(19) United States
(12) Patent Application Publication
(10) Pub. No.: US 2016/0281171 A1
(43) Pub. Date: Sep. 29, 2016

(54) TARGETED SCREENING FOR MUTATIONS

(71) Applicant: INVIVOSCRIBE TECHNOLOGIES, INC., San Diego, CA (US)

(72) Inventors: Jeffrey E. Miller, San Diego, CA (US); Brad Patay, San Diego, CA (US); Andrew Carson, San Diego, CA (US); Suzanne Graham, San Diego, CA (US)

(21) Appl. No.: 15/034,840

(22) PCT Filed: Nov. 6, 2014
(86) PCT No.: PCT/US14/64438

§ 371 Date: May 5, 2016

Related U.S. Application Data
(60) Provisional application No. 61/900,728, filed on Nov. 6, 2013.

(51) Int. Cl. C12Q 1/68

(52) U.S. Cl. CPC C12Q 1/6886; C12Q 2600/156

(57) ABSTRACT

Compositions, methods and kits for genomic screening, genetic analysis, and gene discovery. In some embodiments the disclosed methods can detect large internal tandem duplications, or novel translocations, as well as identify the genomic breakpoint of novel translocations when only one of the two fusion partners is known or targeted. This is accomplished by employing a series of carefully selected capture probes to target genome-specific and disease-specific areas of target genes that harbor disease related somatic mutations, insertions/deletions or are involved in translocations.

### INCORPORATION BY REFERENCE TO ANY PRIORITY APPLICATIONS

[0001] Any and all applications for which a foreign or domestic priority claim is identified in the Application Data Sheet as filed with the present application are hereby incorporated by reference under 37 CFR 1.57, including U.S. Patent Application 61/900,728, filed on Nov. 6, 2013.

### BACKGROUND OF THE INVENTION

[0002] 1. Field of the Invention

[0003] Provided herein is technology relating to genotyping, specifically a sample preparation, sequencing and bioinformatics strategy for identifying mutations/variants, including single nucleotide variants, insertions, deletions and structural variants such as translocations present in an biological sample, preferably a sample containing cancer cells.

[0004] 2. Description of the Related Art

[0005] Traditionally, diagnosis of disease has relied primarily on morphological examination and symptom presentation. However, using this approach, diagnosis is possible only after the disease has progressed to the point of physical manifestation. For many diseases, early detection can lead to early treatment, significantly improving recovery and survival rates. Furthermore, detection of susceptibility or propensity for a disease prior to the appearance of symptoms will maximize awareness and enable changes in lifestyle, which can delay disease onset, minimize the severity of the disease, or prevent the disease state from occurring altogether. The discovery of mutations that determine phenotypes is a fundamental premise of genetic research. Over the past several years, there has been considerable interest in the development of analytical tools and methods to probe nucleic acid sequences for information to aid in the prevention, early detection, diagnosis, stratification, monitoring, and treatment of disease.

[0006] However, the vast amount of data encoded in nucleic acid sequences and the high cost of sequencing have stymied the practical utility of, for example, whole genome sequencing and analysis of mutations that are associated with disease. These efforts have been further complicated and are particularly problematic when somatic mutations play a role in disease etiology. Currently, diagnostic laboratories routinely perform screening to identify the most important, clinically actionable mutations. However, existing tests and sequencing technologies are limited by; 1) the cost of designing, validating and performing multiple individual assays (each of which adds both time and incremental cost to diagnostic assessment or workup) and, 2) the clinical sensitivity, which makes current tests unsuitable both for detecting somatic mutations in heterogeneous cell populations (a characteristic of malignancies) and in monitoring residual disease. Identifying all of the clinically relevant somatic mutations that exist at diagnosis, including mutations that may exist in small numbers or a subpopulation of cancer cells, continues to be a challenge for current test methods.

[0007] Monitoring minimal residual disease (MRD) is also a critical component of cancer treatment. MRD refers to the small numbers of neoplastic cells that survive in a cancer patient through the entire course of disease, most especially following treatment, when the patient is in cytogenetic or molecular remission. A very small number of such cells can cause relapse of the cancer, so the sensitivity of MRD detection is important in all aspects of treatment. For example, MRD can track the responsiveness of a particular patient to a particular therapy, serve as a basis for comparing different therapies, and provide information as to whether the cancer is in the initial stages of recurrence or relapse. However, accurate, sensitive and timely detection of the range of complex mutations that serve as biomarker candidates for MRD detection, particularly somatic mutations present in varying numbers in the diverse cell subpopulations characteristic of malignancies, has been a major obstacle to effective monitoring of patients during the course of their disease. Translocations, particularly those involving unknown fusion partners, are particularly resistant to identification using existing test methods.

[0008] In addition, current tests, even tests that use conventional molecular methods to identify mutations in individual biomarkers, do not interrogate the majority of hotspot mutations in the large number of genes that can affect patient outcome. In order to identify low frequency somatic mutations and interrogate the large number of genes that are driver mutations in cancer, new testing methods need to be developed and validated that utilize more efficient and sensitive technologies. These technologies and approaches could help keep pace, both with physician demands to optimize clinical care, and translational studies in support of drug development.

[0009] In order to maximize the value of these new tests and provide both optimized, personalized treatments and optimal enrollment in clinical trials, patient- and clone-specific ultra-sensitive personalized biomarker tests, developed in response to data generated from these new testing methods, also need to be developed in parallel so healthcare providers can effectively monitor and track the specific clones or subclones identified and associated with the disease.

[0010] The current ‘gold standard’ for nucleic acid sequencing, Sanger sequencing, has remained technologically static since its inception in the 1970s. The Sanger method uses DNA polymerase to synthesize a strand of DNA complementary to the target strand in the presence of 2′-deoxynucleotides (dNTPs) and 2′,3′-dideoxynucleotides (ddNTPs). The latter are irreversible DNA synthesis terminators, so sequencing is terminated whenever a ddNTP is added to the end of the growing oligonucleotide chain. This results in truncated oligonucleotides of varying lengths, each with a ddNTP at the 3′ end. These products are separated by size, and the pattern of ddNTP incorporation is used to elucidate the sequence of the original DNA strand.

[0011] This method initially required four reactions per template, one for each nucleobase found in DNA. Subsequent advances allowed combining the four ddNTPs together followed by fluorescent detection and identification of the different ddNTPs. Further advances have replaced the original polyacrylamide gel separation with capillary arrays and new separation polymers, which increased Sanger sequencing efficiency. These improvements provide a relatively low error rate and long read length.

[0012] However, this methodology is still relatively expensive, particularly for large sequencing projects. Far more importantly, Sanger sequencing is incapable of detecting mutations in a background of non-mutant templates, as the sequencing signals generated are from the pool of templates sequenced. This limitation requires that for detection, mutations must be present in more than 10-20% of the pooled templates molecules. Recent advances in next-generation sequencing (NGS), sometimes also referred to as massively parallel sequencing, have overcome this hurdle by enabling the collection of large amounts of sequence data from individual members of a library of template molecules, and this can be done at relatively low cost, as millions of individual sequencing reactions can be performed simultaneously.

[0013] NGS technologies utilize a number of different approaches to accomplish the simultaneous sequencing of individual templates. Just a few of the numerous examples include: emulsion polymerase chain reaction (PCR), attaching ssDNA fragments to a solid surface and conducting bridge amplification of single-molecule DNA templates, and using transposition through engineered single nanopore substrates to generate sequence information.

[0014] Next generation sequencing (NGS) technologies has started to facilitate whole-genome and focused discovery, which are critical components to a deeper understanding of, and ability to treat, genetically driven disorders. NGS is particularly important for addressing genetically driven disease states that have proven intractable to traditional genotypic analysis, whether due to the current limitations in mutation detection, lack of information processing capability, cost, or throughput. Some disorders, such as acute myeloid leukemia (AML), have proven particularly problematic for genotypic analysis due to the large number of important but complex and infrequent somatic mutations.

[0015] For example, AML is characterized by an increased number of myeloid cells in bone marrow and a concomitant arrest in cell maturation. The Cancer Genome Atlas (TCGA) Consortium completed a systematic survey of de novo AML, that is, AML not associated with previous therapy. The TCGA survey revealed most of the common recurrent somatic mutations. Despite the TCGA's modest sample size, a majority of common nonsynomous mutations were elucidated, because de novo AML has a low somatic mutation rate. Nonsynomous mutations are those that affect the amino acid sequence of a protein and therefore may exert a biological effect and are subject to selection. Thus, while minimal residual disease (MRD) monitoring has been used with success to evaluate and track the disease status of some leukemic patients, it has been difficult to both identify and monitor subsets of somatic mutations in leukemia due to the limited availability of assays that can monitor the myriad of possible somatic mutations at the sensitivity required.

[0016] Most AML cases are initiated in a single founding cell that evolves to several related subclones that harbor different somatic mutations. Although conventional diagnostic methods fail to reveal mutations in cryptic subclones these mutations often become the dominant clone at the time of leukemia relapse. In the United States, more than 14,000 individuals are newly diagnosed with the AML each year and many will succumb to this disease. Diagnostic assays are needed to help individuals enter into clinical trials that stratify patients for clinical trials based on clonal somatic mutations to utilize novel personalized therapeutics that could improve their outcome. FLT3 (FMS-related tyrosine kinase 3) targeted therapies, many of which are currently in phase II and phase III clinical trials, are examples of progress in this area. Furthermore, the diagnostic assays currently used to fully characterize AML require a number of different technologies that generally require testing different sample types or require splitting samples to ensure comprehensive testing. Turnaround times and costs can be prohibitive and impact patient care.

[0017] In addition to molecular diagnostic methods to support clinical treatment, precise characterization of the range of possible mutations in specific somatic mutations implicated in AML is required. For example, immortalized FMS-related tyrosine kinase 3 (FLT3) mutant cell lines that arise spontaneously and cell lines engineered to incorporate recurrent driver mutations will be needed to assist in clinical diagnostic and therapeutic translation, including development and validation of companion diagnostics. In FLT3, two major classes of variants in the FLT3 gene drive cytogenetically normal acute myeloid leukemia (AML): nonsynonymous somatic mutations, predominantly in the tyrosine kinase domains (TKD1 and TKD2), and somatic internal tandem duplications (ITD) in and around the juxtamembrane domain (JMD).

### SUMMARY OF THE INVENTION

[0018] An embodiment of the disclosed invention is a method of screening a nucleic acid sample for mutations comprising: (a) obtaining a nucleic acid sample; (b) fragmenting the nucleic acid sample; (c) contacting the fragmented nucleic acid sample with a panel of capture probes, wherein the panel of capture probes specifically capture targeted nucleic acid fragments which are identified as having or likely having a mutation; (d) isolating the targeted nucleic acid fragments captured by the panel of capture probes; (e) sequencing the isolated targeted nucleic acid fragments; and (f) analyzing the sequences of the isolated targeted nucleic acid fragments to identify mutations with prognostic and/or therapeutic significance.

[0019] An embodiment of the disclosed invention is a panel of nucleic acid capture probes comprising a plurality of nucleic acids, wherein the nucleic acids are 20-200 nucleotides in length, wherein the nucleic acids comprise at least 1,000 unique nucleic acid sequences, and wherein the nucleic acid sequences are complementary to target nucleic acids that are identified as having or likely having a mutation.

[0020] In any or all of the embodiments, the method further comprises: (b′) adding adaptor nucleic acids to the fragmented nucleic acids. In any or all of the embodiments the panel of capture probes comprise a plurality of nucleic acids comprising at least 1,000 unique nucleic acid sequences, at least 10,000 unique nucleic acid sequences, at least 100,000 unique nucleic acid sequences, at least 150,000 unique nucleic acid sequences, or at least 200,000 unique nucleic acid sequences. In any or all of the embodiments, the nucleic acid capture probes are 20-200 nucleotides in length, or 50-200 nucleotides in length, or 20-150 nucleotides in length. In any or all of the embodiments the nucleic acid capture probes have a nucleic acid sequence which is complementary to the targeted nucleic acid fragments, wherein the complementarity is at least 80% complementarity, 90% complementarity, 95% complementarity, or 100% complementarity. In any or all of the embodiments the method, further comprises: (b″) selecting the nucleic acid fragments to select nucleic acid fragments of 100-5,000 nucleotides in length, 200-1400 nucleotides in length, or 300-900 nucleotides in length, or 300-700 nucleotides in length. In any or all of the embodiments the isolated targeted nucleic acid fragments have an average length of 100-5,000 nucleotides in length, 200-1400 nucleotides in length, or 300-900 nucleotides in length, or 300-700 nucleotides in length. In any or all of the embodiments the sequencing of the isolated target nucleic acid fragments is at a read depth of at least 500×, at least 1000×, at least 10,000×, or at least 100,000×. In any or all of the embodiments the average length of the sequence reads of the isolated target nucleic acid fragments is at least 500 nucleotides, or at least 600 nucleotides, at least 700 nucleotides, or at least 1,000 nucleotides. In any or all of the embodiments the analyzing comprises aligning the sequences of the isolated targeted nucleic acid fragments to a reference sequence. In any or all of the embodiments the nucleic acid sample is isolated from a biological sample. In any or all of the embodiments the nucleic acid sample is isolated from a sample comprising cancer cells. In any or all of the embodiments the target nucleic acids are from genes identified as having a mutation in a cancer cell. In any or all of the embodiments the target nucleic acids are from genes identified in a public database as having a mutation in a cancer cell. In any or all of the embodiments the identified mutation is used for diagnostic, prognostic, or treatment purposes. In any or all of the embodiments the sample is from a patient, and the identified mutation is used for diagnostic, prognostic, or treatment purposes. In any or all of the embodiments the mutation is selected from the group consisting of a single nucleotide variant, an insertion, a deletion or a translocation. In any or all of the embodiments step (b′) is before step (c), or step (b′) is after step (c). In any or all of the embodiments (b″) is before step (c) or step (b″) is after step (c). In any or all of the embodiments the mutation is selected from the group consisting of a single nucleotide variant, an insertion, a deletion or a translocation. In any or all of the embodiments the target nucleic acids are from genes identified as having a mutation in a cancer cell. In any or all of the embodiments the target nucleic acids are from genes identified in a public database as having a mutation in a cancer cell. In any or all of the embodiments the panel of capture probes comprise at least 10,000 unique nucleic acid sequences complementary to at least 30 genes selected from Table 1. In any or all of the embodiments the cancer is AML.

### BRIEF DESCRIPTION OF THE DRAWINGS

[0021] FIG. 1 is a schematic representation of an embodiment of a method of screening DNA to identify mutations of interest.

[0022] FIGS. 2A, 2B and 2C are an embodiment of a technical report for AML generated using a disclosed method.

[0023] FIG. 3 is an embodiment of a variant report for AML generated using a disclosed method.

### DETAILED DESCRIPTION OF THE PREFERRED EMBODIMENTS

[0024] The foregoing aspects and many of the attendant advantages of this disclosure will become more readily apparent as the same become better understood by reference to the following detailed description.

[0025] The technology described herein combines a series of discrete inventive steps and technologies that together comprise a method that brings unprecedented power to genomic screening, genetic analysis, and gene discovery. FIG. 1 provides a schematic of one embodiment of the disclosed invention. With reference to FIG. 1, a panel of capture probes are designed or selected 1 to capture target nucleic acids of interest from a sample. Nucleic acid which contains the target nucleic acids, for example genomic DNA 10, is isolated from a sample. The sample nucleic acid is fragmented, 20, and a library of fragmented nucleic acids for sequencing is prepared, (e.g. adding sequencing adaptors), and the target nucleic acids are isolated using the panel of capture probes 30. The quality of the isolated target nucleic acids is confirmed, and then they are sequenced 40. The sequence reads are aligned to a reference genome, 50, and variants are identified, 60. The variants are annotated, 70, validated, 80, and a final report is generated, 90, detailing the variants/mutations identified in the sample.

[0026] For example, in some embodiments, this next-generation sequencing method for the first time reliably detects novel structural mutations, translocations, and insertions and deletions. For example, in some embodiments the disclosed methods can detect large internal tandem duplications, or novel translocations, as well as identify the genomic breakpoint of novel translocations when only one of the two fusion partners is known or targeted. This is accomplished by employing a series of carefully selected capture probes to target genome-specific and disease-specific areas of target genes that harbor disease related somatic mutations, insertions/deletions or are involved in translocations.

[0027] In the preferred embodiment, the method pares down the entire genome to these discrete captured regions, leverages depth of sequence coverage in these target areas, enhances the sequencing data generated by employing methods that maximize sequencing read length, followed by analysis using a series of bioinformatic tools. By selectively restricting and defining the specific target areas that are captured and interrogated by sequencing (for example, drug and ligand target areas in proteins, and regulatory elements that might be involved with translocation partners) the depth of coverage and hence the sensitivity of this technology is enhanced. Sequencing read length in these targeted areas provides enhanced coverage of overlapping sequences that serve as the basis for bioinformatics algorithms that align the sequence reads to reference genomic databases. This allows the bioinformatics tools to more readily assign overlapping regions to large structural variants and translocations, even when the fusion partner is not known. In a preferred embodiment, the method combines the elements of 1) carefully defined gene- and disease-specific probe targeting; 2) capturing larger fragment sized genomic regions; 3) enhanced sequencing read depth; 4) longer sequencing read lengths, and 5) bioinformatics tools, to maximize the potential of this technology.

[0028] Embodiments of the disclosed invention can be used to identify some or preferably all somatic mutations and translocations in cancer. Somatic mutations may occur as a result of errors during DNA replication or through exposure to mutagens. Cancer cell genomes carry two types of somatic mutations: those mutations that confer a growth and survival advantage on the cell, and are positively selected for, and those that are not selected for. Thus, in addition to the difficulties in identifying somatic mutations generally, all somatic mutations are preferably detected to ensure identification of those mutations that drive cancerous growth.

[0029] Stratification of diagnosis, treatment, and/or prognosis of cancer is critical to elevating the state of clinical care for the cancer. The current application describes, in part, a precise mechanism for tracking the presence, emergence, and progression of mutations in nucleic acid sequences that drive cancer, such as AML. The ability to identify and then monitor these mutations with such precision enables faster more accurate diagnosis, facilitates proper patient stratification for enrollment in appropriate clinical trials, and may define the propensity for cancer. Furthermore, upon initiation of treatment, this technique can monitor the progression and effectiveness of therapy by monitoring the disappearance of mutated nucleic acid sequences that drive the cancer. Application of these methods will track the effectiveness of the therapy and provide guidance as to the prognosis of the patient. The disclosed techniques and methods can streamline diagnosis and improve the treatment of cancer, and will facilitate the timely development of more effective therapeutics.

[0030] By limiting the interrogation to genes affected by germline mutations, somatic mutations and translocation processes using the disclosed embodiments, one is able to more efficiently and reliably identify insertion site(s), ITD lengths, and allelic ratios for single nucleotide mutations, insertions, deletions and translocations, with increased sensitivity in detection of major and minor clonal populations. The disclosed embodiments resolve many of the limitations of current diagnostic and monitoring technologies and facilitate monitoring of minimal residual disease and clonal evolution during the course of treatment. This increased limit of detection provides a platform for the identification of some or all somatic mutations in cancer, ensuring the identification of those mutations that drive progression of the disease, many of which may be targets for therapy.

[0031] In some embodiments, the sensitivity of the disclosed methods can be increased by interrogating additional amounts of isolated nucleic acid from a greater number of cells. Sensitivity can also be increased by sequencing to a greater depth more of the enriched nucleic acids that are captured from a greater number of cells.

[0032] In some embodiments the disclosed methods are used in cancer to: stratify a range of patients presenting with different diseases or different subtypes of disease; be used to track one or more mutations directly for MRD analysis to track clones and subclones and better characterize the evolution of driver mutations during the course of treatment; and, even characterize cells lines in order to do a more comprehensive analysis of mutation status.

### DEFINITIONS

[0033] As used herein, “nucleic acid” or “nucleic acid molecule” can refer to polynucleotides, such as deoxyribonucleic acid (DNA) or ribonucleic acid (RNA), oligonucleotides, fragments generated by the polymerase chain reaction (PCR), and fragments generated by any of ligation, scission, endonuclease action, and exonuclease action. Nucleic acid molecules can be composed of monomers that are naturally-occurring nucleotides (such as DNA and RNA), or analogs of naturally-occurring nucleotides (e.g., enantiomeric forms of naturally-occurring nucleotides), or a combination of both. Nucleic acids can be either single stranded or double stranded.

[0034] As used herein, the terms “patient” and “subject” refer to a biological system from which a biological sample or biological data can be collected or to which a therapeutic agent can be administered. A patient can refer to a human patient or a non-human patient. Patients can include those that are healthy and those having a disease, such as cancer. Patients having a disease can include patients that have been diagnosed with the disease, patients that exhibit a set of symptoms associated with the disease, and patients that are progressing towards or are at risk of developing the disease.

### Capture Probe Design

[0035] Selection of Probes:

[0036] One aspect of embodiments disclosed herein is the selection or design of capture probes to use in the isolation of target nucleic acids which are subject to sequencing and analysis for mutations of interest. (FIG. 1, 1). In some embodiments the sub-genomic region(s) for interrogation are determined by reviewing the literature to identify in broad terms the mutation hotspots and translocation breakpoints that have been described for a specific disease. AML is one example provided herein, but the disclosed techniques are broadly applicable to virtually any disease state or process that might be impacted by genetic mutations or genomic architecture.

[0037] A variety of nucleic acid and protein databases are used to identify incompletely annotated or described nucleic acid sequences of both known and potential protein encoding subregions where regulatory proteins might bind as well as genomic regions that might encompass regulatory elements, such as enhancer or promoter regions. These regions typically correspond to only exon regions in many of the targeted genes, but may include intronic regions in other genes.

[0038] Next, the genomic coordinates that correspond to the genomic regions as well as regions flanking by several hundred to several thousand nucleotides are defined. The degree of resolution in the genomic region targeted by the capture probes is dependent on the confidence of the limit and scope of the region described. For many of the genes, there are not any specific hotspots for mutations, or there is uncertainty about the location of breakpoints at the genomic level, so the targeting of these genes can be more extensive than those genes wherein hotspots or specific mutations satisfy the analysis.

[0039] Extensive consideration of what regions of each gene should be included is given to the choice of each capture probe in the panel. For fusion genes, where intronic regions needed to also be included, a more involved analysis is required as these intronic regions can be incredibly large (for example, one intron in the PRPRT gene is over 300 kb in length). Therefore, diligent parsing of sequence area is necessary to maximize depth of coverage over the entire specialized gene panel. For example, AFF1 is a common gene involved in fusions. Its complete genomic sequence spans over 200 kb. However, the transcribed exons are limited to less than 10 kb. For this particular gene, narrowing down to the most relevant hotspot areas that are typically involved in fusions covers only 88,000 bp of the total exons and partial sequence of the introns, effectively not sequencing more than 110,000 bp of sequence.

[0040] Depth of Coverage:

[0041] The selection of capture probes used in the panel to capture cellular target nucleic acids is an important feature, as there is a limited band width (typically 3-4 MB using currently available sequencing systems) that sequencing provides. Therefore the precision and depth of sequencing is dependent on the choice of probes and the quantity of DNA that is captured and sequenced.

[0042] For example: whole genome sequencing of the 20,000+ genes and other DNA in the genome provides a depth of coverage of perhaps 1 or 2 reads for regions within a given gene; sequencing only exon regions increases this coverage to approximately 30-50×; limiting the selection still further to include just selected intron or exon regions within genes increases coverage even more.

[0043] For example, a 1-2 kb region within a genetic locus that often spans >1000 kb further increases the depth of coverage to say 1000 fold. Increasing probe baiting around difficult to detect regions involved in insertion and deletion mutations, and regions of complexity or high G:C content, can boost coverage even further to >5,000×. Examples are G:C rich regions of the gene CEBPA and the exon 14 and 15 regions of FLT3 involved in internal tandem duplication mutations.

[0044] Limiting capture probes to one or two specific exons of a single gene coupled with capturing and testing of multiple cell equivalents allows the depth of coverage to surpass 100,000×.

[0045] Accordingly, the disclosed methods are broadly applicable. Selection of the subset of regions of the 194 gene panel for AML described herein provides a depth of coverage in the 500×-1,500× range, with additional capture around certain critical regions so as to provide additional coverage 5,000×-10,000× around those regions that are either problematic from a hybridization perspective (e.g., CEBPA) or where additional coverage is desired or required so that the bioinformatics pipeline can place insertions and deletions with precision. In view of the disclosure herein, one of skill in the art can determine the desired level of coverage, and design a panel of capture probes to provide the desired level of coverage.

[0046] For example, capture probes for AML can include sequences which target the FLT3 gene, or a portion thereof. FLT3 (CD135) is a cytokine receptor in receptor tyrosine kinase class III, which is expressed on the surface of hematopoietic progenitor cells. FLT3 signaling, through homodimerization and autophosphorylation, impacts cell survival, differentiation, and proliferation. FLT3 signaling plays an important role in normal development of hematopoietic stem cells and is one of the most frequent mutations in AML. The AML capture probes could include regions to detect an ITD or length mutation, or other somatic mutations, such as single nucleotide variants, as discussed.

[0047] In a preferred embodiment, the capture probes are nucleic acids which hybridize to the target nucleic acids of interest and optionally include a moiety which assists in the isolation of the target nucleic acid when hybridized to the capture probe. The nucleic acid capture probe can comprise a DNA oligonucleotide, an RNA oligonucleotide, a combination of DNA/RNA oligonucleotide, or any related analogue (e.g., protein-nucleic acid hybrids) that has target specific hybridization properties, and may have a sense or antisense orientation. The capture probes are complementary to the target nucleic acid sequences. Preferably, they are 100% complementary, although capture probes that are, or are at least, 80%, 85%, 90%, 95%, 96%, 97%, 98%, or 99% complementary to the target nucleic acid sequence, or a range defined by any two of the preceding values, are contemplated. Complementarity can be measured over the entirety of the capture probe sequence. Capture probes can be used to enrich or isolate the target nucleic acids of interest by various methods known to those of skill in the art, including, but is not limited to, hybridization, immunoprecipitation, affinity purification, magnetic bead purification, and differential retention in solution, on a particle in suspension, or on a substrate.

[0048] Nucleic acid capture probes can be any length sufficient to provide the desired level of specificity necessary to capture the target nucleic acid. In a preferred embodiment, the nucleic acid capture probes are at least 15 nucleotides in length, preferably between about 25 and about 300 nucleotides in length. Also contemplated are nucleic acids capture probes that are, or are at least, 15, 20, 25, 30, 35, 40, 45, 50, 55, 60, 65, 70, 75, 80, 85, 90, 95, 100, 110, 120, 130, 140, 150, 175, 200, 225, 250, 275 or 300 nucleotides in length, or are a range defined by any of the preceding values. The nucleic acid capture probes used do not have to be of uniform length, but rather can vary in length depending on the number of nucleotides necessary to achieve the desired level of specificity to the target nucleic acid. In some embodiments, the nucleic acid capture probes specifically hybridize with the target nucleic acid sequence under stringent hybridization conditions, for example, either of the following: a) 6×SSC at about 45° C., followed by one or more washes in 0.2×SSC, 0.1% SDS at 65° C., and b) 400 mM NaCl, 40 mM PIPES pH 6.4, 1 mM EDTA, 50° C. or 70° C. for 12-16 hours, followed by washing.

[0049] The number of nucleic acid capture probe sequences in a panel is selected based on the factors discussed above, including the desired depth of coverage in view of the sequencing capacity of the sequencing method or instrument being used. In some embodiments, the number of capture probes sequences in a panel is between 10,000 and 200,000. Also contemplated are panels where the number of capture probe sequences is, or is at least, 1,000, 50,000, 100,000, 200,000, or a range defined by any two of the preceding values. Preferred numbers of nucleic acid capture probe sequences in a panel include from 1,000-50,000, 50,000-150,000, 100,000-200,000, or 150,000-300,000.

[0050] One or more moieties can optionally be included on a nucleic acid capture probe to facilitate later capture and/or identification of the target nucleic acid sequence. Examples include, but are not limited to an affinity probe (e.g. biotin), a photoreactive species, a hapten, a nucleic acid sequence or barcode, a fluorescent species, a protein, a carbohydrate, or another specific binding molecule or sequence for capture, identification, further amplification, enrichment or sequencing of the target nucleic acid.

[0051] Thus, in a preferred embodiment, target nucleic acid sequences hybridize with the nucleic acid capture probes, which are then located and/or captured using the included moiety. For example, the capture probe can be biotinylated and the subsequent probe-target complex can be captured with magnetic Streptavidin beads.

### Sample Preparation

[0052] A sample containing the cells of interest is obtained and the nucleic acids containing the target nucleic acids of interest are isolated from the sample by known methods. (FIG. 1, 10). The sample can be from a patient or subject suffering from a disease such as cancer, including but not limited to blood, bone marrow aspirate, or a tissue biopsy. Cultured cells could also be used. In some embodiments the isolated nucleic acid is genomic DNA, in others it is RNA or cDNA. In some embodiments, the sample is first treated to enrich the sample for a cell of interest, such as a cancer cell, using methods known in the art.

[0053] Following isolation of the nucleic acid from the biological sample, the nucleic acid is preferably fragmented. (FIG. 1, 20). This can be accomplished using methods known in the art, including but not limited to sonication, enzyme digestion, etc. The fragments are then purified to separate out preferred fragment sizes. The preferred average fragment size is ≧500 base pairs (bp) or nucleotides. In some embodiments, fragments smaller than about 150 bp nucleotides and larger than about 1500 bp/nucleotides in length are excluded. A preferred size range is from about 300 to about 700 bp/nucleotides, but contemplated average fragment sizes are, are at least, or are not more than, 150, 200, 300, 400, 500, 600, 700, 800, 900, 1000, 1100, 1200, 1300, 1400, 1500, 2000, 3000, 4000, 5000 or more bp/nucleotides, or a range defined by any two of the preceding values. Other average fragment sizes include 100-5,000, 200-1400, 200-1000, 200-800, 300-800, 300-1000, and 500-900 bp/nucleotides. In some embodiments, the fragments size or average fragments size listed herein is present in, or in at least 30%, 40%, 50%, 60%, 70% 80%, 90%, 95% or 100% of the total population, or a range defined by any of the preceding values, for example 40%-100%, 60%-100%. In some embodiments, the isolated nucleic acid is not fragmented, for example when the isolated nucleic acid is cDNA. Following isolation of fragments of the desired size, the fragmented nucleic acid sample is then optionally repaired (e.g., end repair and A-tail addition) and adaptor sequences are added to the fragments. (FIG. 1, 30). The adaptor sequences can be commercially available adaptors used in commercial sequencing methods, and can include identifiers (e.g. bar codes or other sequences) to allow identification of the source of the fragmented nucleic acid when nucleic acids from one or more samples are combined for sequencing or other subsequent method steps. Commercial adaptors and sequencing platforms include, for example, Illumina's MiSeq, HiSeq and Life Technologies', PGM platforms. KAPA Hyper Prep Kit (Kapa Biosystems, Wilmington, Mass.) is an example of a commercially available kit which includes end-repairing, A-tailing and adapter sequence ligation for use with Illumina's sequencing platforms. The adapter ligated fragments are then purified, and quantified. In a preferred embodiment, the purified fragmented nucleic acid library has an average size larger than 500 base pairs, and between 300-700 base pair fragments represent >40% of the total population.

[0054] If additional fragmented nucleic acids are desired, the nucleic acid can be amplified, either before fragmentation, before the adaptor is added, or, preferably, after the adapter is added. Amplification of these nucleic acids includes, but is not limited to, polymerase chain reaction, real time PCR, emulsion polymerase chain reaction, solid-phase amplification, rolling circle amplification, template mediated amplification, or isothermal amplification. The final concentration of fragmented nucleic acid is preferably ≧200 ng, more preferably >500 ng. The contemplated amount of fragmented nucleic acid is, or is at least, 50, 100, 150, 200, 250, 300, 350, 400, 500, 600, 700, 800, 900 or 1000 ng, or a range defined by any two of the preceding values.

### Isolation of Target Nucleic Acid

[0055] The capture probe panel discussed above is used to isolate the target nucleic acids of interest. (FIG. 1, 30). In a preferred embodiment, nucleic acid capture probes are hybridized to the fragmented nucleic acid libraries under conditions and for a time which allow for specific hybridization between the capture probe and its target nucleic acid. In some embodiments the hybridization is under stringent conditions. In some embodiments hybridization is at 47° C. for 2-72 hours. Where fragments from multiple samples are combined, equal amounts of each fragmented nucleic acid library from each sample are used to ensure equal numbers of sequencing reads from each component library. The captured target nucleic acids are recovered using known techniques, including but not limited to, immunoprecipitation, affinity purification, magnetic bead purification, and differential retention in solution, on a particle in suspension, or on a substrate.

[0056] The isolated target nucleic acids can be amplified and quantified using known techniques to ensure a sufficient quantity of target nucleic acids for the subsequent sequencing and/or analysis. One of skill in the art will recognize that the isolation of the target nucleic acids using the capture probes could be performed prior to the DNA repair and adaptor addition steps.

[0057] In a preferred embodiment, the target nucleic acid sequence is substantially free of other nucleic acid sequences following isolation using the capture probes. In some embodiments the target nucleic acid is, or is at least: 50% pure, more preferably 55% pure, more preferably 60% pure, more preferably 65% pure, more preferably 70% pure, more preferably 75% pure, more preferably 80% pure, more preferably 85% pure, more preferably 90% pure, more preferably 95% pure, more preferably 99% pure, or a range defined by any two of the preceding values.

[0058] As a non-limiting example, the isolation of target nucleic acid sequences is accomplished by capturing a subset of nucleic acid sequences characteristic of regions wherein variants, translocations or mutations stratify the diagnosis, treatment, or prognosis of AML. The subset of isolated AML target nucleic acids can also comprise an ITD or length mutation, or a somatic mutation, as discussed above.

### Sequencing

[0059] Once the target nucleic acids are isolated, the sample is sequenced. (FIG. 1, 40) The ability to both align sequences to a reference genome to identify large insertions and deletions and, perhaps more difficult, to identify fusion partners involved in gene translocations requires having sufficient flanking sequence outside of the captured target gene sequences with which to align sequences to other genetic regions within the genomic reference database. The longer the sequencing read the more flanking sequence is available for alignment. By adding specific size selection criteria such as longer shearing sizing and purification steps (e.g., at least 500 bp) to exclude shorter fragments, sequencing over longer fragments of DNA is increased. Additionally, novel targets can be identified by sequencing over adjoining fusion partners with these long sequencing reads, even though the actual capture probe set does not include that gene.

[0060] Translocations and large insertions/deletions (indels) are particularly difficult and, for the first time these structural mutations can be identified using the technology disclosed herein when capture probes and corresponding target nucleic acids are chosen correctly so as to encompass the regions required without diluting the band width required for sensitivity, when sufficient DNA is captured and sequenced to provide numbers of sequencing reads around the areas of importance, when the sequencing reads are of sufficient length to span large indels and translocation partners, and when the bioinformatic pipeline can interpret the resulting data and assign flanking sequences to novel genes—even when they reside on other chromosomes. In a preferred embodiment, the minimum concentration of isolated target nucleic acids utilized for the sequencing reaction is 1.5 nM.

[0061] In some embodiments the disclosed isolation and enrichment strategy provides clinical utility. Clinically actionable sensitivity for detection of minimal residual disease (MRD) is approximately 10⁻⁴; this sensitivity is possible with a read depth of coverage and tiling across the genes exceeding, to ensure the appropriate precision, 10,000 reads per sample; a read count of 1,000,000 generates sensitivity that approaches 10⁶. In a preferred embodiment, the read depth is, or is at least, 500×, 1000×, 5000×, 10,000×, 50,000×, or 100,000×, or a range defined by any two of the preceding values. In a preferred embodiment, the average length of the sequence reads of the isolated target nucleic acid fragments is, or is at least, 200, 300, 400, 500, 600, 700, 800, 900, 1000, 2000, 3000, 4000, 5000 or more nucleotides, or a range defined by any two of the preceding values. Average sequence read length can be 100-5,000, 200-1400, 300-1000, 300-700, 500-900, or 200-700 nucleotides. By varying conditions and different multiplex and sequencing strategies, the methods described herein are both scalable and flexible.

[0062] Sequencing of the isolated target nucleic acids includes, but is not limited to, Sanger sequencing, cyclic reversible termination, single-nucleotide addition, four-color sequencing, sequencing by ligation, pyrosequencing, single molecule sequencing, nanopore sequencing, sequencing by mass spectrophotometry, or real-time sequencing. Gnirke A. Melnikov A, Maquire J, Rogov P, LeProust E M, Brockman W, et al., Solution hybrid selection with ultra-long oligonucleotides for massively parallel targeted sequencing. Nat Biotechnol. 2009 February, 27(2):182-9 (incorporated herein by reference in its entirety), or chemistries that are compatible with existing instrumentation. Examples of combination sequencing chemistries and instrumentation approaches for next generation sequencing include, without limitation, Illumina's MiSeq, HiSeq and Life Technologies'. PGM platforms.

[0063] In some embodiments, next-generation sequencing is used to tile across at least one mutated region of nucleic acids wherein variants, translocations or mutations to achieve a depth to provide sufficient precision to identify that variant, translocation or mutation. This tiling strategy enables deep sequencing of a particular region of the genome, as opposed to more traditional genotyping methods, which probe for known or predicted sequences throughout an entire genome. Thus, tiling facilitates precise mapping of nucleic acid sequences implicated in disease, for example AML as described above, facilitating the identification of mutations and structural variants, identifying genetic breakpoints for translocations at the genomic DNA level, and identifying novel gene fusion partners. Data from these analyses can also be used to quantify the mutations relative to the wildtype or unmutated background sequences (allelic or mutation frequency), and to design more sensitive patient-specific MRD tests such as real-time tests for genomic DNA or cDNA.

[0064] In addition to amplification and measuring, the isolated target nucleic acids can also be imaged, wherein imaging includes, but is not limited to, capture of data generated by any method that differentiates normal genomic sequence from said nucleic acid sequences, including sequential assessment or measurement of single nucleotide or nucleotide analog incorporation, FRET signal production, or differential hybridization.

### Identification of Mutations

[0065] Following sequencing, the sequenced reads are aligned to a reference genome using one of any number of read mapping algorithms (eg: Novoalign, BWA, BFAST, Bowtie). (FIG. 1, 50). Aligned reads are then processed to improve mapping and to assess the quality of the sequencing and alignment. The aligned reads are evaluated to determine mutations/variants, including single nucleotide variants, insertions, deletions and structural variants such as translocations, using one or more of the following tools (VarScan, GATK, samtools, MuTect, BreakDancer, DELLY, Pindel). (FIG. 1, 60). Filters are used to eliminate low quality variants, and annotation methods are used to categorize the variants by their potential biological consequences. (FIG. 1, 70). A filtered subset of mutations with the highest likelihood of pathogenicity can then be manually curated to evaluate the potential impact of the mutation on the sample. (FIG. 1, 80).

[0066] Analyses can be conducted on the targeted nucleic acid sequences, for example, performing a bioinformatics analysis on the Internet accessible from a user computer. This bioinformatics analysis comprises identifying the mutant or identifying the mutant to wild type allelic ratios in nucleic acid sequences characteristic of regions that stratify the diagnosis, treatment, or prognosis of a disease such as cancer (e.g. AML), quantifying the mutant or quantifying the mutant to wild type allelic ratios in nucleic acid sequences characteristic of regions that stratify the diagnosis, treatment, or prognosis of the disease, and assigning specific intragenic locations nucleic acid sequences characteristic of regions that stratify the diagnosis, treatment, or prognosis of the disease.

[0067] Information gleaned from the compositions and methods disclosed herein can impact both the treatment protocols and patient outcomes in diseases characterized by genetic mutations such as cancer. The resulting data regarding mutations present in the sample can be used for various purposes, including diagnosis or prognosis of disease, monitoring patient care or for the development of new screening or diagnostic tools, MRD tests, and use of new mutations or patient-specific mutations for use as new biomarkers.

[0068] The treatment of the disease can be modified by administering a treatment or agent that modulates or targets the activity or expression of at least one gene identified within said nucleic acid sequences that comprise variants, translocations or mutations that stratify the diagnosis, treatment, or prognosis of the disease. Furthermore, the treatment of the disease can be monitored by examining the subset of isolated target nucleic acid sequences identified either by subsequent testing using this technology, or by using sequence information obtained from this technology to design other MRD approaches, such as real-time PCR. In other embodiments, the subset of targeted nucleic acid sequences can be correlated with the activity of a drug targeting at least one expressed biological product thereof. Still further, the efficacy of treatment may be determined by examining the subset of isolated target nucleic acid sequences identified either by subsequent testing using this technology, or by using sequence information obtained from this technology to design other MRD approaches, such as real-time PCR with the level of expression of another gene or product of another gene.

[0069] In some embodiments a result can be generated wherein the result consists of a report identifying at least one variant, translocation or mutation that stratify the diagnosis, treatment, or prognosis of a disease. (FIG. 1, 90). This result can be provided by electronic, web-based, or paper means to, for example, a patient, another person or entity, a medical power of attorney, a caregiver, a physician, a health care practitioner, oncologist, a hospital, clinic, third-party payor, insurance company, pharmaceutical company, or government office.

[0070] After reading this description it will become apparent to one skilled in the art how to implement the invention in various alternative embodiments and alternative applications. For example, a preferred embodiment is illustrated in FIG. 1 and described above, wherein the sample DNA is isolated from sample, the sample is fragmented and size selected, adaptors are added and the resulting nucleic acids are amplified prior to using the capture probe panel to isolate target nucleic acids. However, one of skill in the art will recognize that many of these steps can be carried out in a different order, and some steps may not be necessary at all. For example, the panel of capture probes does not have to be designed or selected before the fragmented library is prepared. As another non-limiting example, the capture probes could be used to isolate fragmented target nucleic acids prior to the size selection, adaptor addition and amplification. Applicants specifically contemplate that the values for different parameters specified throughout the disclosure can be selected and combined even where specific combinations of values for parameters are not specifically disclosed. As a non-limiting example, Applicants contemplate selection of a value for the number of capture probes from any of the values or ranges disclosed for that parameter, as well as selection of a read depth from any of the values or ranges disclosed for that parameter, such that a method having the selected number of capture probes and the selected read depth is contemplated. The following examples are non-limiting examples of embodiments of the invention disclosed herein.

### EXAMPLES

### Example 1

### Design of Capture Probes for Screening of AML

[0071] By extensive curation of the literature on genes known to or suspected to impact development of AML, we have compiled a list of 194 relevant genes. The gene list is broken down into 3 subsets based on (1) NCCN/ELN guidelines; (2) those genes most commonly rearranged in AML that include breakpoints with their intronic structures (3) coding sequences or exons of genes suspected to be involved in the etiology of AML development (see Table 1). One major literature source was The Cancer Genome Atlas that recently characterized 200 AML samples. Based on the somatic mutation frequency rate for AML, it is calculated that 95% of all the mutations that are involved in AML have now been identified. The literature that was used for compiling this panel includes well over 300 publications.

TABLE 1
NCCN/ELN Guidelines
Structural Rearrangements: Inv(16) t(16;16) t(8;21) t(15;17) +8 t(9;11) −5 5q-−7 7q-11q23 inv(3)
t(3;3) t(6;9) t(9;22)
[These regions also include genes from the ‘Other Fusions/Gene rearrangements’ below]
Genes: CEBPA DNMT3A FLT3 IDH1 IDH2 KIT NPM1
[Including 5′UTRs, Exons, Non-coding Exons, and 3′UTRs]
Other Fusions/Gene rearrangements (36 Genes)
[Including 5′UTRs, Exons, Recombination Intron Breakpoint Hotspots, Non-coding Exons, and
3′UTRs]
ABL1 AFF1 BCR CBFB CREBBP DEK EIF4E2 ELL ETV6 GAS6 GAS7 GPR128 KAT6A KAT6B KMT2A
MECOM MKL1 MLLT10 MLLT1 MLLT3 MLLT4 MYH11 NSD1 NUP214 NUP98 PICALM PML RARA
RBM15 RPN1 RUNX1 RUNX1T1 SEPT5 SET TFG TMEM255B
Other Genes (151)
[Including 5′UTRs, Exons, Non-coding Exons, and 3′UTRs]
ABCC1 ACVR2B ADRBK1 AKAP13 ANKRD24 ARID2 ARID4B ASXL1 ASXL2 ASXL3 BCOR BCORL1
BRINP3 BRPF1 BUB1 CACNA1E CBL CBX5 CBX7 CDC73 CEP164 CPNE3 CSF1R CSTF2T CTCF CYLD
DCLK1 DDX1 DDX23 DHX32 DIS3 DNAH9 DNMT1 DNMT3B DYRK4 EED EGFR EP300 EPHA2 EPHA3
ETV3 EZH2 FANCC GATA1 GATA2 GFI1 GLI1 HDAC2 HDAC3 HNRNPK HRAS IKZF1 JAK1 JAK2 JAK3
JMJD1C KDM2B KDM3B KDM6A KDM6B KMT2B KMT2C KRAS MAPK1 METTL3 MST1R MTA2 MTOR
MXRA5 MYB MYC MYLK2 MYO3A NF1 NOTCH1 NOTCH2 NRAS NRK OBSCN PAPD5 PAX5 PDGFRA
PDGFRB PDS5B PDSS2 PHF6 PKD1L2 PLRG1 POLR2A PRDM16 PRDM9 PRKCG PRPF3 PRPF40B
PRPF8 PTEN PTPN11 PTPN14 PTPRT RAD21 RBBP4 RBMX RPS6KA6 SAP130 SCML2 SETBP1 SETD2
SF1 SF3A1 SF3B1 SMC1A SMC3 SMC5 SMG1 SNRNP200 SOS1 SPEN SRRM2 SRSF2 SRSF6 STAG2
STK32A STK33 STK36 SUDS3 SUMO2 SUPT5H SUZ12 TCF4 TET1 TET2 THRB TP53 TRA2B TRIO TTBK1
TYK2 TYW1 U2AF1 U2AF1L4 U2AF2 UBA3 WAC WAPAL WEE1 WNK3 WNK4 WT1 ZBTB33 ZBTB7B
ZRSR2
MicroRNA (2)
[Sequence only]
Mir-142 Mir-155
Total: Genes 194 + 2 microRNA

[0072] A panel of approximately 196,000 unique capture probes, each between about 20-200 nucleotides in length, targeted to the genes 194 AML genes listed in Table 1 was designed. The capture probes were directed to portions of the 194 genes identified as involved in, or likely to be involved in, a nucleic acid mutation, such as a single nucleotide variant, an insertion or deletion (InDel) or translocation. The sequences of the capture probe panel are disclosed in the Sequence Listing submitted in the priority document U.S. Patent Application 61/900,728, filed on Nov. 6, 2013, which is incorporated herein by reference.

### Example 2

### Identification of Mutations in AML Cells

[0073] Genomic DNA isolated from a mixture of AML cells was fragmented into average sizes of 700 basepairs (bp) fragments using a Covaris ultrasonicator (Covaris, Woburn, Mass.). DNA fragments were then purified using Ampure XP (Beckman Coulter, Brea, Calif.) following manufacture suggested procedures. This step is important to separate out the longer, preferred fragment sizes (700 bp), from the smaller, less preferred fragment sizes (below 150 bp, and greater than 1500 bp). Longer, purified DNA fragments were analyzed by a LabChip (PerkinElmer, Waltham, Mass.) to ensure that the fragments size distribution primarily fell in the range of 500-900 bp. The DNA was then repaired, and adaptor sequences (commercially available) were added to identify separate DNA samples from one another in subsequent steps (called multi-plexing). End-repairing, A-Tailing, and Adapter ligation of the DNA library was constructed using KAPA Hyper Prep Kit (Kapa Biosystems, Wilmington, Mass.) by following manufacture suggested procedures. After this construction, the Adapter ligated fragments were purified using Ampure XP by following manufacture suggested procedures.

[0074] Adaptor ligated fragments were quantified using KAPA Hyper Prep Kit by following manufacture suggested procedures, and amplified DNA was again purified using Ampure XP by following manufacture suggested procedures. To ensure that the concentration, size distribution, and quality of the fragmented DNA library were sufficient, the Kapa Library Quantification Kit (Kapa Biosystems, Wilmington, Mass.) and HT DNA HiSens Reagents for the LibChip GX (PerkinElmer, Waltham. Mass.) were employed.

[0075] Hybridization of pre-capture fragmented DNA library using the approximately 196,000 capture probes from Example 1 followed. To obtain equal numbers of sequencing reads from each component libraries in the multiplex DNA library, equal amounts of each independently amplified DNA library were normalized for the hybridization. The hybridization samples were incubated at 47° C. for 2-72 hours. The captured DNA library of target nucleic acids was recovered using Nimblegen Hybridization and Wash Kit (Roche NimbleGen, Madison, Wis.) by following manufacture suggested procedures. The post-capture DNA target nucleic acid library was amplified and quantified using KAPA HiFi Library Amplification Kit (Kapa Biosystems, Wilmington. Mass.) by following manufacture suggested procedures. The captured-amplified target nucleic acid DNA library was purified using Ampure XP by following manufacture suggested procedures.

[0076] The final concentration of the target nucleic acid DNA library was determined using Kapa Library Quantification Kit and HT DNA HiSens Reagents for the LibChip GX. The Library was then loaded and sequenced on MiSeq, (Illumina, San Diego, Calif.) and samples were sequenced, generating paired reads that were stored in .fastq format. Sequenced reads were then aligned to a reference genome using one of any number of read mapping algorithms (eg: Novoalign, BWA, BFAST, Bowtie). Aligned reads were then processed to improve mapping and to assess the quality of the sequencing and alignment. Aligned reads were then evaluated to determine mutations/variants, including single nucleotide variants, insertions, deletions and structural variants using one or more of the following tools (VarScan, GATK, samtools. MuTect, BreakDancer, DELLY, Pindel). Filters were then applied to remove low quality variants and annotation methods were used to categorize the variants by their potential consequences. Finally, after filtering variants to a subset containing mutations with the highest likelihood of pathogenicity, the final variant set was manually curated to evaluate the potential impact of the variant on the sample. An exemplary technical report is shown in FIGS. 2A-2C, which includes the raw numbers of mutations/variants found. FIG. 3 is an exemplary variant report, listing mutations/variants with prognostic and therapeutic implications.

[0077] After reading this description it will become apparent to one skilled in the art how to implement the invention in various alternative embodiments and alternative applications. However, all the various embodiments of the present invention will not be described herein. It is understood that the embodiments presented here are presented by way of an example only, and not limitation. As such, this detailed description of various alternative embodiments should not be construed to limit the scope or breadth of the present invention as set forth herein.

What is claimed is:

1. A method of screening a nucleic acid sample for mutations comprising:
(a) obtaining a nucleic acid sample;
(b) fragmenting the nucleic acid sample;
(c) contacting the fragmented nucleic acid sample with a panel of capture probes, wherein the panel of capture probes specifically capture targeted nucleic acid fragments which are identified as having or likely having a mutation;
(d) isolating the targeted nucleic acid fragments captured by the panel of capture probes;
(e) sequencing the isolated targeted nucleic acid fragments; and
(f) analyzing the sequences of the isolated targeted nucleic acid fragments to identify mutations with prognostic and/or therapeutic significance.

2. The method of claim 1, further comprising:
(b′) adding adaptor nucleic acids to the fragmented nucleic acids.

3. The method of any of claim 1 or 2, wherein the panel of capture probes comprise a plurality of nucleic acids comprising at least 1,000 unique nucleic acid sequences, at least 10,000 unique nucleic acid sequences, at least 100,000 unique nucleic acid sequences, at least 150,000 unique nucleic acid sequences, or at least 200,000 unique nucleic acid sequences.

4. The method of any of claims 1-3, wherein the nucleic acid capture probes are 20-200 nucleotides in length, or 50-200 nucleotides in length, or 20-150 nucleotides in length.

5. The method of any one of claims 1-4, wherein the nucleic acid capture probes have a nucleic acid sequence which is complementary to the targeted nucleic acid fragments, wherein the complementarity is at least 80% complementarity, 90% complementarity, 95% complementarity, or 100% complementarity.

6. The method of any of claims 1-5, further comprising
(b″) selecting the nucleic acid fragments to select nucleic acid fragments of 100-5,000 nucleotides in length, 200-1400 nucleotides in length, or 300-900 nucleotides in length, or 300-700 nucleotides in length.

7. The method of any of claims 1-6, wherein the isolated targeted nucleic acid fragments have an average length of 100-5,000 nucleotides in length, 200-1400 nucleotides in length, or 300-900 nucleotides in length, or 300-700 nucleotides in length.

8. The method of any of claims 1-7, wherein the sequencing of the isolated target nucleic acid fragments is at a read depth of at least 500×, at least 1000×, at least 10,000×, or at least 100,000×.

9. The method of any of claims 1-8, wherein the average length of the sequence reads of the isolated target nucleic acid fragments is at least 500 nucleotides, or at least 600 nucleotides, at least 700 nucleotides, or at least 1,000 nucleotides.

10. The method of any of claims 1-9, wherein the analyzing comprises aligning the sequences of the isolated targeted nucleic acid fragments to a reference sequence.

11. The method of any of claims 1-10, wherein the nucleic acid sample is isolated from a biological sample.

12. The method of any of claims 1-11, wherein the nucleic acid sample is isolated from a sample comprising cancer cells.

13. The method of any of claims 1-12, wherein the target nucleic acids are from genes identified as having a mutation in a cancer cell.

14. The method of any of claims 1-13, wherein the target nucleic acids are from genes identified in a public database as having a mutation in a cancer cell.

15. The method of any of claims 1-14, wherein the identified mutation is used for diagnostic, prognostic, or treatment purposes.

16. The method of any of claims 1-15, wherein the sample is from a patient, and the identified mutation is used for diagnostic, prognostic, or treatment purposes.

17. The method of any of claims 1-16, wherein the mutation is selected from the group consisting of a single nucleotide variant, an insertion, a deletion or a translocation.

18. The method of any of claims 1-17, wherein step (b′) is before step (c).

19. The method of any of claims 1-17, wherein step (b′) is after step (c).

20. The method of any of claims 1-19, wherein step (b″) is before step (c).

21. The method of any of claims 1-19, wherein step (b″) is after step (c).

22. A panel of nucleic acid capture probes comprising a plurality of nucleic acids, wherein the nucleic acids are 20-200 nucleotides in length, wherein the nucleic acids comprise at least 1,000 unique nucleic acid sequences, and wherein the nucleic acid sequences are complementary to target nucleic acids that are identified as having or likely having a mutation.

23. The panel of claim 22, wherein the mutation is selected from the group consisting of a single nucleotide variant, an insertion, a deletion or a translocation.

24. The panel of any of claims 22-23, wherein the target nucleic acids are from genes identified as having a mutation in a cancer cell.

25. The panel of any of claims 22-24, wherein the target nucleic acids are from genes identified in a public database as having a mutation in a cancer cell.

26. The method of panel of any of claims 1-25, wherein the panel of capture probes comprise at least 10,000 unique nucleic acid sequences complementary to at least 30 genes selected from Table 1.

The application's sequence listing, which the Patent Office published only in electronic form, follows.

SEQUENCE LISTING (196624 sequences)

SEQ ID NO: 1 - DNA, 69 bp, Homo sapiens
aaggtggttccgtccgaggcgcggactccgcccccacgagcgccgccattttgtttggctgaggggagc

SEQ ID NO: 2 - DNA, 72 bp, Homo sapiens
ttccgtccgaggcgcggactccgcccccacgagcgccgccattttgtttggctgaggggagcgagcggcgct

SEQ ID NO: 3 - DNA, 69 bp, Homo sapiens
cggactccgcccccacgagcgccgccattttgtttggctgaggggagcgagcggcgctttgggggaggg

SEQ ID NO: 4 - DNA, 71 bp, Homo sapiens
cccacgagcgccgccattttgtttggctgaggggagcgagcggcgctttgggggaggggtcgcgtaggcgc

SEQ ID NO: 5 - DNA, 71 bp, Homo sapiens
ccgccattttgtttggctgaggggagcgagcggcgctttgggggaggggtcgcgtaggcgcctcacctgac

SEQ ID NO: 6 - DNA, 71 bp, Homo sapiens
attttgtttggctgaggggagcgagcggcgctttgggggaggggtcgcgtaggcgcctcacctgaccctgc

SEQ ID NO: 7 - DNA, 73 bp, Homo sapiens
tgaggggagcgagcggcgctttgggggaggggtcgcgtaggcgcctcacctgaccctgcggccgtgcggttgc

SEQ ID NO: 8 - DNA, 71 bp, Homo sapiens
agcggcgctttgggggaggggtcgcgtaggcgcctcacctgaccctgcggccgtgcggttgctgctccggg

SEQ ID NO: 9 - DNA, 72 bp, Homo sapiens
ggggaggggtcgcgtaggcgcctcacctgaccctgcggccgtgcggttgctgctccggggcaggtctccttc

SEQ ID NO: 10 - DNA, 74 bp, Homo sapiens
gggtcgcgtaggcgcctcacctgaccctgcggccgtgcggttgctgctccggggcaggtctccttccaggccag

SEQ ID NO: 11 - DNA, 73 bp, Homo sapiens
cctcacctgaccctgcggccgtgcggttgctgctccggggcaggtctccttccaggccaggggcccggaatca

SEQ ID NO: 12 - DNA, 73 bp, Homo sapiens
accctgcggccgtgcggttgctgctccggggcaggtctccttccaggccaggggcccggaatcatgtacataa

SEQ ID NO: 13 - DNA, 73 bp, Homo sapiens
ccgtgcggttgctgctccggggcaggtctccttccaggccaggggcccggaatcatgtacataaagcaggtaa

SEQ ID NO: 14 - DNA, 73 bp, Homo sapiens
gttgctgctccggggcaggtctccttccaggccaggggcccggaatcatgtacataaagcaggtaaggccttc

SEQ ID NO: 15 - DNA, 71 bp, Homo sapiens
caggtctccttccaggccaggggcccggaatcatgtacataaagcaggtaaggccttcgcgtccctccacc

SEQ ID NO: 16 - DNA, 64 bp, Homo sapiens
aatgttaattttttttgtggggtgggttctcaaaaatgttttttatttactaggtgattatcca

SEQ ID NO: 17 - DNA, 64 bp, Homo sapiens
ttttttgtggggtgggttctcaaaaatgttttttatttactaggtgattatccagggttttcga

SEQ ID NO: 18 - DNA, 66 bp, Homo sapiens
gggtgggttctcaaaaatgttttttatttactaggtgattatccagggttttcgaagttacagaga

SEQ ID NO: 19 - DNA, 68 bp, Homo sapiens
ctcaaaaatgttttttatttactaggtgattatccagggttttcgaagttacagagatcaaacaattg

SEQ ID NO: 20 - DNA, 70 bp, Homo sapiens
ttttatttactaggtgattatccagggttttcgaagttacagagatcaaacaattgtagatcccttcagt

SEQ ID NO: 21 - DNA, 71 bp, Homo sapiens
tttactaggtgattatccagggttttcgaagttacagagatcaaacaattgtagatcccttcagttcaaaa

SEQ ID NO: 22 - DNA, 74 bp, Homo sapiens
tatccagggttttcgaagttacagagatcaaacaattgtagatcccttcagttcaaaacataatgtgattggta

SEQ ID NO: 23 - DNA, 72 bp, Homo sapiens
ggttttcgaagttacagagatcaaacaattgtagatcccttcagttcaaaacataatgtgattggtaagtgt

SEQ ID NO: 24 - DNA, 74 bp, Homo sapiens
tacagagatcaaacaattgtagatcccttcagttcaaaacataatgtgattggtaagtgttcttggtttactcg

SEQ ID NO: 25 - DNA, 72 bp, Homo sapiens
caaacaattgtagatcccttcagttcaaaacataatgtgattggtaagtgttcttggtttactcggtcatat

SEQ ID NO: 26 - DNA, 73 bp, Homo sapiens
gtagatcccttcagttcaaaacataatgtgattggtaagtgttcttggtttactcggtcatatttatagtcta

SEQ ID NO: 27 - DNA, 60 bp, Homo sapiens
gtatttttaaaaaggtaaacagttttaattttattggtttttatgtaaaataacttgtac

SEQ ID NO: 28 - DNA, 61 bp, Homo sapiens
taaaaaggtaaacagttttaattttattggtttttatgtaaaataacttgtactttttgaa

SEQ ID NO: 29 - DNA, 64 bp, Homo sapiens
cagttttaattttattggtttttatgtaaaataacttgtactttttgaaattttccagtgggca

SEQ ID NO: 30 - DNA, 68 bp, Homo sapiens
ttattggtttttatgtaaaataacttgtactttttgaaattttccagtgggcagaaatggatctggaa

SEQ ID NO: 31 - DNA, 67 bp, Homo sapiens
ttatgtaaaataacttgtactttttgaaattttccagtgggcagaaatggatctggaaaaagtaact

SEQ ID NO: 32 - DNA, 65 bp, Homo sapiens
taaaataacttgtactttttgaaattttccagtgggcagaaatggatctggaaaaagtaactttt

SEQ ID NO: 33 - DNA, 67 bp, Homo sapiens
tttttgaaattttccagtgggcagaaatggatctggaaaaagtaactttttttatggtaggtgttgc

SEQ ID NO: 34 - DNA, 68 bp, Homo sapiens
tttccagtgggcagaaatggatctggaaaaagtaactttttttatggtaggtgttgctttttgaattg

SEQ ID NO: 35 - DNA, 67 bp, Homo sapiens
agtgggcagaaatggatctggaaaaagtaactttttttatggtaggtgttgctttttgaattgtaaa

SEQ ID NO: 36 - DNA, 67 bp, Homo sapiens
gatctggaaaaagtaactttttttatggtaggtgttgctttttgaattgtaaatatattaagacctg

SEQ ID NO: 37 - DNA, 66 bp, Homo sapiens
agtaactttttttatggtaggtgttgctttttgaattgtaaatatattaagacctgggtatcttag

SEQ ID NO: 38 - DNA, 69 bp, Homo sapiens
tttatggtaggtgttgctttttgaattgtaaatatattaagacctgggtatcttagggtagattattaa

SEQ ID NO: 39 - DNA, 66 bp, Homo sapiens
gaagttataaataagttataaacacttttttagggtatactaatagttgtttttgtatttccagca

SEQ ID NO: 40 - DNA, 66 bp, Homo sapiens
ataagttataaacacttttttagggtatactaatagttgtttttgtatttccagcaattcagtttg

SEQ ID NO: 41 - DNA, 70 bp, Homo sapiens
aacacttttttagggtatactaatagttgtttttgtatttccagcaattcagtttgttctcagtgatgag

SEQ ID NO: 42 - DNA, 74 bp, Homo sapiens
gggtatactaatagttgtttttgtatttccagcaattcagtttgttctcagtgatgagtttagtcatcttcgtc

SEQ ID NO: 43 - DNA, 76 bp, Homo sapiens
tactaatagttgtttttgtatttccagcaattcagtttgttctcagtgatgagtttagtcatcttcgtccagaaca

SEQ ID NO: 44 - DNA, 76 bp, Homo sapiens
tttgtatttccagcaattcagtttgttctcagtgatgagtttagtcatcttcgtccagaacagcggttggctttat

SEQ ID NO: 45 - DNA, 80 bp, Homo sapiens
tttccagcaattcagtttgttctcagtgatgagtttagtcatcttcgtccagaacagcggttggctttattgcatgtgag

SEQ ID NO: 46 - DNA, 81 bp, Homo sapiens
tttgttctcagtgatgagtttagtcatcttcgtccagaacagcggttggctttattgcatgtgagtgagactgctttaaga

SEQ ID NO: 47 - DNA, 81 bp, Homo sapiens
agtgatgagtttagtcatcttcgtccagaacagcggttggctttattgcatgtgagtgagactgctttaagacattattga

SEQ ID NO: 48 - DNA, 79 bp, Homo sapiens
agtttagtcatcttcgtccagaacagcggttggctttattgcatgtgagtgagactgctttaagacattattgatatta

SEQ ID NO: 49 - DNA, 79 bp, Homo sapiens
atcttcgtccagaacagcggttggctttattgcatgtgagtgagactgctttaagacattattgatattacatatattt

SEQ ID NO: 50 - DNA, 77 bp, Homo sapiens
agaacagcggttggctttattgcatgtgagtgagactgctttaagacattattgatattacatatattttaaaaata

SEQ ID NO: 51 - DNA, 69 bp, Homo sapiens
gaatcctttaaaggatatgaatatacaacttaaatggcaaatttctcacttctttcatttttaggaagg

SEQ ID NO: 52 - DNA, 71 bp, Homo sapiens
ggatatgaatatacaacttaaatggcaaatttctcacttctttcatttttaggaaggtactggtcctcgtg

SEQ ID NO: 53 - DNA, 70 bp, Homo sapiens
tacaacttaaatggcaaatttctcacttctttcatttttaggaaggtactggtcctcgtgttatttctgc

SEQ ID NO: 54 - DNA, 70 bp, Homo sapiens
taaatggcaaatttctcacttctttcatttttaggaaggtactggtcctcgtgttatttctgcttttgtg

SEQ ID NO: 55 - DNA, 70 bp, Homo sapiens
ctcacttctttcatttttaggaaggtactggtcctcgtgttatttctgcttttgtggagattatttttga

SEQ ID NO: 56 - DNA, 72 bp, Homo sapiens
tcatttttaggaaggtactggtcctcgtgttatttctgcttttgtggagattatttttgataattcagacaa

SEQ ID NO: 57 - DNA, 70 bp, Homo sapiens
tttaggaaggtactggtcctcgtgttatttctgcttttgtggagattatttttgataattcagacaaccg

SEQ ID NO: 58 - DNA, 70 bp, Homo sapiens
gtcctcgtgttatttctgcttttgtggagattatttttgataattcagacaaccggttaccagtaagtaa

SEQ ID NO: 59 - DNA, 68 bp, Homo sapiens
cgtgttatttctgcttttgtggagattatttttgataattcagacaaccggttaccagtaagtaactt

SEQ ID NO: 60 - DNA, 66 bp, Homo sapiens
ctgcttttgtggagattatttttgataattcagacaaccggttaccagtaagtaacttttttttta

SEQ ID NO: 61 - DNA, 65 bp, Homo sapiens
taaaaagttttctcctttactattaaattaactgtgggcttttacattttttcttagatcgataa

SEQ ID NO: 62 - DNA, 67 bp, Homo sapiens
ctcctttactattaaattaactgtgggcttttacattttttcttagatcgataaagaggaagtttca

SEQ ID NO: 63 - DNA, 67 bp, Homo sapiens
attaaattaactgtgggcttttacattttttcttagatcgataaagaggaagtttcacttcgaagag

SEQ ID NO: 64 - DNA, 70 bp, Homo sapiens
taactgtgggcttttacattttttcttagatcgataaagaggaagtttcacttcgaagagttattggtgc

SEQ ID NO: 65 - DNA, 70 bp, Homo sapiens
ttacattttttcttagatcgataaagaggaagtttcacttcgaagagttattggtgccaaaaaggatcag

SEQ ID NO: 66 - DNA, 72 bp, Homo sapiens
ttcttagatcgataaagaggaagtttcacttcgaagagttattggtgccaaaaaggatcagtatttcttaga

SEQ ID NO: 67 - DNA, 71 bp, Homo sapiens
ataaagaggaagtttcacttcgaagagttattggtgccaaaaaggatcagtatttcttagacaagaagatg

SEQ ID NO: 68 - DNA, 71 bp, Homo sapiens
aagtttcacttcgaagagttattggtgccaaaaaggatcagtatttcttagacaagaagatggtcacgtaa

SEQ ID NO: 69 - DNA, 72 bp, Homo sapiens
ttcgaagagttattggtgccaaaaaggatcagtatttcttagacaagaagatggtcacgtaagcatttttct

SEQ ID NO: 70 - DNA, 69 bp, Homo sapiens
agttattggtgccaaaaaggatcagtatttcttagacaagaagatggtcacgtaagcatttttcttttt

SEQ ID NO: 71 - DNA, 74 bp, Homo sapiens
tgcttaatggtgctttaaaattatttatcggaaagtaatttcattgtttgtcaacaggaaaaatgatgtgatga

SEQ ID NO: 72 - DNA, 71 bp, Homo sapiens
gtgctttaaaattatttatcggaaagtaatttcattgtttgtcaacaggaaaaatgatgtgatgaacctcc

SEQ ID NO: 73 - DNA, 73 bp, Homo sapiens
ttatttatcggaaagtaatttcattgtttgtcaacaggaaaaatgatgtgatgaacctccttgaaagcgctgg

SEQ ID NO: 74 - DNA, 72 bp, Homo sapiens
tatcggaaagtaatttcattgtttgtcaacaggaaaaatgatgtgatgaacctccttgaaagcgctggtttt

SEQ ID NO: 75 - DNA, 75 bp, Homo sapiens
tcattgtttgtcaacaggaaaaatgatgtgatgaacctccttgaaagcgctggtttttctcgaagcaatccttat

SEQ ID NO: 76 - DNA, 74 bp, Homo sapiens
tttgtcaacaggaaaaatgatgtgatgaacctccttgaaagcgctggtttttctcgaagcaatccttattatat

SEQ ID NO: 77 - DNA, 73 bp, Homo sapiens
aaatgatgtgatgaacctccttgaaagcgctggtttttctcgaagcaatccttattatattgttaaacaagga

SEQ ID NO: 78 - DNA, 69 bp, Homo sapiens
atgaacctccttgaaagcgctggtttttctcgaagcaatccttattatattgttaaacaaggaaaggta

SEQ ID NO: 79 - DNA, 67 bp, Homo sapiens
cctccttgaaagcgctggtttttctcgaagcaatccttattatattgttaaacaaggaaaggtaaaa

SEQ ID NO: 80 - DNA, 69 bp, Homo sapiens
gcgctggtttttctcgaagcaatccttattatattgttaaacaaggaaaggtaaaacaattgtatgtcc

SEQ ID NO: 81 - DNA, 67 bp, Homo sapiens
ttctcgaagcaatccttattatattgttaaacaaggaaaggtaaaacaattgtatgtcctttttaag

SEQ ID NO: 82 - DNA, 75 bp, Homo sapiens
tcttaaacggaggctacagctatgtaatgattatttttctaaaaattttagatcaaccagatggcaacagcacca

SEQ ID NO: 83 - DNA, 79 bp, Homo sapiens
gctacagctatgtaatgattatttttctaaaaattttagatcaaccagatggcaacagcaccagattctcagagattaa

SEQ ID NO: 84 - DNA, 76 bp, Homo sapiens
gtaatgattatttttctaaaaattttagatcaaccagatggcaacagcaccagattctcagagattaaagctatta

SEQ ID NO: 85 - DNA, 77 bp, Homo sapiens
tttctaaaaattttagatcaaccagatggcaacagcaccagattctcagagattaaagctattaagagaagtagctg

SEQ ID NO: 86 - DNA, 76 bp, Homo sapiens
aaaaattttagatcaaccagatggcaacagcaccagattctcagagattaaagctattaagagaagtagctggtac

SEQ ID NO: 87 - DNA, 81 bp, Homo sapiens
atcaaccagatggcaacagcaccagattctcagagattaaagctattaagagaagtagctggtactagagtgtatgacgaa

SEQ ID NO: 88 - DNA, 76 bp, Homo sapiens
aacagcaccagattctcagagattaaagctattaagagaagtagctggtactagagtgtatgacgaacgaaaggaa

SEQ ID NO: 89 - DNA, 74 bp, Homo sapiens
accagattctcagagattaaagctattaagagaagtagctggtactagagtgtatgacgaacgaaaggaagaaa

SEQ ID NO: 90 - DNA, 73 bp, Homo sapiens
agattaaagctattaagagaagtagctggtactagagtgtatgacgaacgaaaggaagaaagcatctccttaa

SEQ ID NO: 91 - DNA, 73 bp, Homo sapiens
ctattaagagaagtagctggtactagagtgtatgacgaacgaaaggaagaaagcatctccttaatgaaagaaa

SEQ ID NO: 92 - DNA, 71 bp, Homo sapiens
agtagctggtactagagtgtatgacgaacgaaaggaagaaagcatctccttaatgaaagaaacaggtaaaa

SEQ ID NO: 93 - DNA, 70 bp, Homo sapiens
ggtactagagtgtatgacgaacgaaaggaagaaagcatctccttaatgaaagaaacaggtaaaataaatg

SEQ ID NO: 94 - DNA, 72 bp, Homo sapiens
gtatgacgaacgaaaggaagaaagcatctccttaatgaaagaaacaggtaaaataaatgtgattctgcctta

SEQ ID NO: 95 - DNA, 68 bp, Homo sapiens
aacgaaaggaagaaagcatctccttaatgaaagaaacaggtaaaataaatgtgattctgccttatttt

SEQ ID NO: 96 - DNA, 66 bp, Homo sapiens
cataaaaatcttattcaattcttccacctctctccccatttcttttaagagggcaaacgggaaaaa

SEQ ID NO: 97 - DNA, 68 bp, Homo sapiens
tcttattcaattcttccacctctctccccatttcttttaagagggcaaacgggaaaaaatcaatgagt

SEQ ID NO: 98 - DNA, 67 bp, Homo sapiens
tccacctctctccccatttcttttaagagggcaaacgggaaaaaatcaatgagttgttaaaatacat

SEQ ID NO: 99 - DNA, 68 bp, Homo sapiens
ctccccatttcttttaagagggcaaacgggaaaaaatcaatgagttgttaaaatacattgaagagaga

SEQ ID NO: 100 - DNA, 71 bp, Homo sapiens
tttaagagggcaaacgggaaaaaatcaatgagttgttaaaatacattgaagagagattacatactctagag

SEQ ID NO: 101 - DNA, 72 bp, Homo sapiens
gagggcaaacgggaaaaaatcaatgagttgttaaaatacattgaagagagattacatactctagaggaagaa

SEQ ID NO: 102 - DNA, 74 bp, Homo sapiens
aaaatcaatgagttgttaaaatacattgaagagagattacatactctagaggaagaaaaggaagaactagctca

SEQ ID NO: 103 - DNA, 76 bp, Homo sapiens
tgagttgttaaaatacattgaagagagattacatactctagaggaagaaaaggaagaactagctcagtatcagaag

SEQ ID NO: 104 - DNA, 76 bp, Homo sapiens
taaaatacattgaagagagattacatactctagaggaagaaaaggaagaactagctcagtatcagaagtgggataa

SEQ ID NO: 105 - DNA, 77 bp, Homo sapiens
ttgaagagagattacatactctagaggaagaaaaggaagaactagctcagtatcagaagtgggataaaatgagacga

SEQ ID NO: 106 - DNA, 75 bp, Homo sapiens
atactctagaggaagaaaaggaagaactagctcagtatcagaagtgggataaaatgagacgagccctggaatata

SEQ ID NO: 107 - DNA, 74 bp, Homo sapiens
ggaagaaaaggaagaactagctcagtatcagaagtgggataaaatgagacgagccctggaatataccatttaca

SEQ ID NO: 108 - DNA, 74 bp, Homo sapiens
aaaaggaagaactagctcagtatcagaagtgggataaaatgagacgagccctggaatataccatttacaatcag

SEQ ID NO: 109 - DNA, 75 bp, Homo sapiens
actagctcagtatcagaagtgggataaaatgagacgagccctggaatataccatttacaatcaggaacttaacga

SEQ ID NO: 110 - DNA, 73 bp, Homo sapiens
gaagtgggataaaatgagacgagccctggaatataccatttacaatcaggaacttaacgagactcgtgccaaa

SEQ ID NO: 111 - DNA, 74 bp, Homo sapiens
ataaaatgagacgagccctggaatataccatttacaatcaggaacttaacgagactcgtgccaaacttgatgag

SEQ ID NO: 112 - DNA, 72 bp, Homo sapiens
gagccctggaatataccatttacaatcaggaacttaacgagactcgtgccaaacttgatgaggtaaaatatt

SEQ ID NO: 113 - DNA, 71 bp, Homo sapiens
ctggaatataccatttacaatcaggaacttaacgagactcgtgccaaacttgatgaggtaaaatatttacc

SEQ ID NO: 114 - DNA, 71 bp, Homo sapiens
tttacaatcaggaacttaacgagactcgtgccaaacttgatgaggtaaaatatttacctgtgacacttaaa

SEQ ID NO: 115 - DNA, 71 bp, Homo sapiens
gaaatatttagtaattacaaaatgagttagatatgataagttgttttttttcttagctttctgctaagcga

SEQ ID NO: 116 - DNA, 73 bp, Homo sapiens
gtaattacaaaatgagttagatatgataagttgttttttttcttagctttctgctaagcgagagactagtgga

SEQ ID NO: 117 - DNA, 73 bp, Homo sapiens
aatgagttagatatgataagttgttttttttcttagctttctgctaagcgagagactagtggagaaaaatcca

SEQ ID NO: 118 - DNA, 73 bp, Homo sapiens
gttagatatgataagttgttttttttcttagctttctgctaagcgagagactagtggagaaaaatccagacaa

SEQ ID NO: 119 - DNA, 76 bp, Homo sapiens
ttgttttttttcttagctttctgctaagcgagagactagtggagaaaaatccagacaattaagagatgctcagcag

SEQ ID NO: 120 - DNA, 82 bp, Homo sapiens
ttcttagctttctgctaagcgagagactagtggagaaaaatccagacaattaagagatgctcagcaggatgcaagagataaa

SEQ ID NO: 121 - DNA, 81 bp, Homo sapiens
ctttctgctaagcgagagactagtggagaaaaatccagacaattaagagatgctcagcaggatgcaagagataaaatggag

SEQ ID NO: 122 - DNA, 79 bp, Homo sapiens
agagactagtggagaaaaatccagacaattaagagatgctcagcaggatgcaagagataaaatggaggtaagattataa

SEQ ID NO: 123 - DNA, 78 bp, Homo sapiens
ctagtggagaaaaatccagacaattaagagatgctcagcaggatgcaagagataaaatggaggtaagattataaacaa

SEQ ID NO: 124 - DNA, 78 bp, Homo sapiens
aatccagacaattaagagatgctcagcaggatgcaagagataaaatggaggtaagattataaacaaggttcatgttaa

SEQ ID NO: 125 - DNA, 76 bp, Homo sapiens
caattaagagatgctcagcaggatgcaagagataaaatggaggtaagattataaacaaggttcatgttaacttact

SEQ ID NO: 126 - DNA, 73 bp, Homo sapiens
atgctcagcaggatgcaagagataaaatggaggtaagattataaacaaggttcatgttaacttactttttact

SEQ ID NO: 127 - DNA, 72 bp, Homo sapiens
gctattgtacttctaattgccttattttctgtttaatacttttgaataggatatcgaacgccaagttagaga

SEQ ID NO: 128 - DNA, 70 bp, Homo sapiens
acttctaattgccttattttctgtttaatacttttgaataggatatcgaacgccaagttagagaattgaa

SEQ ID NO: 129 - DNA, 68 bp, Homo sapiens
gccttattttctgtttaatacttttgaataggatatcgaacgccaagttagagaattgaaaacaaaaa

SEQ ID NO: 130 - DNA, 72 bp, Homo sapiens
taatacttttgaataggatatcgaacgccaagttagagaattgaaaacaaaaatttcagctatgaaagaaga

SEQ ID NO: 131 - DNA, 70 bp, Homo sapiens
cttttgaataggatatcgaacgccaagttagagaattgaaaacaaaaatttcagctatgaaagaagaaaa

SEQ ID NO: 132 - DNA, 73 bp, Homo sapiens
tcgaacgccaagttagagaattgaaaacaaaaatttcagctatgaaagaagaaaaagaacagcttagtgctga

SEQ ID NO: 133 - DNA, 75 bp, Homo sapiens
gagaattgaaaacaaaaatttcagctatgaaagaagaaaaagaacagcttagtgctgaaagacaagagcagatta

SEQ ID NO: 134 - DNA, 75 bp, Homo sapiens
aaacaaaaatttcagctatgaaagaagaaaaagaacagcttagtgctgaaagacaagagcagattaagcagagga

SEQ ID NO: 135 - DNA, 75 bp, Homo sapiens
aaatttcagctatgaaagaagaaaaagaacagcttagtgctgaaagacaagagcagattaagcagaggactaagt

SEQ ID NO: 136 - DNA, 75 bp, Homo sapiens
aagaagaaaaagaacagcttagtgctgaaagacaagagcagattaagcagaggactaagttggagcttaaagcca

SEQ ID NO: 137 - DNA, 75 bp, Homo sapiens
aaagaacagcttagtgctgaaagacaagagcagattaagcagaggactaagttggagcttaaagccaaggattta

SEQ ID NO: 138 - DNA, 77 bp, Homo sapiens
ttagtgctgaaagacaagagcagattaagcagaggactaagttggagcttaaagccaaggatttacaagatgaacta

SEQ ID NO: 139 - DNA, 77 bp, Homo sapiens
aagacaagagcagattaagcagaggactaagttggagcttaaagccaaggatttacaagatgaactagcaggcaata

SEQ ID NO: 140 - DNA, 75 bp, Homo sapiens
agattaagcagaggactaagttggagcttaaagccaaggatttacaagatgaactagcaggcaatagtgaacaaa

SEQ ID NO: 141 - DNA, 72 bp, Homo sapiens
agaggactaagttggagcttaaagccaaggatttacaagatgaactagcaggcaatagtgaacaaagggtaa

SEQ ID NO: 142 - DNA, 71 bp, Homo sapiens
taagttggagcttaaagccaaggatttacaagatgaactagcaggcaatagtgaacaaagggtaagttaaa

SEQ ID NO: 143 - DNA, 70 bp, Homo sapiens
cttaaagccaaggatttacaagatgaactagcaggcaatagtgaacaaagggtaagttaaaatgctaaaa

SEQ ID NO: 144 - DNA, 73 bp, Homo sapiens
aggatttacaagatgaactagcaggcaatagtgaacaaagggtaagttaaaatgctaaaaatgaaagatgtga

SEQ ID NO: 145 - DNA, 66 bp, Homo sapiens
ttatgcaaaaaatttaaagcagtttgcatttttactttgtttacagaaacgtttattaaaagagag

SEQ ID NO: 146 - DNA, 68 bp, Homo sapiens
aatttaaagcagtttgcatttttactttgtttacagaaacgtttattaaaagagaggcagaagctgct

SEQ ID NO: 147 - DNA, 69 bp, Homo sapiens
aagcagtttgcatttttactttgtttacagaaacgtttattaaaagagaggcagaagctgcttgaaaaa

SEQ ID NO: 148 - DNA, 69 bp, Homo sapiens
gcatttttactttgtttacagaaacgtttattaaaagagaggcagaagctgcttgaaaaaatagaagaa

SEQ ID NO: 149 - DNA, 72 bp, Homo sapiens
ttacagaaacgtttattaaaagagaggcagaagctgcttgaaaaaatagaagaaaagcagaaagaactggca

SEQ ID NO: 150 - DNA, 71 bp, Homo sapiens
gaaacgtttattaaaagagaggcagaagctgcttgaaaaaatagaagaaaagcagaaagaactggcagaaa

SEQ ID NO: 151 - DNA, 72 bp, Homo sapiens
ttaaaagagaggcagaagctgcttgaaaaaatagaagaaaagcagaaagaactggcagaaacagaacccaaa

SEQ ID NO: 152 - DNA, 72 bp, Homo sapiens
aagctgcttgaaaaaatagaagaaaagcagaaagaactggcagaaacagaacccaaattcaacagtgtgaaa

SEQ ID NO: 153 - DNA, 71 bp, Homo sapiens
cttgaaaaaatagaagaaaagcagaaagaactggcagaaacagaacccaaattcaacagtgtgaaagagaa

SEQ ID NO: 154 - DNA, 72 bp, Homo sapiens
atagaagaaaagcagaaagaactggcagaaacagaacccaaattcaacagtgtgaaagagaaagaagaacga

SEQ ID NO: 155 - DNA, 71 bp, Homo sapiens
aaagaactggcagaaacagaacccaaattcaacagtgtgaaagagaaagaagaacgaggaattgctaggtc

SEQ ID NO: 156 - DNA, 73 bp, Homo sapiens
cagaaacagaacccaaattcaacagtgtgaaagagaaagaagaacgaggaattgctaggtctgagaactttca

SEQ ID NO: 157 - DNA, 72 bp, Homo sapiens
agaacccaaattcaacagtgtgaaagagaaagaagaacgaggaattgctaggtctgagaactttcaccaaca

SEQ ID NO: 158 - DNA, 71 bp, Homo sapiens
ttcaacagtgtgaaagagaaagaagaacgaggaattgctaggtctgagaactttcaccaacactttaactt

SEQ ID NO: 159 - DNA, 73 bp, Homo sapiens
ttggttattattctccttttcatcccatttgcttctattttgtgtagattggctcaagctacccaggaaagaa

SEQ ID NO: 160 - DNA, 73 bp, Homo sapiens
ttctccttttcatcccatttgcttctattttgtgtagattggctcaagctacccaggaaagaacggatcttta

SEQ ID NO: 161 - DNA, 76 bp, Homo sapiens
ttttcatcccatttgcttctattttgtgtagattggctcaagctacccaggaaagaacggatctttatgcaaagca

SEQ ID NO: 162 - DNA, 75 bp, Homo sapiens
ttgcttctattttgtgtagattggctcaagctacccaggaaagaacggatctttatgcaaagcagggtcgaggaa

SEQ ID NO: 163 - DNA, 74 bp, Homo sapiens
tttgtgtagattggctcaagctacccaggaaagaacggatctttatgcaaagcagggtcgaggaagccagttta

SEQ ID NO: 164 - DNA, 73 bp, Homo sapiens
attggctcaagctacccaggaaagaacggatctttatgcaaagcagggtcgaggaagccagtttacatcaaaa

SEQ ID NO: 165 - DNA, 71 bp, Homo sapiens
agctacccaggaaagaacggatctttatgcaaagcagggtcgaggaagccagtttacatcaaaagaagaaa

SEQ ID NO: 166 - DNA, 71 bp, Homo sapiens
aacggatctttatgcaaagcagggtcgaggaagccagtttacatcaaaagaagaaagggataagtggatta

SEQ ID NO: 167 - DNA, 70 bp, Homo sapiens
atctttatgcaaagcagggtcgaggaagccagtttacatcaaaagaagaaagggataagtggattaaaaa

SEQ ID NO: 168 - DNA, 68 bp, Homo sapiens
aaagcagggtcgaggaagccagtttacatcaaaagaagaaagggataagtggattaaaaaggaactca

SEQ ID NO: 169 - DNA, 70 bp, Homo sapiens
gaggaagccagtttacatcaaaagaagaaagggataagtggattaaaaaggaactcaagtctttagatca

SEQ ID NO: 170 - DNA, 72 bp, Homo sapiens
tacatcaaaagaagaaagggataagtggattaaaaaggaactcaagtctttagatcaggctattaatgacaa

SEQ ID NO: 171 - DNA, 71 bp, Homo sapiens
gaagaaagggataagtggattaaaaaggaactcaagtctttagatcaggctattaatgacaagaaaagaca

SEQ ID NO: 172 - DNA, 76 bp, Homo sapiens
ggataagtggattaaaaaggaactcaagtctttagatcaggctattaatgacaagaaaagacagattgctgctata

SEQ ID NO: 173 - DNA, 79 bp, Homo sapiens
aactcaagtctttagatcaggctattaatgacaagaaaagacagattgctgctatacataaggatttggaagacactga

SEQ ID NO: 174 - DNA, 80 bp, Homo sapiens
tctttagatcaggctattaatgacaagaaaagacagattgctgctatacataaggatttggaagacactgaagcaaataa

SEQ ID NO: 175 - DNA, 77 bp, Homo sapiens
aggctattaatgacaagaaaagacagattgctgctatacataaggatttggaagacactgaagcaaataaagagaaa

SEQ ID NO: 176 - DNA, 78 bp, Homo sapiens
agaaaagacagattgctgctatacataaggatttggaagacactgaagcaaataaagagaaaaatctggagcagtata

SEQ ID NO: 177 - DNA, 78 bp, Homo sapiens
agattgctgctatacataaggatttggaagacactgaagcaaataaagagaaaaatctggagcagtataatgtaagaa

SEQ ID NO: 178 - DNA, 76 bp, Homo sapiens
ctgctatacataaggatttggaagacactgaagcaaataaagagaaaaatctggagcagtataatgtaagaacttc

SEQ ID NO: 179 - DNA, 76 bp, Homo sapiens
taaggatttggaagacactgaagcaaataaagagaaaaatctggagcagtataatgtaagaacttctatagctgct

SEQ ID NO: 180 - DNA, 75 bp, Homo sapiens
gacactgaagcaaataaagagaaaaatctggagcagtataatgtaagaacttctatagctgctttgtaaaaatct

SEQ ID NO: 181 - DNA, 72 bp, Homo sapiens
atttttatttccatagaaactggaccaggatcttaatgaagtcaaagctcgagtagaagaactggacagaaa

SEQ ID NO: 182 - DNA, 73 bp, Homo sapiens
atttccatagaaactggaccaggatcttaatgaagtcaaagctcgagtagaagaactggacagaaaatattac

SEQ ID NO: 183 - DNA, 71 bp, Homo sapiens
aaactggaccaggatcttaatgaagtcaaagctcgagtagaagaactggacagaaaatattacgaagtaaa

SEQ ID NO: 184 - DNA, 71 bp, Homo sapiens
caggatcttaatgaagtcaaagctcgagtagaagaactggacagaaaatattacgaagtaaaaaataagaa

SEQ ID NO: 185 - DNA, 72 bp, Homo sapiens
tgaagtcaaagctcgagtagaagaactggacagaaaatattacgaagtaaaaaataagaaagatgaactaca

SEQ ID NO: 186 - DNA, 70 bp, Homo sapiens
agctcgagtagaagaactggacagaaaatattacgaagtaaaaaataagaaagatgaactacaaagtgaa

SEQ ID NO: 187 - DNA, 67 bp, Homo sapiens
gaactggacagaaaatattacgaagtaaaaaataagaaagatgaactacaaagtgaaagaaagttag

SEQ ID NO: 188 - DNA, 68 bp, Homo sapiens
cagaaaatattacgaagtaaaaaataagaaagatgaactacaaagtgaaagaaagttagtatagacta

SEQ ID NO: 189 - DNA, 70 bp, Homo sapiens
tacgaagtaaaaaataagaaagatgaactacaaagtgaaagaaagttagtatagactaaaatgtgcatta

SEQ ID NO: 190 - DNA, 76 bp, Homo sapiens
gcatcctcatatgtgtttaaaattaaagacagtctactttttatttattagctacttgtggagagaagagaatgca

SEQ ID NO: 191 - DNA, 74 bp, Homo sapiens
tttaaaattaaagacagtctactttttatttattagctacttgtggagagaagagaatgcagaacagcaagcac

SEQ ID NO: 192 - DNA, 78 bp, Homo sapiens
taaagacagtctactttttatttattagctacttgtggagagaagagaatgcagaacagcaagcacttgctgctaaaa

SEQ ID NO: 193 - DNA, 79 bp, Homo sapiens
actttttatttattagctacttgtggagagaagagaatgcagaacagcaagcacttgctgctaaaagagaagatcttga

SEQ ID NO: 194 - DNA, 80 bp, Homo sapiens
ttatttattagctacttgtggagagaagagaatgcagaacagcaagcacttgctgctaaaagagaagatcttgaaaagaa

SEQ ID NO: 195 - DNA, 81 bp, Homo sapiens
ttgtggagagaagagaatgcagaacagcaagcacttgctgctaaaagagaagatcttgaaaagaagcaacaacttcttaga

SEQ ID NO: 196 - DNA, 81 bp, Homo sapiens
aagagaatgcagaacagcaagcacttgctgctaaaagagaagatcttgaaaagaagcaacaacttcttagagcagcaacag

SEQ ID NO: 197 - DNA, 80 bp, Homo sapiens
aatgcagaacagcaagcacttgctgctaaaagagaagatcttgaaaagaagcaacaacttcttagagcagcaacaggaaa

SEQ ID NO: 198 - DNA, 76 bp, Homo sapiens
aagcacttgctgctaaaagagaagatcttgaaaagaagcaacaacttcttagagcagcaacaggaaaggtgggcag

SEQ ID NO: 199 - DNA, 71 bp, Homo sapiens
ctaaaagagaagatcttgaaaagaagcaacaacttcttagagcagcaacaggaaaggtgggcaggttcttt

SEQ ID NO: 200 - DNA, 74 bp, Homo sapiens
agaagatcttgaaaagaagcaacaacttcttagagcagcaacaggaaaggtgggcaggttcttttcatcacctc

SEQ ID NO: 201 - DNA, 74 bp, Homo sapiens
ttgaaaagaagcaacaacttcttagagcagcaacaggaaaggtgggcaggttcttttcatcacctctgtttaca

SEQ ID NO: 202 - DNA, 76 bp, Homo sapiens
agtgccattgatgatattattttaatatttttcatttctgacaacttacaggccattttaaatggaatagacagca

SEQ ID NO: 203 - DNA, 70 bp, Homo sapiens
attattttaatatttttcatttctgacaacttacaggccattttaaatggaatagacagcataaacaaag

SEQ ID NO: 204 - DNA, 74 bp, Homo sapiens
tatttttcatttctgacaacttacaggccattttaaatggaatagacagcataaacaaagtgctagaccacttc

SEQ ID NO: 205 - DNA, 73 bp, Homo sapiens
ttctgacaacttacaggccattttaaatggaatagacagcataaacaaagtgctagaccacttccgtcgaaaa

SEQ ID NO: 206 - DNA, 71 bp, Homo sapiens
ttacaggccattttaaatggaatagacagcataaacaaagtgctagaccacttccgtcgaaaaggaataaa

SEQ ID NO: 207 - DNA, 73 bp, Homo sapiens
ttttaaatggaatagacagcataaacaaagtgctagaccacttccgtcgaaaaggaataaaccagcatgttca

SEQ ID NO: 208 - DNA, 73 bp, Homo sapiens
aatggaatagacagcataaacaaagtgctagaccacttccgtcgaaaaggaataaaccagcatgttcaaaatg

SEQ ID NO: 209 - DNA, 73 bp, Homo sapiens
ataaacaaagtgctagaccacttccgtcgaaaaggaataaaccagcatgttcaaaatggctatcatggtattg

SEQ ID NO: 210 - DNA, 75 bp, Homo sapiens
aagtgctagaccacttccgtcgaaaaggaataaaccagcatgttcaaaatggctatcatggtattgtaatgaata

SEQ ID NO: 211 - DNA, 73 bp, Homo sapiens
accacttccgtcgaaaaggaataaaccagcatgttcaaaatggctatcatggtattgtaatgaataactttga

SEQ ID NO: 212 - DNA, 76 bp, Homo sapiens
tcgaaaaggaataaaccagcatgttcaaaatggctatcatggtattgtaatgaataactttgaatgtgaaccagct

SEQ ID NO: 213 - DNA, 79 bp, Homo sapiens
aataaaccagcatgttcaaaatggctatcatggtattgtaatgaataactttgaatgtgaaccagctttctacacatgc

SEQ ID NO: 214 - DNA, 79 bp, Homo sapiens
atgttcaaaatggctatcatggtattgtaatgaataactttgaatgtgaaccagctttctacacatgcgtggaagtcac

SEQ ID NO: 215 - DNA, 79 bp, Homo sapiens
tatcatggtattgtaatgaataactttgaatgtgaaccagctttctacacatgcgtggaagtcactgctggaaacaggt

SEQ ID NO: 216 - DNA, 76 bp, Homo sapiens
gtattgtaatgaataactttgaatgtgaaccagctttctacacatgcgtggaagtcactgctggaaacaggttaaa

SEQ ID NO: 217 - DNA, 74 bp, Homo sapiens
aataactttgaatgtgaaccagctttctacacatgcgtggaagtcactgctggaaacaggttaaagcttttgct

SEQ ID NO: 218 - DNA, 77 bp, Homo sapiens
aatgtgaaccagctttctacacatgcgtggaagtcactgctggaaacaggttaaagcttttgcttgatatttagcat

SEQ ID NO: 219 - DNA, 71 bp, Homo sapiens
gggagaccctgagtaccaataaagatttgtcttactctgtttatatttaggttattttatcacattgttga

SEQ ID NO: 220 - DNA, 76 bp, Homo sapiens
gtaccaataaagatttgtcttactctgtttatatttaggttattttatcacattgttgattcagatgaagtcagca

SEQ ID NO: 221 - DNA, 76 bp, Homo sapiens
gatttgtcttactctgtttatatttaggttattttatcacattgttgattcagatgaagtcagcacgaagatttta

SEQ ID NO: 222 - DNA, 75 bp, Homo sapiens
cttactctgtttatatttaggttattttatcacattgttgattcagatgaagtcagcacgaagattttaatggag

SEQ ID NO: 223 - DNA, 74 bp, Homo sapiens
atttaggttattttatcacattgttgattcagatgaagtcagcacgaagattttaatggagtttaataaaatga

SEQ ID NO: 224 - DNA, 77 bp, Homo sapiens
ttttatcacattgttgattcagatgaagtcagcacgaagattttaatggagtttaataaaatgaatcttcctggaga

SEQ ID NO: 225 - DNA, 76 bp, Homo sapiens
cacattgttgattcagatgaagtcagcacgaagattttaatggagtttaataaaatgaatcttcctggagaggtta

SEQ ID NO: 226 - DNA, 74 bp, Homo sapiens
ttcagatgaagtcagcacgaagattttaatggagtttaataaaatgaatcttcctggagaggttacttttctgc

SEQ ID NO: 227 - DNA, 70 bp, Homo sapiens
aagtcagcacgaagattttaatggagtttaataaaatgaatcttcctggagaggttacttttctgcctct

SEQ ID NO: 228 - DNA, 69 bp, Homo sapiens
ttttaatggagtttaataaaatgaatcttcctggagaggttacttttctgcctcttaacaagttagatg

SEQ ID NO: 229 - DNA, 71 bp, Homo sapiens
agtttaataaaatgaatcttcctggagaggttacttttctgcctcttaacaagttagatgtcagggataca

SEQ ID NO: 230 - DNA, 73 bp, Homo sapiens
ataaaatgaatcttcctggagaggttacttttctgcctcttaacaagttagatgtcagggatacagcctatcc

SEQ ID NO: 231 - DNA, 75 bp, Homo sapiens
ttcctggagaggttacttttctgcctcttaacaagttagatgtcagggatacagcctatcctgaaaccaatgtga

SEQ ID NO: 232 - DNA, 78 bp, Homo sapiens
ttacttttctgcctcttaacaagttagatgtcagggatacagcctatcctgaaaccaatgtgagtcattgtgtgataa

SEQ ID NO: 233 - DNA, 77 bp, Homo sapiens
cctcttaacaagttagatgtcagggatacagcctatcctgaaaccaatgtgagtcattgtgtgataaggtgtatttc

SEQ ID NO: 234 - DNA, 77 bp, Homo sapiens
taacaagttagatgtcagggatacagcctatcctgaaaccaatgtgagtcattgtgtgataaggtgtatttctcttt

SEQ ID NO: 235 - DNA, 79 bp, Homo sapiens
ttcttagttaactgtgttgtgatctctctgttgacaaaatttcatttttaggatgctattcctatgatcagcaaactga

SEQ ID NO: 236 - DNA, 80 bp, Homo sapiens
tgttgtgatctctctgttgacaaaatttcatttttaggatgctattcctatgatcagcaaactgaggtacaatcccagat

SEQ ID NO: 237 - DNA, 78 bp, Homo sapiens
tctctgttgacaaaatttcatttttaggatgctattcctatgatcagcaaactgaggtacaatcccagatttgacaaa

SEQ ID NO: 238 - DNA, 76 bp, Homo sapiens
caaaatttcatttttaggatgctattcctatgatcagcaaactgaggtacaatcccagatttgacaaagctttcaa

SEQ ID NO: 239 - DNA, 76 bp, Homo sapiens
atttttaggatgctattcctatgatcagcaaactgaggtacaatcccagatttgacaaagctttcaaacatgtgtt

SEQ ID NO: 240 - DNA, 76 bp, Homo sapiens
ctattcctatgatcagcaaactgaggtacaatcccagatttgacaaagctttcaaacatgtgtttggaaagactct

SEQ ID NO: 241 - DNA, 77 bp, Homo sapiens
tatgatcagcaaactgaggtacaatcccagatttgacaaagctttcaaacatgtgtttggaaagactcttatttgtc

SEQ ID NO: 242 - DNA, 73 bp, Homo sapiens
aaactgaggtacaatcccagatttgacaaagctttcaaacatgtgtttggaaagactcttatttgtcgtagca

SEQ ID NO: 243 - DNA, 73 bp, Homo sapiens
aatcccagatttgacaaagctttcaaacatgtgtttggaaagactcttatttgtcgtagcatggaagtttcaa

SEQ ID NO: 244 - DNA, 73 bp, Homo sapiens
atttgacaaagctttcaaacatgtgtttggaaagactcttatttgtcgtagcatggaagtttcaacccagctg

SEQ ID NO: 245 - DNA, 74 bp, Homo sapiens
tttcaaacatgtgtttggaaagactcttatttgtcgtagcatggaagtttcaacccagctggcccgtgctttca

SEQ ID NO: 246 - DNA, 75 bp, Homo sapiens
tgtttggaaagactcttatttgtcgtagcatggaagtttcaacccagctggcccgtgctttcactatggactgta

SEQ ID NO: 247 - DNA, 73 bp, Homo sapiens
aagactcttatttgtcgtagcatggaagtttcaacccagctggcccgtgctttcactatggactgtattactt

SEQ ID NO: 248 - DNA, 73 bp, Homo sapiens
ttatttgtcgtagcatggaagtttcaacccagctggcccgtgctttcactatggactgtattactttggaagg

SEQ ID NO: 249 - DNA, 71 bp, Homo sapiens
atggaagtttcaacccagctggcccgtgctttcactatggactgtattactttggaaggtttgtaatacta

SEQ ID NO: 250 - DNA, 71 bp, Homo sapiens
tttcaacccagctggcccgtgctttcactatggactgtattactttggaaggtttgtaatactaattctta

SEQ ID NO: 251 - DNA, 71 bp, Homo sapiens
gcccgtgctttcactatggactgtattactttggaaggtttgtaatactaattcttagctttaaacagata

SEQ ID NO: 252 - DNA, 72 bp, Homo sapiens
atcattgaataaaaaagttgtacagacctattacatatgttttgtttataggtgaccaagtcagccatcggg

SEQ ID NO: 253 - DNA, 71 bp, Homo sapiens
aaaaagttgtacagacctattacatatgttttgtttataggtgaccaagtcagccatcggggtgctctaac

SEQ ID NO: 254 - DNA, 72 bp, Homo sapiens
acctattacatatgttttgtttataggtgaccaagtcagccatcggggtgctctaactgggggttattatga

SEQ ID NO: 255 - DNA, 72 bp, Homo sapiens
tatgttttgtttataggtgaccaagtcagccatcggggtgctctaactgggggttattatgacacaaggaag

SEQ ID NO: 256 - DNA, 73 bp, Homo sapiens
tttgtttataggtgaccaagtcagccatcggggtgctctaactgggggttattatgacacaaggaagtctcga

SEQ ID NO: 257 - DNA, 73 bp, Homo sapiens
accaagtcagccatcggggtgctctaactgggggttattatgacacaaggaagtctcgacttgaattgcaaaa

SEQ ID NO: 258 - DNA, 73 bp, Homo sapiens
agccatcggggtgctctaactgggggttattatgacacaaggaagtctcgacttgaattgcaaaaagatgtta

SEQ ID NO: 259 - DNA, 73 bp, Homo sapiens
ctctaactgggggttattatgacacaaggaagtctcgacttgaattgcaaaaagatgttagaaaagcagaaga

SEQ ID NO: 260 - DNA, 72 bp, Homo sapiens
gggttattatgacacaaggaagtctcgacttgaattgcaaaaagatgttagaaaagcagaagaagaactagg

SEQ ID NO: 261 - DNA, 73 bp, Homo sapiens
attatgacacaaggaagtctcgacttgaattgcaaaaagatgttagaaaagcagaagaagaactaggtgaact

SEQ ID NO: 262 - DNA, 72 bp, Homo sapiens
aaggaagtctcgacttgaattgcaaaaagatgttagaaaagcagaagaagaactaggtgaacttgaagcaaa

SEQ ID NO: 263 - DNA, 74 bp, Homo sapiens
cgacttgaattgcaaaaagatgttagaaaagcagaagaagaactaggtgaacttgaagcaaagctcaatgaaaa

SEQ ID NO: 264 - DNA, 74 bp, Homo sapiens
aaagatgttagaaaagcagaagaagaactaggtgaacttgaagcaaagctcaatgaaaacctgcgcagaaatat

SEQ ID NO: 265 - DNA, 75 bp, Homo sapiens
ttagaaaagcagaagaagaactaggtgaacttgaagcaaagctcaatgaaaacctgcgcagaaatattgaaaata

SEQ ID NO: 266 - DNA, 74 bp, Homo sapiens
cagaagaagaactaggtgaacttgaagcaaagctcaatgaaaacctgcgcagaaatattgaaaatatctttttg

SEQ ID NO: 267 - DNA, 76 bp, Homo sapiens
aggtgaacttgaagcaaagctcaatgaaaacctgcgcagaaatattgaaaatatctttttgttttgtgcatagtga

SEQ ID NO: 268 - DNA, 78 bp, Homo sapiens
gaagcaaagctcaatgaaaacctgcgcagaaatattgaaaatatctttttgttttgtgcatagtgatagatattgtgg

SEQ ID NO: 269 - DNA, 76 bp, Homo sapiens
catacgatatatttacaacctggagataattttccttagccttgtatatggattaataatgaaattgatcagttga

SEQ ID NO: 270 - DNA, 77 bp, Homo sapiens
ttacaacctggagataattttccttagccttgtatatggattaataatgaaattgatcagttgatgaaccaaatgca

SEQ ID NO: 271 - DNA, 79 bp, Homo sapiens
ggagataattttccttagccttgtatatggattaataatgaaattgatcagttgatgaaccaaatgcaacagatcgaga

SEQ ID NO: 272 - DNA, 79 bp, Homo sapiens
tttccttagccttgtatatggattaataatgaaattgatcagttgatgaaccaaatgcaacagatcgagacccagcaaa

SEQ ID NO: 273 - DNA, 78 bp, Homo sapiens
cttgtatatggattaataatgaaattgatcagttgatgaaccaaatgcaacagatcgagacccagcaaaggaaattta

SEQ ID NO: 274 - DNA, 80 bp, Homo sapiens
taataatgaaattgatcagttgatgaaccaaatgcaacagatcgagacccagcaaaggaaatttaaagcatctagagata

SEQ ID NO: 275 - DNA, 80 bp, Homo sapiens
aaattgatcagttgatgaaccaaatgcaacagatcgagacccagcaaaggaaatttaaagcatctagagatagcatatta

SEQ ID NO: 276 - DNA, 81 bp, Homo sapiens
agttgatgaaccaaatgcaacagatcgagacccagcaaaggaaatttaaagcatctagagatagcatattatcagaaatga

SEQ ID NO: 277 - DNA, 80 bp, Homo sapiens
aaatgcaacagatcgagacccagcaaaggaaatttaaagcatctagagatagcatattatcagaaatgaagatgctaaaa

SEQ ID NO: 278 - DNA, 79 bp, Homo sapiens
aacagatcgagacccagcaaaggaaatttaaagcatctagagatagcatattatcagaaatgaagatgctaaaagagaa

SEQ ID NO: 279 - DNA, 82 bp, Homo sapiens
agcaaaggaaatttaaagcatctagagatagcatattatcagaaatgaagatgctaaaagagaagaggcagcagtcagagaa

SEQ ID NO: 280 - DNA, 79 bp, Homo sapiens
aaatttaaagcatctagagatagcatattatcagaaatgaagatgctaaaagagaagaggcagcagtcagagaaaacct

SEQ ID NO: 281 - DNA, 81 bp, Homo sapiens
atctagagatagcatattatcagaaatgaagatgctaaaagagaagaggcagcagtcagagaaaaccttcatgcctaaggt

SEQ ID NO: 282 - DNA, 79 bp, Homo sapiens
atagcatattatcagaaatgaagatgctaaaagagaagaggcagcagtcagagaaaaccttcatgcctaaggttcgtaa

SEQ ID NO: 283 - DNA, 75 bp, Homo sapiens
agaaatgaagatgctaaaagagaagaggcagcagtcagagaaaaccttcatgcctaaggttcgtaagtatatctt

SEQ ID NO: 284 - DNA, 75 bp, Homo sapiens
atgctaaaagagaagaggcagcagtcagagaaaaccttcatgcctaaggttcgtaagtatatctttggttataga

SEQ ID NO: 285 - DNA, 75 bp, Homo sapiens
agaagaggcagcagtcagagaaaaccttcatgcctaaggttcgtaagtatatctttggttatagatcgattgtta

SEQ ID NO: 286 - DNA, 75 bp, Homo sapiens
taagtaatacagtggctaataccttactaataaatggataatgtcatatagcaacgtagcttacagagtttggag

SEQ ID NO: 287 - DNA, 80 bp, Homo sapiens
ctaataccttactaataaatggataatgtcatatagcaacgtagcttacagagtttggaggcaagcttgcatgctatgga

SEQ ID NO: 288 - DNA, 82 bp, Homo sapiens
ttactaataaatggataatgtcatatagcaacgtagcttacagagtttggaggcaagcttgcatgctatggagtctaccaga

SEQ ID NO: 289 - DNA, 84 bp, Homo sapiens
aatggataatgtcatatagcaacgtagcttacagagtttggaggcaagcttgcatgctatggagtctaccagagagtcattgaa

SEQ ID NO: 290 - DNA, 84 bp, Homo sapiens
atgtcatatagcaacgtagcttacagagtttggaggcaagcttgcatgctatggagtctaccagagagtcattgaaagcagaac

SEQ ID NO: 291 - DNA, 81 bp, Homo sapiens
gtagcttacagagtttggaggcaagcttgcatgctatggagtctaccagagagtcattgaaagcagaactgggaactgatt

SEQ ID NO: 292 - DNA, 81 bp, Homo sapiens
ttacagagtttggaggcaagcttgcatgctatggagtctaccagagagtcattgaaagcagaactgggaactgatttgctt

SEQ ID NO: 293 - DNA, 81 bp, Homo sapiens
aggcaagcttgcatgctatggagtctaccagagagtcattgaaagcagaactgggaactgatttgctttctcaactgagtt

SEQ ID NO: 294 - DNA, 81 bp, Homo sapiens
atgctatggagtctaccagagagtcattgaaagcagaactgggaactgatttgctttctcaactgagtttggaagatcaga

SEQ ID NO: 295 - DNA, 79 bp, Homo sapiens
atggagtctaccagagagtcattgaaagcagaactgggaactgatttgctttctcaactgagtttggaagatcagaaga

SEQ ID NO: 296 - DNA, 81 bp, Homo sapiens
agagtcattgaaagcagaactgggaactgatttgctttctcaactgagtttggaagatcagaagagagtagatgcactgaa

SEQ ID NO: 297 - DNA, 83 bp, Homo sapiens
attgaaagcagaactgggaactgatttgctttctcaactgagtttggaagatcagaagagagtagatgcactgaatgatgaga

SEQ ID NO: 298 - DNA, 81 bp, Homo sapiens
actgggaactgatttgctttctcaactgagtttggaagatcagaagagagtagatgcactgaatgatgagattcgtcaact

SEQ ID NO: 299 - DNA, 83 bp, Homo sapiens
tttgctttctcaactgagtttggaagatcagaagagagtagatgcactgaatgatgagattcgtcaacttcagcaggtaagta

SEQ ID NO: 300 - DNA, 86 bp, Homo sapiens
ttctcaactgagtttggaagatcagaagagagtagatgcactgaatgatgagattcgtcaacttcagcaggtaagtagacagctga

SEQ ID NO: 301 - DNA, 83 bp, Homo sapiens
tttggaagatcagaagagagtagatgcactgaatgatgagattcgtcaacttcagcaggtaagtagacagctgactggaaaaa

SEQ ID NO: 302 - DNA, 80 bp, Homo sapiens
aagagagtagatgcactgaatgatgagattcgtcaacttcagcaggtaagtagacagctgactggaaaaagaattcgtta

SEQ ID NO: 303 - DNA, 75 bp, Homo sapiens
cctgtgtgtgaaatgtacatgcttatatagacaactttttcttaattctaggaaaacagacagttgctaaatgaa

SEQ ID NO: 304 - DNA, 72 bp, Homo sapiens
aaatgtacatgcttatatagacaactttttcttaattctaggaaaacagacagttgctaaatgaaagaatta

SEQ ID NO: 305 - DNA, 70 bp, Homo sapiens
gcttatatagacaactttttcttaattctaggaaaacagacagttgctaaatgaaagaattaaattagaa

SEQ ID NO: 306 - DNA, 68 bp, Homo sapiens
tttttcttaattctaggaaaacagacagttgctaaatgaaagaattaaattagaaggtattattactc

SEQ ID NO: 307 - DNA, 71 bp, Homo sapiens
ttctaggaaaacagacagttgctaaatgaaagaattaaattagaaggtattattactcgagtagagactta

SEQ ID NO: 308 - DNA, 75 bp, Homo sapiens
acagacagttgctaaatgaaagaattaaattagaaggtattattactcgagtagagacttatctcaatgagaatc

SEQ ID NO: 309 - DNA, 74 bp, Homo sapiens
gctaaatgaaagaattaaattagaaggtattattactcgagtagagacttatctcaatgagaatctgagaaaac

SEQ ID NO: 310 - DNA, 74 bp, Homo sapiens
agaattaaattagaaggtattattactcgagtagagacttatctcaatgagaatctgagaaaacgcttggacca

SEQ ID NO: 311 - DNA, 74 bp, Homo sapiens
aattagaaggtattattactcgagtagagacttatctcaatgagaatctgagaaaacgcttggaccaagtagaa

SEQ ID NO: 312 - DNA, 77 bp, Homo sapiens
gtattattactcgagtagagacttatctcaatgagaatctgagaaaacgcttggaccaagtagaacaggtgtgtatg

SEQ ID NO: 313 - DNA, 75 bp, Homo sapiens
ctcgagtagagacttatctcaatgagaatctgagaaaacgcttggaccaagtagaacaggtgtgtatgtgttttt

SEQ ID NO: 314 - DNA, 75 bp, Homo sapiens
gttggcagtcataacatttgaaactaatggaatttgtattttttgttacaggaacttaatgagctgagagagaca

SEQ ID NO: 315 - DNA, 71 bp, Homo sapiens
ataacatttgaaactaatggaatttgtattttttgttacaggaacttaatgagctgagagagacagaaggg

SEQ ID NO: 316 - DNA, 69 bp, Homo sapiens
aaactaatggaatttgtattttttgttacaggaacttaatgagctgagagagacagaagggggtactgt

SEQ ID NO: 317 - DNA, 77 bp, Homo sapiens
tgtattttttgttacaggaacttaatgagctgagagagacagaagggggtactgttctcacagccacaacatcagaa

SEQ ID NO: 318 - DNA, 77 bp, Homo sapiens
ttttgttacaggaacttaatgagctgagagagacagaagggggtactgttctcacagccacaacatcagaacttgaa

SEQ ID NO: 319 - DNA, 78 bp, Homo sapiens
aacttaatgagctgagagagacagaagggggtactgttctcacagccacaacatcagaacttgaagccatcaataaaa

SEQ ID NO: 320 - DNA, 77 bp, Homo sapiens
gagagagacagaagggggtactgttctcacagccacaacatcagaacttgaagccatcaataaaagagtaaaagaca

SEQ ID NO: 321 - DNA, 75 bp, Homo sapiens
agacagaagggggtactgttctcacagccacaacatcagaacttgaagccatcaataaaagagtaaaagacacta

SEQ ID NO: 322 - DNA, 81 bp, Homo sapiens
tactgttctcacagccacaacatcagaacttgaagccatcaataaaagagtaaaagacactatggcacgatcagaaggtga

SEQ ID NO: 323 - DNA, 76 bp, Homo sapiens
agccacaacatcagaacttgaagccatcaataaaagagtaaaagacactatggcacgatcagaaggtgaattttta

SEQ ID NO: 324 - DNA, 75 bp, Homo sapiens
aacatcagaacttgaagccatcaataaaagagtaaaagacactatggcacgatcagaaggtgaatttttatgtag

SEQ ID NO: 325 - DNA, 72 bp, Homo sapiens
acttgaagccatcaataaaagagtaaaagacactatggcacgatcagaaggtgaatttttatgtagtaaaat

SEQ ID NO: 326 - DNA, 70 bp, Homo sapiens
aacactggctttataggtattatagcctaattttgtttccccccatcttagatttggacaattccattga

SEQ ID NO: 327 - DNA, 70 bp, Homo sapiens
aggtattatagcctaattttgtttccccccatcttagatttggacaattccattgataaaacagaagctg

SEQ ID NO: 328 - DNA, 72 bp, Homo sapiens
tttgtttccccccatcttagatttggacaattccattgataaaacagaagctggaattaaggagcttcagaa

SEQ ID NO: 329 - DNA, 77 bp, Homo sapiens
tcttagatttggacaattccattgataaaacagaagctggaattaaggagcttcagaagagtatggagcgctggaaa

SEQ ID NO: 330 - DNA, 75 bp, Homo sapiens
atttggacaattccattgataaaacagaagctggaattaaggagcttcagaagagtatggagcgctggaaaaata

SEQ ID NO: 331 - DNA, 74 bp, Homo sapiens
attccattgataaaacagaagctggaattaaggagcttcagaagagtatggagcgctggaaaaatatggaaaaa

SEQ ID NO: 332 - DNA, 75 bp, Homo sapiens
taaaacagaagctggaattaaggagcttcagaagagtatggagcgctggaaaaatatggaaaaagaacatatgga

SEQ ID NO: 333 - DNA, 78 bp, Homo sapiens
aattaaggagcttcagaagagtatggagcgctggaaaaatatggaaaaagaacatatggatgctataaatcatgatac

SEQ ID NO: 334 - DNA, 77 bp, Homo sapiens
gaagagtatggagcgctggaaaaatatggaaaaagaacatatggatgctataaatcatgatactaaagaactggaaa

SEQ ID NO: 335 - DNA, 77 bp, Homo sapiens
gagcgctggaaaaatatggaaaaagaacatatggatgctataaatcatgatactaaagaactggaaaagatgacaaa

SEQ ID NO: 336 - DNA, 79 bp, Homo sapiens
atggaaaaagaacatatggatgctataaatcatgatactaaagaactggaaaagatgacaaatcggcaaggcatgctat

SEQ ID NO: 337 - DNA, 80 bp, Homo sapiens
aaagaacatatggatgctataaatcatgatactaaagaactggaaaagatgacaaatcggcaaggcatgctattgaagaa

SEQ ID NO: 338 - DNA, 80 bp, Homo sapiens
atggatgctataaatcatgatactaaagaactggaaaagatgacaaatcggcaaggcatgctattgaagaagaaagaaga

SEQ ID NO: 339 - DNA, 79 bp, Homo sapiens
taaatcatgatactaaagaactggaaaagatgacaaatcggcaaggcatgctattgaagaagaaagaagagtgtatgaa

SEQ ID NO: 340 - DNA, 75 bp, Homo sapiens
tactaaagaactggaaaagatgacaaatcggcaaggcatgctattgaagaagaaagaagagtgtatgaagaaaat

SEQ ID NO: 341 - DNA, 77 bp, Homo sapiens
aaaagatgacaaatcggcaaggcatgctattgaagaagaaagaagagtgtatgaagaaaattcgagaacttggatca

SEQ ID NO: 342 - DNA, 75 bp, Homo sapiens
acaaatcggcaaggcatgctattgaagaagaaagaagagtgtatgaagaaaattcgagaacttggatcacttccc

SEQ ID NO: 343 - DNA, 77 bp, Homo sapiens
gcatgctattgaagaagaaagaagagtgtatgaagaaaattcgagaacttggatcacttccccaggaagcatttgaa

SEQ ID NO: 344 - DNA, 72 bp, Homo sapiens
aaagaagagtgtatgaagaaaattcgagaacttggatcacttccccaggaagcatttgaaaagtaccagaca

SEQ ID NO: 345 - DNA, 71 bp, Homo sapiens
aaaattcgagaacttggatcacttccccaggaagcatttgaaaagtaccagacactgagcctcaaacaggt

SEQ ID NO: 346 - DNA, 70 bp, Homo sapiens
ttggatcacttccccaggaagcatttgaaaagtaccagacactgagcctcaaacaggttggttttaaatt

SEQ ID NO: 347 - DNA, 69 bp, Homo sapiens
cccaggaagcatttgaaaagtaccagacactgagcctcaaacaggttggttttaaatttgaagtcttgt

SEQ ID NO: 348 - DNA, 70 bp, Homo sapiens
catttgaaaagtaccagacactgagcctcaaacaggttggttttaaatttgaagtcttgttacaaattgc

SEQ ID NO: 349 - DNA, 77 bp, Homo sapiens
tgctcagtatataaatttatttatatgaatacatattttctctttatagttgtttcgaaaacttgagcagtgcaaca

SEQ ID NO: 350 - DNA, 73 bp, Homo sapiens
aatttatttatatgaatacatattttctctttatagttgtttcgaaaacttgagcagtgcaacacagaattaa

SEQ ID NO: 351 - DNA, 76 bp, Homo sapiens
tatgaatacatattttctctttatagttgtttcgaaaacttgagcagtgcaacacagaattaaagaagtacagcca

SEQ ID NO: 352 - DNA, 74 bp, Homo sapiens
tattttctctttatagttgtttcgaaaacttgagcagtgcaacacagaattaaagaagtacagccatgttaaca

SEQ ID NO: 353 - DNA, 71 bp, Homo sapiens
ctttatagttgtttcgaaaacttgagcagtgcaacacagaattaaagaagtacagccatgttaacaaaaag

SEQ ID NO: 354 - DNA, 74 bp, Homo sapiens
ttgtttcgaaaacttgagcagtgcaacacagaattaaagaagtacagccatgttaacaaaaaggctttggatca

SEQ ID NO: 355 - DNA, 73 bp, Homo sapiens
aaacttgagcagtgcaacacagaattaaagaagtacagccatgttaacaaaaaggctttggatcagtttgtaa

SEQ ID NO: 356 - DNA, 71 bp, Homo sapiens
aacacagaattaaagaagtacagccatgttaacaaaaaggctttggatcagtttgtaaatttctccgagca

SEQ ID NO: 357 - DNA, 71 bp, Homo sapiens
gaattaaagaagtacagccatgttaacaaaaaggctttggatcagtttgtaaatttctccgagcagaaaga

SEQ ID NO: 358 - DNA, 69 bp, Homo sapiens
taacaaaaaggctttggatcagtttgtaaatttctccgagcagaaagaaaagttaataaagcgtcaaga

SEQ ID NO: 359 - DNA, 70 bp, Homo sapiens
aggctttggatcagtttgtaaatttctccgagcagaaagaaaagttaataaagcgtcaagaagagttaga

SEQ ID NO: 360 - DNA, 68 bp, Homo sapiens
gtttgtaaatttctccgagcagaaagaaaagttaataaagcgtcaagaagagttagataggggttaca

SEQ ID NO: 361 - DNA, 71 bp, Homo sapiens
atttctccgagcagaaagaaaagttaataaagcgtcaagaagagttagataggggttacaaatcaatcatg

SEQ ID NO: 362 - DNA, 74 bp, Homo sapiens
gcagaaagaaaagttaataaagcgtcaagaagagttagataggggttacaaatcaatcatggaactgatgaatg

SEQ ID NO: 363 - DNA, 74 bp, Homo sapiens
gttaataaagcgtcaagaagagttagataggggttacaaatcaatcatggaactgatgaatgtacttgaacttc

SEQ ID NO: 364 - DNA, 75 bp, Homo sapiens
cgtcaagaagagttagataggggttacaaatcaatcatggaactgatgaatgtacttgaacttcggaaatatgaa

SEQ ID NO: 365 - DNA, 75 bp, Homo sapiens
agaagagttagataggggttacaaatcaatcatggaactgatgaatgtacttgaacttcggaaatatgaagctat

SEQ ID NO: 366 - DNA, 75 bp, Homo sapiens
gggttacaaatcaatcatggaactgatgaatgtacttgaacttcggaaatatgaagctattcagttaactttcaa

SEQ ID NO: 367 - DNA, 75 bp, Homo sapiens
acaaatcaatcatggaactgatgaatgtacttgaacttcggaaatatgaagctattcagttaactttcaaacagg

SEQ ID NO: 368 - DNA, 71 bp, Homo sapiens
gaatgtacttgaacttcggaaatatgaagctattcagttaactttcaaacaggtatgtttcgctttgtagt

SEQ ID NO: 369 - DNA, 70 bp, Homo sapiens
ttgaacttcggaaatatgaagctattcagttaactttcaaacaggtatgtttcgctttgtagttaaaaca

SEQ ID NO: 370 - DNA, 71 bp, Homo sapiens
tataattctaagcaaaatttatatttcaatctgcttttgttttaaggtatctaagaacttcagtgaagtat

SEQ ID NO: 371 - DNA, 72 bp, Homo sapiens
tctaagcaaaatttatatttcaatctgcttttgttttaaggtatctaagaacttcagtgaagtattccagaa

SEQ ID NO: 372 - DNA, 71 bp, Homo sapiens
ttatatttcaatctgcttttgttttaaggtatctaagaacttcagtgaagtattccagaagttagtacctg

SEQ ID NO: 373 - DNA, 70 bp, Homo sapiens
aatctgcttttgttttaaggtatctaagaacttcagtgaagtattccagaagttagtacctggtggcaaa

SEQ ID NO: 374 - DNA, 69 bp, Homo sapiens
tttgttttaaggtatctaagaacttcagtgaagtattccagaagttagtacctggtggcaaagctactt

SEQ ID NO: 375 - DNA, 73 bp, Homo sapiens
gtatctaagaacttcagtgaagtattccagaagttagtacctggtggcaaagctactttggtgatgaagaaag

SEQ ID NO: 376 - DNA, 74 bp, Homo sapiens
aacttcagtgaagtattccagaagttagtacctggtggcaaagctactttggtgatgaagaaaggagatgtgga

SEQ ID NO: 377 - DNA, 77 bp, Homo sapiens
tattccagaagttagtacctggtggcaaagctactttggtgatgaagaaaggagatgtggagggcagtcagtctcaa

SEQ ID NO: 378 - DNA, 76 bp, Homo sapiens
aagttagtacctggtggcaaagctactttggtgatgaagaaaggagatgtggagggcagtcagtctcaagatgaag

SEQ ID NO: 379 - DNA, 78 bp, Homo sapiens
ctggtggcaaagctactttggtgatgaagaaaggagatgtggagggcagtcagtctcaagatgaaggagaagggagtg

SEQ ID NO: 380 - DNA, 79 bp, Homo sapiens
aagctactttggtgatgaagaaaggagatgtggagggcagtcagtctcaagatgaaggagaagggagtggtgagagtga

SEQ ID NO: 381 - DNA, 79 bp, Homo sapiens
gtgatgaagaaaggagatgtggagggcagtcagtctcaagatgaaggagaagggagtggtgagagtgagaggggttctg

SEQ ID NO: 382 - DNA, 78 bp, Homo sapiens
aaggagatgtggagggcagtcagtctcaagatgaaggagaagggagtggtgagagtgagaggggttctggctcacaaa

SEQ ID NO: 383 - DNA, 80 bp, Homo sapiens
agggcagtcagtctcaagatgaaggagaagggagtggtgagagtgagaggggttctggctcacaaagcagtgtcccatca

SEQ ID NO: 384 - DNA, 79 bp, Homo sapiens
tctcaagatgaaggagaagggagtggtgagagtgagaggggttctggctcacaaagcagtgtcccatcagttgaccagt

SEQ ID NO: 385 - DNA, 76 bp, Homo sapiens
agtggtgagagtgagaggggttctggctcacaaagcagtgtcccatcagttgaccagtttactggagttggaatta

SEQ ID NO: 386 - DNA, 73 bp, Homo sapiens
gtgagaggggttctggctcacaaagcagtgtcccatcagttgaccagtttactggagttggaattagggtaaa

SEQ ID NO: 387 - DNA, 72 bp, Homo sapiens
ttctggctcacaaagcagtgtcccatcagttgaccagtttactggagttggaattagggtaaaataccttta

SEQ ID NO: 388 - DNA, 70 bp, Homo sapiens
acaaagcagtgtcccatcagttgaccagtttactggagttggaattagggtaaaatacctttatattcca

SEQ ID NO: 389 - DNA, 68 bp, Homo sapiens
agtgtcccatcagttgaccagtttactggagttggaattagggtaaaatacctttatattccattttc

SEQ ID NO: 390 - DNA, 71 bp, Homo sapiens
ggtggtgattctgccctttaggatattaactcataatatgtttatttttaggtgtcatttacaggaaaaca

SEQ ID NO: 391 - DNA, 69 bp, Homo sapiens
ctgccctttaggatattaactcataatatgtttatttttaggtgtcatttacaggaaaacaaggtgaaa

SEQ ID NO: 392 - DNA, 74 bp, Homo sapiens
tattaactcataatatgtttatttttaggtgtcatttacaggaaaacaaggtgaaatgagagaaatgcaacagc

SEQ ID NO: 393 - DNA, 73 bp, Homo sapiens
atatgtttatttttaggtgtcatttacaggaaaacaaggtgaaatgagagaaatgcaacagctttcaggtgga

SEQ ID NO: 394 - DNA, 73 bp, Homo sapiens
ttatttttaggtgtcatttacaggaaaacaaggtgaaatgagagaaatgcaacagctttcaggtggacagaaa

SEQ ID NO: 395 - DNA, 74 bp, Homo sapiens
tcatttacaggaaaacaaggtgaaatgagagaaatgcaacagctttcaggtggacagaaatccttggtagccct

SEQ ID NO: 396 - DNA, 74 bp, Homo sapiens
aaaacaaggtgaaatgagagaaatgcaacagctttcaggtggacagaaatccttggtagcccttgctctgattt

SEQ ID NO: 397 - DNA, 79 bp, Homo sapiens
tgaaatgagagaaatgcaacagctttcaggtggacagaaatccttggtagcccttgctctgatttttgccattcagaaa

SEQ ID NO: 398 - DNA, 78 bp, Homo sapiens
agagaaatgcaacagctttcaggtggacagaaatccttggtagcccttgctctgatttttgccattcagaaatgtgac

SEQ ID NO: 399 - DNA, 75 bp, Homo sapiens
gctttcaggtggacagaaatccttggtagcccttgctctgatttttgccattcagaaatgtgacccggctccatt

SEQ ID NO: 400 - DNA, 74 bp, Homo sapiens
tggacagaaatccttggtagcccttgctctgatttttgccattcagaaatgtgacccggctccattttacttgt

SEQ ID NO: 401 - DNA, 74 bp, Homo sapiens
aaatccttggtagcccttgctctgatttttgccattcagaaatgtgacccggctccattttacttgtttgatga

SEQ ID NO: 402 - DNA, 75 bp, Homo sapiens
gtagcccttgctctgatttttgccattcagaaatgtgacccggctccattttacttgtttgatgaaattgaccag

SEQ ID NO: 403 - DNA, 79 bp, Homo sapiens
atttttgccattcagaaatgtgacccggctccattttacttgtttgatgaaattgaccaggctctggatgctcagcaca

SEQ ID NO: 404 - DNA, 79 bp, Homo sapiens
attcagaaatgtgacccggctccattttacttgtttgatgaaattgaccaggctctggatgctcagcacagaaaggctg

SEQ ID NO: 405 - DNA, 79 bp, Homo sapiens
aaatgtgacccggctccattttacttgtttgatgaaattgaccaggctctggatgctcagcacagaaaggctgtgtcag

SEQ ID NO: 406 - DNA, 81 bp, Homo sapiens
tccattttacttgtttgatgaaattgaccaggctctggatgctcagcacagaaaggctgtgtcaggtacagtttcagtaca

SEQ ID NO: 407 - DNA, 79 bp, Homo sapiens
ttacttgtttgatgaaattgaccaggctctggatgctcagcacagaaaggctgtgtcaggtacagtttcagtacagttt

SEQ ID NO: 408 - DNA, 76 bp, Homo sapiens
aaattgaccaggctctggatgctcagcacagaaaggctgtgtcaggtacagtttcagtacagttttggttttgtat

SEQ ID NO: 409 - DNA, 79 bp, Homo sapiens
cagatctgctgaaaagaaatttgttaaagcacaattttctttttacagatatgattatggaacttgctgtacatgctca

SEQ ID NO: 410 - DNA, 75 bp, Homo sapiens
gctgaaaagaaatttgttaaagcacaattttctttttacagatatgattatggaacttgctgtacatgctcagtt

SEQ ID NO: 411 - DNA, 74 bp, Homo sapiens
gttaaagcacaattttctttttacagatatgattatggaacttgctgtacatgctcagtttattacaactactt

SEQ ID NO: 412 - DNA, 75 bp, Homo sapiens
caattttctttttacagatatgattatggaacttgctgtacatgctcagtttattacaactacttttaggcctga

SEQ ID NO: 413 - DNA, 77 bp, Homo sapiens
tttttacagatatgattatggaacttgctgtacatgctcagtttattacaactacttttaggcctgaactgcttgag

SEQ ID NO: 414 - DNA, 80 bp, Homo sapiens
atatgattatggaacttgctgtacatgctcagtttattacaactacttttaggcctgaactgcttgagtcagctgacaaa

SEQ ID NO: 415 - DNA, 79 bp, Homo sapiens
acttgctgtacatgctcagtttattacaactacttttaggcctgaactgcttgagtcagctgacaaattctatggtgta

SEQ ID NO: 416 - DNA, 78 bp, Homo sapiens
tacatgctcagtttattacaactacttttaggcctgaactgcttgagtcagctgacaaattctatggtgtaaagttca

SEQ ID NO: 417 - DNA, 73 bp, Homo sapiens
agtttattacaactacttttaggcctgaactgcttgagtcagctgacaaattctatggtgtaaagttcagaaa

SEQ ID NO: 418 - DNA, 72 bp, Homo sapiens
aactacttttaggcctgaactgcttgagtcagctgacaaattctatggtgtaaagttcagaaataaggtaat

SEQ ID NO: 419 - DNA, 73 bp, Homo sapiens
aggcctgaactgcttgagtcagctgacaaattctatggtgtaaagttcagaaataaggtaattttattttaca

SEQ ID NO: 420 - DNA, 73 bp, Homo sapiens
ctgcttgagtcagctgacaaattctatggtgtaaagttcagaaataaggtaattttattttacattgagttta

SEQ ID NO: 421 - DNA, 68 bp, Homo sapiens
ctgacaaattctatggtgtaaagttcagaaataaggtaattttattttacattgagtttaagtttgta

SEQ ID NO: 422 - DNA, 77 bp, Homo sapiens
gtaattaacagatttttgtttttaacatttattcttcaggttagtcatattgatgtgatcacagcagagatggccaa

SEQ ID NO: 423 - DNA, 77 bp, Homo sapiens
ttttgtttttaacatttattcttcaggttagtcatattgatgtgatcacagcagagatggccaaagactttgtagaa

SEQ ID NO: 424 - DNA, 81 bp, Homo sapiens
ttttaacatttattcttcaggttagtcatattgatgtgatcacagcagagatggccaaagactttgtagaagatgatacca

SEQ ID NO: 425 - DNA, 83 bp, Homo sapiens
ttattcttcaggttagtcatattgatgtgatcacagcagagatggccaaagactttgtagaagatgataccacacatggttaa

SEQ ID NO: 426 - DNA, 82 bp, Homo sapiens
gttagtcatattgatgtgatcacagcagagatggccaaagactttgtagaagatgataccacacatggttaattggaaaata

SEQ ID NO: 427 - DNA, 80 bp, Homo sapiens
attgatgtgatcacagcagagatggccaaagactttgtagaagatgataccacacatggttaattggaaaatactaccta

SEQ ID NO: 428 - DNA, 74 bp, Homo sapiens
agcagagatggccaaagactttgtagaagatgataccacacatggttaattggaaaatactacctactggtttg

SEQ ID NO: 429 - DNA, 72 bp, Homo sapiens
ccaaagactttgtagaagatgataccacacatggttaattggaaaatactacctactggtttgggagatgta

SEQ ID NO: 430 - DNA, 74 bp, Homo sapiens
gactttgtagaagatgataccacacatggttaattggaaaatactacctactggtttgggagatgtatatagta

SEQ ID NO: 431 - DNA, 76 bp, Homo sapiens
tgataccacacatggttaattggaaaatactacctactggtttgggagatgtatatagtaatatgattctcatacc

SEQ ID NO: 432 - DNA, 74 bp, Homo sapiens
acacatggttaattggaaaatactacctactggtttgggagatgtatatagtaatatgattctcatacccagga

SEQ ID NO: 433 - DNA, 72 bp, Homo sapiens
ggaaaatactacctactggtttgggagatgtatatagtaatatgattctcatacccaggaactgtaaattta

SEQ ID NO: 434 - DNA, 71 bp, Homo sapiens
atactacctactggtttgggagatgtatatagtaatatgattctcatacccaggaactgtaaatttaaacc

SEQ ID NO: 435 - DNA, 72 bp, Homo sapiens
tggtttgggagatgtatatagtaatatgattctcatacccaggaactgtaaatttaaacctaaatatttggc

SEQ ID NO: 436 - DNA, 72 bp, Homo sapiens
tatatagtaatatgattctcatacccaggaactgtaaatttaaacctaaatatttggccaatagttttcaga

SEQ ID NO: 437 - DNA, 69 bp, Homo sapiens
agtaatatgattctcatacccaggaactgtaaatttaaacctaaatatttggccaatagttttcagact

SEQ ID NO: 438 - DNA, 70 bp, Homo sapiens
catacccaggaactgtaaatttaaacctaaatatttggccaatagttttcagacttaaagcatcatagtc

SEQ ID NO: 439 - DNA, 68 bp, Homo sapiens
caggaactgtaaatttaaacctaaatatttggccaatagttttcagacttaaagcatcatagtccttt

SEQ ID NO: 440 - DNA, 68 bp, Homo sapiens
aatttaaacctaaatatttggccaatagttttcagacttaaagcatcatagtccttttatatttgtct

SEQ ID NO: 441 - DNA, 72 bp, Homo sapiens
tatttggccaatagttttcagacttaaagcatcatagtccttttatatttgtctttgtattttataagatac

SEQ ID NO: 442 - DNA, 73 bp, Homo sapiens
ggccaatagttttcagacttaaagcatcatagtccttttatatttgtctttgtattttataagatactctgta

SEQ ID NO: 443 - DNA, 75 bp, Homo sapiens
cagacttaaagcatcatagtccttttatatttgtctttgtattttataagatactctgtaatgtcatgtttgtac

SEQ ID NO: 444 - DNA, 76 bp, Homo sapiens
gcatcatagtccttttatatttgtctttgtattttataagatactctgtaatgtcatgtttgtactgatagtttaa

SEQ ID NO: 445 - DNA, 72 bp, Homo sapiens
gtccttttatatttgtctttgtattttataagatactctgtaatgtcatgtttgtactgatagtttaagaat

SEQ ID NO: 446 - DNA, 73 bp, Homo sapiens
gtctttgtattttataagatactctgtaatgtcatgtttgtactgatagtttaagaatttaatttcctgtaca

SEQ ID NO: 447 - DNA, 71 bp, Homo sapiens
tttataagatactctgtaatgtcatgtttgtactgatagtttaagaatttaatttcctgtacaactttttg

SEQ ID NO: 448 - DNA, 71 bp, Homo sapiens
gatactctgtaatgtcatgtttgtactgatagtttaagaatttaatttcctgtacaactttttgtaaaatg

SEQ ID NO: 449 - DNA, 71 bp, Homo sapiens
atgtcatgtttgtactgatagtttaagaatttaatttcctgtacaactttttgtaaaatgttctgctccta

SEQ ID NO: 450 - DNA, 67 bp, Homo sapiens
gtttgtactgatagtttaagaatttaatttcctgtacaactttttgtaaaatgttctgctcctattt

SEQ ID NO: 451 - DNA, 65 bp, Homo sapiens
atagtttaagaatttaatttcctgtacaactttttgtaaaatgttctgctcctattttaaatgtt

SEQ ID NO: 452 - DNA, 69 bp, Homo sapiens
cctgtacaactttttgtaaaatgttctgctcctattttaaatgttttgaaacatgctaaatattctttc

SEQ ID NO: 453 - DNA, 71 bp, Homo sapiens
tgtaaaatgttctgctcctattttaaatgttttgaaacatgctaaatattctttcctaattattttatcac

SEQ ID NO: 454 - DNA, 70 bp, Homo sapiens
ctgctcctattttaaatgttttgaaacatgctaaatattctttcctaattattttatcacttatactacc

SEQ ID NO: 455 - DNA, 67 bp, Homo sapiens
cctattttaaatgttttgaaacatgctaaatattctttcctaattattttatcacttatactacctt

SEQ ID NO: 456 - DNA, 69 bp, Homo sapiens
gttttgaaacatgctaaatattctttcctaattattttatcacttatactaccttttttatagcttcaa

SEQ ID NO: 457 - DNA, 68 bp, Homo sapiens
gctaaatattctttcctaattattttatcacttatactaccttttttatagcttcaattaaataatcg

SEQ ID NO: 458 - DNA, 67 bp, Homo sapiens
tttcctaattattttatcacttatactaccttttttatagcttcaattaaataatcggttttatgac

SEQ ID NO: 459 - DNA, 68 bp, Homo sapiens
attttatcacttatactaccttttttatagcttcaattaaataatcggttttatgactaatatagtgt

SEQ ID NO: 460 - DNA, 69 bp, Homo sapiens
cttatactaccttttttatagcttcaattaaataatcggttttatgactaatatagtgttttatgtggc

SEQ ID NO: 461 - DNA, 69 bp, Homo sapiens
ctaccttttttatagcttcaattaaataatcggttttatgactaatatagtgttttatgtggcttttca

SEQ ID NO: 462 - DNA, 69 bp, Homo sapiens
acagtgatgggcttgtttttgtaaaattaccagaaaactcagtggagatttactgaaaaactcagactt

SEQ ID NO: 463 - DNA, 68 bp, Homo sapiens
gtttttgtaaaattaccagaaaactcagtggagatttactgaaaaactcagactttattcagattaag

SEQ ID NO: 464 - DNA, 70 bp, Homo sapiens
attaccagaaaactcagtggagatttactgaaaaactcagactttattcagattaagttcctctacaaaa

SEQ ID NO: 465 - DNA, 69 bp, Homo sapiens
gaaaactcagtggagatttactgaaaaactcagactttattcagattaagttcctctacaaaaagtagg

SEQ ID NO: 466 - DNA, 70 bp, Homo sapiens
gagatttactgaaaaactcagactttattcagattaagttcctctacaaaaagtagggttctgtcccatg

SEQ ID NO: 467 - DNA, 73 bp, Homo sapiens
tactgaaaaactcagactttattcagattaagttcctctacaaaaagtagggttctgtcccatgtgtctctga

SEQ ID NO: 468 - DNA, 71 bp, Homo sapiens
actttattcagattaagttcctctacaaaaagtagggttctgtcccatgtgtctctgacacatttacaaaa

SEQ ID NO: 469 - DNA, 70 bp, Homo sapiens
agattaagttcctctacaaaaagtagggttctgtcccatgtgtctctgacacatttacaaaataccagtt

SEQ ID NO: 470 - DNA, 69 bp, Homo sapiens
agttcctctacaaaaagtagggttctgtcccatgtgtctctgacacatttacaaaataccagtttttta

SEQ ID NO: 471 - DNA, 67 bp, Homo sapiens
caaaaagtagggttctgtcccatgtgtctctgacacatttacaaaataccagttttttaaaattttg

SEQ ID NO: 472 - DNA, 72 bp, Homo sapiens
tgtcccatgtgtctctgacacatttacaaaataccagttttttaaaattttggtcaaattatgagtggttga

SEQ ID NO: 473 - DNA, 71 bp, Homo sapiens
catgtgtctctgacacatttacaaaataccagttttttaaaattttggtcaaattatgagtggttgattta

SEQ ID NO: 474 - DNA, 65 bp, Homo sapiens
gacacatttacaaaataccagttttttaaaattttggtcaaattatgagtggttgatttaaaaac

SEQ ID NO: 475 - DNA, 64 bp, Homo sapiens
ataccagttttttaaaattttggtcaaattatgagtggttgatttaaaaacttttccaagaaga

SEQ ID NO: 476 - DNA, 67 bp, Homo sapiens
tttaaaattttggtcaaattatgagtggttgatttaaaaacttttccaagaagaagaaaagcatgga

SEQ ID NO: 477 - DNA, 69 bp, Homo sapiens
tggtcaaattatgagtggttgatttaaaaacttttccaagaagaagaaaagcatggagtagtaatttaa

SEQ ID NO: 478 - DNA, 69 bp, Homo sapiens
ttatgagtggttgatttaaaaacttttccaagaagaagaaaagcatggagtagtaatttaaagaactca

SEQ ID NO: 479 - DNA, 66 bp, Homo sapiens
ggttgatttaaaaacttttccaagaagaagaaaagcatggagtagtaatttaaagaactcaataaa

SEQ ID NO: 480 - DNA, 65 bp, Homo sapiens
aaaaacttttccaagaagaagaaaagcatggagtagtaatttaaagaactcaataaaaacttcta

SEQ ID NO: 481 - DNA, 65 bp, Homo sapiens
ccaagaagaagaaaagcatggagtagtaatttaaagaactcaataaaaacttctattttttattt

SEQ ID NO: 482 - DNA, 71 bp, Homo sapiens
ttattttaaaataatatacacagtgttattttcttcaagaccgtcctgtggatgtgaaatccgtcttcgcg

SEQ ID NO: 483 - DNA, 73 bp, Homo sapiens
tattttaaaataatatacacagtgttattttcttcaagaccgtcctgtggatgtgaaatccgtcttcgcgtca

SEQ ID NO: 484 - DNA, 76 bp, Homo sapiens
taaaataatatacacagtgttattttcttcaagaccgtcctgtggatgtgaaatccgtcttcgcgtcatgtatctc

SEQ ID NO: 485 - DNA, 78 bp, Homo sapiens
agtgttattttcttcaagaccgtcctgtggatgtgaaatccgtcttcgcgtcatgtatctcccatatccagcagttca

SEQ ID NO: 486 - DNA, 80 bp, Homo sapiens
attttcttcaagaccgtcctgtggatgtgaaatccgtcttcgcgtcatgtatctcccatatccagcagttcagccatcca

SEQ ID NO: 487 - DNA, 79 bp, Homo sapiens
aagaccgtcctgtggatgtgaaatccgtcttcgcgtcatgtatctcccatatccagcagttcagccatccagctacctt

SEQ ID NO: 488 - DNA, 84 bp, Homo sapiens
tgtggatgtgaaatccgtcttcgcgtcatgtatctcccatatccagcagttcagccatccagctacctttgggaccctgctgca

SEQ ID NO: 489 - DNA, 79 bp, Homo sapiens
aaatccgtcttcgcgtcatgtatctcccatatccagcagttcagccatccagctacctttgggaccctgctgcaccttg

SEQ ID NO: 490 - DNA, 82 bp, Homo sapiens
gtcatgtatctcccatatccagcagttcagccatccagctacctttgggaccctgctgcaccttgtgtttgctggggagtca

SEQ ID NO: 491 - DNA, 81 bp, Homo sapiens
tatctcccatatccagcagttcagccatccagctacctttgggaccctgctgcaccttgtgtttgctggggagtcactgga

SEQ ID NO: 492 - DNA, 81 bp, Homo sapiens
agcagttcagccatccagctacctttgggaccctgctgcaccttgtgtttgctggggagtcactggagagtgcatctctgt

SEQ ID NO: 493 - DNA, 79 bp, Homo sapiens
agccatccagctacctttgggaccctgctgcaccttgtgtttgctggggagtcactggagagtgcatctctgttcagtt

SEQ ID NO: 494 - DNA, 79 bp, Homo sapiens
agctacctttgggaccctgctgcaccttgtgtttgctggggagtcactggagagtgcatctctgttcagtttcagggca

SEQ ID NO: 495 - DNA, 83 bp, Homo sapiens
cctgctgcaccttgtgtttgctggggagtcactggagagtgcatctctgttcagtttcagggcacgtctcacacatttgctgt

SEQ ID NO: 496 - DNA, 80 bp, Homo sapiens
cttgtgtttgctggggagtcactggagagtgcatctctgttcagtttcagggcacgtctcacacatttgctgttccttat

SEQ ID NO: 497 - DNA, 81 bp, Homo sapiens
tttgctggggagtcactggagagtgcatctctgttcagtttcagggcacgtctcacacatttgctgttccttattcattgt

SEQ ID NO: 498 - DNA, 81 bp, Homo sapiens
agtcactggagagtgcatctctgttcagtttcagggcacgtctcacacatttgctgttccttattcattgttgacacaggg

SEQ ID NO: 499 - DNA, 78 bp, Homo sapiens
tgttcagtttcagggcacgtctcacacatttgctgttccttattcattgttgacacaggggataggtgatccactact

SEQ ID NO: 500 - DNA, 80 bp, Homo sapiens
ttcagggcacgtctcacacatttgctgttccttattcattgttgacacaggggataggtgatccactacttgctgtagaa

SEQ ID NO: 501 - DNA, 76 bp, Homo sapiens
acacatttgctgttccttattcattgttgacacaggggataggtgatccactacttgctgtagaatgtccttactt

SEQ ID NO: 502 - DNA, 77 bp, Homo sapiens
tttgctgttccttattcattgttgacacaggggataggtgatccactacttgctgtagaatgtccttactttcacta

SEQ ID NO: 503 - DNA, 78 bp, Homo sapiens
ttattcattgttgacacaggggataggtgatccactacttgctgtagaatgtccttactttcactaggaggcagatta

SEQ ID NO: 504 - DNA, 77 bp, Homo sapiens
gttgacacaggggataggtgatccactacttgctgtagaatgtccttactttcactaggaggcagattactgaaata

SEQ ID NO: 505 - DNA, 76 bp, Homo sapiens
ataggtgatccactacttgctgtagaatgtccttactttcactaggaggcagattactgaaatagtattgtggtac

SEQ ID NO: 506 - DNA, 77 bp, Homo sapiens
actacttgctgtagaatgtccttactttcactaggaggcagattactgaaatagtattgtggtaccagctgcataaa

SEQ ID NO: 507 - DNA, 76 bp, Homo sapiens
tagaatgtccttactttcactaggaggcagattactgaaatagtattgtggtaccagctgcataaatctgtttatt

SEQ ID NO: 508 - DNA, 75 bp, Homo sapiens
cttactttcactaggaggcagattactgaaatagtattgtggtaccagctgcataaatctgtttatttaagacaa

SEQ ID NO: 509 - DNA, 77 bp, Homo sapiens
ttcactaggaggcagattactgaaatagtattgtggtaccagctgcataaatctgtttatttaagacaaaaagatga

SEQ ID NO: 510 - DNA, 78 bp, Homo sapiens
gcagattactgaaatagtattgtggtaccagctgcataaatctgtttatttaagacaaaaagatgagattatgagtgg

SEQ ID NO: 511 - DNA, 69 bp, Homo sapiens
aaaaaaatacaaccctttcttctccattaaacttacagttcaggagagatttctgaggtaatcctgatg

SEQ ID NO: 512 - DNA, 71 bp, Homo sapiens
aatacaaccctttcttctccattaaacttacagttcaggagagatttctgaggtaatcctgatgtagttgt

SEQ ID NO: 513 - DNA, 77 bp, Homo sapiens
ttctccattaaacttacagttcaggagagatttctgaggtaatcctgatgtagttgttctcagaaatgctgaattta

SEQ ID NO: 514 - DNA, 76 bp, Homo sapiens
attaaacttacagttcaggagagatttctgaggtaatcctgatgtagttgttctcagaaatgctgaatttatggaa

SEQ ID NO: 515 - DNA, 77 bp, Homo sapiens
agttcaggagagatttctgaggtaatcctgatgtagttgttctcagaaatgctgaatttatggaagaggacccactc

SEQ ID NO: 516 - DNA, 78 bp, Homo sapiens
agatttctgaggtaatcctgatgtagttgttctcagaaatgctgaatttatggaagaggacccactctggcatcttct

SEQ ID NO: 517 - DNA, 80 bp, Homo sapiens
taatcctgatgtagttgttctcagaaatgctgaatttatggaagaggacccactctggcatcttcttggtgattgagtaa

SEQ ID NO: 518 - DNA, 79 bp, Homo sapiens
atgtagttgttctcagaaatgctgaatttatggaagaggacccactctggcatcttcttggtgattgagtaaccagaca

SEQ ID NO: 519 - DNA, 81 bp, Homo sapiens
ttctcagaaatgctgaatttatggaagaggacccactctggcatcttcttggtgattgagtaaccagacaggggatgcagc

SEQ ID NO: 520 - DNA, 79 bp, Homo sapiens
aatttatggaagaggacccactctggcatcttcttggtgattgagtaaccagacaggggatgcagctgagcaacctgct

SEQ ID NO: 521 - DNA, 83 bp, Homo sapiens
atggaagaggacccactctggcatcttcttggtgattgagtaaccagacaggggatgcagctgagcaacctgcttatgtgtca

SEQ ID NO: 522 - DNA, 83 bp, Homo sapiens
actctggcatcttcttggtgattgagtaaccagacaggggatgcagctgagcaacctgcttatgtgtcagcattaagtagtta

SEQ ID NO: 523 - DNA, 84 bp, Homo sapiens
ttcttggtgattgagtaaccagacaggggatgcagctgagcaacctgcttatgtgtcagcattaagtagttacctgatccatca

SEQ ID NO: 524 - DNA, 82 bp, Homo sapiens
attgagtaaccagacaggggatgcagctgagcaacctgcttatgtgtcagcattaagtagttacctgatccatcaacatccc

SEQ ID NO: 525 - DNA, 84 bp, Homo sapiens
agacaggggatgcagctgagcaacctgcttatgtgtcagcattaagtagttacctgatccatcaacatcccgagcaatctgaaa

SEQ ID NO: 526 - DNA, 84 bp, Homo sapiens
atgcagctgagcaacctgcttatgtgtcagcattaagtagttacctgatccatcaacatcccgagcaatctgaaaggcagaatt

SEQ ID NO: 527 - DNA, 79 bp, Homo sapiens
agcaacctgcttatgtgtcagcattaagtagttacctgatccatcaacatcccgagcaatctgaaaggcagaattttaa

SEQ ID NO: 528 - DNA, 76 bp, Homo sapiens
cttatgtgtcagcattaagtagttacctgatccatcaacatcccgagcaatctgaaaggcagaattttaaagaaaa

SEQ ID NO: 529 - DNA, 74 bp, Homo sapiens
tcagcattaagtagttacctgatccatcaacatcccgagcaatctgaaaggcagaattttaaagaaaaaagatt

SEQ ID NO: 530 - DNA, 79 bp, Homo sapiens
tatgtgcaattcagcagagcctatgctgaggtgaccccaccccttctcacctgcataaagtaaccggacagaagagctt

SEQ ID NO: 531 - DNA, 76 bp, Homo sapiens
ttcagcagagcctatgctgaggtgaccccaccccttctcacctgcataaagtaaccggacagaagagctttcttta

SEQ ID NO: 532 - DNA, 72 bp, Homo sapiens
cctatgctgaggtgaccccaccccttctcacctgcataaagtaaccggacagaagagctttctttatgttta

SEQ ID NO: 533 - DNA, 68 bp, Homo sapiens
accccaccccttctcacctgcataaagtaaccggacagaagagctttctttatgtttagagtgttttc

SEQ ID NO: 534 - DNA, 71 bp, Homo sapiens
ttctcacctgcataaagtaaccggacagaagagctttctttatgtttagagtgttttccttggagccaaaa

SEQ ID NO: 535 - DNA, 68 bp, Homo sapiens
ataaagtaaccggacagaagagctttctttatgtttagagtgttttccttggagccaaaagcaggttc

SEQ ID NO: 536 - DNA, 72 bp, Homo sapiens
taaccggacagaagagctttctttatgtttagagtgttttccttggagccaaaagcaggttctgcataggga

SEQ ID NO: 537 - DNA, 74 bp, Homo sapiens
agctttctttatgtttagagtgttttccttggagccaaaagcaggttctgcatagggaagctcgattcgcttga

SEQ ID NO: 538 - DNA, 75 bp, Homo sapiens
ttatgtttagagtgttttccttggagccaaaagcaggttctgcatagggaagctcgattcgcttgataatttcta

SEQ ID NO: 539 - DNA, 76 bp, Homo sapiens
tagagtgttttccttggagccaaaagcaggttctgcatagggaagctcgattcgcttgataatttctaagagttca

SEQ ID NO: 540 - DNA, 78 bp, Homo sapiens
cttggagccaaaagcaggttctgcatagggaagctcgattcgcttgataatttctaagagttcagctcgaataacatc

SEQ ID NO: 541 - DNA, 80 bp, Homo sapiens
aaaagcaggttctgcatagggaagctcgattcgcttgataatttctaagagttcagctcgaataacatctgccattctga

SEQ ID NO: 542 - DNA, 83 bp, Homo sapiens
ttctgcatagggaagctcgattcgcttgataatttctaagagttcagctcgaataacatctgccattctgagtgctgaacagt

SEQ ID NO: 543 - DNA, 81 bp, Homo sapiens
aagctcgattcgcttgataatttctaagagttcagctcgaataacatctgccattctgagtgctgaacagttgaggaagta

SEQ ID NO: 544 - DNA, 81 bp, Homo sapiens
ttgataatttctaagagttcagctcgaataacatctgccattctgagtgctgaacagttgaggaagtaatcacgacaccac

SEQ ID NO: 545 - DNA, 78 bp, Homo sapiens
atttctaagagttcagctcgaataacatctgccattctgagtgctgaacagttgaggaagtaatcacgacaccacttt

SEQ ID NO: 546 - DNA, 80 bp, Homo sapiens
agttcagctcgaataacatctgccattctgagtgctgaacagttgaggaagtaatcacgacaccacttttccacacagtc

SEQ ID NO: 547 - DNA, 78 bp, Homo sapiens
aataacatctgccattctgagtgctgaacagttgaggaagtaatcacgacaccacttttccacacagtctaggaggga

SEQ ID NO: 548 - DNA, 75 bp, Homo sapiens
attctgagtgctgaacagttgaggaagtaatcacgacaccacttttccacacagtctaggagggaaagaacacaa

SEQ ID NO: 549 - DNA, 73 bp, Homo sapiens
tgaacagttgaggaagtaatcacgacaccacttttccacacagtctaggagggaaagaacacaaggctattta

SEQ ID NO: 550 - DNA, 75 bp, Homo sapiens
ggaaaggaaggtggaattaataggtagtttctgagcattcacttacactcactgctagaattcagagttgtgtct

SEQ ID NO: 551 - DNA, 76 bp, Homo sapiens
aaggtggaattaataggtagtttctgagcattcacttacactcactgctagaattcagagttgtgtcttggtaagc

SEQ ID NO: 552 - DNA, 76 bp, Homo sapiens
attaataggtagtttctgagcattcacttacactcactgctagaattcagagttgtgtcttggtaagccttgtaaa

SEQ ID NO: 553 - DNA, 80 bp, Homo sapiens
tttctgagcattcacttacactcactgctagaattcagagttgtgtcttggtaagccttgtaaatgctgatgagggtaaa

SEQ ID NO: 554 - DNA, 79 bp, Homo sapiens
attcacttacactcactgctagaattcagagttgtgtcttggtaagccttgtaaatgctgatgagggtaaagtgatctc

SEQ ID NO: 555 - DNA, 77 bp, Homo sapiens
actgctagaattcagagttgtgtcttggtaagccttgtaaatgctgatgagggtaaagtgatctccttcgggatgta

SEQ ID NO: 556 - DNA, 73 bp, Homo sapiens
aattcagagttgtgtcttggtaagccttgtaaatgctgatgagggtaaagtgatctccttcgggatgtaaaaa

SEQ ID NO: 557 - DNA, 73 bp, Homo sapiens
agttgtgtcttggtaagccttgtaaatgctgatgagggtaaagtgatctccttcgggatgtaaaaatgtcttc

SEQ ID NO: 558 - DNA, 74 bp, Homo sapiens
tggtaagccttgtaaatgctgatgagggtaaagtgatctccttcgggatgtaaaaatgtcttccaacaagtcaa

SEQ ID NO: 559 - DNA, 77 bp, Homo sapiens
tgtaaatgctgatgagggtaaagtgatctccttcgggatgtaaaaatgtcttccaacaagtcaaggcagcctcttca

SEQ ID NO: 560 - DNA, 76 bp, Homo sapiens
atgagggtaaagtgatctccttcgggatgtaaaaatgtcttccaacaagtcaaggcagcctcttcagctccatgtg

SEQ ID NO: 561 - DNA, 79 bp, Homo sapiens
aagtgatctccttcgggatgtaaaaatgtcttccaacaagtcaaggcagcctcttcagctccatgtggcacatgtgaaa

SEQ ID NO: 562 - DNA, 78 bp, Homo sapiens
cttcgggatgtaaaaatgtcttccaacaagtcaaggcagcctcttcagctccatgtggcacatgtgaaaagcaatttg

SEQ ID NO: 563 - DNA, 78 bp, Homo sapiens
ttccaacaagtcaaggcagcctcttcagctccatgtggcacatgtgaaaagcaatttggagcttcaaaatgaaaaagg

SEQ ID NO: 564 - DNA, 81 bp, Homo sapiens
gcagcctcttcagctccatgtggcacatgtgaaaagcaatttggagcttcaaaatgaaaaaggtcacatggttagcaataa

SEQ ID NO: 565 - DNA, 75 bp, Homo sapiens
aaaaaagaaaaggaatagtcattaaggatacctgttaccatggctgcgattgttagcacttcatctacacagtca

SEQ ID NO: 566 - DNA, 78 bp, Homo sapiens
agaaaaggaatagtcattaaggatacctgttaccatggctgcgattgttagcacttcatctacacagtcaaattcaca

SEQ ID NO: 567 - DNA, 81 bp, Homo sapiens
tagtcattaaggatacctgttaccatggctgcgattgttagcacttcatctacacagtcaaattcacaggacgctaagata

SEQ ID NO: 568 - DNA, 80 bp, Homo sapiens
tacctgttaccatggctgcgattgttagcacttcatctacacagtcaaattcacaggacgctaagatagacttcgagagt

SEQ ID NO: 569 - DNA, 83 bp, Homo sapiens
taccatggctgcgattgttagcacttcatctacacagtcaaattcacaggacgctaagatagacttcgagagttgtggatcaa

SEQ ID NO: 570 - DNA, 78 bp, Homo sapiens
attgttagcacttcatctacacagtcaaattcacaggacgctaagatagacttcgagagttgtggatcaagaggaaac

SEQ ID NO: 571 - DNA, 83 bp, Homo sapiens
ttcatctacacagtcaaattcacaggacgctaagatagacttcgagagttgtggatcaagaggaaactctgacatgatgattc

SEQ ID NO: 572 - DNA, 80 bp, Homo sapiens
agtcaaattcacaggacgctaagatagacttcgagagttgtggatcaagaggaaactctgacatgatgattccaaattca

SEQ ID NO: 573 - DNA, 79 bp, Homo sapiens
aattcacaggacgctaagatagacttcgagagttgtggatcaagaggaaactctgacatgatgattccaaattcagaaa

SEQ ID NO: 574 - DNA, 81 bp, Homo sapiens
taagatagacttcgagagttgtggatcaagaggaaactctgacatgatgattccaaattcagaaagatttccatcattatc

SEQ ID NO: 575 - DNA, 81 bp, Homo sapiens
agacttcgagagttgtggatcaagaggaaactctgacatgatgattccaaattcagaaagatttccatcattatccagtgc

SEQ ID NO: 576 - DNA, 84 bp, Homo sapiens
ttgtggatcaagaggaaactctgacatgatgattccaaattcagaaagatttccatcattatccagtgctgccagataatctaa

SEQ ID NO: 577 - DNA, 81 bp, Homo sapiens
aggaaactctgacatgatgattccaaattcagaaagatttccatcattatccagtgctgccagataatctaagtcttccaa

SEQ ID NO: 578 - DNA, 84 bp, Homo sapiens
acatgatgattccaaattcagaaagatttccatcattatccagtgctgccagataatctaagtcttccaatgcctgcatcaaac

SEQ ID NO: 579 - DNA, 80 bp, Homo sapiens
attccaaattcagaaagatttccatcattatccagtgctgccagataatctaagtcttccaatgcctgcatcaaactttc

SEQ ID NO: 580 - DNA, 81 bp, Homo sapiens
gaaagatttccatcattatccagtgctgccagataatctaagtcttccaatgcctgcatcaaactttctggtgctaggaaa

SEQ ID NO: 581 - DNA, 80 bp, Homo sapiens
atttccatcattatccagtgctgccagataatctaagtcttccaatgcctgcatcaaactttctggtgctaggaaaggaa

SEQ ID NO: 582 - DNA, 77 bp, Homo sapiens
ttatccagtgctgccagataatctaagtcttccaatgcctgcatcaaactttctggtgctaggaaaggaaaaaaata

SEQ ID NO: 583 - DNA, 82 bp, Homo sapiens
agaaggtgaatctcagcctaatgcctggctgacatgggagcataaggctacctggtctgttcatgaagtcacagtggcctag

SEQ ID NO: 584 - DNA, 82 bp, Homo sapiens
agcctaatgcctggctgacatgggagcataaggctacctggtctgttcatgaagtcacagtggcctaggcccgcaatgtcta

SEQ ID NO: 585 - DNA, 83 bp, Homo sapiens
tggctgacatgggagcataaggctacctggtctgttcatgaagtcacagtggcctaggcccgcaatgtctatcctcttcataa

SEQ ID NO: 586 - DNA, 78 bp, Homo sapiens
atgggagcataaggctacctggtctgttcatgaagtcacagtggcctaggcccgcaatgtctatcctcttcataaaaa

SEQ ID NO: 587 - DNA, 79 bp, Homo sapiens
ataaggctacctggtctgttcatgaagtcacagtggcctaggcccgcaatgtctatcctcttcataaaaagcaccatgc

SEQ ID NO: 588 - DNA, 79 bp, Homo sapiens
tctgttcatgaagtcacagtggcctaggcccgcaatgtctatcctcttcataaaaagcaccatgcttgttaggttggct

SEQ ID NO: 589 - DNA, 77 bp, Homo sapiens
aagtcacagtggcctaggcccgcaatgtctatcctcttcataaaaagcaccatgcttgttaggttggcttcctgcat

SEQ ID NO: 590 - DNA, 78 bp, Homo sapiens
acagtggcctaggcccgcaatgtctatcctcttcataaaaagcaccatgcttgttaggttggcttcctgcatttctgc

SEQ ID NO: 591 - DNA, 79 bp, Homo sapiens
aggcccgcaatgtctatcctcttcataaaaagcaccatgcttgttaggttggcttcctgcatttctgctggcttcagtg

SEQ ID NO: 592 - DNA, 81 bp, Homo sapiens
tatcctcttcataaaaagcaccatgcttgttaggttggcttcctgcatttctgctggcttcagtggcgtcatgtctttgga

SEQ ID NO: 593 - DNA, 78 bp, Homo sapiens
ataaaaagcaccatgcttgttaggttggcttcctgcatttctgctggcttcagtggcgtcatgtctttggaggcaaat

SEQ ID NO: 594 - DNA, 80 bp, Homo sapiens
accatgcttgttaggttggcttcctgcatttctgctggcttcagtggcgtcatgtctttggaggcaaattcttcagtgta

SEQ ID NO: 595 - DNA, 80 bp, Homo sapiens
ttaggttggcttcctgcatttctgctggcttcagtggcgtcatgtctttggaggcaaattcttcagtgtacaggcagaaa

SEQ ID NO: 596 - DNA, 78 bp, Homo sapiens
ttcctgcatttctgctggcttcagtggcgtcatgtctttggaggcaaattcttcagtgtacaggcagaaaaattttcc

SEQ ID NO: 597 - DNA, 75 bp, Homo sapiens
atttctgctggcttcagtggcgtcatgtctttggaggcaaattcttcagtgtacaggcagaaaaattttcctaaa

SEQ ID NO: 598 - DNA, 72 bp, Homo sapiens
agtggcgtcatgtctttggaggcaaattcttcagtgtacaggcagaaaaattttcctaaaagacaccaagaa

SEQ ID NO: 599 - DNA, 70 bp, Homo sapiens
cgtcatgtctttggaggcaaattcttcagtgtacaggcagaaaaattttcctaaaagacaccaagaaaaa

SEQ ID NO: 600 - DNA, 69 bp, Homo sapiens
ttggaggcaaattcttcagtgtacaggcagaaaaattttcctaaaagacaccaagaaaaatggctttaa

SEQ ID NO: 601 - DNA, 84 bp, Homo sapiens
tgcatacaagaattgacaacatttagtatttgtgtccacagcactacctgaagaagatgagccaagaatctgcttgcgtatctc

SEQ ID NO: 602 - DNA, 81 bp, Homo sapiens
aagaattgacaacatttagtatttgtgtccacagcactacctgaagaagatgagccaagaatctgcttgcgtatctctgcc

SEQ ID NO: 603 - DNA, 84 bp, Homo sapiens
aacatttagtatttgtgtccacagcactacctgaagaagatgagccaagaatctgcttgcgtatctctgcctggctctggctga

SEQ ID NO: 604 - DNA, 90 bp, Homo sapiens
tatttgtgtccacagcactacctgaagaagatgagccaagaatctgcttgcgtatctctgcctggctctggctgatgggctgcatgacga

SEQ ID NO: 605 - DNA, 88 bp, Homo sapiens
cactacctgaagaagatgagccaagaatctgcttgcgtatctctgcctggctctggctgatgggctgcatgacgagcgagtttgctct

SEQ ID NO: 606 - DNA, 87 bp, Homo sapiens
aagaagatgagccaagaatctgcttgcgtatctctgcctggctctggctgatgggctgcatgacgagcgagtttgctcttattctcg

SEQ ID NO: 607 - DNA, 85 bp, Homo sapiens
ccaagaatctgcttgcgtatctctgcctggctctggctgatgggctgcatgacgagcgagtttgctcttattctcgggttgtaca

SEQ ID NO: 608 - DNA, 83 bp, Homo sapiens
tgcttgcgtatctctgcctggctctggctgatgggctgcatgacgagcgagtttgctcttattctcgggttgtacacctttaa

SEQ ID NO: 609 - DNA, 81 bp, Homo sapiens
tatctctgcctggctctggctgatgggctgcatgacgagcgagtttgctcttattctcgggttgtacacctttaaatggaa

SEQ ID NO: 610 - DNA, 78 bp, Homo sapiens
cctggctctggctgatgggctgcatgacgagcgagtttgctcttattctcgggttgtacacctttaaatggaaagaca

SEQ ID NO: 611 - DNA, 79 bp, Homo sapiens
atgggctgcatgacgagcgagtttgctcttattctcgggttgtacacctttaaatggaaagacagcatcattagcgtca

SEQ ID NO: 612 - DNA, 76 bp, Homo sapiens
atgacgagcgagtttgctcttattctcgggttgtacacctttaaatggaaagacagcatcattagcgtcagataag

SEQ ID NO: 613 - DNA, 75 bp, Homo sapiens
cttgacaacgatcagcagtctgtttagcctactcaataataattacctttcttctttccacacccacatcgataa

SEQ ID NO: 614 - DNA, 73 bp, Homo sapiens
aacgatcagcagtctgtttagcctactcaataataattacctttcttctttccacacccacatcgataacaaa

SEQ ID NO: 615 - DNA, 73 bp, Homo sapiens
agtctgtttagcctactcaataataattacctttcttctttccacacccacatcgataacaaatctgactgag

SEQ ID NO: 616 - DNA, 76 bp, Homo sapiens
tactcaataataattacctttcttctttccacacccacatcgataacaaatctgactgagttgctccagatcaaaa

SEQ ID NO: 617 - DNA, 74 bp, Homo sapiens
ataataattacctttcttctttccacacccacatcgataacaaatctgactgagttgctccagatcaaaaactc

SEQ ID NO: 618 - DNA, 78 bp, Homo sapiens
tcttctttccacacccacatcgataacaaatctgactgagttgctccagatcaaaaactctccagagctagtagttaa

SEQ ID NO: 619 - DNA, 77 bp, Homo sapiens
acacccacatcgataacaaatctgactgagttgctccagatcaaaaactctccagagctagtagttaacaccactct

SEQ ID NO: 620 - DNA, 77 bp, Homo sapiens
gataacaaatctgactgagttgctccagatcaaaaactctccagagctagtagttaacaccactcttctttgataaa

SEQ ID NO: 621 - DNA, 75 bp, Homo sapiens
aaatctgactgagttgctccagatcaaaaactctccagagctagtagttaacaccactcttctttgataaacttg

SEQ ID NO: 622 - DNA, 73 bp, Homo sapiens
agttgctccagatcaaaaactctccagagctagtagttaacaccactcttctttgataaacttggcatctttt

SEQ ID NO: 623 - DNA, 71 bp, Homo sapiens
agatcaaaaactctccagagctagtagttaacaccactcttctttgataaacttggcatcttttttctgtt

SEQ ID NO: 624 - DNA, 75 bp, Homo sapiens
tccagagctagtagttaacaccactcttctttgataaacttggcatcttttttctgtttcatcgagtggcttgaa

SEQ ID NO: 625 - DNA, 74 bp, Homo sapiens
tagtagttaacaccactcttctttgataaacttggcatcttttttctgtttcatcgagtggcttgaacaatgaa

SEQ ID NO: 626 - DNA, 73 bp, Homo sapiens
accactcttctttgataaacttggcatcttttttctgtttcatcgagtggcttgaacaatgaacatttctctt

SEQ ID NO: 627 - DNA, 75 bp, Homo sapiens
tgataaacttggcatcttttttctgtttcatcgagtggcttgaacaatgaacatttctcttttggatacaaagga

SEQ ID NO: 628 - DNA, 73 bp, Homo sapiens
aacttggcatcttttttctgtttcatcgagtggcttgaacaatgaacatttctcttttggatacaaaggaaca

SEQ ID NO: 629 - DNA, 72 bp, Homo sapiens
tttttctgtttcatcgagtggcttgaacaatgaacatttctcttttggatacaaaggaacaaccaccagttc

SEQ ID NO: 630 - DNA, 75 bp, Homo sapiens
tttcatcgagtggcttgaacaatgaacatttctcttttggatacaaaggaacaaccaccagttctccaagatctg

SEQ ID NO: 631 - DNA, 71 bp, Homo sapiens
tgaacaatgaacatttctcttttggatacaaaggaacaaccaccagttctccaagatctgggtttaggtta

SEQ ID NO: 632 - DNA, 70 bp, Homo sapiens
acatttctcttttggatacaaaggaacaaccaccagttctccaagatctgggtttaggttagatccttga

SEQ ID NO: 633 - DNA, 70 bp, Homo sapiens
ttttggatacaaaggaacaaccaccagttctccaagatctgggtttaggttagatccttgatagacagtt

SEQ ID NO: 634 - DNA, 70 bp, Homo sapiens
aaaggaacaaccaccagttctccaagatctgggtttaggttagatccttgatagacagtttcacagactt

SEQ ID NO: 635 - DNA, 74 bp, Homo sapiens
caccagttctccaagatctgggtttaggttagatccttgatagacagtttcacagactttctcaatatcctaaa

SEQ ID NO: 636 - DNA, 73 bp, Homo sapiens
ttctccaagatctgggtttaggttagatccttgatagacagtttcacagactttctcaatatcctaaagaaaa

SEQ ID NO: 637 - DNA, 69 bp, Homo sapiens
gaaaaaaaaacccatgaaaataaaatacaatgcaaacaacatcactattaaaaaaatgtctgaattaca

SEQ ID NO: 638 - DNA, 72 bp, Homo sapiens
tgcaaacaacatcactattaaaaaaatgtctgaattacaaaaaattttaggcaatactacgtaacagataca

SEQ ID NO: 639 - DNA, 70 bp, Homo sapiens
caacatcactattaaaaaaatgtctgaattacaaaaaattttaggcaatactacgtaacagatacaggga

SEQ ID NO: 640 - DNA, 67 bp, Homo sapiens
aaaaatgtctgaattacaaaaaattttaggcaatactacgtaacagatacagggaaagaaatccctg

SEQ ID NO: 641 - DNA, 72 bp, Homo sapiens
aaattttaggcaatactacgtaacagatacagggaaagaaatccctgtgttgctgcctacatgtatctttaa

SEQ ID NO: 642 - DNA, 74 bp, Homo sapiens
ttaggcaatactacgtaacagatacagggaaagaaatccctgtgttgctgcctacatgtatctttaaataagta

SEQ ID NO: 643 - DNA, 76 bp, Homo sapiens
taacagatacagggaaagaaatccctgtgttgctgcctacatgtatctttaaataagtaaagatgcacctaaatga

SEQ ID NO: 644 - DNA, 74 bp, Homo sapiens
tacagggaaagaaatccctgtgttgctgcctacatgtatctttaaataagtaaagatgcacctaaatgagaaaa

SEQ ID NO: 645 - DNA, 72 bp, Homo sapiens
aagaaatccctgtgttgctgcctacatgtatctttaaataagtaaagatgcacctaaatgagaaaacgtctt

SEQ ID NO: 646 - DNA, 73 bp, Homo sapiens
tgtgttgctgcctacatgtatctttaaataagtaaagatgcacctaaatgagaaaacgtctttggggaagtta

SEQ ID NO: 647 - DNA, 71 bp, Homo sapiens
gttgctgcctacatgtatctttaaataagtaaagatgcacctaaatgagaaaacgtctttggggaagttaa

SEQ ID NO: 648 - DNA, 71 bp, Homo sapiens
gctgcctacatgtatctttaaataagtaaagatgcacctaaatgagaaaacgtctttggggaagttaaata

SEQ ID NO: 649 - DNA, 66 bp, Homo sapiens
ctttaaataagtaaagatgcacctaaatgagaaaacgtctttggggaagttaaatataatttatat

SEQ ID NO: 650 - DNA, 67 bp, Homo sapiens
agtaaagatgcacctaaatgagaaaacgtctttggggaagttaaatataatttatattgttttccca

SEQ ID NO: 651 - DNA, 67 bp, Homo sapiens
agatgcacctaaatgagaaaacgtctttggggaagttaaatataatttatattgttttcccatttaa

SEQ ID NO: 652 - DNA, 65 bp, Homo sapiens
atgagaaaacgtctttggggaagttaaatataatttatattgttttcccatttaattttgttaga

SEQ ID NO: 653 - DNA, 65 bp, Homo sapiens
acgtctttggggaagttaaatataatttatattgttttcccatttaattttgttagatttcacta

SEQ ID NO: 654 - DNA, 65 bp, Homo sapiens
ggaagttaaatataatttatattgttttcccatttaattttgttagatttcactaaaaatctaag

SEQ ID NO: 655 - DNA, 66 bp, Homo sapiens
tttatattgttttcccatttaattttgttagatttcactaaaaatctaagtaaaaaagatgacttc

SEQ ID NO: 656 - DNA, 71 bp, Homo sapiens
gatttcactaaaaatctaagtaaaaaagatgacttcccacaactgccatagtttttacagctcaattccat

SEQ ID NO: 657 - DNA, 74 bp, Homo sapiens
taagtaaaaaagatgacttcccacaactgccatagtttttacagctcaattccattctctaggtctctagctta

SEQ ID NO: 658 - DNA, 75 bp, Homo sapiens
atgacttcccacaactgccatagtttttacagctcaattccattctctaggtctctagcttatgtctctttcctt

SEQ ID NO: 659 - DNA, 74 bp, Homo sapiens
aactgccatagtttttacagctcaattccattctctaggtctctagcttatgtctctttcctttccataccatt

SEQ ID NO: 660 - DNA, 75 bp, Homo sapiens
ctcaattccattctctaggtctctagcttatgtctctttcctttccataccatttgtagaatgggattgaattaa

SEQ ID NO: 661 - DNA, 75 bp, Homo sapiens
ttccattctctaggtctctagcttatgtctctttcctttccataccatttgtagaatgggattgaattaactcaa

SEQ ID NO: 662 - DNA, 72 bp, Homo sapiens
gtctctagcttatgtctctttcctttccataccatttgtagaatgggattgaattaactcaagggttttgta

SEQ ID NO: 663 - DNA, 70 bp, Homo sapiens
cttatgtctctttcctttccataccatttgtagaatgggattgaattaactcaagggttttgtaggaaga

SEQ ID NO: 664 - DNA, 72 bp, Homo sapiens
ctttccataccatttgtagaatgggattgaattaactcaagggttttgtaggaagacagatccatctagaaa

SEQ ID NO: 665 - DNA, 74 bp, Homo sapiens
cataccatttgtagaatgggattgaattaactcaagggttttgtaggaagacagatccatctagaaaaatagca

SEQ ID NO: 666 - DNA, 74 bp, Homo sapiens
gtagaatgggattgaattaactcaagggttttgtaggaagacagatccatctagaaaaatagcaaggtatcaca

SEQ ID NO: 667 - DNA, 75 bp, Homo sapiens
ttgaattaactcaagggttttgtaggaagacagatccatctagaaaaatagcaaggtatcacaggtcactgagaa

SEQ ID NO: 668 - DNA, 75 bp, Homo sapiens
aagggttttgtaggaagacagatccatctagaaaaatagcaaggtatcacaggtcactgagaactaggtgagctg

SEQ ID NO: 669 - DNA, 79 bp, Homo sapiens
ttgtaggaagacagatccatctagaaaaatagcaaggtatcacaggtcactgagaactaggtgagctgtgctcgtttcc

SEQ ID NO: 670 - DNA, 80 bp, Homo sapiens
acagatccatctagaaaaatagcaaggtatcacaggtcactgagaactaggtgagctgtgctcgtttcctggtctgctaa

SEQ ID NO: 671 - DNA, 79 bp, Homo sapiens
tagaaaaatagcaaggtatcacaggtcactgagaactaggtgagctgtgctcgtttcctggtctgctaagtggctccca

SEQ ID NO: 672 - DNA, 79 bp, Homo sapiens
agcaaggtatcacaggtcactgagaactaggtgagctgtgctcgtttcctggtctgctaagtggctcccaggaagctgg

SEQ ID NO: 673 - DNA, 79 bp, Homo sapiens
aggtcactgagaactaggtgagctgtgctcgtttcctggtctgctaagtggctcccaggaagctgggcagaggccgctc

SEQ ID NO: 674 - DNA, 78 bp, Homo sapiens
tgagaactaggtgagctgtgctcgtttcctggtctgctaagtggctcccaggaagctgggcagaggccgctccagggg

SEQ ID NO: 675 - DNA, 79 bp, Homo sapiens
gtgagctgtgctcgtttcctggtctgctaagtggctcccaggaagctgggcagaggccgctccagggggtcccacatca

SEQ ID NO: 676 - DNA, 77 bp, Homo sapiens
tttcctggtctgctaagtggctcccaggaagctgggcagaggccgctccagggggtcccacatcagctggtacacag

SEQ ID NO: 677 - DNA, 76 bp, Homo sapiens
tcccaggaagctgggcagaggccgctccagggggtcccacatcagctggtacacaggtacggtcccttgcttgcac

SEQ ID NO: 678 - DNA, 72 bp, Homo sapiens
agaggccgctccagggggtcccacatcagctggtacacaggtacggtcccttgcttgcacttcctttttcca

SEQ ID NO: 679 - DNA, 73 bp, Homo sapiens
ggggtcccacatcagctggtacacaggtacggtcccttgcttgcacttcctttttccacatataattgaatta

SEQ ID NO: 680 - DNA, 73 bp, Homo sapiens
cccacatcagctggtacacaggtacggtcccttgcttgcacttcctttttccacatataattgaattacttgg

SEQ ID NO: 681 - DNA, 70 bp, Homo sapiens
tacacaggtacggtcccttgcttgcacttcctttttccacatataattgaattacttggggcagattttt

SEQ ID NO: 682 - DNA, 69 bp, Homo sapiens
gtacggtcccttgcttgcacttcctttttccacatataattgaattacttggggcagattttttaccaa

SEQ ID NO: 683 - DNA, 75 bp, Homo sapiens
tttttccacatataattgaattacttggggcagattttttaccaagcaaacagcatggctgttgatcctaatgag

SEQ ID NO: 684 - DNA, 75 bp, Homo sapiens
ttgaattacttggggcagattttttaccaagcaaacagcatggctgttgatcctaatgagtgaaaacttgccaat

SEQ ID NO: 685 - DNA, 74 bp, Homo sapiens
aaacagcatggctgttgatcctaatgagtgaaaacttgccaattggaataatgagaacaaaacgttttctccat

SEQ ID NO: 686 - DNA, 73 bp, Homo sapiens
ggctgttgatcctaatgagtgaaaacttgccaattggaataatgagaacaaaacgttttctccattcttataa

SEQ ID NO: 687 - DNA, 72 bp, Homo sapiens
cctaatgagtgaaaacttgccaattggaataatgagaacaaaacgttttctccattcttataattctgatta

SEQ ID NO: 688 - DNA, 71 bp, Homo sapiens
ccaaatgaaataccttattactgtaaggttagagtatcacttacttacttgttcacaggccagaaagacta

SEQ ID NO: 689 - DNA, 73 bp, Homo sapiens
ttactgtaaggttagagtatcacttacttacttgttcacaggccagaaagactacaatgtcacctttctcacc

SEQ ID NO: 690 - DNA, 74 bp, Homo sapiens
agtatcacttacttacttgttcacaggccagaaagactacaatgtcacctttctcacccgagtggtgaatttca

SEQ ID NO: 691 - DNA, 73 bp, Homo sapiens
ttacttacttgttcacaggccagaaagactacaatgtcacctttctcacccgagtggtgaatttcaaagataa

SEQ ID NO: 692 - DNA, 73 bp, Homo sapiens
ttcacaggccagaaagactacaatgtcacctttctcacccgagtggtgaatttcaaagataaggcgtaaaata

SEQ ID NO: 693 - DNA, 71 bp, Homo sapiens
agaaagactacaatgtcacctttctcacccgagtggtgaatttcaaagataaggcgtaaaatagactcaaa

SEQ ID NO: 694 - DNA, 69 bp, Homo sapiens
aatgtcacctttctcacccgagtggtgaatttcaaagataaggcgtaaaatagactcaaaagaatcctt

SEQ ID NO: 695 - DNA, 69 bp, Homo sapiens
acctttctcacccgagtggtgaatttcaaagataaggcgtaaaatagactcaaaagaatccttttgagc

SEQ ID NO: 696 - DNA, 71 bp, Homo sapiens
agtggtgaatttcaaagataaggcgtaaaatagactcaaaagaatccttttgagcctcactaaggtacaca

SEQ ID NO: 697 - DNA, 69 bp, Homo sapiens
aatttcaaagataaggcgtaaaatagactcaaaagaatccttttgagcctcactaaggtacacaacctc

SEQ ID NO: 698 - DNA, 69 bp, Homo sapiens
ataaggcgtaaaatagactcaaaagaatccttttgagcctcactaaggtacacaacctccacagggtgt

SEQ ID NO: 699 - DNA, 67 bp, Homo sapiens
aaaatagactcaaaagaatccttttgagcctcactaaggtacacaacctccacagggtgtttatttt

SEQ ID NO: 700 - DNA, 70 bp, Homo sapiens
aaaagaatccttttgagcctcactaaggtacacaacctccacagggtgtttatttttcacttctatgaca

SEQ ID NO: 701 - DNA, 74 bp, Homo sapiens
tgagcctcactaaggtacacaacctccacagggtgtttatttttcacttctatgacaggcacgtttccataata

SEQ ID NO: 702 - DNA, 72 bp, Homo sapiens
taaggtacacaacctccacagggtgtttatttttcacttctatgacaggcacgtttccataataagaattga

SEQ ID NO: 703 - DNA, 73 bp, Homo sapiens
tacacaacctccacagggtgtttatttttcacttctatgacaggcacgtttccataataagaattgagtttgc

SEQ ID NO: 704 - DNA, 75 bp, Homo sapiens
agggtgtttatttttcacttctatgacaggcacgtttccataataagaattgagtttgctgatcaggtgaggtga

SEQ ID NO: 705 - DNA, 76 bp, Homo sapiens
tttttcacttctatgacaggcacgtttccataataagaattgagtttgctgatcaggtgaggtgaggagttaatta

SEQ ID NO: 706 - DNA, 79 bp, Homo sapiens
acttctatgacaggcacgtttccataataagaattgagtttgctgatcaggtgaggtgaggagttaattatgagcttca

SEQ ID NO: 707 - DNA, 77 bp, Homo sapiens
acgtttccataataagaattgagtttgctgatcaggtgaggtgaggagttaattatgagcttcagttctggtcttgc

SEQ ID NO: 708 - DNA, 77 bp, Homo sapiens
ataataagaattgagtttgctgatcaggtgaggtgaggagttaattatgagcttcagttctggtcttgctagtaaaa

SEQ ID NO: 709 - DNA, 77 bp, Homo sapiens
aattgagtttgctgatcaggtgaggtgaggagttaattatgagcttcagttctggtcttgctagtaaaacatcttta

SEQ ID NO: 710 - DNA, 74 bp, Homo sapiens
atcaggtgaggtgaggagttaattatgagcttcagttctggtcttgctagtaaaacatctttaagaagtccaag

SEQ ID NO: 711 - DNA, 73 bp, Homo sapiens
aggtgaggagttaattatgagcttcagttctggtcttgctagtaaaacatctttaagaagtccaagtaacaca

SEQ ID NO: 712 - DNA, 75 bp, Homo sapiens
agttaattatgagcttcagttctggtcttgctagtaaaacatctttaagaagtccaagtaacacatcagttgcaa

SEQ ID NO: 713 - DNA, 78 bp, Homo sapiens
ttcagttctggtcttgctagtaaaacatctttaagaagtccaagtaacacatcagttgcaatgcttctttcatgaata

SEQ ID NO: 714 - DNA, 80 bp, Homo sapiens
ttctggtcttgctagtaaaacatctttaagaagtccaagtaacacatcagttgcaatgcttctttcatgaatatcatcta

SEQ ID NO: 715 - DNA, 81 bp, Homo sapiens
ttaagaagtccaagtaacacatcagttgcaatgcttctttcatgaatatcatctaagatgatgaccccatagctacccaaa

SEQ ID NO: 716 - DNA, 79 bp, Homo sapiens
aagtccaagtaacacatcagttgcaatgcttctttcatgaatatcatctaagatgatgaccccatagctacccaaaaaa

SEQ ID NO: 717 - DNA, 85 bp, Homo sapiens
ttcatgaatatcatctaagatgatgaccccatagctacccaaaaaaggattggacatcatttctctttgcagcatatcatcagta

SEQ ID NO: 718 - DNA, 83 bp, Homo sapiens
atatcatctaagatgatgaccccatagctacccaaaaaaggattggacatcatttctctttgcagcatatcatcagtacaata

SEQ ID NO: 719 - DNA, 79 bp, Homo sapiens
atgatgaccccatagctacccaaaaaaggattggacatcatttctctttgcagcatatcatcagtacaatacctataaa

SEQ ID NO: 720 - DNA, 77 bp, Homo sapiens
atagctacccaaaaaaggattggacatcatttctctttgcagcatatcatcagtacaatacctataaagaagaaaca

SEQ ID NO: 721 - DNA, 76 bp, Homo sapiens
aaaaggattggacatcatttctctttgcagcatatcatcagtacaatacctataaagaagaaacattaaagttaga

SEQ ID NO: 722 - DNA, 79 bp, Homo sapiens
ggacatcatttctctttgcagcatatcatcagtacaatacctataaagaagaaacattaaagttagaatattcttatgc

SEQ ID NO: 723 - DNA, 72 bp, Homo sapiens
acctaagccaagaatcatcagcagggagcggactgaaccccacaaaccaacctcaggattgtttcgttggta

SEQ ID NO: 724 - DNA, 74 bp, Homo sapiens
atcatcagcagggagcggactgaaccccacaaaccaacctcaggattgtttcgttggtacagcagttctcgaaa

SEQ ID NO: 725 - DNA, 69 bp, Homo sapiens
agggagcggactgaaccccacaaaccaacctcaggattgtttcgttggtacagcagttctcgaaaggga

SEQ ID NO: 726 - DNA, 69 bp, Homo sapiens
aaccccacaaaccaacctcaggattgtttcgttggtacagcagttctcgaaagggatcacgtagccaac

SEQ ID NO: 727 - DNA, 72 bp, Homo sapiens
aaaccaacctcaggattgtttcgttggtacagcagttctcgaaagggatcacgtagccaacctcatgaccaa

SEQ ID NO: 728 - DNA, 74 bp, Homo sapiens
aggattgtttcgttggtacagcagttctcgaaagggatcacgtagccaacctcatgaccaatgttaacatccat

SEQ ID NO: 729 - DNA, 75 bp, Homo sapiens
gtttcgttggtacagcagttctcgaaagggatcacgtagccaacctcatgaccaatgttaacatccatttcatcc

SEQ ID NO: 730 - DNA, 77 bp, Homo sapiens
tacagcagttctcgaaagggatcacgtagccaacctcatgaccaatgttaacatccatttcatccgccacccgcagg

SEQ ID NO: 731 - DNA, 76 bp, Homo sapiens
aaagggatcacgtagccaacctcatgaccaatgttaacatccatttcatccgccacccgcagggcgagctggacca

SEQ ID NO: 732 - DNA, 79 bp, Homo sapiens
atcacgtagccaacctcatgaccaatgttaacatccatttcatccgccacccgcagggcgagctggaccacagtctgct

SEQ ID NO: 733 - DNA, 85 bp, Homo sapiens
tcatgaccaatgttaacatccatttcatccgccacccgcagggcgagctggaccacagtctgcttgtggacctgtgtgcatatca

SEQ ID NO: 734 - DNA, 81 bp, Homo sapiens
accaatgttaacatccatttcatccgccacccgcagggcgagctggaccacagtctgcttgtggacctgtgtgcatatcac

SEQ ID NO: 735 - DNA, 81 bp, Homo sapiens
catttcatccgccacccgcagggcgagctggaccacagtctgcttgtggacctgtgtgcatatcacgcccccgtgctggta

SEQ ID NO: 736 - DNA, 81 bp, Homo sapiens
gccacccgcagggcgagctggaccacagtctgcttgtggacctgtgtgcatatcacgcccccgtgctggtagtggatggaa

SEQ ID NO: 737 - DNA, 80 bp, Homo sapiens
agggcgagctggaccacagtctgcttgtggacctgtgtgcatatcacgcccccgtgctggtagtggatggaaagacaata

SEQ ID NO: 738 - DNA, 83 bp, Homo sapiens
agctggaccacagtctgcttgtggacctgtgtgcatatcacgcccccgtgctggtagtggatggaaagacaatattcagcaca

SEQ ID NO: 739 - DNA, 82 bp, Homo sapiens
agtctgcttgtggacctgtgtgcatatcacgcccccgtgctggtagtggatggaaagacaatattcagcacaccactgagga

SEQ ID NO: 740 - DNA, 80 bp, Homo sapiens
gtggacctgtgtgcatatcacgcccccgtgctggtagtggatggaaagacaatattcagcacaccactgaggaacctgta

SEQ ID NO: 741 - DNA, 76 bp, Homo sapiens
atatcacgcccccgtgctggtagtggatggaaagacaatattcagcacaccactgaggaacctgtagcaggaaaaa

SEQ ID NO: 742 - DNA, 79 bp, Homo sapiens
ccgtgctggtagtggatggaaagacaatattcagcacaccactgaggaacctgtagcaggaaaaaatgagacaggatca

SEQ ID NO: 743 - DNA, 75 bp, Homo sapiens
aaaaatcaacacatacagcaaattattttttgtagtggttactcacctgagcgctcttaccacatttagcatctc

SEQ ID NO: 744 - DNA, 77 bp, Homo sapiens
acatacagcaaattattttttgtagtggttactcacctgagcgctcttaccacatttagcatctcctgaaacaatca

SEQ ID NO: 745 - DNA, 75 bp, Homo sapiens
aattattttttgtagtggttactcacctgagcgctcttaccacatttagcatctcctgaaacaatcacgatttga

SEQ ID NO: 746 - DNA, 76 bp, Homo sapiens
tttttgtagtggttactcacctgagcgctcttaccacatttagcatctcctgaaacaatcacgatttgattttgaa

SEQ ID NO: 747 - DNA, 79 bp, Homo sapiens
ttactcacctgagcgctcttaccacatttagcatctcctgaaacaatcacgatttgattttgaagcaggttctccataa

SEQ ID NO: 748 - DNA, 76 bp, Homo sapiens
gcgctcttaccacatttagcatctcctgaaacaatcacgatttgattttgaagcaggttctccataaaggagtatt

SEQ ID NO: 749 - DNA, 73 bp, Homo sapiens
cttaccacatttagcatctcctgaaacaatcacgatttgattttgaagcaggttctccataaaggagtatttt

SEQ ID NO: 750 - DNA, 75 bp, Homo sapiens
tagcatctcctgaaacaatcacgatttgattttgaagcaggttctccataaaggagtatttttctttccatatag

SEQ ID NO: 751 - DNA, 73 bp, Homo sapiens
ctgaaacaatcacgatttgattttgaagcaggttctccataaaggagtatttttctttccatataggaagatc

SEQ ID NO: 752 - DNA, 72 bp, Homo sapiens
cacgatttgattttgaagcaggttctccataaaggagtatttttctttccatataggaagatcttctctttc

SEQ ID NO: 753 - DNA, 71 bp, Homo sapiens
ttttgaagcaggttctccataaaggagtatttttctttccatataggaagatcttctctttctttcagaag

SEQ ID NO: 754 - DNA, 71 bp, Homo sapiens
tccataaaggagtatttttctttccatataggaagatcttctctttctttcagaagtttataataacgtga

SEQ ID NO: 755 - DNA, 74 bp, Homo sapiens
ggagtatttttctttccatataggaagatcttctctttctttcagaagtttataataacgtgatgaatatggca

SEQ ID NO: 756 - DNA, 75 bp, Homo sapiens
tttccatataggaagatcttctctttctttcagaagtttataataacgtgatgaatatggcaatccatcaaaggg

SEQ ID NO: 757 - DNA, 72 bp, Homo sapiens
aggaagatcttctctttctttcagaagtttataataacgtgatgaatatggcaatccatcaaaggggttaag

SEQ ID NO: 758 - DNA, 71 bp, Homo sapiens
ctctttctttcagaagtttataataacgtgatgaatatggcaatccatcaaaggggttaagttccaaatcc

SEQ ID NO: 759 - DNA, 73 bp, Homo sapiens
cagaagtttataataacgtgatgaatatggcaatccatcaaaggggttaagttccaaatcctcacaggccaaa

SEQ ID NO: 760 - DNA, 72 bp, Homo sapiens
tttataataacgtgatgaatatggcaatccatcaaaggggttaagttccaaatcctcacaggccaaaacctc

SEQ ID NO: 761 - DNA, 73 bp, Homo sapiens
acgtgatgaatatggcaatccatcaaaggggttaagttccaaatcctcacaggccaaaacctcttcctcatcc

SEQ ID NO: 762 - DNA, 72 bp, Homo sapiens
caatccatcaaaggggttaagttccaaatcctcacaggccaaaacctcttcctcatccccatcgctggaatc

SEQ ID NO: 763 - DNA, 70 bp, Homo sapiens
atcaaaggggttaagttccaaatcctcacaggccaaaacctcttcctcatccccatcgctggaatccagg

SEQ ID NO: 764 - DNA, 73 bp, Homo sapiens
taagttccaaatcctcacaggccaaaacctcttcctcatccccatcgctggaatccagggattcaggaaaata

SEQ ID NO: 765 - DNA, 71 bp, Homo sapiens
aatcctcacaggccaaaacctcttcctcatccccatcgctggaatccagggattcaggaaaatagcgtttt

SEQ ID NO: 766 - DNA, 70 bp, Homo sapiens
aaaacctcttcctcatccccatcgctggaatccagggattcaggaaaatagcgtttttcagaggaagagt

SEQ ID NO: 767 - DNA, 74 bp, Homo sapiens
ttcctcatccccatcgctggaatccagggattcaggaaaatagcgtttttcagaggaagagtttggacactcca

SEQ ID NO: 768 - DNA, 72 bp, Homo sapiens
atcgctggaatccagggattcaggaaaatagcgtttttcagaggaagagtttggacactccagcccttcttc

SEQ ID NO: 769 - DNA, 71 bp, Homo sapiens
aatccagggattcaggaaaatagcgtttttcagaggaagagtttggacactccagcccttcttcttccatc

SEQ ID NO: 770 - DNA, 73 bp, Homo sapiens
attcaggaaaatagcgtttttcagaggaagagtttggacactccagcccttcttcttccatcttgtctgacag

SEQ ID NO: 771 - DNA, 77 bp, Homo sapiens
aaatagcgtttttcagaggaagagtttggacactccagcccttcttcttccatcttgtctgacagtgagctcacgca

SEQ ID NO: 772 - DNA, 82 bp, Homo sapiens
tttcagaggaagagtttggacactccagcccttcttcttccatcttgtctgacagtgagctcacgcagctgacattccacaa

SEQ ID NO: 773 - DNA, 82 bp, Homo sapiens
tttggacactccagcccttcttcttccatcttgtctgacagtgagctcacgcagctgacattccacaagcaagtttctccta

SEQ ID NO: 774 - DNA, 82 bp, Homo sapiens
actccagcccttcttcttccatcttgtctgacagtgagctcacgcagctgacattccacaagcaagtttctcctatcagtaa

SEQ ID NO: 775 - DNA, 83 bp, Homo sapiens
ttcttccatcttgtctgacagtgagctcacgcagctgacattccacaagcaagtttctcctatcagtaacccattgcaaacag

SEQ ID NO: 776 - DNA, 78 bp, Homo sapiens
tgagctcacgcagctgacattccacaagcaagtttctcctatcagtaacccattgcaaacagggcttaaaagcctatt

SEQ ID NO: 777 - DNA, 75 bp, Homo sapiens
cagctgacattccacaagcaagtttctcctatcagtaacccattgcaaacagggcttaaaagcctatttatacaa

SEQ ID NO: 778 - DNA, 71 bp, Homo sapiens
acattccacaagcaagtttctcctatcagtaacccattgcaaacagggcttaaaagcctatttatacaaac

SEQ ID NO: 779 - DNA, 68 bp, Homo sapiens
aagtttctcctatcagtaacccattgcaaacagggcttaaaagcctatttatacaaacccgtatgttc

SEQ ID NO: 780 - DNA, 71 bp, Homo sapiens
tcctatcagtaacccattgcaaacagggcttaaaagcctatttatacaaacccgtatgttccaatctctaa

SEQ ID NO: 781 - DNA, 71 bp, Homo sapiens
ccattgcaaacagggcttaaaagcctatttatacaaacccgtatgttccaatctctaagacttcagttcaa

SEQ ID NO: 782 - DNA, 68 bp, Homo sapiens
cagggcttaaaagcctatttatacaaacccgtatgttccaatctctaagacttcagttcaaggtttta

SEQ ID NO: 783 - DNA, 68 bp, Homo sapiens
aaagcctatttatacaaacccgtatgttccaatctctaagacttcagttcaaggttttagcaagttaa

SEQ ID NO: 784 - DNA, 68 bp, Homo sapiens
tacaaacccgtatgttccaatctctaagacttcagttcaaggttttagcaagttaaattcctcaaacc

SEQ ID NO: 785 - DNA, 71 bp, Homo sapiens
acccgtatgttccaatctctaagacttcagttcaaggttttagcaagttaaattcctcaaacctgcatctg

SEQ ID NO: 786 - DNA, 74 bp, Homo sapiens
tctctaagacttcagttcaaggttttagcaagttaaattcctcaaacctgcatctgttctccgttgctgtgtta

SEQ ID NO: 787 - DNA, 71 bp, Homo sapiens
aagacttcagttcaaggttttagcaagttaaattcctcaaacctgcatctgttctccgttgctgtgttacc

SEQ ID NO: 788 - DNA, 77 bp, Homo sapiens
aagttaaattcctcaaacctgcatctgttctccgttgctgtgttacccactgtgctggctcactacagcactcttcg

SEQ ID NO: 789 - DNA, 80 bp, Homo sapiens
attcctcaaacctgcatctgttctccgttgctgtgttacccactgtgctggctcactacagcactcttcggcattgtaaa

SEQ ID NO: 790 - DNA, 81 bp, Homo sapiens
catctgttctccgttgctgtgttacccactgtgctggctcactacagcactcttcggcattgtaaatgattgtcaataaac

SEQ ID NO: 791 - DNA, 80 bp, Homo sapiens
tccgttgctgtgttacccactgtgctggctcactacagcactcttcggcattgtaaatgattgtcaataaaccacactaa

SEQ ID NO: 792 - DNA, 78 bp, Homo sapiens
tgttacccactgtgctggctcactacagcactcttcggcattgtaaatgattgtcaataaaccacactaagaaacaaa

SEQ ID NO: 793 - DNA, 78 bp, Homo sapiens
ccactgtgctggctcactacagcactcttcggcattgtaaatgattgtcaataaaccacactaagaaacaaacaaaca

SEQ ID NO: 794 - DNA, 67 bp, Homo sapiens
aacaaacaaaaagagtaaggaaaattaggaacacatataagttaaaaagaaaatgcacaggagttca

SEQ ID NO: 795 - DNA, 69 bp, Homo sapiens
aagagtaaggaaaattaggaacacatataagttaaaaagaaaatgcacaggagttcaaatgaaaagcat

SEQ ID NO: 796 - DNA, 69 bp, Homo sapiens
taaggaaaattaggaacacatataagttaaaaagaaaatgcacaggagttcaaatgaaaagcattattt

SEQ ID NO: 797 - DNA, 71 bp, Homo sapiens
tttctgttaacgggtttctgtcatttctgctgcctgcttaaaagaacaggaataatttaggctggtgttta

SEQ ID NO: 798 - DNA, 70 bp, Homo sapiens
tttctgtcatttctgctgcctgcttaaaagaacaggaataatttaggctggtgtttaaagtttggtgggt

SEQ ID NO: 799 - DNA, 68 bp, Homo sapiens
tctgctgcctgcttaaaagaacaggaataatttaggctggtgtttaaagtttggtgggttccggtatt

SEQ ID NO: 800 - DNA, 66 bp, Homo sapiens
acaggaataatttaggctggtgtttaaagtttggtgggttccggtatttcctggctggttcagaaa

SEQ ID NO: 801 - DNA, 66 bp, Homo sapiens
aataatttaggctggtgtttaaagtttggtgggttccggtatttcctggctggttcagaaaatgat

SEQ ID NO: 802 - DNA, 70 bp, Homo sapiens
tggtgtttaaagtttggtgggttccggtatttcctggctggttcagaaaatgattctgcactgggcctcg

SEQ ID NO: 803 - DNA, 73 bp, Homo sapiens
aaagtttggtgggttccggtatttcctggctggttcagaaaatgattctgcactgggcctcgtgctctctgcc

SEQ ID NO: 804 - DNA, 78 bp, Homo sapiens
gggttccggtatttcctggctggttcagaaaatgattctgcactgggcctcgtgctctctgcctgacctctatctcag

SEQ ID NO: 805 - DNA, 85 bp, Homo sapiens
tttcctggctggttcagaaaatgattctgcactgggcctcgtgctctctgcctgacctctatctcaggctctgcgtcttgatcaa

SEQ ID NO: 806 - DNA, 68 bp, Homo sapiens
ctgcgccgacccccgaccccttccgccgccggggccccgctgttacctgcagcggcggctcccgattc

SEQ ID NO: 807 - DNA, 65 bp, Homo sapiens
ccccgaccccttccgccgccggggccccgctgttacctgcagcggcggctcccgattcccgggag

SEQ ID NO: 808 - DNA, 67 bp, Homo sapiens
cttccgccgccggggccccgctgttacctgcagcggcggctcccgattcccgggagggcggcccagg

SEQ ID NO: 809 - DNA, 68 bp, Homo sapiens
ggggccccgctgttacctgcagcggcggctcccgattcccgggagggcggcccagggccggcgcctta

SEQ ID NO: 810 - DNA, 68 bp, Homo sapiens
cccgctgttacctgcagcggcggctcccgattcccgggagggcggcccagggccggcgccttacccgc

SEQ ID NO: 811 - DNA, 67 bp, Homo sapiens
agcggcggctcccgattcccgggagggcggcccagggccggcgccttacccgcgggcaggcccactc

SEQ ID NO: 812 - DNA, 66 bp, Homo sapiens
ctcccgattcccgggagggcggcccagggccggcgccttacccgcgggcaggcccactcgcccgac

SEQ ID NO: 813 - DNA, 66 bp, Homo sapiens
ttcccgggagggcggcccagggccggcgccttacccgcgggcaggcccactcgcccgacggacgcc

SEQ ID NO: 814 - DNA, 68 bp, Homo sapiens
cccagggccggcgccttacccgcgggcaggcccactcgcccgacggacgccgcgggtcggcgacagcg

SEQ ID NO: 815 - DNA, 67 bp, Homo sapiens
ccggcgccttacccgcgggcaggcccactcgcccgacggacgccgcgggtcggcgacagcggggacc

SEQ ID NO: 816 - DNA, 67 bp, Homo sapiens
ttacccgcgggcaggcccactcgcccgacggacgccgcgggtcggcgacagcggggaccgcgggtcg

SEQ ID NO: 817 - DNA, 66 bp, Homo sapiens
aggcccactcgcccgacggacgccgcgggtcggcgacagcggggaccgcgggtcggcgacgtcggg

SEQ ID NO: 818 - DNA, 68 bp, Homo sapiens
tcgcccgacggacgccgcgggtcggcgacagcggggaccgcgggtcggcgacgtcggggcacaggtcc

SEQ ID NO: 819 - DNA, 68 bp, Homo sapiens
acgccgcgggtcggcgacagcggggaccgcgggtcggcgacgtcggggcacaggtcctgcggggccgc

SEQ ID NO: 820 - DNA, 68 bp, Homo sapiens
gtcggcgacagcggggaccgcgggtcggcgacgtcggggcacaggtcctgcggggccgcgggggccgc

SEQ ID NO: 821 - DNA, 68 bp, Homo sapiens
ggaccgcgggtcggcgacgtcggggcacaggtcctgcggggccgcgggggccgccagggagggcgcga

SEQ ID NO: 822 - DNA, 69 bp, Homo sapiens
gggtcggcgacgtcggggcacaggtcctgcggggccgcgggggccgccagggagggcgcgaccgcctga

SEQ ID NO: 823 - DNA, 70 bp, Homo sapiens
tcggggcacaggtcctgcggggccgcgggggccgccagggagggcgcgaccgcctgaccgggcttcagga

SEQ ID NO: 824 - DNA, 71 bp, Homo sapiens
acaggtcctgcggggccgcgggggccgccagggagggcgcgaccgcctgaccgggcttcaggagcagtgtc

SEQ ID NO: 825 - DNA, 72 bp, Homo sapiens
ccgcgggggccgccagggagggcgcgaccgcctgaccgggcttcaggagcagtgtcctcagccggtgacctg

SEQ ID NO: 826 - DNA, 74 bp, Homo sapiens
cgccagggagggcgcgaccgcctgaccgggcttcaggagcagtgtcctcagccggtgacctggccgctaccctc

SEQ ID NO: 827 - DNA, 76 bp, Homo sapiens
agggcgcgaccgcctgaccgggcttcaggagcagtgtcctcagccggtgacctggccgctaccctcgctcagtgtc

SEQ ID NO: 828 - DNA, 74 bp, Homo sapiens
accgcctgaccgggcttcaggagcagtgtcctcagccggtgacctggccgctaccctcgctcagtgtccccggc

SEQ ID NO: 829 - DNA, 76 bp, Homo sapiens
cttcaggagcagtgtcctcagccggtgacctggccgctaccctcgctcagtgtccccggcgacgcgcgggtcctca

SEQ ID NO: 830 - DNA, 76 bp, Homo sapiens
ggagcagtgtcctcagccggtgacctggccgctaccctcgctcagtgtccccggcgacgcgcgggtcctcacgcgc

SEQ ID NO: 831 - DNA, 73 bp, Homo sapiens
agccggtgacctggccgctaccctcgctcagtgtccccggcgacgcgcgggtcctcacgcgctccctcacttc

SEQ ID NO: 832 - DNA, 72 bp, Homo sapiens
acggggccccggaggtaggccgggggcagccaacaggccgcggcagcgcgcacgcagggctagcctcgccca

SEQ ID NO: 833 - DNA, 74 bp, Homo sapiens
cccggaggtaggccgggggcagccaacaggccgcggcagcgcgcacgcagggctagcctcgcccaggcctcctc

SEQ ID NO: 834 - DNA, 76 bp, Homo sapiens
taggccgggggcagccaacaggccgcggcagcgcgcacgcagggctagcctcgcccaggcctcctccctcacgccg

SEQ ID NO: 835 - DNA, 76 bp, Homo sapiens
agccaacaggccgcggcagcgcgcacgcagggctagcctcgcccaggcctcctccctcacgccggccgcaggacgg

SEQ ID NO: 836 - DNA, 77 bp, Homo sapiens
cggcagcgcgcacgcagggctagcctcgcccaggcctcctccctcacgccggccgcaggacgggcgcgcacgccaag

SEQ ID NO: 837 - DNA, 76 bp, Homo sapiens
cacgcagggctagcctcgcccaggcctcctccctcacgccggccgcaggacgggcgcgcacgccaagtgacgctcc

SEQ ID NO: 838 - DNA, 75 bp, Homo sapiens
tagcctcgcccaggcctcctccctcacgccggccgcaggacgggcgcgcacgccaagtgacgctccgaggaggaa

SEQ ID NO: 839 - DNA, 75 bp, Homo sapiens
ccaggcctcctccctcacgccggccgcaggacgggcgcgcacgccaagtgacgctccgaggaggaagcgcagccc

SEQ ID NO: 840 - DNA, 74 bp, Homo sapiens
tcctccctcacgccggccgcaggacgggcgcgcacgccaagtgacgctccgaggaggaagcgcagcccccttcc

SEQ ID NO: 841 - DNA, 71 bp, Homo sapiens
acgccggccgcaggacgggcgcgcacgccaagtgacgctccgaggaggaagcgcagcccccttcccctccc

SEQ ID NO: 842 - DNA, 72 bp, Homo sapiens
aggacgggcgcgcacgccaagtgacgctccgaggaggaagcgcagcccccttcccctccctcgctgcccctg

SEQ ID NO: 843 - DNA, 72 bp, Homo sapiens
acgccaagtgacgctccgaggaggaagcgcagcccccttcccctccctcgctgcccctggcccagcgggagc

SEQ ID NO: 844 - DNA, 70 bp, Homo sapiens
agtgacgctccgaggaggaagcgcagcccccttcccctccctcgctgcccctggcccagcgggagccccc

SEQ ID NO: 845 - DNA, 67 bp, Homo sapiens
cgaggaggaagcgcagcccccttcccctccctcgctgcccctggcccagcgggagccccccctcccc

SEQ ID NO: 846 - DNA, 68 bp, Homo sapiens
agcccccttcccctccctcgctgcccctggcccagcgggagccccccctccccccagtgcgcctgtgc

SEQ ID NO: 847 - DNA, 71 bp, Homo sapiens
cctccctcgctgcccctggcccagcgggagccccccctccccccagtgcgcctgtgcggaggccctcttga

SEQ ID NO: 848 - DNA, 73 bp, Homo sapiens
tgcccctggcccagcgggagccccccctccccccagtgcgcctgtgcggaggccctcttgattatgtgtgccc

SEQ ID NO: 849 - DNA, 73 bp, Homo sapiens
tggcccagcgggagccccccctccccccagtgcgcctgtgcggaggccctcttgattatgtgtgccctctccg

SEQ ID NO: 850 - DNA, 70 bp, Homo sapiens
ccccccctccccccagtgcgcctgtgcggaggccctcttgattatgtgtgccctctccgggcgcccgcgt

SEQ ID NO: 851 - DNA, 73 bp, Homo sapiens
ccccagtgcgcctgtgcggaggccctcttgattatgtgtgccctctccgggcgcccgcgttagcggccgggtg

SEQ ID NO: 852 - DNA, 71 bp, Homo sapiens
cctgtgcggaggccctcttgattatgtgtgccctctccgggcgcccgcgttagcggccgggtggaggtggg

SEQ ID NO: 853 - DNA, 69 bp, Homo sapiens
cggaggccctcttgattatgtgtgccctctccgggcgcccgcgttagcggccgggtggaggtggggagg

SEQ ID NO: 854 - DNA, 72 bp, Homo sapiens
ttgattatgtgtgccctctccgggcgcccgcgttagcggccgggtggaggtggggagggaagacgctgagga

SEQ ID NO: 855 - DNA, 70 bp, Homo sapiens
gtgtgccctctccgggcgcccgcgttagcggccgggtggaggtggggagggaagacgctgaggaggagga

SEQ ID NO: 856 - DNA, 72 bp, Homo sapiens
aggaggaggaggcggaggaggcggtggaggggaggtggggggaatcagcaaggacatggctcctgactcctg

SEQ ID NO: 857 - DNA, 73 bp, Homo sapiens
cggaggaggcggtggaggggaggtggggggaatcagcaaggacatggctcctgactcctgtgcggaacgtgag

SEQ ID NO: 858 - DNA, 77 bp, Homo sapiens
ggtggaggggaggtggggggaatcagcaaggacatggctcctgactcctgtgcggaacgtgagtgactgagcggcaa

SEQ ID NO: 859 - DNA, 78 bp, Homo sapiens
aggtggggggaatcagcaaggacatggctcctgactcctgtgcggaacgtgagtgactgagcggcaaagcccgagtga

SEQ ID NO: 860 - DNA, 79 bp, Homo sapiens
aaggacatggctcctgactcctgtgcggaacgtgagtgactgagcggcaaagcccgagtgagcgagcggtgggctgccg

SEQ ID NO: 861 - DNA, 77 bp, Homo sapiens
tcctgactcctgtgcggaacgtgagtgactgagcggcaaagcccgagtgagcgagcggtgggctgccgggccgggcg

SEQ ID NO: 862 - DNA, 71 bp, Homo sapiens
aacgtgagtgactgagcggcaaagcccgagtgagcgagcggtgggctgccgggccgggcggggggcgccgg

SEQ ID NO: 863 - DNA, 70 bp, Homo sapiens
actgagcggcaaagcccgagtgagcgagcggtgggctgccgggccgggcggggggcgccggggcgggctc

SEQ ID NO: 864 - DNA, 65 bp, Homo sapiens
aaagcccgagtgagcgagcggtgggctgccgggccgggcggggggcgccggggcgggctcggggg

SEQ ID NO: 865 - DNA, 67 bp, Homo sapiens
tgagcgagcggtgggctgccgggccgggcggggggcgccggggcgggctcggggggctgtgtggggg

SEQ ID NO: 866 - DNA, 65 bp, Homo sapiens
ctgccgggccgggcggggggcgccggggcgggctcggggggctgtgtgggggggaagcactaatc

SEQ ID NO: 867 - DNA, 68 bp, Homo sapiens
gggcggggggcgccggggcgggctcggggggctgtgtgggggggaagcactaatcggcttgcatgtgt

SEQ ID NO: 868 - DNA, 68 bp, Homo sapiens
gggcgccggggcgggctcggggggctgtgtgggggggaagcactaatcggcttgcatgtgttttttaa

SEQ ID NO: 869 - DNA, 68 bp, Homo sapiens
gggcgggctcggggggctgtgtgggggggaagcactaatcggcttgcatgtgttttttaatggtcccc

SEQ ID NO: 870 - DNA, 71 bp, Homo sapiens
gctgtgtgggggggaagcactaatcggcttgcatgtgttttttaatggtccccccaactccctcttagatg

SEQ ID NO: 871 - DNA, 72 bp, Homo sapiens
ggggaagcactaatcggcttgcatgtgttttttaatggtccccccaactccctcttagatggtctctagcga

SEQ ID NO: 872 - DNA, 69 bp, Homo sapiens
tttttaatggtccccccaactccctcttagatggtctctagcgaccggcccgtgtcactggaggacgag

SEQ ID NO: 873 - DNA, 73 bp, Homo sapiens
cccccaactccctcttagatggtctctagcgaccggcccgtgtcactggaggacgaggtctcccatagtatga

SEQ ID NO: 874 - DNA, 74 bp, Homo sapiens
aactccctcttagatggtctctagcgaccggcccgtgtcactggaggacgaggtctcccatagtatgaaggaga

SEQ ID NO: 875 - DNA, 78 bp, Homo sapiens
tagatggtctctagcgaccggcccgtgtcactggaggacgaggtctcccatagtatgaaggagatgattggaggctgt

SEQ ID NO: 876 - DNA, 79 bp, Homo sapiens
cccgtgtcactggaggacgaggtctcccatagtatgaaggagatgattggaggctgttgcgtttgctcagacgagagag

SEQ ID NO: 877 - DNA, 78 bp, Homo sapiens
tcccatagtatgaaggagatgattggaggctgttgcgtttgctcagacgagagaggctgggccgagaacccgctggtt

SEQ ID NO: 878 - DNA, 79 bp, Homo sapiens
tagtatgaaggagatgattggaggctgttgcgtttgctcagacgagagaggctgggccgagaacccgctggtttattgc

SEQ ID NO: 879 - DNA, 77 bp, Homo sapiens
agatgattggaggctgttgcgtttgctcagacgagagaggctgggccgagaacccgctggtttattgcgacgggcac

SEQ ID NO: 880 - DNA, 77 bp, Homo sapiens
aggctgttgcgtttgctcagacgagagaggctgggccgagaacccgctggtttattgcgacgggcacggctgcagcg

SEQ ID NO: 881 - DNA, 80 bp, Homo sapiens
tttgctcagacgagagaggctgggccgagaacccgctggtttattgcgacgggcacggctgcagcgtcgcggtgcatcaa

SEQ ID NO: 882 - DNA, 76 bp, Homo sapiens
agagaggctgggccgagaacccgctggtttattgcgacgggcacggctgcagcgtcgcggtgcatcaaggtaaaca

SEQ ID NO: 883 - DNA, 74 bp, Homo sapiens
ctgggccgagaacccgctggtttattgcgacgggcacggctgcagcgtcgcggtgcatcaaggtaaacacccaa

SEQ ID NO: 884 - DNA, 72 bp, Homo sapiens
aacccgctggtttattgcgacgggcacggctgcagcgtcgcggtgcatcaaggtaaacacccaaccgcccgc

SEQ ID NO: 885 - DNA, 73 bp, Homo sapiens
gtttattgcgacgggcacggctgcagcgtcgcggtgcatcaaggtaaacacccaaccgcccgccggggcgcgc

SEQ ID NO: 886 - DNA, 73 bp, Homo sapiens
cacggctgcagcgtcgcggtgcatcaaggtaaacacccaaccgcccgccggggcgcgccggcctgcgcccaac

SEQ ID NO: 887 - DNA, 70 bp, Homo sapiens
agcgtcgcggtgcatcaaggtaaacacccaaccgcccgccggggcgcgccggcctgcgcccaacggtcac

SEQ ID NO: 888 - DNA, 69 bp, Homo sapiens
gtgcatcaaggtaaacacccaaccgcccgccggggcgcgccggcctgcgcccaacggtcaccgccgccc

SEQ ID NO: 889 - DNA, 65 bp, Homo sapiens
aaggtaaacacccaaccgcccgccggggcgcgccggcctgcgcccaacggtcaccgccgccccca

SEQ ID NO: 890 - DNA, 66 bp, Homo sapiens
aaccgcccgccggggcgcgccggcctgcgcccaacggtcaccgccgcccccacctgggccgcaacc

SEQ ID NO: 891 - DNA, 67 bp, Homo sapiens
ccggggcgcgccggcctgcgcccaacggtcaccgccgcccccacctgggccgcaaccgccggcgccc

SEQ ID NO: 892 - DNA, 67 bp, Homo sapiens
cggcctgcgcccaacggtcaccgccgcccccacctgggccgcaaccgccggcgcccccgccccgtgc

SEQ ID NO: 893 - DNA, 67 bp, Homo sapiens
tcaccgccgcccccacctgggccgcaaccgccggcgcccccgccccgtgccgcggccgcgggaggga

SEQ ID NO: 894 - DNA, 65 bp, Homo sapiens
acctgggccgcaaccgccggcgcccccgccccgtgccgcggccgcgggagggacgcggagggtcc

SEQ ID NO: 895 - DNA, 65 bp, Homo sapiens
ccgcaaccgccggcgcccccgccccgtgccgcggccgcgggagggacgcggagggtccgcggcgg

SEQ ID NO: 896 - DNA, 64 bp, Homo sapiens
ccggcgcccccgccccgtgccgcggccgcgggagggacgcggagggtccgcggcggggcgcggg

SEQ ID NO: 897 - DNA, 69 bp, Homo sapiens
cgtgccgcggccgcgggagggacgcggagggtccgcggcggggcgcggggggtgtgggccgcgcatgtg

SEQ ID NO: 898 - DNA, 74 bp, Homo sapiens
gtccgcggcggggcgcggggggtgtgggccgcgcatgtgggagaaagtgcgtgtggcccggactgtcatgtgat

SEQ ID NO: 899 - DNA, 77 bp, Homo sapiens
gggcgcggggggtgtgggccgcgcatgtgggagaaagtgcgtgtggcccggactgtcatgtgattccgctctcactc

SEQ ID NO: 900 - DNA, 82 bp, Homo sapiens
ggtgtgggccgcgcatgtgggagaaagtgcgtgtggcccggactgtcatgtgattccgctctcactctctcaagtgtcattc

SEQ ID NO: 901 - DNA, 81 bp, Homo sapiens
ccgcgcatgtgggagaaagtgcgtgtggcccggactgtcatgtgattccgctctcactctctcaagtgtcattcggccgcc

SEQ ID NO: 902 - DNA, 82 bp, Homo sapiens
tgtgggagaaagtgcgtgtggcccggactgtcatgtgattccgctctcactctctcaagtgtcattcggccgccgcctgcgc

SEQ ID NO: 903 - DNA, 80 bp, Homo sapiens
agtgcgtgtggcccggactgtcatgtgattccgctctcactctctcaagtgtcattcggccgccgcctgcgcctggggcc

SEQ ID NO: 904 - DNA, 81 bp, Homo sapiens
gactgtcatgtgattccgctctcactctctcaagtgtcattcggccgccgcctgcgcctggggccggggtctgctgactcg

SEQ ID NO: 905 - DNA, 78 bp, Homo sapiens
atgtgattccgctctcactctctcaagtgtcattcggccgccgcctgcgcctggggccggggtctgctgactcggcgg

SEQ ID NO: 906 - DNA, 75 bp, Homo sapiens
ccgctctcactctctcaagtgtcattcggccgccgcctgcgcctggggccggggtctgctgactcggcggggcgg

SEQ ID NO: 907 - DNA, 74 bp, Homo sapiens
tctctcaagtgtcattcggccgccgcctgcgcctggggccggggtctgctgactcggcggggcggggcggggca

SEQ ID NO: 908 - DNA, 70 bp, Homo sapiens
cctgcgcctggggccggggtctgctgactcggcggggcggggcggggcagggcggcggccgcgccctcga

SEQ ID NO: 909 - DNA, 70 bp, Homo sapiens
gggccggggtctgctgactcggcggggcggggcggggcagggcggcggccgcgccctcgagatctgggcc

SEQ ID NO: 910 - DNA, 70 bp, Homo sapiens
gggtctgctgactcggcggggcggggcggggcagggcggcggccgcgccctcgagatctgggccggggtg

SEQ ID NO: 911 - DNA, 66 bp, Homo sapiens
actcggcggggcggggcggggcagggcggcggccgcgccctcgagatctgggccggggtgggggcg

SEQ ID NO: 912 - DNA, 65 bp, Homo sapiens
ggcggggcggggcagggcggcggccgcgccctcgagatctgggccggggtgggggcgggggcggg

SEQ ID NO: 913 - DNA, 59 bp, Homo sapiens
cgggggcgggggcgggggcggtgcgcgcccttcccggggttcccggggccacgggggtg

SEQ ID NO: 914 - DNA, 61 bp, Homo sapiens
gggcgggggcggtgcgcgcccttcccggggttcccggggccacgggggtgggtttgggaga

SEQ ID NO: 915 - DNA, 64 bp, Homo sapiens
gtgcgcgcccttcccggggttcccggggccacgggggtgggtttgggagagtggagcgccctct

SEQ ID NO: 916 - DNA, 62 bp, Homo sapiens
cccttcccggggttcccggggccacgggggtgggtttgggagagtggagcgccctcttctcc

SEQ ID NO: 917 - DNA, 67 bp, Homo sapiens
gggttcccggggccacgggggtgggtttgggagagtggagcgccctcttctcccctggcctgcagcc

SEQ ID NO: 918 - DNA, 77 bp, Homo sapiens
gtttgggagagtggagcgccctcttctcccctggcctgcagccgcctgtctgccgcagtgtttggagacttcctgtg

SEQ ID NO: 919 - DNA, 79 bp, Homo sapiens
agagtggagcgccctcttctcccctggcctgcagccgcctgtctgccgcagtgtttggagacttcctgtggcgtggaga

SEQ ID NO: 920 - DNA, 77 bp, Homo sapiens
ctcttctcccctggcctgcagccgcctgtctgccgcagtgtttggagacttcctgtggcgtggagacgggctcggga

SEQ ID NO: 921 - DNA, 78 bp, Homo sapiens
ctggcctgcagccgcctgtctgccgcagtgtttggagacttcctgtggcgtggagacgggctcgggaacgcggcgcca

SEQ ID NO: 922 - DNA, 70 bp, Homo sapiens
agtgtttggagacttcctgtggcgtggagacgggctcgggaacgcggcgccagtgtggggaggctggggg

SEQ ID NO: 923 - DNA, 72 bp, Homo sapiens
tcctgtggcgtggagacgggctcgggaacgcggcgccagtgtggggaggctgggggtcgccttgcctcttta

SEQ ID NO: 924 - DNA, 71 bp, Homo sapiens
cggcgccagtgtggggaggctgggggtcgccttgcctctttagatggggagggatgcggggcccgttgcac

SEQ ID NO: 925 - DNA, 69 bp, Homo sapiens
agtgtggggaggctgggggtcgccttgcctctttagatggggagggatgcggggcccgttgcaccccga

SEQ ID NO: 926 - DNA, 70 bp, Homo sapiens
ctgggggtcgccttgcctctttagatggggagggatgcggggcccgttgcaccccgagccagaaggctcg

SEQ ID NO: 927 - DNA, 72 bp, Homo sapiens
gtcgccttgcctctttagatggggagggatgcggggcccgttgcaccccgagccagaaggctcgggccctgc

SEQ ID NO: 928 - DNA, 71 bp, Homo sapiens
ctctttagatggggagggatgcggggcccgttgcaccccgagccagaaggctcgggccctgccgccgccgc

SEQ ID NO: 929 - DNA, 72 bp, Homo sapiens
agggatgcggggcccgttgcaccccgagccagaaggctcgggccctgccgccgccgcccggtagctgtctgc

SEQ ID NO: 930 - DNA, 73 bp, Homo sapiens
gggcccgttgcaccccgagccagaaggctcgggccctgccgccgccgcccggtagctgtctgcggaggagatg

SEQ ID NO: 931 - DNA, 76 bp, Homo sapiens
agaaggctcgggccctgccgccgccgcccggtagctgtctgcggaggagatggcggagtccgttgctgaccatgcg

SEQ ID NO: 932 - DNA, 79 bp, Homo sapiens
ccgccgccgcccggtagctgtctgcggaggagatggcggagtccgttgctgaccatgcgggagtggcggggctgctgca

SEQ ID NO: 933 - DNA, 80 bp, Homo sapiens
cccggtagctgtctgcggaggagatggcggagtccgttgctgaccatgcgggagtggcggggctgctgcagcgcctgtgg

SEQ ID NO: 934 - DNA, 82 bp, Homo sapiens
tctgcggaggagatggcggagtccgttgctgaccatgcgggagtggcggggctgctgcagcgcctgtggggtggccgcggca

SEQ ID NO: 935 - DNA, 80 bp, Homo sapiens
agatggcggagtccgttgctgaccatgcgggagtggcggggctgctgcagcgcctgtggggtggccgcggcaggccacca

SEQ ID NO: 936 - DNA, 81 bp, Homo sapiens
tgaccatgcgggagtggcggggctgctgcagcgcctgtggggtggccgcggcaggccaccaccagcctaggtggctgaaga

SEQ ID NO: 937 - DNA, 79 bp, Homo sapiens
tgctgcagcgcctgtggggtggccgcggcaggccaccaccagcctaggtggctgaagaggtggcggtgccaagtcactt

SEQ ID NO: 938 - DNA, 73 bp, Homo sapiens
cctgtggggtggccgcggcaggccaccaccagcctaggtggctgaagaggtggcggtgccaagtcacttttgg

SEQ ID NO: 939 - DNA, 75 bp, Homo sapiens
tggccgcggcaggccaccaccagcctaggtggctgaagaggtggcggtgccaagtcacttttggggagcctctta

SEQ ID NO: 940 - DNA, 71 bp, Homo sapiens
ccaccaccagcctaggtggctgaagaggtggcggtgccaagtcacttttggggagcctcttagtttatttc

SEQ ID NO: 941 - DNA, 70 bp, Homo sapiens
cctaggtggctgaagaggtggcggtgccaagtcacttttggggagcctcttagtttatttctggttgtta

SEQ ID NO: 942 - DNA, 72 bp, Homo sapiens
ctgaagaggtggcggtgccaagtcacttttggggagcctcttagtttatttctggttgttaacaattgatga

SEQ ID NO: 943 - DNA, 69 bp, Homo sapiens
tggcggtgccaagtcacttttggggagcctcttagtttatttctggttgttaacaattgatgaggtttt

SEQ ID NO: 944 - DNA, 70 bp, Homo sapiens
caagtcacttttggggagcctcttagtttatttctggttgttaacaattgatgaggtttttggatataca

SEQ ID NO: 945 - DNA, 70 bp, Homo sapiens
gggagcctcttagtttatttctggttgttaacaattgatgaggtttttggatatacaagaaggccgagga

SEQ ID NO: 946 - DNA, 71 bp, Homo sapiens
tagtttatttctggttgttaacaattgatgaggtttttggatatacaagaaggccgaggacactagtaaga

SEQ ID NO: 947 - DNA, 70 bp, Homo sapiens
tttctggttgttaacaattgatgaggtttttggatatacaagaaggccgaggacactagtaagatacttt

SEQ ID NO: 948 - DNA, 71 bp, Homo sapiens
tgttaacaattgatgaggtttttggatatacaagaaggccgaggacactagtaagatacttttctggcctt

SEQ ID NO: 949 - DNA, 71 bp, Homo sapiens
atgaggtttttggatatacaagaaggccgaggacactagtaagatacttttctggcctttgaagtggccga

SEQ ID NO: 950 - DNA, 70 bp, Homo sapiens
tttggatatacaagaaggccgaggacactagtaagatacttttctggcctttgaagtggccgacttttcc

SEQ ID NO: 951 - DNA, 68 bp, Homo sapiens
aagaaggccgaggacactagtaagatacttttctggcctttgaagtggccgacttttccccatttcac

SEQ ID NO: 952 - DNA, 68 bp, Homo sapiens
acactagtaagatacttttctggcctttgaagtggccgacttttccccatttcacgtggtaaggaatc

SEQ ID NO: 953 - DNA, 67 bp, Homo sapiens
atacttttctggcctttgaagtggccgacttttccccatttcacgtggtaaggaatccaggacaaaa

SEQ ID NO: 954 - DNA, 70 bp, Homo sapiens
ttctggcctttgaagtggccgacttttccccatttcacgtggtaaggaatccaggacaaaacagtctata

SEQ ID NO: 955 - DNA, 66 bp, Homo sapiens
aagtggccgacttttccccatttcacgtggtaaggaatccaggacaaaacagtctatattcttttt

SEQ ID NO: 956 - DNA, 70 bp, Homo sapiens
ttttccccatttcacgtggtaaggaatccaggacaaaacagtctatattcttttttggtggctccatgtc

SEQ ID NO: 957 - DNA, 71 bp, Homo sapiens
atttcacgtggtaaggaatccaggacaaaacagtctatattcttttttggtggctccatgtcccttcgcat

SEQ ID NO: 958 - DNA, 75 bp, Homo sapiens
taaggaatccaggacaaaacagtctatattcttttttggtggctccatgtcccttcgcatttctgaatctggcat

SEQ ID NO: 959 - DNA, 79 bp, Homo sapiens
gacaaaacagtctatattcttttttggtggctccatgtcccttcgcatttctgaatctggcattaagcgatgcatatgt

SEQ ID NO: 960 - DNA, 78 bp, Homo sapiens
tttttggtggctccatgtcccttcgcatttctgaatctggcattaagcgatgcatatgtttttagtagtctgttggaa

SEQ ID NO: 961 - DNA, 78 bp, Homo sapiens
ctccatgtcccttcgcatttctgaatctggcattaagcgatgcatatgtttttagtagtctgttggaaaggactacca

SEQ ID NO: 962 - DNA, 75 bp, Homo sapiens
cttcgcatttctgaatctggcattaagcgatgcatatgtttttagtagtctgttggaaaggactaccaccaaaag

SEQ ID NO: 963 - DNA, 74 bp, Homo sapiens
atttctgaatctggcattaagcgatgcatatgtttttagtagtctgttggaaaggactaccaccaaaagggaga

SEQ ID NO: 964 - DNA, 71 bp, Homo sapiens
cattaagcgatgcatatgtttttagtagtctgttggaaaggactaccaccaaaagggagacgaaaatttga

SEQ ID NO: 965 - DNA, 72 bp, Homo sapiens
tgcatatgtttttagtagtctgttggaaaggactaccaccaaaagggagacgaaaatttgaacatctgctaa

SEQ ID NO: 966 - DNA, 68 bp, Homo sapiens
atgtttttagtagtctgttggaaaggactaccaccaaaagggagacgaaaatttgaacatctgctaaa

SEQ ID NO: 967 - DNA, 72 bp, Homo sapiens
tagtctgttggaaaggactaccaccaaaagggagacgaaaatttgaacatctgctaaagtgcattttgtaga

SEQ ID NO: 968 - DNA, 69 bp, Homo sapiens
aaaggactaccaccaaaagggagacgaaaatttgaacatctgctaaagtgcattttgtagagaaacgaa

SEQ ID NO: 969 - DNA, 71 bp, Homo sapiens
aaaagggagacgaaaatttgaacatctgctaaagtgcattttgtagagaaacgaatgtcacacttggaaag

SEQ ID NO: 970 - DNA, 72 bp, Homo sapiens
acgaaaatttgaacatctgctaaagtgcattttgtagagaaacgaatgtcacacttggaaagggagacttta

SEQ ID NO: 971 - DNA, 75 bp, Homo sapiens
atttgaacatctgctaaagtgcattttgtagagaaacgaatgtcacacttggaaagggagactttagaagcagtg

SEQ ID NO: 972 - DNA, 76 bp, Homo sapiens
taaagtgcattttgtagagaaacgaatgtcacacttggaaagggagactttagaagcagtggtgatgattctgagg

SEQ ID NO: 973 - DNA, 75 bp, Homo sapiens
attttgtagagaaacgaatgtcacacttggaaagggagactttagaagcagtggtgatgattctgaggtagtgta

SEQ ID NO: 974 - DNA, 76 bp, Homo sapiens
agaaacgaatgtcacacttggaaagggagactttagaagcagtggtgatgattctgaggtagtgtacttactctga

SEQ ID NO: 975 - DNA, 76 bp, Homo sapiens
acacttggaaagggagactttagaagcagtggtgatgattctgaggtagtgtacttactctgagaatgctgtttat

SEQ ID NO: 976 - DNA, 75 bp, Homo sapiens
tttagaagcagtggtgatgattctgaggtagtgtacttactctgagaatgctgtttattcccagacttttatttt

SEQ ID NO: 977 - DNA, 72 bp, Homo sapiens
agtggtgatgattctgaggtagtgtacttactctgagaatgctgtttattcccagacttttatttttttact

SEQ ID NO: 978 - DNA, 75 bp, Homo sapiens
cactgcgcctggccctagacttttaaagaagagccaagttgcatgtcttgcttttttagggagtgaatacaatgc

SEQ ID NO: 979 - DNA, 74 bp, Homo sapiens
tggccctagacttttaaagaagagccaagttgcatgtcttgcttttttagggagtgaatacaatgcgtgtcaaa

SEQ ID NO: 980 - DNA, 75 bp, Homo sapiens
ttttaaagaagagccaagttgcatgtcttgcttttttagggagtgaatacaatgcgtgtcaaaccagatactgat

SEQ ID NO: 981 - DNA, 75 bp, Homo sapiens
aagaagagccaagttgcatgtcttgcttttttagggagtgaatacaatgcgtgtcaaaccagatactgattttaa

SEQ ID NO: 982 - DNA, 75 bp, Homo sapiens
aagttgcatgtcttgcttttttagggagtgaatacaatgcgtgtcaaaccagatactgattttaaggtcatccca

SEQ ID NO: 983 - DNA, 74 bp, Homo sapiens
cttttttagggagtgaatacaatgcgtgtcaaaccagatactgattttaaggtcatcccatgttcattggcatt

SEQ ID NO: 984 - DNA, 79 bp, Homo sapiens
gagtgaatacaatgcgtgtcaaaccagatactgattttaaggtcatcccatgttcattggcattttgaaggccaatgaa

SEQ ID NO: 985 - DNA, 76 bp, Homo sapiens
aatacaatgcgtgtcaaaccagatactgattttaaggtcatcccatgttcattggcattttgaaggccaatgaatt

SEQ ID NO: 986 - DNA, 75 bp, Homo sapiens
aaaccagatactgattttaaggtcatcccatgttcattggcattttgaaggccaatgaatttcttatgaattgga

SEQ ID NO: 987 - DNA, 75 bp, Homo sapiens
gatactgattttaaggtcatcccatgttcattggcattttgaaggccaatgaatttcttatgaattggaatttct

SEQ ID NO: 988 - DNA, 78 bp, Homo sapiens
taaggtcatcccatgttcattggcattttgaaggccaatgaatttcttatgaattggaatttcttatgaattggatga

SEQ ID NO: 989 - DNA, 77 bp, Homo sapiens
tcccatgttcattggcattttgaaggccaatgaatttcttatgaattggaatttcttatgaattggatgataaacta

SEQ ID NO: 990 - DNA, 75 bp, Homo sapiens
ggcattttgaaggccaatgaatttcttatgaattggaatttcttatgaattggatgataaactatcaaaatttga

SEQ ID NO: 991 - DNA, 75 bp, Homo sapiens
tgaaggccaatgaatttcttatgaattggaatttcttatgaattggatgataaactatcaaaatttgataatttc

SEQ ID NO: 992 - DNA, 76 bp, Homo sapiens
ttcttatgaattggaatttcttatgaattggatgataaactatcaaaatttgataatttctatgtcccaatataga

SEQ ID NO: 993 - DNA, 74 bp, Homo sapiens
atgaattggaatttcttatgaattggatgataaactatcaaaatttgataatttctatgtcccaatatagaaaa

SEQ ID NO: 994 - DNA, 71 bp, Homo sapiens
aattggatgataaactatcaaaatttgataatttctatgtcccaatatagaaaatttttattcaaatctta

SEQ ID NO: 995 - DNA, 68 bp, Homo sapiens
ctatcaaaatttgataatttctatgtcccaatatagaaaatttttattcaaatcttaaattttccttc

SEQ ID NO: 996 - DNA, 69 bp, Homo sapiens
tgataatttctatgtcccaatatagaaaatttttattcaaatcttaaattttccttcctagaagtacac

SEQ ID NO: 997 - DNA, 69 bp, Homo sapiens
ttctatgtcccaatatagaaaatttttattcaaatcttaaattttccttcctagaagtacacctgaata

SEQ ID NO: 998 - DNA, 65 bp, Homo sapiens
cccaatatagaaaatttttattcaaatcttaaattttccttcctagaagtacacctgaataaagt

SEQ ID NO: 999 - DNA, 70 bp, Homo sapiens
ttttattcaaatcttaaattttccttcctagaagtacacctgaataaagtttttgggcaatgatgctgtg

SEQ ID NO: 1000 - DNA, 71 bp, Homo sapiens
aaattttccttcctagaagtacacctgaataaagtttttgggcaatgatgctgtgttttggacacctatgc

SEQ ID NO: 1001 - DNA, 74 bp, Homo sapiens
gaagtacacctgaataaagtttttgggcaatgatgctgtgttttggacacctatgctgtgttttttgacggata

SEQ ID NO: 1002 - DNA, 76 bp, Homo sapiens
tgaataaagtttttgggcaatgatgctgtgttttggacacctatgctgtgttttttgacggatagagcatttatag

SEQ ID NO: 1003 - DNA, 76 bp, Homo sapiens
aaagtttttgggcaatgatgctgtgttttggacacctatgctgtgttttttgacggatagagcatttatagtgaga

SEQ ID NO: 1004 - DNA, 77 bp, Homo sapiens
aatgatgctgtgttttggacacctatgctgtgttttttgacggatagagcatttatagtgagacacattttacaaat

SEQ ID NO: 1005 - DNA, 75 bp, Homo sapiens
tgtgttttggacacctatgctgtgttttttgacggatagagcatttatagtgagacacattttacaaattctgtt

SEQ ID NO: 1006 - DNA, 75 bp, Homo sapiens
gacacctatgctgtgttttttgacggatagagcatttatagtgagacacattttacaaattctgtttttttgaga

SEQ ID NO: 1007 - DNA, 71 bp, Homo sapiens
aggcatgagctgccttgcctggtcctacaaatgtttaactggaagtggaagtttagcttttggagttttaa

SEQ ID NO: 1008 - DNA, 66 bp, Homo sapiens
tgccttgcctggtcctacaaatgtttaactggaagtggaagtttagcttttggagttttaaaaagt

SEQ ID NO: 1009 - DNA, 65 bp, Homo sapiens
gcctggtcctacaaatgtttaactggaagtggaagtttagcttttggagttttaaaaagttatac

SEQ ID NO: 1010 - DNA, 68 bp, Homo sapiens
tgtttaactggaagtggaagtttagcttttggagttttaaaaagttatactgaatttatattctgctg

SEQ ID NO: 1011 - DNA, 71 bp, Homo sapiens
gaagtggaagtttagcttttggagttttaaaaagttatactgaatttatattctgctgtgattgtacagtg

SEQ ID NO: 1012 - DNA, 71 bp, Homo sapiens
tttagcttttggagttttaaaaagttatactgaatttatattctgctgtgattgtacagtgggtagtactc

SEQ ID NO: 1013 - DNA, 72 bp, Homo sapiens
ggagttttaaaaagttatactgaatttatattctgctgtgattgtacagtgggtagtactctgttttgtgaa

SEQ ID NO: 1014 - DNA, 73 bp, Homo sapiens
aaaaagttatactgaatttatattctgctgtgattgtacagtgggtagtactctgttttgtgaatttatattc

SEQ ID NO: 1015 - DNA, 74 bp, Homo sapiens
atactgaatttatattctgctgtgattgtacagtgggtagtactctgttttgtgaatttatattctttctttct

SEQ ID NO: 1016 - DNA, 72 bp, Homo sapiens
agccaccgcgtccgacctgaatttatattctttaaatgctttccaatatttaagatattttcatatttctgc

SEQ ID NO: 1017 - DNA, 73 bp, Homo sapiens
ccgcgtccgacctgaatttatattctttaaatgctttccaatatttaagatattttcatatttctgcctagca

SEQ ID NO: 1018 - DNA, 77 bp, Homo sapiens
cctgaatttatattctttaaatgctttccaatatttaagatattttcatatttctgcctagcaagctcatgcagaag

SEQ ID NO: 1019 - DNA, 76 bp, Homo sapiens
ctttaaatgctttccaatatttaagatattttcatatttctgcctagcaagctcatgcagaagtctacttggttat

SEQ ID NO: 1020 - DNA, 76 bp, Homo sapiens
gctttccaatatttaagatattttcatatttctgcctagcaagctcatgcagaagtctacttggttattagtgttt

SEQ ID NO: 1021 - DNA, 76 bp, Homo sapiens
taagatattttcatatttctgcctagcaagctcatgcagaagtctacttggttattagtgtttttagagttttaga

SEQ ID NO: 1022 - DNA, 73 bp, Homo sapiens
tttcatatttctgcctagcaagctcatgcagaagtctacttggttattagtgtttttagagttttagaaaatt

SEQ ID NO: 1023 - DNA, 72 bp, Homo sapiens
tttctgcctagcaagctcatgcagaagtctacttggttattagtgtttttagagttttagaaaattttcagt

SEQ ID NO: 1024 - DNA, 72 bp, Homo sapiens
gcaagctcatgcagaagtctacttggttattagtgtttttagagttttagaaaattttcagttttgagctaa

SEQ ID NO: 1025 - DNA, 68 bp, Homo sapiens
gcagaagtctacttggttattagtgtttttagagttttagaaaattttcagttttgagctaattatta

SEQ ID NO: 1026 - DNA, 64 bp, Homo sapiens
acttggttattagtgtttttagagttttagaaaattttcagttttgagctaattattaacttta

SEQ ID NO: 1027 - DNA, 63 bp, Homo sapiens
tagtgtttttagagttttagaaaattttcagttttgagctaattattaactttaaaaaccaat

SEQ ID NO: 1028 - DNA, 63 bp, Homo sapiens
tttagaaaattttcagttttgagctaattattaactttaaaaaccaattttaaaacaagactg

SEQ ID NO: 1029 - DNA, 70 bp, Homo sapiens
tttcagttttgagctaattattaactttaaaaaccaattttaaaacaagactgtgattagatatgtgatg

SEQ ID NO: 1030 - DNA, 70 bp, Homo sapiens
gttttgagctaattattaactttaaaaaccaattttaaaacaagactgtgattagatatgtgatgtataa

SEQ ID NO: 1031 - DNA, 72 bp, Homo sapiens
ttaactttaaaaaccaattttaaaacaagactgtgattagatatgtgatgtataattaaatcatttggagca

SEQ ID NO: 1032 - DNA, 78 bp, Homo sapiens
aaaccaattttaaaacaagactgtgattagatatgtgatgtataattaaatcatttggagcattcacatcattatgta

SEQ ID NO: 1033 - DNA, 79 bp, Homo sapiens
ttttaaaacaagactgtgattagatatgtgatgtataattaaatcatttggagcattcacatcattatgtatttagaaa

SEQ ID NO: 1034 - DNA, 81 bp, Homo sapiens
caagactgtgattagatatgtgatgtataattaaatcatttggagcattcacatcattatgtatttagaaataaacatacc

SEQ ID NO: 1035 - DNA, 79 bp, Homo sapiens
ctgtgattagatatgtgatgtataattaaatcatttggagcattcacatcattatgtatttagaaataaacataccttt

SEQ ID NO: 1036 - DNA, 76 bp, Homo sapiens
attagatatgtgatgtataattaaatcatttggagcattcacatcattatgtatttagaaataaacataccttttt

SEQ ID NO: 1037 - DNA, 74 bp, Homo sapiens
atatgtgatgtataattaaatcatttggagcattcacatcattatgtatttagaaataaacatacctttttttt

SEQ ID NO: 1038 - DNA, 73 bp, Homo sapiens
caggcatgaaccattgcacccagccttgatttatttagatgaggtaacacaaaagagttgcatttaaaatttt

SEQ ID NO: 1039 - DNA, 71 bp, Homo sapiens
atgaaccattgcacccagccttgatttatttagatgaggtaacacaaaagagttgcatttaaaatttttac

SEQ ID NO: 1040 - DNA, 69 bp, Homo sapiens
gcacccagccttgatttatttagatgaggtaacacaaaagagttgcatttaaaatttttacttgttaat

SEQ ID NO: 1041 - DNA, 69 bp, Homo sapiens
tgatttatttagatgaggtaacacaaaagagttgcatttaaaatttttacttgttaattaagtaagctg

SEQ ID NO: 1042 - DNA, 72 bp, Homo sapiens
tagatgaggtaacacaaaagagttgcatttaaaatttttacttgttaattaagtaagctgtatatgtgataa

SEQ ID NO: 1043 - DNA, 72 bp, Homo sapiens
acacaaaagagttgcatttaaaatttttacttgttaattaagtaagctgtatatgtgataaataggatgtga

SEQ ID NO: 1044 - DNA, 70 bp, Homo sapiens
gcatttaaaatttttacttgttaattaagtaagctgtatatgtgataaataggatgtgaactgttttact

SEQ ID NO: 1045 - DNA, 72 bp, Homo sapiens
ttttacttgttaattaagtaagctgtatatgtgataaataggatgtgaactgttttacttctctgtaaagag

SEQ ID NO: 1046 - DNA, 72 bp, Homo sapiens
cttgttaattaagtaagctgtatatgtgataaataggatgtgaactgttttacttctctgtaaagaggtagt

SEQ ID NO: 1047 - DNA, 75 bp, Homo sapiens
agctgtatatgtgataaataggatgtgaactgttttacttctctgtaaagaggtagtttacttgaatagtgacag

SEQ ID NO: 1048 - DNA, 73 bp, Homo sapiens
atgtgataaataggatgtgaactgttttacttctctgtaaagaggtagtttacttgaatagtgacaggtggat

SEQ ID NO: 1049 - DNA, 71 bp, Homo sapiens
ataggatgtgaactgttttacttctctgtaaagaggtagtttacttgaatagtgacaggtggattaatagg

SEQ ID NO: 1050 - DNA, 69 bp, Homo sapiens
tgttttacttctctgtaaagaggtagtttacttgaatagtgacaggtggattaatagggctttgaaagg

SEQ ID NO: 1051 - DNA, 68 bp, Homo sapiens
acttctctgtaaagaggtagtttacttgaatagtgacaggtggattaatagggctttgaaagggtatt

SEQ ID NO: 1052 - DNA, 68 bp, Homo sapiens
aagaggtagtttacttgaatagtgacaggtggattaatagggctttgaaagggtatttgatttttcca

SEQ ID NO: 1053 - DNA, 68 bp, Homo sapiens
aggtagtttacttgaatagtgacaggtggattaatagggctttgaaagggtatttgatttttccatag

SEQ ID NO: 1054 - DNA, 70 bp, Homo sapiens
cttgaatagtgacaggtggattaatagggctttgaaagggtatttgatttttccatagttcttcgaatct

SEQ ID NO: 1055 - DNA, 69 bp, Homo sapiens
gtgacaggtggattaatagggctttgaaagggtatttgatttttccatagttcttcgaatcttaacatt

SEQ ID NO: 1056 - DNA, 68 bp, Homo sapiens
gacaggtggattaatagggctttgaaagggtatttgatttttccatagttcttcgaatcttaacattt

SEQ ID NO: 1057 - DNA, 68 bp, Homo sapiens
gtggattaatagggctttgaaagggtatttgatttttccatagttcttcgaatcttaacattttaaca

SEQ ID NO: 1058 - DNA, 67 bp, Homo sapiens
agggctttgaaagggtatttgatttttccatagttcttcgaatcttaacattttaacacatttcatt

SEQ ID NO: 1059 - DNA, 69 bp, Homo sapiens
gaaagggtatttgatttttccatagttcttcgaatcttaacattttaacacatttcatttttcaacagc

SEQ ID NO: 1060 - DNA, 74 bp, Homo sapiens
gtatttgatttttccatagttcttcgaatcttaacattttaacacatttcatttttcaacagcttgctatggca

SEQ ID NO: 1061 - DNA, 72 bp, Homo sapiens
taacattttaacacatttcatttttcaacagcttgctatggcattgttcaagtacccactggaccgtggttt

SEQ ID NO: 1062 - DNA, 75 bp, Homo sapiens
atttcatttttcaacagcttgctatggcattgttcaagtacccactggaccgtggttttgcaggaaatgtgaatc

SEQ ID NO: 1063 - DNA, 79 bp, Homo sapiens
ctatggcattgttcaagtacccactggaccgtggttttgcaggaaatgtgaatctcaggagagagcagccagagtggta

SEQ ID NO: 1064 - DNA, 76 bp, Homo sapiens
attgttcaagtacccactggaccgtggttttgcaggaaatgtgaatctcaggagagagcagccagagtggtaagga

SEQ ID NO: 1065 - DNA, 76 bp, Homo sapiens
ccactggaccgtggttttgcaggaaatgtgaatctcaggagagagcagccagagtggtaaggactatttatcaaaa

SEQ ID NO: 1066 - DNA, 75 bp, Homo sapiens
tttgcaggaaatgtgaatctcaggagagagcagccagagtggtaaggactatttatcaaaaacattaaactttag

SEQ ID NO: 1067 - DNA, 72 bp, Homo sapiens
aatctcaggagagagcagccagagtggtaaggactatttatcaaaaacattaaactttagtgagtaggttag

SEQ ID NO: 1068 - DNA, 70 bp, Homo sapiens
gagagcagccagagtggtaaggactatttatcaaaaacattaaactttagtgagtaggttaggaaattag

SEQ ID NO: 1069 - DNA, 67 bp, Homo sapiens
gccagagtggtaaggactatttatcaaaaacattaaactttagtgagtaggttaggaaattaggaac

SEQ ID NO: 1070 - DNA, 69 bp, Homo sapiens
ggactatttatcaaaaacattaaactttagtgagtaggttaggaaattaggaactgcactcctgttgtg

SEQ ID NO: 1071 - DNA, 68 bp, Homo sapiens
atcaaaaacattaaactttagtgagtaggttaggaaattaggaactgcactcctgttgtggtttgtgg

SEQ ID NO: 1072 - DNA, 67 bp, Homo sapiens
aacattaaactttagtgagtaggttaggaaattaggaactgcactcctgttgtggtttgtggggttg

SEQ ID NO: 1073 - DNA, 72 bp, Homo sapiens
tttagtgagtaggttaggaaattaggaactgcactcctgttgtggtttgtggggttgtcagtcatttcttca

SEQ ID NO: 1074 - DNA, 76 bp, Homo sapiens
taggaactgcactcctgttgtggtttgtggggttgtcagtcatttcttcaaatatcataatgtaagagataattta

SEQ ID NO: 1075 - DNA, 75 bp, Homo sapiens
tgtggtttgtggggttgtcagtcatttcttcaaatatcataatgtaagagataatttaggccaaatattgacttg

SEQ ID NO: 1076 - DNA, 73 bp, Homo sapiens
caaatatcataatgtaagagataatttaggccaaatattgacttggagtattaaacagattttgtaaaactga

SEQ ID NO: 1077 - DNA, 70 bp, Homo sapiens
ccaaatattgacttggagtattaaacagattttgtaaaactgaaaaacaaatggaatcaagtgagtatat

SEQ ID NO: 1078 - DNA, 69 bp, Homo sapiens
acttggagtattaaacagattttgtaaaactgaaaaacaaatggaatcaagtgagtatattttggatac

SEQ ID NO: 1079 - DNA, 69 bp, Homo sapiens
ttaaacagattttgtaaaactgaaaaacaaatggaatcaagtgagtatattttggatactttgaaaaca

SEQ ID NO: 1080 - DNA, 70 bp, Homo sapiens
gtaaaactgaaaaacaaatggaatcaagtgagtatattttggatactttgaaaacaaaaatacatagtca

SEQ ID NO: 1081 - DNA, 71 bp, Homo sapiens
aacaaatggaatcaagtgagtatattttggatactttgaaaacaaaaatacatagtcatatttgggctttg

SEQ ID NO: 1082 - DNA, 72 bp, Homo sapiens
tggaatcaagtgagtatattttggatactttgaaaacaaaaatacatagtcatatttgggctttgttaacta

SEQ ID NO: 1083 - DNA, 71 bp, Homo sapiens
gtgagtatattttggatactttgaaaacaaaaatacatagtcatatttgggctttgttaactagttacaga

SEQ ID NO: 1084 - DNA, 71 bp, Homo sapiens
ttggatactttgaaaacaaaaatacatagtcatatttgggctttgttaactagttacagaatcaagaaagc

SEQ ID NO: 1085 - DNA, 71 bp, Homo sapiens
aacaaaaatacatagtcatatttgggctttgttaactagttacagaatcaagaaagcttgaagaagtttga

SEQ ID NO: 1086 - DNA, 72 bp, Homo sapiens
catagtcatatttgggctttgttaactagttacagaatcaagaaagcttgaagaagtttgaaggttacactg

SEQ ID NO: 1087 - DNA, 71 bp, Homo sapiens
atttgggctttgttaactagttacagaatcaagaaagcttgaagaagtttgaaggttacactggctaatca

SEQ ID NO: 1088 - DNA, 72 bp, Homo sapiens
gctttgttaactagttacagaatcaagaaagcttgaagaagtttgaaggttacactggctaatcatagttaa

SEQ ID NO: 1089 - DNA, 73 bp, Homo sapiens
ctagttacagaatcaagaaagcttgaagaagtttgaaggttacactggctaatcatagttaaaatataatgga

SEQ ID NO: 1090 - DNA, 72 bp, Homo sapiens
atcaagaaagcttgaagaagtttgaaggttacactggctaatcatagttaaaatataatggaaatagaaaca

SEQ ID NO: 1091 - DNA, 72 bp, Homo sapiens
gtttgaaggttacactggctaatcatagttaaaatataatggaaatagaaacataaggaagttacattgata

SEQ ID NO: 1092 - DNA, 72 bp, Homo sapiens
acactggctaatcatagttaaaatataatggaaatagaaacataaggaagttacattgataattctcttagg

SEQ ID NO: 1093 - DNA, 70 bp, Homo sapiens
tagttaaaatataatggaaatagaaacataaggaagttacattgataattctcttaggttttgtgtaatg

SEQ ID NO: 1094 - DNA, 69 bp, Homo sapiens
atataatggaaatagaaacataaggaagttacattgataattctcttaggttttgtgtaatgggaaaaa

SEQ ID NO: 1095 - DNA, 66 bp, Homo sapiens
ggaaatagaaacataaggaagttacattgataattctcttaggttttgtgtaatgggaaaaaaacc

SEQ ID NO: 1096 - DNA, 66 bp, Homo sapiens
aggaagttacattgataattctcttaggttttgtgtaatgggaaaaaaacccaataattttagtga

SEQ ID NO: 1097 - DNA, 69 bp, Homo sapiens
cattgataattctcttaggttttgtgtaatgggaaaaaaacccaataattttagtgactatcatattcc

SEQ ID NO: 1098 - DNA, 67 bp, Homo sapiens
tctcttaggttttgtgtaatgggaaaaaaacccaataattttagtgactatcatattccttttacta

SEQ ID NO: 1099 - DNA, 68 bp, Homo sapiens
ttgtgtaatgggaaaaaaacccaataattttagtgactatcatattccttttactacatctttgggtg

SEQ ID NO: 1100 - DNA, 66 bp, Homo sapiens
gggaaaaaaacccaataattttagtgactatcatattccttttactacatctttgggtgtatagtt

SEQ ID NO: 1101 - DNA, 71 bp, Homo sapiens
ccaataattttagtgactatcatattccttttactacatctttgggtgtatagtttaacttcgaacactca

SEQ ID NO: 1102 - DNA, 75 bp, Homo sapiens
ttagtgactatcatattccttttactacatctttgggtgtatagtttaacttcgaacactcactgatttcaggca

SEQ ID NO: 1103 - DNA, 74 bp, Homo sapiens
actatcatattccttttactacatctttgggtgtatagtttaacttcgaacactcactgatttcaggcattcag

SEQ ID NO: 1104 - DNA, 73 bp, Homo sapiens
tttactacatctttgggtgtatagtttaacttcgaacactcactgatttcaggcattcagtccctttggcaaa

SEQ ID NO: 1105 - DNA, 72 bp, Homo sapiens
tttgggtgtatagtttaacttcgaacactcactgatttcaggcattcagtccctttggcaaaccaacataaa

SEQ ID NO: 1106 - DNA, 70 bp, Homo sapiens
atagtttaacttcgaacactcactgatttcaggcattcagtccctttggcaaaccaacataaaaatcttt

SEQ ID NO: 1107 - DNA, 69 bp, Homo sapiens
taacttcgaacactcactgatttcaggcattcagtccctttggcaaaccaacataaaaatctttttttt

SEQ ID NO: 1108 - DNA, 64 bp, Homo sapiens
ttttttaacttgggtggttaccttatttcagaacttttctaaacctcttataagaatgaaggag

SEQ ID NO: 1109 - DNA, 66 bp, Homo sapiens
taacttgggtggttaccttatttcagaacttttctaaacctcttataagaatgaaggaggtgccgg

SEQ ID NO: 1110 - DNA, 69 bp, Homo sapiens
ggttaccttatttcagaacttttctaaacctcttataagaatgaaggaggtgccgggtgcagtggttca

SEQ ID NO: 1111 - DNA, 74 bp, Homo sapiens
acaaaaaattaactggatgtggcagcgcgtgcctatagtctagctactctgggggctaagacgggagaatcgct

SEQ ID NO: 1112 - DNA, 76 bp, Homo sapiens
gacagagtgagagactgtctcacaaaaaacacagtgagggaggtatgtttatcctttgtatccacaagcatttttc

SEQ ID NO: 1113 - DNA, 74 bp, Homo sapiens
agtgagagactgtctcacaaaaaacacagtgagggaggtatgtttatcctttgtatccacaagcatttttccca

SEQ ID NO: 1114 - DNA, 72 bp, Homo sapiens
agagactgtctcacaaaaaacacagtgagggaggtatgtttatcctttgtatccacaagcatttttcccatt

SEQ ID NO: 1115 - DNA, 72 bp, Homo sapiens
tgtctcacaaaaaacacagtgagggaggtatgtttatcctttgtatccacaagcatttttcccatttggatt

SEQ ID NO: 1116 - DNA, 73 bp, Homo sapiens
tcacaaaaaacacagtgagggaggtatgtttatcctttgtatccacaagcatttttcccatttggatttctga

SEQ ID NO: 1117 - DNA, 70 bp, Homo sapiens
aaaaacacagtgagggaggtatgtttatcctttgtatccacaagcatttttcccatttggatttctgaaa

SEQ ID NO: 1118 - DNA, 70 bp, Homo sapiens
aaaacacagtgagggaggtatgtttatcctttgtatccacaagcatttttcccatttggatttctgaaaa

SEQ ID NO: 1119 - DNA, 73 bp, Homo sapiens
acagtgagggaggtatgtttatcctttgtatccacaagcatttttcccatttggatttctgaaaatatcagaa

SEQ ID NO: 1120 - DNA, 73 bp, Homo sapiens
gagggaggtatgtttatcctttgtatccacaagcatttttcccatttggatttctgaaaatatcagaaataga

SEQ ID NO: 1121 - DNA, 71 bp, Homo sapiens
aggtatgtttatcctttgtatccacaagcatttttcccatttggatttctgaaaatatcagaaatagattt

SEQ ID NO: 1122 - DNA, 70 bp, Homo sapiens
gtttatcctttgtatccacaagcatttttcccatttggatttctgaaaatatcagaaatagattttattt

SEQ ID NO: 1123 - DNA, 72 bp, Homo sapiens
tcctttgtatccacaagcatttttcccatttggatttctgaaaatatcagaaatagattttattttcattag

SEQ ID NO: 1124 - DNA, 72 bp, Homo sapiens
cacaagcatttttcccatttggatttctgaaaatatcagaaatagattttattttcattagttatgcaaacc

SEQ ID NO: 1125 - DNA, 70 bp, Homo sapiens
cccatttggatttctgaaaatatcagaaatagattttattttcattagttatgcaaacctaccatttaaa

SEQ ID NO: 1126 - DNA, 73 bp, Homo sapiens
tggatttctgaaaatatcagaaatagattttattttcattagttatgcaaacctaccatttaaaatatgatag

SEQ ID NO: 1127 - DNA, 70 bp, Homo sapiens
gaaaatatcagaaatagattttattttcattagttatgcaaacctaccatttaaaatatgatagttcctt

SEQ ID NO: 1128 - DNA, 67 bp, Homo sapiens
atagattttattttcattagttatgcaaacctaccatttaaaatatgatagttcctttttaaaatct

SEQ ID NO: 1129 - DNA, 70 bp, Homo sapiens
ttcattagttatgcaaacctaccatttaaaatatgatagttcctttttaaaatcttattatatttattga

SEQ ID NO: 1130 - DNA, 69 bp, Homo sapiens
tagttatgcaaacctaccatttaaaatatgatagttcctttttaaaatcttattatatttattgattta

SEQ ID NO: 1131 - DNA, 70 bp, Homo sapiens
tttaaaatcttattatatttattgatttattatttattccaagacatcttgttatagcaaattcctttcc

SEQ ID NO: 1132 - DNA, 72 bp, Homo sapiens
tattatatttattgatttattatttattccaagacatcttgttatagcaaattcctttcccttggtgttgat

SEQ ID NO: 1133 - DNA, 72 bp, Homo sapiens
attgatttattatttattccaagacatcttgttatagcaaattcctttcccttggtgttgattatggaatta

SEQ ID NO: 1134 - DNA, 73 bp, Homo sapiens
tatttattccaagacatcttgttatagcaaattcctttcccttggtgttgattatggaattagactgaaggta

SEQ ID NO: 1135 - DNA, 73 bp, Homo sapiens
attccaagacatcttgttatagcaaattcctttcccttggtgttgattatggaattagactgaaggtagagaa

SEQ ID NO: 1136 - DNA, 72 bp, Homo sapiens
acatcttgttatagcaaattcctttcccttggtgttgattatggaattagactgaaggtagagaacaaacat

SEQ ID NO: 1137 - DNA, 71 bp, Homo sapiens
atcttgttatagcaaattcctttcccttggtgttgattatggaattagactgaaggtagagaacaaacatt

SEQ ID NO: 1138 - DNA, 71 bp, Homo sapiens
gttatagcaaattcctttcccttggtgttgattatggaattagactgaaggtagagaacaaacattttagc

SEQ ID NO: 1139 - DNA, 70 bp, Homo sapiens
agcaaattcctttcccttggtgttgattatggaattagactgaaggtagagaacaaacattttagcttct

SEQ ID NO: 1140 - DNA, 70 bp, Homo sapiens
tcctttcccttggtgttgattatggaattagactgaaggtagagaacaaacattttagcttctttaccta

SEQ ID NO: 1141 - DNA, 74 bp, Homo sapiens
cttggtgttgattatggaattagactgaaggtagagaacaaacattttagcttctttacctaggcatatagcaa

SEQ ID NO: 1142 - DNA, 75 bp, Homo sapiens
gtgttgattatggaattagactgaaggtagagaacaaacattttagcttctttacctaggcatatagcaaaagca

SEQ ID NO: 1143 - DNA, 76 bp, Homo sapiens
tgttgattatggaattagactgaaggtagagaacaaacattttagcttctttacctaggcatatagcaaaagcaga

SEQ ID NO: 1144 - DNA, 74 bp, Homo sapiens
attatggaattagactgaaggtagagaacaaacattttagcttctttacctaggcatatagcaaaagcagaagc

SEQ ID NO: 1145 - DNA, 72 bp, Homo sapiens
aattagactgaaggtagagaacaaacattttagcttctttacctaggcatatagcaaaagcagaagcttttg

SEQ ID NO: 1146 - DNA, 73 bp, Homo sapiens
tagactgaaggtagagaacaaacattttagcttctttacctaggcatatagcaaaagcagaagcttttgtgtt

SEQ ID NO: 1147 - DNA, 72 bp, Homo sapiens
gaacaaacattttagcttctttacctaggcatatagcaaaagcagaagcttttgtgtttgcctgggcaattt

SEQ ID NO: 1148 - DNA, 73 bp, Homo sapiens
aacattttagcttctttacctaggcatatagcaaaagcagaagcttttgtgtttgcctgggcaatttttgagc

SEQ ID NO: 1149 - DNA, 73 bp, Homo sapiens
ttctttacctaggcatatagcaaaagcagaagcttttgtgtttgcctgggcaatttttgagcggtagaaataa

SEQ ID NO: 1150 - DNA, 76 bp, Homo sapiens
taggcatatagcaaaagcagaagcttttgtgtttgcctgggcaatttttgagcggtagaaataatgggctgggtgc

SEQ ID NO: 1151 - DNA, 74 bp, Homo sapiens
aagcttttgtgtttgcctgggcaatttttgagcggtagaaataatgggctgggtgctgtggctcgtgcttgtaa

SEQ ID NO: 1152 - DNA, 69 bp, Homo sapiens
aagaaagaaataatggttgagtaacctataaaaatgtgttgagtctcagaactatttgtattttattat

SEQ ID NO: 1153 - DNA, 77 bp, Homo sapiens
tacaggtgtgagcatccgtgcccggccagagcaatttttttatagttccgatgatatgttttggttgtgtgtgagaa

SEQ ID NO: 1154 - DNA, 76 bp, Homo sapiens
agcatccgtgcccggccagagcaatttttttatagttccgatgatatgttttggttgtgtgtgagaatgcacttta

SEQ ID NO: 1155 - DNA, 73 bp, Homo sapiens
cccggccagagcaatttttttatagttccgatgatatgttttggttgtgtgtgagaatgcactttaatagaat

SEQ ID NO: 1156 - DNA, 76 bp, Homo sapiens
ccagagcaatttttttatagttccgatgatatgttttggttgtgtgtgagaatgcactttaatagaattacagctg

SEQ ID NO: 1157 - DNA, 78 bp, Homo sapiens
ttttatagttccgatgatatgttttggttgtgtgtgagaatgcactttaatagaattacagctgttattctagtgtga

SEQ ID NO: 1158 - DNA, 79 bp, Homo sapiens
ttccgatgatatgttttggttgtgtgtgagaatgcactttaatagaattacagctgttattctagtgtgatttagcaaa

SEQ ID NO: 1159 - DNA, 79 bp, Homo sapiens
ttggttgtgtgtgagaatgcactttaatagaattacagctgttattctagtgtgatttagcaaatggaggataaaatca

SEQ ID NO: 1160 - DNA, 81 bp, Homo sapiens
gtgtgtgagaatgcactttaatagaattacagctgttattctagtgtgatttagcaaatggaggataaaatcaatcataga

SEQ ID NO: 1161 - DNA, 76 bp, Homo sapiens
gcactttaatagaattacagctgttattctagtgtgatttagcaaatggaggataaaatcaatcatagaaagtttg

SEQ ID NO: 1162 - DNA, 76 bp, Homo sapiens
gaattacagctgttattctagtgtgatttagcaaatggaggataaaatcaatcatagaaagtttgggacttggtga

SEQ ID NO: 1163 - DNA, 75 bp, Homo sapiens
cagctgttattctagtgtgatttagcaaatggaggataaaatcaatcatagaaagtttgggacttggtgaaatct

SEQ ID NO: 1164 - DNA, 73 bp, Homo sapiens
gtgtgatttagcaaatggaggataaaatcaatcatagaaagtttgggacttggtgaaatctttatagcgttac

SEQ ID NO: 1165 - DNA, 72 bp, Homo sapiens
gcaaatggaggataaaatcaatcatagaaagtttgggacttggtgaaatctttatagcgttactctttgact

SEQ ID NO: 1166 - DNA, 69 bp, Homo sapiens
ggaggataaaatcaatcatagaaagtttgggacttggtgaaatctttatagcgttactctttgactttt

SEQ ID NO: 1167 - DNA, 68 bp, Homo sapiens
atcaatcatagaaagtttgggacttggtgaaatctttatagcgttactctttgacttttttttctttg

SEQ ID NO: 1168 - DNA, 67 bp, Homo sapiens
gtttgggacttggtgaaatctttatagcgttactctttgacttttttttctttgtatcatgttacgg

SEQ ID NO: 1169 - DNA, 69 bp, Homo sapiens
cttggtgaaatctttatagcgttactctttgacttttttttctttgtatcatgttacggtttgtggtga

SEQ ID NO: 1170 - DNA, 71 bp, Homo sapiens
ttatagcgttactctttgacttttttttctttgtatcatgttacggtttgtggtgaataggtcactacgca

SEQ ID NO: 1171 - DNA, 70 bp, Homo sapiens
ttactctttgacttttttttctttgtatcatgttacggtttgtggtgaataggtcactacgcagtggaac

SEQ ID NO: 1172 - DNA, 69 bp, Homo sapiens
ttttttttctttgtatcatgttacggtttgtggtgaataggtcactacgcagtggaacgtatggtttat

SEQ ID NO: 1173 - DNA, 71 bp, Homo sapiens
tttctttgtatcatgttacggtttgtggtgaataggtcactacgcagtggaacgtatggtttattagtaaa

SEQ ID NO: 1174 - DNA, 73 bp, Homo sapiens
atgttacggtttgtggtgaataggtcactacgcagtggaacgtatggtttattagtaaacactgacaatgaga

SEQ ID NO: 1175 - DNA, 76 bp, Homo sapiens
tttgtggtgaataggtcactacgcagtggaacgtatggtttattagtaaacactgacaatgagatgaggctgttcc

SEQ ID NO: 1176 - DNA, 73 bp, Homo sapiens
aataggtcactacgcagtggaacgtatggtttattagtaaacactgacaatgagatgaggctgttcctggggg

SEQ ID NO: 1177 - DNA, 75 bp, Homo sapiens
agtggaacgtatggtttattagtaaacactgacaatgagatgaggctgttcctgggggtgtcacagtagattgaa

SEQ ID NO: 1178 - DNA, 76 bp, Homo sapiens
tatggtttattagtaaacactgacaatgagatgaggctgttcctgggggtgtcacagtagattgaaggctggaaaa

SEQ ID NO: 1179 - DNA, 77 bp, Homo sapiens
ttattagtaaacactgacaatgagatgaggctgttcctgggggtgtcacagtagattgaaggctggaaaagatagga

SEQ ID NO: 1180 - DNA, 75 bp, Homo sapiens
acactgacaatgagatgaggctgttcctgggggtgtcacagtagattgaaggctggaaaagataggaaaataagg

SEQ ID NO: 1181 - DNA, 73 bp, Homo sapiens
agatgaggctgttcctgggggtgtcacagtagattgaaggctggaaaagataggaaaataaggtgggtattca

SEQ ID NO: 1182 - DNA, 73 bp, Homo sapiens
tgttcctgggggtgtcacagtagattgaaggctggaaaagataggaaaataaggtgggtattcagagagagaa

SEQ ID NO: 1183 - DNA, 76 bp, Homo sapiens
tgtcacagtagattgaaggctggaaaagataggaaaataaggtgggtattcagagagagaagataatgaataggga

SEQ ID NO: 1184 - DNA, 78 bp, Homo sapiens
tggaaaagataggaaaataaggtgggtattcagagagagaagataatgaatagggagtgtcagaatgccagcatcatt

SEQ ID NO: 1185 - DNA, 79 bp, Homo sapiens
ataggaaaataaggtgggtattcagagagagaagataatgaatagggagtgtcagaatgccagcatcatttgcctcaaa

SEQ ID NO: 1186 - DNA, 82 bp, Homo sapiens
taaggtgggtattcagagagagaagataatgaatagggagtgtcagaatgccagcatcatttgcctcaaatgccacttgtta

SEQ ID NO: 1187 - DNA, 82 bp, Homo sapiens
gagagagaagataatgaatagggagtgtcagaatgccagcatcatttgcctcaaatgccacttgttacgtgcttccactctt

SEQ ID NO: 1188 - DNA, 79 bp, Homo sapiens
aagataatgaatagggagtgtcagaatgccagcatcatttgcctcaaatgccacttgttacgtgcttccactcttttat

SEQ ID NO: 1189 - DNA, 80 bp, Homo sapiens
aatagggagtgtcagaatgccagcatcatttgcctcaaatgccacttgttacgtgcttccactcttttattctctctgag

SEQ ID NO: 1190 - DNA, 80 bp, Homo sapiens
agaatgccagcatcatttgcctcaaatgccacttgttacgtgcttccactcttttattctctctgaggacatggtcaaag

SEQ ID NO: 1191 - DNA, 80 bp, Homo sapiens
atcatttgcctcaaatgccacttgttacgtgcttccactcttttattctctctgaggacatggtcaaagtgtcagtgtga

SEQ ID NO: 1192 - DNA, 78 bp, Homo sapiens
tcaaatgccacttgttacgtgcttccactcttttattctctctgaggacatggtcaaagtgtcagtgtgaataaggta

SEQ ID NO: 1193 - DNA, 74 bp, Homo sapiens
acttgttacgtgcttccactcttttattctctctgaggacatggtcaaagtgtcagtgtgaataaggtagttaa

SEQ ID NO: 1194 - DNA, 74 bp, Homo sapiens
tacgtgcttccactcttttattctctctgaggacatggtcaaagtgtcagtgtgaataaggtagttaacttaaa

SEQ ID NO: 1195 - DNA, 71 bp, Homo sapiens
ttttattctctctgaggacatggtcaaagtgtcagtgtgaataaggtagttaacttaaaaggtgtattagg

SEQ ID NO: 1196 - DNA, 74 bp, Homo sapiens
ttctctctgaggacatggtcaaagtgtcagtgtgaataaggtagttaacttaaaaggtgtattagggctgggca

SEQ ID NO: 1197 - DNA, 75 bp, Homo sapiens
gttgcaatgagctatagtcacactactgcacactagtccaggtgacaaagtgaaaccctctttaagaaaaagaag

SEQ ID NO: 1198 - DNA, 72 bp, Homo sapiens
aatgagctatagtcacactactgcacactagtccaggtgacaaagtgaaaccctctttaagaaaaagaagtt

SEQ ID NO: 1199 - DNA, 70 bp, Homo sapiens
agtcacactactgcacactagtccaggtgacaaagtgaaaccctctttaagaaaaagaagtttttgcagg

SEQ ID NO: 1200 - DNA, 66 bp, Homo sapiens
cactagtccaggtgacaaagtgaaaccctctttaagaaaaagaagtttttgcaggggggcatttta

SEQ ID NO: 1201 - DNA, 64 bp, Homo sapiens
ccaggtgacaaagtgaaaccctctttaagaaaaagaagtttttgcaggggggcattttatttta

SEQ ID NO: 1202 - DNA, 65 bp, Homo sapiens
gtgaaaccctctttaagaaaaagaagtttttgcaggggggcattttattttaacatcatttggtg

SEQ ID NO: 1203 - DNA, 68 bp, Homo sapiens
tttaagaaaaagaagtttttgcaggggggcattttattttaacatcatttggtgggatgtgggtgaca

SEQ ID NO: 1204 - DNA, 67 bp, Homo sapiens
aaaaagaagtttttgcaggggggcattttattttaacatcatttggtgggatgtgggtgacattaag

SEQ ID NO: 1205 - DNA, 66 bp, Homo sapiens
tttttgcaggggggcattttattttaacatcatttggtgggatgtgggtgacattaaggttttttt

SEQ ID NO: 1206 - DNA, 67 bp, Homo sapiens
aggcgtgagccatgttgcctggccaaggatttttaaagaagaggcaaaagcaaaacctttttaaaat

SEQ ID NO: 1207 - DNA, 67 bp, Homo sapiens
gagccatgttgcctggccaaggatttttaaagaagaggcaaaagcaaaacctttttaaaattatatt

SEQ ID NO: 1208 - DNA, 73 bp, Homo sapiens
agccactatgcccggtctgtagtgtataattatgaaaggcagggtcctttgtaagaaacagataagcaaagaa

SEQ ID NO: 1209 - DNA, 71 bp, Homo sapiens
ctatgcccggtctgtagtgtataattatgaaaggcagggtcctttgtaagaaacagataagcaaagaaagg

SEQ ID NO: 1210 - DNA, 73 bp, Homo sapiens
ctgtagtgtataattatgaaaggcagggtcctttgtaagaaacagataagcaaagaaagggcattgtattata

SEQ ID NO: 1211 - DNA, 72 bp, Homo sapiens
ataattatgaaaggcagggtcctttgtaagaaacagataagcaaagaaagggcattgtattataaggacaca

SEQ ID NO: 1212 - DNA, 70 bp, Homo sapiens
agggtcctttgtaagaaacagataagcaaagaaagggcattgtattataaggacacaggagtcaagaacc

SEQ ID NO: 1213 - DNA, 73 bp, Homo sapiens
tgtaagaaacagataagcaaagaaagggcattgtattataaggacacaggagtcaagaaccctaacatggaaa

SEQ ID NO: 1214 - DNA, 72 bp, Homo sapiens
aacagataagcaaagaaagggcattgtattataaggacacaggagtcaagaaccctaacatggaaatgtatt

SEQ ID NO: 1215 - DNA, 71 bp, Homo sapiens
aaagaaagggcattgtattataaggacacaggagtcaagaaccctaacatggaaatgtatttcacccagaa

SEQ ID NO: 1216 - DNA, 71 bp, Homo sapiens
attgtattataaggacacaggagtcaagaaccctaacatggaaatgtatttcacccagaaagggaattgaa

SEQ ID NO: 1217 - DNA, 71 bp, Homo sapiens
taaggacacaggagtcaagaaccctaacatggaaatgtatttcacccagaaagggaattgaattagtctta

SEQ ID NO: 1218 - DNA, 70 bp, Homo sapiens
aggagtcaagaaccctaacatggaaatgtatttcacccagaaagggaattgaattagtcttatgaatctt

SEQ ID NO: 1219 - DNA, 69 bp, Homo sapiens
gaaccctaacatggaaatgtatttcacccagaaagggaattgaattagtcttatgaatcttttttctac

SEQ ID NO: 1220 - DNA, 74 bp, Homo sapiens
gaaatgtatttcacccagaaagggaattgaattagtcttatgaatcttttttctacttttgtctgcatgcctgc

SEQ ID NO: 1221 - DNA, 73 bp, Homo sapiens
atttcacccagaaagggaattgaattagtcttatgaatcttttttctacttttgtctgcatgcctgcttccat

SEQ ID NO: 1222 - DNA, 72 bp, Homo sapiens
gaaagggaattgaattagtcttatgaatcttttttctacttttgtctgcatgcctgcttccattcttttctt

SEQ ID NO: 1223 - DNA, 73 bp, Homo sapiens
aattagtcttatgaatcttttttctacttttgtctgcatgcctgcttccattcttttctttctgccgacttac

SEQ ID NO: 1224 - DNA, 76 bp, Homo sapiens
tatgaatcttttttctacttttgtctgcatgcctgcttccattcttttctttctgccgacttactgtgctacttgt

SEQ ID NO: 1225 - DNA, 74 bp, Homo sapiens
tttttctacttttgtctgcatgcctgcttccattcttttctttctgccgacttactgtgctacttgttccaaaa

SEQ ID NO: 1226 - DNA, 76 bp, Homo sapiens
ttttctacttttgtctgcatgcctgcttccattcttttctttctgccgacttactgtgctacttgttccaaaatga

SEQ ID NO: 1227 - DNA, 78 bp, Homo sapiens
tacttttgtctgcatgcctgcttccattcttttctttctgccgacttactgtgctacttgttccaaaatgagtagcta

SEQ ID NO: 1228 - DNA, 76 bp, Homo sapiens
tctgcatgcctgcttccattcttttctttctgccgacttactgtgctacttgttccaaaatgagtagctaactttt

SEQ ID NO: 1229 - DNA, 74 bp, Homo sapiens
atgcctgcttccattcttttctttctgccgacttactgtgctacttgttccaaaatgagtagctaactttttga

SEQ ID NO: 1230 - DNA, 71 bp, Homo sapiens
cattcttttctttctgccgacttactgtgctacttgttccaaaatgagtagctaactttttgagtgtttac

SEQ ID NO: 1231 - DNA, 71 bp, Homo sapiens
ttcttttctttctgccgacttactgtgctacttgttccaaaatgagtagctaactttttgagtgtttacta

SEQ ID NO: 1232 - DNA, 75 bp, Homo sapiens
acttactgtgctacttgttccaaaatgagtagctaactttttgagtgtttactatgtgcccacatactgtgctaa

SEQ ID NO: 1233 - DNA, 75 bp, Homo sapiens
tgctacttgttccaaaatgagtagctaactttttgagtgtttactatgtgcccacatactgtgctaaatgtttta

SEQ ID NO: 1234 - DNA, 75 bp, Homo sapiens
ttccaaaatgagtagctaactttttgagtgtttactatgtgcccacatactgtgctaaatgttttatgccagtta

SEQ ID NO: 1235 - DNA, 82 bp, Homo sapiens
ctatgtgcccacatactgtgctaaatgttttatgccagttacttcatttaagcatcctgtcacatctatgaggtggatatta

SEQ ID NO: 1236 - DNA, 77 bp, Homo sapiens
gctaaatgttttatgccagttacttcatttaagcatcctgtcacatctatgaggtggatattattcttactttatgg

SEQ ID NO: 1237 - DNA, 75 bp, Homo sapiens
cctgtcacatctatgaggtggatattattcttactttatgggtaaggatactatagttttaagagagatagatgt

SEQ ID NO: 1238 - DNA, 73 bp, Homo sapiens
gaggtggatattattcttactttatgggtaaggatactatagttttaagagagatagatgttttatgacagtc

SEQ ID NO: 1239 - DNA, 75 bp, Homo sapiens
tattcttactttatgggtaaggatactatagttttaagagagatagatgttttatgacagtctgggatgtgatta

SEQ ID NO: 1240 - DNA, 75 bp, Homo sapiens
tactttatgggtaaggatactatagttttaagagagatagatgttttatgacagtctgggatgtgattaagctct

SEQ ID NO: 1241 - DNA, 75 bp, Homo sapiens
ggtaaggatactatagttttaagagagatagatgttttatgacagtctgggatgtgattaagctcttaaccactg

SEQ ID NO: 1242 - DNA, 76 bp, Homo sapiens
tatagttttaagagagatagatgttttatgacagtctgggatgtgattaagctcttaaccactgtgttacctctta

SEQ ID NO: 1243 - DNA, 76 bp, Homo sapiens
aagagagatagatgttttatgacagtctgggatgtgattaagctcttaaccactgtgttacctcttaaccaccatg

SEQ ID NO: 1244 - DNA, 75 bp, Homo sapiens
atgttttatgacagtctgggatgtgattaagctcttaaccactgtgttacctcttaaccaccatgttgcctccta

SEQ ID NO: 1245 - DNA, 76 bp, Homo sapiens
agtctgggatgtgattaagctcttaaccactgtgttacctcttaaccaccatgttgcctcctatggtgaaagatga

SEQ ID NO: 1246 - DNA, 76 bp, Homo sapiens
ttaaccactgtgttacctcttaaccaccatgttgcctcctatggtgaaagatgacgatacctcagctcctgatatt

SEQ ID NO: 1247 - DNA, 77 bp, Homo sapiens
actgtgttacctcttaaccaccatgttgcctcctatggtgaaagatgacgatacctcagctcctgatattttccatc

SEQ ID NO: 1248 - DNA, 79 bp, Homo sapiens
tcttaaccaccatgttgcctcctatggtgaaagatgacgatacctcagctcctgatattttccatctcctgtctcaaaa

SEQ ID NO: 1249 - DNA, 78 bp, Homo sapiens
atgttgcctcctatggtgaaagatgacgatacctcagctcctgatattttccatctcctgtctcaaaagcgagtaaat

SEQ ID NO: 1250 - DNA, 79 bp, Homo sapiens
tatggtgaaagatgacgatacctcagctcctgatattttccatctcctgtctcaaaagcgagtaaattcagtcccaatc

SEQ ID NO: 1251 - DNA, 78 bp, Homo sapiens
aaagatgacgatacctcagctcctgatattttccatctcctgtctcaaaagcgagtaaattcagtcccaatctcatgt

SEQ ID NO: 1252 - DNA, 78 bp, Homo sapiens
atacctcagctcctgatattttccatctcctgtctcaaaagcgagtaaattcagtcccaatctcatgttcctttgaga

SEQ ID NO: 1253 - DNA, 76 bp, Homo sapiens
tgatattttccatctcctgtctcaaaagcgagtaaattcagtcccaatctcatgttcctttgagaagacaataaaa

SEQ ID NO: 1254 - DNA, 71 bp, Homo sapiens
tctcaaaagcgagtaaattcagtcccaatctcatgttcctttgagaagacaataaaacaaaagcccaactt

SEQ ID NO: 1255 - DNA, 72 bp, Homo sapiens
agtcccaatctcatgttcctttgagaagacaataaaacaaaagcccaactttggtttggcttggatgagata

SEQ ID NO: 1256 - DNA, 72 bp, Homo sapiens
atgttcctttgagaagacaataaaacaaaagcccaactttggtttggcttggatgagatacctagcactgga

SEQ ID NO: 1257 - DNA, 70 bp, Homo sapiens
ttgagaagacaataaaacaaaagcccaactttggtttggcttggatgagatacctagcactggaccgttt

SEQ ID NO: 1258 - DNA, 71 bp, Homo sapiens
aataaaacaaaagcccaactttggtttggcttggatgagatacctagcactggaccgttttgctatggtga

SEQ ID NO: 1259 - DNA, 72 bp, Homo sapiens
aaaagcccaactttggtttggcttggatgagatacctagcactggaccgttttgctatggtgagacaatagg

SEQ ID NO: 1260 - DNA, 76 bp, Homo sapiens
actttggtttggcttggatgagatacctagcactggaccgttttgctatggtgagacaatagggtcaagttgctca

SEQ ID NO: 1261 - DNA, 78 bp, Homo sapiens
cttggatgagatacctagcactggaccgttttgctatggtgagacaatagggtcaagttgctcagacacaggaagaac

SEQ ID NO: 1262 - DNA, 79 bp, Homo sapiens
ttttgctatggtgagacaatagggtcaagttgctcagacacaggaagaactctctggactggggatagctaacttctca

SEQ ID NO: 1263 - DNA, 73 bp, Homo sapiens
agacacaggaagaactctctggactggggatagctaacttctcagggaagggggattatgacctggcagtacc

SEQ ID NO: 1264 - DNA, 74 bp, Homo sapiens
aagaactctctggactggggatagctaacttctcagggaagggggattatgacctggcagtaccctgacagata

SEQ ID NO: 1265 - DNA, 74 bp, Homo sapiens
tggactggggatagctaacttctcagggaagggggattatgacctggcagtaccctgacagataccgaacagta

SEQ ID NO: 1266 - DNA, 74 bp, Homo sapiens
atagctaacttctcagggaagggggattatgacctggcagtaccctgacagataccgaacagtaaagattcaga

SEQ ID NO: 1267 - DNA, 71 bp, Homo sapiens
aacttctcagggaagggggattatgacctggcagtaccctgacagataccgaacagtaaagattcagaaaa

SEQ ID NO: 1268 - DNA, 73 bp, Homo sapiens
ttatgacctggcagtaccctgacagataccgaacagtaaagattcagaaaagtaaaggagcattttcagaaaa

SEQ ID NO: 1269 - DNA, 70 bp, Homo sapiens
cagtaccctgacagataccgaacagtaaagattcagaaaagtaaaggagcattttcagaaaatttaggta

SEQ ID NO: 1270 - DNA, 71 bp, Homo sapiens
gacagataccgaacagtaaagattcagaaaagtaaaggagcattttcagaaaatttaggtactatatagaa

SEQ ID NO: 1271 - DNA, 71 bp, Homo sapiens
gaacagtaaagattcagaaaagtaaaggagcattttcagaaaatttaggtactatatagaatgaacttgaa

SEQ ID NO: 1272 - DNA, 69 bp, Homo sapiens
gattcagaaaagtaaaggagcattttcagaaaatttaggtactatatagaatgaacttgaaagggaagg

SEQ ID NO: 1273 - DNA, 70 bp, Homo sapiens
aggagcattttcagaaaatttaggtactatatagaatgaacttgaaagggaaggttagagatggacttag

SEQ ID NO: 1274 - DNA, 73 bp, Homo sapiens
tcagaaaatttaggtactatatagaatgaacttgaaagggaaggttagagatggacttaggatgctattacta

SEQ ID NO: 1275 - DNA, 74 bp, Homo sapiens
taggtactatatagaatgaacttgaaagggaaggttagagatggacttaggatgctattactataaagatgtgg

SEQ ID NO: 1276 - DNA, 75 bp, Homo sapiens
ctatatagaatgaacttgaaagggaaggttagagatggacttaggatgctattactataaagatgtgggaataca

SEQ ID NO: 1277 - DNA, 72 bp, Homo sapiens
atgaacttgaaagggaaggttagagatggacttaggatgctattactataaagatgtgggaatacaaaagga

SEQ ID NO: 1278 - DNA, 73 bp, Homo sapiens
tagagatggacttaggatgctattactataaagatgtgggaatacaaaaggagtagaaaagaagggagcattt

SEQ ID NO: 1279 - DNA, 73 bp, Homo sapiens
cttaggatgctattactataaagatgtgggaatacaaaaggagtagaaaagaagggagcattttgaagtatga

SEQ ID NO: 1280 - DNA, 72 bp, Homo sapiens
attactataaagatgtgggaatacaaaaggagtagaaaagaagggagcattttgaagtatgaaatgacagaa

SEQ ID NO: 1281 - DNA, 73 bp, Homo sapiens
aagatgtgggaatacaaaaggagtagaaaagaagggagcattttgaagtatgaaatgacagaaatggatgtta

SEQ ID NO: 1282 - DNA, 70 bp, Homo sapiens
caaaaggagtagaaaagaagggagcattttgaagtatgaaatgacagaaatggatgttaggtaaagggaa

SEQ ID NO: 1283 - DNA, 70 bp, Homo sapiens
agtagaaaagaagggagcattttgaagtatgaaatgacagaaatggatgttaggtaaagggaagggaata

SEQ ID NO: 1284 - DNA, 72 bp, Homo sapiens
aagggagcattttgaagtatgaaatgacagaaatggatgttaggtaaagggaagggaataatcaaagatgat

SEQ ID NO: 1285 - DNA, 77 bp, Homo sapiens
tgacagaaatggatgttaggtaaagggaagggaataatcaaagatgattcttagatatcaaggtgctcactcattaa

SEQ ID NO: 1286 - DNA, 76 bp, Homo sapiens
ggtaaagggaagggaataatcaaagatgattcttagatatcaaggtgctcactcattaatggtgataccattaata

SEQ ID NO: 1287 - DNA, 78 bp, Homo sapiens
ggaagggaataatcaaagatgattcttagatatcaaggtgctcactcattaatggtgataccattaataaatattaga

SEQ ID NO: 1288 - DNA, 80 bp, Homo sapiens
aagatgattcttagatatcaaggtgctcactcattaatggtgataccattaataaatattagagcagttgtagtagagga

SEQ ID NO: 1289 - DNA, 78 bp, Homo sapiens
attcttagatatcaaggtgctcactcattaatggtgataccattaataaatattagagcagttgtagtagaggaagga

SEQ ID NO: 1290 - DNA, 80 bp, Homo sapiens
tatcaaggtgctcactcattaatggtgataccattaataaatattagagcagttgtagtagaggaaggagagcaagtgaa

SEQ ID NO: 1291 - DNA, 76 bp, Homo sapiens
actcattaatggtgataccattaataaatattagagcagttgtagtagaggaaggagagcaagtgaagactaaaga

SEQ ID NO: 1292 - DNA, 74 bp, Homo sapiens
aatggtgataccattaataaatattagagcagttgtagtagaggaaggagagcaagtgaagactaaagaaagac

SEQ ID NO: 1293 - DNA, 71 bp, Homo sapiens
attaataaatattagagcagttgtagtagaggaaggagagcaagtgaagactaaagaaagacctgttttgg

SEQ ID NO: 1294 - DNA, 73 bp, Homo sapiens
atattagagcagttgtagtagaggaaggagagcaagtgaagactaaagaaagacctgttttgggcatgttggt

SEQ ID NO: 1295 - DNA, 74 bp, Homo sapiens
tagtagaggaaggagagcaagtgaagactaaagaaagacctgttttgggcatgttggttttgatgctgctaaaa

SEQ ID NO: 1296 - DNA, 71 bp, Homo sapiens
aaggagagcaagtgaagactaaagaaagacctgttttgggcatgttggttttgatgctgctaaaatttttg

SEQ ID NO: 1297 - DNA, 70 bp, Homo sapiens
aagtgaagactaaagaaagacctgttttgggcatgttggttttgatgctgctaaaatttttgtattggag

SEQ ID NO: 1298 - DNA, 69 bp, Homo sapiens
actaaagaaagacctgttttgggcatgttggttttgatgctgctaaaatttttgtattggaggccgggc

SEQ ID NO: 1299 - DNA, 74 bp, Homo sapiens
agacctgttttgggcatgttggttttgatgctgctaaaatttttgtattggaggccgggcgctgtgtcttatgc

SEQ ID NO: 1300 - DNA, 73 bp, Homo sapiens
aaaaaagatttttgtattggaaatttaggatacagttacagagtgaagtcagagttgaagctgcatagaggga

SEQ ID NO: 1301 - DNA, 74 bp, Homo sapiens
agatttttgtattggaaatttaggatacagttacagagtgaagtcagagttgaagctgcatagagggaaaacag

SEQ ID NO: 1302 - DNA, 76 bp, Homo sapiens
attggaaatttaggatacagttacagagtgaagtcagagttgaagctgcatagagggaaaacagggaaccacatgc

SEQ ID NO: 1303 - DNA, 74 bp, Homo sapiens
aaatttaggatacagttacagagtgaagtcagagttgaagctgcatagagggaaaacagggaaccacatgcctt

SEQ ID NO: 1304 - DNA, 74 bp, Homo sapiens
taggatacagttacagagtgaagtcagagttgaagctgcatagagggaaaacagggaaccacatgccttttttt

SEQ ID NO: 1305 - DNA, 75 bp, Homo sapiens
tttttttttgctagagaagagaaatgttcacatttgggagagtaagagaactgattatcaaggattgatagtgaa

SEQ ID NO: 1306 - DNA, 77 bp, Homo sapiens
ctagagaagagaaatgttcacatttgggagagtaagagaactgattatcaaggattgatagtgaactgtcaggaaaa

SEQ ID NO: 1307 - DNA, 73 bp, Homo sapiens
gttcacatttgggagagtaagagaactgattatcaaggattgatagtgaactgtcaggaaaagaacctaaaaa

SEQ ID NO: 1308 - DNA, 74 bp, Homo sapiens
agtaagagaactgattatcaaggattgatagtgaactgtcaggaaaagaacctaaaaagtacagtcgccacaga

SEQ ID NO: 1309 - DNA, 74 bp, Homo sapiens
aactgattatcaaggattgatagtgaactgtcaggaaaagaacctaaaaagtacagtcgccacagagacaacta

SEQ ID NO: 1310 - DNA, 75 bp, Homo sapiens
tatcaaggattgatagtgaactgtcaggaaaagaacctaaaaagtacagtcgccacagagacaactaggtgttca

SEQ ID NO: 1311 - DNA, 71 bp, Homo sapiens
atagtgaactgtcaggaaaagaacctaaaaagtacagtcgccacagagacaactaggtgttcaggaaagaa

SEQ ID NO: 1312 - DNA, 68 bp, Homo sapiens
aggaaaagaacctaaaaagtacagtcgccacagagacaactaggtgttcaggaaagaaaagttgatag

SEQ ID NO: 1313 - DNA, 71 bp, Homo sapiens
aagaacctaaaaagtacagtcgccacagagacaactaggtgttcaggaaagaaaagttgatagtgacagta

SEQ ID NO: 1314 - DNA, 74 bp, Homo sapiens
aaagtacagtcgccacagagacaactaggtgttcaggaaagaaaagttgatagtgacagtactgccaggaacgc

SEQ ID NO: 1315 - DNA, 70 bp, Homo sapiens
taggtgttcaggaaagaaaagttgatagtgacagtactgccaggaacgctgaaggactaagaaaagtttt

SEQ ID NO: 1316 - DNA, 72 bp, Homo sapiens
ggaaagaaaagttgatagtgacagtactgccaggaacgctgaaggactaagaaaagtttttgagacagctaa

SEQ ID NO: 1317 - DNA, 73 bp, Homo sapiens
aaaagttgatagtgacagtactgccaggaacgctgaaggactaagaaaagtttttgagacagctaatacagct

SEQ ID NO: 1318 - DNA, 74 bp, Homo sapiens
tagtgacagtactgccaggaacgctgaaggactaagaaaagtttttgagacagctaatacagcttcctggtttg

SEQ ID NO: 1319 - DNA, 71 bp, Homo sapiens
actgccaggaacgctgaaggactaagaaaagtttttgagacagctaatacagcttcctggtttgggtagaa

SEQ ID NO: 1320 - DNA, 69 bp, Homo sapiens
tgaaggactaagaaaagtttttgagacagctaatacagcttcctggtttgggtagaaccctggttgtag

SEQ ID NO: 1321 - DNA, 71 bp, Homo sapiens
gaaaagtttttgagacagctaatacagcttcctggtttgggtagaaccctggttgtagggcatggaagata

SEQ ID NO: 1322 - DNA, 72 bp, Homo sapiens
tcctggtttgggtagaaccctggttgtagggcatggaagatagaggatttgattgttgtgtggaaagtataa

SEQ ID NO: 1323 - DNA, 71 bp, Homo sapiens
tttgggtagaaccctggttgtagggcatggaagatagaggatttgattgttgtgtggaaagtataaggaaa

SEQ ID NO: 1324 - DNA, 70 bp, Homo sapiens
accctggttgtagggcatggaagatagaggatttgattgttgtgtggaaagtataaggaaagagaaaaat

SEQ ID NO: 1325 - DNA, 74 bp, Homo sapiens
gcatggaagatagaggatttgattgttgtgtggaaagtataaggaaagagaaaaattaaaggagatgaggttga

SEQ ID NO: 1326 - DNA, 69 bp, Homo sapiens
agaggatttgattgttgtgtggaaagtataaggaaagagaaaaattaaaggagatgaggttgaggaaag

SEQ ID NO: 1327 - DNA, 67 bp, Homo sapiens
gattgttgtgtggaaagtataaggaaagagaaaaattaaaggagatgaggttgaggaaagtttggtt

SEQ ID NO: 1328 - DNA, 66 bp, Homo sapiens
tgtgtggaaagtataaggaaagagaaaaattaaaggagatgaggttgaggaaagtttggtttttaa

SEQ ID NO: 1329 - DNA, 62 bp, Homo sapiens
aggaaagagaaaaattaaaggagatgaggttgaggaaagtttggtttttaagggaagttctt

SEQ ID NO: 1330 - DNA, 65 bp, Homo sapiens
aaaattaaaggagatgaggttgaggaaagtttggtttttaagggaagttctttgtagatagacat

SEQ ID NO: 1331 - DNA, 69 bp, Homo sapiens
ggagatgaggttgaggaaagtttggtttttaagggaagttctttgtagatagacattgattgtttagaa

SEQ ID NO: 1332 - DNA, 67 bp, Homo sapiens
tgaggaaagtttggtttttaagggaagttctttgtagatagacattgattgtttagaaaaagcaccg

SEQ ID NO: 1333 - DNA, 68 bp, Homo sapiens
gtttggtttttaagggaagttctttgtagatagacattgattgtttagaaaaagcaccgtgtctccca

SEQ ID NO: 1334 - DNA, 68 bp, Homo sapiens
ttttaagggaagttctttgtagatagacattgattgtttagaaaaagcaccgtgtctcccaaaacaaa

SEQ ID NO: 1335 - DNA, 68 bp, Homo sapiens
gttctttgtagatagacattgattgtttagaaaaagcaccgtgtctcccaaaacaaaaaaattaaaca

SEQ ID NO: 1336 - DNA, 76 bp, Homo sapiens
agggtctcgctttttgcccacgctggaatcagtggtgcgattttagttgactgcaacatcgaactctggggctcaa

SEQ ID NO: 1337 - DNA, 77 bp, Homo sapiens
ctcgctttttgcccacgctggaatcagtggtgcgattttagttgactgcaacatcgaactctggggctcaaggaatc

SEQ ID NO: 1338 - DNA, 79 bp, Homo sapiens
acgctggaatcagtggtgcgattttagttgactgcaacatcgaactctggggctcaaggaatcctctcacttcagtctc

SEQ ID NO: 1339 - DNA, 77 bp, Homo sapiens
atgcctggcctattttttatttagtgagcatttgttctgaattactgcaggctgcagtgacttattagaaatttatc

SEQ ID NO: 1340 - DNA, 75 bp, Homo sapiens
ggcctattttttatttagtgagcatttgttctgaattactgcaggctgcagtgacttattagaaatttatctact

SEQ ID NO: 1341 - DNA, 80 bp, Homo sapiens
tttagtgagcatttgttctgaattactgcaggctgcagtgacttattagaaatttatctacttacataattttgatgaga

SEQ ID NO: 1342 - DNA, 81 bp, Homo sapiens
gcatttgttctgaattactgcaggctgcagtgacttattagaaatttatctacttacataattttgatgagatacagaaga

SEQ ID NO: 1343 - DNA, 77 bp, Homo sapiens
ctgaattactgcaggctgcagtgacttattagaaatttatctacttacataattttgatgagatacagaagaatttt

SEQ ID NO: 1344 - DNA, 74 bp, Homo sapiens
gcaggctgcagtgacttattagaaatttatctacttacataattttgatgagatacagaagaatttttaaaaat

SEQ ID NO: 1345 - DNA, 70 bp, Homo sapiens
ttacaggtgtgagtgaccgtatctggccagagaggacattttagattgtaaatattctactttttttttt

SEQ ID NO: 1346 - DNA, 73 bp, Homo sapiens
tattttttttaattctctgctgatttggaggtcatatgctctatttcttttattttagtgattgcacttaaag

SEQ ID NO: 1347 - DNA, 77 bp, Homo sapiens
ttaattctctgctgatttggaggtcatatgctctatttcttttattttagtgattgcacttaaagttttaacatgca

SEQ ID NO: 1348 - DNA, 77 bp, Homo sapiens
tctgctgatttggaggtcatatgctctatttcttttattttagtgattgcacttaaagttttaacatgcatacttaa

SEQ ID NO: 1349 - DNA, 72 bp, Homo sapiens
ggaggtcatatgctctatttcttttattttagtgattgcacttaaagttttaacatgcatacttaatgtttt

SEQ ID NO: 1350 - DNA, 72 bp, Homo sapiens
gctctatttcttttattttagtgattgcacttaaagttttaacatgcatacttaatgtttttctgagtctta

SEQ ID NO: 1351 - DNA, 73 bp, Homo sapiens
tattttagtgattgcacttaaagttttaacatgcatacttaatgtttttctgagtcttaatatctgtactccg

SEQ ID NO: 1352 - DNA, 74 bp, Homo sapiens
gtgattgcacttaaagttttaacatgcatacttaatgtttttctgagtcttaatatctgtactccgtttgaaca

SEQ ID NO: 1353 - DNA, 70 bp, Homo sapiens
cttaaagttttaacatgcatacttaatgtttttctgagtcttaatatctgtactccgtttgaacaaaaca

SEQ ID NO: 1354 - DNA, 70 bp, Homo sapiens
atgcatacttaatgtttttctgagtcttaatatctgtactccgtttgaacaaaacaaaggtccttgggac

SEQ ID NO: 1355 - DNA, 69 bp, Homo sapiens
taatgtttttctgagtcttaatatctgtactccgtttgaacaaaacaaaggtccttgggacgccttgat

SEQ ID NO: 1356 - DNA, 68 bp, Homo sapiens
ttttctgagtcttaatatctgtactccgtttgaacaaaacaaaggtccttgggacgccttgattcctt

SEQ ID NO: 1357 - DNA, 66 bp, Homo sapiens
ttaatatctgtactccgtttgaacaaaacaaaggtccttgggacgccttgattcctttggttcttt

SEQ ID NO: 1358 - DNA, 64 bp, Homo sapiens
gtactccgtttgaacaaaacaaaggtccttgggacgccttgattcctttggttctttttccctc

SEQ ID NO: 1359 - DNA, 67 bp, Homo sapiens
aaaacaaaggtccttgggacgccttgattcctttggttctttttccctcgcacaatctatgttattg

SEQ ID NO: 1360 - DNA, 68 bp, Homo sapiens
aaaggtccttgggacgccttgattcctttggttctttttccctcgcacaatctatgttattgttgtct

SEQ ID NO: 1361 - DNA, 70 bp, Homo sapiens
tccttgggacgccttgattcctttggttctttttccctcgcacaatctatgttattgttgtctttattac

SEQ ID NO: 1362 - DNA, 71 bp, Homo sapiens
acgccttgattcctttggttctttttccctcgcacaatctatgttattgttgtctttattactctgctgtt

SEQ ID NO: 1363 - DNA, 71 bp, Homo sapiens
cttgattcctttggttctttttccctcgcacaatctatgttattgttgtctttattactctgctgttttct

SEQ ID NO: 1364 - DNA, 70 bp, Homo sapiens
gattcctttggttctttttccctcgcacaatctatgttattgttgtctttattactctgctgttttcttt

SEQ ID NO: 1365 - DNA, 68 bp, Homo sapiens
ctttggttctttttccctcgcacaatctatgttattgttgtctttattactctgctgttttctttttt

SEQ ID NO: 1366 - DNA, 70 bp, Homo sapiens
gtgagccactgtgcgtcttattttgaatcttctaaataatcgtgtgttttaaaaaaatagttatttataa

SEQ ID NO: 1367 - DNA, 68 bp, Homo sapiens
ctgtgcgtcttattttgaatcttctaaataatcgtgtgttttaaaaaaatagttatttataattaggc

SEQ ID NO: 1368 - DNA, 69 bp, Homo sapiens
tgaatcttctaaataatcgtgtgttttaaaaaaatagttatttataattaggcttaatattactcatgt

SEQ ID NO: 1369 - DNA, 66 bp, Homo sapiens
cttctaaataatcgtgtgttttaaaaaaatagttatttataattaggcttaatattactcatgttt

SEQ ID NO: 1370 - DNA, 69 bp, Homo sapiens
tcgtgtgttttaaaaaaatagttatttataattaggcttaatattactcatgtttttgttcaatctagc

SEQ ID NO: 1371 - DNA, 67 bp, Homo sapiens
aaaatagttatttataattaggcttaatattactcatgtttttgttcaatctagccttttattttcc

SEQ ID NO: 1372 - DNA, 68 bp, Homo sapiens
tttataattaggcttaatattactcatgtttttgttcaatctagccttttattttccttgtttgtggg

SEQ ID NO: 1373 - DNA, 68 bp, Homo sapiens
attaggcttaatattactcatgtttttgttcaatctagccttttattttccttgtttgtgggttcatt

SEQ ID NO: 1374 - DNA, 66 bp, Homo sapiens
atattactcatgtttttgttcaatctagccttttattttccttgtttgtgggttcattttttttac

SEQ ID NO: 1375 - DNA, 64 bp, Homo sapiens
tgtttttgttcaatctagccttttattttccttgtttgtgggttcattttttttactttgaagg

SEQ ID NO: 1376 - DNA, 64 bp, Homo sapiens
tcaatctagccttttattttccttgtttgtgggttcattttttttactttgaaggttttggtat

SEQ ID NO: 1377 - DNA, 61 bp, Homo sapiens
ctagccttttattttccttgtttgtgggttcattttttttactttgaaggttttggtattt

SEQ ID NO: 1378 - DNA, 59 bp, Homo sapiens
cttttattttccttgtttgtgggttcattttttttactttgaaggttttggtatttttt

SEQ ID NO: 1379 - DNA, 63 bp, Homo sapiens
ccttgtttgtgggttcattttttttactttgaaggttttggtatttttttctcagggtctgag

SEQ ID NO: 1380 - DNA, 64 bp, Homo sapiens
gtttgtgggttcattttttttactttgaaggttttggtatttttttctcagggtctgaggctag

SEQ ID NO: 1381 - DNA, 64 bp, Homo sapiens
gtgggttcattttttttactttgaaggttttggtatttttttctcagggtctgaggctagtaag

SEQ ID NO: 1382 - DNA, 64 bp, Homo sapiens
gggttcattttttttactttgaaggttttggtatttttttctcagggtctgaggctagtaagta

SEQ ID NO: 1383 - DNA, 65 bp, Homo sapiens
tttttactttgaaggttttggtatttttttctcagggtctgaggctagtaagtaataagtaagaa

SEQ ID NO: 1384 - DNA, 66 bp, Homo sapiens
tactttgaaggttttggtatttttttctcagggtctgaggctagtaagtaataagtaagaaagtta

SEQ ID NO: 1385 - DNA, 66 bp, Homo sapiens
ctttgaaggttttggtatttttttctcagggtctgaggctagtaagtaataagtaagaaagttata

SEQ ID NO: 1386 - DNA, 66 bp, Homo sapiens
ggttttggtatttttttctcagggtctgaggctagtaagtaataagtaagaaagttatattagtct

SEQ ID NO: 1387 - DNA, 68 bp, Homo sapiens
gtatttttttctcagggtctgaggctagtaagtaataagtaagaaagttatattagtctttttgtgtc

SEQ ID NO: 1388 - DNA, 70 bp, Homo sapiens
ctcagggtctgaggctagtaagtaataagtaagaaagttatattagtctttttgtgtctacgaatttcat

SEQ ID NO: 1389 - DNA, 69 bp, Homo sapiens
ggtctgaggctagtaagtaataagtaagaaagttatattagtctttttgtgtctacgaatttcattatt

SEQ ID NO: 1390 - DNA, 70 bp, Homo sapiens
agtaataagtaagaaagttatattagtctttttgtgtctacgaatttcattattttgctctcttggaagc

SEQ ID NO: 1391 - DNA, 71 bp, Homo sapiens
aagaaagttatattagtctttttgtgtctacgaatttcattattttgctctcttggaagctagtttgaatc

SEQ ID NO: 1392 - DNA, 74 bp, Homo sapiens
tattagtctttttgtgtctacgaatttcattattttgctctcttggaagctagtttgaatcctttgataatagc

SEQ ID NO: 1393 - DNA, 74 bp, Homo sapiens
tttgtgtctacgaatttcattattttgctctcttggaagctagtttgaatcctttgataatagctattttcctg

SEQ ID NO: 1394 - DNA, 73 bp, Homo sapiens
gtctacgaatttcattattttgctctcttggaagctagtttgaatcctttgataatagctattttcctgtaac

SEQ ID NO: 1395 - DNA, 71 bp, Homo sapiens
gctctcttggaagctagtttgaatcctttgataatagctattttcctgtaactaaagattttattctagtt

SEQ ID NO: 1396 - DNA, 72 bp, Homo sapiens
tcctttgataatagctattttcctgtaactaaagattttattctagtttgtcttctggtgtctgttggttga

SEQ ID NO: 1397 - DNA, 71 bp, Homo sapiens
tagctattttcctgtaactaaagattttattctagtttgtcttctggtgtctgttggttgataaacaatct

SEQ ID NO: 1398 - DNA, 69 bp, Homo sapiens
cctgtaactaaagattttattctagtttgtcttctggtgtctgttggttgataaacaatcttttgagtt

SEQ ID NO: 1399 - DNA, 70 bp, Homo sapiens
aagattttattctagtttgtcttctggtgtctgttggttgataaacaatcttttgagtttgtttatcctg

SEQ ID NO: 1400 - DNA, 72 bp, Homo sapiens
ttctagtttgtcttctggtgtctgttggttgataaacaatcttttgagtttgtttatcctgtttgagacttg

SEQ ID NO: 1401 - DNA, 72 bp, Homo sapiens
tcttctggtgtctgttggttgataaacaatcttttgagtttgtttatcctgtttgagacttggtctgctttt

SEQ ID NO: 1402 - DNA, 74 bp, Homo sapiens
gtgtctgttggttgataaacaatcttttgagtttgtttatcctgtttgagacttggtctgctttttcattctga

SEQ ID NO: 1403 - DNA, 75 bp, Homo sapiens
ttgataaacaatcttttgagtttgtttatcctgtttgagacttggtctgctttttcattctgaggactcagtgtc

SEQ ID NO: 1404 - DNA, 72 bp, Homo sapiens
ttttgagtttgtttatcctgtttgagacttggtctgctttttcattctgaggactcagtgtccttccatttt

SEQ ID NO: 1405 - DNA, 71 bp, Homo sapiens
agtttgtttatcctgtttgagacttggtctgctttttcattctgaggactcagtgtccttccattttttat

SEQ ID NO: 1406 - DNA, 73 bp, Homo sapiens
acttggtctgctttttcattctgaggactcagtgtccttccattttttattttctactctgtctcttcaaata

SEQ ID NO: 1407 - DNA, 74 bp, Homo sapiens
ttcattctgaggactcagtgtccttccattttttattttctactctgtctcttcaaatactgtaaccttctcat

SEQ ID NO: 1408 - DNA, 71 bp, Homo sapiens
gaggactcagtgtccttccattttttattttctactctgtctcttcaaatactgtaaccttctcattaact

SEQ ID NO: 1409 - DNA, 68 bp, Homo sapiens
ttttattttctactctgtctcttcaaatactgtaaccttctcattaacttttcttttcctagaactgt

SEQ ID NO: 1410 - DNA, 70 bp, Homo sapiens
ctactctgtctcttcaaatactgtaaccttctcattaacttttcttttcctagaactgttaggtatatgt

SEQ ID NO: 1411 - DNA, 69 bp, Homo sapiens
gtctcttcaaatactgtaaccttctcattaacttttcttttcctagaactgttaggtatatgtttggga

SEQ ID NO: 1412 - DNA, 69 bp, Homo sapiens
tactgtaaccttctcattaacttttcttttcctagaactgttaggtatatgtttgggattttcattctg

SEQ ID NO: 1413 - DNA, 69 bp, Homo sapiens
ttcttttcctagaactgttaggtatatgtttgggattttcattctgtttttcatgtcttttaatttgtc

SEQ ID NO: 1414 - DNA, 71 bp, Homo sapiens
ttcctagaactgttaggtatatgtttgggattttcattctgtttttcatgtcttttaatttgtctttcata

SEQ ID NO: 1415 - DNA, 70 bp, Homo sapiens
gttaggtatatgtttgggattttcattctgtttttcatgtcttttaatttgtctttcatattttctatct

SEQ ID NO: 1416 - DNA, 69 bp, Homo sapiens
atgtttgggattttcattctgtttttcatgtcttttaatttgtctttcatattttctatcttatctttt

SEQ ID NO: 1417 - DNA, 76 bp, Homo sapiens
ctgtgcccggcctttctgtcttatctttgcattactgataatatctttaactctgtcttcagatttatgcttattt

SEQ ID NO: 1418 - DNA, 74 bp, Homo sapiens
cccggcctttctgtcttatctttgcattactgataatatctttaactctgtcttcagatttatgcttattttta

SEQ ID NO: 1419 - DNA, 77 bp, Homo sapiens
ctgtcttatctttgcattactgataatatctttaactctgtcttcagatttatgcttatttttaattcagtgaatta

SEQ ID NO: 1420 - DNA, 73 bp, Homo sapiens
tttgcattactgataatatctttaactctgtcttcagatttatgcttatttttaattcagtgaattaattttt

SEQ ID NO: 1421 - DNA, 73 bp, Homo sapiens
tgataatatctttaactctgtcttcagatttatgcttatttttaattcagtgaattaatttttttctgagtaa

SEQ ID NO: 1422 - DNA, 71 bp, Homo sapiens
ttaactctgtcttcagatttatgcttatttttaattcagtgaattaatttttttctgagtaaatttctaga

SEQ ID NO: 1423 - DNA, 71 bp, Homo sapiens
tcagatttatgcttatttttaattcagtgaattaatttttttctgagtaaatttctagaatttttgtgtga

SEQ ID NO: 1424 - DNA, 67 bp, Homo sapiens
gcttatttttaattcagtgaattaatttttttctgagtaaatttctagaatttttgtgtgattttat

SEQ ID NO: 1425 - DNA, 67 bp, Homo sapiens
tttaattcagtgaattaatttttttctgagtaaatttctagaatttttgtgtgattttatttttcaa

SEQ ID NO: 1426 - DNA, 65 bp, Homo sapiens
taatttttttctgagtaaatttctagaatttttgtgtgattttatttttcaatttgtctcttttt

SEQ ID NO: 1427 - DNA, 70 bp, Homo sapiens
tctgagtaaatttctagaatttttgtgtgattttatttttcaatttgtctcttttttcagggtatcttgc

SEQ ID NO: 1428 - DNA, 68 bp, Homo sapiens
ttctagaatttttgtgtgattttatttttcaatttgtctcttttttcagggtatcttgctttattgtt

SEQ ID NO: 1429 - DNA, 69 bp, Homo sapiens
gaatttttgtgtgattttatttttcaatttgtctcttttttcagggtatcttgctttattgtttgaaga

SEQ ID NO: 1430 - DNA, 67 bp, Homo sapiens
tttatttttcaatttgtctcttttttcagggtatcttgctttattgtttgaagaattatattcgttt

SEQ ID NO: 1431 - DNA, 68 bp, Homo sapiens
caatttgtctcttttttcagggtatcttgctttattgtttgaagaattatattcgtttttttatttga

SEQ ID NO: 1432 - DNA, 67 bp, Homo sapiens
gtctcttttttcagggtatcttgctttattgtttgaagaattatattcgtttttttatttgaacatt

SEQ ID NO: 1433 - DNA, 68 bp, Homo sapiens
tcagggtatcttgctttattgtttgaagaattatattcgtttttttatttgaacatttaaaacatact

SEQ ID NO: 1434 - DNA, 68 bp, Homo sapiens
tgctttattgtttgaagaattatattcgtttttttatttgaacatttaaaacatacttattgtaaaga

SEQ ID NO: 1435 - DNA, 69 bp, Homo sapiens
tgaagaattatattcgtttttttatttgaacatttaaaacatacttattgtaaagattctcagattttg

SEQ ID NO: 1436 - DNA, 67 bp, Homo sapiens
ttcgtttttttatttgaacatttaaaacatacttattgtaaagattctcagattttggaattctttg

SEQ ID NO: 1437 - DNA, 72 bp, Homo sapiens
tatttgaacatttaaaacatacttattgtaaagattctcagattttggaattctttgttaactctggtgata

SEQ ID NO: 1438 - DNA, 72 bp, Homo sapiens
catttaaaacatacttattgtaaagattctcagattttggaattctttgttaactctggtgatagatgtctt

SEQ ID NO: 1439 - DNA, 75 bp, Homo sapiens
acatacttattgtaaagattctcagattttggaattctttgttaactctggtgatagatgtctttatatattgtg

SEQ ID NO: 1440 - DNA, 76 bp, Homo sapiens
aagattctcagattttggaattctttgttaactctggtgatagatgtctttatatattgtgtaatttttgactgca

SEQ ID NO: 1441 - DNA, 76 bp, Homo sapiens
cagattttggaattctttgttaactctggtgatagatgtctttatatattgtgtaatttttgactgcaggctaatc

SEQ ID NO: 1442 - DNA, 76 bp, Homo sapiens
ttctttgttaactctggtgatagatgtctttatatattgtgtaatttttgactgcaggctaatcttcaggtggagt

SEQ ID NO: 1443 - DNA, 77 bp, Homo sapiens
ttaactctggtgatagatgtctttatatattgtgtaatttttgactgcaggctaatcttcaggtggagttgtctttc

SEQ ID NO: 1444 - DNA, 75 bp, Homo sapiens
atagatgtctttatatattgtgtaatttttgactgcaggctaatcttcaggtggagttgtctttcctgggattcc

SEQ ID NO: 1445 - DNA, 75 bp, Homo sapiens
ttatatattgtgtaatttttgactgcaggctaatcttcaggtggagttgtctttcctgggattcctgttcctcta

SEQ ID NO: 1446 - DNA, 75 bp, Homo sapiens
tgtaatttttgactgcaggctaatcttcaggtggagttgtctttcctgggattcctgttcctctaccatgagttg

SEQ ID NO: 1447 - DNA, 77 bp, Homo sapiens
ttttgactgcaggctaatcttcaggtggagttgtctttcctgggattcctgttcctctaccatgagttgtgaagatg

SEQ ID NO: 1448 - DNA, 76 bp, Homo sapiens
aggctaatcttcaggtggagttgtctttcctgggattcctgttcctctaccatgagttgtgaagatgtcactgtgg

SEQ ID NO: 1449 - DNA, 73 bp, Homo sapiens
tggagttgtctttcctgggattcctgttcctctaccatgagttgtgaagatgtcactgtggggtttttgcctt

SEQ ID NO: 1450 - DNA, 75 bp, Homo sapiens
ttgtctttcctgggattcctgttcctctaccatgagttgtgaagatgtcactgtggggtttttgcctttgctctc

SEQ ID NO: 1451 - DNA, 74 bp, Homo sapiens
attcctgttcctctaccatgagttgtgaagatgtcactgtggggtttttgcctttgctctctgtcttttaagaa

SEQ ID NO: 1452 - DNA, 74 bp, Homo sapiens
ttcctctaccatgagttgtgaagatgtcactgtggggtttttgcctttgctctctgtcttttaagaattgtgtt

SEQ ID NO: 1453 - DNA, 74 bp, Homo sapiens
atgagttgtgaagatgtcactgtggggtttttgcctttgctctctgtcttttaagaattgtgtttggccgacca

SEQ ID NO: 1454 - DNA, 72 bp, Homo sapiens
aagatgtcactgtggggtttttgcctttgctctctgtcttttaagaattgtgtttggccgaccagattataa

SEQ ID NO: 1455 - DNA, 70 bp, Homo sapiens
gggtttttgcctttgctctctgtcttttaagaattgtgtttggccgaccagattataatggtttctacaa

SEQ ID NO: 1456 - DNA, 73 bp, Homo sapiens
ctttgctctctgtcttttaagaattgtgtttggccgaccagattataatggtttctacaagtcaggagcttat

SEQ ID NO: 1457 - DNA, 70 bp, Homo sapiens
tgtcttttaagaattgtgtttggccgaccagattataatggtttctacaagtcaggagcttattcctttt

SEQ ID NO: 1458 - DNA, 68 bp, Homo sapiens
tttaagaattgtgtttggccgaccagattataatggtttctacaagtcaggagcttattccttttttt

SEQ ID NO: 1459 - DNA, 72 bp, Homo sapiens
actgcacccgtccagttattcttttacttaaaagcaaaaggcattttgaagcttcgatgacagctctcttaa

SEQ ID NO: 1460 - DNA, 73 bp, Homo sapiens
tccagttattcttttacttaaaagcaaaaggcattttgaagcttcgatgacagctctcttaagtcactaggga

SEQ ID NO: 1461 - DNA, 72 bp, Homo sapiens
cttttacttaaaagcaaaaggcattttgaagcttcgatgacagctctcttaagtcactagggagtatgcttt

SEQ ID NO: 1462 - DNA, 74 bp, Homo sapiens
cttaaaagcaaaaggcattttgaagcttcgatgacagctctcttaagtcactagggagtatgctttttctatct

SEQ ID NO: 1463 - DNA, 75 bp, Homo sapiens
aaaaggcattttgaagcttcgatgacagctctcttaagtcactagggagtatgctttttctatcttccttctgta

SEQ ID NO: 1464 - DNA, 81 bp, Homo sapiens
ttgaagcttcgatgacagctctcttaagtcactagggagtatgctttttctatcttccttctgtatcagccttagcacata

SEQ ID NO: 1465 - DNA, 77 bp, Homo sapiens
acagctctcttaagtcactagggagtatgctttttctatcttccttctgtatcagccttagcacatagttttcatgt

SEQ ID NO: 1466 - DNA, 76 bp, Homo sapiens
taagtcactagggagtatgctttttctatcttccttctgtatcagccttagcacatagttttcatgttcagggtta

SEQ ID NO: 1467 - DNA, 77 bp, Homo sapiens
ggagtatgctttttctatcttccttctgtatcagccttagcacatagttttcatgttcagggttatcccatagtcaa

SEQ ID NO: 1468 - DNA, 78 bp, Homo sapiens
atgctttttctatcttccttctgtatcagccttagcacatagttttcatgttcagggttatcccatagtcaaagcatg

SEQ ID NO: 1469 - DNA, 83 bp, Homo sapiens
tatcttccttctgtatcagccttagcacatagttttcatgttcagggttatcccatagtcaaagcatggcagctggaactgca

SEQ ID NO: 1470 - DNA, 85 bp, Homo sapiens
tgtatcagccttagcacatagttttcatgttcagggttatcccatagtcaaagcatggcagctggaactgcagtcattgtgacta

SEQ ID NO: 1471 - DNA, 82 bp, Homo sapiens
tagcacatagttttcatgttcagggttatcccatagtcaaagcatggcagctggaactgcagtcattgtgactacaaaagaa

SEQ ID NO: 1472 - DNA, 78 bp, Homo sapiens
agttttcatgttcagggttatcccatagtcaaagcatggcagctggaactgcagtcattgtgactacaaaagaagtcc

SEQ ID NO: 1473 - DNA, 78 bp, Homo sapiens
agggttatcccatagtcaaagcatggcagctggaactgcagtcattgtgactacaaaagaagtcccaggcagaaagaa

SEQ ID NO: 1474 - DNA, 79 bp, Homo sapiens
tcccatagtcaaagcatggcagctggaactgcagtcattgtgactacaaaagaagtcccaggcagaaagaaggggagag

SEQ ID NO: 1475 - DNA, 76 bp, Homo sapiens
atggcagctggaactgcagtcattgtgactacaaaagaagtcccaggcagaaagaaggggagagggtaagcttcaa

SEQ ID NO: 1476 - DNA, 74 bp, Homo sapiens
gaactgcagtcattgtgactacaaaagaagtcccaggcagaaagaaggggagagggtaagcttcaagtgtggtc

SEQ ID NO: 1477 - DNA, 72 bp, Homo sapiens
tcattgtgactacaaaagaagtcccaggcagaaagaaggggagagggtaagcttcaagtgtggtcctctaac

SEQ ID NO: 1478 - DNA, 71 bp, Homo sapiens
tacaaaagaagtcccaggcagaaagaaggggagagggtaagcttcaagtgtggtcctctaactgagttgta

SEQ ID NO: 1479 - DNA, 69 bp, Homo sapiens
agtcccaggcagaaagaaggggagagggtaagcttcaagtgtggtcctctaactgagttgtactctttt

SEQ ID NO: 1480 - DNA, 67 bp, Homo sapiens
ggcagaaagaaggggagagggtaagcttcaagtgtggtcctctaactgagttgtactcttttttttt

SEQ ID NO: 1481 - DNA, 77 bp, Homo sapiens
gcgtgagccatcgcgcctagctctgagttgtactcttaaactaattgtccttgaggctccactcaacaacttaggct

SEQ ID NO: 1482 - DNA, 73 bp, Homo sapiens
atcgcgcctagctctgagttgtactcttaaactaattgtccttgaggctccactcaacaacttaggcttaatt

SEQ ID NO: 1483 - DNA, 72 bp, Homo sapiens
ctagctctgagttgtactcttaaactaattgtccttgaggctccactcaacaacttaggcttaattttactg

SEQ ID NO: 1484 - DNA, 70 bp, Homo sapiens
tactcttaaactaattgtccttgaggctccactcaacaacttaggcttaattttactggctcttaattgt

SEQ ID NO: 1485 - DNA, 71 bp, Homo sapiens
ttaaactaattgtccttgaggctccactcaacaacttaggcttaattttactggctcttaattgttactga

SEQ ID NO: 1486 - DNA, 76 bp, Homo sapiens
ttgaggctccactcaacaacttaggcttaattttactggctcttaattgttactgagcctgcaaaatgtggtcata

SEQ ID NO: 1487 - DNA, 72 bp, Homo sapiens
actcaacaacttaggcttaattttactggctcttaattgttactgagcctgcaaaatgtggtcataaagttg

SEQ ID NO: 1488 - DNA, 74 bp, Homo sapiens
ttaggcttaattttactggctcttaattgttactgagcctgcaaaatgtggtcataaagttgggcccattgata

SEQ ID NO: 1489 - DNA, 73 bp, Homo sapiens
ttaattttactggctcttaattgttactgagcctgcaaaatgtggtcataaagttgggcccattgataaactg

SEQ ID NO: 1490 - DNA, 74 bp, Homo sapiens
ttgttactgagcctgcaaaatgtggtcataaagttgggcccattgataaactggttaaagtgagagttctgtta

SEQ ID NO: 1491 - DNA, 72 bp, Homo sapiens
tgcaaaatgtggtcataaagttgggcccattgataaactggttaaagtgagagttctgttagtagggaagaa

SEQ ID NO: 1492 - DNA, 68 bp, Homo sapiens
aaagttgggcccattgataaactggttaaagtgagagttctgttagtagggaagaaggagaaaataga

SEQ ID NO: 1493 - DNA, 72 bp, Homo sapiens
ttagtagggaagaaggagaaaatagacttggattggtagctgcagagtctgttacagtttgcctaatggggt

SEQ ID NO: 1494 - DNA, 76 bp, Homo sapiens
aaggagaaaatagacttggattggtagctgcagagtctgttacagtttgcctaatggggttcattgctccaggcca

SEQ ID NO: 1495 - DNA, 77 bp, Homo sapiens
aaaatagacttggattggtagctgcagagtctgttacagtttgcctaatggggttcattgctccaggccagtctcta

SEQ ID NO: 1496 - DNA, 75 bp, Homo sapiens
attggtagctgcagagtctgttacagtttgcctaatggggttcattgctccaggccagtctctaagtttgtttct

SEQ ID NO: 1497 - DNA, 73 bp, Homo sapiens
agagtctgttacagtttgcctaatggggttcattgctccaggccagtctctaagtttgtttcttggcttggat

SEQ ID NO: 1498 - DNA, 74 bp, Homo sapiens
tgttacagtttgcctaatggggttcattgctccaggccagtctctaagtttgtttcttggcttggatttctaca

SEQ ID NO: 1499 - DNA, 74 bp, Homo sapiens
taatggggttcattgctccaggccagtctctaagtttgtttcttggcttggatttctacatcctttagataata

SEQ ID NO: 1500 - DNA, 73 bp, Homo sapiens
ggttcattgctccaggccagtctctaagtttgtttcttggcttggatttctacatcctttagataatagattt

SEQ ID NO: 1501 - DNA, 71 bp, Homo sapiens
ctccaggccagtctctaagtttgtttcttggcttggatttctacatcctttagataatagattttgggccc

SEQ ID NO: 1502 - DNA, 70 bp, Homo sapiens
taagtttgtttcttggcttggatttctacatcctttagataatagattttgggccccataccttccctca

SEQ ID NO: 1503 - DNA, 71 bp, Homo sapiens
ttgtttcttggcttggatttctacatcctttagataatagattttgggccccataccttccctcagtatcc

SEQ ID NO: 1504 - DNA, 71 bp, Homo sapiens
tggatttctacatcctttagataatagattttgggccccataccttccctcagtatccccttggatttcta

SEQ ID NO: 1505 - DNA, 77 bp, Homo sapiens
attttgggccccataccttccctcagtatccccttggatttctagagtgagtcatctactcacatctggagcaagca

SEQ ID NO: 1506 - DNA, 82 bp, Homo sapiens
ccataccttccctcagtatccccttggatttctagagtgagtcatctactcacatctggagcaagcatctaatttctgtgca

SEQ ID NO: 1507 - DNA, 84 bp, Homo sapiens
tagagtgagtcatctactcacatctggagcaagcatctaatttctgtgcagcttccctagtcttagtagtccagcacatggttt

SEQ ID NO: 1508 - DNA, 82 bp, Homo sapiens
atctactcacatctggagcaagcatctaatttctgtgcagcttccctagtcttagtagtccagcacatggttttctagagtc

SEQ ID NO: 1509 - DNA, 80 bp, Homo sapiens
acatctggagcaagcatctaatttctgtgcagcttccctagtcttagtagtccagcacatggttttctagagtctcttcc

SEQ ID NO: 1510 - DNA, 79 bp, Homo sapiens
aagcatctaatttctgtgcagcttccctagtcttagtagtccagcacatggttttctagagtctcttcctgttatgaca

SEQ ID NO: 1511 - DNA, 79 bp, Homo sapiens
tttctgtgcagcttccctagtcttagtagtccagcacatggttttctagagtctcttcctgttatgacatggatcctta

SEQ ID NO: 1512 - DNA, 79 bp, Homo sapiens
ttccctagtcttagtagtccagcacatggttttctagagtctcttcctgttatgacatggatccttatcagctcttgtc

SEQ ID NO: 1513 - DNA, 80 bp, Homo sapiens
gtcttagtagtccagcacatggttttctagagtctcttcctgttatgacatggatccttatcagctcttgtccttatata

SEQ ID NO: 1514 - DNA, 77 bp, Homo sapiens
gcacatggttttctagagtctcttcctgttatgacatggatccttatcagctcttgtccttatatagggaacccagt

SEQ ID NO: 1515 - DNA, 76 bp, Homo sapiens
ttttctagagtctcttcctgttatgacatggatccttatcagctcttgtccttatatagggaacccagttagagct

SEQ ID NO: 1516 - DNA, 77 bp, Homo sapiens
gtctcttcctgttatgacatggatccttatcagctcttgtccttatatagggaacccagttagagcttttctccata

SEQ ID NO: 1517 - DNA, 77 bp, Homo sapiens
ttatgacatggatccttatcagctcttgtccttatatagggaacccagttagagcttttctccatatctttagtcta

SEQ ID NO: 1518 - DNA, 78 bp, Homo sapiens
tccttatcagctcttgtccttatatagggaacccagttagagcttttctccatatctttagtctatgttgctgtcata

SEQ ID NO: 1519 - DNA, 78 bp, Homo sapiens
atcagctcttgtccttatatagggaacccagttagagcttttctccatatctttagtctatgttgctgtcatagtcag

SEQ ID NO: 1520 - DNA, 76 bp, Homo sapiens
tatatagggaacccagttagagcttttctccatatctttagtctatgttgctgtcatagtcagtcctaccctctaa

SEQ ID NO: 1521 - DNA, 74 bp, Homo sapiens
acccagttagagcttttctccatatctttagtctatgttgctgtcatagtcagtcctaccctctaaggtattgt

SEQ ID NO: 1522 - DNA, 77 bp, Homo sapiens
gttagagcttttctccatatctttagtctatgttgctgtcatagtcagtcctaccctctaaggtattgtttctgata

SEQ ID NO: 1523 - DNA, 74 bp, Homo sapiens
ctgtcatagtcagtcctaccctctaaggtattgtttctgatagcttcgttaactgccccagcttcaatttaata

SEQ ID NO: 1524 - DNA, 73 bp, Homo sapiens
atagtcagtcctaccctctaaggtattgtttctgatagcttcgttaactgccccagcttcaatttaatactga

SEQ ID NO: 1525 - DNA, 70 bp, Homo sapiens
aggtattgtttctgatagcttcgttaactgccccagcttcaatttaatactgattcctttagctttttgt

SEQ ID NO: 1526 - DNA, 71 bp, Homo sapiens
ttacagacgtgagctatggcgtccggccttatttagctttaaagttcttttttatttctgccacctggaga

SEQ ID NO: 1527 - DNA, 66 bp, Homo sapiens
ctatggcgtccggccttatttagctttaaagttcttttttatttctgccacctggagagttacctt

SEQ ID NO: 1528 - DNA, 67 bp, Homo sapiens
gtccggccttatttagctttaaagttcttttttatttctgccacctggagagttacctttattcaca

SEQ ID NO: 1529 - DNA, 67 bp, Homo sapiens
tagctttaaagttcttttttatttctgccacctggagagttacctttattcacataattaaaaattg

SEQ ID NO: 1530 - DNA, 67 bp, Homo sapiens
gttcttttttatttctgccacctggagagttacctttattcacataattaaaaattgttttcagatt

SEQ ID NO: 1531 - DNA, 69 bp, Homo sapiens
tttatttctgccacctggagagttacctttattcacataattaaaaattgttttcagatttcttttatc

SEQ ID NO: 1532 - DNA, 67 bp, Homo sapiens
gccacctggagagttacctttattcacataattaaaaattgttttcagatttcttttatctttaatt

SEQ ID NO: 1533 - DNA, 72 bp, Homo sapiens
accgtgcccggccaacttatctttgatttctaagtgcaagaagccaggctgagtgccaaaaagtactcggat

SEQ ID NO: 1534 - DNA, 72 bp, Homo sapiens
gccaacttatctttgatttctaagtgcaagaagccaggctgagtgccaaaaagtactcggattgtacctttt

SEQ ID NO: 1535 - DNA, 70 bp, Homo sapiens
cttatctttgatttctaagtgcaagaagccaggctgagtgccaaaaagtactcggattgtaccttttttt

SEQ ID NO: 1536 - DNA, 64 bp, Homo sapiens
ttttttttttacataacacaaataacttttttatttctgtacaggctttttagcctgtacactt

SEQ ID NO: 1537 - DNA, 69 bp, Homo sapiens
tacataacacaaataacttttttatttctgtacaggctttttagcctgtacactttaaatagaatgtct

SEQ ID NO: 1538 - DNA, 66 bp, Homo sapiens
caaataacttttttatttctgtacaggctttttagcctgtacactttaaatagaatgtctttaaag

SEQ ID NO: 1539 - DNA, 69 bp, Homo sapiens
tttatttctgtacaggctttttagcctgtacactttaaatagaatgtctttaaagttgaacatttacta

SEQ ID NO: 1540 - DNA, 67 bp, Homo sapiens
ctgtacaggctttttagcctgtacactttaaatagaatgtctttaaagttgaacatttactaacttt

SEQ ID NO: 1541 - DNA, 63 bp, Homo sapiens
ctttttagcctgtacactttaaatagaatgtctttaaagttgaacatttactaactttttttt

SEQ ID NO: 1542 - DNA, 68 bp, Homo sapiens
gtacactttaaatagaatgtctttaaagttgaacatttactaactttttttttgttactgctgactca

SEQ ID NO: 1543 - DNA, 70 bp, Homo sapiens
gaatgtctttaaagttgaacatttactaactttttttttgttactgctgactcataatctagtatttcat

SEQ ID NO: 1544 - DNA, 69 bp, Homo sapiens
tctttaaagttgaacatttactaactttttttttgttactgctgactcataatctagtatttcatttta

SEQ ID NO: 1545 - DNA, 72 bp, Homo sapiens
catttactaactttttttttgttactgctgactcataatctagtatttcattttaaattcagcataatatcg

SEQ ID NO: 1546 - DNA, 72 bp, Homo sapiens
ctttttttttgttactgctgactcataatctagtatttcattttaaattcagcataatatcgtaagttccta

SEQ ID NO: 1547 - DNA, 77 bp, Homo sapiens
tgttactgctgactcataatctagtatttcattttaaattcagcataatatcgtaagttcctatagctttcaaagag

SEQ ID NO: 1548 - DNA, 75 bp, Homo sapiens
gctgactcataatctagtatttcattttaaattcagcataatatcgtaagttcctatagctttcaaagaggtggt

SEQ ID NO: 1549 - DNA, 70 bp, Homo sapiens
ctagtatttcattttaaattcagcataatatcgtaagttcctatagctttcaaagaggtggttttcaaaa

SEQ ID NO: 1550 - DNA, 71 bp, Homo sapiens
cagcataatatcgtaagttcctatagctttcaaagaggtggttttcaaaaattaacacatttggtgcttac

SEQ ID NO: 1551 - DNA, 74 bp, Homo sapiens
tatagctttcaaagaggtggttttcaaaaattaacacatttggtgcttaccatcatagaccgataacatagcca

SEQ ID NO: 1552 - DNA, 71 bp, Homo sapiens
ggttttcaaaaattaacacatttggtgcttaccatcatagaccgataacatagccagttttacttgcttgt

SEQ ID NO: 1553 - DNA, 73 bp, Homo sapiens
attaacacatttggtgcttaccatcatagaccgataacatagccagttttacttgcttgtttcttgaattcct

SEQ ID NO: 1554 - DNA, 71 bp, Homo sapiens
atttggtgcttaccatcatagaccgataacatagccagttttacttgcttgtttcttgaattccttttcct

SEQ ID NO: 1555 - DNA, 72 bp, Homo sapiens
accatcatagaccgataacatagccagttttacttgcttgtttcttgaattccttttccttttaatgtgaga

SEQ ID NO: 1556 - DNA, 71 bp, Homo sapiens
cgataacatagccagttttacttgcttgtttcttgaattccttttccttttaatgtgagaaaaggctagca

SEQ ID NO: 1557 - DNA, 70 bp, Homo sapiens
catagccagttttacttgcttgtttcttgaattccttttccttttaatgtgagaaaaggctagcataagg

SEQ ID NO: 1558 - DNA, 71 bp, Homo sapiens
tttacttgcttgtttcttgaattccttttccttttaatgtgagaaaaggctagcataagggcaggaatgaa

SEQ ID NO: 1559 - DNA, 73 bp, Homo sapiens
tttcttgaattccttttccttttaatgtgagaaaaggctagcataagggcaggaatgaagcaggtgcttaata

SEQ ID NO: 1560 - DNA, 73 bp, Homo sapiens
ttttccttttaatgtgagaaaaggctagcataagggcaggaatgaagcaggtgcttaatacttgtttgtattc

SEQ ID NO: 1561 - DNA, 71 bp, Homo sapiens
aaaaggctagcataagggcaggaatgaagcaggtgcttaatacttgtttgtattcttttctaacctcccta

SEQ ID NO: 1562 - DNA, 70 bp, Homo sapiens
taagggcaggaatgaagcaggtgcttaatacttgtttgtattcttttctaacctccctacaaaactagta

SEQ ID NO: 1563 - DNA, 69 bp, Homo sapiens
cttgtttgtattcttttctaacctccctacaaaactagtaagagaattgaaaacatagatgtactttga

SEQ ID NO: 1564 - DNA, 69 bp, Homo sapiens
attcttttctaacctccctacaaaactagtaagagaattgaaaacatagatgtactttgataaattgcc

SEQ ID NO: 1565 - DNA, 74 bp, Homo sapiens
acctccctacaaaactagtaagagaattgaaaacatagatgtactttgataaattgcctagcatatggtatctg

SEQ ID NO: 1566 - DNA, 74 bp, Homo sapiens
cctacaaaactagtaagagaattgaaaacatagatgtactttgataaattgcctagcatatggtatctgtttat

SEQ ID NO: 1567 - DNA, 76 bp, Homo sapiens
tagtaagagaattgaaaacatagatgtactttgataaattgcctagcatatggtatctgtttattctgtttttgtg

SEQ ID NO: 1568 - DNA, 74 bp, Homo sapiens
attgaaaacatagatgtactttgataaattgcctagcatatggtatctgtttattctgtttttgtgtttagact

SEQ ID NO: 1569 - DNA, 70 bp, Homo sapiens
agatgtactttgataaattgcctagcatatggtatctgtttattctgtttttgtgtttagactttttttt

SEQ ID NO: 1570 - DNA, 73 bp, Homo sapiens
ggtagctggaactataggtacacaccgccatgcctgtgtaatttctacattttttgtacggatggggtctcac

SEQ ID NO: 1571 - DNA, 70 bp, Homo sapiens
aggcgtgagctaccctgcctggtttttgctaatttccaagacaaaaatatacagcagtgttattactttt

SEQ ID NO: 1572 - DNA, 70 bp, Homo sapiens
gctaccctgcctggtttttgctaatttccaagacaaaaatatacagcagtgttattactttttggtgtta

SEQ ID NO: 1573 - DNA, 67 bp, Homo sapiens
gcctggtttttgctaatttccaagacaaaaatatacagcagtgttattactttttggtgttaatttt

SEQ ID NO: 1574 - DNA, 67 bp, Homo sapiens
ttttatttttttcctctgtgattaatatttgttctgtatttcagctttccttgtgttttttttcttc

SEQ ID NO: 1575 - DNA, 71 bp, Homo sapiens
ttcctctgtgattaatatttgttctgtatttcagctttccttgtgttttttttcttctaagactataagac

SEQ ID NO: 1576 - DNA, 70 bp, Homo sapiens
gtgattaatatttgttctgtatttcagctttccttgtgttttttttcttctaagactataagactaaatc

SEQ ID NO: 1577 - DNA, 71 bp, Homo sapiens
tgttctgtatttcagctttccttgtgttttttttcttctaagactataagactaaatctttgtatatcttc

SEQ ID NO: 1578 - DNA, 74 bp, Homo sapiens
atgcccggcctctctcattgctttcttaaataatctgcatggttatcgtattaggtcgtttatagattcacttt

SEQ ID NO: 1579 - DNA, 73 bp, Homo sapiens
ggcctctctcattgctttcttaaataatctgcatggttatcgtattaggtcgtttatagattcacttttcctt

SEQ ID NO: 1580 - DNA, 71 bp, Homo sapiens
cattgctttcttaaataatctgcatggttatcgtattaggtcgtttatagattcacttttcctttccttcc

SEQ ID NO: 1581 - DNA, 69 bp, Homo sapiens
aaataatctgcatggttatcgtattaggtcgtttatagattcacttttcctttccttccttttatcttc

SEQ ID NO: 1582 - DNA, 71 bp, Homo sapiens
ttcctcttctttccgtctcctctttctcctctctttgattttattcttctctgttcctccttgcgccttcc

SEQ ID NO: 1583 - DNA, 71 bp, Homo sapiens
cttctttccgtctcctctttctcctctctttgattttattcttctctgttcctccttgcgccttcctcctc

SEQ ID NO: 1584 - DNA, 72 bp, Homo sapiens
tctttctcctctctttgattttattcttctctgttcctccttgcgccttcctcctccctctttcttctctcc

SEQ ID NO: 1585 - DNA, 70 bp, Homo sapiens
tctctttgattttattcttctctgttcctccttgcgccttcctcctccctctttcttctctcccctttta

SEQ ID NO: 1586 - DNA, 67 bp, Homo sapiens
attttattcttctctgttcctccttgcgccttcctcctccctctttcttctctccccttttactttc

SEQ ID NO: 1587 - DNA, 67 bp, Homo sapiens
ttctctgttcctccttgcgccttcctcctccctctttcttctctccccttttactttcccttgtctt

SEQ ID NO: 1588 - DNA, 65 bp, Homo sapiens
cctccttgcgccttcctcctccctctttcttctctccccttttactttcccttgtctttcctccc

SEQ ID NO: 1589 - DNA, 62 bp, Homo sapiens
ctcctccctctttcttctctccccttttactttcccttgtctttcctcccccttcctttcct

SEQ ID NO: 1590 - DNA, 60 bp, Homo sapiens
tttcttctctccccttttactttcccttgtctttcctcccccttcctttcctttttaaac

SEQ ID NO: 1591 - DNA, 61 bp, Homo sapiens
tctctccccttttactttcccttgtctttcctcccccttcctttcctttttaaaccaggga

SEQ ID NO: 1592 - DNA, 61 bp, Homo sapiens
tttactttcccttgtctttcctcccccttcctttcctttttaaaccagggaccttcttctg

SEQ ID NO: 1593 - DNA, 64 bp, Homo sapiens
cttgtctttcctcccccttcctttcctttttaaaccagggaccttcttctgggtaccatctgct

SEQ ID NO: 1594 - DNA, 68 bp, Homo sapiens
ccttcctttcctttttaaaccagggaccttcttctgggtaccatctgcttgctcccatctggtctgtt

SEQ ID NO: 1595 - DNA, 71 bp, Homo sapiens
tttcctttttaaaccagggaccttcttctgggtaccatctgcttgctcccatctggtctgtttgctcctta

SEQ ID NO: 1596 - DNA, 78 bp, Homo sapiens
taaaccagggaccttcttctgggtaccatctgcttgctcccatctggtctgtttgctccttaggcttgctggagcatc

SEQ ID NO: 1597 - DNA, 78 bp, Homo sapiens
accttcttctgggtaccatctgcttgctcccatctggtctgtttgctccttaggcttgctggagcatcctaaggaaca

SEQ ID NO: 1598 - DNA, 80 bp, Homo sapiens
gtaccatctgcttgctcccatctggtctgtttgctccttaggcttgctggagcatcctaaggaacatcccttcaccatta

SEQ ID NO: 1599 - DNA, 78 bp, Homo sapiens
tgctcccatctggtctgtttgctccttaggcttgctggagcatcctaaggaacatcccttcaccattatcttggagtt

SEQ ID NO: 1600 - DNA, 75 bp, Homo sapiens
atctggtctgtttgctccttaggcttgctggagcatcctaaggaacatcccttcaccattatcttggagttttct

SEQ ID NO: 1601 - DNA, 75 bp, Homo sapiens
ttgctggagcatcctaaggaacatcccttcaccattatcttggagttttcttcttgcttatattggattccctgt

SEQ ID NO: 1602 - DNA, 71 bp, Homo sapiens
agcatcctaaggaacatcccttcaccattatcttggagttttcttcttgcttatattggattccctgtttt

SEQ ID NO: 1603 - DNA, 70 bp, Homo sapiens
aaggaacatcccttcaccattatcttggagttttcttcttgcttatattggattccctgtttttctatcc

SEQ ID NO: 1604 - DNA, 69 bp, Homo sapiens
ccttcaccattatcttggagttttcttcttgcttatattggattccctgtttttctatccccctactcc

SEQ ID NO: 1605 - DNA, 67 bp, Homo sapiens
cttcttgcttatattggattccctgtttttctatccccctactcccctgtttctttatatttaagaa

SEQ ID NO: 1606 - DNA, 68 bp, Homo sapiens
ttatattggattccctgtttttctatccccctactcccctgtttctttatatttaagaaggcacatct

SEQ ID NO: 1607 - DNA, 71 bp, Homo sapiens
cctgtttttctatccccctactcccctgtttctttatatttaagaaggcacatcttctggcagcttcatag

SEQ ID NO: 1608 - DNA, 75 bp, Homo sapiens
tactcccctgtttctttatatttaagaaggcacatcttctggcagcttcataggaaaaggcgcatgagaaataaa

SEQ ID NO: 1609 - DNA, 73 bp, Homo sapiens
ttctttatatttaagaaggcacatcttctggcagcttcataggaaaaggcgcatgagaaataaattagggttt

SEQ ID NO: 1610 - DNA, 75 bp, Homo sapiens
atatttaagaaggcacatcttctggcagcttcataggaaaaggcgcatgagaaataaattagggttttgcatggt

SEQ ID NO: 1611 - DNA, 75 bp, Homo sapiens
acatcttctggcagcttcataggaaaaggcgcatgagaaataaattagggttttgcatggttgataaaatgggat

SEQ ID NO: 1612 - DNA, 75 bp, Homo sapiens
cagcttcataggaaaaggcgcatgagaaataaattagggttttgcatggttgataaaatgggattgctatcttac

SEQ ID NO: 1613 - DNA, 75 bp, Homo sapiens
tcataggaaaaggcgcatgagaaataaattagggttttgcatggttgataaaatgggattgctatcttacttgat

SEQ ID NO: 1614 - DNA, 77 bp, Homo sapiens
gcgcatgagaaataaattagggttttgcatggttgataaaatgggattgctatcttacttgattgtttgacagaata

SEQ ID NO: 1615 - DNA, 75 bp, Homo sapiens
gaaataaattagggttttgcatggttgataaaatgggattgctatcttacttgattgtttgacagaatacataga

SEQ ID NO: 1616 - DNA, 74 bp, Homo sapiens
agggttttgcatggttgataaaatgggattgctatcttacttgattgtttgacagaatacatagaattcttggt

SEQ ID NO: 1617 - DNA, 75 bp, Homo sapiens
tgataaaatgggattgctatcttacttgattgtttgacagaatacatagaattcttggttggaaatcattttccg

SEQ ID NO: 1618 - DNA, 75 bp, Homo sapiens
tgggattgctatcttacttgattgtttgacagaatacatagaattcttggttggaaatcattttccgtcagaatt

SEQ ID NO: 1619 - DNA, 76 bp, Homo sapiens
gctatcttacttgattgtttgacagaatacatagaattcttggttggaaatcattttccgtcagaatttgaagata

SEQ ID NO: 1620 - DNA, 75 bp, Homo sapiens
ttgtttgacagaatacatagaattcttggttggaaatcattttccgtcagaatttgaagatatttctctactgcc

SEQ ID NO: 1621 - DNA, 74 bp, Homo sapiens
cagaatacatagaattcttggttggaaatcattttccgtcagaatttgaagatatttctctactgccttttagc

SEQ ID NO: 1622 - DNA, 72 bp, Homo sapiens
attcttggttggaaatcattttccgtcagaatttgaagatatttctctactgccttttagctttcagtgtta

SEQ ID NO: 1623 - DNA, 74 bp, Homo sapiens
tggaaatcattttccgtcagaatttgaagatatttctctactgccttttagctttcagtgttactgttagcaag

SEQ ID NO: 1624 - DNA, 74 bp, Homo sapiens
tcattttccgtcagaatttgaagatatttctctactgccttttagctttcagtgttactgttagcaagtccaaa

SEQ ID NO: 1625 - DNA, 75 bp, Homo sapiens
tcagaatttgaagatatttctctactgccttttagctttcagtgttactgttagcaagtccaaagcagttctaat

SEQ ID NO: 1626 - DNA, 70 bp, Homo sapiens
aagatatttctctactgccttttagctttcagtgttactgttagcaagtccaaagcagttctaatttttt

SEQ ID NO: 1627 - DNA, 75 bp, Homo sapiens
ggcatgagccgctgcacccagccgattctgatttctttttaatcgtttgtatgtggtagttctttctggatttag

SEQ ID NO: 1628 - DNA, 72 bp, Homo sapiens
gctgcacccagccgattctgatttctttttaatcgtttgtatgtggtagttctttctggatttagtattttc

SEQ ID NO: 1629 - DNA, 69 bp, Homo sapiens
acccagccgattctgatttctttttaatcgtttgtatgtggtagttctttctggatttagtattttctc

SEQ ID NO: 1630 - DNA, 66 bp, Homo sapiens
gatttctttttaatcgtttgtatgtggtagttctttctggatttagtattttctctttaacctggt

SEQ ID NO: 1631 - DNA, 70 bp, Homo sapiens
aatcgtttgtatgtggtagttctttctggatttagtattttctctttaacctggttattctgatactcac

SEQ ID NO: 1632 - DNA, 72 bp, Homo sapiens
tttgtatgtggtagttctttctggatttagtattttctctttaacctggttattctgatactcacgatggtg

SEQ ID NO: 1633 - DNA, 75 bp, Homo sapiens
ttctttctggatttagtattttctctttaacctggttattctgatactcacgatggtgtgcttgcttatactcat

SEQ ID NO: 1634 - DNA, 75 bp, Homo sapiens
tttagtattttctctttaacctggttattctgatactcacgatggtgtgcttgcttatactcattgtactaggta

SEQ ID NO: 1635 - DNA, 76 bp, Homo sapiens
attttctctttaacctggttattctgatactcacgatggtgtgcttgcttatactcattgtactaggtacacagtg

SEQ ID NO: 1636 - DNA, 79 bp, Homo sapiens
tattctgatactcacgatggtgtgcttgcttatactcattgtactaggtacacagtggtccttttgatttgttagctcc

SEQ ID NO: 1637 - DNA, 75 bp, Homo sapiens
acgatggtgtgcttgcttatactcattgtactaggtacacagtggtccttttgatttgttagctcctgttttgga

SEQ ID NO: 1638 - DNA, 74 bp, Homo sapiens
ttgcttatactcattgtactaggtacacagtggtccttttgatttgttagctcctgttttggaatgtgagttta

SEQ ID NO: 1639 - DNA, 69 bp, Homo sapiens
tggtccttttgatttgttagctcctgttttggaatgtgagtttaggtcagggagaaagtttttgaatta

SEQ ID NO: 1640 - DNA, 68 bp, Homo sapiens
cttttgatttgttagctcctgttttggaatgtgagtttaggtcagggagaaagtttttgaattatttc

SEQ ID NO: 1641 - DNA, 70 bp, Homo sapiens
gctcctgttttggaatgtgagtttaggtcagggagaaagtttttgaattatttctttgataatttcctca

SEQ ID NO: 1642 - DNA, 70 bp, Homo sapiens
ggaatgtgagtttaggtcagggagaaagtttttgaattatttctttgataatttcctcagttctgctttg

SEQ ID NO: 1643 - DNA, 69 bp, Homo sapiens
gagtttaggtcagggagaaagtttttgaattatttctttgataatttcctcagttctgctttgtttgcc

SEQ ID NO: 1644 - DNA, 70 bp, Homo sapiens
gtcagggagaaagtttttgaattatttctttgataatttcctcagttctgctttgtttgccttttctgta

SEQ ID NO: 1645 - DNA, 67 bp, Homo sapiens
aagtttttgaattatttctttgataatttcctcagttctgctttgtttgccttttctgtatttaaaa

SEQ ID NO: 1646 - DNA, 70 bp, Homo sapiens
tttctgtttcagttctttaactctttttactctattttctgaggtgattcctcactttctcttccaactc

SEQ ID NO: 1647 - DNA, 70 bp, Homo sapiens
gtttcagttctttaactctttttactctattttctgaggtgattcctcactttctcttccaactcttcac

SEQ ID NO: 1648 - DNA, 68 bp, Homo sapiens
tttaactctttttactctattttctgaggtgattcctcactttctcttccaactcttcacttaaaaat

SEQ ID NO: 1649 - DNA, 68 bp, Homo sapiens
ttactctattttctgaggtgattcctcactttctcttccaactcttcacttaaaaatttttttgtttg

SEQ ID NO: 1650 - DNA, 80 bp, Homo sapiens
tttgtttgagacagcatcttgatattgtagcccacgctgaccttgaaagtgattctctcagccttccatagagttgggat

SEQ ID NO: 1651 - DNA, 80 bp, Homo sapiens
agacagcatcttgatattgtagcccacgctgaccttgaaagtgattctctcagccttccatagagttgggattatgggcg

SEQ ID NO: 1652 - DNA, 80 bp, Homo sapiens
tcttgatattgtagcccacgctgaccttgaaagtgattctctcagccttccatagagttgggattatgggcgtgccacta

SEQ ID NO: 1653 - DNA, 79 bp, Homo sapiens
tgtagcccacgctgaccttgaaagtgattctctcagccttccatagagttgggattatgggcgtgccactactcctggc

SEQ ID NO: 1654 - DNA, 75 bp, Homo sapiens
ccttgaaagtgattctctcagccttccatagagttgggattatgggcgtgccactactcctggccctccttcact

SEQ ID NO: 1655 - DNA, 74 bp, Homo sapiens
tgattctctcagccttccatagagttgggattatgggcgtgccactactcctggccctccttcacttaaatttt

SEQ ID NO: 1656 - DNA, 71 bp, Homo sapiens
tctcagccttccatagagttgggattatgggcgtgccactactcctggccctccttcacttaaattttttt

SEQ ID NO: 1657 - DNA, 68 bp, Homo sapiens
ctacaggctctgagccaccgggcccggccccttcactttaatttttcaagatggttatactaatttct

SEQ ID NO: 1658 - DNA, 66 bp, Homo sapiens
tgagccaccgggcccggccccttcactttaatttttcaagatggttatactaatttcttcctttgt

SEQ ID NO: 1659 - DNA, 63 bp, Homo sapiens
gggcccggccccttcactttaatttttcaagatggttatactaatttcttcctttgtttgttt

SEQ ID NO: 1660 - DNA, 73 bp, Homo sapiens
cactgtgcccggccatactttttaatttctaaggactctttatgctctcagctgctccttatttttgtaatct

SEQ ID NO: 1661 - DNA, 73 bp, Homo sapiens
cggccatactttttaatttctaaggactctttatgctctcagctgctccttatttttgtaatcttctgttcaa

SEQ ID NO: 1662 - DNA, 74 bp, Homo sapiens
tttaatttctaaggactctttatgctctcagctgctccttatttttgtaatcttctgttcaagtttcttggata

SEQ ID NO: 1663 - DNA, 75 bp, Homo sapiens
tctaaggactctttatgctctcagctgctccttatttttgtaatcttctgttcaagtttcttggatacaatttat

SEQ ID NO: 1664 - DNA, 73 bp, Homo sapiens
ctctttatgctctcagctgctccttatttttgtaatcttctgttcaagtttcttggatacaatttattttaat

SEQ ID NO: 1665 - DNA, 70 bp, Homo sapiens
tctcagctgctccttatttttgtaatcttctgttcaagtttcttggatacaatttattttaatttaaatt

SEQ ID NO: 1666 - DNA, 68 bp, Homo sapiens
tttgttttgtttcagttacgaaactttcttctgctccttgaactcttcttttgtactgttttggcctg

SEQ ID NO: 1667 - DNA, 69 bp, Homo sapiens
tttgtttcagttacgaaactttcttctgctccttgaactcttcttttgtactgttttggcctgtctttc

SEQ ID NO: 1668 - DNA, 69 bp, Homo sapiens
aaactttcttctgctccttgaactcttcttttgtactgttttggcctgtctttcgtgttagtgacttta

SEQ ID NO: 1669 - DNA, 71 bp, Homo sapiens
tcttctgctccttgaactcttcttttgtactgttttggcctgtctttcgtgttagtgactttatgtaaaaa

SEQ ID NO: 1670 - DNA, 71 bp, Homo sapiens
aactcttcttttgtactgttttggcctgtctttcgtgttagtgactttatgtaaaaatctggtgattctca

SEQ ID NO: 1671 - DNA, 74 bp, Homo sapiens
ttgtactgttttggcctgtctttcgtgttagtgactttatgtaaaaatctggtgattctcagccttgattcaaa

SEQ ID NO: 1672 - DNA, 74 bp, Homo sapiens
ctgttttggcctgtctttcgtgttagtgactttatgtaaaaatctggtgattctcagccttgattcaaatgtaa

SEQ ID NO: 1673 - DNA, 73 bp, Homo sapiens
ctgtctttcgtgttagtgactttatgtaaaaatctggtgattctcagccttgattcaaatgtaagacaatttt

SEQ ID NO: 1674 - DNA, 77 bp, Homo sapiens
cgtgcccagcctcaaatttaagacaaattcttaatgagtggattggaagttttgtgtgagcagacattattgagtga

SEQ ID NO: 1675 - DNA, 76 bp, Homo sapiens
agcctcaaatttaagacaaattcttaatgagtggattggaagttttgtgtgagcagacattattgagtgatagact

SEQ ID NO: 1676 - DNA, 82 bp, Homo sapiens
taagacaaattcttaatgagtggattggaagttttgtgtgagcagacattattgagtgatagacttcatcataagtgatcta

SEQ ID NO: 1677 - DNA, 80 bp, Homo sapiens
aattcttaatgagtggattggaagttttgtgtgagcagacattattgagtgatagacttcatcataagtgatctagcggg

SEQ ID NO: 1678 - DNA, 80 bp, Homo sapiens
gattggaagttttgtgtgagcagacattattgagtgatagacttcatcataagtgatctagcggggttcttagcttagta

SEQ ID NO: 1679 - DNA, 80 bp, Homo sapiens
ttttgtgtgagcagacattattgagtgatagacttcatcataagtgatctagcggggttcttagcttagtaagagagaaa

SEQ ID NO: 1680 - DNA, 84 bp, Homo sapiens
cagacattattgagtgatagacttcatcataagtgatctagcggggttcttagcttagtaagagagaaatatatctgatcatga

SEQ ID NO: 1681 - DNA, 83 bp, Homo sapiens
attattgagtgatagacttcatcataagtgatctagcggggttcttagcttagtaagagagaaatatatctgatcatgatcac

SEQ ID NO: 1682 - DNA, 81 bp, Homo sapiens
agtgatagacttcatcataagtgatctagcggggttcttagcttagtaagagagaaatatatctgatcatgatcacctgtt

SEQ ID NO: 1683 - DNA, 80 bp, Homo sapiens
atagacttcatcataagtgatctagcggggttcttagcttagtaagagagaaatatatctgatcatgatcacctgtttgg

SEQ ID NO: 1684 - DNA, 80 bp, Homo sapiens
ttcatcataagtgatctagcggggttcttagcttagtaagagagaaatatatctgatcatgatcacctgtttggggttga

SEQ ID NO: 1685 - DNA, 77 bp, Homo sapiens
ataagtgatctagcggggttcttagcttagtaagagagaaatatatctgatcatgatcacctgtttggggttgacaa

SEQ ID NO: 1686 - DNA, 76 bp, Homo sapiens
aagtgatctagcggggttcttagcttagtaagagagaaatatatctgatcatgatcacctgtttggggttgacaaa

SEQ ID NO: 1687 - DNA, 75 bp, Homo sapiens
gttcttagcttagtaagagagaaatatatctgatcatgatcacctgtttggggttgacaaacctggttaccaata

SEQ ID NO: 1688 - DNA, 75 bp, Homo sapiens
ttcttagcttagtaagagagaaatatatctgatcatgatcacctgtttggggttgacaaacctggttaccaatat

SEQ ID NO: 1689 - DNA, 74 bp, Homo sapiens
ttagtaagagagaaatatatctgatcatgatcacctgtttggggttgacaaacctggttaccaatattccttta

SEQ ID NO: 1690 - DNA, 76 bp, Homo sapiens
gaaatatatctgatcatgatcacctgtttggggttgacaaacctggttaccaatattcctttagccagatggatgt

SEQ ID NO: 1691 - DNA, 76 bp, Homo sapiens
tatctgatcatgatcacctgtttggggttgacaaacctggttaccaatattcctttagccagatggatgttggaat

SEQ ID NO: 1692 - DNA, 72 bp, Homo sapiens
atgatcacctgtttggggttgacaaacctggttaccaatattcctttagccagatggatgttggaatttgag

SEQ ID NO: 1693 - DNA, 70 bp, Homo sapiens
gacaaacctggttaccaatattcctttagccagatggatgttggaatttgaggatttagaattacacttt

SEQ ID NO: 1694 - DNA, 72 bp, Homo sapiens
gttaccaatattcctttagccagatggatgttggaatttgaggatttagaattacacttttatgattcttgt

SEQ ID NO: 1695 - DNA, 75 bp, Homo sapiens
agatggatgttggaatttgaggatttagaattacacttttatgattcttgtttttcttcagctgctcctggtgtc

SEQ ID NO: 1696 - DNA, 75 bp, Homo sapiens
atttgaggatttagaattacacttttatgattcttgtttttcttcagctgctcctggtgtctctgagtgtagatt

SEQ ID NO: 1697 - DNA, 76 bp, Homo sapiens
ttagaattacacttttatgattcttgtttttcttcagctgctcctggtgtctctgagtgtagatttcttccattta

SEQ ID NO: 1698 - DNA, 74 bp, Homo sapiens
attacacttttatgattcttgtttttcttcagctgctcctggtgtctctgagtgtagatttcttccatttaccc

SEQ ID NO: 1699 - DNA, 74 bp, Homo sapiens
ttcttgtttttcttcagctgctcctggtgtctctgagtgtagatttcttccatttaccctctctaggaaattaa

SEQ ID NO: 1700 - DNA, 73 bp, Homo sapiens
gtttttcttcagctgctcctggtgtctctgagtgtagatttcttccatttaccctctctaggaaattaagctt

SEQ ID NO: 1701 - DNA, 72 bp, Homo sapiens
ctcctggtgtctctgagtgtagatttcttccatttaccctctctaggaaattaagctttgcagttttctagg

SEQ ID NO: 1702 - DNA, 75 bp, Homo sapiens
tgtctctgagtgtagatttcttccatttaccctctctaggaaattaagctttgcagttttctagggcaggtgaga

SEQ ID NO: 1703 - DNA, 73 bp, Homo sapiens
tgtagatttcttccatttaccctctctaggaaattaagctttgcagttttctagggcaggtgagagccagtta

SEQ ID NO: 1704 - DNA, 72 bp, Homo sapiens
catttaccctctctaggaaattaagctttgcagttttctagggcaggtgagagccagttacgcgttagtatg

SEQ ID NO: 1705 - DNA, 74 bp, Homo sapiens
tctctaggaaattaagctttgcagttttctagggcaggtgagagccagttacgcgttagtatgtagtgaataag

SEQ ID NO: 1706 - DNA, 72 bp, Homo sapiens
aattaagctttgcagttttctagggcaggtgagagccagttacgcgttagtatgtagtgaataagggattgt

SEQ ID NO: 1707 - DNA, 74 bp, Homo sapiens
tttgcagttttctagggcaggtgagagccagttacgcgttagtatgtagtgaataagggattgttttgattgct

SEQ ID NO: 1708 - DNA, 76 bp, Homo sapiens
tctagggcaggtgagagccagttacgcgttagtatgtagtgaataagggattgttttgattgcttttcagatggta

SEQ ID NO: 1709 - DNA, 74 bp, Homo sapiens
gttacgcgttagtatgtagtgaataagggattgttttgattgcttttcagatggtatgcaattcctgttggtta

SEQ ID NO: 1710 - DNA, 75 bp, Homo sapiens
aataagggattgttttgattgcttttcagatggtatgcaattcctgttggttagcctcatctgaaaacgtcactc

SEQ ID NO: 1711 - DNA, 85 bp, Homo sapiens
ttttcagatggtatgcaattcctgttggttagcctcatctgaaaacgtcactcctggatacatagaacatcactgcgcatgtgca

SEQ ID NO: 1712 - DNA, 84 bp, Homo sapiens
atggtatgcaattcctgttggttagcctcatctgaaaacgtcactcctggatacatagaacatcactgcgcatgtgcatctccc

SEQ ID NO: 1713 - DNA, 84 bp, Homo sapiens
tagcctcatctgaaaacgtcactcctggatacatagaacatcactgcgcatgtgcatctccccacccccgatgcctggtgtcta

SEQ ID NO: 1714 - DNA, 78 bp, Homo sapiens
actcctggatacatagaacatcactgcgcatgtgcatctccccacccccgatgcctggtgtctaacgttcctccagtt

SEQ ID NO: 1715 - DNA, 80 bp, Homo sapiens
atacatagaacatcactgcgcatgtgcatctccccacccccgatgcctggtgtctaacgttcctccagtttctggtgctc

SEQ ID NO: 1716 - DNA, 80 bp, Homo sapiens
actgcgcatgtgcatctccccacccccgatgcctggtgtctaacgttcctccagtttctggtgctctgatgcattgcttt

SEQ ID NO: 1717 - DNA, 78 bp, Homo sapiens
atgtgcatctccccacccccgatgcctggtgtctaacgttcctccagtttctggtgctctgatgcattgcttttgggc

SEQ ID NO: 1718 - DNA, 76 bp, Homo sapiens
cacccccgatgcctggtgtctaacgttcctccagtttctggtgctctgatgcattgcttttgggcttgtcttacta

SEQ ID NO: 1719 - DNA, 79 bp, Homo sapiens
atgcctggtgtctaacgttcctccagtttctggtgctctgatgcattgcttttgggcttgtcttactacagcagctttc

SEQ ID NO: 1720 - DNA, 78 bp, Homo sapiens
tgtctaacgttcctccagtttctggtgctctgatgcattgcttttgggcttgtcttactacagcagctttcttcggtc

SEQ ID NO: 1721 - DNA, 80 bp, Homo sapiens
tccagtttctggtgctctgatgcattgcttttgggcttgtcttactacagcagctttcttcggtcctcagtcatttacca

SEQ ID NO: 1722 - DNA, 82 bp, Homo sapiens
gtgctctgatgcattgcttttgggcttgtcttactacagcagctttcttcggtcctcagtcatttaccacttgtcatatgtc

SEQ ID NO: 1723 - DNA, 77 bp, Homo sapiens
atgcattgcttttgggcttgtcttactacagcagctttcttcggtcctcagtcatttaccacttgtcatatgtcctt

SEQ ID NO: 1724 - DNA, 74 bp, Homo sapiens
tttgggcttgtcttactacagcagctttcttcggtcctcagtcatttaccacttgtcatatgtcctttctagtt

SEQ ID NO: 1725 - DNA, 70 bp, Homo sapiens
cttcggtcctcagtcatttaccacttgtcatatgtcctttctagtttccagggatattcttttttatatt

SEQ ID NO: 1726 - DNA, 73 bp, Homo sapiens
gtcatttaccacttgtcatatgtcctttctagtttccagggatattcttttttatatttatggctttatgcca

SEQ ID NO: 1727 - DNA, 74 bp, Homo sapiens
ccacttgtcatatgtcctttctagtttccagggatattcttttttatatttatggctttatgccatttatctca

SEQ ID NO: 1728 - DNA, 73 bp, Homo sapiens
tcctttctagtttccagggatattcttttttatatttatggctttatgccatttatctcagttgtcatttggc

SEQ ID NO: 1729 - DNA, 73 bp, Homo sapiens
tattcttttttatatttatggctttatgccatttatctcagttgtcatttggcgtttcaagaaggagaggtgg

SEQ ID NO: 1730 - DNA, 74 bp, Homo sapiens
ttatatttatggctttatgccatttatctcagttgtcatttggcgtttcaagaaggagaggtggtagtgtttaa

SEQ ID NO: 1731 - DNA, 73 bp, Homo sapiens
gctttatgccatttatctcagttgtcatttggcgtttcaagaaggagaggtggtagtgtttaagtggaattaa

SEQ ID NO: 1732 - DNA, 70 bp, Homo sapiens
atttatctcagttgtcatttggcgtttcaagaaggagaggtggtagtgtttaagtggaattaactacttg

SEQ ID NO: 1733 - DNA, 70 bp, Homo sapiens
agttgtcatttggcgtttcaagaaggagaggtggtagtgtttaagtggaattaactacttgtgtttctga

SEQ ID NO: 1734 - DNA, 70 bp, Homo sapiens
atttggcgtttcaagaaggagaggtggtagtgtttaagtggaattaactacttgtgtttctgatgtggtc

SEQ ID NO: 1735 - DNA, 70 bp, Homo sapiens
caagaaggagaggtggtagtgtttaagtggaattaactacttgtgtttctgatgtggtcttttatatttc

SEQ ID NO: 1736 - DNA, 69 bp, Homo sapiens
gaggtggtagtgtttaagtggaattaactacttgtgtttctgatgtggtcttttatatttcttacaggg

SEQ ID NO: 1737 - DNA, 67 bp, Homo sapiens
gtgtttaagtggaattaactacttgtgtttctgatgtggtcttttatatttcttacagggttttgtt

SEQ ID NO: 1738 - DNA, 68 bp, Homo sapiens
taactacttgtgtttctgatgtggtcttttatatttcttacagggttttgttttaccaagtactagtc

SEQ ID NO: 1739 - DNA, 70 bp, Homo sapiens
tgtttctgatgtggtcttttatatttcttacagggttttgttttaccaagtactagtcttcagtctatcc

SEQ ID NO: 1740 - DNA, 69 bp, Homo sapiens
ctgatgtggtcttttatatttcttacagggttttgttttaccaagtactagtcttcagtctatcctgtt

SEQ ID NO: 1741 - DNA, 69 bp, Homo sapiens
gttttaccaagtactagtcttcagtctatcctgtttacttgattttttcccactcaactcacaaacatt

SEQ ID NO: 1742 - DNA, 76 bp, Homo sapiens
cttcagtctatcctgtttacttgattttttcccactcaactcacaaacatttttgaatcatctcatgaattctgct

SEQ ID NO: 1743 - DNA, 74 bp, Homo sapiens
atcctgtttacttgattttttcccactcaactcacaaacatttttgaatcatctcatgaattctgctttccatt

SEQ ID NO: 1744 - DNA, 74 bp, Homo sapiens
gattttttcccactcaactcacaaacatttttgaatcatctcatgaattctgctttccatttacatttttgccc

SEQ ID NO: 1745 - DNA, 75 bp, Homo sapiens
ttcccactcaactcacaaacatttttgaatcatctcatgaattctgctttccatttacatttttgcccttttgtc

SEQ ID NO: 1746 - DNA, 73 bp, Homo sapiens
caaacatttttgaatcatctcatgaattctgctttccatttacatttttgcccttttgtcttttcctcttcgc

SEQ ID NO: 1747 - DNA, 67 bp, Homo sapiens
attctgctttccatttacatttttgcccttttgtcttttcctcttcgctgttaaacttcctgaaaaa

SEQ ID NO: 1748 - DNA, 64 bp, Homo sapiens
ccatttacatttttgcccttttgtcttttcctcttcgctgttaaacttcctgaaaaaataaaac

SEQ ID NO: 1749 - DNA, 70 bp, Homo sapiens
ctcttcgctgttaaacttcctgaaaaaataaaactagttgattcacttcttcaaatgcctactgtgttgt

SEQ ID NO: 1750 - DNA, 67 bp, Homo sapiens
aacttcctgaaaaaataaaactagttgattcacttcttcaaatgcctactgtgttgttatttttccc

SEQ ID NO: 1751 - DNA, 70 bp, Homo sapiens
aaataaaactagttgattcacttcttcaaatgcctactgtgttgttatttttccccttgtgcttaatgat

SEQ ID NO: 1752 - DNA, 73 bp, Homo sapiens
ctagttgattcacttcttcaaatgcctactgtgttgttatttttccccttgtgcttaatgattgagttataac

SEQ ID NO: 1753 - DNA, 73 bp, Homo sapiens
cacttcttcaaatgcctactgtgttgttatttttccccttgtgcttaatgattgagttataactcagttatta

SEQ ID NO: 1754 - DNA, 72 bp, Homo sapiens
ctgtgttgttatttttccccttgtgcttaatgattgagttataactcagttattataagtaatagtttatga

SEQ ID NO: 1755 - DNA, 73 bp, Homo sapiens
ttttccccttgtgcttaatgattgagttataactcagttattataagtaatagtttatgaaatctgtatttga

SEQ ID NO: 1756 - DNA, 77 bp, Homo sapiens
tgtgcttaatgattgagttataactcagttattataagtaatagtttatgaaatctgtatttgatataacactttca

SEQ ID NO: 1757 - DNA, 78 bp, Homo sapiens
tgagttataactcagttattataagtaatagtttatgaaatctgtatttgatataacactttcatcatggacactgtc

SEQ ID NO: 1758 - DNA, 77 bp, Homo sapiens
ataagtaatagtttatgaaatctgtatttgatataacactttcatcatggacactgtccattttgttcttcagtgac

SEQ ID NO: 1759 - DNA, 78 bp, Homo sapiens
gtttatgaaatctgtatttgatataacactttcatcatggacactgtccattttgttcttcagtgactcttaacataa

SEQ ID NO: 1760 - DNA, 78 bp, Homo sapiens
atctgtatttgatataacactttcatcatggacactgtccattttgttcttcagtgactcttaacataaaagatccac

SEQ ID NO: 1761 - DNA, 76 bp, Homo sapiens
atataacactttcatcatggacactgtccattttgttcttcagtgactcttaacataaaagatccacgtacaagaa

SEQ ID NO: 1762 - DNA, 74 bp, Homo sapiens
tttcatcatggacactgtccattttgttcttcagtgactcttaacataaaagatccacgtacaagaagttcttt

SEQ ID NO: 1763 - DNA, 73 bp, Homo sapiens
catggacactgtccattttgttcttcagtgactcttaacataaaagatccacgtacaagaagttcttttaata

SEQ ID NO: 1764 - DNA, 72 bp, Homo sapiens
ttttgttcttcagtgactcttaacataaaagatccacgtacaagaagttcttttaataataaagcatcagga

SEQ ID NO: 1765 - DNA, 71 bp, Homo sapiens
taacataaaagatccacgtacaagaagttcttttaataataaagcatcaggaaaattatctcccttgcgta

SEQ ID NO: 1766 - DNA, 70 bp, Homo sapiens
aaaagatccacgtacaagaagttcttttaataataaagcatcaggaaaattatctcccttgcgtatctgg

SEQ ID NO: 1767 - DNA, 71 bp, Homo sapiens
cgtacaagaagttcttttaataataaagcatcaggaaaattatctcccttgcgtatctggtatatttcctc

SEQ ID NO: 1768 - DNA, 72 bp, Homo sapiens
cttttaataataaagcatcaggaaaattatctcccttgcgtatctggtatatttcctcctttttgatagatc

SEQ ID NO: 1769 - DNA, 76 bp, Homo sapiens
taaagcatcaggaaaattatctcccttgcgtatctggtatatttcctcctttttgatagatctgtgaaatacattc

SEQ ID NO: 1770 - DNA, 74 bp, Homo sapiens
ggaaaattatctcccttgcgtatctggtatatttcctcctttttgatagatctgtgaaatacattctgtttgtc

SEQ ID NO: 1771 - DNA, 74 bp, Homo sapiens
tgcgtatctggtatatttcctcctttttgatagatctgtgaaatacattctgtttgtctttttgtcctggttac

SEQ ID NO: 1772 - DNA, 74 bp, Homo sapiens
tttttgatagatctgtgaaatacattctgtttgtctttttgtcctggttaccaggcagcctagaaccaaatctg

SEQ ID NO: 1773 - DNA, 74 bp, Homo sapiens
tagatctgtgaaatacattctgtttgtctttttgtcctggttaccaggcagcctagaaccaaatctggtcttta

SEQ ID NO: 1774 - DNA, 70 bp, Homo sapiens
aaatacattctgtttgtctttttgtcctggttaccaggcagcctagaaccaaatctggtctttagttaca

SEQ ID NO: 1775 - DNA, 73 bp, Homo sapiens
tttgtctttttgtcctggttaccaggcagcctagaaccaaatctggtctttagttacatcagctatattaata

SEQ ID NO: 1776 - DNA, 76 bp, Homo sapiens
tcctggttaccaggcagcctagaaccaaatctggtctttagttacatcagctatattaatatcattattagtatat

SEQ ID NO: 1777 - DNA, 76 bp, Homo sapiens
caggcagcctagaaccaaatctggtctttagttacatcagctatattaatatcattattagtatatttgttccctc

SEQ ID NO: 1778 - DNA, 71 bp, Homo sapiens
gttacatcagctatattaatatcattattagtatatttgttccctctttctccttccgtggggtttaggac

SEQ ID NO: 1779 - DNA, 69 bp, Homo sapiens
ctatattaatatcattattagtatatttgttccctctttctccttccgtggggtttaggacttcacctc

SEQ ID NO: 1780 - DNA, 70 bp, Homo sapiens
taatatcattattagtatatttgttccctctttctccttccgtggggtttaggacttcacctcttatctc

SEQ ID NO: 1781 - DNA, 68 bp, Homo sapiens
attagtatatttgttccctctttctccttccgtggggtttaggacttcacctcttatctctgtttctc

SEQ ID NO: 1782 - DNA, 71 bp, Homo sapiens
ttccctctttctccttccgtggggtttaggacttcacctcttatctctgtttctctgcgtgttgatttcat

SEQ ID NO: 1783 - DNA, 75 bp, Homo sapiens
ttctccttccgtggggtttaggacttcacctcttatctctgtttctctgcgtgttgatttcattctctcatacta

SEQ ID NO: 1784 - DNA, 79 bp, Homo sapiens
ggtttaggacttcacctcttatctctgtttctctgcgtgttgatttcattctctcatactacagactctacttcatgag

SEQ ID NO: 1785 - DNA, 81 bp, Homo sapiens
aggacttcacctcttatctctgtttctctgcgtgttgatttcattctctcatactacagactctacttcatgaggctggaa

SEQ ID NO: 1786 - DNA, 85 bp, Homo sapiens
tgtttctctgcgtgttgatttcattctctcatactacagactctacttcatgaggctggaaccatgactgctggcagctcttgtt

SEQ ID NO: 1787 - DNA, 83 bp, Homo sapiens
cgtgttgatttcattctctcatactacagactctacttcatgaggctggaaccatgactgctggcagctcttgtttccagccc

SEQ ID NO: 1788 - DNA, 80 bp, Homo sapiens
attctctcatactacagactctacttcatgaggctggaaccatgactgctggcagctcttgtttccagccccttttacca

SEQ ID NO: 1789 - DNA, 78 bp, Homo sapiens
atactacagactctacttcatgaggctggaaccatgactgctggcagctcttgtttccagccccttttaccagaagaa

SEQ ID NO: 1790 - DNA, 74 bp, Homo sapiens
accatgactgctggcagctcttgtttccagccccttttaccagaagaaggggctctctagaagaatcctggaaa

SEQ ID NO: 1791 - DNA, 71 bp, Homo sapiens
agctcttgtttccagccccttttaccagaagaaggggctctctagaagaatcctggaaaggactctgattg

SEQ ID NO: 1792 - DNA, 71 bp, Homo sapiens
tttccagccccttttaccagaagaaggggctctctagaagaatcctggaaaggactctgattggcctgtct

SEQ ID NO: 1793 - DNA, 78 bp, Homo sapiens
ttttaccagaagaaggggctctctagaagaatcctggaaaggactctgattggcctgtcttggatcatgtgcccatca

SEQ ID NO: 1794 - DNA, 81 bp, Homo sapiens
agaagaaggggctctctagaagaatcctggaaaggactctgattggcctgtcttggatcatgtgcccatcatctctgtggc

SEQ ID NO: 1795 - DNA, 82 bp, Homo sapiens
ctctctagaagaatcctggaaaggactctgattggcctgtcttggatcatgtgcccatcatctctgtggctggagtggggag

SEQ ID NO: 1796 - DNA, 79 bp, Homo sapiens
aagaatcctggaaaggactctgattggcctgtcttggatcatgtgcccatcatctctgtggctggagtggggagggtac

SEQ ID NO: 1797 - DNA, 81 bp, Homo sapiens
aaaggactctgattggcctgtcttggatcatgtgcccatcatctctgtggctggagtggggagggtactgtgaatggcaac

SEQ ID NO: 1798 - DNA, 81 bp, Homo sapiens
attggcctgtcttggatcatgtgcccatcatctctgtggctggagtggggagggtactgtgaatggcaaccctcactagaa

SEQ ID NO: 1799 - DNA, 81 bp, Homo sapiens
ttggatcatgtgcccatcatctctgtggctggagtggggagggtactgtgaatggcaaccctcactagaactacatagttg

SEQ ID NO: 1800 - DNA, 80 bp, Homo sapiens
atgtgcccatcatctctgtggctggagtggggagggtactgtgaatggcaaccctcactagaactacatagttggagtca

SEQ ID NO: 1801 - DNA, 75 bp, Homo sapiens
tctgtggctggagtggggagggtactgtgaatggcaaccctcactagaactacatagttggagtcaggggtaaga

SEQ ID NO: 1802 - DNA, 72 bp, Homo sapiens
agtggggagggtactgtgaatggcaaccctcactagaactacatagttggagtcaggggtaagagcagtttc

SEQ ID NO: 1803 - DNA, 72 bp, Homo sapiens
aatggcaaccctcactagaactacatagttggagtcaggggtaagagcagtttccataatgcaggggggtgg

SEQ ID NO: 1804 - DNA, 72 bp, Homo sapiens
aactacatagttggagtcaggggtaagagcagtttccataatgcaggggggtgggtgctgtttgcaaaacaa

SEQ ID NO: 1805 - DNA, 73 bp, Homo sapiens
agtcaggggtaagagcagtttccataatgcaggggggtgggtgctgtttgcaaaacaagggggatgcttatga

SEQ ID NO: 1806 - DNA, 74 bp, Homo sapiens
taagagcagtttccataatgcaggggggtgggtgctgtttgcaaaacaagggggatgcttatgaagcagaaaaa

SEQ ID NO: 1807 - DNA, 72 bp, Homo sapiens
agtttccataatgcaggggggtgggtgctgtttgcaaaacaagggggatgcttatgaagcagaaaaacaata

SEQ ID NO: 1808 - DNA, 76 bp, Homo sapiens
aatgcaggggggtgggtgctgtttgcaaaacaagggggatgcttatgaagcagaaaaacaatagatgtctatcata

SEQ ID NO: 1809 - DNA, 76 bp, Homo sapiens
gtgctgtttgcaaaacaagggggatgcttatgaagcagaaaaacaatagatgtctatcatactggcttttattatt

SEQ ID NO: 1810 - DNA, 73 bp, Homo sapiens
gtttgcaaaacaagggggatgcttatgaagcagaaaaacaatagatgtctatcatactggcttttattatttt

SEQ ID NO: 1811 - DNA, 66 bp, Homo sapiens
ttctttttttaattgttataatacttgtcctttattgtagactgcctcaaatccttttctaaaaat

SEQ ID NO: 1812 - DNA, 66 bp, Homo sapiens
tttaattgttataatacttgtcctttattgtagactgcctcaaatccttttctaaaaattttaggt

SEQ ID NO: 1813 - DNA, 66 bp, Homo sapiens
aatacttgtcctttattgtagactgcctcaaatccttttctaaaaattttaggtttaagtatatta

SEQ ID NO: 1814 - DNA, 67 bp, Homo sapiens
tgtcctttattgtagactgcctcaaatccttttctaaaaattttaggtttaagtatattaaatatcc

SEQ ID NO: 1815 - DNA, 67 bp, Homo sapiens
tgtagactgcctcaaatccttttctaaaaattttaggtttaagtatattaaatatcctaaaataaca

SEQ ID NO: 1816 - DNA, 64 bp, Homo sapiens
tcaaatccttttctaaaaattttaggtttaagtatattaaatatcctaaaataacataaactcc

SEQ ID NO: 1817 - DNA, 67 bp, Homo sapiens
tctaaaaattttaggtttaagtatattaaatatcctaaaataacataaactcctattcattcactct

SEQ ID NO: 1818 - DNA, 71 bp, Homo sapiens
ggtttaagtatattaaatatcctaaaataacataaactcctattcattcactctttaagggtgcagtgagc

SEQ ID NO: 1819 - DNA, 75 bp, Homo sapiens
aaaaaatcaaaatatgatcatgggctttggagtcagatgaactaaatatatgactgagcaagtttcttcttcttt

SEQ ID NO: 1820 - DNA, 75 bp, Homo sapiens
tttttaaattttaagtagagacatctatttgttttgacactattcctctcagttccacagtggcactatgtcata

SEQ ID NO: 1821 - DNA, 79 bp, Homo sapiens
tttaagtagagacatctatttgttttgacactattcctctcagttccacagtggcactatgtcataaatcagctgttaa

SEQ ID NO: 1822 - DNA, 81 bp, Homo sapiens
tagagacatctatttgttttgacactattcctctcagttccacagtggcactatgtcataaatcagctgttaatatttgta

SEQ ID NO: 1823 - DNA, 80 bp, Homo sapiens
tatttgttttgacactattcctctcagttccacagtggcactatgtcataaatcagctgttaatatttgtatgcatttct

SEQ ID NO: 1824 - DNA, 79 bp, Homo sapiens
acactattcctctcagttccacagtggcactatgtcataaatcagctgttaatatttgtatgcatttctttctgaactt

SEQ ID NO: 1825 - DNA, 78 bp, Homo sapiens
tcagttccacagtggcactatgtcataaatcagctgttaatatttgtatgcatttctttctgaactttgtgttctttt

SEQ ID NO: 1826 - DNA, 78 bp, Homo sapiens
acagtggcactatgtcataaatcagctgttaatatttgtatgcatttctttctgaactttgtgttctttttatgtgcc

SEQ ID NO: 1827 - DNA, 77 bp, Homo sapiens
tcataaatcagctgttaatatttgtatgcatttctttctgaactttgtgttctttttatgtgcctttgtgcgagaac

SEQ ID NO: 1828 - DNA, 76 bp, Homo sapiens
aatcagctgttaatatttgtatgcatttctttctgaactttgtgttctttttatgtgcctttgtgcgagaaccaca

SEQ ID NO: 1829 - DNA, 71 bp, Homo sapiens
atttgtatgcatttctttctgaactttgtgttctttttatgtgcctttgtgcgagaaccacagttttaaaa

SEQ ID NO: 1830 - DNA, 71 bp, Homo sapiens
atgcatttctttctgaactttgtgttctttttatgtgcctttgtgcgagaaccacagttttaaaattacta

SEQ ID NO: 1831 - DNA, 72 bp, Homo sapiens
ctgaactttgtgttctttttatgtgcctttgtgcgagaaccacagttttaaaattactatagcttcatatta

SEQ ID NO: 1832 - DNA, 73 bp, Homo sapiens
tctttttatgtgcctttgtgcgagaaccacagttttaaaattactatagcttcatattaataataactctgga

SEQ ID NO: 1833 - DNA, 74 bp, Homo sapiens
gtgcctttgtgcgagaaccacagttttaaaattactatagcttcatattaataataactctggatacaagatac

SEQ ID NO: 1834 - DNA, 75 bp, Homo sapiens
tgtgcgagaaccacagttttaaaattactatagcttcatattaataataactctggatacaagataccagaaaga

SEQ ID NO: 1835 - DNA, 72 bp, Homo sapiens
cacagttttaaaattactatagcttcatattaataataactctggatacaagataccagaaagaattagtcc

SEQ ID NO: 1836 - DNA, 75 bp, Homo sapiens
ttactatagcttcatattaataataactctggatacaagataccagaaagaattagtccttctatattgtgttcc

SEQ ID NO: 1837 - DNA, 73 bp, Homo sapiens
atagcttcatattaataataactctggatacaagataccagaaagaattagtccttctatattgtgttccttt

SEQ ID NO: 1838 - DNA, 70 bp, Homo sapiens
attaataataactctggatacaagataccagaaagaattagtccttctatattgtgttccttttttgttg

SEQ ID NO: 1839 - DNA, 75 bp, Homo sapiens
tgttgttgttttaagtatcttgccacttcttagctctttgcatttgataaatattttgaaccataatgttccaca

SEQ ID NO: 1840 - DNA, 75 bp, Homo sapiens
ttaagtatcttgccacttcttagctctttgcatttgataaatattttgaaccataatgttccacaaaaatgttgc

SEQ ID NO: 1841 - DNA, 74 bp, Homo sapiens
cttgccacttcttagctctttgcatttgataaatattttgaaccataatgttccacaaaaatgttgctagtgtt

SEQ ID NO: 1842 - DNA, 74 bp, Homo sapiens
tcttagctctttgcatttgataaatattttgaaccataatgttccacaaaaatgttgctagtgttttgtttgag

SEQ ID NO: 1843 - DNA, 75 bp, Homo sapiens
gcatttgataaatattttgaaccataatgttccacaaaaatgttgctagtgttttgtttgagtttgcattgattg

SEQ ID NO: 1844 - DNA, 75 bp, Homo sapiens
atattttgaaccataatgttccacaaaaatgttgctagtgttttgtttgagtttgcattgattgtgtatatcagt

SEQ ID NO: 1845 - DNA, 75 bp, Homo sapiens
ttgaaccataatgttccacaaaaatgttgctagtgttttgtttgagtttgcattgattgtgtatatcagtttggg

SEQ ID NO: 1846 - DNA, 75 bp, Homo sapiens
tccacaaaaatgttgctagtgttttgtttgagtttgcattgattgtgtatatcagtttggggagaatggacttct

SEQ ID NO: 1847 - DNA, 74 bp, Homo sapiens
aatgttgctagtgttttgtttgagtttgcattgattgtgtatatcagtttggggagaatggacttcttctttct

SEQ ID NO: 1848 - DNA, 73 bp, Homo sapiens
agtgttttgtttgagtttgcattgattgtgtatatcagtttggggagaatggacttcttctttctttttgaga

SEQ ID NO: 1849 - DNA, 79 bp, Homo sapiens
gccactgcgcttggcaagaatggacatctttatatatagttttgaatttttgaatccatgaacatggtaatctgattat

SEQ ID NO: 1850 - DNA, 79 bp, Homo sapiens
gcgcttggcaagaatggacatctttatatatagttttgaatttttgaatccatgaacatggtaatctgattattcagat

SEQ ID NO: 1851 - DNA, 77 bp, Homo sapiens
gaatggacatctttatatatagttttgaatttttgaatccatgaacatggtaatctgattattcagattttccatat

SEQ ID NO: 1852 - DNA, 77 bp, Homo sapiens
tctttatatatagttttgaatttttgaatccatgaacatggtaatctgattattcagattttccatattcattgtgg

SEQ ID NO: 1853 - DNA, 75 bp, Homo sapiens
atagttttgaatttttgaatccatgaacatggtaatctgattattcagattttccatattcattgtggtaaaata

SEQ ID NO: 1854 - DNA, 74 bp, Homo sapiens
ttaagtacattcacagtgtttataaccgtcagcagtatatatttccagaactaattccaaagagaaattctgta

SEQ ID NO: 1855 - DNA, 75 bp, Homo sapiens
tcacagtgtttataaccgtcagcagtatatatttccagaactaattccaaagagaaattctgtaccttgtaagca

SEQ ID NO: 1856 - DNA, 75 bp, Homo sapiens
ttataaccgtcagcagtatatatttccagaactaattccaaagagaaattctgtaccttgtaagcataactctca

SEQ ID NO: 1857 - DNA, 74 bp, Homo sapiens
agcagtatatatttccagaactaattccaaagagaaattctgtaccttgtaagcataactctcatttcgccctc

SEQ ID NO: 1858 - DNA, 74 bp, Homo sapiens
atatatttccagaactaattccaaagagaaattctgtaccttgtaagcataactctcatttcgccctctctata

SEQ ID NO: 1859 - DNA, 72 bp, Homo sapiens
actaattccaaagagaaattctgtaccttgtaagcataactctcatttcgccctctctatagcccctggtaa

SEQ ID NO: 1860 - DNA, 71 bp, Homo sapiens
aagagaaattctgtaccttgtaagcataactctcatttcgccctctctatagcccctggtaacttctgttt

SEQ ID NO: 1861 - DNA, 72 bp, Homo sapiens
aattctgtaccttgtaagcataactctcatttcgccctctctatagcccctggtaacttctgttttctttca

SEQ ID NO: 1862 - DNA, 72 bp, Homo sapiens
taagcataactctcatttcgccctctctatagcccctggtaacttctgttttctttcaagttgcctagttta

SEQ ID NO: 1863 - DNA, 71 bp, Homo sapiens
taactctcatttcgccctctctatagcccctggtaacttctgttttctttcaagttgcctagtttagctac

SEQ ID NO: 1864 - DNA, 72 bp, Homo sapiens
ttcgccctctctatagcccctggtaacttctgttttctttcaagttgcctagtttagctactcatgtaagtg

SEQ ID NO: 1865 - DNA, 72 bp, Homo sapiens
tatagcccctggtaacttctgttttctttcaagttgcctagtttagctactcatgtaagtggaatcttatat

SEQ ID NO: 1866 - DNA, 70 bp, Homo sapiens
ggtaacttctgttttctttcaagttgcctagtttagctactcatgtaagtggaatcttatatttgttctt

SEQ ID NO: 1867 - DNA, 71 bp, Homo sapiens
gttttctttcaagttgcctagtttagctactcatgtaagtggaatcttatatttgttcttttgtacgtagc

SEQ ID NO: 1868 - DNA, 72 bp, Homo sapiens
caagttgcctagtttagctactcatgtaagtggaatcttatatttgttcttttgtacgtagcttatttcact

SEQ ID NO: 1869 - DNA, 77 bp, Homo sapiens
tttcaaggttcgtctatgttgtagcatgtaccagaatttgaatcttgtttatagctgaatactacataatccattgt

SEQ ID NO: 1870 - DNA, 79 bp, Homo sapiens
ggttcgtctatgttgtagcatgtaccagaatttgaatcttgtttatagctgaatactacataatccattgttatgtata

SEQ ID NO: 1871 - DNA, 77 bp, Homo sapiens
gtagcatgtaccagaatttgaatcttgtttatagctgaatactacataatccattgttatgtatataccgtgttttg

SEQ ID NO: 1872 - DNA, 74 bp, Homo sapiens
accagaatttgaatcttgtttatagctgaatactacataatccattgttatgtatataccgtgttttgtttatc

SEQ ID NO: 1873 - DNA, 75 bp, Homo sapiens
ccagaatttgaatcttgtttatagctgaatactacataatccattgttatgtatataccgtgttttgtttatcca

SEQ ID NO: 1874 - DNA, 75 bp, Homo sapiens
tgtgaataatgctgagctgaacactggtattctagcatctgtttgaatcttttttttttgggtcgggtgggtgta

SEQ ID NO: 1875 - DNA, 74 bp, Homo sapiens
taatgctgagctgaacactggtattctagcatctgtttgaatcttttttttttgggtcgggtgggtgtacatta

SEQ ID NO: 1876 - DNA, 69 bp, Homo sapiens
aacactggtattctagcatctgtttgaatcttttttttttgggtcgggtgggtgtacattaggaatgaa

SEQ ID NO: 1877 - DNA, 73 bp, Homo sapiens
tattctagcatctgtttgaatcttttttttttgggtcgggtgggtgtacattaggaatgaagttgctggatca

SEQ ID NO: 1878 - DNA, 74 bp, Homo sapiens
tctagcatctgtttgaatcttttttttttgggtcgggtgggtgtacattaggaatgaagttgctggatcacatg

SEQ ID NO: 1879 - DNA, 68 bp, Homo sapiens
aatcttttttttttgggtcgggtgggtgtacattaggaatgaagttgctggatcacatggtaattccg

SEQ ID NO: 1880 - DNA, 69 bp, Homo sapiens
tttttgggtcgggtgggtgtacattaggaatgaagttgctggatcacatggtaattccgtttggctttt

SEQ ID NO: 1881 - DNA, 69 bp, Homo sapiens
ggtcgggtgggtgtacattaggaatgaagttgctggatcacatggtaattccgtttggctttttttttc

SEQ ID NO: 1882 - DNA, 75 bp, Homo sapiens
gaggaactgccaaaatgtttttcacagagacttcagctttttgtattcctaccaacaatgcatgaaggttcagtc

SEQ ID NO: 1883 - DNA, 73 bp, Homo sapiens
caaaatgtttttcacagagacttcagctttttgtattcctaccaacaatgcatgaaggttcagtctttttcca

SEQ ID NO: 1884 - DNA, 72 bp, Homo sapiens
aaaatgtttttcacagagacttcagctttttgtattcctaccaacaatgcatgaaggttcagtctttttcca

SEQ ID NO: 1885 - DNA, 74 bp, Homo sapiens
tttcacagagacttcagctttttgtattcctaccaacaatgcatgaaggttcagtctttttccactcaagtctt

SEQ ID NO: 1886 - DNA, 73 bp, Homo sapiens
agagacttcagctttttgtattcctaccaacaatgcatgaaggttcagtctttttccactcaagtctttttca

SEQ ID NO: 1887 - DNA, 71 bp, Homo sapiens
acttcagctttttgtattcctaccaacaatgcatgaaggttcagtctttttccactcaagtctttttcagt

SEQ ID NO: 1888 - DNA, 71 bp, Homo sapiens
ttcagctttttgtattcctaccaacaatgcatgaaggttcagtctttttccactcaagtctttttcagttt

SEQ ID NO: 1889 - DNA, 70 bp, Homo sapiens
gctttttgtattcctaccaacaatgcatgaaggttcagtctttttccactcaagtctttttcagttttct

SEQ ID NO: 1890 - DNA, 71 bp, Homo sapiens
gtattcctaccaacaatgcatgaaggttcagtctttttccactcaagtctttttcagttttcttcaattct

SEQ ID NO: 1891 - DNA, 71 bp, Homo sapiens
cctaccaacaatgcatgaaggttcagtctttttccactcaagtctttttcagttttcttcaattcttctta

SEQ ID NO: 1892 - DNA, 70 bp, Homo sapiens
ccaacaatgcatgaaggttcagtctttttccactcaagtctttttcagttttcttcaattcttcttattt

SEQ ID NO: 1893 - DNA, 71 bp, Homo sapiens
caatgcatgaaggttcagtctttttccactcaagtctttttcagttttcttcaattcttcttattttctgt

SEQ ID NO: 1894 - DNA, 69 bp, Homo sapiens
catgaaggttcagtctttttccactcaagtctttttcagttttcttcaattcttcttattttctgttgt

SEQ ID NO: 1895 - DNA, 68 bp, Homo sapiens
cagtctttttccactcaagtctttttcagttttcttcaattcttcttattttctgttgttcttactgt

SEQ ID NO: 1896 - DNA, 69 bp, Homo sapiens
ccactcaagtctttttcagttttcttcaattcttcttattttctgttgttcttactgtttttgagacag

SEQ ID NO: 1897 - DNA, 82 bp, Homo sapiens
gtgcagtggcttaaacatggctcactggagcgtcaacctcctgggatcaggcagttgtctcacctagactcctgtgtagctg

SEQ ID NO: 1898 - DNA, 79 bp, Homo sapiens
gtgtgagccatgacatctggtctattttctggtttttgatgatagccttgctaatgatgtaaagtggtatcttgtcgtt

SEQ ID NO: 1899 - DNA, 76 bp, Homo sapiens
atgacatctggtctattttctggtttttgatgatagccttgctaatgatgtaaagtggtatcttgtcgttttgatt

SEQ ID NO: 1900 - DNA, 81 bp, Homo sapiens
ttgatttgcattttcccagtcattagtgatacaagcatcttttcatctgcttcttggccatttgtgtgtattctttggaga

SEQ ID NO: 1901 - DNA, 73 bp, Homo sapiens
atcttttcatctgcttcttggccatttgtgtgtattctttggagaattttctgttcaggtcctttgctctttt

SEQ ID NO: 1902 - DNA, 74 bp, Homo sapiens
atctgcttcttggccatttgtgtgtattctttggagaattttctgttcaggtcctttgctctttttgtgtgact

SEQ ID NO: 1903 - DNA, 71 bp, Homo sapiens
gccatttgtgtgtattctttggagaattttctgttcaggtcctttgctctttttgtgtgactttttgttgt

SEQ ID NO: 1904 - DNA, 71 bp, Homo sapiens
gtgtgtattctttggagaattttctgttcaggtcctttgctctttttgtgtgactttttgttgttgaaatg

SEQ ID NO: 1905 - DNA, 71 bp, Homo sapiens
ctttggagaattttctgttcaggtcctttgctctttttgtgtgactttttgttgttgaaatgtcagtattc

SEQ ID NO: 1906 - DNA, 72 bp, Homo sapiens
cctttgctctttttgtgtgactttttgttgttgaaatgtcagtattctttatctacttctagatcctagacc

SEQ ID NO: 1907 - DNA, 74 bp, Homo sapiens
gctctttttgtgtgactttttgttgttgaaatgtcagtattctttatctacttctagatcctagacccagtatc

SEQ ID NO: 1908 - DNA, 72 bp, Homo sapiens
ctttttgttgttgaaatgtcagtattctttatctacttctagatcctagacccagtatctaattttagattc

SEQ ID NO: 1909 - DNA, 74 bp, Homo sapiens
tgttgttgaaatgtcagtattctttatctacttctagatcctagacccagtatctaattttagattccagaccg

SEQ ID NO: 1910 - DNA, 74 bp, Homo sapiens
tgttgaaatgtcagtattctttatctacttctagatcctagacccagtatctaattttagattccagaccgttc

SEQ ID NO: 1911 - DNA, 74 bp, Homo sapiens
atgtcagtattctttatctacttctagatcctagacccagtatctaattttagattccagaccgttcttagata

SEQ ID NO: 1912 - DNA, 76 bp, Homo sapiens
tcagtattctttatctacttctagatcctagacccagtatctaattttagattccagaccgttcttagatacatga

SEQ ID NO: 1913 - DNA, 76 bp, Homo sapiens
tctttatctacttctagatcctagacccagtatctaattttagattccagaccgttcttagatacatgatttgtga

SEQ ID NO: 1914 - DNA, 74 bp, Homo sapiens
ctacttctagatcctagacccagtatctaattttagattccagaccgttcttagatacatgatttgtgaatatt

SEQ ID NO: 1915 - DNA, 74 bp, Homo sapiens
cttctagatcctagacccagtatctaattttagattccagaccgttcttagatacatgatttgtgaatatttta

SEQ ID NO: 1916 - DNA, 74 bp, Homo sapiens
ctagacccagtatctaattttagattccagaccgttcttagatacatgatttgtgaatattttatcccattctg

SEQ ID NO: 1917 - DNA, 74 bp, Homo sapiens
cccagtatctaattttagattccagaccgttcttagatacatgatttgtgaatattttatcccattctgtgtgt

SEQ ID NO: 1918 - DNA, 75 bp, Homo sapiens
ttttagattccagaccgttcttagatacatgatttgtgaatattttatcccattctgtgtgttgtcttttcgctc

SEQ ID NO: 1919 - DNA, 78 bp, Homo sapiens
agaccgttcttagatacatgatttgtgaatattttatcccattctgtgtgttgtcttttcgctctgttgagagtcatg

SEQ ID NO: 1920 - DNA, 79 bp, Homo sapiens
tcttagatacatgatttgtgaatattttatcccattctgtgtgttgtcttttcgctctgttgagagtcatgtcctttta

SEQ ID NO: 1921 - DNA, 79 bp, Homo sapiens
ttgtgaatattttatcccattctgtgtgttgtcttttcgctctgttgagagtcatgtccttttatgcacagagatttta

SEQ ID NO: 1922 - DNA, 76 bp, Homo sapiens
aatattttatcccattctgtgtgttgtcttttcgctctgttgagagtcatgtccttttatgcacagagattttaat

SEQ ID NO: 1923 - DNA, 75 bp, Homo sapiens
tcgctctgttgagagtcatgtccttttatgcacagagattttaattgtggtgaagtccaatttatctttttttag

SEQ ID NO: 1924 - DNA, 71 bp, Homo sapiens
gagagtcatgtccttttatgcacagagattttaattgtggtgaagtccaatttatctttttttagtttttg

SEQ ID NO: 1925 - DNA, 72 bp, Homo sapiens
tttttgttttttgtgcttttggtatcatatccaagaaatgattgtcaaatttagtgcagtgaagattttccc

SEQ ID NO: 1926 - DNA, 75 bp, Homo sapiens
ttgtgcttttggtatcatatccaagaaatgattgtcaaatttagtgcagtgaagattttcccctgtgttttcttc

SEQ ID NO: 1927 - DNA, 73 bp, Homo sapiens
ggtatcatatccaagaaatgattgtcaaatttagtgcagtgaagattttcccctgtgttttcttctaaatgtt

SEQ ID NO: 1928 - DNA, 73 bp, Homo sapiens
gaaatgattgtcaaatttagtgcagtgaagattttcccctgtgttttcttctaaatgtttctatagttgttgc

SEQ ID NO: 1929 - DNA, 72 bp, Homo sapiens
gattgtcaaatttagtgcagtgaagattttcccctgtgttttcttctaaatgtttctatagttgttgctctt

SEQ ID NO: 1930 - DNA, 70 bp, Homo sapiens
tttagtgcagtgaagattttcccctgtgttttcttctaaatgtttctatagttgttgctcttttatttat

SEQ ID NO: 1931 - DNA, 74 bp, Homo sapiens
ctgcacccggcccagtggtagctcttaagtttaggtgtttgatccattttgagccaatttttgtgtgcagtgta

SEQ ID NO: 1932 - DNA, 73 bp, Homo sapiens
cccagtggtagctcttaagtttaggtgtttgatccattttgagccaatttttgtgtgcagtgtaagataagtg

SEQ ID NO: 1933 - DNA, 75 bp, Homo sapiens
tagctcttaagtttaggtgtttgatccattttgagccaatttttgtgtgcagtgtaagataagtgtccacctaca

SEQ ID NO: 1934 - DNA, 73 bp, Homo sapiens
taagtttaggtgtttgatccattttgagccaatttttgtgtgcagtgtaagataagtgtccacctacattctt

SEQ ID NO: 1935 - DNA, 78 bp, Homo sapiens
gatccattttgagccaatttttgtgtgcagtgtaagataagtgtccacctacattcttttgcatgtagataatccagt

SEQ ID NO: 1936 - DNA, 75 bp, Homo sapiens
attttgagccaatttttgtgtgcagtgtaagataagtgtccacctacattcttttgcatgtagataatccagttt

SEQ ID NO: 1937 - DNA, 75 bp, Homo sapiens
ttatttgttgaaaagactctctttcccactgaatgatactggcacttttgttgaaaatcacttcaccatataagc

SEQ ID NO: 1938 - DNA, 74 bp, Homo sapiens
aagactctctttcccactgaatgatactggcacttttgttgaaaatcacttcaccatataagcgagagtttatt

SEQ ID NO: 1939 - DNA, 76 bp, Homo sapiens
tctctttcccactgaatgatactggcacttttgttgaaaatcacttcaccatataagcgagagtttatttctgaac

SEQ ID NO: 1940 - DNA, 76 bp, Homo sapiens
gaatgatactggcacttttgttgaaaatcacttcaccatataagcgagagtttatttctgaactctctattctctt

SEQ ID NO: 1941 - DNA, 76 bp, Homo sapiens
cacttttgttgaaaatcacttcaccatataagcgagagtttatttctgaactctctattctctttcagtgctctgt

SEQ ID NO: 1942 - DNA, 78 bp, Homo sapiens
tgttgaaaatcacttcaccatataagcgagagtttatttctgaactctctattctctttcagtgctctgtttttatgc

SEQ ID NO: 1943 - DNA, 70 bp, Homo sapiens
tttttatttctgccaaaaacattcttgggattttgatagagattttattgaatgtgtagattgctttttt

SEQ ID NO: 1944 - DNA, 70 bp, Homo sapiens
atttctgccaaaaacattcttgggattttgatagagattttattgaatgtgtagattgcttttttttatt

SEQ ID NO: 1945 - DNA, 72 bp, Homo sapiens
accacacctggcgtggagattgctttggagtagtaaaatcttagcaacattaaggtattacaatccaagaac

SEQ ID NO: 1946 - DNA, 72 bp, Homo sapiens
gtggagattgctttggagtagtaaaatcttagcaacattaaggtattacaatccaagaacgtgaaatgtctt

SEQ ID NO: 1947 - DNA, 72 bp, Homo sapiens
gattgctttggagtagtaaaatcttagcaacattaaggtattacaatccaagaacgtgaaatgtctttccat

SEQ ID NO: 1948 - DNA, 71 bp, Homo sapiens
tttccatttatttatattgtcttcagtttatttcagtaaagttttgtgatttttctgtgtacgaatcttgc

SEQ ID NO: 1949 - DNA, 71 bp, Homo sapiens
tttatattgtcttcagtttatttcagtaaagttttgtgatttttctgtgtacgaatcttgcgttttcttca

SEQ ID NO: 1950 - DNA, 72 bp, Homo sapiens
cttcagtttatttcagtaaagttttgtgatttttctgtgtacgaatcttgcgttttcttcattgctgactta

SEQ ID NO: 1951 - DNA, 73 bp, Homo sapiens
tttcagtaaagttttgtgatttttctgtgtacgaatcttgcgttttcttcattgctgacttacatatactttg

SEQ ID NO: 1952 - DNA, 71 bp, Homo sapiens
gtaaagttttgtgatttttctgtgtacgaatcttgcgttttcttcattgctgacttacatatactttgttt

SEQ ID NO: 1953 - DNA, 76 bp, Homo sapiens
aacctcaggttcctggtgcttcctattgcaccatcttcccagaatcctctcccttcctgctgtgcttttatagcca

SEQ ID NO: 1954 - DNA, 78 bp, Homo sapiens
ttcctggtgcttcctattgcaccatcttcccagaatcctctcccttcctgctgtgcttttatagccacacctgctttc

SEQ ID NO: 1955 - DNA, 77 bp, Homo sapiens
cttcctattgcaccatcttcccagaatcctctcccttcctgctgtgcttttatagccacacctgctttcctcctgcc

SEQ ID NO: 1956 - DNA, 76 bp, Homo sapiens
accatcttcccagaatcctctcccttcctgctgtgcttttatagccacacctgctttcctcctgccgccagactta

SEQ ID NO: 1957 - DNA, 76 bp, Homo sapiens
agaatcctctcccttcctgctgtgcttttatagccacacctgctttcctcctgccgccagacttagtcataaccac

SEQ ID NO: 1958 - DNA, 75 bp, Homo sapiens
tcccttcctgctgtgcttttatagccacacctgctttcctcctgccgccagacttagtcataaccactaaggtat

SEQ ID NO: 1959 - DNA, 75 bp, Homo sapiens
tgtgcttttatagccacacctgctttcctcctgccgccagacttagtcataaccactaaggtattcttcattttg

SEQ ID NO: 1960 - DNA, 73 bp, Homo sapiens
ttatagccacacctgctttcctcctgccgccagacttagtcataaccactaaggtattcttcattttggtaat

SEQ ID NO: 1961 - DNA, 70 bp, Homo sapiens
acctgctttcctcctgccgccagacttagtcataaccactaaggtattcttcattttggtaattttgtta

SEQ ID NO: 1962 - DNA, 71 bp, Homo sapiens
ctgccgccagacttagtcataaccactaaggtattcttcattttggtaattttgttacctcaaggatgtta

SEQ ID NO: 1963 - DNA, 71 bp, Homo sapiens
gccagacttagtcataaccactaaggtattcttcattttggtaattttgttacctcaaggatgttatataa

SEQ ID NO: 1964 - DNA, 72 bp, Homo sapiens
gtcataaccactaaggtattcttcattttggtaattttgttacctcaaggatgttatataaatgggatgata

SEQ ID NO: 1965 - DNA, 71 bp, Homo sapiens
ctaaggtattcttcattttggtaattttgttacctcaaggatgttatataaatgggatgatagaacttgta

SEQ ID NO: 1966 - DNA, 70 bp, Homo sapiens
ttttggtaattttgttacctcaaggatgttatataaatgggatgatagaacttgtaattttctggaggcc

SEQ ID NO: 1967 - DNA, 71 bp, Homo sapiens
taattttgttacctcaaggatgttatataaatgggatgatagaacttgtaattttctggaggcccggcgcg

SEQ ID NO: 1968 - DNA, 75 bp, Homo sapiens
tacctcaaggatgttatataaatgggatgatagaacttgtaattttctggaggcccggcgcgtggctcaggccta

SEQ ID NO: 1969 - DNA, 67 bp, Homo sapiens
ctctgtctaaaaacagaacaaaacaacatgtaactttctgggattgagttttttacacttggtttaa

SEQ ID NO: 1970 - DNA, 68 bp, Homo sapiens
cagaacaaaacaacatgtaactttctgggattgagttttttacacttggtttaattccttggagattc

SEQ ID NO: 1971 - DNA, 67 bp, Homo sapiens
aacaacatgtaactttctgggattgagttttttacacttggtttaattccttggagattcctccagg

SEQ ID NO: 1972 - DNA, 67 bp, Homo sapiens
aactttctgggattgagttttttacacttggtttaattccttggagattcctccaggttgttgctta

SEQ ID NO: 1973 - DNA, 68 bp, Homo sapiens
tgggattgagttttttacacttggtttaattccttggagattcctccaggttgttgcttagtatttgt

SEQ ID NO: 1974 - DNA, 69 bp, Homo sapiens
tttacacttggtttaattccttggagattcctccaggttgttgcttagtatttgttacagttaaactgc

SEQ ID NO: 1975 - DNA, 68 bp, Homo sapiens
ttaattccttggagattcctccaggttgttgcttagtatttgttacagttaaactgcgttttgtttaa

SEQ ID NO: 1976 - DNA, 67 bp, Homo sapiens
ccttggagattcctccaggttgttgcttagtatttgttacagttaaactgcgttttgtttaattact

SEQ ID NO: 1977 - DNA, 69 bp, Homo sapiens
tcctccaggttgttgcttagtatttgttacagttaaactgcgttttgtttaattacttatttgctgaaa

SEQ ID NO: 1978 - DNA, 70 bp, Homo sapiens
gtatttgttacagttaaactgcgttttgtttaattacttatttgctgaaagataatctcagttatttcca

SEQ ID NO: 1979 - DNA, 69 bp, Homo sapiens
cagttaaactgcgttttgtttaattacttatttgctgaaagataatctcagttatttccacttgtaggt

SEQ ID NO: 1980 - DNA, 70 bp, Homo sapiens
gcgttttgtttaattacttatttgctgaaagataatctcagttatttccacttgtaggttattaagaata

SEQ ID NO: 1981 - DNA, 70 bp, Homo sapiens
acttatttgctgaaagataatctcagttatttccacttgtaggttattaagaataaaactgttataaaca

SEQ ID NO: 1982 - DNA, 71 bp, Homo sapiens
gctgaaagataatctcagttatttccacttgtaggttattaagaataaaactgttataaacattacatggg

SEQ ID NO: 1983 - DNA, 73 bp, Homo sapiens
tctcagttatttccacttgtaggttattaagaataaaactgttataaacattacatgggttttcatgtgagca

SEQ ID NO: 1984 - DNA, 73 bp, Homo sapiens
ttccacttgtaggttattaagaataaaactgttataaacattacatgggttttcatgtgagcataagtcttca

SEQ ID NO: 1985 - DNA, 73 bp, Homo sapiens
gaataaaactgttataaacattacatgggttttcatgtgagcataagtcttcatttagtaattttgataggcg

SEQ ID NO: 1986 - DNA, 75 bp, Homo sapiens
gttataaacattacatgggttttcatgtgagcataagtcttcatttagtaattttgataggcgggtagtgatatc

SEQ ID NO: 1987 - DNA, 76 bp, Homo sapiens
aaacattacatgggttttcatgtgagcataagtcttcatttagtaattttgataggcgggtagtgatatctcactg

SEQ ID NO: 1988 - DNA, 77 bp, Homo sapiens
ggttttcatgtgagcataagtcttcatttagtaattttgataggcgggtagtgatatctcactgtgtgtattattat

SEQ ID NO: 1989 - DNA, 76 bp, Homo sapiens
cttgctctgttacctagggtttgaagggcagtgtcatgatcatggcttattgccgccttaaccctccgcgtagctg

SEQ ID NO: 1990 - DNA, 74 bp, Homo sapiens
ctgttacctagggtttgaagggcagtgtcatgatcatggcttattgccgccttaaccctccgcgtagctgggac

SEQ ID NO: 1991 - DNA, 75 bp, Homo sapiens
tgggattacaggccactacacacgcgtcattgtgtttttaatacgtatttacttagtggctaatgatgttgacca

SEQ ID NO: 1992 - DNA, 74 bp, Homo sapiens
ttacaggccactacacacgcgtcattgtgtttttaatacgtatttacttagtggctaatgatgttgaccatctt

SEQ ID NO: 1993 - DNA, 73 bp, Homo sapiens
acacgcgtcattgtgtttttaatacgtatttacttagtggctaatgatgttgaccatcttttcaggtgcttat

SEQ ID NO: 1994 - DNA, 73 bp, Homo sapiens
cattgtgtttttaatacgtatttacttagtggctaatgatgttgaccatcttttcaggtgcttatttggtatc

SEQ ID NO: 1995 - DNA, 70 bp, Homo sapiens
ttttaatacgtatttacttagtggctaatgatgttgaccatcttttcaggtgcttatttggtatcttttt

SEQ ID NO: 1996 - DNA, 73 bp, Homo sapiens
tttttttcttttaatatggaacactttaagaatttgcgtgtcattactgttcagggagcatgctaatcttctc

SEQ ID NO: 1997 - DNA, 78 bp, Homo sapiens
ttaatatggaacactttaagaatttgcgtgtcattactgttcagggagcatgctaatcttctctgtattgattcaatt

SEQ ID NO: 1998 - DNA, 77 bp, Homo sapiens
aacactttaagaatttgcgtgtcattactgttcagggagcatgctaatcttctctgtattgattcaattttggtata

SEQ ID NO: 1999 - DNA, 81 bp, Homo sapiens
atcttctctgtattgattcaattttggtatatgtgctgttgagacaagcactagtacctttatatgtcctctgttcatcag

SEQ ID NO: 2000 - DNA, 80 bp, Homo sapiens
tattgattcaattttggtatatgtgctgttgagacaagcactagtacctttatatgtcctctgttcatcagttttggcta

SEQ ID NO: 2001 - DNA, 77 bp, Homo sapiens
attcaattttggtatatgtgctgttgagacaagcactagtacctttatatgtcctctgttcatcagttttggctatt

SEQ ID NO: 2002 - DNA, 76 bp, Homo sapiens
ggtatatgtgctgttgagacaagcactagtacctttatatgtcctctgttcatcagttttggctattttctttttc

SEQ ID NO: 2003 - DNA, 70 bp, Homo sapiens
aaaaaaaaaggtattccactcttggtgagtggaatgttctgttgttctgtaaaatgttcatggatccagt

SEQ ID NO: 2004 - DNA, 74 bp, Homo sapiens
aaaaggtattccactcttggtgagtggaatgttctgttgttctgtaaaatgttcatggatccagttagttcata

SEQ ID NO: 2005 - DNA, 76 bp, Homo sapiens
tcttggtgagtggaatgttctgttgttctgtaaaatgttcatggatccagttagttcatagcgttgaattaaatat

SEQ ID NO: 2006 - DNA, 78 bp, Homo sapiens
gtggaatgttctgttgttctgtaaaatgttcatggatccagttagttcatagcgttgaattaaatattcttgctatga

SEQ ID NO: 2007 - DNA, 78 bp, Homo sapiens
gttctgttgttctgtaaaatgttcatggatccagttagttcatagcgttgaattaaatattcttgctatgaatatatg

SEQ ID NO: 2008 - DNA, 77 bp, Homo sapiens
ctgtaaaatgttcatggatccagttagttcatagcgttgaattaaatattcttgctatgaatatatgtatagtttta

SEQ ID NO: 2009 - DNA, 76 bp, Homo sapiens
gttcatggatccagttagttcatagcgttgaattaaatattcttgctatgaatatatgtatagttttaacagttat

SEQ ID NO: 2010 - DNA, 75 bp, Homo sapiens
ccagttagttcatagcgttgaattaaatattcttgctatgaatatatgtatagttttaacagttattacagagaa

SEQ ID NO: 2011 - DNA, 76 bp, Homo sapiens
catagcgttgaattaaatattcttgctatgaatatatgtatagttttaacagttattacagagaaatattgaagtc

SEQ ID NO: 2012 - DNA, 76 bp, Homo sapiens
aatattcttgctatgaatatatgtatagttttaacagttattacagagaaatattgaagtctctatagtggatttg

SEQ ID NO: 2013 - DNA, 79 bp, Homo sapiens
tcttgctatgaatatatgtatagttttaacagttattacagagaaatattgaagtctctatagtggatttgtgcatttc

SEQ ID NO: 2014 - DNA, 80 bp, Homo sapiens
tgctatgaatatatgtatagttttaacagttattacagagaaatattgaagtctctatagtggatttgtgcatttctcca

SEQ ID NO: 2015 - DNA, 77 bp, Homo sapiens
gaatatatgtatagttttaacagttattacagagaaatattgaagtctctatagtggatttgtgcatttctccactc

SEQ ID NO: 2016 - DNA, 76 bp, Homo sapiens
atgtatagttttaacagttattacagagaaatattgaagtctctatagtggatttgtgcatttctccactctgttc

SEQ ID NO: 2017 - DNA, 78 bp, Homo sapiens
tagttttaacagttattacagagaaatattgaagtctctatagtggatttgtgcatttctccactctgttccatcagc

SEQ ID NO: 2018 - DNA, 77 bp, Homo sapiens
tttaacagttattacagagaaatattgaagtctctatagtggatttgtgcatttctccactctgttccatcagcttt

SEQ ID NO: 2019 - DNA, 76 bp, Homo sapiens
agttattacagagaaatattgaagtctctatagtggatttgtgcatttctccactctgttccatcagcttttcttt

SEQ ID NO: 2020 - DNA, 76 bp, Homo sapiens
attgaagtctctatagtggatttgtgcatttctccactctgttccatcagcttttcttttacatattttgtagtct

SEQ ID NO: 2021 - DNA, 74 bp, Homo sapiens
ctctatagtggatttgtgcatttctccactctgttccatcagcttttcttttacatattttgtagtcttgtttt

SEQ ID NO: 2022 - DNA, 76 bp, Homo sapiens
gatttgtgcatttctccactctgttccatcagcttttcttttacatattttgtagtcttgttttttggtgcataca

SEQ ID NO: 2023 - DNA, 73 bp, Homo sapiens
ccactctgttccatcagcttttcttttacatattttgtagtcttgttttttggtgcatacacatttaggaatg

SEQ ID NO: 2024 - DNA, 73 bp, Homo sapiens
ccatcagcttttcttttacatattttgtagtcttgttttttggtgcatacacatttaggaatgttatgtcctc

SEQ ID NO: 2025 - DNA, 71 bp, Homo sapiens
gcttttcttttacatattttgtagtcttgttttttggtgcatacacatttaggaatgttatgtcctcttgg

SEQ ID NO: 2026 - DNA, 74 bp, Homo sapiens
ttacatattttgtagtcttgttttttggtgcatacacatttaggaatgttatgtcctcttggtggattgacctc

SEQ ID NO: 2027 - DNA, 75 bp, Homo sapiens
tcttgttttttggtgcatacacatttaggaatgttatgtcctcttggtggattgacctctctctccataaataat

SEQ ID NO: 2028 - DNA, 74 bp, Homo sapiens
tttttggtgcatacacatttaggaatgttatgtcctcttggtggattgacctctctctccataaataatttcct

SEQ ID NO: 2029 - DNA, 71 bp, Homo sapiens
aatgttatgtcctcttggtggattgacctctctctccataaataatttccttcttagtctctagtactttt

SEQ ID NO: 2030 - DNA, 72 bp, Homo sapiens
ctcttggtggattgacctctctctccataaataatttccttcttagtctctagtactttttctttgctcaaa

SEQ ID NO: 2031 - DNA, 71 bp, Homo sapiens
ggtggattgacctctctctccataaataatttccttcttagtctctagtactttttctttgctcaaaagta

SEQ ID NO: 2032 - DNA, 72 bp, Homo sapiens
ctctctccataaataatttccttcttagtctctagtactttttctttgctcaaaagtatagtgtttctgatg

SEQ ID NO: 2033 - DNA, 72 bp, Homo sapiens
ataatttccttcttagtctctagtactttttctttgctcaaaagtatagtgtttctgatgttaatatagtca

SEQ ID NO: 2034 - DNA, 73 bp, Homo sapiens
ccttcttagtctctagtactttttctttgctcaaaagtatagtgtttctgatgttaatatagtcactccagct

SEQ ID NO: 2035 - DNA, 73 bp, Homo sapiens
gtctctagtactttttctttgctcaaaagtatagtgtttctgatgttaatatagtcactccagcttttcttta

SEQ ID NO: 2036 - DNA, 76 bp, Homo sapiens
tttctttgctcaaaagtatagtgtttctgatgttaatatagtcactccagcttttctttaattaatgtttgcatca

SEQ ID NO: 2037 - DNA, 76 bp, Homo sapiens
gctcaaaagtatagtgtttctgatgttaatatagtcactccagcttttctttaattaatgtttgcatcatatacct

SEQ ID NO: 2038 - DNA, 72 bp, Homo sapiens
agtgtttctgatgttaatatagtcactccagcttttctttaattaatgtttgcatcatatacctttttaatt

SEQ ID NO: 2039 - DNA, 65 bp, Homo sapiens
aatttttttttgctttcaacgtgcttatttgaagtaaatttcttgtacacaaaatagtgttaggt

SEQ ID NO: 2040 - DNA, 69 bp, Homo sapiens
ttgctttcaacgtgcttatttgaagtaaatttcttgtacacaaaatagtgttaggttatgttttctttg

SEQ ID NO: 2041 - DNA, 67 bp, Homo sapiens
tcaacgtgcttatttgaagtaaatttcttgtacacaaaatagtgttaggttatgttttctttgtttt

SEQ ID NO: 2042 - DNA, 71 bp, Homo sapiens
gagccactgtacctagccagtttttgtcttttatttgctgtatttaggtatttgggtcatttacatagtta

SEQ ID NO: 2043 - DNA, 71 bp, Homo sapiens
ctgtacctagccagtttttgtcttttatttgctgtatttaggtatttgggtcatttacatagttatagatg

SEQ ID NO: 2044 - DNA, 71 bp, Homo sapiens
gtttttgtcttttatttgctgtatttaggtatttgggtcatttacatagttatagatgttgtcagactccc

SEQ ID NO: 2045 - DNA, 71 bp, Homo sapiens
tcttttatttgctgtatttaggtatttgggtcatttacatagttatagatgttgtcagactcccccccacc

SEQ ID NO: 2046 - DNA, 67 bp, Homo sapiens
tgtatttaggtatttgggtcatttacatagttatagatgttgtcagactcccccccacccccttttt

SEQ ID NO: 2047 - DNA, 64 bp, Homo sapiens
aggtatttgggtcatttacatagttatagatgttgtcagactcccccccacccccttttttttt

SEQ ID NO: 2048 - DNA, 64 bp, Homo sapiens
ttgtttttttgactgtttttcttgctttcttttgggttacttgaacatttttggaattccattt

SEQ ID NO: 2049 - DNA, 65 bp, Homo sapiens
tttgactgtttttcttgctttcttttgggttacttgaacatttttggaattccatttttcttatt

SEQ ID NO: 2050 - DNA, 66 bp, Homo sapiens
cttatttttttcttctaccccaattcactgtgccaaaccatttttctttattgtgttttgtatctt

SEQ ID NO: 2051 - DNA, 65 bp, Homo sapiens
tttttcttctaccccaattcactgtgccaaaccatttttctttattgtgttttgtatcttttttt

SEQ ID NO: 2052 - DNA, 70 bp, Homo sapiens
cgcgagccaccgagcccggccttggtatctttttggtatcacaaataacttttgattgaaacctgggcat

SEQ ID NO: 2053 - DNA, 68 bp, Homo sapiens
cgagcccggccttggtatctttttggtatcacaaataacttttgattgaaacctgggcatttttgtat

SEQ ID NO: 2054 - DNA, 75 bp, Homo sapiens
cttggtatctttttggtatcacaaataacttttgattgaaacctgggcatttttgtattgtcatgagactatgca

SEQ ID NO: 2055 - DNA, 73 bp, Homo sapiens
ctttttggtatcacaaataacttttgattgaaacctgggcatttttgtattgtcatgagactatgcacttact

SEQ ID NO: 2056 - DNA, 74 bp, Homo sapiens
ggtatcacaaataacttttgattgaaacctgggcatttttgtattgtcatgagactatgcacttacttaaacaa

SEQ ID NO: 2057 - DNA, 73 bp, Homo sapiens
cacaaataacttttgattgaaacctgggcatttttgtattgtcatgagactatgcacttacttaaacaactgt

SEQ ID NO: 2058 - DNA, 72 bp, Homo sapiens
caaataacttttgattgaaacctgggcatttttgtattgtcatgagactatgcacttacttaaacaactgtt

SEQ ID NO: 2059 - DNA, 73 bp, Homo sapiens
ttgaaacctgggcatttttgtattgtcatgagactatgcacttacttaaacaactgttttaactagtgttctc

SEQ ID NO: 2060 - DNA, 73 bp, Homo sapiens
ctgggcatttttgtattgtcatgagactatgcacttacttaaacaactgttttaactagtgttctcttacact

SEQ ID NO: 2061 - DNA, 74 bp, Homo sapiens
ggcatttttgtattgtcatgagactatgcacttacttaaacaactgttttaactagtgttctcttacacttatc

SEQ ID NO: 2062 - DNA, 72 bp, Homo sapiens
attgtcatgagactatgcacttacttaaacaactgttttaactagtgttctcttacacttatctaacaaggg

SEQ ID NO: 2063 - DNA, 69 bp, Homo sapiens
acaactgttttaactagtgttctcttacacttatctaacaaggggagagtgttggtgccactttgttaa

SEQ ID NO: 2064 - DNA, 71 bp, Homo sapiens
tgttctcttacacttatctaacaaggggagagtgttggtgccactttgttaagccaggtaggggatgaagt

SEQ ID NO: 2065 - DNA, 71 bp, Homo sapiens
cttatctaacaaggggagagtgttggtgccactttgttaagccaggtaggggatgaagttcaggttatcta

SEQ ID NO: 2066 - DNA, 69 bp, Homo sapiens
aacaaggggagagtgttggtgccactttgttaagccaggtaggggatgaagttcaggttatctaccttg

SEQ ID NO: 2067 - DNA, 72 bp, Homo sapiens
agtgttggtgccactttgttaagccaggtaggggatgaagttcaggttatctaccttgtctgtgttgacatt

SEQ ID NO: 2068 - DNA, 71 bp, Homo sapiens
actttgttaagccaggtaggggatgaagttcaggttatctaccttgtctgtgttgacatttgaggcaaact

SEQ ID NO: 2069 - DNA, 72 bp, Homo sapiens
taagccaggtaggggatgaagttcaggttatctaccttgtctgtgttgacatttgaggcaaacttcctttta

SEQ ID NO: 2070 - DNA, 73 bp, Homo sapiens
atgaagttcaggttatctaccttgtctgtgttgacatttgaggcaaacttccttttagttgtttgcagaattg

SEQ ID NO: 2071 - DNA, 72 bp, Homo sapiens
ttcaggttatctaccttgtctgtgttgacatttgaggcaaacttccttttagttgtttgcagaattgggagt

SEQ ID NO: 2072 - DNA, 75 bp, Homo sapiens
tctaccttgtctgtgttgacatttgaggcaaacttccttttagttgtttgcagaattgggagttgtggctctcta

SEQ ID NO: 2073 - DNA, 76 bp, Homo sapiens
ttgacatttgaggcaaacttccttttagttgtttgcagaattgggagttgtggctctctacctgatctctgtggtg

SEQ ID NO: 2074 - DNA, 75 bp, Homo sapiens
atttgaggcaaacttccttttagttgtttgcagaattgggagttgtggctctctacctgatctctgtggtggatg

SEQ ID NO: 2075 - DNA, 76 bp, Homo sapiens
tccttttagttgtttgcagaattgggagttgtggctctctacctgatctctgtggtggatgtggccttgtttgtta

SEQ ID NO: 2076 - DNA, 79 bp, Homo sapiens
tagttgtttgcagaattgggagttgtggctctctacctgatctctgtggtggatgtggccttgtttgttactgtgtgta

SEQ ID NO: 2077 - DNA, 75 bp, Homo sapiens
aattgggagttgtggctctctacctgatctctgtggtggatgtggccttgtttgttactgtgtgtaggtgaaagt

SEQ ID NO: 2078 - DNA, 80 bp, Homo sapiens
tgtggctctctacctgatctctgtggtggatgtggccttgtttgttactgtgtgtaggtgaaagttctcactctctacta

SEQ ID NO: 2079 - DNA, 77 bp, Homo sapiens
tacctgatctctgtggtggatgtggccttgtttgttactgtgtgtaggtgaaagttctcactctctactaggtcttc

SEQ ID NO: 2080 - DNA, 78 bp, Homo sapiens
tctctgtggtggatgtggccttgtttgttactgtgtgtaggtgaaagttctcactctctactaggtcttctctgctac

SEQ ID NO: 2081 - DNA, 76 bp, Homo sapiens
atgtggccttgtttgttactgtgtgtaggtgaaagttctcactctctactaggtcttctctgctaccactccagta

SEQ ID NO: 2082 - DNA, 75 bp, Homo sapiens
ttgtttgttactgtgtgtaggtgaaagttctcactctctactaggtcttctctgctaccactccagtagggacag

SEQ ID NO: 2083 - DNA, 75 bp, Homo sapiens
aaagttctcactctctactaggtcttctctgctaccactccagtagggacagggagggatgccttattactggca

SEQ ID NO: 2084 - DNA, 76 bp, Homo sapiens
actctctactaggtcttctctgctaccactccagtagggacagggagggatgccttattactggcagatggtggtg

SEQ ID NO: 2085 - DNA, 77 bp, Homo sapiens
tcttctctgctaccactccagtagggacagggagggatgccttattactggcagatggtggtggaagtccagtcttc

SEQ ID NO: 2086 - DNA, 72 bp, Homo sapiens
agtagggacagggagggatgccttattactggcagatggtggtggaagtccagtcttccctacttttctcca

SEQ ID NO: 2087 - DNA, 74 bp, Homo sapiens
agggagggatgccttattactggcagatggtggtggaagtccagtcttccctacttttctccactgacacagta

SEQ ID NO: 2088 - DNA, 77 bp, Homo sapiens
tactggcagatggtggtggaagtccagtcttccctacttttctccactgacacagtagggagtggatgctcattaac

SEQ ID NO: 2089 - DNA, 74 bp, Homo sapiens
agtcttccctacttttctccactgacacagtagggagtggatgctcattaactagccaattggaatgaaggttc

SEQ ID NO: 2090 - DNA, 74 bp, Homo sapiens
cctacttttctccactgacacagtagggagtggatgctcattaactagccaattggaatgaaggttccaatccc

SEQ ID NO: 2091 - DNA, 74 bp, Homo sapiens
actgacacagtagggagtggatgctcattaactagccaattggaatgaaggttccaatcccctgcttaattttc

SEQ ID NO: 2092 - DNA, 75 bp, Homo sapiens
acagtagggagtggatgctcattaactagccaattggaatgaaggttccaatcccctgcttaattttctctgaca

SEQ ID NO: 2093 - DNA, 74 bp, Homo sapiens
atgctcattaactagccaattggaatgaaggttccaatcccctgcttaattttctctgacactacctggtggga

SEQ ID NO: 2094 - DNA, 71 bp, Homo sapiens
attaactagccaattggaatgaaggttccaatcccctgcttaattttctctgacactacctggtgggaatc

SEQ ID NO: 2095 - DNA, 70 bp, Homo sapiens
aattggaatgaaggttccaatcccctgcttaattttctctgacactacctggtgggaatcttggattgtt

SEQ ID NO: 2096 - DNA, 76 bp, Homo sapiens
cctgcttaattttctctgacactacctggtgggaatcttggattgttttcattacagtctcatgagggtggatatc

SEQ ID NO: 2097 - DNA, 80 bp, Homo sapiens
tggtgggaatcttggattgttttcattacagtctcatgagggtggatatctaggttccccatgtgatcattgctggtatg

SEQ ID NO: 2098 - DNA, 79 bp, Homo sapiens
ttggattgttttcattacagtctcatgagggtggatatctaggttccccatgtgatcattgctggtatgggtggggcta

SEQ ID NO: 2099 - DNA, 77 bp, Homo sapiens
attacagtctcatgagggtggatatctaggttccccatgtgatcattgctggtatgggtggggctaggttttctatg

SEQ ID NO: 2100 - DNA, 78 bp, Homo sapiens
gtggatatctaggttccccatgtgatcattgctggtatgggtggggctaggttttctatggtgttatgctggattata

SEQ ID NO: 2101 - DNA, 77 bp, Homo sapiens
atgtgatcattgctggtatgggtggggctaggttttctatggtgttatgctggattatagcagttactcttcaagtt

SEQ ID NO: 2102 - DNA, 72 bp, Homo sapiens
gggctaggttttctatggtgttatgctggattatagcagttactcttcaagttttctttctggttaacatac

SEQ ID NO: 2103 - DNA, 71 bp, Homo sapiens
aggttttctatggtgttatgctggattatagcagttactcttcaagttttctttctggttaacataccact

SEQ ID NO: 2104 - DNA, 73 bp, Homo sapiens
ttatgctggattatagcagttactcttcaagttttctttctggttaacataccactttactggtaatctggtc

SEQ ID NO: 2105 - DNA, 72 bp, Homo sapiens
attatagcagttactcttcaagttttctttctggttaacataccactttactggtaatctggtctggagaga

SEQ ID NO: 2106 - DNA, 70 bp, Homo sapiens
ttactcttcaagttttctttctggttaacataccactttactggtaatctggtctggagagagaaggctt

SEQ ID NO: 2107 - DNA, 68 bp, Homo sapiens
aagttttctttctggttaacataccactttactggtaatctggtctggagagagaaggcttttgttgg

SEQ ID NO: 2108 - DNA, 69 bp, Homo sapiens
tggttaacataccactttactggtaatctggtctggagagagaaggcttttgttggggcttcttctttt

SEQ ID NO: 2109 - DNA, 67 bp, Homo sapiens
aacataccactttactggtaatctggtctggagagagaaggcttttgttggggcttcttcttttttt

SEQ ID NO: 2110 - DNA, 70 bp, Homo sapiens
cgcacccggccttgttgggggttcttttatttggtcagtgcccatcggtgttcctgatgtactcacttct

SEQ ID NO: 2111 - DNA, 70 bp, Homo sapiens
ccggccttgttgggggttcttttatttggtcagtgcccatcggtgttcctgatgtactcacttcttccat

SEQ ID NO: 2112 - DNA, 75 bp, Homo sapiens
gttcttttatttggtcagtgcccatcggtgttcctgatgtactcacttcttccattccaggagtaggatacatta

SEQ ID NO: 2113 - DNA, 76 bp, Homo sapiens
tttatttggtcagtgcccatcggtgttcctgatgtactcacttcttccattccaggagtaggatacattaggcaaa

SEQ ID NO: 2114 - DNA, 75 bp, Homo sapiens
agtgcccatcggtgttcctgatgtactcacttcttccattccaggagtaggatacattaggcaaaaagaagagaa

SEQ ID NO: 2115 - DNA, 73 bp, Homo sapiens
ttcctgatgtactcacttcttccattccaggagtaggatacattaggcaaaaagaagagaatacccagggaat

SEQ ID NO: 2116 - DNA, 71 bp, Homo sapiens
atgtactcacttcttccattccaggagtaggatacattaggcaaaaagaagagaatacccagggaatttac

SEQ ID NO: 2117 - DNA, 72 bp, Homo sapiens
cttcttccattccaggagtaggatacattaggcaaaaagaagagaatacccagggaatttactgctatattg

SEQ ID NO: 2118 - DNA, 73 bp, Homo sapiens
aggagtaggatacattaggcaaaaagaagagaatacccagggaatttactgctatattgtgccttgtgtcctg

SEQ ID NO: 2119 - DNA, 77 bp, Homo sapiens
tacattaggcaaaaagaagagaatacccagggaatttactgctatattgtgccttgtgtcctgtgatcctgagctaa

SEQ ID NO: 2120 - DNA, 75 bp, Homo sapiens
aaaagaagagaatacccagggaatttactgctatattgtgccttgtgtcctgtgatcctgagctaatttgccttc

SEQ ID NO: 2121 - DNA, 75 bp, Homo sapiens
aatacccagggaatttactgctatattgtgccttgtgtcctgtgatcctgagctaatttgccttctctccacctt

SEQ ID NO: 2122 - DNA, 77 bp, Homo sapiens
aatttactgctatattgtgccttgtgtcctgtgatcctgagctaatttgccttctctccacctttcagagaaaattc

SEQ ID NO: 2123 - DNA, 73 bp, Homo sapiens
ccttgtgtcctgtgatcctgagctaatttgccttctctccacctttcagagaaaattcgttttatttataata

SEQ ID NO: 2124 - DNA, 74 bp, Homo sapiens
gtcctgtgatcctgagctaatttgccttctctccacctttcagagaaaattcgttttatttataatattcacat

SEQ ID NO: 2125 - DNA, 70 bp, Homo sapiens
cctgagctaatttgccttctctccacctttcagagaaaattcgttttatttataatattcacattttaaa

SEQ ID NO: 2126 - DNA, 69 bp, Homo sapiens
tgccttctctccacctttcagagaaaattcgttttatttataatattcacattttaaatttgtacttag

SEQ ID NO: 2127 - DNA, 67 bp, Homo sapiens
ccacctttcagagaaaattcgttttatttataatattcacattttaaatttgtacttagtgggagga

SEQ ID NO: 2128 - DNA, 67 bp, Homo sapiens
cagagaaaattcgttttatttataatattcacattttaaatttgtacttagtgggaggaatagggaa

SEQ ID NO: 2129 - DNA, 70 bp, Homo sapiens
ttatttataatattcacattttaaatttgtacttagtgggaggaatagggaaaagtatgtccattccatc

SEQ ID NO: 2130 - DNA, 70 bp, Homo sapiens
tattcacattttaaatttgtacttagtgggaggaatagggaaaagtatgtccattccatcctcctagaag

SEQ ID NO: 2131 - DNA, 68 bp, Homo sapiens
ttttaaatttgtacttagtgggaggaatagggaaaagtatgtccattccatcctcctagaagtgtaag

SEQ ID NO: 2132 - DNA, 70 bp, Homo sapiens
tacttagtgggaggaatagggaaaagtatgtccattccatcctcctagaagtgtaagtgtaacctttgat

SEQ ID NO: 2133 - DNA, 73 bp, Homo sapiens
aggaatagggaaaagtatgtccattccatcctcctagaagtgtaagtgtaacctttgatttcattgagtgtgc

SEQ ID NO: 2134 - DNA, 71 bp, Homo sapiens
aaaagtatgtccattccatcctcctagaagtgtaagtgtaacctttgatttcattgagtgtgccctatttt

SEQ ID NO: 2135 - DNA, 75 bp, Homo sapiens
tatgtccattccatcctcctagaagtgtaagtgtaacctttgatttcattgagtgtgccctatttttctgttatc

SEQ ID NO: 2136 - DNA, 73 bp, Homo sapiens
ccatcctcctagaagtgtaagtgtaacctttgatttcattgagtgtgccctatttttctgttatctatttcat

SEQ ID NO: 2137 - DNA, 75 bp, Homo sapiens
agaagtgtaagtgtaacctttgatttcattgagtgtgccctatttttctgttatctatttcattgacttctgctc

SEQ ID NO: 2138 - DNA, 73 bp, Homo sapiens
ctgctctgatctttcttttgctcttctagtttcttaaggaacaaggtgaaatcactgatttgtttcttttcta

SEQ ID NO: 2139 - DNA, 71 bp, Homo sapiens
tttcttttgctcttctagtttcttaaggaacaaggtgaaatcactgatttgtttcttttctaatatagtca

SEQ ID NO: 2140 - DNA, 70 bp, Homo sapiens
gtttcttaaggaacaaggtgaaatcactgatttgtttcttttctaatatagtcatgtaattgtataaatt

SEQ ID NO: 2141 - DNA, 74 bp, Homo sapiens
caaggtgaaatcactgatttgtttcttttctaatatagtcatgtaattgtataaatttctatttcaattactgc

SEQ ID NO: 2142 - DNA, 74 bp, Homo sapiens
tcactgatttgtttcttttctaatatagtcatgtaattgtataaatttctatttcaattactgctttaactgtc

SEQ ID NO: 2143 - DNA, 70 bp, Homo sapiens
gtttcttttctaatatagtcatgtaattgtataaatttctatttcaattactgctttaactgtcttaaaa

SEQ ID NO: 2144 - DNA, 72 bp, Homo sapiens
tttctaatatagtcatgtaattgtataaatttctatttcaattactgctttaactgtcttaaaaatacttga

SEQ ID NO: 2145 - DNA, 71 bp, Homo sapiens
tagtcatgtaattgtataaatttctatttcaattactgctttaactgtcttaaaaatacttgatatttttg

SEQ ID NO: 2146 - DNA, 71 bp, Homo sapiens
gtcatgtaattgtataaatttctatttcaattactgctttaactgtcttaaaaatacttgatatttttgtc

SEQ ID NO: 2147 - DNA, 69 bp, Homo sapiens
atgtaattgtataaatttctatttcaattactgctttaactgtcttaaaaatacttgatatttttgtct

SEQ ID NO: 2148 - DNA, 67 bp, Homo sapiens
attgtataaatttctatttcaattactgctttaactgtcttaaaaatacttgatatttttgtctttt

SEQ ID NO: 2149 - DNA, 70 bp, Homo sapiens
actgctcctggcccccactggttattttagaagtatgttttgattccaaatattgggattgtctttgatt

SEQ ID NO: 2150 - DNA, 68 bp, Homo sapiens
ctcctggcccccactggttattttagaagtatgttttgattccaaatattgggattgtctttgatttt

SEQ ID NO: 2151 - DNA, 67 bp, Homo sapiens
cctggcccccactggttattttagaagtatgttttgattccaaatattgggattgtctttgattttt

SEQ ID NO: 2152 - DNA, 68 bp, Homo sapiens
cccactggttattttagaagtatgttttgattccaaatattgggattgtctttgatttttttttgtca

SEQ ID NO: 2153 - DNA, 70 bp, Homo sapiens
cactggttattttagaagtatgttttgattccaaatattgggattgtctttgatttttttttgtcactga

SEQ ID NO: 2154 - DNA, 70 bp, Homo sapiens
ttttagaagtatgttttgattccaaatattgggattgtctttgatttttttttgtcactgatttctagat

SEQ ID NO: 2155 - DNA, 73 bp, Homo sapiens
gaagtatgttttgattccaaatattgggattgtctttgatttttttttgtcactgatttctagattaatatca

SEQ ID NO: 2156 - DNA, 73 bp, Homo sapiens
tgttttgattccaaatattgggattgtctttgatttttttttgtcactgatttctagattaatatcacagttg

SEQ ID NO: 2157 - DNA, 74 bp, Homo sapiens
tgattccaaatattgggattgtctttgatttttttttgtcactgatttctagattaatatcacagttgtaagaa

SEQ ID NO: 2158 - DNA, 71 bp, Homo sapiens
ccaaatattgggattgtctttgatttttttttgtcactgatttctagattaatatcacagttgtaagaaaa

SEQ ID NO: 2159 - DNA, 72 bp, Homo sapiens
tgggattgtctttgatttttttttgtcactgatttctagattaatatcacagttgtaagaaaaaattcatgg

SEQ ID NO: 2160 - DNA, 72 bp, Homo sapiens
tgatttttttttgtcactgatttctagattaatatcacagttgtaagaaaaaattcatggtaacacctgaaa

SEQ ID NO: 2161 - DNA, 71 bp, Homo sapiens
ttgtcactgatttctagattaatatcacagttgtaagaaaaaattcatggtaacacctgaaaccttttaaa

SEQ ID NO: 2162 - DNA, 67 bp, Homo sapiens
ttaatatcacagttgtaagaaaaaattcatggtaacacctgaaaccttttaaatttaccaagagttg

SEQ ID NO: 2163 - DNA, 64 bp, Homo sapiens
cacagttgtaagaaaaaattcatggtaacacctgaaaccttttaaatttaccaagagttgtttt

SEQ ID NO: 2164 - DNA, 65 bp, Homo sapiens
aaattcatggtaacacctgaaaccttttaaatttaccaagagttgtttttttggcctgaatatgg

SEQ ID NO: 2165 - DNA, 67 bp, Homo sapiens
catggtaacacctgaaaccttttaaatttaccaagagttgtttttttggcctgaatatggtatatct

SEQ ID NO: 2166 - DNA, 67 bp, Homo sapiens
cctgaaaccttttaaatttaccaagagttgtttttttggcctgaatatggtatatcttggtgaatgt

SEQ ID NO: 2167 - DNA, 73 bp, Homo sapiens
atttaccaagagttgtttttttggcctgaatatggtatatcttggtgaatgttccaaatgcacttgaacagaa

SEQ ID NO: 2168 - DNA, 75 bp, Homo sapiens
aagagttgtttttttggcctgaatatggtatatcttggtgaatgttccaaatgcacttgaacagaatgcgtattc

SEQ ID NO: 2169 - DNA, 78 bp, Homo sapiens
ttttggcctgaatatggtatatcttggtgaatgttccaaatgcacttgaacagaatgcgtattctggtagtttgtgta

SEQ ID NO: 2170 - DNA, 79 bp, Homo sapiens
atatggtatatcttggtgaatgttccaaatgcacttgaacagaatgcgtattctggtagtttgtgtagagtgttgtata

SEQ ID NO: 2171 - DNA, 76 bp, Homo sapiens
cttggtgaatgttccaaatgcacttgaacagaatgcgtattctggtagtttgtgtagagtgttgtatagttagtta

SEQ ID NO: 2172 - DNA, 75 bp, Homo sapiens
atgttccaaatgcacttgaacagaatgcgtattctggtagtttgtgtagagtgttgtatagttagttaggtcagt

SEQ ID NO: 2173 - DNA, 74 bp, Homo sapiens
aatgcacttgaacagaatgcgtattctggtagtttgtgtagagtgttgtatagttagttaggtcagtttggtta

SEQ ID NO: 2174 - DNA, 71 bp, Homo sapiens
agaatgcgtattctggtagtttgtgtagagtgttgtatagttagttaggtcagtttggttaatggtgttat

SEQ ID NO: 2175 - DNA, 71 bp, Homo sapiens
attctggtagtttgtgtagagtgttgtatagttagttaggtcagtttggttaatggtgttattcaagcttc

SEQ ID NO: 2176 - DNA, 71 bp, Homo sapiens
agtttgtgtagagtgttgtatagttagttaggtcagtttggttaatggtgttattcaagcttctgtatcct

SEQ ID NO: 2177 - DNA, 71 bp, Homo sapiens
agagtgttgtatagttagttaggtcagtttggttaatggtgttattcaagcttctgtatccttactgattt

SEQ ID NO: 2178 - DNA, 73 bp, Homo sapiens
atagttagttaggtcagtttggttaatggtgttattcaagcttctgtatccttactgattttctgtctgctgg

SEQ ID NO: 2179 - DNA, 76 bp, Homo sapiens
agtttggttaatggtgttattcaagcttctgtatccttactgattttctgtctgctggtcctgctattagtatcat

SEQ ID NO: 2180 - DNA, 76 bp, Homo sapiens
ttaatggtgttattcaagcttctgtatccttactgattttctgtctgctggtcctgctattagtatcattcctttt

SEQ ID NO: 2181 - DNA, 76 bp, Homo sapiens
ttattcaagcttctgtatccttactgattttctgtctgctggtcctgctattagtatcattccttttttttgaaca

SEQ ID NO: 2182 - DNA, 77 bp, Homo sapiens
ttctgtatccttactgattttctgtctgctggtcctgctattagtatcattccttttttttgaacatgatgttgctt

SEQ ID NO: 2183 - DNA, 77 bp, Homo sapiens
ttactgattttctgtctgctggtcctgctattagtatcattccttttttttgaacatgatgttgctttgtcacctag

SEQ ID NO: 2184 - DNA, 81 bp, Homo sapiens
gccactgcgctcagccacttttcttcatgtttccagtgactgatagttcattaaaagagtgccctgttatacatgcttata

SEQ ID NO: 2185 - DNA, 78 bp, Homo sapiens
tcagccacttttcttcatgtttccagtgactgatagttcattaaaagagtgccctgttatacatgcttataatttcca

SEQ ID NO: 2186 - DNA, 80 bp, Homo sapiens
ttcttcatgtttccagtgactgatagttcattaaaagagtgccctgttatacatgcttataatttccatcaaatatgtga

SEQ ID NO: 2187 - DNA, 78 bp, Homo sapiens
catgtttccagtgactgatagttcattaaaagagtgccctgttatacatgcttataatttccatcaaatatgtgaaag

SEQ ID NO: 2188 - DNA, 78 bp, Homo sapiens
ctgatagttcattaaaagagtgccctgttatacatgcttataatttccatcaaatatgtgaaagttgttggccatgat

SEQ ID NO: 2189 - DNA, 77 bp, Homo sapiens
gttcattaaaagagtgccctgttatacatgcttataatttccatcaaatatgtgaaagttgttggccatgatttcta

SEQ ID NO: 2190 - DNA, 75 bp, Homo sapiens
agagtgccctgttatacatgcttataatttccatcaaatatgtgaaagttgttggccatgatttctaaagacttt

SEQ ID NO: 2191 - DNA, 72 bp, Homo sapiens
gttatacatgcttataatttccatcaaatatgtgaaagttgttggccatgatttctaaagactttttttttc

SEQ ID NO: 2192 - DNA, 72 bp, Homo sapiens
taatttccatcaaatatgtgaaagttgttggccatgatttctaaagactttttttttctatattatctcctg

SEQ ID NO: 2193 - DNA, 71 bp, Homo sapiens
caaatatgtgaaagttgttggccatgatttctaaagactttttttttctatattatctcctgttttgtggc

SEQ ID NO: 2194 - DNA, 70 bp, Homo sapiens
gtgaaagttgttggccatgatttctaaagactttttttttctatattatctcctgttttgtggctccagt

SEQ ID NO: 2195 - DNA, 71 bp, Homo sapiens
gttggccatgatttctaaagactttttttttctatattatctcctgttttgtggctccagttacaagtatg

SEQ ID NO: 2196 - DNA, 70 bp, Homo sapiens
ctaaagactttttttttctatattatctcctgttttgtggctccagttacaagtatgtttggcctcttga

SEQ ID NO: 2197 - DNA, 71 bp, Homo sapiens
ttttttctatattatctcctgttttgtggctccagttacaagtatgtttggcctcttgaaattatttcaat

SEQ ID NO: 2198 - DNA, 75 bp, Homo sapiens
tctatattatctcctgttttgtggctccagttacaagtatgtttggcctcttgaaattatttcaattatcacgta

SEQ ID NO: 2199 - DNA, 72 bp, Homo sapiens
ctcctgttttgtggctccagttacaagtatgtttggcctcttgaaattatttcaattatcacgtattacatt

SEQ ID NO: 2200 - DNA, 71 bp, Homo sapiens
gtggctccagttacaagtatgtttggcctcttgaaattatttcaattatcacgtattacattttttagtgg

SEQ ID NO: 2201 - DNA, 67 bp, Homo sapiens
ttacaagtatgtttggcctcttgaaattatttcaattatcacgtattacattttttagtggtttttt

SEQ ID NO: 2202 - DNA, 64 bp, Homo sapiens
gttttttttttctgtgtttcatttaggttagtaattttggtttcatgggttgtaaatctcaaag

SEQ ID NO: 2203 - DNA, 69 bp, Homo sapiens
tttctgtgtttcatttaggttagtaattttggtttcatgggttgtaaatctcaaagtgtatttttcatc

SEQ ID NO: 2204 - DNA, 68 bp, Homo sapiens
gtttcatttaggttagtaattttggtttcatgggttgtaaatctcaaagtgtatttttcatcttagac

SEQ ID NO: 2205 - DNA, 68 bp, Homo sapiens
tgggttgtaaatctcaaagtgtatttttcatcttagactttgtaattttcaatttagaagttcaaatt

SEQ ID NO: 2206 - DNA, 67 bp, Homo sapiens
atctcaaagtgtatttttcatcttagactttgtaattttcaatttagaagttcaaattttaaaaata

SEQ ID NO: 2207 - DNA, 75 bp, Homo sapiens
aaaaatatttcatatttttacttaatatatttgtttcttctagccttctgatcatatgaaatatcatcataattg

SEQ ID NO: 2208 - DNA, 75 bp, Homo sapiens
catatttttacttaatatatttgtttcttctagccttctgatcatatgaaatatcatcataattgttttaaagga

SEQ ID NO: 2209 - DNA, 77 bp, Homo sapiens
cttaatatatttgtttcttctagccttctgatcatatgaaatatcatcataattgttttaaaggacttgtctgctaa

SEQ ID NO: 2210 - DNA, 77 bp, Homo sapiens
ttgtttcttctagccttctgatcatatgaaatatcatcataattgttttaaaggacttgtctgctaattctcttttc

SEQ ID NO: 2211 - DNA, 79 bp, Homo sapiens
tcttctagccttctgatcatatgaaatatcatcataattgttttaaaggacttgtctgctaattctcttttctgtttca

SEQ ID NO: 2212 - DNA, 77 bp, Homo sapiens
ttctgatcatatgaaatatcatcataattgttttaaaggacttgtctgctaattctcttttctgtttcatttcaaaa

SEQ ID NO: 2213 - DNA, 72 bp, Homo sapiens
atgaaatatcatcataattgttttaaaggacttgtctgctaattctcttttctgtttcatttcaaaattggt

SEQ ID NO: 2214 - DNA, 65 bp, Homo sapiens
aattgttttaaaggacttgtctgctaattctcttttctgtttcatttcaaaattggtttattttt

SEQ ID NO: 2215 - DNA, 69 bp, Homo sapiens
tgtctgctaattctcttttctgtttcatttcaaaattggtttattttttgtttcattatggggtgtaac

SEQ ID NO: 2216 - DNA, 68 bp, Homo sapiens
gtttcatttcaaaattggtttattttttgtttcattatggggtgtaacttcctgcttctatgtaagtc

SEQ ID NO: 2217 - DNA, 68 bp, Homo sapiens
ttttttgtttcattatggggtgtaacttcctgcttctatgtaagtcttataaattttgattgactttt

SEQ ID NO: 2218 - DNA, 72 bp, Homo sapiens
cattatggggtgtaacttcctgcttctatgtaagtcttataaattttgattgactttttagccactgtgaat

SEQ ID NO: 2219 - DNA, 70 bp, Homo sapiens
gggtgtaacttcctgcttctatgtaagtcttataaattttgattgactttttagccactgtgaattttac

SEQ ID NO: 2220 - DNA, 68 bp, Homo sapiens
ctatgtaagtcttataaattttgattgactttttagccactgtgaattttaccttgttttctagtttc

SEQ ID NO: 2221 - DNA, 66 bp, Homo sapiens
cttataaattttgattgactttttagccactgtgaattttaccttgttttctagtttctctagttt

SEQ ID NO: 2222 - DNA, 67 bp, Homo sapiens
ttgattgactttttagccactgtgaattttaccttgttttctagtttctctagttttgtttgccttt

SEQ ID NO: 2223 - DNA, 68 bp, Homo sapiens
gccactgtgaattttaccttgttttctagtttctctagttttgtttgccttttacaaatatttgtgga

SEQ ID NO: 2224 - DNA, 65 bp, Homo sapiens
gaattttaccttgttttctagtttctctagttttgtttgccttttacaaatatttgtggactttg

SEQ ID NO: 2225 - DNA, 68 bp, Homo sapiens
accttgttttctagtttctctagttttgtttgccttttacaaatatttgtggactttgttctgtggca

SEQ ID NO: 2226 - DNA, 71 bp, Homo sapiens
ctagtttctctagttttgtttgccttttacaaatatttgtggactttgttctgtggcattattgagttgct

SEQ ID NO: 2227 - DNA, 71 bp, Homo sapiens
ttgtttgccttttacaaatatttgtggactttgttctgtggcattattgagttgcttgaaaacagtttctt

SEQ ID NO: 2228 - DNA, 72 bp, Homo sapiens
tttacaaatatttgtggactttgttctgtggcattattgagttgcttgaaaacagtttctttctgttgggtc

SEQ ID NO: 2229 - DNA, 73 bp, Homo sapiens
tatttgtggactttgttctgtggcattattgagttgcttgaaaacagtttctttctgttgggtctttcatgtt

SEQ ID NO: 2230 - DNA, 70 bp, Homo sapiens
agttgcttgaaaacagtttctttctgttgggtctttcatgttttctttgactggaccagggctgtgttta

SEQ ID NO: 2231 - DNA, 67 bp, Homo sapiens
aacagtttctttctgttgggtctttcatgttttctttgactggaccagggctgtgtttagggttaat

SEQ ID NO: 2232 - DNA, 66 bp, Homo sapiens
tttctttctgttgggtctttcatgttttctttgactggaccagggctgtgtttagggttaattttt

SEQ ID NO: 2233 - DNA, 68 bp, Homo sapiens
tctttcatgttttctttgactggaccagggctgtgtttagggttaattttttcctccttctgaagact

SEQ ID NO: 2234 - DNA, 67 bp, Homo sapiens
tttctttgactggaccagggctgtgtttagggttaattttttcctccttctgaagactttcttagta

SEQ ID NO: 2235 - DNA, 72 bp, Homo sapiens
ctgtgtttagggttaattttttcctccttctgaagactttcttagtactcctatgtcatatctacaatgtga

SEQ ID NO: 2236 - DNA, 78 bp, Homo sapiens
ttcctccttctgaagactttcttagtactcctatgtcatatctacaatgtgatataaattatatcacatcatttcctt

SEQ ID NO: 2237 - DNA, 78 bp, Homo sapiens
ccttctgaagactttcttagtactcctatgtcatatctacaatgtgatataaattatatcacatcatttccttttgga

SEQ ID NO: 2238 - DNA, 77 bp, Homo sapiens
tcttagtactcctatgtcatatctacaatgtgatataaattatatcacatcatttccttttggacttttgggtatgg

SEQ ID NO: 2239 - DNA, 77 bp, Homo sapiens
cctatgtcatatctacaatgtgatataaattatatcacatcatttccttttggacttttgggtatgggtactattca

SEQ ID NO: 2240 - DNA, 77 bp, Homo sapiens
tcatatctacaatgtgatataaattatatcacatcatttccttttggacttttgggtatgggtactattcacatcct

SEQ ID NO: 2241 - DNA, 75 bp, Homo sapiens
gatataaattatatcacatcatttccttttggacttttgggtatgggtactattcacatccttatgtcagttctg

SEQ ID NO: 2242 - DNA, 77 bp, Homo sapiens
ttatatcacatcatttccttttggacttttgggtatgggtactattcacatccttatgtcagttctggatgctatta

SEQ ID NO: 2243 - DNA, 72 bp, Homo sapiens
atttccttttggacttttgggtatgggtactattcacatccttatgtcagttctggatgctattacctctaa

SEQ ID NO: 2244 - DNA, 72 bp, Homo sapiens
ttttggacttttgggtatgggtactattcacatccttatgtcagttctggatgctattacctctaattcttt

SEQ ID NO: 2245 - DNA, 76 bp, Homo sapiens
tttgggtatgggtactattcacatccttatgtcagttctggatgctattacctctaattcttttggtgatttctca

SEQ ID NO: 2246 - DNA, 81 bp, Homo sapiens
ttctggatgctattacctctaattcttttggtgatttctcatcttgccattggatagctcctttacattgcaagtgctgat

SEQ ID NO: 2247 - DNA, 81 bp, Homo sapiens
tattacctctaattcttttggtgatttctcatcttgccattggatagctcctttacattgcaagtgctgatttgtcattca

SEQ ID NO: 2248 - DNA, 79 bp, Homo sapiens
taattcttttggtgatttctcatcttgccattggatagctcctttacattgcaagtgctgatttgtcattcaaccaaaa

SEQ ID NO: 2249 - DNA, 79 bp, Homo sapiens
ttggtgatttctcatcttgccattggatagctcctttacattgcaagtgctgatttgtcattcaaccaaaagttctagg

SEQ ID NO: 2250 - DNA, 77 bp, Homo sapiens
atcttgccattggatagctcctttacattgcaagtgctgatttgtcattcaaccaaaagttctagggtgagcctttg

SEQ ID NO: 2251 - DNA, 77 bp, Homo sapiens
attggatagctcctttacattgcaagtgctgatttgtcattcaaccaaaagttctagggtgagcctttgtagatctc

SEQ ID NO: 2252 - DNA, 76 bp, Homo sapiens
agctcctttacattgcaagtgctgatttgtcattcaaccaaaagttctagggtgagcctttgtagatctcttcatt

SEQ ID NO: 2253 - DNA, 82 bp, Homo sapiens
tctctctctccagctctctactcagtgctggtctcccttgtgagctctaggcaccttggcctccttggacttccagcttcat

SEQ ID NO: 2254 - DNA, 81 bp, Homo sapiens
tctctccagctctctactcagtgctggtctcccttgtgagctctaggcaccttggcctccttggacttccagcttcatttc

SEQ ID NO: 2255 - DNA, 80 bp, Homo sapiens
cagctctctactcagtgctggtctcccttgtgagctctaggcaccttggcctccttggacttccagcttcatttcctcaa

SEQ ID NO: 2256 - DNA, 78 bp, Homo sapiens
tctctactcagtgctggtctcccttgtgagctctaggcaccttggcctccttggacttccagcttcatttcctcaact

SEQ ID NO: 2257 - DNA, 76 bp, Homo sapiens
ctcagtgctggtctcccttgtgagctctaggcaccttggcctccttggacttccagcttcatttcctcaacttggg

SEQ ID NO: 2258 - DNA, 75 bp, Homo sapiens
tctcccttgtgagctctaggcaccttggcctccttggacttccagcttcatttcctcaacttggggagactacag

SEQ ID NO: 2259 - DNA, 74 bp, Homo sapiens
tctaggcaccttggcctccttggacttccagcttcatttcctcaacttggggagactacaggctctgcctgggt

SEQ ID NO: 2260 - DNA, 72 bp, Homo sapiens
accttggcctccttggacttccagcttcatttcctcaacttggggagactacaggctctgcctgggttcctc

SEQ ID NO: 2261 - DNA, 73 bp, Homo sapiens
ttggacttccagcttcatttcctcaacttggggagactacaggctctgcctgggttcctcctccctgttccac

SEQ ID NO: 2262 - DNA, 72 bp, Homo sapiens
gcttcatttcctcaacttggggagactacaggctctgcctgggttcctcctccctgttccacgacctggaaa

SEQ ID NO: 2263 - DNA, 74 bp, Homo sapiens
gggagactacaggctctgcctgggttcctcctccctgttccacgacctggaaactctctcaaggcagtaagctg

SEQ ID NO: 2264 - DNA, 75 bp, Homo sapiens
tacaggctctgcctgggttcctcctccctgttccacgacctggaaactctctcaaggcagtaagctgggcacacg

SEQ ID NO: 2265 - DNA, 73 bp, Homo sapiens
tgggttcctcctccctgttccacgacctggaaactctctcaaggcagtaagctgggcacacgtgcggcccatt

SEQ ID NO: 2266 - DNA, 73 bp, Homo sapiens
gttccacgacctggaaactctctcaaggcagtaagctgggcacacgtgcggcccatttgttttttgtcttcca

SEQ ID NO: 2267 - DNA, 73 bp, Homo sapiens
aactctctcaaggcagtaagctgggcacacgtgcggcccatttgttttttgtcttccagggatgactgtgttt

SEQ ID NO: 2268 - DNA, 73 bp, Homo sapiens
aaggcagtaagctgggcacacgtgcggcccatttgttttttgtcttccagggatgactgtgttttgttgcttg

SEQ ID NO: 2269 - DNA, 75 bp, Homo sapiens
taagctgggcacacgtgcggcccatttgttttttgtcttccagggatgactgtgttttgttgcttgtccaatatc

SEQ ID NO: 2270 - DNA, 75 bp, Homo sapiens
gtgcggcccatttgttttttgtcttccagggatgactgtgttttgttgcttgtccaatatcttcagtgctgttgt

SEQ ID NO: 2271 - DNA, 75 bp, Homo sapiens
tttgttttttgtcttccagggatgactgtgttttgttgcttgtccaatatcttcagtgctgttgtttcattcatt

SEQ ID NO: 2272 - DNA, 76 bp, Homo sapiens
tttttgtcttccagggatgactgtgttttgttgcttgtccaatatcttcagtgctgttgtttcattcattttatta

SEQ ID NO: 2273 - DNA, 74 bp, Homo sapiens
ccagggatgactgtgttttgttgcttgtccaatatcttcagtgctgttgtttcattcattttattaggttttta

SEQ ID NO: 2274 - DNA, 74 bp, Homo sapiens
gtgttttgttgcttgtccaatatcttcagtgctgttgtttcattcattttattaggtttttattatttcgtgca

SEQ ID NO: 2275 - DNA, 75 bp, Homo sapiens
gcttgtccaatatcttcagtgctgttgtttcattcattttattaggtttttattatttcgtgcaaggaggctata

SEQ ID NO: 2276 - DNA, 74 bp, Homo sapiens
tatcttcagtgctgttgtttcattcattttattaggtttttattatttcgtgcaaggaggctatatctggtccc

SEQ ID NO: 2277 - DNA, 71 bp, Homo sapiens
gtgctgttgtttcattcattttattaggtttttattatttcgtgcaaggaggctatatctggtccccttta

SEQ ID NO: 2278 - DNA, 72 bp, Homo sapiens
ttcattttattaggtttttattatttcgtgcaaggaggctatatctggtcccctttattcactccatcttga

SEQ ID NO: 2279 - DNA, 72 bp, Homo sapiens
ttattaggtttttattatttcgtgcaaggaggctatatctggtcccctttattcactccatcttgaccagaa

SEQ ID NO: 2280 - DNA, 81 bp, Homo sapiens
ttactttttcatgataactgatgatattcagcacattttagcttgtgtgttgaccattcgtgtgttctcttgtgatgagtt

SEQ ID NO: 2281 - DNA, 83 bp, Homo sapiens
tttcatgataactgatgatattcagcacattttagcttgtgtgttgaccattcgtgtgttctcttgtgatgagtttgttcatt

SEQ ID NO: 2282 - DNA, 81 bp, Homo sapiens
atgatattcagcacattttagcttgtgtgttgaccattcgtgtgttctcttgtgatgagtttgttcatttagcctttgcta

SEQ ID NO: 2283 - DNA, 77 bp, Homo sapiens
agcacattttagcttgtgtgttgaccattcgtgtgttctcttgtgatgagtttgttcatttagcctttgctattctt

SEQ ID NO: 2284 - DNA, 75 bp, Homo sapiens
tttagcttgtgtgttgaccattcgtgtgttctcttgtgatgagtttgttcatttagcctttgctattctttgttt

SEQ ID NO: 2285 - DNA, 72 bp, Homo sapiens
gtgttgaccattcgtgtgttctcttgtgatgagtttgttcatttagcctttgctattctttgttttcttttt

SEQ ID NO: 2286 - DNA, 76 bp, Homo sapiens
tttttcatctatttgagttgcagaaggtgtttatatgtcctaaatactgatcctgtgtctgataaatgttttgtaa

SEQ ID NO: 2287 - DNA, 74 bp, Homo sapiens
tgcagaaggtgtttatatgtcctaaatactgatcctgtgtctgataaatgttttgtaaatactttccccaagtc

SEQ ID NO: 2288 - DNA, 72 bp, Homo sapiens
gtttatatgtcctaaatactgatcctgtgtctgataaatgttttgtaaatactttccccaagtctatatggt

SEQ ID NO: 2289 - DNA, 71 bp, Homo sapiens
tcctaaatactgatcctgtgtctgataaatgttttgtaaatactttccccaagtctatatggtttaactat

SEQ ID NO: 2290 - DNA, 70 bp, Homo sapiens
tgatcctgtgtctgataaatgttttgtaaatactttccccaagtctatatggtttaactatttattttaa

SEQ ID NO: 2291 - DNA, 72 bp, Homo sapiens
ttccccaagtctatatggtttaactatttattttaactgtaccttttgatgagcagaaatatttatatctga

SEQ ID NO: 2292 - DNA, 71 bp, Homo sapiens
aagtctatatggtttaactatttattttaactgtaccttttgatgagcagaaatatttatatctgataagt

SEQ ID NO: 2293 - DNA, 71 bp, Homo sapiens
aactatttattttaactgtaccttttgatgagcagaaatatttatatctgataagtttaatttatcagtgt

SEQ ID NO: 2294 - DNA, 71 bp, Homo sapiens
ttttaactgtaccttttgatgagcagaaatatttatatctgataagtttaatttatcagtgttttcttttg

SEQ ID NO: 2295 - DNA, 74 bp, Homo sapiens
tgtaccttttgatgagcagaaatatttatatctgataagtttaatttatcagtgttttcttttgtagttattgc

SEQ ID NO: 2296 - DNA, 77 bp, Homo sapiens
gatgagcagaaatatttatatctgataagtttaatttatcagtgttttcttttgtagttattgcttactgtgagcta

SEQ ID NO: 2297 - DNA, 75 bp, Homo sapiens
gcagaaatatttatatctgataagtttaatttatcagtgttttcttttgtagttattgcttactgtgagctaaga

SEQ ID NO: 2298 - DNA, 72 bp, Homo sapiens
tttatatctgataagtttaatttatcagtgttttcttttgtagttattgcttactgtgagctaagacagttt

SEQ ID NO: 2299 - DNA, 74 bp, Homo sapiens
tatctgataagtttaatttatcagtgttttcttttgtagttattgcttactgtgagctaagacagttttgccta

SEQ ID NO: 2300 - DNA, 71 bp, Homo sapiens
gataagtttaatttatcagtgttttcttttgtagttattgcttactgtgagctaagacagttttgcctaac

SEQ ID NO: 2301 - DNA, 71 bp, Homo sapiens
gtttaatttatcagtgttttcttttgtagttattgcttactgtgagctaagacagttttgcctaacctcga

SEQ ID NO: 2302 - DNA, 74 bp, Homo sapiens
tttatcagtgttttcttttgtagttattgcttactgtgagctaagacagttttgcctaacctcgaagtcatgaa

SEQ ID NO: 2303 - DNA, 73 bp, Homo sapiens
cagtgttttcttttgtagttattgcttactgtgagctaagacagttttgcctaacctcgaagtcatgaaggta

SEQ ID NO: 2304 - DNA, 71 bp, Homo sapiens
ttttcttttgtagttattgcttactgtgagctaagacagttttgcctaacctcgaagtcatgaaggtaatt

SEQ ID NO: 2305 - DNA, 71 bp, Homo sapiens
ttttgtagttattgcttactgtgagctaagacagttttgcctaacctcgaagtcatgaaggtaatttcctt

SEQ ID NO: 2306 - DNA, 72 bp, Homo sapiens
ttgtagttattgcttactgtgagctaagacagttttgcctaacctcgaagtcatgaaggtaatttcctttat

SEQ ID NO: 2307 - DNA, 72 bp, Homo sapiens
attgcttactgtgagctaagacagttttgcctaacctcgaagtcatgaaggtaatttcctttatttcctcta

SEQ ID NO: 2308 - DNA, 70 bp, Homo sapiens
ttactgtgagctaagacagttttgcctaacctcgaagtcatgaaggtaatttcctttatttcctctaaaa

SEQ ID NO: 2309 - DNA, 66 bp, Homo sapiens
agacagttttgcctaacctcgaagtcatgaaggtaatttcctttatttcctctaaaaggttttgct

SEQ ID NO: 2310 - DNA, 67 bp, Homo sapiens
tttgcctaacctcgaagtcatgaaggtaatttcctttatttcctctaaaaggttttgcttttgctaa

SEQ ID NO: 2311 - DNA, 67 bp, Homo sapiens
ctcgaagtcatgaaggtaatttcctttatttcctctaaaaggttttgcttttgctaatttatattta

SEQ ID NO: 2312 - DNA, 71 bp, Homo sapiens
ggtaatttcctttatttcctctaaaaggttttgcttttgctaatttatatttaggtctgtgatgcatctga

SEQ ID NO: 2313 - DNA, 77 bp, Homo sapiens
ttgcttttgctaatttatatttaggtctgtgatgcatctgaaattatttttgtaggtttgagtattttgcatatggc

SEQ ID NO: 2314 - DNA, 78 bp, Homo sapiens
ttgctaatttatatttaggtctgtgatgcatctgaaattatttttgtaggtttgagtattttgcatatggctatccag

SEQ ID NO: 2315 - DNA, 77 bp, Homo sapiens
ttaggtctgtgatgcatctgaaattatttttgtaggtttgagtattttgcatatggctatccagttgtttttcacca

SEQ ID NO: 2316 - DNA, 76 bp, Homo sapiens
ctgtgatgcatctgaaattatttttgtaggtttgagtattttgcatatggctatccagttgtttttcaccatttgt

SEQ ID NO: 2317 - DNA, 75 bp, Homo sapiens
ttttcaccatttgttgaaaacagtctctttttctcactgggttgctttgggaacatcacatggctgcataagtgg

SEQ ID NO: 2318 - DNA, 77 bp, Homo sapiens
ttgaaaacagtctctttttctcactgggttgctttgggaacatcacatggctgcataagtgggatatctttcagaaa

SEQ ID NO: 2319 - DNA, 76 bp, Homo sapiens
agtctctttttctcactgggttgctttgggaacatcacatggctgcataagtgggatatctttcagaaatctttat

SEQ ID NO: 2320 - DNA, 79 bp, Homo sapiens
ttctcactgggttgctttgggaacatcacatggctgcataagtgggatatctttcagaaatctttattctgctccaaaa

SEQ ID NO: 2321 - DNA, 77 bp, Homo sapiens
ggttgctttgggaacatcacatggctgcataagtgggatatctttcagaaatctttattctgctccaaaaatctgtt

SEQ ID NO: 2322 - DNA, 79 bp, Homo sapiens
catcacatggctgcataagtgggatatctttcagaaatctttattctgctccaaaaatctgtttgtctagccctgttat

SEQ ID NO: 2323 - DNA, 77 bp, Homo sapiens
ctgcataagtgggatatctttcagaaatctttattctgctccaaaaatctgtttgtctagccctgttattctgataa

SEQ ID NO: 2324 - DNA, 74 bp, Homo sapiens
gtgggatatctttcagaaatctttattctgctccaaaaatctgtttgtctagccctgttattctgataattttg

SEQ ID NO: 2325 - DNA, 71 bp, Homo sapiens
ctttcagaaatctttattctgctccaaaaatctgtttgtctagccctgttattctgataattttgtaactt

SEQ ID NO: 2326 - DNA, 73 bp, Homo sapiens
ttattctgctccaaaaatctgtttgtctagccctgttattctgataattttgtaactttatattgtcttgaag

SEQ ID NO: 2327 - DNA, 74 bp, Homo sapiens
ctgctccaaaaatctgtttgtctagccctgttattctgataattttgtaactttatattgtcttgaagtcagaa

SEQ ID NO: 2328 - DNA, 74 bp, Homo sapiens
aatctgtttgtctagccctgttattctgataattttgtaactttatattgtcttgaagtcagaattgcaagtcc

SEQ ID NO: 2329 - DNA, 72 bp, Homo sapiens
tctagccctgttattctgataattttgtaactttatattgtcttgaagtcagaattgcaagtcctaaaacct

SEQ ID NO: 2330 - DNA, 70 bp, Homo sapiens
ttattctgataattttgtaactttatattgtcttgaagtcagaattgcaagtcctaaaacctttttcttc

SEQ ID NO: 2331 - DNA, 68 bp, Homo sapiens
tgtaactttatattgtcttgaagtcagaattgcaagtcctaaaacctttttcttctttttcgaagttc

SEQ ID NO: 2332 - DNA, 71 bp, Homo sapiens
tattgtcttgaagtcagaattgcaagtcctaaaacctttttcttctttttcgaagttctgcatattctccg

SEQ ID NO: 2333 - DNA, 71 bp, Homo sapiens
ttgaagtcagaattgcaagtcctaaaacctttttcttctttttcgaagttctgcatattctccgtccttca

SEQ ID NO: 2334 - DNA, 70 bp, Homo sapiens
attgcaagtcctaaaacctttttcttctttttcgaagttctgcatattctccgtccttcacatttccata

SEQ ID NO: 2335 - DNA, 68 bp, Homo sapiens
gtcctaaaacctttttcttctttttcgaagttctgcatattctccgtccttcacatttccatataaat

SEQ ID NO: 2336 - DNA, 74 bp, Homo sapiens
tcttctttttcgaagttctgcatattctccgtccttcacatttccatataaattctaataatctcttttctgtc

SEQ ID NO: 2337 - DNA, 76 bp, Homo sapiens
ttcgaagttctgcatattctccgtccttcacatttccatataaattctaataatctcttttctgtcttctccaaga

SEQ ID NO: 2338 - DNA, 77 bp, Homo sapiens
ttctgcatattctccgtccttcacatttccatataaattctaataatctcttttctgtcttctccaagaaaggctga

SEQ ID NO: 2339 - DNA, 78 bp, Homo sapiens
gtccttcacatttccatataaattctaataatctcttttctgtcttctccaagaaaggctgatgggatcatgattata

SEQ ID NO: 2340 - DNA, 80 bp, Homo sapiens
aattctaataatctcttttctgtcttctccaagaaaggctgatgggatcatgattataattgtcttgagtctgttgatca

SEQ ID NO: 2341 - DNA, 80 bp, Homo sapiens
aataatctcttttctgtcttctccaagaaaggctgatgggatcatgattataattgtcttgagtctgttgatcagtttga

SEQ ID NO: 2342 - DNA, 81 bp, Homo sapiens
ttttctgtcttctccaagaaaggctgatgggatcatgattataattgtcttgagtctgttgatcagtttgaggagaactga

SEQ ID NO: 2343 - DNA, 82 bp, Homo sapiens
tgatgggatcatgattataattgtcttgagtctgttgatcagtttgaggagaactgacatcttaacaacgattgagtcttaa

SEQ ID NO: 2344 - DNA, 82 bp, Homo sapiens
gatcatgattataattgtcttgagtctgttgatcagtttgaggagaactgacatcttaacaacgattgagtcttaatcatta

SEQ ID NO: 2345 - DNA, 78 bp, Homo sapiens
aattgtcttgagtctgttgatcagtttgaggagaactgacatcttaacaacgattgagtcttaatcattagtatagta

SEQ ID NO: 2346 - DNA, 79 bp, Homo sapiens
agtctgttgatcagtttgaggagaactgacatcttaacaacgattgagtcttaatcattagtatagtatatctctccat

SEQ ID NO: 2347 - DNA, 78 bp, Homo sapiens
gatcagtttgaggagaactgacatcttaacaacgattgagtcttaatcattagtatagtatatctctccatttattta

SEQ ID NO: 2348 - DNA, 73 bp, Homo sapiens
ctccatttatttaggtcttttttgctttgtctgagcagtcgtttgttgcttttagcctttggtcttgcatgtc

SEQ ID NO: 2349 - DNA, 72 bp, Homo sapiens
tttaggtcttttttgctttgtctgagcagtcgtttgttgcttttagcctttggtcttgcatgtcttctgttt

SEQ ID NO: 2350 - DNA, 72 bp, Homo sapiens
tttttgctttgtctgagcagtcgtttgttgcttttagcctttggtcttgcatgtcttctgttttaaaattac

SEQ ID NO: 2351 - DNA, 70 bp, Homo sapiens
tttgtctgagcagtcgtttgttgcttttagcctttggtcttgcatgtcttctgttttaaaattacttttt

SEQ ID NO: 2352 - DNA, 65 bp, Homo sapiens
atattaaatacattttttagcaattataaagtattataaaaatttctaattttttgttggaaata

SEQ ID NO: 2353 - DNA, 65 bp, Homo sapiens
tttttagcaattataaagtattataaaaatttctaattttttgttggaaatagaatttttgtata

SEQ ID NO: 2354 - DNA, 66 bp, Homo sapiens
agtattataaaaatttctaattttttgttggaaatagaatttttgtatattgacctgtttcttaca

SEQ ID NO: 2355 - DNA, 64 bp, Homo sapiens
aaatttctaattttttgttggaaatagaatttttgtatattgacctgtttcttacaaccttact

SEQ ID NO: 2356 - DNA, 67 bp, Homo sapiens
ctaattttttgttggaaatagaatttttgtatattgacctgtttcttacaaccttacttaagtcata

SEQ ID NO: 2357 - DNA, 68 bp, Homo sapiens
ggaaatagaatttttgtatattgacctgtttcttacaaccttacttaagtcatattaattctactagt

SEQ ID NO: 2358 - DNA, 66 bp, Homo sapiens
agaatttttgtatattgacctgtttcttacaaccttacttaagtcatattaattctactagttttt

SEQ ID NO: 2359 - DNA, 68 bp, Homo sapiens
tgacctgtttcttacaaccttacttaagtcatattaattctactagttttttaggtagattacttaga

SEQ ID NO: 2360 - DNA, 65 bp, Homo sapiens
gtttcttacaaccttacttaagtcatattaattctactagttttttaggtagattacttagattt

SEQ ID NO: 2361 - DNA, 72 bp, Homo sapiens
tacttaagtcatattaattctactagttttttaggtagattacttagatttttctaatagatgattgtcata

SEQ ID NO: 2362 - DNA, 70 bp, Homo sapiens
tttaggtagattacttagatttttctaatagatgattgtcataaaacactgttttatctcttttttccca

SEQ ID NO: 2363 - DNA, 70 bp, Homo sapiens
tacttagatttttctaatagatgattgtcataaaacactgttttatctcttttttcccatttgtaattcc

SEQ ID NO: 2364 - DNA, 70 bp, Homo sapiens
tttctaatagatgattgtcataaaacactgttttatctcttttttcccatttgtaattccttttattctc

SEQ ID NO: 2365 - DNA, 69 bp, Homo sapiens
tagatgattgtcataaaacactgttttatctcttttttcccatttgtaattccttttattctcttccct

SEQ ID NO: 2366 - DNA, 67 bp, Homo sapiens
taaaacactgttttatctcttttttcccatttgtaattccttttattctcttcccttacagaatgga

SEQ ID NO: 2367 - DNA, 67 bp, Homo sapiens
ctgttttatctcttttttcccatttgtaattccttttattctcttcccttacagaatggacttaatc

SEQ ID NO: 2368 - DNA, 67 bp, Homo sapiens
tttttcccatttgtaattccttttattctcttcccttacagaatggacttaatcttgttttcattct

SEQ ID NO: 2369 - DNA, 73 bp, Homo sapiens
ttgtaattccttttattctcttcccttacagaatggacttaatcttgttttcattcttagaggagagcattca

SEQ ID NO: 2370 - DNA, 74 bp, Homo sapiens
ttttattctcttcccttacagaatggacttaatcttgttttcattcttagaggagagcattcagtgttacacca

SEQ ID NO: 2371 - DNA, 79 bp, Homo sapiens
ttacagaatggacttaatcttgttttcattcttagaggagagcattcagtgttacaccatcaattataagtcagctgta

SEQ ID NO: 2372 - DNA, 74 bp, Homo sapiens
aatcttgttttcattcttagaggagagcattcagtgttacaccatcaattataagtcagctgtaggggttttat

SEQ ID NO: 2373 - DNA, 76 bp, Homo sapiens
ttttcattcttagaggagagcattcagtgttacaccatcaattataagtcagctgtaggggttttattgatgaagt

SEQ ID NO: 2374 - DNA, 77 bp, Homo sapiens
cttagaggagagcattcagtgttacaccatcaattataagtcagctgtaggggttttattgatgaagtttatcagat

SEQ ID NO: 2375 - DNA, 77 bp, Homo sapiens
agcattcagtgttacaccatcaattataagtcagctgtaggggttttattgatgaagtttatcagattgctttcaaa

SEQ ID NO: 2376 - DNA, 75 bp, Homo sapiens
gttacaccatcaattataagtcagctgtaggggttttattgatgaagtttatcagattgctttcaaatatagctt

SEQ ID NO: 2377 - DNA, 77 bp, Homo sapiens
tcagctgtaggggttttattgatgaagtttatcagattgctttcaaatatagcttttattactatttagatatggca

SEQ ID NO: 2378 - DNA, 76 bp, Homo sapiens
aagtttatcagattgctttcaaatatagcttttattactatttagatatggcaaggccaacagaacccagcatgac

SEQ ID NO: 2379 - DNA, 77 bp, Homo sapiens
attgctttcaaatatagcttttattactatttagatatggcaaggccaacagaacccagcatgactgccattgaaaa

SEQ ID NO: 2380 - DNA, 75 bp, Homo sapiens
aaatatagcttttattactatttagatatggcaaggccaacagaacccagcatgactgccattgaaaagatagtt

SEQ ID NO: 2381 - DNA, 77 bp, Homo sapiens
ttttattactatttagatatggcaaggccaacagaacccagcatgactgccattgaaaagatagtttgttatagtca

SEQ ID NO: 2382 - DNA, 77 bp, Homo sapiens
actatttagatatggcaaggccaacagaacccagcatgactgccattgaaaagatagtttgttatagtcacagaccc

SEQ ID NO: 2383 - DNA, 78 bp, Homo sapiens
tatggcaaggccaacagaacccagcatgactgccattgaaaagatagtttgttatagtcacagaccccaagaggaata

SEQ ID NO: 2384 - DNA, 80 bp, Homo sapiens
aacagaacccagcatgactgccattgaaaagatagtttgttatagtcacagaccccaagaggaatagtcatgccatgcca

SEQ ID NO: 2385 - DNA, 83 bp, Homo sapiens
agcatgactgccattgaaaagatagtttgttatagtcacagaccccaagaggaatagtcatgccatgccatggagaatacaca

SEQ ID NO: 2386 - DNA, 81 bp, Homo sapiens
ttgaaaagatagtttgttatagtcacagaccccaagaggaatagtcatgccatgccatggagaatacacagctgagtagct

SEQ ID NO: 2387 - DNA, 81 bp, Homo sapiens
atagtttgttatagtcacagaccccaagaggaatagtcatgccatgccatggagaatacacagctgagtagcttcctgagg

SEQ ID NO: 2388 - DNA, 83 bp, Homo sapiens
ttatagtcacagaccccaagaggaatagtcatgccatgccatggagaatacacagctgagtagcttcctgagggtttgtgtca

SEQ ID NO: 2389 - DNA, 84 bp, Homo sapiens
cccaagaggaatagtcatgccatgccatggagaatacacagctgagtagcttcctgagggtttgtgtcatgaatggatattgag

SEQ ID NO: 2390 - DNA, 84 bp, Homo sapiens
aatagtcatgccatgccatggagaatacacagctgagtagcttcctgagggtttgtgtcatgaatggatattgagttttctcaa

SEQ ID NO: 2391 - DNA, 77 bp, Homo sapiens
acacagctgagtagcttcctgagggtttgtgtcatgaatggatattgagttttctcaaaagctttttctgtatctat

SEQ ID NO: 2392 - DNA, 72 bp, Homo sapiens
ctattgagataatgctatgtttttaaagatattaatgtaaatttcattgttttattttcaaatgttacgcta

SEQ ID NO: 2393 - DNA, 71 bp, Homo sapiens
tgctatgtttttaaagatattaatgtaaatttcattgttttattttcaaatgttacgctaaatgccatttg

SEQ ID NO: 2394 - DNA, 72 bp, Homo sapiens
ttaaagatattaatgtaaatttcattgttttattttcaaatgttacgctaaatgccatttggtgtcatggtg

SEQ ID NO: 2395 - DNA, 72 bp, Homo sapiens
taatgtaaatttcattgttttattttcaaatgttacgctaaatgccatttggtgtcatggtgtattattctt

SEQ ID NO: 2396 - DNA, 69 bp, Homo sapiens
aaatttcattgttttattttcaaatgttacgctaaatgccatttggtgtcatggtgtattattcttttt

SEQ ID NO: 2397 - DNA, 73 bp, Homo sapiens
ctgggattactttcgtaatccatgtgagccaccacaactggcctattcttcttatatattgttggacttaaat

SEQ ID NO: 2398 - DNA, 75 bp, Homo sapiens
ttactttcgtaatccatgtgagccaccacaactggcctattcttcttatatattgttggacttaaattgctaata

SEQ ID NO: 2399 - DNA, 74 bp, Homo sapiens
aatccatgtgagccaccacaactggcctattcttcttatatattgttggacttaaattgctaatagtaaatatt

SEQ ID NO: 2400 - DNA, 71 bp, Homo sapiens
ccaccacaactggcctattcttcttatatattgttggacttaaattgctaatagtaaatatttttgcaact

SEQ ID NO: 2401 - DNA, 71 bp, Homo sapiens
gcctattcttcttatatattgttggacttaaattgctaatagtaaatatttttgcaactttgtatgggagg

SEQ ID NO: 2402 - DNA, 70 bp, Homo sapiens
ttatatattgttggacttaaattgctaatagtaaatatttttgcaactttgtatgggagggattttgttg

SEQ ID NO: 2403 - DNA, 69 bp, Homo sapiens
gttggacttaaattgctaatagtaaatatttttgcaactttgtatgggagggattttgttgtaatcttg

SEQ ID NO: 2404 - DNA, 71 bp, Homo sapiens
attgctaatagtaaatatttttgcaactttgtatgggagggattttgttgtaatcttgttgctttttgtca

SEQ ID NO: 2405 - DNA, 71 bp, Homo sapiens
gtaaatatttttgcaactttgtatgggagggattttgttgtaatcttgttgctttttgtcaagtgctggta

SEQ ID NO: 2406 - DNA, 70 bp, Homo sapiens
ttttgcaactttgtatgggagggattttgttgtaatcttgttgctttttgtcaagtgctggtatttttgg

SEQ ID NO: 2407 - DNA, 72 bp, Homo sapiens
ttgtatgggagggattttgttgtaatcttgttgctttttgtcaagtgctggtatttttggtatattcattgg

SEQ ID NO: 2408 - DNA, 71 bp, Homo sapiens
gggagggattttgttgtaatcttgttgctttttgtcaagtgctggtatttttggtatattcattggtattc

SEQ ID NO: 2409 - DNA, 74 bp, Homo sapiens
gggattttgttgtaatcttgttgctttttgtcaagtgctggtatttttggtatattcattggtattcttcatgc

SEQ ID NO: 2410 - DNA, 75 bp, Homo sapiens
tgttgtaatcttgttgctttttgtcaagtgctggtatttttggtatattcattggtattcttcatgctaaactta

SEQ ID NO: 2411 - DNA, 75 bp, Homo sapiens
tgtaatcttgttgctttttgtcaagtgctggtatttttggtatattcattggtattcttcatgctaaacttagaa

SEQ ID NO: 2412 - DNA, 74 bp, Homo sapiens
cttgttgctttttgtcaagtgctggtatttttggtatattcattggtattcttcatgctaaacttagaaaatga

SEQ ID NO: 2413 - DNA, 73 bp, Homo sapiens
gctttttgtcaagtgctggtatttttggtatattcattggtattcttcatgctaaacttagaaaatgatttgg

SEQ ID NO: 2414 - DNA, 75 bp, Homo sapiens
gtcaagtgctggtatttttggtatattcattggtattcttcatgctaaacttagaaaatgatttgggaagcattg

SEQ ID NO: 2415 - DNA, 75 bp, Homo sapiens
gtgctggtatttttggtatattcattggtattcttcatgctaaacttagaaaatgatttgggaagcattgtcttc

SEQ ID NO: 2416 - DNA, 74 bp, Homo sapiens
ggtatttttggtatattcattggtattcttcatgctaaacttagaaaatgatttgggaagcattgtcttctctg

SEQ ID NO: 2417 - DNA, 75 bp, Homo sapiens
tcattggtattcttcatgctaaacttagaaaatgatttgggaagcattgtcttctctgttttctggaaatacttg

SEQ ID NO: 2418 - DNA, 76 bp, Homo sapiens
cttcatgctaaacttagaaaatgatttgggaagcattgtcttctctgttttctggaaatacttgtgtgagattgat

SEQ ID NO: 2419 - DNA, 77 bp, Homo sapiens
gaagcattgtcttctctgttttctggaaatacttgtgtgagattgatttatagtgtttgaaggaacttatcagtgaa

SEQ ID NO: 2420 - DNA, 75 bp, Homo sapiens
tctctgttttctggaaatacttgtgtgagattgatttatagtgtttgaaggaacttatcagtgaaaaaatctgag

SEQ ID NO: 2421 - DNA, 73 bp, Homo sapiens
aatacttgtgtgagattgatttatagtgtttgaaggaacttatcagtgaaaaaatctgagtctagagttttct

SEQ ID NO: 2422 - DNA, 71 bp, Homo sapiens
gagattgatttatagtgtttgaaggaacttatcagtgaaaaaatctgagtctagagttttctttttgggaa

SEQ ID NO: 2423 - DNA, 71 bp, Homo sapiens
gaaggaacttatcagtgaaaaaatctgagtctagagttttctttttgggaaggattttgataatgaattca

SEQ ID NO: 2424 - DNA, 71 bp, Homo sapiens
tcagtgaaaaaatctgagtctagagttttctttttgggaaggattttgataatgaattcaacttaaaatgc

SEQ ID NO: 2425 - DNA, 71 bp, Homo sapiens
ctgagtctagagttttctttttgggaaggattttgataatgaattcaacttaaaatgcttctcagattttc

SEQ ID NO: 2426 - DNA, 69 bp, Homo sapiens
ctagagttttctttttgggaaggattttgataatgaattcaacttaaaatgcttctcagattttctgtt

SEQ ID NO: 2427 - DNA, 72 bp, Homo sapiens
ttgggaaggattttgataatgaattcaacttaaaatgcttctcagattttctgttttatcagttttgataag

SEQ ID NO: 2428 - DNA, 72 bp, Homo sapiens
aaggattttgataatgaattcaacttaaaatgcttctcagattttctgttttatcagttttgataagtttca

SEQ ID NO: 2429 - DNA, 72 bp, Homo sapiens
ataatgaattcaacttaaaatgcttctcagattttctgttttatcagttttgataagtttcattttcaaata

SEQ ID NO: 2430 - DNA, 68 bp, Homo sapiens
caacttaaaatgcttctcagattttctgttttatcagttttgataagtttcattttcaaataattttt

SEQ ID NO: 2431 - DNA, 72 bp, Homo sapiens
tgataagtttcattttcaaataattttttcttttcatctaagctgttgaattggttagcataaagtcattaa

SEQ ID NO: 2432 - DNA, 71 bp, Homo sapiens
cattttcaaataattttttcttttcatctaagctgttgaattggttagcataaagtcattaataataatct

SEQ ID NO: 2433 - DNA, 71 bp, Homo sapiens
taattttttcttttcatctaagctgttgaattggttagcataaagtcattaataataatctttggccttct

SEQ ID NO: 2434 - DNA, 73 bp, Homo sapiens
cttttcatctaagctgttgaattggttagcataaagtcattaataataatctttggccttcttaatatctttg

SEQ ID NO: 2435 - DNA, 73 bp, Homo sapiens
agctgttgaattggttagcataaagtcattaataataatctttggccttcttaatatctttgggattgtagag

SEQ ID NO: 2436 - DNA, 71 bp, Homo sapiens
ttggttagcataaagtcattaataataatctttggccttcttaatatctttgggattgtagaggtaattcc

SEQ ID NO: 2437 - DNA, 71 bp, Homo sapiens
tagcataaagtcattaataataatctttggccttcttaatatctttgggattgtagaggtaattcccattt

SEQ ID NO: 2438 - DNA, 69 bp, Homo sapiens
aatctttggccttcttaatatctttgggattgtagaggtaattcccattttattcttgatattggtaat

SEQ ID NO: 2439 - DNA, 69 bp, Homo sapiens
ccttcttaatatctttgggattgtagaggtaattcccattttattcttgatattggtaatttgtattct

SEQ ID NO: 2440 - DNA, 69 bp, Homo sapiens
atctttgggattgtagaggtaattcccattttattcttgatattggtaatttgtattcttcctatttaa

SEQ ID NO: 2441 - DNA, 64 bp, Homo sapiens
aaaaaattaatttagcttgcagattgtcaactttttaggtttttccaaagtgttaccagaaagg

SEQ ID NO: 2442 - DNA, 65 bp, Homo sapiens
attaatttagcttgcagattgtcaactttttaggtttttccaaagtgttaccagaaagggggtcc

SEQ ID NO: 2443 - DNA, 66 bp, Homo sapiens
cttgcagattgtcaactttttaggtttttccaaagtgttaccagaaagggggtcccaatccagacc

SEQ ID NO: 2444 - DNA, 80 bp, Homo sapiens
atggctactccatagggagagcagtgccatggctgctggtttcccatttttatgagtatttcttgattgtatgctaaaca

SEQ ID NO: 2445 - DNA, 66 bp, Homo sapiens
agaggtcagttttgtcaccatcttggctttggtgggttttggcccccttctttattacaacctgtt

SEQ ID NO: 2446 - DNA, 84 bp, Homo sapiens
ttgtgccagcctcctatctcattctgtgacttagaatgcataacttactgcagtccagcaggactcagccttatgatttcccca

SEQ ID NO: 2447 - DNA, 81 bp, Homo sapiens
agcctcctatctcattctgtgacttagaatgcataacttactgcagtccagcaggactcagccttatgatttccccagccc

SEQ ID NO: 2448 - DNA, 82 bp, Homo sapiens
tatctcattctgtgacttagaatgcataacttactgcagtccagcaggactcagccttatgatttccccagcccctgttcaa

SEQ ID NO: 2449 - DNA, 80 bp, Homo sapiens
attctgtgacttagaatgcataacttactgcagtccagcaggactcagccttatgatttccccagcccctgttcaagata

SEQ ID NO: 2450 - DNA, 81 bp, Homo sapiens
gtgacttagaatgcataacttactgcagtccagcaggactcagccttatgatttccccagcccctgttcaagatagaggca

SEQ ID NO: 2451 - DNA, 79 bp, Homo sapiens
acttagaatgcataacttactgcagtccagcaggactcagccttatgatttccccagcccctgttcaagatagaggcat

SEQ ID NO: 2452 - DNA, 79 bp, Homo sapiens
ataacttactgcagtccagcaggactcagccttatgatttccccagcccctgttcaagatagaggcattctggttcaga

SEQ ID NO: 2453 - DNA, 79 bp, Homo sapiens
taacttactgcagtccagcaggactcagccttatgatttccccagcccctgttcaagatagaggcattctggttcagag

SEQ ID NO: 2454 - DNA, 80 bp, Homo sapiens
cagtccagcaggactcagccttatgatttccccagcccctgttcaagatagaggcattctggttcagaggcctctgacaa

SEQ ID NO: 2455 - DNA, 79 bp, Homo sapiens
tccagcaggactcagccttatgatttccccagcccctgttcaagatagaggcattctggttcagaggcctctgacaaaa

SEQ ID NO: 2456 - DNA, 76 bp, Homo sapiens
aggactcagccttatgatttccccagcccctgttcaagatagaggcattctggttcagaggcctctgacaaaagga

SEQ ID NO: 2457 - DNA, 76 bp, Homo sapiens
actcagccttatgatttccccagcccctgttcaagatagaggcattctggttcagaggcctctgacaaaaggacca

SEQ ID NO: 2458 - DNA, 75 bp, Homo sapiens
ttatgatttccccagcccctgttcaagatagaggcattctggttcagaggcctctgacaaaaggaccaactttga

SEQ ID NO: 2459 - DNA, 74 bp, Homo sapiens
cccctgttcaagatagaggcattctggttcagaggcctctgacaaaaggaccaactttgacttcaaattctctg

SEQ ID NO: 2460 - DNA, 72 bp, Homo sapiens
aagatagaggcattctggttcagaggcctctgacaaaaggaccaactttgacttcaaattctctgttacttt

SEQ ID NO: 2461 - DNA, 69 bp, Homo sapiens
ggttcagaggcctctgacaaaaggaccaactttgacttcaaattctctgttacttttcttttcatttct

SEQ ID NO: 2462 - DNA, 71 bp, Homo sapiens
cctctgacaaaaggaccaactttgacttcaaattctctgttacttttcttttcatttcttctgctctcatt

SEQ ID NO: 2463 - DNA, 70 bp, Homo sapiens
ggaccaactttgacttcaaattctctgttacttttcttttcatttcttctgctctcatttttactatttc

SEQ ID NO: 2464 - DNA, 69 bp, Homo sapiens
tttgacttcaaattctctgttacttttcttttcatttcttctgctctcatttttactatttcttttttc

SEQ ID NO: 2465 - DNA, 66 bp, Homo sapiens
ttcttttcatttcttctgctctcatttttactatttcttttttctacttactttgggtttacttta

SEQ ID NO: 2466 - DNA, 66 bp, Homo sapiens
tcatttcttctgctctcatttttactatttcttttttctacttactttgggtttactttactcttt

SEQ ID NO: 2467 - DNA, 66 bp, Homo sapiens
tgctctcatttttactatttcttttttctacttactttgggtttactttactcttttatatatagg

SEQ ID NO: 2468 - DNA, 63 bp, Homo sapiens
ctatttcttttttctacttactttgggtttactttactcttttatatataggttctttaggta

SEQ ID NO: 2469 - DNA, 63 bp, Homo sapiens
tttctacttactttgggtttactttactcttttatatataggttctttaggtagaaccctact

SEQ ID NO: 2470 - DNA, 62 bp, Homo sapiens
cttactttgggtttactttactcttttatatataggttctttaggtagaaccctacttattt

SEQ ID NO: 2471 - DNA, 73 bp, Homo sapiens
gtgagccaccatatccggctgctaggtcattaattttatatctttttttctaatgtggttagggaacataatc

SEQ ID NO: 2472 - DNA, 74 bp, Homo sapiens
caccatatccggctgctaggtcattaattttatatctttttttctaatgtggttagggaacataatctgtatga

SEQ ID NO: 2473 - DNA, 72 bp, Homo sapiens
cggctgctaggtcattaattttatatctttttttctaatgtggttagggaacataatctgtatgatttccat

SEQ ID NO: 2474 - DNA, 71 bp, Homo sapiens
gtcattaattttatatctttttttctaatgtggttagggaacataatctgtatgatttccattattttcat

SEQ ID NO: 2475 - DNA, 72 bp, Homo sapiens
tctttttttctaatgtggttagggaacataatctgtatgatttccattattttcattttattgtgtcctgct

SEQ ID NO: 2476 - DNA, 76 bp, Homo sapiens
ttctaatgtggttagggaacataatctgtatgatttccattattttcattttattgtgtcctgctttatggctcag

SEQ ID NO: 2477 - DNA, 78 bp, Homo sapiens
tagggaacataatctgtatgatttccattattttcattttattgtgtcctgctttatggctcagtatgtggtcttcca

SEQ ID NO: 2478 - DNA, 77 bp, Homo sapiens
ataatctgtatgatttccattattttcattttattgtgtcctgctttatggctcagtatgtggtcttccatggggta

SEQ ID NO: 2479 - DNA, 75 bp, Homo sapiens
tttccattattttcattttattgtgtcctgctttatggctcagtatgtggtcttccatggggtatgcaccaagtt

SEQ ID NO: 2480 - DNA, 75 bp, Homo sapiens
tttcattttattgtgtcctgctttatggctcagtatgtggtcttccatggggtatgcaccaagtttacctgaaaa

SEQ ID NO: 2481 - DNA, 75 bp, Homo sapiens
ttttattgtgtcctgctttatggctcagtatgtggtcttccatggggtatgcaccaagtttacctgaaaagaatg

SEQ ID NO: 2482 - DNA, 75 bp, Homo sapiens
tcctgctttatggctcagtatgtggtcttccatggggtatgcaccaagtttacctgaaaagaatgtttatagtgg

SEQ ID NO: 2483 - DNA, 71 bp, Homo sapiens
ctcagtatgtggtcttccatggggtatgcaccaagtttacctgaaaagaatgtttatagtggttttaacat

SEQ ID NO: 2484 - DNA, 70 bp, Homo sapiens
gggtatgcaccaagtttacctgaaaagaatgtttatagtggttttaacattgcttagattattattatta

SEQ ID NO: 2485 - DNA, 66 bp, Homo sapiens
attatttttatttggtttggttttgtcagtcacaaagaggagtgttaaaatatcttaccacgtttg

SEQ ID NO: 2486 - DNA, 67 bp, Homo sapiens
ttttatttggtttggttttgtcagtcacaaagaggagtgttaaaatatcttaccacgtttggggcac

SEQ ID NO: 2487 - DNA, 74 bp, Homo sapiens
ttttgtcagtcacaaagaggagtgttaaaatatcttaccacgtttggggcactgagtattctgactatgcctta

SEQ ID NO: 2488 - DNA, 74 bp, Homo sapiens
tcacaaagaggagtgttaaaatatcttaccacgtttggggcactgagtattctgactatgccttatgctaattt

SEQ ID NO: 2489 - DNA, 73 bp, Homo sapiens
agaggagtgttaaaatatcttaccacgtttggggcactgagtattctgactatgccttatgctaatttttgct

SEQ ID NO: 2490 - DNA, 75 bp, Homo sapiens
agtgttaaaatatcttaccacgtttggggcactgagtattctgactatgccttatgctaatttttgcttcatgta

SEQ ID NO: 2491 - DNA, 76 bp, Homo sapiens
atatcttaccacgtttggggcactgagtattctgactatgccttatgctaatttttgcttcatgtattttgaagcc

SEQ ID NO: 2492 - DNA, 76 bp, Homo sapiens
tatcttaccacgtttggggcactgagtattctgactatgccttatgctaatttttgcttcatgtattttgaagcct

SEQ ID NO: 2493 - DNA, 74 bp, Homo sapiens
cgtttggggcactgagtattctgactatgccttatgctaatttttgcttcatgtattttgaagccttgttttta

SEQ ID NO: 2494 - DNA, 77 bp, Homo sapiens
cactgagtattctgactatgccttatgctaatttttgcttcatgtattttgaagccttgtttttaggtgcatacatt

SEQ ID NO: 2495 - DNA, 76 bp, Homo sapiens
actgagtattctgactatgccttatgctaatttttgcttcatgtattttgaagccttgtttttaggtgcatacatt

SEQ ID NO: 2496 - DNA, 76 bp, Homo sapiens
gtattctgactatgccttatgctaatttttgcttcatgtattttgaagccttgtttttaggtgcatacatttataa

SEQ ID NO: 2497 - DNA, 75 bp, Homo sapiens
ctgactatgccttatgctaatttttgcttcatgtattttgaagccttgtttttaggtgcatacatttataattat

SEQ ID NO: 2498 - DNA, 76 bp, Homo sapiens
gcttcatgtattttgaagccttgtttttaggtgcatacatttataattattatgacttcttcattgtctgacttac

SEQ ID NO: 2499 - DNA, 76 bp, Homo sapiens
ttttgaagccttgtttttaggtgcatacatttataattattatgacttcttcattgtctgacttactgtgaaatgc

SEQ ID NO: 2500 - DNA, 75 bp, Homo sapiens
agccttgtttttaggtgcatacatttataattattatgacttcttcattgtctgacttactgtgaaatgcccctc

SEQ ID NO: 2501 - DNA, 76 bp, Homo sapiens
tttaggtgcatacatttataattattatgacttcttcattgtctgacttactgtgaaatgcccctccctctcttta

SEQ ID NO: 2502 - DNA, 77 bp, Homo sapiens
tttataattattatgacttcttcattgtctgacttactgtgaaatgcccctccctctctttactatgtagccactca

SEQ ID NO: 2503 - DNA, 76 bp, Homo sapiens
tatgacttcttcattgtctgacttactgtgaaatgcccctccctctctttactatgtagccactcaccatcttttt

SEQ ID NO: 2504 - DNA, 73 bp, Homo sapiens
cttcttcattgtctgacttactgtgaaatgcccctccctctctttactatgtagccactcaccatcttttttt

SEQ ID NO: 2505 - DNA, 72 bp, Homo sapiens
tctgacttactgtgaaatgcccctccctctctttactatgtagccactcaccatcttttttttcttgttgtt

SEQ ID NO: 2506 - DNA, 70 bp, Homo sapiens
ccgtgcccggccattccatttacttttgacctgtttgtgtcttcacttaaagtgtgtttcttacagacac

SEQ ID NO: 2507 - DNA, 70 bp, Homo sapiens
ccattccatttacttttgacctgtttgtgtcttcacttaaagtgtgtttcttacagacaccttgtgttta

SEQ ID NO: 2508 - DNA, 68 bp, Homo sapiens
ccatttacttttgacctgtttgtgtcttcacttaaagtgtgtttcttacagacaccttgtgtttactt

SEQ ID NO: 2509 - DNA, 72 bp, Homo sapiens
ctgtttgtgtcttcacttaaagtgtgtttcttacagacaccttgtgtttacttttctatccgtgctaataca

SEQ ID NO: 2510 - DNA, 71 bp, Homo sapiens
gtgtcttcacttaaagtgtgtttcttacagacaccttgtgtttacttttctatccgtgctaatacacaatt

SEQ ID NO: 2511 - DNA, 67 bp, Homo sapiens
cttaaagtgtgtttcttacagacaccttgtgtttacttttctatccgtgctaatacacaattttttt

SEQ ID NO: 2512 - DNA, 72 bp, Homo sapiens
attgttttgttttgaaacagtgtctacatcactacaatcaattttagaacacttgtatcccctcaagaagaa

SEQ ID NO: 2513 - DNA, 72 bp, Homo sapiens
ttgttttgaaacagtgtctacatcactacaatcaattttagaacacttgtatcccctcaagaagaagccctt

SEQ ID NO: 2514 - DNA, 73 bp, Homo sapiens
agtgtctacatcactacaatcaattttagaacacttgtatcccctcaagaagaagccctttggcccattaaca

SEQ ID NO: 2515 - DNA, 73 bp, Homo sapiens
atcactacaatcaattttagaacacttgtatcccctcaagaagaagccctttggcccattaacagtcactctc

SEQ ID NO: 2516 - DNA, 69 bp, Homo sapiens
aattttagaacacttgtatcccctcaagaagaagccctttggcccattaacagtcactctccattaccc

SEQ ID NO: 2517 - DNA, 70 bp, Homo sapiens
attttagaacacttgtatcccctcaagaagaagccctttggcccattaacagtcactctccattacccta

SEQ ID NO: 2518 - DNA, 70 bp, Homo sapiens
agaacacttgtatcccctcaagaagaagccctttggcccattaacagtcactctccattaccctacttcc

SEQ ID NO: 2519 - DNA, 73 bp, Homo sapiens
ccctcaagaagaagccctttggcccattaacagtcactctccattaccctacttccccagctcctgacaatca

SEQ ID NO: 2520 - DNA, 73 bp, Homo sapiens
aagccctttggcccattaacagtcactctccattaccctacttccccagctcctgacaatcactaatcttcat

SEQ ID NO: 2521 - DNA, 76 bp, Homo sapiens
tttggcccattaacagtcactctccattaccctacttccccagctcctgacaatcactaatcttcatttctgtctc

SEQ ID NO: 2522 - DNA, 76 bp, Homo sapiens
taacagtcactctccattaccctacttccccagctcctgacaatcactaatcttcatttctgtctctatccctatt

SEQ ID NO: 2523 - DNA, 76 bp, Homo sapiens
cattaccctacttccccagctcctgacaatcactaatcttcatttctgtctctatccctatttgggacatttcata

SEQ ID NO: 2524 - DNA, 75 bp, Homo sapiens
ccctacttccccagctcctgacaatcactaatcttcatttctgtctctatccctatttgggacatttcatataaa

SEQ ID NO: 2525 - DNA, 82 bp, Homo sapiens
ataaatggaatcatatgatatatggtgtattgtgagtggcttctttctcctagcataatgtacaagcatttgttttgtagca

SEQ ID NO: 2526 - DNA, 81 bp, Homo sapiens
atcatatgatatatggtgtattgtgagtggcttctttctcctagcataatgtacaagcatttgttttgtagcattagaact

SEQ ID NO: 2527 - DNA, 79 bp, Homo sapiens
atatatggtgtattgtgagtggcttctttctcctagcataatgtacaagcatttgttttgtagcattagaacttcattc

SEQ ID NO: 2528 - DNA, 76 bp, Homo sapiens
tgtattgtgagtggcttctttctcctagcataatgtacaagcatttgttttgtagcattagaacttcattcccttt

SEQ ID NO: 2529 - DNA, 74 bp, Homo sapiens
ggcttctttctcctagcataatgtacaagcatttgttttgtagcattagaacttcattcccttttgttgtcaaa

SEQ ID NO: 2530 - DNA, 75 bp, Homo sapiens
ctcctagcataatgtacaagcatttgttttgtagcattagaacttcattcccttttgttgtcaaataatattctg

SEQ ID NO: 2531 - DNA, 76 bp, Homo sapiens
gtacaagcatttgttttgtagcattagaacttcattcccttttgttgtcaaataatattctgttgcatggctatac

SEQ ID NO: 2532 - DNA, 76 bp, Homo sapiens
gcatttgttttgtagcattagaacttcattcccttttgttgtcaaataatattctgttgcatggctatactacatt

SEQ ID NO: 2533 - DNA, 77 bp, Homo sapiens
tgtagcattagaacttcattcccttttgttgtcaaataatattctgttgcatggctatactacattttctttactca

SEQ ID NO: 2534 - DNA, 74 bp, Homo sapiens
ctacattttctttactcattcattaattgatagacatttaggttgtatatacttttgcaatgttatgaataacg

SEQ ID NO: 2535 - DNA, 76 bp, Homo sapiens
ttactcattcattaattgatagacatttaggttgtatatacttttgcaatgttatgaataacgttattatgaacat

SEQ ID NO: 2536 - DNA, 76 bp, Homo sapiens
agacatttaggttgtatatacttttgcaatgttatgaataacgttattatgaacatttgtctgcaaatccagacat

SEQ ID NO: 2537 - DNA, 75 bp, Homo sapiens
tttaggttgtatatacttttgcaatgttatgaataacgttattatgaacatttgtctgcaaatccagacatttgt

SEQ ID NO: 2538 - DNA, 75 bp, Homo sapiens
cttttgcaatgttatgaataacgttattatgaacatttgtctgcaaatccagacatttgttttgaattctcttgg

SEQ ID NO: 2539 - DNA, 76 bp, Homo sapiens
gcaatgttatgaataacgttattatgaacatttgtctgcaaatccagacatttgttttgaattctcttgggcgtag

SEQ ID NO: 2540 - DNA, 71 bp, Homo sapiens
aacgttattatgaacatttgtctgcaaatccagacatttgttttgaattctcttgggcgtaggatttttgt

SEQ ID NO: 2541 - DNA, 76 bp, Homo sapiens
ttatgaacatttgtctgcaaatccagacatttgttttgaattctcttgggcgtaggatttttgtttcatgctgtaa

SEQ ID NO: 2542 - DNA, 74 bp, Homo sapiens
tttgtctgcaaatccagacatttgttttgaattctcttgggcgtaggatttttgtttcatgctgtaactctgtt

SEQ ID NO: 2543 - DNA, 75 bp, Homo sapiens
ttgtctgcaaatccagacatttgttttgaattctcttgggcgtaggatttttgtttcatgctgtaactctgttta

SEQ ID NO: 2544 - DNA, 74 bp, Homo sapiens
tgcaaatccagacatttgttttgaattctcttgggcgtaggatttttgtttcatgctgtaactctgtttaatct

SEQ ID NO: 2545 - DNA, 72 bp, Homo sapiens
ccagacatttgttttgaattctcttgggcgtaggatttttgtttcatgctgtaactctgtttaatcttgaaa

SEQ ID NO: 2546 - DNA, 70 bp, Homo sapiens
catttgttttgaattctcttgggcgtaggatttttgtttcatgctgtaactctgtttaatcttgaaaaac

SEQ ID NO: 2547 - DNA, 72 bp, Homo sapiens
ttttgaattctcttgggcgtaggatttttgtttcatgctgtaactctgtttaatcttgaaaaactgacagag

SEQ ID NO: 2548 - DNA, 73 bp, Homo sapiens
tttgaattctcttgggcgtaggatttttgtttcatgctgtaactctgtttaatcttgaaaaactgacagaggc

SEQ ID NO: 2549 - DNA, 73 bp, Homo sapiens
attctcttgggcgtaggatttttgtttcatgctgtaactctgtttaatcttgaaaaactgacagaggctgtaa

SEQ ID NO: 2550 - DNA, 72 bp, Homo sapiens
ttgggcgtaggatttttgtttcatgctgtaactctgtttaatcttgaaaaactgacagaggctgtaacattt

SEQ ID NO: 2551 - DNA, 72 bp, Homo sapiens
gcgtaggatttttgtttcatgctgtaactctgtttaatcttgaaaaactgacagaggctgtaacattttaaa

SEQ ID NO: 2552 - DNA, 74 bp, Homo sapiens
tttgtttcatgctgtaactctgtttaatcttgaaaaactgacagaggctgtaacattttaaattaccagcaaca

SEQ ID NO: 2553 - DNA, 75 bp, Homo sapiens
tgctgtaactctgtttaatcttgaaaaactgacagaggctgtaacattttaaattaccagcaacaatagatgaag

SEQ ID NO: 2554 - DNA, 71 bp, Homo sapiens
ctctgtttaatcttgaaaaactgacagaggctgtaacattttaaattaccagcaacaatagatgaaggttt

SEQ ID NO: 2555 - DNA, 68 bp, Homo sapiens
aatcttgaaaaactgacagaggctgtaacattttaaattaccagcaacaatagatgaaggtttttttt

SEQ ID NO: 2556 - DNA, 69 bp, Homo sapiens
cacccagcctatatgaaggttttaatttctccatctctttgccaacattttttattgtttggcttttgg

SEQ ID NO: 2557 - DNA, 67 bp, Homo sapiens
agcctatatgaaggttttaatttctccatctctttgccaacattttttattgtttggcttttggttt

SEQ ID NO: 2558 - DNA, 70 bp, Homo sapiens
tttaatttctccatctctttgccaacattttttattgtttggcttttggttttagctatcctacagggca

SEQ ID NO: 2559 - DNA, 73 bp, Homo sapiens
tccatctctttgccaacattttttattgtttggcttttggttttagctatcctacagggcatgaggtagtatc

SEQ ID NO: 2560 - DNA, 73 bp, Homo sapiens
tttgccaacattttttattgtttggcttttggttttagctatcctacagggcatgaggtagtatctgattgtg

SEQ ID NO: 2561 - DNA, 73 bp, Homo sapiens
tttattgtttggcttttggttttagctatcctacagggcatgaggtagtatctgattgtggtgttgattttta

SEQ ID NO: 2562 - DNA, 73 bp, Homo sapiens
tgtttggcttttggttttagctatcctacagggcatgaggtagtatctgattgtggtgttgatttttatttat

SEQ ID NO: 2563 - DNA, 70 bp, Homo sapiens
tatatattttctttggagaagtgtctatttagatcctttgttcaatttttaactgggctgtatagctttt

SEQ ID NO: 2564 - DNA, 69 bp, Homo sapiens
ctttggagaagtgtctatttagatcctttgttcaatttttaactgggctgtatagctttttatttttga

SEQ ID NO: 2565 - DNA, 71 bp, Homo sapiens
gtgtctatttagatcctttgttcaatttttaactgggctgtatagctttttatttttgagtggaagagctc

SEQ ID NO: 2566 - DNA, 72 bp, Homo sapiens
ttagatcctttgttcaatttttaactgggctgtatagctttttatttttgagtggaagagctctgtatcctg

SEQ ID NO: 2567 - DNA, 72 bp, Homo sapiens
ttcaatttttaactgggctgtatagctttttatttttgagtggaagagctctgtatcctggatacaaactac

SEQ ID NO: 2568 - DNA, 73 bp, Homo sapiens
tttttaactgggctgtatagctttttatttttgagtggaagagctctgtatcctggatacaaactacttgtca

SEQ ID NO: 2569 - DNA, 77 bp, Homo sapiens
tatagctttttatttttgagtggaagagctctgtatcctggatacaaactacttgtcagacatgcgacttgtagact

SEQ ID NO: 2570 - DNA, 76 bp, Homo sapiens
ctttttatttttgagtggaagagctctgtatcctggatacaaactacttgtcagacatgcgacttgtagacttgta

SEQ ID NO: 2571 - DNA, 77 bp, Homo sapiens
tatttttgagtggaagagctctgtatcctggatacaaactacttgtcagacatgcgacttgtagacttgtaaatatt

SEQ ID NO: 2572 - DNA, 76 bp, Homo sapiens
atttttgagtggaagagctctgtatcctggatacaaactacttgtcagacatgcgacttgtagacttgtaaatatt

SEQ ID NO: 2573 - DNA, 79 bp, Homo sapiens
ttgagtggaagagctctgtatcctggatacaaactacttgtcagacatgcgacttgtagacttgtaaatatttcttcca

SEQ ID NO: 2574 - DNA, 76 bp, Homo sapiens
aagagctctgtatcctggatacaaactacttgtcagacatgcgacttgtagacttgtaaatatttcttccatcctt

SEQ ID NO: 2575 - DNA, 76 bp, Homo sapiens
agctctgtatcctggatacaaactacttgtcagacatgcgacttgtagacttgtaaatatttcttccatcctttta

SEQ ID NO: 2576 - DNA, 74 bp, Homo sapiens
ctgtatcctggatacaaactacttgtcagacatgcgacttgtagacttgtaaatatttcttccatccttttact

SEQ ID NO: 2577 - DNA, 71 bp, Homo sapiens
aaactacttgtcagacatgcgacttgtagacttgtaaatatttcttccatccttttactttcctgatggtt

SEQ ID NO: 2578 - DNA, 71 bp, Homo sapiens
acttgtcagacatgcgacttgtagacttgtaaatatttcttccatccttttactttcctgatggttttgtt

SEQ ID NO: 2579 - DNA, 71 bp, Homo sapiens
catgcgacttgtagacttgtaaatatttcttccatccttttactttcctgatggttttgtttgtagcaaaa

SEQ ID NO: 2580 - DNA, 67 bp, Homo sapiens
cttgtaaatatttcttccatccttttactttcctgatggttttgtttgtagcaaaaaagtctgtagg

SEQ ID NO: 2581 - DNA, 66 bp, Homo sapiens
tttcttccatccttttactttcctgatggttttgtttgtagcaaaaaagtctgtaggtttggtaaa

SEQ ID NO: 2582 - DNA, 65 bp, Homo sapiens
ccttttactttcctgatggttttgtttgtagcaaaaaagtctgtaggtttggtaaattctagtta

SEQ ID NO: 2583 - DNA, 67 bp, Homo sapiens
tttgtttgtagcaaaaaagtctgtaggtttggtaaattctagttattttttcttttattgcctctgc

SEQ ID NO: 2584 - DNA, 67 bp, Homo sapiens
tgtagcaaaaaagtctgtaggtttggtaaattctagttattttttcttttattgcctctgcttttag

SEQ ID NO: 2585 - DNA, 67 bp, Homo sapiens
ctgtaggtttggtaaattctagttattttttcttttattgcctctgcttttagtgttatgtctaaaa

SEQ ID NO: 2586 - DNA, 66 bp, Homo sapiens
agttattttttcttttattgcctctgcttttagtgttatgtctaaaaactgttgtttaaccgagtc

SEQ ID NO: 2587 - DNA, 68 bp, Homo sapiens
tcttttattgcctctgcttttagtgttatgtctaaaaactgttgtttaaccgagtcctaaagacttac

SEQ ID NO: 2588 - DNA, 67 bp, Homo sapiens
cctctgcttttagtgttatgtctaaaaactgttgtttaaccgagtcctaaagacttacctcctatgt

SEQ ID NO: 2589 - DNA, 65 bp, Homo sapiens
gcttttagtgttatgtctaaaaactgttgtttaaccgagtcctaaagacttacctcctatgtttt

SEQ ID NO: 2590 - DNA, 64 bp, Homo sapiens
ttatgtctaaaaactgttgtttaaccgagtcctaaagacttacctcctatgtttttttctaaag

SEQ ID NO: 2591 - DNA, 63 bp, Homo sapiens
aaactgttgtttaaccgagtcctaaagacttacctcctatgtttttttctaaagttgtatagt

SEQ ID NO: 2592 - DNA, 66 bp, Homo sapiens
ttaaccgagtcctaaagacttacctcctatgtttttttctaaagttgtatagttttagctcttaca

SEQ ID NO: 2593 - DNA, 72 bp, Homo sapiens
tagctcttacatttagatctgcgattcacttttgaattaatttttaagtatagtatcaggaagggtttcaac

SEQ ID NO: 2594 - DNA, 70 bp, Homo sapiens
catttagatctgcgattcacttttgaattaatttttaagtatagtatcaggaagggtttcaacttaattc

SEQ ID NO: 2595 - DNA, 71 bp, Homo sapiens
gatctgcgattcacttttgaattaatttttaagtatagtatcaggaagggtttcaacttaattcttttgca

SEQ ID NO: 2596 - DNA, 70 bp, Homo sapiens
tttttaagtatagtatcaggaagggtttcaacttaattcttttgcacattcctctagcaatttaagtata

SEQ ID NO: 2597 - DNA, 70 bp, Homo sapiens
aagtatagtatcaggaagggtttcaacttaattcttttgcacattcctctagcaatttaagtatatttct

SEQ ID NO: 2598 - DNA, 69 bp, Homo sapiens
tcaggaagggtttcaacttaattcttttgcacattcctctagcaatttaagtatatttctttactcttt

SEQ ID NO: 2599 - DNA, 72 bp, Homo sapiens
tcttttgcacattcctctagcaatttaagtatatttctttactcttttcagtctgtttttatagtattacca

SEQ ID NO: 2600 - DNA, 69 bp, Homo sapiens
cctctagcaatttaagtatatttctttactcttttcagtctgtttttatagtattaccacttatgggta

SEQ ID NO: 2601 - DNA, 69 bp, Homo sapiens
gcaatttaagtatatttctttactcttttcagtctgtttttatagtattaccacttatgggtaatattg

SEQ ID NO: 2602 - DNA, 69 bp, Homo sapiens
gtatatttctttactcttttcagtctgtttttatagtattaccacttatgggtaatattgtacaagtcg

SEQ ID NO: 2603 - DNA, 69 bp, Homo sapiens
cttttcagtctgtttttatagtattaccacttatgggtaatattgtacaagtcgtaaagtatacaaagc

SEQ ID NO: 2604 - DNA, 69 bp, Homo sapiens
gtctgtttttatagtattaccacttatgggtaatattgtacaagtcgtaaagtatacaaagcttgtaag

SEQ ID NO: 2605 - DNA, 69 bp, Homo sapiens
ttatagtattaccacttatgggtaatattgtacaagtcgtaaagtatacaaagcttgtaagttgttctt

SEQ ID NO: 2606 - DNA, 70 bp, Homo sapiens
ccacttatgggtaatattgtacaagtcgtaaagtatacaaagcttgtaagttgttcttttatatcacctc

SEQ ID NO: 2607 - DNA, 70 bp, Homo sapiens
ggtaatattgtacaagtcgtaaagtatacaaagcttgtaagttgttcttttatatcacctctgtttgttg

SEQ ID NO: 2608 - DNA, 75 bp, Homo sapiens
gtcgtaaagtatacaaagcttgtaagttgttcttttatatcacctctgtttgttgtcagttatgctattgtcatg

SEQ ID NO: 2609 - DNA, 78 bp, Homo sapiens
agcttgtaagttgttcttttatatcacctctgtttgttgtcagttatgctattgtcatgtgtgttggaactatgtata

SEQ ID NO: 2610 - DNA, 78 bp, Homo sapiens
ttgttcttttatatcacctctgtttgttgtcagttatgctattgtcatgtgtgttggaactatgtatattataagccc

SEQ ID NO: 2611 - DNA, 79 bp, Homo sapiens
tatatcacctctgtttgttgtcagttatgctattgtcatgtgtgttggaactatgtatattataagccccagaaaacaa

SEQ ID NO: 2612 - DNA, 77 bp, Homo sapiens
ctgtttgttgtcagttatgctattgtcatgtgtgttggaactatgtatattataagccccagaaaacaacaatataa

SEQ ID NO: 2613 - DNA, 75 bp, Homo sapiens
cagttatgctattgtcatgtgtgttggaactatgtatattataagccccagaaaacaacaatataattttggctt

SEQ ID NO: 2614 - DNA, 77 bp, Homo sapiens
tgtcatgtgtgttggaactatgtatattataagccccagaaaacaacaatataattttggctttcaataatcatgta

SEQ ID NO: 2615 - DNA, 73 bp, Homo sapiens
gtgttggaactatgtatattataagccccagaaaacaacaatataattttggctttcaataatcatgtaatgt

SEQ ID NO: 2616 - DNA, 70 bp, Homo sapiens
gccccagaaaacaacaatataattttggctttcaataatcatgtaatgttaagaacttaagagttgaaag

SEQ ID NO: 2617 - DNA, 70 bp, Homo sapiens
acaacaatataattttggctttcaataatcatgtaatgttaagaacttaagagttgaaagtcttctaagt

SEQ ID NO: 2618 - DNA, 69 bp, Homo sapiens
aattttggctttcaataatcatgtaatgttaagaacttaagagttgaaagtcttctaagtttacccaga

SEQ ID NO: 2619 - DNA, 70 bp, Homo sapiens
ggctttcaataatcatgtaatgttaagaacttaagagttgaaagtcttctaagtttacccagatatttac

SEQ ID NO: 2620 - DNA, 69 bp, Homo sapiens
catgtaatgttaagaacttaagagttgaaagtcttctaagtttacccagatatttaccatttgtggtag

SEQ ID NO: 2621 - DNA, 71 bp, Homo sapiens
agagttgaaagtcttctaagtttacccagatatttaccatttgtggtagtcttctgaagattggcattttc

SEQ ID NO: 2622 - DNA, 74 bp, Homo sapiens
gaaagtcttctaagtttacccagatatttaccatttgtggtagtcttctgaagattggcattttctagcatcat

SEQ ID NO: 2623 - DNA, 76 bp, Homo sapiens
gtttacccagatatttaccatttgtggtagtcttctgaagattggcattttctagcatcatttgtcttaattctga

SEQ ID NO: 2624 - DNA, 77 bp, Homo sapiens
cagatatttaccatttgtggtagtcttctgaagattggcattttctagcatcatttgtcttaattctgaagaatttc

SEQ ID NO: 2625 - DNA, 75 bp, Homo sapiens
ccatttgtggtagtcttctgaagattggcattttctagcatcatttgtcttaattctgaagaatttctttagcct

SEQ ID NO: 2626 - DNA, 78 bp, Homo sapiens
ttctgaagattggcattttctagcatcatttgtcttaattctgaagaatttctttagcctttcttgcagggcatatct

SEQ ID NO: 2627 - DNA, 76 bp, Homo sapiens
agattggcattttctagcatcatttgtcttaattctgaagaatttctttagcctttcttgcagggcatatcttttg

SEQ ID NO: 2628 - DNA, 76 bp, Homo sapiens
ctagcatcatttgtcttaattctgaagaatttctttagcctttcttgcagggcatatcttttggtgataaattgtg

SEQ ID NO: 2629 - DNA, 72 bp, Homo sapiens
catttgtcttaattctgaagaatttctttagcctttcttgcagggcatatcttttggtgataaattgtgttt

SEQ ID NO: 2630 - DNA, 71 bp, Homo sapiens
taattctgaagaatttctttagcctttcttgcagggcatatcttttggtgataaattgtgttttctttctt

SEQ ID NO: 2631 - DNA, 71 bp, Homo sapiens
tctttagcctttcttgcagggcatatcttttggtgataaattgtgttttctttcttttatctgaaagtacc

SEQ ID NO: 2632 - DNA, 72 bp, Homo sapiens
ctttcttgcagggcatatcttttggtgataaattgtgttttctttcttttatctgaaagtacctatttcatc

SEQ ID NO: 2633 - DNA, 71 bp, Homo sapiens
gcagggcatatcttttggtgataaattgtgttttctttcttttatctgaaagtacctatttcatctttatt

SEQ ID NO: 2634 - DNA, 70 bp, Homo sapiens
tttcttttatctgaaagtacctatttcatctttatttttgaagggcattgtggttggatttagaattctg

SEQ ID NO: 2635 - DNA, 70 bp, Homo sapiens
aagtacctatttcatctttatttttgaagggcattgtggttggatttagaattctgtgttgacggtgctt

SEQ ID NO: 2636 - DNA, 74 bp, Homo sapiens
tcatctttatttttgaagggcattgtggttggatttagaattctgtgttgacggtgctttatctcttagcaatt

SEQ ID NO: 2637 - DNA, 71 bp, Homo sapiens
aagggcattgtggttggatttagaattctgtgttgacggtgctttatctcttagcaatttaagtattttag

SEQ ID NO: 2638 - DNA, 69 bp, Homo sapiens
ggttggatttagaattctgtgttgacggtgctttatctcttagcaatttaagtattttagtttactttc

SEQ ID NO: 2639 - DNA, 70 bp, Homo sapiens
tagaattctgtgttgacggtgctttatctcttagcaatttaagtattttagtttactttcttttggcttc

SEQ ID NO: 2640 - DNA, 70 bp, Homo sapiens
gaattctgtgttgacggtgctttatctcttagcaatttaagtattttagtttactttcttttggcttcca

SEQ ID NO: 2641 - DNA, 70 bp, Homo sapiens
ttctgtgttgacggtgctttatctcttagcaatttaagtattttagtttactttcttttggcttccatat

SEQ ID NO: 2642 - DNA, 69 bp, Homo sapiens
tgttgacggtgctttatctcttagcaatttaagtattttagtttactttcttttggcttccatatttta

SEQ ID NO: 2643 - DNA, 71 bp, Homo sapiens
cggtgctttatctcttagcaatttaagtattttagtttactttcttttggcttccatattttatgatgaga

SEQ ID NO: 2644 - DNA, 72 bp, Homo sapiens
atctcttagcaatttaagtattttagtttactttcttttggcttccatattttatgatgagaaatctgccat

SEQ ID NO: 2645 - DNA, 72 bp, Homo sapiens
tctcttagcaatttaagtattttagtttactttcttttggcttccatattttatgatgagaaatctgccatt

SEQ ID NO: 2646 - DNA, 72 bp, Homo sapiens
gcaatttaagtattttagtttactttcttttggcttccatattttatgatgagaaatctgccatttatccag

SEQ ID NO: 2647 - DNA, 72 bp, Homo sapiens
aagtattttagtttactttcttttggcttccatattttatgatgagaaatctgccatttatccagtcactgt

SEQ ID NO: 2648 - DNA, 72 bp, Homo sapiens
attttagtttactttcttttggcttccatattttatgatgagaaatctgccatttatccagtcactgttccc

SEQ ID NO: 2649 - DNA, 73 bp, Homo sapiens
ttttagtttactttcttttggcttccatattttatgatgagaaatctgccatttatccagtcactgttccctc

SEQ ID NO: 2650 - DNA, 80 bp, Homo sapiens
ttttggcttccatattttatgatgagaaatctgccatttatccagtcactgttccctctgccctctgtgtaatgtgacat

SEQ ID NO: 2651 - DNA, 79 bp, Homo sapiens
catattttatgatgagaaatctgccatttatccagtcactgttccctctgccctctgtgtaatgtgacattttcttttg

SEQ ID NO: 2652 - DNA, 79 bp, Homo sapiens
tttatgatgagaaatctgccatttatccagtcactgttccctctgccctctgtgtaatgtgacattttcttttggtgct

SEQ ID NO: 2653 - DNA, 76 bp, Homo sapiens
atctgccatttatccagtcactgttccctctgccctctgtgtaatgtgacattttcttttggtgcttcaagatttt

SEQ ID NO: 2654 - DNA, 73 bp, Homo sapiens
atttatccagtcactgttccctctgccctctgtgtaatgtgacattttcttttggtgcttcaagatttttccc

SEQ ID NO: 2655 - DNA, 74 bp, Homo sapiens
tgttccctctgccctctgtgtaatgtgacattttcttttggtgcttcaagatttttccctctgtgtttgctgtt

SEQ ID NO: 2656 - DNA, 74 bp, Homo sapiens
taatgtgacattttcttttggtgcttcaagatttttccctctgtgtttgctgtttagcaaggcatttgactatt

SEQ ID NO: 2657 - DNA, 71 bp, Homo sapiens
ttttcttttggtgcttcaagatttttccctctgtgtttgctgtttagcaaggcatttgactatttgaggtt

SEQ ID NO: 2658 - DNA, 78 bp, Homo sapiens
tgcttcaagatttttccctctgtgtttgctgtttagcaaggcatttgactatttgaggtttgctgagattcttgaatc

SEQ ID NO: 2659 - DNA, 77 bp, Homo sapiens
agatttttccctctgtgtttgctgtttagcaaggcatttgactatttgaggtttgctgagattcttgaatctgtgaa

SEQ ID NO: 2660 - DNA, 78 bp, Homo sapiens
ctctgtgtttgctgtttagcaaggcatttgactatttgaggtttgctgagattcttgaatctgtgaatgtgtcttttt

SEQ ID NO: 2661 - DNA, 79 bp, Homo sapiens
ttgctgtttagcaaggcatttgactatttgaggtttgctgagattcttgaatctgtgaatgtgtcttttttcaaattga

SEQ ID NO: 2662 - DNA, 76 bp, Homo sapiens
gcaaggcatttgactatttgaggtttgctgagattcttgaatctgtgaatgtgtcttttttcaaattgaagaaatt

SEQ ID NO: 2663 - DNA, 76 bp, Homo sapiens
gactatttgaggtttgctgagattcttgaatctgtgaatgtgtcttttttcaaattgaagaaattttcagccatcg

SEQ ID NO: 2664 - DNA, 75 bp, Homo sapiens
ggtttgctgagattcttgaatctgtgaatgtgtcttttttcaaattgaagaaattttcagccatcgtttcttcaa

SEQ ID NO: 2665 - DNA, 72 bp, Homo sapiens
gattcttgaatctgtgaatgtgtcttttttcaaattgaagaaattttcagccatcgtttcttcaaaattttc

SEQ ID NO: 2666 - DNA, 70 bp, Homo sapiens
ctgtgaatgtgtcttttttcaaattgaagaaattttcagccatcgtttcttcaaaattttctttcctgcc

SEQ ID NO: 2667 - DNA, 70 bp, Homo sapiens
gtgtcttttttcaaattgaagaaattttcagccatcgtttcttcaaaattttctttcctgcctcatattc

SEQ ID NO: 2668 - DNA, 72 bp, Homo sapiens
tcaaattgaagaaattttcagccatcgtttcttcaaaattttctttcctgcctcatattctttctctcttct

SEQ ID NO: 2669 - DNA, 70 bp, Homo sapiens
tttcagccatcgtttcttcaaaattttctttcctgcctcatattctttctctcttcttctttttaaggcc

SEQ ID NO: 2670 - DNA, 69 bp, Homo sapiens
gccatcgtttcttcaaaattttctttcctgcctcatattctttctctcttcttctttttaaggcctttg

SEQ ID NO: 2671 - DNA, 71 bp, Homo sapiens
aaaattttctttcctgcctcatattctttctctcttcttctttttaaggcctttggttatgcatgtgagac

SEQ ID NO: 2672 - DNA, 73 bp, Homo sapiens
tctttcctgcctcatattctttctctcttcttctttttaaggcctttggttatgcatgtgagaccttttggta

SEQ ID NO: 2673 - DNA, 71 bp, Homo sapiens
atattctttctctcttcttctttttaaggcctttggttatgcatgtgagaccttttggtactgtcctgtag

SEQ ID NO: 2674 - DNA, 71 bp, Homo sapiens
ctcttcttctttttaaggcctttggttatgcatgtgagaccttttggtactgtcctgtaggtccctgaagc

SEQ ID NO: 2675 - DNA, 69 bp, Homo sapiens
ttttaaggcctttggttatgcatgtgagaccttttggtactgtcctgtaggtccctgaagccctggttt

SEQ ID NO: 2676 - DNA, 68 bp, Homo sapiens
aggcctttggttatgcatgtgagaccttttggtactgtcctgtaggtccctgaagccctggttttttt

SEQ ID NO: 2677 - DNA, 85 bp, Homo sapiens
catgcctggcctcagattagattctatctattgatgtagcttcaagttcactgactcttttgtcatctcagatttgttgttatga

SEQ ID NO: 2678 - DNA, 83 bp, Homo sapiens
tggcctcagattagattctatctattgatgtagcttcaagttcactgactcttttgtcatctcagatttgttgttatgaagct

SEQ ID NO: 2679 - DNA, 81 bp, Homo sapiens
attctatctattgatgtagcttcaagttcactgactcttttgtcatctcagatttgttgttatgaagcttgcctagtgaaa

SEQ ID NO: 2680 - DNA, 78 bp, Homo sapiens
attgatgtagcttcaagttcactgactcttttgtcatctcagatttgttgttatgaagcttgcctagtgaaattttta

SEQ ID NO: 2681 - DNA, 77 bp, Homo sapiens
ttcaagttcactgactcttttgtcatctcagatttgttgttatgaagcttgcctagtgaaatttttacttcacatgt

SEQ ID NO: 2682 - DNA, 77 bp, Homo sapiens
gttcactgactcttttgtcatctcagatttgttgttatgaagcttgcctagtgaaatttttacttcacatgttgtat

SEQ ID NO: 2683 - DNA, 74 bp, Homo sapiens
cttttgtcatctcagatttgttgttatgaagcttgcctagtgaaatttttacttcacatgttgtatttttagta

SEQ ID NO: 2684 - DNA, 77 bp, Homo sapiens
agccttctgagtatttgggactgcagactggtgctgccacgctcggcttatagtttcttttttattgttgttgctga

SEQ ID NO: 2685 - DNA, 77 bp, Homo sapiens
tatttgggactgcagactggtgctgccacgctcggcttatagtttcttttttattgttgttgctgagacatcctgtt

SEQ ID NO: 2686 - DNA, 77 bp, Homo sapiens
tgcagactggtgctgccacgctcggcttatagtttcttttttattgttgttgctgagacatcctgttttatttatta

SEQ ID NO: 2687 - DNA, 74 bp, Homo sapiens
actggtgctgccacgctcggcttatagtttcttttttattgttgttgctgagacatcctgttttatttattata

SEQ ID NO: 2688 - DNA, 71 bp, Homo sapiens
agtttcttttttattgttgttgctgagacatcctgttttatttattataggtttatcttcagtgggcagat

SEQ ID NO: 2689 - DNA, 74 bp, Homo sapiens
tttattgttgttgctgagacatcctgttttatttattataggtttatcttcagtgggcagatttaattagcatt

SEQ ID NO: 2690 - DNA, 76 bp, Homo sapiens
gttgttgctgagacatcctgttttatttattataggtttatcttcagtgggcagatttaattagcatttagtgaca

SEQ ID NO: 2691 - DNA, 71 bp, Homo sapiens
catcctgttttatttattataggtttatcttcagtgggcagatttaattagcatttagtgacatttttccg

SEQ ID NO: 2692 - DNA, 71 bp, Homo sapiens
tttattataggtttatcttcagtgggcagatttaattagcatttagtgacatttttccgtaaaacttgaca

SEQ ID NO: 2693 - DNA, 70 bp, Homo sapiens
ggtttatcttcagtgggcagatttaattagcatttagtgacatttttccgtaaaacttgacaatataacg

SEQ ID NO: 2694 - DNA, 70 bp, Homo sapiens
cttcagtgggcagatttaattagcatttagtgacatttttccgtaaaacttgacaatataacggaaatgg

SEQ ID NO: 2695 - DNA, 70 bp, Homo sapiens
gcagatttaattagcatttagtgacatttttccgtaaaacttgacaatataacggaaatggtataatttg

SEQ ID NO: 2696 - DNA, 70 bp, Homo sapiens
ttagcatttagtgacatttttccgtaaaacttgacaatataacggaaatggtataatttggaatagagaa

SEQ ID NO: 2697 - DNA, 69 bp, Homo sapiens
gtgacatttttccgtaaaacttgacaatataacggaaatggtataatttggaatagagaaaagaaatca

SEQ ID NO: 2698 - DNA, 71 bp, Homo sapiens
tccgtaaaacttgacaatataacggaaatggtataatttggaatagagaaaagaaatcactcataatctta

SEQ ID NO: 2699 - DNA, 75 bp, Homo sapiens
tgacaatataacggaaatggtataatttggaatagagaaaagaaatcactcataatcttaccatccttatcacag

SEQ ID NO: 2700 - DNA, 72 bp, Homo sapiens
aacggaaatggtataatttggaatagagaaaagaaatcactcataatcttaccatccttatcacagtcctat

SEQ ID NO: 2701 - DNA, 74 bp, Homo sapiens
gtataatttggaatagagaaaagaaatcactcataatcttaccatccttatcacagtcctattaatatattttg

SEQ ID NO: 2702 - DNA, 73 bp, Homo sapiens
gaatagagaaaagaaatcactcataatcttaccatccttatcacagtcctattaatatattttgtgtattttt

SEQ ID NO: 2703 - DNA, 70 bp, Homo sapiens
gaaaaggtacagctaaaataatggtatgaaagattttaaaaaatgcacttgtatagggctttaccatgaa

SEQ ID NO: 2704 - DNA, 72 bp, Homo sapiens
ggtacagctaaaataatggtatgaaagattttaaaaaatgcacttgtatagggctttaccatgaatgaagct

SEQ ID NO: 2705 - DNA, 73 bp, Homo sapiens
aataatggtatgaaagattttaaaaaatgcacttgtatagggctttaccatgaatgaagcttacaggactaga

SEQ ID NO: 2706 - DNA, 74 bp, Homo sapiens
atgaaagattttaaaaaatgcacttgtatagggctttaccatgaatgaagcttacaggactagaagttgctctg

SEQ ID NO: 2707 - DNA, 75 bp, Homo sapiens
ggtgagtgaatgtgaaagcctgggacatttttgtacactactgatagggtttggctgtgtatccccactgaaatc

SEQ ID NO: 2708 - DNA, 76 bp, Homo sapiens
aatgtgaaagcctgggacatttttgtacactactgatagggtttggctgtgtatccccactgaaatctcatctcga

SEQ ID NO: 2709 - DNA, 79 bp, Homo sapiens
tgttctcatgatagcgagtgaattctcttgcggtctgatggttttgaaagtggcagttttttcctatgtacacattctc

SEQ ID NO: 2710 - DNA, 76 bp, Homo sapiens
atgatagcgagtgaattctcttgcggtctgatggttttgaaagtggcagttttttcctatgtacacattctctttc

SEQ ID NO: 2711 - DNA, 74 bp, Homo sapiens
agtgaattctcttgcggtctgatggttttgaaagtggcagttttttcctatgtacacattctctttctcttgct

SEQ ID NO: 2712 - DNA, 78 bp, Homo sapiens
tcttgcggtctgatggttttgaaagtggcagttttttcctatgtacacattctctttctcttgcttgctgctatgtaa

SEQ ID NO: 2713 - DNA, 78 bp, Homo sapiens
atggttttgaaagtggcagttttttcctatgtacacattctctttctcttgcttgctgctatgtaagatgtgcttgct

SEQ ID NO: 2714 - DNA, 82 bp, Homo sapiens
tggcagttttttcctatgtacacattctctttctcttgcttgctgctatgtaagatgtgcttgcttcccctcctgtgatgat

SEQ ID NO: 2715 - DNA, 81 bp, Homo sapiens
tttcctatgtacacattctctttctcttgcttgctgctatgtaagatgtgcttgcttcccctcctgtgatgattgaaagtt

SEQ ID NO: 2716 - DNA, 76 bp, Homo sapiens
ctttatagcagtgagagaatggactgctacaactactatagactttataaacattgtacacttaatgtacactaaa

SEQ ID NO: 2717 - DNA, 73 bp, Homo sapiens
atttattttaaaaattgctctgtcatgttactatggctattacatcattacgtcactaggcaataggaatttt

SEQ ID NO: 2718 - DNA, 74 bp, Homo sapiens
aaaaattgctctgtcatgttactatggctattacatcattacgtcactaggcaataggaattttttagttccat

SEQ ID NO: 2719 - DNA, 76 bp, Homo sapiens
ctgtcatgttactatggctattacatcattacgtcactaggcaataggaattttttagttccatttaatctcatgg

SEQ ID NO: 2720 - DNA, 75 bp, Homo sapiens
tgttactatggctattacatcattacgtcactaggcaataggaattttttagttccatttaatctcatgggacca

SEQ ID NO: 2721 - DNA, 75 bp, Homo sapiens
tattacatcattacgtcactaggcaataggaattttttagttccatttaatctcatgggaccaccactgtatatg

SEQ ID NO: 2722 - DNA, 72 bp, Homo sapiens
attacgtcactaggcaataggaattttttagttccatttaatctcatgggaccaccactgtatatgtggttg

SEQ ID NO: 2723 - DNA, 76 bp, Homo sapiens
caataggaattttttagttccatttaatctcatgggaccaccactgtatatgtggttgttgttatgcagactgcat

SEQ ID NO: 2724 - DNA, 78 bp, Homo sapiens
tttttagttccatttaatctcatgggaccaccactgtatatgtggttgttgttatgcagactgcattttgagagagac

SEQ ID NO: 2725 - DNA, 83 bp, Homo sapiens
ttccatttaatctcatgggaccaccactgtatatgtggttgttgttatgcagactgcattttgagagagaccacattcatata

SEQ ID NO: 2726 - DNA, 83 bp, Homo sapiens
tcatgggaccaccactgtatatgtggttgttgttatgcagactgcattttgagagagaccacattcatatagcttttcttata

SEQ ID NO: 2727 - DNA, 81 bp, Homo sapiens
ccactgtatatgtggttgttgttatgcagactgcattttgagagagaccacattcatatagcttttcttatagtacattgt

SEQ ID NO: 2728 - DNA, 78 bp, Homo sapiens
atgtggttgttgttatgcagactgcattttgagagagaccacattcatatagcttttcttatagtacattgttatttt

SEQ ID NO: 2729 - DNA, 76 bp, Homo sapiens
ttgttgttatgcagactgcattttgagagagaccacattcatatagcttttcttatagtacattgttatttttttt

SEQ ID NO: 2730 - DNA, 70 bp, Homo sapiens
aaattaaactttttataggtatgtatgtatagcaaaaaacagaatcaagtgctcagtaccatttgttgtt

SEQ ID NO: 2731 - DNA, 76 bp, Homo sapiens
ctttttataggtatgtatgtatagcaaaaaacagaatcaagtgctcagtaccatttgttgtttcagacatccactg

SEQ ID NO: 2732 - DNA, 77 bp, Homo sapiens
tatgtatgtatagcaaaaaacagaatcaagtgctcagtaccatttgttgtttcagacatccactggggttcttagaa

SEQ ID NO: 2733 - DNA, 75 bp, Homo sapiens
tagcaaaaaacagaatcaagtgctcagtaccatttgttgtttcagacatccactggggttcttagaatgtttctc

SEQ ID NO: 2734 - DNA, 74 bp, Homo sapiens
aaaacagaatcaagtgctcagtaccatttgttgtttcagacatccactggggttcttagaatgtttctcccatg

SEQ ID NO: 2735 - DNA, 73 bp, Homo sapiens
aagtgctcagtaccatttgttgtttcagacatccactggggttcttagaatgtttctcccatggataactggg

SEQ ID NO: 2736 - DNA, 72 bp, Homo sapiens
atttgttgtttcagacatccactggggttcttagaatgtttctcccatggataactgggggactactgcatt

SEQ ID NO: 2737 - DNA, 73 bp, Homo sapiens
ttgtttcagacatccactggggttcttagaatgtttctcccatggataactgggggactactgcatttaggag

SEQ ID NO: 2738 - DNA, 72 bp, Homo sapiens
atccactggggttcttagaatgtttctcccatggataactgggggactactgcatttaggaggtgactgaag

SEQ ID NO: 2739 - DNA, 75 bp, Homo sapiens
ttcttagaatgtttctcccatggataactgggggactactgcatttaggaggtgactgaagtggtcctgatgaaa

SEQ ID NO: 2740 - DNA, 76 bp, Homo sapiens
atgtttctcccatggataactgggggactactgcatttaggaggtgactgaagtggtcctgatgaaaggtgatgct

SEQ ID NO: 2741 - DNA, 76 bp, Homo sapiens
ggactactgcatttaggaggtgactgaagtggtcctgatgaaaggtgatgcttgctttaagtagggtaatagtgga

SEQ ID NO: 2742 - DNA, 76 bp, Homo sapiens
atttaggaggtgactgaagtggtcctgatgaaaggtgatgcttgctttaagtagggtaatagtggagatggagaga

SEQ ID NO: 2743 - DNA, 79 bp, Homo sapiens
aggtgactgaagtggtcctgatgaaaggtgatgcttgctttaagtagggtaatagtggagatggagagagagaggcaga

SEQ ID NO: 2744 - DNA, 80 bp, Homo sapiens
gtcctgatgaaaggtgatgcttgctttaagtagggtaatagtggagatggagagagagaggcagatctcaccagtattta

SEQ ID NO: 2745 - DNA, 78 bp, Homo sapiens
atgaaaggtgatgcttgctttaagtagggtaatagtggagatggagagagagaggcagatctcaccagtatttaggaa

SEQ ID NO: 2746 - DNA, 76 bp, Homo sapiens
atgcttgctttaagtagggtaatagtggagatggagagagagaggcagatctcaccagtatttaggaagaggaagg

SEQ ID NO: 2747 - DNA, 77 bp, Homo sapiens
ttaagtagggtaatagtggagatggagagagagaggcagatctcaccagtatttaggaagaggaagggcacaataca

SEQ ID NO: 2748 - DNA, 79 bp, Homo sapiens
taatagtggagatggagagagagaggcagatctcaccagtatttaggaagaggaagggcacaatacagttatggattaa

SEQ ID NO: 2749 - DNA, 76 bp, Homo sapiens
agagagagaggcagatctcaccagtatttaggaagaggaagggcacaatacagttatggattaaaagtgagattag

SEQ ID NO: 2750 - DNA, 73 bp, Homo sapiens
accagtatttaggaagaggaagggcacaatacagttatggattaaaagtgagattagggagtgaggcatgaag

SEQ ID NO: 2751 - DNA, 74 bp, Homo sapiens
tttaggaagaggaagggcacaatacagttatggattaaaagtgagattagggagtgaggcatgaagtggtcaaa

SEQ ID NO: 2752 - DNA, 76 bp, Homo sapiens
aagggcacaatacagttatggattaaaagtgagattagggagtgaggcatgaagtggtcaaagatgacgtatacta

SEQ ID NO: 2753 - DNA, 75 bp, Homo sapiens
aatacagttatggattaaaagtgagattagggagtgaggcatgaagtggtcaaagatgacgtatactaggtgtct

SEQ ID NO: 2754 - DNA, 80 bp, Homo sapiens
ttaaaagtgagattagggagtgaggcatgaagtggtcaaagatgacgtatactaggtgtcttgcgtgagcaatgtgtcat

SEQ ID NO: 2755 - DNA, 82 bp, Homo sapiens
agattagggagtgaggcatgaagtggtcaaagatgacgtatactaggtgtcttgcgtgagcaatgtgtcattgaaaatatca

SEQ ID NO: 2756 - DNA, 85 bp, Homo sapiens
tgaggcatgaagtggtcaaagatgacgtatactaggtgtcttgcgtgagcaatgtgtcattgaaaatatcattaccagtatatga

SEQ ID NO: 2757 - DNA, 79 bp, Homo sapiens
aagtggtcaaagatgacgtatactaggtgtcttgcgtgagcaatgtgtcattgaaaatatcattaccagtatatgaaaa

SEQ ID NO: 2758 - DNA, 80 bp, Homo sapiens
aaagatgacgtatactaggtgtcttgcgtgagcaatgtgtcattgaaaatatcattaccagtatatgaaaagagcaggaa

SEQ ID NO: 2759 - DNA, 81 bp, Homo sapiens
gtatactaggtgtcttgcgtgagcaatgtgtcattgaaaatatcattaccagtatatgaaaagagcaggaagagcagattt

SEQ ID NO: 2760 - DNA, 82 bp, Homo sapiens
gtgtcttgcgtgagcaatgtgtcattgaaaatatcattaccagtatatgaaaagagcaggaagagcagattttgtcataaat

SEQ ID NO: 2761 - DNA, 78 bp, Homo sapiens
aatgtgtcattgaaaatatcattaccagtatatgaaaagagcaggaagagcagattttgtcataaattgtggagcgtt

SEQ ID NO: 2762 - DNA, 79 bp, Homo sapiens
tgaaaatatcattaccagtatatgaaaagagcaggaagagcagattttgtcataaattgtggagcgtttcaagtgtcta

SEQ ID NO: 2763 - DNA, 79 bp, Homo sapiens
atatcattaccagtatatgaaaagagcaggaagagcagattttgtcataaattgtggagcgtttcaagtgtctatgtag

SEQ ID NO: 2764 - DNA, 78 bp, Homo sapiens
agtatatgaaaagagcaggaagagcagattttgtcataaattgtggagcgtttcaagtgtctatgtaggctgggtgag

SEQ ID NO: 2765 - DNA, 72 bp, Homo sapiens
aataaaataaagtgtttatgtagcatatagagttttatacctgaacctgaggacagatacaaatagataaaa

SEQ ID NO: 2766 - DNA, 74 bp, Homo sapiens
aagtgtttatgtagcatatagagttttatacctgaacctgaggacagatacaaatagataaaatttgggagtca

SEQ ID NO: 2767 - DNA, 75 bp, Homo sapiens
atgtagcatatagagttttatacctgaacctgaggacagatacaaatagataaaatttgggagtcactgttacat

SEQ ID NO: 2768 - DNA, 71 bp, Homo sapiens
atagagttttatacctgaacctgaggacagatacaaatagataaaatttgggagtcactgttacattttta

SEQ ID NO: 2769 - DNA, 70 bp, Homo sapiens
cctgaacctgaggacagatacaaatagataaaatttgggagtcactgttacatttttataatttagttgg

SEQ ID NO: 2770 - DNA, 71 bp, Homo sapiens
cctgaggacagatacaaatagataaaatttgggagtcactgttacatttttataatttagttggtaatgga

SEQ ID NO: 2771 - DNA, 68 bp, Homo sapiens
caaatagataaaatttgggagtcactgttacatttttataatttagttggtaatggaaatttggacaa

SEQ ID NO: 2772 - DNA, 70 bp, Homo sapiens
aatttgggagtcactgttacatttttataatttagttggtaatggaaatttggacaatgagtaagattgc

SEQ ID NO: 2773 - DNA, 72 bp, Homo sapiens
gtcactgttacatttttataatttagttggtaatggaaatttggacaatgagtaagattgcctagtgtttca

SEQ ID NO: 2774 - DNA, 72 bp, Homo sapiens
catttttataatttagttggtaatggaaatttggacaatgagtaagattgcctagtgtttcatgtgaaataa

SEQ ID NO: 2775 - DNA, 76 bp, Homo sapiens
tttagttggtaatggaaatttggacaatgagtaagattgcctagtgtttcatgtgaaataagatgacatcttaggc

SEQ ID NO: 2776 - DNA, 78 bp, Homo sapiens
ttggtaatggaaatttggacaatgagtaagattgcctagtgtttcatgtgaaataagatgacatcttaggccagagcc

SEQ ID NO: 2777 - DNA, 77 bp, Homo sapiens
aatttggacaatgagtaagattgcctagtgtttcatgtgaaataagatgacatcttaggccagagccctgaggaatt

SEQ ID NO: 2778 - DNA, 76 bp, Homo sapiens
agtaagattgcctagtgtttcatgtgaaataagatgacatcttaggccagagccctgaggaatttcaccatttaaa

SEQ ID NO: 2779 - DNA, 74 bp, Homo sapiens
attgcctagtgtttcatgtgaaataagatgacatcttaggccagagccctgaggaatttcaccatttaaaggtt

SEQ ID NO: 2780 - DNA, 76 bp, Homo sapiens
atgtgaaataagatgacatcttaggccagagccctgaggaatttcaccatttaaaggtttgatagggtgatcagaa

SEQ ID NO: 2781 - DNA, 73 bp, Homo sapiens
aaataagatgacatcttaggccagagccctgaggaatttcaccatttaaaggtttgatagggtgatcagaaag

SEQ ID NO: 2782 - DNA, 74 bp, Homo sapiens
acatcttaggccagagccctgaggaatttcaccatttaaaggtttgatagggtgatcagaaaggtgctgccaaa

SEQ ID NO: 2783 - DNA, 72 bp, Homo sapiens
gccctgaggaatttcaccatttaaaggtttgatagggtgatcagaaaggtgctgccaaagaggtaataggaa

SEQ ID NO: 2784 - DNA, 71 bp, Homo sapiens
aggaatttcaccatttaaaggtttgatagggtgatcagaaaggtgctgccaaagaggtaataggaaaatca

SEQ ID NO: 2785 - DNA, 72 bp, Homo sapiens
atttaaaggtttgatagggtgatcagaaaggtgctgccaaagaggtaataggaaaatcaggagagtgaaata

SEQ ID NO: 2786 - DNA, 76 bp, Homo sapiens
tttgatagggtgatcagaaaggtgctgccaaagaggtaataggaaaatcaggagagtgaaatactgaaaggcaaga

SEQ ID NO: 2787 - DNA, 73 bp, Homo sapiens
aaggtgctgccaaagaggtaataggaaaatcaggagagtgaaatactgaaaggcaagaagtatagtggtatta

SEQ ID NO: 2788 - DNA, 72 bp, Homo sapiens
aaagaggtaataggaaaatcaggagagtgaaatactgaaaggcaagaagtatagtggtattagcctgtttca

SEQ ID NO: 2789 - DNA, 71 bp, Homo sapiens
aaaatcaggagagtgaaatactgaaaggcaagaagtatagtggtattagcctgtttcaggttaaaggaata

SEQ ID NO: 2790 - DNA, 70 bp, Homo sapiens
agagtgaaatactgaaaggcaagaagtatagtggtattagcctgtttcaggttaaaggaatacctgaaac

SEQ ID NO: 2791 - DNA, 68 bp, Homo sapiens
aaatactgaaaggcaagaagtatagtggtattagcctgtttcaggttaaaggaatacctgaaactggg

SEQ ID NO: 2792 - DNA, 71 bp, Homo sapiens
gaggtttatttggttcacagttctgtaggctgtacaagtataccaccaacatctttgggctgaggaaactt

SEQ ID NO: 2793 - DNA, 73 bp, Homo sapiens
ttatttggttcacagttctgtaggctgtacaagtataccaccaacatctttgggctgaggaaacttttactca

SEQ ID NO: 2794 - DNA, 74 bp, Homo sapiens
ttctgtaggctgtacaagtataccaccaacatctttgggctgaggaaacttttactcatggggcagtgggaatg

SEQ ID NO: 2795 - DNA, 73 bp, Homo sapiens
taggctgtacaagtataccaccaacatctttgggctgaggaaacttttactcatggggcagtgggaatgggga

SEQ ID NO: 2796 - DNA, 70 bp, Homo sapiens
aagtataccaccaacatctttgggctgaggaaacttttactcatggggcagtgggaatggggaccaggag

SEQ ID NO: 2797 - DNA, 75 bp, Homo sapiens
ccaacatctttgggctgaggaaacttttactcatggggcagtgggaatggggaccaggagtgtcacatggtgaga

SEQ ID NO: 2798 - DNA, 75 bp, Homo sapiens
tgaggaaacttttactcatggggcagtgggaatggggaccaggagtgtcacatggtgagagaagggagcaaggtg

SEQ ID NO: 2799 - DNA, 74 bp, Homo sapiens
aaacttttactcatggggcagtgggaatggggaccaggagtgtcacatggtgagagaagggagcaaggtggcag

SEQ ID NO: 2800 - DNA, 76 bp, Homo sapiens
gggcagtgggaatggggaccaggagtgtcacatggtgagagaagggagcaaggtggcaggctctttttaccaatca

SEQ ID NO: 2801 - DNA, 80 bp, Homo sapiens
ggaatggggaccaggagtgtcacatggtgagagaagggagcaaggtggcaggctctttttaccaatcagatctcacatga

SEQ ID NO: 2802 - DNA, 81 bp, Homo sapiens
accaggagtgtcacatggtgagagaagggagcaaggtggcaggctctttttaccaatcagatctcacatgagctaacaaca

SEQ ID NO: 2803 - DNA, 81 bp, Homo sapiens
acatggtgagagaagggagcaaggtggcaggctctttttaccaatcagatctcacatgagctaacaacagcaagaaactca

SEQ ID NO: 2804 - DNA, 80 bp, Homo sapiens
agagaagggagcaaggtggcaggctctttttaccaatcagatctcacatgagctaacaacagcaagaaactcactcatta

SEQ ID NO: 2805 - DNA, 78 bp, Homo sapiens
aggtggcaggctctttttaccaatcagatctcacatgagctaacaacagcaagaaactcactcattaccacagggaaa

SEQ ID NO: 2806 - DNA, 77 bp, Homo sapiens
ctctttttaccaatcagatctcacatgagctaacaacagcaagaaactcactcattaccacagggaaaacaccaaga

SEQ ID NO: 2807 - DNA, 81 bp, Homo sapiens
tttaccaatcagatctcacatgagctaacaacagcaagaaactcactcattaccacagggaaaacaccaagacattcatga

SEQ ID NO: 2808 - DNA, 67 bp, Homo sapiens
agggatctgcccccattacccaaacaccttttgctagtttccaccttcaacattgggattacatttt

SEQ ID NO: 2809 - DNA, 68 bp, Homo sapiens
ccccattacccaaacaccttttgctagtttccaccttcaacattgggattacatttttacatgagatt

SEQ ID NO: 2810 - DNA, 70 bp, Homo sapiens
ctgcacccggcctcattaggcttttatggcttatgctttctgtacttttaatactatttcaacttaattt

SEQ ID NO: 2811 - DNA, 69 bp, Homo sapiens
cccggcctcattaggcttttatggcttatgctttctgtacttttaatactatttcaacttaattttcta

SEQ ID NO: 2812 - DNA, 67 bp, Homo sapiens
aggcttttatggcttatgctttctgtacttttaatactatttcaacttaattttctactccaatttt

SEQ ID NO: 2813 - DNA, 68 bp, Homo sapiens
atggcttatgctttctgtacttttaatactatttcaacttaattttctactccaattttttgttgtaa

SEQ ID NO: 2814 - DNA, 66 bp, Homo sapiens
ctttctgtacttttaatactatttcaacttaattttctactccaattttttgttgtaatttatata

SEQ ID NO: 2815 - DNA, 71 bp, Homo sapiens
taatactatttcaacttaattttctactccaattttttgttgtaatttatatatgtatgtaagtgtatata

SEQ ID NO: 2816 - DNA, 73 bp, Homo sapiens
ctgtgcccggcctatattactatatagtatgctgcaaaacctcttttggaaacaaagtgggatataaataata

SEQ ID NO: 2817 - DNA, 72 bp, Homo sapiens
cccggcctatattactatatagtatgctgcaaaacctcttttggaaacaaagtgggatataaataatactca

SEQ ID NO: 2818 - DNA, 74 bp, Homo sapiens
ctatatagtatgctgcaaaacctcttttggaaacaaagtgggatataaataatactcaagtgagactttcagga

SEQ ID NO: 2819 - DNA, 73 bp, Homo sapiens
agtatgctgcaaaacctcttttggaaacaaagtgggatataaataatactcaagtgagactttcaggaacata

SEQ ID NO: 2820 - DNA, 70 bp, Homo sapiens
acctcttttggaaacaaagtgggatataaataatactcaagtgagactttcaggaacatattcttcttgg

SEQ ID NO: 2821 - DNA, 73 bp, Homo sapiens
aaacaaagtgggatataaataatactcaagtgagactttcaggaacatattcttcttggtaagacagtgccac

SEQ ID NO: 2822 - DNA, 76 bp, Homo sapiens
gatataaataatactcaagtgagactttcaggaacatattcttcttggtaagacagtgccactgaaacttactgtg

SEQ ID NO: 2823 - DNA, 76 bp, Homo sapiens
ataatactcaagtgagactttcaggaacatattcttcttggtaagacagtgccactgaaacttactgtgtttcata

SEQ ID NO: 2824 - DNA, 74 bp, Homo sapiens
aagtgagactttcaggaacatattcttcttggtaagacagtgccactgaaacttactgtgtttcataagaagtg

SEQ ID NO: 2825 - DNA, 74 bp, Homo sapiens
tttcaggaacatattcttcttggtaagacagtgccactgaaacttactgtgtttcataagaagtggtagtactg

SEQ ID NO: 2826 - DNA, 73 bp, Homo sapiens
tcttcttggtaagacagtgccactgaaacttactgtgtttcataagaagtggtagtactggctctacttttat

SEQ ID NO: 2827 - DNA, 72 bp, Homo sapiens
tggtaagacagtgccactgaaacttactgtgtttcataagaagtggtagtactggctctacttttatttttg

SEQ ID NO: 2828 - DNA, 70 bp, Homo sapiens
agacagtgccactgaaacttactgtgtttcataagaagtggtagtactggctctacttttatttttggtt

SEQ ID NO: 2829 - DNA, 69 bp, Homo sapiens
gtgccactgaaacttactgtgtttcataagaagtggtagtactggctctacttttatttttggttttaa

SEQ ID NO: 2830 - DNA, 69 bp, Homo sapiens
aacttactgtgtttcataagaagtggtagtactggctctacttttatttttggttttaaattctgagca

SEQ ID NO: 2831 - DNA, 71 bp, Homo sapiens
actgtgtttcataagaagtggtagtactggctctacttttatttttggttttaaattctgagcatgagaag

SEQ ID NO: 2832 - DNA, 71 bp, Homo sapiens
gtttcataagaagtggtagtactggctctacttttatttttggttttaaattctgagcatgagaaggagag

SEQ ID NO: 2833 - DNA, 71 bp, Homo sapiens
ataagaagtggtagtactggctctacttttatttttggttttaaattctgagcatgagaaggagagggatc

SEQ ID NO: 2834 - DNA, 71 bp, Homo sapiens
gtagtactggctctacttttatttttggttttaaattctgagcatgagaaggagagggatccacaataaat

SEQ ID NO: 2835 - DNA, 74 bp, Homo sapiens
tggttttaaattctgagcatgagaaggagagggatccacaataaattttgagtactattgtatttgaataataa

SEQ ID NO: 2836 - DNA, 77 bp, Homo sapiens
ttctgagcatgagaaggagagggatccacaataaattttgagtactattgtatttgaataataataactgattatcc

SEQ ID NO: 2837 - DNA, 75 bp, Homo sapiens
gcatgagaaggagagggatccacaataaattttgagtactattgtatttgaataataataactgattatcctaat

SEQ ID NO: 2838 - DNA, 71 bp, Homo sapiens
ggagagggatccacaataaattttgagtactattgtatttgaataataataactgattatcctaattcctt

SEQ ID NO: 2839 - DNA, 71 bp, Homo sapiens
ccacaataaattttgagtactattgtatttgaataataataactgattatcctaattcctttcagaaggga

SEQ ID NO: 2840 - DNA, 79 bp, Homo sapiens
gagtactattgtatttgaataataataactgattatcctaattcctttcagaagggaaatcagcatgcatgagatcatt

SEQ ID NO: 2841 - DNA, 79 bp, Homo sapiens
gtatttgaataataataactgattatcctaattcctttcagaagggaaatcagcatgcatgagatcatttcttgccact

SEQ ID NO: 2842 - DNA, 77 bp, Homo sapiens
ataataactgattatcctaattcctttcagaagggaaatcagcatgcatgagatcatttcttgccacttaaattaaa

SEQ ID NO: 2843 - DNA, 76 bp, Homo sapiens
aactgattatcctaattcctttcagaagggaaatcagcatgcatgagatcatttcttgccacttaaattaaaattc

SEQ ID NO: 2844 - DNA, 75 bp, Homo sapiens
cctaattcctttcagaagggaaatcagcatgcatgagatcatttcttgccacttaaattaaaattctaaattcta

SEQ ID NO: 2845 - DNA, 76 bp, Homo sapiens
cagaagggaaatcagcatgcatgagatcatttcttgccacttaaattaaaattctaaattctagagttaggctctt

SEQ ID NO: 2846 - DNA, 73 bp, Homo sapiens
gcatgagatcatttcttgccacttaaattaaaattctaaattctagagttaggctctttaagagaaaccagac

SEQ ID NO: 2847 - DNA, 68 bp, Homo sapiens
aaattaaaattctaaattctagagttaggctctttaagagaaaccagacctacttgacggcagtcgtc

SEQ ID NO: 2848 - DNA, 73 bp, Homo sapiens
ttctaaattctagagttaggctctttaagagaaaccagacctacttgacggcagtcgtcctagctgaccataa

SEQ ID NO: 2849 - DNA, 74 bp, Homo sapiens
ttctagagttaggctctttaagagaaaccagacctacttgacggcagtcgtcctagctgaccataagacaggaa

SEQ ID NO: 2850 - DNA, 72 bp, Homo sapiens
tctttaagagaaaccagacctacttgacggcagtcgtcctagctgaccataagacaggaagtaaacaggtaa

SEQ ID NO: 2851 - DNA, 74 bp, Homo sapiens
aaccagacctacttgacggcagtcgtcctagctgaccataagacaggaagtaaacaggtaacaggcatatgtta

SEQ ID NO: 2852 - DNA, 73 bp, Homo sapiens
acctacttgacggcagtcgtcctagctgaccataagacaggaagtaaacaggtaacaggcatatgttaaaagc

SEQ ID NO: 2853 - DNA, 72 bp, Homo sapiens
agtcgtcctagctgaccataagacaggaagtaaacaggtaacaggcatatgttaaaagccttgccccattcc

SEQ ID NO: 2854 - DNA, 74 bp, Homo sapiens
agctgaccataagacaggaagtaaacaggtaacaggcatatgttaaaagccttgccccattcctgtgttgagag

SEQ ID NO: 2855 - DNA, 70 bp, Homo sapiens
agacaggaagtaaacaggtaacaggcatatgttaaaagccttgccccattcctgtgttgagaggaccttt

SEQ ID NO: 2856 - DNA, 68 bp, Homo sapiens
taaacaggtaacaggcatatgttaaaagccttgccccattcctgtgttgagaggacctttttgttttt

SEQ ID NO: 2857 - DNA, 67 bp, Homo sapiens
atatgttaaaagccttgccccattcctgtgttgagaggacctttttgttttttctcccgctccccag

SEQ ID NO: 2858 - DNA, 68 bp, Homo sapiens
attcctgtgttgagaggacctttttgttttttctcccgctccccaggtaaataatcccagcatctttg

SEQ ID NO: 2859 - DNA, 65 bp, Homo sapiens
agaggacctttttgttttttctcccgctccccaggtaaataatcccagcatctttgtgtttttat

SEQ ID NO: 2860 - DNA, 68 bp, Homo sapiens
ttgttttttctcccgctccccaggtaaataatcccagcatctttgtgtttttattaatgtaagattta

SEQ ID NO: 2861 - DNA, 67 bp, Homo sapiens
ttttctcccgctccccaggtaaataatcccagcatctttgtgtttttattaatgtaagatttaaaaa

SEQ ID NO: 2862 - DNA, 68 bp, Homo sapiens
cccaggtaaataatcccagcatctttgtgtttttattaatgtaagatttaaaaaattgtggcaggagt

SEQ ID NO: 2863 - DNA, 67 bp, Homo sapiens
aatcccagcatctttgtgtttttattaatgtaagatttaaaaaattgtggcaggagttttgttttgt

SEQ ID NO: 2864 - DNA, 68 bp, Homo sapiens
gcgcctggcccatggcaggaatttaaaagttaaaatgtactttaaaaaaattacttgtcctctgaaga

SEQ ID NO: 2865 - DNA, 69 bp, Homo sapiens
tggcccatggcaggaatttaaaagttaaaatgtactttaaaaaaattacttgtcctctgaagaagatca

SEQ ID NO: 2866 - DNA, 70 bp, Homo sapiens
ggaatttaaaagttaaaatgtactttaaaaaaattacttgtcctctgaagaagatcacatgtcatcaaga

SEQ ID NO: 2867 - DNA, 74 bp, Homo sapiens
taaaatgtactttaaaaaaattacttgtcctctgaagaagatcacatgtcatcaagaacaactgtttgtgaaga

SEQ ID NO: 2868 - DNA, 75 bp, Homo sapiens
ctttaaaaaaattacttgtcctctgaagaagatcacatgtcatcaagaacaactgtttgtgaagaatgttctgaa

SEQ ID NO: 2869 - DNA, 77 bp, Homo sapiens
aaattacttgtcctctgaagaagatcacatgtcatcaagaacaactgtttgtgaagaatgttctgaaatattcttgg

SEQ ID NO: 2870 - DNA, 79 bp, Homo sapiens
tctgaagaagatcacatgtcatcaagaacaactgtttgtgaagaatgttctgaaatattcttggggggcaactaggaca

SEQ ID NO: 2871 - DNA, 76 bp, Homo sapiens
agaagatcacatgtcatcaagaacaactgtttgtgaagaatgttctgaaatattcttggggggcaactaggacaaa

SEQ ID NO: 2872 - DNA, 79 bp, Homo sapiens
atgtcatcaagaacaactgtttgtgaagaatgttctgaaatattcttggggggcaactaggacaaatgctgctctcaca

SEQ ID NO: 2873 - DNA, 76 bp, Homo sapiens
atcaagaacaactgtttgtgaagaatgttctgaaatattcttggggggcaactaggacaaatgctgctctcacatt

SEQ ID NO: 2874 - DNA, 74 bp, Homo sapiens
aagaacaactgtttgtgaagaatgttctgaaatattcttggggggcaactaggacaaatgctgctctcacattt

SEQ ID NO: 2875 - DNA, 76 bp, Homo sapiens
acaactgtttgtgaagaatgttctgaaatattcttggggggcaactaggacaaatgctgctctcacattttcagta

SEQ ID NO: 2876 - DNA, 76 bp, Homo sapiens
tttgtgaagaatgttctgaaatattcttggggggcaactaggacaaatgctgctctcacattttcagtagttttga

SEQ ID NO: 2877 - DNA, 73 bp, Homo sapiens
aagaatgttctgaaatattcttggggggcaactaggacaaatgctgctctcacattttcagtagttttgacgt

SEQ ID NO: 2878 - DNA, 76 bp, Homo sapiens
tgaaatattcttggggggcaactaggacaaatgctgctctcacattttcagtagttttgacgttgcagggaagata

SEQ ID NO: 2879 - DNA, 74 bp, Homo sapiens
aaatattcttggggggcaactaggacaaatgctgctctcacattttcagtagttttgacgttgcagggaagata

SEQ ID NO: 2880 - DNA, 76 bp, Homo sapiens
tattcttggggggcaactaggacaaatgctgctctcacattttcagtagttttgacgttgcagggaagatactaca

SEQ ID NO: 2881 - DNA, 76 bp, Homo sapiens
gggcaactaggacaaatgctgctctcacattttcagtagttttgacgttgcagggaagatactacatttttgataa

SEQ ID NO: 2882 - DNA, 78 bp, Homo sapiens
taggacaaatgctgctctcacattttcagtagttttgacgttgcagggaagatactacatttttgataatctgaaata

SEQ ID NO: 2883 - DNA, 76 bp, Homo sapiens
ctgctctcacattttcagtagttttgacgttgcagggaagatactacatttttgataatctgaaatattcattacc

SEQ ID NO: 2884 - DNA, 73 bp, Homo sapiens
cattttcagtagttttgacgttgcagggaagatactacatttttgataatctgaaatattcattacctgtttc

SEQ ID NO: 2885 - DNA, 70 bp, Homo sapiens
gtagttttgacgttgcagggaagatactacatttttgataatctgaaatattcattacctgtttcttttt

SEQ ID NO: 2886 - DNA, 68 bp, Homo sapiens
ttttttttatagagatgtgaactttgtccccataaggatggagctttaaaaagaacagataatggggg

SEQ ID NO: 2887 - DNA, 73 bp, Homo sapiens
tttatagagatgtgaactttgtccccataaggatggagctttaaaaagaacagataatgggggtaagtgcaga

SEQ ID NO: 2888 - DNA, 70 bp, Homo sapiens
aactttgtccccataaggatggagctttaaaaagaacagataatgggggtaagtgcagagatttcttgaa

SEQ ID NO: 2889 - DNA, 68 bp, Homo sapiens
cccataaggatggagctttaaaaagaacagataatgggggtaagtgcagagatttcttgaaaaaaatt

SEQ ID NO: 2890 - DNA, 69 bp, Homo sapiens
ggatggagctttaaaaagaacagataatgggggtaagtgcagagatttcttgaaaaaaattttattgaa

SEQ ID NO: 2891 - DNA, 67 bp, Homo sapiens
ttaaaaagaacagataatgggggtaagtgcagagatttcttgaaaaaaattttattgaaaactggga

SEQ ID NO: 2892 - DNA, 69 bp, Homo sapiens
aagaacagataatgggggtaagtgcagagatttcttgaaaaaaattttattgaaaactgggacagtgga

SEQ ID NO: 2893 - DNA, 70 bp, Homo sapiens
gaacagataatgggggtaagtgcagagatttcttgaaaaaaattttattgaaaactgggacagtggagta

SEQ ID NO: 2894 - DNA, 69 bp, Homo sapiens
cagataatgggggtaagtgcagagatttcttgaaaaaaattttattgaaaactgggacagtggagtatt

SEQ ID NO: 2895 - DNA, 68 bp, Homo sapiens
gggtaagtgcagagatttcttgaaaaaaattttattgaaaactgggacagtggagtattttcaaatat

SEQ ID NO: 2896 - DNA, 69 bp, Homo sapiens
gtgcagagatttcttgaaaaaaattttattgaaaactgggacagtggagtattttcaaatatttggtag

SEQ ID NO: 2897 - DNA, 66 bp, Homo sapiens
agagatttcttgaaaaaaattttattgaaaactgggacagtggagtattttcaaatatttggtagt

SEQ ID NO: 2898 - DNA, 64 bp, Homo sapiens
cttgaaaaaaattttattgaaaactgggacagtggagtattttcaaatatttggtagtttattt

SEQ ID NO: 2899 - DNA, 63 bp, Homo sapiens
aaaaattttattgaaaactgggacagtggagtattttcaaatatttggtagtttattttattt

SEQ ID NO: 2900 - DNA, 68 bp, Homo sapiens
tttattttatcaaattaaacagcgttttctactcatttttaacagtggtggctataatttataaatcc

SEQ ID NO: 2901 - DNA, 70 bp, Homo sapiens
caaattaaacagcgttttctactcatttttaacagtggtggctataatttataaatccttattgtattga

SEQ ID NO: 2902 - DNA, 71 bp, Homo sapiens
taaacagcgttttctactcatttttaacagtggtggctataatttataaatccttattgtattgacccaca

SEQ ID NO: 2903 - DNA, 69 bp, Homo sapiens
ctactcatttttaacagtggtggctataatttataaatccttattgtattgacccacaatttttctact

SEQ ID NO: 2904 - DNA, 69 bp, Homo sapiens
aacagtggtggctataatttataaatccttattgtattgacccacaatttttctactttgtggacaaac

SEQ ID NO: 2905 - DNA, 71 bp, Homo sapiens
tggtggctataatttataaatccttattgtattgacccacaatttttctactttgtggacaaacttaagca

SEQ ID NO: 2906 - DNA, 68 bp, Homo sapiens
ataaatccttattgtattgacccacaatttttctactttgtggacaaacttaagcattgggtatttta

SEQ ID NO: 2907 - DNA, 73 bp, Homo sapiens
tccttattgtattgacccacaatttttctactttgtggacaaacttaagcattgggtattttatgcagtatga

SEQ ID NO: 2908 - DNA, 73 bp, Homo sapiens
gacccacaatttttctactttgtggacaaacttaagcattgggtattttatgcagtatgatctattaaataca

SEQ ID NO: 2909 - DNA, 73 bp, Homo sapiens
tttctactttgtggacaaacttaagcattgggtattttatgcagtatgatctattaaatacatacttctaatt

SEQ ID NO: 2910 - DNA, 72 bp, Homo sapiens
ctttgtggacaaacttaagcattgggtattttatgcagtatgatctattaaatacatacttctaatttaaat

SEQ ID NO: 2911 - DNA, 74 bp, Homo sapiens
taagcattgggtattttatgcagtatgatctattaaatacatacttctaatttaaattcttatgtttttggctg

SEQ ID NO: 2912 - DNA, 72 bp, Homo sapiens
gggtattttatgcagtatgatctattaaatacatacttctaatttaaattcttatgtttttggctgggcgag

SEQ ID NO: 2913 - DNA, 72 bp, Homo sapiens
ttgttgttgttagacctaaaatctgttgttttagattctttttttctgttttgtgtatctctagacagatga

SEQ ID NO: 2914 - DNA, 73 bp, Homo sapiens
tgttgttgttagacctaaaatctgttgttttagattctttttttctgttttgtgtatctctagacagatgatg

SEQ ID NO: 2915 - DNA, 74 bp, Homo sapiens
tagacctaaaatctgttgttttagattctttttttctgttttgtgtatctctagacagatgatgtttctagtga

SEQ ID NO: 2916 - DNA, 73 bp, Homo sapiens
atctgttgttttagattctttttttctgttttgtgtatctctagacagatgatgtttctagtgaatgttaatt

SEQ ID NO: 2917 - DNA, 73 bp, Homo sapiens
tagattctttttttctgttttgtgtatctctagacagatgatgtttctagtgaatgttaattttatttaactc

SEQ ID NO: 2918 - DNA, 75 bp, Homo sapiens
ttttctgttttgtgtatctctagacagatgatgtttctagtgaatgttaattttatttaactctgaagatctttg

SEQ ID NO: 2919 - DNA, 77 bp, Homo sapiens
gttttgtgtatctctagacagatgatgtttctagtgaatgttaattttatttaactctgaagatctttgttgcttga

SEQ ID NO: 2920 - DNA, 77 bp, Homo sapiens
atctctagacagatgatgtttctagtgaatgttaattttatttaactctgaagatctttgttgcttgaatataaaga

SEQ ID NO: 2921 - DNA, 74 bp, Homo sapiens
tgatgtttctagtgaatgttaattttatttaactctgaagatctttgttgcttgaatataaagaaatgttgact

SEQ ID NO: 2922 - DNA, 72 bp, Homo sapiens
tgaatgttaattttatttaactctgaagatctttgttgcttgaatataaagaaatgttgacttttaggctgg

SEQ ID NO: 2923 - DNA, 75 bp, Homo sapiens
ttttatttaactctgaagatctttgttgcttgaatataaagaaatgttgacttttaggctgggtgtgctgcctga

SEQ ID NO: 2924 - DNA, 77 bp, Homo sapiens
ttaactctgaagatctttgttgcttgaatataaagaaatgttgacttttaggctgggtgtgctgcctgacacctgta

SEQ ID NO: 2925 - DNA, 73 bp, Homo sapiens
aaaaaagctgacttctgtatcacattttggtatgctttcctatgaacccttgtatattactcattttcttctc

SEQ ID NO: 2926 - DNA, 75 bp, Homo sapiens
tgacttctgtatcacattttggtatgctttcctatgaacccttgtatattactcattttcttctccactttcagt

SEQ ID NO: 2927 - DNA, 75 bp, Homo sapiens
tcacattttggtatgctttcctatgaacccttgtatattactcattttcttctccactttcagttatctttgtca

SEQ ID NO: 2928 - DNA, 76 bp, Homo sapiens
tggtatgctttcctatgaacccttgtatattactcattttcttctccactttcagttatctttgtcagagaaatca

SEQ ID NO: 2929 - DNA, 73 bp, Homo sapiens
cctatgaacccttgtatattactcattttcttctccactttcagttatctttgtcagagaaatcatatttttc

SEQ ID NO: 2930 - DNA, 75 bp, Homo sapiens
cccttgtatattactcattttcttctccactttcagttatctttgtcagagaaatcatatttttctacagctcag

SEQ ID NO: 2931 - DNA, 77 bp, Homo sapiens
ctcattttcttctccactttcagttatctttgtcagagaaatcatatttttctacagctcagtactattctgaaatg

SEQ ID NO: 2932 - DNA, 80 bp, Homo sapiens
tctccactttcagttatctttgtcagagaaatcatatttttctacagctcagtactattctgaaatgtgtagacatgagt

SEQ ID NO: 2933 - DNA, 79 bp, Homo sapiens
cagttatctttgtcagagaaatcatatttttctacagctcagtactattctgaaatgtgtagacatgagtttattagac

SEQ ID NO: 2934 - DNA, 82 bp, Homo sapiens
tctttgtcagagaaatcatatttttctacagctcagtactattctgaaatgtgtagacatgagtttattagaccatggcata

SEQ ID NO: 2935 - DNA, 84 bp, Homo sapiens
ttgtcagagaaatcatatttttctacagctcagtactattctgaaatgtgtagacatgagtttattagaccatggcatatatga

SEQ ID NO: 2936 - DNA, 83 bp, Homo sapiens
agagaaatcatatttttctacagctcagtactattctgaaatgtgtagacatgagtttattagaccatggcatatatgatgag

SEQ ID NO: 2937 - DNA, 85 bp, Homo sapiens
tcatatttttctacagctcagtactattctgaaatgtgtagacatgagtttattagaccatggcatatatgatgaggcagctaaa

SEQ ID NO: 2938 - DNA, 82 bp, Homo sapiens
tttttctacagctcagtactattctgaaatgtgtagacatgagtttattagaccatggcatatatgatgaggcagctaaaaa

SEQ ID NO: 2939 - DNA, 80 bp, Homo sapiens
agctcagtactattctgaaatgtgtagacatgagtttattagaccatggcatatatgatgaggcagctaaaaaaaggtta

SEQ ID NO: 2940 - DNA, 80 bp, Homo sapiens
attctgaaatgtgtagacatgagtttattagaccatggcatatatgatgaggcagctaaaaaaaggttaagctgctatta

SEQ ID NO: 2941 - DNA, 78 bp, Homo sapiens
aaatgtgtagacatgagtttattagaccatggcatatatgatgaggcagctaaaaaaaggttaagctgctattactac

SEQ ID NO: 2942 - DNA, 78 bp, Homo sapiens
atgagtttattagaccatggcatatatgatgaggcagctaaaaaaaggttaagctgctattactactatactcttctc

SEQ ID NO: 2943 - DNA, 78 bp, Homo sapiens
tattagaccatggcatatatgatgaggcagctaaaaaaaggttaagctgctattactactatactcttctccattttg

SEQ ID NO: 2944 - DNA, 74 bp, Homo sapiens
atatatgatgaggcagctaaaaaaaggttaagctgctattactactatactcttctccattttgggtagccact

SEQ ID NO: 2945 - DNA, 68 bp, Homo sapiens
aaaaggttaagctgctattactactatactcttctccattttgggtagccacttctaaagtagttttg

SEQ ID NO: 2946 - DNA, 74 bp, Homo sapiens
ttaagctgctattactactatactcttctccattttgggtagccacttctaaagtagttttggcataggctaga

SEQ ID NO: 2947 - DNA, 72 bp, Homo sapiens
tattactactatactcttctccattttgggtagccacttctaaagtagttttggcataggctagagtaatgg

SEQ ID NO: 2948 - DNA, 69 bp, Homo sapiens
attttgggtagccacttctaaagtagttttggcataggctagagtaatggtgtgagtaaataaaaggga

SEQ ID NO: 2949 - DNA, 71 bp, Homo sapiens
gccacttctaaagtagttttggcataggctagagtaatggtgtgagtaaataaaagggaaaaatagaatga

SEQ ID NO: 2950 - DNA, 71 bp, Homo sapiens
agtagttttggcataggctagagtaatggtgtgagtaaataaaagggaaaaatagaatgattttggctaga

SEQ ID NO: 2951 - DNA, 74 bp, Homo sapiens
ttggcataggctagagtaatggtgtgagtaaataaaagggaaaaatagaatgattttggctagatatatatatt

SEQ ID NO: 2952 - DNA, 71 bp, Homo sapiens
ctagagtaatggtgtgagtaaataaaagggaaaaatagaatgattttggctagatatatatattttacagt

SEQ ID NO: 2953 - DNA, 72 bp, Homo sapiens
tgtgagtaaataaaagggaaaaatagaatgattttggctagatatatatattttacagtttaatcttcagac

SEQ ID NO: 2954 - DNA, 74 bp, Homo sapiens
aagggaaaaatagaatgattttggctagatatatatattttacagtttaatcttcagactatgttatacagtca

SEQ ID NO: 2955 - DNA, 78 bp, Homo sapiens
tagaatgattttggctagatatatatattttacagtttaatcttcagactatgttatacagtcagattgtacagaatt

SEQ ID NO: 2956 - DNA, 76 bp, Homo sapiens
gattttggctagatatatatattttacagtttaatcttcagactatgttatacagtcagattgtacagaatttaaa

SEQ ID NO: 2957 - DNA, 74 bp, Homo sapiens
atatatattttacagtttaatcttcagactatgttatacagtcagattgtacagaatttaaaaatatgttgaaa

SEQ ID NO: 2958 - DNA, 74 bp, Homo sapiens
tacagtttaatcttcagactatgttatacagtcagattgtacagaatttaaaaatatgttgaaaactcttcctg

SEQ ID NO: 2959 - DNA, 74 bp, Homo sapiens
tcttcagactatgttatacagtcagattgtacagaatttaaaaatatgttgaaaactcttcctgttattcctct

SEQ ID NO: 2960 - DNA, 72 bp, Homo sapiens
gactatgttatacagtcagattgtacagaatttaaaaatatgttgaaaactcttcctgttattcctcttccc

SEQ ID NO: 2961 - DNA, 73 bp, Homo sapiens
atacagtcagattgtacagaatttaaaaatatgttgaaaactcttcctgttattcctcttccccatctgccca

SEQ ID NO: 2962 - DNA, 73 bp, Homo sapiens
tgaaaactcttcctgttattcctcttccccatctgcccagtttatcaatagttttcctgctactatgtaataa

SEQ ID NO: 2963 - DNA, 72 bp, Homo sapiens
tcttcctgttattcctcttccccatctgcccagtttatcaatagttttcctgctactatgtaataattactt

SEQ ID NO: 2964 - DNA, 75 bp, Homo sapiens
ctcttccccatctgcccagtttatcaatagttttcctgctactatgtaataattactttcttgcatatctttcta

SEQ ID NO: 2965 - DNA, 73 bp, Homo sapiens
cccatctgcccagtttatcaatagttttcctgctactatgtaataattactttcttgcatatctttctaggtt

SEQ ID NO: 2966 - DNA, 75 bp, Homo sapiens
atagttttcctgctactatgtaataattactttcttgcatatctttctaggtttcttttgcatattcaaatgtga

SEQ ID NO: 2967 - DNA, 75 bp, Homo sapiens
ctgctactatgtaataattactttcttgcatatctttctaggtttcttttgcatattcaaatgtgaataaagact

SEQ ID NO: 2968 - DNA, 72 bp, Homo sapiens
taattactttcttgcatatctttctaggtttcttttgcatattcaaatgtgaataaagacttatttactccc

SEQ ID NO: 2969 - DNA, 73 bp, Homo sapiens
ctttcttgcatatctttctaggtttcttttgcatattcaaatgtgaataaagacttatttactccctccatct

SEQ ID NO: 2970 - DNA, 71 bp, Homo sapiens
ttctaggtttcttttgcatattcaaatgtgaataaagacttatttactccctccatctttatacaaatggg

SEQ ID NO: 2971 - DNA, 70 bp, Homo sapiens
ggtttcttttgcatattcaaatgtgaataaagacttatttactccctccatctttatacaaatgggttaa

SEQ ID NO: 2972 - DNA, 73 bp, Homo sapiens
ttcaaatgtgaataaagacttatttactccctccatctttatacaaatgggttaatattatatactcttctgc

SEQ ID NO: 2973 - DNA, 72 bp, Homo sapiens
atgtgaataaagacttatttactccctccatctttatacaaatgggttaatattatatactcttctgcctct

SEQ ID NO: 2974 - DNA, 70 bp, Homo sapiens
agacttatttactccctccatctttatacaaatgggttaatattatatactcttctgcctcttaatttat

SEQ ID NO: 2975 - DNA, 72 bp, Homo sapiens
actccctccatctttatacaaatgggttaatattatatactcttctgcctcttaatttatttcactgaacaa

SEQ ID NO: 2976 - DNA, 72 bp, Homo sapiens
tctttatacaaatgggttaatattatatactcttctgcctcttaatttatttcactgaacaatttatctgtt

SEQ ID NO: 2977 - DNA, 71 bp, Homo sapiens
atgggttaatattatatactcttctgcctcttaatttatttcactgaacaatttatctgttttttttgaga

SEQ ID NO: 2978 - DNA, 78 bp, Homo sapiens
tttctttttaaccatgttatctaatatctaatcaatcagttcttgatgcactttctgatcttctactttgatgactaa

SEQ ID NO: 2979 - DNA, 82 bp, Homo sapiens
accatgttatctaatatctaatcaatcagttcttgatgcactttctgatcttctactttgatgactaactcttgtatgtatg

SEQ ID NO: 2980 - DNA, 82 bp, Homo sapiens
ctaatatctaatcaatcagttcttgatgcactttctgatcttctactttgatgactaactcttgtatgtatgtcattttgct

SEQ ID NO: 2981 - DNA, 83 bp, Homo sapiens
ctaatcaatcagttcttgatgcactttctgatcttctactttgatgactaactcttgtatgtatgtcattttgcttgtataca

SEQ ID NO: 2982 - DNA, 83 bp, Homo sapiens
tcagttcttgatgcactttctgatcttctactttgatgactaactcttgtatgtatgtcattttgcttgtatacaagtatatc

SEQ ID NO: 2983 - DNA, 81 bp, Homo sapiens
atgcactttctgatcttctactttgatgactaactcttgtatgtatgtcattttgcttgtatacaagtatatctataggat

SEQ ID NO: 2984 - DNA, 77 bp, Homo sapiens
cttctactttgatgactaactcttgtatgtatgtcattttgcttgtatacaagtatatctataggattattaatttc

SEQ ID NO: 2985 - DNA, 78 bp, Homo sapiens
gatgactaactcttgtatgtatgtcattttgcttgtatacaagtatatctataggattattaatttccataggtggaa

SEQ ID NO: 2986 - DNA, 77 bp, Homo sapiens
ctcttgtatgtatgtcattttgcttgtatacaagtatatctataggattattaatttccataggtggaaacattgag

SEQ ID NO: 2987 - DNA, 75 bp, Homo sapiens
tgtcattttgcttgtatacaagtatatctataggattattaatttccataggtggaaacattgagtcaaaggagt

SEQ ID NO: 2988 - DNA, 73 bp, Homo sapiens
gcttgtatacaagtatatctataggattattaatttccataggtggaaacattgagtcaaaggagttttgccg

SEQ ID NO: 2989 - DNA, 70 bp, Homo sapiens
caagtatatctataggattattaatttccataggtggaaacattgagtcaaaggagttttgccgttaatt

SEQ ID NO: 2990 - DNA, 71 bp, Homo sapiens
taggattattaatttccataggtggaaacattgagtcaaaggagttttgccgttaattttgatagatagtc

SEQ ID NO: 2991 - DNA, 70 bp, Homo sapiens
ggattattaatttccataggtggaaacattgagtcaaaggagttttgccgttaattttgatagatagtcc

SEQ ID NO: 2992 - DNA, 69 bp, Homo sapiens
aatttccataggtggaaacattgagtcaaaggagttttgccgttaattttgatagatagtcccaaatta

SEQ ID NO: 2993 - DNA, 71 bp, Homo sapiens
ttccataggtggaaacattgagtcaaaggagttttgccgttaattttgatagatagtcccaaattatttgc

SEQ ID NO: 2994 - DNA, 69 bp, Homo sapiens
ttgagtcaaaggagttttgccgttaattttgatagatagtcccaaattatttgccctgtagttttacca

SEQ ID NO: 2995 - DNA, 68 bp, Homo sapiens
gagtcaaaggagttttgccgttaattttgatagatagtcccaaattatttgccctgtagttttaccaa

SEQ ID NO: 2996 - DNA, 69 bp, Homo sapiens
ggagttttgccgttaattttgatagatagtcccaaattatttgccctgtagttttaccaatatatgttc

SEQ ID NO: 2997 - DNA, 69 bp, Homo sapiens
tttgccgttaattttgatagatagtcccaaattatttgccctgtagttttaccaatatatgttcccagt

SEQ ID NO: 2998 - DNA, 72 bp, Homo sapiens
gatagatagtcccaaattatttgccctgtagttttaccaatatatgttcccagttttaccaatatatgaata

SEQ ID NO: 2999 - DNA, 68 bp, Homo sapiens
ccaaattatttgccctgtagttttaccaatatatgttcccagttttaccaatatatgaataaaaaagc

SEQ ID NO: 3000 - DNA, 70 bp, Homo sapiens
gccctgtagttttaccaatatatgttcccagttttaccaatatatgaataaaaaagctgttctacatacc

SEQ ID NO: 3001 - DNA, 69 bp, Homo sapiens
tgttcccagttttaccaatatatgaataaaaaagctgttctacatacctttggtaatctaacaggtaaa

SEQ ID NO: 3002 - DNA, 67 bp, Homo sapiens
cagttttaccaatatatgaataaaaaagctgttctacatacctttggtaatctaacaggtaaaagtt

SEQ ID NO: 3003 - DNA, 70 bp, Homo sapiens
atgaataaaaaagctgttctacatacctttggtaatctaacaggtaaaagtttgtatatccaagcagtag

SEQ ID NO: 3004 - DNA, 71 bp, Homo sapiens
gttctacatacctttggtaatctaacaggtaaaagtttgtatatccaagcagtagttttgcatttctctta

SEQ ID NO: 3005 - DNA, 72 bp, Homo sapiens
ggtaatctaacaggtaaaagtttgtatatccaagcagtagttttgcatttctcttaatattagtgaggttca

SEQ ID NO: 3006 - DNA, 76 bp, Homo sapiens
tttgtatatccaagcagtagttttgcatttctcttaatattagtgaggttcacatctttttatagtttgaagagca

SEQ ID NO: 3007 - DNA, 73 bp, Homo sapiens
ccaagcagtagttttgcatttctcttaatattagtgaggttcacatctttttatagtttgaagagcagtttgt

SEQ ID NO: 3008 - DNA, 70 bp, Homo sapiens
gtagttttgcatttctcttaatattagtgaggttcacatctttttatagtttgaagagcagtttgttttt

SEQ ID NO: 3009 - DNA, 73 bp, Homo sapiens
tctcttaatattagtgaggttcacatctttttatagtttgaagagcagtttgttttttctcttctgtggtctg

SEQ ID NO: 3010 - DNA, 70 bp, Homo sapiens
aatattagtgaggttcacatctttttatagtttgaagagcagtttgttttttctcttctgtggtctgttt

SEQ ID NO: 3011 - DNA, 69 bp, Homo sapiens
aggttcacatctttttatagtttgaagagcagtttgttttttctcttctgtggtctgttttttgacttg

SEQ ID NO: 3012 - DNA, 70 bp, Homo sapiens
tatagtttgaagagcagtttgttttttctcttctgtggtctgttttttgacttggttgttgatctttttc

SEQ ID NO: 3013 - DNA, 68 bp, Homo sapiens
tttgaagagcagtttgttttttctcttctgtggtctgttttttgacttggttgttgatctttttcttt

SEQ ID NO: 3014 - DNA, 75 bp, Homo sapiens
atgcccagccacaattgttgatctttttactttgatttattggagtgttcataaggagcccctcatatattatta

SEQ ID NO: 3015 - DNA, 76 bp, Homo sapiens
cagccacaattgttgatctttttactttgatttattggagtgttcataaggagcccctcatatattattatgctgt

SEQ ID NO: 3016 - DNA, 76 bp, Homo sapiens
gatctttttactttgatttattggagtgttcataaggagcccctcatatattattatgctgttttgatatgagttg

SEQ ID NO: 3017 - DNA, 75 bp, Homo sapiens
ctttgatttattggagtgttcataaggagcccctcatatattattatgctgttttgatatgagttggactaattt

SEQ ID NO: 3018 - DNA, 76 bp, Homo sapiens
tttattggagtgttcataaggagcccctcatatattattatgctgttttgatatgagttggactaatttttgccca

SEQ ID NO: 3019 - DNA, 77 bp, Homo sapiens
ttcataaggagcccctcatatattattatgctgttttgatatgagttggactaatttttgcccatctggtcagtctt

SEQ ID NO: 3020 - DNA, 78 bp, Homo sapiens
cctcatatattattatgctgttttgatatgagttggactaatttttgcccatctggtcagtctttgtttatattgtgc

SEQ ID NO: 3021 - DNA, 75 bp, Homo sapiens
tattatgctgttttgatatgagttggactaatttttgcccatctggtcagtctttgtttatattgtgctttaaaa

SEQ ID NO: 3022 - DNA, 70 bp, Homo sapiens
ttttgatatgagttggactaatttttgcccatctggtcagtctttgtttatattgtgctttaaaaaaatt

SEQ ID NO: 3023 - DNA, 69 bp, Homo sapiens
aaatttttttttaccgtgcatgagtttctgattttaattttgttcaatttattaatctttcatgatgtc

SEQ ID NO: 3024 - DNA, 73 bp, Homo sapiens
tttttaccgtgcatgagtttctgattttaattttgttcaatttattaatctttcatgatgtctgtattttgag

SEQ ID NO: 3025 - DNA, 76 bp, Homo sapiens
tgcatgagtttctgattttaattttgttcaatttattaatctttcatgatgtctgtattttgagttattagttaga

SEQ ID NO: 3026 - DNA, 71 bp, Homo sapiens
ctgattttaattttgttcaatttattaatctttcatgatgtctgtattttgagttattagttagaaaggcc

SEQ ID NO: 3027 - DNA, 73 bp, Homo sapiens
tgttcaatttattaatctttcatgatgtctgtattttgagttattagttagaaaggccttcactattccaaag

SEQ ID NO: 3028 - DNA, 70 bp, Homo sapiens
aatttattaatctttcatgatgtctgtattttgagttattagttagaaaggccttcactattccaaagtt

SEQ ID NO: 3029 - DNA, 67 bp, Homo sapiens
ctttcatgatgtctgtattttgagttattagttagaaaggccttcactattccaaagtttttttttt

SEQ ID NO: 3030 - DNA, 75 bp, Homo sapiens
ttttttaagtgacaggttttcattctgttgttcaggctgaattacaagtagcaggatcctagctcactgtagctt

SEQ ID NO: 3031 - DNA, 78 bp, Homo sapiens
taagtgacaggttttcattctgttgttcaggctgaattacaagtagcaggatcctagctcactgtagctttgtagtcc

SEQ ID NO: 3032 - DNA, 78 bp, Homo sapiens
gttttcattctgttgttcaggctgaattacaagtagcaggatcctagctcactgtagctttgtagtcctgggctcaag

SEQ ID NO: 3033 - DNA, 70 bp, Homo sapiens
ccactgcacctggtgtaaaccttccatcttattaaatatttcctattctggtttgtttcacttgttccat

SEQ ID NO: 3034 - DNA, 70 bp, Homo sapiens
gcacctggtgtaaaccttccatcttattaaatatttcctattctggtttgtttcacttgttccattctac

SEQ ID NO: 3035 - DNA, 69 bp, Homo sapiens
ccttccatcttattaaatatttcctattctggtttgtttcacttgttccattctaccctattagcttaa

SEQ ID NO: 3036 - DNA, 66 bp, Homo sapiens
cttattaaatatttcctattctggtttgtttcacttgttccattctaccctattagcttaaaaaag

SEQ ID NO: 3037 - DNA, 70 bp, Homo sapiens
tcctattctggtttgtttcacttgttccattctaccctattagcttaaaaaagttaacattactatgtgc

SEQ ID NO: 3038 - DNA, 67 bp, Homo sapiens
ctggtttgtttcacttgttccattctaccctattagcttaaaaaagttaacattactatgtgctttt

SEQ ID NO: 3039 - DNA, 67 bp, Homo sapiens
tttcacttgttccattctaccctattagcttaaaaaagttaacattactatgtgcttttttcctctt

SEQ ID NO: 3040 - DNA, 70 bp, Homo sapiens
ccattctaccctattagcttaaaaaagttaacattactatgtgcttttttcctctttctgaatcctctga

SEQ ID NO: 3041 - DNA, 67 bp, Homo sapiens
cctattagcttaaaaaagttaacattactatgtgcttttttcctctttctgaatcctctgaaacttt

SEQ ID NO: 3042 - DNA, 70 bp, Homo sapiens
aagttaacattactatgtgcttttttcctctttctgaatcctctgaaacttttaggatactgtaaattca

SEQ ID NO: 3043 - DNA, 73 bp, Homo sapiens
cttttttcctctttctgaatcctctgaaacttttaggatactgtaaattcacttgtccatctccagacatata

SEQ ID NO: 3044 - DNA, 73 bp, Homo sapiens
cctctttctgaatcctctgaaacttttaggatactgtaaattcacttgtccatctccagacatatattttatt

SEQ ID NO: 3045 - DNA, 73 bp, Homo sapiens
cctctgaaacttttaggatactgtaaattcacttgtccatctccagacatatattttatttttgtcatgtact

SEQ ID NO: 3046 - DNA, 75 bp, Homo sapiens
cttttaggatactgtaaattcacttgtccatctccagacatatattttatttttgtcatgtactttcattctctg

SEQ ID NO: 3047 - DNA, 76 bp, Homo sapiens
gatactgtaaattcacttgtccatctccagacatatattttatttttgtcatgtactttcattctctgtttcttta

SEQ ID NO: 3048 - DNA, 76 bp, Homo sapiens
tcacttgtccatctccagacatatattttatttttgtcatgtactttcattctctgtttctttaagaattatagtg

SEQ ID NO: 3049 - DNA, 72 bp, Homo sapiens
ccatctccagacatatattttatttttgtcatgtactttcattctctgtttctttaagaattatagtggttt

SEQ ID NO: 3050 - DNA, 70 bp, Homo sapiens
tattttatttttgtcatgtactttcattctctgtttctttaagaattatagtggttttgtcaggtgtttg

SEQ ID NO: 3051 - DNA, 73 bp, Homo sapiens
gtactttcattctctgtttctttaagaattatagtggttttgtcaggtgtttgttgaggattatgctagtcac

SEQ ID NO: 3052 - DNA, 72 bp, Homo sapiens
ttaagaattatagtggttttgtcaggtgtttgttgaggattatgctagtcacttaaaatgaaacagtttgtg

SEQ ID NO: 3053 - DNA, 71 bp, Homo sapiens
gtggttttgtcaggtgtttgttgaggattatgctagtcacttaaaatgaaacagtttgtgtaaatttggtg

SEQ ID NO: 3054 - DNA, 71 bp, Homo sapiens
tttgtcaggtgtttgttgaggattatgctagtcacttaaaatgaaacagtttgtgtaaatttggtgttatt

SEQ ID NO: 3055 - DNA, 70 bp, Homo sapiens
gtttgttgaggattatgctagtcacttaaaatgaaacagtttgtgtaaatttggtgttatttttctttga

SEQ ID NO: 3056 - DNA, 72 bp, Homo sapiens
gattatgctagtcacttaaaatgaaacagtttgtgtaaatttggtgttatttttctttgaattctatataga

SEQ ID NO: 3057 - DNA, 69 bp, Homo sapiens
cttaaaatgaaacagtttgtgtaaatttggtgttatttttctttgaattctatatagaacttcgtgaga

SEQ ID NO: 3058 - DNA, 69 bp, Homo sapiens
gaaacagtttgtgtaaatttggtgttatttttctttgaattctatatagaacttcgtgagaaactgaaa

SEQ ID NO: 3059 - DNA, 69 bp, Homo sapiens
tgtgtaaatttggtgttatttttctttgaattctatatagaacttcgtgagaaactgaaacttttctgg

SEQ ID NO: 3060 - DNA, 67 bp, Homo sapiens
gttatttttctttgaattctatatagaacttcgtgagaaactgaaacttttctgggaaaatttttga

SEQ ID NO: 3061 - DNA, 67 bp, Homo sapiens
ctttgaattctatatagaacttcgtgagaaactgaaacttttctgggaaaatttttgataaattcgt

SEQ ID NO: 3062 - DNA, 65 bp, Homo sapiens
attctatatagaacttcgtgagaaactgaaacttttctgggaaaatttttgataaattcgttttt

SEQ ID NO: 3063 - DNA, 64 bp, Homo sapiens
gaacttcgtgagaaactgaaacttttctgggaaaatttttgataaattcgttttttggcaaaat

SEQ ID NO: 3064 - DNA, 64 bp, Homo sapiens
ctgaaacttttctgggaaaatttttgataaattcgttttttggcaaaattatagggacattcct

SEQ ID NO: 3065 - DNA, 63 bp, Homo sapiens
ttttctgggaaaatttttgataaattcgttttttggcaaaattatagggacattccttttccc

SEQ ID NO: 3066 - DNA, 62 bp, Homo sapiens
tttttgataaattcgttttttggcaaaattatagggacattccttttccccctttcctttcc

SEQ ID NO: 3067 - DNA, 60 bp, Homo sapiens
attcgttttttggcaaaattatagggacattccttttccccctttcctttccctttccct

SEQ ID NO: 3068 - DNA, 69 bp, Homo sapiens
aggcttgagcccttgggcctgacctatttttataaacttaagtcaattttggtgcgctctatttttcca

SEQ ID NO: 3069 - DNA, 67 bp, Homo sapiens
agcccttgggcctgacctatttttataaacttaagtcaattttggtgcgctctatttttccaagaaa

SEQ ID NO: 3070 - DNA, 67 bp, Homo sapiens
ggcctgacctatttttataaacttaagtcaattttggtgcgctctatttttccaagaaatttaacta

SEQ ID NO: 3071 - DNA, 70 bp, Homo sapiens
tataaacttaagtcaattttggtgcgctctatttttccaagaaatttaactactttgtataagttgctga

SEQ ID NO: 3072 - DNA, 70 bp, Homo sapiens
agtcaattttggtgcgctctatttttccaagaaatttaactactttgtataagttgctgaaattgttgga

SEQ ID NO: 3073 - DNA, 69 bp, Homo sapiens
attttggtgcgctctatttttccaagaaatttaactactttgtataagttgctgaaattgttggactaa

SEQ ID NO: 3074 - DNA, 71 bp, Homo sapiens
gctctatttttccaagaaatttaactactttgtataagttgctgaaattgttggactaacattgccaatag

SEQ ID NO: 3075 - DNA, 68 bp, Homo sapiens
ccaagaaatttaactactttgtataagttgctgaaattgttggactaacattgccaatagtatttttt

SEQ ID NO: 3076 - DNA, 70 bp, Homo sapiens
tattattattttgttaattttgctagcaatggtagtaattaccccgttgttattcctgatgttggtgact

SEQ ID NO: 3077 - DNA, 71 bp, Homo sapiens
ttgttaattttgctagcaatggtagtaattaccccgttgttattcctgatgttggtgacttgtgttctggt

SEQ ID NO: 3078 - DNA, 69 bp, Homo sapiens
aattttgctagcaatggtagtaattaccccgttgttattcctgatgttggtgacttgtgttctggtttt

SEQ ID NO: 3079 - DNA, 67 bp, Homo sapiens
caatggtagtaattaccccgttgttattcctgatgttggtgacttgtgttctggttttttctttgtt

SEQ ID NO: 3080 - DNA, 64 bp, Homo sapiens
ttatttttttgaccagtccaaatagaattgttcagttttattgacctttttaaagaaagttttg

SEQ ID NO: 3081 - DNA, 64 bp, Homo sapiens
tttgaccagtccaaatagaattgttcagttttattgacctttttaaagaaagttttgggttttg

SEQ ID NO: 3082 - DNA, 62 bp, Homo sapiens
gtccaaatagaattgttcagttttattgacctttttaaagaaagttttgggttttgttaatt

SEQ ID NO: 3083 - DNA, 66 bp, Homo sapiens
ttgttaattttttttgccatctccctgttttctattttgttaaacttctgctctttattatttcct

SEQ ID NO: 3084 - DNA, 66 bp, Homo sapiens
ctttattatttccttcctagtacttactatgtgttacattttcctcttgttttctaacttataaag

SEQ ID NO: 3085 - DNA, 66 bp, Homo sapiens
tttccttcctagtacttactatgtgttacattttcctcttgttttctaacttataaaggtggaacc

SEQ ID NO: 3086 - DNA, 66 bp, Homo sapiens
cctagtacttactatgtgttacattttcctcttgttttctaacttataaaggtggaaccttaggtc

SEQ ID NO: 3087 - DNA, 64 bp, Homo sapiens
actatgtgttacattttcctcttgttttctaacttataaaggtggaaccttaggtcttttattt

SEQ ID NO: 3088 - DNA, 64 bp, Homo sapiens
tttcctcttgttttctaacttataaaggtggaaccttaggtcttttattttagatattcttttc

SEQ ID NO: 3089 - DNA, 65 bp, Homo sapiens
cttgttttctaacttataaaggtggaaccttaggtcttttattttagatattcttttctaatgaa

SEQ ID NO: 3090 - DNA, 69 bp, Homo sapiens
tctaacttataaaggtggaaccttaggtcttttattttagatattcttttctaatgaaaatgtatatgc

SEQ ID NO: 3091 - DNA, 69 bp, Homo sapiens
acttataaaggtggaaccttaggtcttttattttagatattcttttctaatgaaaatgtatatgctgta

SEQ ID NO: 3092 - DNA, 70 bp, Homo sapiens
ggtggaaccttaggtcttttattttagatattcttttctaatgaaaatgtatatgctgtaagttcctctc

SEQ ID NO: 3093 - DNA, 71 bp, Homo sapiens
aaccttaggtcttttattttagatattcttttctaatgaaaatgtatatgctgtaagttcctctctattgc

SEQ ID NO: 3094 - DNA, 73 bp, Homo sapiens
ggtcttttattttagatattcttttctaatgaaaatgtatatgctgtaagttcctctctattgcttttattga

SEQ ID NO: 3095 - DNA, 74 bp, Homo sapiens
attttagatattcttttctaatgaaaatgtatatgctgtaagttcctctctattgcttttattgaatcccacaa

SEQ ID NO: 3096 - DNA, 74 bp, Homo sapiens
tttagatattcttttctaatgaaaatgtatatgctgtaagttcctctctattgcttttattgaatcccacaagt

SEQ ID NO: 3097 - DNA, 75 bp, Homo sapiens
gatattcttttctaatgaaaatgtatatgctgtaagttcctctctattgcttttattgaatcccacaagttgtgt

SEQ ID NO: 3098 - DNA, 72 bp, Homo sapiens
cttttctaatgaaaatgtatatgctgtaagttcctctctattgcttttattgaatcccacaagttgtgtttt

SEQ ID NO: 3099 - DNA, 73 bp, Homo sapiens
ttctaatgaaaatgtatatgctgtaagttcctctctattgcttttattgaatcccacaagttgtgtttttttg

SEQ ID NO: 3100 - DNA, 75 bp, Homo sapiens
catgaaccactgtccccagcctatgtctcaagttttgataaatttcatatttgttgccattccgttcaagacatt

SEQ ID NO: 3101 - DNA, 73 bp, Homo sapiens
tgtccccagcctatgtctcaagttttgataaatttcatatttgttgccattccgttcaagacattttccagtt

SEQ ID NO: 3102 - DNA, 71 bp, Homo sapiens
agcctatgtctcaagttttgataaatttcatatttgttgccattccgttcaagacattttccagtttccct

SEQ ID NO: 3103 - DNA, 70 bp, Homo sapiens
agttttgataaatttcatatttgttgccattccgttcaagacattttccagtttcccttgtgactttctc

SEQ ID NO: 3104 - DNA, 72 bp, Homo sapiens
aatttcatatttgttgccattccgttcaagacattttccagtttcccttgtgactttctcttgactatctta

SEQ ID NO: 3105 - DNA, 73 bp, Homo sapiens
tatttgttgccattccgttcaagacattttccagtttcccttgtgactttctcttgactatcttagtctatct

SEQ ID NO: 3106 - DNA, 73 bp, Homo sapiens
ttccgttcaagacattttccagtttcccttgtgactttctcttgactatcttagtctatcttggacagaagta

SEQ ID NO: 3107 - DNA, 74 bp, Homo sapiens
acattttccagtttcccttgtgactttctcttgactatcttagtctatcttggacagaagtagaagtcttctgc

SEQ ID NO: 3108 - DNA, 74 bp, Homo sapiens
agtttcccttgtgactttctcttgactatcttagtctatcttggacagaagtagaagtcttctgctgtttgttc

SEQ ID NO: 3109 - DNA, 77 bp, Homo sapiens
tgtgactttctcttgactatcttagtctatcttggacagaagtagaagtcttctgctgtttgttcgtaacattgatt

SEQ ID NO: 3110 - DNA, 75 bp, Homo sapiens
ttctcttgactatcttagtctatcttggacagaagtagaagtcttctgctgtttgttcgtaacattgattttccc

SEQ ID NO: 3111 - DNA, 74 bp, Homo sapiens
tatcttagtctatcttggacagaagtagaagtcttctgctgtttgttcgtaacattgattttccctcttatttc

SEQ ID NO: 3112 - DNA, 72 bp, Homo sapiens
atcttggacagaagtagaagtcttctgctgtttgttcgtaacattgattttccctcttatttcttatttctc

SEQ ID NO: 3113 - DNA, 71 bp, Homo sapiens
agaagtagaagtcttctgctgtttgttcgtaacattgattttccctcttatttcttatttctcttctgttc

SEQ ID NO: 3114 - DNA, 71 bp, Homo sapiens
gtcttctgctgtttgttcgtaacattgattttccctcttatttcttatttctcttctgttctttttgtgat

SEQ ID NO: 3115 - DNA, 67 bp, Homo sapiens
gtttgttcgtaacattgattttccctcttatttcttatttctcttctgttctttttgtgattatttt

SEQ ID NO: 3116 - DNA, 69 bp, Homo sapiens
aacattgattttccctcttatttcttatttctcttctgttctttttgtgattattttttagtgctgtat

SEQ ID NO: 3117 - DNA, 69 bp, Homo sapiens
tccctcttatttcttatttctcttctgttctttttgtgattattttttagtgctgtattttaatcagtt

SEQ ID NO: 3118 - DNA, 71 bp, Homo sapiens
tatttctcttctgttctttttgtgattattttttagtgctgtattttaatcagtttaacaatgcaactagt

SEQ ID NO: 3119 - DNA, 72 bp, Homo sapiens
ctgttctttttgtgattattttttagtgctgtattttaatcagtttaacaatgcaactagttagtattgcat

SEQ ID NO: 3120 - DNA, 72 bp, Homo sapiens
tgtgattattttttagtgctgtattttaatcagtttaacaatgcaactagttagtattgcatttaaatttaa

SEQ ID NO: 3121 - DNA, 71 bp, Homo sapiens
tttttagtgctgtattttaatcagtttaacaatgcaactagttagtattgcatttaaatttaattatatta

SEQ ID NO: 3122 - DNA, 72 bp, Homo sapiens
gtgctgtattttaatcagtttaacaatgcaactagttagtattgcatttaaatttaattatattaaattgcc

SEQ ID NO: 3123 - DNA, 71 bp, Homo sapiens
taatcagtttaacaatgcaactagttagtattgcatttaaatttaattatattaaattgccttaaattgcc

SEQ ID NO: 3124 - DNA, 71 bp, Homo sapiens
atgcaactagttagtattgcatttaaatttaattatattaaattgccttaaattgcctttttggccatatc

SEQ ID NO: 3125 - DNA, 70 bp, Homo sapiens
ctagttagtattgcatttaaatttaattatattaaattgccttaaattgcctttttggccatatctcttc

SEQ ID NO: 3126 - DNA, 72 bp, Homo sapiens
attgcatttaaatttaattatattaaattgccttaaattgcctttttggccatatctcttcctatatatata

SEQ ID NO: 3127 - DNA, 74 bp, Homo sapiens
atatatatacacaagtatttatatttatctatatagtggttgctgtagggattataattttcttatcagtaaat

SEQ ID NO: 3128 - DNA, 76 bp, Homo sapiens
atatttatctatatagtggttgctgtagggattataattttcttatcagtaaattcagtctctactgagtgtacaa

SEQ ID NO: 3129 - DNA, 73 bp, Homo sapiens
ctatatagtggttgctgtagggattataattttcttatcagtaaattcagtctctactgagtgtacaactttt

SEQ ID NO: 3130 - DNA, 70 bp, Homo sapiens
gtggttgctgtagggattataattttcttatcagtaaattcagtctctactgagtgtacaactttttttt

SEQ ID NO: 3131 - DNA, 71 bp, Homo sapiens
cacctggcctgtgtgtgccacttaacacgaaatgtagaatgaaaccatatagacttcttttacctgttttt

SEQ ID NO: 3132 - DNA, 70 bp, Homo sapiens
cctgtgtgtgccacttaacacgaaatgtagaatgaaaccatatagacttcttttacctgttttttttcca

SEQ ID NO: 3133 - DNA, 69 bp, Homo sapiens
tgccacttaacacgaaatgtagaatgaaaccatatagacttcttttacctgttttttttccagtctttg

SEQ ID NO: 3134 - DNA, 67 bp, Homo sapiens
cacgaaatgtagaatgaaaccatatagacttcttttacctgttttttttccagtctttgttatagtt

SEQ ID NO: 3135 - DNA, 66 bp, Homo sapiens
atgaaaccatatagacttcttttacctgttttttttccagtctttgttatagttttataggaaagc

SEQ ID NO: 3136 - DNA, 69 bp, Homo sapiens
tagacttcttttacctgttttttttccagtctttgttatagttttataggaaagctacatacattcaca

SEQ ID NO: 3137 - DNA, 68 bp, Homo sapiens
tacctgttttttttccagtctttgttatagttttataggaaagctacatacattcacaaaccctacca

SEQ ID NO: 3138 - DNA, 69 bp, Homo sapiens
ttttccagtctttgttatagttttataggaaagctacatacattcacaaaccctaccagtgttttaata

SEQ ID NO: 3139 - DNA, 69 bp, Homo sapiens
cagtctttgttatagttttataggaaagctacatacattcacaaaccctaccagtgttttaatatttaa

SEQ ID NO: 3140 - DNA, 69 bp, Homo sapiens
gttttataggaaagctacatacattcacaaaccctaccagtgttttaatatttaatgtaagtggtcatt

SEQ ID NO: 3141 - DNA, 71 bp, Homo sapiens
aggaaagctacatacattcacaaaccctaccagtgttttaatatttaatgtaagtggtcatttgtattgta

SEQ ID NO: 3142 - DNA, 73 bp, Homo sapiens
cattcacaaaccctaccagtgttttaatatttaatgtaagtggtcatttgtattgtaaatgagtgtgaaggca

SEQ ID NO: 3143 - DNA, 71 bp, Homo sapiens
acaaaccctaccagtgttttaatatttaatgtaagtggtcatttgtattgtaaatgagtgtgaaggcatta

SEQ ID NO: 3144 - DNA, 71 bp, Homo sapiens
ccctaccagtgttttaatatttaatgtaagtggtcatttgtattgtaaatgagtgtgaaggcattattgtt

SEQ ID NO: 3145 - DNA, 73 bp, Homo sapiens
ccagtgttttaatatttaatgtaagtggtcatttgtattgtaaatgagtgtgaaggcattattgttttgtatg

SEQ ID NO: 3146 - DNA, 74 bp, Homo sapiens
aatatttaatgtaagtggtcatttgtattgtaaatgagtgtgaaggcattattgttttgtatgttcgttacata

SEQ ID NO: 3147 - DNA, 74 bp, Homo sapiens
ttaatgtaagtggtcatttgtattgtaaatgagtgtgaaggcattattgttttgtatgttcgttacatattaaa

SEQ ID NO: 3148 - DNA, 74 bp, Homo sapiens
gtaagtggtcatttgtattgtaaatgagtgtgaaggcattattgttttgtatgttcgttacatattaaatgtac

SEQ ID NO: 3149 - DNA, 75 bp, Homo sapiens
gtggtcatttgtattgtaaatgagtgtgaaggcattattgttttgtatgttcgttacatattaaatgtacctaca

SEQ ID NO: 3150 - DNA, 75 bp, Homo sapiens
ggtcatttgtattgtaaatgagtgtgaaggcattattgttttgtatgttcgttacatattaaatgtacctacatg

SEQ ID NO: 3151 - DNA, 74 bp, Homo sapiens
gtaaatgagtgtgaaggcattattgttttgtatgttcgttacatattaaatgtacctacatgtttatcactctt

SEQ ID NO: 3152 - DNA, 73 bp, Homo sapiens
gcattattgttttgtatgttcgttacatattaaatgtacctacatgtttatcactctttatatttttcttcag

SEQ ID NO: 3153 - DNA, 74 bp, Homo sapiens
ttgtatgttcgttacatattaaatgtacctacatgtttatcactctttatatttttcttcagttctgagcttcc

SEQ ID NO: 3154 - DNA, 73 bp, Homo sapiens
cgttacatattaaatgtacctacatgtttatcactctttatatttttcttcagttctgagcttccttctggaa

SEQ ID NO: 3155 - DNA, 73 bp, Homo sapiens
gtacctacatgtttatcactctttatatttttcttcagttctgagcttccttctggaatcattttcctattac

SEQ ID NO: 3156 - DNA, 72 bp, Homo sapiens
tcactctttatatttttcttcagttctgagcttccttctggaatcattttcctattactcaaggaaaattgt

SEQ ID NO: 3157 - DNA, 70 bp, Homo sapiens
tttttcttcagttctgagcttccttctggaatcattttcctattactcaaggaaaattgtttggtgttcc

SEQ ID NO: 3158 - DNA, 70 bp, Homo sapiens
tctgagcttccttctggaatcattttcctattactcaaggaaaattgtttggtgttccctttaatggaaa

SEQ ID NO: 3159 - DNA, 66 bp, Homo sapiens
cttccttctggaatcattttcctattactcaaggaaaattgtttggtgttccctttaatggaaaac

SEQ ID NO: 3160 - DNA, 64 bp, Homo sapiens
gaatcattttcctattactcaaggaaaattgtttggtgttccctttaatggaaaacttttaaaa

SEQ ID NO: 3161 - DNA, 64 bp, Homo sapiens
aaaaaatgttttctggctttatttagttatctagtttttcttttgataacttgccttttgtctt

SEQ ID NO: 3162 - DNA, 65 bp, Homo sapiens
gttttctggctttatttagttatctagtttttcttttgataacttgccttttgtctttaagattt

SEQ ID NO: 3163 - DNA, 66 bp, Homo sapiens
gctttatttagttatctagtttttcttttgataacttgccttttgtctttaagattttcatttctt

SEQ ID NO: 3164 - DNA, 65 bp, Homo sapiens
tctagtttttcttttgataacttgccttttgtctttaagattttcatttctttcccttagttttc

SEQ ID NO: 3165 - DNA, 64 bp, Homo sapiens
ctagtttttcttttgataacttgccttttgtctttaagattttcatttctttcccttagttttc

SEQ ID NO: 3166 - DNA, 65 bp, Homo sapiens
tttcttttgataacttgccttttgtctttaagattttcatttctttcccttagttttctgtagtt

SEQ ID NO: 3167 - DNA, 62 bp, Homo sapiens
ataacttgccttttgtctttaagattttcatttctttcccttagttttctgtagtttttttt

SEQ ID NO: 3168 - DNA, 71 bp, Homo sapiens
ccgcgcccggccagttttctgtagttttattgtctcttggtgtatgtctttatttactctgatttatagtg

SEQ ID NO: 3169 - DNA, 70 bp, Homo sapiens
ccggccagttttctgtagttttattgtctcttggtgtatgtctttatttactctgatttatagtggttct

SEQ ID NO: 3170 - DNA, 74 bp, Homo sapiens
tgtagttttattgtctcttggtgtatgtctttatttactctgatttatagtggttcttcagtcagtggctttgg

SEQ ID NO: 3171 - DNA, 74 bp, Homo sapiens
tttattgtctcttggtgtatgtctttatttactctgatttatagtggttcttcagtcagtggctttgggtcttc

SEQ ID NO: 3172 - DNA, 73 bp, Homo sapiens
tgtatgtctttatttactctgatttatagtggttcttcagtcagtggctttgggtcttctgttctggaaaatt

SEQ ID NO: 3173 - DNA, 70 bp, Homo sapiens
gtctttatttactctgatttatagtggttcttcagtcagtggctttgggtcttctgttctggaaaatttt

SEQ ID NO: 3174 - DNA, 72 bp, Homo sapiens
atagtggttcttcagtcagtggctttgggtcttctgttctggaaaatttttaggtattatcaattcagataa

SEQ ID NO: 3175 - DNA, 76 bp, Homo sapiens
ctgttctggaaaatttttaggtattatcaattcagataatgctttcatgccattttctttctcatattttctctga

SEQ ID NO: 3176 - DNA, 79 bp, Homo sapiens
atttttaggtattatcaattcagataatgctttcatgccattttctttctcatattttctctgagactctgattacatg

SEQ ID NO: 3177 - DNA, 83 bp, Homo sapiens
ggtattatcaattcagataatgctttcatgccattttctttctcatattttctctgagactctgattacatgtgtgttagatc

SEQ ID NO: 3178 - DNA, 84 bp, Homo sapiens
aattcagataatgctttcatgccattttctttctcatattttctctgagactctgattacatgtgtgttagatctgcctgccta

SEQ ID NO: 3179 - DNA, 82 bp, Homo sapiens
tttcatgccattttctttctcatattttctctgagactctgattacatgtgtgttagatctgcctgcctattacatttttca

SEQ ID NO: 3180 - DNA, 80 bp, Homo sapiens
attttctttctcatattttctctgagactctgattacatgtgtgttagatctgcctgcctattacatttttcatgtgtct

SEQ ID NO: 3181 - DNA, 81 bp, Homo sapiens
tcatattttctctgagactctgattacatgtgtgttagatctgcctgcctattacatttttcatgtgtcttattccatttt

SEQ ID NO: 3182 - DNA, 80 bp, Homo sapiens
tttctctgagactctgattacatgtgtgttagatctgcctgcctattacatttttcatgtgtcttattccattttttgta

SEQ ID NO: 3183 - DNA, 79 bp, Homo sapiens
ctgagactctgattacatgtgtgttagatctgcctgcctattacatttttcatgtgtcttattccattttttgtatttc

SEQ ID NO: 3184 - DNA, 73 bp, Homo sapiens
tcatgtgtcttattccattttttgtatttcttacttttgtgctaacattctggatttcttctgacctgttttg

SEQ ID NO: 3185 - DNA, 72 bp, Homo sapiens
catgtgtcttattccattttttgtatttcttacttttgtgctaacattctggatttcttctgacctgttttg

SEQ ID NO: 3186 - DNA, 69 bp, Homo sapiens
attccattttttgtatttcttacttttgtgctaacattctggatttcttctgacctgttttgttcctac

SEQ ID NO: 3187 - DNA, 70 bp, Homo sapiens
ttgtatttcttacttttgtgctaacattctggatttcttctgacctgttttgttcctactaattctcttt

SEQ ID NO: 3188 - DNA, 74 bp, Homo sapiens
tcttacttttgtgctaacattctggatttcttctgacctgttttgttcctactaattctcttttcatccatgtc

SEQ ID NO: 3189 - DNA, 71 bp, Homo sapiens
ctaacattctggatttcttctgacctgttttgttcctactaattctcttttcatccatgtctaaaccgttg

SEQ ID NO: 3190 - DNA, 71 bp, Homo sapiens
ttctggatttcttctgacctgttttgttcctactaattctcttttcatccatgtctaaaccgttgttaatc

SEQ ID NO: 3191 - DNA, 70 bp, Homo sapiens
tgacctgttttgttcctactaattctcttttcatccatgtctaaaccgttgttaatcccacccattgatt

SEQ ID NO: 3192 - DNA, 67 bp, Homo sapiens
gttttgttcctactaattctcttttcatccatgtctaaaccgttgttaatcccacccattgattttt

SEQ ID NO: 3193 - DNA, 72 bp, Homo sapiens
gtgctgggcttacgggtgtgagcccctgtgcctggctgatttctaaatttcctctttacttctggaatttta

SEQ ID NO: 3194 - DNA, 70 bp, Homo sapiens
tacgggtgtgagcccctgtgcctggctgatttctaaatttcctctttacttctggaattttaatttatta

SEQ ID NO: 3195 - DNA, 69 bp, Homo sapiens
gtgcctggctgatttctaaatttcctctttacttctggaattttaatttattattatagttttcagtta

SEQ ID NO: 3196 - DNA, 70 bp, Homo sapiens
ctgatttctaaatttcctctttacttctggaattttaatttattattatagttttcagttatttgcatca

SEQ ID NO: 3197 - DNA, 69 bp, Homo sapiens
tcctctttacttctggaattttaatttattattatagttttcagttatttgcatcaatttagaattttg

SEQ ID NO: 3198 - DNA, 71 bp, Homo sapiens
tctggaattttaatttattattatagttttcagttatttgcatcaatttagaattttgtcttgtgtgtact

SEQ ID NO: 3199 - DNA, 76 bp, Homo sapiens
taatttattattatagttttcagttatttgcatcaatttagaattttgtcttgtgtgtacttgatcatagtaagca

SEQ ID NO: 3200 - DNA, 75 bp, Homo sapiens
ttatagttttcagttatttgcatcaatttagaattttgtcttgtgtgtacttgatcatagtaagcatacttattt

SEQ ID NO: 3201 - DNA, 74 bp, Homo sapiens
ttcagttatttgcatcaatttagaattttgtcttgtgtgtacttgatcatagtaagcatacttattttaaaacc

SEQ ID NO: 3202 - DNA, 76 bp, Homo sapiens
tgcatcaatttagaattttgtcttgtgtgtacttgatcatagtaagcatacttattttaaaacctttatctgataa

SEQ ID NO: 3203 - DNA, 72 bp, Homo sapiens
gaattttgtcttgtgtgtacttgatcatagtaagcatacttattttaaaacctttatctgataactccaaaa

SEQ ID NO: 3204 - DNA, 75 bp, Homo sapiens
gtcttgtgtgtacttgatcatagtaagcatacttattttaaaacctttatctgataactccaaaatggtgatctg

SEQ ID NO: 3205 - DNA, 71 bp, Homo sapiens
catagtaagcatacttattttaaaacctttatctgataactccaaaatggtgatctgttttgattttctta

SEQ ID NO: 3206 - DNA, 68 bp, Homo sapiens
tattttaaaacctttatctgataactccaaaatggtgatctgttttgattttcttatttctccttatt

SEQ ID NO: 3207 - DNA, 73 bp, Homo sapiens
cctttatctgataactccaaaatggtgatctgttttgattttcttatttctccttattttcattcatattgtc

SEQ ID NO: 3208 - DNA, 77 bp, Homo sapiens
tgataactccaaaatggtgatctgttttgattttcttatttctccttattttcattcatattgtcttgtctgtcatg

SEQ ID NO: 3209 - DNA, 75 bp, Homo sapiens
aactccaaaatggtgatctgttttgattttcttatttctccttattttcattcatattgtcttgtctgtcatgtg

SEQ ID NO: 3210 - DNA, 75 bp, Homo sapiens
aatggtgatctgttttgattttcttatttctccttattttcattcatattgtcttgtctgtcatgtgtttggtac

SEQ ID NO: 3211 - DNA, 76 bp, Homo sapiens
tgttttgattttcttatttctccttattttcattcatattgtcttgtctgtcatgtgtttggtacttattgtgctg

SEQ ID NO: 3212 - DNA, 76 bp, Homo sapiens
tgattttcttatttctccttattttcattcatattgtcttgtctgtcatgtgtttggtacttattgtgctggaaat

SEQ ID NO: 3213 - DNA, 77 bp, Homo sapiens
ttcttatttctccttattttcattcatattgtcttgtctgtcatgtgtttggtacttattgtgctggaaattatatg

SEQ ID NO: 3214 - DNA, 78 bp, Homo sapiens
atttctccttattttcattcatattgtcttgtctgtcatgtgtttggtacttattgtgctggaaattatatgtaatga

SEQ ID NO: 3215 - DNA, 78 bp, Homo sapiens
ctccttattttcattcatattgtcttgtctgtcatgtgtttggtacttattgtgctggaaattatatgtaatgaagaa

SEQ ID NO: 3216 - DNA, 77 bp, Homo sapiens
ccttattttcattcatattgtcttgtctgtcatgtgtttggtacttattgtgctggaaattatatgtaatgaagaaa

SEQ ID NO: 3217 - DNA, 79 bp, Homo sapiens
tcattcatattgtcttgtctgtcatgtgtttggtacttattgtgctggaaattatatgtaatgaagaaattttaggctg

SEQ ID NO: 3218 - DNA, 76 bp, Homo sapiens
catattgtcttgtctgtcatgtgtttggtacttattgtgctggaaattatatgtaatgaagaaattttaggctggg

SEQ ID NO: 3219 - DNA, 75 bp, Homo sapiens
gtcttgtctgtcatgtgtttggtacttattgtgctggaaattatatgtaatgaagaaattttaggctgggtgtgg

SEQ ID NO: 3220 - DNA, 72 bp, Homo sapiens
aaaaaaaggtggaaattatttgtagccaagatgatactgttttcttttagagaggatagatgtatatttgca

SEQ ID NO: 3221 - DNA, 76 bp, Homo sapiens
aaggtggaaattatttgtagccaagatgatactgttttcttttagagaggatagatgtatatttgcatctgcttgg

SEQ ID NO: 3222 - DNA, 77 bp, Homo sapiens
tatttgtagccaagatgatactgttttcttttagagaggatagatgtatatttgcatctgcttggtgccttgggggt

SEQ ID NO: 3223 - DNA, 75 bp, Homo sapiens
aagatgatactgttttcttttagagaggatagatgtatatttgcatctgcttggtgccttgggggttgtaattta

SEQ ID NO: 3224 - DNA, 72 bp, Homo sapiens
ttttcttttagagaggatagatgtatatttgcatctgcttggtgccttgggggttgtaatttaggattacct

SEQ ID NO: 3225 - DNA, 74 bp, Homo sapiens
agaggatagatgtatatttgcatctgcttggtgccttgggggttgtaatttaggattaccttcgtcaaatttca

SEQ ID NO: 3226 - DNA, 72 bp, Homo sapiens
atagatgtatatttgcatctgcttggtgccttgggggttgtaatttaggattaccttcgtcaaatttcagtt

SEQ ID NO: 3227 - DNA, 71 bp, Homo sapiens
gtgccttgggggttgtaatttaggattaccttcgtcaaatttcagtttgagatggtcagaggcctggtgta

SEQ ID NO: 3228 - DNA, 72 bp, Homo sapiens
gggttgtaatttaggattaccttcgtcaaatttcagtttgagatggtcagaggcctggtgtagtctctttga

SEQ ID NO: 3229 - DNA, 73 bp, Homo sapiens
taatttaggattaccttcgtcaaatttcagtttgagatggtcagaggcctggtgtagtctctttgagggtcta

SEQ ID NO: 3230 - DNA, 72 bp, Homo sapiens
ttaccttcgtcaaatttcagtttgagatggtcagaggcctggtgtagtctctttgagggtctatgtactttt

SEQ ID NO: 3231 - DNA, 73 bp, Homo sapiens
aaatttcagtttgagatggtcagaggcctggtgtagtctctttgagggtctatgtactttttgtgtattctta

SEQ ID NO: 3232 - DNA, 76 bp, Homo sapiens
tttgagatggtcagaggcctggtgtagtctctttgagggtctatgtactttttgtgtattcttagctctagtttgc

SEQ ID NO: 3233 - DNA, 72 bp, Homo sapiens
aggcctggtgtagtctctttgagggtctatgtactttttgtgtattcttagctctagtttgcccttcagtgt

SEQ ID NO: 3234 - DNA, 76 bp, Homo sapiens
tagtctctttgagggtctatgtactttttgtgtattcttagctctagtttgcccttcagtgttgcatctgaaacga

SEQ ID NO: 3235 - DNA, 74 bp, Homo sapiens
tttgagggtctatgtactttttgtgtattcttagctctagtttgcccttcagtgttgcatctgaaacgagaggg

SEQ ID NO: 3236 - DNA, 71 bp, Homo sapiens
gtactttttgtgtattcttagctctagtttgcccttcagtgttgcatctgaaacgagaggggtttacttgt

SEQ ID NO: 3237 - DNA, 71 bp, Homo sapiens
tttgtgtattcttagctctagtttgcccttcagtgttgcatctgaaacgagaggggtttacttgttccctt

SEQ ID NO: 3238 - DNA, 71 bp, Homo sapiens
tgtgtattcttagctctagtttgcccttcagtgttgcatctgaaacgagaggggtttacttgttccctttt

SEQ ID NO: 3239 - DNA, 70 bp, Homo sapiens
gtattcttagctctagtttgcccttcagtgttgcatctgaaacgagaggggtttacttgttccctttttc

SEQ ID NO: 3240 - DNA, 70 bp, Homo sapiens
cttagctctagtttgcccttcagtgttgcatctgaaacgagaggggtttacttgttccctttttctgttg

SEQ ID NO: 3241 - DNA, 68 bp, Homo sapiens
tagtttgcccttcagtgttgcatctgaaacgagaggggtttacttgttccctttttctgttggttgtt

SEQ ID NO: 3242 - DNA, 70 bp, Homo sapiens
tttgcccttcagtgttgcatctgaaacgagaggggtttacttgttccctttttctgttggttgtttctga

SEQ ID NO: 3243 - DNA, 72 bp, Homo sapiens
tcagtgttgcatctgaaacgagaggggtttacttgttccctttttctgttggttgtttctgaatgtacatcc

SEQ ID NO: 3244 - DNA, 71 bp, Homo sapiens
ttgcatctgaaacgagaggggtttacttgttccctttttctgttggttgtttctgaatgtacatccctgta

SEQ ID NO: 3245 - DNA, 68 bp, Homo sapiens
atctgaaacgagaggggtttacttgttccctttttctgttggttgtttctgaatgtacatccctgtac

SEQ ID NO: 3246 - DNA, 66 bp, Homo sapiens
aaacgagaggggtttacttgttccctttttctgttggttgtttctgaatgtacatccctgtactgt

SEQ ID NO: 3247 - DNA, 67 bp, Homo sapiens
aacgagaggggtttacttgttccctttttctgttggttgtttctgaatgtacatccctgtactgtta

SEQ ID NO: 3248 - DNA, 70 bp, Homo sapiens
tttacttgttccctttttctgttggttgtttctgaatgtacatccctgtactgttaggcctctgagtttg

SEQ ID NO: 3249 - DNA, 70 bp, Homo sapiens
tttttctgttggttgtttctgaatgtacatccctgtactgttaggcctctgagtttgtcaaaagtaccct

SEQ ID NO: 3250 - DNA, 74 bp, Homo sapiens
ttggttgtttctgaatgtacatccctgtactgttaggcctctgagtttgtcaaaagtacccttcaggctgagcg

SEQ ID NO: 3251 - DNA, 79 bp, Homo sapiens
ttctgaatgtacatccctgtactgttaggcctctgagtttgtcaaaagtacccttcaggctgagcgtggtgctcatgcc

SEQ ID NO: 3252 - DNA, 67 bp, Homo sapiens
aaaaaaaaaaggacccttcatcctcaccaccgctttctctgaaataggcaaatgttccctgggcaaa

SEQ ID NO: 3253 - DNA, 70 bp, Homo sapiens
aaaaaggacccttcatcctcaccaccgctttctctgaaataggcaaatgttccctgggcaaaagtggcca

SEQ ID NO: 3254 - DNA, 72 bp, Homo sapiens
ttcatcctcaccaccgctttctctgaaataggcaaatgttccctgggcaaaagtggccaaaaactgtaccta

SEQ ID NO: 3255 - DNA, 69 bp, Homo sapiens
accgctttctctgaaataggcaaatgttccctgggcaaaagtggccaaaaactgtacctaggactttca

SEQ ID NO: 3256 - DNA, 70 bp, Homo sapiens
tctctgaaataggcaaatgttccctgggcaaaagtggccaaaaactgtacctaggactttcattcttttc

SEQ ID NO: 3257 - DNA, 64 bp, Homo sapiens
aaatgttccctgggcaaaagtggccaaaaactgtacctaggactttcattcttttccggtttta

SEQ ID NO: 3258 - DNA, 66 bp, Homo sapiens
tgggcaaaagtggccaaaaactgtacctaggactttcattcttttccggttttagcccagaaactc

SEQ ID NO: 3259 - DNA, 71 bp, Homo sapiens
tggccaaaaactgtacctaggactttcattcttttccggttttagcccagaaactcctcactatcatatca

SEQ ID NO: 3260 - DNA, 72 bp, Homo sapiens
ctgtacctaggactttcattcttttccggttttagcccagaaactcctcactatcatatcagctctttaata

SEQ ID NO: 3261 - DNA, 71 bp, Homo sapiens
actttcattcttttccggttttagcccagaaactcctcactatcatatcagctctttaataccttcagtcg

SEQ ID NO: 3262 - DNA, 71 bp, Homo sapiens
attcttttccggttttagcccagaaactcctcactatcatatcagctctttaataccttcagtcgggaggc

SEQ ID NO: 3263 - DNA, 67 bp, Homo sapiens
aaaaaaatttaatatgaaatttaacacatttcaaattaaaatagtgaaatgattattactaatatta

SEQ ID NO: 3264 - DNA, 70 bp, Homo sapiens
aatatgaaatttaacacatttcaaattaaaatagtgaaatgattattactaatattaaaaatattgacac

SEQ ID NO: 3265 - DNA, 70 bp, Homo sapiens
gaaatttaacacatttcaaattaaaatagtgaaatgattattactaatattaaaaatattgacactaaga

SEQ ID NO: 3266 - DNA, 71 bp, Homo sapiens
tcaaattaaaatagtgaaatgattattactaatattaaaaatattgacactaagataaaaataatttcatg

SEQ ID NO: 3267 - DNA, 72 bp, Homo sapiens
taaaatagtgaaatgattattactaatattaaaaatattgacactaagataaaaataatttcatgttgacat

SEQ ID NO: 3268 - DNA, 72 bp, Homo sapiens
gaaatgattattactaatattaaaaatattgacactaagataaaaataatttcatgttgacatttaaaatga

SEQ ID NO: 3269 - DNA, 71 bp, Homo sapiens
ctaatattaaaaatattgacactaagataaaaataatttcatgttgacatttaaaatgattaagataatta

SEQ ID NO: 3270 - DNA, 71 bp, Homo sapiens
atattgacactaagataaaaataatttcatgttgacatttaaaatgattaagataattaaattttgtcgta

SEQ ID NO: 3271 - DNA, 70 bp, Homo sapiens
gacactaagataaaaataatttcatgttgacatttaaaatgattaagataattaaattttgtcgtaagta

SEQ ID NO: 3272 - DNA, 68 bp, Homo sapiens
gataaaaataatttcatgttgacatttaaaatgattaagataattaaattttgtcgtaagtattaaac

SEQ ID NO: 3273 - DNA, 67 bp, Homo sapiens
aataatttcatgttgacatttaaaatgattaagataattaaattttgtcgtaagtattaaactttta

SEQ ID NO: 3274 - DNA, 67 bp, Homo sapiens
ataatttcatgttgacatttaaaatgattaagataattaaattttgtcgtaagtattaaacttttaa

SEQ ID NO: 3275 - DNA, 64 bp, Homo sapiens
gttgacatttaaaatgattaagataattaaattttgtcgtaagtattaaacttttaaaaactcc

SEQ ID NO: 3276 - DNA, 62 bp, Homo sapiens
aaaatgattaagataattaaattttgtcgtaagtattaaacttttaaaaactccttttatag

SEQ ID NO: 3277 - DNA, 63 bp, Homo sapiens
atgattaagataattaaattttgtcgtaagtattaaacttttaaaaactccttttatagtggt

SEQ ID NO: 3278 - DNA, 64 bp, Homo sapiens
attaaattttgtcgtaagtattaaacttttaaaaactccttttatagtggttctcagaggtagc

SEQ ID NO: 3279 - DNA, 70 bp, Homo sapiens
ttaaacttttaaaaactccttttatagtggttctcagaggtagcgttgatctgaatatttagtctgcctg

SEQ ID NO: 3280 - DNA, 73 bp, Homo sapiens
ttaaaaactccttttatagtggttctcagaggtagcgttgatctgaatatttagtctgcctgtataagaagtg

SEQ ID NO: 3281 - DNA, 79 bp, Homo sapiens
ttttatagtggttctcagaggtagcgttgatctgaatatttagtctgcctgtataagaagtgttagtgccaacatctga

SEQ ID NO: 3282 - DNA, 78 bp, Homo sapiens
gttctcagaggtagcgttgatctgaatatttagtctgcctgtataagaagtgttagtgccaacatctgaatttataaa

SEQ ID NO: 3283 - DNA, 76 bp, Homo sapiens
agaggtagcgttgatctgaatatttagtctgcctgtataagaagtgttagtgccaacatctgaatttataaatgtt

SEQ ID NO: 3284 - DNA, 74 bp, Homo sapiens
gatctgaatatttagtctgcctgtataagaagtgttagtgccaacatctgaatttataaatgtttccctttatt

SEQ ID NO: 3285 - DNA, 75 bp, Homo sapiens
gcctgtataagaagtgttagtgccaacatctgaatttataaatgtttccctttatttatgtaactgtacatcata

SEQ ID NO: 3286 - DNA, 73 bp, Homo sapiens
gaagtgttagtgccaacatctgaatttataaatgtttccctttatttatgtaactgtacatcataactgggga

SEQ ID NO: 3287 - DNA, 74 bp, Homo sapiens
tgccaacatctgaatttataaatgtttccctttatttatgtaactgtacatcataactggggaaatgattaaga

SEQ ID NO: 3288 - DNA, 70 bp, Homo sapiens
gaatttataaatgtttccctttatttatgtaactgtacatcataactggggaaatgattaagaatgcttt

SEQ ID NO: 3289 - DNA, 69 bp, Homo sapiens
ttccctttatttatgtaactgtacatcataactggggaaatgattaagaatgcttttttttggtagtgg

SEQ ID NO: 3290 - DNA, 73 bp, Homo sapiens
ttatgtaactgtacatcataactggggaaatgattaagaatgcttttttttggtagtggtttgagtattctca

SEQ ID NO: 3291 - DNA, 74 bp, Homo sapiens
ctgtacatcataactggggaaatgattaagaatgcttttttttggtagtggtttgagtattctcaagcaatgga

SEQ ID NO: 3292 - DNA, 71 bp, Homo sapiens
actggggaaatgattaagaatgcttttttttggtagtggtttgagtattctcaagcaatggaagtaagaca

SEQ ID NO: 3293 - DNA, 75 bp, Homo sapiens
ggaaatgattaagaatgcttttttttggtagtggtttgagtattctcaagcaatggaagtaagacagcaatgaga

SEQ ID NO: 3294 - DNA, 74 bp, Homo sapiens
tgcttttttttggtagtggtttgagtattctcaagcaatggaagtaagacagcaatgagaatttgttaatgtcc

SEQ ID NO: 3295 - DNA, 74 bp, Homo sapiens
tttttggtagtggtttgagtattctcaagcaatggaagtaagacagcaatgagaatttgttaatgtccttgttg

SEQ ID NO: 3296 - DNA, 78 bp, Homo sapiens
tggtttgagtattctcaagcaatggaagtaagacagcaatgagaatttgttaatgtccttgttgtgcatttatttcaa

SEQ ID NO: 3297 - DNA, 77 bp, Homo sapiens
tcaagcaatggaagtaagacagcaatgagaatttgttaatgtccttgttgtgcatttatttcaatagacatttaagg

SEQ ID NO: 3298 - DNA, 75 bp, Homo sapiens
ggaagtaagacagcaatgagaatttgttaatgtccttgttgtgcatttatttcaatagacatttaagggatctgt

SEQ ID NO: 3299 - DNA, 75 bp, Homo sapiens
gacagcaatgagaatttgttaatgtccttgttgtgcatttatttcaatagacatttaagggatctgttaaggaag

SEQ ID NO: 3300 - DNA, 69 bp, Homo sapiens
atttgttaatgtccttgttgtgcatttatttcaatagacatttaagggatctgttaaggaagttaacgg

SEQ ID NO: 3301 - DNA, 70 bp, Homo sapiens
gtccttgttgtgcatttatttcaatagacatttaagggatctgttaaggaagttaacggtgttaatttgc

SEQ ID NO: 3302 - DNA, 70 bp, Homo sapiens
gttgtgcatttatttcaatagacatttaagggatctgttaaggaagttaacggtgttaatttgctttcga

SEQ ID NO: 3303 - DNA, 68 bp, Homo sapiens
tcaatagacatttaagggatctgttaaggaagttaacggtgttaatttgctttcgataaaactgaaaa

SEQ ID NO: 3304 - DNA, 69 bp, Homo sapiens
gacatttaagggatctgttaaggaagttaacggtgttaatttgctttcgataaaactgaaaagatgaca

SEQ ID NO: 3305 - DNA, 68 bp, Homo sapiens
gggatctgttaaggaagttaacggtgttaatttgctttcgataaaactgaaaagatgacatttattta

SEQ ID NO: 3306 - DNA, 70 bp, Homo sapiens
ttatttatttttaggttgggcccatgtggtttgtgccctgtatattccagaggtacaatttgccaatgtt

SEQ ID NO: 3307 - DNA, 72 bp, Homo sapiens
tatttttaggttgggcccatgtggtttgtgccctgtatattccagaggtacaatttgccaatgtttccacaa

SEQ ID NO: 3308 - DNA, 72 bp, Homo sapiens
cccatgtggtttgtgccctgtatattccagaggtacaatttgccaatgtttccacaatggaaccaattgttt

SEQ ID NO: 3309 - DNA, 75 bp, Homo sapiens
tatattccagaggtacaatttgccaatgtttccacaatggaaccaattgttttacagtctgttccgcatgatcgt

SEQ ID NO: 3310 - DNA, 73 bp, Homo sapiens
aggtacaatttgccaatgtttccacaatggaaccaattgttttacagtctgttccgcatgatcgttataataa

SEQ ID NO: 3311 - DNA, 73 bp, Homo sapiens
atttgccaatgtttccacaatggaaccaattgttttacagtctgttccgcatgatcgttataataaggtacag

SEQ ID NO: 3312 - DNA, 73 bp, Homo sapiens
tttccacaatggaaccaattgttttacagtctgttccgcatgatcgttataataaggtacagtggatattatt

SEQ ID NO: 3313 - DNA, 72 bp, Homo sapiens
atggaaccaattgttttacagtctgttccgcatgatcgttataataaggtacagtggatattattttattac

SEQ ID NO: 3314 - DNA, 77 bp, Homo sapiens
tttttttaaccccaagacttgctacatttgtgatgaacaaggaagagaaagcaaagcagccactggtgcttgcatga

SEQ ID NO: 3315 - DNA, 82 bp, Homo sapiens
cccaagacttgctacatttgtgatgaacaaggaagagaaagcaaagcagccactggtgcttgcatgacatgtaataaacatg

SEQ ID NO: 3316 - DNA, 84 bp, Homo sapiens
acttgctacatttgtgatgaacaaggaagagaaagcaaagcagccactggtgcttgcatgacatgtaataaacatggatgtcga

SEQ ID NO: 3317 - DNA, 82 bp, Homo sapiens
atttgtgatgaacaaggaagagaaagcaaagcagccactggtgcttgcatgacatgtaataaacatggatgtcgacaggctt

SEQ ID NO: 3318 - DNA, 83 bp, Homo sapiens
ggaagagaaagcaaagcagccactggtgcttgcatgacatgtaataaacatggatgtcgacaggctttccatgtaacatggta

SEQ ID NO: 3319 - DNA, 82 bp, Homo sapiens
agcaaagcagccactggtgcttgcatgacatgtaataaacatggatgtcgacaggctttccatgtaacatggtaaggatgtt

SEQ ID NO: 3320 - DNA, 80 bp, Homo sapiens
ccactggtgcttgcatgacatgtaataaacatggatgtcgacaggctttccatgtaacatggtaaggatgtttccattgt

SEQ ID NO: 3321 - DNA, 83 bp, Homo sapiens
ttgcatgacatgtaataaacatggatgtcgacaggctttccatgtaacatggtaaggatgtttccattgttgcacagaactga

SEQ ID NO: 3322 - DNA, 77 bp, Homo sapiens
atgtaataaacatggatgtcgacaggctttccatgtaacatggtaaggatgtttccattgttgcacagaactgaact

SEQ ID NO: 3323 - DNA, 73 bp, Homo sapiens
aggtactgtgattttagtatatcaataaatatacttggcttttattttcagcgctcagtttgccggactgctt

SEQ ID NO: 3324 - DNA, 76 bp, Homo sapiens
tgattttagtatatcaataaatatacttggcttttattttcagcgctcagtttgccggactgctttgtgaagaaga

SEQ ID NO: 3325 - DNA, 74 bp, Homo sapiens
atatcaataaatatacttggcttttattttcagcgctcagtttgccggactgctttgtgaagaagaaggtaatg

SEQ ID NO: 3326 - DNA, 74 bp, Homo sapiens
atatacttggcttttattttcagcgctcagtttgccggactgctttgtgaagaagaaggtaatggtgccgataa

SEQ ID NO: 3327 - DNA, 75 bp, Homo sapiens
ttttattttcagcgctcagtttgccggactgctttgtgaagaagaaggtaatggtgccgataatgtccaatactg

SEQ ID NO: 3328 - DNA, 77 bp, Homo sapiens
agcgctcagtttgccggactgctttgtgaagaagaaggtaatggtgccgataatgtccaatactgtggctactgtaa

SEQ ID NO: 3329 - DNA, 73 bp, Homo sapiens
ccggactgctttgtgaagaagaaggtaatggtgccgataatgtccaatactgtggctactgtaaataccattt

SEQ ID NO: 3330 - DNA, 74 bp, Homo sapiens
tttgtgaagaagaaggtaatggtgccgataatgtccaatactgtggctactgtaaataccattttagtaagctg

SEQ ID NO: 3331 - DNA, 72 bp, Homo sapiens
aagaaggtaatggtgccgataatgtccaatactgtggctactgtaaataccattttagtaagctggtaagaa

SEQ ID NO: 3332 - DNA, 74 bp, Homo sapiens
taatggtgccgataatgtccaatactgtggctactgtaaataccattttagtaagctggtaagaatttctcttg

SEQ ID NO: 3333 - DNA, 74 bp, Homo sapiens
gataatgtccaatactgtggctactgtaaataccattttagtaagctggtaagaatttctcttggatttaatga

SEQ ID NO: 3334 - DNA, 74 bp, Homo sapiens
atactgtggctactgtaaataccattttagtaagctggtaagaatttctcttggatttaatgaaatgattatga

SEQ ID NO: 3335 - DNA, 70 bp, Homo sapiens
atatatattttcttttttagaaaaagagcaaacggggatctaataggtcatatgatcaaagtttaagtga

SEQ ID NO: 3336 - DNA, 72 bp, Homo sapiens
tcttttttagaaaaagagcaaacggggatctaataggtcatatgatcaaagtttaagtgattcttcctctca

SEQ ID NO: 3337 - DNA, 74 bp, Homo sapiens
aaaaagagcaaacggggatctaataggtcatatgatcaaagtttaagtgattcttcctctcactctcaggataa

SEQ ID NO: 3338 - DNA, 77 bp, Homo sapiens
aaacggggatctaataggtcatatgatcaaagtttaagtgattcttcctctcactctcaggataaacatcatgagaa

SEQ ID NO: 3339 - DNA, 79 bp, Homo sapiens
ggatctaataggtcatatgatcaaagtttaagtgattcttcctctcactctcaggataaacatcatgagaaagagaaaa

SEQ ID NO: 3340 - DNA, 76 bp, Homo sapiens
ggtcatatgatcaaagtttaagtgattcttcctctcactctcaggataaacatcatgagaaagagaaaaaagtaag

SEQ ID NO: 3341 - DNA, 73 bp, Homo sapiens
gtttaagtgattcttcctctcactctcaggataaacatcatgagaaagagaaaaaagtaagtggatttgttgt

SEQ ID NO: 3342 - DNA, 75 bp, Homo sapiens
agtgattcttcctctcactctcaggataaacatcatgagaaagagaaaaaagtaagtggatttgttgttgctaaa

SEQ ID NO: 3343 - DNA, 76 bp, Homo sapiens
cactctcaggataaacatcatgagaaagagaaaaaagtaagtggatttgttgttgctaaatttgtagcacatctac

SEQ ID NO: 3344 - DNA, 75 bp, Homo sapiens
tcaggataaacatcatgagaaagagaaaaaagtaagtggatttgttgttgctaaatttgtagcacatctacttaa

SEQ ID NO: 3345 - DNA, 73 bp, Homo sapiens
catcatgagaaagagaaaaaagtaagtggatttgttgttgctaaatttgtagcacatctacttaatagaattt

SEQ ID NO: 3346 - DNA, 67 bp, Homo sapiens
aagagaaaaaagtaagtggatttgttgttgctaaatttgtagcacatctacttaatagaattttttt

SEQ ID NO: 3347 - DNA, 69 bp, Homo sapiens
gtaagtggatttgttgttgctaaatttgtagcacatctacttaatagaatttttttttgcctttttaga

SEQ ID NO: 3348 - DNA, 69 bp, Homo sapiens
ttgttgttgctaaatttgtagcacatctacttaatagaatttttttttgcctttttagataaaattaca

SEQ ID NO: 3349 - DNA, 69 bp, Homo sapiens
atttgtagcacatctacttaatagaatttttttttgcctttttagataaaattacattcttgatagtta

SEQ ID NO: 3350 - DNA, 70 bp, Homo sapiens
gcacatctacttaatagaatttttttttgcctttttagataaaattacattcttgatagttaaatggaga

SEQ ID NO: 3351 - DNA, 70 bp, Homo sapiens
tagaatttttttttgcctttttagataaaattacattcttgatagttaaatggagacattgaaatataga

SEQ ID NO: 3352 - DNA, 71 bp, Homo sapiens
ttttgcctttttagataaaattacattcttgatagttaaatggagacattgaaatatagaaacattttggc

SEQ ID NO: 3353 - DNA, 73 bp, Homo sapiens
tgcctttttagataaaattacattcttgatagttaaatggagacattgaaatatagaaacattttggctaata

SEQ ID NO: 3354 - DNA, 73 bp, Homo sapiens
ttagataaaattacattcttgatagttaaatggagacattgaaatatagaaacattttggctaataaagagta

SEQ ID NO: 3355 - DNA, 72 bp, Homo sapiens
gataaaattacattcttgatagttaaatggagacattgaaatatagaaacattttggctaataaagagtatt

SEQ ID NO: 3356 - DNA, 74 bp, Homo sapiens
tcttgatagttaaatggagacattgaaatatagaaacattttggctaataaagagtatttaatgaaatgatagg

SEQ ID NO: 3357 - DNA, 73 bp, Homo sapiens
ttaaatggagacattgaaatatagaaacattttggctaataaagagtatttaatgaaatgataggtttaatgc

SEQ ID NO: 3358 - DNA, 74 bp, Homo sapiens
tggagacattgaaatatagaaacattttggctaataaagagtatttaatgaaatgataggtttaatgccatatt

SEQ ID NO: 3359 - DNA, 74 bp, Homo sapiens
cattgaaatatagaaacattttggctaataaagagtatttaatgaaatgataggtttaatgccatatttgtgaa

SEQ ID NO: 3360 - DNA, 74 bp, Homo sapiens
tttggctaataaagagtatttaatgaaatgataggtttaatgccatatttgtgaatatggttttacccattgca

SEQ ID NO: 3361 - DNA, 75 bp, Homo sapiens
tgataggtttaatgccatatttgtgaatatggttttacccattgcaactgaacatttagattacaactttactga

SEQ ID NO: 3362 - DNA, 76 bp, Homo sapiens
atgccatatttgtgaatatggttttacccattgcaactgaacatttagattacaactttactgaaagcatgaggga

SEQ ID NO: 3363 - DNA, 73 bp, Homo sapiens
ttgtgaatatggttttacccattgcaactgaacatttagattacaactttactgaaagcatgagggaaatttc

SEQ ID NO: 3364 - DNA, 77 bp, Homo sapiens
attgcaactgaacatttagattacaactttactgaaagcatgagggaaatttcttgcatgtgttactgtggtcatct

SEQ ID NO: 3365 - DNA, 75 bp, Homo sapiens
acaactttactgaaagcatgagggaaatttcttgcatgtgttactgtggtcatcttgcgaaatctttaggtgact

SEQ ID NO: 3366 - DNA, 80 bp, Homo sapiens
tactgaaagcatgagggaaatttcttgcatgtgttactgtggtcatcttgcgaaatctttaggtgacttcagcaataata

SEQ ID NO: 3367 - DNA, 76 bp, Homo sapiens
atgagggaaatttcttgcatgtgttactgtggtcatcttgcgaaatctttaggtgacttcagcaataatagttcgt

SEQ ID NO: 3368 - DNA, 79 bp, Homo sapiens
tttcttgcatgtgttactgtggtcatcttgcgaaatctttaggtgacttcagcaataatagttcgttgctatatattat

SEQ ID NO: 3369 - DNA, 78 bp, Homo sapiens
atgtgttactgtggtcatcttgcgaaatctttaggtgacttcagcaataatagttcgttgctatatattattaactga

SEQ ID NO: 3370 - DNA, 78 bp, Homo sapiens
tcatcttgcgaaatctttaggtgacttcagcaataatagttcgttgctatatattattaactgatttcttcgcctgta

SEQ ID NO: 3371 - DNA, 75 bp, Homo sapiens
gcgaaatctttaggtgacttcagcaataatagttcgttgctatatattattaactgatttcttcgcctgtaagta

SEQ ID NO: 3372 - DNA, 75 bp, Homo sapiens
aggtgacttcagcaataatagttcgttgctatatattattaactgatttcttcgcctgtaagtaattatcagctt

SEQ ID NO: 3373 - DNA, 73 bp, Homo sapiens
cagcaataatagttcgttgctatatattattaactgatttcttcgcctgtaagtaattatcagcttttttcct

SEQ ID NO: 3374 - DNA, 72 bp, Homo sapiens
gttcgttgctatatattattaactgatttcttcgcctgtaagtaattatcagcttttttcctttataataga

SEQ ID NO: 3375 - DNA, 72 bp, Homo sapiens
tcgcctgtaagtaattatcagcttttttcctttataatagaacaattttgaagttctatatattcttggcta

SEQ ID NO: 3376 - DNA, 69 bp, Homo sapiens
taagtaattatcagcttttttcctttataatagaacaattttgaagttctatatattcttggctatttt

SEQ ID NO: 3377 - DNA, 71 bp, Homo sapiens
tataatagaacaattttgaagttctatatattcttggctattttttctttttcagtggtgctactggttta

SEQ ID NO: 3378 - DNA, 70 bp, Homo sapiens
tagaacaattttgaagttctatatattcttggctattttttctttttcagtggtgctactggtttattaa

SEQ ID NO: 3379 - DNA, 72 bp, Homo sapiens
ttcttggctattttttctttttcagtggtgctactggtttattaattttttctagtggctacatgtcatgtc

SEQ ID NO: 3380 - DNA, 69 bp, Homo sapiens
ttttttctttttcagtggtgctactggtttattaattttttctagtggctacatgtcatgtcttttgtt

SEQ ID NO: 3381 - DNA, 74 bp, Homo sapiens
ttcagtggtgctactggtttattaattttttctagtggctacatgtcatgtcttttgtttgagaatattttgtc

SEQ ID NO: 3382 - DNA, 71 bp, Homo sapiens
ggtgctactggtttattaattttttctagtggctacatgtcatgtcttttgtttgagaatattttgtcttt

SEQ ID NO: 3383 - DNA, 72 bp, Homo sapiens
ttctagtggctacatgtcatgtcttttgtttgagaatattttgtcttttaattaaaacactaaaagcttgcc

SEQ ID NO: 3384 - DNA, 69 bp, Homo sapiens
tgtcttttgtttgagaatattttgtcttttaattaaaacactaaaagcttgcctaaatactaatctgtc

SEQ ID NO: 3385 - DNA, 69 bp, Homo sapiens
ttgagaatattttgtcttttaattaaaacactaaaagcttgcctaaatactaatctgtctttttctgac

SEQ ID NO: 3386 - DNA, 68 bp, Homo sapiens
tgtcttttaattaaaacactaaaagcttgcctaaatactaatctgtctttttctgacttgcctgtttt

SEQ ID NO: 3387 - DNA, 69 bp, Homo sapiens
ttaaaacactaaaagcttgcctaaatactaatctgtctttttctgacttgcctgtttttcccgcttaca

SEQ ID NO: 3388 - DNA, 68 bp, Homo sapiens
ctaaaagcttgcctaaatactaatctgtctttttctgacttgcctgtttttcccgcttacatttttac

SEQ ID NO: 3389 - DNA, 69 bp, Homo sapiens
cttgcctaaatactaatctgtctttttctgacttgcctgtttttcccgcttacatttttacttgcttta

SEQ ID NO: 3390 - DNA, 65 bp, Homo sapiens
ctttttctgacttgcctgtttttcccgcttacatttttacttgctttataggaaatactttttaa

SEQ ID NO: 3391 - DNA, 64 bp, Homo sapiens
acttgcctgtttttcccgcttacatttttacttgctttataggaaatactttttaataaactaa

SEQ ID NO: 3392 - DNA, 65 bp, Homo sapiens
tcccgcttacatttttacttgctttataggaaatactttttaataaactaaaaaataatactgga

SEQ ID NO: 3393 - DNA, 65 bp, Homo sapiens
ttttacttgctttataggaaatactttttaataaactaaaaaataatactggaaaatcatttgta

SEQ ID NO: 3394 - DNA, 65 bp, Homo sapiens
cttgctttataggaaatactttttaataaactaaaaaataatactggaaaatcatttgtacttaa

SEQ ID NO: 3395 - DNA, 63 bp, Homo sapiens
ggaaatactttttaataaactaaaaaataatactggaaaatcatttgtacttaatttgttctt

SEQ ID NO: 3396 - DNA, 66 bp, Homo sapiens
ataaactaaaaaataatactggaaaatcatttgtacttaatttgttctttaatatgttctttaaga

SEQ ID NO: 3397 - DNA, 70 bp, Homo sapiens
aaataatactggaaaatcatttgtacttaatttgttctttaatatgttctttaagaacatattgccatta

SEQ ID NO: 3398 - DNA, 75 bp, Homo sapiens
atactggaaaatcatttgtacttaatttgttctttaatatgttctttaagaacatattgccattagctgagcatg

SEQ ID NO: 3399 - DNA, 72 bp, Homo sapiens
cctgtctcttaaaaatgaatctattatgaattgtgtttaaggaagtgaagataaaaaggacattgtcaaatg

SEQ ID NO: 3400 - DNA, 71 bp, Homo sapiens
ctcttaaaaatgaatctattatgaattgtgtttaaggaagtgaagataaaaaggacattgtcaaatggaaa

SEQ ID NO: 3401 - DNA, 70 bp, Homo sapiens
gaatctattatgaattgtgtttaaggaagtgaagataaaaaggacattgtcaaatggaaaagaatatttt

SEQ ID NO: 3402 - DNA, 69 bp, Homo sapiens
atgaattgtgtttaaggaagtgaagataaaaaggacattgtcaaatggaaaagaatatttttcttacaa

SEQ ID NO: 3403 - DNA, 70 bp, Homo sapiens
ggaagtgaagataaaaaggacattgtcaaatggaaaagaatatttttcttacaaagttggtatatgctag

SEQ ID NO: 3404 - DNA, 69 bp, Homo sapiens
gataaaaaggacattgtcaaatggaaaagaatatttttcttacaaagttggtatatgctagttttggaa

SEQ ID NO: 3405 - DNA, 72 bp, Homo sapiens
ggacattgtcaaatggaaaagaatatttttcttacaaagttggtatatgctagttttggaaatgtttctgca

SEQ ID NO: 3406 - DNA, 71 bp, Homo sapiens
tggaaaagaatatttttcttacaaagttggtatatgctagttttggaaatgtttctgcagactgtatttaa

SEQ ID NO: 3407 - DNA, 71 bp, Homo sapiens
tatttttcttacaaagttggtatatgctagttttggaaatgtttctgcagactgtatttaaaatttagatc

SEQ ID NO: 3408 - DNA, 73 bp, Homo sapiens
cttacaaagttggtatatgctagttttggaaatgtttctgcagactgtatttaaaatttagatctcttatcat

SEQ ID NO: 3409 - DNA, 74 bp, Homo sapiens
gttggtatatgctagttttggaaatgtttctgcagactgtatttaaaatttagatctcttatcattttcacatt

SEQ ID NO: 3410 - DNA, 75 bp, Homo sapiens
gctagttttggaaatgtttctgcagactgtatttaaaatttagatctcttatcattttcacatttgtaaatatga

SEQ ID NO: 3411 - DNA, 76 bp, Homo sapiens
tgtttctgcagactgtatttaaaatttagatctcttatcattttcacatttgtaaatatgatttggtaaatgccaa

SEQ ID NO: 3412 - DNA, 76 bp, Homo sapiens
tgcagactgtatttaaaatttagatctcttatcattttcacatttgtaaatatgatttggtaaatgccaacaaata

SEQ ID NO: 3413 - DNA, 71 bp, Homo sapiens
atttaaaatttagatctcttatcattttcacatttgtaaatatgatttggtaaatgccaacaaataattgt

SEQ ID NO: 3414 - DNA, 72 bp, Homo sapiens
tagatctcttatcattttcacatttgtaaatatgatttggtaaatgccaacaaataattgtttaaaaacatt

SEQ ID NO: 3415 - DNA, 69 bp, Homo sapiens
tttcacatttgtaaatatgatttggtaaatgccaacaaataattgtttaaaaacattttgggctgggcg

SEQ ID NO: 3416 - DNA, 62 bp, Homo sapiens
aaaaaaaaatttttggtttgagttagtgctttttcaaggtaaacattgtagaaacttaagta

SEQ ID NO: 3417 - DNA, 66 bp, Homo sapiens
ttttggtttgagttagtgctttttcaaggtaaacattgtagaaacttaagtagttttgagagtaaa

SEQ ID NO: 3418 - DNA, 71 bp, Homo sapiens
gagttagtgctttttcaaggtaaacattgtagaaacttaagtagttttgagagtaaattctctatcatgag

SEQ ID NO: 3419 - DNA, 72 bp, Homo sapiens
gtgctttttcaaggtaaacattgtagaaacttaagtagttttgagagtaaattctctatcatgagtgaaata

SEQ ID NO: 3420 - DNA, 70 bp, Homo sapiens
aaggtaaacattgtagaaacttaagtagttttgagagtaaattctctatcatgagtgaaataattataac

SEQ ID NO: 3421 - DNA, 71 bp, Homo sapiens
gtagaaacttaagtagttttgagagtaaattctctatcatgagtgaaataattataacttagggctgttgt

SEQ ID NO: 3422 - DNA, 73 bp, Homo sapiens
ttaagtagttttgagagtaaattctctatcatgagtgaaataattataacttagggctgttgtttggcattta

SEQ ID NO: 3423 - DNA, 73 bp, Homo sapiens
cacacacactttttttagatctcaggcagcaagtaaacatgtatatcttgatttctttttgaggtggttttgt

SEQ ID NO: 3424 - DNA, 73 bp, Homo sapiens
cacacactttttttagatctcaggcagcaagtaaacatgtatatcttgatttctttttgaggtggttttgtta

SEQ ID NO: 3425 - DNA, 73 bp, Homo sapiens
tttttagatctcaggcagcaagtaaacatgtatatcttgatttctttttgaggtggttttgttataaagtgac

SEQ ID NO: 3426 - DNA, 74 bp, Homo sapiens
tagatctcaggcagcaagtaaacatgtatatcttgatttctttttgaggtggttttgttataaagtgacggtag

SEQ ID NO: 3427 - DNA, 71 bp, Homo sapiens
aggcagcaagtaaacatgtatatcttgatttctttttgaggtggttttgttataaagtgacggtagtagga

SEQ ID NO: 3428 - DNA, 70 bp, Homo sapiens
agtaaacatgtatatcttgatttctttttgaggtggttttgttataaagtgacggtagtaggagcctgtc

SEQ ID NO: 3429 - DNA, 70 bp, Homo sapiens
aacatgtatatcttgatttctttttgaggtggttttgttataaagtgacggtagtaggagcctgtcttgt

SEQ ID NO: 3430 - DNA, 70 bp, Homo sapiens
acatgtatatcttgatttctttttgaggtggttttgttataaagtgacggtagtaggagcctgtcttgtt

SEQ ID NO: 3431 - DNA, 69 bp, Homo sapiens
cttgatttctttttgaggtggttttgttataaagtgacggtagtaggagcctgtcttgtttattgttga

SEQ ID NO: 3432 - DNA, 73 bp, Homo sapiens
ttttgaggtggttttgttataaagtgacggtagtaggagcctgtcttgtttattgttgattagattgctgata

SEQ ID NO: 3433 - DNA, 71 bp, Homo sapiens
ggtggttttgttataaagtgacggtagtaggagcctgtcttgtttattgttgattagattgctgataaaaa

SEQ ID NO: 3434 - DNA, 74 bp, Homo sapiens
gttataaagtgacggtagtaggagcctgtcttgtttattgttgattagattgctgataaaaaatagcagagtta

SEQ ID NO: 3435 - DNA, 74 bp, Homo sapiens
cggtagtaggagcctgtcttgtttattgttgattagattgctgataaaaaatagcagagttagtttaattagca

SEQ ID NO: 3436 - DNA, 73 bp, Homo sapiens
ggagcctgtcttgtttattgttgattagattgctgataaaaaatagcagagttagtttaattagcagttttag

SEQ ID NO: 3437 - DNA, 73 bp, Homo sapiens
gtttattgttgattagattgctgataaaaaatagcagagttagtttaattagcagttttagtaataagcacca

SEQ ID NO: 3438 - DNA, 74 bp, Homo sapiens
tgattagattgctgataaaaaatagcagagttagtttaattagcagttttagtaataagcaccatgaaagttta

SEQ ID NO: 3439 - DNA, 71 bp, Homo sapiens
gcagagttagtttaattagcagttttagtaataagcaccatgaaagtttatttaagctttttaagtcatca

SEQ ID NO: 3440 - DNA, 69 bp, Homo sapiens
tttaattagcagttttagtaataagcaccatgaaagtttatttaagctttttaagtcatcaactaagga

SEQ ID NO: 3441 - DNA, 71 bp, Homo sapiens
agtaataagcaccatgaaagtttatttaagctttttaagtcatcaactaaggattcttaggcagggctcat

SEQ ID NO: 3442 - DNA, 71 bp, Homo sapiens
caccatgaaagtttatttaagctttttaagtcatcaactaaggattcttaggcagggctcattataaattg

SEQ ID NO: 3443 - DNA, 72 bp, Homo sapiens
ttatttaagctttttaagtcatcaactaaggattcttaggcagggctcattataaattgtgaagagggaagc

SEQ ID NO: 3444 - DNA, 73 bp, Homo sapiens
tttttaagtcatcaactaaggattcttaggcagggctcattataaattgtgaagagggaagcctcactattaa

SEQ ID NO: 3445 - DNA, 74 bp, Homo sapiens
atcaactaaggattcttaggcagggctcattataaattgtgaagagggaagcctcactattaatggtcttctgt

SEQ ID NO: 3446 - DNA, 75 bp, Homo sapiens
aggattcttaggcagggctcattataaattgtgaagagggaagcctcactattaatggtcttctgttctgccatt

SEQ ID NO: 3447 - DNA, 81 bp, Homo sapiens
ggctcattataaattgtgaagagggaagcctcactattaatggtcttctgttctgccatttcatgcatattatcttgtata

SEQ ID NO: 3448 - DNA, 78 bp, Homo sapiens
taaattgtgaagagggaagcctcactattaatggtcttctgttctgccatttcatgcatattatcttgtataaaaagc

SEQ ID NO: 3449 - DNA, 78 bp, Homo sapiens
agagggaagcctcactattaatggtcttctgttctgccatttcatgcatattatcttgtataaaaagcgcttactata

SEQ ID NO: 3450 - DNA, 80 bp, Homo sapiens
gcctcactattaatggtcttctgttctgccatttcatgcatattatcttgtataaaaagcgcttactatatgatcgtatt

SEQ ID NO: 3451 - DNA, 78 bp, Homo sapiens
atggtcttctgttctgccatttcatgcatattatcttgtataaaaagcgcttactatatgatcgtatttattttaaga

SEQ ID NO: 3452 - DNA, 80 bp, Homo sapiens
gttctgccatttcatgcatattatcttgtataaaaagcgcttactatatgatcgtatttattttaagatatgccctatca

SEQ ID NO: 3453 - DNA, 79 bp, Homo sapiens
ccatttcatgcatattatcttgtataaaaagcgcttactatatgatcgtatttattttaagatatgccctatcatgtta

SEQ ID NO: 3454 - DNA, 76 bp, Homo sapiens
gcgcttactatatgatcgtatttattttaagatatgccctatcatgttatttgaaggacagttattaaatatgtta

SEQ ID NO: 3455 - DNA, 77 bp, Homo sapiens
tgatcgtatttattttaagatatgccctatcatgttatttgaaggacagttattaaatatgttatggtgttgaatga

SEQ ID NO: 3456 - DNA, 79 bp, Homo sapiens
catgttatttgaaggacagttattaaatatgttatggtgttgaatgaatatagtgctgatgactacacgtatagatctt

SEQ ID NO: 3457 - DNA, 80 bp, Homo sapiens
ggacagttattaaatatgttatggtgttgaatgaatatagtgctgatgactacacgtatagatcttttattgctctggga

SEQ ID NO: 3458 - DNA, 80 bp, Homo sapiens
atgttatggtgttgaatgaatatagtgctgatgactacacgtatagatcttttattgctctgggaatgaatgaaattttg

SEQ ID NO: 3459 - DNA, 75 bp, Homo sapiens
tatagtgctgatgactacacgtatagatcttttattgctctgggaatgaatgaaattttgtattttaagaatttt

SEQ ID NO: 3460 - DNA, 71 bp, Homo sapiens
gactacacgtatagatcttttattgctctgggaatgaatgaaattttgtattttaagaattttttgtggtg

SEQ ID NO: 3461 - DNA, 72 bp, Homo sapiens
agatcttttattgctctgggaatgaatgaaattttgtattttaagaattttttgtggtggttgagtggatgc

SEQ ID NO: 3462 - DNA, 72 bp, Homo sapiens
ttgctctgggaatgaatgaaattttgtattttaagaattttttgtggtggttgagtggatgctagattaaaa

SEQ ID NO: 3463 - DNA, 69 bp, Homo sapiens
gaatgaatgaaattttgtattttaagaattttttgtggtggttgagtggatgctagattaaaaaacacg

SEQ ID NO: 3464 - DNA, 68 bp, Homo sapiens
taagaattttttgtggtggttgagtggatgctagattaaaaaacacgtttagtcaaacttgtttagct

SEQ ID NO: 3465 - DNA, 70 bp, Homo sapiens
ttgtggtggttgagtggatgctagattaaaaaacacgtttagtcaaacttgtttagctttaatatttaga

SEQ ID NO: 3466 - DNA, 69 bp, Homo sapiens
gtggttgagtggatgctagattaaaaaacacgtttagtcaaacttgtttagctttaatatttagaagta

SEQ ID NO: 3467 - DNA, 65 bp, Homo sapiens
aaaaacacgtttagtcaaacttgtttagctttaatatttagaagtatgtaaatactatttggatt

SEQ ID NO: 3468 - DNA, 68 bp, Homo sapiens
cttgtttagctttaatatttagaagtatgtaaatactatttggattttacttttcgcatatataagtt

SEQ ID NO: 3469 - DNA, 69 bp, Homo sapiens
aatatttagaagtatgtaaatactatttggattttacttttcgcatatataagtttaatataacttgag

SEQ ID NO: 3470 - DNA, 71 bp, Homo sapiens
ttggattttacttttcgcatatataagtttaatataacttgagtttttgctgtcaagcttgaatctgtttt

SEQ ID NO: 3471 - DNA, 71 bp, Homo sapiens
acttttcgcatatataagtttaatataacttgagtttttgctgtcaagcttgaatctgtttttacattttg

SEQ ID NO: 3472 - DNA, 68 bp, Homo sapiens
taagtttaatataacttgagtttttgctgtcaagcttgaatctgtttttacattttgtttttaataac

SEQ ID NO: 3473 - DNA, 70 bp, Homo sapiens
taacttgagtttttgctgtcaagcttgaatctgtttttacattttgtttttaataactgagatttactgg

SEQ ID NO: 3474 - DNA, 74 bp, Homo sapiens
tgagtttttgctgtcaagcttgaatctgtttttacattttgtttttaataactgagatttactggtcatctaca

SEQ ID NO: 3475 - DNA, 74 bp, Homo sapiens
tgtcaagcttgaatctgtttttacattttgtttttaataactgagatttactggtcatctacaaagtaagcaca

SEQ ID NO: 3476 - DNA, 70 bp, Homo sapiens
ctgtttttacattttgtttttaataactgagatttactggtcatctacaaagtaagcacactaaatgaag

SEQ ID NO: 3477 - DNA, 72 bp, Homo sapiens
cattttgtttttaataactgagatttactggtcatctacaaagtaagcacactaaatgaaggaaacatactg

SEQ ID NO: 3478 - DNA, 71 bp, Homo sapiens
gtttttaataactgagatttactggtcatctacaaagtaagcacactaaatgaaggaaacatactgtaagt

SEQ ID NO: 3479 - DNA, 76 bp, Homo sapiens
gatttactggtcatctacaaagtaagcacactaaatgaaggaaacatactgtaagtttattattagacatgcttgc

SEQ ID NO: 3480 - DNA, 77 bp, Homo sapiens
tggtcatctacaaagtaagcacactaaatgaaggaaacatactgtaagtttattattagacatgcttgcttggcttg

SEQ ID NO: 3481 - DNA, 74 bp, Homo sapiens
agtaagcacactaaatgaaggaaacatactgtaagtttattattagacatgcttgcttggcttgggaatatttg

SEQ ID NO: 3482 - DNA, 74 bp, Homo sapiens
gcacactaaatgaaggaaacatactgtaagtttattattagacatgcttgcttggcttgggaatatttgggaaa

SEQ ID NO: 3483 - DNA, 71 bp, Homo sapiens
gaaggaaacatactgtaagtttattattagacatgcttgcttggcttgggaatatttgggaaaggacttta

SEQ ID NO: 3484 - DNA, 70 bp, Homo sapiens
ctgtaagtttattattagacatgcttgcttggcttgggaatatttgggaaaggactttaaaaatatggga

SEQ ID NO: 3485 - DNA, 74 bp, Homo sapiens
tattagacatgcttgcttggcttgggaatatttgggaaaggactttaaaaatatgggatgattataagtgatac

SEQ ID NO: 3486 - DNA, 74 bp, Homo sapiens
gacatgcttgcttggcttgggaatatttgggaaaggactttaaaaatatgggatgattataagtgatactatag

SEQ ID NO: 3487 - DNA, 69 bp, Homo sapiens
cttggcttgggaatatttgggaaaggactttaaaaatatgggatgattataagtgatactatagttaaa

SEQ ID NO: 3488 - DNA, 71 bp, Homo sapiens
tttgggaaaggactttaaaaatatgggatgattataagtgatactatagttaaaagattgagtgttataga

SEQ ID NO: 3489 - DNA, 72 bp, Homo sapiens
aaaaatatgggatgattataagtgatactatagttaaaagattgagtgttatagactatctttttctccttc

SEQ ID NO: 3490 - DNA, 72 bp, Homo sapiens
ggatgattataagtgatactatagttaaaagattgagtgttatagactatctttttctccttccctccttac

SEQ ID NO: 3491 - DNA, 69 bp, Homo sapiens
agtgatactatagttaaaagattgagtgttatagactatctttttctccttccctccttacctctttta

SEQ ID NO: 3492 - DNA, 65 bp, Homo sapiens
atagttaaaagattgagtgttatagactatctttttctccttccctccttacctcttttaagttt

SEQ ID NO: 3493 - DNA, 72 bp, Homo sapiens
catgcctggcccctcttttaaaatttttatgttcagtagagttgtcttgaaaatatgcctagcatgttttta

SEQ ID NO: 3494 - DNA, 71 bp, Homo sapiens
ccctcttttaaaatttttatgttcagtagagttgtcttgaaaatatgcctagcatgtttttagtgttgcat

SEQ ID NO: 3495 - DNA, 72 bp, Homo sapiens
aaatttttatgttcagtagagttgtcttgaaaatatgcctagcatgtttttagtgttgcattgaaaggtaac

SEQ ID NO: 3496 - DNA, 78 bp, Homo sapiens
ttatgttcagtagagttgtcttgaaaatatgcctagcatgtttttagtgttgcattgaaaggtaacgctcataatcaa

SEQ ID NO: 3497 - DNA, 78 bp, Homo sapiens
gttgtcttgaaaatatgcctagcatgtttttagtgttgcattgaaaggtaacgctcataatcaagtcagacattagta

SEQ ID NO: 3498 - DNA, 76 bp, Homo sapiens
cttgaaaatatgcctagcatgtttttagtgttgcattgaaaggtaacgctcataatcaagtcagacattagtattt

SEQ ID NO: 3499 - DNA, 75 bp, Homo sapiens
gcctagcatgtttttagtgttgcattgaaaggtaacgctcataatcaagtcagacattagtatttttaaaacaga

SEQ ID NO: 3500 - DNA, 73 bp, Homo sapiens
ttttagtgttgcattgaaaggtaacgctcataatcaagtcagacattagtatttttaaaacagacagttccca

SEQ ID NO: 3501 - DNA, 73 bp, Homo sapiens
gcattgaaaggtaacgctcataatcaagtcagacattagtatttttaaaacagacagttcccaatttgaaatg

SEQ ID NO: 3502 - DNA, 70 bp, Homo sapiens
cataatcaagtcagacattagtatttttaaaacagacagttcccaatttgaaatggtttgaattacgatt

SEQ ID NO: 3503 - DNA, 69 bp, Homo sapiens
tcagacattagtatttttaaaacagacagttcccaatttgaaatggtttgaattacgatttttagactg

SEQ ID NO: 3504 - DNA, 69 bp, Homo sapiens
tttaaaacagacagttcccaatttgaaatggtttgaattacgatttttagactgtacactggtatgaaa

SEQ ID NO: 3505 - DNA, 72 bp, Homo sapiens
aacagacagttcccaatttgaaatggtttgaattacgatttttagactgtacactggtatgaaaactatgca

SEQ ID NO: 3506 - DNA, 74 bp, Homo sapiens
ggtttgaattacgatttttagactgtacactggtatgaaaactatgcatttattgtgcttctagatttaccatg

SEQ ID NO: 3507 - DNA, 76 bp, Homo sapiens
acgatttttagactgtacactggtatgaaaactatgcatttattgtgcttctagatttaccatggagttatgtcag

SEQ ID NO: 3508 - DNA, 76 bp, Homo sapiens
agactgtacactggtatgaaaactatgcatttattgtgcttctagatttaccatggagttatgtcaggataaactt

SEQ ID NO: 3509 - DNA, 74 bp, Homo sapiens
ctggtatgaaaactatgcatttattgtgcttctagatttaccatggagttatgtcaggataaacttttcgtaag

SEQ ID NO: 3510 - DNA, 73 bp, Homo sapiens
gaaaactatgcatttattgtgcttctagatttaccatggagttatgtcaggataaacttttcgtaagttgaaa

SEQ ID NO: 3511 - DNA, 72 bp, Homo sapiens
catttattgtgcttctagatttaccatggagttatgtcaggataaacttttcgtaagttgaaaatattgtaa

SEQ ID NO: 3512 - DNA, 72 bp, Homo sapiens
gcttctagatttaccatggagttatgtcaggataaacttttcgtaagttgaaaatattgtaagttgaaagca

SEQ ID NO: 3513 - DNA, 70 bp, Homo sapiens
ccatggagttatgtcaggataaacttttcgtaagttgaaaatattgtaagttgaaagcacatttttaaca

SEQ ID NO: 3514 - DNA, 69 bp, Homo sapiens
gttatgtcaggataaacttttcgtaagttgaaaatattgtaagttgaaagcacatttttaacaggatat

SEQ ID NO: 3515 - DNA, 71 bp, Homo sapiens
agttgaaaatattgtaagttgaaagcacatttttaacaggatattttcagcttatgatggggttattgtaa

SEQ ID NO: 3516 - DNA, 74 bp, Homo sapiens
attgtaagttgaaagcacatttttaacaggatattttcagcttatgatggggttattgtaaggtgaggagcatc

SEQ ID NO: 3517 - DNA, 76 bp, Homo sapiens
gaaagcacatttttaacaggatattttcagcttatgatggggttattgtaaggtgaggagcatctgtattgtatat

SEQ ID NO: 3518 - DNA, 78 bp, Homo sapiens
catttttaacaggatattttcagcttatgatggggttattgtaaggtgaggagcatctgtattgtatattatgagcta

SEQ ID NO: 3519 - DNA, 76 bp, Homo sapiens
aggatattttcagcttatgatggggttattgtaaggtgaggagcatctgtattgtatattatgagctaaattttgg

SEQ ID NO: 3520 - DNA, 78 bp, Homo sapiens
gggttattgtaaggtgaggagcatctgtattgtatattatgagctaaattttggtgatactgttcataagatatacat

SEQ ID NO: 3521 - DNA, 79 bp, Homo sapiens
aggtgaggagcatctgtattgtatattatgagctaaattttggtgatactgttcataagatatacattgaaccactttc

SEQ ID NO: 3522 - DNA, 80 bp, Homo sapiens
ggagcatctgtattgtatattatgagctaaattttggtgatactgttcataagatatacattgaaccactttctttctga

SEQ ID NO: 3523 - DNA, 76 bp, Homo sapiens
gtattgtatattatgagctaaattttggtgatactgttcataagatatacattgaaccactttctttctgaattct

SEQ ID NO: 3524 - DNA, 77 bp, Homo sapiens
tgagctaaattttggtgatactgttcataagatatacattgaaccactttctttctgaattcttttatctgccttca

SEQ ID NO: 3525 - DNA, 78 bp, Homo sapiens
ttttggtgatactgttcataagatatacattgaaccactttctttctgaattcttttatctgccttcattctggcaca

SEQ ID NO: 3526 - DNA, 77 bp, Homo sapiens
tactgttcataagatatacattgaaccactttctttctgaattcttttatctgccttcattctggcacatatttttc

SEQ ID NO: 3527 - DNA, 73 bp, Homo sapiens
taagatatacattgaaccactttctttctgaattcttttatctgccttcattctggcacatatttttcttttt

SEQ ID NO: 3528 - DNA, 66 bp, Homo sapiens
taattttttaaaagtaggtgagcgaggtgtgcctgttgtgttgaaccgacctccgccccccccacc

SEQ ID NO: 3529 - DNA, 66 bp, Homo sapiens
ttttaaaagtaggtgagcgaggtgtgcctgttgtgttgaaccgacctccgccccccccaccccgcc

SEQ ID NO: 3530 - DNA, 67 bp, Homo sapiens
gtgagcgaggtgtgcctgttgtgttgaaccgacctccgccccccccaccccgcccccgcccccaatc

SEQ ID NO: 3531 - DNA, 65 bp, Homo sapiens
ggtgtgcctgttgtgttgaaccgacctccgccccccccaccccgcccccgcccccaatcccactg

SEQ ID NO: 3532 - DNA, 65 bp, Homo sapiens
ttgtgttgaaccgacctccgccccccccaccccgcccccgcccccaatcccactggcgccacgag

SEQ ID NO: 3533 - DNA, 65 bp, Homo sapiens
acctccgccccccccaccccgcccccgcccccaatcccactggcgccacgagggagatggcaggg

SEQ ID NO: 3534 - DNA, 69 bp, Homo sapiens
cccaccccgcccccgcccccaatcccactggcgccacgagggagatggcaggggcagggaggtctactg

SEQ ID NO: 3535 - DNA, 71 bp, Homo sapiens
ccccgcccccaatcccactggcgccacgagggagatggcaggggcagggaggtctactgggattccacacc

SEQ ID NO: 3536 - DNA, 76 bp, Homo sapiens
aatcccactggcgccacgagggagatggcaggggcagggaggtctactgggattccacacccctgcctcccatgca

SEQ ID NO: 3537 - DNA, 77 bp, Homo sapiens
actggcgccacgagggagatggcaggggcagggaggtctactgggattccacacccctgcctcccatgcactgccca

SEQ ID NO: 3538 - DNA, 75 bp, Homo sapiens
agggagatggcaggggcagggaggtctactgggattccacacccctgcctcccatgcactgcccatgggcgtaaa

SEQ ID NO: 3539 - DNA, 74 bp, Homo sapiens
aggggcagggaggtctactgggattccacacccctgcctcccatgcactgcccatgggcgtaaaggagagacga

SEQ ID NO: 3540 - DNA, 74 bp, Homo sapiens
gggcagggaggtctactgggattccacacccctgcctcccatgcactgcccatgggcgtaaaggagagacgagg

SEQ ID NO: 3541 - DNA, 73 bp, Homo sapiens
agggaggtctactgggattccacacccctgcctcccatgcactgcccatgggcgtaaaggagagacgaggggc

SEQ ID NO: 3542 - DNA, 73 bp, Homo sapiens
gtctactgggattccacacccctgcctcccatgcactgcccatgggcgtaaaggagagacgaggggcccgtgg

SEQ ID NO: 3543 - DNA, 73 bp, Homo sapiens
gattccacacccctgcctcccatgcactgcccatgggcgtaaaggagagacgaggggcccgtggggtgaaaga

SEQ ID NO: 3544 - DNA, 72 bp, Homo sapiens
attccacacccctgcctcccatgcactgcccatgggcgtaaaggagagacgaggggcccgtggggtgaaaga

SEQ ID NO: 3545 - DNA, 72 bp, Homo sapiens
ccctgcctcccatgcactgcccatgggcgtaaaggagagacgaggggcccgtggggtgaaagagaagaccag

SEQ ID NO: 3546 - DNA, 72 bp, Homo sapiens
cctcccatgcactgcccatgggcgtaaaggagagacgaggggcccgtggggtgaaagagaagaccagtttca

SEQ ID NO: 3547 - DNA, 72 bp, Homo sapiens
tcccatgcactgcccatgggcgtaaaggagagacgaggggcccgtggggtgaaagagaagaccagtttcatt

SEQ ID NO: 3548 - DNA, 71 bp, Homo sapiens
atgcactgcccatgggcgtaaaggagagacgaggggcccgtggggtgaaagagaagaccagtttcatttcc

SEQ ID NO: 3549 - DNA, 70 bp, Homo sapiens
atgggcgtaaaggagagacgaggggcccgtggggtgaaagagaagaccagtttcatttcccatgaatgtg

SEQ ID NO: 3550 - DNA, 68 bp, Homo sapiens
aaaggagagacgaggggcccgtggggtgaaagagaagaccagtttcatttcccatgaatgtgggtccc

SEQ ID NO: 3551 - DNA, 72 bp, Homo sapiens
gggcccgtggggtgaaagagaagaccagtttcatttcccatgaatgtgggtccctcttctgtcgtgactcag

SEQ ID NO: 3552 - DNA, 77 bp, Homo sapiens
agagaagaccagtttcatttcccatgaatgtgggtccctcttctgtcgtgactcaggcctggtccaccgcattgatc

SEQ ID NO: 3553 - DNA, 79 bp, Homo sapiens
tttcatttcccatgaatgtgggtccctcttctgtcgtgactcaggcctggtccaccgcattgatcctggcatctgtttc

SEQ ID NO: 3554 - DNA, 79 bp, Homo sapiens
atgaatgtgggtccctcttctgtcgtgactcaggcctggtccaccgcattgatcctggcatctgtttctctttgtgtat

SEQ ID NO: 3555 - DNA, 77 bp, Homo sapiens
tccctcttctgtcgtgactcaggcctggtccaccgcattgatcctggcatctgtttctctttgtgtatttaaaaata

SEQ ID NO: 3556 - DNA, 73 bp, Homo sapiens
ggtccaccgcattgatcctggcatctgtttctctttgtgtatttaaaaatactatttatcgaagtataaataa

SEQ ID NO: 3557 - DNA, 74 bp, Homo sapiens
ttgatcctggcatctgtttctctttgtgtatttaaaaatactatttatcgaagtataaataagtgatattgtta

SEQ ID NO: 3558 - DNA, 69 bp, Homo sapiens
ctctttgtgtatttaaaaatactatttatcgaagtataaataagtgatattgttattttatatttaata

SEQ ID NO: 3559 - DNA, 69 bp, Homo sapiens
aaaatactatttatcgaagtataaataagtgatattgttattttatatttaatattaaatactgtggta

SEQ ID NO: 3560 - DNA, 70 bp, Homo sapiens
actatttatcgaagtataaataagtgatattgttattttatatttaatattaaatactgtggtatccaaa

SEQ ID NO: 3561 - DNA, 69 bp, Homo sapiens
gaagtataaataagtgatattgttattttatatttaatattaaatactgtggtatccaaattatttaaa

SEQ ID NO: 3562 - DNA, 68 bp, Homo sapiens
tatttaatattaaatactgtggtatccaaattatttaaaaatgaaataacttaatttacaacttcata

SEQ ID NO: 3563 - DNA, 67 bp, Homo sapiens
tattaaatactgtggtatccaaattatttaaaaatgaaataacttaatttacaacttcatatggttt

SEQ ID NO: 3564 - DNA, 67 bp, Homo sapiens
taaatactgtggtatccaaattatttaaaaatgaaataacttaatttacaacttcatatggttttag

SEQ ID NO: 3565 - DNA, 66 bp, Homo sapiens
actgtggtatccaaattatttaaaaatgaaataacttaatttacaacttcatatggttttaggaaa

SEQ ID NO: 3566 - DNA, 62 bp, Homo sapiens
attatttaaaaatgaaataacttaatttacaacttcatatggttttaggaaaaatttaaaaa

SEQ ID NO: 3567 - DNA, 75 bp, Homo sapiens
aaatttaaaaatatatagcctttgcttttcagagaagctctgtgtgattcaagctgtattagcactggttaggta

SEQ ID NO: 3568 - DNA, 81 bp, Homo sapiens
tttgcttttcagagaagctctgtgtgattcaagctgtattagcactggttaggtactaactgtagtgcgagcaaggagaga

SEQ ID NO: 3569 - DNA, 80 bp, Homo sapiens
ttttcagagaagctctgtgtgattcaagctgtattagcactggttaggtactaactgtagtgcgagcaaggagagaagaa

SEQ ID NO: 3570 - DNA, 74 bp, Homo sapiens
attcaagctgtattagcactggttaggtactaactgtagtgcgagcaaggagagaagaaaagttaatggtgaaa

SEQ ID NO: 3571 - DNA, 75 bp, Homo sapiens
tagcactggttaggtactaactgtagtgcgagcaaggagagaagaaaagttaatggtgaaatatggcttcgaata

SEQ ID NO: 3572 - DNA, 73 bp, Homo sapiens
ttaggtactaactgtagtgcgagcaaggagagaagaaaagttaatggtgaaatatggcttcgaataagggata

SEQ ID NO: 3573 - DNA, 71 bp, Homo sapiens
tgtagtgcgagcaaggagagaagaaaagttaatggtgaaatatggcttcgaataagggatagtttgttttt

SEQ ID NO: 3574 - DNA, 69 bp, Homo sapiens
cgagcaaggagagaagaaaagttaatggtgaaatatggcttcgaataagggatagtttgttttttcttg

SEQ ID NO: 3575 - DNA, 68 bp, Homo sapiens
gcaaggagagaagaaaagttaatggtgaaatatggcttcgaataagggatagtttgttttttcttgtt

SEQ ID NO: 3576 - DNA, 67 bp, Homo sapiens
gagagaagaaaagttaatggtgaaatatggcttcgaataagggatagtttgttttttcttgtttctt

SEQ ID NO: 3577 - DNA, 70 bp, Homo sapiens
ggcgttagccaccacccaggctgattaaaggatgtttctgcaaaaattgaaaatttggtatatattttaa

SEQ ID NO: 3578 - DNA, 69 bp, Homo sapiens
agccaccacccaggctgattaaaggatgtttctgcaaaaattgaaaatttggtatatattttaaaagga

SEQ ID NO: 3579 - DNA, 71 bp, Homo sapiens
ccaggctgattaaaggatgtttctgcaaaaattgaaaatttggtatatattttaaaaggaaccagagcata

SEQ ID NO: 3580 - DNA, 70 bp, Homo sapiens
ctgattaaaggatgtttctgcaaaaattgaaaatttggtatatattttaaaaggaaccagagcatatatt

SEQ ID NO: 3581 - DNA, 70 bp, Homo sapiens
aggatgtttctgcaaaaattgaaaatttggtatatattttaaaaggaaccagagcatatatttaaaatca

SEQ ID NO: 3582 - DNA, 70 bp, Homo sapiens
gatgtttctgcaaaaattgaaaatttggtatatattttaaaaggaaccagagcatatatttaaaatcaat

SEQ ID NO: 3583 - DNA, 70 bp, Homo sapiens
tgcaaaaattgaaaatttggtatatattttaaaaggaaccagagcatatatttaaaatcaattaaagctg

SEQ ID NO: 3584 - DNA, 72 bp, Homo sapiens
attgaaaatttggtatatattttaaaaggaaccagagcatatatttaaaatcaattaaagctgtgcctatca

SEQ ID NO: 3585 - DNA, 72 bp, Homo sapiens
gaaaatttggtatatattttaaaaggaaccagagcatatatttaaaatcaattaaagctgtgcctatcagga

SEQ ID NO: 3586 - DNA, 75 bp, Homo sapiens
aaaggaaccagagcatatatttaaaatcaattaaagctgtgcctatcaggattaaattcagtcactaagagttca

SEQ ID NO: 3587 - DNA, 75 bp, Homo sapiens
ggaaccagagcatatatttaaaatcaattaaagctgtgcctatcaggattaaattcagtcactaagagttcaaat

SEQ ID NO: 3588 - DNA, 72 bp, Homo sapiens
aaaatcaattaaagctgtgcctatcaggattaaattcagtcactaagagttcaaattgtgaattattatttt

SEQ ID NO: 3589 - DNA, 75 bp, Homo sapiens
aagctgtgcctatcaggattaaattcagtcactaagagttcaaattgtgaattattatttttgtagaatgccttc

SEQ ID NO: 3590 - DNA, 73 bp, Homo sapiens
cctatcaggattaaattcagtcactaagagttcaaattgtgaattattatttttgtagaatgccttctaatat

SEQ ID NO: 3591 - DNA, 74 bp, Homo sapiens
ttcagtcactaagagttcaaattgtgaattattatttttgtagaatgccttctaatatttgttatgcctgttaa

SEQ ID NO: 3592 - DNA, 74 bp, Homo sapiens
tcaaattgtgaattattatttttgtagaatgccttctaatatttgttatgcctgttaatgttagttaatgttga

SEQ ID NO: 3593 - DNA, 70 bp, Homo sapiens
attatttttgtagaatgccttctaatatttgttatgcctgttaatgttagttaatgttgattagtaaaag

SEQ ID NO: 3594 - DNA, 76 bp, Homo sapiens
gtagaatgccttctaatatttgttatgcctgttaatgttagttaatgttgattagtaaaaggaaagcatgctgctg

SEQ ID NO: 3595 - DNA, 74 bp, Homo sapiens
gttatgcctgttaatgttagttaatgttgattagtaaaaggaaagcatgctgctgttctataagttcacttttg

SEQ ID NO: 3596 - DNA, 75 bp, Homo sapiens
gcctgttaatgttagttaatgttgattagtaaaaggaaagcatgctgctgttctataagttcacttttggcaaca

SEQ ID NO: 3597 - DNA, 73 bp, Homo sapiens
ttaatgttgattagtaaaaggaaagcatgctgctgttctataagttcacttttggcaacaaacgtgtgggtta

SEQ ID NO: 3598 - DNA, 71 bp, Homo sapiens
attagtaaaaggaaagcatgctgctgttctataagttcacttttggcaacaaacgtgtgggttattttcta

SEQ ID NO: 3599 - DNA, 72 bp, Homo sapiens
aggaaagcatgctgctgttctataagttcacttttggcaacaaacgtgtgggttattttctacgccaattaa

SEQ ID NO: 3600 - DNA, 70 bp, Homo sapiens
ctgctgttctataagttcacttttggcaacaaacgtgtgggttattttctacgccaattaatcacccaat

SEQ ID NO: 3601 - DNA, 70 bp, Homo sapiens
ttctataagttcacttttggcaacaaacgtgtgggttattttctacgccaattaatcacccaattctctg

SEQ ID NO: 3602 - DNA, 69 bp, Homo sapiens
acttttggcaacaaacgtgtgggttattttctacgccaattaatcacccaattctctgtggacaccaag

SEQ ID NO: 3603 - DNA, 70 bp, Homo sapiens
acaaacgtgtgggttattttctacgccaattaatcacccaattctctgtggacaccaagtgggtatccta

SEQ ID NO: 3604 - DNA, 74 bp, Homo sapiens
ttattttctacgccaattaatcacccaattctctgtggacaccaagtgggtatcctacaattcagttctgatat

SEQ ID NO: 3605 - DNA, 75 bp, Homo sapiens
ttctacgccaattaatcacccaattctctgtggacaccaagtgggtatcctacaattcagttctgatattaccca

SEQ ID NO: 3606 - DNA, 76 bp, Homo sapiens
acaccaagtgggtatcctacaattcagttctgatattacccagagttagtgcagatcccatagatactgggtccca

SEQ ID NO: 3607 - DNA, 77 bp, Homo sapiens
ggtatcctacaattcagttctgatattacccagagttagtgcagatcccatagatactgggtcccacgagactgccc

SEQ ID NO: 3608 - DNA, 78 bp, Homo sapiens
tacaattcagttctgatattacccagagttagtgcagatcccatagatactgggtcccacgagactgcccccacttca

SEQ ID NO: 3609 - DNA, 77 bp, Homo sapiens
ttctgatattacccagagttagtgcagatcccatagatactgggtcccacgagactgcccccacttcagaggccagt

SEQ ID NO: 3610 - DNA, 77 bp, Homo sapiens
agatcccatagatactgggtcccacgagactgcccccacttcagaggccagttgcaagtcccagattgtcacctgta

SEQ ID NO: 3611 - DNA, 74 bp, Homo sapiens
atagatactgggtcccacgagactgcccccacttcagaggccagttgcaagtcccagattgtcacctgtacttt

SEQ ID NO: 3612 - DNA, 74 bp, Homo sapiens
tcccacgagactgcccccacttcagaggccagttgcaagtcccagattgtcacctgtacttttcaccaactggt

SEQ ID NO: 3613 - DNA, 73 bp, Homo sapiens
tgcccccacttcagaggccagttgcaagtcccagattgtcacctgtacttttcaccaactggttataaattgg

SEQ ID NO: 3614 - DNA, 70 bp, Homo sapiens
acttcagaggccagttgcaagtcccagattgtcacctgtacttttcaccaactggttataaattgggggt

SEQ ID NO: 3615 - DNA, 69 bp, Homo sapiens
gttgcaagtcccagattgtcacctgtacttttcaccaactggttataaattgggggttccacacaacct

SEQ ID NO: 3616 - DNA, 69 bp, Homo sapiens
tcccagattgtcacctgtacttttcaccaactggttataaattgggggttccacacaaccttctcctta

SEQ ID NO: 3617 - DNA, 66 bp, Homo sapiens
acctgtacttttcaccaactggttataaattgggggttccacacaaccttctccttagattaggta

SEQ ID NO: 3618 - DNA, 68 bp, Homo sapiens
ttttcaccaactggttataaattgggggttccacacaaccttctccttagattaggtaatttgctaga

SEQ ID NO: 3619 - DNA, 72 bp, Homo sapiens
taaattgggggttccacacaaccttctccttagattaggtaatttgctagaatagctcacagaactccagaa

SEQ ID NO: 3620 - DNA, 72 bp, Homo sapiens
gttccacacaaccttctccttagattaggtaatttgctagaatagctcacagaactccagaacactattttt

SEQ ID NO: 3621 - DNA, 76 bp, Homo sapiens
taggtaatttgctagaatagctcacagaactccagaacactattttttattacttatgtattgtgaaggatacagc

SEQ ID NO: 3622 - DNA, 77 bp, Homo sapiens
agaactccagaacactattttttattacttatgtattgtgaaggatacagctcaggaacagctggatggaagagaca

SEQ ID NO: 3623 - DNA, 79 bp, Homo sapiens
tattgtgaaggatacagctcaggaacagctggatggaagagacacataggacaagttatggggaggtaggtagagcttc

SEQ ID NO: 3624 - DNA, 77 bp, Homo sapiens
ctcaggaacagctggatggaagagacacataggacaagttatggggaggtaggtagagcttccatgccctctccagg

SEQ ID NO: 3625 - DNA, 77 bp, Homo sapiens
atggaagagacacataggacaagttatggggaggtaggtagagcttccatgccctctccaggtgctccacccacaca

SEQ ID NO: 3626 - DNA, 76 bp, Homo sapiens
acacataggacaagttatggggaggtaggtagagcttccatgccctctccaggtgctccacccacacagcatcggt

SEQ ID NO: 3627 - DNA, 77 bp, Homo sapiens
aagttatggggaggtaggtagagcttccatgccctctccaggtgctccacccacacagcatcggttgtgttcactga

SEQ ID NO: 3628 - DNA, 81 bp, Homo sapiens
gaggtaggtagagcttccatgccctctccaggtgctccacccacacagcatcggttgtgttcactgatcaggaagctctta

SEQ ID NO: 3629 - DNA, 82 bp, Homo sapiens
tagagcttccatgccctctccaggtgctccacccacacagcatcggttgtgttcactgatcaggaagctcttagaacttcat

SEQ ID NO: 3630 - DNA, 79 bp, Homo sapiens
gccctctccaggtgctccacccacacagcatcggttgtgttcactgatcaggaagctcttagaacttcattgttaagat

SEQ ID NO: 3631 - DNA, 77 bp, Homo sapiens
tccaggtgctccacccacacagcatcggttgtgttcactgatcaggaagctcttagaacttcattgttaagattttt

SEQ ID NO: 3632 - DNA, 72 bp, Homo sapiens
atcggttgtgttcactgatcaggaagctcttagaacttcattgttaagattttttctggaggtttcccatta

SEQ ID NO: 3633 - DNA, 74 bp, Homo sapiens
ttcactgatcaggaagctcttagaacttcattgttaagattttttctggaggtttcccattatgtaggcacaat

SEQ ID NO: 3634 - DNA, 72 bp, Homo sapiens
gatcaggaagctcttagaacttcattgttaagattttttctggaggtttcccattatgtaggcacaatttat

SEQ ID NO: 3635 - DNA, 69 bp, Homo sapiens
tagaacttcattgttaagattttttctggaggtttcccattatgtaggcacaatttattaaatcgttgg

SEQ ID NO: 3636 - DNA, 71 bp, Homo sapiens
tttttctggaggtttcccattatgtaggcacaatttattaaatcgttggtcattggtgattgaattcaacc

SEQ ID NO: 3637 - DNA, 71 bp, Homo sapiens
aggtttcccattatgtaggcacaatttattaaatcgttggtcattggtgattgaattcaacctccagccct

SEQ ID NO: 3638 - DNA, 70 bp, Homo sapiens
ttaaatcgttggtcattggtgattgaattcaacctccagcccttcacccctcaacagaggtaccggggta

SEQ ID NO: 3639 - DNA, 67 bp, Homo sapiens
attggtgattgaattcaacctccagcccttcacccctcaacagaggtaccggggtaggacttaaggt

SEQ ID NO: 3640 - DNA, 66 bp, Homo sapiens
attgaattcaacctccagcccttcacccctcaacagaggtaccggggtaggacttaaggttccaaa

SEQ ID NO: 3641 - DNA, 69 bp, Homo sapiens
aacctccagcccttcacccctcaacagaggtaccggggtaggacttaaggttccaaatctctgatcaca

SEQ ID NO: 3642 - DNA, 68 bp, Homo sapiens
cccttcacccctcaacagaggtaccggggtaggacttaaggttccaaatctctgatcacatggttggt

SEQ ID NO: 3643 - DNA, 72 bp, Homo sapiens
aacagaggtaccggggtaggacttaaggttccaaatctctgatcacatggttggttcctctggtgatcagcg

SEQ ID NO: 3644 - DNA, 75 bp, Homo sapiens
ggggtaggacttaaggttccaaatctctgatcacatggttggttcctctggtgatcagcgtctatcctccaagat

SEQ ID NO: 3645 - DNA, 76 bp, Homo sapiens
ttaaggttccaaatctctgatcacatggttggttcctctggtgatcagcgtctatcctccaagatttaccttatta

SEQ ID NO: 3646 - DNA, 77 bp, Homo sapiens
aaatctctgatcacatggttggttcctctggtgatcagcgtctatcctccaagatttaccttattagtgtaaactca

SEQ ID NO: 3647 - DNA, 73 bp, Homo sapiens
ttggttcctctggtgatcagcgtctatcctccaagatttaccttattagtgtaaactcaagtatggttgaaag

SEQ ID NO: 3648 - DNA, 73 bp, Homo sapiens
tggtgatcagcgtctatcctccaagatttaccttattagtgtaaactcaagtatggttgaaaggggcttatta

SEQ ID NO: 3649 - DNA, 72 bp, Homo sapiens
cgtctatcctccaagatttaccttattagtgtaaactcaagtatggttgaaaggggcttattatgagcacta

SEQ ID NO: 3650 - DNA, 69 bp, Homo sapiens
cttattagtgtaaactcaagtatggttgaaaggggcttattatgagcactaggggaattcaaagagttt

SEQ ID NO: 3651 - DNA, 70 bp, Homo sapiens
agtgtaaactcaagtatggttgaaaggggcttattatgagcactaggggaattcaaagagttttacaagc

SEQ ID NO: 3652 - DNA, 72 bp, Homo sapiens
aagtatggttgaaaggggcttattatgagcactaggggaattcaaagagttttacaagctctgtgccaggaa

SEQ ID NO: 3653 - DNA, 74 bp, Homo sapiens
aaaggggcttattatgagcactaggggaattcaaagagttttacaagctctgtgccaggaatctgagaataaga

SEQ ID NO: 3654 - DNA, 76 bp, Homo sapiens
ttattatgagcactaggggaattcaaagagttttacaagctctgtgccaggaatctgagaataagaccaaatatta

SEQ ID NO: 3655 - DNA, 74 bp, Homo sapiens
aagagttttacaagctctgtgccaggaatctgagaataagaccaaatattataacaaaaaatgctcttatcacc

SEQ ID NO: 3656 - DNA, 76 bp, Homo sapiens
ttttacaagctctgtgccaggaatctgagaataagaccaaatattataacaaaaaatgctcttatcaccccatcac

SEQ ID NO: 3657 - DNA, 75 bp, Homo sapiens
gaatctgagaataagaccaaatattataacaaaaaatgctcttatcaccccatcactcaggacatcaaaggattt

SEQ ID NO: 3658 - DNA, 73 bp, Homo sapiens
gaccaaatattataacaaaaaatgctcttatcaccccatcactcaggacatcaaaggatttttagaagttctg

SEQ ID NO: 3659 - DNA, 74 bp, Homo sapiens
attataacaaaaaatgctcttatcaccccatcactcaggacatcaaaggatttttagaagttctgtgccagaaa

SEQ ID NO: 3660 - DNA, 74 bp, Homo sapiens
aaaaatgctcttatcaccccatcactcaggacatcaaaggatttttagaagttctgtgccagaaactgggggca

SEQ ID NO: 3661 - DNA, 77 bp, Homo sapiens
ttatcaccccatcactcaggacatcaaaggatttttagaagttctgtgccagaaactgggggcagagatcaaatata

SEQ ID NO: 3662 - DNA, 77 bp, Homo sapiens
atcactcaggacatcaaaggatttttagaagttctgtgccagaaactgggggcagagatcaaatatacacacaaaga

SEQ ID NO: 3663 - DNA, 76 bp, Homo sapiens
tcaaaggatttttagaagttctgtgccagaaactgggggcagagatcaaatatacacacaaagacacacacactta

SEQ ID NO: 3664 - DNA, 80 bp, Homo sapiens
tgtgccagaaactgggggcagagatcaaatatacacacaaagacacacacacttattatatatgtcacaactgtaaaata

SEQ ID NO: 3665 - DNA, 76 bp, Homo sapiens
aaactgggggcagagatcaaatatacacacaaagacacacacacttattatatatgtcacaactgtaaaatagagt

SEQ ID NO: 3666 - DNA, 75 bp, Homo sapiens
tatacacacaaagacacacacacttattatatatgtcacaactgtaaaatagagttttattttccttcagtaaca

SEQ ID NO: 3667 - DNA, 75 bp, Homo sapiens
agacacacacacttattatatatgtcacaactgtaaaatagagttttattttccttcagtaacacaagtgataca

SEQ ID NO: 3668 - DNA, 76 bp, Homo sapiens
tatgtcacaactgtaaaatagagttttattttccttcagtaacacaagtgatacatagaatgaacagttgatttga

SEQ ID NO: 3669 - DNA, 74 bp, Homo sapiens
ctgtaaaatagagttttattttccttcagtaacacaagtgatacatagaatgaacagttgatttgactagtcaa

SEQ ID NO: 3670 - DNA, 75 bp, Homo sapiens
gagttttattttccttcagtaacacaagtgatacatagaatgaacagttgatttgactagtcaaaatcactagga

SEQ ID NO: 3671 - DNA, 75 bp, Homo sapiens
ttttccttcagtaacacaagtgatacatagaatgaacagttgatttgactagtcaaaatcactaggaataatctt

SEQ ID NO: 3672 - DNA, 79 bp, Homo sapiens
gtgatacatagaatgaacagttgatttgactagtcaaaatcactaggaataatctttaataaggaagtcattgctgtca

SEQ ID NO: 3673 - DNA, 76 bp, Homo sapiens
tgaacagttgatttgactagtcaaaatcactaggaataatctttaataaggaagtcattgctgtcaaaggactcta

SEQ ID NO: 3674 - DNA, 70 bp, Homo sapiens
actagtcaaaatcactaggaataatctttaataaggaagtcattgctgtcaaaggactctatttgttttt

SEQ ID NO: 3675 - DNA, 67 bp, Homo sapiens
ctttaataaggaagtcattgctgtcaaaggactctatttgtttttttctaactctttttatacttgt

SEQ ID NO: 3676 - DNA, 67 bp, Homo sapiens
aaggaagtcattgctgtcaaaggactctatttgtttttttctaactctttttatacttgttagaaag

SEQ ID NO: 3677 - DNA, 67 bp, Homo sapiens
tgctgtcaaaggactctatttgtttttttctaactctttttatacttgttagaaagttttaaaagca

SEQ ID NO: 3678 - DNA, 65 bp, Homo sapiens
gactctatttgtttttttctaactctttttatacttgttagaaagttttaaaagcaccaacctca

SEQ ID NO: 3679 - DNA, 65 bp, Homo sapiens
tttttttctaactctttttatacttgttagaaagttttaaaagcaccaacctcacttctatccca

SEQ ID NO: 3680 - DNA, 67 bp, Homo sapiens
ttttatacttgttagaaagttttaaaagcaccaacctcacttctatcccactcaatctgaaaacttt

SEQ ID NO: 3681 - DNA, 70 bp, Homo sapiens
ttaaaagcaccaacctcacttctatcccactcaatctgaaaacttttaaaaagccctctaagaattgtga

SEQ ID NO: 3682 - DNA, 69 bp, Homo sapiens
aacctcacttctatcccactcaatctgaaaacttttaaaaagccctctaagaattgtgaagctgtgttt

SEQ ID NO: 3683 - DNA, 71 bp, Homo sapiens
ctcaatctgaaaacttttaaaaagccctctaagaattgtgaagctgtgttttcacagagagtttaaatgac

SEQ ID NO: 3684 - DNA, 71 bp, Homo sapiens
ttttaaaaagccctctaagaattgtgaagctgtgttttcacagagagtttaaatgacttgttcgaaggtca

SEQ ID NO: 3685 - DNA, 75 bp, Homo sapiens
aaagccctctaagaattgtgaagctgtgttttcacagagagtttaaatgacttgttcgaaggtcagtgatttgca

SEQ ID NO: 3686 - DNA, 76 bp, Homo sapiens
aagaattgtgaagctgtgttttcacagagagtttaaatgacttgttcgaaggtcagtgatttgcagtaactgatag

SEQ ID NO: 3687 - DNA, 74 bp, Homo sapiens
gtgttttcacagagagtttaaatgacttgttcgaaggtcagtgatttgcagtaactgatagtggttagaagaaa

SEQ ID NO: 3688 - DNA, 73 bp, Homo sapiens
agagagtttaaatgacttgttcgaaggtcagtgatttgcagtaactgatagtggttagaagaaaatggagtta

SEQ ID NO: 3689 - DNA, 74 bp, Homo sapiens
taaatgacttgttcgaaggtcagtgatttgcagtaactgatagtggttagaagaaaatggagttatgttgactt

SEQ ID NO: 3690 - DNA, 73 bp, Homo sapiens
ggtcagtgatttgcagtaactgatagtggttagaagaaaatggagttatgttgacttttaatctatggttctt

SEQ ID NO: 3691 - DNA, 69 bp, Homo sapiens
ttgcagtaactgatagtggttagaagaaaatggagttatgttgacttttaatctatggttctttttttt

SEQ ID NO: 3692 - DNA, 70 bp, Homo sapiens
tttttaatagatttttttagttttattgaaatcttacatgaacaggaaattggaaatacaatcacatcaa

SEQ ID NO: 3693 - DNA, 71 bp, Homo sapiens
atagatttttttagttttattgaaatcttacatgaacaggaaattggaaatacaatcacatcaaagaacaa

SEQ ID NO: 3694 - DNA, 75 bp, Homo sapiens
ttttattgaaatcttacatgaacaggaaattggaaatacaatcacatcaaagaacaaattgtcatggcttttgac

SEQ ID NO: 3695 - DNA, 75 bp, Homo sapiens
atcttacatgaacaggaaattggaaatacaatcacatcaaagaacaaattgtcatggcttttgacgtttaagcca

SEQ ID NO: 3696 - DNA, 73 bp, Homo sapiens
tggaaatacaatcacatcaaagaacaaattgtcatggcttttgacgtttaagccaaacaaattttgtagggca

SEQ ID NO: 3697 - DNA, 73 bp, Homo sapiens
caatcacatcaaagaacaaattgtcatggcttttgacgtttaagccaaacaaattttgtagggcagatttcaa

SEQ ID NO: 3698 - DNA, 71 bp, Homo sapiens
agaacaaattgtcatggcttttgacgtttaagccaaacaaattttgtagggcagatttcaaaatggtgtga

SEQ ID NO: 3699 - DNA, 71 bp, Homo sapiens
gtcatggcttttgacgtttaagccaaacaaattttgtagggcagatttcaaaatggtgtgaagttataaca

SEQ ID NO: 3700 - DNA, 68 bp, Homo sapiens
ggcttttgacgtttaagccaaacaaattttgtagggcagatttcaaaatggtgtgaagttataacaat

SEQ ID NO: 3701 - DNA, 68 bp, Homo sapiens
ttaagccaaacaaattttgtagggcagatttcaaaatggtgtgaagttataacaatttaaaaacacag

SEQ ID NO: 3702 - DNA, 67 bp, Homo sapiens
caaattttgtagggcagatttcaaaatggtgtgaagttataacaatttaaaaacacagttaacctac

SEQ ID NO: 3703 - DNA, 69 bp, Homo sapiens
gggcagatttcaaaatggtgtgaagttataacaatttaaaaacacagttaacctacttctaaaaatgca

SEQ ID NO: 3704 - DNA, 67 bp, Homo sapiens
aaatggtgtgaagttataacaatttaaaaacacagttaacctacttctaaaaatgcaaaacatacga

SEQ ID NO: 3705 - DNA, 69 bp, Homo sapiens
gtgtgaagttataacaatttaaaaacacagttaacctacttctaaaaatgcaaaacatacgatcatagg

SEQ ID NO: 3706 - DNA, 69 bp, Homo sapiens
caatttaaaaacacagttaacctacttctaaaaatgcaaaacatacgatcataggttattttcagtata

SEQ ID NO: 3707 - DNA, 68 bp, Homo sapiens
aaacacagttaacctacttctaaaaatgcaaaacatacgatcataggttattttcagtataagaaaac

SEQ ID NO: 3708 - DNA, 70 bp, Homo sapiens
cctacttctaaaaatgcaaaacatacgatcataggttattttcagtataagaaaacttaaatgtgtttgc

SEQ ID NO: 3709 - DNA, 69 bp, Homo sapiens
aaaatgcaaaacatacgatcataggttattttcagtataagaaaacttaaatgtgtttgctttaatttc

SEQ ID NO: 3710 - DNA, 68 bp, Homo sapiens
caaaacatacgatcataggttattttcagtataagaaaacttaaatgtgtttgctttaatttcttaaa

SEQ ID NO: 3711 - DNA, 71 bp, Homo sapiens
tcagtataagaaaacttaaatgtgtttgctttaatttcttaaaactactaagacatagcactagcttgtat

SEQ ID NO: 3712 - DNA, 68 bp, Homo sapiens
gaaaacttaaatgtgtttgctttaatttcttaaaactactaagacatagcactagcttgtatttttat

SEQ ID NO: 3713 - DNA, 73 bp, Homo sapiens
atgtgtttgctttaatttcttaaaactactaagacatagcactagcttgtatttttatttacagcatactcca

SEQ ID NO: 3714 - DNA, 77 bp, Homo sapiens
taaaactactaagacatagcactagcttgtatttttatttacagcatactccatactcctatgtaatctatcctaga

SEQ ID NO: 3715 - DNA, 75 bp, Homo sapiens
agcactagcttgtatttttatttacagcatactccatactcctatgtaatctatcctagatccaaaaaaatgaaa

SEQ ID NO: 3716 - DNA, 77 bp, Homo sapiens
tacagcatactccatactcctatgtaatctatcctagatccaaaaaaatgaaattcttcaaaaccacaggttctgca

SEQ ID NO: 3717 - DNA, 74 bp, Homo sapiens
tgtaatctatcctagatccaaaaaaatgaaattcttcaaaaccacaggttctgcaaaatcatgacttaacagtg

SEQ ID NO: 3718 - DNA, 75 bp, Homo sapiens
tatcctagatccaaaaaaatgaaattcttcaaaaccacaggttctgcaaaatcatgacttaacagtgtgttcagc

SEQ ID NO: 3719 - DNA, 75 bp, Homo sapiens
gaaattcttcaaaaccacaggttctgcaaaatcatgacttaacagtgtgttcagcttgttttgaagctaaaatga

SEQ ID NO: 3720 - DNA, 76 bp, Homo sapiens
accacaggttctgcaaaatcatgacttaacagtgtgttcagcttgttttgaagctaaaatgaagcccgaaatgata

SEQ ID NO: 3721 - DNA, 74 bp, Homo sapiens
ggttctgcaaaatcatgacttaacagtgtgttcagcttgttttgaagctaaaatgaagcccgaaatgataaaaa

SEQ ID NO: 3722 - DNA, 74 bp, Homo sapiens
atcatgacttaacagtgtgttcagcttgttttgaagctaaaatgaagcccgaaatgataaaaacataactccca

SEQ ID NO: 3723 - DNA, 71 bp, Homo sapiens
aacagtgtgttcagcttgttttgaagctaaaatgaagcccgaaatgataaaaacataactcccagaataag

SEQ ID NO: 3724 - DNA, 70 bp, Homo sapiens
aaaatgaagcccgaaatgataaaaacataactcccagaataagggaactctgtaagcccaataatgtcca

SEQ ID NO: 3725 - DNA, 71 bp, Homo sapiens
aaaaacataactcccagaataagggaactctgtaagcccaataatgtccaagagcatttatgaaaagagga

SEQ ID NO: 3726 - DNA, 70 bp, Homo sapiens
ctcccagaataagggaactctgtaagcccaataatgtccaagagcatttatgaaaagaggaaaaataaaa

SEQ ID NO: 3727 - DNA, 73 bp, Homo sapiens
tgtaagcccaataatgtccaagagcatttatgaaaagaggaaaaataaaaaggcctgagtatatacacaatag

SEQ ID NO: 3728 - DNA, 75 bp, Homo sapiens
tgtccaagagcatttatgaaaagaggaaaaataaaaaggcctgagtatatacacaatagtgatttcttcagccca

SEQ ID NO: 3729 - DNA, 74 bp, Homo sapiens
gagcatttatgaaaagaggaaaaataaaaaggcctgagtatatacacaatagtgatttcttcagcccaatacaa

SEQ ID NO: 3730 - DNA, 75 bp, Homo sapiens
agaggaaaaataaaaaggcctgagtatatacacaatagtgatttcttcagcccaatacaaatggcagcaaattgc

SEQ ID NO: 3731 - DNA, 76 bp, Homo sapiens
ataaaaaggcctgagtatatacacaatagtgatttcttcagcccaatacaaatggcagcaaattgctacttaaaga

SEQ ID NO: 3732 - DNA, 78 bp, Homo sapiens
ctgagtatatacacaatagtgatttcttcagcccaatacaaatggcagcaaattgctacttaaagatgaaacagttaa

SEQ ID NO: 3733 - DNA, 71 bp, Homo sapiens
agtgatttcttcagcccaatacaaatggcagcaaattgctacttaaagatgaaacagttaaacaaaatttt

SEQ ID NO: 3734 - DNA, 71 bp, Homo sapiens
ttcagcccaatacaaatggcagcaaattgctacttaaagatgaaacagttaaacaaaattttttttgaaga

SEQ ID NO: 3735 - DNA, 73 bp, Homo sapiens
atggcagcaaattgctacttaaagatgaaacagttaaacaaaattttttttgaagaatgtagatctagagcca

SEQ ID NO: 3736 - DNA, 71 bp, Homo sapiens
gcaaattgctacttaaagatgaaacagttaaacaaaattttttttgaagaatgtagatctagagccagtcg

SEQ ID NO: 3737 - DNA, 74 bp, Homo sapiens
taaagatgaaacagttaaacaaaattttttttgaagaatgtagatctagagccagtcgtatcttgccattatca

SEQ ID NO: 3738 - DNA, 73 bp, Homo sapiens
cagttaaacaaaattttttttgaagaatgtagatctagagccagtcgtatcttgccattatcattttcaagcc

SEQ ID NO: 3739 - DNA, 73 bp, Homo sapiens
aaattttttttgaagaatgtagatctagagccagtcgtatcttgccattatcattttcaagcccttacttgtc

SEQ ID NO: 3740 - DNA, 78 bp, Homo sapiens
ttttgaagaatgtagatctagagccagtcgtatcttgccattatcattttcaagcccttacttgtctgcttccactgt

SEQ ID NO: 3741 - DNA, 79 bp, Homo sapiens
aatgtagatctagagccagtcgtatcttgccattatcattttcaagcccttacttgtctgcttccactgttgcccataa

SEQ ID NO: 3742 - DNA, 77 bp, Homo sapiens
ccagtcgtatcttgccattatcattttcaagcccttacttgtctgcttccactgttgcccataagtatcctgataaa

SEQ ID NO: 3743 - DNA, 76 bp, Homo sapiens
tatcattttcaagcccttacttgtctgcttccactgttgcccataagtatcctgataaaattcctggttgtcatta

SEQ ID NO: 3744 - DNA, 75 bp, Homo sapiens
ttcaagcccttacttgtctgcttccactgttgcccataagtatcctgataaaattcctggttgtcattattgtaa

SEQ ID NO: 3745 - DNA, 74 bp, Homo sapiens
actgttgcccataagtatcctgataaaattcctggttgtcattattgtaaccatagttaccagaatagtcacca

SEQ ID NO: 3746 - DNA, 74 bp, Homo sapiens
ataagtatcctgataaaattcctggttgtcattattgtaaccatagttaccagaatagtcaccaccttgctgaa

SEQ ID NO: 3747 - DNA, 77 bp, Homo sapiens
aaattcctggttgtcattattgtaaccatagttaccagaatagtcaccaccttgctgaagcggctgctgagcgatgg

SEQ ID NO: 3748 - DNA, 77 bp, Homo sapiens
attattgtaaccatagttaccagaatagtcaccaccttgctgaagcggctgctgagcgatgggttgagagacccagt

SEQ ID NO: 3749 - DNA, 78 bp, Homo sapiens
taaccatagttaccagaatagtcaccaccttgctgaagcggctgctgagcgatgggttgagagacccagttctgttgt

SEQ ID NO: 3750 - DNA, 78 bp, Homo sapiens
ttaccagaatagtcaccaccttgctgaagcggctgctgagcgatgggttgagagacccagttctgttgtttgttggtc

SEQ ID NO: 3751 - DNA, 79 bp, Homo sapiens
accaccttgctgaagcggctgctgagcgatgggttgagagacccagttctgttgtttgttggtctgacgatgcttggaa

SEQ ID NO: 3752 - DNA, 79 bp, Homo sapiens
tgaagcggctgctgagcgatgggttgagagacccagttctgttgtttgttggtctgacgatgcttggaatcaggttggt

SEQ ID NO: 3753 - DNA, 76 bp, Homo sapiens
atgggttgagagacccagttctgttgtttgttggtctgacgatgcttggaatcaggttggttgtaagcatctgcct

SEQ ID NO: 3754 - DNA, 77 bp, Homo sapiens
agacccagttctgttgtttgttggtctgacgatgcttggaatcaggttggttgtaagcatctgccttctcttgcgtc

SEQ ID NO: 3755 - DNA, 80 bp, Homo sapiens
acgatgcttggaatcaggttggttgtaagcatctgccttctcttgcgtcctacattgtcccctgattgccctgagatcca

SEQ ID NO: 3756 - DNA, 76 bp, Homo sapiens
aatcaggttggttgtaagcatctgccttctcttgcgtcctacattgtcccctgattgccctgagatccacgggaac

SEQ ID NO: 3757 - DNA, 77 bp, Homo sapiens
tggttgtaagcatctgccttctcttgcgtcctacattgtcccctgattgccctgagatccacgggaaccacggccac

SEQ ID NO: 3758 - DNA, 77 bp, Homo sapiens
tgccttctcttgcgtcctacattgtcccctgattgccctgagatccacgggaaccacggccacggcctctctgctgt

SEQ ID NO: 3759 - DNA, 79 bp, Homo sapiens
tcttgcgtcctacattgtcccctgattgccctgagatccacgggaaccacggccacggcctctctgctgttgtgcagga

SEQ ID NO: 3760 - DNA, 76 bp, Homo sapiens
tacattgtcccctgattgccctgagatccacgggaaccacggccacggcctctctgctgttgtgcaggaccccctc

SEQ ID NO: 3761 - DNA, 75 bp, Homo sapiens
ccctgattgccctgagatccacgggaaccacggccacggcctctctgctgttgtgcaggaccccctctgccaccc

SEQ ID NO: 3762 - DNA, 74 bp, Homo sapiens
agatccacgggaaccacggccacggcctctctgctgttgtgcaggaccccctctgccacccctacagcctcgtg

SEQ ID NO: 3763 - DNA, 73 bp, Homo sapiens
aaccacggccacggcctctctgctgttgtgcaggaccccctctgccacccctacagcctcgtggtggtcccaa

SEQ ID NO: 3764 - DNA, 73 bp, Homo sapiens
ccacggcctctctgctgttgtgcaggaccccctctgccacccctacagcctcgtggtggtcccaaaggtgccc

SEQ ID NO: 3765 - DNA, 72 bp, Homo sapiens
tgctgttgtgcaggaccccctctgccacccctacagcctcgtggtggtcccaaaggtgcccccttttgtgaa

SEQ ID NO: 3766 - DNA, 71 bp, Homo sapiens
ttgtgcaggaccccctctgccacccctacagcctcgtggtggtcccaaaggtgcccccttttgtgaatagc

SEQ ID NO: 3767 - DNA, 73 bp, Homo sapiens
tctgccacccctacagcctcgtggtggtcccaaaggtgcccccttttgtgaatagccagctctacctcttgga

SEQ ID NO: 3768 - DNA, 70 bp, Homo sapiens
ccctacagcctcgtggtggtcccaaaggtgcccccttttgtgaatagccagctctacctcttggaggtgg

SEQ ID NO: 3769 - DNA, 71 bp, Homo sapiens
ctcgtggtggtcccaaaggtgcccccttttgtgaatagccagctctacctcttggaggtggtgctcccctc

SEQ ID NO: 3770 - DNA, 68 bp, Homo sapiens
ggtcccaaaggtgcccccttttgtgaatagccagctctacctcttggaggtggtgctcccctccccct

SEQ ID NO: 3771 - DNA, 71 bp, Homo sapiens
cccttttgtgaatagccagctctacctcttggaggtggtgctcccctcccccttggtggtggtgaagcacc

SEQ ID NO: 3772 - DNA, 74 bp, Homo sapiens
ttgtgaatagccagctctacctcttggaggtggtgctcccctcccccttggtggtggtgaagcaccctgccctc

SEQ ID NO: 3773 - DNA, 69 bp, Homo sapiens
agctctacctcttggaggtggtgctcccctcccccttggtggtggtgaagcaccctgccctccccttcc

SEQ ID NO: 3774 - DNA, 68 bp, Homo sapiens
cttggaggtggtgctcccctcccccttggtggtggtgaagcaccctgccctccccttcctcctcttcc

SEQ ID NO: 3775 - DNA, 73 bp, Homo sapiens
cctccccttcctcctcttcctcttactgcatagccaccatcatagccatagtagggaatcttcgtaacctcct

SEQ ID NO: 3776 - DNA, 78 bp, Homo sapiens
ctcctcttcctcttactgcatagccaccatcatagccatagtagggaatcttcgtaacctccttgatagatgtggtaa

SEQ ID NO: 3777 - DNA, 80 bp, Homo sapiens
ctcttactgcatagccaccatcatagccatagtagggaatcttcgtaacctccttgatagatgtggtaatcataactgta

SEQ ID NO: 3778 - DNA, 77 bp, Homo sapiens
atagccaccatcatagccatagtagggaatcttcgtaacctccttgatagatgtggtaatcataactgtagtaatct

SEQ ID NO: 3779 - DNA, 80 bp, Homo sapiens
tcatagccatagtagggaatcttcgtaacctccttgatagatgtggtaatcataactgtagtaatcttcatgccatagta

SEQ ID NO: 3780 - DNA, 77 bp, Homo sapiens
aatcttcgtaacctccttgatagatgtggtaatcataactgtagtaatcttcatgccatagtaatctggaggttagc

SEQ ID NO: 3781 - DNA, 78 bp, Homo sapiens
aacctccttgatagatgtggtaatcataactgtagtaatcttcatgccatagtaatctggaggttagccatatccacc

SEQ ID NO: 3782 - DNA, 78 bp, Homo sapiens
atagatgtggtaatcataactgtagtaatcttcatgccatagtaatctggaggttagccatatccacctctcccccaa

SEQ ID NO: 3783 - DNA, 75 bp, Homo sapiens
taactgtagtaatcttcatgccatagtaatctggaggttagccatatccacctctcccccaacctctaatcggaa

SEQ ID NO: 3784 - DNA, 78 bp, Homo sapiens
taatcttcatgccatagtaatctggaggttagccatatccacctctcccccaacctctaatcggaagcggcatgcgag

SEQ ID NO: 3785 - DNA, 78 bp, Homo sapiens
ttcatgccatagtaatctggaggttagccatatccacctctcccccaacctctaatcggaagcggcatgcgaggagga

SEQ ID NO: 3786 - DNA, 73 bp, Homo sapiens
atagtaatctggaggttagccatatccacctctcccccaacctctaatcggaagcggcatgcgaggaggaggg

SEQ ID NO: 3787 - DNA, 74 bp, Homo sapiens
gtaatctggaggttagccatatccacctctcccccaacctctaatcggaagcggcatgcgaggaggagggtgta

SEQ ID NO: 3788 - DNA, 74 bp, Homo sapiens
aggttagccatatccacctctcccccaacctctaatcggaagcggcatgcgaggaggagggtgtagtgataatc

SEQ ID NO: 3789 - DNA, 77 bp, Homo sapiens
ttagccatatccacctctcccccaacctctaatcggaagcggcatgcgaggaggagggtgtagtgataatcttcata

SEQ ID NO: 3790 - DNA, 79 bp, Homo sapiens
agccatatccacctctcccccaacctctaatcggaagcggcatgcgaggaggagggtgtagtgataatcttcatatgca

SEQ ID NO: 3791 - DNA, 79 bp, Homo sapiens
tatccacctctcccccaacctctaatcggaagcggcatgcgaggaggagggtgtagtgataatcttcatatgcagtgct

SEQ ID NO: 3792 - DNA, 79 bp, Homo sapiens
tcccccaacctctaatcggaagcggcatgcgaggaggagggtgtagtgataatcttcatatgcagtgcttctggaggcc

SEQ ID NO: 3793 - DNA, 82 bp, Homo sapiens
aacctctaatcggaagcggcatgcgaggaggagggtgtagtgataatcttcatatgcagtgcttctggaggcctgtctagca

SEQ ID NO: 3794 - DNA, 81 bp, Homo sapiens
atgcgaggaggagggtgtagtgataatcttcatatgcagtgcttctggaggcctgtctagcagcttggcgctctttccttt

SEQ ID NO: 3795 - DNA, 80 bp, Homo sapiens
agggtgtagtgataatcttcatatgcagtgcttctggaggcctgtctagcagcttggcgctctttccttttcttgtctgg

SEQ ID NO: 3796 - DNA, 76 bp, Homo sapiens
ttctggaggcctgtctagcagcttggcgctctttccttttcttgtctggtgccttggctaagactatttcaagttc

SEQ ID NO: 3797 - DNA, 70 bp, Homo sapiens
ttggcgctctttccttttcttgtctggtgccttggctaagactatttcaagttcttccccttctgtttct

SEQ ID NO: 3798 - DNA, 71 bp, Homo sapiens
ttccttttcttgtctggtgccttggctaagactatttcaagttcttccccttctgtttctttgccattcat

SEQ ID NO: 3799 - DNA, 75 bp, Homo sapiens
ggtgccttggctaagactatttcaagttcttccccttctgtttctttgccattcatttcatccatagccataaca

SEQ ID NO: 3800 - DNA, 78 bp, Homo sapiens
actatttcaagttcttccccttctgtttctttgccattcatttcatccatagccataacagctgctcgtctgtcttca

SEQ ID NO: 3801 - DNA, 84 bp, Homo sapiens
ttctgtttctttgccattcatttcatccatagccataacagctgctcgtctgtcttcagaatgaacaaatgcataatctttcaa

SEQ ID NO: 3802 - DNA, 83 bp, Homo sapiens
tttgccattcatttcatccatagccataacagctgctcgtctgtcttcagaatgaacaaatgcataatctttcaacttattta

SEQ ID NO: 3803 - DNA, 81 bp, Homo sapiens
ttcatttcatccatagccataacagctgctcgtctgtcttcagaatgaacaaatgcataatctttcaacttatttactctt

SEQ ID NO: 3804 - DNA, 79 bp, Homo sapiens
atagccataacagctgctcgtctgtcttcagaatgaacaaatgcataatctttcaacttatttactctttggagttctc

SEQ ID NO: 3805 - DNA, 77 bp, Homo sapiens
taacagctgctcgtctgtcttcagaatgaacaaatgcataatctttcaacttatttactctttggagttctccaaat

SEQ ID NO: 3806 - DNA, 74 bp, Homo sapiens
cgtctgtcttcagaatgaacaaatgcataatctttcaacttatttactctttggagttctccaaattcagaaaa

SEQ ID NO: 3807 - DNA, 73 bp, Homo sapiens
cagaatgaacaaatgcataatctttcaacttatttactctttggagttctccaaattcagaaaatgacttttc

SEQ ID NO: 3808 - DNA, 71 bp, Homo sapiens
gcataatctttcaacttatttactctttggagttctccaaattcagaaaatgacttttccaatatttcgtc

SEQ ID NO: 3809 - DNA, 71 bp, Homo sapiens
tcaacttatttactctttggagttctccaaattcagaaaatgacttttccaatatttcgtctgtgcccaag

SEQ ID NO: 3810 - DNA, 71 bp, Homo sapiens
atttactctttggagttctccaaattcagaaaatgacttttccaatatttcgtctgtgcccaagtttctca

SEQ ID NO: 3811 - DNA, 71 bp, Homo sapiens
gagttctccaaattcagaaaatgacttttccaatatttcgtctgtgcccaagtttctcacaaagaatactt

SEQ ID NO: 3812 - DNA, 70 bp, Homo sapiens
attcagaaaatgacttttccaatatttcgtctgtgcccaagtttctcacaaagaatacttttaccttagc

SEQ ID NO: 3813 - DNA, 70 bp, Homo sapiens
aaatgacttttccaatatttcgtctgtgcccaagtttctcacaaagaatacttttaccttagccatgact

SEQ ID NO: 3814 - DNA, 74 bp, Homo sapiens
ttcgtctgtgcccaagtttctcacaaagaatacttttaccttagccatgacttctggatatggttcttcacagg

SEQ ID NO: 3815 - DNA, 74 bp, Homo sapiens
agtttctcacaaagaatacttttaccttagccatgacttctggatatggttcttcacagggtcagcccattcaa

SEQ ID NO: 3816 - DNA, 74 bp, Homo sapiens
tacttttaccttagccatgacttctggatatggttcttcacagggtcagcccattcaactgtaactacatttcc

SEQ ID NO: 3817 - DNA, 73 bp, Homo sapiens
catgacttctggatatggttcttcacagggtcagcccattcaactgtaactacatttccccatacttttactt

SEQ ID NO: 3818 - DNA, 71 bp, Homo sapiens
cttctggatatggttcttcacagggtcagcccattcaactgtaactacatttccccatacttttacttttc

SEQ ID NO: 3819 - DNA, 74 bp, Homo sapiens
ttcttcacagggtcagcccattcaactgtaactacatttccccatacttttacttttccagcatctggcttgta

SEQ ID NO: 3820 - DNA, 78 bp, Homo sapiens
tcagcccattcaactgtaactacatttccccatacttttacttttccagcatctggcttgtactgctgacttgtgatc

SEQ ID NO: 3821 - DNA, 76 bp, Homo sapiens
caactgtaactacatttccccatacttttacttttccagcatctggcttgtactgctgacttgtgatcctcacatt

SEQ ID NO: 3822 - DNA, 76 bp, Homo sapiens
taactacatttccccatacttttacttttccagcatctggcttgtactgctgacttgtgatcctcacatttaagga

SEQ ID NO: 3823 - DNA, 76 bp, Homo sapiens
ttccccatacttttacttttccagcatctggcttgtactgctgacttgtgatcctcacatttaaggaagcagaacc

SEQ ID NO: 3824 - DNA, 75 bp, Homo sapiens
ttttacttttccagcatctggcttgtactgctgacttgtgatcctcacatttaaggaagcagaacccccatttct

SEQ ID NO: 3825 - DNA, 76 bp, Homo sapiens
atctggcttgtactgctgacttgtgatcctcacatttaaggaagcagaacccccatttcttctttttgtcatcagg

SEQ ID NO: 3826 - DNA, 78 bp, Homo sapiens
ttgtactgctgacttgtgatcctcacatttaaggaagcagaacccccatttcttctttttgtcatcaggttgatcata

SEQ ID NO: 3827 - DNA, 76 bp, Homo sapiens
acttgtgatcctcacatttaaggaagcagaacccccatttcttctttttgtcatcaggttgatcatagagaatgac

SEQ ID NO: 3828 - DNA, 72 bp, Homo sapiens
ttaaggaagcagaacccccatttcttctttttgtcatcaggttgatcatagagaatgacgtccaccaaaccc

SEQ ID NO: 3829 - DNA, 77 bp, Homo sapiens
tcttctttttgtcatcaggttgatcatagagaatgacgtccaccaaaccctctgtgactttactgaattcttccaga

SEQ ID NO: 3830 - DNA, 74 bp, Homo sapiens
atcaggttgatcatagagaatgacgtccaccaaaccctctgtgactttactgaattcttccagagtgttttctt

SEQ ID NO: 3831 - DNA, 73 bp, Homo sapiens
caaaccctctgtgactttactgaattcttccagagtgttttctttagtcttattcttcagaatggatccaaca

SEQ ID NO: 3832 - DNA, 74 bp, Homo sapiens
tactgaattcttccagagtgttttctttagtcttattcttcagaatggatccaacaaaagtctgttgtttgcca

SEQ ID NO: 3833 - DNA, 75 bp, Homo sapiens
tcttccagagtgttttctttagtcttattcttcagaatggatccaacaaaagtctgttgtttgccacagaaatgc

SEQ ID NO: 3834 - DNA, 77 bp, Homo sapiens
tctttagtcttattcttcagaatggatccaacaaaagtctgttgtttgccacagaaatgcgcactccatgttgttta

SEQ ID NO: 3835 - DNA, 76 bp, Homo sapiens
agtcttattcttcagaatggatccaacaaaagtctgttgtttgccacagaaatgcgcactccatgttgtttaccag

SEQ ID NO: 3836 - DNA, 76 bp, Homo sapiens
agaatggatccaacaaaagtctgttgtttgccacagaaatgcgcactccatgttgtttaccagggcgaatttcata

SEQ ID NO: 3837 - DNA, 76 bp, Homo sapiens
acaaaagtctgttgtttgccacagaaatgcgcactccatgttgtttaccagggcgaatttcatagctgtcacagtt

SEQ ID NO: 3838 - DNA, 79 bp, Homo sapiens
agtctgttgtttgccacagaaatgcgcactccatgttgtttaccagggcgaatttcatagctgtcacagtttcacagct

SEQ ID NO: 3839 - DNA, 80 bp, Homo sapiens
aatgcgcactccatgttgtttaccagggcgaatttcatagctgtcacagtttcacagcttcctgtgcagcttcctttcca

SEQ ID NO: 3840 - DNA, 77 bp, Homo sapiens
agggcgaatttcatagctgtcacagtttcacagcttcctgtgcagcttcctttccacagaaagtggtaaatgcctac

SEQ ID NO: 3841 - DNA, 77 bp, Homo sapiens
atttcatagctgtcacagtttcacagcttcctgtgcagcttcctttccacagaaagtggtaaatgcctaccctctat

SEQ ID NO: 3842 - DNA, 76 bp, Homo sapiens
acagtttcacagcttcctgtgcagcttcctttccacagaaagtggtaaatgcctaccctctattctgaccagacag

SEQ ID NO: 3843 - DNA, 79 bp, Homo sapiens
agcttcctgtgcagcttcctttccacagaaagtggtaaatgcctaccctctattctgaccagacagtggatctatgata

SEQ ID NO: 3844 - DNA, 78 bp, Homo sapiens
gcagcttcctttccacagaaagtggtaaatgcctaccctctattctgaccagacagtggatctatgataagacgtaga

SEQ ID NO: 3845 - DNA, 76 bp, Homo sapiens
tttccacagaaagtggtaaatgcctaccctctattctgaccagacagtggatctatgataagacgtagatcccaaa

SEQ ID NO: 3846 - DNA, 75 bp, Homo sapiens
aaagtggtaaatgcctaccctctattctgaccagacagtggatctatgataagacgtagatcccaaatgggactg

SEQ ID NO: 3847 - DNA, 78 bp, Homo sapiens
taaatgcctaccctctattctgaccagacagtggatctatgataagacgtagatcccaaatgggactggccttctcaa

SEQ ID NO: 3848 - DNA, 76 bp, Homo sapiens
agacagtggatctatgataagacgtagatcccaaatgggactggccttctcaaaaaggggcaccaactcatcctca

SEQ ID NO: 3849 - DNA, 77 bp, Homo sapiens
atctatgataagacgtagatcccaaatgggactggccttctcaaaaaggggcaccaactcatcctcatatacatctc

SEQ ID NO: 3850 - DNA, 75 bp, Homo sapiens
taagacgtagatcccaaatgggactggccttctcaaaaaggggcaccaactcatcctcatatacatctcttggta

SEQ ID NO: 3851 - DNA, 73 bp, Homo sapiens
agatcccaaatgggactggccttctcaaaaaggggcaccaactcatcctcatatacatctcttggtattttac

SEQ ID NO: 3852 - DNA, 72 bp, Homo sapiens
actggccttctcaaaaaggggcaccaactcatcctcatatacatctcttggtattttacctacaaacacctc

SEQ ID NO: 3853 - DNA, 73 bp, Homo sapiens
tctcaaaaaggggcaccaactcatcctcatatacatctcttggtattttacctacaaacacctctgttccaat

SEQ ID NO: 3854 - DNA, 76 bp, Homo sapiens
caccaactcatcctcatatacatctcttggtattttacctacaaacacctctgttccaattctaggttgcacacca

SEQ ID NO: 3855 - DNA, 76 bp, Homo sapiens
atcctcatatacatctcttggtattttacctacaaacacctctgttccaattctaggttgcacaccagagtacaca

SEQ ID NO: 3856 - DNA, 72 bp, Homo sapiens
ttggtattttacctacaaacacctctgttccaattctaggttgcacaccagagtacacactgtttggtggag

SEQ ID NO: 3857 - DNA, 74 bp, Homo sapiens
aattctaggttgcacaccagagtacacactgtttggtggaggcccaccatacttcctctgtcctgtggttacat

SEQ ID NO: 3858 - DNA, 76 bp, Homo sapiens
acaccagagtacacactgtttggtggaggcccaccatacttcctctgtcctgtggttacattcagagtataatcat

SEQ ID NO: 3859 - DNA, 76 bp, Homo sapiens
agagtacacactgtttggtggaggcccaccatacttcctctgtcctgtggttacattcagagtataatcatttctc

SEQ ID NO: 3860 - DNA, 76 bp, Homo sapiens
tttggtggaggcccaccatacttcctctgtcctgtggttacattcagagtataatcatttctctcaagcaaggcct

SEQ ID NO: 3861 - DNA, 81 bp, Homo sapiens
ccaccatacttcctctgtcctgtggttacattcagagtataatcatttctctcaagcaaggccttgatcttcacttcatca

SEQ ID NO: 3862 - DNA, 80 bp, Homo sapiens
atacttcctctgtcctgtggttacattcagagtataatcatttctctcaagcaaggccttgatcttcacttcatcaggtc

SEQ ID NO: 3863 - DNA, 79 bp, Homo sapiens
tgtggttacattcagagtataatcatttctctcaagcaaggccttgatcttcacttcatcaggtccctttgtggactct

SEQ ID NO: 3864 - DNA, 81 bp, Homo sapiens
tacattcagagtataatcatttctctcaagcaaggccttgatcttcacttcatcaggtccctttgtggactcttgcaccta

SEQ ID NO: 3865 - DNA, 78 bp, Homo sapiens
agtataatcatttctctcaagcaaggccttgatcttcacttcatcaggtccctttgtggactcttgcacctagctccc

SEQ ID NO: 3866 - DNA, 77 bp, Homo sapiens
tttctctcaagcaaggccttgatcttcacttcatcaggtccctttgtggactcttgcacctagctcccctgtttctc

SEQ ID NO: 3867 - DNA, 77 bp, Homo sapiens
aaggccttgatcttcacttcatcaggtccctttgtggactcttgcacctagctcccctgtttctctctctgcctgta

SEQ ID NO: 3868 - DNA, 75 bp, Homo sapiens
aggtccctttgtggactcttgcacctagctcccctgtttctctctctgcctgtaggtcttcataactccacataa

SEQ ID NO: 3869 - DNA, 77 bp, Homo sapiens
tttgtggactcttgcacctagctcccctgtttctctctctgcctgtaggtcttcataactccacataaaaatgcact

SEQ ID NO: 3870 - DNA, 77 bp, Homo sapiens
ttgcacctagctcccctgtttctctctctgcctgtaggtcttcataactccacataaaaatgcacttttgttctgaa

SEQ ID NO: 3871 - DNA, 77 bp, Homo sapiens
ctgtaggtcttcataactccacataaaaatgcacttttgttctgaacatgtgataagtcactttccttgaactgctg

SEQ ID NO: 3872 - DNA, 79 bp, Homo sapiens
ttcataactccacataaaaatgcacttttgttctgaacatgtgataagtcactttccttgaactgctgtagtacagaca

SEQ ID NO: 3873 - DNA, 78 bp, Homo sapiens
cataaaaatgcacttttgttctgaacatgtgataagtcactttccttgaactgctgtagtacagacagagctccttct

SEQ ID NO: 3874 - DNA, 76 bp, Homo sapiens
cacttttgttctgaacatgtgataagtcactttccttgaactgctgtagtacagacagagctccttctttattaaa

SEQ ID NO: 3875 - DNA, 76 bp, Homo sapiens
ttgttctgaacatgtgataagtcactttccttgaactgctgtagtacagacagagctccttctttattaaattccc

SEQ ID NO: 3876 - DNA, 78 bp, Homo sapiens
atgtgataagtcactttccttgaactgctgtagtacagacagagctccttctttattaaattccctgagagcatcaat

SEQ ID NO: 3877 - DNA, 80 bp, Homo sapiens
tttccttgaactgctgtagtacagacagagctccttctttattaaattccctgagagcatcaattgctctttcatcaaga

SEQ ID NO: 3878 - DNA, 81 bp, Homo sapiens
aactgctgtagtacagacagagctccttctttattaaattccctgagagcatcaattgctctttcatcaagatcgatacaa

SEQ ID NO: 3879 - DNA, 83 bp, Homo sapiens
tagtacagacagagctccttctttattaaattccctgagagcatcaattgctctttcatcaagatcgatacaagctatcaatc

SEQ ID NO: 3880 - DNA, 82 bp, Homo sapiens
agagctccttctttattaaattccctgagagcatcaattgctctttcatcaagatcgatacaagctatcaatccagggcaga

SEQ ID NO: 3881 - DNA, 83 bp, Homo sapiens
tctttattaaattccctgagagcatcaattgctctttcatcaagatcgatacaagctatcaatccagggcagagcaggggctg

SEQ ID NO: 3882 - DNA, 86 bp, Homo sapiens
ctgagagcatcaattgctctttcatcaagatcgatacaagctatcaatccagggcagagcaggggctggtggctgggcccgtgaga

SEQ ID NO: 3883 - DNA, 82 bp, Homo sapiens
tttcatcaagatcgatacaagctatcaatccagggcagagcaggggctggtggctgggcccgtgagaaccagtgcaaggcat

SEQ ID NO: 3884 - DNA, 79 bp, Homo sapiens
atcgatacaagctatcaatccagggcagagcaggggctggtggctgggcccgtgagaaccagtgcaaggcattttgaaa

SEQ ID NO: 3885 - DNA, 78 bp, Homo sapiens
aagctatcaatccagggcagagcaggggctggtggctgggcccgtgagaaccagtgcaaggcattttgaaaatgacta

SEQ ID NO: 3886 - DNA, 75 bp, Homo sapiens
ctggtggctgggcccgtgagaaccagtgcaaggcattttgaaaatgactagaaatctcgcacgcgtgccaccccc

SEQ ID NO: 3887 - DNA, 77 bp, Homo sapiens
gtgagaaccagtgcaaggcattttgaaaatgactagaaatctcgcacgcgtgccaccccccaagtctatgattctta

SEQ ID NO: 3888 - DNA, 76 bp, Homo sapiens
agtgcaaggcattttgaaaatgactagaaatctcgcacgcgtgccaccccccaagtctatgattcttatgtttaca

SEQ ID NO: 3889 - DNA, 75 bp, Homo sapiens
ttttgaaaatgactagaaatctcgcacgcgtgccaccccccaagtctatgattcttatgtttacatggcaaagaa

SEQ ID NO: 3890 - DNA, 76 bp, Homo sapiens
aaaatgactagaaatctcgcacgcgtgccaccccccaagtctatgattcttatgtttacatggcaaagaagctgaa

SEQ ID NO: 3891 - DNA, 75 bp, Homo sapiens
aaatctcgcacgcgtgccaccccccaagtctatgattcttatgtttacatggcaaagaagctgaaggggaagcag

SEQ ID NO: 3892 - DNA, 78 bp, Homo sapiens
tatgattcttatgtttacatggcaaagaagctgaaggggaagcaggtacgtgtgcagaacgggagaccaaacatgaga

SEQ ID NO: 3893 - DNA, 77 bp, Homo sapiens
ttacatggcaaagaagctgaaggggaagcaggtacgtgtgcagaacgggagaccaaacatgagaggcagccttctaa

SEQ ID NO: 3894 - DNA, 75 bp, Homo sapiens
aaagaagctgaaggggaagcaggtacgtgtgcagaacgggagaccaaacatgagaggcagccttctaatctattc

SEQ ID NO: 3895 - DNA, 77 bp, Homo sapiens
aggggaagcaggtacgtgtgcagaacgggagaccaaacatgagaggcagccttctaatctattcctgcaagaatcaa

SEQ ID NO: 3896 - DNA, 81 bp, Homo sapiens
cagaacgggagaccaaacatgagaggcagccttctaatctattcctgcaagaatcaacccagcctcatgaaagctgcatta

SEQ ID NO: 3897 - DNA, 84 bp, Homo sapiens
agaccaaacatgagaggcagccttctaatctattcctgcaagaatcaacccagcctcatgaaagctgcattaatacattcatga

SEQ ID NO: 3898 - DNA, 83 bp, Homo sapiens
aacatgagaggcagccttctaatctattcctgcaagaatcaacccagcctcatgaaagctgcattaatacattcatgagggta

SEQ ID NO: 3899 - DNA, 79 bp, Homo sapiens
cttctaatctattcctgcaagaatcaacccagcctcatgaaagctgcattaatacattcatgagggtagtagtcccgta

SEQ ID NO: 3900 - DNA, 76 bp, Homo sapiens
attcctgcaagaatcaacccagcctcatgaaagctgcattaatacattcatgagggtagtagtcccgtaacccaaa

SEQ ID NO: 3901 - DNA, 73 bp, Homo sapiens
agaatcaacccagcctcatgaaagctgcattaatacattcatgagggtagtagtcccgtaacccaaacgcctt

SEQ ID NO: 3902 - DNA, 71 bp, Homo sapiens
aacccagcctcatgaaagctgcattaatacattcatgagggtagtagtcccgtaacccaaacgccttttaa

SEQ ID NO: 3903 - DNA, 73 bp, Homo sapiens
atgaaagctgcattaatacattcatgagggtagtagtcccgtaacccaaacgccttttaatggccccatcagc

SEQ ID NO: 3904 - DNA, 73 bp, Homo sapiens
tagtagtcccgtaacccaaacgccttttaatggccccatcagctctcaatagtgtcacattggcaaatttcaa

SEQ ID NO: 3905 - DNA, 77 bp, Homo sapiens
tcaacatgagttttggcaggaacacaccacacttaaaccatagaataggattactcacctctttgaagagagctaga

SEQ ID NO: 3906 - DNA, 73 bp, Homo sapiens
ttttggcaggaacacaccacacttaaaccatagaataggattactcacctctttgaagagagctagactactt

SEQ ID NO: 3907 - DNA, 73 bp, Homo sapiens
acacttaaaccatagaataggattactcacctctttgaagagagctagactactttcttctgtggccctcaaa

SEQ ID NO: 3908 - DNA, 73 bp, Homo sapiens
aaccatagaataggattactcacctctttgaagagagctagactactttcttctgtggccctcaaaggaataa

SEQ ID NO: 3909 - DNA, 76 bp, Homo sapiens
ttactcacctctttgaagagagctagactactttcttctgtggccctcaaaggaataaaactctcagtcatatcat

SEQ ID NO: 3910 - DNA, 77 bp, Homo sapiens
tctttgaagagagctagactactttcttctgtggccctcaaaggaataaaactctcagtcatatcattggaatgact

SEQ ID NO: 3911 - DNA, 77 bp, Homo sapiens
tttgaagagagctagactactttcttctgtggccctcaaaggaataaaactctcagtcatatcattggaatgacttc

SEQ ID NO: 3912 - DNA, 76 bp, Homo sapiens
aagagagctagactactttcttctgtggccctcaaaggaataaaactctcagtcatatcattggaatgacttctct

SEQ ID NO: 3913 - DNA, 75 bp, Homo sapiens
tagactactttcttctgtggccctcaaaggaataaaactctcagtcatatcattggaatgacttctctttgtctt

SEQ ID NO: 3914 - DNA, 73 bp, Homo sapiens
ttctgtggccctcaaaggaataaaactctcagtcatatcattggaatgacttctctttgtctttgtaaaagtt

SEQ ID NO: 3915 - DNA, 74 bp, Homo sapiens
aggaataaaactctcagtcatatcattggaatgacttctctttgtctttgtaaaagttttctagcattgagagt

SEQ ID NO: 3916 - DNA, 75 bp, Homo sapiens
taaaactctcagtcatatcattggaatgacttctctttgtctttgtaaaagttttctagcattgagagttacctg

SEQ ID NO: 3917 - DNA, 75 bp, Homo sapiens
aactctcagtcatatcattggaatgacttctctttgtctttgtaaaagttttctagcattgagagttacctggta

SEQ ID NO: 3918 - DNA, 75 bp, Homo sapiens
ctctcagtcatatcattggaatgacttctctttgtctttgtaaaagttttctagcattgagagttacctggtacc

SEQ ID NO: 3919 - DNA, 69 bp, Homo sapiens
ttggaatgacttctctttgtctttgtaaaagttttctagcattgagagttacctggtacctgccctttt

SEQ ID NO: 3920 - DNA, 68 bp, Homo sapiens
ttctctttgtctttgtaaaagttttctagcattgagagttacctggtacctgccctttttgtgtactt

SEQ ID NO: 3921 - DNA, 65 bp, Homo sapiens
aaaagttttctagcattgagagttacctggtacctgccctttttgtgtactttccttttggaatt

SEQ ID NO: 3922 - DNA, 65 bp, Homo sapiens
agttacctggtacctgccctttttgtgtactttccttttggaattttgtgctcaagttgaacctt

SEQ ID NO: 3923 - DNA, 74 bp, Homo sapiens
tgccctttttgtgtactttccttttggaattttgtgctcaagttgaacctttcagcatctgtatatgtgaagag

SEQ ID NO: 3924 - DNA, 74 bp, Homo sapiens
cttttggaattttgtgctcaagttgaacctttcagcatctgtatatgtgaagagttaagagaggacaggtcttt

SEQ ID NO: 3925 - DNA, 75 bp, Homo sapiens
aagttgaacctttcagcatctgtatatgtgaagagttaagagaggacaggtcttttcaggaacatcagtttagaa

SEQ ID NO: 3926 - DNA, 76 bp, Homo sapiens
aacctttcagcatctgtatatgtgaagagttaagagaggacaggtcttttcaggaacatcagtttagaatgtgagg

SEQ ID NO: 3927 - DNA, 75 bp, Homo sapiens
atctgtatatgtgaagagttaagagaggacaggtcttttcaggaacatcagtttagaatgtgagggtgtgttggg

SEQ ID NO: 3928 - DNA, 74 bp, Homo sapiens
aagagttaagagaggacaggtcttttcaggaacatcagtttagaatgtgagggtgtgttgggtgagactgaaga

SEQ ID NO: 3929 - DNA, 76 bp, Homo sapiens
taagagaggacaggtcttttcaggaacatcagtttagaatgtgagggtgtgttgggtgagactgaagagtatggta

SEQ ID NO: 3930 - DNA, 77 bp, Homo sapiens
cttttcaggaacatcagtttagaatgtgagggtgtgttgggtgagactgaagagtatggtaacatgagactagctaa

SEQ ID NO: 3931 - DNA, 78 bp, Homo sapiens
aacatcagtttagaatgtgagggtgtgttgggtgagactgaagagtatggtaacatgagactagctaagaagaggcta

SEQ ID NO: 3932 - DNA, 78 bp, Homo sapiens
tttagaatgtgagggtgtgttgggtgagactgaagagtatggtaacatgagactagctaagaagaggctagtttatga

SEQ ID NO: 3933 - DNA, 76 bp, Homo sapiens
ggtgtgttgggtgagactgaagagtatggtaacatgagactagctaagaagaggctagtttatgaagaatttataa

SEQ ID NO: 3934 - DNA, 77 bp, Homo sapiens
gtgagactgaagagtatggtaacatgagactagctaagaagaggctagtttatgaagaatttataagcagttagagt

SEQ ID NO: 3935 - DNA, 74 bp, Homo sapiens
actgaagagtatggtaacatgagactagctaagaagaggctagtttatgaagaatttataagcagttagagttt

SEQ ID NO: 3936 - DNA, 74 bp, Homo sapiens
tggtaacatgagactagctaagaagaggctagtttatgaagaatttataagcagttagagttttagacttcgtc

SEQ ID NO: 3937 - DNA, 71 bp, Homo sapiens
actagctaagaagaggctagtttatgaagaatttataagcagttagagttttagacttcgtccttgggcat

SEQ ID NO: 3938 - DNA, 75 bp, Homo sapiens
tatgaagaatttataagcagttagagttttagacttcgtccttgggcattgagccaggcagccagtaggattaat

SEQ ID NO: 3939 - DNA, 71 bp, Homo sapiens
atttataagcagttagagttttagacttcgtccttgggcattgagccaggcagccagtaggattaattttt

SEQ ID NO: 3940 - DNA, 69 bp, Homo sapiens
agcagttagagttttagacttcgtccttgggcattgagccaggcagccagtaggattaatttttttttt

SEQ ID NO: 3941 - DNA, 69 bp, Homo sapiens
tttggttttttcaatagtttcaaacttaaagttgcaaaaatactacaaataataatgctgtactactca

SEQ ID NO: 3942 - DNA, 72 bp, Homo sapiens
tcaatagtttcaaacttaaagttgcaaaaatactacaaataataatgctgtactactcactcattccaaaaa

SEQ ID NO: 3943 - DNA, 70 bp, Homo sapiens
agtttcaaacttaaagttgcaaaaatactacaaataataatgctgtactactcactcattccaaaaatgt

SEQ ID NO: 3944 - DNA, 72 bp, Homo sapiens
aagttgcaaaaatactacaaataataatgctgtactactcactcattccaaaaatgttaacattttaccata

SEQ ID NO: 3945 - DNA, 74 bp, Homo sapiens
tactacaaataataatgctgtactactcactcattccaaaaatgttaacattttaccatattaatgttaccatg

SEQ ID NO: 3946 - DNA, 74 bp, Homo sapiens
aataatgctgtactactcactcattccaaaaatgttaacattttaccatattaatgttaccatgtccttcgctc

SEQ ID NO: 3947 - DNA, 71 bp, Homo sapiens
actcattccaaaaatgttaacattttaccatattaatgttaccatgtccttcgctctaccctcctttgcta

SEQ ID NO: 3948 - DNA, 72 bp, Homo sapiens
aaaaatgttaacattttaccatattaatgttaccatgtccttcgctctaccctcctttgctatctctctcac

SEQ ID NO: 3949 - DNA, 75 bp, Homo sapiens
taacattttaccatattaatgttaccatgtccttcgctctaccctcctttgctatctctctcactctctttctcc

SEQ ID NO: 3950 - DNA, 79 bp, Homo sapiens
ccttcgctctaccctcctttgctatctctctcactctctttctcctctactctctgtagaatctttctgaaccattgca

SEQ ID NO: 3951 - DNA, 74 bp, Homo sapiens
ctctttctcctctactctctgtagaatctttctgaaccattgcagggtaaattacaaataacaatgcctcttta

SEQ ID NO: 3952 - DNA, 72 bp, Homo sapiens
tgtagaatctttctgaaccattgcagggtaaattacaaataacaatgcctctttagcccaagtactaaagtg

SEQ ID NO: 3953 - DNA, 70 bp, Homo sapiens
ctttctgaaccattgcagggtaaattacaaataacaatgcctctttagcccaagtactaaagtgtatagt

SEQ ID NO: 3954 - DNA, 68 bp, Homo sapiens
accattgcagggtaaattacaaataacaatgcctctttagcccaagtactaaagtgtatagttttaat

SEQ ID NO: 3955 - DNA, 65 bp, Homo sapiens
acaatgcctctttagcccaagtactaaagtgtatagttttaattaaaaggggaatttcctaaaca

SEQ ID NO: 3956 - DNA, 64 bp, Homo sapiens
gcctctttagcccaagtactaaagtgtatagttttaattaaaaggggaatttcctaaacaatta

SEQ ID NO: 3957 - DNA, 65 bp, Homo sapiens
cccaagtactaaagtgtatagttttaattaaaaggggaatttcctaaacaattacagtacagtga

SEQ ID NO: 3958 - DNA, 67 bp, Homo sapiens
aagtgtatagttttaattaaaaggggaatttcctaaacaattacagtacagtgatcaaaatcaataa

SEQ ID NO: 3959 - DNA, 66 bp, Homo sapiens
gttttaattaaaaggggaatttcctaaacaattacagtacagtgatcaaaatcaataaattaatat

SEQ ID NO: 3960 - DNA, 78 bp, Homo sapiens
tcctaaacaattacagtacagtgatcaaaatcaataaattaatattgttacagattattatctaatctacagatcata

SEQ ID NO: 3961 - DNA, 81 bp, Homo sapiens
cagtacagtgatcaaaatcaataaattaatattgttacagattattatctaatctacagatcatattcaaattgcagccac

SEQ ID NO: 3962 - DNA, 81 bp, Homo sapiens
taaattaatattgttacagattattatctaatctacagatcatattcaaattgcagccactgatgtcatctacaccaaagg

SEQ ID NO: 3963 - DNA, 80 bp, Homo sapiens
aatattgttacagattattatctaatctacagatcatattcaaattgcagccactgatgtcatctacaccaaagggggaa

SEQ ID NO: 3964 - DNA, 79 bp, Homo sapiens
atctaatctacagatcatattcaaattgcagccactgatgtcatctacaccaaagggggaaacatttttctcttccatg

SEQ ID NO: 3965 - DNA, 76 bp, Homo sapiens
aaattgcagccactgatgtcatctacaccaaagggggaaacatttttctcttccatgtccaggatccaatccaaga

SEQ ID NO: 3966 - DNA, 77 bp, Homo sapiens
tgatgtcatctacaccaaagggggaaacatttttctcttccatgtccaggatccaatccaagatcacaagttgcatt

SEQ ID NO: 3967 - DNA, 74 bp, Homo sapiens
atctacaccaaagggggaaacatttttctcttccatgtccaggatccaatccaagatcacaagttgcatttagc

SEQ ID NO: 3968 - DNA, 79 bp, Homo sapiens
ttttctcttccatgtccaggatccaatccaagatcacaagttgcatttagctgtcatgtctattcagtatttcccagtt

SEQ ID NO: 3969 - DNA, 81 bp, Homo sapiens
ttccatgtccaggatccaatccaagatcacaagttgcatttagctgtcatgtctattcagtatttcccagtttggaatatg

SEQ ID NO: 3970 - DNA, 79 bp, Homo sapiens
atccaatccaagatcacaagttgcatttagctgtcatgtctattcagtatttcccagtttggaatatgtccttattcat

SEQ ID NO: 3971 - DNA, 77 bp, Homo sapiens
aagatcacaagttgcatttagctgtcatgtctattcagtatttcccagtttggaatatgtccttattcattgtcttt

SEQ ID NO: 3972 - DNA, 77 bp, Homo sapiens
ctgtcatgtctattcagtatttcccagtttggaatatgtccttattcattgtcttttgtgaccttgacatctcttaa

SEQ ID NO: 3973 - DNA, 75 bp, Homo sapiens
tgtctattcagtatttcccagtttggaatatgtccttattcattgtcttttgtgaccttgacatctcttaaagtc

SEQ ID NO: 3974 - DNA, 72 bp, Homo sapiens
atttcccagtttggaatatgtccttattcattgtcttttgtgaccttgacatctcttaaagtcctatttcag

SEQ ID NO: 3975 - DNA, 75 bp, Homo sapiens
tggaatatgtccttattcattgtcttttgtgaccttgacatctcttaaagtcctatttcaggttatctgaggtat

SEQ ID NO: 3976 - DNA, 74 bp, Homo sapiens
atgtccttattcattgtcttttgtgaccttgacatctcttaaagtcctatttcaggttatctgaggtattgcct

SEQ ID NO: 3977 - DNA, 71 bp, Homo sapiens
accttgacatctcttaaagtcctatttcaggttatctgaggtattgccttctgtctttcttaggtcttaaa

SEQ ID NO: 3978 - DNA, 70 bp, Homo sapiens
gacatctcttaaagtcctatttcaggttatctgaggtattgccttctgtctttcttaggtcttaaaaaag

SEQ ID NO: 3979 - DNA, 65 bp, Homo sapiens
aaagtcctatttcaggttatctgaggtattgccttctgtctttcttaggtcttaaaaaaggggtt

SEQ ID NO: 3980 - DNA, 67 bp, Homo sapiens
gttatctgaggtattgccttctgtctttcttaggtcttaaaaaaggggtttgtagccatactctttt

SEQ ID NO: 3981 - DNA, 66 bp, Homo sapiens
ctgaggtattgccttctgtctttcttaggtcttaaaaaaggggtttgtagccatactcttttttaa

SEQ ID NO: 3982 - DNA, 67 bp, Homo sapiens
ctgtctttcttaggtcttaaaaaaggggtttgtagccatactcttttttaaatcttcatacagctgt

SEQ ID NO: 3983 - DNA, 67 bp, Homo sapiens
taggtcttaaaaaaggggtttgtagccatactcttttttaaatcttcatacagctgttttctaacag

SEQ ID NO: 3984 - DNA, 68 bp, Homo sapiens
aaaaaggggtttgtagccatactcttttttaaatcttcatacagctgttttctaacagtggcctagat

SEQ ID NO: 3985 - DNA, 70 bp, Homo sapiens
gggtttgtagccatactcttttttaaatcttcatacagctgttttctaacagtggcctagattttatctt

SEQ ID NO: 3986 - DNA, 75 bp, Homo sapiens
tttaaatcttcatacagctgttttctaacagtggcctagattttatctttctctgggagccattctttgatttga

SEQ ID NO: 3987 - DNA, 77 bp, Homo sapiens
atacagctgttttctaacagtggcctagattttatctttctctgggagccattctttgatttgagcattgtttgcta

SEQ ID NO: 3988 - DNA, 79 bp, Homo sapiens
ttttctaacagtggcctagattttatctttctctgggagccattctttgatttgagcattgtttgctatctgcagagac

SEQ ID NO: 3989 - DNA, 77 bp, Homo sapiens
cctagattttatctttctctgggagccattctttgatttgagcattgtttgctatctgcagagactggaaattttta

SEQ ID NO: 3990 - DNA, 75 bp, Homo sapiens
ttttatctttctctgggagccattctttgatttgagcattgtttgctatctgcagagactggaaatttttaaaac

SEQ ID NO: 3991 - DNA, 78 bp, Homo sapiens
tctctgggagccattctttgatttgagcattgtttgctatctgcagagactggaaatttttaaaaccagcaagtcttg

SEQ ID NO: 3992 - DNA, 72 bp, Homo sapiens
atttgagcattgtttgctatctgcagagactggaaatttttaaaaccagcaagtcttggctctttttttttg

SEQ ID NO: 3993 - DNA, 71 bp, Homo sapiens
tgctatctgcagagactggaaatttttaaaaccagcaagtcttggctctttttttttggtcaacagtcttt

SEQ ID NO: 3994 - DNA, 69 bp, Homo sapiens
ctgcagagactggaaatttttaaaaccagcaagtcttggctctttttttttggtcaacagtcttttcat

SEQ ID NO: 3995 - DNA, 65 bp, Homo sapiens
ggaaatttttaaaaccagcaagtcttggctctttttttttggtcaacagtcttttcattaactta

SEQ ID NO: 3996 - DNA, 69 bp, Homo sapiens
accagcaagtcttggctctttttttttggtcaacagtcttttcattaacttatttctgtactcctgctt

SEQ ID NO: 3997 - DNA, 68 bp, Homo sapiens
ttttttggtcaacagtcttttcattaacttatttctgtactcctgctttttactataaacagtaagaa

SEQ ID NO: 3998 - DNA, 73 bp, Homo sapiens
tcattaacttatttctgtactcctgctttttactataaacagtaagaaataattagactgcatcttccaccga

SEQ ID NO: 3999 - DNA, 73 bp, Homo sapiens
tatttctgtactcctgctttttactataaacagtaagaaataattagactgcatcttccaccgaatacctaga

SEQ ID NO: 4000 - DNA, 71 bp, Homo sapiens
actcctgctttttactataaacagtaagaaataattagactgcatcttccaccgaatacctagaaatctcc

SEQ ID NO: 4001 - DNA, 74 bp, Homo sapiens
tactataaacagtaagaaataattagactgcatcttccaccgaatacctagaaatctccttgttaaattatgca

SEQ ID NO: 4002 - DNA, 74 bp, Homo sapiens
cagtaagaaataattagactgcatcttccaccgaatacctagaaatctccttgttaaattatgcaactcattaa

SEQ ID NO: 4003 - DNA, 74 bp, Homo sapiens
gaaataattagactgcatcttccaccgaatacctagaaatctccttgttaaattatgcaactcattaaatacat

SEQ ID NO: 4004 - DNA, 73 bp, Homo sapiens
gactgcatcttccaccgaatacctagaaatctccttgttaaattatgcaactcattaaatacattttctattt

SEQ ID NO: 4005 - DNA, 72 bp, Homo sapiens
tccaccgaatacctagaaatctccttgttaaattatgcaactcattaaatacattttctatttttcatgtta

SEQ ID NO: 4006 - DNA, 72 bp, Homo sapiens
gaaatctccttgttaaattatgcaactcattaaatacattttctatttttcatgttaccacaggcaaggttg

SEQ ID NO: 4007 - DNA, 73 bp, Homo sapiens
ctccttgttaaattatgcaactcattaaatacattttctatttttcatgttaccacaggcaaggttgtgccta

SEQ ID NO: 4008 - DNA, 73 bp, Homo sapiens
tatgcaactcattaaatacattttctatttttcatgttaccacaggcaaggttgtgcctaaactttcagttac

SEQ ID NO: 4009 - DNA, 73 bp, Homo sapiens
ttctatttttcatgttaccacaggcaaggttgtgcctaaactttcagttactaattatgaagtattcagcttc

SEQ ID NO: 4010 - DNA, 73 bp, Homo sapiens
ttcatgttaccacaggcaaggttgtgcctaaactttcagttactaattatgaagtattcagcttcttccaatt

SEQ ID NO: 4011 - DNA, 71 bp, Homo sapiens
acaggcaaggttgtgcctaaactttcagttactaattatgaagtattcagcttcttccaattttcagttac

SEQ ID NO: 4012 - DNA, 68 bp, Homo sapiens
aactttcagttactaattatgaagtattcagcttcttccaattttcagttacctttttctcactttgg

SEQ ID NO: 4013 - DNA, 68 bp, Homo sapiens
gttactaattatgaagtattcagcttcttccaattttcagttacctttttctcactttggtttaagcc

SEQ ID NO: 4014 - DNA, 69 bp, Homo sapiens
ttcttccaattttcagttacctttttctcactttggtttaagcctttagtagcagcctgctaagggcca

SEQ ID NO: 4015 - DNA, 72 bp, Homo sapiens
ctttttctcactttggtttaagcctttagtagcagcctgctaagggccatgaggtttctagtgacaatctct

SEQ ID NO: 4016 - DNA, 77 bp, Homo sapiens
actttggtttaagcctttagtagcagcctgctaagggccatgaggtttctagtgacaatctcttcattgctcatcaa

SEQ ID NO: 4017 - DNA, 82 bp, Homo sapiens
ttaagcctttagtagcagcctgctaagggccatgaggtttctagtgacaatctcttcattgctcatcaagcttttgctgata

SEQ ID NO: 4018 - DNA, 85 bp, Homo sapiens
ttagtagcagcctgctaagggccatgaggtttctagtgacaatctcttcattgctcatcaagcttttgctgatattctcctgcaa

SEQ ID NO: 4019 - DNA, 84 bp, Homo sapiens
taagggccatgaggtttctagtgacaatctcttcattgctcatcaagcttttgctgatattctcctgcaagtcctgtcagcttc

SEQ ID NO: 4020 - DNA, 85 bp, Homo sapiens
atgaggtttctagtgacaatctcttcattgctcatcaagcttttgctgatattctcctgcaagtcctgtcagcttctgcctacta

SEQ ID NO: 4021 - DNA, 86 bp, Homo sapiens
ttctagtgacaatctcttcattgctcatcaagcttttgctgatattctcctgcaagtcctgtcagcttctgcctactacctgattc

SEQ ID NO: 4022 - DNA, 86 bp, Homo sapiens
aatctcttcattgctcatcaagcttttgctgatattctcctgcaagtcctgtcagcttctgcctactacctgattccaagcagcgc

SEQ ID NO: 4023 - DNA, 87 bp, Homo sapiens
ttgctcatcaagcttttgctgatattctcctgcaagtcctgtcagcttctgcctactacctgattccaagcagcgcctgcattttca

SEQ ID NO: 4024 - DNA, 81 bp, Homo sapiens
ttttgctgatattctcctgcaagtcctgtcagcttctgcctactacctgattccaagcagcgcctgcattttcaggtttta

SEQ ID NO: 4025 - DNA, 77 bp, Homo sapiens
aagtcctgtcagcttctgcctactacctgattccaagcagcgcctgcattttcaggttttattgtatgggaacatcc

SEQ ID NO: 4026 - DNA, 76 bp, Homo sapiens
cttctgcctactacctgattccaagcagcgcctgcattttcaggttttattgtatgggaacatccgtctcctggta

SEQ ID NO: 4027 - DNA, 76 bp, Homo sapiens
tactacctgattccaagcagcgcctgcattttcaggttttattgtatgggaacatccgtctcctggtaacagataa

SEQ ID NO: 4028 - DNA, 75 bp, Homo sapiens
ttccaagcagcgcctgcattttcaggttttattgtatgggaacatccgtctcctggtaacagataaccaggagta

SEQ ID NO: 4029 - DNA, 73 bp, Homo sapiens
ttcaggttttattgtatgggaacatccgtctcctggtaacagataaccaggagtaatctgtaaatctgtgtta

SEQ ID NO: 4030 - DNA, 73 bp, Homo sapiens
ttattgtatgggaacatccgtctcctggtaacagataaccaggagtaatctgtaaatctgtgttagttaacta

SEQ ID NO: 4031 - DNA, 74 bp, Homo sapiens
catccgtctcctggtaacagataaccaggagtaatctgtaaatctgtgttagttaactattgtagtatagcaat

SEQ ID NO: 4032 - DNA, 72 bp, Homo sapiens
aacagataaccaggagtaatctgtaaatctgtgttagttaactattgtagtatagcaatttaccctgaaata

SEQ ID NO: 4033 - DNA, 73 bp, Homo sapiens
ctgtaaatctgtgttagttaactattgtagtatagcaatttaccctgaaatatattggcttaaaactgcaata

SEQ ID NO: 4034 - DNA, 71 bp, Homo sapiens
gtgttagttaactattgtagtatagcaatttaccctgaaatatattggcttaaaactgcaataaacattta

SEQ ID NO: 4035 - DNA, 76 bp, Homo sapiens
tgtagtatagcaatttaccctgaaatatattggcttaaaactgcaataaacatttatagtctcacagcttcagtgg

SEQ ID NO: 4036 - DNA, 76 bp, Homo sapiens
tatagcaatttaccctgaaatatattggcttaaaactgcaataaacatttatagtctcacagcttcagtgggtcag

SEQ ID NO: 4037 - DNA, 74 bp, Homo sapiens
cctgaaatatattggcttaaaactgcaataaacatttatagtctcacagcttcagtgggtcaggaatttggatt

SEQ ID NO: 4038 - DNA, 76 bp, Homo sapiens
tatattggcttaaaactgcaataaacatttatagtctcacagcttcagtgggtcaggaatttggatttagtgtcta

SEQ ID NO: 4039 - DNA, 78 bp, Homo sapiens
taaaactgcaataaacatttatagtctcacagcttcagtgggtcaggaatttggatttagtgtctattatcagattgc

SEQ ID NO: 4040 - DNA, 78 bp, Homo sapiens
ataaacatttatagtctcacagcttcagtgggtcaggaatttggatttagtgtctattatcagattgccttcatgttg

SEQ ID NO: 4041 - DNA, 80 bp, Homo sapiens
atagtctcacagcttcagtgggtcaggaatttggatttagtgtctattatcagattgccttcatgttgtctttgattata

SEQ ID NO: 4042 - DNA, 77 bp, Homo sapiens
cttcagtgggtcaggaatttggatttagtgtctattatcagattgccttcatgttgtctttgattatagtcatttaa

SEQ ID NO: 4043 - DNA, 77 bp, Homo sapiens
caggaatttggatttagtgtctattatcagattgccttcatgttgtctttgattatagtcatttaaaggccagacta

SEQ ID NO: 4044 - DNA, 78 bp, Homo sapiens
ttggatttagtgtctattatcagattgccttcatgttgtctttgattatagtcatttaaaggccagactaaagctgaa

SEQ ID NO: 4045 - DNA, 79 bp, Homo sapiens
tattatcagattgccttcatgttgtctttgattatagtcatttaaaggccagactaaagctgaaggatgctctctcttt

SEQ ID NO: 4046 - DNA, 75 bp, Homo sapiens
agattgccttcatgttgtctttgattatagtcatttaaaggccagactaaagctgaaggatgctctctctttttt

SEQ ID NO: 4047 - DNA, 79 bp, Homo sapiens
gggattacaggagctgccacacccagccgctggaggatattctctaagatgacttactcacatggttgacagtttggtg

SEQ ID NO: 4048 - DNA, 78 bp, Homo sapiens
agctgccacacccagccgctggaggatattctctaagatgacttactcacatggttgacagtttggtggctgcctttt

SEQ ID NO: 4049 - DNA, 75 bp, Homo sapiens
ccacacccagccgctggaggatattctctaagatgacttactcacatggttgacagtttggtggctgcctttttt

SEQ ID NO: 4050 - DNA, 73 bp, Homo sapiens
ttttttttttgctgcatgaattttttcttagggccttttgagtgccatgtgacatggcacctagcttttccca

SEQ ID NO: 4051 - DNA, 75 bp, Homo sapiens
tttttgctgcatgaattttttcttagggccttttgagtgccatgtgacatggcacctagcttttcccatacggac

SEQ ID NO: 4052 - DNA, 75 bp, Homo sapiens
attttttcttagggccttttgagtgccatgtgacatggcacctagcttttcccatacggactgctctaagagcaa

SEQ ID NO: 4053 - DNA, 76 bp, Homo sapiens
tcttagggccttttgagtgccatgtgacatggcacctagcttttcccatacggactgctctaagagcaacccaaaa

SEQ ID NO: 4054 - DNA, 78 bp, Homo sapiens
ttttgagtgccatgtgacatggcacctagcttttcccatacggactgctctaagagcaacccaaaagctgccatgttt

SEQ ID NO: 4055 - DNA, 76 bp, Homo sapiens
atgtgacatggcacctagcttttcccatacggactgctctaagagcaacccaaaagctgccatgttttttatagcc

SEQ ID NO: 4056 - DNA, 73 bp, Homo sapiens
ctagcttttcccatacggactgctctaagagcaacccaaaagctgccatgttttttatagcctggcctcggaa

SEQ ID NO: 4057 - DNA, 74 bp, Homo sapiens
ttttcccatacggactgctctaagagcaacccaaaagctgccatgttttttatagcctggcctcggaagtcaca

SEQ ID NO: 4058 - DNA, 74 bp, Homo sapiens
tgctctaagagcaacccaaaagctgccatgttttttatagcctggcctcggaagtcacacggtatcattttctt

SEQ ID NO: 4059 - DNA, 71 bp, Homo sapiens
taagagcaacccaaaagctgccatgttttttatagcctggcctcggaagtcacacggtatcattttctttt

SEQ ID NO: 4060 - DNA, 71 bp, Homo sapiens
aaaagctgccatgttttttatagcctggcctcggaagtcacacggtatcattttctttttctgactaaatg

SEQ ID NO: 4061 - DNA, 71 bp, Homo sapiens
catgttttttatagcctggcctcggaagtcacacggtatcattttctttttctgactaaatgtcttattta

SEQ ID NO: 4062 - DNA, 64 bp, Homo sapiens
gttttatttgtttttaaggtttttttgaggtaagaatagataacataacatttgccattttaac

SEQ ID NO: 4063 - DNA, 71 bp, Homo sapiens
ttttttgaggtaagaatagataacataacatttgccattttaaccactttgatggcatattgttattttta

SEQ ID NO: 4064 - DNA, 77 bp, Homo sapiens
taagaatagataacataacatttgccattttaaccactttgatggcatattgttatttttactctctattggatgca

SEQ ID NO: 4065 - DNA, 76 bp, Homo sapiens
taacataacatttgccattttaaccactttgatggcatattgttatttttactctctattggatgcataggtaagc

SEQ ID NO: 4066 - DNA, 73 bp, Homo sapiens
attttaaccactttgatggcatattgttatttttactctctattggatgcataggtaagcctgttcagtacgg

SEQ ID NO: 4067 - DNA, 78 bp, Homo sapiens
actttgatggcatattgttatttttactctctattggatgcataggtaagcctgttcagtacgggtaggcactgcaca

SEQ ID NO: 4068 - DNA, 77 bp, Homo sapiens
tgttatttttactctctattggatgcataggtaagcctgttcagtacgggtaggcactgcacaggtacaaagatcat

SEQ ID NO: 4069 - DNA, 76 bp, Homo sapiens
tttttactctctattggatgcataggtaagcctgttcagtacgggtaggcactgcacaggtacaaagatcattggg

SEQ ID NO: 4070 - DNA, 78 bp, Homo sapiens
tattggatgcataggtaagcctgttcagtacgggtaggcactgcacaggtacaaagatcattgggggcatggaggctt

SEQ ID NO: 4071 - DNA, 76 bp, Homo sapiens
ttcagtacgggtaggcactgcacaggtacaaagatcattgggggcatggaggctttctaccacaccttgagattta

SEQ ID NO: 4072 - DNA, 79 bp, Homo sapiens
taggcactgcacaggtacaaagatcattgggggcatggaggctttctaccacaccttgagatttaggcacatatcctgt

SEQ ID NO: 4073 - DNA, 75 bp, Homo sapiens
acaggtacaaagatcattgggggcatggaggctttctaccacaccttgagatttaggcacatatcctgtttctta

SEQ ID NO: 4074 - DNA, 75 bp, Homo sapiens
tacaaagatcattgggggcatggaggctttctaccacaccttgagatttaggcacatatcctgtttcttattaaa

SEQ ID NO: 4075 - DNA, 73 bp, Homo sapiens
gggcatggaggctttctaccacaccttgagatttaggcacatatcctgtttcttattaaattttcacccacaa

SEQ ID NO: 4076 - DNA, 70 bp, Homo sapiens
ggctttctaccacaccttgagatttaggcacatatcctgtttcttattaaattttcacccacaagtttta

SEQ ID NO: 4077 - DNA, 74 bp, Homo sapiens
taccacaccttgagatttaggcacatatcctgtttcttattaaattttcacccacaagttttagcattcactga

SEQ ID NO: 4078 - DNA, 75 bp, Homo sapiens
atttaggcacatatcctgtttcttattaaattttcacccacaagttttagcattcactgatgagtctagcctgaa

SEQ ID NO: 4079 - DNA, 75 bp, Homo sapiens
ggcacatatcctgtttcttattaaattttcacccacaagttttagcattcactgatgagtctagcctgaaataaa

SEQ ID NO: 4080 - DNA, 74 bp, Homo sapiens
tcttattaaattttcacccacaagttttagcattcactgatgagtctagcctgaaataaataatagttgacaaa

SEQ ID NO: 4081 - DNA, 72 bp, Homo sapiens
attttcacccacaagttttagcattcactgatgagtctagcctgaaataaataatagttgacaaaaggtaat

SEQ ID NO: 4082 - DNA, 72 bp, Homo sapiens
acccacaagttttagcattcactgatgagtctagcctgaaataaataatagttgacaaaaggtaattttcta

SEQ ID NO: 4083 - DNA, 77 bp, Homo sapiens
gcattcactgatgagtctagcctgaaataaataatagttgacaaaaggtaattttctaattgtatcattgtcaatag

SEQ ID NO: 4084 - DNA, 70 bp, Homo sapiens
gcctgaaataaataatagttgacaaaaggtaattttctaattgtatcattgtcaatagtggggaagggtg

SEQ ID NO: 4085 - DNA, 70 bp, Homo sapiens
aaataatagttgacaaaaggtaattttctaattgtatcattgtcaatagtggggaagggtggagtctaca

SEQ ID NO: 4086 - DNA, 71 bp, Homo sapiens
gtggagtctacagaggaaataaaagagtaggttgagtagtagaaggataaatgttatgttctttggattta

SEQ ID NO: 4087 - DNA, 71 bp, Homo sapiens
cagaggaaataaaagagtaggttgagtagtagaaggataaatgttatgttctttggatttagcaccaagga

SEQ ID NO: 4088 - DNA, 72 bp, Homo sapiens
ataaaagagtaggttgagtagtagaaggataaatgttatgttctttggatttagcaccaaggaagtcattga

SEQ ID NO: 4089 - DNA, 73 bp, Homo sapiens
gttgagtagtagaaggataaatgttatgttctttggatttagcaccaaggaagtcattgaagaggagtttcaa

SEQ ID NO: 4090 - DNA, 75 bp, Homo sapiens
tgagtagtagaaggataaatgttatgttctttggatttagcaccaaggaagtcattgaagaggagtttcaatgta

SEQ ID NO: 4091 - DNA, 72 bp, Homo sapiens
agaaggataaatgttatgttctttggatttagcaccaaggaagtcattgaagaggagtttcaatgtagagtt

SEQ ID NO: 4092 - DNA, 73 bp, Homo sapiens
aggataaatgttatgttctttggatttagcaccaaggaagtcattgaagaggagtttcaatgtagagtttcaa

SEQ ID NO: 4093 - DNA, 75 bp, Homo sapiens
gataaatgttatgttctttggatttagcaccaaggaagtcattgaagaggagtttcaatgtagagtttcaatata

SEQ ID NO: 4094 - DNA, 73 bp, Homo sapiens
atgttctttggatttagcaccaaggaagtcattgaagaggagtttcaatgtagagtttcaatatatttattgg

SEQ ID NO: 4095 - DNA, 73 bp, Homo sapiens
ggatttagcaccaaggaagtcattgaagaggagtttcaatgtagagtttcaatatatttattggtagataaag

SEQ ID NO: 4096 - DNA, 74 bp, Homo sapiens
tagcaccaaggaagtcattgaagaggagtttcaatgtagagtttcaatatatttattggtagataaagtgggtg

SEQ ID NO: 4097 - DNA, 74 bp, Homo sapiens
caccaaggaagtcattgaagaggagtttcaatgtagagtttcaatatatttattggtagataaagtgggtgtga

SEQ ID NO: 4098 - DNA, 74 bp, Homo sapiens
caaggaagtcattgaagaggagtttcaatgtagagtttcaatatatttattggtagataaagtgggtgtgagga

SEQ ID NO: 4099 - DNA, 74 bp, Homo sapiens
gagtttcaatgtagagtttcaatatatttattggtagataaagtgggtgtgaggaagtacaggtagtgagagta

SEQ ID NO: 4100 - DNA, 72 bp, Homo sapiens
tagagtttcaatatatttattggtagataaagtgggtgtgaggaagtacaggtagtgagagtacttaactct

SEQ ID NO: 4101 - DNA, 73 bp, Homo sapiens
atatatttattggtagataaagtgggtgtgaggaagtacaggtagtgagagtacttaactcttaagaatctca

SEQ ID NO: 4102 - DNA, 76 bp, Homo sapiens
agtgggtgtgaggaagtacaggtagtgagagtacttaactcttaagaatctcagatttgctgggcttgcgtgtata

SEQ ID NO: 4103 - DNA, 82 bp, Homo sapiens
tacaggtagtgagagtacttaactcttaagaatctcagatttgctgggcttgcgtgtatagtcccagctgctggagcgctga

SEQ ID NO: 4104 - DNA, 81 bp, Homo sapiens
agagtacttaactcttaagaatctcagatttgctgggcttgcgtgtatagtcccagctgctggagcgctgatgtgggagta

SEQ ID NO: 4105 - DNA, 70 bp, Homo sapiens
aaattaaaaaagaatctcagatttgaagacaaaagggaggaggcaggaaaaatgatactatgtcttcttc

SEQ ID NO: 4106 - DNA, 69 bp, Homo sapiens
atttgaagacaaaagggaggaggcaggaaaaatgatactatgtcttcttctgttttggtggggaagaaa

SEQ ID NO: 4107 - DNA, 69 bp, Homo sapiens
aagacaaaagggaggaggcaggaaaaatgatactatgtcttcttctgttttggtggggaagaaagaaga

SEQ ID NO: 4108 - DNA, 73 bp, Homo sapiens
aggcaggaaaaatgatactatgtcttcttctgttttggtggggaagaaagaagagaagcatgtaggtgaataa

SEQ ID NO: 4109 - DNA, 71 bp, Homo sapiens
aaaaatgatactatgtcttcttctgttttggtggggaagaaagaagagaagcatgtaggtgaataactagg

SEQ ID NO: 4110 - DNA, 72 bp, Homo sapiens
tgtcttcttctgttttggtggggaagaaagaagagaagcatgtaggtgaataactaggtcacctgggtagta

SEQ ID NO: 4111 - DNA, 72 bp, Homo sapiens
tgttttggtggggaagaaagaagagaagcatgtaggtgaataactaggtcacctgggtagtagagcaaagaa

SEQ ID NO: 4112 - DNA, 73 bp, Homo sapiens
gggaagaaagaagagaagcatgtaggtgaataactaggtcacctgggtagtagagcaaagaaactagatgtgg

SEQ ID NO: 4113 - DNA, 73 bp, Homo sapiens
aaagaagagaagcatgtaggtgaataactaggtcacctgggtagtagagcaaagaaactagatgtgggttgaa

SEQ ID NO: 4114 - DNA, 74 bp, Homo sapiens
aagcatgtaggtgaataactaggtcacctgggtagtagagcaaagaaactagatgtgggttgaaccctatcaga

SEQ ID NO: 4115 - DNA, 74 bp, Homo sapiens
atgtaggtgaataactaggtcacctgggtagtagagcaaagaaactagatgtgggttgaaccctatcagagata

SEQ ID NO: 4116 - DNA, 74 bp, Homo sapiens
tgtaggtgaataactaggtcacctgggtagtagagcaaagaaactagatgtgggttgaaccctatcagagatat

SEQ ID NO: 4117 - DNA, 76 bp, Homo sapiens
taactaggtcacctgggtagtagagcaaagaaactagatgtgggttgaaccctatcagagatattgctaggcagat

SEQ ID NO: 4118 - DNA, 76 bp, Homo sapiens
acctgggtagtagagcaaagaaactagatgtgggttgaaccctatcagagatattgctaggcagattgggtataca

SEQ ID NO: 4119 - DNA, 76 bp, Homo sapiens
ggtagtagagcaaagaaactagatgtgggttgaaccctatcagagatattgctaggcagattgggtatacaaataa

SEQ ID NO: 4120 - DNA, 77 bp, Homo sapiens
tagtagagcaaagaaactagatgtgggttgaaccctatcagagatattgctaggcagattgggtatacaaataagga

SEQ ID NO: 4121 - DNA, 75 bp, Homo sapiens
caaagaaactagatgtgggttgaaccctatcagagatattgctaggcagattgggtatacaaataaggaggccaa

SEQ ID NO: 4122 - DNA, 74 bp, Homo sapiens
aaagaaactagatgtgggttgaaccctatcagagatattgctaggcagattgggtatacaaataaggaggccaa

SEQ ID NO: 4123 - DNA, 76 bp, Homo sapiens
tagatgtgggttgaaccctatcagagatattgctaggcagattgggtatacaaataaggaggccaagtgcgttatt

SEQ ID NO: 4124 - DNA, 74 bp, Homo sapiens
gttgaaccctatcagagatattgctaggcagattgggtatacaaataaggaggccaagtgcgttattttcaaaa

SEQ ID NO: 4125 - DNA, 71 bp, Homo sapiens
ttgctaggcagattgggtatacaaataaggaggccaagtgcgttattttcaaaagtgtttaaaataatgga

SEQ ID NO: 4126 - DNA, 72 bp, Homo sapiens
caaataaggaggccaagtgcgttattttcaaaagtgtttaaaataatggatcatgagattgaggtgggataa

SEQ ID NO: 4127 - DNA, 75 bp, Homo sapiens
gccaagtgcgttattttcaaaagtgtttaaaataatggatcatgagattgaggtgggataatagatgtagtggaa

SEQ ID NO: 4128 - DNA, 73 bp, Homo sapiens
gcgttattttcaaaagtgtttaaaataatggatcatgagattgaggtgggataatagatgtagtggaactagg

SEQ ID NO: 4129 - DNA, 73 bp, Homo sapiens
aaagtgtttaaaataatggatcatgagattgaggtgggataatagatgtagtggaactagggaagggctggaa

SEQ ID NO: 4130 - DNA, 76 bp, Homo sapiens
ttaaaataatggatcatgagattgaggtgggataatagatgtagtggaactagggaagggctggaacatagagtta

SEQ ID NO: 4131 - DNA, 78 bp, Homo sapiens
atcatgagattgaggtgggataatagatgtagtggaactagggaagggctggaacatagagttacaggagatattgga

SEQ ID NO: 4132 - DNA, 76 bp, Homo sapiens
attgaggtgggataatagatgtagtggaactagggaagggctggaacatagagttacaggagatattggagcatgg

SEQ ID NO: 4133 - DNA, 76 bp, Homo sapiens
tgtagtggaactagggaagggctggaacatagagttacaggagatattggagcatgggcctagagggctcagtaag

SEQ ID NO: 4134 - DNA, 76 bp, Homo sapiens
gaagggctggaacatagagttacaggagatattggagcatgggcctagagggctcagtaaggttcaagaataagta

SEQ ID NO: 4135 - DNA, 75 bp, Homo sapiens
aacatagagttacaggagatattggagcatgggcctagagggctcagtaaggttcaagaataagtatagtaagag

SEQ ID NO: 4136 - DNA, 76 bp, Homo sapiens
ttacaggagatattggagcatgggcctagagggctcagtaaggttcaagaataagtatagtaagagtgtgaattaa

SEQ ID NO: 4137 - DNA, 76 bp, Homo sapiens
agatattggagcatgggcctagagggctcagtaaggttcaagaataagtatagtaagagtgtgaattaactgcaag

SEQ ID NO: 4138 - DNA, 74 bp, Homo sapiens
atgggcctagagggctcagtaaggttcaagaataagtatagtaagagtgtgaattaactgcaaggttatgaaga

SEQ ID NO: 4139 - DNA, 74 bp, Homo sapiens
tagagggctcagtaaggttcaagaataagtatagtaagagtgtgaattaactgcaaggttatgaagaaagagta

SEQ ID NO: 4140 - DNA, 75 bp, Homo sapiens
gaataagtatagtaagagtgtgaattaactgcaaggttatgaagaaagagtagatcattgtggtttaatatttca

SEQ ID NO: 4141 - DNA, 75 bp, Homo sapiens
aagagtgtgaattaactgcaaggttatgaagaaagagtagatcattgtggtttaatatttcattgggatatgttg

SEQ ID NO: 4142 - DNA, 76 bp, Homo sapiens
aagaaagagtagatcattgtggtttaatatttcattgggatatgttgggtgatggcagcttccaggtgttggaaga

SEQ ID NO: 4143 - DNA, 77 bp, Homo sapiens
agtagatcattgtggtttaatatttcattgggatatgttgggtgatggcagcttccaggtgttggaagacagttctc

SEQ ID NO: 4144 - DNA, 77 bp, Homo sapiens
tttaatatttcattgggatatgttgggtgatggcagcttccaggtgttggaagacagttctccatggttctcacatt

SEQ ID NO: 4145 - DNA, 82 bp, Homo sapiens
atatgttgggtgatggcagcttccaggtgttggaagacagttctccatggttctcacatttatacacatcttgtgagtggca

SEQ ID NO: 4146 - DNA, 82 bp, Homo sapiens
tggcagcttccaggtgttggaagacagttctccatggttctcacatttatacacatcttgtgagtggcagccctgactgcct

SEQ ID NO: 4147 - DNA, 79 bp, Homo sapiens
ttccaggtgttggaagacagttctccatggttctcacatttatacacatcttgtgagtggcagccctgactgcctttgt

SEQ ID NO: 4148 - DNA, 79 bp, Homo sapiens
ttggaagacagttctccatggttctcacatttatacacatcttgtgagtggcagccctgactgcctttgttcttttcaa

SEQ ID NO: 4149 - DNA, 77 bp, Homo sapiens
tcacatttatacacatcttgtgagtggcagccctgactgcctttgttcttttcaaggttgtttatgttgtttatata

SEQ ID NO: 4150 - DNA, 76 bp, Homo sapiens
tttatacacatcttgtgagtggcagccctgactgcctttgttcttttcaaggttgtttatgttgtttatatagcaa

SEQ ID NO: 4151 - DNA, 75 bp, Homo sapiens
ttgtgagtggcagccctgactgcctttgttcttttcaaggttgtttatgttgtttatatagcaagcaaacagcct

SEQ ID NO: 4152 - DNA, 71 bp, Homo sapiens
agccctgactgcctttgttcttttcaaggttgtttatgttgtttatatagcaagcaaacagccttggaaaa

SEQ ID NO: 4153 - DNA, 73 bp, Homo sapiens
ctttgttcttttcaaggttgtttatgttgtttatatagcaagcaaacagccttggaaaacagaggcactatca

SEQ ID NO: 4154 - DNA, 75 bp, Homo sapiens
ttcaaggttgtttatgttgtttatatagcaagcaaacagccttggaaaacagaggcactatcattcaaatttctc

SEQ ID NO: 4155 - DNA, 76 bp, Homo sapiens
tttatgttgtttatatagcaagcaaacagccttggaaaacagaggcactatcattcaaatttctcctgtaattcag

SEQ ID NO: 4156 - DNA, 77 bp, Homo sapiens
ttgtttatatagcaagcaaacagccttggaaaacagaggcactatcattcaaatttctcctgtaattcagtccactg

SEQ ID NO: 4157 - DNA, 79 bp, Homo sapiens
acagccttggaaaacagaggcactatcattcaaatttctcctgtaattcagtccactgtgtgtataaatgtcatcttgc

SEQ ID NO: 4158 - DNA, 78 bp, Homo sapiens
aaaacagaggcactatcattcaaatttctcctgtaattcagtccactgtgtgtataaatgtcatcttgccccaggtca

SEQ ID NO: 4159 - DNA, 78 bp, Homo sapiens
actatcattcaaatttctcctgtaattcagtccactgtgtgtataaatgtcatcttgccccaggtcaccctgtcagaa

SEQ ID NO: 4160 - DNA, 75 bp, Homo sapiens
aaatttctcctgtaattcagtccactgtgtgtataaatgtcatcttgccccaggtcaccctgtcagaatggggaa

SEQ ID NO: 4161 - DNA, 77 bp, Homo sapiens
ctgtgtgtataaatgtcatcttgccccaggtcaccctgtcagaatggggaacttaggcaaatgctaacagtctggct

SEQ ID NO: 4162 - DNA, 77 bp, Homo sapiens
tataaatgtcatcttgccccaggtcaccctgtcagaatggggaacttaggcaaatgctaacagtctggcttttgcta

SEQ ID NO: 4163 - DNA, 74 bp, Homo sapiens
aggtcaccctgtcagaatggggaacttaggcaaatgctaacagtctggcttttgctattgccacgagtattaaa

SEQ ID NO: 4164 - DNA, 75 bp, Homo sapiens
agaatggggaacttaggcaaatgctaacagtctggcttttgctattgccacgagtattaaagtcctctgtgtcca

SEQ ID NO: 4165 - DNA, 79 bp, Homo sapiens
aaatgctaacagtctggcttttgctattgccacgagtattaaagtcctctgtgtccaatgcaggagtcttgtgtcatct

SEQ ID NO: 4166 - DNA, 79 bp, Homo sapiens
aacagtctggcttttgctattgccacgagtattaaagtcctctgtgtccaatgcaggagtcttgtgtcatcttctacca

SEQ ID NO: 4167 - DNA, 81 bp, Homo sapiens
cttttgctattgccacgagtattaaagtcctctgtgtccaatgcaggagtcttgtgtcatcttctaccagcatctatgaaa

SEQ ID NO: 4168 - DNA, 80 bp, Homo sapiens
acgagtattaaagtcctctgtgtccaatgcaggagtcttgtgtcatcttctaccagcatctatgaaactgtggtgaacta

SEQ ID NO: 4169 - DNA, 79 bp, Homo sapiens
attaaagtcctctgtgtccaatgcaggagtcttgtgtcatcttctaccagcatctatgaaactgtggtgaactaacttg

SEQ ID NO: 4170 - DNA, 81 bp, Homo sapiens
tgtgtccaatgcaggagtcttgtgtcatcttctaccagcatctatgaaactgtggtgaactaacttgtcactttacaagta

SEQ ID NO: 4171 - DNA, 78 bp, Homo sapiens
tgtcatcttctaccagcatctatgaaactgtggtgaactaacttgtcactttacaagtacagtaagatcttagactct

SEQ ID NO: 4172 - DNA, 76 bp, Homo sapiens
ttctaccagcatctatgaaactgtggtgaactaacttgtcactttacaagtacagtaagatcttagactctttgta

SEQ ID NO: 4173 - DNA, 72 bp, Homo sapiens
catctatgaaactgtggtgaactaacttgtcactttacaagtacagtaagatcttagactctttgtagtttt

SEQ ID NO: 4174 - DNA, 71 bp, Homo sapiens
actgtggtgaactaacttgtcactttacaagtacagtaagatcttagactctttgtagtttttgacaccaa

SEQ ID NO: 4175 - DNA, 72 bp, Homo sapiens
cttgtcactttacaagtacagtaagatcttagactctttgtagtttttgacaccaagatgtggttttaggca

SEQ ID NO: 4176 - DNA, 72 bp, Homo sapiens
actttacaagtacagtaagatcttagactctttgtagtttttgacaccaagatgtggttttaggcatactga

SEQ ID NO: 4177 - DNA, 75 bp, Homo sapiens
agtaagatcttagactctttgtagtttttgacaccaagatgtggttttaggcatactgaaggagagtctgaatga

SEQ ID NO: 4178 - DNA, 76 bp, Homo sapiens
ttagactctttgtagtttttgacaccaagatgtggttttaggcatactgaaggagagtctgaatgaaagccattga

SEQ ID NO: 4179 - DNA, 76 bp, Homo sapiens
tagtttttgacaccaagatgtggttttaggcatactgaaggagagtctgaatgaaagccattgaaattgagaatat

SEQ ID NO: 4180 - DNA, 78 bp, Homo sapiens
tttgacaccaagatgtggttttaggcatactgaaggagagtctgaatgaaagccattgaaattgagaatatttgagga

SEQ ID NO: 4181 - DNA, 79 bp, Homo sapiens
tggttttaggcatactgaaggagagtctgaatgaaagccattgaaattgagaatatttgaggactgtgcgagttgttca

SEQ ID NO: 4182 - DNA, 80 bp, Homo sapiens
ttaggcatactgaaggagagtctgaatgaaagccattgaaattgagaatatttgaggactgtgcgagttgttcatacagt

SEQ ID NO: 4183 - DNA, 78 bp, Homo sapiens
aatgaaagccattgaaattgagaatatttgaggactgtgcgagttgttcatacagttggccttaactcgctagcacac

SEQ ID NO: 4184 - DNA, 76 bp, Homo sapiens
attgaaattgagaatatttgaggactgtgcgagttgttcatacagttggccttaactcgctagcacacccacccac

SEQ ID NO: 4185 - DNA, 76 bp, Homo sapiens
agaatatttgaggactgtgcgagttgttcatacagttggccttaactcgctagcacacccacccactcttgtggtc

SEQ ID NO: 4186 - DNA, 76 bp, Homo sapiens
tttgaggactgtgcgagttgttcatacagttggccttaactcgctagcacacccacccactcttgtggtccaggga

SEQ ID NO: 4187 - DNA, 74 bp, Homo sapiens
agttgttcatacagttggccttaactcgctagcacacccacccactcttgtggtccagggatgttgggatactg

SEQ ID NO: 4188 - DNA, 74 bp, Homo sapiens
atacagttggccttaactcgctagcacacccacccactcttgtggtccagggatgttgggatactgtggttcaa

SEQ ID NO: 4189 - DNA, 73 bp, Homo sapiens
ttaactcgctagcacacccacccactcttgtggtccagggatgttgggatactgtggttcaaggtcttaccaa

SEQ ID NO: 4190 - DNA, 76 bp, Homo sapiens
ctagcacacccacccactcttgtggtccagggatgttgggatactgtggttcaaggtcttaccaagatcacatgta

SEQ ID NO: 4191 - DNA, 75 bp, Homo sapiens
acccactcttgtggtccagggatgttgggatactgtggttcaaggtcttaccaagatcacatgtagcaggaaaga

SEQ ID NO: 4192 - DNA, 76 bp, Homo sapiens
tggtccagggatgttgggatactgtggttcaaggtcttaccaagatcacatgtagcaggaaagagttgcctaaaga

SEQ ID NO: 4193 - DNA, 73 bp, Homo sapiens
atgttgggatactgtggttcaaggtcttaccaagatcacatgtagcaggaaagagttgcctaaagaaaagtac

SEQ ID NO: 4194 - DNA, 72 bp, Homo sapiens
atactgtggttcaaggtcttaccaagatcacatgtagcaggaaagagttgcctaaagaaaagtacgtcgggc

SEQ ID NO: 4195 - DNA, 71 bp, Homo sapiens
ggttcaaggtcttaccaagatcacatgtagcaggaaagagttgcctaaagaaaagtacgtcgggcgcggtg

SEQ ID NO: 4196 - DNA, 72 bp, Homo sapiens
aaaagaaaagtaatgggcagacgaagagataaagagacacctattaataaatgatagagctggaatttaaga

SEQ ID NO: 4197 - DNA, 76 bp, Homo sapiens
aagtaatgggcagacgaagagataaagagacacctattaataaatgatagagctggaatttaagatgaactatgtc

SEQ ID NO: 4198 - DNA, 76 bp, Homo sapiens
acgaagagataaagagacacctattaataaatgatagagctggaatttaagatgaactatgtctgactacgaagtc

SEQ ID NO: 4199 - DNA, 75 bp, Homo sapiens
taaagagacacctattaataaatgatagagctggaatttaagatgaactatgtctgactacgaagtccctggaat

SEQ ID NO: 4200 - DNA, 73 bp, Homo sapiens
gacacctattaataaatgatagagctggaatttaagatgaactatgtctgactacgaagtccctggaattttt

SEQ ID NO: 4201 - DNA, 76 bp, Homo sapiens
aacttacaatcatgtcagaaggcgacgaggaaataaacacatctttaccatggtggagcaggagagagaaaatgaa

SEQ ID NO: 4202 - DNA, 76 bp, Homo sapiens
atcatgtcagaaggcgacgaggaaataaacacatctttaccatggtggagcaggagagagaaaatgaagagggaaa

SEQ ID NO: 4203 - DNA, 71 bp, Homo sapiens
cgacgaggaaataaacacatctttaccatggtggagcaggagagagaaaatgaagagggaaagtttgaaac

SEQ ID NO: 4204 - DNA, 73 bp, Homo sapiens
ataaacacatctttaccatggtggagcaggagagagaaaatgaagagggaaagtttgaaactgctacatactt

SEQ ID NO: 4205 - DNA, 73 bp, Homo sapiens
atctttaccatggtggagcaggagagagaaaatgaagagggaaagtttgaaactgctacatactttcaaacaa

SEQ ID NO: 4206 - DNA, 75 bp, Homo sapiens
acacagagccaaacgatatcagaggtaagaatcatatcccctttgaaagttagataaatctgtattacaacttga

SEQ ID NO: 4207 - DNA, 73 bp, Homo sapiens
gccaaacgatatcagaggtaagaatcatatcccctttgaaagttagataaatctgtattacaacttgaagagt

SEQ ID NO: 4208 - DNA, 70 bp, Homo sapiens
atatcagaggtaagaatcatatcccctttgaaagttagataaatctgtattacaacttgaagagtttttt

SEQ ID NO: 4209 - DNA, 67 bp, Homo sapiens
agaggtaagaatcatatcccctttgaaagttagataaatctgtattacaacttgaagagtttttttt

SEQ ID NO: 4210 - DNA, 67 bp, Homo sapiens
taagaatcatatcccctttgaaagttagataaatctgtattacaacttgaagagttttttttttggt

SEQ ID NO: 4211 - DNA, 72 bp, Homo sapiens
ttttttggttttagtacaaatggtgaagttttcacatgttctcaaaagaatgctaatacagaatatgcctta

SEQ ID NO: 4212 - DNA, 78 bp, Homo sapiens
ttagtacaaatggtgaagttttcacatgttctcaaaagaatgctaatacagaatatgccttatcaatcctctgttctg

SEQ ID NO: 4213 - DNA, 72 bp, Homo sapiens
ctgttctgttccaggaagctattatttaactgagtagtatttgggagaataaattttgaagacctgcttgct

SEQ ID NO: 4214 - DNA, 71 bp, Homo sapiens
ctgttccaggaagctattatttaactgagtagtatttgggagaataaattttgaagacctgcttgcttaaa

SEQ ID NO: 4215 - DNA, 69 bp, Homo sapiens
aagctattatttaactgagtagtatttgggagaataaattttgaagacctgcttgcttaaataaataac

SEQ ID NO: 4216 - DNA, 69 bp, Homo sapiens
ctgagtagtatttgggagaataaattttgaagacctgcttgcttaaataaataacttgttaaaagaaga

SEQ ID NO: 4217 - DNA, 67 bp, Homo sapiens
agtatttgggagaataaattttgaagacctgcttgcttaaataaataacttgttaaaagaagataaa

SEQ ID NO: 4218 - DNA, 67 bp, Homo sapiens
gggagaataaattttgaagacctgcttgcttaaataaataacttgttaaaagaagataaaaagtgaa

SEQ ID NO: 4219 - DNA, 68 bp, Homo sapiens
taaattttgaagacctgcttgcttaaataaataacttgttaaaagaagataaaaagtgaaagtagatg

SEQ ID NO: 4220 - DNA, 71 bp, Homo sapiens
ttgaagacctgcttgcttaaataaataacttgttaaaagaagataaaaagtgaaagtagatgtgaatagtc

SEQ ID NO: 4221 - DNA, 71 bp, Homo sapiens
tgaagacctgcttgcttaaataaataacttgttaaaagaagataaaaagtgaaagtagatgtgaatagtct

SEQ ID NO: 4222 - DNA, 67 bp, Homo sapiens
ataaataacttgttaaaagaagataaaaagtgaaagtagatgtgaatagtctttttgaaatttagct

SEQ ID NO: 4223 - DNA, 70 bp, Homo sapiens
taacttgttaaaagaagataaaaagtgaaagtagatgtgaatagtctttttgaaatttagcttgaattca

SEQ ID NO: 4224 - DNA, 71 bp, Homo sapiens
cttgttaaaagaagataaaaagtgaaagtagatgtgaatagtctttttgaaatttagcttgaattcagatg

SEQ ID NO: 4225 - DNA, 72 bp, Homo sapiens
aaaagaagataaaaagtgaaagtagatgtgaatagtctttttgaaatttagcttgaattcagatgttgaaga

SEQ ID NO: 4226 - DNA, 73 bp, Homo sapiens
agataaaaagtgaaagtagatgtgaatagtctttttgaaatttagcttgaattcagatgttgaagacaaacag

SEQ ID NO: 4227 - DNA, 78 bp, Homo sapiens
gtgaaagtagatgtgaatagtctttttgaaatttagcttgaattcagatgttgaagacaaacagtaatatagtgtgca

SEQ ID NO: 4228 - DNA, 79 bp, Homo sapiens
gtagatgtgaatagtctttttgaaatttagcttgaattcagatgttgaagacaaacagtaatatagtgtgcatcaatta

SEQ ID NO: 4229 - DNA, 80 bp, Homo sapiens
ctttttgaaatttagcttgaattcagatgttgaagacaaacagtaatatagtgtgcatcaattaattggcatgtccatga

SEQ ID NO: 4230 - DNA, 81 bp, Homo sapiens
gaaatttagcttgaattcagatgttgaagacaaacagtaatatagtgtgcatcaattaattggcatgtccatgaaatagaa

SEQ ID NO: 4231 - DNA, 81 bp, Homo sapiens
aacagtaatatagtgtgcatcaattaattggcatgtccatgaaatagaatgttatggctaactgaattggctgaggattaa

SEQ ID NO: 4232 - DNA, 75 bp, Homo sapiens
ttggcatgtccatgaaatagaatgttatggctaactgaattggctgaggattaactttatttaatagagttattt

SEQ ID NO: 4233 - DNA, 72 bp, Homo sapiens
tatggctaactgaattggctgaggattaactttatttaatagagttattttttgcaacttgtaaggttgaga

SEQ ID NO: 4234 - DNA, 76 bp, Homo sapiens
tgaattggctgaggattaactttatttaatagagttattttttgcaacttgtaaggttgagattgcatgtaatgca

SEQ ID NO: 4235 - DNA, 75 bp, Homo sapiens
tggctgaggattaactttatttaatagagttattttttgcaacttgtaaggttgagattgcatgtaatgcaaaga

SEQ ID NO: 4236 - DNA, 73 bp, Homo sapiens
ctttatttaatagagttattttttgcaacttgtaaggttgagattgcatgtaatgcaaagactcatgtttaat

SEQ ID NO: 4237 - DNA, 75 bp, Homo sapiens
agagttattttttgcaacttgtaaggttgagattgcatgtaatgcaaagactcatgtttaattcatgtaggtgtt

SEQ ID NO: 4238 - DNA, 75 bp, Homo sapiens
tttttgcaacttgtaaggttgagattgcatgtaatgcaaagactcatgtttaattcatgtaggtgtttagaattt

SEQ ID NO: 4239 - DNA, 76 bp, Homo sapiens
acttgtaaggttgagattgcatgtaatgcaaagactcatgtttaattcatgtaggtgtttagaattttattccagc

SEQ ID NO: 4240 - DNA, 82 bp, Homo sapiens
gagattgcatgtaatgcaaagactcatgtttaattcatgtaggtgtttagaattttattccagctatctaattatagcatca

SEQ ID NO: 4241 - DNA, 82 bp, Homo sapiens
tgtaatgcaaagactcatgtttaattcatgtaggtgtttagaattttattccagctatctaattatagcatcatggagatga

SEQ ID NO: 4242 - DNA, 79 bp, Homo sapiens
aattcatgtaggtgtttagaattttattccagctatctaattatagcatcatggagatgaagtaatgatagcctattgt

SEQ ID NO: 4243 - DNA, 79 bp, Homo sapiens
tgtaggtgtttagaattttattccagctatctaattatagcatcatggagatgaagtaatgatagcctattgttttcca

SEQ ID NO: 4244 - DNA, 79 bp, Homo sapiens
tatagcatcatggagatgaagtaatgatagcctattgttttccattaataatataaatatttattaatgtatttatcac

SEQ ID NO: 4245 - DNA, 77 bp, Homo sapiens
tggagatgaagtaatgatagcctattgttttccattaataatataaatatttattaatgtatttatcacctgtggca

SEQ ID NO: 4246 - DNA, 74 bp, Homo sapiens
gtaatgatagcctattgttttccattaataatataaatatttattaatgtatttatcacctgtggcaaatgacc

SEQ ID NO: 4247 - DNA, 73 bp, Homo sapiens
gatagcctattgttttccattaataatataaatatttattaatgtatttatcacctgtggcaaatgacctagt

SEQ ID NO: 4248 - DNA, 71 bp, Homo sapiens
gttttccattaataatataaatatttattaatgtatttatcacctgtggcaaatgacctagttttcatttc

SEQ ID NO: 4249 - DNA, 73 bp, Homo sapiens
atataaatatttattaatgtatttatcacctgtggcaaatgacctagttttcatttccatttttatagatgaa

SEQ ID NO: 4250 - DNA, 73 bp, Homo sapiens
ttattaatgtatttatcacctgtggcaaatgacctagttttcatttccatttttatagatgaagaattaggga

SEQ ID NO: 4251 - DNA, 73 bp, Homo sapiens
gtatttatcacctgtggcaaatgacctagttttcatttccatttttatagatgaagaattagggacatgaagg

SEQ ID NO: 4252 - DNA, 71 bp, Homo sapiens
caaatgacctagttttcatttccatttttatagatgaagaattagggacatgaaggtttaattagatttga

SEQ ID NO: 4253 - DNA, 72 bp, Homo sapiens
tcatttccatttttatagatgaagaattagggacatgaaggtttaattagatttgataaatgtttacaaagc

SEQ ID NO: 4254 - DNA, 72 bp, Homo sapiens
ttttatagatgaagaattagggacatgaaggtttaattagatttgataaatgtttacaaagcgtctactcaa

SEQ ID NO: 4255 - DNA, 73 bp, Homo sapiens
tgaagaattagggacatgaaggtttaattagatttgataaatgtttacaaagcgtctactcaattcgagacac

SEQ ID NO: 4256 - DNA, 75 bp, Homo sapiens
attagggacatgaaggtttaattagatttgataaatgtttacaaagcgtctactcaattcgagacaccatgctca

SEQ ID NO: 4257 - DNA, 73 bp, Homo sapiens
gtttaattagatttgataaatgtttacaaagcgtctactcaattcgagacaccatgctcaatccttgggaaaa

SEQ ID NO: 4258 - DNA, 74 bp, Homo sapiens
agatttgataaatgtttacaaagcgtctactcaattcgagacaccatgctcaatccttgggaaaacagaattta

SEQ ID NO: 4259 - DNA, 71 bp, Homo sapiens
aaatgtttacaaagcgtctactcaattcgagacaccatgctcaatccttgggaaaacagaatttaaaaatc

SEQ ID NO: 4260 - DNA, 74 bp, Homo sapiens
aaagcgtctactcaattcgagacaccatgctcaatccttgggaaaacagaatttaaaaatctggagagtcacaa

SEQ ID NO: 4261 - DNA, 74 bp, Homo sapiens
agacaccatgctcaatccttgggaaaacagaatttaaaaatctggagagtcacaatcaatattgaacagtttgt

SEQ ID NO: 4262 - DNA, 71 bp, Homo sapiens
gctcaatccttgggaaaacagaatttaaaaatctggagagtcacaatcaatattgaacagtttgtttaaag

SEQ ID NO: 4263 - DNA, 71 bp, Homo sapiens
taaaaatctggagagtcacaatcaatattgaacagtttgtttaaagttttgtatttgggggcataacacca

SEQ ID NO: 4264 - DNA, 72 bp, Homo sapiens
atctggagagtcacaatcaatattgaacagtttgtttaaagttttgtatttgggggcataacaccagtagaa

SEQ ID NO: 4265 - DNA, 69 bp, Homo sapiens
tcacaatcaatattgaacagtttgtttaaagttttgtatttgggggcataacaccagtagaatccggtt

SEQ ID NO: 4266 - DNA, 64 bp, Homo sapiens
ttgaacagtttgtttaaagttttgtatttgggggcataacaccagtagaatccggtttattttt

SEQ ID NO: 4267 - DNA, 62 bp, Homo sapiens
tttgtttaaagttttgtatttgggggcataacaccagtagaatccggtttattttttaaaac

SEQ ID NO: 4268 - DNA, 66 bp, Homo sapiens
gtatttgggggcataacaccagtagaatccggtttattttttaaaacttttctgctcctttctatg

SEQ ID NO: 4269 - DNA, 68 bp, Homo sapiens
gcataacaccagtagaatccggtttattttttaaaacttttctgctcctttctatggcctctcttttg

SEQ ID NO: 4270 - DNA, 66 bp, Homo sapiens
acaccagtagaatccggtttattttttaaaacttttctgctcctttctatggcctctcttttgtat

SEQ ID NO: 4271 - DNA, 73 bp, Homo sapiens
ttaaaacttttctgctcctttctatggcctctcttttgtattttttcagaaatgtagctataagcagtgagag

SEQ ID NO: 4272 - DNA, 76 bp, Homo sapiens
ttttctgctcctttctatggcctctcttttgtattttttcagaaatgtagctataagcagtgagagtgttatagta

SEQ ID NO: 4273 - DNA, 80 bp, Homo sapiens
tctatggcctctcttttgtattttttcagaaatgtagctataagcagtgagagtgttatagtagatagatctgacttatc

SEQ ID NO: 4274 - DNA, 80 bp, Homo sapiens
ctcttttgtattttttcagaaatgtagctataagcagtgagagtgttatagtagatagatctgacttatctgagaagcca

SEQ ID NO: 4275 - DNA, 80 bp, Homo sapiens
ttttttcagaaatgtagctataagcagtgagagtgttatagtagatagatctgacttatctgagaagccatttaactgtg

SEQ ID NO: 4276 - DNA, 82 bp, Homo sapiens
aatgtagctataagcagtgagagtgttatagtagatagatctgacttatctgagaagccatttaactgtggtatataatcta

SEQ ID NO: 4277 - DNA, 82 bp, Homo sapiens
tataagcagtgagagtgttatagtagatagatctgacttatctgagaagccatttaactgtggtatataatctaatctccta

SEQ ID NO: 4278 - DNA, 82 bp, Homo sapiens
tgagagtgttatagtagatagatctgacttatctgagaagccatttaactgtggtatataatctaatctcctactgattgta

SEQ ID NO: 4279 - DNA, 82 bp, Homo sapiens
ttatagtagatagatctgacttatctgagaagccatttaactgtggtatataatctaatctcctactgattgtaggatgcac

SEQ ID NO: 4280 - DNA, 79 bp, Homo sapiens
atctgacttatctgagaagccatttaactgtggtatataatctaatctcctactgattgtaggatgcaccttcatttta

SEQ ID NO: 4281 - DNA, 78 bp, Homo sapiens
gtatataatctaatctcctactgattgtaggatgcaccttcattttatgtgccactaagaaaaaatcatgccaagtaa

SEQ ID NO: 4282 - DNA, 76 bp, Homo sapiens
aatctaatctcctactgattgtaggatgcaccttcattttatgtgccactaagaaaaaatcatgccaagtaaacta

SEQ ID NO: 4283 - DNA, 80 bp, Homo sapiens
tactgattgtaggatgcaccttcattttatgtgccactaagaaaaaatcatgccaagtaaactatgacacagcagtatta

SEQ ID NO: 4284 - DNA, 77 bp, Homo sapiens
ccttcattttatgtgccactaagaaaaaatcatgccaagtaaactatgacacagcagtattataatacataacctga

SEQ ID NO: 4285 - DNA, 77 bp, Homo sapiens
atgtgccactaagaaaaaatcatgccaagtaaactatgacacagcagtattataatacataacctgattttagagat

SEQ ID NO: 4286 - DNA, 74 bp, Homo sapiens
aaaaatcatgccaagtaaactatgacacagcagtattataatacataacctgattttagagatttatttaaata

SEQ ID NO: 4287 - DNA, 74 bp, Homo sapiens
catgccaagtaaactatgacacagcagtattataatacataacctgattttagagatttatttaaataaataaa

SEQ ID NO: 4288 - DNA, 69 bp, Homo sapiens
atttaaataaataaatctcttaggatctattaaacatggcatgtcaaagaacttagagttccttttaac

SEQ ID NO: 4289 - DNA, 71 bp, Homo sapiens
ataaatctcttaggatctattaaacatggcatgtcaaagaacttagagttccttttaactctttcaggtgt

SEQ ID NO: 4290 - DNA, 76 bp, Homo sapiens
tctcttaggatctattaaacatggcatgtcaaagaacttagagttccttttaactctttcaggtgttgcatataca

SEQ ID NO: 4291 - DNA, 74 bp, Homo sapiens
taaacatggcatgtcaaagaacttagagttccttttaactctttcaggtgttgcatatacagttaaaagatgtg

SEQ ID NO: 4292 - DNA, 75 bp, Homo sapiens
agaacttagagttccttttaactctttcaggtgttgcatatacagttaaaagatgtgtatatgattgttcatcac

SEQ ID NO: 4293 - DNA, 78 bp, Homo sapiens
agttccttttaactctttcaggtgttgcatatacagttaaaagatgtgtatatgattgttcatcactatggtagctca

SEQ ID NO: 4294 - DNA, 80 bp, Homo sapiens
actctttcaggtgttgcatatacagttaaaagatgtgtatatgattgttcatcactatggtagctcatatttagaaacca

SEQ ID NO: 4295 - DNA, 80 bp, Homo sapiens
ttgcatatacagttaaaagatgtgtatatgattgttcatcactatggtagctcatatttagaaaccatgtaaattgcccg

SEQ ID NO: 4296 - DNA, 78 bp, Homo sapiens
cagttaaaagatgtgtatatgattgttcatcactatggtagctcatatttagaaaccatgtaaattgcccgtaacaga

SEQ ID NO: 4297 - DNA, 79 bp, Homo sapiens
aaagatgtgtatatgattgttcatcactatggtagctcatatttagaaaccatgtaaattgcccgtaacagatgaataa

SEQ ID NO: 4298 - DNA, 80 bp, Homo sapiens
atatgattgttcatcactatggtagctcatatttagaaaccatgtaaattgcccgtaacagatgaataaattatggcaca

SEQ ID NO: 4299 - DNA, 78 bp, Homo sapiens
catcactatggtagctcatatttagaaaccatgtaaattgcccgtaacagatgaataaattatggcacatctgtaaaa

SEQ ID NO: 4300 - DNA, 74 bp, Homo sapiens
ggtagctcatatttagaaaccatgtaaattgcccgtaacagatgaataaattatggcacatctgtaaaaatggg

SEQ ID NO: 4301 - DNA, 75 bp, Homo sapiens
catatttagaaaccatgtaaattgcccgtaacagatgaataaattatggcacatctgtaaaaatggggcattatg

SEQ ID NO: 4302 - DNA, 75 bp, Homo sapiens
ttagaaaccatgtaaattgcccgtaacagatgaataaattatggcacatctgtaaaaatggggcattatgttgtg

SEQ ID NO: 4303 - DNA, 76 bp, Homo sapiens
aaaccatgtaaattgcccgtaacagatgaataaattatggcacatctgtaaaaatggggcattatgttgtgtctca

SEQ ID NO: 4304 - DNA, 76 bp, Homo sapiens
atgtaaattgcccgtaacagatgaataaattatggcacatctgtaaaaatggggcattatgttgtgtctcagtttc

SEQ ID NO: 4305 - DNA, 76 bp, Homo sapiens
aaattgcccgtaacagatgaataaattatggcacatctgtaaaaatggggcattatgttgtgtctcagtttcttca

SEQ ID NO: 4306 - DNA, 72 bp, Homo sapiens
cagtttcttcatctgcatcaagttgattttagtgcttacctcatagagtttttaaaactaaattagttagta

SEQ ID NO: 4307 - DNA, 73 bp, Homo sapiens
cttcatctgcatcaagttgattttagtgcttacctcatagagtttttaaaactaaattagttagtacatgtaa

SEQ ID NO: 4308 - DNA, 70 bp, Homo sapiens
catcaagttgattttagtgcttacctcatagagtttttaaaactaaattagttagtacatgtaaaatgtc

SEQ ID NO: 4309 - DNA, 71 bp, Homo sapiens
tagtgcttacctcatagagtttttaaaactaaattagttagtacatgtaaaatgtcctggcacatattaac

SEQ ID NO: 4310 - DNA, 69 bp, Homo sapiens
ctcatagagtttttaaaactaaattagttagtacatgtaaaatgtcctggcacatattaactgaaaacc

SEQ ID NO: 4311 - DNA, 68 bp, Homo sapiens
tttaaaactaaattagttagtacatgtaaaatgtcctggcacatattaactgaaaacctggttgttta

SEQ ID NO: 4312 - DNA, 71 bp, Homo sapiens
aattagttagtacatgtaaaatgtcctggcacatattaactgaaaacctggttgtttagacagaaaacaca

SEQ ID NO: 4313 - DNA, 72 bp, Homo sapiens
aaatgtcctggcacatattaactgaaaacctggttgtttagacagaaaacacaggagcatcttagttattaa

SEQ ID NO: 4314 - DNA, 72 bp, Homo sapiens
ggcacatattaactgaaaacctggttgtttagacagaaaacacaggagcatcttagttattaaccaacatta

SEQ ID NO: 4315 - DNA, 71 bp, Homo sapiens
ctgaaaacctggttgtttagacagaaaacacaggagcatcttagttattaaccaacattattattgtaaca

SEQ ID NO: 4316 - DNA, 72 bp, Homo sapiens
cctggttgtttagacagaaaacacaggagcatcttagttattaaccaacattattattgtaacacttatgat

SEQ ID NO: 4317 - DNA, 76 bp, Homo sapiens
cagaaaacacaggagcatcttagttattaaccaacattattattgtaacacttatgatttagaatcatgatttaga

SEQ ID NO: 4318 - DNA, 75 bp, Homo sapiens
aacacaggagcatcttagttattaaccaacattattattgtaacacttatgatttagaatcatgatttagaagac

SEQ ID NO: 4319 - DNA, 77 bp, Homo sapiens
catcttagttattaaccaacattattattgtaacacttatgatttagaatcatgatttagaagactaatgaagtgca

SEQ ID NO: 4320 - DNA, 75 bp, Homo sapiens
attaaccaacattattattgtaacacttatgatttagaatcatgatttagaagactaatgaagtgcaaagatgtt

SEQ ID NO: 4321 - DNA, 77 bp, Homo sapiens
tattattgtaacacttatgatttagaatcatgatttagaagactaatgaagtgcaaagatgtttttaatataagtga

SEQ ID NO: 4322 - DNA, 77 bp, Homo sapiens
cttatgatttagaatcatgatttagaagactaatgaagtgcaaagatgtttttaatataagtgaaagatacatagtg

SEQ ID NO: 4323 - DNA, 76 bp, Homo sapiens
agaatcatgatttagaagactaatgaagtgcaaagatgtttttaatataagtgaaagatacatagtgtattcccag

SEQ ID NO: 4324 - DNA, 73 bp, Homo sapiens
gatttagaagactaatgaagtgcaaagatgtttttaatataagtgaaagatacatagtgtattcccagttttg

SEQ ID NO: 4325 - DNA, 73 bp, Homo sapiens
gactaatgaagtgcaaagatgtttttaatataagtgaaagatacatagtgtattcccagttttggttaggaga

SEQ ID NO: 4326 - DNA, 70 bp, Homo sapiens
gcaaagatgtttttaatataagtgaaagatacatagtgtattcccagttttggttaggagatttttaggc

SEQ ID NO: 4327 - DNA, 70 bp, Homo sapiens
atgtttttaatataagtgaaagatacatagtgtattcccagttttggttaggagatttttaggccaggca

SEQ ID NO: 4328 - DNA, 75 bp, Homo sapiens
ctcaaaaaaattattatggattcatttgagaattagtttttcacattgtgatgcttcctctctacacagttagga

SEQ ID NO: 4329 - DNA, 77 bp, Homo sapiens
aattattatggattcatttgagaattagtttttcacattgtgatgcttcctctctacacagttaggaatgtatcacc

SEQ ID NO: 4330 - DNA, 77 bp, Homo sapiens
ttcatttgagaattagtttttcacattgtgatgcttcctctctacacagttaggaatgtatcacctaagaagttgat

SEQ ID NO: 4331 - DNA, 77 bp, Homo sapiens
aattagtttttcacattgtgatgcttcctctctacacagttaggaatgtatcacctaagaagttgattctatatagc

SEQ ID NO: 4332 - DNA, 80 bp, Homo sapiens
tttcacattgtgatgcttcctctctacacagttaggaatgtatcacctaagaagttgattctatatagccacaatgtaat

SEQ ID NO: 4333 - DNA, 80 bp, Homo sapiens
ttgtgatgcttcctctctacacagttaggaatgtatcacctaagaagttgattctatatagccacaatgtaattagctta

SEQ ID NO: 4334 - DNA, 76 bp, Homo sapiens
tcctctctacacagttaggaatgtatcacctaagaagttgattctatatagccacaatgtaattagcttaggaaat

SEQ ID NO: 4335 - DNA, 73 bp, Homo sapiens
acagttaggaatgtatcacctaagaagttgattctatatagccacaatgtaattagcttaggaaatttaacat

SEQ ID NO: 4336 - DNA, 74 bp, Homo sapiens
atgtatcacctaagaagttgattctatatagccacaatgtaattagcttaggaaatttaacattaatataatac

SEQ ID NO: 4337 - DNA, 71 bp, Homo sapiens
agaagttgattctatatagccacaatgtaattagcttaggaaatttaacattaatataatactattaaaaa

SEQ ID NO: 4338 - DNA, 73 bp, Homo sapiens
tctatatagccacaatgtaattagcttaggaaatttaacattaatataatactattaaaaaacatataatcca

SEQ ID NO: 4339 - DNA, 71 bp, Homo sapiens
gccacaatgtaattagcttaggaaatttaacattaatataatactattaaaaaacatataatccataacca

SEQ ID NO: 4340 - DNA, 71 bp, Homo sapiens
gcttaggaaatttaacattaatataatactattaaaaaacatataatccataaccaagcatctcgttgttc

SEQ ID NO: 4341 - DNA, 74 bp, Homo sapiens
tttaacattaatataatactattaaaaaacatataatccataaccaagcatctcgttgttcgagcaatgtccta

SEQ ID NO: 4342 - DNA, 76 bp, Homo sapiens
atataatactattaaaaaacatataatccataaccaagcatctcgttgttcgagcaatgtcctaattgatagccag

SEQ ID NO: 4343 - DNA, 75 bp, Homo sapiens
ctattaaaaaacatataatccataaccaagcatctcgttgttcgagcaatgtcctaattgatagccagtttaaga

SEQ ID NO: 4344 - DNA, 74 bp, Homo sapiens
aaaacatataatccataaccaagcatctcgttgttcgagcaatgtcctaattgatagccagtttaagaagaaat

SEQ ID NO: 4345 - DNA, 77 bp, Homo sapiens
taaccaagcatctcgttgttcgagcaatgtcctaattgatagccagtttaagaagaaattgatgtagaagtcaagta

SEQ ID NO: 4346 - DNA, 77 bp, Homo sapiens
aagcatctcgttgttcgagcaatgtcctaattgatagccagtttaagaagaaattgatgtagaagtcaagtatcaaa

SEQ ID NO: 4347 - DNA, 76 bp, Homo sapiens
ttgttcgagcaatgtcctaattgatagccagtttaagaagaaattgatgtagaagtcaagtatcaaacgttgcatt

SEQ ID NO: 4348 - DNA, 75 bp, Homo sapiens
tgtcctaattgatagccagtttaagaagaaattgatgtagaagtcaagtatcaaacgttgcatttagttgttgtc

SEQ ID NO: 4349 - DNA, 75 bp, Homo sapiens
tgatagccagtttaagaagaaattgatgtagaagtcaagtatcaaacgttgcatttagttgttgtctctttagtc

SEQ ID NO: 4350 - DNA, 71 bp, Homo sapiens
gtttaagaagaaattgatgtagaagtcaagtatcaaacgttgcatttagttgttgtctctttagtctcctt

SEQ ID NO: 4351 - DNA, 73 bp, Homo sapiens
tgatgtagaagtcaagtatcaaacgttgcatttagttgttgtctctttagtctcctttaatctaaaatagtcc

SEQ ID NO: 4352 - DNA, 71 bp, Homo sapiens
agtcaagtatcaaacgttgcatttagttgttgtctctttagtctcctttaatctaaaatagtcccagcact

SEQ ID NO: 4353 - DNA, 70 bp, Homo sapiens
aaaaataaaacagttaccaggattttctacctttcatgacattgacattttcttgagttcagactagttg

SEQ ID NO: 4354 - DNA, 72 bp, Homo sapiens
aaaacagttaccaggattttctacctttcatgacattgacattttcttgagttcagactagttgttttgcag

SEQ ID NO: 4355 - DNA, 78 bp, Homo sapiens
gattttctacctttcatgacattgacattttcttgagttcagactagttgttttgcagtgttgctcagctgggatttg

SEQ ID NO: 4356 - DNA, 79 bp, Homo sapiens
ctttcatgacattgacattttcttgagttcagactagttgttttgcagtgttgctcagctgggatttgtctgatttgtt

SEQ ID NO: 4357 - DNA, 80 bp, Homo sapiens
tttcatgacattgacattttcttgagttcagactagttgttttgcagtgttgctcagctgggatttgtctgatttgtttc

SEQ ID NO: 4358 - DNA, 78 bp, Homo sapiens
attgacattttcttgagttcagactagttgttttgcagtgttgctcagctgggatttgtctgatttgtttcctcctga

SEQ ID NO: 4359 - DNA, 76 bp, Homo sapiens
cattttcttgagttcagactagttgttttgcagtgttgctcagctgggatttgtctgatttgtttcctcctgaaaa

SEQ ID NO: 4360 - DNA, 75 bp, Homo sapiens
attttcttgagttcagactagttgttttgcagtgttgctcagctgggatttgtctgatttgtttcctcctgaaaa

SEQ ID NO: 4361 - DNA, 78 bp, Homo sapiens
agactagttgttttgcagtgttgctcagctgggatttgtctgatttgtttcctcctgaaaagattcatgttaagcata

SEQ ID NO: 4362 - DNA, 79 bp, Homo sapiens
tagttgttttgcagtgttgctcagctgggatttgtctgatttgtttcctcctgaaaagattcatgttaagcatatttga

SEQ ID NO: 4363 - DNA, 79 bp, Homo sapiens
ttttgcagtgttgctcagctgggatttgtctgatttgtttcctcctgaaaagattcatgttaagcatatttgatggaaa

SEQ ID NO: 4364 - DNA, 79 bp, Homo sapiens
tcagctgggatttgtctgatttgtttcctcctgaaaagattcatgttaagcatatttgatggaaataccacgtagatga

SEQ ID NO: 4365 - DNA, 79 bp, Homo sapiens
tttgtttcctcctgaaaagattcatgttaagcatatttgatggaaataccacgtagatgatgtcttgttctcagtgcat

SEQ ID NO: 4366 - DNA, 83 bp, Homo sapiens
tgaaaagattcatgttaagcatatttgatggaaataccacgtagatgatgtcttgttctcagtgcattgtatcaagggacata

SEQ ID NO: 4367 - DNA, 83 bp, Homo sapiens
taagcatatttgatggaaataccacgtagatgatgtcttgttctcagtgcattgtatcaagggacatatgatattagtttatc

SEQ ID NO: 4368 - DNA, 83 bp, Homo sapiens
gaaataccacgtagatgatgtcttgttctcagtgcattgtatcaagggacatatgatattagtttatcccatcatccgtgata

SEQ ID NO: 4369 - DNA, 83 bp, Homo sapiens
gtagatgatgtcttgttctcagtgcattgtatcaagggacatatgatattagtttatcccatcatccgtgatactaaatttga

SEQ ID NO: 4370 - DNA, 80 bp, Homo sapiens
tcttgttctcagtgcattgtatcaagggacatatgatattagtttatcccatcatccgtgatactaaatttgatcccttg

SEQ ID NO: 4371 - DNA, 76 bp, Homo sapiens
agtgcattgtatcaagggacatatgatattagtttatcccatcatccgtgatactaaatttgatcccttggttaag

SEQ ID NO: 4372 - DNA, 74 bp, Homo sapiens
attgtatcaagggacatatgatattagtttatcccatcatccgtgatactaaatttgatcccttggttaaggtg

SEQ ID NO: 4373 - DNA, 75 bp, Homo sapiens
atatgatattagtttatcccatcatccgtgatactaaatttgatcccttggttaaggtgtcgtctaccagatcta

SEQ ID NO: 4374 - DNA, 73 bp, Homo sapiens
atattagtttatcccatcatccgtgatactaaatttgatcccttggttaaggtgtcgtctaccagatctactg

SEQ ID NO: 4375 - DNA, 75 bp, Homo sapiens
atcccatcatccgtgatactaaatttgatcccttggttaaggtgtcgtctaccagatctactgtgaagctttcat

SEQ ID NO: 4376 - DNA, 74 bp, Homo sapiens
atactaaatttgatcccttggttaaggtgtcgtctaccagatctactgtgaagctttcatttccctgtgagata

SEQ ID NO: 4377 - DNA, 73 bp, Homo sapiens
aatttgatcccttggttaaggtgtcgtctaccagatctactgtgaagctttcatttccctgtgagatattact

SEQ ID NO: 4378 - DNA, 74 bp, Homo sapiens
gttaaggtgtcgtctaccagatctactgtgaagctttcatttccctgtgagatattacttgaggctttgaaatt

SEQ ID NO: 4379 - DNA, 76 bp, Homo sapiens
ggtgtcgtctaccagatctactgtgaagctttcatttccctgtgagatattacttgaggctttgaaatttctgttc

SEQ ID NO: 4380 - DNA, 73 bp, Homo sapiens
atctactgtgaagctttcatttccctgtgagatattacttgaggctttgaaatttctgttccccaatagtctt

SEQ ID NO: 4381 - DNA, 75 bp, Homo sapiens
aagctttcatttccctgtgagatattacttgaggctttgaaatttctgttccccaatagtctttcatgcagtgtg

SEQ ID NO: 4382 - DNA, 75 bp, Homo sapiens
tttccctgtgagatattacttgaggctttgaaatttctgttccccaatagtctttcatgcagtgtgtttaatata

SEQ ID NO: 4383 - DNA, 78 bp, Homo sapiens
agatattacttgaggctttgaaatttctgttccccaatagtctttcatgcagtgtgtttaatatatccattgatgatc

SEQ ID NO: 4384 - DNA, 78 bp, Homo sapiens
tacttgaggctttgaaatttctgttccccaatagtctttcatgcagtgtgtttaatatatccattgatgatctttgcc

SEQ ID NO: 4385 - DNA, 82 bp, Homo sapiens
tctttcatgcagtgtgtttaatatatccattgatgatctttgcctgaatctgttgtaactttggtggtaataatgtgatgat

SEQ ID NO: 4386 - DNA, 81 bp, Homo sapiens
tatatccattgatgatctttgcctgaatctgttgtaactttggtggtaataatgtgatgattttctgtttctatcaatgct

SEQ ID NO: 4387 - DNA, 79 bp, Homo sapiens
gatgatctttgcctgaatctgttgtaactttggtggtaataatgtgatgattttctgtttctatcaatgcttccatatt

SEQ ID NO: 4388 - DNA, 77 bp, Homo sapiens
tctttgcctgaatctgttgtaactttggtggtaataatgtgatgattttctgtttctatcaatgcttccatatttat

SEQ ID NO: 4389 - DNA, 79 bp, Homo sapiens
ttggtggtaataatgtgatgattttctgtttctatcaatgcttccatatttatttcttggcatgctttggttatgaaga

SEQ ID NO: 4390 - DNA, 78 bp, Homo sapiens
ttttctgtttctatcaatgcttccatatttatttcttggcatgctttggttatgaagaacttcatctgtccatccaaa

SEQ ID NO: 4391 - DNA, 81 bp, Homo sapiens
tgtttctatcaatgcttccatatttatttcttggcatgctttggttatgaagaacttcatctgtccatccaaacatccatc

SEQ ID NO: 4392 - DNA, 80 bp, Homo sapiens
ttccatatttatttcttggcatgctttggttatgaagaacttcatctgtccatccaaacatccatccattcactaatctc

SEQ ID NO: 4393 - DNA, 80 bp, Homo sapiens
tttatttcttggcatgctttggttatgaagaacttcatctgtccatccaaacatccatccattcactaatctctccagta

SEQ ID NO: 4394 - DNA, 81 bp, Homo sapiens
atgctttggttatgaagaacttcatctgtccatccaaacatccatccattcactaatctctccagtatcgagtagactcaa

SEQ ID NO: 4395 - DNA, 79 bp, Homo sapiens
tatgaagaacttcatctgtccatccaaacatccatccattcactaatctctccagtatcgagtagactcaagtttattt

SEQ ID NO: 4396 - DNA, 76 bp, Homo sapiens
agaacttcatctgtccatccaaacatccatccattcactaatctctccagtatcgagtagactcaagtttattttt

SEQ ID NO: 4397 - DNA, 75 bp, Homo sapiens
ctgtccatccaaacatccatccattcactaatctctccagtatcgagtagactcaagtttatttttttaagttca

SEQ ID NO: 4398 - DNA, 73 bp, Homo sapiens
tccatccattcactaatctctccagtatcgagtagactcaagtttatttttttaagttcactgtgttacgtaa

SEQ ID NO: 4399 - DNA, 70 bp, Homo sapiens
cactaatctctccagtatcgagtagactcaagtttatttttttaagttcactgtgttacgtaattcctgt

SEQ ID NO: 4400 - DNA, 71 bp, Homo sapiens
agtttatttttttaagttcactgtgttacgtaattcctgttattattcatcttaatgctcagattgtccca

SEQ ID NO: 4401 - DNA, 75 bp, Homo sapiens
ttttaagttcactgtgttacgtaattcctgttattattcatcttaatgctcagattgtcccacatttggccaatg

SEQ ID NO: 4402 - DNA, 76 bp, Homo sapiens
ttcactgtgttacgtaattcctgttattattcatcttaatgctcagattgtcccacatttggccaatgggagtcct

SEQ ID NO: 4403 - DNA, 75 bp, Homo sapiens
ttacgtaattcctgttattattcatcttaatgctcagattgtcccacatttggccaatgggagtccttcaacttg

SEQ ID NO: 4404 - DNA, 76 bp, Homo sapiens
ttattattcatcttaatgctcagattgtcccacatttggccaatgggagtccttcaacttggcacttgtgcccttt

SEQ ID NO: 4405 - DNA, 71 bp, Homo sapiens
agattgtcccacatttggccaatgggagtccttcaacttggcacttgtgcccttttgaaatttttcaacag

SEQ ID NO: 4406 - DNA, 68 bp, Homo sapiens
tggccaatgggagtccttcaacttggcacttgtgcccttttgaaatttttcaacagtttataaaaatt

SEQ ID NO: 4407 - DNA, 65 bp, Homo sapiens
acttggcacttgtgcccttttgaaatttttcaacagtttataaaaatttccttaatttctagtaa

SEQ ID NO: 4408 - DNA, 66 bp, Homo sapiens
ccttttgaaatttttcaacagtttataaaaatttccttaatttctagtaaaacagatgctgtaggc

SEQ ID NO: 4409 - DNA, 69 bp, Homo sapiens
tttttcaacagtttataaaaatttccttaatttctagtaaaacagatgctgtaggcttatcttgtcttc

SEQ ID NO: 4410 - DNA, 69 bp, Homo sapiens
gtttataaaaatttccttaatttctagtaaaacagatgctgtaggcttatcttgtcttcttttctgccc

SEQ ID NO: 4411 - DNA, 69 bp, Homo sapiens
aaaatttccttaatttctagtaaaacagatgctgtaggcttatcttgtcttcttttctgccccagacct

SEQ ID NO: 4412 - DNA, 75 bp, Homo sapiens
ttaatttctagtaaaacagatgctgtaggcttatcttgtcttcttttctgccccagaccttgaatcagctcattt

SEQ ID NO: 4413 - DNA, 73 bp, Homo sapiens
ctgtaggcttatcttgtcttcttttctgccccagaccttgaatcagctcattttctaacactggtttctttta

SEQ ID NO: 4414 - DNA, 73 bp, Homo sapiens
tatcttgtcttcttttctgccccagaccttgaatcagctcattttctaacactggtttcttttagtggaggta

SEQ ID NO: 4415 - DNA, 76 bp, Homo sapiens
agaccttgaatcagctcattttctaacactggtttcttttagtggaggtagcatatctacttggagtgtgtctctg

SEQ ID NO: 4416 - DNA, 76 bp, Homo sapiens
aatcagctcattttctaacactggtttcttttagtggaggtagcatatctacttggagtgtgtctctgtcctagaa

SEQ ID NO: 4417 - DNA, 73 bp, Homo sapiens
attttctaacactggtttcttttagtggaggtagcatatctacttggagtgtgtctctgtcctagaatggacc

SEQ ID NO: 4418 - DNA, 81 bp, Homo sapiens
tagcatatctacttggagtgtgtctctgtcctagaatggacccttcagcagtttgagagatcataccagtccttcttactg

SEQ ID NO: 4419 - DNA, 79 bp, Homo sapiens
tctacttggagtgtgtctctgtcctagaatggacccttcagcagtttgagagatcataccagtccttcttactgtgtac

SEQ ID NO: 4420 - DNA, 79 bp, Homo sapiens
tgtctctgtcctagaatggacccttcagcagtttgagagatcataccagtccttcttactgtgtaccccatgcgcttac

SEQ ID NO: 4421 - DNA, 77 bp, Homo sapiens
tagaatggacccttcagcagtttgagagatcataccagtccttcttactgtgtaccccatgcgcttacctgttactg

SEQ ID NO: 4422 - DNA, 79 bp, Homo sapiens
cttcagcagtttgagagatcataccagtccttcttactgtgtaccccatgcgcttacctgttactggccagtgcagaac

SEQ ID NO: 4423 - DNA, 77 bp, Homo sapiens
agtttgagagatcataccagtccttcttactgtgtaccccatgcgcttacctgttactggccagtgcagaactcttc

SEQ ID NO: 4424 - DNA, 75 bp, Homo sapiens
agatcataccagtccttcttactgtgtaccccatgcgcttacctgttactggccagtgcagaactcttcctggtt

SEQ ID NO: 4425 - DNA, 77 bp, Homo sapiens
ttcttactgtgtaccccatgcgcttacctgttactggccagtgcagaactcttcctggtttcagctgcgtttctcaa

SEQ ID NO: 4426 - DNA, 76 bp, Homo sapiens
actgtgtaccccatgcgcttacctgttactggccagtgcagaactcttcctggtttcagctgcgtttctcaaattg

SEQ ID NO: 4427 - DNA, 79 bp, Homo sapiens
atgcgcttacctgttactggccagtgcagaactcttcctggtttcagctgcgtttctcaaattggctctcagtgctttc

SEQ ID NO: 4428 - DNA, 78 bp, Homo sapiens
ctgttactggccagtgcagaactcttcctggtttcagctgcgtttctcaaattggctctcagtgctttccagtaagta

SEQ ID NO: 4429 - DNA, 77 bp, Homo sapiens
agtgcagaactcttcctggtttcagctgcgtttctcaaattggctctcagtgctttccagtaagtactgttgactaa

SEQ ID NO: 4430 - DNA, 74 bp, Homo sapiens
aactcttcctggtttcagctgcgtttctcaaattggctctcagtgctttccagtaagtactgttgactaaatat

SEQ ID NO: 4431 - DNA, 75 bp, Homo sapiens
tttcagctgcgtttctcaaattggctctcagtgctttccagtaagtactgttgactaaatatttagtgcttttct

SEQ ID NO: 4432 - DNA, 73 bp, Homo sapiens
cgtttctcaaattggctctcagtgctttccagtaagtactgttgactaaatatttagtgcttttcttgtcact

SEQ ID NO: 4433 - DNA, 72 bp, Homo sapiens
aaattggctctcagtgctttccagtaagtactgttgactaaatatttagtgcttttcttgtcacttccttct

SEQ ID NO: 4434 - DNA, 75 bp, Homo sapiens
agtaagtactgttgactaaatatttagtgcttttcttgtcacttccttcttcctcatgaatgctgttaccatgtg

SEQ ID NO: 4435 - DNA, 76 bp, Homo sapiens
tgttgactaaatatttagtgcttttcttgtcacttccttcttcctcatgaatgctgttaccatgtgggccttgtaa

SEQ ID NO: 4436 - DNA, 73 bp, Homo sapiens
aatatttagtgcttttcttgtcacttccttcttcctcatgaatgctgttaccatgtgggccttgtaactcttt

SEQ ID NO: 4437 - DNA, 72 bp, Homo sapiens
tttcttgtcacttccttcttcctcatgaatgctgttaccatgtgggccttgtaactcttttccttacctcct

SEQ ID NO: 4438 - DNA, 71 bp, Homo sapiens
ttccttcttcctcatgaatgctgttaccatgtgggccttgtaactcttttccttacctccttgtattttgg

SEQ ID NO: 4439 - DNA, 72 bp, Homo sapiens
ttcctcatgaatgctgttaccatgtgggccttgtaactcttttccttacctccttgtattttggggttgatg

SEQ ID NO: 4440 - DNA, 70 bp, Homo sapiens
tgttaccatgtgggccttgtaactcttttccttacctccttgtattttggggttgatggtgatgctttta

SEQ ID NO: 4441 - DNA, 69 bp, Homo sapiens
atgtgggccttgtaactcttttccttacctccttgtattttggggttgatggtgatgcttttacacttg

SEQ ID NO: 4442 - DNA, 67 bp, Homo sapiens
ttgtaactcttttccttacctccttgtattttggggttgatggtgatgcttttacacttggttttgt

SEQ ID NO: 4443 - DNA, 68 bp, Homo sapiens
ttttccttacctccttgtattttggggttgatggtgatgcttttacacttggttttgttgtgttattc

SEQ ID NO: 4444 - DNA, 70 bp, Homo sapiens
tccttgtattttggggttgatggtgatgcttttacacttggttttgttgtgttattccatgagtttttag

SEQ ID NO: 4445 - DNA, 70 bp, Homo sapiens
gggttgatggtgatgcttttacacttggttttgttgtgttattccatgagtttttagttttattatctat

SEQ ID NO: 4446 - DNA, 71 bp, Homo sapiens
ggtgatgcttttacacttggttttgttgtgttattccatgagtttttagttttattatctatttgctttgc

SEQ ID NO: 4447 - DNA, 69 bp, Homo sapiens
tttacacttggttttgttgtgttattccatgagtttttagttttattatctatttgctttgcttgtttg

SEQ ID NO: 4448 - DNA, 73 bp, Homo sapiens
attacaggctctttgctttgtttttatatttgggattcagaaaggatgagaaactatgttgctgccaccattt

SEQ ID NO: 4449 - DNA, 73 bp, Homo sapiens
aggctctttgctttgtttttatatttgggattcagaaaggatgagaaactatgttgctgccaccattttctct

SEQ ID NO: 4450 - DNA, 72 bp, Homo sapiens
ctttgtttttatatttgggattcagaaaggatgagaaactatgttgctgccaccattttctcttgctgtttt

SEQ ID NO: 4451 - DNA, 70 bp, Homo sapiens
tttttttttttacattgctctgtttactcctcttctgtcaaatcatagctctcttcgttttactcttttc

SEQ ID NO: 4452 - DNA, 74 bp, Homo sapiens
tttttacattgctctgtttactcctcttctgtcaaatcatagctctcttcgttttactcttttcttgctcctct

SEQ ID NO: 4453 - DNA, 74 bp, Homo sapiens
tgtttactcctcttctgtcaaatcatagctctcttcgttttactcttttcttgctcctcttgtacccaaattca

SEQ ID NO: 4454 - DNA, 74 bp, Homo sapiens
tcttctgtcaaatcatagctctcttcgttttactcttttcttgctcctcttgtacccaaattcagcacttaacc

SEQ ID NO: 4455 - DNA, 71 bp, Homo sapiens
aaatcatagctctcttcgttttactcttttcttgctcctcttgtacccaaattcagcacttaacctagcct

SEQ ID NO: 4456 - DNA, 71 bp, Homo sapiens
tagctctcttcgttttactcttttcttgctcctcttgtacccaaattcagcacttaacctagccttgcctt

SEQ ID NO: 4457 - DNA, 73 bp, Homo sapiens
tttactcttttcttgctcctcttgtacccaaattcagcacttaacctagccttgcctttctggtgaagctaga

SEQ ID NO: 4458 - DNA, 73 bp, Homo sapiens
ttgctcctcttgtacccaaattcagcacttaacctagccttgcctttctggtgaagctagacttcctttgact

SEQ ID NO: 4459 - DNA, 73 bp, Homo sapiens
tcttgtacccaaattcagcacttaacctagccttgcctttctggtgaagctagacttcctttgacttataaga

SEQ ID NO: 4460 - DNA, 74 bp, Homo sapiens
aaattcagcacttaacctagccttgcctttctggtgaagctagacttcctttgacttataagactcatactgta

SEQ ID NO: 4461 - DNA, 74 bp, Homo sapiens
acttaacctagccttgcctttctggtgaagctagacttcctttgacttataagactcatactgtatctctgtct

SEQ ID NO: 4462 - DNA, 76 bp, Homo sapiens
tgcctttctggtgaagctagacttcctttgacttataagactcatactgtatctctgtcttttgcatgggttttgt

SEQ ID NO: 4463 - DNA, 76 bp, Homo sapiens
ttctggtgaagctagacttcctttgacttataagactcatactgtatctctgtcttttgcatgggttttgttgttg

SEQ ID NO: 4464 - DNA, 70 bp, Homo sapiens
cccaccttggccttggcctaccagtgttacgattacagggttgagccactgcgaccggcccatgattttt

SEQ ID NO: 4465 - DNA, 71 bp, Homo sapiens
tggccttggcctaccagtgttacgattacagggttgagccactgcgaccggcccatgatttttttatattt

SEQ ID NO: 4466 - DNA, 71 bp, Homo sapiens
ctaccagtgttacgattacagggttgagccactgcgaccggcccatgatttttttatattttcatttcact

SEQ ID NO: 4467 - DNA, 79 bp, Homo sapiens
atatatgtatatgtcttattgtcagactgtatcatgtctcaaagctgatctatattttttatgttttaatgttctttta

SEQ ID NO: 4468 - DNA, 78 bp, Homo sapiens
atatgtcttattgtcagactgtatcatgtctcaaagctgatctatattttttatgttttaatgttcttttatagtgcc

SEQ ID NO: 4469 - DNA, 78 bp, Homo sapiens
gtcagactgtatcatgtctcaaagctgatctatattttttatgttttaatgttcttttatagtgcctaatatgatttc

SEQ ID NO: 4470 - DNA, 75 bp, Homo sapiens
actgtatcatgtctcaaagctgatctatattttttatgttttaatgttcttttatagtgcctaatatgatttctt

SEQ ID NO: 4471 - DNA, 71 bp, Homo sapiens
gtctcaaagctgatctatattttttatgttttaatgttcttttatagtgcctaatatgatttcttttcttt

SEQ ID NO: 4472 - DNA, 72 bp, Homo sapiens
ttttaaaccctgagtgtcaggtgtgaggtagtagaagaaaggtagtgttgttgacagcttgtgagtacttaa

SEQ ID NO: 4473 - DNA, 74 bp, Homo sapiens
ctgagtgtcaggtgtgaggtagtagaagaaaggtagtgttgttgacagcttgtgagtacttaactaattcttgt

SEQ ID NO: 4474 - DNA, 76 bp, Homo sapiens
tgtgaggtagtagaagaaaggtagtgttgttgacagcttgtgagtacttaactaattcttgttgcattcactataa

SEQ ID NO: 4475 - DNA, 75 bp, Homo sapiens
gtagaagaaaggtagtgttgttgacagcttgtgagtacttaactaattcttgttgcattcactataatatggtag

SEQ ID NO: 4476 - DNA, 76 bp, Homo sapiens
gaaaggtagtgttgttgacagcttgtgagtacttaactaattcttgttgcattcactataatatggtagttgtgta

SEQ ID NO: 4477 - DNA, 79 bp, Homo sapiens
ttgttgacagcttgtgagtacttaactaattcttgttgcattcactataatatggtagttgtgtatacatttataggca

SEQ ID NO: 4478 - DNA, 77 bp, Homo sapiens
gcttgtgagtacttaactaattcttgttgcattcactataatatggtagttgtgtatacatttataggcaattagga

SEQ ID NO: 4479 - DNA, 75 bp, Homo sapiens
aactaattcttgttgcattcactataatatggtagttgtgtatacatttataggcaattaggaatagggaacaga

SEQ ID NO: 4480 - DNA, 80 bp, Homo sapiens
tcttgttgcattcactataatatggtagttgtgtatacatttataggcaattaggaatagggaacagaatcagcagatac

SEQ ID NO: 4481 - DNA, 75 bp, Homo sapiens
ctataatatggtagttgtgtatacatttataggcaattaggaatagggaacagaatcagcagatactaacggagt

SEQ ID NO: 4482 - DNA, 76 bp, Homo sapiens
atatggtagttgtgtatacatttataggcaattaggaatagggaacagaatcagcagatactaacggagttagaga

SEQ ID NO: 4483 - DNA, 78 bp, Homo sapiens
atacatttataggcaattaggaatagggaacagaatcagcagatactaacggagttagagatgtttgctgaagtcatg

SEQ ID NO: 4484 - DNA, 77 bp, Homo sapiens
tttataggcaattaggaatagggaacagaatcagcagatactaacggagttagagatgtttgctgaagtcatggaaa

SEQ ID NO: 4485 - DNA, 77 bp, Homo sapiens
gaatagggaacagaatcagcagatactaacggagttagagatgtttgctgaagtcatggaaagccatcattactttt

SEQ ID NO: 4486 - DNA, 76 bp, Homo sapiens
gggaacagaatcagcagatactaacggagttagagatgtttgctgaagtcatggaaagccatcattacttttttct

SEQ ID NO: 4487 - DNA, 74 bp, Homo sapiens
agatactaacggagttagagatgtttgctgaagtcatggaaagccatcattacttttttcttccttcctcataa

SEQ ID NO: 4488 - DNA, 75 bp, Homo sapiens
tagagatgtttgctgaagtcatggaaagccatcattacttttttcttccttcctcataaggccttagtgggtgtg

SEQ ID NO: 4489 - DNA, 70 bp, Homo sapiens
aagtcatggaaagccatcattacttttttcttccttcctcataaggccttagtgggtgtggcgttcagtt

SEQ ID NO: 4490 - DNA, 70 bp, Homo sapiens
aaagccatcattacttttttcttccttcctcataaggccttagtgggtgtggcgttcagtttcagtaaga

SEQ ID NO: 4491 - DNA, 72 bp, Homo sapiens
ataaggccttagtgggtgtggcgttcagtttcagtaagaactctgtagcaagctaatagctccttttcaaaa

SEQ ID NO: 4492 - DNA, 75 bp, Homo sapiens
tagtgggtgtggcgttcagtttcagtaagaactctgtagcaagctaatagctccttttcaaaaaggatgcactta

SEQ ID NO: 4493 - DNA, 77 bp, Homo sapiens
gcgttcagtttcagtaagaactctgtagcaagctaatagctccttttcaaaaaggatgcacttaatagccatgtcat

SEQ ID NO: 4494 - DNA, 75 bp, Homo sapiens
agtttcagtaagaactctgtagcaagctaatagctccttttcaaaaaggatgcacttaatagccatgtcattggg

SEQ ID NO: 4495 - DNA, 77 bp, Homo sapiens
aactctgtagcaagctaatagctccttttcaaaaaggatgcacttaatagccatgtcattggggcatcaagtccaaa

SEQ ID NO: 4496 - DNA, 76 bp, Homo sapiens
aagctaatagctccttttcaaaaaggatgcacttaatagccatgtcattggggcatcaagtccaaatctccagtgg

SEQ ID NO: 4497 - DNA, 77 bp, Homo sapiens
atagctccttttcaaaaaggatgcacttaatagccatgtcattggggcatcaagtccaaatctccagtgggtgcctg

SEQ ID NO: 4498 - DNA, 76 bp, Homo sapiens
aaaaaggatgcacttaatagccatgtcattggggcatcaagtccaaatctccagtgggtgcctgtgggtggaggct

SEQ ID NO: 4499 - DNA, 76 bp, Homo sapiens
atgtcattggggcatcaagtccaaatctccagtgggtgcctgtgggtggaggcttttttgccagaggattcagttg

SEQ ID NO: 4500 - DNA, 77 bp, Homo sapiens
ggcatcaagtccaaatctccagtgggtgcctgtgggtggaggcttttttgccagaggattcagttggcaaaatcata

SEQ ID NO: 4501 - DNA, 73 bp, Homo sapiens
aagtccaaatctccagtgggtgcctgtgggtggaggcttttttgccagaggattcagttggcaaaatcataat

SEQ ID NO: 4502 - DNA, 77 bp, Homo sapiens
tccagtgggtgcctgtgggtggaggcttttttgccagaggattcagttggcaaaatcataattcatagaaacatgta

SEQ ID NO: 4503 - DNA, 77 bp, Homo sapiens
tgtgggtggaggcttttttgccagaggattcagttggcaaaatcataattcatagaaacatgtagcttaaaagcata

SEQ ID NO: 4504 - DNA, 77 bp, Homo sapiens
gtggaggcttttttgccagaggattcagttggcaaaatcataattcatagaaacatgtagcttaaaagcataatgag

SEQ ID NO: 4505 - DNA, 77 bp, Homo sapiens
ttttgccagaggattcagttggcaaaatcataattcatagaaacatgtagcttaaaagcataatgaggcctgtgggg

SEQ ID NO: 4506 - DNA, 75 bp, Homo sapiens
ttcagttggcaaaatcataattcatagaaacatgtagcttaaaagcataatgaggcctgtggggttccaaaggta

SEQ ID NO: 4507 - DNA, 75 bp, Homo sapiens
aaatcataattcatagaaacatgtagcttaaaagcataatgaggcctgtggggttccaaaggtagacaatgtgct

SEQ ID NO: 4508 - DNA, 74 bp, Homo sapiens
aaacatgtagcttaaaagcataatgaggcctgtggggttccaaaggtagacaatgtgcttcagcttcctaccta

SEQ ID NO: 4509 - DNA, 75 bp, Homo sapiens
ttaaaagcataatgaggcctgtggggttccaaaggtagacaatgtgcttcagcttcctacctagcttccaacaca

SEQ ID NO: 4510 - DNA, 78 bp, Homo sapiens
aatgtgcttcagcttcctacctagcttccaacacagtgtgtgggttttgggctactctcataggatgcatatttacag

SEQ ID NO: 4511 - DNA, 76 bp, Homo sapiens
cttccaacacagtgtgtgggttttgggctactctcataggatgcatatttacaggatagctgacatttaaaggaaa

SEQ ID NO: 4512 - DNA, 77 bp, Homo sapiens
ttttgggctactctcataggatgcatatttacaggatagctgacatttaaaggaaaagcagaacgttgaagtgagtg

SEQ ID NO: 4513 - DNA, 80 bp, Homo sapiens
tactctcataggatgcatatttacaggatagctgacatttaaaggaaaagcagaacgttgaagtgagtgtcatagagccc

SEQ ID NO: 4514 - DNA, 76 bp, Homo sapiens
atgcatatttacaggatagctgacatttaaaggaaaagcagaacgttgaagtgagtgtcatagagcccctgttatt

SEQ ID NO: 4515 - DNA, 74 bp, Homo sapiens
tatttacaggatagctgacatttaaaggaaaagcagaacgttgaagtgagtgtcatagagcccctgttatttaa

SEQ ID NO: 4516 - DNA, 72 bp, Homo sapiens
tgacatttaaaggaaaagcagaacgttgaagtgagtgtcatagagcccctgttatttaaagagttcagtaag

SEQ ID NO: 4517 - DNA, 71 bp, Homo sapiens
aaaggaaaagcagaacgttgaagtgagtgtcatagagcccctgttatttaaagagttcagtaaggtgttca

SEQ ID NO: 4518 - DNA, 72 bp, Homo sapiens
aagcagaacgttgaagtgagtgtcatagagcccctgttatttaaagagttcagtaaggtgttcagcctgttt

SEQ ID NO: 4519 - DNA, 73 bp, Homo sapiens
ttgaagtgagtgtcatagagcccctgttatttaaagagttcagtaaggtgttcagcctgtttttcgatggtgg

SEQ ID NO: 4520 - DNA, 72 bp, Homo sapiens
atagagcccctgttatttaaagagttcagtaaggtgttcagcctgtttttcgatggtgggattctgaagaga

SEQ ID NO: 4521 - DNA, 71 bp, Homo sapiens
gttatttaaagagttcagtaaggtgttcagcctgtttttcgatggtgggattctgaagagaccccaccatc

SEQ ID NO: 4522 - DNA, 72 bp, Homo sapiens
ttaaagagttcagtaaggtgttcagcctgtttttcgatggtgggattctgaagagaccccaccatccttgac

SEQ ID NO: 4523 - DNA, 74 bp, Homo sapiens
agtaaggtgttcagcctgtttttcgatggtgggattctgaagagaccccaccatccttgactgccagaggaatc

SEQ ID NO: 4524 - DNA, 76 bp, Homo sapiens
cctgtttttcgatggtgggattctgaagagaccccaccatccttgactgccagaggaatctggcgttgtgaatctg

SEQ ID NO: 4525 - DNA, 78 bp, Homo sapiens
tttcgatggtgggattctgaagagaccccaccatccttgactgccagaggaatctggcgttgtgaatctgttcctata

SEQ ID NO: 4526 - DNA, 74 bp, Homo sapiens
aagagaccccaccatccttgactgccagaggaatctggcgttgtgaatctgttcctatactttccagaaacttg

SEQ ID NO: 4527 - DNA, 77 bp, Homo sapiens
atccttgactgccagaggaatctggcgttgtgaatctgttcctatactttccagaaacttgttgagcaggtctttga

SEQ ID NO: 4528 - DNA, 73 bp, Homo sapiens
ccagaggaatctggcgttgtgaatctgttcctatactttccagaaacttgttgagcaggtctttgaaatttat

SEQ ID NO: 4529 - DNA, 72 bp, Homo sapiens
aatctggcgttgtgaatctgttcctatactttccagaaacttgttgagcaggtctttgaaatttattggagt

SEQ ID NO: 4530 - DNA, 74 bp, Homo sapiens
ttcctatactttccagaaacttgttgagcaggtctttgaaatttattggagtttccaccaactgtgctgacaga

SEQ ID NO: 4531 - DNA, 75 bp, Homo sapiens
agaaacttgttgagcaggtctttgaaatttattggagtttccaccaactgtgctgacagaggagataacattaca

SEQ ID NO: 4532 - DNA, 79 bp, Homo sapiens
ttgttgagcaggtctttgaaatttattggagtttccaccaactgtgctgacagaggagataacattacagagctattga

SEQ ID NO: 4533 - DNA, 79 bp, Homo sapiens
tttgaaatttattggagtttccaccaactgtgctgacagaggagataacattacagagctattgagactgaggcttcta

SEQ ID NO: 4534 - DNA, 78 bp, Homo sapiens
atttattggagtttccaccaactgtgctgacagaggagataacattacagagctattgagactgaggcttctaattta

SEQ ID NO: 4535 - DNA, 82 bp, Homo sapiens
tgtgctgacagaggagataacattacagagctattgagactgaggcttctaatttaccagctaatagtgagagctttgaaaa

SEQ ID NO: 4536 - DNA, 80 bp, Homo sapiens
acagaggagataacattacagagctattgagactgaggcttctaatttaccagctaatagtgagagctttgaaaatcaca

SEQ ID NO: 4537 - DNA, 75 bp, Homo sapiens
aggcttctaatttaccagctaatagtgagagctttgaaaatcacagggtagaggtactgagtcctgacataccta

SEQ ID NO: 4538 - DNA, 76 bp, Homo sapiens
tctaatttaccagctaatagtgagagctttgaaaatcacagggtagaggtactgagtcctgacatacctatttgtg

SEQ ID NO: 4539 - DNA, 77 bp, Homo sapiens
agctaatagtgagagctttgaaaatcacagggtagaggtactgagtcctgacatacctatttgtggcaagtggcaag

SEQ ID NO: 4540 - DNA, 72 bp, Homo sapiens
aaaatcacagggtagaggtactgagtcctgacatacctatttgtggcaagtggcaagggagtttaggtcacc

SEQ ID NO: 4541 - DNA, 74 bp, Homo sapiens
agtcctgacatacctatttgtggcaagtggcaagggagtttaggtcacccctctgggaaagcacttcagacata

SEQ ID NO: 4542 - DNA, 73 bp, Homo sapiens
acatacctatttgtggcaagtggcaagggagtttaggtcacccctctgggaaagcacttcagacatattggag

SEQ ID NO: 4543 - DNA, 74 bp, Homo sapiens
tttgtggcaagtggcaagggagtttaggtcacccctctgggaaagcacttcagacatattggagggctttgaca

SEQ ID NO: 4544 - DNA, 72 bp, Homo sapiens
aagggagtttaggtcacccctctgggaaagcacttcagacatattggagggctttgacacatggatgtaaac

SEQ ID NO: 4545 - DNA, 76 bp, Homo sapiens
agtttaggtcacccctctgggaaagcacttcagacatattggagggctttgacacatggatgtaaactgatcttga

SEQ ID NO: 4546 - DNA, 80 bp, Homo sapiens
tctgggaaagcacttcagacatattggagggctttgacacatggatgtaaactgatcttgatccttaggtatgagtgtta

SEQ ID NO: 4547 - DNA, 80 bp, Homo sapiens
aagcacttcagacatattggagggctttgacacatggatgtaaactgatcttgatccttaggtatgagtgttatggcaaa

SEQ ID NO: 4548 - DNA, 79 bp, Homo sapiens
atattggagggctttgacacatggatgtaaactgatcttgatccttaggtatgagtgttatggcaaagaggcattagaa

SEQ ID NO: 4549 - DNA, 79 bp, Homo sapiens
agggctttgacacatggatgtaaactgatcttgatccttaggtatgagtgttatggcaaagaggcattagaaatgtcca

SEQ ID NO: 4550 - DNA, 77 bp, Homo sapiens
tatgagtgttatggcaaagaggcattagaaatgtccagaacaacctaccaagtaccatcagtgtgtagtggatttag

SEQ ID NO: 4551 - DNA, 76 bp, Homo sapiens
ttatggcaaagaggcattagaaatgtccagaacaacctaccaagtaccatcagtgtgtagtggatttagtctgtaa

SEQ ID NO: 4552 - DNA, 75 bp, Homo sapiens
aagaggcattagaaatgtccagaacaacctaccaagtaccatcagtgtgtagtggatttagtctgtaacagctgg

SEQ ID NO: 4553 - DNA, 77 bp, Homo sapiens
atgtccagaacaacctaccaagtaccatcagtgtgtagtggatttagtctgtaacagctggggctataagagcaata

SEQ ID NO: 4554 - DNA, 74 bp, Homo sapiens
aacaacctaccaagtaccatcagtgtgtagtggatttagtctgtaacagctggggctataagagcaataactaa

SEQ ID NO: 4555 - DNA, 77 bp, Homo sapiens
tgtgtagtggatttagtctgtaacagctggggctataagagcaataactaaactcacttggcgctaattcactgtta

SEQ ID NO: 4556 - DNA, 78 bp, Homo sapiens
tctgtaacagctggggctataagagcaataactaaactcacttggcgctaattcactgttagcttcctgctcttacta

SEQ ID NO: 4557 - DNA, 73 bp, Homo sapiens
gggctataagagcaataactaaactcacttggcgctaattcactgttagcttcctgctcttactagccttttt

SEQ ID NO: 4558 - DNA, 75 bp, Homo sapiens
taagagcaataactaaactcacttggcgctaattcactgttagcttcctgctcttactagccttttttcactggc

SEQ ID NO: 4559 - DNA, 73 bp, Homo sapiens
aactaaactcacttggcgctaattcactgttagcttcctgctcttactagccttttttcactggccttgcagg

SEQ ID NO: 4560 - DNA, 76 bp, Homo sapiens
gcgctaattcactgttagcttcctgctcttactagccttttttcactggccttgcagggcttttgtgttgagatat

SEQ ID NO: 4561 - DNA, 77 bp, Homo sapiens
aattcactgttagcttcctgctcttactagccttttttcactggccttgcagggcttttgtgttgagatattgcatc

SEQ ID NO: 4562 - DNA, 74 bp, Homo sapiens
tcttactagccttttttcactggccttgcagggcttttgtgttgagatattgcatctcttcctacccctggtac

SEQ ID NO: 4563 - DNA, 74 bp, Homo sapiens
tttcactggccttgcagggcttttgtgttgagatattgcatctcttcctacccctggtacctttgagtccttta

SEQ ID NO: 4564 - DNA, 75 bp, Homo sapiens
cttgcagggcttttgtgttgagatattgcatctcttcctacccctggtacctttgagtcctttatcgaagctgtg

SEQ ID NO: 4565 - DNA, 73 bp, Homo sapiens
ttttgtgttgagatattgcatctcttcctacccctggtacctttgagtcctttatcgaagctgtggcttccct

SEQ ID NO: 4566 - DNA, 73 bp, Homo sapiens
ttgagatattgcatctcttcctacccctggtacctttgagtcctttatcgaagctgtggcttccctttgtcct

SEQ ID NO: 4567 - DNA, 70 bp, Homo sapiens
atctcttcctacccctggtacctttgagtcctttatcgaagctgtggcttccctttgtccttctggaatc

SEQ ID NO: 4568 - DNA, 71 bp, Homo sapiens
tacccctggtacctttgagtcctttatcgaagctgtggcttccctttgtccttctggaatcctatgctgtt

SEQ ID NO: 4569 - DNA, 74 bp, Homo sapiens
tacctttgagtcctttatcgaagctgtggcttccctttgtccttctggaatcctatgctgtttctgttggacca

SEQ ID NO: 4570 - DNA, 73 bp, Homo sapiens
ctgtggcttccctttgtccttctggaatcctatgctgtttctgttggaccacccaggaaagagacatggtttg

SEQ ID NO: 4571 - DNA, 80 bp, Homo sapiens
tctggaatcctatgctgtttctgttggaccacccaggaaagagacatggtttggagagtgatttacatgtctcattagca

SEQ ID NO: 4572 - DNA, 77 bp, Homo sapiens
aatcctatgctgtttctgttggaccacccaggaaagagacatggtttggagagtgatttacatgtctcattagcatt

SEQ ID NO: 4573 - DNA, 79 bp, Homo sapiens
ttctgttggaccacccaggaaagagacatggtttggagagtgatttacatgtctcattagcatttctacgtgctgctct

SEQ ID NO: 4574 - DNA, 78 bp, Homo sapiens
aaagagacatggtttggagagtgatttacatgtctcattagcatttctacgtgctgctcttcttggtggggagaatac

SEQ ID NO: 4575 - DNA, 78 bp, Homo sapiens
tttggagagtgatttacatgtctcattagcatttctacgtgctgctcttcttggtggggagaataccttttgcactta

SEQ ID NO: 4576 - DNA, 77 bp, Homo sapiens
atttacatgtctcattagcatttctacgtgctgctcttcttggtggggagaataccttttgcacttatggatgggta

SEQ ID NO: 4577 - DNA, 77 bp, Homo sapiens
tgtctcattagcatttctacgtgctgctcttcttggtggggagaataccttttgcacttatggatgggtaaagataa

SEQ ID NO: 4578 - DNA, 74 bp, Homo sapiens
acgtgctgctcttcttggtggggagaataccttttgcacttatggatgggtaaagataagcatataatacaggg

SEQ ID NO: 4579 - DNA, 72 bp, Homo sapiens
ttggtggggagaataccttttgcacttatggatgggtaaagataagcatataatacaggggatggcaaactt

SEQ ID NO: 4580 - DNA, 71 bp, Homo sapiens
aataccttttgcacttatggatgggtaaagataagcatataatacaggggatggcaaacttttcctctaaa

SEQ ID NO: 4581 - DNA, 74 bp, Homo sapiens
tttgcacttatggatgggtaaagataagcatataatacaggggatggcaaacttttcctctaaaggaccagata

SEQ ID NO: 4582 - DNA, 73 bp, Homo sapiens
tatggatgggtaaagataagcatataatacaggggatggcaaacttttcctctaaaggaccagatagtaaata

SEQ ID NO: 4583 - DNA, 70 bp, Homo sapiens
agatagtaaatattttgggctttgtggaccgcatttagtctctatcatatattcttctttttggtggggg

SEQ ID NO: 4584 - DNA, 69 bp, Homo sapiens
tggggggaggggggcgggggcactaaggaatattttaaagatgcaacattactcttagcttaggtatca

SEQ ID NO: 4585 - DNA, 72 bp, Homo sapiens
ggggcgggggcactaaggaatattttaaagatgcaacattactcttagcttaggtatcataatttgctgact

SEQ ID NO: 4586 - DNA, 77 bp, Homo sapiens
gggcactaaggaatattttaaagatgcaacattactcttagcttaggtatcataatttgctgacttctgatataaca

SEQ ID NO: 4587 - DNA, 78 bp, Homo sapiens
atattttaaagatgcaacattactcttagcttaggtatcataatttgctgacttctgatataacatatcatttcctct

SEQ ID NO: 4588 - DNA, 81 bp, Homo sapiens
agatgcaacattactcttagcttaggtatcataatttgctgacttctgatataacatatcatttcctcttataccttcaga

SEQ ID NO: 4589 - DNA, 80 bp, Homo sapiens
cattactcttagcttaggtatcataatttgctgacttctgatataacatatcatttcctcttataccttcagatgtccag

SEQ ID NO: 4590 - DNA, 82 bp, Homo sapiens
ttaggtatcataatttgctgacttctgatataacatatcatttcctcttataccttcagatgtccaggcagtagtgaacata

SEQ ID NO: 4591 - DNA, 78 bp, Homo sapiens
ctgacttctgatataacatatcatttcctcttataccttcagatgtccaggcagtagtgaacatacagtttaattccc

SEQ ID NO: 4592 - DNA, 75 bp, Homo sapiens
atataacatatcatttcctcttataccttcagatgtccaggcagtagtgaacatacagtttaattccccaaagac

SEQ ID NO: 4593 - DNA, 72 bp, Homo sapiens
atcatttcctcttataccttcagatgtccaggcagtagtgaacatacagtttaattccccaaagaccccacc

SEQ ID NO: 4594 - DNA, 73 bp, Homo sapiens
taccttcagatgtccaggcagtagtgaacatacagtttaattccccaaagaccccacctacaaagtcatgtta

SEQ ID NO: 4595 - DNA, 72 bp, Homo sapiens
tgtccaggcagtagtgaacatacagtttaattccccaaagaccccacctacaaagtcatgttagcttcctta

SEQ ID NO: 4596 - DNA, 69 bp, Homo sapiens
ggcagtagtgaacatacagtttaattccccaaagaccccacctacaaagtcatgttagcttccttaccc

SEQ ID NO: 4597 - DNA, 67 bp, Homo sapiens
aacatacagtttaattccccaaagaccccacctacaaagtcatgttagcttccttaccccctgagaa

SEQ ID NO: 4598 - DNA, 70 bp, Homo sapiens
accccacctacaaagtcatgttagcttccttaccccctgagaatcctgcccactgaatcctgggatcttt

SEQ ID NO: 4599 - DNA, 72 bp, Homo sapiens
cctacaaagtcatgttagcttccttaccccctgagaatcctgcccactgaatcctgggatcttttcctttca

SEQ ID NO: 4600 - DNA, 71 bp, Homo sapiens
atgttagcttccttaccccctgagaatcctgcccactgaatcctgggatcttttcctttcatgggtccagg

SEQ ID NO: 4601 - DNA, 74 bp, Homo sapiens
ttaccccctgagaatcctgcccactgaatcctgggatcttttcctttcatgggtccaggtgggatagtgatctg

SEQ ID NO: 4602 - DNA, 76 bp, Homo sapiens
aatcctgcccactgaatcctgggatcttttcctttcatgggtccaggtgggatagtgatctgggtgcctgtatcca

SEQ ID NO: 4603 - DNA, 75 bp, Homo sapiens
actgaatcctgggatcttttcctttcatgggtccaggtgggatagtgatctgggtgcctgtatccaacagagtct

SEQ ID NO: 4604 - DNA, 73 bp, Homo sapiens
tgggatcttttcctttcatgggtccaggtgggatagtgatctgggtgcctgtatccaacagagtcttaaaaac

SEQ ID NO: 4605 - DNA, 72 bp, Homo sapiens
ttttcctttcatgggtccaggtgggatagtgatctgggtgcctgtatccaacagagtcttaaaaacttgtgt

SEQ ID NO: 4606 - DNA, 76 bp, Homo sapiens
atgggtccaggtgggatagtgatctgggtgcctgtatccaacagagtcttaaaaacttgtgttttctggctgagca

SEQ ID NO: 4607 - DNA, 76 bp, Homo sapiens
gtgggatagtgatctgggtgcctgtatccaacagagtcttaaaaacttgtgttttctggctgagcacggtggctta

SEQ ID NO: 4608 - DNA, 75 bp, Homo sapiens
catcactatttaaaaaaataaatcgtgtcttttcctctcctcaaattccatagcatacttggatgactacatgtg

SEQ ID NO: 4609 - DNA, 75 bp, Homo sapiens
ttaaaaaaataaatcgtgtcttttcctctcctcaaattccatagcatacttggatgactacatgtggccattgag

SEQ ID NO: 4610 - DNA, 77 bp, Homo sapiens
aaataaatcgtgtcttttcctctcctcaaattccatagcatacttggatgactacatgtggccattgaggcctcttg

SEQ ID NO: 4611 - DNA, 80 bp, Homo sapiens
ttttcctctcctcaaattccatagcatacttggatgactacatgtggccattgaggcctcttggggatagggagtgcaca

SEQ ID NO: 4612 - DNA, 82 bp, Homo sapiens
tcaaattccatagcatacttggatgactacatgtggccattgaggcctcttggggatagggagtgcacatccccatctctaa

SEQ ID NO: 4613 - DNA, 79 bp, Homo sapiens
atagcatacttggatgactacatgtggccattgaggcctcttggggatagggagtgcacatccccatctctaattattt

SEQ ID NO: 4614 - DNA, 77 bp, Homo sapiens
tacttggatgactacatgtggccattgaggcctcttggggatagggagtgcacatccccatctctaattatttttct

SEQ ID NO: 4615 - DNA, 74 bp, Homo sapiens
actacatgtggccattgaggcctcttggggatagggagtgcacatccccatctctaattatttttcttcttaaa

SEQ ID NO: 4616 - DNA, 74 bp, Homo sapiens
attgaggcctcttggggatagggagtgcacatccccatctctaattatttttcttcttaaagcactgaggtcac

SEQ ID NO: 4617 - DNA, 73 bp, Homo sapiens
ttggggatagggagtgcacatccccatctctaattatttttcttcttaaagcactgaggtcacctaattgtta

SEQ ID NO: 4618 - DNA, 73 bp, Homo sapiens
atagggagtgcacatccccatctctaattatttttcttcttaaagcactgaggtcacctaattgttacagtgg

SEQ ID NO: 4619 - DNA, 71 bp, Homo sapiens
tccccatctctaattatttttcttcttaaagcactgaggtcacctaattgttacagtggggtagaaatgaa

SEQ ID NO: 4620 - DNA, 73 bp, Homo sapiens
aattatttttcttcttaaagcactgaggtcacctaattgttacagtggggtagaaatgaagctgactgccaga

SEQ ID NO: 4621 - DNA, 74 bp, Homo sapiens
aggtcacctaattgttacagtggggtagaaatgaagctgactgccagattggtgaggaagtcctctccacctaa

SEQ ID NO: 4622 - DNA, 76 bp, Homo sapiens
ttgttacagtggggtagaaatgaagctgactgccagattggtgaggaagtcctctccacctaaccagagtaggcta

SEQ ID NO: 4623 - DNA, 83 bp, Homo sapiens
tagaaatgaagctgactgccagattggtgaggaagtcctctccacctaaccagagtaggctagctgccagcacagcatccttg

SEQ ID NO: 4624 - DNA, 84 bp, Homo sapiens
atgaagctgactgccagattggtgaggaagtcctctccacctaaccagagtaggctagctgccagcacagcatccttgggcagc

SEQ ID NO: 4625 - DNA, 79 bp, Homo sapiens
agattggtgaggaagtcctctccacctaaccagagtaggctagctgccagcacagcatccttgggcagctctgtttaaa

SEQ ID NO: 4626 - DNA, 77 bp, Homo sapiens
aggaagtcctctccacctaaccagagtaggctagctgccagcacagcatccttgggcagctctgtttaaacatagtt

SEQ ID NO: 4627 - DNA, 80 bp, Homo sapiens
ctctccacctaaccagagtaggctagctgccagcacagcatccttgggcagctctgtttaaacatagtttctggtgctta

SEQ ID NO: 4628 - DNA, 82 bp, Homo sapiens
taaccagagtaggctagctgccagcacagcatccttgggcagctctgtttaaacatagtttctggtgcttagcctacagcca

SEQ ID NO: 4629 - DNA, 78 bp, Homo sapiens
cacagcatccttgggcagctctgtttaaacatagtttctggtgcttagcctacagccacctcttcagtttctcctcat

SEQ ID NO: 4630 - DNA, 78 bp, Homo sapiens
ttgggcagctctgtttaaacatagtttctggtgcttagcctacagccacctcttcagtttctcctcattattcaggca

SEQ ID NO: 4631 - DNA, 75 bp, Homo sapiens
tctgtttaaacatagtttctggtgcttagcctacagccacctcttcagtttctcctcattattcaggcaataaaa

SEQ ID NO: 4632 - DNA, 76 bp, Homo sapiens
taaacatagtttctggtgcttagcctacagccacctcttcagtttctcctcattattcaggcaataaaatgaagac

SEQ ID NO: 4633 - DNA, 77 bp, Homo sapiens
ttctggtgcttagcctacagccacctcttcagtttctcctcattattcaggcaataaaatgaagacccattaactgc

SEQ ID NO: 4634 - DNA, 75 bp, Homo sapiens
tacagccacctcttcagtttctcctcattattcaggcaataaaatgaagacccattaactgcctagttgaccgta

SEQ ID NO: 4635 - DNA, 72 bp, Homo sapiens
tcttcagtttctcctcattattcaggcaataaaatgaagacccattaactgcctagttgaccgtacaatttt

SEQ ID NO: 4636 - DNA, 71 bp, Homo sapiens
agtttctcctcattattcaggcaataaaatgaagacccattaactgcctagttgaccgtacaatttttcat

SEQ ID NO: 4637 - DNA, 69 bp, Homo sapiens
ttcaggcaataaaatgaagacccattaactgcctagttgaccgtacaatttttcatttttcgactttcc

SEQ ID NO: 4638 - DNA, 72 bp, Homo sapiens
taactgcctagttgaccgtacaatttttcatttttcgactttcctcagatcccattaattggcctgtgaggc

SEQ ID NO: 4639 - DNA, 67 bp, Homo sapiens
accgtacaatttttcatttttcgactttcctcagatcccattaattggcctgtgaggcctttaattt

SEQ ID NO: 4640 - DNA, 71 bp, Homo sapiens
tttttcgactttcctcagatcccattaattggcctgtgaggcctttaattttcctcttctaaatagccata

SEQ ID NO: 4641 - DNA, 74 bp, Homo sapiens
tcagatcccattaattggcctgtgaggcctttaattttcctcttctaaatagccatacccctaacagcattata

SEQ ID NO: 4642 - DNA, 73 bp, Homo sapiens
attaattggcctgtgaggcctttaattttcctcttctaaatagccatacccctaacagcattatattctctca

SEQ ID NO: 4643 - DNA, 76 bp, Homo sapiens
tgtgaggcctttaattttcctcttctaaatagccatacccctaacagcattatattctctcatcaccaaactgtca

SEQ ID NO: 4644 - DNA, 76 bp, Homo sapiens
taattttcctcttctaaatagccatacccctaacagcattatattctctcatcaccaaactgtcaagaactatgaa

SEQ ID NO: 4645 - DNA, 77 bp, Homo sapiens
tcttctaaatagccatacccctaacagcattatattctctcatcaccaaactgtcaagaactatgaaagaggtggaa

SEQ ID NO: 4646 - DNA, 74 bp, Homo sapiens
ccctaacagcattatattctctcatcaccaaactgtcaagaactatgaaagaggtggaatagaaaaaacaaaca

SEQ ID NO: 4647 - DNA, 74 bp, Homo sapiens
ttatattctctcatcaccaaactgtcaagaactatgaaagaggtggaatagaaaaaacaaacagtttctcctgc

SEQ ID NO: 4648 - DNA, 74 bp, Homo sapiens
atcaccaaactgtcaagaactatgaaagaggtggaatagaaaaaacaaacagtttctcctgctgtaatctcaca

SEQ ID NO: 4649 - DNA, 74 bp, Homo sapiens
aactgtcaagaactatgaaagaggtggaatagaaaaaacaaacagtttctcctgctgtaatctcacaatacaga

SEQ ID NO: 4650 - DNA, 75 bp, Homo sapiens
agaactatgaaagaggtggaatagaaaaaacaaacagtttctcctgctgtaatctcacaatacagaatgcttctg

SEQ ID NO: 4651 - DNA, 77 bp, Homo sapiens
gtggaatagaaaaaacaaacagtttctcctgctgtaatctcacaatacagaatgcttctgtgacccataaatgtatg

SEQ ID NO: 4652 - DNA, 75 bp, Homo sapiens
aaaaacaaacagtttctcctgctgtaatctcacaatacagaatgcttctgtgacccataaatgtatggggatttc

SEQ ID NO: 4653 - DNA, 80 bp, Homo sapiens
tgctgtaatctcacaatacagaatgcttctgtgacccataaatgtatggggatttctccccaccaagcaagctgtcagtt

SEQ ID NO: 4654 - DNA, 79 bp, Homo sapiens
aatctcacaatacagaatgcttctgtgacccataaatgtatggggatttctccccaccaagcaagctgtcagttttgca

SEQ ID NO: 4655 - DNA, 81 bp, Homo sapiens
aatgcttctgtgacccataaatgtatggggatttctccccaccaagcaagctgtcagttttgcagcagacatcatctgcgt

SEQ ID NO: 4656 - DNA, 81 bp, Homo sapiens
tgacccataaatgtatggggatttctccccaccaagcaagctgtcagttttgcagcagacatcatctgcgtttggacacta

SEQ ID NO: 4657 - DNA, 80 bp, Homo sapiens
ataaatgtatggggatttctccccaccaagcaagctgtcagttttgcagcagacatcatctgcgtttggacactatccac

SEQ ID NO: 4658 - DNA, 85 bp, Homo sapiens
accaagcaagctgtcagttttgcagcagacatcatctgcgtttggacactatccacctggagatggcatcagattacacaggttg

SEQ ID NO: 4659 - DNA, 82 bp, Homo sapiens
agttttgcagcagacatcatctgcgtttggacactatccacctggagatggcatcagattacacaggttgggaactcagtcc

SEQ ID NO: 4660 - DNA, 82 bp, Homo sapiens
agacatcatctgcgtttggacactatccacctggagatggcatcagattacacaggttgggaactcagtcccacaggactga

SEQ ID NO: 4661 - DNA, 78 bp, Homo sapiens
tttggacactatccacctggagatggcatcagattacacaggttgggaactcagtcccacaggactgagcctcacttt

SEQ ID NO: 4662 - DNA, 83 bp, Homo sapiens
tatccacctggagatggcatcagattacacaggttgggaactcagtcccacaggactgagcctcacttttgatgctgattcta

SEQ ID NO: 4663 - DNA, 81 bp, Homo sapiens
ctggagatggcatcagattacacaggttgggaactcagtcccacaggactgagcctcacttttgatgctgattctaagccc

SEQ ID NO: 4664 - DNA, 78 bp, Homo sapiens
atcagattacacaggttgggaactcagtcccacaggactgagcctcacttttgatgctgattctaagccccaggtgct

SEQ ID NO: 4665 - DNA, 77 bp, Homo sapiens
acaggttgggaactcagtcccacaggactgagcctcacttttgatgctgattctaagccccaggtgcttctgttcaa

SEQ ID NO: 4666 - DNA, 79 bp, Homo sapiens
aactcagtcccacaggactgagcctcacttttgatgctgattctaagccccaggtgcttctgttcaactgactgtgact

SEQ ID NO: 4667 - DNA, 77 bp, Homo sapiens
aggactgagcctcacttttgatgctgattctaagccccaggtgcttctgttcaactgactgtgacttggggttccca

SEQ ID NO: 4668 - DNA, 71 bp, Homo sapiens
taagccccaggtgcttctgttcaactgactgtgacttggggttcccacagccccctccttgggttggatta

SEQ ID NO: 4669 - DNA, 71 bp, Homo sapiens
aggtgcttctgttcaactgactgtgacttggggttcccacagccccctccttgggttggattagtttgcta

SEQ ID NO: 4670 - DNA, 74 bp, Homo sapiens
tctgttcaactgactgtgacttggggttcccacagccccctccttgggttggattagtttgctagagtggctca

SEQ ID NO: 4671 - DNA, 72 bp, Homo sapiens
actgtgacttggggttcccacagccccctccttgggttggattagtttgctagagtggctcacagaactgag

SEQ ID NO: 4672 - DNA, 70 bp, Homo sapiens
gttcccacagccccctccttgggttggattagtttgctagagtggctcacagaactgagggaaaccctta

SEQ ID NO: 4673 - DNA, 70 bp, Homo sapiens
ttgggttggattagtttgctagagtggctcacagaactgagggaaacccttacttatgtttattggttta

SEQ ID NO: 4674 - DNA, 72 bp, Homo sapiens
ttagtttgctagagtggctcacagaactgagggaaacccttacttatgtttattggtttattatgaaggata

SEQ ID NO: 4675 - DNA, 70 bp, Homo sapiens
agtggctcacagaactgagggaaacccttacttatgtttattggtttattatgaaggatattacgaagta

SEQ ID NO: 4676 - DNA, 73 bp, Homo sapiens
tcacagaactgagggaaacccttacttatgtttattggtttattatgaaggatattacgaagtatacagatga

SEQ ID NO: 4677 - DNA, 72 bp, Homo sapiens
gagggaaacccttacttatgtttattggtttattatgaaggatattacgaagtatacagatgaagagatgaa

SEQ ID NO: 4678 - DNA, 78 bp, Homo sapiens
cttatgtttattggtttattatgaaggatattacgaagtatacagatgaagagatgaatagtgtgaagtatgtcactg

SEQ ID NO: 4679 - DNA, 77 bp, Homo sapiens
ttattggtttattatgaaggatattacgaagtatacagatgaagagatgaatagtgtgaagtatgtcactgggtagg

SEQ ID NO: 4680 - DNA, 80 bp, Homo sapiens
ttattatgaaggatattacgaagtatacagatgaagagatgaatagtgtgaagtatgtcactgggtagggaggcagagct

SEQ ID NO: 4681 - DNA, 78 bp, Homo sapiens
tacagatgaagagatgaatagtgtgaagtatgtcactgggtagggaggcagagcttccccatcctcttgggcctttgt

SEQ ID NO: 4682 - DNA, 72 bp, Homo sapiens
aatagtgtgaagtatgtcactgggtagggaggcagagcttccccatcctcttgggcctttgttataccgagt

SEQ ID NO: 4683 - DNA, 73 bp, Homo sapiens
aagtatgtcactgggtagggaggcagagcttccccatcctcttgggcctttgttataccgagttcactggaca

SEQ ID NO: 4684 - DNA, 79 bp, Homo sapiens
tagggaggcagagcttccccatcctcttgggcctttgttataccgagttcactggacaggcatgactgaagcatggaca

SEQ ID NO: 4685 - DNA, 78 bp, Homo sapiens
agagcttccccatcctcttgggcctttgttataccgagttcactggacaggcatgactgaagcatggacacctgtgta

SEQ ID NO: 4686 - DNA, 79 bp, Homo sapiens
ccatcctcttgggcctttgttataccgagttcactggacaggcatgactgaagcatggacacctgtgtagaaatgtgat

SEQ ID NO: 4687 - DNA, 82 bp, Homo sapiens
agttcactggacaggcatgactgaagcatggacacctgtgtagaaatgtgattggacaaaggtatgatcgaacactaataga

SEQ ID NO: 4688 - DNA, 80 bp, Homo sapiens
catgactgaagcatggacacctgtgtagaaatgtgattggacaaaggtatgatcgaacactaatagactgagtagggaaa

SEQ ID NO: 4689 - DNA, 76 bp, Homo sapiens
ctgtgtagaaatgtgattggacaaaggtatgatcgaacactaatagactgagtagggaaacccaagcaggcctgta

SEQ ID NO: 4690 - DNA, 76 bp, Homo sapiens
aatgtgattggacaaaggtatgatcgaacactaatagactgagtagggaaacccaagcaggcctgtatgttcacac

SEQ ID NO: 4691 - DNA, 77 bp, Homo sapiens
ggtatgatcgaacactaatagactgagtagggaaacccaagcaggcctgtatgttcacacgcttcttggcctctctg

SEQ ID NO: 4692 - DNA, 78 bp, Homo sapiens
taatagactgagtagggaaacccaagcaggcctgtatgttcacacgcttcttggcctctctgtgcagcattattttct

SEQ ID NO: 4693 - DNA, 76 bp, Homo sapiens
agtagggaaacccaagcaggcctgtatgttcacacgcttcttggcctctctgtgcagcattattttcttctgggta

SEQ ID NO: 4694 - DNA, 76 bp, Homo sapiens
ggaaacccaagcaggcctgtatgttcacacgcttcttggcctctctgtgcagcattattttcttctgggtattggg

SEQ ID NO: 4695 - DNA, 77 bp, Homo sapiens
cctgtatgttcacacgcttcttggcctctctgtgcagcattattttcttctgggtattggggcagaaccccttctga

SEQ ID NO: 4696 - DNA, 76 bp, Homo sapiens
atgttcacacgcttcttggcctctctgtgcagcattattttcttctgggtattggggcagaaccccttctgaaatg

SEQ ID NO: 4697 - DNA, 73 bp, Homo sapiens
ttggcctctctgtgcagcattattttcttctgggtattggggcagaaccccttctgaaatgggggttttatga

SEQ ID NO: 4698 - DNA, 73 bp, Homo sapiens
tgtgcagcattattttcttctgggtattggggcagaaccccttctgaaatgggggttttatgacccacaatca

SEQ ID NO: 4699 - DNA, 69 bp, Homo sapiens
ttattttcttctgggtattggggcagaaccccttctgaaatgggggttttatgacccacaatcagacaa

SEQ ID NO: 4700 - DNA, 69 bp, Homo sapiens
tcttctgggtattggggcagaaccccttctgaaatgggggttttatgacccacaatcagacaaggtagg

SEQ ID NO: 4701 - DNA, 70 bp, Homo sapiens
ggcagaaccccttctgaaatgggggttttatgacccacaatcagacaaggtaggtcagagaatttcttta

SEQ ID NO: 4702 - DNA, 75 bp, Homo sapiens
cttctgaaatgggggttttatgacccacaatcagacaaggtaggtcagagaatttctttatgtccagctccatga

SEQ ID NO: 4703 - DNA, 74 bp, Homo sapiens
aatgggggttttatgacccacaatcagacaaggtaggtcagagaatttctttatgtccagctccatgatagaaa

SEQ ID NO: 4704 - DNA, 75 bp, Homo sapiens
tcagacaaggtaggtcagagaatttctttatgtccagctccatgatagaaaagtaggggaagtttagagcatatt

SEQ ID NO: 4705 - DNA, 71 bp, Homo sapiens
aatttctttatgtccagctccatgatagaaaagtaggggaagtttagagcatatttttagttttcatggcc

SEQ ID NO: 4706 - DNA, 73 bp, Homo sapiens
tttatgtccagctccatgatagaaaagtaggggaagtttagagcatatttttagttttcatggcctgtcttgg

SEQ ID NO: 4707 - DNA, 70 bp, Homo sapiens
tccatgatagaaaagtaggggaagtttagagcatatttttagttttcatggcctgtcttggggagaaaaa

SEQ ID NO: 4708 - DNA, 67 bp, Homo sapiens
tagaaaagtaggggaagtttagagcatatttttagttttcatggcctgtcttggggagaaaaaggag

SEQ ID NO: 4709 - DNA, 67 bp, Homo sapiens
aagtttagagcatatttttagttttcatggcctgtcttggggagaaaaaggagggcaggaaaggtcc

SEQ ID NO: 4710 - DNA, 68 bp, Homo sapiens
atatttttagttttcatggcctgtcttggggagaaaaaggagggcaggaaaggtccgaaagagagaga

SEQ ID NO: 4711 - DNA, 69 bp, Homo sapiens
tttagttttcatggcctgtcttggggagaaaaaggagggcaggaaaggtccgaaagagagagattctgt

SEQ ID NO: 4712 - DNA, 69 bp, Homo sapiens
ctgtcttggggagaaaaaggagggcaggaaaggtccgaaagagagagattctgttttctgaggcctaaa

SEQ ID NO: 4713 - DNA, 70 bp, Homo sapiens
aaaggagggcaggaaaggtccgaaagagagagattctgttttctgaggcctaaagcaccccattataaca

SEQ ID NO: 4714 - DNA, 70 bp, Homo sapiens
aaaggtccgaaagagagagattctgttttctgaggcctaaagcaccccattataacaaaggactgtcatt

SEQ ID NO: 4715 - DNA, 73 bp, Homo sapiens
gagagagattctgttttctgaggcctaaagcaccccattataacaaaggactgtcatttcacctttgttactc

SEQ ID NO: 4716 - DNA, 72 bp, Homo sapiens
ctgttttctgaggcctaaagcaccccattataacaaaggactgtcatttcacctttgttactctgccgctgt

SEQ ID NO: 4717 - DNA, 77 bp, Homo sapiens
taaagcaccccattataacaaaggactgtcatttcacctttgttactctgccgctgttctgaagctgcatcaggaac

SEQ ID NO: 4718 - DNA, 76 bp, Homo sapiens
attataacaaaggactgtcatttcacctttgttactctgccgctgttctgaagctgcatcaggaaccaaggacaaa

SEQ ID NO: 4719 - DNA, 73 bp, Homo sapiens
atttcacctttgttactctgccgctgttctgaagctgcatcaggaaccaaggacaaaaggccaaatactttaa

SEQ ID NO: 4720 - DNA, 75 bp, Homo sapiens
tgttactctgccgctgttctgaagctgcatcaggaaccaaggacaaaaggccaaatactttaacaaaagatacgc

SEQ ID NO: 4721 - DNA, 68 bp, Homo sapiens
agctgcatcaggaaccaaggacaaaaggccaaatactttaacaaaagatacgcctgtttttttagtta

SEQ ID NO: 4722 - DNA, 64 bp, Homo sapiens
caggaaccaaggacaaaaggccaaatactttaacaaaagatacgcctgtttttttagttactta

SEQ ID NO: 4723 - DNA, 64 bp, Homo sapiens
ggacaaaaggccaaatactttaacaaaagatacgcctgtttttttagttacttaaaaaatggca

SEQ ID NO: 4724 - DNA, 63 bp, Homo sapiens
tactttaacaaaagatacgcctgtttttttagttacttaaaaaatggcaaggactttgggagt

SEQ ID NO: 4725 - DNA, 64 bp, Homo sapiens
caaaagatacgcctgtttttttagttacttaaaaaatggcaaggactttgggagttttgaccca

SEQ ID NO: 4726 - DNA, 64 bp, Homo sapiens
tacgcctgtttttttagttacttaaaaaatggcaaggactttgggagttttgacccagggactg

SEQ ID NO: 4727 - DNA, 66 bp, Homo sapiens
agttacttaaaaaatggcaaggactttgggagttttgacccagggactgtggacaaaaccaatata

SEQ ID NO: 4728 - DNA, 69 bp, Homo sapiens
cttaaaaaatggcaaggactttgggagttttgacccagggactgtggacaaaaccaatatatgtataca

SEQ ID NO: 4729 - DNA, 81 bp, Homo sapiens
tatgtatatatcataatatcacagaagtctatcatttgatcttacttgtaaagtagctaattaagagatgcaacttctggg

SEQ ID NO: 4730 - DNA, 81 bp, Homo sapiens
tcataatatcacagaagtctatcatttgatcttacttgtaaagtagctaattaagagatgcaacttctgggtcaagagata

SEQ ID NO: 4731 - DNA, 80 bp, Homo sapiens
atatcacagaagtctatcatttgatcttacttgtaaagtagctaattaagagatgcaacttctgggtcaagagatagaca

SEQ ID NO: 4732 - DNA, 76 bp, Homo sapiens
ctatcatttgatcttacttgtaaagtagctaattaagagatgcaacttctgggtcaagagatagacaacttattac

SEQ ID NO: 4733 - DNA, 76 bp, Homo sapiens
gatcttacttgtaaagtagctaattaagagatgcaacttctgggtcaagagatagacaacttattacttagagcaa

SEQ ID NO: 4734 - DNA, 77 bp, Homo sapiens
ttgtaaagtagctaattaagagatgcaacttctgggtcaagagatagacaacttattacttagagcaatagctgtaa

SEQ ID NO: 4735 - DNA, 79 bp, Homo sapiens
taattaagagatgcaacttctgggtcaagagatagacaacttattacttagagcaatagctgtaaccagagtatcagta

SEQ ID NO: 4736 - DNA, 76 bp, Homo sapiens
agatgcaacttctgggtcaagagatagacaacttattacttagagcaatagctgtaaccagagtatcagtaatttt

SEQ ID NO: 4737 - DNA, 75 bp, Homo sapiens
gtcaagagatagacaacttattacttagagcaatagctgtaaccagagtatcagtaatttttggtcatttcccaa

SEQ ID NO: 4738 - DNA, 74 bp, Homo sapiens
agatagacaacttattacttagagcaatagctgtaaccagagtatcagtaatttttggtcatttcccaagccca

SEQ ID NO: 4739 - DNA, 73 bp, Homo sapiens
ttattacttagagcaatagctgtaaccagagtatcagtaatttttggtcatttcccaagcccagttcccatag

SEQ ID NO: 4740 - DNA, 74 bp, Homo sapiens
caatagctgtaaccagagtatcagtaatttttggtcatttcccaagcccagttcccatagggcactgcaaagaa

SEQ ID NO: 4741 - DNA, 74 bp, Homo sapiens
taaccagagtatcagtaatttttggtcatttcccaagcccagttcccatagggcactgcaaagaaggccagata

SEQ ID NO: 4742 - DNA, 73 bp, Homo sapiens
tatcagtaatttttggtcatttcccaagcccagttcccatagggcactgcaaagaaggccagataaaatctgt

SEQ ID NO: 4743 - DNA, 77 bp, Homo sapiens
atttcccaagcccagttcccatagggcactgcaaagaaggccagataaaatctgtttgtgctgtgtgttgcattaca

SEQ ID NO: 4744 - DNA, 79 bp, Homo sapiens
agttcccatagggcactgcaaagaaggccagataaaatctgtttgtgctgtgtgttgcattacaggagaggagccctga

SEQ ID NO: 4745 - DNA, 78 bp, Homo sapiens
aagaaggccagataaaatctgtttgtgctgtgtgttgcattacaggagaggagccctgagcttagggcacctgaatct

SEQ ID NO: 4746 - DNA, 80 bp, Homo sapiens
ataaaatctgtttgtgctgtgtgttgcattacaggagaggagccctgagcttagggcacctgaatcttctgtaatagaca

SEQ ID NO: 4747 - DNA, 83 bp, Homo sapiens
tctgtttgtgctgtgtgttgcattacaggagaggagccctgagcttagggcacctgaatcttctgtaatagacagtaagcata

SEQ ID NO: 4748 - DNA, 78 bp, Homo sapiens
attacaggagaggagccctgagcttagggcacctgaatcttctgtaatagacagtaagcatagctgacctttgctttc

SEQ ID NO: 4749 - DNA, 80 bp, Homo sapiens
agaggagccctgagcttagggcacctgaatcttctgtaatagacagtaagcatagctgacctttgctttctgtcttctga

SEQ ID NO: 4750 - DNA, 82 bp, Homo sapiens
ttagggcacctgaatcttctgtaatagacagtaagcatagctgacctttgctttctgtcttctgaggctattcactatatga

SEQ ID NO: 4751 - DNA, 83 bp, Homo sapiens
tgaatcttctgtaatagacagtaagcatagctgacctttgctttctgtcttctgaggctattcactatatgagcaaccttgaa

SEQ ID NO: 4752 - DNA, 81 bp, Homo sapiens
tgtaatagacagtaagcatagctgacctttgctttctgtcttctgaggctattcactatatgagcaaccttgaaaagataa

SEQ ID NO: 4753 - DNA, 80 bp, Homo sapiens
agtaagcatagctgacctttgctttctgtcttctgaggctattcactatatgagcaaccttgaaaagataatccagaata

SEQ ID NO: 4754 - DNA, 78 bp, Homo sapiens
tagctgacctttgctttctgtcttctgaggctattcactatatgagcaaccttgaaaagataatccagaataatgggt

SEQ ID NO: 4755 - DNA, 78 bp, Homo sapiens
ctttctgtcttctgaggctattcactatatgagcaaccttgaaaagataatccagaataatgggttgccattgcctaa

SEQ ID NO: 4756 - DNA, 78 bp, Homo sapiens
ttctgaggctattcactatatgagcaaccttgaaaagataatccagaataatgggttgccattgcctaactcaaaaga

SEQ ID NO: 4757 - DNA, 79 bp, Homo sapiens
tattcactatatgagcaaccttgaaaagataatccagaataatgggttgccattgcctaactcaaaagacatgcagaaa

SEQ ID NO: 4758 - DNA, 79 bp, Homo sapiens
tatatgagcaaccttgaaaagataatccagaataatgggttgccattgcctaactcaaaagacatgcagaaataagaga

SEQ ID NO: 4759 - DNA, 77 bp, Homo sapiens
cttgaaaagataatccagaataatgggttgccattgcctaactcaaaagacatgcagaaataagagagacttgtgta

SEQ ID NO: 4760 - DNA, 81 bp, Homo sapiens
taatgggttgccattgcctaactcaaaagacatgcagaaataagagagacttgtgtagcatggtttcctgacacatgaata

SEQ ID NO: 4761 - DNA, 79 bp, Homo sapiens
attgcctaactcaaaagacatgcagaaataagagagacttgtgtagcatggtttcctgacacatgaataattctcaaat

SEQ ID NO: 4762 - DNA, 82 bp, Homo sapiens
taactcaaaagacatgcagaaataagagagacttgtgtagcatggtttcctgacacatgaataattctcaaattatgattga

SEQ ID NO: 4763 - DNA, 80 bp, Homo sapiens
gagagacttgtgtagcatggtttcctgacacatgaataattctcaaattatgattgactttacacaatgtttttgattca

SEQ ID NO: 4764 - DNA, 79 bp, Homo sapiens
acttgtgtagcatggtttcctgacacatgaataattctcaaattatgattgactttacacaatgtttttgattcacagc

SEQ ID NO: 4765 - DNA, 78 bp, Homo sapiens
catggtttcctgacacatgaataattctcaaattatgattgactttacacaatgtttttgattcacagctaagtccaa

SEQ ID NO: 4766 - DNA, 76 bp, Homo sapiens
tctcaaattatgattgactttacacaatgtttttgattcacagctaagtccaaaagaggtgtccttgattgacaaa

SEQ ID NO: 4767 - DNA, 75 bp, Homo sapiens
tatgattgactttacacaatgtttttgattcacagctaagtccaaaagaggtgtccttgattgacaaacaaattc

SEQ ID NO: 4768 - DNA, 74 bp, Homo sapiens
atgtttttgattcacagctaagtccaaaagaggtgtccttgattgacaaacaaattcttccaagttgtgaatca

SEQ ID NO: 4769 - DNA, 73 bp, Homo sapiens
attcacagctaagtccaaaagaggtgtccttgattgacaaacaaattcttccaagttgtgaatcaggggctta

SEQ ID NO: 4770 - DNA, 69 bp, Homo sapiens
agtccaaaagaggtgtccttgattgacaaacaaattcttccaagttgtgaatcaggggcttaggtttct

SEQ ID NO: 4771 - DNA, 72 bp, Homo sapiens
aggtgtccttgattgacaaacaaattcttccaagttgtgaatcaggggcttaggtttcttccatcttgtgac

SEQ ID NO: 4772 - DNA, 72 bp, Homo sapiens
ttgacaaacaaattcttccaagttgtgaatcaggggcttaggtttcttccatcttgtgactgccttctttaa

SEQ ID NO: 4773 - DNA, 73 bp, Homo sapiens
acaaattcttccaagttgtgaatcaggggcttaggtttcttccatcttgtgactgccttctttaaaatgctgc

SEQ ID NO: 4774 - DNA, 74 bp, Homo sapiens
aagttgtgaatcaggggcttaggtttcttccatcttgtgactgccttctttaaaatgctgcctctatggcttta

SEQ ID NO: 4775 - DNA, 72 bp, Homo sapiens
aggggcttaggtttcttccatcttgtgactgccttctttaaaatgctgcctctatggctttaatgcttattt

SEQ ID NO: 4776 - DNA, 76 bp, Homo sapiens
tttcttccatcttgtgactgccttctttaaaatgctgcctctatggctttaatgcttatttttgttatccatgtaa

SEQ ID NO: 4777 - DNA, 75 bp, Homo sapiens
aatgctgcctctatggctttaatgcttatttttgttatccatgtaaaaggaatcagtgtggatactagaaatttg

SEQ ID NO: 4778 - DNA, 73 bp, Homo sapiens
ctctatggctttaatgcttatttttgttatccatgtaaaaggaatcagtgtggatactagaaatttggggcta

SEQ ID NO: 4779 - DNA, 71 bp, Homo sapiens
aatgcttatttttgttatccatgtaaaaggaatcagtgtggatactagaaatttggggctattaaggacca

SEQ ID NO: 4780 - DNA, 71 bp, Homo sapiens
tatttttgttatccatgtaaaaggaatcagtgtggatactagaaatttggggctattaaggaccaggccta

SEQ ID NO: 4781 - DNA, 74 bp, Homo sapiens
atgtaaaaggaatcagtgtggatactagaaatttggggctattaaggaccaggcctagaggtgacacacatcat

SEQ ID NO: 4782 - DNA, 74 bp, Homo sapiens
aaaggaatcagtgtggatactagaaatttggggctattaaggaccaggcctagaggtgacacacatcattttca

SEQ ID NO: 4783 - DNA, 75 bp, Homo sapiens
tagaaatttggggctattaaggaccaggcctagaggtgacacacatcattttcattcagactacgttgattggaa

SEQ ID NO: 4784 - DNA, 81 bp, Homo sapiens
tattaaggaccaggcctagaggtgacacacatcattttcattcagactacgttgattggaacccagtgcactggctgcatg

SEQ ID NO: 4785 - DNA, 81 bp, Homo sapiens
aggcctagaggtgacacacatcattttcattcagactacgttgattggaacccagtgcactggctgcatgtaactgcaaag

SEQ ID NO: 4786 - DNA, 84 bp, Homo sapiens
tagaggtgacacacatcattttcattcagactacgttgattggaacccagtgcactggctgcatgtaactgcaaaggatgctgg

SEQ ID NO: 4787 - DNA, 81 bp, Homo sapiens
tcattttcattcagactacgttgattggaacccagtgcactggctgcatgtaactgcaaaggatgctgggaaatgtctagt

SEQ ID NO: 4788 - DNA, 80 bp, Homo sapiens
ttcattcagactacgttgattggaacccagtgcactggctgcatgtaactgcaaaggatgctgggaaatgtctagttacc

SEQ ID NO: 4789 - DNA, 78 bp, Homo sapiens
ttgattggaacccagtgcactggctgcatgtaactgcaaaggatgctgggaaatgtctagttacctgccaaataaaaa

SEQ ID NO: 4790 - DNA, 77 bp, Homo sapiens
tggaacccagtgcactggctgcatgtaactgcaaaggatgctgggaaatgtctagttacctgccaaataaaaagaaa

SEQ ID NO: 4791 - DNA, 71 bp, Homo sapiens
aaaagaaatgagtttggcgaataggctgtctctacctcattttagcccattcttgttaatttgtatgtaat

SEQ ID NO: 4792 - DNA, 74 bp, Homo sapiens
aatgagtttggcgaataggctgtctctacctcattttagcccattcttgttaatttgtatgtaattacagagaa

SEQ ID NO: 4793 - DNA, 77 bp, Homo sapiens
cgaataggctgtctctacctcattttagcccattcttgttaatttgtatgtaattacagagaatgacagaagacaga

SEQ ID NO: 4794 - DNA, 76 bp, Homo sapiens
gtctctacctcattttagcccattcttgttaatttgtatgtaattacagagaatgacagaagacagagcatttaaa

SEQ ID NO: 4795 - DNA, 75 bp, Homo sapiens
tcattttagcccattcttgttaatttgtatgtaattacagagaatgacagaagacagagcatttaaaaaatgaaa

SEQ ID NO: 4796 - DNA, 72 bp, Homo sapiens
ccattcttgttaatttgtatgtaattacagagaatgacagaagacagagcatttaaaaaatgaaagttaaaa

SEQ ID NO: 4797 - DNA, 73 bp, Homo sapiens
gacagagcatttaaaaaatgaaagttaaaaaacaaaatcccactccatatctcccattgagaaatagccatca

SEQ ID NO: 4798 - DNA, 70 bp, Homo sapiens
aaaaatgaaagttaaaaaacaaaatcccactccatatctcccattgagaaatagccatcacttactacta

SEQ ID NO: 4799 - DNA, 73 bp, Homo sapiens
gttaaaaaacaaaatcccactccatatctcccattgagaaatagccatcacttactactaagtaaatatcaca

SEQ ID NO: 4800 - DNA, 73 bp, Homo sapiens
aaaacaaaatcccactccatatctcccattgagaaatagccatcacttactactaagtaaatatcacagattt

SEQ ID NO: 4801 - DNA, 77 bp, Homo sapiens
aaatcccactccatatctcccattgagaaatagccatcacttactactaagtaaatatcacagattttttctatgca

SEQ ID NO: 4802 - DNA, 81 bp, Homo sapiens
ccatatctcccattgagaaatagccatcacttactactaagtaaatatcacagattttttctatgcatagagacatagata

SEQ ID NO: 4803 - DNA, 81 bp, Homo sapiens
ctcccattgagaaatagccatcacttactactaagtaaatatcacagattttttctatgcatagagacatagatacataca

SEQ ID NO: 4804 - DNA, 81 bp, Homo sapiens
ccattgagaaatagccatcacttactactaagtaaatatcacagattttttctatgcatagagacatagatacatacataa

SEQ ID NO: 4805 - DNA, 79 bp, Homo sapiens
gagaaatagccatcacttactactaagtaaatatcacagattttttctatgcatagagacatagatacatacataaaaa

SEQ ID NO: 4806 - DNA, 79 bp, Homo sapiens
atagccatcacttactactaagtaaatatcacagattttttctatgcatagagacatagatacatacataaaaaggata

SEQ ID NO: 4807 - DNA, 78 bp, Homo sapiens
catcacttactactaagtaaatatcacagattttttctatgcatagagacatagatacatacataaaaaggataatta

SEQ ID NO: 4808 - DNA, 77 bp, Homo sapiens
cttactactaagtaaatatcacagattttttctatgcatagagacatagatacatacataaaaaggataattagaga

SEQ ID NO: 4809 - DNA, 75 bp, Homo sapiens
agtaaatatcacagattttttctatgcatagagacatagatacatacataaaaaggataattagagaaaaattat

SEQ ID NO: 4810 - DNA, 72 bp, Homo sapiens
gagacatagatacatacataaaaaggataattagagaaaaattattaaattgagtgaaacctactgatgttt

SEQ ID NO: 4811 - DNA, 69 bp, Homo sapiens
ggataattagagaaaaattattaaattgagtgaaacctactgatgttttaaacaccaaaggcagattta

SEQ ID NO: 4812 - DNA, 69 bp, Homo sapiens
agagaaaaattattaaattgagtgaaacctactgatgttttaaacaccaaaggcagatttatttggctg

SEQ ID NO: 4813 - DNA, 72 bp, Homo sapiens
ttaaattgagtgaaacctactgatgttttaaacaccaaaggcagatttatttggctgtatagatggaaaaga

SEQ ID NO: 4814 - DNA, 73 bp, Homo sapiens
tttaaacaccaaaggcagatttatttggctgtatagatggaaaagaaagagaccctgtctgtatagaagaaca

SEQ ID NO: 4815 - DNA, 77 bp, Homo sapiens
ttatttggctgtatagatggaaaagaaagagaccctgtctgtatagaagaacaacagcaacaaaacatagctgaatg

SEQ ID NO: 4816 - DNA, 79 bp, Homo sapiens
tagatggaaaagaaagagaccctgtctgtatagaagaacaacagcaacaaaacatagctgaatgtgtggtgcgtgccta

SEQ ID NO: 4817 - DNA, 64 bp, Homo sapiens
cctgggtggcagaatgagaccaaaaaaacttttttccccccttaccacaagaaatattatttcc

SEQ ID NO: 4818 - DNA, 66 bp, Homo sapiens
gtggcagaatgagaccaaaaaaacttttttccccccttaccacaagaaatattatttcctcaaaga

SEQ ID NO: 4819 - DNA, 62 bp, Homo sapiens
gagaccaaaaaaacttttttccccccttaccacaagaaatattatttcctcaaagatacctt

SEQ ID NO: 4820 - DNA, 64 bp, Homo sapiens
tttttccccccttaccacaagaaatattatttcctcaaagatacctttaagtttaataatagaa

SEQ ID NO: 4821 - DNA, 67 bp, Homo sapiens
ccttaccacaagaaatattatttcctcaaagatacctttaagtttaataatagaaattacaaaagca

SEQ ID NO: 4822 - DNA, 66 bp, Homo sapiens
gaaatattatttcctcaaagatacctttaagtttaataatagaaattacaaaagcaaacaagacgt

SEQ ID NO: 4823 - DNA, 67 bp, Homo sapiens
ttcctcaaagatacctttaagtttaataatagaaattacaaaagcaaacaagacgttgaagaggtaa

SEQ ID NO: 4824 - DNA, 67 bp, Homo sapiens
agatacctttaagtttaataatagaaattacaaaagcaaacaagacgttgaagaggtaagactgtct

SEQ ID NO: 4825 - DNA, 67 bp, Homo sapiens
agtttaataatagaaattacaaaagcaaacaagacgttgaagaggtaagactgtctttctagttggg

SEQ ID NO: 4826 - DNA, 69 bp, Homo sapiens
atagaaattacaaaagcaaacaagacgttgaagaggtaagactgtctttctagttggggtgcttttagc

SEQ ID NO: 4827 - DNA, 71 bp, Homo sapiens
aaagcaaacaagacgttgaagaggtaagactgtctttctagttggggtgcttttagctctaagtgatggaa

SEQ ID NO: 4828 - DNA, 72 bp, Homo sapiens
aaacaagacgttgaagaggtaagactgtctttctagttggggtgcttttagctctaagtgatggaatactca

SEQ ID NO: 4829 - DNA, 75 bp, Homo sapiens
aagaggtaagactgtctttctagttggggtgcttttagctctaagtgatggaatactcaaatcagagtggctgaa

SEQ ID NO: 4830 - DNA, 76 bp, Homo sapiens
tgtctttctagttggggtgcttttagctctaagtgatggaatactcaaatcagagtggctgaagcaattggaaatt

SEQ ID NO: 4831 - DNA, 79 bp, Homo sapiens
cttttagctctaagtgatggaatactcaaatcagagtggctgaagcaattggaaatttattacttcatgtaagatcaga

SEQ ID NO: 4832 - DNA, 80 bp, Homo sapiens
taagtgatggaatactcaaatcagagtggctgaagcaattggaaatttattacttcatgtaagatcagatgctaggcttt

SEQ ID NO: 4833 - DNA, 78 bp, Homo sapiens
aatactcaaatcagagtggctgaagcaattggaaatttattacttcatgtaagatcagatgctaggcttttctaagat

SEQ ID NO: 4834 - DNA, 76 bp, Homo sapiens
cagagtggctgaagcaattggaaatttattacttcatgtaagatcagatgctaggcttttctaagattggttaatt

SEQ ID NO: 4835 - DNA, 75 bp, Homo sapiens
gaaatttattacttcatgtaagatcagatgctaggcttttctaagattggttaatttaacagtagccaattcagc

SEQ ID NO: 4836 - DNA, 79 bp, Homo sapiens
ttattacttcatgtaagatcagatgctaggcttttctaagattggttaatttaacagtagccaattcagctgtggcaga

SEQ ID NO: 4837 - DNA, 79 bp, Homo sapiens
taagatcagatgctaggcttttctaagattggttaatttaacagtagccaattcagctgtggcagagcattgttgactt

SEQ ID NO: 4838 - DNA, 77 bp, Homo sapiens
ctaggcttttctaagattggttaatttaacagtagccaattcagctgtggcagagcattgttgactttcatgtgatt

SEQ ID NO: 4839 - DNA, 75 bp, Homo sapiens
cttttctaagattggttaatttaacagtagccaattcagctgtggcagagcattgttgactttcatgtgattttt

SEQ ID NO: 4840 - DNA, 77 bp, Homo sapiens
attggttaatttaacagtagccaattcagctgtggcagagcattgttgactttcatgtgatttttttggcttttgca

SEQ ID NO: 4841 - DNA, 81 bp, Homo sapiens
ttaacagtagccaattcagctgtggcagagcattgttgactttcatgtgatttttttggcttttgcagtcatggttgccag

SEQ ID NO: 4842 - DNA, 82 bp, Homo sapiens
attcagctgtggcagagcattgttgactttcatgtgatttttttggcttttgcagtcatggttgccaggacactgcagttgt

SEQ ID NO: 4843 - DNA, 83 bp, Homo sapiens
cagagcattgttgactttcatgtgatttttttggcttttgcagtcatggttgccaggacactgcagttgttctgaggatcatg

SEQ ID NO: 4844 - DNA, 81 bp, Homo sapiens
ttgactttcatgtgatttttttggcttttgcagtcatggttgccaggacactgcagttgttctgaggatcatggtctaaca

SEQ ID NO: 4845 - DNA, 83 bp, Homo sapiens
tgtgatttttttggcttttgcagtcatggttgccaggacactgcagttgttctgaggatcatggtctaacacttgagcatcta

SEQ ID NO: 4846 - DNA, 82 bp, Homo sapiens
tttttggcttttgcagtcatggttgccaggacactgcagttgttctgaggatcatggtctaacacttgagcatctaaaggca

SEQ ID NO: 4847 - DNA, 82 bp, Homo sapiens
ttttgcagtcatggttgccaggacactgcagttgttctgaggatcatggtctaacacttgagcatctaaaggcaggaaggga

SEQ ID NO: 4848 - DNA, 79 bp, Homo sapiens
ttgccaggacactgcagttgttctgaggatcatggtctaacacttgagcatctaaaggcaggaagggaatacctcttaa

SEQ ID NO: 4849 - DNA, 78 bp, Homo sapiens
acactgcagttgttctgaggatcatggtctaacacttgagcatctaaaggcaggaagggaatacctcttaagaatgag

SEQ ID NO: 4850 - DNA, 73 bp, Homo sapiens
atggtctaacacttgagcatctaaaggcaggaagggaatacctcttaagaatgaggagaacagctagaaaatt

SEQ ID NO: 4851 - DNA, 73 bp, Homo sapiens
taacacttgagcatctaaaggcaggaagggaatacctcttaagaatgaggagaacagctagaaaatttcaatt

SEQ ID NO: 4852 - DNA, 71 bp, Homo sapiens
atctaaaggcaggaagggaatacctcttaagaatgaggagaacagctagaaaatttcaatttctggcctgg

SEQ ID NO: 4853 - DNA, 68 bp, Homo sapiens
agaaaagaaaaatttaacttctattttattatcctgattgaaacctattccaggcctaaagcagtcag

SEQ ID NO: 4854 - DNA, 71 bp, Homo sapiens
aatttaacttctattttattatcctgattgaaacctattccaggcctaaagcagtcagtggctaaagagaa

SEQ ID NO: 4855 - DNA, 75 bp, Homo sapiens
tctattttattatcctgattgaaacctattccaggcctaaagcagtcagtggctaaagagaatcaatttctctta

SEQ ID NO: 4856 - DNA, 74 bp, Homo sapiens
ttattatcctgattgaaacctattccaggcctaaagcagtcagtggctaaagagaatcaatttctcttaattac

SEQ ID NO: 4857 - DNA, 73 bp, Homo sapiens
attgaaacctattccaggcctaaagcagtcagtggctaaagagaatcaatttctcttaattaccttggactca

SEQ ID NO: 4858 - DNA, 76 bp, Homo sapiens
tattccaggcctaaagcagtcagtggctaaagagaatcaatttctcttaattaccttggactcatccatgttcacc

SEQ ID NO: 4859 - DNA, 76 bp, Homo sapiens
ctaaagcagtcagtggctaaagagaatcaatttctcttaattaccttggactcatccatgttcacctctgggctgg

SEQ ID NO: 4860 - DNA, 75 bp, Homo sapiens
gctaaagagaatcaatttctcttaattaccttggactcatccatgttcacctctgggctggggaatagatacact

SEQ ID NO: 4861 - DNA, 75 bp, Homo sapiens
agaatcaatttctcttaattaccttggactcatccatgttcacctctgggctggggaatagatacacttttatga

SEQ ID NO: 4862 - DNA, 77 bp, Homo sapiens
ttctcttaattaccttggactcatccatgttcacctctgggctggggaatagatacacttttatgaggacatgagaa

SEQ ID NO: 4863 - DNA, 80 bp, Homo sapiens
ttggactcatccatgttcacctctgggctggggaatagatacacttttatgaggacatgagaaggtgatcatgaattttc

SEQ ID NO: 4864 - DNA, 78 bp, Homo sapiens
atccatgttcacctctgggctggggaatagatacacttttatgaggacatgagaaggtgatcatgaattttcttaaga

SEQ ID NO: 4865 - DNA, 76 bp, Homo sapiens
acacttttatgaggacatgagaaggtgatcatgaattttcttaagaaatcaggactttgtcagcaagaaagatgtt

SEQ ID NO: 4866 - DNA, 78 bp, Homo sapiens
tgagaaggtgatcatgaattttcttaagaaatcaggactttgtcagcaagaaagatgtttatgtctagtcactatttg

SEQ ID NO: 4867 - DNA, 77 bp, Homo sapiens
catgaattttcttaagaaatcaggactttgtcagcaagaaagatgtttatgtctagtcactatttggcagacttatg

SEQ ID NO: 4868 - DNA, 75 bp, Homo sapiens
tcttaagaaatcaggactttgtcagcaagaaagatgtttatgtctagtcactatttggcagacttatgttttgtt

SEQ ID NO: 4869 - DNA, 73 bp, Homo sapiens
aaatcaggactttgtcagcaagaaagatgtttatgtctagtcactatttggcagacttatgttttgttttaat

SEQ ID NO: 4870 - DNA, 75 bp, Homo sapiens
ggactttgtcagcaagaaagatgtttatgtctagtcactatttggcagacttatgttttgttttaattacatgtg

SEQ ID NO: 4871 - DNA, 77 bp, Homo sapiens
ttgtcagcaagaaagatgtttatgtctagtcactatttggcagacttatgttttgttttaattacatgtgtcagatt

SEQ ID NO: 4872 - DNA, 76 bp, Homo sapiens
cagcaagaaagatgtttatgtctagtcactatttggcagacttatgttttgttttaattacatgtgtcagatttta

SEQ ID NO: 4873 - DNA, 77 bp, Homo sapiens
gatgtttatgtctagtcactatttggcagacttatgttttgttttaattacatgtgtcagattttatattgagctcc

SEQ ID NO: 4874 - DNA, 77 bp, Homo sapiens
tctagtcactatttggcagacttatgttttgttttaattacatgtgtcagattttatattgagctcctacagtgaag

SEQ ID NO: 4875 - DNA, 76 bp, Homo sapiens
agtcactatttggcagacttatgttttgttttaattacatgtgtcagattttatattgagctcctacagtgaaggc

SEQ ID NO: 4876 - DNA, 78 bp, Homo sapiens
tatttggcagacttatgttttgttttaattacatgtgtcagattttatattgagctcctacagtgaaggctgctagta

SEQ ID NO: 4877 - DNA, 77 bp, Homo sapiens
atttggcagacttatgttttgttttaattacatgtgtcagattttatattgagctcctacagtgaaggctgctagta

SEQ ID NO: 4878 - DNA, 76 bp, Homo sapiens
agacttatgttttgttttaattacatgtgtcagattttatattgagctcctacagtgaaggctgctagtatcccta

SEQ ID NO: 4879 - DNA, 76 bp, Homo sapiens
gttttgttttaattacatgtgtcagattttatattgagctcctacagtgaaggctgctagtatccctatagtcatt

SEQ ID NO: 4880 - DNA, 77 bp, Homo sapiens
ttttaattacatgtgtcagattttatattgagctcctacagtgaaggctgctagtatccctatagtcattttgcttt

SEQ ID NO: 4881 - DNA, 79 bp, Homo sapiens
tgtcagattttatattgagctcctacagtgaaggctgctagtatccctatagtcattttgcttttcctgctatccaggt

SEQ ID NO: 4882 - DNA, 73 bp, Homo sapiens
agctcctacagtgaaggctgctagtatccctatagtcattttgcttttcctgctatccaggttgtttttattt

SEQ ID NO: 4883 - DNA, 72 bp, Homo sapiens
gttgtttgtttttgaagacatttctattttttcaggtagtgacattctcttatgtaaacataatcctcatag

SEQ ID NO: 4884 - DNA, 76 bp, Homo sapiens
ttgaagacatttctattttttcaggtagtgacattctcttatgtaaacataatcctcatagttgtgtaggcatttg

SEQ ID NO: 4885 - DNA, 74 bp, Homo sapiens
ttctattttttcaggtagtgacattctcttatgtaaacataatcctcatagttgtgtaggcatttgttttgtat

SEQ ID NO: 4886 - DNA, 74 bp, Homo sapiens
tcaggtagtgacattctcttatgtaaacataatcctcatagttgtgtaggcatttgttttgtatttaaattcgt

SEQ ID NO: 4887 - DNA, 76 bp, Homo sapiens
gacattctcttatgtaaacataatcctcatagttgtgtaggcatttgttttgtatttaaattcgttagctgctcac

SEQ ID NO: 4888 - DNA, 75 bp, Homo sapiens
tatgtaaacataatcctcatagttgtgtaggcatttgttttgtatttaaattcgttagctgctcactattagtct

SEQ ID NO: 4889 - DNA, 72 bp, Homo sapiens
aatcctcatagttgtgtaggcatttgttttgtatttaaattcgttagctgctcactattagtctttttacca

SEQ ID NO: 4890 - DNA, 73 bp, Homo sapiens
gttgtgtaggcatttgttttgtatttaaattcgttagctgctcactattagtctttttaccacagctattcca

SEQ ID NO: 4891 - DNA, 71 bp, Homo sapiens
ggcatttgttttgtatttaaattcgttagctgctcactattagtctttttaccacagctattccagtaagt

SEQ ID NO: 4892 - DNA, 73 bp, Homo sapiens
ttgtatttaaattcgttagctgctcactattagtctttttaccacagctattccagtaagttcattgttcctc

SEQ ID NO: 4893 - DNA, 72 bp, Homo sapiens
aattcgttagctgctcactattagtctttttaccacagctattccagtaagttcattgttcctcttaaattg

SEQ ID NO: 4894 - DNA, 73 bp, Homo sapiens
agctgctcactattagtctttttaccacagctattccagtaagttcattgttcctcttaaattggctgaattt

SEQ ID NO: 4895 - DNA, 70 bp, Homo sapiens
attagtctttttaccacagctattccagtaagttcattgttcctcttaaattggctgaattttattcact

SEQ ID NO: 4896 - DNA, 71 bp, Homo sapiens
tttaccacagctattccagtaagttcattgttcctcttaaattggctgaattttattcacttttttcaata

SEQ ID NO: 4897 - DNA, 69 bp, Homo sapiens
ctattccagtaagttcattgttcctcttaaattggctgaattttattcacttttttcaataataagttc

SEQ ID NO: 4898 - DNA, 69 bp, Homo sapiens
cattgttcctcttaaattggctgaattttattcacttttttcaataataagttcttaggacttgtgttc

SEQ ID NO: 4899 - DNA, 69 bp, Homo sapiens
cctcttaaattggctgaattttattcacttttttcaataataagttcttaggacttgtgttctctgatt

SEQ ID NO: 4900 - DNA, 73 bp, Homo sapiens
gctgaattttattcacttttttcaataataagttcttaggacttgtgttctctgatttctttcataatggaga

SEQ ID NO: 4901 - DNA, 71 bp, Homo sapiens
ttcacttttttcaataataagttcttaggacttgtgttctctgatttctttcataatggagaacatttcct

SEQ ID NO: 4902 - DNA, 70 bp, Homo sapiens
gttcttaggacttgtgttctctgatttctttcataatggagaacatttccttttgccttaatttttgaac

SEQ ID NO: 4903 - DNA, 73 bp, Homo sapiens
cttgtgttctctgatttctttcataatggagaacatttccttttgccttaatttttgaactgtatcttggctg

SEQ ID NO: 4904 - DNA, 73 bp, Homo sapiens
ctgatttctttcataatggagaacatttccttttgccttaatttttgaactgtatcttggctgtatataatat

SEQ ID NO: 4905 - DNA, 75 bp, Homo sapiens
tcataatggagaacatttccttttgccttaatttttgaactgtatcttggctgtatataatattgttgggtcaca

SEQ ID NO: 4906 - DNA, 71 bp, Homo sapiens
ggagaacatttccttttgccttaatttttgaactgtatcttggctgtatataatattgttgggtcacactt

SEQ ID NO: 4907 - DNA, 71 bp, Homo sapiens
ttccttttgccttaatttttgaactgtatcttggctgtatataatattgttgggtcacactttatttcttc

SEQ ID NO: 4908 - DNA, 69 bp, Homo sapiens
ccttaatttttgaactgtatcttggctgtatataatattgttgggtcacactttatttcttctaaaaac

SEQ ID NO: 4909 - DNA, 73 bp, Homo sapiens
ggctgtatataatattgttgggtcacactttatttcttctaaaaacttaatggtcctggaatattgctgtgga

SEQ ID NO: 4910 - DNA, 72 bp, Homo sapiens
ttgggtcacactttatttcttctaaaaacttaatggtcctggaatattgctgtggagatgactaacgacacc

SEQ ID NO: 4911 - DNA, 72 bp, Homo sapiens
tttcttctaaaaacttaatggtcctggaatattgctgtggagatgactaacgacacctccctctccctgtat

SEQ ID NO: 4912 - DNA, 75 bp, Homo sapiens
tctaaaaacttaatggtcctggaatattgctgtggagatgactaacgacacctccctctccctgtattctgctaa

SEQ ID NO: 4913 - DNA, 76 bp, Homo sapiens
taatggtcctggaatattgctgtggagatgactaacgacacctccctctccctgtattctgctaagtttaactaca

SEQ ID NO: 4914 - DNA, 74 bp, Homo sapiens
aatattgctgtggagatgactaacgacacctccctctccctgtattctgctaagtttaactacagtaagtcttg

SEQ ID NO: 4915 - DNA, 74 bp, Homo sapiens
agatgactaacgacacctccctctccctgtattctgctaagtttaactacagtaagtcttggtgctacacagtc

SEQ ID NO: 4916 - DNA, 74 bp, Homo sapiens
taacgacacctccctctccctgtattctgctaagtttaactacagtaagtcttggtgctacacagtctgtaaca

SEQ ID NO: 4917 - DNA, 72 bp, Homo sapiens
ttttccattttcattttgtggaattttatgtttgaatataccttctgttccccattcattgaattctctgct

SEQ ID NO: 4918 - DNA, 75 bp, Homo sapiens
ttcattttgtggaattttatgtttgaatataccttctgttccccattcattgaattctctgcttcagggatacac

SEQ ID NO: 4919 - DNA, 75 bp, Homo sapiens
gaattttatgtttgaatataccttctgttccccattcattgaattctctgcttcagggatacacgttatcttatg

SEQ ID NO: 4920 - DNA, 76 bp, Homo sapiens
atgtttgaatataccttctgttccccattcattgaattctctgcttcagggatacacgttatcttatgtttgatta

SEQ ID NO: 4921 - DNA, 76 bp, Homo sapiens
atataccttctgttccccattcattgaattctctgcttcagggatacacgttatcttatgtttgattatctctgtt

SEQ ID NO: 4922 - DNA, 77 bp, Homo sapiens
cccattcattgaattctctgcttcagggatacacgttatcttatgtttgattatctctgttttttatacctgtcaga

SEQ ID NO: 4923 - DNA, 77 bp, Homo sapiens
attgaattctctgcttcagggatacacgttatcttatgtttgattatctctgttttttatacctgtcagatgtggtc

SEQ ID NO: 4924 - DNA, 76 bp, Homo sapiens
cttcagggatacacgttatcttatgtttgattatctctgttttttatacctgtcagatgtggtctgcctgctttag

SEQ ID NO: 4925 - DNA, 76 bp, Homo sapiens
gatacacgttatcttatgtttgattatctctgttttttatacctgtcagatgtggtctgcctgctttagtatcttt

SEQ ID NO: 4926 - DNA, 74 bp, Homo sapiens
ttatcttatgtttgattatctctgttttttatacctgtcagatgtggtctgcctgctttagtatcttttttaaa

SEQ ID NO: 4927 - DNA, 75 bp, Homo sapiens
ttatctctgttttttatacctgtcagatgtggtctgcctgctttagtatcttttttaaaatttgcattactgtga

SEQ ID NO: 4928 - DNA, 74 bp, Homo sapiens
tttttatacctgtcagatgtggtctgcctgctttagtatcttttttaaaatttgcattactgtgattatttcaa

SEQ ID NO: 4929 - DNA, 75 bp, Homo sapiens
tacctgtcagatgtggtctgcctgctttagtatcttttttaaaatttgcattactgtgattatttcaagcctttc

SEQ ID NO: 4930 - DNA, 71 bp, Homo sapiens
tggtctgcctgctttagtatcttttttaaaatttgcattactgtgattatttcaagcctttcttttaacac

SEQ ID NO: 4931 - DNA, 68 bp, Homo sapiens
cttttttaaaatttgcattactgtgattatttcaagcctttcttttaacactttaacaattcttggca

SEQ ID NO: 4932 - DNA, 71 bp, Homo sapiens
atttgcattactgtgattatttcaagcctttcttttaacactttaacaattcttggcaatgtgtattttcc

SEQ ID NO: 4933 - DNA, 71 bp, Homo sapiens
ctgtgattatttcaagcctttcttttaacactttaacaattcttggcaatgtgtattttccttgctgtttc

SEQ ID NO: 4934 - DNA, 69 bp, Homo sapiens
tttcaagcctttcttttaacactttaacaattcttggcaatgtgtattttccttgctgtttctattttg

SEQ ID NO: 4935 - DNA, 67 bp, Homo sapiens
cctttcttttaacactttaacaattcttggcaatgtgtattttccttgctgtttctattttgtttac

SEQ ID NO: 4936 - DNA, 71 bp, Homo sapiens
tcttggcaatgtgtattttccttgctgtttctattttgtttactaattctgtaatgataccgttttagtct

SEQ ID NO: 4937 - DNA, 67 bp, Homo sapiens
gtgtattttccttgctgtttctattttgtttactaattctgtaatgataccgttttagtcttaacct

SEQ ID NO: 4938 - DNA, 67 bp, Homo sapiens
ttgctgtttctattttgtttactaattctgtaatgataccgttttagtcttaaccttattactttgg

SEQ ID NO: 4939 - DNA, 66 bp, Homo sapiens
tattttgtttactaattctgtaatgataccgttttagtcttaaccttattactttggttatctccc

SEQ ID NO: 4940 - DNA, 65 bp, Homo sapiens
actaattctgtaatgataccgttttagtcttaaccttattactttggttatctcccttcttacct

SEQ ID NO: 4941 - DNA, 65 bp, Homo sapiens
ttctgtaatgataccgttttagtcttaaccttattactttggttatctcccttcttaccttttcc

SEQ ID NO: 4942 - DNA, 64 bp, Homo sapiens
ccgttttagtcttaaccttattactttggttatctcccttcttaccttttcctattttatcatc

SEQ ID NO: 4943 - DNA, 69 bp, Homo sapiens
agtcttaaccttattactttggttatctcccttcttaccttttcctattttatcatctcattcttgagc

SEQ ID NO: 4944 - DNA, 71 bp, Homo sapiens
actttggttatctcccttcttaccttttcctattttatcatctcattcttgagctttgtttgaactcatgt

SEQ ID NO: 4945 - DNA, 72 bp, Homo sapiens
ggttatctcccttcttaccttttcctattttatcatctcattcttgagctttgtttgaactcatgttatatt

SEQ ID NO: 4946 - DNA, 73 bp, Homo sapiens
taccttttcctattttatcatctcattcttgagctttgtttgaactcatgttatattttttatttggcatggg

SEQ ID NO: 4947 - DNA, 73 bp, Homo sapiens
cctattttatcatctcattcttgagctttgtttgaactcatgttatattttttatttggcatggggacagttt

SEQ ID NO: 4948 - DNA, 73 bp, Homo sapiens
gagctttgtttgaactcatgttatattttttatttggcatggggacagttttgagaaatattttcatactcag

SEQ ID NO: 4949 - DNA, 76 bp, Homo sapiens
tgaactcatgttatattttttatttggcatggggacagttttgagaaatattttcatactcagttatgtatgcttc

SEQ ID NO: 4950 - DNA, 74 bp, Homo sapiens
catgttatattttttatttggcatggggacagttttgagaaatattttcatactcagttatgtatgcttctagg

SEQ ID NO: 4951 - DNA, 76 bp, Homo sapiens
tttatttggcatggggacagttttgagaaatattttcatactcagttatgtatgcttctaggttgtgatatttggc

SEQ ID NO: 4952 - DNA, 81 bp, Homo sapiens
tggggacagttttgagaaatattttcatactcagttatgtatgcttctaggttgtgatatttggctatctcatgcacatta

SEQ ID NO: 4953 - DNA, 80 bp, Homo sapiens
aatattttcatactcagttatgtatgcttctaggttgtgatatttggctatctcatgcacattagactctgtattatttt

SEQ ID NO: 4954 - DNA, 80 bp, Homo sapiens
atgtatgcttctaggttgtgatatttggctatctcatgcacattagactctgtattattttttgcctgtagtttctttgc

SEQ ID NO: 4955 - DNA, 75 bp, Homo sapiens
tcatgcacattagactctgtattattttttgcctgtagtttctttgccatacagtttttaaaatgttgtttatgc

SEQ ID NO: 4956 - DNA, 70 bp, Homo sapiens
gactctgtattattttttgcctgtagtttctttgccatacagtttttaaaatgttgtttatgcttgggag

SEQ ID NO: 4957 - DNA, 70 bp, Homo sapiens
gtattattttttgcctgtagtttctttgccatacagtttttaaaatgttgtttatgcttgggaggctcac

SEQ ID NO: 4958 - DNA, 70 bp, Homo sapiens
cctgtagtttctttgccatacagtttttaaaatgttgtttatgcttgggaggctcacttttgacacttat

SEQ ID NO: 4959 - DNA, 71 bp, Homo sapiens
gtttctttgccatacagtttttaaaatgttgtttatgcttgggaggctcacttttgacacttattccatta

SEQ ID NO: 4960 - DNA, 69 bp, Homo sapiens
cagtttttaaaatgttgtttatgcttgggaggctcacttttgacacttattccattataatttacgtaa

SEQ ID NO: 4961 - DNA, 68 bp, Homo sapiens
ttaaaatgttgtttatgcttgggaggctcacttttgacacttattccattataatttacgtaattttt

SEQ ID NO: 4962 - DNA, 69 bp, Homo sapiens
gtttatgcttgggaggctcacttttgacacttattccattataatttacgtaattttttgaatattttc

SEQ ID NO: 4963 - DNA, 66 bp, Homo sapiens
gggaggctcacttttgacacttattccattataatttacgtaattttttgaatattttctcgtttt

SEQ ID NO: 4964 - DNA, 67 bp, Homo sapiens
ccattataatttacgtaattttttgaatattttctcgtttttgagacgatggtttaagggctatgta

SEQ ID NO: 4965 - DNA, 67 bp, Homo sapiens
aatttacgtaattttttgaatattttctcgtttttgagacgatggtttaagggctatgtattttgca

SEQ ID NO: 4966 - DNA, 70 bp, Homo sapiens
aatattttctcgtttttgagacgatggtttaagggctatgtattttgcatttttctgaagcctgtgggaa

SEQ ID NO: 4967 - DNA, 74 bp, Homo sapiens
acgatggtttaagggctatgtattttgcatttttctgaagcctgtgggaatgaggggtgcagtatagaagcttg

SEQ ID NO: 4968 - DNA, 73 bp, Homo sapiens
aagggctatgtattttgcatttttctgaagcctgtgggaatgaggggtgcagtatagaagcttgggaggaggg

SEQ ID NO: 4969 - DNA, 77 bp, Homo sapiens
ttgcatttttctgaagcctgtgggaatgaggggtgcagtatagaagcttgggaggaggggcgcagtataagagcttg

SEQ ID NO: 4970 - DNA, 76 bp, Homo sapiens
ttttctgaagcctgtgggaatgaggggtgcagtatagaagcttgggaggaggggcgcagtataagagcttggctta

SEQ ID NO: 4971 - DNA, 77 bp, Homo sapiens
tgggaatgaggggtgcagtatagaagcttgggaggaggggcgcagtataagagcttggcttagggcagtatgcactt

SEQ ID NO: 4972 - DNA, 76 bp, Homo sapiens
ggtgcagtatagaagcttgggaggaggggcgcagtataagagcttggcttagggcagtatgcactttttggtagaa

SEQ ID NO: 4973 - DNA, 74 bp, Homo sapiens
agtatagaagcttgggaggaggggcgcagtataagagcttggcttagggcagtatgcactttttggtagaactc

SEQ ID NO: 4974 - DNA, 74 bp, Homo sapiens
cttgggaggaggggcgcagtataagagcttggcttagggcagtatgcactttttggtagaactccaggctgggc

SEQ ID NO: 4975 - DNA, 75 bp, Homo sapiens
gcagtataagagcttggcttagggcagtatgcactttttggtagaactccaggctgggctctcctttttaacaca

SEQ ID NO: 4976 - DNA, 74 bp, Homo sapiens
agcttggcttagggcagtatgcactttttggtagaactccaggctgggctctcctttttaacacagtgcattat

SEQ ID NO: 4977 - DNA, 74 bp, Homo sapiens
ttagggcagtatgcactttttggtagaactccaggctgggctctcctttttaacacagtgcattattaaatgtc

SEQ ID NO: 4978 - DNA, 75 bp, Homo sapiens
agtatgcactttttggtagaactccaggctgggctctcctttttaacacagtgcattattaaatgtcttgcacca

SEQ ID NO: 4979 - DNA, 75 bp, Homo sapiens
tttggtagaactccaggctgggctctcctttttaacacagtgcattattaaatgtcttgcaccaggttctatata

SEQ ID NO: 4980 - DNA, 75 bp, Homo sapiens
aggctgggctctcctttttaacacagtgcattattaaatgtcttgcaccaggttctatatatctcaagtgtttgg

SEQ ID NO: 4981 - DNA, 74 bp, Homo sapiens
ctctcctttttaacacagtgcattattaaatgtcttgcaccaggttctatatatctcaagtgtttgggtgtatt

SEQ ID NO: 4982 - DNA, 76 bp, Homo sapiens
taacacagtgcattattaaatgtcttgcaccaggttctatatatctcaagtgtttgggtgtattttagtcttatgg

SEQ ID NO: 4983 - DNA, 72 bp, Homo sapiens
ttattaaatgtcttgcaccaggttctatatatctcaagtgtttgggtgtattttagtcttatggggaatacc

SEQ ID NO: 4984 - DNA, 71 bp, Homo sapiens
aaatgtcttgcaccaggttctatatatctcaagtgtttgggtgtattttagtcttatggggaataccctag

SEQ ID NO: 4985 - DNA, 69 bp, Homo sapiens
accaggttctatatatctcaagtgtttgggtgtattttagtcttatggggaataccctaggattctatt

SEQ ID NO: 4986 - DNA, 67 bp, Homo sapiens
atatatctcaagtgtttgggtgtattttagtcttatggggaataccctaggattctattttattttt

SEQ ID NO: 4987 - DNA, 70 bp, Homo sapiens
tcccaaagcactagaattacaggggagagccactgcaccgggccccctaggattttatgtagttagttct

SEQ ID NO: 4988 - DNA, 70 bp, Homo sapiens
ctagaattacaggggagagccactgcaccgggccccctaggattttatgtagttagttcttagccttgat

SEQ ID NO: 4989 - DNA, 70 bp, Homo sapiens
ttacaggggagagccactgcaccgggccccctaggattttatgtagttagttcttagccttgattcttta

SEQ ID NO: 4990 - DNA, 69 bp, Homo sapiens
ggccccctaggattttatgtagttagttcttagccttgattctttacttccagttagcacctcttcact

SEQ ID NO: 4991 - DNA, 73 bp, Homo sapiens
tatgtagttagttcttagccttgattctttacttccagttagcacctcttcacttttcttcctctcgccttca

SEQ ID NO: 4992 - DNA, 70 bp, Homo sapiens
gttcttagccttgattctttacttccagttagcacctcttcacttttcttcctctcgccttcagtttttc

SEQ ID NO: 4993 - DNA, 70 bp, Homo sapiens
ttgattctttacttccagttagcacctcttcacttttcttcctctcgccttcagtttttcctgtttcttc

SEQ ID NO: 4994 - DNA, 71 bp, Homo sapiens
cagttagcacctcttcacttttcttcctctcgccttcagtttttcctgtttcttccctgaagctagtacta

SEQ ID NO: 4995 - DNA, 69 bp, Homo sapiens
ctcttcacttttcttcctctcgccttcagtttttcctgtttcttccctgaagctagtactactctttag

SEQ ID NO: 4996 - DNA, 69 bp, Homo sapiens
ttttcttcctctcgccttcagtttttcctgtttcttccctgaagctagtactactctttaggcagaaaa

SEQ ID NO: 4997 - DNA, 69 bp, Homo sapiens
tctcgccttcagtttttcctgtttcttccctgaagctagtactactctttaggcagaaaaagtagttta

SEQ ID NO: 4998 - DNA, 67 bp, Homo sapiens
ttttcctgtttcttccctgaagctagtactactctttaggcagaaaaagtagtttagtaggtaggaa

SEQ ID NO: 4999 - DNA, 70 bp, Homo sapiens
tcttccctgaagctagtactactctttaggcagaaaaagtagtttagtaggtaggaacatataaaatcac

SEQ ID NO: 5000 - DNA, 70 bp, Homo sapiens
ctgaagctagtactactctttaggcagaaaaagtagtttagtaggtaggaacatataaaatcacctctct

SEQ ID NO: 5001 - DNA, 70 bp, Homo sapiens
ctactctttaggcagaaaaagtagtttagtaggtaggaacatataaaatcacctctcttcagatttggga

SEQ ID NO: 5002 - DNA, 69 bp, Homo sapiens
gcagaaaaagtagtttagtaggtaggaacatataaaatcacctctcttcagatttgggactttcggtta

SEQ ID NO: 5003 - DNA, 71 bp, Homo sapiens
agtagtttagtaggtaggaacatataaaatcacctctcttcagatttgggactttcggttatattctcaga

SEQ ID NO: 5004 - DNA, 70 bp, Homo sapiens
gtaggtaggaacatataaaatcacctctcttcagatttgggactttcggttatattctcagaatttttgg

SEQ ID NO: 5005 - DNA, 69 bp, Homo sapiens
catataaaatcacctctcttcagatttgggactttcggttatattctcagaatttttgggaattaaggg

SEQ ID NO: 5006 - DNA, 68 bp, Homo sapiens
ctctcttcagatttgggactttcggttatattctcagaatttttgggaattaaggggtaggattaaga

SEQ ID NO: 5007 - DNA, 68 bp, Homo sapiens
agatttgggactttcggttatattctcagaatttttgggaattaaggggtaggattaagagctgaatc

SEQ ID NO: 5008 - DNA, 72 bp, Homo sapiens
tttcggttatattctcagaatttttgggaattaaggggtaggattaagagctgaatcctgtagctcagtcta

SEQ ID NO: 5009 - DNA, 73 bp, Homo sapiens
ttctcagaatttttgggaattaaggggtaggattaagagctgaatcctgtagctcagtctagggcaatttcta

SEQ ID NO: 5010 - DNA, 71 bp, Homo sapiens
aatttttgggaattaaggggtaggattaagagctgaatcctgtagctcagtctagggcaatttctactata

SEQ ID NO: 5011 - DNA, 73 bp, Homo sapiens
aattaaggggtaggattaagagctgaatcctgtagctcagtctagggcaatttctactatagaatctagttta

SEQ ID NO: 5012 - DNA, 75 bp, Homo sapiens
gattaagagctgaatcctgtagctcagtctagggcaatttctactatagaatctagtttactccttgacagtttt

SEQ ID NO: 5013 - DNA, 76 bp, Homo sapiens
ctgtagctcagtctagggcaatttctactatagaatctagtttactccttgacagtttttgtttaatgcatgaata

SEQ ID NO: 5014 - DNA, 74 bp, Homo sapiens
agtctagggcaatttctactatagaatctagtttactccttgacagtttttgtttaatgcatgaatatctgccc

SEQ ID NO: 5015 - DNA, 72 bp, Homo sapiens
aatctagtttactccttgacagtttttgtttaatgcatgaatatctgcccctgcttcccattttggttgctt

SEQ ID NO: 5016 - DNA, 71 bp, Homo sapiens
gtttactccttgacagtttttgtttaatgcatgaatatctgcccctgcttcccattttggttgcttttggg

SEQ ID NO: 5017 - DNA, 71 bp, Homo sapiens
gtttttgtttaatgcatgaatatctgcccctgcttcccattttggttgcttttggggatcatttggttggt

SEQ ID NO: 5018 - DNA, 71 bp, Homo sapiens
tttaatgcatgaatatctgcccctgcttcccattttggttgcttttggggatcatttggttggttgttttt

SEQ ID NO: 5019 - DNA, 69 bp, Homo sapiens
atgaatatctgcccctgcttcccattttggttgcttttggggatcatttggttggttgttttttaactg

SEQ ID NO: 5020 - DNA, 65 bp, Homo sapiens
cccattttggttgcttttggggatcatttggttggttgttttttaactggtttctgttcatttgt

SEQ ID NO: 5021 - DNA, 67 bp, Homo sapiens
gcttttggggatcatttggttggttgttttttaactggtttctgttcatttgttttctacattggga

SEQ ID NO: 5022 - DNA, 69 bp, Homo sapiens
ggatcatttggttggttgttttttaactggtttctgttcatttgttttctacattgggaaaatctgtga

SEQ ID NO: 5023 - DNA, 71 bp, Homo sapiens
gttggttgttttttaactggtttctgttcatttgttttctacattgggaaaatctgtgatgtgatttcagc

SEQ ID NO: 5024 - DNA, 74 bp, Homo sapiens
tttaactggtttctgttcatttgttttctacattgggaaaatctgtgatgtgatttcagctttctcttaagcat

SEQ ID NO: 5025 - DNA, 76 bp, Homo sapiens
ctgttcatttgttttctacattgggaaaatctgtgatgtgatttcagctttctcttaagcattttaagatccatgt

SEQ ID NO: 5026 - DNA, 74 bp, Homo sapiens
gttttctacattgggaaaatctgtgatgtgatttcagctttctcttaagcattttaagatccatgtttacttaa

SEQ ID NO: 5027 - DNA, 71 bp, Homo sapiens
gtgatttcagctttctcttaagcattttaagatccatgtttacttaaaatttgtttgctttatatttgtaa

SEQ ID NO: 5028 - DNA, 70 bp, Homo sapiens
ctcttaagcattttaagatccatgtttacttaaaatttgtttgctttatatttgtaatgatattttgtgt

SEQ ID NO: 5029 - DNA, 71 bp, Homo sapiens
agcattttaagatccatgtttacttaaaatttgtttgctttatatttgtaatgatattttgtgttatttga

SEQ ID NO: 5030 - DNA, 73 bp, Homo sapiens
gatccatgtttacttaaaatttgtttgctttatatttgtaatgatattttgtgttatttgaatataggcactc

SEQ ID NO: 5031 - DNA, 75 bp, Homo sapiens
tgctttatatttgtaatgatattttgtgttatttgaatataggcactcttactagaaatttgttctatttcagtg

SEQ ID NO: 5032 - DNA, 73 bp, Homo sapiens
attttgtgttatttgaatataggcactcttactagaaatttgttctatttcagtgtaaagaattgagtcatat

SEQ ID NO: 5033 - DNA, 73 bp, Homo sapiens
gtgttatttgaatataggcactcttactagaaatttgttctatttcagtgtaaagaattgagtcatattaaaa

SEQ ID NO: 5034 - DNA, 75 bp, Homo sapiens
tataggcactcttactagaaatttgttctatttcagtgtaaagaattgagtcatattaaaataactcacatgttc

SEQ ID NO: 5035 - DNA, 71 bp, Homo sapiens
ctcttactagaaatttgttctatttcagtgtaaagaattgagtcatattaaaataactcacatgttctttt

SEQ ID NO: 5036 - DNA, 74 bp, Homo sapiens
tctttttctttcttatgttatgcctaaatattaatttctagtattgggctttctgatgaacttgtcttgatgat

SEQ ID NO: 5037 - DNA, 76 bp, Homo sapiens
gttatgcctaaatattaatttctagtattgggctttctgatgaacttgtcttgatgattagtgataatgaaattct

SEQ ID NO: 5038 - DNA, 78 bp, Homo sapiens
ttaatttctagtattgggctttctgatgaacttgtcttgatgattagtgataatgaaattctttcttatatgttagca

SEQ ID NO: 5039 - DNA, 77 bp, Homo sapiens
ctagtattgggctttctgatgaacttgtcttgatgattagtgataatgaaattctttcttatatgttagcaaatctt

SEQ ID NO: 5040 - DNA, 76 bp, Homo sapiens
gggctttctgatgaacttgtcttgatgattagtgataatgaaattctttcttatatgttagcaaatctttttaata

SEQ ID NO: 5041 - DNA, 74 bp, Homo sapiens
cttgtcttgatgattagtgataatgaaattctttcttatatgttagcaaatctttttaataatttactctagag

SEQ ID NO: 5042 - DNA, 73 bp, Homo sapiens
tgattagtgataatgaaattctttcttatatgttagcaaatctttttaataatttactctagagttttcctga

SEQ ID NO: 5043 - DNA, 71 bp, Homo sapiens
gtgataatgaaattctttcttatatgttagcaaatctttttaataatttactctagagttttcctgagagg

SEQ ID NO: 5044 - DNA, 71 bp, Homo sapiens
ctttcttatatgttagcaaatctttttaataatttactctagagttttcctgagaggtaacttcaagctca

SEQ ID NO: 5045 - DNA, 73 bp, Homo sapiens
tgttagcaaatctttttaataatttactctagagttttcctgagaggtaacttcaagctcagtattgcattct

SEQ ID NO: 5046 - DNA, 73 bp, Homo sapiens
aatttactctagagttttcctgagaggtaacttcaagctcagtattgcattctttgtaaaattcactttctga

SEQ ID NO: 5047 - DNA, 74 bp, Homo sapiens
actctagagttttcctgagaggtaacttcaagctcagtattgcattctttgtaaaattcactttctgatttgtc

SEQ ID NO: 5048 - DNA, 75 bp, Homo sapiens
tttcctgagaggtaacttcaagctcagtattgcattctttgtaaaattcactttctgatttgtcccagacatttc

SEQ ID NO: 5049 - DNA, 78 bp, Homo sapiens
taacttcaagctcagtattgcattctttgtaaaattcactttctgatttgtcccagacatttctgtctatggttcaca

SEQ ID NO: 5050 - DNA, 76 bp, Homo sapiens
agtattgcattctttgtaaaattcactttctgatttgtcccagacatttctgtctatggttcacagattacatacg

SEQ ID NO: 5051 - DNA, 76 bp, Homo sapiens
tctttgtaaaattcactttctgatttgtcccagacatttctgtctatggttcacagattacatacgtactcttcaa

SEQ ID NO: 5052 - DNA, 74 bp, Homo sapiens
gtaaaattcactttctgatttgtcccagacatttctgtctatggttcacagattacatacgtactcttcaaaac

SEQ ID NO: 5053 - DNA, 78 bp, Homo sapiens
cagacatttctgtctatggttcacagattacatacgtactcttcaaaactctgaattcctcttggccttaagatatga

SEQ ID NO: 5054 - DNA, 76 bp, Homo sapiens
tgtctatggttcacagattacatacgtactcttcaaaactctgaattcctcttggccttaagatatgaacttacaa

SEQ ID NO: 5055 - DNA, 74 bp, Homo sapiens
atggttcacagattacatacgtactcttcaaaactctgaattcctcttggccttaagatatgaacttacaagta

SEQ ID NO: 5056 - DNA, 74 bp, Homo sapiens
tctgaattcctcttggccttaagatatgaacttacaagtattatcttcactgctcctttaaatagtcctatacc

SEQ ID NO: 5057 - DNA, 72 bp, Homo sapiens
cttggccttaagatatgaacttacaagtattatcttcactgctcctttaaatagtcctatacctgttctagt

SEQ ID NO: 5058 - DNA, 72 bp, Homo sapiens
tgaacttacaagtattatcttcactgctcctttaaatagtcctatacctgttctagtttgaaaactgaaaca

SEQ ID NO: 5059 - DNA, 71 bp, Homo sapiens
agtattatcttcactgctcctttaaatagtcctatacctgttctagtttgaaaactgaaacattggacctg

SEQ ID NO: 5060 - DNA, 70 bp, Homo sapiens
tgctcctttaaatagtcctatacctgttctagtttgaaaactgaaacattggacctgtctcttggttgtt

SEQ ID NO: 5061 - DNA, 72 bp, Homo sapiens
ttaaatagtcctatacctgttctagtttgaaaactgaaacattggacctgtctcttggttgtttgtcttgca

SEQ ID NO: 5062 - DNA, 70 bp, Homo sapiens
atacctgttctagtttgaaaactgaaacattggacctgtctcttggttgtttgtcttgcactaaacttaa

SEQ ID NO: 5063 - DNA, 67 bp, Homo sapiens
gtttgaaaactgaaacattggacctgtctcttggttgtttgtcttgcactaaacttaagttaaaaac

SEQ ID NO: 5064 - DNA, 70 bp, Homo sapiens
aaactgaaacattggacctgtctcttggttgtttgtcttgcactaaacttaagttaaaaactcctgcata

SEQ ID NO: 5065 - DNA, 71 bp, Homo sapiens
attggacctgtctcttggttgtttgtcttgcactaaacttaagttaaaaactcctgcataggctgggtgtg

SEQ ID NO: 5066 - DNA, 67 bp, Homo sapiens
acaaaaaaacccctctcctgtataactgtctttagcttctttacggggaaagcagttcattctggaa

SEQ ID NO: 5067 - DNA, 68 bp, Homo sapiens
cctctcctgtataactgtctttagcttctttacggggaaagcagttcattctggaactaaacccagtt

SEQ ID NO: 5068 - DNA, 68 bp, Homo sapiens
tgtataactgtctttagcttctttacggggaaagcagttcattctggaactaaacccagtttaacatt

SEQ ID NO: 5069 - DNA, 68 bp, Homo sapiens
ttagcttctttacggggaaagcagttcattctggaactaaacccagtttaacatttaggttcattaca

SEQ ID NO: 5070 - DNA, 69 bp, Homo sapiens
tttacggggaaagcagttcattctggaactaaacccagtttaacatttaggttcattacagagagcaaa

SEQ ID NO: 5071 - DNA, 77 bp, Homo sapiens
ggaaagcagttcattctggaactaaacccagtttaacatttaggttcattacagagagcaaatgatgctgcattgat

SEQ ID NO: 5072 - DNA, 76 bp, Homo sapiens
aaagcagttcattctggaactaaacccagtttaacatttaggttcattacagagagcaaatgatgctgcattgatt

SEQ ID NO: 5073 - DNA, 75 bp, Homo sapiens
attctggaactaaacccagtttaacatttaggttcattacagagagcaaatgatgctgcattgatttccttgaaa

SEQ ID NO: 5074 - DNA, 75 bp, Homo sapiens
tggaactaaacccagtttaacatttaggttcattacagagagcaaatgatgctgcattgatttccttgaaactat

SEQ ID NO: 5075 - DNA, 74 bp, Homo sapiens
ctaaacccagtttaacatttaggttcattacagagagcaaatgatgctgcattgatttccttgaaactatttgg

SEQ ID NO: 5076 - DNA, 76 bp, Homo sapiens
gtttaacatttaggttcattacagagagcaaatgatgctgcattgatttccttgaaactatttggtaatgttatta

SEQ ID NO: 5077 - DNA, 76 bp, Homo sapiens
ttaggttcattacagagagcaaatgatgctgcattgatttccttgaaactatttggtaatgttattattataaacg

SEQ ID NO: 5078 - DNA, 75 bp, Homo sapiens
aggttcattacagagagcaaatgatgctgcattgatttccttgaaactatttggtaatgttattattataaacgt

SEQ ID NO: 5079 - DNA, 75 bp, Homo sapiens
acagagagcaaatgatgctgcattgatttccttgaaactatttggtaatgttattattataaacgtttctctccc

SEQ ID NO: 5080 - DNA, 73 bp, Homo sapiens
gagcaaatgatgctgcattgatttccttgaaactatttggtaatgttattattataaacgtttctctcccttt

SEQ ID NO: 5081 - DNA, 71 bp, Homo sapiens
tgctgcattgatttccttgaaactatttggtaatgttattattataaacgtttctctcccttttgtttctg

SEQ ID NO: 5082 - DNA, 65 bp, Homo sapiens
ccttgaaactatttggtaatgttattattataaacgtttctctcccttttgtttctgtcctttct

SEQ ID NO: 5083 - DNA, 64 bp, Homo sapiens
aactatttggtaatgttattattataaacgtttctctcccttttgtttctgtcctttctttctt

SEQ ID NO: 5084 - DNA, 65 bp, Homo sapiens
cccttgctcttgattttcatcatgggtgccttacctactttctttaaattttgaaaacttttttt

SEQ ID NO: 5085 - DNA, 62 bp, Homo sapiens
tttttttttaggttttggttatgtttttttgggggggtagataagagtctaccttgtgcttg

SEQ ID NO: 5086 - DNA, 64 bp, Homo sapiens
ttttaggttttggttatgtttttttgggggggtagataagagtctaccttgtgcttgtttaagc

SEQ ID NO: 5087 - DNA, 67 bp, Homo sapiens
ttatgtttttttgggggggtagataagagtctaccttgtgcttgtttaagccatacctttctgtaaa

SEQ ID NO: 5088 - DNA, 65 bp, Homo sapiens
tttttgggggggtagataagagtctaccttgtgcttgtttaagccatacctttctgtaaaaaaaa

SEQ ID NO: 5089 - DNA, 67 bp, Homo sapiens
ggtagataagagtctaccttgtgcttgtttaagccatacctttctgtaaaaaaaataaacagaattt

SEQ ID NO: 5090 - DNA, 67 bp, Homo sapiens
tgcttgtttaagccatacctttctgtaaaaaaaataaacagaatttttctcacacggctattttaag

SEQ ID NO: 5091 - DNA, 71 bp, Homo sapiens
gccatacctttctgtaaaaaaaataaacagaatttttctcacacggctattttaaggattgagatatcatg

SEQ ID NO: 5092 - DNA, 72 bp, Homo sapiens
ctgtaaaaaaaataaacagaatttttctcacacggctattttaaggattgagatatcatgtgtattcataaa

SEQ ID NO: 5093 - DNA, 73 bp, Homo sapiens
gaatttttctcacacggctattttaaggattgagatatcatgtgtattcataaaatataaacttttacagttc

SEQ ID NO: 5094 - DNA, 77 bp, Homo sapiens
taaggattgagatatcatgtgtattcataaaatataaacttttacagttctgattttgtattgctaattatacatac

SEQ ID NO: 5095 - DNA, 76 bp, Homo sapiens
atataaacttttacagttctgattttgtattgctaattatacatactgattcaactgagagtgacgttggctgtct

SEQ ID NO: 5096 - DNA, 78 bp, Homo sapiens
tttacagttctgattttgtattgctaattatacatactgattcaactgagagtgacgttggctgtcttgacctaacaa

SEQ ID NO: 5097 - DNA, 81 bp, Homo sapiens
tgattttgtattgctaattatacatactgattcaactgagagtgacgttggctgtcttgacctaacaagcagtgaagataa

SEQ ID NO: 5098 - DNA, 81 bp, Homo sapiens
tattgctaattatacatactgattcaactgagagtgacgttggctgtcttgacctaacaagcagtgaagataatacttgta

SEQ ID NO: 5099 - DNA, 78 bp, Homo sapiens
taattatacatactgattcaactgagagtgacgttggctgtcttgacctaacaagcagtgaagataatacttgtaagt

SEQ ID NO: 5100 - DNA, 80 bp, Homo sapiens
ttatacatactgattcaactgagagtgacgttggctgtcttgacctaacaagcagtgaagataatacttgtaagttcata

SEQ ID NO: 5101 - DNA, 80 bp, Homo sapiens
atactgattcaactgagagtgacgttggctgtcttgacctaacaagcagtgaagataatacttgtaagttcatatcttca

SEQ ID NO: 5102 - DNA, 79 bp, Homo sapiens
attcaactgagagtgacgttggctgtcttgacctaacaagcagtgaagataatacttgtaagttcatatcttcaggcca

SEQ ID NO: 5103 - DNA, 77 bp, Homo sapiens
aactgagagtgacgttggctgtcttgacctaacaagcagtgaagataatacttgtaagttcatatcttcaggccaag

SEQ ID NO: 5104 - DNA, 75 bp, Homo sapiens
agtgacgttggctgtcttgacctaacaagcagtgaagataatacttgtaagttcatatcttcaggccaaggggaa

SEQ ID NO: 5105 - DNA, 75 bp, Homo sapiens
acgttggctgtcttgacctaacaagcagtgaagataatacttgtaagttcatatcttcaggccaaggggaattca

SEQ ID NO: 5106 - DNA, 75 bp, Homo sapiens
acctaacaagcagtgaagataatacttgtaagttcatatcttcaggccaaggggaattcacagttctgaagagta

SEQ ID NO: 5107 - DNA, 77 bp, Homo sapiens
aagcagtgaagataatacttgtaagttcatatcttcaggccaaggggaattcacagttctgaagagtacatatgtaa

SEQ ID NO: 5108 - DNA, 77 bp, Homo sapiens
aagataatacttgtaagttcatatcttcaggccaaggggaattcacagttctgaagagtacatatgtaatctgtgaa

SEQ ID NO: 5109 - DNA, 78 bp, Homo sapiens
ttgtaagttcatatcttcaggccaaggggaattcacagttctgaagagtacatatgtaatctgtgaactacacacaaa

SEQ ID NO: 5110 - DNA, 80 bp, Homo sapiens
tatcttcaggccaaggggaattcacagttctgaagagtacatatgtaatctgtgaactacacacaaagctcatctgttaa

SEQ ID NO: 5111 - DNA, 77 bp, Homo sapiens
caaggggaattcacagttctgaagagtacatatgtaatctgtgaactacacacaaagctcatctgttaacagttttc

SEQ ID NO: 5112 - DNA, 77 bp, Homo sapiens
aattcacagttctgaagagtacatatgtaatctgtgaactacacacaaagctcatctgttaacagttttccgaaatc

SEQ ID NO: 5113 - DNA, 79 bp, Homo sapiens
ttctgaagagtacatatgtaatctgtgaactacacacaaagctcatctgttaacagttttccgaaatctctgactattc

SEQ ID NO: 5114 - DNA, 75 bp, Homo sapiens
tacatatgtaatctgtgaactacacacaaagctcatctgttaacagttttccgaaatctctgactattccctttt

SEQ ID NO: 5115 - DNA, 83 bp, Homo sapiens
aggcatgagccgctgcacctggccatctgtgacttattttaatggccattatatgcttgcataatgattttttttcaagcaca

SEQ ID NO: 5116 - DNA, 80 bp, Homo sapiens
cgctgcacctggccatctgtgacttattttaatggccattatatgcttgcataatgattttttttcaagcacacctctgt

SEQ ID NO: 5117 - DNA, 80 bp, Homo sapiens
tggccatctgtgacttattttaatggccattatatgcttgcataatgattttttttcaagcacacctctgttgttgaaca

SEQ ID NO: 5118 - DNA, 76 bp, Homo sapiens
gtgacttattttaatggccattatatgcttgcataatgattttttttcaagcacacctctgttgttgaacaagttg

SEQ ID NO: 5119 - DNA, 75 bp, Homo sapiens
ttttaatggccattatatgcttgcataatgattttttttcaagcacacctctgttgttgaacaagttgtttacat

SEQ ID NO: 5120 - DNA, 74 bp, Homo sapiens
ccattatatgcttgcataatgattttttttcaagcacacctctgttgttgaacaagttgtttacatttttctcc

SEQ ID NO: 5121 - DNA, 73 bp, Homo sapiens
cttgcataatgattttttttcaagcacacctctgttgttgaacaagttgtttacatttttctccccattgcaa

SEQ ID NO: 5122 - DNA, 73 bp, Homo sapiens
tttttcaagcacacctctgttgttgaacaagttgtttacatttttctccccattgcaaatagaagtatgataa

SEQ ID NO: 5123 - DNA, 74 bp, Homo sapiens
caagcacacctctgttgttgaacaagttgtttacatttttctccccattgcaaatagaagtatgataaactgta

SEQ ID NO: 5124 - DNA, 71 bp, Homo sapiens
ctgttgttgaacaagttgtttacatttttctccccattgcaaatagaagtatgataaactgtatttaaatc

SEQ ID NO: 5125 - DNA, 70 bp, Homo sapiens
gttgtttacatttttctccccattgcaaatagaagtatgataaactgtatttaaatctttgtacaccttg

SEQ ID NO: 5126 - DNA, 73 bp, Homo sapiens
catttttctccccattgcaaatagaagtatgataaactgtatttaaatctttgtacaccttgttagatgtgaa

SEQ ID NO: 5127 - DNA, 72 bp, Homo sapiens
cccattgcaaatagaagtatgataaactgtatttaaatctttgtacaccttgttagatgtgaaattactagg

SEQ ID NO: 5128 - DNA, 74 bp, Homo sapiens
agaagtatgataaactgtatttaaatctttgtacaccttgttagatgtgaaattactaggtcacatggtatgag

SEQ ID NO: 5129 - DNA, 75 bp, Homo sapiens
gaagtatgataaactgtatttaaatctttgtacaccttgttagatgtgaaattactaggtcacatggtatgagta

SEQ ID NO: 5130 - DNA, 72 bp, Homo sapiens
gataaactgtatttaaatctttgtacaccttgttagatgtgaaattactaggtcacatggtatgagtatttt

SEQ ID NO: 5131 - DNA, 72 bp, Homo sapiens
ctgtatttaaatctttgtacaccttgttagatgtgaaattactaggtcacatggtatgagtatttttatagt

SEQ ID NO: 5132 - DNA, 71 bp, Homo sapiens
gtatttaaatctttgtacaccttgttagatgtgaaattactaggtcacatggtatgagtatttttatagtt

SEQ ID NO: 5133 - DNA, 73 bp, Homo sapiens
tctttgtacaccttgttagatgtgaaattactaggtcacatggtatgagtatttttatagtttctaactcttg

SEQ ID NO: 5134 - DNA, 72 bp, Homo sapiens
ctttgtacaccttgttagatgtgaaattactaggtcacatggtatgagtatttttatagtttctaactcttg

SEQ ID NO: 5135 - DNA, 71 bp, Homo sapiens
gtacaccttgttagatgtgaaattactaggtcacatggtatgagtatttttatagtttctaactcttgttt

SEQ ID NO: 5136 - DNA, 70 bp, Homo sapiens
ccttgttagatgtgaaattactaggtcacatggtatgagtatttttatagtttctaactcttgttttaaa

SEQ ID NO: 5137 - DNA, 72 bp, Homo sapiens
gatgtgaaattactaggtcacatggtatgagtatttttatagtttctaactcttgttttaaaaattgtcagc

SEQ ID NO: 5138 - DNA, 72 bp, Homo sapiens
ctaggtcacatggtatgagtatttttatagtttctaactcttgttttaaaaattgtcagcttggctcagtag

SEQ ID NO: 5139 - DNA, 76 bp, Homo sapiens
tcacatggtatgagtatttttatagtttctaactcttgttttaaaaattgtcagcttggctcagtagtgtgtgcca

SEQ ID NO: 5140 - DNA, 72 bp, Homo sapiens
atttttatagtttctaactcttgttttaaaaattgtcagcttggctcagtagtgtgtgccaatagtcccaga

SEQ ID NO: 5141 - DNA, 73 bp, Homo sapiens
aactcttgttttaaaaattgtcagcttggctcagtagtgtgtgccaatagtcccagatatttgggaggctaag

SEQ ID NO: 5142 - DNA, 70 bp, Homo sapiens
gccagcctggggaaaatagcaagacccagtctctttaagaacaaaaataagtgttctttatatgtttaca

SEQ ID NO: 5143 - DNA, 68 bp, Homo sapiens
gggaaaatagcaagacccagtctctttaagaacaaaaataagtgttctttatatgtttacattttctc

SEQ ID NO: 5144 - DNA, 72 bp, Homo sapiens
caagacccagtctctttaagaacaaaaataagtgttctttatatgtttacattttctctagtaatgtatgca

SEQ ID NO: 5145 - DNA, 74 bp, Homo sapiens
ccagtctctttaagaacaaaaataagtgttctttatatgtttacattttctctagtaatgtatgcaagtgctca

SEQ ID NO: 5146 - DNA, 74 bp, Homo sapiens
gaacaaaaataagtgttctttatatgtttacattttctctagtaatgtatgcaagtgctcatttccctaggcag

SEQ ID NO: 5147 - DNA, 78 bp, Homo sapiens
gtgttctttatatgtttacattttctctagtaatgtatgcaagtgctcatttccctaggcagttattagatcttgtca

SEQ ID NO: 5148 - DNA, 74 bp, Homo sapiens
tctagtaatgtatgcaagtgctcatttccctaggcagttattagatcttgtcattaaaaacaaaacccaacaac

SEQ ID NO: 5149 - DNA, 63 bp, Homo sapiens
aaaaacaaaacccaacaactttggtcactatataggagaaaaatactacctttagttgtttta

SEQ ID NO: 5150 - DNA, 71 bp, Homo sapiens
ttggtcactatataggagaaaaatactacctttagttgttttaatacttgggttgcatgtttctgttgctg

SEQ ID NO: 5151 - DNA, 70 bp, Homo sapiens
tataggagaaaaatactacctttagttgttttaatacttgggttgcatgtttctgttgctgtttactggc

SEQ ID NO: 5152 - DNA, 69 bp, Homo sapiens
gagaaaaatactacctttagttgttttaatacttgggttgcatgtttctgttgctgtttactggctctt

SEQ ID NO: 5153 - DNA, 67 bp, Homo sapiens
cctttagttgttttaatacttgggttgcatgtttctgttgctgtttactggctctttttttttgcgg

SEQ ID NO: 5154 - DNA, 67 bp, Homo sapiens
ttgttttaatacttgggttgcatgtttctgttgctgtttactggctctttttttttgcggggggcgg

SEQ ID NO: 5155 - DNA, 67 bp, Homo sapiens
acttgggttgcatgtttctgttgctgtttactggctctttttttttgcggggggcggggggattgcc

SEQ ID NO: 5156 - DNA, 69 bp, Homo sapiens
atgtttctgttgctgtttactggctctttttttttgcggggggcggggggattgcccagtcatgtccaa

SEQ ID NO: 5157 - DNA, 70 bp, Homo sapiens
tgtttactggctctttttttttgcggggggcggggggattgcccagtcatgtccaatggcatatgtattt

SEQ ID NO: 5158 - DNA, 69 bp, Homo sapiens
tctttttttttgcggggggcggggggattgcccagtcatgtccaatggcatatgtattttcttatttat

SEQ ID NO: 5159 - DNA, 69 bp, Homo sapiens
tttttgcggggggcggggggattgcccagtcatgtccaatggcatatgtattttcttatttattaaaaa

SEQ ID NO: 5160 - DNA, 69 bp, Homo sapiens
ggggcggggggattgcccagtcatgtccaatggcatatgtattttcttatttattaaaaaatttaaaca

SEQ ID NO: 5161 - DNA, 65 bp, Homo sapiens
ttttgttttttaatgatttgttttttaatttgcatagctaagtctgtgttttccctttctgtttt

SEQ ID NO: 5162 - DNA, 61 bp, Homo sapiens
ttttattttttgggggggaggttagaaaagtctttccttccttaaagtcagatactttaaa

SEQ ID NO: 5163 - DNA, 64 bp, Homo sapiens
tgggggggaggttagaaaagtctttccttccttaaagtcagatactttaaaaatactttctagc

SEQ ID NO: 5164 - DNA, 65 bp, Homo sapiens
gggaggttagaaaagtctttccttccttaaagtcagatactttaaaaatactttctagctgactt

SEQ ID NO: 5165 - DNA, 66 bp, Homo sapiens
aaaagtctttccttccttaaagtcagatactttaaaaatactttctagctgactttgatgttattt

SEQ ID NO: 5166 - DNA, 66 bp, Homo sapiens
ccttccttaaagtcagatactttaaaaatactttctagctgactttgatgttattttaatttttac

SEQ ID NO: 5167 - DNA, 65 bp, Homo sapiens
actttctagctgactttgatgttattttaatttttacttaaccctttaacccatctggattttgt

SEQ ID NO: 5168 - DNA, 65 bp, Homo sapiens
tagctgactttgatgttattttaatttttacttaaccctttaacccatctggattttgttttatt

SEQ ID NO: 5169 - DNA, 66 bp, Homo sapiens
ttgttttattttgtctaagatattttcccctaaattattaaccagttctagtaccattattaagta

SEQ ID NO: 5170 - DNA, 66 bp, Homo sapiens
tttgtctaagatattttcccctaaattattaaccagttctagtaccattattaagtaattttagtc

SEQ ID NO: 5171 - DNA, 67 bp, Homo sapiens
tattttcccctaaattattaaccagttctagtaccattattaagtaattttagtctttgccttctga

SEQ ID NO: 5172 - DNA, 67 bp, Homo sapiens
cctaaattattaaccagttctagtaccattattaagtaattttagtctttgccttctgatttggaac

SEQ ID NO: 5173 - DNA, 69 bp, Homo sapiens
aaccagttctagtaccattattaagtaattttagtctttgccttctgatttggaacctcctctttatca

SEQ ID NO: 5174 - DNA, 71 bp, Homo sapiens
ttctagtaccattattaagtaattttagtctttgccttctgatttggaacctcctctttatcatatactaa

SEQ ID NO: 5175 - DNA, 70 bp, Homo sapiens
attattaagtaattttagtctttgccttctgatttggaacctcctctttatcatatactaaattttcata

SEQ ID NO: 5176 - DNA, 73 bp, Homo sapiens
tagtctttgccttctgatttggaacctcctctttatcatatactaaattttcatatataattgactcttttcc

SEQ ID NO: 5177 - DNA, 69 bp, Homo sapiens
gatttggaacctcctctttatcatatactaaattttcatatataattgactcttttcctgggttttccc

SEQ ID NO: 5178 - DNA, 69 bp, Homo sapiens
ctcctctttatcatatactaaattttcatatataattgactcttttcctgggttttccctttcttaatc

SEQ ID NO: 5179 - DNA, 68 bp, Homo sapiens
tactaaattttcatatataattgactcttttcctgggttttccctttcttaatctgtttaaatcaaca

SEQ ID NO: 5180 - DNA, 69 bp, Homo sapiens
tcatatataattgactcttttcctgggttttccctttcttaatctgtttaaatcaacatatgtttttag

SEQ ID NO: 5181 - DNA, 69 bp, Homo sapiens
tcctgggttttccctttcttaatctgtttaaatcaacatatgtttttagtgacagtcattagacttctt

SEQ ID NO: 5182 - DNA, 75 bp, Homo sapiens
tccctttcttaatctgtttaaatcaacatatgtttttagtgacagtcattagacttctttgattcacatttgata

SEQ ID NO: 5183 - DNA, 83 bp, Homo sapiens
atatgtttttagtgacagtcattagacttctttgattcacatttgataggctgttcatatggatataagccatgcacagtgtg

SEQ ID NO: 5184 - DNA, 85 bp, Homo sapiens
ttagtgacagtcattagacttctttgattcacatttgataggctgttcatatggatataagccatgcacagtgtgttccagtgaa

SEQ ID NO: 5185 - DNA, 82 bp, Homo sapiens
attagacttctttgattcacatttgataggctgttcatatggatataagccatgcacagtgtgttccagtgaacacttgtaa

SEQ ID NO: 5186 - DNA, 88 bp, Homo sapiens
tttgattcacatttgataggctgttcatatggatataagccatgcacagtgtgttccagtgaacacttgtaatgctcattgcaggata

SEQ ID NO: 5187 - DNA, 85 bp, Homo sapiens
atttgataggctgttcatatggatataagccatgcacagtgtgttccagtgaacacttgtaatgctcattgcaggatacatttct

SEQ ID NO: 5188 - DNA, 87 bp, Homo sapiens
atggatataagccatgcacagtgtgttccagtgaacacttgtaatgctcattgcaggatacatttcttgatgtatcacagaggacca

SEQ ID NO: 5189 - DNA, 84 bp, Homo sapiens
tgcacagtgtgttccagtgaacacttgtaatgctcattgcaggatacatttcttgatgtatcacagaggaccagagttctttat

SEQ ID NO: 5190 - DNA, 82 bp, Homo sapiens
tgtgttccagtgaacacttgtaatgctcattgcaggatacatttcttgatgtatcacagaggaccagagttctttattgttc

SEQ ID NO: 5191 - DNA, 81 bp, Homo sapiens
aacacttgtaatgctcattgcaggatacatttcttgatgtatcacagaggaccagagttctttattgttccatgatttgct

SEQ ID NO: 5192 - DNA, 83 bp, Homo sapiens
taatgctcattgcaggatacatttcttgatgtatcacagaggaccagagttctttattgttccatgatttgctttgtatgatt

SEQ ID NO: 5193 - DNA, 78 bp, Homo sapiens
ttgcaggatacatttcttgatgtatcacagaggaccagagttctttattgttccatgatttgctttgtatgatttttt

SEQ ID NO: 5194 - DNA, 78 bp, Homo sapiens
catttcttgatgtatcacagaggaccagagttctttattgttccatgatttgctttgtatgatttttttacatctcta

SEQ ID NO: 5195 - DNA, 77 bp, Homo sapiens
gtatcacagaggaccagagttctttattgttccatgatttgctttgtatgatttttttacatctctatattgtatgt

SEQ ID NO: 5196 - DNA, 76 bp, Homo sapiens
ggaccagagttctttattgttccatgatttgctttgtatgatttttttacatctctatattgtatgttttcacaca

SEQ ID NO: 5197 - DNA, 79 bp, Homo sapiens
ttctttattgttccatgatttgctttgtatgatttttttacatctctatattgtatgttttcacacatgtacatgtgta

SEQ ID NO: 5198 - DNA, 78 bp, Homo sapiens
ttccatgatttgctttgtatgatttttttacatctctatattgtatgttttcacacatgtacatgtgtattttttgcc

SEQ ID NO: 5199 - DNA, 75 bp, Homo sapiens
gctttgtatgatttttttacatctctatattgtatgttttcacacatgtacatgtgtattttttgccttttactc

SEQ ID NO: 5200 - DNA, 76 bp, Homo sapiens
catctctatattgtatgttttcacacatgtacatgtgtattttttgccttttactctcatttgttttgcaagttgt

SEQ ID NO: 5201 - DNA, 70 bp, Homo sapiens
cacacatgtacatgtgtattttttgccttttactctcatttgttttgcaagttgttagggtttgtttgtt

SEQ ID NO: 5202 - DNA, 66 bp, Homo sapiens
acatgtgtattttttgccttttactctcatttgttttgcaagttgttagggtttgtttgtttactt

SEQ ID NO: 5203 - DNA, 69 bp, Homo sapiens
actctcatttgttttgcaagttgttagggtttgtttgtttacttttttgttattcaggatcattcacca

SEQ ID NO: 5204 - DNA, 71 bp, Homo sapiens
ttgcaagttgttagggtttgtttgtttacttttttgttattcaggatcattcaccattaaattatctcagc

SEQ ID NO: 5205 - DNA, 69 bp, Homo sapiens
agttgttagggtttgtttgtttacttttttgttattcaggatcattcaccattaaattatctcagctct

SEQ ID NO: 5206 - DNA, 72 bp, Homo sapiens
gtttgtttacttttttgttattcaggatcattcaccattaaattatctcagctcttataaccttgaagaaca

SEQ ID NO: 5207 - DNA, 74 bp, Homo sapiens
tttttgttattcaggatcattcaccattaaattatctcagctcttataaccttgaagaacaaagcccagaatgg

SEQ ID NO: 5208 - DNA, 77 bp, Homo sapiens
tcaggatcattcaccattaaattatctcagctcttataaccttgaagaacaaagcccagaatgggaagtagaatata

SEQ ID NO: 5209 - DNA, 76 bp, Homo sapiens
tcattcaccattaaattatctcagctcttataaccttgaagaacaaagcccagaatgggaagtagaatatatagag

SEQ ID NO: 5210 - DNA, 74 bp, Homo sapiens
attatctcagctcttataaccttgaagaacaaagcccagaatgggaagtagaatatatagagtaaaggaggata

SEQ ID NO: 5211 - DNA, 71 bp, Homo sapiens
agctcttataaccttgaagaacaaagcccagaatgggaagtagaatatatagagtaaaggaggatagaaag

SEQ ID NO: 5212 - DNA, 71 bp, Homo sapiens
cttgaagaacaaagcccagaatgggaagtagaatatatagagtaaaggaggatagaaaggcttcttaatta

SEQ ID NO: 5213 - DNA, 71 bp, Homo sapiens
gaacaaagcccagaatgggaagtagaatatatagagtaaaggaggatagaaaggcttcttaattatctttg

SEQ ID NO: 5214 - DNA, 71 bp, Homo sapiens
ccagaatgggaagtagaatatatagagtaaaggaggatagaaaggcttcttaattatctttgtagggagaa

SEQ ID NO: 5215 - DNA, 70 bp, Homo sapiens
aagtagaatatatagagtaaaggaggatagaaaggcttcttaattatctttgtagggagaaaaacattga

SEQ ID NO: 5216 - DNA, 71 bp, Homo sapiens
tatagagtaaaggaggatagaaaggcttcttaattatctttgtagggagaaaaacattgatataacactta

SEQ ID NO: 5217 - DNA, 70 bp, Homo sapiens
ggaggatagaaaggcttcttaattatctttgtagggagaaaaacattgatataacacttaaagaccagga

SEQ ID NO: 5218 - DNA, 72 bp, Homo sapiens
ggcttcttaattatctttgtagggagaaaaacattgatataacacttaaagaccaggatcatttcaacttca

SEQ ID NO: 5219 - DNA, 74 bp, Homo sapiens
atctttgtagggagaaaaacattgatataacacttaaagaccaggatcatttcaacttcatagactagagtgta

SEQ ID NO: 5220 - DNA, 73 bp, Homo sapiens
gggagaaaaacattgatataacacttaaagaccaggatcatttcaacttcatagactagagtgtataaatttg

SEQ ID NO: 5221 - DNA, 74 bp, Homo sapiens
cattgatataacacttaaagaccaggatcatttcaacttcatagactagagtgtataaatttgttattttggtg

SEQ ID NO: 5222 - DNA, 74 bp, Homo sapiens
cacttaaagaccaggatcatttcaacttcatagactagagtgtataaatttgttattttggtgtgtgtagttgc

SEQ ID NO: 5223 - DNA, 75 bp, Homo sapiens
gaccaggatcatttcaacttcatagactagagtgtataaatttgttattttggtgtgtgtagttgcccattttca

SEQ ID NO: 5224 - DNA, 76 bp, Homo sapiens
atcatttcaacttcatagactagagtgtataaatttgttattttggtgtgtgtagttgcccattttcatactgcta

SEQ ID NO: 5225 - DNA, 78 bp, Homo sapiens
tcacaattatggcagaaggcgaaggaggagtaaaggcaagtcttacgtggcggcaggcaggagacaatgtgcagggga

SEQ ID NO: 5226 - DNA, 75 bp, Homo sapiens
ggcagaaggcgaaggaggagtaaaggcaagtcttacgtggcggcaggcaggagacaatgtgcaggggaactgccc

SEQ ID NO: 5227 - DNA, 65 bp, Homo sapiens
caaaccatatcaatgtattaacttacaaaaatcctaatattgttattttagtttttttaaataaa

SEQ ID NO: 5228 - DNA, 77 bp, Homo sapiens
caggtgtgagccagtgtgcctggcctgtattgttattttgtttgtgctttctttagctcccatgacccaatcgtgta

SEQ ID NO: 5229 - DNA, 75 bp, Homo sapiens
ccagtgtgcctggcctgtattgttattttgtttgtgctttctttagctcccatgacccaatcgtgtattctagtc

SEQ ID NO: 5230 - DNA, 74 bp, Homo sapiens
tggcctgtattgttattttgtttgtgctttctttagctcccatgacccaatcgtgtattctagtctggtttcag

SEQ ID NO: 5231 - DNA, 73 bp, Homo sapiens
tgttattttgtttgtgctttctttagctcccatgacccaatcgtgtattctagtctggtttcagttacactgt

SEQ ID NO: 5232 - DNA, 73 bp, Homo sapiens
tttgtgctttctttagctcccatgacccaatcgtgtattctagtctggtttcagttacactgttgctttaaac

SEQ ID NO: 5233 - DNA, 73 bp, Homo sapiens
tttctttagctcccatgacccaatcgtgtattctagtctggtttcagttacactgttgctttaaaccactcca

SEQ ID NO: 5234 - DNA, 72 bp, Homo sapiens
catgacccaatcgtgtattctagtctggtttcagttacactgttgctttaaaccactccacgacttttagtg

SEQ ID NO: 5235 - DNA, 71 bp, Homo sapiens
atcgtgtattctagtctggtttcagttacactgttgctttaaaccactccacgacttttagtggcttatta

SEQ ID NO: 5236 - DNA, 70 bp, Homo sapiens
tattctagtctggtttcagttacactgttgctttaaaccactccacgacttttagtggcttattaagcgg

SEQ ID NO: 5237 - DNA, 72 bp, Homo sapiens
tggtttcagttacactgttgctttaaaccactccacgacttttagtggcttattaagcggtgggctcagcag

SEQ ID NO: 5238 - DNA, 73 bp, Homo sapiens
tgttgctttaaaccactccacgacttttagtggcttattaagcggtgggctcagcagggatgatttatctttc

SEQ ID NO: 5239 - DNA, 71 bp, Homo sapiens
ctttaaaccactccacgacttttagtggcttattaagcggtgggctcagcagggatgatttatctttcttc

SEQ ID NO: 5240 - DNA, 75 bp, Homo sapiens
actccacgacttttagtggcttattaagcggtgggctcagcagggatgatttatctttcttccatgtggtatctg

SEQ ID NO: 5241 - DNA, 74 bp, Homo sapiens
acgacttttagtggcttattaagcggtgggctcagcagggatgatttatctttcttccatgtggtatctgtcgg

SEQ ID NO: 5242 - DNA, 74 bp, Homo sapiens
ttttagtggcttattaagcggtgggctcagcagggatgatttatctttcttccatgtggtatctgtcgggttta

SEQ ID NO: 5243 - DNA, 74 bp, Homo sapiens
tttagtggcttattaagcggtgggctcagcagggatgatttatctttcttccatgtggtatctgtcgggtttac

SEQ ID NO: 5244 - DNA, 78 bp, Homo sapiens
ttattaagcggtgggctcagcagggatgatttatctttcttccatgtggtatctgtcgggtttactcatgaggattca

SEQ ID NO: 5245 - DNA, 78 bp, Homo sapiens
tattaagcggtgggctcagcagggatgatttatctttcttccatgtggtatctgtcgggtttactcatgaggattcat

SEQ ID NO: 5246 - DNA, 79 bp, Homo sapiens
gtgggctcagcagggatgatttatctttcttccatgtggtatctgtcgggtttactcatgaggattcattaagctggtg

SEQ ID NO: 5247 - DNA, 77 bp, Homo sapiens
agggatgatttatctttcttccatgtggtatctgtcgggtttactcatgaggattcattaagctggtggctagctgg

SEQ ID NO: 5248 - DNA, 77 bp, Homo sapiens
atgatttatctttcttccatgtggtatctgtcgggtttactcatgaggattcattaagctggtggctagctgggtgt

SEQ ID NO: 5249 - DNA, 78 bp, Homo sapiens
tccatgtggtatctgtcgggtttactcatgaggattcattaagctggtggctagctgggtgttcagtgttggtcttat

SEQ ID NO: 5250 - DNA, 79 bp, Homo sapiens
tggtatctgtcgggtttactcatgaggattcattaagctggtggctagctgggtgttcagtgttggtcttattcacatg

SEQ ID NO: 5251 - DNA, 84 bp, Homo sapiens
atgaggattcattaagctggtggctagctgggtgttcagtgttggtcttattcacatgtctggcgccaggcgctgctggctata

SEQ ID NO: 5252 - DNA, 83 bp, Homo sapiens
ttaagctggtggctagctgggtgttcagtgttggtcttattcacatgtctggcgccaggcgctgctggctataggctagagta

SEQ ID NO: 5253 - DNA, 82 bp, Homo sapiens
tagctgggtgttcagtgttggtcttattcacatgtctggcgccaggcgctgctggctataggctagagtacctcagttcacc

SEQ ID NO: 5254 - DNA, 84 bp, Homo sapiens
ttcagtgttggtcttattcacatgtctggcgccaggcgctgctggctataggctagagtacctcagttcaccctgtgatgtcat

SEQ ID NO: 5255 - DNA, 84 bp, Homo sapiens
ttggtcttattcacatgtctggcgccaggcgctgctggctataggctagagtacctcagttcaccctgtgatgtcattctccat

SEQ ID NO: 5256 - DNA, 84 bp, Homo sapiens
gccaggcgctgctggctataggctagagtacctcagttcaccctgtgatgtcattctccatttggcctctctatgagtagagtg

SEQ ID NO: 5257 - DNA, 83 bp, Homo sapiens
cgctgctggctataggctagagtacctcagttcaccctgtgatgtcattctccatttggcctctctatgagtagagtgtggaa

SEQ ID NO: 5258 - DNA, 81 bp, Homo sapiens
tataggctagagtacctcagttcaccctgtgatgtcattctccatttggcctctctatgagtagagtgtggaatgattctt

SEQ ID NO: 5259 - DNA, 80 bp, Homo sapiens
agtacctcagttcaccctgtgatgtcattctccatttggcctctctatgagtagagtgtggaatgattctttacatggtg

SEQ ID NO: 5260 - DNA, 83 bp, Homo sapiens
ttcaccctgtgatgtcattctccatttggcctctctatgagtagagtgtggaatgattctttacatggtggctgataactgag

SEQ ID NO: 5261 - DNA, 82 bp, Homo sapiens
atgtcattctccatttggcctctctatgagtagagtgtggaatgattctttacatggtggctgataactgaggtggcagagg

SEQ ID NO: 5262 - DNA, 82 bp, Homo sapiens
atttggcctctctatgagtagagtgtggaatgattctttacatggtggctgataactgaggtggcagaggtggaagccatga

SEQ ID NO: 5263 - DNA, 82 bp, Homo sapiens
tctatgagtagagtgtggaatgattctttacatggtggctgataactgaggtggcagaggtggaagccatgaagacttctta

SEQ ID NO: 5264 - DNA, 78 bp, Homo sapiens
agtagagtgtggaatgattctttacatggtggctgataactgaggtggcagaggtggaagccatgaagacttcttaaa

SEQ ID NO: 5265 - DNA, 75 bp, Homo sapiens
aatgattctttacatggtggctgataactgaggtggcagaggtggaagccatgaagacttcttaaacctccaggt

SEQ ID NO: 5266 - DNA, 78 bp, Homo sapiens
tacatggtggctgataactgaggtggcagaggtggaagccatgaagacttcttaaacctccaggttcttgagcttata

SEQ ID NO: 5267 - DNA, 75 bp, Homo sapiens
ataactgaggtggcagaggtggaagccatgaagacttcttaaacctccaggttcttgagcttatacaccatcact

SEQ ID NO: 5268 - DNA, 78 bp, Homo sapiens
tggaagccatgaagacttcttaaacctccaggttcttgagcttatacaccatcacttctgccacatcctgttgagtaa

SEQ ID NO: 5269 - DNA, 76 bp, Homo sapiens
aagacttcttaaacctccaggttcttgagcttatacaccatcacttctgccacatcctgttgagtaacacaagtca

SEQ ID NO: 5270 - DNA, 76 bp, Homo sapiens
ttaaacctccaggttcttgagcttatacaccatcacttctgccacatcctgttgagtaacacaagtcataaggtta

SEQ ID NO: 5271 - DNA, 74 bp, Homo sapiens
atcacttctgccacatcctgttgagtaacacaagtcataaggttaacccaggttcaagggagtggagaagagga

SEQ ID NO: 5272 - DNA, 74 bp, Homo sapiens
tgttgagtaacacaagtcataaggttaacccaggttcaagggagtggagaagaggatgtcttaggatgagaaga

SEQ ID NO: 5273 - DNA, 75 bp, Homo sapiens
aacacaagtcataaggttaacccaggttcaagggagtggagaagaggatgtcttaggatgagaagagcagtgata

SEQ ID NO: 5274 - DNA, 71 bp, Homo sapiens
ataaggttaacccaggttcaagggagtggagaagaggatgtcttaggatgagaagagcagtgataacccgt

SEQ ID NO: 5275 - DNA, 80 bp, Homo sapiens
gttcaagggagtggagaagaggatgtcttaggatgagaagagcagtgataacccgttgcagagaatatggcatgattctt

SEQ ID NO: 5276 - DNA, 79 bp, Homo sapiens
agggagtggagaagaggatgtcttaggatgagaagagcagtgataacccgttgcagagaatatggcatgattctttggg

SEQ ID NO: 5277 - DNA, 82 bp, Homo sapiens
aagaggatgtcttaggatgagaagagcagtgataacccgttgcagagaatatggcatgattctttggggagtcattatctgc

SEQ ID NO: 5278 - DNA, 83 bp, Homo sapiens
taggatgagaagagcagtgataacccgttgcagagaatatggcatgattctttggggagtcattatctgccacaatcaaaata

SEQ ID NO: 5279 - DNA, 78 bp, Homo sapiens
aagagcagtgataacccgttgcagagaatatggcatgattctttggggagtcattatctgccacaatcaaaataactt

SEQ ID NO: 5280 - DNA, 76 bp, Homo sapiens
ataacccgttgcagagaatatggcatgattctttggggagtcattatctgccacaatcaaaataactttaggataa

SEQ ID NO: 5281 - DNA, 77 bp, Homo sapiens
ttgcagagaatatggcatgattctttggggagtcattatctgccacaatcaaaataactttaggataaaaatgtttc

SEQ ID NO: 5282 - DNA, 72 bp, Homo sapiens
atggcatgattctttggggagtcattatctgccacaatcaaaataactttaggataaaaatgtttcctaaaa

SEQ ID NO: 5283 - DNA, 69 bp, Homo sapiens
ctttggggagtcattatctgccacaatcaaaataactttaggataaaaatgtttcctaaaaagtctgaa

SEQ ID NO: 5284 - DNA, 73 bp, Homo sapiens
agtcattatctgccacaatcaaaataactttaggataaaaatgtttcctaaaaagtctgaattagaagcatca

SEQ ID NO: 5285 - DNA, 70 bp, Homo sapiens
gccacaatcaaaataactttaggataaaaatgtttcctaaaaagtctgaattagaagcatcattgggtgg

SEQ ID NO: 5286 - DNA, 70 bp, Homo sapiens
aactttaggataaaaatgtttcctaaaaagtctgaattagaagcatcattgggtgggaagatagccgaga

SEQ ID NO: 5287 - DNA, 73 bp, Homo sapiens
taaaaatgtttcctaaaaagtctgaattagaagcatcattgggtgggaagatagccgagaacactctgggcaa

SEQ ID NO: 5288 - DNA, 75 bp, Homo sapiens
gaaaagaaaagagtattattatattaatttacatttactgttgctgaagtactgacagtgcagcctgaaaatatc

SEQ ID NO: 5289 - DNA, 75 bp, Homo sapiens
agagtattattatattaatttacatttactgttgctgaagtactgacagtgcagcctgaaaatatcttacgtact

SEQ ID NO: 5290 - DNA, 77 bp, Homo sapiens
tattaatttacatttactgttgctgaagtactgacagtgcagcctgaaaatatcttacgtacttagatcaggaatta

SEQ ID NO: 5291 - DNA, 75 bp, Homo sapiens
atttacatttactgttgctgaagtactgacagtgcagcctgaaaatatcttacgtacttagatcaggaattaaaa

SEQ ID NO: 5292 - DNA, 75 bp, Homo sapiens
actgttgctgaagtactgacagtgcagcctgaaaatatcttacgtacttagatcaggaattaaaagcagaaaaaa

SEQ ID NO: 5293 - DNA, 74 bp, Homo sapiens
aagtactgacagtgcagcctgaaaatatcttacgtacttagatcaggaattaaaagcagaaaaaatggcagtat

SEQ ID NO: 5294 - DNA, 71 bp, Homo sapiens
agtgcagcctgaaaatatcttacgtacttagatcaggaattaaaagcagaaaaaatggcagtattttgggg

SEQ ID NO: 5295 - DNA, 68 bp, Homo sapiens
gaaaatatcttacgtacttagatcaggaattaaaagcagaaaaaatggcagtattttgggggtattaa

SEQ ID NO: 5296 - DNA, 67 bp, Homo sapiens
cgtacttagatcaggaattaaaagcagaaaaaatggcagtattttgggggtattaaagtaaaacatc

SEQ ID NO: 5297 - DNA, 68 bp, Homo sapiens
gatcaggaattaaaagcagaaaaaatggcagtattttgggggtattaaagtaaaacatctgtctttaa

SEQ ID NO: 5298 - DNA, 71 bp, Homo sapiens
gcagaaaaaatggcagtattttgggggtattaaagtaaaacatctgtctttaatttgtatgcattgtgttc

SEQ ID NO: 5299 - DNA, 73 bp, Homo sapiens
aatggcagtattttgggggtattaaagtaaaacatctgtctttaatttgtatgcattgtgttctgcttgtatg

SEQ ID NO: 5300 - DNA, 70 bp, Homo sapiens
ttgggggtattaaagtaaaacatctgtctttaatttgtatgcattgtgttctgcttgtatgtaaaccttt

SEQ ID NO: 5301 - DNA, 75 bp, Homo sapiens
taaagtaaaacatctgtctttaatttgtatgcattgtgttctgcttgtatgtaaacctttttaggatgacagaga

SEQ ID NO: 5302 - DNA, 78 bp, Homo sapiens
catctgtctttaatttgtatgcattgtgttctgcttgtatgtaaacctttttaggatgacagagataccaatctttca

SEQ ID NO: 5303 - DNA, 76 bp, Homo sapiens
ctttaatttgtatgcattgtgttctgcttgtatgtaaacctttttaggatgacagagataccaatctttcatggct

SEQ ID NO: 5304 - DNA, 77 bp, Homo sapiens
atgcattgtgttctgcttgtatgtaaacctttttaggatgacagagataccaatctttcatggcttgaaaagattaa

SEQ ID NO: 5305 - DNA, 73 bp, Homo sapiens
tatgtaaacctttttaggatgacagagataccaatctttcatggcttgaaaagattaagggccctcaatggtc

SEQ ID NO: 5306 - DNA, 74 bp, Homo sapiens
tttttaggatgacagagataccaatctttcatggcttgaaaagattaagggccctcaatggtctgatttaagct

SEQ ID NO: 5307 - DNA, 75 bp, Homo sapiens
agagataccaatctttcatggcttgaaaagattaagggccctcaatggtctgatttaagcttcatgagaaataaa

SEQ ID NO: 5308 - DNA, 74 bp, Homo sapiens
taccaatctttcatggcttgaaaagattaagggccctcaatggtctgatttaagcttcatgagaaataaacaaa

SEQ ID NO: 5309 - DNA, 73 bp, Homo sapiens
gcttgaaaagattaagggccctcaatggtctgatttaagcttcatgagaaataaacaaattcgatgaactctt

SEQ ID NO: 5310 - DNA, 71 bp, Homo sapiens
gggccctcaatggtctgatttaagcttcatgagaaataaacaaattcgatgaactctttaaatagtaaatt

SEQ ID NO: 5311 - DNA, 73 bp, Homo sapiens
tctgatttaagcttcatgagaaataaacaaattcgatgaactctttaaatagtaaatttcacacccaatactg

SEQ ID NO: 5312 - DNA, 74 bp, Homo sapiens
ttcgatgaactctttaaatagtaaatttcacacccaatactgtttcataatgtagtgattcaaacaacagaaca

SEQ ID NO: 5313 - DNA, 71 bp, Homo sapiens
ctctttaaatagtaaatttcacacccaatactgtttcataatgtagtgattcaaacaacagaacattttgg

SEQ ID NO: 5314 - DNA, 70 bp, Homo sapiens
aatagtaaatttcacacccaatactgtttcataatgtagtgattcaaacaacagaacattttggttaaaa

SEQ ID NO: 5315 - DNA, 74 bp, Homo sapiens
tcacacccaatactgtttcataatgtagtgattcaaacaacagaacattttggttaaaattatctgacattaag

SEQ ID NO: 5316 - DNA, 73 bp, Homo sapiens
ctgtttcataatgtagtgattcaaacaacagaacattttggttaaaattatctgacattaagttggacttcca

SEQ ID NO: 5317 - DNA, 70 bp, Homo sapiens
gattcaaacaacagaacattttggttaaaattatctgacattaagttggacttccaatatgtaattaatt

SEQ ID NO: 5318 - DNA, 67 bp, Homo sapiens
acagaacattttggttaaaattatctgacattaagttggacttccaatatgtaattaattttttatt

SEQ ID NO: 5319 - DNA, 69 bp, Homo sapiens
ttttattttattgaattcctttttatatttagctcatcagttttagcactttatagcacaccctaactt

SEQ ID NO: 5320 - DNA, 70 bp, Homo sapiens
ttgaattcctttttatatttagctcatcagttttagcactttatagcacaccctaactttatctaaattt

SEQ ID NO: 5321 - DNA, 68 bp, Homo sapiens
ttcctttttatatttagctcatcagttttagcactttatagcacaccctaactttatctaaatttttt

SEQ ID NO: 5322 - DNA, 71 bp, Homo sapiens
ttagctcatcagttttagcactttatagcacaccctaactttatctaaatttttttgttagagataactaa

SEQ ID NO: 5323 - DNA, 70 bp, Homo sapiens
atcagttttagcactttatagcacaccctaactttatctaaatttttttgttagagataactaattcatc

SEQ ID NO: 5324 - DNA, 67 bp, Homo sapiens
gcacaccctaactttatctaaatttttttgttagagataactaattcatctatttttttgagtaaac

SEQ ID NO: 5325 - DNA, 67 bp, Homo sapiens
ttttgttagagataactaattcatctatttttttgagtaaacccaggaaataattttttgctggagt

SEQ ID NO: 5326 - DNA, 70 bp, Homo sapiens
gagataactaattcatctatttttttgagtaaacccaggaaataattttttgctggagtttctgtgcctc

SEQ ID NO: 5327 - DNA, 71 bp, Homo sapiens
tcatctatttttttgagtaaacccaggaaataattttttgctggagtttctgtgcctctagtttctggaga

SEQ ID NO: 5328 - DNA, 70 bp, Homo sapiens
catctatttttttgagtaaacccaggaaataattttttgctggagtttctgtgcctctagtttctggaga

SEQ ID NO: 5329 - DNA, 73 bp, Homo sapiens
ttttgagtaaacccaggaaataattttttgctggagtttctgtgcctctagtttctggagaaattctcatgca

SEQ ID NO: 5330 - DNA, 75 bp, Homo sapiens
ggaaataattttttgctggagtttctgtgcctctagtttctggagaaattctcatgcatggtagaggaaaatctg

SEQ ID NO: 5331 - DNA, 75 bp, Homo sapiens
aataattttttgctggagtttctgtgcctctagtttctggagaaattctcatgcatggtagaggaaaatctggta

SEQ ID NO: 5332 - DNA, 78 bp, Homo sapiens
tttttgctggagtttctgtgcctctagtttctggagaaattctcatgcatggtagaggaaaatctggtactgttcaga

SEQ ID NO: 5333 - DNA, 79 bp, Homo sapiens
ttttgctggagtttctgtgcctctagtttctggagaaattctcatgcatggtagaggaaaatctggtactgttcagatg

SEQ ID NO: 5334 - DNA, 80 bp, Homo sapiens
agtttctgtgcctctagtttctggagaaattctcatgcatggtagaggaaaatctggtactgttcagatgtgaagtgcta

SEQ ID NO: 5335 - DNA, 82 bp, Homo sapiens
tttctgtgcctctagtttctggagaaattctcatgcatggtagaggaaaatctggtactgttcagatgtgaagtgctatgta

SEQ ID NO: 5336 - DNA, 78 bp, Homo sapiens
ctctagtttctggagaaattctcatgcatggtagaggaaaatctggtactgttcagatgtgaagtgctatgtaaactt

SEQ ID NO: 5337 - DNA, 77 bp, Homo sapiens
gtttctggagaaattctcatgcatggtagaggaaaatctggtactgttcagatgtgaagtgctatgtaaactttaaa

SEQ ID NO: 5338 - DNA, 75 bp, Homo sapiens
aaattctcatgcatggtagaggaaaatctggtactgttcagatgtgaagtgctatgtaaactttaaagtactatt

SEQ ID NO: 5339 - DNA, 73 bp, Homo sapiens
gcatggtagaggaaaatctggtactgttcagatgtgaagtgctatgtaaactttaaagtactattttaaaatg

SEQ ID NO: 5340 - DNA, 71 bp, Homo sapiens
ggaaaatctggtactgttcagatgtgaagtgctatgtaaactttaaagtactattttaaaatgttcacaaa

SEQ ID NO: 5341 - DNA, 70 bp, Homo sapiens
ctgttcagatgtgaagtgctatgtaaactttaaagtactattttaaaatgttcacaaaagtatttggtgg

SEQ ID NO: 5342 - DNA, 69 bp, Homo sapiens
gatgtgaagtgctatgtaaactttaaagtactattttaaaatgttcacaaaagtatttggtggttgtgt

SEQ ID NO: 5343 - DNA, 66 bp, Homo sapiens
gctatgtaaactttaaagtactattttaaaatgttcacaaaagtatttggtggttgtgttgttttg

SEQ ID NO: 5344 - DNA, 71 bp, Homo sapiens
accatgcctggccgtatttggtgtttttaaggagaaaaagtgtatattttgctgaatgtaaatgtagcaaa

SEQ ID NO: 5345 - DNA, 70 bp, Homo sapiens
gcctggccgtatttggtgtttttaaggagaaaaagtgtatattttgctgaatgtaaatgtagcaaataat

SEQ ID NO: 5346 - DNA, 71 bp, Homo sapiens
ggtgtttttaaggagaaaaagtgtatattttgctgaatgtaaatgtagcaaataattacagacttcagttg

SEQ ID NO: 5347 - DNA, 72 bp, Homo sapiens
aggagaaaaagtgtatattttgctgaatgtaaatgtagcaaataattacagacttcagttgtttattagtat

SEQ ID NO: 5348 - DNA, 73 bp, Homo sapiens
gtgtatattttgctgaatgtaaatgtagcaaataattacagacttcagttgtttattagtattattttaggct

SEQ ID NO: 5349 - DNA, 74 bp, Homo sapiens
gctgaatgtaaatgtagcaaataattacagacttcagttgtttattagtattattttaggcttatcaagaataa

SEQ ID NO: 5350 - DNA, 71 bp, Homo sapiens
atgtaaatgtagcaaataattacagacttcagttgtttattagtattattttaggcttatcaagaataaaa

SEQ ID NO: 5351 - DNA, 70 bp, Homo sapiens
agcaaataattacagacttcagttgtttattagtattattttaggcttatcaagaataaaaaagctgaac

SEQ ID NO: 5352 - DNA, 69 bp, Homo sapiens
tacagacttcagttgtttattagtattattttaggcttatcaagaataaaaaagctgaacttacctaaa

SEQ ID NO: 5353 - DNA, 68 bp, Homo sapiens
tgtttattagtattattttaggcttatcaagaataaaaaagctgaacttacctaaaaagaaactcaca

SEQ ID NO: 5354 - DNA, 67 bp, Homo sapiens
ttattttaggcttatcaagaataaaaaagctgaacttacctaaaaagaaactcacactagtattact

SEQ ID NO: 5355 - DNA, 68 bp, Homo sapiens
ttaggcttatcaagaataaaaaagctgaacttacctaaaaagaaactcacactagtattacttgttta

SEQ ID NO: 5356 - DNA, 67 bp, Homo sapiens
gaataaaaaagctgaacttacctaaaaagaaactcacactagtattacttgtttataaaacaacaca

SEQ ID NO: 5357 - DNA, 71 bp, Homo sapiens
gctgaacttacctaaaaagaaactcacactagtattacttgtttataaaacaacacaatgatcagaggaag

SEQ ID NO: 5358 - DNA, 71 bp, Homo sapiens
cctaaaaagaaactcacactagtattacttgtttataaaacaacacaatgatcagaggaagtgatttttga

SEQ ID NO: 5359 - DNA, 73 bp, Homo sapiens
agaaactcacactagtattacttgtttataaaacaacacaatgatcagaggaagtgatttttgacagaagtat

SEQ ID NO: 5360 - DNA, 72 bp, Homo sapiens
actagtattacttgtttataaaacaacacaatgatcagaggaagtgatttttgacagaagtatttgttaatg

SEQ ID NO: 5361 - DNA, 70 bp, Homo sapiens
cttgtttataaaacaacacaatgatcagaggaagtgatttttgacagaagtatttgttaatgttttaaat

SEQ ID NO: 5362 - DNA, 71 bp, Homo sapiens
aacaacacaatgatcagaggaagtgatttttgacagaagtatttgttaatgttttaaattactagttataa

SEQ ID NO: 5363 - DNA, 70 bp, Homo sapiens
tgatcagaggaagtgatttttgacagaagtatttgttaatgttttaaattactagttataaaaaaatctc

SEQ ID NO: 5364 - DNA, 70 bp, Homo sapiens
gatttttgacagaagtatttgttaatgttttaaattactagttataaaaaaatctctgttgcatatatgg

SEQ ID NO: 5365 - DNA, 71 bp, Homo sapiens
tgacagaagtatttgttaatgttttaaattactagttataaaaaaatctctgttgcatatatggggttata

SEQ ID NO: 5366 - DNA, 67 bp, Homo sapiens
gttaatgttttaaattactagttataaaaaaatctctgttgcatatatggggttatagttaaattaa

SEQ ID NO: 5367 - DNA, 66 bp, Homo sapiens
gttttaaattactagttataaaaaaatctctgttgcatatatggggttatagttaaattaaaattg

SEQ ID NO: 5368 - DNA, 68 bp, Homo sapiens
ctagttataaaaaaatctctgttgcatatatggggttatagttaaattaaaattggattttacttata

SEQ ID NO: 5369 - DNA, 68 bp, Homo sapiens
aatctctgttgcatatatggggttatagttaaattaaaattggattttacttatattcgtttttagaa

SEQ ID NO: 5370 - DNA, 65 bp, Homo sapiens
ggttatagttaaattaaaattggattttacttatattcgtttttagaaatataaagagaaggaca

SEQ ID NO: 5371 - DNA, 65 bp, Homo sapiens
aaattaaaattggattttacttatattcgtttttagaaatataaagagaaggacaaacacaaaca

SEQ ID NO: 5372 - DNA, 70 bp, Homo sapiens
tggattttacttatattcgtttttagaaatataaagagaaggacaaacacaaacagaaacacaagaagca

SEQ ID NO: 5373 - DNA, 71 bp, Homo sapiens
cttatattcgtttttagaaatataaagagaaggacaaacacaaacagaaacacaagaagcagccagaacca

SEQ ID NO: 5374 - DNA, 74 bp, Homo sapiens
ttttagaaatataaagagaaggacaaacacaaacagaaacacaagaagcagccagaaccatcacctgcattggt

SEQ ID NO: 5375 - DNA, 75 bp, Homo sapiens
aatataaagagaaggacaaacacaaacagaaacacaagaagcagccagaaccatcacctgcattggttccatcct

SEQ ID NO: 5376 - DNA, 76 bp, Homo sapiens
aaggacaaacacaaacagaaacacaagaagcagccagaaccatcacctgcattggttccatccttgactgttacta

SEQ ID NO: 5377 - DNA, 75 bp, Homo sapiens
aaacagaaacacaagaagcagccagaaccatcacctgcattggttccatccttgactgttactacagaaaaagta

SEQ ID NO: 5378 - DNA, 73 bp, Homo sapiens
aaacacaagaagcagccagaaccatcacctgcattggttccatccttgactgttactacagaaaaagtaagtt

SEQ ID NO: 5379 - DNA, 73 bp, Homo sapiens
agccagaaccatcacctgcattggttccatccttgactgttactacagaaaaagtaagttttaagtatcatat

SEQ ID NO: 5380 - DNA, 71 bp, Homo sapiens
aaccatcacctgcattggttccatccttgactgttactacagaaaaagtaagttttaagtatcatattttg

SEQ ID NO: 5381 - DNA, 71 bp, Homo sapiens
tgcattggttccatccttgactgttactacagaaaaagtaagttttaagtatcatattttgttttatgtaa

SEQ ID NO: 5382 - DNA, 68 bp, Homo sapiens
ccatccttgactgttactacagaaaaagtaagttttaagtatcatattttgttttatgtaataagtag

SEQ ID NO: 5383 - DNA, 70 bp, Homo sapiens
ctgttactacagaaaaagtaagttttaagtatcatattttgttttatgtaataagtagttattgtgctga

SEQ ID NO: 5384 - DNA, 69 bp, Homo sapiens
gaaaaagtaagttttaagtatcatattttgttttatgtaataagtagttattgtgctgattttcacctc

SEQ ID NO: 5385 - DNA, 69 bp, Homo sapiens
gttttaagtatcatattttgttttatgtaataagtagttattgtgctgattttcacctctaaaaactgt

SEQ ID NO: 5386 - DNA, 68 bp, Homo sapiens
attttgttttatgtaataagtagttattgtgctgattttcacctctaaaaactgttttcattccctaa

SEQ ID NO: 5387 - DNA, 69 bp, Homo sapiens
tagttattgtgctgattttcacctctaaaaactgttttcattccctaacttttcccagcttttcaacca

SEQ ID NO: 5388 - DNA, 71 bp, Homo sapiens
attgtgctgattttcacctctaaaaactgttttcattccctaacttttcccagcttttcaaccacatatca

SEQ ID NO: 5389 - DNA, 68 bp, Homo sapiens
acctctaaaaactgttttcattccctaacttttcccagcttttcaaccacatatcaggcacttagaat

SEQ ID NO: 5390 - DNA, 70 bp, Homo sapiens
aaactgttttcattccctaacttttcccagcttttcaaccacatatcaggcacttagaattctcatttct

SEQ ID NO: 5391 - DNA, 69 bp, Homo sapiens
tttcattccctaacttttcccagcttttcaaccacatatcaggcacttagaattctcatttcttttttt

SEQ ID NO: 5392 - DNA, 74 bp, Homo sapiens
ccaccactcctggcctgaattctcatttcttaccttattctaccttctgtttattctgtgcttgtctccaaagc

SEQ ID NO: 5393 - DNA, 74 bp, Homo sapiens
tggcctgaattctcatttcttaccttattctaccttctgtttattctgtgcttgtctccaaagcctgttgttaa

SEQ ID NO: 5394 - DNA, 71 bp, Homo sapiens
attctcatttcttaccttattctaccttctgtttattctgtgcttgtctccaaagcctgttgttaagtaag

SEQ ID NO: 5395 - DNA, 71 bp, Homo sapiens
ttcttaccttattctaccttctgtttattctgtgcttgtctccaaagcctgttgttaagtaaggataacaa

SEQ ID NO: 5396 - DNA, 74 bp, Homo sapiens
taccttctgtttattctgtgcttgtctccaaagcctgttgttaagtaaggataacaagtgggaaccatcattga

SEQ ID NO: 5397 - DNA, 75 bp, Homo sapiens
tttattctgtgcttgtctccaaagcctgttgttaagtaaggataacaagtgggaaccatcattgagacagagaat

SEQ ID NO: 5398 - DNA, 74 bp, Homo sapiens
cttgtctccaaagcctgttgttaagtaaggataacaagtgggaaccatcattgagacagagaattttggctgtg

SEQ ID NO: 5399 - DNA, 72 bp, Homo sapiens
aagcctgttgttaagtaaggataacaagtgggaaccatcattgagacagagaattttggctgtgggtggact

SEQ ID NO: 5400 - DNA, 77 bp, Homo sapiens
ttgttaagtaaggataacaagtgggaaccatcattgagacagagaattttggctgtgggtggacttcattcatctga

SEQ ID NO: 5401 - DNA, 78 bp, Homo sapiens
taaggataacaagtgggaaccatcattgagacagagaattttggctgtgggtggacttcattcatctgagattttgaa

SEQ ID NO: 5402 - DNA, 77 bp, Homo sapiens
aagtgggaaccatcattgagacagagaattttggctgtgggtggacttcattcatctgagattttgaattctggcct

SEQ ID NO: 5403 - DNA, 80 bp, Homo sapiens
attgagacagagaattttggctgtgggtggacttcattcatctgagattttgaattctggccttgccacttactgattga

SEQ ID NO: 5404 - DNA, 77 bp, Homo sapiens
agaattttggctgtgggtggacttcattcatctgagattttgaattctggccttgccacttactgattgagtgttta

SEQ ID NO: 5405 - DNA, 76 bp, Homo sapiens
tgtgggtggacttcattcatctgagattttgaattctggccttgccacttactgattgagtgtttaggttaattaa

SEQ ID NO: 5406 - DNA, 73 bp, Homo sapiens
cttcattcatctgagattttgaattctggccttgccacttactgattgagtgtttaggttaattaaccttggt

SEQ ID NO: 5407 - DNA, 72 bp, Homo sapiens
tctgagattttgaattctggccttgccacttactgattgagtgtttaggttaattaaccttggttaactcaa

SEQ ID NO: 5408 - DNA, 71 bp, Homo sapiens
ctggccttgccacttactgattgagtgtttaggttaattaaccttggttaactcaattatatcatttgtaa

SEQ ID NO: 5409 - DNA, 68 bp, Homo sapiens
cacttactgattgagtgtttaggttaattaaccttggttaactcaattatatcatttgtaaagtgggg

SEQ ID NO: 5410 - DNA, 67 bp, Homo sapiens
tgagtgtttaggttaattaaccttggttaactcaattatatcatttgtaaagtgggggaaattatta

SEQ ID NO: 5411 - DNA, 67 bp, Homo sapiens
ggttaattaaccttggttaactcaattatatcatttgtaaagtgggggaaattattaatgaaatgga

SEQ ID NO: 5412 - DNA, 72 bp, Homo sapiens
ccttggttaactcaattatatcatttgtaaagtgggggaaattattaatgaaatggaatgacagaatatgtg

SEQ ID NO: 5413 - DNA, 72 bp, Homo sapiens
ttgtaaagtgggggaaattattaatgaaatggaatgacagaatatgtgtaaagcaattagaacagtatttgg

SEQ ID NO: 5414 - DNA, 75 bp, Homo sapiens
ggggaaattattaatgaaatggaatgacagaatatgtgtaaagcaattagaacagtatttggttcatagtgagaa

SEQ ID NO: 5415 - DNA, 76 bp, Homo sapiens
ttaatgaaatggaatgacagaatatgtgtaaagcaattagaacagtatttggttcatagtgagaattagtaaatat

SEQ ID NO: 5416 - DNA, 75 bp, Homo sapiens
gaaatggaatgacagaatatgtgtaaagcaattagaacagtatttggttcatagtgagaattagtaaatattaag

SEQ ID NO: 5417 - DNA, 74 bp, Homo sapiens
cagaatatgtgtaaagcaattagaacagtatttggttcatagtgagaattagtaaatattaagtagtattagga

SEQ ID NO: 5418 - DNA, 72 bp, Homo sapiens
ggttcatagtgagaattagtaaatattaagtagtattaggattattatcttgtggttaatatgaaaacagag

SEQ ID NO: 5419 - DNA, 72 bp, Homo sapiens
tagtgagaattagtaaatattaagtagtattaggattattatcttgtggttaatatgaaaacagagggagac

SEQ ID NO: 5420 - DNA, 71 bp, Homo sapiens
gtagtattaggattattatcttgtggttaatatgaaaacagagggagactgggacagaataaataagttgg

SEQ ID NO: 5421 - DNA, 73 bp, Homo sapiens
ttaggattattatcttgtggttaatatgaaaacagagggagactgggacagaataaataagttgggaagtgca

SEQ ID NO: 5422 - DNA, 75 bp, Homo sapiens
ttgtggttaatatgaaaacagagggagactgggacagaataaataagttgggaagtgcagtaggagatgagtcta

SEQ ID NO: 5423 - DNA, 76 bp, Homo sapiens
ggacagaataaataagttgggaagtgcagtaggagatgagtctagggtgagggacccattatgcaaagctgtataa

SEQ ID NO: 5424 - DNA, 74 bp, Homo sapiens
aataaataagttgggaagtgcagtaggagatgagtctagggtgagggacccattatgcaaagctgtataaacca

SEQ ID NO: 5425 - DNA, 76 bp, Homo sapiens
gaagtgcagtaggagatgagtctagggtgagggacccattatgcaaagctgtataaaccagtgtaaggactttgtg

SEQ ID NO: 5426 - DNA, 72 bp, Homo sapiens
tctagggtgagggacccattatgcaaagctgtataaaccagtgtaaggactttgtgtttagtttgatcgaaa

SEQ ID NO: 5427 - DNA, 72 bp, Homo sapiens
agggacccattatgcaaagctgtataaaccagtgtaaggactttgtgtttagtttgatcgaaaagtgagcta

SEQ ID NO: 5428 - DNA, 72 bp, Homo sapiens
attatgcaaagctgtataaaccagtgtaaggactttgtgtttagtttgatcgaaaagtgagctactggaggt

SEQ ID NO: 5429 - DNA, 73 bp, Homo sapiens
tgtataaaccagtgtaaggactttgtgtttagtttgatcgaaaagtgagctactggaggtttctgaattgaga

SEQ ID NO: 5430 - DNA, 72 bp, Homo sapiens
aaccagtgtaaggactttgtgtttagtttgatcgaaaagtgagctactggaggtttctgaattgagatgtaa

SEQ ID NO: 5431 - DNA, 73 bp, Homo sapiens
actttgtgtttagtttgatcgaaaagtgagctactggaggtttctgaattgagatgtaacgtggtctgactta

SEQ ID NO: 5432 - DNA, 71 bp, Homo sapiens
gtttagtttgatcgaaaagtgagctactggaggtttctgaattgagatgtaacgtggtctgacttaggttt

SEQ ID NO: 5433 - DNA, 71 bp, Homo sapiens
atcgaaaagtgagctactggaggtttctgaattgagatgtaacgtggtctgacttaggttttgaaaggacc

SEQ ID NO: 5434 - DNA, 72 bp, Homo sapiens
tactggaggtttctgaattgagatgtaacgtggtctgacttaggttttgaaaggacctctggctgctttgtt

SEQ ID NO: 5435 - DNA, 71 bp, Homo sapiens
aggtttctgaattgagatgtaacgtggtctgacttaggttttgaaaggacctctggctgctttgttttgga

SEQ ID NO: 5436 - DNA, 73 bp, Homo sapiens
attgagatgtaacgtggtctgacttaggttttgaaaggacctctggctgctttgttttggacaggctgtggaa

SEQ ID NO: 5437 - DNA, 71 bp, Homo sapiens
aacgtggtctgacttaggttttgaaaggacctctggctgctttgttttggacaggctgtggaaagtcagaa

SEQ ID NO: 5438 - DNA, 76 bp, Homo sapiens
ttgaaaggacctctggctgctttgttttggacaggctgtggaaagtcagaatggaagcagggaggccattagcaag

SEQ ID NO: 5439 - DNA, 79 bp, Homo sapiens
tttgttttggacaggctgtggaaagtcagaatggaagcagggaggccattagcaaggtatgcaatcgtccagagagaga

SEQ ID NO: 5440 - DNA, 79 bp, Homo sapiens
aagcagggaggccattagcaaggtatgcaatcgtccagagagagatggtggtaaaaacagaggtagtgataggtgatca

SEQ ID NO: 5441 - DNA, 81 bp, Homo sapiens
ccattagcaaggtatgcaatcgtccagagagagatggtggtaaaaacagaggtagtgataggtgatcagattctgaataca

SEQ ID NO: 5442 - DNA, 76 bp, Homo sapiens
taaaaacagaggtagtgataggtgatcagattctgaatacatacaaagcccacctgactttcttacagataagtta

SEQ ID NO: 5443 - DNA, 80 bp, Homo sapiens
agaggtagtgataggtgatcagattctgaatacatacaaagcccacctgactttcttacagataagttagaggcatatga

SEQ ID NO: 5444 - DNA, 79 bp, Homo sapiens
ataggtgatcagattctgaatacatacaaagcccacctgactttcttacagataagttagaggcatatgagaaagagag

SEQ ID NO: 5445 - DNA, 79 bp, Homo sapiens
atacatacaaagcccacctgactttcttacagataagttagaggcatatgagaaagagaggatccatggatgattccaa

SEQ ID NO: 5446 - DNA, 76 bp, Homo sapiens
aagcccacctgactttcttacagataagttagaggcatatgagaaagagaggatccatggatgattccaaagattt

SEQ ID NO: 5447 - DNA, 80 bp, Homo sapiens
ttcttacagataagttagaggcatatgagaaagagaggatccatggatgattccaaagattttgggtcagatcactagaa

SEQ ID NO: 5448 - DNA, 79 bp, Homo sapiens
agataagttagaggcatatgagaaagagaggatccatggatgattccaaagattttgggtcagatcactagaaggtata

SEQ ID NO: 5449 - DNA, 80 bp, Homo sapiens
catatgagaaagagaggatccatggatgattccaaagattttgggtcagatcactagaaggtatagagtcactgttaaca

SEQ ID NO: 5450 - DNA, 76 bp, Homo sapiens
agaaagagaggatccatggatgattccaaagattttgggtcagatcactagaaggtatagagtcactgttaacaaa

SEQ ID NO: 5451 - DNA, 74 bp, Homo sapiens
atccatggatgattccaaagattttgggtcagatcactagaaggtatagagtcactgttaacaaagaggggaaa

SEQ ID NO: 5452 - DNA, 71 bp, Homo sapiens
attccaaagattttgggtcagatcactagaaggtatagagtcactgttaacaaagaggggaaagactgtgg

SEQ ID NO: 5453 - DNA, 73 bp, Homo sapiens
attttgggtcagatcactagaaggtatagagtcactgttaacaaagaggggaaagactgtgggcatagcaggt

SEQ ID NO: 5454 - DNA, 70 bp, Homo sapiens
agaaggtatagagtcactgttaacaaagaggggaaagactgtgggcatagcaggttgaggggaaagaaag

SEQ ID NO: 5455 - DNA, 69 bp, Homo sapiens
agtcactgttaacaaagaggggaaagactgtgggcatagcaggttgaggggaaagaaaggaattcagtt

SEQ ID NO: 5456 - DNA, 68 bp, Homo sapiens
aagaggggaaagactgtgggcatagcaggttgaggggaaagaaaggaattcagtttgggatgtggttt

SEQ ID NO: 5457 - DNA, 69 bp, Homo sapiens
aagactgtgggcatagcaggttgaggggaaagaaaggaattcagtttgggatgtggttttagttttcta

SEQ ID NO: 5458 - DNA, 70 bp, Homo sapiens
catagcaggttgaggggaaagaaaggaattcagtttgggatgtggttttagttttctattgcagttgaaa

SEQ ID NO: 5459 - DNA, 69 bp, Homo sapiens
tgaggggaaagaaaggaattcagtttgggatgtggttttagttttctattgcagttgaaattactacag

SEQ ID NO: 5460 - DNA, 69 bp, Homo sapiens
gaaaggaattcagtttgggatgtggttttagttttctattgcagttgaaattactacagtataccagtt

SEQ ID NO: 5461 - DNA, 69 bp, Homo sapiens
cagtttgggatgtggttttagttttctattgcagttgaaattactacagtataccagtttaaaacaaca

SEQ ID NO: 5462 - DNA, 69 bp, Homo sapiens
tgggatgtggttttagttttctattgcagttgaaattactacagtataccagtttaaaacaacataaac

SEQ ID NO: 5463 - DNA, 69 bp, Homo sapiens
gttttctattgcagttgaaattactacagtataccagtttaaaacaacataaacttactagtcgttctg

SEQ ID NO: 5464 - DNA, 70 bp, Homo sapiens
gcagttgaaattactacagtataccagtttaaaacaacataaacttactagtcgttctgtaggccagaag

SEQ ID NO: 5465 - DNA, 71 bp, Homo sapiens
tataccagtttaaaacaacataaacttactagtcgttctgtaggccagaagtctgggtggactcagctgtt

SEQ ID NO: 5466 - DNA, 71 bp, Homo sapiens
aaaacaacataaacttactagtcgttctgtaggccagaagtctgggtggactcagctgtttcctctaatta

SEQ ID NO: 5467 - DNA, 74 bp, Homo sapiens
tactagtcgttctgtaggccagaagtctgggtggactcagctgtttcctctaattagggtctctcaaggccaaa

SEQ ID NO: 5468 - DNA, 73 bp, Homo sapiens
gtggactcagctgtttcctctaattagggtctctcaaggccaaaatcaaggtgttggatggtctgggttctta

SEQ ID NO: 5469 - DNA, 73 bp, Homo sapiens
taattagggtctctcaaggccaaaatcaaggtgttggatggtctgggttcttatctgaaagaatctgtttcta

SEQ ID NO: 5470 - DNA, 70 bp, Homo sapiens
aaggccaaaatcaaggtgttggatggtctgggttcttatctgaaagaatctgtttctaccgttcgtcagg

SEQ ID NO: 5471 - DNA, 73 bp, Homo sapiens
atcaaggtgttggatggtctgggttcttatctgaaagaatctgtttctaccgttcgtcaggttattggcagaa

SEQ ID NO: 5472 - DNA, 77 bp, Homo sapiens
tggatggtctgggttcttatctgaaagaatctgtttctaccgttcgtcaggttattggcagaatgaatctgcttata

SEQ ID NO: 5473 - DNA, 78 bp, Homo sapiens
tgggttcttatctgaaagaatctgtttctaccgttcgtcaggttattggcagaatgaatctgcttatatgcttggtca

SEQ ID NO: 5474 - DNA, 77 bp, Homo sapiens
ttatctgaaagaatctgtttctaccgttcgtcaggttattggcagaatgaatctgcttatatgcttggtcaggttat

SEQ ID NO: 5475 - DNA, 75 bp, Homo sapiens
aatctgtttctaccgttcgtcaggttattggcagaatgaatctgcttatatgcttggtcaggttattggcaaaat

SEQ ID NO: 5476 - DNA, 77 bp, Homo sapiens
ttattggcagaatgaatctgcttatatgcttggtcaggttattggcaaaatttggttccttgtgattggttgtagga

SEQ ID NO: 5477 - DNA, 75 bp, Homo sapiens
agaatgaatctgcttatatgcttggtcaggttattggcaaaatttggttccttgtgattggttgtaggactgagg

SEQ ID NO: 5478 - DNA, 73 bp, Homo sapiens
aggttattggcaaaatttggttccttgtgattggttgtaggactgaggtgcccacttctttgctgcctgtcag

SEQ ID NO: 5479 - DNA, 77 bp, Homo sapiens
ttccttgtgattggttgtaggactgaggtgcccacttctttgctgcctgtcaggtggggatcagcccttggcttcta

SEQ ID NO: 5480 - DNA, 76 bp, Homo sapiens
cctgtcaggtggggatcagcccttggcttctagagcctctttttgtttccttgtgccattgtcagatgatcccctc

SEQ ID NO: 5481 - DNA, 80 bp, Homo sapiens
ccttggcttctagagcctctttttgtttccttgtgccattgtcagatgatcccctccatctcataggtagcaatggcatg

SEQ ID NO: 5482 - DNA, 81 bp, Homo sapiens
ttctagagcctctttttgtttccttgtgccattgtcagatgatcccctccatctcataggtagcaatggcatgttgaattc

SEQ ID NO: 5483 - DNA, 80 bp, Homo sapiens
ttttgtttccttgtgccattgtcagatgatcccctccatctcataggtagcaatggcatgttgaattcctcttacacttg

SEQ ID NO: 5484 - DNA, 79 bp, Homo sapiens
cttgtgccattgtcagatgatcccctccatctcataggtagcaatggcatgttgaattcctcttacacttggaattttt

SEQ ID NO: 5485 - DNA, 76 bp, Homo sapiens
ccattgtcagatgatcccctccatctcataggtagcaatggcatgttgaattcctcttacacttggaatttttttt

SEQ ID NO: 5486 - DNA, 74 bp, Homo sapiens
atcccctccatctcataggtagcaatggcatgttgaattcctcttacacttggaatttttttttgcatctcttt

SEQ ID NO: 5487 - DNA, 73 bp, Homo sapiens
ggtagcaatggcatgttgaattcctcttacacttggaatttttttttgcatctcttttgcttttagttggaga

SEQ ID NO: 5488 - DNA, 71 bp, Homo sapiens
gcatgttgaattcctcttacacttggaatttttttttgcatctcttttgcttttagttggagaaagttctc

SEQ ID NO: 5489 - DNA, 69 bp, Homo sapiens
tcctcttacacttggaatttttttttgcatctcttttgcttttagttggagaaagttctctctttaagc

SEQ ID NO: 5490 - DNA, 72 bp, Homo sapiens
ggaatttttttttgcatctcttttgcttttagttggagaaagttctctctttaagctcatgtgattagattg

SEQ ID NO: 5491 - DNA, 74 bp, Homo sapiens
tttttgcatctcttttgcttttagttggagaaagttctctctttaagctcatgtgattagattgggtctacctg

SEQ ID NO: 5492 - DNA, 72 bp, Homo sapiens
ttttgcttttagttggagaaagttctctctttaagctcatgtgattagattgggtctacctggaaagtccaa

SEQ ID NO: 5493 - DNA, 72 bp, Homo sapiens
ttttagttggagaaagttctctctttaagctcatgtgattagattgggtctacctggaaagtccaagataac

SEQ ID NO: 5494 - DNA, 71 bp, Homo sapiens
gttctctctttaagctcatgtgattagattgggtctacctggaaagtccaagataacgtccctattttaaa

SEQ ID NO: 5495 - DNA, 70 bp, Homo sapiens
tttaagctcatgtgattagattgggtctacctggaaagtccaagataacgtccctattttaaaatcctta

SEQ ID NO: 5496 - DNA, 68 bp, Homo sapiens
catgtgattagattgggtctacctggaaagtccaagataacgtccctattttaaaatccttaagttta

SEQ ID NO: 5497 - DNA, 66 bp, Homo sapiens
gattgggtctacctggaaagtccaagataacgtccctattttaaaatccttaagtttaattacatc

SEQ ID NO: 5498 - DNA, 79 bp, Homo sapiens
ttgccatgtaatataacatattcacaggtttcagggattagaatgtggacatcttggttgaggggtgctatcctgccta

SEQ ID NO: 5499 - DNA, 77 bp, Homo sapiens
atgtaatataacatattcacaggtttcagggattagaatgtggacatcttggttgaggggtgctatcctgcctacca

SEQ ID NO: 5500 - DNA, 77 bp, Homo sapiens
tattcacaggtttcagggattagaatgtggacatcttggttgaggggtgctatcctgcctaccacagatacgttggc

SEQ ID NO: 5501 - DNA, 80 bp, Homo sapiens
tcagggattagaatgtggacatcttggttgaggggtgctatcctgcctaccacagatacgttggcgttgagatgtatcta

SEQ ID NO: 5502 - DNA, 79 bp, Homo sapiens
gattagaatgtggacatcttggttgaggggtgctatcctgcctaccacagatacgttggcgttgagatgtatctattaa

SEQ ID NO: 5503 - DNA, 78 bp, Homo sapiens
aatgtggacatcttggttgaggggtgctatcctgcctaccacagatacgttggcgttgagatgtatctattaatatta

SEQ ID NO: 5504 - DNA, 80 bp, Homo sapiens
acatcttggttgaggggtgctatcctgcctaccacagatacgttggcgttgagatgtatctattaatattagacatctga

SEQ ID NO: 5505 - DNA, 84 bp, Homo sapiens
ttgaggggtgctatcctgcctaccacagatacgttggcgttgagatgtatctattaatattagacatctgagtagatatgctga

SEQ ID NO: 5506 - DNA, 85 bp, Homo sapiens
tgctatcctgcctaccacagatacgttggcgttgagatgtatctattaatattagacatctgagtagatatgctgactagccagt

SEQ ID NO: 5507 - DNA, 84 bp, Homo sapiens
tatcctgcctaccacagatacgttggcgttgagatgtatctattaatattagacatctgagtagatatgctgactagccagttg

SEQ ID NO: 5508 - DNA, 82 bp, Homo sapiens
cctaccacagatacgttggcgttgagatgtatctattaatattagacatctgagtagatatgctgactagccagttggataa

SEQ ID NO: 5509 - DNA, 82 bp, Homo sapiens
gttgagatgtatctattaatattagacatctgagtagatatgctgactagccagttggataactagtctggtattcagaaaa

SEQ ID NO: 5510 - DNA, 80 bp, Homo sapiens
atgtatctattaatattagacatctgagtagatatgctgactagccagttggataactagtctggtattcagaaaagagg

SEQ ID NO: 5511 - DNA, 78 bp, Homo sapiens
atctgagtagatatgctgactagccagttggataactagtctggtattcagaaaagaggtctcaactttggatattaa

SEQ ID NO: 5512 - DNA, 76 bp, Homo sapiens
agatatgctgactagccagttggataactagtctggtattcagaaaagaggtctcaactttggatattaaatgtgg

SEQ ID NO: 5513 - DNA, 72 bp, Homo sapiens
actagccagttggataactagtctggtattcagaaaagaggtctcaactttggatattaaatgtgggaatta

SEQ ID NO: 5514 - DNA, 76 bp, Homo sapiens
tggataactagtctggtattcagaaaagaggtctcaactttggatattaaatgtgggaattatatgcatatggagt

SEQ ID NO: 5515 - DNA, 74 bp, Homo sapiens
ggtattcagaaaagaggtctcaactttggatattaaatgtgggaattatatgcatatggagttatttaaagcca

SEQ ID NO: 5516 - DNA, 75 bp, Homo sapiens
gaaaagaggtctcaactttggatattaaatgtgggaattatatgcatatggagttatttaaagccacaagactga

SEQ ID NO: 5517 - DNA, 79 bp, Homo sapiens
ggaattatatgcatatggagttatttaaagccacaagactgaatgataccactaagggagaagtgagtgcaggtagaga

SEQ ID NO: 5518 - DNA, 79 bp, Homo sapiens
tatatgcatatggagttatttaaagccacaagactgaatgataccactaagggagaagtgagtgcaggtagagaaatag

SEQ ID NO: 5519 - DNA, 73 bp, Homo sapiens
agttatttaaagccacaagactgaatgataccactaagggagaagtgagtgcaggtagagaaataggccttag

SEQ ID NO: 5520 - DNA, 77 bp, Homo sapiens
taaagccacaagactgaatgataccactaagggagaagtgagtgcaggtagagaaataggccttaggaggctcagga

SEQ ID NO: 5521 - DNA, 77 bp, Homo sapiens
tgaatgataccactaagggagaagtgagtgcaggtagagaaataggccttaggaggctcaggacctcctgtgtcgaa

SEQ ID NO: 5522 - DNA, 74 bp, Homo sapiens
ataccactaagggagaagtgagtgcaggtagagaaataggccttaggaggctcaggacctcctgtgtcgaaaga

SEQ ID NO: 5523 - DNA, 75 bp, Homo sapiens
aagtgagtgcaggtagagaaataggccttaggaggctcaggacctcctgtgtcgaaagatctggaagaggaggta

SEQ ID NO: 5524 - DNA, 72 bp, Homo sapiens
aggtagagaaataggccttaggaggctcaggacctcctgtgtcgaaagatctggaagaggaggtacaaccga

SEQ ID NO: 5525 - DNA, 71 bp, Homo sapiens
agaaataggccttaggaggctcaggacctcctgtgtcgaaagatctggaagaggaggtacaaccgacaaag

SEQ ID NO: 5526 - DNA, 73 bp, Homo sapiens
ccttaggaggctcaggacctcctgtgtcgaaagatctggaagaggaggtacaaccgacaaaggagactgagaa

SEQ ID NO: 5527 - DNA, 72 bp, Homo sapiens
aggacctcctgtgtcgaaagatctggaagaggaggtacaaccgacaaaggagactgagaagaggctagagtt

SEQ ID NO: 5528 - DNA, 73 bp, Homo sapiens
tgtgtcgaaagatctggaagaggaggtacaaccgacaaaggagactgagaagaggctagagtttggaagaaaa

SEQ ID NO: 5529 - DNA, 72 bp, Homo sapiens
agactgagaagaggctagagtttggaagaaaactaacaggatgtggtatgctggaagccaagttaaagaaag

SEQ ID NO: 5530 - DNA, 69 bp, Homo sapiens
aagaggctagagtttggaagaaaactaacaggatgtggtatgctggaagccaagttaaagaaaggtggg

SEQ ID NO: 5531 - DNA, 69 bp, Homo sapiens
agtttggaagaaaactaacaggatgtggtatgctggaagccaagttaaagaaaggtggggataagtgaa

SEQ ID NO: 5532 - DNA, 74 bp, Homo sapiens
aggatgtggtatgctggaagccaagttaaagaaaggtggggataagtgaactgtgtcatatattaaggactagc

SEQ ID NO: 5533 - DNA, 71 bp, Homo sapiens
tggaagccaagttaaagaaaggtggggataagtgaactgtgtcatatattaaggactagcccttttagtca

SEQ ID NO: 5534 - DNA, 69 bp, Homo sapiens
aagttaaagaaaggtggggataagtgaactgtgtcatatattaaggactagcccttttagtcatttgga

SEQ ID NO: 5535 - DNA, 72 bp, Homo sapiens
aaaggtggggataagtgaactgtgtcatatattaaggactagcccttttagtcatttggaggtcattactga

SEQ ID NO: 5536 - DNA, 73 bp, Homo sapiens
ataagtgaactgtgtcatatattaaggactagcccttttagtcatttggaggtcattactgaccttgaacagt

SEQ ID NO: 5537 - DNA, 70 bp, Homo sapiens
gtcatatattaaggactagcccttttagtcatttggaggtcattactgaccttgaacagttttaaagtac

SEQ ID NO: 5538 - DNA, 70 bp, Homo sapiens
attaaggactagcccttttagtcatttggaggtcattactgaccttgaacagttttaaagtactgattga

SEQ ID NO: 5539 - DNA, 72 bp, Homo sapiens
cttttagtcatttggaggtcattactgaccttgaacagttttaaagtactgattgaggcaaaagcctgattg

SEQ ID NO: 5540 - DNA, 74 bp, Homo sapiens
tttggaggtcattactgaccttgaacagttttaaagtactgattgaggcaaaagcctgattggagtgctttata

SEQ ID NO: 5541 - DNA, 74 bp, Homo sapiens
attactgaccttgaacagttttaaagtactgattgaggcaaaagcctgattggagtgctttatagagagaatgg

SEQ ID NO: 5542 - DNA, 73 bp, Homo sapiens
ttgaacagttttaaagtactgattgaggcaaaagcctgattggagtgctttatagagagaatgggggagaaaa

SEQ ID NO: 5543 - DNA, 73 bp, Homo sapiens
agttttaaagtactgattgaggcaaaagcctgattggagtgctttatagagagaatgggggagaaaagtcaga

SEQ ID NO: 5544 - DNA, 79 bp, Homo sapiens
tactgattgaggcaaaagcctgattggagtgctttatagagagaatgggggagaaaagtcagacagtgtgtgtaaatga

SEQ ID NO: 5545 - DNA, 77 bp, Homo sapiens
aaagcctgattggagtgctttatagagagaatgggggagaaaagtcagacagtgtgtgtaaatgaggagctttgcta

SEQ ID NO: 5546 - DNA, 78 bp, Homo sapiens
attggagtgctttatagagagaatgggggagaaaagtcagacagtgtgtgtaaatgaggagctttgctatgaagagga

SEQ ID NO: 5547 - DNA, 79 bp, Homo sapiens
tttatagagagaatgggggagaaaagtcagacagtgtgtgtaaatgaggagctttgctatgaagaggagcagaagaata

SEQ ID NO: 5548 - DNA, 77 bp, Homo sapiens
aaaagtcagacagtgtgtgtaaatgaggagctttgctatgaagaggagcagaagaataggttagggaagtggagata

SEQ ID NO: 5549 - DNA, 76 bp, Homo sapiens
agtgtgtgtaaatgaggagctttgctatgaagaggagcagaagaataggttagggaagtggagataatgaagggta

SEQ ID NO: 5550 - DNA, 72 bp, Homo sapiens
ggagctttgctatgaagaggagcagaagaataggttagggaagtggagataatgaagggtattttaaaaata

SEQ ID NO: 5551 - DNA, 69 bp, Homo sapiens
atgaagaggagcagaagaataggttagggaagtggagataatgaagggtattttaaaaataagataaat

SEQ ID NO: 5552 - DNA, 69 bp, Homo sapiens
agcagaagaataggttagggaagtggagataatgaagggtattttaaaaataagataaattataggatg

SEQ ID NO: 5553 - DNA, 72 bp, Homo sapiens
tggagataatgaagggtattttaaaaataagataaattataggatgttaggtacactaataggaatgattca

SEQ ID NO: 5554 - DNA, 71 bp, Homo sapiens
tgaagggtattttaaaaataagataaattataggatgttaggtacactaataggaatgattcagtagagag

SEQ ID NO: 5555 - DNA, 72 bp, Homo sapiens
aaaaataagataaattataggatgttaggtacactaataggaatgattcagtagagaggaggaataatgaaa

SEQ ID NO: 5556 - DNA, 76 bp, Homo sapiens
gataaattataggatgttaggtacactaataggaatgattcagtagagaggaggaataatgaaatgatagaaaaga

SEQ ID NO: 5557 - DNA, 77 bp, Homo sapiens
ggatgttaggtacactaataggaatgattcagtagagaggaggaataatgaaatgatagaaaagacagaaatattgc

SEQ ID NO: 5558 - DNA, 78 bp, Homo sapiens
aggtacactaataggaatgattcagtagagaggaggaataatgaaatgatagaaaagacagaaatattgctacagtga

SEQ ID NO: 5559 - DNA, 78 bp, Homo sapiens
aataggaatgattcagtagagaggaggaataatgaaatgatagaaaagacagaaatattgctacagtgatgtccccta

SEQ ID NO: 5560 - DNA, 79 bp, Homo sapiens
attcagtagagaggaggaataatgaaatgatagaaaagacagaaatattgctacagtgatgtcccctagaatatgagaa

SEQ ID NO: 5561 - DNA, 76 bp, Homo sapiens
ggaataatgaaatgatagaaaagacagaaatattgctacagtgatgtcccctagaatatgagaagggatgggattt

SEQ ID NO: 5562 - DNA, 72 bp, Homo sapiens
aaaagacagaaatattgctacagtgatgtcccctagaatatgagaagggatgggattttggggaaaatatct

SEQ ID NO: 5563 - DNA, 71 bp, Homo sapiens
agtgatgtcccctagaatatgagaagggatgggattttggggaaaatatcttgtgataaatccagacgttt

SEQ ID NO: 5564 - DNA, 69 bp, Homo sapiens
cctagaatatgagaagggatgggattttggggaaaatatcttgtgataaatccagacgttttttggtaa

SEQ ID NO: 5565 - DNA, 67 bp, Homo sapiens
gagaagggatgggattttggggaaaatatcttgtgataaatccagacgttttttggtaaagtaagaa

SEQ ID NO: 5566 - DNA, 69 bp, Homo sapiens
ggatgggattttggggaaaatatcttgtgataaatccagacgttttttggtaaagtaagaagcaatgct

SEQ ID NO: 5567 - DNA, 70 bp, Homo sapiens
gggaaaatatcttgtgataaatccagacgttttttggtaaagtaagaagcaatgcttttagttgtgacga

SEQ ID NO: 5568 - DNA, 71 bp, Homo sapiens
cttgtgataaatccagacgttttttggtaaagtaagaagcaatgcttttagttgtgacgatttgaggagta

SEQ ID NO: 5569 - DNA, 71 bp, Homo sapiens
ccagacgttttttggtaaagtaagaagcaatgcttttagttgtgacgatttgaggagtattagagatttga

SEQ ID NO: 5570 - DNA, 72 bp, Homo sapiens
tttttggtaaagtaagaagcaatgcttttagttgtgacgatttgaggagtattagagatttgagtgaagaaa

SEQ ID NO: 5571 - DNA, 72 bp, Homo sapiens
aaagtaagaagcaatgcttttagttgtgacgatttgaggagtattagagatttgagtgaagaaaaaaaggca

SEQ ID NO: 5572 - DNA, 75 bp, Homo sapiens
agcaatgcttttagttgtgacgatttgaggagtattagagatttgagtgaagaaaaaaaggcatgagatggttaa

SEQ ID NO: 5573 - DNA, 76 bp, Homo sapiens
agttgtgacgatttgaggagtattagagatttgagtgaagaaaaaaaggcatgagatggttaactataataatgca

SEQ ID NO: 5574 - DNA, 73 bp, Homo sapiens
gtattagagatttgagtgaagaaaaaaaggcatgagatggttaactataataatgcaaaagaaaatttccaca

SEQ ID NO: 5575 - DNA, 76 bp, Homo sapiens
gcatgagatggttaactataataatgcaaaagaaaatttccacaatgtttactatgatttctgggtagtcacagtg

SEQ ID NO: 5576 - DNA, 73 bp, Homo sapiens
ctataataatgcaaaagaaaatttccacaatgtttactatgatttctgggtagtcacagtgttccacctgaag

SEQ ID NO: 5577 - DNA, 73 bp, Homo sapiens
aatgcaaaagaaaatttccacaatgtttactatgatttctgggtagtcacagtgttccacctgaaggttcatg

SEQ ID NO: 5578 - DNA, 73 bp, Homo sapiens
atttccacaatgtttactatgatttctgggtagtcacagtgttccacctgaaggttcatgggcaagacttaaa

SEQ ID NO: 5579 - DNA, 73 bp, Homo sapiens
acaatgtttactatgatttctgggtagtcacagtgttccacctgaaggttcatgggcaagacttaaaggtgag

SEQ ID NO: 5580 - DNA, 75 bp, Homo sapiens
actatgatttctgggtagtcacagtgttccacctgaaggttcatgggcaagacttaaaggtgaggcagatttaca

SEQ ID NO: 5581 - DNA, 73 bp, Homo sapiens
tagtcacagtgttccacctgaaggttcatgggcaagacttaaaggtgaggcagatttacacagctttttgttt

SEQ ID NO: 5582 - DNA, 71 bp, Homo sapiens
acagtgttccacctgaaggttcatgggcaagacttaaaggtgaggcagatttacacagctttttgtttttc

SEQ ID NO: 5583 - DNA, 74 bp, Homo sapiens
atgggcaagacttaaaggtgaggcagatttacacagctttttgtttttctctattcttgtccatctctatggac

SEQ ID NO: 5584 - DNA, 73 bp, Homo sapiens
cagatttacacagctttttgtttttctctattcttgtccatctctatggacgtgggcacagagtagggtttgg

SEQ ID NO: 5585 - DNA, 72 bp, Homo sapiens
ttgtttttctctattcttgtccatctctatggacgtgggcacagagtagggtttggtcaggttgttatttta

SEQ ID NO: 5586 - DNA, 76 bp, Homo sapiens
tctattcttgtccatctctatggacgtgggcacagagtagggtttggtcaggttgttattttaccatctgaataca

SEQ ID NO: 5587 - DNA, 76 bp, Homo sapiens
atctctatggacgtgggcacagagtagggtttggtcaggttgttattttaccatctgaatacagcgaatgagtgag

SEQ ID NO: 5588 - DNA, 72 bp, Homo sapiens
acgtgggcacagagtagggtttggtcaggttgttattttaccatctgaatacagcgaatgagtgagggtaaa

SEQ ID NO: 5589 - DNA, 72 bp, Homo sapiens
acagagtagggtttggtcaggttgttattttaccatctgaatacagcgaatgagtgagggtaaatgccaggg

SEQ ID NO: 5590 - DNA, 73 bp, Homo sapiens
tttggtcaggttgttattttaccatctgaatacagcgaatgagtgagggtaaatgccaggggggttataatga

SEQ ID NO: 5591 - DNA, 76 bp, Homo sapiens
tgttattttaccatctgaatacagcgaatgagtgagggtaaatgccaggggggttataatgatggatcattatatt

SEQ ID NO: 5592 - DNA, 75 bp, Homo sapiens
tttaccatctgaatacagcgaatgagtgagggtaaatgccaggggggttataatgatggatcattatatttaaac

SEQ ID NO: 5593 - DNA, 73 bp, Homo sapiens
atacagcgaatgagtgagggtaaatgccaggggggttataatgatggatcattatatttaaacccagtgggta

SEQ ID NO: 5594 - DNA, 70 bp, Homo sapiens
aatgagtgagggtaaatgccaggggggttataatgatggatcattatatttaaacccagtgggtagggaa

SEQ ID NO: 5595 - DNA, 71 bp, Homo sapiens
gtaaatgccaggggggttataatgatggatcattatatttaaacccagtgggtagggaaatgaggacaata

SEQ ID NO: 5596 - DNA, 75 bp, Homo sapiens
ggttataatgatggatcattatatttaaacccagtgggtagggaaatgaggacaatagatgagggatagtatata

SEQ ID NO: 5597 - DNA, 74 bp, Homo sapiens
aatgatggatcattatatttaaacccagtgggtagggaaatgaggacaatagatgagggatagtatatactggt

SEQ ID NO: 5598 - DNA, 73 bp, Homo sapiens
taaacccagtgggtagggaaatgaggacaatagatgagggatagtatatactggttcatggtttctggtgaaa

SEQ ID NO: 5599 - DNA, 74 bp, Homo sapiens
gggaaatgaggacaatagatgagggatagtatatactggttcatggtttctggtgaaattaagggattgttgaa

SEQ ID NO: 5600 - DNA, 78 bp, Homo sapiens
atgaggacaatagatgagggatagtatatactggttcatggtttctggtgaaattaagggattgttgaaggctgcgca

SEQ ID NO: 5601 - DNA, 73 bp, Homo sapiens
agcctgggcaactcagtaagacctcaaagattgttggagtagtaaagagtgaattagaaatatgaagtggtat

SEQ ID NO: 5602 - DNA, 72 bp, Homo sapiens
gggcaactcagtaagacctcaaagattgttggagtagtaaagagtgaattagaaatatgaagtggtatttaa

SEQ ID NO: 5603 - DNA, 72 bp, Homo sapiens
gtaagacctcaaagattgttggagtagtaaagagtgaattagaaatatgaagtggtatttaagagtaggata

SEQ ID NO: 5604 - DNA, 74 bp, Homo sapiens
aagattgttggagtagtaaagagtgaattagaaatatgaagtggtatttaagagtaggatatatgaaatggaga

SEQ ID NO: 5605 - DNA, 74 bp, Homo sapiens
ggagtagtaaagagtgaattagaaatatgaagtggtatttaagagtaggatatatgaaatggagattattgagg

SEQ ID NO: 5606 - DNA, 75 bp, Homo sapiens
gagtgaattagaaatatgaagtggtatttaagagtaggatatatgaaatggagattattgagggtttgagattat

SEQ ID NO: 5607 - DNA, 78 bp, Homo sapiens
tatgaagtggtatttaagagtaggatatatgaaatggagattattgagggtttgagattatttaatcatatcagaatc

SEQ ID NO: 5608 - DNA, 77 bp, Homo sapiens
gtggtatttaagagtaggatatatgaaatggagattattgagggtttgagattatttaatcatatcagaatctagga

SEQ ID NO: 5609 - DNA, 81 bp, Homo sapiens
aagagtaggatatatgaaatggagattattgagggtttgagattatttaatcatatcagaatctaggatgtgatcagggca

SEQ ID NO: 5610 - DNA, 84 bp, Homo sapiens
tatgaaatggagattattgagggtttgagattatttaatcatatcagaatctaggatgtgatcagggcatgaggggctgctgta

SEQ ID NO: 5611 - DNA, 82 bp, Homo sapiens
attattgagggtttgagattatttaatcatatcagaatctaggatgtgatcagggcatgaggggctgctgtagggcagaaga

SEQ ID NO: 5612 - DNA, 84 bp, Homo sapiens
attatttaatcatatcagaatctaggatgtgatcagggcatgaggggctgctgtagggcagaagacaagatcattggaagagag

SEQ ID NO: 5613 - DNA, 85 bp, Homo sapiens
atatcagaatctaggatgtgatcagggcatgaggggctgctgtagggcagaagacaagatcattggaagagaggctgtcaaggaa

SEQ ID NO: 5614 - DNA, 78 bp, Homo sapiens
gggctgctgtagggcagaagacaagatcattggaagagaggctgtcaaggaacagagagactggaggttataaaagat

SEQ ID NO: 5615 - DNA, 79 bp, Homo sapiens
tagggcagaagacaagatcattggaagagaggctgtcaaggaacagagagactggaggttataaaagattgtctagatg

SEQ ID NO: 5616 - DNA, 78 bp, Homo sapiens
acaagatcattggaagagaggctgtcaaggaacagagagactggaggttataaaagattgtctagatgtatactgaat

SEQ ID NO: 5617 - DNA, 73 bp, Homo sapiens
aggaacagagagactggaggttataaaagattgtctagatgtatactgaattctctaagaagtaaaataacag

SEQ ID NO: 5618 - DNA, 73 bp, Homo sapiens
ctggaggttataaaagattgtctagatgtatactgaattctctaagaagtaaaataacagtagtgttgaagac

SEQ ID NO: 5619 - DNA, 74 bp, Homo sapiens
ggttataaaagattgtctagatgtatactgaattctctaagaagtaaaataacagtagtgttgaagactgacag

SEQ ID NO: 5620 - DNA, 76 bp, Homo sapiens
gattgtctagatgtatactgaattctctaagaagtaaaataacagtagtgttgaagactgacagtaatgtaggtac

SEQ ID NO: 5621 - DNA, 72 bp, Homo sapiens
tactgaattctctaagaagtaaaataacagtagtgttgaagactgacagtaatgtaggtactaaggtagtgg

SEQ ID NO: 5622 - DNA, 72 bp, Homo sapiens
ttctctaagaagtaaaataacagtagtgttgaagactgacagtaatgtaggtactaaggtagtggttggcaa

SEQ ID NO: 5623 - DNA, 69 bp, Homo sapiens
aagtaaaataacagtagtgttgaagactgacagtaatgtaggtactaaggtagtggttggcaagctttt

SEQ ID NO: 5624 - DNA, 74 bp, Homo sapiens
tagtgttgaagactgacagtaatgtaggtactaaggtagtggttggcaagctttttctgtcaggggctgaatac

SEQ ID NO: 5625 - DNA, 72 bp, Homo sapiens
agactgacagtaatgtaggtactaaggtagtggttggcaagctttttctgtcaggggctgaatactaagtat

SEQ ID NO: 5626 - DNA, 70 bp, Homo sapiens
acagtaatgtaggtactaaggtagtggttggcaagctttttctgtcaggggctgaatactaagtatttta

SEQ ID NO: 5627 - DNA, 67 bp, Homo sapiens
aggtactaaggtagtggttggcaagctttttctgtcaggggctgaatactaagtattttaggttttg

SEQ ID NO: 5628 - DNA, 71 bp, Homo sapiens
tggttggcaagctttttctgtcaggggctgaatactaagtattttaggttttgtaggccatactggctctt

SEQ ID NO: 5629 - DNA, 68 bp, Homo sapiens
aagctttttctgtcaggggctgaatactaagtattttaggttttgtaggccatactggctctttttaa

SEQ ID NO: 5630 - DNA, 70 bp, Homo sapiens
tgtcaggggctgaatactaagtattttaggttttgtaggccatactggctctttttaatactcagacctt

SEQ ID NO: 5631 - DNA, 71 bp, Homo sapiens
gaatactaagtattttaggttttgtaggccatactggctctttttaatactcagacctttgttgctgtaga

SEQ ID NO: 5632 - DNA, 76 bp, Homo sapiens
tttgtaggccatactggctctttttaatactcagacctttgttgctgtagaacagagtagccatagacaatttgta

SEQ ID NO: 5633 - DNA, 76 bp, Homo sapiens
ttttaatactcagacctttgttgctgtagaacagagtagccatagacaatttgtaaacaagcggatgtggcagtgt

SEQ ID NO: 5634 - DNA, 79 bp, Homo sapiens
tactcagacctttgttgctgtagaacagagtagccatagacaatttgtaaacaagcggatgtggcagtgttccagcaaa

SEQ ID NO: 5635 - DNA, 76 bp, Homo sapiens
tttgttgctgtagaacagagtagccatagacaatttgtaaacaagcggatgtggcagtgttccagcaaaactttat

SEQ ID NO: 5636 - DNA, 76 bp, Homo sapiens
tagaacagagtagccatagacaatttgtaaacaagcggatgtggcagtgttccagcaaaactttatttatggacac

SEQ ID NO: 5637 - DNA, 72 bp, Homo sapiens
atagacaatttgtaaacaagcggatgtggcagtgttccagcaaaactttatttatggacactggaacttaaa

SEQ ID NO: 5638 - DNA, 71 bp, Homo sapiens
aatttgtaaacaagcggatgtggcagtgttccagcaaaactttatttatggacactggaacttaaatttca

SEQ ID NO: 5639 - DNA, 71 bp, Homo sapiens
aagcggatgtggcagtgttccagcaaaactttatttatggacactggaacttaaatttcatagaatagttt

SEQ ID NO: 5640 - DNA, 71 bp, Homo sapiens
gtggcagtgttccagcaaaactttatttatggacactggaacttaaatttcatagaatagttttcacgtgt

SEQ ID NO: 5641 - DNA, 71 bp, Homo sapiens
cagcaaaactttatttatggacactggaacttaaatttcatagaatagttttcacgtgttatgaaatagtc

SEQ ID NO: 5642 - DNA, 70 bp, Homo sapiens
atttatggacactggaacttaaatttcatagaatagttttcacgtgttatgaaatagtcttcttttgatt

SEQ ID NO: 5643 - DNA, 68 bp, Homo sapiens
ggacactggaacttaaatttcatagaatagttttcacgtgttatgaaatagtcttcttttgatttttt

SEQ ID NO: 5644 - DNA, 68 bp, Homo sapiens
ttttttaaaaagccatttaaacgtattaaaatcattcttagctgttgagctatacaaaaacaggtgga

SEQ ID NO: 5645 - DNA, 72 bp, Homo sapiens
aaagccatttaaacgtattaaaatcattcttagctgttgagctatacaaaaacaggtggatgactagagggc

SEQ ID NO: 5646 - DNA, 72 bp, Homo sapiens
ttaaacgtattaaaatcattcttagctgttgagctatacaaaaacaggtggatgactagagggcctgtagtt

SEQ ID NO: 5647 - DNA, 76 bp, Homo sapiens
ttaaaatcattcttagctgttgagctatacaaaaacaggtggatgactagagggcctgtagtttgctgtatcctac

SEQ ID NO: 5648 - DNA, 79 bp, Homo sapiens
tcttagctgttgagctatacaaaaacaggtggatgactagagggcctgtagtttgctgtatcctaccctaatgatgaga

SEQ ID NO: 5649 - DNA, 74 bp, Homo sapiens
ctatacaaaaacaggtggatgactagagggcctgtagtttgctgtatcctaccctaatgatgagacctaatggt

SEQ ID NO: 5650 - DNA, 74 bp, Homo sapiens
aaaaacaggtggatgactagagggcctgtagtttgctgtatcctaccctaatgatgagacctaatggttgctaa

SEQ ID NO: 5651 - DNA, 77 bp, Homo sapiens
atgactagagggcctgtagtttgctgtatcctaccctaatgatgagacctaatggttgctaatgtctggtaacttga

SEQ ID NO: 5652 - DNA, 74 bp, Homo sapiens
ggcctgtagtttgctgtatcctaccctaatgatgagacctaatggttgctaatgtctggtaacttgagattttt

SEQ ID NO: 5653 - DNA, 75 bp, Homo sapiens
gtttgctgtatcctaccctaatgatgagacctaatggttgctaatgtctggtaacttgagatttttttgctgaaa

SEQ ID NO: 5654 - DNA, 72 bp, Homo sapiens
tcctaccctaatgatgagacctaatggttgctaatgtctggtaacttgagatttttttgctgaaaggtttta

SEQ ID NO: 5655 - DNA, 71 bp, Homo sapiens
gagacctaatggttgctaatgtctggtaacttgagatttttttgctgaaaggttttagagagttgtagaat

SEQ ID NO: 5656 - DNA, 71 bp, Homo sapiens
ggttgctaatgtctggtaacttgagatttttttgctgaaaggttttagagagttgtagaattaacattgag

SEQ ID NO: 5657 - DNA, 72 bp, Homo sapiens
atgtctggtaacttgagatttttttgctgaaaggttttagagagttgtagaattaacattgaggaatgagga

SEQ ID NO: 5658 - DNA, 69 bp, Homo sapiens
cttgagatttttttgctgaaaggttttagagagttgtagaattaacattgaggaatgaggaaacctacc

SEQ ID NO: 5659 - DNA, 72 bp, Homo sapiens
tttttgctgaaaggttttagagagttgtagaattaacattgaggaatgaggaaacctacctcatctccatac

SEQ ID NO: 5660 - DNA, 72 bp, Homo sapiens
aaaggttttagagagttgtagaattaacattgaggaatgaggaaacctacctcatctccatacccagtgata

SEQ ID NO: 5661 - DNA, 78 bp, Homo sapiens
tagagagttgtagaattaacattgaggaatgaggaaacctacctcatctccatacccagtgatacaagagctgtggga

SEQ ID NO: 5662 - DNA, 77 bp, Homo sapiens
tagaattaacattgaggaatgaggaaacctacctcatctccatacccagtgatacaagagctgtgggagcaaagtaa

SEQ ID NO: 5663 - DNA, 77 bp, Homo sapiens
aggaatgaggaaacctacctcatctccatacccagtgatacaagagctgtgggagcaaagtaacgttgagatagcta

SEQ ID NO: 5664 - DNA, 77 bp, Homo sapiens
atctccatacccagtgatacaagagctgtgggagcaaagtaacgttgagatagctacagagtaaacagtgggtttca

SEQ ID NO: 5665 - DNA, 74 bp, Homo sapiens
atacccagtgatacaagagctgtgggagcaaagtaacgttgagatagctacagagtaaacagtgggtttcaggg

SEQ ID NO: 5666 - DNA, 69 bp, Homo sapiens
aaagtaacgttgagatagctacagagtaaacagtgggtttcagggtcgatctaagtttttgttggaaca

SEQ ID NO: 5667 - DNA, 71 bp, Homo sapiens
agtgggtttcagggtcgatctaagtttttgttggaacaagaatcagaggagatgttcagagaaaaggatgg

SEQ ID NO: 5668 - DNA, 74 bp, Homo sapiens
tcgatctaagtttttgttggaacaagaatcagaggagatgttcagagaaaaggatggggtacattgcaccttgt

SEQ ID NO: 5669 - DNA, 73 bp, Homo sapiens
taagtttttgttggaacaagaatcagaggagatgttcagagaaaaggatggggtacattgcaccttgttctcg

SEQ ID NO: 5670 - DNA, 77 bp, Homo sapiens
gttggaacaagaatcagaggagatgttcagagaaaaggatggggtacattgcaccttgttctcggagcacagtggaa

SEQ ID NO: 5671 - DNA, 78 bp, Homo sapiens
aatcagaggagatgttcagagaaaaggatggggtacattgcaccttgttctcggagcacagtggaaggctttcagctg

SEQ ID NO: 5672 - DNA, 77 bp, Homo sapiens
agatgttcagagaaaaggatggggtacattgcaccttgttctcggagcacagtggaaggctttcagctgttgaagga

SEQ ID NO: 5673 - DNA, 73 bp, Homo sapiens
agaaaaggatggggtacattgcaccttgttctcggagcacagtggaaggctttcagctgttgaaggaggggtg

SEQ ID NO: 5674 - DNA, 78 bp, Homo sapiens
gtacattgcaccttgttctcggagcacagtggaaggctttcagctgttgaaggaggggtggcaggtgtggacataata

SEQ ID NO: 5675 - DNA, 74 bp, Homo sapiens
ttgttctcggagcacagtggaaggctttcagctgttgaaggaggggtggcaggtgtggacataataggggaggt

SEQ ID NO: 5676 - DNA, 73 bp, Homo sapiens
agcacagtggaaggctttcagctgttgaaggaggggtggcaggtgtggacataataggggaggttcacaaccg

SEQ ID NO: 5677 - DNA, 71 bp, Homo sapiens
aaggctttcagctgttgaaggaggggtggcaggtgtggacataataggggaggttcacaaccgtgtaggga

SEQ ID NO: 5678 - DNA, 74 bp, Homo sapiens
tttcagctgttgaaggaggggtggcaggtgtggacataataggggaggttcacaaccgtgtagggatgaggcag

SEQ ID NO: 5679 - DNA, 73 bp, Homo sapiens
aaggaggggtggcaggtgtggacataataggggaggttcacaaccgtgtagggatgaggcaggtgaggatgga

SEQ ID NO: 5680 - DNA, 75 bp, Homo sapiens
gggaggttcacaaccgtgtagggatgaggcaggtgaggatggaccaggagtcttttgatgactgacataaaaaca

SEQ ID NO: 5681 - DNA, 74 bp, Homo sapiens
acaaccgtgtagggatgaggcaggtgaggatggaccaggagtcttttgatgactgacataaaaacagggagaaa

SEQ ID NO: 5682 - DNA, 76 bp, Homo sapiens
tgaggatggaccaggagtcttttgatgactgacataaaaacagggagaaagtcattatccgattgaccctggtaga

SEQ ID NO: 5683 - DNA, 73 bp, Homo sapiens
accaggagtcttttgatgactgacataaaaacagggagaaagtcattatccgattgaccctggtagacttcag

SEQ ID NO: 5684 - DNA, 76 bp, Homo sapiens
ttttgatgactgacataaaaacagggagaaagtcattatccgattgaccctggtagacttcaggcaaataagatga

SEQ ID NO: 5685 - DNA, 75 bp, Homo sapiens
tgacataaaaacagggagaaagtcattatccgattgaccctggtagacttcaggcaaataagatgaggccttgag

SEQ ID NO: 5686 - DNA, 74 bp, Homo sapiens
agaaagtcattatccgattgaccctggtagacttcaggcaaataagatgaggccttgagtgtttgaagaggttg

SEQ ID NO: 5687 - DNA, 74 bp, Homo sapiens
gattgaccctggtagacttcaggcaaataagatgaggccttgagtgtttgaagaggttgggtagagaggtagta

SEQ ID NO: 5688 - DNA, 74 bp, Homo sapiens
tggtagacttcaggcaaataagatgaggccttgagtgtttgaagaggttgggtagagaggtagtatgggcttct

SEQ ID NO: 5689 - DNA, 74 bp, Homo sapiens
acttcaggcaaataagatgaggccttgagtgtttgaagaggttgggtagagaggtagtatgggcttcttcttga

SEQ ID NO: 5690 - DNA, 76 bp, Homo sapiens
aataagatgaggccttgagtgtttgaagaggttgggtagagaggtagtatgggcttcttcttgatcctgatggctg

SEQ ID NO: 5691 - DNA, 76 bp, Homo sapiens
ttgagtgtttgaagaggttgggtagagaggtagtatgggcttcttcttgatcctgatggctggtagaagccttcag

SEQ ID NO: 5692 - DNA, 74 bp, Homo sapiens
ttgggtagagaggtagtatgggcttcttcttgatcctgatggctggtagaagccttcagtcataggttcctttt

SEQ ID NO: 5693 - DNA, 72 bp, Homo sapiens
aggtagtatgggcttcttcttgatcctgatggctggtagaagccttcagtcataggttcctttttggggaac

SEQ ID NO: 5694 - DNA, 72 bp, Homo sapiens
ttgatcctgatggctggtagaagccttcagtcataggttcctttttggggaacggtgtcattttacattggt

SEQ ID NO: 5695 - DNA, 70 bp, Homo sapiens
tggtagaagccttcagtcataggttcctttttggggaacggtgtcattttacattggttcaccacactct

SEQ ID NO: 5696 - DNA, 69 bp, Homo sapiens
aagccttcagtcataggttcctttttggggaacggtgtcattttacattggttcaccacactcttatct

SEQ ID NO: 5697 - DNA, 70 bp, Homo sapiens
ataggttcctttttggggaacggtgtcattttacattggttcaccacactcttatcttctcttgatggaa

SEQ ID NO: 5698 - DNA, 72 bp, Homo sapiens
tttttggggaacggtgtcattttacattggttcaccacactcttatcttctcttgatggaaagatagggata

SEQ ID NO: 5699 - DNA, 74 bp, Homo sapiens
tgtcattttacattggttcaccacactcttatcttctcttgatggaaagatagggataggtcagggaaagaaag

SEQ ID NO: 5700 - DNA, 73 bp, Homo sapiens
ttttacattggttcaccacactcttatcttctcttgatggaaagatagggataggtcagggaaagaaaggctg

SEQ ID NO: 5701 - DNA, 70 bp, Homo sapiens
tcttatcttctcttgatggaaagatagggataggtcagggaaagaaaggctgttttacccagaactttag

SEQ ID NO: 5702 - DNA, 68 bp, Homo sapiens
tgatggaaagatagggataggtcagggaaagaaaggctgttttacccagaactttagggttccttcta

SEQ ID NO: 5703 - DNA, 67 bp, Homo sapiens
agatagggataggtcagggaaagaaaggctgttttacccagaactttagggttccttctagactata

SEQ ID NO: 5704 - DNA, 65 bp, Homo sapiens
tcagggaaagaaaggctgttttacccagaactttagggttccttctagactatatgggtttttaa

SEQ ID NO: 5705 - DNA, 63 bp, Homo sapiens
gaaagaaaggctgttttacccagaactttagggttccttctagactatatgggtttttaaaaa

SEQ ID NO: 5706 - DNA, 82 bp, Homo sapiens
catattttggaggtacatgtaatattttgatacatgtacacaatgtgtagactccatggttgatgatggtagagcacactta

SEQ ID NO: 5707 - DNA, 80 bp, Homo sapiens
aggtacatgtaatattttgatacatgtacacaatgtgtagactccatggttgatgatggtagagcacacttaaattgaaa

SEQ ID NO: 5708 - DNA, 80 bp, Homo sapiens
atgtaatattttgatacatgtacacaatgtgtagactccatggttgatgatggtagagcacacttaaattgaaagtcaag

SEQ ID NO: 5709 - DNA, 77 bp, Homo sapiens
tacatgtacacaatgtgtagactccatggttgatgatggtagagcacacttaaattgaaagtcaagggaactttaat

SEQ ID NO: 5710 - DNA, 77 bp, Homo sapiens
tacacaatgtgtagactccatggttgatgatggtagagcacacttaaattgaaagtcaagggaactttaattcacta

SEQ ID NO: 5711 - DNA, 74 bp, Homo sapiens
tagactccatggttgatgatggtagagcacacttaaattgaaagtcaagggaactttaattcactactgtaatt

SEQ ID NO: 5712 - DNA, 71 bp, Homo sapiens
ggtagagcacacttaaattgaaagtcaagggaactttaattcactactgtaatttttaaatgtctgtatca

SEQ ID NO: 5713 - DNA, 73 bp, Homo sapiens
taaattgaaagtcaagggaactttaattcactactgtaatttttaaatgtctgtatcatgtagtgtttgcaca

SEQ ID NO: 5714 - DNA, 71 bp, Homo sapiens
gaaagtcaagggaactttaattcactactgtaatttttaaatgtctgtatcatgtagtgtttgcacagttt

SEQ ID NO: 5715 - DNA, 70 bp, Homo sapiens
ggaactttaattcactactgtaatttttaaatgtctgtatcatgtagtgtttgcacagttttaaccttag

SEQ ID NO: 5716 - DNA, 71 bp, Homo sapiens
ttttaaatgtctgtatcatgtagtgtttgcacagttttaaccttagtttaccatctcttactccttagtaa

SEQ ID NO: 5717 - DNA, 69 bp, Homo sapiens
ctgtatcatgtagtgtttgcacagttttaaccttagtttaccatctcttactccttagtaaaaaattcc

SEQ ID NO: 5718 - DNA, 66 bp, Homo sapiens
catgtagtgtttgcacagttttaaccttagtttaccatctcttactccttagtaaaaaattccgtt

SEQ ID NO: 5719 - DNA, 65 bp, Homo sapiens
gcacagttttaaccttagtttaccatctcttactccttagtaaaaaattccgtttcatttatttc

SEQ ID NO: 5720 - DNA, 63 bp, Homo sapiens
tttaaccttagtttaccatctcttactccttagtaaaaaattccgtttcatttatttctttat

SEQ ID NO: 5721 - DNA, 67 bp, Homo sapiens
ccatctcttactccttagtaaaaaattccgtttcatttatttctttattaacttagattatactgcc

SEQ ID NO: 5722 - DNA, 70 bp, Homo sapiens
tccgtttcatttatttctttattaacttagattatactgccttatattttttagtgcactttttctgtga

SEQ ID NO: 5723 - DNA, 68 bp, Homo sapiens
ttctttattaacttagattatactgccttatattttttagtgcactttttctgtgactaacctttaac

SEQ ID NO: 5724 - DNA, 69 bp, Homo sapiens
acttagattatactgccttatattttttagtgcactttttctgtgactaacctttaacccttttgcata

SEQ ID NO: 5725 - DNA, 70 bp, Homo sapiens
gattatactgccttatattttttagtgcactttttctgtgactaacctttaacccttttgcatataaatg

SEQ ID NO: 5726 - DNA, 66 bp, Homo sapiens
ccttatattttttagtgcactttttctgtgactaacctttaacccttttgcatataaatgttttaa

SEQ ID NO: 5727 - DNA, 69 bp, Homo sapiens
aacccttttgcatataaatgttttaaaactagaaattagcaacaagtatctacttcaatattatgttat

SEQ ID NO: 5728 - DNA, 73 bp, Homo sapiens
aaatgttttaaaactagaaattagcaacaagtatctacttcaatattatgttattaatgtggtatcactatca

SEQ ID NO: 5729 - DNA, 72 bp, Homo sapiens
aaactagaaattagcaacaagtatctacttcaatattatgttattaatgtggtatcactatcaccttttaaa

SEQ ID NO: 5730 - DNA, 75 bp, Homo sapiens
gaaattagcaacaagtatctacttcaatattatgttattaatgtggtatcactatcaccttttaaatattgcaac

SEQ ID NO: 5731 - DNA, 74 bp, Homo sapiens
caagtatctacttcaatattatgttattaatgtggtatcactatcaccttttaaatattgcaactataatttac

SEQ ID NO: 5732 - DNA, 74 bp, Homo sapiens
cttcaatattatgttattaatgtggtatcactatcaccttttaaatattgcaactataatttactagtgtaata

SEQ ID NO: 5733 - DNA, 74 bp, Homo sapiens
atgttattaatgtggtatcactatcaccttttaaatattgcaactataatttactagtgtaatattttcacaca

SEQ ID NO: 5734 - DNA, 72 bp, Homo sapiens
gtggtatcactatcaccttttaaatattgcaactataatttactagtgtaatattttcacacaaatctttgg

SEQ ID NO: 5735 - DNA, 71 bp, Homo sapiens
tcaccttttaaatattgcaactataatttactagtgtaatattttcacacaaatctttggtaacgatggta

SEQ ID NO: 5736 - DNA, 72 bp, Homo sapiens
ctataatttactagtgtaatattttcacacaaatctttggtaacgatggtagtggaccaccggtgatacata

SEQ ID NO: 5737 - DNA, 75 bp, Homo sapiens
acacaaatctttggtaacgatggtagtggaccaccggtgatacataagcattgttcactaagattgttatcagag

SEQ ID NO: 5738 - DNA, 74 bp, Homo sapiens
tttggtaacgatggtagtggaccaccggtgatacataagcattgttcactaagattgttatcagagggagtaaa

SEQ ID NO: 5739 - DNA, 73 bp, Homo sapiens
accggtgatacataagcattgttcactaagattgttatcagagggagtaaaagtgtaagtgtcttttccagaa

SEQ ID NO: 5740 - DNA, 74 bp, Homo sapiens
ataagcattgttcactaagattgttatcagagggagtaaaagtgtaagtgtcttttccagaagccatagctctt

SEQ ID NO: 5741 - DNA, 72 bp, Homo sapiens
attgttcactaagattgttatcagagggagtaaaagtgtaagtgtcttttccagaagccatagctctttgtt

SEQ ID NO: 5742 - DNA, 70 bp, Homo sapiens
agagggagtaaaagtgtaagtgtcttttccagaagccatagctctttgtttctatgattgggggattttg

SEQ ID NO: 5743 - DNA, 72 bp, Homo sapiens
tcttttccagaagccatagctctttgtttctatgattgggggattttggttcttaggtaaaagatgattaga

SEQ ID NO: 5744 - DNA, 73 bp, Homo sapiens
aagccatagctctttgtttctatgattgggggattttggttcttaggtaaaagatgattagatggaacacata

SEQ ID NO: 5745 - DNA, 72 bp, Homo sapiens
ctttgtttctatgattgggggattttggttcttaggtaaaagatgattagatggaacacataggattctgtg

SEQ ID NO: 5746 - DNA, 76 bp, Homo sapiens
tttctatgattgggggattttggttcttaggtaaaagatgattagatggaacacataggattctgtgtctgcaaga

SEQ ID NO: 5747 - DNA, 76 bp, Homo sapiens
gattttggttcttaggtaaaagatgattagatggaacacataggattctgtgtctgcaagaacttgatgtacggag

SEQ ID NO: 5748 - DNA, 77 bp, Homo sapiens
tcttaggtaaaagatgattagatggaacacataggattctgtgtctgcaagaacttgatgtacggagtcctttaata

SEQ ID NO: 5749 - DNA, 78 bp, Homo sapiens
taaaagatgattagatggaacacataggattctgtgtctgcaagaacttgatgtacggagtcctttaatatgacaaaa

SEQ ID NO: 5750 - DNA, 77 bp, Homo sapiens
attagatggaacacataggattctgtgtctgcaagaacttgatgtacggagtcctttaatatgacaaaacaagtaga

SEQ ID NO: 5751 - DNA, 76 bp, Homo sapiens
ataggattctgtgtctgcaagaacttgatgtacggagtcctttaatatgacaaaacaagtagagacagcttatgtt

SEQ ID NO: 5752 - DNA, 74 bp, Homo sapiens
tgtctgcaagaacttgatgtacggagtcctttaatatgacaaaacaagtagagacagcttatgtttttaggaaa

SEQ ID NO: 5753 - DNA, 71 bp, Homo sapiens
caagaacttgatgtacggagtcctttaatatgacaaaacaagtagagacagcttatgtttttaggaaagtg

SEQ ID NO: 5754 - DNA, 70 bp, Homo sapiens
atgtacggagtcctttaatatgacaaaacaagtagagacagcttatgtttttaggaaagtgtggttactc

SEQ ID NO: 5755 - DNA, 70 bp, Homo sapiens
tcctttaatatgacaaaacaagtagagacagcttatgtttttaggaaagtgtggttactcccctgatttc

SEQ ID NO: 5756 - DNA, 67 bp, Homo sapiens
acaaaacaagtagagacagcttatgtttttaggaaagtgtggttactcccctgatttccccaattta

SEQ ID NO: 5757 - DNA, 69 bp, Homo sapiens
ttatgtttttaggaaagtgtggttactcccctgatttccccaatttatagtctttctgagcacttcaaa

SEQ ID NO: 5758 - DNA, 68 bp, Homo sapiens
tttaggaaagtgtggttactcccctgatttccccaatttatagtctttctgagcacttcaaactagtt

SEQ ID NO: 5759 - DNA, 70 bp, Homo sapiens
ttactcccctgatttccccaatttatagtctttctgagcacttcaaactagtttccttcttcccatggta

SEQ ID NO: 5760 - DNA, 72 bp, Homo sapiens
tgatttccccaatttatagtctttctgagcacttcaaactagtttccttcttcccatggtagaagaggatat

SEQ ID NO: 5761 - DNA, 72 bp, Homo sapiens
aatttatagtctttctgagcacttcaaactagtttccttcttcccatggtagaagaggatattgccaaggaa

SEQ ID NO: 5762 - DNA, 71 bp, Homo sapiens
tagtctttctgagcacttcaaactagtttccttcttcccatggtagaagaggatattgccaaggaaaaaaa

SEQ ID NO: 5763 - DNA, 69 bp, Homo sapiens
acttcaaactagtttccttcttcccatggtagaagaggatattgccaaggaaaaaaaggggagatgcca

SEQ ID NO: 5764 - DNA, 68 bp, Homo sapiens
aactagtttccttcttcccatggtagaagaggatattgccaaggaaaaaaaggggagatgccaggtgg

SEQ ID NO: 5765 - DNA, 71 bp, Homo sapiens
cttcttcccatggtagaagaggatattgccaaggaaaaaaaggggagatgccaggtggggtagctcacacc

SEQ ID NO: 5766 - DNA, 69 bp, Homo sapiens
aaaaaaaaaaggtgagaaagtcttcgttttgacctgatagagatttgcttgctgtcaatgttattttgg

SEQ ID NO: 5767 - DNA, 73 bp, Homo sapiens
ggtgagaaagtcttcgttttgacctgatagagatttgcttgctgtcaatgttattttggtaaagaaattcgta

SEQ ID NO: 5768 - DNA, 76 bp, Homo sapiens
tcttcgttttgacctgatagagatttgcttgctgtcaatgttattttggtaaagaaattcgtagatgcttataagc

SEQ ID NO: 5769 - DNA, 76 bp, Homo sapiens
ttttgacctgatagagatttgcttgctgtcaatgttattttggtaaagaaattcgtagatgcttataagccacagt

SEQ ID NO: 5770 - DNA, 75 bp, Homo sapiens
gatagagatttgcttgctgtcaatgttattttggtaaagaaattcgtagatgcttataagccacagttctctttt

SEQ ID NO: 5771 - DNA, 74 bp, Homo sapiens
gcttgctgtcaatgttattttggtaaagaaattcgtagatgcttataagccacagttctctttttaaattgaca

SEQ ID NO: 5772 - DNA, 69 bp, Homo sapiens
gttattttggtaaagaaattcgtagatgcttataagccacagttctctttttaaattgacaaattgaac

SEQ ID NO: 5773 - DNA, 72 bp, Homo sapiens
ggtaaagaaattcgtagatgcttataagccacagttctctttttaaattgacaaattgaacctcacagcttg

SEQ ID NO: 5774 - DNA, 73 bp, Homo sapiens
cgtagatgcttataagccacagttctctttttaaattgacaaattgaacctcacagcttgttaaaagcaatct

SEQ ID NO: 5775 - DNA, 72 bp, Homo sapiens
gcttataagccacagttctctttttaaattgacaaattgaacctcacagcttgttaaaagcaatctttaaca

SEQ ID NO: 5776 - DNA, 70 bp, Homo sapiens
ccacagttctctttttaaattgacaaattgaacctcacagcttgttaaaagcaatctttaacacattacc

SEQ ID NO: 5777 - DNA, 72 bp, Homo sapiens
taaattgacaaattgaacctcacagcttgttaaaagcaatctttaacacattacctttcattattattagaa

SEQ ID NO: 5778 - DNA, 71 bp, Homo sapiens
caaattgaacctcacagcttgttaaaagcaatctttaacacattacctttcattattattagaagacttag

SEQ ID NO: 5779 - DNA, 71 bp, Homo sapiens
cttgttaaaagcaatctttaacacattacctttcattattattagaagacttagttgtttctcagcgtcat

SEQ ID NO: 5780 - DNA, 72 bp, Homo sapiens
cattattattagaagacttagttgtttctcagcgtcattataaatagctcacaatttttagttgtttgaatt

SEQ ID NO: 5781 - DNA, 70 bp, Homo sapiens
gcgtcattataaatagctcacaatttttagttgtttgaattttgaggtaatttagcttttaaagtacagc

SEQ ID NO: 5782 - DNA, 66 bp, Homo sapiens
aatagctcacaatttttagttgtttgaattttgaggtaatttagcttttaaagtacagcttttgtt

SEQ ID NO: 5783 - DNA, 65 bp, Homo sapiens
ctcacaatttttagttgtttgaattttgaggtaatttagcttttaaagtacagcttttgtttgtt

SEQ ID NO: 5784 - DNA, 63 bp, Homo sapiens
gttgtttgaattttgaggtaatttagcttttaaagtacagcttttgtttgttttaaggaaggt

SEQ ID NO: 5785 - DNA, 67 bp, Homo sapiens
ttgaggtaatttagcttttaaagtacagcttttgtttgttttaaggaaggttttcgtgcaccagaga

SEQ ID NO: 5786 - DNA, 69 bp, Homo sapiens
tttagcttttaaagtacagcttttgtttgttttaaggaaggttttcgtgcaccagagatacgtgatcag

SEQ ID NO: 5787 - DNA, 68 bp, Homo sapiens
ttaaagtacagcttttgtttgttttaaggaaggttttcgtgcaccagagatacgtgatcaggtttttg

SEQ ID NO: 5788 - DNA, 68 bp, Homo sapiens
ttttgtttgttttaaggaaggttttcgtgcaccagagatacgtgatcaggtttttgtctctttctctt

SEQ ID NO: 5789 - DNA, 71 bp, Homo sapiens
ttttaaggaaggttttcgtgcaccagagatacgtgatcaggtttttgtctctttctctttgcagcattttt

SEQ ID NO: 5790 - DNA, 73 bp, Homo sapiens
ttttcgtgcaccagagatacgtgatcaggtttttgtctctttctctttgcagcattttttaaaagaggataaa

SEQ ID NO: 5791 - DNA, 71 bp, Homo sapiens
accagagatacgtgatcaggtttttgtctctttctctttgcagcattttttaaaagaggataaaggagaac

SEQ ID NO: 5792 - DNA, 70 bp, Homo sapiens
gatacgtgatcaggtttttgtctctttctctttgcagcattttttaaaagaggataaaggagaacctaat

SEQ ID NO: 5793 - DNA, 66 bp, Homo sapiens
caggtttttgtctctttctctttgcagcattttttaaaagaggataaaggagaacctaattttaag

SEQ ID NO: 5794 - DNA, 67 bp, Homo sapiens
gcagcattttttaaaagaggataaaggagaacctaattttaagtaaatcctttcaattagctgttaa

SEQ ID NO: 5795 - DNA, 65 bp, Homo sapiens
aggataaaggagaacctaattttaagtaaatcctttcaattagctgttaaattttgtactgattt

SEQ ID NO: 5796 - DNA, 66 bp, Homo sapiens
cctaattttaagtaaatcctttcaattagctgttaaattttgtactgatttttaagactttcagga

SEQ ID NO: 5797 - DNA, 66 bp, Homo sapiens
tttaagtaaatcctttcaattagctgttaaattttgtactgatttttaagactttcaggagaaaat

SEQ ID NO: 5798 - DNA, 66 bp, Homo sapiens
tcctttcaattagctgttaaattttgtactgatttttaagactttcaggagaaaatttttggtaaa

SEQ ID NO: 5799 - DNA, 64 bp, Homo sapiens
ttttgtactgatttttaagactttcaggagaaaatttttggtaaaataagttaatttttatgtg

SEQ ID NO: 5800 - DNA, 65 bp, Homo sapiens
taaaaattttaatgtttctttaaggatcatcttttaaagaaatctttagaactttgaagttataa

SEQ ID NO: 5801 - DNA, 68 bp, Homo sapiens
aatgtttctttaaggatcatcttttaaagaaatctttagaactttgaagttataatgaaatccaagtg

SEQ ID NO: 5802 - DNA, 70 bp, Homo sapiens
taaggatcatcttttaaagaaatctttagaactttgaagttataatgaaatccaagtggagatttaatct

SEQ ID NO: 5803 - DNA, 67 bp, Homo sapiens
catcttttaaagaaatctttagaactttgaagttataatgaaatccaagtggagatttaatcttttt

SEQ ID NO: 5804 - DNA, 68 bp, Homo sapiens
aagaaatctttagaactttgaagttataatgaaatccaagtggagatttaatcttttttattgtcact

SEQ ID NO: 5805 - DNA, 72 bp, Homo sapiens
tagaactttgaagttataatgaaatccaagtggagatttaatcttttttattgtcactttatctctctgttc

SEQ ID NO: 5806 - DNA, 71 bp, Homo sapiens
gaagttataatgaaatccaagtggagatttaatcttttttattgtcactttatctctctgttctttccttg

SEQ ID NO: 5807 - DNA, 69 bp, Homo sapiens
tttttattgtcactttatctctctgttctttccttgtatttttacaacacaatacaattatatttaaaa

SEQ ID NO: 5808 - DNA, 66 bp, Homo sapiens
ctctctgttctttccttgtatttttacaacacaatacaattatatttaaaagttaagcttttttaa

SEQ ID NO: 5809 - DNA, 69 bp, Homo sapiens
ttaaaaagtaaatttaattttgaaggaaatacacacaatcttaggatcataaggtattcagaagtctaa

SEQ ID NO: 5810 - DNA, 73 bp, Homo sapiens
gtaaatttaattttgaaggaaatacacacaatcttaggatcataaggtattcagaagtctaatatatcataaa

SEQ ID NO: 5811 - DNA, 74 bp, Homo sapiens
aatttaattttgaaggaaatacacacaatcttaggatcataaggtattcagaagtctaatatatcataaatata

SEQ ID NO: 5812 - DNA, 79 bp, Homo sapiens
tgaaggaaatacacacaatcttaggatcataaggtattcagaagtctaatatatcataaatatattatacacgatacat

SEQ ID NO: 5813 - DNA, 81 bp, Homo sapiens
ggaaatacacacaatcttaggatcataaggtattcagaagtctaatatatcataaatatattatacacgatacattgcaca

SEQ ID NO: 5814 - DNA, 82 bp, Homo sapiens
gaaatacacacaatcttaggatcataaggtattcagaagtctaatatatcataaatatattatacacgatacattgcacata

SEQ ID NO: 5815 - DNA, 81 bp, Homo sapiens
acacacaatcttaggatcataaggtattcagaagtctaatatatcataaatatattatacacgatacattgcacatattta

SEQ ID NO: 5816 - DNA, 79 bp, Homo sapiens
caatcttaggatcataaggtattcagaagtctaatatatcataaatatattatacacgatacattgcacatatttaaaa

SEQ ID NO: 5817 - DNA, 79 bp, Homo sapiens
ttaggatcataaggtattcagaagtctaatatatcataaatatattatacacgatacattgcacatatttaaaatagaa

SEQ ID NO: 5818 - DNA, 80 bp, Homo sapiens
tcataaggtattcagaagtctaatatatcataaatatattatacacgatacattgcacatatttaaaatagaaacattga

SEQ ID NO: 5819 - DNA, 79 bp, Homo sapiens
ggtattcagaagtctaatatatcataaatatattatacacgatacattgcacatatttaaaatagaaacattgataaca

SEQ ID NO: 5820 - DNA, 79 bp, Homo sapiens
gaagtctaatatatcataaatatattatacacgatacattgcacatatttaaaatagaaacattgataacattttgaca

SEQ ID NO: 5821 - DNA, 79 bp, Homo sapiens
cataaatatattatacacgatacattgcacatatttaaaatagaaacattgataacattttgacatatgtacacattag

SEQ ID NO: 5822 - DNA, 79 bp, Homo sapiens
tatacacgatacattgcacatatttaaaatagaaacattgataacattttgacatatgtacacattagtgaaactacca

SEQ ID NO: 5823 - DNA, 78 bp, Homo sapiens
cgatacattgcacatatttaaaatagaaacattgataacattttgacatatgtacacattagtgaaactaccaccaca

SEQ ID NO: 5824 - DNA, 79 bp, Homo sapiens
gcacatatttaaaatagaaacattgataacattttgacatatgtacacattagtgaaactaccaccacaatcacaggca

SEQ ID NO: 5825 - DNA, 76 bp, Homo sapiens
atagaaacattgataacattttgacatatgtacacattagtgaaactaccaccacaatcacaggcaacagtttcct

SEQ ID NO: 5826 - DNA, 73 bp, Homo sapiens
accaccacaatcacaggcaacagtttccttgtgacttcttttaatctccttctccctgagttcacatccttcc

SEQ ID NO: 5827 - DNA, 72 bp, Homo sapiens
acaggcaacagtttccttgtgacttcttttaatctccttctccctgagttcacatccttccccaagcaacta

SEQ ID NO: 5828 - DNA, 73 bp, Homo sapiens
tttccttgtgacttcttttaatctccttctccctgagttcacatccttccccaagcaactactgatctgcttt

SEQ ID NO: 5829 - DNA, 73 bp, Homo sapiens
ttcttttaatctccttctccctgagttcacatccttccccaagcaactactgatctgctttttgtcagtttaa

SEQ ID NO: 5830 - DNA, 73 bp, Homo sapiens
taatctccttctccctgagttcacatccttccccaagcaactactgatctgctttttgtcagtttaaattagt

SEQ ID NO: 5831 - DNA, 73 bp, Homo sapiens
ctgagttcacatccttccccaagcaactactgatctgctttttgtcagtttaaattagtttgaattttctgta

SEQ ID NO: 5832 - DNA, 72 bp, Homo sapiens
ttcacatccttccccaagcaactactgatctgctttttgtcagtttaaattagtttgaattttctgtaatgt

SEQ ID NO: 5833 - DNA, 69 bp, Homo sapiens
cccaagcaactactgatctgctttttgtcagtttaaattagtttgaattttctgtaatgttaaaaaatg

SEQ ID NO: 5834 - DNA, 69 bp, Homo sapiens
actactgatctgctttttgtcagtttaaattagtttgaattttctgtaatgttaaaaaatggaaacata

SEQ ID NO: 5835 - DNA, 71 bp, Homo sapiens
tgctttttgtcagtttaaattagtttgaattttctgtaatgttaaaaaatggaaacatatagtatgtatgc

SEQ ID NO: 5836 - DNA, 73 bp, Homo sapiens
taaattagtttgaattttctgtaatgttaaaaaatggaaacatatagtatgtatgctttttctgtctggcatc

SEQ ID NO: 5837 - DNA, 76 bp, Homo sapiens
gtttgaattttctgtaatgttaaaaaatggaaacatatagtatgtatgctttttctgtctggcatctttcagcata

SEQ ID NO: 5838 - DNA, 75 bp, Homo sapiens
tttctgtaatgttaaaaaatggaaacatatagtatgtatgctttttctgtctggcatctttcagcataattattt

SEQ ID NO: 5839 - DNA, 73 bp, Homo sapiens
gttaaaaaatggaaacatatagtatgtatgctttttctgtctggcatctttcagcataattattttaagattt

SEQ ID NO: 5840 - DNA, 72 bp, Homo sapiens
gtatgctttttctgtctggcatctttcagcataattattttaagattttttcttgttgtatgttttaatagt

SEQ ID NO: 5841 - DNA, 71 bp, Homo sapiens
ctttttctgtctggcatctttcagcataattattttaagattttttcttgttgtatgttttaatagttcat

SEQ ID NO: 5842 - DNA, 71 bp, Homo sapiens
ctggcatctttcagcataattattttaagattttttcttgttgtatgttttaatagttcattttttggcta

SEQ ID NO: 5843 - DNA, 68 bp, Homo sapiens
gcataattattttaagattttttcttgttgtatgttttaatagttcattttttggctaaccacaattg

SEQ ID NO: 5844 - DNA, 74 bp, Homo sapiens
tcttgttgtatgttttaatagttcattttttggctaaccacaattgtgtgtatggatatactataattagctta

SEQ ID NO: 5845 - DNA, 75 bp, Homo sapiens
tgttttaatagttcattttttggctaaccacaattgtgtgtatggatatactataattagcttatccattcaaca

SEQ ID NO: 5846 - DNA, 77 bp, Homo sapiens
gttcattttttggctaaccacaattgtgtgtatggatatactataattagcttatccattcaacaattgatggacat

SEQ ID NO: 5847 - DNA, 78 bp, Homo sapiens
ttttggctaaccacaattgtgtgtatggatatactataattagcttatccattcaacaattgatggacattcaggttg

SEQ ID NO: 5848 - DNA, 76 bp, Homo sapiens
accacaattgtgtgtatggatatactataattagcttatccattcaacaattgatggacattcaggttgtttttag

SEQ ID NO: 5849 - DNA, 75 bp, Homo sapiens
gtgtatggatatactataattagcttatccattcaacaattgatggacattcaggttgtttttagttttgggctg

SEQ ID NO: 5850 - DNA, 72 bp, Homo sapiens
atactataattagcttatccattcaacaattgatggacattcaggttgtttttagttttgggctgttacaaa

SEQ ID NO: 5851 - DNA, 72 bp, Homo sapiens
ttagcttatccattcaacaattgatggacattcaggttgtttttagttttgggctgttacaaataaagctac

SEQ ID NO: 5852 - DNA, 71 bp, Homo sapiens
ccattcaacaattgatggacattcaggttgtttttagttttgggctgttacaaataaagctactataaata

SEQ ID NO: 5853 - DNA, 70 bp, Homo sapiens
gatggacattcaggttgtttttagttttgggctgttacaaataaagctactataaatattgtataaatct

SEQ ID NO: 5854 - DNA, 70 bp, Homo sapiens
tcaggttgtttttagttttgggctgttacaaataaagctactataaatattgtataaatcttataagata

SEQ ID NO: 5855 - DNA, 69 bp, Homo sapiens
tttttagttttgggctgttacaaataaagctactataaatattgtataaatcttataagatatatgttt

SEQ ID NO: 5856 - DNA, 74 bp, Homo sapiens
aaagctactataaatattgtataaatcttataagatatatgtttttatttctcttgcatgaataccaaggagtg

SEQ ID NO: 5857 - DNA, 74 bp, Homo sapiens
taaatattgtataaatcttataagatatatgtttttatttctcttgcatgaataccaaggagtggaatggttgg

SEQ ID NO: 5858 - DNA, 76 bp, Homo sapiens
tgtataaatcttataagatatatgtttttatttctcttgcatgaataccaaggagtggaatggttgggccacatgg

SEQ ID NO: 5859 - DNA, 76 bp, Homo sapiens
tcttataagatatatgtttttatttctcttgcatgaataccaaggagtggaatggttgggccacatggtaggtgtg

SEQ ID NO: 5860 - DNA, 75 bp, Homo sapiens
gtttttatttctcttgcatgaataccaaggagtggaatggttgggccacatggtaggtgtggctcaccatggtag

SEQ ID NO: 5861 - DNA, 78 bp, Homo sapiens
ttctcttgcatgaataccaaggagtggaatggttgggccacatggtaggtgtggctcaccatggtaggtatatgcttt

SEQ ID NO: 5862 - DNA, 73 bp, Homo sapiens
aataccaaggagtggaatggttgggccacatggtaggtgtggctcaccatggtaggtatatgctttttttgta

SEQ ID NO: 5863 - DNA, 75 bp, Homo sapiens
aaggagtggaatggttgggccacatggtaggtgtggctcaccatggtaggtatatgctttttttgtatgtgtgac

SEQ ID NO: 5864 - DNA, 76 bp, Homo sapiens
aatggttgggccacatggtaggtgtggctcaccatggtaggtatatgctttttttgtatgtgtgacggagtctcgc

SEQ ID NO: 5865 - DNA, 74 bp, Homo sapiens
tgagccaccgtgcttagctggtatctttttatgtgcatatttgttatttgttatttttggtgaagtgtttatta

SEQ ID NO: 5866 - DNA, 72 bp, Homo sapiens
caccgtgcttagctggtatctttttatgtgcatatttgttatttgttatttttggtgaagtgtttattaagc

SEQ ID NO: 5867 - DNA, 72 bp, Homo sapiens
gctggtatctttttatgtgcatatttgttatttgttatttttggtgaagtgtttattaagctctccccacca

SEQ ID NO: 5868 - DNA, 70 bp, Homo sapiens
ttatgtgcatatttgttatttgttatttttggtgaagtgtttattaagctctccccaccacctgcttttt

SEQ ID NO: 5869 - DNA, 66 bp, Homo sapiens
catatttgttatttgttatttttggtgaagtgtttattaagctctccccaccacctgctttttttt

SEQ ID NO: 5870 - DNA, 65 bp, Homo sapiens
gttatttttggtgaagtgtttattaagctctccccaccacctgctttttttttattggcttgttt

SEQ ID NO: 5871 - DNA, 67 bp, Homo sapiens
tttggtgaagtgtttattaagctctccccaccacctgctttttttttattggcttgttttgttgtta

SEQ ID NO: 5872 - DNA, 69 bp, Homo sapiens
tattaagctctccccaccacctgctttttttttattggcttgttttgttgttattgacttttgtgagag

SEQ ID NO: 5873 - DNA, 70 bp, Homo sapiens
tccccaccacctgctttttttttattggcttgttttgttgttattgacttttgtgagagtatgtattctg

SEQ ID NO: 5874 - DNA, 72 bp, Homo sapiens
ctgctttttttttattggcttgttttgttgttattgacttttgtgagagtatgtattctggatgcaggtcct

SEQ ID NO: 5875 - DNA, 76 bp, Homo sapiens
tttttattggcttgttttgttgttattgacttttgtgagagtatgtattctggatgcaggtcctttgtcagataca

SEQ ID NO: 5876 - DNA, 79 bp, Homo sapiens
gttttgttgttattgacttttgtgagagtatgtattctggatgcaggtcctttgtcagatacatatttgcagatactta

SEQ ID NO: 5877 - DNA, 83 bp, Homo sapiens
ttgttattgacttttgtgagagtatgtattctggatgcaggtcctttgtcagatacatatttgcagatacttatctcactctg

SEQ ID NO: 5878 - DNA, 83 bp, Homo sapiens
ttttgtgagagtatgtattctggatgcaggtcctttgtcagatacatatttgcagatacttatctcactctgtggcttatatt

SEQ ID NO: 5879 - DNA, 82 bp, Homo sapiens
tatgtattctggatgcaggtcctttgtcagatacatatttgcagatacttatctcactctgtggcttatattttcattcttt

SEQ ID NO: 5880 - DNA, 80 bp, Homo sapiens
tggatgcaggtcctttgtcagatacatatttgcagatacttatctcactctgtggcttatattttcattcttttaatctt

SEQ ID NO: 5881 - DNA, 81 bp, Homo sapiens
tttgtcagatacatatttgcagatacttatctcactctgtggcttatattttcattcttttaatcttttgaagagcagaca

SEQ ID NO: 5882 - DNA, 78 bp, Homo sapiens
tttgcagatacttatctcactctgtggcttatattttcattcttttaatcttttgaagagcagacattctttatgaaa

SEQ ID NO: 5883 - DNA, 73 bp, Homo sapiens
tctgtggcttatattttcattcttttaatcttttgaagagcagacattctttatgaaatttagtttatgaatt

SEQ ID NO: 5884 - DNA, 69 bp, Homo sapiens
tttcattcttttaatcttttgaagagcagacattctttatgaaatttagtttatgaatttttttgtgtt

SEQ ID NO: 5885 - DNA, 69 bp, Homo sapiens
atttttttgtgttttcttttacaagcttttaaaactataattcaggagtatatagtcacacagcccaga

SEQ ID NO: 5886 - DNA, 72 bp, Homo sapiens
cttttacaagcttttaaaactataattcaggagtatatagtcacacagcccagactggttagccaaatctaa

SEQ ID NO: 5887 - DNA, 73 bp, Homo sapiens
taaaactataattcaggagtatatagtcacacagcccagactggttagccaaatctaaaataaactggcttct

SEQ ID NO: 5888 - DNA, 76 bp, Homo sapiens
tataattcaggagtatatagtcacacagcccagactggttagccaaatctaaaataaactggcttcttatcacaac

SEQ ID NO: 5889 - DNA, 77 bp, Homo sapiens
tatatagtcacacagcccagactggttagccaaatctaaaataaactggcttcttatcacaactaatgtgtgaacat

SEQ ID NO: 5890 - DNA, 79 bp, Homo sapiens
tatagtcacacagcccagactggttagccaaatctaaaataaactggcttcttatcacaactaatgtgtgaacattgca

SEQ ID NO: 5891 - DNA, 75 bp, Homo sapiens
acacagcccagactggttagccaaatctaaaataaactggcttcttatcacaactaatgtgtgaacattgcaacc

SEQ ID NO: 5892 - DNA, 74 bp, Homo sapiens
cagactggttagccaaatctaaaataaactggcttcttatcacaactaatgtgtgaacattgcaacccttcttc

SEQ ID NO: 5893 - DNA, 73 bp, Homo sapiens
agactggttagccaaatctaaaataaactggcttcttatcacaactaatgtgtgaacattgcaacccttcttc

SEQ ID NO: 5894 - DNA, 76 bp, Homo sapiens
aatctaaaataaactggcttcttatcacaactaatgtgtgaacattgcaacccttcttctctccagaatgaccata

SEQ ID NO: 5895 - DNA, 75 bp, Homo sapiens
taaaataaactggcttcttatcacaactaatgtgtgaacattgcaacccttcttctctccagaatgaccataaaa

SEQ ID NO: 5896 - DNA, 74 bp, Homo sapiens
aaataaactggcttcttatcacaactaatgtgtgaacattgcaacccttcttctctccagaatgaccataaaaa

SEQ ID NO: 5897 - DNA, 73 bp, Homo sapiens
aaactggcttcttatcacaactaatgtgtgaacattgcaacccttcttctctccagaatgaccataaaaaaag

SEQ ID NO: 5898 - DNA, 75 bp, Homo sapiens
ttcttatcacaactaatgtgtgaacattgcaacccttcttctctccagaatgaccataaaaaaagttactgtaga

SEQ ID NO: 5899 - DNA, 75 bp, Homo sapiens
tatcacaactaatgtgtgaacattgcaacccttcttctctccagaatgaccataaaaaaagttactgtagagaaa

SEQ ID NO: 5900 - DNA, 67 bp, Homo sapiens
ctccagaatgaccataaaaaaagttactgtagagaaacagaaacctaggtttgaggcaaaacgtaaa

SEQ ID NO: 5901 - DNA, 62 bp, Homo sapiens
aaaaaaagttactgtagagaaacagaaacctaggtttgaggcaaaacgtaaaaaccaaagga

SEQ ID NO: 5902 - DNA, 65 bp, Homo sapiens
agttactgtagagaaacagaaacctaggtttgaggcaaaacgtaaaaaccaaaggaaaaatagca

SEQ ID NO: 5903 - DNA, 64 bp, Homo sapiens
aacagaaacctaggtttgaggcaaaacgtaaaaaccaaaggaaaaatagcaattcagtggttcg

SEQ ID NO: 5904 - DNA, 63 bp, Homo sapiens
aaacctaggtttgaggcaaaacgtaaaaaccaaaggaaaaatagcaattcagtggttcgttgg

SEQ ID NO: 5905 - DNA, 70 bp, Homo sapiens
caaaggaaaaatagcaattcagtggttcgttggtgaaagcaggaaagtttgtgcccttcactgggctact

SEQ ID NO: 5906 - DNA, 72 bp, Homo sapiens
aaatagcaattcagtggttcgttggtgaaagcaggaaagtttgtgcccttcactgggctactttgctcttct

SEQ ID NO: 5907 - DNA, 72 bp, Homo sapiens
attcagtggttcgttggtgaaagcaggaaagtttgtgcccttcactgggctactttgctcttcttactctta

SEQ ID NO: 5908 - DNA, 70 bp, Homo sapiens
ttcgttggtgaaagcaggaaagtttgtgcccttcactgggctactttgctcttcttactcttaatctttt

SEQ ID NO: 5909 - DNA, 76 bp, Homo sapiens
attacaggtgagccacaatgcctggccttagtcttgctctttttgttcctcttcttcagtccatccatgttagacc

SEQ ID NO: 5910 - DNA, 75 bp, Homo sapiens
agccacaatgcctggccttagtcttgctctttttgttcctcttcttcagtccatccatgttagacctcaataggt

SEQ ID NO: 5911 - DNA, 74 bp, Homo sapiens
aatgcctggccttagtcttgctctttttgttcctcttcttcagtccatccatgttagacctcaataggtttgaa

SEQ ID NO: 5912 - DNA, 74 bp, Homo sapiens
tagtcttgctctttttgttcctcttcttcagtccatccatgttagacctcaataggtttgaacaaaccatctat

SEQ ID NO: 5913 - DNA, 71 bp, Homo sapiens
ttttgttcctcttcttcagtccatccatgttagacctcaataggtttgaacaaaccatctattcgtttctt

SEQ ID NO: 5914 - DNA, 73 bp, Homo sapiens
cttcttcagtccatccatgttagacctcaataggtttgaacaaaccatctattcgtttctttggagcttacca

SEQ ID NO: 5915 - DNA, 75 bp, Homo sapiens
gtccatccatgttagacctcaataggtttgaacaaaccatctattcgtttctttggagcttaccacagtgatgat

SEQ ID NO: 5916 - DNA, 73 bp, Homo sapiens
tgttagacctcaataggtttgaacaaaccatctattcgtttctttggagcttaccacagtgatgattgttcct

SEQ ID NO: 5917 - DNA, 74 bp, Homo sapiens
aataggtttgaacaaaccatctattcgtttctttggagcttaccacagtgatgattgttccttgctagtgtata

SEQ ID NO: 5918 - DNA, 74 bp, Homo sapiens
taggtttgaacaaaccatctattcgtttctttggagcttaccacagtgatgattgttccttgctagtgtataaa

SEQ ID NO: 5919 - DNA, 74 bp, Homo sapiens
ttgaacaaaccatctattcgtttctttggagcttaccacagtgatgattgttccttgctagtgtataaaaatcc

SEQ ID NO: 5920 - DNA, 74 bp, Homo sapiens
aaaccatctattcgtttctttggagcttaccacagtgatgattgttccttgctagtgtataaaaatcctgttga

SEQ ID NO: 5921 - DNA, 74 bp, Homo sapiens
catctattcgtttctttggagcttaccacagtgatgattgttccttgctagtgtataaaaatcctgttgaaatt

SEQ ID NO: 5922 - DNA, 73 bp, Homo sapiens
attcgtttctttggagcttaccacagtgatgattgttccttgctagtgtataaaaatcctgttgaaatttctg

SEQ ID NO: 5923 - DNA, 74 bp, Homo sapiens
tttctttggagcttaccacagtgatgattgttccttgctagtgtataaaaatcctgttgaaatttctgtgttta

SEQ ID NO: 5924 - DNA, 74 bp, Homo sapiens
ttggagcttaccacagtgatgattgttccttgctagtgtataaaaatcctgttgaaatttctgtgtttattttg

SEQ ID NO: 5925 - DNA, 74 bp, Homo sapiens
gcttaccacagtgatgattgttccttgctagtgtataaaaatcctgttgaaatttctgtgtttattttgtatcc

SEQ ID NO: 5926 - DNA, 74 bp, Homo sapiens
acagtgatgattgttccttgctagtgtataaaaatcctgttgaaatttctgtgtttattttgtatcctgccacc

SEQ ID NO: 5927 - DNA, 75 bp, Homo sapiens
tgatgattgttccttgctagtgtataaaaatcctgttgaaatttctgtgtttattttgtatcctgccaccttgct

SEQ ID NO: 5928 - DNA, 73 bp, Homo sapiens
gattgttccttgctagtgtataaaaatcctgttgaaatttctgtgtttattttgtatcctgccaccttgctta

SEQ ID NO: 5929 - DNA, 69 bp, Homo sapiens
gctagtgtataaaaatcctgttgaaatttctgtgtttattttgtatcctgccaccttgcttaaactttt

SEQ ID NO: 5930 - DNA, 67 bp, Homo sapiens
aaaaatcctgttgaaatttctgtgtttattttgtatcctgccaccttgcttaaacttttttttgaga

SEQ ID NO: 5931 - DNA, 71 bp, Homo sapiens
catgcctggccactttaatttttgtttgcttacattgggcttaattggctcttctttttctactattttga

SEQ ID NO: 5932 - DNA, 69 bp, Homo sapiens
ctggccactttaatttttgtttgcttacattgggcttaattggctcttctttttctactattttgaaga

SEQ ID NO: 5933 - DNA, 70 bp, Homo sapiens
tttttgtttgcttacattgggcttaattggctcttctttttctactattttgaagattaaggccaggcac

SEQ ID NO: 5934 - DNA, 70 bp, Homo sapiens
aaaaaaagattattgttcttctatcttcttttctaatatattcattcagtgcgataaattcctctttaaa

SEQ ID NO: 5935 - DNA, 78 bp, Homo sapiens
tattgttcttctatcttcttttctaatatattcattcagtgcgataaattcctctttaaatgctgctttcccagcatc

SEQ ID NO: 5936 - DNA, 78 bp, Homo sapiens
cttctatcttcttttctaatatattcattcagtgcgataaattcctctttaaatgctgctttcccagcatctgacaaa

SEQ ID NO: 5937 - DNA, 76 bp, Homo sapiens
cttttctaatatattcattcagtgcgataaattcctctttaaatgctgctttcccagcatctgacaaatttttatg

SEQ ID NO: 5938 - DNA, 75 bp, Homo sapiens
atatattcattcagtgcgataaattcctctttaaatgctgctttcccagcatctgacaaatttttatgttttatt

SEQ ID NO: 5939 - DNA, 69 bp, Homo sapiens
ttaaaatttctctttatatttcttcttttacttatatgttgtttagaagtgtcttgtttaatctccatg

SEQ ID NO: 5940 - DNA, 70 bp, Homo sapiens
ctctttatatttcttcttttacttatatgttgtttagaagtgtcttgtttaatctccatgtgtttttgga

SEQ ID NO: 5941 - DNA, 71 bp, Homo sapiens
tcttcttttacttatatgttgtttagaagtgtcttgtttaatctccatgtgtttttggatttatggccacc

SEQ ID NO: 5942 - DNA, 71 bp, Homo sapiens
cttatatgttgtttagaagtgtcttgtttaatctccatgtgtttttggatttatggccacctttctggtat

SEQ ID NO: 5943 - DNA, 71 bp, Homo sapiens
gttgtttagaagtgtcttgtttaatctccatgtgtttttggatttatggccacctttctggtattgatttc

SEQ ID NO: 5944 - DNA, 71 bp, Homo sapiens
gaagtgtcttgtttaatctccatgtgtttttggatttatggccacctttctggtattgatttctggtttaa

SEQ ID NO: 5945 - DNA, 71 bp, Homo sapiens
gtttaatctccatgtgtttttggatttatggccacctttctggtattgatttctggtttaatttcactgtg

SEQ ID NO: 5946 - DNA, 70 bp, Homo sapiens
ttctattctttaaaatttgttaaggtgtgttttatggtctagaatgtggtccatcttggttaatgttcca

SEQ ID NO: 5947 - DNA, 73 bp, Homo sapiens
taaaatttgttaaggtgtgttttatggtctagaatgtggtccatcttggttaatgttccatgtaagctggaga

SEQ ID NO: 5948 - DNA, 75 bp, Homo sapiens
ttaaggtgtgttttatggtctagaatgtggtccatcttggttaatgttccatgtaagctggagaatagaagaatg

SEQ ID NO: 5949 - DNA, 80 bp, Homo sapiens
tttatggtctagaatgtggtccatcttggttaatgttccatgtaagctggagaatagaagaatgtgtcatctgctgttgt

SEQ ID NO: 5950 - DNA, 81 bp, Homo sapiens
tctagaatgtggtccatcttggttaatgttccatgtaagctggagaatagaagaatgtgtcatctgctgttgttggacgaa

SEQ ID NO: 5951 - DNA, 80 bp, Homo sapiens
tggtccatcttggttaatgttccatgtaagctggagaatagaagaatgtgtcatctgctgttgttggacgaagtagtcta

SEQ ID NO: 5952 - DNA, 82 bp, Homo sapiens
ttaatgttccatgtaagctggagaatagaagaatgtgtcatctgctgttgttggacgaagtagtctacagatgtcaattata

SEQ ID NO: 5953 - DNA, 82 bp, Homo sapiens
atgtaagctggagaatagaagaatgtgtcatctgctgttgttggacgaagtagtctacagatgtcaattatatacagttgat

SEQ ID NO: 5954 - DNA, 82 bp, Homo sapiens
agaatagaagaatgtgtcatctgctgttgttggacgaagtagtctacagatgtcaattatatacagttgattgatagtactg

SEQ ID NO: 5955 - DNA, 84 bp, Homo sapiens
agaatgtgtcatctgctgttgttggacgaagtagtctacagatgtcaattatatacagttgattgatagtactgttgagctcaa

SEQ ID NO: 5956 - DNA, 83 bp, Homo sapiens
aatgtgtcatctgctgttgttggacgaagtagtctacagatgtcaattatatacagttgattgatagtactgttgagctcaac

SEQ ID NO: 5957 - DNA, 81 bp, Homo sapiens
ctgctgttgttggacgaagtagtctacagatgtcaattatatacagttgattgatagtactgttgagctcaactgtgtcct

SEQ ID NO: 5958 - DNA, 80 bp, Homo sapiens
tgttgttggacgaagtagtctacagatgtcaattatatacagttgattgatagtactgttgagctcaactgtgtccttaa

SEQ ID NO: 5959 - DNA, 79 bp, Homo sapiens
gttgttggacgaagtagtctacagatgtcaattatatacagttgattgatagtactgttgagctcaactgtgtccttaa

SEQ ID NO: 5960 - DNA, 80 bp, Homo sapiens
aagtagtctacagatgtcaattatatacagttgattgatagtactgttgagctcaactgtgtccttaactgattttctca

SEQ ID NO: 5961 - DNA, 82 bp, Homo sapiens
tacagatgtcaattatatacagttgattgatagtactgttgagctcaactgtgtccttaactgattttctcactagtgtatc

SEQ ID NO: 5962 - DNA, 81 bp, Homo sapiens
tgtcaattatatacagttgattgatagtactgttgagctcaactgtgtccttaactgattttctcactagtgtatctgtta

SEQ ID NO: 5963 - DNA, 79 bp, Homo sapiens
caattatatacagttgattgatagtactgttgagctcaactgtgtccttaactgattttctcactagtgtatctgttaa

SEQ ID NO: 5964 - DNA, 78 bp, Homo sapiens
atatacagttgattgatagtactgttgagctcaactgtgtccttaactgattttctcactagtgtatctgttaatttc

SEQ ID NO: 5965 - DNA, 78 bp, Homo sapiens
atacagttgattgatagtactgttgagctcaactgtgtccttaactgattttctcactagtgtatctgttaatttctg

SEQ ID NO: 5966 - DNA, 79 bp, Homo sapiens
ctgattttctcactagtgtatctgttaatttctggctgcagtatcaatttctatcagtttttgcttcatatattttgac

SEQ ID NO: 5967 - DNA, 78 bp, Homo sapiens
ttctcactagtgtatctgttaatttctggctgcagtatcaatttctatcagtttttgcttcatatattttgacttctt

SEQ ID NO: 5968 - DNA, 79 bp, Homo sapiens
tctggctgcagtatcaatttctatcagtttttgcttcatatattttgacttcttttgttagtcacatacacattaagga

SEQ ID NO: 5969 - DNA, 72 bp, Homo sapiens
catatattttgacttcttttgttagtcacatacacattaaggattgttatgtctttttgaagtattaacacc

SEQ ID NO: 5970 - DNA, 72 bp, Homo sapiens
tgacttcttttgttagtcacatacacattaaggattgttatgtctttttgaagtattaacacctttatctta

SEQ ID NO: 5971 - DNA, 69 bp, Homo sapiens
cttttgttagtcacatacacattaaggattgttatgtctttttgaagtattaacacctttatcttattt

SEQ ID NO: 5972 - DNA, 70 bp, Homo sapiens
cacatacacattaaggattgttatgtctttttgaagtattaacacctttatcttattttattactctctt

SEQ ID NO: 5973 - DNA, 69 bp, Homo sapiens
ggattgttatgtctttttgaagtattaacacctttatcttattttattactctctttagtcctgataac

SEQ ID NO: 5974 - DNA, 69 bp, Homo sapiens
tgtctttttgaagtattaacacctttatcttattttattactctctttagtcctgataactttctttgc

SEQ ID NO: 5975 - DNA, 71 bp, Homo sapiens
tttgaagtattaacacctttatcttattttattactctctttagtcctgataactttctttgctctgagtc

SEQ ID NO: 5976 - DNA, 71 bp, Homo sapiens
gaagtattaacacctttatcttattttattactctctttagtcctgataactttctttgctctgagtctgt

SEQ ID NO: 5977 - DNA, 72 bp, Homo sapiens
gtattaacacctttatcttattttattactctctttagtcctgataactttctttgctctgagtctgttctg

SEQ ID NO: 5978 - DNA, 73 bp, Homo sapiens
acacctttatcttattttattactctctttagtcctgataactttctttgctctgagtctgttctgttcataa

SEQ ID NO: 5979 - DNA, 74 bp, Homo sapiens
atcttattttattactctctttagtcctgataactttctttgctctgagtctgttctgttcataatatagtatt

SEQ ID NO: 5980 - DNA, 75 bp, Homo sapiens
attttattactctctttagtcctgataactttctttgctctgagtctgttctgttcataatatagtatttctgct

SEQ ID NO: 5981 - DNA, 76 bp, Homo sapiens
attactctctttagtcctgataactttctttgctctgagtctgttctgttcataatatagtatttctgctttttga

SEQ ID NO: 5982 - DNA, 75 bp, Homo sapiens
tctctttagtcctgataactttctttgctctgagtctgttctgttcataatatagtatttctgctttttgaaaat

SEQ ID NO: 5983 - DNA, 78 bp, Homo sapiens
ctgataactttctttgctctgagtctgttctgttcataatatagtatttctgctttttgaaaattagcattagcacag

SEQ ID NO: 5984 - DNA, 79 bp, Homo sapiens
ttgctctgagtctgttctgttcataatatagtatttctgctttttgaaaattagcattagcacagtatacctttctcca

SEQ ID NO: 5985 - DNA, 77 bp, Homo sapiens
tgagtctgttctgttcataatatagtatttctgctttttgaaaattagcattagcacagtatacctttctccatttc

SEQ ID NO: 5986 - DNA, 72 bp, Homo sapiens
ctgttcataatatagtatttctgctttttgaaaattagcattagcacagtatacctttctccatttcctttt

SEQ ID NO: 5987 - DNA, 70 bp, Homo sapiens
tatagtatttctgctttttgaaaattagcattagcacagtatacctttctccatttcctttttatttatt

SEQ ID NO: 5988 - DNA, 83 bp, Homo sapiens
tttgcatgtcactcttgcacaggggtcctactaatcttctctgtatcattctaatttttgtatgtgtgctgccaaagtgagca

SEQ ID NO: 5989 - DNA, 81 bp, Homo sapiens
tgtcactcttgcacaggggtcctactaatcttctctgtatcattctaatttttgtatgtgtgctgccaaagtgagcacgat

SEQ ID NO: 5990 - DNA, 76 bp, Homo sapiens
ctgtatcattctaatttttgtatgtgtgctgccaaagtgagcacgatttcctttaaactctacatgtctttatatt

SEQ ID NO: 5991 - DNA, 72 bp, Homo sapiens
atttttgtatgtgtgctgccaaagtgagcacgatttcctttaaactctacatgtctttatatttaaagtagg

SEQ ID NO: 5992 - DNA, 74 bp, Homo sapiens
tatgtgtgctgccaaagtgagcacgatttcctttaaactctacatgtctttatatttaaagtaggtttcctgta

SEQ ID NO: 5993 - DNA, 71 bp, Homo sapiens
gccaaagtgagcacgatttcctttaaactctacatgtctttatatttaaagtaggtttcctgtagacaaca

SEQ ID NO: 5994 - DNA, 72 bp, Homo sapiens
cacgatttcctttaaactctacatgtctttatatttaaagtaggtttcctgtagacaacatgtagttgctgc

SEQ ID NO: 5995 - DNA, 72 bp, Homo sapiens
aaactctacatgtctttatatttaaagtaggtttcctgtagacaacatgtagttgctgcttggttttggatc

SEQ ID NO: 5996 - DNA, 74 bp, Homo sapiens
tgtctttatatttaaagtaggtttcctgtagacaacatgtagttgctgcttggttttggatctgtgacaatctt

SEQ ID NO: 5997 - DNA, 72 bp, Homo sapiens
agtaggtttcctgtagacaacatgtagttgctgcttggttttggatctgtgacaatctttattttttaattg

SEQ ID NO: 5998 - DNA, 72 bp, Homo sapiens
gacaacatgtagttgctgcttggttttggatctgtgacaatctttattttttaattggggtatttagaccat

SEQ ID NO: 5999 - DNA, 71 bp, Homo sapiens
gtagttgctgcttggttttggatctgtgacaatctttattttttaattggggtatttagaccattgccatt

SEQ ID NO: 6000 - DNA, 69 bp, Homo sapiens
ctgcttggttttggatctgtgacaatctttattttttaattggggtatttagaccattgccatttaagg

SEQ ID NO: 6001 - DNA, 73 bp, Homo sapiens
ttggatctgtgacaatctttattttttaattggggtatttagaccattgccatttaaggtgattattgatata

SEQ ID NO: 6002 - DNA, 69 bp, Homo sapiens
gacaatctttattttttaattggggtatttagaccattgccatttaaggtgattattgatataattggg

SEQ ID NO: 6003 - DNA, 71 bp, Homo sapiens
tttaattggggtatttagaccattgccatttaaggtgattattgatataattgggttaatatctaccatat

SEQ ID NO: 6004 - DNA, 72 bp, Homo sapiens
gggtatttagaccattgccatttaaggtgattattgatataattgggttaatatctaccatatttattatta

SEQ ID NO: 6005 - DNA, 71 bp, Homo sapiens
ttaaatttttgttactgtttttgtcattcacagcttttgtggtttttattgagtattttatatgattgcat

SEQ ID NO: 6006 - DNA, 70 bp, Homo sapiens
gtttttgtcattcacagcttttgtggtttttattgagtattttatatgattgcattttcttgtctttttt

SEQ ID NO: 6007 - DNA, 74 bp, Homo sapiens
tcacagcttttgtggtttttattgagtattttatatgattgcattttcttgtcttttttttcaccctctcatca

SEQ ID NO: 6008 - DNA, 72 bp, Homo sapiens
tgtggtttttattgagtattttatatgattgcattttcttgtcttttttttcaccctctcatcacactttaa

SEQ ID NO: 6009 - DNA, 72 bp, Homo sapiens
gagtattttatatgattgcattttcttgtcttttttttcaccctctcatcacactttaagtgttttatttca

SEQ ID NO: 6010 - DNA, 76 bp, Homo sapiens
tgcattttcttgtcttttttttcaccctctcatcacactttaagtgttttatttcactgtctgcttgattgcatgt

SEQ ID NO: 6011 - DNA, 75 bp, Homo sapiens
tttttttcaccctctcatcacactttaagtgttttatttcactgtctgcttgattgcatgttttctgaggcaaat

SEQ ID NO: 6012 - DNA, 81 bp, Homo sapiens
cctctcatcacactttaagtgttttatttcactgtctgcttgattgcatgttttctgaggcaaattcagatatcattctta

SEQ ID NO: 6013 - DNA, 78 bp, Homo sapiens
cactttaagtgttttatttcactgtctgcttgattgcatgttttctgaggcaaattcagatatcattcttacacttag

SEQ ID NO: 6014 - DNA, 81 bp, Homo sapiens
taagtgttttatttcactgtctgcttgattgcatgttttctgaggcaaattcagatatcattcttacacttagtgcctgtg

SEQ ID NO: 6015 - DNA, 79 bp, Homo sapiens
actgtctgcttgattgcatgttttctgaggcaaattcagatatcattcttacacttagtgcctgtgtgggtaaggtgtt

SEQ ID NO: 6016 - DNA, 77 bp, Homo sapiens
cttgattgcatgttttctgaggcaaattcagatatcattcttacacttagtgcctgtgtgggtaaggtgttttcttc

SEQ ID NO: 6017 - DNA, 77 bp, Homo sapiens
attgcatgttttctgaggcaaattcagatatcattcttacacttagtgcctgtgtgggtaaggtgttttcttctggc

SEQ ID NO: 6018 - DNA, 75 bp, Homo sapiens
atgttttctgaggcaaattcagatatcattcttacacttagtgcctgtgtgggtaaggtgttttcttctggcttc

SEQ ID NO: 6019 - DNA, 74 bp, Homo sapiens
ttttctgaggcaaattcagatatcattcttacacttagtgcctgtgtgggtaaggtgttttcttctggcttcct

SEQ ID NO: 6020 - DNA, 73 bp, Homo sapiens
caaattcagatatcattcttacacttagtgcctgtgtgggtaaggtgttttcttctggcttccttcgtggatt

SEQ ID NO: 6021 - DNA, 73 bp, Homo sapiens
ttcagatatcattcttacacttagtgcctgtgtgggtaaggtgttttcttctggcttccttcgtggattttaa

SEQ ID NO: 6022 - DNA, 71 bp, Homo sapiens
tatcattcttacacttagtgcctgtgtgggtaaggtgttttcttctggcttccttcgtggattttaatctt

SEQ ID NO: 6023 - DNA, 72 bp, Homo sapiens
ttcttacacttagtgcctgtgtgggtaaggtgttttcttctggcttccttcgtggattttaatctttgagca

SEQ ID NO: 6024 - DNA, 73 bp, Homo sapiens
ttagtgcctgtgtgggtaaggtgttttcttctggcttccttcgtggattttaatctttgagcatggaggtgta

SEQ ID NO: 6025 - DNA, 73 bp, Homo sapiens
tgcctgtgtgggtaaggtgttttcttctggcttccttcgtggattttaatctttgagcatggaggtgtacttc

SEQ ID NO: 6026 - DNA, 69 bp, Homo sapiens
taaggtgttttcttctggcttccttcgtggattttaatctttgagcatggaggtgtacttcccttaccc

SEQ ID NO: 6027 - DNA, 68 bp, Homo sapiens
tccttcgtggattttaatctttgagcatggaggtgtacttcccttaccccctcctttttttgcattta

SEQ ID NO: 6028 - DNA, 68 bp, Homo sapiens
agcatggaggtgtacttcccttaccccctcctttttttgcatttatcttgtttggcatcctctaagtt

SEQ ID NO: 6029 - DNA, 70 bp, Homo sapiens
ttaccccctcctttttttgcatttatcttgtttggcatcctctaagtttctttgatagctggtttggcta

SEQ ID NO: 6030 - DNA, 74 bp, Homo sapiens
ttttttgcatttatcttgtttggcatcctctaagtttctttgatagctggtttggctactgccatttattcgag

SEQ ID NO: 6031 - DNA, 71 bp, Homo sapiens
ttgtttggcatcctctaagtttctttgatagctggtttggctactgccatttattcgaggggaagtttttg

SEQ ID NO: 6032 - DNA, 71 bp, Homo sapiens
ttctttgatagctggtttggctactgccatttattcgaggggaagtttttggacgttatgatttcaaatat

SEQ ID NO: 6033 - DNA, 70 bp, Homo sapiens
tttggctactgccatttattcgaggggaagtttttggacgttatgatttcaaatattgcttcttctcttt

SEQ ID NO: 6034 - DNA, 70 bp, Homo sapiens
ctactgccatttattcgaggggaagtttttggacgttatgatttcaaatattgcttcttctcttttcttc

SEQ ID NO: 6035 - DNA, 70 bp, Homo sapiens
tattcgaggggaagtttttggacgttatgatttcaaatattgcttcttctcttttcttctcttccctgta

SEQ ID NO: 6036 - DNA, 69 bp, Homo sapiens
ggaagtttttggacgttatgatttcaaatattgcttcttctcttttcttctcttccctgtattcccatt

SEQ ID NO: 6037 - DNA, 73 bp, Homo sapiens
ggacgttatgatttcaaatattgcttcttctcttttcttctcttccctgtattcccattttaactatgtcatg

SEQ ID NO: 6038 - DNA, 74 bp, Homo sapiens
caaatattgcttcttctcttttcttctcttccctgtattcccattttaactatgtcatgtgttttgtatatgtc

SEQ ID NO: 6039 - DNA, 77 bp, Homo sapiens
tcttctcttttcttctcttccctgtattcccattttaactatgtcatgtgttttgtatatgtcccagcattcatgga

SEQ ID NO: 6040 - DNA, 76 bp, Homo sapiens
tcttctcttccctgtattcccattttaactatgtcatgtgttttgtatatgtcccagcattcatggatattttgtt

SEQ ID NO: 6041 - DNA, 75 bp, Homo sapiens
tcccattttaactatgtcatgtgttttgtatatgtcccagcattcatggatattttgtttgcttttgttttccag

SEQ ID NO: 6042 - DNA, 72 bp, Homo sapiens
atgtgttttgtatatgtcccagcattcatggatattttgtttgcttttgttttccagtcttttttctctttc

SEQ ID NO: 6043 - DNA, 67 bp, Homo sapiens
gtcttttttctctttccttttcaattttggaagtttttattgtcatatcctcaagcttaagagattt

SEQ ID NO: 6044 - DNA, 75 bp, Homo sapiens
ttttggaagtttttattgtcatatcctcaagcttaagagatttttttcttgagttgtgtcccactctgctgatga

SEQ ID NO: 6045 - DNA, 78 bp, Homo sapiens
tttttattgtcatatcctcaagcttaagagatttttttcttgagttgtgtcccactctgctgatgattccatcaaaga

SEQ ID NO: 6046 - DNA, 78 bp, Homo sapiens
atatcctcaagcttaagagatttttttcttgagttgtgtcccactctgctgatgattccatcaaagacattcttcatt

SEQ ID NO: 6047 - DNA, 76 bp, Homo sapiens
taagagatttttttcttgagttgtgtcccactctgctgatgattccatcaaagacattcttcatttctgtttgttt

SEQ ID NO: 6048 - DNA, 81 bp, Homo sapiens
ttcttgagttgtgtcccactctgctgatgattccatcaaagacattcttcatttctgtttgtttttgatctctctggcatt

SEQ ID NO: 6049 - DNA, 81 bp, Homo sapiens
agttgtgtcccactctgctgatgattccatcaaagacattcttcatttctgtttgtttttgatctctctggcatttctgat

SEQ ID NO: 6050 - DNA, 82 bp, Homo sapiens
ccactctgctgatgattccatcaaagacattcttcatttctgtttgtttttgatctctctggcatttctgatttgctttcat

SEQ ID NO: 6051 - DNA, 83 bp, Homo sapiens
gatgattccatcaaagacattcttcatttctgtttgtttttgatctctctggcatttctgatttgctttcattatgcatatgt

SEQ ID NO: 6052 - DNA, 83 bp, Homo sapiens
atcaaagacattcttcatttctgtttgtttttgatctctctggcatttctgatttgctttcattatgcatatgttcttgcatg

SEQ ID NO: 6053 - DNA, 83 bp, Homo sapiens
tcaaagacattcttcatttctgtttgtttttgatctctctggcatttctgatttgctttcattatgcatatgttcttgcatgt

SEQ ID NO: 6054 - DNA, 79 bp, Homo sapiens
atttctgtttgtttttgatctctctggcatttctgatttgctttcattatgcatatgttcttgcatgttgtctaccttt

SEQ ID NO: 6055 - DNA, 80 bp, Homo sapiens
gtttgtttttgatctctctggcatttctgatttgctttcattatgcatatgttcttgcatgttgtctaccttttccatta

SEQ ID NO: 6056 - DNA, 82 bp, Homo sapiens
tctctctggcatttctgatttgctttcattatgcatatgttcttgcatgttgtctaccttttccattaaattccttatcata

SEQ ID NO: 6057 - DNA, 79 bp, Homo sapiens
ttgctttcattatgcatatgttcttgcatgttgtctaccttttccattaaattccttatcatattaattatagatttca

SEQ ID NO: 6058 - DNA, 75 bp, Homo sapiens
attatgcatatgttcttgcatgttgtctaccttttccattaaattccttatcatattaattatagatttcaaaaa

SEQ ID NO: 6059 - DNA, 73 bp, Homo sapiens
cttgcatgttgtctaccttttccattaaattccttatcatattaattatagatttcaaaaattattggtctca

SEQ ID NO: 6060 - DNA, 71 bp, Homo sapiens
gtctaccttttccattaaattccttatcatattaattatagatttcaaaaattattggtctcataattcca

SEQ ID NO: 6061 - DNA, 74 bp, Homo sapiens
ccattaaattccttatcatattaattatagatttcaaaaattattggtctcataattccaacattcctgccatg

SEQ ID NO: 6062 - DNA, 75 bp, Homo sapiens
ttaattatagatttcaaaaattattggtctcataattccaacattcctgccatgtctgacttggtttctgatggt

SEQ ID NO: 6063 - DNA, 73 bp, Homo sapiens
atttcaaaaattattggtctcataattccaacattcctgccatgtctgacttggtttctgatggtttttcact

SEQ ID NO: 6064 - DNA, 72 bp, Homo sapiens
aaaaattattggtctcataattccaacattcctgccatgtctgacttggtttctgatggtttttcactttat

SEQ ID NO: 6065 - DNA, 73 bp, Homo sapiens
ggtctcataattccaacattcctgccatgtctgacttggtttctgatggtttttcactttatttaaactgtat

SEQ ID NO: 6066 - DNA, 70 bp, Homo sapiens
ccaacattcctgccatgtctgacttggtttctgatggtttttcactttatttaaactgtattttttgcct

SEQ ID NO: 6067 - DNA, 69 bp, Homo sapiens
cctgccatgtctgacttggtttctgatggtttttcactttatttaaactgtattttttgccttttgtgt

SEQ ID NO: 6068 - DNA, 66 bp, Homo sapiens
ctgacttggtttctgatggtttttcactttatttaaactgtattttttgccttttgtgttgttgtt

SEQ ID NO: 6069 - DNA, 67 bp, Homo sapiens
ctgatggtttttcactttatttaaactgtattttttgccttttgtgttgttgtttcaagttgaacat

SEQ ID NO: 6070 - DNA, 69 bp, Homo sapiens
cactttatttaaactgtattttttgccttttgtgttgttgtttcaagttgaacattatatcctggcaaa

SEQ ID NO: 6071 - DNA, 71 bp, Homo sapiens
aactgtattttttgccttttgtgttgttgtttcaagttgaacattatatcctggcaaagggaactgcacta

SEQ ID NO: 6072 - DNA, 72 bp, Homo sapiens
tttttgccttttgtgttgttgtttcaagttgaacattatatcctggcaaagggaactgcactataaataggc

SEQ ID NO: 6073 - DNA, 73 bp, Homo sapiens
gttgaacattatatcctggcaaagggaactgcactataaataggcctttagttaacgtgctagtgaattgtgg

SEQ ID NO: 6074 - DNA, 74 bp, Homo sapiens
gaactgcactataaataggcctttagttaacgtgctagtgaattgtggggaacaggagatcttatatttctata

SEQ ID NO: 6075 - DNA, 70 bp, Homo sapiens
cctttagttaacgtgctagtgaattgtggggaacaggagatcttatatttctataattaggtttcagtct

SEQ ID NO: 6076 - DNA, 72 bp, Homo sapiens
ttaacgtgctagtgaattgtggggaacaggagatcttatatttctataattaggtttcagtctttaggtgaa

SEQ ID NO: 6077 - DNA, 71 bp, Homo sapiens
tagtgaattgtggggaacaggagatcttatatttctataattaggtttcagtctttaggtgaacctctacc

SEQ ID NO: 6078 - DNA, 72 bp, Homo sapiens
agatcttatatttctataattaggtttcagtctttaggtgaacctctacccctggaatgtgaactgcatagg

SEQ ID NO: 6079 - DNA, 71 bp, Homo sapiens
tataattaggtttcagtctttaggtgaacctctacccctggaatgtgaactgcataggggcttcttagtta

SEQ ID NO: 6080 - DNA, 68 bp, Homo sapiens
aggtttcagtctttaggtgaacctctacccctggaatgtgaactgcataggggcttcttagttatttt

SEQ ID NO: 6081 - DNA, 68 bp, Homo sapiens
gtctttaggtgaacctctacccctggaatgtgaactgcataggggcttcttagttatttttttctccc

SEQ ID NO: 6082 - DNA, 69 bp, Homo sapiens
aacctctacccctggaatgtgaactgcataggggcttcttagttatttttttctccctcaagtgggaca

SEQ ID NO: 6083 - DNA, 74 bp, Homo sapiens
tggaatgtgaactgcataggggcttcttagttatttttttctccctcaagtgggacaggatgatggttagagtc

SEQ ID NO: 6084 - DNA, 71 bp, Homo sapiens
cttcttagttatttttttctccctcaagtgggacaggatgatggttagagtcgcctgaggttgtacatttc

SEQ ID NO: 6085 - DNA, 72 bp, Homo sapiens
tctccctcaagtgggacaggatgatggttagagtcgcctgaggttgtacatttcccttccctaggttagtta

SEQ ID NO: 6086 - DNA, 72 bp, Homo sapiens
ggacaggatgatggttagagtcgcctgaggttgtacatttcccttccctaggttagttaggctctgacaaaa

SEQ ID NO: 6087 - DNA, 70 bp, Homo sapiens
atgatggttagagtcgcctgaggttgtacatttcccttccctaggttagttaggctctgacaaaaacctc

SEQ ID NO: 6088 - DNA, 68 bp, Homo sapiens
agtcgcctgaggttgtacatttcccttccctaggttagttaggctctgacaaaaacctccacaggtta

SEQ ID NO: 6089 - DNA, 66 bp, Homo sapiens
tttcccttccctaggttagttaggctctgacaaaaacctccacaggttaggatctggttaaatagt

SEQ ID NO: 6090 - DNA, 69 bp, Homo sapiens
taggttagttaggctctgacaaaaacctccacaggttaggatctggttaaatagttaaatagcaggcct

SEQ ID NO: 6091 - DNA, 67 bp, Homo sapiens
gacaaaaacctccacaggttaggatctggttaaatagttaaatagcaggccttgttaggaaaaagaa

SEQ ID NO: 6092 - DNA, 65 bp, Homo sapiens
agttaaatagcaggccttgttaggaaaaagaaagctctggttatttcaaaatggttccttttccc

SEQ ID NO: 6093 - DNA, 64 bp, Homo sapiens
aatagcaggccttgttaggaaaaagaaagctctggttatttcaaaatggttccttttccccctt

SEQ ID NO: 6094 - DNA, 63 bp, Homo sapiens
cttgttaggaaaaagaaagctctggttatttcaaaatggttccttttccccctttattggagg

SEQ ID NO: 6095 - DNA, 64 bp, Homo sapiens
aaaagaaagctctggttatttcaaaatggttccttttccccctttattggagggatctctgggg

SEQ ID NO: 6096 - DNA, 66 bp, Homo sapiens
ttatttcaaaatggttccttttccccctttattggagggatctctgggggactctgtctccggtat

SEQ ID NO: 6097 - DNA, 67 bp, Homo sapiens
aaaatggttccttttccccctttattggagggatctctgggggactctgtctccggtattcactctg

SEQ ID NO: 6098 - DNA, 72 bp, Homo sapiens
tttccccctttattggagggatctctgggggactctgtctccggtattcactctgtgggcctgctagaggtc

SEQ ID NO: 6099 - DNA, 74 bp, Homo sapiens
tattggagggatctctgggggactctgtctccggtattcactctgtgggcctgctagaggtcctagaggtaaaa

SEQ ID NO: 6100 - DNA, 73 bp, Homo sapiens
atctctgggggactctgtctccggtattcactctgtgggcctgctagaggtcctagaggtaaaattcacaaaa

SEQ ID NO: 6101 - DNA, 73 bp, Homo sapiens
actctgtctccggtattcactctgtgggcctgctagaggtcctagaggtaaaattcacaaaagtgtgagggtc

SEQ ID NO: 6102 - DNA, 71 bp, Homo sapiens
ttcactctgtgggcctgctagaggtcctagaggtaaaattcacaaaagtgtgagggtcccccaagaccagg

SEQ ID NO: 6103 - DNA, 68 bp, Homo sapiens
tgctagaggtcctagaggtaaaattcacaaaagtgtgagggtcccccaagaccaggtccccctggagg

SEQ ID NO: 6104 - DNA, 65 bp, Homo sapiens
tcctagaggtaaaattcacaaaagtgtgagggtcccccaagaccaggtccccctggaggttttct

SEQ ID NO: 6105 - DNA, 62 bp, Homo sapiens
aaaattcacaaaagtgtgagggtcccccaagaccaggtccccctggaggttttctttttcgg

SEQ ID NO: 6106 - DNA, 64 bp, Homo sapiens
aaaagtgtgagggtcccccaagaccaggtccccctggaggttttctttttcgggcttgttcaca

SEQ ID NO: 6107 - DNA, 66 bp, Homo sapiens
agggtcccccaagaccaggtccccctggaggttttctttttcgggcttgttcacactgtgcctcca

SEQ ID NO: 6108 - DNA, 69 bp, Homo sapiens
accaggtccccctggaggttttctttttcgggcttgttcacactgtgcctccagcagtatcaactaaaa

SEQ ID NO: 6109 - DNA, 70 bp, Homo sapiens
cctggaggttttctttttcgggcttgttcacactgtgcctccagcagtatcaactaaaatagttcaggtt

SEQ ID NO: 6110 - DNA, 69 bp, Homo sapiens
aggttttctttttcgggcttgttcacactgtgcctccagcagtatcaactaaaatagttcaggttttct

SEQ ID NO: 6111 - DNA, 72 bp, Homo sapiens
tttcgggcttgttcacactgtgcctccagcagtatcaactaaaatagttcaggttttctttccctggtactg

SEQ ID NO: 6112 - DNA, 74 bp, Homo sapiens
gttcacactgtgcctccagcagtatcaactaaaatagttcaggttttctttccctggtactggttcctgcagag

SEQ ID NO: 6113 - DNA, 75 bp, Homo sapiens
tccagcagtatcaactaaaatagttcaggttttctttccctggtactggttcctgcagaggtttcagctgctgga

SEQ ID NO: 6114 - DNA, 71 bp, Homo sapiens
agtatcaactaaaatagttcaggttttctttccctggtactggttcctgcagaggtttcagctgctggatt

SEQ ID NO: 6115 - DNA, 71 bp, Homo sapiens
aaatagttcaggttttctttccctggtactggttcctgcagaggtttcagctgctggatttgcttaagtaa

SEQ ID NO: 6116 - DNA, 73 bp, Homo sapiens
ttttctttccctggtactggttcctgcagaggtttcagctgctggatttgcttaagtaagttgtaagtctctc

SEQ ID NO: 6117 - DNA, 79 bp, Homo sapiens
tggtactggttcctgcagaggtttcagctgctggatttgcttaagtaagttgtaagtctctctgtgcactgatttgtct

SEQ ID NO: 6118 - DNA, 77 bp, Homo sapiens
ttcctgcagaggtttcagctgctggatttgcttaagtaagttgtaagtctctctgtgcactgatttgtctttccttt

SEQ ID NO: 6119 - DNA, 73 bp, Homo sapiens
agaggtttcagctgctggatttgcttaagtaagttgtaagtctctctgtgcactgatttgtctttcctttttt

SEQ ID NO: 6120 - DNA, 73 bp, Homo sapiens
ctggaattacaggtatgacccccaattttttgtttagcagtttgccctgtgacctctcaattcactgatataa

SEQ ID NO: 6121 - DNA, 72 bp, Homo sapiens
attacaggtatgacccccaattttttgtttagcagtttgccctgtgacctctcaattcactgatataagagt

SEQ ID NO: 6122 - DNA, 72 bp, Homo sapiens
cccaattttttgtttagcagtttgccctgtgacctctcaattcactgatataagagttggtgattttcagtt

SEQ ID NO: 6123 - DNA, 74 bp, Homo sapiens
ttttgtttagcagtttgccctgtgacctctcaattcactgatataagagttggtgattttcagtttgttgagtt

SEQ ID NO: 6124 - DNA, 75 bp, Homo sapiens
tttagcagtttgccctgtgacctctcaattcactgatataagagttggtgattttcagtttgttgagttttgtgt

SEQ ID NO: 6125 - DNA, 73 bp, Homo sapiens
tttgccctgtgacctctcaattcactgatataagagttggtgattttcagtttgttgagttttgtgtttgttt

SEQ ID NO: 6126 - DNA, 75 bp, Homo sapiens
tctcaattcactgatataagagttggtgattttcagtttgttgagttttgtgtttgttttagggcagagcaaaga

SEQ ID NO: 6127 - DNA, 74 bp, Homo sapiens
ctcaattcactgatataagagttggtgattttcagtttgttgagttttgtgtttgttttagggcagagcaaaga

SEQ ID NO: 6128 - DNA, 73 bp, Homo sapiens
ttcactgatataagagttggtgattttcagtttgttgagttttgtgtttgttttagggcagagcaaagacttc

SEQ ID NO: 6129 - DNA, 73 bp, Homo sapiens
atataagagttggtgattttcagtttgttgagttttgtgtttgttttagggcagagcaaagacttctctctgc

SEQ ID NO: 6130 - DNA, 73 bp, Homo sapiens
gttggtgattttcagtttgttgagttttgtgtttgttttagggcagagcaaagacttctctctgctccttata

SEQ ID NO: 6131 - DNA, 76 bp, Homo sapiens
gtgattttcagtttgttgagttttgtgtttgttttagggcagagcaaagacttctctctgctccttatatgctcaa

SEQ ID NO: 6132 - DNA, 74 bp, Homo sapiens
attttcagtttgttgagttttgtgtttgttttagggcagagcaaagacttctctctgctccttatatgctcaac

SEQ ID NO: 6133 - DNA, 75 bp, Homo sapiens
ttgagttttgtgtttgttttagggcagagcaaagacttctctctgctccttatatgctcaacgagaaaccagaat

SEQ ID NO: 6134 - DNA, 77 bp, Homo sapiens
tgtgtttgttttagggcagagcaaagacttctctctgctccttatatgctcaacgagaaaccagaattcctagtata

SEQ ID NO: 6135 - DNA, 77 bp, Homo sapiens
ttttagggcagagcaaagacttctctctgctccttatatgctcaacgagaaaccagaattcctagtataggcattta

SEQ ID NO: 6136 - DNA, 75 bp, Homo sapiens
aaagacttctctctgctccttatatgctcaacgagaaaccagaattcctagtataggcatttaatgatataaact

SEQ ID NO: 6137 - DNA, 70 bp, Homo sapiens
ctcaacgagaaaccagaattcctagtataggcatttaatgatataaacttccctcttaagtagggcttta

SEQ ID NO: 6138 - DNA, 72 bp, Homo sapiens
ccagaattcctagtataggcatttaatgatataaacttccctcttaagtagggctttatgaattttgatatg

SEQ ID NO: 6139 - DNA, 71 bp, Homo sapiens
cctagtataggcatttaatgatataaacttccctcttaagtagggctttatgaattttgatatgttgtgtt

SEQ ID NO: 6140 - DNA, 65 bp, Homo sapiens
catttttatttagttaaaaaatgctttgtatggttttccttttcttctttgacctatgagttact

SEQ ID NO: 6141 - DNA, 65 bp, Homo sapiens
agttaaaaaatgctttgtatggttttccttttcttctttgacctatgagttacttaaaagtgtgt

SEQ ID NO: 6142 - DNA, 67 bp, Homo sapiens
gctttgtatggttttccttttcttctttgacctatgagttacttaaaagtgtgttatttagtttaga

SEQ ID NO: 6143 - DNA, 66 bp, Homo sapiens
gtatggttttccttttcttctttgacctatgagttacttaaaagtgtgttatttagtttagaaata

SEQ ID NO: 6144 - DNA, 69 bp, Homo sapiens
tcttctttgacctatgagttacttaaaagtgtgttatttagtttagaaatatttggatattcactttgt

SEQ ID NO: 6145 - DNA, 70 bp, Homo sapiens
ttgacctatgagttacttaaaagtgtgttatttagtttagaaatatttggatattcactttgttactgat

SEQ ID NO: 6146 - DNA, 68 bp, Homo sapiens
gagttacttaaaagtgtgttatttagtttagaaatatttggatattcactttgttactgatttctaat

SEQ ID NO: 6147 - DNA, 68 bp, Homo sapiens
agtgtgttatttagtttagaaatatttggatattcactttgttactgatttctaatttaatatttttg

SEQ ID NO: 6148 - DNA, 70 bp, Homo sapiens
actgatttctaatttaatatttttgtgttatcattccttttaagtttattgatacttttttgatgcagaa

SEQ ID NO: 6149 - DNA, 71 bp, Homo sapiens
aatttaatatttttgtgttatcattccttttaagtttattgatacttttttgatgcagaacatggattatc

SEQ ID NO: 6150 - DNA, 72 bp, Homo sapiens
ttttgtgttatcattccttttaagtttattgatacttttttgatgcagaacatggattatcttgttaaacat

SEQ ID NO: 6151 - DNA, 75 bp, Homo sapiens
atcattccttttaagtttattgatacttttttgatgcagaacatggattatcttgttaaacattctatgtatgtg

SEQ ID NO: 6152 - DNA, 72 bp, Homo sapiens
ccttttaagtttattgatacttttttgatgcagaacatggattatcttgttaaacattctatgtatgtgttt

SEQ ID NO: 6153 - DNA, 73 bp, Homo sapiens
ttacaggcgtgcccggctctatgtgttttttataacaatgaatgtgtattcatttgtagttgtgtggagtttt

SEQ ID NO: 6154 - DNA, 73 bp, Homo sapiens
cgtgcccggctctatgtgttttttataacaatgaatgtgtattcatttgtagttgtgtggagtttttctgtaa

SEQ ID NO: 6155 - DNA, 75 bp, Homo sapiens
gctctatgtgttttttataacaatgaatgtgtattcatttgtagttgtgtggagtttttctgtaaatgtccatta

SEQ ID NO: 6156 - DNA, 74 bp, Homo sapiens
ttataacaatgaatgtgtattcatttgtagttgtgtggagtttttctgtaaatgtccattaggtcaagttgatt

SEQ ID NO: 6157 - DNA, 74 bp, Homo sapiens
tgaatgtgtattcatttgtagttgtgtggagtttttctgtaaatgtccattaggtcaagttgatttatattaag

SEQ ID NO: 6158 - DNA, 70 bp, Homo sapiens
gtattcatttgtagttgtgtggagtttttctgtaaatgtccattaggtcaagttgatttatattaagttt

SEQ ID NO: 6159 - DNA, 71 bp, Homo sapiens
tgtgtggagtttttctgtaaatgtccattaggtcaagttgatttatattaagttttctatatccttactcg

SEQ ID NO: 6160 - DNA, 68 bp, Homo sapiens
ggagtttttctgtaaatgtccattaggtcaagttgatttatattaagttttctatatccttactcgtt

SEQ ID NO: 6161 - DNA, 68 bp, Homo sapiens
gtaaatgtccattaggtcaagttgatttatattaagttttctatatccttactcgttttttgcttgtt

SEQ ID NO: 6162 - DNA, 70 bp, Homo sapiens
cattaggtcaagttgatttatattaagttttctatatccttactcgttttttgcttgtttgttctgtcag

SEQ ID NO: 6163 - DNA, 72 bp, Homo sapiens
tgatttatattaagttttctatatccttactcgttttttgcttgtttgttctgtcagttattgtgagcggtg

SEQ ID NO: 6164 - DNA, 70 bp, Homo sapiens
taagttttctatatccttactcgttttttgcttgtttgttctgtcagttattgtgagcggtgggtattag

SEQ ID NO: 6165 - DNA, 73 bp, Homo sapiens
tatatccttactcgttttttgcttgtttgttctgtcagttattgtgagcggtgggtattaggtgcagaaacaa

SEQ ID NO: 6166 - DNA, 70 bp, Homo sapiens
gttttttgcttgtttgttctgtcagttattgtgagcggtgggtattaggtgcagaaacaattaggatttt

SEQ ID NO: 6167 - DNA, 76 bp, Homo sapiens
tgtttgttctgtcagttattgtgagcggtgggtattaggtgcagaaacaattaggatttttgtatcttgatgagta

SEQ ID NO: 6168 - DNA, 77 bp, Homo sapiens
tgtcagttattgtgagcggtgggtattaggtgcagaaacaattaggatttttgtatcttgatgagtaagccactgta

SEQ ID NO: 6169 - DNA, 74 bp, Homo sapiens
ttattgtgagcggtgggtattaggtgcagaaacaattaggatttttgtatcttgatgagtaagccactgtattt

SEQ ID NO: 6170 - DNA, 72 bp, Homo sapiens
cggtgggtattaggtgcagaaacaattaggatttttgtatcttgatgagtaagccactgtattttgttaata

SEQ ID NO: 6171 - DNA, 75 bp, Homo sapiens
taggtgcagaaacaattaggatttttgtatcttgatgagtaagccactgtattttgttaatattctttgttgtga

SEQ ID NO: 6172 - DNA, 75 bp, Homo sapiens
attaggatttttgtatcttgatgagtaagccactgtattttgttaatattctttgttgtgaaatctactggctga

SEQ ID NO: 6173 - DNA, 79 bp, Homo sapiens
ttgtatcttgatgagtaagccactgtattttgttaatattctttgttgtgaaatctactggctgatattaatatagtga

SEQ ID NO: 6174 - DNA, 77 bp, Homo sapiens
gatgagtaagccactgtattttgttaatattctttgttgtgaaatctactggctgatattaatatagtgaatttagc

SEQ ID NO: 6175 - DNA, 75 bp, Homo sapiens
gccactgtattttgttaatattctttgttgtgaaatctactggctgatattaatatagtgaatttagctttctat

SEQ ID NO: 6176 - DNA, 76 bp, Homo sapiens
gttaatattctttgttgtgaaatctactggctgatattaatatagtgaatttagctttctattgattagctttagc

SEQ ID NO: 6177 - DNA, 79 bp, Homo sapiens
gaaatctactggctgatattaatatagtgaatttagctttctattgattagctttagcttgatgtttcttttcacatgc

SEQ ID NO: 6178 - DNA, 78 bp, Homo sapiens
actggctgatattaatatagtgaatttagctttctattgattagctttagcttgatgtttcttttcacatgcttatac

SEQ ID NO: 6179 - DNA, 76 bp, Homo sapiens
atatagtgaatttagctttctattgattagctttagcttgatgtttcttttcacatgcttatactttctttgtgcc

SEQ ID NO: 6180 - DNA, 76 bp, Homo sapiens
tgaatttagctttctattgattagctttagcttgatgtttcttttcacatgcttatactttctttgtgcctttata

SEQ ID NO: 6181 - DNA, 73 bp, Homo sapiens
tttctattgattagctttagcttgatgtttcttttcacatgcttatactttctttgtgcctttatatttaaaa

SEQ ID NO: 6182 - DNA, 71 bp, Homo sapiens
agctttagcttgatgtttcttttcacatgcttatactttctttgtgcctttatatttaaaataggcttctt

SEQ ID NO: 6183 - DNA, 69 bp, Homo sapiens
cttgatgtttcttttcacatgcttatactttctttgtgcctttatatttaaaataggcttcttttttct

SEQ ID NO: 6184 - DNA, 76 bp, Homo sapiens
tgcgcccagccaaaataggtttttttaaggcagcgtatagtcatgttatgagtttattcattcattgttgcaatct

SEQ ID NO: 6185 - DNA, 75 bp, Homo sapiens
ccagccaaaataggtttttttaaggcagcgtatagtcatgttatgagtttattcattcattgttgcaatctttgc

SEQ ID NO: 6186 - DNA, 73 bp, Homo sapiens
ggtttttttaaggcagcgtatagtcatgttatgagtttattcattcattgttgcaatctttgctttttaattg

SEQ ID NO: 6187 - DNA, 76 bp, Homo sapiens
aggcagcgtatagtcatgttatgagtttattcattcattgttgcaatctttgctttttaattggggtgtttagaga

SEQ ID NO: 6188 - DNA, 74 bp, Homo sapiens
agtcatgttatgagtttattcattcattgttgcaatctttgctttttaattggggtgtttagagaatttacaga

SEQ ID NO: 6189 - DNA, 75 bp, Homo sapiens
tgagtttattcattcattgttgcaatctttgctttttaattggggtgtttagagaatttacagataatatgattc

SEQ ID NO: 6190 - DNA, 75 bp, Homo sapiens
ttcattgttgcaatctttgctttttaattggggtgtttagagaatttacagataatatgattctctgagtggttg

SEQ ID NO: 6191 - DNA, 73 bp, Homo sapiens
gttgcaatctttgctttttaattggggtgtttagagaatttacagataatatgattctctgagtggttgtatt

SEQ ID NO: 6192 - DNA, 72 bp, Homo sapiens
tttgctttttaattggggtgtttagagaatttacagataatatgattctctgagtggttgtattttattata

SEQ ID NO: 6193 - DNA, 73 bp, Homo sapiens
gggtgtttagagaatttacagataatatgattctctgagtggttgtattttattataatactgttattattat

SEQ ID NO: 6194 - DNA, 75 bp, Homo sapiens
actgcacctggcctctgtgtagttgcattttaatctaacatttgctaatccttttctttttgcccatcatttctc

SEQ ID NO: 6195 - DNA, 73 bp, Homo sapiens
acctggcctctgtgtagttgcattttaatctaacatttgctaatccttttctttttgcccatcatttctcttc

SEQ ID NO: 6196 - DNA, 71 bp, Homo sapiens
gtgtagttgcattttaatctaacatttgctaatccttttctttttgcccatcatttctcttcccttctctt

SEQ ID NO: 6197 - DNA, 74 bp, Homo sapiens
tttaatctaacatttgctaatccttttctttttgcccatcatttctcttcccttctctttctctgtctgctgta

SEQ ID NO: 6198 - DNA, 75 bp, Homo sapiens
atttgctaatccttttctttttgcccatcatttctcttcccttctctttctctgtctgctgtatgtttgattgaa

SEQ ID NO: 6199 - DNA, 72 bp, Homo sapiens
tccttttctttttgcccatcatttctcttcccttctctttctctgtctgctgtatgtttgattgaacttttt

SEQ ID NO: 6200 - DNA, 75 bp, Homo sapiens
ctttttgcccatcatttctcttcccttctctttctctgtctgctgtatgtttgattgaactttttttatgattca

SEQ ID NO: 6201 - DNA, 76 bp, Homo sapiens
tcatttctcttcccttctctttctctgtctgctgtatgtttgattgaactttttttatgattcagttttgcctgat

SEQ ID NO: 6202 - DNA, 75 bp, Homo sapiens
cccttctctttctctgtctgctgtatgtttgattgaactttttttatgattcagttttgcctgatttgcaataat

SEQ ID NO: 6203 - DNA, 74 bp, Homo sapiens
tttctctgtctgctgtatgtttgattgaactttttttatgattcagttttgcctgatttgcaataattttttgt

SEQ ID NO: 6204 - DNA, 74 bp, Homo sapiens
tgctgtatgtttgattgaactttttttatgattcagttttgcctgatttgcaataattttttgttatattgtat

SEQ ID NO: 6205 - DNA, 72 bp, Homo sapiens
tgaactttttttatgattcagttttgcctgatttgcaataattttttgttatattgtattgtttgatttaga

SEQ ID NO: 6206 - DNA, 74 bp, Homo sapiens
ttatgattcagttttgcctgatttgcaataattttttgttatattgtattgtttgatttagagagtacggtata

SEQ ID NO: 6207 - DNA, 72 bp, Homo sapiens
cagttttgcctgatttgcaataattttttgttatattgtattgtttgatttagagagtacggtatagcgtcg

SEQ ID NO: 6208 - DNA, 73 bp, Homo sapiens
gcctgatttgcaataattttttgttatattgtattgtttgatttagagagtacggtatagcgtcgttagccta

SEQ ID NO: 6209 - DNA, 70 bp, Homo sapiens
attttttgttatattgtattgtttgatttagagagtacggtatagcgtcgttagcctatcagagtttacc

SEQ ID NO: 6210 - DNA, 74 bp, Homo sapiens
atattgtattgtttgatttagagagtacggtatagcgtcgttagcctatcagagtttaccttcaagcaatatta

SEQ ID NO: 6211 - DNA, 73 bp, Homo sapiens
ttgtttgatttagagagtacggtatagcgtcgttagcctatcagagtttaccttcaagcaatattatactagt

SEQ ID NO: 6212 - DNA, 73 bp, Homo sapiens
atttagagagtacggtatagcgtcgttagcctatcagagtttaccttcaagcaatattatactagtttacata

SEQ ID NO: 6213 - DNA, 73 bp, Homo sapiens
tacggtatagcgtcgttagcctatcagagtttaccttcaagcaatattatactagtttacataaagtataaga

SEQ ID NO: 6214 - DNA, 73 bp, Homo sapiens
tcgttagcctatcagagtttaccttcaagcaatattatactagtttacataaagtataagaaccttgtagctg

SEQ ID NO: 6215 - DNA, 72 bp, Homo sapiens
cagagtttaccttcaagcaatattatactagtttacataaagtataagaaccttgtagctgtatacttctcc

SEQ ID NO: 6216 - DNA, 70 bp, Homo sapiens
cttcaagcaatattatactagtttacataaagtataagaaccttgtagctgtatacttctccccttttgg

SEQ ID NO: 6217 - DNA, 69 bp, Homo sapiens
gcaatattatactagtttacataaagtataagaaccttgtagctgtatacttctccccttttggttttg

SEQ ID NO: 6218 - DNA, 67 bp, Homo sapiens
actagtttacataaagtataagaaccttgtagctgtatacttctccccttttggttttgtgctattt

SEQ ID NO: 6219 - DNA, 69 bp, Homo sapiens
taaagtataagaaccttgtagctgtatacttctccccttttggttttgtgctatttttatcacttattg

SEQ ID NO: 6220 - DNA, 66 bp, Homo sapiens
agaaccttgtagctgtatacttctccccttttggttttgtgctatttttatcacttattgtttttt

SEQ ID NO: 6221 - DNA, 69 bp, Homo sapiens
agctgtatacttctccccttttggttttgtgctatttttatcacttattgtttttttacatatattata

SEQ ID NO: 6222 - DNA, 66 bp, Homo sapiens
cccttttggttttgtgctatttttatcacttattgtttttttacatatattataaaacacaattta

SEQ ID NO: 6223 - DNA, 69 bp, Homo sapiens
tggttttgtgctatttttatcacttattgtttttttacatatattataaaacacaatttattgttacta

SEQ ID NO: 6224 - DNA, 69 bp, Homo sapiens
gctatttttatcacttattgtttttttacatatattataaaacacaatttattgttactacttttgctc

SEQ ID NO: 6225 - DNA, 72 bp, Homo sapiens
cttattgtttttttacatatattataaaacacaatttattgttactacttttgctctatatcatctgtcttg

SEQ ID NO: 6226 - DNA, 73 bp, Homo sapiens
ttacatatattataaaacacaatttattgttactacttttgctctatatcatctgtcttgtaaagagtttaaa

SEQ ID NO: 6227 - DNA, 72 bp, Homo sapiens
tataaaacacaatttattgttactacttttgctctatatcatctgtcttgtaaagagtttaaaataggccag

SEQ ID NO: 6228 - DNA, 72 bp, Homo sapiens
aacacaatttattgttactacttttgctctatatcatctgtcttgtaaagagtttaaaataggccaggcgcg

SEQ ID NO: 6229 - DNA, 65 bp, Homo sapiens
ataaaaaagtaaaataatggaacaagtctttattgtttaccatttttactgtatttgtctgttac

SEQ ID NO: 6230 - DNA, 67 bp, Homo sapiens
aaaataatggaacaagtctttattgtttaccatttttactgtatttgtctgttactccttccttatc

SEQ ID NO: 6231 - DNA, 69 bp, Homo sapiens
ggaacaagtctttattgtttaccatttttactgtatttgtctgttactccttccttatctcttttcaca

SEQ ID NO: 6232 - DNA, 69 bp, Homo sapiens
gtctttattgtttaccatttttactgtatttgtctgttactccttccttatctcttttcacagtttcag

SEQ ID NO: 6233 - DNA, 73 bp, Homo sapiens
catttttactgtatttgtctgttactccttccttatctcttttcacagtttcagttatcttcagtcaactgcg

SEQ ID NO: 6234 - DNA, 74 bp, Homo sapiens
tgtatttgtctgttactccttccttatctcttttcacagtttcagttatcttcagtcaactgcggtctgaaaaa

SEQ ID NO: 6235 - DNA, 75 bp, Homo sapiens
tctgttactccttccttatctcttttcacagtttcagttatcttcagtcaactgcggtctgaaaaatattgaata

SEQ ID NO: 6236 - DNA, 74 bp, Homo sapiens
ccttatctcttttcacagtttcagttatcttcagtcaactgcggtctgaaaaatattgaatagaaaattccaga

SEQ ID NO: 6237 - DNA, 73 bp, Homo sapiens
ctcttttcacagtttcagttatcttcagtcaactgcggtctgaaaaatattgaatagaaaattccagaaataa

SEQ ID NO: 6238 - DNA, 82 bp, Homo sapiens
aattccagaaataaatacattataatttgcacactgttttgagtggtgtgatgagaaatttcacatcatcatcatctctctg

SEQ ID NO: 6239 - DNA, 84 bp, Homo sapiens
cagaaataaatacattataatttgcacactgttttgagtggtgtgatgagaaatttcacatcatcatcatctctctgtactata

SEQ ID NO: 6240 - DNA, 85 bp, Homo sapiens
cattataatttgcacactgttttgagtggtgtgatgagaaatttcacatcatcatcatctctctgtactatatttactattagca

SEQ ID NO: 6241 - DNA, 83 bp, Homo sapiens
acactgttttgagtggtgtgatgagaaatttcacatcatcatcatctctctgtactatatttactattagcaatgaacatttc

SEQ ID NO: 6242 - DNA, 84 bp, Homo sapiens
gttttgagtggtgtgatgagaaatttcacatcatcatcatctctctgtactatatttactattagcaatgaacatttctaatgc

SEQ ID NO: 6243 - DNA, 84 bp, Homo sapiens
gtgtgatgagaaatttcacatcatcatcatctctctgtactatatttactattagcaatgaacatttctaatgctcttccttct

SEQ ID NO: 6244 - DNA, 80 bp, Homo sapiens
gagaaatttcacatcatcatcatctctctgtactatatttactattagcaatgaacatttctaatgctcttccttctttt

SEQ ID NO: 6245 - DNA, 80 bp, Homo sapiens
catcatcatctctctgtactatatttactattagcaatgaacatttctaatgctcttccttctttttggtatattcacat

SEQ ID NO: 6246 - DNA, 76 bp, Homo sapiens
ctctctgtactatatttactattagcaatgaacatttctaatgctcttccttctttttggtatattcacatttcat

SEQ ID NO: 6247 - DNA, 75 bp, Homo sapiens
tgtactatatttactattagcaatgaacatttctaatgctcttccttctttttggtatattcacatttcatttat

SEQ ID NO: 6248 - DNA, 76 bp, Homo sapiens
ttactattagcaatgaacatttctaatgctcttccttctttttggtatattcacatttcatttattatttgtctga

SEQ ID NO: 6249 - DNA, 75 bp, Homo sapiens
gcaatgaacatttctaatgctcttccttctttttggtatattcacatttcatttattatttgtctgaaatagttc

SEQ ID NO: 6250 - DNA, 72 bp, Homo sapiens
ctaatgctcttccttctttttggtatattcacatttcatttattatttgtctgaaatagttcttttagcatt

SEQ ID NO: 6251 - DNA, 72 bp, Homo sapiens
tccttctttttggtatattcacatttcatttattatttgtctgaaatagttcttttagcatttattgtagtg

SEQ ID NO: 6252 - DNA, 76 bp, Homo sapiens
ggtatattcacatttcatttattatttgtctgaaatagttcttttagcatttattgtagtgttggtctgctagtga

SEQ ID NO: 6253 - DNA, 75 bp, Homo sapiens
cacatttcatttattatttgtctgaaatagttcttttagcatttattgtagtgttggtctgctagtgattagttc

SEQ ID NO: 6254 - DNA, 74 bp, Homo sapiens
ttattatttgtctgaaatagttcttttagcatttattgtagtgttggtctgctagtgattagttctttctgctt

SEQ ID NO: 6255 - DNA, 75 bp, Homo sapiens
gtctgaaatagttcttttagcatttattgtagtgttggtctgctagtgattagttctttctgcttttatatccaa

SEQ ID NO: 6256 - DNA, 72 bp, Homo sapiens
gttcttttagcatttattgtagtgttggtctgctagtgattagttctttctgcttttatatccaaaaaagcc

SEQ ID NO: 6257 - DNA, 69 bp, Homo sapiens
agtgttggtctgctagtgattagttctttctgcttttatatccaaaaaagcctttattttgtatttgtt

SEQ ID NO: 6258 - DNA, 67 bp, Homo sapiens
ctttctgcttttatatccaaaaaagcctttattttgtatttgttttagaaagatattttataatagc

SEQ ID NO: 6259 - DNA, 70 bp, Homo sapiens
tgcttttatatccaaaaaagcctttattttgtatttgttttagaaagatattttataatagctgcctgtg

SEQ ID NO: 6260 - DNA, 69 bp, Homo sapiens
aaaagcctttattttgtatttgttttagaaagatattttataatagctgcctgtggaattctaagttga

SEQ ID NO: 6261 - DNA, 69 bp, Homo sapiens
cctttattttgtatttgttttagaaagatattttataatagctgcctgtggaattctaagttgacagtt

SEQ ID NO: 6262 - DNA, 70 bp, Homo sapiens
tgttttagaaagatattttataatagctgcctgtggaattctaagttgacagttttttcttttagtactc

SEQ ID NO: 6263 - DNA, 70 bp, Homo sapiens
agatattttataatagctgcctgtggaattctaagttgacagttttttcttttagtactctcctgttttc

SEQ ID NO: 6264 - DNA, 72 bp, Homo sapiens
taatagctgcctgtggaattctaagttgacagttttttcttttagtactctcctgttttctagatcgaatgt

SEQ ID NO: 6265 - DNA, 70 bp, Homo sapiens
gcctgtggaattctaagttgacagttttttcttttagtactctcctgttttctagatcgaatgttttcag

SEQ ID NO: 6266 - DNA, 69 bp, Homo sapiens
gaattctaagttgacagttttttcttttagtactctcctgttttctagatcgaatgttttcagggaaga

SEQ ID NO: 6267 - DNA, 69 bp, Homo sapiens
cagttttttcttttagtactctcctgttttctagatcgaatgttttcagggaagattttgctttcattc

SEQ ID NO: 6268 - DNA, 70 bp, Homo sapiens
cttttagtactctcctgttttctagatcgaatgttttcagggaagattttgctttcattcttaatctttg

SEQ ID NO: 6269 - DNA, 71 bp, Homo sapiens
ctagatcgaatgttttcagggaagattttgctttcattcttaatctttgtttttggagtgtaagacatcct

SEQ ID NO: 6270 - DNA, 69 bp, Homo sapiens
cgaatgttttcagggaagattttgctttcattcttaatctttgtttttggagtgtaagacatccttaaa

SEQ ID NO: 6271 - DNA, 67 bp, Homo sapiens
cagggaagattttgctttcattcttaatctttgtttttggagtgtaagacatccttaaaaagaaaaa

SEQ ID NO: 6272 - DNA, 66 bp, Homo sapiens
agaaaaaagaaaagcctggtttcttgtaacatttcctctttatcattggtttttaaagataagcaa

SEQ ID NO: 6273 - DNA, 69 bp, Homo sapiens
aaagcctggtttcttgtaacatttcctctttatcattggtttttaaagataagcaatttgataatgaac

SEQ ID NO: 6274 - DNA, 72 bp, Homo sapiens
ctggtttcttgtaacatttcctctttatcattggtttttaaagataagcaatttgataatgaactgagttca

SEQ ID NO: 6275 - DNA, 70 bp, Homo sapiens
gtaacatttcctctttatcattggtttttaaagataagcaatttgataatgaactgagttcatttacttt

SEQ ID NO: 6276 - DNA, 71 bp, Homo sapiens
tcattggtttttaaagataagcaatttgataatgaactgagttcatttacttttcttcatatttatttttc

SEQ ID NO: 6277 - DNA, 69 bp, Homo sapiens
ttggtttttaaagataagcaatttgataatgaactgagttcatttacttttcttcatatttatttttct

SEQ ID NO: 6278 - DNA, 70 bp, Homo sapiens
taaagataagcaatttgataatgaactgagttcatttacttttcttcatatttatttttcttggggttac

SEQ ID NO: 6279 - DNA, 69 bp, Homo sapiens
aagcaatttgataatgaactgagttcatttacttttcttcatatttatttttcttggggttacttgagg

SEQ ID NO: 6280 - DNA, 69 bp, Homo sapiens
tttgataatgaactgagttcatttacttttcttcatatttatttttcttggggttacttgaggttctta

SEQ ID NO: 6281 - DNA, 66 bp, Homo sapiens
ctgagttcatttacttttcttcatatttatttttcttggggttacttgaggttcttaaactgtggg

SEQ ID NO: 6282 - DNA, 65 bp, Homo sapiens
gagttcatttacttttcttcatatttatttttcttggggttacttgaggttcttaaactgtgggg

SEQ ID NO: 6283 - DNA, 63 bp, Homo sapiens
catttacttttcttcatatttatttttcttggggttacttgaggttcttaaactgtgggggtt

SEQ ID NO: 6284 - DNA, 61 bp, Homo sapiens
acttttcttcatatttatttttcttggggttacttgaggttcttaaactgtgggggttttt

SEQ ID NO: 6285 - DNA, 63 bp, Homo sapiens
tttttttttcatcaattttataatttttcctactattatttcttcagttttgtggggattttt

SEQ ID NO: 6286 - DNA, 66 bp, Homo sapiens
ttcatcaattttataatttttcctactattatttcttcagttttgtggggattttttgttcgtttg

SEQ ID NO: 6287 - DNA, 65 bp, Homo sapiens
taatttttcctactattatttcttcagttttgtggggattttttgttcgtttgttttgatcctcc

SEQ ID NO: 6288 - DNA, 67 bp, Homo sapiens
cttcagttttgtggggattttttgttcgtttgttttgatcctcccattctttttgagtattctagta

SEQ ID NO: 6289 - DNA, 69 bp, Homo sapiens
gttttgtggggattttttgttcgtttgttttgatcctcccattctttttgagtattctagtagcatgta

SEQ ID NO: 6290 - DNA, 70 bp, Homo sapiens
tttgttcgtttgttttgatcctcccattctttttgagtattctagtagcatgtaaattaggctacttaag

SEQ ID NO: 6291 - DNA, 73 bp, Homo sapiens
tgttttgatcctcccattctttttgagtattctagtagcatgtaaattaggctacttaaggttgttctacagc

SEQ ID NO: 6292 - DNA, 72 bp, Homo sapiens
ctcccattctttttgagtattctagtagcatgtaaattaggctacttaaggttgttctacagctcactgttt

SEQ ID NO: 6293 - DNA, 70 bp, Homo sapiens
attctttttgagtattctagtagcatgtaaattaggctacttaaggttgttctacagctcactgtttttt

SEQ ID NO: 6294 - DNA, 70 bp, Homo sapiens
ttttgagtattctagtagcatgtaaattaggctacttaaggttgttctacagctcactgtttttttttta

SEQ ID NO: 6295 - DNA, 68 bp, Homo sapiens
tttttttttaatgtactcattcttttggtgatttatgttgggtagtttacatgttgtagtctcaaggt

SEQ ID NO: 6296 - DNA, 72 bp, Homo sapiens
atgtactcattcttttggtgatttatgttgggtagtttacatgttgtagtctcaaggttggcttggtacaaa

SEQ ID NO: 6297 - DNA, 69 bp, Homo sapiens
attcttttggtgatttatgttgggtagtttacatgttgtagtctcaaggttggcttggtacaaagtttg

SEQ ID NO: 6298 - DNA, 69 bp, Homo sapiens
ggtagtttacatgttgtagtctcaaggttggcttggtacaaagtttgtggtttttatgggacacttgaa

SEQ ID NO: 6299 - DNA, 70 bp, Homo sapiens
atgttgtagtctcaaggttggcttggtacaaagtttgtggtttttatgggacacttgaatagtacattat

SEQ ID NO: 6300 - DNA, 69 bp, Homo sapiens
gtagtctcaaggttggcttggtacaaagtttgtggtttttatgggacacttgaatagtacattatttta

SEQ ID NO: 6301 - DNA, 67 bp, Homo sapiens
ggttggcttggtacaaagtttgtggtttttatgggacacttgaatagtacattattttattttaata

SEQ ID NO: 6302 - DNA, 79 bp, Homo sapiens
tttattttaatattttaaccagcacattatgttttctaatggttgaaggcatagcacttgccatcaccaatgcagatga

SEQ ID NO: 6303 - DNA, 81 bp, Homo sapiens
ttaatattttaaccagcacattatgttttctaatggttgaaggcatagcacttgccatcaccaatgcagatgacagagcct

SEQ ID NO: 6304 - DNA, 83 bp, Homo sapiens
attatgttttctaatggttgaaggcatagcacttgccatcaccaatgcagatgacagagccttgtagactaatctgaggcaac

SEQ ID NO: 6305 - DNA, 85 bp, Homo sapiens
tatgttttctaatggttgaaggcatagcacttgccatcaccaatgcagatgacagagccttgtagactaatctgaggcaaccata

SEQ ID NO: 6306 - DNA, 83 bp, Homo sapiens
tctaatggttgaaggcatagcacttgccatcaccaatgcagatgacagagccttgtagactaatctgaggcaaccataccttt

SEQ ID NO: 6307 - DNA, 83 bp, Homo sapiens
tggttgaaggcatagcacttgccatcaccaatgcagatgacagagccttgtagactaatctgaggcaaccataccttttgtaa

SEQ ID NO: 6308 - DNA, 81 bp, Homo sapiens
aaggcatagcacttgccatcaccaatgcagatgacagagccttgtagactaatctgaggcaaccataccttttgtaaataa

SEQ ID NO: 6309 - DNA, 79 bp, Homo sapiens
accaatgcagatgacagagccttgtagactaatctgaggcaaccataccttttgtaaataatcatagctgctgtttctt

SEQ ID NO: 6310 - DNA, 77 bp, Homo sapiens
agatgacagagccttgtagactaatctgaggcaaccataccttttgtaaataatcatagctgctgtttctttggtta

SEQ ID NO: 6311 - DNA, 73 bp, Homo sapiens
ccttgtagactaatctgaggcaaccataccttttgtaaataatcatagctgctgtttctttggttacttgtta

SEQ ID NO: 6312 - DNA, 75 bp, Homo sapiens
ctaatctgaggcaaccataccttttgtaaataatcatagctgctgtttctttggttacttgttatagagtcattg

SEQ ID NO: 6313 - DNA, 73 bp, Homo sapiens
gaggcaaccataccttttgtaaataatcatagctgctgtttctttggttacttgttatagagtcattgtttaa

SEQ ID NO: 6314 - DNA, 71 bp, Homo sapiens
accttttgtaaataatcatagctgctgtttctttggttacttgttatagagtcattgtttaattttggatc

SEQ ID NO: 6315 - DNA, 67 bp, Homo sapiens
tctttggttacttgttatagagtcattgtttaattttggatctagttttaaatttttgtttgaagta

SEQ ID NO: 6316 - DNA, 65 bp, Homo sapiens
cttgttatagagtcattgtttaattttggatctagttttaaatttttgtttgaagtaaataattt

SEQ ID NO: 6317 - DNA, 64 bp, Homo sapiens
gtcattgtttaattttggatctagttttaaatttttgtttgaagtaaataatttttgtttccac

SEQ ID NO: 6318 - DNA, 67 bp, Homo sapiens
ttggatctagttttaaatttttgtttgaagtaaataatttttgtttccacttaatgctattgtatag

SEQ ID NO: 6319 - DNA, 66 bp, Homo sapiens
ttttaaatttttgtttgaagtaaataatttttgtttccacttaatgctattgtataggtatattgg

SEQ ID NO: 6320 - DNA, 73 bp, Homo sapiens
ttgtttgaagtaaataatttttgtttccacttaatgctattgtataggtatattggtgttgcagcttatctta

SEQ ID NO: 6321 - DNA, 73 bp, Homo sapiens
taaataatttttgtttccacttaatgctattgtataggtatattggtgttgcagcttatcttaggactaatag

SEQ ID NO: 6322 - DNA, 77 bp, Homo sapiens
ttgtttccacttaatgctattgtataggtatattggtgttgcagcttatcttaggactaatagttggccatgaaata

SEQ ID NO: 6323 - DNA, 75 bp, Homo sapiens
ccacttaatgctattgtataggtatattggtgttgcagcttatcttaggactaatagttggccatgaaataaaaa

SEQ ID NO: 6324 - DNA, 77 bp, Homo sapiens
tgtataggtatattggtgttgcagcttatcttaggactaatagttggccatgaaataaaaatgacgtgtattctgaa

SEQ ID NO: 6325 - DNA, 76 bp, Homo sapiens
tatattggtgttgcagcttatcttaggactaatagttggccatgaaataaaaatgacgtgtattctgaattagcct

SEQ ID NO: 6326 - DNA, 74 bp, Homo sapiens
gtgttgcagcttatcttaggactaatagttggccatgaaataaaaatgacgtgtattctgaattagccttttaa

SEQ ID NO: 6327 - DNA, 69 bp, Homo sapiens
cttaggactaatagttggccatgaaataaaaatgacgtgtattctgaattagccttttaaaagattaag

SEQ ID NO: 6328 - DNA, 69 bp, Homo sapiens
ctaatagttggccatgaaataaaaatgacgtgtattctgaattagccttttaaaagattaagttgcccg

SEQ ID NO: 6329 - DNA, 71 bp, Homo sapiens
tgaaataaaaatgacgtgtattctgaattagccttttaaaagattaagttgcccgtaaatcacaatgtaga

SEQ ID NO: 6330 - DNA, 73 bp, Homo sapiens
atgacgtgtattctgaattagccttttaaaagattaagttgcccgtaaatcacaatgtagaacaaagtatgca

SEQ ID NO: 6331 - DNA, 76 bp, Homo sapiens
aaagattaagttgcccgtaaatcacaatgtagaacaaagtatgcagtacttcagagactctcagtacagccaaata

SEQ ID NO: 6332 - DNA, 76 bp, Homo sapiens
aagttgcccgtaaatcacaatgtagaacaaagtatgcagtacttcagagactctcagtacagccaaatatctagtt

SEQ ID NO: 6333 - DNA, 79 bp, Homo sapiens
atcacaatgtagaacaaagtatgcagtacttcagagactctcagtacagccaaatatctagttttatctccagtagaaa

SEQ ID NO: 6334 - DNA, 77 bp, Homo sapiens
tagaacaaagtatgcagtacttcagagactctcagtacagccaaatatctagttttatctccagtagaaaacaacaa

SEQ ID NO: 6335 - DNA, 69 bp, Homo sapiens
caacaaaaaaagaacttacatttttcagtagagcaccaaatgaagtagttggcattttgtggtccaatt

SEQ ID NO: 6336 - DNA, 70 bp, Homo sapiens
aaagaacttacatttttcagtagagcaccaaatgaagtagttggcattttgtggtccaatttacattaaa

SEQ ID NO: 6337 - DNA, 71 bp, Homo sapiens
tacatttttcagtagagcaccaaatgaagtagttggcattttgtggtccaatttacattaaaaataagtat

SEQ ID NO: 6338 - DNA, 72 bp, Homo sapiens
agtagagcaccaaatgaagtagttggcattttgtggtccaatttacattaaaaataagtattattatataca

SEQ ID NO: 6339 - DNA, 76 bp, Homo sapiens
ttggcattttgtggtccaatttacattaaaaataagtattattatatacaagaattacactcagagcagtgagatg

SEQ ID NO: 6340 - DNA, 78 bp, Homo sapiens
gtggtccaatttacattaaaaataagtattattatatacaagaattacactcagagcagtgagatgttcatactatga

SEQ ID NO: 6341 - DNA, 80 bp, Homo sapiens
cattaaaaataagtattattatatacaagaattacactcagagcagtgagatgttcatactatgatagacatttagaata

SEQ ID NO: 6342 - DNA, 80 bp, Homo sapiens
aagtattattatatacaagaattacactcagagcagtgagatgttcatactatgatagacatttagaatacaaaagtgag

SEQ ID NO: 6343 - DNA, 80 bp, Homo sapiens
atatacaagaattacactcagagcagtgagatgttcatactatgatagacatttagaatacaaaagtgaggaaacaagat

SEQ ID NO: 6344 - DNA, 79 bp, Homo sapiens
caagaattacactcagagcagtgagatgttcatactatgatagacatttagaatacaaaagtgaggaaacaagattttg

SEQ ID NO: 6345 - DNA, 76 bp, Homo sapiens
gtgagatgttcatactatgatagacatttagaatacaaaagtgaggaaacaagattttgtgaatttagtcttgggc

SEQ ID NO: 6346 - DNA, 74 bp, Homo sapiens
ctatgatagacatttagaatacaaaagtgaggaaacaagattttgtgaatttagtcttgggcttactcatagtg

SEQ ID NO: 6347 - DNA, 73 bp, Homo sapiens
catttagaatacaaaagtgaggaaacaagattttgtgaatttagtcttgggcttactcatagtgtgtctttca

SEQ ID NO: 6348 - DNA, 74 bp, Homo sapiens
aatacaaaagtgaggaaacaagattttgtgaatttagtcttgggcttactcatagtgtgtctttcagccatctc

SEQ ID NO: 6349 - DNA, 73 bp, Homo sapiens
aggaaacaagattttgtgaatttagtcttgggcttactcatagtgtgtctttcagccatctcccacctccttc

SEQ ID NO: 6350 - DNA, 74 bp, Homo sapiens
tttgtgaatttagtcttgggcttactcatagtgtgtctttcagccatctcccacctccttctggtctcctttta

SEQ ID NO: 6351 - DNA, 72 bp, Homo sapiens
aatttagtcttgggcttactcatagtgtgtctttcagccatctcccacctccttctggtctccttttacctg

SEQ ID NO: 6352 - DNA, 73 bp, Homo sapiens
cttactcatagtgtgtctttcagccatctcccacctccttctggtctccttttacctgtcttcgattttgagt

SEQ ID NO: 6353 - DNA, 75 bp, Homo sapiens
ttactcatagtgtgtctttcagccatctcccacctccttctggtctccttttacctgtcttcgattttgagttga

SEQ ID NO: 6354 - DNA, 76 bp, Homo sapiens
tagtgtgtctttcagccatctcccacctccttctggtctccttttacctgtcttcgattttgagttgatcattgta

SEQ ID NO: 6355 - DNA, 75 bp, Homo sapiens
tctttcagccatctcccacctccttctggtctccttttacctgtcttcgattttgagttgatcattgtatgttta

SEQ ID NO: 6356 - DNA, 75 bp, Homo sapiens
tttcagccatctcccacctccttctggtctccttttacctgtcttcgattttgagttgatcattgtatgtttata

SEQ ID NO: 6357 - DNA, 73 bp, Homo sapiens
atctcccacctccttctggtctccttttacctgtcttcgattttgagttgatcattgtatgtttataatggaa

SEQ ID NO: 6358 - DNA, 72 bp, Homo sapiens
ccacctccttctggtctccttttacctgtcttcgattttgagttgatcattgtatgtttataatggaattcc

SEQ ID NO: 6359 - DNA, 72 bp, Homo sapiens
ctccttctggtctccttttacctgtcttcgattttgagttgatcattgtatgtttataatggaattccctag

SEQ ID NO: 6360 - DNA, 77 bp, Homo sapiens
tttacctgtcttcgattttgagttgatcattgtatgtttataatggaattccctagtgccatattgtcccaacagca

SEQ ID NO: 6361 - DNA, 76 bp, Homo sapiens
gatcattgtatgtttataatggaattccctagtgccatattgtcccaacagcacattatggaacaagtacttttaa

SEQ ID NO: 6362 - DNA, 74 bp, Homo sapiens
gtatgtttataatggaattccctagtgccatattgtcccaacagcacattatggaacaagtacttttaaaatca

SEQ ID NO: 6363 - DNA, 72 bp, Homo sapiens
taatggaattccctagtgccatattgtcccaacagcacattatggaacaagtacttttaaaatcatttttaa

SEQ ID NO: 6364 - DNA, 70 bp, Homo sapiens
ccctagtgccatattgtcccaacagcacattatggaacaagtacttttaaaatcatttttaaacctggaa

SEQ ID NO: 6365 - DNA, 69 bp, Homo sapiens
ttgtcccaacagcacattatggaacaagtacttttaaaatcatttttaaacctggaattaaaatagatg

SEQ ID NO: 6366 - DNA, 68 bp, Homo sapiens
aacagcacattatggaacaagtacttttaaaatcatttttaaacctggaattaaaatagatgtttctc

SEQ ID NO: 6367 - DNA, 71 bp, Homo sapiens
catttttaaacctggaattaaaatagatgtttctctttgaatgaaccctgcattgccttagttagtgtcat

SEQ ID NO: 6368 - DNA, 72 bp, Homo sapiens
ttaaaatagatgtttctctttgaatgaaccctgcattgccttagttagtgtcattatgtgtaatttaaaaat

SEQ ID NO: 6369 - DNA, 73 bp, Homo sapiens
ctctttgaatgaaccctgcattgccttagttagtgtcattatgtgtaatttaaaaattgttaacatctaaagc

SEQ ID NO: 6370 - DNA, 73 bp, Homo sapiens
tgaatgaaccctgcattgccttagttagtgtcattatgtgtaatttaaaaattgttaacatctaaagctaaaa

SEQ ID NO: 6371 - DNA, 71 bp, Homo sapiens
ctgcattgccttagttagtgtcattatgtgtaatttaaaaattgttaacatctaaagctaaaattcatttt

SEQ ID NO: 6372 - DNA, 70 bp, Homo sapiens
tagtgtcattatgtgtaatttaaaaattgttaacatctaaagctaaaattcatttttttcacattaagtc

SEQ ID NO: 6373 - DNA, 70 bp, Homo sapiens
tatgtgtaatttaaaaattgttaacatctaaagctaaaattcatttttttcacattaagtctgattatgt

SEQ ID NO: 6374 - DNA, 70 bp, Homo sapiens
taaaaattgttaacatctaaagctaaaattcatttttttcacattaagtctgattatgttctgaaacgta

SEQ ID NO: 6375 - DNA, 70 bp, Homo sapiens
tctaaagctaaaattcatttttttcacattaagtctgattatgttctgaaacgtaggtttggacatttaa

SEQ ID NO: 6376 - DNA, 69 bp, Homo sapiens
tttcacattaagtctgattatgttctgaaacgtaggtttggacatttaaaaaatgttcagttacagttt

SEQ ID NO: 6377 - DNA, 69 bp, Homo sapiens
aagtctgattatgttctgaaacgtaggtttggacatttaaaaaatgttcagttacagttttaatatgat

SEQ ID NO: 6378 - DNA, 67 bp, Homo sapiens
gttctgaaacgtaggtttggacatttaaaaaatgttcagttacagttttaatatgattttttgtcac

SEQ ID NO: 6379 - DNA, 68 bp, Homo sapiens
cgtaggtttggacatttaaaaaatgttcagttacagttttaatatgattttttgtcactgaagtttga

SEQ ID NO: 6380 - DNA, 70 bp, Homo sapiens
tttaaaaaatgttcagttacagttttaatatgattttttgtcactgaagtttgattgttttattcattgc

SEQ ID NO: 6381 - DNA, 74 bp, Homo sapiens
tgttcagttacagttttaatatgattttttgtcactgaagtttgattgttttattcattgctctctttgtaata

SEQ ID NO: 6382 - DNA, 72 bp, Homo sapiens
gttacagttttaatatgattttttgtcactgaagtttgattgttttattcattgctctctttgtaatactgt

SEQ ID NO: 6383 - DNA, 76 bp, Homo sapiens
tatgattttttgtcactgaagtttgattgttttattcattgctctctttgtaatactgtttcttccaaatgtcatg

SEQ ID NO: 6384 - DNA, 75 bp, Homo sapiens
gtcactgaagtttgattgttttattcattgctctctttgtaatactgtttcttccaaatgtcatgttttcatggg

SEQ ID NO: 6385 - DNA, 74 bp, Homo sapiens
ttgattgttttattcattgctctctttgtaatactgtttcttccaaatgtcatgttttcatgggtttttatgga

SEQ ID NO: 6386 - DNA, 75 bp, Homo sapiens
tattcattgctctctttgtaatactgtttcttccaaatgtcatgttttcatgggtttttatggacagatttatac

SEQ ID NO: 6387 - DNA, 72 bp, Homo sapiens
atactgtttcttccaaatgtcatgttttcatgggtttttatggacagatttatacttgagggtttgatcaag

SEQ ID NO: 6388 - DNA, 72 bp, Homo sapiens
ttccaaatgtcatgttttcatgggtttttatggacagatttatacttgagggtttgatcaagggtgttctgt

SEQ ID NO: 6389 - DNA, 70 bp, Homo sapiens
catgttttcatgggtttttatggacagatttatacttgagggtttgatcaagggtgttctgttaaataag

SEQ ID NO: 6390 - DNA, 70 bp, Homo sapiens
ttcatgggtttttatggacagatttatacttgagggtttgatcaagggtgttctgttaaataagtgggaa

SEQ ID NO: 6391 - DNA, 71 bp, Homo sapiens
tttatggacagatttatacttgagggtttgatcaagggtgttctgttaaataagtgggaaaaatgaccatc

SEQ ID NO: 6392 - DNA, 74 bp, Homo sapiens
tatacttgagggtttgatcaagggtgttctgttaaataagtgggaaaaatgaccatctctaatgtagattgtca

SEQ ID NO: 6393 - DNA, 73 bp, Homo sapiens
agggtttgatcaagggtgttctgttaaataagtgggaaaaatgaccatctctaatgtagattgtcatgtggaa

SEQ ID NO: 6394 - DNA, 74 bp, Homo sapiens
agggtgttctgttaaataagtgggaaaaatgaccatctctaatgtagattgtcatgtggaagtgaatagcgtat

SEQ ID NO: 6395 - DNA, 76 bp, Homo sapiens
aagtgggaaaaatgaccatctctaatgtagattgtcatgtggaagtgaatagcgtatttccatttgtagtactcta

SEQ ID NO: 6396 - DNA, 77 bp, Homo sapiens
tctctaatgtagattgtcatgtggaagtgaatagcgtatttccatttgtagtactctacccaattttctctccattc

SEQ ID NO: 6397 - DNA, 75 bp, Homo sapiens
gcgtatttccatttgtagtactctacccaattttctctccattctttatttgatacatgagcaaaaatacatgag

SEQ ID NO: 6398 - DNA, 76 bp, Homo sapiens
ttgtagtactctacccaattttctctccattctttatttgatacatgagcaaaaatacatgagtgaagaacaccac

SEQ ID NO: 6399 - DNA, 76 bp, Homo sapiens
tactctacccaattttctctccattctttatttgatacatgagcaaaaatacatgagtgaagaacaccactgtgtt

SEQ ID NO: 6400 - DNA, 77 bp, Homo sapiens
ttctctccattctttatttgatacatgagcaaaaatacatgagtgaagaacaccactgtgttttcttagatgacttt

SEQ ID NO: 6401 - DNA, 75 bp, Homo sapiens
ccattctttatttgatacatgagcaaaaatacatgagtgaagaacaccactgtgttttcttagatgacttttaaa

SEQ ID NO: 6402 - DNA, 77 bp, Homo sapiens
ttgatacatgagcaaaaatacatgagtgaagaacaccactgtgttttcttagatgacttttaaacttcactaggtca

SEQ ID NO: 6403 - DNA, 75 bp, Homo sapiens
aaaaatacatgagtgaagaacaccactgtgttttcttagatgacttttaaacttcactaggtcatgcaaggatca

SEQ ID NO: 6404 - DNA, 80 bp, Homo sapiens
tacatgagtgaagaacaccactgtgttttcttagatgacttttaaacttcactaggtcatgcaaggatcagatgtgagag

SEQ ID NO: 6405 - DNA, 77 bp, Homo sapiens
aagaacaccactgtgttttcttagatgacttttaaacttcactaggtcatgcaaggatcagatgtgagaggaatgga

SEQ ID NO: 6406 - DNA, 78 bp, Homo sapiens
atgacttttaaacttcactaggtcatgcaaggatcagatgtgagaggaatggagaacctcaggatcaactcaagtaat

SEQ ID NO: 6407 - DNA, 78 bp, Homo sapiens
tttaaacttcactaggtcatgcaaggatcagatgtgagaggaatggagaacctcaggatcaactcaagtaattggaaa

SEQ ID NO: 6408 - DNA, 78 bp, Homo sapiens
actaggtcatgcaaggatcagatgtgagaggaatggagaacctcaggatcaactcaagtaattggaaaaagtatttga

SEQ ID NO: 6409 - DNA, 74 bp, Homo sapiens
aaggatcagatgtgagaggaatggagaacctcaggatcaactcaagtaattggaaaaagtatttgaaaaatgag

SEQ ID NO: 6410 - DNA, 68 bp, Homo sapiens
ctcaggatcaactcaagtaattggaaaaagtatttgaaaaatgaggtggggtggtttccaaattgacc

SEQ ID NO: 6411 - DNA, 68 bp, Homo sapiens
aactcaagtaattggaaaaagtatttgaaaaatgaggtggggtggtttccaaattgacctgcccagca

SEQ ID NO: 6412 - DNA, 68 bp, Homo sapiens
aaaaagtatttgaaaaatgaggtggggtggtttccaaattgacctgcccagcatggaaaaggttcata

SEQ ID NO: 6413 - DNA, 74 bp, Homo sapiens
tttccaaattgacctgcccagcatggaaaaggttcatatttctaaagtaagccatgaagtttcatcagcttaaa

SEQ ID NO: 6414 - DNA, 74 bp, Homo sapiens
aaattgacctgcccagcatggaaaaggttcatatttctaaagtaagccatgaagtttcatcagcttaaatgtaa

SEQ ID NO: 6415 - DNA, 74 bp, Homo sapiens
gcccagcatggaaaaggttcatatttctaaagtaagccatgaagtttcatcagcttaaatgtaattggtttgta

SEQ ID NO: 6416 - DNA, 70 bp, Homo sapiens
gaaaaggttcatatttctaaagtaagccatgaagtttcatcagcttaaatgtaattggtttgtaaaatgg

SEQ ID NO: 6417 - DNA, 68 bp, Homo sapiens
atatttctaaagtaagccatgaagtttcatcagcttaaatgtaattggtttgtaaaatgggatttttt

SEQ ID NO: 6418 - DNA, 63 bp, Homo sapiens
tttttttccttttaaacttactttgaaacgtttgttcttgtttgtggattgtagtttgttaga

SEQ ID NO: 6419 - DNA, 65 bp, Homo sapiens
ccttttaaacttactttgaaacgtttgttcttgtttgtggattgtagtttgttagaatagtggag

SEQ ID NO: 6420 - DNA, 66 bp, Homo sapiens
acttactttgaaacgtttgttcttgtttgtggattgtagtttgttagaatagtggagtactttgtt

SEQ ID NO: 6421 - DNA, 67 bp, Homo sapiens
aaacgtttgttcttgtttgtggattgtagtttgttagaatagtggagtactttgtttttatgaaata

SEQ ID NO: 6422 - DNA, 70 bp, Homo sapiens
tcttgtttgtggattgtagtttgttagaatagtggagtactttgtttttatgaaatatttcttctattta

SEQ ID NO: 6423 - DNA, 73 bp, Homo sapiens
gattgtagtttgttagaatagtggagtactttgtttttatgaaatatttcttctatttaatgatgaatatctg

SEQ ID NO: 6424 - DNA, 77 bp, Homo sapiens
agaatagtggagtactttgtttttatgaaatatttcttctatttaatgatgaatatctgttattggcactgagatga

SEQ ID NO: 6425 - DNA, 76 bp, Homo sapiens
agtggagtactttgtttttatgaaatatttcttctatttaatgatgaatatctgttattggcactgagatgatggg

SEQ ID NO: 6426 - DNA, 77 bp, Homo sapiens
tttgtttttatgaaatatttcttctatttaatgatgaatatctgttattggcactgagatgatgggggctggggatg

SEQ ID NO: 6427 - DNA, 80 bp, Homo sapiens
tatttcttctatttaatgatgaatatctgttattggcactgagatgatgggggctggggatggcaacagggtgacagaaa

SEQ ID NO: 6428 - DNA, 82 bp, Homo sapiens
ttctatttaatgatgaatatctgttattggcactgagatgatgggggctggggatggcaacagggtgacagaaaagcagcaa

SEQ ID NO: 6429 - DNA, 79 bp, Homo sapiens
tgaatatctgttattggcactgagatgatgggggctggggatggcaacagggtgacagaaaagcagcaagatttggttt

SEQ ID NO: 6430 - DNA, 77 bp, Homo sapiens
tgttattggcactgagatgatgggggctggggatggcaacagggtgacagaaaagcagcaagatttggttttccaaa

SEQ ID NO: 6431 - DNA, 74 bp, Homo sapiens
tgagatgatgggggctggggatggcaacagggtgacagaaaagcagcaagatttggttttccaaacacttaatt

SEQ ID NO: 6432 - DNA, 71 bp, Homo sapiens
gggctggggatggcaacagggtgacagaaaagcagcaagatttggttttccaaacacttaatttcttctct

SEQ ID NO: 6433 - DNA, 71 bp, Homo sapiens
atggcaacagggtgacagaaaagcagcaagatttggttttccaaacacttaatttcttctcttattcctct

SEQ ID NO: 6434 - DNA, 70 bp, Homo sapiens
cagggtgacagaaaagcagcaagatttggttttccaaacacttaatttcttctcttattcctctttttga

SEQ ID NO: 6435 - DNA, 67 bp, Homo sapiens
agaaaagcagcaagatttggttttccaaacacttaatttcttctcttattcctctttttgaaattgt

SEQ ID NO: 6436 - DNA, 66 bp, Homo sapiens
caagatttggttttccaaacacttaatttcttctcttattcctctttttgaaattgtttttgctaa

SEQ ID NO: 6437 - DNA, 67 bp, Homo sapiens
ccaaacacttaatttcttctcttattcctctttttgaaattgtttttgctaaaaatgccagccattt

SEQ ID NO: 6438 - DNA, 67 bp, Homo sapiens
acttaatttcttctcttattcctctttttgaaattgtttttgctaaaaatgccagccattttgaaac

SEQ ID NO: 6439 - DNA, 67 bp, Homo sapiens
ctcttattcctctttttgaaattgtttttgctaaaaatgccagccattttgaaactttattttattg

SEQ ID NO: 6440 - DNA, 73 bp, Homo sapiens
gtttttgctaaaaatgccagccattttgaaactttattttattgtcatgttctcgtttttcatattcatctga

SEQ ID NO: 6441 - DNA, 76 bp, Homo sapiens
actttattttattgtcatgttctcgtttttcatattcatctgattgtttgtgttgagtggtggctgtatgtgggaa

SEQ ID NO: 6442 - DNA, 77 bp, Homo sapiens
attttattgtcatgttctcgtttttcatattcatctgattgtttgtgttgagtggtggctgtatgtgggaaaattca

SEQ ID NO: 6443 - DNA, 76 bp, Homo sapiens
ttctcgtttttcatattcatctgattgtttgtgttgagtggtggctgtatgtgggaaaattcacttttgcatattt

SEQ ID NO: 6444 - DNA, 77 bp, Homo sapiens
tttttcatattcatctgattgtttgtgttgagtggtggctgtatgtgggaaaattcacttttgcatattttcagatt

SEQ ID NO: 6445 - DNA, 75 bp, Homo sapiens
catctgattgtttgtgttgagtggtggctgtatgtgggaaaattcacttttgcatattttcagatttttttcatt

SEQ ID NO: 6446 - DNA, 68 bp, Homo sapiens
tttttttcatttttatagcagagattttagatagatacaataaaaaagtattaacttatccaacaaaa

SEQ ID NO: 6447 - DNA, 70 bp, Homo sapiens
ttttatagcagagattttagatagatacaataaaaaagtattaacttatccaacaaaaatttagtgccga

SEQ ID NO: 6448 - DNA, 73 bp, Homo sapiens
gcagagattttagatagatacaataaaaaagtattaacttatccaacaaaaatttagtgccgattatgtagca

SEQ ID NO: 6449 - DNA, 73 bp, Homo sapiens
gatagatacaataaaaaagtattaacttatccaacaaaaatttagtgccgattatgtagcaagcacttagtga

SEQ ID NO: 6450 - DNA, 71 bp, Homo sapiens
taaaaaagtattaacttatccaacaaaaatttagtgccgattatgtagcaagcacttagtgaactttatgc

SEQ ID NO: 6451 - DNA, 76 bp, Homo sapiens
aagtattaacttatccaacaaaaatttagtgccgattatgtagcaagcacttagtgaactttatgctgtgcatgcc

SEQ ID NO: 6452 - DNA, 79 bp, Homo sapiens
caacaaaaatttagtgccgattatgtagcaagcacttagtgaactttatgctgtgcatgcctcagatactttagtgaac

SEQ ID NO: 6453 - DNA, 78 bp, Homo sapiens
aaaatttagtgccgattatgtagcaagcacttagtgaactttatgctgtgcatgcctcagatactttagtgaacttaa

SEQ ID NO: 6454 - DNA, 78 bp, Homo sapiens
aagcacttagtgaactttatgctgtgcatgcctcagatactttagtgaacttaatggcaacatcaaaatctttgccct

SEQ ID NO: 6455 - DNA, 78 bp, Homo sapiens
gaactttatgctgtgcatgcctcagatactttagtgaacttaatggcaacatcaaaatctttgcccttatggacttta

SEQ ID NO: 6456 - DNA, 78 bp, Homo sapiens
ttatgctgtgcatgcctcagatactttagtgaacttaatggcaacatcaaaatctttgcccttatggactttataaac

SEQ ID NO: 6457 - DNA, 74 bp, Homo sapiens
catgcctcagatactttagtgaacttaatggcaacatcaaaatctttgcccttatggactttataaacctttga

SEQ ID NO: 6458 - DNA, 71 bp, Homo sapiens
ttagtgaacttaatggcaacatcaaaatctttgcccttatggactttataaacctttgatttcaaaacatg

SEQ ID NO: 6459 - DNA, 75 bp, Homo sapiens
taatggcaacatcaaaatctttgcccttatggactttataaacctttgatttcaaaacatggtgattaatgtgca

SEQ ID NO: 6460 - DNA, 73 bp, Homo sapiens
ctttgcccttatggactttataaacctttgatttcaaaacatggtgattaatgtgcatctggtataatacact

SEQ ID NO: 6461 - DNA, 75 bp, Homo sapiens
ggactttataaacctttgatttcaaaacatggtgattaatgtgcatctggtataatacactttcatgtagtcatt

SEQ ID NO: 6462 - DNA, 77 bp, Homo sapiens
gatttcaaaacatggtgattaatgtgcatctggtataatacactttcatgtagtcattttattcaccattatttggg

SEQ ID NO: 6463 - DNA, 77 bp, Homo sapiens
acatggtgattaatgtgcatctggtataatacactttcatgtagtcattttattcaccattatttgggtataccttg

SEQ ID NO: 6464 - DNA, 75 bp, Homo sapiens
gtgcatctggtataatacactttcatgtagtcattttattcaccattatttgggtataccttgtattaaaaatga

SEQ ID NO: 6465 - DNA, 74 bp, Homo sapiens
tctggtataatacactttcatgtagtcattttattcaccattatttgggtataccttgtattaaaaatgactgc

SEQ ID NO: 6466 - DNA, 72 bp, Homo sapiens
cactttcatgtagtcattttattcaccattatttgggtataccttgtattaaaaatgactgctaaaactgga

SEQ ID NO: 6467 - DNA, 71 bp, Homo sapiens
tagtcattttattcaccattatttgggtataccttgtattaaaaatgactgctaaaactggaaactataca

SEQ ID NO: 6468 - DNA, 71 bp, Homo sapiens
ttcaccattatttgggtataccttgtattaaaaatgactgctaaaactggaaactatacaagtcttcatct

SEQ ID NO: 6469 - DNA, 68 bp, Homo sapiens
tttgggtataccttgtattaaaaatgactgctaaaactggaaactatacaagtcttcatctttttacc

SEQ ID NO: 6470 - DNA, 73 bp, Homo sapiens
ttgtattaaaaatgactgctaaaactggaaactatacaagtcttcatctttttaccttaacaaatgcagatca

SEQ ID NO: 6471 - DNA, 73 bp, Homo sapiens
aatgactgctaaaactggaaactatacaagtcttcatctttttaccttaacaaatgcagatcaagggaatgat

SEQ ID NO: 6472 - DNA, 73 bp, Homo sapiens
gctaaaactggaaactatacaagtcttcatctttttaccttaacaaatgcagatcaagggaatgattgagaac

SEQ ID NO: 6473 - DNA, 72 bp, Homo sapiens
actatacaagtcttcatctttttaccttaacaaatgcagatcaagggaatgattgagaaccatttttaggga

SEQ ID NO: 6474 - DNA, 71 bp, Homo sapiens
acaagtcttcatctttttaccttaacaaatgcagatcaagggaatgattgagaaccatttttagggatagt

SEQ ID NO: 6475 - DNA, 70 bp, Homo sapiens
tttaccttaacaaatgcagatcaagggaatgattgagaaccatttttagggatagttataaaatcttacc

SEQ ID NO: 6476 - DNA, 72 bp, Homo sapiens
cttaacaaatgcagatcaagggaatgattgagaaccatttttagggatagttataaaatcttacctttgcga

SEQ ID NO: 6477 - DNA, 72 bp, Homo sapiens
gcagatcaagggaatgattgagaaccatttttagggatagttataaaatcttacctttgcgatatataactt

SEQ ID NO: 6478 - DNA, 69 bp, Homo sapiens
catttttagggatagttataaaatcttacctttgcgatatataactttttcctcaacataacaattgga

SEQ ID NO: 6479 - DNA, 70 bp, Homo sapiens
tagggatagttataaaatcttacctttgcgatatataactttttcctcaacataacaattggaaaaatga

SEQ ID NO: 6480 - DNA, 69 bp, Homo sapiens
aaaatcttacctttgcgatatataactttttcctcaacataacaattggaaaaatgatttctgtttcaa

SEQ ID NO: 6481 - DNA, 71 bp, Homo sapiens
tacctttgcgatatataactttttcctcaacataacaattggaaaaatgatttctgtttcaaatctttctg

SEQ ID NO: 6482 - DNA, 68 bp, Homo sapiens
gatatataactttttcctcaacataacaattggaaaaatgatttctgtttcaaatctttctgtttttt

SEQ ID NO: 6483 - DNA, 67 bp, Homo sapiens
ttctgtttttttttgcaaaggggccctcacctggtttccttcaaaagttttgctctgtcctccgcta

SEQ ID NO: 6484 - DNA, 68 bp, Homo sapiens
tttttgcaaaggggccctcacctggtttccttcaaaagttttgctctgtcctccgctagccttataaa

SEQ ID NO: 6485 - DNA, 72 bp, Homo sapiens
ccctcacctggtttccttcaaaagttttgctctgtcctccgctagccttataaactcatggatatggtcctc

SEQ ID NO: 6486 - DNA, 73 bp, Homo sapiens
gtttccttcaaaagttttgctctgtcctccgctagccttataaactcatggatatggtcctctaatggatttg

SEQ ID NO: 6487 - DNA, 74 bp, Homo sapiens
aaaagttttgctctgtcctccgctagccttataaactcatggatatggtcctctaatggatttgtagcacctta

SEQ ID NO: 6488 - DNA, 74 bp, Homo sapiens
tccgctagccttataaactcatggatatggtcctctaatggatttgtagcaccttagttcccttattgtcacct

SEQ ID NO: 6489 - DNA, 75 bp, Homo sapiens
taaactcatggatatggtcctctaatggatttgtagcaccttagttcccttattgtcaccttcctgtgttgaata

SEQ ID NO: 6490 - DNA, 73 bp, Homo sapiens
atggatatggtcctctaatggatttgtagcaccttagttcccttattgtcaccttcctgtgttgaatactaaa

SEQ ID NO: 6491 - DNA, 71 bp, Homo sapiens
tcctctaatggatttgtagcaccttagttcccttattgtcaccttcctgtgttgaatactaaagcttattt

SEQ ID NO: 6492 - DNA, 70 bp, Homo sapiens
ggatttgtagcaccttagttcccttattgtcaccttcctgtgttgaatactaaagcttattttaatttca

SEQ ID NO: 6493 - DNA, 71 bp, Homo sapiens
gcaccttagttcccttattgtcaccttcctgtgttgaatactaaagcttattttaatttcatgtctaggaa

SEQ ID NO: 6494 - DNA, 72 bp, Homo sapiens
cccttattgtcaccttcctgtgttgaatactaaagcttattttaatttcatgtctaggaagtgtagacattg

SEQ ID NO: 6495 - DNA, 71 bp, Homo sapiens
tcaccttcctgtgttgaatactaaagcttattttaatttcatgtctaggaagtgtagacattgttaaaaaa

SEQ ID NO: 6496 - DNA, 72 bp, Homo sapiens
tgttgaatactaaagcttattttaatttcatgtctaggaagtgtagacattgttaaaaaaaaatgatgttgc

SEQ ID NO: 6497 - DNA, 71 bp, Homo sapiens
ctaaagcttattttaatttcatgtctaggaagtgtagacattgttaaaaaaaaatgatgttgcttgacaaa

SEQ ID NO: 6498 - DNA, 74 bp, Homo sapiens
gcttattttaatttcatgtctaggaagtgtagacattgttaaaaaaaaatgatgttgcttgacaaatgagtatc

SEQ ID NO: 6499 - DNA, 75 bp, Homo sapiens
atttcatgtctaggaagtgtagacattgttaaaaaaaaatgatgttgcttgacaaatgagtatcttcagtattac

SEQ ID NO: 6500 - DNA, 79 bp, Homo sapiens
tcatgtctaggaagtgtagacattgttaaaaaaaaatgatgttgcttgacaaatgagtatcttcagtattactgtgtca

SEQ ID NO: 6501 - DNA, 76 bp, Homo sapiens
gtctaggaagtgtagacattgttaaaaaaaaatgatgttgcttgacaaatgagtatcttcagtattactgtgtcac

SEQ ID NO: 6502 - DNA, 77 bp, Homo sapiens
taggaagtgtagacattgttaaaaaaaaatgatgttgcttgacaaatgagtatcttcagtattactgtgtcacttca

SEQ ID NO: 6503 - DNA, 76 bp, Homo sapiens
gacattgttaaaaaaaaatgatgttgcttgacaaatgagtatcttcagtattactgtgtcacttcataaatataac

SEQ ID NO: 6504 - DNA, 77 bp, Homo sapiens
taaaaaaaaatgatgttgcttgacaaatgagtatcttcagtattactgtgtcacttcataaatataactaatacata

SEQ ID NO: 6505 - DNA, 76 bp, Homo sapiens
aaaaatgatgttgcttgacaaatgagtatcttcagtattactgtgtcacttcataaatataactaatacatacttt

SEQ ID NO: 6506 - DNA, 79 bp, Homo sapiens
tgcttgacaaatgagtatcttcagtattactgtgtcacttcataaatataactaatacatacttttactagttgttgca

SEQ ID NO: 6507 - DNA, 77 bp, Homo sapiens
atgagtatcttcagtattactgtgtcacttcataaatataactaatacatacttttactagttgttgcaatttgatc

SEQ ID NO: 6508 - DNA, 77 bp, Homo sapiens
tcagtattactgtgtcacttcataaatataactaatacatacttttactagttgttgcaatttgatcctgaaacagc

SEQ ID NO: 6509 - DNA, 75 bp, Homo sapiens
actgtgtcacttcataaatataactaatacatacttttactagttgttgcaatttgatcctgaaacagccatctt

SEQ ID NO: 6510 - DNA, 73 bp, Homo sapiens
cacttcataaatataactaatacatacttttactagttgttgcaatttgatcctgaaacagccatctttaaat

SEQ ID NO: 6511 - DNA, 71 bp, Homo sapiens
actaatacatacttttactagttgttgcaatttgatcctgaaacagccatctttaaattatgtaggctttt

SEQ ID NO: 6512 - DNA, 71 bp, Homo sapiens
catacttttactagttgttgcaatttgatcctgaaacagccatctttaaattatgtaggctttttcttttc

SEQ ID NO: 6513 - DNA, 66 bp, Homo sapiens
ttctttttttaaaagtaattataatagacttaaattgtttttggatgattttcttaggtgaactga

SEQ ID NO: 6514 - DNA, 66 bp, Homo sapiens
aaaagtaattataatagacttaaattgtttttggatgattttcttaggtgaactgacttattttta

SEQ ID NO: 6515 - DNA, 68 bp, Homo sapiens
ttataatagacttaaattgtttttggatgattttcttaggtgaactgacttatttttagaacagaaac

SEQ ID NO: 6516 - DNA, 67 bp, Homo sapiens
agacttaaattgtttttggatgattttcttaggtgaactgacttatttttagaacagaaactttgtg

SEQ ID NO: 6517 - DNA, 71 bp, Homo sapiens
ttggatgattttcttaggtgaactgacttatttttagaacagaaactttgtgtttattctgcaagttcttc

SEQ ID NO: 6518 - DNA, 69 bp, Homo sapiens
gattttcttaggtgaactgacttatttttagaacagaaactttgtgtttattctgcaagttcttcttat

SEQ ID NO: 6519 - DNA, 71 bp, Homo sapiens
ggtgaactgacttatttttagaacagaaactttgtgtttattctgcaagttcttcttattaatgtggcacc

SEQ ID NO: 6520 - DNA, 71 bp, Homo sapiens
tttttagaacagaaactttgtgtttattctgcaagttcttcttattaatgtggcacccattgttttctgta

SEQ ID NO: 6521 - DNA, 71 bp, Homo sapiens
gaacagaaactttgtgtttattctgcaagttcttcttattaatgtggcacccattgttttctgtaactaaa

SEQ ID NO: 6522 - DNA, 72 bp, Homo sapiens
gtgtttattctgcaagttcttcttattaatgtggcacccattgttttctgtaactaaaatgtaatcaactct

SEQ ID NO: 6523 - DNA, 70 bp, Homo sapiens
ctgcaagttcttcttattaatgtggcacccattgttttctgtaactaaaatgtaatcaactctttttcct

SEQ ID NO: 6524 - DNA, 67 bp, Homo sapiens
cattgttttctgtaactaaaatgtaatcaactctttttccttccctttttgaatcaaaatgttagac

SEQ ID NO: 6525 - DNA, 72 bp, Homo sapiens
tgtaatcaactctttttccttccctttttgaatcaaaatgttagacttatacaagcactagcaacaactcta

SEQ ID NO: 6526 - DNA, 75 bp, Homo sapiens
tttttccttccctttttgaatcaaaatgttagacttatacaagcactagcaacaactctatatctggatcattga

SEQ ID NO: 6527 - DNA, 81 bp, Homo sapiens
aatcaaaatgttagacttatacaagcactagcaacaactctatatctggatcattgaagcgcttggaagatactactgcac

SEQ ID NO: 6528 - DNA, 81 bp, Homo sapiens
ttagacttatacaagcactagcaacaactctatatctggatcattgaagcgcttggaagatactactgcacgatttacaaa

SEQ ID NO: 6529 - DNA, 82 bp, Homo sapiens
tatacaagcactagcaacaactctatatctggatcattgaagcgcttggaagatactactgcacgatttacaaatgcaaatt

SEQ ID NO: 6530 - DNA, 78 bp, Homo sapiens
aacaactctatatctggatcattgaagcgcttggaagatactactgcacgatttacaaatgcaaatttccaggaagtc

SEQ ID NO: 6531 - DNA, 83 bp, Homo sapiens
tctatatctggatcattgaagcgcttggaagatactactgcacgatttacaaatgcaaatttccaggaagtctctgcacacac

SEQ ID NO: 6532 - DNA, 78 bp, Homo sapiens
agatactactgcacgatttacaaatgcaaatttccaggaagtctctgcacacacctctagtggaaaagatgtttcaga

SEQ ID NO: 6533 - DNA, 76 bp, Homo sapiens
atttacaaatgcaaatttccaggaagtctctgcacacacctctagtggaaaagatgtttcagagactagagggtca

SEQ ID NO: 6534 - DNA, 77 bp, Homo sapiens
atgcaaatttccaggaagtctctgcacacacctctagtggaaaagatgtttcagagactagagggtcagagggcaaa

SEQ ID NO: 6535 - DNA, 74 bp, Homo sapiens
aggaagtctctgcacacacctctagtggaaaagatgtttcagagactagagggtcagagggcaaagggaagaaa

SEQ ID NO: 6536 - DNA, 79 bp, Homo sapiens
tctgcacacacctctagtggaaaagatgtttcagagactagagggtcagagggcaaagggaagaaatcttcagctcaca

SEQ ID NO: 6537 - DNA, 78 bp, Homo sapiens
tctagtggaaaagatgtttcagagactagagggtcagagggcaaagggaagaaatcttcagctcacagctcaggtcaa

SEQ ID NO: 6538 - DNA, 74 bp, Homo sapiens
aaaagatgtttcagagactagagggtcagagggcaaagggaagaaatcttcagctcacagctcaggtcaaaggg

SEQ ID NO: 6539 - DNA, 74 bp, Homo sapiens
gtttcagagactagagggtcagagggcaaagggaagaaatcttcagctcacagctcaggtcaaaggggaagaaa

SEQ ID NO: 6540 - DNA, 74 bp, Homo sapiens
tagagggtcagagggcaaagggaagaaatcttcagctcacagctcaggtcaaaggggaagaaagcctggtggtg

SEQ ID NO: 6541 - DNA, 74 bp, Homo sapiens
gcaaagggaagaaatcttcagctcacagctcaggtcaaaggggaagaaagcctggtggtggaagaaatccagga

SEQ ID NO: 6542 - DNA, 73 bp, Homo sapiens
aagaaatcttcagctcacagctcaggtcaaaggggaagaaagcctggtggtggaagaaatccaggaacaactg

SEQ ID NO: 6543 - DNA, 78 bp, Homo sapiens
cttcagctcacagctcaggtcaaaggggaagaaagcctggtggtggaagaaatccaggaacaactgtgtcagcagcta

SEQ ID NO: 6544 - DNA, 73 bp, Homo sapiens
tcaggtcaaaggggaagaaagcctggtggtggaagaaatccaggaacaactgtgtcagcagctagcccttttc

SEQ ID NO: 6545 - DNA, 73 bp, Homo sapiens
cctggtggtggaagaaatccaggaacaactgtgtcagcagctagcccttttcctcaaggtattagtgatgttt

SEQ ID NO: 6546 - DNA, 72 bp, Homo sapiens
gaagaaatccaggaacaactgtgtcagcagctagcccttttcctcaaggtattagtgatgttttagttaaaa

SEQ ID NO: 6547 - DNA, 72 bp, Homo sapiens
tttttttaaactacaggcagtttttcaggaactccaggcagtgtaaagtcatcttctggaagttcagtgcag

SEQ ID NO: 6548 - DNA, 75 bp, Homo sapiens
ttaaactacaggcagtttttcaggaactccaggcagtgtaaagtcatcttctggaagttcagtgcagtctcccca

SEQ ID NO: 6549 - DNA, 75 bp, Homo sapiens
tttttcaggaactccaggcagtgtaaagtcatcttctggaagttcagtgcagtctccccaggatttcctgagctt

SEQ ID NO: 6550 - DNA, 78 bp, Homo sapiens
aactccaggcagtgtaaagtcatcttctggaagttcagtgcagtctccccaggatttcctgagctttacagactcaga

SEQ ID NO: 6551 - DNA, 80 bp, Homo sapiens
agtgtaaagtcatcttctggaagttcagtgcagtctccccaggatttcctgagctttacagactcagatctgcgtaatga

SEQ ID NO: 6552 - DNA, 80 bp, Homo sapiens
aagtcatcttctggaagttcagtgcagtctccccaggatttcctgagctttacagactcagatctgcgtaatgacagtta

SEQ ID NO: 6553 - DNA, 79 bp, Homo sapiens
aagttcagtgcagtctccccaggatttcctgagctttacagactcagatctgcgtaatgacagttactctcactcccaa

SEQ ID NO: 6554 - DNA, 81 bp, Homo sapiens
agtctccccaggatttcctgagctttacagactcagatctgcgtaatgacagttactctcactcccaacagtcatcagcaa

SEQ ID NO: 6555 - DNA, 82 bp, Homo sapiens
ggatttcctgagctttacagactcagatctgcgtaatgacagttactctcactcccaacagtcatcagcaaccaaagatgta

SEQ ID NO: 6556 - DNA, 81 bp, Homo sapiens
agctttacagactcagatctgcgtaatgacagttactctcactcccaacagtcatcagcaaccaaagatgtacataaagga

SEQ ID NO: 6557 - DNA, 81 bp, Homo sapiens
actcagatctgcgtaatgacagttactctcactcccaacagtcatcagcaaccaaagatgtacataaaggagagtctggaa

SEQ ID NO: 6558 - DNA, 80 bp, Homo sapiens
atctgcgtaatgacagttactctcactcccaacagtcatcagcaaccaaagatgtacataaaggagagtctggaagccag

SEQ ID NO: 6559 - DNA, 77 bp, Homo sapiens
atgacagttactctcactcccaacagtcatcagcaaccaaagatgtacataaaggagagtctggaagccaggaaggg

SEQ ID NO: 6560 - DNA, 72 bp, Homo sapiens
actcccaacagtcatcagcaaccaaagatgtacataaaggagagtctggaagccaggaagggggggtaaata

SEQ ID NO: 6561 - DNA, 71 bp, Homo sapiens
acagtcatcagcaaccaaagatgtacataaaggagagtctggaagccaggaagggggggtaaatagtttta

SEQ ID NO: 6562 - DNA, 66 bp, Homo sapiens
accaaagatgtacataaaggagagtctggaagccaggaagggggggtaaatagttttagtacctta

SEQ ID NO: 6563 - DNA, 67 bp, Homo sapiens
agatgtacataaaggagagtctggaagccaggaagggggggtaaatagttttagtaccttaattggc

SEQ ID NO: 6564 - DNA, 63 bp, Homo sapiens
aaaggagagtctggaagccaggaagggggggtaaatagttttagtaccttaattggcctccct

SEQ ID NO: 6565 - DNA, 65 bp, Homo sapiens
aagccaggaagggggggtaaatagttttagtaccttaattggcctcccttcaacctcagctgtta

SEQ ID NO: 6566 - DNA, 67 bp, Homo sapiens
ggggggtaaatagttttagtaccttaattggcctcccttcaacctcagctgttacttcacagcctaa

SEQ ID NO: 6567 - DNA, 69 bp, Homo sapiens
aatagttttagtaccttaattggcctcccttcaacctcagctgttacttcacagcctaaaagctttgaa

SEQ ID NO: 6568 - DNA, 70 bp, Homo sapiens
ttagtaccttaattggcctcccttcaacctcagctgttacttcacagcctaaaagctttgaaaattcacc

SEQ ID NO: 6569 - DNA, 71 bp, Homo sapiens
aattggcctcccttcaacctcagctgttacttcacagcctaaaagctttgaaaattcacctggagatttgg

SEQ ID NO: 6570 - DNA, 72 bp, Homo sapiens
ttcaacctcagctgttacttcacagcctaaaagctttgaaaattcacctggagatttgggtaattccagcct

SEQ ID NO: 6571 - DNA, 73 bp, Homo sapiens
agctgttacttcacagcctaaaagctttgaaaattcacctggagatttgggtaattccagccttcctacagca

SEQ ID NO: 6572 - DNA, 74 bp, Homo sapiens
ttcacagcctaaaagctttgaaaattcacctggagatttgggtaattccagccttcctacagcaggatataagc

SEQ ID NO: 6573 - DNA, 72 bp, Homo sapiens
ctttgaaaattcacctggagatttgggtaattccagccttcctacagcaggatataagcgggctcaaacttc

SEQ ID NO: 6574 - DNA, 74 bp, Homo sapiens
aaaattcacctggagatttgggtaattccagccttcctacagcaggatataagcgggctcaaacttctggcata

SEQ ID NO: 6575 - DNA, 75 bp, Homo sapiens
tggagatttgggtaattccagccttcctacagcaggatataagcgggctcaaacttctggcatagaagaagaaac

SEQ ID NO: 6576 - DNA, 74 bp, Homo sapiens
taattccagccttcctacagcaggatataagcgggctcaaacttctggcatagaagaagaaactgtaaaggaaa

SEQ ID NO: 6577 - DNA, 71 bp, Homo sapiens
ccttcctacagcaggatataagcgggctcaaacttctggcatagaagaagaaactgtaaaggaaaagaaaa

SEQ ID NO: 6578 - DNA, 67 bp, Homo sapiens
aaaggaaaggaaataaacaaagtaagcatgggcctggcagacccaaaggaaacaaaaatcaagagaa

SEQ ID NO: 6579 - DNA, 70 bp, Homo sapiens
aaggaaataaacaaagtaagcatgggcctggcagacccaaaggaaacaaaaatcaagagaatgtttctca

SEQ ID NO: 6580 - DNA, 73 bp, Homo sapiens
acaaagtaagcatgggcctggcagacccaaaggaaacaaaaatcaagagaatgtttctcatctctcagtttct

SEQ ID NO: 6581 - DNA, 75 bp, Homo sapiens
atgggcctggcagacccaaaggaaacaaaaatcaagagaatgtttctcatctctcagtttcttctgcttcaccaa

SEQ ID NO: 6582 - DNA, 79 bp, Homo sapiens
acccaaaggaaacaaaaatcaagagaatgtttctcatctctcagtttcttctgcttcaccaacatcatctgtagcatca

SEQ ID NO: 6583 - DNA, 85 bp, Homo sapiens
aacaaaaatcaagagaatgtttctcatctctcagtttcttctgcttcaccaacatcatctgtagcatcagctgcaggaagcataa

SEQ ID NO: 6584 - DNA, 88 bp, Homo sapiens
aatcaagagaatgtttctcatctctcagtttcttctgcttcaccaacatcatctgtagcatcagctgcaggaagcataacaagctcta

SEQ ID NO: 6585 - DNA, 90 bp, Homo sapiens
tttctcatctctcagtttcttctgcttcaccaacatcatctgtagcatcagctgcaggaagcataacaagctctagtctgcagaaatctc

SEQ ID NO: 6586 - DNA, 91 bp, Homo sapiens
tcagtttcttctgcttcaccaacatcatctgtagcatcagctgcaggaagcataacaagctctagtctgcagaaatctcctacattgctca

SEQ ID NO: 6587 - DNA, 91 bp, Homo sapiens
ttctgcttcaccaacatcatctgtagcatcagctgcaggaagcataacaagctctagtctgcagaaatctcctacattgctcaggaatgga

SEQ ID NO: 6588 - DNA, 87 bp, Homo sapiens
aacatcatctgtagcatcagctgcaggaagcataacaagctctagtctgcagaaatctcctacattgctcaggaatggaagtttaca

SEQ ID NO: 6589 - DNA, 86 bp, Homo sapiens
atctgtagcatcagctgcaggaagcataacaagctctagtctgcagaaatctcctacattgctcaggaatggaagtttacagagcc

SEQ ID NO: 6590 - DNA, 83 bp, Homo sapiens
agctgcaggaagcataacaagctctagtctgcagaaatctcctacattgctcaggaatggaagtttacagagcctcagtgttg

SEQ ID NO: 6591 - DNA, 83 bp, Homo sapiens
aagcataacaagctctagtctgcagaaatctcctacattgctcaggaatggaagtttacagagcctcagtgttggctcatctc

SEQ ID NO: 6592 - DNA, 82 bp, Homo sapiens
ctctagtctgcagaaatctcctacattgctcaggaatggaagtttacagagcctcagtgttggctcatctccagttggttca

SEQ ID NO: 6593 - DNA, 77 bp, Homo sapiens
agaaatctcctacattgctcaggaatggaagtttacagagcctcagtgttggctcatctccagttggttcaggtagg

SEQ ID NO: 6594 - DNA, 77 bp, Homo sapiens
tacattgctcaggaatggaagtttacagagcctcagtgttggctcatctccagttggttcaggtaggggtttgccta

SEQ ID NO: 6595 - DNA, 73 bp, Homo sapiens
ggaatggaagtttacagagcctcagtgttggctcatctccagttggttcaggtaggggtttgcctattattat

SEQ ID NO: 6596 - DNA, 69 bp, Homo sapiens
ttttctggcctatctctttttttacccttgagtcactggcaatttcttcactgatttcctttttccttc

SEQ ID NO: 6597 - DNA, 69 bp, Homo sapiens
tctttttttacccttgagtcactggcaatttcttcactgatttcctttttccttcctctcaacagaaat

SEQ ID NO: 6598 - DNA, 74 bp, Homo sapiens
ttacccttgagtcactggcaatttcttcactgatttcctttttccttcctctcaacagaaatttccatgcagta

SEQ ID NO: 6599 - DNA, 78 bp, Homo sapiens
agtcactggcaatttcttcactgatttcctttttccttcctctcaacagaaatttccatgcagtatcggcatgatgga

SEQ ID NO: 6600 - DNA, 77 bp, Homo sapiens
atttcttcactgatttcctttttccttcctctcaacagaaatttccatgcagtatcggcatgatggagcttgcccaa

SEQ ID NO: 6601 - DNA, 75 bp, Homo sapiens
ttcctttttccttcctctcaacagaaatttccatgcagtatcggcatgatggagcttgcccaacaactagtaagt

SEQ ID NO: 6602 - DNA, 77 bp, Homo sapiens
ttttccttcctctcaacagaaatttccatgcagtatcggcatgatggagcttgcccaacaactagtaagttgtcaaa

SEQ ID NO: 6603 - DNA, 76 bp, Homo sapiens
aacagaaatttccatgcagtatcggcatgatggagcttgcccaacaactagtaagttgtcaaactgggttgataac

SEQ ID NO: 6604 - DNA, 74 bp, Homo sapiens
aatttccatgcagtatcggcatgatggagcttgcccaacaactagtaagttgtcaaactgggttgataacccgg

SEQ ID NO: 6605 - DNA, 71 bp, Homo sapiens
agtatcggcatgatggagcttgcccaacaactagtaagttgtcaaactgggttgataacccgggccttttg

SEQ ID NO: 6606 - DNA, 71 bp, Homo sapiens
atgatggagcttgcccaacaactagtaagttgtcaaactgggttgataacccgggccttttgtctcctcta

SEQ ID NO: 6607 - DNA, 69 bp, Homo sapiens
caacaactagtaagttgtcaaactgggttgataacccgggccttttgtctcctctagtgctctttctag

SEQ ID NO: 6608 - DNA, 73 bp, Homo sapiens
tactaattcagtgtatggctatgtatttcttttgtgtgtttgagaatgatcttaacctgaagtccttttttcc

SEQ ID NO: 6609 - DNA, 71 bp, Homo sapiens
agtgtatggctatgtatttcttttgtgtgtttgagaatgatcttaacctgaagtccttttttccttactta

SEQ ID NO: 6610 - DNA, 68 bp, Homo sapiens
atttcttttgtgtgtttgagaatgatcttaacctgaagtccttttttccttacttaaaagcgttctca

SEQ ID NO: 6611 - DNA, 70 bp, Homo sapiens
ttttgtgtgtttgagaatgatcttaacctgaagtccttttttccttacttaaaagcgttctcagagttgc

SEQ ID NO: 6612 - DNA, 73 bp, Homo sapiens
agaatgatcttaacctgaagtccttttttccttacttaaaagcgttctcagagttgctgaatgcaatacacaa

SEQ ID NO: 6613 - DNA, 70 bp, Homo sapiens
ttaacctgaagtccttttttccttacttaaaagcgttctcagagttgctgaatgcaatacacaacggtaa

SEQ ID NO: 6614 - DNA, 69 bp, Homo sapiens
ccttttttccttacttaaaagcgttctcagagttgctgaatgcaatacacaacggtaagttttattaga

SEQ ID NO: 6615 - DNA, 73 bp, Homo sapiens
tccttacttaaaagcgttctcagagttgctgaatgcaatacacaacggtaagttttattagaatcttctctag

SEQ ID NO: 6616 - DNA, 73 bp, Homo sapiens
aagcgttctcagagttgctgaatgcaatacacaacggtaagttttattagaatcttctctagtggttcgttta

SEQ ID NO: 6617 - DNA, 71 bp, Homo sapiens
agttgctgaatgcaatacacaacggtaagttttattagaatcttctctagtggttcgtttatcacaaaggt

SEQ ID NO: 6618 - DNA, 70 bp, Homo sapiens
gaatgcaatacacaacggtaagttttattagaatcttctctagtggttcgtttatcacaaaggttgcctt

SEQ ID NO: 6619 - DNA, 69 bp, Homo sapiens
cacaacggtaagttttattagaatcttctctagtggttcgtttatcacaaaggttgccttttgtagaga

SEQ ID NO: 6620 - DNA, 71 bp, Homo sapiens
aggaagtggtgattaaaaatctgaaattaaagtgtgtcttttctttagacagaggtgacagttctacacta

SEQ ID NO: 6621 - DNA, 71 bp, Homo sapiens
taaaaatctgaaattaaagtgtgtcttttctttagacagaggtgacagttctacactaacaaagcaagaac

SEQ ID NO: 6622 - DNA, 71 bp, Homo sapiens
gaaattaaagtgtgtcttttctttagacagaggtgacagttctacactaacaaagcaagaacttaaattca

SEQ ID NO: 6623 - DNA, 73 bp, Homo sapiens
gtgtcttttctttagacagaggtgacagttctacactaacaaagcaagaacttaaattcataggtatgtacca

SEQ ID NO: 6624 - DNA, 73 bp, Homo sapiens
ttctttagacagaggtgacagttctacactaacaaagcaagaacttaaattcataggtatgtaccaaactcca

SEQ ID NO: 6625 - DNA, 73 bp, Homo sapiens
aggtgacagttctacactaacaaagcaagaacttaaattcataggtatgtaccaaactccagcatggttctaa

SEQ ID NO: 6626 - DNA, 73 bp, Homo sapiens
cagttctacactaacaaagcaagaacttaaattcataggtatgtaccaaactccagcatggttctaaacataa

SEQ ID NO: 6627 - DNA, 72 bp, Homo sapiens
ctaacaaagcaagaacttaaattcataggtatgtaccaaactccagcatggttctaaacataatagtgttaa

SEQ ID NO: 6628 - DNA, 71 bp, Homo sapiens
gaacttaaattcataggtatgtaccaaactccagcatggttctaaacataatagtgttaaattaatcctat

SEQ ID NO: 6629 - DNA, 73 bp, Homo sapiens
cataggtatgtaccaaactccagcatggttctaaacataatagtgttaaattaatcctattgtagcttggaaa

SEQ ID NO: 6630 - DNA, 70 bp, Homo sapiens
gtaccaaactccagcatggttctaaacataatagtgttaaattaatcctattgtagcttggaaaccttcc

SEQ ID NO: 6631 - DNA, 70 bp, Homo sapiens
ctaaacataatagtgttaaattaatcctattgtagcttggaaaccttcccatacaaaccagtgttagcag

SEQ ID NO: 6632 - DNA, 72 bp, Homo sapiens
gtgttaaattaatcctattgtagcttggaaaccttcccatacaaaccagtgttagcagtatgtactcataaa

SEQ ID NO: 6633 - DNA, 70 bp, Homo sapiens
aaattaatcctattgtagcttggaaaccttcccatacaaaccagtgttagcagtatgtactcataaaaaa

SEQ ID NO: 6634 - DNA, 74 bp, Homo sapiens
tattgtagcttggaaaccttcccatacaaaccagtgttagcagtatgtactcataaaaaaaaaatgatgcctga

SEQ ID NO: 6635 - DNA, 70 bp, Homo sapiens
ggaaaccttcccatacaaaccagtgttagcagtatgtactcataaaaaaaaaatgatgcctgaaaggaat

SEQ ID NO: 6636 - DNA, 72 bp, Homo sapiens
cccatacaaaccagtgttagcagtatgtactcataaaaaaaaaatgatgcctgaaaggaattatctataacc

SEQ ID NO: 6637 - DNA, 71 bp, Homo sapiens
gtgttagcagtatgtactcataaaaaaaaaatgatgcctgaaaggaattatctataaccttgggtggtagg

SEQ ID NO: 6638 - DNA, 71 bp, Homo sapiens
tgtactcataaaaaaaaaatgatgcctgaaaggaattatctataaccttgggtggtaggtgggatgaacta

SEQ ID NO: 6639 - DNA, 69 bp, Homo sapiens
aaaaaaaaatgatgcctgaaaggaattatctataaccttgggtggtaggtgggatgaactatatgttct

SEQ ID NO: 6640 - DNA, 73 bp, Homo sapiens
aaatgatgcctgaaaggaattatctataaccttgggtggtaggtgggatgaactatatgttcttattgttgta

SEQ ID NO: 6641 - DNA, 70 bp, Homo sapiens
ctgaaaggaattatctataaccttgggtggtaggtgggatgaactatatgttcttattgttgtagttatt

SEQ ID NO: 6642 - DNA, 74 bp, Homo sapiens
tctataaccttgggtggtaggtgggatgaactatatgttcttattgttgtagttatttggatttgtcatattgc

SEQ ID NO: 6643 - DNA, 75 bp, Homo sapiens
ggtggtaggtgggatgaactatatgttcttattgttgtagttatttggatttgtcatattgcttcagacttggta

SEQ ID NO: 6644 - DNA, 76 bp, Homo sapiens
atatgttcttattgttgtagttatttggatttgtcatattgcttcagacttggtaggtagatcttagaattcctga

SEQ ID NO: 6645 - DNA, 74 bp, Homo sapiens
cttattgttgtagttatttggatttgtcatattgcttcagacttggtaggtagatcttagaattcctgaaactg

SEQ ID NO: 6646 - DNA, 72 bp, Homo sapiens
atttgtcatattgcttcagacttggtaggtagatcttagaattcctgaaactgtttacttgtaagggcctag

SEQ ID NO: 6647 - DNA, 72 bp, Homo sapiens
atattgcttcagacttggtaggtagatcttagaattcctgaaactgtttacttgtaagggcctaggctccta

SEQ ID NO: 6648 - DNA, 70 bp, Homo sapiens
atcttagaattcctgaaactgtttacttgtaagggcctaggctcctaggtctgattttgtgaagaccact

SEQ ID NO: 6649 - DNA, 70 bp, Homo sapiens
aattcctgaaactgtttacttgtaagggcctaggctcctaggtctgattttgtgaagaccactttgtaca

SEQ ID NO: 6650 - DNA, 75 bp, Homo sapiens
ttgtaagggcctaggctcctaggtctgattttgtgaagaccactttgtacacctgtgtcccttctcacactgaga

SEQ ID NO: 6651 - DNA, 79 bp, Homo sapiens
taggctcctaggtctgattttgtgaagaccactttgtacacctgtgtcccttctcacactgagatcaggaagaatatga

SEQ ID NO: 6652 - DNA, 79 bp, Homo sapiens
taggtctgattttgtgaagaccactttgtacacctgtgtcccttctcacactgagatcaggaagaatatgagaacatat

SEQ ID NO: 6653 - DNA, 78 bp, Homo sapiens
tttgtgaagaccactttgtacacctgtgtcccttctcacactgagatcaggaagaatatgagaacatatttcatgttt

SEQ ID NO: 6654 - DNA, 82 bp, Homo sapiens
tgtgtcccttctcacactgagatcaggaagaatatgagaacatatttcatgttttataatcatgataactctctgattcttt

SEQ ID NO: 6655 - DNA, 81 bp, Homo sapiens
ccttctcacactgagatcaggaagaatatgagaacatatttcatgttttataatcatgataactctctgattcttttaaca

SEQ ID NO: 6656 - DNA, 82 bp, Homo sapiens
ctgagatcaggaagaatatgagaacatatttcatgttttataatcatgataactctctgattcttttaacatatatctcaaa

SEQ ID NO: 6657 - DNA, 82 bp, Homo sapiens
gaatatgagaacatatttcatgttttataatcatgataactctctgattcttttaacatatatctcaaatactctggatcag

SEQ ID NO: 6658 - DNA, 82 bp, Homo sapiens
catatttcatgttttataatcatgataactctctgattcttttaacatatatctcaaatactctggatcagttcagagagaa

SEQ ID NO: 6659 - DNA, 82 bp, Homo sapiens
ttaacatatatctcaaatactctggatcagttcagagagaacatgtgtattctgaactacagagtgaaatccactactgtta

SEQ ID NO: 6660 - DNA, 81 bp, Homo sapiens
atatatctcaaatactctggatcagttcagagagaacatgtgtattctgaactacagagtgaaatccactactgttaacca

SEQ ID NO: 6661 - DNA, 79 bp, Homo sapiens
atactctggatcagttcagagagaacatgtgtattctgaactacagagtgaaatccactactgttaaccacttgaagta

SEQ ID NO: 6662 - DNA, 81 bp, Homo sapiens
ttcagagagaacatgtgtattctgaactacagagtgaaatccactactgttaaccacttgaagtatgcatccactcatttc

SEQ ID NO: 6663 - DNA, 76 bp, Homo sapiens
tattctgaactacagagtgaaatccactactgttaaccacttgaagtatgcatccactcatttccctcccctacaa

SEQ ID NO: 6664 - DNA, 72 bp, Homo sapiens
agagtgaaatccactactgttaaccacttgaagtatgcatccactcatttccctcccctacaaacctcattt

SEQ ID NO: 6665 - DNA, 70 bp, Homo sapiens
aaatccactactgttaaccacttgaagtatgcatccactcatttccctcccctacaaacctcatttttaa

SEQ ID NO: 6666 - DNA, 74 bp, Homo sapiens
taaccacttgaagtatgcatccactcatttccctcccctacaaacctcatttttaacatgctgataaagctaat

SEQ ID NO: 6667 - DNA, 73 bp, Homo sapiens
acttgaagtatgcatccactcatttccctcccctacaaacctcatttttaacatgctgataaagctaatttta

SEQ ID NO: 6668 - DNA, 74 bp, Homo sapiens
ttccctcccctacaaacctcatttttaacatgctgataaagctaattttataggctgtgagtatcttcaatatg

SEQ ID NO: 6669 - DNA, 75 bp, Homo sapiens
cctacaaacctcatttttaacatgctgataaagctaattttataggctgtgagtatcttcaatatggcactttcc

SEQ ID NO: 6670 - DNA, 78 bp, Homo sapiens
ttttaacatgctgataaagctaattttataggctgtgagtatcttcaatatggcactttccttcttgagactgtctta

SEQ ID NO: 6671 - DNA, 76 bp, Homo sapiens
ctgataaagctaattttataggctgtgagtatcttcaatatggcactttccttcttgagactgtcttagcttttta

SEQ ID NO: 6672 - DNA, 75 bp, Homo sapiens
aagctaattttataggctgtgagtatcttcaatatggcactttccttcttgagactgtcttagctttttatcatt

SEQ ID NO: 6673 - DNA, 79 bp, Homo sapiens
ttataggctgtgagtatcttcaatatggcactttccttcttgagactgtcttagctttttatcatttgacaagaatata

SEQ ID NO: 6674 - DNA, 76 bp, Homo sapiens
gagtatcttcaatatggcactttccttcttgagactgtcttagctttttatcatttgacaagaatatattaggttc

SEQ ID NO: 6675 - DNA, 74 bp, Homo sapiens
tggcactttccttcttgagactgtcttagctttttatcatttgacaagaatatattaggttctttctttatgtc

SEQ ID NO: 6676 - DNA, 71 bp, Homo sapiens
catttgacaagaatatattaggttctttctttatgtctatatgtaaggtcctggttagttgctttggggaa

SEQ ID NO: 6677 - DNA, 72 bp, Homo sapiens
tatattaggttctttctttatgtctatatgtaaggtcctggttagttgctttggggaaataagtatactgca

SEQ ID NO: 6678 - DNA, 70 bp, Homo sapiens
ggttctttctttatgtctatatgtaaggtcctggttagttgctttggggaaataagtatactgcaaaaga

SEQ ID NO: 6679 - DNA, 75 bp, Homo sapiens
atatgtaaggtcctggttagttgctttggggaaataagtatactgcaaaagataaatgatgcggcacatgagtcc

SEQ ID NO: 6680 - DNA, 76 bp, Homo sapiens
gttagttgctttggggaaataagtatactgcaaaagataaatgatgcggcacatgagtcctccctttgagaacata

SEQ ID NO: 6681 - DNA, 76 bp, Homo sapiens
ttggggaaataagtatactgcaaaagataaatgatgcggcacatgagtcctccctttgagaacatacactctaaaa

SEQ ID NO: 6682 - DNA, 76 bp, Homo sapiens
aaataagtatactgcaaaagataaatgatgcggcacatgagtcctccctttgagaacatacactctaaaaggaaga

SEQ ID NO: 6683 - DNA, 79 bp, Homo sapiens
tactgcaaaagataaatgatgcggcacatgagtcctccctttgagaacatacactctaaaaggaagagaaatacatata

SEQ ID NO: 6684 - DNA, 77 bp, Homo sapiens
ataaatgatgcggcacatgagtcctccctttgagaacatacactctaaaaggaagagaaatacatatatgtaataat

SEQ ID NO: 6685 - DNA, 72 bp, Homo sapiens
gtcctccctttgagaacatacactctaaaaggaagagaaatacatatatgtaataatttcaagggatgtact

SEQ ID NO: 6686 - DNA, 71 bp, Homo sapiens
ctctaaaaggaagagaaatacatatatgtaataatttcaagggatgtacttacaacttctttaatggtcag

SEQ ID NO: 6687 - DNA, 73 bp, Homo sapiens
gagaaatacatatatgtaataatttcaagggatgtacttacaacttctttaatggtcagtaggagttcaaggc

SEQ ID NO: 6688 - DNA, 76 bp, Homo sapiens
gggaaaattgctttcagctgaaggaatgagctattcagataatgtaacgtttgacctgatacttaaagaatatgta

SEQ ID NO: 6689 - DNA, 75 bp, Homo sapiens
aattgctttcagctgaaggaatgagctattcagataatgtaacgtttgacctgatacttaaagaatatgtaaaat

SEQ ID NO: 6690 - DNA, 73 bp, Homo sapiens
agctgaaggaatgagctattcagataatgtaacgtttgacctgatacttaaagaatatgtaaaattttgttat

SEQ ID NO: 6691 - DNA, 73 bp, Homo sapiens
gagctattcagataatgtaacgtttgacctgatacttaaagaatatgtaaaattttgttatttggagatacag

SEQ ID NO: 6692 - DNA, 73 bp, Homo sapiens
gataatgtaacgtttgacctgatacttaaagaatatgtaaaattttgttatttggagatacagggatcagagc

SEQ ID NO: 6693 - DNA, 76 bp, Homo sapiens
ttgacctgatacttaaagaatatgtaaaattttgttatttggagatacagggatcagagctagattcttagtctga

SEQ ID NO: 6694 - DNA, 75 bp, Homo sapiens
gatacttaaagaatatgtaaaattttgttatttggagatacagggatcagagctagattcttagtctgaggtatg

SEQ ID NO: 6695 - DNA, 80 bp, Homo sapiens
tatgtaaaattttgttatttggagatacagggatcagagctagattcttagtctgaggtatgtacagttagcatgagcaa

SEQ ID NO: 6696 - DNA, 82 bp, Homo sapiens
attttgttatttggagatacagggatcagagctagattcttagtctgaggtatgtacagttagcatgagcaatggcatagaa

SEQ ID NO: 6697 - DNA, 85 bp, Homo sapiens
gttatttggagatacagggatcagagctagattcttagtctgaggtatgtacagttagcatgagcaatggcatagaatgagaata

SEQ ID NO: 6698 - DNA, 86 bp, Homo sapiens
atttggagatacagggatcagagctagattcttagtctgaggtatgtacagttagcatgagcaatggcatagaatgagaatacaca

SEQ ID NO: 6699 - DNA, 87 bp, Homo sapiens
atacagggatcagagctagattcttagtctgaggtatgtacagttagcatgagcaatggcatagaatgagaatacacaggctgtgta

SEQ ID NO: 6700 - DNA, 86 bp, Homo sapiens
ggatcagagctagattcttagtctgaggtatgtacagttagcatgagcaatggcatagaatgagaatacacaggctgtgtaaagta

SEQ ID NO: 6701 - DNA, 84 bp, Homo sapiens
agagctagattcttagtctgaggtatgtacagttagcatgagcaatggcatagaatgagaatacacaggctgtgtaaagtaata

SEQ ID NO: 6702 - DNA, 84 bp, Homo sapiens
ctagattcttagtctgaggtatgtacagttagcatgagcaatggcatagaatgagaatacacaggctgtgtaaagtaatatata

SEQ ID NO: 6703 - DNA, 85 bp, Homo sapiens
tagattcttagtctgaggtatgtacagttagcatgagcaatggcatagaatgagaatacacaggctgtgtaaagtaatatatata

SEQ ID NO: 6704 - DNA, 71 bp, Homo sapiens
attttttttttcttggcatgttttacctccaagatactgatatttgatatgaaaaataacaacattagcta

SEQ ID NO: 6705 - DNA, 75 bp, Homo sapiens
tcttggcatgttttacctccaagatactgatatttgatatgaaaaataacaacattagctattagtccaaggagt

SEQ ID NO: 6706 - DNA, 75 bp, Homo sapiens
gcatgttttacctccaagatactgatatttgatatgaaaaataacaacattagctattagtccaaggagttgaaa

SEQ ID NO: 6707 - DNA, 75 bp, Homo sapiens
cctccaagatactgatatttgatatgaaaaataacaacattagctattagtccaaggagttgaaagcagttggtg

SEQ ID NO: 6708 - DNA, 75 bp, Homo sapiens
ctgatatttgatatgaaaaataacaacattagctattagtccaaggagttgaaagcagttggtgttgagttggaa

SEQ ID NO: 6709 - DNA, 70 bp, Homo sapiens
gaaaaataacaacattagctattagtccaaggagttgaaagcagttggtgttgagttggaaaaaagataa

SEQ ID NO: 6710 - DNA, 71 bp, Homo sapiens
aacattagctattagtccaaggagttgaaagcagttggtgttgagttggaaaaaagataatcaaacctgta

SEQ ID NO: 6711 - DNA, 69 bp, Homo sapiens
caaggagttgaaagcagttggtgttgagttggaaaaaagataatcaaacctgtactttaggaagtttca

SEQ ID NO: 6712 - DNA, 69 bp, Homo sapiens
gtgttgagttggaaaaaagataatcaaacctgtactttaggaagtttcaactggtgggtagcatgtaaa

SEQ ID NO: 6713 - DNA, 67 bp, Homo sapiens
aaaaagataatcaaacctgtactttaggaagtttcaactggtgggtagcatgtaaaaagatggaaaa

SEQ ID NO: 6714 - DNA, 71 bp, Homo sapiens
ataatcaaacctgtactttaggaagtttcaactggtgggtagcatgtaaaaagatggaaaagagctaatgc

SEQ ID NO: 6715 - DNA, 73 bp, Homo sapiens
tgtactttaggaagtttcaactggtgggtagcatgtaaaaagatggaaaagagctaatgctgaaacagagtaa

SEQ ID NO: 6716 - DNA, 71 bp, Homo sapiens
agtttcaactggtgggtagcatgtaaaaagatggaaaagagctaatgctgaaacagagtaacccaatagtt

SEQ ID NO: 6717 - DNA, 71 bp, Homo sapiens
gtgggtagcatgtaaaaagatggaaaagagctaatgctgaaacagagtaacccaatagttttttgttacaa

SEQ ID NO: 6718 - DNA, 72 bp, Homo sapiens
gcatgtaaaaagatggaaaagagctaatgctgaaacagagtaacccaatagttttttgttacaatctaacca

SEQ ID NO: 6719 - DNA, 71 bp, Homo sapiens
tggaaaagagctaatgctgaaacagagtaacccaatagttttttgttacaatctaaccaaatttattgatg

SEQ ID NO: 6720 - DNA, 73 bp, Homo sapiens
gctaatgctgaaacagagtaacccaatagttttttgttacaatctaaccaaatttattgatggcctgaatgag

SEQ ID NO: 6721 - DNA, 73 bp, Homo sapiens
tgctgaaacagagtaacccaatagttttttgttacaatctaaccaaatttattgatggcctgaatgaggatcc

SEQ ID NO: 6722 - DNA, 71 bp, Homo sapiens
aacagagtaacccaatagttttttgttacaatctaaccaaatttattgatggcctgaatgaggatcctgga

SEQ ID NO: 6723 - DNA, 71 bp, Homo sapiens
agtaacccaatagttttttgttacaatctaaccaaatttattgatggcctgaatgaggatcctggaagtca

SEQ ID NO: 6724 - DNA, 75 bp, Homo sapiens
atagttttttgttacaatctaaccaaatttattgatggcctgaatgaggatcctggaagtcaaactgatgagatg

SEQ ID NO: 6725 - DNA, 78 bp, Homo sapiens
ttacaatctaaccaaatttattgatggcctgaatgaggatcctggaagtcaaactgatgagatgtgtattacccaaga

SEQ ID NO: 6726 - DNA, 77 bp, Homo sapiens
atctaaccaaatttattgatggcctgaatgaggatcctggaagtcaaactgatgagatgtgtattacccaagaagaa

SEQ ID NO: 6727 - DNA, 76 bp, Homo sapiens
aaatttattgatggcctgaatgaggatcctggaagtcaaactgatgagatgtgtattacccaagaagaactggtaa

SEQ ID NO: 6728 - DNA, 79 bp, Homo sapiens
tgaatgaggatcctggaagtcaaactgatgagatgtgtattacccaagaagaactggtaatgacagtagctggaaagga

SEQ ID NO: 6729 - DNA, 76 bp, Homo sapiens
tcctggaagtcaaactgatgagatgtgtattacccaagaagaactggtaatgacagtagctggaaaggatgggtat

SEQ ID NO: 6730 - DNA, 74 bp, Homo sapiens
agatgtgtattacccaagaagaactggtaatgacagtagctggaaaggatgggtattcatttactaacacaata

SEQ ID NO: 6731 - DNA, 72 bp, Homo sapiens
aagaactggtaatgacagtagctggaaaggatgggtattcatttactaacacaatatttaggtagagatgtt

SEQ ID NO: 6732 - DNA, 74 bp, Homo sapiens
gctggaaaggatgggtattcatttactaacacaatatttaggtagagatgtttagcacagaattaaatagagct

SEQ ID NO: 6733 - DNA, 75 bp, Homo sapiens
gatgggtattcatttactaacacaatatttaggtagagatgtttagcacagaattaaatagagcttgggcaccaa

SEQ ID NO: 6734 - DNA, 75 bp, Homo sapiens
catttactaacacaatatttaggtagagatgtttagcacagaattaaatagagcttgggcaccaaagagaattga

SEQ ID NO: 6735 - DNA, 74 bp, Homo sapiens
acacaatatttaggtagagatgtttagcacagaattaaatagagcttgggcaccaaagagaattgaaactaggc

SEQ ID NO: 6736 - DNA, 73 bp, Homo sapiens
taggtagagatgtttagcacagaattaaatagagcttgggcaccaaagagaattgaaactaggccacttaggg

SEQ ID NO: 6737 - DNA, 71 bp, Homo sapiens
tgtttagcacagaattaaatagagcttgggcaccaaagagaattgaaactaggccacttagggggtagtaa

SEQ ID NO: 6738 - DNA, 68 bp, Homo sapiens
aattaaatagagcttgggcaccaaagagaattgaaactaggccacttagggggtagtaactgaaactc

SEQ ID NO: 6739 - DNA, 71 bp, Homo sapiens
agcttgggcaccaaagagaattgaaactaggccacttagggggtagtaactgaaactctgagactagtata

SEQ ID NO: 6740 - DNA, 69 bp, Homo sapiens
aaagagaattgaaactaggccacttagggggtagtaactgaaactctgagactagtataggctgaaaaa

SEQ ID NO: 6741 - DNA, 69 bp, Homo sapiens
aattgaaactaggccacttagggggtagtaactgaaactctgagactagtataggctgaaaaatgtggg

SEQ ID NO: 6742 - DNA, 71 bp, Homo sapiens
ccacttagggggtagtaactgaaactctgagactagtataggctgaaaaatgtgggtagagaagacagaaa

SEQ ID NO: 6743 - DNA, 74 bp, Homo sapiens
tagtaactgaaactctgagactagtataggctgaaaaatgtgggtagagaagacagaaagaggttgaatcaggt

SEQ ID NO: 6744 - DNA, 72 bp, Homo sapiens
aactctgagactagtataggctgaaaaatgtgggtagagaagacagaaagaggttgaatcaggtttatttta

SEQ ID NO: 6745 - DNA, 69 bp, Homo sapiens
gagaagacagaaagaggttgaatcaggtttattttaaaatagtgaagtcttaataggtagaaaggagat

SEQ ID NO: 6746 - DNA, 67 bp, Homo sapiens
caggtttattttaaaatagtgaagtcttaataggtagaaaggagattaaggattaagattcaaggag

SEQ ID NO: 6747 - DNA, 74 bp, Homo sapiens
taaaatagtgaagtcttaataggtagaaaggagattaaggattaagattcaaggagtgatatttcatagatcaa

SEQ ID NO: 6748 - DNA, 78 bp, Homo sapiens
tgaagtcttaataggtagaaaggagattaaggattaagattcaaggagtgatatttcatagatcaagaatctggagca

SEQ ID NO: 6749 - DNA, 78 bp, Homo sapiens
taataggtagaaaggagattaaggattaagattcaaggagtgatatttcatagatcaagaatctggagcagatgggaa

SEQ ID NO: 6750 - DNA, 80 bp, Homo sapiens
aaggagattaaggattaagattcaaggagtgatatttcatagatcaagaatctggagcagatgggaagagatcaagtgaa

SEQ ID NO: 6751 - DNA, 80 bp, Homo sapiens
attaagattcaaggagtgatatttcatagatcaagaatctggagcagatgggaagagatcaagtgaacatgtagaaaaat

SEQ ID NO: 6752 - DNA, 79 bp, Homo sapiens
attcaaggagtgatatttcatagatcaagaatctggagcagatgggaagagatcaagtgaacatgtagaaaaattaagt

SEQ ID NO: 6753 - DNA, 78 bp, Homo sapiens
atatttcatagatcaagaatctggagcagatgggaagagatcaagtgaacatgtagaaaaattaagtttgaaggaaga

SEQ ID NO: 6754 - DNA, 78 bp, Homo sapiens
atagatcaagaatctggagcagatgggaagagatcaagtgaacatgtagaaaaattaagtttgaaggaagacagagaa

SEQ ID NO: 6755 - DNA, 78 bp, Homo sapiens
aatctggagcagatgggaagagatcaagtgaacatgtagaaaaattaagtttgaaggaagacagagaatcactgtgga

SEQ ID NO: 6756 - DNA, 76 bp, Homo sapiens
agatgggaagagatcaagtgaacatgtagaaaaattaagtttgaaggaagacagagaatcactgtggaaacattca

SEQ ID NO: 6757 - DNA, 71 bp, Homo sapiens
aacatgtagaaaaattaagtttgaaggaagacagagaatcactgtggaaacattcactgtcagaaaacccc

SEQ ID NO: 6758 - DNA, 69 bp, Homo sapiens
aaaattaagtttgaaggaagacagagaatcactgtggaaacattcactgtcagaaaaccccccaccaaa

SEQ ID NO: 6759 - DNA, 70 bp, Homo sapiens
ggaagacagagaatcactgtggaaacattcactgtcagaaaaccccccaccaaaccaaattagttttcta

SEQ ID NO: 6760 - DNA, 68 bp, Homo sapiens
acagagaatcactgtggaaacattcactgtcagaaaaccccccaccaaaccaaattagttttctaaaa

SEQ ID NO: 6761 - DNA, 65 bp, Homo sapiens
gtggaaacattcactgtcagaaaaccccccaccaaaccaaattagttttctaaaaccttcataat

SEQ ID NO: 6762 - DNA, 66 bp, Homo sapiens
cattcactgtcagaaaaccccccaccaaaccaaattagttttctaaaaccttcataatttgaatta

SEQ ID NO: 6763 - DNA, 63 bp, Homo sapiens
cagaaaaccccccaccaaaccaaattagttttctaaaaccttcataatttgaattaatgaatt

SEQ ID NO: 6764 - DNA, 67 bp, Homo sapiens
gaaattttaaaaatagatttccccccaaaagaactgattctttcaggtatgtgtagtaacttgaatg

SEQ ID NO: 6765 - DNA, 68 bp, Homo sapiens
tccccccaaaagaactgattctttcaggtatgtgtagtaacttgaatgtgtttacaaaagcgttttct

SEQ ID NO: 6766 - DNA, 68 bp, Homo sapiens
caaaagaactgattctttcaggtatgtgtagtaacttgaatgtgtttacaaaagcgttttctttttag

SEQ ID NO: 6767 - DNA, 69 bp, Homo sapiens
tttcaggtatgtgtagtaacttgaatgtgtttacaaaagcgttttctttttagtgtacttcagaatagg

SEQ ID NO: 6768 - DNA, 68 bp, Homo sapiens
ggtatgtgtagtaacttgaatgtgtttacaaaagcgttttctttttagtgtacttcagaatagggctt

SEQ ID NO: 6769 - DNA, 68 bp, Homo sapiens
gtaacttgaatgtgtttacaaaagcgttttctttttagtgtacttcagaatagggctttaatgattaa

SEQ ID NO: 6770 - DNA, 67 bp, Homo sapiens
gtgtttacaaaagcgttttctttttagtgtacttcagaatagggctttaatgattaaataagagtat

SEQ ID NO: 6771 - DNA, 67 bp, Homo sapiens
aagcgttttctttttagtgtacttcagaatagggctttaatgattaaataagagtattaaataatac

SEQ ID NO: 6772 - DNA, 70 bp, Homo sapiens
ttagtgtacttcagaatagggctttaatgattaaataagagtattaaataatacttaaatatgcaacggt

SEQ ID NO: 6773 - DNA, 75 bp, Homo sapiens
cagaatagggctttaatgattaaataagagtattaaataatacttaaatatgcaacggttatgcatctgagcgag

SEQ ID NO: 6774 - DNA, 73 bp, Homo sapiens
gggctttaatgattaaataagagtattaaataatacttaaatatgcaacggttatgcatctgagcgagttatt

SEQ ID NO: 6775 - DNA, 73 bp, Homo sapiens
atgattaaataagagtattaaataatacttaaatatgcaacggttatgcatctgagcgagttattttatttta

SEQ ID NO: 6776 - DNA, 76 bp, Homo sapiens
aatacttaaatatgcaacggttatgcatctgagcgagttattttattttaaattctcagtgtcgcctgagaagtga

SEQ ID NO: 6777 - DNA, 78 bp, Homo sapiens
ttatgcatctgagcgagttattttattttaaattctcagtgtcgcctgagaagtgatctctttcctctcctcttgtat

SEQ ID NO: 6778 - DNA, 72 bp, Homo sapiens
ttattttaaattctcagtgtcgcctgagaagtgatctctttcctctcctcttgtatttttttgtccgaaata

SEQ ID NO: 6779 - DNA, 73 bp, Homo sapiens
ttaaattctcagtgtcgcctgagaagtgatctctttcctctcctcttgtatttttttgtccgaaatacctctg

SEQ ID NO: 6780 - DNA, 70 bp, Homo sapiens
agaagtgatctctttcctctcctcttgtatttttttgtccgaaatacctctgtcctggagttactgtttg

SEQ ID NO: 6781 - DNA, 74 bp, Homo sapiens
ttgtatttttttgtccgaaatacctctgtcctggagttactgtttgtgcctgcctgtctgtcattttctctgcc

SEQ ID NO: 6782 - DNA, 75 bp, Homo sapiens
ttttgtccgaaatacctctgtcctggagttactgtttgtgcctgcctgtctgtcattttctctgcctattcctta

SEQ ID NO: 6783 - DNA, 76 bp, Homo sapiens
aatacctctgtcctggagttactgtttgtgcctgcctgtctgtcattttctctgcctattccttaactattacata

SEQ ID NO: 6784 - DNA, 77 bp, Homo sapiens
tgtcctggagttactgtttgtgcctgcctgtctgtcattttctctgcctattccttaactattacataaatcaccaa

SEQ ID NO: 6785 - DNA, 78 bp, Homo sapiens
ttactgtttgtgcctgcctgtctgtcattttctctgcctattccttaactattacataaatcaccaagtgctgccttc

SEQ ID NO: 6786 - DNA, 76 bp, Homo sapiens
ctgcctgtctgtcattttctctgcctattccttaactattacataaatcaccaagtgctgccttctgaacattttt

SEQ ID NO: 6787 - DNA, 75 bp, Homo sapiens
gtctgtcattttctctgcctattccttaactattacataaatcaccaagtgctgccttctgaacattttttctaa

SEQ ID NO: 6788 - DNA, 72 bp, Homo sapiens
ctctgcctattccttaactattacataaatcaccaagtgctgccttctgaacattttttctaatttactaat

SEQ ID NO: 6789 - DNA, 71 bp, Homo sapiens
tccttaactattacataaatcaccaagtgctgccttctgaacattttttctaatttactaatttgaggctt

SEQ ID NO: 6790 - DNA, 73 bp, Homo sapiens
cataaatcaccaagtgctgccttctgaacattttttctaatttactaatttgaggctttctagacatgacttt

SEQ ID NO: 6791 - DNA, 73 bp, Homo sapiens
atcaccaagtgctgccttctgaacattttttctaatttactaatttgaggctttctagacatgacttttgtat

SEQ ID NO: 6792 - DNA, 70 bp, Homo sapiens
gctgccttctgaacattttttctaatttactaatttgaggctttctagacatgacttttgtatttaattt

SEQ ID NO: 6793 - DNA, 67 bp, Homo sapiens
cattttttctaatttactaatttgaggctttctagacatgacttttgtatttaatttttctttatcg

SEQ ID NO: 6794 - DNA, 68 bp, Homo sapiens
ttttgtatttaatttttctttatcgttttcaaaactcttcttttgtgttgattcaggtccttatcatc

SEQ ID NO: 6795 - DNA, 72 bp, Homo sapiens
aatttttctttatcgttttcaaaactcttcttttgtgttgattcaggtccttatcatctcttgcacagatta

SEQ ID NO: 6796 - DNA, 76 bp, Homo sapiens
tatcgttttcaaaactcttcttttgtgttgattcaggtccttatcatctcttgcacagattattctaatatcctct

SEQ ID NO: 6797 - DNA, 74 bp, Homo sapiens
ttttcaaaactcttcttttgtgttgattcaggtccttatcatctcttgcacagattattctaatatcctctttt

SEQ ID NO: 6798 - DNA, 75 bp, Homo sapiens
cttttgtgttgattcaggtccttatcatctcttgcacagattattctaatatcctcttttttacttttgtcagta

SEQ ID NO: 6799 - DNA, 75 bp, Homo sapiens
gattcaggtccttatcatctcttgcacagattattctaatatcctcttttttacttttgtcagtatacctagagt

SEQ ID NO: 6800 - DNA, 76 bp, Homo sapiens
ggtccttatcatctcttgcacagattattctaatatcctcttttttacttttgtcagtatacctagagttcatcaa

SEQ ID NO: 6801 - DNA, 75 bp, Homo sapiens
cttgcacagattattctaatatcctcttttttacttttgtcagtatacctagagttcatcaaatgggcttactca

SEQ ID NO: 6802 - DNA, 74 bp, Homo sapiens
gattattctaatatcctcttttttacttttgtcagtatacctagagttcatcaaatgggcttactcaagccaga

SEQ ID NO: 6803 - DNA, 75 bp, Homo sapiens
taatatcctcttttttacttttgtcagtatacctagagttcatcaaatgggcttactcaagccagaatctcagaa

SEQ ID NO: 6804 - DNA, 74 bp, Homo sapiens
tttttacttttgtcagtatacctagagttcatcaaatgggcttactcaagccagaatctcagaaatgaaggtag

SEQ ID NO: 6805 - DNA, 80 bp, Homo sapiens
tagagttcatcaaatgggcttactcaagccagaatctcagaaatgaaggtagggaagaatgtcatttaatcatctatgat

SEQ ID NO: 6806 - DNA, 77 bp, Homo sapiens
atcaaatgggcttactcaagccagaatctcagaaatgaaggtagggaagaatgtcatttaatcatctatgatttaaa

SEQ ID NO: 6807 - DNA, 77 bp, Homo sapiens
gaatctcagaaatgaaggtagggaagaatgtcatttaatcatctatgatttaaaaataataactgccaagaatgcca

SEQ ID NO: 6808 - DNA, 75 bp, Homo sapiens
ggtagggaagaatgtcatttaatcatctatgatttaaaaataataactgccaagaatgccaaatgttgcttatct

SEQ ID NO: 6809 - DNA, 75 bp, Homo sapiens
tcatttaatcatctatgatttaaaaataataactgccaagaatgccaaatgttgcttatcttattcttccttacg

SEQ ID NO: 6810 - DNA, 73 bp, Homo sapiens
tctatgatttaaaaataataactgccaagaatgccaaatgttgcttatcttattcttccttacggtaatcttc

SEQ ID NO: 6811 - DNA, 70 bp, Homo sapiens
aaaaataataactgccaagaatgccaaatgttgcttatcttattcttccttacggtaatcttcttgggaa

SEQ ID NO: 6812 - DNA, 70 bp, Homo sapiens
agaatgccaaatgttgcttatcttattcttccttacggtaatcttcttgggaaaacaaattataattgga

SEQ ID NO: 6813 - DNA, 69 bp, Homo sapiens
gttgcttatcttattcttccttacggtaatcttcttgggaaaacaaattataattggaaagtgcttgct

SEQ ID NO: 6814 - DNA, 70 bp, Homo sapiens
tattcttccttacggtaatcttcttgggaaaacaaattataattggaaagtgcttgcttagtgaatcgga

SEQ ID NO: 6815 - DNA, 72 bp, Homo sapiens
cttacggtaatcttcttgggaaaacaaattataattggaaagtgcttgcttagtgaatcggacatcagaata

SEQ ID NO: 6816 - DNA, 72 bp, Homo sapiens
aatcttcttgggaaaacaaattataattggaaagtgcttgcttagtgaatcggacatcagaataaaggcagt

SEQ ID NO: 6817 - DNA, 75 bp, Homo sapiens
aacaaattataattggaaagtgcttgcttagtgaatcggacatcagaataaaggcagttcgatcatgtttaaata

SEQ ID NO: 6818 - DNA, 81 bp, Homo sapiens
gaaagtgcttgcttagtgaatcggacatcagaataaaggcagttcgatcatgtttaaatattatcatcatcttgataatac

SEQ ID NO: 6819 - DNA, 77 bp, Homo sapiens
gcttagtgaatcggacatcagaataaaggcagttcgatcatgtttaaatattatcatcatcttgataatactttttt

SEQ ID NO: 6820 - DNA, 76 bp, Homo sapiens
aaggcagttcgatcatgtttaaatattatcatcatcttgataatacttttttttctctctgtgtaatgtatttcac

SEQ ID NO: 6821 - DNA, 78 bp, Homo sapiens
cgatcatgtttaaatattatcatcatcttgataatacttttttttctctctgtgtaatgtatttcactactttgcagc

SEQ ID NO: 6822 - DNA, 77 bp, Homo sapiens
taaatattatcatcatcttgataatacttttttttctctctgtgtaatgtatttcactactttgcagcttcctttca

SEQ ID NO: 6823 - DNA, 75 bp, Homo sapiens
catcatcttgataatacttttttttctctctgtgtaatgtatttcactactttgcagcttcctttcacattaact

SEQ ID NO: 6824 - DNA, 77 bp, Homo sapiens
ttttctctctgtgtaatgtatttcactactttgcagcttcctttcacattaacttctggtcctgcatttgcagaaac

SEQ ID NO: 6825 - DNA, 78 bp, Homo sapiens
tgtgtaatgtatttcactactttgcagcttcctttcacattaacttctggtcctgcatttgcagaaactatgtcccaa

SEQ ID NO: 6826 - DNA, 77 bp, Homo sapiens
tttcactactttgcagcttcctttcacattaacttctggtcctgcatttgcagaaactatgtcccaatcaccttcat

SEQ ID NO: 6827 - DNA, 76 bp, Homo sapiens
tactttgcagcttcctttcacattaacttctggtcctgcatttgcagaaactatgtcccaatcaccttcattaaac

SEQ ID NO: 6828 - DNA, 75 bp, Homo sapiens
acattaacttctggtcctgcatttgcagaaactatgtcccaatcaccttcattaaacctggagttgtagaccatg

SEQ ID NO: 6829 - DNA, 76 bp, Homo sapiens
tcctgcatttgcagaaactatgtcccaatcaccttcattaaacctggagttgtagaccatgtccttggtgggctgt

SEQ ID NO: 6830 - DNA, 75 bp, Homo sapiens
ttgcagaaactatgtcccaatcaccttcattaaacctggagttgtagaccatgtccttggtgggctgtttctata

SEQ ID NO: 6831 - DNA, 78 bp, Homo sapiens
tatgtcccaatcaccttcattaaacctggagttgtagaccatgtccttggtgggctgtttctatagatgactgatata

SEQ ID NO: 6832 - DNA, 75 bp, Homo sapiens
accttcattaaacctggagttgtagaccatgtccttggtgggctgtttctatagatgactgatatacttgtttca

SEQ ID NO: 6833 - DNA, 77 bp, Homo sapiens
ttgtagaccatgtccttggtgggctgtttctatagatgactgatatacttgtttcacactcagagggtcattttatt

SEQ ID NO: 6834 - DNA, 78 bp, Homo sapiens
atgtccttggtgggctgtttctatagatgactgatatacttgtttcacactcagagggtcattttatttcaggatctc

SEQ ID NO: 6835 - DNA, 82 bp, Homo sapiens
tgggctgtttctatagatgactgatatacttgtttcacactcagagggtcattttatttcaggatctcttgatatatacata

SEQ ID NO: 6836 - DNA, 84 bp, Homo sapiens
gactgatatacttgtttcacactcagagggtcattttatttcaggatctcttgatatatacatatggatatatatctctggata

SEQ ID NO: 6837 - DNA, 85 bp, Homo sapiens
cttgtttcacactcagagggtcattttatttcaggatctcttgatatatacatatggatatatatctctggatatatgtatgtgc

SEQ ID NO: 6838 - DNA, 83 bp, Homo sapiens
agagggtcattttatttcaggatctcttgatatatacatatggatatatatctctggatatatgtatgtgcccattcctaaca

SEQ ID NO: 6839 - DNA, 84 bp, Homo sapiens
cattttatttcaggatctcttgatatatacatatggatatatatctctggatatatgtatgtgcccattcctaacagaatagta

SEQ ID NO: 6840 - DNA, 82 bp, Homo sapiens
atatacatatggatatatatctctggatatatgtatgtgcccattcctaacagaatagtatatttatgtaataacagctagg

SEQ ID NO: 6841 - DNA, 77 bp, Homo sapiens
tatgtatgtgcccattcctaacagaatagtatatttatgtaataacagctaggtatttggaattttgcttctcatac

SEQ ID NO: 6842 - DNA, 78 bp, Homo sapiens
acagaatagtatatttatgtaataacagctaggtatttggaattttgcttctcatacttttttccatcatgcatgcat

SEQ ID NO: 6843 - DNA, 79 bp, Homo sapiens
tatttatgtaataacagctaggtatttggaattttgcttctcatacttttttccatcatgcatgcattaggagcaacta

SEQ ID NO: 6844 - DNA, 77 bp, Homo sapiens
gtaataacagctaggtatttggaattttgcttctcatacttttttccatcatgcatgcattaggagcaactaatatt

SEQ ID NO: 6845 - DNA, 75 bp, Homo sapiens
agctaggtatttggaattttgcttctcatacttttttccatcatgcatgcattaggagcaactaatatttttatt

SEQ ID NO: 6846 - DNA, 77 bp, Homo sapiens
tggaattttgcttctcatacttttttccatcatgcatgcattaggagcaactaatatttttatttcaaaggtgtatc

SEQ ID NO: 6847 - DNA, 79 bp, Homo sapiens
tctcatacttttttccatcatgcatgcattaggagcaactaatatttttatttcaaaggtgtatctgaaagcttatagc

SEQ ID NO: 6848 - DNA, 75 bp, Homo sapiens
catgcattaggagcaactaatatttttatttcaaaggtgtatctgaaagcttatagctttggcttaggaagccaa

SEQ ID NO: 6849 - DNA, 70 bp, Homo sapiens
ggagcaactaatatttttatttcaaaggtgtatctgaaagcttatagctttggcttaggaagccaaaaac

SEQ ID NO: 6850 - DNA, 74 bp, Homo sapiens
tcaaaggtgtatctgaaagcttatagctttggcttaggaagccaaaaactttatttcatgttgccaatagtaga

SEQ ID NO: 6851 - DNA, 72 bp, Homo sapiens
ggtgtatctgaaagcttatagctttggcttaggaagccaaaaactttatttcatgttgccaatagtagaaaa

SEQ ID NO: 6852 - DNA, 72 bp, Homo sapiens
gcttatagctttggcttaggaagccaaaaactttatttcatgttgccaatagtagaaaatctgattttccac

SEQ ID NO: 6853 - DNA, 71 bp, Homo sapiens
gccaaaaactttatttcatgttgccaatagtagaaaatctgattttccacccagattaggtcttttatgga

SEQ ID NO: 6854 - DNA, 74 bp, Homo sapiens
ttatttcatgttgccaatagtagaaaatctgattttccacccagattaggtcttttatggaactgtagagagaa

SEQ ID NO: 6855 - DNA, 73 bp, Homo sapiens
aatagtagaaaatctgattttccacccagattaggtcttttatggaactgtagagagaaaacaaatcagcata

SEQ ID NO: 6856 - DNA, 75 bp, Homo sapiens
tctgattttccacccagattaggtcttttatggaactgtagagagaaaacaaatcagcataataaacataagaca

SEQ ID NO: 6857 - DNA, 75 bp, Homo sapiens
cccagattaggtcttttatggaactgtagagagaaaacaaatcagcataataaacataagacatgagggaagata

SEQ ID NO: 6858 - DNA, 74 bp, Homo sapiens
aggtcttttatggaactgtagagagaaaacaaatcagcataataaacataagacatgagggaagatagtagtaa

SEQ ID NO: 6859 - DNA, 75 bp, Homo sapiens
atggaactgtagagagaaaacaaatcagcataataaacataagacatgagggaagatagtagtaatttgaaacaa

SEQ ID NO: 6860 - DNA, 72 bp, Homo sapiens
agagagaaaacaaatcagcataataaacataagacatgagggaagatagtagtaatttgaaacaaaatttaa

SEQ ID NO: 6861 - DNA, 69 bp, Homo sapiens
taaaaagaaagaaattttatatattcagctatattttataatagtcaaagcaaggaacacagtaaaggg

SEQ ID NO: 6862 - DNA, 71 bp, Homo sapiens
gaaattttatatattcagctatattttataatagtcaaagcaaggaacacagtaaaggggtaataacgcaa

SEQ ID NO: 6863 - DNA, 73 bp, Homo sapiens
atattcagctatattttataatagtcaaagcaaggaacacagtaaaggggtaataacgcaatggttacagcca

SEQ ID NO: 6864 - DNA, 70 bp, Homo sapiens
ctatattttataatagtcaaagcaaggaacacagtaaaggggtaataacgcaatggttacagccaaggaa

SEQ ID NO: 6865 - DNA, 70 bp, Homo sapiens
ttataatagtcaaagcaaggaacacagtaaaggggtaataacgcaatggttacagccaaggaaaagaata

SEQ ID NO: 6866 - DNA, 67 bp, Homo sapiens
aaagcaaggaacacagtaaaggggtaataacgcaatggttacagccaaggaaaagaataataaatgg

SEQ ID NO: 6867 - DNA, 70 bp, Homo sapiens
acacagtaaaggggtaataacgcaatggttacagccaaggaaaagaataataaatgggtaaatcagatga

SEQ ID NO: 6868 - DNA, 69 bp, Homo sapiens
gggtaataacgcaatggttacagccaaggaaaagaataataaatgggtaaatcagatgaagaaaacttc

SEQ ID NO: 6869 - DNA, 70 bp, Homo sapiens
acgcaatggttacagccaaggaaaagaataataaatgggtaaatcagatgaagaaaacttcctagaaaga

SEQ ID NO: 6870 - DNA, 68 bp, Homo sapiens
gccaaggaaaagaataataaatgggtaaatcagatgaagaaaacttcctagaaagaaggaaagtacca

SEQ ID NO: 6871 - DNA, 71 bp, Homo sapiens
gaataataaatgggtaaatcagatgaagaaaacttcctagaaagaaggaaagtaccaatactgtggtgcca

SEQ ID NO: 6872 - DNA, 70 bp, Homo sapiens
ataaatgggtaaatcagatgaagaaaacttcctagaaagaaggaaagtaccaatactgtggtgccaggga

SEQ ID NO: 6873 - DNA, 70 bp, Homo sapiens
aaatcagatgaagaaaacttcctagaaagaaggaaagtaccaatactgtggtgccagggacttaatagac

SEQ ID NO: 6874 - DNA, 68 bp, Homo sapiens
aagaaaacttcctagaaagaaggaaagtaccaatactgtggtgccagggacttaatagactgggcacg

SEQ ID NO: 6875 - DNA, 67 bp, Homo sapiens
aaaaaataaaaggacttaataatagaagtgacttccattctaaggaaatgtacaaaatatgaaaaga

SEQ ID NO: 6876 - DNA, 73 bp, Homo sapiens
aaggacttaataatagaagtgacttccattctaaggaaatgtacaaaatatgaaaagactagacatacagaga

SEQ ID NO: 6877 - DNA, 78 bp, Homo sapiens
ataatagaagtgacttccattctaaggaaatgtacaaaatatgaaaagactagacatacagagatatttatcatagca

SEQ ID NO: 6878 - DNA, 77 bp, Homo sapiens
gacttccattctaaggaaatgtacaaaatatgaaaagactagacatacagagatatttatcatagcaaaaagttgca

SEQ ID NO: 6879 - DNA, 75 bp, Homo sapiens
taaggaaatgtacaaaatatgaaaagactagacatacagagatatttatcatagcaaaaagttgcaagtactggg

SEQ ID NO: 6880 - DNA, 76 bp, Homo sapiens
gtacaaaatatgaaaagactagacatacagagatatttatcatagcaaaaagttgcaagtactggggattgacaaa

SEQ ID NO: 6881 - DNA, 77 bp, Homo sapiens
gaaaagactagacatacagagatatttatcatagcaaaaagttgcaagtactggggattgacaaaattatcacaatg

SEQ ID NO: 6882 - DNA, 76 bp, Homo sapiens
aaagactagacatacagagatatttatcatagcaaaaagttgcaagtactggggattgacaaaattatcacaatgg

SEQ ID NO: 6883 - DNA, 78 bp, Homo sapiens
gactagacatacagagatatttatcatagcaaaaagttgcaagtactggggattgacaaaattatcacaatggttata

SEQ ID NO: 6884 - DNA, 77 bp, Homo sapiens
gacatacagagatatttatcatagcaaaaagttgcaagtactggggattgacaaaattatcacaatggttatattat

SEQ ID NO: 6885 - DNA, 75 bp, Homo sapiens
acagagatatttatcatagcaaaaagttgcaagtactggggattgacaaaattatcacaatggttatattattat

SEQ ID NO: 6886 - DNA, 75 bp, Homo sapiens
gatatttatcatagcaaaaagttgcaagtactggggattgacaaaattatcacaatggttatattattattatta

SEQ ID NO: 6887 - DNA, 76 bp, Homo sapiens
catgagccgccacacctggccataatggttatattaaaatcactggttcaagagtattgtgttttcttgtctctgt

SEQ ID NO: 6888 - DNA, 73 bp, Homo sapiens
cacacctggccataatggttatattaaaatcactggttcaagagtattgtgttttcttgtctctgttttctaa

SEQ ID NO: 6889 - DNA, 71 bp, Homo sapiens
ctggccataatggttatattaaaatcactggttcaagagtattgtgttttcttgtctctgttttctaaaaa

SEQ ID NO: 6890 - DNA, 72 bp, Homo sapiens
ggttatattaaaatcactggttcaagagtattgtgttttcttgtctctgttttctaaaaatgaatgtggcca

SEQ ID NO: 6891 - DNA, 72 bp, Homo sapiens
aatcactggttcaagagtattgtgttttcttgtctctgttttctaaaaatgaatgtggccattcttttatgt

SEQ ID NO: 6892 - DNA, 70 bp, Homo sapiens
gttcaagagtattgtgttttcttgtctctgttttctaaaaatgaatgtggccattcttttatgtttttat

SEQ ID NO: 6893 - DNA, 68 bp, Homo sapiens
attgtgttttcttgtctctgttttctaaaaatgaatgtggccattcttttatgtttttatttaaaaca

SEQ ID NO: 6894 - DNA, 72 bp, Homo sapiens
atgtttttatttaaaacaaaaatattcatgaagaaaggcaaattatgttgataaccaccatatctgataaga

SEQ ID NO: 6895 - DNA, 75 bp, Homo sapiens
ttaaaacaaaaatattcatgaagaaaggcaaattatgttgataaccaccatatctgataagattatgttcttcat

SEQ ID NO: 6896 - DNA, 77 bp, Homo sapiens
aaatattcatgaagaaaggcaaattatgttgataaccaccatatctgataagattatgttcttcattttagttgata

SEQ ID NO: 6897 - DNA, 77 bp, Homo sapiens
aatattcatgaagaaaggcaaattatgttgataaccaccatatctgataagattatgttcttcattttagttgatac

SEQ ID NO: 6898 - DNA, 74 bp, Homo sapiens
gaagaaaggcaaattatgttgataaccaccatatctgataagattatgttcttcattttagttgatactttttc

SEQ ID NO: 6899 - DNA, 73 bp, Homo sapiens
ggcaaattatgttgataaccaccatatctgataagattatgttcttcattttagttgatactttttcccccac

SEQ ID NO: 6900 - DNA, 71 bp, Homo sapiens
gttgataaccaccatatctgataagattatgttcttcattttagttgatactttttcccccactaaatctt

SEQ ID NO: 6901 - DNA, 70 bp, Homo sapiens
caccatatctgataagattatgttcttcattttagttgatactttttcccccactaaatctttcttttaa

SEQ ID NO: 6902 - DNA, 66 bp, Homo sapiens
gataagattatgttcttcattttagttgatactttttcccccactaaatctttcttttaatctttt

SEQ ID NO: 6903 - DNA, 65 bp, Homo sapiens
tcttcattttagttgatactttttcccccactaaatctttcttttaatctttttaaagaaacaga

SEQ ID NO: 6904 - DNA, 77 bp, Homo sapiens
aaaaaaatcactgtgtagtatgtatgtttcatgatgcttctcgtttaggcttatgattgtactcatttaggtgtgcc

SEQ ID NO: 6905 - DNA, 82 bp, Homo sapiens
aatcactgtgtagtatgtatgtttcatgatgcttctcgtttaggcttatgattgtactcatttaggtgtgcctcatctctta

SEQ ID NO: 6906 - DNA, 82 bp, Homo sapiens
tagtatgtatgtttcatgatgcttctcgtttaggcttatgattgtactcatttaggtgtgcctcatctcttagctgaagtac

SEQ ID NO: 6907 - DNA, 80 bp, Homo sapiens
atgatgcttctcgtttaggcttatgattgtactcatttaggtgtgcctcatctcttagctgaagtactctccttcattaa

SEQ ID NO: 6908 - DNA, 80 bp, Homo sapiens
ttatgattgtactcatttaggtgtgcctcatctcttagctgaagtactctccttcattaacctgatgactcatattttta

SEQ ID NO: 6909 - DNA, 78 bp, Homo sapiens
attgtactcatttaggtgtgcctcatctcttagctgaagtactctccttcattaacctgatgactcatatttttatac

SEQ ID NO: 6910 - DNA, 77 bp, Homo sapiens
tttaggtgtgcctcatctcttagctgaagtactctccttcattaacctgatgactcatatttttatactttatttga

SEQ ID NO: 6911 - DNA, 73 bp, Homo sapiens
ctctccttcattaacctgatgactcatatttttatactttatttgagcttagtgtttatagagaaaaaatcac

SEQ ID NO: 6912 - DNA, 72 bp, Homo sapiens
taacctgatgactcatatttttatactttatttgagcttagtgtttatagagaaaaaatcaccccatgtaaa

SEQ ID NO: 6913 - DNA, 72 bp, Homo sapiens
ctcatatttttatactttatttgagcttagtgtttatagagaaaaaatcaccccatgtaaaaattcatatca

SEQ ID NO: 6914 - DNA, 73 bp, Homo sapiens
tttatactttatttgagcttagtgtttatagagaaaaaatcaccccatgtaaaaattcatatcattcattgat

SEQ ID NO: 6915 - DNA, 80 bp, Homo sapiens
gagcttagtgtttatagagaaaaaatcaccccatgtaaaaattcatatcattcattgattcataacaattgcagctgaca

SEQ ID NO: 6916 - DNA, 78 bp, Homo sapiens
gtgtttatagagaaaaaatcaccccatgtaaaaattcatatcattcattgattcataacaattgcagctgacatttaa

SEQ ID NO: 6917 - DNA, 79 bp, Homo sapiens
aaaaatcaccccatgtaaaaattcatatcattcattgattcataacaattgcagctgacatttaaattgctttgcaatg

SEQ ID NO: 6918 - DNA, 80 bp, Homo sapiens
cccatgtaaaaattcatatcattcattgattcataacaattgcagctgacatttaaattgctttgcaatgttaatatact

SEQ ID NO: 6919 - DNA, 81 bp, Homo sapiens
attcatatcattcattgattcataacaattgcagctgacatttaaattgctttgcaatgttaatatacttctctaggaaac

SEQ ID NO: 6920 - DNA, 77 bp, Homo sapiens
ttcattgattcataacaattgcagctgacatttaaattgctttgcaatgttaatatacttctctaggaaacttactt

SEQ ID NO: 6921 - DNA, 79 bp, Homo sapiens
tcataacaattgcagctgacatttaaattgctttgcaatgttaatatacttctctaggaaacttactttttgctatgca

SEQ ID NO: 6922 - DNA, 77 bp, Homo sapiens
caattgcagctgacatttaaattgctttgcaatgttaatatacttctctaggaaacttactttttgctatgcatgtt

SEQ ID NO: 6923 - DNA, 76 bp, Homo sapiens
tgacatttaaattgctttgcaatgttaatatacttctctaggaaacttactttttgctatgcatgtttaatatgta

SEQ ID NO: 6924 - DNA, 75 bp, Homo sapiens
gctttgcaatgttaatatacttctctaggaaacttactttttgctatgcatgtttaatatgtatacatttaactc

SEQ ID NO: 6925 - DNA, 75 bp, Homo sapiens
taatatacttctctaggaaacttactttttgctatgcatgtttaatatgtatacatttaactcctcatactcttc

SEQ ID NO: 6926 - DNA, 74 bp, Homo sapiens
cttctctaggaaacttactttttgctatgcatgtttaatatgtatacatttaactcctcatactcttcctttgc

SEQ ID NO: 6927 - DNA, 75 bp, Homo sapiens
cttactttttgctatgcatgtttaatatgtatacatttaactcctcatactcttcctttgctttccctgtactca

SEQ ID NO: 6928 - DNA, 80 bp, Homo sapiens
tgctatgcatgtttaatatgtatacatttaactcctcatactcttcctttgctttccctgtactcaagatattagatgtc

SEQ ID NO: 6929 - DNA, 73 bp, Homo sapiens
atgtatacatttaactcctcatactcttcctttgctttccctgtactcaagatattagatgtctttcccaggg

SEQ ID NO: 6930 - DNA, 70 bp, Homo sapiens
tttaactcctcatactcttcctttgctttccctgtactcaagatattagatgtctttcccagggggaaaa

SEQ ID NO: 6931 - DNA, 66 bp, Homo sapiens
atactcttcctttgctttccctgtactcaagatattagatgtctttcccagggggaaaaaaaaaac

SEQ ID NO: 6932 - DNA, 71 bp, Homo sapiens
aaccttattttagtttcctgaccgtctttttgtcaccatctcttatgttttcatcaatcgtgctcttagta

SEQ ID NO: 6933 - DNA, 72 bp, Homo sapiens
accgtctttttgtcaccatctcttatgttttcatcaatcgtgctcttagtatctttcctcttgaaaacaacc

SEQ ID NO: 6934 - DNA, 74 bp, Homo sapiens
tttttgtcaccatctcttatgttttcatcaatcgtgctcttagtatctttcctcttgaaaacaacccctccaca

SEQ ID NO: 6935 - DNA, 72 bp, Homo sapiens
atctcttatgttttcatcaatcgtgctcttagtatctttcctcttgaaaacaacccctccacagagaaaaaa

SEQ ID NO: 6936 - DNA, 68 bp, Homo sapiens
gttttcatcaatcgtgctcttagtatctttcctcttgaaaacaacccctccacagagaaaaaaaaacc

SEQ ID NO: 6937 - DNA, 65 bp, Homo sapiens
gctcttagtatctttcctcttgaaaacaacccctccacagagaaaaaaaaaccccaatttactta

SEQ ID NO: 6938 - DNA, 64 bp, Homo sapiens
tagtatctttcctcttgaaaacaacccctccacagagaaaaaaaaaccccaatttacttattcc

SEQ ID NO: 6939 - DNA, 66 bp, Homo sapiens
tcttgaaaacaacccctccacagagaaaaaaaaaccccaatttacttattcctatttgtgcgccta

SEQ ID NO: 6940 - DNA, 65 bp, Homo sapiens
ccctccacagagaaaaaaaaaccccaatttacttattcctatttgtgcgcctacccctgaaactg

SEQ ID NO: 6941 - DNA, 66 bp, Homo sapiens
agaaaaaaaaaccccaatttacttattcctatttgtgcgcctacccctgaaactgttctacaagca

SEQ ID NO: 6942 - DNA, 71 bp, Homo sapiens
aatttacttattcctatttgtgcgcctacccctgaaactgttctacaagcacacactcgtttaagatcatt

SEQ ID NO: 6943 - DNA, 71 bp, Homo sapiens
ttcctatttgtgcgcctacccctgaaactgttctacaagcacacactcgtttaagatcatttgtttatttt

SEQ ID NO: 6944 - DNA, 76 bp, Homo sapiens
ctacccctgaaactgttctacaagcacacactcgtttaagatcatttgtttatttttgtgatatgtctatgtatga

SEQ ID NO: 6945 - DNA, 77 bp, Homo sapiens
tgaaactgttctacaagcacacactcgtttaagatcatttgtttatttttgtgatatgtctatgtatgacttaagtc

SEQ ID NO: 6946 - DNA, 75 bp, Homo sapiens
acaagcacacactcgtttaagatcatttgtttatttttgtgatatgtctatgtatgacttaagtcttccttggac

SEQ ID NO: 6947 - DNA, 74 bp, Homo sapiens
ctcgtttaagatcatttgtttatttttgtgatatgtctatgtatgacttaagtcttccttggacttaactgtgc

SEQ ID NO: 6948 - DNA, 78 bp, Homo sapiens
gatcatttgtttatttttgtgatatgtctatgtatgacttaagtcttccttggacttaactgtgcttcctgattgaga

SEQ ID NO: 6949 - DNA, 78 bp, Homo sapiens
atatgtctatgtatgacttaagtcttccttggacttaactgtgcttcctgattgagagaattcatgcgtttcaccgat

SEQ ID NO: 6950 - DNA, 77 bp, Homo sapiens
tatgtatgacttaagtcttccttggacttaactgtgcttcctgattgagagaattcatgcgtttcaccgattcccta

SEQ ID NO: 6951 - DNA, 77 bp, Homo sapiens
ttggacttaactgtgcttcctgattgagagaattcatgcgtttcaccgattccctacacagtcttagccattatatt

SEQ ID NO: 6952 - DNA, 78 bp, Homo sapiens
taactgtgcttcctgattgagagaattcatgcgtttcaccgattccctacacagtcttagccattatatttcaaaata

SEQ ID NO: 6953 - DNA, 77 bp, Homo sapiens
attgagagaattcatgcgtttcaccgattccctacacagtcttagccattatatttcaaaatacagcatcttaccat

SEQ ID NO: 6954 - DNA, 77 bp, Homo sapiens
agaattcatgcgtttcaccgattccctacacagtcttagccattatatttcaaaatacagcatcttaccattctctc

SEQ ID NO: 6955 - DNA, 75 bp, Homo sapiens
tttcaccgattccctacacagtcttagccattatatttcaaaatacagcatcttaccattctctccattctttct

SEQ ID NO: 6956 - DNA, 74 bp, Homo sapiens
cctacacagtcttagccattatatttcaaaatacagcatcttaccattctctccattctttcttctggaagttt

SEQ ID NO: 6957 - DNA, 75 bp, Homo sapiens
gtcttagccattatatttcaaaatacagcatcttaccattctctccattctttcttctggaagttttgttaggca

SEQ ID NO: 6958 - DNA, 73 bp, Homo sapiens
atatttcaaaatacagcatcttaccattctctccattctttcttctggaagttttgttaggcatatttggatt

SEQ ID NO: 6959 - DNA, 75 bp, Homo sapiens
aaatacagcatcttaccattctctccattctttcttctggaagttttgttaggcatatttggatttgaatactgc

SEQ ID NO: 6960 - DNA, 72 bp, Homo sapiens
ttaccattctctccattctttcttctggaagttttgttaggcatatttggatttgaatactgcccttaatgt

SEQ ID NO: 6961 - DNA, 69 bp, Homo sapiens
tcttctggaagttttgttaggcatatttggatttgaatactgcccttaatgttctttaagtttttgtaa

SEQ ID NO: 6962 - DNA, 67 bp, Homo sapiens
ggaagttttgttaggcatatttggatttgaatactgcccttaatgttctttaagtttttgtaatttc

SEQ ID NO: 6963 - DNA, 67 bp, Homo sapiens
gttaggcatatttggatttgaatactgcccttaatgttctttaagtttttgtaatttccatttttta

SEQ ID NO: 6964 - DNA, 66 bp, Homo sapiens
gttctttaagtttttgtaatttccattttttaaatctctcttttatatctgagtaatttgtttaga

SEQ ID NO: 6965 - DNA, 66 bp, Homo sapiens
gtttttgtaatttccattttttaaatctctcttttatatctgagtaatttgtttagatgtttgttt

SEQ ID NO: 6966 - DNA, 71 bp, Homo sapiens
ttccattttttaaatctctcttttatatctgagtaatttgtttagatgtttgtttttgttcactaatcatc

SEQ ID NO: 6967 - DNA, 74 bp, Homo sapiens
taaatctctcttttatatctgagtaatttgtttagatgtttgtttttgttcactaatcatctctttagctgtgt

SEQ ID NO: 6968 - DNA, 73 bp, Homo sapiens
ctctcttttatatctgagtaatttgtttagatgtttgtttttgttcactaatcatctctttagctgtgtttaa

SEQ ID NO: 6969 - DNA, 72 bp, Homo sapiens
tatctgagtaatttgtttagatgtttgtttttgttcactaatcatctctttagctgtgtttaatttattgtt

SEQ ID NO: 6970 - DNA, 71 bp, Homo sapiens
tgtttagatgtttgtttttgttcactaatcatctctttagctgtgtttaatttattgttttattagactat

SEQ ID NO: 6971 - DNA, 72 bp, Homo sapiens
gtttgtttttgttcactaatcatctctttagctgtgtttaatttattgttttattagactattgagtgaaga

SEQ ID NO: 6972 - DNA, 74 bp, Homo sapiens
cactaatcatctctttagctgtgtttaatttattgttttattagactattgagtgaagaattttagtgaacatg

SEQ ID NO: 6973 - DNA, 72 bp, Homo sapiens
catctctttagctgtgtttaatttattgttttattagactattgagtgaagaattttagtgaacatgttgtt

SEQ ID NO: 6974 - DNA, 70 bp, Homo sapiens
gctgtgtttaatttattgttttattagactattgagtgaagaattttagtgaacatgttgttttcaagtt

SEQ ID NO: 6975 - DNA, 71 bp, Homo sapiens
tattgttttattagactattgagtgaagaattttagtgaacatgttgttttcaagtttgaattctttgaag

SEQ ID NO: 6976 - DNA, 71 bp, Homo sapiens
ctattgagtgaagaattttagtgaacatgttgttttcaagtttgaattctttgaagtctcttttaaaatga

SEQ ID NO: 6977 - DNA, 68 bp, Homo sapiens
ttttagtgaacatgttgttttcaagtttgaattctttgaagtctcttttaaaatgaatgtagtttggt

SEQ ID NO: 6978 - DNA, 69 bp, Homo sapiens
aaaaaaagagctgcgtagttcttttcccacatccgaaaatatttttattttgaagcaatctcaaactca

SEQ ID NO: 6979 - DNA, 73 bp, Homo sapiens
gctgcgtagttcttttcccacatccgaaaatatttttattttgaagcaatctcaaactcatggaaaaattgca

SEQ ID NO: 6980 - DNA, 74 bp, Homo sapiens
ttcccacatccgaaaatatttttattttgaagcaatctcaaactcatggaaaaattgcaagtatagtagagaga

SEQ ID NO: 6981 - DNA, 70 bp, Homo sapiens
aaaatatttttattttgaagcaatctcaaactcatggaaaaattgcaagtatagtagagagaactttgtt

SEQ ID NO: 6982 - DNA, 76 bp, Homo sapiens
tattttgaagcaatctcaaactcatggaaaaattgcaagtatagtagagagaactttgtttttctgagccatttga

SEQ ID NO: 6983 - DNA, 76 bp, Homo sapiens
gaagcaatctcaaactcatggaaaaattgcaagtatagtagagagaactttgtttttctgagccatttgagagtaa

SEQ ID NO: 6984 - DNA, 74 bp, Homo sapiens
aaactcatggaaaaattgcaagtatagtagagagaactttgtttttctgagccatttgagagtaagttgcgcac

SEQ ID NO: 6985 - DNA, 78 bp, Homo sapiens
tatagtagagagaactttgtttttctgagccatttgagagtaagttgcgcaccgtatcccatcagcactgaatactta

SEQ ID NO: 6986 - DNA, 77 bp, Homo sapiens
ttgtttttctgagccatttgagagtaagttgcgcaccgtatcccatcagcactgaatacttatgtatttcttacaaa

SEQ ID NO: 6987 - DNA, 76 bp, Homo sapiens
atttgagagtaagttgcgcaccgtatcccatcagcactgaatacttatgtatttcttacaaacaaggacattctcc

SEQ ID NO: 6988 - DNA, 76 bp, Homo sapiens
agtaagttgcgcaccgtatcccatcagcactgaatacttatgtatttcttacaaacaaggacattctcctacaata

SEQ ID NO: 6989 - DNA, 78 bp, Homo sapiens
accgtatcccatcagcactgaatacttatgtatttcttacaaacaaggacattctcctacaatatcacagtatagcta

SEQ ID NO: 6990 - DNA, 75 bp, Homo sapiens
actgaatacttatgtatttcttacaaacaaggacattctcctacaatatcacagtatagctattaagaacagaaa

SEQ ID NO: 6991 - DNA, 75 bp, Homo sapiens
gtatttcttacaaacaaggacattctcctacaatatcacagtatagctattaagaacagaaaattaacactgcta

SEQ ID NO: 6992 - DNA, 77 bp, Homo sapiens
ctacaatatcacagtatagctattaagaacagaaaattaacactgctatattactaccatctagttttcaaatgcca

SEQ ID NO: 6993 - DNA, 74 bp, Homo sapiens
acagtatagctattaagaacagaaaattaacactgctatattactaccatctagttttcaaatgccattcaagt

SEQ ID NO: 6994 - DNA, 74 bp, Homo sapiens
agaacagaaaattaacactgctatattactaccatctagttttcaaatgccattcaagttttggcagttgtcaa

SEQ ID NO: 6995 - DNA, 74 bp, Homo sapiens
attaacactgctatattactaccatctagttttcaaatgccattcaagttttggcagttgtcaatgtttttgga

SEQ ID NO: 6996 - DNA, 76 bp, Homo sapiens
ctatattactaccatctagttttcaaatgccattcaagttttggcagttgtcaatgtttttggagatcacagcgta

SEQ ID NO: 6997 - DNA, 74 bp, Homo sapiens
taccatctagttttcaaatgccattcaagttttggcagttgtcaatgtttttggagatcacagcgtagttgttt

SEQ ID NO: 6998 - DNA, 73 bp, Homo sapiens
tagttttcaaatgccattcaagttttggcagttgtcaatgtttttggagatcacagcgtagttgttttggatt

SEQ ID NO: 6999 - DNA, 71 bp, Homo sapiens
aatgccattcaagttttggcagttgtcaatgtttttggagatcacagcgtagttgttttggattttatttt

SEQ ID NO: 7000 - DNA, 73 bp, Homo sapiens
ttggcagttgtcaatgtttttggagatcacagcgtagttgttttggattttatttttcattactaaattcaga

SEQ ID NO: 7001 - DNA, 72 bp, Homo sapiens
gttgtcaatgtttttggagatcacagcgtagttgttttggattttatttttcattactaaattcagattatg

SEQ ID NO: 7002 - DNA, 69 bp, Homo sapiens
gtttttggagatcacagcgtagttgttttggattttatttttcattactaaattcagattatgttttgg

SEQ ID NO: 7003 - DNA, 67 bp, Homo sapiens
gttgttttggattttatttttcattactaaattcagattatgttttggggggcaggaattttataga

SEQ ID NO: 7004 - DNA, 73 bp, Homo sapiens
tatttttcattactaaattcagattatgttttggggggcaggaattttatagaaattatctttgcagtgcata

SEQ ID NO: 7005 - DNA, 78 bp, Homo sapiens
tcagattatgttttggggggcaggaattttatagaaattatctttgcagtgcatattatcaataacacataatcaggc

SEQ ID NO: 7006 - DNA, 75 bp, Homo sapiens
tttggggggcaggaattttatagaaattatctttgcagtgcatattatcaataacacataatcaggctttcccaa

SEQ ID NO: 7007 - DNA, 73 bp, Homo sapiens
agaaattatctttgcagtgcatattatcaataacacataatcaggctttcccaatgtaaaggttttctttccc

SEQ ID NO: 7008 - DNA, 72 bp, Homo sapiens
ttatctttgcagtgcatattatcaataacacataatcaggctttcccaatgtaaaggttttctttccccctt

SEQ ID NO: 7009 - DNA, 70 bp, Homo sapiens
gtgcatattatcaataacacataatcaggctttcccaatgtaaaggttttctttccccctttacaattag

SEQ ID NO: 7010 - DNA, 66 bp, Homo sapiens
cataatcaggctttcccaatgtaaaggttttctttccccctttacaattagtaattattttgtgga

SEQ ID NO: 7011 - DNA, 65 bp, Homo sapiens
cccaatgtaaaggttttctttccccctttacaattagtaattattttgtggaataaattgtgaca

SEQ ID NO: 7012 - DNA, 66 bp, Homo sapiens
gtaaaggttttctttccccctttacaattagtaattattttgtggaataaattgtgacactatatg

SEQ ID NO: 7013 - DNA, 69 bp, Homo sapiens
tttccccctttacaattagtaattattttgtggaataaattgtgacactatatgtaatattccattccc

SEQ ID NO: 7014 - DNA, 74 bp, Homo sapiens
ttacaattagtaattattttgtggaataaattgtgacactatatgtaatattccattccccatcagattttcag

SEQ ID NO: 7015 - DNA, 77 bp, Homo sapiens
tattttgtggaataaattgtgacactatatgtaatattccattccccatcagattttcagtttatatcagtatgtgt

SEQ ID NO: 7016 - DNA, 77 bp, Homo sapiens
tggaataaattgtgacactatatgtaatattccattccccatcagattttcagtttatatcagtatgtgtttaagga

SEQ ID NO: 7017 - DNA, 77 bp, Homo sapiens
ttgtgacactatatgtaatattccattccccatcagattttcagtttatatcagtatgtgtttaaggattcctgtgg

SEQ ID NO: 7018 - DNA, 74 bp, Homo sapiens
gtaatattccattccccatcagattttcagtttatatcagtatgtgtttaaggattcctgtgggctataattta

SEQ ID NO: 7019 - DNA, 76 bp, Homo sapiens
ccattccccatcagattttcagtttatatcagtatgtgtttaaggattcctgtgggctataatttattattcatga

SEQ ID NO: 7020 - DNA, 78 bp, Homo sapiens
cagattttcagtttatatcagtatgtgtttaaggattcctgtgggctataatttattattcatgatttattgtgatgc

SEQ ID NO: 7021 - DNA, 78 bp, Homo sapiens
ttcagtttatatcagtatgtgtttaaggattcctgtgggctataatttattattcatgatttattgtgatgctgaaaa

SEQ ID NO: 7022 - DNA, 77 bp, Homo sapiens
atcagtatgtgtttaaggattcctgtgggctataatttattattcatgatttattgtgatgctgaaaattgttcagg

SEQ ID NO: 7023 - DNA, 76 bp, Homo sapiens
ttaaggattcctgtgggctataatttattattcatgatttattgtgatgctgaaaattgttcaggttagccagtgg

SEQ ID NO: 7024 - DNA, 81 bp, Homo sapiens
tattcatgatttattgtgatgctgaaaattgttcaggttagccagtgggagcccctttgagctggctctctgttctgttga

SEQ ID NO: 7025 - DNA, 74 bp, Homo sapiens
aaattgttcaggttagccagtgggagcccctttgagctggctctctgttctgttgacatatccctgttattctt

SEQ ID NO: 7026 - DNA, 75 bp, Homo sapiens
agtgggagcccctttgagctggctctctgttctgttgacatatccctgttattctttgaatgcttccttactttc

SEQ ID NO: 7027 - DNA, 79 bp, Homo sapiens
tttgagctggctctctgttctgttgacatatccctgttattctttgaatgcttccttactttctggcactgtaagtaca

SEQ ID NO: 7028 - DNA, 75 bp, Homo sapiens
ctctctgttctgttgacatatccctgttattctttgaatgcttccttactttctggcactgtaagtacattagtt

SEQ ID NO: 7029 - DNA, 74 bp, Homo sapiens
ttctgttgacatatccctgttattctttgaatgcttccttactttctggcactgtaagtacattagttttccat

SEQ ID NO: 7030 - DNA, 75 bp, Homo sapiens
atatccctgttattctttgaatgcttccttactttctggcactgtaagtacattagttttccattgctgacataa

SEQ ID NO: 7031 - DNA, 76 bp, Homo sapiens
attctttgaatgcttccttactttctggcactgtaagtacattagttttccattgctgacataacaaattatcaga

SEQ ID NO: 7032 - DNA, 76 bp, Homo sapiens
atgcttccttactttctggcactgtaagtacattagttttccattgctgacataacaaattatcagaaagttagca

SEQ ID NO: 7033 - DNA, 76 bp, Homo sapiens
ttctggcactgtaagtacattagttttccattgctgacataacaaattatcagaaagttagcagcttaaaaccaca

SEQ ID NO: 7034 - DNA, 76 bp, Homo sapiens
gcactgtaagtacattagttttccattgctgacataacaaattatcagaaagttagcagcttaaaaccacacacat

SEQ ID NO: 7035 - DNA, 77 bp, Homo sapiens
cattagttttccattgctgacataacaaattatcagaaagttagcagcttaaaaccacacacattcattagctttca

SEQ ID NO: 7036 - DNA, 79 bp, Homo sapiens
ttccattgctgacataacaaattatcagaaagttagcagcttaaaaccacacacattcattagctttcatttatcatat

SEQ ID NO: 7037 - DNA, 75 bp, Homo sapiens
cataacaaattatcagaaagttagcagcttaaaaccacacacattcattagctttcatttatcatattttaccag

SEQ ID NO: 7038 - DNA, 73 bp, Homo sapiens
cagaaagttagcagcttaaaaccacacacattcattagctttcatttatcatattttaccagtagaagtttgg

SEQ ID NO: 7039 - DNA, 71 bp, Homo sapiens
ttaaaaccacacacattcattagctttcatttatcatattttaccagtagaagtttgggttggctgggttc

SEQ ID NO: 7040 - DNA, 73 bp, Homo sapiens
acattcattagctttcatttatcatattttaccagtagaagtttgggttggctgggttctctgcttagtgtct

SEQ ID NO: 7041 - DNA, 74 bp, Homo sapiens
tttcatttatcatattttaccagtagaagtttgggttggctgggttctctgcttagtgtcttgcaaggctgaaa

SEQ ID NO: 7042 - DNA, 74 bp, Homo sapiens
ttatcatattttaccagtagaagtttgggttggctgggttctctgcttagtgtcttgcaaggctgaaatccagg

SEQ ID NO: 7043 - DNA, 79 bp, Homo sapiens
tgggttctctgcttagtgtcttgcaaggctgaaatccaggtgctggccagctgggctcttaccaggaggcttccaaaga

SEQ ID NO: 7044 - DNA, 74 bp, Homo sapiens
cttagtgtcttgcaaggctgaaatccaggtgctggccagctgggctcttaccaggaggcttccaaagaaaccct

SEQ ID NO: 7045 - DNA, 76 bp, Homo sapiens
ttgcaaggctgaaatccaggtgctggccagctgggctcttaccaggaggcttccaaagaaacccttagctcttaga

SEQ ID NO: 7046 - DNA, 71 bp, Homo sapiens
aaatccaggtgctggccagctgggctcttaccaggaggcttccaaagaaacccttagctcttagaggcttt

SEQ ID NO: 7047 - DNA, 71 bp, Homo sapiens
aggtgctggccagctgggctcttaccaggaggcttccaaagaaacccttagctcttagaggcttttataaa

SEQ ID NO: 7048 - DNA, 71 bp, Homo sapiens
agctgggctcttaccaggaggcttccaaagaaacccttagctcttagaggcttttataaagaccttgcaca

SEQ ID NO: 7049 - DNA, 72 bp, Homo sapiens
tcttaccaggaggcttccaaagaaacccttagctcttagaggcttttataaagaccttgcacatgcccctgc

SEQ ID NO: 7050 - DNA, 74 bp, Homo sapiens
ttccaaagaaacccttagctcttagaggcttttataaagaccttgcacatgcccctgcgtcttcaagccagcaa

SEQ ID NO: 7051 - DNA, 80 bp, Homo sapiens
ttagaggcttttataaagaccttgcacatgcccctgcgtcttcaagccagcaatgatgagttgaatccttctcacactta

SEQ ID NO: 7052 - DNA, 81 bp, Homo sapiens
ttttataaagaccttgcacatgcccctgcgtcttcaagccagcaatgatgagttgaatccttctcacacttagaatctgtc

SEQ ID NO: 7053 - DNA, 83 bp, Homo sapiens
aagaccttgcacatgcccctgcgtcttcaagccagcaatgatgagttgaatccttctcacacttagaatctgtctgacttcgc

SEQ ID NO: 7054 - DNA, 84 bp, Homo sapiens
acatgcccctgcgtcttcaagccagcaatgatgagttgaatccttctcacacttagaatctgtctgacttcgccttctgccgca

SEQ ID NO: 7055 - DNA, 84 bp, Homo sapiens
cttcaagccagcaatgatgagttgaatccttctcacacttagaatctgtctgacttcgccttctgccgcatctctcactttctc

SEQ ID NO: 7056 - DNA, 84 bp, Homo sapiens
ttgaatccttctcacacttagaatctgtctgacttcgccttctgccgcatctctcactttctcttctgccgcatctttcactga

SEQ ID NO: 7057 - DNA, 83 bp, Homo sapiens
ttctcacacttagaatctgtctgacttcgccttctgccgcatctctcactttctcttctgccgcatctttcactgactttcta

SEQ ID NO: 7058 - DNA, 80 bp, Homo sapiens
ttagaatctgtctgacttcgccttctgccgcatctctcactttctcttctgccgcatctttcactgactttctaccttct

SEQ ID NO: 7059 - DNA, 77 bp, Homo sapiens
tgtctgacttcgccttctgccgcatctctcactttctcttctgccgcatctttcactgactttctaccttctttttt

SEQ ID NO: 7060 - DNA, 79 bp, Homo sapiens
cactgcactcagcccctcttctgctttcaaaggctcatgtgattacattggatccttctagataaccccagataatttg

SEQ ID NO: 7061 - DNA, 75 bp, Homo sapiens
actcagcccctcttctgctttcaaaggctcatgtgattacattggatccttctagataaccccagataatttgtt

SEQ ID NO: 7062 - DNA, 76 bp, Homo sapiens
ttcaaaggctcatgtgattacattggatccttctagataaccccagataatttgtttccaagtcagctaaccaata

SEQ ID NO: 7063 - DNA, 73 bp, Homo sapiens
tgattacattggatccttctagataaccccagataatttgtttccaagtcagctaaccaatagccttaattcg

SEQ ID NO: 7064 - DNA, 74 bp, Homo sapiens
ttggatccttctagataaccccagataatttgtttccaagtcagctaaccaatagccttaattcggtctgcata

SEQ ID NO: 7065 - DNA, 75 bp, Homo sapiens
tctagataaccccagataatttgtttccaagtcagctaaccaatagccttaattcggtctgcatagcagtaccta

SEQ ID NO: 7066 - DNA, 75 bp, Homo sapiens
gataatttgtttccaagtcagctaaccaatagccttaattcggtctgcatagcagtacctagattagcgtttcat

SEQ ID NO: 7067 - DNA, 76 bp, Homo sapiens
ttgtttccaagtcagctaaccaatagccttaattcggtctgcatagcagtacctagattagcgtttcattgaataa

SEQ ID NO: 7068 - DNA, 75 bp, Homo sapiens
aatagccttaattcggtctgcatagcagtacctagattagcgtttcattgaataaccaggggatagcaaacacca

SEQ ID NO: 7069 - DNA, 75 bp, Homo sapiens
taattcggtctgcatagcagtacctagattagcgtttcattgaataaccaggggatagcaaacaccaacctgtct

SEQ ID NO: 7070 - DNA, 74 bp, Homo sapiens
atagcagtacctagattagcgtttcattgaataaccaggggatagcaaacaccaacctgtctttagaattctgc

SEQ ID NO: 7071 - DNA, 73 bp, Homo sapiens
tacctagattagcgtttcattgaataaccaggggatagcaaacaccaacctgtctttagaattctgcctacca

SEQ ID NO: 7072 - DNA, 74 bp, Homo sapiens
tttcattgaataaccaggggatagcaaacaccaacctgtctttagaattctgcctaccactacaagatactctg

SEQ ID NO: 7073 - DNA, 72 bp, Homo sapiens
aataaccaggggatagcaaacaccaacctgtctttagaattctgcctaccactacaagatactctgtgttct

SEQ ID NO: 7074 - DNA, 74 bp, Homo sapiens
gatagcaaacaccaacctgtctttagaattctgcctaccactacaagatactctgtgttcttcttttttatata

SEQ ID NO: 7075 - DNA, 71 bp, Homo sapiens
aaacaccaacctgtctttagaattctgcctaccactacaagatactctgtgttcttcttttttatatagag

SEQ ID NO: 7076 - DNA, 72 bp, Homo sapiens
caacctgtctttagaattctgcctaccactacaagatactctgtgttcttcttttttatatagagtgttctt

SEQ ID NO: 7077 - DNA, 73 bp, Homo sapiens
gaattctgcctaccactacaagatactctgtgttcttcttttttatatagagtgttcttttctcacatttaaa

SEQ ID NO: 7078 - DNA, 72 bp, Homo sapiens
attctgcctaccactacaagatactctgtgttcttcttttttatatagagtgttcttttctcacatttaaaa

SEQ ID NO: 7079 - DNA, 73 bp, Homo sapiens
ccactacaagatactctgtgttcttcttttttatatagagtgttcttttctcacatttaaaaaatgcatcctc

SEQ ID NO: 7080 - DNA, 71 bp, Homo sapiens
ctctgtgttcttcttttttatatagagtgttcttttctcacatttaaaaaatgcatcctcttaggttctta

SEQ ID NO: 7081 - DNA, 70 bp, Homo sapiens
tttttatatagagtgttcttttctcacatttaaaaaatgcatcctcttaggttcttaatcatttaaaata

SEQ ID NO: 7082 - DNA, 71 bp, Homo sapiens
tagagtgttcttttctcacatttaaaaaatgcatcctcttaggttcttaatcatttaaaatatttatctta

SEQ ID NO: 7083 - DNA, 72 bp, Homo sapiens
tcacatttaaaaaatgcatcctcttaggttcttaatcatttaaaatatttatcttataatatttatttgcca

SEQ ID NO: 7084 - DNA, 70 bp, Homo sapiens
aaaaatgcatcctcttaggttcttaatcatttaaaatatttatcttataatatttatttgccatttctat

SEQ ID NO: 7085 - DNA, 72 bp, Homo sapiens
tcttaatcatttaaaatatttatcttataatatttatttgccatttctattttcgaagtgtcttggagggca

SEQ ID NO: 7086 - DNA, 71 bp, Homo sapiens
taaaatatttatcttataatatttatttgccatttctattttcgaagtgtcttggagggcagtctaaatgt

SEQ ID NO: 7087 - DNA, 74 bp, Homo sapiens
atttatttgccatttctattttcgaagtgtcttggagggcagtctaaatgtttgtatctgttgatttgtcatcg

SEQ ID NO: 7088 - DNA, 74 bp, Homo sapiens
ccatttctattttcgaagtgtcttggagggcagtctaaatgtttgtatctgttgatttgtcatcgtggggattg

SEQ ID NO: 7089 - DNA, 74 bp, Homo sapiens
tcttggagggcagtctaaatgtttgtatctgttgatttgtcatcgtggggattggttccttccatgtttcctta

SEQ ID NO: 7090 - DNA, 71 bp, Homo sapiens
agtctaaatgtttgtatctgttgatttgtcatcgtggggattggttccttccatgtttccttattttggat

SEQ ID NO: 7091 - DNA, 72 bp, Homo sapiens
tttgtatctgttgatttgtcatcgtggggattggttccttccatgtttccttattttggattgtgaacttaa

SEQ ID NO: 7092 - DNA, 70 bp, Homo sapiens
tgttgatttgtcatcgtggggattggttccttccatgtttccttattttggattgtgaacttaagtttta

SEQ ID NO: 7093 - DNA, 66 bp, Homo sapiens
atcgtggggattggttccttccatgtttccttattttggattgtgaacttaagttttatcgtgggt

SEQ ID NO: 7094 - DNA, 67 bp, Homo sapiens
ggattggttccttccatgtttccttattttggattgtgaacttaagttttatcgtgggttaaggata

SEQ ID NO: 7095 - DNA, 69 bp, Homo sapiens
cttccatgtttccttattttggattgtgaacttaagttttatcgtgggttaaggatatatcccttcaga

SEQ ID NO: 7096 - DNA, 66 bp, Homo sapiens
ccttattttggattgtgaacttaagttttatcgtgggttaaggatatatcccttcagaaaagtttg

SEQ ID NO: 7097 - DNA, 70 bp, Homo sapiens
tggattgtgaacttaagttttatcgtgggttaaggatatatcccttcagaaaagtttgtgtttgcttcac

SEQ ID NO: 7098 - DNA, 69 bp, Homo sapiens
gtgggttaaggatatatcccttcagaaaagtttgtgtttgcttcaccaccctgtcccttcttatgttaa

SEQ ID NO: 7099 - DNA, 70 bp, Homo sapiens
taaggatatatcccttcagaaaagtttgtgtttgcttcaccaccctgtcccttcttatgttaatttaatg

SEQ ID NO: 7100 - DNA, 70 bp, Homo sapiens
cttcagaaaagtttgtgtttgcttcaccaccctgtcccttcttatgttaatttaatgttgggatttatca

SEQ ID NO: 7101 - DNA, 69 bp, Homo sapiens
tttgtgtttgcttcaccaccctgtcccttcttatgttaatttaatgttgggatttatcaaaccaaagtc

SEQ ID NO: 7102 - DNA, 69 bp, Homo sapiens
caccctgtcccttcttatgttaatttaatgttgggatttatcaaaccaaagtctatttgaacacaagac

SEQ ID NO: 7103 - DNA, 72 bp, Homo sapiens
ccttcttatgttaatttaatgttgggatttatcaaaccaaagtctatttgaacacaagactatgtggctata

SEQ ID NO: 7104 - DNA, 73 bp, Homo sapiens
gggatttatcaaaccaaagtctatttgaacacaagactatgtggctataaattcatatggcagactttttacc

SEQ ID NO: 7105 - DNA, 78 bp, Homo sapiens
tatttgaacacaagactatgtggctataaattcatatggcagactttttacctcctatccagagcatagaccaaattg

SEQ ID NO: 7106 - DNA, 76 bp, Homo sapiens
aagactatgtggctataaattcatatggcagactttttacctcctatccagagcatagaccaaattggacaagtat

SEQ ID NO: 7107 - DNA, 76 bp, Homo sapiens
atgtggctataaattcatatggcagactttttacctcctatccagagcatagaccaaattggacaagtattattat

SEQ ID NO: 7108 - DNA, 73 bp, Homo sapiens
aaattcatatggcagactttttacctcctatccagagcatagaccaaattggacaagtattattattttctcc

SEQ ID NO: 7109 - DNA, 72 bp, Homo sapiens
gactttttacctcctatccagagcatagaccaaattggacaagtattattattttctccctatgatgtggtt

SEQ ID NO: 7110 - DNA, 72 bp, Homo sapiens
tttacctcctatccagagcatagaccaaattggacaagtattattattttctccctatgatgtggtttttgg

SEQ ID NO: 7111 - DNA, 72 bp, Homo sapiens
atccagagcatagaccaaattggacaagtattattattttctccctatgatgtggtttttgggtgatttttg

SEQ ID NO: 7112 - DNA, 70 bp, Homo sapiens
tagaccaaattggacaagtattattattttctccctatgatgtggtttttgggtgatttttgtgtgtggg

SEQ ID NO: 7113 - DNA, 66 bp, Homo sapiens
ggacaagtattattattttctccctatgatgtggtttttgggtgatttttgtgtgtgggttttttt

SEQ ID NO: 7114 - DNA, 72 bp, Homo sapiens
tttttttttaagtggtctgcccttccactgaaagtgtagctttttgacagtctcagccatataaacaggatc

SEQ ID NO: 7115 - DNA, 76 bp, Homo sapiens
ttttaagtggtctgcccttccactgaaagtgtagctttttgacagtctcagccatataaacaggatctcagtttca

SEQ ID NO: 7116 - DNA, 80 bp, Homo sapiens
tctgcccttccactgaaagtgtagctttttgacagtctcagccatataaacaggatctcagtttcatccttccatccatc

SEQ ID NO: 7117 - DNA, 79 bp, Homo sapiens
aaagtgtagctttttgacagtctcagccatataaacaggatctcagtttcatccttccatccatccattagaggcacaa

SEQ ID NO: 7118 - DNA, 81 bp, Homo sapiens
tttttgacagtctcagccatataaacaggatctcagtttcatccttccatccatccattagaggcacaaggtctcatctct

SEQ ID NO: 7119 - DNA, 79 bp, Homo sapiens
tctcagccatataaacaggatctcagtttcatccttccatccatccattagaggcacaaggtctcatctcttttccttt

SEQ ID NO: 7120 - DNA, 77 bp, Homo sapiens
atataaacaggatctcagtttcatccttccatccatccattagaggcacaaggtctcatctcttttccttttgggca

SEQ ID NO: 7121 - DNA, 75 bp, Homo sapiens
tctcagtttcatccttccatccatccattagaggcacaaggtctcatctcttttccttttgggcattaaaaccaa

SEQ ID NO: 7122 - DNA, 73 bp, Homo sapiens
atccttccatccatccattagaggcacaaggtctcatctcttttccttttgggcattaaaaccaaagttcata

SEQ ID NO: 7123 - DNA, 74 bp, Homo sapiens
tccatccatccattagaggcacaaggtctcatctcttttccttttgggcattaaaaccaaagttcatacattat

SEQ ID NO: 7124 - DNA, 74 bp, Homo sapiens
atccatccattagaggcacaaggtctcatctcttttccttttgggcattaaaaccaaagttcatacattattga

SEQ ID NO: 7125 - DNA, 74 bp, Homo sapiens
atccattagaggcacaaggtctcatctcttttccttttgggcattaaaaccaaagttcatacattattgagaca

SEQ ID NO: 7126 - DNA, 73 bp, Homo sapiens
attagaggcacaaggtctcatctcttttccttttgggcattaaaaccaaagttcatacattattgagacaggc

SEQ ID NO: 7127 - DNA, 73 bp, Homo sapiens
acaaggtctcatctcttttccttttgggcattaaaaccaaagttcatacattattgagacaggccgactctgc

SEQ ID NO: 7128 - DNA, 73 bp, Homo sapiens
aggtctcatctcttttccttttgggcattaaaaccaaagttcatacattattgagacaggccgactctgctaa

SEQ ID NO: 7129 - DNA, 73 bp, Homo sapiens
atctcttttccttttgggcattaaaaccaaagttcatacattattgagacaggccgactctgctaaggcagcc

SEQ ID NO: 7130 - DNA, 72 bp, Homo sapiens
ttttccttttgggcattaaaaccaaagttcatacattattgagacaggccgactctgctaaggcagcctgtt

SEQ ID NO: 7131 - DNA, 74 bp, Homo sapiens
tttgggcattaaaaccaaagttcatacattattgagacaggccgactctgctaaggcagcctgtttggccttta

SEQ ID NO: 7132 - DNA, 71 bp, Homo sapiens
ttaaaaccaaagttcatacattattgagacaggccgactctgctaaggcagcctgtttggcctttaagttt

SEQ ID NO: 7133 - DNA, 73 bp, Homo sapiens
aaagttcatacattattgagacaggccgactctgctaaggcagcctgtttggcctttaagttttattgcttat

SEQ ID NO: 7134 - DNA, 73 bp, Homo sapiens
atacattattgagacaggccgactctgctaaggcagcctgtttggcctttaagttttattgcttattttttga

SEQ ID NO: 7135 - DNA, 70 bp, Homo sapiens
aggccgactctgctaaggcagcctgtttggcctttaagttttattgcttattttttgagtatgtatttat

SEQ ID NO: 7136 - DNA, 69 bp, Homo sapiens
gactctgctaaggcagcctgtttggcctttaagttttattgcttattttttgagtatgtatttattttt

SEQ ID NO: 7137 - DNA, 66 bp, Homo sapiens
tttttttgagctttaagccttcaagtttcctttttattcttgacccctagacatttcctttgcttg

SEQ ID NO: 7138 - DNA, 69 bp, Homo sapiens
ttgagctttaagccttcaagtttcctttttattcttgacccctagacatttcctttgcttgtggactcg

SEQ ID NO: 7139 - DNA, 66 bp, Homo sapiens
tcaagtttcctttttattcttgacccctagacatttcctttgcttgtggactcgggtatttgtttt

SEQ ID NO: 7140 - DNA, 66 bp, Homo sapiens
ctttttattcttgacccctagacatttcctttgcttgtggactcgggtatttgtttttaggtaata

SEQ ID NO: 7141 - DNA, 65 bp, Homo sapiens
attcttgacccctagacatttcctttgcttgtggactcgggtatttgtttttaggtaatattttt

SEQ ID NO: 7142 - DNA, 68 bp, Homo sapiens
gacatttcctttgcttgtggactcgggtatttgtttttaggtaatattttttttccctatgacacagc

SEQ ID NO: 7143 - DNA, 68 bp, Homo sapiens
tcctttgcttgtggactcgggtatttgtttttaggtaatattttttttccctatgacacagccctcag

SEQ ID NO: 7144 - DNA, 71 bp, Homo sapiens
agatcctgagaacatgtgccctcatttttaggtaattttaattaggaagggttttaggttgtctgatctgc

SEQ ID NO: 7145 - DNA, 68 bp, Homo sapiens
agaacatgtgccctcatttttaggtaattttaattaggaagggttttaggttgtctgatctgccttgt

SEQ ID NO: 7146 - DNA, 69 bp, Homo sapiens
tgccctcatttttaggtaattttaattaggaagggttttaggttgtctgatctgccttgttgctagaaa

SEQ ID NO: 7147 - DNA, 69 bp, Homo sapiens
ggtaattttaattaggaagggttttaggttgtctgatctgccttgttgctagaaacagaaattctccta

SEQ ID NO: 7148 - DNA, 71 bp, Homo sapiens
aagggttttaggttgtctgatctgccttgttgctagaaacagaaattctcctattgattgatttttcaaac

SEQ ID NO: 7149 - DNA, 77 bp, Homo sapiens
tctgatctgccttgttgctagaaacagaaattctcctattgattgatttttcaaaccacttcttagtggcctctaca

SEQ ID NO: 7150 - DNA, 72 bp, Homo sapiens
cttgttgctagaaacagaaattctcctattgattgatttttcaaaccacttcttagtggcctctacaactac

SEQ ID NO: 7151 - DNA, 73 bp, Homo sapiens
tagaaacagaaattctcctattgattgatttttcaaaccacttcttagtggcctctacaactactccagtcag

SEQ ID NO: 7152 - DNA, 72 bp, Homo sapiens
aaattctcctattgattgatttttcaaaccacttcttagtggcctctacaactactccagtcaggtcaagaa

SEQ ID NO: 7153 - DNA, 77 bp, Homo sapiens
gattgatttttcaaaccacttcttagtggcctctacaactactccagtcaggtcaagaatggctctcacattgccaa

SEQ ID NO: 7154 - DNA, 76 bp, Homo sapiens
attgatttttcaaaccacttcttagtggcctctacaactactccagtcaggtcaagaatggctctcacattgccaa

SEQ ID NO: 7155 - DNA, 76 bp, Homo sapiens
atttttcaaaccacttcttagtggcctctacaactactccagtcaggtcaagaatggctctcacattgccaagtca

SEQ ID NO: 7156 - DNA, 76 bp, Homo sapiens
accacttcttagtggcctctacaactactccagtcaggtcaagaatggctctcacattgccaagtcagtgggtatt

SEQ ID NO: 7157 - DNA, 76 bp, Homo sapiens
ttagtggcctctacaactactccagtcaggtcaagaatggctctcacattgccaagtcagtgggtatttttagtct

SEQ ID NO: 7158 - DNA, 80 bp, Homo sapiens
tctacaactactccagtcaggtcaagaatggctctcacattgccaagtcagtgggtatttttagtcttcatcttagatga

SEQ ID NO: 7159 - DNA, 78 bp, Homo sapiens
tactccagtcaggtcaagaatggctctcacattgccaagtcagtgggtatttttagtcttcatcttagatgaccttta

SEQ ID NO: 7160 - DNA, 79 bp, Homo sapiens
agtcaggtcaagaatggctctcacattgccaagtcagtgggtatttttagtcttcatcttagatgacctttatgcacat

SEQ ID NO: 7161 - DNA, 78 bp, Homo sapiens
aggtcaagaatggctctcacattgccaagtcagtgggtatttttagtcttcatcttagatgacctttatgcacatttg

SEQ ID NO: 7162 - DNA, 77 bp, Homo sapiens
aagaatggctctcacattgccaagtcagtgggtatttttagtcttcatcttagatgacctttatgcacatttgtctt

SEQ ID NO: 7163 - DNA, 78 bp, Homo sapiens
tctcacattgccaagtcagtgggtatttttagtcttcatcttagatgacctttatgcacatttgtctttgtctaggaa

SEQ ID NO: 7164 - DNA, 73 bp, Homo sapiens
aagtcagtgggtatttttagtcttcatcttagatgacctttatgcacatttgtctttgtctaggaacttctgt

SEQ ID NO: 7165 - DNA, 74 bp, Homo sapiens
tgggtatttttagtcttcatcttagatgacctttatgcacatttgtctttgtctaggaacttctgttggaaaca

SEQ ID NO: 7166 - DNA, 74 bp, Homo sapiens
atcttagatgacctttatgcacatttgtctttgtctaggaacttctgttggaaacatcttctattttaatgtta

SEQ ID NO: 7167 - DNA, 70 bp, Homo sapiens
acctttatgcacatttgtctttgtctaggaacttctgttggaaacatcttctattttaatgttattttaa

SEQ ID NO: 7168 - DNA, 66 bp, Homo sapiens
acatttgtctttgtctaggaacttctgttggaaacatcttctattttaatgttattttaaattttt

SEQ ID NO: 7169 - DNA, 70 bp, Homo sapiens
tttaaatttttttgcttttgtaacattatgcttagcatgtgtgtccaactctttgacaatttctttttag

SEQ ID NO: 7170 - DNA, 73 bp, Homo sapiens
tttgcttttgtaacattatgcttagcatgtgtgtccaactctttgacaatttctttttagttttctggtggct

SEQ ID NO: 7171 - DNA, 69 bp, Homo sapiens
cttagcatgtgtgtccaactctttgacaatttctttttagttttctggtggcttccctttatccaaatt

SEQ ID NO: 7172 - DNA, 69 bp, Homo sapiens
catgtgtgtccaactctttgacaatttctttttagttttctggtggcttccctttatccaaatttagta

SEQ ID NO: 7173 - DNA, 66 bp, Homo sapiens
ctttgacaatttctttttagttttctggtggcttccctttatccaaatttagtattgaaattcctc

SEQ ID NO: 7174 - DNA, 68 bp, Homo sapiens
ttctttttagttttctggtggcttccctttatccaaatttagtattgaaattcctcgagccgctgctt

SEQ ID NO: 7175 - DNA, 70 bp, Homo sapiens
tttagttttctggtggcttccctttatccaaatttagtattgaaattcctcgagccgctgcttttctcac

SEQ ID NO: 7176 - DNA, 74 bp, Homo sapiens
gcttccctttatccaaatttagtattgaaattcctcgagccgctgcttttctcactccataattctggccagaa

SEQ ID NO: 7177 - DNA, 74 bp, Homo sapiens
tttatccaaatttagtattgaaattcctcgagccgctgcttttctcactccataattctggccagaatttggta

SEQ ID NO: 7178 - DNA, 72 bp, Homo sapiens
cgagccgctgcttttctcactccataattctggccagaatttggtacttaaaatattttgtctaaaatatta

SEQ ID NO: 7179 - DNA, 72 bp, Homo sapiens
ttctcactccataattctggccagaatttggtacttaaaatattttgtctaaaatattacaatagctactta

SEQ ID NO: 7180 - DNA, 72 bp, Homo sapiens
cataattctggccagaatttggtacttaaaatattttgtctaaaatattacaatagctacttaagtcatctc

SEQ ID NO: 7181 - DNA, 72 bp, Homo sapiens
tggccagaatttggtacttaaaatattttgtctaaaatattacaatagctacttaagtcatctccctgactc

SEQ ID NO: 7182 - DNA, 73 bp, Homo sapiens
aaatattttgtctaaaatattacaatagctacttaagtcatctccctgactccactctgttgtctttcagggc

SEQ ID NO: 7183 - DNA, 75 bp, Homo sapiens
aaaatattacaatagctacttaagtcatctccctgactccactctgttgtctttcagggcgtcgtccacactgta

SEQ ID NO: 7184 - DNA, 78 bp, Homo sapiens
tacaatagctacttaagtcatctccctgactccactctgttgtctttcagggcgtcgtccacactgtagccaaagtga

SEQ ID NO: 7185 - DNA, 77 bp, Homo sapiens
tctgttgtctttcagggcgtcgtccacactgtagccaaagtgatcttataaaaacataattctaatcatggcactct

SEQ ID NO: 7186 - DNA, 77 bp, Homo sapiens
tttcagggcgtcgtccacactgtagccaaagtgatcttataaaaacataattctaatcatggcactcttctgcttaa

SEQ ID NO: 7187 - DNA, 75 bp, Homo sapiens
gtcgtccacactgtagccaaagtgatcttataaaaacataattctaatcatggcactcttctgcttaaaaatgtt

SEQ ID NO: 7188 - DNA, 75 bp, Homo sapiens
cactgtagccaaagtgatcttataaaaacataattctaatcatggcactcttctgcttaaaaatgttttaatggc

SEQ ID NO: 7189 - DNA, 72 bp, Homo sapiens
tgatcttataaaaacataattctaatcatggcactcttctgcttaaaaatgttttaatggctttccgttagg

SEQ ID NO: 7190 - DNA, 68 bp, Homo sapiens
aaaacataattctaatcatggcactcttctgcttaaaaatgttttaatggctttccgttaggttaaaa

SEQ ID NO: 7191 - DNA, 68 bp, Homo sapiens
tctaatcatggcactcttctgcttaaaaatgttttaatggctttccgttaggttaaaatttaaaagtc

SEQ ID NO: 7192 - DNA, 66 bp, Homo sapiens
tcatggcactcttctgcttaaaaatgttttaatggctttccgttaggttaaaatttaaaagtcctt

SEQ ID NO: 7193 - DNA, 65 bp, Homo sapiens
gcttaaaaatgttttaatggctttccgttaggttaaaatttaaaagtcctttgtagcctgtgaga

SEQ ID NO: 7194 - DNA, 67 bp, Homo sapiens
gttttaatggctttccgttaggttaaaatttaaaagtcctttgtagcctgtgagactctacatgagt

SEQ ID NO: 7195 - DNA, 69 bp, Homo sapiens
aatggctttccgttaggttaaaatttaaaagtcctttgtagcctgtgagactctacatgagttgactcc

SEQ ID NO: 7196 - DNA, 73 bp, Homo sapiens
ttaggttaaaatttaaaagtcctttgtagcctgtgagactctacatgagttgactccctagcttcatctttga

SEQ ID NO: 7197 - DNA, 75 bp, Homo sapiens
aaatttaaaagtcctttgtagcctgtgagactctacatgagttgactccctagcttcatctttgagcatcttatt

SEQ ID NO: 7198 - DNA, 79 bp, Homo sapiens
tgagactctacatgagttgactccctagcttcatctttgagcatcttatttctttacttattataccatcagttagagt

SEQ ID NO: 7199 - DNA, 78 bp, Homo sapiens
tacatgagttgactccctagcttcatctttgagcatcttatttctttacttattataccatcagttagagttgattgt

SEQ ID NO: 7200 - DNA, 77 bp, Homo sapiens
gttgactccctagcttcatctttgagcatcttatttctttacttattataccatcagttagagttgattgttatata

SEQ ID NO: 7201 - DNA, 79 bp, Homo sapiens
gcttcatctttgagcatcttatttctttacttattataccatcagttagagttgattgttatataatccacagaagtga

SEQ ID NO: 7202 - DNA, 79 bp, Homo sapiens
gagcatcttatttctttacttattataccatcagttagagttgattgttatataatccacagaagtgaattctgtctga

SEQ ID NO: 7203 - DNA, 77 bp, Homo sapiens
tctttacttattataccatcagttagagttgattgttatataatccacagaagtgaattctgtctgatttaagcaaa

SEQ ID NO: 7204 - DNA, 75 bp, Homo sapiens
acttattataccatcagttagagttgattgttatataatccacagaagtgaattctgtctgatttaagcaaaaaa

SEQ ID NO: 7205 - DNA, 65 bp, Homo sapiens
aaaaaaagagggagaatttattaggtgtgtatagttacagttaatttagggaattaaaagacaga

SEQ ID NO: 7206 - DNA, 68 bp, Homo sapiens
ggagaatttattaggtgtgtatagttacagttaatttagggaattaaaagacagaaataggccgggca

SEQ ID NO: 7207 - DNA, 64 bp, Homo sapiens
caaaaaccaaaaaaagtttgttgatgattttttcctactttcgcatgtatttcaaattttaaaa

SEQ ID NO: 7208 - DNA, 68 bp, Homo sapiens
aaaaagtttgttgatgattttttcctactttcgcatgtatttcaaattttaaaaatgattgtgttcaa

SEQ ID NO: 7209 - DNA, 77 bp, Homo sapiens
tgttgatgattttttcctactttcgcatgtatttcaaattttaaaaatgattgtgttcaattgtatagatcatgtca

SEQ ID NO: 7210 - DNA, 75 bp, Homo sapiens
ttttcctactttcgcatgtatttcaaattttaaaaatgattgtgttcaattgtatagatcatgtcaaaagaagca

SEQ ID NO: 7211 - DNA, 79 bp, Homo sapiens
ttcgcatgtatttcaaattttaaaaatgattgtgttcaattgtatagatcatgtcaaaagaagcaatacataatgagta

SEQ ID NO: 7212 - DNA, 77 bp, Homo sapiens
aaaaatgattgtgttcaattgtatagatcatgtcaaaagaagcaatacataatgagtaaaaatgttcatctttaata

SEQ ID NO: 7213 - DNA, 79 bp, Homo sapiens
tgattgtgttcaattgtatagatcatgtcaaaagaagcaatacataatgagtaaaaatgttcatctttaataaagcaaa

SEQ ID NO: 7214 - DNA, 77 bp, Homo sapiens
tgtatagatcatgtcaaaagaagcaatacataatgagtaaaaatgttcatctttaataaagcaaaaatagagcaacc

SEQ ID NO: 7215 - DNA, 76 bp, Homo sapiens
gatcatgtcaaaagaagcaatacataatgagtaaaaatgttcatctttaataaagcaaaaatagagcaacccacca

SEQ ID NO: 7216 - DNA, 72 bp, Homo sapiens
agcaatacataatgagtaaaaatgttcatctttaataaagcaaaaatagagcaacccaccaaatagttaaca

SEQ ID NO: 7217 - DNA, 70 bp, Homo sapiens
aatgagtaaaaatgttcatctttaataaagcaaaaatagagcaacccaccaaatagttaacacttgcctg

SEQ ID NO: 7218 - DNA, 70 bp, Homo sapiens
atctttaataaagcaaaaatagagcaacccaccaaatagttaacacttgcctggagagatttaggaacac

SEQ ID NO: 7219 - DNA, 71 bp, Homo sapiens
aaagcaaaaatagagcaacccaccaaatagttaacacttgcctggagagatttaggaacaccagtattcca

SEQ ID NO: 7220 - DNA, 77 bp, Homo sapiens
atagagcaacccaccaaatagttaacacttgcctggagagatttaggaacaccagtattccactgagattgctgaga

SEQ ID NO: 7221 - DNA, 76 bp, Homo sapiens
aaatagttaacacttgcctggagagatttaggaacaccagtattccactgagattgctgagagtctcaggaaagaa

SEQ ID NO: 7222 - DNA, 77 bp, Homo sapiens
ttaacacttgcctggagagatttaggaacaccagtattccactgagattgctgagagtctcaggaaagaaaggtcta

SEQ ID NO: 7223 - DNA, 76 bp, Homo sapiens
tgcctggagagatttaggaacaccagtattccactgagattgctgagagtctcaggaaagaaaggtctaacttaaa

SEQ ID NO: 7224 - DNA, 75 bp, Homo sapiens
gagagatttaggaacaccagtattccactgagattgctgagagtctcaggaaagaaaggtctaacttaaattgta

SEQ ID NO: 7225 - DNA, 72 bp, Homo sapiens
accagtattccactgagattgctgagagtctcaggaaagaaaggtctaacttaaattgtattttaccatttc

SEQ ID NO: 7226 - DNA, 75 bp, Homo sapiens
ttccactgagattgctgagagtctcaggaaagaaaggtctaacttaaattgtattttaccatttctgagtaatga

SEQ ID NO: 7227 - DNA, 73 bp, Homo sapiens
agattgctgagagtctcaggaaagaaaggtctaacttaaattgtattttaccatttctgagtaatgaatggat

SEQ ID NO: 7228 - DNA, 72 bp, Homo sapiens
gctgagagtctcaggaaagaaaggtctaacttaaattgtattttaccatttctgagtaatgaatggattaat

SEQ ID NO: 7229 - DNA, 72 bp, Homo sapiens
tcaggaaagaaaggtctaacttaaattgtattttaccatttctgagtaatgaatggattaattctatggaga

SEQ ID NO: 7230 - DNA, 72 bp, Homo sapiens
agaaaggtctaacttaaattgtattttaccatttctgagtaatgaatggattaattctatggagatatattc

SEQ ID NO: 7231 - DNA, 74 bp, Homo sapiens
ttaaattgtattttaccatttctgagtaatgaatggattaattctatggagatatattctacagtctagaaagg

SEQ ID NO: 7232 - DNA, 75 bp, Homo sapiens
gtattttaccatttctgagtaatgaatggattaattctatggagatatattctacagtctagaaagggaaagcca

SEQ ID NO: 7233 - DNA, 74 bp, Homo sapiens
gaatggattaattctatggagatatattctacagtctagaaagggaaagccaaagataaagactgttgtattta

SEQ ID NO: 7234 - DNA, 74 bp, Homo sapiens
gattaattctatggagatatattctacagtctagaaagggaaagccaaagataaagactgttgtatttattcat

SEQ ID NO: 7235 - DNA, 73 bp, Homo sapiens
ggagatatattctacagtctagaaagggaaagccaaagataaagactgttgtatttattcattagttgccaaa

SEQ ID NO: 7236 - DNA, 70 bp, Homo sapiens
tctacagtctagaaagggaaagccaaagataaagactgttgtatttattcattagttgccaaagggaaag

SEQ ID NO: 7237 - DNA, 68 bp, Homo sapiens
ctagaaagggaaagccaaagataaagactgttgtatttattcattagttgccaaagggaaagggaaga

SEQ ID NO: 7238 - DNA, 69 bp, Homo sapiens
ccaaagataaagactgttgtatttattcattagttgccaaagggaaagggaagaccgattaacaacaga

SEQ ID NO: 7239 - DNA, 69 bp, Homo sapiens
gtatttattcattagttgccaaagggaaagggaagaccgattaacaacagaagtgtttctgttattgtg

SEQ ID NO: 7240 - DNA, 68 bp, Homo sapiens
ccaaagggaaagggaagaccgattaacaacagaagtgtttctgttattgtgtatattatcctgtttat

SEQ ID NO: 7241 - DNA, 72 bp, Homo sapiens
gggaagaccgattaacaacagaagtgtttctgttattgtgtatattatcctgtttattttaaagatgcttgc

SEQ ID NO: 7242 - DNA, 73 bp, Homo sapiens
gattaacaacagaagtgtttctgttattgtgtatattatcctgtttattttaaagatgcttgcttatttacat

SEQ ID NO: 7243 - DNA, 72 bp, Homo sapiens
gtgtttctgttattgtgtatattatcctgtttattttaaagatgcttgcttatttacattttcttttatcgc

SEQ ID NO: 7244 - DNA, 73 bp, Homo sapiens
ctgttattgtgtatattatcctgtttattttaaagatgcttgcttatttacattttcttttatcgctacataa

SEQ ID NO: 7245 - DNA, 71 bp, Homo sapiens
tattatcctgtttattttaaagatgcttgcttatttacattttcttttatcgctacataataatttaccta

SEQ ID NO: 7246 - DNA, 69 bp, Homo sapiens
tttattttaaagatgcttgcttatttacattttcttttatcgctacataataatttacctatttatggg

SEQ ID NO: 7247 - DNA, 71 bp, Homo sapiens
gatgcttgcttatttacattttcttttatcgctacataataatttacctatttatgggggacgtttgagtg

SEQ ID NO: 7248 - DNA, 68 bp, Homo sapiens
gcttatttacattttcttttatcgctacataataatttacctatttatgggggacgtttgagtgtttg

SEQ ID NO: 7249 - DNA, 72 bp, Homo sapiens
cattttcttttatcgctacataataatttacctatttatgggggacgtttgagtgtttgttacatgcataga

SEQ ID NO: 7250 - DNA, 76 bp, Homo sapiens
atcgctacataataatttacctatttatgggggacgtttgagtgtttgttacatgcatagaatgtatactgagcaa

SEQ ID NO: 7251 - DNA, 78 bp, Homo sapiens
acgtttgagtgtttgttacatgcatagaatgtatactgagcaagtcagggtatgtggggtatccatcacctcgaatgt

SEQ ID NO: 7252 - DNA, 79 bp, Homo sapiens
agtgtttgttacatgcatagaatgtatactgagcaagtcagggtatgtggggtatccatcacctcgaatgtttatcatt

SEQ ID NO: 7253 - DNA, 76 bp, Homo sapiens
aagtcagggtatgtggggtatccatcacctcgaatgtttatcatttctgtgtgttggcaacatttcaagtcttctc

SEQ ID NO: 7254 - DNA, 76 bp, Homo sapiens
agggtatgtggggtatccatcacctcgaatgtttatcatttctgtgtgttggcaacatttcaagtcttctcttcta

SEQ ID NO: 7255 - DNA, 78 bp, Homo sapiens
tatccatcacctcgaatgtttatcatttctgtgtgttggcaacatttcaagtcttctcttctaccttcattgaaatat

SEQ ID NO: 7256 - DNA, 76 bp, Homo sapiens
acctcgaatgtttatcatttctgtgtgttggcaacatttcaagtcttctcttctaccttcattgaaatattcaatg

SEQ ID NO: 7257 - DNA, 80 bp, Homo sapiens
tcatttctgtgtgttggcaacatttcaagtcttctcttctaccttcattgaaatattcaatgtattgttgctaatgatag

SEQ ID NO: 7258 - DNA, 79 bp, Homo sapiens
tgtgttggcaacatttcaagtcttctcttctaccttcattgaaatattcaatgtattgttgctaatgatagtcacccta

SEQ ID NO: 7259 - DNA, 76 bp, Homo sapiens
aacatttcaagtcttctcttctaccttcattgaaatattcaatgtattgttgctaatgatagtcaccctagccttc

SEQ ID NO: 7260 - DNA, 75 bp, Homo sapiens
cttctaccttcattgaaatattcaatgtattgttgctaatgatagtcaccctagccttctgtcgaacattaaaac

SEQ ID NO: 7261 - DNA, 75 bp, Homo sapiens
gaaatattcaatgtattgttgctaatgatagtcaccctagccttctgtcgaacattaaaacttacttattctatc

SEQ ID NO: 7262 - DNA, 75 bp, Homo sapiens
ttcaatgtattgttgctaatgatagtcaccctagccttctgtcgaacattaaaacttacttattctatctaactg

SEQ ID NO: 7263 - DNA, 75 bp, Homo sapiens
tgttgctaatgatagtcaccctagccttctgtcgaacattaaaacttacttattctatctaactgtatgtttgta

SEQ ID NO: 7264 - DNA, 73 bp, Homo sapiens
ctatctaactgtatgtttgtacccattcaacaacctttcttcatttctccctcctaccctcacactcttgcca

SEQ ID NO: 7265 - DNA, 73 bp, Homo sapiens
tatgtttgtacccattcaacaacctttcttcatttctccctcctaccctcacactcttgccagcctctggtat

SEQ ID NO: 7266 - DNA, 72 bp, Homo sapiens
tacccattcaacaacctttcttcatttctccctcctaccctcacactcttgccagcctctggtatttgttat

SEQ ID NO: 7267 - DNA, 72 bp, Homo sapiens
aacaacctttcttcatttctccctcctaccctcacactcttgccagcctctggtatttgttattctattctc

SEQ ID NO: 7268 - DNA, 79 bp, Homo sapiens
tcatttctccctcctaccctcacactcttgccagcctctggtatttgttattctattctctgtctccatgacatcaagt

SEQ ID NO: 7269 - DNA, 78 bp, Homo sapiens
tcctaccctcacactcttgccagcctctggtatttgttattctattctctgtctccatgacatcaagtttttcaggtc

SEQ ID NO: 7270 - DNA, 79 bp, Homo sapiens
acactcttgccagcctctggtatttgttattctattctctgtctccatgacatcaagtttttcaggtcttacatatgag

SEQ ID NO: 7271 - DNA, 82 bp, Homo sapiens
cagcctctggtatttgttattctattctctgtctccatgacatcaagtttttcaggtcttacatatgagttgagcacatgtg

SEQ ID NO: 7272 - DNA, 80 bp, Homo sapiens
tggtatttgttattctattctctgtctccatgacatcaagtttttcaggtcttacatatgagttgagcacatgtggtatt

SEQ ID NO: 7273 - DNA, 80 bp, Homo sapiens
gttattctattctctgtctccatgacatcaagtttttcaggtcttacatatgagttgagcacatgtggtatttgtctttc

SEQ ID NO: 7274 - DNA, 79 bp, Homo sapiens
ttccatatctttgcttttgtgaagaaatgctatgataaatatgtgagtgcaggtaaccctttgatatgctcatttcttt

SEQ ID NO: 7275 - DNA, 80 bp, Homo sapiens
tccatatctttgcttttgtgaagaaatgctatgataaatatgtgagtgcaggtaaccctttgatatgctcatttctttta

SEQ ID NO: 7276 - DNA, 77 bp, Homo sapiens
ttgcttttgtgaagaaatgctatgataaatatgtgagtgcaggtaaccctttgatatgctcatttcttttactttgg

SEQ ID NO: 7277 - DNA, 76 bp, Homo sapiens
ttgtgaagaaatgctatgataaatatgtgagtgcaggtaaccctttgatatgctcatttcttttactttggtttaa

SEQ ID NO: 7278 - DNA, 75 bp, Homo sapiens
gctatgataaatatgtgagtgcaggtaaccctttgatatgctcatttcttttactttggtttaaatacctgatat

SEQ ID NO: 7279 - DNA, 75 bp, Homo sapiens
tatgtgagtgcaggtaaccctttgatatgctcatttcttttactttggtttaaatacctgatattgggattgcta

SEQ ID NO: 7280 - DNA, 74 bp, Homo sapiens
caggtaaccctttgatatgctcatttcttttactttggtttaaatacctgatattgggattgctagatcatgtg

SEQ ID NO: 7281 - DNA, 74 bp, Homo sapiens
ccctttgatatgctcatttcttttactttggtttaaatacctgatattgggattgctagatcatgtggaagttg

SEQ ID NO: 7282 - DNA, 72 bp, Homo sapiens
gctcatttcttttactttggtttaaatacctgatattgggattgctagatcatgtggaagttgtatttttag

SEQ ID NO: 7283 - DNA, 68 bp, Homo sapiens
ttttactttggtttaaatacctgatattgggattgctagatcatgtggaagttgtatttttagttttt

SEQ ID NO: 7284 - DNA, 83 bp, Homo sapiens
tctccacatcctcagcaacatctgtcatttttgtctttctaatcatagccattctaactggagtaataggatatctcattgtg

SEQ ID NO: 7285 - DNA, 77 bp, Homo sapiens
ttccttgtgtattctggatgttagtctgttgtcaggtgaatactttgcagatattttctcctattcaacagtttgtc

SEQ ID NO: 7286 - DNA, 78 bp, Homo sapiens
tgtgtattctggatgttagtctgttgtcaggtgaatactttgcagatattttctcctattcaacagtttgtctccctc

SEQ ID NO: 7287 - DNA, 77 bp, Homo sapiens
ttagtctgttgtcaggtgaatactttgcagatattttctcctattcaacagtttgtctccctcctctgttgattatg

SEQ ID NO: 7288 - DNA, 76 bp, Homo sapiens
tgttgtcaggtgaatactttgcagatattttctcctattcaacagtttgtctccctcctctgttgattatgtcttt

SEQ ID NO: 7289 - DNA, 73 bp, Homo sapiens
tttgctgtgcaggaggtttttagtttaatgtagtcccattttgtctatttgtgattttgatgttttagccata

SEQ ID NO: 7290 - DNA, 71 bp, Homo sapiens
tgtgcaggaggtttttagtttaatgtagtcccattttgtctatttgtgattttgatgttttagccataaaa

SEQ ID NO: 7291 - DNA, 69 bp, Homo sapiens
gtttttagtttaatgtagtcccattttgtctatttgtgattttgatgttttagccataaaatctttgcc

SEQ ID NO: 7292 - DNA, 70 bp, Homo sapiens
cttatgtttaagtctgtaatccatcttgggttgacttttgtgtatggttagaaatggggtacagttctat

SEQ ID NO: 7293 - DNA, 72 bp, Homo sapiens
aagtctgtaatccatcttgggttgacttttgtgtatggttagaaatggggtacagttctattcttttgcata

SEQ ID NO: 7294 - DNA, 73 bp, Homo sapiens
ccatcttgggttgacttttgtgtatggttagaaatggggtacagttctattcttttgcatacagatatccaat

SEQ ID NO: 7295 - DNA, 72 bp, Homo sapiens
ttgggttgacttttgtgtatggttagaaatggggtacagttctattcttttgcatacagatatccaattttc

SEQ ID NO: 7296 - DNA, 75 bp, Homo sapiens
gctttgttcttttgctcaggattacttcagctattctgattctttcttggctccatacaaatgttagaattgttt

SEQ ID NO: 7297 - DNA, 74 bp, Homo sapiens
gttcttttgctcaggattacttcagctattctgattctttcttggctccatacaaatgttagaattgttttttc

SEQ ID NO: 7298 - DNA, 70 bp, Homo sapiens
tttttttttaaacactatagtaaacaggactgctgccttgatttctttttttgctatttcattattgata

SEQ ID NO: 7299 - DNA, 74 bp, Homo sapiens
aacactatagtaaacaggactgctgccttgatttctttttttgctatttcattattgatatatagaaacagtac

SEQ ID NO: 7300 - DNA, 74 bp, Homo sapiens
tatagtaaacaggactgctgccttgatttctttttttgctatttcattattgatatatagaaacagtactggtt

SEQ ID NO: 7301 - DNA, 75 bp, Homo sapiens
ggactgctgccttgatttctttttttgctatttcattattgatatatagaaacagtactggtttttgtatgttga

SEQ ID NO: 7302 - DNA, 67 bp, Homo sapiens
ttttgtatcctccaaatttactgaatttatcagttcttatagtcttttggtggagtatttaagtttt

SEQ ID NO: 7303 - DNA, 72 bp, Homo sapiens
ccaaatttactgaatttatcagttcttatagtcttttggtggagtatttaagtttttctgcatataagatca

SEQ ID NO: 7304 - DNA, 75 bp, Homo sapiens
gaatttatcagttcttatagtcttttggtggagtatttaagtttttctgcatataagatcatgtaatctgcaaag

SEQ ID NO: 7305 - DNA, 76 bp, Homo sapiens
tcagttcttatagtcttttggtggagtatttaagtttttctgcatataagatcatgtaatctgcaaagtaatgaat

SEQ ID NO: 7306 - DNA, 74 bp, Homo sapiens
tagtcttttggtggagtatttaagtttttctgcatataagatcatgtaatctgcaaagtaatgaattttacttc

SEQ ID NO: 7307 - DNA, 72 bp, Homo sapiens
cttttggtggagtatttaagtttttctgcatataagatcatgtaatctgcaaagtaatgaattttacttccg

SEQ ID NO: 7308 - DNA, 75 bp, Homo sapiens
tggtggagtatttaagtttttctgcatataagatcatgtaatctgcaaagtaatgaattttacttccgtatggaa

SEQ ID NO: 7309 - DNA, 77 bp, Homo sapiens
taagtttttctgcatataagatcatgtaatctgcaaagtaatgaattttacttccgtatggaagtcaacttggatgc

SEQ ID NO: 7310 - DNA, 78 bp, Homo sapiens
ttctgcatataagatcatgtaatctgcaaagtaatgaattttacttccgtatggaagtcaacttggatgcctgttatt

SEQ ID NO: 7311 - DNA, 77 bp, Homo sapiens
catataagatcatgtaatctgcaaagtaatgaattttacttccgtatggaagtcaacttggatgcctgttatttctg

SEQ ID NO: 7312 - DNA, 77 bp, Homo sapiens
taatctgcaaagtaatgaattttacttccgtatggaagtcaacttggatgcctgttatttctgttgccagattgctc

SEQ ID NO: 7313 - DNA, 76 bp, Homo sapiens
ttttacttccgtatggaagtcaacttggatgcctgttatttctgttgccagattgctctggttagaattgtcaata

SEQ ID NO: 7314 - DNA, 79 bp, Homo sapiens
gtatggaagtcaacttggatgcctgttatttctgttgccagattgctctggttagaattgtcaatattatgttgaataa

SEQ ID NO: 7315 - DNA, 78 bp, Homo sapiens
aacttggatgcctgttatttctgttgccagattgctctggttagaattgtcaatattatgttgaataagagttgtgaa

SEQ ID NO: 7316 - DNA, 75 bp, Homo sapiens
ttgccagattgctctggttagaattgtcaatattatgttgaataagagttgtgaaggtgggtgttcttgttttgt

SEQ ID NO: 7317 - DNA, 71 bp, Homo sapiens
gctctggttagaattgtcaatattatgttgaataagagttgtgaaggtgggtgttcttgttttgttttagg

SEQ ID NO: 7318 - DNA, 66 bp, Homo sapiens
attatgttgaataagagttgtgaaggtgggtgttcttgttttgttttaggtcttagaggaaaaatt

SEQ ID NO: 7319 - DNA, 66 bp, Homo sapiens
gttgaataagagttgtgaaggtgggtgttcttgttttgttttaggtcttagaggaaaaattttagc

SEQ ID NO: 7320 - DNA, 64 bp, Homo sapiens
gttgtgaaggtgggtgttcttgttttgttttaggtcttagaggaaaaattttagctttttcctg

SEQ ID NO: 7321 - DNA, 66 bp, Homo sapiens
tgggtgttcttgttttgttttaggtcttagaggaaaaattttagctttttcctgttgagtataatg

SEQ ID NO: 7322 - DNA, 69 bp, Homo sapiens
ttgttttaggtcttagaggaaaaattttagctttttcctgttgagtataatgttagctgtgagtttgtc

SEQ ID NO: 7323 - DNA, 71 bp, Homo sapiens
gtcttagaggaaaaattttagctttttcctgttgagtataatgttagctgtgagtttgtcctatatggcct

SEQ ID NO: 7324 - DNA, 71 bp, Homo sapiens
gaggaaaaattttagctttttcctgttgagtataatgttagctgtgagtttgtcctatatggcctttatta

SEQ ID NO: 7325 - DNA, 75 bp, Homo sapiens
tgttagctgtgagtttgtcctatatggcctttattattttgcagaatggtccttctgtgcttagtttgagagttt

SEQ ID NO: 7326 - DNA, 73 bp, Homo sapiens
ctgtgagtttgtcctatatggcctttattattttgcagaatggtccttctgtgcttagtttgagagtttttaa

SEQ ID NO: 7327 - DNA, 76 bp, Homo sapiens
ctatatggcctttattattttgcagaatggtccttctgtgcttagtttgagagtttttaatatgaagcgatgttga

SEQ ID NO: 7328 - DNA, 73 bp, Homo sapiens
ggcctttattattttgcagaatggtccttctgtgcttagtttgagagtttttaatatgaagcgatgttgaatt

SEQ ID NO: 7329 - DNA, 79 bp, Homo sapiens
gatgatcatatgggttttgtcctttattctattgatgtgatacctattatgttaaaccatccttgcattccaagtgtga

SEQ ID NO: 7330 - DNA, 75 bp, Homo sapiens
atatgggttttgtcctttattctattgatgtgatacctattatgttaaaccatccttgcattccaagtgtgagtc

SEQ ID NO: 7331 - DNA, 79 bp, Homo sapiens
ttgtcctttattctattgatgtgatacctattatgttaaaccatccttgcattccaagtgtgagtcccacttgatcatg

SEQ ID NO: 7332 - DNA, 73 bp, Homo sapiens
ttgatcatggtgtattaccttttgatgttttgttgaattcggtttgctagcattttgttggggatttttgcat

SEQ ID NO: 7333 - DNA, 74 bp, Homo sapiens
ttttgcattgatgtttcttggggatattgacctgtagtttccttttttgatgttgttgtatccttgactggtca

SEQ ID NO: 7334 - DNA, 72 bp, Homo sapiens
attgatgtttcttggggatattgacctgtagtttccttttttgatgttgttgtatccttgactggtcagggc

SEQ ID NO: 7335 - DNA, 72 bp, Homo sapiens
gggatattgacctgtagtttccttttttgatgttgttgtatccttgactggtcagggccttgtagaatgagt

SEQ ID NO: 7336 - DNA, 71 bp, Homo sapiens
attgacctgtagtttccttttttgatgttgttgtatccttgactggtcagggccttgtagaatgagttaag

SEQ ID NO: 7337 - DNA, 70 bp, Homo sapiens
tttccttttttgatgttgttgtatccttgactggtcagggccttgtagaatgagttaaggagaattccct

SEQ ID NO: 7338 - DNA, 71 bp, Homo sapiens
atgttgttgtatccttgactggtcagggccttgtagaatgagttaaggagaattcccttctcttggatttt

SEQ ID NO: 7339 - DNA, 72 bp, Homo sapiens
ttgtatccttgactggtcagggccttgtagaatgagttaaggagaattcccttctcttggatttttggaata

SEQ ID NO: 7340 - DNA, 77 bp, Homo sapiens
gaattcagcattgaatctatccagtcctaggcttttctttggttgggagacattttattactgattcagtctcatta

SEQ ID NO: 7341 - DNA, 76 bp, Homo sapiens
agcattgaatctatccagtcctaggcttttctttggttgggagacattttattactgattcagtctcattactcat

SEQ ID NO: 7342 - DNA, 75 bp, Homo sapiens
tctatccagtcctaggcttttctttggttgggagacattttattactgattcagtctcattactcattgttggtc

SEQ ID NO: 7343 - DNA, 71 bp, Homo sapiens
tgttcagggtttctgtttcttcctgattcagtctgggtaggttgtatgttttttggaattcatcaattttc

SEQ ID NO: 7344 - DNA, 71 bp, Homo sapiens
ggtttctgtttcttcctgattcagtctgggtaggttgtatgttttttggaattcatcaattttctctagat

SEQ ID NO: 7345 - DNA, 71 bp, Homo sapiens
cttcctgattcagtctgggtaggttgtatgttttttggaattcatcaattttctctagattttccaatttg

SEQ ID NO: 7346 - DNA, 73 bp, Homo sapiens
ctgattcagtctgggtaggttgtatgttttttggaattcatcaattttctctagattttccaatttgttagca

SEQ ID NO: 7347 - DNA, 72 bp, Homo sapiens
gtctgggtaggttgtatgttttttggaattcatcaattttctctagattttccaatttgttagcattcatac

SEQ ID NO: 7348 - DNA, 75 bp, Homo sapiens
ggttgtatgttttttggaattcatcaattttctctagattttccaatttgttagcattcatactattctctgctg

SEQ ID NO: 7349 - DNA, 76 bp, Homo sapiens
gttgtatgttttttggaattcatcaattttctctagattttccaatttgttagcattcatactattctctgctgtc

SEQ ID NO: 7350 - DNA, 77 bp, Homo sapiens
ttttggaattcatcaattttctctagattttccaatttgttagcattcatactattctctgctgtctttcatatttc

SEQ ID NO: 7351 - DNA, 79 bp, Homo sapiens
tggaattcatcaattttctctagattttccaatttgttagcattcatactattctctgctgtctttcatatttctgtgg

SEQ ID NO: 7352 - DNA, 79 bp, Homo sapiens
gaattcatcaattttctctagattttccaatttgttagcattcatactattctctgctgtctttcatatttctgtggta

SEQ ID NO: 7353 - DNA, 70 bp, Homo sapiens
gtctcctttttcaattttgattttgctgatttggttcttacctcttttttttgccttgtctagctagcag

SEQ ID NO: 7354 - DNA, 73 bp, Homo sapiens
tcaattttgattttgctgatttggttcttacctcttttttttgccttgtctagctagcagttcatcaattttg

SEQ ID NO: 7355 - DNA, 71 bp, Homo sapiens
gattttgctgatttggttcttacctcttttttttgccttgtctagctagcagttcatcaattttgtttacc

SEQ ID NO: 7356 - DNA, 70 bp, Homo sapiens
ctgatttggttcttacctcttttttttgccttgtctagctagcagttcatcaattttgtttaccttttga

SEQ ID NO: 7357 - DNA, 68 bp, Homo sapiens
cttacctcttttttttgccttgtctagctagcagttcatcaattttgtttaccttttgaagaaccaat

SEQ ID NO: 7358 - DNA, 72 bp, Homo sapiens
tttttgccttgtctagctagcagttcatcaattttgtttaccttttgaagaaccaatttttcatttcattga

SEQ ID NO: 7359 - DNA, 70 bp, Homo sapiens
ttgtctagctagcagttcatcaattttgtttaccttttgaagaaccaatttttcatttcattgatttttt

SEQ ID NO: 7360 - DNA, 72 bp, Homo sapiens
tttttgagagggagagggggtctctgtctaatcttcattatatcttttcttctgctgattttgggtttgatt

SEQ ID NO: 7361 - DNA, 70 bp, Homo sapiens
gattgtttatttgcagtctttctacttttttgatgtagatgtttactgctataaactttttagtgttgtt

SEQ ID NO: 7362 - DNA, 74 bp, Homo sapiens
ttgcagtctttctacttttttgatgtagatgtttactgctataaactttttagtgttgtttttgctgtatcaca

SEQ ID NO: 7363 - DNA, 71 bp, Homo sapiens
tctacttttttgatgtagatgtttactgctataaactttttagtgttgtttttgctgtatcacataggttt

SEQ ID NO: 7364 - DNA, 75 bp, Homo sapiens
tgatgtagatgtttactgctataaactttttagtgttgtttttgctgtatcacataggttttggcatgttgcgtt

SEQ ID NO: 7365 - DNA, 73 bp, Homo sapiens
gatgtttactgctataaactttttagtgttgtttttgctgtatcacataggttttggcatgttgcgtttccat

SEQ ID NO: 7366 - DNA, 71 bp, Homo sapiens
ataaactttttagtgttgtttttgctgtatcacataggttttggcatgttgcgtttccattttcatttgaa

SEQ ID NO: 7367 - DNA, 71 bp, Homo sapiens
ctttttagtgttgtttttgctgtatcacataggttttggcatgttgcgtttccattttcatttgaagaaat

SEQ ID NO: 7368 - DNA, 74 bp, Homo sapiens
tttgctgtatcacataggttttggcatgttgcgtttccattttcatttgaagaaatttttttatatccatctta

SEQ ID NO: 7369 - DNA, 72 bp, Homo sapiens
tatcacataggttttggcatgttgcgtttccattttcatttgaagaaatttttttatatccatcttaatttc

SEQ ID NO: 7370 - DNA, 73 bp, Homo sapiens
tccattttcatttgaagaaatttttttatatccatcttaatttcttcattggcacagtggtggattgtgttat

SEQ ID NO: 7371 - DNA, 72 bp, Homo sapiens
tcatttgaagaaatttttttatatccatcttaatttcttcattggcacagtggtggattgtgttattaaaaa

SEQ ID NO: 7372 - DNA, 74 bp, Homo sapiens
cattgtaaattgagaagattcttgatatgattttgatttttaaagatttgttttgtgtcctgacatacggtctg

SEQ ID NO: 7373 - DNA, 75 bp, Homo sapiens
attgagaagattcttgatatgattttgatttttaaagatttgttttgtgtcctgacatacggtctgtcctggaga

SEQ ID NO: 7374 - DNA, 77 bp, Homo sapiens
atttttaaagatttgttttgtgtcctgacatacggtctgtcctggagaatgttccatatgctgatgagagcagttgt

SEQ ID NO: 7375 - DNA, 79 bp, Homo sapiens
aagatttgttttgtgtcctgacatacggtctgtcctggagaatgttccatatgctgatgagagcagttgttggataaaa

SEQ ID NO: 7376 - DNA, 80 bp, Homo sapiens
tttgtgtcctgacatacggtctgtcctggagaatgttccatatgctgatgagagcagttgttggataaaatgttttgtaa

SEQ ID NO: 7377 - DNA, 73 bp, Homo sapiens
ggtccatttggtctaaagtctagttggagtccagtgttcgttttttgattttctgtgccagtgatctatctaa

SEQ ID NO: 7378 - DNA, 74 bp, Homo sapiens
atttggtctaaagtctagttggagtccagtgttcgttttttgattttctgtgccagtgatctatctaatgttga

SEQ ID NO: 7379 - DNA, 74 bp, Homo sapiens
aagtctagttggagtccagtgttcgttttttgattttctgtgccagtgatctatctaatgttgagagtgggttg

SEQ ID NO: 7380 - DNA, 77 bp, Homo sapiens
tccagtgttcgttttttgattttctgtgccagtgatctatctaatgttgagagtgggttgttgaagtctctcactat

SEQ ID NO: 7381 - DNA, 77 bp, Homo sapiens
ttcgttttttgattttctgtgccagtgatctatctaatgttgagagtgggttgttgaagtctctcactattattgta

SEQ ID NO: 7382 - DNA, 78 bp, Homo sapiens
attttctgtgccagtgatctatctaatgttgagagtgggttgttgaagtctctcactattattgtattggagtttatc

SEQ ID NO: 7383 - DNA, 76 bp, Homo sapiens
agtgatctatctaatgttgagagtgggttgttgaagtctctcactattattgtattggagtttatccctctcttta

SEQ ID NO: 7384 - DNA, 73 bp, Homo sapiens
tctaatgttgagagtgggttgttgaagtctctcactattattgtattggagtttatccctctctttaggttta

SEQ ID NO: 7385 - DNA, 71 bp, Homo sapiens
gagagtgggttgttgaagtctctcactattattgtattggagtttatccctctctttaggtttagtaatat

SEQ ID NO: 7386 - DNA, 75 bp, Homo sapiens
tgaagtctctcactattattgtattggagtttatccctctctttaggtttagtaatatttgctttctgaatctga

SEQ ID NO: 7387 - DNA, 72 bp, Homo sapiens
ctctcactattattgtattggagtttatccctctctttaggtttagtaatatttgctttctgaatctgaatt

SEQ ID NO: 7388 - DNA, 69 bp, Homo sapiens
gtattggagtttatccctctctttaggtttagtaatatttgctttctgaatctgaattttccagtttgg

SEQ ID NO: 7389 - DNA, 72 bp, Homo sapiens
ggagtttatccctctctttaggtttagtaatatttgctttctgaatctgaattttccagtttggtgcatata

SEQ ID NO: 7390 - DNA, 68 bp, Homo sapiens
attgttatatcctcttgctggttatccctttgtcgttatataatgacctaatcttttttacagttttt

SEQ ID NO: 7391 - DNA, 66 bp, Homo sapiens
atatcctcttgctggttatccctttgtcgttatataatgacctaatcttttttacagttttttttt

SEQ ID NO: 7392 - DNA, 65 bp, Homo sapiens
cctcttgctggttatccctttgtcgttatataatgacctaatcttttttacagttttttttttct

SEQ ID NO: 7393 - DNA, 70 bp, Homo sapiens
tatagctactcctgcttacttcctgtggtttccctttgcataaaatatcttttttcatacctttactttc

SEQ ID NO: 7394 - DNA, 72 bp, Homo sapiens
ttcctgtggtttccctttgcataaaatatcttttttcatacctttactttccatctgtatgcatccttacag

SEQ ID NO: 7395 - DNA, 71 bp, Homo sapiens
ggtttccctttgcataaaatatcttttttcatacctttactttccatctgtatgcatccttacaggtgaag

SEQ ID NO: 7396 - DNA, 73 bp, Homo sapiens
gcataaaatatcttttttcatacctttactttccatctgtatgcatccttacaggtgaagtgtgttttttgtg

SEQ ID NO: 7397 - DNA, 72 bp, Homo sapiens
tttttcatacctttactttccatctgtatgcatccttacaggtgaagtgtgttttttgtgggcaataagtag

SEQ ID NO: 7398 - DNA, 72 bp, Homo sapiens
atacctttactttccatctgtatgcatccttacaggtgaagtgtgttttttgtgggcaataagtagttggac

SEQ ID NO: 7399 - DNA, 71 bp, Homo sapiens
tttccatctgtatgcatccttacaggtgaagtgtgttttttgtgggcaataagtagttggaccttgttttt

SEQ ID NO: 7400 - DNA, 69 bp, Homo sapiens
ggtgaagtgtgttttttgtgggcaataagtagttggaccttgttttttaattcattcacctagttgata

SEQ ID NO: 7401 - DNA, 69 bp, Homo sapiens
agtgtgttttttgtgggcaataagtagttggaccttgttttttaattcattcacctagttgatatcttg

SEQ ID NO: 7402 - DNA, 70 bp, Homo sapiens
gtgggcaataagtagttggaccttgttttttaattcattcacctagttgatatcttgtaagtggagaatt

SEQ ID NO: 7403 - DNA, 70 bp, Homo sapiens
ggcaataagtagttggaccttgttttttaattcattcacctagttgatatcttgtaagtggagaatttaa

SEQ ID NO: 7404 - DNA, 71 bp, Homo sapiens
gtagttggaccttgttttttaattcattcacctagttgatatcttgtaagtggagaatttaatccattaca

SEQ ID NO: 7405 - DNA, 70 bp, Homo sapiens
agttggaccttgttttttaattcattcacctagttgatatcttgtaagtggagaatttaatccattacat

SEQ ID NO: 7406 - DNA, 69 bp, Homo sapiens
ccttgttttttaattcattcacctagttgatatcttgtaagtggagaatttaatccattacatttaagg

SEQ ID NO: 7407 - DNA, 63 bp, Homo sapiens
cttttcctttctttttgtcgttgtggttttgtggttttctgtaggggtggtttgagtcctttc

SEQ ID NO: 7408 - DNA, 66 bp, Homo sapiens
ttgtggttttgtggttttctgtaggggtggtttgagtcctttctctttcttcttactttgtgtatt

SEQ ID NO: 7409 - DNA, 67 bp, Homo sapiens
tttgtggttttctgtaggggtggtttgagtcctttctctttcttcttactttgtgtatttgctttac

SEQ ID NO: 7410 - DNA, 69 bp, Homo sapiens
ttctgtaggggtggtttgagtcctttctctttcttcttactttgtgtatttgctttactccagtgagtt

SEQ ID NO: 7411 - DNA, 71 bp, Homo sapiens
ttctctttcttcttactttgtgtatttgctttactccagtgagttttgtacttttgtatgttttcatggtg

SEQ ID NO: 7412 - DNA, 74 bp, Homo sapiens
tcttactttgtgtatttgctttactccagtgagttttgtacttttgtatgttttcatggtggcaaatgtcatcc

SEQ ID NO: 7413 - DNA, 74 bp, Homo sapiens
ttgtgtatttgctttactccagtgagttttgtacttttgtatgttttcatggtggcaaatgtcatccttttgct

SEQ ID NO: 7414 - DNA, 72 bp, Homo sapiens
tttactccagtgagttttgtacttttgtatgttttcatggtggcaaatgtcatccttttgcttccaggttta

SEQ ID NO: 7415 - DNA, 71 bp, Homo sapiens
tgagttttgtacttttgtatgttttcatggtggcaaatgtcatccttttgcttccaggtttagaattccct

SEQ ID NO: 7416 - DNA, 70 bp, Homo sapiens
gagttttgtacttttgtatgttttcatggtggcaaatgtcatccttttgcttccaggtttagaattccct

SEQ ID NO: 7417 - DNA, 73 bp, Homo sapiens
ttgtacttttgtatgttttcatggtggcaaatgtcatccttttgcttccaggtttagaattcccttgagcatt

SEQ ID NO: 7418 - DNA, 74 bp, Homo sapiens
tatgttttcatggtggcaaatgtcatccttttgcttccaggtttagaattcccttgagcatttcgtgtagggtg

SEQ ID NO: 7419 - DNA, 71 bp, Homo sapiens
atccttttgcttccaggtttagaattcccttgagcatttcgtgtagggtggtctaatggtgatgaatttcc

SEQ ID NO: 7420 - DNA, 73 bp, Homo sapiens
tttgcttccaggtttagaattcccttgagcatttcgtgtagggtggtctaatggtgatgaatttcctcagctt

SEQ ID NO: 7421 - DNA, 76 bp, Homo sapiens
tttagaattcccttgagcatttcgtgtagggtggtctaatggtgatgaatttcctcagcttttgcttgtctggaga

SEQ ID NO: 7422 - DNA, 75 bp, Homo sapiens
ccttgagcatttcgtgtagggtggtctaatggtgatgaatttcctcagcttttgcttgtctggagaagactttat

SEQ ID NO: 7423 - DNA, 68 bp, Homo sapiens
gttagtctgatgggggggtcttttataggtgactggatacctttctcttgtttttagaattctttgtc

SEQ ID NO: 7424 - DNA, 66 bp, Homo sapiens
atgggggggtcttttataggtgactggatacctttctcttgtttttagaattctttgtctttgtct

SEQ ID NO: 7425 - DNA, 69 bp, Homo sapiens
ttttataggtgactggatacctttctcttgtttttagaattctttgtctttgtctttagacaacctgag

SEQ ID NO: 7426 - DNA, 70 bp, Homo sapiens
gactggatacctttctcttgtttttagaattctttgtctttgtctttagacaacctgagtaaaatgtgcc

SEQ ID NO: 7427 - DNA, 70 bp, Homo sapiens
ctttctcttgtttttagaattctttgtctttgtctttagacaacctgagtaaaatgtgccgtagagaaga

SEQ ID NO: 7428 - DNA, 70 bp, Homo sapiens
tttttagaattctttgtctttgtctttagacaacctgagtaaaatgtgccgtagagaagacctttttgca

SEQ ID NO: 7429 - DNA, 70 bp, Homo sapiens
gaattctttgtctttgtctttagacaacctgagtaaaatgtgccgtagagaagacctttttgcattgttt

SEQ ID NO: 7430 - DNA, 70 bp, Homo sapiens
tttgtctttagacaacctgagtaaaatgtgccgtagagaagacctttttgcattgtttttagggatctta

SEQ ID NO: 7431 - DNA, 71 bp, Homo sapiens
ttagacaacctgagtaaaatgtgccgtagagaagacctttttgcattgtttttagggatcttagagcctcc

SEQ ID NO: 7432 - DNA, 75 bp, Homo sapiens
taaaatgtgccgtagagaagacctttttgcattgtttttagggatcttagagcctcctctatctggatgtctgta

SEQ ID NO: 7433 - DNA, 77 bp, Homo sapiens
gtagagaagacctttttgcattgtttttagggatcttagagcctcctctatctggatgtctgtatctcttgctagac

SEQ ID NO: 7434 - DNA, 75 bp, Homo sapiens
acctttttgcattgtttttagggatcttagagcctcctctatctggatgtctgtatctcttgctagacctgggaa

SEQ ID NO: 7435 - DNA, 73 bp, Homo sapiens
attgtttttagggatcttagagcctcctctatctggatgtctgtatctcttgctagacctgggaagttctttt

SEQ ID NO: 7436 - DNA, 74 bp, Homo sapiens
tttagggatcttagagcctcctctatctggatgtctgtatctcttgctagacctgggaagttctttttttttga

SEQ ID NO: 7437 - DNA, 71 bp, Homo sapiens
agtattttgttgagttgattttccatattattggtcactgtgttttgactgggttatttcaaaagactggc

SEQ ID NO: 7438 - DNA, 74 bp, Homo sapiens
tgagttgattttccatattattggtcactgtgttttgactgggttatttcaaaagactggcttcaagttgtgaa

SEQ ID NO: 7439 - DNA, 72 bp, Homo sapiens
tttccatattattggtcactgtgttttgactgggttatttcaaaagactggcttcaagttgtgaatttcttc

SEQ ID NO: 7440 - DNA, 73 bp, Homo sapiens
aaataattaatttattattcatattattcatgtcctgaataaccattctgatttctttgtattttcagaatta

SEQ ID NO: 7441 - DNA, 77 bp, Homo sapiens
tttattattcatattattcatgtcctgaataaccattctgatttctttgtattttcagaattattttgtatcgcaca

SEQ ID NO: 7442 - DNA, 78 bp, Homo sapiens
tcatattattcatgtcctgaataaccattctgatttctttgtattttcagaattattttgtatcgcacatagcttctt

SEQ ID NO: 7443 - DNA, 76 bp, Homo sapiens
catgtcctgaataaccattctgatttctttgtattttcagaattattttgtatcgcacatagcttctttagtatta

SEQ ID NO: 7444 - DNA, 75 bp, Homo sapiens
tgtcctgaataaccattctgatttctttgtattttcagaattattttgtatcgcacatagcttctttagtattaa

SEQ ID NO: 7445 - DNA, 73 bp, Homo sapiens
tgaataaccattctgatttctttgtattttcagaattattttgtatcgcacatagcttctttagtattaaaat

SEQ ID NO: 7446 - DNA, 72 bp, Homo sapiens
accattctgatttctttgtattttcagaattattttgtatcgcacatagcttctttagtattaaaattttga

SEQ ID NO: 7447 - DNA, 71 bp, Homo sapiens
ctgatttctttgtattttcagaattattttgtatcgcacatagcttctttagtattaaaattttgaattat

SEQ ID NO: 7448 - DNA, 69 bp, Homo sapiens
ctttgtattttcagaattattttgtatcgcacatagcttctttagtattaaaattttgaattatttttc

SEQ ID NO: 7449 - DNA, 70 bp, Homo sapiens
ttgtattttcagaattattttgtatcgcacatagcttctttagtattaaaattttgaattatttttccaa

SEQ ID NO: 7450 - DNA, 69 bp, Homo sapiens
ttcagaattattttgtatcgcacatagcttctttagtattaaaattttgaattatttttccaatatttt

SEQ ID NO: 7451 - DNA, 67 bp, Homo sapiens
ttattttgtatcgcacatagcttctttagtattaaaattttgaattatttttccaatatttttaaaa

SEQ ID NO: 7452 - DNA, 69 bp, Homo sapiens
tttaaaaactttttaatggtatgtgttcctacggaattattgtgtgccctttggaggtgtctctctctc

SEQ ID NO: 7453 - DNA, 69 bp, Homo sapiens
aaactttttaatggtatgtgttcctacggaattattgtgtgccctttggaggtgtctctctctcgcttt

SEQ ID NO: 7454 - DNA, 68 bp, Homo sapiens
atggtatgtgttcctacggaattattgtgtgccctttggaggtgtctctctctcgctttttttttttt

SEQ ID NO: 7455 - DNA, 76 bp, Homo sapiens
ttttttggctttttaatgtttcctgtatatgttgatatctgtgcatctgatgtgataatagcttctcccaattttt

SEQ ID NO: 7456 - DNA, 77 bp, Homo sapiens
ggctttttaatgtttcctgtatatgttgatatctgtgcatctgatgtgataatagcttctcccaatttttttgaatt

SEQ ID NO: 7457 - DNA, 80 bp, Homo sapiens
tgtttcctgtatatgttgatatctgtgcatctgatgtgataatagcttctcccaatttttttgaatttgctttcataggg

SEQ ID NO: 7458 - DNA, 81 bp, Homo sapiens
tgtatatgttgatatctgtgcatctgatgtgataatagcttctcccaatttttttgaatttgctttcataggggagaacat

SEQ ID NO: 7459 - DNA, 78 bp, Homo sapiens
gttgatatctgtgcatctgatgtgataatagcttctcccaatttttttgaatttgctttcataggggagaacatttta

SEQ ID NO: 7460 - DNA, 79 bp, Homo sapiens
gatatctgtgcatctgatgtgataatagcttctcccaatttttttgaatttgctttcataggggagaacattttattga

SEQ ID NO: 7461 - DNA, 78 bp, Homo sapiens
tctgtgcatctgatgtgataatagcttctcccaatttttttgaatttgctttcataggggagaacattttattgaaga

SEQ ID NO: 7462 - DNA, 77 bp, Homo sapiens
gtgcatctgatgtgataatagcttctcccaatttttttgaatttgctttcataggggagaacattttattgaagata

SEQ ID NO: 7463 - DNA, 72 bp, Homo sapiens
tcccaatttttttgaatttgctttcataggggagaacattttattgaagatatatctatggtgttgcttggg

SEQ ID NO: 7464 - DNA, 74 bp, Homo sapiens
ttttgaatttgctttcataggggagaacattttattgaagatatatctatggtgttgcttgggtaggcaccgta

SEQ ID NO: 7465 - DNA, 81 bp, Homo sapiens
ggagaacattttattgaagatatatctatggtgttgcttgggtaggcaccgtagttgtgattctggatgtgtgcagtcatg

SEQ ID NO: 7466 - DNA, 81 bp, Homo sapiens
attttattgaagatatatctatggtgttgcttgggtaggcaccgtagttgtgattctggatgtgtgcagtcatgtaatctc

SEQ ID NO: 7467 - DNA, 82 bp, Homo sapiens
atatatctatggtgttgcttgggtaggcaccgtagttgtgattctggatgtgtgcagtcatgtaatctctggatgatttatt

SEQ ID NO: 7468 - DNA, 82 bp, Homo sapiens
tatggtgttgcttgggtaggcaccgtagttgtgattctggatgtgtgcagtcatgtaatctctggatgatttatttggctta

SEQ ID NO: 7469 - DNA, 81 bp, Homo sapiens
ttgggtaggcaccgtagttgtgattctggatgtgtgcagtcatgtaatctctggatgatttatttggcttaaacagtatca

SEQ ID NO: 7470 - DNA, 84 bp, Homo sapiens
attctggatgtgtgcagtcatgtaatctctggatgatttatttggcttaaacagtatcagcagtggctatgatttttctcagtg

SEQ ID NO: 7471 - DNA, 82 bp, Homo sapiens
atgtgtgcagtcatgtaatctctggatgatttatttggcttaaacagtatcagcagtggctatgatttttctcagtggttta

SEQ ID NO: 7472 - DNA, 78 bp, Homo sapiens
tgtaatctctggatgatttatttggcttaaacagtatcagcagtggctatgatttttctcagtggtttagggtgcaat

SEQ ID NO: 7473 - DNA, 77 bp, Homo sapiens
gatgatttatttggcttaaacagtatcagcagtggctatgatttttctcagtggtttagggtgcaattattagtgga

SEQ ID NO: 7474 - DNA, 76 bp, Homo sapiens
tttatttggcttaaacagtatcagcagtggctatgatttttctcagtggtttagggtgcaattattagtggaggca

SEQ ID NO: 7475 - DNA, 76 bp, Homo sapiens
ttaaacagtatcagcagtggctatgatttttctcagtggtttagggtgcaattattagtggaggcagtggtgaagt

SEQ ID NO: 7476 - DNA, 73 bp, Homo sapiens
agtggctatgatttttctcagtggtttagggtgcaattattagtggaggcagtggtgaagttttgctggggac

SEQ ID NO: 7477 - DNA, 73 bp, Homo sapiens
ctatgatttttctcagtggtttagggtgcaattattagtggaggcagtggtgaagttttgctggggactagga

SEQ ID NO: 7478 - DNA, 73 bp, Homo sapiens
agtggtttagggtgcaattattagtggaggcagtggtgaagttttgctggggactaggatgccaagtagacca

SEQ ID NO: 7479 - DNA, 76 bp, Homo sapiens
ttagggtgcaattattagtggaggcagtggtgaagttttgctggggactaggatgccaagtagaccagcctttgca

SEQ ID NO: 7480 - DNA, 76 bp, Homo sapiens
ttagtggaggcagtggtgaagttttgctggggactaggatgccaagtagaccagcctttgcacctcagtcgtggac

SEQ ID NO: 7481 - DNA, 78 bp, Homo sapiens
agtggtgaagttttgctggggactaggatgccaagtagaccagcctttgcacctcagtcgtggaccaagcatgcctca

SEQ ID NO: 7482 - DNA, 76 bp, Homo sapiens
aagttttgctggggactaggatgccaagtagaccagcctttgcacctcagtcgtggaccaagcatgcctcaccttg

SEQ ID NO: 7483 - DNA, 79 bp, Homo sapiens
gactaggatgccaagtagaccagcctttgcacctcagtcgtggaccaagcatgcctcaccttgggcccagggtggcata

SEQ ID NO: 7484 - DNA, 80 bp, Homo sapiens
atgccaagtagaccagcctttgcacctcagtcgtggaccaagcatgcctcaccttgggcccagggtggcatatgctggta

SEQ ID NO: 7485 - DNA, 78 bp, Homo sapiens
tttgcacctcagtcgtggaccaagcatgcctcaccttgggcccagggtggcatatgctggtactggtgttagtgggtc

SEQ ID NO: 7486 - DNA, 78 bp, Homo sapiens
aagcatgcctcaccttgggcccagggtggcatatgctggtactggtgttagtgggtccaggtaggctgattcttgtgc

SEQ ID NO: 7487 - DNA, 76 bp, Homo sapiens
ttgggcccagggtggcatatgctggtactggtgttagtgggtccaggtaggctgattcttgtgcctcgaggtggag

SEQ ID NO: 7488 - DNA, 77 bp, Homo sapiens
ggtggcatatgctggtactggtgttagtgggtccaggtaggctgattcttgtgcctcgaggtggaggcccatacttc

SEQ ID NO: 7489 - DNA, 77 bp, Homo sapiens
atatgctggtactggtgttagtgggtccaggtaggctgattcttgtgcctcgaggtggaggcccatacttcctcaga

SEQ ID NO: 7490 - DNA, 77 bp, Homo sapiens
tactggtgttagtgggtccaggtaggctgattcttgtgcctcgaggtggaggcccatacttcctcagatgccagtag

SEQ ID NO: 7491 - DNA, 80 bp, Homo sapiens
taggctgattcttgtgcctcgaggtggaggcccatacttcctcagatgccagtagtggtagcagttggctctgtaggttg

SEQ ID NO: 7492 - DNA, 77 bp, Homo sapiens
ttgtgcctcgaggtggaggcccatacttcctcagatgccagtagtggtagcagttggctctgtaggttggacggttc

SEQ ID NO: 7493 - DNA, 74 bp, Homo sapiens
aggtggaggcccatacttcctcagatgccagtagtggtagcagttggctctgtaggttggacggttctcgggtc

SEQ ID NO: 7494 - DNA, 79 bp, Homo sapiens
atacttcctcagatgccagtagtggtagcagttggctctgtaggttggacggttctcgggtctgcagccagccagtgtg

SEQ ID NO: 7495 - DNA, 80 bp, Homo sapiens
agatgccagtagtggtagcagttggctctgtaggttggacggttctcgggtctgcagccagccagtgtggtgtgcgaaga

SEQ ID NO: 7496 - DNA, 76 bp, Homo sapiens
agtagtggtagcagttggctctgtaggttggacggttctcgggtctgcagccagccagtgtggtgtgcgaagacgg

SEQ ID NO: 7497 - DNA, 79 bp, Homo sapiens
tagcagttggctctgtaggttggacggttctcgggtctgcagccagccagtgtggtgtgcgaagacggtggcagtggtg

SEQ ID NO: 7498 - DNA, 76 bp, Homo sapiens
ctctgtaggttggacggttctcgggtctgcagccagccagtgtggtgtgcgaagacggtggcagtggtgggtcaac

SEQ ID NO: 7499 - DNA, 81 bp, Homo sapiens
tctgcagccagccagtgtggtgtgcgaagacggtggcagtggtgggtcaaccctctggatcccaggaagagtgcacttgta

SEQ ID NO: 7500 - DNA, 75 bp, Homo sapiens
aagacggtggcagtggtgggtcaaccctctggatcccaggaagagtgcacttgtattggtggtggctacagtgga

SEQ ID NO: 7501 - DNA, 77 bp, Homo sapiens
accctctggatcccaggaagagtgcacttgtattggtggtggctacagtggactgggcaggccagtctccagaccta

SEQ ID NO: 7502 - DNA, 83 bp, Homo sapiens
cttgtattggtggtggctacagtggactgggcaggccagtctccagacctacagatggtacatgcagataggtgccagctgtg

SEQ ID NO: 7503 - DNA, 87 bp, Homo sapiens
tggtggctacagtggactgggcaggccagtctccagacctacagatggtacatgcagataggtgccagctgtggcagtagcagcagg

SEQ ID NO: 7504 - DNA, 84 bp, Homo sapiens
agtggactgggcaggccagtctccagacctacagatggtacatgcagataggtgccagctgtggcagtagcagcagggtgggta

SEQ ID NO: 7505 - DNA, 83 bp, Homo sapiens
ccagtctccagacctacagatggtacatgcagataggtgccagctgtggcagtagcagcagggtgggtaggcctaacctcaga

SEQ ID NO: 7506 - DNA, 82 bp, Homo sapiens
ctccagacctacagatggtacatgcagataggtgccagctgtggcagtagcagcagggtgggtaggcctaacctcagatccc

SEQ ID NO: 7507 - DNA, 80 bp, Homo sapiens
atggtacatgcagataggtgccagctgtggcagtagcagcagggtgggtaggcctaacctcagatccccaggacaagtgt

SEQ ID NO: 7508 - DNA, 79 bp, Homo sapiens
agataggtgccagctgtggcagtagcagcagggtgggtaggcctaacctcagatccccaggacaagtgttcaggtgcta

SEQ ID NO: 7509 - DNA, 80 bp, Homo sapiens
cagctgtggcagtagcagcagggtgggtaggcctaacctcagatccccaggacaagtgttcaggtgctaatgatgttgga

SEQ ID NO: 7510 - DNA, 78 bp, Homo sapiens
agtagcagcagggtgggtaggcctaacctcagatccccaggacaagtgttcaggtgctaatgatgttggattgcgctg

SEQ ID NO: 7511 - DNA, 76 bp, Homo sapiens
agggtgggtaggcctaacctcagatccccaggacaagtgttcaggtgctaatgatgttggattgcgctgggcagtc

SEQ ID NO: 7512 - DNA, 78 bp, Homo sapiens
taggcctaacctcagatccccaggacaagtgttcaggtgctaatgatgttggattgcgctgggcagtcccctgtactc

SEQ ID NO: 7513 - DNA, 80 bp, Homo sapiens
agatccccaggacaagtgttcaggtgctaatgatgttggattgcgctgggcagtcccctgtactccagacttgtgtgctc

SEQ ID NO: 7514 - DNA, 82 bp, Homo sapiens
cccaggacaagtgttcaggtgctaatgatgttggattgcgctgggcagtcccctgtactccagacttgtgtgctctggcatg

SEQ ID NO: 7515 - DNA, 83 bp, Homo sapiens
gtgttcaggtgctaatgatgttggattgcgctgggcagtcccctgtactccagacttgtgtgctctggcatgggctgagggtg

SEQ ID NO: 7516 - DNA, 82 bp, Homo sapiens
taatgatgttggattgcgctgggcagtcccctgtactccagacttgtgtgctctggcatgggctgagggtggggcaaagctg

SEQ ID NO: 7517 - DNA, 79 bp, Homo sapiens
ttggattgcgctgggcagtcccctgtactccagacttgtgtgctctggcatgggctgagggtggggcaaagctgggttg

SEQ ID NO: 7518 - DNA, 77 bp, Homo sapiens
ccctgtactccagacttgtgtgctctggcatgggctgagggtggggcaaagctgggttggtgggcttgtcctcaggc

SEQ ID NO: 7519 - DNA, 76 bp, Homo sapiens
tctggcatgggctgagggtggggcaaagctgggttggtgggcttgtcctcaggccccctgatggtatttgcaggta

SEQ ID NO: 7520 - DNA, 74 bp, Homo sapiens
tgagggtggggcaaagctgggttggtgggcttgtcctcaggccccctgatggtatttgcaggtaccagtcatgg

SEQ ID NO: 7521 - DNA, 74 bp, Homo sapiens
ggcaaagctgggttggtgggcttgtcctcaggccccctgatggtatttgcaggtaccagtcatggtaggcaggg

SEQ ID NO: 7522 - DNA, 76 bp, Homo sapiens
ttgtcctcaggccccctgatggtatttgcaggtaccagtcatggtaggcaggggcagggtgatccctaagtcacca

SEQ ID NO: 7523 - DNA, 77 bp, Homo sapiens
atggtatttgcaggtaccagtcatggtaggcaggggcagggtgatccctaagtcaccagcagaatgttcaggtagcc

SEQ ID NO: 7524 - DNA, 76 bp, Homo sapiens
aggtaccagtcatggtaggcaggggcagggtgatccctaagtcaccagcagaatgttcaggtagccggggcagcat

SEQ ID NO: 7525 - DNA, 78 bp, Homo sapiens
agtcatggtaggcaggggcagggtgatccctaagtcaccagcagaatgttcaggtagccggggcagcattggtcacac

SEQ ID NO: 7526 - DNA, 77 bp, Homo sapiens
ggggcagggtgatccctaagtcaccagcagaatgttcaggtagccggggcagcattggtcacaccgttgccctgtca

SEQ ID NO: 7527 - DNA, 77 bp, Homo sapiens
agggtgatccctaagtcaccagcagaatgttcaggtagccggggcagcattggtcacaccgttgccctgtcactgga

SEQ ID NO: 7528 - DNA, 80 bp, Homo sapiens
tcaccagcagaatgttcaggtagccggggcagcattggtcacaccgttgccctgtcactggagagcccagggccatgtta

SEQ ID NO: 7529 - DNA, 77 bp, Homo sapiens
agaatgttcaggtagccggggcagcattggtcacaccgttgccctgtcactggagagcccagggccatgttagtgga

SEQ ID NO: 7530 - DNA, 77 bp, Homo sapiens
ggtagccggggcagcattggtcacaccgttgccctgtcactggagagcccagggccatgttagtggaggcaagtgta

SEQ ID NO: 7531 - DNA, 79 bp, Homo sapiens
agcattggtcacaccgttgccctgtcactggagagcccagggccatgttagtggaggcaagtgtaggccagcagatggg

SEQ ID NO: 7532 - DNA, 78 bp, Homo sapiens
acaccgttgccctgtcactggagagcccagggccatgttagtggaggcaagtgtaggccagcagatggggaacactca

SEQ ID NO: 7533 - DNA, 82 bp, Homo sapiens
gagagcccagggccatgttagtggaggcaagtgtaggccagcagatggggaacactcatgcatcagccctagcagtggttcc

SEQ ID NO: 7534 - DNA, 81 bp, Homo sapiens
agggccatgttagtggaggcaagtgtaggccagcagatggggaacactcatgcatcagccctagcagtggttccccacatc

SEQ ID NO: 7535 - DNA, 84 bp, Homo sapiens
aagtgtaggccagcagatggggaacactcatgcatcagccctagcagtggttccccacatctcagccctgtgtgcagtagccca

SEQ ID NO: 7536 - DNA, 85 bp, Homo sapiens
agcagatggggaacactcatgcatcagccctagcagtggttccccacatctcagccctgtgtgcagtagcccacactttgctcat

SEQ ID NO: 7537 - DNA, 85 bp, Homo sapiens
aacactcatgcatcagccctagcagtggttccccacatctcagccctgtgtgcagtagcccacactttgctcattcacgcctcca

SEQ ID NO: 7538 - DNA, 83 bp, Homo sapiens
atgcatcagccctagcagtggttccccacatctcagccctgtgtgcagtagcccacactttgctcattcacgcctccaccctg

SEQ ID NO: 7539 - DNA, 81 bp, Homo sapiens
ctagcagtggttccccacatctcagccctgtgtgcagtagcccacactttgctcattcacgcctccaccctgggagcagta

SEQ ID NO: 7540 - DNA, 82 bp, Homo sapiens
ttccccacatctcagccctgtgtgcagtagcccacactttgctcattcacgcctccaccctgggagcagtagctggtgtatc

SEQ ID NO: 7541 - DNA, 82 bp, Homo sapiens
tcagccctgtgtgcagtagcccacactttgctcattcacgcctccaccctgggagcagtagctggtgtatctcttggcctta

SEQ ID NO: 7542 - DNA, 81 bp, Homo sapiens
tgtgtgcagtagcccacactttgctcattcacgcctccaccctgggagcagtagctggtgtatctcttggccttagtccta

SEQ ID NO: 7543 - DNA, 81 bp, Homo sapiens
tagcccacactttgctcattcacgcctccaccctgggagcagtagctggtgtatctcttggccttagtcctagcgctgctg

SEQ ID NO: 7544 - DNA, 79 bp, Homo sapiens
tttgctcattcacgcctccaccctgggagcagtagctggtgtatctcttggccttagtcctagcgctgctgggccctag

SEQ ID NO: 7545 - DNA, 78 bp, Homo sapiens
ctccaccctgggagcagtagctggtgtatctcttggccttagtcctagcgctgctgggccctaggacagtgtgtagcc

SEQ ID NO: 7546 - DNA, 79 bp, Homo sapiens
ggagcagtagctggtgtatctcttggccttagtcctagcgctgctgggccctaggacagtgtgtagcctgttgggtaca

SEQ ID NO: 7547 - DNA, 77 bp, Homo sapiens
agtagctggtgtatctcttggccttagtcctagcgctgctgggccctaggacagtgtgtagcctgttgggtacaaga

SEQ ID NO: 7548 - DNA, 77 bp, Homo sapiens
tatctcttggccttagtcctagcgctgctgggccctaggacagtgtgtagcctgttgggtacaagactcttaagatg

SEQ ID NO: 7549 - DNA, 77 bp, Homo sapiens
ttagtcctagcgctgctgggccctaggacagtgtgtagcctgttgggtacaagactcttaagatggtgctttgctgt

SEQ ID NO: 7550 - DNA, 78 bp, Homo sapiens
ctgctgggccctaggacagtgtgtagcctgttgggtacaagactcttaagatggtgctttgctgttgctgcttaggtc

SEQ ID NO: 7551 - DNA, 78 bp, Homo sapiens
ctaggacagtgtgtagcctgttgggtacaagactcttaagatggtgctttgctgttgctgcttaggtcttagaacatg

SEQ ID NO: 7552 - DNA, 80 bp, Homo sapiens
tgtgtagcctgttgggtacaagactcttaagatggtgctttgctgttgctgcttaggtcttagaacatgtatgggataca

SEQ ID NO: 7553 - DNA, 82 bp, Homo sapiens
tacaagactcttaagatggtgctttgctgttgctgcttaggtcttagaacatgtatgggatacagcataagcatcctccctg

SEQ ID NO: 7554 - DNA, 86 bp, Homo sapiens
taagatggtgctttgctgttgctgcttaggtcttagaacatgtatgggatacagcataagcatcctccctgtggctgtgctgtcaa

SEQ ID NO: 7555 - DNA, 85 bp, Homo sapiens
tttgctgttgctgcttaggtcttagaacatgtatgggatacagcataagcatcctccctgtggctgtgctgtcaacacaatctcc

SEQ ID NO: 7556 - DNA, 83 bp, Homo sapiens
atgtatgggatacagcataagcatcctccctgtggctgtgctgtcaacacaatctcctcgcagttccttatgtttatttcaga

SEQ ID NO: 7557 - DNA, 82 bp, Homo sapiens
tacagcataagcatcctccctgtggctgtgctgtcaacacaatctcctcgcagttccttatgtttatttcagagcctgaaag

SEQ ID NO: 7558 - DNA, 79 bp, Homo sapiens
atcctccctgtggctgtgctgtcaacacaatctcctcgcagttccttatgtttatttcagagcctgaaaggatctagga

SEQ ID NO: 7559 - DNA, 81 bp, Homo sapiens
ctgtgctgtcaacacaatctcctcgcagttccttatgtttatttcagagcctgaaaggatctaggagctctcccatggcta

SEQ ID NO: 7560 - DNA, 79 bp, Homo sapiens
tgtcaacacaatctcctcgcagttccttatgtttatttcagagcctgaaaggatctaggagctctcccatggctaggat

SEQ ID NO: 7561 - DNA, 78 bp, Homo sapiens
aatctcctcgcagttccttatgtttatttcagagcctgaaaggatctaggagctctcccatggctaggattgcagaag

SEQ ID NO: 7562 - DNA, 79 bp, Homo sapiens
tccttatgtttatttcagagcctgaaaggatctaggagctctcccatggctaggattgcagaagtccatgtgggaatgt

SEQ ID NO: 7563 - DNA, 83 bp, Homo sapiens
tgtttatttcagagcctgaaaggatctaggagctctcccatggctaggattgcagaagtccatgtgggaatgttgacagctga

SEQ ID NO: 7564 - DNA, 79 bp, Homo sapiens
atctaggagctctcccatggctaggattgcagaagtccatgtgggaatgttgacagctgagggtctctaacctgttctt

SEQ ID NO: 7565 - DNA, 79 bp, Homo sapiens
tcccatggctaggattgcagaagtccatgtgggaatgttgacagctgagggtctctaacctgttctttccctgcattag

SEQ ID NO: 7566 - DNA, 76 bp, Homo sapiens
agaagtccatgtgggaatgttgacagctgagggtctctaacctgttctttccctgcattagggagcctctcttggc

SEQ ID NO: 7567 - DNA, 75 bp, Homo sapiens
agggtctctaacctgttctttccctgcattagggagcctctcttggctcctggccaagcaggctgccttgcttcc

SEQ ID NO: 7568 - DNA, 73 bp, Homo sapiens
tttccctgcattagggagcctctcttggctcctggccaagcaggctgccttgcttccctttccttccttgttt

SEQ ID NO: 7569 - DNA, 72 bp, Homo sapiens
gagcctctcttggctcctggccaagcaggctgccttgcttccctttccttccttgttttaggtattggttgt

SEQ ID NO: 7570 - DNA, 69 bp, Homo sapiens
ttggctcctggccaagcaggctgccttgcttccctttccttccttgttttaggtattggttgttagttt

SEQ ID NO: 7571 - DNA, 67 bp, Homo sapiens
ccaagcaggctgccttgcttccctttccttccttgttttaggtattggttgttagttttttgttgaa

SEQ ID NO: 7572 - DNA, 66 bp, Homo sapiens
tgccttgcttccctttccttccttgttttaggtattggttgttagttttttgttgaattccagtgt

SEQ ID NO: 7573 - DNA, 66 bp, Homo sapiens
ccttccttgttttaggtattggttgttagttttttgttgaattccagtgttttctcttggacgatc

SEQ ID NO: 7574 - DNA, 69 bp, Homo sapiens
ttaggtattggttgttagttttttgttgaattccagtgttttctcttggacgatctatacaaattgtgg

SEQ ID NO: 7575 - DNA, 68 bp, Homo sapiens
gttagttttttgttgaattccagtgttttctcttggacgatctatacaaattgtggttaccttctaac

SEQ ID NO: 7576 - DNA, 70 bp, Homo sapiens
cagtgttttctcttggacgatctatacaaattgtggttaccttctaactattttggttcttagtggaaga

SEQ ID NO: 7577 - DNA, 70 bp, Homo sapiens
ttttctcttggacgatctatacaaattgtggttaccttctaactattttggttcttagtggaagagacaa

SEQ ID NO: 7578 - DNA, 70 bp, Homo sapiens
caaattgtggttaccttctaactattttggttcttagtggaagagacaaatacaaaatgcctctagtcac

SEQ ID NO: 7579 - DNA, 71 bp, Homo sapiens
ttaccttctaactattttggttcttagtggaagagacaaatacaaaatgcctctagtcacccatcttgaaa

SEQ ID NO: 7580 - DNA, 70 bp, Homo sapiens
aactattttggttcttagtggaagagacaaatacaaaatgcctctagtcacccatcttgaaacccctctc

SEQ ID NO: 7581 - DNA, 75 bp, Homo sapiens
tagtggaagagacaaatacaaaatgcctctagtcacccatcttgaaacccctctctcaatcctatttaattcata

SEQ ID NO: 7582 - DNA, 75 bp, Homo sapiens
atacaaaatgcctctagtcacccatcttgaaacccctctctcaatcctatttaattcataataatgaattcataa

SEQ ID NO: 7583 - DNA, 76 bp, Homo sapiens
agtcacccatcttgaaacccctctctcaatcctatttaattcataataatgaattcataataatgatgggcactgt

SEQ ID NO: 7584 - DNA, 78 bp, Homo sapiens
ccatcttgaaacccctctctcaatcctatttaattcataataatgaattcataataatgatgggcactgtttgtcaga

SEQ ID NO: 7585 - DNA, 80 bp, Homo sapiens
cctatttaattcataataatgaattcataataatgatgggcactgtttgtcagatgtttactatgtggtagacagcatac

SEQ ID NO: 7586 - DNA, 84 bp, Homo sapiens
ataatgaattcataataatgatgggcactgtttgtcagatgtttactatgtggtagacagcatactgtctaccatgactggtgc

SEQ ID NO: 7587 - DNA, 85 bp, Homo sapiens
ataatgatgggcactgtttgtcagatgtttactatgtggtagacagcatactgtctaccatgactggtgcctgcacataccatta

SEQ ID NO: 7588 - DNA, 82 bp, Homo sapiens
atgggcactgtttgtcagatgtttactatgtggtagacagcatactgtctaccatgactggtgcctgcacataccattaggg

SEQ ID NO: 7589 - DNA, 83 bp, Homo sapiens
tcagatgtttactatgtggtagacagcatactgtctaccatgactggtgcctgcacataccattaggggtcctgaggacaata

SEQ ID NO: 7590 - DNA, 82 bp, Homo sapiens
tactatgtggtagacagcatactgtctaccatgactggtgcctgcacataccattaggggtcctgaggacaatattagtata

SEQ ID NO: 7591 - DNA, 85 bp, Homo sapiens
gacagcatactgtctaccatgactggtgcctgcacataccattaggggtcctgaggacaatattagtatatgcttcgcatatgta

SEQ ID NO: 7592 - DNA, 81 bp, Homo sapiens
tgtctaccatgactggtgcctgcacataccattaggggtcctgaggacaatattagtatatgcttcgcatatgtaagttaa

SEQ ID NO: 7593 - DNA, 77 bp, Homo sapiens
cctgcacataccattaggggtcctgaggacaatattagtatatgcttcgcatatgtaagttaatccttgccccagcc

SEQ ID NO: 7594 - DNA, 74 bp, Homo sapiens
attaggggtcctgaggacaatattagtatatgcttcgcatatgtaagttaatccttgccccagccctgtgaaat

SEQ ID NO: 7595 - DNA, 77 bp, Homo sapiens
tcctgaggacaatattagtatatgcttcgcatatgtaagttaatccttgccccagccctgtgaaattgttggtacca

SEQ ID NO: 7596 - DNA, 75 bp, Homo sapiens
gtatatgcttcgcatatgtaagttaatccttgccccagccctgtgaaattgttggtaccaccctcactttataga

SEQ ID NO: 7597 - DNA, 75 bp, Homo sapiens
ttaatccttgccccagccctgtgaaattgttggtaccaccctcactttatagatgaggtatatgaggttgtgtga

SEQ ID NO: 7598 - DNA, 73 bp, Homo sapiens
cagccctgtgaaattgttggtaccaccctcactttatagatgaggtatatgaggttgtgtgaggttaagttat

SEQ ID NO: 7599 - DNA, 72 bp, Homo sapiens
aaattgttggtaccaccctcactttatagatgaggtatatgaggttgtgtgaggttaagttatttgcacgag

SEQ ID NO: 7600 - DNA, 75 bp, Homo sapiens
taccaccctcactttatagatgaggtatatgaggttgtgtgaggttaagttatttgcacgagggagcaggatttg

SEQ ID NO: 7601 - DNA, 73 bp, Homo sapiens
actttatagatgaggtatatgaggttgtgtgaggttaagttatttgcacgagggagcaggatttggactttta

SEQ ID NO: 7602 - DNA, 71 bp, Homo sapiens
atgaggtatatgaggttgtgtgaggttaagttatttgcacgagggagcaggatttggacttttaactattt

SEQ ID NO: 7603 - DNA, 73 bp, Homo sapiens
tatatgaggttgtgtgaggttaagttatttgcacgagggagcaggatttggacttttaactattttcacacca

SEQ ID NO: 7604 - DNA, 71 bp, Homo sapiens
tgaggttaagttatttgcacgagggagcaggatttggacttttaactattttcacaccatattaacctcta

SEQ ID NO: 7605 - DNA, 70 bp, Homo sapiens
taagttatttgcacgagggagcaggatttggacttttaactattttcacaccatattaacctctaggaaa

SEQ ID NO: 7606 - DNA, 69 bp, Homo sapiens
acgagggagcaggatttggacttttaactattttcacaccatattaacctctaggaaagaataagtcat

SEQ ID NO: 7607 - DNA, 71 bp, Homo sapiens
gatttggacttttaactattttcacaccatattaacctctaggaaagaataagtcattcagtctctcggga

SEQ ID NO: 7608 - DNA, 71 bp, Homo sapiens
ttttaactattttcacaccatattaacctctaggaaagaataagtcattcagtctctcgggatgtgggtta

SEQ ID NO: 7609 - DNA, 71 bp, Homo sapiens
atattaacctctaggaaagaataagtcattcagtctctcgggatgtgggttagggataacttacaggctta

SEQ ID NO: 7610 - DNA, 70 bp, Homo sapiens
taggaaagaataagtcattcagtctctcgggatgtgggttagggataacttacaggcttaattacttact

SEQ ID NO: 7611 - DNA, 69 bp, Homo sapiens
agtcattcagtctctcgggatgtgggttagggataacttacaggcttaattacttacttagttaaatat

SEQ ID NO: 7612 - DNA, 70 bp, Homo sapiens
ttcagtctctcgggatgtgggttagggataacttacaggcttaattacttacttagttaaatatttctga

SEQ ID NO: 7613 - DNA, 71 bp, Homo sapiens
caggcttaattacttacttagttaaatatttctgaagactattccattcacagtctttttcctgaataagc

SEQ ID NO: 7614 - DNA, 72 bp, Homo sapiens
tacttacttagttaaatatttctgaagactattccattcacagtctttttcctgaataagccactggatggg

SEQ ID NO: 7615 - DNA, 74 bp, Homo sapiens
tatttctgaagactattccattcacagtctttttcctgaataagccactggatgggtacttacttgacctccta

SEQ ID NO: 7616 - DNA, 71 bp, Homo sapiens
attcacagtctttttcctgaataagccactggatgggtacttacttgacctcctaggcagtttgaaagtgg

SEQ ID NO: 7617 - DNA, 70 bp, Homo sapiens
tttttcctgaataagccactggatgggtacttacttgacctcctaggcagtttgaaagtgggaaatagga

SEQ ID NO: 7618 - DNA, 71 bp, Homo sapiens
ataagccactggatgggtacttacttgacctcctaggcagtttgaaagtgggaaataggaactcaggttga

SEQ ID NO: 7619 - DNA, 76 bp, Homo sapiens
ttgacctcctaggcagtttgaaagtgggaaataggaactcaggttgatgagcattattatttctgtcattagacag

SEQ ID NO: 7620 - DNA, 76 bp, Homo sapiens
taggcagtttgaaagtgggaaataggaactcaggttgatgagcattattatttctgtcattagacaggtatacttc

SEQ ID NO: 7621 - DNA, 76 bp, Homo sapiens
tgaaagtgggaaataggaactcaggttgatgagcattattatttctgtcattagacaggtatacttctgtcttatt

SEQ ID NO: 7622 - DNA, 76 bp, Homo sapiens
ggaaataggaactcaggttgatgagcattattatttctgtcattagacaggtatacttctgtcttatttaccaatc

SEQ ID NO: 7623 - DNA, 78 bp, Homo sapiens
gagcattattatttctgtcattagacaggtatacttctgtcttatttaccaatcttgtgtaattgcattggcttacta

SEQ ID NO: 7624 - DNA, 74 bp, Homo sapiens
ttctgtcattagacaggtatacttctgtcttatttaccaatcttgtgtaattgcattggcttactaataaaaac

SEQ ID NO: 7625 - DNA, 71 bp, Homo sapiens
agacaggtatacttctgtcttatttaccaatcttgtgtaattgcattggcttactaataaaaacttaagtc

SEQ ID NO: 7626 - DNA, 70 bp, Homo sapiens
cttctgtcttatttaccaatcttgtgtaattgcattggcttactaataaaaacttaagtctaaacaatgt

SEQ ID NO: 7627 - DNA, 71 bp, Homo sapiens
tatttaccaatcttgtgtaattgcattggcttactaataaaaacttaagtctaaacaatgttcttctggcg

SEQ ID NO: 7628 - DNA, 73 bp, Homo sapiens
cttgtgtaattgcattggcttactaataaaaacttaagtctaaacaatgttcttctggcgtctactcatactg

SEQ ID NO: 7629 - DNA, 74 bp, Homo sapiens
tgcattggcttactaataaaaacttaagtctaaacaatgttcttctggcgtctactcatactgtattcttctcc

SEQ ID NO: 7630 - DNA, 75 bp, Homo sapiens
tactaataaaaacttaagtctaaacaatgttcttctggcgtctactcatactgtattcttctcctgagatcactg

SEQ ID NO: 7631 - DNA, 74 bp, Homo sapiens
ataaaaacttaagtctaaacaatgttcttctggcgtctactcatactgtattcttctcctgagatcactgtttg

SEQ ID NO: 7632 - DNA, 78 bp, Homo sapiens
aagtctaaacaatgttcttctggcgtctactcatactgtattcttctcctgagatcactgtttgtctccatcttttca

SEQ ID NO: 7633 - DNA, 81 bp, Homo sapiens
ttcttctggcgtctactcatactgtattcttctcctgagatcactgtttgtctccatcttttcacatctagtgggctgaaa

SEQ ID NO: 7634 - DNA, 83 bp, Homo sapiens
atactgtattcttctcctgagatcactgtttgtctccatcttttcacatctagtgggctgaaaatgcagcatttgagaagtca

SEQ ID NO: 7635 - DNA, 82 bp, Homo sapiens
tctccatcttttcacatctagtgggctgaaaatgcagcatttgagaagtcactgccatctctttcgtcaggctctctttctt

SEQ ID NO: 7636 - DNA, 83 bp, Homo sapiens
tcttttcacatctagtgggctgaaaatgcagcatttgagaagtcactgccatctctttcgtcaggctctctttctttgcttca

SEQ ID NO: 7637 - DNA, 84 bp, Homo sapiens
tctagtgggctgaaaatgcagcatttgagaagtcactgccatctctttcgtcaggctctctttctttgcttcagtgacaccaca

SEQ ID NO: 7638 - DNA, 81 bp, Homo sapiens
aaatgcagcatttgagaagtcactgccatctctttcgtcaggctctctttctttgcttcagtgacaccacagtcatggttt

SEQ ID NO: 7639 - DNA, 79 bp, Homo sapiens
tttgagaagtcactgccatctctttcgtcaggctctctttctttgcttcagtgacaccacagtcatggttttcttctta

SEQ ID NO: 7640 - DNA, 78 bp, Homo sapiens
agtcactgccatctctttcgtcaggctctctttctttgcttcagtgacaccacagtcatggttttcttcttatcttac

SEQ ID NO: 7641 - DNA, 75 bp, Homo sapiens
tttcgtcaggctctctttctttgcttcagtgacaccacagtcatggttttcttcttatcttactggtgtcaattt

SEQ ID NO: 7642 - DNA, 74 bp, Homo sapiens
agtgacaccacagtcatggttttcttcttatcttactggtgtcaattttctgtatgaactcctcttctaggacc

SEQ ID NO: 7643 - DNA, 74 bp, Homo sapiens
tcatggttttcttcttatcttactggtgtcaattttctgtatgaactcctcttctaggacccatccttgaaatg

SEQ ID NO: 7644 - DNA, 73 bp, Homo sapiens
ttttcttcttatcttactggtgtcaattttctgtatgaactcctcttctaggacccatccttgaaatgttgga

SEQ ID NO: 7645 - DNA, 77 bp, Homo sapiens
tatcttactggtgtcaattttctgtatgaactcctcttctaggacccatccttgaaatgttggagagcctcaacatg

SEQ ID NO: 7646 - DNA, 75 bp, Homo sapiens
aattttctgtatgaactcctcttctaggacccatccttgaaatgttggagagcctcaacatgtggtcccaggctg

SEQ ID NO: 7647 - DNA, 76 bp, Homo sapiens
tatgaactcctcttctaggacccatccttgaaatgttggagagcctcaacatgtggtcccaggctggcgtttaaga

SEQ ID NO: 7648 - DNA, 73 bp, Homo sapiens
tcttctaggacccatccttgaaatgttggagagcctcaacatgtggtcccaggctggcgtttaagaaaacttc

SEQ ID NO: 7649 - DNA, 72 bp, Homo sapiens
aggacccatccttgaaatgttggagagcctcaacatgtggtcccaggctggcgtttaagaaaacttccattc

SEQ ID NO: 7650 - DNA, 73 bp, Homo sapiens
cttgaaatgttggagagcctcaacatgtggtcccaggctggcgtttaagaaaacttccattcctcctgttcca

SEQ ID NO: 7651 - DNA, 70 bp, Homo sapiens
agagcctcaacatgtggtcccaggctggcgtttaagaaaacttccattcctcctgttccagtttttacca

SEQ ID NO: 7652 - DNA, 70 bp, Homo sapiens
acatgtggtcccaggctggcgtttaagaaaacttccattcctcctgttccagtttttaccatctcagtaa

SEQ ID NO: 7653 - DNA, 68 bp, Homo sapiens
ggctggcgtttaagaaaacttccattcctcctgttccagtttttaccatctcagtaagggcactttta

SEQ ID NO: 7654 - DNA, 68 bp, Homo sapiens
gtttaagaaaacttccattcctcctgttccagtttttaccatctcagtaagggcacttttaatcacta

SEQ ID NO: 7655 - DNA, 69 bp, Homo sapiens
aaacttccattcctcctgttccagtttttaccatctcagtaagggcacttttaatcactagccagaaac

SEQ ID NO: 7656 - DNA, 75 bp, Homo sapiens
ctgttccagtttttaccatctcagtaagggcacttttaatcactagccagaaacccatgactcattcatcttcta

SEQ ID NO: 7657 - DNA, 75 bp, Homo sapiens
tttttaccatctcagtaagggcacttttaatcactagccagaaacccatgactcattcatcttctaccctgctac

SEQ ID NO: 7658 - DNA, 75 bp, Homo sapiens
tcagtaagggcacttttaatcactagccagaaacccatgactcattcatcttctaccctgctaccaaatctaatt

SEQ ID NO: 7659 - DNA, 76 bp, Homo sapiens
cacttttaatcactagccagaaacccatgactcattcatcttctaccctgctaccaaatctaatttgtcatcaagt

SEQ ID NO: 7660 - DNA, 79 bp, Homo sapiens
ttaatcactagccagaaacccatgactcattcatcttctaccctgctaccaaatctaatttgtcatcaagtttagatga

SEQ ID NO: 7661 - DNA, 74 bp, Homo sapiens
ccagaaacccatgactcattcatcttctaccctgctaccaaatctaatttgtcatcaagtttagatgatttttt

SEQ ID NO: 7662 - DNA, 75 bp, Homo sapiens
gcgcccggccaagtttagatgattctaatttctagatgcactgcaagtccttgtccgtgttcagtactactaccg

SEQ ID NO: 7663 - DNA, 76 bp, Homo sapiens
caagtttagatgattctaatttctagatgcactgcaagtccttgtccgtgttcagtactactaccgtctttgtctg

SEQ ID NO: 7664 - DNA, 75 bp, Homo sapiens
aagtttagatgattctaatttctagatgcactgcaagtccttgtccgtgttcagtactactaccgtctttgtctg

SEQ ID NO: 7665 - DNA, 76 bp, Homo sapiens
gattctaatttctagatgcactgcaagtccttgtccgtgttcagtactactaccgtctttgtctggagggacataa

SEQ ID NO: 7666 - DNA, 74 bp, Homo sapiens
taatttctagatgcactgcaagtccttgtccgtgttcagtactactaccgtctttgtctggagggacataattt

SEQ ID NO: 7667 - DNA, 72 bp, Homo sapiens
tccttgtccgtgttcagtactactaccgtctttgtctggagggacataatttttaatccagattgtgaaata

SEQ ID NO: 7668 - DNA, 71 bp, Homo sapiens
ttcagtactactaccgtctttgtctggagggacataatttttaatccagattgtgaaatagcctcctaaaa

SEQ ID NO: 7669 - DNA, 68 bp, Homo sapiens
actactaccgtctttgtctggagggacataatttttaatccagattgtgaaatagcctcctaaaaaaa

SEQ ID NO: 7670 - DNA, 69 bp, Homo sapiens
tgtctggagggacataatttttaatccagattgtgaaatagcctcctaaaaaaaaatctttgtttccac

SEQ ID NO: 7671 - DNA, 69 bp, Homo sapiens
gagggacataatttttaatccagattgtgaaatagcctcctaaaaaaaaatctttgtttccactcatcc

SEQ ID NO: 7672 - DNA, 68 bp, Homo sapiens
tttttaatccagattgtgaaatagcctcctaaaaaaaaatctttgtttccactcatccccgtcagtcc

SEQ ID NO: 7673 - DNA, 69 bp, Homo sapiens
attgtgaaatagcctcctaaaaaaaaatctttgtttccactcatccccgtcagtccctttgctacataa

SEQ ID NO: 7674 - DNA, 70 bp, Homo sapiens
aatagcctcctaaaaaaaaatctttgtttccactcatccccgtcagtccctttgctacataagagtcaga

SEQ ID NO: 7675 - DNA, 71 bp, Homo sapiens
aaaaatctttgtttccactcatccccgtcagtccctttgctacataagagtcagagggatgatctttttaa

SEQ ID NO: 7676 - DNA, 73 bp, Homo sapiens
tctttgtttccactcatccccgtcagtccctttgctacataagagtcagagggatgatctttttaaaaagtga

SEQ ID NO: 7677 - DNA, 73 bp, Homo sapiens
agtccctttgctacataagagtcagagggatgatctttttaaaaagtgagtcatactatttgcctttggtgtc

SEQ ID NO: 7678 - DNA, 74 bp, Homo sapiens
tttgctacataagagtcagagggatgatctttttaaaaagtgagtcatactatttgcctttggtgtcttcctac

SEQ ID NO: 7679 - DNA, 75 bp, Homo sapiens
tacataagagtcagagggatgatctttttaaaaagtgagtcatactatttgcctttggtgtcttcctactgatct

SEQ ID NO: 7680 - DNA, 74 bp, Homo sapiens
ataagagtcagagggatgatctttttaaaaagtgagtcatactatttgcctttggtgtcttcctactgatctta

SEQ ID NO: 7681 - DNA, 73 bp, Homo sapiens
gatctttttaaaaagtgagtcatactatttgcctttggtgtcttcctactgatcttagcaaaaattcagaaca

SEQ ID NO: 7682 - DNA, 72 bp, Homo sapiens
ttttaaaaagtgagtcatactatttgcctttggtgtcttcctactgatcttagcaaaaattcagaacacctg

SEQ ID NO: 7683 - DNA, 74 bp, Homo sapiens
ttaaaaagtgagtcatactatttgcctttggtgtcttcctactgatcttagcaaaaattcagaacacctgtaca

SEQ ID NO: 7684 - DNA, 76 bp, Homo sapiens
aagtgagtcatactatttgcctttggtgtcttcctactgatcttagcaaaaattcagaacacctgtacatggctta

SEQ ID NO: 7685 - DNA, 75 bp, Homo sapiens
agtcatactatttgcctttggtgtcttcctactgatcttagcaaaaattcagaacacctgtacatggcttacaag

SEQ ID NO: 7686 - DNA, 76 bp, Homo sapiens
tatttgcctttggtgtcttcctactgatcttagcaaaaattcagaacacctgtacatggcttacaaggccttatga

SEQ ID NO: 7687 - DNA, 76 bp, Homo sapiens
tttggtgtcttcctactgatcttagcaaaaattcagaacacctgtacatggcttacaaggccttatgatctgttcc

SEQ ID NO: 7688 - DNA, 75 bp, Homo sapiens
tcttcctactgatcttagcaaaaattcagaacacctgtacatggcttacaaggccttatgatctgttccttcccc

SEQ ID NO: 7689 - DNA, 73 bp, Homo sapiens
ttagcaaaaattcagaacacctgtacatggcttacaaggccttatgatctgttccttcccctctctccaactt

SEQ ID NO: 7690 - DNA, 72 bp, Homo sapiens
aaaattcagaacacctgtacatggcttacaaggccttatgatctgttccttcccctctctccaactttgtct

SEQ ID NO: 7691 - DNA, 72 bp, Homo sapiens
acacctgtacatggcttacaaggccttatgatctgttccttcccctctctccaactttgtcttttaccagcc

SEQ ID NO: 7692 - DNA, 73 bp, Homo sapiens
cttatgatctgttccttcccctctctccaactttgtcttttaccagcctctccacaaggctttagctgtatta

SEQ ID NO: 7693 - DNA, 69 bp, Homo sapiens
ctctctccaactttgtcttttaccagcctctccacaaggctttagctgtattacctgttttttcttctt

SEQ ID NO: 7694 - DNA, 69 bp, Homo sapiens
caactttgtcttttaccagcctctccacaaggctttagctgtattacctgttttttcttctttcaatat

SEQ ID NO: 7695 - DNA, 69 bp, Homo sapiens
tctccacaaggctttagctgtattacctgttttttcttctttcaatatttctgggtcttttggacaagt

SEQ ID NO: 7696 - DNA, 68 bp, Homo sapiens
ttcttctttcaatatttctgggtcttttggacaagtttttctgtcttactctttgtctagttaacacc

SEQ ID NO: 7697 - DNA, 67 bp, Homo sapiens
caatatttctgggtcttttggacaagtttttctgtcttactctttgtctagttaacacctacctaac

SEQ ID NO: 7698 - DNA, 65 bp, Homo sapiens
ctgggtcttttggacaagtttttctgtcttactctttgtctagttaacacctacctaacctttaa

SEQ ID NO: 7699 - DNA, 66 bp, Homo sapiens
ggacaagtttttctgtcttactctttgtctagttaacacctacctaacctttaagccttgtcttaa

SEQ ID NO: 7700 - DNA, 65 bp, Homo sapiens
tttttctgtcttactctttgtctagttaacacctacctaacctttaagccttgtcttaaatattt

SEQ ID NO: 7701 - DNA, 65 bp, Homo sapiens
ctctttgtctagttaacacctacctaacctttaagccttgtcttaaatatttttttagacaggtc

SEQ ID NO: 7702 - DNA, 66 bp, Homo sapiens
tctagttaacacctacctaacctttaagccttgtcttaaatatttttttagacaggtctttcttgc

SEQ ID NO: 7703 - DNA, 66 bp, Homo sapiens
cctaacctttaagccttgtcttaaatatttttttagacaggtctttcttgcttcctagtatttcac

SEQ ID NO: 7704 - DNA, 69 bp, Homo sapiens
taagccttgtcttaaatatttttttagacaggtctttcttgcttcctagtatttcactcttgtggtacc

SEQ ID NO: 7705 - DNA, 67 bp, Homo sapiens
cttaaatatttttttagacaggtctttcttgcttcctagtatttcactcttgtggtacctttttctc

SEQ ID NO: 7706 - DNA, 71 bp, Homo sapiens
ttttagacaggtctttcttgcttcctagtatttcactcttgtggtacctttttctcttccattatagtatg

SEQ ID NO: 7707 - DNA, 71 bp, Homo sapiens
gtctttcttgcttcctagtatttcactcttgtggtacctttttctcttccattatagtatgtgttggaatt

SEQ ID NO: 7708 - DNA, 73 bp, Homo sapiens
cttgcttcctagtatttcactcttgtggtacctttttctcttccattatagtatgtgttggaatttatattca

SEQ ID NO: 7709 - DNA, 73 bp, Homo sapiens
tagtatttcactcttgtggtacctttttctcttccattatagtatgtgttggaatttatattcatgtatttgt

SEQ ID NO: 7710 - DNA, 72 bp, Homo sapiens
gtgttggaatttatattcatgtatttgttttaatgtttgccttgctccttaaattgtaaattcccagagagc

SEQ ID NO: 7711 - DNA, 72 bp, Homo sapiens
ttatattcatgtatttgttttaatgtttgccttgctccttaaattgtaaattcccagagagctaaaatcttg

SEQ ID NO: 7712 - DNA, 72 bp, Homo sapiens
gtatttgttttaatgtttgccttgctccttaaattgtaaattcccagagagctaaaatcttgtctgtcttgc

SEQ ID NO: 7713 - DNA, 75 bp, Homo sapiens
tttaatgtttgccttgctccttaaattgtaaattcccagagagctaaaatcttgtctgtcttgcttgctacatta

SEQ ID NO: 7714 - DNA, 77 bp, Homo sapiens
tttgccttgctccttaaattgtaaattcccagagagctaaaatcttgtctgtcttgcttgctacattatcccagctc

SEQ ID NO: 7715 - DNA, 77 bp, Homo sapiens
ttaaattgtaaattcccagagagctaaaatcttgtctgtcttgcttgctacattatcccagctcctagcctcattcc

SEQ ID NO: 7716 - DNA, 79 bp, Homo sapiens
gtaaattcccagagagctaaaatcttgtctgtcttgcttgctacattatcccagctcctagcctcattcctcataccta

SEQ ID NO: 7717 - DNA, 78 bp, Homo sapiens
agctaaaatcttgtctgtcttgcttgctacattatcccagctcctagcctcattcctcatacctactgagtatttgtt

SEQ ID NO: 7718 - DNA, 80 bp, Homo sapiens
aatcttgtctgtcttgcttgctacattatcccagctcctagcctcattcctcatacctactgagtatttgtttgatgaaa

SEQ ID NO: 7719 - DNA, 72 bp, Homo sapiens
aagaaaaggaaaggaaggaatcagtatgtcattgccaccctctgtaccgttctgcagctttgtttctcctcc

SEQ ID NO: 7720 - DNA, 75 bp, Homo sapiens
aaaggaaggaatcagtatgtcattgccaccctctgtaccgttctgcagctttgtttctcctccctatcctgaaca

SEQ ID NO: 7721 - DNA, 78 bp, Homo sapiens
aatcagtatgtcattgccaccctctgtaccgttctgcagctttgtttctcctccctatcctgaacagatgaatttcag

SEQ ID NO: 7722 - DNA, 74 bp, Homo sapiens
accctctgtaccgttctgcagctttgtttctcctccctatcctgaacagatgaatttcagtgtattttcctaga

SEQ ID NO: 7723 - DNA, 81 bp, Homo sapiens
tctgcagctttgtttctcctccctatcctgaacagatgaatttcagtgtattttcctagagctcatgcattgtaacattta

SEQ ID NO: 7724 - DNA, 78 bp, Homo sapiens
agctttgtttctcctccctatcctgaacagatgaatttcagtgtattttcctagagctcatgcattgtaacatttagc

SEQ ID NO: 7725 - DNA, 79 bp, Homo sapiens
tgtttctcctccctatcctgaacagatgaatttcagtgtattttcctagagctcatgcattgtaacatttagctctgtt

SEQ ID NO: 7726 - DNA, 80 bp, Homo sapiens
tcctccctatcctgaacagatgaatttcagtgtattttcctagagctcatgcattgtaacatttagctctgtttaattca

SEQ ID NO: 7727 - DNA, 80 bp, Homo sapiens
cctatcctgaacagatgaatttcagtgtattttcctagagctcatgcattgtaacatttagctctgtttaattcaatgaa

SEQ ID NO: 7728 - DNA, 81 bp, Homo sapiens
acagatgaatttcagtgtattttcctagagctcatgcattgtaacatttagctctgtttaattcaatgaatgtcaccttga

SEQ ID NO: 7729 - DNA, 81 bp, Homo sapiens
cagatgaatttcagtgtattttcctagagctcatgcattgtaacatttagctctgtttaattcaatgaatgtcaccttgat

SEQ ID NO: 7730 - DNA, 78 bp, Homo sapiens
tttcagtgtattttcctagagctcatgcattgtaacatttagctctgtttaattcaatgaatgtcaccttgattttag

SEQ ID NO: 7731 - DNA, 78 bp, Homo sapiens
cagtgtattttcctagagctcatgcattgtaacatttagctctgtttaattcaatgaatgtcaccttgattttagtta

SEQ ID NO: 7732 - DNA, 78 bp, Homo sapiens
ctcatgcattgtaacatttagctctgtttaattcaatgaatgtcaccttgattttagttaaaaacagcatatgactta

SEQ ID NO: 7733 - DNA, 75 bp, Homo sapiens
gtaacatttagctctgtttaattcaatgaatgtcaccttgattttagttaaaaacagcatatgacttaagatgaa

SEQ ID NO: 7734 - DNA, 76 bp, Homo sapiens
gctctgtttaattcaatgaatgtcaccttgattttagttaaaaacagcatatgacttaagatgaaaatagagtgaa

SEQ ID NO: 7735 - DNA, 74 bp, Homo sapiens
ccttgattttagttaaaaacagcatatgacttaagatgaaaatagagtgaagttaaatagaaagcagatacaga

SEQ ID NO: 7736 - DNA, 73 bp, Homo sapiens
tttagttaaaaacagcatatgacttaagatgaaaatagagtgaagttaaatagaaagcagatacagaagaatt

SEQ ID NO: 7737 - DNA, 73 bp, Homo sapiens
ttaagatgaaaatagagtgaagttaaatagaaagcagatacagaagaatttaaggtggatgttgtaccagtcc

SEQ ID NO: 7738 - DNA, 72 bp, Homo sapiens
aaaatagagtgaagttaaatagaaagcagatacagaagaatttaaggtggatgttgtaccagtcctacctga

SEQ ID NO: 7739 - DNA, 73 bp, Homo sapiens
aatagaaagcagatacagaagaatttaaggtggatgttgtaccagtcctacctgaggagcaaggaagttgaag

SEQ ID NO: 7740 - DNA, 72 bp, Homo sapiens
tacagaagaatttaaggtggatgttgtaccagtcctacctgaggagcaaggaagttgaagggaatacattat

SEQ ID NO: 7741 - DNA, 70 bp, Homo sapiens
aatttaaggtggatgttgtaccagtcctacctgaggagcaaggaagttgaagggaatacattattttcat

SEQ ID NO: 7742 - DNA, 71 bp, Homo sapiens
atgttgtaccagtcctacctgaggagcaaggaagttgaagggaatacattattttcattttcaaagaaaga

SEQ ID NO: 7743 - DNA, 68 bp, Homo sapiens
ggagcaaggaagttgaagggaatacattattttcattttcaaagaaagatttagaattttaagctttc

SEQ ID NO: 7744 - DNA, 69 bp, Homo sapiens
gaagttgaagggaatacattattttcattttcaaagaaagatttagaattttaagctttcctgccttga

SEQ ID NO: 7745 - DNA, 69 bp, Homo sapiens
ggaatacattattttcattttcaaagaaagatttagaattttaagctttcctgccttgataggaaagga

SEQ ID NO: 7746 - DNA, 70 bp, Homo sapiens
tttcattttcaaagaaagatttagaattttaagctttcctgccttgataggaaaggaacattttgctctg

SEQ ID NO: 7747 - DNA, 68 bp, Homo sapiens
ttttcaaagaaagatttagaattttaagctttcctgccttgataggaaaggaacattttgctctgttt

SEQ ID NO: 7748 - DNA, 72 bp, Homo sapiens
tgttttttttttaccagtaaactgagtaccagatattgtttcaaagtgtgattactggattgcacatttagc

SEQ ID NO: 7749 - DNA, 75 bp, Homo sapiens
ttttaccagtaaactgagtaccagatattgtttcaaagtgtgattactggattgcacatttagctgcgtaatttc

SEQ ID NO: 7750 - DNA, 77 bp, Homo sapiens
aactgagtaccagatattgtttcaaagtgtgattactggattgcacatttagctgcgtaatttcgtatgtaagtata

SEQ ID NO: 7751 - DNA, 78 bp, Homo sapiens
cagatattgtttcaaagtgtgattactggattgcacatttagctgcgtaatttcgtatgtaagtatacgttgatgtaa

SEQ ID NO: 7752 - DNA, 76 bp, Homo sapiens
gtttcaaagtgtgattactggattgcacatttagctgcgtaatttcgtatgtaagtatacgttgatgtaatataaa

SEQ ID NO: 7753 - DNA, 75 bp, Homo sapiens
gtgtgattactggattgcacatttagctgcgtaatttcgtatgtaagtatacgttgatgtaatataaaaacaatt

SEQ ID NO: 7754 - DNA, 72 bp, Homo sapiens
tggattgcacatttagctgcgtaatttcgtatgtaagtatacgttgatgtaatataaaaacaatttaagttt

SEQ ID NO: 7755 - DNA, 71 bp, Homo sapiens
gctgcgtaatttcgtatgtaagtatacgttgatgtaatataaaaacaatttaagttttgagattgaaggtc

SEQ ID NO: 7756 - DNA, 70 bp, Homo sapiens
ttcgtatgtaagtatacgttgatgtaatataaaaacaatttaagttttgagattgaaggtccttaatcac

SEQ ID NO: 7757 - DNA, 71 bp, Homo sapiens
tcgtatgtaagtatacgttgatgtaatataaaaacaatttaagttttgagattgaaggtccttaatcacca

SEQ ID NO: 7758 - DNA, 69 bp, Homo sapiens
gtaagtatacgttgatgtaatataaaaacaatttaagttttgagattgaaggtccttaatcaccacgat

SEQ ID NO: 7759 - DNA, 69 bp, Homo sapiens
acgttgatgtaatataaaaacaatttaagttttgagattgaaggtccttaatcaccacgattttgcttc

SEQ ID NO: 7760 - DNA, 71 bp, Homo sapiens
cgttgatgtaatataaaaacaatttaagttttgagattgaaggtccttaatcaccacgattttgcttctca

SEQ ID NO: 7761 - DNA, 71 bp, Homo sapiens
gatgtaatataaaaacaatttaagttttgagattgaaggtccttaatcaccacgattttgcttctcaatat

SEQ ID NO: 7762 - DNA, 72 bp, Homo sapiens
caatttaagttttgagattgaaggtccttaatcaccacgattttgcttctcaatattattcttccaagatgt

SEQ ID NO: 7763 - DNA, 76 bp, Homo sapiens
tttgagattgaaggtccttaatcaccacgattttgcttctcaatattattcttccaagatgttttactgcatgttg

SEQ ID NO: 7764 - DNA, 75 bp, Homo sapiens
aaggtccttaatcaccacgattttgcttctcaatattattcttccaagatgttttactgcatgttgtgatggtaa

SEQ ID NO: 7765 - DNA, 77 bp, Homo sapiens
cttaatcaccacgattttgcttctcaatattattcttccaagatgttttactgcatgttgtgatggtaattgcaact

SEQ ID NO: 7766 - DNA, 77 bp, Homo sapiens
cacgattttgcttctcaatattattcttccaagatgttttactgcatgttgtgatggtaattgcaactttcaaagtg

SEQ ID NO: 7767 - DNA, 78 bp, Homo sapiens
cttctcaatattattcttccaagatgttttactgcatgttgtgatggtaattgcaactttcaaagtgtagtagagaca

SEQ ID NO: 7768 - DNA, 77 bp, Homo sapiens
ttattcttccaagatgttttactgcatgttgtgatggtaattgcaactttcaaagtgtagtagagacattagaggac

SEQ ID NO: 7769 - DNA, 76 bp, Homo sapiens
tgttttactgcatgttgtgatggtaattgcaactttcaaagtgtagtagagacattagaggacctggtagttacaa

SEQ ID NO: 7770 - DNA, 73 bp, Homo sapiens
atggtaattgcaactttcaaagtgtagtagagacattagaggacctggtagttacaacagtgtactttcctga

SEQ ID NO: 7771 - DNA, 72 bp, Homo sapiens
aactttcaaagtgtagtagagacattagaggacctggtagttacaacagtgtactttcctgacttacagata

SEQ ID NO: 7772 - DNA, 71 bp, Homo sapiens
aaagtgtagtagagacattagaggacctggtagttacaacagtgtactttcctgacttacagatacatttt

SEQ ID NO: 7773 - DNA, 71 bp, Homo sapiens
agtgtactttcctgacttacagatacatttttaatgaaagcattaacaccaaaatggccgtagctaccatt

SEQ ID NO: 7774 - DNA, 70 bp, Homo sapiens
cctgacttacagatacatttttaatgaaagcattaacaccaaaatggccgtagctaccatttattaaaac

SEQ ID NO: 7775 - DNA, 70 bp, Homo sapiens
gatacatttttaatgaaagcattaacaccaaaatggccgtagctaccatttattaaaacttactctgtgg

SEQ ID NO: 7776 - DNA, 73 bp, Homo sapiens
ttaatgaaagcattaacaccaaaatggccgtagctaccatttattaaaacttactctgtggtaggcattgcta

SEQ ID NO: 7777 - DNA, 70 bp, Homo sapiens
ttaacaccaaaatggccgtagctaccatttattaaaacttactctgtggtaggcattgctagagcttttt

SEQ ID NO: 7778 - DNA, 72 bp, Homo sapiens
aaaatggccgtagctaccatttattaaaacttactctgtggtaggcattgctagagcttttttatatggata

SEQ ID NO: 7779 - DNA, 76 bp, Homo sapiens
gctaccatttattaaaacttactctgtggtaggcattgctagagcttttttatatggatattctcaaaatctcaca

SEQ ID NO: 7780 - DNA, 73 bp, Homo sapiens
taaaacttactctgtggtaggcattgctagagcttttttatatggatattctcaaaatctcacaaaaagtctt

SEQ ID NO: 7781 - DNA, 74 bp, Homo sapiens
ggtaggcattgctagagcttttttatatggatattctcaaaatctcacaaaaagtctttaaggtagccattatc

SEQ ID NO: 7782 - DNA, 71 bp, Homo sapiens
gctagagcttttttatatggatattctcaaaatctcacaaaaagtctttaaggtagccattatctttgttt

SEQ ID NO: 7783 - DNA, 72 bp, Homo sapiens
ttttatatggatattctcaaaatctcacaaaaagtctttaaggtagccattatctttgttttatagataaga

SEQ ID NO: 7784 - DNA, 71 bp, Homo sapiens
tctcaaaatctcacaaaaagtctttaaggtagccattatctttgttttatagataagaataatatggaggt

SEQ ID NO: 7785 - DNA, 69 bp, Homo sapiens
cacaaaaagtctttaaggtagccattatctttgttttatagataagaataatatggaggttcagaaggg

SEQ ID NO: 7786 - DNA, 69 bp, Homo sapiens
gtctttaaggtagccattatctttgttttatagataagaataatatggaggttcagaagggttaagtag

SEQ ID NO: 7787 - DNA, 69 bp, Homo sapiens
gccattatctttgttttatagataagaataatatggaggttcagaagggttaagtagtttgattaaggg

SEQ ID NO: 7788 - DNA, 74 bp, Homo sapiens
ttatagataagaataatatggaggttcagaagggttaagtagtttgattaagggtcatgtaggtgacagatcca

SEQ ID NO: 7789 - DNA, 73 bp, Homo sapiens
aataatatggaggttcagaagggttaagtagtttgattaagggtcatgtaggtgacagatccagcatttgaac

SEQ ID NO: 7790 - DNA, 73 bp, Homo sapiens
tcagaagggttaagtagtttgattaagggtcatgtaggtgacagatccagcatttgaacccagttttgtctaa

SEQ ID NO: 7791 - DNA, 72 bp, Homo sapiens
gttaagtagtttgattaagggtcatgtaggtgacagatccagcatttgaacccagttttgtctaagtcaaaa

SEQ ID NO: 7792 - DNA, 75 bp, Homo sapiens
tttgattaagggtcatgtaggtgacagatccagcatttgaacccagttttgtctaagtcaaaagcctctgctgtt

SEQ ID NO: 7793 - DNA, 76 bp, Homo sapiens
agggtcatgtaggtgacagatccagcatttgaacccagttttgtctaagtcaaaagcctctgctgtttcaatttca

SEQ ID NO: 7794 - DNA, 80 bp, Homo sapiens
acagatccagcatttgaacccagttttgtctaagtcaaaagcctctgctgtttcaatttcagcatgctgcctccagctaa

SEQ ID NO: 7795 - DNA, 76 bp, Homo sapiens
agcatttgaacccagttttgtctaagtcaaaagcctctgctgtttcaatttcagcatgctgcctccagctaacttt

SEQ ID NO: 7796 - DNA, 75 bp, Homo sapiens
cagttttgtctaagtcaaaagcctctgctgtttcaatttcagcatgctgcctccagctaacttttgttttctaat

SEQ ID NO: 7797 - DNA, 74 bp, Homo sapiens
taagtcaaaagcctctgctgtttcaatttcagcatgctgcctccagctaacttttgttttctaattttagaaat

SEQ ID NO: 7798 - DNA, 74 bp, Homo sapiens
aaaagcctctgctgtttcaatttcagcatgctgcctccagctaacttttgttttctaattttagaaattggaga

SEQ ID NO: 7799 - DNA, 74 bp, Homo sapiens
tttcaatttcagcatgctgcctccagctaacttttgttttctaattttagaaattggagactccctgtgtagta

SEQ ID NO: 7800 - DNA, 73 bp, Homo sapiens
agcatgctgcctccagctaacttttgttttctaattttagaaattggagactccctgtgtagtacacttttca

SEQ ID NO: 7801 - DNA, 67 bp, Homo sapiens
cctccagctaacttttgttttctaattttagaaattggagactccctgtgtagtacacttttcaccc

SEQ ID NO: 7802 - DNA, 66 bp, Homo sapiens
gctaacttttgttttctaattttagaaattggagactccctgtgtagtacacttttcacccccaaa

SEQ ID NO: 7803 - DNA, 68 bp, Homo sapiens
ctaattttagaaattggagactccctgtgtagtacacttttcacccccaaaataactaatcagcattt

SEQ ID NO: 7804 - DNA, 71 bp, Homo sapiens
ttagaaattggagactccctgtgtagtacacttttcacccccaaaataactaatcagcattttatctgctt

SEQ ID NO: 7805 - DNA, 68 bp, Homo sapiens
ggagactccctgtgtagtacacttttcacccccaaaataactaatcagcattttatctgctttttttt

SEQ ID NO: 7806 - DNA, 76 bp, Homo sapiens
ccaccgcatctggctgcagtattttattttctaagatactctgaaaacactgaattcagtagaaactcaatatttg

SEQ ID NO: 7807 - DNA, 77 bp, Homo sapiens
gcatctggctgcagtattttattttctaagatactctgaaaacactgaattcagtagaaactcaatatttgttgaat

SEQ ID NO: 7808 - DNA, 73 bp, Homo sapiens
attttattttctaagatactctgaaaacactgaattcagtagaaactcaatatttgttgaattatctatggag

SEQ ID NO: 7809 - DNA, 75 bp, Homo sapiens
ctaagatactctgaaaacactgaattcagtagaaactcaatatttgttgaattatctatggagtagcaaccttta

SEQ ID NO: 7810 - DNA, 75 bp, Homo sapiens
ctctgaaaacactgaattcagtagaaactcaatatttgttgaattatctatggagtagcaacctttaaaaatgca

SEQ ID NO: 7811 - DNA, 74 bp, Homo sapiens
aacactgaattcagtagaaactcaatatttgttgaattatctatggagtagcaacctttaaaaatgcatatctt

SEQ ID NO: 7812 - DNA, 77 bp, Homo sapiens
tcagtagaaactcaatatttgttgaattatctatggagtagcaacctttaaaaatgcatatctttttctctgctatg

SEQ ID NO: 7813 - DNA, 76 bp, Homo sapiens
tatttgttgaattatctatggagtagcaacctttaaaaatgcatatctttttctctgctatgtattatttggaata

SEQ ID NO: 7814 - DNA, 75 bp, Homo sapiens
gttgaattatctatggagtagcaacctttaaaaatgcatatctttttctctgctatgtattatttggaatataaa

SEQ ID NO: 7815 - DNA, 73 bp, Homo sapiens
ctatggagtagcaacctttaaaaatgcatatctttttctctgctatgtattatttggaatataaagtttataa

SEQ ID NO: 7816 - DNA, 75 bp, Homo sapiens
gcaacctttaaaaatgcatatctttttctctgctatgtattatttggaatataaagtttataaataatcactgca

SEQ ID NO: 7817 - DNA, 78 bp, Homo sapiens
gcatatctttttctctgctatgtattatttggaatataaagtttataaataatcactgcattaacatgctgtctcttt

SEQ ID NO: 7818 - DNA, 78 bp, Homo sapiens
ttctctgctatgtattatttggaatataaagtttataaataatcactgcattaacatgctgtctcttttctggccctc

SEQ ID NO: 7819 - DNA, 77 bp, Homo sapiens
gctatgtattatttggaatataaagtttataaataatcactgcattaacatgctgtctcttttctggccctcttagc

SEQ ID NO: 7820 - DNA, 73 bp, Homo sapiens
ggaatataaagtttataaataatcactgcattaacatgctgtctcttttctggccctcttagccaaacttgtt

SEQ ID NO: 7821 - DNA, 72 bp, Homo sapiens
agtttataaataatcactgcattaacatgctgtctcttttctggccctcttagccaaacttgtttctttttc

SEQ ID NO: 7822 - DNA, 72 bp, Homo sapiens
taaataatcactgcattaacatgctgtctcttttctggccctcttagccaaacttgtttctttttcttcctt

SEQ ID NO: 7823 - DNA, 76 bp, Homo sapiens
catgagccacttgcaccaggccattcctttgaaattcttagagcagtttataagattctctatcttagttttctaa

SEQ ID NO: 7824 - DNA, 72 bp, Homo sapiens
cacttgcaccaggccattcctttgaaattcttagagcagtttataagattctctatcttagttttctaagtt

SEQ ID NO: 7825 - DNA, 70 bp, Homo sapiens
ccaggccattcctttgaaattcttagagcagtttataagattctctatcttagttttctaagtttgccct

SEQ ID NO: 7826 - DNA, 72 bp, Homo sapiens
cattcctttgaaattcttagagcagtttataagattctctatcttagttttctaagtttgccctttgtgatc

SEQ ID NO: 7827 - DNA, 71 bp, Homo sapiens
cctttgaaattcttagagcagtttataagattctctatcttagttttctaagtttgccctttgtgatctat

SEQ ID NO: 7828 - DNA, 71 bp, Homo sapiens
gaaattcttagagcagtttataagattctctatcttagttttctaagtttgccctttgtgatctatttttg

SEQ ID NO: 7829 - DNA, 71 bp, Homo sapiens
tcttagagcagtttataagattctctatcttagttttctaagtttgccctttgtgatctatttttgtttgt

SEQ ID NO: 7830 - DNA, 70 bp, Homo sapiens
gagcagtttataagattctctatcttagttttctaagtttgccctttgtgatctatttttgtttgtttac

SEQ ID NO: 7831 - DNA, 67 bp, Homo sapiens
gattctctatcttagttttctaagtttgccctttgtgatctatttttgtttgtttaccctttaaatg

SEQ ID NO: 7832 - DNA, 65 bp, Homo sapiens
tcttagttttctaagtttgccctttgtgatctatttttgtttgtttaccctttaaatggtaatgt

SEQ ID NO: 7833 - DNA, 65 bp, Homo sapiens
tctaagtttgccctttgtgatctatttttgtttgtttaccctttaaatggtaatgttatttaggg

SEQ ID NO: 7834 - DNA, 65 bp, Homo sapiens
gccctttgtgatctatttttgtttgtttaccctttaaatggtaatgttatttagggttctgtctt

SEQ ID NO: 7835 - DNA, 64 bp, Homo sapiens
tttttgtttgtttaccctttaaatggtaatgttatttagggttctgtctttggttctcttctct

SEQ ID NO: 7836 - DNA, 71 bp, Homo sapiens
tttaccctttaaatggtaatgttatttagggttctgtctttggttctcttctcttgatcatgctgagaact

SEQ ID NO: 7837 - DNA, 72 bp, Homo sapiens
ctttaaatggtaatgttatttagggttctgtctttggttctcttctcttgatcatgctgagaactttccctg

SEQ ID NO: 7838 - DNA, 73 bp, Homo sapiens
ttagggttctgtctttggttctcttctcttgatcatgctgagaactttccctgggtgattccatttttgttcc

SEQ ID NO: 7839 - DNA, 74 bp, Homo sapiens
tttggttctcttctcttgatcatgctgagaactttccctgggtgattccatttttgttccttggccttgaccat

SEQ ID NO: 7840 - DNA, 71 bp, Homo sapiens
tttccctgggtgattccatttttgttccttggccttgaccattgtgttcatatcaagagttgtaagtaaaa

SEQ ID NO: 7841 - DNA, 72 bp, Homo sapiens
ctgggtgattccatttttgttccttggccttgaccattgtgttcatatcaagagttgtaagtaaaatactta

SEQ ID NO: 7842 - DNA, 72 bp, Homo sapiens
atttttgttccttggccttgaccattgtgttcatatcaagagttgtaagtaaaatacttatggggccacata

SEQ ID NO: 7843 - DNA, 73 bp, Homo sapiens
cttggccttgaccattgtgttcatatcaagagttgtaagtaaaatacttatggggccacataggtaacataaa

SEQ ID NO: 7844 - DNA, 76 bp, Homo sapiens
ttcatatcaagagttgtaagtaaaatacttatggggccacataggtaacataaatgagtgacatggtaagggatga

SEQ ID NO: 7845 - DNA, 77 bp, Homo sapiens
agttgtaagtaaaatacttatggggccacataggtaacataaatgagtgacatggtaagggatgatggagatgctga

SEQ ID NO: 7846 - DNA, 78 bp, Homo sapiens
taaaatacttatggggccacataggtaacataaatgagtgacatggtaagggatgatggagatgctgatggattaaag

SEQ ID NO: 7847 - DNA, 83 bp, Homo sapiens
ataggtaacataaatgagtgacatggtaagggatgatggagatgctgatggattaaagtctctatgccctgttcagagctctg

SEQ ID NO: 7848 - DNA, 84 bp, Homo sapiens
ataaatgagtgacatggtaagggatgatggagatgctgatggattaaagtctctatgccctgttcagagctctggtcagattgt

SEQ ID NO: 7849 - DNA, 83 bp, Homo sapiens
atggtaagggatgatggagatgctgatggattaaagtctctatgccctgttcagagctctggtcagattgttgctcttttata

SEQ ID NO: 7850 - DNA, 85 bp, Homo sapiens
atgatggagatgctgatggattaaagtctctatgccctgttcagagctctggtcagattgttgctcttttataatatagtatcca

SEQ ID NO: 7851 - DNA, 82 bp, Homo sapiens
agatgctgatggattaaagtctctatgccctgttcagagctctggtcagattgttgctcttttataatatagtatccagtgt

SEQ ID NO: 7852 - DNA, 79 bp, Homo sapiens
attaaagtctctatgccctgttcagagctctggtcagattgttgctcttttataatatagtatccagtgttggcaaatc

SEQ ID NO: 7853 - DNA, 79 bp, Homo sapiens
tctatgccctgttcagagctctggtcagattgttgctcttttataatatagtatccagtgttggcaaatcttcagtttt

SEQ ID NO: 7854 - DNA, 78 bp, Homo sapiens
agagctctggtcagattgttgctcttttataatatagtatccagtgttggcaaatcttcagtttttcaagagatatta

SEQ ID NO: 7855 - DNA, 76 bp, Homo sapiens
gttgctcttttataatatagtatccagtgttggcaaatcttcagtttttcaagagatattaggcatctagagttct

SEQ ID NO: 7856 - DNA, 74 bp, Homo sapiens
aatatagtatccagtgttggcaaatcttcagtttttcaagagatattaggcatctagagttcttaatgggaaat

SEQ ID NO: 7857 - DNA, 73 bp, Homo sapiens
gttggcaaatcttcagtttttcaagagatattaggcatctagagttcttaatgggaaatttcttatttctata

SEQ ID NO: 7858 - DNA, 73 bp, Homo sapiens
gtttttcaagagatattaggcatctagagttcttaatgggaaatttcttatttctataataattatgagcaac

SEQ ID NO: 7859 - DNA, 75 bp, Homo sapiens
tcaagagatattaggcatctagagttcttaatgggaaatttcttatttctataataattatgagcaactggttaa

SEQ ID NO: 7860 - DNA, 71 bp, Homo sapiens
ggcatctagagttcttaatgggaaatttcttatttctataataattatgagcaactggttaaaatttcaac

SEQ ID NO: 7861 - DNA, 73 bp, Homo sapiens
tcttaatgggaaatttcttatttctataataattatgagcaactggttaaaatttcaaccatagtgcagacca

SEQ ID NO: 7862 - DNA, 73 bp, Homo sapiens
tgggaaatttcttatttctataataattatgagcaactggttaaaatttcaaccatagtgcagaccaatagta

SEQ ID NO: 7863 - DNA, 71 bp, Homo sapiens
ataattatgagcaactggttaaaatttcaaccatagtgcagaccaatagtaagtatttttagtttgcaggt

SEQ ID NO: 7864 - DNA, 69 bp, Homo sapiens
gcaactggttaaaatttcaaccatagtgcagaccaatagtaagtatttttagtttgcaggtttacttac

SEQ ID NO: 7865 - DNA, 69 bp, Homo sapiens
aatttcaaccatagtgcagaccaatagtaagtatttttagtttgcaggtttacttactgtaacttacca

SEQ ID NO: 7866 - DNA, 71 bp, Homo sapiens
cagaccaatagtaagtatttttagtttgcaggtttacttactgtaacttaccatgcttctcactcctagat

SEQ ID NO: 7867 - DNA, 75 bp, Homo sapiens
tttagtttgcaggtttacttactgtaacttaccatgcttctcactcctagatttatgtcttcagatctgaatttc

SEQ ID NO: 7868 - DNA, 75 bp, Homo sapiens
tttacttactgtaacttaccatgcttctcactcctagatttatgtcttcagatctgaatttcctgctgggtttta

SEQ ID NO: 7869 - DNA, 78 bp, Homo sapiens
atgcttctcactcctagatttatgtcttcagatctgaatttcctgctgggttttaggcttatcccattgtgttctata

SEQ ID NO: 7870 - DNA, 76 bp, Homo sapiens
tcctagatttatgtcttcagatctgaatttcctgctgggttttaggcttatcccattgtgttctatatgtaggagt

SEQ ID NO: 7871 - DNA, 76 bp, Homo sapiens
atttatgtcttcagatctgaatttcctgctgggttttaggcttatcccattgtgttctatatgtaggagttctgtg

SEQ ID NO: 7872 - DNA, 77 bp, Homo sapiens
agatctgaatttcctgctgggttttaggcttatcccattgtgttctatatgtaggagttctgtgtcccacaggcatc

SEQ ID NO: 7873 - DNA, 77 bp, Homo sapiens
gttttaggcttatcccattgtgttctatatgtaggagttctgtgtcccacaggcatctcaaagaccatgaccctgaa

SEQ ID NO: 7874 - DNA, 77 bp, Homo sapiens
tatcccattgtgttctatatgtaggagttctgtgtcccacaggcatctcaaagaccatgaccctgaacctcttaatt

SEQ ID NO: 7875 - DNA, 76 bp, Homo sapiens
ttctatatgtaggagttctgtgtcccacaggcatctcaaagaccatgaccctgaacctcttaatttgtattaggaa

SEQ ID NO: 7876 - DNA, 75 bp, Homo sapiens
atgtaggagttctgtgtcccacaggcatctcaaagaccatgaccctgaacctcttaatttgtattaggaagtgat

SEQ ID NO: 7877 - DNA, 76 bp, Homo sapiens
tgtcccacaggcatctcaaagaccatgaccctgaacctcttaatttgtattaggaagtgatttcatttataggata

SEQ ID NO: 7878 - DNA, 74 bp, Homo sapiens
catctcaaagaccatgaccctgaacctcttaatttgtattaggaagtgatttcatttataggatacctgtgagt

SEQ ID NO: 7879 - DNA, 74 bp, Homo sapiens
gaccatgaccctgaacctcttaatttgtattaggaagtgatttcatttataggatacctgtgagtttgaatcat

SEQ ID NO: 7880 - DNA, 72 bp, Homo sapiens
gaccctgaacctcttaatttgtattaggaagtgatttcatttataggatacctgtgagtttgaatcattatt

SEQ ID NO: 7881 - DNA, 75 bp, Homo sapiens
aatttgtattaggaagtgatttcatttataggatacctgtgagtttgaatcattatttcaccacctactagctca

SEQ ID NO: 7882 - DNA, 75 bp, Homo sapiens
gtattaggaagtgatttcatttataggatacctgtgagtttgaatcattatttcaccacctactagctcaccaaa

SEQ ID NO: 7883 - DNA, 72 bp, Homo sapiens
gatttcatttataggatacctgtgagtttgaatcattatttcaccacctactagctcaccaaaaaagttact

SEQ ID NO: 7884 - DNA, 71 bp, Homo sapiens
ttataggatacctgtgagtttgaatcattatttcaccacctactagctcaccaaaaaagttactttatttc

SEQ ID NO: 7885 - DNA, 68 bp, Homo sapiens
cctgtgagtttgaatcattatttcaccacctactagctcaccaaaaaagttactttatttctttaaag

SEQ ID NO: 7886 - DNA, 71 bp, Homo sapiens
tcattatttcaccacctactagctcaccaaaaaagttactttatttctttaaagttctgtttgctcatatg

SEQ ID NO: 7887 - DNA, 70 bp, Homo sapiens
caccacctactagctcaccaaaaaagttactttatttctttaaagttctgtttgctcatatgtgaaatgg

SEQ ID NO: 7888 - DNA, 76 bp, Homo sapiens
tatttctttaaagttctgtttgctcatatgtgaaatgggagtaatatttacctcattgagttcttatactagcaca

SEQ ID NO: 7889 - DNA, 75 bp, Homo sapiens
aagttctgtttgctcatatgtgaaatgggagtaatatttacctcattgagttcttatactagcacagttacttcc

SEQ ID NO: 7890 - DNA, 76 bp, Homo sapiens
tttgctcatatgtgaaatgggagtaatatttacctcattgagttcttatactagcacagttacttccgtacagtaa

SEQ ID NO: 7891 - DNA, 72 bp, Homo sapiens
atgtgaaatgggagtaatatttacctcattgagttcttatactagcacagttacttccgtacagtaaccaaa

SEQ ID NO: 7892 - DNA, 72 bp, Homo sapiens
gtaatatttacctcattgagttcttatactagcacagttacttccgtacagtaaccaaacactgctttcagt

SEQ ID NO: 7893 - DNA, 73 bp, Homo sapiens
atttacctcattgagttcttatactagcacagttacttccgtacagtaaccaaacactgctttcagttgctgt

SEQ ID NO: 7894 - DNA, 74 bp, Homo sapiens
ttgagttcttatactagcacagttacttccgtacagtaaccaaacactgctttcagttgctgttcctgtttcag

SEQ ID NO: 7895 - DNA, 76 bp, Homo sapiens
atactagcacagttacttccgtacagtaaccaaacactgctttcagttgctgttcctgtttcagtgaatggtatca

SEQ ID NO: 7896 - DNA, 76 bp, Homo sapiens
tacttccgtacagtaaccaaacactgctttcagttgctgttcctgtttcagtgaatggtatcactacatgtactta

SEQ ID NO: 7897 - DNA, 76 bp, Homo sapiens
agtaaccaaacactgctttcagttgctgttcctgtttcagtgaatggtatcactacatgtacttacttatgcttaa

SEQ ID NO: 7898 - DNA, 78 bp, Homo sapiens
aaacactgctttcagttgctgttcctgtttcagtgaatggtatcactacatgtacttacttatgcttaagagtcattg

SEQ ID NO: 7899 - DNA, 79 bp, Homo sapiens
tttcagttgctgttcctgtttcagtgaatggtatcactacatgtacttacttatgcttaagagtcattggtgactctac

SEQ ID NO: 7900 - DNA, 75 bp, Homo sapiens
ctgtttcagtgaatggtatcactacatgtacttacttatgcttaagagtcattggtgactctacccttgttttta

SEQ ID NO: 7901 - DNA, 73 bp, Homo sapiens
gtatcactacatgtacttacttatgcttaagagtcattggtgactctacccttgtttttatttttcaggtcta

SEQ ID NO: 7902 - DNA, 70 bp, Homo sapiens
cttacttatgcttaagagtcattggtgactctacccttgtttttatttttcaggtctaattagtcaccag

SEQ ID NO: 7903 - DNA, 70 bp, Homo sapiens
atgcttaagagtcattggtgactctacccttgtttttatttttcaggtctaattagtcaccaggttctat

SEQ ID NO: 7904 - DNA, 71 bp, Homo sapiens
tagtcaccaggttctattggtctaatagaattttcaggtctaattagtcaccaagtccttagaatttatcc

SEQ ID NO: 7905 - DNA, 71 bp, Homo sapiens
aggttctattggtctaatagaattttcaggtctaattagtcaccaagtccttagaatttatcctgctctac

SEQ ID NO: 7906 - DNA, 74 bp, Homo sapiens
attggtctaatagaattttcaggtctaattagtcaccaagtccttagaatttatcctgctctactgcatgtttc

SEQ ID NO: 7907 - DNA, 74 bp, Homo sapiens
tagaattttcaggtctaattagtcaccaagtccttagaatttatcctgctctactgcatgtttcttcctcaaac

SEQ ID NO: 7908 - DNA, 73 bp, Homo sapiens
aggtctaattagtcaccaagtccttagaatttatcctgctctactgcatgtttcttcctcaaaccgtccttca

SEQ ID NO: 7909 - DNA, 76 bp, Homo sapiens
agtcaccaagtccttagaatttatcctgctctactgcatgtttcttcctcaaaccgtccttcacctctgtactgca

SEQ ID NO: 7910 - DNA, 75 bp, Homo sapiens
tagaatttatcctgctctactgcatgtttcttcctcaaaccgtccttcacctctgtactgcagcccctttagaaa

SEQ ID NO: 7911 - DNA, 75 bp, Homo sapiens
ttatcctgctctactgcatgtttcttcctcaaaccgtccttcacctctgtactgcagcccctttagaaattagct

SEQ ID NO: 7912 - DNA, 76 bp, Homo sapiens
tactgcatgtttcttcctcaaaccgtccttcacctctgtactgcagcccctttagaaattagcttgagaggccaga

SEQ ID NO: 7913 - DNA, 74 bp, Homo sapiens
tttcttcctcaaaccgtccttcacctctgtactgcagcccctttagaaattagcttgagaggccagatgtggtg

SEQ ID NO: 7914 - DNA, 67 bp, Homo sapiens
acaaacaaacaaaagatagaaaagaaattagcttgaaaagcaacaacatctcttccagtaagttttt

SEQ ID NO: 7915 - DNA, 70 bp, Homo sapiens
caaaagatagaaaagaaattagcttgaaaagcaacaacatctcttccagtaagttttttggctcaccact

SEQ ID NO: 7916 - DNA, 70 bp, Homo sapiens
aaaagaaattagcttgaaaagcaacaacatctcttccagtaagttttttggctcaccacttttctcactc

SEQ ID NO: 7917 - DNA, 74 bp, Homo sapiens
tagcttgaaaagcaacaacatctcttccagtaagttttttggctcaccacttttctcactccaggtctgaatta

SEQ ID NO: 7918 - DNA, 72 bp, Homo sapiens
aaaagcaacaacatctcttccagtaagttttttggctcaccacttttctcactccaggtctgaattagatac

SEQ ID NO: 7919 - DNA, 71 bp, Homo sapiens
acatctcttccagtaagttttttggctcaccacttttctcactccaggtctgaattagatacctctttttc

SEQ ID NO: 7920 - DNA, 72 bp, Homo sapiens
agtaagttttttggctcaccacttttctcactccaggtctgaattagatacctctttttctgtgctcctagc

SEQ ID NO: 7921 - DNA, 77 bp, Homo sapiens
tttggctcaccacttttctcactccaggtctgaattagatacctctttttctgtgctcctagcctcctgaggatgtc

SEQ ID NO: 7922 - DNA, 79 bp, Homo sapiens
acttttctcactccaggtctgaattagatacctctttttctgtgctcctagcctcctgaggatgtctctgtcatagtgc

SEQ ID NO: 7923 - DNA, 79 bp, Homo sapiens
aggtctgaattagatacctctttttctgtgctcctagcctcctgaggatgtctctgtcatagtgctctccacaactgtt

SEQ ID NO: 7924 - DNA, 80 bp, Homo sapiens
aattagatacctctttttctgtgctcctagcctcctgaggatgtctctgtcatagtgctctccacaactgtttgtaatgc

SEQ ID NO: 7925 - DNA, 77 bp, Homo sapiens
acctctttttctgtgctcctagcctcctgaggatgtctctgtcatagtgctctccacaactgtttgtaatgcctttt

SEQ ID NO: 7926 - DNA, 77 bp, Homo sapiens
ctcctagcctcctgaggatgtctctgtcatagtgctctccacaactgtttgtaatgccttttttctacgcaacttct

SEQ ID NO: 7927 - DNA, 78 bp, Homo sapiens
tcctgaggatgtctctgtcatagtgctctccacaactgtttgtaatgccttttttctacgcaacttcttgaaggcaaa

SEQ ID NO: 7928 - DNA, 76 bp, Homo sapiens
tctctgtcatagtgctctccacaactgtttgtaatgccttttttctacgcaacttcttgaaggcaaagactaccta

SEQ ID NO: 7929 - DNA, 74 bp, Homo sapiens
atagtgctctccacaactgtttgtaatgccttttttctacgcaacttcttgaaggcaaagactacctatcttga

SEQ ID NO: 7930 - DNA, 70 bp, Homo sapiens
acaactgtttgtaatgccttttttctacgcaacttcttgaaggcaaagactacctatcttgaatggcttt

SEQ ID NO: 7931 - DNA, 72 bp, Homo sapiens
tttgtaatgccttttttctacgcaacttcttgaaggcaaagactacctatcttgaatggctttttatctcca

SEQ ID NO: 7932 - DNA, 72 bp, Homo sapiens
tttttctacgcaacttcttgaaggcaaagactacctatcttgaatggctttttatctccagggcttagaata

SEQ ID NO: 7933 - DNA, 73 bp, Homo sapiens
aacttcttgaaggcaaagactacctatcttgaatggctttttatctccagggcttagaataatgcctggcaaa

SEQ ID NO: 7934 - DNA, 75 bp, Homo sapiens
aaggcaaagactacctatcttgaatggctttttatctccagggcttagaataatgcctggcaaataatgagttca

SEQ ID NO: 7935 - DNA, 76 bp, Homo sapiens
aagactacctatcttgaatggctttttatctccagggcttagaataatgcctggcaaataatgagttcagtgatgt

SEQ ID NO: 7936 - DNA, 82 bp, Homo sapiens
atcttgaatggctttttatctccagggcttagaataatgcctggcaaataatgagttcagtgatgtttgcagaatgaatgca

SEQ ID NO: 7937 - DNA, 82 bp, Homo sapiens
ttttatctccagggcttagaataatgcctggcaaataatgagttcagtgatgtttgcagaatgaatgcattggctaaatata

SEQ ID NO: 7938 - DNA, 81 bp, Homo sapiens
agggcttagaataatgcctggcaaataatgagttcagtgatgtttgcagaatgaatgcattggctaaatatatcatttttc

SEQ ID NO: 7939 - DNA, 83 bp, Homo sapiens
ctggcaaataatgagttcagtgatgtttgcagaatgaatgcattggctaaatatatcatttttctggagaaattgtagatata

SEQ ID NO: 7940 - DNA, 79 bp, Homo sapiens
gttcagtgatgtttgcagaatgaatgcattggctaaatatatcatttttctggagaaattgtagatataaaaaagatcc

SEQ ID NO: 7941 - DNA, 76 bp, Homo sapiens
gtttgcagaatgaatgcattggctaaatatatcatttttctggagaaattgtagatataaaaaagatcccgacgcc

SEQ ID NO: 7942 - DNA, 74 bp, Homo sapiens
gaatgaatgcattggctaaatatatcatttttctggagaaattgtagatataaaaaagatcccgacgccttaat

SEQ ID NO: 7943 - DNA, 73 bp, Homo sapiens
cattggctaaatatatcatttttctggagaaattgtagatataaaaaagatcccgacgccttaattatagctg

SEQ ID NO: 7944 - DNA, 69 bp, Homo sapiens
atcatttttctggagaaattgtagatataaaaaagatcccgacgccttaattatagctgtaaggctttt

SEQ ID NO: 7945 - DNA, 69 bp, Homo sapiens
ctggagaaattgtagatataaaaaagatcccgacgccttaattatagctgtaaggctttttaaaatgtc

SEQ ID NO: 7946 - DNA, 67 bp, Homo sapiens
gtagatataaaaaagatcccgacgccttaattatagctgtaaggctttttaaaatgtcccagttgtt

SEQ ID NO: 7947 - DNA, 65 bp, Homo sapiens
aaagatcccgacgccttaattatagctgtaaggctttttaaaatgtcccagttgttttgttttcc

SEQ ID NO: 7948 - DNA, 65 bp, Homo sapiens
tcccgacgccttaattatagctgtaaggctttttaaaatgtcccagttgttttgttttccctgtt

SEQ ID NO: 7949 - DNA, 69 bp, Homo sapiens
tatagctgtaaggctttttaaaatgtcccagttgttttgttttccctgtttgaataagattctaggtgc

SEQ ID NO: 7950 - DNA, 66 bp, Homo sapiens
ctgtaaggctttttaaaatgtcccagttgttttgttttccctgtttgaataagattctaggtgctt

SEQ ID NO: 7951 - DNA, 69 bp, Homo sapiens
tcccagttgttttgttttccctgtttgaataagattctaggtgctttaatttattatataagtcaataa

SEQ ID NO: 7952 - DNA, 69 bp, Homo sapiens
tttgttttccctgtttgaataagattctaggtgctttaatttattatataagtcaataacttcatttat

SEQ ID NO: 7953 - DNA, 72 bp, Homo sapiens
tttgtagagacaatatctccctttgttgtccaggctatgttgatgtttttttggaacaaagtaaattgtatg

SEQ ID NO: 7954 - DNA, 74 bp, Homo sapiens
gagacaatatctccctttgttgtccaggctatgttgatgtttttttggaacaaagtaaattgtatgttgataca

SEQ ID NO: 7955 - DNA, 72 bp, Homo sapiens
tccctttgttgtccaggctatgttgatgtttttttggaacaaagtaaattgtatgttgatacaaattactga

SEQ ID NO: 7956 - DNA, 74 bp, Homo sapiens
tgtccaggctatgttgatgtttttttggaacaaagtaaattgtatgttgatacaaattactgattattgttgtc

SEQ ID NO: 7957 - DNA, 72 bp, Homo sapiens
gatgtttttttggaacaaagtaaattgtatgttgatacaaattactgattattgttgtcctctagggctaca

SEQ ID NO: 7958 - DNA, 73 bp, Homo sapiens
ttggaacaaagtaaattgtatgttgatacaaattactgattattgttgtcctctagggctacagttgctaatt

SEQ ID NO: 7959 - DNA, 73 bp, Homo sapiens
ggaacaaagtaaattgtatgttgatacaaattactgattattgttgtcctctagggctacagttgctaattta

SEQ ID NO: 7960 - DNA, 73 bp, Homo sapiens
caaagtaaattgtatgttgatacaaattactgattattgttgtcctctagggctacagttgctaatttattta

SEQ ID NO: 7961 - DNA, 69 bp, Homo sapiens
ttatttatttcttttttctgcagcccacttaggttcattctttcctcctgtttctgtaccttggtttca

SEQ ID NO: 7962 - DNA, 69 bp, Homo sapiens
tcttttttctgcagcccacttaggttcattctttcctcctgtttctgtaccttggtttcaggctctttt

SEQ ID NO: 7963 - DNA, 70 bp, Homo sapiens
ttctgcagcccacttaggttcattctttcctcctgtttctgtaccttggtttcaggctctttttcccctc

SEQ ID NO: 7964 - DNA, 67 bp, Homo sapiens
acttaggttcattctttcctcctgtttctgtaccttggtttcaggctctttttcccctcttgccctc

SEQ ID NO: 7965 - DNA, 68 bp, Homo sapiens
tttcctcctgtttctgtaccttggtttcaggctctttttcccctcttgccctcccaagagctctggtt

SEQ ID NO: 7966 - DNA, 69 bp, Homo sapiens
tttctgtaccttggtttcaggctctttttcccctcttgccctcccaagagctctggtttatagcaagtt

SEQ ID NO: 7967 - DNA, 69 bp, Homo sapiens
taccttggtttcaggctctttttcccctcttgccctcccaagagctctggtttatagcaagttttctcg

SEQ ID NO: 7968 - DNA, 71 bp, Homo sapiens
gctctttttcccctcttgccctcccaagagctctggtttatagcaagttttctcggcctccacactattaa

SEQ ID NO: 7969 - DNA, 73 bp, Homo sapiens
ccctcttgccctcccaagagctctggtttatagcaagttttctcggcctccacactattaacactatgggcca

SEQ ID NO: 7970 - DNA, 72 bp, Homo sapiens
ctcccaagagctctggtttatagcaagttttctcggcctccacactattaacactatgggccagttatttct

SEQ ID NO: 7971 - DNA, 73 bp, Homo sapiens
aagagctctggtttatagcaagttttctcggcctccacactattaacactatgggccagttatttcttctgga

SEQ ID NO: 7972 - DNA, 73 bp, Homo sapiens
gtttatagcaagttttctcggcctccacactattaacactatgggccagttatttcttctggaggctgtcctg

SEQ ID NO: 7973 - DNA, 75 bp, Homo sapiens
agttttctcggcctccacactattaacactatgggccagttatttcttctggaggctgtcctgtgcattgtaaga

SEQ ID NO: 7974 - DNA, 80 bp, Homo sapiens
tccacactattaacactatgggccagttatttcttctggaggctgtcctgtgcattgtaagatgtctagtagcatccctg

SEQ ID NO: 7975 - DNA, 80 bp, Homo sapiens
tattaacactatgggccagttatttcttctggaggctgtcctgtgcattgtaagatgtctagtagcatccctggcctata

SEQ ID NO: 7976 - DNA, 79 bp, Homo sapiens
atgggccagttatttcttctggaggctgtcctgtgcattgtaagatgtctagtagcatccctggcctatacccattgga

SEQ ID NO: 7977 - DNA, 82 bp, Homo sapiens
tatttcttctggaggctgtcctgtgcattgtaagatgtctagtagcatccctggcctatacccattggatgccagtagcacc

SEQ ID NO: 7978 - DNA, 82 bp, Homo sapiens
ctgtcctgtgcattgtaagatgtctagtagcatccctggcctatacccattggatgccagtagcaccctccaggcttgataa

SEQ ID NO: 7979 - DNA, 77 bp, Homo sapiens
catccctggcctatacccattggatgccagtagcaccctccaggcttgataactaaaaatgtctccaggtattgtga

SEQ ID NO: 7980 - DNA, 71 bp, Homo sapiens
tccaggcttgataactaaaaatgtctccaggtattgtgaaatgtcccttgtggggcaaaatcacccctggt

SEQ ID NO: 7981 - DNA, 71 bp, Homo sapiens
ttgataactaaaaatgtctccaggtattgtgaaatgtcccttgtggggcaaaatcacccctggttgagaac

SEQ ID NO: 7982 - DNA, 71 bp, Homo sapiens
aatgtctccaggtattgtgaaatgtcccttgtggggcaaaatcacccctggttgagaacggctggtttata

SEQ ID NO: 7983 - DNA, 71 bp, Homo sapiens
tattgtgaaatgtcccttgtggggcaaaatcacccctggttgagaacggctggtttatagatattcccatt

SEQ ID NO: 7984 - DNA, 71 bp, Homo sapiens
gggcaaaatcacccctggttgagaacggctggtttatagatattcccatttctttatcctgaaagcctctc

SEQ ID NO: 7985 - DNA, 72 bp, Homo sapiens
atcacccctggttgagaacggctggtttatagatattcccatttctttatcctgaaagcctctccttctcta

SEQ ID NO: 7986 - DNA, 78 bp, Homo sapiens
ttgagaacggctggtttatagatattcccatttctttatcctgaaagcctctccttctctatgctgagcatgattttc

SEQ ID NO: 7987 - DNA, 75 bp, Homo sapiens
ggctggtttatagatattcccatttctttatcctgaaagcctctccttctctatgctgagcatgattttcttttt

SEQ ID NO: 7988 - DNA, 65 bp, Homo sapiens
tttaaaaaataagcacttttaaaaaattaacttgtttcctgttaacttatgctcatcctcccacc

SEQ ID NO: 7989 - DNA, 67 bp, Homo sapiens
aagcacttttaaaaaattaacttgtttcctgttaacttatgctcatcctcccaccctcttttctaga

SEQ ID NO: 7990 - DNA, 69 bp, Homo sapiens
aaaaaattaacttgtttcctgttaacttatgctcatcctcccaccctcttttctagaatgaatagcttc

SEQ ID NO: 7991 - DNA, 71 bp, Homo sapiens
attaacttgtttcctgttaacttatgctcatcctcccaccctcttttctagaatgaatagcttccaccatt

SEQ ID NO: 7992 - DNA, 73 bp, Homo sapiens
tgttaacttatgctcatcctcccaccctcttttctagaatgaatagcttccaccatttcccaccttatttctg

SEQ ID NO: 7993 - DNA, 73 bp, Homo sapiens
ttatgctcatcctcccaccctcttttctagaatgaatagcttccaccatttcccaccttatttctggctttta

SEQ ID NO: 7994 - DNA, 70 bp, Homo sapiens
tcccaccctcttttctagaatgaatagcttccaccatttcccaccttatttctggcttttatccccatgg

SEQ ID NO: 7995 - DNA, 72 bp, Homo sapiens
aatgaatagcttccaccatttcccaccttatttctggcttttatccccatggtgcctctcaaagtgttttca

SEQ ID NO: 7996 - DNA, 73 bp, Homo sapiens
accatttcccaccttatttctggcttttatccccatggtgcctctcaaagtgttttcatcaagtctcccatga

SEQ ID NO: 7997 - DNA, 74 bp, Homo sapiens
ttcccaccttatttctggcttttatccccatggtgcctctcaaagtgttttcatcaagtctcccatgattttca

SEQ ID NO: 7998 - DNA, 74 bp, Homo sapiens
atttctggcttttatccccatggtgcctctcaaagtgttttcatcaagtctcccatgattttcacctcctgtgt

SEQ ID NO: 7999 - DNA, 76 bp, Homo sapiens
ttatccccatggtgcctctcaaagtgttttcatcaagtctcccatgattttcacctcctgtgttctctggagtaaa

SEQ ID NO: 8000 - DNA, 78 bp, Homo sapiens
cctctcaaagtgttttcatcaagtctcccatgattttcacctcctgtgttctctggagtaaatggagctgccaactca

SEQ ID NO: 8001 - DNA, 77 bp, Homo sapiens
aaagtgttttcatcaagtctcccatgattttcacctcctgtgttctctggagtaaatggagctgccaactcatagcc

SEQ ID NO: 8002 - DNA, 80 bp, Homo sapiens
aagtctcccatgattttcacctcctgtgttctctggagtaaatggagctgccaactcatagcccagttcatcatgtctta

SEQ ID NO: 8003 - DNA, 79 bp, Homo sapiens
atgattttcacctcctgtgttctctggagtaaatggagctgccaactcatagcccagttcatcatgtcttaatcgttcc

SEQ ID NO: 8004 - DNA, 79 bp, Homo sapiens
ctcctgtgttctctggagtaaatggagctgccaactcatagcccagttcatcatgtcttaatcgttcctcctctcctac

SEQ ID NO: 8005 - DNA, 77 bp, Homo sapiens
gtgttctctggagtaaatggagctgccaactcatagcccagttcatcatgtcttaatcgttcctcctctcctacccc

SEQ ID NO: 8006 - DNA, 81 bp, Homo sapiens
taaatggagctgccaactcatagcccagttcatcatgtcttaatcgttcctcctctcctacccctgcagctgccccataca

SEQ ID NO: 8007 - DNA, 78 bp, Homo sapiens
atagcccagttcatcatgtcttaatcgttcctcctctcctacccctgcagctgccccatacagtcagtcacaaagtcc

SEQ ID NO: 8008 - DNA, 80 bp, Homo sapiens
ttcatcatgtcttaatcgttcctcctctcctacccctgcagctgccccatacagtcagtcacaaagtcctgtctgtgtta

SEQ ID NO: 8009 - DNA, 78 bp, Homo sapiens
ttaatcgttcctcctctcctacccctgcagctgccccatacagtcagtcacaaagtcctgtctgtgttatcgctggaa

SEQ ID NO: 8010 - DNA, 81 bp, Homo sapiens
ctctcctacccctgcagctgccccatacagtcagtcacaaagtcctgtctgtgttatcgctggaatgtctctagaatctac

SEQ ID NO: 8011 - DNA, 81 bp, Homo sapiens
cctgcagctgccccatacagtcagtcacaaagtcctgtctgtgttatcgctggaatgtctctagaatctaccaacattctt

SEQ ID NO: 8012 - DNA, 79 bp, Homo sapiens
agctgccccatacagtcagtcacaaagtcctgtctgtgttatcgctggaatgtctctagaatctaccaacattctttat

SEQ ID NO: 8013 - DNA, 76 bp, Homo sapiens
acaaagtcctgtctgtgttatcgctggaatgtctctagaatctaccaacattctttattcccacacctgtctccca

SEQ ID NO: 8014 - DNA, 76 bp, Homo sapiens
tctagaatctaccaacattctttattcccacacctgtctcccaccaatgtcatcagctcctcttttggtctcggaa

SEQ ID NO: 8015 - DNA, 73 bp, Homo sapiens
attctttattcccacacctgtctcccaccaatgtcatcagctcctcttttggtctcggaatttcaagttgggc

SEQ ID NO: 8016 - DNA, 72 bp, Homo sapiens
acctgtctcccaccaatgtcatcagctcctcttttggtctcggaatttcaagttgggcctgttccattttaa

SEQ ID NO: 8017 - DNA, 73 bp, Homo sapiens
tctcccaccaatgtcatcagctcctcttttggtctcggaatttcaagttgggcctgttccattttaatttcta

SEQ ID NO: 8018 - DNA, 71 bp, Homo sapiens
atgtcatcagctcctcttttggtctcggaatttcaagttgggcctgttccattttaatttctaccttgtcg

SEQ ID NO: 8019 - DNA, 68 bp, Homo sapiens
tcttttggtctcggaatttcaagttgggcctgttccattttaatttctaccttgtcggctttctagaa

SEQ ID NO: 8020 - DNA, 72 bp, Homo sapiens
tgttccattttaatttctaccttgtcggctttctagaacaaggtctcttcctacttcagacttcctcagtga

SEQ ID NO: 8021 - DNA, 71 bp, Homo sapiens
attttaatttctaccttgtcggctttctagaacaaggtctcttcctacttcagacttcctcagtgatgatt

SEQ ID NO: 8022 - DNA, 73 bp, Homo sapiens
ctaccttgtcggctttctagaacaaggtctcttcctacttcagacttcctcagtgatgatttctggggcttta

SEQ ID NO: 8023 - DNA, 74 bp, Homo sapiens
tttctagaacaaggtctcttcctacttcagacttcctcagtgatgatttctggggctttagcatttgccttttg

SEQ ID NO: 8024 - DNA, 73 bp, Homo sapiens
aacaaggtctcttcctacttcagacttcctcagtgatgatttctggggctttagcatttgccttttggaaggc

SEQ ID NO: 8025 - DNA, 73 bp, Homo sapiens
tacttcagacttcctcagtgatgatttctggggctttagcatttgccttttggaaggcccattaggtgatttt

SEQ ID NO: 8026 - DNA, 72 bp, Homo sapiens
acttcctcagtgatgatttctggggctttagcatttgccttttggaaggcccattaggtgatttttatggaa

SEQ ID NO: 8027 - DNA, 72 bp, Homo sapiens
gggctttagcatttgccttttggaaggcccattaggtgatttttatggaactctaattgcttcattcctcta

SEQ ID NO: 8028 - DNA, 68 bp, Homo sapiens
ccttttggaaggcccattaggtgatttttatggaactctaattgcttcattcctctatttaagaaacg

SEQ ID NO: 8029 - DNA, 70 bp, Homo sapiens
ggcccattaggtgatttttatggaactctaattgcttcattcctctatttaagaaacgttttcttgctct

SEQ ID NO: 8030 - DNA, 70 bp, Homo sapiens
gtgatttttatggaactctaattgcttcattcctctatttaagaaacgttttcttgctcttagaaactcc

SEQ ID NO: 8031 - DNA, 71 bp, Homo sapiens
ggaactctaattgcttcattcctctatttaagaaacgttttcttgctcttagaaactcctaaaatccatga

SEQ ID NO: 8032 - DNA, 70 bp, Homo sapiens
attgcttcattcctctatttaagaaacgttttcttgctcttagaaactcctaaaatccatgacatatttt

SEQ ID NO: 8033 - DNA, 69 bp, Homo sapiens
tcctctatttaagaaacgttttcttgctcttagaaactcctaaaatccatgacatattttttacaaagc

SEQ ID NO: 8034 - DNA, 70 bp, Homo sapiens
aacgttttcttgctcttagaaactcctaaaatccatgacatattttttacaaagctctttctgctatccc

SEQ ID NO: 8035 - DNA, 72 bp, Homo sapiens
gctcttagaaactcctaaaatccatgacatattttttacaaagctctttctgctatcccctgcttttaacaa

SEQ ID NO: 8036 - DNA, 70 bp, Homo sapiens
gaaactcctaaaatccatgacatattttttacaaagctctttctgctatcccctgcttttaacaaaagcc

SEQ ID NO: 8037 - DNA, 70 bp, Homo sapiens
aatccatgacatattttttacaaagctctttctgctatcccctgcttttaacaaaagcctttttgctaaa

SEQ ID NO: 8038 - DNA, 68 bp, Homo sapiens
gacatattttttacaaagctctttctgctatcccctgcttttaacaaaagcctttttgctaaataaaa

SEQ ID NO: 8039 - DNA, 67 bp, Homo sapiens
ctgctatcccctgcttttaacaaaagcctttttgctaaataaaaatggtgtaggttcttttagacaa

SEQ ID NO: 8040 - DNA, 67 bp, Homo sapiens
ccctgcttttaacaaaagcctttttgctaaataaaaatggtgtaggttcttttagacaactgcttca

SEQ ID NO: 8041 - DNA, 70 bp, Homo sapiens
caaaagcctttttgctaaataaaaatggtgtaggttcttttagacaactgcttcatgagaagtcagtgtt

SEQ ID NO: 8042 - DNA, 70 bp, Homo sapiens
cctttttgctaaataaaaatggtgtaggttcttttagacaactgcttcatgagaagtcagtgtttatttg

SEQ ID NO: 8043 - DNA, 73 bp, Homo sapiens
taaaaatggtgtaggttcttttagacaactgcttcatgagaagtcagtgtttatttgtttagttactagcaca

SEQ ID NO: 8044 - DNA, 72 bp, Homo sapiens
ggtgtaggttcttttagacaactgcttcatgagaagtcagtgtttatttgtttagttactagcacaatattt

SEQ ID NO: 8045 - DNA, 70 bp, Homo sapiens
gtcagtgtttatttgtttagttactagcacaatattttttaaacagcaacaataagatttataattggag

SEQ ID NO: 8046 - DNA, 71 bp, Homo sapiens
tatttgtttagttactagcacaatattttttaaacagcaacaataagatttataattggaggagggatcca

SEQ ID NO: 8047 - DNA, 73 bp, Homo sapiens
gttactagcacaatattttttaaacagcaacaataagatttataattggaggagggatccaggaggaaatgca

SEQ ID NO: 8048 - DNA, 70 bp, Homo sapiens
caatattttttaaacagcaacaataagatttataattggaggagggatccaggaggaaatgcaagtttac

SEQ ID NO: 8049 - DNA, 74 bp, Homo sapiens
tttaaacagcaacaataagatttataattggaggagggatccaggaggaaatgcaagtttactgattatgtgtg

SEQ ID NO: 8050 - DNA, 77 bp, Homo sapiens
atttataattggaggagggatccaggaggaaatgcaagtttactgattatgtgtgtctgtgacaaatttgactgcta

SEQ ID NO: 8051 - DNA, 76 bp, Homo sapiens
gagggatccaggaggaaatgcaagtttactgattatgtgtgtctgtgacaaatttgactgctaagttatatttaaa

SEQ ID NO: 8052 - DNA, 76 bp, Homo sapiens
atccaggaggaaatgcaagtttactgattatgtgtgtctgtgacaaatttgactgctaagttatatttaaataaca

SEQ ID NO: 8053 - DNA, 73 bp, Homo sapiens
aaatgcaagtttactgattatgtgtgtctgtgacaaatttgactgctaagttatatttaaataacatttgttt

SEQ ID NO: 8054 - DNA, 74 bp, Homo sapiens
ttactgattatgtgtgtctgtgacaaatttgactgctaagttatatttaaataacatttgtttttttgcaggta

SEQ ID NO: 8055 - DNA, 74 bp, Homo sapiens
caaatttgactgctaagttatatttaaataacatttgtttttttgcaggtatttataacagcaatgatgtagca

SEQ ID NO: 8056 - DNA, 74 bp, Homo sapiens
gactgctaagttatatttaaataacatttgtttttttgcaggtatttataacagcaatgatgtagcagtatcgt

SEQ ID NO: 8057 - DNA, 73 bp, Homo sapiens
tttaaataacatttgtttttttgcaggtatttataacagcaatgatgtagcagtatcgtttccaaatgtagta

SEQ ID NO: 8058 - DNA, 75 bp, Homo sapiens
atttgtttttttgcaggtatttataacagcaatgatgtagcagtatcgtttccaaatgtagtatctggctcggga

SEQ ID NO: 8059 - DNA, 79 bp, Homo sapiens
ggtatttataacagcaatgatgtagcagtatcgtttccaaatgtagtatctggctcgggatctagtactcctgtctcca

SEQ ID NO: 8060 - DNA, 80 bp, Homo sapiens
aatgatgtagcagtatcgtttccaaatgtagtatctggctcgggatctagtactcctgtctccagctctcacttacctca

SEQ ID NO: 8061 - DNA, 80 bp, Homo sapiens
tagcagtatcgtttccaaatgtagtatctggctcgggatctagtactcctgtctccagctctcacttacctcagcagtct

SEQ ID NO: 8062 - DNA, 79 bp, Homo sapiens
tttccaaatgtagtatctggctcgggatctagtactcctgtctccagctctcacttacctcagcagtcttctgggcatt

SEQ ID NO: 8063 - DNA, 82 bp, Homo sapiens
tcgggatctagtactcctgtctccagctctcacttacctcagcagtcttctgggcatttgcaacaagtaggagcgctctctc

SEQ ID NO: 8064 - DNA, 83 bp, Homo sapiens
tctagtactcctgtctccagctctcacttacctcagcagtcttctgggcatttgcaacaagtaggagcgctctctccctcagc

SEQ ID NO: 8065 - DNA, 88 bp, Homo sapiens
tgtctccagctctcacttacctcagcagtcttctgggcatttgcaacaagtaggagcgctctctccctcagctgtgtcatctgcagcc

SEQ ID NO: 8066 - DNA, 86 bp, Homo sapiens
tctcacttacctcagcagtcttctgggcatttgcaacaagtaggagcgctctctccctcagctgtgtcatctgcagcccctgctgt

SEQ ID NO: 8067 - DNA, 86 bp, Homo sapiens
agcagtcttctgggcatttgcaacaagtaggagcgctctctccctcagctgtgtcatctgcagcccctgctgttgctacaactcag

SEQ ID NO: 8068 - DNA, 84 bp, Homo sapiens
tgggcatttgcaacaagtaggagcgctctctccctcagctgtgtcatctgcagcccctgctgttgctacaactcaggtaagttg

SEQ ID NO: 8069 - DNA, 81 bp, Homo sapiens
aacaagtaggagcgctctctccctcagctgtgtcatctgcagcccctgctgttgctacaactcaggtaagttgttacacta

SEQ ID NO: 8070 - DNA, 85 bp, Homo sapiens
agcgctctctccctcagctgtgtcatctgcagcccctgctgttgctacaactcaggtaagttgttacactatcatgtgacaggta

SEQ ID NO: 8071 - DNA, 83 bp, Homo sapiens
tccctcagctgtgtcatctgcagcccctgctgttgctacaactcaggtaagttgttacactatcatgtgacaggtaataggtg

SEQ ID NO: 8072 - DNA, 81 bp, Homo sapiens
tgtcatctgcagcccctgctgttgctacaactcaggtaagttgttacactatcatgtgacaggtaataggtgggtttctca

SEQ ID NO: 8073 - DNA, 74 bp, Homo sapiens
agcccctgctgttgctacaactcaggtaagttgttacactatcatgtgacaggtaataggtgggtttctcattt

SEQ ID NO: 8074 - DNA, 70 bp, Homo sapiens
acaactcaggtaagttgttacactatcatgtgacaggtaataggtgggtttctcatttttaaagtgagtt

SEQ ID NO: 8075 - DNA, 70 bp, Homo sapiens
gtaagttgttacactatcatgtgacaggtaataggtgggtttctcatttttaaagtgagttttgttggag

SEQ ID NO: 8076 - DNA, 69 bp, Homo sapiens
gtgacaggtaataggtgggtttctcatttttaaagtgagttttgttggaggagaaacaaatgacatagg

SEQ ID NO: 8077 - DNA, 69 bp, Homo sapiens
tgggtttctcatttttaaagtgagttttgttggaggagaaacaaatgacatagggccttctataggaat

SEQ ID NO: 8078 - DNA, 70 bp, Homo sapiens
ctcatttttaaagtgagttttgttggaggagaaacaaatgacatagggccttctataggaatttatgaaa

SEQ ID NO: 8079 - DNA, 72 bp, Homo sapiens
tttgttggaggagaaacaaatgacatagggccttctataggaatttatgaaatacctcaatttgtattaatg

SEQ ID NO: 8080 - DNA, 73 bp, Homo sapiens
gagaaacaaatgacatagggccttctataggaatttatgaaatacctcaatttgtattaatgtattagtgaaa

SEQ ID NO: 8081 - DNA, 73 bp, Homo sapiens
gacatagggccttctataggaatttatgaaatacctcaatttgtattaatgtattagtgaaaatgataggtat

SEQ ID NO: 8082 - DNA, 71 bp, Homo sapiens
ccttctataggaatttatgaaatacctcaatttgtattaatgtattagtgaaaatgataggtatttttaca

SEQ ID NO: 8083 - DNA, 79 bp, Homo sapiens
tattaatgtattagtgaaaatgataggtatttttacatggtattcatgagagaggatggatgagtgtatgggcaccaac

SEQ ID NO: 8084 - DNA, 78 bp, Homo sapiens
tattagtgaaaatgataggtatttttacatggtattcatgagagaggatggatgagtgtatgggcaccaactaattct

SEQ ID NO: 8085 - DNA, 75 bp, Homo sapiens
aaaatgataggtatttttacatggtattcatgagagaggatggatgagtgtatgggcaccaactaattcttttta

SEQ ID NO: 8086 - DNA, 74 bp, Homo sapiens
tatttttacatggtattcatgagagaggatggatgagtgtatgggcaccaactaattctttttaatttctgggt

SEQ ID NO: 8087 - DNA, 71 bp, Homo sapiens
ggtattcatgagagaggatggatgagtgtatgggcaccaactaattctttttaatttctgggttttaaatt

SEQ ID NO: 8088 - DNA, 71 bp, Homo sapiens
tggatgagtgtatgggcaccaactaattctttttaatttctgggttttaaattttgtctgaatgatataaa

SEQ ID NO: 8089 - DNA, 68 bp, Homo sapiens
tatgggcaccaactaattctttttaatttctgggttttaaattttgtctgaatgatataaaatatact

SEQ ID NO: 8090 - DNA, 65 bp, Homo sapiens
aactaattctttttaatttctgggttttaaattttgtctgaatgatataaaatatactttcaggg

SEQ ID NO: 8091 - DNA, 67 bp, Homo sapiens
aatttctgggttttaaattttgtctgaatgatataaaatatactttcaggggagcttttattctttc

SEQ ID NO: 8092 - DNA, 66 bp, Homo sapiens
gggttttaaattttgtctgaatgatataaaatatactttcaggggagcttttattctttctttaaa

SEQ ID NO: 8093 - DNA, 69 bp, Homo sapiens
tgtctgaatgatataaaatatactttcaggggagcttttattctttctttaaaaaagtaggacccacaa

SEQ ID NO: 8094 - DNA, 66 bp, Homo sapiens
tactttcaggggagcttttattctttctttaaaaaagtaggacccacaaaatatgagcaagttttg

SEQ ID NO: 8095 - DNA, 68 bp, Homo sapiens
gggagcttttattctttctttaaaaaagtaggacccacaaaatatgagcaagttttggactcttgtga

SEQ ID NO: 8096 - DNA, 66 bp, Homo sapiens
attctttctttaaaaaagtaggacccacaaaatatgagcaagttttggactcttgtgatttttaaa

SEQ ID NO: 8097 - DNA, 66 bp, Homo sapiens
aaaaagtaggacccacaaaatatgagcaagttttggactcttgtgatttttaaaattccttttata

SEQ ID NO: 8098 - DNA, 66 bp, Homo sapiens
gtaggacccacaaaatatgagcaagttttggactcttgtgatttttaaaattccttttataatttt

SEQ ID NO: 8099 - DNA, 62 bp, Homo sapiens
aaatatatgaaatctttttaaagttttaaaaaaaaccgtgtaggagaatgtaggttaaaaga

SEQ ID NO: 8100 - DNA, 61 bp, Homo sapiens
aatctttttaaagttttaaaaaaaaccgtgtaggagaatgtaggttaaaagaccgaatgac

SEQ ID NO: 8101 - DNA, 65 bp, Homo sapiens
aagttttaaaaaaaaccgtgtaggagaatgtaggttaaaagaccgaatgaccgcttcaagcacta

SEQ ID NO: 8102 - DNA, 68 bp, Homo sapiens
aaaaaccgtgtaggagaatgtaggttaaaagaccgaatgaccgcttcaagcactacacatttttcctc

SEQ ID NO: 8103 - DNA, 72 bp, Homo sapiens
taggagaatgtaggttaaaagaccgaatgaccgcttcaagcactacacatttttcctcctagtgggagagaa

SEQ ID NO: 8104 - DNA, 71 bp, Homo sapiens
atgtaggttaaaagaccgaatgaccgcttcaagcactacacatttttcctcctagtgggagagaacagtgt

SEQ ID NO: 8105 - DNA, 72 bp, Homo sapiens
taaaagaccgaatgaccgcttcaagcactacacatttttcctcctagtgggagagaacagtgtttgtaaata

SEQ ID NO: 8106 - DNA, 76 bp, Homo sapiens
aatgaccgcttcaagcactacacatttttcctcctagtgggagagaacagtgtttgtaaataatgatgaatatata

SEQ ID NO: 8107 - DNA, 73 bp, Homo sapiens
caagcactacacatttttcctcctagtgggagagaacagtgtttgtaaataatgatgaatatataggtttttc

SEQ ID NO: 8108 - DNA, 72 bp, Homo sapiens
cacatttttcctcctagtgggagagaacagtgtttgtaaataatgatgaatatataggtttttccatttgtg

SEQ ID NO: 8109 - DNA, 70 bp, Homo sapiens
ctcctagtgggagagaacagtgtttgtaaataatgatgaatatataggtttttccatttgtgtacccctt

SEQ ID NO: 8110 - DNA, 73 bp, Homo sapiens
gagagaacagtgtttgtaaataatgatgaatatataggtttttccatttgtgtaccccttttatctgacttca

SEQ ID NO: 8111 - DNA, 72 bp, Homo sapiens
gtaaataatgatgaatatataggtttttccatttgtgtaccccttttatctgacttcagatttgtagtttga

SEQ ID NO: 8112 - DNA, 74 bp, Homo sapiens
taatgatgaatatataggtttttccatttgtgtaccccttttatctgacttcagatttgtagtttgataggtga

SEQ ID NO: 8113 - DNA, 72 bp, Homo sapiens
gatgaatatataggtttttccatttgtgtaccccttttatctgacttcagatttgtagtttgataggtgacc

SEQ ID NO: 8114 - DNA, 71 bp, Homo sapiens
tatataggtttttccatttgtgtaccccttttatctgacttcagatttgtagtttgataggtgacctagtc

SEQ ID NO: 8115 - DNA, 70 bp, Homo sapiens
aggtttttccatttgtgtaccccttttatctgacttcagatttgtagtttgataggtgacctagtctata

SEQ ID NO: 8116 - DNA, 71 bp, Homo sapiens
tttccatttgtgtaccccttttatctgacttcagatttgtagtttgataggtgacctagtctataggattt

SEQ ID NO: 8117 - DNA, 70 bp, Homo sapiens
ccatttgtgtaccccttttatctgacttcagatttgtagtttgataggtgacctagtctataggattttt

SEQ ID NO: 8118 - DNA, 69 bp, Homo sapiens
atttgtgtaccccttttatctgacttcagatttgtagtttgataggtgacctagtctataggatttttt

SEQ ID NO: 8119 - DNA, 69 bp, Homo sapiens
tgtaccccttttatctgacttcagatttgtagtttgataggtgacctagtctataggatttttttgttt

SEQ ID NO: 8120 - DNA, 74 bp, Homo sapiens
cgtgagccaccaagcacagccaagatgttttaaaagagtcatataagagaaattgtaatcctgttttataaaga

SEQ ID NO: 8121 - DNA, 75 bp, Homo sapiens
ccaagcacagccaagatgttttaaaagagtcatataagagaaattgtaatcctgttttataaagaggacagtgca

SEQ ID NO: 8122 - DNA, 72 bp, Homo sapiens
acagccaagatgttttaaaagagtcatataagagaaattgtaatcctgttttataaagaggacagtgcaggg

SEQ ID NO: 8123 - DNA, 71 bp, Homo sapiens
tttaaaagagtcatataagagaaattgtaatcctgttttataaagaggacagtgcagggggaaagctgtac

SEQ ID NO: 8124 - DNA, 72 bp, Homo sapiens
taaaagagtcatataagagaaattgtaatcctgttttataaagaggacagtgcagggggaaagctgtaccca

SEQ ID NO: 8125 - DNA, 71 bp, Homo sapiens
agtcatataagagaaattgtaatcctgttttataaagaggacagtgcagggggaaagctgtacccaatccc

SEQ ID NO: 8126 - DNA, 69 bp, Homo sapiens
atataagagaaattgtaatcctgttttataaagaggacagtgcagggggaaagctgtacccaatccccc

SEQ ID NO: 8127 - DNA, 66 bp, Homo sapiens
ttttataaagaggacagtgcagggggaaagctgtacccaatccccctgtattacaccccccttccc

SEQ ID NO: 8128 - DNA, 67 bp, Homo sapiens
ttataaagaggacagtgcagggggaaagctgtacccaatccccctgtattacaccccccttccccaa

SEQ ID NO: 8129 - DNA, 67 bp, Homo sapiens
agtgcagggggaaagctgtacccaatccccctgtattacaccccccttccccaaagataatcattta

SEQ ID NO: 8130 - DNA, 66 bp, Homo sapiens
tgtacccaatccccctgtattacaccccccttccccaaagataatcatttaagatttccaaagtat

SEQ ID NO: 8131 - DNA, 64 bp, Homo sapiens
caatccccctgtattacaccccccttccccaaagataatcatttaagatttccaaagtattttt

SEQ ID NO: 8132 - DNA, 72 bp, Homo sapiens
ttatttatttgaaattatgtatgattttattttcatttctccaaagctctagtagtcttttaatggtcaaga

SEQ ID NO: 8133 - DNA, 73 bp, Homo sapiens
gaaattatgtatgattttattttcatttctccaaagctctagtagtcttttaatggtcaagaaaatggtcaca

SEQ ID NO: 8134 - DNA, 74 bp, Homo sapiens
tttcatttctccaaagctctagtagtcttttaatggtcaagaaaatggtcacagggacaaatgtctaataatga

SEQ ID NO: 8135 - DNA, 74 bp, Homo sapiens
tctccaaagctctagtagtcttttaatggtcaagaaaatggtcacagggacaaatgtctaataatgaacaacta

SEQ ID NO: 8136 - DNA, 69 bp, Homo sapiens
cttttaatggtcaagaaaatggtcacagggacaaatgtctaataatgaacaactagttaaaatagttgt

SEQ ID NO: 8137 - DNA, 71 bp, Homo sapiens
gaaaatggtcacagggacaaatgtctaataatgaacaactagttaaaatagttgtttataagttcctgtca

SEQ ID NO: 8138 - DNA, 72 bp, Homo sapiens
gtcacagggacaaatgtctaataatgaacaactagttaaaatagttgtttataagttcctgtcaacttgagc

SEQ ID NO: 8139 - DNA, 75 bp, Homo sapiens
atgtctaataatgaacaactagttaaaatagttgtttataagttcctgtcaacttgagctttatggatgcgtgca

SEQ ID NO: 8140 - DNA, 74 bp, Homo sapiens
atgaacaactagttaaaatagttgtttataagttcctgtcaacttgagctttatggatgcgtgcataatttcca

SEQ ID NO: 8141 - DNA, 75 bp, Homo sapiens
tagttaaaatagttgtttataagttcctgtcaacttgagctttatggatgcgtgcataatttccattgcgtgtgt

SEQ ID NO: 8142 - DNA, 78 bp, Homo sapiens
gttgtttataagttcctgtcaacttgagctttatggatgcgtgcataatttccattgcgtgtgttgttaggatatata

SEQ ID NO: 8143 - DNA, 79 bp, Homo sapiens
tataagttcctgtcaacttgagctttatggatgcgtgcataatttccattgcgtgtgttgttaggatatatatacgctt

SEQ ID NO: 8144 - DNA, 79 bp, Homo sapiens
aacttgagctttatggatgcgtgcataatttccattgcgtgtgttgttaggatatatatacgcttttccggcaagcaca

SEQ ID NO: 8145 - DNA, 79 bp, Homo sapiens
agctttatggatgcgtgcataatttccattgcgtgtgttgttaggatatatatacgcttttccggcaagcacaatgtta

SEQ ID NO: 8146 - DNA, 76 bp, Homo sapiens
atgcgtgcataatttccattgcgtgtgttgttaggatatatatacgcttttccggcaagcacaatgttaggttatt

SEQ ID NO: 8147 - DNA, 76 bp, Homo sapiens
taatttccattgcgtgtgttgttaggatatatatacgcttttccggcaagcacaatgttaggttattttgatgcat

SEQ ID NO: 8148 - DNA, 81 bp, Homo sapiens
atatacgcttttccggcaagcacaatgttaggttattttgatgcatttgtgtgaatggcacagtgagagcagttgctatta

SEQ ID NO: 8149 - DNA, 81 bp, Homo sapiens
gcaagcacaatgttaggttattttgatgcatttgtgtgaatggcacagtgagagcagttgctattaaaattacgtattaga

SEQ ID NO: 8150 - DNA, 79 bp, Homo sapiens
atttgtgtgaatggcacagtgagagcagttgctattaaaattacgtattagaatcaaccccagatagttcagcacagaa

SEQ ID NO: 8151 - DNA, 78 bp, Homo sapiens
aatggcacagtgagagcagttgctattaaaattacgtattagaatcaaccccagatagttcagcacagaaaagcaatg

SEQ ID NO: 8152 - DNA, 78 bp, Homo sapiens
agagcagttgctattaaaattacgtattagaatcaaccccagatagttcagcacagaaaagcaatggcatgattagta

SEQ ID NO: 8153 - DNA, 76 bp, Homo sapiens
ctattaaaattacgtattagaatcaaccccagatagttcagcacagaaaagcaatggcatgattagtagtatcgtc

SEQ ID NO: 8154 - DNA, 76 bp, Homo sapiens
aaattacgtattagaatcaaccccagatagttcagcacagaaaagcaatggcatgattagtagtatcgtctttgaa

SEQ ID NO: 8155 - DNA, 79 bp, Homo sapiens
attagaatcaaccccagatagttcagcacagaaaagcaatggcatgattagtagtatcgtctttgaagatgaaagtgaa

SEQ ID NO: 8156 - DNA, 78 bp, Homo sapiens
agatagttcagcacagaaaagcaatggcatgattagtagtatcgtctttgaagatgaaagtgaactatttggtgaacc

SEQ ID NO: 8157 - DNA, 76 bp, Homo sapiens
gcacagaaaagcaatggcatgattagtagtatcgtctttgaagatgaaagtgaactatttggtgaacctcccaact

SEQ ID NO: 8158 - DNA, 76 bp, Homo sapiens
aaagcaatggcatgattagtagtatcgtctttgaagatgaaagtgaactatttggtgaacctcccaacttgatata

SEQ ID NO: 8159 - DNA, 71 bp, Homo sapiens
aagatgaaagtgaactatttggtgaacctcccaacttgatatagaggagtttgactactttagcagagttt

SEQ ID NO: 8160 - DNA, 71 bp, Homo sapiens
aagtgaactatttggtgaacctcccaacttgatatagaggagtttgactactttagcagagtttttctgta

SEQ ID NO: 8161 - DNA, 74 bp, Homo sapiens
tatttggtgaacctcccaacttgatatagaggagtttgactactttagcagagtttttctgtagttcatgtcac

SEQ ID NO: 8162 - DNA, 74 bp, Homo sapiens
tcccaacttgatatagaggagtttgactactttagcagagtttttctgtagttcatgtcactaaaagtgaggta

SEQ ID NO: 8163 - DNA, 76 bp, Homo sapiens
ttgatatagaggagtttgactactttagcagagtttttctgtagttcatgtcactaaaagtgaggtagccataaca

SEQ ID NO: 8164 - DNA, 70 bp, Homo sapiens
tactttagcagagtttttctgtagttcatgtcactaaaagtgaggtagccataacaggggtttggggtta

SEQ ID NO: 8165 - DNA, 69 bp, Homo sapiens
tttttctgtagttcatgtcactaaaagtgaggtagccataacaggggtttggggttagagagggtgaaa

SEQ ID NO: 8166 - DNA, 67 bp, Homo sapiens
actaaaagtgaggtagccataacaggggtttggggttagagagggtgaaaggataaatgaaagaata

SEQ ID NO: 8167 - DNA, 69 bp, Homo sapiens
tagccataacaggggtttggggttagagagggtgaaaggataaatgaaagaatagctcctataaatggt

SEQ ID NO: 8168 - DNA, 67 bp, Homo sapiens
taacaggggtttggggttagagagggtgaaaggataaatgaaagaatagctcctataaatggtttta

SEQ ID NO: 8169 - DNA, 68 bp, Homo sapiens
gggttagagagggtgaaaggataaatgaaagaatagctcctataaatggttttatctctttttaatta

SEQ ID NO: 8170 - DNA, 72 bp, Homo sapiens
ggtgaaaggataaatgaaagaatagctcctataaatggttttatctctttttaattaagtgcaaccatatgc

SEQ ID NO: 8171 - DNA, 74 bp, Homo sapiens
ggataaatgaaagaatagctcctataaatggttttatctctttttaattaagtgcaaccatatgctgttgatag

SEQ ID NO: 8172 - DNA, 73 bp, Homo sapiens
agaatagctcctataaatggttttatctctttttaattaagtgcaaccatatgctgttgatagttttatatcc

SEQ ID NO: 8173 - DNA, 73 bp, Homo sapiens
ctcctataaatggttttatctctttttaattaagtgcaaccatatgctgttgatagttttatatccttggaca

SEQ ID NO: 8174 - DNA, 76 bp, Homo sapiens
ttatctctttttaattaagtgcaaccatatgctgttgatagttttatatccttggacaaagtctcacatgaacatt

SEQ ID NO: 8175 - DNA, 80 bp, Homo sapiens
taagtgcaaccatatgctgttgatagttttatatccttggacaaagtctcacatgaacattttcaatgtgcatttctctt

SEQ ID NO: 8176 - DNA, 74 bp, Homo sapiens
gttttatatccttggacaaagtctcacatgaacattttcaatgtgcatttctcttttctgtctttataaaagtc

SEQ ID NO: 8177 - DNA, 71 bp, Homo sapiens
tgaacattttcaatgtgcatttctcttttctgtctttataaaagtctgtttaattaccctctggttacttc

SEQ ID NO: 8178 - DNA, 69 bp, Homo sapiens
atgtgcatttctcttttctgtctttataaaagtctgtttaattaccctctggttacttcccggctgaat

SEQ ID NO: 8179 - DNA, 66 bp, Homo sapiens
ctcttttctgtctttataaaagtctgtttaattaccctctggttacttcccggctgaattaagtaa

SEQ ID NO: 8180 - DNA, 64 bp, Homo sapiens
aaagtctgtttaattaccctctggttacttcccggctgaattaagtaaaaatccccatttcttc

SEQ ID NO: 8181 - DNA, 69 bp, Homo sapiens
ttaattaccctctggttacttcccggctgaattaagtaaaaatccccatttcttctcattcattatgtc

SEQ ID NO: 8182 - DNA, 72 bp, Homo sapiens
cctctggttacttcccggctgaattaagtaaaaatccccatttcttctcattcattatgtctgtgagccagg

SEQ ID NO: 8183 - DNA, 73 bp, Homo sapiens
ttcccggctgaattaagtaaaaatccccatttcttctcattcattatgtctgtgagccagggggttggcatta

SEQ ID NO: 8184 - DNA, 71 bp, Homo sapiens
aattaagtaaaaatccccatttcttctcattcattatgtctgtgagccagggggttggcattagggaagtg

SEQ ID NO: 8185 - DNA, 74 bp, Homo sapiens
aaaatccccatttcttctcattcattatgtctgtgagccagggggttggcattagggaagtggtagagaagaga

SEQ ID NO: 8186 - DNA, 76 bp, Homo sapiens
tttcttctcattcattatgtctgtgagccagggggttggcattagggaagtggtagagaagagaagtttatagcta

SEQ ID NO: 8187 - DNA, 72 bp, Homo sapiens
attatgtctgtgagccagggggttggcattagggaagtggtagagaagagaagtttatagctagagggaaaa

SEQ ID NO: 8188 - DNA, 70 bp, Homo sapiens
agccagggggttggcattagggaagtggtagagaagagaagtttatagctagagggaaaattccacttga

SEQ ID NO: 8189 - DNA, 76 bp, Homo sapiens
ttggcattagggaagtggtagagaagagaagtttatagctagagggaaaattccacttgacatgtgactcaactga

SEQ ID NO: 8190 - DNA, 74 bp, Homo sapiens
ttagggaagtggtagagaagagaagtttatagctagagggaaaattccacttgacatgtgactcaactgaagaa

SEQ ID NO: 8191 - DNA, 76 bp, Homo sapiens
gtagagaagagaagtttatagctagagggaaaattccacttgacatgtgactcaactgaagaacaaagaaatcata

SEQ ID NO: 8192 - DNA, 73 bp, Homo sapiens
tagagggaaaattccacttgacatgtgactcaactgaagaacaaagaaatcatagttgtaagtaacccaggat

SEQ ID NO: 8193 - DNA, 75 bp, Homo sapiens
attccacttgacatgtgactcaactgaagaacaaagaaatcatagttgtaagtaacccaggattcagttcaatta

SEQ ID NO: 8194 - DNA, 74 bp, Homo sapiens
cttgacatgtgactcaactgaagaacaaagaaatcatagttgtaagtaacccaggattcagttcaattaaaatc

SEQ ID NO: 8195 - DNA, 71 bp, Homo sapiens
gactcaactgaagaacaaagaaatcatagttgtaagtaacccaggattcagttcaattaaaatctttacta

SEQ ID NO: 8196 - DNA, 68 bp, Homo sapiens
agaacaaagaaatcatagttgtaagtaacccaggattcagttcaattaaaatctttactatttatccc

SEQ ID NO: 8197 - DNA, 71 bp, Homo sapiens
catagttgtaagtaacccaggattcagttcaattaaaatctttactatttatcccctctccatgtttcaga

SEQ ID NO: 8198 - DNA, 72 bp, Homo sapiens
caggattcagttcaattaaaatctttactatttatcccctctccatgtttcagaaagatgggtctcttacaa

SEQ ID NO: 8199 - DNA, 75 bp, Homo sapiens
atctttactatttatcccctctccatgtttcagaaagatgggtctcttacaaatgtgatcatccagttagattta

SEQ ID NO: 8200 - DNA, 78 bp, Homo sapiens
atttatcccctctccatgtttcagaaagatgggtctcttacaaatgtgatcatccagttagatttacatgctgtgtac

SEQ ID NO: 8201 - DNA, 82 bp, Homo sapiens
atgtttcagaaagatgggtctcttacaaatgtgatcatccagttagatttacatgctgtgtactgagatacctacatctatg

SEQ ID NO: 8202 - DNA, 80 bp, Homo sapiens
aaagatgggtctcttacaaatgtgatcatccagttagatttacatgctgtgtactgagatacctacatctatgtttctgt

SEQ ID NO: 8203 - DNA, 84 bp, Homo sapiens
tcttacaaatgtgatcatccagttagatttacatgctgtgtactgagatacctacatctatgtttctgttcagcagtaaatgct

SEQ ID NO: 8204 - DNA, 83 bp, Homo sapiens
aaatgtgatcatccagttagatttacatgctgtgtactgagatacctacatctatgtttctgttcagcagtaaatgctttctg

SEQ ID NO: 8205 - DNA, 82 bp, Homo sapiens
agttagatttacatgctgtgtactgagatacctacatctatgtttctgttcagcagtaaatgctttctgtcttcaagctgaa

SEQ ID NO: 8206 - DNA, 81 bp, Homo sapiens
tactgagatacctacatctatgtttctgttcagcagtaaatgctttctgtcttcaagctgaagcttatttagcctggctta

SEQ ID NO: 8207 - DNA, 84 bp, Homo sapiens
tctatgtttctgttcagcagtaaatgctttctgtcttcaagctgaagcttatttagcctggcttatctggtgctgctgtagcaa

SEQ ID NO: 8208 - DNA, 85 bp, Homo sapiens
ttcagcagtaaatgctttctgtcttcaagctgaagcttatttagcctggcttatctggtgctgctgtagcaaccatcagtctcca

SEQ ID NO: 8209 - DNA, 83 bp, Homo sapiens
taaatgctttctgtcttcaagctgaagcttatttagcctggcttatctggtgctgctgtagcaaccatcagtctccaggcaac

SEQ ID NO: 8210 - DNA, 85 bp, Homo sapiens
tgtcttcaagctgaagcttatttagcctggcttatctggtgctgctgtagcaaccatcagtctccaggcaactgaggcacgttga

SEQ ID NO: 8211 - DNA, 84 bp, Homo sapiens
tatttagcctggcttatctggtgctgctgtagcaaccatcagtctccaggcaactgaggcacgttgacctctcagttgaactga

SEQ ID NO: 8212 - DNA, 84 bp, Homo sapiens
ttatctggtgctgctgtagcaaccatcagtctccaggcaactgaggcacgttgacctctcagttgaactgagtgctgaactact

SEQ ID NO: 8213 - DNA, 82 bp, Homo sapiens
ctgctgtagcaaccatcagtctccaggcaactgaggcacgttgacctctcagttgaactgagtgctgaactacttcaattta

SEQ ID NO: 8214 - DNA, 81 bp, Homo sapiens
aaccatcagtctccaggcaactgaggcacgttgacctctcagttgaactgagtgctgaactacttcaatttagctgcctga

SEQ ID NO: 8215 - DNA, 81 bp, Homo sapiens
tccaggcaactgaggcacgttgacctctcagttgaactgagtgctgaactacttcaatttagctgcctgagacaatagtaa

SEQ ID NO: 8216 - DNA, 81 bp, Homo sapiens
tgaggcacgttgacctctcagttgaactgagtgctgaactacttcaatttagctgcctgagacaatagtaatggtgttgaa

SEQ ID NO: 8217 - DNA, 80 bp, Homo sapiens
ttgacctctcagttgaactgagtgctgaactacttcaatttagctgcctgagacaatagtaatggtgttgaatgtgaaaa

SEQ ID NO: 8218 - DNA, 78 bp, Homo sapiens
agttgaactgagtgctgaactacttcaatttagctgcctgagacaatagtaatggtgttgaatgtgaaaaatgtgaaa

SEQ ID NO: 8219 - DNA, 78 bp, Homo sapiens
tacttcaatttagctgcctgagacaatagtaatggtgttgaatgtgaaaaatgtgaaattttctaggcaatgtgcaaa

SEQ ID NO: 8220 - DNA, 76 bp, Homo sapiens
atttagctgcctgagacaatagtaatggtgttgaatgtgaaaaatgtgaaattttctaggcaatgtgcaaaggaaa

SEQ ID NO: 8221 - DNA, 76 bp, Homo sapiens
ctgagacaatagtaatggtgttgaatgtgaaaaatgtgaaattttctaggcaatgtgcaaaggaaaggatacagaa

SEQ ID NO: 8222 - DNA, 74 bp, Homo sapiens
gtaatggtgttgaatgtgaaaaatgtgaaattttctaggcaatgtgcaaaggaaaggatacagaaatatttaga

SEQ ID NO: 8223 - DNA, 75 bp, Homo sapiens
tgtgaaaaatgtgaaattttctaggcaatgtgcaaaggaaaggatacagaaatatttagatagaattgataggac

SEQ ID NO: 8224 - DNA, 74 bp, Homo sapiens
tgtgaaattttctaggcaatgtgcaaaggaaaggatacagaaatatttagatagaattgataggactcttaaaa

SEQ ID NO: 8225 - DNA, 76 bp, Homo sapiens
caatgtgcaaaggaaaggatacagaaatatttagatagaattgataggactcttaaaattggggatgcacttagca

SEQ ID NO: 8226 - DNA, 75 bp, Homo sapiens
ggaaaggatacagaaatatttagatagaattgataggactcttaaaattggggatgcacttagcaattgaatcat

SEQ ID NO: 8227 - DNA, 74 bp, Homo sapiens
cagaaatatttagatagaattgataggactcttaaaattggggatgcacttagcaattgaatcattttttacaa

SEQ ID NO: 8228 - DNA, 68 bp, Homo sapiens
aggactcttaaaattggggatgcacttagcaattgaatcattttttacaaaacgacaaagtttattcc

SEQ ID NO: 8229 - DNA, 71 bp, Homo sapiens
aaattggggatgcacttagcaattgaatcattttttacaaaacgacaaagtttattcctgtttcactctca

SEQ ID NO: 8230 - DNA, 73 bp, Homo sapiens
gggatgcacttagcaattgaatcattttttacaaaacgacaaagtttattcctgtttcactctcatatagacc

SEQ ID NO: 8231 - DNA, 71 bp, Homo sapiens
tagcaattgaatcattttttacaaaacgacaaagtttattcctgtttcactctcatatagaccctgtttgt

SEQ ID NO: 8232 - DNA, 68 bp, Homo sapiens
cattttttacaaaacgacaaagtttattcctgtttcactctcatatagaccctgtttgttttcaagtc

SEQ ID NO: 8233 - DNA, 70 bp, Homo sapiens
aacgacaaagtttattcctgtttcactctcatatagaccctgtttgttttcaagtcttacattagttgtg

SEQ ID NO: 8234 - DNA, 73 bp, Homo sapiens
gtttattcctgtttcactctcatatagaccctgtttgttttcaagtcttacattagttgtgtttagatagtca

SEQ ID NO: 8235 - DNA, 75 bp, Homo sapiens
ctgtttcactctcatatagaccctgtttgttttcaagtcttacattagttgtgtttagatagtcacatctagtgt

SEQ ID NO: 8236 - DNA, 73 bp, Homo sapiens
ctctcatatagaccctgtttgttttcaagtcttacattagttgtgtttagatagtcacatctagtgttttatt

SEQ ID NO: 8237 - DNA, 70 bp, Homo sapiens
ccctgtttgttttcaagtcttacattagttgtgtttagatagtcacatctagtgttttatttagggttgc

SEQ ID NO: 8238 - DNA, 72 bp, Homo sapiens
caagtcttacattagttgtgtttagatagtcacatctagtgttttatttagggttgctctaagtagttgatt

SEQ ID NO: 8239 - DNA, 76 bp, Homo sapiens
cattagttgtgtttagatagtcacatctagtgttttatttagggttgctctaagtagttgattttagagcaatgca

SEQ ID NO: 8240 - DNA, 76 bp, Homo sapiens
ttgtgtttagatagtcacatctagtgttttatttagggttgctctaagtagttgattttagagcaatgcagtaaga

SEQ ID NO: 8241 - DNA, 76 bp, Homo sapiens
tagtcacatctagtgttttatttagggttgctctaagtagttgattttagagcaatgcagtaagataaatgggtga

SEQ ID NO: 8242 - DNA, 72 bp, Homo sapiens
ctagtgttttatttagggttgctctaagtagttgattttagagcaatgcagtaagataaatgggtgaataaa

SEQ ID NO: 8243 - DNA, 73 bp, Homo sapiens
atttagggttgctctaagtagttgattttagagcaatgcagtaagataaatgggtgaataaaaattatcaata

SEQ ID NO: 8244 - DNA, 72 bp, Homo sapiens
gctctaagtagttgattttagagcaatgcagtaagataaatgggtgaataaaaattatcaatatttaaaacg

SEQ ID NO: 8245 - DNA, 72 bp, Homo sapiens
gattttagagcaatgcagtaagataaatgggtgaataaaaattatcaatatttaaaacgtaattctaggctg

SEQ ID NO: 8246 - DNA, 72 bp, Homo sapiens
gagcaatgcagtaagataaatgggtgaataaaaattatcaatatttaaaacgtaattctaggctgggcgtgg

SEQ ID NO: 8247 - DNA, 67 bp, Homo sapiens
aaaaaagtaattctagaagtcttaccacaactgttaagaaaaccatcatacttgcaagcaaaaactt

SEQ ID NO: 8248 - DNA, 70 bp, Homo sapiens
gtaattctagaagtcttaccacaactgttaagaaaaccatcatacttgcaagcaaaaactttaataatag

SEQ ID NO: 8249 - DNA, 75 bp, Homo sapiens
gaagtcttaccacaactgttaagaaaaccatcatacttgcaagcaaaaactttaataatagtgatagatgatgga

SEQ ID NO: 8250 - DNA, 74 bp, Homo sapiens
cacaactgttaagaaaaccatcatacttgcaagcaaaaactttaataatagtgatagatgatggaaatattaaa

SEQ ID NO: 8251 - DNA, 74 bp, Homo sapiens
agaaaaccatcatacttgcaagcaaaaactttaataatagtgatagatgatggaaatattaaacttgaataaca

SEQ ID NO: 8252 - DNA, 75 bp, Homo sapiens
tcatacttgcaagcaaaaactttaataatagtgatagatgatggaaatattaaacttgaataacattttgtgccc

SEQ ID NO: 8253 - DNA, 71 bp, Homo sapiens
gcaaaaactttaataatagtgatagatgatggaaatattaaacttgaataacattttgtgcccccacaccc

SEQ ID NO: 8254 - DNA, 71 bp, Homo sapiens
taatagtgatagatgatggaaatattaaacttgaataacattttgtgcccccacacccttaacgaaagtag

SEQ ID NO: 8255 - DNA, 70 bp, Homo sapiens
tgatagatgatggaaatattaaacttgaataacattttgtgcccccacacccttaacgaaagtaggagtt

SEQ ID NO: 8256 - DNA, 64 bp, Homo sapiens
ggaaatattaaacttgaataacattttgtgcccccacacccttaacgaaagtaggagtttttat

SEQ ID NO: 8257 - DNA, 66 bp, Homo sapiens
aacttgaataacattttgtgcccccacacccttaacgaaagtaggagtttttattgattggattgg

SEQ ID NO: 8258 - DNA, 69 bp, Homo sapiens
ttttgtgcccccacacccttaacgaaagtaggagtttttattgattggattggtgtcagcaggataaaa

SEQ ID NO: 8259 - DNA, 71 bp, Homo sapiens
ccacacccttaacgaaagtaggagtttttattgattggattggtgtcagcaggataaaatccagaggtcat

SEQ ID NO: 8260 - DNA, 71 bp, Homo sapiens
ttaacgaaagtaggagtttttattgattggattggtgtcagcaggataaaatccagaggtcatttttgctt

SEQ ID NO: 8261 - DNA, 75 bp, Homo sapiens
gtaggagtttttattgattggattggtgtcagcaggataaaatccagaggtcatttttgctttttgtgatataca

SEQ ID NO: 8262 - DNA, 74 bp, Homo sapiens
ttttattgattggattggtgtcagcaggataaaatccagaggtcatttttgctttttgtgatatacattttaag

SEQ ID NO: 8263 - DNA, 75 bp, Homo sapiens
tggtgtcagcaggataaaatccagaggtcatttttgctttttgtgatatacattttaagtaaatagacctctaca

SEQ ID NO: 8264 - DNA, 75 bp, Homo sapiens
tcagcaggataaaatccagaggtcatttttgctttttgtgatatacattttaagtaaatagacctctacattgcc

SEQ ID NO: 8265 - DNA, 72 bp, Homo sapiens
ccagaggtcatttttgctttttgtgatatacattttaagtaaatagacctctacattgccttatttggtatc

SEQ ID NO: 8266 - DNA, 70 bp, Homo sapiens
tttttgctttttgtgatatacattttaagtaaatagacctctacattgccttatttggtatcttaagaac

SEQ ID NO: 8267 - DNA, 72 bp, Homo sapiens
ttgtgatatacattttaagtaaatagacctctacattgccttatttggtatcttaagaactgttccctgggc

SEQ ID NO: 8268 - DNA, 69 bp, Homo sapiens
atatacattttaagtaaatagacctctacattgccttatttggtatcttaagaactgttccctgggccg

SEQ ID NO: 8269 - DNA, 65 bp, Homo sapiens
aaaaaaattgttccctggaaagtggtcaaggagataagattgggaagggctagtagaagttaaaa

SEQ ID NO: 8270 - DNA, 67 bp, Homo sapiens
aattgttccctggaaagtggtcaaggagataagattgggaagggctagtagaagttaaaaacttaga

SEQ ID NO: 8271 - DNA, 67 bp, Homo sapiens
ggaaagtggtcaaggagataagattgggaagggctagtagaagttaaaaacttagaataacttgaaa

SEQ ID NO: 8272 - DNA, 70 bp, Homo sapiens
gagataagattgggaagggctagtagaagttaaaaacttagaataacttgaaacttgatttgtgctggga

SEQ ID NO: 8273 - DNA, 68 bp, Homo sapiens
tgggaagggctagtagaagttaaaaacttagaataacttgaaacttgatttgtgctgggaaaaggaga

SEQ ID NO: 8274 - DNA, 68 bp, Homo sapiens
gggctagtagaagttaaaaacttagaataacttgaaacttgatttgtgctgggaaaaggagatacttg

SEQ ID NO: 8275 - DNA, 67 bp, Homo sapiens
taaaaacttagaataacttgaaacttgatttgtgctgggaaaaggagatacttgtaaaattggcggg

SEQ ID NO: 8276 - DNA, 67 bp, Homo sapiens
acttagaataacttgaaacttgatttgtgctgggaaaaggagatacttgtaaaattggcgggtgggg

SEQ ID NO: 8277 - DNA, 66 bp, Homo sapiens
acttgaaacttgatttgtgctgggaaaaggagatacttgtaaaattggcgggtggggggtggggag

SEQ ID NO: 8278 - DNA, 69 bp, Homo sapiens
atttgtgctgggaaaaggagatacttgtaaaattggcgggtggggggtggggaggggagtctgatagca

SEQ ID NO: 8279 - DNA, 69 bp, Homo sapiens
aaaaggagatacttgtaaaattggcgggtggggggtggggaggggagtctgatagcagcatacattttg

SEQ ID NO: 8280 - DNA, 68 bp, Homo sapiens
atacttgtaaaattggcgggtggggggtggggaggggagtctgatagcagcatacattttggggaaaa

SEQ ID NO: 8281 - DNA, 66 bp, Homo sapiens
aattggcgggtggggggtggggaggggagtctgatagcagcatacattttggggaaaaaaccttta

SEQ ID NO: 8282 - DNA, 66 bp, Homo sapiens
ggggtggggaggggagtctgatagcagcatacattttggggaaaaaacctttaaaaaactgtttga

SEQ ID NO: 8283 - DNA, 69 bp, Homo sapiens
gtctgatagcagcatacattttggggaaaaaacctttaaaaaactgtttgattttatattcttatattc

SEQ ID NO: 8284 - DNA, 65 bp, Homo sapiens
gcatacattttggggaaaaaacctttaaaaaactgtttgattttatattcttatattcctcctcc

SEQ ID NO: 8285 - DNA, 67 bp, Homo sapiens
ttttttttccccctttcaacagactagtttttagagtaatggctctttcacaaataattgataggaa

SEQ ID NO: 8286 - DNA, 72 bp, Homo sapiens
ccctttcaacagactagtttttagagtaatggctctttcacaaataattgataggaagcctgctttactaca

SEQ ID NO: 8287 - DNA, 75 bp, Homo sapiens
tcaacagactagtttttagagtaatggctctttcacaaataattgataggaagcctgctttactacatactagta

SEQ ID NO: 8288 - DNA, 75 bp, Homo sapiens
tttagagtaatggctctttcacaaataattgataggaagcctgctttactacatactagtatattagtaatagag

SEQ ID NO: 8289 - DNA, 75 bp, Homo sapiens
tggctctttcacaaataattgataggaagcctgctttactacatactagtatattagtaatagagtagtttctta

SEQ ID NO: 8290 - DNA, 73 bp, Homo sapiens
caaataattgataggaagcctgctttactacatactagtatattagtaatagagtagtttcttaacattgcgg

SEQ ID NO: 8291 - DNA, 73 bp, Homo sapiens
ataggaagcctgctttactacatactagtatattagtaatagagtagtttcttaacattgcgggaagagcgga

SEQ ID NO: 8292 - DNA, 72 bp, Homo sapiens
aagcctgctttactacatactagtatattagtaatagagtagtttcttaacattgcgggaagagcggactcc

SEQ ID NO: 8293 - DNA, 77 bp, Homo sapiens
atattagtaatagagtagtttcttaacattgcgggaagagcggactcctgtccatgtgactgttaatcatggatcag

SEQ ID NO: 8294 - DNA, 77 bp, Homo sapiens
gtaatagagtagtttcttaacattgcgggaagagcggactcctgtccatgtgactgttaatcatggatcagggtaga

SEQ ID NO: 8295 - DNA, 76 bp, Homo sapiens
tttcttaacattgcgggaagagcggactcctgtccatgtgactgttaatcatggatcagggtagaggtataaatta

SEQ ID NO: 8296 - DNA, 76 bp, Homo sapiens
attgcgggaagagcggactcctgtccatgtgactgttaatcatggatcagggtagaggtataaattagtttctgta

SEQ ID NO: 8297 - DNA, 76 bp, Homo sapiens
ggactcctgtccatgtgactgttaatcatggatcagggtagaggtataaattagtttctgtaggagtgtcattaat

SEQ ID NO: 8298 - DNA, 76 bp, Homo sapiens
tgtccatgtgactgttaatcatggatcagggtagaggtataaattagtttctgtaggagtgtcattaatttttcat

SEQ ID NO: 8299 - DNA, 73 bp, Homo sapiens
gactgttaatcatggatcagggtagaggtataaattagtttctgtaggagtgtcattaatttttcattttgcc

SEQ ID NO: 8300 - DNA, 70 bp, Homo sapiens
gggtagaggtataaattagtttctgtaggagtgtcattaatttttcattttgcctttcaaatcctgctgt

SEQ ID NO: 8301 - DNA, 76 bp, Homo sapiens
ttctgtaggagtgtcattaatttttcattttgcctttcaaatcctgctgtttcctagttctgcagtcattctgtac

SEQ ID NO: 8302 - DNA, 74 bp, Homo sapiens
attaatttttcattttgcctttcaaatcctgctgtttcctagttctgcagtcattctgtactgtctttgggaga

SEQ ID NO: 8303 - DNA, 76 bp, Homo sapiens
tttttcattttgcctttcaaatcctgctgtttcctagttctgcagtcattctgtactgtctttgggagaatgcagg

SEQ ID NO: 8304 - DNA, 75 bp, Homo sapiens
atcctgctgtttcctagttctgcagtcattctgtactgtctttgggagaatgcaggtgctttttttttggtttga

SEQ ID NO: 8305 - DNA, 74 bp, Homo sapiens
tagttctgcagtcattctgtactgtctttgggagaatgcaggtgctttttttttggtttgaaggatgatttctt

SEQ ID NO: 8306 - DNA, 73 bp, Homo sapiens
tcattctgtactgtctttgggagaatgcaggtgctttttttttggtttgaaggatgatttctttagtagaaga

SEQ ID NO: 8307 - DNA, 70 bp, Homo sapiens
tgtactgtctttgggagaatgcaggtgctttttttttggtttgaaggatgatttctttagtagaagaact

SEQ ID NO: 8308 - DNA, 72 bp, Homo sapiens
ggagaatgcaggtgctttttttttggtttgaaggatgatttctttagtagaagaacttaagactgaatgcaa

SEQ ID NO: 8309 - DNA, 73 bp, Homo sapiens
tgcaggtgctttttttttggtttgaaggatgatttctttagtagaagaacttaagactgaatgcaatgaaaca

SEQ ID NO: 8310 - DNA, 74 bp, Homo sapiens
tttggtttgaaggatgatttctttagtagaagaacttaagactgaatgcaatgaaacataattgcattccgtta

SEQ ID NO: 8311 - DNA, 75 bp, Homo sapiens
gatttctttagtagaagaacttaagactgaatgcaatgaaacataattgcattccgttacatcctactttctgag

SEQ ID NO: 8312 - DNA, 76 bp, Homo sapiens
tagaagaacttaagactgaatgcaatgaaacataattgcattccgttacatcctactttctgagttttgcgtttga

SEQ ID NO: 8313 - DNA, 77 bp, Homo sapiens
agactgaatgcaatgaaacataattgcattccgttacatcctactttctgagttttgcgtttgaaatacaatcttca

SEQ ID NO: 8314 - DNA, 79 bp, Homo sapiens
gcaatgaaacataattgcattccgttacatcctactttctgagttttgcgtttgaaatacaatcttcatgtgataatca

SEQ ID NO: 8315 - DNA, 77 bp, Homo sapiens
ataattgcattccgttacatcctactttctgagttttgcgtttgaaatacaatcttcatgtgataatcatggcttct

SEQ ID NO: 8316 - DNA, 77 bp, Homo sapiens
attccgttacatcctactttctgagttttgcgtttgaaatacaatcttcatgtgataatcatggcttcttgtctatc

SEQ ID NO: 8317 - DNA, 77 bp, Homo sapiens
actttctgagttttgcgtttgaaatacaatcttcatgtgataatcatggcttcttgtctatcccatgttactgttaa

SEQ ID NO: 8318 - DNA, 77 bp, Homo sapiens
ctgagttttgcgtttgaaatacaatcttcatgtgataatcatggcttcttgtctatcccatgttactgttaaacaaa

SEQ ID NO: 8319 - DNA, 78 bp, Homo sapiens
acaatcttcatgtgataatcatggcttcttgtctatcccatgttactgttaaacaaaatgatgtagacttaacattta

SEQ ID NO: 8320 - DNA, 74 bp, Homo sapiens
gtgataatcatggcttcttgtctatcccatgttactgttaaacaaaatgatgtagacttaacatttaaagtaaa

SEQ ID NO: 8321 - DNA, 69 bp, Homo sapiens
ggcttcttgtctatcccatgttactgttaaacaaaatgatgtagacttaacatttaaagtaaaataaac

SEQ ID NO: 8322 - DNA, 67 bp, Homo sapiens
ctatcccatgttactgttaaacaaaatgatgtagacttaacatttaaagtaaaataaacttccaagg

SEQ ID NO: 8323 - DNA, 67 bp, Homo sapiens
ctgttaaacaaaatgatgtagacttaacatttaaagtaaaataaacttccaaggtttatttatgtga

SEQ ID NO: 8324 - DNA, 68 bp, Homo sapiens
caaaatgatgtagacttaacatttaaagtaaaataaacttccaaggtttatttatgtgatatttagga

SEQ ID NO: 8325 - DNA, 70 bp, Homo sapiens
tgtagacttaacatttaaagtaaaataaacttccaaggtttatttatgtgatatttaggaaatgcagata

SEQ ID NO: 8326 - DNA, 68 bp, Homo sapiens
catttaaagtaaaataaacttccaaggtttatttatgtgatatttaggaaatgcagatatttcgtgtt

SEQ ID NO: 8327 - DNA, 68 bp, Homo sapiens
gtaaaataaacttccaaggtttatttatgtgatatttaggaaatgcagatatttcgtgtttttgttgt

SEQ ID NO: 8328 - DNA, 76 bp, Homo sapiens
gccacctcgcctgggcatatttctgtattttaaacatacaatttagtgactagagttttgcagatttctgtgacac

SEQ ID NO: 8329 - DNA, 77 bp, Homo sapiens
cctgggcatatttctgtattttaaacatacaatttagtgactagagttttgcagatttctgtgacactttcatctca

SEQ ID NO: 8330 - DNA, 77 bp, Homo sapiens
ttctgtattttaaacatacaatttagtgactagagttttgcagatttctgtgacactttcatctcaattagcttcga

SEQ ID NO: 8331 - DNA, 76 bp, Homo sapiens
taaacatacaatttagtgactagagttttgcagatttctgtgacactttcatctcaattagcttcgaatattttgt

SEQ ID NO: 8332 - DNA, 75 bp, Homo sapiens
atacaatttagtgactagagttttgcagatttctgtgacactttcatctcaattagcttcgaatattttgttttc

SEQ ID NO: 8333 - DNA, 78 bp, Homo sapiens
gtgactagagttttgcagatttctgtgacactttcatctcaattagcttcgaatattttgttttccaatatgattatg

SEQ ID NO: 8334 - DNA, 76 bp, Homo sapiens
atgtatgtgtgtgtttatgtaggggaagttgtctaagatgtagtctccgatttcttttcagatgatgtctaataag

SEQ ID NO: 8335 - DNA, 74 bp, Homo sapiens
tgtgtttatgtaggggaagttgtctaagatgtagtctccgatttcttttcagatgatgtctaataaggacactt

SEQ ID NO: 8336 - DNA, 74 bp, Homo sapiens
tatgtaggggaagttgtctaagatgtagtctccgatttcttttcagatgatgtctaataaggacactttaattc

SEQ ID NO: 8337 - DNA, 75 bp, Homo sapiens
aagttgtctaagatgtagtctccgatttcttttcagatgatgtctaataaggacactttaattctgcttgagaaa

SEQ ID NO: 8338 - DNA, 74 bp, Homo sapiens
agatgtagtctccgatttcttttcagatgatgtctaataaggacactttaattctgcttgagaaaatggtttcg

SEQ ID NO: 8339 - DNA, 75 bp, Homo sapiens
gatttcttttcagatgatgtctaataaggacactttaattctgcttgagaaaatggtttcgtttctcaggcagat

SEQ ID NO: 8340 - DNA, 76 bp, Homo sapiens
tttcagatgatgtctaataaggacactttaattctgcttgagaaaatggtttcgtttctcaggcagatttaactga

SEQ ID NO: 8341 - DNA, 73 bp, Homo sapiens
tgtctaataaggacactttaattctgcttgagaaaatggtttcgtttctcaggcagatttaactgacttctgg

SEQ ID NO: 8342 - DNA, 72 bp, Homo sapiens
ctttaattctgcttgagaaaatggtttcgtttctcaggcagatttaactgacttctggggtgatatttatgt

SEQ ID NO: 8343 - DNA, 72 bp, Homo sapiens
gcttgagaaaatggtttcgtttctcaggcagatttaactgacttctggggtgatatttatgtttatacttaa

SEQ ID NO: 8344 - DNA, 72 bp, Homo sapiens
aatggtttcgtttctcaggcagatttaactgacttctggggtgatatttatgtttatacttaattagtcaga

SEQ ID NO: 8345 - DNA, 73 bp, Homo sapiens
ttcgtttctcaggcagatttaactgacttctggggtgatatttatgtttatacttaattagtcagaatgtaaa

SEQ ID NO: 8346 - DNA, 73 bp, Homo sapiens
aggcagatttaactgacttctggggtgatatttatgtttatacttaattagtcagaatgtaaatttcttctga

SEQ ID NO: 8347 - DNA, 72 bp, Homo sapiens
aactgacttctggggtgatatttatgtttatacttaattagtcagaatgtaaatttcttctgatttcaataa

SEQ ID NO: 8348 - DNA, 74 bp, Homo sapiens
gggtgatatttatgtttatacttaattagtcagaatgtaaatttcttctgatttcaataatataatgacttata

SEQ ID NO: 8349 - DNA, 71 bp, Homo sapiens
tgtttatacttaattagtcagaatgtaaatttcttctgatttcaataatataatgacttataattttaagg

SEQ ID NO: 8350 - DNA, 70 bp, Homo sapiens
taattagtcagaatgtaaatttcttctgatttcaataatataatgacttataattttaagggaattacct

SEQ ID NO: 8351 - DNA, 71 bp, Homo sapiens
cagaatgtaaatttcttctgatttcaataatataatgacttataattttaagggaattacctttctgagga

SEQ ID NO: 8352 - DNA, 71 bp, Homo sapiens
tcttctgatttcaataatataatgacttataattttaagggaattacctttctgaggaaaatcagttttca

SEQ ID NO: 8353 - DNA, 67 bp, Homo sapiens
aatgacttataattttaagggaattacctttctgaggaaaatcagttttcataaccttggtaacatc

SEQ ID NO: 8354 - DNA, 66 bp, Homo sapiens
aattttaagggaattacctttctgaggaaaatcagttttcataaccttggtaacatctcttgttac

SEQ ID NO: 8355 - DNA, 71 bp, Homo sapiens
aagggaattacctttctgaggaaaatcagttttcataaccttggtaacatctcttgttaccagatgatgaa

SEQ ID NO: 8356 - DNA, 77 bp, Homo sapiens
aatcagttttcataaccttggtaacatctcttgttaccagatgatgaaaaggttcagtcacagtcacatatctgtaa

SEQ ID NO: 8357 - DNA, 77 bp, Homo sapiens
ataaccttggtaacatctcttgttaccagatgatgaaaaggttcagtcacagtcacatatctgtaagtctggaatta

SEQ ID NO: 8358 - DNA, 80 bp, Homo sapiens
ttggtaacatctcttgttaccagatgatgaaaaggttcagtcacagtcacatatctgtaagtctggaattaagacatgat

SEQ ID NO: 8359 - DNA, 81 bp, Homo sapiens
tgatgaaaaggttcagtcacagtcacatatctgtaagtctggaattaagacatgattccttagcctgctctcttattacta

SEQ ID NO: 8360 - DNA, 77 bp, Homo sapiens
aaaaggttcagtcacagtcacatatctgtaagtctggaattaagacatgattccttagcctgctctcttattactaa

SEQ ID NO: 8361 - DNA, 76 bp, Homo sapiens
catatctgtaagtctggaattaagacatgattccttagcctgctctcttattactaattgttactgttaaaatgaa

SEQ ID NO: 8362 - DNA, 73 bp, Homo sapiens
agtctggaattaagacatgattccttagcctgctctcttattactaattgttactgttaaaatgaatttccca

SEQ ID NO: 8363 - DNA, 73 bp, Homo sapiens
agacatgattccttagcctgctctcttattactaattgttactgttaaaatgaatttcccaattatgtacttc

SEQ ID NO: 8364 - DNA, 73 bp, Homo sapiens
tagcctgctctcttattactaattgttactgttaaaatgaatttcccaattatgtacttcttatgctaagagg

SEQ ID NO: 8365 - DNA, 74 bp, Homo sapiens
tgctctcttattactaattgttactgttaaaatgaatttcccaattatgtacttcttatgctaagaggtatctc

SEQ ID NO: 8366 - DNA, 71 bp, Homo sapiens
ttactaattgttactgttaaaatgaatttcccaattatgtacttcttatgctaagaggtatctccttggaa

SEQ ID NO: 8367 - DNA, 68 bp, Homo sapiens
atttcccaattatgtacttcttatgctaagaggtatctccttggaaaacgttgttagtaattttactg

SEQ ID NO: 8368 - DNA, 70 bp, Homo sapiens
ccaattatgtacttcttatgctaagaggtatctccttggaaaacgttgttagtaattttactgtgttcat

SEQ ID NO: 8369 - DNA, 76 bp, Homo sapiens
taagaggtatctccttggaaaacgttgttagtaattttactgtgttcatttgtgtgatgcaatgcagaagagagaa

SEQ ID NO: 8370 - DNA, 79 bp, Homo sapiens
ttcatttgtgtgatgcaatgcagaagagagaaatttgagtcagcaaaagtcctgggttccaggagttttgctactcact

SEQ ID NO: 8371 - DNA, 73 bp, Homo sapiens
aatgcagaagagagaaatttgagtcagcaaaagtcctgggttccaggagttttgctactcacttgtataacct

SEQ ID NO: 8372 - DNA, 70 bp, Homo sapiens
aaatttgagtcagcaaaagtcctgggttccaggagttttgctactcacttgtataaccttgggcaggtct

SEQ ID NO: 8373 - DNA, 69 bp, Homo sapiens
tcagcaaaagtcctgggttccaggagttttgctactcacttgtataaccttgggcaggtcttttaattt

SEQ ID NO: 8374 - DNA, 66 bp, Homo sapiens
aaagtcctgggttccaggagttttgctactcacttgtataaccttgggcaggtcttttaatttttg

SEQ ID NO: 8375 - DNA, 71 bp, Homo sapiens
aggagttttgctactcacttgtataaccttgggcaggtcttttaatttttgtgagcctcaatgtttccata

SEQ ID NO: 8376 - DNA, 72 bp, Homo sapiens
ttttgctactcacttgtataaccttgggcaggtcttttaatttttgtgagcctcaatgtttccatatgtaaa

SEQ ID NO: 8377 - DNA, 71 bp, Homo sapiens
cacttgtataaccttgggcaggtcttttaatttttgtgagcctcaatgtttccatatgtaaaatgggaata

SEQ ID NO: 8378 - DNA, 70 bp, Homo sapiens
tgggcaggtcttttaatttttgtgagcctcaatgtttccatatgtaaaatgggaatactttaagtacctg

SEQ ID NO: 8379 - DNA, 71 bp, Homo sapiens
tttaatttttgtgagcctcaatgtttccatatgtaaaatgggaatactttaagtacctgttctacctgcta

SEQ ID NO: 8380 - DNA, 75 bp, Homo sapiens
tgtgagcctcaatgtttccatatgtaaaatgggaatactttaagtacctgttctacctgctatacagatacttta

SEQ ID NO: 8381 - DNA, 73 bp, Homo sapiens
actttaagtacctgttctacctgctatacagatactttatgaggttcaaatgcagaccataaaatactttaga

SEQ ID NO: 8382 - DNA, 75 bp, Homo sapiens
cctgttctacctgctatacagatactttatgaggttcaaatgcagaccataaaatactttagaattcatggttat

SEQ ID NO: 8383 - DNA, 75 bp, Homo sapiens
ctttatgaggttcaaatgcagaccataaaatactttagaattcatggttattgacttcaactgttactcttcagc

SEQ ID NO: 8384 - DNA, 75 bp, Homo sapiens
tcaaatgcagaccataaaatactttagaattcatggttattgacttcaactgttactcttcagcctaattaccag

SEQ ID NO: 8385 - DNA, 76 bp, Homo sapiens
tgcagaccataaaatactttagaattcatggttattgacttcaactgttactcttcagcctaattaccagtgagaa

SEQ ID NO: 8386 - DNA, 73 bp, Homo sapiens
actttagaattcatggttattgacttcaactgttactcttcagcctaattaccagtgagaaattgtacaggaa

SEQ ID NO: 8387 - DNA, 74 bp, Homo sapiens
tattgacttcaactgttactcttcagcctaattaccagtgagaaattgtacaggaacacttcctgtattggaaa

SEQ ID NO: 8388 - DNA, 72 bp, Homo sapiens
ctcttcagcctaattaccagtgagaaattgtacaggaacacttcctgtattggaaatagtattaacaatttc

SEQ ID NO: 8389 - DNA, 71 bp, Homo sapiens
ttaccagtgagaaattgtacaggaacacttcctgtattggaaatagtattaacaatttctgttaaaactca

SEQ ID NO: 8390 - DNA, 73 bp, Homo sapiens
gaaattgtacaggaacacttcctgtattggaaatagtattaacaatttctgttaaaactcatataattcatgc

SEQ ID NO: 8391 - DNA, 75 bp, Homo sapiens
caggaacacttcctgtattggaaatagtattaacaatttctgttaaaactcatataattcatgctaacatagata

SEQ ID NO: 8392 - DNA, 74 bp, Homo sapiens
cttcctgtattggaaatagtattaacaatttctgttaaaactcatataattcatgctaacatagataaatgaat

SEQ ID NO: 8393 - DNA, 74 bp, Homo sapiens
ggaaatagtattaacaatttctgttaaaactcatataattcatgctaacatagataaatgaattttagccagta

SEQ ID NO: 8394 - DNA, 78 bp, Homo sapiens
gttaaaactcatataattcatgctaacatagataaatgaattttagccagtatatatattcagctgtggattaaggtc

SEQ ID NO: 8395 - DNA, 79 bp, Homo sapiens
ctcatataattcatgctaacatagataaatgaattttagccagtatatatattcagctgtggattaaggtctttcccag

SEQ ID NO: 8396 - DNA, 73 bp, Homo sapiens
agataaatgaattttagccagtatatatattcagctgtggattaaggtctttcccagttccaaaattatttca

SEQ ID NO: 8397 - DNA, 75 bp, Homo sapiens
tatatatattcagctgtggattaaggtctttcccagttccaaaattatttcaatagctgcctttgtcctacagta

SEQ ID NO: 8398 - DNA, 67 bp, Homo sapiens
ggattaaggtctttcccagttccaaaattatttcaatagctgcctttgtcctacagtaattttttcc

SEQ ID NO: 8399 - DNA, 69 bp, Homo sapiens
ccagttccaaaattatttcaatagctgcctttgtcctacagtaattttttcccagaaaggtaagagcta

SEQ ID NO: 8400 - DNA, 72 bp, Homo sapiens
aattatttcaatagctgcctttgtcctacagtaattttttcccagaaaggtaagagctatattgataagata

SEQ ID NO: 8401 - DNA, 72 bp, Homo sapiens
caatagctgcctttgtcctacagtaattttttcccagaaaggtaagagctatattgataagatattaaccag

SEQ ID NO: 8402 - DNA, 70 bp, Homo sapiens
gcctttgtcctacagtaattttttcccagaaaggtaagagctatattgataagatattaaccagttaaga

SEQ ID NO: 8403 - DNA, 68 bp, Homo sapiens
ctacagtaattttttcccagaaaggtaagagctatattgataagatattaaccagttaagaaacctac

SEQ ID NO: 8404 - DNA, 69 bp, Homo sapiens
ttcccagaaaggtaagagctatattgataagatattaaccagttaagaaacctacttagaatttgttgg

SEQ ID NO: 8405 - DNA, 72 bp, Homo sapiens
taagagctatattgataagatattaaccagttaagaaacctacttagaatttgttggttaatctatacagtc

SEQ ID NO: 8406 - DNA, 70 bp, Homo sapiens
attgataagatattaaccagttaagaaacctacttagaatttgttggttaatctatacagtcctgttgtc

SEQ ID NO: 8407 - DNA, 72 bp, Homo sapiens
tattaaccagttaagaaacctacttagaatttgttggttaatctatacagtcctgttgtccgatcatgagtg

SEQ ID NO: 8408 - DNA, 72 bp, Homo sapiens
accagttaagaaacctacttagaatttgttggttaatctatacagtcctgttgtccgatcatgagtgttcag

SEQ ID NO: 8409 - DNA, 76 bp, Homo sapiens
agaatttgttggttaatctatacagtcctgttgtccgatcatgagtgttcagtgatggtttaactacacttcattc

SEQ ID NO: 8410 - DNA, 77 bp, Homo sapiens
ttgtccgatcatgagtgttcagtgatggtttaactacacttcattccctcctgctactttatggaaactcaattgtg

SEQ ID NO: 8411 - DNA, 72 bp, Homo sapiens
agtgttcagtgatggtttaactacacttcattccctcctgctactttatggaaactcaattgtggggcattt

SEQ ID NO: 8412 - DNA, 73 bp, Homo sapiens
agtgatggtttaactacacttcattccctcctgctactttatggaaactcaattgtggggcattttggcatta

SEQ ID NO: 8413 - DNA, 73 bp, Homo sapiens
taactacacttcattccctcctgctactttatggaaactcaattgtggggcattttggcattagcctaaacaa

SEQ ID NO: 8414 - DNA, 71 bp, Homo sapiens
attccctcctgctactttatggaaactcaattgtggggcattttggcattagcctaaacaatggttttgaa

SEQ ID NO: 8415 - DNA, 71 bp, Homo sapiens
tactttatggaaactcaattgtggggcattttggcattagcctaaacaatggttttgaatacgttaagctc

SEQ ID NO: 8416 - DNA, 70 bp, Homo sapiens
aactcaattgtggggcattttggcattagcctaaacaatggttttgaatacgttaagctcctaacaatta

SEQ ID NO: 8417 - DNA, 69 bp, Homo sapiens
aattgtggggcattttggcattagcctaaacaatggttttgaatacgttaagctcctaacaattaggga

SEQ ID NO: 8418 - DNA, 71 bp, Homo sapiens
ttttggcattagcctaaacaatggttttgaatacgttaagctcctaacaattagggagcagtttggagcat

SEQ ID NO: 8419 - DNA, 75 bp, Homo sapiens
aatggttttgaatacgttaagctcctaacaattagggagcagtttggagcattgaataatgtggaatgatgcaat

SEQ ID NO: 8420 - DNA, 78 bp, Homo sapiens
aatacgttaagctcctaacaattagggagcagtttggagcattgaataatgtggaatgatgcaattgaacctgacagc

SEQ ID NO: 8421 - DNA, 82 bp, Homo sapiens
tcctaacaattagggagcagtttggagcattgaataatgtggaatgatgcaattgaacctgacagcttcaacagtcagccta

SEQ ID NO: 8422 - DNA, 82 bp, Homo sapiens
aattagggagcagtttggagcattgaataatgtggaatgatgcaattgaacctgacagcttcaacagtcagcctactcatgg

SEQ ID NO: 8423 - DNA, 82 bp, Homo sapiens
ttggagcattgaataatgtggaatgatgcaattgaacctgacagcttcaacagtcagcctactcatgggacctgaaagttgt

SEQ ID NO: 8424 - DNA, 81 bp, Homo sapiens
ttgaataatgtggaatgatgcaattgaacctgacagcttcaacagtcagcctactcatgggacctgaaagttgttcacact

SEQ ID NO: 8425 - DNA, 78 bp, Homo sapiens
aatgatgcaattgaacctgacagcttcaacagtcagcctactcatgggacctgaaagttgttcacacttggtttcacc

SEQ ID NO: 8426 - DNA, 78 bp, Homo sapiens
aattgaacctgacagcttcaacagtcagcctactcatgggacctgaaagttgttcacacttggtttcacctctcatca

SEQ ID NO: 8427 - DNA, 82 bp, Homo sapiens
acagcttcaacagtcagcctactcatgggacctgaaagttgttcacacttggtttcacctctcatcacatgctgagtattga

SEQ ID NO: 8428 - DNA, 80 bp, Homo sapiens
acagtcagcctactcatgggacctgaaagttgttcacacttggtttcacctctcatcacatgctgagtattgaagcctta

SEQ ID NO: 8429 - DNA, 79 bp, Homo sapiens
tactcatgggacctgaaagttgttcacacttggtttcacctctcatcacatgctgagtattgaagccttactggcggta

SEQ ID NO: 8430 - DNA, 80 bp, Homo sapiens
ctgaaagttgttcacacttggtttcacctctcatcacatgctgagtattgaagccttactggcggtagctgacacagaaa

SEQ ID NO: 8431 - DNA, 79 bp, Homo sapiens
agttgttcacacttggtttcacctctcatcacatgctgagtattgaagccttactggcggtagctgacacagaaatggg

SEQ ID NO: 8432 - DNA, 76 bp, Homo sapiens
tattgaagccttactggcggtagctgacacagaaatgggtctgctatcagaatatgttcttagtaaatataaagtt

SEQ ID NO: 8433 - DNA, 78 bp, Homo sapiens
ttactggcggtagctgacacagaaatgggtctgctatcagaatatgttcttagtaaatataaagtttgaattgatctg

SEQ ID NO: 8434 - DNA, 77 bp, Homo sapiens
gaaatgggtctgctatcagaatatgttcttagtaaatataaagtttgaattgatctggagaatatgtgaacctttca

SEQ ID NO: 8435 - DNA, 75 bp, Homo sapiens
gctatcagaatatgttcttagtaaatataaagtttgaattgatctggagaatatgtgaacctttcaattgttccc

SEQ ID NO: 8436 - DNA, 73 bp, Homo sapiens
gttcttagtaaatataaagtttgaattgatctggagaatatgtgaacctttcaattgttccctaatccatgtc

SEQ ID NO: 8437 - DNA, 75 bp, Homo sapiens
aaagtttgaattgatctggagaatatgtgaacctttcaattgttccctaatccatgtctaatgttcattcatgtt

SEQ ID NO: 8438 - DNA, 75 bp, Homo sapiens
atctggagaatatgtgaacctttcaattgttccctaatccatgtctaatgttcattcatgtttttgctggaaact

SEQ ID NO: 8439 - DNA, 74 bp, Homo sapiens
gaatatgtgaacctttcaattgttccctaatccatgtctaatgttcattcatgtttttgctggaaacttttcta

SEQ ID NO: 8440 - DNA, 74 bp, Homo sapiens
gttccctaatccatgtctaatgttcattcatgtttttgctggaaacttttctaatcaaatatattgtgttccca

SEQ ID NO: 8441 - DNA, 72 bp, Homo sapiens
gttcattcatgtttttgctggaaacttttctaatcaaatatattgtgttcccaaattcaaacaataatataa

SEQ ID NO: 8442 - DNA, 70 bp, Homo sapiens
gtttttgctggaaacttttctaatcaaatatattgtgttcccaaattcaaacaataatataaattggatc

SEQ ID NO: 8443 - DNA, 74 bp, Homo sapiens
tcaaatatattgtgttcccaaattcaaacaataatataaattggatctagaaacattcaagtccttacattcta

SEQ ID NO: 8444 - DNA, 79 bp, Homo sapiens
tgtgttcccaaattcaaacaataatataaattggatctagaaacattcaagtccttacattctatgtgcagcattgcta

SEQ ID NO: 8445 - DNA, 78 bp, Homo sapiens
cccaaattcaaacaataatataaattggatctagaaacattcaagtccttacattctatgtgcagcattgctatatta

SEQ ID NO: 8446 - DNA, 80 bp, Homo sapiens
caataatataaattggatctagaaacattcaagtccttacattctatgtgcagcattgctatattatcaaatacatagtt

SEQ ID NO: 8447 - DNA, 79 bp, Homo sapiens
ttggatctagaaacattcaagtccttacattctatgtgcagcattgctatattatcaaatacatagtttaaaacattac

SEQ ID NO: 8448 - DNA, 81 bp, Homo sapiens
gaaacattcaagtccttacattctatgtgcagcattgctatattatcaaatacatagtttaaaacattactgcataatgag

SEQ ID NO: 8449 - DNA, 83 bp, Homo sapiens
caagtccttacattctatgtgcagcattgctatattatcaaatacatagtttaaaacattactgcataatgaggcatttatgc

SEQ ID NO: 8450 - DNA, 79 bp, Homo sapiens
gtgcagcattgctatattatcaaatacatagtttaaaacattactgcataatgaggcatttatgctatttaagttttct

SEQ ID NO: 8451 - DNA, 75 bp, Homo sapiens
gctatattatcaaatacatagtttaaaacattactgcataatgaggcatttatgctatttaagttttcttaggga

SEQ ID NO: 8452 - DNA, 71 bp, Homo sapiens
caaatacatagtttaaaacattactgcataatgaggcatttatgctatttaagttttcttagggaaatagg

SEQ ID NO: 8453 - DNA, 70 bp, Homo sapiens
aaaacattactgcataatgaggcatttatgctatttaagttttcttagggaaataggttttaatctttga

SEQ ID NO: 8454 - DNA, 72 bp, Homo sapiens
gcataatgaggcatttatgctatttaagttttcttagggaaataggttttaatctttgaaatatagccacag

SEQ ID NO: 8455 - DNA, 71 bp, Homo sapiens
gaggcatttatgctatttaagttttcttagggaaataggttttaatctttgaaatatagccacagttcaga

SEQ ID NO: 8456 - DNA, 70 bp, Homo sapiens
tgctatttaagttttcttagggaaataggttttaatctttgaaatatagccacagttcagaatataattg

SEQ ID NO: 8457 - DNA, 68 bp, Homo sapiens
gttttcttagggaaataggttttaatctttgaaatatagccacagttcagaatataattggtaagttg

SEQ ID NO: 8458 - DNA, 71 bp, Homo sapiens
ttaatctttgaaatatagccacagttcagaatataattggtaagttgtattttctaataattttaatggaa

SEQ ID NO: 8459 - DNA, 71 bp, Homo sapiens
ttgaaatatagccacagttcagaatataattggtaagttgtattttctaataattttaatggaaaaataga

SEQ ID NO: 8460 - DNA, 69 bp, Homo sapiens
gccacagttcagaatataattggtaagttgtattttctaataattttaatggaaaaatagaaaccacaa

SEQ ID NO: 8461 - DNA, 66 bp, Homo sapiens
ggtaagttgtattttctaataattttaatggaaaaatagaaaccacaatagcttgtgaaaataatt

SEQ ID NO: 8462 - DNA, 72 bp, Homo sapiens
ttttaaagttaagctaaaatatgagcgcttaccatgtgtcaagcattttttaagccctttgcatatattaac

SEQ ID NO: 8463 - DNA, 78 bp, Homo sapiens
taagctaaaatatgagcgcttaccatgtgtcaagcattttttaagccctttgcatatattaactcaattctcacagtg

SEQ ID NO: 8464 - DNA, 77 bp, Homo sapiens
agcgcttaccatgtgtcaagcattttttaagccctttgcatatattaactcaattctcacagtgttcctatgaggta

SEQ ID NO: 8465 - DNA, 77 bp, Homo sapiens
atgtgtcaagcattttttaagccctttgcatatattaactcaattctcacagtgttcctatgaggtagatactgttg

SEQ ID NO: 8466 - DNA, 76 bp, Homo sapiens
caagcattttttaagccctttgcatatattaactcaattctcacagtgttcctatgaggtagatactgttgttatc

SEQ ID NO: 8467 - DNA, 76 bp, Homo sapiens
cattttttaagccctttgcatatattaactcaattctcacagtgttcctatgaggtagatactgttgttatcctca

SEQ ID NO: 8468 - DNA, 75 bp, Homo sapiens
tttttaagccctttgcatatattaactcaattctcacagtgttcctatgaggtagatactgttgttatcctcatt

SEQ ID NO: 8469 - DNA, 77 bp, Homo sapiens
ttaagccctttgcatatattaactcaattctcacagtgttcctatgaggtagatactgttgttatcctcattttcca

SEQ ID NO: 8470 - DNA, 80 bp, Homo sapiens
ttgcatatattaactcaattctcacagtgttcctatgaggtagatactgttgttatcctcattttccagatggaaattga

SEQ ID NO: 8471 - DNA, 77 bp, Homo sapiens
atatattaactcaattctcacagtgttcctatgaggtagatactgttgttatcctcattttccagatggaaattgag

SEQ ID NO: 8472 - DNA, 77 bp, Homo sapiens
atattaactcaattctcacagtgttcctatgaggtagatactgttgttatcctcattttccagatggaaattgagga

SEQ ID NO: 8473 - DNA, 77 bp, Homo sapiens
tcacagtgttcctatgaggtagatactgttgttatcctcattttccagatggaaattgaggacagagaggtttaata

SEQ ID NO: 8474 - DNA, 74 bp, Homo sapiens
agtgttcctatgaggtagatactgttgttatcctcattttccagatggaaattgaggacagagaggtttaataa

SEQ ID NO: 8475 - DNA, 71 bp, Homo sapiens
aggtagatactgttgttatcctcattttccagatggaaattgaggacagagaggtttaataatttacccaa

SEQ ID NO: 8476 - DNA, 73 bp, Homo sapiens
ttgttatcctcattttccagatggaaattgaggacagagaggtttaataatttacccaaagtgagatagcttg

SEQ ID NO: 8477 - DNA, 77 bp, Homo sapiens
agatggaaattgaggacagagaggtttaataatttacccaaagtgagatagcttggcttatgatatatatggtgata

SEQ ID NO: 8478 - DNA, 75 bp, Homo sapiens
gaggacagagaggtttaataatttacccaaagtgagatagcttggcttatgatatatatggtgataataaaatgt

SEQ ID NO: 8479 - DNA, 72 bp, Homo sapiens
gaggtttaataatttacccaaagtgagatagcttggcttatgatatatatggtgataataaaatgtttttcc

SEQ ID NO: 8480 - DNA, 76 bp, Homo sapiens
tacccaaagtgagatagcttggcttatgatatatatggtgataataaaatgtttttcctcctgaaagtatatacga

SEQ ID NO: 8481 - DNA, 76 bp, Homo sapiens
gtgagatagcttggcttatgatatatatggtgataataaaatgtttttcctcctgaaagtatatacgaattaggaa

SEQ ID NO: 8482 - DNA, 73 bp, Homo sapiens
agcttggcttatgatatatatggtgataataaaatgtttttcctcctgaaagtatatacgaattaggaattta

SEQ ID NO: 8483 - DNA, 70 bp, Homo sapiens
atgatatatatggtgataataaaatgtttttcctcctgaaagtatatacgaattaggaatttaaaaagta

SEQ ID NO: 8484 - DNA, 68 bp, Homo sapiens
tggtgataataaaatgtttttcctcctgaaagtatatacgaattaggaatttaaaaagtaaatactga

SEQ ID NO: 8485 - DNA, 69 bp, Homo sapiens
tgtttttcctcctgaaagtatatacgaattaggaatttaaaaagtaaatactgaatttagtgagcctga

SEQ ID NO: 8486 - DNA, 69 bp, Homo sapiens
tcctcctgaaagtatatacgaattaggaatttaaaaagtaaatactgaatttagtgagcctgaatattt

SEQ ID NO: 8487 - DNA, 71 bp, Homo sapiens
gtatatacgaattaggaatttaaaaagtaaatactgaatttagtgagcctgaatatttttggaagattgca

SEQ ID NO: 8488 - DNA, 71 bp, Homo sapiens
ggaatttaaaaagtaaatactgaatttagtgagcctgaatatttttggaagattgcatttttaatcatgtg

SEQ ID NO: 8489 - DNA, 74 bp, Homo sapiens
aagtaaatactgaatttagtgagcctgaatatttttggaagattgcatttttaatcatgtgtcagggctgaaaa

SEQ ID NO: 8490 - DNA, 78 bp, Homo sapiens
atactgaatttagtgagcctgaatatttttggaagattgcatttttaatcatgtgtcagggctgaaaagcttgaagca

SEQ ID NO: 8491 - DNA, 78 bp, Homo sapiens
ttagtgagcctgaatatttttggaagattgcatttttaatcatgtgtcagggctgaaaagcttgaagcagctagttta

SEQ ID NO: 8492 - DNA, 75 bp, Homo sapiens
gaatatttttggaagattgcatttttaatcatgtgtcagggctgaaaagcttgaagcagctagtttagagctttt

SEQ ID NO: 8493 - DNA, 77 bp, Homo sapiens
gattgcatttttaatcatgtgtcagggctgaaaagcttgaagcagctagtttagagcttttttgaatcacttgactt

SEQ ID NO: 8494 - DNA, 75 bp, Homo sapiens
tttaatcatgtgtcagggctgaaaagcttgaagcagctagtttagagcttttttgaatcacttgactttaatgtt

SEQ ID NO: 8495 - DNA, 76 bp, Homo sapiens
atgtgtcagggctgaaaagcttgaagcagctagtttagagcttttttgaatcacttgactttaatgtttattgaca

SEQ ID NO: 8496 - DNA, 74 bp, Homo sapiens
cttgaagcagctagtttagagcttttttgaatcacttgactttaatgtttattgacaggttaattgtgcattaa

SEQ ID NO: 8497 - DNA, 73 bp, Homo sapiens
tttgaatcacttgactttaatgtttattgacaggttaattgtgcattaaaaaaaatgcttgctatatataacc

SEQ ID NO: 8498 - DNA, 77 bp, Homo sapiens
tgacaggttaattgtgcattaaaaaaaatgcttgctatatataacctgttcctgtatgattgaagtatgaagtttca

SEQ ID NO: 8499 - DNA, 81 bp, Homo sapiens
gtgcattaaaaaaaatgcttgctatatataacctgttcctgtatgattgaagtatgaagtttcagatctatctctagatga

SEQ ID NO: 8500 - DNA, 82 bp, Homo sapiens
aaaaatgcttgctatatataacctgttcctgtatgattgaagtatgaagtttcagatctatctctagatgatacattgctgt

SEQ ID NO: 8501 - DNA, 83 bp, Homo sapiens
cttgctatatataacctgttcctgtatgattgaagtatgaagtttcagatctatctctagatgatacattgctgttaatacag

SEQ ID NO: 8502 - DNA, 82 bp, Homo sapiens
atataacctgttcctgtatgattgaagtatgaagtttcagatctatctctagatgatacattgctgttaatacagtgctttc

SEQ ID NO: 8503 - DNA, 82 bp, Homo sapiens
ctgtatgattgaagtatgaagtttcagatctatctctagatgatacattgctgttaatacagtgctttccaaaggtgaaata

SEQ ID NO: 8504 - DNA, 79 bp, Homo sapiens
agtatgaagtttcagatctatctctagatgatacattgctgttaatacagtgctttccaaaggtgaaatattttcatcg

SEQ ID NO: 8505 - DNA, 78 bp, Homo sapiens
gtttcagatctatctctagatgatacattgctgttaatacagtgctttccaaaggtgaaatattttcatcggtattag

SEQ ID NO: 8506 - DNA, 76 bp, Homo sapiens
tctctagatgatacattgctgttaatacagtgctttccaaaggtgaaatattttcatcggtattagtctttcgaac

SEQ ID NO: 8507 - DNA, 74 bp, Homo sapiens
gatgatacattgctgttaatacagtgctttccaaaggtgaaatattttcatcggtattagtctttcgaacctaa

SEQ ID NO: 8508 - DNA, 69 bp, Homo sapiens
gctgttaatacagtgctttccaaaggtgaaatattttcatcggtattagtctttcgaacctaatttttc

SEQ ID NO: 8509 - DNA, 70 bp, Homo sapiens
tgctttccaaaggtgaaatattttcatcggtattagtctttcgaacctaatttttcttattattctgcgc

SEQ ID NO: 8510 - DNA, 69 bp, Homo sapiens
tccaaaggtgaaatattttcatcggtattagtctttcgaacctaatttttcttattattctgcgcttat

SEQ ID NO: 8511 - DNA, 71 bp, Homo sapiens
tattttcatcggtattagtctttcgaacctaatttttcttattattctgcgcttattaacattaggcagga

SEQ ID NO: 8512 - DNA, 68 bp, Homo sapiens
gtctttcgaacctaatttttcttattattctgcgcttattaacattaggcaggaaaaaaatctaccaa

SEQ ID NO: 8513 - DNA, 68 bp, Homo sapiens
tttttcttattattctgcgcttattaacattaggcaggaaaaaaatctaccaaaacagtgtccacttt

SEQ ID NO: 8514 - DNA, 70 bp, Homo sapiens
ttattctgcgcttattaacattaggcaggaaaaaaatctaccaaaacagtgtccacttttaagtttcaca

SEQ ID NO: 8515 - DNA, 69 bp, Homo sapiens
gcgcttattaacattaggcaggaaaaaaatctaccaaaacagtgtccacttttaagtttcacattcagt

SEQ ID NO: 8516 - DNA, 69 bp, Homo sapiens
taggcaggaaaaaaatctaccaaaacagtgtccacttttaagtttcacattcagttaattgaggacact

SEQ ID NO: 8517 - DNA, 67 bp, Homo sapiens
aaaaatctaccaaaacagtgtccacttttaagtttcacattcagttaattgaggacacttgaacctt

SEQ ID NO: 8518 - DNA, 67 bp, Homo sapiens
ctaccaaaacagtgtccacttttaagtttcacattcagttaattgaggacacttgaaccttttcccc

SEQ ID NO: 8519 - DNA, 69 bp, Homo sapiens
tccacttttaagtttcacattcagttaattgaggacacttgaaccttttcccccacgcagtcgactcct

SEQ ID NO: 8520 - DNA, 72 bp, Homo sapiens
attcagttaattgaggacacttgaaccttttcccccacgcagtcgactcctttagcatgagccaagttccta

SEQ ID NO: 8521 - DNA, 71 bp, Homo sapiens
taattgaggacacttgaaccttttcccccacgcagtcgactcctttagcatgagccaagttcctaggaatt

SEQ ID NO: 8522 - DNA, 71 bp, Homo sapiens
tgaaccttttcccccacgcagtcgactcctttagcatgagccaagttcctaggaatttgacagttactact

SEQ ID NO: 8523 - DNA, 72 bp, Homo sapiens
ccccacgcagtcgactcctttagcatgagccaagttcctaggaatttgacagttactactttataaacaagc

SEQ ID NO: 8524 - DNA, 70 bp, Homo sapiens
cctttagcatgagccaagttcctaggaatttgacagttactactttataaacaagctcttttaaaacatc

SEQ ID NO: 8525 - DNA, 71 bp, Homo sapiens
gccaagttcctaggaatttgacagttactactttataaacaagctcttttaaaacatctctgtggtcatag

SEQ ID NO: 8526 - DNA, 74 bp, Homo sapiens
gacagttactactttataaacaagctcttttaaaacatctctgtggtcataggcagatatttgaaaatataaga

SEQ ID NO: 8527 - DNA, 74 bp, Homo sapiens
gctcttttaaaacatctctgtggtcataggcagatatttgaaaatataagaggtaaactcttaataacaggaga

SEQ ID NO: 8528 - DNA, 74 bp, Homo sapiens
aacatctctgtggtcataggcagatatttgaaaatataagaggtaaactcttaataacaggagaaattataagc

SEQ ID NO: 8529 - DNA, 71 bp, Homo sapiens
ataggcagatatttgaaaatataagaggtaaactcttaataacaggagaaattataagctgaaatatattt

SEQ ID NO: 8530 - DNA, 69 bp, Homo sapiens
atttgaaaatataagaggtaaactcttaataacaggagaaattataagctgaaatatatttttatctta

SEQ ID NO: 8531 - DNA, 69 bp, Homo sapiens
gaggtaaactcttaataacaggagaaattataagctgaaatatatttttatcttaatattttaatatgg

SEQ ID NO: 8532 - DNA, 73 bp, Homo sapiens
tcttaataacaggagaaattataagctgaaatatatttttatcttaatattttaatatggtatgccagtctac

SEQ ID NO: 8533 - DNA, 72 bp, Homo sapiens
caggagaaattataagctgaaatatatttttatcttaatattttaatatggtatgccagtctacttaggaaa

SEQ ID NO: 8534 - DNA, 71 bp, Homo sapiens
taagctgaaatatatttttatcttaatattttaatatggtatgccagtctacttaggaaatactaagtttc

SEQ ID NO: 8535 - DNA, 67 bp, Homo sapiens
atatttttatcttaatattttaatatggtatgccagtctacttaggaaatactaagtttcttttatt

SEQ ID NO: 8536 - DNA, 67 bp, Homo sapiens
cttaatattttaatatggtatgccagtctacttaggaaatactaagtttcttttatttgttttgagt

SEQ ID NO: 8537 - DNA, 70 bp, Homo sapiens
ttaatatggtatgccagtctacttaggaaatactaagtttcttttatttgttttgagtttgaatactgcc

SEQ ID NO: 8538 - DNA, 70 bp, Homo sapiens
tgccagtctacttaggaaatactaagtttcttttatttgttttgagtttgaatactgccttggtagagac

SEQ ID NO: 8539 - DNA, 69 bp, Homo sapiens
cttaggaaatactaagtttcttttatttgttttgagtttgaatactgccttggtagagacttgcagacg

SEQ ID NO: 8540 - DNA, 69 bp, Homo sapiens
gaaatactaagtttcttttatttgttttgagtttgaatactgccttggtagagacttgcagacgtttaa

SEQ ID NO: 8541 - DNA, 72 bp, Homo sapiens
tttgagtttgaatactgccttggtagagacttgcagacgtttaatatattaagttattctaaatttgctaag

SEQ ID NO: 8542 - DNA, 72 bp, Homo sapiens
gaatactgccttggtagagacttgcagacgtttaatatattaagttattctaaatttgctaaggatattctt

SEQ ID NO: 8543 - DNA, 72 bp, Homo sapiens
gccttggtagagacttgcagacgtttaatatattaagttattctaaatttgctaaggatattctttaactca

SEQ ID NO: 8544 - DNA, 73 bp, Homo sapiens
gagacttgcagacgtttaatatattaagttattctaaatttgctaaggatattctttaactcagacacctgaa

SEQ ID NO: 8545 - DNA, 70 bp, Homo sapiens
aagttattctaaatttgctaaggatattctttaactcagacacctgaacatatattgtttaaaagtgact

SEQ ID NO: 8546 - DNA, 71 bp, Homo sapiens
ctaaatttgctaaggatattctttaactcagacacctgaacatatattgtttaaaagtgacttaagcttag

SEQ ID NO: 8547 - DNA, 73 bp, Homo sapiens
tgctaaggatattctttaactcagacacctgaacatatattgtttaaaagtgacttaagcttagttcaataat

SEQ ID NO: 8548 - DNA, 71 bp, Homo sapiens
attctttaactcagacacctgaacatatattgtttaaaagtgacttaagcttagttcaataattattcaat

SEQ ID NO: 8549 - DNA, 73 bp, Homo sapiens
tcagacacctgaacatatattgtttaaaagtgacttaagcttagttcaataattattcaatttattcttaatc

SEQ ID NO: 8550 - DNA, 71 bp, Homo sapiens
gaacatatattgtttaaaagtgacttaagcttagttcaataattattcaatttattcttaatctactggtc

SEQ ID NO: 8551 - DNA, 72 bp, Homo sapiens
taaaagtgacttaagcttagttcaataattattcaatttattcttaatctactggtctttcagtctatcttg

SEQ ID NO: 8552 - DNA, 73 bp, Homo sapiens
tgacttaagcttagttcaataattattcaatttattcttaatctactggtctttcagtctatcttgtaaaata

SEQ ID NO: 8553 - DNA, 72 bp, Homo sapiens
gttcaataattattcaatttattcttaatctactggtctttcagtctatcttgtaaaataattacacttctc

SEQ ID NO: 8554 - DNA, 71 bp, Homo sapiens
tcttaatctactggtctttcagtctatcttgtaaaataattacacttctcttaatgaggtttttactagag

SEQ ID NO: 8555 - DNA, 71 bp, Homo sapiens
ctactggtctttcagtctatcttgtaaaataattacacttctcttaatgaggtttttactagagtgttaca

SEQ ID NO: 8556 - DNA, 70 bp, Homo sapiens
ctttcagtctatcttgtaaaataattacacttctcttaatgaggtttttactagagtgttacaataaatg

SEQ ID NO: 8557 - DNA, 71 bp, Homo sapiens
gtaaaataattacacttctcttaatgaggtttttactagagtgttacaataaatgttagataacatcttga

SEQ ID NO: 8558 - DNA, 74 bp, Homo sapiens
aattacacttctcttaatgaggtttttactagagtgttacaataaatgttagataacatcttgagcagaagtga

SEQ ID NO: 8559 - DNA, 74 bp, Homo sapiens
ctcttaatgaggtttttactagagtgttacaataaatgttagataacatcttgagcagaagtgatttttatcag

SEQ ID NO: 8560 - DNA, 74 bp, Homo sapiens
ttttactagagtgttacaataaatgttagataacatcttgagcagaagtgatttttatcagttattggtcttgg

SEQ ID NO: 8561 - DNA, 73 bp, Homo sapiens
gagtgttacaataaatgttagataacatcttgagcagaagtgatttttatcagttattggtcttgggaaaggg

SEQ ID NO: 8562 - DNA, 72 bp, Homo sapiens
ataaatgttagataacatcttgagcagaagtgatttttatcagttattggtcttgggaaaggggaaggattc

SEQ ID NO: 8563 - DNA, 71 bp, Homo sapiens
cttgagcagaagtgatttttatcagttattggtcttgggaaaggggaaggattcctctttaagatattata

SEQ ID NO: 8564 - DNA, 75 bp, Homo sapiens
tcagttattggtcttgggaaaggggaaggattcctctttaagatattatatgaaggatgtatacatccatatatg

SEQ ID NO: 8565 - DNA, 69 bp, Homo sapiens
aatatatatataaacttaagtttgttatggcagttttcttaatttgaaataattttcgatatatagaaa

SEQ ID NO: 8566 - DNA, 68 bp, Homo sapiens
tataaacttaagtttgttatggcagttttcttaatttgaaataattttcgatatatagaaaagttaca

SEQ ID NO: 8567 - DNA, 70 bp, Homo sapiens
gtttgttatggcagttttcttaatttgaaataattttcgatatatagaaaagttacaaggacagtacaga

SEQ ID NO: 8568 - DNA, 72 bp, Homo sapiens
tggcagttttcttaatttgaaataattttcgatatatagaaaagttacaaggacagtacagagagttagata

SEQ ID NO: 8569 - DNA, 74 bp, Homo sapiens
aatttgaaataattttcgatatatagaaaagttacaaggacagtacagagagttagatatatcatggatatcct

SEQ ID NO: 8570 - DNA, 78 bp, Homo sapiens
tatatagaaaagttacaaggacagtacagagagttagatatatcatggatatccttcactcagcctcccctagtgtta

SEQ ID NO: 8571 - DNA, 76 bp, Homo sapiens
agttacaaggacagtacagagagttagatatatcatggatatccttcactcagcctcccctagtgttaacttatat

SEQ ID NO: 8572 - DNA, 78 bp, Homo sapiens
agttagatatatcatggatatccttcactcagcctcccctagtgttaacttatattcttacagtaccagcagatccaa

SEQ ID NO: 8573 - DNA, 78 bp, Homo sapiens
atatatcatggatatccttcactcagcctcccctagtgttaacttatattcttacagtaccagcagatccaaggagag

SEQ ID NO: 8574 - DNA, 77 bp, Homo sapiens
atatccttcactcagcctcccctagtgttaacttatattcttacagtaccagcagatccaaggagagtgtctattca

SEQ ID NO: 8575 - DNA, 74 bp, Homo sapiens
agcctcccctagtgttaacttatattcttacagtaccagcagatccaaggagagtgtctattcacaatagccgt

SEQ ID NO: 8576 - DNA, 75 bp, Homo sapiens
tagtgttaacttatattcttacagtaccagcagatccaaggagagtgtctattcacaatagccgttctccttacc

SEQ ID NO: 8577 - DNA, 76 bp, Homo sapiens
tatattcttacagtaccagcagatccaaggagagtgtctattcacaatagccgttctccttacctgggcaggttaa

SEQ ID NO: 8578 - DNA, 76 bp, Homo sapiens
ttacagtaccagcagatccaaggagagtgtctattcacaatagccgttctccttacctgggcaggttaagattgaa

SEQ ID NO: 8579 - DNA, 76 bp, Homo sapiens
agatccaaggagagtgtctattcacaatagccgttctccttacctgggcaggttaagattgaaatgtcatataata

SEQ ID NO: 8580 - DNA, 74 bp, Homo sapiens
aaggagagtgtctattcacaatagccgttctccttacctgggcaggttaagattgaaatgtcatataataggta

SEQ ID NO: 8581 - DNA, 72 bp, Homo sapiens
attcacaatagccgttctccttacctgggcaggttaagattgaaatgtcatataataggtacttcttttcca

SEQ ID NO: 8582 - DNA, 69 bp, Homo sapiens
aatagccgttctccttacctgggcaggttaagattgaaatgtcatataataggtacttcttttccaaaa

SEQ ID NO: 8583 - DNA, 69 bp, Homo sapiens
ctccttacctgggcaggttaagattgaaatgtcatataataggtacttcttttccaaaaagaatttcta

SEQ ID NO: 8584 - DNA, 71 bp, Homo sapiens
gaaatgtcatataataggtacttcttttccaaaaagaatttctagtctttgtaccagatcttctgaaacag

SEQ ID NO: 8585 - DNA, 69 bp, Homo sapiens
ataataggtacttcttttccaaaaagaatttctagtctttgtaccagatcttctgaaacagtcttctgg

SEQ ID NO: 8586 - DNA, 69 bp, Homo sapiens
aggtacttcttttccaaaaagaatttctagtctttgtaccagatcttctgaaacagtcttctggtatat

SEQ ID NO: 8587 - DNA, 72 bp, Homo sapiens
ccaaaaagaatttctagtctttgtaccagatcttctgaaacagtcttctggtatattagtaatttgctttca

SEQ ID NO: 8588 - DNA, 74 bp, Homo sapiens
gaatttctagtctttgtaccagatcttctgaaacagtcttctggtatattagtaatttgctttcaatgcacttt

SEQ ID NO: 8589 - DNA, 73 bp, Homo sapiens
gtaccagatcttctgaaacagtcttctggtatattagtaatttgctttcaatgcacttttcaaaatccgtttc

SEQ ID NO: 8590 - DNA, 73 bp, Homo sapiens
ttctgaaacagtcttctggtatattagtaatttgctttcaatgcacttttcaaaatccgtttccaaagtatgc

SEQ ID NO: 8591 - DNA, 73 bp, Homo sapiens
gtcttctggtatattagtaatttgctttcaatgcacttttcaaaatccgtttccaaagtatgctgtagagaag

SEQ ID NO: 8592 - DNA, 74 bp, Homo sapiens
ctggtatattagtaatttgctttcaatgcacttttcaaaatccgtttccaaagtatgctgtagagaagtatgtg

SEQ ID NO: 8593 - DNA, 74 bp, Homo sapiens
tttgctttcaatgcacttttcaaaatccgtttccaaagtatgctgtagagaagtatgtgtatgttaatgtttcc

SEQ ID NO: 8594 - DNA, 72 bp, Homo sapiens
tcaaaatccgtttccaaagtatgctgtagagaagtatgtgtatgttaatgtttcctttatttcttattccag

SEQ ID NO: 8595 - DNA, 69 bp, Homo sapiens
ccgtttccaaagtatgctgtagagaagtatgtgtatgttaatgtttcctttatttcttattccagtttt

SEQ ID NO: 8596 - DNA, 70 bp, Homo sapiens
aagtatgctgtagagaagtatgtgtatgttaatgtttcctttatttcttattccagttttttttaataca

SEQ ID NO: 8597 - DNA, 69 bp, Homo sapiens
gaagtatgtgtatgttaatgtttcctttatttcttattccagttttttttaatacaaaagctttcatgc

SEQ ID NO: 8598 - DNA, 69 bp, Homo sapiens
gtatgttaatgtttcctttatttcttattccagttttttttaatacaaaagctttcatgcccttgatgc

SEQ ID NO: 8599 - DNA, 68 bp, Homo sapiens
ttcctttatttcttattccagttttttttaatacaaaagctttcatgcccttgatgcttcataaccct

SEQ ID NO: 8600 - DNA, 69 bp, Homo sapiens
tcttattccagttttttttaatacaaaagctttcatgcccttgatgcttcataacccttatttctttgg

SEQ ID NO: 8601 - DNA, 68 bp, Homo sapiens
gttttttttaatacaaaagctttcatgcccttgatgcttcataacccttatttctttgggttaacatg

SEQ ID NO: 8602 - DNA, 71 bp, Homo sapiens
ttaatacaaaagctttcatgcccttgatgcttcataacccttatttctttgggttaacatggactttcttc

SEQ ID NO: 8603 - DNA, 68 bp, Homo sapiens
ttcataacccttatttctttgggttaacatggactttcttcctttcccctgaatcttaatgcttttgc

SEQ ID NO: 8604 - DNA, 71 bp, Homo sapiens
ttaacatggactttcttcctttcccctgaatcttaatgcttttgcttattaatggcagcaaaggtttttga

SEQ ID NO: 8605 - DNA, 71 bp, Homo sapiens
ctttcttcctttcccctgaatcttaatgcttttgcttattaatggcagcaaaggtttttgagtctatgaaa

SEQ ID NO: 8606 - DNA, 77 bp, Homo sapiens
aatcttaatgcttttgcttattaatggcagcaaaggtttttgagtctatgaaacgccagacactgtgtgtgctctct

SEQ ID NO: 8607 - DNA, 77 bp, Homo sapiens
ttttgcttattaatggcagcaaaggtttttgagtctatgaaacgccagacactgtgtgtgctctcttcagtaagccg

SEQ ID NO: 8608 - DNA, 77 bp, Homo sapiens
ttattaatggcagcaaaggtttttgagtctatgaaacgccagacactgtgtgtgctctcttcagtaagccgtcttcc

SEQ ID NO: 8609 - DNA, 78 bp, Homo sapiens
aaaggtttttgagtctatgaaacgccagacactgtgtgtgctctcttcagtaagccgtcttcctcttctgcatcttca

SEQ ID NO: 8610 - DNA, 81 bp, Homo sapiens
aaacgccagacactgtgtgtgctctcttcagtaagccgtcttcctcttctgcatcttcagtgctaataagctgtgggatct

SEQ ID NO: 8611 - DNA, 80 bp, Homo sapiens
actgtgtgtgctctcttcagtaagccgtcttcctcttctgcatcttcagtgctaataagctgtgggatctttccactaaa

SEQ ID NO: 8612 - DNA, 76 bp, Homo sapiens
ctctcttcagtaagccgtcttcctcttctgcatcttcagtgctaataagctgtgggatctttccactaaaaggtgg

SEQ ID NO: 8613 - DNA, 72 bp, Homo sapiens
agtaagccgtcttcctcttctgcatcttcagtgctaataagctgtgggatctttccactaaaaggtgggggt

SEQ ID NO: 8614 - DNA, 74 bp, Homo sapiens
ttcctcttctgcatcttcagtgctaataagctgtgggatctttccactaaaaggtgggggtttcttggcttgga

SEQ ID NO: 8615 - DNA, 70 bp, Homo sapiens
atcttcagtgctaataagctgtgggatctttccactaaaaggtgggggtttcttggcttggaggtaccca

SEQ ID NO: 8616 - DNA, 67 bp, Homo sapiens
ctaataagctgtgggatctttccactaaaaggtgggggtttcttggcttggaggtacccagtctttc

SEQ ID NO: 8617 - DNA, 67 bp, Homo sapiens
atctttccactaaaaggtgggggtttcttggcttggaggtacccagtctttccgaaagactcatcaa

SEQ ID NO: 8618 - DNA, 69 bp, Homo sapiens
tttcttggcttggaggtacccagtctttccgaaagactcatcaagggtcccagtattaactgttccaaa

SEQ ID NO: 8619 - DNA, 70 bp, Homo sapiens
ttggaggtacccagtctttccgaaagactcatcaagggtcccagtattaactgttccaaacatcagttaa

SEQ ID NO: 8620 - DNA, 70 bp, Homo sapiens
acccagtctttccgaaagactcatcaagggtcccagtattaactgttccaaacatcagttaagaaatgta

SEQ ID NO: 8621 - DNA, 75 bp, Homo sapiens
aaagactcatcaagggtcccagtattaactgttccaaacatcagttaagaaatgtaggctaagcagtgacagtca

SEQ ID NO: 8622 - DNA, 75 bp, Homo sapiens
agtattaactgttccaaacatcagttaagaaatgtaggctaagcagtgacagtcatttgtgtagtctttggtatc

SEQ ID NO: 8623 - DNA, 74 bp, Homo sapiens
cagttaagaaatgtaggctaagcagtgacagtcatttgtgtagtctttggtatctcatcttaccaaccttaaaa

SEQ ID NO: 8624 - DNA, 76 bp, Homo sapiens
aagaaatgtaggctaagcagtgacagtcatttgtgtagtctttggtatctcatcttaccaaccttaaaatgatgac

SEQ ID NO: 8625 - DNA, 75 bp, Homo sapiens
acagtcatttgtgtagtctttggtatctcatcttaccaaccttaaaatgatgacgttcatgatttcagtttccca

SEQ ID NO: 8626 - DNA, 75 bp, Homo sapiens
tgtagtctttggtatctcatcttaccaaccttaaaatgatgacgttcatgatttcagtttcccagcagaaattaa

SEQ ID NO: 8627 - DNA, 76 bp, Homo sapiens
ttggtatctcatcttaccaaccttaaaatgatgacgttcatgatttcagtttcccagcagaaattaatatggaatg

SEQ ID NO: 8628 - DNA, 76 bp, Homo sapiens
catcttaccaaccttaaaatgatgacgttcatgatttcagtttcccagcagaaattaatatggaatgtagtagatg

SEQ ID NO: 8629 - DNA, 75 bp, Homo sapiens
cttaaaatgatgacgttcatgatttcagtttcccagcagaaattaatatggaatgtagtagatgtttttatacac

SEQ ID NO: 8630 - DNA, 76 bp, Homo sapiens
gatgacgttcatgatttcagtttcccagcagaaattaatatggaatgtagtagatgtttttatacaccaaaatgac

SEQ ID NO: 8631 - DNA, 75 bp, Homo sapiens
gatttcagtttcccagcagaaattaatatggaatgtagtagatgtttttatacaccaaaatgactctatctggta

SEQ ID NO: 8632 - DNA, 73 bp, Homo sapiens
cccagcagaaattaatatggaatgtagtagatgtttttatacaccaaaatgactctatctggtaaaattaata

SEQ ID NO: 8633 - DNA, 70 bp, Homo sapiens
gaaattaatatggaatgtagtagatgtttttatacaccaaaatgactctatctggtaaaattaataactt

SEQ ID NO: 8634 - DNA, 70 bp, Homo sapiens
tggaatgtagtagatgtttttatacaccaaaatgactctatctggtaaaattaataacttttaatttctc

SEQ ID NO: 8635 - DNA, 67 bp, Homo sapiens
gatgtttttatacaccaaaatgactctatctggtaaaattaataacttttaatttctcttttgaaag

SEQ ID NO: 8636 - DNA, 68 bp, Homo sapiens
caccaaaatgactctatctggtaaaattaataacttttaatttctcttttgaaagtctcttgtttaga

SEQ ID NO: 8637 - DNA, 69 bp, Homo sapiens
atgactctatctggtaaaattaataacttttaatttctcttttgaaagtctcttgtttagataaatgcc

SEQ ID NO: 8638 - DNA, 67 bp, Homo sapiens
tggtaaaattaataacttttaatttctcttttgaaagtctcttgtttagataaatgcctttactaga

SEQ ID NO: 8639 - DNA, 65 bp, Homo sapiens
aacttttaatttctcttttgaaagtctcttgtttagataaatgcctttactagaaaaacaactac

SEQ ID NO: 8640 - DNA, 67 bp, Homo sapiens
tttctcttttgaaagtctcttgtttagataaatgcctttactagaaaaacaactaccacattaattt

SEQ ID NO: 8641 - DNA, 66 bp, Homo sapiens
tagaaaaacaactaccacattaattttagctaacccgtttgggaaattggtcatttccaataatac

SEQ ID NO: 8642 - DNA, 66 bp, Homo sapiens
aaacaactaccacattaattttagctaacccgtttgggaaattggtcatttccaataatactttca

SEQ ID NO: 8643 - DNA, 68 bp, Homo sapiens
cattaattttagctaacccgtttgggaaattggtcatttccaataatactttcatttattgtatcaac

SEQ ID NO: 8644 - DNA, 70 bp, Homo sapiens
agctaacccgtttgggaaattggtcatttccaataatactttcatttattgtatcaacttttgccagcca

SEQ ID NO: 8645 - DNA, 70 bp, Homo sapiens
cgtttgggaaattggtcatttccaataatactttcatttattgtatcaacttttgccagccatcttttaa

SEQ ID NO: 8646 - DNA, 72 bp, Homo sapiens
tggtcatttccaataatactttcatttattgtatcaacttttgccagccatcttttaaaaatagatactttc

SEQ ID NO: 8647 - DNA, 72 bp, Homo sapiens
catttattgtatcaacttttgccagccatcttttaaaaatagatactttccttctttagcatacgctaaaga

SEQ ID NO: 8648 - DNA, 69 bp, Homo sapiens
ttttgccagccatcttttaaaaatagatactttccttctttagcatacgctaaagatactttatctttt

SEQ ID NO: 8649 - DNA, 75 bp, Homo sapiens
tttaaaaatagatactttccttctttagcatacgctaaagatactttatctttttttgatgatcatcattatgca

SEQ ID NO: 8650 - DNA, 75 bp, Homo sapiens
gatactttccttctttagcatacgctaaagatactttatctttttttgatgatcatcattatgcaaattagttgt

SEQ ID NO: 8651 - DNA, 77 bp, Homo sapiens
ccttctttagcatacgctaaagatactttatctttttttgatgatcatcattatgcaaattagttgttgtgccatac

SEQ ID NO: 8652 - DNA, 80 bp, Homo sapiens
gatcatcattatgcaaattagttgttgtgccatactcctttctattttgatctttagtatatatagatctaatagatagg

SEQ ID NO: 8653 - DNA, 74 bp, Homo sapiens
attagttgttgtgccatactcctttctattttgatctttagtatatatagatctaatagatagggaaactaaga

SEQ ID NO: 8654 - DNA, 77 bp, Homo sapiens
tgtgccatactcctttctattttgatctttagtatatatagatctaatagatagggaaactaagataattcagagac

SEQ ID NO: 8655 - DNA, 76 bp, Homo sapiens
cctttctattttgatctttagtatatatagatctaatagatagggaaactaagataattcagagactagatcaaga

SEQ ID NO: 8656 - DNA, 77 bp, Homo sapiens
ttgatctttagtatatatagatctaatagatagggaaactaagataattcagagactagatcaagaaaatgccaccc

SEQ ID NO: 8657 - DNA, 76 bp, Homo sapiens
atatagatctaatagatagggaaactaagataattcagagactagatcaagaaaatgccacccctctgaaatttga

SEQ ID NO: 8658 - DNA, 75 bp, Homo sapiens
atctaatagatagggaaactaagataattcagagactagatcaagaaaatgccacccctctgaaatttgaagcta

SEQ ID NO: 8659 - DNA, 74 bp, Homo sapiens
tagggaaactaagataattcagagactagatcaagaaaatgccacccctctgaaatttgaagctaataaggata

SEQ ID NO: 8660 - DNA, 74 bp, Homo sapiens
aagataattcagagactagatcaagaaaatgccacccctctgaaatttgaagctaataaggataaatattaata

SEQ ID NO: 8661 - DNA, 73 bp, Homo sapiens
cagagactagatcaagaaaatgccacccctctgaaatttgaagctaataaggataaatattaatataaagccc

SEQ ID NO: 8662 - DNA, 71 bp, Homo sapiens
agaaaatgccacccctctgaaatttgaagctaataaggataaatattaatataaagcccttggcagaagga

SEQ ID NO: 8663 - DNA, 68 bp, Homo sapiens
acccctctgaaatttgaagctaataaggataaatattaatataaagcccttggcagaaggaacccttc

SEQ ID NO: 8664 - DNA, 68 bp, Homo sapiens
ctgaaatttgaagctaataaggataaatattaatataaagcccttggcagaaggaacccttcctaaaa

SEQ ID NO: 8665 - DNA, 77 bp, Homo sapiens
atttctagttctagtgagagttggatctttggattcttatctaaggcaagtgatgagactgataattgaaagcaaaa

SEQ ID NO: 8666 - DNA, 77 bp, Homo sapiens
tagtgagagttggatctttggattcttatctaaggcaagtgatgagactgataattgaaagcaaaaaggtattccaa

SEQ ID NO: 8667 - DNA, 78 bp, Homo sapiens
ggatctttggattcttatctaaggcaagtgatgagactgataattgaaagcaaaaaggtattccaagtgatatattga

SEQ ID NO: 8668 - DNA, 83 bp, Homo sapiens
tcttatctaaggcaagtgatgagactgataattgaaagcaaaaaggtattccaagtgatatattgatatgtcacatagatgac

SEQ ID NO: 8669 - DNA, 86 bp, Homo sapiens
tctaaggcaagtgatgagactgataattgaaagcaaaaaggtattccaagtgatatattgatatgtcacatagatgactgcatgaa

SEQ ID NO: 8670 - DNA, 84 bp, Homo sapiens
tgagactgataattgaaagcaaaaaggtattccaagtgatatattgatatgtcacatagatgactgcatgaacgagagtcaaaa

SEQ ID NO: 8671 - DNA, 81 bp, Homo sapiens
ataattgaaagcaaaaaggtattccaagtgatatattgatatgtcacatagatgactgcatgaacgagagtcaaaaggctg

SEQ ID NO: 8672 - DNA, 81 bp, Homo sapiens
attgaaagcaaaaaggtattccaagtgatatattgatatgtcacatagatgactgcatgaacgagagtcaaaaggctggga

SEQ ID NO: 8673 - DNA, 79 bp, Homo sapiens
aaaaaggtattccaagtgatatattgatatgtcacatagatgactgcatgaacgagagtcaaaaggctgggagtgtttc

SEQ ID NO: 8674 - DNA, 82 bp, Homo sapiens
gtattccaagtgatatattgatatgtcacatagatgactgcatgaacgagagtcaaaaggctgggagtgtttccttgctttg

SEQ ID NO: 8675 - DNA, 83 bp, Homo sapiens
tgatatattgatatgtcacatagatgactgcatgaacgagagtcaaaaggctgggagtgtttccttgctttggaagtgctaag

SEQ ID NO: 8676 - DNA, 81 bp, Homo sapiens
atatattgatatgtcacatagatgactgcatgaacgagagtcaaaaggctgggagtgtttccttgctttggaagtgctaag

SEQ ID NO: 8677 - DNA, 82 bp, Homo sapiens
tatgtcacatagatgactgcatgaacgagagtcaaaaggctgggagtgtttccttgctttggaagtgctaaggcatctagaa

SEQ ID NO: 8678 - DNA, 77 bp, Homo sapiens
atgactgcatgaacgagagtcaaaaggctgggagtgtttccttgctttggaagtgctaaggcatctagaagtacact

SEQ ID NO: 8679 - DNA, 75 bp, Homo sapiens
catgaacgagagtcaaaaggctgggagtgtttccttgctttggaagtgctaaggcatctagaagtacactttata

SEQ ID NO: 8680 - DNA, 71 bp, Homo sapiens
agtcaaaaggctgggagtgtttccttgctttggaagtgctaaggcatctagaagtacactttataaagtta

SEQ ID NO: 8681 - DNA, 70 bp, Homo sapiens
aaaggctgggagtgtttccttgctttggaagtgctaaggcatctagaagtacactttataaagttaataa

SEQ ID NO: 8682 - DNA, 69 bp, Homo sapiens
agtgtttccttgctttggaagtgctaaggcatctagaagtacactttataaagttaataataaactaaa

SEQ ID NO: 8683 - DNA, 75 bp, Homo sapiens
tggaagtgctaaggcatctagaagtacactttataaagttaataataaactaaaatgagaatgctatcctcagtg

SEQ ID NO: 8684 - DNA, 75 bp, Homo sapiens
gtgctaaggcatctagaagtacactttataaagttaataataaactaaaatgagaatgctatcctcagtgtcttc

SEQ ID NO: 8685 - DNA, 73 bp, Homo sapiens
ttataaagttaataataaactaaaatgagaatgctatcctcagtgtcttcttggaggaccaccgtatccgcat

SEQ ID NO: 8686 - DNA, 75 bp, Homo sapiens
aaactaaaatgagaatgctatcctcagtgtcttcttggaggaccaccgtatccgcattctgtactgtgttttctc

SEQ ID NO: 8687 - DNA, 75 bp, Homo sapiens
aatgctatcctcagtgtcttcttggaggaccaccgtatccgcattctgtactgtgttttctctgttggtcctatt

SEQ ID NO: 8688 - DNA, 73 bp, Homo sapiens
atcctcagtgtcttcttggaggaccaccgtatccgcattctgtactgtgttttctctgttggtcctatttttc

SEQ ID NO: 8689 - DNA, 74 bp, Homo sapiens
tcttcttggaggaccaccgtatccgcattctgtactgtgttttctctgttggtcctatttttctctgccctgtc

SEQ ID NO: 8690 - DNA, 75 bp, Homo sapiens
accgtatccgcattctgtactgtgttttctctgttggtcctatttttctctgccctgtcctgtggtcagctgtta

SEQ ID NO: 8691 - DNA, 75 bp, Homo sapiens
atccgcattctgtactgtgttttctctgttggtcctatttttctctgccctgtcctgtggtcagctgttacttct

SEQ ID NO: 8692 - DNA, 76 bp, Homo sapiens
tactgtgttttctctgttggtcctatttttctctgccctgtcctgtggtcagctgttacttcttggtgtcaacaga

SEQ ID NO: 8693 - DNA, 78 bp, Homo sapiens
tctgttggtcctatttttctctgccctgtcctgtggtcagctgttacttcttggtgtcaacagactgtctcgagataa

SEQ ID NO: 8694 - DNA, 77 bp, Homo sapiens
tatttttctctgccctgtcctgtggtcagctgttacttcttggtgtcaacagactgtctcgagataagactgtttct

SEQ ID NO: 8695 - DNA, 78 bp, Homo sapiens
ttctctgccctgtcctgtggtcagctgttacttcttggtgtcaacagactgtctcgagataagactgtttcttcctcc

SEQ ID NO: 8696 - DNA, 75 bp, Homo sapiens
tgtggtcagctgttacttcttggtgtcaacagactgtctcgagataagactgtttcttcctccttctaattaatt

SEQ ID NO: 8697 - DNA, 72 bp, Homo sapiens
tgttacttcttggtgtcaacagactgtctcgagataagactgtttcttcctccttctaattaattttccatt

SEQ ID NO: 8698 - DNA, 72 bp, Homo sapiens
cttcttggtgtcaacagactgtctcgagataagactgtttcttcctccttctaattaattttccatttctaa

SEQ ID NO: 8699 - DNA, 72 bp, Homo sapiens
caacagactgtctcgagataagactgtttcttcctccttctaattaattttccatttctaatctattaaatg

SEQ ID NO: 8700 - DNA, 72 bp, Homo sapiens
gtctcgagataagactgtttcttcctccttctaattaattttccatttctaatctattaaatgtgtagtgga

SEQ ID NO: 8701 - DNA, 68 bp, Homo sapiens
agactgtttcttcctccttctaattaattttccatttctaatctattaaatgtgtagtggatcttttt

SEQ ID NO: 8702 - DNA, 69 bp, Homo sapiens
cttcctccttctaattaattttccatttctaatctattaaatgtgtagtggatcttttttagaattgta

SEQ ID NO: 8703 - DNA, 74 bp, Homo sapiens
catttctaatctattaaatgtgtagtggatcttttttagaattgtatctacagtaagagtaaattggctctaca

SEQ ID NO: 8704 - DNA, 72 bp, Homo sapiens
ctattaaatgtgtagtggatcttttttagaattgtatctacagtaagagtaaattggctctacaaaagctat

SEQ ID NO: 8705 - DNA, 71 bp, Homo sapiens
tgtgtagtggatcttttttagaattgtatctacagtaagagtaaattggctctacaaaagctatttttaag

SEQ ID NO: 8706 - DNA, 72 bp, Homo sapiens
tttttagaattgtatctacagtaagagtaaattggctctacaaaagctatttttaagtattaggatctgaga

SEQ ID NO: 8707 - DNA, 75 bp, Homo sapiens
tgtatctacagtaagagtaaattggctctacaaaagctatttttaagtattaggatctgagacgtcaacagatgg

SEQ ID NO: 8708 - DNA, 73 bp, Homo sapiens
gtaagagtaaattggctctacaaaagctatttttaagtattaggatctgagacgtcaacagatgggactggta

SEQ ID NO: 8709 - DNA, 72 bp, Homo sapiens
ctctacaaaagctatttttaagtattaggatctgagacgtcaacagatgggactggtaatatctgttttttc

SEQ ID NO: 8710 - DNA, 73 bp, Homo sapiens
gctatttttaagtattaggatctgagacgtcaacagatgggactggtaatatctgttttttctgttgaattgt

SEQ ID NO: 8711 - DNA, 72 bp, Homo sapiens
agtattaggatctgagacgtcaacagatgggactggtaatatctgttttttctgttgaattgtttgtatttt

SEQ ID NO: 8712 - DNA, 73 bp, Homo sapiens
ctgagacgtcaacagatgggactggtaatatctgttttttctgttgaattgtttgtatttttcttattctata

SEQ ID NO: 8713 - DNA, 71 bp, Homo sapiens
tgaattgtttgtatttttcttattctatattgttttattaatagctaagattcccaaagaattgacttctg

SEQ ID NO: 8714 - DNA, 70 bp, Homo sapiens
tttcttattctatattgttttattaatagctaagattcccaaagaattgacttctggagagagaaaaaaa

SEQ ID NO: 8715 - DNA, 72 bp, Homo sapiens
tgttttattaatagctaagattcccaaagaattgacttctggagagagaaaaaaatcttaactgtatctctg

SEQ ID NO: 8716 - DNA, 73 bp, Homo sapiens
atagctaagattcccaaagaattgacttctggagagagaaaaaaatcttaactgtatctctgtttatgaattg

SEQ ID NO: 8717 - DNA, 75 bp, Homo sapiens
gaattgacttctggagagagaaaaaaatcttaactgtatctctgtttatgaattgtgtgttttatgtgccctcta

SEQ ID NO: 8718 - DNA, 74 bp, Homo sapiens
cttctggagagagaaaaaaatcttaactgtatctctgtttatgaattgtgtgttttatgtgccctctactacta

SEQ ID NO: 8719 - DNA, 77 bp, Homo sapiens
ttaactgtatctctgtttatgaattgtgtgttttatgtgccctctactactaaatacatggtaagtgaacagcacga

SEQ ID NO: 8720 - DNA, 79 bp, Homo sapiens
tctgtttatgaattgtgtgttttatgtgccctctactactaaatacatggtaagtgaacagcacgatcttcatgttgaa

SEQ ID NO: 8721 - DNA, 76 bp, Homo sapiens
aattgtgtgttttatgtgccctctactactaaatacatggtaagtgaacagcacgatcttcatgttgaagttataa

SEQ ID NO: 8722 - DNA, 74 bp, Homo sapiens
tttatgtgccctctactactaaatacatggtaagtgaacagcacgatcttcatgttgaagttataacttacctt

SEQ ID NO: 8723 - DNA, 72 bp, Homo sapiens
tctactactaaatacatggtaagtgaacagcacgatcttcatgttgaagttataacttaccttttcccgagg

SEQ ID NO: 8724 - DNA, 72 bp, Homo sapiens
aatacatggtaagtgaacagcacgatcttcatgttgaagttataacttaccttttcccgagggacagttgat

SEQ ID NO: 8725 - DNA, 71 bp, Homo sapiens
gtaagtgaacagcacgatcttcatgttgaagttataacttaccttttcccgagggacagttgattgttaaa

SEQ ID NO: 8726 - DNA, 70 bp, Homo sapiens
acgatcttcatgttgaagttataacttaccttttcccgagggacagttgattgttaaacaggactgaaga

SEQ ID NO: 8727 - DNA, 68 bp, Homo sapiens
atgttgaagttataacttaccttttcccgagggacagttgattgttaaacaggactgaagagtaccaa

SEQ ID NO: 8728 - DNA, 71 bp, Homo sapiens
ttttcccgagggacagttgattgttaaacaggactgaagagtaccaacttactgactttgtctgcatattt

SEQ ID NO: 8729 - DNA, 71 bp, Homo sapiens
gttgattgttaaacaggactgaagagtaccaacttactgactttgtctgcatatttttaataagaggaaaa

SEQ ID NO: 8730 - DNA, 69 bp, Homo sapiens
acaggactgaagagtaccaacttactgactttgtctgcatatttttaataagaggaaaaacaaaaccca

SEQ ID NO: 8731 - DNA, 70 bp, Homo sapiens
tactgactttgtctgcatatttttaataagaggaaaaacaaaacccagaaattgacagatttaatttaca

SEQ ID NO: 8732 - DNA, 69 bp, Homo sapiens
ctttgtctgcatatttttaataagaggaaaaacaaaacccagaaattgacagatttaatttacacatta

SEQ ID NO: 8733 - DNA, 68 bp, Homo sapiens
tttaataagaggaaaaacaaaacccagaaattgacagatttaatttacacattaaagtgtgaactata

SEQ ID NO: 8734 - DNA, 68 bp, Homo sapiens
ggaaaaacaaaacccagaaattgacagatttaatttacacattaaagtgtgaactataaaatacacgc

SEQ ID NO: 8735 - DNA, 72 bp, Homo sapiens
aacccagaaattgacagatttaatttacacattaaagtgtgaactataaaatacacgctttgagataataga

SEQ ID NO: 8736 - DNA, 75 bp, Homo sapiens
taatttacacattaaagtgtgaactataaaatacacgctttgagataatagaaagcaaggatggtacatcccaga

SEQ ID NO: 8737 - DNA, 73 bp, Homo sapiens
cattaaagtgtgaactataaaatacacgctttgagataatagaaagcaaggatggtacatcccagaaactgtt

SEQ ID NO: 8738 - DNA, 74 bp, Homo sapiens
tgaactataaaatacacgctttgagataatagaaagcaaggatggtacatcccagaaactgtttccgtgaacca

SEQ ID NO: 8739 - DNA, 72 bp, Homo sapiens
ataaaatacacgctttgagataatagaaagcaaggatggtacatcccagaaactgtttccgtgaaccataaa

SEQ ID NO: 8740 - DNA, 75 bp, Homo sapiens
tttgagataatagaaagcaaggatggtacatcccagaaactgtttccgtgaaccataaacgcacattttcatgct

SEQ ID NO: 8741 - DNA, 74 bp, Homo sapiens
taatagaaagcaaggatggtacatcccagaaactgtttccgtgaaccataaacgcacattttcatgctttgtaa

SEQ ID NO: 8742 - DNA, 75 bp, Homo sapiens
atcccagaaactgtttccgtgaaccataaacgcacattttcatgctttgtaagtgggctgaaggccaagatgcaa

SEQ ID NO: 8743 - DNA, 80 bp, Homo sapiens
aactgtttccgtgaaccataaacgcacattttcatgctttgtaagtgggctgaaggccaagatgcaatgtcatgatgtga

SEQ ID NO: 8744 - DNA, 82 bp, Homo sapiens
aaccataaacgcacattttcatgctttgtaagtgggctgaaggccaagatgcaatgtcatgatgtgagtctgtccagaaata

SEQ ID NO: 8745 - DNA, 85 bp, Homo sapiens
ttcatgctttgtaagtgggctgaaggccaagatgcaatgtcatgatgtgagtctgtccagaaatacagcttcttctctgtgttat

SEQ ID NO: 8746 - DNA, 82 bp, Homo sapiens
aggccaagatgcaatgtcatgatgtgagtctgtccagaaatacagcttcttctctgtgttattttgcttacaactactgtgt

SEQ ID NO: 8747 - DNA, 80 bp, Homo sapiens
aatgtcatgatgtgagtctgtccagaaatacagcttcttctctgtgttattttgcttacaactactgtgttgtcttagtc

SEQ ID NO: 8748 - DNA, 79 bp, Homo sapiens
tccagaaatacagcttcttctctgtgttattttgcttacaactactgtgttgtcttagtctcttgtgtgcagttataca

SEQ ID NO: 8749 - DNA, 77 bp, Homo sapiens
cttctctgtgttattttgcttacaactactgtgttgtcttagtctcttgtgtgcagttatacatatccaaatgtccc

SEQ ID NO: 8750 - DNA, 75 bp, Homo sapiens
ttacaactactgtgttgtcttagtctcttgtgtgcagttatacatatccaaatgtcccccatcttttgttcttgt

SEQ ID NO: 8751 - DNA, 77 bp, Homo sapiens
tagtctcttgtgtgcagttatacatatccaaatgtcccccatcttttgttcttgttattcagcttctttacgataga

SEQ ID NO: 8752 - DNA, 72 bp, Homo sapiens
agttatacatatccaaatgtcccccatcttttgttcttgttattcagcttctttacgatagaagtgctttag

SEQ ID NO: 8753 - DNA, 71 bp, Homo sapiens
acatatccaaatgtcccccatcttttgttcttgttattcagcttctttacgatagaagtgctttagttctt

SEQ ID NO: 8754 - DNA, 72 bp, Homo sapiens
tcccccatcttttgttcttgttattcagcttctttacgatagaagtgctttagttctttgccgatattttca

SEQ ID NO: 8755 - DNA, 71 bp, Homo sapiens
ttgttcttgttattcagcttctttacgatagaagtgctttagttctttgccgatattttcaagagttttgt

SEQ ID NO: 8756 - DNA, 72 bp, Homo sapiens
cttgttattcagcttctttacgatagaagtgctttagttctttgccgatattttcaagagttttgttctgaa

SEQ ID NO: 8757 - DNA, 74 bp, Homo sapiens
gcttctttacgatagaagtgctttagttctttgccgatattttcaagagttttgttctgaaataactgcaatga

SEQ ID NO: 8758 - DNA, 72 bp, Homo sapiens
cgatagaagtgctttagttctttgccgatattttcaagagttttgttctgaaataactgcaatgattttagt

SEQ ID NO: 8759 - DNA, 72 bp, Homo sapiens
tttgccgatattttcaagagttttgttctgaaataactgcaatgattttagtttataaaagcttcagtttga

SEQ ID NO: 8760 - DNA, 74 bp, Homo sapiens
tttcaagagttttgttctgaaataactgcaatgattttagtttataaaagcttcagtttgatttcattcatgaa

SEQ ID NO: 8761 - DNA, 73 bp, Homo sapiens
ttttgttctgaaataactgcaatgattttagtttataaaagcttcagtttgatttcattcatgaaaaagaaga

SEQ ID NO: 8762 - DNA, 72 bp, Homo sapiens
actgcaatgattttagtttataaaagcttcagtttgatttcattcatgaaaaagaagaacaattctacttta

SEQ ID NO: 8763 - DNA, 69 bp, Homo sapiens
ttttagtttataaaagcttcagtttgatttcattcatgaaaaagaagaacaattctactttaacatttg

SEQ ID NO: 8764 - DNA, 72 bp, Homo sapiens
tataaaagcttcagtttgatttcattcatgaaaaagaagaacaattctactttaacatttgtggttctgtta

SEQ ID NO: 8765 - DNA, 74 bp, Homo sapiens
gcttcagtttgatttcattcatgaaaaagaagaacaattctactttaacatttgtggttctgttaaatctgaga

SEQ ID NO: 8766 - DNA, 74 bp, Homo sapiens
tcattcatgaaaaagaagaacaattctactttaacatttgtggttctgttaaatctgagaattatttcaggcca

SEQ ID NO: 8767 - DNA, 78 bp, Homo sapiens
taacatttgtggttctgttaaatctgagaattatttcaggccactgagagtcttctgtgagtaacagcattttgtata

SEQ ID NO: 8768 - DNA, 78 bp, Homo sapiens
tggttctgttaaatctgagaattatttcaggccactgagagtcttctgtgagtaacagcattttgtatacaagagatt

SEQ ID NO: 8769 - DNA, 78 bp, Homo sapiens
aatctgagaattatttcaggccactgagagtcttctgtgagtaacagcattttgtatacaagagatttgcctccaaaa

SEQ ID NO: 8770 - DNA, 77 bp, Homo sapiens
attatttcaggccactgagagtcttctgtgagtaacagcattttgtatacaagagatttgcctccaaaatgtcaaat

SEQ ID NO: 8771 - DNA, 76 bp, Homo sapiens
ccactgagagtcttctgtgagtaacagcattttgtatacaagagatttgcctccaaaatgtcaaattttaaggtca

SEQ ID NO: 8772 - DNA, 75 bp, Homo sapiens
tgtgagtaacagcattttgtatacaagagatttgcctccaaaatgtcaaattttaaggtcataatattcttggaa

SEQ ID NO: 8773 - DNA, 74 bp, Homo sapiens
tttgtatacaagagatttgcctccaaaatgtcaaattttaaggtcataatattcttggaaagtgggagagagca

SEQ ID NO: 8774 - DNA, 76 bp, Homo sapiens
aagagatttgcctccaaaatgtcaaattttaaggtcataatattcttggaaagtgggagagagcatgcacatcaaa

SEQ ID NO: 8775 - DNA, 75 bp, Homo sapiens
gtcaaattttaaggtcataatattcttggaaagtgggagagagcatgcacatcaaagaaagcatttttattacag

SEQ ID NO: 8776 - DNA, 76 bp, Homo sapiens
tttaaggtcataatattcttggaaagtgggagagagcatgcacatcaaagaaagcatttttattacagtggattac

SEQ ID NO: 8777 - DNA, 76 bp, Homo sapiens
ataatattcttggaaagtgggagagagcatgcacatcaaagaaagcatttttattacagtggattacgcaatactt

SEQ ID NO: 8778 - DNA, 77 bp, Homo sapiens
aagtgggagagagcatgcacatcaaagaaagcatttttattacagtggattacgcaatactttggccagcctcctta

SEQ ID NO: 8779 - DNA, 71 bp, Homo sapiens
catttttattacagtggattacgcaatactttggccagcctccttagcttcatctgtttaagggttcattt

SEQ ID NO: 8780 - DNA, 73 bp, Homo sapiens
tattacagtggattacgcaatactttggccagcctccttagcttcatctgtttaagggttcattttcgcttgt

SEQ ID NO: 8781 - DNA, 72 bp, Homo sapiens
attacgcaatactttggccagcctccttagcttcatctgtttaagggttcattttcgcttgtttggcacagg

SEQ ID NO: 8782 - DNA, 73 bp, Homo sapiens
atactttggccagcctccttagcttcatctgtttaagggttcattttcgcttgtttggcacaggtcccagtga

SEQ ID NO: 8783 - DNA, 73 bp, Homo sapiens
ctccttagcttcatctgtttaagggttcattttcgcttgtttggcacaggtcccagtgaggccttcagaattg

SEQ ID NO: 8784 - DNA, 74 bp, Homo sapiens
ttcatctgtttaagggttcattttcgcttgtttggcacaggtcccagtgaggccttcagaattgtggttagcaa

SEQ ID NO: 8785 - DNA, 74 bp, Homo sapiens
attttcgcttgtttggcacaggtcccagtgaggccttcagaattgtggttagcaacatgaatgaattacaaact

SEQ ID NO: 8786 - DNA, 76 bp, Homo sapiens
tttggcacaggtcccagtgaggccttcagaattgtggttagcaacatgaatgaattacaaactttggacgagctct

SEQ ID NO: 8787 - DNA, 77 bp, Homo sapiens
tcccagtgaggccttcagaattgtggttagcaacatgaatgaattacaaactttggacgagctcttcagttagtaga

SEQ ID NO: 8788 - DNA, 76 bp, Homo sapiens
aggccttcagaattgtggttagcaacatgaatgaattacaaactttggacgagctcttcagttagtagagctggct

SEQ ID NO: 8789 - DNA, 77 bp, Homo sapiens
aattgtggttagcaacatgaatgaattacaaactttggacgagctcttcagttagtagagctggcttgctgccaaaa

SEQ ID NO: 8790 - DNA, 77 bp, Homo sapiens
aacatgaatgaattacaaactttggacgagctcttcagttagtagagctggcttgctgccaaaaagacagtgcctta

SEQ ID NO: 8791 - DNA, 76 bp, Homo sapiens
aatgaattacaaactttggacgagctcttcagttagtagagctggcttgctgccaaaaagacagtgccttatatgg

SEQ ID NO: 8792 - DNA, 76 bp, Homo sapiens
aaactttggacgagctcttcagttagtagagctggcttgctgccaaaaagacagtgccttatatggggtcagggca

SEQ ID NO: 8793 - DNA, 79 bp, Homo sapiens
ctcttcagttagtagagctggcttgctgccaaaaagacagtgccttatatggggtcagggcaaagctgtgattcgttga

SEQ ID NO: 8794 - DNA, 79 bp, Homo sapiens
gcttgctgccaaaaagacagtgccttatatggggtcagggcaaagctgtgattcgttgagtcctgcattgtatagaaaa

SEQ ID NO: 8795 - DNA, 78 bp, Homo sapiens
tgccttatatggggtcagggcaaagctgtgattcgttgagtcctgcattgtatagaaaacatacttgggatgcctgtt

SEQ ID NO: 8796 - DNA, 78 bp, Homo sapiens
tatatggggtcagggcaaagctgtgattcgttgagtcctgcattgtatagaaaacatacttgggatgcctgtttgctt

SEQ ID NO: 8797 - DNA, 75 bp, Homo sapiens
caaagctgtgattcgttgagtcctgcattgtatagaaaacatacttgggatgcctgtttgctttcttttaaaata

SEQ ID NO: 8798 - DNA, 73 bp, Homo sapiens
ctgtgattcgttgagtcctgcattgtatagaaaacatacttgggatgcctgtttgctttcttttaaaataaaa

SEQ ID NO: 8799 - DNA, 70 bp, Homo sapiens
aaaacaaaacagaaaaagcagcaggcttccaagtctatcaaaataggaagtaacaaaatagtgtgcaggt

SEQ ID NO: 8800 - DNA, 73 bp, Homo sapiens
agaaaaagcagcaggcttccaagtctatcaaaataggaagtaacaaaatagtgtgcaggttttactaatgaca

SEQ ID NO: 8801 - DNA, 74 bp, Homo sapiens
agcaggcttccaagtctatcaaaataggaagtaacaaaatagtgtgcaggttttactaatgacagagttaagca

SEQ ID NO: 8802 - DNA, 73 bp, Homo sapiens
cttccaagtctatcaaaataggaagtaacaaaatagtgtgcaggttttactaatgacagagttaagcaatgga

SEQ ID NO: 8803 - DNA, 71 bp, Homo sapiens
aaaataggaagtaacaaaatagtgtgcaggttttactaatgacagagttaagcaatggaaatacagctccc

SEQ ID NO: 8804 - DNA, 74 bp, Homo sapiens
taacaaaatagtgtgcaggttttactaatgacagagttaagcaatggaaatacagctccctgtagctaaaatac

SEQ ID NO: 8805 - DNA, 74 bp, Homo sapiens
aaatagtgtgcaggttttactaatgacagagttaagcaatggaaatacagctccctgtagctaaaatactagaa

SEQ ID NO: 8806 - DNA, 71 bp, Homo sapiens
caggttttactaatgacagagttaagcaatggaaatacagctccctgtagctaaaatactagaagtaaaag

SEQ ID NO: 8807 - DNA, 70 bp, Homo sapiens
ttaagcaatggaaatacagctccctgtagctaaaatactagaagtaaaagttggacttttgacctcctta

SEQ ID NO: 8808 - DNA, 72 bp, Homo sapiens
aatacagctccctgtagctaaaatactagaagtaaaagttggacttttgacctccttagccagcttgtgata

SEQ ID NO: 8809 - DNA, 76 bp, Homo sapiens
tgtagctaaaatactagaagtaaaagttggacttttgacctccttagccagcttgtgatatgagagattgaagcat

SEQ ID NO: 8810 - DNA, 74 bp, Homo sapiens
aatactagaagtaaaagttggacttttgacctccttagccagcttgtgatatgagagattgaagcatttggtta

SEQ ID NO: 8811 - DNA, 74 bp, Homo sapiens
aagtaaaagttggacttttgacctccttagccagcttgtgatatgagagattgaagcatttggttagatacctg

SEQ ID NO: 8812 - DNA, 76 bp, Homo sapiens
acttttgacctccttagccagcttgtgatatgagagattgaagcatttggttagatacctgttgtcttcctgcttt

SEQ ID NO: 8813 - DNA, 78 bp, Homo sapiens
acctccttagccagcttgtgatatgagagattgaagcatttggttagatacctgttgtcttcctgcttttatgtttca

SEQ ID NO: 8814 - DNA, 79 bp, Homo sapiens
agcttgtgatatgagagattgaagcatttggttagatacctgttgtcttcctgcttttatgtttcagatggcttaataa

SEQ ID NO: 8815 - DNA, 78 bp, Homo sapiens
gatatgagagattgaagcatttggttagatacctgttgtcttcctgcttttatgtttcagatggcttaataagattaa

SEQ ID NO: 8816 - DNA, 76 bp, Homo sapiens
gaagcatttggttagatacctgttgtcttcctgcttttatgtttcagatggcttaataagattaattagtctcatg

SEQ ID NO: 8817 - DNA, 76 bp, Homo sapiens
tttggttagatacctgttgtcttcctgcttttatgtttcagatggcttaataagattaattagtctcatgtccaca

SEQ ID NO: 8818 - DNA, 80 bp, Homo sapiens
tacctgttgtcttcctgcttttatgtttcagatggcttaataagattaattagtctcatgtccacatggttgctgtgcca

SEQ ID NO: 8819 - DNA, 78 bp, Homo sapiens
tgcttttatgtttcagatggcttaataagattaattagtctcatgtccacatggttgctgtgccactggggtttggta

SEQ ID NO: 8820 - DNA, 80 bp, Homo sapiens
ttatgtttcagatggcttaataagattaattagtctcatgtccacatggttgctgtgccactggggtttggtatcagcta

SEQ ID NO: 8821 - DNA, 78 bp, Homo sapiens
cttaataagattaattagtctcatgtccacatggttgctgtgccactggggtttggtatcagctagatatgttgaaaa

SEQ ID NO: 8822 - DNA, 78 bp, Homo sapiens
taagattaattagtctcatgtccacatggttgctgtgccactggggtttggtatcagctagatatgttgaaaattaaa

SEQ ID NO: 8823 - DNA, 79 bp, Homo sapiens
tctcatgtccacatggttgctgtgccactggggtttggtatcagctagatatgttgaaaattaaaagcaggaatagtta

SEQ ID NO: 8824 - DNA, 74 bp, Homo sapiens
atggttgctgtgccactggggtttggtatcagctagatatgttgaaaattaaaagcaggaatagttaccttcca

SEQ ID NO: 8825 - DNA, 74 bp, Homo sapiens
tgtgccactggggtttggtatcagctagatatgttgaaaattaaaagcaggaatagttaccttccaacgtgcca

SEQ ID NO: 8826 - DNA, 71 bp, Homo sapiens
gtttggtatcagctagatatgttgaaaattaaaagcaggaatagttaccttccaacgtgccagttcttctt

SEQ ID NO: 8827 - DNA, 71 bp, Homo sapiens
gtatcagctagatatgttgaaaattaaaagcaggaatagttaccttccaacgtgccagttcttctttttta

SEQ ID NO: 8828 - DNA, 66 bp, Homo sapiens
gatatgttgaaaattaaaagcaggaatagttaccttccaacgtgccagttcttcttttttaaaaat

SEQ ID NO: 8829 - DNA, 67 bp, Homo sapiens
cgcgcccggcctagttatgtaacttttaaaaaattgacatgttgaatggtaaaacaagtaagaacga

SEQ ID NO: 8830 - DNA, 67 bp, Homo sapiens
gcgcccggcctagttatgtaacttttaaaaaattgacatgttgaatggtaaaacaagtaagaacgaa

SEQ ID NO: 8831 - DNA, 67 bp, Homo sapiens
ggcctagttatgtaacttttaaaaaattgacatgttgaatggtaaaacaagtaagaacgaaatttgc

SEQ ID NO: 8832 - DNA, 67 bp, Homo sapiens
gttatgtaacttttaaaaaattgacatgttgaatggtaaaacaagtaagaacgaaatttgcttttca

SEQ ID NO: 8833 - DNA, 67 bp, Homo sapiens
acttttaaaaaattgacatgttgaatggtaaaacaagtaagaacgaaatttgcttttcagaaggtca

SEQ ID NO: 8834 - DNA, 68 bp, Homo sapiens
taaaaaattgacatgttgaatggtaaaacaagtaagaacgaaatttgcttttcagaaggtcacaaatt

SEQ ID NO: 8835 - DNA, 69 bp, Homo sapiens
aaattgacatgttgaatggtaaaacaagtaagaacgaaatttgcttttcagaaggtcacaaattttgct

SEQ ID NO: 8836 - DNA, 70 bp, Homo sapiens
acatgttgaatggtaaaacaagtaagaacgaaatttgcttttcagaaggtcacaaattttgcttatattc

SEQ ID NO: 8837 - DNA, 69 bp, Homo sapiens
tgaatggtaaaacaagtaagaacgaaatttgcttttcagaaggtcacaaattttgcttatattcttagg

SEQ ID NO: 8838 - DNA, 68 bp, Homo sapiens
aaaacaagtaagaacgaaatttgcttttcagaaggtcacaaattttgcttatattcttaggttggaga

SEQ ID NO: 8839 - DNA, 71 bp, Homo sapiens
gaacgaaatttgcttttcagaaggtcacaaattttgcttatattcttaggttggagaatataattactaga

SEQ ID NO: 8840 - DNA, 72 bp, Homo sapiens
gcttttcagaaggtcacaaattttgcttatattcttaggttggagaatataattactagatctattagaagg

SEQ ID NO: 8841 - DNA, 69 bp, Homo sapiens
aggtcacaaattttgcttatattcttaggttggagaatataattactagatctattagaagggaaaact

SEQ ID NO: 8842 - DNA, 69 bp, Homo sapiens
attttgcttatattcttaggttggagaatataattactagatctattagaagggaaaacttttaatata

SEQ ID NO: 8843 - DNA, 71 bp, Homo sapiens
tattcttaggttggagaatataattactagatctattagaagggaaaacttttaatatattttcacatata

SEQ ID NO: 8844 - DNA, 73 bp, Homo sapiens
ttggagaatataattactagatctattagaagggaaaacttttaatatattttcacatataattcatttatca

SEQ ID NO: 8845 - DNA, 71 bp, Homo sapiens
taattactagatctattagaagggaaaacttttaatatattttcacatataattcatttatcattgtaatt

SEQ ID NO: 8846 - DNA, 69 bp, Homo sapiens
atctattagaagggaaaacttttaatatattttcacatataattcatttatcattgtaattttttccat

SEQ ID NO: 8847 - DNA, 70 bp, Homo sapiens
gaaaacttttaatatattttcacatataattcatttatcattgtaattttttccatttaggcaaatactc

SEQ ID NO: 8848 - DNA, 77 bp, Homo sapiens
tatattttcacatataattcatttatcattgtaattttttccatttaggcaaatactctatctggatcttctctcag

SEQ ID NO: 8849 - DNA, 79 bp, Homo sapiens
catataattcatttatcattgtaattttttccatttaggcaaatactctatctggatcttctctcagtcaggcaccatc

SEQ ID NO: 8850 - DNA, 80 bp, Homo sapiens
atttatcattgtaattttttccatttaggcaaatactctatctggatcttctctcagtcaggcaccatctcatatgtatg

SEQ ID NO: 8851 - DNA, 82 bp, Homo sapiens
gtaattttttccatttaggcaaatactctatctggatcttctctcagtcaggcaccatctcatatgtatggcaatagatcaa

SEQ ID NO: 8852 - DNA, 85 bp, Homo sapiens
ttttccatttaggcaaatactctatctggatcttctctcagtcaggcaccatctcatatgtatggcaatagatcaaattcatcaa

SEQ ID NO: 8853 - DNA, 90 bp, Homo sapiens
aaatactctatctggatcttctctcagtcaggcaccatctcatatgtatggcaatagatcaaattcatcaatggcagctcttatagctca

SEQ ID NO: 8854 - DNA, 89 bp, Homo sapiens
ttctctcagtcaggcaccatctcatatgtatggcaatagatcaaattcatcaatggcagctcttatagctcagtctgaaaacaatcaaa

SEQ ID NO: 8855 - DNA, 85 bp, Homo sapiens
aggcaccatctcatatgtatggcaatagatcaaattcatcaatggcagctcttatagctcagtctgaaaacaatcaaacaggtaa

SEQ ID NO: 8856 - DNA, 82 bp, Homo sapiens
atctcatatgtatggcaatagatcaaattcatcaatggcagctcttatagctcagtctgaaaacaatcaaacaggtaagttt

SEQ ID NO: 8857 - DNA, 80 bp, Homo sapiens
tatggcaatagatcaaattcatcaatggcagctcttatagctcagtctgaaaacaatcaaacaggtaagttttcaagaat

SEQ ID NO: 8858 - DNA, 76 bp, Homo sapiens
caaattcatcaatggcagctcttatagctcagtctgaaaacaatcaaacaggtaagttttcaagaattactaactc

SEQ ID NO: 8859 - DNA, 70 bp, Homo sapiens
gctcagtctgaaaacaatcaaacaggtaagttttcaagaattactaactctaaaaccctactctcaccta

SEQ ID NO: 8860 - DNA, 62 bp, Homo sapiens
aacaggtaagttttcaagaattactaactctaaaaccctactctcacctactttaatttttt

SEQ ID NO: 8861 - DNA, 64 bp, Homo sapiens
tcaagaattactaactctaaaaccctactctcacctactttaatttttttccccttttggttca

SEQ ID NO: 8862 - DNA, 65 bp, Homo sapiens
ccctactctcacctactttaatttttttccccttttggttcattttatttgaaaacatgcaggga

SEQ ID NO: 8863 - DNA, 66 bp, Homo sapiens
ctctcacctactttaatttttttccccttttggttcattttatttgaaaacatgcagggatgtggt

SEQ ID NO: 8864 - DNA, 67 bp, Homo sapiens
cccttttggttcattttatttgaaaacatgcagggatgtggttagtagaggatttgtactttaaaaa

SEQ ID NO: 8865 - DNA, 70 bp, Homo sapiens
cattttatttgaaaacatgcagggatgtggttagtagaggatttgtactttaaaaaaatattcacagttg

SEQ ID NO: 8866 - DNA, 71 bp, Homo sapiens
tgaaaacatgcagggatgtggttagtagaggatttgtactttaaaaaaatattcacagttggaaaatgtta

SEQ ID NO: 8867 - DNA, 70 bp, Homo sapiens
catgcagggatgtggttagtagaggatttgtactttaaaaaaatattcacagttggaaaatgttaaatat

SEQ ID NO: 8868 - DNA, 69 bp, Homo sapiens
tgtggttagtagaggatttgtactttaaaaaaatattcacagttggaaaatgttaaatatttcaggtgc

SEQ ID NO: 8869 - DNA, 69 bp, Homo sapiens
gaggatttgtactttaaaaaaatattcacagttggaaaatgttaaatatttcaggtgctggttatgtta

SEQ ID NO: 8870 - DNA, 70 bp, Homo sapiens
taaaaaaatattcacagttggaaaatgttaaatatttcaggtgctggttatgttaactagcttgatttta

SEQ ID NO: 8871 - DNA, 73 bp, Homo sapiens
atattcacagttggaaaatgttaaatatttcaggtgctggttatgttaactagcttgattttattattccaca

SEQ ID NO: 8872 - DNA, 75 bp, Homo sapiens
ggttatgttaactagcttgattttattattccacattacattcatatatcataacatcaatttgtactccaaatt

SEQ ID NO: 8873 - DNA, 77 bp, Homo sapiens
ttattccacattacattcatatatcataacatcaatttgtactccaaatttatataattacaaactgtcaatttaca

SEQ ID NO: 8874 - DNA, 76 bp, Homo sapiens
ccacattacattcatatatcataacatcaatttgtactccaaatttatataattacaaactgtcaatttacaataa

SEQ ID NO: 8875 - DNA, 71 bp, Homo sapiens
catcaatttgtactccaaatttatataattacaaactgtcaatttacaataaaaaagaatcacagttggaa

SEQ ID NO: 8876 - DNA, 69 bp, Homo sapiens
tttgtactccaaatttatataattacaaactgtcaatttacaataaaaaagaatcacagttggaagtaa

SEQ ID NO: 8877 - DNA, 75 bp, Homo sapiens
tatataattacaaactgtcaatttacaataaaaaagaatcacagttggaagtaaatagtatgctgtgctgcaaaa

SEQ ID NO: 8878 - DNA, 76 bp, Homo sapiens
caaactgtcaatttacaataaaaaagaatcacagttggaagtaaatagtatgctgtgctgcaaaatagcaatgtcc

SEQ ID NO: 8879 - DNA, 74 bp, Homo sapiens
gtcaatttacaataaaaaagaatcacagttggaagtaaatagtatgctgtgctgcaaaatagcaatgtcctttt

SEQ ID NO: 8880 - DNA, 71 bp, Homo sapiens
caataaaaaagaatcacagttggaagtaaatagtatgctgtgctgcaaaatagcaatgtcctttttttttt

SEQ ID NO: 8881 - DNA, 79 bp, Homo sapiens
tttttttttttattgtctgaaatggaaatgtttcaacagagccatcagcaagcaggaatgcagcagtgtctcctgtgac

SEQ ID NO: 8882 - DNA, 82 bp, Homo sapiens
tttttattgtctgaaatggaaatgtttcaacagagccatcagcaagcaggaatgcagcagtgtctcctgtgacttttgtgat

SEQ ID NO: 8883 - DNA, 84 bp, Homo sapiens
aaatggaaatgtttcaacagagccatcagcaagcaggaatgcagcagtgtctcctgtgacttttgtgattgatgtgttcagttc

SEQ ID NO: 8884 - DNA, 86 bp, Homo sapiens
aatgtttcaacagagccatcagcaagcaggaatgcagcagtgtctcctgtgacttttgtgattgatgtgttcagttctcagttcta

SEQ ID NO: 8885 - DNA, 87 bp, Homo sapiens
agccatcagcaagcaggaatgcagcagtgtctcctgtgacttttgtgattgatgtgttcagttctcagttctatgcaatgaaagtaa

SEQ ID NO: 8886 - DNA, 84 bp, Homo sapiens
aagcaggaatgcagcagtgtctcctgtgacttttgtgattgatgtgttcagttctcagttctatgcaatgaaagtaacataaca

SEQ ID NO: 8887 - DNA, 81 bp, Homo sapiens
cagcagtgtctcctgtgacttttgtgattgatgtgttcagttctcagttctatgcaatgaaagtaacataacactgggctt

SEQ ID NO: 8888 - DNA, 80 bp, Homo sapiens
tcctgtgacttttgtgattgatgtgttcagttctcagttctatgcaatgaaagtaacataacactgggcttttctgtgaa

SEQ ID NO: 8889 - DNA, 75 bp, Homo sapiens
atgtgttcagttctcagttctatgcaatgaaagtaacataacactgggcttttctgtgaatagcctaaaccttta

SEQ ID NO: 8890 - DNA, 75 bp, Homo sapiens
agttctcagttctatgcaatgaaagtaacataacactgggcttttctgtgaatagcctaaacctttatttgcata

SEQ ID NO: 8891 - DNA, 76 bp, Homo sapiens
agttctatgcaatgaaagtaacataacactgggcttttctgtgaatagcctaaacctttatttgcataattcatga

SEQ ID NO: 8892 - DNA, 73 bp, Homo sapiens
atgaaagtaacataacactgggcttttctgtgaatagcctaaacctttatttgcataattcatgaaattgtat

SEQ ID NO: 8893 - DNA, 72 bp, Homo sapiens
acactgggcttttctgtgaatagcctaaacctttatttgcataattcatgaaattgtattacacaaacttgg

SEQ ID NO: 8894 - DNA, 71 bp, Homo sapiens
gggcttttctgtgaatagcctaaacctttatttgcataattcatgaaattgtattacacaaacttggttaa

SEQ ID NO: 8895 - DNA, 69 bp, Homo sapiens
gtgaatagcctaaacctttatttgcataattcatgaaattgtattacacaaacttggttaaaaaaatcc

SEQ ID NO: 8896 - DNA, 72 bp, Homo sapiens
ctttatttgcataattcatgaaattgtattacacaaacttggttaaaaaaatcctgttagagaatttctgca

SEQ ID NO: 8897 - DNA, 73 bp, Homo sapiens
tgcataattcatgaaattgtattacacaaacttggttaaaaaaatcctgttagagaatttctgcagtgtttag

SEQ ID NO: 8898 - DNA, 69 bp, Homo sapiens
gaaattgtattacacaaacttggttaaaaaaatcctgttagagaatttctgcagtgtttagtaatcctg

SEQ ID NO: 8899 - DNA, 71 bp, Homo sapiens
acacaaacttggttaaaaaaatcctgttagagaatttctgcagtgtttagtaatcctgtgaatgttcacca

SEQ ID NO: 8900 - DNA, 70 bp, Homo sapiens
ggttaaaaaaatcctgttagagaatttctgcagtgtttagtaatcctgtgaatgttcaccagttgacgtt

SEQ ID NO: 8901 - DNA, 73 bp, Homo sapiens
aaaatcctgttagagaatttctgcagtgtttagtaatcctgtgaatgttcaccagttgacgttttgtcgcatt

SEQ ID NO: 8902 - DNA, 77 bp, Homo sapiens
tagtaatcctgtgaatgttcaccagttgacgttttgtcgcatttgtctcttgtactgtcttaatgagccactggatt

SEQ ID NO: 8903 - DNA, 76 bp, Homo sapiens
gtgaatgttcaccagttgacgttttgtcgcatttgtctcttgtactgtcttaatgagccactggatttgctttgtt

SEQ ID NO: 8904 - DNA, 77 bp, Homo sapiens
agttgacgttttgtcgcatttgtctcttgtactgtcttaatgagccactggatttgctttgtttcattgcatcctta

SEQ ID NO: 8905 - DNA, 77 bp, Homo sapiens
gttttgtcgcatttgtctcttgtactgtcttaatgagccactggatttgctttgtttcattgcatccttaaggattg

SEQ ID NO: 8906 - DNA, 78 bp, Homo sapiens
atttgtctcttgtactgtcttaatgagccactggatttgctttgtttcattgcatccttaaggattggttgacatgtc

SEQ ID NO: 8907 - DNA, 79 bp, Homo sapiens
ttaatgagccactggatttgctttgtttcattgcatccttaaggattggttgacatgtccaagtagtcatgcctgtttg

SEQ ID NO: 8908 - DNA, 75 bp, Homo sapiens
tgtttcattgcatccttaaggattggttgacatgtccaagtagtcatgcctgtttgggggaagggaatggattta

SEQ ID NO: 8909 - DNA, 74 bp, Homo sapiens
attgcatccttaaggattggttgacatgtccaagtagtcatgcctgtttgggggaagggaatggatttagcagt

SEQ ID NO: 8910 - DNA, 75 bp, Homo sapiens
atgtccaagtagtcatgcctgtttgggggaagggaatggatttagcagttcaccaagaatggatcagtctgtctt

SEQ ID NO: 8911 - DNA, 73 bp, Homo sapiens
tagtcatgcctgtttgggggaagggaatggatttagcagttcaccaagaatggatcagtctgtctttaccgtt

SEQ ID NO: 8912 - DNA, 69 bp, Homo sapiens
tgtttgggggaagggaatggatttagcagttcaccaagaatggatcagtctgtctttaccgtttaaggg

SEQ ID NO: 8913 - DNA, 70 bp, Homo sapiens
aagggaatggatttagcagttcaccaagaatggatcagtctgtctttaccgtttaagggtcagaggttac

SEQ ID NO: 8914 - DNA, 73 bp, Homo sapiens
atttagcagttcaccaagaatggatcagtctgtctttaccgtttaagggtcagaggttacctgactcagaata

SEQ ID NO: 8915 - DNA, 70 bp, Homo sapiens
agttcaccaagaatggatcagtctgtctttaccgtttaagggtcagaggttacctgactcagaataaggg

SEQ ID NO: 8916 - DNA, 70 bp, Homo sapiens
agaatggatcagtctgtctttaccgtttaagggtcagaggttacctgactcagaataaggggaggacaac

SEQ ID NO: 8917 - DNA, 67 bp, Homo sapiens
agtctgtctttaccgtttaagggtcagaggttacctgactcagaataaggggaggacaaccttgaaa

SEQ ID NO: 8918 - DNA, 69 bp, Homo sapiens
taccgtttaagggtcagaggttacctgactcagaataaggggaggacaaccttgaaagaggccagataa

SEQ ID NO: 8919 - DNA, 69 bp, Homo sapiens
agaggttacctgactcagaataaggggaggacaaccttgaaagaggccagataaggtgatttttataag

SEQ ID NO: 8920 - DNA, 70 bp, Homo sapiens
ttacctgactcagaataaggggaggacaaccttgaaagaggccagataaggtgatttttataaggaacta

SEQ ID NO: 8921 - DNA, 68 bp, Homo sapiens
acaaccttgaaagaggccagataaggtgatttttataaggaactaactgcaggggaaatacaagttac

SEQ ID NO: 8922 - DNA, 73 bp, Homo sapiens
ccagataaggtgatttttataaggaactaactgcaggggaaatacaagttactttccaagcagagatatatga

SEQ ID NO: 8923 - DNA, 73 bp, Homo sapiens
ggaactaactgcaggggaaatacaagttactttccaagcagagatatatgatattacctaaggaatattttga

SEQ ID NO: 8924 - DNA, 71 bp, Homo sapiens
actgcaggggaaatacaagttactttccaagcagagatatatgatattacctaaggaatattttgaaaagt

SEQ ID NO: 8925 - DNA, 68 bp, Homo sapiens
aaatacaagttactttccaagcagagatatatgatattacctaaggaatattttgaaaagttaatttt

SEQ ID NO: 8926 - DNA, 65 bp, Homo sapiens
ttttttctttaaaattcaggattctgtattcctacttgtttttgtcaatttggaaatttagtgtt

SEQ ID NO: 8927 - DNA, 68 bp, Homo sapiens
tctttaaaattcaggattctgtattcctacttgtttttgtcaatttggaaatttagtgttttatgtaa

SEQ ID NO: 8928 - DNA, 69 bp, Homo sapiens
tcaggattctgtattcctacttgtttttgtcaatttggaaatttagtgttttatgtaattttattcttg

SEQ ID NO: 8929 - DNA, 67 bp, Homo sapiens
cctacttgtttttgtcaatttggaaatttagtgttttatgtaattttattcttggtgtaaggctcta

SEQ ID NO: 8930 - DNA, 70 bp, Homo sapiens
tttgtcaatttggaaatttagtgttttatgtaattttattcttggtgtaaggctctagtgtctaacacca

SEQ ID NO: 8931 - DNA, 69 bp, Homo sapiens
tggaaatttagtgttttatgtaattttattcttggtgtaaggctctagtgtctaacaccataattttag

SEQ ID NO: 8932 - DNA, 73 bp, Homo sapiens
gtgttttatgtaattttattcttggtgtaaggctctagtgtctaacaccataattttagtcttggtgtgcagc

SEQ ID NO: 8933 - DNA, 75 bp, Homo sapiens
taattttattcttggtgtaaggctctagtgtctaacaccataattttagtcttggtgtgcagctctatgtaaatg

SEQ ID NO: 8934 - DNA, 75 bp, Homo sapiens
ttattcttggtgtaaggctctagtgtctaacaccataattttagtcttggtgtgcagctctatgtaaatgtgttt

SEQ ID NO: 8935 - DNA, 77 bp, Homo sapiens
tgtaaggctctagtgtctaacaccataattttagtcttggtgtgcagctctatgtaaatgtgttttatggcttgtct

SEQ ID NO: 8936 - DNA, 78 bp, Homo sapiens
tagtgtctaacaccataattttagtcttggtgtgcagctctatgtaaatgtgttttatggcttgtcttgggatgcaaa

SEQ ID NO: 8937 - DNA, 74 bp, Homo sapiens
agctctatgtaaatgtgttttatggcttgtcttgggatgcaaagtgttaaaaaatacaaagcatacggatttgc

SEQ ID NO: 8938 - DNA, 76 bp, Homo sapiens
taaatgtgttttatggcttgtcttgggatgcaaagtgttaaaaaatacaaagcatacggatttgctgtgataagca

SEQ ID NO: 8939 - DNA, 77 bp, Homo sapiens
ttttatggcttgtcttgggatgcaaagtgttaaaaaatacaaagcatacggatttgctgtgataagcatacagatta

SEQ ID NO: 8940 - DNA, 79 bp, Homo sapiens
cttgtcttgggatgcaaagtgttaaaaaatacaaagcatacggatttgctgtgataagcatacagattagctgtccaca

SEQ ID NO: 8941 - DNA, 79 bp, Homo sapiens
aaaatacaaagcatacggatttgctgtgataagcatacagattagctgtccacagctgtgattcattactttaaccgta

SEQ ID NO: 8942 - DNA, 79 bp, Homo sapiens
aaagcatacggatttgctgtgataagcatacagattagctgtccacagctgtgattcattactttaaccgtagaaatta

SEQ ID NO: 8943 - DNA, 77 bp, Homo sapiens
cggatttgctgtgataagcatacagattagctgtccacagctgtgattcattactttaaccgtagaaattaaaagtg

SEQ ID NO: 8944 - DNA, 75 bp, Homo sapiens
ataagcatacagattagctgtccacagctgtgattcattactttaaccgtagaaattaaaagtggctgaggggag

SEQ ID NO: 8945 - DNA, 74 bp, Homo sapiens
tacagattagctgtccacagctgtgattcattactttaaccgtagaaattaaaagtggctgaggggagggtaca

SEQ ID NO: 8946 - DNA, 74 bp, Homo sapiens
tgtccacagctgtgattcattactttaaccgtagaaattaaaagtggctgaggggagggtacagcaaatgcaaa

SEQ ID NO: 8947 - DNA, 69 bp, Homo sapiens
attcattactttaaccgtagaaattaaaagtggctgaggggagggtacagcaaatgcaaaccacgcttc

SEQ ID NO: 8948 - DNA, 71 bp, Homo sapiens
tttaaccgtagaaattaaaagtggctgaggggagggtacagcaaatgcaaaccacgcttctgtgctgtaaa

SEQ ID NO: 8949 - DNA, 71 bp, Homo sapiens
aaattaaaagtggctgaggggagggtacagcaaatgcaaaccacgcttctgtgctgtaaaattgaaaggaa

SEQ ID NO: 8950 - DNA, 73 bp, Homo sapiens
aaaagtggctgaggggagggtacagcaaatgcaaaccacgcttctgtgctgtaaaattgaaaggaatgaaaga

SEQ ID NO: 8951 - DNA, 76 bp, Homo sapiens
ggagggtacagcaaatgcaaaccacgcttctgtgctgtaaaattgaaaggaatgaaagaacagaacataatccatg

SEQ ID NO: 8952 - DNA, 78 bp, Homo sapiens
tacagcaaatgcaaaccacgcttctgtgctgtaaaattgaaaggaatgaaagaacagaacataatccatggccttcta

SEQ ID NO: 8953 - DNA, 74 bp, Homo sapiens
aaaccacgcttctgtgctgtaaaattgaaaggaatgaaagaacagaacataatccatggccttctacacccaca

SEQ ID NO: 8954 - DNA, 74 bp, Homo sapiens
tctgtgctgtaaaattgaaaggaatgaaagaacagaacataatccatggccttctacacccacaaaaacgtgta

SEQ ID NO: 8955 - DNA, 74 bp, Homo sapiens
atgaaagaacagaacataatccatggccttctacacccacaaaaacgtgtagggacaacgccttacatgccaca

SEQ ID NO: 8956 - DNA, 74 bp, Homo sapiens
agaacataatccatggccttctacacccacaaaaacgtgtagggacaacgccttacatgccacagttcagcaat

SEQ ID NO: 8957 - DNA, 75 bp, Homo sapiens
ataatccatggccttctacacccacaaaaacgtgtagggacaacgccttacatgccacagttcagcaattctgaa

SEQ ID NO: 8958 - DNA, 78 bp, Homo sapiens
ttctacacccacaaaaacgtgtagggacaacgccttacatgccacagttcagcaattctgaactagcaacatgctaga

SEQ ID NO: 8959 - DNA, 76 bp, Homo sapiens
aaaaacgtgtagggacaacgccttacatgccacagttcagcaattctgaactagcaacatgctagatcttctattt

SEQ ID NO: 8960 - DNA, 79 bp, Homo sapiens
gtgtagggacaacgccttacatgccacagttcagcaattctgaactagcaacatgctagatcttctattttcgtgggaa

SEQ ID NO: 8961 - DNA, 80 bp, Homo sapiens
aacgccttacatgccacagttcagcaattctgaactagcaacatgctagatcttctattttcgtgggaactgcaaagata

SEQ ID NO: 8962 - DNA, 77 bp, Homo sapiens
cacagttcagcaattctgaactagcaacatgctagatcttctattttcgtgggaactgcaaagatagtggtaaaggt

SEQ ID NO: 8963 - DNA, 75 bp, Homo sapiens
caattctgaactagcaacatgctagatcttctattttcgtgggaactgcaaagatagtggtaaaggtttaatgta

SEQ ID NO: 8964 - DNA, 74 bp, Homo sapiens
tgaactagcaacatgctagatcttctattttcgtgggaactgcaaagatagtggtaaaggtttaatgtatgttt

SEQ ID NO: 8965 - DNA, 71 bp, Homo sapiens
aacatgctagatcttctattttcgtgggaactgcaaagatagtggtaaaggtttaatgtatgttttaggaa

SEQ ID NO: 8966 - DNA, 69 bp, Homo sapiens
ttctattttcgtgggaactgcaaagatagtggtaaaggtttaatgtatgttttaggaaaaatcagggca

SEQ ID NO: 8967 - DNA, 69 bp, Homo sapiens
tcgtgggaactgcaaagatagtggtaaaggtttaatgtatgttttaggaaaaatcagggcaagagttta

SEQ ID NO: 8968 - DNA, 67 bp, Homo sapiens
gtaaaggtttaatgtatgttttaggaaaaatcagggcaagagtttaaaacctcttatctagtgagag

SEQ ID NO: 8969 - DNA, 74 bp, Homo sapiens
atgtatgttttaggaaaaatcagggcaagagtttaaaacctcttatctagtgagagtcactttatcagctctga

SEQ ID NO: 8970 - DNA, 72 bp, Homo sapiens
gttttaggaaaaatcagggcaagagtttaaaacctcttatctagtgagagtcactttatcagctctgaaata

SEQ ID NO: 8971 - DNA, 75 bp, Homo sapiens
aaatcagggcaagagtttaaaacctcttatctagtgagagtcactttatcagctctgaaatatttacactacaga

SEQ ID NO: 8972 - DNA, 77 bp, Homo sapiens
agtttaaaacctcttatctagtgagagtcactttatcagctctgaaatatttacactacagatcaagatcttggaga

SEQ ID NO: 8973 - DNA, 79 bp, Homo sapiens
aaacctcttatctagtgagagtcactttatcagctctgaaatatttacactacagatcaagatcttggagacaatagcc

SEQ ID NO: 8974 - DNA, 81 bp, Homo sapiens
tctagtgagagtcactttatcagctctgaaatatttacactacagatcaagatcttggagacaatagccgcaacctagttg

SEQ ID NO: 8975 - DNA, 80 bp, Homo sapiens
gtcactttatcagctctgaaatatttacactacagatcaagatcttggagacaatagccgcaacctagttggcagaggaa

SEQ ID NO: 8976 - DNA, 77 bp, Homo sapiens
ctgaaatatttacactacagatcaagatcttggagacaatagccgcaacctagttggcagaggaagctcaccccgag

SEQ ID NO: 8977 - DNA, 76 bp, Homo sapiens
atatttacactacagatcaagatcttggagacaatagccgcaacctagttggcagaggaagctcaccccgaggaag

SEQ ID NO: 8978 - DNA, 76 bp, Homo sapiens
atcaagatcttggagacaatagccgcaacctagttggcagaggaagctcaccccgaggaagtctctcgccacggta

SEQ ID NO: 8979 - DNA, 74 bp, Homo sapiens
acaatagccgcaacctagttggcagaggaagctcaccccgaggaagtctctcgccacggtaagcgctatttaca

SEQ ID NO: 8980 - DNA, 74 bp, Homo sapiens
acctagttggcagaggaagctcaccccgaggaagtctctcgccacggtaagcgctatttacactgcaaagtata

SEQ ID NO: 8981 - DNA, 70 bp, Homo sapiens
ttaaaagcattccccttctttttaacttgagaattgttttcaacagatcccctgtaagcagcttacagat

SEQ ID NO: 8982 - DNA, 74 bp, Homo sapiens
ttccccttctttttaacttgagaattgttttcaacagatcccctgtaagcagcttacagattcgctatgatcaa

SEQ ID NO: 8983 - DNA, 76 bp, Homo sapiens
ttctttttaacttgagaattgttttcaacagatcccctgtaagcagcttacagattcgctatgatcaaccaggcaa

SEQ ID NO: 8984 - DNA, 79 bp, Homo sapiens
ttgagaattgttttcaacagatcccctgtaagcagcttacagattcgctatgatcaaccaggcaacagcagtttggaaa

SEQ ID NO: 8985 - DNA, 79 bp, Homo sapiens
gttttcaacagatcccctgtaagcagcttacagattcgctatgatcaaccaggcaacagcagtttggaaaatctgcctc

SEQ ID NO: 8986 - DNA, 84 bp, Homo sapiens
cctgtaagcagcttacagattcgctatgatcaaccaggcaacagcagtttggaaaatctgcctccagtagcagccagcatagaa

SEQ ID NO: 8987 - DNA, 82 bp, Homo sapiens
agcttacagattcgctatgatcaaccaggcaacagcagtttggaaaatctgcctccagtagcagccagcatagaacagcttt

SEQ ID NO: 8988 - DNA, 82 bp, Homo sapiens
agattcgctatgatcaaccaggcaacagcagtttggaaaatctgcctccagtagcagccagcatagaacagcttttggagag

SEQ ID NO: 8989 - DNA, 82 bp, Homo sapiens
atgatcaaccaggcaacagcagtttggaaaatctgcctccagtagcagccagcatagaacagcttttggagaggcagtggag

SEQ ID NO: 8990 - DNA, 81 bp, Homo sapiens
acagcagtttggaaaatctgcctccagtagcagccagcatagaacagcttttggagaggcagtggagtgaaggacagcaat

SEQ ID NO: 8991 - DNA, 79 bp, Homo sapiens
tttggaaaatctgcctccagtagcagccagcatagaacagcttttggagaggcagtggagtgaaggacagcaattttta

SEQ ID NO: 8992 - DNA, 80 bp, Homo sapiens
atctgcctccagtagcagccagcatagaacagcttttggagaggcagtggagtgaaggacagcaatttttactagaacag

SEQ ID NO: 8993 - DNA, 78 bp, Homo sapiens
tagcagccagcatagaacagcttttggagaggcagtggagtgaaggacagcaatttttactagaacagggtactccta

SEQ ID NO: 8994 - DNA, 75 bp, Homo sapiens
tagaacagcttttggagaggcagtggagtgaaggacagcaatttttactagaacagggtactcctagtgacagta

SEQ ID NO: 8995 - DNA, 74 bp, Homo sapiens
ttttggagaggcagtggagtgaaggacagcaatttttactagaacagggtactcctagtgacagtaagtattca

SEQ ID NO: 8996 - DNA, 72 bp, Homo sapiens
agtggagtgaaggacagcaatttttactagaacagggtactcctagtgacagtaagtattcattttcttata

SEQ ID NO: 8997 - DNA, 75 bp, Homo sapiens
gtgaaggacagcaatttttactagaacagggtactcctagtgacagtaagtattcattttcttatatgtgaatca

SEQ ID NO: 8998 - DNA, 75 bp, Homo sapiens
tatgtgtgtacttgtcattattaaaaactatccaaatgtgtggtagttttaggaatgctgaagtcattacaccaa

SEQ ID NO: 8999 - DNA, 72 bp, Homo sapiens
cttgtcattattaaaaactatccaaatgtgtggtagttttaggaatgctgaagtcattacaccaacttcaag

SEQ ID NO: 9000 - DNA, 70 bp, Homo sapiens
ttaaaaactatccaaatgtgtggtagttttaggaatgctgaagtcattacaccaacttcaagttgaaaac

SEQ ID NO: 9001 - DNA, 73 bp, Homo sapiens
tatccaaatgtgtggtagttttaggaatgctgaagtcattacaccaacttcaagttgaaaaccgaagattaga

SEQ ID NO: 9002 - DNA, 70 bp, Homo sapiens
tggtagttttaggaatgctgaagtcattacaccaacttcaagttgaaaaccgaagattagaggaacaaat

SEQ ID NO: 9003 - DNA, 69 bp, Homo sapiens
gttttaggaatgctgaagtcattacaccaacttcaagttgaaaaccgaagattagaggaacaaattaaa

SEQ ID NO: 9004 - DNA, 70 bp, Homo sapiens
ctgaagtcattacaccaacttcaagttgaaaaccgaagattagaggaacaaattaaaaacttgactgcca

SEQ ID NO: 9005 - DNA, 66 bp, Homo sapiens
acaccaacttcaagttgaaaaccgaagattagaggaacaaattaaaaacttgactgccaaaaagga

SEQ ID NO: 9006 - DNA, 67 bp, Homo sapiens
tcaagttgaaaaccgaagattagaggaacaaattaaaaacttgactgccaaaaaggaacggcttcag

SEQ ID NO: 9007 - DNA, 69 bp, Homo sapiens
aaccgaagattagaggaacaaattaaaaacttgactgccaaaaaggaacggcttcagttattgaatgca

SEQ ID NO: 9008 - DNA, 71 bp, Homo sapiens
attagaggaacaaattaaaaacttgactgccaaaaaggaacggcttcagttattgaatgcacagctttcag

SEQ ID NO: 9009 - DNA, 71 bp, Homo sapiens
aattaaaaacttgactgccaaaaaggaacggcttcagttattgaatgcacagctttcagtgccttttccaa

SEQ ID NO: 9010 - DNA, 75 bp, Homo sapiens
acttgactgccaaaaaggaacggcttcagttattgaatgcacagctttcagtgccttttccaacaataacagcaa

SEQ ID NO: 9011 - DNA, 73 bp, Homo sapiens
aaaaaggaacggcttcagttattgaatgcacagctttcagtgccttttccaacaataacagcaaatcctagtc

SEQ ID NO: 9012 - DNA, 79 bp, Homo sapiens
cttcagttattgaatgcacagctttcagtgccttttccaacaataacagcaaatcctagtccgtctcatcaaatacaca

SEQ ID NO: 9013 - DNA, 80 bp, Homo sapiens
tattgaatgcacagctttcagtgccttttccaacaataacagcaaatcctagtccgtctcatcaaatacacacattttca

SEQ ID NO: 9014 - DNA, 78 bp, Homo sapiens
tttcagtgccttttccaacaataacagcaaatcctagtccgtctcatcaaatacacacattttcagcacagactggta

SEQ ID NO: 9015 - DNA, 77 bp, Homo sapiens
ttttccaacaataacagcaaatcctagtccgtctcatcaaatacacacattttcagcacagactggtaagtgtgaaa

SEQ ID NO: 9016 - DNA, 76 bp, Homo sapiens
aataacagcaaatcctagtccgtctcatcaaatacacacattttcagcacagactggtaagtgtgaaaatatttat

SEQ ID NO: 9017 - DNA, 76 bp, Homo sapiens
agcaaatcctagtccgtctcatcaaatacacacattttcagcacagactggtaagtgtgaaaatatttattttgta

SEQ ID NO: 9018 - DNA, 75 bp, Homo sapiens
agtccgtctcatcaaatacacacattttcagcacagactggtaagtgtgaaaatatttattttgtatctaaggaa

SEQ ID NO: 9019 - DNA, 69 bp, Homo sapiens
cacataatgtaatttaatagggtaaataggtttctttttgtcttttattattctagctcctactactga

SEQ ID NO: 9020 - DNA, 70 bp, Homo sapiens
taatagggtaaataggtttctttttgtcttttattattctagctcctactactgattccttgaacagcag

SEQ ID NO: 9021 - DNA, 70 bp, Homo sapiens
aaataggtttctttttgtcttttattattctagctcctactactgattccttgaacagcagtaagagccc

SEQ ID NO: 9022 - DNA, 74 bp, Homo sapiens
ctttttgtcttttattattctagctcctactactgattccttgaacagcagtaagagccctcatataggaaaca

SEQ ID NO: 9023 - DNA, 74 bp, Homo sapiens
ttttattattctagctcctactactgattccttgaacagcagtaagagccctcatataggaaacagctttttac

SEQ ID NO: 9024 - DNA, 75 bp, Homo sapiens
attctagctcctactactgattccttgaacagcagtaagagccctcatataggaaacagctttttacctgataat

SEQ ID NO: 9025 - DNA, 76 bp, Homo sapiens
tactactgattccttgaacagcagtaagagccctcatataggaaacagctttttacctgataattctcttcctgta

SEQ ID NO: 9026 - DNA, 75 bp, Homo sapiens
ttccttgaacagcagtaagagccctcatataggaaacagctttttacctgataattctcttcctgtattaaatca

SEQ ID NO: 9027 - DNA, 72 bp, Homo sapiens
agcagtaagagccctcatataggaaacagctttttacctgataattctcttcctgtattaaatcaggtaatt

SEQ ID NO: 9028 - DNA, 71 bp, Homo sapiens
gccctcatataggaaacagctttttacctgataattctcttcctgtattaaatcaggtaatttttgtatgg

SEQ ID NO: 9029 - DNA, 69 bp, Homo sapiens
ggaaacagctttttacctgataattctcttcctgtattaaatcaggtaatttttgtatggttattttca

SEQ ID NO: 9030 - DNA, 72 bp, Homo sapiens
tacctgataattctcttcctgtattaaatcaggtaatttttgtatggttattttcatctatgttgatttact

SEQ ID NO: 9031 - DNA, 72 bp, Homo sapiens
taatgtccagtggacttagtttctcttctttcttacgctaggacttaacctccagtggacaaagtaccagca

SEQ ID NO: 9032 - DNA, 75 bp, Homo sapiens
ttagtttctcttctttcttacgctaggacttaacctccagtggacaaagtaccagcagctcatcagctctttcta

SEQ ID NO: 9033 - DNA, 74 bp, Homo sapiens
ctcttctttcttacgctaggacttaacctccagtggacaaagtaccagcagctcatcagctctttctaccccac

SEQ ID NO: 9034 - DNA, 76 bp, Homo sapiens
tcttacgctaggacttaacctccagtggacaaagtaccagcagctcatcagctctttctaccccacctcctgctgg

SEQ ID NO: 9035 - DNA, 78 bp, Homo sapiens
ttaacctccagtggacaaagtaccagcagctcatcagctctttctaccccacctcctgctgggcagagtccggctcaa

SEQ ID NO: 9036 - DNA, 79 bp, Homo sapiens
agtggacaaagtaccagcagctcatcagctctttctaccccacctcctgctgggcagagtccggctcaacaaggctcag

SEQ ID NO: 9037 - DNA, 79 bp, Homo sapiens
aaagtaccagcagctcatcagctctttctaccccacctcctgctgggcagagtccggctcaacaaggctcaggagtgag

SEQ ID NO: 9038 - DNA, 82 bp, Homo sapiens
tcatcagctctttctaccccacctcctgctgggcagagtccggctcaacaaggctcaggagtgagtggagttcagcaggtca

SEQ ID NO: 9039 - DNA, 80 bp, Homo sapiens
ccacctcctgctgggcagagtccggctcaacaaggctcaggagtgagtggagttcagcaggtcaatggcgtgacagtggg

SEQ ID NO: 9040 - DNA, 81 bp, Homo sapiens
ggcagagtccggctcaacaaggctcaggagtgagtggagttcagcaggtcaatggcgtgacagtgggggcactagctagtg

SEQ ID NO: 9041 - DNA, 79 bp, Homo sapiens
agtccggctcaacaaggctcaggagtgagtggagttcagcaggtcaatggcgtgacagtgggggcactagctagtggaa

SEQ ID NO: 9042 - DNA, 80 bp, Homo sapiens
aaggctcaggagtgagtggagttcagcaggtcaatggcgtgacagtgggggcactagctagtggaatgcagcctgtaact

SEQ ID NO: 9043 - DNA, 80 bp, Homo sapiens
agtgagtggagttcagcaggtcaatggcgtgacagtgggggcactagctagtggaatgcagcctgtaacttccaccattc

SEQ ID NO: 9044 - DNA, 79 bp, Homo sapiens
agttcagcaggtcaatggcgtgacagtgggggcactagctagtggaatgcagcctgtaacttccaccattcctgccgtg

SEQ ID NO: 9045 - DNA, 80 bp, Homo sapiens
aggtcaatggcgtgacagtgggggcactagctagtggaatgcagcctgtaacttccaccattcctgccgtgtctgcagtg

SEQ ID NO: 9046 - DNA, 77 bp, Homo sapiens
acagtgggggcactagctagtggaatgcagcctgtaacttccaccattcctgccgtgtctgcagtgggtggaataat

SEQ ID NO: 9047 - DNA, 79 bp, Homo sapiens
actagctagtggaatgcagcctgtaacttccaccattcctgccgtgtctgcagtgggtggaataattggagctttgcca

SEQ ID NO: 9048 - DNA, 78 bp, Homo sapiens
tagtggaatgcagcctgtaacttccaccattcctgccgtgtctgcagtgggtggaataattggagctttgccaggtaa

SEQ ID NO: 9049 - DNA, 75 bp, Homo sapiens
ctgtaacttccaccattcctgccgtgtctgcagtgggtggaataattggagctttgccaggtaaccaactggcaa

SEQ ID NO: 9050 - DNA, 74 bp, Homo sapiens
acttccaccattcctgccgtgtctgcagtgggtggaataattggagctttgccaggtaaccaactggcaattaa

SEQ ID NO: 9051 - DNA, 73 bp, Homo sapiens
cagtgggtggaataattggagctttgccaggtaaccaactggcaattaatggcattgtaggagctttaaatgg

SEQ ID NO: 9052 - DNA, 72 bp, Homo sapiens
gtggaataattggagctttgccaggtaaccaactggcaattaatggcattgtaggagctttaaatggggtta

SEQ ID NO: 9053 - DNA, 75 bp, Homo sapiens
aggtaaccaactggcaattaatggcattgtaggagctttaaatggggttatgcagactcctgtcacaatgtccca

SEQ ID NO: 9054 - DNA, 75 bp, Homo sapiens
ttaatggcattgtaggagctttaaatggggttatgcagactcctgtcacaatgtcccagaaccctacccctctca

SEQ ID NO: 9055 - DNA, 74 bp, Homo sapiens
tgtaggagctttaaatggggttatgcagactcctgtcacaatgtcccagaaccctacccctctcacccacacaa

SEQ ID NO: 9056 - DNA, 72 bp, Homo sapiens
ttaaatggggttatgcagactcctgtcacaatgtcccagaaccctacccctctcacccacacaaccgtacca

SEQ ID NO: 9057 - DNA, 76 bp, Homo sapiens
ttatgcagactcctgtcacaatgtcccagaaccctacccctctcacccacacaaccgtaccacctaatgcaacaca

SEQ ID NO: 9058 - DNA, 77 bp, Homo sapiens
tcacaatgtcccagaaccctacccctctcacccacacaaccgtaccacctaatgcaacacatccaatgccagctaca

SEQ ID NO: 9059 - DNA, 76 bp, Homo sapiens
tacccctctcacccacacaaccgtaccacctaatgcaacacatccaatgccagctacactgactaacaggtaagaa

SEQ ID NO: 9060 - DNA, 73 bp, Homo sapiens
acccacacaaccgtaccacctaatgcaacacatccaatgccagctacactgactaacaggtaagaaacttaag

SEQ ID NO: 9061 - DNA, 72 bp, Homo sapiens
aaccgtaccacctaatgcaacacatccaatgccagctacactgactaacaggtaagaaacttaagtatgttt

SEQ ID NO: 9062 - DNA, 71 bp, Homo sapiens
acctaatgcaacacatccaatgccagctacactgactaacaggtaagaaacttaagtatgttttgggtttt

SEQ ID NO: 9063 - DNA, 75 bp, Homo sapiens
tgcattagaggtgtgtagtaaaaagtaagaattgtaatcatttttcagtgcctcaggactaggattactttctga

SEQ ID NO: 9064 - DNA, 73 bp, Homo sapiens
tagaggtgtgtagtaaaaagtaagaattgtaatcatttttcagtgcctcaggactaggattactttctgacca

SEQ ID NO: 9065 - DNA, 72 bp, Homo sapiens
aaaaagtaagaattgtaatcatttttcagtgcctcaggactaggattactttctgaccagcaacgacaaata

SEQ ID NO: 9066 - DNA, 77 bp, Homo sapiens
taagaattgtaatcatttttcagtgcctcaggactaggattactttctgaccagcaacgacaaatacttattcatca

SEQ ID NO: 9067 - DNA, 76 bp, Homo sapiens
aatcatttttcagtgcctcaggactaggattactttctgaccagcaacgacaaatacttattcatcaacagcagtt

SEQ ID NO: 9068 - DNA, 76 bp, Homo sapiens
cctcaggactaggattactttctgaccagcaacgacaaatacttattcatcaacagcagtttcagcagttgttaaa

SEQ ID NO: 9069 - DNA, 76 bp, Homo sapiens
actaggattactttctgaccagcaacgacaaatacttattcatcaacagcagtttcagcagttgttaaattctcaa

SEQ ID NO: 9070 - DNA, 80 bp, Homo sapiens
tactttctgaccagcaacgacaaatacttattcatcaacagcagtttcagcagttgttaaattctcaacagctcacacca

SEQ ID NO: 9071 - DNA, 75 bp, Homo sapiens
aacgacaaatacttattcatcaacagcagtttcagcagttgttaaattctcaacagctcacaccagtaagttctt

SEQ ID NO: 9072 - DNA, 75 bp, Homo sapiens
caaatacttattcatcaacagcagtttcagcagttgttaaattctcaacagctcacaccagtaagttctttcttt

SEQ ID NO: 9073 - DNA, 78 bp, Homo sapiens
ttcatcaacagcagtttcagcagttgttaaattctcaacagctcacaccagtaagttctttcttttgataatatctta

SEQ ID NO: 9074 - DNA, 76 bp, Homo sapiens
gtttcagcagttgttaaattctcaacagctcacaccagtaagttctttcttttgataatatcttattaggagcatg

SEQ ID NO: 9075 - DNA, 77 bp, Homo sapiens
aatcaagattttactctaataatagcatgtgtagctgtctcatttccagaacatggttaaggaattttcagcacaaa

SEQ ID NO: 9076 - DNA, 78 bp, Homo sapiens
tttactctaataatagcatgtgtagctgtctcatttccagaacatggttaaggaattttcagcacaaattattgcttg

SEQ ID NO: 9077 - DNA, 80 bp, Homo sapiens
ataatagcatgtgtagctgtctcatttccagaacatggttaaggaattttcagcacaaattattgcttggagaccatgag

SEQ ID NO: 9078 - DNA, 77 bp, Homo sapiens
gtgtagctgtctcatttccagaacatggttaaggaattttcagcacaaattattgcttggagaccatgaggactaaa

SEQ ID NO: 9079 - DNA, 73 bp, Homo sapiens
ttccagaacatggttaaggaattttcagcacaaattattgcttggagaccatgaggactaaaggactgtactt

SEQ ID NO: 9080 - DNA, 71 bp, Homo sapiens
aacatggttaaggaattttcagcacaaattattgcttggagaccatgaggactaaaggactgtactttttc

SEQ ID NO: 9081 - DNA, 75 bp, Homo sapiens
aattttcagcacaaattattgcttggagaccatgaggactaaaggactgtactttttccttcatctgccaatgtc

SEQ ID NO: 9082 - DNA, 74 bp, Homo sapiens
caaattattgcttggagaccatgaggactaaaggactgtactttttccttcatctgccaatgtcgtgggctaaa

SEQ ID NO: 9083 - DNA, 74 bp, Homo sapiens
tattgcttggagaccatgaggactaaaggactgtactttttccttcatctgccaatgtcgtgggctaaagtttg

SEQ ID NO: 9084 - DNA, 72 bp, Homo sapiens
agaccatgaggactaaaggactgtactttttccttcatctgccaatgtcgtgggctaaagtttgttcattta

SEQ ID NO: 9085 - DNA, 71 bp, Homo sapiens
taaaggactgtactttttccttcatctgccaatgtcgtgggctaaagtttgttcatttacagggatcaaac

SEQ ID NO: 9086 - DNA, 69 bp, Homo sapiens
actttttccttcatctgccaatgtcgtgggctaaagtttgttcatttacagggatcaaacttaacgtag

SEQ ID NO: 9087 - DNA, 71 bp, Homo sapiens
ttcatctgccaatgtcgtgggctaaagtttgttcatttacagggatcaaacttaacgtaggtgaggatttt

SEQ ID NO: 9088 - DNA, 67 bp, Homo sapiens
aatgtcgtgggctaaagtttgttcatttacagggatcaaacttaacgtaggtgaggattttttggaa

SEQ ID NO: 9089 - DNA, 69 bp, Homo sapiens
taaagtttgttcatttacagggatcaaacttaacgtaggtgaggattttttggaagcctccgcacagct

SEQ ID NO: 9090 - DNA, 71 bp, Homo sapiens
aattccgtgcttgggaactcattttctctcacatgttttttgcctaaggaacaacatcaagcctttttgta

SEQ ID NO: 9091 - DNA, 74 bp, Homo sapiens
ttgggaactcattttctctcacatgttttttgcctaaggaacaacatcaagcctttttgtatcagttaatgcaa

SEQ ID NO: 9092 - DNA, 75 bp, Homo sapiens
attttctctcacatgttttttgcctaaggaacaacatcaagcctttttgtatcagttaatgcaacatcaccacca

SEQ ID NO: 9093 - DNA, 76 bp, Homo sapiens
atgttttttgcctaaggaacaacatcaagcctttttgtatcagttaatgcaacatcaccaccagcagcaccaccaa

SEQ ID NO: 9094 - DNA, 77 bp, Homo sapiens
ttttgcctaaggaacaacatcaagcctttttgtatcagttaatgcaacatcaccaccagcagcaccaccaacctgaa

SEQ ID NO: 9095 - DNA, 83 bp, Homo sapiens
aacaacatcaagcctttttgtatcagttaatgcaacatcaccaccagcagcaccaccaacctgaacttcagcagctgcagatc

SEQ ID NO: 9096 - DNA, 82 bp, Homo sapiens
ctttttgtatcagttaatgcaacatcaccaccagcagcaccaccaacctgaacttcagcagctgcagatccctggaccaaca

SEQ ID NO: 9097 - DNA, 84 bp, Homo sapiens
tgtatcagttaatgcaacatcaccaccagcagcaccaccaacctgaacttcagcagctgcagatccctggaccaacacaaatac

SEQ ID NO: 9098 - DNA, 79 bp, Homo sapiens
aacatcaccaccagcagcaccaccaacctgaacttcagcagctgcagatccctggaccaacacaaatacccataaacaa

SEQ ID NO: 9099 - DNA, 76 bp, Homo sapiens
accagcagcaccaccaacctgaacttcagcagctgcagatccctggaccaacacaaatacccataaacaaccttct

SEQ ID NO: 9100 - DNA, 75 bp, Homo sapiens
accaccaacctgaacttcagcagctgcagatccctggaccaacacaaatacccataaacaaccttcttgcaggta

SEQ ID NO: 9101 - DNA, 77 bp, Homo sapiens
acctgaacttcagcagctgcagatccctggaccaacacaaatacccataaacaaccttcttgcaggtacacaggcac

SEQ ID NO: 9102 - DNA, 75 bp, Homo sapiens
agctgcagatccctggaccaacacaaatacccataaacaaccttcttgcaggtacacaggcacccccacttcaca

SEQ ID NO: 9103 - DNA, 73 bp, Homo sapiens
atccctggaccaacacaaatacccataaacaaccttcttgcaggtacacaggcacccccacttcacacagcta

SEQ ID NO: 9104 - DNA, 71 bp, Homo sapiens
aacacaaatacccataaacaaccttcttgcaggtacacaggcacccccacttcacacagctaccaccaacc

SEQ ID NO: 9105 - DNA, 73 bp, Homo sapiens
atacccataaacaaccttcttgcaggtacacaggcacccccacttcacacagctaccaccaacccatttctca

SEQ ID NO: 9106 - DNA, 76 bp, Homo sapiens
aaccttcttgcaggtacacaggcacccccacttcacacagctaccaccaacccatttctcaccatccatggagata

SEQ ID NO: 9107 - DNA, 78 bp, Homo sapiens
aggtacacaggcacccccacttcacacagctaccaccaacccatttctcaccatccatggagataatgcaagtcagaa

SEQ ID NO: 9108 - DNA, 77 bp, Homo sapiens
acccccacttcacacagctaccaccaacccatttctcaccatccatggagataatgcaagtcagaaagtagcagtaa

SEQ ID NO: 9109 - DNA, 78 bp, Homo sapiens
acttcacacagctaccaccaacccatttctcaccatccatggagataatgcaagtcagaaagtagcagtaagtatatt

SEQ ID NO: 9110 - DNA, 76 bp, Homo sapiens
taccaccaacccatttctcaccatccatggagataatgcaagtcagaaagtagcagtaagtatattttccttacta

SEQ ID NO: 9111 - DNA, 78 bp, Homo sapiens
atttctcaccatccatggagataatgcaagtcagaaagtagcagtaagtatattttccttactacatctaatgaaaca

SEQ ID NO: 9112 - DNA, 74 bp, Homo sapiens
attatcaaaagttgatttagctaacgcatctgctcttttgtttacctgcagagacttagtgataaaactgggcc

SEQ ID NO: 9113 - DNA, 76 bp, Homo sapiens
atttagctaacgcatctgctcttttgtttacctgcagagacttagtgataaaactgggcctgtagctcaagagaaa

SEQ ID NO: 9114 - DNA, 77 bp, Homo sapiens
taacgcatctgctcttttgtttacctgcagagacttagtgataaaactgggcctgtagctcaagagaaaagttgaca

SEQ ID NO: 9115 - DNA, 74 bp, Homo sapiens
ttttgtttacctgcagagacttagtgataaaactgggcctgtagctcaagagaaaagttgacacctgagaaaca

SEQ ID NO: 9116 - DNA, 76 bp, Homo sapiens
tttacctgcagagacttagtgataaaactgggcctgtagctcaagagaaaagttgacacctgagaaacatctagaa

SEQ ID NO: 9117 - DNA, 75 bp, Homo sapiens
agacttagtgataaaactgggcctgtagctcaagagaaaagttgacacctgagaaacatctagaaattgcctatc

SEQ ID NO: 9118 - DNA, 76 bp, Homo sapiens
ataaaactgggcctgtagctcaagagaaaagttgacacctgagaaacatctagaaattgcctatcctgctgttcta

SEQ ID NO: 9119 - DNA, 82 bp, Homo sapiens
tgtagctcaagagaaaagttgacacctgagaaacatctagaaattgcctatcctgctgttctagcacttcatctggctgcct

SEQ ID NO: 9120 - DNA, 80 bp, Homo sapiens
aagagaaaagttgacacctgagaaacatctagaaattgcctatcctgctgttctagcacttcatctggctgcctttgcag

SEQ ID NO: 9121 - DNA, 80 bp, Homo sapiens
acacctgagaaacatctagaaattgcctatcctgctgttctagcacttcatctggctgcctttgcagtccttttactaca

SEQ ID NO: 9122 - DNA, 81 bp, Homo sapiens
aaacatctagaaattgcctatcctgctgttctagcacttcatctggctgcctttgcagtccttttactacagctatgaaga

SEQ ID NO: 9123 - DNA, 81 bp, Homo sapiens
tagaaattgcctatcctgctgttctagcacttcatctggctgcctttgcagtccttttactacagctatgaagaaacgcaa

SEQ ID NO: 9124 - DNA, 80 bp, Homo sapiens
tagcacttcatctggctgcctttgcagtccttttactacagctatgaagaaacgcaacaagaaactcaatgcacaacaaa

SEQ ID NO: 9125 - DNA, 77 bp, Homo sapiens
atctggctgcctttgcagtccttttactacagctatgaagaaacgcaacaagaaactcaatgcacaacaaaggatta

SEQ ID NO: 9126 - DNA, 77 bp, Homo sapiens
tttgcagtccttttactacagctatgaagaaacgcaacaagaaactcaatgcacaacaaaggattaattgctgcaag

SEQ ID NO: 9127 - DNA, 77 bp, Homo sapiens
ttttactacagctatgaagaaacgcaacaagaaactcaatgcacaacaaaggattaattgctgcaaggacattcttg

SEQ ID NO: 9128 - DNA, 76 bp, Homo sapiens
agctatgaagaaacgcaacaagaaactcaatgcacaacaaaggattaattgctgcaaggacattcttgtaaggctt

SEQ ID NO: 9129 - DNA, 75 bp, Homo sapiens
aagaaacgcaacaagaaactcaatgcacaacaaaggattaattgctgcaaggacattcttgtaaggctttgatta

SEQ ID NO: 9130 - DNA, 74 bp, Homo sapiens
caagaaactcaatgcacaacaaaggattaattgctgcaaggacattcttgtaaggctttgattagttttcttgt

SEQ ID NO: 9131 - DNA, 76 bp, Homo sapiens
aatgcacaacaaaggattaattgctgcaaggacattcttgtaaggctttgattagttttcttgttgctttgttgca

SEQ ID NO: 9132 - DNA, 74 bp, Homo sapiens
acaaaggattaattgctgcaaggacattcttgtaaggctttgattagttttcttgttgctttgttgcactgaaa

SEQ ID NO: 9133 - DNA, 75 bp, Homo sapiens
aattgctgcaaggacattcttgtaaggctttgattagttttcttgttgctttgttgcactgaaatggaattccca

SEQ ID NO: 9134 - DNA, 73 bp, Homo sapiens
aggacattcttgtaaggctttgattagttttcttgttgctttgttgcactgaaatggaattcccatgccccta

SEQ ID NO: 9135 - DNA, 71 bp, Homo sapiens
tgtaaggctttgattagttttcttgttgctttgttgcactgaaatggaattcccatgcccctaccccttac

SEQ ID NO: 9136 - DNA, 67 bp, Homo sapiens
tagttttcttgttgctttgttgcactgaaatggaattcccatgcccctaccccttaccccagttttt

SEQ ID NO: 9137 - DNA, 70 bp, Homo sapiens
ttgttgctttgttgcactgaaatggaattcccatgcccctaccccttaccccagttttttgaacatggaa

SEQ ID NO: 9138 - DNA, 67 bp, Homo sapiens
ttgcactgaaatggaattcccatgcccctaccccttaccccagttttttgaacatggaaagaaaatt

SEQ ID NO: 9139 - DNA, 62 bp, Homo sapiens
cccatgcccctaccccttaccccagttttttgaacatggaaagaaaatttaataacttttta

SEQ ID NO: 9140 - DNA, 62 bp, Homo sapiens
cccttaccccagttttttgaacatggaaagaaaatttaataactttttaaagtgacataatt

SEQ ID NO: 9141 - DNA, 72 bp, Homo sapiens
actttttaaagtgacataatttacatgcaatatgtttatcaactcaagaatttaatatagttggtacacaac

SEQ ID NO: 9142 - DNA, 73 bp, Homo sapiens
agtgacataatttacatgcaatatgtttatcaactcaagaatttaatatagttggtacacaactagttttgtt

SEQ ID NO: 9143 - DNA, 71 bp, Homo sapiens
atttacatgcaatatgtttatcaactcaagaatttaatatagttggtacacaactagttttgtttataaat

SEQ ID NO: 9144 - DNA, 71 bp, Homo sapiens
caactcaagaatttaatatagttggtacacaactagttttgtttataaattggagatgcaaatagcaaaac

SEQ ID NO: 9145 - DNA, 71 bp, Homo sapiens
tttaatatagttggtacacaactagttttgtttataaattggagatgcaaatagcaaaactaaatacttgc

SEQ ID NO: 9146 - DNA, 72 bp, Homo sapiens
gttggtacacaactagttttgtttataaattggagatgcaaatagcaaaactaaatacttgctccatttaca

SEQ ID NO: 9147 - DNA, 71 bp, Homo sapiens
cacaactagttttgtttataaattggagatgcaaatagcaaaactaaatacttgctccatttacaaactac

SEQ ID NO: 9148 - DNA, 72 bp, Homo sapiens
gtttataaattggagatgcaaatagcaaaactaaatacttgctccatttacaaactacttgattttattgta

SEQ ID NO: 9149 - DNA, 73 bp, Homo sapiens
ggagatgcaaatagcaaaactaaatacttgctccatttacaaactacttgattttattgtacaagttgaaata

SEQ ID NO: 9150 - DNA, 73 bp, Homo sapiens
gcaaatagcaaaactaaatacttgctccatttacaaactacttgattttattgtacaagttgaaatatgctct

SEQ ID NO: 9151 - DNA, 70 bp, Homo sapiens
ctaaatacttgctccatttacaaactacttgattttattgtacaagttgaaatatgctcttttgtttggg

SEQ ID NO: 9152 - DNA, 72 bp, Homo sapiens
gctccatttacaaactacttgattttattgtacaagttgaaatatgctcttttgtttgggttacagtatgct

SEQ ID NO: 9153 - DNA, 74 bp, Homo sapiens
caaactacttgattttattgtacaagttgaaatatgctcttttgtttgggttacagtatgcttgctctaagtca

SEQ ID NO: 9154 - DNA, 73 bp, Homo sapiens
gattttattgtacaagttgaaatatgctcttttgtttgggttacagtatgcttgctctaagtcaaattccaag

SEQ ID NO: 9155 - DNA, 72 bp, Homo sapiens
gtacaagttgaaatatgctcttttgtttgggttacagtatgcttgctctaagtcaaattccaaggaactaat

SEQ ID NO: 9156 - DNA, 71 bp, Homo sapiens
aaatatgctcttttgtttgggttacagtatgcttgctctaagtcaaattccaaggaactaatttcttctcc

SEQ ID NO: 9157 - DNA, 72 bp, Homo sapiens
ttttgtttgggttacagtatgcttgctctaagtcaaattccaaggaactaatttcttctcctggagttgcat

SEQ ID NO: 9158 - DNA, 77 bp, Homo sapiens
ttacagtatgcttgctctaagtcaaattccaaggaactaatttcttctcctggagttgcattgattcagtattacaa

SEQ ID NO: 9159 - DNA, 77 bp, Homo sapiens
cttgctctaagtcaaattccaaggaactaatttcttctcctggagttgcattgattcagtattacaaatatatagca

SEQ ID NO: 9160 - DNA, 78 bp, Homo sapiens
tttcttctcctggagttgcattgattcagtattacaaatatatagcacatcacctgggacttggcaatctttgttaaa

SEQ ID NO: 9161 - DNA, 76 bp, Homo sapiens
ctcctggagttgcattgattcagtattacaaatatatagcacatcacctgggacttggcaatctttgttaaaaaaa

SEQ ID NO: 9162 - DNA, 73 bp, Homo sapiens
gcattgattcagtattacaaatatatagcacatcacctgggacttggcaatctttgttaaaaaaaaatttcct

SEQ ID NO: 9163 - DNA, 70 bp, Homo sapiens
ttacaaatatatagcacatcacctgggacttggcaatctttgttaaaaaaaaatttcctttctaatggga

SEQ ID NO: 9164 - DNA, 70 bp, Homo sapiens
atatagcacatcacctgggacttggcaatctttgttaaaaaaaaatttcctttctaatgggatttggcca

SEQ ID NO: 9165 - DNA, 65 bp, Homo sapiens
tgttaaaaaaaaatttcctttctaatgggatttggccaattttggtaatgaagttaggatggtaa

SEQ ID NO: 9166 - DNA, 72 bp, Homo sapiens
aaatttcctttctaatgggatttggccaattttggtaatgaagttaggatggtaatgtctgcatctgctaaa

SEQ ID NO: 9167 - DNA, 72 bp, Homo sapiens
tttctaatgggatttggccaattttggtaatgaagttaggatggtaatgtctgcatctgctaaaggtaattt

SEQ ID NO: 9168 - DNA, 73 bp, Homo sapiens
tgggatttggccaattttggtaatgaagttaggatggtaatgtctgcatctgctaaaggtaattttcttttga

SEQ ID NO: 9169 - DNA, 72 bp, Homo sapiens
ccaattttggtaatgaagttaggatggtaatgtctgcatctgctaaaggtaattttcttttgagaattgctt

SEQ ID NO: 9170 - DNA, 73 bp, Homo sapiens
gaagttaggatggtaatgtctgcatctgctaaaggtaattttcttttgagaattgctttctttagtgttaaga

SEQ ID NO: 9171 - DNA, 74 bp, Homo sapiens
ggatggtaatgtctgcatctgctaaaggtaattttcttttgagaattgctttctttagtgttaagacctactca

SEQ ID NO: 9172 - DNA, 69 bp, Homo sapiens
gctaaaggtaattttcttttgagaattgctttctttagtgttaagacctactcatattttgaagaaatc

SEQ ID NO: 9173 - DNA, 72 bp, Homo sapiens
tcttttgagaattgctttctttagtgttaagacctactcatattttgaagaaatcttgagttaagtgagttc

SEQ ID NO: 9174 - DNA, 76 bp, Homo sapiens
taagacctactcatattttgaagaaatcttgagttaagtgagttctgaggctgctgggggaaccagatcaattcaa

SEQ ID NO: 9175 - DNA, 74 bp, Homo sapiens
tattttgaagaaatcttgagttaagtgagttctgaggctgctgggggaaccagatcaattcaaagctaaatact

SEQ ID NO: 9176 - DNA, 74 bp, Homo sapiens
aagaaatcttgagttaagtgagttctgaggctgctgggggaaccagatcaattcaaagctaaatacttctttca

SEQ ID NO: 9177 - DNA, 73 bp, Homo sapiens
agttctgaggctgctgggggaaccagatcaattcaaagctaaatacttctttcagaaaggggccactgtggaa

SEQ ID NO: 9178 - DNA, 71 bp, Homo sapiens
ctgggggaaccagatcaattcaaagctaaatacttctttcagaaaggggccactgtggaaagtgctggtgg

SEQ ID NO: 9179 - DNA, 71 bp, Homo sapiens
aaccagatcaattcaaagctaaatacttctttcagaaaggggccactgtggaaagtgctggtggggtttgc

SEQ ID NO: 9180 - DNA, 71 bp, Homo sapiens
attcaaagctaaatacttctttcagaaaggggccactgtggaaagtgctggtggggtttgcccttgatcaa

SEQ ID NO: 9181 - DNA, 72 bp, Homo sapiens
taaatacttctttcagaaaggggccactgtggaaagtgctggtggggtttgcccttgatcaagtgcctccat

SEQ ID NO: 9182 - DNA, 75 bp, Homo sapiens
ctttcagaaaggggccactgtggaaagtgctggtggggtttgcccttgatcaagtgcctccattgtgctgcaagg

SEQ ID NO: 9183 - DNA, 82 bp, Homo sapiens
gggtttgcccttgatcaagtgcctccattgtgctgcaagggctgtagacagcagggtgggacagtcagtcctccgagcagca

SEQ ID NO: 9184 - DNA, 84 bp, Homo sapiens
ttgatcaagtgcctccattgtgctgcaagggctgtagacagcagggtgggacagtcagtcctccgagcagcaggaatcatcccg

SEQ ID NO: 9185 - DNA, 82 bp, Homo sapiens
aagtgcctccattgtgctgcaagggctgtagacagcagggtgggacagtcagtcctccgagcagcaggaatcatcccgtcac

SEQ ID NO: 9186 - DNA, 83 bp, Homo sapiens
attgtgctgcaagggctgtagacagcagggtgggacagtcagtcctccgagcagcaggaatcatcccgtcacctgcagccttc

SEQ ID NO: 9187 - DNA, 80 bp, Homo sapiens
aagggctgtagacagcagggtgggacagtcagtcctccgagcagcaggaatcatcccgtcacctgcagccttcccatgct

SEQ ID NO: 9188 - DNA, 78 bp, Homo sapiens
acagtcagtcctccgagcagcaggaatcatcccgtcacctgcagccttcccatgcttccgcctttattcagaactttc

SEQ ID NO: 9189 - DNA, 79 bp, Homo sapiens
agtcctccgagcagcaggaatcatcccgtcacctgcagccttcccatgcttccgcctttattcagaactttctgtgcca

SEQ ID NO: 9190 - DNA, 81 bp, Homo sapiens
agcaggaatcatcccgtcacctgcagccttcccatgcttccgcctttattcagaactttctgtgccactgtagatagctca

SEQ ID NO: 9191 - DNA, 78 bp, Homo sapiens
atcccgtcacctgcagccttcccatgcttccgcctttattcagaactttctgtgccactgtagatagctcaggcaaaa

SEQ ID NO: 9192 - DNA, 77 bp, Homo sapiens
acctgcagccttcccatgcttccgcctttattcagaactttctgtgccactgtagatagctcaggcaaaactattac

SEQ ID NO: 9193 - DNA, 76 bp, Homo sapiens
catgcttccgcctttattcagaactttctgtgccactgtagatagctcaggcaaaactattacctgggtatttatc

SEQ ID NO: 9194 - DNA, 75 bp, Homo sapiens
cctttattcagaactttctgtgccactgtagatagctcaggcaaaactattacctgggtatttatccactaatga

SEQ ID NO: 9195 - DNA, 76 bp, Homo sapiens
gaactttctgtgccactgtagatagctcaggcaaaactattacctgggtatttatccactaatgagtcacaagaaa

SEQ ID NO: 9196 - DNA, 76 bp, Homo sapiens
ttctgtgccactgtagatagctcaggcaaaactattacctgggtatttatccactaatgagtcacaagaaaaggag

SEQ ID NO: 9197 - DNA, 74 bp, Homo sapiens
tagatagctcaggcaaaactattacctgggtatttatccactaatgagtcacaagaaaaggagtggatttggta

SEQ ID NO: 9198 - DNA, 70 bp, Homo sapiens
aggcaaaactattacctgggtatttatccactaatgagtcacaagaaaaggagtggatttggtaagaata

SEQ ID NO: 9199 - DNA, 71 bp, Homo sapiens
actattacctgggtatttatccactaatgagtcacaagaaaaggagtggatttggtaagaatagagatttg

SEQ ID NO: 9200 - DNA, 70 bp, Homo sapiens
gggtatttatccactaatgagtcacaagaaaaggagtggatttggtaagaatagagatttgttttattta

SEQ ID NO: 9201 - DNA, 69 bp, Homo sapiens
ccactaatgagtcacaagaaaaggagtggatttggtaagaatagagatttgttttatttaaaccacttc

SEQ ID NO: 9202 - DNA, 68 bp, Homo sapiens
caagaaaaggagtggatttggtaagaatagagatttgttttatttaaaccacttcccattactgacca

SEQ ID NO: 9203 - DNA, 69 bp, Homo sapiens
ggtaagaatagagatttgttttatttaaaccacttcccattactgaccattaaaagctcaccactagag

SEQ ID NO: 9204 - DNA, 69 bp, Homo sapiens
gatttgttttatttaaaccacttcccattactgaccattaaaagctcaccactagagttcctgaaacag

SEQ ID NO: 9205 - DNA, 69 bp, Homo sapiens
ttttatttaaaccacttcccattactgaccattaaaagctcaccactagagttcctgaaacaggtgaaa

SEQ ID NO: 9206 - DNA, 72 bp, Homo sapiens
acttcccattactgaccattaaaagctcaccactagagttcctgaaacaggtgaaacctgtatgacagccct

SEQ ID NO: 9207 - DNA, 72 bp, Homo sapiens
attactgaccattaaaagctcaccactagagttcctgaaacaggtgaaacctgtatgacagcccttccactt

SEQ ID NO: 9208 - DNA, 72 bp, Homo sapiens
attaaaagctcaccactagagttcctgaaacaggtgaaacctgtatgacagcccttccactttggggagcca

SEQ ID NO: 9209 - DNA, 74 bp, Homo sapiens
actagagttcctgaaacaggtgaaacctgtatgacagcccttccactttggggagccacgcttttgatgtgaca

SEQ ID NO: 9210 - DNA, 73 bp, Homo sapiens
agttcctgaaacaggtgaaacctgtatgacagcccttccactttggggagccacgcttttgatgtgacagtac

SEQ ID NO: 9211 - DNA, 76 bp, Homo sapiens
acaggtgaaacctgtatgacagcccttccactttggggagccacgcttttgatgtgacagtaccgcagagtgattc

SEQ ID NO: 9212 - DNA, 79 bp, Homo sapiens
tatgacagcccttccactttggggagccacgcttttgatgtgacagtaccgcagagtgattcccccactgaggatgtca

SEQ ID NO: 9213 - DNA, 79 bp, Homo sapiens
ttccactttggggagccacgcttttgatgtgacagtaccgcagagtgattcccccactgaggatgtcatcatcaaactc

SEQ ID NO: 9214 - DNA, 79 bp, Homo sapiens
gggagccacgcttttgatgtgacagtaccgcagagtgattcccccactgaggatgtcatcatcaaactcttctttggtg

SEQ ID NO: 9215 - DNA, 79 bp, Homo sapiens
cttttgatgtgacagtaccgcagagtgattcccccactgaggatgtcatcatcaaactcttctttggtgtgtgaattat

SEQ ID NO: 9216 - DNA, 79 bp, Homo sapiens
tgacagtaccgcagagtgattcccccactgaggatgtcatcatcaaactcttctttggtgtgtgaattattagtggaaa

SEQ ID NO: 9217 - DNA, 77 bp, Homo sapiens
taccgcagagtgattcccccactgaggatgtcatcatcaaactcttctttggtgtgtgaattattagtggaaaagac

SEQ ID NO: 9218 - DNA, 76 bp, Homo sapiens
tcccccactgaggatgtcatcatcaaactcttctttggtgtgtgaattattagtggaaaagacccagctgtaatta

SEQ ID NO: 9219 - DNA, 75 bp, Homo sapiens
aggatgtcatcatcaaactcttctttggtgtgtgaattattagtggaaaagacccagctgtaattagacctccac

SEQ ID NO: 9220 - DNA, 72 bp, Homo sapiens
atcaaactcttctttggtgtgtgaattattagtggaaaagacccagctgtaattagacctccactgtgtact

SEQ ID NO: 9221 - DNA, 74 bp, Homo sapiens
tgtgaattattagtggaaaagacccagctgtaattagacctccactgtgtacttagctggaagaacatgttaat

SEQ ID NO: 9222 - DNA, 76 bp, Homo sapiens
tattagtggaaaagacccagctgtaattagacctccactgtgtacttagctggaagaacatgttaattctgcaata

SEQ ID NO: 9223 - DNA, 74 bp, Homo sapiens
ctgtaattagacctccactgtgtacttagctggaagaacatgttaattctgcaatatgtttcttggttaaacat

SEQ ID NO: 9224 - DNA, 76 bp, Homo sapiens
tccactgtgtacttagctggaagaacatgttaattctgcaatatgtttcttggttaaacattgcacagttcttacc

SEQ ID NO: 9225 - DNA, 75 bp, Homo sapiens
gtgtacttagctggaagaacatgttaattctgcaatatgtttcttggttaaacattgcacagttcttacctcatt

SEQ ID NO: 9226 - DNA, 72 bp, Homo sapiens
gcaatatgtttcttggttaaacattgcacagttcttacctcatttctgtaaataaagttttgtgaatctgtt

SEQ ID NO: 9227 - DNA, 72 bp, Homo sapiens
cttggttaaacattgcacagttcttacctcatttctgtaaataaagttttgtgaatctgttttgtattgtga

SEQ ID NO: 9228 - DNA, 75 bp, Homo sapiens
cattgcacagttcttacctcatttctgtaaataaagttttgtgaatctgttttgtattgtgacaaattcataaga

SEQ ID NO: 9229 - DNA, 75 bp, Homo sapiens
tcttacctcatttctgtaaataaagttttgtgaatctgttttgtattgtgacaaattcataagataacattgata

SEQ ID NO: 9230 - DNA, 75 bp, Homo sapiens
tctgtaaataaagttttgtgaatctgttttgtattgtgacaaattcataagataacattgatattttgatttgta

SEQ ID NO: 9231 - DNA, 74 bp, Homo sapiens
taaagttttgtgaatctgttttgtattgtgacaaattcataagataacattgatattttgatttgtaatatttc

SEQ ID NO: 9232 - DNA, 77 bp, Homo sapiens
tgtgaatctgttttgtattgtgacaaattcataagataacattgatattttgatttgtaatatttctaattggtaga

SEQ ID NO: 9233 - DNA, 75 bp, Homo sapiens
ttgtattgtgacaaattcataagataacattgatattttgatttgtaatatttctaattggtagatttaattgaa

SEQ ID NO: 9234 - DNA, 73 bp, Homo sapiens
gtgacaaattcataagataacattgatattttgatttgtaatatttctaattggtagatttaattgaaaagta

SEQ ID NO: 9235 - DNA, 70 bp, Homo sapiens
cataagataacattgatattttgatttgtaatatttctaattggtagatttaattgaaaagtaaaattaa

SEQ ID NO: 9236 - DNA, 67 bp, Homo sapiens
cattgatattttgatttgtaatatttctaattggtagatttaattgaaaagtaaaattaatttattt

SEQ ID NO: 9237 - DNA, 64 bp, Homo sapiens
attaatttatttttatatgttcaggggaattttaaagtcaaatcttttgtagataatttaaaaa

SEQ ID NO: 9238 - DNA, 66 bp, Homo sapiens
ttttatatgttcaggggaattttaaagtcaaatcttttgtagataatttaaaaaatcagtgtggtt

SEQ ID NO: 9239 - DNA, 65 bp, Homo sapiens
atgttcaggggaattttaaagtcaaatcttttgtagataatttaaaaaatcagtgtggtttattt

SEQ ID NO: 9240 - DNA, 64 bp, Homo sapiens
ggaattttaaagtcaaatcttttgtagataatttaaaaaatcagtgtggtttattttacttatt

SEQ ID NO: 9241 - DNA, 64 bp, Homo sapiens
atttaaaaaatcagtgtggtttattttacttatttaacccactggttgttattctgtaacagtt

SEQ ID NO: 9242 - DNA, 67 bp, Homo sapiens
aatcagtgtggtttattttacttatttaacccactggttgttattctgtaacagtttgtataaatgg

SEQ ID NO: 9243 - DNA, 65 bp, Homo sapiens
gtggtttattttacttatttaacccactggttgttattctgtaacagtttgtataaatggtaaat

SEQ ID NO: 9244 - DNA, 68 bp, Homo sapiens
ttacttatttaacccactggttgttattctgtaacagtttgtataaatggtaaattttgaatgtgttg

SEQ ID NO: 9245 - DNA, 67 bp, Homo sapiens
acccactggttgttattctgtaacagtttgtataaatggtaaattttgaatgtgttgttattttacc

SEQ ID NO: 9246 - DNA, 70 bp, Homo sapiens
tattctgtaacagtttgtataaatggtaaattttgaatgtgttgttattttacctagatgtaaaattcca

SEQ ID NO: 9247 - DNA, 69 bp, Homo sapiens
aatggtaaattttgaatgtgttgttattttacctagatgtaaaattccacatgtattaaaatgtacaaa

SEQ ID NO: 9248 - DNA, 69 bp, Homo sapiens
attttgaatgtgttgttattttacctagatgtaaaattccacatgtattaaaatgtacaaaatgttttg

SEQ ID NO: 9249 - DNA, 68 bp, Homo sapiens
gtgttgttattttacctagatgtaaaattccacatgtattaaaatgtacaaaatgttttgttaataaa

SEQ ID NO: 9250 - DNA, 66 bp, Homo sapiens
attttacctagatgtaaaattccacatgtattaaaatgtacaaaatgttttgttaataaaatttaa

SEQ ID NO: 9251 - DNA, 68 bp, Homo sapiens
gatgtaaaattccacatgtattaaaatgtacaaaatgttttgttaataaaatttaataatgtttataa

SEQ ID NO: 9252 - DNA, 70 bp, Homo sapiens
catgtattaaaatgtacaaaatgttttgttaataaaatttaataatgtttataactccgtgccattctca

SEQ ID NO: 9253 - DNA, 70 bp, Homo sapiens
atgtacaaaatgttttgttaataaaatttaataatgtttataactccgtgccattctcatttggagagga

SEQ ID NO: 9254 - DNA, 69 bp, Homo sapiens
aatgttttgttaataaaatttaataatgtttataactccgtgccattctcatttggagaggatggaggg

SEQ ID NO: 9255 - DNA, 75 bp, Homo sapiens
agtcccgggaagcccctcggcagccagccaagggccctgcgaggatgtggatggcgcggatggcgcggcctccac

SEQ ID NO: 9256 - DNA, 78 bp, Homo sapiens
aagcccctcggcagccagccaagggccctgcgaggatgtggatggcgcggatggcgcggcctccacctgcgggcagtg

SEQ ID NO: 9257 - DNA, 81 bp, Homo sapiens
agccagccaagggccctgcgaggatgtggatggcgcggatggcgcggcctccacctgcgggcagtggagagagcggcgaga

SEQ ID NO: 9258 - DNA, 80 bp, Homo sapiens
ggccctgcgaggatgtggatggcgcggatggcgcggcctccacctgcgggcagtggagagagcggcgagaggaagaatat

SEQ ID NO: 9259 - DNA, 78 bp, Homo sapiens
aggatgtggatggcgcggatggcgcggcctccacctgcgggcagtggagagagcggcgagaggaagaatattccccgc

SEQ ID NO: 9260 - DNA, 78 bp, Homo sapiens
tggatggcgcggatggcgcggcctccacctgcgggcagtggagagagcggcgagaggaagaatattccccgcgagccg

SEQ ID NO: 9261 - DNA, 74 bp, Homo sapiens
atggcgcggcctccacctgcgggcagtggagagagcggcgagaggaagaatattccccgcgagccgggataagg

SEQ ID NO: 9262 - DNA, 72 bp, Homo sapiens
tccacctgcgggcagtggagagagcggcgagaggaagaatattccccgcgagccgggataaggggccccttc

SEQ ID NO: 9263 - DNA, 71 bp, Homo sapiens
cagtggagagagcggcgagaggaagaatattccccgcgagccgggataaggggccccttcggctcggttga

SEQ ID NO: 9264 - DNA, 69 bp, Homo sapiens
agagagcggcgagaggaagaatattccccgcgagccgggataaggggccccttcggctcggttgaccca

SEQ ID NO: 9265 - DNA, 68 bp, Homo sapiens
aggaagaatattccccgcgagccgggataaggggccccttcggctcggttgacccaggtcagatcctc

SEQ ID NO: 9266 - DNA, 67 bp, Homo sapiens
aatattccccgcgagccgggataaggggccccttcggctcggttgacccaggtcagatcctcccgcc

SEQ ID NO: 9267 - DNA, 66 bp, Homo sapiens
agccgggataaggggccccttcggctcggttgacccaggtcagatcctcccgccgaccttcggccc

SEQ ID NO: 9268 - DNA, 68 bp, Homo sapiens
gggccccttcggctcggttgacccaggtcagatcctcccgccgaccttcggcccgccctctacaggcg

SEQ ID NO: 9269 - DNA, 70 bp, Homo sapiens
ttcggctcggttgacccaggtcagatcctcccgccgaccttcggcccgccctctacaggcggcccagttc

SEQ ID NO: 9270 - DNA, 68 bp, Homo sapiens
ggttgacccaggtcagatcctcccgccgaccttcggcccgccctctacaggcggcccagttcttcccc

SEQ ID NO: 9271 - DNA, 71 bp, Homo sapiens
ggtcagatcctcccgccgaccttcggcccgccctctacaggcggcccagttcttcccctgctcggctgccc

SEQ ID NO: 9272 - DNA, 70 bp, Homo sapiens
tcccgccgaccttcggcccgccctctacaggcggcccagttcttcccctgctcggctgcccctgcccgcc

SEQ ID NO: 9273 - DNA, 70 bp, Homo sapiens
cttcggcccgccctctacaggcggcccagttcttcccctgctcggctgcccctgcccgcccctcgaggga

SEQ ID NO: 9274 - DNA, 72 bp, Homo sapiens
cctctacaggcggcccagttcttcccctgctcggctgcccctgcccgcccctcgagggagcgcccgtagcca

SEQ ID NO: 9275 - DNA, 70 bp, Homo sapiens
ccagttcttcccctgctcggctgcccctgcccgcccctcgagggagcgcccgtagccagcgcccccgtaa

SEQ ID NO: 9276 - DNA, 69 bp, Homo sapiens
ccctgctcggctgcccctgcccgcccctcgagggagcgcccgtagccagcgcccccgtaaagaaataag

SEQ ID NO: 9277 - DNA, 68 bp, Homo sapiens
ctgcccctgcccgcccctcgagggagcgcccgtagccagcgcccccgtaaagaaataaggaggcgccc

SEQ ID NO: 9278 - DNA, 68 bp, Homo sapiens
tgcccgcccctcgagggagcgcccgtagccagcgcccccgtaaagaaataaggaggcgcccggcttcc

SEQ ID NO: 9279 - DNA, 68 bp, Homo sapiens
tcgagggagcgcccgtagccagcgcccccgtaaagaaataaggaggcgcccggcttcccgcccaggta

SEQ ID NO: 9280 - DNA, 67 bp, Homo sapiens
cgtagccagcgcccccgtaaagaaataaggaggcgcccggcttcccgcccaggtacgtgtcgggaca

SEQ ID NO: 9281 - DNA, 67 bp, Homo sapiens
agcgcccccgtaaagaaataaggaggcgcccggcttcccgcccaggtacgtgtcgggacagcgcagg

SEQ ID NO: 9282 - DNA, 68 bp, Homo sapiens
aaagaaataaggaggcgcccggcttcccgcccaggtacgtgtcgggacagcgcaggggactggcttgg

SEQ ID NO: 9283 - DNA, 69 bp, Homo sapiens
ccccagatcctgaatgtttactcccataaagccatgatctttttgttttgggttacaggcccagggccc

SEQ ID NO: 9284 - DNA, 71 bp, Homo sapiens
aatgtttactcccataaagccatgatctttttgttttgggttacaggcccagggccccagtgcagcctgga

SEQ ID NO: 9285 - DNA, 72 bp, Homo sapiens
ataaagccatgatctttttgttttgggttacaggcccagggccccagtgcagcctggacacagtattcaaag

SEQ ID NO: 9286 - DNA, 71 bp, Homo sapiens
ccatgatctttttgttttgggttacaggcccagggccccagtgcagcctggacacagtattcaaagttttg

SEQ ID NO: 9287 - DNA, 74 bp, Homo sapiens
ttttgggttacaggcccagggccccagtgcagcctggacacagtattcaaagttttggcgtctgagcattgtta

SEQ ID NO: 9288 - DNA, 76 bp, Homo sapiens
tacaggcccagggccccagtgcagcctggacacagtattcaaagttttggcgtctgagcattgttatgcgttattt

SEQ ID NO: 9289 - DNA, 75 bp, Homo sapiens
agggccccagtgcagcctggacacagtattcaaagttttggcgtctgagcattgttatgcgttattttcaagctt

SEQ ID NO: 9290 - DNA, 74 bp, Homo sapiens
agcctggacacagtattcaaagttttggcgtctgagcattgttatgcgttattttcaagctttgctaacggtag

SEQ ID NO: 9291 - DNA, 73 bp, Homo sapiens
cagtattcaaagttttggcgtctgagcattgttatgcgttattttcaagctttgctaacggtaggtgataaaa

SEQ ID NO: 9292 - DNA, 74 bp, Homo sapiens
ttcaaagttttggcgtctgagcattgttatgcgttattttcaagctttgctaacggtaggtgataaaattgaca

SEQ ID NO: 9293 - DNA, 73 bp, Homo sapiens
gtctgagcattgttatgcgttattttcaagctttgctaacggtaggtgataaaattgacaagtgttctgggtt

SEQ ID NO: 9294 - DNA, 72 bp, Homo sapiens
attgttatgcgttattttcaagctttgctaacggtaggtgataaaattgacaagtgttctgggtttgccaga

SEQ ID NO: 9295 - DNA, 74 bp, Homo sapiens
ttgatatcctcaatcaactgtagatgaaactgtacttcttatctccaggtttttaaacctttgagatgtttcca

SEQ ID NO: 9296 - DNA, 71 bp, Homo sapiens
cctcaatcaactgtagatgaaactgtacttcttatctccaggtttttaaacctttgagatgtttccattaa

SEQ ID NO: 9297 - DNA, 69 bp, Homo sapiens
ctgtagatgaaactgtacttcttatctccaggtttttaaacctttgagatgtttccattaattggaaaa

SEQ ID NO: 9298 - DNA, 68 bp, Homo sapiens
aactgtacttcttatctccaggtttttaaacctttgagatgtttccattaattggaaaaacaatcatc

SEQ ID NO: 9299 - DNA, 67 bp, Homo sapiens
ctccaggtttttaaacctttgagatgtttccattaattggaaaaacaatcatctttgataactttcc

SEQ ID NO: 9300 - DNA, 73 bp, Homo sapiens
ttaaacctttgagatgtttccattaattggaaaaacaatcatctttgataactttcctgatccttctgataca

SEQ ID NO: 9301 - DNA, 77 bp, Homo sapiens
gagatgtttccattaattggaaaaacaatcatctttgataactttcctgatccttctgatacatgggaaatcactga

SEQ ID NO: 9302 - DNA, 76 bp, Homo sapiens
gtttccattaattggaaaaacaatcatctttgataactttcctgatccttctgatacatgggaaatcactgagaca

SEQ ID NO: 9303 - DNA, 75 bp, Homo sapiens
aaaaacaatcatctttgataactttcctgatccttctgatacatgggaaatcactgagacaattggcaaaggaac

SEQ ID NO: 9304 - DNA, 75 bp, Homo sapiens
atctttgataactttcctgatccttctgatacatgggaaatcactgagacaattggcaaaggaacttatgggaaa

SEQ ID NO: 9305 - DNA, 72 bp, Homo sapiens
ataactttcctgatccttctgatacatgggaaatcactgagacaattggcaaaggaacttatgggaaagttt

SEQ ID NO: 9306 - DNA, 72 bp, Homo sapiens
ctgatccttctgatacatgggaaatcactgagacaattggcaaaggaacttatgggaaagtttttaaagtat

SEQ ID NO: 9307 - DNA, 72 bp, Homo sapiens
ctgatacatgggaaatcactgagacaattggcaaaggaacttatgggaaagtttttaaagtattgaataaga

SEQ ID NO: 9308 - DNA, 69 bp, Homo sapiens
atcactgagacaattggcaaaggaacttatgggaaagtttttaaagtattgaataagaaaaatggccaa

SEQ ID NO: 9309 - DNA, 68 bp, Homo sapiens
caattggcaaaggaacttatgggaaagtttttaaagtattgaataagaaaaatggccaaaaagcagca

SEQ ID NO: 9310 - DNA, 68 bp, Homo sapiens
gcaaaggaacttatgggaaagtttttaaagtattgaataagaaaaatggccaaaaagcagcagtcaaa

SEQ ID NO: 9311 - DNA, 70 bp, Homo sapiens
ggaaagtttttaaagtattgaataagaaaaatggccaaaaagcagcagtcaaaattcttgatccaattca

SEQ ID NO: 9312 - DNA, 73 bp, Homo sapiens
taaagtattgaataagaaaaatggccaaaaagcagcagtcaaaattcttgatccaattcacgtaagtcatatt

SEQ ID NO: 9313 - DNA, 71 bp, Homo sapiens
gaataagaaaaatggccaaaaagcagcagtcaaaattcttgatccaattcacgtaagtcatattttttcct

SEQ ID NO: 9314 - DNA, 72 bp, Homo sapiens
atggccaaaaagcagcagtcaaaattcttgatccaattcacgtaagtcatattttttccttctaattagctt

SEQ ID NO: 9315 - DNA, 71 bp, Homo sapiens
caaaaagcagcagtcaaaattcttgatccaattcacgtaagtcatattttttccttctaattagctttatt

SEQ ID NO: 9316 - DNA, 77 bp, Homo sapiens
cattactcatggttttctcacagttctattcttatgactttttgaaactaggatattgacgaagagattgaagcaga

SEQ ID NO: 9317 - DNA, 77 bp, Homo sapiens
ttctcacagttctattcttatgactttttgaaactaggatattgacgaagagattgaagcagaatataacatcttaa

SEQ ID NO: 9318 - DNA, 75 bp, Homo sapiens
gttctattcttatgactttttgaaactaggatattgacgaagagattgaagcagaatataacatcttaaaagcac

SEQ ID NO: 9319 - DNA, 74 bp, Homo sapiens
gactttttgaaactaggatattgacgaagagattgaagcagaatataacatcttaaaagcactttctgaccacc

SEQ ID NO: 9320 - DNA, 75 bp, Homo sapiens
tttgaaactaggatattgacgaagagattgaagcagaatataacatcttaaaagcactttctgaccaccctaatg

SEQ ID NO: 9321 - DNA, 78 bp, Homo sapiens
atattgacgaagagattgaagcagaatataacatcttaaaagcactttctgaccaccctaatgtggtcagattctatg

SEQ ID NO: 9322 - DNA, 77 bp, Homo sapiens
gattgaagcagaatataacatcttaaaagcactttctgaccaccctaatgtggtcagattctatgggatatacttta

SEQ ID NO: 9323 - DNA, 75 bp, Homo sapiens
aagcagaatataacatcttaaaagcactttctgaccaccctaatgtggtcagattctatgggatatactttaaga

SEQ ID NO: 9324 - DNA, 72 bp, Homo sapiens
tcttaaaagcactttctgaccaccctaatgtggtcagattctatgggatatactttaagaaggataaagtaa

SEQ ID NO: 9325 - DNA, 72 bp, Homo sapiens
aaagcactttctgaccaccctaatgtggtcagattctatgggatatactttaagaaggataaagtaaatgga

SEQ ID NO: 9326 - DNA, 72 bp, Homo sapiens
accaccctaatgtggtcagattctatgggatatactttaagaaggataaagtaaatggagacaagctgtggt

SEQ ID NO: 9327 - DNA, 75 bp, Homo sapiens
taatgtggtcagattctatgggatatactttaagaaggataaagtaaatggagacaagctgtggttggttcttga

SEQ ID NO: 9328 - DNA, 71 bp, Homo sapiens
attctatgggatatactttaagaaggataaagtaaatggagacaagctgtggttggttcttgaggtaagtg

SEQ ID NO: 9329 - DNA, 74 bp, Homo sapiens
atatactttaagaaggataaagtaaatggagacaagctgtggttggttcttgaggtaagtgtgtcagcatcatt

SEQ ID NO: 9330 - DNA, 75 bp, Homo sapiens
aggataaagtaaatggagacaagctgtggttggttcttgaggtaagtgtgtcagcatcatttgtatgggtggaaa

SEQ ID NO: 9331 - DNA, 77 bp, Homo sapiens
taaaatgtcacatgtttttaatagccatcttaaaatattcttgtttagctctgcagtggaggatcagtgactgacct

SEQ ID NO: 9332 - DNA, 76 bp, Homo sapiens
tgtttttaatagccatcttaaaatattcttgtttagctctgcagtggaggatcagtgactgaccttgtgaaaggat

SEQ ID NO: 9333 - DNA, 78 bp, Homo sapiens
ttaatagccatcttaaaatattcttgtttagctctgcagtggaggatcagtgactgaccttgtgaaaggatttctgaa

SEQ ID NO: 9334 - DNA, 75 bp, Homo sapiens
aaaatattcttgtttagctctgcagtggaggatcagtgactgaccttgtgaaaggatttctgaagaggggtgaaa

SEQ ID NO: 9335 - DNA, 79 bp, Homo sapiens
ttcttgtttagctctgcagtggaggatcagtgactgaccttgtgaaaggatttctgaagaggggtgaaagaatgagtga

SEQ ID NO: 9336 - DNA, 80 bp, Homo sapiens
tgcagtggaggatcagtgactgaccttgtgaaaggatttctgaagaggggtgaaagaatgagtgagcctctaattgccta

SEQ ID NO: 9337 - DNA, 76 bp, Homo sapiens
atcagtgactgaccttgtgaaaggatttctgaagaggggtgaaagaatgagtgagcctctaattgcctatatttta

SEQ ID NO: 9338 - DNA, 75 bp, Homo sapiens
actgaccttgtgaaaggatttctgaagaggggtgaaagaatgagtgagcctctaattgcctatattttacatgaa

SEQ ID NO: 9339 - DNA, 75 bp, Homo sapiens
aaggatttctgaagaggggtgaaagaatgagtgagcctctaattgcctatattttacatgaagcactaatggtaa

SEQ ID NO: 9340 - DNA, 76 bp, Homo sapiens
tgaagaggggtgaaagaatgagtgagcctctaattgcctatattttacatgaagcactaatggtaaggcaatttaa

SEQ ID NO: 9341 - DNA, 78 bp, Homo sapiens
gaaagaatgagtgagcctctaattgcctatattttacatgaagcactaatggtaaggcaatttaaattgtatgtgcat

SEQ ID NO: 9342 - DNA, 79 bp, Homo sapiens
gagtgagcctctaattgcctatattttacatgaagcactaatggtaaggcaatttaaattgtatgtgcattaattatga

SEQ ID NO: 9343 - DNA, 75 bp, Homo sapiens
attgtttgatgcttttgttaagagtcattatatatttcttatcttctagggacttcaacatttgcataacaacaa

SEQ ID NO: 9344 - DNA, 74 bp, Homo sapiens
gcttttgttaagagtcattatatatttcttatcttctagggacttcaacatttgcataacaacaaaactatcca

SEQ ID NO: 9345 - DNA, 78 bp, Homo sapiens
gtcattatatatttcttatcttctagggacttcaacatttgcataacaacaaaactatccacagagatgtgaaaggca

SEQ ID NO: 9346 - DNA, 75 bp, Homo sapiens
atttcttatcttctagggacttcaacatttgcataacaacaaaactatccacagagatgtgaaaggcaataacat

SEQ ID NO: 9347 - DNA, 78 bp, Homo sapiens
ttatcttctagggacttcaacatttgcataacaacaaaactatccacagagatgtgaaaggcaataacattctattga

SEQ ID NO: 9348 - DNA, 75 bp, Homo sapiens
acttcaacatttgcataacaacaaaactatccacagagatgtgaaaggcaataacattctattgaccacggaagg

SEQ ID NO: 9349 - DNA, 76 bp, Homo sapiens
atttgcataacaacaaaactatccacagagatgtgaaaggcaataacattctattgaccacggaaggtggagtgaa

SEQ ID NO: 9350 - DNA, 73 bp, Homo sapiens
aaaactatccacagagatgtgaaaggcaataacattctattgaccacggaaggtggagtgaaactagtagatt

SEQ ID NO: 9351 - DNA, 72 bp, Homo sapiens
acagagatgtgaaaggcaataacattctattgaccacggaaggtggagtgaaactagtagattttggtaagt

SEQ ID NO: 9352 - DNA, 68 bp, Homo sapiens
gaaaggcaataacattctattgaccacggaaggtggagtgaaactagtagattttggtaagttttgtt

SEQ ID NO: 9353 - DNA, 68 bp, Homo sapiens
gcaataacattctattgaccacggaaggtggagtgaaactagtagattttggtaagttttgtttaaaa

SEQ ID NO: 9354 - DNA, 69 bp, Homo sapiens
tctattgaccacggaaggtggagtgaaactagtagattttggtaagttttgtttaaaatgcatgagttt

SEQ ID NO: 9355 - DNA, 79 bp, Homo sapiens
aattgaaagctctttatatgagtaattaatgcaaaaaagtacatcttgtctcttcctctaggtgtgtctgcacagctca

SEQ ID NO: 9356 - DNA, 78 bp, Homo sapiens
tctttatatgagtaattaatgcaaaaaagtacatcttgtctcttcctctaggtgtgtctgcacagctcaccagtaccc

SEQ ID NO: 9357 - DNA, 75 bp, Homo sapiens
agtaattaatgcaaaaaagtacatcttgtctcttcctctaggtgtgtctgcacagctcaccagtacccggcaccg

SEQ ID NO: 9358 - DNA, 75 bp, Homo sapiens
aaaaagtacatcttgtctcttcctctaggtgtgtctgcacagctcaccagtacccggcaccgtcggaacacatcc

SEQ ID NO: 9359 - DNA, 78 bp, Homo sapiens
tacatcttgtctcttcctctaggtgtgtctgcacagctcaccagtacccggcaccgtcggaacacatccgtaggaaca

SEQ ID NO: 9360 - DNA, 73 bp, Homo sapiens
ttcctctaggtgtgtctgcacagctcaccagtacccggcaccgtcggaacacatccgtaggaacaccgttttg

SEQ ID NO: 9361 - DNA, 75 bp, Homo sapiens
taggtgtgtctgcacagctcaccagtacccggcaccgtcggaacacatccgtaggaacaccgttttggatggctc

SEQ ID NO: 9362 - DNA, 73 bp, Homo sapiens
agctcaccagtacccggcaccgtcggaacacatccgtaggaacaccgttttggatggctcctgaggtcagata

SEQ ID NO: 9363 - DNA, 72 bp, Homo sapiens
tacccggcaccgtcggaacacatccgtaggaacaccgttttggatggctcctgaggtcagatagagttttga

SEQ ID NO: 9364 - DNA, 73 bp, Homo sapiens
accgtcggaacacatccgtaggaacaccgttttggatggctcctgaggtcagatagagttttgaggcagacaa

SEQ ID NO: 9365 - DNA, 73 bp, Homo sapiens
aacacatccgtaggaacaccgttttggatggctcctgaggtcagatagagttttgaggcagacaaacgtaata

SEQ ID NO: 9366 - DNA, 75 bp, Homo sapiens
taggaacaccgttttggatggctcctgaggtcagatagagttttgaggcagacaaacgtaatagctgatcctgtt

SEQ ID NO: 9367 - DNA, 76 bp, Homo sapiens
ttgttaaagtcacaaatttcaccttttgatggtgtggttttctactaggtgattgcatgtgaacagcaattggata

SEQ ID NO: 9368 - DNA, 76 bp, Homo sapiens
acaaatttcaccttttgatggtgtggttttctactaggtgattgcatgtgaacagcaattggataccacttatgac

SEQ ID NO: 9369 - DNA, 80 bp, Homo sapiens
cttttgatggtgtggttttctactaggtgattgcatgtgaacagcaattggataccacttatgacgccagatgtgacact

SEQ ID NO: 9370 - DNA, 80 bp, Homo sapiens
atggtgtggttttctactaggtgattgcatgtgaacagcaattggataccacttatgacgccagatgtgacacttggtcc

SEQ ID NO: 9371 - DNA, 81 bp, Homo sapiens
ttttctactaggtgattgcatgtgaacagcaattggataccacttatgacgccagatgtgacacttggtccctgggtatca

SEQ ID NO: 9372 - DNA, 82 bp, Homo sapiens
attgcatgtgaacagcaattggataccacttatgacgccagatgtgacacttggtccctgggtatcacggccattgagctgg

SEQ ID NO: 9373 - DNA, 82 bp, Homo sapiens
tgtgaacagcaattggataccacttatgacgccagatgtgacacttggtccctgggtatcacggccattgagctgggtgatg

SEQ ID NO: 9374 - DNA, 79 bp, Homo sapiens
aattggataccacttatgacgccagatgtgacacttggtccctgggtatcacggccattgagctgggtgatggagatcc

SEQ ID NO: 9375 - DNA, 81 bp, Homo sapiens
acttatgacgccagatgtgacacttggtccctgggtatcacggccattgagctgggtgatggagatcctccactagctgac

SEQ ID NO: 9376 - DNA, 82 bp, Homo sapiens
agatgtgacacttggtccctgggtatcacggccattgagctgggtgatggagatcctccactagctgaccttcatcccatga

SEQ ID NO: 9377 - DNA, 83 bp, Homo sapiens
ttggtccctgggtatcacggccattgagctgggtgatggagatcctccactagctgaccttcatcccatgagagcactcttca

SEQ ID NO: 9378 - DNA, 82 bp, Homo sapiens
cctgggtatcacggccattgagctgggtgatggagatcctccactagctgaccttcatcccatgagagcactcttcaaaata

SEQ ID NO: 9379 - DNA, 84 bp, Homo sapiens
cattgagctgggtgatggagatcctccactagctgaccttcatcccatgagagcactcttcaaaataccaaggtcagatgacta

SEQ ID NO: 9380 - DNA, 82 bp, Homo sapiens
tgggtgatggagatcctccactagctgaccttcatcccatgagagcactcttcaaaataccaaggtcagatgactaacattg

SEQ ID NO: 9381 - DNA, 79 bp, Homo sapiens
atcctccactagctgaccttcatcccatgagagcactcttcaaaataccaaggtcagatgactaacattgggtccagta

SEQ ID NO: 9382 - DNA, 81 bp, Homo sapiens
actagctgaccttcatcccatgagagcactcttcaaaataccaaggtcagatgactaacattgggtccagtatctgcagcc

SEQ ID NO: 9383 - DNA, 79 bp, Homo sapiens
ttcatcccatgagagcactcttcaaaataccaaggtcagatgactaacattgggtccagtatctgcagcccgatttact

SEQ ID NO: 9384 - DNA, 78 bp, Homo sapiens
atgagagcactcttcaaaataccaaggtcagatgactaacattgggtccagtatctgcagcccgatttacttcctcca

SEQ ID NO: 9385 - DNA, 75 bp, Homo sapiens
cttcaaaataccaaggtcagatgactaacattgggtccagtatctgcagcccgatttacttcctccagccaccaa

SEQ ID NO: 9386 - DNA, 79 bp, Homo sapiens
aaggtcagatgactaacattgggtccagtatctgcagcccgatttacttcctccagccaccaagtgttcatcatgctct

SEQ ID NO: 9387 - DNA, 82 bp, Homo sapiens
agatgactaacattgggtccagtatctgcagcccgatttacttcctccagccaccaagtgttcatcatgctcttcatggaga

SEQ ID NO: 9388 - DNA, 82 bp, Homo sapiens
ttgggtccagtatctgcagcccgatttacttcctccagccaccaagtgttcatcatgctcttcatggagacgttcagatata

SEQ ID NO: 9389 - DNA, 82 bp, Homo sapiens
agtatctgcagcccgatttacttcctccagccaccaagtgttcatcatgctcttcatggagacgttcagatatattccaaca

SEQ ID NO: 9390 - DNA, 80 bp, Homo sapiens
atttacttcctccagccaccaagtgttcatcatgctcttcatggagacgttcagatatattccaacaagttgggagcaga

SEQ ID NO: 9391 - DNA, 83 bp, Homo sapiens
tccagccaccaagtgttcatcatgctcttcatggagacgttcagatatattccaacaagttgggagcagaagatcctggaata

SEQ ID NO: 9392 - DNA, 80 bp, Homo sapiens
accaagtgttcatcatgctcttcatggagacgttcagatatattccaacaagttgggagcagaagatcctggaatattat

SEQ ID NO: 9393 - DNA, 83 bp, Homo sapiens
ttcatcatgctcttcatggagacgttcagatatattccaacaagttgggagcagaagatcctggaatattattctgcttcttc

SEQ ID NO: 9394 - DNA, 80 bp, Homo sapiens
atggagacgttcagatatattccaacaagttgggagcagaagatcctggaatattattctgcttcttctgagacattgta

SEQ ID NO: 9395 - DNA, 81 bp, Homo sapiens
tcagatatattccaacaagttgggagcagaagatcctggaatattattctgcttcttctgagacattgtatttgttcagta

SEQ ID NO: 9396 - DNA, 78 bp, Homo sapiens
tatattccaacaagttgggagcagaagatcctggaatattattctgcttcttctgagacattgtatttgttcagtagt

SEQ ID NO: 9397 - DNA, 78 bp, Homo sapiens
tgcttcttctgagacattgtatttgttcagtagttgcatttccctggtctaagtaaaagagctttctcttgataatca

SEQ ID NO: 9398 - DNA, 75 bp, Homo sapiens
tagttgcatttccctggtctaagtaaaagagctttctcttgataatcagtgtgtctttctctcttttgctaggat

SEQ ID NO: 9399 - DNA, 73 bp, Homo sapiens
atttccctggtctaagtaaaagagctttctcttgataatcagtgtgtctttctctcttttgctaggatttgat

SEQ ID NO: 9400 - DNA, 75 bp, Homo sapiens
agtaaaagagctttctcttgataatcagtgtgtctttctctcttttgctaggatttgatttcagaaaatagcagt

SEQ ID NO: 9401 - DNA, 76 bp, Homo sapiens
aagagctttctcttgataatcagtgtgtctttctctcttttgctaggatttgatttcagaaaatagcagttcctcc

SEQ ID NO: 9402 - DNA, 75 bp, Homo sapiens
tcttgataatcagtgtgtctttctctcttttgctaggatttgatttcagaaaatagcagttcctcccacccttta

SEQ ID NO: 9403 - DNA, 72 bp, Homo sapiens
agtgtgtctttctctcttttgctaggatttgatttcagaaaatagcagttcctcccaccctttatccattcc

SEQ ID NO: 9404 - DNA, 74 bp, Homo sapiens
ttctctcttttgctaggatttgatttcagaaaatagcagttcctcccaccctttatccattccccaatgagtca

SEQ ID NO: 9405 - DNA, 77 bp, Homo sapiens
taggatttgatttcagaaaatagcagttcctcccaccctttatccattccccaatgagtcagtgaggcatcagagtc

SEQ ID NO: 9406 - DNA, 77 bp, Homo sapiens
atttcagaaaatagcagttcctcccaccctttatccattccccaatgagtcagtgaggcatcagagtccatagcctg

SEQ ID NO: 9407 - DNA, 78 bp, Homo sapiens
aatagcagttcctcccaccctttatccattccccaatgagtcagtgaggcatcagagtccatagcctgtgcaagtgtt

SEQ ID NO: 9408 - DNA, 79 bp, Homo sapiens
tttatccattccccaatgagtcagtgaggcatcagagtccatagcctgtgcaagtgttttgctttgctttacctaccaa

SEQ ID NO: 9409 - DNA, 77 bp, Homo sapiens
aatgagtcagtgaggcatcagagtccatagcctgtgcaagtgttttgctttgctttacctaccaatctagtaatttt

SEQ ID NO: 9410 - DNA, 75 bp, Homo sapiens
agtgaggcatcagagtccatagcctgtgcaagtgttttgctttgctttacctaccaatctagtaattttttacta

SEQ ID NO: 9411 - DNA, 72 bp, Homo sapiens
agagtccatagcctgtgcaagtgttttgctttgctttacctaccaatctagtaattttttactacttgctaa

SEQ ID NO: 9412 - DNA, 68 bp, Homo sapiens
gcaagtgttttgctttgctttacctaccaatctagtaattttttactacttgctaagatttccctttg

SEQ ID NO: 9413 - DNA, 67 bp, Homo sapiens
gctttgctttacctaccaatctagtaattttttactacttgctaagatttccctttgttcagaactt

SEQ ID NO: 9414 - DNA, 66 bp, Homo sapiens
tacctaccaatctagtaattttttactacttgctaagatttccctttgttcagaactttaaaataa

SEQ ID NO: 9415 - DNA, 67 bp, Homo sapiens
ttttactacttgctaagatttccctttgttcagaactttaaaataatattattaagaaaattatata

SEQ ID NO: 9416 - DNA, 68 bp, Homo sapiens
gaaaattatatataaaatttatccagaaaataatggttttaaacatgttagtattttgaatatgttaa

SEQ ID NO: 9417 - DNA, 68 bp, Homo sapiens
tataaaatttatccagaaaataatggttttaaacatgttagtattttgaatatgttaatataaaacaa

SEQ ID NO: 9418 - DNA, 69 bp, Homo sapiens
tatccagaaaataatggttttaaacatgttagtattttgaatatgttaatataaaacaataaatttaga

SEQ ID NO: 9419 - DNA, 67 bp, Homo sapiens
taatggttttaaacatgttagtattttgaatatgttaatataaaacaataaatttagaagaataacc

SEQ ID NO: 9420 - DNA, 69 bp, Homo sapiens
taaacatgttagtattttgaatatgttaatataaaacaataaatttagaagaataacctcttttggtgc

SEQ ID NO: 9421 - DNA, 72 bp, Homo sapiens
tatgttaatataaaacaataaatttagaagaataacctcttttggtgccatgaaagcacttgactatttatg

SEQ ID NO: 9422 - DNA, 72 bp, Homo sapiens
aatttagaagaataacctcttttggtgccatgaaagcacttgactatttatgtggccccccactccttcatg

SEQ ID NO: 9423 - DNA, 73 bp, Homo sapiens
agaagaataacctcttttggtgccatgaaagcacttgactatttatgtggccccccactccttcatgtgtgtt

SEQ ID NO: 9424 - DNA, 75 bp, Homo sapiens
ctcttttggtgccatgaaagcacttgactatttatgtggccccccactccttcatgtgtgtttcaacagattttc

SEQ ID NO: 9425 - DNA, 74 bp, Homo sapiens
tgaaagcacttgactatttatgtggccccccactccttcatgtgtgtttcaacagattttcccctactatccta

SEQ ID NO: 9426 - DNA, 72 bp, Homo sapiens
tgactatttatgtggccccccactccttcatgtgtgtttcaacagattttcccctactatcctataaactaa

SEQ ID NO: 9427 - DNA, 69 bp, Homo sapiens
atttatgtggccccccactccttcatgtgtgtttcaacagattttcccctactatcctataaactaatt

SEQ ID NO: 9428 - DNA, 70 bp, Homo sapiens
tgtgtgtttcaacagattttcccctactatcctataaactaatttctttaaacactattttctatgagtg

SEQ ID NO: 9429 - DNA, 69 bp, Homo sapiens
tcaacagattttcccctactatcctataaactaatttctttaaacactattttctatgagtggtggtta

SEQ ID NO: 9430 - DNA, 69 bp, Homo sapiens
tcccctactatcctataaactaatttctttaaacactattttctatgagtggtggttagtcccttgatg

SEQ ID NO: 9431 - DNA, 69 bp, Homo sapiens
cctataaactaatttctttaaacactattttctatgagtggtggttagtcccttgatgtttcagataac

SEQ ID NO: 9432 - DNA, 71 bp, Homo sapiens
ctaatttctttaaacactattttctatgagtggtggttagtcccttgatgtttcagataactaatgtgaaa

SEQ ID NO: 9433 - DNA, 72 bp, Homo sapiens
gagtggtggttagtcccttgatgtttcagataactaatgtgaaaagactgcctatatttattaaaggtgtta

SEQ ID NO: 9434 - DNA, 70 bp, Homo sapiens
tagtcccttgatgtttcagataactaatgtgaaaagactgcctatatttattaaaggtgttatttttaaa

SEQ ID NO: 9435 - DNA, 69 bp, Homo sapiens
tcagataactaatgtgaaaagactgcctatatttattaaaggtgttatttttaaatatctttttaagga

SEQ ID NO: 9436 - DNA, 70 bp, Homo sapiens
tatttattaaaggtgttatttttaaatatctttttaaggattttgccttaattataatgcagtgcacagc

SEQ ID NO: 9437 - DNA, 74 bp, Homo sapiens
ggtgttatttttaaatatctttttaaggattttgccttaattataatgcagtgcacagccagagcctgtggtga

SEQ ID NO: 9438 - DNA, 75 bp, Homo sapiens
ttaaatatctttttaaggattttgccttaattataatgcagtgcacagccagagcctgtggtgacagggttccaa

SEQ ID NO: 9439 - DNA, 75 bp, Homo sapiens
ttttaaggattttgccttaattataatgcagtgcacagccagagcctgtggtgacagggttccaaaacattagaa

SEQ ID NO: 9440 - DNA, 76 bp, Homo sapiens
aggattttgccttaattataatgcagtgcacagccagagcctgtggtgacagggttccaaaacattagaatatttg

SEQ ID NO: 9441 - DNA, 78 bp, Homo sapiens
attataatgcagtgcacagccagagcctgtggtgacagggttccaaaacattagaatatttggcatctaactaaatta

SEQ ID NO: 9442 - DNA, 76 bp, Homo sapiens
agtgcacagccagagcctgtggtgacagggttccaaaacattagaatatttggcatctaactaaattattataaga

SEQ ID NO: 9443 - DNA, 72 bp, Homo sapiens
ccagagcctgtggtgacagggttccaaaacattagaatatttggcatctaactaaattattataagactaaa

SEQ ID NO: 9444 - DNA, 70 bp, Homo sapiens
ctgtggtgacagggttccaaaacattagaatatttggcatctaactaaattattataagactaaaacatt

SEQ ID NO: 9445 - DNA, 69 bp, Homo sapiens
agggttccaaaacattagaatatttggcatctaactaaattattataagactaaaacatttgaattcat

SEQ ID NO: 9446 - DNA, 70 bp, Homo sapiens
cattagaatatttggcatctaactaaattattataagactaaaacatttgaattcatttttaattttgcc

SEQ ID NO: 9447 - DNA, 69 bp, Homo sapiens
ttggcatctaactaaattattataagactaaaacatttgaattcatttttaattttgcctttgaatttc

SEQ ID NO: 9448 - DNA, 68 bp, Homo sapiens
ctaaattattataagactaaaacatttgaattcatttttaattttgcctttgaatttcttgtcctatc

SEQ ID NO: 9449 - DNA, 70 bp, Homo sapiens
taagactaaaacatttgaattcatttttaattttgcctttgaatttcttgtcctatctagatgttccaaa

SEQ ID NO: 9450 - DNA, 70 bp, Homo sapiens
acatttgaattcatttttaattttgcctttgaatttcttgtcctatctagatgttccaaattataatacc

SEQ ID NO: 9451 - DNA, 74 bp, Homo sapiens
tcatttttaattttgcctttgaatttcttgtcctatctagatgttccaaattataataccttggctatatatca

SEQ ID NO: 9452 - DNA, 75 bp, Homo sapiens
ttttgcctttgaatttcttgtcctatctagatgttccaaattataataccttggctatatatcatcctttacata

SEQ ID NO: 9453 - DNA, 75 bp, Homo sapiens
cctttgaatttcttgtcctatctagatgttccaaattataataccttggctatatatcatcctttacatactgct

SEQ ID NO: 9454 - DNA, 75 bp, Homo sapiens
gtcctatctagatgttccaaattataataccttggctatatatcatcctttacatactgcttattttgttaagtg

SEQ ID NO: 9455 - DNA, 74 bp, Homo sapiens
ctagatgttccaaattataataccttggctatatatcatcctttacatactgcttattttgttaagtggagaaa

SEQ ID NO: 9456 - DNA, 74 bp, Homo sapiens
attataataccttggctatatatcatcctttacatactgcttattttgttaagtggagaaacaacattatggaa

SEQ ID NO: 9457 - DNA, 73 bp, Homo sapiens
accttggctatatatcatcctttacatactgcttattttgttaagtggagaaacaacattatggaaaagaatg

SEQ ID NO: 9458 - DNA, 71 bp, Homo sapiens
atatcatcctttacatactgcttattttgttaagtggagaaacaacattatggaaaagaatggaaaacctc

SEQ ID NO: 9459 - DNA, 69 bp, Homo sapiens
cctttacatactgcttattttgttaagtggagaaacaacattatggaaaagaatggaaaacctctatac

SEQ ID NO: 9460 - DNA, 70 bp, Homo sapiens
gcttattttgttaagtggagaaacaacattatggaaaagaatggaaaacctctatactaaatccaagaca

SEQ ID NO: 9461 - DNA, 71 bp, Homo sapiens
tgttaagtggagaaacaacattatggaaaagaatggaaaacctctatactaaatccaagacatttcattaa

SEQ ID NO: 9462 - DNA, 69 bp, Homo sapiens
atggaaaacctctatactaaatccaagacatttcattaattttgaagaaagcaggaaaaaaatctgtag

SEQ ID NO: 9463 - DNA, 70 bp, Homo sapiens
ctctatactaaatccaagacatttcattaattttgaagaaagcaggaaaaaaatctgtagtttctaattc

SEQ ID NO: 9464 - DNA, 71 bp, Homo sapiens
ccaagacatttcattaattttgaagaaagcaggaaaaaaatctgtagtttctaattcctattgtcattcag

SEQ ID NO: 9465 - DNA, 73 bp, Homo sapiens
tcattaattttgaagaaagcaggaaaaaaatctgtagtttctaattcctattgtcattcagtatgtaaggtga

SEQ ID NO: 9466 - DNA, 72 bp, Homo sapiens
gaagaaagcaggaaaaaaatctgtagtttctaattcctattgtcattcagtatgtaaggtgaagttctgtac

SEQ ID NO: 9467 - DNA, 73 bp, Homo sapiens
ggaaaaaaatctgtagtttctaattcctattgtcattcagtatgtaaggtgaagttctgtactgccttagctg

SEQ ID NO: 9468 - DNA, 74 bp, Homo sapiens
atctgtagtttctaattcctattgtcattcagtatgtaaggtgaagttctgtactgccttagctgttttaactg

SEQ ID NO: 9469 - DNA, 74 bp, Homo sapiens
tctaattcctattgtcattcagtatgtaaggtgaagttctgtactgccttagctgttttaactgtggattaaac

SEQ ID NO: 9470 - DNA, 75 bp, Homo sapiens
ttgtcattcagtatgtaaggtgaagttctgtactgccttagctgttttaactgtggattaaaccatcatatttag

SEQ ID NO: 9471 - DNA, 76 bp, Homo sapiens
gtgaagttctgtactgccttagctgttttaactgtggattaaaccatcatatttagtctgatgttattactcttga

SEQ ID NO: 9472 - DNA, 78 bp, Homo sapiens
agctgttttaactgtggattaaaccatcatatttagtctgatgttattactcttgatgataatgccacatgaaggaag

SEQ ID NO: 9473 - DNA, 81 bp, Homo sapiens
taactgtggattaaaccatcatatttagtctgatgttattactcttgatgataatgccacatgaaggaaggatgacactgt

SEQ ID NO: 9474 - DNA, 83 bp, Homo sapiens
aaaccatcatatttagtctgatgttattactcttgatgataatgccacatgaaggaaggatgacactgttgatagatattgta

SEQ ID NO: 9475 - DNA, 81 bp, Homo sapiens
atgttattactcttgatgataatgccacatgaaggaaggatgacactgttgatagatattgtacctaggtaacaggcaatg

SEQ ID NO: 9476 - DNA, 82 bp, Homo sapiens
tcttgatgataatgccacatgaaggaaggatgacactgttgatagatattgtacctaggtaacaggcaatgtgcaaagtaat

SEQ ID NO: 9477 - DNA, 80 bp, Homo sapiens
ataatgccacatgaaggaaggatgacactgttgatagatattgtacctaggtaacaggcaatgtgcaaagtaattctaga

SEQ ID NO: 9478 - DNA, 80 bp, Homo sapiens
atgaaggaaggatgacactgttgatagatattgtacctaggtaacaggcaatgtgcaaagtaattctagaaactgcatca

SEQ ID NO: 9479 - DNA, 77 bp, Homo sapiens
acactgttgatagatattgtacctaggtaacaggcaatgtgcaaagtaattctagaaactgcatcatcttagttatt

SEQ ID NO: 9480 - DNA, 72 bp, Homo sapiens
agttatttcttaattatgtctaccagcagtggaattccaagaatactgactatggtaatatggagaaaaagg

SEQ ID NO: 9481 - DNA, 75 bp, Homo sapiens
ttcttaattatgtctaccagcagtggaattccaagaatactgactatggtaatatggagaaaaagggaatctgaa

SEQ ID NO: 9482 - DNA, 74 bp, Homo sapiens
atgtctaccagcagtggaattccaagaatactgactatggtaatatggagaaaaagggaatctgaaaagctacc

SEQ ID NO: 9483 - DNA, 73 bp, Homo sapiens
tggaattccaagaatactgactatggtaatatggagaaaaagggaatctgaaaagctacccagttctgagtgt

SEQ ID NO: 9484 - DNA, 73 bp, Homo sapiens
aagaatactgactatggtaatatggagaaaaagggaatctgaaaagctacccagttctgagtgttctgaaata

SEQ ID NO: 9485 - DNA, 71 bp, Homo sapiens
tatggtaatatggagaaaaagggaatctgaaaagctacccagttctgagtgttctgaaataatccaaactt

SEQ ID NO: 9486 - DNA, 71 bp, Homo sapiens
tggagaaaaagggaatctgaaaagctacccagttctgagtgttctgaaataatccaaactttgttattcaa

SEQ ID NO: 9487 - DNA, 73 bp, Homo sapiens
gggaatctgaaaagctacccagttctgagtgttctgaaataatccaaactttgttattcaaagcaagccaata

SEQ ID NO: 9488 - DNA, 75 bp, Homo sapiens
tctgaaaagctacccagttctgagtgttctgaaataatccaaactttgttattcaaagcaagccaataaatctca

SEQ ID NO: 9489 - DNA, 73 bp, Homo sapiens
tacccagttctgagtgttctgaaataatccaaactttgttattcaaagcaagccaataaatctcataaaagga

SEQ ID NO: 9490 - DNA, 71 bp, Homo sapiens
gagtgttctgaaataatccaaactttgttattcaaagcaagccaataaatctcataaaaggaaattttcag

SEQ ID NO: 9491 - DNA, 69 bp, Homo sapiens
aatccaaactttgttattcaaagcaagccaataaatctcataaaaggaaattttcaggaggacaagaaa

SEQ ID NO: 9492 - DNA, 69 bp, Homo sapiens
actttgttattcaaagcaagccaataaatctcataaaaggaaattttcaggaggacaagaaacaaaaca

SEQ ID NO: 9493 - DNA, 71 bp, Homo sapiens
caaagcaagccaataaatctcataaaaggaaattttcaggaggacaagaaacaaaacaacatttctggaga

SEQ ID NO: 9494 - DNA, 69 bp, Homo sapiens
agccaataaatctcataaaaggaaattttcaggaggacaagaaacaaaacaacatttctggagaaaaga

SEQ ID NO: 9495 - DNA, 67 bp, Homo sapiens
ctcataaaaggaaattttcaggaggacaagaaacaaaacaacatttctggagaaaagaattacttct

SEQ ID NO: 9496 - DNA, 69 bp, Homo sapiens
ggaaattttcaggaggacaagaaacaaaacaacatttctggagaaaagaattacttcttttaatgtgca

SEQ ID NO: 9497 - DNA, 72 bp, Homo sapiens
gaggacaagaaacaaaacaacatttctggagaaaagaattacttcttttaatgtgcaaattagcaatcttca

SEQ ID NO: 9498 - DNA, 71 bp, Homo sapiens
caaaacaacatttctggagaaaagaattacttcttttaatgtgcaaattagcaatcttcaaattgtcctaa

SEQ ID NO: 9499 - DNA, 73 bp, Homo sapiens
aagaattacttcttttaatgtgcaaattagcaatcttcaaattgtcctaaggattgtgaaatgagcttagtcc

SEQ ID NO: 9500 - DNA, 76 bp, Homo sapiens
ttacttcttttaatgtgcaaattagcaatcttcaaattgtcctaaggattgtgaaatgagcttagtcctgatctgg

SEQ ID NO: 9501 - DNA, 78 bp, Homo sapiens
attagcaatcttcaaattgtcctaaggattgtgaaatgagcttagtcctgatctggggtagatgagtagctgcacttt

SEQ ID NO: 9502 - DNA, 78 bp, Homo sapiens
ttcaaattgtcctaaggattgtgaaatgagcttagtcctgatctggggtagatgagtagctgcacttttctttaatga

SEQ ID NO: 9503 - DNA, 78 bp, Homo sapiens
taaggattgtgaaatgagcttagtcctgatctggggtagatgagtagctgcacttttctttaatgagcctgtacaaac

SEQ ID NO: 9504 - DNA, 77 bp, Homo sapiens
aaatgagcttagtcctgatctggggtagatgagtagctgcacttttctttaatgagcctgtacaaactgtacattaa

SEQ ID NO: 9505 - DNA, 77 bp, Homo sapiens
ttagtcctgatctggggtagatgagtagctgcacttttctttaatgagcctgtacaaactgtacattaatttcatta

SEQ ID NO: 9506 - DNA, 75 bp, Homo sapiens
gggtagatgagtagctgcacttttctttaatgagcctgtacaaactgtacattaatttcattataagctatttaa

SEQ ID NO: 9507 - DNA, 76 bp, Homo sapiens
gatgagtagctgcacttttctttaatgagcctgtacaaactgtacattaatttcattataagctatttaaggagta

SEQ ID NO: 9508 - DNA, 74 bp, Homo sapiens
gcacttttctttaatgagcctgtacaaactgtacattaatttcattataagctatttaaggagtaatgcagaac

SEQ ID NO: 9509 - DNA, 75 bp, Homo sapiens
ttaatgagcctgtacaaactgtacattaatttcattataagctatttaaggagtaatgcagaactgaagacaaag

SEQ ID NO: 9510 - DNA, 74 bp, Homo sapiens
ctgtacaaactgtacattaatttcattataagctatttaaggagtaatgcagaactgaagacaaagtatttcca

SEQ ID NO: 9511 - DNA, 75 bp, Homo sapiens
gtacattaatttcattataagctatttaaggagtaatgcagaactgaagacaaagtatttccatttcactaatga

SEQ ID NO: 9512 - DNA, 75 bp, Homo sapiens
tcattataagctatttaaggagtaatgcagaactgaagacaaagtatttccatttcactaatgaaaacaaagagc

SEQ ID NO: 9513 - DNA, 74 bp, Homo sapiens
agctatttaaggagtaatgcagaactgaagacaaagtatttccatttcactaatgaaaacaaagagctgttaga

SEQ ID NO: 9514 - DNA, 77 bp, Homo sapiens
taatgcagaactgaagacaaagtatttccatttcactaatgaaaacaaagagctgttagaattaacataaagcagca

SEQ ID NO: 9515 - DNA, 76 bp, Homo sapiens
ctgaagacaaagtatttccatttcactaatgaaaacaaagagctgttagaattaacataaagcagcacttcagcaa

SEQ ID NO: 9516 - DNA, 77 bp, Homo sapiens
gtatttccatttcactaatgaaaacaaagagctgttagaattaacataaagcagcacttcagcaaattcaactatca

SEQ ID NO: 9517 - DNA, 80 bp, Homo sapiens
ttcactaatgaaaacaaagagctgttagaattaacataaagcagcacttcagcaaattcaactatcatggttgatcaatg

SEQ ID NO: 9518 - DNA, 79 bp, Homo sapiens
aaaacaaagagctgttagaattaacataaagcagcacttcagcaaattcaactatcatggttgatcaatgttgcttgat

SEQ ID NO: 9519 - DNA, 82 bp, Homo sapiens
agctgttagaattaacataaagcagcacttcagcaaattcaactatcatggttgatcaatgttgcttgattacagagttaga

SEQ ID NO: 9520 - DNA, 83 bp, Homo sapiens
attaacataaagcagcacttcagcaaattcaactatcatggttgatcaatgttgcttgattacagagttagatcagcctcatt

SEQ ID NO: 9521 - DNA, 83 bp, Homo sapiens
ataaagcagcacttcagcaaattcaactatcatggttgatcaatgttgcttgattacagagttagatcagcctcattttcaaa

SEQ ID NO: 9522 - DNA, 82 bp, Homo sapiens
ttcagcaaattcaactatcatggttgatcaatgttgcttgattacagagttagatcagcctcattttcaaatgatgttcctt

SEQ ID NO: 9523 - DNA, 82 bp, Homo sapiens
attcaactatcatggttgatcaatgttgcttgattacagagttagatcagcctcattttcaaatgatgttcctttgtattca

SEQ ID NO: 9524 - DNA, 81 bp, Homo sapiens
ttgatcaatgttgcttgattacagagttagatcagcctcattttcaaatgatgttcctttgtattcaacgaatgtgccaaa

SEQ ID NO: 9525 - DNA, 77 bp, Homo sapiens
aatgttgcttgattacagagttagatcagcctcattttcaaatgatgttcctttgtattcaacgaatgtgccaaaaa

SEQ ID NO: 9526 - DNA, 77 bp, Homo sapiens
tgattacagagttagatcagcctcattttcaaatgatgttcctttgtattcaacgaatgtgccaaaaaatatatttg

SEQ ID NO: 9527 - DNA, 75 bp, Homo sapiens
gatcagcctcattttcaaatgatgttcctttgtattcaacgaatgtgccaaaaaatatatttgttcagcttaaac

SEQ ID NO: 9528 - DNA, 71 bp, Homo sapiens
aaatgatgttcctttgtattcaacgaatgtgccaaaaaatatatttgttcagcttaaactgaaaggaatta

SEQ ID NO: 9529 - DNA, 68 bp, Homo sapiens
cctttgtattcaacgaatgtgccaaaaaatatatttgttcagcttaaactgaaaggaattaataaaat

SEQ ID NO: 9530 - DNA, 67 bp, Homo sapiens
caacgaatgtgccaaaaaatatatttgttcagcttaaactgaaaggaattaataaaattgttaaagt

SEQ ID NO: 9531 - DNA, 71 bp, Homo sapiens
tgttcagcttaaactgaaaggaattaataaaattgttaaagttgtattcacagctttatcgctaatagtat

SEQ ID NO: 9532 - DNA, 76 bp, Homo sapiens
ctctgcctctcattttacactgactgaccaatatacagaatccaacattgattcttatttttctaggaatccaccc

SEQ ID NO: 9533 - DNA, 71 bp, Homo sapiens
ttttacactgactgaccaatatacagaatccaacattgattcttatttttctaggaatccacccccaaaac

SEQ ID NO: 9534 - DNA, 72 bp, Homo sapiens
actgactgaccaatatacagaatccaacattgattcttatttttctaggaatccacccccaaaactaaggca

SEQ ID NO: 9535 - DNA, 73 bp, Homo sapiens
aatatacagaatccaacattgattcttatttttctaggaatccacccccaaaactaaggcagcctgagctatg

SEQ ID NO: 9536 - DNA, 74 bp, Homo sapiens
aacattgattcttatttttctaggaatccacccccaaaactaaggcagcctgagctatggtcagcagaattcaa

SEQ ID NO: 9537 - DNA, 76 bp, Homo sapiens
tcttatttttctaggaatccacccccaaaactaaggcagcctgagctatggtcagcagaattcaatgacttcataa

SEQ ID NO: 9538 - DNA, 78 bp, Homo sapiens
ttttctaggaatccacccccaaaactaaggcagcctgagctatggtcagcagaattcaatgacttcataagcaagtga

SEQ ID NO: 9539 - DNA, 77 bp, Homo sapiens
atccacccccaaaactaaggcagcctgagctatggtcagcagaattcaatgacttcataagcaagtgagtaaaaaca

SEQ ID NO: 9540 - DNA, 76 bp, Homo sapiens
aaaactaaggcagcctgagctatggtcagcagaattcaatgacttcataagcaagtgagtaaaaacagtcttttaa

SEQ ID NO: 9541 - DNA, 74 bp, Homo sapiens
agcctgagctatggtcagcagaattcaatgacttcataagcaagtgagtaaaaacagtcttttaaaaaaccaaa

SEQ ID NO: 9542 - DNA, 71 bp, Homo sapiens
ggtcagcagaattcaatgacttcataagcaagtgagtaaaaacagtcttttaaaaaaccaaagatattccc

SEQ ID NO: 9543 - DNA, 71 bp, Homo sapiens
tcaatgacttcataagcaagtgagtaaaaacagtcttttaaaaaaccaaagatattccctcctgctataac

SEQ ID NO: 9544 - DNA, 75 bp, Homo sapiens
aactctaacttatctaataattgcatgttcttttttgccagtgcaggtgcttgactaaagattatgaaaagcgtc

SEQ ID NO: 9545 - DNA, 76 bp, Homo sapiens
taacttatctaataattgcatgttcttttttgccagtgcaggtgcttgactaaagattatgaaaagcgtccaacag

SEQ ID NO: 9546 - DNA, 76 bp, Homo sapiens
attgcatgttcttttttgccagtgcaggtgcttgactaaagattatgaaaagcgtccaacagtgtcagaactttta

SEQ ID NO: 9547 - DNA, 75 bp, Homo sapiens
ttttttgccagtgcaggtgcttgactaaagattatgaaaagcgtccaacagtgtcagaacttttacagcataaat

SEQ ID NO: 9548 - DNA, 77 bp, Homo sapiens
agtgcaggtgcttgactaaagattatgaaaagcgtccaacagtgtcagaacttttacagcataaattcattactcaa

SEQ ID NO: 9549 - DNA, 76 bp, Homo sapiens
ggtgcttgactaaagattatgaaaagcgtccaacagtgtcagaacttttacagcataaattcattactcaaattga

SEQ ID NO: 9550 - DNA, 75 bp, Homo sapiens
aagattatgaaaagcgtccaacagtgtcagaacttttacagcataaattcattactcaaattgagggcaaagatg

SEQ ID NO: 9551 - DNA, 77 bp, Homo sapiens
aaaagcgtccaacagtgtcagaacttttacagcataaattcattactcaaattgagggcaaagatgtgatgctacaa

SEQ ID NO: 9552 - DNA, 77 bp, Homo sapiens
caacagtgtcagaacttttacagcataaattcattactcaaattgagggcaaagatgtgatgctacaaaaacaacta

SEQ ID NO: 9553 - DNA, 74 bp, Homo sapiens
cttttacagcataaattcattactcaaattgagggcaaagatgtgatgctacaaaaacaactaacggaattcat

SEQ ID NO: 9554 - DNA, 77 bp, Homo sapiens
ataaattcattactcaaattgagggcaaagatgtgatgctacaaaaacaactaacggaattcattggcatccatcaa

SEQ ID NO: 9555 - DNA, 79 bp, Homo sapiens
attactcaaattgagggcaaagatgtgatgctacaaaaacaactaacggaattcattggcatccatcaatgcatgggag

SEQ ID NO: 9556 - DNA, 80 bp, Homo sapiens
aattgagggcaaagatgtgatgctacaaaaacaactaacggaattcattggcatccatcaatgcatgggaggcacagaaa

SEQ ID NO: 9557 - DNA, 80 bp, Homo sapiens
tgtgatgctacaaaaacaactaacggaattcattggcatccatcaatgcatgggaggcacagaaaaggccaggtaatcaa

SEQ ID NO: 9558 - DNA, 76 bp, Homo sapiens
caaaaacaactaacggaattcattggcatccatcaatgcatgggaggcacagaaaaggccaggtaatcaaataata

SEQ ID NO: 9559 - DNA, 78 bp, Homo sapiens
acaactaacggaattcattggcatccatcaatgcatgggaggcacagaaaaggccaggtaatcaaataatatcttgat

SEQ ID NO: 9560 - DNA, 80 bp, Homo sapiens
aattcattggcatccatcaatgcatgggaggcacagaaaaggccaggtaatcaaataatatcttgattccaaaatccaga

SEQ ID NO: 9561 - DNA, 74 bp, Homo sapiens
actatgagcagtaatcaattcttaaatcagaaagcgtttttctccacagacgtgaacgtattcacacgaagaaa

SEQ ID NO: 9562 - DNA, 69 bp, Homo sapiens
aatcaattcttaaatcagaaagcgtttttctccacagacgtgaacgtattcacacgaagaaagggaact

SEQ ID NO: 9563 - DNA, 69 bp, Homo sapiens
ttaaatcagaaagcgtttttctccacagacgtgaacgtattcacacgaagaaagggaacttcaaccgac

SEQ ID NO: 9564 - DNA, 68 bp, Homo sapiens
aaagcgtttttctccacagacgtgaacgtattcacacgaagaaagggaacttcaaccgacctctaata

SEQ ID NO: 9565 - DNA, 72 bp, Homo sapiens
tttctccacagacgtgaacgtattcacacgaagaaagggaacttcaaccgacctctaatatccaatctgaag

SEQ ID NO: 9566 - DNA, 74 bp, Homo sapiens
gtgaacgtattcacacgaagaaagggaacttcaaccgacctctaatatccaatctgaaggatgtagatgattta

SEQ ID NO: 9567 - DNA, 74 bp, Homo sapiens
ttcacacgaagaaagggaacttcaaccgacctctaatatccaatctgaaggatgtagatgatttagcaacccta

SEQ ID NO: 9568 - DNA, 70 bp, Homo sapiens
aaagggaacttcaaccgacctctaatatccaatctgaaggatgtagatgatttagcaaccctagaaattt

SEQ ID NO: 9569 - DNA, 73 bp, Homo sapiens
aaccgacctctaatatccaatctgaaggatgtagatgatttagcaaccctagaaattttggatgaggtaagaa

SEQ ID NO: 9570 - DNA, 74 bp, Homo sapiens
acctctaatatccaatctgaaggatgtagatgatttagcaaccctagaaattttggatgaggtaagaatttcag

SEQ ID NO: 9571 - DNA, 72 bp, Homo sapiens
ccaatctgaaggatgtagatgatttagcaaccctagaaattttggatgaggtaagaatttcagtttaattaa

SEQ ID NO: 9572 - DNA, 71 bp, Homo sapiens
ggatgtagatgatttagcaaccctagaaattttggatgaggtaagaatttcagtttaattaaacttagaca

SEQ ID NO: 9573 - DNA, 81 bp, Homo sapiens
ttttattttattgcagaatacagtctcagagcaacttgagaagtgttattccagagatcagatctacgtctatgtgggaga

SEQ ID NO: 9574 - DNA, 84 bp, Homo sapiens
tttattgcagaatacagtctcagagcaacttgagaagtgttattccagagatcagatctacgtctatgtgggagacatactcat

SEQ ID NO: 9575 - DNA, 83 bp, Homo sapiens
aatacagtctcagagcaacttgagaagtgttattccagagatcagatctacgtctatgtgggagacatactcattgctcttaa

SEQ ID NO: 9576 - DNA, 79 bp, Homo sapiens
agcaacttgagaagtgttattccagagatcagatctacgtctatgtgggagacatactcattgctcttaacccttttca

SEQ ID NO: 9577 - DNA, 80 bp, Homo sapiens
ttgagaagtgttattccagagatcagatctacgtctatgtgggagacatactcattgctcttaacccttttcagagtctg

SEQ ID NO: 9578 - DNA, 78 bp, Homo sapiens
ttattccagagatcagatctacgtctatgtgggagacatactcattgctcttaacccttttcagagtctgggtcttta

SEQ ID NO: 9579 - DNA, 76 bp, Homo sapiens
atcagatctacgtctatgtgggagacatactcattgctcttaacccttttcagagtctgggtctttactccacaaa

SEQ ID NO: 9580 - DNA, 75 bp, Homo sapiens
tatgtgggagacatactcattgctcttaacccttttcagagtctgggtctttactccacaaaggtatgtcgtatg

SEQ ID NO: 9581 - DNA, 72 bp, Homo sapiens
gggagacatactcattgctcttaacccttttcagagtctgggtctttactccacaaaggtatgtcgtatggg

SEQ ID NO: 9582 - DNA, 72 bp, Homo sapiens
attgctcttaacccttttcagagtctgggtctttactccacaaaggtatgtcgtatggggtgcattctgtta

SEQ ID NO: 9583 - DNA, 72 bp, Homo sapiens
ttaacccttttcagagtctgggtctttactccacaaaggtatgtcgtatggggtgcattctgttacttcata

SEQ ID NO: 9584 - DNA, 65 bp, Homo sapiens
aataaaaacaaaaagccctacaaaatgtattctttttaacctttagcattccaaactatatattg

SEQ ID NO: 9585 - DNA, 69 bp, Homo sapiens
acaaaaagccctacaaaatgtattctttttaacctttagcattccaaactatatattggatcaaagaga

SEQ ID NO: 9586 - DNA, 73 bp, Homo sapiens
caaaatgtattctttttaacctttagcattccaaactatatattggatcaaagagaactgccagtcctcctca

SEQ ID NO: 9587 - DNA, 74 bp, Homo sapiens
tctttttaacctttagcattccaaactatatattggatcaaagagaactgccagtcctcctcacatttttgcaa

SEQ ID NO: 9588 - DNA, 77 bp, Homo sapiens
acctttagcattccaaactatatattggatcaaagagaactgccagtcctcctcacatttttgcaatggctgactta

SEQ ID NO: 9589 - DNA, 80 bp, Homo sapiens
ttccaaactatatattggatcaaagagaactgccagtcctcctcacatttttgcaatggctgacttaggatatcaatcta

SEQ ID NO: 9590 - DNA, 84 bp, Homo sapiens
tatatattggatcaaagagaactgccagtcctcctcacatttttgcaatggctgacttaggatatcaatctatgataacatata

SEQ ID NO: 9591 - DNA, 84 bp, Homo sapiens
atcaaagagaactgccagtcctcctcacatttttgcaatggctgacttaggatatcaatctatgataacatataattcagatca

SEQ ID NO: 9592 - DNA, 82 bp, Homo sapiens
actgccagtcctcctcacatttttgcaatggctgacttaggatatcaatctatgataacatataattcagatcaggtaagaa

SEQ ID NO: 9593 - DNA, 82 bp, Homo sapiens
tcacatttttgcaatggctgacttaggatatcaatctatgataacatataattcagatcaggtaagaagagtctcccattct

SEQ ID NO: 9594 - DNA, 81 bp, Homo sapiens
tttgcaatggctgacttaggatatcaatctatgataacatataattcagatcaggtaagaagagtctcccattcttagaaa

SEQ ID NO: 9595 - DNA, 78 bp, Homo sapiens
ggctgacttaggatatcaatctatgataacatataattcagatcaggtaagaagagtctcccattcttagaaatttac

SEQ ID NO: 9596 - DNA, 75 bp, Homo sapiens
tgtcacttaattttgaggataaggtcttctcacagttttcttttctatgtatagtgcattgttatttctggagaa

SEQ ID NO: 9597 - DNA, 74 bp, Homo sapiens
attttgaggataaggtcttctcacagttttcttttctatgtatagtgcattgttatttctggagaaagtggtgc

SEQ ID NO: 9598 - DNA, 74 bp, Homo sapiens
aggataaggtcttctcacagttttcttttctatgtatagtgcattgttatttctggagaaagtggtgctggaaa

SEQ ID NO: 9599 - DNA, 78 bp, Homo sapiens
tcacagttttcttttctatgtatagtgcattgttatttctggagaaagtggtgctggaaagactgaaaatgctcatct

SEQ ID NO: 9600 - DNA, 76 bp, Homo sapiens
ttcttttctatgtatagtgcattgttatttctggagaaagtggtgctggaaagactgaaaatgctcatcttttagt

SEQ ID NO: 9601 - DNA, 82 bp, Homo sapiens
tatgtatagtgcattgttatttctggagaaagtggtgctggaaagactgaaaatgctcatcttttagttcagcagctgacag

SEQ ID NO: 9602 - DNA, 79 bp, Homo sapiens
ttgttatttctggagaaagtggtgctggaaagactgaaaatgctcatcttttagttcagcagctgacagtgcttggaaa

SEQ ID NO: 9603 - DNA, 78 bp, Homo sapiens
gagaaagtggtgctggaaagactgaaaatgctcatcttttagttcagcagctgacagtgcttggaaaggtataattta

SEQ ID NO: 9604 - DNA, 76 bp, Homo sapiens
tggtgctggaaagactgaaaatgctcatcttttagttcagcagctgacagtgcttggaaaggtataatttattttt

SEQ ID NO: 9605 - DNA, 75 bp, Homo sapiens
gaaagactgaaaatgctcatcttttagttcagcagctgacagtgcttggaaaggtataatttatttttttctctg

SEQ ID NO: 9606 - DNA, 75 bp, Homo sapiens
ctcatcttttagttcagcagctgacagtgcttggaaaggtataatttatttttttctctgtcccatcagaaatat

SEQ ID NO: 9607 - DNA, 73 bp, Homo sapiens
cttttagttcagcagctgacagtgcttggaaaggtataatttatttttttctctgtcccatcagaaatatttg

SEQ ID NO: 9608 - DNA, 68 bp, Homo sapiens
ttttaaaaatatcttaatattttctatttaggctaataacagaaccttgcaagagaagattttacaag

SEQ ID NO: 9609 - DNA, 70 bp, Homo sapiens
atcttaatattttctatttaggctaataacagaaccttgcaagagaagattttacaagtgaacaatttgg

SEQ ID NO: 9610 - DNA, 70 bp, Homo sapiens
tttctatttaggctaataacagaaccttgcaagagaagattttacaagtgaacaatttggtagaagcctt

SEQ ID NO: 9611 - DNA, 71 bp, Homo sapiens
atttaggctaataacagaaccttgcaagagaagattttacaagtgaacaatttggtagaagcctttggcaa

SEQ ID NO: 9612 - DNA, 74 bp, Homo sapiens
agaaccttgcaagagaagattttacaagtgaacaatttggtagaagcctttggcaatgcctgcactattataaa

SEQ ID NO: 9613 - DNA, 76 bp, Homo sapiens
caagagaagattttacaagtgaacaatttggtagaagcctttggcaatgcctgcactattataaatgacaattcta

SEQ ID NO: 9614 - DNA, 76 bp, Homo sapiens
attttacaagtgaacaatttggtagaagcctttggcaatgcctgcactattataaatgacaattctagcagatttg

SEQ ID NO: 9615 - DNA, 76 bp, Homo sapiens
aagtgaacaatttggtagaagcctttggcaatgcctgcactattataaatgacaattctagcagatttggaaaata

SEQ ID NO: 9616 - DNA, 77 bp, Homo sapiens
tttggtagaagcctttggcaatgcctgcactattataaatgacaattctagcagatttggaaaatacttagaaatga

SEQ ID NO: 9617 - DNA, 76 bp, Homo sapiens
cctttggcaatgcctgcactattataaatgacaattctagcagatttggaaaatacttagaaatgaaattcacctc

SEQ ID NO: 9618 - DNA, 76 bp, Homo sapiens
tgcactattataaatgacaattctagcagatttggaaaatacttagaaatgaaattcacctcttctggagcggtag

SEQ ID NO: 9619 - DNA, 74 bp, Homo sapiens
ttataaatgacaattctagcagatttggaaaatacttagaaatgaaattcacctcttctggagcggtagtggga

SEQ ID NO: 9620 - DNA, 74 bp, Homo sapiens
acaattctagcagatttggaaaatacttagaaatgaaattcacctcttctggagcggtagtgggagcacagatt

SEQ ID NO: 9621 - DNA, 75 bp, Homo sapiens
agatttggaaaatacttagaaatgaaattcacctcttctggagcggtagtgggagcacagatttctgaatatctc

SEQ ID NO: 9622 - DNA, 74 bp, Homo sapiens
aatacttagaaatgaaattcacctcttctggagcggtagtgggagcacagatttctgaatatctcctggaaaaa

SEQ ID NO: 9623 - DNA, 74 bp, Homo sapiens
aatgaaattcacctcttctggagcggtagtgggagcacagatttctgaatatctcctggaaaaatcccgagtta

SEQ ID NO: 9624 - DNA, 77 bp, Homo sapiens
tcttctggagcggtagtgggagcacagatttctgaatatctcctggaaaaatcccgagttatccaccaagctatgta

SEQ ID NO: 9625 - DNA, 73 bp, Homo sapiens
cggtagtgggagcacagatttctgaatatctcctggaaaaatcccgagttatccaccaagctatgtaagttta

SEQ ID NO: 9626 - DNA, 74 bp, Homo sapiens
agcacagatttctgaatatctcctggaaaaatcccgagttatccaccaagctatgtaagtttatttcaaatctc

SEQ ID NO: 9627 - DNA, 72 bp, Homo sapiens
ttctgaatatctcctggaaaaatcccgagttatccaccaagctatgtaagtttatttcaaatctctcctatt

SEQ ID NO: 9628 - DNA, 71 bp, Homo sapiens
atatctcctggaaaaatcccgagttatccaccaagctatgtaagtttatttcaaatctctcctattttgga

SEQ ID NO: 9629 - DNA, 65 bp, Homo sapiens
agcaagaaatgttcttactaactaccttactgtaaatatctttttttccagtggagaaaaaaatt

SEQ ID NO: 9630 - DNA, 64 bp, Homo sapiens
gttcttactaactaccttactgtaaatatctttttttccagtggagaaaaaaattttcatattt

SEQ ID NO: 9631 - DNA, 68 bp, Homo sapiens
ttccagtggagaaaaaaattttcatattttttactacatttatgctggtttggctgaaaagaagaaac

SEQ ID NO: 9632 - DNA, 69 bp, Homo sapiens
tggagaaaaaaattttcatattttttactacatttatgctggtttggctgaaaagaagaaactagccca

SEQ ID NO: 9633 - DNA, 72 bp, Homo sapiens
ttcatattttttactacatttatgctggtttggctgaaaagaagaaactagcccattacaaactgcctgaaa

SEQ ID NO: 9634 - DNA, 71 bp, Homo sapiens
tttttactacatttatgctggtttggctgaaaagaagaaactagcccattacaaactgcctgaaaataagc

SEQ ID NO: 9635 - DNA, 71 bp, Homo sapiens
atttatgctggtttggctgaaaagaagaaactagcccattacaaactgcctgaaaataagcctcccaggta

SEQ ID NO: 9636 - DNA, 70 bp, Homo sapiens
ttggctgaaaagaagaaactagcccattacaaactgcctgaaaataagcctcccaggtaatctaccaggt

SEQ ID NO: 9637 - DNA, 69 bp, Homo sapiens
aaagaagaaactagcccattacaaactgcctgaaaataagcctcccaggtaatctaccaggttgagctt

SEQ ID NO: 9638 - DNA, 73 bp, Homo sapiens
aactagcccattacaaactgcctgaaaataagcctcccaggtaatctaccaggttgagctttcatcaataata

SEQ ID NO: 9639 - DNA, 62 bp, Homo sapiens
ttcccttaattttagacttttatccttccttttatattttttttaggtacctacaaaatgac

SEQ ID NO: 9640 - DNA, 65 bp, Homo sapiens
tttagacttttatccttccttttatattttttttaggtacctacaaaatgaccacctcagaacag

SEQ ID NO: 9641 - DNA, 71 bp, Homo sapiens
tatccttccttttatattttttttaggtacctacaaaatgaccacctcagaacagtacaagacatcatgaa

SEQ ID NO: 9642 - DNA, 71 bp, Homo sapiens
tttatattttttttaggtacctacaaaatgaccacctcagaacagtacaagacatcatgaataatagtttc

SEQ ID NO: 9643 - DNA, 73 bp, Homo sapiens
ttttaggtacctacaaaatgaccacctcagaacagtacaagacatcatgaataatagtttctataaatcccag

SEQ ID NO: 9644 - DNA, 75 bp, Homo sapiens
ggtacctacaaaatgaccacctcagaacagtacaagacatcatgaataatagtttctataaatcccagtatgaat

SEQ ID NO: 9645 - DNA, 79 bp, Homo sapiens
gaccacctcagaacagtacaagacatcatgaataatagtttctataaatcccagtatgaattaattgagcaatgtttca

SEQ ID NO: 9646 - DNA, 79 bp, Homo sapiens
ctcagaacagtacaagacatcatgaataatagtttctataaatcccagtatgaattaattgagcaatgtttcaaagtca

SEQ ID NO: 9647 - DNA, 75 bp, Homo sapiens
acaagacatcatgaataatagtttctataaatcccagtatgaattaattgagcaatgtttcaaagtcataggttt

SEQ ID NO: 9648 - DNA, 72 bp, Homo sapiens
ataatagtttctataaatcccagtatgaattaattgagcaatgtttcaaagtcataggttttacaatggagg

SEQ ID NO: 9649 - DNA, 71 bp, Homo sapiens
agtttctataaatcccagtatgaattaattgagcaatgtttcaaagtcataggttttacaatggaggtaag

SEQ ID NO: 9650 - DNA, 74 bp, Homo sapiens
cccagtatgaattaattgagcaatgtttcaaagtcataggttttacaatggaggtaagtatgaaagacacttga

SEQ ID NO: 9651 - DNA, 72 bp, Homo sapiens
gaattaattgagcaatgtttcaaagtcataggttttacaatggaggtaagtatgaaagacacttgaacttct

SEQ ID NO: 9652 - DNA, 71 bp, Homo sapiens
gagcaatgtttcaaagtcataggttttacaatggaggtaagtatgaaagacacttgaacttctttagaaag

SEQ ID NO: 9653 - DNA, 83 bp, Homo sapiens
tgtactcaaggaaagaatgatgccaatgtttctgtggtgtgtttcagcaacttggtagtatatacagcatactcgctgcaatc

SEQ ID NO: 9654 - DNA, 82 bp, Homo sapiens
aaagaatgatgccaatgtttctgtggtgtgtttcagcaacttggtagtatatacagcatactcgctgcaatcttgaatgttg

SEQ ID NO: 9655 - DNA, 84 bp, Homo sapiens
tgccaatgtttctgtggtgtgtttcagcaacttggtagtatatacagcatactcgctgcaatcttgaatgttggcaacattgaa

SEQ ID NO: 9656 - DNA, 81 bp, Homo sapiens
tttctgtggtgtgtttcagcaacttggtagtatatacagcatactcgctgcaatcttgaatgttggcaacattgaattttc

SEQ ID NO: 9657 - DNA, 83 bp, Homo sapiens
tttcagcaacttggtagtatatacagcatactcgctgcaatcttgaatgttggcaacattgaattttcttctgtggcaactga

SEQ ID NO: 9658 - DNA, 80 bp, Homo sapiens
aacttggtagtatatacagcatactcgctgcaatcttgaatgttggcaacattgaattttcttctgtggcaactgaacac

SEQ ID NO: 9659 - DNA, 83 bp, Homo sapiens
agtatatacagcatactcgctgcaatcttgaatgttggcaacattgaattttcttctgtggcaactgaacaccagattgacaa

SEQ ID NO: 9660 - DNA, 81 bp, Homo sapiens
atactcgctgcaatcttgaatgttggcaacattgaattttcttctgtggcaactgaacaccagattgacaagagccacatt

SEQ ID NO: 9661 - DNA, 80 bp, Homo sapiens
aatcttgaatgttggcaacattgaattttcttctgtggcaactgaacaccagattgacaagagccacatttctaatcata

SEQ ID NO: 9662 - DNA, 79 bp, Homo sapiens
aatgttggcaacattgaattttcttctgtggcaactgaacaccagattgacaagagccacatttctaatcatacagccc

SEQ ID NO: 9663 - DNA, 79 bp, Homo sapiens
ttgaattttcttctgtggcaactgaacaccagattgacaagagccacatttctaatcatacagccctggagaactgtaa

SEQ ID NO: 9664 - DNA, 78 bp, Homo sapiens
ttctgtggcaactgaacaccagattgacaagagccacatttctaatcatacagccctggagaactgtaagttttatta

SEQ ID NO: 9665 - DNA, 77 bp, Homo sapiens
tgaacaccagattgacaagagccacatttctaatcatacagccctggagaactgtaagttttattaccttctattca

SEQ ID NO: 9666 - DNA, 73 bp, Homo sapiens
agattgacaagagccacatttctaatcatacagccctggagaactgtaagttttattaccttctattcaaaac

SEQ ID NO: 9667 - DNA, 72 bp, Homo sapiens
aagagccacatttctaatcatacagccctggagaactgtaagttttattaccttctattcaaaactgaaatc

SEQ ID NO: 9668 - DNA, 79 bp, Homo sapiens
acctcattgccataatttcttctaacaatgcatctgtttgtttttcaggtgcttctttgctttgcattcgggcagatga

SEQ ID NO: 9669 - DNA, 78 bp, Homo sapiens
ataatttcttctaacaatgcatctgtttgtttttcaggtgcttctttgctttgcattcgggcagatgagctacaagaa

SEQ ID NO: 9670 - DNA, 81 bp, Homo sapiens
tcttctaacaatgcatctgtttgtttttcaggtgcttctttgctttgcattcgggcagatgagctacaagaagctctcacc

SEQ ID NO: 9671 - DNA, 79 bp, Homo sapiens
atctgtttgtttttcaggtgcttctttgctttgcattcgggcagatgagctacaagaagctctcacctcccactgtgtg

SEQ ID NO: 9672 - DNA, 80 bp, Homo sapiens
ttgtttttcaggtgcttctttgctttgcattcgggcagatgagctacaagaagctctcacctcccactgtgtggtcacta

SEQ ID NO: 9673 - DNA, 80 bp, Homo sapiens
ttctttgctttgcattcgggcagatgagctacaagaagctctcacctcccactgtgtggtcactagaggagaaacaatta

SEQ ID NO: 9674 - DNA, 79 bp, Homo sapiens
tttgcattcgggcagatgagctacaagaagctctcacctcccactgtgtggtcactagaggagaaacaattatacgacc

SEQ ID NO: 9675 - DNA, 79 bp, Homo sapiens
cagatgagctacaagaagctctcacctcccactgtgtggtcactagaggagaaacaattatacgacccaatactgtaga

SEQ ID NO: 9676 - DNA, 74 bp, Homo sapiens
tacaagaagctctcacctcccactgtgtggtcactagaggagaaacaattatacgacccaatactgtagaaaaa

SEQ ID NO: 9677 - DNA, 73 bp, Homo sapiens
aagctctcacctcccactgtgtggtcactagaggagaaacaattatacgacccaatactgtagaaaaagctac

SEQ ID NO: 9678 - DNA, 75 bp, Homo sapiens
actgtgtggtcactagaggagaaacaattatacgacccaatactgtagaaaaagctaccgatgtcagggatgcca

SEQ ID NO: 9679 - DNA, 75 bp, Homo sapiens
tcactagaggagaaacaattatacgacccaatactgtagaaaaagctaccgatgtcagggatgccatggctaaaa

SEQ ID NO: 9680 - DNA, 72 bp, Homo sapiens
agaaacaattatacgacccaatactgtagaaaaagctaccgatgtcagggatgccatggctaaaactttata

SEQ ID NO: 9681 - DNA, 72 bp, Homo sapiens
aattatacgacccaatactgtagaaaaagctaccgatgtcagggatgccatggctaaaactttatatggacg

SEQ ID NO: 9682 - DNA, 74 bp, Homo sapiens
atactgtagaaaaagctaccgatgtcagggatgccatggctaaaactttatatggacgtctctttagttggata

SEQ ID NO: 9683 - DNA, 74 bp, Homo sapiens
tagaaaaagctaccgatgtcagggatgccatggctaaaactttatatggacgtctctttagttggatagtcaat

SEQ ID NO: 9684 - DNA, 75 bp, Homo sapiens
atgtcagggatgccatggctaaaactttatatggacgtctctttagttggatagtcaattgcattaacagtttgt

SEQ ID NO: 9685 - DNA, 74 bp, Homo sapiens
agggatgccatggctaaaactttatatggacgtctctttagttggatagtcaattgcattaacagtttgttgaa

SEQ ID NO: 9686 - DNA, 76 bp, Homo sapiens
aaaactttatatggacgtctctttagttggatagtcaattgcattaacagtttgttgaagcatgactcatcaccaa

SEQ ID NO: 9687 - DNA, 77 bp, Homo sapiens
tttatatggacgtctctttagttggatagtcaattgcattaacagtttgttgaagcatgactcatcaccaaggtaaa

SEQ ID NO: 9688 - DNA, 73 bp, Homo sapiens
cgtctctttagttggatagtcaattgcattaacagtttgttgaagcatgactcatcaccaaggtaaaaatttt

SEQ ID NO: 9689 - DNA, 71 bp, Homo sapiens
ttgcattaacagtttgttgaagcatgactcatcaccaaggtaaaaatttttacagaaacatttttttccca

SEQ ID NO: 9690 - DNA, 79 bp, Homo sapiens
attacctcttcaggaaataactcaaaataatgcctcttcaattcttctagtgggaatggtgatgagctgagcattggca

SEQ ID NO: 9691 - DNA, 80 bp, Homo sapiens
aaataactcaaaataatgcctcttcaattcttctagtgggaatggtgatgagctgagcattggcattcttgatatatttg

SEQ ID NO: 9692 - DNA, 80 bp, Homo sapiens
aaaataatgcctcttcaattcttctagtgggaatggtgatgagctgagcattggcattcttgatatatttggctttgaaa

SEQ ID NO: 9693 - DNA, 79 bp, Homo sapiens
tcttcaattcttctagtgggaatggtgatgagctgagcattggcattcttgatatatttggctttgaaaatttcaaaaa

SEQ ID NO: 9694 - DNA, 76 bp, Homo sapiens
aattcttctagtgggaatggtgatgagctgagcattggcattcttgatatatttggctttgaaaatttcaaaaaaa

SEQ ID NO: 9695 - DNA, 76 bp, Homo sapiens
gtgggaatggtgatgagctgagcattggcattcttgatatatttggctttgaaaatttcaaaaaaaattccttcga

SEQ ID NO: 9696 - DNA, 79 bp, Homo sapiens
atgagctgagcattggcattcttgatatatttggctttgaaaatttcaaaaaaaattccttcgagcagctgtgcattaa

SEQ ID NO: 9697 - DNA, 78 bp, Homo sapiens
agcattggcattcttgatatatttggctttgaaaatttcaaaaaaaattccttcgagcagctgtgcattaacattgca

SEQ ID NO: 9698 - DNA, 75 bp, Homo sapiens
cttgatatatttggctttgaaaatttcaaaaaaaattccttcgagcagctgtgcattaacattgcaaatgaacaa

SEQ ID NO: 9699 - DNA, 73 bp, Homo sapiens
atttggctttgaaaatttcaaaaaaaattccttcgagcagctgtgcattaacattgcaaatgaacaaattcag

SEQ ID NO: 9700 - DNA, 77 bp, Homo sapiens
tttcaaaaaaaattccttcgagcagctgtgcattaacattgcaaatgaacaaattcagtattattataatcaacatg

SEQ ID NO: 9701 - DNA, 81 bp, Homo sapiens
aaattccttcgagcagctgtgcattaacattgcaaatgaacaaattcagtattattataatcaacatgtgtttgcatggga

SEQ ID NO: 9702 - DNA, 82 bp, Homo sapiens
ttcgagcagctgtgcattaacattgcaaatgaacaaattcagtattattataatcaacatgtgtttgcatgggaacaggtaa

SEQ ID NO: 9703 - DNA, 79 bp, Homo sapiens
tgtgcattaacattgcaaatgaacaaattcagtattattataatcaacatgtgtttgcatgggaacaggtaagtctaag

SEQ ID NO: 9704 - DNA, 76 bp, Homo sapiens
cattgcaaatgaacaaattcagtattattataatcaacatgtgtttgcatgggaacaggtaagtctaagtacttac

SEQ ID NO: 9705 - DNA, 79 bp, Homo sapiens
caaattcagtattattataatcaacatgtgtttgcatgggaacaggtaagtctaagtacttactataaatatgcatgca

SEQ ID NO: 9706 - DNA, 75 bp, Homo sapiens
agctatatattattcacagttttaagtggttttgtctttattatagaatgaatacctaaatgaagatgtggatgc

SEQ ID NO: 9707 - DNA, 74 bp, Homo sapiens
tattcacagttttaagtggttttgtctttattatagaatgaatacctaaatgaagatgtggatgctagagttat

SEQ ID NO: 9708 - DNA, 76 bp, Homo sapiens
tttaagtggttttgtctttattatagaatgaatacctaaatgaagatgtggatgctagagttattgaatatgagga

SEQ ID NO: 9709 - DNA, 77 bp, Homo sapiens
ttttgtctttattatagaatgaatacctaaatgaagatgtggatgctagagttattgaatatgaggataactggccc

SEQ ID NO: 9710 - DNA, 79 bp, Homo sapiens
ttatagaatgaatacctaaatgaagatgtggatgctagagttattgaatatgaggataactggcccctcttagatatgt

SEQ ID NO: 9711 - DNA, 78 bp, Homo sapiens
aatacctaaatgaagatgtggatgctagagttattgaatatgaggataactggcccctcttagatatgtttctgcaaa

SEQ ID NO: 9712 - DNA, 80 bp, Homo sapiens
taaatgaagatgtggatgctagagttattgaatatgaggataactggcccctcttagatatgtttctgcaaaagccaatg

SEQ ID NO: 9713 - DNA, 75 bp, Homo sapiens
gatgctagagttattgaatatgaggataactggcccctcttagatatgtttctgcaaaagccaatgggtttactt

SEQ ID NO: 9714 - DNA, 73 bp, Homo sapiens
tagagttattgaatatgaggataactggcccctcttagatatgtttctgcaaaagccaatgggtttactttcc

SEQ ID NO: 9715 - DNA, 73 bp, Homo sapiens
atatgaggataactggcccctcttagatatgtttctgcaaaagccaatgggtttactttccctacttgatgaa

SEQ ID NO: 9716 - DNA, 70 bp, Homo sapiens
ataactggcccctcttagatatgtttctgcaaaagccaatgggtttactttccctacttgatgaagaaag

SEQ ID NO: 9717 - DNA, 71 bp, Homo sapiens
ctcttagatatgtttctgcaaaagccaatgggtttactttccctacttgatgaagaaagtagatttcccaa

SEQ ID NO: 9718 - DNA, 71 bp, Homo sapiens
atgtttctgcaaaagccaatgggtttactttccctacttgatgaagaaagtagatttcccaaggccactga

SEQ ID NO: 9719 - DNA, 69 bp, Homo sapiens
aaagccaatgggtttactttccctacttgatgaagaaagtagatttcccaaggccactgaccagactct

SEQ ID NO: 9720 - DNA, 70 bp, Homo sapiens
tttactttccctacttgatgaagaaagtagatttcccaaggccactgaccagactcttgtaggtgagttt

SEQ ID NO: 9721 - DNA, 75 bp, Homo sapiens
ctacttgatgaagaaagtagatttcccaaggccactgaccagactcttgtaggtgagttttcagtccagtgtgtc

SEQ ID NO: 9722 - DNA, 75 bp, Homo sapiens
gaaagtagatttcccaaggccactgaccagactcttgtaggtgagttttcagtccagtgtgtctgcatggtttta

SEQ ID NO: 9723 - DNA, 74 bp, Homo sapiens
tttttgaggatctcatacatgcttgatatttgagttcagtatttttctacagaaaaatttgaaggtaacctgaa

SEQ ID NO: 9724 - DNA, 76 bp, Homo sapiens
gaggatctcatacatgcttgatatttgagttcagtatttttctacagaaaaatttgaaggtaacctgaaatcacaa

SEQ ID NO: 9725 - DNA, 73 bp, Homo sapiens
gcttgatatttgagttcagtatttttctacagaaaaatttgaaggtaacctgaaatcacaatacttctggaga

SEQ ID NO: 9726 - DNA, 70 bp, Homo sapiens
atttgagttcagtatttttctacagaaaaatttgaaggtaacctgaaatcacaatacttctggagaccca

SEQ ID NO: 9727 - DNA, 69 bp, Homo sapiens
cagtatttttctacagaaaaatttgaaggtaacctgaaatcacaatacttctggagacccaaaagaatg

SEQ ID NO: 9728 - DNA, 68 bp, Homo sapiens
ctacagaaaaatttgaaggtaacctgaaatcacaatacttctggagacccaaaagaatggaacttagt

SEQ ID NO: 9729 - DNA, 69 bp, Homo sapiens
tttgaaggtaacctgaaatcacaatacttctggagacccaaaagaatggaacttagttttggaattcac

SEQ ID NO: 9730 - DNA, 73 bp, Homo sapiens
taacctgaaatcacaatacttctggagacccaaaagaatggaacttagttttggaattcaccattatgcagga

SEQ ID NO: 9731 - DNA, 69 bp, Homo sapiens
aatacttctggagacccaaaagaatggaacttagttttggaattcaccattatgcaggaaaggtaagaa

SEQ ID NO: 9732 - DNA, 69 bp, Homo sapiens
gagacccaaaagaatggaacttagttttggaattcaccattatgcaggaaaggtaagaactctaaagaa

SEQ ID NO: 9733 - DNA, 71 bp, Homo sapiens
agaatggaacttagttttggaattcaccattatgcaggaaaggtaagaactctaaagaattatgactgagt

SEQ ID NO: 9734 - DNA, 71 bp, Homo sapiens
gaacttagttttggaattcaccattatgcaggaaaggtaagaactctaaagaattatgactgagtttctcc

SEQ ID NO: 9735 - DNA, 82 bp, Homo sapiens
atgacaatgacattgattgtgataattatagcatactgtatcaacaggtcctctataatgcaagtggattcttagccaaaaa

SEQ ID NO: 9736 - DNA, 82 bp, Homo sapiens
atgacattgattgtgataattatagcatactgtatcaacaggtcctctataatgcaagtggattcttagccaaaaacagaga

SEQ ID NO: 9737 - DNA, 78 bp, Homo sapiens
ataattatagcatactgtatcaacaggtcctctataatgcaagtggattcttagccaaaaacagagacactcttccta

SEQ ID NO: 9738 - DNA, 80 bp, Homo sapiens
tatagcatactgtatcaacaggtcctctataatgcaagtggattcttagccaaaaacagagacactcttcctactgacat

SEQ ID NO: 9739 - DNA, 78 bp, Homo sapiens
tatcaacaggtcctctataatgcaagtggattcttagccaaaaacagagacactcttcctactgacattgtgctactt

SEQ ID NO: 9740 - DNA, 79 bp, Homo sapiens
tctataatgcaagtggattcttagccaaaaacagagacactcttcctactgacattgtgctacttttgaggtcatccga

SEQ ID NO: 9741 - DNA, 77 bp, Homo sapiens
aatgcaagtggattcttagccaaaaacagagacactcttcctactgacattgtgctacttttgaggtcatccgacaa

SEQ ID NO: 9742 - DNA, 76 bp, Homo sapiens
ttcttagccaaaaacagagacactcttcctactgacattgtgctacttttgaggtcatccgacaacagtgtaatta

SEQ ID NO: 9743 - DNA, 75 bp, Homo sapiens
aaaaacagagacactcttcctactgacattgtgctacttttgaggtcatccgacaacagtgtaattaggcaacta

SEQ ID NO: 9744 - DNA, 75 bp, Homo sapiens
acactcttcctactgacattgtgctacttttgaggtcatccgacaacagtgtaattaggcaactagtcaaccacc

SEQ ID NO: 9745 - DNA, 76 bp, Homo sapiens
tactgacattgtgctacttttgaggtcatccgacaacagtgtaattaggcaactagtcaaccaccctctgaccaaa

SEQ ID NO: 9746 - DNA, 72 bp, Homo sapiens
tacttttgaggtcatccgacaacagtgtaattaggcaactagtcaaccaccctctgaccaaaacaggtaaga

SEQ ID NO: 9747 - DNA, 70 bp, Homo sapiens
aggtcatccgacaacagtgtaattaggcaactagtcaaccaccctctgaccaaaacaggtaagacaattt

SEQ ID NO: 9748 - DNA, 68 bp, Homo sapiens
acaacagtgtaattaggcaactagtcaaccaccctctgaccaaaacaggtaagacaattttccttacc

SEQ ID NO: 9749 - DNA, 67 bp, Homo sapiens
taattaggcaactagtcaaccaccctctgaccaaaacaggtaagacaattttccttacctggaagtt

SEQ ID NO: 9750 - DNA, 75 bp, Homo sapiens
aaatcatctagccattaaggattctaaaaggtatattacatttttctacattctcataggtaatctgccacattc

SEQ ID NO: 9751 - DNA, 72 bp, Homo sapiens
agccattaaggattctaaaaggtatattacatttttctacattctcataggtaatctgccacattctaaaac

SEQ ID NO: 9752 - DNA, 71 bp, Homo sapiens
ggattctaaaaggtatattacatttttctacattctcataggtaatctgccacattctaaaactaaaaatg

SEQ ID NO: 9753 - DNA, 73 bp, Homo sapiens
ggtatattacatttttctacattctcataggtaatctgccacattctaaaactaaaaatgttataaactatca

SEQ ID NO: 9754 - DNA, 75 bp, Homo sapiens
ttctacattctcataggtaatctgccacattctaaaactaaaaatgttataaactatcaaatgaggacttcagaa

SEQ ID NO: 9755 - DNA, 73 bp, Homo sapiens
cattctcataggtaatctgccacattctaaaactaaaaatgttataaactatcaaatgaggacttcagaaaaa

SEQ ID NO: 9756 - DNA, 73 bp, Homo sapiens
tctgccacattctaaaactaaaaatgttataaactatcaaatgaggacttcagaaaaattaatcaacctggca

SEQ ID NO: 9757 - DNA, 69 bp, Homo sapiens
tctaaaactaaaaatgttataaactatcaaatgaggacttcagaaaaattaatcaacctggcaaaggta

SEQ ID NO: 9758 - DNA, 69 bp, Homo sapiens
aaaatgttataaactatcaaatgaggacttcagaaaaattaatcaacctggcaaaggtaagaaaatgct

SEQ ID NO: 9759 - DNA, 68 bp, Homo sapiens
gttataaactatcaaatgaggacttcagaaaaattaatcaacctggcaaaggtaagaaaatgcttttt

SEQ ID NO: 9760 - DNA, 70 bp, Homo sapiens
aatgaggacttcagaaaaattaatcaacctggcaaaggtaagaaaatgctttttttcttggcagtgagtc

SEQ ID NO: 9761 - DNA, 70 bp, Homo sapiens
cttcagaaaaattaatcaacctggcaaaggtaagaaaatgctttttttcttggcagtgagtctaagaatc

SEQ ID NO: 9762 - DNA, 77 bp, Homo sapiens
tgtctgtagataataaagtacaatagataccaaggcatcactgtcttccttggtctccttagggcgacactggagaa

SEQ ID NO: 9763 - DNA, 75 bp, Homo sapiens
taataaagtacaatagataccaaggcatcactgtcttccttggtctccttagggcgacactggagaagccacacg

SEQ ID NO: 9764 - DNA, 80 bp, Homo sapiens
atagataccaaggcatcactgtcttccttggtctccttagggcgacactggagaagccacacgtcatgccagagagacaa

SEQ ID NO: 9765 - DNA, 79 bp, Homo sapiens
catcactgtcttccttggtctccttagggcgacactggagaagccacacgtcatgccagagagacaaccaacatgaaaa

SEQ ID NO: 9766 - DNA, 77 bp, Homo sapiens
tcttccttggtctccttagggcgacactggagaagccacacgtcatgccagagagacaaccaacatgaaaacacaaa

SEQ ID NO: 9767 - DNA, 79 bp, Homo sapiens
tccttagggcgacactggagaagccacacgtcatgccagagagacaaccaacatgaaaacacaaacggttgcatcatat

SEQ ID NO: 9768 - DNA, 79 bp, Homo sapiens
gacactggagaagccacacgtcatgccagagagacaaccaacatgaaaacacaaacggttgcatcatattttagagtaa

SEQ ID NO: 9769 - DNA, 77 bp, Homo sapiens
aagccacacgtcatgccagagagacaaccaacatgaaaacacaaacggttgcatcatattttagagtaagatattaa

SEQ ID NO: 9770 - DNA, 79 bp, Homo sapiens
tcatgccagagagacaaccaacatgaaaacacaaacggttgcatcatattttagagtaagatattaaactatgatgtat

SEQ ID NO: 9771 - DNA, 78 bp, Homo sapiens
cagagagacaaccaacatgaaaacacaaacggttgcatcatattttagagtaagatattaaactatgatgtattgtgc

SEQ ID NO: 9772 - DNA, 74 bp, Homo sapiens
accaacatgaaaacacaaacggttgcatcatattttagagtaagatattaaactatgatgtattgtgcttaggg

SEQ ID NO: 9773 - DNA, 75 bp, Homo sapiens
acacaaacggttgcatcatattttagagtaagatattaaactatgatgtattgtgcttaggggtgctatttagtc

SEQ ID NO: 9774 - DNA, 71 bp, Homo sapiens
cgtttttgtatgctacattgggaaatttatttttgttgtgtattatagtattccctgatggatttgttgtc

SEQ ID NO: 9775 - DNA, 72 bp, Homo sapiens
tgctacattgggaaatttatttttgttgtgtattatagtattccctgatggatttgttgtctaaaatggtgg

SEQ ID NO: 9776 - DNA, 70 bp, Homo sapiens
gggaaatttatttttgttgtgtattatagtattccctgatggatttgttgtctaaaatggtggtgggcca

SEQ ID NO: 9777 - DNA, 70 bp, Homo sapiens
atttttgttgtgtattatagtattccctgatggatttgttgtctaaaatggtggtgggccaacctcattt

SEQ ID NO: 9778 - DNA, 74 bp, Homo sapiens
tattatagtattccctgatggatttgttgtctaaaatggtggtgggccaacctcattttgtccgttgcatcaaa

SEQ ID NO: 9779 - DNA, 73 bp, Homo sapiens
tattccctgatggatttgttgtctaaaatggtggtgggccaacctcattttgtccgttgcatcaaaccaaata

SEQ ID NO: 9780 - DNA, 74 bp, Homo sapiens
atggatttgttgtctaaaatggtggtgggccaacctcattttgtccgttgcatcaaaccaaatagtgagcgtca

SEQ ID NO: 9781 - DNA, 74 bp, Homo sapiens
tctaaaatggtggtgggccaacctcattttgtccgttgcatcaaaccaaatagtgagcgtcaggcaagaaaata

SEQ ID NO: 9782 - DNA, 75 bp, Homo sapiens
gtgggccaacctcattttgtccgttgcatcaaaccaaatagtgagcgtcaggcaagaaaatatgacaaagagaaa

SEQ ID NO: 9783 - DNA, 76 bp, Homo sapiens
acctcattttgtccgttgcatcaaaccaaatagtgagcgtcaggcaagaaaatatgacaaagagaaagttctgcta

SEQ ID NO: 9784 - DNA, 78 bp, Homo sapiens
cgttgcatcaaaccaaatagtgagcgtcaggcaagaaaatatgacaaagagaaagttctgctacagcttcggtacaca

SEQ ID NO: 9785 - DNA, 74 bp, Homo sapiens
aaaccaaatagtgagcgtcaggcaagaaaatatgacaaagagaaagttctgctacagcttcggtacacaggaat

SEQ ID NO: 9786 - DNA, 76 bp, Homo sapiens
aatagtgagcgtcaggcaagaaaatatgacaaagagaaagttctgctacagcttcggtacacaggaattctggaaa

SEQ ID NO: 9787 - DNA, 76 bp, Homo sapiens
gcaagaaaatatgacaaagagaaagttctgctacagcttcggtacacaggaattctggaaacagcaagaattcgaa

SEQ ID NO: 9788 - DNA, 75 bp, Homo sapiens
aaatatgacaaagagaaagttctgctacagcttcggtacacaggaattctggaaacagcaagaattcgaagacta

SEQ ID NO: 9789 - DNA, 74 bp, Homo sapiens
aaagagaaagttctgctacagcttcggtacacaggaattctggaaacagcaagaattcgaagactaggattctc

SEQ ID NO: 9790 - DNA, 73 bp, Homo sapiens
ctacagcttcggtacacaggaattctggaaacagcaagaattcgaagactaggattctcccatcggatacttt

SEQ ID NO: 9791 - DNA, 73 bp, Homo sapiens
ttcggtacacaggaattctggaaacagcaagaattcgaagactaggattctcccatcggatactttttgctaa

SEQ ID NO: 9792 - DNA, 71 bp, Homo sapiens
aattctggaaacagcaagaattcgaagactaggattctcccatcggatactttttgctaactttataaagc

SEQ ID NO: 9793 - DNA, 71 bp, Homo sapiens
aaacagcaagaattcgaagactaggattctcccatcggatactttttgctaactttataaagcggtatgtg

SEQ ID NO: 9794 - DNA, 69 bp, Homo sapiens
aattcgaagactaggattctcccatcggatactttttgctaactttataaagcggtatgtggatttctt

SEQ ID NO: 9795 - DNA, 69 bp, Homo sapiens
agactaggattctcccatcggatactttttgctaactttataaagcggtatgtggatttctttttcagt

SEQ ID NO: 9796 - DNA, 72 bp, Homo sapiens
atgttggcactttatgcaatactaaccagcccttttttccattccaaggtactaccttctctgctacaagtc

SEQ ID NO: 9797 - DNA, 71 bp, Homo sapiens
actttatgcaatactaaccagcccttttttccattccaaggtactaccttctctgctacaagtcgagcgag

SEQ ID NO: 9798 - DNA, 69 bp, Homo sapiens
aatactaaccagcccttttttccattccaaggtactaccttctctgctacaagtcgagcgaggagcccc

SEQ ID NO: 9799 - DNA, 74 bp, Homo sapiens
cttttttccattccaaggtactaccttctctgctacaagtcgagcgaggagccccgcatgagccctgacacctg

SEQ ID NO: 9800 - DNA, 76 bp, Homo sapiens
attccaaggtactaccttctctgctacaagtcgagcgaggagccccgcatgagccctgacacctgtgccaccattt

SEQ ID NO: 9801 - DNA, 76 bp, Homo sapiens
gtactaccttctctgctacaagtcgagcgaggagccccgcatgagccctgacacctgtgccaccattttggaaaaa

SEQ ID NO: 9802 - DNA, 79 bp, Homo sapiens
tctgctacaagtcgagcgaggagccccgcatgagccctgacacctgtgccaccattttggaaaaagctggtctcgataa

SEQ ID NO: 9803 - DNA, 75 bp, Homo sapiens
aagtcgagcgaggagccccgcatgagccctgacacctgtgccaccattttggaaaaagctggtctcgataactgg

SEQ ID NO: 9804 - DNA, 73 bp, Homo sapiens
ccccgcatgagccctgacacctgtgccaccattttggaaaaagctggtctcgataactgggctcttggaaaaa

SEQ ID NO: 9805 - DNA, 72 bp, Homo sapiens
atgagccctgacacctgtgccaccattttggaaaaagctggtctcgataactgggctcttggaaaaacaaaa

SEQ ID NO: 9806 - DNA, 70 bp, Homo sapiens
ctgtgccaccattttggaaaaagctggtctcgataactgggctcttggaaaaacaaaagtaatgttttca

SEQ ID NO: 9807 - DNA, 69 bp, Homo sapiens
caccattttggaaaaagctggtctcgataactgggctcttggaaaaacaaaagtaatgttttcatgtaa

SEQ ID NO: 9808 - DNA, 69 bp, Homo sapiens
ggaaaaagctggtctcgataactgggctcttggaaaaacaaaagtaatgttttcatgtaattttcagga

SEQ ID NO: 9809 - DNA, 68 bp, Homo sapiens
ggtctcgataactgggctcttggaaaaacaaaagtaatgttttcatgtaattttcaggaaaataaata

SEQ ID NO: 9810 - DNA, 68 bp, Homo sapiens
ctgggctcttggaaaaacaaaagtaatgttttcatgtaattttcaggaaaataaataattatgctggg

SEQ ID NO: 9811 - DNA, 70 bp, Homo sapiens
tggaaaaacaaaagtaatgttttcatgtaattttcaggaaaataaataattatgctgggttcactgagaa

SEQ ID NO: 9812 - DNA, 72 bp, Homo sapiens
gtaatgttttcatgtaattttcaggaaaataaataattatgctgggttcactgagaattgtaacattttaca

SEQ ID NO: 9813 - DNA, 72 bp, Homo sapiens
catgtaattttcaggaaaataaataattatgctgggttcactgagaattgtaacattttacaatgtttgaaa

SEQ ID NO: 9814 - DNA, 70 bp, Homo sapiens
caggaaaataaataattatgctgggttcactgagaattgtaacattttacaatgtttgaaagtatggttt

SEQ ID NO: 9815 - DNA, 76 bp, Homo sapiens
tcacatctgtgtgccatggttctttgtattatattttaatttttcaggtgttccttaagtattatcacgtggagca

SEQ ID NO: 9816 - DNA, 72 bp, Homo sapiens
ctgtgtgccatggttctttgtattatattttaatttttcaggtgttccttaagtattatcacgtggagcagt

SEQ ID NO: 9817 - DNA, 71 bp, Homo sapiens
ctttgtattatattttaatttttcaggtgttccttaagtattatcacgtggagcagttaaatctaatgcga

SEQ ID NO: 9818 - DNA, 71 bp, Homo sapiens
tattttaatttttcaggtgttccttaagtattatcacgtggagcagttaaatctaatgcgaaaggaagcta

SEQ ID NO: 9819 - DNA, 74 bp, Homo sapiens
tttcaggtgttccttaagtattatcacgtggagcagttaaatctaatgcgaaaggaagctattgacaagcttat

SEQ ID NO: 9820 - DNA, 74 bp, Homo sapiens
gtgttccttaagtattatcacgtggagcagttaaatctaatgcgaaaggaagctattgacaagcttattttgat

SEQ ID NO: 9821 - DNA, 76 bp, Homo sapiens
aagtattatcacgtggagcagttaaatctaatgcgaaaggaagctattgacaagcttattttgattcaagcttgtg

SEQ ID NO: 9822 - DNA, 80 bp, Homo sapiens
tggagcagttaaatctaatgcgaaaggaagctattgacaagcttattttgattcaagcttgtgtcagagcattcttgtgt

SEQ ID NO: 9823 - DNA, 79 bp, Homo sapiens
ttaaatctaatgcgaaaggaagctattgacaagcttattttgattcaagcttgtgtcagagcattcttgtgttcaagaa

SEQ ID NO: 9824 - DNA, 76 bp, Homo sapiens
aaaggaagctattgacaagcttattttgattcaagcttgtgtcagagcattcttgtgttcaagaagataccaaaaa

SEQ ID NO: 9825 - DNA, 77 bp, Homo sapiens
aagctattgacaagcttattttgattcaagcttgtgtcagagcattcttgtgttcaagaagataccaaaaaatacag

SEQ ID NO: 9826 - DNA, 75 bp, Homo sapiens
caagcttattttgattcaagcttgtgtcagagcattcttgtgttcaagaagataccaaaaaatacaggagaaaag

SEQ ID NO: 9827 - DNA, 75 bp, Homo sapiens
ttgattcaagcttgtgtcagagcattcttgtgttcaagaagataccaaaaaatacaggagaaaaggaaagaaagc

SEQ ID NO: 9828 - DNA, 74 bp, Homo sapiens
cttgtgtcagagcattcttgtgttcaagaagataccaaaaaatacaggagaaaaggaaagaaagcgctataata

SEQ ID NO: 9829 - DNA, 73 bp, Homo sapiens
gcattcttgtgttcaagaagataccaaaaaatacaggagaaaaggaaagaaagcgctataataatacagtcag

SEQ ID NO: 9830 - DNA, 71 bp, Homo sapiens
gttcaagaagataccaaaaaatacaggagaaaaggaaagaaagcgctataataatacagtcaggtaatctc

SEQ ID NO: 9831 - DNA, 72 bp, Homo sapiens
gataccaaaaaatacaggagaaaaggaaagaaagcgctataataatacagtcaggtaatctctttgacatat

SEQ ID NO: 9832 - DNA, 75 bp, Homo sapiens
caggagaaaaggaaagaaagcgctataataatacagtcaggtaatctctttgacatatttagatatggtcataaa

SEQ ID NO: 9833 - DNA, 74 bp, Homo sapiens
tttatttgtttataattaacactactatgggctttctgtgtttcagctgcaagaggacaccttgtcaggaaaca

SEQ ID NO: 9834 - DNA, 74 bp, Homo sapiens
ttgtttataattaacactactatgggctttctgtgtttcagctgcaagaggacaccttgtcaggaaacaaagaa

SEQ ID NO: 9835 - DNA, 73 bp, Homo sapiens
ttaacactactatgggctttctgtgtttcagctgcaagaggacaccttgtcaggaaacaaagaaaagaaattg

SEQ ID NO: 9836 - DNA, 75 bp, Homo sapiens
tatgggctttctgtgtttcagctgcaagaggacaccttgtcaggaaacaaagaaaagaaattgttgacatgaaaa

SEQ ID NO: 9837 - DNA, 75 bp, Homo sapiens
tttcagctgcaagaggacaccttgtcaggaaacaaagaaaagaaattgttgacatgaaaaacacagcagtaacaa

SEQ ID NO: 9838 - DNA, 72 bp, Homo sapiens
aagaggacaccttgtcaggaaacaaagaaaagaaattgttgacatgaaaaacacagcagtaacaaccattca

SEQ ID NO: 9839 - DNA, 71 bp, Homo sapiens
gacaccttgtcaggaaacaaagaaaagaaattgttgacatgaaaaacacagcagtaacaaccattcaaact

SEQ ID NO: 9840 - DNA, 73 bp, Homo sapiens
aacaaagaaaagaaattgttgacatgaaaaacacagcagtaacaaccattcaaacttctgatcaggaattcga

SEQ ID NO: 9841 - DNA, 74 bp, Homo sapiens
agaaattgttgacatgaaaaacacagcagtaacaaccattcaaacttctgatcaggaattcgactacaagaaaa

SEQ ID NO: 9842 - DNA, 75 bp, Homo sapiens
tgttgacatgaaaaacacagcagtaacaaccattcaaacttctgatcaggaattcgactacaagaaaaactttga

SEQ ID NO: 9843 - DNA, 71 bp, Homo sapiens
acacagcagtaacaaccattcaaacttctgatcaggaattcgactacaagaaaaactttgaaaatacaagg

SEQ ID NO: 9844 - DNA, 71 bp, Homo sapiens
gcagtaacaaccattcaaacttctgatcaggaattcgactacaagaaaaactttgaaaatacaaggtataa

SEQ ID NO: 9845 - DNA, 73 bp, Homo sapiens
ccattcaaacttctgatcaggaattcgactacaagaaaaactttgaaaatacaaggtataatgatgttcattc

SEQ ID NO: 9846 - DNA, 72 bp, Homo sapiens
ctgatcaggaattcgactacaagaaaaactttgaaaatacaaggtataatgatgttcattcttataccgttg

SEQ ID NO: 9847 - DNA, 74 bp, Homo sapiens
agctccagtttagtactgtatattcaaagataatatattttacacagggaatctttcgtgaagaaacaagcaga

SEQ ID NO: 9848 - DNA, 75 bp, Homo sapiens
agtactgtatattcaaagataatatattttacacagggaatctttcgtgaagaaacaagcagaaaatgcaatctc

SEQ ID NO: 9849 - DNA, 79 bp, Homo sapiens
tgtatattcaaagataatatattttacacagggaatctttcgtgaagaaacaagcagaaaatgcaatctctgctaatga

SEQ ID NO: 9850 - DNA, 77 bp, Homo sapiens
aatatattttacacagggaatctttcgtgaagaaacaagcagaaaatgcaatctctgctaatgaaagattcatttca

SEQ ID NO: 9851 - DNA, 79 bp, Homo sapiens
ttacacagggaatctttcgtgaagaaacaagcagaaaatgcaatctctgctaatgaaagattcatttcagctccaaata

SEQ ID NO: 9852 - DNA, 77 bp, Homo sapiens
gggaatctttcgtgaagaaacaagcagaaaatgcaatctctgctaatgaaagattcatttcagctccaaataataaa

SEQ ID NO: 9853 - DNA, 78 bp, Homo sapiens
agaaacaagcagaaaatgcaatctctgctaatgaaagattcatttcagctccaaataataaaggaagtgtatctgtag

SEQ ID NO: 9854 - DNA, 78 bp, Homo sapiens
agaaaatgcaatctctgctaatgaaagattcatttcagctccaaataataaaggaagtgtatctgtagtgaagacttc

SEQ ID NO: 9855 - DNA, 77 bp, Homo sapiens
atctctgctaatgaaagattcatttcagctccaaataataaaggaagtgtatctgtagtgaagacttccactttcaa

SEQ ID NO: 9856 - DNA, 75 bp, Homo sapiens
tgctaatgaaagattcatttcagctccaaataataaaggaagtgtatctgtagtgaagacttccactttcaaacc

SEQ ID NO: 9857 - DNA, 73 bp, Homo sapiens
attcatttcagctccaaataataaaggaagtgtatctgtagtgaagacttccactttcaaacctgaagaggaa

SEQ ID NO: 9858 - DNA, 70 bp, Homo sapiens
ctccaaataataaaggaagtgtatctgtagtgaagacttccactttcaaacctgaagaggaaaccaccaa

SEQ ID NO: 9859 - DNA, 74 bp, Homo sapiens
taataaaggaagtgtatctgtagtgaagacttccactttcaaacctgaagaggaaaccaccaatgctgtggaga

SEQ ID NO: 9860 - DNA, 76 bp, Homo sapiens
tatctgtagtgaagacttccactttcaaacctgaagaggaaaccaccaatgctgtggagagtaacaacagagtgta

SEQ ID NO: 9861 - DNA, 75 bp, Homo sapiens
aagacttccactttcaaacctgaagaggaaaccaccaatgctgtggagagtaacaacagagtgtatcagactcca

SEQ ID NO: 9862 - DNA, 74 bp, Homo sapiens
ttccactttcaaacctgaagaggaaaccaccaatgctgtggagagtaacaacagagtgtatcagactccaaaaa

SEQ ID NO: 9863 - DNA, 73 bp, Homo sapiens
aaacctgaagaggaaaccaccaatgctgtggagagtaacaacagagtgtatcagactccaaaaaaaatgaata

SEQ ID NO: 9864 - DNA, 76 bp, Homo sapiens
aaaccaccaatgctgtggagagtaacaacagagtgtatcagactccaaaaaaaatgaataatgtgtatgaggaaga

SEQ ID NO: 9865 - DNA, 77 bp, Homo sapiens
aatgctgtggagagtaacaacagagtgtatcagactccaaaaaaaatgaataatgtgtatgaggaagaggttaagca

SEQ ID NO: 9866 - DNA, 75 bp, Homo sapiens
gagagtaacaacagagtgtatcagactccaaaaaaaatgaataatgtgtatgaggaagaggttaagcaagaattc

SEQ ID NO: 9867 - DNA, 74 bp, Homo sapiens
cagagtgtatcagactccaaaaaaaatgaataatgtgtatgaggaagaggttaagcaagaattctaccttgtag

SEQ ID NO: 9868 - DNA, 71 bp, Homo sapiens
ctccaaaaaaaatgaataatgtgtatgaggaagaggttaagcaagaattctaccttgtagggccagaagta

SEQ ID NO: 9869 - DNA, 70 bp, Homo sapiens
aaaaaatgaataatgtgtatgaggaagaggttaagcaagaattctaccttgtagggccagaagtaagccc

SEQ ID NO: 9870 - DNA, 71 bp, Homo sapiens
ataatgtgtatgaggaagaggttaagcaagaattctaccttgtagggccagaagtaagccccaaacagaag

SEQ ID NO: 9871 - DNA, 70 bp, Homo sapiens
aggaagaggttaagcaagaattctaccttgtagggccagaagtaagccccaaacagaagtctgtcaaaga

SEQ ID NO: 9872 - DNA, 73 bp, Homo sapiens
attctaccttgtagggccagaagtaagccccaaacagaagtctgtcaaagacctggaagagaacagcaatcta

SEQ ID NO: 9873 - DNA, 73 bp, Homo sapiens
tgtagggccagaagtaagccccaaacagaagtctgtcaaagacctggaagagaacagcaatctaaggaaagtg

SEQ ID NO: 9874 - DNA, 71 bp, Homo sapiens
aagtaagccccaaacagaagtctgtcaaagacctggaagagaacagcaatctaaggaaagtggagaaagag

SEQ ID NO: 9875 - DNA, 79 bp, Homo sapiens
tctgtcaaagacctggaagagaacagcaatctaaggaaagtggagaaagaggaagctatgatccagagttactatcaga

SEQ ID NO: 9876 - DNA, 77 bp, Homo sapiens
acctggaagagaacagcaatctaaggaaagtggagaaagaggaagctatgatccagagttactatcagaggtacaca

SEQ ID NO: 9877 - DNA, 77 bp, Homo sapiens
aacagcaatctaaggaaagtggagaaagaggaagctatgatccagagttactatcagaggtacacagaggagaggaa

SEQ ID NO: 9878 - DNA, 78 bp, Homo sapiens
tctaaggaaagtggagaaagaggaagctatgatccagagttactatcagaggtacacagaggagaggaattgtgaaga

SEQ ID NO: 9879 - DNA, 81 bp, Homo sapiens
aggaagctatgatccagagttactatcagaggtacacagaggagaggaattgtgaagagtcaaaagcagcatatctagaaa

SEQ ID NO: 9880 - DNA, 80 bp, Homo sapiens
tactatcagaggtacacagaggagaggaattgtgaagagtcaaaagcagcatatctagaaaggaaggccatatcagaaag

SEQ ID NO: 9881 - DNA, 78 bp, Homo sapiens
acagaggagaggaattgtgaagagtcaaaagcagcatatctagaaaggaaggccatatcagaaaggccaagctaccca

SEQ ID NO: 9882 - DNA, 77 bp, Homo sapiens
aggaattgtgaagagtcaaaagcagcatatctagaaaggaaggccatatcagaaaggccaagctacccagtgccttg

SEQ ID NO: 9883 - DNA, 77 bp, Homo sapiens
aagagtcaaaagcagcatatctagaaaggaaggccatatcagaaaggccaagctacccagtgccttggttagctgaa

SEQ ID NO: 9884 - DNA, 77 bp, Homo sapiens
aaaagcagcatatctagaaaggaaggccatatcagaaaggccaagctacccagtgccttggttagctgaaaatgaga

SEQ ID NO: 9885 - DNA, 73 bp, Homo sapiens
tagaaaggaaggccatatcagaaaggccaagctacccagtgccttggttagctgaaaatgagacttcctttaa

SEQ ID NO: 9886 - DNA, 71 bp, Homo sapiens
aggaaggccatatcagaaaggccaagctacccagtgccttggttagctgaaaatgagacttcctttaaaaa

SEQ ID NO: 9887 - DNA, 70 bp, Homo sapiens
tatcagaaaggccaagctacccagtgccttggttagctgaaaatgagacttcctttaaaaaaactttgga

SEQ ID NO: 9888 - DNA, 67 bp, Homo sapiens
agctacccagtgccttggttagctgaaaatgagacttcctttaaaaaaactttggaacctacactta

SEQ ID NO: 9889 - DNA, 66 bp, Homo sapiens
agtgccttggttagctgaaaatgagacttcctttaaaaaaactttggaacctacacttagccaaag

SEQ ID NO: 9890 - DNA, 65 bp, Homo sapiens
ggttagctgaaaatgagacttcctttaaaaaaactttggaacctacacttagccaaaggtcaatt

SEQ ID NO: 9891 - DNA, 67 bp, Homo sapiens
gagacttcctttaaaaaaactttggaacctacacttagccaaaggtcaatttatcaaaatgcaaaca

SEQ ID NO: 9892 - DNA, 68 bp, Homo sapiens
cctttaaaaaaactttggaacctacacttagccaaaggtcaatttatcaaaatgcaaacagcatggaa

SEQ ID NO: 9893 - DNA, 69 bp, Homo sapiens
aaactttggaacctacacttagccaaaggtcaatttatcaaaatgcaaacagcatggaaaaagaaaaga

SEQ ID NO: 9894 - DNA, 72 bp, Homo sapiens
acctacacttagccaaaggtcaatttatcaaaatgcaaacagcatggaaaaagaaaagaagacatctgtagt

SEQ ID NO: 9895 - DNA, 73 bp, Homo sapiens
aaaggtcaatttatcaaaatgcaaacagcatggaaaaagaaaagaagacatctgtagttacccagcgtgcacc

SEQ ID NO: 9896 - DNA, 77 bp, Homo sapiens
aaatgcaaacagcatggaaaaagaaaagaagacatctgtagttacccagcgtgcaccgatatgcagccaggaggaag

SEQ ID NO: 9897 - DNA, 78 bp, Homo sapiens
tggaaaaagaaaagaagacatctgtagttacccagcgtgcaccgatatgcagccaggaggaaggcagaggccgtctga

SEQ ID NO: 9898 - DNA, 81 bp, Homo sapiens
aagaaaagaagacatctgtagttacccagcgtgcaccgatatgcagccaggaggaaggcagaggccgtctgaggcatgaga

SEQ ID NO: 9899 - DNA, 83 bp, Homo sapiens
ttacccagcgtgcaccgatatgcagccaggaggaaggcagaggccgtctgaggcatgagacagtcaaagagaggcaagttgaa

SEQ ID NO: 9900 - DNA, 80 bp, Homo sapiens
agccaggaggaaggcagaggccgtctgaggcatgagacagtcaaagagaggcaagttgaaccagtgacacaggcccagga

SEQ ID NO: 9901 - DNA, 79 bp, Homo sapiens
aaggcagaggccgtctgaggcatgagacagtcaaagagaggcaagttgaaccagtgacacaggcccaggaggaagaaga

SEQ ID NO: 9902 - DNA, 79 bp, Homo sapiens
aggccgtctgaggcatgagacagtcaaagagaggcaagttgaaccagtgacacaggcccaggaggaagaagataaagca

SEQ ID NO: 9903 - DNA, 79 bp, Homo sapiens
atgagacagtcaaagagaggcaagttgaaccagtgacacaggcccaggaggaagaagataaagcagcggtattcattca

SEQ ID NO: 9904 - DNA, 79 bp, Homo sapiens
tcaaagagaggcaagttgaaccagtgacacaggcccaggaggaagaagataaagcagcggtattcattcagagcaaata

SEQ ID NO: 9905 - DNA, 76 bp, Homo sapiens
agaggcaagttgaaccagtgacacaggcccaggaggaagaagataaagcagcggtattcattcagagcaaataccg

SEQ ID NO: 9906 - DNA, 73 bp, Homo sapiens
aaccagtgacacaggcccaggaggaagaagataaagcagcggtattcattcagagcaaataccggggttacaa

SEQ ID NO: 9907 - DNA, 74 bp, Homo sapiens
acacaggcccaggaggaagaagataaagcagcggtattcattcagagcaaataccggggttacaagagaaggca

SEQ ID NO: 9908 - DNA, 76 bp, Homo sapiens
gaagaagataaagcagcggtattcattcagagcaaataccggggttacaagagaaggcagcagttgaggaaggaca

SEQ ID NO: 9909 - DNA, 76 bp, Homo sapiens
agataaagcagcggtattcattcagagcaaataccggggttacaagagaaggcagcagttgaggaaggacaagatg

SEQ ID NO: 9910 - DNA, 74 bp, Homo sapiens
gtattcattcagagcaaataccggggttacaagagaaggcagcagttgaggaaggacaagatgtcttcttttaa

SEQ ID NO: 9911 - DNA, 74 bp, Homo sapiens
agcaaataccggggttacaagagaaggcagcagttgaggaaggacaagatgtcttcttttaagcatcagaggat

SEQ ID NO: 9912 - DNA, 76 bp, Homo sapiens
ataccggggttacaagagaaggcagcagttgaggaaggacaagatgtcttcttttaagcatcagaggattgtcaca

SEQ ID NO: 9913 - DNA, 78 bp, Homo sapiens
aagagaaggcagcagttgaggaaggacaagatgtcttcttttaagcatcagaggattgtcacaacaccaacagaagta

SEQ ID NO: 9914 - DNA, 78 bp, Homo sapiens
agcagttgaggaaggacaagatgtcttcttttaagcatcagaggattgtcacaacaccaacagaagtagcaagaaaca

SEQ ID NO: 9915 - DNA, 77 bp, Homo sapiens
tttaagcatcagaggattgtcacaacaccaacagaagtagcaagaaacactcataatttgtattcctatcccacaaa

SEQ ID NO: 9916 - DNA, 75 bp, Homo sapiens
aggattgtcacaacaccaacagaagtagcaagaaacactcataatttgtattcctatcccacaaaacatgaggaa

SEQ ID NO: 9917 - DNA, 76 bp, Homo sapiens
tcacaacaccaacagaagtagcaagaaacactcataatttgtattcctatcccacaaaacatgaggaaatcaataa

SEQ ID NO: 9918 - DNA, 76 bp, Homo sapiens
gcaagaaacactcataatttgtattcctatcccacaaaacatgaggaaatcaataacatcaagaagaaggataaca

SEQ ID NO: 9919 - DNA, 75 bp, Homo sapiens
ctcataatttgtattcctatcccacaaaacatgaggaaatcaataacatcaagaagaaggataacaaagactcga

SEQ ID NO: 9920 - DNA, 75 bp, Homo sapiens
tattcctatcccacaaaacatgaggaaatcaataacatcaagaagaaggataacaaagactcgaaagcaacttca

SEQ ID NO: 9921 - DNA, 74 bp, Homo sapiens
ccacaaaacatgaggaaatcaataacatcaagaagaaggataacaaagactcgaaagcaacttcagaaagagaa

SEQ ID NO: 9922 - DNA, 75 bp, Homo sapiens
atgaggaaatcaataacatcaagaagaaggataacaaagactcgaaagcaacttcagaaagagaagcatgtggtt

SEQ ID NO: 9923 - DNA, 73 bp, Homo sapiens
taacatcaagaagaaggataacaaagactcgaaagcaacttcagaaagagaagcatgtggtttggcaattttt

SEQ ID NO: 9924 - DNA, 72 bp, Homo sapiens
actcgaaagcaacttcagaaagagaagcatgtggtttggcaattttttcaaaacaggtatgtgaataaataa

SEQ ID NO: 9925 - DNA, 69 bp, Homo sapiens
agagaagcatgtggtttggcaattttttcaaaacaggtatgtgaataaataaatttatttactaataaa

SEQ ID NO: 9926 - DNA, 74 bp, Homo sapiens
ctctctgtattcttttccttgatttaacctgacacatgaccttctttttagatatcaaagttatctgaagaata

SEQ ID NO: 9927 - DNA, 75 bp, Homo sapiens
cttttccttgatttaacctgacacatgaccttctttttagatatcaaagttatctgaagaatatttcattctgca

SEQ ID NO: 9928 - DNA, 76 bp, Homo sapiens
aacctgacacatgaccttctttttagatatcaaagttatctgaagaatatttcattctgcagaaaaaattgaatga

SEQ ID NO: 9929 - DNA, 77 bp, Homo sapiens
gacacatgaccttctttttagatatcaaagttatctgaagaatatttcattctgcagaaaaaattgaatgaaatgat

SEQ ID NO: 9930 - DNA, 79 bp, Homo sapiens
ttttagatatcaaagttatctgaagaatatttcattctgcagaaaaaattgaatgaaatgattttgtcacagcaactga

SEQ ID NO: 9931 - DNA, 80 bp, Homo sapiens
gatatcaaagttatctgaagaatatttcattctgcagaaaaaattgaatgaaatgattttgtcacagcaactgaagtcac

SEQ ID NO: 9932 - DNA, 79 bp, Homo sapiens
tgaagaatatttcattctgcagaaaaaattgaatgaaatgattttgtcacagcaactgaagtcactttatctgggtgtc

SEQ ID NO: 9933 - DNA, 79 bp, Homo sapiens
aatatttcattctgcagaaaaaattgaatgaaatgattttgtcacagcaactgaagtcactttatctgggtgtctcgca

SEQ ID NO: 9934 - DNA, 76 bp, Homo sapiens
agaaaaaattgaatgaaatgattttgtcacagcaactgaagtcactttatctgggtgtctcgcaccataagccaat

SEQ ID NO: 9935 - DNA, 78 bp, Homo sapiens
aaattgaatgaaatgattttgtcacagcaactgaagtcactttatctgggtgtctcgcaccataagccaattaataga

SEQ ID NO: 9936 - DNA, 76 bp, Homo sapiens
aatgattttgtcacagcaactgaagtcactttatctgggtgtctcgcaccataagccaattaatagacgagtttct

SEQ ID NO: 9937 - DNA, 80 bp, Homo sapiens
agcaactgaagtcactttatctgggtgtctcgcaccataagccaattaatagacgagtttcttctcagcagtgcctctca

SEQ ID NO: 9938 - DNA, 77 bp, Homo sapiens
agtcactttatctgggtgtctcgcaccataagccaattaatagacgagtttcttctcagcagtgcctctcaggtaaa

SEQ ID NO: 9939 - DNA, 78 bp, Homo sapiens
ttatctgggtgtctcgcaccataagccaattaatagacgagtttcttctcagcagtgcctctcaggtaaaaatcagta

SEQ ID NO: 9940 - DNA, 76 bp, Homo sapiens
tcgcaccataagccaattaatagacgagtttcttctcagcagtgcctctcaggtaaaaatcagtagagttagaact

SEQ ID NO: 9941 - DNA, 75 bp, Homo sapiens
taagccaattaatagacgagtttcttctcagcagtgcctctcaggtaaaaatcagtagagttagaacttcctgaa

SEQ ID NO: 9942 - DNA, 73 bp, Homo sapiens
gataatagtatttgtaattaaatacttgtttatgatcacctttcttataggtgtctgtaaaggagaggagcca

SEQ ID NO: 9943 - DNA, 72 bp, Homo sapiens
gtaattaaatacttgtttatgatcacctttcttataggtgtctgtaaaggagaggagccaaaaatattgaga

SEQ ID NO: 9944 - DNA, 70 bp, Homo sapiens
aaatacttgtttatgatcacctttcttataggtgtctgtaaaggagaggagccaaaaatattgagacccc

SEQ ID NO: 9945 - DNA, 71 bp, Homo sapiens
ttatgatcacctttcttataggtgtctgtaaaggagaggagccaaaaatattgagacccccaagacgaccc

SEQ ID NO: 9946 - DNA, 67 bp, Homo sapiens
tttcttataggtgtctgtaaaggagaggagccaaaaatattgagacccccaagacgaccccggaaac

SEQ ID NO: 9947 - DNA, 66 bp, Homo sapiens
tctgtaaaggagaggagccaaaaatattgagacccccaagacgaccccggaaacccaaaacattaa

SEQ ID NO: 9948 - DNA, 64 bp, Homo sapiens
aaggagaggagccaaaaatattgagacccccaagacgaccccggaaacccaaaacattaaataa

SEQ ID NO: 9949 - DNA, 63 bp, Homo sapiens
aaaaatattgagacccccaagacgaccccggaaacccaaaacattaaataaccctgaagactc

SEQ ID NO: 9950 - DNA, 65 bp, Homo sapiens
agacccccaagacgaccccggaaacccaaaacattaaataaccctgaagactccacatactatta

SEQ ID NO: 9951 - DNA, 68 bp, Homo sapiens
acgaccccggaaacccaaaacattaaataaccctgaagactccacatactattatctacttcatgtaa

SEQ ID NO: 9952 - DNA, 72 bp, Homo sapiens
aaacccaaaacattaaataaccctgaagactccacatactattatctacttcatgtaagtggctcactctta

SEQ ID NO: 9953 - DNA, 76 bp, Homo sapiens
aaaacattaaataaccctgaagactccacatactattatctacttcatgtaagtggctcactcttactatcagatg

SEQ ID NO: 9954 - DNA, 76 bp, Homo sapiens
acatattaagattatagttatatatccattatattaagatcataatattatatagatcttttgaattcttctttcc

SEQ ID NO: 9955 - DNA, 76 bp, Homo sapiens
tagttatatatccattatattaagatcataatattatatagatcttttgaattcttctttcctttagaagtcaatc

SEQ ID NO: 9956 - DNA, 74 bp, Homo sapiens
ccattatattaagatcataatattatatagatcttttgaattcttctttcctttagaagtcaatccaagaagaa

SEQ ID NO: 9957 - DNA, 72 bp, Homo sapiens
taagatcataatattatatagatcttttgaattcttctttcctttagaagtcaatccaagaagaaaaacgaa

SEQ ID NO: 9958 - DNA, 70 bp, Homo sapiens
tattatatagatcttttgaattcttctttcctttagaagtcaatccaagaagaaaaacgaagaccaagga

SEQ ID NO: 9959 - DNA, 68 bp, Homo sapiens
gatcttttgaattcttctttcctttagaagtcaatccaagaagaaaaacgaagaccaaggaaagacag

SEQ ID NO: 9960 - DNA, 67 bp, Homo sapiens
gaattcttctttcctttagaagtcaatccaagaagaaaaacgaagaccaaggaaagacaggtaatta

SEQ ID NO: 9961 - DNA, 67 bp, Homo sapiens
cctttagaagtcaatccaagaagaaaaacgaagaccaaggaaagacaggtaattattacttctggat

SEQ ID NO: 9962 - DNA, 70 bp, Homo sapiens
gaagtcaatccaagaagaaaaacgaagaccaaggaaagacaggtaattattacttctggatttcaatcag

SEQ ID NO: 9963 - DNA, 72 bp, Homo sapiens
caagaagaaaaacgaagaccaaggaaagacaggtaattattacttctggatttcaatcagtcatcttattca

SEQ ID NO: 9964 - DNA, 70 bp, Homo sapiens
aacgaagaccaaggaaagacaggtaattattacttctggatttcaatcagtcatcttattcaaacaaaaa

SEQ ID NO: 9965 - DNA, 75 bp, Homo sapiens
gagtagaaaattagattgatgcaatggtgtgtttatgtgttcatttacagtcagggaaaattattagatttggaa

SEQ ID NO: 9966 - DNA, 76 bp, Homo sapiens
ttagattgatgcaatggtgtgtttatgtgttcatttacagtcagggaaaattattagatttggaagatttctatta

SEQ ID NO: 9967 - DNA, 74 bp, Homo sapiens
tgcaatggtgtgtttatgtgttcatttacagtcagggaaaattattagatttggaagatttctattataaggaa

SEQ ID NO: 9968 - DNA, 70 bp, Homo sapiens
atgtgttcatttacagtcagggaaaattattagatttggaagatttctattataaggaatttttgcccag

SEQ ID NO: 9969 - DNA, 70 bp, Homo sapiens
ttacagtcagggaaaattattagatttggaagatttctattataaggaatttttgcccagtcgttctgga

SEQ ID NO: 9970 - DNA, 69 bp, Homo sapiens
gtcagggaaaattattagatttggaagatttctattataaggaatttttgcccagtcgttctggaccaa

SEQ ID NO: 9971 - DNA, 70 bp, Homo sapiens
ttattagatttggaagatttctattataaggaatttttgcccagtcgttctggaccaaaggaacatagcc

SEQ ID NO: 9972 - DNA, 68 bp, Homo sapiens
aagatttctattataaggaatttttgcccagtcgttctggaccaaaggaacatagccctagtttaaga

SEQ ID NO: 9973 - DNA, 69 bp, Homo sapiens
tattataaggaatttttgcccagtcgttctggaccaaaggaacatagccctagtttaagagaacgaaga

SEQ ID NO: 9974 - DNA, 70 bp, Homo sapiens
aatttttgcccagtcgttctggaccaaaggaacatagccctagtttaagagaacgaagaccacagcaaga

SEQ ID NO: 9975 - DNA, 74 bp, Homo sapiens
tcgttctggaccaaaggaacatagccctagtttaagagaacgaagaccacagcaagaactccagaatcaatgta

SEQ ID NO: 9976 - DNA, 73 bp, Homo sapiens
ccaaaggaacatagccctagtttaagagaacgaagaccacagcaagaactccagaatcaatgtattaaggcta

SEQ ID NO: 9977 - DNA, 73 bp, Homo sapiens
aacatagccctagtttaagagaacgaagaccacagcaagaactccagaatcaatgtattaaggctaatgaaag

SEQ ID NO: 9978 - DNA, 71 bp, Homo sapiens
ctagtttaagagaacgaagaccacagcaagaactccagaatcaatgtattaaggctaatgaaaggtaaaaa

SEQ ID NO: 9979 - DNA, 70 bp, Homo sapiens
agaacgaagaccacagcaagaactccagaatcaatgtattaaggctaatgaaaggtaaaaagctaaactt

SEQ ID NO: 9980 - DNA, 72 bp, Homo sapiens
ccacagcaagaactccagaatcaatgtattaaggctaatgaaaggtaaaaagctaaactttaaagtacatca

SEQ ID NO: 9981 - DNA, 75 bp, Homo sapiens
ttgacacttgggccctgggtttcacttgcaggtgctgggcggcggagagccccgagaaggaggaggagagagagc

SEQ ID NO: 9982 - DNA, 75 bp, Homo sapiens
cctgggtttcacttgcaggtgctgggcggcggagagccccgagaaggaggaggagagagagccagcagccaaccc

SEQ ID NO: 9983 - DNA, 78 bp, Homo sapiens
tcacttgcaggtgctgggcggcggagagccccgagaaggaggaggagagagagccagcagccaacccctacgacttca

SEQ ID NO: 9984 - DNA, 76 bp, Homo sapiens
gtgctgggcggcggagagccccgagaaggaggaggagagagagccagcagccaacccctacgacttcaggaggctc

SEQ ID NO: 9985 - DNA, 74 bp, Homo sapiens
agagccccgagaaggaggaggagagagagccagcagccaacccctacgacttcaggaggctcctgcgcaaaacc

SEQ ID NO: 9986 - DNA, 75 bp, Homo sapiens
gaaggaggaggagagagagccagcagccaacccctacgacttcaggaggctcctgcgcaaaacctcccagcgccg

SEQ ID NO: 9987 - DNA, 77 bp, Homo sapiens
gagagagagccagcagccaacccctacgacttcaggaggctcctgcgcaaaacctcccagcgccggcgcctcgtcca

SEQ ID NO: 9988 - DNA, 76 bp, Homo sapiens
cagcagccaacccctacgacttcaggaggctcctgcgcaaaacctcccagcgccggcgcctcgtccagcagtccta

SEQ ID NO: 9989 - DNA, 71 bp, Homo sapiens
aacccctacgacttcaggaggctcctgcgcaaaacctcccagcgccggcgcctcgtccagcagtcctaacc

SEQ ID NO: 9990 - DNA, 76 bp, Homo sapiens
ttcaggaggctcctgcgcaaaacctcccagcgccggcgcctcgtccagcagtcctaaccgttcaacgaggcagtca

SEQ ID NO: 9991 - DNA, 74 bp, Homo sapiens
aggctcctgcgcaaaacctcccagcgccggcgcctcgtccagcagtcctaaccgttcaacgaggcagtcaccgc

SEQ ID NO: 9992 - DNA, 70 bp, Homo sapiens
aaaacctcccagcgccggcgcctcgtccagcagtcctaaccgttcaacgaggcagtcaccgccgtcggaa

SEQ ID NO: 9993 - DNA, 74 bp, Homo sapiens
cccagcgccggcgcctcgtccagcagtcctaaccgttcaacgaggcagtcaccgccgtcggaaggcgctggagc

SEQ ID NO: 9994 - DNA, 75 bp, Homo sapiens
cctcgtccagcagtcctaaccgttcaacgaggcagtcaccgccgtcggaaggcgctggagcctgcggggcagcag

SEQ ID NO: 9995 - DNA, 74 bp, Homo sapiens
agcagtcctaaccgttcaacgaggcagtcaccgccgtcggaaggcgctggagcctgcggggcagcaggggccaa

SEQ ID NO: 9996 - DNA, 75 bp, Homo sapiens
aaccgttcaacgaggcagtcaccgccgtcggaaggcgctggagcctgcggggcagcaggggccaagcaggcactc

SEQ ID NO: 9997 - DNA, 80 bp, Homo sapiens
aggcagtcaccgccgtcggaaggcgctggagcctgcggggcagcaggggccaagcaggcactctggggctggcaccagca

SEQ ID NO: 9998 - DNA, 80 bp, Homo sapiens
accgccgtcggaaggcgctggagcctgcggggcagcaggggccaagcaggcactctggggctggcaccagcaggcactga

SEQ ID NO: 9999 - DNA, 83 bp, Homo sapiens
aaggcgctggagcctgcggggcagcaggggccaagcaggcactctggggctggcaccagcaggcactgaagctgcggccctga

SEQ ID NO: 10000 - DNA, 84 bp, Homo sapiens
agcctgcggggcagcaggggccaagcaggcactctggggctggcaccagcaggcactgaagctgcggccctgatctccgcagag

SEQ ID NO: 10001 - DNA, 88 bp, Homo sapiens
agcaggggccaagcaggcactctggggctggcaccagcaggcactgaagctgcggccctgatctccgcagaggctgcctgctgcgctc

SEQ ID NO: 10002 - DNA, 87 bp, Homo sapiens
aagcaggcactctggggctggcaccagcaggcactgaagctgcggccctgatctccgcagaggctgcctgctgcgctcggccctcaa

SEQ ID NO: 10003 - DNA, 85 bp, Homo sapiens
actctggggctggcaccagcaggcactgaagctgcggccctgatctccgcagaggctgcctgctgcgctcggccctcaagtgccc

SEQ ID NO: 10004 - DNA, 81 bp, Homo sapiens
accagcaggcactgaagctgcggccctgatctccgcagaggctgcctgctgcgctcggccctcaagtgcccgggccggcct

SEQ ID NO: 10005 - DNA, 80 bp, Homo sapiens
actgaagctgcggccctgatctccgcagaggctgcctgctgcgctcggccctcaagtgcccgggccggccttcgtgctcc

SEQ ID NO: 10006 - DNA, 79 bp, Homo sapiens
tgcggccctgatctccgcagaggctgcctgctgcgctcggccctcaagtgcccgggccggccttcgtgctccgaaacaa

SEQ ID NO: 10007 - DNA, 79 bp, Homo sapiens
tgatctccgcagaggctgcctgctgcgctcggccctcaagtgcccgggccggccttcgtgctccgaaacaagagacctg

SEQ ID NO: 10008 - DNA, 71 bp, Homo sapiens
tgcgctcggccctcaagtgcccgggccggccttcgtgctccgaaacaagagacctgggagccctcgggaaa

SEQ ID NO: 10009 - DNA, 67 bp, Homo sapiens
cgggccggccttcgtgctccgaaacaagagacctgggagccctcgggaaacctcccccgacgctctc

SEQ ID NO: 10010 - DNA, 69 bp, Homo sapiens
cttcgtgctccgaaacaagagacctgggagccctcgggaaacctcccccgacgctctctctcggaactc

SEQ ID NO: 10011 - DNA, 68 bp, Homo sapiens
ctccgaaacaagagacctgggagccctcgggaaacctcccccgacgctctctctcggaactcccgcac

SEQ ID NO: 10012 - DNA, 66 bp, Homo sapiens
aagagacctgggagccctcgggaaacctcccccgacgctctctctcggaactcccgcaccctcctt

SEQ ID NO: 10013 - DNA, 70 bp, Homo sapiens
aaacctcccccgacgctctctctcggaactcccgcaccctcctttctcaccagcccgccagttgtggcaa

SEQ ID NO: 10014 - DNA, 72 bp, Homo sapiens
acgctctctctcggaactcccgcaccctcctttctcaccagcccgccagttgtggcaaccctgtccttgttc

SEQ ID NO: 10015 - DNA, 70 bp, Homo sapiens
tctcggaactcccgcaccctcctttctcaccagcccgccagttgtggcaaccctgtccttgttcccctaa

SEQ ID NO: 10016 - DNA, 72 bp, Homo sapiens
gcaccctcctttctcaccagcccgccagttgtggcaaccctgtccttgttcccctaatctatcactttgttc

SEQ ID NO: 10017 - DNA, 70 bp, Homo sapiens
tcctttctcaccagcccgccagttgtggcaaccctgtccttgttcccctaatctatcactttgttctttt

SEQ ID NO: 10018 - DNA, 72 bp, Homo sapiens
tttgttctttttttttgtgactcctgtggactccactgcgcctgggatctcgccaacccctctctcatttgg

SEQ ID NO: 10019 - DNA, 76 bp, Homo sapiens
ttttttgtgactcctgtggactccactgcgcctgggatctcgccaacccctctctcatttggggtgactgaattca

SEQ ID NO: 10020 - DNA, 75 bp, Homo sapiens
actcctgtggactccactgcgcctgggatctcgccaacccctctctcatttggggtgactgaattcacagatttt

SEQ ID NO: 10021 - DNA, 73 bp, Homo sapiens
gtggactccactgcgcctgggatctcgccaacccctctctcatttggggtgactgaattcacagatttttttt

SEQ ID NO: 10022 - DNA, 68 bp, Homo sapiens
tttttttttttattggaaacggcttttcttggccaacagaacacttgctagcggttgaatcttagaga

SEQ ID NO: 10023 - DNA, 69 bp, Homo sapiens
tttttattggaaacggcttttcttggccaacagaacacttgctagcggttgaatcttagagaaaaaagc

SEQ ID NO: 10024 - DNA, 67 bp, Homo sapiens
aaacggcttttcttggccaacagaacacttgctagcggttgaatcttagagaaaaaagcccgggagg

SEQ ID NO: 10025 - DNA, 68 bp, Homo sapiens
ttggccaacagaacacttgctagcggttgaatcttagagaaaaaagcccgggaggggtggggagaatt

SEQ ID NO: 10026 - DNA, 68 bp, Homo sapiens
aacacttgctagcggttgaatcttagagaaaaaagcccgggaggggtggggagaatttcgaagatgta

SEQ ID NO: 10027 - DNA, 70 bp, Homo sapiens
tagcggttgaatcttagagaaaaaagcccgggaggggtggggagaatttcgaagatgtatttcatctcaa

SEQ ID NO: 10028 - DNA, 70 bp, Homo sapiens
atcttagagaaaaaagcccgggaggggtggggagaatttcgaagatgtatttcatctcaagcttgctctt

SEQ ID NO: 10029 - DNA, 69 bp, Homo sapiens
aaaaagcccgggaggggtggggagaatttcgaagatgtatttcatctcaagcttgctctttctcttcct

SEQ ID NO: 10030 - DNA, 70 bp, Homo sapiens
aggggtggggagaatttcgaagatgtatttcatctcaagcttgctctttctcttcctttggttattaagg

SEQ ID NO: 10031 - DNA, 73 bp, Homo sapiens
gggagaatttcgaagatgtatttcatctcaagcttgctctttctcttcctttggttattaaggtcactaaata

SEQ ID NO: 10032 - DNA, 72 bp, Homo sapiens
ttcgaagatgtatttcatctcaagcttgctctttctcttcctttggttattaaggtcactaaataaaggaag

SEQ ID NO: 10033 - DNA, 72 bp, Homo sapiens
tatttcatctcaagcttgctctttctcttcctttggttattaaggtcactaaataaaggaagtgccttggaa

SEQ ID NO: 10034 - DNA, 66 bp, Homo sapiens
tcttcctttggttattaaggtcactaaataaaggaagtgccttggaaaacccgtggtttgcgtgac

SEQ ID NO: 10035 - DNA, 68 bp, Homo sapiens
gttattaaggtcactaaataaaggaagtgccttggaaaacccgtggtttgcgtgactgatccctcatt

SEQ ID NO: 10036 - DNA, 68 bp, Homo sapiens
taaggtcactaaataaaggaagtgccttggaaaacccgtggtttgcgtgactgatccctcattttccc

SEQ ID NO: 10037 - DNA, 73 bp, Homo sapiens
gtctaaagggcgcccggcgagctcgcagcagcccctgccccgcggagggccggtggcgcgcggcgtccggtga

SEQ ID NO: 10038 - DNA, 73 bp, Homo sapiens
cccggcgagctcgcagcagcccctgccccgcggagggccggtggcgcgcggcgtccggtgaggggcagcggcc

SEQ ID NO: 10039 - DNA, 70 bp, Homo sapiens
cagcagcccctgccccgcggagggccggtggcgcgcggcgtccggtgaggggcagcggcccgggctcggt

SEQ ID NO: 10040 - DNA, 69 bp, Homo sapiens
tgccccgcggagggccggtggcgcgcggcgtccggtgaggggcagcggcccgggctcggttccggcttc

SEQ ID NO: 10041 - DNA, 70 bp, Homo sapiens
agggccggtggcgcgcggcgtccggtgaggggcagcggcccgggctcggttccggcttccagcagcggcc

SEQ ID NO: 10042 - DNA, 70 bp, Homo sapiens
cggtggcgcgcggcgtccggtgaggggcagcggcccgggctcggttccggcttccagcagcggcccgaag

SEQ ID NO: 10043 - DNA, 72 bp, Homo sapiens
tccggtgaggggcagcggcccgggctcggttccggcttccagcagcggcccgaaggcgccggagcacgctcc

SEQ ID NO: 10044 - DNA, 71 bp, Homo sapiens
gggcagcggcccgggctcggttccggcttccagcagcggcccgaaggcgccggagcacgctccccgctccc

SEQ ID NO: 10045 - DNA, 72 bp, Homo sapiens
cgggctcggttccggcttccagcagcggcccgaaggcgccggagcacgctccccgctccccagaacgcagct

SEQ ID NO: 10046 - DNA, 73 bp, Homo sapiens
tcggttccggcttccagcagcggcccgaaggcgccggagcacgctccccgctccccagaacgcagcttccgcg

SEQ ID NO: 10047 - DNA, 78 bp, Homo sapiens
cttccagcagcggcccgaaggcgccggagcacgctccccgctccccagaacgcagcttccgcggctgcagcccaggca

SEQ ID NO: 10048 - DNA, 76 bp, Homo sapiens
ccgaaggcgccggagcacgctccccgctccccagaacgcagcttccgcggctgcagcccaggcagctcttcgggaa

SEQ ID NO: 10049 - DNA, 76 bp, Homo sapiens
ccggagcacgctccccgctccccagaacgcagcttccgcggctgcagcccaggcagctcttcgggaagcgtccgcc

SEQ ID NO: 10050 - DNA, 76 bp, Homo sapiens
tccccgctccccagaacgcagcttccgcggctgcagcccaggcagctcttcgggaagcgtccgcccgtggtctcgc

SEQ ID NO: 10051 - DNA, 75 bp, Homo sapiens
ctccccagaacgcagcttccgcggctgcagcccaggcagctcttcgggaagcgtccgcccgtggtctcgccaggg

SEQ ID NO: 10052 - DNA, 72 bp, Homo sapiens
agcttccgcggctgcagcccaggcagctcttcgggaagcgtccgcccgtggtctcgccagggggtttccgac

SEQ ID NO: 10053 - DNA, 70 bp, Homo sapiens
tgcagcccaggcagctcttcgggaagcgtccgcccgtggtctcgccagggggtttccgacctccccgccc

SEQ ID NO: 10054 - DNA, 68 bp, Homo sapiens
ccaggcagctcttcgggaagcgtccgcccgtggtctcgccagggggtttccgacctccccgcccgaca

SEQ ID NO: 10055 - DNA, 67 bp, Homo sapiens
tcttcgggaagcgtccgcccgtggtctcgccagggggtttccgacctccccgcccgacagcgcaggg

SEQ ID NO: 10056 - DNA, 65 bp, Homo sapiens
cgtccgcccgtggtctcgccagggggtttccgacctccccgcccgacagcgcaggggcgggggcc

SEQ ID NO: 10057 - DNA, 67 bp, Homo sapiens
gtggtctcgccagggggtttccgacctccccgcccgacagcgcaggggcgggggccgcggccggaga

SEQ ID NO: 10058 - DNA, 69 bp, Homo sapiens
gggtttccgacctccccgcccgacagcgcaggggcgggggccgcggccggagagctcgcccgagagcac

SEQ ID NO: 10059 - DNA, 69 bp, Homo sapiens
ccgacctccccgcccgacagcgcaggggcgggggccgcggccggagagctcgcccgagagcaccccctc

SEQ ID NO: 10060 - DNA, 75 bp, Homo sapiens
cgacagcgcaggggcgggggccgcggccggagagctcgcccgagagcaccccctcccgctgcgcctctgggcgca

SEQ ID NO: 10061 - DNA, 75 bp, Homo sapiens
gggcgggggccgcggccggagagctcgcccgagagcaccccctcccgctgcgcctctgggcgcacgcgcagccgc

SEQ ID NO: 10062 - DNA, 79 bp, Homo sapiens
cgcggccggagagctcgcccgagagcaccccctcccgctgcgcctctgggcgcacgcgcagccgctgcagcctccctta

SEQ ID NO: 10063 - DNA, 78 bp, Homo sapiens
agagctcgcccgagagcaccccctcccgctgcgcctctgggcgcacgcgcagccgctgcagcctcccttatttagtcc

SEQ ID NO: 10064 - DNA, 79 bp, Homo sapiens
cgagagcaccccctcccgctgcgcctctgggcgcacgcgcagccgctgcagcctcccttatttagtccgcgatggcttc

SEQ ID NO: 10065 - DNA, 78 bp, Homo sapiens
cctcccgctgcgcctctgggcgcacgcgcagccgctgcagcctcccttatttagtccgcgatggcttccctcgcgccc

SEQ ID NO: 10066 - DNA, 78 bp, Homo sapiens
ctgcgcctctgggcgcacgcgcagccgctgcagcctcccttatttagtccgcgatggcttccctcgcgccccaccgtc

SEQ ID NO: 10067 - DNA, 75 bp, Homo sapiens
cgcacgcgcagccgctgcagcctcccttatttagtccgcgatggcttccctcgcgccccaccgtcctcttccgga

SEQ ID NO: 10068 - DNA, 71 bp, Homo sapiens
agccgctgcagcctcccttatttagtccgcgatggcttccctcgcgccccaccgtcctcttccggaaggcg

SEQ ID NO: 10069 - DNA, 68 bp, Homo sapiens
cctcccttatttagtccgcgatggcttccctcgcgccccaccgtcctcttccggaaggcggctccctc

SEQ ID NO: 10070 - DNA, 71 bp, Homo sapiens
cttatttagtccgcgatggcttccctcgcgccccaccgtcctcttccggaaggcggctccctccctgcgca

SEQ ID NO: 10071 - DNA, 71 bp, Homo sapiens
ccgcgatggcttccctcgcgccccaccgtcctcttccggaaggcggctccctccctgcgcagcccggagcc

SEQ ID NO: 10072 - DNA, 73 bp, Homo sapiens
ttccctcgcgccccaccgtcctcttccggaaggcggctccctccctgcgcagcccggagcccctgagatcagc

SEQ ID NO: 10073 - DNA, 74 bp, Homo sapiens
accgtcctcttccggaaggcggctccctccctgcgcagcccggagcccctgagatcagcctcgagcaggcgccc

SEQ ID NO: 10074 - DNA, 78 bp, Homo sapiens
tcttccggaaggcggctccctccctgcgcagcccggagcccctgagatcagcctcgagcaggcgcccgagcgagacta

SEQ ID NO: 10075 - DNA, 76 bp, Homo sapiens
tgcgcagcccggagcccctgagatcagcctcgagcaggcgcccgagcgagactatccctaaacgggaacggcggtg

SEQ ID NO: 10076 - DNA, 74 bp, Homo sapiens
ggagcccctgagatcagcctcgagcaggcgcccgagcgagactatccctaaacgggaacggcggtggccgactc

SEQ ID NO: 10077 - DNA, 71 bp, Homo sapiens
cctcgagcaggcgcccgagcgagactatccctaaacgggaacggcggtggccgactcgcgagtgaggaaaa

SEQ ID NO: 10078 - DNA, 69 bp, Homo sapiens
aggcgcccgagcgagactatccctaaacgggaacggcggtggccgactcgcgagtgaggaaaagaagga

SEQ ID NO: 10079 - DNA, 70 bp, Homo sapiens
taaacgggaacggcggtggccgactcgcgagtgaggaaaagaaggaaagggcagactggtcgcgaagaga

SEQ ID NO: 10080 - DNA, 72 bp, Homo sapiens
aacggcggtggccgactcgcgagtgaggaaaagaaggaaagggcagactggtcgcgaagagaagatccaggc

SEQ ID NO: 10081 - DNA, 72 bp, Homo sapiens
agtgaggaaaagaaggaaagggcagactggtcgcgaagagaagatccaggcctcagaggaggagaaaggccg

SEQ ID NO: 10082 - DNA, 73 bp, Homo sapiens
aaagaaggaaagggcagactggtcgcgaagagaagatccaggcctcagaggaggagaaaggccggagccagcc

SEQ ID NO: 10083 - DNA, 75 bp, Homo sapiens
agggcagactggtcgcgaagagaagatccaggcctcagaggaggagaaaggccggagccagccgaggtttgccga

SEQ ID NO: 10084 - DNA, 74 bp, Homo sapiens
tcgcgaagagaagatccaggcctcagaggaggagaaaggccggagccagccgaggtttgccgagggcggtgttc

SEQ ID NO: 10085 - DNA, 71 bp, Homo sapiens
agaagatccaggcctcagaggaggagaaaggccggagccagccgaggtttgccgagggcggtgttccggac

SEQ ID NO: 10086 - DNA, 71 bp, Homo sapiens
ccgccgccgcctgcgcgcccgcccgcctttcgcggccgctctcccccctccccgacacacactcacaggcc

SEQ ID NO: 10087 - DNA, 73 bp, Homo sapiens
ctgcgcgcccgcccgcctttcgcggccgctctcccccctccccgacacacactcacaggccgggcattgatgg

SEQ ID NO: 10088 - DNA, 75 bp, Homo sapiens
gcccgcctttcgcggccgctctcccccctccccgacacacactcacaggccgggcattgatggtaatgtatgcga

SEQ ID NO: 10089 - DNA, 75 bp, Homo sapiens
tttcgcggccgctctcccccctccccgacacacactcacaggccgggcattgatggtaatgtatgcgaggaaaca

SEQ ID NO: 10090 - DNA, 80 bp, Homo sapiens
tctcccccctccccgacacacactcacaggccgggcattgatggtaatgtatgcgaggaaacagcagagactcagtgatg

SEQ ID NO: 10091 - DNA, 80 bp, Homo sapiens
cccgacacacactcacaggccgggcattgatggtaatgtatgcgaggaaacagcagagactcagtgatgggtaaattgtc

SEQ ID NO: 10092 - DNA, 77 bp, Homo sapiens
actcacaggccgggcattgatggtaatgtatgcgaggaaacagcagagactcagtgatgggtaaattgtcttttcgt

SEQ ID NO: 10093 - DNA, 75 bp, Homo sapiens
aggccgggcattgatggtaatgtatgcgaggaaacagcagagactcagtgatgggtaaattgtcttttcgtttcg

SEQ ID NO: 10094 - DNA, 74 bp, Homo sapiens
attgatggtaatgtatgcgaggaaacagcagagactcagtgatgggtaaattgtcttttcgtttcgggccgggc

SEQ ID NO: 10095 - DNA, 65 bp, Homo sapiens
gggggccccgttttcttcctccccggccccccacccgcgccgtgtcttatgtcgctgccttctct

SEQ ID NO: 10096 - DNA, 66 bp, Homo sapiens
cgttttcttcctccccggccccccacccgcgccgtgtcttatgtcgctgccttctcttcctgtttt

SEQ ID NO: 10097 - DNA, 72 bp, Homo sapiens
ttcctccccggccccccacccgcgccgtgtcttatgtcgctgccttctcttcctgtttttcagctgtcacga

SEQ ID NO: 10098 - DNA, 72 bp, Homo sapiens
ccacccgcgccgtgtcttatgtcgctgccttctcttcctgtttttcagctgtcacgaccggaggggggactc

SEQ ID NO: 10099 - DNA, 74 bp, Homo sapiens
cgtgtcttatgtcgctgccttctcttcctgtttttcagctgtcacgaccggaggggggactcgcagccttacca

SEQ ID NO: 10100 - DNA, 73 bp, Homo sapiens
ttatgtcgctgccttctcttcctgtttttcagctgtcacgaccggaggggggactcgcagccttaccaggtac

SEQ ID NO: 10101 - DNA, 71 bp, Homo sapiens
tctcttcctgtttttcagctgtcacgaccggaggggggactcgcagccttaccaggtaccagccgaggccg

SEQ ID NO: 10102 - DNA, 69 bp, Homo sapiens
gtttttcagctgtcacgaccggaggggggactcgcagccttaccaggtaccagccgaggccggggtgga

SEQ ID NO: 10103 - DNA, 69 bp, Homo sapiens
agctgtcacgaccggaggggggactcgcagccttaccaggtaccagccgaggccggggtggagggattg

SEQ ID NO: 10104 - DNA, 65 bp, Homo sapiens
accggaggggggactcgcagccttaccaggtaccagccgaggccggggtggagggattggaaggg

SEQ ID NO: 10105 - DNA, 66 bp, Homo sapiens
gggactcgcagccttaccaggtaccagccgaggccggggtggagggattggaaggggccggagggg

SEQ ID NO: 10106 - DNA, 63 bp, Homo sapiens
ccttaccaggtaccagccgaggccggggtggagggattggaaggggccggagggggaagggag

SEQ ID NO: 10107 - DNA, 74 bp, Homo sapiens
tggttcctttagcgctctccagcaaggtttagtgacttattttgacaggtgactggagggagttcgctgattta

SEQ ID NO: 10108 - DNA, 73 bp, Homo sapiens
tttagcgctctccagcaaggtttagtgacttattttgacaggtgactggagggagttcgctgatttaggaaaa

SEQ ID NO: 10109 - DNA, 70 bp, Homo sapiens
agcaaggtttagtgacttattttgacaggtgactggagggagttcgctgatttaggaaaaaagaatcatt

SEQ ID NO: 10110 - DNA, 74 bp, Homo sapiens
ttagtgacttattttgacaggtgactggagggagttcgctgatttaggaaaaaagaatcatttgcagccagaaa

SEQ ID NO: 10111 - DNA, 75 bp, Homo sapiens
tattttgacaggtgactggagggagttcgctgatttaggaaaaaagaatcatttgcagccagaaagacctgactc

SEQ ID NO: 10112 - DNA, 74 bp, Homo sapiens
actggagggagttcgctgatttaggaaaaaagaatcatttgcagccagaaagacctgactcgattatttgatta

SEQ ID NO: 10113 - DNA, 76 bp, Homo sapiens
gttcgctgatttaggaaaaaagaatcatttgcagccagaaagacctgactcgattatttgattatttgcgagtgaa

SEQ ID NO: 10114 - DNA, 74 bp, Homo sapiens
atttaggaaaaaagaatcatttgcagccagaaagacctgactcgattatttgattatttgcgagtgaaggaatc

SEQ ID NO: 10115 - DNA, 78 bp, Homo sapiens
aaaaagaatcatttgcagccagaaagacctgactcgattatttgattatttgcgagtgaaggaatcgatgggatgaga

SEQ ID NO: 10116 - DNA, 81 bp, Homo sapiens
tttgcagccagaaagacctgactcgattatttgattatttgcgagtgaaggaatcgatgggatgagatgataggtgactta

SEQ ID NO: 10117 - DNA, 78 bp, Homo sapiens
agacctgactcgattatttgattatttgcgagtgaaggaatcgatgggatgagatgataggtgacttacgaggcttat

SEQ ID NO: 10118 - DNA, 76 bp, Homo sapiens
actcgattatttgattatttgcgagtgaaggaatcgatgggatgagatgataggtgacttacgaggcttatttatt

SEQ ID NO: 10119 - DNA, 70 bp, Homo sapiens
ttctctctttttttgggggggtgatgttttacaggcacttaagtattcatcgaagagtcaccccagtagc

SEQ ID NO: 10120 - DNA, 74 bp, Homo sapiens
ttttgggggggtgatgttttacaggcacttaagtattcatcgaagagtcaccccagtagcggtgatcacagaca

SEQ ID NO: 10121 - DNA, 80 bp, Homo sapiens
gtgatgttttacaggcacttaagtattcatcgaagagtcaccccagtagcggtgatcacagacatgaaaagatgcgagac

SEQ ID NO: 10122 - DNA, 80 bp, Homo sapiens
ttacaggcacttaagtattcatcgaagagtcaccccagtagcggtgatcacagacatgaaaagatgcgagacgccggaga

SEQ ID NO: 10123 - DNA, 80 bp, Homo sapiens
ttaagtattcatcgaagagtcaccccagtagcggtgatcacagacatgaaaagatgcgagacgccggagatccttcacca

SEQ ID NO: 10124 - DNA, 76 bp, Homo sapiens
aagagtcaccccagtagcggtgatcacagacatgaaaagatgcgagacgccggagatccttcaccaccaaataaaa

SEQ ID NO: 10125 - DNA, 82 bp, Homo sapiens
tgatcacagacatgaaaagatgcgagacgccggagatccttcaccaccaaataaaatgttgcggagatctgatagtcctgaa

SEQ ID NO: 10126 - DNA, 76 bp, Homo sapiens
atgaaaagatgcgagacgccggagatccttcaccaccaaataaaatgttgcggagatctgatagtcctgaaaacaa

SEQ ID NO: 10127 - DNA, 76 bp, Homo sapiens
aagatgcgagacgccggagatccttcaccaccaaataaaatgttgcggagatctgatagtcctgaaaacaaataca

SEQ ID NO: 10128 - DNA, 79 bp, Homo sapiens
ggagatccttcaccaccaaataaaatgttgcggagatctgatagtcctgaaaacaaatacagtgacagcacaggtcaca

SEQ ID NO: 10129 - DNA, 78 bp, Homo sapiens
tccttcaccaccaaataaaatgttgcggagatctgatagtcctgaaaacaaatacagtgacagcacaggtcacagtaa

SEQ ID NO: 10130 - DNA, 75 bp, Homo sapiens
aaataaaatgttgcggagatctgatagtcctgaaaacaaatacagtgacagcacaggtcacagtaaggccaaaaa

SEQ ID NO: 10131 - DNA, 80 bp, Homo sapiens
cggagatctgatagtcctgaaaacaaatacagtgacagcacaggtcacagtaaggccaaaaatgtgcatactcacagagt

SEQ ID NO: 10132 - DNA, 81 bp, Homo sapiens
atctgatagtcctgaaaacaaatacagtgacagcacaggtcacagtaaggccaaaaatgtgcatactcacagagttagaga

SEQ ID NO: 10133 - DNA, 78 bp, Homo sapiens
aaaacaaatacagtgacagcacaggtcacagtaaggccaaaaatgtgcatactcacagagttagagagagggatggtg

SEQ ID NO: 10134 - DNA, 81 bp, Homo sapiens
tacagtgacagcacaggtcacagtaaggccaaaaatgtgcatactcacagagttagagagagggatggtggtgagtatctt

SEQ ID NO: 10135 - DNA, 78 bp, Homo sapiens
acaggtcacagtaaggccaaaaatgtgcatactcacagagttagagagagggatggtggtgagtatctttcttgttga

SEQ ID NO: 10136 - DNA, 74 bp, Homo sapiens
agtaaggccaaaaatgtgcatactcacagagttagagagagggatggtggtgagtatctttcttgttgaaactt

SEQ ID NO: 10137 - DNA, 68 bp, Homo sapiens
catgaaatacagtttacttgtaattcactttgttctttatttttttaagggaccagttactctccaca

SEQ ID NO: 10138 - DNA, 65 bp, Homo sapiens
cagtttacttgtaattcactttgttctttatttttttaagggaccagttactctccacaagaaaa

SEQ ID NO: 10139 - DNA, 69 bp, Homo sapiens
ttcactttgttctttatttttttaagggaccagttactctccacaagaaaattcacacaaccacagtgc

SEQ ID NO: 10140 - DNA, 72 bp, Homo sapiens
tctttatttttttaagggaccagttactctccacaagaaaattcacacaaccacagtgctcttcatagttca

SEQ ID NO: 10141 - DNA, 73 bp, Homo sapiens
tttttaagggaccagttactctccacaagaaaattcacacaaccacagtgctcttcatagttcaaattcacat

SEQ ID NO: 10142 - DNA, 76 bp, Homo sapiens
accagttactctccacaagaaaattcacacaaccacagtgctcttcatagttcaaattcacattcttctaatccaa

SEQ ID NO: 10143 - DNA, 77 bp, Homo sapiens
tccacaagaaaattcacacaaccacagtgctcttcatagttcaaattcacattcttctaatccaagcaataacccaa

SEQ ID NO: 10144 - DNA, 75 bp, Homo sapiens
aaaattcacacaaccacagtgctcttcatagttcaaattcacattcttctaatccaagcaataacccaagcaaaa

SEQ ID NO: 10145 - DNA, 78 bp, Homo sapiens
accacagtgctcttcatagttcaaattcacattcttctaatccaagcaataacccaagcaaaacttcagatgcagtaa

SEQ ID NO: 10146 - DNA, 78 bp, Homo sapiens
gctcttcatagttcaaattcacattcttctaatccaagcaataacccaagcaaaacttcagatgcagtaagtattata

SEQ ID NO: 10147 - DNA, 76 bp, Homo sapiens
caaattcacattcttctaatccaagcaataacccaagcaaaacttcagatgcagtaagtattataaacatgtccaa

SEQ ID NO: 10148 - DNA, 76 bp, Homo sapiens
cacattcttctaatccaagcaataacccaagcaaaacttcagatgcagtaagtattataaacatgtccaatatggt

SEQ ID NO: 10149 - DNA, 74 bp, Homo sapiens
ctaatccaagcaataacccaagcaaaacttcagatgcagtaagtattataaacatgtccaatatggtttctttg

SEQ ID NO: 10150 - DNA, 77 bp, Homo sapiens
tgtaaaaaatatatttttaagccttatgattctgcagatgactggtctgagcatattagctcttctgggaaaaagta

SEQ ID NO: 10151 - DNA, 77 bp, Homo sapiens
atatttttaagccttatgattctgcagatgactggtctgagcatattagctcttctgggaaaaagtactactacaat

SEQ ID NO: 10152 - DNA, 79 bp, Homo sapiens
tttaagccttatgattctgcagatgactggtctgagcatattagctcttctgggaaaaagtactactacaattgtcgaa

SEQ ID NO: 10153 - DNA, 80 bp, Homo sapiens
atgattctgcagatgactggtctgagcatattagctcttctgggaaaaagtactactacaattgtcgaacagaagtttca

SEQ ID NO: 10154 - DNA, 74 bp, Homo sapiens
actggtctgagcatattagctcttctgggaaaaagtactactacaattgtcgaacagaagtttcacaatgggaa

SEQ ID NO: 10155 - DNA, 71 bp, Homo sapiens
agcatattagctcttctgggaaaaagtactactacaattgtcgaacagaagtttcacaatgggaaaaacca

SEQ ID NO: 10156 - DNA, 68 bp, Homo sapiens
agctcttctgggaaaaagtactactacaattgtcgaacagaagtttcacaatgggaaaaaccaaaaga

SEQ ID NO: 10157 - DNA, 68 bp, Homo sapiens
ggaaaaagtactactacaattgtcgaacagaagtttcacaatgggaaaaaccaaaagagtggcttgaa

SEQ ID NO: 10158 - DNA, 69 bp, Homo sapiens
tactacaattgtcgaacagaagtttcacaatgggaaaaaccaaaagagtggcttgaaaggtaattagct

SEQ ID NO: 10159 - DNA, 68 bp, Homo sapiens
ttgtcgaacagaagtttcacaatgggaaaaaccaaaagagtggcttgaaaggtaattagcttttaatc

SEQ ID NO: 10160 - DNA, 66 bp, Homo sapiens
agaagtttcacaatgggaaaaaccaaaagagtggcttgaaaggtaattagcttttaatctaattaa

SEQ ID NO: 10161 - DNA, 72 bp, Homo sapiens
tttatttttagagaacagagacaaaaagaagcaaacaagatggcagtcaacagcttcccaaaagatagggat

SEQ ID NO: 10162 - DNA, 74 bp, Homo sapiens
ttttagagaacagagacaaaaagaagcaaacaagatggcagtcaacagcttcccaaaagatagggattacagaa

SEQ ID NO: 10163 - DNA, 77 bp, Homo sapiens
acaaaaagaagcaaacaagatggcagtcaacagcttcccaaaagatagggattacagaagagaggtgatgcaagcaa

SEQ ID NO: 10164 - DNA, 79 bp, Homo sapiens
aagcaaacaagatggcagtcaacagcttcccaaaagatagggattacagaagagaggtgatgcaagcaacagccactag

SEQ ID NO: 10165 - DNA, 77 bp, Homo sapiens
aagatggcagtcaacagcttcccaaaagatagggattacagaagagaggtgatgcaagcaacagccactagtgggtt

SEQ ID NO: 10166 - DNA, 76 bp, Homo sapiens
aacagcttcccaaaagatagggattacagaagagaggtgatgcaagcaacagccactagtgggtttgccagtggaa

SEQ ID NO: 10167 - DNA, 75 bp, Homo sapiens
aaagatagggattacagaagagaggtgatgcaagcaacagccactagtgggtttgccagtggaagtaagtattaa

SEQ ID NO: 10168 - DNA, 74 bp, Homo sapiens
tagggattacagaagagaggtgatgcaagcaacagccactagtgggtttgccagtggaagtaagtattaatttt

SEQ ID NO: 10169 - DNA, 71 bp, Homo sapiens
agaagagaggtgatgcaagcaacagccactagtgggtttgccagtggaagtaagtattaattttttttctt

SEQ ID NO: 10170 - DNA, 76 bp, Homo sapiens
cccttctgtcattccaacatctgttttttcgaactgtgaactaaagtggaagacaagcattccagtgatgccagta

SEQ ID NO: 10171 - DNA, 75 bp, Homo sapiens
attccaacatctgttttttcgaactgtgaactaaagtggaagacaagcattccagtgatgccagtagtttgctcc

SEQ ID NO: 10172 - DNA, 76 bp, Homo sapiens
atctgttttttcgaactgtgaactaaagtggaagacaagcattccagtgatgccagtagtttgctcccacagaata

SEQ ID NO: 10173 - DNA, 76 bp, Homo sapiens
ttttcgaactgtgaactaaagtggaagacaagcattccagtgatgccagtagtttgctcccacagaatattttgtc

SEQ ID NO: 10174 - DNA, 78 bp, Homo sapiens
aactaaagtggaagacaagcattccagtgatgccagtagtttgctcccacagaatattttgtctcaaacaagcagaca

SEQ ID NO: 10175 - DNA, 82 bp, Homo sapiens
aagacaagcattccagtgatgccagtagtttgctcccacagaatattttgtctcaaacaagcagacacaatgacagagacta

SEQ ID NO: 10176 - DNA, 83 bp, Homo sapiens
ttccagtgatgccagtagtttgctcccacagaatattttgtctcaaacaagcagacacaatgacagagactacagactgccaa

SEQ ID NO: 10177 - DNA, 84 bp, Homo sapiens
atgccagtagtttgctcccacagaatattttgtctcaaacaagcagacacaatgacagagactacagactgccaagagcagaga

SEQ ID NO: 10178 - DNA, 84 bp, Homo sapiens
ttgctcccacagaatattttgtctcaaacaagcagacacaatgacagagactacagactgccaagagcagagactcacagtagt

SEQ ID NO: 10179 - DNA, 82 bp, Homo sapiens
aatattttgtctcaaacaagcagacacaatgacagagactacagactgccaagagcagagactcacagtagttctacgccag

SEQ ID NO: 10180 - DNA, 85 bp, Homo sapiens
tttgtctcaaacaagcagacacaatgacagagactacagactgccaagagcagagactcacagtagttctacgccagtacagcac

SEQ ID NO: 10181 - DNA, 84 bp, Homo sapiens
acaagcagacacaatgacagagactacagactgccaagagcagagactcacagtagttctacgccagtacagcaccccatcaaa

SEQ ID NO: 10182 - DNA, 80 bp, Homo sapiens
aatgacagagactacagactgccaagagcagagactcacagtagttctacgccagtacagcaccccatcaaaccagtggt

SEQ ID NO: 10183 - DNA, 80 bp, Homo sapiens
agactacagactgccaagagcagagactcacagtagttctacgccagtacagcaccccatcaaaccagtggttcatccaa

SEQ ID NO: 10184 - DNA, 79 bp, Homo sapiens
ctgccaagagcagagactcacagtagttctacgccagtacagcaccccatcaaaccagtggttcatccaactgctaccc

SEQ ID NO: 10185 - DNA, 76 bp, Homo sapiens
actcacagtagttctacgccagtacagcaccccatcaaaccagtggttcatccaactgctaccccaagcactgttc

SEQ ID NO: 10186 - DNA, 74 bp, Homo sapiens
agtagttctacgccagtacagcaccccatcaaaccagtggttcatccaactgctaccccaagcactgttccttc

SEQ ID NO: 10187 - DNA, 74 bp, Homo sapiens
agtacagcaccccatcaaaccagtggttcatccaactgctaccccaagcactgttccttctagtccatttacgc

SEQ ID NO: 10188 - DNA, 77 bp, Homo sapiens
cccatcaaaccagtggttcatccaactgctaccccaagcactgttccttctagtccatttacgctacagtctgatca

SEQ ID NO: 10189 - DNA, 76 bp, Homo sapiens
aaaccagtggttcatccaactgctaccccaagcactgttccttctagtccatttacgctacagtctgatcaccagc

SEQ ID NO: 10190 - DNA, 76 bp, Homo sapiens
atccaactgctaccccaagcactgttccttctagtccatttacgctacagtctgatcaccagccaaagaaatcatt

SEQ ID NO: 10191 - DNA, 80 bp, Homo sapiens
ctgttccttctagtccatttacgctacagtctgatcaccagccaaagaaatcatttgatgctaatggagcatctacttta

SEQ ID NO: 10192 - DNA, 80 bp, Homo sapiens
cttctagtccatttacgctacagtctgatcaccagccaaagaaatcatttgatgctaatggagcatctactttatcaaaa

SEQ ID NO: 10193 - DNA, 80 bp, Homo sapiens
atttacgctacagtctgatcaccagccaaagaaatcatttgatgctaatggagcatctactttatcaaaactgcctacac

SEQ ID NO: 10194 - DNA, 81 bp, Homo sapiens
acagtctgatcaccagccaaagaaatcatttgatgctaatggagcatctactttatcaaaactgcctacacccacatcttc

SEQ ID NO: 10195 - DNA, 81 bp, Homo sapiens
gccaaagaaatcatttgatgctaatggagcatctactttatcaaaactgcctacacccacatcttctgtccctgcacagaa

SEQ ID NO: 10196 - DNA, 80 bp, Homo sapiens
agaaatcatttgatgctaatggagcatctactttatcaaaactgcctacacccacatcttctgtccctgcacagaaaaca

SEQ ID NO: 10197 - DNA, 77 bp, Homo sapiens
atgctaatggagcatctactttatcaaaactgcctacacccacatcttctgtccctgcacagaaaacagaaagaaaa

SEQ ID NO: 10198 - DNA, 74 bp, Homo sapiens
atctactttatcaaaactgcctacacccacatcttctgtccctgcacagaaaacagaaagaaaaggtatgccat

SEQ ID NO: 10199 - DNA, 75 bp, Homo sapiens
ttatcaaaactgcctacacccacatcttctgtccctgcacagaaaacagaaagaaaaggtatgccattattacta

SEQ ID NO: 10200 - DNA, 78 bp, Homo sapiens
ctacacccacatcttctgtccctgcacagaaaacagaaagaaaaggtatgccattattactagatgctgcacgttgaa

SEQ ID NO: 10201 - DNA, 72 bp, Homo sapiens
tttctctattcaggtaatttttcaggctgattatctttttatttagaatctacatcaggagacaaacccgta

SEQ ID NO: 10202 - DNA, 76 bp, Homo sapiens
tcaggtaatttttcaggctgattatctttttatttagaatctacatcaggagacaaacccgtatcacattcttgca

SEQ ID NO: 10203 - DNA, 75 bp, Homo sapiens
atttttcaggctgattatctttttatttagaatctacatcaggagacaaacccgtatcacattcttgcacaactc

SEQ ID NO: 10204 - DNA, 74 bp, Homo sapiens
ttatctttttatttagaatctacatcaggagacaaacccgtatcacattcttgcacaactccttccacgtcttc

SEQ ID NO: 10205 - DNA, 75 bp, Homo sapiens
tttttatttagaatctacatcaggagacaaacccgtatcacattcttgcacaactccttccacgtcttctgcctc

SEQ ID NO: 10206 - DNA, 76 bp, Homo sapiens
aatctacatcaggagacaaacccgtatcacattcttgcacaactccttccacgtcttctgcctctggactgaaccc

SEQ ID NO: 10207 - DNA, 77 bp, Homo sapiens
aggagacaaacccgtatcacattcttgcacaactccttccacgtcttctgcctctggactgaaccccacatctgcac

SEQ ID NO: 10208 - DNA, 78 bp, Homo sapiens
acccgtatcacattcttgcacaactccttccacgtcttctgcctctggactgaaccccacatctgcacctccaacatc

SEQ ID NO: 10209 - DNA, 80 bp, Homo sapiens
attcttgcacaactccttccacgtcttctgcctctggactgaaccccacatctgcacctccaacatctgcttcagcggtc

SEQ ID NO: 10210 - DNA, 76 bp, Homo sapiens
aactccttccacgtcttctgcctctggactgaaccccacatctgcacctccaacatctgcttcagcggtccctgtt

SEQ ID NO: 10211 - DNA, 78 bp, Homo sapiens
acgtcttctgcctctggactgaaccccacatctgcacctccaacatctgcttcagcggtccctgtttctcctgttcca

SEQ ID NO: 10212 - DNA, 79 bp, Homo sapiens
tctggactgaaccccacatctgcacctccaacatctgcttcagcggtccctgtttctcctgttccacagtcgccaatac

SEQ ID NO: 10213 - DNA, 76 bp, Homo sapiens
cccacatctgcacctccaacatctgcttcagcggtccctgtttctcctgttccacagtcgccaatacctcccttac

SEQ ID NO: 10214 - DNA, 76 bp, Homo sapiens
atctgcacctccaacatctgcttcagcggtccctgtttctcctgttccacagtcgccaatacctcccttacttcag

SEQ ID NO: 10215 - DNA, 72 bp, Homo sapiens
aacatctgcttcagcggtccctgtttctcctgttccacagtcgccaatacctcccttacttcaggacccaaa

SEQ ID NO: 10216 - DNA, 71 bp, Homo sapiens
ttcagcggtccctgtttctcctgttccacagtcgccaatacctcccttacttcaggacccaaatcttctta

SEQ ID NO: 10217 - DNA, 71 bp, Homo sapiens
gtttctcctgttccacagtcgccaatacctcccttacttcaggacccaaatcttcttagacaattgcttcc

SEQ ID NO: 10218 - DNA, 74 bp, Homo sapiens
ctgttccacagtcgccaatacctcccttacttcaggacccaaatcttcttagacaattgcttcctgctttgcaa

SEQ ID NO: 10219 - DNA, 76 bp, Homo sapiens
ccaatacctcccttacttcaggacccaaatcttcttagacaattgcttcctgctttgcaagccacgctgcagctta

SEQ ID NO: 10220 - DNA, 76 bp, Homo sapiens
ccttacttcaggacccaaatcttcttagacaattgcttcctgctttgcaagccacgctgcagcttaataattctaa

SEQ ID NO: 10221 - DNA, 80 bp, Homo sapiens
ttcaggacccaaatcttcttagacaattgcttcctgctttgcaagccacgctgcagcttaataattctaatgtggacata

SEQ ID NO: 10222 - DNA, 79 bp, Homo sapiens
aaatcttcttagacaattgcttcctgctttgcaagccacgctgcagcttaataattctaatgtggacatatctaaaata

SEQ ID NO: 10223 - DNA, 77 bp, Homo sapiens
aattgcttcctgctttgcaagccacgctgcagcttaataattctaatgtggacatatctaaaataaatgaaggtaaa

SEQ ID NO: 10224 - DNA, 79 bp, Homo sapiens
ttcctgctttgcaagccacgctgcagcttaataattctaatgtggacatatctaaaataaatgaaggtaaatcttcata

SEQ ID NO: 10225 - DNA, 76 bp, Homo sapiens
gcaagccacgctgcagcttaataattctaatgtggacatatctaaaataaatgaaggtaaatcttcataacagttt

SEQ ID NO: 10226 - DNA, 73 bp, Homo sapiens
gctgcagcttaataattctaatgtggacatatctaaaataaatgaaggtaaatcttcataacagttttttaaa

SEQ ID NO: 10227 - DNA, 67 bp, Homo sapiens
aataattctaatgtggacatatctaaaataaatgaaggtaaatcttcataacagttttttaaaaatt

SEQ ID NO: 10228 - DNA, 78 bp, Homo sapiens
cataagcctcttgtttttatatgaatgtatgaaataatatgtttttagttcttacagcagctgtgacacaagcctcac

SEQ ID NO: 10229 - DNA, 80 bp, Homo sapiens
cttgtttttatatgaatgtatgaaataatatgtttttagttcttacagcagctgtgacacaagcctcactgcagtctata

SEQ ID NO: 10230 - DNA, 80 bp, Homo sapiens
atgaatgtatgaaataatatgtttttagttcttacagcagctgtgacacaagcctcactgcagtctataattcataagtt

SEQ ID NO: 10231 - DNA, 78 bp, Homo sapiens
aaataatatgtttttagttcttacagcagctgtgacacaagcctcactgcagtctataattcataagtttcttactgc

SEQ ID NO: 10232 - DNA, 80 bp, Homo sapiens
atgtttttagttcttacagcagctgtgacacaagcctcactgcagtctataattcataagtttcttactgctggaccatc

SEQ ID NO: 10233 - DNA, 84 bp, Homo sapiens
ttcttacagcagctgtgacacaagcctcactgcagtctataattcataagtttcttactgctggaccatctgctttcaacataa

SEQ ID NO: 10234 - DNA, 82 bp, Homo sapiens
tgtgacacaagcctcactgcagtctataattcataagtttcttactgctggaccatctgctttcaacataacgtctctgatt

SEQ ID NO: 10235 - DNA, 80 bp, Homo sapiens
aagcctcactgcagtctataattcataagtttcttactgctggaccatctgctttcaacataacgtctctgatttctcaa

SEQ ID NO: 10236 - DNA, 83 bp, Homo sapiens
gtctataattcataagtttcttactgctggaccatctgctttcaacataacgtctctgatttctcaagctgctcagctctcta

SEQ ID NO: 10237 - DNA, 83 bp, Homo sapiens
taattcataagtttcttactgctggaccatctgctttcaacataacgtctctgatttctcaagctgctcagctctctacacaa

SEQ ID NO: 10238 - DNA, 82 bp, Homo sapiens
tttcttactgctggaccatctgctttcaacataacgtctctgatttctcaagctgctcagctctctacacaaggtattctta

SEQ ID NO: 10239 - DNA, 83 bp, Homo sapiens
accatctgctttcaacataacgtctctgatttctcaagctgctcagctctctacacaaggtattcttactcatcttagatatc

SEQ ID NO: 10240 - DNA, 83 bp, Homo sapiens
tttcaacataacgtctctgatttctcaagctgctcagctctctacacaaggtattcttactcatcttagatatctctagaatg

SEQ ID NO: 10241 - DNA, 85 bp, Homo sapiens
ataacgtctctgatttctcaagctgctcagctctctacacaaggtattcttactcatcttagatatctctagaatggcatcttga

SEQ ID NO: 10242 - DNA, 70 bp, Homo sapiens
ttttgtttttctttaaaattaattgcttccctcttttacagcccagccatctaatcagtctccgatgtct

SEQ ID NO: 10243 - DNA, 75 bp, Homo sapiens
ctttaaaattaattgcttccctcttttacagcccagccatctaatcagtctccgatgtctttaacatctgatgcg

SEQ ID NO: 10244 - DNA, 77 bp, Homo sapiens
aaattaattgcttccctcttttacagcccagccatctaatcagtctccgatgtctttaacatctgatgcgtcatccc

SEQ ID NO: 10245 - DNA, 80 bp, Homo sapiens
ttccctcttttacagcccagccatctaatcagtctccgatgtctttaacatctgatgcgtcatccccaagatcatatgtt

SEQ ID NO: 10246 - DNA, 83 bp, Homo sapiens
ttacagcccagccatctaatcagtctccgatgtctttaacatctgatgcgtcatccccaagatcatatgtttctccaagaata

SEQ ID NO: 10247 - DNA, 82 bp, Homo sapiens
atctaatcagtctccgatgtctttaacatctgatgcgtcatccccaagatcatatgtttctccaagaataagcacacctcaa

SEQ ID NO: 10248 - DNA, 79 bp, Homo sapiens
agtctccgatgtctttaacatctgatgcgtcatccccaagatcatatgtttctccaagaataagcacacctcaaactaa

SEQ ID NO: 10249 - DNA, 80 bp, Homo sapiens
tttaacatctgatgcgtcatccccaagatcatatgtttctccaagaataagcacacctcaaactaacacagtccctatca

SEQ ID NO: 10250 - DNA, 75 bp, Homo sapiens
atgcgtcatccccaagatcatatgtttctccaagaataagcacacctcaaactaacacagtccctatcaaacctt

SEQ ID NO: 10251 - DNA, 75 bp, Homo sapiens
cccaagatcatatgtttctccaagaataagcacacctcaaactaacacagtccctatcaaacctttgatcagtac

SEQ ID NO: 10252 - DNA, 74 bp, Homo sapiens
tatgtttctccaagaataagcacacctcaaactaacacagtccctatcaaacctttgatcagtactcctcctgt

SEQ ID NO: 10253 - DNA, 76 bp, Homo sapiens
ttctccaagaataagcacacctcaaactaacacagtccctatcaaacctttgatcagtactcctcctgtttcatca

SEQ ID NO: 10254 - DNA, 75 bp, Homo sapiens
ataagcacacctcaaactaacacagtccctatcaaacctttgatcagtactcctcctgtttcatcacagccaaag

SEQ ID NO: 10255 - DNA, 73 bp, Homo sapiens
aactaacacagtccctatcaaacctttgatcagtactcctcctgtttcatcacagccaaaggtatgtcacctt

SEQ ID NO: 10256 - DNA, 74 bp, Homo sapiens
agtccctatcaaacctttgatcagtactcctcctgtttcatcacagccaaaggtatgtcacctttgagggacat

SEQ ID NO: 10257 - DNA, 72 bp, Homo sapiens
aaacctttgatcagtactcctcctgtttcatcacagccaaaggtatgtcacctttgagggacattcggaaaa

SEQ ID NO: 10258 - DNA, 76 bp, Homo sapiens
agatgtggattagatttggagaccatctcaccagattttgacatttcaggttagtactccagtagttaagcaagga

SEQ ID NO: 10259 - DNA, 74 bp, Homo sapiens
attagatttggagaccatctcaccagattttgacatttcaggttagtactccagtagttaagcaaggaccagtg

SEQ ID NO: 10260 - DNA, 78 bp, Homo sapiens
agaccatctcaccagattttgacatttcaggttagtactccagtagttaagcaaggaccagtgtcacagtcagccaca

SEQ ID NO: 10261 - DNA, 78 bp, Homo sapiens
agattttgacatttcaggttagtactccagtagttaagcaaggaccagtgtcacagtcagccacacagcagcctgtaa

SEQ ID NO: 10262 - DNA, 80 bp, Homo sapiens
acatttcaggttagtactccagtagttaagcaaggaccagtgtcacagtcagccacacagcagcctgtaactgctgacaa

SEQ ID NO: 10263 - DNA, 85 bp, Homo sapiens
ttagtactccagtagttaagcaaggaccagtgtcacagtcagccacacagcagcctgtaactgctgacaagcagcaaggtcatga

SEQ ID NO: 10264 - DNA, 84 bp, Homo sapiens
agtagttaagcaaggaccagtgtcacagtcagccacacagcagcctgtaactgctgacaagcagcaaggtcatgaacctgtctc

SEQ ID NO: 10265 - DNA, 84 bp, Homo sapiens
aggaccagtgtcacagtcagccacacagcagcctgtaactgctgacaagcagcaaggtcatgaacctgtctctcctcgaagtct

SEQ ID NO: 10266 - DNA, 88 bp, Homo sapiens
tgtcacagtcagccacacagcagcctgtaactgctgacaagcagcaaggtcatgaacctgtctctcctcgaagtcttcagcgctcaag

SEQ ID NO: 10267 - DNA, 84 bp, Homo sapiens
cacacagcagcctgtaactgctgacaagcagcaaggtcatgaacctgtctctcctcgaagtcttcagcgctcaaggtaggttga

SEQ ID NO: 10268 - DNA, 81 bp, Homo sapiens
cctgtaactgctgacaagcagcaaggtcatgaacctgtctctcctcgaagtcttcagcgctcaaggtaggttgatattgta

SEQ ID NO: 10269 - DNA, 82 bp, Homo sapiens
aactgctgacaagcagcaaggtcatgaacctgtctctcctcgaagtcttcagcgctcaaggtaggttgatattgtatattga

SEQ ID NO: 10270 - DNA, 79 bp, Homo sapiens
agcaaggtcatgaacctgtctctcctcgaagtcttcagcgctcaaggtaggttgatattgtatattgagaccacattgt

SEQ ID NO: 10271 - DNA, 72 bp, Homo sapiens
atacccagaaactacttttaaacatactacacattcaattctgttttctagtagccagagaagtccatcacc

SEQ ID NO: 10272 - DNA, 75 bp, Homo sapiens
ttttaaacatactacacattcaattctgttttctagtagccagagaagtccatcacctggtcccaatcatacttc

SEQ ID NO: 10273 - DNA, 77 bp, Homo sapiens
acatactacacattcaattctgttttctagtagccagagaagtccatcacctggtcccaatcatacttctaatagta

SEQ ID NO: 10274 - DNA, 78 bp, Homo sapiens
ttcaattctgttttctagtagccagagaagtccatcacctggtcccaatcatacttctaatagtagtaatgcatcaaa

SEQ ID NO: 10275 - DNA, 80 bp, Homo sapiens
tttctagtagccagagaagtccatcacctggtcccaatcatacttctaatagtagtaatgcatcaaatgcaacagttgta

SEQ ID NO: 10276 - DNA, 79 bp, Homo sapiens
ccagagaagtccatcacctggtcccaatcatacttctaatagtagtaatgcatcaaatgcaacagttgtaccacagaat

SEQ ID NO: 10277 - DNA, 78 bp, Homo sapiens
aagtccatcacctggtcccaatcatacttctaatagtagtaatgcatcaaatgcaacagttgtaccacagaattcttc

SEQ ID NO: 10278 - DNA, 79 bp, Homo sapiens
tcccaatcatacttctaatagtagtaatgcatcaaatgcaacagttgtaccacagaattcttctgcccgatccacgtgt

SEQ ID NO: 10279 - DNA, 78 bp, Homo sapiens
atacttctaatagtagtaatgcatcaaatgcaacagttgtaccacagaattcttctgcccgatccacgtgttcattaa

SEQ ID NO: 10280 - DNA, 80 bp, Homo sapiens
atagtagtaatgcatcaaatgcaacagttgtaccacagaattcttctgcccgatccacgtgttcattaacgcctgcacta

SEQ ID NO: 10281 - DNA, 81 bp, Homo sapiens
atcaaatgcaacagttgtaccacagaattcttctgcccgatccacgtgttcattaacgcctgcactagcagcacacttcag

SEQ ID NO: 10282 - DNA, 78 bp, Homo sapiens
aacagttgtaccacagaattcttctgcccgatccacgtgttcattaacgcctgcactagcagcacacttcagtgaaaa

SEQ ID NO: 10283 - DNA, 80 bp, Homo sapiens
taccacagaattcttctgcccgatccacgtgttcattaacgcctgcactagcagcacacttcagtgaaaatctcataaaa

SEQ ID NO: 10284 - DNA, 77 bp, Homo sapiens
aattcttctgcccgatccacgtgttcattaacgcctgcactagcagcacacttcagtgaaaatctcataaaacacgt

SEQ ID NO: 10285 - DNA, 81 bp, Homo sapiens
atccacgtgttcattaacgcctgcactagcagcacacttcagtgaaaatctcataaaacacgttcaaggatggcctgcaga

SEQ ID NO: 10286 - DNA, 86 bp, Homo sapiens
tgttcattaacgcctgcactagcagcacacttcagtgaaaatctcataaaacacgttcaaggatggcctgcagatcatgcagagaa

SEQ ID NO: 10287 - DNA, 88 bp, Homo sapiens
tgcactagcagcacacttcagtgaaaatctcataaaacacgttcaaggatggcctgcagatcatgcagagaagcaggtatgttatgta

SEQ ID NO: 10288 - DNA, 82 bp, Homo sapiens
gtgaaaatctcataaaacacgttcaaggatggcctgcagatcatgcagagaagcaggtatgttatgtacagcctagatttta

SEQ ID NO: 10289 - DNA, 80 bp, Homo sapiens
atctcataaaacacgttcaaggatggcctgcagatcatgcagagaagcaggtatgttatgtacagcctagattttacctt

SEQ ID NO: 10290 - DNA, 74 bp, Homo sapiens
gtatgttaatgtttatattttatgttttcttcatttctttaattacaggcatcaagattacgcgaagaagcgca

SEQ ID NO: 10291 - DNA, 74 bp, Homo sapiens
ttatattttatgttttcttcatttctttaattacaggcatcaagattacgcgaagaagcgcataacatgggaac

SEQ ID NO: 10292 - DNA, 76 bp, Homo sapiens
tttatgttttcttcatttctttaattacaggcatcaagattacgcgaagaagcgcataacatgggaactattcaca

SEQ ID NO: 10293 - DNA, 75 bp, Homo sapiens
atttctttaattacaggcatcaagattacgcgaagaagcgcataacatgggaactattcacatgtccgaaatttg

SEQ ID NO: 10294 - DNA, 77 bp, Homo sapiens
ttaattacaggcatcaagattacgcgaagaagcgcataacatgggaactattcacatgtccgaaatttgtactgaat

SEQ ID NO: 10295 - DNA, 74 bp, Homo sapiens
catcaagattacgcgaagaagcgcataacatgggaactattcacatgtccgaaatttgtactgaattaaaaaat

SEQ ID NO: 10296 - DNA, 72 bp, Homo sapiens
acgcgaagaagcgcataacatgggaactattcacatgtccgaaatttgtactgaattaaaaaatttaagatc

SEQ ID NO: 10297 - DNA, 72 bp, Homo sapiens
gcgcataacatgggaactattcacatgtccgaaatttgtactgaattaaaaaatttaagatctttagtccga

SEQ ID NO: 10298 - DNA, 72 bp, Homo sapiens
catgggaactattcacatgtccgaaatttgtactgaattaaaaaatttaagatctttagtccgagtatgtga

SEQ ID NO: 10299 - DNA, 71 bp, Homo sapiens
cacatgtccgaaatttgtactgaattaaaaaatttaagatctttagtccgagtatgtgaaattcaagcaac

SEQ ID NO: 10300 - DNA, 72 bp, Homo sapiens
atttgtactgaattaaaaaatttaagatctttagtccgagtatgtgaaattcaagcaactttgcgagagcaa

SEQ ID NO: 10301 - DNA, 70 bp, Homo sapiens
gaattaaaaaatttaagatctttagtccgagtatgtgaaattcaagcaactttgcgagagcaaaggtaag

SEQ ID NO: 10302 - DNA, 73 bp, Homo sapiens
atttaagatctttagtccgagtatgtgaaattcaagcaactttgcgagagcaaaggtaagtctttcactgaaa

SEQ ID NO: 10303 - DNA, 74 bp, Homo sapiens
gatctttagtccgagtatgtgaaattcaagcaactttgcgagagcaaaggtaagtctttcactgaaatatattt

SEQ ID NO: 10304 - DNA, 73 bp, Homo sapiens
ccgagtatgtgaaattcaagcaactttgcgagagcaaaggtaagtctttcactgaaatatatttttatgtttc

SEQ ID NO: 10305 - DNA, 72 bp, Homo sapiens
tatttgtatatgtacacaggttctaatgtctgcttttttttttcaggatactatttttgagacaacaaatta

SEQ ID NO: 10306 - DNA, 67 bp, Homo sapiens
tgcttttttttttcaggatactatttttgagacaacaaattaaggaacttgaaaagctaaaaaatca

SEQ ID NO: 10307 - DNA, 70 bp, Homo sapiens
tttcaggatactatttttgagacaacaaattaaggaacttgaaaagctaaaaaatcagaattccttcatg

SEQ ID NO: 10308 - DNA, 71 bp, Homo sapiens
ctatttttgagacaacaaattaaggaacttgaaaagctaaaaaatcagaattccttcatggtgtgaagatg

SEQ ID NO: 10309 - DNA, 75 bp, Homo sapiens
gacaacaaattaaggaacttgaaaagctaaaaaatcagaattccttcatggtgtgaagatgtgaataattgcaca

SEQ ID NO: 10310 - DNA, 76 bp, Homo sapiens
taaggaacttgaaaagctaaaaaatcagaattccttcatggtgtgaagatgtgaataattgcacatggttttgaga

SEQ ID NO: 10311 - DNA, 76 bp, Homo sapiens
ttgaaaagctaaaaaatcagaattccttcatggtgtgaagatgtgaataattgcacatggttttgagaacaggaac

SEQ ID NO: 10312 - DNA, 76 bp, Homo sapiens
aaaaatcagaattccttcatggtgtgaagatgtgaataattgcacatggttttgagaacaggaactgtaaatctgt

SEQ ID NO: 10313 - DNA, 78 bp, Homo sapiens
ttccttcatggtgtgaagatgtgaataattgcacatggttttgagaacaggaactgtaaatctgttgcccaatcttaa

SEQ ID NO: 10314 - DNA, 76 bp, Homo sapiens
atggtgtgaagatgtgaataattgcacatggttttgagaacaggaactgtaaatctgttgcccaatcttaacattt

SEQ ID NO: 10315 - DNA, 77 bp, Homo sapiens
atgtgaataattgcacatggttttgagaacaggaactgtaaatctgttgcccaatcttaacatttttgagctgcatt

SEQ ID NO: 10316 - DNA, 76 bp, Homo sapiens
taattgcacatggttttgagaacaggaactgtaaatctgttgcccaatcttaacatttttgagctgcatttaagta

SEQ ID NO: 10317 - DNA, 73 bp, Homo sapiens
ttttgagaacaggaactgtaaatctgttgcccaatcttaacatttttgagctgcatttaagtagactttggac

SEQ ID NO: 10318 - DNA, 71 bp, Homo sapiens
acaggaactgtaaatctgttgcccaatcttaacatttttgagctgcatttaagtagactttggaccgttaa

SEQ ID NO: 10319 - DNA, 72 bp, Homo sapiens
gtaaatctgttgcccaatcttaacatttttgagctgcatttaagtagactttggaccgttaagctgggcaaa

SEQ ID NO: 10320 - DNA, 70 bp, Homo sapiens
aatcttaacatttttgagctgcatttaagtagactttggaccgttaagctgggcaaaggaaatgacaagg

SEQ ID NO: 10321 - DNA, 70 bp, Homo sapiens
taacatttttgagctgcatttaagtagactttggaccgttaagctgggcaaaggaaatgacaaggggacg

SEQ ID NO: 10322 - DNA, 72 bp, Homo sapiens
tgcatttaagtagactttggaccgttaagctgggcaaaggaaatgacaaggggacggggtctgtgagagtca

SEQ ID NO: 10323 - DNA, 71 bp, Homo sapiens
taagtagactttggaccgttaagctgggcaaaggaaatgacaaggggacggggtctgtgagagtcaattca

SEQ ID NO: 10324 - DNA, 70 bp, Homo sapiens
accgttaagctgggcaaaggaaatgacaaggggacggggtctgtgagagtcaattcaggggaaagataca

SEQ ID NO: 10325 - DNA, 72 bp, Homo sapiens
gggcaaaggaaatgacaaggggacggggtctgtgagagtcaattcaggggaaagatacaagattgatttgta

SEQ ID NO: 10326 - DNA, 70 bp, Homo sapiens
aaggaaatgacaaggggacggggtctgtgagagtcaattcaggggaaagatacaagattgatttgtaaaa

SEQ ID NO: 10327 - DNA, 71 bp, Homo sapiens
ggacggggtctgtgagagtcaattcaggggaaagatacaagattgatttgtaaaacccttgaaatgtagat

SEQ ID NO: 10328 - DNA, 75 bp, Homo sapiens
tctgtgagagtcaattcaggggaaagatacaagattgatttgtaaaacccttgaaatgtagatttcttgtagatg

SEQ ID NO: 10329 - DNA, 73 bp, Homo sapiens
gagtcaattcaggggaaagatacaagattgatttgtaaaacccttgaaatgtagatttcttgtagatgtatcc

SEQ ID NO: 10330 - DNA, 72 bp, Homo sapiens
gggaaagatacaagattgatttgtaaaacccttgaaatgtagatttcttgtagatgtatccttcacgttgta

SEQ ID NO: 10331 - DNA, 71 bp, Homo sapiens
acaagattgatttgtaaaacccttgaaatgtagatttcttgtagatgtatccttcacgttgtaaatatgtt

SEQ ID NO: 10332 - DNA, 73 bp, Homo sapiens
taaaacccttgaaatgtagatttcttgtagatgtatccttcacgttgtaaatatgttttgtagagtgaagcca

SEQ ID NO: 10333 - DNA, 74 bp, Homo sapiens
cccttgaaatgtagatttcttgtagatgtatccttcacgttgtaaatatgttttgtagagtgaagccatgggaa

SEQ ID NO: 10334 - DNA, 78 bp, Homo sapiens
tagatttcttgtagatgtatccttcacgttgtaaatatgttttgtagagtgaagccatgggaagccatgtgtaacaga

SEQ ID NO: 10335 - DNA, 78 bp, Homo sapiens
atgtatccttcacgttgtaaatatgttttgtagagtgaagccatgggaagccatgtgtaacagagcttagacatccaa

SEQ ID NO: 10336 - DNA, 76 bp, Homo sapiens
ttcacgttgtaaatatgttttgtagagtgaagccatgggaagccatgtgtaacagagcttagacatccaaaactaa

SEQ ID NO: 10337 - DNA, 78 bp, Homo sapiens
aaatatgttttgtagagtgaagccatgggaagccatgtgtaacagagcttagacatccaaaactaatcaatgctgagg

SEQ ID NO: 10338 - DNA, 80 bp, Homo sapiens
tttgtagagtgaagccatgggaagccatgtgtaacagagcttagacatccaaaactaatcaatgctgaggtggctaaata

SEQ ID NO: 10339 - DNA, 76 bp, Homo sapiens
ccatgggaagccatgtgtaacagagcttagacatccaaaactaatcaatgctgaggtggctaaatacctagccttt

SEQ ID NO: 10340 - DNA, 76 bp, Homo sapiens
ccatgtgtaacagagcttagacatccaaaactaatcaatgctgaggtggctaaatacctagccttttacatgtaaa

SEQ ID NO: 10341 - DNA, 75 bp, Homo sapiens
taacagagcttagacatccaaaactaatcaatgctgaggtggctaaatacctagccttttacatgtaaacctgtc

SEQ ID NO: 10342 - DNA, 74 bp, Homo sapiens
ttagacatccaaaactaatcaatgctgaggtggctaaatacctagccttttacatgtaaacctgtctgcaaaat

SEQ ID NO: 10343 - DNA, 71 bp, Homo sapiens
aaactaatcaatgctgaggtggctaaatacctagccttttacatgtaaacctgtctgcaaaattagctttt

SEQ ID NO: 10344 - DNA, 70 bp, Homo sapiens
caatgctgaggtggctaaatacctagccttttacatgtaaacctgtctgcaaaattagcttttttaaaaa

SEQ ID NO: 10345 - DNA, 68 bp, Homo sapiens
aaaaaaaaattgggggggttaatttatcattcagaaatcttgcattttcaaaaattcagtgcaagcgc

SEQ ID NO: 10346 - DNA, 71 bp, Homo sapiens
aaattgggggggttaatttatcattcagaaatcttgcattttcaaaaattcagtgcaagcgccaggcgatt

SEQ ID NO: 10347 - DNA, 77 bp, Homo sapiens
taatttatcattcagaaatcttgcattttcaaaaattcagtgcaagcgccaggcgatttgtgtctaaggatacgatt

SEQ ID NO: 10348 - DNA, 77 bp, Homo sapiens
ttcagaaatcttgcattttcaaaaattcagtgcaagcgccaggcgatttgtgtctaaggatacgattttgaaccata

SEQ ID NO: 10349 - DNA, 78 bp, Homo sapiens
ttgcattttcaaaaattcagtgcaagcgccaggcgatttgtgtctaaggatacgattttgaaccatatgggcagtgta

SEQ ID NO: 10350 - DNA, 75 bp, Homo sapiens
aaaaattcagtgcaagcgccaggcgatttgtgtctaaggatacgattttgaaccatatgggcagtgtacaaaata

SEQ ID NO: 10351 - DNA, 76 bp, Homo sapiens
agtgcaagcgccaggcgatttgtgtctaaggatacgattttgaaccatatgggcagtgtacaaaatatgaaacaac

SEQ ID NO: 10352 - DNA, 74 bp, Homo sapiens
aggcgatttgtgtctaaggatacgattttgaaccatatgggcagtgtacaaaatatgaaacaactgtttccaca

SEQ ID NO: 10353 - DNA, 78 bp, Homo sapiens
aggatacgattttgaaccatatgggcagtgtacaaaatatgaaacaactgtttccacacttgcacctgatcaagagca

SEQ ID NO: 10354 - DNA, 80 bp, Homo sapiens
cagtgtacaaaatatgaaacaactgtttccacacttgcacctgatcaagagcagtgcttctccatttgttttgcagagaa

SEQ ID NO: 10355 - DNA, 77 bp, Homo sapiens
aatatgaaacaactgtttccacacttgcacctgatcaagagcagtgcttctccatttgttttgcagagaaatgtttt

SEQ ID NO: 10356 - DNA, 76 bp, Homo sapiens
aaacaactgtttccacacttgcacctgatcaagagcagtgcttctccatttgttttgcagagaaatgtttttcatt

SEQ ID NO: 10357 - DNA, 77 bp, Homo sapiens
acacttgcacctgatcaagagcagtgcttctccatttgttttgcagagaaatgtttttcatttcccgtgtgtttcca

SEQ ID NO: 10358 - DNA, 74 bp, Homo sapiens
acctgatcaagagcagtgcttctccatttgttttgcagagaaatgtttttcatttcccgtgtgtttccatttcc

SEQ ID NO: 10359 - DNA, 72 bp, Homo sapiens
agcagtgcttctccatttgttttgcagagaaatgtttttcatttcccgtgtgtttccatttccttctgaaat

SEQ ID NO: 10360 - DNA, 71 bp, Homo sapiens
cttctccatttgttttgcagagaaatgtttttcatttcccgtgtgtttccatttccttctgaaattctgat

SEQ ID NO: 10361 - DNA, 70 bp, Homo sapiens
gttttgcagagaaatgtttttcatttcccgtgtgtttccatttccttctgaaattctgattttatccatt

SEQ ID NO: 10362 - DNA, 67 bp, Homo sapiens
atgtttttcatttcccgtgtgtttccatttccttctgaaattctgattttatccatttttttaaggc

SEQ ID NO: 10363 - DNA, 68 bp, Homo sapiens
cgtgtgtttccatttccttctgaaattctgattttatccatttttttaaggctcctctttatctcctt

SEQ ID NO: 10364 - DNA, 70 bp, Homo sapiens
ccttctgaaattctgattttatccatttttttaaggctcctctttatctcctttcttaaggcactgttgc

SEQ ID NO: 10365 - DNA, 71 bp, Homo sapiens
ttctgattttatccatttttttaaggctcctctttatctcctttcttaaggcactgttgctatggcacttt

SEQ ID NO: 10366 - DNA, 71 bp, Homo sapiens
ttatccatttttttaaggctcctctttatctcctttcttaaggcactgttgctatggcacttttctataac

SEQ ID NO: 10367 - DNA, 70 bp, Homo sapiens
tttttaaggctcctctttatctcctttcttaaggcactgttgctatggcacttttctataaccttttcat

SEQ ID NO: 10368 - DNA, 74 bp, Homo sapiens
tctttatctcctttcttaaggcactgttgctatggcacttttctataaccttttcattcctgtgtacagtagct

SEQ ID NO: 10369 - DNA, 77 bp, Homo sapiens
ttaaggcactgttgctatggcacttttctataaccttttcattcctgtgtacagtagcttaaaattgcagtgattga

SEQ ID NO: 10370 - DNA, 76 bp, Homo sapiens
tatggcacttttctataaccttttcattcctgtgtacagtagcttaaaattgcagtgattgagcataacctacttg

SEQ ID NO: 10371 - DNA, 73 bp, Homo sapiens
cttttctataaccttttcattcctgtgtacagtagcttaaaattgcagtgattgagcataacctacttgtttg

SEQ ID NO: 10372 - DNA, 73 bp, Homo sapiens
aaccttttcattcctgtgtacagtagcttaaaattgcagtgattgagcataacctacttgtttgtataaatta

SEQ ID NO: 10373 - DNA, 77 bp, Homo sapiens
cctgtgtacagtagcttaaaattgcagtgattgagcataacctacttgtttgtataaattattgaaatccatttgca

SEQ ID NO: 10374 - DNA, 75 bp, Homo sapiens
cagtagcttaaaattgcagtgattgagcataacctacttgtttgtataaattattgaaatccatttgcaccctgt

SEQ ID NO: 10375 - DNA, 75 bp, Homo sapiens
aattgcagtgattgagcataacctacttgtttgtataaattattgaaatccatttgcaccctgttaagaatggac

SEQ ID NO: 10376 - DNA, 71 bp, Homo sapiens
ttgagcataacctacttgtttgtataaattattgaaatccatttgcaccctgttaagaatggacttaaaag

SEQ ID NO: 10377 - DNA, 71 bp, Homo sapiens
cctacttgtttgtataaattattgaaatccatttgcaccctgttaagaatggacttaaaagtactgctgga

SEQ ID NO: 10378 - DNA, 77 bp, Homo sapiens
tataaattattgaaatccatttgcaccctgttaagaatggacttaaaagtactgctggacaggcatgtgtgctcaaa

SEQ ID NO: 10379 - DNA, 80 bp, Homo sapiens
tttgcaccctgttaagaatggacttaaaagtactgctggacaggcatgtgtgctcaaagtacattgattgctcaaatata

SEQ ID NO: 10380 - DNA, 78 bp, Homo sapiens
ctgttaagaatggacttaaaagtactgctggacaggcatgtgtgctcaaagtacattgattgctcaaatataaggaaa

SEQ ID NO: 10381 - DNA, 78 bp, Homo sapiens
acttaaaagtactgctggacaggcatgtgtgctcaaagtacattgattgctcaaatataaggaaatggcccaatgaac

SEQ ID NO: 10382 - DNA, 78 bp, Homo sapiens
aaagtactgctggacaggcatgtgtgctcaaagtacattgattgctcaaatataaggaaatggcccaatgaacgtggt

SEQ ID NO: 10383 - DNA, 78 bp, Homo sapiens
tggacaggcatgtgtgctcaaagtacattgattgctcaaatataaggaaatggcccaatgaacgtggttgtgggaggg

SEQ ID NO: 10384 - DNA, 75 bp, Homo sapiens
tgtgtgctcaaagtacattgattgctcaaatataaggaaatggcccaatgaacgtggttgtgggaggggaaagag

SEQ ID NO: 10385 - DNA, 74 bp, Homo sapiens
tcaaatataaggaaatggcccaatgaacgtggttgtgggaggggaaagaggaaacagagctagtcagatgtgaa

SEQ ID NO: 10386 - DNA, 74 bp, Homo sapiens
tataaggaaatggcccaatgaacgtggttgtgggaggggaaagaggaaacagagctagtcagatgtgaattgta

SEQ ID NO: 10387 - DNA, 75 bp, Homo sapiens
caatgaacgtggttgtgggaggggaaagaggaaacagagctagtcagatgtgaattgtatctgttgtaataaaca

SEQ ID NO: 10388 - DNA, 74 bp, Homo sapiens
tggttgtgggaggggaaagaggaaacagagctagtcagatgtgaattgtatctgttgtaataaacatgttaaaa

SEQ ID NO: 10389 - DNA, 73 bp, Homo sapiens
ggaggggaaagaggaaacagagctagtcagatgtgaattgtatctgttgtaataaacatgttaaaacaaacaa

SEQ ID NO: 10390 - DNA, 69 bp, Homo sapiens
caaacaaaaattgttatttttcttttccttcggtcagtgcacattagcatttgaactacctggggattc

SEQ ID NO: 10391 - DNA, 71 bp, Homo sapiens
gttatttttcttttccttcggtcagtgcacattagcatttgaactacctggggattctttatcagaactgt

SEQ ID NO: 10392 - DNA, 72 bp, Homo sapiens
ttttcttttccttcggtcagtgcacattagcatttgaactacctggggattctttatcagaactgttcttgt

SEQ ID NO: 10393 - DNA, 75 bp, Homo sapiens
ggtcagtgcacattagcatttgaactacctggggattctttatcagaactgttcttgttgaatatttatacttaa

SEQ ID NO: 10394 - DNA, 75 bp, Homo sapiens
tgcacattagcatttgaactacctggggattctttatcagaactgttcttgttgaatatttatacttaattgaaa

SEQ ID NO: 10395 - DNA, 71 bp, Homo sapiens
catttgaactacctggggattctttatcagaactgttcttgttgaatatttatacttaattgaaataattc

SEQ ID NO: 10396 - DNA, 68 bp, Homo sapiens
gggattctttatcagaactgttcttgttgaatatttatacttaattgaaataattccttaagggaggt

SEQ ID NO: 10397 - DNA, 64 bp, Homo sapiens
ctgttcttgttgaatatttatacttaattgaaataattccttaagggaggttttgtttaaaacg

SEQ ID NO: 10398 - DNA, 64 bp, Homo sapiens
gaatatttatacttaattgaaataattccttaagggaggttttgtttaaaacgtattaacagga

SEQ ID NO: 10399 - DNA, 66 bp, Homo sapiens
ttaattgaaataattccttaagggaggttttgtttaaaacgtattaacaggaaattgtgtatgaga

SEQ ID NO: 10400 - DNA, 67 bp, Homo sapiens
ataattccttaagggaggttttgtttaaaacgtattaacaggaaattgtgtatgagatatttaatga

SEQ ID NO: 10401 - DNA, 66 bp, Homo sapiens
ccttaagggaggttttgtttaaaacgtattaacaggaaattgtgtatgagatatttaatgaaataa

SEQ ID NO: 10402 - DNA, 68 bp, Homo sapiens
ggttttgtttaaaacgtattaacaggaaattgtgtatgagatatttaatgaaataagaaattcaacaa

SEQ ID NO: 10403 - DNA, 74 bp, Homo sapiens
gtattaacaggaaattgtgtatgagatatttaatgaaataagaaattcaacaagaatgattaagtcacttccca

SEQ ID NO: 10404 - DNA, 73 bp, Homo sapiens
ggaaattgtgtatgagatatttaatgaaataagaaattcaacaagaatgattaagtcacttcccaagtggttg

SEQ ID NO: 10405 - DNA, 75 bp, Homo sapiens
gaaattgtgtatgagatatttaatgaaataagaaattcaacaagaatgattaagtcacttcccaagtggttgtca

SEQ ID NO: 10406 - DNA, 74 bp, Homo sapiens
gtgtatgagatatttaatgaaataagaaattcaacaagaatgattaagtcacttcccaagtggttgtcatttgt

SEQ ID NO: 10407 - DNA, 68 bp, Homo sapiens
gaaataagaaattcaacaagaatgattaagtcacttcccaagtggttgtcatttgttaaaccctggtt

SEQ ID NO: 10408 - DNA, 68 bp, Homo sapiens
aattcaacaagaatgattaagtcacttcccaagtggttgtcatttgttaaaccctggtttacctgtct

SEQ ID NO: 10409 - DNA, 71 bp, Homo sapiens
atgattaagtcacttcccaagtggttgtcatttgttaaaccctggtttacctgtcttgctattatgacatt

SEQ ID NO: 10410 - DNA, 71 bp, Homo sapiens
taagtcacttcccaagtggttgtcatttgttaaaccctggtttacctgtcttgctattatgacatttcatt

SEQ ID NO: 10411 - DNA, 70 bp, Homo sapiens
aagtggttgtcatttgttaaaccctggtttacctgtcttgctattatgacatttcatttggaaggatgtt

SEQ ID NO: 10412 - DNA, 74 bp, Homo sapiens
tcatttgttaaaccctggtttacctgtcttgctattatgacatttcatttggaaggatgtttgtgttgtagcta

SEQ ID NO: 10413 - DNA, 74 bp, Homo sapiens
taaaccctggtttacctgtcttgctattatgacatttcatttggaaggatgtttgtgttgtagctaactgttca

SEQ ID NO: 10414 - DNA, 78 bp, Homo sapiens
tttacctgtcttgctattatgacatttcatttggaaggatgtttgtgttgtagctaactgttcaagtctggtgctgac

SEQ ID NO: 10415 - DNA, 76 bp, Homo sapiens
aaggatgtttgtgttgtagctaactgttcaagtctggtgctgactgctgttcttagccatcacaaaacgctaaatt

SEQ ID NO: 10416 - DNA, 79 bp, Homo sapiens
tgactgctgttcttagccatcacaaaacgctaaatttgtgtaattggagcttcctgctgttatctggaaatagcaggaa

SEQ ID NO: 10417 - DNA, 76 bp, Homo sapiens
ctgttcttagccatcacaaaacgctaaatttgtgtaattggagcttcctgctgttatctggaaatagcaggaaagc

SEQ ID NO: 10418 - DNA, 75 bp, Homo sapiens
acaaaacgctaaatttgtgtaattggagcttcctgctgttatctggaaatagcaggaaagcgcagctttgtatat

SEQ ID NO: 10419 - DNA, 75 bp, Homo sapiens
aaatttgtgtaattggagcttcctgctgttatctggaaatagcaggaaagcgcagctttgtatattgtttcctaa

SEQ ID NO: 10420 - DNA, 76 bp, Homo sapiens
taattggagcttcctgctgttatctggaaatagcaggaaagcgcagctttgtatattgtttcctaaagtatattaa

SEQ ID NO: 10421 - DNA, 75 bp, Homo sapiens
gagcttcctgctgttatctggaaatagcaggaaagcgcagctttgtatattgtttcctaaagtatattaaaataa

SEQ ID NO: 10422 - DNA, 70 bp, Homo sapiens
ctgttatctggaaatagcaggaaagcgcagctttgtatattgtttcctaaagtatattaaaataaaaaaa

SEQ ID NO: 10423 - DNA, 75 bp, Homo sapiens
ctttttttttcctttgctgaaatattagtcacatagccttagcttcacactgccagtaatgtatcaaatcacaag

SEQ ID NO: 10424 - DNA, 76 bp, Homo sapiens
tttttcctttgctgaaatattagtcacatagccttagcttcacactgccagtaatgtatcaaatcacaagggtttc

SEQ ID NO: 10425 - DNA, 77 bp, Homo sapiens
ctgaaatattagtcacatagccttagcttcacactgccagtaatgtatcaaatcacaagggtttccgcatgaaaaaa

SEQ ID NO: 10426 - DNA, 76 bp, Homo sapiens
tagtcacatagccttagcttcacactgccagtaatgtatcaaatcacaagggtttccgcatgaaaaaaatcttttc

SEQ ID NO: 10427 - DNA, 69 bp, Homo sapiens
acactgccagtaatgtatcaaatcacaagggtttccgcatgaaaaaaatcttttcttcccccacaaaaa

SEQ ID NO: 10428 - DNA, 65 bp, Homo sapiens
gtaatgtatcaaatcacaagggtttccgcatgaaaaaaatcttttcttcccccacaaaaaaacct

SEQ ID NO: 10429 - DNA, 64 bp, Homo sapiens
atcacaagggtttccgcatgaaaaaaatcttttcttcccccacaaaaaaacctttaccatcaaa

SEQ ID NO: 10430 - DNA, 65 bp, Homo sapiens
ggtttccgcatgaaaaaaatcttttcttcccccacaaaaaaacctttaccatcaaaatcttgcca

SEQ ID NO: 10431 - DNA, 67 bp, Homo sapiens
ccgcatgaaaaaaatcttttcttcccccacaaaaaaacctttaccatcaaaatcttgccatctgatt

SEQ ID NO: 10432 - DNA, 65 bp, Homo sapiens
aaaatcttttcttcccccacaaaaaaacctttaccatcaaaatcttgccatctgatttagaaagg

SEQ ID NO: 10433 - DNA, 66 bp, Homo sapiens
cttttcttcccccacaaaaaaacctttaccatcaaaatcttgccatctgatttagaaaggtgtttc

SEQ ID NO: 10434 - DNA, 68 bp, Homo sapiens
tcttcccccacaaaaaaacctttaccatcaaaatcttgccatctgatttagaaaggtgtttcttcttc

SEQ ID NO: 10435 - DNA, 67 bp, Homo sapiens
ccccacaaaaaaacctttaccatcaaaatcttgccatctgatttagaaaggtgtttcttcttcttct

SEQ ID NO: 10436 - DNA, 68 bp, Homo sapiens
ttttttttttctgttggggcagataagtgcttccaaaactggcagcaccaagggcttattttttatgt

SEQ ID NO: 10437 - DNA, 73 bp, Homo sapiens
tttttctgttggggcagataagtgcttccaaaactggcagcaccaagggcttattttttatgttagacatcaa

SEQ ID NO: 10438 - DNA, 75 bp, Homo sapiens
agataagtgcttccaaaactggcagcaccaagggcttattttttatgttagacatcaatgtcaatgttactacat

SEQ ID NO: 10439 - DNA, 77 bp, Homo sapiens
ttccaaaactggcagcaccaagggcttattttttatgttagacatcaatgtcaatgttactacattctcggatgcta

SEQ ID NO: 10440 - DNA, 77 bp, Homo sapiens
tggcagcaccaagggcttattttttatgttagacatcaatgtcaatgttactacattctcggatgctaacataaatt

SEQ ID NO: 10441 - DNA, 75 bp, Homo sapiens
caccaagggcttattttttatgttagacatcaatgtcaatgttactacattctcggatgctaacataaattttga

SEQ ID NO: 10442 - DNA, 77 bp, Homo sapiens
tttttatgttagacatcaatgtcaatgttactacattctcggatgctaacataaattttgaaattgctcttgtgctt

SEQ ID NO: 10443 - DNA, 80 bp, Homo sapiens
atgttagacatcaatgtcaatgttactacattctcggatgctaacataaattttgaaattgctcttgtgctttaagcata

SEQ ID NO: 10444 - DNA, 80 bp, Homo sapiens
gttagacatcaatgtcaatgttactacattctcggatgctaacataaattttgaaattgctcttgtgctttaagcatata

SEQ ID NO: 10445 - DNA, 81 bp, Homo sapiens
gacatcaatgtcaatgttactacattctcggatgctaacataaattttgaaattgctcttgtgctttaagcatatattgaa

SEQ ID NO: 10446 - DNA, 78 bp, Homo sapiens
caatgtcaatgttactacattctcggatgctaacataaattttgaaattgctcttgtgctttaagcatatattgaaag

SEQ ID NO: 10447 - DNA, 77 bp, Homo sapiens
tgttactacattctcggatgctaacataaattttgaaattgctcttgtgctttaagcatatattgaaagtatggaag

SEQ ID NO: 10448 - DNA, 76 bp, Homo sapiens
gttactacattctcggatgctaacataaattttgaaattgctcttgtgctttaagcatatattgaaagtatggaag

SEQ ID NO: 10449 - DNA, 76 bp, Homo sapiens
cattctcggatgctaacataaattttgaaattgctcttgtgctttaagcatatattgaaagtatggaagttaaatg

SEQ ID NO: 10450 - DNA, 76 bp, Homo sapiens
ggatgctaacataaattttgaaattgctcttgtgctttaagcatatattgaaagtatggaagttaaatgttcaggc

SEQ ID NO: 10451 - DNA, 76 bp, Homo sapiens
gatgctaacataaattttgaaattgctcttgtgctttaagcatatattgaaagtatggaagttaaatgttcaggct

SEQ ID NO: 10452 - DNA, 74 bp, Homo sapiens
cataaattttgaaattgctcttgtgctttaagcatatattgaaagtatggaagttaaatgttcaggcttttcag

SEQ ID NO: 10453 - DNA, 74 bp, Homo sapiens
gctcttgtgctttaagcatatattgaaagtatggaagttaaatgttcaggcttttcagtaagctcaaaaagtta

SEQ ID NO: 10454 - DNA, 72 bp, Homo sapiens
gtgctttaagcatatattgaaagtatggaagttaaatgttcaggcttttcagtaagctcaaaaagttaactg

SEQ ID NO: 10455 - DNA, 70 bp, Homo sapiens
attgaaagtatggaagttaaatgttcaggcttttcagtaagctcaaaaagttaactgtaagcgatagtgt

SEQ ID NO: 10456 - DNA, 70 bp, Homo sapiens
tggaagttaaatgttcaggcttttcagtaagctcaaaaagttaactgtaagcgatagtgttggtgttttc

SEQ ID NO: 10457 - DNA, 66 bp, Homo sapiens
aaatgttccagtgtaattaaaaggaattaaaatcttgaagatattttcctgtaatttaaggatact

SEQ ID NO: 10458 - DNA, 65 bp, Homo sapiens
aaggaattaaaatcttgaagatattttcctgtaatttaaggatactttttaaatgtaagaaaaga

SEQ ID NO: 10459 - DNA, 68 bp, Homo sapiens
aatcttgaagatattttcctgtaatttaaggatactttttaaatgtaagaaaagacatgtcattaatt

SEQ ID NO: 10460 - DNA, 70 bp, Homo sapiens
agatattttcctgtaatttaaggatactttttaaatgtaagaaaagacatgtcattaatttattgtcatg

SEQ ID NO: 10461 - DNA, 71 bp, Homo sapiens
tgtaatttaaggatactttttaaatgtaagaaaagacatgtcattaatttattgtcatgtttatacctctg

SEQ ID NO: 10462 - DNA, 74 bp, Homo sapiens
gatactttttaaatgtaagaaaagacatgtcattaatttattgtcatgtttatacctctgtgagattgttaaca

SEQ ID NO: 10463 - DNA, 77 bp, Homo sapiens
aaatgtaagaaaagacatgtcattaatttattgtcatgtttatacctctgtgagattgttaacatctgctgaattta

SEQ ID NO: 10464 - DNA, 80 bp, Homo sapiens
gaaaagacatgtcattaatttattgtcatgtttatacctctgtgagattgttaacatctgctgaatttaactagtgcatg

SEQ ID NO: 10465 - DNA, 78 bp, Homo sapiens
cattaatttattgtcatgtttatacctctgtgagattgttaacatctgctgaatttaactagtgcatgtaaatgaaac

SEQ ID NO: 10466 - DNA, 77 bp, Homo sapiens
attgtcatgtttatacctctgtgagattgttaacatctgctgaatttaactagtgcatgtaaatgaaaccccaaaga

SEQ ID NO: 10467 - DNA, 77 bp, Homo sapiens
atgtttatacctctgtgagattgttaacatctgctgaatttaactagtgcatgtaaatgaaaccccaaagagctgtg

SEQ ID NO: 10468 - DNA, 80 bp, Homo sapiens
tctgtgagattgttaacatctgctgaatttaactagtgcatgtaaatgaaaccccaaagagctgtgtgttcagctagaaa

SEQ ID NO: 10469 - DNA, 76 bp, Homo sapiens
ttgttaacatctgctgaatttaactagtgcatgtaaatgaaaccccaaagagctgtgtgttcagctagaaacctta

SEQ ID NO: 10470 - DNA, 74 bp, Homo sapiens
ctgaatttaactagtgcatgtaaatgaaaccccaaagagctgtgtgttcagctagaaaccttactgtatctttc

SEQ ID NO: 10471 - DNA, 74 bp, Homo sapiens
taactagtgcatgtaaatgaaaccccaaagagctgtgtgttcagctagaaaccttactgtatctttcctggaaa

SEQ ID NO: 10472 - DNA, 74 bp, Homo sapiens
ccaaagagctgtgtgttcagctagaaaccttactgtatctttcctggaaagaagtgagcaatttgttgtaatag

SEQ ID NO: 10473 - DNA, 74 bp, Homo sapiens
agctagaaaccttactgtatctttcctggaaagaagtgagcaatttgttgtaataggcaaatgtttcctgatca

SEQ ID NO: 10474 - DNA, 77 bp, Homo sapiens
actgtatctttcctggaaagaagtgagcaatttgttgtaataggcaaatgtttcctgatcagatggcaatttgtgat

SEQ ID NO: 10475 - DNA, 76 bp, Homo sapiens
ttcctggaaagaagtgagcaatttgttgtaataggcaaatgtttcctgatcagatggcaatttgtgatttaggtaa

SEQ ID NO: 10476 - DNA, 76 bp, Homo sapiens
gaaagaagtgagcaatttgttgtaataggcaaatgtttcctgatcagatggcaatttgtgatttaggtaaatttga

SEQ ID NO: 10477 - DNA, 76 bp, Homo sapiens
gcaatttgttgtaataggcaaatgtttcctgatcagatggcaatttgtgatttaggtaaatttgaatttgatttgc

SEQ ID NO: 10478 - DNA, 76 bp, Homo sapiens
taggcaaatgtttcctgatcagatggcaatttgtgatttaggtaaatttgaatttgatttgcttatagtctactgg

SEQ ID NO: 10479 - DNA, 76 bp, Homo sapiens
gtttcctgatcagatggcaatttgtgatttaggtaaatttgaatttgatttgcttatagtctactggtctgtgtac

SEQ ID NO: 10480 - DNA, 76 bp, Homo sapiens
gatcagatggcaatttgtgatttaggtaaatttgaatttgatttgcttatagtctactggtctgtgtacctatgtt

SEQ ID NO: 10481 - DNA, 72 bp, Homo sapiens
gcaatttgtgatttaggtaaatttgaatttgatttgcttatagtctactggtctgtgtacctatgttttgtt

SEQ ID NO: 10482 - DNA, 69 bp, Homo sapiens
atttaggtaaatttgaatttgatttgcttatagtctactggtctgtgtacctatgttttgtttttcaaa

SEQ ID NO: 10483 - DNA, 69 bp, Homo sapiens
gaatttgatttgcttatagtctactggtctgtgtacctatgttttgtttttcaaaaaagtttacatccc

SEQ ID NO: 10484 - DNA, 70 bp, Homo sapiens
gatttgcttatagtctactggtctgtgtacctatgttttgtttttcaaaaaagtttacatccctaaatga

SEQ ID NO: 10485 - DNA, 69 bp, Homo sapiens
agtctactggtctgtgtacctatgttttgtttttcaaaaaagtttacatccctaaatgaattagtcaca

SEQ ID NO: 10486 - DNA, 69 bp, Homo sapiens
gtctgtgtacctatgttttgtttttcaaaaaagtttacatccctaaatgaattagtcacatatatttag

SEQ ID NO: 10487 - DNA, 69 bp, Homo sapiens
gttttgtttttcaaaaaagtttacatccctaaatgaattagtcacatatatttaggagaagatgcctaa

SEQ ID NO: 10488 - DNA, 70 bp, Homo sapiens
caaaaaagtttacatccctaaatgaattagtcacatatatttaggagaagatgcctaatttggtatttct

SEQ ID NO: 10489 - DNA, 73 bp, Homo sapiens
agtttacatccctaaatgaattagtcacatatatttaggagaagatgcctaatttggtatttcttaatagtga

SEQ ID NO: 10490 - DNA, 70 bp, Homo sapiens
ccctaaatgaattagtcacatatatttaggagaagatgcctaatttggtatttcttaatagtgaattttt

SEQ ID NO: 10491 - DNA, 68 bp, Homo sapiens
gccaccgctcctggccagtagtgaatttttaaacacagaaaatctaaaattttgtggaaatattttaa

SEQ ID NO: 10492 - DNA, 67 bp, Homo sapiens
cgctcctggccagtagtgaatttttaaacacagaaaatctaaaattttgtggaaatattttaaatat

SEQ ID NO: 10493 - DNA, 67 bp, Homo sapiens
cagtagtgaatttttaaacacagaaaatctaaaattttgtggaaatattttaaatattgcaccttaa

SEQ ID NO: 10494 - DNA, 70 bp, Homo sapiens
taaacacagaaaatctaaaattttgtggaaatattttaaatattgcaccttaatacaaggtatccagctc

SEQ ID NO: 10495 - DNA, 68 bp, Homo sapiens
gaaaatctaaaattttgtggaaatattttaaatattgcaccttaatacaaggtatccagctcctaacc

SEQ ID NO: 10496 - DNA, 69 bp, Homo sapiens
tttgtggaaatattttaaatattgcaccttaatacaaggtatccagctcctaaccttaactagggaata

SEQ ID NO: 10497 - DNA, 69 bp, Homo sapiens
tattttaaatattgcaccttaatacaaggtatccagctcctaaccttaactagggaatatctattaaaa

SEQ ID NO: 10498 - DNA, 71 bp, Homo sapiens
aaatattgcaccttaatacaaggtatccagctcctaaccttaactagggaatatctattaaaataagcata

SEQ ID NO: 10499 - DNA, 71 bp, Homo sapiens
ccttaatacaaggtatccagctcctaaccttaactagggaatatctattaaaataagcataatgttctgga

SEQ ID NO: 10500 - DNA, 72 bp, Homo sapiens
gtatccagctcctaaccttaactagggaatatctattaaaataagcataatgttctggactagagtattcct

SEQ ID NO: 10501 - DNA, 72 bp, Homo sapiens
gctcctaaccttaactagggaatatctattaaaataagcataatgttctggactagagtattccttatctag

SEQ ID NO: 10502 - DNA, 74 bp, Homo sapiens
ctagggaatatctattaaaataagcataatgttctggactagagtattccttatctagttggttatggatttga

SEQ ID NO: 10503 - DNA, 73 bp, Homo sapiens
ctattaaaataagcataatgttctggactagagtattccttatctagttggttatggatttgaacatgtacct

SEQ ID NO: 10504 - DNA, 74 bp, Homo sapiens
aagcataatgttctggactagagtattccttatctagttggttatggatttgaacatgtaccttggtttagata

SEQ ID NO: 10505 - DNA, 73 bp, Homo sapiens
atgttctggactagagtattccttatctagttggttatggatttgaacatgtaccttggtttagatactttga

SEQ ID NO: 10506 - DNA, 72 bp, Homo sapiens
gactagagtattccttatctagttggttatggatttgaacatgtaccttggtttagatactttgaaaataga

SEQ ID NO: 10507 - DNA, 73 bp, Homo sapiens
tatctagttggttatggatttgaacatgtaccttggtttagatactttgaaaatagaagtactgaatagcctc

SEQ ID NO: 10508 - DNA, 71 bp, Homo sapiens
gttatggatttgaacatgtaccttggtttagatactttgaaaatagaagtactgaatagcctctagggaac

SEQ ID NO: 10509 - DNA, 70 bp, Homo sapiens
atgtaccttggtttagatactttgaaaatagaagtactgaatagcctctagggaacttgagtggcctttc

SEQ ID NO: 10510 - DNA, 67 bp, Homo sapiens
tttgaaaatagaagtactgaatagcctctagggaacttgagtggcctttccctccccctgccccccc

SEQ ID NO: 10511 - DNA, 63 bp, Homo sapiens
aagtactgaatagcctctagggaacttgagtggcctttccctccccctgcccccccccccccc

SEQ ID NO: 10512 - DNA, 61 bp, Homo sapiens
ccccccccccccccgttttaaaagatcagtagtctctattcaaacttttaaaatgtcgtgg

SEQ ID NO: 10513 - DNA, 67 bp, Homo sapiens
ccccgttttaaaagatcagtagtctctattcaaacttttaaaatgtcgtggtattgtaacaatatat

SEQ ID NO: 10514 - DNA, 71 bp, Homo sapiens
agtctctattcaaacttttaaaatgtcgtggtattgtaacaatatatttgatgaaagaaggttacagactc

SEQ ID NO: 10515 - DNA, 70 bp, Homo sapiens
caaacttttaaaatgtcgtggtattgtaacaatatatttgatgaaagaaggttacagactcccctgaaga

SEQ ID NO: 10516 - DNA, 71 bp, Homo sapiens
ttttaaaatgtcgtggtattgtaacaatatatttgatgaaagaaggttacagactcccctgaagaaccagc

SEQ ID NO: 10517 - DNA, 70 bp, Homo sapiens
gtattgtaacaatatatttgatgaaagaaggttacagactcccctgaagaaccagctttcctacgctttt

SEQ ID NO: 10518 - DNA, 69 bp, Homo sapiens
caatatatttgatgaaagaaggttacagactcccctgaagaaccagctttcctacgctttttatttttc

SEQ ID NO: 10519 - DNA, 67 bp, Homo sapiens
atttgatgaaagaaggttacagactcccctgaagaaccagctttcctacgctttttatttttctaac

SEQ ID NO: 10520 - DNA, 67 bp, Homo sapiens
gttacagactcccctgaagaaccagctttcctacgctttttatttttctaacttgtctaacctgatt

SEQ ID NO: 10521 - DNA, 66 bp, Homo sapiens
agactcccctgaagaaccagctttcctacgctttttatttttctaacttgtctaacctgattttaa

SEQ ID NO: 10522 - DNA, 69 bp, Homo sapiens
gaaccagctttcctacgctttttatttttctaacttgtctaacctgattttaaaatgactgcaattcca

SEQ ID NO: 10523 - DNA, 72 bp, Homo sapiens
tatttttctaacttgtctaacctgattttaaaatgactgcaattccagactaaaaacatgcttcagccctgt

SEQ ID NO: 10524 - DNA, 74 bp, Homo sapiens
ttctaacttgtctaacctgattttaaaatgactgcaattccagactaaaaacatgcttcagccctgtttcaaga

SEQ ID NO: 10525 - DNA, 75 bp, Homo sapiens
cctgattttaaaatgactgcaattccagactaaaaacatgcttcagccctgtttcaagacattatgcttctttta

SEQ ID NO: 10526 - DNA, 75 bp, Homo sapiens
tttaaaatgactgcaattccagactaaaaacatgcttcagccctgtttcaagacattatgcttcttttaacagtc

SEQ ID NO: 10527 - DNA, 72 bp, Homo sapiens
aattccagactaaaaacatgcttcagccctgtttcaagacattatgcttcttttaacagtccaaattagtag

SEQ ID NO: 10528 - DNA, 72 bp, Homo sapiens
cagactaaaaacatgcttcagccctgtttcaagacattatgcttcttttaacagtccaaattagtagtttta

SEQ ID NO: 10529 - DNA, 71 bp, Homo sapiens
acatgcttcagccctgtttcaagacattatgcttcttttaacagtccaaattagtagttttatttttcttc

SEQ ID NO: 10530 - DNA, 68 bp, Homo sapiens
gccctgtttcaagacattatgcttcttttaacagtccaaattagtagttttatttttcttctaaatct

SEQ ID NO: 10531 - DNA, 68 bp, Homo sapiens
cattatgcttcttttaacagtccaaattagtagttttatttttcttctaaatctttgtttcacacttg

SEQ ID NO: 10532 - DNA, 66 bp, Homo sapiens
gcttcttttaacagtccaaattagtagttttatttttcttctaaatctttgtttcacacttgtaaa

SEQ ID NO: 10533 - DNA, 65 bp, Homo sapiens
ccaaattagtagttttatttttcttctaaatctttgtttcacacttgtaaaatcttgggaaggag

SEQ ID NO: 10534 - DNA, 65 bp, Homo sapiens
gtagttttatttttcttctaaatctttgtttcacacttgtaaaatcttgggaaggaggttcttaa

SEQ ID NO: 10535 - DNA, 67 bp, Homo sapiens
tctttgtttcacacttgtaaaatcttgggaaggaggttcttaaaactttgccaggaattgttaccca

SEQ ID NO: 10536 - DNA, 66 bp, Homo sapiens
gtttcacacttgtaaaatcttgggaaggaggttcttaaaactttgccaggaattgttacccatttc

SEQ ID NO: 10537 - DNA, 64 bp, Homo sapiens
gtaaaatcttgggaaggaggttcttaaaactttgccaggaattgttacccatttccaaaaacag

SEQ ID NO: 10538 - DNA, 64 bp, Homo sapiens
gggaaggaggttcttaaaactttgccaggaattgttacccatttccaaaaacagtttattatgt

SEQ ID NO: 10539 - DNA, 69 bp, Homo sapiens
tgccaggaattgttacccatttccaaaaacagtttattatgttcaaaaaccaccatatctttgagggac

SEQ ID NO: 10540 - DNA, 67 bp, Homo sapiens
ttacccatttccaaaaacagtttattatgttcaaaaaccaccatatctttgagggactgtttgaaag

SEQ ID NO: 10541 - DNA, 67 bp, Homo sapiens
ttccaaaaacagtttattatgttcaaaaaccaccatatctttgagggactgtttgaaaggggagagg

SEQ ID NO: 10542 - DNA, 68 bp, Homo sapiens
tttattatgttcaaaaaccaccatatctttgagggactgtttgaaaggggagagggcaacgcgggaaa

SEQ ID NO: 10543 - DNA, 70 bp, Homo sapiens
tatgttcaaaaaccaccatatctttgagggactgtttgaaaggggagagggcaacgcgggaaataattca

SEQ ID NO: 10544 - DNA, 71 bp, Homo sapiens
accatatctttgagggactgtttgaaaggggagagggcaacgcgggaaataattcactctgcgcaccggaa

SEQ ID NO: 10545 - DNA, 71 bp, Homo sapiens
tttgagggactgtttgaaaggggagagggcaacgcgggaaataattcactctgcgcaccggaactattgta

SEQ ID NO: 10546 - DNA, 71 bp, Homo sapiens
tttgaaaggggagagggcaacgcgggaaataattcactctgcgcaccggaactattgtagttcaggacttc

SEQ ID NO: 10547 - DNA, 73 bp, Homo sapiens
agagggcaacgcgggaaataattcactctgcgcaccggaactattgtagttcaggacttccagctactgtatt

SEQ ID NO: 10548 - DNA, 73 bp, Homo sapiens
aacgcgggaaataattcactctgcgcaccggaactattgtagttcaggacttccagctactgtatttagatgt

SEQ ID NO: 10549 - DNA, 76 bp, Homo sapiens
taattcactctgcgcaccggaactattgtagttcaggacttccagctactgtatttagatgttgggtttgaatata

SEQ ID NO: 10550 - DNA, 73 bp, Homo sapiens
cgcaccggaactattgtagttcaggacttccagctactgtatttagatgttgggtttgaatatacagatttct

SEQ ID NO: 10551 - DNA, 73 bp, Homo sapiens
cggaactattgtagttcaggacttccagctactgtatttagatgttgggtttgaatatacagatttcttttca

SEQ ID NO: 10552 - DNA, 74 bp, Homo sapiens
acttccagctactgtatttagatgttgggtttgaatatacagatttcttttcaatacctgtaaatatggctata

SEQ ID NO: 10553 - DNA, 73 bp, Homo sapiens
actgtatttagatgttgggtttgaatatacagatttcttttcaatacctgtaaatatggctatattcttgtat

SEQ ID NO: 10554 - DNA, 72 bp, Homo sapiens
ttgggtttgaatatacagatttcttttcaatacctgtaaatatggctatattcttgtatttgtacgggagtg

SEQ ID NO: 10555 - DNA, 73 bp, Homo sapiens
agatttcttttcaatacctgtaaatatggctatattcttgtatttgtacgggagtgtacaaaatgacactgaa

SEQ ID NO: 10556 - DNA, 72 bp, Homo sapiens
caatacctgtaaatatggctatattcttgtatttgtacgggagtgtacaaaatgacactgaaaagtaataaa

SEQ ID NO: 10557 - DNA, 72 bp, Homo sapiens
aatatggctatattcttgtatttgtacgggagtgtacaaaatgacactgaaaagtaataaatatgttttgac

SEQ ID NO: 10558 - DNA, 74 bp, Homo sapiens
tcttgtatttgtacgggagtgtacaaaatgacactgaaaagtaataaatatgttttgactatattgtgcagtta

SEQ ID NO: 10559 - DNA, 74 bp, Homo sapiens
ggagtgtacaaaatgacactgaaaagtaataaatatgttttgactatattgtgcagttatttcagaactgtgtt

SEQ ID NO: 10560 - DNA, 75 bp, Homo sapiens
tgacactgaaaagtaataaatatgttttgactatattgtgcagttatttcagaactgtgttttgaaagtcttaga

SEQ ID NO: 10561 - DNA, 77 bp, Homo sapiens
gtaataaatatgttttgactatattgtgcagttatttcagaactgtgttttgaaagtcttagaatgcataatttgca

SEQ ID NO: 10562 - DNA, 77 bp, Homo sapiens
tgactatattgtgcagttatttcagaactgtgttttgaaagtcttagaatgcataatttgcatttgagtaaggaaat

SEQ ID NO: 10563 - DNA, 73 bp, Homo sapiens
gtgcagttatttcagaactgtgttttgaaagtcttagaatgcataatttgcatttgagtaaggaaatttaaaa

SEQ ID NO: 10564 - DNA, 75 bp, Homo sapiens
gaactgtgttttgaaagtcttagaatgcataatttgcatttgagtaaggaaatttaaaatacagattactgctga

SEQ ID NO: 10565 - DNA, 76 bp, Homo sapiens
tgaaagtcttagaatgcataatttgcatttgagtaaggaaatttaaaatacagattactgctgagattttaatcag

SEQ ID NO: 10566 - DNA, 75 bp, Homo sapiens
agaatgcataatttgcatttgagtaaggaaatttaaaatacagattactgctgagattttaatcagtcggtgtgt

SEQ ID NO: 10567 - DNA, 76 bp, Homo sapiens
ttttgtataatgtattcattaaaaataaacatatcagatactaatgtcagccttaattgtatctttattttctgca

SEQ ID NO: 10568 - DNA, 80 bp, Homo sapiens
tgtattcattaaaaataaacatatcagatactaatgtcagccttaattgtatctttattttctgcatgaaacaatgcaga

SEQ ID NO: 10569 - DNA, 78 bp, Homo sapiens
aaaaataaacatatcagatactaatgtcagccttaattgtatctttattttctgcatgaaacaatgcagagatttgac

SEQ ID NO: 10570 - DNA, 81 bp, Homo sapiens
catatcagatactaatgtcagccttaattgtatctttattttctgcatgaaacaatgcagagatttgactaaagactaaca

SEQ ID NO: 10571 - DNA, 77 bp, Homo sapiens
agatactaatgtcagccttaattgtatctttattttctgcatgaaacaatgcagagatttgactaaagactaacatt

SEQ ID NO: 10572 - DNA, 75 bp, Homo sapiens
gtcagccttaattgtatctttattttctgcatgaaacaatgcagagatttgactaaagactaacatttaataatt

SEQ ID NO: 10573 - DNA, 74 bp, Homo sapiens
atctttattttctgcatgaaacaatgcagagatttgactaaagactaacatttaataattttcagttacagccc

SEQ ID NO: 10574 - DNA, 77 bp, Homo sapiens
tctgcatgaaacaatgcagagatttgactaaagactaacatttaataattttcagttacagcccttcagtgaaagct

SEQ ID NO: 10575 - DNA, 74 bp, Homo sapiens
aacaatgcagagatttgactaaagactaacatttaataattttcagttacagcccttcagtgaaagctttgaga

SEQ ID NO: 10576 - DNA, 75 bp, Homo sapiens
gcagagatttgactaaagactaacatttaataattttcagttacagcccttcagtgaaagctttgagataaagca

SEQ ID NO: 10577 - DNA, 73 bp, Homo sapiens
aagactaacatttaataattttcagttacagcccttcagtgaaagctttgagataaagcaactagaatctcaa

SEQ ID NO: 10578 - DNA, 76 bp, Homo sapiens
tttaataattttcagttacagcccttcagtgaaagctttgagataaagcaactagaatctcaaaatgatcgagcca

SEQ ID NO: 10579 - DNA, 77 bp, Homo sapiens
taattttcagttacagcccttcagtgaaagctttgagataaagcaactagaatctcaaaatgatcgagccaactctg

SEQ ID NO: 10580 - DNA, 77 bp, Homo sapiens
agcccttcagtgaaagctttgagataaagcaactagaatctcaaaatgatcgagccaactctgtgaattagtattaa

SEQ ID NO: 10581 - DNA, 80 bp, Homo sapiens
gaaagctttgagataaagcaactagaatctcaaaatgatcgagccaactctgtgaattagtattaagcataactatcaca

SEQ ID NO: 10582 - DNA, 80 bp, Homo sapiens
gagataaagcaactagaatctcaaaatgatcgagccaactctgtgaattagtattaagcataactatcacatatgtaaac

SEQ ID NO: 10583 - DNA, 78 bp, Homo sapiens
aactagaatctcaaaatgatcgagccaactctgtgaattagtattaagcataactatcacatatgtaaacgcgagtta

SEQ ID NO: 10584 - DNA, 79 bp, Homo sapiens
aatctcaaaatgatcgagccaactctgtgaattagtattaagcataactatcacatatgtaaacgcgagttatcctctc

SEQ ID NO: 10585 - DNA, 77 bp, Homo sapiens
atcgagccaactctgtgaattagtattaagcataactatcacatatgtaaacgcgagttatcctctccaatataggg

SEQ ID NO: 10586 - DNA, 78 bp, Homo sapiens
tgtgaattagtattaagcataactatcacatatgtaaacgcgagttatcctctccaatataggggaggcatataggaa

SEQ ID NO: 10587 - DNA, 76 bp, Homo sapiens
attagtattaagcataactatcacatatgtaaacgcgagttatcctctccaatataggggaggcatataggaaaca

SEQ ID NO: 10588 - DNA, 76 bp, Homo sapiens
ataactatcacatatgtaaacgcgagttatcctctccaatataggggaggcatataggaaacatgggaaagtagca

SEQ ID NO: 10589 - DNA, 75 bp, Homo sapiens
atatgtaaacgcgagttatcctctccaatataggggaggcatataggaaacatgggaaagtagcagtatgaacaa

SEQ ID NO: 10590 - DNA, 74 bp, Homo sapiens
aaacgcgagttatcctctccaatataggggaggcatataggaaacatgggaaagtagcagtatgaacaagagta

SEQ ID NO: 10591 - DNA, 74 bp, Homo sapiens
tctccaatataggggaggcatataggaaacatgggaaagtagcagtatgaacaagagtaaaacaggtagtagaa

SEQ ID NO: 10592 - DNA, 71 bp, Homo sapiens
aatataggggaggcatataggaaacatgggaaagtagcagtatgaacaagagtaaaacaggtagtagaaaa

SEQ ID NO: 10593 - DNA, 74 bp, Homo sapiens
tataggaaacatgggaaagtagcagtatgaacaagagtaaaacaggtagtagaaaacaacagcatagggatgaa

SEQ ID NO: 10594 - DNA, 71 bp, Homo sapiens
aaacatgggaaagtagcagtatgaacaagagtaaaacaggtagtagaaaacaacagcatagggatgaaaac

SEQ ID NO: 10595 - DNA, 72 bp, Homo sapiens
aaagtagcagtatgaacaagagtaaaacaggtagtagaaaacaacagcatagggatgaaaaccttgcaaaca

SEQ ID NO: 10596 - DNA, 70 bp, Homo sapiens
atgaacaagagtaaaacaggtagtagaaaacaacagcatagggatgaaaaccttgcaaacaaagaattac

SEQ ID NO: 10597 - DNA, 68 bp, Homo sapiens
aacaggtagtagaaaacaacagcatagggatgaaaaccttgcaaacaaagaattactaatttaaagtg

SEQ ID NO: 10598 - DNA, 65 bp, Homo sapiens
agggatgaaaaccttgcaaacaaagaattactaatttaaagtgtaaaaattttgcaaagggaaga

SEQ ID NO: 10599 - DNA, 66 bp, Homo sapiens
ccttgcaaacaaagaattactaatttaaagtgtaaaaattttgcaaagggaagataactcaatttc

SEQ ID NO: 10600 - DNA, 68 bp, Homo sapiens
agaattactaatttaaagtgtaaaaattttgcaaagggaagataactcaatttctacattttcagctc

SEQ ID NO: 10601 - DNA, 68 bp, Homo sapiens
gtgtaaaaattttgcaaagggaagataactcaatttctacattttcagctctttgtattaaacatttt

SEQ ID NO: 10602 - DNA, 73 bp, Homo sapiens
gcaaagggaagataactcaatttctacattttcagctctttgtattaaacattttttcatctgtaactagata

SEQ ID NO: 10603 - DNA, 72 bp, Homo sapiens
gaagataactcaatttctacattttcagctctttgtattaaacattttttcatctgtaactagatattggtt

SEQ ID NO: 10604 - DNA, 72 bp, Homo sapiens
ttctacattttcagctctttgtattaaacattttttcatctgtaactagatattggtttttcttctccatag

SEQ ID NO: 10605 - DNA, 75 bp, Homo sapiens
tcagctctttgtattaaacattttttcatctgtaactagatattggtttttcttctccatagtaagatcacctga

SEQ ID NO: 10606 - DNA, 74 bp, Homo sapiens
gtattaaacattttttcatctgtaactagatattggtttttcttctccatagtaagatcacctgatatttgata

SEQ ID NO: 10607 - DNA, 74 bp, Homo sapiens
tttttcatctgtaactagatattggtttttcttctccatagtaagatcacctgatatttgataatttatgcttt

SEQ ID NO: 10608 - DNA, 75 bp, Homo sapiens
catctgtaactagatattggtttttcttctccatagtaagatcacctgatatttgataatttatgcttttattac

SEQ ID NO: 10609 - DNA, 72 bp, Homo sapiens
agatattggtttttcttctccatagtaagatcacctgatatttgataatttatgcttttattactacttgtt

SEQ ID NO: 10610 - DNA, 76 bp, Homo sapiens
gtaagatcacctgatatttgataatttatgcttttattactacttgttttatgataccaacatttatgttcacatc

SEQ ID NO: 10611 - DNA, 73 bp, Homo sapiens
ttatgcttttattactacttgttttatgataccaacatttatgttcacatcctcaaggctttattttcaagaa

SEQ ID NO: 10612 - DNA, 70 bp, Homo sapiens
tacttgttttatgataccaacatttatgttcacatcctcaaggctttattttcaagaaaaaataaagtcg

SEQ ID NO: 10613 - DNA, 73 bp, Homo sapiens
atgataccaacatttatgttcacatcctcaaggctttattttcaagaaaaaataaagtcgtagtagcacaatg

SEQ ID NO: 10614 - DNA, 75 bp, Homo sapiens
catttatgttcacatcctcaaggctttattttcaagaaaaaataaagtcgtagtagcacaatgtgataagctcca

SEQ ID NO: 10615 - DNA, 75 bp, Homo sapiens
atgttcacatcctcaaggctttattttcaagaaaaaataaagtcgtagtagcacaatgtgataagctccatcttc

SEQ ID NO: 10616 - DNA, 72 bp, Homo sapiens
ctcaaggctttattttcaagaaaaaataaagtcgtagtagcacaatgtgataagctccatcttccaaccaat

SEQ ID NO: 10617 - DNA, 73 bp, Homo sapiens
ttcaagaaaaaataaagtcgtagtagcacaatgtgataagctccatcttccaaccaatttttaattgtctcat

SEQ ID NO: 10618 - DNA, 73 bp, Homo sapiens
aaaaataaagtcgtagtagcacaatgtgataagctccatcttccaaccaatttttaattgtctcattggtatg

SEQ ID NO: 10619 - DNA, 76 bp, Homo sapiens
cgtagtagcacaatgtgataagctccatcttccaaccaatttttaattgtctcattggtatgtatattaggactaa

SEQ ID NO: 10620 - DNA, 77 bp, Homo sapiens
cacaatgtgataagctccatcttccaaccaatttttaattgtctcattggtatgtatattaggactaaatggctgta

SEQ ID NO: 10621 - DNA, 76 bp, Homo sapiens
aagctccatcttccaaccaatttttaattgtctcattggtatgtatattaggactaaatggctgtattccatgcaa

SEQ ID NO: 10622 - DNA, 73 bp, Homo sapiens
cttccaaccaatttttaattgtctcattggtatgtatattaggactaaatggctgtattccatgcaaaaagta

SEQ ID NO: 10623 - DNA, 77 bp, Homo sapiens
ttaattgtctcattggtatgtatattaggactaaatggctgtattccatgcaaaaagtaaaatgagcagtaagtcaa

SEQ ID NO: 10624 - DNA, 78 bp, Homo sapiens
cattggtatgtatattaggactaaatggctgtattccatgcaaaaagtaaaatgagcagtaagtcaagtgagtattca

SEQ ID NO: 10625 - DNA, 78 bp, Homo sapiens
atgtatattaggactaaatggctgtattccatgcaaaaagtaaaatgagcagtaagtcaagtgagtattcaggctata

SEQ ID NO: 10626 - DNA, 76 bp, Homo sapiens
tggctgtattccatgcaaaaagtaaaatgagcagtaagtcaagtgagtattcaggctatataaaaacttctaccta

SEQ ID NO: 10627 - DNA, 70 bp, Homo sapiens
caaaaagtaaaatgagcagtaagtcaagtgagtattcaggctatataaaaacttctacctacctgggcct

SEQ ID NO: 10628 - DNA, 72 bp, Homo sapiens
agtaaaatgagcagtaagtcaagtgagtattcaggctatataaaaacttctacctacctgggccttgattat

SEQ ID NO: 10629 - DNA, 72 bp, Homo sapiens
caggctatataaaaacttctacctacctgggccttgattattcctggtaagatgattaatgatagaaaagta

SEQ ID NO: 10630 - DNA, 73 bp, Homo sapiens
acttctacctacctgggccttgattattcctggtaagatgattaatgatagaaaagtagattatgaaataaga

SEQ ID NO: 10631 - DNA, 73 bp, Homo sapiens
ggccttgattattcctggtaagatgattaatgatagaaaagtagattatgaaataagaaaactaaaaggcatg

SEQ ID NO: 10632 - DNA, 72 bp, Homo sapiens
cctggtaagatgattaatgatagaaaagtagattatgaaataagaaaactaaaaggcatgttaaatgctctt

SEQ ID NO: 10633 - DNA, 71 bp, Homo sapiens
gatgattaatgatagaaaagtagattatgaaataagaaaactaaaaggcatgttaaatgctctttaaaggt

SEQ ID NO: 10634 - DNA, 66 bp, Homo sapiens
gaaaagtagattatgaaataagaaaactaaaaggcatgttaaatgctctttaaaggtttttaactc

SEQ ID NO: 10635 - DNA, 68 bp, Homo sapiens
ttatgaaataagaaaactaaaaggcatgttaaatgctctttaaaggtttttaactcctgtctggtgga

SEQ ID NO: 10636 - DNA, 69 bp, Homo sapiens
agaaaactaaaaggcatgttaaatgctctttaaaggtttttaactcctgtctggtggagcaaatggaca

SEQ ID NO: 10637 - DNA, 71 bp, Homo sapiens
actaaaaggcatgttaaatgctctttaaaggtttttaactcctgtctggtggagcaaatggacaccatctg

SEQ ID NO: 10638 - DNA, 72 bp, Homo sapiens
atgttaaatgctctttaaaggtttttaactcctgtctggtggagcaaatggacaccatctgtataagaaagc

SEQ ID NO: 10639 - DNA, 74 bp, Homo sapiens
tttttaactcctgtctggtggagcaaatggacaccatctgtataagaaagccagataccaagaaactgagagtt

SEQ ID NO: 10640 - DNA, 76 bp, Homo sapiens
tgtctggtggagcaaatggacaccatctgtataagaaagccagataccaagaaactgagagttttacttagtgaaa

SEQ ID NO: 10641 - DNA, 71 bp, Homo sapiens
aaatggacaccatctgtataagaaagccagataccaagaaactgagagttttacttagtgaaaccttccac

SEQ ID NO: 10642 - DNA, 73 bp, Homo sapiens
gccagataccaagaaactgagagttttacttagtgaaaccttccactacttatgaaaagtcaaatatcatgta

SEQ ID NO: 10643 - DNA, 75 bp, Homo sapiens
aaaccttccactacttatgaaaagtcaaatatcatgtataactcatccagatcaactagtccctagacactgatt

SEQ ID NO: 10644 - DNA, 76 bp, Homo sapiens
aaagtcaaatatcatgtataactcatccagatcaactagtccctagacactgatttttgggaaggatgtaagagaa

SEQ ID NO: 10645 - DNA, 77 bp, Homo sapiens
aaatatcatgtataactcatccagatcaactagtccctagacactgatttttgggaaggatgtaagagaattactga

SEQ ID NO: 10646 - DNA, 71 bp, Homo sapiens
atcaactagtccctagacactgatttttgggaaggatgtaagagaattactgactcagatttagggtttaa

SEQ ID NO: 10647 - DNA, 72 bp, Homo sapiens
tccctagacactgatttttgggaaggatgtaagagaattactgactcagatttagggtttaaagactattga

SEQ ID NO: 10648 - DNA, 71 bp, Homo sapiens
cactgatttttgggaaggatgtaagagaattactgactcagatttagggtttaaagactattgagaaatag

SEQ ID NO: 10649 - DNA, 71 bp, Homo sapiens
gggaaggatgtaagagaattactgactcagatttagggtttaaagactattgagaaataggaaggtattga

SEQ ID NO: 10650 - DNA, 71 bp, Homo sapiens
agagaattactgactcagatttagggtttaaagactattgagaaataggaaggtattgagagattattggg

SEQ ID NO: 10651 - DNA, 73 bp, Homo sapiens
actgactcagatttagggtttaaagactattgagaaataggaaggtattgagagattattgggtttcatcaga

SEQ ID NO: 10652 - DNA, 72 bp, Homo sapiens
ttagggtttaaagactattgagaaataggaaggtattgagagattattgggtttcatcagagcagacttaag

SEQ ID NO: 10653 - DNA, 74 bp, Homo sapiens
ttaaagactattgagaaataggaaggtattgagagattattgggtttcatcagagcagacttaagtagcctggt

SEQ ID NO: 10654 - DNA, 73 bp, Homo sapiens
agaaataggaaggtattgagagattattgggtttcatcagagcagacttaagtagcctggttgattttagatt

SEQ ID NO: 10655 - DNA, 80 bp, Homo sapiens
ttgagagattattgggtttcatcagagcagacttaagtagcctggttgattttagatttgtcacagcaaaatcatgcttg

SEQ ID NO: 10656 - DNA, 79 bp, Homo sapiens
acttaagtagcctggttgattttagatttgtcacagcaaaatcatgcttggatgctcgaggcctggcagaaccttgctg

SEQ ID NO: 10657 - DNA, 81 bp, Homo sapiens
ttgattttagatttgtcacagcaaaatcatgcttggatgctcgaggcctggcagaaccttgctggtctctgtagggtggga

SEQ ID NO: 10658 - DNA, 80 bp, Homo sapiens
tttagatttgtcacagcaaaatcatgcttggatgctcgaggcctggcagaaccttgctggtctctgtagggtgggataag

SEQ ID NO: 10659 - DNA, 80 bp, Homo sapiens
agcaaaatcatgcttggatgctcgaggcctggcagaaccttgctggtctctgtagggtgggataagtgaagcaacattaa

SEQ ID NO: 10660 - DNA, 76 bp, Homo sapiens
tcgaggcctggcagaaccttgctggtctctgtagggtgggataagtgaagcaacattaaaccaggtgcagtcctta

SEQ ID NO: 10661 - DNA, 76 bp, Homo sapiens
tggcagaaccttgctggtctctgtagggtgggataagtgaagcaacattaaaccaggtgcagtccttaatttctca

SEQ ID NO: 10662 - DNA, 75 bp, Homo sapiens
ttgctggtctctgtagggtgggataagtgaagcaacattaaaccaggtgcagtccttaatttctcaggtaacata

SEQ ID NO: 10663 - DNA, 72 bp, Homo sapiens
tctgtagggtgggataagtgaagcaacattaaaccaggtgcagtccttaatttctcaggtaacataacttta

SEQ ID NO: 10664 - DNA, 70 bp, Homo sapiens
gtgggataagtgaagcaacattaaaccaggtgcagtccttaatttctcaggtaacataactttagaaaaa

SEQ ID NO: 10665 - DNA, 69 bp, Homo sapiens
gaagcaacattaaaccaggtgcagtccttaatttctcaggtaacataactttagaaaaaacaattctaa

SEQ ID NO: 10666 - DNA, 68 bp, Homo sapiens
ccaggtgcagtccttaatttctcaggtaacataactttagaaaaaacaattctaatacaagttaactc

SEQ ID NO: 10667 - DNA, 69 bp, Homo sapiens
gcagtccttaatttctcaggtaacataactttagaaaaaacaattctaatacaagttaactcctgtctg

SEQ ID NO: 10668 - DNA, 71 bp, Homo sapiens
ctcaggtaacataactttagaaaaaacaattctaatacaagttaactcctgtctggttgagcaaatggaca

SEQ ID NO: 10669 - DNA, 71 bp, Homo sapiens
aacataactttagaaaaaacaattctaatacaagttaactcctgtctggttgagcaaatggacaccatctg

SEQ ID NO: 10670 - DNA, 73 bp, Homo sapiens
aaaaaacaattctaatacaagttaactcctgtctggttgagcaaatggacaccatctgtatacaaacgtcaga

SEQ ID NO: 10671 - DNA, 75 bp, Homo sapiens
aattctaatacaagttaactcctgtctggttgagcaaatggacaccatctgtatacaaacgtcagataccaagaa

SEQ ID NO: 10672 - DNA, 77 bp, Homo sapiens
tacaagttaactcctgtctggttgagcaaatggacaccatctgtatacaaacgtcagataccaagaaactcagatct

SEQ ID NO: 10673 - DNA, 77 bp, Homo sapiens
ctgtctggttgagcaaatggacaccatctgtatacaaacgtcagataccaagaaactcagatctttacttagtgaaa

SEQ ID NO: 10674 - DNA, 76 bp, Homo sapiens
ttgagcaaatggacaccatctgtatacaaacgtcagataccaagaaactcagatctttacttagtgaaaccttcca

SEQ ID NO: 10675 - DNA, 73 bp, Homo sapiens
accatctgtatacaaacgtcagataccaagaaactcagatctttacttagtgaaaccttccactacttatgaa

SEQ ID NO: 10676 - DNA, 71 bp, Homo sapiens
ctgtatacaaacgtcagataccaagaaactcagatctttacttagtgaaaccttccactacttatgaaaag

SEQ ID NO: 10677 - DNA, 71 bp, Homo sapiens
acgtcagataccaagaaactcagatctttacttagtgaaaccttccactacttatgaaaagtcaaatacca

SEQ ID NO: 10678 - DNA, 72 bp, Homo sapiens
gaaactcagatctttacttagtgaaaccttccactacttatgaaaagtcaaataccatttataactcatcta

SEQ ID NO: 10679 - DNA, 72 bp, Homo sapiens
tctttacttagtgaaaccttccactacttatgaaaagtcaaataccatttataactcatctagatcaaccag

SEQ ID NO: 10680 - DNA, 74 bp, Homo sapiens
tagtgaaaccttccactacttatgaaaagtcaaataccatttataactcatctagatcaaccagtccctagaca

SEQ ID NO: 10681 - DNA, 71 bp, Homo sapiens
gaaaagtcaaataccatttataactcatctagatcaaccagtccctagacactgatttttgggaaggattt

SEQ ID NO: 10682 - DNA, 71 bp, Homo sapiens
aataccatttataactcatctagatcaaccagtccctagacactgatttttgggaaggatttttagagaat

SEQ ID NO: 10683 - DNA, 72 bp, Homo sapiens
atctagatcaaccagtccctagacactgatttttgggaaggatttttagagaattactgactcagatttagg

SEQ ID NO: 10684 - DNA, 70 bp, Homo sapiens
gtccctagacactgatttttgggaaggatttttagagaattactgactcagatttagggcttaaagacta

SEQ ID NO: 10685 - DNA, 71 bp, Homo sapiens
agacactgatttttgggaaggatttttagagaattactgactcagatttagggcttaaagactattgagaa

SEQ ID NO: 10686 - DNA, 72 bp, Homo sapiens
tttttagagaattactgactcagatttagggcttaaagactattgagaaataggaaggtattgagagactgg

SEQ ID NO: 10687 - DNA, 74 bp, Homo sapiens
agaattactgactcagatttagggcttaaagactattgagaaataggaaggtattgagagactgggtttcatca

SEQ ID NO: 10688 - DNA, 72 bp, Homo sapiens
agatttagggcttaaagactattgagaaataggaaggtattgagagactgggtttcatcagagcggacttaa

SEQ ID NO: 10689 - DNA, 71 bp, Homo sapiens
ttaaagactattgagaaataggaaggtattgagagactgggtttcatcagagcggacttaagtaacctggt

SEQ ID NO: 10690 - DNA, 73 bp, Homo sapiens
aaataggaaggtattgagagactgggtttcatcagagcggacttaagtaacctggttgatcttagaattgtca

SEQ ID NO: 10691 - DNA, 82 bp, Homo sapiens
tattgagagactgggtttcatcagagcggacttaagtaacctggttgatcttagaattgtcacagcaaaatcatcatgctca

SEQ ID NO: 10692 - DNA, 81 bp, Homo sapiens
actgggtttcatcagagcggacttaagtaacctggttgatcttagaattgtcacagcaaaatcatcatgctcagatgcttg

SEQ ID NO: 10693 - DNA, 83 bp, Homo sapiens
atcagagcggacttaagtaacctggttgatcttagaattgtcacagcaaaatcatcatgctcagatgcttggggcctggcaga

SEQ ID NO: 10694 - DNA, 85 bp, Homo sapiens
ttagaattgtcacagcaaaatcatcatgctcagatgcttggggcctggcagaaccttgctggtctctgaaggatgggataaatga

SEQ ID NO: 10695 - DNA, 83 bp, Homo sapiens
agcaaaatcatcatgctcagatgcttggggcctggcagaaccttgctggtctctgaaggatgggataaatgaagcaacagtaa

SEQ ID NO: 10696 - DNA, 83 bp, Homo sapiens
atcatcatgctcagatgcttggggcctggcagaaccttgctggtctctgaaggatgggataaatgaagcaacagtaaatcagg

SEQ ID NO: 10697 - DNA, 78 bp, Homo sapiens
atgcttggggcctggcagaaccttgctggtctctgaaggatgggataaatgaagcaacagtaaatcaggtgcactcct

SEQ ID NO: 10698 - DNA, 78 bp, Homo sapiens
cctggcagaaccttgctggtctctgaaggatgggataaatgaagcaacagtaaatcaggtgcactccttgatttttca

SEQ ID NO: 10699 - DNA, 77 bp, Homo sapiens
cttgctggtctctgaaggatgggataaatgaagcaacagtaaatcaggtgcactccttgatttttcaggtaacataa

SEQ ID NO: 10700 - DNA, 75 bp, Homo sapiens
tctgaaggatgggataaatgaagcaacagtaaatcaggtgcactccttgatttttcaggtaacataactttagaa

SEQ ID NO: 10701 - DNA, 72 bp, Homo sapiens
aggatgggataaatgaagcaacagtaaatcaggtgcactccttgatttttcaggtaacataactttagaaaa

SEQ ID NO: 10702 - DNA, 69 bp, Homo sapiens
aaatgaagcaacagtaaatcaggtgcactccttgatttttcaggtaacataactttagaaaaaaacaat

SEQ ID NO: 10703 - DNA, 69 bp, Homo sapiens
cagtaaatcaggtgcactccttgatttttcaggtaacataactttagaaaaaaacaattctaatacaag

SEQ ID NO: 10704 - DNA, 67 bp, Homo sapiens
aggtgcactccttgatttttcaggtaacataactttagaaaaaaacaattctaatacaagtgtaacc

SEQ ID NO: 10705 - DNA, 66 bp, Homo sapiens
cttgatttttcaggtaacataactttagaaaaaaacaattctaatacaagtgtaaccttatcctgt

SEQ ID NO: 10706 - DNA, 66 bp, Homo sapiens
aacataactttagaaaaaaacaattctaatacaagtgtaaccttatcctgttaactctgtttcaaa

SEQ ID NO: 10707 - DNA, 68 bp, Homo sapiens
ctaagacaatgcttatcctattgcctccaaaataggattttgtattttaaatggtttaccaaaaaatg

SEQ ID NO: 10708 - DNA, 69 bp, Homo sapiens
tgcttatcctattgcctccaaaataggattttgtattttaaatggtttaccaaaaaatgtatcttatac

SEQ ID NO: 10709 - DNA, 66 bp, Homo sapiens
tgcctccaaaataggattttgtattttaaatggtttaccaaaaaatgtatcttatacttttgggta

SEQ ID NO: 10710 - DNA, 62 bp, Homo sapiens
ggattttgtattttaaatggtttaccaaaaaatgtatcttatacttttgggtaaacttttat

SEQ ID NO: 10711 - DNA, 62 bp, Homo sapiens
ttgtattttaaatggtttaccaaaaaatgtatcttatacttttgggtaaacttttattttgt

SEQ ID NO: 10712 - DNA, 63 bp, Homo sapiens
aatggtttaccaaaaaatgtatcttatacttttgggtaaacttttattttgttatacaaccaa

SEQ ID NO: 10713 - DNA, 64 bp, Homo sapiens
taccaaaaaatgtatcttatacttttgggtaaacttttattttgttatacaaccaaaaatctta

SEQ ID NO: 10714 - DNA, 64 bp, Homo sapiens
aatgtatcttatacttttgggtaaacttttattttgttatacaaccaaaaatcttaaaactatc

SEQ ID NO: 10715 - DNA, 64 bp, Homo sapiens
tatacttttgggtaaacttttattttgttatacaaccaaaaatcttaaaactatcttagtacat

SEQ ID NO: 10716 - DNA, 63 bp, Homo sapiens
tttgggtaaacttttattttgttatacaaccaaaaatcttaaaactatcttagtacattaacg

SEQ ID NO: 10717 - DNA, 63 bp, Homo sapiens
tgggtaaacttttattttgttatacaaccaaaaatcttaaaactatcttagtacattaacgtt

SEQ ID NO: 10718 - DNA, 63 bp, Homo sapiens
cttttattttgttatacaaccaaaaatcttaaaactatcttagtacattaacgttttaacagg

SEQ ID NO: 10719 - DNA, 64 bp, Homo sapiens
attttgttatacaaccaaaaatcttaaaactatcttagtacattaacgttttaacaggtcaact

SEQ ID NO: 10720 - DNA, 65 bp, Homo sapiens
tgttatacaaccaaaaatcttaaaactatcttagtacattaacgttttaacaggtcaacttttag

SEQ ID NO: 10721 - DNA, 64 bp, Homo sapiens
tacaaccaaaaatcttaaaactatcttagtacattaacgttttaacaggtcaacttttagtctt

SEQ ID NO: 10722 - DNA, 67 bp, Homo sapiens
aaaactatcttagtacattaacgttttaacaggtcaacttttagtctttatgagcagttttcacgaa

SEQ ID NO: 10723 - DNA, 68 bp, Homo sapiens
tagtacattaacgttttaacaggtcaacttttagtctttatgagcagttttcacgaagttttactcga

SEQ ID NO: 10724 - DNA, 67 bp, Homo sapiens
cattaacgttttaacaggtcaacttttagtctttatgagcagttttcacgaagttttactcgacatt

SEQ ID NO: 10725 - DNA, 72 bp, Homo sapiens
agttttcacgaagttttactcgacatttaaaaaatgtagttaacatactgtagatgcttcaatattgctgct

SEQ ID NO: 10726 - DNA, 74 bp, Homo sapiens
gttttactcgacatttaaaaaatgtagttaacatactgtagatgcttcaatattgctgcttattctttgtaatc

SEQ ID NO: 10727 - DNA, 76 bp, Homo sapiens
cgacatttaaaaaatgtagttaacatactgtagatgcttcaatattgctgcttattctttgtaatcttatttggca

SEQ ID NO: 10728 - DNA, 82 bp, Homo sapiens
tgtagttaacatactgtagatgcttcaatattgctgcttattctttgtaatcttatttggcataatataatcatgttcagag

SEQ ID NO: 10729 - DNA, 80 bp, Homo sapiens
aacatactgtagatgcttcaatattgctgcttattctttgtaatcttatttggcataatataatcatgttcagagttatt

SEQ ID NO: 10730 - DNA, 79 bp, Homo sapiens
tagatgcttcaatattgctgcttattctttgtaatcttatttggcataatataatcatgttcagagttattttaaagta

SEQ ID NO: 10731 - DNA, 75 bp, Homo sapiens
tgctgcttattctttgtaatcttatttggcataatataatcatgttcagagttattttaaagtaacttaaagtga

SEQ ID NO: 10732 - DNA, 74 bp, Homo sapiens
tctttgtaatcttatttggcataatataatcatgttcagagttattttaaagtaacttaaagtgaacagacgca

SEQ ID NO: 10733 - DNA, 73 bp, Homo sapiens
tcttatttggcataatataatcatgttcagagttattttaaagtaacttaaagtgaacagacgcactccctcc

SEQ ID NO: 10734 - DNA, 72 bp, Homo sapiens
ttggcataatataatcatgttcagagttattttaaagtaacttaaagtgaacagacgcactccctcctcccc

SEQ ID NO: 10735 - DNA, 68 bp, Homo sapiens
ataatcatgttcagagttattttaaagtaacttaaagtgaacagacgcactccctcctccccccaccc

SEQ ID NO: 10736 - DNA, 64 bp, Homo sapiens
gttattttaaagtaacttaaagtgaacagacgcactccctcctccccccaccctcaattaaaaa

SEQ ID NO: 10737 - DNA, 64 bp, Homo sapiens
agaaagaaaaagaacaaaaaataagattaggttctaggaggagggaaaccctaatccaagtgtg

SEQ ID NO: 10738 - DNA, 67 bp, Homo sapiens
aaaataagattaggttctaggaggagggaaaccctaatccaagtgtggggatacagaagtcagcttt

SEQ ID NO: 10739 - DNA, 69 bp, Homo sapiens
attaggttctaggaggagggaaaccctaatccaagtgtggggatacagaagtcagctttttgcacccat

SEQ ID NO: 10740 - DNA, 74 bp, Homo sapiens
gagggaaaccctaatccaagtgtggggatacagaagtcagctttttgcacccattctccatgctacagaataaa

SEQ ID NO: 10741 - DNA, 72 bp, Homo sapiens
aaaccctaatccaagtgtggggatacagaagtcagctttttgcacccattctccatgctacagaataaaatt

SEQ ID NO: 10742 - DNA, 77 bp, Homo sapiens
tgtggggatacagaagtcagctttttgcacccattctccatgctacagaataaaatttgagactacagccaaatatt

SEQ ID NO: 10743 - DNA, 76 bp, Homo sapiens
atacagaagtcagctttttgcacccattctccatgctacagaataaaatttgagactacagccaaatattttctaa

SEQ ID NO: 10744 - DNA, 73 bp, Homo sapiens
gtcagctttttgcacccattctccatgctacagaataaaatttgagactacagccaaatattttctaaaacct

SEQ ID NO: 10745 - DNA, 72 bp, Homo sapiens
acccattctccatgctacagaataaaatttgagactacagccaaatattttctaaaacctttcaagacgctc

SEQ ID NO: 10746 - DNA, 72 bp, Homo sapiens
atgctacagaataaaatttgagactacagccaaatattttctaaaacctttcaagacgctccagtggatttc

SEQ ID NO: 10747 - DNA, 71 bp, Homo sapiens
cagaataaaatttgagactacagccaaatattttctaaaacctttcaagacgctccagtggatttctggat

SEQ ID NO: 10748 - DNA, 69 bp, Homo sapiens
agactacagccaaatattttctaaaacctttcaagacgctccagtggatttctggatttgttcctttaa

SEQ ID NO: 10749 - DNA, 69 bp, Homo sapiens
cagccaaatattttctaaaacctttcaagacgctccagtggatttctggatttgttcctttaaaatcag

SEQ ID NO: 10750 - DNA, 70 bp, Homo sapiens
ttctaaaacctttcaagacgctccagtggatttctggatttgttcctttaaaatcaggatactctgcctt

SEQ ID NO: 10751 - DNA, 72 bp, Homo sapiens
cctttcaagacgctccagtggatttctggatttgttcctttaaaatcaggatactctgcctttgctcagggg

SEQ ID NO: 10752 - DNA, 82 bp, Homo sapiens
tccagtggatttctggatttgttcctttaaaatcaggatactctgcctttgctcagggggcagcatggcaatctgatctgca

SEQ ID NO: 10753 - DNA, 80 bp, Homo sapiens
atttctggatttgttcctttaaaatcaggatactctgcctttgctcagggggcagcatggcaatctgatctgcagtcagt

SEQ ID NO: 10754 - DNA, 86 bp, Homo sapiens
tcctttaaaatcaggatactctgcctttgctcagggggcagcatggcaatctgatctgcagtcagttgaagaacctgcatgatcaa

SEQ ID NO: 10755 - DNA, 89 bp, Homo sapiens
atactctgcctttgctcagggggcagcatggcaatctgatctgcagtcagttgaagaacctgcatgatcaaagctgccttctcctgatc

SEQ ID NO: 10756 - DNA, 90 bp, Homo sapiens
tttgctcagggggcagcatggcaatctgatctgcagtcagttgaagaacctgcatgatcaaagctgccttctcctgatcctgtggagtga

SEQ ID NO: 10757 - DNA, 90 bp, Homo sapiens
agcatggcaatctgatctgcagtcagttgaagaacctgcatgatcaaagctgccttctcctgatcctgtggagtgacctggctctgccca

SEQ ID NO: 10758 - DNA, 87 bp, Homo sapiens
atctgatctgcagtcagttgaagaacctgcatgatcaaagctgccttctcctgatcctgtggagtgacctggctctgcccaggacta

SEQ ID NO: 10759 - DNA, 82 bp, Homo sapiens
ttgaagaacctgcatgatcaaagctgccttctcctgatcctgtggagtgacctggctctgcccaggactaaaactgctaggc

SEQ ID NO: 10760 - DNA, 78 bp, Homo sapiens
aagctgccttctcctgatcctgtggagtgacctggctctgcccaggactaaaactgctaggctggcttccaccttgct

SEQ ID NO: 10761 - DNA, 78 bp, Homo sapiens
ctcctgatcctgtggagtgacctggctctgcccaggactaaaactgctaggctggcttccaccttgcttgcttgcccc

SEQ ID NO: 10762 - DNA, 75 bp, Homo sapiens
agtgacctggctctgcccaggactaaaactgctaggctggcttccaccttgcttgcttgccccctgtatacctcc

SEQ ID NO: 10763 - DNA, 72 bp, Homo sapiens
aggactaaaactgctaggctggcttccaccttgcttgcttgccccctgtatacctcctccttgtatacctcc

SEQ ID NO: 10764 - DNA, 74 bp, Homo sapiens
aactgctaggctggcttccaccttgcttgcttgccccctgtatacctcctccttgtatacctcctccttgtata

SEQ ID NO: 10765 - DNA, 73 bp, Homo sapiens
cttccaccttgcttgcttgccccctgtatacctcctccttgtatacctcctccttgtatactgactccttgta

SEQ ID NO: 10766 - DNA, 75 bp, Homo sapiens
accttgcttgcttgccccctgtatacctcctccttgtatacctcctccttgtatactgactccttgtatgcctgc

SEQ ID NO: 10767 - DNA, 75 bp, Homo sapiens
tatacctcctccttgtatacctcctccttgtatactgactccttgtatgcctgccccctgcatccctcctccttg

SEQ ID NO: 10768 - DNA, 78 bp, Homo sapiens
tccttgtatacctcctccttgtatactgactccttgtatgcctgccccctgcatccctcctccttgtatgcctgctcc

SEQ ID NO: 10769 - DNA, 81 bp, Homo sapiens
tccttgtatactgactccttgtatgcctgccccctgcatccctcctccttgtatgcctgctccctgcatgcctgttccttg

SEQ ID NO: 10770 - DNA, 83 bp, Homo sapiens
cttgtatgcctgccccctgcatccctcctccttgtatgcctgctccctgcatgcctgttccttgtatgcctgtaccctgcata

SEQ ID NO: 10771 - DNA, 82 bp, Homo sapiens
cccctgcatccctcctccttgtatgcctgctccctgcatgcctgttccttgtatgcctgtaccctgcataccagctccagga

SEQ ID NO: 10772 - DNA, 80 bp, Homo sapiens
atccctcctccttgtatgcctgctccctgcatgcctgttccttgtatgcctgtaccctgcataccagctccaggattccc

SEQ ID NO: 10773 - DNA, 80 bp, Homo sapiens
ttgtatgcctgctccctgcatgcctgttccttgtatgcctgtaccctgcataccagctccaggattccccacccctgaaa

SEQ ID NO: 10774 - DNA, 76 bp, Homo sapiens
atgcctgttccttgtatgcctgtaccctgcataccagctccaggattccccacccctgaaatgcctgggacctgtc

SEQ ID NO: 10775 - DNA, 76 bp, Homo sapiens
ttgtatgcctgtaccctgcataccagctccaggattccccacccctgaaatgcctgggacctgtctgggtccctga

SEQ ID NO: 10776 - DNA, 73 bp, Homo sapiens
cctgtaccctgcataccagctccaggattccccacccctgaaatgcctgggacctgtctgggtccctgaggag

SEQ ID NO: 10777 - DNA, 72 bp, Homo sapiens
ataccagctccaggattccccacccctgaaatgcctgggacctgtctgggtccctgaggagggccacctgcc

SEQ ID NO: 10778 - DNA, 71 bp, Homo sapiens
gattccccacccctgaaatgcctgggacctgtctgggtccctgaggagggccacctgcccctatattaatg

SEQ ID NO: 10779 - DNA, 71 bp, Homo sapiens
ccctgaaatgcctgggacctgtctgggtccctgaggagggccacctgcccctatattaatgggaccaggac

SEQ ID NO: 10780 - DNA, 71 bp, Homo sapiens
atgcctgggacctgtctgggtccctgaggagggccacctgcccctatattaatgggaccaggaccctgaat

SEQ ID NO: 10781 - DNA, 73 bp, Homo sapiens
tgtctgggtccctgaggagggccacctgcccctatattaatgggaccaggaccctgaattccaccagtcatag

SEQ ID NO: 10782 - DNA, 73 bp, Homo sapiens
ctgaggagggccacctgcccctatattaatgggaccaggaccctgaattccaccagtcatagggcctcttgaa

SEQ ID NO: 10783 - DNA, 71 bp, Homo sapiens
agggccacctgcccctatattaatgggaccaggaccctgaattccaccagtcatagggcctcttgaactgg

SEQ ID NO: 10784 - DNA, 70 bp, Homo sapiens
ccctatattaatgggaccaggaccctgaattccaccagtcatagggcctcttgaactggggacagggccc

SEQ ID NO: 10785 - DNA, 77 bp, Homo sapiens
accctgaattccaccagtcatagggcctcttgaactggggacagggcccctcatctccaatcctcttgcatccatgc

SEQ ID NO: 10786 - DNA, 76 bp, Homo sapiens
atagggcctcttgaactggggacagggcccctcatctccaatcctcttgcatccatgccccttgcttccatccctc

SEQ ID NO: 10787 - DNA, 77 bp, Homo sapiens
tcttgaactggggacagggcccctcatctccaatcctcttgcatccatgccccttgcttccatccctctggtttcca

SEQ ID NO: 10788 - DNA, 80 bp, Homo sapiens
ccctcatctccaatcctcttgcatccatgccccttgcttccatccctctggtttccatcgcacaggtctccattcctctc

SEQ ID NO: 10789 - DNA, 79 bp, Homo sapiens
aatcctcttgcatccatgccccttgcttccatccctctggtttccatcgcacaggtctccattcctctcctctccatta

SEQ ID NO: 10790 - DNA, 78 bp, Homo sapiens
tgcttccatccctctggtttccatcgcacaggtctccattcctctcctctccattacacgtgtctctaagacctcagt

SEQ ID NO: 10791 - DNA, 76 bp, Homo sapiens
atccctctggtttccatcgcacaggtctccattcctctcctctccattacacgtgtctctaagacctcagtttcca

SEQ ID NO: 10792 - DNA, 79 bp, Homo sapiens
tttccatcgcacaggtctccattcctctcctctccattacacgtgtctctaagacctcagtttccatggcacgagtctc

SEQ ID NO: 10793 - DNA, 79 bp, Homo sapiens
ggtctccattcctctcctctccattacacgtgtctctaagacctcagtttccatggcacgagtctccatcgctcgagaa

SEQ ID NO: 10794 - DNA, 79 bp, Homo sapiens
cctctcctctccattacacgtgtctctaagacctcagtttccatggcacgagtctccatcgctcgagaatctctaccac

SEQ ID NO: 10795 - DNA, 79 bp, Homo sapiens
cctctccattacacgtgtctctaagacctcagtttccatggcacgagtctccatcgctcgagaatctctaccacctcta

SEQ ID NO: 10796 - DNA, 80 bp, Homo sapiens
tgtctctaagacctcagtttccatggcacgagtctccatcgctcgagaatctctaccacctctaccatccataggtagac

SEQ ID NO: 10797 - DNA, 77 bp, Homo sapiens
ctaagacctcagtttccatggcacgagtctccatcgctcgagaatctctaccacctctaccatccataggtagaccc

SEQ ID NO: 10798 - DNA, 77 bp, Homo sapiens
agtttccatggcacgagtctccatcgctcgagaatctctaccacctctaccatccataggtagacccctttgatcta

SEQ ID NO: 10799 - DNA, 77 bp, Homo sapiens
acgagtctccatcgctcgagaatctctaccacctctaccatccataggtagacccctttgatctatcatggggcctc

SEQ ID NO: 10800 - DNA, 77 bp, Homo sapiens
gctcgagaatctctaccacctctaccatccataggtagacccctttgatctatcatggggcctctgggctctccaat

SEQ ID NO: 10801 - DNA, 77 bp, Homo sapiens
atccataggtagacccctttgatctatcatggggcctctgggctctccaattagcagtctgggatctcctaatggcc

SEQ ID NO: 10802 - DNA, 79 bp, Homo sapiens
ccctttgatctatcatggggcctctgggctctccaattagcagtctgggatctcctaatggccctcccctcatctcatg

SEQ ID NO: 10803 - DNA, 80 bp, Homo sapiens
atctatcatggggcctctgggctctccaattagcagtctgggatctcctaatggccctcccctcatctcatgtgaggaag

SEQ ID NO: 10804 - DNA, 78 bp, Homo sapiens
cctctgggctctccaattagcagtctgggatctcctaatggccctcccctcatctcatgtgaggaagggccacgagtg

SEQ ID NO: 10805 - DNA, 85 bp, Homo sapiens
attagcagtctgggatctcctaatggccctcccctcatctcatgtgaggaagggccacgagtgtcatgaccagaggcatgatgca

SEQ ID NO: 10806 - DNA, 81 bp, Homo sapiens
atctcctaatggccctcccctcatctcatgtgaggaagggccacgagtgtcatgaccagaggcatgatgcatggggggacc

SEQ ID NO: 10807 - DNA, 82 bp, Homo sapiens
taatggccctcccctcatctcatgtgaggaagggccacgagtgtcatgaccagaggcatgatgcatggggggaccctgatgg

SEQ ID NO: 10808 - DNA, 83 bp, Homo sapiens
tcatctcatgtgaggaagggccacgagtgtcatgaccagaggcatgatgcatggggggaccctgatggggtggacccagataa

SEQ ID NO: 10809 - DNA, 78 bp, Homo sapiens
atgtgaggaagggccacgagtgtcatgaccagaggcatgatgcatggggggaccctgatggggtggacccagataacc

SEQ ID NO: 10810 - DNA, 78 bp, Homo sapiens
agggccacgagtgtcatgaccagaggcatgatgcatggggggaccctgatggggtggacccagataacctctgggctc

SEQ ID NO: 10811 - DNA, 81 bp, Homo sapiens
tgtcatgaccagaggcatgatgcatggggggaccctgatggggtggacccagataacctctgggctccacttctccagtga

SEQ ID NO: 10812 - DNA, 77 bp, Homo sapiens
agaggcatgatgcatggggggaccctgatggggtggacccagataacctctgggctccacttctccagtgactgaaa

SEQ ID NO: 10813 - DNA, 74 bp, Homo sapiens
atgcatggggggaccctgatggggtggacccagataacctctgggctccacttctccagtgactgaaagcaaag

SEQ ID NO: 10814 - DNA, 72 bp, Homo sapiens
accctgatggggtggacccagataacctctgggctccacttctccagtgactgaaagcaaagtccctccacg

SEQ ID NO: 10815 - DNA, 74 bp, Homo sapiens
gtggacccagataacctctgggctccacttctccagtgactgaaagcaaagtccctccacgtgggtcatttgga

SEQ ID NO: 10816 - DNA, 76 bp, Homo sapiens
ctccacttctccagtgactgaaagcaaagtccctccacgtgggtcatttggagcatctcctaacagtcctcgagga

SEQ ID NO: 10817 - DNA, 73 bp, Homo sapiens
aaagtccctccacgtgggtcatttggagcatctcctaacagtcctcgaggaggcagaccaccaggagtcacgg

SEQ ID NO: 10818 - DNA, 76 bp, Homo sapiens
tgggtcatttggagcatctcctaacagtcctcgaggaggcagaccaccaggagtcacgggtccgcgaggtatagga

SEQ ID NO: 10819 - DNA, 76 bp, Homo sapiens
atttggagcatctcctaacagtcctcgaggaggcagaccaccaggagtcacgggtccgcgaggtataggagctcta

SEQ ID NO: 10820 - DNA, 76 bp, Homo sapiens
agaccaccaggagtcacgggtccgcgaggtataggagctctaggatctgacatctgcacttgtccccgctctaaag

SEQ ID NO: 10821 - DNA, 77 bp, Homo sapiens
agtcacgggtccgcgaggtataggagctctaggatctgacatctgcacttgtccccgctctaaaggcactgggccaa

SEQ ID NO: 10822 - DNA, 78 bp, Homo sapiens
tataggagctctaggatctgacatctgcacttgtccccgctctaaaggcactgggccaacccctggcattccaagttg

SEQ ID NO: 10823 - DNA, 77 bp, Homo sapiens
acatctgcacttgtccccgctctaaaggcactgggccaacccctggcattccaagttggggctgcattgctcctcca

SEQ ID NO: 10824 - DNA, 74 bp, Homo sapiens
ttgtccccgctctaaaggcactgggccaacccctggcattccaagttggggctgcattgctcctccaggagtta

SEQ ID NO: 10825 - DNA, 73 bp, Homo sapiens
tctaaaggcactgggccaacccctggcattccaagttggggctgcattgctcctccaggagttaaggaaccag

SEQ ID NO: 10826 - DNA, 73 bp, Homo sapiens
actgggccaacccctggcattccaagttggggctgcattgctcctccaggagttaaggaaccaggaccagctc

SEQ ID NO: 10827 - DNA, 76 bp, Homo sapiens
cctggcattccaagttggggctgcattgctcctccaggagttaaggaaccaggaccagctccgggaactgcagctg

SEQ ID NO: 10828 - DNA, 74 bp, Homo sapiens
attccaagttggggctgcattgctcctccaggagttaaggaaccaggaccagctccgggaactgcagctggtat

SEQ ID NO: 10829 - DNA, 77 bp, Homo sapiens
tgcattgctcctccaggagttaaggaaccaggaccagctccgggaactgcagctggtattggccctggagctggaat

SEQ ID NO: 10830 - DNA, 73 bp, Homo sapiens
agttaaggaaccaggaccagctccgggaactgcagctggtattggccctggagctggaattccaccctggata

SEQ ID NO: 10831 - DNA, 78 bp, Homo sapiens
aaccaggaccagctccgggaactgcagctggtattggccctggagctggaattccaccctggataggagtctgcatca

SEQ ID NO: 10832 - DNA, 78 bp, Homo sapiens
cgggaactgcagctggtattggccctggagctggaattccaccctggataggagtctgcatcagaggaggaatgtcct

SEQ ID NO: 10833 - DNA, 78 bp, Homo sapiens
agctggtattggccctggagctggaattccaccctggataggagtctgcatcagaggaggaatgtccttcacaggtct

SEQ ID NO: 10834 - DNA, 80 bp, Homo sapiens
tattggccctggagctggaattccaccctggataggagtctgcatcagaggaggaatgtccttcacaggtcttctagcca

SEQ ID NO: 10835 - DNA, 82 bp, Homo sapiens
agctggaattccaccctggataggagtctgcatcagaggaggaatgtccttcacaggtcttctagccaaatgctgaggctga

SEQ ID NO: 10836 - DNA, 82 bp, Homo sapiens
attccaccctggataggagtctgcatcagaggaggaatgtccttcacaggtcttctagccaaatgctgaggctgaggagctg

SEQ ID NO: 10837 - DNA, 84 bp, Homo sapiens
ataggagtctgcatcagaggaggaatgtccttcacaggtcttctagccaaatgctgaggctgaggagctggaggattctgctgg

SEQ ID NO: 10838 - DNA, 84 bp, Homo sapiens
atcagaggaggaatgtccttcacaggtcttctagccaaatgctgaggctgaggagctggaggattctgctggttcagcagaaca

SEQ ID NO: 10839 - DNA, 81 bp, Homo sapiens
aatgtccttcacaggtcttctagccaaatgctgaggctgaggagctggaggattctgctggttcagcagaacattaggtcc

SEQ ID NO: 10840 - DNA, 83 bp, Homo sapiens
cttcacaggtcttctagccaaatgctgaggctgaggagctggaggattctgctggttcagcagaacattaggtcctgggcaga

SEQ ID NO: 10841 - DNA, 83 bp, Homo sapiens
tcttctagccaaatgctgaggctgaggagctggaggattctgctggttcagcagaacattaggtcctgggcagagcccagggc

SEQ ID NO: 10842 - DNA, 81 bp, Homo sapiens
aaatgctgaggctgaggagctggaggattctgctggttcagcagaacattaggtcctgggcagagcccagggccagggcca

SEQ ID NO: 10843 - DNA, 78 bp, Homo sapiens
ctgaggagctggaggattctgctggttcagcagaacattaggtcctgggcagagcccagggccagggccagggccagg

SEQ ID NO: 10844 - DNA, 84 bp, Homo sapiens
ggccagggccagggccagggccagagacagacacagactgagatttgcctgggatcagtggtgtgacatgtatcttccgatgca

SEQ ID NO: 10845 - DNA, 83 bp, Homo sapiens
agggccagggccagagacagacacagactgagatttgcctgggatcagtggtgtgacatgtatcttccgatgcagaattttca

SEQ ID NO: 10846 - DNA, 87 bp, Homo sapiens
ccagagacagacacagactgagatttgcctgggatcagtggtgtgacatgtatcttccgatgcagaattttcagagcaatctctgga

SEQ ID NO: 10847 - DNA, 87 bp, Homo sapiens
acacagactgagatttgcctgggatcagtggtgtgacatgtatcttccgatgcagaattttcagagcaatctctggatccatgattc

SEQ ID NO: 10848 - DNA, 87 bp, Homo sapiens
agatttgcctgggatcagtggtgtgacatgtatcttccgatgcagaattttcagagcaatctctggatccatgattctcatcactac

SEQ ID NO: 10849 - DNA, 90 bp, Homo sapiens
tgggatcagtggtgtgacatgtatcttccgatgcagaattttcagagcaatctctggatccatgattctcatcactacttgtgcctgcaa

SEQ ID NO: 10850 - DNA, 88 bp, Homo sapiens
tgcagaattttcagagcaatctctggatccatgattctcatcactacttgtgcctgcaacagtgcataagccagttgtggattttgaa

SEQ ID NO: 10851 - DNA, 85 bp, Homo sapiens
attttcagagcaatctctggatccatgattctcatcactacttgtgcctgcaacagtgcataagccagttgtggattttgaagta

SEQ ID NO: 10852 - DNA, 83 bp, Homo sapiens
aatctctggatccatgattctcatcactacttgtgcctgcaacagtgcataagccagttgtggattttgaagtaacatgtttc

SEQ ID NO: 10853 - DNA, 82 bp, Homo sapiens
atccatgattctcatcactacttgtgcctgcaacagtgcataagccagttgtggattttgaagtaacatgtttcgagcttcc

SEQ ID NO: 10854 - DNA, 77 bp, Homo sapiens
acttgtgcctgcaacagtgcataagccagttgtggattttgaagtaacatgtttcgagcttcctggtggctgttttg

SEQ ID NO: 10855 - DNA, 76 bp, Homo sapiens
aacagtgcataagccagttgtggattttgaagtaacatgtttcgagcttcctggtggctgttttggacacagagct

SEQ ID NO: 10856 - DNA, 77 bp, Homo sapiens
ataagccagttgtggattttgaagtaacatgtttcgagcttcctggtggctgttttggacacagagcttcatctgct

SEQ ID NO: 10857 - DNA, 81 bp, Homo sapiens
ttgtggattttgaagtaacatgtttcgagcttcctggtggctgttttggacacagagcttcatctgcttcatcagctcaaa

SEQ ID NO: 10858 - DNA, 82 bp, Homo sapiens
tgtggattttgaagtaacatgtttcgagcttcctggtggctgttttggacacagagcttcatctgcttcatcagctcaaaca

SEQ ID NO: 10859 - DNA, 82 bp, Homo sapiens
attttgaagtaacatgtttcgagcttcctggtggctgttttggacacagagcttcatctgcttcatcagctcaaacatctgc

SEQ ID NO: 10860 - DNA, 81 bp, Homo sapiens
aagtaacatgtttcgagcttcctggtggctgttttggacacagagcttcatctgcttcatcagctcaaacatctgctccgg

SEQ ID NO: 10861 - DNA, 80 bp, Homo sapiens
aacatgtttcgagcttcctggtggctgttttggacacagagcttcatctgcttcatcagctcaaacatctgctccggggg

SEQ ID NO: 10862 - DNA, 83 bp, Homo sapiens
ttcctggtggctgttttggacacagagcttcatctgcttcatcagctcaaacatctgctccggggggagactggctactgctc

SEQ ID NO: 10863 - DNA, 83 bp, Homo sapiens
tgttttggacacagagcttcatctgcttcatcagctcaaacatctgctccggggggagactggctactgctctggtaatcgat

SEQ ID NO: 10864 - DNA, 84 bp, Homo sapiens
tggacacagagcttcatctgcttcatcagctcaaacatctgctccggggggagactggctactgctctggtaatcgattcaggg

SEQ ID NO: 10865 - DNA, 83 bp, Homo sapiens
atctgcttcatcagctcaaacatctgctccggggggagactggctactgctctggtaatcgattcaggggcatcttctggatc

SEQ ID NO: 10866 - DNA, 81 bp, Homo sapiens
atcagctcaaacatctgctccggggggagactggctactgctctggtaatcgattcaggggcatcttctggatcgatggga

SEQ ID NO: 10867 - DNA, 78 bp, Homo sapiens
ggggggagactggctactgctctggtaatcgattcaggggcatcttctggatcgatgggatccccatagggtgagtca

SEQ ID NO: 10868 - DNA, 79 bp, Homo sapiens
agactggctactgctctggtaatcgattcaggggcatcttctggatcgatgggatccccatagggtgagtcaataatgg

SEQ ID NO: 10869 - DNA, 81 bp, Homo sapiens
actgctctggtaatcgattcaggggcatcttctggatcgatgggatccccatagggtgagtcaataatgggcgctgcaggc

SEQ ID NO: 10870 - DNA, 77 bp, Homo sapiens
catcttctggatcgatgggatccccatagggtgagtcaataatgggcgctgcaggcccaaggctctttaactcctcc

SEQ ID NO: 10871 - DNA, 74 bp, Homo sapiens
atcgatgggatccccatagggtgagtcaataatgggcgctgcaggcccaaggctctttaactcctccttattct

SEQ ID NO: 10872 - DNA, 74 bp, Homo sapiens
tgggatccccatagggtgagtcaataatgggcgctgcaggcccaaggctctttaactcctccttattcttttca

SEQ ID NO: 10873 - DNA, 76 bp, Homo sapiens
atagggtgagtcaataatgggcgctgcaggcccaaggctctttaactcctccttattcttttcactggcagcattg

SEQ ID NO: 10874 - DNA, 74 bp, Homo sapiens
aataatgggcgctgcaggcccaaggctctttaactcctccttattcttttcactggcagcattgtccacccgaa

SEQ ID NO: 10875 - DNA, 77 bp, Homo sapiens
tgcaggcccaaggctctttaactcctccttattcttttcactggcagcattgtccacccgaagcgctctcccactga

SEQ ID NO: 10876 - DNA, 73 bp, Homo sapiens
aaggctctttaactcctccttattcttttcactggcagcattgtccacccgaagcgctctcccactgaactcc

SEQ ID NO: 10877 - DNA, 73 bp, Homo sapiens
tttaactcctccttattcttttcactggcagcattgtccacccgaagcgctctcccactgaactcccgcccat

SEQ ID NO: 10878 - DNA, 79 bp, Homo sapiens
tggcagcattgtccacccgaagcgctctcccactgaactcccgcccattgaggttccgcatggcactaagcgcggtctc

SEQ ID NO: 10879 - DNA, 75 bp, Homo sapiens
attgtccacccgaagcgctctcccactgaactcccgcccattgaggttccgcatggcactaagcgcggtctcctg

SEQ ID NO: 10880 - DNA, 77 bp, Homo sapiens
ccactgaactcccgcccattgaggttccgcatggcactaagcgcggtctcctggtcttggtattcgcagaagccata

SEQ ID NO: 10881 - DNA, 75 bp, Homo sapiens
aactcccgcccattgaggttccgcatggcactaagcgcggtctcctggtcttggtattcgcagaagccatagccc

SEQ ID NO: 10882 - DNA, 74 bp, Homo sapiens
attgaggttccgcatggcactaagcgcggtctcctggtcttggtattcgcagaagccatagcccttgggttttc

SEQ ID NO: 10883 - DNA, 74 bp, Homo sapiens
atggcactaagcgcggtctcctggtcttggtattcgcagaagccatagcccttgggttttcccgtctctctatc

SEQ ID NO: 10884 - DNA, 73 bp, Homo sapiens
tggtcttggtattcgcagaagccatagcccttgggttttcccgtctctctatcgtataccagccggaaactga

SEQ ID NO: 10885 - DNA, 70 bp, Homo sapiens
agaagccatagcccttgggttttcccgtctctctatcgtataccagccggaaactgacaacagaaccaac

SEQ ID NO: 10886 - DNA, 69 bp, Homo sapiens
ttgggttttcccgtctctctatcgtataccagccggaaactgacaacagaaccaacctccgagaaaatg

SEQ ID NO: 10887 - DNA, 69 bp, Homo sapiens
ttttcccgtctctctatcgtataccagccggaaactgacaacagaaccaacctccgagaaaatgtcctt

SEQ ID NO: 10888 - DNA, 73 bp, Homo sapiens
ataccagccggaaactgacaacagaaccaacctccgagaaaatgtcctttaactgctcctcagttgcctcata

SEQ ID NO: 10889 - DNA, 73 bp, Homo sapiens
aaactgacaacagaaccaacctccgagaaaatgtcctttaactgctcctcagttgcctcatatggaatgttcc

SEQ ID NO: 10890 - DNA, 73 bp, Homo sapiens
acagaaccaacctccgagaaaatgtcctttaactgctcctcagttgcctcatatggaatgttccccacgaaca

SEQ ID NO: 10891 - DNA, 77 bp, Homo sapiens
gagaaaatgtcctttaactgctcctcagttgcctcatatggaatgttccccacgaacacggaacgcagtgatcgatc

SEQ ID NO: 10892 - DNA, 78 bp, Homo sapiens
aatgtcctttaactgctcctcagttgcctcatatggaatgttccccacgaacacggaacgcagtgatcgatccattgc

SEQ ID NO: 10893 - DNA, 79 bp, Homo sapiens
aactgctcctcagttgcctcatatggaatgttccccacgaacacggaacgcagtgatcgatccattgccgggtctctca

SEQ ID NO: 10894 - DNA, 76 bp, Homo sapiens
agttgcctcatatggaatgttccccacgaacacggaacgcagtgatcgatccattgccgggtctctcaccgccaaa

SEQ ID NO: 10895 - DNA, 76 bp, Homo sapiens
atggaatgttccccacgaacacggaacgcagtgatcgatccattgccgggtctctcaccgccaaactcgacatgat

SEQ ID NO: 10896 - DNA, 79 bp, Homo sapiens
cacgaacacggaacgcagtgatcgatccattgccgggtctctcaccgccaaactcgacatgattccggttgtgcagaca

SEQ ID NO: 10897 - DNA, 79 bp, Homo sapiens
acggaacgcagtgatcgatccattgccgggtctctcaccgccaaactcgacatgattccggttgtgcagacagccgata

SEQ ID NO: 10898 - DNA, 79 bp, Homo sapiens
agtgatcgatccattgccgggtctctcaccgccaaactcgacatgattccggttgtgcagacagccgatagcggattct

SEQ ID NO: 10899 - DNA, 78 bp, Homo sapiens
ggtctctcaccgccaaactcgacatgattccggttgtgcagacagccgatagcggattcttcgaggcgtctgtcctct

SEQ ID NO: 10900 - DNA, 77 bp, Homo sapiens
aaactcgacatgattccggttgtgcagacagccgatagcggattcttcgaggcgtctgtcctcttgcgaccgacact

SEQ ID NO: 10901 - DNA, 80 bp, Homo sapiens
atgattccggttgtgcagacagccgatagcggattcttcgaggcgtctgtcctcttgcgaccgacacttccgctgagcaa

SEQ ID NO: 10902 - DNA, 78 bp, Homo sapiens
cggttgtgcagacagccgatagcggattcttcgaggcgtctgtcctcttgcgaccgacacttccgctgagcaacggaa

SEQ ID NO: 10903 - DNA, 71 bp, Homo sapiens
agtgtcatgcttgtcaacagagggagtactctggaaaaagtcaatttttgataaagtccttttaatggaaa

SEQ ID NO: 10904 - DNA, 70 bp, Homo sapiens
atgcttgtcaacagagggagtactctggaaaaagtcaatttttgataaagtccttttaatggaaaatgta

SEQ ID NO: 10905 - DNA, 65 bp, Homo sapiens
cagagggagtactctggaaaaagtcaatttttgataaagtccttttaatggaaaatgtaaaaccc

SEQ ID NO: 10906 - DNA, 64 bp, Homo sapiens
tactctggaaaaagtcaatttttgataaagtccttttaatggaaaatgtaaaacccctttcaac

SEQ ID NO: 10907 - DNA, 64 bp, Homo sapiens
caatttttgataaagtccttttaatggaaaatgtaaaacccctttcaactttaatgtacaaagc

SEQ ID NO: 10908 - DNA, 66 bp, Homo sapiens
taaagtccttttaatggaaaatgtaaaacccctttcaactttaatgtacaaagccatatgtaacac

SEQ ID NO: 10909 - DNA, 69 bp, Homo sapiens
ttaatggaaaatgtaaaacccctttcaactttaatgtacaaagccatatgtaacacttgcactttaaca

SEQ ID NO: 10910 - DNA, 70 bp, Homo sapiens
atgtaaaacccctttcaactttaatgtacaaagccatatgtaacacttgcactttaacaaaagcaagcca

SEQ ID NO: 10911 - DNA, 70 bp, Homo sapiens
ccctttcaactttaatgtacaaagccatatgtaacacttgcactttaacaaaagcaagccaatgttttaa

SEQ ID NO: 10912 - DNA, 69 bp, Homo sapiens
caactttaatgtacaaagccatatgtaacacttgcactttaacaaaagcaagccaatgttttaaaaaaa

SEQ ID NO: 10913 - DNA, 71 bp, Homo sapiens
gtacaaagccatatgtaacacttgcactttaacaaaagcaagccaatgttttaaaaaaatacatcattaaa

SEQ ID NO: 10914 - DNA, 73 bp, Homo sapiens
atatgtaacacttgcactttaacaaaagcaagccaatgttttaaaaaaatacatcattaaatgtatatatgta

SEQ ID NO: 10915 - DNA, 70 bp, Homo sapiens
gtatatatttacatagcatattaagtttaatatttagctttaaaagttcacataaattttaccaaaatga

SEQ ID NO: 10916 - DNA, 69 bp, Homo sapiens
tttacatagcatattaagtttaatatttagctttaaaagttcacataaattttaccaaaatgagacaat

SEQ ID NO: 10917 - DNA, 67 bp, Homo sapiens
gcatattaagtttaatatttagctttaaaagttcacataaattttaccaaaatgagacaattttaaa

SEQ ID NO: 10918 - DNA, 65 bp, Homo sapiens
ttaagtttaatatttagctttaaaagttcacataaattttaccaaaatgagacaattttaaataa

SEQ ID NO: 10919 - DNA, 65 bp, Homo sapiens
tatttagctttaaaagttcacataaattttaccaaaatgagacaattttaaataaattacacctt

SEQ ID NO: 10920 - DNA, 66 bp, Homo sapiens
tagctttaaaagttcacataaattttaccaaaatgagacaattttaaataaattacaccttttgaa

SEQ ID NO: 10921 - DNA, 65 bp, Homo sapiens
agctttaaaagttcacataaattttaccaaaatgagacaattttaaataaattacaccttttgaa

SEQ ID NO: 10922 - DNA, 65 bp, Homo sapiens
taaaagttcacataaattttaccaaaatgagacaattttaaataaattacaccttttgaaaatgt

SEQ ID NO: 10923 - DNA, 70 bp, Homo sapiens
caaaatgagacaattttaaataaattacaccttttgaaaatgtttaattgtacagtcaatagcttcaaca

SEQ ID NO: 10924 - DNA, 70 bp, Homo sapiens
tgagacaattttaaataaattacaccttttgaaaatgtttaattgtacagtcaatagcttcaacaaaata

SEQ ID NO: 10925 - DNA, 68 bp, Homo sapiens
ttttaaataaattacaccttttgaaaatgtttaattgtacagtcaatagcttcaacaaaatattgaag

SEQ ID NO: 10926 - DNA, 71 bp, Homo sapiens
attacaccttttgaaaatgtttaattgtacagtcaatagcttcaacaaaatattgaagtgtctgtatttag

SEQ ID NO: 10927 - DNA, 72 bp, Homo sapiens
ccttttgaaaatgtttaattgtacagtcaatagcttcaacaaaatattgaagtgtctgtatttagtatctac

SEQ ID NO: 10928 - DNA, 73 bp, Homo sapiens
aatgtttaattgtacagtcaatagcttcaacaaaatattgaagtgtctgtatttagtatctactttatatact

SEQ ID NO: 10929 - DNA, 75 bp, Homo sapiens
tgtacagtcaatagcttcaacaaaatattgaagtgtctgtatttagtatctactttatatactttatactttaca

SEQ ID NO: 10930 - DNA, 71 bp, Homo sapiens
tattgaagtgtctgtatttagtatctactttatatactttatactttacaaattttacaattatttggcag

SEQ ID NO: 10931 - DNA, 69 bp, Homo sapiens
aagtgtctgtatttagtatctactttatatactttatactttacaaattttacaattatttggcagtaa

SEQ ID NO: 10932 - DNA, 78 bp, Homo sapiens
tatatactttatactttacaaattttacaattatttggcagtaattttctgattatgacatgactgctgtgcgattca

SEQ ID NO: 10933 - DNA, 82 bp, Homo sapiens
aattttacaattatttggcagtaattttctgattatgacatgactgctgtgcgattcagcaatttcccagatgcaggcaata

SEQ ID NO: 10934 - DNA, 83 bp, Homo sapiens
aattatttggcagtaattttctgattatgacatgactgctgtgcgattcagcaatttcccagatgcaggcaatagctggtgtt

SEQ ID NO: 10935 - DNA, 84 bp, Homo sapiens
agtaattttctgattatgacatgactgctgtgcgattcagcaatttcccagatgcaggcaatagctggtgtttgtgtcctattc

SEQ ID NO: 10936 - DNA, 87 bp, Homo sapiens
tttctgattatgacatgactgctgtgcgattcagcaatttcccagatgcaggcaatagctggtgtttgtgtcctattctcacagtaa

SEQ ID NO: 10937 - DNA, 86 bp, Homo sapiens
atgactgctgtgcgattcagcaatttcccagatgcaggcaatagctggtgtttgtgtcctattctcacagtaactgtctcaatgta

SEQ ID NO: 10938 - DNA, 83 bp, Homo sapiens
tgcgattcagcaatttcccagatgcaggcaatagctggtgtttgtgtcctattctcacagtaactgtctcaatgtagtgaaaa

SEQ ID NO: 10939 - DNA, 79 bp, Homo sapiens
aatttcccagatgcaggcaatagctggtgtttgtgtcctattctcacagtaactgtctcaatgtagtgaaaaatatcag

SEQ ID NO: 10940 - DNA, 79 bp, Homo sapiens
agatgcaggcaatagctggtgtttgtgtcctattctcacagtaactgtctcaatgtagtgaaaaatatcagtaatttta

SEQ ID NO: 10941 - DNA, 76 bp, Homo sapiens
ggcaatagctggtgtttgtgtcctattctcacagtaactgtctcaatgtagtgaaaaatatcagtaattttagtaa

SEQ ID NO: 10942 - DNA, 75 bp, Homo sapiens
ttgtgtcctattctcacagtaactgtctcaatgtagtgaaaaatatcagtaattttagtaaactgtacaaggtca

SEQ ID NO: 10943 - DNA, 73 bp, Homo sapiens
cctattctcacagtaactgtctcaatgtagtgaaaaatatcagtaattttagtaaactgtacaaggtcacatt

SEQ ID NO: 10944 - DNA, 75 bp, Homo sapiens
cagtaactgtctcaatgtagtgaaaaatatcagtaattttagtaaactgtacaaggtcacatttacacttgatca

SEQ ID NO: 10945 - DNA, 71 bp, Homo sapiens
cagtaattttagtaaactgtacaaggtcacatttacacttgatcaacaatatagcatagaattttttattt

SEQ ID NO: 10946 - DNA, 72 bp, Homo sapiens
tttattttttaccaaaaataaatacatcattttaaatctggcattttcacaaacatcatatacactataata

SEQ ID NO: 10947 - DNA, 75 bp, Homo sapiens
accaaaaataaatacatcattttaaatctggcattttcacaaacatcatatacactataatacaaaacagctata

SEQ ID NO: 10948 - DNA, 79 bp, Homo sapiens
aatacatcattttaaatctggcattttcacaaacatcatatacactataatacaaaacagctatatagtgctgctttta

SEQ ID NO: 10949 - DNA, 77 bp, Homo sapiens
atcattttaaatctggcattttcacaaacatcatatacactataatacaaaacagctatatagtgctgcttttaaaa

SEQ ID NO: 10950 - DNA, 77 bp, Homo sapiens
ctggcattttcacaaacatcatatacactataatacaaaacagctatatagtgctgcttttaaaattctgcttgttt

SEQ ID NO: 10951 - DNA, 79 bp, Homo sapiens
tcacaaacatcatatacactataatacaaaacagctatatagtgctgcttttaaaattctgcttgttttataacattga

SEQ ID NO: 10952 - DNA, 78 bp, Homo sapiens
tacactataatacaaaacagctatatagtgctgcttttaaaattctgcttgttttataacattgaatcacaggagctg

SEQ ID NO: 10953 - DNA, 81 bp, Homo sapiens
atacaaaacagctatatagtgctgcttttaaaattctgcttgttttataacattgaatcacaggagctgtgacatatgcta

SEQ ID NO: 10954 - DNA, 83 bp, Homo sapiens
aacagctatatagtgctgcttttaaaattctgcttgttttataacattgaatcacaggagctgtgacatatgctatactgctg

SEQ ID NO: 10955 - DNA, 81 bp, Homo sapiens
aaattctgcttgttttataacattgaatcacaggagctgtgacatatgctatactgctgtggtgtcagtaacaagtaatta

SEQ ID NO: 10956 - DNA, 81 bp, Homo sapiens
ttgttttataacattgaatcacaggagctgtgacatatgctatactgctgtggtgtcagtaacaagtaattactacaaaga

SEQ ID NO: 10957 - DNA, 81 bp, Homo sapiens
ataacattgaatcacaggagctgtgacatatgctatactgctgtggtgtcagtaacaagtaattactacaaagagaatttc

SEQ ID NO: 10958 - DNA, 76 bp, Homo sapiens
tatactgctgtggtgtcagtaacaagtaattactacaaagagaatttcttggcactgatggttttatgaagcttaa

SEQ ID NO: 10959 - DNA, 74 bp, Homo sapiens
tgtggtgtcagtaacaagtaattactacaaagagaatttcttggcactgatggttttatgaagcttaaagtcag

SEQ ID NO: 10960 - DNA, 79 bp, Homo sapiens
acaagtaattactacaaagagaatttcttggcactgatggttttatgaagcttaaagtcagtgtgcatacatatcatca

SEQ ID NO: 10961 - DNA, 79 bp, Homo sapiens
ctacaaagagaatttcttggcactgatggttttatgaagcttaaagtcagtgtgcatacatatcatcattcaaggttaa

SEQ ID NO: 10962 - DNA, 78 bp, Homo sapiens
aagagaatttcttggcactgatggttttatgaagcttaaagtcagtgtgcatacatatcatcattcaaggttaagtaa

SEQ ID NO: 10963 - DNA, 78 bp, Homo sapiens
cactgatggttttatgaagcttaaagtcagtgtgcatacatatcatcattcaaggttaagtaatcccagttcaacaac

SEQ ID NO: 10964 - DNA, 76 bp, Homo sapiens
tggttttatgaagcttaaagtcagtgtgcatacatatcatcattcaaggttaagtaatcccagttcaacaacctaa

SEQ ID NO: 10965 - DNA, 72 bp, Homo sapiens
catatcatcattcaaggttaagtaatcccagttcaacaacctaaaaatatcaaactggatcacacttaattt

SEQ ID NO: 10966 - DNA, 69 bp, Homo sapiens
cattcaaggttaagtaatcccagttcaacaacctaaaaatatcaaactggatcacacttaattttcttc

SEQ ID NO: 10967 - DNA, 73 bp, Homo sapiens
taatcccagttcaacaacctaaaaatatcaaactggatcacacttaattttcttccatatcctctacttcatc

SEQ ID NO: 10968 - DNA, 72 bp, Homo sapiens
agttcaacaacctaaaaatatcaaactggatcacacttaattttcttccatatcctctacttcatcctcgtg

SEQ ID NO: 10969 - DNA, 73 bp, Homo sapiens
acctaaaaatatcaaactggatcacacttaattttcttccatatcctctacttcatcctcgtgtatcttcaag

SEQ ID NO: 10970 - DNA, 75 bp, Homo sapiens
aaactggatcacacttaattttcttccatatcctctacttcatcctcgtgtatcttcaaggctctcaccatttct

SEQ ID NO: 10971 - DNA, 79 bp, Homo sapiens
acacttaattttcttccatatcctctacttcatcctcgtgtatcttcaaggctctcaccatttctttgactgcatgata

SEQ ID NO: 10972 - DNA, 79 bp, Homo sapiens
ttttcttccatatcctctacttcatcctcgtgtatcttcaaggctctcaccatttctttgactgcatgatacaaaatat

SEQ ID NO: 10973 - DNA, 77 bp, Homo sapiens
atatcctctacttcatcctcgtgtatcttcaaggctctcaccatttctttgactgcatgatacaaaatatttttaac

SEQ ID NO: 10974 - DNA, 76 bp, Homo sapiens
acttcatcctcgtgtatcttcaaggctctcaccatttctttgactgcatgatacaaaatatttttaacctgaaaga

SEQ ID NO: 10975 - DNA, 77 bp, Homo sapiens
cgtgtatcttcaaggctctcaccatttctttgactgcatgatacaaaatatttttaacctgaaagagatgttgatat

SEQ ID NO: 10976 - DNA, 77 bp, Homo sapiens
caaggctctcaccatttctttgactgcatgatacaaaatatttttaacctgaaagagatgttgatatttctaatcac

SEQ ID NO: 10977 - DNA, 72 bp, Homo sapiens
gaatataaaaagcctgaagaacaggacctagaacacccaactcttacctgtagtttatcatcataattgatt

SEQ ID NO: 10978 - DNA, 71 bp, Homo sapiens
aaaaagcctgaagaacaggacctagaacacccaactcttacctgtagtttatcatcataattgatttcttc

SEQ ID NO: 10979 - DNA, 70 bp, Homo sapiens
aagaacaggacctagaacacccaactcttacctgtagtttatcatcataattgatttcttccttcaaaag

SEQ ID NO: 10980 - DNA, 73 bp, Homo sapiens
tagaacacccaactcttacctgtagtttatcatcataattgatttcttccttcaaaagtctcagttcctgtgt

SEQ ID NO: 10981 - DNA, 73 bp, Homo sapiens
ccaactcttacctgtagtttatcatcataattgatttcttccttcaaaagtctcagttcctgtgttaaatgaa

SEQ ID NO: 10982 - DNA, 75 bp, Homo sapiens
cctgtagtttatcatcataattgatttcttccttcaaaagtctcagttcctgtgttaaatgaaatgactctacaa

SEQ ID NO: 10983 - DNA, 78 bp, Homo sapiens
atcatcataattgatttcttccttcaaaagtctcagttcctgtgttaaatgaaatgactctacaagatgttctggaga

SEQ ID NO: 10984 - DNA, 74 bp, Homo sapiens
tttcttccttcaaaagtctcagttcctgtgttaaatgaaatgactctacaagatgttctggagacacaaaatct

SEQ ID NO: 10985 - DNA, 75 bp, Homo sapiens
aaaagtctcagttcctgtgttaaatgaaatgactctacaagatgttctggagacacaaaatcttcagttacctga

SEQ ID NO: 10986 - DNA, 78 bp, Homo sapiens
agttcctgtgttaaatgaaatgactctacaagatgttctggagacacaaaatcttcagttacctgaatacagctgtga

SEQ ID NO: 10987 - DNA, 78 bp, Homo sapiens
ttaaatgaaatgactctacaagatgttctggagacacaaaatcttcagttacctgaatacagctgtgaaaattctgaa

SEQ ID NO: 10988 - DNA, 77 bp, Homo sapiens
aaatgactctacaagatgttctggagacacaaaatcttcagttacctgaatacagctgtgaaaattctgaacctatc

SEQ ID NO: 10989 - DNA, 75 bp, Homo sapiens
tacaagatgttctggagacacaaaatcttcagttacctgaatacagctgtgaaaattctgaacctatccccaaaa

SEQ ID NO: 10990 - DNA, 69 bp, Homo sapiens
agacacaaaatcttcagttacctgaatacagctgtgaaaattctgaacctatccccaaaagaaaaaccg

SEQ ID NO: 10991 - DNA, 70 bp, Homo sapiens
atcttcagttacctgaatacagctgtgaaaattctgaacctatccccaaaagaaaaaccgtgaaatacaa

SEQ ID NO: 10992 - DNA, 74 bp, Homo sapiens
ctagttctttcagtcagtaaaaaatatgttagaaataagtttgtatatacctgatgaagtgctcccgctggcaa

SEQ ID NO: 10993 - DNA, 76 bp, Homo sapiens
agtcagtaaaaaatatgttagaaataagtttgtatatacctgatgaagtgctcccgctggcaaaacaatagcatca

SEQ ID NO: 10994 - DNA, 76 bp, Homo sapiens
aaataagtttgtatatacctgatgaagtgctcccgctggcaaaacaatagcatcaccaaggaactgaataagagta

SEQ ID NO: 10995 - DNA, 79 bp, Homo sapiens
tttgtatatacctgatgaagtgctcccgctggcaaaacaatagcatcaccaaggaactgaataagagtacaggttctga

SEQ ID NO: 10996 - DNA, 79 bp, Homo sapiens
atgaagtgctcccgctggcaaaacaatagcatcaccaaggaactgaataagagtacaggttctgactccatattcttca

SEQ ID NO: 10997 - DNA, 77 bp, Homo sapiens
ccgctggcaaaacaatagcatcaccaaggaactgaataagagtacaggttctgactccatattcttcaagcagcctt

SEQ ID NO: 10998 - DNA, 76 bp, Homo sapiens
aaaacaatagcatcaccaaggaactgaataagagtacaggttctgactccatattcttcaagcagcctttgacgga

SEQ ID NO: 10999 - DNA, 74 bp, Homo sapiens
atcaccaaggaactgaataagagtacaggttctgactccatattcttcaagcagcctttgacggagctttttgt

SEQ ID NO: 11000 - DNA, 75 bp, Homo sapiens
aaggaactgaataagagtacaggttctgactccatattcttcaagcagcctttgacggagctttttgttcacata

SEQ ID NO: 11001 - DNA, 74 bp, Homo sapiens
ataagagtacaggttctgactccatattcttcaagcagcctttgacggagctttttgttcacataccaactttg

SEQ ID NO: 11002 - DNA, 77 bp, Homo sapiens
ttctgactccatattcttcaagcagcctttgacggagctttttgttcacataccaactttggtcacgtattggatca

SEQ ID NO: 11003 - DNA, 73 bp, Homo sapiens
aagcagcctttgacggagctttttgttcacataccaactttggtcacgtattggatcatgttctggtagaact

SEQ ID NO: 11004 - DNA, 73 bp, Homo sapiens
tttgacggagctttttgttcacataccaactttggtcacgtattggatcatgttctggtagaacttcaaggcc

SEQ ID NO: 11005 - DNA, 71 bp, Homo sapiens
tttttgttcacataccaactttggtcacgtattggatcatgttctggtagaacttcaaggccttgttcttt

SEQ ID NO: 11006 - DNA, 73 bp, Homo sapiens
acataccaactttggtcacgtattggatcatgttctggtagaacttcaaggccttgttcttttgaaatctgaa

SEQ ID NO: 11007 - DNA, 74 bp, Homo sapiens
tttggtcacgtattggatcatgttctggtagaacttcaaggccttgttcttttgaaatctgaaatatgaattaa

SEQ ID NO: 11008 - DNA, 75 bp, Homo sapiens
ttggatcatgttctggtagaacttcaaggccttgttcttttgaaatctgaaatatgaattaaaatagacactcca

SEQ ID NO: 11009 - DNA, 71 bp, Homo sapiens
gttctggtagaacttcaaggccttgttcttttgaaatctgaaatatgaattaaaatagacactccaattta

SEQ ID NO: 11010 - DNA, 70 bp, Homo sapiens
gaacttcaaggccttgttcttttgaaatctgaaatatgaattaaaatagacactccaatttaagtaagga

SEQ ID NO: 11011 - DNA, 70 bp, Homo sapiens
tgttcttttgaaatctgaaatatgaattaaaatagacactccaatttaagtaaggaaatggtaaatcctg

SEQ ID NO: 11012 - DNA, 70 bp, Homo sapiens
gaaatctgaaatatgaattaaaatagacactccaatttaagtaaggaaatggtaaatcctgttcagttaa

SEQ ID NO: 11013 - DNA, 67 bp, Homo sapiens
atgaattaaaatagacactccaatttaagtaaggaaatggtaaatcctgttcagttaaatttcaatt

SEQ ID NO: 11014 - DNA, 66 bp, Homo sapiens
ttaaaatagacactccaatttaagtaaggaaatggtaaatcctgttcagttaaatttcaattttat

SEQ ID NO: 11015 - DNA, 67 bp, Homo sapiens
cactccaatttaagtaaggaaatggtaaatcctgttcagttaaatttcaattttatttgtaataaca

SEQ ID NO: 11016 - DNA, 66 bp, Homo sapiens
gtaaggaaatggtaaatcctgttcagttaaatttcaattttatttgtaataacaaatcttttcttc

SEQ ID NO: 11017 - DNA, 70 bp, Homo sapiens
ggtaaatcctgttcagttaaatttcaattttatttgtaataacaaatcttttcttctcagaatcaatgga

SEQ ID NO: 11018 - DNA, 67 bp, Homo sapiens
tttttttttttaccaaaagccaaaccattcatatgtatggatttcataaacatttattgatcctttt

SEQ ID NO: 11019 - DNA, 72 bp, Homo sapiens
taccaaaagccaaaccattcatatgtatggatttcataaacatttattgatccttttttgaggtaagtataa

SEQ ID NO: 11020 - DNA, 71 bp, Homo sapiens
aagccaaaccattcatatgtatggatttcataaacatttattgatccttttttgaggtaagtataaatacc

SEQ ID NO: 11021 - DNA, 69 bp, Homo sapiens
ggatttcataaacatttattgatccttttttgaggtaagtataaatacctttacatggctaaccttcta

SEQ ID NO: 11022 - DNA, 68 bp, Homo sapiens
aacatttattgatccttttttgaggtaagtataaatacctttacatggctaaccttctaacacttgaa

SEQ ID NO: 11023 - DNA, 68 bp, Homo sapiens
attgatccttttttgaggtaagtataaatacctttacatggctaaccttctaacacttgaaaaatcaa

SEQ ID NO: 11024 - DNA, 69 bp, Homo sapiens
ttgaggtaagtataaatacctttacatggctaaccttctaacacttgaaaaatcaatttcaagggactc

SEQ ID NO: 11025 - DNA, 69 bp, Homo sapiens
gtataaatacctttacatggctaaccttctaacacttgaaaaatcaatttcaagggactctttaatcag

SEQ ID NO: 11026 - DNA, 71 bp, Homo sapiens
tttacatggctaaccttctaacacttgaaaaatcaatttcaagggactctttaatcagttaaataatctgc

SEQ ID NO: 11027 - DNA, 71 bp, Homo sapiens
ccttctaacacttgaaaaatcaatttcaagggactctttaatcagttaaataatctgctttagaaggcaca

SEQ ID NO: 11028 - DNA, 74 bp, Homo sapiens
cacttgaaaaatcaatttcaagggactctttaatcagttaaataatctgctttagaaggcacaaatgatcatac

SEQ ID NO: 11029 - DNA, 75 bp, Homo sapiens
aatcaatttcaagggactctttaatcagttaaataatctgctttagaaggcacaaatgatcatacttcagattaa

SEQ ID NO: 11030 - DNA, 74 bp, Homo sapiens
caagggactctttaatcagttaaataatctgctttagaaggcacaaatgatcatacttcagattaaaatacagg

SEQ ID NO: 11031 - DNA, 75 bp, Homo sapiens
aatcagttaaataatctgctttagaaggcacaaatgatcatacttcagattaaaatacaggtaagtattcaggga

SEQ ID NO: 11032 - DNA, 76 bp, Homo sapiens
taatctgctttagaaggcacaaatgatcatacttcagattaaaatacaggtaagtattcagggataaaatggtaca

SEQ ID NO: 11033 - DNA, 73 bp, Homo sapiens
gctttagaaggcacaaatgatcatacttcagattaaaatacaggtaagtattcagggataaaatggtacaaaa

SEQ ID NO: 11034 - DNA, 73 bp, Homo sapiens
ggcacaaatgatcatacttcagattaaaatacaggtaagtattcagggataaaatggtacaaaaaaggctgta

SEQ ID NO: 11035 - DNA, 69 bp, Homo sapiens
atcatacttcagattaaaatacaggtaagtattcagggataaaatggtacaaaaaaggctgtaactctt

SEQ ID NO: 11036 - DNA, 68 bp, Homo sapiens
aaaatacaggtaagtattcagggataaaatggtacaaaaaaggctgtaactcttttacttcacattga

SEQ ID NO: 11037 - DNA, 72 bp, Homo sapiens
acaggtaagtattcagggataaaatggtacaaaaaaggctgtaactcttttacttcacattgatcacagaca

SEQ ID NO: 11038 - DNA, 71 bp, Homo sapiens
gggataaaatggtacaaaaaaggctgtaactcttttacttcacattgatcacagacagaacttacatcctt

SEQ ID NO: 11039 - DNA, 75 bp, Homo sapiens
atggtacaaaaaaggctgtaactcttttacttcacattgatcacagacagaacttacatcctttcagaaagatga

SEQ ID NO: 11040 - DNA, 78 bp, Homo sapiens
aaaaaggctgtaactcttttacttcacattgatcacagacagaacttacatcctttcagaaagatgatgtatcagcac

SEQ ID NO: 11041 - DNA, 80 bp, Homo sapiens
aactcttttacttcacattgatcacagacagaacttacatcctttcagaaagatgatgtatcagcactgaacatttctta

SEQ ID NO: 11042 - DNA, 79 bp, Homo sapiens
acttcacattgatcacagacagaacttacatcctttcagaaagatgatgtatcagcactgaacatttcttaaaacaaat

SEQ ID NO: 11043 - DNA, 79 bp, Homo sapiens
tgatcacagacagaacttacatcctttcagaaagatgatgtatcagcactgaacatttcttaaaacaaatttccataat

SEQ ID NO: 11044 - DNA, 74 bp, Homo sapiens
gaacttacatcctttcagaaagatgatgtatcagcactgaacatttcttaaaacaaatttccataattacgaag

SEQ ID NO: 11045 - DNA, 72 bp, Homo sapiens
tcctttcagaaagatgatgtatcagcactgaacatttcttaaaacaaatttccataattacgaagtttaaaa

SEQ ID NO: 11046 - DNA, 73 bp, Homo sapiens
gatgatgtatcagcactgaacatttcttaaaacaaatttccataattacgaagtttaaaaagtacctgagcaa

SEQ ID NO: 11047 - DNA, 65 bp, Homo sapiens
caaatttccataattacgaagtttaaaaagtacctgagcaaagggtttcaaccaattatttcagg

SEQ ID NO: 11048 - DNA, 68 bp, Homo sapiens
ttccataattacgaagtttaaaaagtacctgagcaaagggtttcaaccaattatttcaggttgatata

SEQ ID NO: 11049 - DNA, 66 bp, Homo sapiens
acgaagtttaaaaagtacctgagcaaagggtttcaaccaattatttcaggttgatatataaatttc

SEQ ID NO: 11050 - DNA, 73 bp, Homo sapiens
gtacctgagcaaagggtttcaaccaattatttcaggttgatatataaatttctttcagagtatatgccaacta

SEQ ID NO: 11051 - DNA, 73 bp, Homo sapiens
gcaaagggtttcaaccaattatttcaggttgatatataaatttctttcagagtatatgccaactacagtcaag

SEQ ID NO: 11052 - DNA, 77 bp, Homo sapiens
tcaaccaattatttcaggttgatatataaatttctttcagagtatatgccaactacagtcaaggtatgattactcaa

SEQ ID NO: 11053 - DNA, 80 bp, Homo sapiens
tcaggttgatatataaatttctttcagagtatatgccaactacagtcaaggtatgattactcaaaatctgagtctactca

SEQ ID NO: 11054 - DNA, 77 bp, Homo sapiens
atataaatttctttcagagtatatgccaactacagtcaaggtatgattactcaaaatctgagtctactcagtaagta

SEQ ID NO: 11055 - DNA, 81 bp, Homo sapiens
tttctttcagagtatatgccaactacagtcaaggtatgattactcaaaatctgagtctactcagtaagtatcatagtatca

SEQ ID NO: 11056 - DNA, 85 bp, Homo sapiens
tatatgccaactacagtcaaggtatgattactcaaaatctgagtctactcagtaagtatcatagtatcagatgtgatagagtaga

SEQ ID NO: 11057 - DNA, 82 bp, Homo sapiens
aactacagtcaaggtatgattactcaaaatctgagtctactcagtaagtatcatagtatcagatgtgatagagtagaatcat

SEQ ID NO: 11058 - DNA, 80 bp, Homo sapiens
aaggtatgattactcaaaatctgagtctactcagtaagtatcatagtatcagatgtgatagagtagaatcattccctagg

SEQ ID NO: 11059 - DNA, 83 bp, Homo sapiens
tcaaaatctgagtctactcagtaagtatcatagtatcagatgtgatagagtagaatcattccctaggtcagcagccaaaaata

SEQ ID NO: 11060 - DNA, 82 bp, Homo sapiens
agtaagtatcatagtatcagatgtgatagagtagaatcattccctaggtcagcagccaaaaatatctatcagattcaaagaa

SEQ ID NO: 11061 - DNA, 78 bp, Homo sapiens
agatgtgatagagtagaatcattccctaggtcagcagccaaaaatatctatcagattcaaagaaaataaagatcctac

SEQ ID NO: 11062 - DNA, 75 bp, Homo sapiens
tagagtagaatcattccctaggtcagcagccaaaaatatctatcagattcaaagaaaataaagatcctaccttct

SEQ ID NO: 11063 - DNA, 71 bp, Homo sapiens
ttccctaggtcagcagccaaaaatatctatcagattcaaagaaaataaagatcctaccttctttagacgtt

SEQ ID NO: 11064 - DNA, 73 bp, Homo sapiens
ggtcagcagccaaaaatatctatcagattcaaagaaaataaagatcctaccttctttagacgtttccatgaaa

SEQ ID NO: 11065 - DNA, 70 bp, Homo sapiens
caaaaatatctatcagattcaaagaaaataaagatcctaccttctttagacgtttccatgaaatatttgt

SEQ ID NO: 11066 - DNA, 68 bp, Homo sapiens
gattcaaagaaaataaagatcctaccttctttagacgtttccatgaaatatttgtttttacatcccgc

SEQ ID NO: 11067 - DNA, 69 bp, Homo sapiens
gaaaataaagatcctaccttctttagacgtttccatgaaatatttgtttttacatcccgcgactccaga

SEQ ID NO: 11068 - DNA, 69 bp, Homo sapiens
atcctaccttctttagacgtttccatgaaatatttgtttttacatcccgcgactccagatagctacttt

SEQ ID NO: 11069 - DNA, 71 bp, Homo sapiens
ttagacgtttccatgaaatatttgtttttacatcccgcgactccagatagctacttttcgccacccaacta

SEQ ID NO: 11070 - DNA, 72 bp, Homo sapiens
gtttccatgaaatatttgtttttacatcccgcgactccagatagctacttttcgccacccaactaatatctg

SEQ ID NO: 11071 - DNA, 75 bp, Homo sapiens
atttgtttttacatcccgcgactccagatagctacttttcgccacccaactaatatctggctcaagaacagatca

SEQ ID NO: 11072 - DNA, 75 bp, Homo sapiens
ttttacatcccgcgactccagatagctacttttcgccacccaactaatatctggctcaagaacagatcagtcttt

SEQ ID NO: 11073 - DNA, 74 bp, Homo sapiens
actccagatagctacttttcgccacccaactaatatctggctcaagaacagatcagtcttttattaacagggaa

SEQ ID NO: 11074 - DNA, 75 bp, Homo sapiens
atagctacttttcgccacccaactaatatctggctcaagaacagatcagtcttttattaacagggaatggaggca

SEQ ID NO: 11075 - DNA, 75 bp, Homo sapiens
tttcgccacccaactaatatctggctcaagaacagatcagtcttttattaacagggaatggaggcacactaccaa

SEQ ID NO: 11076 - DNA, 74 bp, Homo sapiens
tcaagaacagatcagtcttttattaacagggaatggaggcacactaccaactgggaacaaatcaccattcaaaa

SEQ ID NO: 11077 - DNA, 70 bp, Homo sapiens
tttattaacagggaatggaggcacactaccaactgggaacaaatcaccattcaaaaccctcaaaatgtta

SEQ ID NO: 11078 - DNA, 71 bp, Homo sapiens
gaatggaggcacactaccaactgggaacaaatcaccattcaaaaccctcaaaatgttaacagactttcaaa

SEQ ID NO: 11079 - DNA, 70 bp, Homo sapiens
acactaccaactgggaacaaatcaccattcaaaaccctcaaaatgttaacagactttcaaagaggagcaa

SEQ ID NO: 11080 - DNA, 70 bp, Homo sapiens
aactgggaacaaatcaccattcaaaaccctcaaaatgttaacagactttcaaagaggagcaagagaaaca

SEQ ID NO: 11081 - DNA, 68 bp, Homo sapiens
aacaaatcaccattcaaaaccctcaaaatgttaacagactttcaaagaggagcaagagaaacagggtt

SEQ ID NO: 11082 - DNA, 69 bp, Homo sapiens
cattcaaaaccctcaaaatgttaacagactttcaaagaggagcaagagaaacagggttttgactttcaa

SEQ ID NO: 11083 - DNA, 68 bp, Homo sapiens
ttaacagactttcaaagaggagcaagagaaacagggttttgactttcaacaaaaactcccatctactt

SEQ ID NO: 11084 - DNA, 67 bp, Homo sapiens
caaagaggagcaagagaaacagggttttgactttcaacaaaaactcccatctactttgaagtaaaaa

SEQ ID NO: 11085 - DNA, 67 bp, Homo sapiens
gagaaacagggttttgactttcaacaaaaactcccatctactttgaagtaaaaattatgtaatggtc

SEQ ID NO: 11086 - DNA, 67 bp, Homo sapiens
gggttttgactttcaacaaaaactcccatctactttgaagtaaaaattatgtaatggtcttatattg

SEQ ID NO: 11087 - DNA, 72 bp, Homo sapiens
tcaacaaaaactcccatctactttgaagtaaaaattatgtaatggtcttatattgttgaatgccaagtgaag

SEQ ID NO: 11088 - DNA, 72 bp, Homo sapiens
actcccatctactttgaagtaaaaattatgtaatggtcttatattgttgaatgccaagtgaaggtacggcaa

SEQ ID NO: 11089 - DNA, 72 bp, Homo sapiens
ctttgaagtaaaaattatgtaatggtcttatattgttgaatgccaagtgaaggtacggcaacaatgaataag

SEQ ID NO: 11090 - DNA, 74 bp, Homo sapiens
aaaattatgtaatggtcttatattgttgaatgccaagtgaaggtacggcaacaatgaataagtccttgcttgag

SEQ ID NO: 11091 - DNA, 76 bp, Homo sapiens
tatgtaatggtcttatattgttgaatgccaagtgaaggtacggcaacaatgaataagtccttgcttgaggggaaga

SEQ ID NO: 11092 - DNA, 75 bp, Homo sapiens
tcttatattgttgaatgccaagtgaaggtacggcaacaatgaataagtccttgcttgaggggaagagatattatt

SEQ ID NO: 11093 - DNA, 75 bp, Homo sapiens
ttgaatgccaagtgaaggtacggcaacaatgaataagtccttgcttgaggggaagagatattatttgcaaactaa

SEQ ID NO: 11094 - DNA, 70 bp, Homo sapiens
aaggtacggcaacaatgaataagtccttgcttgaggggaagagatattatttgcaaactaacttatacct

SEQ ID NO: 11095 - DNA, 72 bp, Homo sapiens
ggcaacaatgaataagtccttgcttgaggggaagagatattatttgcaaactaacttataccttttgaagaa

SEQ ID NO: 11096 - DNA, 69 bp, Homo sapiens
gaataagtccttgcttgaggggaagagatattatttgcaaactaacttataccttttgaagaaattccc

SEQ ID NO: 11097 - DNA, 71 bp, Homo sapiens
gcttgaggggaagagatattatttgcaaactaacttataccttttgaagaaattcccttatcttgtcaaca

SEQ ID NO: 11098 - DNA, 72 bp, Homo sapiens
agagatattatttgcaaactaacttataccttttgaagaaattcccttatcttgtcaacatctttcccagca

SEQ ID NO: 11099 - DNA, 75 bp, Homo sapiens
tgcaaactaacttataccttttgaagaaattcccttatcttgtcaacatctttcccagcataaatatgccacaga

SEQ ID NO: 11100 - DNA, 74 bp, Homo sapiens
actaacttataccttttgaagaaattcccttatcttgtcaacatctttcccagcataaatatgccacagagcac

SEQ ID NO: 11101 - DNA, 77 bp, Homo sapiens
ttttgaagaaattcccttatcttgtcaacatctttcccagcataaatatgccacagagcaccaggtatttcacttga

SEQ ID NO: 11102 - DNA, 77 bp, Homo sapiens
aattcccttatcttgtcaacatctttcccagcataaatatgccacagagcaccaggtatttcacttgagtccttcaa

SEQ ID NO: 11103 - DNA, 78 bp, Homo sapiens
tatcttgtcaacatctttcccagcataaatatgccacagagcaccaggtatttcacttgagtccttcaatcttttcct

SEQ ID NO: 11104 - DNA, 75 bp, Homo sapiens
acatctttcccagcataaatatgccacagagcaccaggtatttcacttgagtccttcaatcttttccttaaaatg

SEQ ID NO: 11105 - DNA, 75 bp, Homo sapiens
taaatatgccacagagcaccaggtatttcacttgagtccttcaatcttttccttaaaatgtcatccaaatcttct

SEQ ID NO: 11106 - DNA, 73 bp, Homo sapiens
acagagcaccaggtatttcacttgagtccttcaatcttttccttaaaatgtcatccaaatcttcttcctcaaa

SEQ ID NO: 11107 - DNA, 71 bp, Homo sapiens
caccaggtatttcacttgagtccttcaatcttttccttaaaatgtcatccaaatcttcttcctcaaatttc

SEQ ID NO: 11108 - DNA, 73 bp, Homo sapiens
cacttgagtccttcaatcttttccttaaaatgtcatccaaatcttcttcctcaaatttcttgagaattcctga

SEQ ID NO: 11109 - DNA, 73 bp, Homo sapiens
gtcatccaaatcttcttcctcaaatttcttgagaattcctgaaacaaaggaacataatttcaaattgtcggca

SEQ ID NO: 11110 - DNA, 71 bp, Homo sapiens
gattattcaactcttatttcaaagactacttattcttttaagtttacctgcttttgagagaatgccatttc

SEQ ID NO: 11111 - DNA, 72 bp, Homo sapiens
tcttatttcaaagactacttattcttttaagtttacctgcttttgagagaatgccatttccttttgctatgc

SEQ ID NO: 11112 - DNA, 73 bp, Homo sapiens
tcaaagactacttattcttttaagtttacctgcttttgagagaatgccatttccttttgctatgccaacataa

SEQ ID NO: 11113 - DNA, 72 bp, Homo sapiens
cttattcttttaagtttacctgcttttgagagaatgccatttccttttgctatgccaacataaactagtata

SEQ ID NO: 11114 - DNA, 75 bp, Homo sapiens
aagtttacctgcttttgagagaatgccatttccttttgctatgccaacataaactagtatatttacaacatcaga

SEQ ID NO: 11115 - DNA, 76 bp, Homo sapiens
cctgcttttgagagaatgccatttccttttgctatgccaacataaactagtatatttacaacatcagaaacttcaa

SEQ ID NO: 11116 - DNA, 77 bp, Homo sapiens
gagaatgccatttccttttgctatgccaacataaactagtatatttacaacatcagaaacttcaatatggagatttg

SEQ ID NO: 11117 - DNA, 75 bp, Homo sapiens
ccttttgctatgccaacataaactagtatatttacaacatcagaaacttcaatatggagatttgttgttcctata

SEQ ID NO: 11118 - DNA, 79 bp, Homo sapiens
gccaacataaactagtatatttacaacatcagaaacttcaatatggagatttgttgttcctatatcatgatctttagca

SEQ ID NO: 11119 - DNA, 79 bp, Homo sapiens
actagtatatttacaacatcagaaacttcaatatggagatttgttgttcctatatcatgatctttagcagcaactacac

SEQ ID NO: 11120 - DNA, 80 bp, Homo sapiens
ttacaacatcagaaacttcaatatggagatttgttgttcctatatcatgatctttagcagcaactacacctgtatataaa

SEQ ID NO: 11121 - DNA, 79 bp, Homo sapiens
acatcagaaacttcaatatggagatttgttgttcctatatcatgatctttagcagcaactacacctgtatataaaacaa

SEQ ID NO: 11122 - DNA, 76 bp, Homo sapiens
cttcaatatggagatttgttgttcctatatcatgatctttagcagcaactacacctgtatataaaacaaaatttta

SEQ ID NO: 11123 - DNA, 75 bp, Homo sapiens
gagatttgttgttcctatatcatgatctttagcagcaactacacctgtatataaaacaaaattttacttgacaaa

SEQ ID NO: 11124 - DNA, 75 bp, Homo sapiens
aaaatccaatataattcctacatgggagaaatgtgaatatatacctaccataggcactgcacaacctgggtccta

SEQ ID NO: 11125 - DNA, 77 bp, Homo sapiens
aatataattcctacatgggagaaatgtgaatatatacctaccataggcactgcacaacctgggtcctagatcaggac

SEQ ID NO: 11126 - DNA, 76 bp, Homo sapiens
ctacatgggagaaatgtgaatatatacctaccataggcactgcacaacctgggtcctagatcaggacgtacaaaaa

SEQ ID NO: 11127 - DNA, 75 bp, Homo sapiens
aatgtgaatatatacctaccataggcactgcacaacctgggtcctagatcaggacgtacaaaaaatcctggcaaa

SEQ ID NO: 11128 - DNA, 76 bp, Homo sapiens
atatacctaccataggcactgcacaacctgggtcctagatcaggacgtacaaaaaatcctggcaaatgagaggcca

SEQ ID NO: 11129 - DNA, 74 bp, Homo sapiens
ataggcactgcacaacctgggtcctagatcaggacgtacaaaaaatcctggcaaatgagaggccaaattgaatt

SEQ ID NO: 11130 - DNA, 70 bp, Homo sapiens
acaacctgggtcctagatcaggacgtacaaaaaatcctggcaaatgagaggccaaattgaattttccttc

SEQ ID NO: 11131 - DNA, 73 bp, Homo sapiens
tcctagatcaggacgtacaaaaaatcctggcaaatgagaggccaaattgaattttccttctggattacaatat

SEQ ID NO: 11132 - DNA, 72 bp, Homo sapiens
aggacgtacaaaaaatcctggcaaatgagaggccaaattgaattttccttctggattacaatattctggcaa

SEQ ID NO: 11133 - DNA, 74 bp, Homo sapiens
aatcctggcaaatgagaggccaaattgaattttccttctggattacaatattctggcaatggcagactttttaa

SEQ ID NO: 11134 - DNA, 74 bp, Homo sapiens
gcaaatgagaggccaaattgaattttccttctggattacaatattctggcaatggcagactttttaaaagatct

SEQ ID NO: 11135 - DNA, 74 bp, Homo sapiens
ggccaaattgaattttccttctggattacaatattctggcaatggcagactttttaaaagatcttcgtatctga

SEQ ID NO: 11136 - DNA, 73 bp, Homo sapiens
tttccttctggattacaatattctggcaatggcagactttttaaaagatcttcgtatctgaagaaaaacaaca

SEQ ID NO: 11137 - DNA, 75 bp, Homo sapiens
tctggattacaatattctggcaatggcagactttttaaaagatcttcgtatctgaagaaaaacaacattgccttc

SEQ ID NO: 11138 - DNA, 73 bp, Homo sapiens
caatattctggcaatggcagactttttaaaagatcttcgtatctgaagaaaaacaacattgccttcttataaa

SEQ ID NO: 11139 - DNA, 76 bp, Homo sapiens
acagtcttagctcgatctcaaaaagtcaagagtcaaaatgaaaagtttcaaaccttgctggcatcatagtcttgaa

SEQ ID NO: 11140 - DNA, 77 bp, Homo sapiens
tagctcgatctcaaaaagtcaagagtcaaaatgaaaagtttcaaaccttgctggcatcatagtcttgaagtcttctc

SEQ ID NO: 11141 - DNA, 73 bp, Homo sapiens
aaaaagtcaagagtcaaaatgaaaagtttcaaaccttgctggcatcatagtcttgaagtcttctcctgaaggc

SEQ ID NO: 11142 - DNA, 74 bp, Homo sapiens
tcaaaatgaaaagtttcaaaccttgctggcatcatagtcttgaagtcttctcctgaaggccagtctttcaattt

SEQ ID NO: 11143 - DNA, 71 bp, Homo sapiens
aaaagtttcaaaccttgctggcatcatagtcttgaagtcttctcctgaaggccagtctttcaattttaaaa

SEQ ID NO: 11144 - DNA, 72 bp, Homo sapiens
aaaccttgctggcatcatagtcttgaagtcttctcctgaaggccagtctttcaattttaaaacaactgtttc

SEQ ID NO: 11145 - DNA, 71 bp, Homo sapiens
atcatagtcttgaagtcttctcctgaaggccagtctttcaattttaaaacaactgtttctccactcttgtt

SEQ ID NO: 11146 - DNA, 68 bp, Homo sapiens
agtcttgaagtcttctcctgaaggccagtctttcaattttaaaacaactgtttctccactcttgtttt

SEQ ID NO: 11147 - DNA, 70 bp, Homo sapiens
tctcctgaaggccagtctttcaattttaaaacaactgtttctccactcttgtttttctgccgttctataa

SEQ ID NO: 11148 - DNA, 69 bp, Homo sapiens
ccagtctttcaattttaaaacaactgtttctccactcttgtttttctgccgttctataaggaatgcagt

SEQ ID NO: 11149 - DNA, 69 bp, Homo sapiens
caattttaaaacaactgtttctccactcttgtttttctgccgttctataaggaatgcagttaattacta

SEQ ID NO: 11150 - DNA, 68 bp, Homo sapiens
caactgtttctccactcttgtttttctgccgttctataaggaatgcagttaattactaaaagggtaat

SEQ ID NO: 11151 - DNA, 69 bp, Homo sapiens
ttgaaggagtatgatggagaaaatagtaaaataaaaaccaacatacttgaaacttcttcaaaaccatcc

SEQ ID NO: 11152 - DNA, 69 bp, Homo sapiens
ggagtatgatggagaaaatagtaaaataaaaaccaacatacttgaaacttcttcaaaaccatcccagaa

SEQ ID NO: 11153 - DNA, 66 bp, Homo sapiens
ggagaaaatagtaaaataaaaaccaacatacttgaaacttcttcaaaaccatcccagaattcctta

SEQ ID NO: 11154 - DNA, 70 bp, Homo sapiens
ataaaaaccaacatacttgaaacttcttcaaaaccatcccagaattccttaacattggcatttgaaatga

SEQ ID NO: 11155 - DNA, 75 bp, Homo sapiens
acatacttgaaacttcttcaaaaccatcccagaattccttaacattggcatttgaaatgatgctatctttgcagt

SEQ ID NO: 11156 - DNA, 77 bp, Homo sapiens
aaacttcttcaaaaccatcccagaattccttaacattggcatttgaaatgatgctatctttgcagttcaggagatca

SEQ ID NO: 11157 - DNA, 79 bp, Homo sapiens
cttcaaaaccatcccagaattccttaacattggcatttgaaatgatgctatctttgcagttcaggagatcagcttggtg

SEQ ID NO: 11158 - DNA, 80 bp, Homo sapiens
agaattccttaacattggcatttgaaatgatgctatctttgcagttcaggagatcagcttggtggtctccaaaatcaaga

SEQ ID NO: 11159 - DNA, 81 bp, Homo sapiens
ttaacattggcatttgaaatgatgctatctttgcagttcaggagatcagcttggtggtctccaaaatcaagactaattgat

SEQ ID NO: 11160 - DNA, 79 bp, Homo sapiens
atttgaaatgatgctatctttgcagttcaggagatcagcttggtggtctccaaaatcaagactaattgattccgccttc

SEQ ID NO: 11161 - DNA, 79 bp, Homo sapiens
atgctatctttgcagttcaggagatcagcttggtggtctccaaaatcaagactaattgattccgccttccataggctaa

SEQ ID NO: 11162 - DNA, 78 bp, Homo sapiens
ttgcagttcaggagatcagcttggtggtctccaaaatcaagactaattgattccgccttccataggctaatgttcatt

SEQ ID NO: 11163 - DNA, 75 bp, Homo sapiens
aggagatcagcttggtggtctccaaaatcaagactaattgattccgccttccataggctaatgttcattttctta

SEQ ID NO: 11164 - DNA, 76 bp, Homo sapiens
ttggtggtctccaaaatcaagactaattgattccgccttccataggctaatgttcattttcttatgcacaccagaa

SEQ ID NO: 11165 - DNA, 78 bp, Homo sapiens
tctccaaaatcaagactaattgattccgccttccataggctaatgttcattttcttatgcacaccagaaaccactgca

SEQ ID NO: 11166 - DNA, 76 bp, Homo sapiens
actaattgattccgccttccataggctaatgttcattttcttatgcacaccagaaaccactgcaggcttataaata

SEQ ID NO: 11167 - DNA, 76 bp, Homo sapiens
attccgccttccataggctaatgttcattttcttatgcacaccagaaaccactgcaggcttataaatagataaata

SEQ ID NO: 11168 - DNA, 72 bp, Homo sapiens
aataagcttcagttccaccaagagtgttctttatcagcctaaaatacacacctgtccttgtttccaacattc

SEQ ID NO: 11169 - DNA, 70 bp, Homo sapiens
agttccaccaagagtgttctttatcagcctaaaatacacacctgtccttgtttccaacattctttgaaaa

SEQ ID NO: 11170 - DNA, 70 bp, Homo sapiens
agtgttctttatcagcctaaaatacacacctgtccttgtttccaacattctttgaaaagcttccaattac

SEQ ID NO: 11171 - DNA, 72 bp, Homo sapiens
cagcctaaaatacacacctgtccttgtttccaacattctttgaaaagcttccaattactgctattcttataa

SEQ ID NO: 11172 - DNA, 72 bp, Homo sapiens
atacacacctgtccttgtttccaacattctttgaaaagcttccaattactgctattcttataatccttaagc

SEQ ID NO: 11173 - DNA, 71 bp, Homo sapiens
cctgtccttgtttccaacattctttgaaaagcttccaattactgctattcttataatccttaagccataaa

SEQ ID NO: 11174 - DNA, 76 bp, Homo sapiens
ccaacattctttgaaaagcttccaattactgctattcttataatccttaagccataaaatatgcttctcacagatc

SEQ ID NO: 11175 - DNA, 78 bp, Homo sapiens
tgaaaagcttccaattactgctattcttataatccttaagccataaaatatgcttctcacagatccaagaatgtggta

SEQ ID NO: 11176 - DNA, 81 bp, Homo sapiens
tccaattactgctattcttataatccttaagccataaaatatgcttctcacagatccaagaatgtggtatatcactgtata

SEQ ID NO: 11177 - DNA, 79 bp, Homo sapiens
actgctattcttataatccttaagccataaaatatgcttctcacagatccaagaatgtggtatatcactgtataattta

SEQ ID NO: 11178 - DNA, 78 bp, Homo sapiens
atccttaagccataaaatatgcttctcacagatccaagaatgtggtatatcactgtataatttattattttcatccac

SEQ ID NO: 11179 - DNA, 84 bp, Homo sapiens
gccataaaatatgcttctcacagatccaagaatgtggtatatcactgtataatttattattttcatccactgcagatattatgc

SEQ ID NO: 11180 - DNA, 83 bp, Homo sapiens
atgcttctcacagatccaagaatgtggtatatcactgtataatttattattttcatccactgcagatattatgctttcttcag

SEQ ID NO: 11181 - DNA, 81 bp, Homo sapiens
acagatccaagaatgtggtatatcactgtataatttattattttcatccactgcagatattatgctttcttcaggctcttc

SEQ ID NO: 11182 - DNA, 80 bp, Homo sapiens
tgtggtatatcactgtataatttattattttcatccactgcagatattatgctttcttcaggctcttctttaagctctgg

SEQ ID NO: 11183 - DNA, 77 bp, Homo sapiens
cactgtataatttattattttcatccactgcagatattatgctttcttcaggctcttctttaagctctggttttaca

SEQ ID NO: 11184 - DNA, 76 bp, Homo sapiens
tttattattttcatccactgcagatattatgctttcttcaggctcttctttaagctctggttttacatttatcttg

SEQ ID NO: 11185 - DNA, 76 bp, Homo sapiens
ttcatccactgcagatattatgctttcttcaggctcttctttaagctctggttttacatttatcttggaggtttta

SEQ ID NO: 11186 - DNA, 73 bp, Homo sapiens
actgcagatattatgctttcttcaggctcttctttaagctctggttttacatttatcttggaggttttacttg

SEQ ID NO: 11187 - DNA, 70 bp, Homo sapiens
tatgctttcttcaggctcttctttaagctctggttttacatttatcttggaggttttacttggtggaatt

SEQ ID NO: 11188 - DNA, 67 bp, Homo sapiens
cttcaggctcttctttaagctctggttttacatttatcttggaggttttacttggtggaattttgtt

SEQ ID NO: 11189 - DNA, 69 bp, Homo sapiens
taagctctggttttacatttatcttggaggttttacttggtggaattttgttttcaacaactgaagcaa

SEQ ID NO: 11190 - DNA, 69 bp, Homo sapiens
ggttttacatttatcttggaggttttacttggtggaattttgttttcaacaactgaagcaattatgtca

SEQ ID NO: 11191 - DNA, 73 bp, Homo sapiens
atcttggaggttttacttggtggaattttgttttcaacaactgaagcaattatgtcatcaagaatgttaggca

SEQ ID NO: 11192 - DNA, 74 bp, Homo sapiens
ttttacttggtggaattttgttttcaacaactgaagcaattatgtcatcaagaatgttaggcatagtccgtcca

SEQ ID NO: 11193 - DNA, 76 bp, Homo sapiens
tggaattttgttttcaacaactgaagcaattatgtcatcaagaatgttaggcatagtccgtccacttttgctactc

SEQ ID NO: 11194 - DNA, 76 bp, Homo sapiens
tttgttttcaacaactgaagcaattatgtcatcaagaatgttaggcatagtccgtccacttttgctactctattaa

SEQ ID NO: 11195 - DNA, 74 bp, Homo sapiens
aacaactgaagcaattatgtcatcaagaatgttaggcatagtccgtccacttttgctactctattaaggaaaaa

SEQ ID NO: 11196 - DNA, 73 bp, Homo sapiens
gcaattatgtcatcaagaatgttaggcatagtccgtccacttttgctactctattaaggaaaaaacaaaacaa

SEQ ID NO: 11197 - DNA, 75 bp, Homo sapiens
atcatctctatttaaggcccacattaaaaccaaaaatctggcatcactcactggggctcccattgaatatactgg

SEQ ID NO: 11198 - DNA, 72 bp, Homo sapiens
tttaaggcccacattaaaaccaaaaatctggcatcactcactggggctcccattgaatatactggggcaaag

SEQ ID NO: 11199 - DNA, 79 bp, Homo sapiens
ttaaaaccaaaaatctggcatcactcactggggctcccattgaatatactggggcaaaggcaatgccagcatctgtaga

SEQ ID NO: 11200 - DNA, 79 bp, Homo sapiens
aaaaatctggcatcactcactggggctcccattgaatatactggggcaaaggcaatgccagcatctgtagaccccacac

SEQ ID NO: 11201 - DNA, 79 bp, Homo sapiens
atcactcactggggctcccattgaatatactggggcaaaggcaatgccagcatctgtagaccccacacgtagctttcca

SEQ ID NO: 11202 - DNA, 80 bp, Homo sapiens
attgaatatactggggcaaaggcaatgccagcatctgtagaccccacacgtagctttccagctgttgtagtcagcaaatc

SEQ ID NO: 11203 - DNA, 78 bp, Homo sapiens
ggcaaaggcaatgccagcatctgtagaccccacacgtagctttccagctgttgtagtcagcaaatcccgtaaggttga

SEQ ID NO: 11204 - DNA, 78 bp, Homo sapiens
atgccagcatctgtagaccccacacgtagctttccagctgttgtagtcagcaaatcccgtaaggttgagccttgttca

SEQ ID NO: 11205 - DNA, 74 bp, Homo sapiens
atctgtagaccccacacgtagctttccagctgttgtagtcagcaaatcccgtaaggttgagccttgttcattat

SEQ ID NO: 11206 - DNA, 76 bp, Homo sapiens
cacacgtagctttccagctgttgtagtcagcaaatcccgtaaggttgagccttgttcattattctgggacacaaga

SEQ ID NO: 11207 - DNA, 76 bp, Homo sapiens
tttccagctgttgtagtcagcaaatcccgtaaggttgagccttgttcattattctgggacacaagaggtgatgttc

SEQ ID NO: 11208 - DNA, 76 bp, Homo sapiens
ctgttgtagtcagcaaatcccgtaaggttgagccttgttcattattctgggacacaagaggtgatgttctgccatt

SEQ ID NO: 11209 - DNA, 77 bp, Homo sapiens
agcaaatcccgtaaggttgagccttgttcattattctgggacacaagaggtgatgttctgccatttggagattcaga

SEQ ID NO: 11210 - DNA, 78 bp, Homo sapiens
taaggttgagccttgttcattattctgggacacaagaggtgatgttctgccatttggagattcagagttgtcttgttc

SEQ ID NO: 11211 - DNA, 77 bp, Homo sapiens
agccttgttcattattctgggacacaagaggtgatgttctgccatttggagattcagagttgtcttgttctctttct

SEQ ID NO: 11212 - DNA, 75 bp, Homo sapiens
attattctgggacacaagaggtgatgttctgccatttggagattcagagttgtcttgttctctttcttctttaat

SEQ ID NO: 11213 - DNA, 73 bp, Homo sapiens
acaagaggtgatgttctgccatttggagattcagagttgtcttgttctctttcttctttaatttggttttcaa

SEQ ID NO: 11214 - DNA, 70 bp, Homo sapiens
atgttctgccatttggagattcagagttgtcttgttctctttcttctttaatttggttttcaagggtaag

SEQ ID NO: 11215 - DNA, 67 bp, Homo sapiens
gagattcagagttgtcttgttctctttcttctttaatttggttttcaagggtaagttctttgttttc

SEQ ID NO: 11216 - DNA, 66 bp, Homo sapiens
gttgtcttgttctctttcttctttaatttggttttcaagggtaagttctttgttttctgaaataga

SEQ ID NO: 11217 - DNA, 65 bp, Homo sapiens
ctttcttctttaatttggttttcaagggtaagttctttgttttctgaaatagaaaatttcacaga

SEQ ID NO: 11218 - DNA, 65 bp, Homo sapiens
taatttggttttcaagggtaagttctttgttttctgaaatagaaaatttcacagattttgttttg

SEQ ID NO: 11219 - DNA, 76 bp, Homo sapiens
atactcctctcacacatgcctagataatcaattatgtttaccttttttttcctctctggctttttgctctgcaaga

SEQ ID NO: 11220 - DNA, 76 bp, Homo sapiens
acacatgcctagataatcaattatgtttaccttttttttcctctctggctttttgctctgcaagatctgctaacca

SEQ ID NO: 11221 - DNA, 76 bp, Homo sapiens
tagataatcaattatgtttaccttttttttcctctctggctttttgctctgcaagatctgctaaccagtgcagtgg

SEQ ID NO: 11222 - DNA, 75 bp, Homo sapiens
ttatgtttaccttttttttcctctctggctttttgctctgcaagatctgctaaccagtgcagtggtgactgggat

SEQ ID NO: 11223 - DNA, 77 bp, Homo sapiens
tttttcctctctggctttttgctctgcaagatctgctaaccagtgcagtggtgactgggattctggaggagttaact

SEQ ID NO: 11224 - DNA, 82 bp, Homo sapiens
tttttgctctgcaagatctgctaaccagtgcagtggtgactgggattctggaggagttaacttgttatctgtgcctacatca

SEQ ID NO: 11225 - DNA, 80 bp, Homo sapiens
aagatctgctaaccagtgcagtggtgactgggattctggaggagttaacttgttatctgtgcctacatcactctctgggc

SEQ ID NO: 11226 - DNA, 81 bp, Homo sapiens
cagtgcagtggtgactgggattctggaggagttaacttgttatctgtgcctacatcactctctgggctgctgccaccattt

SEQ ID NO: 11227 - DNA, 78 bp, Homo sapiens
agtggtgactgggattctggaggagttaacttgttatctgtgcctacatcactctctgggctgctgccaccatttttc

SEQ ID NO: 11228 - DNA, 78 bp, Homo sapiens
attctggaggagttaacttgttatctgtgcctacatcactctctgggctgctgccaccatttttctcagacttcggag

SEQ ID NO: 11229 - DNA, 76 bp, Homo sapiens
agttaacttgttatctgtgcctacatcactctctgggctgctgccaccatttttctcagacttcggaggagtattt

SEQ ID NO: 11230 - DNA, 84 bp, Homo sapiens
ttgttatctgtgcctacatcactctctgggctgctgccaccatttttctcagacttcggaggagtattttgctgctgagactca

SEQ ID NO: 11231 - DNA, 86 bp, Homo sapiens
tacatcactctctgggctgctgccaccatttttctcagacttcggaggagtattttgctgctgagactcaggcatgcacagagaaa

SEQ ID NO: 11232 - DNA, 82 bp, Homo sapiens
tctgggctgctgccaccatttttctcagacttcggaggagtattttgctgctgagactcaggcatgcacagagaaattttat

SEQ ID NO: 11233 - DNA, 81 bp, Homo sapiens
tgccaccatttttctcagacttcggaggagtattttgctgctgagactcaggcatgcacagagaaattttattactgtgat

SEQ ID NO: 11234 - DNA, 79 bp, Homo sapiens
tttttctcagacttcggaggagtattttgctgctgagactcaggcatgcacagagaaattttattactgtgattaagaa

SEQ ID NO: 11235 - DNA, 79 bp, Homo sapiens
ttcggaggagtattttgctgctgagactcaggcatgcacagagaaattttattactgtgattaagaacattctgtaaaa

SEQ ID NO: 11236 - DNA, 78 bp, Homo sapiens
agtattttgctgctgagactcaggcatgcacagagaaattttattactgtgattaagaacattctgtaaaacctacaa

SEQ ID NO: 11237 - DNA, 76 bp, Homo sapiens
ctgagactcaggcatgcacagagaaattttattactgtgattaagaacattctgtaaaacctacaaaggtagaaca

SEQ ID NO: 11238 - DNA, 74 bp, Homo sapiens
caggcatgcacagagaaattttattactgtgattaagaacattctgtaaaacctacaaaggtagaacaattaca

SEQ ID NO: 11239 - DNA, 70 bp, Homo sapiens
gcacagagaaattttattactgtgattaagaacattctgtaaaacctacaaaggtagaacaattacattt

SEQ ID NO: 11240 - DNA, 74 bp, Homo sapiens
tgactaatttaaccacagattttatttgaataaccagagatttttactcacttgagatacaccattcattgtag

SEQ ID NO: 11241 - DNA, 73 bp, Homo sapiens
ccacagattttatttgaataaccagagatttttactcacttgagatacaccattcattgtaggaaaatttcca

SEQ ID NO: 11242 - DNA, 72 bp, Homo sapiens
ttgaataaccagagatttttactcacttgagatacaccattcattgtaggaaaatttccaacttgtaaattc

SEQ ID NO: 11243 - DNA, 71 bp, Homo sapiens
accagagatttttactcacttgagatacaccattcattgtaggaaaatttccaacttgtaaattctgtttg

SEQ ID NO: 11244 - DNA, 73 bp, Homo sapiens
actcacttgagatacaccattcattgtaggaaaatttccaacttgtaaattctgtttgttagtacaatgacaa

SEQ ID NO: 11245 - DNA, 73 bp, Homo sapiens
cttgagatacaccattcattgtaggaaaatttccaacttgtaaattctgtttgttagtacaatgacaatggga

SEQ ID NO: 11246 - DNA, 71 bp, Homo sapiens
cattcattgtaggaaaatttccaacttgtaaattctgtttgttagtacaatgacaatgggatttaatacca

SEQ ID NO: 11247 - DNA, 68 bp, Homo sapiens
gtaggaaaatttccaacttgtaaattctgtttgttagtacaatgacaatgggatttaataccatattt

SEQ ID NO: 11248 - DNA, 72 bp, Homo sapiens
acttgtaaattctgtttgttagtacaatgacaatgggatttaataccatatttttccctaagagtgtgcatg

SEQ ID NO: 11249 - DNA, 76 bp, Homo sapiens
attctgtttgttagtacaatgacaatgggatttaataccatatttttccctaagagtgtgcatggcatctagaaga

SEQ ID NO: 11250 - DNA, 78 bp, Homo sapiens
tgttagtacaatgacaatgggatttaataccatatttttccctaagagtgtgcatggcatctagaagatctgtcaaaa

SEQ ID NO: 11251 - DNA, 76 bp, Homo sapiens
aatgacaatgggatttaataccatatttttccctaagagtgtgcatggcatctagaagatctgtcaaaactacaaa

SEQ ID NO: 11252 - DNA, 74 bp, Homo sapiens
ggatttaataccatatttttccctaagagtgtgcatggcatctagaagatctgtcaaaactacaaaataaaatg

SEQ ID NO: 11253 - DNA, 74 bp, Homo sapiens
ccatatttttccctaagagtgtgcatggcatctagaagatctgtcaaaactacaaaataaaatggtagttaata

SEQ ID NO: 11254 - DNA, 73 bp, Homo sapiens
ccctaagagtgtgcatggcatctagaagatctgtcaaaactacaaaataaaatggtagttaataaaaagatta

SEQ ID NO: 11255 - DNA, 75 bp, Homo sapiens
ttccttaatctggagcaaccaagagcagttatattacatgaagaagatatacttaccagaaccaggtataatttg

SEQ ID NO: 11256 - DNA, 74 bp, Homo sapiens
agcaaccaagagcagttatattacatgaagaagatatacttaccagaaccaggtataatttgggttggcattaa

SEQ ID NO: 11257 - DNA, 75 bp, Homo sapiens
gagcagttatattacatgaagaagatatacttaccagaaccaggtataatttgggttggcattaaatgtttgtga

SEQ ID NO: 11258 - DNA, 76 bp, Homo sapiens
atattacatgaagaagatatacttaccagaaccaggtataatttgggttggcattaaatgtttgtgatcatgaggc

SEQ ID NO: 11259 - DNA, 73 bp, Homo sapiens
aagaagatatacttaccagaaccaggtataatttgggttggcattaaatgtttgtgatcatgaggctgtccct

SEQ ID NO: 11260 - DNA, 75 bp, Homo sapiens
acttaccagaaccaggtataatttgggttggcattaaatgtttgtgatcatgaggctgtcccttcacacacttca

SEQ ID NO: 11261 - DNA, 78 bp, Homo sapiens
gtataatttgggttggcattaaatgtttgtgatcatgaggctgtcccttcacacacttcatccaagcatatagttctt

SEQ ID NO: 11262 - DNA, 79 bp, Homo sapiens
atttgggttggcattaaatgtttgtgatcatgaggctgtcccttcacacacttcatccaagcatatagttctttatctg

SEQ ID NO: 11263 - DNA, 79 bp, Homo sapiens
attaaatgtttgtgatcatgaggctgtcccttcacacacttcatccaagcatatagttctttatctgtaagataataaa

SEQ ID NO: 11264 - DNA, 80 bp, Homo sapiens
tttgtgatcatgaggctgtcccttcacacacttcatccaagcatatagttctttatctgtaagataataaaacttgtata

SEQ ID NO: 11265 - DNA, 78 bp, Homo sapiens
ctgtcccttcacacacttcatccaagcatatagttctttatctgtaagataataaaacttgtatatcacactcatggt

SEQ ID NO: 11266 - DNA, 79 bp, Homo sapiens
ccttcacacacttcatccaagcatatagttctttatctgtaagataataaaacttgtatatcacactcatggtttcata

SEQ ID NO: 11267 - DNA, 65 bp, Homo sapiens
agaaaaattataaaaaacttcaatttatataaacttatacaccaacctctagaactcttcctttc

SEQ ID NO: 11268 - DNA, 67 bp, Homo sapiens
taaaaaacttcaatttatataaacttatacaccaacctctagaactcttcctttcctttgccttgta

SEQ ID NO: 11269 - DNA, 71 bp, Homo sapiens
caatttatataaacttatacaccaacctctagaactcttcctttcctttgccttgtaacaatctaagcaga

SEQ ID NO: 11270 - DNA, 71 bp, Homo sapiens
tataaacttatacaccaacctctagaactcttcctttcctttgccttgtaacaatctaagcagaccacaaa

SEQ ID NO: 11271 - DNA, 72 bp, Homo sapiens
tatacaccaacctctagaactcttcctttcctttgccttgtaacaatctaagcagaccacaaatccacattt

SEQ ID NO: 11272 - DNA, 74 bp, Homo sapiens
tagaactcttcctttcctttgccttgtaacaatctaagcagaccacaaatccacatttttggcagacccagtga

SEQ ID NO: 11273 - DNA, 73 bp, Homo sapiens
ctttcctttgccttgtaacaatctaagcagaccacaaatccacatttttggcagacccagtgaatgttaaaca

SEQ ID NO: 11274 - DNA, 75 bp, Homo sapiens
tttgccttgtaacaatctaagcagaccacaaatccacatttttggcagacccagtgaatgttaaacaatgttgct

SEQ ID NO: 11275 - DNA, 82 bp, Homo sapiens
taacaatctaagcagaccacaaatccacatttttggcagacccagtgaatgttaaacaatgttgcttcacatgcatcacaca

SEQ ID NO: 11276 - DNA, 79 bp, Homo sapiens
accacaaatccacatttttggcagacccagtgaatgttaaacaatgttgcttcacatgcatcacacatctcccggactc

SEQ ID NO: 11277 - DNA, 80 bp, Homo sapiens
aaatccacatttttggcagacccagtgaatgttaaacaatgttgcttcacatgcatcacacatctcccggactcctctca

SEQ ID NO: 11278 - DNA, 81 bp, Homo sapiens
ttttggcagacccagtgaatgttaaacaatgttgcttcacatgcatcacacatctcccggactcctctcactgctcttttc

SEQ ID NO: 11279 - DNA, 80 bp, Homo sapiens
agtgaatgttaaacaatgttgcttcacatgcatcacacatctcccggactcctctcactgctcttttccaggcaattttg

SEQ ID NO: 11280 - DNA, 81 bp, Homo sapiens
ttaaacaatgttgcttcacatgcatcacacatctcccggactcctctcactgctcttttccaggcaattttggctgaaata

SEQ ID NO: 11281 - DNA, 80 bp, Homo sapiens
gttgcttcacatgcatcacacatctcccggactcctctcactgctcttttccaggcaattttggctgaaatacagaaaaa

SEQ ID NO: 11282 - DNA, 76 bp, Homo sapiens
atgcatcacacatctcccggactcctctcactgctcttttccaggcaattttggctgaaatacagaaaaaacaaaa

SEQ ID NO: 11283 - DNA, 69 bp, Homo sapiens
atctcccggactcctctcactgctcttttccaggcaattttggctgaaatacagaaaaaacaaaaattt

SEQ ID NO: 11284 - DNA, 69 bp, Homo sapiens
cttaaaatgaaatttgtgcagttcatgttatatttaacttccttaccatcctttttcacccaggacaaa

SEQ ID NO: 11285 - DNA, 69 bp, Homo sapiens
gaaatttgtgcagttcatgttatatttaacttccttaccatcctttttcacccaggacaaagctgtttt

SEQ ID NO: 11286 - DNA, 71 bp, Homo sapiens
gcagttcatgttatatttaacttccttaccatcctttttcacccaggacaaagctgttttttcagatgtta

SEQ ID NO: 11287 - DNA, 70 bp, Homo sapiens
tatttaacttccttaccatcctttttcacccaggacaaagctgttttttcagatgttactaattgacaga

SEQ ID NO: 11288 - DNA, 68 bp, Homo sapiens
aacttccttaccatcctttttcacccaggacaaagctgttttttcagatgttactaattgacagaact

SEQ ID NO: 11289 - DNA, 72 bp, Homo sapiens
cctttttcacccaggacaaagctgttttttcagatgttactaattgacagaacttatcacctattatatcca

SEQ ID NO: 11290 - DNA, 74 bp, Homo sapiens
cacccaggacaaagctgttttttcagatgttactaattgacagaacttatcacctattatatccaagatatatt

SEQ ID NO: 11291 - DNA, 77 bp, Homo sapiens
gctgttttttcagatgttactaattgacagaacttatcacctattatatccaagatatatttagaagtctctatatc

SEQ ID NO: 11292 - DNA, 80 bp, Homo sapiens
cagatgttactaattgacagaacttatcacctattatatccaagatatatttagaagtctctatatctagttcatcatct

SEQ ID NO: 11293 - DNA, 79 bp, Homo sapiens
ttactaattgacagaacttatcacctattatatccaagatatatttagaagtctctatatctagttcatcatcttcaaa

SEQ ID NO: 11294 - DNA, 79 bp, Homo sapiens
cagaacttatcacctattatatccaagatatatttagaagtctctatatctagttcatcatcttcaaaattttcatgtg

SEQ ID NO: 11295 - DNA, 83 bp, Homo sapiens
ccaagatatatttagaagtctctatatctagttcatcatcttcaaaattttcatgtgtccacaaactcatagcttcatcatca

SEQ ID NO: 11296 - DNA, 82 bp, Homo sapiens
atatttagaagtctctatatctagttcatcatcttcaaaattttcatgtgtccacaaactcatagcttcatcatcatattgg

SEQ ID NO: 11297 - DNA, 84 bp, Homo sapiens
tctatatctagttcatcatcttcaaaattttcatgtgtccacaaactcatagcttcatcatcatattggtcaggagaagagaaa

SEQ ID NO: 11298 - DNA, 84 bp, Homo sapiens
tcatcatcttcaaaattttcatgtgtccacaaactcatagcttcatcatcatattggtcaggagaagagaaaccatctattcta

SEQ ID NO: 11299 - DNA, 80 bp, Homo sapiens
ttcaaaattttcatgtgtccacaaactcatagcttcatcatcatattggtcaggagaagagaaaccatctattctaacta

SEQ ID NO: 11300 - DNA, 77 bp, Homo sapiens
atgtgtccacaaactcatagcttcatcatcatattggtcaggagaagagaaaccatctattctaactactccgtttt

SEQ ID NO: 11301 - DNA, 75 bp, Homo sapiens
acaaactcatagcttcatcatcatattggtcaggagaagagaaaccatctattctaactactccgtttttactaa

SEQ ID NO: 11302 - DNA, 75 bp, Homo sapiens
atagcttcatcatcatattggtcaggagaagagaaaccatctattctaactactccgtttttactaaatgacaac

SEQ ID NO: 11303 - DNA, 71 bp, Homo sapiens
catattggtcaggagaagagaaaccatctattctaactactccgtttttactaaatgacaacctgaaatat

SEQ ID NO: 11304 - DNA, 69 bp, Homo sapiens
ggtcaggagaagagaaaccatctattctaactactccgtttttactaaatgacaacctgaaatattaaa

SEQ ID NO: 11305 - DNA, 67 bp, Homo sapiens
gagaaaccatctattctaactactccgtttttactaaatgacaacctgaaatattaaaacataaaag

SEQ ID NO: 11306 - DNA, 69 bp, Homo sapiens
tcaaatcaataaattacttttttcccaatctcatattttcacttaccgtctaaagtagtaaaatctaca

SEQ ID NO: 11307 - DNA, 65 bp, Homo sapiens
aaattacttttttcccaatctcatattttcacttaccgtctaaagtagtaaaatctacaaaatac

SEQ ID NO: 11308 - DNA, 71 bp, Homo sapiens
tttcccaatctcatattttcacttaccgtctaaagtagtaaaatctacaaaatactggtgagtgagctggt

SEQ ID NO: 11309 - DNA, 71 bp, Homo sapiens
tcatattttcacttaccgtctaaagtagtaaaatctacaaaatactggtgagtgagctggttcttctcctt

SEQ ID NO: 11310 - DNA, 68 bp, Homo sapiens
ttttcacttaccgtctaaagtagtaaaatctacaaaatactggtgagtgagctggttcttctcctttt

SEQ ID NO: 11311 - DNA, 70 bp, Homo sapiens
ctaaagtagtaaaatctacaaaatactggtgagtgagctggttcttctccttttttactgcgaataagtc

SEQ ID NO: 11312 - DNA, 73 bp, Homo sapiens
tagtaaaatctacaaaatactggtgagtgagctggttcttctccttttttactgcgaataagtctacattctc

SEQ ID NO: 11313 - DNA, 72 bp, Homo sapiens
aatactggtgagtgagctggttcttctccttttttactgcgaataagtctacattctcgacacttttgtaaa

SEQ ID NO: 11314 - DNA, 70 bp, Homo sapiens
agtgagctggttcttctccttttttactgcgaataagtctacattctcgacacttttgtaaattaggccc

SEQ ID NO: 11315 - DNA, 72 bp, Homo sapiens
tggttcttctccttttttactgcgaataagtctacattctcgacacttttgtaaattaggccctatctcaca

SEQ ID NO: 11316 - DNA, 76 bp, Homo sapiens
tttttactgcgaataagtctacattctcgacacttttgtaaattaggccctatctcacagcaggagtcatcctgta

SEQ ID NO: 11317 - DNA, 74 bp, Homo sapiens
gaataagtctacattctcgacacttttgtaaattaggccctatctcacagcaggagtcatcctgtaaaaaggat

SEQ ID NO: 11318 - DNA, 73 bp, Homo sapiens
agtctacattctcgacacttttgtaaattaggccctatctcacagcaggagtcatcctgtaaaaaggattccc

SEQ ID NO: 11319 - DNA, 74 bp, Homo sapiens
tcgacacttttgtaaattaggccctatctcacagcaggagtcatcctgtaaaaaggattccccagtttgcttca

SEQ ID NO: 11320 - DNA, 74 bp, Homo sapiens
taaattaggccctatctcacagcaggagtcatcctgtaaaaaggattccccagtttgcttcagcttcttgactt

SEQ ID NO: 11321 - DNA, 77 bp, Homo sapiens
tatctcacagcaggagtcatcctgtaaaaaggattccccagtttgcttcagcttcttgactttacgccaatctttca

SEQ ID NO: 11322 - DNA, 74 bp, Homo sapiens
acagcaggagtcatcctgtaaaaaggattccccagtttgcttcagcttcttgactttacgccaatctttcaata

SEQ ID NO: 11323 - DNA, 71 bp, Homo sapiens
atcctgtaaaaaggattccccagtttgcttcagcttcttgactttacgccaatctttcaatactgaacgag

SEQ ID NO: 11324 - DNA, 72 bp, Homo sapiens
aaaaaggattccccagtttgcttcagcttcttgactttacgccaatctttcaatactgaacgaggaatgcca

SEQ ID NO: 11325 - DNA, 76 bp, Homo sapiens
agtttgcttcagcttcttgactttacgccaatctttcaatactgaacgaggaatgccagctgtaaaatcagtagga

SEQ ID NO: 11326 - DNA, 73 bp, Homo sapiens
gcttcttgactttacgccaatctttcaatactgaacgaggaatgccagctgtaaaatcagtaggaaagtttta

SEQ ID NO: 11327 - DNA, 72 bp, Homo sapiens
actttacgccaatctttcaatactgaacgaggaatgccagctgtaaaatcagtaggaaagttttagcaagat

SEQ ID NO: 11328 - DNA, 72 bp, Homo sapiens
acattcagcccattttacctgagataaaacaaagtaactgacttactattactgttgctttgcaacttcagt

SEQ ID NO: 11329 - DNA, 71 bp, Homo sapiens
cagcccattttacctgagataaaacaaagtaactgacttactattactgttgctttgcaacttcagtttac

SEQ ID NO: 11330 - DNA, 69 bp, Homo sapiens
acctgagataaaacaaagtaactgacttactattactgttgctttgcaacttcagtttacttctttctt

SEQ ID NO: 11331 - DNA, 71 bp, Homo sapiens
aaacaaagtaactgacttactattactgttgctttgcaacttcagtttacttctttctttggcactcctgc

SEQ ID NO: 11332 - DNA, 74 bp, Homo sapiens
aactgacttactattactgttgctttgcaacttcagtttacttctttctttggcactcctgctgagaactccat

SEQ ID NO: 11333 - DNA, 74 bp, Homo sapiens
tattactgttgctttgcaacttcagtttacttctttctttggcactcctgctgagaactccattgggtttcaaa

SEQ ID NO: 11334 - DNA, 73 bp, Homo sapiens
ttgcaacttcagtttacttctttctttggcactcctgctgagaactccattgggtttcaaatcttcttctatt

SEQ ID NO: 11335 - DNA, 70 bp, Homo sapiens
agtttacttctttctttggcactcctgctgagaactccattgggtttcaaatcttcttctatttcacctt

SEQ ID NO: 11336 - DNA, 71 bp, Homo sapiens
ttctttctttggcactcctgctgagaactccattgggtttcaaatcttcttctatttcaccttttctcttt

SEQ ID NO: 11337 - DNA, 73 bp, Homo sapiens
actcctgctgagaactccattgggtttcaaatcttcttctatttcaccttttctcttttgcaaatcattttgc

SEQ ID NO: 11338 - DNA, 72 bp, Homo sapiens
gctgagaactccattgggtttcaaatcttcttctatttcaccttttctcttttgcaaatcattttgcttctt

SEQ ID NO: 11339 - DNA, 69 bp, Homo sapiens
ccattgggtttcaaatcttcttctatttcaccttttctcttttgcaaatcattttgcttctttttgtaa

SEQ ID NO: 11340 - DNA, 70 bp, Homo sapiens
tcttcttctatttcaccttttctcttttgcaaatcattttgcttctttttgtaagttggcttaggttgtc

SEQ ID NO: 11341 - DNA, 68 bp, Homo sapiens
tttcaccttttctcttttgcaaatcattttgcttctttttgtaagttggcttaggttgtcttttagtc

SEQ ID NO: 11342 - DNA, 71 bp, Homo sapiens
tctcttttgcaaatcattttgcttctttttgtaagttggcttaggttgtcttttagtcctttgctctgact

SEQ ID NO: 11343 - DNA, 70 bp, Homo sapiens
aaatcattttgcttctttttgtaagttggcttaggttgtcttttagtcctttgctctgacttgctttcac

SEQ ID NO: 11344 - DNA, 70 bp, Homo sapiens
attttgcttctttttgtaagttggcttaggttgtcttttagtcctttgctctgacttgctttcactttca

SEQ ID NO: 11345 - DNA, 78 bp, Homo sapiens
ttaggttgtcttttagtcctttgctctgacttgctttcactttcatctgagtctccactttcagagccagattcataa

SEQ ID NO: 11346 - DNA, 77 bp, Homo sapiens
ttttagtcctttgctctgacttgctttcactttcatctgagtctccactttcagagccagattcataagttcttttg

SEQ ID NO: 11347 - DNA, 77 bp, Homo sapiens
gtcctttgctctgacttgctttcactttcatctgagtctccactttcagagccagattcataagttcttttggcttt

SEQ ID NO: 11348 - DNA, 76 bp, Homo sapiens
ttgctttcactttcatctgagtctccactttcagagccagattcataagttcttttggcttttctcctgttgactt

SEQ ID NO: 11349 - DNA, 76 bp, Homo sapiens
tttcatctgagtctccactttcagagccagattcataagttcttttggcttttctcctgttgactttatcatcttt

SEQ ID NO: 11350 - DNA, 74 bp, Homo sapiens
agtctccactttcagagccagattcataagttcttttggcttttctcctgttgactttatcatcttttacatat

SEQ ID NO: 11351 - DNA, 78 bp, Homo sapiens
tcagagccagattcataagttcttttggcttttctcctgttgactttatcatcttttacatatttatcaactatgatc

SEQ ID NO: 11352 - DNA, 76 bp, Homo sapiens
gccagattcataagttcttttggcttttctcctgttgactttatcatcttttacatatttatcaactatgatctta

SEQ ID NO: 11353 - DNA, 76 bp, Homo sapiens
ggcttttctcctgttgactttatcatcttttacatatttatcaactatgatcttactatctacactattttgtata

SEQ ID NO: 11354 - DNA, 80 bp, Homo sapiens
ttgactttatcatcttttacatatttatcaactatgatcttactatctacactattttgtatatcactagatgtagaggc

SEQ ID NO: 11355 - DNA, 78 bp, Homo sapiens
catcttttacatatttatcaactatgatcttactatctacactattttgtatatcactagatgtagaggctattaagt

SEQ ID NO: 11356 - DNA, 81 bp, Homo sapiens
tatttatcaactatgatcttactatctacactattttgtatatcactagatgtagaggctattaagttgacagaacatggc

SEQ ID NO: 11357 - DNA, 80 bp, Homo sapiens
atcaactatgatcttactatctacactattttgtatatcactagatgtagaggctattaagttgacagaacatggcttaa

SEQ ID NO: 11358 - DNA, 77 bp, Homo sapiens
ctattttgtatatcactagatgtagaggctattaagttgacagaacatggcttaataatttctgatacagaattccc

SEQ ID NO: 11359 - DNA, 75 bp, Homo sapiens
ctagatgtagaggctattaagttgacagaacatggcttaataatttctgatacagaattccctgaattttccatt

SEQ ID NO: 11360 - DNA, 72 bp, Homo sapiens
catggcttaataatttctgatacagaattccctgaattttccattttattagtatttttatcttcttctgag

SEQ ID NO: 11361 - DNA, 70 bp, Homo sapiens
gaattccctgaattttccattttattagtatttttatcttcttctgagtgtctggtgagccaggcctttt

SEQ ID NO: 11362 - DNA, 70 bp, Homo sapiens
cctgaattttccattttattagtatttttatcttcttctgagtgtctggtgagccaggcctttttcagtt

SEQ ID NO: 11363 - DNA, 71 bp, Homo sapiens
tttattagtatttttatcttcttctgagtgtctggtgagccaggcctttttcagtttagtatggtagtttg

SEQ ID NO: 11364 - DNA, 71 bp, Homo sapiens
atttttatcttcttctgagtgtctggtgagccaggcctttttcagtttagtatggtagtttggttgacttg

SEQ ID NO: 11365 - DNA, 73 bp, Homo sapiens
ttcttctgagtgtctggtgagccaggcctttttcagtttagtatggtagtttggttgacttgtctgggaagct

SEQ ID NO: 11366 - DNA, 70 bp, Homo sapiens
tttttcagtttagtatggtagtttggttgacttgtctgggaagcttgcccatttcctacagagtttgctt

SEQ ID NO: 11367 - DNA, 73 bp, Homo sapiens
tatggtagtttggttgacttgtctgggaagcttgcccatttcctacagagtttgctttgttaattgtactaca

SEQ ID NO: 11368 - DNA, 73 bp, Homo sapiens
tttggttgacttgtctgggaagcttgcccatttcctacagagtttgctttgttaattgtactacagattacag

SEQ ID NO: 11369 - DNA, 77 bp, Homo sapiens
tgtctgggaagcttgcccatttcctacagagtttgctttgttaattgtactacagattacagtgctatccagaggaa

SEQ ID NO: 11370 - DNA, 74 bp, Homo sapiens
atttcctacagagtttgctttgttaattgtactacagattacagtgctatccagaggaagggaggctgaaagtg

SEQ ID NO: 11371 - DNA, 73 bp, Homo sapiens
agtttgctttgttaattgtactacagattacagtgctatccagaggaagggaggctgaaagtgtctgattttt

SEQ ID NO: 11372 - DNA, 75 bp, Homo sapiens
ttaattgtactacagattacagtgctatccagaggaagggaggctgaaagtgtctgattttttatagcattaggt

SEQ ID NO: 11373 - DNA, 77 bp, Homo sapiens
tgctatccagaggaagggaggctgaaagtgtctgattttttatagcattaggttcagtctcactggcattactactt

SEQ ID NO: 11374 - DNA, 73 bp, Homo sapiens
aggaagggaggctgaaagtgtctgattttttatagcattaggttcagtctcactggcattactacttttatac

SEQ ID NO: 11375 - DNA, 79 bp, Homo sapiens
aggctgaaagtgtctgattttttatagcattaggttcagtctcactggcattactacttttatactgagctgcagccaa

SEQ ID NO: 11376 - DNA, 82 bp, Homo sapiens
tctgattttttatagcattaggttcagtctcactggcattactacttttatactgagctgcagccaatgctgccttgtgctt

SEQ ID NO: 11377 - DNA, 79 bp, Homo sapiens
tttttatagcattaggttcagtctcactggcattactacttttatactgagctgcagccaatgctgccttgtgcttttt

SEQ ID NO: 11378 - DNA, 79 bp, Homo sapiens
attaggttcagtctcactggcattactacttttatactgagctgcagccaatgctgccttgtgcttttttaaatggata

SEQ ID NO: 11379 - DNA, 79 bp, Homo sapiens
gtctcactggcattactacttttatactgagctgcagccaatgctgccttgtgcttttttaaatggataaaatcagttg

SEQ ID NO: 11380 - DNA, 78 bp, Homo sapiens
attactacttttatactgagctgcagccaatgctgccttgtgcttttttaaatggataaaatcagttgtgcctgagaa

SEQ ID NO: 11381 - DNA, 79 bp, Homo sapiens
tttatactgagctgcagccaatgctgccttgtgcttttttaaatggataaaatcagttgtgcctgagaacccagaactg

SEQ ID NO: 11382 - DNA, 74 bp, Homo sapiens
agccaatgctgccttgtgcttttttaaatggataaaatcagttgtgcctgagaacccagaactgggttgaacaa

SEQ ID NO: 11383 - DNA, 73 bp, Homo sapiens
atgctgccttgtgcttttttaaatggataaaatcagttgtgcctgagaacccagaactgggttgaacaacact

SEQ ID NO: 11384 - DNA, 71 bp, Homo sapiens
tttttaaatggataaaatcagttgtgcctgagaacccagaactgggttgaacaacacttcctgtcttacta

SEQ ID NO: 11385 - DNA, 74 bp, Homo sapiens
gataaaatcagttgtgcctgagaacccagaactgggttgaacaacacttcctgtcttactactggctaatgtaa

SEQ ID NO: 11386 - DNA, 74 bp, Homo sapiens
agaacccagaactgggttgaacaacacttcctgtcttactactggctaatgtaactggtgctgtggtgctgacc

SEQ ID NO: 11387 - DNA, 76 bp, Homo sapiens
agaactgggttgaacaacacttcctgtcttactactggctaatgtaactggtgctgtggtgctgaccttgcattct

SEQ ID NO: 11388 - DNA, 77 bp, Homo sapiens
gttgaacaacacttcctgtcttactactggctaatgtaactggtgctgtggtgctgaccttgcattcttgtttttga

SEQ ID NO: 11389 - DNA, 80 bp, Homo sapiens
tactggctaatgtaactggtgctgtggtgctgaccttgcattcttgtttttgagccactggctgactgacactttttgaa

SEQ ID NO: 11390 - DNA, 81 bp, Homo sapiens
taatgtaactggtgctgtggtgctgaccttgcattcttgtttttgagccactggctgactgacactttttgaagatacaca

SEQ ID NO: 11391 - DNA, 78 bp, Homo sapiens
ttcttgtttttgagccactggctgactgacactttttgaagatacacattctgatgatgtagaggccaaaatggtatt

SEQ ID NO: 11392 - DNA, 79 bp, Homo sapiens
tttttgagccactggctgactgacactttttgaagatacacattctgatgatgtagaggccaaaatggtatttgataaa

SEQ ID NO: 11393 - DNA, 76 bp, Homo sapiens
ctgactgacactttttgaagatacacattctgatgatgtagaggccaaaatggtatttgataaagaggaaattact

SEQ ID NO: 11394 - DNA, 75 bp, Homo sapiens
ctttttgaagatacacattctgatgatgtagaggccaaaatggtatttgataaagaggaaattacttctgaacca

SEQ ID NO: 11395 - DNA, 75 bp, Homo sapiens
aagatacacattctgatgatgtagaggccaaaatggtatttgataaagaggaaattacttctgaaccaccccagc

SEQ ID NO: 11396 - DNA, 74 bp, Homo sapiens
attctgatgatgtagaggccaaaatggtatttgataaagaggaaattacttctgaaccaccccagctggaaaca

SEQ ID NO: 11397 - DNA, 71 bp, Homo sapiens
tagaggccaaaatggtatttgataaagaggaaattacttctgaaccaccccagctggaaacactggtagta

SEQ ID NO: 11398 - DNA, 72 bp, Homo sapiens
aaaatggtatttgataaagaggaaattacttctgaaccaccccagctggaaacactggtagtatcggcagca

SEQ ID NO: 11399 - DNA, 77 bp, Homo sapiens
tttgataaagaggaaattacttctgaaccaccccagctggaaacactggtagtatcggcagcagatgtgattacatc

SEQ ID NO: 11400 - DNA, 75 bp, Homo sapiens
attacttctgaaccaccccagctggaaacactggtagtatcggcagcagatgtgattacatccgttttggtatta

SEQ ID NO: 11401 - DNA, 75 bp, Homo sapiens
aaccaccccagctggaaacactggtagtatcggcagcagatgtgattacatccgttttggtattacacatcgtat

SEQ ID NO: 11402 - DNA, 81 bp, Homo sapiens
agctggaaacactggtagtatcggcagcagatgtgattacatccgttttggtattacacatcgtatttacagcagacatga

SEQ ID NO: 11403 - DNA, 80 bp, Homo sapiens
aaacactggtagtatcggcagcagatgtgattacatccgttttggtattacacatcgtatttacagcagacatgactgaa

SEQ ID NO: 11404 - DNA, 80 bp, Homo sapiens
agtatcggcagcagatgtgattacatccgttttggtattacacatcgtatttacagcagacatgactgaactgggaacac

SEQ ID NO: 11405 - DNA, 80 bp, Homo sapiens
agatgtgattacatccgttttggtattacacatcgtatttacagcagacatgactgaactgggaacactgccctgtgaga

SEQ ID NO: 11406 - DNA, 77 bp, Homo sapiens
tttggtattacacatcgtatttacagcagacatgactgaactgggaacactgccctgtgagacagcctgaaagtttt

SEQ ID NO: 11407 - DNA, 76 bp, Homo sapiens
atgactgaactgggaacactgccctgtgagacagcctgaaagtttttttcagattttgtgtgaacactgtctgaat

SEQ ID NO: 11408 - DNA, 76 bp, Homo sapiens
aacactgccctgtgagacagcctgaaagtttttttcagattttgtgtgaacactgtctgaattcacatttggcaaa

SEQ ID NO: 11409 - DNA, 78 bp, Homo sapiens
tgtgagacagcctgaaagtttttttcagattttgtgtgaacactgtctgaattcacatttggcaaaatgattcttcca

SEQ ID NO: 11410 - DNA, 74 bp, Homo sapiens
acagcctgaaagtttttttcagattttgtgtgaacactgtctgaattcacatttggcaaaatgattcttccagt

SEQ ID NO: 11411 - DNA, 77 bp, Homo sapiens
tttttcagattttgtgtgaacactgtctgaattcacatttggcaaaatgattcttccagtttctccggcttctgcta

SEQ ID NO: 11412 - DNA, 76 bp, Homo sapiens
attttgtgtgaacactgtctgaattcacatttggcaaaatgattcttccagtttctccggcttctgctagtttgag

SEQ ID NO: 11413 - DNA, 77 bp, Homo sapiens
cactgtctgaattcacatttggcaaaatgattcttccagtttctccggcttctgctagtttgaggcaatctgtttta

SEQ ID NO: 11414 - DNA, 75 bp, Homo sapiens
aattcacatttggcaaaatgattcttccagtttctccggcttctgctagtttgaggcaatctgttttatgtgccc

SEQ ID NO: 11415 - DNA, 76 bp, Homo sapiens
atttggcaaaatgattcttccagtttctccggcttctgctagtttgaggcaatctgttttatgtgccccagctgaa

SEQ ID NO: 11416 - DNA, 77 bp, Homo sapiens
tttctccggcttctgctagtttgaggcaatctgttttatgtgccccagctgaagatctttcactaacacgatcttta

SEQ ID NO: 11417 - DNA, 80 bp, Homo sapiens
tgttttatgtgccccagctgaagatctttcactaacacgatctttagaagctaactgcattgctggcatactatcagttt

SEQ ID NO: 11418 - DNA, 81 bp, Homo sapiens
tatgtgccccagctgaagatctttcactaacacgatctttagaagctaactgcattgctggcatactatcagtttttgtac

SEQ ID NO: 11419 - DNA, 85 bp, Homo sapiens
acgatctttagaagctaactgcattgctggcatactatcagtttttgtactagaagatggacgcacaatgacagatgccatagca

SEQ ID NO: 11420 - DNA, 84 bp, Homo sapiens
ctaactgcattgctggcatactatcagtttttgtactagaagatggacgcacaatgacagatgccatagcagcctgtaactttc

SEQ ID NO: 11421 - DNA, 83 bp, Homo sapiens
tgctggcatactatcagtttttgtactagaagatggacgcacaatgacagatgccatagcagcctgtaactttccgctgcttt

SEQ ID NO: 11422 - DNA, 80 bp, Homo sapiens
atactatcagtttttgtactagaagatggacgcacaatgacagatgccatagcagcctgtaactttccgctgcttttctc

SEQ ID NO: 11423 - DNA, 83 bp, Homo sapiens
tagaagatggacgcacaatgacagatgccatagcagcctgtaactttccgctgcttttctccacatgccattcagttttctct

SEQ ID NO: 11424 - DNA, 81 bp, Homo sapiens
acaatgacagatgccatagcagcctgtaactttccgctgcttttctccacatgccattcagttttctctttgctgaggtta

SEQ ID NO: 11425 - DNA, 79 bp, Homo sapiens
agatgccatagcagcctgtaactttccgctgcttttctccacatgccattcagttttctctttgctgaggttattatta

SEQ ID NO: 11426 - DNA, 76 bp, Homo sapiens
atagcagcctgtaactttccgctgcttttctccacatgccattcagttttctctttgctgaggttattattaggtc

SEQ ID NO: 11427 - DNA, 76 bp, Homo sapiens
gtaactttccgctgcttttctccacatgccattcagttttctctttgctgaggttattattaggtctccacatctc

SEQ ID NO: 11428 - DNA, 76 bp, Homo sapiens
ttttctccacatgccattcagttttctctttgctgaggttattattaggtctccacatctccgtcaaactctgttc

SEQ ID NO: 11429 - DNA, 76 bp, Homo sapiens
acatgccattcagttttctctttgctgaggttattattaggtctccacatctccgtcaaactctgttctgaagaac

SEQ ID NO: 11430 - DNA, 72 bp, Homo sapiens
gttttctctttgctgaggttattattaggtctccacatctccgtcaaactctgttctgaagaactcttaaaa

SEQ ID NO: 11431 - DNA, 74 bp, Homo sapiens
tctttgctgaggttattattaggtctccacatctccgtcaaactctgttctgaagaactcttaaaatttgcctg

SEQ ID NO: 11432 - DNA, 71 bp, Homo sapiens
ttattattaggtctccacatctccgtcaaactctgttctgaagaactcttaaaatttgcctgggagtcttt

SEQ ID NO: 11433 - DNA, 71 bp, Homo sapiens
tctccacatctccgtcaaactctgttctgaagaactcttaaaatttgcctgggagtcttttggttcgggta

SEQ ID NO: 11434 - DNA, 69 bp, Homo sapiens
atctccgtcaaactctgttctgaagaactcttaaaatttgcctgggagtcttttggttcgggtattaga

SEQ ID NO: 11435 - DNA, 70 bp, Homo sapiens
gaactcttaaaatttgcctgggagtcttttggttcgggtattagagttggaggcttctgtgattcttgaa

SEQ ID NO: 11436 - DNA, 71 bp, Homo sapiens
tgggagtcttttggttcgggtattagagttggaggcttctgtgattcttgaactttaccaccagcatttac

SEQ ID NO: 11437 - DNA, 73 bp, Homo sapiens
cttttggttcgggtattagagttggaggcttctgtgattcttgaactttaccaccagcatttactggcatcac

SEQ ID NO: 11438 - DNA, 74 bp, Homo sapiens
tattagagttggaggcttctgtgattcttgaactttaccaccagcatttactggcatcaccggagttaaagttg

SEQ ID NO: 11439 - DNA, 72 bp, Homo sapiens
gttggaggcttctgtgattcttgaactttaccaccagcatttactggcatcaccggagttaaagttggaggg

SEQ ID NO: 11440 - DNA, 70 bp, Homo sapiens
aactttaccaccagcatttactggcatcaccggagttaaagttggaggggaaagactactatagctgcct

SEQ ID NO: 11441 - DNA, 70 bp, Homo sapiens
accagcatttactggcatcaccggagttaaagttggaggggaaagactactatagctgccttcctttctt

SEQ ID NO: 11442 - DNA, 71 bp, Homo sapiens
ttactggcatcaccggagttaaagttggaggggaaagactactatagctgccttcctttctttccaggctg

SEQ ID NO: 11443 - DNA, 70 bp, Homo sapiens
accggagttaaagttggaggggaaagactactatagctgccttcctttctttccaggctgtgatggattg

SEQ ID NO: 11444 - DNA, 72 bp, Homo sapiens
aagttggaggggaaagactactatagctgccttcctttctttccaggctgtgatggattggtgggtgaaata

SEQ ID NO: 11445 - DNA, 76 bp, Homo sapiens
aaagactactatagctgccttcctttctttccaggctgtgatggattggtgggtgaaatactggtgctctatgtaa

SEQ ID NO: 11446 - DNA, 80 bp, Homo sapiens
actatagctgccttcctttctttccaggctgtgatggattggtgggtgaaatactggtgctctatgtaatgcaggcatac

SEQ ID NO: 11447 - DNA, 80 bp, Homo sapiens
ctttctttccaggctgtgatggattggtgggtgaaatactggtgctctatgtaatgcaggcatactgcggagtgtatttg

SEQ ID NO: 11448 - DNA, 80 bp, Homo sapiens
aggctgtgatggattggtgggtgaaatactggtgctctatgtaatgcaggcatactgcggagtgtatttgtagaagaaac

SEQ ID NO: 11449 - DNA, 79 bp, Homo sapiens
atggattggtgggtgaaatactggtgctctatgtaatgcaggcatactgcggagtgtatttgtagaagaaactgtcaaa

SEQ ID NO: 11450 - DNA, 79 bp, Homo sapiens
tatgtaatgcaggcatactgcggagtgtatttgtagaagaaactgtcaaatgggtaggactcctacaatcatttctgaa

SEQ ID NO: 11451 - DNA, 74 bp, Homo sapiens
catactgcggagtgtatttgtagaagaaactgtcaaatgggtaggactcctacaatcatttctgaaggttgtta

SEQ ID NO: 11452 - DNA, 79 bp, Homo sapiens
aactgtcaaatgggtaggactcctacaatcatttctgaaggttgttactgagtgagatgcaatctgatgtggaagatgt

SEQ ID NO: 11453 - DNA, 80 bp, Homo sapiens
tacaatcatttctgaaggttgttactgagtgagatgcaatctgatgtggaagatgttctggtatcttgcctactaaacct

SEQ ID NO: 11454 - DNA, 78 bp, Homo sapiens
tttctgaaggttgttactgagtgagatgcaatctgatgtggaagatgttctggtatcttgcctactaaaccttcactt

SEQ ID NO: 11455 - DNA, 77 bp, Homo sapiens
aggttgttactgagtgagatgcaatctgatgtggaagatgttctggtatcttgcctactaaaccttcactttctggt

SEQ ID NO: 11456 - DNA, 78 bp, Homo sapiens
tgagatgcaatctgatgtggaagatgttctggtatcttgcctactaaaccttcactttctggttggtgtttaatcaaa

SEQ ID NO: 11457 - DNA, 72 bp, Homo sapiens
aatctgatgtggaagatgttctggtatcttgcctactaaaccttcactttctggttggtgtttaatcaaagg

SEQ ID NO: 11458 - DNA, 69 bp, Homo sapiens
aagatgttctggtatcttgcctactaaaccttcactttctggttggtgtttaatcaaaggtggaggctt

SEQ ID NO: 11459 - DNA, 70 bp, Homo sapiens
ttctggtatcttgcctactaaaccttcactttctggttggtgtttaatcaaaggtggaggctttgaaaga

SEQ ID NO: 11460 - DNA, 70 bp, Homo sapiens
ctactaaaccttcactttctggttggtgtttaatcaaaggtggaggctttgaaagagatgttataaatga

SEQ ID NO: 11461 - DNA, 73 bp, Homo sapiens
ttcactttctggttggtgtttaatcaaaggtggaggctttgaaagagatgttataaatgaagtcagagtttga

SEQ ID NO: 11462 - DNA, 73 bp, Homo sapiens
ttctggttggtgtttaatcaaaggtggaggctttgaaagagatgttataaatgaagtcagagtttgaggatta

SEQ ID NO: 11463 - DNA, 79 bp, Homo sapiens
tgtttaatcaaaggtggaggctttgaaagagatgttataaatgaagtcagagtttgaggattagctgctgccgctgcaa

SEQ ID NO: 11464 - DNA, 80 bp, Homo sapiens
tggaggctttgaaagagatgttataaatgaagtcagagtttgaggattagctgctgccgctgcaagggcattactctgtt

SEQ ID NO: 11465 - DNA, 79 bp, Homo sapiens
aaagagatgttataaatgaagtcagagtttgaggattagctgctgccgctgcaagggcattactctgtttatcaccgta

SEQ ID NO: 11466 - DNA, 79 bp, Homo sapiens
tataaatgaagtcagagtttgaggattagctgctgccgctgcaagggcattactctgtttatcaccgtaaatatttgaa

SEQ ID NO: 11467 - DNA, 77 bp, Homo sapiens
atgaagtcagagtttgaggattagctgctgccgctgcaagggcattactctgtttatcaccgtaaatatttgaaact

SEQ ID NO: 11468 - DNA, 75 bp, Homo sapiens
agtttgaggattagctgctgccgctgcaagggcattactctgtttatcaccgtaaatatttgaaacttctttgga

SEQ ID NO: 11469 - DNA, 77 bp, Homo sapiens
ttagctgctgccgctgcaagggcattactctgtttatcaccgtaaatatttgaaacttctttggatgggtatgatct

SEQ ID NO: 11470 - DNA, 74 bp, Homo sapiens
tgcaagggcattactctgtttatcaccgtaaatatttgaaacttctttggatgggtatgatcttggtggttcat

SEQ ID NO: 11471 - DNA, 73 bp, Homo sapiens
attactctgtttatcaccgtaaatatttgaaacttctttggatgggtatgatcttggtggttcattgaccaca

SEQ ID NO: 11472 - DNA, 73 bp, Homo sapiens
aacttctttggatgggtatgatcttggtggttcattgaccacactattagacaatgtagtgaaatagttactt

SEQ ID NO: 11473 - DNA, 72 bp, Homo sapiens
atgggtatgatcttggtggttcattgaccacactattagacaatgtagtgaaatagttactttggggtaaac

SEQ ID NO: 11474 - DNA, 75 bp, Homo sapiens
atgatcttggtggttcattgaccacactattagacaatgtagtgaaatagttactttggggtaaactctgaggca

SEQ ID NO: 11475 - DNA, 76 bp, Homo sapiens
ttcattgaccacactattagacaatgtagtgaaatagttactttggggtaaactctgaggcactgagtgcttcatt

SEQ ID NO: 11476 - DNA, 74 bp, Homo sapiens
accacactattagacaatgtagtgaaatagttactttggggtaaactctgaggcactgagtgcttcattttata

SEQ ID NO: 11477 - DNA, 76 bp, Homo sapiens
acaatgtagtgaaatagttactttggggtaaactctgaggcactgagtgcttcattttataaagatctgatactga

SEQ ID NO: 11478 - DNA, 75 bp, Homo sapiens
aaatagttactttggggtaaactctgaggcactgagtgcttcattttataaagatctgatactgagcgttctaca

SEQ ID NO: 11479 - DNA, 81 bp, Homo sapiens
actgagtgcttcattttataaagatctgatactgagcgttctacatccatatcttgtttgatgatatggcttttaggactg

SEQ ID NO: 11480 - DNA, 83 bp, Homo sapiens
ttcattttataaagatctgatactgagcgttctacatccatatcttgtttgatgatatggcttttaggactggaagatgatga

SEQ ID NO: 11481 - DNA, 83 bp, Homo sapiens
atactgagcgttctacatccatatcttgtttgatgatatggcttttaggactggaagatgatgatgccactctggaataattc

SEQ ID NO: 11482 - DNA, 84 bp, Homo sapiens
cgttctacatccatatcttgtttgatgatatggcttttaggactggaagatgatgatgccactctggaataattctctctctca

SEQ ID NO: 11483 - DNA, 82 bp, Homo sapiens
atatcttgtttgatgatatggcttttaggactggaagatgatgatgccactctggaataattctctctctcaccctcaagtc

SEQ ID NO: 11484 - DNA, 77 bp, Homo sapiens
tttaggactggaagatgatgatgccactctggaataattctctctctcaccctcaagtcccttgattttagttgtaa

SEQ ID NO: 11485 - DNA, 76 bp, Homo sapiens
actggaagatgatgatgccactctggaataattctctctctcaccctcaagtcccttgattttagttgtaaaggga

SEQ ID NO: 11486 - DNA, 77 bp, Homo sapiens
atgatgccactctggaataattctctctctcaccctcaagtcccttgattttagttgtaaagggagcaacatcaata

SEQ ID NO: 11487 - DNA, 74 bp, Homo sapiens
tggaataattctctctctcaccctcaagtcccttgattttagttgtaaagggagcaacatcaatactttcttga

SEQ ID NO: 11488 - DNA, 73 bp, Homo sapiens
tctctctcaccctcaagtcccttgattttagttgtaaagggagcaacatcaatactttcttgaagaattcgac

SEQ ID NO: 11489 - DNA, 70 bp, Homo sapiens
cctcaagtcccttgattttagttgtaaagggagcaacatcaatactttcttgaagaattcgacggtgttc

SEQ ID NO: 11490 - DNA, 70 bp, Homo sapiens
cttgattttagttgtaaagggagcaacatcaatactttcttgaagaattcgacggtgttcctctttgtat

SEQ ID NO: 11491 - DNA, 69 bp, Homo sapiens
ttttagttgtaaagggagcaacatcaatactttcttgaagaattcgacggtgttcctctttgtatttgt

SEQ ID NO: 11492 - DNA, 69 bp, Homo sapiens
aaagggagcaacatcaatactttcttgaagaattcgacggtgttcctctttgtatttgtttaacctctc

SEQ ID NO: 11493 - DNA, 71 bp, Homo sapiens
acatcaatactttcttgaagaattcgacggtgttcctctttgtatttgtttaacctctctccagtctcctg

SEQ ID NO: 11494 - DNA, 72 bp, Homo sapiens
ttcctctttgtatttgtttaacctctctccagtctcctggggtggcctctgtaactgatttaatactggatc

SEQ ID NO: 11495 - DNA, 74 bp, Homo sapiens
tgtatttgtttaacctctctccagtctcctggggtggcctctgtaactgatttaatactggatccacaaaatgc

SEQ ID NO: 11496 - DNA, 77 bp, Homo sapiens
tctctccagtctcctggggtggcctctgtaactgatttaatactggatccacaaaatgcctatgtaagtgacaatct

SEQ ID NO: 11497 - DNA, 74 bp, Homo sapiens
agtctcctggggtggcctctgtaactgatttaatactggatccacaaaatgcctatgtaagtgacaatcttttc

SEQ ID NO: 11498 - DNA, 77 bp, Homo sapiens
tggcctctgtaactgatttaatactggatccacaaaatgcctatgtaagtgacaatcttttccagtctgtgacctat

SEQ ID NO: 11499 - DNA, 77 bp, Homo sapiens
taactgatttaatactggatccacaaaatgcctatgtaagtgacaatcttttccagtctgtgacctatttagatcca

SEQ ID NO: 11500 - DNA, 76 bp, Homo sapiens
tttaatactggatccacaaaatgcctatgtaagtgacaatcttttccagtctgtgacctatttagatccaggtcat

SEQ ID NO: 11501 - DNA, 77 bp, Homo sapiens
atccacaaaatgcctatgtaagtgacaatcttttccagtctgtgacctatttagatccaggtcatttttggctgatg

SEQ ID NO: 11502 - DNA, 81 bp, Homo sapiens
atgcctatgtaagtgacaatcttttccagtctgtgacctatttagatccaggtcatttttggctgatgtggatgcaacaga

SEQ ID NO: 11503 - DNA, 76 bp, Homo sapiens
acaatcttttccagtctgtgacctatttagatccaggtcatttttggctgatgtggatgcaacagaccgtaatggt

SEQ ID NO: 11504 - DNA, 77 bp, Homo sapiens
ttccagtctgtgacctatttagatccaggtcatttttggctgatgtggatgcaacagaccgtaatggttccataaaa

SEQ ID NO: 11505 - DNA, 74 bp, Homo sapiens
tttagatccaggtcatttttggctgatgtggatgcaacagaccgtaatggttccataaaagcttttctttctaa

SEQ ID NO: 11506 - DNA, 74 bp, Homo sapiens
ctgatgtggatgcaacagaccgtaatggttccataaaagcttttctttctaattctctgtaaagaaaatacaca

SEQ ID NO: 11507 - DNA, 71 bp, Homo sapiens
gatgcaacagaccgtaatggttccataaaagcttttctttctaattctctgtaaagaaaatacacaaatat

SEQ ID NO: 11508 - DNA, 68 bp, Homo sapiens
accgtaatggttccataaaagcttttctttctaattctctgtaaagaaaatacacaaatatttctgta

SEQ ID NO: 11509 - DNA, 70 bp, Homo sapiens
aattatgaacaaggtatttataatttttaagcactggtgaacttactccttatgatgatctactaaagtt

SEQ ID NO: 11510 - DNA, 71 bp, Homo sapiens
gaacaaggtatttataatttttaagcactggtgaacttactccttatgatgatctactaaagtttttgtca

SEQ ID NO: 11511 - DNA, 72 bp, Homo sapiens
tttataatttttaagcactggtgaacttactccttatgatgatctactaaagtttttgtcaatggtggactg

SEQ ID NO: 11512 - DNA, 75 bp, Homo sapiens
tttaagcactggtgaacttactccttatgatgatctactaaagtttttgtcaatggtggactggaatgggctgta

SEQ ID NO: 11513 - DNA, 71 bp, Homo sapiens
aacttactccttatgatgatctactaaagtttttgtcaatggtggactggaatgggctgtaattttaagag

SEQ ID NO: 11514 - DNA, 74 bp, Homo sapiens
ctccttatgatgatctactaaagtttttgtcaatggtggactggaatgggctgtaattttaagaggccgatgag

SEQ ID NO: 11515 - DNA, 75 bp, Homo sapiens
tctactaaagtttttgtcaatggtggactggaatgggctgtaattttaagaggccgatgaggctctgcactggaa

SEQ ID NO: 11516 - DNA, 75 bp, Homo sapiens
aagtttttgtcaatggtggactggaatgggctgtaattttaagaggccgatgaggctctgcactggaaggtctga

SEQ ID NO: 11517 - DNA, 78 bp, Homo sapiens
gtggactggaatgggctgtaattttaagaggccgatgaggctctgcactggaaggtctgacaggaatgtgactaagta

SEQ ID NO: 11518 - DNA, 77 bp, Homo sapiens
aatgggctgtaattttaagaggccgatgaggctctgcactggaaggtctgacaggaatgtgactaagtaatccaata

SEQ ID NO: 11519 - DNA, 80 bp, Homo sapiens
taattttaagaggccgatgaggctctgcactggaaggtctgacaggaatgtgactaagtaatccaataccatctgctgag

SEQ ID NO: 11520 - DNA, 81 bp, Homo sapiens
aagaggccgatgaggctctgcactggaaggtctgacaggaatgtgactaagtaatccaataccatctgctgaggtcacagg

SEQ ID NO: 11521 - DNA, 82 bp, Homo sapiens
ctctgcactggaaggtctgacaggaatgtgactaagtaatccaataccatctgctgaggtcacaggggtgggctgatgtagc

SEQ ID NO: 11522 - DNA, 79 bp, Homo sapiens
actggaaggtctgacaggaatgtgactaagtaatccaataccatctgctgaggtcacaggggtgggctgatgtagccaa

SEQ ID NO: 11523 - DNA, 78 bp, Homo sapiens
acaggaatgtgactaagtaatccaataccatctgctgaggtcacaggggtgggctgatgtagccaaggactgggagaa

SEQ ID NO: 11524 - DNA, 76 bp, Homo sapiens
actaagtaatccaataccatctgctgaggtcacaggggtgggctgatgtagccaaggactgggagaattctattaa

SEQ ID NO: 11525 - DNA, 77 bp, Homo sapiens
taatccaataccatctgctgaggtcacaggggtgggctgatgtagccaaggactgggagaattctattaacaaaaca

SEQ ID NO: 11526 - DNA, 77 bp, Homo sapiens
acatgttcattaatatatactgctatgtggcaaactacagtgtaacttaccctccttaatgaagcttcagcattaac

SEQ ID NO: 11527 - DNA, 75 bp, Homo sapiens
tatgtggcaaactacagtgtaacttaccctccttaatgaagcttcagcattaactgcattttctgggtgaaccca

SEQ ID NO: 11528 - DNA, 71 bp, Homo sapiens
aaactacagtgtaacttaccctccttaatgaagcttcagcattaactgcattttctgggtgaacccactta

SEQ ID NO: 11529 - DNA, 72 bp, Homo sapiens
taacttaccctccttaatgaagcttcagcattaactgcattttctgggtgaacccacttagaagaaggcaaa

SEQ ID NO: 11530 - DNA, 76 bp, Homo sapiens
aagcttcagcattaactgcattttctgggtgaacccacttagaagaaggcaaaccaagtcctgagtatgcatgtgt

SEQ ID NO: 11531 - DNA, 74 bp, Homo sapiens
attaactgcattttctgggtgaacccacttagaagaaggcaaaccaagtcctgagtatgcatgtgttccatttg

SEQ ID NO: 11532 - DNA, 75 bp, Homo sapiens
attttctgggtgaacccacttagaagaaggcaaaccaagtcctgagtatgcatgtgttccatttggatactgcca

SEQ ID NO: 11533 - DNA, 75 bp, Homo sapiens
aacccacttagaagaaggcaaaccaagtcctgagtatgcatgtgttccatttggatactgccaaataattggata

SEQ ID NO: 11534 - DNA, 76 bp, Homo sapiens
ttagaagaaggcaaaccaagtcctgagtatgcatgtgttccatttggatactgccaaataattggataaagtccaa

SEQ ID NO: 11535 - DNA, 78 bp, Homo sapiens
aaaccaagtcctgagtatgcatgtgttccatttggatactgccaaataattggataaagtccaagctgattatatgaa

SEQ ID NO: 11536 - DNA, 80 bp, Homo sapiens
agtatgcatgtgttccatttggatactgccaaataattggataaagtccaagctgattatatgaagcagaaggatgggct

SEQ ID NO: 11537 - DNA, 79 bp, Homo sapiens
tgttccatttggatactgccaaataattggataaagtccaagctgattatatgaagcagaaggatgggcttgtccaaga

SEQ ID NO: 11538 - DNA, 79 bp, Homo sapiens
atttggatactgccaaataattggataaagtccaagctgattatatgaagcagaaggatgggcttgtccaagaagatga

SEQ ID NO: 11539 - DNA, 79 bp, Homo sapiens
aaataattggataaagtccaagctgattatatgaagcagaaggatgggcttgtccaagaagatgaggtgactggtgctg

SEQ ID NO: 11540 - DNA, 80 bp, Homo sapiens
attggataaagtccaagctgattatatgaagcagaaggatgggcttgtccaagaagatgaggtgactggtgctgtaacaa

SEQ ID NO: 11541 - DNA, 80 bp, Homo sapiens
gtccaagctgattatatgaagcagaaggatgggcttgtccaagaagatgaggtgactggtgctgtaacaactgttgttgt

SEQ ID NO: 11542 - DNA, 82 bp, Homo sapiens
ttatatgaagcagaaggatgggcttgtccaagaagatgaggtgactggtgctgtaacaactgttgttgttgctggtgtgcta

SEQ ID NO: 11543 - DNA, 79 bp, Homo sapiens
aaggatgggcttgtccaagaagatgaggtgactggtgctgtaacaactgttgttgttgctggtgtgctagcgctaagtg

SEQ ID NO: 11544 - DNA, 83 bp, Homo sapiens
cttgtccaagaagatgaggtgactggtgctgtaacaactgttgttgttgctggtgtgctagcgctaagtggctcaagctgctg

SEQ ID NO: 11545 - DNA, 88 bp, Homo sapiens
agatgaggtgactggtgctgtaacaactgttgttgttgctggtgtgctagcgctaagtggctcaagctgctggcatgagcactctcta

SEQ ID NO: 11546 - DNA, 85 bp, Homo sapiens
actggtgctgtaacaactgttgttgttgctggtgtgctagcgctaagtggctcaagctgctggcatgagcactctctagtcgtgg

SEQ ID NO: 11547 - DNA, 85 bp, Homo sapiens
taacaactgttgttgttgctggtgtgctagcgctaagtggctcaagctgctggcatgagcactctctagtcgtgggtggccacca

SEQ ID NO: 11548 - DNA, 84 bp, Homo sapiens
ttgttgttgctggtgtgctagcgctaagtggctcaagctgctggcatgagcactctctagtcgtgggtggccaccaagtaagga

SEQ ID NO: 11549 - DNA, 83 bp, Homo sapiens
ctggtgtgctagcgctaagtggctcaagctgctggcatgagcactctctagtcgtgggtggccaccaagtaaggaggcagtag

SEQ ID NO: 11550 - DNA, 78 bp, Homo sapiens
tggcatgagcactctctagtcgtgggtggccaccaagtaaggaggcagtaggcactccaggtaacacagtgggaagta

SEQ ID NO: 11551 - DNA, 73 bp, Homo sapiens
actctctagtcgtgggtggccaccaagtaaggaggcagtaggcactccaggtaacacagtgggaagtaaatga

SEQ ID NO: 11552 - DNA, 74 bp, Homo sapiens
tcgtgggtggccaccaagtaaggaggcagtaggcactccaggtaacacagtgggaagtaaatgagggtgatgaa

SEQ ID NO: 11553 - DNA, 77 bp, Homo sapiens
taaggaggcagtaggcactccaggtaacacagtgggaagtaaatgagggtgatgaacagcatggtgtggaccactag

SEQ ID NO: 11554 - DNA, 80 bp, Homo sapiens
gcactccaggtaacacagtgggaagtaaatgagggtgatgaacagcatggtgtggaccactagtcagaggatgagtgtta

SEQ ID NO: 11555 - DNA, 78 bp, Homo sapiens
taacacagtgggaagtaaatgagggtgatgaacagcatggtgtggaccactagtcagaggatgagtgttaatggtagg

SEQ ID NO: 11556 - DNA, 79 bp, Homo sapiens
taaatgagggtgatgaacagcatggtgtggaccactagtcagaggatgagtgttaatggtaggtaatggagtttgacta

SEQ ID NO: 11557 - DNA, 80 bp, Homo sapiens
atgaacagcatggtgtggaccactagtcagaggatgagtgttaatggtaggtaatggagtttgactagatgatccggcta

SEQ ID NO: 11558 - DNA, 76 bp, Homo sapiens
atggtgtggaccactagtcagaggatgagtgttaatggtaggtaatggagtttgactagatgatccggctagtaaa

SEQ ID NO: 11559 - DNA, 76 bp, Homo sapiens
accactagtcagaggatgagtgttaatggtaggtaatggagtttgactagatgatccggctagtaaatggggtgca

SEQ ID NO: 11560 - DNA, 74 bp, Homo sapiens
agaggatgagtgttaatggtaggtaatggagtttgactagatgatccggctagtaaatggggtgcaggagttaa

SEQ ID NO: 11561 - DNA, 76 bp, Homo sapiens
tgttaatggtaggtaatggagtttgactagatgatccggctagtaaatggggtgcaggagttaaggcaggatgatg

SEQ ID NO: 11562 - DNA, 75 bp, Homo sapiens
atggagtttgactagatgatccggctagtaaatggggtgcaggagttaaggcaggatgatgggtacctggattta

SEQ ID NO: 11563 - DNA, 74 bp, Homo sapiens
gtttgactagatgatccggctagtaaatggggtgcaggagttaaggcaggatgatgggtacctggatttaaaca

SEQ ID NO: 11564 - DNA, 73 bp, Homo sapiens
aggagttaaggcaggatgatgggtacctggatttaaacaggttctatgagatgaggagtgaagaggaaaagga

SEQ ID NO: 11565 - DNA, 74 bp, Homo sapiens
atgatgggtacctggatttaaacaggttctatgagatgaggagtgaagaggaaaaggatgctggcttaggaaag

SEQ ID NO: 11566 - DNA, 76 bp, Homo sapiens
tggatttaaacaggttctatgagatgaggagtgaagaggaaaaggatgctggcttaggaaaggtgaaatatgatta

SEQ ID NO: 11567 - DNA, 76 bp, Homo sapiens
acaggttctatgagatgaggagtgaagaggaaaaggatgctggcttaggaaaggtgaaatatgattagctcctgtt

SEQ ID NO: 11568 - DNA, 75 bp, Homo sapiens
atgaggagtgaagaggaaaaggatgctggcttaggaaaggtgaaatatgattagctcctgtttctgacccaataa

SEQ ID NO: 11569 - DNA, 75 bp, Homo sapiens
aagaggaaaaggatgctggcttaggaaaggtgaaatatgattagctcctgtttctgacccaataagtgcaggatc

SEQ ID NO: 11570 - DNA, 76 bp, Homo sapiens
aaaggatgctggcttaggaaaggtgaaatatgattagctcctgtttctgacccaataagtgcaggatctctgtaaa

SEQ ID NO: 11571 - DNA, 75 bp, Homo sapiens
tggcttaggaaaggtgaaatatgattagctcctgtttctgacccaataagtgcaggatctctgtaaactgtaaaa

SEQ ID NO: 11572 - DNA, 75 bp, Homo sapiens
aaaggtgaaatatgattagctcctgtttctgacccaataagtgcaggatctctgtaaactgtaaaatgctcattt

SEQ ID NO: 11573 - DNA, 77 bp, Homo sapiens
tttctgacccaataagtgcaggatctctgtaaactgtaaaatgctcatttttatcaatgataagaggactctttgta

SEQ ID NO: 11574 - DNA, 75 bp, Homo sapiens
gacccaataagtgcaggatctctgtaaactgtaaaatgctcatttttatcaatgataagaggactctttgtagtt

SEQ ID NO: 11575 - DNA, 78 bp, Homo sapiens
tgcaggatctctgtaaactgtaaaatgctcatttttatcaatgataagaggactctttgtagtttctaatgtactgct

SEQ ID NO: 11576 - DNA, 74 bp, Homo sapiens
aaactgtaaaatgctcatttttatcaatgataagaggactctttgtagtttctaatgtactgcttcgagtagga

SEQ ID NO: 11577 - DNA, 76 bp, Homo sapiens
atgctcatttttatcaatgataagaggactctttgtagtttctaatgtactgcttcgagtaggaattggatgaaaa

SEQ ID NO: 11578 - DNA, 79 bp, Homo sapiens
aatgataagaggactctttgtagtttctaatgtactgcttcgagtaggaattggatgaaaactgcatcttgatagctca

SEQ ID NO: 11579 - DNA, 78 bp, Homo sapiens
ctttgtagtttctaatgtactgcttcgagtaggaattggatgaaaactgcatcttgatagctcatgttctatcttatt

SEQ ID NO: 11580 - DNA, 81 bp, Homo sapiens
tagtttctaatgtactgcttcgagtaggaattggatgaaaactgcatcttgatagctcatgttctatcttatttgccaatc

SEQ ID NO: 11581 - DNA, 82 bp, Homo sapiens
tgtactgcttcgagtaggaattggatgaaaactgcatcttgatagctcatgttctatcttatttgccaatcttctttcacca

SEQ ID NO: 11582 - DNA, 78 bp, Homo sapiens
atagctcatgttctatcttatttgccaatcttctttcaccagtagcttggctgttcacataagtggccttagacttta

SEQ ID NO: 11583 - DNA, 77 bp, Homo sapiens
gttctatcttatttgccaatcttctttcaccagtagcttggctgttcacataagtggccttagactttacagaatca

SEQ ID NO: 11584 - DNA, 75 bp, Homo sapiens
cttctttcaccagtagcttggctgttcacataagtggccttagactttacagaatcaggagaatgagttattttg

SEQ ID NO: 11585 - DNA, 73 bp, Homo sapiens
agtagcttggctgttcacataagtggccttagactttacagaatcaggagaatgagttattttgggtttaaca

SEQ ID NO: 11586 - DNA, 73 bp, Homo sapiens
tgttcacataagtggccttagactttacagaatcaggagaatgagttattttgggtttaacaacttcaggtga

SEQ ID NO: 11587 - DNA, 72 bp, Homo sapiens
taagtggccttagactttacagaatcaggagaatgagttattttgggtttaacaacttcaggtgatgggctg

SEQ ID NO: 11588 - DNA, 72 bp, Homo sapiens
tagactttacagaatcaggagaatgagttattttgggtttaacaacttcaggtgatgggctggattttatct

SEQ ID NO: 11589 - DNA, 74 bp, Homo sapiens
agaatcaggagaatgagttattttgggtttaacaacttcaggtgatgggctggattttatcttgtgagtatcta

SEQ ID NO: 11590 - DNA, 72 bp, Homo sapiens
gagttattttgggtttaacaacttcaggtgatgggctggattttatcttgtgagtatctactgaagtattaa

SEQ ID NO: 11591 - DNA, 71 bp, Homo sapiens
gggtttaacaacttcaggtgatgggctggattttatcttgtgagtatctactgaagtattaagtttagatt

SEQ ID NO: 11592 - DNA, 75 bp, Homo sapiens
caacttcaggtgatgggctggattttatcttgtgagtatctactgaagtattaagtttagattttatagtctctg

SEQ ID NO: 11593 - DNA, 73 bp, Homo sapiens
atgggctggattttatcttgtgagtatctactgaagtattaagtttagattttatagtctctggaggtggact

SEQ ID NO: 11594 - DNA, 76 bp, Homo sapiens
gattttatcttgtgagtatctactgaagtattaagtttagattttatagtctctggaggtggacttcgcttatgca

SEQ ID NO: 11595 - DNA, 77 bp, Homo sapiens
ttgtgagtatctactgaagtattaagtttagattttatagtctctggaggtggacttcgcttatgcagcttatcttc

SEQ ID NO: 11596 - DNA, 77 bp, Homo sapiens
tactgaagtattaagtttagattttatagtctctggaggtggacttcgcttatgcagcttatcttccatgacagaaa

SEQ ID NO: 11597 - DNA, 76 bp, Homo sapiens
aagtttagattttatagtctctggaggtggacttcgcttatgcagcttatcttccatgacagaaactgcacttaaa

SEQ ID NO: 11598 - DNA, 79 bp, Homo sapiens
tctggaggtggacttcgcttatgcagcttatcttccatgacagaaactgcacttaaaggagaaatgtaagagacatact

SEQ ID NO: 11599 - DNA, 79 bp, Homo sapiens
ttatgcagcttatcttccatgacagaaactgcacttaaaggagaaatgtaagagacatacttctctttttccatgttca

SEQ ID NO: 11600 - DNA, 78 bp, Homo sapiens
tatcttccatgacagaaactgcacttaaaggagaaatgtaagagacatacttctctttttccatgttcaagtgatcat

SEQ ID NO: 11601 - DNA, 75 bp, Homo sapiens
acagaaactgcacttaaaggagaaatgtaagagacatacttctctttttccatgttcaagtgatcatttcctgaa

SEQ ID NO: 11602 - DNA, 75 bp, Homo sapiens
cacttaaaggagaaatgtaagagacatacttctctttttccatgttcaagtgatcatttcctgaagaagcatttg

SEQ ID NO: 11603 - DNA, 76 bp, Homo sapiens
aatgtaagagacatacttctctttttccatgttcaagtgatcatttcctgaagaagcatttgtaacacttgattgg

SEQ ID NO: 11604 - DNA, 75 bp, Homo sapiens
aagagacatacttctctttttccatgttcaagtgatcatttcctgaagaagcatttgtaacacttgattgggtta

SEQ ID NO: 11605 - DNA, 77 bp, Homo sapiens
atgttcaagtgatcatttcctgaagaagcatttgtaacacttgattgggttagatccactttaactacatcactgac

SEQ ID NO: 11606 - DNA, 77 bp, Homo sapiens
agtgatcatttcctgaagaagcatttgtaacacttgattgggttagatccactttaactacatcactgacccagctc

SEQ ID NO: 11607 - DNA, 75 bp, Homo sapiens
aagaagcatttgtaacacttgattgggttagatccactttaactacatcactgacccagctctggtcagaatctt

SEQ ID NO: 11608 - DNA, 72 bp, Homo sapiens
atttgtaacacttgattgggttagatccactttaactacatcactgacccagctctggtcagaatctttttt

SEQ ID NO: 11609 - DNA, 74 bp, Homo sapiens
acttgattgggttagatccactttaactacatcactgacccagctctggtcagaatctttttttgctgtttcca

SEQ ID NO: 11610 - DNA, 75 bp, Homo sapiens
actttaactacatcactgacccagctctggtcagaatctttttttgctgtttccaagaattttgcatttgcaata

SEQ ID NO: 11611 - DNA, 76 bp, Homo sapiens
actgacccagctctggtcagaatctttttttgctgtttccaagaattttgcatttgcaatagagtgttttgaatca

SEQ ID NO: 11612 - DNA, 76 bp, Homo sapiens
cagctctggtcagaatctttttttgctgtttccaagaattttgcatttgcaatagagtgttttgaatcactaacat

SEQ ID NO: 11613 - DNA, 77 bp, Homo sapiens
ttgctgtttccaagaattttgcatttgcaatagagtgttttgaatcactaacattaggatccattttctgaagtgtc

SEQ ID NO: 11614 - DNA, 76 bp, Homo sapiens
agaattttgcatttgcaatagagtgttttgaatcactaacattaggatccattttctgaagtgtctgaaggccaaa

SEQ ID NO: 11615 - DNA, 75 bp, Homo sapiens
atttgcaatagagtgttttgaatcactaacattaggatccattttctgaagtgtctgaaggccaaaggtacttga

SEQ ID NO: 11616 - DNA, 72 bp, Homo sapiens
atagagtgttttgaatcactaacattaggatccattttctgaagtgtctgaaggccaaaggtacttgagttt

SEQ ID NO: 11617 - DNA, 74 bp, Homo sapiens
ttttgaatcactaacattaggatccattttctgaagtgtctgaaggccaaaggtacttgagttttcctgagcca

SEQ ID NO: 11618 - DNA, 70 bp, Homo sapiens
attaggatccattttctgaagtgtctgaaggccaaaggtacttgagttttcctgagccaccttttctaaa

SEQ ID NO: 11619 - DNA, 70 bp, Homo sapiens
attttctgaagtgtctgaaggccaaaggtacttgagttttcctgagccaccttttctaaattagtgtcat

SEQ ID NO: 11620 - DNA, 70 bp, Homo sapiens
aagtgtctgaaggccaaaggtacttgagttttcctgagccaccttttctaaattagtgtcatttgtaata

SEQ ID NO: 11621 - DNA, 71 bp, Homo sapiens
cttgagttttcctgagccaccttttctaaattagtgtcatttgtaatatcaataacacattttggtgtggg

SEQ ID NO: 11622 - DNA, 72 bp, Homo sapiens
ttttcctgagccaccttttctaaattagtgtcatttgtaatatcaataacacattttggtgtgggtggtctg

SEQ ID NO: 11623 - DNA, 71 bp, Homo sapiens
ccaccttttctaaattagtgtcatttgtaatatcaataacacattttggtgtgggtggtctggatacaaac

SEQ ID NO: 11624 - DNA, 72 bp, Homo sapiens
aattagtgtcatttgtaatatcaataacacattttggtgtgggtggtctggatacaaacttctcctttggta

SEQ ID NO: 11625 - DNA, 73 bp, Homo sapiens
atttgtaatatcaataacacattttggtgtgggtggtctggatacaaacttctcctttggtagcaattccatg

SEQ ID NO: 11626 - DNA, 71 bp, Homo sapiens
aataacacattttggtgtgggtggtctggatacaaacttctcctttggtagcaattccatggtatgtgttt

SEQ ID NO: 11627 - DNA, 72 bp, Homo sapiens
attttggtgtgggtggtctggatacaaacttctcctttggtagcaattccatggtatgtgttttatccatat

SEQ ID NO: 11628 - DNA, 76 bp, Homo sapiens
ggtggtctggatacaaacttctcctttggtagcaattccatggtatgtgttttatccatattgcattcctgaggaa

SEQ ID NO: 11629 - DNA, 76 bp, Homo sapiens
tacaaacttctcctttggtagcaattccatggtatgtgttttatccatattgcattcctgaggaagtaaatcatta

SEQ ID NO: 11630 - DNA, 75 bp, Homo sapiens
acttctcctttggtagcaattccatggtatgtgttttatccatattgcattcctgaggaagtaaatcattagaat

SEQ ID NO: 11631 - DNA, 80 bp, Homo sapiens
tggtagcaattccatggtatgtgttttatccatattgcattcctgaggaagtaaatcattagaattatgatcagaaactg

SEQ ID NO: 11632 - DNA, 80 bp, Homo sapiens
atggtatgtgttttatccatattgcattcctgaggaagtaaatcattagaattatgatcagaaactgtggactgttctga

SEQ ID NO: 11633 - DNA, 82 bp, Homo sapiens
catattgcattcctgaggaagtaaatcattagaattatgatcagaaactgtggactgttctgacgaatgaataatcatatct

SEQ ID NO: 11634 - DNA, 84 bp, Homo sapiens
taaatcattagaattatgatcagaaactgtggactgttctgacgaatgaataatcatatcttcttgaagctgagtgtcaacaga

SEQ ID NO: 11635 - DNA, 80 bp, Homo sapiens
aaactgtggactgttctgacgaatgaataatcatatcttcttgaagctgagtgtcaacagacttccgcttctctgcttct

SEQ ID NO: 11636 - DNA, 80 bp, Homo sapiens
actgttctgacgaatgaataatcatatcttcttgaagctgagtgtcaacagacttccgcttctctgcttcttcatgtttt

SEQ ID NO: 11637 - DNA, 79 bp, Homo sapiens
acgaatgaataatcatatcttcttgaagctgagtgtcaacagacttccgcttctctgcttcttcatgttttttatcttc

SEQ ID NO: 11638 - DNA, 78 bp, Homo sapiens
ataatcatatcttcttgaagctgagtgtcaacagacttccgcttctctgcttcttcatgttttttatcttcctgtatt

SEQ ID NO: 11639 - DNA, 77 bp, Homo sapiens
ttcttgaagctgagtgtcaacagacttccgcttctctgcttcttcatgttttttatcttcctgtatttgatcccagg

SEQ ID NO: 11640 - DNA, 72 bp, Homo sapiens
agacttccgcttctctgcttcttcatgttttttatcttcctgtatttgatcccagggaggctggctattttt

SEQ ID NO: 11641 - DNA, 72 bp, Homo sapiens
ttctctgcttcttcatgttttttatcttcctgtatttgatcccagggaggctggctattttttagggtctct

SEQ ID NO: 11642 - DNA, 72 bp, Homo sapiens
ttcttcatgttttttatcttcctgtatttgatcccagggaggctggctattttttagggtctcttctcctgc

SEQ ID NO: 11643 - DNA, 73 bp, Homo sapiens
tttatcttcctgtatttgatcccagggaggctggctattttttagggtctcttctcctgccttctcattatta

SEQ ID NO: 11644 - DNA, 71 bp, Homo sapiens
tgtatttgatcccagggaggctggctattttttagggtctcttctcctgccttctcattattatggggttt

SEQ ID NO: 11645 - DNA, 69 bp, Homo sapiens
agggaggctggctattttttagggtctcttctcctgccttctcattattatggggttttccttcttctc

SEQ ID NO: 11646 - DNA, 68 bp, Homo sapiens
gctattttttagggtctcttctcctgccttctcattattatggggttttccttcttctccatttattt

SEQ ID NO: 11647 - DNA, 68 bp, Homo sapiens
ttttagggtctcttctcctgccttctcattattatggggttttccttcttctccatttatttttgaag

SEQ ID NO: 11648 - DNA, 72 bp, Homo sapiens
tttttgaagtatttttatttttcaattcattctctggcttctgttctgaggaattatctattattctcttat

SEQ ID NO: 11649 - DNA, 72 bp, Homo sapiens
atttttatttttcaattcattctctggcttctgttctgaggaattatctattattctcttatttgaattttc

SEQ ID NO: 11650 - DNA, 81 bp, Homo sapiens
ttcaattcattctctggcttctgttctgaggaattatctattattctcttatttgaattttctgagtcactgctctcagaa

SEQ ID NO: 11651 - DNA, 79 bp, Homo sapiens
ttcattctctggcttctgttctgaggaattatctattattctcttatttgaattttctgagtcactgctctcagaaaag

SEQ ID NO: 11652 - DNA, 78 bp, Homo sapiens
gcttctgttctgaggaattatctattattctcttatttgaattttctgagtcactgctctcagaaaagtctgaaacat

SEQ ID NO: 11653 - DNA, 78 bp, Homo sapiens
gaggaattatctattattctcttatttgaattttctgagtcactgctctcagaaaagtctgaaacattgtcagttcga

SEQ ID NO: 11654 - DNA, 77 bp, Homo sapiens
ttattctcttatttgaattttctgagtcactgctctcagaaaagtctgaaacattgtcagttcgaagtcttttcata

SEQ ID NO: 11655 - DNA, 76 bp, Homo sapiens
tttctgagtcactgctctcagaaaagtctgaaacattgtcagttcgaagtcttttcatatttagtttcttttcatc

SEQ ID NO: 11656 - DNA, 74 bp, Homo sapiens
tgctctcagaaaagtctgaaacattgtcagttcgaagtcttttcatatttagtttcttttcatcctcctcaggt

SEQ ID NO: 11657 - DNA, 70 bp, Homo sapiens
gaaaagtctgaaacattgtcagttcgaagtcttttcatatttagtttcttttcatcctcctcaggtttcc

SEQ ID NO: 11658 - DNA, 69 bp, Homo sapiens
ctgaaacattgtcagttcgaagtcttttcatatttagtttcttttcatcctcctcaggtttccttcttt

SEQ ID NO: 11659 - DNA, 70 bp, Homo sapiens
gtcagttcgaagtcttttcatatttagtttcttttcatcctcctcaggtttccttcttttattcatcaag

SEQ ID NO: 11660 - DNA, 68 bp, Homo sapiens
gtcttttcatatttagtttcttttcatcctcctcaggtttccttcttttattcatcaagtgtttgttt

SEQ ID NO: 11661 - DNA, 66 bp, Homo sapiens
cctcaggtttccttcttttattcatcaagtgtttgtttttacctttaggattttctgtaggattaa

SEQ ID NO: 11662 - DNA, 66 bp, Homo sapiens
cttttattcatcaagtgtttgtttttacctttaggattttctgtaggattaaagaaagaagagtct

SEQ ID NO: 11663 - DNA, 70 bp, Homo sapiens
aaaaaaaaaagtgggtcctacctcctcgtgatatataatcatatttttcctccttcatcttctcttcatc

SEQ ID NO: 11664 - DNA, 73 bp, Homo sapiens
aaaaagtgggtcctacctcctcgtgatatataatcatatttttcctccttcatcttctcttcatctggtatac

SEQ ID NO: 11665 - DNA, 80 bp, Homo sapiens
tcctacctcctcgtgatatataatcatatttttcctccttcatcttctcttcatctggtatactgctatctgagcccttc

SEQ ID NO: 11666 - DNA, 78 bp, Homo sapiens
atatataatcatatttttcctccttcatcttctcttcatctggtatactgctatctgagcccttcctcttatttggac

SEQ ID NO: 11667 - DNA, 75 bp, Homo sapiens
atatttttcctccttcatcttctcttcatctggtatactgctatctgagcccttcctcttatttggacggatact

SEQ ID NO: 11668 - DNA, 78 bp, Homo sapiens
tccttcatcttctcttcatctggtatactgctatctgagcccttcctcttatttggacggatacttctttgttgctgt

SEQ ID NO: 11669 - DNA, 78 bp, Homo sapiens
atcttctcttcatctggtatactgctatctgagcccttcctcttatttggacggatacttctttgttgctgttgctgg

SEQ ID NO: 11670 - DNA, 77 bp, Homo sapiens
tggtatactgctatctgagcccttcctcttatttggacggatacttctttgttgctgttgctggtgtgtattctgtt

SEQ ID NO: 11671 - DNA, 75 bp, Homo sapiens
ctatctgagcccttcctcttatttggacggatacttctttgttgctgttgctggtgtgtattctgttttggtaca

SEQ ID NO: 11672 - DNA, 74 bp, Homo sapiens
ccttcctcttatttggacggatacttctttgttgctgttgctggtgtgtattctgttttggtacagcagcttgg

SEQ ID NO: 11673 - DNA, 76 bp, Homo sapiens
tcttatttggacggatacttctttgttgctgttgctggtgtgtattctgttttggtacagcagcttgggagttcat

SEQ ID NO: 11674 - DNA, 78 bp, Homo sapiens
atacttctttgttgctgttgctggtgtgtattctgttttggtacagcagcttgggagttcattgctggtctgggacta

SEQ ID NO: 11675 - DNA, 81 bp, Homo sapiens
tgttgctgttgctggtgtgtattctgttttggtacagcagcttgggagttcattgctggtctgggactatttgcttgggca

SEQ ID NO: 11676 - DNA, 78 bp, Homo sapiens
ctggtgtgtattctgttttggtacagcagcttgggagttcattgctggtctgggactatttgcttgggcacgtgtata

SEQ ID NO: 11677 - DNA, 78 bp, Homo sapiens
ttctgttttggtacagcagcttgggagttcattgctggtctgggactatttgcttgggcacgtgtataatggctctaa

SEQ ID NO: 11678 - DNA, 76 bp, Homo sapiens
ttttggtacagcagcttgggagttcattgctggtctgggactatttgcttgggcacgtgtataatggctctaaaaa

SEQ ID NO: 11679 - DNA, 73 bp, Homo sapiens
cttgggagttcattgctggtctgggactatttgcttgggcacgtgtataatggctctaaaaataaccaattaa

SEQ ID NO: 11680 - DNA, 72 bp, Homo sapiens
attgctggtctgggactatttgcttgggcacgtgtataatggctctaaaaataaccaattaacagtaattgt

SEQ ID NO: 11681 - DNA, 70 bp, Homo sapiens
ctgggactatttgcttgggcacgtgtataatggctctaaaaataaccaattaacagtaattgtttactac

SEQ ID NO: 11682 - DNA, 71 bp, Homo sapiens
ctactagcctaaggaaaaatattttacagaaattcatccctaataacatacatacgtgaacagcgttgacg

SEQ ID NO: 11683 - DNA, 73 bp, Homo sapiens
aaaatattttacagaaattcatccctaataacatacatacgtgaacagcgttgacgttttgattggcacgaga

SEQ ID NO: 11684 - DNA, 74 bp, Homo sapiens
attttacagaaattcatccctaataacatacatacgtgaacagcgttgacgttttgattggcacgagacctgcg

SEQ ID NO: 11685 - DNA, 78 bp, Homo sapiens
atccctaataacatacatacgtgaacagcgttgacgttttgattggcacgagacctgcgtcgtgatgtaatgccaata

SEQ ID NO: 11686 - DNA, 78 bp, Homo sapiens
aataacatacatacgtgaacagcgttgacgttttgattggcacgagacctgcgtcgtgatgtaatgccaatattttca

SEQ ID NO: 11687 - DNA, 75 bp, Homo sapiens
atacgtgaacagcgttgacgttttgattggcacgagacctgcgtcgtgatgtaatgccaatattttcacctttta

SEQ ID NO: 11688 - DNA, 75 bp, Homo sapiens
ttgacgttttgattggcacgagacctgcgtcgtgatgtaatgccaatattttcaccttttaacaaagagtgaaca

SEQ ID NO: 11689 - DNA, 78 bp, Homo sapiens
tttgattggcacgagacctgcgtcgtgatgtaatgccaatattttcaccttttaacaaagagtgaacaacatcatcta

SEQ ID NO: 11690 - DNA, 75 bp, Homo sapiens
agacctgcgtcgtgatgtaatgccaatattttcaccttttaacaaagagtgaacaacatcatctagaaaggtcat

SEQ ID NO: 11691 - DNA, 75 bp, Homo sapiens
gtcgtgatgtaatgccaatattttcaccttttaacaaagagtgaacaacatcatctagaaaggtcatttgaacca

SEQ ID NO: 11692 - DNA, 75 bp, Homo sapiens
tgccaatattttcaccttttaacaaagagtgaacaacatcatctagaaaggtcatttgaaccatagaaggatcga

SEQ ID NO: 11693 - DNA, 74 bp, Homo sapiens
ttttcaccttttaacaaagagtgaacaacatcatctagaaaggtcatttgaaccatagaaggatcgacattctg

SEQ ID NO: 11694 - DNA, 76 bp, Homo sapiens
tttaacaaagagtgaacaacatcatctagaaaggtcatttgaaccatagaaggatcgacattctgtggttctagta

SEQ ID NO: 11695 - DNA, 80 bp, Homo sapiens
tgaacaacatcatctagaaaggtcatttgaaccatagaaggatcgacattctgtggttctagtacctaatccatgataca

SEQ ID NO: 11696 - DNA, 75 bp, Homo sapiens
atctagaaaggtcatttgaaccatagaaggatcgacattctgtggttctagtacctaatccatgatacaaaacaa

SEQ ID NO: 11697 - DNA, 72 bp, Homo sapiens
aaaggtcatttgaaccatagaaggatcgacattctgtggttctagtacctaatccatgatacaaaacaaaaa

SEQ ID NO: 11698 - DNA, 73 bp, Homo sapiens
tttgaacttttaaaatctctataaaaatattagtggaactatttacctgatcattcataacgatcatggtgcg

SEQ ID NO: 11699 - DNA, 79 bp, Homo sapiens
taaaatctctataaaaatattagtggaactatttacctgatcattcataacgatcatggtgcgggtgaagagatcatga

SEQ ID NO: 11700 - DNA, 79 bp, Homo sapiens
ataaaaatattagtggaactatttacctgatcattcataacgatcatggtgcgggtgaagagatcatgatgagtaatta

SEQ ID NO: 11701 - DNA, 82 bp, Homo sapiens
aatattagtggaactatttacctgatcattcataacgatcatggtgcgggtgaagagatcatgatgagtaattatgccagta

SEQ ID NO: 11702 - DNA, 80 bp, Homo sapiens
aactatttacctgatcattcataacgatcatggtgcgggtgaagagatcatgatgagtaattatgccagtaaaccactgg

SEQ ID NO: 11703 - DNA, 84 bp, Homo sapiens
tcattcataacgatcatggtgcgggtgaagagatcatgatgagtaattatgccagtaaaccactgggtggcagagtcttgtcta

SEQ ID NO: 11704 - DNA, 82 bp, Homo sapiens
ataacgatcatggtgcgggtgaagagatcatgatgagtaattatgccagtaaaccactgggtggcagagtcttgtctatata

SEQ ID NO: 11705 - DNA, 84 bp, Homo sapiens
tgcgggtgaagagatcatgatgagtaattatgccagtaaaccactgggtggcagagtcttgtctatatactctcactctgtatc

SEQ ID NO: 11706 - DNA, 82 bp, Homo sapiens
aagagatcatgatgagtaattatgccagtaaaccactgggtggcagagtcttgtctatatactctcactctgtatccattta

SEQ ID NO: 11707 - DNA, 78 bp, Homo sapiens
atgagtaattatgccagtaaaccactgggtggcagagtcttgtctatatactctcactctgtatccatttaaggaata

SEQ ID NO: 11708 - DNA, 76 bp, Homo sapiens
attatgccagtaaaccactgggtggcagagtcttgtctatatactctcactctgtatccatttaaggaataaggac

SEQ ID NO: 11709 - DNA, 73 bp, Homo sapiens
taaaccactgggtggcagagtcttgtctatatactctcactctgtatccatttaaggaataaggaccttaaaa

SEQ ID NO: 11710 - DNA, 72 bp, Homo sapiens
ggtggcagagtcttgtctatatactctcactctgtatccatttaaggaataaggaccttaaaaaaaacacaa

SEQ ID NO: 11711 - DNA, 71 bp, Homo sapiens
tcttgtctatatactctcactctgtatccatttaaggaataaggaccttaaaaaaaacacaagaaacagaa

SEQ ID NO: 11712 - DNA, 69 bp, Homo sapiens
atactctcactctgtatccatttaaggaataaggaccttaaaaaaaacacaagaaacagaaacatctta

SEQ ID NO: 11713 - DNA, 70 bp, Homo sapiens
gttgcctagatccaaaaaaatttaatgcataacttcaaaatagttaccttgcataaaaatctcctgaacc

SEQ ID NO: 11714 - DNA, 67 bp, Homo sapiens
ccaaaaaaatttaatgcataacttcaaaatagttaccttgcataaaaatctcctgaaccttttgttc

SEQ ID NO: 11715 - DNA, 69 bp, Homo sapiens
ttaatgcataacttcaaaatagttaccttgcataaaaatctcctgaaccttttgttcctttacccagac

SEQ ID NO: 11716 - DNA, 66 bp, Homo sapiens
acttcaaaatagttaccttgcataaaaatctcctgaaccttttgttcctttacccagactttcact

SEQ ID NO: 11717 - DNA, 69 bp, Homo sapiens
aatagttaccttgcataaaaatctcctgaaccttttgttcctttacccagactttcacttcctcatgaa

SEQ ID NO: 11718 - DNA, 72 bp, Homo sapiens
ttgcataaaaatctcctgaaccttttgttcctttacccagactttcacttcctcatgaagctgcgggttgtc

SEQ ID NO: 11719 - DNA, 71 bp, Homo sapiens
aatctcctgaaccttttgttcctttacccagactttcacttcctcatgaagctgcgggttgtccctgagaa

SEQ ID NO: 11720 - DNA, 69 bp, Homo sapiens
cttttgttcctttacccagactttcacttcctcatgaagctgcgggttgtccctgagaactgggtttag

SEQ ID NO: 11721 - DNA, 74 bp, Homo sapiens
tttacccagactttcacttcctcatgaagctgcgggttgtccctgagaactgggtttaggctgtctatgtcgtc

SEQ ID NO: 11722 - DNA, 76 bp, Homo sapiens
ttcacttcctcatgaagctgcgggttgtccctgagaactgggtttaggctgtctatgtcgtcctagaattatagat

SEQ ID NO: 11723 - DNA, 75 bp, Homo sapiens
ttcctcatgaagctgcgggttgtccctgagaactgggtttaggctgtctatgtcgtcctagaattatagattaaa

SEQ ID NO: 11724 - DNA, 71 bp, Homo sapiens
agctgcgggttgtccctgagaactgggtttaggctgtctatgtcgtcctagaattatagattaaaagaaag

SEQ ID NO: 11725 - DNA, 72 bp, Homo sapiens
tgtccctgagaactgggtttaggctgtctatgtcgtcctagaattatagattaaaagaaaggtccatgttac

SEQ ID NO: 11726 - DNA, 62 bp, Homo sapiens
taaagtttaattaacctttaattttaaaaagtaatctaaaatttcttacctggtagggctga

SEQ ID NO: 11727 - DNA, 65 bp, Homo sapiens
acctttaattttaaaaagtaatctaaaatttcttacctggtagggctgaaaggcactatcttcag

SEQ ID NO: 11728 - DNA, 65 bp, Homo sapiens
attttaaaaagtaatctaaaatttcttacctggtagggctgaaaggcactatcttcagttaaaaa

SEQ ID NO: 11729 - DNA, 71 bp, Homo sapiens
atctaaaatttcttacctggtagggctgaaaggcactatcttcagttaaaaaatccagttgcttatctaca

SEQ ID NO: 11730 - DNA, 70 bp, Homo sapiens
atttcttacctggtagggctgaaaggcactatcttcagttaaaaaatccagttgcttatctacaaggaat

SEQ ID NO: 11731 - DNA, 76 bp, Homo sapiens
gtagggctgaaaggcactatcttcagttaaaaaatccagttgcttatctacaaggaattctactgcagtgactgaa

SEQ ID NO: 11732 - DNA, 75 bp, Homo sapiens
aggcactatcttcagttaaaaaatccagttgcttatctacaaggaattctactgcagtgactgaactgggtatat

SEQ ID NO: 11733 - DNA, 74 bp, Homo sapiens
cttcagttaaaaaatccagttgcttatctacaaggaattctactgcagtgactgaactgggtatatttctttca

SEQ ID NO: 11734 - DNA, 73 bp, Homo sapiens
aaatccagttgcttatctacaaggaattctactgcagtgactgaactgggtatatttctttcaaccagaggtt

SEQ ID NO: 11735 - DNA, 73 bp, Homo sapiens
agttgcttatctacaaggaattctactgcagtgactgaactgggtatatttctttcaaccagaggtttgaaag

SEQ ID NO: 11736 - DNA, 72 bp, Homo sapiens
aaggaattctactgcagtgactgaactgggtatatttctttcaaccagaggtttgaaagtctgccaagaaaa

SEQ ID NO: 11737 - DNA, 71 bp, Homo sapiens
attctactgcagtgactgaactgggtatatttctttcaaccagaggtttgaaagtctgccaagaaaaaaaa

SEQ ID NO: 11738 - DNA, 64 bp, Homo sapiens
gtaaattaagacaaaagaaaaaggaagcagaaaaatacaaaccgtactttgttcttgagaattt

SEQ ID NO: 11739 - DNA, 65 bp, Homo sapiens
gacaaaagaaaaaggaagcagaaaaatacaaaccgtactttgttcttgagaattttaaagtatct

SEQ ID NO: 11740 - DNA, 67 bp, Homo sapiens
aggaagcagaaaaatacaaaccgtactttgttcttgagaattttaaagtatctttaaatctcagaaa

SEQ ID NO: 11741 - DNA, 69 bp, Homo sapiens
gcagaaaaatacaaaccgtactttgttcttgagaattttaaagtatctttaaatctcagaaatccacaa

SEQ ID NO: 11742 - DNA, 67 bp, Homo sapiens
acaaaccgtactttgttcttgagaattttaaagtatctttaaatctcagaaatccacaacaaggctt

SEQ ID NO: 11743 - DNA, 69 bp, Homo sapiens
gttcttgagaattttaaagtatctttaaatctcagaaatccacaacaaggctttaaaggtcagtaagta

SEQ ID NO: 11744 - DNA, 71 bp, Homo sapiens
gagaattttaaagtatctttaaatctcagaaatccacaacaaggctttaaaggtcagtaagtatttgctga

SEQ ID NO: 11745 - DNA, 70 bp, Homo sapiens
aagtatctttaaatctcagaaatccacaacaaggctttaaaggtcagtaagtatttgctgaaatttctat

SEQ ID NO: 11746 - DNA, 71 bp, Homo sapiens
ctcagaaatccacaacaaggctttaaaggtcagtaagtatttgctgaaatttctattttgttctggaagag

SEQ ID NO: 11747 - DNA, 71 bp, Homo sapiens
ccacaacaaggctttaaaggtcagtaagtatttgctgaaatttctattttgttctggaagagtatctagtg

SEQ ID NO: 11748 - DNA, 71 bp, Homo sapiens
gctttaaaggtcagtaagtatttgctgaaatttctattttgttctggaagagtatctagtgtaaatacttc

SEQ ID NO: 11749 - DNA, 71 bp, Homo sapiens
ggtcagtaagtatttgctgaaatttctattttgttctggaagagtatctagtgtaaatacttctttagtct

SEQ ID NO: 11750 - DNA, 74 bp, Homo sapiens
ttgctgaaatttctattttgttctggaagagtatctagtgtaaatacttctttagtcttcaaaaatcacaggca

SEQ ID NO: 11751 - DNA, 75 bp, Homo sapiens
tctattttgttctggaagagtatctagtgtaaatacttctttagtcttcaaaaatcacaggcaaatggctctcaa

SEQ ID NO: 11752 - DNA, 74 bp, Homo sapiens
ttgttctggaagagtatctagtgtaaatacttctttagtcttcaaaaatcacaggcaaatggctctcaaaccaa

SEQ ID NO: 11753 - DNA, 75 bp, Homo sapiens
aagagtatctagtgtaaatacttctttagtcttcaaaaatcacaggcaaatggctctcaaaccaagcatttctga

SEQ ID NO: 11754 - DNA, 78 bp, Homo sapiens
agtgtaaatacttctttagtcttcaaaaatcacaggcaaatggctctcaaaccaagcatttctgagctcacttgcagc

SEQ ID NO: 11755 - DNA, 81 bp, Homo sapiens
ttctttagtcttcaaaaatcacaggcaaatggctctcaaaccaagcatttctgagctcacttgcagcggcgtcattgtata

SEQ ID NO: 11756 - DNA, 79 bp, Homo sapiens
aaaaatcacaggcaaatggctctcaaaccaagcatttctgagctcacttgcagcggcgtcattgtataggaagaaaagc

SEQ ID NO: 11757 - DNA, 81 bp, Homo sapiens
gcaaatggctctcaaaccaagcatttctgagctcacttgcagcggcgtcattgtataggaagaaaagccaagaccacagaa

SEQ ID NO: 11758 - DNA, 80 bp, Homo sapiens
tctcaaaccaagcatttctgagctcacttgcagcggcgtcattgtataggaagaaaagccaagaccacagaacgaagcag

SEQ ID NO: 11759 - DNA, 80 bp, Homo sapiens
aagcatttctgagctcacttgcagcggcgtcattgtataggaagaaaagccaagaccacagaacgaagcaggagctgtaa

SEQ ID NO: 11760 - DNA, 77 bp, Homo sapiens
agctcacttgcagcggcgtcattgtataggaagaaaagccaagaccacagaacgaagcaggagctgtaacctaacaa

SEQ ID NO: 11761 - DNA, 74 bp, Homo sapiens
agcggcgtcattgtataggaagaaaagccaagaccacagaacgaagcaggagctgtaacctaacaagtctccaa

SEQ ID NO: 11762 - DNA, 73 bp, Homo sapiens
attgtataggaagaaaagccaagaccacagaacgaagcaggagctgtaacctaacaagtctccaacgagcaaa

SEQ ID NO: 11763 - DNA, 73 bp, Homo sapiens
agaaaagccaagaccacagaacgaagcaggagctgtaacctaacaagtctccaacgagcaaatgacgattttc

SEQ ID NO: 11764 - DNA, 77 bp, Homo sapiens
agccaagaccacagaacgaagcaggagctgtaacctaacaagtctccaacgagcaaatgacgattttctgtctgctc

SEQ ID NO: 11765 - DNA, 81 bp, Homo sapiens
agctgtaacctaacaagtctccaacgagcaaatgacgattttctgtctgctctggctcagccctggcagtgatgaggatta

SEQ ID NO: 11766 - DNA, 80 bp, Homo sapiens
taacctaacaagtctccaacgagcaaatgacgattttctgtctgctctggctcagccctggcagtgatgaggattacaac

SEQ ID NO: 11767 - DNA, 83 bp, Homo sapiens
agtctccaacgagcaaatgacgattttctgtctgctctggctcagccctggcagtgatgaggattacaactcgctctttgtca

SEQ ID NO: 11768 - DNA, 85 bp, Homo sapiens
aatgacgattttctgtctgctctggctcagccctggcagtgatgaggattacaactcgctctttgtcatcagcactgtggtgtta

SEQ ID NO: 11769 - DNA, 84 bp, Homo sapiens
tttctgtctgctctggctcagccctggcagtgatgaggattacaactcgctctttgtcatcagcactgtggtgttaacgactaa

SEQ ID NO: 11770 - DNA, 84 bp, Homo sapiens
tctggctcagccctggcagtgatgaggattacaactcgctctttgtcatcagcactgtggtgttaacgactaagaaatcctgca

SEQ ID NO: 11771 - DNA, 82 bp, Homo sapiens
agccctggcagtgatgaggattacaactcgctctttgtcatcagcactgtggtgttaacgactaagaaatcctgcagctgaa

SEQ ID NO: 11772 - DNA, 84 bp, Homo sapiens
agtgatgaggattacaactcgctctttgtcatcagcactgtggtgttaacgactaagaaatcctgcagctgaagcactactgca

SEQ ID NO: 11773 - DNA, 82 bp, Homo sapiens
attacaactcgctctttgtcatcagcactgtggtgttaacgactaagaaatcctgcagctgaagcactactgcatcctccga

SEQ ID NO: 11774 - DNA, 83 bp, Homo sapiens
ctttgtcatcagcactgtggtgttaacgactaagaaatcctgcagctgaagcactactgcatcctccgatctgggtcaggata

SEQ ID NO: 11775 - DNA, 80 bp, Homo sapiens
tgtggtgttaacgactaagaaatcctgcagctgaagcactactgcatcctccgatctgggtcaggataatttctctcgag

SEQ ID NO: 11776 - DNA, 80 bp, Homo sapiens
actaagaaatcctgcagctgaagcactactgcatcctccgatctgggtcaggataatttctctcgaggtcgcttacataa

SEQ ID NO: 11777 - DNA, 82 bp, Homo sapiens
tgcagctgaagcactactgcatcctccgatctgggtcaggataatttctctcgaggtcgcttacataaccagtaagatactc

SEQ ID NO: 11778 - DNA, 78 bp, Homo sapiens
gcactactgcatcctccgatctgggtcaggataatttctctcgaggtcgcttacataaccagtaagatactccaaata

SEQ ID NO: 11779 - DNA, 74 bp, Homo sapiens
atcctccgatctgggtcaggataatttctctcgaggtcgcttacataaccagtaagatactccaaataaagaga

SEQ ID NO: 11780 - DNA, 75 bp, Homo sapiens
atctgggtcaggataatttctctcgaggtcgcttacataaccagtaagatactccaaataaagagaacagccatc

SEQ ID NO: 11781 - DNA, 77 bp, Homo sapiens
ataatttctctcgaggtcgcttacataaccagtaagatactccaaataaagagaacagccatccatcagctggagaa

SEQ ID NO: 11782 - DNA, 76 bp, Homo sapiens
ttacataaccagtaagatactccaaataaagagaacagccatccatcagctggagaaagcctttcccactgtactc

SEQ ID NO: 11783 - DNA, 78 bp, Homo sapiens
agtaagatactccaaataaagagaacagccatccatcagctggagaaagcctttcccactgtactctgtctgcgtgga

SEQ ID NO: 11784 - DNA, 78 bp, Homo sapiens
atactccaaataaagagaacagccatccatcagctggagaaagcctttcccactgtactctgtctgcgtggaaacaca

SEQ ID NO: 11785 - DNA, 80 bp, Homo sapiens
ataaagagaacagccatccatcagctggagaaagcctttcccactgtactctgtctgcgtggaaacacagtgcagtagct

SEQ ID NO: 11786 - DNA, 82 bp, Homo sapiens
atccatcagctggagaaagcctttcccactgtactctgtctgcgtggaaacacagtgcagtagcttccaacagtgcagacac

SEQ ID NO: 11787 - DNA, 79 bp, Homo sapiens
ctttcccactgtactctgtctgcgtggaaacacagtgcagtagcttccaacagtgcagacacccaaatgagaacgagta

SEQ ID NO: 11788 - DNA, 80 bp, Homo sapiens
ctgtactctgtctgcgtggaaacacagtgcagtagcttccaacagtgcagacacccaaatgagaacgagtacttggctta

SEQ ID NO: 11789 - DNA, 78 bp, Homo sapiens
aaacacagtgcagtagcttccaacagtgcagacacccaaatgagaacgagtacttggcttagggcacactgagagaag

SEQ ID NO: 11790 - DNA, 76 bp, Homo sapiens
agtagcttccaacagtgcagacacccaaatgagaacgagtacttggcttagggcacactgagagaagggaagaggc

SEQ ID NO: 11791 - DNA, 72 bp, Homo sapiens
ttgttgttgttctttgttttaaacgaacaaatgaaaatgcttaatgaaacaggaatagatcttaccaatgca

SEQ ID NO: 11792 - DNA, 74 bp, Homo sapiens
tctttgttttaaacgaacaaatgaaaatgcttaatgaaacaggaatagatcttaccaatgcaggccactgaatc

SEQ ID NO: 11793 - DNA, 75 bp, Homo sapiens
ttttaaacgaacaaatgaaaatgcttaatgaaacaggaatagatcttaccaatgcaggccactgaatctgtttgc

SEQ ID NO: 11794 - DNA, 77 bp, Homo sapiens
aacaaatgaaaatgcttaatgaaacaggaatagatcttaccaatgcaggccactgaatctgtttgctctttgatccc

SEQ ID NO: 11795 - DNA, 80 bp, Homo sapiens
aatgcttaatgaaacaggaatagatcttaccaatgcaggccactgaatctgtttgctctttgatccctgagtctggctag

SEQ ID NO: 11796 - DNA, 77 bp, Homo sapiens
aggaatagatcttaccaatgcaggccactgaatctgtttgctctttgatccctgagtctggctagggtcattccttt

SEQ ID NO: 11797 - DNA, 79 bp, Homo sapiens
tagatcttaccaatgcaggccactgaatctgtttgctctttgatccctgagtctggctagggtcattccttttggccca

SEQ ID NO: 11798 - DNA, 77 bp, Homo sapiens
aatgcaggccactgaatctgtttgctctttgatccctgagtctggctagggtcattccttttggcccagattaagtg

SEQ ID NO: 11799 - DNA, 74 bp, Homo sapiens
aatctgtttgctctttgatccctgagtctggctagggtcattccttttggcccagattaagtggtattccacca

SEQ ID NO: 11800 - DNA, 73 bp, Homo sapiens
tttgctctttgatccctgagtctggctagggtcattccttttggcccagattaagtggtattccaccaagaaa

SEQ ID NO: 11801 - DNA, 70 bp, Homo sapiens
atccctgagtctggctagggtcattccttttggcccagattaagtggtattccaccaagaaagttgaaaa

SEQ ID NO: 11802 - DNA, 70 bp, Homo sapiens
tggctagggtcattccttttggcccagattaagtggtattccaccaagaaagttgaaaaatcttcataaa

SEQ ID NO: 11803 - DNA, 68 bp, Homo sapiens
ggtcattccttttggcccagattaagtggtattccaccaagaaagttgaaaaatcttcataaacttta

SEQ ID NO: 11804 - DNA, 68 bp, Homo sapiens
tttggcccagattaagtggtattccaccaagaaagttgaaaaatcttcataaactttaacccactctc

SEQ ID NO: 11805 - DNA, 68 bp, Homo sapiens
gtggtattccaccaagaaagttgaaaaatcttcataaactttaacccactctcgtttatcccattcaa

SEQ ID NO: 11806 - DNA, 70 bp, Homo sapiens
ccaccaagaaagttgaaaaatcttcataaactttaacccactctcgtttatcccattcaagatcatcaaa

SEQ ID NO: 11807 - DNA, 72 bp, Homo sapiens
gttgaaaaatcttcataaactttaacccactctcgtttatcccattcaagatcatcaaattccacatacacc

SEQ ID NO: 11808 - DNA, 73 bp, Homo sapiens
cttcataaactttaacccactctcgtttatcccattcaagatcatcaaattccacatacacctatgaaaacaa

SEQ ID NO: 11809 - DNA, 70 bp, Homo sapiens
aaactttaacccactctcgtttatcccattcaagatcatcaaattccacatacacctatgaaaacaaaaa

SEQ ID NO: 11810 - DNA, 73 bp, Homo sapiens
ccactctcgtttatcccattcaagatcatcaaattccacatacacctatgaaaacaaaaacacaaaattcaat

SEQ ID NO: 11811 - DNA, 77 bp, Homo sapiens
attcttttgcgctggaagcagtcttctcatcacttatatttttatcctaattctgccacccatcttctgctccctta

SEQ ID NO: 11812 - DNA, 79 bp, Homo sapiens
tttgcgctggaagcagtcttctcatcacttatatttttatcctaattctgccacccatcttctgctcccttacacctga

SEQ ID NO: 11813 - DNA, 75 bp, Homo sapiens
agtcttctcatcacttatatttttatcctaattctgccacccatcttctgctcccttacacctgaagagtttcca

SEQ ID NO: 11814 - DNA, 72 bp, Homo sapiens
cacttatatttttatcctaattctgccacccatcttctgctcccttacacctgaagagtttccatttccact

SEQ ID NO: 11815 - DNA, 71 bp, Homo sapiens
atatttttatcctaattctgccacccatcttctgctcccttacacctgaagagtttccatttccacttatt

SEQ ID NO: 11816 - DNA, 76 bp, Homo sapiens
taattctgccacccatcttctgctcccttacacctgaagagtttccatttccacttatttgaatcatggttgctct

SEQ ID NO: 11817 - DNA, 77 bp, Homo sapiens
catcttctgctcccttacacctgaagagtttccatttccacttatttgaatcatggttgctcttttggcctagctca

SEQ ID NO: 11818 - DNA, 73 bp, Homo sapiens
tcccttacacctgaagagtttccatttccacttatttgaatcatggttgctcttttggcctagctcaagttct

SEQ ID NO: 11819 - DNA, 76 bp, Homo sapiens
ctgaagagtttccatttccacttatttgaatcatggttgctcttttggcctagctcaagttcttccatgatgttta

SEQ ID NO: 11820 - DNA, 75 bp, Homo sapiens
agtttccatttccacttatttgaatcatggttgctcttttggcctagctcaagttcttccatgatgtttacatcc

SEQ ID NO: 11821 - DNA, 74 bp, Homo sapiens
acttatttgaatcatggttgctcttttggcctagctcaagttcttccatgatgtttacatcccccaacttcaac

SEQ ID NO: 11822 - DNA, 75 bp, Homo sapiens
ttgaatcatggttgctcttttggcctagctcaagttcttccatgatgtttacatcccccaacttcaactccaact

SEQ ID NO: 11823 - DNA, 70 bp, Homo sapiens
cgggtgcgggcgcggcaggggaaaaggggggcgctgactctcttaccgccaggtccggattgcggctgtc

SEQ ID NO: 11824 - DNA, 72 bp, Homo sapiens
gggcgcggcaggggaaaaggggggcgctgactctcttaccgccaggtccggattgcggctgtccctgtgtga

SEQ ID NO: 11825 - DNA, 74 bp, Homo sapiens
gaaaaggggggcgctgactctcttaccgccaggtccggattgcggctgtccctgtgtgacacggctcggatgac

SEQ ID NO: 11826 - DNA, 77 bp, Homo sapiens
ggcgctgactctcttaccgccaggtccggattgcggctgtccctgtgtgacacggctcggatgacccccgctcgcca

SEQ ID NO: 11827 - DNA, 75 bp, Homo sapiens
actctcttaccgccaggtccggattgcggctgtccctgtgtgacacggctcggatgacccccgctcgccagcttc

SEQ ID NO: 11828 - DNA, 76 bp, Homo sapiens
ccaggtccggattgcggctgtccctgtgtgacacggctcggatgacccccgctcgccagcttcgccagccgcgtcc

SEQ ID NO: 11829 - DNA, 78 bp, Homo sapiens
cggattgcggctgtccctgtgtgacacggctcggatgacccccgctcgccagcttcgccagccgcgtccgctctccca

SEQ ID NO: 11830 - DNA, 77 bp, Homo sapiens
tccctgtgtgacacggctcggatgacccccgctcgccagcttcgccagccgcgtccgctctcccagcgctccgaacg

SEQ ID NO: 11831 - DNA, 78 bp, Homo sapiens
tgacacggctcggatgacccccgctcgccagcttcgccagccgcgtccgctctcccagcgctccgaacgtgcctcgtc

SEQ ID NO: 11832 - DNA, 76 bp, Homo sapiens
atgacccccgctcgccagcttcgccagccgcgtccgctctcccagcgctccgaacgtgcctcgtcgccgaccgcca

SEQ ID NO: 11833 - DNA, 78 bp, Homo sapiens
cgctcgccagcttcgccagccgcgtccgctctcccagcgctccgaacgtgcctcgtcgccgaccgccacacacaggaa

SEQ ID NO: 11834 - DNA, 75 bp, Homo sapiens
cttcgccagccgcgtccgctctcccagcgctccgaacgtgcctcgtcgccgaccgccacacacaggaaccgctta

SEQ ID NO: 11835 - DNA, 75 bp, Homo sapiens
gaacgtgcctcgtcgccgaccgccacacacaggaaccgcttacccaccagctctgcccgcgtctctaccgccata

SEQ ID NO: 11836 - DNA, 78 bp, Homo sapiens
tgcctcgtcgccgaccgccacacacaggaaccgcttacccaccagctctgcccgcgtctctaccgccatagctgtcgc

SEQ ID NO: 11837 - DNA, 77 bp, Homo sapiens
accgccacacacaggaaccgcttacccaccagctctgcccgcgtctctaccgccatagctgtcgctgccgaagcggc

SEQ ID NO: 11838 - DNA, 78 bp, Homo sapiens
acacaggaaccgcttacccaccagctctgcccgcgtctctaccgccatagctgtcgctgccgaagcggccgctgcctc

SEQ ID NO: 11839 - DNA, 80 bp, Homo sapiens
tacccaccagctctgcccgcgtctctaccgccatagctgtcgctgccgaagcggccgctgcctcctccagtgcgagggaa

SEQ ID NO: 11840 - DNA, 79 bp, Homo sapiens
ctctgcccgcgtctctaccgccatagctgtcgctgccgaagcggccgctgcctcctccagtgcgagggaaccgatgaaa

SEQ ID NO: 11841 - DNA, 78 bp, Homo sapiens
cgtctctaccgccatagctgtcgctgccgaagcggccgctgcctcctccagtgcgagggaaccgatgaaacctcactc

SEQ ID NO: 11842 - DNA, 77 bp, Homo sapiens
taccgccatagctgtcgctgccgaagcggccgctgcctcctccagtgcgagggaaccgatgaaacctcactcctacc

SEQ ID NO: 11843 - DNA, 80 bp, Homo sapiens
tgtcgctgccgaagcggccgctgcctcctccagtgcgagggaaccgatgaaacctcactcctaccggccgctcatgctga

SEQ ID NO: 11844 - DNA, 77 bp, Homo sapiens
ccgaagcggccgctgcctcctccagtgcgagggaaccgatgaaacctcactcctaccggccgctcatgctgaggaga

SEQ ID NO: 11845 - DNA, 75 bp, Homo sapiens
cctcctccagtgcgagggaaccgatgaaacctcactcctaccggccgctcatgctgaggagagcggaccgggaca

SEQ ID NO: 11846 - DNA, 77 bp, Homo sapiens
agtgcgagggaaccgatgaaacctcactcctaccggccgctcatgctgaggagagcggaccgggacacagcagcgga

SEQ ID NO: 11847 - DNA, 74 bp, Homo sapiens
aaccgatgaaacctcactcctaccggccgctcatgctgaggagagcggaccgggacacagcagcggacccgaaa

SEQ ID NO: 11848 - DNA, 76 bp, Homo sapiens
aaacctcactcctaccggccgctcatgctgaggagagcggaccgggacacagcagcggacccgaaagagcgcagac

SEQ ID NO: 11849 - DNA, 76 bp, Homo sapiens
atgctgaggagagcggaccgggacacagcagcggacccgaaagagcgcagactcgggacgaaccggccgctctgcc

SEQ ID NO: 11850 - DNA, 72 bp, Homo sapiens
aggagagcggaccgggacacagcagcggacccgaaagagcgcagactcgggacgaaccggccgctctgcccc

SEQ ID NO: 11851 - DNA, 72 bp, Homo sapiens
agcagcggacccgaaagagcgcagactcgggacgaaccggccgctctgccccggacacagcgacctcgggcc

SEQ ID NO: 11852 - DNA, 70 bp, Homo sapiens
aaagagcgcagactcgggacgaaccggccgctctgccccggacacagcgacctcgggccctccccgcaaa

SEQ ID NO: 11853 - DNA, 67 bp, Homo sapiens
actcgggacgaaccggccgctctgccccggacacagcgacctcgggccctccccgcaaacactcctt

SEQ ID NO: 11854 - DNA, 68 bp, Homo sapiens
acgaaccggccgctctgccccggacacagcgacctcgggccctccccgcaaacactcctttggactcc

SEQ ID NO: 11855 - DNA, 74 bp, Homo sapiens
tctgccccggacacagcgacctcgggccctccccgcaaacactcctttggactcccagattcgcagccttgtgc

SEQ ID NO: 11856 - DNA, 78 bp, Homo sapiens
acacagcgacctcgggccctccccgcaaacactcctttggactcccagattcgcagccttgtgctgcagcgccacaca

SEQ ID NO: 11857 - DNA, 75 bp, Homo sapiens
ctcgggccctccccgcaaacactcctttggactcccagattcgcagccttgtgctgcagcgccacacaagaaaac

SEQ ID NO: 11858 - DNA, 76 bp, Homo sapiens
ctccccgcaaacactcctttggactcccagattcgcagccttgtgctgcagcgccacacaagaaaactgaaacaaa

SEQ ID NO: 11859 - DNA, 74 bp, Homo sapiens
aaacactcctttggactcccagattcgcagccttgtgctgcagcgccacacaagaaaactgaaacaaaacccaa

SEQ ID NO: 11860 - DNA, 75 bp, Homo sapiens
actcccagattcgcagccttgtgctgcagcgccacacaagaaaactgaaacaaaacccaacgcggccgtcgaaga

SEQ ID NO: 11861 - DNA, 73 bp, Homo sapiens
attcgcagccttgtgctgcagcgccacacaagaaaactgaaacaaaacccaacgcggccgtcgaagaccccga

SEQ ID NO: 11862 - DNA, 73 bp, Homo sapiens
cttgtgctgcagcgccacacaagaaaactgaaacaaaacccaacgcggccgtcgaagaccccgaggcagccca

SEQ ID NO: 11863 - DNA, 69 bp, Homo sapiens
agcgccacacaagaaaactgaaacaaaacccaacgcggccgtcgaagaccccgaggcagcccagccgcc

SEQ ID NO: 11864 - DNA, 67 bp, Homo sapiens
acaagaaaactgaaacaaaacccaacgcggccgtcgaagaccccgaggcagcccagccgccgccacc

SEQ ID NO: 11865 - DNA, 72 bp, Homo sapiens
aacgcggccgtcgaagaccccgaggcagcccagccgccgccaccgcgccgcggccagtactgctccgtctcc

SEQ ID NO: 11866 - DNA, 71 bp, Homo sapiens
ccgtcgaagaccccgaggcagcccagccgccgccaccgcgccgcggccagtactgctccgtctccctcccc

SEQ ID NO: 11867 - DNA, 78 bp, Homo sapiens
tccagcgaaggcagagccccagcttcactccctgaggtctgtcctggggagacactgctgctccggggggctgacctg

SEQ ID NO: 11868 - DNA, 75 bp, Homo sapiens
aggcagagccccagcttcactccctgaggtctgtcctggggagacactgctgctccggggggctgacctggcggg

SEQ ID NO: 11869 - DNA, 76 bp, Homo sapiens
ttcactccctgaggtctgtcctggggagacactgctgctccggggggctgacctggcggggagtggccgcgcagtc

SEQ ID NO: 11870 - DNA, 77 bp, Homo sapiens
tccctgaggtctgtcctggggagacactgctgctccggggggctgacctggcggggagtggccgcgcagtctgctcc

SEQ ID NO: 11871 - DNA, 77 bp, Homo sapiens
ctggggagacactgctgctccggggggctgacctggcggggagtggccgcgcagtctgctccggcgccgctttgtgc

SEQ ID NO: 11872 - DNA, 79 bp, Homo sapiens
agacactgctgctccggggggctgacctggcggggagtggccgcgcagtctgctccggcgccgctttgtgcgcgcagcc

SEQ ID NO: 11873 - DNA, 78 bp, Homo sapiens
tgctccggggggctgacctggcggggagtggccgcgcagtctgctccggcgccgctttgtgcgcgcagccgctggccc

SEQ ID NO: 11874 - DNA, 77 bp, Homo sapiens
tgacctggcggggagtggccgcgcagtctgctccggcgccgctttgtgcgcgcagccgctggcccctctactcccgg

SEQ ID NO: 11875 - DNA, 76 bp, Homo sapiens
cggggagtggccgcgcagtctgctccggcgccgctttgtgcgcgcagccgctggcccctctactcccgggtctgcc

SEQ ID NO: 11876 - DNA, 74 bp, Homo sapiens
cgcagtctgctccggcgccgctttgtgcgcgcagccgctggcccctctactcccgggtctgccccccgggacac

SEQ ID NO: 11877 - DNA, 72 bp, Homo sapiens
tgctccggcgccgctttgtgcgcgcagccgctggcccctctactcccgggtctgccccccgggacacccctc

SEQ ID NO: 11878 - DNA, 71 bp, Homo sapiens
ctttgtgcgcgcagccgctggcccctctactcccgggtctgccccccgggacacccctctgcctcgcccaa

SEQ ID NO: 11879 - DNA, 72 bp, Homo sapiens
cagccgctggcccctctactcccgggtctgccccccgggacacccctctgcctcgcccaagtcatgcagccc

SEQ ID NO: 11880 - DNA, 70 bp, Homo sapiens
cccctctactcccgggtctgccccccgggacacccctctgcctcgcccaagtcatgcagccctacctgcc

SEQ ID NO: 11881 - DNA, 72 bp, Homo sapiens
ctactcccgggtctgccccccgggacacccctctgcctcgcccaagtcatgcagccctacctgcctctccac

SEQ ID NO: 11882 - DNA, 74 bp, Homo sapiens
gtctgccccccgggacacccctctgcctcgcccaagtcatgcagccctacctgcctctccactgtggacctttg

SEQ ID NO: 11883 - DNA, 75 bp, Homo sapiens
acacccctctgcctcgcccaagtcatgcagccctacctgcctctccactgtggacctttgggaaccgactcctca

SEQ ID NO: 11884 - DNA, 75 bp, Homo sapiens
ctctgcctcgcccaagtcatgcagccctacctgcctctccactgtggacctttgggaaccgactcctcacctcgg

SEQ ID NO: 11885 - DNA, 71 bp, Homo sapiens
cctacctgcctctccactgtggacctttgggaaccgactcctcacctcgggggctcgggccttgactgtgc

SEQ ID NO: 11886 - DNA, 71 bp, Homo sapiens
tctccactgtggacctttgggaaccgactcctcacctcgggggctcgggccttgactgtgctgggagccgg

SEQ ID NO: 11887 - DNA, 69 bp, Homo sapiens
actgtggacctttgggaaccgactcctcacctcgggggctcgggccttgactgtgctgggagccggtag

SEQ ID NO: 11888 - DNA, 70 bp, Homo sapiens
tttgggaaccgactcctcacctcgggggctcgggccttgactgtgctgggagccggtaggcgtcctccgc

SEQ ID NO: 11889 - DNA, 70 bp, Homo sapiens
actcctcacctcgggggctcgggccttgactgtgctgggagccggtaggcgtcctccgcgacccgcccgc

SEQ ID NO: 11890 - DNA, 71 bp, Homo sapiens
gggctcgggccttgactgtgctgggagccggtaggcgtcctccgcgacccgcccgcgcccctcgcgcccgc

SEQ ID NO: 11891 - DNA, 69 bp, Homo sapiens
gggccttgactgtgctgggagccggtaggcgtcctccgcgacccgcccgcgcccctcgcgcccgccggg

SEQ ID NO: 11892 - DNA, 67 bp, Homo sapiens
ctgtgctgggagccggtaggcgtcctccgcgacccgcccgcgcccctcgcgcccgccggggccccgg

SEQ ID NO: 11893 - DNA, 66 bp, Homo sapiens
gtaggcgtcctccgcgacccgcccgcgcccctcgcgcccgccggggccccgggctccaaagttgtg

SEQ ID NO: 11894 - DNA, 65 bp, Homo sapiens
cgtcctccgcgacccgcccgcgcccctcgcgcccgccggggccccgggctccaaagttgtgggga

SEQ ID NO: 11895 - DNA, 65 bp, Homo sapiens
ccctcgcgcccgccggggccccgggctccaaagttgtggggaccggcgcgagttggaaagtttgc

SEQ ID NO: 11896 - DNA, 64 bp, Homo sapiens
ccggggccccgggctccaaagttgtggggaccggcgcgagttggaaagtttgcccgagggctgg

SEQ ID NO: 11897 - DNA, 69 bp, Homo sapiens
cccgggctccaaagttgtggggaccggcgcgagttggaaagtttgcccgagggctggtgcaggcttgga

SEQ ID NO: 11898 - DNA, 69 bp, Homo sapiens
aaagttgtggggaccggcgcgagttggaaagtttgcccgagggctggtgcaggcttggagctgggggcc

SEQ ID NO: 11899 - DNA, 73 bp, Homo sapiens
accggcgcgagttggaaagtttgcccgagggctggtgcaggcttggagctgggggccgtgcgctgccctggga

SEQ ID NO: 11900 - DNA, 73 bp, Homo sapiens
agttggaaagtttgcccgagggctggtgcaggcttggagctgggggccgtgcgctgccctgggaatgtgaccc

SEQ ID NO: 11901 - DNA, 74 bp, Homo sapiens
ctggtgcaggcttggagctgggggccgtgcgctgccctgggaatgtgacccggccagcggtgagttggggccgg

SEQ ID NO: 11902 - DNA, 72 bp, Homo sapiens
agctgggggccgtgcgctgccctgggaatgtgacccggccagcggtgagttggggccggggcagagggcagg

SEQ ID NO: 11903 - DNA, 77 bp, Homo sapiens
aatgcataggaaaaagactcacttcagtgtattctgttgttatttcagaccaaaaccttgtgtgactgagctgaaga

SEQ ID NO: 11904 - DNA, 79 bp, Homo sapiens
aaaaagactcacttcagtgtattctgttgttatttcagaccaaaaccttgtgtgactgagctgaagagcagtgcatcca

SEQ ID NO: 11905 - DNA, 82 bp, Homo sapiens
cttcagtgtattctgttgttatttcagaccaaaaccttgtgtgactgagctgaagagcagtgcatccagattctcctcagaa

SEQ ID NO: 11906 - DNA, 81 bp, Homo sapiens
ttctgttgttatttcagaccaaaaccttgtgtgactgagctgaagagcagtgcatccagattctcctcagaagtgagactt

SEQ ID NO: 11907 - DNA, 81 bp, Homo sapiens
tgttatttcagaccaaaaccttgtgtgactgagctgaagagcagtgcatccagattctcctcagaagtgagactttccaaa

SEQ ID NO: 11908 - DNA, 80 bp, Homo sapiens
aaaaccttgtgtgactgagctgaagagcagtgcatccagattctcctcagaagtgagactttccaaaggaccaatgactc

SEQ ID NO: 11909 - DNA, 84 bp, Homo sapiens
ttgtgtgactgagctgaagagcagtgcatccagattctcctcagaagtgagactttccaaaggaccaatgactctgtttcctgc

SEQ ID NO: 11910 - DNA, 80 bp, Homo sapiens
tgaagagcagtgcatccagattctcctcagaagtgagactttccaaaggaccaatgactctgtttcctgcgccctttcat

SEQ ID NO: 11911 - DNA, 75 bp, Homo sapiens
gtgcatccagattctcctcagaagtgagactttccaaaggaccaatgactctgtttcctgcgccctttcattttt

SEQ ID NO: 11912 - DNA, 72 bp, Homo sapiens
agattctcctcagaagtgagactttccaaaggaccaatgactctgtttcctgcgccctttcattttttccta

SEQ ID NO: 11913 - DNA, 72 bp, Homo sapiens
aagtgagactttccaaaggaccaatgactctgtttcctgcgccctttcattttttcctactctgtagctatg

SEQ ID NO: 11914 - DNA, 73 bp, Homo sapiens
actttccaaaggaccaatgactctgtttcctgcgccctttcattttttcctactctgtagctatgtctcgatc

SEQ ID NO: 11915 - DNA, 76 bp, Homo sapiens
aggaccaatgactctgtttcctgcgccctttcattttttcctactctgtagctatgtctcgatcccgccatgcaag

SEQ ID NO: 11916 - DNA, 77 bp, Homo sapiens
tctgtttcctgcgccctttcattttttcctactctgtagctatgtctcgatcccgccatgcaaggccttccagatta

SEQ ID NO: 11917 - DNA, 75 bp, Homo sapiens
ccctttcattttttcctactctgtagctatgtctcgatcccgccatgcaaggccttccagattagtcaggaagga

SEQ ID NO: 11918 - DNA, 77 bp, Homo sapiens
ttttcctactctgtagctatgtctcgatcccgccatgcaaggccttccagattagtcaggaaggaagatgtaaacaa

SEQ ID NO: 11919 - DNA, 76 bp, Homo sapiens
ctactctgtagctatgtctcgatcccgccatgcaaggccttccagattagtcaggaaggaagatgtaaacaaaaaa

SEQ ID NO: 11920 - DNA, 72 bp, Homo sapiens
ctatgtctcgatcccgccatgcaaggccttccagattagtcaggaaggaagatgtaaacaaaaaaaagaaaa

SEQ ID NO: 11921 - DNA, 70 bp, Homo sapiens
aaagaaaaacagccaactacgaaagacaaccaagggagccaacaaaaatgtggcatcagtcaagacttta

SEQ ID NO: 11922 - DNA, 70 bp, Homo sapiens
aaaacagccaactacgaaagacaaccaagggagccaacaaaaatgtggcatcagtcaagactttaagccc

SEQ ID NO: 11923 - DNA, 70 bp, Homo sapiens
tacgaaagacaaccaagggagccaacaaaaatgtggcatcagtcaagactttaagccctggaaaattaaa

SEQ ID NO: 11924 - DNA, 69 bp, Homo sapiens
aaccaagggagccaacaaaaatgtggcatcagtcaagactttaagccctggaaaattaaagcaattaat

SEQ ID NO: 11925 - DNA, 72 bp, Homo sapiens
agccaacaaaaatgtggcatcagtcaagactttaagccctggaaaattaaagcaattaattcaagaaagaga

SEQ ID NO: 11926 - DNA, 69 bp, Homo sapiens
tcagtcaagactttaagccctggaaaattaaagcaattaattcaagaaagagatgttaagaaaaaaaca

SEQ ID NO: 11927 - DNA, 66 bp, Homo sapiens
agccctggaaaattaaagcaattaattcaagaaagagatgttaagaaaaaaacagaacctaaacca

SEQ ID NO: 11928 - DNA, 66 bp, Homo sapiens
aattaaagcaattaattcaagaaagagatgttaagaaaaaaacagaacctaaaccacccgtgccag

SEQ ID NO: 11929 - DNA, 67 bp, Homo sapiens
aattaattcaagaaagagatgttaagaaaaaaacagaacctaaaccacccgtgccagtcagaagcct

SEQ ID NO: 11930 - DNA, 71 bp, Homo sapiens
ttcaagaaagagatgttaagaaaaaaacagaacctaaaccacccgtgccagtcagaagccttctgacaaga

SEQ ID NO: 11931 - DNA, 76 bp, Homo sapiens
ttaagaaaaaaacagaacctaaaccacccgtgccagtcagaagccttctgacaagagctggagcagcacgcatgaa

SEQ ID NO: 11932 - DNA, 77 bp, Homo sapiens
aaaaacagaacctaaaccacccgtgccagtcagaagccttctgacaagagctggagcagcacgcatgaatttggata

SEQ ID NO: 11933 - DNA, 79 bp, Homo sapiens
taaaccacccgtgccagtcagaagccttctgacaagagctggagcagcacgcatgaatttggataggactgaggttctt

SEQ ID NO: 11934 - DNA, 80 bp, Homo sapiens
acccgtgccagtcagaagccttctgacaagagctggagcagcacgcatgaatttggataggactgaggttctttttcaga

SEQ ID NO: 11935 - DNA, 77 bp, Homo sapiens
aagccttctgacaagagctggagcagcacgcatgaatttggataggactgaggttctttttcagaacccagagtcct

SEQ ID NO: 11936 - DNA, 77 bp, Homo sapiens
acaagagctggagcagcacgcatgaatttggataggactgaggttctttttcagaacccagagtccttaacctgcaa

SEQ ID NO: 11937 - DNA, 75 bp, Homo sapiens
gagcagcacgcatgaatttggataggactgaggttctttttcagaacccagagtccttaacctgcaatgggttta

SEQ ID NO: 11938 - DNA, 71 bp, Homo sapiens
acgcatgaatttggataggactgaggttctttttcagaacccagagtccttaacctgcaatgggtttacaa

SEQ ID NO: 11939 - DNA, 71 bp, Homo sapiens
atttggataggactgaggttctttttcagaacccagagtccttaacctgcaatgggtttacaatggcgcta

SEQ ID NO: 11940 - DNA, 70 bp, Homo sapiens
aggttctttttcagaacccagagtccttaacctgcaatgggtttacaatggcgctacgaagcacctctct

SEQ ID NO: 11941 - DNA, 74 bp, Homo sapiens
tttttcagaacccagagtccttaacctgcaatgggtttacaatggcgctacgaagcacctctcttagcaggcga

SEQ ID NO: 11942 - DNA, 73 bp, Homo sapiens
agagtccttaacctgcaatgggtttacaatggcgctacgaagcacctctcttagcaggcgactctcccaaccc

SEQ ID NO: 11943 - DNA, 73 bp, Homo sapiens
cttaacctgcaatgggtttacaatggcgctacgaagcacctctcttagcaggcgactctcccaacccccactg

SEQ ID NO: 11944 - DNA, 72 bp, Homo sapiens
aatggcgctacgaagcacctctcttagcaggcgactctcccaacccccactggtcgtagccaaatccaaaaa

SEQ ID NO: 11945 - DNA, 69 bp, Homo sapiens
aagcacctctcttagcaggcgactctcccaacccccactggtcgtagccaaatccaaaaaggttccact

SEQ ID NO: 11946 - DNA, 69 bp, Homo sapiens
tctcttagcaggcgactctcccaacccccactggtcgtagccaaatccaaaaaggttccactttctaag

SEQ ID NO: 11947 - DNA, 64 bp, Homo sapiens
ctctcccaacccccactggtcgtagccaaatccaaaaaggttccactttctaagggtttagaaa

SEQ ID NO: 11948 - DNA, 70 bp, Homo sapiens
tggtcgtagccaaatccaaaaaggttccactttctaagggtttagaaaagcaacatgattgtgattataa

SEQ ID NO: 11949 - DNA, 70 bp, Homo sapiens
atccaaaaaggttccactttctaagggtttagaaaagcaacatgattgtgattataagatactccctgct

SEQ ID NO: 11950 - DNA, 71 bp, Homo sapiens
gttccactttctaagggtttagaaaagcaacatgattgtgattataagatactccctgctttgggagtaaa

SEQ ID NO: 11951 - DNA, 74 bp, Homo sapiens
tttctaagggtttagaaaagcaacatgattgtgattataagatactccctgctttgggagtaaagcactcagaa

SEQ ID NO: 11952 - DNA, 75 bp, Homo sapiens
tttagaaaagcaacatgattgtgattataagatactccctgctttgggagtaaagcactcagaaaatgattcggt

SEQ ID NO: 11953 - DNA, 78 bp, Homo sapiens
aacatgattgtgattataagatactccctgctttgggagtaaagcactcagaaaatgattcggttccaatgcaagaca

SEQ ID NO: 11954 - DNA, 74 bp, Homo sapiens
attataagatactccctgctttgggagtaaagcactcagaaaatgattcggttccaatgcaagacacccaagtc

SEQ ID NO: 11955 - DNA, 75 bp, Homo sapiens
ctccctgctttgggagtaaagcactcagaaaatgattcggttccaatgcaagacacccaagtccttcctgatata

SEQ ID NO: 11956 - DNA, 76 bp, Homo sapiens
tgggagtaaagcactcagaaaatgattcggttccaatgcaagacacccaagtccttcctgatatagagactctaat

SEQ ID NO: 11957 - DNA, 77 bp, Homo sapiens
gcactcagaaaatgattcggttccaatgcaagacacccaagtccttcctgatatagagactctaattggtgtacaaa

SEQ ID NO: 11958 - DNA, 73 bp, Homo sapiens
ttccaatgcaagacacccaagtccttcctgatatagagactctaattggtgtacaaaatccctctttacttaa

SEQ ID NO: 11959 - DNA, 69 bp, Homo sapiens
aagacacccaagtccttcctgatatagagactctaattggtgtacaaaatccctctttacttaaaggta

SEQ ID NO: 11960 - DNA, 70 bp, Homo sapiens
aagtccttcctgatatagagactctaattggtgtacaaaatccctctttacttaaaggtaagagccaaga

SEQ ID NO: 11961 - DNA, 70 bp, Homo sapiens
atatagagactctaattggtgtacaaaatccctctttacttaaaggtaagagccaagagacaactcagtt

SEQ ID NO: 11962 - DNA, 68 bp, Homo sapiens
agactctaattggtgtacaaaatccctctttacttaaaggtaagagccaagagacaactcagttttgg

SEQ ID NO: 11963 - DNA, 69 bp, Homo sapiens
tgtacaaaatccctctttacttaaaggtaagagccaagagacaactcagttttggtcccaaagagttga

SEQ ID NO: 11964 - DNA, 67 bp, Homo sapiens
aaatccctctttacttaaaggtaagagccaagagacaactcagttttggtcccaaagagttgaggat

SEQ ID NO: 11965 - DNA, 72 bp, Homo sapiens
ttacttaaaggtaagagccaagagacaactcagttttggtcccaaagagttgaggattccaagatcaatatc

SEQ ID NO: 11966 - DNA, 74 bp, Homo sapiens
taagagccaagagacaactcagttttggtcccaaagagttgaggattccaagatcaatatccctacccacagtg

SEQ ID NO: 11967 - DNA, 77 bp, Homo sapiens
aaagagttgaggattccaagatcaatatccctacccacagtggccctgcagctgagatccttcctgggccactggaa

SEQ ID NO: 11968 - DNA, 78 bp, Homo sapiens
attccaagatcaatatccctacccacagtggccctgcagctgagatccttcctgggccactggaagggacacgctgtg

SEQ ID NO: 11969 - DNA, 78 bp, Homo sapiens
aagatcaatatccctacccacagtggccctgcagctgagatccttcctgggccactggaagggacacgctgtggtgaa

SEQ ID NO: 11970 - DNA, 79 bp, Homo sapiens
tacccacagtggccctgcagctgagatccttcctgggccactggaagggacacgctgtggtgaaggactattctctgaa

SEQ ID NO: 11971 - DNA, 82 bp, Homo sapiens
gccctgcagctgagatccttcctgggccactggaagggacacgctgtggtgaaggactattctctgaagagacattgaatga

SEQ ID NO: 11972 - DNA, 80 bp, Homo sapiens
tgagatccttcctgggccactggaagggacacgctgtggtgaaggactattctctgaagagacattgaatgataccagtg

SEQ ID NO: 11973 - DNA, 77 bp, Homo sapiens
ttcctgggccactggaagggacacgctgtggtgaaggactattctctgaagagacattgaatgataccagtggttcc

SEQ ID NO: 11974 - DNA, 74 bp, Homo sapiens
actggaagggacacgctgtggtgaaggactattctctgaagagacattgaatgataccagtggttccccaaaaa

SEQ ID NO: 11975 - DNA, 77 bp, Homo sapiens
acacgctgtggtgaaggactattctctgaagagacattgaatgataccagtggttccccaaaaatgtttgctcagga

SEQ ID NO: 11976 - DNA, 78 bp, Homo sapiens
tggtgaaggactattctctgaagagacattgaatgataccagtggttccccaaaaatgtttgctcaggacacagtgtg

SEQ ID NO: 11977 - DNA, 77 bp, Homo sapiens
ttctctgaagagacattgaatgataccagtggttccccaaaaatgtttgctcaggacacagtgtgtgctccttttcc

SEQ ID NO: 11978 - DNA, 74 bp, Homo sapiens
aagagacattgaatgataccagtggttccccaaaaatgtttgctcaggacacagtgtgtgctccttttccccaa

SEQ ID NO: 11979 - DNA, 69 bp, Homo sapiens
gttccccaaaaatgtttgctcaggacacagtgtgtgctccttttccccaaagagcaacccccaaagtta

SEQ ID NO: 11980 - DNA, 70 bp, Homo sapiens
aaaaatgtttgctcaggacacagtgtgtgctccttttccccaaagagcaacccccaaagttacctctcaa

SEQ ID NO: 11981 - DNA, 67 bp, Homo sapiens
ttttccccaaagagcaacccccaaagttacctctcaaggaaaccccagcattcagttagaagagttg

SEQ ID NO: 11982 - DNA, 70 bp, Homo sapiens
ccaaagttacctctcaaggaaaccccagcattcagttagaagagttgggttcacgagtagaatctcttaa

SEQ ID NO: 11983 - DNA, 71 bp, Homo sapiens
aaggaaaccccagcattcagttagaagagttgggttcacgagtagaatctcttaagttatctgattcttac

SEQ ID NO: 11984 - DNA, 72 bp, Homo sapiens
ttcagttagaagagttgggttcacgagtagaatctcttaagttatctgattcttacctggatcccattaaaa

SEQ ID NO: 11985 - DNA, 72 bp, Homo sapiens
ttagaagagttgggttcacgagtagaatctcttaagttatctgattcttacctggatcccattaaaagtgaa

SEQ ID NO: 11986 - DNA, 75 bp, Homo sapiens
tgggttcacgagtagaatctcttaagttatctgattcttacctggatcccattaaaagtgaacatgattgctacc

SEQ ID NO: 11987 - DNA, 74 bp, Homo sapiens
agtagaatctcttaagttatctgattcttacctggatcccattaaaagtgaacatgattgctaccccacctcca

SEQ ID NO: 11988 - DNA, 73 bp, Homo sapiens
taagttatctgattcttacctggatcccattaaaagtgaacatgattgctaccccacctccagtcttaataag

SEQ ID NO: 11989 - DNA, 70 bp, Homo sapiens
attcttacctggatcccattaaaagtgaacatgattgctaccccacctccagtcttaataaggttatacc

SEQ ID NO: 11990 - DNA, 70 bp, Homo sapiens
atcccattaaaagtgaacatgattgctaccccacctccagtcttaataaggttatacctgacttgaacct

SEQ ID NO: 11991 - DNA, 70 bp, Homo sapiens
ttaaaagtgaacatgattgctaccccacctccagtcttaataaggttatacctgacttgaaccttagaaa

SEQ ID NO: 11992 - DNA, 71 bp, Homo sapiens
gttatacctgacttgaaccttagaaactgcttggctcttggtgggtctacgtctcctacctctgtaataaa

SEQ ID NO: 11993 - DNA, 69 bp, Homo sapiens
acttgaaccttagaaactgcttggctcttggtgggtctacgtctcctacctctgtaataaaattcctct

SEQ ID NO: 11994 - DNA, 73 bp, Homo sapiens
tagaaactgcttggctcttggtgggtctacgtctcctacctctgtaataaaattcctcttggcaggctcaaaa

SEQ ID NO: 11995 - DNA, 72 bp, Homo sapiens
ttggctcttggtgggtctacgtctcctacctctgtaataaaattcctcttggcaggctcaaaacaagcgacc

SEQ ID NO: 11996 - DNA, 71 bp, Homo sapiens
tcttggtgggtctacgtctcctacctctgtaataaaattcctcttggcaggctcaaaacaagcgacccttg

SEQ ID NO: 11997 - DNA, 72 bp, Homo sapiens
tctacgtctcctacctctgtaataaaattcctcttggcaggctcaaaacaagcgacccttggtgctaaacca

SEQ ID NO: 11998 - DNA, 73 bp, Homo sapiens
aataaaattcctcttggcaggctcaaaacaagcgacccttggtgctaaaccagatcatcaagaggccttcgaa

SEQ ID NO: 11999 - DNA, 79 bp, Homo sapiens
tcttggcaggctcaaaacaagcgacccttggtgctaaaccagatcatcaagaggccttcgaagctactgcaaatcaaca

SEQ ID NO: 12000 - DNA, 73 bp, Homo sapiens
aaaacaagcgacccttggtgctaaaccagatcatcaagaggccttcgaagctactgcaaatcaacaggaagtt

SEQ ID NO: 12001 - DNA, 75 bp, Homo sapiens
acccttggtgctaaaccagatcatcaagaggccttcgaagctactgcaaatcaacaggaagtttctgataccacc

SEQ ID NO: 12002 - DNA, 76 bp, Homo sapiens
taaaccagatcatcaagaggccttcgaagctactgcaaatcaacaggaagtttctgataccacctctttcctagga

SEQ ID NO: 12003 - DNA, 75 bp, Homo sapiens
atcatcaagaggccttcgaagctactgcaaatcaacaggaagtttctgataccacctctttcctaggacaggcct

SEQ ID NO: 12004 - DNA, 74 bp, Homo sapiens
ccttcgaagctactgcaaatcaacaggaagtttctgataccacctctttcctaggacaggcctttggtgctatc

SEQ ID NO: 12005 - DNA, 76 bp, Homo sapiens
tactgcaaatcaacaggaagtttctgataccacctctttcctaggacaggcctttggtgctatcccacatcaatgg

SEQ ID NO: 12006 - DNA, 73 bp, Homo sapiens
aagtttctgataccacctctttcctaggacaggcctttggtgctatcccacatcaatgggaacttcctggtgc

SEQ ID NO: 12007 - DNA, 73 bp, Homo sapiens
ataccacctctttcctaggacaggcctttggtgctatcccacatcaatgggaacttcctggtgctgacccagt

SEQ ID NO: 12008 - DNA, 77 bp, Homo sapiens
acaggcctttggtgctatcccacatcaatgggaacttcctggtgctgacccagttcatggtgaggccctgggtgaga

SEQ ID NO: 12009 - DNA, 78 bp, Homo sapiens
tatcccacatcaatgggaacttcctggtgctgacccagttcatggtgaggccctgggtgagaccccagatctaccaga

SEQ ID NO: 12010 - DNA, 77 bp, Homo sapiens
acatcaatgggaacttcctggtgctgacccagttcatggtgaggccctgggtgagaccccagatctaccagagattc

SEQ ID NO: 12011 - DNA, 76 bp, Homo sapiens
ttcatggtgaggccctgggtgagaccccagatctaccagagattcctggtgctattccagtccaaggagaggtctt

SEQ ID NO: 12012 - DNA, 73 bp, Homo sapiens
gaccccagatctaccagagattcctggtgctattccagtccaaggagaggtctttggtactattttagaccaa

SEQ ID NO: 12013 - DNA, 72 bp, Homo sapiens
atctaccagagattcctggtgctattccagtccaaggagaggtctttggtactattttagaccaacaagaaa

SEQ ID NO: 12014 - DNA, 71 bp, Homo sapiens
tattccagtccaaggagaggtctttggtactattttagaccaacaagaaactcttggtatgagtgggagtg

SEQ ID NO: 12015 - DNA, 70 bp, Homo sapiens
agtccaaggagaggtctttggtactattttagaccaacaagaaactcttggtatgagtgggagtgttgtc

SEQ ID NO: 12016 - DNA, 71 bp, Homo sapiens
agaggtctttggtactattttagaccaacaagaaactcttggtatgagtgggagtgttgtcccagacttgc

SEQ ID NO: 12017 - DNA, 71 bp, Homo sapiens
ggtactattttagaccaacaagaaactcttggtatgagtgggagtgttgtcccagacttgcctgtcttcct

SEQ ID NO: 12018 - DNA, 73 bp, Homo sapiens
caacaagaaactcttggtatgagtgggagtgttgtcccagacttgcctgtcttccttcctgttcctccaaatc

SEQ ID NO: 12019 - DNA, 72 bp, Homo sapiens
agaaactcttggtatgagtgggagtgttgtcccagacttgcctgtcttccttcctgttcctccaaatccaat

SEQ ID NO: 12020 - DNA, 73 bp, Homo sapiens
gtatgagtgggagtgttgtcccagacttgcctgtcttccttcctgttcctccaaatccaattgctacctttaa

SEQ ID NO: 12021 - DNA, 73 bp, Homo sapiens
tgttgtcccagacttgcctgtcttccttcctgttcctccaaatccaattgctacctttaatgctccttccaaa

SEQ ID NO: 12022 - DNA, 74 bp, Homo sapiens
agacttgcctgtcttccttcctgttcctccaaatccaattgctacctttaatgctccttccaaatggcctgagc

SEQ ID NO: 12023 - DNA, 72 bp, Homo sapiens
ctgtcttccttcctgttcctccaaatccaattgctacctttaatgctccttccaaatggcctgagccccaaa

SEQ ID NO: 12024 - DNA, 78 bp, Homo sapiens
aaatccaattgctacctttaatgctccttccaaatggcctgagccccaaagcactgtctcatatggacttgcagtcca

SEQ ID NO: 12025 - DNA, 80 bp, Homo sapiens
tacctttaatgctccttccaaatggcctgagccccaaagcactgtctcatatggacttgcagtccagggtgctatacaga

SEQ ID NO: 12026 - DNA, 81 bp, Homo sapiens
ttaatgctccttccaaatggcctgagccccaaagcactgtctcatatggacttgcagtccagggtgctatacagattttgc

SEQ ID NO: 12027 - DNA, 79 bp, Homo sapiens
ttccaaatggcctgagccccaaagcactgtctcatatggacttgcagtccagggtgctatacagattttgcctttgggc

SEQ ID NO: 12028 - DNA, 81 bp, Homo sapiens
gccccaaagcactgtctcatatggacttgcagtccagggtgctatacagattttgcctttgggctcaggacacactcctca

SEQ ID NO: 12029 - DNA, 83 bp, Homo sapiens
actgtctcatatggacttgcagtccagggtgctatacagattttgcctttgggctcaggacacactcctcaatcatcatcaaa

SEQ ID NO: 12030 - DNA, 83 bp, Homo sapiens
atatggacttgcagtccagggtgctatacagattttgcctttgggctcaggacacactcctcaatcatcatcaaactcagaga

SEQ ID NO: 12031 - DNA, 80 bp, Homo sapiens
ttgcagtccagggtgctatacagattttgcctttgggctcaggacacactcctcaatcatcatcaaactcagagaaaaat

SEQ ID NO: 12032 - DNA, 77 bp, Homo sapiens
agattttgcctttgggctcaggacacactcctcaatcatcatcaaactcagagaaaaattcattacctccagtaatg

SEQ ID NO: 12033 - DNA, 81 bp, Homo sapiens
ttgggctcaggacacactcctcaatcatcatcaaactcagagaaaaattcattacctccagtaatggctataagcaatgta

SEQ ID NO: 12034 - DNA, 78 bp, Homo sapiens
aggacacactcctcaatcatcatcaaactcagagaaaaattcattacctccagtaatggctataagcaatgtagaaaa

SEQ ID NO: 12035 - DNA, 79 bp, Homo sapiens
aatcatcatcaaactcagagaaaaattcattacctccagtaatggctataagcaatgtagaaaatgagaagcaggttca

SEQ ID NO: 12036 - DNA, 76 bp, Homo sapiens
aaactcagagaaaaattcattacctccagtaatggctataagcaatgtagaaaatgagaagcaggttcatataagc

SEQ ID NO: 12037 - DNA, 77 bp, Homo sapiens
agaaaaattcattacctccagtaatggctataagcaatgtagaaaatgagaagcaggttcatataagcttcctgcca

SEQ ID NO: 12038 - DNA, 79 bp, Homo sapiens
attacctccagtaatggctataagcaatgtagaaaatgagaagcaggttcatataagcttcctgccagctaacactcag

SEQ ID NO: 12039 - DNA, 78 bp, Homo sapiens
taatggctataagcaatgtagaaaatgagaagcaggttcatataagcttcctgccagctaacactcaggggttcccat

SEQ ID NO: 12040 - DNA, 75 bp, Homo sapiens
aaaatgagaagcaggttcatataagcttcctgccagctaacactcaggggttcccattagcccctgagagaggac

SEQ ID NO: 12041 - DNA, 76 bp, Homo sapiens
agaagcaggttcatataagcttcctgccagctaacactcaggggttcccattagcccctgagagaggactcttcca

SEQ ID NO: 12042 - DNA, 78 bp, Homo sapiens
ttcatataagcttcctgccagctaacactcaggggttcccattagcccctgagagaggactcttccatgcttcactgg

SEQ ID NO: 12043 - DNA, 76 bp, Homo sapiens
ctaacactcaggggttcccattagcccctgagagaggactcttccatgcttcactgggtatagcccaactctctca

SEQ ID NO: 12044 - DNA, 78 bp, Homo sapiens
ttcccattagcccctgagagaggactcttccatgcttcactgggtatagcccaactctctcaggctggtcctagcaaa

SEQ ID NO: 12045 - DNA, 79 bp, Homo sapiens
cccctgagagaggactcttccatgcttcactgggtatagcccaactctctcaggctggtcctagcaaatcagacagagg

SEQ ID NO: 12046 - DNA, 80 bp, Homo sapiens
agagaggactcttccatgcttcactgggtatagcccaactctctcaggctggtcctagcaaatcagacagagggagctcc

SEQ ID NO: 12047 - DNA, 81 bp, Homo sapiens
tccatgcttcactgggtatagcccaactctctcaggctggtcctagcaaatcagacagagggagctcccaggtcagtgtaa

SEQ ID NO: 12048 - DNA, 80 bp, Homo sapiens
ttcactgggtatagcccaactctctcaggctggtcctagcaaatcagacagagggagctcccaggtcagtgtaaccagca

SEQ ID NO: 12049 - DNA, 81 bp, Homo sapiens
ccaactctctcaggctggtcctagcaaatcagacagagggagctcccaggtcagtgtaaccagcacagttcatgttgtcaa

SEQ ID NO: 12050 - DNA, 83 bp, Homo sapiens
tctctcaggctggtcctagcaaatcagacagagggagctcccaggtcagtgtaaccagcacagttcatgttgtcaacaccaca

SEQ ID NO: 12051 - DNA, 81 bp, Homo sapiens
gtcctagcaaatcagacagagggagctcccaggtcagtgtaaccagcacagttcatgttgtcaacaccacagtggtgacta

SEQ ID NO: 12052 - DNA, 82 bp, Homo sapiens
aaatcagacagagggagctcccaggtcagtgtaaccagcacagttcatgttgtcaacaccacagtggtgactatgccagtgc

SEQ ID NO: 12053 - DNA, 81 bp, Homo sapiens
agctcccaggtcagtgtaaccagcacagttcatgttgtcaacaccacagtggtgactatgccagtgccaatggtcagtacc

SEQ ID NO: 12054 - DNA, 81 bp, Homo sapiens
gtcagtgtaaccagcacagttcatgttgtcaacaccacagtggtgactatgccagtgccaatggtcagtacctcctcttct

SEQ ID NO: 12055 - DNA, 81 bp, Homo sapiens
taaccagcacagttcatgttgtcaacaccacagtggtgactatgccagtgccaatggtcagtacctcctcttcttcctata

SEQ ID NO: 12056 - DNA, 80 bp, Homo sapiens
ttcatgttgtcaacaccacagtggtgactatgccagtgccaatggtcagtacctcctcttcttcctataccactttgcta

SEQ ID NO: 12057 - DNA, 75 bp, Homo sapiens
acaccacagtggtgactatgccagtgccaatggtcagtacctcctcttcttcctataccactttgctaccgactt

SEQ ID NO: 12058 - DNA, 75 bp, Homo sapiens
tggtgactatgccagtgccaatggtcagtacctcctcttcttcctataccactttgctaccgactttggaaaaga

SEQ ID NO: 12059 - DNA, 73 bp, Homo sapiens
ctatgccagtgccaatggtcagtacctcctcttcttcctataccactttgctaccgactttggaaaagaagaa

SEQ ID NO: 12060 - DNA, 77 bp, Homo sapiens
aagaagaaaagaaagcgatgtggggtctgtgaaccctgccagcagaagaccaactgtggtgaatgcacttactgcaa

SEQ ID NO: 12061 - DNA, 78 bp, Homo sapiens
aaaagaaagcgatgtggggtctgtgaaccctgccagcagaagaccaactgtggtgaatgcacttactgcaagaacaga

SEQ ID NO: 12062 - DNA, 81 bp, Homo sapiens
atgtggggtctgtgaaccctgccagcagaagaccaactgtggtgaatgcacttactgcaagaacagaaagaacagccatca

SEQ ID NO: 12063 - DNA, 82 bp, Homo sapiens
tgaaccctgccagcagaagaccaactgtggtgaatgcacttactgcaagaacagaaagaacagccatcagatctgtaagaaa

SEQ ID NO: 12064 - DNA, 79 bp, Homo sapiens
ccagcagaagaccaactgtggtgaatgcacttactgcaagaacagaaagaacagccatcagatctgtaagaaaagaaaa

SEQ ID NO: 12065 - DNA, 78 bp, Homo sapiens
aagaccaactgtggtgaatgcacttactgcaagaacagaaagaacagccatcagatctgtaagaaaagaaaatgtgag

SEQ ID NO: 12066 - DNA, 79 bp, Homo sapiens
tgaatgcacttactgcaagaacagaaagaacagccatcagatctgtaagaaaagaaaatgtgaggagctgaaaaagaaa

SEQ ID NO: 12067 - DNA, 75 bp, Homo sapiens
acttactgcaagaacagaaagaacagccatcagatctgtaagaaaagaaaatgtgaggagctgaaaaagaaacca

SEQ ID NO: 12068 - DNA, 76 bp, Homo sapiens
agccatcagatctgtaagaaaagaaaatgtgaggagctgaaaaagaaaccatctgttgttgtgcctctggaggtaa

SEQ ID NO: 12069 - DNA, 74 bp, Homo sapiens
atctgtaagaaaagaaaatgtgaggagctgaaaaagaaaccatctgttgttgtgcctctggaggtaagcaaaca

SEQ ID NO: 12070 - DNA, 72 bp, Homo sapiens
aaaagaaaatgtgaggagctgaaaaagaaaccatctgttgttgtgcctctggaggtaagcaaacagtcaagg

SEQ ID NO: 12071 - DNA, 75 bp, Homo sapiens
aatgtgaggagctgaaaaagaaaccatctgttgttgtgcctctggaggtaagcaaacagtcaaggggctgggaga

SEQ ID NO: 12072 - DNA, 68 bp, Homo sapiens
caaaaattttggggatgtgggagctaattttatttcttaaacagaggctcattttgcaatttgatttt

SEQ ID NO: 12073 - DNA, 69 bp, Homo sapiens
gggatgtgggagctaattttatttcttaaacagaggctcattttgcaatttgattttttttaggttata

SEQ ID NO: 12074 - DNA, 67 bp, Homo sapiens
gagctaattttatttcttaaacagaggctcattttgcaatttgattttttttaggttataaaggaaa

SEQ ID NO: 12075 - DNA, 66 bp, Homo sapiens
tttcttaaacagaggctcattttgcaatttgattttttttaggttataaaggaaaacaagaggccc

SEQ ID NO: 12076 - DNA, 67 bp, Homo sapiens
cagaggctcattttgcaatttgattttttttaggttataaaggaaaacaagaggccccagagggaaa

SEQ ID NO: 12077 - DNA, 64 bp, Homo sapiens
gcaatttgattttttttaggttataaaggaaaacaagaggccccagagggaaaagaagcccaaa

SEQ ID NO: 12078 - DNA, 61 bp, Homo sapiens
tttttttaggttataaaggaaaacaagaggccccagagggaaaagaagcccaaagttttaa

SEQ ID NO: 12079 - DNA, 62 bp, Homo sapiens
ttaggttataaaggaaaacaagaggccccagagggaaaagaagcccaaagttttaaaggtaa

SEQ ID NO: 12080 - DNA, 66 bp, Homo sapiens
aaaacaagaggccccagagggaaaagaagcccaaagttttaaaggtaatcagctgttgattaaata

SEQ ID NO: 12081 - DNA, 68 bp, Homo sapiens
agaggccccagagggaaaagaagcccaaagttttaaaggtaatcagctgttgattaaataatatttca

SEQ ID NO: 12082 - DNA, 67 bp, Homo sapiens
gagggaaaagaagcccaaagttttaaaggtaatcagctgttgattaaataatatttcattatttttc

SEQ ID NO: 12083 - DNA, 70 bp, Homo sapiens
agcccaaagttttaaaggtaatcagctgttgattaaataatatttcattatttttccatttcatatagta

SEQ ID NO: 12084 - DNA, 74 bp, Homo sapiens
ttcagatatttaagtagatgacataagtaatttctgtattttacaggcagattttgacaacaaaccagtaaatg

SEQ ID NO: 12085 - DNA, 72 bp, Homo sapiens
tatttaagtagatgacataagtaatttctgtattttacaggcagattttgacaacaaaccagtaaatggccc

SEQ ID NO: 12086 - DNA, 73 bp, Homo sapiens
atgacataagtaatttctgtattttacaggcagattttgacaacaaaccagtaaatggccccaagtcagaatc

SEQ ID NO: 12087 - DNA, 74 bp, Homo sapiens
tttctgtattttacaggcagattttgacaacaaaccagtaaatggccccaagtcagaatccatggactacagta

SEQ ID NO: 12088 - DNA, 74 bp, Homo sapiens
attttgacaacaaaccagtaaatggccccaagtcagaatccatggactacagtagatgtggtcatggggaagaa

SEQ ID NO: 12089 - DNA, 72 bp, Homo sapiens
aacaaaccagtaaatggccccaagtcagaatccatggactacagtagatgtggtcatggggaagaacaaaaa

SEQ ID NO: 12090 - DNA, 74 bp, Homo sapiens
agtaaatggccccaagtcagaatccatggactacagtagatgtggtcatggggaagaacaaaaattggaattga

SEQ ID NO: 12091 - DNA, 74 bp, Homo sapiens
aagtcagaatccatggactacagtagatgtggtcatggggaagaacaaaaattggaattgaacccacatactgt

SEQ ID NO: 12092 - DNA, 73 bp, Homo sapiens
aatccatggactacagtagatgtggtcatggggaagaacaaaaattggaattgaacccacatactgttgaaaa

SEQ ID NO: 12093 - DNA, 71 bp, Homo sapiens
acagtagatgtggtcatggggaagaacaaaaattggaattgaacccacatactgttgaaaatgtaactaaa

SEQ ID NO: 12094 - DNA, 70 bp, Homo sapiens
gtggtcatggggaagaacaaaaattggaattgaacccacatactgttgaaaatgtaactaaaaatgaaga

SEQ ID NO: 12095 - DNA, 75 bp, Homo sapiens
agaacaaaaattggaattgaacccacatactgttgaaaatgtaactaaaaatgaagacagcatgacaggcatcga

SEQ ID NO: 12096 - DNA, 74 bp, Homo sapiens
aaaaattggaattgaacccacatactgttgaaaatgtaactaaaaatgaagacagcatgacaggcatcgaggtg

SEQ ID NO: 12097 - DNA, 76 bp, Homo sapiens
aacccacatactgttgaaaatgtaactaaaaatgaagacagcatgacaggcatcgaggtggagaagtggacacaaa

SEQ ID NO: 12098 - DNA, 76 bp, Homo sapiens
atactgttgaaaatgtaactaaaaatgaagacagcatgacaggcatcgaggtggagaagtggacacaaaacaagaa

SEQ ID NO: 12099 - DNA, 76 bp, Homo sapiens
aatgtaactaaaaatgaagacagcatgacaggcatcgaggtggagaagtggacacaaaacaagaaatcacagttaa

SEQ ID NO: 12100 - DNA, 79 bp, Homo sapiens
aaatgaagacagcatgacaggcatcgaggtggagaagtggacacaaaacaagaaatcacagttaactgatcacgtgaaa

SEQ ID NO: 12101 - DNA, 77 bp, Homo sapiens
catgacaggcatcgaggtggagaagtggacacaaaacaagaaatcacagttaactgatcacgtgaaaggagatttta

SEQ ID NO: 12102 - DNA, 74 bp, Homo sapiens
atcgaggtggagaagtggacacaaaacaagaaatcacagttaactgatcacgtgaaaggagattttagtgctaa

SEQ ID NO: 12103 - DNA, 74 bp, Homo sapiens
agaagtggacacaaaacaagaaatcacagttaactgatcacgtgaaaggagattttagtgctaatgtcccagaa

SEQ ID NO: 12104 - DNA, 73 bp, Homo sapiens
acaaaacaagaaatcacagttaactgatcacgtgaaaggagattttagtgctaatgtcccagaagctgaaaaa

SEQ ID NO: 12105 - DNA, 73 bp, Homo sapiens
agaaatcacagttaactgatcacgtgaaaggagattttagtgctaatgtcccagaagctgaaaaatcgaaaaa

SEQ ID NO: 12106 - DNA, 70 bp, Homo sapiens
agattttagtgctaatgtcccagaagctgaaaaatcgaaaaactctgaagttgacaagaaacgaaccaaa

SEQ ID NO: 12107 - DNA, 69 bp, Homo sapiens
ctaatgtcccagaagctgaaaaatcgaaaaactctgaagttgacaagaaacgaaccaaatctccaaaat

SEQ ID NO: 12108 - DNA, 66 bp, Homo sapiens
aaatcgaaaaactctgaagttgacaagaaacgaaccaaatctccaaaattgtttgtacaaaccgta

SEQ ID NO: 12109 - DNA, 68 bp, Homo sapiens
gaagttgacaagaaacgaaccaaatctccaaaattgtttgtacaaaccgtaagaaatggcattaaaca

SEQ ID NO: 12110 - DNA, 69 bp, Homo sapiens
cgaaccaaatctccaaaattgtttgtacaaaccgtaagaaatggcattaaacatgtacactgtttacca

SEQ ID NO: 12111 - DNA, 70 bp, Homo sapiens
ctccaaaattgtttgtacaaaccgtaagaaatggcattaaacatgtacactgtttaccagctgaaacaaa

SEQ ID NO: 12112 - DNA, 69 bp, Homo sapiens
aaattgtttgtacaaaccgtaagaaatggcattaaacatgtacactgtttaccagctgaaacaaatgtt

SEQ ID NO: 12113 - DNA, 69 bp, Homo sapiens
acaaaccgtaagaaatggcattaaacatgtacactgtttaccagctgaaacaaatgtttcatttaaaaa

SEQ ID NO: 12114 - DNA, 73 bp, Homo sapiens
acatgtacactgtttaccagctgaaacaaatgtttcatttaaaaaattcaatattgaagaattcggcaagaca

SEQ ID NO: 12115 - DNA, 72 bp, Homo sapiens
acactgtttaccagctgaaacaaatgtttcatttaaaaaattcaatattgaagaattcggcaagacattgga

SEQ ID NO: 12116 - DNA, 71 bp, Homo sapiens
ccagctgaaacaaatgtttcatttaaaaaattcaatattgaagaattcggcaagacattggaaaacaattc

SEQ ID NO: 12117 - DNA, 70 bp, Homo sapiens
tgtttcatttaaaaaattcaatattgaagaattcggcaagacattggaaaacaattcttataaattccta

SEQ ID NO: 12118 - DNA, 68 bp, Homo sapiens
aaaaaattcaatattgaagaattcggcaagacattggaaaacaattcttataaattcctaaaagacac

SEQ ID NO: 12119 - DNA, 72 bp, Homo sapiens
caatattgaagaattcggcaagacattggaaaacaattcttataaattcctaaaagacactgcaaaccataa

SEQ ID NO: 12120 - DNA, 69 bp, Homo sapiens
agaattcggcaagacattggaaaacaattcttataaattcctaaaagacactgcaaaccataaaaacgc

SEQ ID NO: 12121 - DNA, 81 bp, Homo sapiens
ttataaattcctaaaagacactgcaaaccataaaaacgctatgagctctgttgctactgatatgagttgtgatcatctcaa

SEQ ID NO: 12122 - DNA, 80 bp, Homo sapiens
aaagacactgcaaaccataaaaacgctatgagctctgttgctactgatatgagttgtgatcatctcaaggggagaagtaa

SEQ ID NO: 12123 - DNA, 77 bp, Homo sapiens
ataaaaacgctatgagctctgttgctactgatatgagttgtgatcatctcaaggggagaagtaacgttttagtattc

SEQ ID NO: 12124 - DNA, 79 bp, Homo sapiens
agctctgttgctactgatatgagttgtgatcatctcaaggggagaagtaacgttttagtattccagcagcctggcttta

SEQ ID NO: 12125 - DNA, 77 bp, Homo sapiens
ctactgatatgagttgtgatcatctcaaggggagaagtaacgttttagtattccagcagcctggctttaactgcagt

SEQ ID NO: 12126 - DNA, 76 bp, Homo sapiens
atatgagttgtgatcatctcaaggggagaagtaacgttttagtattccagcagcctggctttaactgcagttccat

SEQ ID NO: 12127 - DNA, 74 bp, Homo sapiens
atcatctcaaggggagaagtaacgttttagtattccagcagcctggctttaactgcagttccattccacattct

SEQ ID NO: 12128 - DNA, 77 bp, Homo sapiens
ggagaagtaacgttttagtattccagcagcctggctttaactgcagttccattccacattcttcacactccatcata

SEQ ID NO: 12129 - DNA, 77 bp, Homo sapiens
agtaacgttttagtattccagcagcctggctttaactgcagttccattccacattcttcacactccatcataaatca

SEQ ID NO: 12130 - DNA, 86 bp, Homo sapiens
tattccagcagcctggctttaactgcagttccattccacattcttcacactccatcataaatcatcatgctagtatacacaatgaa

SEQ ID NO: 12131 - DNA, 84 bp, Homo sapiens
cctggctttaactgcagttccattccacattcttcacactccatcataaatcatcatgctagtatacacaatgaaggtgatcaa

SEQ ID NO: 12132 - DNA, 83 bp, Homo sapiens
taactgcagttccattccacattcttcacactccatcataaatcatcatgctagtatacacaatgaaggtgatcaaccaaaaa

SEQ ID NO: 12133 - DNA, 82 bp, Homo sapiens
attccacattcttcacactccatcataaatcatcatgctagtatacacaatgaaggtgatcaaccaaaaactcctgagaata

SEQ ID NO: 12134 - DNA, 81 bp, Homo sapiens
attcttcacactccatcataaatcatcatgctagtatacacaatgaaggtgatcaaccaaaaactcctgagaatataccaa

SEQ ID NO: 12135 - DNA, 79 bp, Homo sapiens
tccatcataaatcatcatgctagtatacacaatgaaggtgatcaaccaaaaactcctgagaatataccaagtaaagaac

SEQ ID NO: 12136 - DNA, 76 bp, Homo sapiens
atcatcatgctagtatacacaatgaaggtgatcaaccaaaaactcctgagaatataccaagtaaagaaccaaaaga

SEQ ID NO: 12137 - DNA, 74 bp, Homo sapiens
tagtatacacaatgaaggtgatcaaccaaaaactcctgagaatataccaagtaaagaaccaaaagatggatctc

SEQ ID NO: 12138 - DNA, 69 bp, Homo sapiens
atcaaccaaaaactcctgagaatataccaagtaaagaaccaaaagatggatctcccgttcaaccaagtc

SEQ ID NO: 12139 - DNA, 70 bp, Homo sapiens
actcctgagaatataccaagtaaagaaccaaaagatggatctcccgttcaaccaagtctcttatcgttaa

SEQ ID NO: 12140 - DNA, 70 bp, Homo sapiens
atataccaagtaaagaaccaaaagatggatctcccgttcaaccaagtctcttatcgttaatgaaagatag

SEQ ID NO: 12141 - DNA, 70 bp, Homo sapiens
aaagaaccaaaagatggatctcccgttcaaccaagtctcttatcgttaatgaaagataggagattaacat

SEQ ID NO: 12142 - DNA, 73 bp, Homo sapiens
aaaagatggatctcccgttcaaccaagtctcttatcgttaatgaaagataggagattaacattggagcaagtg

SEQ ID NO: 12143 - DNA, 79 bp, Homo sapiens
tctcttatcgttaatgaaagataggagattaacattggagcaagtggtagccatagaggccctgactcaactctcagaa

SEQ ID NO: 12144 - DNA, 80 bp, Homo sapiens
ttaatgaaagataggagattaacattggagcaagtggtagccatagaggccctgactcaactctcagaagccccatcaga

SEQ ID NO: 12145 - DNA, 77 bp, Homo sapiens
aagtggtagccatagaggccctgactcaactctcagaagccccatcagagaattcctccccatcaaagtcagagaag

SEQ ID NO: 12146 - DNA, 80 bp, Homo sapiens
atagaggccctgactcaactctcagaagccccatcagagaattcctccccatcaaagtcagagaaggatgaggaatcaga

SEQ ID NO: 12147 - DNA, 82 bp, Homo sapiens
cctgactcaactctcagaagccccatcagagaattcctccccatcaaagtcagagaaggatgaggaatcagagcagagaaca

SEQ ID NO: 12148 - DNA, 80 bp, Homo sapiens
agaagccccatcagagaattcctccccatcaaagtcagagaaggatgaggaatcagagcagagaacagccagtttgctta

SEQ ID NO: 12149 - DNA, 82 bp, Homo sapiens
atcagagaattcctccccatcaaagtcagagaaggatgaggaatcagagcagagaacagccagtttgcttaatagctgcaaa

SEQ ID NO: 12150 - DNA, 81 bp, Homo sapiens
aattcctccccatcaaagtcagagaaggatgaggaatcagagcagagaacagccagtttgcttaatagctgcaaagctatc

SEQ ID NO: 12151 - DNA, 82 bp, Homo sapiens
aaagtcagagaaggatgaggaatcagagcagagaacagccagtttgcttaatagctgcaaagctatcctctacactgtaaga

SEQ ID NO: 12152 - DNA, 80 bp, Homo sapiens
agaaggatgaggaatcagagcagagaacagccagtttgcttaatagctgcaaagctatcctctacactgtaagaaaagac

SEQ ID NO: 12153 - DNA, 74 bp, Homo sapiens
gagaacagccagtttgcttaatagctgcaaagctatcctctacactgtaagaaaagacctccaagacccaaact

SEQ ID NO: 12154 - DNA, 72 bp, Homo sapiens
agtttgcttaatagctgcaaagctatcctctacactgtaagaaaagacctccaagacccaaacttacaggga

SEQ ID NO: 12155 - DNA, 74 bp, Homo sapiens
taatagctgcaaagctatcctctacactgtaagaaaagacctccaagacccaaacttacagggagagccaccaa

SEQ ID NO: 12156 - DNA, 69 bp, Homo sapiens
aagctatcctctacactgtaagaaaagacctccaagacccaaacttacagggagagccaccaaaactta

SEQ ID NO: 12157 - DNA, 71 bp, Homo sapiens
tacactgtaagaaaagacctccaagacccaaacttacagggagagccaccaaaacttaatcactgtccatc

SEQ ID NO: 12158 - DNA, 71 bp, Homo sapiens
ttaatcactgtccatctttggaaaaacaaagttcatgcaacacggtggttttcaatgggcaaactactacc

SEQ ID NO: 12159 - DNA, 67 bp, Homo sapiens
atctttggaaaaacaaagttcatgcaacacggtggttttcaatgggcaaactactaccctttccaac

SEQ ID NO: 12160 - DNA, 70 bp, Homo sapiens
aaaaacaaagttcatgcaacacggtggttttcaatgggcaaactactaccctttccaactcacatatcaa

SEQ ID NO: 12161 - DNA, 73 bp, Homo sapiens
atgcaacacggtggttttcaatgggcaaactactaccctttccaactcacatatcaactcagctactaaccaa

SEQ ID NO: 12162 - DNA, 74 bp, Homo sapiens
tggttttcaatgggcaaactactaccctttccaactcacatatcaactcagctactaaccaagcatccacaaag

SEQ ID NO: 12163 - DNA, 77 bp, Homo sapiens
aatgggcaaactactaccctttccaactcacatatcaactcagctactaaccaagcatccacaaagtcacatgaata

SEQ ID NO: 12164 - DNA, 76 bp, Homo sapiens
aaactactaccctttccaactcacatatcaactcagctactaaccaagcatccacaaagtcacatgaatattcaaa

SEQ ID NO: 12165 - DNA, 80 bp, Homo sapiens
tttccaactcacatatcaactcagctactaaccaagcatccacaaagtcacatgaatattcaaaagtcacaaattcatta

SEQ ID NO: 12166 - DNA, 79 bp, Homo sapiens
cacatatcaactcagctactaaccaagcatccacaaagtcacatgaatattcaaaagtcacaaattcattatctctttt

SEQ ID NO: 12167 - DNA, 76 bp, Homo sapiens
ccaagcatccacaaagtcacatgaatattcaaaagtcacaaattcattatctctttttataccaaaatcaaattca

SEQ ID NO: 12168 - DNA, 76 bp, Homo sapiens
cacatgaatattcaaaagtcacaaattcattatctctttttataccaaaatcaaattcatccaagattgacaccaa

SEQ ID NO: 12169 - DNA, 74 bp, Homo sapiens
ttcattatctctttttataccaaaatcaaattcatccaagattgacaccaataaaagtattgctcaagggataa

SEQ ID NO: 12170 - DNA, 72 bp, Homo sapiens
ctctttttataccaaaatcaaattcatccaagattgacaccaataaaagtattgctcaagggataattactc

SEQ ID NO: 12171 - DNA, 75 bp, Homo sapiens
caaaatcaaattcatccaagattgacaccaataaaagtattgctcaagggataattactcttgacaattgttcca

SEQ ID NO: 12172 - DNA, 78 bp, Homo sapiens
aagattgacaccaataaaagtattgctcaagggataattactcttgacaattgttccaatgatttgcatcagttgcca

SEQ ID NO: 12173 - DNA, 77 bp, Homo sapiens
caataaaagtattgctcaagggataattactcttgacaattgttccaatgatttgcatcagttgccaccaagaaata

SEQ ID NO: 12174 - DNA, 78 bp, Homo sapiens
agtattgctcaagggataattactcttgacaattgttccaatgatttgcatcagttgccaccaagaaataatgaagtg

SEQ ID NO: 12175 - DNA, 78 bp, Homo sapiens
ataattactcttgacaattgttccaatgatttgcatcagttgccaccaagaaataatgaagtggagtattgcaaccag

SEQ ID NO: 12176 - DNA, 79 bp, Homo sapiens
tactcttgacaattgttccaatgatttgcatcagttgccaccaagaaataatgaagtggagtattgcaaccagttactg

SEQ ID NO: 12177 - DNA, 81 bp, Homo sapiens
ttgccaccaagaaataatgaagtggagtattgcaaccagttactggacagcagcaaaaaattggactcagatgatctatca

SEQ ID NO: 12178 - DNA, 83 bp, Homo sapiens
aaataatgaagtggagtattgcaaccagttactggacagcagcaaaaaattggactcagatgatctatcatgtcaggatgcaa

SEQ ID NO: 12179 - DNA, 84 bp, Homo sapiens
atgaagtggagtattgcaaccagttactggacagcagcaaaaaattggactcagatgatctatcatgtcaggatgcaacccata

SEQ ID NO: 12180 - DNA, 83 bp, Homo sapiens
tattgcaaccagttactggacagcagcaaaaaattggactcagatgatctatcatgtcaggatgcaacccatacccaaattga

SEQ ID NO: 12181 - DNA, 81 bp, Homo sapiens
agttactggacagcagcaaaaaattggactcagatgatctatcatgtcaggatgcaacccatacccaaattgaggaagatg

SEQ ID NO: 12182 - DNA, 82 bp, Homo sapiens
agcaaaaaattggactcagatgatctatcatgtcaggatgcaacccatacccaaattgaggaagatgttgcaacacagttga

SEQ ID NO: 12183 - DNA, 82 bp, Homo sapiens
aaaattggactcagatgatctatcatgtcaggatgcaacccatacccaaattgaggaagatgttgcaacacagttgacacaa

SEQ ID NO: 12184 - DNA, 83 bp, Homo sapiens
tgatctatcatgtcaggatgcaacccatacccaaattgaggaagatgttgcaacacagttgacacaacttgcttcgataatta

SEQ ID NO: 12185 - DNA, 80 bp, Homo sapiens
atgtcaggatgcaacccatacccaaattgaggaagatgttgcaacacagttgacacaacttgcttcgataattaagatca

SEQ ID NO: 12186 - DNA, 77 bp, Homo sapiens
caacccatacccaaattgaggaagatgttgcaacacagttgacacaacttgcttcgataattaagatcaattatata

SEQ ID NO: 12187 - DNA, 76 bp, Homo sapiens
cccaaattgaggaagatgttgcaacacagttgacacaacttgcttcgataattaagatcaattatataaaaccaga

SEQ ID NO: 12188 - DNA, 76 bp, Homo sapiens
gaggaagatgttgcaacacagttgacacaacttgcttcgataattaagatcaattatataaaaccagaggacaaaa

SEQ ID NO: 12189 - DNA, 74 bp, Homo sapiens
gttgcaacacagttgacacaacttgcttcgataattaagatcaattatataaaaccagaggacaaaaaagttga

SEQ ID NO: 12190 - DNA, 70 bp, Homo sapiens
cttgcttcgataattaagatcaattatataaaaccagaggacaaaaaagttgaaagtacaccaacaagcc

SEQ ID NO: 12191 - DNA, 72 bp, Homo sapiens
ttatataaaaccagaggacaaaaaagttgaaagtacaccaacaagccttgtcacatgtaatgtacagcaaaa

SEQ ID NO: 12192 - DNA, 71 bp, Homo sapiens
aaaaccagaggacaaaaaagttgaaagtacaccaacaagccttgtcacatgtaatgtacagcaaaaataca

SEQ ID NO: 12193 - DNA, 76 bp, Homo sapiens
aaagtacaccaacaagccttgtcacatgtaatgtacagcaaaaatacaatcaggagaagggcacaatacaacagaa

SEQ ID NO: 12194 - DNA, 78 bp, Homo sapiens
tcacatgtaatgtacagcaaaaatacaatcaggagaagggcacaatacaacagaaaccaccttcaagtgtacacaata

SEQ ID NO: 12195 - DNA, 77 bp, Homo sapiens
tgtaatgtacagcaaaaatacaatcaggagaagggcacaatacaacagaaaccaccttcaagtgtacacaataatca

SEQ ID NO: 12196 - DNA, 76 bp, Homo sapiens
aaatacaatcaggagaagggcacaatacaacagaaaccaccttcaagtgtacacaataatcatggttcatcattaa

SEQ ID NO: 12197 - DNA, 73 bp, Homo sapiens
aagggcacaatacaacagaaaccaccttcaagtgtacacaataatcatggttcatcattaacaaaacaaaaga

SEQ ID NO: 12198 - DNA, 70 bp, Homo sapiens
ccaccttcaagtgtacacaataatcatggttcatcattaacaaaacaaaagaacccaacccagaaaaaga

SEQ ID NO: 12199 - DNA, 69 bp, Homo sapiens
tacacaataatcatggttcatcattaacaaaacaaaagaacccaacccagaaaaagacaaaatccaccc

SEQ ID NO: 12200 - DNA, 70 bp, Homo sapiens
taatcatggttcatcattaacaaaacaaaagaacccaacccagaaaaagacaaaatccaccccatcaaga

SEQ ID NO: 12201 - DNA, 65 bp, Homo sapiens
aaacaaaagaacccaacccagaaaaagacaaaatccaccccatcaagagatcggcggaaaaagaa

SEQ ID NO: 12202 - DNA, 69 bp, Homo sapiens
aaaagacaaaatccaccccatcaagagatcggcggaaaaagaagcccacagttgtaagttatcaagaaa

SEQ ID NO: 12203 - DNA, 71 bp, Homo sapiens
acaaaatccaccccatcaagagatcggcggaaaaagaagcccacagttgtaagttatcaagaaaatgatcg

SEQ ID NO: 12204 - DNA, 71 bp, Homo sapiens
aaaaagaagcccacagttgtaagttatcaagaaaatgatcggcagaagtgggaaaagttgtcctatatgta

SEQ ID NO: 12205 - DNA, 76 bp, Homo sapiens
agttgtaagttatcaagaaaatgatcggcagaagtgggaaaagttgtcctatatgtatggcacaatatgcgacatt

SEQ ID NO: 12206 - DNA, 80 bp, Homo sapiens
atcaagaaaatgatcggcagaagtgggaaaagttgtcctatatgtatggcacaatatgcgacatttggatagcatcgaaa

SEQ ID NO: 12207 - DNA, 79 bp, Homo sapiens
aaatgatcggcagaagtgggaaaagttgtcctatatgtatggcacaatatgcgacatttggatagcatcgaaatttcaa

SEQ ID NO: 12208 - DNA, 76 bp, Homo sapiens
ggcagaagtgggaaaagttgtcctatatgtatggcacaatatgcgacatttggatagcatcgaaatttcaaaattt

SEQ ID NO: 12209 - DNA, 75 bp, Homo sapiens
ggaaaagttgtcctatatgtatggcacaatatgcgacatttggatagcatcgaaatttcaaaattttgggcaatt

SEQ ID NO: 12210 - DNA, 78 bp, Homo sapiens
ctatatgtatggcacaatatgcgacatttggatagcatcgaaatttcaaaattttgggcaattttgtccacatgattt

SEQ ID NO: 12211 - DNA, 76 bp, Homo sapiens
cacaatatgcgacatttggatagcatcgaaatttcaaaattttgggcaattttgtccacatgattttcctactgta

SEQ ID NO: 12212 - DNA, 74 bp, Homo sapiens
tgcgacatttggatagcatcgaaatttcaaaattttgggcaattttgtccacatgattttcctactgtatttgg

SEQ ID NO: 12213 - DNA, 70 bp, Homo sapiens
ggatagcatcgaaatttcaaaattttgggcaattttgtccacatgattttcctactgtatttgggaaaat

SEQ ID NO: 12214 - DNA, 68 bp, Homo sapiens
tttcaaaattttgggcaattttgtccacatgattttcctactgtatttgggaaaatttcttcctcgac

SEQ ID NO: 12215 - DNA, 70 bp, Homo sapiens
ttgggcaattttgtccacatgattttcctactgtatttgggaaaatttcttcctcgaccaaaatatggaa

SEQ ID NO: 12216 - DNA, 69 bp, Homo sapiens
atgattttcctactgtatttgggaaaatttcttcctcgaccaaaatatggaaaccactggctcaaacga

SEQ ID NO: 12217 - DNA, 69 bp, Homo sapiens
ctactgtatttgggaaaatttcttcctcgaccaaaatatggaaaccactggctcaaacgaggtccatta

SEQ ID NO: 12218 - DNA, 70 bp, Homo sapiens
gaaaatttcttcctcgaccaaaatatggaaaccactggctcaaacgaggtccattatgcaacccaaaaca

SEQ ID NO: 12219 - DNA, 70 bp, Homo sapiens
tttcttcctcgaccaaaatatggaaaccactggctcaaacgaggtccattatgcaacccaaaacagtatt

SEQ ID NO: 12220 - DNA, 74 bp, Homo sapiens
aaatatggaaaccactggctcaaacgaggtccattatgcaacccaaaacagtatttccaccactcactcagata

SEQ ID NO: 12221 - DNA, 79 bp, Homo sapiens
tccattatgcaacccaaaacagtatttccaccactcactcagataaaattacagagatatcctgaatcagcagaggaaa

SEQ ID NO: 12222 - DNA, 75 bp, Homo sapiens
aacccaaaacagtatttccaccactcactcagataaaattacagagatatcctgaatcagcagaggaaaaggtga

SEQ ID NO: 12223 - DNA, 76 bp, Homo sapiens
aacagtatttccaccactcactcagataaaattacagagatatcctgaatcagcagaggaaaaggtgaaggttgaa

SEQ ID NO: 12224 - DNA, 77 bp, Homo sapiens
accactcactcagataaaattacagagatatcctgaatcagcagaggaaaaggtgaaggttgaaccattggattcac

SEQ ID NO: 12225 - DNA, 76 bp, Homo sapiens
agataaaattacagagatatcctgaatcagcagaggaaaaggtgaaggttgaaccattggattcactcagcttatt

SEQ ID NO: 12226 - DNA, 78 bp, Homo sapiens
aattacagagatatcctgaatcagcagaggaaaaggtgaaggttgaaccattggattcactcagcttatttcatctta

SEQ ID NO: 12227 - DNA, 75 bp, Homo sapiens
tatcctgaatcagcagaggaaaaggtgaaggttgaaccattggattcactcagcttatttcatcttaaaacggaa

SEQ ID NO: 12228 - DNA, 69 bp, Homo sapiens
agaggaaaaggtgaaggttgaaccattggattcactcagcttatttcatcttaaaacggaatccaacgg

SEQ ID NO: 12229 - DNA, 68 bp, Homo sapiens
aaaaggtgaaggttgaaccattggattcactcagcttatttcatcttaaaacggaatccaacgggaag

SEQ ID NO: 12230 - DNA, 73 bp, Homo sapiens
aaccattggattcactcagcttatttcatcttaaaacggaatccaacgggaaggcattcactgataaagctta

SEQ ID NO: 12231 - DNA, 74 bp, Homo sapiens
ttggattcactcagcttatttcatcttaaaacggaatccaacgggaaggcattcactgataaagcttataattc

SEQ ID NO: 12232 - DNA, 70 bp, Homo sapiens
ttaaaacggaatccaacgggaaggcattcactgataaagcttataattctcaggtacagttaacggtgaa

SEQ ID NO: 12233 - DNA, 74 bp, Homo sapiens
aatccaacgggaaggcattcactgataaagcttataattctcaggtacagttaacggtgaatgccaatcagaaa

SEQ ID NO: 12234 - DNA, 76 bp, Homo sapiens
aaggcattcactgataaagcttataattctcaggtacagttaacggtgaatgccaatcagaaagcccatcctttga

SEQ ID NO: 12235 - DNA, 75 bp, Homo sapiens
attcactgataaagcttataattctcaggtacagttaacggtgaatgccaatcagaaagcccatcctttgaccca

SEQ ID NO: 12236 - DNA, 72 bp, Homo sapiens
aaagcttataattctcaggtacagttaacggtgaatgccaatcagaaagcccatcctttgacccagccctcc

SEQ ID NO: 12237 - DNA, 73 bp, Homo sapiens
attctcaggtacagttaacggtgaatgccaatcagaaagcccatcctttgacccagccctcctctccacctaa

SEQ ID NO: 12238 - DNA, 79 bp, Homo sapiens
atgccaatcagaaagcccatcctttgacccagccctcctctccacctaaccagtgtgctaacgtgatggcaggcgatga

SEQ ID NO: 12239 - DNA, 75 bp, Homo sapiens
aaagcccatcctttgacccagccctcctctccacctaaccagtgtgctaacgtgatggcaggcgatgaccaaata

SEQ ID NO: 12240 - DNA, 75 bp, Homo sapiens
tcctttgacccagccctcctctccacctaaccagtgtgctaacgtgatggcaggcgatgaccaaatacggtttca

SEQ ID NO: 12241 - DNA, 75 bp, Homo sapiens
gccctcctctccacctaaccagtgtgctaacgtgatggcaggcgatgaccaaatacggtttcagcaggttgttaa

SEQ ID NO: 12242 - DNA, 77 bp, Homo sapiens
tccacctaaccagtgtgctaacgtgatggcaggcgatgaccaaatacggtttcagcaggttgttaaggagcaactca

SEQ ID NO: 12243 - DNA, 82 bp, Homo sapiens
taaccagtgtgctaacgtgatggcaggcgatgaccaaatacggtttcagcaggttgttaaggagcaactcatgcatcagaga

SEQ ID NO: 12244 - DNA, 81 bp, Homo sapiens
ctaacgtgatggcaggcgatgaccaaatacggtttcagcaggttgttaaggagcaactcatgcatcagagactgccaacat

SEQ ID NO: 12245 - DNA, 81 bp, Homo sapiens
aggcgatgaccaaatacggtttcagcaggttgttaaggagcaactcatgcatcagagactgccaacattgcctggtatctc

SEQ ID NO: 12246 - DNA, 81 bp, Homo sapiens
accaaatacggtttcagcaggttgttaaggagcaactcatgcatcagagactgccaacattgcctggtatctctcatgaaa

SEQ ID NO: 12247 - DNA, 81 bp, Homo sapiens
tttcagcaggttgttaaggagcaactcatgcatcagagactgccaacattgcctggtatctctcatgaaacacccttaccg

SEQ ID NO: 12248 - DNA, 83 bp, Homo sapiens
tgttaaggagcaactcatgcatcagagactgccaacattgcctggtatctctcatgaaacacccttaccggagtcagcactaa

SEQ ID NO: 12249 - DNA, 82 bp, Homo sapiens
aactcatgcatcagagactgccaacattgcctggtatctctcatgaaacacccttaccggagtcagcactaactctcaggaa

SEQ ID NO: 12250 - DNA, 79 bp, Homo sapiens
atcagagactgccaacattgcctggtatctctcatgaaacacccttaccggagtcagcactaactctcaggaatgtaaa

SEQ ID NO: 12251 - DNA, 77 bp, Homo sapiens
actgccaacattgcctggtatctctcatgaaacacccttaccggagtcagcactaactctcaggaatgtaaatgtag

SEQ ID NO: 12252 - DNA, 77 bp, Homo sapiens
attgcctggtatctctcatgaaacacccttaccggagtcagcactaactctcaggaatgtaaatgtagtgtgttcag

SEQ ID NO: 12253 - DNA, 76 bp, Homo sapiens
atctctcatgaaacacccttaccggagtcagcactaactctcaggaatgtaaatgtagtgtgttcaggtggaatta

SEQ ID NO: 12254 - DNA, 72 bp, Homo sapiens
aaacacccttaccggagtcagcactaactctcaggaatgtaaatgtagtgtgttcaggtggaattacagtgg

SEQ ID NO: 12255 - DNA, 73 bp, Homo sapiens
accggagtcagcactaactctcaggaatgtaaatgtagtgtgttcaggtggaattacagtggtttctaccaaa

SEQ ID NO: 12256 - DNA, 72 bp, Homo sapiens
actaactctcaggaatgtaaatgtagtgtgttcaggtggaattacagtggtttctaccaaaagtgaagagga

SEQ ID NO: 12257 - DNA, 73 bp, Homo sapiens
aatgtaaatgtagtgtgttcaggtggaattacagtggtttctaccaaaagtgaagaggaagtctgttcatcca

SEQ ID NO: 12258 - DNA, 71 bp, Homo sapiens
aaatgtagtgtgttcaggtggaattacagtggtttctaccaaaagtgaagaggaagtctgttcatccagtt

SEQ ID NO: 12259 - DNA, 71 bp, Homo sapiens
aattacagtggtttctaccaaaagtgaagaggaagtctgttcatccagttttggaacatcagaattttcca

SEQ ID NO: 12260 - DNA, 76 bp, Homo sapiens
tttctaccaaaagtgaagaggaagtctgttcatccagttttggaacatcagaattttccacagtggacagtgcaca

SEQ ID NO: 12261 - DNA, 74 bp, Homo sapiens
aagtgaagaggaagtctgttcatccagttttggaacatcagaattttccacagtggacagtgcacagaaaaatt

SEQ ID NO: 12262 - DNA, 74 bp, Homo sapiens
aggaagtctgttcatccagttttggaacatcagaattttccacagtggacagtgcacagaaaaattttaatgat

SEQ ID NO: 12263 - DNA, 77 bp, Homo sapiens
ttcatccagttttggaacatcagaattttccacagtggacagtgcacagaaaaattttaatgattatgccatgaact

SEQ ID NO: 12264 - DNA, 76 bp, Homo sapiens
tggaacatcagaattttccacagtggacagtgcacagaaaaattttaatgattatgccatgaacttctttactaac

SEQ ID NO: 12265 - DNA, 74 bp, Homo sapiens
cagaattttccacagtggacagtgcacagaaaaattttaatgattatgccatgaacttctttactaaccctaca

SEQ ID NO: 12266 - DNA, 71 bp, Homo sapiens
cacagtggacagtgcacagaaaaattttaatgattatgccatgaacttctttactaaccctacaaaaaacc

SEQ ID NO: 12267 - DNA, 71 bp, Homo sapiens
gtgcacagaaaaattttaatgattatgccatgaacttctttactaaccctacaaaaaacctagtgtctata

SEQ ID NO: 12268 - DNA, 71 bp, Homo sapiens
tttaatgattatgccatgaacttctttactaaccctacaaaaaacctagtgtctataactaaagattctga

SEQ ID NO: 12269 - DNA, 71 bp, Homo sapiens
ttatgccatgaacttctttactaaccctacaaaaaacctagtgtctataactaaagattctgaactgccca

SEQ ID NO: 12270 - DNA, 81 bp, Homo sapiens
ctagtgtctataactaaagattctgaactgcccacctgcagctgtcttggtgagtacttgtgtgcatgtgttcttatttca

SEQ ID NO: 12271 - DNA, 73 bp, Homo sapiens
ccctatgcaattctgtaaagctttgggtctaataatcttattccttccacagatcgagttatacaaaaagaca

SEQ ID NO: 12272 - DNA, 71 bp, Homo sapiens
caattctgtaaagctttgggtctaataatcttattccttccacagatcgagttatacaaaaagacaaaggc

SEQ ID NO: 12273 - DNA, 72 bp, Homo sapiens
tttgggtctaataatcttattccttccacagatcgagttatacaaaaagacaaaggcccatattatacacac

SEQ ID NO: 12274 - DNA, 71 bp, Homo sapiens
ctaataatcttattccttccacagatcgagttatacaaaaagacaaaggcccatattatacacaccttggg

SEQ ID NO: 12275 - DNA, 72 bp, Homo sapiens
ttattccttccacagatcgagttatacaaaaagacaaaggcccatattatacacaccttggggcaggaccaa

SEQ ID NO: 12276 - DNA, 76 bp, Homo sapiens
acagatcgagttatacaaaaagacaaaggcccatattatacacaccttggggcaggaccaagtgttgctgctgtca

SEQ ID NO: 12277 - DNA, 75 bp, Homo sapiens
ttatacaaaaagacaaaggcccatattatacacaccttggggcaggaccaagtgttgctgctgtcagggaaatca

SEQ ID NO: 12278 - DNA, 76 bp, Homo sapiens
aaagacaaaggcccatattatacacaccttggggcaggaccaagtgttgctgctgtcagggaaatcatggagaata

SEQ ID NO: 12279 - DNA, 77 bp, Homo sapiens
tattatacacaccttggggcaggaccaagtgttgctgctgtcagggaaatcatggagaataggtgaggaaatacgct

SEQ ID NO: 12280 - DNA, 74 bp, Homo sapiens
accttggggcaggaccaagtgttgctgctgtcagggaaatcatggagaataggtgaggaaatacgcttccctgt

SEQ ID NO: 12281 - DNA, 75 bp, Homo sapiens
aggaccaagtgttgctgctgtcagggaaatcatggagaataggtgaggaaatacgcttccctgttaaaatcattc

SEQ ID NO: 12282 - DNA, 75 bp, Homo sapiens
aagtgttgctgctgtcagggaaatcatggagaataggtgaggaaatacgcttccctgttaaaatcattcttactg

SEQ ID NO: 12283 - DNA, 72 bp, Homo sapiens
acagattgcaattaattagtacattcccttcactgtgttttatactcaggtatggtcaaaaaggaaacgcaa

SEQ ID NO: 12284 - DNA, 71 bp, Homo sapiens
gcaattaattagtacattcccttcactgtgttttatactcaggtatggtcaaaaaggaaacgcaataagga

SEQ ID NO: 12285 - DNA, 70 bp, Homo sapiens
agtacattcccttcactgtgttttatactcaggtatggtcaaaaaggaaacgcaataaggatagaaatag

SEQ ID NO: 12286 - DNA, 71 bp, Homo sapiens
ttcactgtgttttatactcaggtatggtcaaaaaggaaacgcaataaggatagaaatagtagtgtacaccg

SEQ ID NO: 12287 - DNA, 69 bp, Homo sapiens
ttatactcaggtatggtcaaaaaggaaacgcaataaggatagaaatagtagtgtacaccggtaaagaag

SEQ ID NO: 12288 - DNA, 66 bp, Homo sapiens
aggtatggtcaaaaaggaaacgcaataaggatagaaatagtagtgtacaccggtaaagaagggaaa

SEQ ID NO: 12289 - DNA, 67 bp, Homo sapiens
aaaaaggaaacgcaataaggatagaaatagtagtgtacaccggtaaagaagggaaaagctctcatgg

SEQ ID NO: 12290 - DNA, 70 bp, Homo sapiens
aataaggatagaaatagtagtgtacaccggtaaagaagggaaaagctctcatgggtgtccaattgctaag

SEQ ID NO: 12291 - DNA, 70 bp, Homo sapiens
atagaaatagtagtgtacaccggtaaagaagggaaaagctctcatgggtgtccaattgctaagtgggtaa

SEQ ID NO: 12292 - DNA, 69 bp, Homo sapiens
tgtacaccggtaaagaagggaaaagctctcatgggtgtccaattgctaagtgggtaagtatttcctatt

SEQ ID NO: 12293 - DNA, 69 bp, Homo sapiens
gtaaagaagggaaaagctctcatgggtgtccaattgctaagtgggtaagtatttcctatttatacattt

SEQ ID NO: 12294 - DNA, 70 bp, Homo sapiens
ggaaaagctctcatgggtgtccaattgctaagtgggtaagtatttcctatttatacatttttttgaagct

SEQ ID NO: 12295 - DNA, 76 bp, Homo sapiens
caaatttggcatacttgtcttccatagatgaatgtattctgttttttcaggttttaagaagaagcagtgatgaaga

SEQ ID NO: 12296 - DNA, 73 bp, Homo sapiens
catacttgtcttccatagatgaatgtattctgttttttcaggttttaagaagaagcagtgatgaagaaaaagt

SEQ ID NO: 12297 - DNA, 71 bp, Homo sapiens
tagatgaatgtattctgttttttcaggttttaagaagaagcagtgatgaagaaaaagttctttgtttggtc

SEQ ID NO: 12298 - DNA, 69 bp, Homo sapiens
tattctgttttttcaggttttaagaagaagcagtgatgaagaaaaagttctttgtttggtccggcagcg

SEQ ID NO: 12299 - DNA, 70 bp, Homo sapiens
tttttcaggttttaagaagaagcagtgatgaagaaaaagttctttgtttggtccggcagcgtacaggcca

SEQ ID NO: 12300 - DNA, 72 bp, Homo sapiens
ttttaagaagaagcagtgatgaagaaaaagttctttgtttggtccggcagcgtacaggccaccactgtccaa

SEQ ID NO: 12301 - DNA, 76 bp, Homo sapiens
aagcagtgatgaagaaaaagttctttgtttggtccggcagcgtacaggccaccactgtccaactgctgtgatggtg

SEQ ID NO: 12302 - DNA, 77 bp, Homo sapiens
aagaaaaagttctttgtttggtccggcagcgtacaggccaccactgtccaactgctgtgatggtggtgctcatcatg

SEQ ID NO: 12303 - DNA, 80 bp, Homo sapiens
agttctttgtttggtccggcagcgtacaggccaccactgtccaactgctgtgatggtggtgctcatcatggtgtgggatg

SEQ ID NO: 12304 - DNA, 84 bp, Homo sapiens
ttggtccggcagcgtacaggccaccactgtccaactgctgtgatggtggtgctcatcatggtgtgggatggcatccctcttcca

SEQ ID NO: 12305 - DNA, 83 bp, Homo sapiens
agcgtacaggccaccactgtccaactgctgtgatggtggtgctcatcatggtgtgggatggcatccctcttccaatggccgac

SEQ ID NO: 12306 - DNA, 83 bp, Homo sapiens
accactgtccaactgctgtgatggtggtgctcatcatggtgtgggatggcatccctcttccaatggccgaccggctatacaca

SEQ ID NO: 12307 - DNA, 88 bp, Homo sapiens
tgctgtgatggtggtgctcatcatggtgtgggatggcatccctcttccaatggccgaccggctatacacagagctcacagagaatcta

SEQ ID NO: 12308 - DNA, 83 bp, Homo sapiens
atggtggtgctcatcatggtgtgggatggcatccctcttccaatggccgaccggctatacacagagctcacagagaatctaaa

SEQ ID NO: 12309 - DNA, 82 bp, Homo sapiens
atcatggtgtgggatggcatccctcttccaatggccgaccggctatacacagagctcacagagaatctaaagtcatacaatg

SEQ ID NO: 12310 - DNA, 80 bp, Homo sapiens
ggatggcatccctcttccaatggccgaccggctatacacagagctcacagagaatctaaagtcatacaatgggcacccta

SEQ ID NO: 12311 - DNA, 78 bp, Homo sapiens
cctcttccaatggccgaccggctatacacagagctcacagagaatctaaagtcatacaatgggcaccctaccgacaga

SEQ ID NO: 12312 - DNA, 81 bp, Homo sapiens
tccaatggccgaccggctatacacagagctcacagagaatctaaagtcatacaatgggcaccctaccgacagaagatgcac

SEQ ID NO: 12313 - DNA, 81 bp, Homo sapiens
gctatacacagagctcacagagaatctaaagtcatacaatgggcaccctaccgacagaagatgcaccctcaatgaaaagta

SEQ ID NO: 12314 - DNA, 77 bp, Homo sapiens
agagctcacagagaatctaaagtcatacaatgggcaccctaccgacagaagatgcaccctcaatgaaaagtaattaa

SEQ ID NO: 12315 - DNA, 73 bp, Homo sapiens
agaatctaaagtcatacaatgggcaccctaccgacagaagatgcaccctcaatgaaaagtaattaaatctgtt

SEQ ID NO: 12316 - DNA, 73 bp, Homo sapiens
ctaaagtcatacaatgggcaccctaccgacagaagatgcaccctcaatgaaaagtaattaaatctgttttata

SEQ ID NO: 12317 - DNA, 72 bp, Homo sapiens
acaatgggcaccctaccgacagaagatgcaccctcaatgaaaagtaattaaatctgttttatactgccttac

SEQ ID NO: 12318 - DNA, 79 bp, Homo sapiens
aggtattgtaatgcttcatcaattcactctcttgaattacaatcttacagtcgtacctgtacatgtcaaggaattgatc

SEQ ID NO: 12319 - DNA, 80 bp, Homo sapiens
aatgcttcatcaattcactctcttgaattacaatcttacagtcgtacctgtacatgtcaaggaattgatccagagacttg

SEQ ID NO: 12320 - DNA, 79 bp, Homo sapiens
attcactctcttgaattacaatcttacagtcgtacctgtacatgtcaaggaattgatccagagacttgtggagcttcat

SEQ ID NO: 12321 - DNA, 77 bp, Homo sapiens
cttgaattacaatcttacagtcgtacctgtacatgtcaaggaattgatccagagacttgtggagcttcattctcttt

SEQ ID NO: 12322 - DNA, 79 bp, Homo sapiens
aatcttacagtcgtacctgtacatgtcaaggaattgatccagagacttgtggagcttcattctcttttggctgttcatg

SEQ ID NO: 12323 - DNA, 80 bp, Homo sapiens
tacctgtacatgtcaaggaattgatccagagacttgtggagcttcattctcttttggctgttcatggagtatgtacttta

SEQ ID NO: 12324 - DNA, 80 bp, Homo sapiens
atgtcaaggaattgatccagagacttgtggagcttcattctcttttggctgttcatggagtatgtactttaatggctgta

SEQ ID NO: 12325 - DNA, 77 bp, Homo sapiens
aattgatccagagacttgtggagcttcattctcttttggctgttcatggagtatgtactttaatggctgtaagtttg

SEQ ID NO: 12326 - DNA, 76 bp, Homo sapiens
agagacttgtggagcttcattctcttttggctgttcatggagtatgtactttaatggctgtaagtttggtagaagc

SEQ ID NO: 12327 - DNA, 75 bp, Homo sapiens
tggagcttcattctcttttggctgttcatggagtatgtactttaatggctgtaagtttggtagaagcccaagccc

SEQ ID NO: 12328 - DNA, 73 bp, Homo sapiens
ttttggctgttcatggagtatgtactttaatggctgtaagtttggtagaagcccaagccccagaagatttaga

SEQ ID NO: 12329 - DNA, 74 bp, Homo sapiens
ttcatggagtatgtactttaatggctgtaagtttggtagaagcccaagccccagaagatttagaattgatccaa

SEQ ID NO: 12330 - DNA, 73 bp, Homo sapiens
agtatgtactttaatggctgtaagtttggtagaagcccaagccccagaagatttagaattgatccaagctctc

SEQ ID NO: 12331 - DNA, 74 bp, Homo sapiens
ttaatggctgtaagtttggtagaagcccaagccccagaagatttagaattgatccaagctctcccttacatgta

SEQ ID NO: 12332 - DNA, 72 bp, Homo sapiens
taagtttggtagaagcccaagccccagaagatttagaattgatccaagctctcccttacatgtaagtgtcct

SEQ ID NO: 12333 - DNA, 72 bp, Homo sapiens
aagcccaagccccagaagatttagaattgatccaagctctcccttacatgtaagtgtccttctttattcaaa

SEQ ID NO: 12334 - DNA, 71 bp, Homo sapiens
cccagaagatttagaattgatccaagctctcccttacatgtaagtgtccttctttattcaaataatttatt

SEQ ID NO: 12335 - DNA, 68 bp, Homo sapiens
ggaaaaacccatttgccaaaatttcaaagactcagaaagtttactacccacagacctactatgaaaga

SEQ ID NO: 12336 - DNA, 69 bp, Homo sapiens
acccatttgccaaaatttcaaagactcagaaagtttactacccacagacctactatgaaagaattacta

SEQ ID NO: 12337 - DNA, 70 bp, Homo sapiens
tttcaaagactcagaaagtttactacccacagacctactatgaaagaattactaaaggacgtaatccaga

SEQ ID NO: 12338 - DNA, 70 bp, Homo sapiens
ctcagaaagtttactacccacagacctactatgaaagaattactaaaggacgtaatccagaaagaagata

SEQ ID NO: 12339 - DNA, 70 bp, Homo sapiens
ttactacccacagacctactatgaaagaattactaaaggacgtaatccagaaagaagatatatgaaaccg

SEQ ID NO: 12340 - DNA, 70 bp, Homo sapiens
agacctactatgaaagaattactaaaggacgtaatccagaaagaagatatatgaaaccggaacgaatcag

SEQ ID NO: 12341 - DNA, 69 bp, Homo sapiens
actatgaaagaattactaaaggacgtaatccagaaagaagatatatgaaaccggaacgaatcagtccgg

SEQ ID NO: 12342 - DNA, 69 bp, Homo sapiens
aattactaaaggacgtaatccagaaagaagatatatgaaaccggaacgaatcagtccgggacacgaggc

SEQ ID NO: 12343 - DNA, 73 bp, Homo sapiens
gtaatccagaaagaagatatatgaaaccggaacgaatcagtccgggacacgaggccatggtgagcaaagaaat

SEQ ID NO: 12344 - DNA, 72 bp, Homo sapiens
aagaagatatatgaaaccggaacgaatcagtccgggacacgaggccatggtgagcaaagaaattagtcgaac

SEQ ID NO: 12345 - DNA, 72 bp, Homo sapiens
tatgaaaccggaacgaatcagtccgggacacgaggccatggtgagcaaagaaattagtcgaacttggtgtta

SEQ ID NO: 12346 - DNA, 70 bp, Homo sapiens
aacgaatcagtccgggacacgaggccatggtgagcaaagaaattagtcgaacttggtgttaagttaaata

SEQ ID NO: 12347 - DNA, 67 bp, Homo sapiens
cttaaacacatgaaggtgcgattataaaatacctaatggattctgttttcctataggaaaaaaacct

SEQ ID NO: 12348 - DNA, 67 bp, Homo sapiens
gaaggtgcgattataaaatacctaatggattctgttttcctataggaaaaaaaccttgaagataact

SEQ ID NO: 12349 - DNA, 66 bp, Homo sapiens
aaaatacctaatggattctgttttcctataggaaaaaaaccttgaagataacttacagagtttggc

SEQ ID NO: 12350 - DNA, 70 bp, Homo sapiens
atggattctgttttcctataggaaaaaaaccttgaagataacttacagagtttggctacacgattagctc

SEQ ID NO: 12351 - DNA, 69 bp, Homo sapiens
tctgttttcctataggaaaaaaaccttgaagataacttacagagtttggctacacgattagctccaatt

SEQ ID NO: 12352 - DNA, 73 bp, Homo sapiens
taggaaaaaaaccttgaagataacttacagagtttggctacacgattagctccaatttataagcagtatgctc

SEQ ID NO: 12353 - DNA, 75 bp, Homo sapiens
aaaccttgaagataacttacagagtttggctacacgattagctccaatttataagcagtatgctccagtagctta

SEQ ID NO: 12354 - DNA, 76 bp, Homo sapiens
taacttacagagtttggctacacgattagctccaatttataagcagtatgctccagtagcttaccaaaatcaggta

SEQ ID NO: 12355 - DNA, 78 bp, Homo sapiens
tttggctacacgattagctccaatttataagcagtatgctccagtagcttaccaaaatcaggtatgtattggtatgaa

SEQ ID NO: 12356 - DNA, 75 bp, Homo sapiens
cgattagctccaatttataagcagtatgctccagtagcttaccaaaatcaggtatgtattggtatgaacttttta

SEQ ID NO: 12357 - DNA, 74 bp, Homo sapiens
agctccaatttataagcagtatgctccagtagcttaccaaaatcaggtatgtattggtatgaactttttattta

SEQ ID NO: 12358 - DNA, 75 bp, Homo sapiens
atttccttctctctcttaagattgtgctccatgctttcttttctaggtggaatatgaaaatgttgcccgagaatg

SEQ ID NO: 12359 - DNA, 77 bp, Homo sapiens
ttctctctcttaagattgtgctccatgctttcttttctaggtggaatatgaaaatgttgcccgagaatgtcggcttg

SEQ ID NO: 12360 - DNA, 78 bp, Homo sapiens
ttaagattgtgctccatgctttcttttctaggtggaatatgaaaatgttgcccgagaatgtcggcttggcagcaagga

SEQ ID NO: 12361 - DNA, 73 bp, Homo sapiens
atgctttcttttctaggtggaatatgaaaatgttgcccgagaatgtcggcttggcagcaaggaaggtcgtccc

SEQ ID NO: 12362 - DNA, 73 bp, Homo sapiens
ttcttttctaggtggaatatgaaaatgttgcccgagaatgtcggcttggcagcaaggaaggtcgtcccttctc

SEQ ID NO: 12363 - DNA, 75 bp, Homo sapiens
aatatgaaaatgttgcccgagaatgtcggcttggcagcaaggaaggtcgtcccttctctggggtcactgcttgcc

SEQ ID NO: 12364 - DNA, 74 bp, Homo sapiens
aaaatgttgcccgagaatgtcggcttggcagcaaggaaggtcgtcccttctctggggtcactgcttgcctggac

SEQ ID NO: 12365 - DNA, 78 bp, Homo sapiens
cccgagaatgtcggcttggcagcaaggaaggtcgtcccttctctggggtcactgcttgcctggacttctgtgctcatc

SEQ ID NO: 12366 - DNA, 79 bp, Homo sapiens
ttggcagcaaggaaggtcgtcccttctctggggtcactgcttgcctggacttctgtgctcatccccacagggacattca

SEQ ID NO: 12367 - DNA, 76 bp, Homo sapiens
aaggaaggtcgtcccttctctggggtcactgcttgcctggacttctgtgctcatccccacagggacattcacaaca

SEQ ID NO: 12368 - DNA, 80 bp, Homo sapiens
tcgtcccttctctggggtcactgcttgcctggacttctgtgctcatccccacagggacattcacaacatgaataatggaa

SEQ ID NO: 12369 - DNA, 82 bp, Homo sapiens
gggtcactgcttgcctggacttctgtgctcatccccacagggacattcacaacatgaataatggaagcactgtggtatgtac

SEQ ID NO: 12370 - DNA, 82 bp, Homo sapiens
ttgcctggacttctgtgctcatccccacagggacattcacaacatgaataatggaagcactgtggtatgtacctgtgtgaat

SEQ ID NO: 12371 - DNA, 82 bp, Homo sapiens
ttctgtgctcatccccacagggacattcacaacatgaataatggaagcactgtggtatgtacctgtgtgaatttgtattcta

SEQ ID NO: 12372 - DNA, 78 bp, Homo sapiens
ctcatccccacagggacattcacaacatgaataatggaagcactgtggtatgtacctgtgtgaatttgtattctaaaa

SEQ ID NO: 12373 - DNA, 72 bp, Homo sapiens
tgcacgacccgtatatctttcccatttcatgtttttctccctatcaggtttgtaccttaactcgagaagata

SEQ ID NO: 12374 - DNA, 70 bp, Homo sapiens
tatatctttcccatttcatgtttttctccctatcaggtttgtaccttaactcgagaagataaccgctctt

SEQ ID NO: 12375 - DNA, 69 bp, Homo sapiens
ccatttcatgtttttctccctatcaggtttgtaccttaactcgagaagataaccgctctttgggtgtta

SEQ ID NO: 12376 - DNA, 69 bp, Homo sapiens
tttttctccctatcaggtttgtaccttaactcgagaagataaccgctctttgggtgttattcctcaaga

SEQ ID NO: 12377 - DNA, 74 bp, Homo sapiens
ctccctatcaggtttgtaccttaactcgagaagataaccgctctttgggtgttattcctcaagatgagcagctc

SEQ ID NO: 12378 - DNA, 76 bp, Homo sapiens
tttgtaccttaactcgagaagataaccgctctttgggtgttattcctcaagatgagcagctccatgtgctacctct

SEQ ID NO: 12379 - DNA, 77 bp, Homo sapiens
ttaactcgagaagataaccgctctttgggtgttattcctcaagatgagcagctccatgtgctacctctttataagct

SEQ ID NO: 12380 - DNA, 79 bp, Homo sapiens
aagataaccgctctttgggtgttattcctcaagatgagcagctccatgtgctacctctttataagctttcagacacaga

SEQ ID NO: 12381 - DNA, 81 bp, Homo sapiens
tttgggtgttattcctcaagatgagcagctccatgtgctacctctttataagctttcagacacagatgagtttggctccaa

SEQ ID NO: 12382 - DNA, 81 bp, Homo sapiens
ttattcctcaagatgagcagctccatgtgctacctctttataagctttcagacacagatgagtttggctccaaggaaggaa

SEQ ID NO: 12383 - DNA, 81 bp, Homo sapiens
aagatgagcagctccatgtgctacctctttataagctttcagacacagatgagtttggctccaaggaaggaatggaagcca

SEQ ID NO: 12384 - DNA, 78 bp, Homo sapiens
atgtgctacctctttataagctttcagacacagatgagtttggctccaaggaaggaatggaagccaagatcaaatctg

SEQ ID NO: 12385 - DNA, 75 bp, Homo sapiens
ctacctctttataagctttcagacacagatgagtttggctccaaggaaggaatggaagccaagatcaaatctggg

SEQ ID NO: 12386 - DNA, 77 bp, Homo sapiens
ataagctttcagacacagatgagtttggctccaaggaaggaatggaagccaagatcaaatctggggccatcgaggtc

SEQ ID NO: 12387 - DNA, 76 bp, Homo sapiens
agacacagatgagtttggctccaaggaaggaatggaagccaagatcaaatctggggccatcgaggtcctggcaccc

SEQ ID NO: 12388 - DNA, 73 bp, Homo sapiens
ttggctccaaggaaggaatggaagccaagatcaaatctggggccatcgaggtcctggcaccccgccgcaaaaa

SEQ ID NO: 12389 - DNA, 71 bp, Homo sapiens
gaaggaatggaagccaagatcaaatctggggccatcgaggtcctggcaccccgccgcaaaaaaagaacgtg

SEQ ID NO: 12390 - DNA, 71 bp, Homo sapiens
aatggaagccaagatcaaatctggggccatcgaggtcctggcaccccgccgcaaaaaaagaacgtgtttca

SEQ ID NO: 12391 - DNA, 71 bp, Homo sapiens
aagatcaaatctggggccatcgaggtcctggcaccccgccgcaaaaaaagaacgtgtttcactcagcctgt

SEQ ID NO: 12392 - DNA, 67 bp, Homo sapiens
aggtcctggcaccccgccgcaaaaaaagaacgtgtttcactcagcctgttccccgttctggaaagaa

SEQ ID NO: 12393 - DNA, 73 bp, Homo sapiens
ccgccgcaaaaaaagaacgtgtttcactcagcctgttccccgttctggaaagaagagggctgcgatgatgaca

SEQ ID NO: 12394 - DNA, 72 bp, Homo sapiens
aaaaagaacgtgtttcactcagcctgttccccgttctggaaagaagagggctgcgatgatgacagaggttct

SEQ ID NO: 12395 - DNA, 78 bp, Homo sapiens
acgtgtttcactcagcctgttccccgttctggaaagaagagggctgcgatgatgacagaggttcttgcacataagata

SEQ ID NO: 12396 - DNA, 77 bp, Homo sapiens
agcctgttccccgttctggaaagaagagggctgcgatgatgacagaggttcttgcacataagataagggcagtggaa

SEQ ID NO: 12397 - DNA, 76 bp, Homo sapiens
cgttctggaaagaagagggctgcgatgatgacagaggttcttgcacataagataagggcagtggaaaagaaaccta

SEQ ID NO: 12398 - DNA, 76 bp, Homo sapiens
tggaaagaagagggctgcgatgatgacagaggttcttgcacataagataagggcagtggaaaagaaacctattccc

SEQ ID NO: 12399 - DNA, 77 bp, Homo sapiens
tgcgatgatgacagaggttcttgcacataagataagggcagtggaaaagaaacctattccccgaatcaagcggaaga

SEQ ID NO: 12400 - DNA, 71 bp, Homo sapiens
acagaggttcttgcacataagataagggcagtggaaaagaaacctattccccgaatcaagcggaagaataa

SEQ ID NO: 12401 - DNA, 72 bp, Homo sapiens
ttcttgcacataagataagggcagtggaaaagaaacctattccccgaatcaagcggaagaataactcaacaa

SEQ ID NO: 12402 - DNA, 69 bp, Homo sapiens
ataagataagggcagtggaaaagaaacctattccccgaatcaagcggaagaataactcaacaacaacaa

SEQ ID NO: 12403 - DNA, 71 bp, Homo sapiens
actcaacaacaacaaacaacagtaagccttcgtcactgccaaccttaggtgagccctatggaacctggtaa

SEQ ID NO: 12404 - DNA, 73 bp, Homo sapiens
aacaaacaacagtaagccttcgtcactgccaaccttaggtgagccctatggaacctggtaatctctgcacaac

SEQ ID NO: 12405 - DNA, 67 bp, Homo sapiens
ctaccaaaagtaatttgtatttttcttcacatttggtgtccttgtttagggagtaacactgagaccg

SEQ ID NO: 12406 - DNA, 70 bp, Homo sapiens
tttgtatttttcttcacatttggtgtccttgtttagggagtaacactgagaccgtgcaacctgaagtaaa

SEQ ID NO: 12407 - DNA, 70 bp, Homo sapiens
ttttcttcacatttggtgtccttgtttagggagtaacactgagaccgtgcaacctgaagtaaaaagtgaa

SEQ ID NO: 12408 - DNA, 68 bp, Homo sapiens
acatttggtgtccttgtttagggagtaacactgagaccgtgcaacctgaagtaaaaagtgaaaccgaa

SEQ ID NO: 12409 - DNA, 67 bp, Homo sapiens
tgtttagggagtaacactgagaccgtgcaacctgaagtaaaaagtgaaaccgaaccccattttatct

SEQ ID NO: 12410 - DNA, 66 bp, Homo sapiens
gggagtaacactgagaccgtgcaacctgaagtaaaaagtgaaaccgaaccccattttatcttaaaa

SEQ ID NO: 12411 - DNA, 66 bp, Homo sapiens
agaccgtgcaacctgaagtaaaaagtgaaaccgaaccccattttatcttaaaaagttcagacaaca

SEQ ID NO: 12412 - DNA, 65 bp, Homo sapiens
gcaacctgaagtaaaaagtgaaaccgaaccccattttatcttaaaaagttcagacaacactaaaa

SEQ ID NO: 12413 - DNA, 69 bp, Homo sapiens
aagtgaaaccgaaccccattttatcttaaaaagttcagacaacactaaaacttattcgctgatgccatc

SEQ ID NO: 12414 - DNA, 69 bp, Homo sapiens
aaaccgaaccccattttatcttaaaaagttcagacaacactaaaacttattcgctgatgccatccgctc

SEQ ID NO: 12415 - DNA, 73 bp, Homo sapiens
ttttatcttaaaaagttcagacaacactaaaacttattcgctgatgccatccgctcctcacccagtgaaagag

SEQ ID NO: 12416 - DNA, 76 bp, Homo sapiens
ttaaaaagttcagacaacactaaaacttattcgctgatgccatccgctcctcacccagtgaaagaggcatctccag

SEQ ID NO: 12417 - DNA, 78 bp, Homo sapiens
agacaacactaaaacttattcgctgatgccatccgctcctcacccagtgaaagaggcatctccaggcttctcctggtc

SEQ ID NO: 12418 - DNA, 77 bp, Homo sapiens
taaaacttattcgctgatgccatccgctcctcacccagtgaaagaggcatctccaggcttctcctggtccccgaaga

SEQ ID NO: 12419 - DNA, 81 bp, Homo sapiens
ctgatgccatccgctcctcacccagtgaaagaggcatctccaggcttctcctggtccccgaagactgcttcagccacacca

SEQ ID NO: 12420 - DNA, 81 bp, Homo sapiens
cagtgaaagaggcatctccaggcttctcctggtccccgaagactgcttcagccacaccagctccactgaagaatgacgcaa

SEQ ID NO: 12421 - DNA, 80 bp, Homo sapiens
aaagaggcatctccaggcttctcctggtccccgaagactgcttcagccacaccagctccactgaagaatgacgcaacagc

SEQ ID NO: 12422 - DNA, 78 bp, Homo sapiens
ggcttctcctggtccccgaagactgcttcagccacaccagctccactgaagaatgacgcaacagcctcatgcgggttt

SEQ ID NO: 12423 - DNA, 79 bp, Homo sapiens
tggtccccgaagactgcttcagccacaccagctccactgaagaatgacgcaacagcctcatgcgggttttcagaaagaa

SEQ ID NO: 12424 - DNA, 81 bp, Homo sapiens
aagactgcttcagccacaccagctccactgaagaatgacgcaacagcctcatgcgggttttcagaaagaagcagcactccc

SEQ ID NO: 12425 - DNA, 80 bp, Homo sapiens
agccacaccagctccactgaagaatgacgcaacagcctcatgcgggttttcagaaagaagcagcactccccactgtacga

SEQ ID NO: 12426 - DNA, 79 bp, Homo sapiens
agctccactgaagaatgacgcaacagcctcatgcgggttttcagaaagaagcagcactccccactgtacgatgccttcg

SEQ ID NO: 12427 - DNA, 76 bp, Homo sapiens
aagaatgacgcaacagcctcatgcgggttttcagaaagaagcagcactccccactgtacgatgccttcgggaagac

SEQ ID NO: 12428 - DNA, 77 bp, Homo sapiens
aacagcctcatgcgggttttcagaaagaagcagcactccccactgtacgatgccttcgggaagactcagtggtgcca

SEQ ID NO: 12429 - DNA, 81 bp, Homo sapiens
ctcatgcgggttttcagaaagaagcagcactccccactgtacgatgccttcgggaagactcagtggtgccaatgcagctgc

SEQ ID NO: 12430 - DNA, 83 bp, Homo sapiens
ttttcagaaagaagcagcactccccactgtacgatgccttcgggaagactcagtggtgccaatgcagctgctgctgatggccc

SEQ ID NO: 12431 - DNA, 85 bp, Homo sapiens
agcactccccactgtacgatgccttcgggaagactcagtggtgccaatgcagctgctgctgatggccctggcatttcacagcttg

SEQ ID NO: 12432 - DNA, 85 bp, Homo sapiens
ccactgtacgatgccttcgggaagactcagtggtgccaatgcagctgctgctgatggccctggcatttcacagcttggcgaagtg

SEQ ID NO: 12433 - DNA, 85 bp, Homo sapiens
acgatgccttcgggaagactcagtggtgccaatgcagctgctgctgatggccctggcatttcacagcttggcgaagtggctcctc

SEQ ID NO: 12434 - DNA, 83 bp, Homo sapiens
cgggaagactcagtggtgccaatgcagctgctgctgatggccctggcatttcacagcttggcgaagtggctcctctccccacc

SEQ ID NO: 12435 - DNA, 88 bp, Homo sapiens
gtgccaatgcagctgctgctgatggccctggcatttcacagcttggcgaagtggctcctctccccaccctgtctgctcctgtgatgga

SEQ ID NO: 12436 - DNA, 81 bp, Homo sapiens
tgatggccctggcatttcacagcttggcgaagtggctcctctccccaccctgtctgctcctgtgatggagcccctcattaa

SEQ ID NO: 12437 - DNA, 80 bp, Homo sapiens
tcacagcttggcgaagtggctcctctccccaccctgtctgctcctgtgatggagcccctcattaattctgagccttccac

SEQ ID NO: 12438 - DNA, 79 bp, Homo sapiens
aagtggctcctctccccaccctgtctgctcctgtgatggagcccctcattaattctgagccttccactggtgtgactga

SEQ ID NO: 12439 - DNA, 83 bp, Homo sapiens
tgtctgctcctgtgatggagcccctcattaattctgagccttccactggtgtgactgagccgctaacgcctcatcagccaaac

SEQ ID NO: 12440 - DNA, 81 bp, Homo sapiens
tcctgtgatggagcccctcattaattctgagccttccactggtgtgactgagccgctaacgcctcatcagccaaaccacca

SEQ ID NO: 12441 - DNA, 77 bp, Homo sapiens
ccctcattaattctgagccttccactggtgtgactgagccgctaacgcctcatcagccaaaccaccagccctccttc

SEQ ID NO: 12442 - DNA, 77 bp, Homo sapiens
attaattctgagccttccactggtgtgactgagccgctaacgcctcatcagccaaaccaccagccctccttcctcac

SEQ ID NO: 12443 - DNA, 77 bp, Homo sapiens
cttccactggtgtgactgagccgctaacgcctcatcagccaaaccaccagccctccttcctcacctctcctcaagac

SEQ ID NO: 12444 - DNA, 76 bp, Homo sapiens
gctaacgcctcatcagccaaaccaccagccctccttcctcacctctcctcaagaccttgcctcttctccaatggaa

SEQ ID NO: 12445 - DNA, 78 bp, Homo sapiens
aaaccaccagccctccttcctcacctctcctcaagaccttgcctcttctccaatggaagaagatgagcagcattctga

SEQ ID NO: 12446 - DNA, 85 bp, Homo sapiens
ctccttcctcacctctcctcaagaccttgcctcttctccaatggaagaagatgagcagcattctgaagcagatgagcctccatca

SEQ ID NO: 12447 - DNA, 83 bp, Homo sapiens
acctctcctcaagaccttgcctcttctccaatggaagaagatgagcagcattctgaagcagatgagcctccatcagacgaacc

SEQ ID NO: 12448 - DNA, 85 bp, Homo sapiens
aagaccttgcctcttctccaatggaagaagatgagcagcattctgaagcagatgagcctccatcagacgaacccctatctgatga

SEQ ID NO: 12449 - DNA, 84 bp, Homo sapiens
cttgcctcttctccaatggaagaagatgagcagcattctgaagcagatgagcctccatcagacgaacccctatctgatgacccc

SEQ ID NO: 12450 - DNA, 84 bp, Homo sapiens
aagatgagcagcattctgaagcagatgagcctccatcagacgaacccctatctgatgaccccctgtcacctgctgaggagaaat

SEQ ID NO: 12451 - DNA, 81 bp, Homo sapiens
ttctgaagcagatgagcctccatcagacgaacccctatctgatgaccccctgtcacctgctgaggagaaattgccccacat

SEQ ID NO: 12452 - DNA, 81 bp, Homo sapiens
agatgagcctccatcagacgaacccctatctgatgaccccctgtcacctgctgaggagaaattgccccacattgatgagta

SEQ ID NO: 12453 - DNA, 81 bp, Homo sapiens
tccatcagacgaacccctatctgatgaccccctgtcacctgctgaggagaaattgccccacattgatgagtattggtcaga

SEQ ID NO: 12454 - DNA, 79 bp, Homo sapiens
acgaacccctatctgatgaccccctgtcacctgctgaggagaaattgccccacattgatgagtattggtcagacagtga

SEQ ID NO: 12455 - DNA, 83 bp, Homo sapiens
tatctgatgaccccctgtcacctgctgaggagaaattgccccacattgatgagtattggtcagacagtgagcacatctttttg

SEQ ID NO: 12456 - DNA, 81 bp, Homo sapiens
cctgctgaggagaaattgccccacattgatgagtattggtcagacagtgagcacatctttttggatgcaaatattggtggg

SEQ ID NO: 12457 - DNA, 80 bp, Homo sapiens
agaaattgccccacattgatgagtattggtcagacagtgagcacatctttttggatgcaaatattggtggggtggccatc

SEQ ID NO: 12458 - DNA, 83 bp, Homo sapiens
attgatgagtattggtcagacagtgagcacatctttttggatgcaaatattggtggggtggccatcgcacctgctcacggctc

SEQ ID NO: 12459 - DNA, 79 bp, Homo sapiens
tattggtcagacagtgagcacatctttttggatgcaaatattggtggggtggccatcgcacctgctcacggctcggttt

SEQ ID NO: 12460 - DNA, 79 bp, Homo sapiens
agacagtgagcacatctttttggatgcaaatattggtggggtggccatcgcacctgctcacggctcggttttgattgag

SEQ ID NO: 12461 - DNA, 76 bp, Homo sapiens
acatctttttggatgcaaatattggtggggtggccatcgcacctgctcacggctcggttttgattgagtgtgcccg

SEQ ID NO: 12462 - DNA, 79 bp, Homo sapiens
atattggtggggtggccatcgcacctgctcacggctcggttttgattgagtgtgcccggcgagagctgcacgctaccac

SEQ ID NO: 12463 - DNA, 77 bp, Homo sapiens
tttgattgagtgtgcccggcgagagctgcacgctaccactcctgttgagcaccccaaccgtaatcatccaacccgcc

SEQ ID NO: 12464 - DNA, 74 bp, Homo sapiens
ccggcgagagctgcacgctaccactcctgttgagcaccccaaccgtaatcatccaacccgcctctcccttgtct

SEQ ID NO: 12465 - DNA, 71 bp, Homo sapiens
taccactcctgttgagcaccccaaccgtaatcatccaacccgcctctcccttgtcttttaccagcacaaaa

SEQ ID NO: 12466 - DNA, 69 bp, Homo sapiens
ttgagcaccccaaccgtaatcatccaacccgcctctcccttgtcttttaccagcacaaaaacctaaata

SEQ ID NO: 12467 - DNA, 66 bp, Homo sapiens
cccaaccgtaatcatccaacccgcctctcccttgtcttttaccagcacaaaaacctaaataagccc

SEQ ID NO: 12468 - DNA, 68 bp, Homo sapiens
taatcatccaacccgcctctcccttgtcttttaccagcacaaaaacctaaataagccccaacatggtt

SEQ ID NO: 12469 - DNA, 66 bp, Homo sapiens
cccttgtcttttaccagcacaaaaacctaaataagccccaacatggttttgaactaaacaagatta

SEQ ID NO: 12470 - DNA, 67 bp, Homo sapiens
ccagcacaaaaacctaaataagccccaacatggttttgaactaaacaagattaagtttgaggctaaa

SEQ ID NO: 12471 - DNA, 67 bp, Homo sapiens
aacctaaataagccccaacatggttttgaactaaacaagattaagtttgaggctaaagaagctaaga

SEQ ID NO: 12472 - DNA, 68 bp, Homo sapiens
ataagccccaacatggttttgaactaaacaagattaagtttgaggctaaagaagctaagaataagaaa

SEQ ID NO: 12473 - DNA, 71 bp, Homo sapiens
ggttttgaactaaacaagattaagtttgaggctaaagaagctaagaataagaaaatgaaggcctcagagca

SEQ ID NO: 12474 - DNA, 70 bp, Homo sapiens
aaacaagattaagtttgaggctaaagaagctaagaataagaaaatgaaggcctcagagcaaaaagaccag

SEQ ID NO: 12475 - DNA, 74 bp, Homo sapiens
attaagtttgaggctaaagaagctaagaataagaaaatgaaggcctcagagcaaaaagaccaggcagctaatga

SEQ ID NO: 12476 - DNA, 76 bp, Homo sapiens
taagaataagaaaatgaaggcctcagagcaaaaagaccaggcagctaatgaaggtccagaacagtcctctgaagta

SEQ ID NO: 12477 - DNA, 75 bp, Homo sapiens
agaaaatgaaggcctcagagcaaaaagaccaggcagctaatgaaggtccagaacagtcctctgaagtaaatgaat

SEQ ID NO: 12478 - DNA, 75 bp, Homo sapiens
cctcagagcaaaaagaccaggcagctaatgaaggtccagaacagtcctctgaagtaaatgaattgaaccaaattc

SEQ ID NO: 12479 - DNA, 73 bp, Homo sapiens
aaaaagaccaggcagctaatgaaggtccagaacagtcctctgaagtaaatgaattgaaccaaattccttctca

SEQ ID NO: 12480 - DNA, 76 bp, Homo sapiens
gcagctaatgaaggtccagaacagtcctctgaagtaaatgaattgaaccaaattccttctcataaagcattaacat

SEQ ID NO: 12481 - DNA, 75 bp, Homo sapiens
cagaacagtcctctgaagtaaatgaattgaaccaaattccttctcataaagcattaacattaacccatgacaatg

SEQ ID NO: 12482 - DNA, 73 bp, Homo sapiens
attaacattaacccatgacaatgttgtcaccgtgtccccttatgctctcacacacgttgcggggccctataac

SEQ ID NO: 12483 - DNA, 73 bp, Homo sapiens
ttaacccatgacaatgttgtcaccgtgtccccttatgctctcacacacgttgcggggccctataaccattggg

SEQ ID NO: 12484 - DNA, 72 bp, Homo sapiens
aatgttgtcaccgtgtccccttatgctctcacacacgttgcggggccctataaccattgggtctgaaggctt

SEQ ID NO: 12485 - DNA, 70 bp, Homo sapiens
accgtgtccccttatgctctcacacacgttgcggggccctataaccattgggtctgaaggcttttctccc

SEQ ID NO: 12486 - DNA, 72 bp, Homo sapiens
ttatgctctcacacacgttgcggggccctataaccattgggtctgaaggcttttctccccctcttaatgcct

SEQ ID NO: 12487 - DNA, 69 bp, Homo sapiens
acacacgttgcggggccctataaccattgggtctgaaggcttttctccccctcttaatgcctttgctag

SEQ ID NO: 12488 - DNA, 71 bp, Homo sapiens
tataaccattgggtctgaaggcttttctccccctcttaatgcctttgctagtgcagtgtattttttcaagg

SEQ ID NO: 12489 - DNA, 71 bp, Homo sapiens
ttttctccccctcttaatgcctttgctagtgcagtgtattttttcaaggtgctgttaaaagaaagtcatgt

SEQ ID NO: 12490 - DNA, 74 bp, Homo sapiens
tcttaatgcctttgctagtgcagtgtattttttcaaggtgctgttaaaagaaagtcatgttgtcgtttactatc

SEQ ID NO: 12491 - DNA, 75 bp, Homo sapiens
cctttgctagtgcagtgtattttttcaaggtgctgttaaaagaaagtcatgttgtcgtttactatcttcatctca

SEQ ID NO: 12492 - DNA, 72 bp, Homo sapiens
gtgtattttttcaaggtgctgttaaaagaaagtcatgttgtcgtttactatcttcatctcacccatttcaag

SEQ ID NO: 12493 - DNA, 74 bp, Homo sapiens
ttcaaggtgctgttaaaagaaagtcatgttgtcgtttactatcttcatctcacccatttcaagtctgaggtaaa

SEQ ID NO: 12494 - DNA, 72 bp, Homo sapiens
gtgctgttaaaagaaagtcatgttgtcgtttactatcttcatctcacccatttcaagtctgaggtaaaaaaa

SEQ ID NO: 12495 - DNA, 73 bp, Homo sapiens
aagaaagtcatgttgtcgtttactatcttcatctcacccatttcaagtctgaggtaaaaaaataataatgata

SEQ ID NO: 12496 - DNA, 66 bp, Homo sapiens
aaaaaaataataatgataacaaaacggggtgggtattcttaactgtgactatattttgacaattgg

SEQ ID NO: 12497 - DNA, 69 bp, Homo sapiens
ataacaaaacggggtgggtattcttaactgtgactatattttgacaattggtagaaggtgcacatttta

SEQ ID NO: 12498 - DNA, 70 bp, Homo sapiens
gggtgggtattcttaactgtgactatattttgacaattggtagaaggtgcacattttaagcaaaaataaa

SEQ ID NO: 12499 - DNA, 70 bp, Homo sapiens
tcttaactgtgactatattttgacaattggtagaaggtgcacattttaagcaaaaataaaagttttatag

SEQ ID NO: 12500 - DNA, 72 bp, Homo sapiens
ttatagttttaaatacataaagaaatgtttcagttaggcattaaccttgatagaatcactcagtttggtgct

SEQ ID NO: 12501 - DNA, 71 bp, Homo sapiens
aaatacataaagaaatgtttcagttaggcattaaccttgatagaatcactcagtttggtgctttaaattaa

SEQ ID NO: 12502 - DNA, 71 bp, Homo sapiens
agaaatgtttcagttaggcattaaccttgatagaatcactcagtttggtgctttaaattaagtctgtttac

SEQ ID NO: 12503 - DNA, 73 bp, Homo sapiens
cagttaggcattaaccttgatagaatcactcagtttggtgctttaaattaagtctgtttactatgaaacaaga

SEQ ID NO: 12504 - DNA, 73 bp, Homo sapiens
aggcattaaccttgatagaatcactcagtttggtgctttaaattaagtctgtttactatgaaacaagagtcat

SEQ ID NO: 12505 - DNA, 73 bp, Homo sapiens
cttgatagaatcactcagtttggtgctttaaattaagtctgtttactatgaaacaagagtcatttttagagga

SEQ ID NO: 12506 - DNA, 71 bp, Homo sapiens
tcactcagtttggtgctttaaattaagtctgtttactatgaaacaagagtcatttttagaggattttaaca

SEQ ID NO: 12507 - DNA, 69 bp, Homo sapiens
ggtgctttaaattaagtctgtttactatgaaacaagagtcatttttagaggattttaacaggttcatgt

SEQ ID NO: 12508 - DNA, 73 bp, Homo sapiens
aagtctgtttactatgaaacaagagtcatttttagaggattttaacaggttcatgttctatgatgtaaaatca

SEQ ID NO: 12509 - DNA, 75 bp, Homo sapiens
actatgaaacaagagtcatttttagaggattttaacaggttcatgttctatgatgtaaaatcaagacacacagtg

SEQ ID NO: 12510 - DNA, 75 bp, Homo sapiens
agagtcatttttagaggattttaacaggttcatgttctatgatgtaaaatcaagacacacagtgttaactctaca

SEQ ID NO: 12511 - DNA, 76 bp, Homo sapiens
ttttagaggattttaacaggttcatgttctatgatgtaaaatcaagacacacagtgttaactctacacagcttctg

SEQ ID NO: 12512 - DNA, 81 bp, Homo sapiens
tcatgttctatgatgtaaaatcaagacacacagtgttaactctacacagcttctggtgcttaaccacatccacacagttaa

SEQ ID NO: 12513 - DNA, 78 bp, Homo sapiens
tatgatgtaaaatcaagacacacagtgttaactctacacagcttctggtgcttaaccacatccacacagttaaaaata

SEQ ID NO: 12514 - DNA, 76 bp, Homo sapiens
aaaatcaagacacacagtgttaactctacacagcttctggtgcttaaccacatccacacagttaaaaataagctga

SEQ ID NO: 12515 - DNA, 74 bp, Homo sapiens
acacagtgttaactctacacagcttctggtgcttaaccacatccacacagttaaaaataagctgaattattatt

SEQ ID NO: 12516 - DNA, 77 bp, Homo sapiens
taactctacacagcttctggtgcttaaccacatccacacagttaaaaataagctgaattattatttcatggtgccat

SEQ ID NO: 12517 - DNA, 76 bp, Homo sapiens
ttctggtgcttaaccacatccacacagttaaaaataagctgaattattatttcatggtgccattgttccaacatct

SEQ ID NO: 12518 - DNA, 76 bp, Homo sapiens
cttaaccacatccacacagttaaaaataagctgaattattatttcatggtgccattgttccaacatcttccaatca

SEQ ID NO: 12519 - DNA, 78 bp, Homo sapiens
catccacacagttaaaaataagctgaattattatttcatggtgccattgttccaacatcttccaatcattgctagaaa

SEQ ID NO: 12520 - DNA, 77 bp, Homo sapiens
aaataagctgaattattatttcatggtgccattgttccaacatcttccaatcattgctagaaaattggcatattcct

SEQ ID NO: 12521 - DNA, 77 bp, Homo sapiens
atttcatggtgccattgttccaacatcttccaatcattgctagaaaattggcatattcctttgaaataaacttatga

SEQ ID NO: 12522 - DNA, 75 bp, Homo sapiens
gtgccattgttccaacatcttccaatcattgctagaaaattggcatattcctttgaaataaacttatgaaatgtt

SEQ ID NO: 12523 - DNA, 74 bp, Homo sapiens
ccaacatcttccaatcattgctagaaaattggcatattcctttgaaataaacttatgaaatgttttctctctta

SEQ ID NO: 12524 - DNA, 70 bp, Homo sapiens
tggcatattcctttgaaataaacttatgaaatgttttctctcttaaaatatttctcctgtgtaaaataaa

SEQ ID NO: 12525 - DNA, 70 bp, Homo sapiens
atgaaatgttttctctcttaaaatatttctcctgtgtaaaataaatcattgttgttagtaatggttggag

SEQ ID NO: 12526 - DNA, 71 bp, Homo sapiens
gttttctctcttaaaatatttctcctgtgtaaaataaatcattgttgttagtaatggttggaggctgttca

SEQ ID NO: 12527 - DNA, 71 bp, Homo sapiens
cttaaaatatttctcctgtgtaaaataaatcattgttgttagtaatggttggaggctgttcataaattgta

SEQ ID NO: 12528 - DNA, 72 bp, Homo sapiens
tttctcctgtgtaaaataaatcattgttgttagtaatggttggaggctgttcataaattgtaaatatatatt

SEQ ID NO: 12529 - DNA, 67 bp, Homo sapiens
atatattttaaaagcactttctatttttaaaagtaacttgaaataatatagtataagaatcctattg

SEQ ID NO: 12530 - DNA, 74 bp, Homo sapiens
ctatttttaaaagtaacttgaaataatatagtataagaatcctattgtctattgtttgtgcatatttgcataca

SEQ ID NO: 12531 - DNA, 76 bp, Homo sapiens
aagtaacttgaaataatatagtataagaatcctattgtctattgtttgtgcatatttgcatacaagagaaatcatt

SEQ ID NO: 12532 - DNA, 80 bp, Homo sapiens
gaaataatatagtataagaatcctattgtctattgtttgtgcatatttgcatacaagagaaatcatttatccttgctgtg

SEQ ID NO: 12533 - DNA, 81 bp, Homo sapiens
gtataagaatcctattgtctattgtttgtgcatatttgcatacaagagaaatcatttatccttgctgtgtagagttccatc

SEQ ID NO: 12534 - DNA, 80 bp, Homo sapiens
tcctattgtctattgtttgtgcatatttgcatacaagagaaatcatttatccttgctgtgtagagttccatcttgttaac

SEQ ID NO: 12535 - DNA, 82 bp, Homo sapiens
tattgtttgtgcatatttgcatacaagagaaatcatttatccttgctgtgtagagttccatcttgttaactgcagtatgtat

SEQ ID NO: 12536 - DNA, 83 bp, Homo sapiens
catatttgcatacaagagaaatcatttatccttgctgtgtagagttccatcttgttaactgcagtatgtattctaatcatgta

SEQ ID NO: 12537 - DNA, 79 bp, Homo sapiens
aatcatttatccttgctgtgtagagttccatcttgttaactgcagtatgtattctaatcatgtatatggtttgtgttct

SEQ ID NO: 12538 - DNA, 78 bp, Homo sapiens
ttatccttgctgtgtagagttccatcttgttaactgcagtatgtattctaatcatgtatatggtttgtgttcttttac

SEQ ID NO: 12539 - DNA, 79 bp, Homo sapiens
tagagttccatcttgttaactgcagtatgtattctaatcatgtatatggtttgtgttcttttactgtgtcctctcacat

SEQ ID NO: 12540 - DNA, 78 bp, Homo sapiens
aactgcagtatgtattctaatcatgtatatggtttgtgttcttttactgtgtcctctcacattcaagtattagcaact

SEQ ID NO: 12541 - DNA, 77 bp, Homo sapiens
atcatgtatatggtttgtgttcttttactgtgtcctctcacattcaagtattagcaacttgcagtatataaaatagt

SEQ ID NO: 12542 - DNA, 77 bp, Homo sapiens
tgtgttcttttactgtgtcctctcacattcaagtattagcaacttgcagtatataaaatagttagataatgagaagt

SEQ ID NO: 12543 - DNA, 78 bp, Homo sapiens
tactgtgtcctctcacattcaagtattagcaacttgcagtatataaaatagttagataatgagaagttgttaattatc

SEQ ID NO: 12544 - DNA, 77 bp, Homo sapiens
gtcctctcacattcaagtattagcaacttgcagtatataaaatagttagataatgagaagttgttaattatctctaa

SEQ ID NO: 12545 - DNA, 75 bp, Homo sapiens
cattcaagtattagcaacttgcagtatataaaatagttagataatgagaagttgttaattatctctaaaattgga

SEQ ID NO: 12546 - DNA, 75 bp, Homo sapiens
gcagtatataaaatagttagataatgagaagttgttaattatctctaaaattggaattaggaagcatatcaccaa

SEQ ID NO: 12547 - DNA, 75 bp, Homo sapiens
gttagataatgagaagttgttaattatctctaaaattggaattaggaagcatatcaccaatactgattaacattc

SEQ ID NO: 12548 - DNA, 74 bp, Homo sapiens
gagaagttgttaattatctctaaaattggaattaggaagcatatcaccaatactgattaacattctctttggaa

SEQ ID NO: 12549 - DNA, 73 bp, Homo sapiens
ttgttaattatctctaaaattggaattaggaagcatatcaccaatactgattaacattctctttggaactagg

SEQ ID NO: 12550 - DNA, 75 bp, Homo sapiens
attaggaagcatatcaccaatactgattaacattctctttggaactaggtaagagtggtctcttcttattgaaca

SEQ ID NO: 12551 - DNA, 71 bp, Homo sapiens
ttaacattctctttggaactaggtaagagtggtctcttcttattgaacaacctcaatttagtttcatccca

SEQ ID NO: 12552 - DNA, 72 bp, Homo sapiens
tggaactaggtaagagtggtctcttcttattgaacaacctcaatttagtttcatcccacctttctcagtata

SEQ ID NO: 12553 - DNA, 74 bp, Homo sapiens
taggtaagagtggtctcttcttattgaacaacctcaatttagtttcatcccacctttctcagtataatccatga

SEQ ID NO: 12554 - DNA, 73 bp, Homo sapiens
tcttcttattgaacaacctcaatttagtttcatcccacctttctcagtataatccatgagaggtgtttccaaa

SEQ ID NO: 12555 - DNA, 72 bp, Homo sapiens
ttattgaacaacctcaatttagtttcatcccacctttctcagtataatccatgagaggtgtttccaaaagga

SEQ ID NO: 12556 - DNA, 72 bp, Homo sapiens
acctcaatttagtttcatcccacctttctcagtataatccatgagaggtgtttccaaaaggagatgagggaa

SEQ ID NO: 12557 - DNA, 74 bp, Homo sapiens
tttcatcccacctttctcagtataatccatgagaggtgtttccaaaaggagatgagggaacaggataggtttca

SEQ ID NO: 12558 - DNA, 74 bp, Homo sapiens
ctttctcagtataatccatgagaggtgtttccaaaaggagatgagggaacaggataggtttcagaagagtcaaa

SEQ ID NO: 12559 - DNA, 76 bp, Homo sapiens
tataatccatgagaggtgtttccaaaaggagatgagggaacaggataggtttcagaagagtcaaatgcttctaatg

SEQ ID NO: 12560 - DNA, 75 bp, Homo sapiens
atgagaggtgtttccaaaaggagatgagggaacaggataggtttcagaagagtcaaatgcttctaatgtctcaag

SEQ ID NO: 12561 - DNA, 74 bp, Homo sapiens
aaaaggagatgagggaacaggataggtttcagaagagtcaaatgcttctaatgtctcaaggtgataaaatacaa

SEQ ID NO: 12562 - DNA, 70 bp, Homo sapiens
ttgttgaaatattttgaaaacaaattccctactatcatcacatgcctccccaaccccaagtcaaaaacaa

SEQ ID NO: 12563 - DNA, 69 bp, Homo sapiens
aatattttgaaaacaaattccctactatcatcacatgcctccccaaccccaagtcaaaaacaagaggaa

SEQ ID NO: 12564 - DNA, 70 bp, Homo sapiens
ttttgaaaacaaattccctactatcatcacatgcctccccaaccccaagtcaaaaacaagaggaatggta

SEQ ID NO: 12565 - DNA, 70 bp, Homo sapiens
aaacaaattccctactatcatcacatgcctccccaaccccaagtcaaaaacaagaggaatggtactacaa

SEQ ID NO: 12566 - DNA, 72 bp, Homo sapiens
aattccctactatcatcacatgcctccccaaccccaagtcaaaaacaagaggaatggtactacaaacatggc

SEQ ID NO: 12567 - DNA, 74 bp, Homo sapiens
tatcatcacatgcctccccaaccccaagtcaaaaacaagaggaatggtactacaaacatggctttgtccattaa

SEQ ID NO: 12568 - DNA, 71 bp, Homo sapiens
tgcctccccaaccccaagtcaaaaacaagaggaatggtactacaaacatggctttgtccattaagagctaa

SEQ ID NO: 12569 - DNA, 71 bp, Homo sapiens
tccccaaccccaagtcaaaaacaagaggaatggtactacaaacatggctttgtccattaagagctaattca

SEQ ID NO: 12570 - DNA, 70 bp, Homo sapiens
aaccccaagtcaaaaacaagaggaatggtactacaaacatggctttgtccattaagagctaattcatttg

SEQ ID NO: 12571 - DNA, 71 bp, Homo sapiens
cccaagtcaaaaacaagaggaatggtactacaaacatggctttgtccattaagagctaattcatttgttta

SEQ ID NO: 12572 - DNA, 75 bp, Homo sapiens
ggaatggtactacaaacatggctttgtccattaagagctaattcatttgtttatcttagcatactagatttggga

SEQ ID NO: 12573 - DNA, 76 bp, Homo sapiens
caaacatggctttgtccattaagagctaattcatttgtttatcttagcatactagatttgggaaaatgataactca

SEQ ID NO: 12574 - DNA, 75 bp, Homo sapiens
gctttgtccattaagagctaattcatttgtttatcttagcatactagatttgggaaaatgataactcatcttttc

SEQ ID NO: 12575 - DNA, 77 bp, Homo sapiens
gagctaattcatttgtttatcttagcatactagatttgggaaaatgataactcatcttttctgataattgcctatgt

SEQ ID NO: 12576 - DNA, 75 bp, Homo sapiens
atcttagcatactagatttgggaaaatgataactcatcttttctgataattgcctatgttctaggtaacaggaaa

SEQ ID NO: 12577 - DNA, 74 bp, Homo sapiens
atactagatttgggaaaatgataactcatcttttctgataattgcctatgttctaggtaacaggaaaacaggca

SEQ ID NO: 12578 - DNA, 72 bp, Homo sapiens
gggaaaatgataactcatcttttctgataattgcctatgttctaggtaacaggaaaacaggcattaagttta

SEQ ID NO: 12579 - DNA, 71 bp, Homo sapiens
ctcatcttttctgataattgcctatgttctaggtaacaggaaaacaggcattaagtttattttagtcttcc

SEQ ID NO: 12580 - DNA, 69 bp, Homo sapiens
ctgataattgcctatgttctaggtaacaggaaaacaggcattaagtttattttagtcttcccattttct

SEQ ID NO: 12581 - DNA, 68 bp, Homo sapiens
attgcctatgttctaggtaacaggaaaacaggcattaagtttattttagtcttcccattttcttccta

SEQ ID NO: 12582 - DNA, 66 bp, Homo sapiens
ggtaacaggaaaacaggcattaagtttattttagtcttcccattttcttcctattactttattgac

SEQ ID NO: 12583 - DNA, 67 bp, Homo sapiens
caggaaaacaggcattaagtttattttagtcttcccattttcttcctattactttattgactcattt

SEQ ID NO: 12584 - DNA, 69 bp, Homo sapiens
ggcattaagtttattttagtcttcccattttcttcctattactttattgactcattttattgcaaaaca

SEQ ID NO: 12585 - DNA, 68 bp, Homo sapiens
ttagtcttcccattttcttcctattactttattgactcattttattgcaaaacaaaaaggattaccca

SEQ ID NO: 12586 - DNA, 67 bp, Homo sapiens
cccattttcttcctattactttattgactcattttattgcaaaacaaaaaggattacccaaacaaca

SEQ ID NO: 12587 - DNA, 68 bp, Homo sapiens
ctattactttattgactcattttattgcaaaacaaaaaggattacccaaacaacatgtttcgaacaag

SEQ ID NO: 12588 - DNA, 69 bp, Homo sapiens
attgactcattttattgcaaaacaaaaaggattacccaaacaacatgtttcgaacaaggagaattttca

SEQ ID NO: 12589 - DNA, 69 bp, Homo sapiens
ctcattttattgcaaaacaaaaaggattacccaaacaacatgtttcgaacaaggagaattttcaatgaa

SEQ ID NO: 12590 - DNA, 68 bp, Homo sapiens
aacaaaaaggattacccaaacaacatgtttcgaacaaggagaattttcaatgaaatacttgattctgt

SEQ ID NO: 12591 - DNA, 74 bp, Homo sapiens
ccaaacaacatgtttcgaacaaggagaattttcaatgaaatacttgattctgttaaaatgcagaggtgctataa

SEQ ID NO: 12592 - DNA, 76 bp, Homo sapiens
cgaacaaggagaattttcaatgaaatacttgattctgttaaaatgcagaggtgctataacattcaaagtgtcagat

SEQ ID NO: 12593 - DNA, 76 bp, Homo sapiens
atgaaatacttgattctgttaaaatgcagaggtgctataacattcaaagtgtcagattccttgggagtatggaaaa

SEQ ID NO: 12594 - DNA, 75 bp, Homo sapiens
tacttgattctgttaaaatgcagaggtgctataacattcaaagtgtcagattccttgggagtatggaaaacctaa

SEQ ID NO: 12595 - DNA, 72 bp, Homo sapiens
aggtgctataacattcaaagtgtcagattccttgggagtatggaaaacctaatggtgcttctcccttggaaa

SEQ ID NO: 12596 - DNA, 73 bp, Homo sapiens
ataacattcaaagtgtcagattccttgggagtatggaaaacctaatggtgcttctcccttggaaatgccatag

SEQ ID NO: 12597 - DNA, 73 bp, Homo sapiens
agtgtcagattccttgggagtatggaaaacctaatggtgcttctcccttggaaatgccataggaagcccacaa

SEQ ID NO: 12598 - DNA, 72 bp, Homo sapiens
tgggagtatggaaaacctaatggtgcttctcccttggaaatgccataggaagcccacaaccgctaacactta

SEQ ID NO: 12599 - DNA, 71 bp, Homo sapiens
tatggaaaacctaatggtgcttctcccttggaaatgccataggaagcccacaaccgctaacacttacaatt

SEQ ID NO: 12600 - DNA, 72 bp, Homo sapiens
ctaatggtgcttctcccttggaaatgccataggaagcccacaaccgctaacacttacaattttggtgcaaaa

SEQ ID NO: 12601 - DNA, 71 bp, Homo sapiens
ttctcccttggaaatgccataggaagcccacaaccgctaacacttacaattttggtgcaaaagcaaacagt

SEQ ID NO: 12602 - DNA, 75 bp, Homo sapiens
atgccataggaagcccacaaccgctaacacttacaattttggtgcaaaagcaaacagttccagcaggctctctaa

SEQ ID NO: 12603 - DNA, 71 bp, Homo sapiens
aagcccacaaccgctaacacttacaattttggtgcaaaagcaaacagttccagcaggctctctaaagaaaa

SEQ ID NO: 12604 - DNA, 71 bp, Homo sapiens
acaaccgctaacacttacaattttggtgcaaaagcaaacagttccagcaggctctctaaagaaaaactcat

SEQ ID NO: 12605 - DNA, 71 bp, Homo sapiens
acacttacaattttggtgcaaaagcaaacagttccagcaggctctctaaagaaaaactcattgtaacttat

SEQ ID NO: 12606 - DNA, 75 bp, Homo sapiens
gtgcaaaagcaaacagttccagcaggctctctaaagaaaaactcattgtaacttattaaaataatatctggtgca

SEQ ID NO: 12607 - DNA, 74 bp, Homo sapiens
gcaaacagttccagcaggctctctaaagaaaaactcattgtaacttattaaaataatatctggtgcaaagtatc

SEQ ID NO: 12608 - DNA, 73 bp, Homo sapiens
gctctctaaagaaaaactcattgtaacttattaaaataatatctggtgcaaagtatctgttttgagcttttga

SEQ ID NO: 12609 - DNA, 72 bp, Homo sapiens
actcattgtaacttattaaaataatatctggtgcaaagtatctgttttgagcttttgactaatccaagtaaa

SEQ ID NO: 12610 - DNA, 72 bp, Homo sapiens
acttattaaaataatatctggtgcaaagtatctgttttgagcttttgactaatccaagtaaaggaatatgaa

SEQ ID NO: 12611 - DNA, 73 bp, Homo sapiens
aataatatctggtgcaaagtatctgttttgagcttttgactaatccaagtaaaggaatatgaagggattgtaa

SEQ ID NO: 12612 - DNA, 71 bp, Homo sapiens
ctggtgcaaagtatctgttttgagcttttgactaatccaagtaaaggaatatgaagggattgtaaaaaaca

SEQ ID NO: 12613 - DNA, 70 bp, Homo sapiens
gtatctgttttgagcttttgactaatccaagtaaaggaatatgaagggattgtaaaaaacaaaatgtcca

SEQ ID NO: 12614 - DNA, 71 bp, Homo sapiens
gcttttgactaatccaagtaaaggaatatgaagggattgtaaaaaacaaaatgtccattgatagaccatcg

SEQ ID NO: 12615 - DNA, 73 bp, Homo sapiens
aaggaatatgaagggattgtaaaaaacaaaatgtccattgatagaccatcgtgtacaagtagatttctgcttg

SEQ ID NO: 12616 - DNA, 75 bp, Homo sapiens
atgaagggattgtaaaaaacaaaatgtccattgatagaccatcgtgtacaagtagatttctgcttgttgaatatg

SEQ ID NO: 12617 - DNA, 72 bp, Homo sapiens
aaaaaacaaaatgtccattgatagaccatcgtgtacaagtagatttctgcttgttgaatatgtaaaataggg

SEQ ID NO: 12618 - DNA, 77 bp, Homo sapiens
atgtccattgatagaccatcgtgtacaagtagatttctgcttgttgaatatgtaaaatagggtaattcattgacttg

SEQ ID NO: 12619 - DNA, 75 bp, Homo sapiens
cattgatagaccatcgtgtacaagtagatttctgcttgttgaatatgtaaaatagggtaattcattgacttgttt

SEQ ID NO: 12620 - DNA, 72 bp, Homo sapiens
ccatcgtgtacaagtagatttctgcttgttgaatatgtaaaatagggtaattcattgacttgttttagtatt

SEQ ID NO: 12621 - DNA, 72 bp, Homo sapiens
caagtagatttctgcttgttgaatatgtaaaatagggtaattcattgacttgttttagtattttgtgtgcct

SEQ ID NO: 12622 - DNA, 69 bp, Homo sapiens
tgtaaaatagggtaattcattgacttgttttagtattttgtgtgccttagatttccgttttaagacatg

SEQ ID NO: 12623 - DNA, 70 bp, Homo sapiens
tgacttgttttagtattttgtgtgccttagatttccgttttaagacatgtatatttttgtgagcctaagg

SEQ ID NO: 12624 - DNA, 68 bp, Homo sapiens
gttttagtattttgtgtgccttagatttccgttttaagacatgtatatttttgtgagcctaaggtttc

SEQ ID NO: 12625 - DNA, 71 bp, Homo sapiens
cttagatttccgttttaagacatgtatatttttgtgagcctaaggtttcttatatacatataagtatataa

SEQ ID NO: 12626 - DNA, 78 bp, Homo sapiens
acatataagtatataaataagtgattgtttattgcttcagctgcttcaacaagatatttactagtattagactatcag

SEQ ID NO: 12627 - DNA, 77 bp, Homo sapiens
atataaataagtgattgtttattgcttcagctgcttcaacaagatatttactagtattagactatcaggaatacacc

SEQ ID NO: 12628 - DNA, 77 bp, Homo sapiens
aataagtgattgtttattgcttcagctgcttcaacaagatatttactagtattagactatcaggaatacacccttgc

SEQ ID NO: 12629 - DNA, 78 bp, Homo sapiens
ttattgcttcagctgcttcaacaagatatttactagtattagactatcaggaatacacccttgcgagattatgtttta

SEQ ID NO: 12630 - DNA, 76 bp, Homo sapiens
ttcagctgcttcaacaagatatttactagtattagactatcaggaatacacccttgcgagattatgttttagattt

SEQ ID NO: 12631 - DNA, 73 bp, Homo sapiens
caagatatttactagtattagactatcaggaatacacccttgcgagattatgttttagattttaggccttagc

SEQ ID NO: 12632 - DNA, 72 bp, Homo sapiens
atttactagtattagactatcaggaatacacccttgcgagattatgttttagattttaggccttagctccca

SEQ ID NO: 12633 - DNA, 72 bp, Homo sapiens
attagactatcaggaatacacccttgcgagattatgttttagattttaggccttagctcccactagaaatta

SEQ ID NO: 12634 - DNA, 70 bp, Homo sapiens
aggaatacacccttgcgagattatgttttagattttaggccttagctcccactagaaattatttcttcac

SEQ ID NO: 12635 - DNA, 70 bp, Homo sapiens
cccttgcgagattatgttttagattttaggccttagctcccactagaaattatttcttcaccagatttaa

SEQ ID NO: 12636 - DNA, 67 bp, Homo sapiens
gttttagattttaggccttagctcccactagaaattatttcttcaccagatttaatggataaagttt

SEQ ID NO: 12637 - DNA, 73 bp, Homo sapiens
ttaggccttagctcccactagaaattatttcttcaccagatttaatggataaagttttatggctctttatgca

SEQ ID NO: 12638 - DNA, 76 bp, Homo sapiens
ttagctcccactagaaattatttcttcaccagatttaatggataaagttttatggctctttatgcatccactcatc

SEQ ID NO: 12639 - DNA, 79 bp, Homo sapiens
tatttcttcaccagatttaatggataaagttttatggctctttatgcatccactcatctactcattcttcgagtctaca

SEQ ID NO: 12640 - DNA, 79 bp, Homo sapiens
agatttaatggataaagttttatggctctttatgcatccactcatctactcattcttcgagtctacacttattgaatgc

SEQ ID NO: 12641 - DNA, 80 bp, Homo sapiens
taaagttttatggctctttatgcatccactcatctactcattcttcgagtctacacttattgaatgcctgcaaaatctaa

SEQ ID NO: 12642 - DNA, 82 bp, Homo sapiens
ttatggctctttatgcatccactcatctactcattcttcgagtctacacttattgaatgcctgcaaaatctaagtatcactt

SEQ ID NO: 12643 - DNA, 76 bp, Homo sapiens
cactcatctactcattcttcgagtctacacttattgaatgcctgcaaaatctaagtatcacttttatttttctttg

SEQ ID NO: 12644 - DNA, 74 bp, Homo sapiens
gaatgcctgcaaaatctaagtatcacttttatttttctttggatcaccacctatgacatagtaaacttgaagaa

SEQ ID NO: 12645 - DNA, 72 bp, Homo sapiens
cctgcaaaatctaagtatcacttttatttttctttggatcaccacctatgacatagtaaacttgaagaataa

SEQ ID NO: 12646 - DNA, 71 bp, Homo sapiens
tatcacttttatttttctttggatcaccacctatgacatagtaaacttgaagaataaaaactaccctcaga

SEQ ID NO: 12647 - DNA, 69 bp, Homo sapiens
tctttggatcaccacctatgacatagtaaacttgaagaataaaaactaccctcagaaatatttttaaaa

SEQ ID NO: 12648 - DNA, 75 bp, Homo sapiens
taccctcagaaatatttttaaaagaagtagcaaattatcttcagtataatccatggtaatgtatgcagtaattca

SEQ ID NO: 12649 - DNA, 78 bp, Homo sapiens
tttttaaaagaagtagcaaattatcttcagtataatccatggtaatgtatgcagtaattcaaattgatctctctctca

SEQ ID NO: 12650 - DNA, 79 bp, Homo sapiens
gaagtagcaaattatcttcagtataatccatggtaatgtatgcagtaattcaaattgatctctctctcaataggtttct

SEQ ID NO: 12651 - DNA, 79 bp, Homo sapiens
gcaaattatcttcagtataatccatggtaatgtatgcagtaattcaaattgatctctctctcaataggtttcttaacaa

SEQ ID NO: 12652 - DNA, 79 bp, Homo sapiens
tcagtataatccatggtaatgtatgcagtaattcaaattgatctctctctcaataggtttcttaacaatctaaacttga

SEQ ID NO: 12653 - DNA, 77 bp, Homo sapiens
ccatggtaatgtatgcagtaattcaaattgatctctctctcaataggtttcttaacaatctaaacttgaaacatcaa

SEQ ID NO: 12654 - DNA, 75 bp, Homo sapiens
gtatgcagtaattcaaattgatctctctctcaataggtttcttaacaatctaaacttgaaacatcaatgttaatt

SEQ ID NO: 12655 - DNA, 72 bp, Homo sapiens
ttcaaattgatctctctctcaataggtttcttaacaatctaaacttgaaacatcaatgttaatttttggaac

SEQ ID NO: 12656 - DNA, 72 bp, Homo sapiens
gatctctctctcaataggtttcttaacaatctaaacttgaaacatcaatgttaatttttggaactattggga

SEQ ID NO: 12657 - DNA, 69 bp, Homo sapiens
taggtttcttaacaatctaaacttgaaacatcaatgttaatttttggaactattgggatttgtgacgct

SEQ ID NO: 12658 - DNA, 71 bp, Homo sapiens
acaatctaaacttgaaacatcaatgttaatttttggaactattgggatttgtgacgcttgttgcagtttac

SEQ ID NO: 12659 - DNA, 70 bp, Homo sapiens
cttgaaacatcaatgttaatttttggaactattgggatttgtgacgcttgttgcagtttaccaaaacaag

SEQ ID NO: 12660 - DNA, 69 bp, Homo sapiens
caatgttaatttttggaactattgggatttgtgacgcttgttgcagtttaccaaaacaagtatttgaaa

SEQ ID NO: 12661 - DNA, 69 bp, Homo sapiens
ttaatttttggaactattgggatttgtgacgcttgttgcagtttaccaaaacaagtatttgaaaatata

SEQ ID NO: 12662 - DNA, 73 bp, Homo sapiens
gaactattgggatttgtgacgcttgttgcagtttaccaaaacaagtatttgaaaatatatagtatcaactgaa

SEQ ID NO: 12663 - DNA, 73 bp, Homo sapiens
tgtgacgcttgttgcagtttaccaaaacaagtatttgaaaatatatagtatcaactgaaatgtttccattccg

SEQ ID NO: 12664 - DNA, 72 bp, Homo sapiens
gtgacgcttgttgcagtttaccaaaacaagtatttgaaaatatatagtatcaactgaaatgtttccattccg

SEQ ID NO: 12665 - DNA, 71 bp, Homo sapiens
gcttgttgcagtttaccaaaacaagtatttgaaaatatatagtatcaactgaaatgtttccattccgttgt

SEQ ID NO: 12666 - DNA, 71 bp, Homo sapiens
tgcagtttaccaaaacaagtatttgaaaatatatagtatcaactgaaatgtttccattccgttgttgtagt

SEQ ID NO: 12667 - DNA, 73 bp, Homo sapiens
ccaaaacaagtatttgaaaatatatagtatcaactgaaatgtttccattccgttgttgtagttaacatcatga

SEQ ID NO: 12668 - DNA, 74 bp, Homo sapiens
acaagtatttgaaaatatatagtatcaactgaaatgtttccattccgttgttgtagttaacatcatgaatggac

SEQ ID NO: 12669 - DNA, 74 bp, Homo sapiens
gtatttgaaaatatatagtatcaactgaaatgtttccattccgttgttgtagttaacatcatgaatggacttct

SEQ ID NO: 12670 - DNA, 76 bp, Homo sapiens
gaaaatatatagtatcaactgaaatgtttccattccgttgttgtagttaacatcatgaatggacttcttaagctga

SEQ ID NO: 12671 - DNA, 76 bp, Homo sapiens
tatatagtatcaactgaaatgtttccattccgttgttgtagttaacatcatgaatggacttcttaagctgattacc

SEQ ID NO: 12672 - DNA, 75 bp, Homo sapiens
tatagtatcaactgaaatgtttccattccgttgttgtagttaacatcatgaatggacttcttaagctgattaccc

SEQ ID NO: 12673 - DNA, 74 bp, Homo sapiens
agtatcaactgaaatgtttccattccgttgttgtagttaacatcatgaatggacttcttaagctgattacccca

SEQ ID NO: 12674 - DNA, 73 bp, Homo sapiens
gaaatgtttccattccgttgttgtagttaacatcatgaatggacttcttaagctgattaccccactgtgggaa

SEQ ID NO: 12675 - DNA, 72 bp, Homo sapiens
tttccattccgttgttgtagttaacatcatgaatggacttcttaagctgattaccccactgtgggaaccaaa

SEQ ID NO: 12676 - DNA, 73 bp, Homo sapiens
gttgttgtagttaacatcatgaatggacttcttaagctgattaccccactgtgggaaccaaattggattccta

SEQ ID NO: 12677 - DNA, 69 bp, Homo sapiens
aatggacttcttaagctgattaccccactgtgggaaccaaattggattcctactttgttggactctctt

SEQ ID NO: 12678 - DNA, 70 bp, Homo sapiens
ttaagctgattaccccactgtgggaaccaaattggattcctactttgttggactctctttcctgatttta

SEQ ID NO: 12679 - DNA, 68 bp, Homo sapiens
cccactgtgggaaccaaattggattcctactttgttggactctctttcctgattttaacaatttacca

SEQ ID NO: 12680 - DNA, 69 bp, Homo sapiens
tgtgggaaccaaattggattcctactttgttggactctctttcctgattttaacaatttaccatcccat

SEQ ID NO: 12681 - DNA, 70 bp, Homo sapiens
aaattggattcctactttgttggactctctttcctgattttaacaatttaccatcccattctctgccctg

SEQ ID NO: 12682 - DNA, 69 bp, Homo sapiens
cctactttgttggactctctttcctgattttaacaatttaccatcccattctctgccctgtgatttttt

SEQ ID NO: 12683 - DNA, 69 bp, Homo sapiens
ggactctctttcctgattttaacaatttaccatcccattctctgccctgtgattttttttaaaagctta

SEQ ID NO: 12684 - DNA, 74 bp, Homo sapiens
ctgattttaacaatttaccatcccattctctgccctgtgattttttttaaaagcttattcaatgttctgcagca

SEQ ID NO: 12685 - DNA, 76 bp, Homo sapiens
taacaatttaccatcccattctctgccctgtgattttttttaaaagcttattcaatgttctgcagcattgtgattg

SEQ ID NO: 12686 - DNA, 80 bp, Homo sapiens
ccattctctgccctgtgattttttttaaaagcttattcaatgttctgcagcattgtgattgtatgctggctacactgctt

SEQ ID NO: 12687 - DNA, 80 bp, Homo sapiens
tctgccctgtgattttttttaaaagcttattcaatgttctgcagcattgtgattgtatgctggctacactgcttttagaa

SEQ ID NO: 12688 - DNA, 82 bp, Homo sapiens
ttttttaaaagcttattcaatgttctgcagcattgtgattgtatgctggctacactgcttttagaatgctctttctcatgaa

SEQ ID NO: 12689 - DNA, 85 bp, Homo sapiens
taaaagcttattcaatgttctgcagcattgtgattgtatgctggctacactgcttttagaatgctctttctcatgaagcaaggaa

SEQ ID NO: 12690 - DNA, 82 bp, Homo sapiens
aatgttctgcagcattgtgattgtatgctggctacactgcttttagaatgctctttctcatgaagcaaggaaataaatttgt

SEQ ID NO: 12691 - DNA, 78 bp, Homo sapiens
gattgtatgctggctacactgcttttagaatgctctttctcatgaagcaaggaaataaatttgtttgaaatgacattt

SEQ ID NO: 12692 - DNA, 78 bp, Homo sapiens
ctggctacactgcttttagaatgctctttctcatgaagcaaggaaataaatttgtttgaaatgacattttctctcata

SEQ ID NO: 12693 - DNA, 77 bp, Homo sapiens
ttagaatgctctttctcatgaagcaaggaaataaatttgtttgaaatgacattttctctcataaaactggtcatcta

SEQ ID NO: 12694 - DNA, 77 bp, Homo sapiens
tgctctttctcatgaagcaaggaaataaatttgtttgaaatgacattttctctcataaaactggtcatctaacatta

SEQ ID NO: 12695 - DNA, 73 bp, Homo sapiens
tgaagcaaggaaataaatttgtttgaaatgacattttctctcataaaactggtcatctaacattatttctacc

SEQ ID NO: 12696 - DNA, 78 bp, Homo sapiens
tttaatgagactccattgggctgtaatcagtgtcatgtcggattcatgtcaacgacaacaacagggggacacaaaatg

SEQ ID NO: 12697 - DNA, 78 bp, Homo sapiens
tccattgggctgtaatcagtgtcatgtcggattcatgtcaacgacaacaacagggggacacaaaatggcggcggctta

SEQ ID NO: 12698 - DNA, 76 bp, Homo sapiens
gtaatcagtgtcatgtcggattcatgtcaacgacaacaacagggggacacaaaatggcggcggcttagctcctacc

SEQ ID NO: 12699 - DNA, 74 bp, Homo sapiens
agtgtcatgtcggattcatgtcaacgacaacaacagggggacacaaaatggcggcggcttagctcctacccctg

SEQ ID NO: 12700 - DNA, 72 bp, Homo sapiens
cggattcatgtcaacgacaacaacagggggacacaaaatggcggcggcttagctcctacccctggcggcggc

SEQ ID NO: 12701 - DNA, 72 bp, Homo sapiens
tcaacgacaacaacagggggacacaaaatggcggcggcttagctcctacccctggcggcggcggcagcggtg

SEQ ID NO: 12702 - DNA, 71 bp, Homo sapiens
aacagggggacacaaaatggcggcggcttagctcctacccctggcggcggcggcagcggtggcggaggcga

SEQ ID NO: 12703 - DNA, 72 bp, Homo sapiens
aaaatggcggcggcttagctcctacccctggcggcggcggcagcggtggcggaggcgacggcacctcctcca

SEQ ID NO: 12704 - DNA, 75 bp, Homo sapiens
cggcttagctcctacccctggcggcggcggcagcggtggcggaggcgacggcacctcctccaggcggcagccgca

SEQ ID NO: 12705 - DNA, 75 bp, Homo sapiens
tcctacccctggcggcggcggcagcggtggcggaggcgacggcacctcctccaggcggcagccgcagtttctcag

SEQ ID NO: 12706 - DNA, 78 bp, Homo sapiens
cggcggcggcagcggtggcggaggcgacggcacctcctccaggcggcagccgcagtttctcaggcagcggcagcgccc

SEQ ID NO: 12707 - DNA, 77 bp, Homo sapiens
agcggtggcggaggcgacggcacctcctccaggcggcagccgcagtttctcaggcagcggcagcgcccccggcaggc

SEQ ID NO: 12708 - DNA, 78 bp, Homo sapiens
tggcggaggcgacggcacctcctccaggcggcagccgcagtttctcaggcagcggcagcgcccccggcaggcgcggtg

SEQ ID NO: 12709 - DNA, 80 bp, Homo sapiens
cacctcctccaggcggcagccgcagtttctcaggcagcggcagcgcccccggcaggcgcggtggcggtggcgcgcagcca

SEQ ID NO: 12710 - DNA, 82 bp, Homo sapiens
tccaggcggcagccgcagtttctcaggcagcggcagcgcccccggcaggcgcggtggcggtggcgcgcagccaggtctgtca

SEQ ID NO: 12711 - DNA, 78 bp, Homo sapiens
agccgcagtttctcaggcagcggcagcgcccccggcaggcgcggtggcggtggcgcgcagccaggtctgtcacccacc

SEQ ID NO: 12712 - DNA, 77 bp, Homo sapiens
ttctcaggcagcggcagcgcccccggcaggcgcggtggcggtggcgcgcagccaggtctgtcacccaccccgcgcgt

SEQ ID NO: 12713 - DNA, 74 bp, Homo sapiens
agcggcagcgcccccggcaggcgcggtggcggtggcgcgcagccaggtctgtcacccaccccgcgcgttcccag

SEQ ID NO: 12714 - DNA, 73 bp, Homo sapiens
tggttgctgaatttaaggatgtccttatgtccaaatgaacatttccttttttcttttggcagatttgcctgaa

SEQ ID NO: 12715 - DNA, 74 bp, Homo sapiens
ggatgtccttatgtccaaatgaacatttccttttttcttttggcagatttgcctgaagacctggataatctcca

SEQ ID NO: 12716 - DNA, 74 bp, Homo sapiens
tgaacatttccttttttcttttggcagatttgcctgaagacctggataatctccatttttgtcatggactgtta

SEQ ID NO: 12717 - DNA, 70 bp, Homo sapiens
ttttttcttttggcagatttgcctgaagacctggataatctccatttttgtcatggactgttaaaacgtt

SEQ ID NO: 12718 - DNA, 73 bp, Homo sapiens
ttggcagatttgcctgaagacctggataatctccatttttgtcatggactgttaaaacgtttgaagttccaat

SEQ ID NO: 12719 - DNA, 72 bp, Homo sapiens
tttgcctgaagacctggataatctccatttttgtcatggactgttaaaacgtttgaagttccaattctggta

SEQ ID NO: 12720 - DNA, 69 bp, Homo sapiens
ctggataatctccatttttgtcatggactgttaaaacgtttgaagttccaattctggtactttccctta

SEQ ID NO: 12721 - DNA, 66 bp, Homo sapiens
aatctccatttttgtcatggactgttaaaacgtttgaagttccaattctggtactttcccttattt

SEQ ID NO: 12722 - DNA, 66 bp, Homo sapiens
ttttgtcatggactgttaaaacgtttgaagttccaattctggtactttcccttattttattacatt

SEQ ID NO: 12723 - DNA, 63 bp, Homo sapiens
gactgttaaaacgtttgaagttccaattctggtactttcccttattttattacatttttaagg

SEQ ID NO: 12724 - DNA, 65 bp, Homo sapiens
acgtttgaagttccaattctggtactttcccttattttattacatttttaaggtataaaatgaca

SEQ ID NO: 12725 - DNA, 67 bp, Homo sapiens
gtgtaagcttcattattaagagactttcccctctttttatcctttaaggtcttgatttcccagttaa

SEQ ID NO: 12726 - DNA, 66 bp, Homo sapiens
cattattaagagactttcccctctttttatcctttaaggtcttgatttcccagttaaagatgttct

SEQ ID NO: 12727 - DNA, 65 bp, Homo sapiens
agactttcccctctttttatcctttaaggtcttgatttcccagttaaagatgttcttcacccgaa

SEQ ID NO: 12728 - DNA, 68 bp, Homo sapiens
ctttttatcctttaaggtcttgatttcccagttaaagatgttcttcacccgaatgcagtctttcctgt

SEQ ID NO: 12729 - DNA, 69 bp, Homo sapiens
tttaaggtcttgatttcccagttaaagatgttcttcacccgaatgcagtctttcctgttggtaaaataa

SEQ ID NO: 12730 - DNA, 72 bp, Homo sapiens
ttgatttcccagttaaagatgttcttcacccgaatgcagtctttcctgttggtaaaataagacaaccatcaa

SEQ ID NO: 12731 - DNA, 72 bp, Homo sapiens
gttaaagatgttcttcacccgaatgcagtctttcctgttggtaaaataagacaaccatcaacattgcctgtt

SEQ ID NO: 12732 - DNA, 74 bp, Homo sapiens
atgttcttcacccgaatgcagtctttcctgttggtaaaataagacaaccatcaacattgcctgtttgtctgctt

SEQ ID NO: 12733 - DNA, 75 bp, Homo sapiens
cgaatgcagtctttcctgttggtaaaataagacaaccatcaacattgcctgtttgtctgcttttgaatctcttaa

SEQ ID NO: 12734 - DNA, 74 bp, Homo sapiens
tttcctgttggtaaaataagacaaccatcaacattgcctgtttgtctgcttttgaatctcttaaggatggatgt

SEQ ID NO: 12735 - DNA, 75 bp, Homo sapiens
gtaaaataagacaaccatcaacattgcctgtttgtctgcttttgaatctcttaaggatggatgtttgtaagatgt

SEQ ID NO: 12736 - DNA, 78 bp, Homo sapiens
taagacaaccatcaacattgcctgtttgtctgcttttgaatctcttaaggatggatgtttgtaagatgttgcttaata

SEQ ID NO: 12737 - DNA, 77 bp, Homo sapiens
aacattgcctgtttgtctgcttttgaatctcttaaggatggatgtttgtaagatgttgcttaatacagtctggaata

SEQ ID NO: 12738 - DNA, 77 bp, Homo sapiens
tttgtctgcttttgaatctcttaaggatggatgtttgtaagatgttgcttaatacagtctggaatactctgtccatt

SEQ ID NO: 12739 - DNA, 78 bp, Homo sapiens
tctcttaaggatggatgtttgtaagatgttgcttaatacagtctggaatactctgtccatttgttgaattgtaaatga

SEQ ID NO: 12740 - DNA, 79 bp, Homo sapiens
gatgtttgtaagatgttgcttaatacagtctggaatactctgtccatttgttgaattgtaaatgactttcaaatgtgca

SEQ ID NO: 12741 - DNA, 78 bp, Homo sapiens
gatgttgcttaatacagtctggaatactctgtccatttgttgaattgtaaatgactttcaaatgtgcaagttctgtta

SEQ ID NO: 12742 - DNA, 77 bp, Homo sapiens
tgcttaatacagtctggaatactctgtccatttgttgaattgtaaatgactttcaaatgtgcaagttctgttaaata

SEQ ID NO: 12743 - DNA, 75 bp, Homo sapiens
agtctggaatactctgtccatttgttgaattgtaaatgactttcaaatgtgcaagttctgttaaatacaaagaga

SEQ ID NO: 12744 - DNA, 73 bp, Homo sapiens
ctgtccatttgttgaattgtaaatgactttcaaatgtgcaagttctgttaaatacaaagagaacctctatggg

SEQ ID NO: 12745 - DNA, 73 bp, Homo sapiens
caaatgtgcaagttctgttaaatacaaagagaacctctatgggtaacttttgtgttgaagaagtcatttgtca

SEQ ID NO: 12746 - DNA, 70 bp, Homo sapiens
agttctgttaaatacaaagagaacctctatgggtaacttttgtgttgaagaagtcatttgtcaaccatgg

SEQ ID NO: 12747 - DNA, 71 bp, Homo sapiens
tacaaagagaacctctatgggtaacttttgtgttgaagaagtcatttgtcaaccatggtaaaacttgcaaa

SEQ ID NO: 12748 - DNA, 68 bp, Homo sapiens
aacctctatgggtaacttttgtgttgaagaagtcatttgtcaaccatggtaaaacttgcaaacccact

SEQ ID NO: 12749 - DNA, 73 bp, Homo sapiens
aagtcatttgtcaaccatggtaaaacttgcaaacccactttatacagagtggattcttgaagctatacagaaa

SEQ ID NO: 12750 - DNA, 72 bp, Homo sapiens
ttgtcaaccatggtaaaacttgcaaacccactttatacagagtggattcttgaagctatacagaaaataaaa

SEQ ID NO: 12751 - DNA, 71 bp, Homo sapiens
gtaaaacttgcaaacccactttatacagagtggattcttgaagctatacagaaaataaaaaagcaaaagca

SEQ ID NO: 12752 - DNA, 69 bp, Homo sapiens
aaacccactttatacagagtggattcttgaagctatacagaaaataaaaaagcaaaagcaaaggccctc

SEQ ID NO: 12753 - DNA, 74 bp, Homo sapiens
tttatacagagtggattcttgaagctatacagaaaataaaaaagcaaaagcaaaggccctctgaagagagaatc

SEQ ID NO: 12754 - DNA, 76 bp, Homo sapiens
attcttgaagctatacagaaaataaaaaagcaaaagcaaaggccctctgaagagagaatctgccatgcggtcagta

SEQ ID NO: 12755 - DNA, 74 bp, Homo sapiens
aataaaaaagcaaaagcaaaggccctctgaagagagaatctgccatgcggtcagtacttcccatgggttggata

SEQ ID NO: 12756 - DNA, 77 bp, Homo sapiens
caaaagcaaaggccctctgaagagagaatctgccatgcggtcagtacttcccatgggttggataagaagacagtctc

SEQ ID NO: 12757 - DNA, 78 bp, Homo sapiens
aaaggccctctgaagagagaatctgccatgcggtcagtacttcccatgggttggataagaagacagtctctgaacagc

SEQ ID NO: 12758 - DNA, 79 bp, Homo sapiens
aagagagaatctgccatgcggtcagtacttcccatgggttggataagaagacagtctctgaacagctggaactcagtgt

SEQ ID NO: 12759 - DNA, 80 bp, Homo sapiens
aatctgccatgcggtcagtacttcccatgggttggataagaagacagtctctgaacagctggaactcagtgttcaggatg

SEQ ID NO: 12760 - DNA, 79 bp, Homo sapiens
acttcccatgggttggataagaagacagtctctgaacagctggaactcagtgttcaggatggctcagttctcaaagtca

SEQ ID NO: 12761 - DNA, 78 bp, Homo sapiens
ggttggataagaagacagtctctgaacagctggaactcagtgttcaggatggctcagttctcaaagtcaccaacaaag

SEQ ID NO: 12762 - DNA, 79 bp, Homo sapiens
cagtctctgaacagctggaactcagtgttcaggatggctcagttctcaaagtcaccaacaaaggccttgcctcctataa

SEQ ID NO: 12763 - DNA, 75 bp, Homo sapiens
aacagctggaactcagtgttcaggatggctcagttctcaaagtcaccaacaaaggccttgcctcctataaggacc

SEQ ID NO: 12764 - DNA, 74 bp, Homo sapiens
aactcagtgttcaggatggctcagttctcaaagtcaccaacaaaggccttgcctcctataaggacccagacaac

SEQ ID NO: 12765 - DNA, 71 bp, Homo sapiens
agttctcaaagtcaccaacaaaggccttgcctcctataaggacccagacaaccctgggcgcttttcatcag

SEQ ID NO: 12766 - DNA, 69 bp, Homo sapiens
aaagtcaccaacaaaggccttgcctcctataaggacccagacaaccctgggcgcttttcatcagttaaa

SEQ ID NO: 12767 - DNA, 68 bp, Homo sapiens
aaaggccttgcctcctataaggacccagacaaccctgggcgcttttcatcagttaaaccaggcacttt

SEQ ID NO: 12768 - DNA, 71 bp, Homo sapiens
ttgcctcctataaggacccagacaaccctgggcgcttttcatcagttaaaccaggcacttttcctaagtca

SEQ ID NO: 12769 - DNA, 69 bp, Homo sapiens
ataaggacccagacaaccctgggcgcttttcatcagttaaaccaggcacttttcctaagtcagccaagg

SEQ ID NO: 12770 - DNA, 72 bp, Homo sapiens
accctgggcgcttttcatcagttaaaccaggcacttttcctaagtcagccaaggggtctagaggatcatgta

SEQ ID NO: 12771 - DNA, 75 bp, Homo sapiens
cttttcatcagttaaaccaggcacttttcctaagtcagccaaggggtctagaggatcatgtaatgatctccgcaa

SEQ ID NO: 12772 - DNA, 76 bp, Homo sapiens
atcagttaaaccaggcacttttcctaagtcagccaaggggtctagaggatcatgtaatgatctccgcaatgtggat

SEQ ID NO: 12773 - DNA, 75 bp, Homo sapiens
gcacttttcctaagtcagccaaggggtctagaggatcatgtaatgatctccgcaatgtggattggaataaacttt

SEQ ID NO: 12774 - DNA, 74 bp, Homo sapiens
tttcctaagtcagccaaggggtctagaggatcatgtaatgatctccgcaatgtggattggaataaacttttaag

SEQ ID NO: 12775 - DNA, 75 bp, Homo sapiens
aaggggtctagaggatcatgtaatgatctccgcaatgtggattggaataaacttttaaggagagcaattgaagga

SEQ ID NO: 12776 - DNA, 78 bp, Homo sapiens
gtctagaggatcatgtaatgatctccgcaatgtggattggaataaacttttaaggagagcaattgaaggacttgagga

SEQ ID NO: 12777 - DNA, 76 bp, Homo sapiens
atgtaatgatctccgcaatgtggattggaataaacttttaaggagagcaattgaaggacttgaggagccgaatggc

SEQ ID NO: 12778 - DNA, 74 bp, Homo sapiens
atctccgcaatgtggattggaataaacttttaaggagagcaattgaaggacttgaggagccgaatggctcctcc

SEQ ID NO: 12779 - DNA, 73 bp, Homo sapiens
attggaataaacttttaaggagagcaattgaaggacttgaggagccgaatggctcctccctgaagaacataga

SEQ ID NO: 12780 - DNA, 73 bp, Homo sapiens
ataaacttttaaggagagcaattgaaggacttgaggagccgaatggctcctccctgaagaacatagagaagta

SEQ ID NO: 12781 - DNA, 78 bp, Homo sapiens
taaggagagcaattgaaggacttgaggagccgaatggctcctccctgaagaacatagagaagtatctcagaagtcaaa

SEQ ID NO: 12782 - DNA, 79 bp, Homo sapiens
aattgaaggacttgaggagccgaatggctcctccctgaagaacatagagaagtatctcagaagtcaaagtgatctcaca

SEQ ID NO: 12783 - DNA, 79 bp, Homo sapiens
aggagccgaatggctcctccctgaagaacatagagaagtatctcagaagtcaaagtgatctcacaagcaccaccaacaa

SEQ ID NO: 12784 - DNA, 78 bp, Homo sapiens
tggctcctccctgaagaacatagagaagtatctcagaagtcaaagtgatctcacaagcaccaccaacaacccagcctt

SEQ ID NO: 12785 - DNA, 83 bp, Homo sapiens
tgaagaacatagagaagtatctcagaagtcaaagtgatctcacaagcaccaccaacaacccagcctttcagcagcggctgcga

SEQ ID NO: 12786 - DNA, 81 bp, Homo sapiens
aacatagagaagtatctcagaagtcaaagtgatctcacaagcaccaccaacaacccagcctttcagcagcggctgcgactg

SEQ ID NO: 12787 - DNA, 79 bp, Homo sapiens
tatctcagaagtcaaagtgatctcacaagcaccaccaacaacccagcctttcagcagcggctgcgactgggggccaaac

SEQ ID NO: 12788 - DNA, 78 bp, Homo sapiens
aaagtgatctcacaagcaccaccaacaacccagcctttcagcagcggctgcgactgggggccaaacgcgctgtgaata

SEQ ID NO: 12789 - DNA, 78 bp, Homo sapiens
atctcacaagcaccaccaacaacccagcctttcagcagcggctgcgactgggggccaaacgcgctgtgaataatggga

SEQ ID NO: 12790 - DNA, 74 bp, Homo sapiens
accaacaacccagcctttcagcagcggctgcgactgggggccaaacgcgctgtgaataatgggaggttactgaa

SEQ ID NO: 12791 - DNA, 73 bp, Homo sapiens
aacccagcctttcagcagcggctgcgactgggggccaaacgcgctgtgaataatgggaggttactgaaagacg

SEQ ID NO: 12792 - DNA, 76 bp, Homo sapiens
tttcagcagcggctgcgactgggggccaaacgcgctgtgaataatgggaggttactgaaagacggaccgcagtaca

SEQ ID NO: 12793 - DNA, 71 bp, Homo sapiens
cgactgggggccaaacgcgctgtgaataatgggaggttactgaaagacggaccgcagtacagggtcaatta

SEQ ID NO: 12794 - DNA, 73 bp, Homo sapiens
ccaaacgcgctgtgaataatgggaggttactgaaagacggaccgcagtacagggtcaattatgggagcttaga

SEQ ID NO: 12795 - DNA, 73 bp, Homo sapiens
ctgtgaataatgggaggttactgaaagacggaccgcagtacagggtcaattatgggagcttagatggcaaagg

SEQ ID NO: 12796 - DNA, 72 bp, Homo sapiens
ataatgggaggttactgaaagacggaccgcagtacagggtcaattatgggagcttagatggcaaaggggcac

SEQ ID NO: 12797 - DNA, 76 bp, Homo sapiens
acggaccgcagtacagggtcaattatgggagcttagatggcaaaggggcacctcagtatcccagtgcattcccatc

SEQ ID NO: 12798 - DNA, 77 bp, Homo sapiens
aattatgggagcttagatggcaaaggggcacctcagtatcccagtgcattcccatcctcgctcccacctgtcagcct

SEQ ID NO: 12799 - DNA, 79 bp, Homo sapiens
tagatggcaaaggggcacctcagtatcccagtgcattcccatcctcgctcccacctgtcagccttctaccccatgagaa

SEQ ID NO: 12800 - DNA, 75 bp, Homo sapiens
aaaggggcacctcagtatcccagtgcattcccatcctcgctcccacctgtcagccttctaccccatgagaaagac

SEQ ID NO: 12801 - DNA, 75 bp, Homo sapiens
agtatcccagtgcattcccatcctcgctcccacctgtcagccttctaccccatgagaaagaccaggtaagcgaag

SEQ ID NO: 12802 - DNA, 72 bp, Homo sapiens
tttattttaattttgtcatagccccgtgctgatcccattccaatatgtagcttctgtttggggactaaagaa

SEQ ID NO: 12803 - DNA, 74 bp, Homo sapiens
tttaattttgtcatagccccgtgctgatcccattccaatatgtagcttctgtttggggactaaagaatcaaatc

SEQ ID NO: 12804 - DNA, 73 bp, Homo sapiens
atagccccgtgctgatcccattccaatatgtagcttctgtttggggactaaagaatcaaatcgtgaaaagaaa

SEQ ID NO: 12805 - DNA, 73 bp, Homo sapiens
tgatcccattccaatatgtagcttctgtttggggactaaagaatcaaatcgtgaaaagaaaccagaagaactc

SEQ ID NO: 12806 - DNA, 71 bp, Homo sapiens
ttccaatatgtagcttctgtttggggactaaagaatcaaatcgtgaaaagaaaccagaagaactcctctct

SEQ ID NO: 12807 - DNA, 74 bp, Homo sapiens
tagcttctgtttggggactaaagaatcaaatcgtgaaaagaaaccagaagaactcctctcttgtgcagattgtg

SEQ ID NO: 12808 - DNA, 74 bp, Homo sapiens
gggactaaagaatcaaatcgtgaaaagaaaccagaagaactcctctcttgtgcagattgtggcagtagtggtaa

SEQ ID NO: 12809 - DNA, 75 bp, Homo sapiens
taaagaatcaaatcgtgaaaagaaaccagaagaactcctctcttgtgcagattgtggcagtagtggtaagttgtg

SEQ ID NO: 12810 - DNA, 73 bp, Homo sapiens
atcgtgaaaagaaaccagaagaactcctctcttgtgcagattgtggcagtagtggtaagttgtgtttttccta

SEQ ID NO: 12811 - DNA, 74 bp, Homo sapiens
aaaccagaagaactcctctcttgtgcagattgtggcagtagtggtaagttgtgtttttcctatgtgttgtacaa

SEQ ID NO: 12812 - DNA, 72 bp, Homo sapiens
aaaagtcaaaggcaccattcccatcaagcaatttgctttttattctcataggacacccatcctgtttgaaat

SEQ ID NO: 12813 - DNA, 74 bp, Homo sapiens
cattcccatcaagcaatttgctttttattctcataggacacccatcctgtttgaaattttgtcctgaattaaca

SEQ ID NO: 12814 - DNA, 73 bp, Homo sapiens
ccatcaagcaatttgctttttattctcataggacacccatcctgtttgaaattttgtcctgaattaacaacaa

SEQ ID NO: 12815 - DNA, 70 bp, Homo sapiens
gctttttattctcataggacacccatcctgtttgaaattttgtcctgaattaacaacaaatgtaaaggcc

SEQ ID NO: 12816 - DNA, 70 bp, Homo sapiens
tattctcataggacacccatcctgtttgaaattttgtcctgaattaacaacaaatgtaaaggccttaagg

SEQ ID NO: 12817 - DNA, 71 bp, Homo sapiens
acccatcctgtttgaaattttgtcctgaattaacaacaaatgtaaaggccttaaggtggcagtgcatcgaa

SEQ ID NO: 12818 - DNA, 76 bp, Homo sapiens
gtttgaaattttgtcctgaattaacaacaaatgtaaaggccttaaggtggcagtgcatcgaatgcaagacatgcag

SEQ ID NO: 12819 - DNA, 79 bp, Homo sapiens
attttgtcctgaattaacaacaaatgtaaaggccttaaggtggcagtgcatcgaatgcaagacatgcagtgcctgtaga

SEQ ID NO: 12820 - DNA, 80 bp, Homo sapiens
attaacaacaaatgtaaaggccttaaggtggcagtgcatcgaatgcaagacatgcagtgcctgtagagtccaaggcagaa

SEQ ID NO: 12821 - DNA, 82 bp, Homo sapiens
aatgtaaaggccttaaggtggcagtgcatcgaatgcaagacatgcagtgcctgtagagtccaaggcagaaatgctgtaagta

SEQ ID NO: 12822 - DNA, 84 bp, Homo sapiens
ttaaggtggcagtgcatcgaatgcaagacatgcagtgcctgtagagtccaaggcagaaatgctgtaagtatggctcccgtaatc

SEQ ID NO: 12823 - DNA, 83 bp, Homo sapiens
agtgcatcgaatgcaagacatgcagtgcctgtagagtccaaggcagaaatgctgtaagtatggctcccgtaatccgcctccag

SEQ ID NO: 12824 - DNA, 79 bp, Homo sapiens
aatgcaagacatgcagtgcctgtagagtccaaggcagaaatgctgtaagtatggctcccgtaatccgcctccaggtaac

SEQ ID NO: 12825 - DNA, 72 bp, Homo sapiens
ttttggccttttacagttggtttcagtctcaattagtctctaatatgttatattacaggataatatgctttt

SEQ ID NO: 12826 - DNA, 78 bp, Homo sapiens
cagttggtttcagtctcaattagtctctaatatgttatattacaggataatatgcttttttgtgattcctgtgataga

SEQ ID NO: 12827 - DNA, 77 bp, Homo sapiens
ggtttcagtctcaattagtctctaatatgttatattacaggataatatgcttttttgtgattcctgtgatagaggat

SEQ ID NO: 12828 - DNA, 82 bp, Homo sapiens
tagtctctaatatgttatattacaggataatatgcttttttgtgattcctgtgatagaggatttcatatggaatgctgtgac

SEQ ID NO: 12829 - DNA, 80 bp, Homo sapiens
tatgttatattacaggataatatgcttttttgtgattcctgtgatagaggatttcatatggaatgctgtgacccaccact

SEQ ID NO: 12830 - DNA, 80 bp, Homo sapiens
tatattacaggataatatgcttttttgtgattcctgtgatagaggatttcatatggaatgctgtgacccaccactttcca

SEQ ID NO: 12831 - DNA, 79 bp, Homo sapiens
taatatgcttttttgtgattcctgtgatagaggatttcatatggaatgctgtgacccaccactttccagaatgccaaaa

SEQ ID NO: 12832 - DNA, 77 bp, Homo sapiens
ttttgtgattcctgtgatagaggatttcatatggaatgctgtgacccaccactttccagaatgccaaaaggtgaact

SEQ ID NO: 12833 - DNA, 77 bp, Homo sapiens
ctgtgatagaggatttcatatggaatgctgtgacccaccactttccagaatgccaaaaggtgaacttctaaactgta

SEQ ID NO: 12834 - DNA, 72 bp, Homo sapiens
atttcatatggaatgctgtgacccaccactttccagaatgccaaaaggtgaacttctaaactgtactaaaaa

SEQ ID NO: 12835 - DNA, 72 bp, Homo sapiens
atatggaatgctgtgacccaccactttccagaatgccaaaaggtgaacttctaaactgtactaaaaatgtat

SEQ ID NO: 12836 - DNA, 69 bp, Homo sapiens
ctgtgacccaccactttccagaatgccaaaaggtgaacttctaaactgtactaaaaatgtattttatta

SEQ ID NO: 12837 - DNA, 76 bp, Homo sapiens
taaaatgaaacattaaaatatttttctcatatatatattaattcagggatgtggatttgccaagtctgcagaccaa

SEQ ID NO: 12838 - DNA, 74 bp, Homo sapiens
cattaaaatatttttctcatatatatattaattcagggatgtggatttgccaagtctgcagaccaaagaaaaag

SEQ ID NO: 12839 - DNA, 73 bp, Homo sapiens
atttttctcatatatatattaattcagggatgtggatttgccaagtctgcagaccaaagaaaaagggaagaaa

SEQ ID NO: 12840 - DNA, 75 bp, Homo sapiens
tatatatattaattcagggatgtggatttgccaagtctgcagaccaaagaaaaagggaagaaaactacttcatga

SEQ ID NO: 12841 - DNA, 73 bp, Homo sapiens
tattaattcagggatgtggatttgccaagtctgcagaccaaagaaaaagggaagaaaactacttcatgagaaa

SEQ ID NO: 12842 - DNA, 74 bp, Homo sapiens
atgtggatttgccaagtctgcagaccaaagaaaaagggaagaaaactacttcatgagaaagctgcacaaataaa

SEQ ID NO: 12843 - DNA, 72 bp, Homo sapiens
ccaagtctgcagaccaaagaaaaagggaagaaaactacttcatgagaaagctgcacaaataaaacgacgata

SEQ ID NO: 12844 - DNA, 70 bp, Homo sapiens
agaccaaagaaaaagggaagaaaactacttcatgagaaagctgcacaaataaaacgacgatatgcaaaac

SEQ ID NO: 12845 - DNA, 71 bp, Homo sapiens
aaagggaagaaaactacttcatgagaaagctgcacaaataaaacgacgatatgcaaaacccattggacgac

SEQ ID NO: 12846 - DNA, 71 bp, Homo sapiens
aaactacttcatgagaaagctgcacaaataaaacgacgatatgcaaaacccattggacgaccgaaaaataa

SEQ ID NO: 12847 - DNA, 71 bp, Homo sapiens
acttcatgagaaagctgcacaaataaaacgacgatatgcaaaacccattggacgaccgaaaaataaattaa

SEQ ID NO: 12848 - DNA, 70 bp, Homo sapiens
tgcacaaataaaacgacgatatgcaaaacccattggacgaccgaaaaataaattaaagcaacgattgttg

SEQ ID NO: 12849 - DNA, 68 bp, Homo sapiens
aaacgacgatatgcaaaacccattggacgaccgaaaaataaattaaagcaacgattgttgtaggttga

SEQ ID NO: 12850 - DNA, 70 bp, Homo sapiens
acgatatgcaaaacccattggacgaccgaaaaataaattaaagcaacgattgttgtaggttgagatctta

SEQ ID NO: 12851 - DNA, 70 bp, Homo sapiens
cccattggacgaccgaaaaataaattaaagcaacgattgttgtaggttgagatcttatcaaaagaaatca

SEQ ID NO: 12852 - DNA, 80 bp, Homo sapiens
attctatttattaaatgctgatactattctctaaatttctgcctaggtctgtaaccagtgatgaaggatccatgaatgca

SEQ ID NO: 12853 - DNA, 81 bp, Homo sapiens
atttattaaatgctgatactattctctaaatttctgcctaggtctgtaaccagtgatgaaggatccatgaatgcattcaca

SEQ ID NO: 12854 - DNA, 78 bp, Homo sapiens
atactattctctaaatttctgcctaggtctgtaaccagtgatgaaggatccatgaatgcattcacaggaagggggtca

SEQ ID NO: 12855 - DNA, 76 bp, Homo sapiens
tgcctaggtctgtaaccagtgatgaaggatccatgaatgcattcacaggaagggggtcacctggtaggggtcaaaa

SEQ ID NO: 12856 - DNA, 75 bp, Homo sapiens
tctgtaaccagtgatgaaggatccatgaatgcattcacaggaagggggtcacctggtaggggtcaaaagactaaa

SEQ ID NO: 12857 - DNA, 74 bp, Homo sapiens
atgaaggatccatgaatgcattcacaggaagggggtcacctggtaggggtcaaaagactaaagtctgtaccaca

SEQ ID NO: 12858 - DNA, 73 bp, Homo sapiens
atccatgaatgcattcacaggaagggggtcacctggtaggggtcaaaagactaaagtctgtaccacaccttca

SEQ ID NO: 12859 - DNA, 72 bp, Homo sapiens
attcacaggaagggggtcacctggtaggggtcaaaagactaaagtctgtaccacaccttcatctggtcatgc

SEQ ID NO: 12860 - DNA, 74 bp, Homo sapiens
aggaagggggtcacctggtaggggtcaaaagactaaagtctgtaccacaccttcatctggtcatgctgcatctg

SEQ ID NO: 12861 - DNA, 77 bp, Homo sapiens
acctggtaggggtcaaaagactaaagtctgtaccacaccttcatctggtcatgctgcatctgggaaggactcaagca

SEQ ID NO: 12862 - DNA, 84 bp, Homo sapiens
tcaaaagactaaagtctgtaccacaccttcatctggtcatgctgcatctgggaaggactcaagcagcagattggctgttacaga

SEQ ID NO: 12863 - DNA, 82 bp, Homo sapiens
actaaagtctgtaccacaccttcatctggtcatgctgcatctgggaaggactcaagcagcagattggctgttacagacccca

SEQ ID NO: 12864 - DNA, 83 bp, Homo sapiens
tgtaccacaccttcatctggtcatgctgcatctgggaaggactcaagcagcagattggctgttacagaccccactcggcctgg

SEQ ID NO: 12865 - DNA, 82 bp, Homo sapiens
atctggtcatgctgcatctgggaaggactcaagcagcagattggctgttacagaccccactcggcctggtgccaccaccaaa

SEQ ID NO: 12866 - DNA, 81 bp, Homo sapiens
atgctgcatctgggaaggactcaagcagcagattggctgttacagaccccactcggcctggtgccaccaccaaaatcacca

SEQ ID NO: 12867 - DNA, 77 bp, Homo sapiens
tctgggaaggactcaagcagcagattggctgttacagaccccactcggcctggtgccaccaccaaaatcaccaccac

SEQ ID NO: 12868 - DNA, 75 bp, Homo sapiens
aagcagcagattggctgttacagaccccactcggcctggtgccaccaccaaaatcaccaccacctccacctacat

SEQ ID NO: 12869 - DNA, 74 bp, Homo sapiens
agattggctgttacagaccccactcggcctggtgccaccaccaaaatcaccaccacctccacctacatttctgc

SEQ ID NO: 12870 - DNA, 72 bp, Homo sapiens
agaccccactcggcctggtgccaccaccaaaatcaccaccacctccacctacatttctgcctctacacttaa

SEQ ID NO: 12871 - DNA, 72 bp, Homo sapiens
tcggcctggtgccaccaccaaaatcaccaccacctccacctacatttctgcctctacacttaaagttaacaa

SEQ ID NO: 12872 - DNA, 69 bp, Homo sapiens
ccaccaccaaaatcaccaccacctccacctacatttctgcctctacacttaaagttaacaagaaaacca

SEQ ID NO: 12873 - DNA, 67 bp, Homo sapiens
accaaaatcaccaccacctccacctacatttctgcctctacacttaaagttaacaagaaaaccaaag

SEQ ID NO: 12874 - DNA, 70 bp, Homo sapiens
acctccacctacatttctgcctctacacttaaagttaacaagaaaaccaaagggctcattgatggcctta

SEQ ID NO: 12875 - DNA, 68 bp, Homo sapiens
acatttctgcctctacacttaaagttaacaagaaaaccaaagggctcattgatggccttactaagttt

SEQ ID NO: 12876 - DNA, 69 bp, Homo sapiens
ttaaagttaacaagaaaaccaaagggctcattgatggccttactaagttttttacaccatcacctgatg

SEQ ID NO: 12877 - DNA, 74 bp, Homo sapiens
taacaagaaaaccaaagggctcattgatggccttactaagttttttacaccatcacctgatggtcgcagatcac

SEQ ID NO: 12878 - DNA, 76 bp, Homo sapiens
ttacaccatcacctgatggtcgcagatcacgaggtgaaattatagacttttcaaagcactatcgtccaaggaaaaa

SEQ ID NO: 12879 - DNA, 75 bp, Homo sapiens
acctgatggtcgcagatcacgaggtgaaattatagacttttcaaagcactatcgtccaaggaaaaaggtctctca

SEQ ID NO: 12880 - DNA, 75 bp, Homo sapiens
tggtcgcagatcacgaggtgaaattatagacttttcaaagcactatcgtccaaggaaaaaggtctctcagaaaca

SEQ ID NO: 12881 - DNA, 75 bp, Homo sapiens
aaattatagacttttcaaagcactatcgtccaaggaaaaaggtctctcagaaacagtcatgcacttctcatgtgt

SEQ ID NO: 12882 - DNA, 77 bp, Homo sapiens
ttttcaaagcactatcgtccaaggaaaaaggtctctcagaaacagtcatgcacttctcatgtgttggctacaggtac

SEQ ID NO: 12883 - DNA, 76 bp, Homo sapiens
actatcgtccaaggaaaaaggtctctcagaaacagtcatgcacttctcatgtgttggctacaggtaccacacaaaa

SEQ ID NO: 12884 - DNA, 74 bp, Homo sapiens
aaggaaaaaggtctctcagaaacagtcatgcacttctcatgtgttggctacaggtaccacacaaaagctaaaac

SEQ ID NO: 12885 - DNA, 77 bp, Homo sapiens
tctcagaaacagtcatgcacttctcatgtgttggctacaggtaccacacaaaagctaaaacctccaccttcttcact

SEQ ID NO: 12886 - DNA, 75 bp, Homo sapiens
aaacagtcatgcacttctcatgtgttggctacaggtaccacacaaaagctaaaacctccaccttcttcacttcca

SEQ ID NO: 12887 - DNA, 70 bp, Homo sapiens
acttctcatgtgttggctacaggtaccacacaaaagctaaaacctccaccttcttcacttccacccccaa

SEQ ID NO: 12888 - DNA, 68 bp, Homo sapiens
tgtgttggctacaggtaccacacaaaagctaaaacctccaccttcttcacttccacccccaaccccca

SEQ ID NO: 12889 - DNA, 66 bp, Homo sapiens
aggtaccacacaaaagctaaaacctccaccttcttcacttccacccccaacccccatctccggtca

SEQ ID NO: 12890 - DNA, 65 bp, Homo sapiens
aaaagctaaaacctccaccttcttcacttccacccccaacccccatctccggtcagagccccagt

SEQ ID NO: 12891 - DNA, 70 bp, Homo sapiens
ttcacttccacccccaacccccatctccggtcagagccccagttcacaaaagtccagcacggccacttct

SEQ ID NO: 12892 - DNA, 69 bp, Homo sapiens
acccccaacccccatctccggtcagagccccagttcacaaaagtccagcacggccacttcttctccctc

SEQ ID NO: 12893 - DNA, 73 bp, Homo sapiens
ccatctccggtcagagccccagttcacaaaagtccagcacggccacttcttctccctctccccagagttcttc

SEQ ID NO: 12894 - DNA, 75 bp, Homo sapiens
agttcacaaaagtccagcacggccacttcttctccctctccccagagttcttccagccagtgcagtgtgccctcc

SEQ ID NO: 12895 - DNA, 77 bp, Homo sapiens
acaaaagtccagcacggccacttcttctccctctccccagagttcttccagccagtgcagtgtgccctccctgagca

SEQ ID NO: 12896 - DNA, 79 bp, Homo sapiens
ttctccctctccccagagttcttccagccagtgcagtgtgccctccctgagcagccttaccactaacagccagctgaag

SEQ ID NO: 12897 - DNA, 81 bp, Homo sapiens
cccagagttcttccagccagtgcagtgtgccctccctgagcagccttaccactaacagccagctgaaggcactctttgatg

SEQ ID NO: 12898 - DNA, 83 bp, Homo sapiens
ttccagccagtgcagtgtgccctccctgagcagccttaccactaacagccagctgaaggcactctttgatgggctttctcata

SEQ ID NO: 12899 - DNA, 82 bp, Homo sapiens
agtgcagtgtgccctccctgagcagccttaccactaacagccagctgaaggcactctttgatgggctttctcatatctatac

SEQ ID NO: 12900 - DNA, 79 bp, Homo sapiens
ttaccactaacagccagctgaaggcactctttgatgggctttctcatatctataccactcagggacagtctcgcaaaaa

SEQ ID NO: 12901 - DNA, 76 bp, Homo sapiens
agctgaaggcactctttgatgggctttctcatatctataccactcagggacagtctcgcaaaaagggacacccgag

SEQ ID NO: 12902 - DNA, 76 bp, Homo sapiens
actctttgatgggctttctcatatctataccactcagggacagtctcgcaaaaagggacacccgagttatgcacca

SEQ ID NO: 12903 - DNA, 74 bp, Homo sapiens
atgggctttctcatatctataccactcagggacagtctcgcaaaaagggacacccgagttatgcaccacccaaa

SEQ ID NO: 12904 - DNA, 73 bp, Homo sapiens
atatctataccactcagggacagtctcgcaaaaagggacacccgagttatgcaccacccaaacgtatgcgtcg

SEQ ID NO: 12905 - DNA, 70 bp, Homo sapiens
gggacagtctcgcaaaaagggacacccgagttatgcaccacccaaacgtatgcgtcgtaaaactgaatta

SEQ ID NO: 12906 - DNA, 69 bp, Homo sapiens
aaaaagggacacccgagttatgcaccacccaaacgtatgcgtcgtaaaactgaattatcttccacggca

SEQ ID NO: 12907 - DNA, 70 bp, Homo sapiens
acacccgagttatgcaccacccaaacgtatgcgtcgtaaaactgaattatcttccacggcaaaatctaaa

SEQ ID NO: 12908 - DNA, 69 bp, Homo sapiens
aaacgtatgcgtcgtaaaactgaattatcttccacggcaaaatctaaagcccacttctttggcaaaaga

SEQ ID NO: 12909 - DNA, 70 bp, Homo sapiens
cgtcgtaaaactgaattatcttccacggcaaaatctaaagcccacttctttggcaaaagagatattagaa

SEQ ID NO: 12910 - DNA, 70 bp, Homo sapiens
tgaattatcttccacggcaaaatctaaagcccacttctttggcaaaagagatattagaagtcggtttatt

SEQ ID NO: 12911 - DNA, 70 bp, Homo sapiens
atcttccacggcaaaatctaaagcccacttctttggcaaaagagatattagaagtcggtttatttctcac

SEQ ID NO: 12912 - DNA, 69 bp, Homo sapiens
aaaatctaaagcccacttctttggcaaaagagatattagaagtcggtttatttctcactcctcctcctc

SEQ ID NO: 12913 - DNA, 70 bp, Homo sapiens
aagcccacttctttggcaaaagagatattagaagtcggtttatttctcactcctcctcctctagctgggg

SEQ ID NO: 12914 - DNA, 73 bp, Homo sapiens
gcaaaagagatattagaagtcggtttatttctcactcctcctcctctagctgggggatggctagaggaagtat

SEQ ID NO: 12915 - DNA, 70 bp, Homo sapiens
atattagaagtcggtttatttctcactcctcctcctctagctgggggatggctagaggaagtatttttaa

SEQ ID NO: 12916 - DNA, 69 bp, Homo sapiens
aagtcggtttatttctcactcctcctcctctagctgggggatggctagaggaagtatttttaaagcaat

SEQ ID NO: 12917 - DNA, 76 bp, Homo sapiens
tatttctcactcctcctcctctagctgggggatggctagaggaagtatttttaaagcaattgctcacttcaagcga

SEQ ID NO: 12918 - DNA, 72 bp, Homo sapiens
ctcctctagctgggggatggctagaggaagtatttttaaagcaattgctcacttcaagcgaacaactttcct

SEQ ID NO: 12919 - DNA, 69 bp, Homo sapiens
ctgggggatggctagaggaagtatttttaaagcaattgctcacttcaagcgaacaactttccttaaaaa

SEQ ID NO: 12920 - DNA, 72 bp, Homo sapiens
ctagaggaagtatttttaaagcaattgctcacttcaagcgaacaactttccttaaaaagcacaggatgctag

SEQ ID NO: 12921 - DNA, 73 bp, Homo sapiens
tatttttaaagcaattgctcacttcaagcgaacaactttccttaaaaagcacaggatgctaggcagattaaaa

SEQ ID NO: 12922 - DNA, 72 bp, Homo sapiens
acttcaagcgaacaactttccttaaaaagcacaggatgctaggcagattaaaatataaagtgacccctcaga

SEQ ID NO: 12923 - DNA, 71 bp, Homo sapiens
tttccttaaaaagcacaggatgctaggcagattaaaatataaagtgacccctcagatggggaccccctcac

SEQ ID NO: 12924 - DNA, 71 bp, Homo sapiens
aaagcacaggatgctaggcagattaaaatataaagtgacccctcagatggggaccccctcaccagggaagg

SEQ ID NO: 12925 - DNA, 68 bp, Homo sapiens
aaatataaagtgacccctcagatggggaccccctcaccagggaaggggagcttgacagacggaaggat

SEQ ID NO: 12926 - DNA, 68 bp, Homo sapiens
taaagtgacccctcagatggggaccccctcaccagggaaggggagcttgacagacggaaggattaaac

SEQ ID NO: 12927 - DNA, 73 bp, Homo sapiens
ccctcaccagggaaggggagcttgacagacggaaggattaaacctgatcaggatgatggtaagcaaaaggtca

SEQ ID NO: 12928 - DNA, 73 bp, Homo sapiens
ggaaggggagcttgacagacggaaggattaaacctgatcaggatgatggtaagcaaaaggtcaaagctccaac

SEQ ID NO: 12929 - DNA, 74 bp, Homo sapiens
agcttgacagacggaaggattaaacctgatcaggatgatggtaagcaaaaggtcaaagctccaaccaaacctgc

SEQ ID NO: 12930 - DNA, 77 bp, Homo sapiens
ctcatgattcaagtcagtgaatacactttctgctggttttaaatgacagatactgaaataaaaataaacatcaaaca

SEQ ID NO: 12931 - DNA, 75 bp, Homo sapiens
gtcagtgaatacactttctgctggttttaaatgacagatactgaaataaaaataaacatcaaacaagaaagtgca

SEQ ID NO: 12932 - DNA, 74 bp, Homo sapiens
cactttctgctggttttaaatgacagatactgaaataaaaataaacatcaaacaagaaagtgcagatgtaaatg

SEQ ID NO: 12933 - DNA, 77 bp, Homo sapiens
tctgctggttttaaatgacagatactgaaataaaaataaacatcaaacaagaaagtgcagatgtaaatgtgattgga

SEQ ID NO: 12934 - DNA, 76 bp, Homo sapiens
tgacagatactgaaataaaaataaacatcaaacaagaaagtgcagatgtaaatgtgattggaaacaaggatgtcgt

SEQ ID NO: 12935 - DNA, 75 bp, Homo sapiens
tgaaataaaaataaacatcaaacaagaaagtgcagatgtaaatgtgattggaaacaaggatgtcgttactgaaga

SEQ ID NO: 12936 - DNA, 75 bp, Homo sapiens
aataaacatcaaacaagaaagtgcagatgtaaatgtgattggaaacaaggatgtcgttactgaagaggatttgga

SEQ ID NO: 12937 - DNA, 74 bp, Homo sapiens
atcaaacaagaaagtgcagatgtaaatgtgattggaaacaaggatgtcgttactgaagaggatttggatgtttt

SEQ ID NO: 12938 - DNA, 74 bp, Homo sapiens
aaagtgcagatgtaaatgtgattggaaacaaggatgtcgttactgaagaggatttggatgtttttaagcaggcc

SEQ ID NO: 12939 - DNA, 71 bp, Homo sapiens
taaatgtgattggaaacaaggatgtcgttactgaagaggatttggatgtttttaagcaggcccaggaactt

SEQ ID NO: 12940 - DNA, 69 bp, Homo sapiens
attggaaacaaggatgtcgttactgaagaggatttggatgtttttaagcaggcccaggaactttcttgg

SEQ ID NO: 12941 - DNA, 68 bp, Homo sapiens
aaggatgtcgttactgaagaggatttggatgtttttaagcaggcccaggaactttcttgggaggtaag

SEQ ID NO: 12942 - DNA, 70 bp, Homo sapiens
ttactgaagaggatttggatgtttttaagcaggcccaggaactttcttgggaggtaaggcgaggatccca

SEQ ID NO: 12943 - DNA, 72 bp, Homo sapiens
tggatgtttttaagcaggcccaggaactttcttgggaggtaaggcgaggatcccacattgtagtagcaagta

SEQ ID NO: 12944 - DNA, 70 bp, Homo sapiens
attattttccttttctttctatttgacagaaaatagagtgtgagagtggggtggaagactgtggccggta

SEQ ID NO: 12945 - DNA, 74 bp, Homo sapiens
tctttctatttgacagaaaatagagtgtgagagtggggtggaagactgtggccggtacccttctgtgattgaat

SEQ ID NO: 12946 - DNA, 74 bp, Homo sapiens
tgacagaaaatagagtgtgagagtggggtggaagactgtggccggtacccttctgtgattgaatttggtaaata

SEQ ID NO: 12947 - DNA, 72 bp, Homo sapiens
aaaatagagtgtgagagtggggtggaagactgtggccggtacccttctgtgattgaatttggtaaatatgaa

SEQ ID NO: 12948 - DNA, 70 bp, Homo sapiens
agagtggggtggaagactgtggccggtacccttctgtgattgaatttggtaaatatgaaatccaaacctg

SEQ ID NO: 12949 - DNA, 71 bp, Homo sapiens
gtggaagactgtggccggtacccttctgtgattgaatttggtaaatatgaaatccaaacctggtactcctc

SEQ ID NO: 12950 - DNA, 70 bp, Homo sapiens
ctgtggccggtacccttctgtgattgaatttggtaaatatgaaatccaaacctggtactcctcgccttac

SEQ ID NO: 12951 - DNA, 71 bp, Homo sapiens
tacccttctgtgattgaatttggtaaatatgaaatccaaacctggtactcctcgccttacccacaggaata

SEQ ID NO: 12952 - DNA, 71 bp, Homo sapiens
attgaatttggtaaatatgaaatccaaacctggtactcctcgccttacccacaggaatatgcaaggtaatg

SEQ ID NO: 12953 - DNA, 72 bp, Homo sapiens
gtaaatatgaaatccaaacctggtactcctcgccttacccacaggaatatgcaaggtaatggaataagtctg

SEQ ID NO: 12954 - DNA, 73 bp, Homo sapiens
aatccaaacctggtactcctcgccttacccacaggaatatgcaaggtaatggaataagtctggcaggtgtata

SEQ ID NO: 12955 - DNA, 72 bp, Homo sapiens
cccaacagtataatctatctgatagattctatgatttttaaactttaacagattaccaaagctttacctgtg

SEQ ID NO: 12956 - DNA, 73 bp, Homo sapiens
aatctatctgatagattctatgatttttaaactttaacagattaccaaagctttacctgtgtgaattctgtct

SEQ ID NO: 12957 - DNA, 72 bp, Homo sapiens
gatagattctatgatttttaaactttaacagattaccaaagctttacctgtgtgaattctgtcttaaatata

SEQ ID NO: 12958 - DNA, 69 bp, Homo sapiens
gatttttaaactttaacagattaccaaagctttacctgtgtgaattctgtcttaaatatatgaaaagta

SEQ ID NO: 12959 - DNA, 68 bp, Homo sapiens
aactttaacagattaccaaagctttacctgtgtgaattctgtcttaaatatatgaaaagtaaaaatat

SEQ ID NO: 12960 - DNA, 71 bp, Homo sapiens
ccaaagctttacctgtgtgaattctgtcttaaatatatgaaaagtaaaaatattttgctaagacactccaa

SEQ ID NO: 12961 - DNA, 73 bp, Homo sapiens
acctgtgtgaattctgtcttaaatatatgaaaagtaaaaatattttgctaagacactccaagaagtgtggatg

SEQ ID NO: 12962 - DNA, 72 bp, Homo sapiens
attctgtcttaaatatatgaaaagtaaaaatattttgctaagacactccaagaagtgtggatggtttcatcc

SEQ ID NO: 12963 - DNA, 74 bp, Homo sapiens
aaatatatgaaaagtaaaaatattttgctaagacactccaagaagtgtggatggtttcatcctccagcaaatga

SEQ ID NO: 12964 - DNA, 71 bp, Homo sapiens
aaagtaaaaatattttgctaagacactccaagaagtgtggatggtttcatcctccagcaaatgaaatttac

SEQ ID NO: 12965 - DNA, 72 bp, Homo sapiens
aatattttgctaagacactccaagaagtgtggatggtttcatcctccagcaaatgaaatttaccgaaggaaa

SEQ ID NO: 12966 - DNA, 72 bp, Homo sapiens
agacactccaagaagtgtggatggtttcatcctccagcaaatgaaatttaccgaaggaaagacctttcagta

SEQ ID NO: 12967 - DNA, 71 bp, Homo sapiens
agaagtgtggatggtttcatcctccagcaaatgaaatttaccgaaggaaagacctttcagtatttgaggta

SEQ ID NO: 12968 - DNA, 71 bp, Homo sapiens
atggtttcatcctccagcaaatgaaatttaccgaaggaaagacctttcagtatttgaggtaagcgcgtgta

SEQ ID NO: 12969 - DNA, 69 bp, Homo sapiens
tcctccagcaaatgaaatttaccgaaggaaagacctttcagtatttgaggtaagcgcgtgtaaataaaa

SEQ ID NO: 12970 - DNA, 66 bp, Homo sapiens
agcaaatgaaatttaccgaaggaaagacctttcagtatttgaggtaagcgcgtgtaaataaaaaaa

SEQ ID NO: 12971 - DNA, 74 bp, Homo sapiens
tatggtgcagtatttttatgttaaataatgttgtctgtttctttttgctaggttgatgggaatatgagcaaaat

SEQ ID NO: 12972 - DNA, 72 bp, Homo sapiens
ttatgttaaataatgttgtctgtttctttttgctaggttgatgggaatatgagcaaaatttattgccaaaac

SEQ ID NO: 12973 - DNA, 72 bp, Homo sapiens
ataatgttgtctgtttctttttgctaggttgatgggaatatgagcaaaatttattgccaaaacctttgcttg

SEQ ID NO: 12974 - DNA, 73 bp, Homo sapiens
tgtttctttttgctaggttgatgggaatatgagcaaaatttattgccaaaacctttgcttgttagccaagctc

SEQ ID NO: 12975 - DNA, 73 bp, Homo sapiens
tttttgctaggttgatgggaatatgagcaaaatttattgccaaaacctttgcttgttagccaagctcttcctg

SEQ ID NO: 12976 - DNA, 73 bp, Homo sapiens
gttgatgggaatatgagcaaaatttattgccaaaacctttgcttgttagccaagctcttcctggaccacaaaa

SEQ ID NO: 12977 - DNA, 72 bp, Homo sapiens
tatgagcaaaatttattgccaaaacctttgcttgttagccaagctcttcctggaccacaaaacgttgtatta

SEQ ID NO: 12978 - DNA, 71 bp, Homo sapiens
aaatttattgccaaaacctttgcttgttagccaagctcttcctggaccacaaaacgttgtattatgatgtc

SEQ ID NO: 12979 - DNA, 71 bp, Homo sapiens
aacctttgcttgttagccaagctcttcctggaccacaaaacgttgtattatgatgtcgagccattcctttt

SEQ ID NO: 12980 - DNA, 73 bp, Homo sapiens
ttgttagccaagctcttcctggaccacaaaacgttgtattatgatgtcgagccattccttttttatgtcctta

SEQ ID NO: 12981 - DNA, 70 bp, Homo sapiens
aagctcttcctggaccacaaaacgttgtattatgatgtcgagccattccttttttatgtccttacaaaaa

SEQ ID NO: 12982 - DNA, 71 bp, Homo sapiens
cctggaccacaaaacgttgtattatgatgtcgagccattccttttttatgtccttacaaaaaatgatgaaa

SEQ ID NO: 12983 - DNA, 72 bp, Homo sapiens
aaacgttgtattatgatgtcgagccattccttttttatgtccttacaaaaaatgatgaaaagggctgtcatc

SEQ ID NO: 12984 - DNA, 74 bp, Homo sapiens
attatgatgtcgagccattccttttttatgtccttacaaaaaatgatgaaaagggctgtcatctggttggatac

SEQ ID NO: 12985 - DNA, 71 bp, Homo sapiens
cattccttttttatgtccttacaaaaaatgatgaaaagggctgtcatctggttggatacttctctaaggta

SEQ ID NO: 12986 - DNA, 72 bp, Homo sapiens
tttatgtccttacaaaaaatgatgaaaagggctgtcatctggttggatacttctctaaggtaaaacaagagc

SEQ ID NO: 12987 - DNA, 74 bp, Homo sapiens
ttacaaaaaatgatgaaaagggctgtcatctggttggatacttctctaaggtaaaacaagagccagcatgacct

SEQ ID NO: 12988 - DNA, 75 bp, Homo sapiens
aaatgatgaaaagggctgtcatctggttggatacttctctaaggtaaaacaagagccagcatgaccttcattttc

SEQ ID NO: 12989 - DNA, 79 bp, Homo sapiens
ccacttcagcagggctctgacatacttgatctgtttctccttccctcaggaaaagctttgccagcagaagtataatgtc

SEQ ID NO: 12990 - DNA, 79 bp, Homo sapiens
agggctctgacatacttgatctgtttctccttccctcaggaaaagctttgccagcagaagtataatgtctcctgcataa

SEQ ID NO: 12991 - DNA, 84 bp, Homo sapiens
tctgacatacttgatctgtttctccttccctcaggaaaagctttgccagcagaagtataatgtctcctgcataatgatcatgcc

SEQ ID NO: 12992 - DNA, 81 bp, Homo sapiens
tctgtttctccttccctcaggaaaagctttgccagcagaagtataatgtctcctgcataatgatcatgccccagcaccaaa

SEQ ID NO: 12993 - DNA, 80 bp, Homo sapiens
ttccctcaggaaaagctttgccagcagaagtataatgtctcctgcataatgatcatgccccagcaccaaaggcaaggatt

SEQ ID NO: 12994 - DNA, 78 bp, Homo sapiens
aaaagctttgccagcagaagtataatgtctcctgcataatgatcatgccccagcaccaaaggcaaggatttggacggt

SEQ ID NO: 12995 - DNA, 80 bp, Homo sapiens
ccagcagaagtataatgtctcctgcataatgatcatgccccagcaccaaaggcaaggatttggacggtttctcattgatt

SEQ ID NO: 12996 - DNA, 79 bp, Homo sapiens
aagtataatgtctcctgcataatgatcatgccccagcaccaaaggcaaggatttggacggtttctcattgatttcagta

SEQ ID NO: 12997 - DNA, 78 bp, Homo sapiens
tcctgcataatgatcatgccccagcaccaaaggcaaggatttggacggtttctcattgatttcagtaagtgaagtact

SEQ ID NO: 12998 - DNA, 75 bp, Homo sapiens
ataatgatcatgccccagcaccaaaggcaaggatttggacggtttctcattgatttcagtaagtgaagtacttta

SEQ ID NO: 12999 - DNA, 69 bp, Homo sapiens
cccagcaccaaaggcaaggatttggacggtttctcattgatttcagtaagtgaagtactttatttactt

SEQ ID NO: 13000 - DNA, 71 bp, Homo sapiens
aaaggcaaggatttggacggtttctcattgatttcagtaagtgaagtactttatttactttcatgatccag

SEQ ID NO: 13001 - DNA, 75 bp, Homo sapiens
agctctgggaatgccacagtgaggaatgcccatttattttttctgccctaggctatttgctttctagaagagaag

SEQ ID NO: 13002 - DNA, 73 bp, Homo sapiens
acagtgaggaatgcccatttattttttctgccctaggctatttgctttctagaagagaaggccaagcagggtc

SEQ ID NO: 13003 - DNA, 72 bp, Homo sapiens
atgcccatttattttttctgccctaggctatttgctttctagaagagaaggccaagcagggtctcctgaaaa

SEQ ID NO: 13004 - DNA, 71 bp, Homo sapiens
atttattttttctgccctaggctatttgctttctagaagagaaggccaagcagggtctcctgaaaagcctc

SEQ ID NO: 13005 - DNA, 76 bp, Homo sapiens
ttctgccctaggctatttgctttctagaagagaaggccaagcagggtctcctgaaaagcctctctccgatctgggc

SEQ ID NO: 13006 - DNA, 75 bp, Homo sapiens
tatttgctttctagaagagaaggccaagcagggtctcctgaaaagcctctctccgatctgggccgtctctcctac

SEQ ID NO: 13007 - DNA, 78 bp, Homo sapiens
gccaagcagggtctcctgaaaagcctctctccgatctgggccgtctctcctacctggcatattggaagagcgtcatct

SEQ ID NO: 13008 - DNA, 79 bp, Homo sapiens
gtctcctgaaaagcctctctccgatctgggccgtctctcctacctggcatattggaagagcgtcatcttggagtatctc

SEQ ID NO: 13009 - DNA, 77 bp, Homo sapiens
aaaagcctctctccgatctgggccgtctctcctacctggcatattggaagagcgtcatcttggagtatctctaccac

SEQ ID NO: 13010 - DNA, 81 bp, Homo sapiens
tctctccgatctgggccgtctctcctacctggcatattggaagagcgtcatcttggagtatctctaccaccaccatgagag

SEQ ID NO: 13011 - DNA, 85 bp, Homo sapiens
tgggccgtctctcctacctggcatattggaagagcgtcatcttggagtatctctaccaccaccatgagaggcacatcagcatcaa

SEQ ID NO: 13012 - DNA, 87 bp, Homo sapiens
tctcctacctggcatattggaagagcgtcatcttggagtatctctaccaccaccatgagaggcacatcagcatcaaggcaattagca

SEQ ID NO: 13013 - DNA, 86 bp, Homo sapiens
atattggaagagcgtcatcttggagtatctctaccaccaccatgagaggcacatcagcatcaaggcaattagcagagcgacgggca

SEQ ID NO: 13014 - DNA, 87 bp, Homo sapiens
aagagcgtcatcttggagtatctctaccaccaccatgagaggcacatcagcatcaaggcaattagcagagcgacgggcatgtgccca

SEQ ID NO: 13015 - DNA, 90 bp, Homo sapiens
tcttggagtatctctaccaccaccatgagaggcacatcagcatcaaggcaattagcagagcgacgggcatgtgcccacatgacattgcca

SEQ ID NO: 13016 - DNA, 92 bp, Homo sapiens
tctaccaccaccatgagaggcacatcagcatcaaggcaattagcagagcgacgggcatgtgcccacatgacattgccaccactctgcagcac

SEQ ID NO: 13017 - DNA, 94 bp, Homo sapiens
atgagaggcacatcagcatcaaggcaattagcagagcgacgggcatgtgcccacatgacattgccaccactctgcagcacctccacatgatcga

SEQ ID NO: 13018 - DNA, 92 bp, Homo sapiens
atcagcatcaaggcaattagcagagcgacgggcatgtgcccacatgacattgccaccactctgcagcacctccacatgatcgacaagagaga

SEQ ID NO: 13019 - DNA, 91 bp, Homo sapiens
atcaaggcaattagcagagcgacgggcatgtgcccacatgacattgccaccactctgcagcacctccacatgatcgacaagagagatggca

SEQ ID NO: 13020 - DNA, 90 bp, Homo sapiens
attagcagagcgacgggcatgtgcccacatgacattgccaccactctgcagcacctccacatgatcgacaagagagatggcaggtgagtc

SEQ ID NO: 13021 - DNA, 86 bp, Homo sapiens
acgggcatgtgcccacatgacattgccaccactctgcagcacctccacatgatcgacaagagagatggcaggtgagtcctgggacc

SEQ ID NO: 13022 - DNA, 86 bp, Homo sapiens
cccacatgacattgccaccactctgcagcacctccacatgatcgacaagagagatggcaggtgagtcctgggaccctgggcagctc

SEQ ID NO: 13023 - DNA, 85 bp, Homo sapiens
attgccaccactctgcagcacctccacatgatcgacaagagagatggcaggtgagtcctgggaccctgggcagctccgtggctca

SEQ ID NO: 13024 - DNA, 78 bp, Homo sapiens
aatttcagcttgtgattacatcttgttctgccttatcacattacagatttgtcatcattagacgggaaaagttgatat

SEQ ID NO: 13025 - DNA, 82 bp, Homo sapiens
tgtgattacatcttgttctgccttatcacattacagatttgtcatcattagacgggaaaagttgatattgagccacatggaa

SEQ ID NO: 13026 - DNA, 79 bp, Homo sapiens
ttacatcttgttctgccttatcacattacagatttgtcatcattagacgggaaaagttgatattgagccacatggaaaa

SEQ ID NO: 13027 - DNA, 78 bp, Homo sapiens
ttctgccttatcacattacagatttgtcatcattagacgggaaaagttgatattgagccacatggaaaagctgaaaac

SEQ ID NO: 13028 - DNA, 76 bp, Homo sapiens
acattacagatttgtcatcattagacgggaaaagttgatattgagccacatggaaaagctgaaaacctgttccaga

SEQ ID NO: 13029 - DNA, 76 bp, Homo sapiens
atttgtcatcattagacgggaaaagttgatattgagccacatggaaaagctgaaaacctgttccagagccaatgaa

SEQ ID NO: 13030 - DNA, 75 bp, Homo sapiens
attagacgggaaaagttgatattgagccacatggaaaagctgaaaacctgttccagagccaatgaacttgatcca

SEQ ID NO: 13031 - DNA, 77 bp, Homo sapiens
aaaagttgatattgagccacatggaaaagctgaaaacctgttccagagccaatgaacttgatccagacagtctgagg

SEQ ID NO: 13032 - DNA, 75 bp, Homo sapiens
agccacatggaaaagctgaaaacctgttccagagccaatgaacttgatccagacagtctgaggtggaccccaatt

SEQ ID NO: 13033 - DNA, 71 bp, Homo sapiens
aaaagctgaaaacctgttccagagccaatgaacttgatccagacagtctgaggtggaccccaattttaatt

SEQ ID NO: 13034 - DNA, 75 bp, Homo sapiens
aaaacctgttccagagccaatgaacttgatccagacagtctgaggtggaccccaattttaatttctaatgctgca

SEQ ID NO: 13035 - DNA, 79 bp, Homo sapiens
ttccagagccaatgaacttgatccagacagtctgaggtggaccccaattttaatttctaatgctgcagtgtctgaagaa

SEQ ID NO: 13036 - DNA, 78 bp, Homo sapiens
aatgaacttgatccagacagtctgaggtggaccccaattttaatttctaatgctgcagtgtctgaagaagagcgagaa

SEQ ID NO: 13037 - DNA, 79 bp, Homo sapiens
atccagacagtctgaggtggaccccaattttaatttctaatgctgcagtgtctgaagaagagcgagaagctgagaaaga

SEQ ID NO: 13038 - DNA, 76 bp, Homo sapiens
aggtggaccccaattttaatttctaatgctgcagtgtctgaagaagagcgagaagctgagaaagaggtaatgattg

SEQ ID NO: 13039 - DNA, 80 bp, Homo sapiens
caattttaatttctaatgctgcagtgtctgaagaagagcgagaagctgagaaagaggtaatgattgtctttatcatccta

SEQ ID NO: 13040 - DNA, 80 bp, Homo sapiens
ttaatttctaatgctgcagtgtctgaagaagagcgagaagctgagaaagaggtaatgattgtctttatcatcctaagttg

SEQ ID NO: 13041 - DNA, 74 bp, Homo sapiens
ctgtgtaactgccctctcactggccaccatttttaccctccccacttaggctgagcggctaatggaacaagcta

SEQ ID NO: 13042 - DNA, 75 bp, Homo sapiens
cctctcactggccaccatttttaccctccccacttaggctgagcggctaatggaacaagctagctgctgggagaa

SEQ ID NO: 13043 - DNA, 73 bp, Homo sapiens
actggccaccatttttaccctccccacttaggctgagcggctaatggaacaagctagctgctgggagaaggag

SEQ ID NO: 13044 - DNA, 72 bp, Homo sapiens
atttttaccctccccacttaggctgagcggctaatggaacaagctagctgctgggagaaggaggaacaagaa

SEQ ID NO: 13045 - DNA, 77 bp, Homo sapiens
acttaggctgagcggctaatggaacaagctagctgctgggagaaggaggaacaagaaatcctgtcaactagagctaa

SEQ ID NO: 13046 - DNA, 77 bp, Homo sapiens
agcggctaatggaacaagctagctgctgggagaaggaggaacaagaaatcctgtcaactagagctaacagtaggcaa

SEQ ID NO: 13047 - DNA, 80 bp, Homo sapiens
taatggaacaagctagctgctgggagaaggaggaacaagaaatcctgtcaactagagctaacagtaggcaatcacctgca

SEQ ID NO: 13048 - DNA, 78 bp, Homo sapiens
tagctgctgggagaaggaggaacaagaaatcctgtcaactagagctaacagtaggcaatcacctgcaaaagtacaatc

SEQ ID NO: 13049 - DNA, 73 bp, Homo sapiens
agaaggaggaacaagaaatcctgtcaactagagctaacagtaggcaatcacctgcaaaagtacaatcgaaaaa

SEQ ID NO: 13050 - DNA, 73 bp, Homo sapiens
ggaacaagaaatcctgtcaactagagctaacagtaggcaatcacctgcaaaagtacaatcgaaaaataaatat

SEQ ID NO: 13051 - DNA, 74 bp, Homo sapiens
aaatcctgtcaactagagctaacagtaggcaatcacctgcaaaagtacaatcgaaaaataaatatttgcattcc

SEQ ID NO: 13052 - DNA, 73 bp, Homo sapiens
aactagagctaacagtaggcaatcacctgcaaaagtacaatcgaaaaataaatatttgcattccccggagagc

SEQ ID NO: 13053 - DNA, 73 bp, Homo sapiens
aacagtaggcaatcacctgcaaaagtacaatcgaaaaataaatatttgcattccccggagagccggccagtca

SEQ ID NO: 13054 - DNA, 72 bp, Homo sapiens
aatcacctgcaaaagtacaatcgaaaaataaatatttgcattccccggagagccggccagtcacaggggagc

SEQ ID NO: 13055 - DNA, 71 bp, Homo sapiens
aaaagtacaatcgaaaaataaatatttgcattccccggagagccggccagtcacaggggagcgagggcagc

SEQ ID NO: 13056 - DNA, 77 bp, Homo sapiens
aaataaatatttgcattccccggagagccggccagtcacaggggagcgagggcagctgctggagctgtctaaagaga

SEQ ID NO: 13057 - DNA, 80 bp, Homo sapiens
aatatttgcattccccggagagccggccagtcacaggggagcgagggcagctgctggagctgtctaaagagagcagtgaa

SEQ ID NO: 13058 - DNA, 79 bp, Homo sapiens
cccggagagccggccagtcacaggggagcgagggcagctgctggagctgtctaaagagagcagtgaagaagaagaggag

SEQ ID NO: 13059 - DNA, 72 bp, Homo sapiens
gaagaagaagaaaatattcaaagctctcccccaagattgacgaaaccacagtcagttgccataaagagaaag

SEQ ID NO: 13060 - DNA, 71 bp, Homo sapiens
aaaatattcaaagctctcccccaagattgacgaaaccacagtcagttgccataaagagaaaggtaggtgtc

SEQ ID NO: 13061 - DNA, 72 bp, Homo sapiens
attcaaagctctcccccaagattgacgaaaccacagtcagttgccataaagagaaaggtaggtgtctgttta

SEQ ID NO: 13062 - DNA, 73 bp, Homo sapiens
cccaagattgacgaaaccacagtcagttgccataaagagaaaggtaggtgtctgtttagattttctgtgagtc

SEQ ID NO: 13063 - DNA, 73 bp, Homo sapiens
catttaatttctcatgagctcttatgtgttatgtttggaattaatttcagaggccttttgtactaaagaagaa

SEQ ID NO: 13064 - DNA, 70 bp, Homo sapiens
tgagctcttatgtgttatgtttggaattaatttcagaggccttttgtactaaagaagaaaaggggtcgta

SEQ ID NO: 13065 - DNA, 67 bp, Homo sapiens
tgtgttatgtttggaattaatttcagaggccttttgtactaaagaagaaaaggggtcgtaaacgcag

SEQ ID NO: 13066 - DNA, 67 bp, Homo sapiens
tttggaattaatttcagaggccttttgtactaaagaagaaaaggggtcgtaaacgcaggaggatcaa

SEQ ID NO: 13067 - DNA, 70 bp, Homo sapiens
ttaatttcagaggccttttgtactaaagaagaaaaggggtcgtaaacgcaggaggatcaacagcagtgta

SEQ ID NO: 13068 - DNA, 70 bp, Homo sapiens
ttttgtactaaagaagaaaaggggtcgtaaacgcaggaggatcaacagcagtgtaacaacagagaccatt

SEQ ID NO: 13069 - DNA, 74 bp, Homo sapiens
aagaagaaaaggggtcgtaaacgcaggaggatcaacagcagtgtaacaacagagaccatttcagagacgacaga

SEQ ID NO: 13070 - DNA, 73 bp, Homo sapiens
aaaaggggtcgtaaacgcaggaggatcaacagcagtgtaacaacagagaccatttcagagacgacagaagtac

SEQ ID NO: 13071 - DNA, 80 bp, Homo sapiens
taaacgcaggaggatcaacagcagtgtaacaacagagaccatttcagagacgacagaagtactgaatgagccctttgaca

SEQ ID NO: 13072 - DNA, 82 bp, Homo sapiens
atcaacagcagtgtaacaacagagaccatttcagagacgacagaagtactgaatgagccctttgacaactcagatgaagaga

SEQ ID NO: 13073 - DNA, 79 bp, Homo sapiens
agtgtaacaacagagaccatttcagagacgacagaagtactgaatgagccctttgacaactcagatgaagagaggccaa

SEQ ID NO: 13074 - DNA, 82 bp, Homo sapiens
aacagagaccatttcagagacgacagaagtactgaatgagccctttgacaactcagatgaagagaggccaatgccacagctg

SEQ ID NO: 13075 - DNA, 81 bp, Homo sapiens
atttcagagacgacagaagtactgaatgagccctttgacaactcagatgaagagaggccaatgccacagctggagcctacc

SEQ ID NO: 13076 - DNA, 82 bp, Homo sapiens
acagaagtactgaatgagccctttgacaactcagatgaagagaggccaatgccacagctggagcctacctgtgagattgaag

SEQ ID NO: 13077 - DNA, 83 bp, Homo sapiens
tactgaatgagccctttgacaactcagatgaagagaggccaatgccacagctggagcctacctgtgagattgaagtggaggaa

SEQ ID NO: 13078 - DNA, 82 bp, Homo sapiens
cctttgacaactcagatgaagagaggccaatgccacagctggagcctacctgtgagattgaagtggaggaagatggcaggaa

SEQ ID NO: 13079 - DNA, 85 bp, Homo sapiens
tcagatgaagagaggccaatgccacagctggagcctacctgtgagattgaagtggaggaagatggcaggaagccagtcctgagaa

SEQ ID NO: 13080 - DNA, 80 bp, Homo sapiens
aagagaggccaatgccacagctggagcctacctgtgagattgaagtggaggaagatggcaggaagccagtcctgagaaaa

SEQ ID NO: 13081 - DNA, 84 bp, Homo sapiens
aatgccacagctggagcctacctgtgagattgaagtggaggaagatggcaggaagccagtcctgagaaaagcattccagcatca

SEQ ID NO: 13082 - DNA, 81 bp, Homo sapiens
agcctacctgtgagattgaagtggaggaagatggcaggaagccagtcctgagaaaagcattccagcatcagcctgggaaga

SEQ ID NO: 13083 - DNA, 79 bp, Homo sapiens
acctgtgagattgaagtggaggaagatggcaggaagccagtcctgagaaaagcattccagcatcagcctgggaagaaaa

SEQ ID NO: 13084 - DNA, 79 bp, Homo sapiens
ttgaagtggaggaagatggcaggaagccagtcctgagaaaagcattccagcatcagcctgggaagaaaagacaaacaga

SEQ ID NO: 13085 - DNA, 77 bp, Homo sapiens
aagatggcaggaagccagtcctgagaaaagcattccagcatcagcctgggaagaaaagacaaacagaggaagaggaa

SEQ ID NO: 13086 - DNA, 74 bp, Homo sapiens
aagccagtcctgagaaaagcattccagcatcagcctgggaagaaaagacaaacagaggaagaggaaggaaaaga

SEQ ID NO: 13087 - DNA, 76 bp, Homo sapiens
agaaaagcattccagcatcagcctgggaagaaaagacaaacagaggaagaggaaggaaaagacaatcattgcttca

SEQ ID NO: 13088 - DNA, 78 bp, Homo sapiens
attccagcatcagcctgggaagaaaagacaaacagaggaagaggaaggaaaagacaatcattgcttcaagaatgctga

SEQ ID NO: 13089 - DNA, 74 bp, Homo sapiens
gcctgggaagaaaagacaaacagaggaagaggaaggaaaagacaatcattgcttcaagaatgctgacccttgta

SEQ ID NO: 13090 - DNA, 73 bp, Homo sapiens
agaaaagacaaacagaggaagaggaaggaaaagacaatcattgcttcaagaatgctgacccttgtagaagtaa

SEQ ID NO: 13091 - DNA, 74 bp, Homo sapiens
ttgcttcaagaatgctgacccttgtagaagtaagtagaggaatgataaaaaccttacccttgagaatgtctgta

SEQ ID NO: 13092 - DNA, 73 bp, Homo sapiens
cttgtagaagtaagtagaggaatgataaaaaccttacccttgagaatgtctgtatctgactgggtgccaaaga

SEQ ID NO: 13093 - DNA, 78 bp, Homo sapiens
aatgataaaaaccttacccttgagaatgtctgtatctgactgggtgccaaagagcaggcctctggcgtgatgcccaga

SEQ ID NO: 13094 - DNA, 77 bp, Homo sapiens
aaaaccttacccttgagaatgtctgtatctgactgggtgccaaagagcaggcctctggcgtgatgcccagaggcacc

SEQ ID NO: 13095 - DNA, 86 bp, Homo sapiens
agaatgtctgtatctgactgggtgccaaagagcaggcctctggcgtgatgcccagaggcacctgcgaagtggtgctgatgcacctg

SEQ ID NO: 13096 - DNA, 87 bp, Homo sapiens
gtctgtatctgactgggtgccaaagagcaggcctctggcgtgatgcccagaggcacctgcgaagtggtgctgatgcacctggagcaa

SEQ ID NO: 13097 - DNA, 85 bp, Homo sapiens
actgggtgccaaagagcaggcctctggcgtgatgcccagaggcacctgcgaagtggtgctgatgcacctggagcaagtgcccatc

SEQ ID NO: 13098 - DNA, 84 bp, Homo sapiens
aaagagcaggcctctggcgtgatgcccagaggcacctgcgaagtggtgctgatgcacctggagcaagtgcccatctgccctttc

SEQ ID NO: 13099 - DNA, 84 bp, Homo sapiens
tctggcgtgatgcccagaggcacctgcgaagtggtgctgatgcacctggagcaagtgcccatctgccctttcccatccttacaa

SEQ ID NO: 13100 - DNA, 82 bp, Homo sapiens
atgcccagaggcacctgcgaagtggtgctgatgcacctggagcaagtgcccatctgccctttcccatccttacaagcttctc

SEQ ID NO: 13101 - DNA, 78 bp, Homo sapiens
acctgcgaagtggtgctgatgcacctggagcaagtgcccatctgccctttcccatccttacaagcttctctcccttct

SEQ ID NO: 13102 - DNA, 79 bp, Homo sapiens
tggtgctgatgcacctggagcaagtgcccatctgccctttcccatccttacaagcttctctcccttcttcctggaattg

SEQ ID NO: 13103 - DNA, 73 bp, Homo sapiens
cacctggagcaagtgcccatctgccctttcccatccttacaagcttctctcccttcttcctggaattggattt

SEQ ID NO: 13104 - DNA, 71 bp, Homo sapiens
aagtgcccatctgccctttcccatccttacaagcttctctcccttcttcctggaattggattttatgttaa

SEQ ID NO: 13105 - DNA, 69 bp, Homo sapiens
atctgccctttcccatccttacaagcttctctcccttcttcctggaattggattttatgttaaacaact

SEQ ID NO: 13106 - DNA, 68 bp, Homo sapiens
ctttcccatccttacaagcttctctcccttcttcctggaattggattttatgttaaacaacttctaag

SEQ ID NO: 13107 - DNA, 70 bp, Homo sapiens
cttacaagcttctctcccttcttcctggaattggattttatgttaaacaacttctaaggccagaacattc

SEQ ID NO: 13108 - DNA, 67 bp, Homo sapiens
cccttcttcctggaattggattttatgttaaacaacttctaaggccagaacattcctctaggtgggt

SEQ ID NO: 13109 - DNA, 70 bp, Homo sapiens
tggaattggattttatgttaaacaacttctaaggccagaacattcctctaggtgggttcatcttacttac

SEQ ID NO: 13110 - DNA, 69 bp, Homo sapiens
ttttatgttaaacaacttctaaggccagaacattcctctaggtgggttcatcttacttaccagaaattg

SEQ ID NO: 13111 - DNA, 70 bp, Homo sapiens
ttaaacaacttctaaggccagaacattcctctaggtgggttcatcttacttaccagaaattggcttatcc

SEQ ID NO: 13112 - DNA, 68 bp, Homo sapiens
taaggccagaacattcctctaggtgggttcatcttacttaccagaaattggcttatccccaaaaactt

SEQ ID NO: 13113 - DNA, 68 bp, Homo sapiens
agaacattcctctaggtgggttcatcttacttaccagaaattggcttatccccaaaaactttgaagtc

SEQ ID NO: 13114 - DNA, 69 bp, Homo sapiens
taggtgggttcatcttacttaccagaaattggcttatccccaaaaactttgaagtctgttgacaagaaa

SEQ ID NO: 13115 - DNA, 71 bp, Homo sapiens
gttcatcttacttaccagaaattggcttatccccaaaaactttgaagtctgttgacaagaaacacattaca

SEQ ID NO: 13116 - DNA, 70 bp, Homo sapiens
cttaccagaaattggcttatccccaaaaactttgaagtctgttgacaagaaacacattacatttctttga

SEQ ID NO: 13117 - DNA, 72 bp, Homo sapiens
ttggcttatccccaaaaactttgaagtctgttgacaagaaacacattacatttctttgattctaatatgtac

SEQ ID NO: 13118 - DNA, 68 bp, Homo sapiens
cccaaaaactttgaagtctgttgacaagaaacacattacatttctttgattctaatatgtactttttt

SEQ ID NO: 13119 - DNA, 74 bp, Homo sapiens
gtacttttttttttcacatttagttatttctgaaatcaaggtatatattattatcagtgtgagcattgaatgga

SEQ ID NO: 13120 - DNA, 75 bp, Homo sapiens
tttcacatttagttatttctgaaatcaaggtatatattattatcagtgtgagcattgaatggaatcgtttctttt

SEQ ID NO: 13121 - DNA, 74 bp, Homo sapiens
agttatttctgaaatcaaggtatatattattatcagtgtgagcattgaatggaatcgtttcttttttcctggaa

SEQ ID NO: 13122 - DNA, 74 bp, Homo sapiens
ctgaaatcaaggtatatattattatcagtgtgagcattgaatggaatcgtttcttttttcctggaaaacaaata

SEQ ID NO: 13123 - DNA, 73 bp, Homo sapiens
caaggtatatattattatcagtgtgagcattgaatggaatcgtttcttttttcctggaaaacaaatattagta

SEQ ID NO: 13124 - DNA, 73 bp, Homo sapiens
ttatcagtgtgagcattgaatggaatcgtttcttttttcctggaaaacaaatattagtaaatcaatagtacat

SEQ ID NO: 13125 - DNA, 71 bp, Homo sapiens
gtgtgagcattgaatggaatcgtttcttttttcctggaaaacaaatattagtaaatcaatagtacatttta

SEQ ID NO: 13126 - DNA, 69 bp, Homo sapiens
tggaatcgtttcttttttcctggaaaacaaatattagtaaatcaatagtacattttataatcagtagtg

SEQ ID NO: 13127 - DNA, 70 bp, Homo sapiens
cttttttcctggaaaacaaatattagtaaatcaatagtacattttataatcagtagtgtcgtagtatata

SEQ ID NO: 13128 - DNA, 72 bp, Homo sapiens
cctggaaaacaaatattagtaaatcaatagtacattttataatcagtagtgtcgtagtatatactactataa

SEQ ID NO: 13129 - DNA, 75 bp, Homo sapiens
tattagtaaatcaatagtacattttataatcagtagtgtcgtagtatatactactataaagattcatctaaacta

SEQ ID NO: 13130 - DNA, 79 bp, Homo sapiens
tcaatagtacattttataatcagtagtgtcgtagtatatactactataaagattcatctaaactaagctgggcatgatg

SEQ ID NO: 13131 - DNA, 70 bp, Homo sapiens
aaaaaaaaggaaccatctaaacttacccacacatcaatattagctttgataatattgcataacataaaaa

SEQ ID NO: 13132 - DNA, 72 bp, Homo sapiens
aaaaaaaggaaccatctaaacttacccacacatcaatattagctttgataatattgcataacataaaaatca

SEQ ID NO: 13133 - DNA, 75 bp, Homo sapiens
ggaaccatctaaacttacccacacatcaatattagctttgataatattgcataacataaaaatcagtaaactgac

SEQ ID NO: 13134 - DNA, 73 bp, Homo sapiens
ctaaacttacccacacatcaatattagctttgataatattgcataacataaaaatcagtaaactgactttcct

SEQ ID NO: 13135 - DNA, 75 bp, Homo sapiens
ccacacatcaatattagctttgataatattgcataacataaaaatcagtaaactgactttccttttaagttgaca

SEQ ID NO: 13136 - DNA, 72 bp, Homo sapiens
agctttgataatattgcataacataaaaatcagtaaactgactttccttttaagttgacagggacacctcta

SEQ ID NO: 13137 - DNA, 70 bp, Homo sapiens
aatattgcataacataaaaatcagtaaactgactttccttttaagttgacagggacacctctaccccatc

SEQ ID NO: 13138 - DNA, 67 bp, Homo sapiens
acataaaaatcagtaaactgactttccttttaagttgacagggacacctctaccccatcctctaaaa

SEQ ID NO: 13139 - DNA, 67 bp, Homo sapiens
aaatcagtaaactgactttccttttaagttgacagggacacctctaccccatcctctaaaaaataca

SEQ ID NO: 13140 - DNA, 68 bp, Homo sapiens
actttccttttaagttgacagggacacctctaccccatcctctaaaaaatacactgaacaccagtgaa

SEQ ID NO: 13141 - DNA, 70 bp, Homo sapiens
taagttgacagggacacctctaccccatcctctaaaaaatacactgaacaccagtgaatcgtctttaaaa

SEQ ID NO: 13142 - DNA, 70 bp, Homo sapiens
acagggacacctctaccccatcctctaaaaaatacactgaacaccagtgaatcgtctttaaaagcaccca

SEQ ID NO: 13143 - DNA, 70 bp, Homo sapiens
acctctaccccatcctctaaaaaatacactgaacaccagtgaatcgtctttaaaagcacccatccttgcc

SEQ ID NO: 13144 - DNA, 73 bp, Homo sapiens
atcctctaaaaaatacactgaacaccagtgaatcgtctttaaaagcacccatccttgcctgtcaggttgagaa

SEQ ID NO: 13145 - DNA, 74 bp, Homo sapiens
aaaatacactgaacaccagtgaatcgtctttaaaagcacccatccttgcctgtcaggttgagaacgtgtgctcc

SEQ ID NO: 13146 - DNA, 78 bp, Homo sapiens
aacaccagtgaatcgtctttaaaagcacccatccttgcctgtcaggttgagaacgtgtgctcccagctgaatcatgag

SEQ ID NO: 13147 - DNA, 77 bp, Homo sapiens
gtctttaaaagcacccatccttgcctgtcaggttgagaacgtgtgctcccagctgaatcatgagggtttatggtata

SEQ ID NO: 13148 - DNA, 77 bp, Homo sapiens
tttaaaagcacccatccttgcctgtcaggttgagaacgtgtgctcccagctgaatcatgagggtttatggtatactc

SEQ ID NO: 13149 - DNA, 79 bp, Homo sapiens
aaagcacccatccttgcctgtcaggttgagaacgtgtgctcccagctgaatcatgagggtttatggtatactctctcta

SEQ ID NO: 13150 - DNA, 78 bp, Homo sapiens
acccatccttgcctgtcaggttgagaacgtgtgctcccagctgaatcatgagggtttatggtatactctctctattcc

SEQ ID NO: 13151 - DNA, 80 bp, Homo sapiens
ttgcctgtcaggttgagaacgtgtgctcccagctgaatcatgagggtttatggtatactctctctattccctggccaaga

SEQ ID NO: 13152 - DNA, 79 bp, Homo sapiens
aggttgagaacgtgtgctcccagctgaatcatgagggtttatggtatactctctctattccctggccaagatgactcta

SEQ ID NO: 13153 - DNA, 80 bp, Homo sapiens
agaacgtgtgctcccagctgaatcatgagggtttatggtatactctctctattccctggccaagatgactctattcagaa

SEQ ID NO: 13154 - DNA, 77 bp, Homo sapiens
ctcccagctgaatcatgagggtttatggtatactctctctattccctggccaagatgactctattcagaacttactt

SEQ ID NO: 13155 - DNA, 78 bp, Homo sapiens
cagctgaatcatgagggtttatggtatactctctctattccctggccaagatgactctattcagaacttactttaatc

SEQ ID NO: 13156 - DNA, 75 bp, Homo sapiens
aatcatgagggtttatggtatactctctctattccctggccaagatgactctattcagaacttactttaatctgg

SEQ ID NO: 13157 - DNA, 72 bp, Homo sapiens
agggtttatggtatactctctctattccctggccaagatgactctattcagaacttactttaatctggggaa

SEQ ID NO: 13158 - DNA, 74 bp, Homo sapiens
tattccctggccaagatgactctattcagaacttactttaatctggggaacaggccatctcatttccctgggaa

SEQ ID NO: 13159 - DNA, 74 bp, Homo sapiens
tctattcagaacttactttaatctggggaacaggccatctcatttccctgggaaccacaggatcactctagctt

SEQ ID NO: 13160 - DNA, 71 bp, Homo sapiens
aacttactttaatctggggaacaggccatctcatttccctgggaaccacaggatcactctagcttttgaaa

SEQ ID NO: 13161 - DNA, 73 bp, Homo sapiens
tttaatctggggaacaggccatctcatttccctgggaaccacaggatcactctagcttttgaaaagccacagt

SEQ ID NO: 13162 - DNA, 73 bp, Homo sapiens
aacaggccatctcatttccctgggaaccacaggatcactctagcttttgaaaagccacagttttaagaacata

SEQ ID NO: 13163 - DNA, 74 bp, Homo sapiens
atttccctgggaaccacaggatcactctagcttttgaaaagccacagttttaagaacatatgcaagcatcttct

SEQ ID NO: 13164 - DNA, 76 bp, Homo sapiens
ggaaccacaggatcactctagcttttgaaaagccacagttttaagaacatatgcaagcatcttcttgattttctta

SEQ ID NO: 13165 - DNA, 77 bp, Homo sapiens
gatcactctagcttttgaaaagccacagttttaagaacatatgcaagcatcttcttgattttcttagttcacagaaa

SEQ ID NO: 13166 - DNA, 79 bp, Homo sapiens
gccacagttttaagaacatatgcaagcatcttcttgattttcttagttcacagaaatgctattcctgcatacagtattt

SEQ ID NO: 13167 - DNA, 81 bp, Homo sapiens
tttaagaacatatgcaagcatcttcttgattttcttagttcacagaaatgctattcctgcatacagtattttgctgaagga

SEQ ID NO: 13168 - DNA, 82 bp, Homo sapiens
tatgcaagcatcttcttgattttcttagttcacagaaatgctattcctgcatacagtattttgctgaaggaatgacttctta

SEQ ID NO: 13169 - DNA, 76 bp, Homo sapiens
ttcttgattttcttagttcacagaaatgctattcctgcatacagtattttgctgaaggaatgacttcttaccctgg

SEQ ID NO: 13170 - DNA, 75 bp, Homo sapiens
attttcttagttcacagaaatgctattcctgcatacagtattttgctgaaggaatgacttcttaccctgggtata

SEQ ID NO: 13171 - DNA, 76 bp, Homo sapiens
gttcacagaaatgctattcctgcatacagtattttgctgaaggaatgacttcttaccctgggtatagagaaaccaa

SEQ ID NO: 13172 - DNA, 73 bp, Homo sapiens
tattcctgcatacagtattttgctgaaggaatgacttcttaccctgggtatagagaaaccaagccttattctt

SEQ ID NO: 13173 - DNA, 69 bp, Homo sapiens
tacagtattttgctgaaggaatgacttcttaccctgggtatagagaaaccaagccttattctttgggtt

SEQ ID NO: 13174 - DNA, 66 bp, Homo sapiens
attttgctgaaggaatgacttcttaccctgggtatagagaaaccaagccttattctttgggttttt

SEQ ID NO: 13175 - DNA, 69 bp, Homo sapiens
tttttttttaaacaaataacaaactgcagtgagcgatcattttgtgtgtgaaaatgaggtttatttccc

SEQ ID NO: 13176 - DNA, 72 bp, Homo sapiens
tttaaacaaataacaaactgcagtgagcgatcattttgtgtgtgaaaatgaggtttatttccccttcttggc

SEQ ID NO: 13177 - DNA, 75 bp, Homo sapiens
agcgatcattttgtgtgtgaaaatgaggtttatttccccttcttggctgtcttctcatattatgcctgattcctt

SEQ ID NO: 13178 - DNA, 72 bp, Homo sapiens
aaaatgaggtttatttccccttcttggctgtcttctcatattatgcctgattcctttcaggatgtccttctt

SEQ ID NO: 13179 - DNA, 72 bp, Homo sapiens
tttatttccccttcttggctgtcttctcatattatgcctgattcctttcaggatgtccttctttcttaaaaa

SEQ ID NO: 13180 - DNA, 75 bp, Homo sapiens
cttcttggctgtcttctcatattatgcctgattcctttcaggatgtccttctttcttaaaaataattgtcagaaa

SEQ ID NO: 13181 - DNA, 78 bp, Homo sapiens
tcttctcatattatgcctgattcctttcaggatgtccttctttcttaaaaataattgtcagaaagctcatcttctgat

SEQ ID NO: 13182 - DNA, 75 bp, Homo sapiens
ttatgcctgattcctttcaggatgtccttctttcttaaaaataattgtcagaaagctcatcttctgattttggga

SEQ ID NO: 13183 - DNA, 71 bp, Homo sapiens
attcctttcaggatgtccttctttcttaaaaataattgtcagaaagctcatcttctgattttgggaggtgt

SEQ ID NO: 13184 - DNA, 71 bp, Homo sapiens
atgtccttctttcttaaaaataattgtcagaaagctcatcttctgattttgggaggtgttccaacaaaagc

SEQ ID NO: 13185 - DNA, 70 bp, Homo sapiens
ttcttaaaaataattgtcagaaagctcatcttctgattttgggaggtgttccaacaaaagccggtaggtc

SEQ ID NO: 13186 - DNA, 70 bp, Homo sapiens
aaaaataattgtcagaaagctcatcttctgattttgggaggtgttccaacaaaagccggtaggtccagta

SEQ ID NO: 13187 - DNA, 71 bp, Homo sapiens
aaagctcatcttctgattttgggaggtgttccaacaaaagccggtaggtccagtagcacgtagaataagaa

SEQ ID NO: 13188 - DNA, 73 bp, Homo sapiens
atcttctgattttgggaggtgttccaacaaaagccggtaggtccagtagcacgtagaataagaatgcagaatc

SEQ ID NO: 13189 - DNA, 72 bp, Homo sapiens
attttgggaggtgttccaacaaaagccggtaggtccagtagcacgtagaataagaatgcagaatccagccag

SEQ ID NO: 13190 - DNA, 75 bp, Homo sapiens
caaaaataaaaagaatgtggaatccgggggcactggcatggctattacctgccattgtgaatagaaatgtcctga

SEQ ID NO: 13191 - DNA, 78 bp, Homo sapiens
aaagaatgtggaatccgggggcactggcatggctattacctgccattgtgaatagaaatgtcctgagatgactcttaa

SEQ ID NO: 13192 - DNA, 80 bp, Homo sapiens
tggaatccgggggcactggcatggctattacctgccattgtgaatagaaatgtcctgagatgactcttaactcgggcatg

SEQ ID NO: 13193 - DNA, 78 bp, Homo sapiens
aatccgggggcactggcatggctattacctgccattgtgaatagaaatgtcctgagatgactcttaactcgggcatgg

SEQ ID NO: 13194 - DNA, 81 bp, Homo sapiens
cactggcatggctattacctgccattgtgaatagaaatgtcctgagatgactcttaactcgggcatggtactcggcacttc

SEQ ID NO: 13195 - DNA, 79 bp, Homo sapiens
atggctattacctgccattgtgaatagaaatgtcctgagatgactcttaactcgggcatggtactcggcacttctcaag

SEQ ID NO: 13196 - DNA, 79 bp, Homo sapiens
gccattgtgaatagaaatgtcctgagatgactcttaactcgggcatggtactcggcacttctcaaggaaacattctaca

SEQ ID NO: 13197 - DNA, 79 bp, Homo sapiens
aatagaaatgtcctgagatgactcttaactcgggcatggtactcggcacttctcaaggaaacattctacatcacatatg

SEQ ID NO: 13198 - DNA, 79 bp, Homo sapiens
aatgtcctgagatgactcttaactcgggcatggtactcggcacttctcaaggaaacattctacatcacatatgtgttct

SEQ ID NO: 13199 - DNA, 78 bp, Homo sapiens
atgactcttaactcgggcatggtactcggcacttctcaaggaaacattctacatcacatatgtgttcttttcagctgg

SEQ ID NO: 13200 - DNA, 78 bp, Homo sapiens
gggcatggtactcggcacttctcaaggaaacattctacatcacatatgtgttcttttcagctggtcggtttgaatgta

SEQ ID NO: 13201 - DNA, 76 bp, Homo sapiens
gtactcggcacttctcaaggaaacattctacatcacatatgtgttcttttcagctggtcggtttgaatgtaatact

SEQ ID NO: 13202 - DNA, 76 bp, Homo sapiens
tctcaaggaaacattctacatcacatatgtgttcttttcagctggtcggtttgaatgtaatacttgcaggtaagtt

SEQ ID NO: 13203 - DNA, 76 bp, Homo sapiens
aaacattctacatcacatatgtgttcttttcagctggtcggtttgaatgtaatacttgcaggtaagtttatctgta

SEQ ID NO: 13204 - DNA, 75 bp, Homo sapiens
tacatcacatatgtgttcttttcagctggtcggtttgaatgtaatacttgcaggtaagtttatctgtaatccttt

SEQ ID NO: 13205 - DNA, 70 bp, Homo sapiens
gtgttcttttcagctggtcggtttgaatgtaatacttgcaggtaagtttatctgtaatccttttattacc

SEQ ID NO: 13206 - DNA, 73 bp, Homo sapiens
ttcagctggtcggtttgaatgtaatacttgcaggtaagtttatctgtaatccttttattacctaaatcagcca

SEQ ID NO: 13207 - DNA, 71 bp, Homo sapiens
cggtttgaatgtaatacttgcaggtaagtttatctgtaatccttttattacctaaatcagccagtgcttac

SEQ ID NO: 13208 - DNA, 75 bp, Homo sapiens
gtaatacttgcaggtaagtttatctgtaatccttttattacctaaatcagccagtgcttactctgctgtccacca

SEQ ID NO: 13209 - DNA, 74 bp, Homo sapiens
caggtaagtttatctgtaatccttttattacctaaatcagccagtgcttactctgctgtccaccagttggacta

SEQ ID NO: 13210 - DNA, 74 bp, Homo sapiens
taagtttatctgtaatccttttattacctaaatcagccagtgcttactctgctgtccaccagttggactagaac

SEQ ID NO: 13211 - DNA, 73 bp, Homo sapiens
aagtttatctgtaatccttttattacctaaatcagccagtgcttactctgctgtccaccagttggactagaac

SEQ ID NO: 13212 - DNA, 77 bp, Homo sapiens
tatctgtaatccttttattacctaaatcagccagtgcttactctgctgtccaccagttggactagaactcactctat

SEQ ID NO: 13213 - DNA, 76 bp, Homo sapiens
gtaatccttttattacctaaatcagccagtgcttactctgctgtccaccagttggactagaactcactctattctg

SEQ ID NO: 13214 - DNA, 77 bp, Homo sapiens
ttttattacctaaatcagccagtgcttactctgctgtccaccagttggactagaactcactctattctggcagaagg

SEQ ID NO: 13215 - DNA, 80 bp, Homo sapiens
tattacctaaatcagccagtgcttactctgctgtccaccagttggactagaactcactctattctggcagaagggatatc

SEQ ID NO: 13216 - DNA, 81 bp, Homo sapiens
agccagtgcttactctgctgtccaccagttggactagaactcactctattctggcagaagggatatctgttttatgatgat

SEQ ID NO: 13217 - DNA, 82 bp, Homo sapiens
agtgcttactctgctgtccaccagttggactagaactcactctattctggcagaagggatatctgttttatgatgattgtga

SEQ ID NO: 13218 - DNA, 83 bp, Homo sapiens
tactctgctgtccaccagttggactagaactcactctattctggcagaagggatatctgttttatgatgattgtgagatctta

SEQ ID NO: 13219 - DNA, 78 bp, Homo sapiens
caccagttggactagaactcactctattctggcagaagggatatctgttttatgatgattgtgagatcttatttttat

SEQ ID NO: 13220 - DNA, 79 bp, Homo sapiens
ttggactagaactcactctattctggcagaagggatatctgttttatgatgattgtgagatcttatttttattctccaa

SEQ ID NO: 13221 - DNA, 77 bp, Homo sapiens
aactcactctattctggcagaagggatatctgttttatgatgattgtgagatcttatttttattctccaaaatagag

SEQ ID NO: 13222 - DNA, 75 bp, Homo sapiens
ggcagaagggatatctgttttatgatgattgtgagatcttatttttattctccaaaatagagtttctaataagac

SEQ ID NO: 13223 - DNA, 74 bp, Homo sapiens
gggatatctgttttatgatgattgtgagatcttatttttattctccaaaatagagtttctaataagactattgt

SEQ ID NO: 13224 - DNA, 75 bp, Homo sapiens
ttatgatgattgtgagatcttatttttattctccaaaatagagtttctaataagactattgttctatataaagct

SEQ ID NO: 13225 - DNA, 73 bp, Homo sapiens
tgattgtgagatcttatttttattctccaaaatagagtttctaataagactattgttctatataaagcttttc

SEQ ID NO: 13226 - DNA, 67 bp, Homo sapiens
cttatttttattctccaaaatagagtttctaataagactattgttctatataaagcttttcctttaa

SEQ ID NO: 13227 - DNA, 71 bp, Homo sapiens
tctccaaaatagagtttctaataagactattgttctatataaagcttttcctttaaattgaccactgattc

SEQ ID NO: 13228 - DNA, 71 bp, Homo sapiens
gagtttctaataagactattgttctatataaagcttttcctttaaattgaccactgattctagaagattgg

SEQ ID NO: 13229 - DNA, 72 bp, Homo sapiens
ctaataagactattgttctatataaagcttttcctttaaattgaccactgattctagaagattggtgtaatc

SEQ ID NO: 13230 - DNA, 70 bp, Homo sapiens
agcttttcctttaaattgaccactgattctagaagattggtgtaatctaaagatcttaagaatacttggg

SEQ ID NO: 13231 - DNA, 76 bp, Homo sapiens
cctttaaattgaccactgattctagaagattggtgtaatctaaagatcttaagaatacttgggtgcttcatgcata

SEQ ID NO: 13232 - DNA, 78 bp, Homo sapiens
ttgaccactgattctagaagattggtgtaatctaaagatcttaagaatacttgggtgcttcatgcatatatttattaa

SEQ ID NO: 13233 - DNA, 76 bp, Homo sapiens
attctagaagattggtgtaatctaaagatcttaagaatacttgggtgcttcatgcatatatttattaatatatatt

SEQ ID NO: 13234 - DNA, 83 bp, Homo sapiens
tatatttattaatatgtatatagctattcatctgcttgtataaatatgtacatatttacatttatattaacatgtgcatatag

SEQ ID NO: 13235 - DNA, 83 bp, Homo sapiens
taatatgtatatagctattcatctgcttgtataaatatgtacatatttacatttatattaacatgtgcatataggttcagtaa

SEQ ID NO: 13236 - DNA, 81 bp, Homo sapiens
tagctattcatctgcttgtataaatatgtacatatttacatttatattaacatgtgcatataggttcagtaaaaagctcac

SEQ ID NO: 13237 - DNA, 80 bp, Homo sapiens
tctgcttgtataaatatgtacatatttacatttatattaacatgtgcatataggttcagtaaaaagctcacctgaactga

SEQ ID NO: 13238 - DNA, 77 bp, Homo sapiens
taaatatgtacatatttacatttatattaacatgtgcatataggttcagtaaaaagctcacctgaactgaaatgaac

SEQ ID NO: 13239 - DNA, 77 bp, Homo sapiens
gtacatatttacatttatattaacatgtgcatataggttcagtaaaaagctcacctgaactgaaatgaacttcacaa

SEQ ID NO: 13240 - DNA, 76 bp, Homo sapiens
catttatattaacatgtgcatataggttcagtaaaaagctcacctgaactgaaatgaacttcacaattatggtttg

SEQ ID NO: 13241 - DNA, 75 bp, Homo sapiens
acatgtgcatataggttcagtaaaaagctcacctgaactgaaatgaacttcacaattatggtttgtttctaagtg

SEQ ID NO: 13242 - DNA, 73 bp, Homo sapiens
gcatataggttcagtaaaaagctcacctgaactgaaatgaacttcacaattatggtttgtttctaagtgtctt

SEQ ID NO: 13243 - DNA, 73 bp, Homo sapiens
cagtaaaaagctcacctgaactgaaatgaacttcacaattatggtttgtttctaagtgtctttaatatgcaaa

SEQ ID NO: 13244 - DNA, 77 bp, Homo sapiens
aatgaacttcacaattatggtttgtttctaagtgtctttaatatgcaaaccttacatcagcaacatattgatccaga

SEQ ID NO: 13245 - DNA, 78 bp, Homo sapiens
cacaattatggtttgtttctaagtgtctttaatatgcaaaccttacatcagcaacatattgatccagaattcagtgtg

SEQ ID NO: 13246 - DNA, 78 bp, Homo sapiens
attatggtttgtttctaagtgtctttaatatgcaaaccttacatcagcaacatattgatccagaattcagtgtggaca

SEQ ID NO: 13247 - DNA, 78 bp, Homo sapiens
tttgtttctaagtgtctttaatatgcaaaccttacatcagcaacatattgatccagaattcagtgtggacagaattag

SEQ ID NO: 13248 - DNA, 78 bp, Homo sapiens
gtgtctttaatatgcaaaccttacatcagcaacatattgatccagaattcagtgtggacagaattagtgttaaaaaga

SEQ ID NO: 13249 - DNA, 78 bp, Homo sapiens
taatatgcaaaccttacatcagcaacatattgatccagaattcagtgtggacagaattagtgttaaaaagaatacctg

SEQ ID NO: 13250 - DNA, 75 bp, Homo sapiens
cttacatcagcaacatattgatccagaattcagtgtggacagaattagtgttaaaaagaatacctgtattttaaa

SEQ ID NO: 13251 - DNA, 74 bp, Homo sapiens
caacatattgatccagaattcagtgtggacagaattagtgttaaaaagaatacctgtattttaaatgttcagga

SEQ ID NO: 13252 - DNA, 72 bp, Homo sapiens
tccagaattcagtgtggacagaattagtgttaaaaagaatacctgtattttaaatgttcaggaatttgctag

SEQ ID NO: 13253 - DNA, 71 bp, Homo sapiens
cagtgtggacagaattagtgttaaaaagaatacctgtattttaaatgttcaggaatttgctagtaattaca

SEQ ID NO: 13254 - DNA, 71 bp, Homo sapiens
tagtgttaaaaagaatacctgtattttaaatgttcaggaatttgctagtaattacattgtagtttgtatca

SEQ ID NO: 13255 - DNA, 75 bp, Homo sapiens
aagaatacctgtattttaaatgttcaggaatttgctagtaattacattgtagtttgtatcatgcaaaaatgatga

SEQ ID NO: 13256 - DNA, 81 bp, Homo sapiens
tgttcaggaatttgctagtaattacattgtagtttgtatcatgcaaaaatgatgatcctaaaaatgatgattacaaatgca

SEQ ID NO: 13257 - DNA, 77 bp, Homo sapiens
tagtaattacattgtagtttgtatcatgcaaaaatgatgatcctaaaaatgatgattacaaatgcatttgttttggg

SEQ ID NO: 13258 - DNA, 76 bp, Homo sapiens
tgtagtttgtatcatgcaaaaatgatgatcctaaaaatgatgattacaaatgcatttgttttgggtatttagttat

SEQ ID NO: 13259 - DNA, 76 bp, Homo sapiens
gtatcatgcaaaaatgatgatcctaaaaatgatgattacaaatgcatttgttttgggtatttagttatttactgat

SEQ ID NO: 13260 - DNA, 73 bp, Homo sapiens
gatgatcctaaaaatgatgattacaaatgcatttgttttgggtatttagttatttactgatttgtttcagagg

SEQ ID NO: 13261 - DNA, 72 bp, Homo sapiens
aaaatgatgattacaaatgcatttgttttgggtatttagttatttactgatttgtttcagaggtacacagct

SEQ ID NO: 13262 - DNA, 72 bp, Homo sapiens
gatgattacaaatgcatttgttttgggtatttagttatttactgatttgtttcagaggtacacagcttattt

SEQ ID NO: 13263 - DNA, 74 bp, Homo sapiens
gggtatttagttatttactgatttgtttcagaggtacacagcttatttttatgccagagagaacattcaaatca

SEQ ID NO: 13264 - DNA, 74 bp, Homo sapiens
ttagttatttactgatttgtttcagaggtacacagcttatttttatgccagagagaacattcaaatcaaagtaa

SEQ ID NO: 13265 - DNA, 76 bp, Homo sapiens
actgatttgtttcagaggtacacagcttatttttatgccagagagaacattcaaatcaaagtaaataaatcatgtc

SEQ ID NO: 13266 - DNA, 77 bp, Homo sapiens
cagaggtacacagcttatttttatgccagagagaacattcaaatcaaagtaaataaatcatgtcttccaagatcatt

SEQ ID NO: 13267 - DNA, 78 bp, Homo sapiens
cacagcttatttttatgccagagagaacattcaaatcaaagtaaataaatcatgtcttccaagatcatttacatccta

SEQ ID NO: 13268 - DNA, 74 bp, Homo sapiens
tcaaagtaaataaatcatgtcttccaagatcatttacatcctataaatgtccacaaacagaggtttactttctc

SEQ ID NO: 13269 - DNA, 77 bp, Homo sapiens
taaatcatgtcttccaagatcatttacatcctataaatgtccacaaacagaggtttactttctctaggtagatatga

SEQ ID NO: 13270 - DNA, 75 bp, Homo sapiens
gatcatttacatcctataaatgtccacaaacagaggtttactttctctaggtagatatgagagttaaggcttcta

SEQ ID NO: 13271 - DNA, 71 bp, Homo sapiens
cctataaatgtccacaaacagaggtttactttctctaggtagatatgagagttaaggcttctagtcatttt

SEQ ID NO: 13272 - DNA, 72 bp, Homo sapiens
aatgtccacaaacagaggtttactttctctaggtagatatgagagttaaggcttctagtcatttttccagga

SEQ ID NO: 13273 - DNA, 72 bp, Homo sapiens
aggtttactttctctaggtagatatgagagttaaggcttctagtcatttttccaggacagtaatgatttgta

SEQ ID NO: 13274 - DNA, 78 bp, Homo sapiens
tctctaggtagatatgagagttaaggcttctagtcatttttccaggacagtaatgatttgtatataagctagcattaa

SEQ ID NO: 13275 - DNA, 76 bp, Homo sapiens
ggtagatatgagagttaaggcttctagtcatttttccaggacagtaatgatttgtatataagctagcattaattcc

SEQ ID NO: 13276 - DNA, 72 bp, Homo sapiens
agagttaaggcttctagtcatttttccaggacagtaatgatttgtatataagctagcattaattcctttccc

SEQ ID NO: 13277 - DNA, 73 bp, Homo sapiens
gcttctagtcatttttccaggacagtaatgatttgtatataagctagcattaattcctttcccctatatttcc

SEQ ID NO: 13278 - DNA, 70 bp, Homo sapiens
atttttccaggacagtaatgatttgtatataagctagcattaattcctttcccctatatttcctaatttg

SEQ ID NO: 13279 - DNA, 72 bp, Homo sapiens
gacagtaatgatttgtatataagctagcattaattcctttcccctatatttcctaatttgtaaatgttcaaa

SEQ ID NO: 13280 - DNA, 69 bp, Homo sapiens
atttgtatataagctagcattaattcctttcccctatatttcctaatttgtaaatgttcaaattgattt

SEQ ID NO: 13281 - DNA, 65 bp, Homo sapiens
aagctagcattaattcctttcccctatatttcctaatttgtaaatgttcaaattgattttttttt

SEQ ID NO: 13282 - DNA, 72 bp, Homo sapiens
gatttttttttttacactgtggaactctgggcttttgcatcagagaatgtcttgttcattaaattcaaataa

SEQ ID NO: 13283 - DNA, 79 bp, Homo sapiens
tttttacactgtggaactctgggcttttgcatcagagaatgtcttgttcattaaattcaaataagcacattagcattgc

SEQ ID NO: 13284 - DNA, 82 bp, Homo sapiens
tggaactctgggcttttgcatcagagaatgtcttgttcattaaattcaaataagcacattagcattgcctatatccatgtgt

SEQ ID NO: 13285 - DNA, 81 bp, Homo sapiens
cttttgcatcagagaatgtcttgttcattaaattcaaataagcacattagcattgcctatatccatgtgttcccaatatgt

SEQ ID NO: 13286 - DNA, 81 bp, Homo sapiens
atcagagaatgtcttgttcattaaattcaaataagcacattagcattgcctatatccatgtgttcccaatatgttactctc

SEQ ID NO: 13287 - DNA, 78 bp, Homo sapiens
ttgttcattaaattcaaataagcacattagcattgcctatatccatgtgttcccaatatgttactctcccaggcctag

SEQ ID NO: 13288 - DNA, 76 bp, Homo sapiens
aattcaaataagcacattagcattgcctatatccatgtgttcccaatatgttactctcccaggcctaggttattta

SEQ ID NO: 13289 - DNA, 75 bp, Homo sapiens
aaataagcacattagcattgcctatatccatgtgttcccaatatgttactctcccaggcctaggttatttacttg

SEQ ID NO: 13290 - DNA, 73 bp, Homo sapiens
attagcattgcctatatccatgtgttcccaatatgttactctcccaggcctaggttatttacttggtttataa

SEQ ID NO: 13291 - DNA, 72 bp, Homo sapiens
ctatatccatgtgttcccaatatgttactctcccaggcctaggttatttacttggtttataacacaatatta

SEQ ID NO: 13292 - DNA, 71 bp, Homo sapiens
tcccaatatgttactctcccaggcctaggttatttacttggtttataacacaatattattacacattagcc

SEQ ID NO: 13293 - DNA, 71 bp, Homo sapiens
gttactctcccaggcctaggttatttacttggtttataacacaatattattacacattagccttgattatg

SEQ ID NO: 13294 - DNA, 70 bp, Homo sapiens
cccaggcctaggttatttacttggtttataacacaatattattacacattagccttgattatgtctttac

SEQ ID NO: 13295 - DNA, 70 bp, Homo sapiens
aggttatttacttggtttataacacaatattattacacattagccttgattatgtctttaccatcaactt

SEQ ID NO: 13296 - DNA, 73 bp, Homo sapiens
acttggtttataacacaatattattacacattagccttgattatgtctttaccatcaacttttaacatgccaa

SEQ ID NO: 13297 - DNA, 76 bp, Homo sapiens
caatattattacacattagccttgattatgtctttaccatcaacttttaacatgccaaattgaaagcagtgtttgc

SEQ ID NO: 13298 - DNA, 74 bp, Homo sapiens
gccttgattatgtctttaccatcaacttttaacatgccaaattgaaagcagtgtttgctaattaatttagagga

SEQ ID NO: 13299 - DNA, 74 bp, Homo sapiens
atgtctttaccatcaacttttaacatgccaaattgaaagcagtgtttgctaattaatttagaggaatgaattca

SEQ ID NO: 13300 - DNA, 73 bp, Homo sapiens
caacttttaacatgccaaattgaaagcagtgtttgctaattaatttagaggaatgaattcaagttgcccatgg

SEQ ID NO: 13301 - DNA, 76 bp, Homo sapiens
catgccaaattgaaagcagtgtttgctaattaatttagaggaatgaattcaagttgcccatggttatgctttctaa

SEQ ID NO: 13302 - DNA, 74 bp, Homo sapiens
ttgaaagcagtgtttgctaattaatttagaggaatgaattcaagttgcccatggttatgctttctaagactgtt

SEQ ID NO: 13303 - DNA, 72 bp, Homo sapiens
gcagtgtttgctaattaatttagaggaatgaattcaagttgcccatggttatgctttctaagactgtttttt

SEQ ID NO: 13304 - DNA, 68 bp, Homo sapiens
ttcaagttgcccatggttatgctttctaagactgttttttttccttcccgtttttgtctcttcactaa

SEQ ID NO: 13305 - DNA, 69 bp, Homo sapiens
cccatggttatgctttctaagactgttttttttccttcccgtttttgtctcttcactaagacaatatga

SEQ ID NO: 13306 - DNA, 70 bp, Homo sapiens
gttttttttccttcccgtttttgtctcttcactaagacaatatgaatgatgattcaagtaacttgaaaga

SEQ ID NO: 13307 - DNA, 73 bp, Homo sapiens
ttttccttcccgtttttgtctcttcactaagacaatatgaatgatgattcaagtaacttgaaagaaggcagta

SEQ ID NO: 13308 - DNA, 75 bp, Homo sapiens
ttttgtctcttcactaagacaatatgaatgatgattcaagtaacttgaaagaaggcagtaaagacaatcccgaac

SEQ ID NO: 13309 - DNA, 75 bp, Homo sapiens
tcttcactaagacaatatgaatgatgattcaagtaacttgaaagaaggcagtaaagacaatcccgaacctctaaa

SEQ ID NO: 13310 - DNA, 74 bp, Homo sapiens
acaatatgaatgatgattcaagtaacttgaaagaaggcagtaaagacaatcccgaacctctaaagtgcaaacaa

SEQ ID NO: 13311 - DNA, 72 bp, Homo sapiens
tgattcaagtaacttgaaagaaggcagtaaagacaatcccgaacctctaaagtgcaaacaagtgtggccaaa

SEQ ID NO: 13312 - DNA, 68 bp, Homo sapiens
aagtaacttgaaagaaggcagtaaagacaatcccgaacctctaaagtgcaaacaagtgtggccaaaag

SEQ ID NO: 13313 - DNA, 69 bp, Homo sapiens
aaagaaggcagtaaagacaatcccgaacctctaaagtgcaaacaagtgtggccaaaaggaacaaagcgc

SEQ ID NO: 13314 - DNA, 70 bp, Homo sapiens
taaagacaatcccgaacctctaaagtgcaaacaagtgtggccaaaaggaacaaagcgcggtctatctaag

SEQ ID NO: 13315 - DNA, 70 bp, Homo sapiens
aacctctaaagtgcaaacaagtgtggccaaaaggaacaaagcgcggtctatctaagtggaggcaaaacaa

SEQ ID NO: 13316 - DNA, 71 bp, Homo sapiens
ctaaagtgcaaacaagtgtggccaaaaggaacaaagcgcggtctatctaagtggaggcaaaacaaagagag

SEQ ID NO: 13317 - DNA, 70 bp, Homo sapiens
acaaagcgcggtctatctaagtggaggcaaaacaaagagaggaagaccggatttaaactgaatttgtaca

SEQ ID NO: 13318 - DNA, 69 bp, Homo sapiens
tatctaagtggaggcaaaacaaagagaggaagaccggatttaaactgaatttgtacaccccgccagaaa

SEQ ID NO: 13319 - DNA, 72 bp, Homo sapiens
atttaaactgaatttgtacaccccgccagaaacacccatggagcctgacgagcaggtaacagtggaagaaca

SEQ ID NO: 13320 - DNA, 73 bp, Homo sapiens
ccagaaacacccatggagcctgacgagcaggtaacagtggaagaacagaaggagacttcagaaggaaaaacca

SEQ ID NO: 13321 - DNA, 75 bp, Homo sapiens
tgacgagcaggtaacagtggaagaacagaaggagacttcagaaggaaaaaccagccccagtcccatcaggattga

SEQ ID NO: 13322 - DNA, 71 bp, Homo sapiens
aggtaacagtggaagaacagaaggagacttcagaaggaaaaaccagccccagtcccatcaggattgaggag

SEQ ID NO: 13323 - DNA, 71 bp, Homo sapiens
aagaacagaaggagacttcagaaggaaaaaccagccccagtcccatcaggattgaggaggaggtcaaggaa

SEQ ID NO: 13324 - DNA, 70 bp, Homo sapiens
agaaggagacttcagaaggaaaaaccagccccagtcccatcaggattgaggaggaggtcaaggaaactgg

SEQ ID NO: 13325 - DNA, 68 bp, Homo sapiens
agaaggaaaaaccagccccagtcccatcaggattgaggaggaggtcaaggaaactggggaagccctgt

SEQ ID NO: 13326 - DNA, 70 bp, Homo sapiens
aaaaaccagccccagtcccatcaggattgaggaggaggtcaaggaaactggggaagccctgttgcctcaa

SEQ ID NO: 13327 - DNA, 71 bp, Homo sapiens
agtcccatcaggattgaggaggaggtcaaggaaactggggaagccctgttgcctcaagaggaaaacagaag

SEQ ID NO: 13328 - DNA, 69 bp, Homo sapiens
aggattgaggaggaggtcaaggaaactggggaagccctgttgcctcaagaggaaaacagaagggaagaa

SEQ ID NO: 13329 - DNA, 69 bp, Homo sapiens
aggaggtcaaggaaactggggaagccctgttgcctcaagaggaaaacagaagggaagaaacatgtgccc

SEQ ID NO: 13330 - DNA, 72 bp, Homo sapiens
ttgcctcaagaggaaaacagaagggaagaaacatgtgcccctgtaagtccaaacacatcaccaggtgaaaaa

SEQ ID NO: 13331 - DNA, 72 bp, Homo sapiens
aaaacagaagggaagaaacatgtgcccctgtaagtccaaacacatcaccaggtgaaaaaccagaagatgatc

SEQ ID NO: 13332 - DNA, 74 bp, Homo sapiens
aagggaagaaacatgtgcccctgtaagtccaaacacatcaccaggtgaaaaaccagaagatgatctcatcaaac

SEQ ID NO: 13333 - DNA, 76 bp, Homo sapiens
aacatgtgcccctgtaagtccaaacacatcaccaggtgaaaaaccagaagatgatctcatcaaacctgaggaagag

SEQ ID NO: 13334 - DNA, 75 bp, Homo sapiens
cctgtaagtccaaacacatcaccaggtgaaaaaccagaagatgatctcatcaaacctgaggaagaggaagaggag

SEQ ID NO: 13335 - DNA, 70 bp, Homo sapiens
gaagaaggaggaggaaatgtagaaaaagatccagatggtgctaaaagccaagaaaaagaggaaccagaaa

SEQ ID NO: 13336 - DNA, 71 bp, Homo sapiens
gaggaaatgtagaaaaagatccagatggtgctaaaagccaagaaaaagaggaaccagaaatctccacggaa

SEQ ID NO: 13337 - DNA, 69 bp, Homo sapiens
aatgtagaaaaagatccagatggtgctaaaagccaagaaaaagaggaaccagaaatctccacggaaaaa

SEQ ID NO: 13338 - DNA, 72 bp, Homo sapiens
aagatccagatggtgctaaaagccaagaaaaagaggaaccagaaatctccacggaaaaagaagactctgcac

SEQ ID NO: 13339 - DNA, 71 bp, Homo sapiens
ctaaaagccaagaaaaagaggaaccagaaatctccacggaaaaagaagactctgcacgtttggatgatcac

SEQ ID NO: 13340 - DNA, 73 bp, Homo sapiens
aagaggaaccagaaatctccacggaaaaagaagactctgcacgtttggatgatcacgaagaggaggaggaaga

SEQ ID NO: 13341 - DNA, 83 bp, Homo sapiens
aggaggaggaagaggatgaagagccatcccacaacgaggaccatgatgccgatgacgaggatgacagccacatggagtctgcc

SEQ ID NO: 13342 - DNA, 84 bp, Homo sapiens
agaggatgaagagccatcccacaacgaggaccatgatgccgatgacgaggatgacagccacatggagtctgccgaagtggagaa

SEQ ID NO: 13343 - DNA, 83 bp, Homo sapiens
atgaagagccatcccacaacgaggaccatgatgccgatgacgaggatgacagccacatggagtctgccgaagtggagaaggaa

SEQ ID NO: 13344 - DNA, 83 bp, Homo sapiens
atcccacaacgaggaccatgatgccgatgacgaggatgacagccacatggagtctgccgaagtggagaaggaagagctgccca

SEQ ID NO: 13345 - DNA, 83 bp, Homo sapiens
accatgatgccgatgacgaggatgacagccacatggagtctgccgaagtggagaaggaagagctgcccagagaaagcttcaaa

SEQ ID NO: 13346 - DNA, 81 bp, Homo sapiens
gatgacgaggatgacagccacatggagtctgccgaagtggagaaggaagagctgcccagagaaagcttcaaagaagtactg

SEQ ID NO: 13347 - DNA, 77 bp, Homo sapiens
atgacagccacatggagtctgccgaagtggagaaggaagagctgcccagagaaagcttcaaagaagtactggaaaac

SEQ ID NO: 13348 - DNA, 75 bp, Homo sapiens
acatggagtctgccgaagtggagaaggaagagctgcccagagaaagcttcaaagaagtactggaaaaccaggaga

SEQ ID NO: 13349 - DNA, 71 bp, Homo sapiens
tgccgaagtggagaaggaagagctgcccagagaaagcttcaaagaagtactggaaaaccaggagacttttt

SEQ ID NO: 13350 - DNA, 69 bp, Homo sapiens
agaaggaagagctgcccagagaaagcttcaaagaagtactggaaaaccaggagacttttttagacctta

SEQ ID NO: 13351 - DNA, 72 bp, Homo sapiens
aagagctgcccagagaaagcttcaaagaagtactggaaaaccaggagacttttttagaccttaatgtgcagc

SEQ ID NO: 13352 - DNA, 71 bp, Homo sapiens
gaaagcttcaaagaagtactggaaaaccaggagacttttttagaccttaatgtgcagcctggtcactcgaa

SEQ ID NO: 13353 - DNA, 71 bp, Homo sapiens
tactggaaaaccaggagacttttttagaccttaatgtgcagcctggtcactcgaacccagaggtcttaatg

SEQ ID NO: 13354 - DNA, 73 bp, Homo sapiens
aggagacttttttagaccttaatgtgcagcctggtcactcgaacccagaggtcttaatggactgtggcgtcga

SEQ ID NO: 13355 - DNA, 75 bp, Homo sapiens
tttttagaccttaatgtgcagcctggtcactcgaacccagaggtcttaatggactgtggcgtcgacctgacagct

SEQ ID NO: 13356 - DNA, 79 bp, Homo sapiens
ttaatgtgcagcctggtcactcgaacccagaggtcttaatggactgtggcgtcgacctgacagcttcttgtaacagtga

SEQ ID NO: 13357 - DNA, 76 bp, Homo sapiens
agcctggtcactcgaacccagaggtcttaatggactgtggcgtcgacctgacagcttcttgtaacagtgagcccaa

SEQ ID NO: 13358 - DNA, 75 bp, Homo sapiens
aacccagaggtcttaatggactgtggcgtcgacctgacagcttcttgtaacagtgagcccaaggagcttgctggg

SEQ ID NO: 13359 - DNA, 76 bp, Homo sapiens
aggtcttaatggactgtggcgtcgacctgacagcttcttgtaacagtgagcccaaggagcttgctggggaccctga

SEQ ID NO: 13360 - DNA, 76 bp, Homo sapiens
acctgacagcttcttgtaacagtgagcccaaggagcttgctggggaccctgaagctgtacccgaatctgacgagga

SEQ ID NO: 13361 - DNA, 75 bp, Homo sapiens
taacagtgagcccaaggagcttgctggggaccctgaagctgtacccgaatctgacgaggagccacccccaggaga

SEQ ID NO: 13362 - DNA, 74 bp, Homo sapiens
aaggagcttgctggggaccctgaagctgtacccgaatctgacgaggagccacccccaggagaacaggcacagaa

SEQ ID NO: 13363 - DNA, 73 bp, Homo sapiens
accctgaagctgtacccgaatctgacgaggagccacccccaggagaacaggcacagaagcaggaccaaaagaa

SEQ ID NO: 13364 - DNA, 73 bp, Homo sapiens
acccccaggagaacaggcacagaagcaggaccaaaagaacagcaaggaagtcgatacagagttcaaagaggga

SEQ ID NO: 13365 - DNA, 74 bp, Homo sapiens
agaacaggcacagaagcaggaccaaaagaacagcaaggaagtcgatacagagttcaaagagggaaacccagcaa

SEQ ID NO: 13366 - DNA, 72 bp, Homo sapiens
agaagcaggaccaaaagaacagcaaggaagtcgatacagagttcaaagagggaaacccagcaaccatggaaa

SEQ ID NO: 13367 - DNA, 73 bp, Homo sapiens
accaaaagaacagcaaggaagtcgatacagagttcaaagagggaaacccagcaaccatggaaatcgactctga

SEQ ID NO: 13368 - DNA, 75 bp, Homo sapiens
aacagcaaggaagtcgatacagagttcaaagagggaaacccagcaaccatggaaatcgactctgagactgtccag

SEQ ID NO: 13369 - DNA, 73 bp, Homo sapiens
agagttcaaagagggaaacccagcaaccatggaaatcgactctgagactgtccaggccgttcagtctttgacc

SEQ ID NO: 13370 - DNA, 77 bp, Homo sapiens
gaaacccagcaaccatggaaatcgactctgagactgtccaggccgttcagtctttgacccaggagagcagcgaacag

SEQ ID NO: 13371 - DNA, 76 bp, Homo sapiens
aaccatggaaatcgactctgagactgtccaggccgttcagtctttgacccaggagagcagcgaacaggacgacacc

SEQ ID NO: 13372 - DNA, 76 bp, Homo sapiens
aaatcgactctgagactgtccaggccgttcagtctttgacccaggagagcagcgaacaggacgacacctttcagga

SEQ ID NO: 13373 - DNA, 76 bp, Homo sapiens
agactgtccaggccgttcagtctttgacccaggagagcagcgaacaggacgacacctttcaggattgtgccgagac

SEQ ID NO: 13374 - DNA, 77 bp, Homo sapiens
gtccaggccgttcagtctttgacccaggagagcagcgaacaggacgacacctttcaggattgtgccgagactcaaga

SEQ ID NO: 13375 - DNA, 78 bp, Homo sapiens
aggagagcagcgaacaggacgacacctttcaggattgtgccgagactcaagaggcctgtagaagcctacagaactaca

SEQ ID NO: 13376 - DNA, 74 bp, Homo sapiens
agcgaacaggacgacacctttcaggattgtgccgagactcaagaggcctgtagaagcctacagaactacacccg

SEQ ID NO: 13377 - DNA, 75 bp, Homo sapiens
acgacacctttcaggattgtgccgagactcaagaggcctgtagaagcctacagaactacacccgtgcagaccaaa

SEQ ID NO: 13378 - DNA, 77 bp, Homo sapiens
tttcaggattgtgccgagactcaagaggcctgtagaagcctacagaactacacccgtgcagaccaaagtccacagat

SEQ ID NO: 13379 - DNA, 79 bp, Homo sapiens
tgtgccgagactcaagaggcctgtagaagcctacagaactacacccgtgcagaccaaagtccacagattgccaccacgc

SEQ ID NO: 13380 - DNA, 77 bp, Homo sapiens
aagaggcctgtagaagcctacagaactacacccgtgcagaccaaagtccacagattgccaccacgctcgacgattgc

SEQ ID NO: 13381 - DNA, 78 bp, Homo sapiens
tagaagcctacagaactacacccgtgcagaccaaagtccacagattgccaccacgctcgacgattgccaacagtcgga

SEQ ID NO: 13382 - DNA, 78 bp, Homo sapiens
tacagaactacacccgtgcagaccaaagtccacagattgccaccacgctcgacgattgccaacagtcggaccacagta

SEQ ID NO: 13383 - DNA, 78 bp, Homo sapiens
ccgtgcagaccaaagtccacagattgccaccacgctcgacgattgccaacagtcggaccacagtagcccagtttcatc

SEQ ID NO: 13384 - DNA, 76 bp, Homo sapiens
aaagtccacagattgccaccacgctcgacgattgccaacagtcggaccacagtagcccagtttcatccgtccactc

SEQ ID NO: 13385 - DNA, 77 bp, Homo sapiens
acagattgccaccacgctcgacgattgccaacagtcggaccacagtagcccagtttcatccgtccactcccatcctg

SEQ ID NO: 13386 - DNA, 74 bp, Homo sapiens
accacagtagcccagtttcatccgtccactcccatcctggccagtccgtacgttctgtcaacagcccaagtgtc

SEQ ID NO: 13387 - DNA, 74 bp, Homo sapiens
agtttcatccgtccactcccatcctggccagtccgtacgttctgtcaacagcccaagtgtccctgctctggaaa

SEQ ID NO: 13388 - DNA, 75 bp, Homo sapiens
agtccgtacgttctgtcaacagcccaagtgtccctgctctggaaaacagctacgcccaaatcagcccagatcaaa

SEQ ID NO: 13389 - DNA, 79 bp, Homo sapiens
cgttctgtcaacagcccaagtgtccctgctctggaaaacagctacgcccaaatcagcccagatcaaagtgccatctcag

SEQ ID NO: 13390 - DNA, 84 bp, Homo sapiens
ccaagtgtccctgctctggaaaacagctacgcccaaatcagcccagatcaaagtgccatctcagtgccatctctgcagaacatg

SEQ ID NO: 13391 - DNA, 84 bp, Homo sapiens
ctgctctggaaaacagctacgcccaaatcagcccagatcaaagtgccatctcagtgccatctctgcagaacatggaaaccagtc

SEQ ID NO: 13392 - DNA, 83 bp, Homo sapiens
aaaacagctacgcccaaatcagcccagatcaaagtgccatctcagtgccatctctgcagaacatggaaaccagtcccatgatg

SEQ ID NO: 13393 - DNA, 87 bp, Homo sapiens
tacgcccaaatcagcccagatcaaagtgccatctcagtgccatctctgcagaacatggaaaccagtcccatgatggatgtcccatca

SEQ ID NO: 13394 - DNA, 87 bp, Homo sapiens
aatcagcccagatcaaagtgccatctcagtgccatctctgcagaacatggaaaccagtcccatgatggatgtcccatcagtttcaga

SEQ ID NO: 13395 - DNA, 89 bp, Homo sapiens
atcaaagtgccatctcagtgccatctctgcagaacatggaaaccagtcccatgatggatgtcccatcagtttcagatcattcacagcaa

SEQ ID NO: 13396 - DNA, 88 bp, Homo sapiens
atctcagtgccatctctgcagaacatggaaaccagtcccatgatggatgtcccatcagtttcagatcattcacagcaagtcgtagaca

SEQ ID NO: 13397 - DNA, 85 bp, Homo sapiens
tctctgcagaacatggaaaccagtcccatgatggatgtcccatcagtttcagatcattcacagcaagtcgtagacagtggattta

SEQ ID NO: 13398 - DNA, 81 bp, Homo sapiens
aacatggaaaccagtcccatgatggatgtcccatcagtttcagatcattcacagcaagtcgtagacagtggatttagtgac

SEQ ID NO: 13399 - DNA, 83 bp, Homo sapiens
agtcccatgatggatgtcccatcagtttcagatcattcacagcaagtcgtagacagtggatttagtgacctgggcagtatcga

SEQ ID NO: 13400 - DNA, 85 bp, Homo sapiens
atgatggatgtcccatcagtttcagatcattcacagcaagtcgtagacagtggatttagtgacctgggcagtatcgagagcacaa

SEQ ID NO: 13401 - DNA, 82 bp, Homo sapiens
atcagtttcagatcattcacagcaagtcgtagacagtggatttagtgacctgggcagtatcgagagcacaactgagaactac

SEQ ID NO: 13402 - DNA, 81 bp, Homo sapiens
ttcagatcattcacagcaagtcgtagacagtggatttagtgacctgggcagtatcgagagcacaactgagaactacgaaaa

SEQ ID NO: 13403 - DNA, 77 bp, Homo sapiens
ttcacagcaagtcgtagacagtggatttagtgacctgggcagtatcgagagcacaactgagaactacgaaaacccaa

SEQ ID NO: 13404 - DNA, 78 bp, Homo sapiens
tagacagtggatttagtgacctgggcagtatcgagagcacaactgagaactacgaaaacccaagcagctacgattcta

SEQ ID NO: 13405 - DNA, 76 bp, Homo sapiens
atttagtgacctgggcagtatcgagagcacaactgagaactacgaaaacccaagcagctacgattctactatggga

SEQ ID NO: 13406 - DNA, 79 bp, Homo sapiens
acctgggcagtatcgagagcacaactgagaactacgaaaacccaagcagctacgattctactatgggaggcagcatctg

SEQ ID NO: 13407 - DNA, 77 bp, Homo sapiens
aactgagaactacgaaaacccaagcagctacgattctactatgggaggcagcatctgtggaaacggctcttcacaga

SEQ ID NO: 13408 - DNA, 78 bp, Homo sapiens
aactacgaaaacccaagcagctacgattctactatgggaggcagcatctgtggaaacggctcttcacagaacagctgc

SEQ ID NO: 13409 - DNA, 81 bp, Homo sapiens
aacccaagcagctacgattctactatgggaggcagcatctgtggaaacggctcttcacagaacagctgctcctatagcaac

SEQ ID NO: 13410 - DNA, 83 bp, Homo sapiens
ctacgattctactatgggaggcagcatctgtggaaacggctcttcacagaacagctgctcctatagcaacctcacctccagca

SEQ ID NO: 13411 - DNA, 89 bp, Homo sapiens
agcatctgtggaaacggctcttcacagaacagctgctcctatagcaacctcacctccagcagtctgacacagagcagctgtgctgtcac

SEQ ID NO: 13412 - DNA, 88 bp, Homo sapiens
aaacggctcttcacagaacagctgctcctatagcaacctcacctccagcagtctgacacagagcagctgtgctgtcacccagcagatg

SEQ ID NO: 13413 - DNA, 92 bp, Homo sapiens
ctcttcacagaacagctgctcctatagcaacctcacctccagcagtctgacacagagcagctgtgctgtcacccagcagatgtccaacatca

SEQ ID NO: 13414 - DNA, 90 bp, Homo sapiens
aacagctgctcctatagcaacctcacctccagcagtctgacacagagcagctgtgctgtcacccagcagatgtccaacatcagcgggagc

SEQ ID NO: 13415 - DNA, 97 bp, Homo sapiens
tatagcaacctcacctccagcagtctgacacagagcagctgtgctgtcacccagcagatgtccaacatcagcgggagctgcagcatgctgcagcaaa

SEQ ID NO: 13416 - DNA, 98 bp, Homo sapiens
acctccagcagtctgacacagagcagctgtgctgtcacccagcagatgtccaacatcagcgggagctgcagcatgctgcagcaaaccagcatcagctc

SEQ ID NO: 13417 - DNA, 95 bp, Homo sapiens
agtctgacacagagcagctgtgctgtcacccagcagatgtccaacatcagcgggagctgcagcatgctgcagcaaaccagcatcagctcccctcc

SEQ ID NO: 13418 - DNA, 94 bp, Homo sapiens
agcagctgtgctgtcacccagcagatgtccaacatcagcgggagctgcagcatgctgcagcaaaccagcatcagctcccctccgacctgcagcg

SEQ ID NO: 13419 - DNA, 91 bp, Homo sapiens
ctgtcacccagcagatgtccaacatcagcgggagctgcagcatgctgcagcaaaccagcatcagctcccctccgacctgcagcgtcaagtc

SEQ ID NO: 13420 - DNA, 90 bp, Homo sapiens
tgtccaacatcagcgggagctgcagcatgctgcagcaaaccagcatcagctcccctccgacctgcagcgtcaagtctcctcaaggctgtg

SEQ ID NO: 13421 - DNA, 88 bp, Homo sapiens
agcgggagctgcagcatgctgcagcaaaccagcatcagctcccctccgacctgcagcgtcaagtctcctcaaggctgtgtggtggaga

SEQ ID NO: 13422 - DNA, 85 bp, Homo sapiens
agcatgctgcagcaaaccagcatcagctcccctccgacctgcagcgtcaagtctcctcaaggctgtgtggtggagaggcctccga

SEQ ID NO: 13423 - DNA, 83 bp, Homo sapiens
caaaccagcatcagctcccctccgacctgcagcgtcaagtctcctcaaggctgtgtggtggagaggcctccgagcagcagcca

SEQ ID NO: 13424 - DNA, 89 bp, Homo sapiens
agcgtcaagtctcctcaaggctgtgtggtggagaggcctccgagcagcagccagcagctggctcagtgcagcatggctgctaacttcac

SEQ ID NO: 13425 - DNA, 87 bp, Homo sapiens
aagtctcctcaaggctgtgtggtggagaggcctccgagcagcagccagcagctggctcagtgcagcatggctgctaacttcacccca

SEQ ID NO: 13426 - DNA, 91 bp, Homo sapiens
ctgtgtggtggagaggcctccgagcagcagccagcagctggctcagtgcagcatggctgctaacttcaccccacccatgcagctggctgaa

SEQ ID NO: 13427 - DNA, 90 bp, Homo sapiens
tggtggagaggcctccgagcagcagccagcagctggctcagtgcagcatggctgctaacttcaccccacccatgcagctggctgaaatcc

SEQ ID NO: 13428 - DNA, 90 bp, Homo sapiens
tccgagcagcagccagcagctggctcagtgcagcatggctgctaacttcaccccacccatgcagctggctgaaatccccgagacgagcaa

SEQ ID NO: 13429 - DNA, 86 bp, Homo sapiens
ccagcagctggctcagtgcagcatggctgctaacttcaccccacccatgcagctggctgaaatccccgagacgagcaacgccaaca

SEQ ID NO: 13430 - DNA, 84 bp, Homo sapiens
gctcagtgcagcatggctgctaacttcaccccacccatgcagctggctgaaatccccgagacgagcaacgccaacattggctta

SEQ ID NO: 13431 - DNA, 80 bp, Homo sapiens
agcatggctgctaacttcaccccacccatgcagctggctgaaatccccgagacgagcaacgccaacattggcttatacga

SEQ ID NO: 13432 - DNA, 77 bp, Homo sapiens
taacttcaccccacccatgcagctggctgaaatccccgagacgagcaacgccaacattggcttatacgagcgaatgg

SEQ ID NO: 13433 - DNA, 79 bp, Homo sapiens
ccacccatgcagctggctgaaatccccgagacgagcaacgccaacattggcttatacgagcgaatgggtcagagtgatt

SEQ ID NO: 13434 - DNA, 78 bp, Homo sapiens
atgcagctggctgaaatccccgagacgagcaacgccaacattggcttatacgagcgaatgggtcagagtgattttggg

SEQ ID NO: 13435 - DNA, 76 bp, Homo sapiens
ctgaaatccccgagacgagcaacgccaacattggcttatacgagcgaatgggtcagagtgattttggggctgggca

SEQ ID NO: 13436 - DNA, 76 bp, Homo sapiens
agacgagcaacgccaacattggcttatacgagcgaatgggtcagagtgattttggggctgggcattacccgcagcc

SEQ ID NO: 13437 - DNA, 76 bp, Homo sapiens
aacgccaacattggcttatacgagcgaatgggtcagagtgattttggggctgggcattacccgcagccgtcagcca

SEQ ID NO: 13438 - DNA, 76 bp, Homo sapiens
attggcttatacgagcgaatgggtcagagtgattttggggctgggcattacccgcagccgtcagccaccttcagcc

SEQ ID NO: 13439 - DNA, 75 bp, Homo sapiens
acgagcgaatgggtcagagtgattttggggctgggcattacccgcagccgtcagccaccttcagccttgccaaac

SEQ ID NO: 13440 - DNA, 76 bp, Homo sapiens
agagtgattttggggctgggcattacccgcagccgtcagccaccttcagccttgccaaactgcagcagttaactaa

SEQ ID NO: 13441 - DNA, 76 bp, Homo sapiens
ttggggctgggcattacccgcagccgtcagccaccttcagccttgccaaactgcagcagttaactaatacacttat

SEQ ID NO: 13442 - DNA, 80 bp, Homo sapiens
tgggcattacccgcagccgtcagccaccttcagccttgccaaactgcagcagttaactaatacacttattgatcattcat

SEQ ID NO: 13443 - DNA, 80 bp, Homo sapiens
agccgtcagccaccttcagccttgccaaactgcagcagttaactaatacacttattgatcattcattgccttacagccat

SEQ ID NO: 13444 - DNA, 81 bp, Homo sapiens
ccttgccaaactgcagcagttaactaatacacttattgatcattcattgccttacagccattccgctgctgtgacttccta

SEQ ID NO: 13445 - DNA, 82 bp, Homo sapiens
aaactgcagcagttaactaatacacttattgatcattcattgccttacagccattccgctgctgtgacttcctatgcaaaca

SEQ ID NO: 13446 - DNA, 82 bp, Homo sapiens
cttattgatcattcattgccttacagccattccgctgctgtgacttcctatgcaaacagtgcctctttgtccacaccattaa

SEQ ID NO: 13447 - DNA, 80 bp, Homo sapiens
attcattgccttacagccattccgctgctgtgacttcctatgcaaacagtgcctctttgtccacaccattaagtaacaca

SEQ ID NO: 13448 - DNA, 78 bp, Homo sapiens
ttacagccattccgctgctgtgacttcctatgcaaacagtgcctctttgtccacaccattaagtaacacagggcttgt

SEQ ID NO: 13449 - DNA, 76 bp, Homo sapiens
attccgctgctgtgacttcctatgcaaacagtgcctctttgtccacaccattaagtaacacagggcttgttcaact

SEQ ID NO: 13450 - DNA, 76 bp, Homo sapiens
ctgtgacttcctatgcaaacagtgcctctttgtccacaccattaagtaacacagggcttgttcaactttctcagtc

SEQ ID NO: 13451 - DNA, 77 bp, Homo sapiens
tcctatgcaaacagtgcctctttgtccacaccattaagtaacacagggcttgttcaactttctcagtctccacactc

SEQ ID NO: 13452 - DNA, 73 bp, Homo sapiens
agtgcctctttgtccacaccattaagtaacacagggcttgttcaactttctcagtctccacactccgtccctg

SEQ ID NO: 13453 - DNA, 71 bp, Homo sapiens
tttgtccacaccattaagtaacacagggcttgttcaactttctcagtctccacactccgtccctgggggac

SEQ ID NO: 13454 - DNA, 70 bp, Homo sapiens
attaagtaacacagggcttgttcaactttctcagtctccacactccgtccctgggggaccccaagcacaa

SEQ ID NO: 13455 - DNA, 73 bp, Homo sapiens
acacagggcttgttcaactttctcagtctccacactccgtccctgggggaccccaagcacaagctaccatgac

SEQ ID NO: 13456 - DNA, 70 bp, Homo sapiens
tccgtccctgggggaccccaagcacaagctaccatgaccccaccccccaacctgactcctcctccaatga

SEQ ID NO: 13457 - DNA, 72 bp, Homo sapiens
ggggaccccaagcacaagctaccatgaccccaccccccaacctgactcctcctccaatgaatctgccgccgc

SEQ ID NO: 13458 - DNA, 74 bp, Homo sapiens
aagcacaagctaccatgaccccaccccccaacctgactcctcctccaatgaatctgccgccgcctcttttgcaa

SEQ ID NO: 13459 - DNA, 73 bp, Homo sapiens
taccatgaccccaccccccaacctgactcctcctccaatgaatctgccgccgcctcttttgcaacggaacatg

SEQ ID NO: 13460 - DNA, 82 bp, Homo sapiens
aacctgactcctcctccaatgaatctgccgccgcctcttttgcaacggaacatggctgcatcaaatattggcatctctcaca

SEQ ID NO: 13461 - DNA, 85 bp, Homo sapiens
tcctccaatgaatctgccgccgcctcttttgcaacggaacatggctgcatcaaatattggcatctctcacagccaaagactgcaa

SEQ ID NO: 13462 - DNA, 83 bp, Homo sapiens
ccgcctcttttgcaacggaacatggctgcatcaaatattggcatctctcacagccaaagactgcaaacccagattgccagcaa

SEQ ID NO: 13463 - DNA, 84 bp, Homo sapiens
ttttgcaacggaacatggctgcatcaaatattggcatctctcacagccaaagactgcaaacccagattgccagcaagggccaca

SEQ ID NO: 13464 - DNA, 86 bp, Homo sapiens
aacatggctgcatcaaatattggcatctctcacagccaaagactgcaaacccagattgccagcaagggccacatctccatgagaac

SEQ ID NO: 13465 - DNA, 84 bp, Homo sapiens
atcaaatattggcatctctcacagccaaagactgcaaacccagattgccagcaagggccacatctccatgagaaccaagtcagc

SEQ ID NO: 13466 - DNA, 84 bp, Homo sapiens
atctctcacagccaaagactgcaaacccagattgccagcaagggccacatctccatgagaaccaagtcagcgtctctgtcacca

SEQ ID NO: 13467 - DNA, 82 bp, Homo sapiens
acagccaaagactgcaaacccagattgccagcaagggccacatctccatgagaaccaagtcagcgtctctgtcaccagccgc

SEQ ID NO: 13468 - DNA, 84 bp, Homo sapiens
actgcaaacccagattgccagcaagggccacatctccatgagaaccaagtcagcgtctctgtcaccagccgctgccacccatca

SEQ ID NO: 13469 - DNA, 83 bp, Homo sapiens
aagggccacatctccatgagaaccaagtcagcgtctctgtcaccagccgctgccacccatcagtcacaaatctatgggcgctc

SEQ ID NO: 13470 - DNA, 84 bp, Homo sapiens
atctccatgagaaccaagtcagcgtctctgtcaccagccgctgccacccatcagtcacaaatctatgggcgctcccagactgta

SEQ ID NO: 13471 - DNA, 84 bp, Homo sapiens
agaaccaagtcagcgtctctgtcaccagccgctgccacccatcagtcacaaatctatgggcgctcccagactgtagccatgcag

SEQ ID NO: 13472 - DNA, 80 bp, Homo sapiens
accagccgctgccacccatcagtcacaaatctatgggcgctcccagactgtagccatgcagggtcctgcacggactttaa

SEQ ID NO: 13473 - DNA, 82 bp, Homo sapiens
tgccacccatcagtcacaaatctatgggcgctcccagactgtagccatgcagggtcctgcacggactttaacgatgcaaaga

SEQ ID NO: 13474 - DNA, 81 bp, Homo sapiens
aaatctatgggcgctcccagactgtagccatgcagggtcctgcacggactttaacgatgcaaagaggcatgaacatgagtg

SEQ ID NO: 13475 - DNA, 82 bp, Homo sapiens
agggtcctgcacggactttaacgatgcaaagaggcatgaacatgagtgtgaacctgatgccagcgccagcctacaatgtcaa

SEQ ID NO: 13476 - DNA, 83 bp, Homo sapiens
acggactttaacgatgcaaagaggcatgaacatgagtgtgaacctgatgccagcgccagcctacaatgtcaactctgtgaaca

SEQ ID NO: 13477 - DNA, 86 bp, Homo sapiens
aaagaggcatgaacatgagtgtgaacctgatgccagcgccagcctacaatgtcaactctgtgaacatgaacatgaacactctcaac

SEQ ID NO: 13478 - DNA, 86 bp, Homo sapiens
atgagtgtgaacctgatgccagcgccagcctacaatgtcaactctgtgaacatgaacatgaacactctcaacgccatgaatgggta

SEQ ID NO: 13479 - DNA, 86 bp, Homo sapiens
aacctgatgccagcgccagcctacaatgtcaactctgtgaacatgaacatgaacactctcaacgccatgaatgggtacagcatgtc

SEQ ID NO: 13480 - DNA, 86 bp, Homo sapiens
agcgccagcctacaatgtcaactctgtgaacatgaacatgaacactctcaacgccatgaatgggtacagcatgtcccagccaatga

SEQ ID NO: 13481 - DNA, 86 bp, Homo sapiens
agcctacaatgtcaactctgtgaacatgaacatgaacactctcaacgccatgaatgggtacagcatgtcccagccaatgatgaaca

SEQ ID NO: 13482 - DNA, 85 bp, Homo sapiens
aactctgtgaacatgaacatgaacactctcaacgccatgaatgggtacagcatgtcccagccaatgatgaacagtggctaccaca

SEQ ID NO: 13483 - DNA, 87 bp, Homo sapiens
aacactctcaacgccatgaatgggtacagcatgtcccagccaatgatgaacagtggctaccacagcaatcatggctatatgaatcaa

SEQ ID NO: 13484 - DNA, 87 bp, Homo sapiens
tctcaacgccatgaatgggtacagcatgtcccagccaatgatgaacagtggctaccacagcaatcatggctatatgaatcaaacgcc

SEQ ID NO: 13485 - DNA, 84 bp, Homo sapiens
atgaatgggtacagcatgtcccagccaatgatgaacagtggctaccacagcaatcatggctatatgaatcaaacgccccaatac

SEQ ID NO: 13486 - DNA, 88 bp, Homo sapiens
acagcatgtcccagccaatgatgaacagtggctaccacagcaatcatggctatatgaatcaaacgccccaataccctatgcagatgca

SEQ ID NO: 13487 - DNA, 89 bp, Homo sapiens
agccaatgatgaacagtggctaccacagcaatcatggctatatgaatcaaacgccccaataccctatgcagatgcagatgggcatgatg

SEQ ID NO: 13488 - DNA, 87 bp, Homo sapiens
atgaacagtggctaccacagcaatcatggctatatgaatcaaacgccccaataccctatgcagatgcagatgggcatgatgggcacc

SEQ ID NO: 13489 - DNA, 83 bp, Homo sapiens
aaacgccccaataccctatgcagatgcagatgggcatgatgggcacccagccatatgcccagcagccaatgcagaccccaccc

SEQ ID NO: 13490 - DNA, 86 bp, Homo sapiens
ataccctatgcagatgcagatgggcatgatgggcacccagccatatgcccagcagccaatgcagaccccaccccacggtaacatga

SEQ ID NO: 13491 - DNA, 85 bp, Homo sapiens
agatgcagatgggcatgatgggcacccagccatatgcccagcagccaatgcagaccccaccccacggtaacatgatgtacacggc

SEQ ID NO: 13492 - DNA, 78 bp, Homo sapiens
atgatgggcacccagccatatgcccagcagccaatgcagaccccaccccacggtaacatgatgtacacggcccccgga

SEQ ID NO: 13493 - DNA, 76 bp, Homo sapiens
acccagccatatgcccagcagccaatgcagaccccaccccacggtaacatgatgtacacggcccccggacatcacg

SEQ ID NO: 13494 - DNA, 78 bp, Homo sapiens
atatgcccagcagccaatgcagaccccaccccacggtaacatgatgtacacggcccccggacatcacggctacatgaa

SEQ ID NO: 13495 - DNA, 77 bp, Homo sapiens
agccaatgcagaccccaccccacggtaacatgatgtacacggcccccggacatcacggctacatgaacacaggcatg

SEQ ID NO: 13496 - DNA, 74 bp, Homo sapiens
agaccccaccccacggtaacatgatgtacacggcccccggacatcacggctacatgaacacaggcatgtccaaa

SEQ ID NO: 13497 - DNA, 79 bp, Homo sapiens
acggtaacatgatgtacacggcccccggacatcacggctacatgaacacaggcatgtccaaacagtctctcaatggctc

SEQ ID NO: 13498 - DNA, 82 bp, Homo sapiens
atgatgtacacggcccccggacatcacggctacatgaacacaggcatgtccaaacagtctctcaatggctcctacatgagaa

SEQ ID NO: 13499 - DNA, 79 bp, Homo sapiens
cccccggacatcacggctacatgaacacaggcatgtccaaacagtctctcaatggctcctacatgagaaggtagacaac

SEQ ID NO: 13500 - DNA, 76 bp, Homo sapiens
acaggcatgtccaaacagtctctcaatggctcctacatgagaaggtagacaacgtgggcagtccacaaaacctacg

SEQ ID NO: 13501 - DNA, 78 bp, Homo sapiens
tcctacatgagaaggtagacaacgtgggcagtccacaaaacctacggggcatcactattggattgatctgcacaaata

SEQ ID NO: 13502 - DNA, 73 bp, Homo sapiens
agtccacaaaacctacggggcatcactattggattgatctgcacaaatacctttgaagagtacgatttcaaaa

SEQ ID NO: 13503 - DNA, 77 bp, Homo sapiens
tacggggcatcactattggattgatctgcacaaatacctttgaagagtacgatttcaaaaccagcaattggtgtgaa

SEQ ID NO: 13504 - DNA, 77 bp, Homo sapiens
atcactattggattgatctgcacaaatacctttgaagagtacgatttcaaaaccagcaattggtgtgaatgcaaaaa

SEQ ID NO: 13505 - DNA, 75 bp, Homo sapiens
attgatctgcacaaatacctttgaagagtacgatttcaaaaccagcaattggtgtgaatgcaaaaacatttgttg

SEQ ID NO: 13506 - DNA, 71 bp, Homo sapiens
aaatacctttgaagagtacgatttcaaaaccagcaattggtgtgaatgcaaaaacatttgttggcaccatt

SEQ ID NO: 13507 - DNA, 72 bp, Homo sapiens
ctttgaagagtacgatttcaaaaccagcaattggtgtgaatgcaaaaacatttgttggcaccatttatttaa

SEQ ID NO: 13508 - DNA, 66 bp, Homo sapiens
cttttttttggtaccttcatttctgttacttttatataaaattctctgcaaaggaaggcctctctt

SEQ ID NO: 13509 - DNA, 69 bp, Homo sapiens
ggtaccttcatttctgttacttttatataaaattctctgcaaaggaaggcctctctttggactacaatt

SEQ ID NO: 13510 - DNA, 72 bp, Homo sapiens
atttctgttacttttatataaaattctctgcaaaggaaggcctctctttggactacaatttggaggcagcca

SEQ ID NO: 13511 - DNA, 72 bp, Homo sapiens
ttacttttatataaaattctctgcaaaggaaggcctctctttggactacaatttggaggcagccacttgttg

SEQ ID NO: 13512 - DNA, 75 bp, Homo sapiens
aattctctgcaaaggaaggcctctctttggactacaatttggaggcagccacttgttgtgcctgcttctgttaaa

SEQ ID NO: 13513 - DNA, 77 bp, Homo sapiens
aggcctctctttggactacaatttggaggcagccacttgttgtgcctgcttctgttaaacaatgtggatatcaagcc

SEQ ID NO: 13514 - DNA, 74 bp, Homo sapiens
actacaatttggaggcagccacttgttgtgcctgcttctgttaaacaatgtggatatcaagcccccccaaatta

SEQ ID NO: 13515 - DNA, 74 bp, Homo sapiens
atttggaggcagccacttgttgtgcctgcttctgttaaacaatgtggatatcaagcccccccaaattatctgtt

SEQ ID NO: 13516 - DNA, 71 bp, Homo sapiens
ctgcttctgttaaacaatgtggatatcaagcccccccaaattatctgttttaatattgaacctagagcttt

SEQ ID NO: 13517 - DNA, 69 bp, Homo sapiens
tctgttaaacaatgtggatatcaagcccccccaaattatctgttttaatattgaacctagagctttttt

SEQ ID NO: 13518 - DNA, 64 bp, Homo sapiens
aagcccccccaaattatctgttttaatattgaacctagagctttttttttcccttccctgtcca

SEQ ID NO: 13519 - DNA, 68 bp, Homo sapiens
ttatctgttttaatattgaacctagagctttttttttcccttccctgtccactccatgtaaatgcctt

SEQ ID NO: 13520 - DNA, 70 bp, Homo sapiens
ttgaacctagagctttttttttcccttccctgtccactccatgtaaatgcctttagcatttcagttattg

SEQ ID NO: 13521 - DNA, 69 bp, Homo sapiens
tttttttcccttccctgtccactccatgtaaatgcctttagcatttcagttattgtatattttgtttaa

SEQ ID NO: 13522 - DNA, 73 bp, Homo sapiens
ccttccctgtccactccatgtaaatgcctttagcatttcagttattgtatattttgtttaaggtgacacttca

SEQ ID NO: 13523 - DNA, 77 bp, Homo sapiens
actccatgtaaatgcctttagcatttcagttattgtatattttgtttaaggtgacacttcagcatgccgctaatgtc

SEQ ID NO: 13524 - DNA, 76 bp, Homo sapiens
tgtaaatgcctttagcatttcagttattgtatattttgtttaaggtgacacttcagcatgccgctaatgtctttgt

SEQ ID NO: 13525 - DNA, 79 bp, Homo sapiens
tagcatttcagttattgtatattttgtttaaggtgacacttcagcatgccgctaatgtctttgttagtgacagtgcatt

SEQ ID NO: 13526 - DNA, 77 bp, Homo sapiens
atattttgtttaaggtgacacttcagcatgccgctaatgtctttgttagtgacagtgcattttgtagtactgtacaa

SEQ ID NO: 13527 - DNA, 80 bp, Homo sapiens
ttcagcatgccgctaatgtctttgttagtgacagtgcattttgtagtactgtacaagtgttgtgctaacagtaagccatt

SEQ ID NO: 13528 - DNA, 75 bp, Homo sapiens
taatgtctttgttagtgacagtgcattttgtagtactgtacaagtgttgtgctaacagtaagccatttcttaagt

SEQ ID NO: 13529 - DNA, 72 bp, Homo sapiens
ctttgttagtgacagtgcattttgtagtactgtacaagtgttgtgctaacagtaagccatttcttaagtttt

SEQ ID NO: 13530 - DNA, 75 bp, Homo sapiens
tgacagtgcattttgtagtactgtacaagtgttgtgctaacagtaagccatttcttaagttttttgccttgatta

SEQ ID NO: 13531 - DNA, 71 bp, Homo sapiens
ttttgtagtactgtacaagtgttgtgctaacagtaagccatttcttaagttttttgccttgattagggtgc

SEQ ID NO: 13532 - DNA, 71 bp, Homo sapiens
tgtacaagtgttgtgctaacagtaagccatttcttaagttttttgccttgattagggtgccctaatttgag

SEQ ID NO: 13533 - DNA, 68 bp, Homo sapiens
ttgtgctaacagtaagccatttcttaagttttttgccttgattagggtgccctaatttgagggtttta

SEQ ID NO: 13534 - DNA, 62 bp, Homo sapiens
tttcttaagttttttgccttgattagggtgccctaatttgagggttttaaaaaaaactatat

SEQ ID NO: 13535 - DNA, 62 bp, Homo sapiens
tttttgccttgattagggtgccctaatttgagggttttaaaaaaaactatatttttgttaat

SEQ ID NO: 13536 - DNA, 62 bp, Homo sapiens
gattagggtgccctaatttgagggttttaaaaaaaactatatttttgttaattataaaactg

SEQ ID NO: 13537 - DNA, 62 bp, Homo sapiens
ccctaatttgagggttttaaaaaaaactatatttttgttaattataaaactgtaaagagcta

SEQ ID NO: 13538 - DNA, 64 bp, Homo sapiens
gttttaaaaaaaactatatttttgttaattataaaactgtaaagagctataaaagctattccca

SEQ ID NO: 13539 - DNA, 67 bp, Homo sapiens
actatatttttgttaattataaaactgtaaagagctataaaagctattcccatttggttagtcaaaa

SEQ ID NO: 13540 - DNA, 66 bp, Homo sapiens
tgttaattataaaactgtaaagagctataaaagctattcccatttggttagtcaaaagggttttat

SEQ ID NO: 13541 - DNA, 66 bp, Homo sapiens
aaaactgtaaagagctataaaagctattcccatttggttagtcaaaagggttttattgctaaatgt

SEQ ID NO: 13542 - DNA, 67 bp, Homo sapiens
agagctataaaagctattcccatttggttagtcaaaagggttttattgctaaatgtttggtgtaaag

SEQ ID NO: 13543 - DNA, 66 bp, Homo sapiens
aagctattcccatttggttagtcaaaagggttttattgctaaatgtttggtgtaaagttgagaccc

SEQ ID NO: 13544 - DNA, 65 bp, Homo sapiens
cccatttggttagtcaaaagggttttattgctaaatgtttggtgtaaagttgagacccttttcca

SEQ ID NO: 13545 - DNA, 64 bp, Homo sapiens
ggttagtcaaaagggttttattgctaaatgtttggtgtaaagttgagacccttttccattttgg

SEQ ID NO: 13546 - DNA, 67 bp, Homo sapiens
gttttattgctaaatgtttggtgtaaagttgagacccttttccattttggtgacagatttctttggg

SEQ ID NO: 13547 - DNA, 67 bp, Homo sapiens
ttgctaaatgtttggtgtaaagttgagacccttttccattttggtgacagatttctttggggaaaaa

SEQ ID NO: 13548 - DNA, 66 bp, Homo sapiens
tttggtgtaaagttgagacccttttccattttggtgacagatttctttggggaaaaaaggcagctt

SEQ ID NO: 13549 - DNA, 67 bp, Homo sapiens
agttgagacccttttccattttggtgacagatttctttggggaaaaaaggcagctttctgttttata

SEQ ID NO: 13550 - DNA, 70 bp, Homo sapiens
ttccattttggtgacagatttctttggggaaaaaaggcagctttctgttttataaatgcagacttctgtt

SEQ ID NO: 13551 - DNA, 74 bp, Homo sapiens
ctttggggaaaaaaggcagctttctgttttataaatgcagacttctgtttattgaatgaagcatatctcagtgt

SEQ ID NO: 13552 - DNA, 77 bp, Homo sapiens
aaaggcagctttctgttttataaatgcagacttctgtttattgaatgaagcatatctcagtgtttatctgtcaggtt

SEQ ID NO: 13553 - DNA, 78 bp, Homo sapiens
gctttctgttttataaatgcagacttctgtttattgaatgaagcatatctcagtgtttatctgtcaggttttgaaaca

SEQ ID NO: 13554 - DNA, 82 bp, Homo sapiens
tataaatgcagacttctgtttattgaatgaagcatatctcagtgtttatctgtcaggttttgaaacatttcatatatgtcca

SEQ ID NO: 13555 - DNA, 80 bp, Homo sapiens
gcagacttctgtttattgaatgaagcatatctcagtgtttatctgtcaggttttgaaacatttcatatatgtccaaatac

SEQ ID NO: 13556 - DNA, 79 bp, Homo sapiens
gtttattgaatgaagcatatctcagtgtttatctgtcaggttttgaaacatttcatatatgtccaaatacttggcagga

SEQ ID NO: 13557 - DNA, 77 bp, Homo sapiens
tgaagcatatctcagtgtttatctgtcaggttttgaaacatttcatatatgtccaaatacttggcaggatttaaaaa

SEQ ID NO: 13558 - DNA, 71 bp, Homo sapiens
ctcagtgtttatctgtcaggttttgaaacatttcatatatgtccaaatacttggcaggatttaaaaaaaaa

SEQ ID NO: 13559 - DNA, 66 bp, Homo sapiens
ttaaaaaaaaatagtgaatttggtgtaaagttgctattttatggaaatgcctctaactttacattt

SEQ ID NO: 13560 - DNA, 73 bp, Homo sapiens
aatagtgaatttggtgtaaagttgctattttatggaaatgcctctaactttacattttcattccatctgtaga

SEQ ID NO: 13561 - DNA, 72 bp, Homo sapiens
aaagttgctattttatggaaatgcctctaactttacattttcattccatctgtagatttttctatctttata

SEQ ID NO: 13562 - DNA, 73 bp, Homo sapiens
ttgctattttatggaaatgcctctaactttacattttcattccatctgtagatttttctatctttataaaata

SEQ ID NO: 13563 - DNA, 72 bp, Homo sapiens
ttatggaaatgcctctaactttacattttcattccatctgtagatttttctatctttataaaatattggagt

SEQ ID NO: 13564 - DNA, 72 bp, Homo sapiens
atggaaatgcctctaactttacattttcattccatctgtagatttttctatctttataaaatattggagtta

SEQ ID NO: 13565 - DNA, 70 bp, Homo sapiens
aatgcctctaactttacattttcattccatctgtagatttttctatctttataaaatattggagttattt

SEQ ID NO: 13566 - DNA, 68 bp, Homo sapiens
actttacattttcattccatctgtagatttttctatctttataaaatattggagttattttttaagga

SEQ ID NO: 13567 - DNA, 67 bp, Homo sapiens
acattttcattccatctgtagatttttctatctttataaaatattggagttattttttaaggaaaaa

SEQ ID NO: 13568 - DNA, 68 bp, Homo sapiens
ttcattccatctgtagatttttctatctttataaaatattggagttattttttaaggaaaaatagaaa

SEQ ID NO: 13569 - DNA, 67 bp, Homo sapiens
catctgtagatttttctatctttataaaatattggagttattttttaaggaaaaatagaaaagtagc

SEQ ID NO: 13570 - DNA, 69 bp, Homo sapiens
ttctatctttataaaatattggagttattttttaaggaaaaatagaaaagtagcttgtgaatagctcaa

SEQ ID NO: 13571 - DNA, 68 bp, Homo sapiens
tataaaatattggagttattttttaaggaaaaatagaaaagtagcttgtgaatagctcaaactaagct

SEQ ID NO: 13572 - DNA, 71 bp, Homo sapiens
tggagttattttttaaggaaaaatagaaaagtagcttgtgaatagctcaaactaagcttacaaatcgcatg

SEQ ID NO: 13573 - DNA, 71 bp, Homo sapiens
tttaaggaaaaatagaaaagtagcttgtgaatagctcaaactaagcttacaaatcgcatgtaaaaaagcaa

SEQ ID NO: 13574 - DNA, 72 bp, Homo sapiens
aagtagcttgtgaatagctcaaactaagcttacaaatcgcatgtaaaaaagcaaaaaagttatttgtgtctg

SEQ ID NO: 13575 - DNA, 74 bp, Homo sapiens
tgtgaatagctcaaactaagcttacaaatcgcatgtaaaaaagcaaaaaagttatttgtgtctgtttatattgc

SEQ ID NO: 13576 - DNA, 69 bp, Homo sapiens
caaactaagcttacaaatcgcatgtaaaaaagcaaaaaagttatttgtgtctgtttatattgcttcctt

SEQ ID NO: 13577 - DNA, 68 bp, Homo sapiens
gcatgtaaaaaagcaaaaaagttatttgtgtctgtttatattgcttccttttttgtagcctttgtacc

SEQ ID NO: 13578 - DNA, 68 bp, Homo sapiens
aaaaagttatttgtgtctgtttatattgcttccttttttgtagcctttgtacctgtacagggtgacag

SEQ ID NO: 13579 - DNA, 70 bp, Homo sapiens
atttgtgtctgtttatattgcttccttttttgtagcctttgtacctgtacagggtgacagtaagggccaa

SEQ ID NO: 13580 - DNA, 72 bp, Homo sapiens
tctgtttatattgcttccttttttgtagcctttgtacctgtacagggtgacagtaagggccaagcaggagag

SEQ ID NO: 13581 - DNA, 71 bp, Homo sapiens
tccttttttgtagcctttgtacctgtacagggtgacagtaagggccaagcaggagaggcgtaatccttgta

SEQ ID NO: 13582 - DNA, 71 bp, Homo sapiens
ttttgtagcctttgtacctgtacagggtgacagtaagggccaagcaggagaggcgtaatccttgtataaaa

SEQ ID NO: 13583 - DNA, 74 bp, Homo sapiens
tttgtacctgtacagggtgacagtaagggccaagcaggagaggcgtaatccttgtataaaataggatccagcga

SEQ ID NO: 13584 - DNA, 74 bp, Homo sapiens
gggtgacagtaagggccaagcaggagaggcgtaatccttgtataaaataggatccagcgacactcttgtattta

SEQ ID NO: 13585 - DNA, 74 bp, Homo sapiens
agtaagggccaagcaggagaggcgtaatccttgtataaaataggatccagcgacactcttgtatttatctgttc

SEQ ID NO: 13586 - DNA, 73 bp, Homo sapiens
aagcaggagaggcgtaatccttgtataaaataggatccagcgacactcttgtatttatctgttctctttttag

SEQ ID NO: 13587 - DNA, 74 bp, Homo sapiens
cgtaatccttgtataaaataggatccagcgacactcttgtatttatctgttctctttttagtcagtcacttcaa

SEQ ID NO: 13588 - DNA, 72 bp, Homo sapiens
cttgtataaaataggatccagcgacactcttgtatttatctgttctctttttagtcagtcacttcaaaaaaa

SEQ ID NO: 13589 - DNA, 70 bp, Homo sapiens
caaacaaaaaaaagctgtacattttaacataaaataaattatgatgagccatttttagcctcttgtgtcc

SEQ ID NO: 13590 - DNA, 78 bp, Homo sapiens
aagctgtacattttaacataaaataaattatgatgagccatttttagcctcttgtgtcctgtcatattatgattgata

SEQ ID NO: 13591 - DNA, 79 bp, Homo sapiens
ttttaacataaaataaattatgatgagccatttttagcctcttgtgtcctgtcatattatgattgatagagaatgacca

SEQ ID NO: 13592 - DNA, 80 bp, Homo sapiens
aaataaattatgatgagccatttttagcctcttgtgtcctgtcatattatgattgatagagaatgaccaatggaactgta

SEQ ID NO: 13593 - DNA, 85 bp, Homo sapiens
aattatgatgagccatttttagcctcttgtgtcctgtcatattatgattgatagagaatgaccaatggaactgtatcatgtgtca

SEQ ID NO: 13594 - DNA, 83 bp, Homo sapiens
atttttagcctcttgtgtcctgtcatattatgattgatagagaatgaccaatggaactgtatcatgtgtcacgcctcagaaca

SEQ ID NO: 13595 - DNA, 85 bp, Homo sapiens
cctcttgtgtcctgtcatattatgattgatagagaatgaccaatggaactgtatcatgtgtcacgcctcagaacacatacacatt

SEQ ID NO: 13596 - DNA, 84 bp, Homo sapiens
tgtcatattatgattgatagagaatgaccaatggaactgtatcatgtgtcacgcctcagaacacatacacattttgggaaaata

SEQ ID NO: 13597 - DNA, 81 bp, Homo sapiens
atattatgattgatagagaatgaccaatggaactgtatcatgtgtcacgcctcagaacacatacacattttgggaaaataa

SEQ ID NO: 13598 - DNA, 80 bp, Homo sapiens
attatgattgatagagaatgaccaatggaactgtatcatgtgtcacgcctcagaacacatacacattttgggaaaataaa

SEQ ID NO: 13599 - DNA, 78 bp, Homo sapiens
attgatagagaatgaccaatggaactgtatcatgtgtcacgcctcagaacacatacacattttgggaaaataaattat

SEQ ID NO: 13600 - DNA, 77 bp, Homo sapiens
atagagaatgaccaatggaactgtatcatgtgtcacgcctcagaacacatacacattttgggaaaataaattattta

SEQ ID NO: 13601 - DNA, 76 bp, Homo sapiens
aatgaccaatggaactgtatcatgtgtcacgcctcagaacacatacacattttgggaaaataaattatttagtgta

SEQ ID NO: 13602 - DNA, 75 bp, Homo sapiens
tggaactgtatcatgtgtcacgcctcagaacacatacacattttgggaaaataaattatttagtgtaaattggag

SEQ ID NO: 13603 - DNA, 75 bp, Homo sapiens
tgtatcatgtgtcacgcctcagaacacatacacattttgggaaaataaattatttagtgtaaattggagttatgg

SEQ ID NO: 13604 - DNA, 73 bp, Homo sapiens
catgtgtcacgcctcagaacacatacacattttgggaaaataaattatttagtgtaaattggagttatgggat

SEQ ID NO: 13605 - DNA, 70 bp, Homo sapiens
gtcacgcctcagaacacatacacattttgggaaaataaattatttagtgtaaattggagttatgggattt

SEQ ID NO: 13606 - DNA, 71 bp, Homo sapiens
cgcctcagaacacatacacattttgggaaaataaattatttagtgtaaattggagttatgggattttctga

SEQ ID NO: 13607 - DNA, 68 bp, Homo sapiens
cacatacacattttgggaaaataaattatttagtgtaaattggagttatgggattttctgatttgttt

SEQ ID NO: 13608 - DNA, 66 bp, Homo sapiens
ttgggaaaataaattatttagtgtaaattggagttatgggattttctgatttgttttgactttggg

SEQ ID NO: 13609 - DNA, 67 bp, Homo sapiens
ttatttagtgtaaattggagttatgggattttctgatttgttttgactttgggggaggggttggcaa

SEQ ID NO: 13610 - DNA, 68 bp, Homo sapiens
tagtgtaaattggagttatgggattttctgatttgttttgactttgggggaggggttggcaataaata

SEQ ID NO: 13611 - DNA, 70 bp, Homo sapiens
ttctgatttgttttgactttgggggaggggttggcaataaataagagtaatatctaataaaaccatcaca

SEQ ID NO: 13612 - DNA, 69 bp, Homo sapiens
gttttgactttgggggaggggttggcaataaataagagtaatatctaataaaaccatcacatataccaa

SEQ ID NO: 13613 - DNA, 69 bp, Homo sapiens
ctttgggggaggggttggcaataaataagagtaatatctaataaaaccatcacatataccaaataccta

SEQ ID NO: 13614 - DNA, 70 bp, Homo sapiens
gggttggcaataaataagagtaatatctaataaaaccatcacatataccaaatacctatttaataaatta

SEQ ID NO: 13615 - DNA, 70 bp, Homo sapiens
aataagagtaatatctaataaaaccatcacatataccaaatacctatttaataaattaatttataatgga

SEQ ID NO: 13616 - DNA, 71 bp, Homo sapiens
taatatctaataaaaccatcacatataccaaatacctatttaataaattaatttataatggattttaatgc

SEQ ID NO: 13617 - DNA, 70 bp, Homo sapiens
aaccatcacatataccaaatacctatttaataaattaatttataatggattttaatgcttttcatgaaag

SEQ ID NO: 13618 - DNA, 70 bp, Homo sapiens
tcacatataccaaatacctatttaataaattaatttataatggattttaatgcttttcatgaaagtttat

SEQ ID NO: 13619 - DNA, 71 bp, Homo sapiens
acctatttaataaattaatttataatggattttaatgcttttcatgaaagtttattttatgcgagtgcata

SEQ ID NO: 13620 - DNA, 75 bp, Homo sapiens
taaattaatttataatggattttaatgcttttcatgaaagtttattttatgcgagtgcataccttctgtatgcca

SEQ ID NO: 13621 - DNA, 77 bp, Homo sapiens
ttataatggattttaatgcttttcatgaaagtttattttatgcgagtgcataccttctgtatgccaatcattgtctt

SEQ ID NO: 13622 - DNA, 75 bp, Homo sapiens
ggattttaatgcttttcatgaaagtttattttatgcgagtgcataccttctgtatgccaatcattgtctttaaaa

SEQ ID NO: 13623 - DNA, 75 bp, Homo sapiens
gcttttcatgaaagtttattttatgcgagtgcataccttctgtatgccaatcattgtctttaaaataaagtgaaa

SEQ ID NO: 13624 - DNA, 72 bp, Homo sapiens
gaaagtttattttatgcgagtgcataccttctgtatgccaatcattgtctttaaaataaagtgaaattgttt

SEQ ID NO: 13625 - DNA, 73 bp, Homo sapiens
aaagtttgtgacacttctgtcctccaatagacttatgttaaagacaacatgtgtattgaaagtagcaatttta

SEQ ID NO: 13626 - DNA, 73 bp, Homo sapiens
acacttctgtcctccaatagacttatgttaaagacaacatgtgtattgaaagtagcaattttatttgagttaa

SEQ ID NO: 13627 - DNA, 70 bp, Homo sapiens
cctccaatagacttatgttaaagacaacatgtgtattgaaagtagcaattttatttgagttaaaattatt

SEQ ID NO: 13628 - DNA, 69 bp, Homo sapiens
tatgttaaagacaacatgtgtattgaaagtagcaattttatttgagttaaaattatttacaaaaaccca

SEQ ID NO: 13629 - DNA, 69 bp, Homo sapiens
gacaacatgtgtattgaaagtagcaattttatttgagttaaaattatttacaaaaacccaaagacatac

SEQ ID NO: 13630 - DNA, 69 bp, Homo sapiens
gtgtattgaaagtagcaattttatttgagttaaaattatttacaaaaacccaaagacatacttcatgaa

SEQ ID NO: 13631 - DNA, 67 bp, Homo sapiens
gcaattttatttgagttaaaattatttacaaaaacccaaagacatacttcatgaaactggtacaaac

SEQ ID NO: 13632 - DNA, 65 bp, Homo sapiens
tttgagttaaaattatttacaaaaacccaaagacatacttcatgaaactggtacaaactattttt

SEQ ID NO: 13633 - DNA, 67 bp, Homo sapiens
ttatttacaaaaacccaaagacatacttcatgaaactggtacaaactattttttcctgccgttggct

SEQ ID NO: 13634 - DNA, 68 bp, Homo sapiens
aaacccaaagacatacttcatgaaactggtacaaactattttttcctgccgttggcttttgctccaaa

SEQ ID NO: 13635 - DNA, 74 bp, Homo sapiens
aaagacatacttcatgaaactggtacaaactattttttcctgccgttggcttttgctccaaagatcacagctga

SEQ ID NO: 13636 - DNA, 74 bp, Homo sapiens
atgaaactggtacaaactattttttcctgccgttggcttttgctccaaagatcacagctgagaaatactgtata

SEQ ID NO: 13637 - DNA, 73 bp, Homo sapiens
tggtacaaactattttttcctgccgttggcttttgctccaaagatcacagctgagaaatactgtataaaataa

SEQ ID NO: 13638 - DNA, 73 bp, Homo sapiens
tttttcctgccgttggcttttgctccaaagatcacagctgagaaatactgtataaaataaaaataggattgga

SEQ ID NO: 13639 - DNA, 75 bp, Homo sapiens
tgccgttggcttttgctccaaagatcacagctgagaaatactgtataaaataaaaataggattggattcagaaaa

SEQ ID NO: 13640 - DNA, 75 bp, Homo sapiens
gctccaaagatcacagctgagaaatactgtataaaataaaaataggattggattcagaaaagtactctactgttc

SEQ ID NO: 13641 - DNA, 74 bp, Homo sapiens
tcacagctgagaaatactgtataaaataaaaataggattggattcagaaaagtactctactgttctaatttcca

SEQ ID NO: 13642 - DNA, 71 bp, Homo sapiens
gctgagaaatactgtataaaataaaaataggattggattcagaaaagtactctactgttctaatttccaat

SEQ ID NO: 13643 - DNA, 68 bp, Homo sapiens
ataaaataaaaataggattggattcagaaaagtactctactgttctaatttccaattggtagtattta

SEQ ID NO: 13644 - DNA, 69 bp, Homo sapiens
ataaaaataggattggattcagaaaagtactctactgttctaatttccaattggtagtatttacagaaa

SEQ ID NO: 13645 - DNA, 72 bp, Homo sapiens
gattggattcagaaaagtactctactgttctaatttccaattggtagtatttacagaaatatttacaatgga

SEQ ID NO: 13646 - DNA, 67 bp, Homo sapiens
gaaaagtactctactgttctaatttccaattggtagtatttacagaaatatttacaatggaaaaaag

SEQ ID NO: 13647 - DNA, 66 bp, Homo sapiens
ctactgttctaatttccaattggtagtatttacagaaatatttacaatggaaaaaaggttacttta

SEQ ID NO: 13648 - DNA, 63 bp, Homo sapiens
taatttccaattggtagtatttacagaaatatttacaatggaaaaaaggttactttaaaactt

SEQ ID NO: 13649 - DNA, 64 bp, Homo sapiens
tagtatttacagaaatatttacaatggaaaaaaggttactttaaaacttttagttaagtcagcc

SEQ ID NO: 13650 - DNA, 63 bp, Homo sapiens
gaaatatttacaatggaaaaaaggttactttaaaacttttagttaagtcagcctcaagtaccc

SEQ ID NO: 13651 - DNA, 65 bp, Homo sapiens
caatggaaaaaaggttactttaaaacttttagttaagtcagcctcaagtaccctaaaatgcagag

SEQ ID NO: 13652 - DNA, 66 bp, Homo sapiens
aaggttactttaaaacttttagttaagtcagcctcaagtaccctaaaatgcagagttctctgaggg

SEQ ID NO: 13653 - DNA, 71 bp, Homo sapiens
cttttagttaagtcagcctcaagtaccctaaaatgcagagttctctgagggttaaaaacacacaaatgcac

SEQ ID NO: 13654 - DNA, 76 bp, Homo sapiens
gcctcaagtaccctaaaatgcagagttctctgagggttaaaaacacacaaatgcactgcagttggtgaagtgatta

SEQ ID NO: 13655 - DNA, 75 bp, Homo sapiens
aagtaccctaaaatgcagagttctctgagggttaaaaacacacaaatgcactgcagttggtgaagtgattatctc

SEQ ID NO: 13656 - DNA, 75 bp, Homo sapiens
aaatgcagagttctctgagggttaaaaacacacaaatgcactgcagttggtgaagtgattatctcccccaccacc

SEQ ID NO: 13657 - DNA, 73 bp, Homo sapiens
ttctctgagggttaaaaacacacaaatgcactgcagttggtgaagtgattatctcccccaccacctcccccca

SEQ ID NO: 13658 - DNA, 74 bp, Homo sapiens
aaaaacacacaaatgcactgcagttggtgaagtgattatctcccccaccacctccccccaccaaaatctgcatc

SEQ ID NO: 13659 - DNA, 79 bp, Homo sapiens
aaatgcactgcagttggtgaagtgattatctcccccaccacctccccccaccaaaatctgcatctctatcagtgctcga

SEQ ID NO: 13660 - DNA, 75 bp, Homo sapiens
gttggtgaagtgattatctcccccaccacctccccccaccaaaatctgcatctctatcagtgctcgacaattagt

SEQ ID NO: 13661 - DNA, 75 bp, Homo sapiens
tgattatctcccccaccacctccccccaccaaaatctgcatctctatcagtgctcgacaattagttattatttaa

SEQ ID NO: 13662 - DNA, 72 bp, Homo sapiens
atctcccccaccacctccccccaccaaaatctgcatctctatcagtgctcgacaattagttattatttaaaa

SEQ ID NO: 13663 - DNA, 67 bp, Homo sapiens
caaaacaaaaaactgttaaacactgaggtaaatcaattttcaaatgattaccagtgtaacagaaaaa

SEQ ID NO: 13664 - DNA, 72 bp, Homo sapiens
actgttaaacactgaggtaaatcaattttcaaatgattaccagtgtaacagaaaaatgcagttcgccctgat

SEQ ID NO: 13665 - DNA, 75 bp, Homo sapiens
taaacactgaggtaaatcaattttcaaatgattaccagtgtaacagaaaaatgcagttcgccctgattgttctca

SEQ ID NO: 13666 - DNA, 74 bp, Homo sapiens
ggtaaatcaattttcaaatgattaccagtgtaacagaaaaatgcagttcgccctgattgttctcatccaaatgt

SEQ ID NO: 13667 - DNA, 75 bp, Homo sapiens
ttcaaatgattaccagtgtaacagaaaaatgcagttcgccctgattgttctcatccaaatgttttataatattcc

SEQ ID NO: 13668 - DNA, 74 bp, Homo sapiens
ttaccagtgtaacagaaaaatgcagttcgccctgattgttctcatccaaatgttttataatattccttaccatc

SEQ ID NO: 13669 - DNA, 77 bp, Homo sapiens
taacagaaaaatgcagttcgccctgattgttctcatccaaatgttttataatattccttaccatctgccacaagtca

SEQ ID NO: 13670 - DNA, 74 bp, Homo sapiens
agttcgccctgattgttctcatccaaatgttttataatattccttaccatctgccacaagtcaggttcaccaaa

SEQ ID NO: 13671 - DNA, 73 bp, Homo sapiens
attgttctcatccaaatgttttataatattccttaccatctgccacaagtcaggttcaccaaaaatctgtccc

SEQ ID NO: 13672 - DNA, 71 bp, Homo sapiens
tccaaatgttttataatattccttaccatctgccacaagtcaggttcaccaaaaatctgtccctttcccta

SEQ ID NO: 13673 - DNA, 70 bp, Homo sapiens
ttttataatattccttaccatctgccacaagtcaggttcaccaaaaatctgtccctttccctaaatccaa

SEQ ID NO: 13674 - DNA, 72 bp, Homo sapiens
atattccttaccatctgccacaagtcaggttcaccaaaaatctgtccctttccctaaatccaatgattaata

SEQ ID NO: 13675 - DNA, 74 bp, Homo sapiens
catctgccacaagtcaggttcaccaaaaatctgtccctttccctaaatccaatgattaataaatatcaatgtat

SEQ ID NO: 13676 - DNA, 72 bp, Homo sapiens
caagtcaggttcaccaaaaatctgtccctttccctaaatccaatgattaataaatatcaatgtattttgcat

SEQ ID NO: 13677 - DNA, 70 bp, Homo sapiens
caccaaaaatctgtccctttccctaaatccaatgattaataaatatcaatgtattttgcattttaaaata

SEQ ID NO: 13678 - DNA, 68 bp, Homo sapiens
aaaaatctgtccctttccctaaatccaatgattaataaatatcaatgtattttgcattttaaaataaa

SEQ ID NO: 13679 - DNA, 62 bp, Homo sapiens
aaaataaaatataactaatttaattttacgggtatcatttaccaatatgtttttaaaagtat

SEQ ID NO: 13680 - DNA, 68 bp, Homo sapiens
taattttacgggtatcatttaccaatatgtttttaaaagtattttgctaagctagctttaatactcag

SEQ ID NO: 13681 - DNA, 70 bp, Homo sapiens
cgggtatcatttaccaatatgtttttaaaagtattttgctaagctagctttaatactcagggcaaataca

SEQ ID NO: 13682 - DNA, 71 bp, Homo sapiens
accaatatgtttttaaaagtattttgctaagctagctttaatactcagggcaaatacaatctcaatggttc

SEQ ID NO: 13683 - DNA, 71 bp, Homo sapiens
ttttaaaagtattttgctaagctagctttaatactcagggcaaatacaatctcaatggttcccacgttaca

SEQ ID NO: 13684 - DNA, 74 bp, Homo sapiens
taagctagctttaatactcagggcaaatacaatctcaatggttcccacgttacactggcgtactatgttcttaa

SEQ ID NO: 13685 - DNA, 72 bp, Homo sapiens
tttaatactcagggcaaatacaatctcaatggttcccacgttacactggcgtactatgttcttaaaaggtga

SEQ ID NO: 13686 - DNA, 70 bp, Homo sapiens
agggcaaatacaatctcaatggttcccacgttacactggcgtactatgttcttaaaaggtgatgggtagg

SEQ ID NO: 13687 - DNA, 68 bp, Homo sapiens
acaatctcaatggttcccacgttacactggcgtactatgttcttaaaaggtgatgggtaggggttggg

SEQ ID NO: 13688 - DNA, 66 bp, Homo sapiens
gttcccacgttacactggcgtactatgttcttaaaaggtgatgggtaggggttggggtgggtagaa

SEQ ID NO: 13689 - DNA, 66 bp, Homo sapiens
ttacactggcgtactatgttcttaaaaggtgatgggtaggggttggggtgggtagaaggaagaaaa

SEQ ID NO: 13690 - DNA, 66 bp, Homo sapiens
ttaaaaggtgatgggtaggggttggggtgggtagaaggaagaaaacaatttgcctggaatcagtta

SEQ ID NO: 13691 - DNA, 65 bp, Homo sapiens
aaaggtgatgggtaggggttggggtgggtagaaggaagaaaacaatttgcctggaatcagttact

SEQ ID NO: 13692 - DNA, 66 bp, Homo sapiens
ggtaggggttggggtgggtagaaggaagaaaacaatttgcctggaatcagttacttccttacagat

SEQ ID NO: 13693 - DNA, 67 bp, Homo sapiens
gggttggggtgggtagaaggaagaaaacaatttgcctggaatcagttacttccttacagatttccca

SEQ ID NO: 13694 - DNA, 74 bp, Homo sapiens
tgggtagaaggaagaaaacaatttgcctggaatcagttacttccttacagatttcccaacaatctgcattatca

SEQ ID NO: 13695 - DNA, 73 bp, Homo sapiens
gaaaacaatttgcctggaatcagttacttccttacagatttcccaacaatctgcattatcaaaaataggaaga

SEQ ID NO: 13696 - DNA, 73 bp, Homo sapiens
aacaatttgcctggaatcagttacttccttacagatttcccaacaatctgcattatcaaaaataggaagacaa

SEQ ID NO: 13697 - DNA, 77 bp, Homo sapiens
atcagttacttccttacagatttcccaacaatctgcattatcaaaaataggaagacaatagaaggcagccactgcat

SEQ ID NO: 13698 - DNA, 75 bp, Homo sapiens
ttccttacagatttcccaacaatctgcattatcaaaaataggaagacaatagaaggcagccactgcatttaaaaa

SEQ ID NO: 13699 - DNA, 80 bp, Homo sapiens
acaatctgcattatcaaaaataggaagacaatagaaggcagccactgcatttaaaaacattacagctggcactgatacaa

SEQ ID NO: 13700 - DNA, 77 bp, Homo sapiens
attatcaaaaataggaagacaatagaaggcagccactgcatttaaaaacattacagctggcactgatacaagagccc

SEQ ID NO: 13701 - DNA, 78 bp, Homo sapiens
gaagacaatagaaggcagccactgcatttaaaaacattacagctggcactgatacaagagccccgatttgtcacttta

SEQ ID NO: 13702 - DNA, 77 bp, Homo sapiens
aatagaaggcagccactgcatttaaaaacattacagctggcactgatacaagagccccgatttgtcactttatacaa

SEQ ID NO: 13703 - DNA, 65 bp, Homo sapiens
aagagccccgatttgtcactttatacaaggaaataacaaagtctaaatgggtaaaaattagactt

SEQ ID NO: 13704 - DNA, 65 bp, Homo sapiens
gtcactttatacaaggaaataacaaagtctaaatgggtaaaaattagacttttagctattttccc

SEQ ID NO: 13705 - DNA, 66 bp, Homo sapiens
caaggaaataacaaagtctaaatgggtaaaaattagacttttagctattttccccaatacacacca

SEQ ID NO: 13706 - DNA, 65 bp, Homo sapiens
acaaagtctaaatgggtaaaaattagacttttagctattttccccaatacacaccaaactaatat

SEQ ID NO: 13707 - DNA, 65 bp, Homo sapiens
aaatgggtaaaaattagacttttagctattttccccaatacacaccaaactaatatttttatggc

SEQ ID NO: 13708 - DNA, 67 bp, Homo sapiens
aattagacttttagctattttccccaatacacaccaaactaatatttttatggcttcaagttttaca

SEQ ID NO: 13709 - DNA, 71 bp, Homo sapiens
tttccccaatacacaccaaactaatatttttatggcttcaagttttacaaatccaatgaagaaacatgatg

SEQ ID NO: 13710 - DNA, 72 bp, Homo sapiens
cacaccaaactaatatttttatggcttcaagttttacaaatccaatgaagaaacatgatgtaactacctgaa

SEQ ID NO: 13711 - DNA, 69 bp, Homo sapiens
ttttatggcttcaagttttacaaatccaatgaagaaacatgatgtaactacctgaaaggtatttaaaag

SEQ ID NO: 13712 - DNA, 69 bp, Homo sapiens
caagttttacaaatccaatgaagaaacatgatgtaactacctgaaaggtatttaaaagtattaatgaaa

SEQ ID NO: 13713 - DNA, 71 bp, Homo sapiens
aacatgatgtaactacctgaaaggtatttaaaagtattaatgaaaaagatctctagaaagcctgtattcag

SEQ ID NO: 13714 - DNA, 71 bp, Homo sapiens
gatgtaactacctgaaaggtatttaaaagtattaatgaaaaagatctctagaaagcctgtattcaggccca

SEQ ID NO: 13715 - DNA, 70 bp, Homo sapiens
cctgaaaggtatttaaaagtattaatgaaaaagatctctagaaagcctgtattcaggcccaatcaataaa

SEQ ID NO: 13716 - DNA, 68 bp, Homo sapiens
atttaaaagtattaatgaaaaagatctctagaaagcctgtattcaggcccaatcaataaaaaaggaaa

SEQ ID NO: 13717 - DNA, 70 bp, Homo sapiens
gaaaaaaaaaagtataaccagtggtgtgaataatacaagaaaaatttgcaatgttatgatattaaatcta

SEQ ID NO: 13718 - DNA, 73 bp, Homo sapiens
gtataaccagtggtgtgaataatacaagaaaaatttgcaatgttatgatattaaatctataaaatgttttgtg

SEQ ID NO: 13719 - DNA, 74 bp, Homo sapiens
ccagtggtgtgaataatacaagaaaaatttgcaatgttatgatattaaatctataaaatgttttgtgttccata

SEQ ID NO: 13720 - DNA, 71 bp, Homo sapiens
aatacaagaaaaatttgcaatgttatgatattaaatctataaaatgttttgtgttccataactgtttttca

SEQ ID NO: 13721 - DNA, 72 bp, Homo sapiens
aaatttgcaatgttatgatattaaatctataaaatgttttgtgttccataactgtttttcaaataactgctc

SEQ ID NO: 13722 - DNA, 74 bp, Homo sapiens
gcaatgttatgatattaaatctataaaatgttttgtgttccataactgtttttcaaataactgctctacgaaca

SEQ ID NO: 13723 - DNA, 71 bp, Homo sapiens
ctataaaatgttttgtgttccataactgtttttcaaataactgctctacgaacaaagaatctgaatgaaaa

SEQ ID NO: 13724 - DNA, 70 bp, Homo sapiens
actgtttttcaaataactgctctacgaacaaagaatctgaatgaaaaaagggtcttctctaaaccagcaa

SEQ ID NO: 13725 - DNA, 75 bp, Homo sapiens
atgaaaaaagggtcttctctaaaccagcaatttaaggctttgcgcttatgcaattgatcctgtcactctatagaa

SEQ ID NO: 13726 - DNA, 75 bp, Homo sapiens
aaaagggtcttctctaaaccagcaatttaaggctttgcgcttatgcaattgatcctgtcactctatagaagaata

SEQ ID NO: 13727 - DNA, 80 bp, Homo sapiens
tctaaaccagcaatttaaggctttgcgcttatgcaattgatcctgtcactctatagaagaatatacatgttatctggaaa

SEQ ID NO: 13728 - DNA, 78 bp, Homo sapiens
aatttaaggctttgcgcttatgcaattgatcctgtcactctatagaagaatatacatgttatctggaaacaggaattc

SEQ ID NO: 13729 - DNA, 79 bp, Homo sapiens
ttatgcaattgatcctgtcactctatagaagaatatacatgttatctggaaacaggaattccacattggtgttttagct

SEQ ID NO: 13730 - DNA, 76 bp, Homo sapiens
atcctgtcactctatagaagaatatacatgttatctggaaacaggaattccacattggtgttttagcttccttata

SEQ ID NO: 13731 - DNA, 74 bp, Homo sapiens
ctctatagaagaatatacatgttatctggaaacaggaattccacattggtgttttagcttccttatatttattg

SEQ ID NO: 13732 - DNA, 75 bp, Homo sapiens
tatacatgttatctggaaacaggaattccacattggtgttttagcttccttatatttattgtactgaacattaga

SEQ ID NO: 13733 - DNA, 71 bp, Homo sapiens
gttatctggaaacaggaattccacattggtgttttagcttccttatatttattgtactgaacattagaaaa

SEQ ID NO: 13734 - DNA, 74 bp, Homo sapiens
caggaattccacattggtgttttagcttccttatatttattgtactgaacattagaaaatatatctagagagtc

SEQ ID NO: 13735 - DNA, 74 bp, Homo sapiens
ccacattggtgttttagcttccttatatttattgtactgaacattagaaaatatatctagagagtctttcctca

SEQ ID NO: 13736 - DNA, 74 bp, Homo sapiens
ttagcttccttatatttattgtactgaacattagaaaatatatctagagagtctttcctcaaaatctaataatg

SEQ ID NO: 13737 - DNA, 73 bp, Homo sapiens
tatttattgtactgaacattagaaaatatatctagagagtctttcctcaaaatctaataatgttttaagagcc

SEQ ID NO: 13738 - DNA, 74 bp, Homo sapiens
gtactgaacattagaaaatatatctagagagtctttcctcaaaatctaataatgttttaagagcctccctagca

SEQ ID NO: 13739 - DNA, 70 bp, Homo sapiens
atctagagagtctttcctcaaaatctaataatgttttaagagcctccctagcattaagtgtaaactaccc

SEQ ID NO: 13740 - DNA, 68 bp, Homo sapiens
ctttcctcaaaatctaataatgttttaagagcctccctagcattaagtgtaaactaccctgggtttga

SEQ ID NO: 13741 - DNA, 68 bp, Homo sapiens
aatctaataatgttttaagagcctccctagcattaagtgtaaactaccctgggtttgactattttgcc

SEQ ID NO: 13742 - DNA, 68 bp, Homo sapiens
taagagcctccctagcattaagtgtaaactaccctgggtttgactattttgcctcctccttttaacag

SEQ ID NO: 13743 - DNA, 71 bp, Homo sapiens
cattaagtgtaaactaccctgggtttgactattttgcctcctccttttaacagggcacatcatcttatata

SEQ ID NO: 13744 - DNA, 70 bp, Homo sapiens
agtgtaaactaccctgggtttgactattttgcctcctccttttaacagggcacatcatcttatataatat

SEQ ID NO: 13745 - DNA, 73 bp, Homo sapiens
tgggtttgactattttgcctcctccttttaacagggcacatcatcttatataatattctctcaaactgttgtt

SEQ ID NO: 13746 - DNA, 81 bp, Homo sapiens
catcttatataatattctctcaaactgttgtttttcttgtgcctatagctatgacacattatggtatgatattgaatatgg

SEQ ID NO: 13747 - DNA, 79 bp, Homo sapiens
aatattctctcaaactgttgtttttcttgtgcctatagctatgacacattatggtatgatattgaatatggttgtggtc

SEQ ID NO: 13748 - DNA, 78 bp, Homo sapiens
caaactgttgtttttcttgtgcctatagctatgacacattatggtatgatattgaatatggttgtggtctcaaaagta

SEQ ID NO: 13749 - DNA, 76 bp, Homo sapiens
gttgtttttcttgtgcctatagctatgacacattatggtatgatattgaatatggttgtggtctcaaaagtaaaaa

SEQ ID NO: 13750 - DNA, 78 bp, Homo sapiens
cttgtgcctatagctatgacacattatggtatgatattgaatatggttgtggtctcaaaagtaaaaaatagttcaata

SEQ ID NO: 13751 - DNA, 74 bp, Homo sapiens
gctatgacacattatggtatgatattgaatatggttgtggtctcaaaagtaaaaaatagttcaataacccaaac

SEQ ID NO: 13752 - DNA, 65 bp, Homo sapiens
atatggttgtggtctcaaaagtaaaaaatagttcaataacccaaacctaatcaagaataaaaaaa

SEQ ID NO: 13753 - DNA, 65 bp, Homo sapiens
ggtctcaaaagtaaaaaatagttcaataacccaaacctaatcaagaataaaaaaatatactatta

SEQ ID NO: 13754 - DNA, 66 bp, Homo sapiens
aaatagttcaataacccaaacctaatcaagaataaaaaaatatactattaatcccgtgtatctttg

SEQ ID NO: 13755 - DNA, 69 bp, Homo sapiens
ttcaataacccaaacctaatcaagaataaaaaaatatactattaatcccgtgtatctttggattccatc

SEQ ID NO: 13756 - DNA, 69 bp, Homo sapiens
gaataaaaaaatatactattaatcccgtgtatctttggattccatctaattttaaatatagacagtagt

SEQ ID NO: 13757 - DNA, 72 bp, Homo sapiens
atatactattaatcccgtgtatctttggattccatctaattttaaatatagacagtagttcagggaacaaca

SEQ ID NO: 13758 - DNA, 70 bp, Homo sapiens
attaatcccgtgtatctttggattccatctaattttaaatatagacagtagttcagggaacaacaaccaa

SEQ ID NO: 13759 - DNA, 71 bp, Homo sapiens
gtgtatctttggattccatctaattttaaatatagacagtagttcagggaacaacaaccaaaaaattcaca

SEQ ID NO: 13760 - DNA, 65 bp, Homo sapiens
attttaaatatagacagtagttcagggaacaacaaccaaaaaattcacaaaattattaaaagctt

SEQ ID NO: 13761 - DNA, 67 bp, Homo sapiens
gacagtagttcagggaacaacaaccaaaaaattcacaaaattattaaaagctttatttacgattgga

SEQ ID NO: 13762 - DNA, 66 bp, Homo sapiens
agttcagggaacaacaaccaaaaaattcacaaaattattaaaagctttatttacgattggaatcat

SEQ ID NO: 13763 - DNA, 66 bp, Homo sapiens
acaacaaccaaaaaattcacaaaattattaaaagctttatttacgattggaatcattcaacaaaaa

SEQ ID NO: 13764 - DNA, 72 bp, Homo sapiens
ttcacaaaattattaaaagctttatttacgattggaatcattcaacaaaaaagcaaaagcaaatgagcctga

SEQ ID NO: 13765 - DNA, 70 bp, Homo sapiens
ttattaaaagctttatttacgattggaatcattcaacaaaaaagcaaaagcaaatgagcctgaaaaagga

SEQ ID NO: 13766 - DNA, 71 bp, Homo sapiens
agctttatttacgattggaatcattcaacaaaaaagcaaaagcaaatgagcctgaaaaaggaactaagctg

SEQ ID NO: 13767 - DNA, 74 bp, Homo sapiens
tacgattggaatcattcaacaaaaaagcaaaagcaaatgagcctgaaaaaggaactaagctgttgtctagaatg

SEQ ID NO: 13768 - DNA, 74 bp, Homo sapiens
ttcaacaaaaaagcaaaagcaaatgagcctgaaaaaggaactaagctgttgtctagaatgtcctcagaacattc

SEQ ID NO: 13769 - DNA, 76 bp, Homo sapiens
aagcaaaagcaaatgagcctgaaaaaggaactaagctgttgtctagaatgtcctcagaacattcgctacctcagta

SEQ ID NO: 13770 - DNA, 76 bp, Homo sapiens
aaagcaaatgagcctgaaaaaggaactaagctgttgtctagaatgtcctcagaacattcgctacctcagtagctaa

SEQ ID NO: 13771 - DNA, 77 bp, Homo sapiens
gaaaaaggaactaagctgttgtctagaatgtcctcagaacattcgctacctcagtagctaagctgcctttgcacctg

SEQ ID NO: 13772 - DNA, 82 bp, Homo sapiens
aactaagctgttgtctagaatgtcctcagaacattcgctacctcagtagctaagctgcctttgcacctggctggcatgacaa

SEQ ID NO: 13773 - DNA, 86 bp, Homo sapiens
tgtctagaatgtcctcagaacattcgctacctcagtagctaagctgcctttgcacctggctggcatgacaacagtggctcaacata

SEQ ID NO: 13774 - DNA, 86 bp, Homo sapiens
aatgtcctcagaacattcgctacctcagtagctaagctgcctttgcacctggctggcatgacaacagtggctcaacatacacagca

SEQ ID NO: 13775 - DNA, 85 bp, Homo sapiens
aacattcgctacctcagtagctaagctgcctttgcacctggctggcatgacaacagtggctcaacatacacagcagttgcactaa

SEQ ID NO: 13776 - DNA, 87 bp, Homo sapiens
tcagtagctaagctgcctttgcacctggctggcatgacaacagtggctcaacatacacagcagttgcactaacagcagcacaaattt

SEQ ID NO: 13777 - DNA, 85 bp, Homo sapiens
agctaagctgcctttgcacctggctggcatgacaacagtggctcaacatacacagcagttgcactaacagcagcacaaattttcc

SEQ ID NO: 13778 - DNA, 82 bp, Homo sapiens
ctttgcacctggctggcatgacaacagtggctcaacatacacagcagttgcactaacagcagcacaaattttccccttcaaa

SEQ ID NO: 13779 - DNA, 82 bp, Homo sapiens
tggcatgacaacagtggctcaacatacacagcagttgcactaacagcagcacaaattttccccttcaaacttgcccagaata

SEQ ID NO: 13780 - DNA, 77 bp, Homo sapiens
acaacagtggctcaacatacacagcagttgcactaacagcagcacaaattttccccttcaaacttgcccagaataaa

SEQ ID NO: 13781 - DNA, 76 bp, Homo sapiens
ctcaacatacacagcagttgcactaacagcagcacaaattttccccttcaaacttgcccagaataaagcaagaaaa

SEQ ID NO: 13782 - DNA, 69 bp, Homo sapiens
taacagcagcacaaattttccccttcaaacttgcccagaataaagcaagaaaacaaggggagggtataa

SEQ ID NO: 13783 - DNA, 66 bp, Homo sapiens
acaaattttccccttcaaacttgcccagaataaagcaagaaaacaaggggagggtataaactctgc

SEQ ID NO: 13784 - DNA, 68 bp, Homo sapiens
ccttcaaacttgcccagaataaagcaagaaaacaaggggagggtataaactctgccaaagtaaatgta

SEQ ID NO: 13785 - DNA, 67 bp, Homo sapiens
aaacttgcccagaataaagcaagaaaacaaggggagggtataaactctgccaaagtaaatgtattta

SEQ ID NO: 13786 - DNA, 69 bp, Homo sapiens
aaagcaagaaaacaaggggagggtataaactctgccaaagtaaatgtatttaaatactgcatggaattg

SEQ ID NO: 13787 - DNA, 70 bp, Homo sapiens
gaaaacaaggggagggtataaactctgccaaagtaaatgtatttaaatactgcatggaattgttaacagc

SEQ ID NO: 13788 - DNA, 70 bp, Homo sapiens
gggtataaactctgccaaagtaaatgtatttaaatactgcatggaattgttaacagcctgaaccttttcc

SEQ ID NO: 13789 - DNA, 70 bp, Homo sapiens
aaactctgccaaagtaaatgtatttaaatactgcatggaattgttaacagcctgaaccttttcccctcat

SEQ ID NO: 13790 - DNA, 73 bp, Homo sapiens
gtaaatgtatttaaatactgcatggaattgttaacagcctgaaccttttcccctcatttttgatagttgcaga

SEQ ID NO: 13791 - DNA, 75 bp, Homo sapiens
ttaaatactgcatggaattgttaacagcctgaaccttttcccctcatttttgatagttgcagattgatgtagtaa

SEQ ID NO: 13792 - DNA, 74 bp, Homo sapiens
atggaattgttaacagcctgaaccttttcccctcatttttgatagttgcagattgatgtagtaactgtcattta

SEQ ID NO: 13793 - DNA, 74 bp, Homo sapiens
attgttaacagcctgaaccttttcccctcatttttgatagttgcagattgatgtagtaactgtcatttagcaaa

SEQ ID NO: 13794 - DNA, 77 bp, Homo sapiens
aaccttttcccctcatttttgatagttgcagattgatgtagtaactgtcatttagcaaatgccgaatgcatgacgaa

SEQ ID NO: 13795 - DNA, 81 bp, Homo sapiens
ccctcatttttgatagttgcagattgatgtagtaactgtcatttagcaaatgccgaatgcatgacgaagaaatcaggtggc

SEQ ID NO: 13796 - DNA, 80 bp, Homo sapiens
ttgatagttgcagattgatgtagtaactgtcatttagcaaatgccgaatgcatgacgaagaaatcaggtggccttaaaaa

SEQ ID NO: 13797 - DNA, 79 bp, Homo sapiens
ttgcagattgatgtagtaactgtcatttagcaaatgccgaatgcatgacgaagaaatcaggtggccttaaaaatccaaa

SEQ ID NO: 13798 - DNA, 77 bp, Homo sapiens
tagtaactgtcatttagcaaatgccgaatgcatgacgaagaaatcaggtggccttaaaaatccaaacacgaatgata

SEQ ID NO: 13799 - DNA, 76 bp, Homo sapiens
aaatgccgaatgcatgacgaagaaatcaggtggccttaaaaatccaaacacgaatgatactgatgaatgttcttgg

SEQ ID NO: 13800 - DNA, 78 bp, Homo sapiens
atgcatgacgaagaaatcaggtggccttaaaaatccaaacacgaatgatactgatgaatgttcttggtatatcttcaa

SEQ ID NO: 13801 - DNA, 73 bp, Homo sapiens
aagaaatcaggtggccttaaaaatccaaacacgaatgatactgatgaatgttcttggtatatcttcaaggact

SEQ ID NO: 13802 - DNA, 75 bp, Homo sapiens
ccttaaaaatccaaacacgaatgatactgatgaatgttcttggtatatcttcaaggacttctttcatgacttgac

SEQ ID NO: 13803 - DNA, 75 bp, Homo sapiens
aaatccaaacacgaatgatactgatgaatgttcttggtatatcttcaaggacttctttcatgacttgacttttct

SEQ ID NO: 13804 - DNA, 76 bp, Homo sapiens
acgaatgatactgatgaatgttcttggtatatcttcaaggacttctttcatgacttgacttttctttgtctaagga

SEQ ID NO: 13805 - DNA, 77 bp, Homo sapiens
atgaatgttcttggtatatcttcaaggacttctttcatgacttgacttttctttgtctaaggatagctccagcatta

SEQ ID NO: 13806 - DNA, 77 bp, Homo sapiens
ttcttggtatatcttcaaggacttctttcatgacttgacttttctttgtctaaggatagctccagcattaccgagca

SEQ ID NO: 13807 - DNA, 77 bp, Homo sapiens
atcttcaaggacttctttcatgacttgacttttctttgtctaaggatagctccagcattaccgagcacctgaagcaa

SEQ ID NO: 13808 - DNA, 77 bp, Homo sapiens
tttctttgtctaaggatagctccagcattaccgagcacctgaagcaaaggtaaagcagctagcaatgttccaaatat

SEQ ID NO: 13809 - DNA, 82 bp, Homo sapiens
atagctccagcattaccgagcacctgaagcaaaggtaaagcagctagcaatgttccaaatattcaatcactctagagataga

SEQ ID NO: 13810 - DNA, 80 bp, Homo sapiens
agcattaccgagcacctgaagcaaaggtaaagcagctagcaatgttccaaatattcaatcactctagagatagatttctg

SEQ ID NO: 13811 - DNA, 76 bp, Homo sapiens
aaatattcaatcactctagagatagatttctggccagttgttccaacagcacactgaaagcagggtgaaggggaaa

SEQ ID NO: 13812 - DNA, 75 bp, Homo sapiens
atcactctagagatagatttctggccagttgttccaacagcacactgaaagcagggtgaaggggaaaggaagtaa

SEQ ID NO: 13813 - DNA, 75 bp, Homo sapiens
tgtcaatgtattataaatttaaaatcatataagctgtaataaaagctacttacagtgagattcataaaactcaaa

SEQ ID NO: 13814 - DNA, 68 bp, Homo sapiens
aaatttaaaatcatataagctgtaataaaagctacttacagtgagattcataaaactcaaaaattttt

SEQ ID NO: 13815 - DNA, 76 bp, Homo sapiens
aaatcatataagctgtaataaaagctacttacagtgagattcataaaactcaaaaattttttgagcatctctgtca

SEQ ID NO: 13816 - DNA, 75 bp, Homo sapiens
agctgtaataaaagctacttacagtgagattcataaaactcaaaaattttttgagcatctctgtcattattgaaa

SEQ ID NO: 13817 - DNA, 77 bp, Homo sapiens
gctacttacagtgagattcataaaactcaaaaattttttgagcatctctgtcattattgaaaagtctccttctggca

SEQ ID NO: 13818 - DNA, 76 bp, Homo sapiens
gtgagattcataaaactcaaaaattttttgagcatctctgtcattattgaaaagtctccttctggcagatattccc

SEQ ID NO: 13819 - DNA, 75 bp, Homo sapiens
ataaaactcaaaaattttttgagcatctctgtcattattgaaaagtctccttctggcagatattcccgcacagtg

SEQ ID NO: 13820 - DNA, 76 bp, Homo sapiens
aaaaattttttgagcatctctgtcattattgaaaagtctccttctggcagatattcccgcacagtggttacattga

SEQ ID NO: 13821 - DNA, 82 bp, Homo sapiens
tttgagcatctctgtcattattgaaaagtctccttctggcagatattcccgcacagtggttacattgatctgaggaaacaga

SEQ ID NO: 13822 - DNA, 79 bp, Homo sapiens
tcattattgaaaagtctccttctggcagatattcccgcacagtggttacattgatctgaggaaacagagcaagaaatat

SEQ ID NO: 13823 - DNA, 79 bp, Homo sapiens
ttgaaaagtctccttctggcagatattcccgcacagtggttacattgatctgaggaaacagagcaagaaatattggtca

SEQ ID NO: 13824 - DNA, 77 bp, Homo sapiens
tcgttacattggaatctttcaaagatacataaaacatcactgaactatgtacttactggactttcctggcagagaca

SEQ ID NO: 13825 - DNA, 75 bp, Homo sapiens
atctttcaaagatacataaaacatcactgaactatgtacttactggactttcctggcagagacacccaagaagta

SEQ ID NO: 13826 - DNA, 77 bp, Homo sapiens
aagatacataaaacatcactgaactatgtacttactggactttcctggcagagacacccaagaagtagtgctgtgta

SEQ ID NO: 13827 - DNA, 76 bp, Homo sapiens
aaaacatcactgaactatgtacttactggactttcctggcagagacacccaagaagtagtgctgtgtaggaggcca

SEQ ID NO: 13828 - DNA, 77 bp, Homo sapiens
aactatgtacttactggactttcctggcagagacacccaagaagtagtgctgtgtaggaggccacaatgcaatcctc

SEQ ID NO: 13829 - DNA, 78 bp, Homo sapiens
tacttactggactttcctggcagagacacccaagaagtagtgctgtgtaggaggccacaatgcaatcctccatgtgtt

SEQ ID NO: 13830 - DNA, 82 bp, Homo sapiens
tttcctggcagagacacccaagaagtagtgctgtgtaggaggccacaatgcaatcctccatgtgtttgccggcatgctgaag

SEQ ID NO: 13831 - DNA, 81 bp, Homo sapiens
acacccaagaagtagtgctgtgtaggaggccacaatgcaatcctccatgtgtttgccggcatgctgaagggctgagagaat

SEQ ID NO: 13832 - DNA, 81 bp, Homo sapiens
aagtagtgctgtgtaggaggccacaatgcaatcctccatgtgtttgccggcatgctgaagggctgagagaattgaagtaaa

SEQ ID NO: 13833 - DNA, 81 bp, Homo sapiens
tgtgtaggaggccacaatgcaatcctccatgtgtttgccggcatgctgaagggctgagagaattgaagtaaagaattgtaa

SEQ ID NO: 13834 - DNA, 80 bp, Homo sapiens
cacaatgcaatcctccatgtgtttgccggcatgctgaagggctgagagaattgaagtaaagaattgtaacagtatattaa

SEQ ID NO: 13835 - DNA, 76 bp, Homo sapiens
aatcctccatgtgtttgccggcatgctgaagggctgagagaattgaagtaaagaattgtaacagtatattaattaa

SEQ ID NO: 13836 - DNA, 71 bp, Homo sapiens
caaaccactatcttcaatttaaatacaccattcaaagtaaatatacctttattgaggtcaagttcttcatc

SEQ ID NO: 13837 - DNA, 72 bp, Homo sapiens
cactatcttcaatttaaatacaccattcaaagtaaatatacctttattgaggtcaagttcttcatcctcctc

SEQ ID NO: 13838 - DNA, 69 bp, Homo sapiens
aatttaaatacaccattcaaagtaaatatacctttattgaggtcaagttcttcatcctcctcctccttc

SEQ ID NO: 13839 - DNA, 73 bp, Homo sapiens
cctcctcctccttcttatgtttctcttctgtaccatcagtcttttcagttgacacccactgtatttctccact

SEQ ID NO: 13840 - DNA, 73 bp, Homo sapiens
ctccttcttatgtttctcttctgtaccatcagtcttttcagttgacacccactgtatttctccacttgtttct

SEQ ID NO: 13841 - DNA, 77 bp, Homo sapiens
tatgtttctcttctgtaccatcagtcttttcagttgacacccactgtatttctccacttgtttcttgccactctcca

SEQ ID NO: 13842 - DNA, 79 bp, Homo sapiens
ttctgtaccatcagtcttttcagttgacacccactgtatttctccacttgtttcttgccactctccactcttatcatgc

SEQ ID NO: 13843 - DNA, 77 bp, Homo sapiens
agtcttttcagttgacacccactgtatttctccacttgtttcttgccactctccactcttatcatgctgagtggtgg

SEQ ID NO: 13844 - DNA, 82 bp, Homo sapiens
ttgacacccactgtatttctccacttgtttcttgccactctccactcttatcatgctgagtggtgggagcatctttgatcaa

SEQ ID NO: 13845 - DNA, 82 bp, Homo sapiens
tgtatttctccacttgtttcttgccactctccactcttatcatgctgagtggtgggagcatctttgatcaactcatctgttt

SEQ ID NO: 13846 - DNA, 81 bp, Homo sapiens
tctccacttgtttcttgccactctccactcttatcatgctgagtggtgggagcatctttgatcaactcatctgttttactt

SEQ ID NO: 13847 - DNA, 83 bp, Homo sapiens
tttcttgccactctccactcttatcatgctgagtggtgggagcatctttgatcaactcatctgttttactttctgctagctgg

SEQ ID NO: 13848 - DNA, 85 bp, Homo sapiens
tctccactcttatcatgctgagtggtgggagcatctttgatcaactcatctgttttactttctgctagctgggctgcccgctctc

SEQ ID NO: 13849 - DNA, 83 bp, Homo sapiens
atgctgagtggtgggagcatctttgatcaactcatctgttttactttctgctagctgggctgcccgctctcgctcaaggaata

SEQ ID NO: 13850 - DNA, 82 bp, Homo sapiens
gtgggagcatctttgatcaactcatctgttttactttctgctagctgggctgcccgctctcgctcaaggaatagctgataaa

SEQ ID NO: 13851 - DNA, 79 bp, Homo sapiens
atctttgatcaactcatctgttttactttctgctagctgggctgcccgctctcgctcaaggaatagctgataaaaatta

SEQ ID NO: 13852 - DNA, 76 bp, Homo sapiens
atcaactcatctgttttactttctgctagctgggctgcccgctctcgctcaaggaatagctgataaaaattatttt

SEQ ID NO: 13853 - DNA, 76 bp, Homo sapiens
tttactttctgctagctgggctgcccgctctcgctcaaggaatagctgataaaaattatttttgaagatcattaaa

SEQ ID NO: 13854 - DNA, 77 bp, Homo sapiens
ttctgctagctgggctgcccgctctcgctcaaggaatagctgataaaaattatttttgaagatcattaaaaagagat

SEQ ID NO: 13855 - DNA, 73 bp, Homo sapiens
acaaatccaacaaactgcagttatgagtttgtttttaaagtggttgcttacctgcactaaagcctggacagca

SEQ ID NO: 13856 - DNA, 74 bp, Homo sapiens
aaactgcagttatgagtttgtttttaaagtggttgcttacctgcactaaagcctggacagcatgaacttgtcca

SEQ ID NO: 13857 - DNA, 71 bp, Homo sapiens
agtttgtttttaaagtggttgcttacctgcactaaagcctggacagcatgaacttgtccacctatccttaa

SEQ ID NO: 13858 - DNA, 74 bp, Homo sapiens
tttttaaagtggttgcttacctgcactaaagcctggacagcatgaacttgtccacctatccttaaactatcatc

SEQ ID NO: 13859 - DNA, 77 bp, Homo sapiens
ttgcttacctgcactaaagcctggacagcatgaacttgtccacctatccttaaactatcatccccttctccactaca

SEQ ID NO: 13860 - DNA, 75 bp, Homo sapiens
actaaagcctggacagcatgaacttgtccacctatccttaaactatcatccccttctccactacagatggaagaa

SEQ ID NO: 13861 - DNA, 76 bp, Homo sapiens
cctggacagcatgaacttgtccacctatccttaaactatcatccccttctccactacagatggaagaatcaaaaga

SEQ ID NO: 13862 - DNA, 73 bp, Homo sapiens
aacttgtccacctatccttaaactatcatccccttctccactacagatggaagaatcaaaagagcacgatgtt

SEQ ID NO: 13863 - DNA, 76 bp, Homo sapiens
acctatccttaaactatcatccccttctccactacagatggaagaatcaaaagagcacgatgtttccatgttgaca

SEQ ID NO: 13864 - DNA, 76 bp, Homo sapiens
ccttaaactatcatccccttctccactacagatggaagaatcaaaagagcacgatgtttccatgttgacaagacag

SEQ ID NO: 13865 - DNA, 79 bp, Homo sapiens
cccttctccactacagatggaagaatcaaaagagcacgatgtttccatgttgacaagacagtgccgattccgagcacta

SEQ ID NO: 13866 - DNA, 80 bp, Homo sapiens
actacagatggaagaatcaaaagagcacgatgtttccatgttgacaagacagtgccgattccgagcactatactccacta

SEQ ID NO: 13867 - DNA, 81 bp, Homo sapiens
aagaatcaaaagagcacgatgtttccatgttgacaagacagtgccgattccgagcactatactccactagatttatcagca

SEQ ID NO: 13868 - DNA, 80 bp, Homo sapiens
aaaagagcacgatgtttccatgttgacaagacagtgccgattccgagcactatactccactagatttatcagcagaccta

SEQ ID NO: 13869 - DNA, 79 bp, Homo sapiens
tgtttccatgttgacaagacagtgccgattccgagcactatactccactagatttatcagcagacctaagcccttcaaa

SEQ ID NO: 13870 - DNA, 76 bp, Homo sapiens
atgttgacaagacagtgccgattccgagcactatactccactagatttatcagcagacctaagcccttcaaaaagt

SEQ ID NO: 13871 - DNA, 73 bp, Homo sapiens
agacagtgccgattccgagcactatactccactagatttatcagcagacctaagcccttcaaaaagtttaaaa

SEQ ID NO: 13872 - DNA, 73 bp, Homo sapiens
attccgagcactatactccactagatttatcagcagacctaagcccttcaaaaagtttaaaagacacatatta

SEQ ID NO: 13873 - DNA, 79 bp, Homo sapiens
accttattagatatgatactcatttctgaaaaagtcatttcaacttaccagcactcgaatatcaaatctctgctcctga

SEQ ID NO: 13874 - DNA, 80 bp, Homo sapiens
tagatatgatactcatttctgaaaaagtcatttcaacttaccagcactcgaatatcaaatctctgctcctgaggtaggta

SEQ ID NO: 13875 - DNA, 74 bp, Homo sapiens
atttctgaaaaagtcatttcaacttaccagcactcgaatatcaaatctctgctcctgaggtaggtactttggaa

SEQ ID NO: 13876 - DNA, 73 bp, Homo sapiens
aaaaagtcatttcaacttaccagcactcgaatatcaaatctctgctcctgaggtaggtactttggaacctgaa

SEQ ID NO: 13877 - DNA, 78 bp, Homo sapiens
tttcaacttaccagcactcgaatatcaaatctctgctcctgaggtaggtactttggaacctgaagcacacagttcagc

SEQ ID NO: 13878 - DNA, 80 bp, Homo sapiens
actcgaatatcaaatctctgctcctgaggtaggtactttggaacctgaagcacacagttcagcgctgtgcctatgagacc

SEQ ID NO: 13879 - DNA, 79 bp, Homo sapiens
aatatcaaatctctgctcctgaggtaggtactttggaacctgaagcacacagttcagcgctgtgcctatgagaccgtcc

SEQ ID NO: 13880 - DNA, 77 bp, Homo sapiens
ctcctgaggtaggtactttggaacctgaagcacacagttcagcgctgtgcctatgagaccgtcctgctctcctgttt

SEQ ID NO: 13881 - DNA, 77 bp, Homo sapiens
aggtaggtactttggaacctgaagcacacagttcagcgctgtgcctatgagaccgtcctgctctcctgttttggtgc

SEQ ID NO: 13882 - DNA, 81 bp, Homo sapiens
gaacctgaagcacacagttcagcgctgtgcctatgagaccgtcctgctctcctgttttggtgctgccccactctgaaataa

SEQ ID NO: 13883 - DNA, 80 bp, Homo sapiens
aagcacacagttcagcgctgtgcctatgagaccgtcctgctctcctgttttggtgctgccccactctgaaataagaaatg

SEQ ID NO: 13884 - DNA, 78 bp, Homo sapiens
agcgctgtgcctatgagaccgtcctgctctcctgttttggtgctgccccactctgaaataagaaatggatacaggaaa

SEQ ID NO: 13885 - DNA, 75 bp, Homo sapiens
ctatgagaccgtcctgctctcctgttttggtgctgccccactctgaaataagaaatggatacaggaaaatggtta

SEQ ID NO: 13886 - DNA, 68 bp, Homo sapiens
gagaaaaaaatggaaaaaaatcttaccattatcattagttaaattaagcaacaccccgatgatggccc

SEQ ID NO: 13887 - DNA, 73 bp, Homo sapiens
aatggaaaaaaatcttaccattatcattagttaaattaagcaacaccccgatgatggccctcatgcagtcctc

SEQ ID NO: 13888 - DNA, 74 bp, Homo sapiens
aaaaatcttaccattatcattagttaaattaagcaacaccccgatgatggccctcatgcagtcctccactgctt

SEQ ID NO: 13889 - DNA, 78 bp, Homo sapiens
tatcattagttaaattaagcaacaccccgatgatggccctcatgcagtcctccactgctttgcctacatggttagtta

SEQ ID NO: 13890 - DNA, 77 bp, Homo sapiens
tagttaaattaagcaacaccccgatgatggccctcatgcagtcctccactgctttgcctacatggttagttacattc

SEQ ID NO: 13891 - DNA, 80 bp, Homo sapiens
aagcaacaccccgatgatggccctcatgcagtcctccactgctttgcctacatggttagttacattctggtgaggcagag

SEQ ID NO: 13892 - DNA, 83 bp, Homo sapiens
atgatggccctcatgcagtcctccactgctttgcctacatggttagttacattctggtgaggcagaggcttactgtcagctaa

SEQ ID NO: 13893 - DNA, 84 bp, Homo sapiens
atgcagtcctccactgctttgcctacatggttagttacattctggtgaggcagaggcttactgtcagctaagcatatgctgtcc

SEQ ID NO: 13894 - DNA, 85 bp, Homo sapiens
gtcctccactgctttgcctacatggttagttacattctggtgaggcagaggcttactgtcagctaagcatatgctgtcctcagca

SEQ ID NO: 13895 - DNA, 82 bp, Homo sapiens
tttgcctacatggttagttacattctggtgaggcagaggcttactgtcagctaagcatatgctgtcctcagcacggttgtac

SEQ ID NO: 13896 - DNA, 84 bp, Homo sapiens
ttagttacattctggtgaggcagaggcttactgtcagctaagcatatgctgtcctcagcacggttgtactgctgaatcagttct

SEQ ID NO: 13897 - DNA, 88 bp, Homo sapiens
tacattctggtgaggcagaggcttactgtcagctaagcatatgctgtcctcagcacggttgtactgctgaatcagttcttcacaatgc

SEQ ID NO: 13898 - DNA, 87 bp, Homo sapiens
cagaggcttactgtcagctaagcatatgctgtcctcagcacggttgtactgctgaatcagttcttcacaatgctgtaatgctcttaa

SEQ ID NO: 13899 - DNA, 85 bp, Homo sapiens
ttactgtcagctaagcatatgctgtcctcagcacggttgtactgctgaatcagttcttcacaatgctgtaatgctcttaaaagga

SEQ ID NO: 13900 - DNA, 82 bp, Homo sapiens
agctaagcatatgctgtcctcagcacggttgtactgctgaatcagttcttcacaatgctgtaatgctcttaaaaggaaataa

SEQ ID NO: 13901 - DNA, 79 bp, Homo sapiens
tgtcctcagcacggttgtactgctgaatcagttcttcacaatgctgtaatgctcttaaaaggaaataaaatatagacta

SEQ ID NO: 13902 - DNA, 78 bp, Homo sapiens
cagcacggttgtactgctgaatcagttcttcacaatgctgtaatgctcttaaaaggaaataaaatatagactattata

SEQ ID NO: 13903 - DNA, 66 bp, Homo sapiens
tccaaatgtttaaaataagtaacaatgttagttgttaactaataaacaaaaaacttacttagctga

SEQ ID NO: 13904 - DNA, 66 bp, Homo sapiens
gtttaaaataagtaacaatgttagttgttaactaataaacaaaaaacttacttagctgatgaaaca

SEQ ID NO: 13905 - DNA, 67 bp, Homo sapiens
gtaacaatgttagttgttaactaataaacaaaaaacttacttagctgatgaaacaataagttgggaa

SEQ ID NO: 13906 - DNA, 71 bp, Homo sapiens
gttgttaactaataaacaaaaaacttacttagctgatgaaacaataagttgggaatctttatatgctatca

SEQ ID NO: 13907 - DNA, 72 bp, Homo sapiens
aataaacaaaaaacttacttagctgatgaaacaataagttgggaatctttatatgctatcaagtagctttga

SEQ ID NO: 13908 - DNA, 72 bp, Homo sapiens
aaacttacttagctgatgaaacaataagttgggaatctttatatgctatcaagtagctttgattttcgggat

SEQ ID NO: 13909 - DNA, 76 bp, Homo sapiens
acttagctgatgaaacaataagttgggaatctttatatgctatcaagtagctttgattttcgggattatgcacagt

SEQ ID NO: 13910 - DNA, 73 bp, Homo sapiens
gaaacaataagttgggaatctttatatgctatcaagtagctttgattttcgggattatgcacagttacctaaa

SEQ ID NO: 13911 - DNA, 72 bp, Homo sapiens
agttgggaatctttatatgctatcaagtagctttgattttcgggattatgcacagttacctaaaaaggaaga

SEQ ID NO: 13912 - DNA, 74 bp, Homo sapiens
tctttatatgctatcaagtagctttgattttcgggattatgcacagttacctaaaaaggaagaatatgaaataa

SEQ ID NO: 13913 - DNA, 73 bp, Homo sapiens
caagtagctttgattttcgggattatgcacagttacctaaaaaggaagaatatgaaataattgtggcaatcca

SEQ ID NO: 13914 - DNA, 71 bp, Homo sapiens
gctttgattttcgggattatgcacagttacctaaaaaggaagaatatgaaataattgtggcaatccaaaac

SEQ ID NO: 13915 - DNA, 72 bp, Homo sapiens
cacaattaagactgaataatttttgccaaatagtcatccatacttacactttctaaaactcgtaaacatctc

SEQ ID NO: 13916 - DNA, 73 bp, Homo sapiens
agactgaataatttttgccaaatagtcatccatacttacactttctaaaactcgtaaacatctctctgctccc

SEQ ID NO: 13917 - DNA, 74 bp, Homo sapiens
ataatttttgccaaatagtcatccatacttacactttctaaaactcgtaaacatctctctgctccccatagtga

SEQ ID NO: 13918 - DNA, 73 bp, Homo sapiens
aaatagtcatccatacttacactttctaaaactcgtaaacatctctctgctccccatagtgaggctaccagtt

SEQ ID NO: 13919 - DNA, 75 bp, Homo sapiens
atccatacttacactttctaaaactcgtaaacatctctctgctccccatagtgaggctaccagtttctcttcatc

SEQ ID NO: 13920 - DNA, 75 bp, Homo sapiens
actttctaaaactcgtaaacatctctctgctccccatagtgaggctaccagtttctcttcatcctcatctctact

SEQ ID NO: 13921 - DNA, 78 bp, Homo sapiens
aaactcgtaaacatctctctgctccccatagtgaggctaccagtttctcttcatcctcatctctacttaaatgatcca

SEQ ID NO: 13922 - DNA, 79 bp, Homo sapiens
tctctgctccccatagtgaggctaccagtttctcttcatcctcatctctacttaaatgatccacacattcttttactag

SEQ ID NO: 13923 - DNA, 76 bp, Homo sapiens
ccatagtgaggctaccagtttctcttcatcctcatctctacttaaatgatccacacattcttttactaggtgaaaa

SEQ ID NO: 13924 - DNA, 74 bp, Homo sapiens
gctaccagtttctcttcatcctcatctctacttaaatgatccacacattcttttactaggtgaaaagaaacaaa

SEQ ID NO: 13925 - DNA, 73 bp, Homo sapiens
cagtttctcttcatcctcatctctacttaaatgatccacacattcttttactaggtgaaaagaaacaaacgta

SEQ ID NO: 13926 - DNA, 71 bp, Homo sapiens
catcctcatctctacttaaatgatccacacattcttttactaggtgaaaagaaacaaacgtaagttagtat

SEQ ID NO: 13927 - DNA, 75 bp, Homo sapiens
tcaggctttaaataatatataaaaacattctaaatgtaaatatcatacctttatctacaatatgatccagaccac

SEQ ID NO: 13928 - DNA, 73 bp, Homo sapiens
taatatataaaaacattctaaatgtaaatatcatacctttatctacaatatgatccagaccacccaaaagccg

SEQ ID NO: 13929 - DNA, 72 bp, Homo sapiens
aaacattctaaatgtaaatatcatacctttatctacaatatgatccagaccacccaaaagccggagttcttc

SEQ ID NO: 13930 - DNA, 71 bp, Homo sapiens
aatgtaaatatcatacctttatctacaatatgatccagaccacccaaaagccggagttcttctttaaacca

SEQ ID NO: 13931 - DNA, 71 bp, Homo sapiens
aaatatcatacctttatctacaatatgatccagaccacccaaaagccggagttcttctttaaaccagtctc

SEQ ID NO: 13932 - DNA, 72 bp, Homo sapiens
ttatctacaatatgatccagaccacccaaaagccggagttcttctttaaaccagtctcctgctcgtttagaa

SEQ ID NO: 13933 - DNA, 69 bp, Homo sapiens
aatatgatccagaccacccaaaagccggagttcttctttaaaccagtctcctgctcgtttagaagtaag

SEQ ID NO: 13934 - DNA, 66 bp, Homo sapiens
accacccaaaagccggagttcttctttaaaccagtctcctgctcgtttagaagtaagggataataa

SEQ ID NO: 13935 - DNA, 69 bp, Homo sapiens
aaaagccggagttcttctttaaaccagtctcctgctcgtttagaagtaagggataataatgtctccata

SEQ ID NO: 13936 - DNA, 73 bp, Homo sapiens
tctttaaaccagtctcctgctcgtttagaagtaagggataataatgtctccatagctaaatgcccagtctaaa

SEQ ID NO: 13937 - DNA, 71 bp, Homo sapiens
aaaccagtctcctgctcgtttagaagtaagggataataatgtctccatagctaaatgcccagtctaaaaac

SEQ ID NO: 13938 - DNA, 75 bp, Homo sapiens
tcgtttagaagtaagggataataatgtctccatagctaaatgcccagtctaaaaaccagaagcatcattaatgaa

SEQ ID NO: 13939 - DNA, 76 bp, Homo sapiens
agaagtaagggataataatgtctccatagctaaatgcccagtctaaaaaccagaagcatcattaatgaatatcaac

SEQ ID NO: 13940 - DNA, 70 bp, Homo sapiens
ctttctgaaagtaattctcatcttagaaggaaggaagaaggaacccaccgttatattttctagatcaaga

SEQ ID NO: 13941 - DNA, 70 bp, Homo sapiens
aaagtaattctcatcttagaaggaaggaagaaggaacccaccgttatattttctagatcaagatgcttgt

SEQ ID NO: 13942 - DNA, 72 bp, Homo sapiens
atcttagaaggaaggaagaaggaacccaccgttatattttctagatcaagatgcttgttgtgtacagtttca

SEQ ID NO: 13943 - DNA, 72 bp, Homo sapiens
aaggaagaaggaacccaccgttatattttctagatcaagatgcttgttgtgtacagtttcacagagccttcg

SEQ ID NO: 13944 - DNA, 71 bp, Homo sapiens
aaggaacccaccgttatattttctagatcaagatgcttgttgtgtacagtttcacagagccttcggatttt

SEQ ID NO: 13945 - DNA, 71 bp, Homo sapiens
ccgttatattttctagatcaagatgcttgttgtgtacagtttcacagagccttcggattttttctttaatt

SEQ ID NO: 13946 - DNA, 74 bp, Homo sapiens
ttctagatcaagatgcttgttgtgtacagtttcacagagccttcggattttttctttaattttgttcatgtctt

SEQ ID NO: 13947 - DNA, 73 bp, Homo sapiens
gatgcttgttgtgtacagtttcacagagccttcggattttttctttaattttgttcatgtctttttcattcag

SEQ ID NO: 13948 - DNA, 75 bp, Homo sapiens
tacagtttcacagagccttcggattttttctttaattttgttcatgtctttttcattcagtagcttggctgatga

SEQ ID NO: 13949 - DNA, 74 bp, Homo sapiens
agagccttcggattttttctttaattttgttcatgtctttttcattcagtagcttggctgatgaagcatcttgt

SEQ ID NO: 13950 - DNA, 75 bp, Homo sapiens
tcggattttttctttaattttgttcatgtctttttcattcagtagcttggctgatgaagcatcttgttccagttc

SEQ ID NO: 13951 - DNA, 77 bp, Homo sapiens
ttaattttgttcatgtctttttcattcagtagcttggctgatgaagcatcttgttccagttccaaaagtcgaatcat

SEQ ID NO: 13952 - DNA, 81 bp, Homo sapiens
ttcatgtctttttcattcagtagcttggctgatgaagcatcttgttccagttccaaaagtcgaatcattagatctaagcta

SEQ ID NO: 13953 - DNA, 82 bp, Homo sapiens
ttttcattcagtagcttggctgatgaagcatcttgttccagttccaaaagtcgaatcattagatctaagctagctctatcaa

SEQ ID NO: 13954 - DNA, 84 bp, Homo sapiens
tagcttggctgatgaagcatcttgttccagttccaaaagtcgaatcattagatctaagctagctctatcaagatccatgttcaa

SEQ ID NO: 13955 - DNA, 81 bp, Homo sapiens
atgaagcatcttgttccagttccaaaagtcgaatcattagatctaagctagctctatcaagatccatgttcaaacgatctc

SEQ ID NO: 13956 - DNA, 80 bp, Homo sapiens
ttgttccagttccaaaagtcgaatcattagatctaagctagctctatcaagatccatgttcaaacgatctctactcagta

SEQ ID NO: 13957 - DNA, 82 bp, Homo sapiens
agttccaaaagtcgaatcattagatctaagctagctctatcaagatccatgttcaaacgatctctactcagtatatacatga

SEQ ID NO: 13958 - DNA, 85 bp, Homo sapiens
aagtcgaatcattagatctaagctagctctatcaagatccatgttcaaacgatctctactcagtatatacatgagggcagctgta

SEQ ID NO: 13959 - DNA, 85 bp, Homo sapiens
attagatctaagctagctctatcaagatccatgttcaaacgatctctactcagtatatacatgagggcagctgtacagagggaca

SEQ ID NO: 13960 - DNA, 85 bp, Homo sapiens
agctagctctatcaagatccatgttcaaacgatctctactcagtatatacatgagggcagctgtacagagggacagattcttcaa

SEQ ID NO: 13961 - DNA, 81 bp, Homo sapiens
agatccatgttcaaacgatctctactcagtatatacatgagggcagctgtacagagggacagattcttcaacaggccaaaa

SEQ ID NO: 13962 - DNA, 78 bp, Homo sapiens
atgttcaaacgatctctactcagtatatacatgagggcagctgtacagagggacagattcttcaacaggccaaaaaaa

SEQ ID NO: 13963 - DNA, 74 bp, Homo sapiens
tagtagttttcaacataaggcttctcaatctcagaaacttaaaaaatacctgatggtgctgggaatcatccaag

SEQ ID NO: 13964 - DNA, 71 bp, Homo sapiens
aacataaggcttctcaatctcagaaacttaaaaaatacctgatggtgctgggaatcatccaaggttttaaa

SEQ ID NO: 13965 - DNA, 73 bp, Homo sapiens
ttctcaatctcagaaacttaaaaaatacctgatggtgctgggaatcatccaaggttttaaagaccattgctac

SEQ ID NO: 13966 - DNA, 71 bp, Homo sapiens
agaaacttaaaaaatacctgatggtgctgggaatcatccaaggttttaaagaccattgctaccatcccatg

SEQ ID NO: 13967 - DNA, 77 bp, Homo sapiens
aaaaatacctgatggtgctgggaatcatccaaggttttaaagaccattgctaccatcccatgtgctctcaggtgcat

SEQ ID NO: 13968 - DNA, 77 bp, Homo sapiens
atggtgctgggaatcatccaaggttttaaagaccattgctaccatcccatgtgctctcaggtgcattcgaaaactgg

SEQ ID NO: 13969 - DNA, 78 bp, Homo sapiens
aatcatccaaggttttaaagaccattgctaccatcccatgtgctctcaggtgcattcgaaaactgggcatggcacatt

SEQ ID NO: 13970 - DNA, 77 bp, Homo sapiens
aaggttttaaagaccattgctaccatcccatgtgctctcaggtgcattcgaaaactgggcatggcacatttagtagc

SEQ ID NO: 13971 - DNA, 81 bp, Homo sapiens
taaagaccattgctaccatcccatgtgctctcaggtgcattcgaaaactgggcatggcacatttagtagccaagctaataa

SEQ ID NO: 13972 - DNA, 80 bp, Homo sapiens
taccatcccatgtgctctcaggtgcattcgaaaactgggcatggcacatttagtagccaagctaataacactacaagaaa

SEQ ID NO: 13973 - DNA, 80 bp, Homo sapiens
atgtgctctcaggtgcattcgaaaactgggcatggcacatttagtagccaagctaataacactacaagaaaatagagcag

SEQ ID NO: 13974 - DNA, 75 bp, Homo sapiens
aggtgcattcgaaaactgggcatggcacatttagtagccaagctaataacactacaagaaaatagagcaggttag

SEQ ID NO: 13975 - DNA, 72 bp, Homo sapiens
aaaactgggcatggcacatttagtagccaagctaataacactacaagaaaatagagcaggttaggggggctg

SEQ ID NO: 13976 - DNA, 77 bp, Homo sapiens
taatacagcatgcacataattgtaaaatataaaaataagatcttacctaaggcaacgtgtgtttagaggctgagtgc

SEQ ID NO: 13977 - DNA, 76 bp, Homo sapiens
gcatgcacataattgtaaaatataaaaataagatcttacctaaggcaacgtgtgtttagaggctgagtgctcttta

SEQ ID NO: 13978 - DNA, 72 bp, Homo sapiens
tgtaaaatataaaaataagatcttacctaaggcaacgtgtgtttagaggctgagtgctctttaagccactta

SEQ ID NO: 13979 - DNA, 71 bp, Homo sapiens
ataaaaataagatcttacctaaggcaacgtgtgtttagaggctgagtgctctttaagccacttaacaagta

SEQ ID NO: 13980 - DNA, 77 bp, Homo sapiens
taagatcttacctaaggcaacgtgtgtttagaggctgagtgctctttaagccacttaacaagtactcaatgtcatca

SEQ ID NO: 13981 - DNA, 78 bp, Homo sapiens
taaggcaacgtgtgtttagaggctgagtgctctttaagccacttaacaagtactcaatgtcatcagtgaactcttgat

SEQ ID NO: 13982 - DNA, 77 bp, Homo sapiens
tgtttagaggctgagtgctctttaagccacttaacaagtactcaatgtcatcagtgaactcttgattttcaccaaat

SEQ ID NO: 13983 - DNA, 78 bp, Homo sapiens
tgagtgctctttaagccacttaacaagtactcaatgtcatcagtgaactcttgattttcaccaaattctacaacatcg

SEQ ID NO: 13984 - DNA, 76 bp, Homo sapiens
tctttaagccacttaacaagtactcaatgtcatcagtgaactcttgattttcaccaaattctacaacatcgttgaa

SEQ ID NO: 13985 - DNA, 76 bp, Homo sapiens
acttaacaagtactcaatgtcatcagtgaactcttgattttcaccaaattctacaacatcgttgaagtgcttcacg

SEQ ID NO: 13986 - DNA, 82 bp, Homo sapiens
tcaatgtcatcagtgaactcttgattttcaccaaattctacaacatcgttgaagtgcttcacgtgctgaacaacagtatata

SEQ ID NO: 13987 - DNA, 79 bp, Homo sapiens
atcagtgaactcttgattttcaccaaattctacaacatcgttgaagtgcttcacgtgctgaacaacagtatataactgc

SEQ ID NO: 13988 - DNA, 76 bp, Homo sapiens
ttgattttcaccaaattctacaacatcgttgaagtgcttcacgtgctgaacaacagtatataactgccaagaaaaa

SEQ ID NO: 13989 - DNA, 74 bp, Homo sapiens
tttcaccaaattctacaacatcgttgaagtgcttcacgtgctgaacaacagtatataactgccaagaaaaaaaa

SEQ ID NO: 13990 - DNA, 73 bp, Homo sapiens
ttctacaacatcgttgaagtgcttcacgtgctgaacaacagtatataactgccaagaaaaaaaaagttcaccc

SEQ ID NO: 13991 - DNA, 82 bp, Homo sapiens
tacaaaaatctatcaacatgcagtaaacactgtatatggctgcttacttctttgtcttctcgtctgcatttcagtgcagtaa

SEQ ID NO: 13992 - DNA, 83 bp, Homo sapiens
aatctatcaacatgcagtaaacactgtatatggctgcttacttctttgtcttctcgtctgcatttcagtgcagtaactatatc

SEQ ID NO: 13993 - DNA, 80 bp, Homo sapiens
atgcagtaaacactgtatatggctgcttacttctttgtcttctcgtctgcatttcagtgcagtaactatatcttggtagg

SEQ ID NO: 13994 - DNA, 80 bp, Homo sapiens
tgtatatggctgcttacttctttgtcttctcgtctgcatttcagtgcagtaactatatcttggtagggctgagtaggtat

SEQ ID NO: 13995 - DNA, 79 bp, Homo sapiens
tgcttacttctttgtcttctcgtctgcatttcagtgcagtaactatatcttggtagggctgagtaggtattgtcacagt

SEQ ID NO: 13996 - DNA, 77 bp, Homo sapiens
ttctttgtcttctcgtctgcatttcagtgcagtaactatatcttggtagggctgagtaggtattgtcacagttttta

SEQ ID NO: 13997 - DNA, 78 bp, Homo sapiens
ttctcgtctgcatttcagtgcagtaactatatcttggtagggctgagtaggtattgtcacagtttttatcactttgga

SEQ ID NO: 13998 - DNA, 77 bp, Homo sapiens
atttcagtgcagtaactatatcttggtagggctgagtaggtattgtcacagtttttatcactttggatggtggtgca

SEQ ID NO: 13999 - DNA, 75 bp, Homo sapiens
taactatatcttggtagggctgagtaggtattgtcacagtttttatcactttggatggtggtgcaggagccttaa

SEQ ID NO: 14000 - DNA, 72 bp, Homo sapiens
atcttggtagggctgagtaggtattgtcacagtttttatcactttggatggtggtgcaggagccttaaaaac

SEQ ID NO: 14001 - DNA, 73 bp, Homo sapiens
agtaggtattgtcacagtttttatcactttggatggtggtgcaggagccttaaaaactccatcatctttttga

SEQ ID NO: 14002 - DNA, 73 bp, Homo sapiens
tattgtcacagtttttatcactttggatggtggtgcaggagccttaaaaactccatcatctttttgatttggt

SEQ ID NO: 14003 - DNA, 71 bp, Homo sapiens
tttttatcactttggatggtggtgcaggagccttaaaaactccatcatctttttgatttggttcctttgaa

SEQ ID NO: 14004 - DNA, 73 bp, Homo sapiens
actttggatggtggtgcaggagccttaaaaactccatcatctttttgatttggttcctttgaagacagcctca

SEQ ID NO: 14005 - DNA, 72 bp, Homo sapiens
tgcaggagccttaaaaactccatcatctttttgatttggttcctttgaagacagcctcacctattaataaag

SEQ ID NO: 14006 - DNA, 69 bp, Homo sapiens
agccttaaaaactccatcatctttttgatttggttcctttgaagacagcctcacctattaataaaggta

SEQ ID NO: 14007 - DNA, 70 bp, Homo sapiens
ctccatcatctttttgatttggttcctttgaagacagcctcacctattaataaaggtattaaattagttg

SEQ ID NO: 14008 - DNA, 67 bp, Homo sapiens
ctttttgatttggttcctttgaagacagcctcacctattaataaaggtattaaattagttgttctaa

SEQ ID NO: 14009 - DNA, 69 bp, Homo sapiens
tttatagcttattaaaaaacacaaaataaataagtacagttcacttactgtgacactctgaggttttac

SEQ ID NO: 14010 - DNA, 69 bp, Homo sapiens
attaaaaaacacaaaataaataagtacagttcacttactgtgacactctgaggttttactactggtggc

SEQ ID NO: 14011 - DNA, 71 bp, Homo sapiens
acaaaataaataagtacagttcacttactgtgacactctgaggttttactactggtggcccaggcagttct

SEQ ID NO: 14012 - DNA, 74 bp, Homo sapiens
ataaataagtacagttcacttactgtgacactctgaggttttactactggtggcccaggcagttcttctgaatc

SEQ ID NO: 14013 - DNA, 77 bp, Homo sapiens
acagttcacttactgtgacactctgaggttttactactggtggcccaggcagttcttctgaatctggatgattccaa

SEQ ID NO: 14014 - DNA, 82 bp, Homo sapiens
tgtgacactctgaggttttactactggtggcccaggcagttcttctgaatctggatgattccaatgtctggcattatataca

SEQ ID NO: 14015 - DNA, 79 bp, Homo sapiens
tctgaggttttactactggtggcccaggcagttcttctgaatctggatgattccaatgtctggcattatatacagcttt

SEQ ID NO: 14016 - DNA, 81 bp, Homo sapiens
tactactggtggcccaggcagttcttctgaatctggatgattccaatgtctggcattatatacagcttttgtgggtgacta

SEQ ID NO: 14017 - DNA, 82 bp, Homo sapiens
caggcagttcttctgaatctggatgattccaatgtctggcattatatacagcttttgtgggtgactagagaaatgagagaaa

SEQ ID NO: 14018 - DNA, 82 bp, Homo sapiens
agttcttctgaatctggatgattccaatgtctggcattatatacagcttttgtgggtgactagagaaatgagagaaagatca

SEQ ID NO: 14019 - DNA, 82 bp, Homo sapiens
aatctggatgattccaatgtctggcattatatacagcttttgtgggtgactagagaaatgagagaaagatcaactgcttcca

SEQ ID NO: 14020 - DNA, 67 bp, Homo sapiens
ataaataataaaaatcactgacagtgctttacttacccgtttggggccactaaaaatctttctggta

SEQ ID NO: 14021 - DNA, 65 bp, Homo sapiens
aaaaatcactgacagtgctttacttacccgtttggggccactaaaaatctttctggtattttcct

SEQ ID NO: 14022 - DNA, 66 bp, Homo sapiens
actgacagtgctttacttacccgtttggggccactaaaaatctttctggtattttcctttgattta

SEQ ID NO: 14023 - DNA, 64 bp, Homo sapiens
ctttacttacccgtttggggccactaaaaatctttctggtattttcctttgatttatctccttg

SEQ ID NO: 14024 - DNA, 66 bp, Homo sapiens
cgtttggggccactaaaaatctttctggtattttcctttgatttatctccttgtttatttatgggc

SEQ ID NO: 14025 - DNA, 69 bp, Homo sapiens
gccactaaaaatctttctggtattttcctttgatttatctccttgtttatttatgggcttcttcacact

SEQ ID NO: 14026 - DNA, 72 bp, Homo sapiens
atctttctggtattttcctttgatttatctccttgtttatttatgggcttcttcacactttcaggcacacca

SEQ ID NO: 14027 - DNA, 74 bp, Homo sapiens
tcctttgatttatctccttgtttatttatgggcttcttcacactttcaggcacaccaggcaagtcctctgtaaa

SEQ ID NO: 14028 - DNA, 73 bp, Homo sapiens
atttatctccttgtttatttatgggcttcttcacactttcaggcacaccaggcaagtcctctgtaaaatccaa

SEQ ID NO: 14029 - DNA, 73 bp, Homo sapiens
ttgtttatttatgggcttcttcacactttcaggcacaccaggcaagtcctctgtaaaatccaagttttctgaa

SEQ ID NO: 14030 - DNA, 73 bp, Homo sapiens
ggcttcttcacactttcaggcacaccaggcaagtcctctgtaaaatccaagttttctgaaatggtaatcaaaa

SEQ ID NO: 14031 - DNA, 74 bp, Homo sapiens
ttcacactttcaggcacaccaggcaagtcctctgtaaaatccaagttttctgaaatggtaatcaaaactatcta

SEQ ID NO: 14032 - DNA, 69 bp, Homo sapiens
aagggggaactattgtacttattatacatattttttaaattcttacctgcattgttagtaccagactga

SEQ ID NO: 14033 - DNA, 72 bp, Homo sapiens
ctattgtacttattatacatattttttaaattcttacctgcattgttagtaccagactgactgtcctgggaa

SEQ ID NO: 14034 - DNA, 74 bp, Homo sapiens
cttattatacatattttttaaattcttacctgcattgttagtaccagactgactgtcctgggaattatcattgc

SEQ ID NO: 14035 - DNA, 76 bp, Homo sapiens
taaattcttacctgcattgttagtaccagactgactgtcctgggaattatcattgctttctgggggaggctgcaag

SEQ ID NO: 14036 - DNA, 78 bp, Homo sapiens
cctgcattgttagtaccagactgactgtcctgggaattatcattgctttctgggggaggctgcaaggagggtgatgga

SEQ ID NO: 14037 - DNA, 77 bp, Homo sapiens
tagtaccagactgactgtcctgggaattatcattgctttctgggggaggctgcaaggagggtgatggagctgtttta

SEQ ID NO: 14038 - DNA, 72 bp, Homo sapiens
actgtcctgggaattatcattgctttctgggggaggctgcaaggagggtgatggagctgttttagttctttt

SEQ ID NO: 14039 - DNA, 72 bp, Homo sapiens
aattatcattgctttctgggggaggctgcaaggagggtgatggagctgttttagttctttttttgcttgtct

SEQ ID NO: 14040 - DNA, 70 bp, Homo sapiens
attgctttctgggggaggctgcaaggagggtgatggagctgttttagttctttttttgcttgtctttctt

SEQ ID NO: 14041 - DNA, 76 bp, Homo sapiens
gaggctgcaaggagggtgatggagctgttttagttctttttttgcttgtctttctttctacttgacagtcatcatc

SEQ ID NO: 14042 - DNA, 75 bp, Homo sapiens
aaggagggtgatggagctgttttagttctttttttgcttgtctttctttctacttgacagtcatcatcttcatca

SEQ ID NO: 14043 - DNA, 77 bp, Homo sapiens
atggagctgttttagttctttttttgcttgtctttctttctacttgacagtcatcatcttcatcatcttcgctttca

SEQ ID NO: 14044 - DNA, 80 bp, Homo sapiens
ttagttctttttttgcttgtctttctttctacttgacagtcatcatcttcatcatcttcgctttcactgagatcatcaaa

SEQ ID NO: 14045 - DNA, 82 bp, Homo sapiens
tttgcttgtctttctttctacttgacagtcatcatcttcatcatcttcgctttcactgagatcatcaaagccaaaatactta

SEQ ID NO: 14046 - DNA, 78 bp, Homo sapiens
catcatcttcatcatcttcgctttcactgagatcatcaaagccaaaatacttaattttgtaattagaacttccagaac

SEQ ID NO: 14047 - DNA, 75 bp, Homo sapiens
cttcatcatcttcgctttcactgagatcatcaaagccaaaatacttaattttgtaattagaacttccagaacctc

SEQ ID NO: 14048 - DNA, 74 bp, Homo sapiens
ttcgctttcactgagatcatcaaagccaaaatacttaattttgtaattagaacttccagaacctccttcatcac

SEQ ID NO: 14049 - DNA, 75 bp, Homo sapiens
atcatcaaagccaaaatacttaattttgtaattagaacttccagaacctccttcatcacctcctgtctcatgatc

SEQ ID NO: 14050 - DNA, 72 bp, Homo sapiens
ccaaaatacttaattttgtaattagaacttccagaacctccttcatcacctcctgtctcatgatcttcaaaa

SEQ ID NO: 14051 - DNA, 71 bp, Homo sapiens
acttaattttgtaattagaacttccagaacctccttcatcacctcctgtctcatgatcttcaaaaccaaaa

SEQ ID NO: 14052 - DNA, 72 bp, Homo sapiens
ttgtaattagaacttccagaacctccttcatcacctcctgtctcatgatcttcaaaaccaaaaaattcaagt

SEQ ID NO: 14053 - DNA, 71 bp, Homo sapiens
tccagaacctccttcatcacctcctgtctcatgatcttcaaaaccaaaaaattcaagtttaacatcctttt

SEQ ID NO: 14054 - DNA, 70 bp, Homo sapiens
cctccttcatcacctcctgtctcatgatcttcaaaaccaaaaaattcaagtttaacatcctttttggatt

SEQ ID NO: 14055 - DNA, 69 bp, Homo sapiens
cacctcctgtctcatgatcttcaaaaccaaaaaattcaagtttaacatcctttttggatttagtattac

SEQ ID NO: 14056 - DNA, 65 bp, Homo sapiens
aaccaaaaaattcaagtttaacatcctttttggatttagtattactaggtcgaaatctagtagta

SEQ ID NO: 14057 - DNA, 70 bp, Homo sapiens
ttcaagtttaacatcctttttggatttagtattactaggtcgaaatctagtagtagtcttagaagttgca

SEQ ID NO: 14058 - DNA, 71 bp, Homo sapiens
aacatcctttttggatttagtattactaggtcgaaatctagtagtagtcttagaagttgcaatatctgcct

SEQ ID NO: 14059 - DNA, 69 bp, Homo sapiens
ctttttggatttagtattactaggtcgaaatctagtagtagtcttagaagttgcaatatctgccttttt

SEQ ID NO: 14060 - DNA, 74 bp, Homo sapiens
tagtattactaggtcgaaatctagtagtagtcttagaagttgcaatatctgccttttttctgagacgaccagct

SEQ ID NO: 14061 - DNA, 74 bp, Homo sapiens
taggtcgaaatctagtagtagtcttagaagttgcaatatctgccttttttctgagacgaccagcttctcccaaa

SEQ ID NO: 14062 - DNA, 78 bp, Homo sapiens
tctagtagtagtcttagaagttgcaatatctgccttttttctgagacgaccagcttctcccaaatctgcaggagtgga

SEQ ID NO: 14063 - DNA, 82 bp, Homo sapiens
ttagaagttgcaatatctgccttttttctgagacgaccagcttctcccaaatctgcaggagtggatgcagtgaactcatcca

SEQ ID NO: 14064 - DNA, 84 bp, Homo sapiens
atatctgccttttttctgagacgaccagcttctcccaaatctgcaggagtggatgcagtgaactcatccatgctgcgttccata

SEQ ID NO: 14065 - DNA, 84 bp, Homo sapiens
tttttctgagacgaccagcttctcccaaatctgcaggagtggatgcagtgaactcatccatgctgcgttccatagtatcctgta

SEQ ID NO: 14066 - DNA, 83 bp, Homo sapiens
acgaccagcttctcccaaatctgcaggagtggatgcagtgaactcatccatgctgcgttccatagtatcctgtatggtaacat

SEQ ID NO: 14067 - DNA, 84 bp, Homo sapiens
ttctcccaaatctgcaggagtggatgcagtgaactcatccatgctgcgttccatagtatcctgtatggtaacattacaaactga

SEQ ID NO: 14068 - DNA, 84 bp, Homo sapiens
aaatctgcaggagtggatgcagtgaactcatccatgctgcgttccatagtatcctgtatggtaacattacaaactgacaagcaa

SEQ ID NO: 14069 - DNA, 80 bp, Homo sapiens
aactcatccatgctgcgttccatagtatcctgtatggtaacattacaaactgacaagcaagatggatgtaaaacagtgta

SEQ ID NO: 14070 - DNA, 79 bp, Homo sapiens
atgctgcgttccatagtatcctgtatggtaacattacaaactgacaagcaagatggatgtaaaacagtgtaatctctag

SEQ ID NO: 14071 - DNA, 77 bp, Homo sapiens
catagtatcctgtatggtaacattacaaactgacaagcaagatggatgtaaaacagtgtaatctctagtccgtccaa

SEQ ID NO: 14072 - DNA, 77 bp, Homo sapiens
tatcctgtatggtaacattacaaactgacaagcaagatggatgtaaaacagtgtaatctctagtccgtccaactgtc

SEQ ID NO: 14073 - DNA, 74 bp, Homo sapiens
taacattacaaactgacaagcaagatggatgtaaaacagtgtaatctctagtccgtccaactgtccctctaaaa

SEQ ID NO: 14074 - DNA, 72 bp, Homo sapiens
aaactgacaagcaagatggatgtaaaacagtgtaatctctagtccgtccaactgtccctctaaaactggtcc

SEQ ID NO: 14075 - DNA, 71 bp, Homo sapiens
aagatggatgtaaaacagtgtaatctctagtccgtccaactgtccctctaaaactggtcccacaacttaca

SEQ ID NO: 14076 - DNA, 68 bp, Homo sapiens
gtgtaatctctagtccgtccaactgtccctctaaaactggtcccacaacttacaccccctttctttgc

SEQ ID NO: 14077 - DNA, 70 bp, Homo sapiens
taaaactggtcccacaacttacaccccctttctttgcctgattcaggccatctttactcgattcactgtt

SEQ ID NO: 14078 - DNA, 74 bp, Homo sapiens
cccctttctttgcctgattcaggccatctttactcgattcactgtttgctttggctaaggcctgactggtgccg

SEQ ID NO: 14079 - DNA, 81 bp, Homo sapiens
ttgcctgattcaggccatctttactcgattcactgtttgctttggctaaggcctgactggtgccgtccatcagcttatcaa

SEQ ID NO: 14080 - DNA, 77 bp, Homo sapiens
attcaggccatctttactcgattcactgtttgctttggctaaggcctgactggtgccgtccatcagcttatcaaaat

SEQ ID NO: 14081 - DNA, 78 bp, Homo sapiens
atctttactcgattcactgtttgctttggctaaggcctgactggtgccgtccatcagcttatcaaaatttgatgctcc

SEQ ID NO: 14082 - DNA, 76 bp, Homo sapiens
actgtttgctttggctaaggcctgactggtgccgtccatcagcttatcaaaatttgatgctccttgggaggatttc

SEQ ID NO: 14083 - DNA, 74 bp, Homo sapiens
tttggctaaggcctgactggtgccgtccatcagcttatcaaaatttgatgctccttgggaggatttcgttttat

SEQ ID NO: 14084 - DNA, 74 bp, Homo sapiens
aggcctgactggtgccgtccatcagcttatcaaaatttgatgctccttgggaggatttcgttttattggcccta

SEQ ID NO: 14085 - DNA, 74 bp, Homo sapiens
tgccgtccatcagcttatcaaaatttgatgctccttgggaggatttcgttttattggccctacagtacgtccta

SEQ ID NO: 14086 - DNA, 70 bp, Homo sapiens
agcttatcaaaatttgatgctccttgggaggatttcgttttattggccctacagtacgtcctacagttgg

SEQ ID NO: 14087 - DNA, 67 bp, Homo sapiens
tccttgggaggatttcgttttattggccctacagtacgtcctacagttggttggcctaagaacactt

SEQ ID NO: 14088 - DNA, 68 bp, Homo sapiens
aggatttcgttttattggccctacagtacgtcctacagttggttggcctaagaacactttgtacaata

SEQ ID NO: 14089 - DNA, 70 bp, Homo sapiens
gttttattggccctacagtacgtcctacagttggttggcctaagaacactttgtacaatatcttcctcaa

SEQ ID NO: 14090 - DNA, 74 bp, Homo sapiens
tacagtacgtcctacagttggttggcctaagaacactttgtacaatatcttcctcaatggcttcattcagattt

SEQ ID NO: 14091 - DNA, 74 bp, Homo sapiens
ctacagttggttggcctaagaacactttgtacaatatcttcctcaatggcttcattcagattttccaatcgatt

SEQ ID NO: 14092 - DNA, 72 bp, Homo sapiens
ggttggcctaagaacactttgtacaatatcttcctcaatggcttcattcagattttccaatcgatttttaaa

SEQ ID NO: 14093 - DNA, 75 bp, Homo sapiens
gaacactttgtacaatatcttcctcaatggcttcattcagattttccaatcgatttttaaaatcgtcatccttca

SEQ ID NO: 14094 - DNA, 72 bp, Homo sapiens
ttcattcagattttccaatcgatttttaaaatcgtcatccttcatctccaaaaggggatcactatccaaact

SEQ ID NO: 14095 - DNA, 70 bp, Homo sapiens
cagattttccaatcgatttttaaaatcgtcatccttcatctccaaaaggggatcactatccaaacttaaa

SEQ ID NO: 14096 - DNA, 75 bp, Homo sapiens
ttaaaatcgtcatccttcatctccaaaaggggatcactatccaaacttaaaatacagtcttctgatctgatatct

SEQ ID NO: 14097 - DNA, 76 bp, Homo sapiens
cttcatctccaaaaggggatcactatccaaacttaaaatacagtcttctgatctgatatcttcaaaatcattatcc

SEQ ID NO: 14098 - DNA, 76 bp, Homo sapiens
ctccaaaaggggatcactatccaaacttaaaatacagtcttctgatctgatatcttcaaaatcattatcccattca

SEQ ID NO: 14099 - DNA, 76 bp, Homo sapiens
ggatcactatccaaacttaaaatacagtcttctgatctgatatcttcaaaatcattatcccattcaaacaaaccag

SEQ ID NO: 14100 - DNA, 75 bp, Homo sapiens
cttaaaatacagtcttctgatctgatatcttcaaaatcattatcccattcaaacaaaccagttctaacagatccc

SEQ ID NO: 14101 - DNA, 77 bp, Homo sapiens
aatacagtcttctgatctgatatcttcaaaatcattatcccattcaaacaaaccagttctaacagatcccttgattg

SEQ ID NO: 14102 - DNA, 80 bp, Homo sapiens
tctgatctgatatcttcaaaatcattatcccattcaaacaaaccagttctaacagatcccttgattggagatatttctga

SEQ ID NO: 14103 - DNA, 76 bp, Homo sapiens
atcttcaaaatcattatcccattcaaacaaaccagttctaacagatcccttgattggagatatttctgatggtgat

SEQ ID NO: 14104 - DNA, 74 bp, Homo sapiens
attatcccattcaaacaaaccagttctaacagatcccttgattggagatatttctgatggtgattctggccttt

SEQ ID NO: 14105 - DNA, 73 bp, Homo sapiens
attcaaacaaaccagttctaacagatcccttgattggagatatttctgatggtgattctggccttttcccaaa

SEQ ID NO: 14106 - DNA, 73 bp, Homo sapiens
agttctaacagatcccttgattggagatatttctgatggtgattctggccttttcccaaactgggagttccaa

SEQ ID NO: 14107 - DNA, 73 bp, Homo sapiens
atcccttgattggagatatttctgatggtgattctggccttttcccaaactgggagttccaagtatcatttgt

SEQ ID NO: 14108 - DNA, 73 bp, Homo sapiens
ttgattggagatatttctgatggtgattctggccttttcccaaactgggagttccaagtatcatttgtttcct

SEQ ID NO: 14109 - DNA, 73 bp, Homo sapiens
atatttctgatggtgattctggccttttcccaaactgggagttccaagtatcatttgtttccttgatttcaga

SEQ ID NO: 14110 - DNA, 70 bp, Homo sapiens
attctggccttttcccaaactgggagttccaagtatcatttgtttccttgatttcagaagccactgtagt

SEQ ID NO: 14111 - DNA, 72 bp, Homo sapiens
ttttcccaaactgggagttccaagtatcatttgtttccttgatttcagaagccactgtagtttctgcattgg

SEQ ID NO: 14112 - DNA, 72 bp, Homo sapiens
aactgggagttccaagtatcatttgtttccttgatttcagaagccactgtagtttctgcattgggtttctta

SEQ ID NO: 14113 - DNA, 76 bp, Homo sapiens
aagtatcatttgtttccttgatttcagaagccactgtagtttctgcattgggtttcttagtactgtcatcagcatt

SEQ ID NO: 14114 - DNA, 78 bp, Homo sapiens
atttcagaagccactgtagtttctgcattgggtttcttagtactgtcatcagcatttttgtgaatatggtgactattc

SEQ ID NO: 14115 - DNA, 77 bp, Homo sapiens
aagccactgtagtttctgcattgggtttcttagtactgtcatcagcatttttgtgaatatggtgactattcttttca

SEQ ID NO: 14116 - DNA, 80 bp, Homo sapiens
tagtttctgcattgggtttcttagtactgtcatcagcatttttgtgaatatggtgactattcttttcatgttcttcatga

SEQ ID NO: 14117 - DNA, 78 bp, Homo sapiens
tgggtttcttagtactgtcatcagcatttttgtgaatatggtgactattcttttcatgttcttcatgaaaattctcca

SEQ ID NO: 14118 - DNA, 78 bp, Homo sapiens
cttagtactgtcatcagcatttttgtgaatatggtgactattcttttcatgttcttcatgaaaattctccactttatc

SEQ ID NO: 14119 - DNA, 78 bp, Homo sapiens
tcatcagcatttttgtgaatatggtgactattcttttcatgttcttcatgaaaattctccactttatctgtaaaaata

SEQ ID NO: 14120 - DNA, 74 bp, Homo sapiens
gtgaatatggtgactattcttttcatgttcttcatgaaaattctccactttatctgtaaaaataagtcaaagga

SEQ ID NO: 14121 - DNA, 72 bp, Homo sapiens
atggtgactattcttttcatgttcttcatgaaaattctccactttatctgtaaaaataagtcaaaggataaa

SEQ ID NO: 14122 - DNA, 71 bp, Homo sapiens
gttgcacaaagctctcttggcggagaataaagaaaatcaaaacttacctgaagttattaatttattacagc

SEQ ID NO: 14123 - DNA, 71 bp, Homo sapiens
agctctcttggcggagaataaagaaaatcaaaacttacctgaagttattaatttattacagctacttatgc

SEQ ID NO: 14124 - DNA, 73 bp, Homo sapiens
ggcggagaataaagaaaatcaaaacttacctgaagttattaatttattacagctacttatgcttgcatcatct

SEQ ID NO: 14125 - DNA, 73 bp, Homo sapiens
gaaaatcaaaacttacctgaagttattaatttattacagctacttatgcttgcatcatcttctacaattcggt

SEQ ID NO: 14126 - DNA, 75 bp, Homo sapiens
caaaacttacctgaagttattaatttattacagctacttatgcttgcatcatcttctacaattcggtttgtgctc

SEQ ID NO: 14127 - DNA, 75 bp, Homo sapiens
cctgaagttattaatttattacagctacttatgcttgcatcatcttctacaattcggtttgtgctcttttctttc

SEQ ID NO: 14128 - DNA, 74 bp, Homo sapiens
agctacttatgcttgcatcatcttctacaattcggtttgtgctcttttctttcccaagtaaagtgtcctccaaa

SEQ ID NO: 14129 - DNA, 73 bp, Homo sapiens
tgcatcatcttctacaattcggtttgtgctcttttctttcccaagtaaagtgtcctccaaagggaagcattta

SEQ ID NO: 14130 - DNA, 70 bp, Homo sapiens
atcttctacaattcggtttgtgctcttttctttcccaagtaaagtgtcctccaaagggaagcatttatca

SEQ ID NO: 14131 - DNA, 68 bp, Homo sapiens
aattcggtttgtgctcttttctttcccaagtaaagtgtcctccaaagggaagcatttatcagaaacga

SEQ ID NO: 14132 - DNA, 69 bp, Homo sapiens
cttttctttcccaagtaaagtgtcctccaaagggaagcatttatcagaaacgacagtgtcttcaacgac

SEQ ID NO: 14133 - DNA, 72 bp, Homo sapiens
ccaagtaaagtgtcctccaaagggaagcatttatcagaaacgacagtgtcttcaacgaccacatgactaatt

SEQ ID NO: 14134 - DNA, 74 bp, Homo sapiens
taaagtgtcctccaaagggaagcatttatcagaaacgacagtgtcttcaacgaccacatgactaattttgctat

SEQ ID NO: 14135 - DNA, 74 bp, Homo sapiens
aaagggaagcatttatcagaaacgacagtgtcttcaacgaccacatgactaattttgctattagcttcaagtac

SEQ ID NO: 14136 - DNA, 76 bp, Homo sapiens
atttatcagaaacgacagtgtcttcaacgaccacatgactaattttgctattagcttcaagtactgaagtgacctc

SEQ ID NO: 14137 - DNA, 75 bp, Homo sapiens
agaaacgacagtgtcttcaacgaccacatgactaattttgctattagcttcaagtactgaagtgacctcttccaa

SEQ ID NO: 14138 - DNA, 79 bp, Homo sapiens
ttcaacgaccacatgactaattttgctattagcttcaagtactgaagtgacctcttccaactgagcagcttcactagat

SEQ ID NO: 14139 - DNA, 80 bp, Homo sapiens
acatgactaattttgctattagcttcaagtactgaagtgacctcttccaactgagcagcttcactagattctgaataaga

SEQ ID NO: 14140 - DNA, 79 bp, Homo sapiens
taattttgctattagcttcaagtactgaagtgacctcttccaactgagcagcttcactagattctgaataagaggaaca

SEQ ID NO: 14141 - DNA, 77 bp, Homo sapiens
ctattagcttcaagtactgaagtgacctcttccaactgagcagcttcactagattctgaataagaggaacacttaac

SEQ ID NO: 14142 - DNA, 76 bp, Homo sapiens
tactgaagtgacctcttccaactgagcagcttcactagattctgaataagaggaacacttaacctgggctaaattc

SEQ ID NO: 14143 - DNA, 74 bp, Homo sapiens
acctcttccaactgagcagcttcactagattctgaataagaggaacacttaacctgggctaaattctttgaaga

SEQ ID NO: 14144 - DNA, 73 bp, Homo sapiens
aactgagcagcttcactagattctgaataagaggaacacttaacctgggctaaattctttgaagaaactggta

SEQ ID NO: 14145 - DNA, 76 bp, Homo sapiens
ttcactagattctgaataagaggaacacttaacctgggctaaattctttgaagaaactggtagagactcatcatca

SEQ ID NO: 14146 - DNA, 75 bp, Homo sapiens
attctgaataagaggaacacttaacctgggctaaattctttgaagaaactggtagagactcatcatcactatcaa

SEQ ID NO: 14147 - DNA, 75 bp, Homo sapiens
ttaacctgggctaaattctttgaagaaactggtagagactcatcatcactatcaaatccaaaaggatctccagta

SEQ ID NO: 14148 - DNA, 75 bp, Homo sapiens
taaattctttgaagaaactggtagagactcatcatcactatcaaatccaaaaggatctccagtactttcttcttc

SEQ ID NO: 14149 - DNA, 75 bp, Homo sapiens
tttgaagaaactggtagagactcatcatcactatcaaatccaaaaggatctccagtactttcttcttccacttta

SEQ ID NO: 14150 - DNA, 74 bp, Homo sapiens
tagagactcatcatcactatcaaatccaaaaggatctccagtactttcttcttccactttaggtttcttcggaa

SEQ ID NO: 14151 - DNA, 70 bp, Homo sapiens
atcatcactatcaaatccaaaaggatctccagtactttcttcttccactttaggtttcttcggaatttct

SEQ ID NO: 14152 - DNA, 70 bp, Homo sapiens
tatcaaatccaaaaggatctccagtactttcttcttccactttaggtttcttcggaatttcttggatatc

SEQ ID NO: 14153 - DNA, 68 bp, Homo sapiens
aaaaggatctccagtactttcttcttccactttaggtttcttcggaatttcttggatatctggtttga

SEQ ID NO: 14154 - DNA, 68 bp, Homo sapiens
ttccactttaggtttcttcggaatttcttggatatctggtttgaaattgggcctcttctgccctaatt

SEQ ID NO: 14155 - DNA, 70 bp, Homo sapiens
tttaggtttcttcggaatttcttggatatctggtttgaaattgggcctcttctgccctaatttagccata

SEQ ID NO: 14156 - DNA, 72 bp, Homo sapiens
cttcggaatttcttggatatctggtttgaaattgggcctcttctgccctaatttagccataaatgtggtctc

SEQ ID NO: 14157 - DNA, 73 bp, Homo sapiens
tcttggatatctggtttgaaattgggcctcttctgccctaatttagccataaatgtggtctctccccattttg

SEQ ID NO: 14158 - DNA, 71 bp, Homo sapiens
gtttgaaattgggcctcttctgccctaatttagccataaatgtggtctctccccattttgtgctaagggta

SEQ ID NO: 14159 - DNA, 71 bp, Homo sapiens
gcctcttctgccctaatttagccataaatgtggtctctccccattttgtgctaagggtagtccgtttgttg

SEQ ID NO: 14160 - DNA, 68 bp, Homo sapiens
ccctaatttagccataaatgtggtctctccccattttgtgctaagggtagtccgtttgttggaaaaga

SEQ ID NO: 14161 - DNA, 70 bp, Homo sapiens
atttagccataaatgtggtctctccccattttgtgctaagggtagtccgtttgttggaaaagacttcatc

SEQ ID NO: 14162 - DNA, 69 bp, Homo sapiens
aatgtggtctctccccattttgtgctaagggtagtccgtttgttggaaaagacttcatcgaattttgaa

SEQ ID NO: 14163 - DNA, 69 bp, Homo sapiens
cccattttgtgctaagggtagtccgtttgttggaaaagacttcatcgaattttgaactgccatttccac

SEQ ID NO: 14164 - DNA, 69 bp, Homo sapiens
ttgtgctaagggtagtccgtttgttggaaaagacttcatcgaattttgaactgccatttccacctttcc

SEQ ID NO: 14165 - DNA, 69 bp, Homo sapiens
tagtccgtttgttggaaaagacttcatcgaattttgaactgccatttccacctttcctactgtatgttt

SEQ ID NO: 14166 - DNA, 70 bp, Homo sapiens
ttgttggaaaagacttcatcgaattttgaactgccatttccacctttcctactgtatgttttcccaaatc

SEQ ID NO: 14167 - DNA, 73 bp, Homo sapiens
acttcatcgaattttgaactgccatttccacctttcctactgtatgttttcccaaatctggatgtcattttga

SEQ ID NO: 14168 - DNA, 71 bp, Homo sapiens
aattttgaactgccatttccacctttcctactgtatgttttcccaaatctggatgtcattttgacaccagt

SEQ ID NO: 14169 - DNA, 74 bp, Homo sapiens
atttccacctttcctactgtatgttttcccaaatctggatgtcattttgacaccagtttcatattctctgtgaa

SEQ ID NO: 14170 - DNA, 72 bp, Homo sapiens
actgtatgttttcccaaatctggatgtcattttgacaccagtttcatattctctgtgaaaaaaaatttaaga

SEQ ID NO: 14171 - DNA, 73 bp, Homo sapiens
cccaaatctggatgtcattttgacaccagtttcatattctctgtgaaaaaaaatttaagaaaacatataatca

SEQ ID NO: 14172 - DNA, 68 bp, Homo sapiens
tcccggctccctcccggcctaggcggccgcccgacacctcacttaccctcggagcctggcgggtgctt

SEQ ID NO: 14173 - DNA, 69 bp, Homo sapiens
ctccctcccggcctaggcggccgcccgacacctcacttaccctcggagcctggcgggtgctttggccac

SEQ ID NO: 14174 - DNA, 69 bp, Homo sapiens
cctaggcggccgcccgacacctcacttaccctcggagcctggcgggtgctttggccacgggccgcctcc

SEQ ID NO: 14175 - DNA, 70 bp, Homo sapiens
cccgacacctcacttaccctcggagcctggcgggtgctttggccacgggccgcctccgcctctcccgctc

SEQ ID NO: 14176 - DNA, 69 bp, Homo sapiens
acctcacttaccctcggagcctggcgggtgctttggccacgggccgcctccgcctctcccgctccctac

SEQ ID NO: 14177 - DNA, 68 bp, Homo sapiens
ccctcggagcctggcgggtgctttggccacgggccgcctccgcctctcccgctccctacggcccgcgg

SEQ ID NO: 14178 - DNA, 69 bp, Homo sapiens
tggcgggtgctttggccacgggccgcctccgcctctcccgctccctacggcccgcgggcgggcgcggaa

SEQ ID NO: 14179 - DNA, 67 bp, Homo sapiens
ctttggccacgggccgcctccgcctctcccgctccctacggcccgcgggcgggcgcggaaccctcgc

SEQ ID NO: 14180 - DNA, 69 bp, Homo sapiens
cgcctccgcctctcccgctccctacggcccgcgggcgggcgcggaaccctcgcgcgggagagcagggcc

SEQ ID NO: 14181 - DNA, 71 bp, Homo sapiens
ctctcccgctccctacggcccgcgggcgggcgcggaaccctcgcgcgggagagcagggccggcaggtgaga

SEQ ID NO: 14182 - DNA, 72 bp, Homo sapiens
ctccctacggcccgcgggcgggcgcggaaccctcgcgcgggagagcagggccggcaggtgagagccgagaga

SEQ ID NO: 14183 - DNA, 74 bp, Homo sapiens
cgggcgggcgcggaaccctcgcgcgggagagcagggccggcaggtgagagccgagagaggcgagggactctgct

SEQ ID NO: 14184 - DNA, 73 bp, Homo sapiens
cggaaccctcgcgcgggagagcagggccggcaggtgagagccgagagaggcgagggactctgctttcggtaaa

SEQ ID NO: 14185 - DNA, 74 bp, Homo sapiens
ccctcgcgcgggagagcagggccggcaggtgagagccgagagaggcgagggactctgctttcggtaaataggaa

SEQ ID NO: 14186 - DNA, 72 bp, Homo sapiens
agagcagggccggcaggtgagagccgagagaggcgagggactctgctttcggtaaataggaagcccggttgg

SEQ ID NO: 14187 - DNA, 70 bp, Homo sapiens
ccggcaggtgagagccgagagaggcgagggactctgctttcggtaaataggaagcccggttgggggggca

SEQ ID NO: 14188 - DNA, 69 bp, Homo sapiens
agagccgagagaggcgagggactctgctttcggtaaataggaagcccggttgggggggcaggagcggcg

SEQ ID NO: 14189 - DNA, 66 bp, Homo sapiens
cgagggactctgctttcggtaaataggaagcccggttgggggggcaggagcggcggccccgcaact

SEQ ID NO: 14190 - DNA, 66 bp, Homo sapiens
actctgctttcggtaaataggaagcccggttgggggggcaggagcggcggccccgcaacttccctc

SEQ ID NO: 14191 - DNA, 65 bp, Homo sapiens
tcggtaaataggaagcccggttgggggggcaggagcggcggccccgcaacttccctccccgcctc

SEQ ID NO: 14192 - DNA, 66 bp, Homo sapiens
aagcccggttgggggggcaggagcggcggccccgcaacttccctccccgcctcgagcgccgccggc

SEQ ID NO: 14193 - DNA, 69 bp, Homo sapiens
ggggcaggagcggcggccccgcaacttccctccccgcctcgagcgccgccggccgggcccaggcctagc

SEQ ID NO: 14194 - DNA, 70 bp, Homo sapiens
aggagcggcggccccgcaacttccctccccgcctcgagcgccgccggccgggcccaggcctagctctcgc

SEQ ID NO: 14195 - DNA, 74 bp, Homo sapiens
ccgcaacttccctccccgcctcgagcgccgccggccgggcccaggcctagctctcgctggccgccactgctgga

SEQ ID NO: 14196 - DNA, 75 bp, Homo sapiens
ttccctccccgcctcgagcgccgccggccgggcccaggcctagctctcgctggccgccactgctggagctggtaa

SEQ ID NO: 14197 - DNA, 81 bp, Homo sapiens
cctcgagcgccgccggccgggcccaggcctagctctcgctggccgccactgctggagctggtaacagagcctgctgtgtgc

SEQ ID NO: 14198 - DNA, 78 bp, Homo sapiens
ccggccgggcccaggcctagctctcgctggccgccactgctggagctggtaacagagcctgctgtgtgcccccgctgg

SEQ ID NO: 14199 - DNA, 80 bp, Homo sapiens
ggcccaggcctagctctcgctggccgccactgctggagctggtaacagagcctgctgtgtgcccccgctgggccgccgcc

SEQ ID NO: 14200 - DNA, 82 bp, Homo sapiens
tagctctcgctggccgccactgctggagctggtaacagagcctgctgtgtgcccccgctgggccgccgccgcctcctgcgcc

SEQ ID NO: 14201 - DNA, 80 bp, Homo sapiens
tggccgccactgctggagctggtaacagagcctgctgtgtgcccccgctgggccgccgccgcctcctgcgccgccgcttc

SEQ ID NO: 14202 - DNA, 77 bp, Homo sapiens
gagctggtaacagagcctgctgtgtgcccccgctgggccgccgccgcctcctgcgccgccgcttccgccggtgaatg

SEQ ID NO: 14203 - DNA, 78 bp, Homo sapiens
taacagagcctgctgtgtgcccccgctgggccgccgccgcctcctgcgccgccgcttccgccggtgaatggtcagtgc

SEQ ID NO: 14204 - DNA, 76 bp, Homo sapiens
tgtgtgcccccgctgggccgccgccgcctcctgcgccgccgcttccgccggtgaatggtcagtgctggagtttgaa

SEQ ID NO: 14205 - DNA, 76 bp, Homo sapiens
ccgccgcctcctgcgccgccgcttccgccggtgaatggtcagtgctggagtttgaacagggccctgaaccatctca

SEQ ID NO: 14206 - DNA, 75 bp, Homo sapiens
cgcttccgccggtgaatggtcagtgctggagtttgaacagggccctgaaccatctcaacgccatttgcgctcccg

SEQ ID NO: 14207 - DNA, 74 bp, Homo sapiens
cgccggtgaatggtcagtgctggagtttgaacagggccctgaaccatctcaacgccatttgcgctcccggcccc

SEQ ID NO: 14208 - DNA, 74 bp, Homo sapiens
tggtcagtgctggagtttgaacagggccctgaaccatctcaacgccatttgcgctcccggcccccacctccttc

SEQ ID NO: 14209 - DNA, 72 bp, Homo sapiens
tggagtttgaacagggccctgaaccatctcaacgccatttgcgctcccggcccccacctccttcctccaaca

SEQ ID NO: 14210 - DNA, 73 bp, Homo sapiens
atctcaacgccatttgcgctcccggcccccacctccttcctccaacagccgctcgctccgtcactccgcttcc

SEQ ID NO: 14211 - DNA, 70 bp, Homo sapiens
ctcccggcccccacctccttcctccaacagccgctcgctccgtcactccgcttcccacagtccccgcgcg

SEQ ID NO: 14212 - DNA, 69 bp, Homo sapiens
ccctgccctgccctgccctcccctcgcccggcgcggtcccgtccgcctctcgctcgcctcccgcctccc

SEQ ID NO: 14213 - DNA, 67 bp, Homo sapiens
ccctgccctcccctcgcccggcgcggtcccgtccgcctctcgctcgcctcccgcctcccctcggtct

SEQ ID NO: 14214 - DNA, 68 bp, Homo sapiens
ccctcgcccggcgcggtcccgtccgcctctcgctcgcctcccgcctcccctcggtcttccgaggcgcc

SEQ ID NO: 14215 - DNA, 68 bp, Homo sapiens
ccggcgcggtcccgtccgcctctcgctcgcctcccgcctcccctcggtcttccgaggcgcccgggctc

SEQ ID NO: 14216 - DNA, 68 bp, Homo sapiens
gtcccgtccgcctctcgctcgcctcccgcctcccctcggtcttccgaggcgcccgggctcccggcgcg

SEQ ID NO: 14217 - DNA, 68 bp, Homo sapiens
cctctcgctcgcctcccgcctcccctcggtcttccgaggcgcccgggctcccggcgcggcggcggagg

SEQ ID NO: 14218 - DNA, 66 bp, Homo sapiens
cctcccgcctcccctcggtcttccgaggcgcccgggctcccggcgcggcggcggagggggcgggca

SEQ ID NO: 14219 - DNA, 68 bp, Homo sapiens
tcggtcttccgaggcgcccgggctcccggcgcggcggcggagggggcgggcaggccggcgggcggtga

SEQ ID NO: 14220 - DNA, 69 bp, Homo sapiens
cttccgaggcgcccgggctcccggcgcggcggcggagggggcgggcaggccggcgggcggtgatgtggc

SEQ ID NO: 14221 - DNA, 73 bp, Homo sapiens
ggctcccggcgcggcggcggagggggcgggcaggccggcgggcggtgatgtggcgggactctttatgcgctgc

SEQ ID NO: 14222 - DNA, 74 bp, Homo sapiens
cgcggcggcggagggggcgggcaggccggcgggcggtgatgtggcgggactctttatgcgctgcggcaggatac

SEQ ID NO: 14223 - DNA, 76 bp, Homo sapiens
agggggcgggcaggccggcgggcggtgatgtggcgggactctttatgcgctgcggcaggatacgcgctcggcgctg

SEQ ID NO: 14224 - DNA, 80 bp, Homo sapiens
caggccggcgggcggtgatgtggcgggactctttatgcgctgcggcaggatacgcgctcggcgctgggacgcgactgcgc

SEQ ID NO: 14225 - DNA, 82 bp, Homo sapiens
gggcggtgatgtggcgggactctttatgcgctgcggcaggatacgcgctcggcgctgggacgcgactgcgctcagttctctc

SEQ ID NO: 14226 - DNA, 84 bp, Homo sapiens
tgatgtggcgggactctttatgcgctgcggcaggatacgcgctcggcgctgggacgcgactgcgctcagttctctcctctcgga

SEQ ID NO: 14227 - DNA, 86 bp, Homo sapiens
actctttatgcgctgcggcaggatacgcgctcggcgctgggacgcgactgcgctcagttctctcctctcggaagctgcagccatga

SEQ ID NO: 14228 - DNA, 85 bp, Homo sapiens
ctgcggcaggatacgcgctcggcgctgggacgcgactgcgctcagttctctcctctcggaagctgcagccatgatggaagtttga

SEQ ID NO: 14229 - DNA, 82 bp, Homo sapiens
aggatacgcgctcggcgctgggacgcgactgcgctcagttctctcctctcggaagctgcagccatgatggaagtttgagagt

SEQ ID NO: 14230 - DNA, 85 bp, Homo sapiens
ctcggcgctgggacgcgactgcgctcagttctctcctctcggaagctgcagccatgatggaagtttgagagttgagccgctgtga

SEQ ID NO: 14231 - DNA, 83 bp, Homo sapiens
acgcgactgcgctcagttctctcctctcggaagctgcagccatgatggaagtttgagagttgagccgctgtgaggcgaggccg

SEQ ID NO: 14232 - DNA, 83 bp, Homo sapiens
tcagttctctcctctcggaagctgcagccatgatggaagtttgagagttgagccgctgtgaggcgaggccgggctcaggcgag

SEQ ID NO: 14233 - DNA, 84 bp, Homo sapiens
tctcctctcggaagctgcagccatgatggaagtttgagagttgagccgctgtgaggcgaggccgggctcaggcgagggagatga

SEQ ID NO: 14234 - DNA, 76 bp, Homo sapiens
aagtttgagagttgagccgctgtgaggcgaggccgggctcaggcgagggagatgagagacggcggcggccgcggcc

SEQ ID NO: 14235 - DNA, 76 bp, Homo sapiens
aggcgaggccgggctcaggcgagggagatgagagacggcggcggccgcggcccggagcccctctcagcgcctgtga

SEQ ID NO: 14236 - DNA, 77 bp, Homo sapiens
aggccgggctcaggcgagggagatgagagacggcggcggccgcggcccggagcccctctcagcgcctgtgagcagcc

SEQ ID NO: 14237 - DNA, 76 bp, Homo sapiens
agatgagagacggcggcggccgcggcccggagcccctctcagcgcctgtgagcagccgcgggggcagcgccctcgg

SEQ ID NO: 14238 - DNA, 73 bp, Homo sapiens
ggcggccgcggcccggagcccctctcagcgcctgtgagcagccgcgggggcagcgccctcggggagccggccg

SEQ ID NO: 14239 - DNA, 76 bp, Homo sapiens
ccctctcagcgcctgtgagcagccgcgggggcagcgccctcggggagccggccggcctgcggcggcggcagcggcg

SEQ ID NO: 14240 - DNA, 74 bp, Homo sapiens
cctgtgagcagccgcgggggcagcgccctcggggagccggccggcctgcggcggcggcagcggcggcgtttctc

SEQ ID NO: 14241 - DNA, 73 bp, Homo sapiens
agcagccgcgggggcagcgccctcggggagccggccggcctgcggcggcggcagcggcggcgtttctcgcctc

SEQ ID NO: 14242 - DNA, 70 bp, Homo sapiens
agcgccctcggggagccggccggcctgcggcggcggcagcggcggcgtttctcgcctcctcttcgtcttt

SEQ ID NO: 14243 - DNA, 72 bp, Homo sapiens
gggagccggccggcctgcggcggcggcagcggcggcgtttctcgcctcctcttcgtcttttctaaccgtgca

SEQ ID NO: 14244 - DNA, 73 bp, Homo sapiens
cggcctgcggcggcggcagcggcggcgtttctcgcctcctcttcgtcttttctaaccgtgcagcctcttcctc

SEQ ID NO: 14245 - DNA, 72 bp, Homo sapiens
cggcggcagcggcggcgtttctcgcctcctcttcgtcttttctaaccgtgcagcctcttcctcggcttctcc

SEQ ID NO: 14246 - DNA, 71 bp, Homo sapiens
agcggcggcgtttctcgcctcctcttcgtcttttctaaccgtgcagcctcttcctcggcttctcctgaaag

SEQ ID NO: 14247 - DNA, 70 bp, Homo sapiens
gtttctcgcctcctcttcgtcttttctaaccgtgcagcctcttcctcggcttctcctgaaagggaaggtg

SEQ ID NO: 14248 - DNA, 70 bp, Homo sapiens
tcctcttcgtcttttctaaccgtgcagcctcttcctcggcttctcctgaaagggaaggtggaagccgtgg

SEQ ID NO: 14249 - DNA, 70 bp, Homo sapiens
tcttttctaaccgtgcagcctcttcctcggcttctcctgaaagggaaggtggaagccgtgggctcgggcg

SEQ ID NO: 14250 - DNA, 72 bp, Homo sapiens
cagcctcttcctcggcttctcctgaaagggaaggtggaagccgtgggctcgggcgggagccggctgaggcgc

SEQ ID NO: 14251 - DNA, 71 bp, Homo sapiens
tcttcctcggcttctcctgaaagggaaggtggaagccgtgggctcgggcgggagccggctgaggcgcggcg

SEQ ID NO: 14252 - DNA, 70 bp, Homo sapiens
cttctcctgaaagggaaggtggaagccgtgggctcgggcgggagccggctgaggcgcggcggcggcggcg

SEQ ID NO: 14253 - DNA, 75 bp, Homo sapiens
cggcggcggcggccgcggcggctgcagctccagggagggggtctgagtcgcctgtcaccatttccagggctggga

SEQ ID NO: 14254 - DNA, 75 bp, Homo sapiens
ggccgcggcggctgcagctccagggagggggtctgagtcgcctgtcaccatttccagggctgggaacgccggaga

SEQ ID NO: 14255 - DNA, 76 bp, Homo sapiens
gctgcagctccagggagggggtctgagtcgcctgtcaccatttccagggctgggaacgccggagagttggtctctc

SEQ ID NO: 14256 - DNA, 72 bp, Homo sapiens
agctccagggagggggtctgagtcgcctgtcaccatttccagggctgggaacgccggagagttggtctctcc

SEQ ID NO: 14257 - DNA, 74 bp, Homo sapiens
gtctgagtcgcctgtcaccatttccagggctgggaacgccggagagttggtctctccccttctactgcctccaa

SEQ ID NO: 14258 - DNA, 72 bp, Homo sapiens
agtcgcctgtcaccatttccagggctgggaacgccggagagttggtctctccccttctactgcctccaacac

SEQ ID NO: 14259 - DNA, 70 bp, Homo sapiens
accatttccagggctgggaacgccggagagttggtctctccccttctactgcctccaacacggcggcggc

SEQ ID NO: 14260 - DNA, 68 bp, Homo sapiens
ggcggcggcggctggcacatccagggacccgggccggttttaaacctcccgtgcgccgccgccgcacc

SEQ ID NO: 14261 - DNA, 66 bp, Homo sapiens
cggcggctggcacatccagggacccgggccggttttaaacctcccgtgcgccgccgccgcaccccc

SEQ ID NO: 14262 - DNA, 63 bp, Homo sapiens
acatccagggacccgggccggttttaaacctcccgtgcgccgccgccgcaccccccgtggccc

SEQ ID NO: 14263 - DNA, 61 bp, Homo sapiens
acccgggccggttttaaacctcccgtgcgccgccgccgcaccccccgtggcccgggctccg

SEQ ID NO: 14264 - DNA, 65 bp, Homo sapiens
ttttaaacctcccgtgcgccgccgccgcaccccccgtggcccgggctccggaggccgccggcgga

SEQ ID NO: 14265 - DNA, 69 bp, Homo sapiens
gtgcgccgccgccgcaccccccgtggcccgggctccggaggccgccggcggaggcagccgttcggagga

SEQ ID NO: 14266 - DNA, 68 bp, Homo sapiens
ccgtggcccgggctccggaggccgccggcggaggcagccgttcggaggattattcgtcttctccccat

SEQ ID NO: 14267 - DNA, 70 bp, Homo sapiens
cccgggctccggaggccgccggcggaggcagccgttcggaggattattcgtcttctccccattccgctgc

SEQ ID NO: 14268 - DNA, 73 bp, Homo sapiens
cggaggccgccggcggaggcagccgttcggaggattattcgtcttctccccattccgctgccgccgctgccag

SEQ ID NO: 14269 - DNA, 79 bp, Homo sapiens
gaggcagccgttcggaggattattcgtcttctccccattccgctgccgccgctgccaggcctctggctgctgaggagaa

SEQ ID NO: 14270 - DNA, 78 bp, Homo sapiens
agccgttcggaggattattcgtcttctccccattccgctgccgccgctgccaggcctctggctgctgaggagaagcag

SEQ ID NO: 14271 - DNA, 81 bp, Homo sapiens
attattcgtcttctccccattccgctgccgccgctgccaggcctctggctgctgaggagaagcaggcccagtcgctgcaac

SEQ ID NO: 14272 - DNA, 85 bp, Homo sapiens
tcttctccccattccgctgccgccgctgccaggcctctggctgctgaggagaagcaggcccagtcgctgcaaccatccagcagcc

SEQ ID NO: 14273 - DNA, 89 bp, Homo sapiens
tccgctgccgccgctgccaggcctctggctgctgaggagaagcaggcccagtcgctgcaaccatccagcagccgccgcagcagccatta

SEQ ID NO: 14274 - DNA, 87 bp, Homo sapiens
gctgccaggcctctggctgctgaggagaagcaggcccagtcgctgcaaccatccagcagccgccgcagcagccattacccggctgcg

SEQ ID NO: 14275 - DNA, 85 bp, Homo sapiens
cctctggctgctgaggagaagcaggcccagtcgctgcaaccatccagcagccgccgcagcagccattacccggctgcggtccaga

SEQ ID NO: 14276 - DNA, 83 bp, Homo sapiens
ctgaggagaagcaggcccagtcgctgcaaccatccagcagccgccgcagcagccattacccggctgcggtccagagccaagcg

SEQ ID NO: 14277 - DNA, 83 bp, Homo sapiens
aagcaggcccagtcgctgcaaccatccagcagccgccgcagcagccattacccggctgcggtccagagccaagcggcggcaga

SEQ ID NO: 14278 - DNA, 82 bp, Homo sapiens
aaccatccagcagccgccgcagcagccattacccggctgcggtccagagccaagcggcggcagagcgaggggcatcagctac

SEQ ID NO: 14279 - DNA, 81 bp, Homo sapiens
cgccgcagcagccattacccggctgcggtccagagccaagcggcggcagagcgaggggcatcagctaccgccaagtccaga

SEQ ID NO: 14280 - DNA, 78 bp, Homo sapiens
agccattacccggctgcggtccagagccaagcggcggcagagcgaggggcatcagctaccgccaagtccagagccatt

SEQ ID NO: 14281 - DNA, 79 bp, Homo sapiens
tacccggctgcggtccagagccaagcggcggcagagcgaggggcatcagctaccgccaagtccagagccatttccatcc

SEQ ID NO: 14282 - DNA, 81 bp, Homo sapiens
cggtccagagccaagcggcggcagagcgaggggcatcagctaccgccaagtccagagccatttccatcctgcagaagaagc

SEQ ID NO: 14283 - DNA, 79 bp, Homo sapiens
aagcggcggcagagcgaggggcatcagctaccgccaagtccagagccatttccatcctgcagaagaagccccgccacca

SEQ ID NO: 14284 - DNA, 82 bp, Homo sapiens
atcagctaccgccaagtccagagccatttccatcctgcagaagaagccccgccaccagcagcttctgccatctctctcctcc

SEQ ID NO: 14285 - DNA, 80 bp, Homo sapiens
agagccatttccatcctgcagaagaagccccgccaccagcagcttctgccatctctctcctcctttttcttcagccacag

SEQ ID NO: 14286 - DNA, 82 bp, Homo sapiens
atcctgcagaagaagccccgccaccagcagcttctgccatctctctcctcctttttcttcagccacaggctcccagacatga

SEQ ID NO: 14287 - DNA, 82 bp, Homo sapiens
aagaagccccgccaccagcagcttctgccatctctctcctcctttttcttcagccacaggctcccagacatgacagccatca

SEQ ID NO: 14288 - DNA, 84 bp, Homo sapiens
ccaccagcagcttctgccatctctctcctcctttttcttcagccacaggctcccagacatgacagccatcatcaaagagatcgt

SEQ ID NO: 14289 - DNA, 83 bp, Homo sapiens
cttctgccatctctctcctcctttttcttcagccacaggctcccagacatgacagccatcatcaaagagatcgttagcagaaa

SEQ ID NO: 14290 - DNA, 80 bp, Homo sapiens
atctctctcctcctttttcttcagccacaggctcccagacatgacagccatcatcaaagagatcgttagcagaaacaaaa

SEQ ID NO: 14291 - DNA, 81 bp, Homo sapiens
ctttttcttcagccacaggctcccagacatgacagccatcatcaaagagatcgttagcagaaacaaaaggagatatcaaga

SEQ ID NO: 14292 - DNA, 83 bp, Homo sapiens
agccacaggctcccagacatgacagccatcatcaaagagatcgttagcagaaacaaaaggagatatcaagaggatggattcga

SEQ ID NO: 14293 - DNA, 81 bp, Homo sapiens
tcccagacatgacagccatcatcaaagagatcgttagcagaaacaaaaggagatatcaagaggatggattcgacttagact

SEQ ID NO: 14294 - DNA, 81 bp, Homo sapiens
tgacagccatcatcaaagagatcgttagcagaaacaaaaggagatatcaagaggatggattcgacttagacttgacctgta

SEQ ID NO: 14295 - DNA, 76 bp, Homo sapiens
atcaaagagatcgttagcagaaacaaaaggagatatcaagaggatggattcgacttagacttgacctgtatccatt

SEQ ID NO: 14296 - DNA, 77 bp, Homo sapiens
agagatcgttagcagaaacaaaaggagatatcaagaggatggattcgacttagacttgacctgtatccatttctgcg

SEQ ID NO: 14297 - DNA, 76 bp, Homo sapiens
aaacaaaaggagatatcaagaggatggattcgacttagacttgacctgtatccatttctgcggctgctcctcttta

SEQ ID NO: 14298 - DNA, 76 bp, Homo sapiens
ttagtttgattgctgcatatttcagatatttctttccttaactaaagtactcagatatttatccaaacattattgc

SEQ ID NO: 14299 - DNA, 77 bp, Homo sapiens
tgctgcatatttcagatatttctttccttaactaaagtactcagatatttatccaaacattattgctatgggatttc

SEQ ID NO: 14300 - DNA, 75 bp, Homo sapiens
ttcagatatttctttccttaactaaagtactcagatatttatccaaacattattgctatgggatttcctgcagaa

SEQ ID NO: 14301 - DNA, 72 bp, Homo sapiens
tttctttccttaactaaagtactcagatatttatccaaacattattgctatgggatttcctgcagaaagact

SEQ ID NO: 14302 - DNA, 76 bp, Homo sapiens
taactaaagtactcagatatttatccaaacattattgctatgggatttcctgcagaaagacttgaaggcgtataca

SEQ ID NO: 14303 - DNA, 77 bp, Homo sapiens
tactcagatatttatccaaacattattgctatgggatttcctgcagaaagacttgaaggcgtatacaggaacaatat

SEQ ID NO: 14304 - DNA, 79 bp, Homo sapiens
tatttatccaaacattattgctatgggatttcctgcagaaagacttgaaggcgtatacaggaacaatattgatgatgta

SEQ ID NO: 14305 - DNA, 77 bp, Homo sapiens
ttattgctatgggatttcctgcagaaagacttgaaggcgtatacaggaacaatattgatgatgtagtaaggtaagaa

SEQ ID NO: 14306 - DNA, 76 bp, Homo sapiens
ggatttcctgcagaaagacttgaaggcgtatacaggaacaatattgatgatgtagtaaggtaagaatgctttgatt

SEQ ID NO: 14307 - DNA, 76 bp, Homo sapiens
ctgcagaaagacttgaaggcgtatacaggaacaatattgatgatgtagtaaggtaagaatgctttgattttctatt

SEQ ID NO: 14308 - DNA, 75 bp, Homo sapiens
agacttgaaggcgtatacaggaacaatattgatgatgtagtaaggtaagaatgctttgattttctatttcaaata

SEQ ID NO: 14309 - DNA, 77 bp, Homo sapiens
gcgtatacaggaacaatattgatgatgtagtaaggtaagaatgctttgattttctatttcaaatattgatgtttata

SEQ ID NO: 14310 - DNA, 69 bp, Homo sapiens
tgttttgttttaaggtttttggattcaaagcataaaaaccattacaagatatacaatctgtaagtatgt

SEQ ID NO: 14311 - DNA, 68 bp, Homo sapiens
gttttaaggtttttggattcaaagcataaaaaccattacaagatatacaatctgtaagtatgttttct

SEQ ID NO: 14312 - DNA, 77 bp, Homo sapiens
tggattcaaagcataaaaaccattacaagatatacaatctgtaagtatgttttcttatttgtatgcttgcaaatatc

SEQ ID NO: 14313 - DNA, 76 bp, Homo sapiens
caaagcataaaaaccattacaagatatacaatctgtaagtatgttttcttatttgtatgcttgcaaatatcttcta

SEQ ID NO: 14314 - DNA, 75 bp, Homo sapiens
ccattacaagatatacaatctgtaagtatgttttcttatttgtatgcttgcaaatatcttctaaaacaactatta

SEQ ID NO: 14315 - DNA, 74 bp, Homo sapiens
gatatacaatctgtaagtatgttttcttatttgtatgcttgcaaatatcttctaaaacaactattaagtgaaag

SEQ ID NO: 14316 - DNA, 66 bp, Homo sapiens
atgtttgttagtattagtacttttttttcttcctaagtgcaaaagataactttatatcacttttaa

SEQ ID NO: 14317 - DNA, 64 bp, Homo sapiens
gtattagtacttttttttcttcctaagtgcaaaagataactttatatcacttttaaacttttct

SEQ ID NO: 14318 - DNA, 69 bp, Homo sapiens
tttcttcctaagtgcaaaagataactttatatcacttttaaacttttcttttagttgtgctgaaagaca

SEQ ID NO: 14319 - DNA, 71 bp, Homo sapiens
agtgcaaaagataactttatatcacttttaaacttttcttttagttgtgctgaaagacattatgacaccgc

SEQ ID NO: 14320 - DNA, 69 bp, Homo sapiens
agataactttatatcacttttaaacttttcttttagttgtgctgaaagacattatgacaccgccaaatt

SEQ ID NO: 14321 - DNA, 72 bp, Homo sapiens
tatcacttttaaacttttcttttagttgtgctgaaagacattatgacaccgccaaatttaattgcagaggta

SEQ ID NO: 14322 - DNA, 73 bp, Homo sapiens
aacttttcttttagttgtgctgaaagacattatgacaccgccaaatttaattgcagaggtaggtatgaatgta

SEQ ID NO: 14323 - DNA, 76 bp, Homo sapiens
ttttagttgtgctgaaagacattatgacaccgccaaatttaattgcagaggtaggtatgaatgtactgtactatgt

SEQ ID NO: 14324 - DNA, 76 bp, Homo sapiens
ctgaaagacattatgacaccgccaaatttaattgcagaggtaggtatgaatgtactgtactatgttgtataactta

SEQ ID NO: 14325 - DNA, 74 bp, Homo sapiens
tatgacaccgccaaatttaattgcagaggtaggtatgaatgtactgtactatgttgtataacttaaacccgata

SEQ ID NO: 14326 - DNA, 74 bp, Homo sapiens
gccaaatttaattgcagaggtaggtatgaatgtactgtactatgttgtataacttaaacccgatagactgtatc

SEQ ID NO: 14327 - DNA, 76 bp, Homo sapiens
aattgcagaggtaggtatgaatgtactgtactatgttgtataacttaaacccgatagactgtatcttactgtcata

SEQ ID NO: 14328 - DNA, 69 bp, Homo sapiens
ttcaagagtttttttttcttattctgaggttatctttttaccacagttgcacaatatccttttgaagac

SEQ ID NO: 14329 - DNA, 69 bp, Homo sapiens
tttttttcttattctgaggttatctttttaccacagttgcacaatatccttttgaagaccataacccac

SEQ ID NO: 14330 - DNA, 73 bp, Homo sapiens
tattctgaggttatctttttaccacagttgcacaatatccttttgaagaccataacccaccacagctagaact

SEQ ID NO: 14331 - DNA, 72 bp, Homo sapiens
ttatctttttaccacagttgcacaatatccttttgaagaccataacccaccacagctagaacttatcaaacc

SEQ ID NO: 14332 - DNA, 70 bp, Homo sapiens
ttttaccacagttgcacaatatccttttgaagaccataacccaccacagctagaacttatcaaacccttt

SEQ ID NO: 14333 - DNA, 72 bp, Homo sapiens
acaatatccttttgaagaccataacccaccacagctagaacttatcaaacccttttgtgaagatcttgacca

SEQ ID NO: 14334 - DNA, 72 bp, Homo sapiens
ttttgaagaccataacccaccacagctagaacttatcaaacccttttgtgaagatcttgaccaatggctaag

SEQ ID NO: 14335 - DNA, 76 bp, Homo sapiens
ataacccaccacagctagaacttatcaaacccttttgtgaagatcttgaccaatggctaagtgaagatgacaatca

SEQ ID NO: 14336 - DNA, 81 bp, Homo sapiens
acagctagaacttatcaaacccttttgtgaagatcttgaccaatggctaagtgaagatgacaatcatgttgcagcaattca

SEQ ID NO: 14337 - DNA, 79 bp, Homo sapiens
aacttatcaaacccttttgtgaagatcttgaccaatggctaagtgaagatgacaatcatgttgcagcaattcactgtaa

SEQ ID NO: 14338 - DNA, 79 bp, Homo sapiens
aacccttttgtgaagatcttgaccaatggctaagtgaagatgacaatcatgttgcagcaattcactgtaaagctggaaa

SEQ ID NO: 14339 - DNA, 79 bp, Homo sapiens
aagatcttgaccaatggctaagtgaagatgacaatcatgttgcagcaattcactgtaaagctggaaagggacgaactgg

SEQ ID NO: 14340 - DNA, 80 bp, Homo sapiens
accaatggctaagtgaagatgacaatcatgttgcagcaattcactgtaaagctggaaagggacgaactggtgtaatgata

SEQ ID NO: 14341 - DNA, 82 bp, Homo sapiens
ctaagtgaagatgacaatcatgttgcagcaattcactgtaaagctggaaagggacgaactggtgtaatgatatgtgcatatt

SEQ ID NO: 14342 - DNA, 82 bp, Homo sapiens
atgacaatcatgttgcagcaattcactgtaaagctggaaagggacgaactggtgtaatgatatgtgcatatttattacatcg

SEQ ID NO: 14343 - DNA, 78 bp, Homo sapiens
tgcagcaattcactgtaaagctggaaagggacgaactggtgtaatgatatgtgcatatttattacatcggggcaaatt

SEQ ID NO: 14344 - DNA, 72 bp, Homo sapiens
actgtaaagctggaaagggacgaactggtgtaatgatatgtgcatatttattacatcggggcaaatttttaa

SEQ ID NO: 14345 - DNA, 72 bp, Homo sapiens
aaagctggaaagggacgaactggtgtaatgatatgtgcatatttattacatcggggcaaatttttaaaggca

SEQ ID NO: 14346 - DNA, 73 bp, Homo sapiens
acgaactggtgtaatgatatgtgcatatttattacatcggggcaaatttttaaaggcacaagaggccctagat

SEQ ID NO: 14347 - DNA, 75 bp, Homo sapiens
tggtgtaatgatatgtgcatatttattacatcggggcaaatttttaaaggcacaagaggccctagatttctatgg

SEQ ID NO: 14348 - DNA, 71 bp, Homo sapiens
atgtgcatatttattacatcggggcaaatttttaaaggcacaagaggccctagatttctatggggaagtaa

SEQ ID NO: 14349 - DNA, 67 bp, Homo sapiens
atttattacatcggggcaaatttttaaaggcacaagaggccctagatttctatggggaagtaaggac

SEQ ID NO: 14350 - DNA, 68 bp, Homo sapiens
gcaaatttttaaaggcacaagaggccctagatttctatggggaagtaaggaccagagacaaaaaggta

SEQ ID NO: 14351 - DNA, 67 bp, Homo sapiens
ttttaaaggcacaagaggccctagatttctatggggaagtaaggaccagagacaaaaaggtaagtta

SEQ ID NO: 14352 - DNA, 66 bp, Homo sapiens
aagaggccctagatttctatggggaagtaaggaccagagacaaaaaggtaagttattttttgatgt

SEQ ID NO: 14353 - DNA, 65 bp, Homo sapiens
gatttctatggggaagtaaggaccagagacaaaaaggtaagttattttttgatgtttttcctttc

SEQ ID NO: 14354 - DNA, 74 bp, Homo sapiens
agcatgtgcttctgcttattaaaaaatgttaactataaaataatctttaggcagatcctacaggaggtattcca

SEQ ID NO: 14355 - DNA, 71 bp, Homo sapiens
gcttattaaaaaatgttaactataaaataatctttaggcagatcctacaggaggtattccagataaaggca

SEQ ID NO: 14356 - DNA, 74 bp, Homo sapiens
aatgttaactataaaataatctttaggcagatcctacaggaggtattccagataaaggcattattgtcatagga

SEQ ID NO: 14357 - DNA, 77 bp, Homo sapiens
aactataaaataatctttaggcagatcctacaggaggtattccagataaaggcattattgtcataggagatggcagc

SEQ ID NO: 14358 - DNA, 81 bp, Homo sapiens
ataatctttaggcagatcctacaggaggtattccagataaaggcattattgtcataggagatggcagctccatggatgtta

SEQ ID NO: 14359 - DNA, 79 bp, Homo sapiens
atcctacaggaggtattccagataaaggcattattgtcataggagatggcagctccatggatgttattgccccttaaga

SEQ ID NO: 14360 - DNA, 78 bp, Homo sapiens
ggaggtattccagataaaggcattattgtcataggagatggcagctccatggatgttattgccccttaagaccttcca

SEQ ID NO: 14361 - DNA, 73 bp, Homo sapiens
gtgatattgatgatcctgaccttgtagaggccaaggctaaagtatgtatttattagtttttaacaagagttta

SEQ ID NO: 14362 - DNA, 68 bp, Homo sapiens
gaacattttttttcaatttggcttctcttttttttctgtccaccagggagtaactattcccagtcaga

SEQ ID NO: 14363 - DNA, 72 bp, Homo sapiens
ttttcaatttggcttctcttttttttctgtccaccagggagtaactattcccagtcagaggcgctatgtgta

SEQ ID NO: 14364 - DNA, 73 bp, Homo sapiens
tttggcttctcttttttttctgtccaccagggagtaactattcccagtcagaggcgctatgtgtattattata

SEQ ID NO: 14365 - DNA, 74 bp, Homo sapiens
tttttctgtccaccagggagtaactattcccagtcagaggcgctatgtgtattattatagctacctgttaaaga

SEQ ID NO: 14366 - DNA, 77 bp, Homo sapiens
caccagggagtaactattcccagtcagaggcgctatgtgtattattatagctacctgttaaagaatcatctggatta

SEQ ID NO: 14367 - DNA, 77 bp, Homo sapiens
agtaactattcccagtcagaggcgctatgtgtattattatagctacctgttaaagaatcatctggattatagaccag

SEQ ID NO: 14368 - DNA, 81 bp, Homo sapiens
cagtcagaggcgctatgtgtattattatagctacctgttaaagaatcatctggattatagaccagtggcactgttgtttca

SEQ ID NO: 14369 - DNA, 79 bp, Homo sapiens
agaggcgctatgtgtattattatagctacctgttaaagaatcatctggattatagaccagtggcactgttgtttcacaa

SEQ ID NO: 14370 - DNA, 78 bp, Homo sapiens
attattatagctacctgttaaagaatcatctggattatagaccagtggcactgttgtttcacaagatgatgtttgaaa

SEQ ID NO: 14371 - DNA, 79 bp, Homo sapiens
tatagctacctgttaaagaatcatctggattatagaccagtggcactgttgtttcacaagatgatgtttgaaactattc

SEQ ID NO: 14372 - DNA, 77 bp, Homo sapiens
ttaaaggcatttcctgtgaaataatactggtatgtatttaaccatgcagatcctcagtttgtggtctgccagctaaa

SEQ ID NO: 14373 - DNA, 79 bp, Homo sapiens
ctgtgaaataatactggtatgtatttaaccatgcagatcctcagtttgtggtctgccagctaaaggtgaagatatattc

SEQ ID NO: 14374 - DNA, 77 bp, Homo sapiens
aaataatactggtatgtatttaaccatgcagatcctcagtttgtggtctgccagctaaaggtgaagatatattcctc

SEQ ID NO: 14375 - DNA, 79 bp, Homo sapiens
tatgtatttaaccatgcagatcctcagtttgtggtctgccagctaaaggtgaagatatattcctccaattcaggaccca

SEQ ID NO: 14376 - DNA, 78 bp, Homo sapiens
taaccatgcagatcctcagtttgtggtctgccagctaaaggtgaagatatattcctccaattcaggacccacacgacg

SEQ ID NO: 14377 - DNA, 74 bp, Homo sapiens
tcagtttgtggtctgccagctaaaggtgaagatatattcctccaattcaggacccacacgacgggaagacaagt

SEQ ID NO: 14378 - DNA, 74 bp, Homo sapiens
gtctgccagctaaaggtgaagatatattcctccaattcaggacccacacgacgggaagacaagttcatgtactt

SEQ ID NO: 14379 - DNA, 72 bp, Homo sapiens
agctaaaggtgaagatatattcctccaattcaggacccacacgacgggaagacaagttcatgtactttgagt

SEQ ID NO: 14380 - DNA, 70 bp, Homo sapiens
attcctccaattcaggacccacacgacgggaagacaagttcatgtactttgagttccctcagccgttacc

SEQ ID NO: 14381 - DNA, 74 bp, Homo sapiens
gacccacacgacgggaagacaagttcatgtactttgagttccctcagccgttacctgtgtgtggtgatatcaaa

SEQ ID NO: 14382 - DNA, 73 bp, Homo sapiens
acgggaagacaagttcatgtactttgagttccctcagccgttacctgtgtgtggtgatatcaaagtagagttc

SEQ ID NO: 14383 - DNA, 74 bp, Homo sapiens
acaagttcatgtactttgagttccctcagccgttacctgtgtgtggtgatatcaaagtagagttcttccacaaa

SEQ ID NO: 14384 - DNA, 74 bp, Homo sapiens
atgtactttgagttccctcagccgttacctgtgtgtggtgatatcaaagtagagttcttccacaaacagaacaa

SEQ ID NO: 14385 - DNA, 74 bp, Homo sapiens
agttccctcagccgttacctgtgtgtggtgatatcaaagtagagttcttccacaaacagaacaagatgctaaaa

SEQ ID NO: 14386 - DNA, 72 bp, Homo sapiens
ttacctgtgtgtggtgatatcaaagtagagttcttccacaaacagaacaagatgctaaaaaaggtttgtact

SEQ ID NO: 14387 - DNA, 71 bp, Homo sapiens
gtgtgtggtgatatcaaagtagagttcttccacaaacagaacaagatgctaaaaaaggtttgtactttact

SEQ ID NO: 14388 - DNA, 69 bp, Homo sapiens
caaagtagagttcttccacaaacagaacaagatgctaaaaaaggtttgtactttactttcattgggaga

SEQ ID NO: 14389 - DNA, 70 bp, Homo sapiens
gagttcttccacaaacagaacaagatgctaaaaaaggtttgtactttactttcattgggagaaatatcca

SEQ ID NO: 14390 - DNA, 66 bp, Homo sapiens
tttttttttaggacaaaatgtttcacttttgggtaaatacattcttcataccaggaccagaggaaa

SEQ ID NO: 14391 - DNA, 69 bp, Homo sapiens
ttttaggacaaaatgtttcacttttgggtaaatacattcttcataccaggaccagaggaaacctcagaa

SEQ ID NO: 14392 - DNA, 68 bp, Homo sapiens
aaatgtttcacttttgggtaaatacattcttcataccaggaccagaggaaacctcagaaaaagtagaa

SEQ ID NO: 14393 - DNA, 69 bp, Homo sapiens
ttttgggtaaatacattcttcataccaggaccagaggaaacctcagaaaaagtagaaaatggaagtcta

SEQ ID NO: 14394 - DNA, 73 bp, Homo sapiens
aatacattcttcataccaggaccagaggaaacctcagaaaaagtagaaaatggaagtctatgtgatcaagaaa

SEQ ID NO: 14395 - DNA, 76 bp, Homo sapiens
ataccaggaccagaggaaacctcagaaaaagtagaaaatggaagtctatgtgatcaagaaatcgatagcatttgca

SEQ ID NO: 14396 - DNA, 77 bp, Homo sapiens
accagaggaaacctcagaaaaagtagaaaatggaagtctatgtgatcaagaaatcgatagcatttgcagtatagagc

SEQ ID NO: 14397 - DNA, 81 bp, Homo sapiens
agaaaaagtagaaaatggaagtctatgtgatcaagaaatcgatagcatttgcagtatagagcgtgcagataatgacaagga

SEQ ID NO: 14398 - DNA, 83 bp, Homo sapiens
gaaaatggaagtctatgtgatcaagaaatcgatagcatttgcagtatagagcgtgcagataatgacaaggaatatctagtact

SEQ ID NO: 14399 - DNA, 82 bp, Homo sapiens
agtctatgtgatcaagaaatcgatagcatttgcagtatagagcgtgcagataatgacaaggaatatctagtacttactttaa

SEQ ID NO: 14400 - DNA, 80 bp, Homo sapiens
gtgatcaagaaatcgatagcatttgcagtatagagcgtgcagataatgacaaggaatatctagtacttactttaacaaaa

SEQ ID NO: 14401 - DNA, 80 bp, Homo sapiens
atcgatagcatttgcagtatagagcgtgcagataatgacaaggaatatctagtacttactttaacaaaaaatgatcttga

SEQ ID NO: 14402 - DNA, 79 bp, Homo sapiens
catttgcagtatagagcgtgcagataatgacaaggaatatctagtacttactttaacaaaaaatgatcttgacaaagca

SEQ ID NO: 14403 - DNA, 76 bp, Homo sapiens
gagcgtgcagataatgacaaggaatatctagtacttactttaacaaaaaatgatcttgacaaagcaaataaagaca

SEQ ID NO: 14404 - DNA, 73 bp, Homo sapiens
cagataatgacaaggaatatctagtacttactttaacaaaaaatgatcttgacaaagcaaataaagacaaagc

SEQ ID NO: 14405 - DNA, 70 bp, Homo sapiens
ggaatatctagtacttactttaacaaaaaatgatcttgacaaagcaaataaagacaaagccaaccgatac

SEQ ID NO: 14406 - DNA, 69 bp, Homo sapiens
gtacttactttaacaaaaaatgatcttgacaaagcaaataaagacaaagccaaccgatacttttctcca

SEQ ID NO: 14407 - DNA, 67 bp, Homo sapiens
acaaaaaatgatcttgacaaagcaaataaagacaaagccaaccgatacttttctccaaattttaagg

SEQ ID NO: 14408 - DNA, 69 bp, Homo sapiens
tgatcttgacaaagcaaataaagacaaagccaaccgatacttttctccaaattttaaggtcagttaaat

SEQ ID NO: 14409 - DNA, 64 bp, Homo sapiens
aagacaaagccaaccgatacttttctccaaattttaaggtcagttaaattaaacattttgtggg

SEQ ID NO: 14410 - DNA, 71 bp, Homo sapiens
gatgagtcatatttgtgggttttcattttaaattttctttctctaggtgaagctgtacttcacaaaaacag

SEQ ID NO: 14411 - DNA, 69 bp, Homo sapiens
tatttgtgggttttcattttaaattttctttctctaggtgaagctgtacttcacaaaaacagtagagga

SEQ ID NO: 14412 - DNA, 71 bp, Homo sapiens
tttcattttaaattttctttctctaggtgaagctgtacttcacaaaaacagtagaggagccgtcaaatcca

SEQ ID NO: 14413 - DNA, 73 bp, Homo sapiens
aattttctttctctaggtgaagctgtacttcacaaaaacagtagaggagccgtcaaatccagaggctagcagt

SEQ ID NO: 14414 - DNA, 77 bp, Homo sapiens
ttctctaggtgaagctgtacttcacaaaaacagtagaggagccgtcaaatccagaggctagcagttcaacttctgta

SEQ ID NO: 14415 - DNA, 76 bp, Homo sapiens
aagctgtacttcacaaaaacagtagaggagccgtcaaatccagaggctagcagttcaacttctgtaacaccagatg

SEQ ID NO: 14416 - DNA, 77 bp, Homo sapiens
ttcacaaaaacagtagaggagccgtcaaatccagaggctagcagttcaacttctgtaacaccagatgttagtgacaa

SEQ ID NO: 14417 - DNA, 76 bp, Homo sapiens
aaacagtagaggagccgtcaaatccagaggctagcagttcaacttctgtaacaccagatgttagtgacaatgaacc

SEQ ID NO: 14418 - DNA, 80 bp, Homo sapiens
agccgtcaaatccagaggctagcagttcaacttctgtaacaccagatgttagtgacaatgaacctgatcattatagatat

SEQ ID NO: 14419 - DNA, 82 bp, Homo sapiens
aatccagaggctagcagttcaacttctgtaacaccagatgttagtgacaatgaacctgatcattatagatattctgacacca

SEQ ID NO: 14420 - DNA, 83 bp, Homo sapiens
agttcaacttctgtaacaccagatgttagtgacaatgaacctgatcattatagatattctgacaccactgactctgatccaga

SEQ ID NO: 14421 - DNA, 84 bp, Homo sapiens
aacttctgtaacaccagatgttagtgacaatgaacctgatcattatagatattctgacaccactgactctgatccagagaatga

SEQ ID NO: 14422 - DNA, 84 bp, Homo sapiens
agatgttagtgacaatgaacctgatcattatagatattctgacaccactgactctgatccagagaatgaaccttttgatgaaga

SEQ ID NO: 14423 - DNA, 87 bp, Homo sapiens
ttagtgacaatgaacctgatcattatagatattctgacaccactgactctgatccagagaatgaaccttttgatgaagatcagcata

SEQ ID NO: 14424 - DNA, 84 bp, Homo sapiens
aacctgatcattatagatattctgacaccactgactctgatccagagaatgaaccttttgatgaagatcagcatacacaaatta

SEQ ID NO: 14425 - DNA, 81 bp, Homo sapiens
attatagatattctgacaccactgactctgatccagagaatgaaccttttgatgaagatcagcatacacaaattacaaaag

SEQ ID NO: 14426 - DNA, 79 bp, Homo sapiens
tgacaccactgactctgatccagagaatgaaccttttgatgaagatcagcatacacaaattacaaaagtctgaattttt

SEQ ID NO: 14427 - DNA, 76 bp, Homo sapiens
cactgactctgatccagagaatgaaccttttgatgaagatcagcatacacaaattacaaaagtctgaatttttttt

SEQ ID NO: 14428 - DNA, 73 bp, Homo sapiens
ccagagaatgaaccttttgatgaagatcagcatacacaaattacaaaagtctgaatttttttttatcaagagg

SEQ ID NO: 14429 - DNA, 71 bp, Homo sapiens
ccttttgatgaagatcagcatacacaaattacaaaagtctgaatttttttttatcaagagggataaaacac

SEQ ID NO: 14430 - DNA, 73 bp, Homo sapiens
gatgaagatcagcatacacaaattacaaaagtctgaatttttttttatcaagagggataaaacaccatgaaaa

SEQ ID NO: 14431 - DNA, 69 bp, Homo sapiens
cagcatacacaaattacaaaagtctgaatttttttttatcaagagggataaaacaccatgaaaataaac

SEQ ID NO: 14432 - DNA, 68 bp, Homo sapiens
tacaaaagtctgaatttttttttatcaagagggataaaacaccatgaaaataaacttgaataaactga

SEQ ID NO: 14433 - DNA, 66 bp, Homo sapiens
gaatttttttttatcaagagggataaaacaccatgaaaataaacttgaataaactgaaaatggacc

SEQ ID NO: 14434 - DNA, 65 bp, Homo sapiens
ttttttatcaagagggataaaacaccatgaaaataaacttgaataaactgaaaatggaccttttt

SEQ ID NO: 14435 - DNA, 63 bp, Homo sapiens
aagagggataaaacaccatgaaaataaacttgaataaactgaaaatggaccttttttttttta

SEQ ID NO: 14436 - DNA, 72 bp, Homo sapiens
tttttttaatggcaataggacattgtgtcagattaccagttataggaacaattctcttttcctgaccaatct

SEQ ID NO: 14437 - DNA, 74 bp, Homo sapiens
taatggcaataggacattgtgtcagattaccagttataggaacaattctcttttcctgaccaatcttgttttac

SEQ ID NO: 14438 - DNA, 73 bp, Homo sapiens
acattgtgtcagattaccagttataggaacaattctcttttcctgaccaatcttgttttaccctatacatcca

SEQ ID NO: 14439 - DNA, 69 bp, Homo sapiens
agattaccagttataggaacaattctcttttcctgaccaatcttgttttaccctatacatccacagggt

SEQ ID NO: 14440 - DNA, 70 bp, Homo sapiens
ttataggaacaattctcttttcctgaccaatcttgttttaccctatacatccacagggttttgacacttg

SEQ ID NO: 14441 - DNA, 69 bp, Homo sapiens
ttttcctgaccaatcttgttttaccctatacatccacagggttttgacacttgttgtccagttgaaaaa

SEQ ID NO: 14442 - DNA, 68 bp, Homo sapiens
aatcttgttttaccctatacatccacagggttttgacacttgttgtccagttgaaaaaaggttgtgta

SEQ ID NO: 14443 - DNA, 74 bp, Homo sapiens
ttaccctatacatccacagggttttgacacttgttgtccagttgaaaaaaggttgtgtagctgtgtcatgtata

SEQ ID NO: 14444 - DNA, 71 bp, Homo sapiens
atccacagggttttgacacttgttgtccagttgaaaaaaggttgtgtagctgtgtcatgtatatacctttt

SEQ ID NO: 14445 - DNA, 72 bp, Homo sapiens
gttttgacacttgttgtccagttgaaaaaaggttgtgtagctgtgtcatgtatatacctttttgtgtcaaaa

SEQ ID NO: 14446 - DNA, 72 bp, Homo sapiens
cttgttgtccagttgaaaaaaggttgtgtagctgtgtcatgtatatacctttttgtgtcaaaaggacattta

SEQ ID NO: 14447 - DNA, 70 bp, Homo sapiens
agttgaaaaaaggttgtgtagctgtgtcatgtatatacctttttgtgtcaaaaggacatttaaaattcaa

SEQ ID NO: 14448 - DNA, 72 bp, Homo sapiens
aggttgtgtagctgtgtcatgtatatacctttttgtgtcaaaaggacatttaaaattcaattaggattaata

SEQ ID NO: 14449 - DNA, 73 bp, Homo sapiens
gctgtgtcatgtatatacctttttgtgtcaaaaggacatttaaaattcaattaggattaataaagatggcact

SEQ ID NO: 14450 - DNA, 66 bp, Homo sapiens
tacctttttgtgtcaaaaggacatttaaaattcaattaggattaataaagatggcactttcccgtt

SEQ ID NO: 14451 - DNA, 67 bp, Homo sapiens
gtgtcaaaaggacatttaaaattcaattaggattaataaagatggcactttcccgttttattccagt

SEQ ID NO: 14452 - DNA, 68 bp, Homo sapiens
ttcaattaggattaataaagatggcactttcccgttttattccagttttataaaaagtggagacagac

SEQ ID NO: 14453 - DNA, 71 bp, Homo sapiens
gattaataaagatggcactttcccgttttattccagttttataaaaagtggagacagactgatgtgtatac

SEQ ID NO: 14454 - DNA, 69 bp, Homo sapiens
atggcactttcccgttttattccagttttataaaaagtggagacagactgatgtgtatacgtaggaatt

SEQ ID NO: 14455 - DNA, 73 bp, Homo sapiens
atgtgtatacgtaggaattttttccttttgtgttctgtcaccaactgaagtggctaaagagctttgtgatata

SEQ ID NO: 14456 - DNA, 72 bp, Homo sapiens
tatacgtaggaattttttccttttgtgttctgtcaccaactgaagtggctaaagagctttgtgatatactgg

SEQ ID NO: 14457 - DNA, 73 bp, Homo sapiens
tttttccttttgtgttctgtcaccaactgaagtggctaaagagctttgtgatatactggttcacatcctaccc

SEQ ID NO: 14458 - DNA, 75 bp, Homo sapiens
ttttgtgttctgtcaccaactgaagtggctaaagagctttgtgatatactggttcacatcctacccctttgcact

SEQ ID NO: 14459 - DNA, 76 bp, Homo sapiens
accaactgaagtggctaaagagctttgtgatatactggttcacatcctacccctttgcacttgtggcaacagataa

SEQ ID NO: 14460 - DNA, 76 bp, Homo sapiens
aagtggctaaagagctttgtgatatactggttcacatcctacccctttgcacttgtggcaacagataagtttgcag

SEQ ID NO: 14461 - DNA, 76 bp, Homo sapiens
aaagagctttgtgatatactggttcacatcctacccctttgcacttgtggcaacagataagtttgcagttggctaa

SEQ ID NO: 14462 - DNA, 74 bp, Homo sapiens
atatactggttcacatcctacccctttgcacttgtggcaacagataagtttgcagttggctaagagaggtttcc

SEQ ID NO: 14463 - DNA, 73 bp, Homo sapiens
cctttgcacttgtggcaacagataagtttgcagttggctaagagaggtttccgaagggttttgctacattcta

SEQ ID NO: 14464 - DNA, 72 bp, Homo sapiens
acagataagtttgcagttggctaagagaggtttccgaagggttttgctacattctaatgcatgtattcgggt

SEQ ID NO: 14465 - DNA, 71 bp, Homo sapiens
tttgcagttggctaagagaggtttccgaagggttttgctacattctaatgcatgtattcgggttaggggaa

SEQ ID NO: 14466 - DNA, 69 bp, Homo sapiens
ctaagagaggtttccgaagggttttgctacattctaatgcatgtattcgggttaggggaatggagggaa

SEQ ID NO: 14467 - DNA, 71 bp, Homo sapiens
ggtttccgaagggttttgctacattctaatgcatgtattcgggttaggggaatggagggaatgctcagaaa

SEQ ID NO: 14468 - DNA, 71 bp, Homo sapiens
ggttttgctacattctaatgcatgtattcgggttaggggaatggagggaatgctcagaaaggaaataattt

SEQ ID NO: 14469 - DNA, 74 bp, Homo sapiens
attctaatgcatgtattcgggttaggggaatggagggaatgctcagaaaggaaataattttatgctggactctg

SEQ ID NO: 14470 - DNA, 73 bp, Homo sapiens
atgtattcgggttaggggaatggagggaatgctcagaaaggaaataattttatgctggactctggaccatata

SEQ ID NO: 14471 - DNA, 76 bp, Homo sapiens
taggggaatggagggaatgctcagaaaggaaataattttatgctggactctggaccatataccatctccagctatt

SEQ ID NO: 14472 - DNA, 78 bp, Homo sapiens
aatggagggaatgctcagaaaggaaataattttatgctggactctggaccatataccatctccagctatttacacaca

SEQ ID NO: 14473 - DNA, 75 bp, Homo sapiens
ctcagaaaggaaataattttatgctggactctggaccatataccatctccagctatttacacacacctttcttta

SEQ ID NO: 14474 - DNA, 78 bp, Homo sapiens
ataattttatgctggactctggaccatataccatctccagctatttacacacacctttctttagcatgctacagttat

SEQ ID NO: 14475 - DNA, 79 bp, Homo sapiens
actctggaccatataccatctccagctatttacacacacctttctttagcatgctacagttattaatctggacattcga

SEQ ID NO: 14476 - DNA, 78 bp, Homo sapiens
atataccatctccagctatttacacacacctttctttagcatgctacagttattaatctggacattcgaggaattggc

SEQ ID NO: 14477 - DNA, 78 bp, Homo sapiens
ctatttacacacacctttctttagcatgctacagttattaatctggacattcgaggaattggccgctgtcactgcttg

SEQ ID NO: 14478 - DNA, 78 bp, Homo sapiens
tacacacacctttctttagcatgctacagttattaatctggacattcgaggaattggccgctgtcactgcttgttgtt

SEQ ID NO: 14479 - DNA, 78 bp, Homo sapiens
ttctttagcatgctacagttattaatctggacattcgaggaattggccgctgtcactgcttgttgtttgcgcattttt

SEQ ID NO: 14480 - DNA, 75 bp, Homo sapiens
atgctacagttattaatctggacattcgaggaattggccgctgtcactgcttgttgtttgcgcatttttttttaa

SEQ ID NO: 14481 - DNA, 75 bp, Homo sapiens
tattaatctggacattcgaggaattggccgctgtcactgcttgttgtttgcgcatttttttttaaagcatattgg

SEQ ID NO: 14482 - DNA, 74 bp, Homo sapiens
acattcgaggaattggccgctgtcactgcttgttgtttgcgcatttttttttaaagcatattggtgctagaaaa

SEQ ID NO: 14483 - DNA, 74 bp, Homo sapiens
aattggccgctgtcactgcttgttgtttgcgcatttttttttaaagcatattggtgctagaaaaggcagctaaa

SEQ ID NO: 14484 - DNA, 73 bp, Homo sapiens
ttgttgtttgcgcatttttttttaaagcatattggtgctagaaaaggcagctaaaggaagtgaatctgtattg

SEQ ID NO: 14485 - DNA, 72 bp, Homo sapiens
ttttttttaaagcatattggtgctagaaaaggcagctaaaggaagtgaatctgtattggggtacaggaatga

SEQ ID NO: 14486 - DNA, 73 bp, Homo sapiens
tttaaagcatattggtgctagaaaaggcagctaaaggaagtgaatctgtattggggtacaggaatgaaccttc

SEQ ID NO: 14487 - DNA, 75 bp, Homo sapiens
ttggtgctagaaaaggcagctaaaggaagtgaatctgtattggggtacaggaatgaaccttctgcaacatcttaa

SEQ ID NO: 14488 - DNA, 74 bp, Homo sapiens
aaaggcagctaaaggaagtgaatctgtattggggtacaggaatgaaccttctgcaacatcttaagatccacaaa

SEQ ID NO: 14489 - DNA, 75 bp, Homo sapiens
taaaggaagtgaatctgtattggggtacaggaatgaaccttctgcaacatcttaagatccacaaatgaagggata

SEQ ID NO: 14490 - DNA, 75 bp, Homo sapiens
tgaatctgtattggggtacaggaatgaaccttctgcaacatcttaagatccacaaatgaagggatataaaaataa

SEQ ID NO: 14491 - DNA, 75 bp, Homo sapiens
ggtacaggaatgaaccttctgcaacatcttaagatccacaaatgaagggatataaaaataatgtcataggtaaga

SEQ ID NO: 14492 - DNA, 77 bp, Homo sapiens
gaatgaaccttctgcaacatcttaagatccacaaatgaagggatataaaaataatgtcataggtaagaaacacagca

SEQ ID NO: 14493 - DNA, 77 bp, Homo sapiens
ttctgcaacatcttaagatccacaaatgaagggatataaaaataatgtcataggtaagaaacacagcaacaatgact

SEQ ID NO: 14494 - DNA, 75 bp, Homo sapiens
tcttaagatccacaaatgaagggatataaaaataatgtcataggtaagaaacacagcaacaatgacttaaccata

SEQ ID NO: 14495 - DNA, 74 bp, Homo sapiens
aatgaagggatataaaaataatgtcataggtaagaaacacagcaacaatgacttaaccatataaatgtggaggc

SEQ ID NO: 14496 - DNA, 75 bp, Homo sapiens
ataaaaataatgtcataggtaagaaacacagcaacaatgacttaaccatataaatgtggaggctatcaacaaaga

SEQ ID NO: 14497 - DNA, 76 bp, Homo sapiens
aataatgtcataggtaagaaacacagcaacaatgacttaaccatataaatgtggaggctatcaacaaagaatgggc

SEQ ID NO: 14498 - DNA, 76 bp, Homo sapiens
cacagcaacaatgacttaaccatataaatgtggaggctatcaacaaagaatgggcttgaaacattataaaaattga

SEQ ID NO: 14499 - DNA, 74 bp, Homo sapiens
aatgacttaaccatataaatgtggaggctatcaacaaagaatgggcttgaaacattataaaaattgacaatgat

SEQ ID NO: 14500 - DNA, 74 bp, Homo sapiens
ccatataaatgtggaggctatcaacaaagaatgggcttgaaacattataaaaattgacaatgatttattaaata

SEQ ID NO: 14501 - DNA, 76 bp, Homo sapiens
gacaatgatttattaaatatgttttctcaattgtaacgacttctccatctcctgtgtaatcaaggccagtgctaaa

SEQ ID NO: 14502 - DNA, 77 bp, Homo sapiens
ttattaaatatgttttctcaattgtaacgacttctccatctcctgtgtaatcaaggccagtgctaaaattcagatgc

SEQ ID NO: 14503 - DNA, 79 bp, Homo sapiens
ttctccatctcctgtgtaatcaaggccagtgctaaaattcagatgctgttagtacctacatcagtcaacaacttacact

SEQ ID NO: 14504 - DNA, 77 bp, Homo sapiens
atctcctgtgtaatcaaggccagtgctaaaattcagatgctgttagtacctacatcagtcaacaacttacacttatt

SEQ ID NO: 14505 - DNA, 75 bp, Homo sapiens
ccagtgctaaaattcagatgctgttagtacctacatcagtcaacaacttacacttattttactagttttcaatca

SEQ ID NO: 14506 - DNA, 76 bp, Homo sapiens
agatgctgttagtacctacatcagtcaacaacttacacttattttactagttttcaatcataatacctgctgtgga

SEQ ID NO: 14507 - DNA, 76 bp, Homo sapiens
gttagtacctacatcagtcaacaacttacacttattttactagttttcaatcataatacctgctgtggatgcttca

SEQ ID NO: 14508 - DNA, 82 bp, Homo sapiens
ctacatcagtcaacaacttacacttattttactagttttcaatcataatacctgctgtggatgcttcatgtgctgcctgcaa

SEQ ID NO: 14509 - DNA, 77 bp, Homo sapiens
acttacacttattttactagttttcaatcataatacctgctgtggatgcttcatgtgctgcctgcaagcttcttttt

SEQ ID NO: 14510 - DNA, 79 bp, Homo sapiens
ttattttactagttttcaatcataatacctgctgtggatgcttcatgtgctgcctgcaagcttcttttttctcattaaa

SEQ ID NO: 14511 - DNA, 79 bp, Homo sapiens
actagttttcaatcataatacctgctgtggatgcttcatgtgctgcctgcaagcttcttttttctcattaaatataaaa

SEQ ID NO: 14512 - DNA, 81 bp, Homo sapiens
atcataatacctgctgtggatgcttcatgtgctgcctgcaagcttcttttttctcattaaatataaaatattttgtaatgc

SEQ ID NO: 14513 - DNA, 80 bp, Homo sapiens
ctgtggatgcttcatgtgctgcctgcaagcttcttttttctcattaaatataaaatattttgtaatgctgcacagaaatt

SEQ ID NO: 14514 - DNA, 79 bp, Homo sapiens
atgcttcatgtgctgcctgcaagcttcttttttctcattaaatataaaatattttgtaatgctgcacagaaattttcaa

SEQ ID NO: 14515 - DNA, 74 bp, Homo sapiens
tcttttttctcattaaatataaaatattttgtaatgctgcacagaaattttcaatttgagattctacagtaagc

SEQ ID NO: 14516 - DNA, 71 bp, Homo sapiens
ataaaatattttgtaatgctgcacagaaattttcaatttgagattctacagtaagcgttttttttctttga

SEQ ID NO: 14517 - DNA, 75 bp, Homo sapiens
gtaatgctgcacagaaattttcaatttgagattctacagtaagcgttttttttctttgaagatttatgatgcact

SEQ ID NO: 14518 - DNA, 76 bp, Homo sapiens
gctgcacagaaattttcaatttgagattctacagtaagcgttttttttctttgaagatttatgatgcacttattca

SEQ ID NO: 14519 - DNA, 76 bp, Homo sapiens
tcaatttgagattctacagtaagcgttttttttctttgaagatttatgatgcacttattcaatagctgtcagccgt

SEQ ID NO: 14520 - DNA, 76 bp, Homo sapiens
ttgagattctacagtaagcgttttttttctttgaagatttatgatgcacttattcaatagctgtcagccgttccac

SEQ ID NO: 14521 - DNA, 72 bp, Homo sapiens
agtaagcgttttttttctttgaagatttatgatgcacttattcaatagctgtcagccgttccacccttttga

SEQ ID NO: 14522 - DNA, 76 bp, Homo sapiens
tttctttgaagatttatgatgcacttattcaatagctgtcagccgttccacccttttgaccttacacattctatta

SEQ ID NO: 14523 - DNA, 75 bp, Homo sapiens
atgcacttattcaatagctgtcagccgttccacccttttgaccttacacattctattacaatgaattttgcagtt

SEQ ID NO: 14524 - DNA, 73 bp, Homo sapiens
aatagctgtcagccgttccacccttttgaccttacacattctattacaatgaattttgcagttttgcacattt

SEQ ID NO: 14525 - DNA, 72 bp, Homo sapiens
ctgtcagccgttccacccttttgaccttacacattctattacaatgaattttgcagttttgcacatttttta

SEQ ID NO: 14526 - DNA, 72 bp, Homo sapiens
ttccacccttttgaccttacacattctattacaatgaattttgcagttttgcacattttttaaatgtcatta

SEQ ID NO: 14527 - DNA, 73 bp, Homo sapiens
tgaccttacacattctattacaatgaattttgcagttttgcacattttttaaatgtcattaactgttagggaa

SEQ ID NO: 14528 - DNA, 70 bp, Homo sapiens
cattctattacaatgaattttgcagttttgcacattttttaaatgtcattaactgttagggaattttact

SEQ ID NO: 14529 - DNA, 72 bp, Homo sapiens
tgaattttgcagttttgcacattttttaaatgtcattaactgttagggaattttacttgaatactgaataca

SEQ ID NO: 14530 - DNA, 72 bp, Homo sapiens
gcagttttgcacattttttaaatgtcattaactgttagggaattttacttgaatactgaatacatataatgt

SEQ ID NO: 14531 - DNA, 72 bp, Homo sapiens
gcacattttttaaatgtcattaactgttagggaattttacttgaatactgaatacatataatgtttatatta

SEQ ID NO: 14532 - DNA, 71 bp, Homo sapiens
tgtcattaactgttagggaattttacttgaatactgaatacatataatgtttatattaaaaaggacatttg

SEQ ID NO: 14533 - DNA, 70 bp, Homo sapiens
taactgttagggaattttacttgaatactgaatacatataatgtttatattaaaaaggacatttgtgtta

SEQ ID NO: 14534 - DNA, 71 bp, Homo sapiens
gaatactgaatacatataatgtttatattaaaaaggacatttgtgttaaaaaggaaattagagttgcagta

SEQ ID NO: 14535 - DNA, 68 bp, Homo sapiens
catataatgtttatattaaaaaggacatttgtgttaaaaaggaaattagagttgcagtaaactttcaa

SEQ ID NO: 14536 - DNA, 71 bp, Homo sapiens
gtttatattaaaaaggacatttgtgttaaaaaggaaattagagttgcagtaaactttcaatgctgcacaca

SEQ ID NO: 14537 - DNA, 76 bp, Homo sapiens
ctttcaatgctgcacacaaaaaaaagacatttgatttttcagtagaaattgtcctacatgtgctttattgatttgc

SEQ ID NO: 14538 - DNA, 72 bp, Homo sapiens
aaaaagacatttgatttttcagtagaaattgtcctacatgtgctttattgatttgctattgaaagaataggg

SEQ ID NO: 14539 - DNA, 72 bp, Homo sapiens
gacatttgatttttcagtagaaattgtcctacatgtgctttattgatttgctattgaaagaatagggttttt

SEQ ID NO: 14540 - DNA, 73 bp, Homo sapiens
ttttttaaatgtgcagtgttgaatcatttcttcatagtgctcccccgagttgggactagggcttcaatttcac

SEQ ID NO: 14541 - DNA, 75 bp, Homo sapiens
taaatgtgcagtgttgaatcatttcttcatagtgctcccccgagttgggactagggcttcaatttcacttcttaa

SEQ ID NO: 14542 - DNA, 70 bp, Homo sapiens
gtgttgaatcatttcttcatagtgctcccccgagttgggactagggcttcaatttcacttcttaaaaaaa

SEQ ID NO: 14543 - DNA, 71 bp, Homo sapiens
atttcttcatagtgctcccccgagttgggactagggcttcaatttcacttcttaaaaaaaatcatcatata

SEQ ID NO: 14544 - DNA, 75 bp, Homo sapiens
gttgggactagggcttcaatttcacttcttaaaaaaaatcatcatatatttgatatgcccagactgcatacgatt

SEQ ID NO: 14545 - DNA, 75 bp, Homo sapiens
gggcttcaatttcacttcttaaaaaaaatcatcatatatttgatatgcccagactgcatacgattttaagcggag

SEQ ID NO: 14546 - DNA, 75 bp, Homo sapiens
cacttcttaaaaaaaatcatcatatatttgatatgcccagactgcatacgattttaagcggagtacaactactat

SEQ ID NO: 14547 - DNA, 76 bp, Homo sapiens
aaaaaatcatcatatatttgatatgcccagactgcatacgattttaagcggagtacaactactattgtaaagctaa

SEQ ID NO: 14548 - DNA, 79 bp, Homo sapiens
atcatatatttgatatgcccagactgcatacgattttaagcggagtacaactactattgtaaagctaatgtgaagatat

SEQ ID NO: 14549 - DNA, 77 bp, Homo sapiens
atttgatatgcccagactgcatacgattttaagcggagtacaactactattgtaaagctaatgtgaagatattatta

SEQ ID NO: 14550 - DNA, 72 bp, Homo sapiens
cccagactgcatacgattttaagcggagtacaactactattgtaaagctaatgtgaagatattattaaaaag

SEQ ID NO: 14551 - DNA, 70 bp, Homo sapiens
actgcatacgattttaagcggagtacaactactattgtaaagctaatgtgaagatattattaaaaaggtt

SEQ ID NO: 14552 - DNA, 67 bp, Homo sapiens
atacgattttaagcggagtacaactactattgtaaagctaatgtgaagatattattaaaaaggtttt

SEQ ID NO: 14553 - DNA, 65 bp, Homo sapiens
attttaagcggagtacaactactattgtaaagctaatgtgaagatattattaaaaaggttttttt

SEQ ID NO: 14554 - DNA, 67 bp, Homo sapiens
aagcggagtacaactactattgtaaagctaatgtgaagatattattaaaaaggtttttttttccaga

SEQ ID NO: 14555 - DNA, 66 bp, Homo sapiens
caactactattgtaaagctaatgtgaagatattattaaaaaggtttttttttccagaaatttggtg

SEQ ID NO: 14556 - DNA, 66 bp, Homo sapiens
agctaatgtgaagatattattaaaaaggtttttttttccagaaatttggtgtcttcaaattatacc

SEQ ID NO: 14557 - DNA, 66 bp, Homo sapiens
tgtgaagatattattaaaaaggtttttttttccagaaatttggtgtcttcaaattataccttcacc

SEQ ID NO: 14558 - DNA, 72 bp, Homo sapiens
gtcttcaaattataccttcaccttgacatttgaatatccagccattttgtttcttaatggtataaaattcca

SEQ ID NO: 14559 - DNA, 71 bp, Homo sapiens
taccttcaccttgacatttgaatatccagccattttgtttcttaatggtataaaattccattttcaataac

SEQ ID NO: 14560 - DNA, 73 bp, Homo sapiens
gacatttgaatatccagccattttgtttcttaatggtataaaattccattttcaataacttattggtgctgaa

SEQ ID NO: 14561 - DNA, 71 bp, Homo sapiens
atccagccattttgtttcttaatggtataaaattccattttcaataacttattggtgctgaaattgttcac

SEQ ID NO: 14562 - DNA, 72 bp, Homo sapiens
tttgtttcttaatggtataaaattccattttcaataacttattggtgctgaaattgttcactagctgtggtc

SEQ ID NO: 14563 - DNA, 73 bp, Homo sapiens
cttaatggtataaaattccattttcaataacttattggtgctgaaattgttcactagctgtggtctgacctag

SEQ ID NO: 14564 - DNA, 76 bp, Homo sapiens
tcaataacttattggtgctgaaattgttcactagctgtggtctgacctagttaatttacaaatacagattgaatag

SEQ ID NO: 14565 - DNA, 74 bp, Homo sapiens
aacttattggtgctgaaattgttcactagctgtggtctgacctagttaatttacaaatacagattgaataggac

SEQ ID NO: 14566 - DNA, 75 bp, Homo sapiens
aaattgttcactagctgtggtctgacctagttaatttacaaatacagattgaataggacctactagagcagcatt

SEQ ID NO: 14567 - DNA, 75 bp, Homo sapiens
actagctgtggtctgacctagttaatttacaaatacagattgaataggacctactagagcagcatttatagagtt

SEQ ID NO: 14568 - DNA, 78 bp, Homo sapiens
tctgacctagttaatttacaaatacagattgaataggacctactagagcagcatttatagagtttgatggcaaataga

SEQ ID NO: 14569 - DNA, 78 bp, Homo sapiens
gttaatttacaaatacagattgaataggacctactagagcagcatttatagagtttgatggcaaatagattaggcaga

SEQ ID NO: 14570 - DNA, 79 bp, Homo sapiens
aaatacagattgaataggacctactagagcagcatttatagagtttgatggcaaatagattaggcagaacttcatctaa

SEQ ID NO: 14571 - DNA, 78 bp, Homo sapiens
agattgaataggacctactagagcagcatttatagagtttgatggcaaatagattaggcagaacttcatctaaaatat

SEQ ID NO: 14572 - DNA, 79 bp, Homo sapiens
gagcagcatttatagagtttgatggcaaatagattaggcagaacttcatctaaaatattcttagtaaataatgttgaca

SEQ ID NO: 14573 - DNA, 74 bp, Homo sapiens
gagtttgatggcaaatagattaggcagaacttcatctaaaatattcttagtaaataatgttgacacgttttcca

SEQ ID NO: 14574 - DNA, 73 bp, Homo sapiens
gattaggcagaacttcatctaaaatattcttagtaaataatgttgacacgttttccataccttgtcagtttca

SEQ ID NO: 14575 - DNA, 72 bp, Homo sapiens
gaacttcatctaaaatattcttagtaaataatgttgacacgttttccataccttgtcagtttcattcaacaa

SEQ ID NO: 14576 - DNA, 68 bp, Homo sapiens
aaaatattcttagtaaataatgttgacacgttttccataccttgtcagtttcattcaacaatttttaa

SEQ ID NO: 14577 - DNA, 72 bp, Homo sapiens
ttaaatttttaacaaagctcttaggatttacacatttatatttaaacattgatatatagagtattgattgat

SEQ ID NO: 14578 - DNA, 77 bp, Homo sapiens
taacaaagctcttaggatttacacatttatatttaaacattgatatatagagtattgattgattgctcataagttaa

SEQ ID NO: 14579 - DNA, 76 bp, Homo sapiens
agctcttaggatttacacatttatatttaaacattgatatatagagtattgattgattgctcataagttaaattgg

SEQ ID NO: 14580 - DNA, 76 bp, Homo sapiens
cacatttatatttaaacattgatatatagagtattgattgattgctcataagttaaattggtaaagttagagacaa

SEQ ID NO: 14581 - DNA, 75 bp, Homo sapiens
tttaaacattgatatatagagtattgattgattgctcataagttaaattggtaaagttagagacaactattctaa

SEQ ID NO: 14582 - DNA, 76 bp, Homo sapiens
gatatatagagtattgattgattgctcataagttaaattggtaaagttagagacaactattctaacacctcaccat

SEQ ID NO: 14583 - DNA, 75 bp, Homo sapiens
tagagtattgattgattgctcataagttaaattggtaaagttagagacaactattctaacacctcaccattgaaa

SEQ ID NO: 14584 - DNA, 74 bp, Homo sapiens
gattgctcataagttaaattggtaaagttagagacaactattctaacacctcaccattgaaatttatatgccac

SEQ ID NO: 14585 - DNA, 70 bp, Homo sapiens
agttaaattggtaaagttagagacaactattctaacacctcaccattgaaatttatatgccaccttgtct

SEQ ID NO: 14586 - DNA, 72 bp, Homo sapiens
ggtaaagttagagacaactattctaacacctcaccattgaaatttatatgccaccttgtctttcataaaagc

SEQ ID NO: 14587 - DNA, 72 bp, Homo sapiens
actattctaacacctcaccattgaaatttatatgccaccttgtctttcataaaagctgaaaattgttaccta

SEQ ID NO: 14588 - DNA, 72 bp, Homo sapiens
ttgaaatttatatgccaccttgtctttcataaaagctgaaaattgttacctaaaatgaaaatcaacttcatg

SEQ ID NO: 14589 - DNA, 71 bp, Homo sapiens
gccaccttgtctttcataaaagctgaaaattgttacctaaaatgaaaatcaacttcatgttttgaagatag

SEQ ID NO: 14590 - DNA, 71 bp, Homo sapiens
tgtctttcataaaagctgaaaattgttacctaaaatgaaaatcaacttcatgttttgaagatagttataaa

SEQ ID NO: 14591 - DNA, 70 bp, Homo sapiens
agctgaaaattgttacctaaaatgaaaatcaacttcatgttttgaagatagttataaatattgttctttg

SEQ ID NO: 14592 - DNA, 70 bp, Homo sapiens
tgttacctaaaatgaaaatcaacttcatgttttgaagatagttataaatattgttctttgttacaatttc

SEQ ID NO: 14593 - DNA, 73 bp, Homo sapiens
tgaaaatcaacttcatgttttgaagatagttataaatattgttctttgttacaatttcgggcaccgcatatta

SEQ ID NO: 14594 - DNA, 69 bp, Homo sapiens
tataaatattgttctttgttacaatttcgggcaccgcatattaaaacgtaactttattgttccaatatg

SEQ ID NO: 14595 - DNA, 69 bp, Homo sapiens
gttctttgttacaatttcgggcaccgcatattaaaacgtaactttattgttccaatatgtaacatggag

SEQ ID NO: 14596 - DNA, 70 bp, Homo sapiens
ttgttacaatttcgggcaccgcatattaaaacgtaactttattgttccaatatgtaacatggagggccag

SEQ ID NO: 14597 - DNA, 71 bp, Homo sapiens
ttcgggcaccgcatattaaaacgtaactttattgttccaatatgtaacatggagggccaggtcataaataa

SEQ ID NO: 14598 - DNA, 72 bp, Homo sapiens
ttaaaacgtaactttattgttccaatatgtaacatggagggccaggtcataaataatgacattataatgggc

SEQ ID NO: 14599 - DNA, 75 bp, Homo sapiens
actttattgttccaatatgtaacatggagggccaggtcataaataatgacattataatgggcttttgcactgtta

SEQ ID NO: 14600 - DNA, 75 bp, Homo sapiens
attgttccaatatgtaacatggagggccaggtcataaataatgacattataatgggcttttgcactgttattatt

SEQ ID NO: 14601 - DNA, 73 bp, Homo sapiens
atgtaacatggagggccaggtcataaataatgacattataatgggcttttgcactgttattatttttcctttg

SEQ ID NO: 14602 - DNA, 75 bp, Homo sapiens
gccaggtcataaataatgacattataatgggcttttgcactgttattatttttcctttggaatgtgaaggtctga

SEQ ID NO: 14603 - DNA, 72 bp, Homo sapiens
aaataatgacattataatgggcttttgcactgttattatttttcctttggaatgtgaaggtctgaatgaggg

SEQ ID NO: 14604 - DNA, 72 bp, Homo sapiens
gacattataatgggcttttgcactgttattatttttcctttggaatgtgaaggtctgaatgagggttttgat

SEQ ID NO: 14605 - DNA, 70 bp, Homo sapiens
gggcttttgcactgttattatttttcctttggaatgtgaaggtctgaatgagggttttgattttgaatgt

SEQ ID NO: 14606 - DNA, 72 bp, Homo sapiens
tgcactgttattatttttcctttggaatgtgaaggtctgaatgagggttttgattttgaatgtttcaatgtt

SEQ ID NO: 14607 - DNA, 72 bp, Homo sapiens
tttcctttggaatgtgaaggtctgaatgagggttttgattttgaatgtttcaatgtttttgagaagccttgc

SEQ ID NO: 14608 - DNA, 72 bp, Homo sapiens
ggaatgtgaaggtctgaatgagggttttgattttgaatgtttcaatgtttttgagaagccttgcttacattt

SEQ ID NO: 14609 - DNA, 72 bp, Homo sapiens
gaaggtctgaatgagggttttgattttgaatgtttcaatgtttttgagaagccttgcttacattttatggtg

SEQ ID NO: 14610 - DNA, 74 bp, Homo sapiens
gtttcaatgtttttgagaagccttgcttacattttatggtgtagtcattggaaatggaaaaatggcattatata

SEQ ID NO: 14611 - DNA, 77 bp, Homo sapiens
tatatattatacatactctccttactttatttcagttaccatccccatagaatttgacaagaattgctatgactgaa

SEQ ID NO: 14612 - DNA, 73 bp, Homo sapiens
tacatactctccttactttatttcagttaccatccccatagaatttgacaagaattgctatgactgaaaggtt

SEQ ID NO: 14613 - DNA, 71 bp, Homo sapiens
cttactttatttcagttaccatccccatagaatttgacaagaattgctatgactgaaaggttttcgagtcc

SEQ ID NO: 14614 - DNA, 71 bp, Homo sapiens
ttcagttaccatccccatagaatttgacaagaattgctatgactgaaaggttttcgagtcctaattaaaac

SEQ ID NO: 14615 - DNA, 70 bp, Homo sapiens
ttaccatccccatagaatttgacaagaattgctatgactgaaaggttttcgagtcctaattaaaacttta

SEQ ID NO: 14616 - DNA, 74 bp, Homo sapiens
gctatgactgaaaggttttcgagtcctaattaaaactttatttatggcagtattcataattagcctgaaatgca

SEQ ID NO: 14617 - DNA, 72 bp, Homo sapiens
ggttttcgagtcctaattaaaactttatttatggcagtattcataattagcctgaaatgcattctgtaggta

SEQ ID NO: 14618 - DNA, 75 bp, Homo sapiens
gagtcctaattaaaactttatttatggcagtattcataattagcctgaaatgcattctgtaggtaatctctgagt

SEQ ID NO: 14619 - DNA, 75 bp, Homo sapiens
aactttatttatggcagtattcataattagcctgaaatgcattctgtaggtaatctctgagtttctggaatattt

SEQ ID NO: 14620 - DNA, 77 bp, Homo sapiens
tttatggcagtattcataattagcctgaaatgcattctgtaggtaatctctgagtttctggaatattttcttagact

SEQ ID NO: 14621 - DNA, 78 bp, Homo sapiens
ttcataattagcctgaaatgcattctgtaggtaatctctgagtttctggaatattttcttagactttttggatgtgca

SEQ ID NO: 14622 - DNA, 82 bp, Homo sapiens
tgaaatgcattctgtaggtaatctctgagtttctggaatattttcttagactttttggatgtgcagcagcttacatgtctga

SEQ ID NO: 14623 - DNA, 78 bp, Homo sapiens
ttctgtaggtaatctctgagtttctggaatattttcttagactttttggatgtgcagcagcttacatgtctgaagtta

SEQ ID NO: 14624 - DNA, 77 bp, Homo sapiens
aggtaatctctgagtttctggaatattttcttagactttttggatgtgcagcagcttacatgtctgaagttacttga

SEQ ID NO: 14625 - DNA, 77 bp, Homo sapiens
ttctggaatattttcttagactttttggatgtgcagcagcttacatgtctgaagttacttgaaggcatcacttttaa

SEQ ID NO: 14626 - DNA, 76 bp, Homo sapiens
gaatattttcttagactttttggatgtgcagcagcttacatgtctgaagttacttgaaggcatcacttttaagaaa

SEQ ID NO: 14627 - DNA, 75 bp, Homo sapiens
gcagcttacatgtctgaagttacttgaaggcatcacttttaagaaagcttacagttgggccctgtaccatcccaa

SEQ ID NO: 14628 - DNA, 73 bp, Homo sapiens
ttacatgtctgaagttacttgaaggcatcacttttaagaaagcttacagttgggccctgtaccatcccaagtc

SEQ ID NO: 14629 - DNA, 69 bp, Homo sapiens
aagttacttgaaggcatcacttttaagaaagcttacagttgggccctgtaccatcccaagtcctttgta

SEQ ID NO: 14630 - DNA, 71 bp, Homo sapiens
ttacagttgggccctgtaccatcccaagtcctttgtagctcctcttgaacatgtttgccatacttttaaaa

SEQ ID NO: 14631 - DNA, 70 bp, Homo sapiens
cctgtaccatcccaagtcctttgtagctcctcttgaacatgtttgccatacttttaaaagggtagttgaa

SEQ ID NO: 14632 - DNA, 74 bp, Homo sapiens
acatgtttgccatacttttaaaagggtagttgaataaatagcatcaccattctttgctgtggcacaggttataa

SEQ ID NO: 14633 - DNA, 71 bp, Homo sapiens
cttttaaaagggtagttgaataaatagcatcaccattctttgctgtggcacaggttataaacttaagtgga

SEQ ID NO: 14634 - DNA, 71 bp, Homo sapiens
aaaagggtagttgaataaatagcatcaccattctttgctgtggcacaggttataaacttaagtggagttta

SEQ ID NO: 14635 - DNA, 75 bp, Homo sapiens
ataaatagcatcaccattctttgctgtggcacaggttataaacttaagtggagtttaccggcagcatcaaatgtt

SEQ ID NO: 14636 - DNA, 75 bp, Homo sapiens
atcaccattctttgctgtggcacaggttataaacttaagtggagtttaccggcagcatcaaatgtttcagcttta

SEQ ID NO: 14637 - DNA, 72 bp, Homo sapiens
ttctttgctgtggcacaggttataaacttaagtggagtttaccggcagcatcaaatgtttcagctttaaaaa

SEQ ID NO: 14638 - DNA, 69 bp, Homo sapiens
tggcacaggttataaacttaagtggagtttaccggcagcatcaaatgtttcagctttaaaaaataaaag

SEQ ID NO: 14639 - DNA, 66 bp, Homo sapiens
aacttaagtggagtttaccggcagcatcaaatgtttcagctttaaaaaataaaagtagggtacaag

SEQ ID NO: 14640 - DNA, 67 bp, Homo sapiens
agtggagtttaccggcagcatcaaatgtttcagctttaaaaaataaaagtagggtacaagtttaatg

SEQ ID NO: 14641 - DNA, 68 bp, Homo sapiens
ccggcagcatcaaatgtttcagctttaaaaaataaaagtagggtacaagtttaatgtttagttctaga

SEQ ID NO: 14642 - DNA, 66 bp, Homo sapiens
atgtttcagctttaaaaaataaaagtagggtacaagtttaatgtttagttctagaaattttgtgca

SEQ ID NO: 14643 - DNA, 67 bp, Homo sapiens
ttaaaaaataaaagtagggtacaagtttaatgtttagttctagaaattttgtgcaatatgttcataa

SEQ ID NO: 14644 - DNA, 70 bp, Homo sapiens
aaagtagggtacaagtttaatgtttagttctagaaattttgtgcaatatgttcataacgatggctgtggt

SEQ ID NO: 14645 - DNA, 73 bp, Homo sapiens
agggtacaagtttaatgtttagttctagaaattttgtgcaatatgttcataacgatggctgtggttgccacaa

SEQ ID NO: 14646 - DNA, 75 bp, Homo sapiens
ttaatgtttagttctagaaattttgtgcaatatgttcataacgatggctgtggttgccacaaagtgcctcgttta

SEQ ID NO: 14647 - DNA, 74 bp, Homo sapiens
ttctagaaattttgtgcaatatgttcataacgatggctgtggttgccacaaagtgcctcgtttacctttaaata

SEQ ID NO: 14648 - DNA, 80 bp, Homo sapiens
atatgttcataacgatggctgtggttgccacaaagtgcctcgtttacctttaaatactgttaatgtgtcatgcatgcaga

SEQ ID NO: 14649 - DNA, 77 bp, Homo sapiens
aacgatggctgtggttgccacaaagtgcctcgtttacctttaaatactgttaatgtgtcatgcatgcagatggaagg

SEQ ID NO: 14650 - DNA, 76 bp, Homo sapiens
tggttgccacaaagtgcctcgtttacctttaaatactgttaatgtgtcatgcatgcagatggaaggggtggaactg

SEQ ID NO: 14651 - DNA, 75 bp, Homo sapiens
aaagtgcctcgtttacctttaaatactgttaatgtgtcatgcatgcagatggaaggggtggaactgtgcactaaa

SEQ ID NO: 14652 - DNA, 78 bp, Homo sapiens
taatgtgtcatgcatgcagatggaaggggtggaactgtgcactaaagtgggggctttaactgtagtatttggcagagt

SEQ ID NO: 14653 - DNA, 74 bp, Homo sapiens
atgcagatggaaggggtggaactgtgcactaaagtgggggctttaactgtagtatttggcagagttgccttcta

SEQ ID NO: 14654 - DNA, 71 bp, Homo sapiens
aaggggtggaactgtgcactaaagtgggggctttaactgtagtatttggcagagttgccttctacctgcca

SEQ ID NO: 14655 - DNA, 71 bp, Homo sapiens
actgtgcactaaagtgggggctttaactgtagtatttggcagagttgccttctacctgccagttcaaaagt

SEQ ID NO: 14656 - DNA, 69 bp, Homo sapiens
actaaagtgggggctttaactgtagtatttggcagagttgccttctacctgccagttcaaaagttcaac

SEQ ID NO: 14657 - DNA, 73 bp, Homo sapiens
tttaactgtagtatttggcagagttgccttctacctgccagttcaaaagttcaacctgttttcatatagaata

SEQ ID NO: 14658 - DNA, 76 bp, Homo sapiens
tgtagtatttggcagagttgccttctacctgccagttcaaaagttcaacctgttttcatatagaatatatatacta

SEQ ID NO: 14659 - DNA, 72 bp, Homo sapiens
ggcagagttgccttctacctgccagttcaaaagttcaacctgttttcatatagaatatatatactaaaaaat

SEQ ID NO: 14660 - DNA, 71 bp, Homo sapiens
ccttctacctgccagttcaaaagttcaacctgttttcatatagaatatatatactaaaaaatttcagtctg

SEQ ID NO: 14661 - DNA, 71 bp, Homo sapiens
gccagttcaaaagttcaacctgttttcatatagaatatatatactaaaaaatttcagtctgttaaacagcc

SEQ ID NO: 14662 - DNA, 75 bp, Homo sapiens
tcaacctgttttcatatagaatatatatactaaaaaatttcagtctgttaaacagccttactctgattcagcctc

SEQ ID NO: 14663 - DNA, 78 bp, Homo sapiens
tcatatagaatatatatactaaaaaatttcagtctgttaaacagccttactctgattcagcctcttcagatactcttg

SEQ ID NO: 14664 - DNA, 77 bp, Homo sapiens
agaatatatatactaaaaaatttcagtctgttaaacagccttactctgattcagcctcttcagatactcttgtgctg

SEQ ID NO: 14665 - DNA, 80 bp, Homo sapiens
atactaaaaaatttcagtctgttaaacagccttactctgattcagcctcttcagatactcttgtgctgtgcagcagtggc

SEQ ID NO: 14666 - DNA, 86 bp, Homo sapiens
tttcagtctgttaaacagccttactctgattcagcctcttcagatactcttgtgctgtgcagcagtggctctgtgtgtaaatgcta

SEQ ID NO: 14667 - DNA, 88 bp, Homo sapiens
gttaaacagccttactctgattcagcctcttcagatactcttgtgctgtgcagcagtggctctgtgtgtaaatgctatgcactgagga

SEQ ID NO: 14668 - DNA, 89 bp, Homo sapiens
ttactctgattcagcctcttcagatactcttgtgctgtgcagcagtggctctgtgtgtaaatgctatgcactgaggatacacaaaaata

SEQ ID NO: 14669 - DNA, 89 bp, Homo sapiens
ttcagcctcttcagatactcttgtgctgtgcagcagtggctctgtgtgtaaatgctatgcactgaggatacacaaaaataccaatatga

SEQ ID NO: 14670 - DNA, 88 bp, Homo sapiens
atactcttgtgctgtgcagcagtggctctgtgtgtaaatgctatgcactgaggatacacaaaaataccaatatgatgtgtacaggata

SEQ ID NO: 14671 - DNA, 85 bp, Homo sapiens
agtggctctgtgtgtaaatgctatgcactgaggatacacaaaaataccaatatgatgtgtacaggataatgcctcatcccaatca

SEQ ID NO: 14672 - DNA, 85 bp, Homo sapiens
tgtgtaaatgctatgcactgaggatacacaaaaataccaatatgatgtgtacaggataatgcctcatcccaatcagatgtccatt

SEQ ID NO: 14673 - DNA, 84 bp, Homo sapiens
aatgctatgcactgaggatacacaaaaataccaatatgatgtgtacaggataatgcctcatcccaatcagatgtccatttgtta

SEQ ID NO: 14674 - DNA, 79 bp, Homo sapiens
aggatacacaaaaataccaatatgatgtgtacaggataatgcctcatcccaatcagatgtccatttgttattgtgtttg

SEQ ID NO: 14675 - DNA, 77 bp, Homo sapiens
aaaataccaatatgatgtgtacaggataatgcctcatcccaatcagatgtccatttgttattgtgtttgttaacaac

SEQ ID NO: 14676 - DNA, 78 bp, Homo sapiens
tatgatgtgtacaggataatgcctcatcccaatcagatgtccatttgttattgtgtttgttaacaaccctttatctct

SEQ ID NO: 14677 - DNA, 75 bp, Homo sapiens
gtgtacaggataatgcctcatcccaatcagatgtccatttgttattgtgtttgttaacaaccctttatctcttag

SEQ ID NO: 14678 - DNA, 68 bp, Homo sapiens
gtccatttgttattgtgtttgttaacaaccctttatctcttagtgttataaactccacttaaaactga

SEQ ID NO: 14679 - DNA, 71 bp, Homo sapiens
ccctttatctcttagtgttataaactccacttaaaactgattaaagtctcattcttgtcattgtgtgggtg

SEQ ID NO: 14680 - DNA, 72 bp, Homo sapiens
gtgttataaactccacttaaaactgattaaagtctcattcttgtcattgtgtgggtgttttattaaatgaga

SEQ ID NO: 14681 - DNA, 71 bp, Homo sapiens
actccacttaaaactgattaaagtctcattcttgtcattgtgtgggtgttttattaaatgagagtttataa

SEQ ID NO: 14682 - DNA, 74 bp, Homo sapiens
aaataattttcccaatgagactgtagaagagagagcaattggccaatgaggactgcggggcgggaccctgtgcc

SEQ ID NO: 14683 - DNA, 75 bp, Homo sapiens
attttcccaatgagactgtagaagagagagcaattggccaatgaggactgcggggcgggaccctgtgccgcggcg

SEQ ID NO: 14684 - DNA, 76 bp, Homo sapiens
actgtagaagagagagcaattggccaatgaggactgcggggcgggaccctgtgccgcggcggagtccaagatggcg

SEQ ID NO: 14685 - DNA, 75 bp, Homo sapiens
agagagcaattggccaatgaggactgcggggcgggaccctgtgccgcggcggagtccaagatggcggcgtgcggt

SEQ ID NO: 14686 - DNA, 73 bp, Homo sapiens
aattggccaatgaggactgcggggcgggaccctgtgccgcggcggagtccaagatggcggcgtgcggttccgc

SEQ ID NO: 14687 - DNA, 74 bp, Homo sapiens
atgaggactgcggggcgggaccctgtgccgcggcggagtccaagatggcggcgtgcggttccgctgtgtgaaac

SEQ ID NO: 14688 - DNA, 72 bp, Homo sapiens
ggggcgggaccctgtgccgcggcggagtccaagatggcggcgtgcggttccgctgtgtgaaacgagcgcggg

SEQ ID NO: 14689 - DNA, 75 bp, Homo sapiens
tgtgccgcggcggagtccaagatggcggcgtgcggttccgctgtgtgaaacgagcgcggggcggcgggttactca

SEQ ID NO: 14690 - DNA, 75 bp, Homo sapiens
gagtccaagatggcggcgtgcggttccgctgtgtgaaacgagcgcggggcggcgggttactcagctccgcggaga

SEQ ID NO: 14691 - DNA, 73 bp, Homo sapiens
aagatggcggcgtgcggttccgctgtgtgaaacgagcgcggggcggcgggttactcagctccgcggagacgac

SEQ ID NO: 14692 - DNA, 72 bp, Homo sapiens
gtgcggttccgctgtgtgaaacgagcgcggggcggcgggttactcagctccgcggagacgacctccgacgac

SEQ ID NO: 14693 - DNA, 73 bp, Homo sapiens
tgtgtgaaacgagcgcggggcggcgggttactcagctccgcggagacgacctccgacgacccgcaacaatgaa

SEQ ID NO: 14694 - DNA, 69 bp, Homo sapiens
aaacgagcgcggggcggcgggttactcagctccgcggagacgacctccgacgacccgcaacaatgaagg

SEQ ID NO: 14695 - DNA, 75 bp, Homo sapiens
ttactcagctccgcggagacgacctccgacgacccgcaacaatgaagggaaaagagcgctcgccagtgaaggcca

SEQ ID NO: 14696 - DNA, 73 bp, Homo sapiens
tccgcggagacgacctccgacgacccgcaacaatgaagggaaaagagcgctcgccagtgaaggccaaacgctc

SEQ ID NO: 14697 - DNA, 73 bp, Homo sapiens
tccgacgacccgcaacaatgaagggaaaagagcgctcgccagtgaaggccaaacgctcccgtggtggtgagga

SEQ ID NO: 14698 - DNA, 73 bp, Homo sapiens
ccgcaacaatgaagggaaaagagcgctcgccagtgaaggccaaacgctcccgtggtggtgaggactcgacttc

SEQ ID NO: 14699 - DNA, 71 bp, Homo sapiens
aagggaaaagagcgctcgccagtgaaggccaaacgctcccgtggtggtgaggactcgacttcccgcggtga

SEQ ID NO: 14700 - DNA, 74 bp, Homo sapiens
aaagagcgctcgccagtgaaggccaaacgctcccgtggtggtgaggactcgacttcccgcggtgagcggagcaa

SEQ ID NO: 14701 - DNA, 70 bp, Homo sapiens
agtgaaggccaaacgctcccgtggtggtgaggactcgacttcccgcggtgagcggagcaagaagttaggg

SEQ ID NO: 14702 - DNA, 70 bp, Homo sapiens
aggccaaacgctcccgtggtggtgaggactcgacttcccgcggtgagcggagcaagaagttagggggctc

SEQ ID NO: 14703 - DNA, 74 bp, Homo sapiens
ctcccgtggtggtgaggactcgacttcccgcggtgagcggagcaagaagttagggggctctggtggcagcaatg

SEQ ID NO: 14704 - DNA, 78 bp, Homo sapiens
tgaggactcgacttcccgcggtgagcggagcaagaagttagggggctctggtggcagcaatgggagcagcagcggaaa

SEQ ID NO: 14705 - DNA, 76 bp, Homo sapiens
acttcccgcggtgagcggagcaagaagttagggggctctggtggcagcaatgggagcagcagcggaaagaccgata

SEQ ID NO: 14706 - DNA, 76 bp, Homo sapiens
agcggagcaagaagttagggggctctggtggcagcaatgggagcagcagcggaaagaccgatagcggcggtgggtc

SEQ ID NO: 14707 - DNA, 74 bp, Homo sapiens
aagaagttagggggctctggtggcagcaatgggagcagcagcggaaagaccgatagcggcggtgggtcgcggcg

SEQ ID NO: 14708 - DNA, 79 bp, Homo sapiens
ggctctggtggcagcaatgggagcagcagcggaaagaccgatagcggcggtgggtcgcggcggagtctccacctggaca

SEQ ID NO: 14709 - DNA, 76 bp, Homo sapiens
aatgggagcagcagcggaaagaccgatagcggcggtgggtcgcggcggagtctccacctggacaagtccagcagtc

SEQ ID NO: 14710 - DNA, 75 bp, Homo sapiens
agcggaaagaccgatagcggcggtgggtcgcggcggagtctccacctggacaagtccagcagtcgaggtggcagc

SEQ ID NO: 14711 - DNA, 75 bp, Homo sapiens
cggtgggtcgcggcggagtctccacctggacaagtccagcagtcgaggtggcagccgcgagtatgataccggtgg

SEQ ID NO: 14712 - DNA, 79 bp, Homo sapiens
acctggacaagtccagcagtcgaggtggcagccgcgagtatgataccggtgggggcagctccagtagccgcttgcatag

SEQ ID NO: 14713 - DNA, 80 bp, Homo sapiens
acaagtccagcagtcgaggtggcagccgcgagtatgataccggtgggggcagctccagtagccgcttgcatagttatagc

SEQ ID NO: 14714 - DNA, 79 bp, Homo sapiens
agtcgaggtggcagccgcgagtatgataccggtgggggcagctccagtagccgcttgcatagttatagctccccgagca

SEQ ID NO: 14715 - DNA, 75 bp, Homo sapiens
agccgcgagtatgataccggtgggggcagctccagtagccgcttgcatagttatagctccccgagcaccaaaaat

SEQ ID NO: 14716 - DNA, 71 bp, Homo sapiens
ccggtgggggcagctccagtagccgcttgcatagttatagctccccgagcaccaaaaattcttcgggcggg

SEQ ID NO: 14717 - DNA, 76 bp, Homo sapiens
agctccagtagccgcttgcatagttatagctccccgagcaccaaaaattcttcgggcgggggcgaatcgcgcagca

SEQ ID NO: 14718 - DNA, 74 bp, Homo sapiens
agccgcttgcatagttatagctccccgagcaccaaaaattcttcgggcgggggcgaatcgcgcagcagctcccg

SEQ ID NO: 14719 - DNA, 71 bp, Homo sapiens
atagttatagctccccgagcaccaaaaattcttcgggcgggggcgaatcgcgcagcagctcccggggtgga

SEQ ID NO: 14720 - DNA, 70 bp, Homo sapiens
cccgagcaccaaaaattcttcgggcgggggcgaatcgcgcagcagctcccggggtggaggcggggagtca

SEQ ID NO: 14721 - DNA, 68 bp, Homo sapiens
accaaaaattcttcgggcgggggcgaatcgcgcagcagctcccggggtggaggcggggagtcacgttc

SEQ ID NO: 14722 - DNA, 72 bp, Homo sapiens
aatcgcgcagcagctcccggggtggaggcggggagtcacgttcctctggggccgcctcctcagctcccggcg

SEQ ID NO: 14723 - DNA, 69 bp, Homo sapiens
agcagctcccggggtggaggcggggagtcacgttcctctggggccgcctcctcagctcccggcggcggg

SEQ ID NO: 14724 - DNA, 69 bp, Homo sapiens
ggtggaggcggggagtcacgttcctctggggccgcctcctcagctcccggcggcggggacggcgcggaa

SEQ ID NO: 14725 - DNA, 72 bp, Homo sapiens
gggagtcacgttcctctggggccgcctcctcagctcccggcggcggggacggcgcggaatacaagactctga

SEQ ID NO: 14726 - DNA, 71 bp, Homo sapiens
acgttcctctggggccgcctcctcagctcccggcggcggggacggcgcggaatacaagactctgaagataa

SEQ ID NO: 14727 - DNA, 72 bp, Homo sapiens
acggcgcggaatacaagactctgaagataagcgagttggggtcccagcttagtgacgaagcggtggaggacg

SEQ ID NO: 14728 - DNA, 75 bp, Homo sapiens
atacaagactctgaagataagcgagttggggtcccagcttagtgacgaagcggtggaggacggcctgtttcatga

SEQ ID NO: 14729 - DNA, 74 bp, Homo sapiens
actctgaagataagcgagttggggtcccagcttagtgacgaagcggtggaggacggcctgtttcatgagttcaa

SEQ ID NO: 14730 - DNA, 75 bp, Homo sapiens
tcccagcttagtgacgaagcggtggaggacggcctgtttcatgagttcaaacgcttcggtgatgtaagtgtgaaa

SEQ ID NO: 14731 - DNA, 74 bp, Homo sapiens
cttagtgacgaagcggtggaggacggcctgtttcatgagttcaaacgcttcggtgatgtaagtgtgaaaatcag

SEQ ID NO: 14732 - DNA, 76 bp, Homo sapiens
gtggaggacggcctgtttcatgagttcaaacgcttcggtgatgtaagtgtgaaaatcagtcatctgtcgggttctg

SEQ ID NO: 14733 - DNA, 76 bp, Homo sapiens
acggcctgtttcatgagttcaaacgcttcggtgatgtaagtgtgaaaatcagtcatctgtcgggttctggcagcgg

SEQ ID NO: 14734 - DNA, 77 bp, Homo sapiens
atgagttcaaacgcttcggtgatgtaagtgtgaaaatcagtcatctgtcgggttctggcagcggggatgagcgggta

SEQ ID NO: 14735 - DNA, 74 bp, Homo sapiens
aaacgcttcggtgatgtaagtgtgaaaatcagtcatctgtcgggttctggcagcggggatgagcgggtagcctt

SEQ ID NO: 14736 - DNA, 75 bp, Homo sapiens
atgtaagtgtgaaaatcagtcatctgtcgggttctggcagcggggatgagcgggtagcctttgtgaacttccggc

SEQ ID NO: 14737 - DNA, 76 bp, Homo sapiens
tgaaaatcagtcatctgtcgggttctggcagcggggatgagcgggtagcctttgtgaacttccggcggccagagga

SEQ ID NO: 14738 - DNA, 76 bp, Homo sapiens
gttctggcagcggggatgagcgggtagcctttgtgaacttccggcggccagaggacgcgcgggcggccaagcatgc

SEQ ID NO: 14739 - DNA, 75 bp, Homo sapiens
agcggggatgagcgggtagcctttgtgaacttccggcggccagaggacgcgcgggcggccaagcatgccagaggc

SEQ ID NO: 14740 - DNA, 75 bp, Homo sapiens
atgagcgggtagcctttgtgaacttccggcggccagaggacgcgcgggcggccaagcatgccagaggccgcctgg

SEQ ID NO: 14741 - DNA, 77 bp, Homo sapiens
agcctttgtgaacttccggcggccagaggacgcgcgggcggccaagcatgccagaggccgcctggtgctctatgacc

SEQ ID NO: 14742 - DNA, 83 bp, Homo sapiens
agaggacgcgcgggcggccaagcatgccagaggccgcctggtgctctatgaccggcctctgaagatagaagctgtgtatgtga

SEQ ID NO: 14743 - DNA, 84 bp, Homo sapiens
gggcggccaagcatgccagaggccgcctggtgctctatgaccggcctctgaagatagaagctgtgtatgtgagccggcgccgca

SEQ ID NO: 14744 - DNA, 84 bp, Homo sapiens
aagcatgccagaggccgcctggtgctctatgaccggcctctgaagatagaagctgtgtatgtgagccggcgccgcagccgctcc

SEQ ID NO: 14745 - DNA, 79 bp, Homo sapiens
aggccgcctggtgctctatgaccggcctctgaagatagaagctgtgtatgtgagccggcgccgcagccgctccccttta

SEQ ID NO: 14746 - DNA, 80 bp, Homo sapiens
tgctctatgaccggcctctgaagatagaagctgtgtatgtgagccggcgccgcagccgctcccctttagacaaagatact

SEQ ID NO: 14747 - DNA, 79 bp, Homo sapiens
aagatagaagctgtgtatgtgagccggcgccgcagccgctcccctttagacaaagatacttatcctccatcagccagtg

SEQ ID NO: 14748 - DNA, 77 bp, Homo sapiens
tatgtgagccggcgccgcagccgctcccctttagacaaagatacttatcctccatcagccagtgtggtcggggcctc

SEQ ID NO: 14749 - DNA, 75 bp, Homo sapiens
cgcagccgctcccctttagacaaagatacttatcctccatcagccagtgtggtcggggcctctgtaggtggtcac

SEQ ID NO: 14750 - DNA, 73 bp, Homo sapiens
tcccctttagacaaagatacttatcctccatcagccagtgtggtcggggcctctgtaggtggtcaccggcacc

SEQ ID NO: 14751 - DNA, 73 bp, Homo sapiens
ttagacaaagatacttatcctccatcagccagtgtggtcggggcctctgtaggtggtcaccggcacccccctg

SEQ ID NO: 14752 - DNA, 72 bp, Homo sapiens
atacttatcctccatcagccagtgtggtcggggcctctgtaggtggtcaccggcacccccctggaggtggtg

SEQ ID NO: 14753 - DNA, 73 bp, Homo sapiens
tctgtaggtggtcaccggcacccccctggaggtggtggaggccagagatcactttcccctggtggcgctgctt

SEQ ID NO: 14754 - DNA, 74 bp, Homo sapiens
tggtcaccggcacccccctggaggtggtggaggccagagatcactttcccctggtggcgctgctttgggataca

SEQ ID NO: 14755 - DNA, 78 bp, Homo sapiens
aggtggtggaggccagagatcactttcccctggtggcgctgctttgggatacagagactaccggctgcagcagttggc

SEQ ID NO: 14756 - DNA, 79 bp, Homo sapiens
aggccagagatcactttcccctggtggcgctgctttgggatacagagactaccggctgcagcagttggctcttggccgc

SEQ ID NO: 14757 - DNA, 78 bp, Homo sapiens
agatcactttcccctggtggcgctgctttgggatacagagactaccggctgcagcagttggctcttggccgcctgccc

SEQ ID NO: 14758 - DNA, 77 bp, Homo sapiens
ccctggtggcgctgctttgggatacagagactaccggctgcagcagttggctcttggccgcctgccccctccacctc

SEQ ID NO: 14759 - DNA, 76 bp, Homo sapiens
ctttgggatacagagactaccggctgcagcagttggctcttggccgcctgccccctccacctccgccaccattgcc

SEQ ID NO: 14760 - DNA, 77 bp, Homo sapiens
atacagagactaccggctgcagcagttggctcttggccgcctgccccctccacctccgccaccattgcctcgagacc

SEQ ID NO: 14761 - DNA, 77 bp, Homo sapiens
actaccggctgcagcagttggctcttggccgcctgccccctccacctccgccaccattgcctcgagacctggagaga

SEQ ID NO: 14762 - DNA, 76 bp, Homo sapiens
agcagttggctcttggccgcctgccccctccacctccgccaccattgcctcgagacctggagagagaaagagacta

SEQ ID NO: 14763 - DNA, 75 bp, Homo sapiens
tggccgcctgccccctccacctccgccaccattgcctcgagacctggagagagaaagagactacccgttctatga

SEQ ID NO: 14764 - DNA, 76 bp, Homo sapiens
ctgccccctccacctccgccaccattgcctcgagacctggagagagaaagagactacccgttctatgagagagtgc

SEQ ID NO: 14765 - DNA, 79 bp, Homo sapiens
ctccgccaccattgcctcgagacctggagagagaaagagactacccgttctatgagagagtgcgccctgcatacagtct

SEQ ID NO: 14766 - DNA, 80 bp, Homo sapiens
accattgcctcgagacctggagagagaaagagactacccgttctatgagagagtgcgccctgcatacagtcttgagccaa

SEQ ID NO: 14767 - DNA, 79 bp, Homo sapiens
tcgagacctggagagagaaagagactacccgttctatgagagagtgcgccctgcatacagtcttgagccaagggtggga

SEQ ID NO: 14768 - DNA, 81 bp, Homo sapiens
actacccgttctatgagagagtgcgccctgcatacagtcttgagccaagggtgggagctggagcaggtgctgctcctttca

SEQ ID NO: 14769 - DNA, 86 bp, Homo sapiens
ttctatgagagagtgcgccctgcatacagtcttgagccaagggtgggagctggagcaggtgctgctcctttcagagaagtggatga

SEQ ID NO: 14770 - DNA, 81 bp, Homo sapiens
atacagtcttgagccaagggtgggagctggagcaggtgctgctcctttcagagaagtggatgagatttcacccgaggatga

SEQ ID NO: 14771 - DNA, 84 bp, Homo sapiens
tgagccaagggtgggagctggagcaggtgctgctcctttcagagaagtggatgagatttcacccgaggatgatcagcgagctaa

SEQ ID NO: 14772 - DNA, 80 bp, Homo sapiens
aagggtgggagctggagcaggtgctgctcctttcagagaagtggatgagatttcacccgaggatgatcagcgagctaacc

SEQ ID NO: 14773 - DNA, 80 bp, Homo sapiens
agcaggtgctgctcctttcagagaagtggatgagatttcacccgaggatgatcagcgagctaaccggacgctcttcttgg

SEQ ID NO: 14774 - DNA, 79 bp, Homo sapiens
tgctcctttcagagaagtggatgagatttcacccgaggatgatcagcgagctaaccggacgctcttcttgggcaaccta

SEQ ID NO: 14775 - DNA, 80 bp, Homo sapiens
gagaagtggatgagatttcacccgaggatgatcagcgagctaaccggacgctcttcttgggcaacctagacatcactgta

SEQ ID NO: 14776 - DNA, 76 bp, Homo sapiens
acccgaggatgatcagcgagctaaccggacgctcttcttgggcaacctagacatcactgtaacggagagtgattta

SEQ ID NO: 14777 - DNA, 76 bp, Homo sapiens
ggatgatcagcgagctaaccggacgctcttcttgggcaacctagacatcactgtaacggagagtgatttaagaagg

SEQ ID NO: 14778 - DNA, 72 bp, Homo sapiens
agctaaccggacgctcttcttgggcaacctagacatcactgtaacggagagtgatttaagaagggcgtttga

SEQ ID NO: 14779 - DNA, 76 bp, Homo sapiens
ctcttcttgggcaacctagacatcactgtaacggagagtgatttaagaagggcgtttgatcgctttggagtcatca

SEQ ID NO: 14780 - DNA, 76 bp, Homo sapiens
cttgggcaacctagacatcactgtaacggagagtgatttaagaagggcgtttgatcgctttggagtcatcacagaa

SEQ ID NO: 14781 - DNA, 79 bp, Homo sapiens
ctagacatcactgtaacggagagtgatttaagaagggcgtttgatcgctttggagtcatcacagaagtagatatcaaga

SEQ ID NO: 14782 - DNA, 77 bp, Homo sapiens
tgtaacggagagtgatttaagaagggcgtttgatcgctttggagtcatcacagaagtagatatcaagaggccttctc

SEQ ID NO: 14783 - DNA, 76 bp, Homo sapiens
atttaagaagggcgtttgatcgctttggagtcatcacagaagtagatatcaagaggccttctcgcggccagactag

SEQ ID NO: 14784 - DNA, 77 bp, Homo sapiens
ggcgtttgatcgctttggagtcatcacagaagtagatatcaagaggccttctcgcggccagactagtacttacggct

SEQ ID NO: 14785 - DNA, 77 bp, Homo sapiens
tcgctttggagtcatcacagaagtagatatcaagaggccttctcgcggccagactagtacttacggctttctcaaat

SEQ ID NO: 14786 - DNA, 77 bp, Homo sapiens
tcatcacagaagtagatatcaagaggccttctcgcggccagactagtacttacggctttctcaaatttgagaactta

SEQ ID NO: 14787 - DNA, 75 bp, Homo sapiens
agactagtacttacggctttctcaaatttgagaacttagatatgtctcaccgggccaaattagcaatgtctggca

SEQ ID NO: 14788 - DNA, 74 bp, Homo sapiens
ttacggctttctcaaatttgagaacttagatatgtctcaccgggccaaattagcaatgtctggcaaaattataa

SEQ ID NO: 14789 - DNA, 75 bp, Homo sapiens
tcaaatttgagaacttagatatgtctcaccgggccaaattagcaatgtctggcaaaattataattcggaatccta

SEQ ID NO: 14790 - DNA, 73 bp, Homo sapiens
agaacttagatatgtctcaccgggccaaattagcaatgtctggcaaaattataattcggaatcctatcaaaat

SEQ ID NO: 14791 - DNA, 75 bp, Homo sapiens
tagatatgtctcaccgggccaaattagcaatgtctggcaaaattataattcggaatcctatcaaaattggttatg

SEQ ID NO: 14792 - DNA, 72 bp, Homo sapiens
cgggccaaattagcaatgtctggcaaaattataattcggaatcctatcaaaattggttatggtaaagctaca

SEQ ID NO: 14793 - DNA, 69 bp, Homo sapiens
ggcaaaattataattcggaatcctatcaaaattggttatggtaaagctacacccaccacccgcctctgg

SEQ ID NO: 14794 - DNA, 68 bp, Homo sapiens
aattataattcggaatcctatcaaaattggttatggtaaagctacacccaccacccgcctctgggtgg

SEQ ID NO: 14795 - DNA, 68 bp, Homo sapiens
atcctatcaaaattggttatggtaaagctacacccaccacccgcctctgggtgggaggcctgggacct

SEQ ID NO: 14796 - DNA, 65 bp, Homo sapiens
aaaattggttatggtaaagctacacccaccacccgcctctgggtgggaggcctgggaccttgggt

SEQ ID NO: 14797 - DNA, 70 bp, Homo sapiens
ttatggtaaagctacacccaccacccgcctctgggtgggaggcctgggaccttgggttcctcttgctgcc

SEQ ID NO: 14798 - DNA, 69 bp, Homo sapiens
acccaccacccgcctctgggtgggaggcctgggaccttgggttcctcttgctgccctggcacgagaatt

SEQ ID NO: 14799 - DNA, 71 bp, Homo sapiens
acccgcctctgggtgggaggcctgggaccttgggttcctcttgctgccctggcacgagaatttgatcgatt

SEQ ID NO: 14800 - DNA, 77 bp, Homo sapiens
tgggaggcctgggaccttgggttcctcttgctgccctggcacgagaatttgatcgatttggcaccatacgcaccata

SEQ ID NO: 14801 - DNA, 77 bp, Homo sapiens
tgggaccttgggttcctcttgctgccctggcacgagaatttgatcgatttggcaccatacgcaccatagactaccga

SEQ ID NO: 14802 - DNA, 77 bp, Homo sapiens
gttcctcttgctgccctggcacgagaatttgatcgatttggcaccatacgcaccatagactaccgaaaaggtgatag

SEQ ID NO: 14803 - DNA, 78 bp, Homo sapiens
acgagaatttgatcgatttggcaccatacgcaccatagactaccgaaaaggtgatagttgggcatatatccagtatga

SEQ ID NO: 14804 - DNA, 81 bp, Homo sapiens
atttggcaccatacgcaccatagactaccgaaaaggtgatagttgggcatatatccagtatgaaagcctggatgcagcgca

SEQ ID NO: 14805 - DNA, 82 bp, Homo sapiens
aaaaggtgatagttgggcatatatccagtatgaaagcctggatgcagcgcatgctgcctggacccatatgcggggcttccca

SEQ ID NO: 14806 - DNA, 85 bp, Homo sapiens
ggcatatatccagtatgaaagcctggatgcagcgcatgctgcctggacccatatgcggggcttcccacttggtggcccagatcga

SEQ ID NO: 14807 - DNA, 82 bp, Homo sapiens
cagtatgaaagcctggatgcagcgcatgctgcctggacccatatgcggggcttcccacttggtggcccagatcgacgcctta

SEQ ID NO: 14808 - DNA, 80 bp, Homo sapiens
aaagcctggatgcagcgcatgctgcctggacccatatgcggggcttcccacttggtggcccagatcgacgccttagagta

SEQ ID NO: 14809 - DNA, 75 bp, Homo sapiens
tgcctggacccatatgcggggcttcccacttggtggcccagatcgacgccttagagtagactttgccgacaccga

SEQ ID NO: 14810 - DNA, 73 bp, Homo sapiens
atatgcggggcttcccacttggtggcccagatcgacgccttagagtagactttgccgacaccgaacatcgtta

SEQ ID NO: 14811 - DNA, 75 bp, Homo sapiens
cttcccacttggtggcccagatcgacgccttagagtagactttgccgacaccgaacatcgttaccagcagcagta

SEQ ID NO: 14812 - DNA, 78 bp, Homo sapiens
acttggtggcccagatcgacgccttagagtagactttgccgacaccgaacatcgttaccagcagcagtatctgcagcc

SEQ ID NO: 14813 - DNA, 80 bp, Homo sapiens
atcgacgccttagagtagactttgccgacaccgaacatcgttaccagcagcagtatctgcagcctctgcccttgactcat

SEQ ID NO: 14814 - DNA, 84 bp, Homo sapiens
ttagagtagactttgccgacaccgaacatcgttaccagcagcagtatctgcagcctctgcccttgactcattatgagctggtga

SEQ ID NO: 14815 - DNA, 85 bp, Homo sapiens
tttgccgacaccgaacatcgttaccagcagcagtatctgcagcctctgcccttgactcattatgagctggtgacagatgcttttg

SEQ ID NO: 14816 - DNA, 85 bp, Homo sapiens
acaccgaacatcgttaccagcagcagtatctgcagcctctgcccttgactcattatgagctggtgacagatgcttttggacatcg

SEQ ID NO: 14817 - DNA, 86 bp, Homo sapiens
atcgttaccagcagcagtatctgcagcctctgcccttgactcattatgagctggtgacagatgcttttggacatcgggcaccagac

SEQ ID NO: 14818 - DNA, 75 bp, Homo sapiens
tgacagatgcttttggacatcgggcaccagaccctttgaggggtgctcgggataggacaccacccttactataca

SEQ ID NO: 14819 - DNA, 73 bp, Homo sapiens
acatcgggcaccagaccctttgaggggtgctcgggataggacaccacccttactatacagagatcgtgatagg

SEQ ID NO: 14820 - DNA, 71 bp, Homo sapiens
agaccctttgaggggtgctcgggataggacaccacccttactatacagagatcgtgatagggacctttatc

SEQ ID NO: 14821 - DNA, 74 bp, Homo sapiens
gggtgctcgggataggacaccacccttactatacagagatcgtgatagggacctttatcctgactctgattggg

SEQ ID NO: 14822 - DNA, 75 bp, Homo sapiens
ctcgggataggacaccacccttactatacagagatcgtgatagggacctttatcctgactctgattgggtgccac

SEQ ID NO: 14823 - DNA, 72 bp, Homo sapiens
acaccacccttactatacagagatcgtgatagggacctttatcctgactctgattgggtgccacccccaccc

SEQ ID NO: 14824 - DNA, 74 bp, Homo sapiens
tactatacagagatcgtgatagggacctttatcctgactctgattgggtgccacccccacccccagtccgagaa

SEQ ID NO: 14825 - DNA, 74 bp, Homo sapiens
acctttatcctgactctgattgggtgccacccccacccccagtccgagaacgcagcactcggactgcagctact

SEQ ID NO: 14826 - DNA, 79 bp, Homo sapiens
tgactctgattgggtgccacccccacccccagtccgagaacgcagcactcggactgcagctacttctgtgcctgcttac

SEQ ID NO: 14827 - DNA, 79 bp, Homo sapiens
tgattgggtgccacccccacccccagtccgagaacgcagcactcggactgcagctacttctgtgcctgcttacgagcca

SEQ ID NO: 14828 - DNA, 79 bp, Homo sapiens
ccccacccccagtccgagaacgcagcactcggactgcagctacttctgtgcctgcttacgagccactggatagcctaga

SEQ ID NO: 14829 - DNA, 83 bp, Homo sapiens
agtccgagaacgcagcactcggactgcagctacttctgtgcctgcttacgagccactggatagcctagatcgcaggcgggatg

SEQ ID NO: 14830 - DNA, 82 bp, Homo sapiens
aacgcagcactcggactgcagctacttctgtgcctgcttacgagccactggatagcctagatcgcaggcgggatggttggtc

SEQ ID NO: 14831 - DNA, 80 bp, Homo sapiens
actcggactgcagctacttctgtgcctgcttacgagccactggatagcctagatcgcaggcgggatggttggtccttgga

SEQ ID NO: 14832 - DNA, 77 bp, Homo sapiens
tacttctgtgcctgcttacgagccactggatagcctagatcgcaggcgggatggttggtccttggaccgggacagag

SEQ ID NO: 14833 - DNA, 77 bp, Homo sapiens
cctgcttacgagccactggatagcctagatcgcaggcgggatggttggtccttggaccgggacagaggtgatcgaga

SEQ ID NO: 14834 - DNA, 78 bp, Homo sapiens
ttacgagccactggatagcctagatcgcaggcgggatggttggtccttggaccgggacagaggtgatcgagatctgcc

SEQ ID NO: 14835 - DNA, 81 bp, Homo sapiens
tagatcgcaggcgggatggttggtccttggaccgggacagaggtgatcgagatctgcccagcagcagagaccagcctagga

SEQ ID NO: 14836 - DNA, 84 bp, Homo sapiens
aggtgatcgagatctgcccagcagcagagaccagcctaggaagcgaaggctgcctgaggagagtggaggacgtcatctggatag

SEQ ID NO: 14837 - DNA, 84 bp, Homo sapiens
atctgcccagcagcagagaccagcctaggaagcgaaggctgcctgaggagagtggaggacgtcatctggataggtctcctgaga

SEQ ID NO: 14838 - DNA, 79 bp, Homo sapiens
agagaccagcctaggaagcgaaggctgcctgaggagagtggaggacgtcatctggataggtctcctgagagtgaccgcc

SEQ ID NO: 14839 - DNA, 77 bp, Homo sapiens
ctaggaagcgaaggctgcctgaggagagtggaggacgtcatctggataggtctcctgagagtgaccgcccacgaaaa

SEQ ID NO: 14840 - DNA, 77 bp, Homo sapiens
aagcgaaggctgcctgaggagagtggaggacgtcatctggataggtctcctgagagtgaccgcccacgaaaacgtca

SEQ ID NO: 14841 - DNA, 77 bp, Homo sapiens
gaggagagtggaggacgtcatctggataggtctcctgagagtgaccgcccacgaaaacgtcactgcgctccttctcc

SEQ ID NO: 14842 - DNA, 76 bp, Homo sapiens
agtggaggacgtcatctggataggtctcctgagagtgaccgcccacgaaaacgtcactgcgctccttctcctgacc

SEQ ID NO: 14843 - DNA, 78 bp, Homo sapiens
atctggataggtctcctgagagtgaccgcccacgaaaacgtcactgcgctccttctcctgaccgcagtccagaattga

SEQ ID NO: 14844 - DNA, 78 bp, Homo sapiens
ataggtctcctgagagtgaccgcccacgaaaacgtcactgcgctccttctcctgaccgcagtccagaattgagcagta

SEQ ID NO: 14845 - DNA, 76 bp, Homo sapiens
gtgaccgcccacgaaaacgtcactgcgctccttctcctgaccgcagtccagaattgagcagtagccgggatcgtta

SEQ ID NO: 14846 - DNA, 77 bp, Homo sapiens
acgaaaacgtcactgcgctccttctcctgaccgcagtccagaattgagcagtagccgggatcgttacaacagcgaca

SEQ ID NO: 14847 - DNA, 82 bp, Homo sapiens
tcactgcgctccttctcctgaccgcagtccagaattgagcagtagccgggatcgttacaacagcgacaatgatcgatcttcc

SEQ ID NO: 14848 - DNA, 78 bp, Homo sapiens
tccttctcctgaccgcagtccagaattgagcagtagccgggatcgttacaacagcgacaatgatcgatcttcccgtct

SEQ ID NO: 14849 - DNA, 77 bp, Homo sapiens
accgcagtccagaattgagcagtagccgggatcgttacaacagcgacaatgatcgatcttcccgtcttctcttggaa

SEQ ID NO: 14850 - DNA, 75 bp, Homo sapiens
agaattgagcagtagccgggatcgttacaacagcgacaatgatcgatcttcccgtcttctcttggaaaggccctc

SEQ ID NO: 14851 - DNA, 75 bp, Homo sapiens
agtagccgggatcgttacaacagcgacaatgatcgatcttcccgtcttctcttggaaaggccctctccaatcaga

SEQ ID NO: 14852 - DNA, 77 bp, Homo sapiens
tcgttacaacagcgacaatgatcgatcttcccgtcttctcttggaaaggccctctccaatcagagacagacgaggta

SEQ ID NO: 14853 - DNA, 76 bp, Homo sapiens
agcgacaatgatcgatcttcccgtcttctcttggaaaggccctctccaatcagagacagacgaggtagtttggaga

SEQ ID NO: 14854 - DNA, 75 bp, Homo sapiens
aatgatcgatcttcccgtcttctcttggaaaggccctctccaatcagagacagacgaggtagtttggagaagagc

SEQ ID NO: 14855 - DNA, 74 bp, Homo sapiens
tcttcccgtcttctcttggaaaggccctctccaatcagagacagacgaggtagtttggagaagagccagggtga

SEQ ID NO: 14856 - DNA, 75 bp, Homo sapiens
acgaggtagtttggagaagagccagggtgacaagcgagaccgtaaaaactctgcatcagctgaacgagataggaa

SEQ ID NO: 14857 - DNA, 77 bp, Homo sapiens
tttggagaagagccagggtgacaagcgagaccgtaaaaactctgcatcagctgaacgagataggaagcaccggacaa

SEQ ID NO: 14858 - DNA, 78 bp, Homo sapiens
ccagggtgacaagcgagaccgtaaaaactctgcatcagctgaacgagataggaagcaccggacaactgctcccactga

SEQ ID NO: 14859 - DNA, 75 bp, Homo sapiens
aagcgagaccgtaaaaactctgcatcagctgaacgagataggaagcaccggacaactgctcccactgagggaaaa

SEQ ID NO: 14860 - DNA, 74 bp, Homo sapiens
agaccgtaaaaactctgcatcagctgaacgagataggaagcaccggacaactgctcccactgagggaaaaagcc

SEQ ID NO: 14861 - DNA, 75 bp, Homo sapiens
aactctgcatcagctgaacgagataggaagcaccggacaactgctcccactgagggaaaaagccctctgaaaaaa

SEQ ID NO: 14862 - DNA, 71 bp, Homo sapiens
agctgaacgagataggaagcaccggacaactgctcccactgagggaaaaagccctctgaaaaaagaagacc

SEQ ID NO: 14863 - DNA, 72 bp, Homo sapiens
agataggaagcaccggacaactgctcccactgagggaaaaagccctctgaaaaaagaagaccgctctgatgg

SEQ ID NO: 14864 - DNA, 72 bp, Homo sapiens
accggacaactgctcccactgagggaaaaagccctctgaaaaaagaagaccgctctgatgggagtgcaccta

SEQ ID NO: 14865 - DNA, 76 bp, Homo sapiens
tcccactgagggaaaaagccctctgaaaaaagaagaccgctctgatgggagtgcacctagcaccagcactgcttcc

SEQ ID NO: 14866 - DNA, 77 bp, Homo sapiens
gaaaaagccctctgaaaaaagaagaccgctctgatgggagtgcacctagcaccagcactgcttcctccaagctgaag

SEQ ID NO: 14867 - DNA, 76 bp, Homo sapiens
aaaaagaagaccgctctgatgggagtgcacctagcaccagcactgcttcctccaagctgaagtccccgtcccagaa

SEQ ID NO: 14868 - DNA, 77 bp, Homo sapiens
ccgctctgatgggagtgcacctagcaccagcactgcttcctccaagctgaagtccccgtcccagaaacaggatgggg

SEQ ID NO: 14869 - DNA, 75 bp, Homo sapiens
gggagtgcacctagcaccagcactgcttcctccaagctgaagtccccgtcccagaaacaggatggggggacagcc

SEQ ID NO: 14870 - DNA, 73 bp, Homo sapiens
cttcctccaagctgaagtccccgtcccagaaacaggatggggggacagcccctgtggcatcagcctctcccaa

SEQ ID NO: 14871 - DNA, 72 bp, Homo sapiens
aagctgaagtccccgtcccagaaacaggatggggggacagcccctgtggcatcagcctctcccaaactctgt

SEQ ID NO: 14872 - DNA, 73 bp, Homo sapiens
cccgtcccagaaacaggatggggggacagcccctgtggcatcagcctctcccaaactctgtttggcctggcag

SEQ ID NO: 14873 - DNA, 77 bp, Homo sapiens
agaaacaggatggggggacagcccctgtggcatcagcctctcccaaactctgtttggcctggcagggcatgcttcta

SEQ ID NO: 14874 - DNA, 79 bp, Homo sapiens
cctgtggcatcagcctctcccaaactctgtttggcctggcagggcatgcttctactgaagaacagcaactttccttcca

SEQ ID NO: 14875 - DNA, 80 bp, Homo sapiens
atcagcctctcccaaactctgtttggcctggcagggcatgcttctactgaagaacagcaactttccttccaacatgcatc

SEQ ID NO: 14876 - DNA, 81 bp, Homo sapiens
caaactctgtttggcctggcagggcatgcttctactgaagaacagcaactttccttccaacatgcatctgttgcagggtga

SEQ ID NO: 14877 - DNA, 79 bp, Homo sapiens
agggcatgcttctactgaagaacagcaactttccttccaacatgcatctgttgcagggtgacctccaagtggctagtag

SEQ ID NO: 14878 - DNA, 78 bp, Homo sapiens
ttctactgaagaacagcaactttccttccaacatgcatctgttgcagggtgacctccaagtggctagtagtcttcttg

SEQ ID NO: 14879 - DNA, 75 bp, Homo sapiens
aacagcaactttccttccaacatgcatctgttgcagggtgacctccaagtggctagtagtcttcttgtggagggt

SEQ ID NO: 14880 - DNA, 74 bp, Homo sapiens
aactttccttccaacatgcatctgttgcagggtgacctccaagtggctagtagtcttcttgtggagggttcaac

SEQ ID NO: 14881 - DNA, 78 bp, Homo sapiens
tccaacatgcatctgttgcagggtgacctccaagtggctagtagtcttcttgtggagggttcaactggaggcaaagtg

SEQ ID NO: 14882 - DNA, 77 bp, Homo sapiens
tggctagtagtcttcttgtggagggttcaactggaggcaaagtggcccagctcaagatcactcagcgtctccgtttg

SEQ ID NO: 14883 - DNA, 76 bp, Homo sapiens
gtagtcttcttgtggagggttcaactggaggcaaagtggcccagctcaagatcactcagcgtctccgtttggacca

SEQ ID NO: 14884 - DNA, 75 bp, Homo sapiens
aactggaggcaaagtggcccagctcaagatcactcagcgtctccgtttggaccagcccaagttggatgaagtaac

SEQ ID NO: 14885 - DNA, 77 bp, Homo sapiens
aagtggcccagctcaagatcactcagcgtctccgtttggaccagcccaagttggatgaagtaactcgacgcatcaaa

SEQ ID NO: 14886 - DNA, 78 bp, Homo sapiens
tcaagatcactcagcgtctccgtttggaccagcccaagttggatgaagtaactcgacgcatcaaagtagcagggccca

SEQ ID NO: 14887 - DNA, 75 bp, Homo sapiens
tctccgtttggaccagcccaagttggatgaagtaactcgacgcatcaaagtagcagggcccaatggttatgccat

SEQ ID NO: 14888 - DNA, 75 bp, Homo sapiens
accagcccaagttggatgaagtaactcgacgcatcaaagtagcagggcccaatggttatgccattcttttggctg

SEQ ID NO: 14889 - DNA, 76 bp, Homo sapiens
aagttggatgaagtaactcgacgcatcaaagtagcagggcccaatggttatgccattcttttggctgtgcctggaa

SEQ ID NO: 14890 - DNA, 77 bp, Homo sapiens
aagtaactcgacgcatcaaagtagcagggcccaatggttatgccattcttttggctgtgcctggaagttctgacagc

SEQ ID NO: 14891 - DNA, 75 bp, Homo sapiens
atcaaagtagcagggcccaatggttatgccattcttttggctgtgcctggaagttctgacagccggtcctcctct

SEQ ID NO: 14892 - DNA, 79 bp, Homo sapiens
agggcccaatggttatgccattcttttggctgtgcctggaagttctgacagccggtcctcctcttcctcagctgcatca

SEQ ID NO: 14893 - DNA, 82 bp, Homo sapiens
attcttttggctgtgcctggaagttctgacagccggtcctcctcttcctcagctgcatcagacactgccacttctactcaga

SEQ ID NO: 14894 - DNA, 83 bp, Homo sapiens
tgtgcctggaagttctgacagccggtcctcctcttcctcagctgcatcagacactgccacttctactcagaggccacttagga

SEQ ID NO: 14895 - DNA, 78 bp, Homo sapiens
aagttctgacagccggtcctcctcttcctcagctgcatcagacactgccacttctactcagaggccacttaggaacct

SEQ ID NO: 14896 - DNA, 78 bp, Homo sapiens
agccggtcctcctcttcctcagctgcatcagacactgccacttctactcagaggccacttaggaaccttgtgtcctat

SEQ ID NO: 14897 - DNA, 78 bp, Homo sapiens
ctcttcctcagctgcatcagacactgccacttctactcagaggccacttaggaaccttgtgtcctatttaaagcaaaa

SEQ ID NO: 14898 - DNA, 80 bp, Homo sapiens
cctcagctgcatcagacactgccacttctactcagaggccacttaggaaccttgtgtcctatttaaagcaaaagcaggca

SEQ ID NO: 14899 - DNA, 75 bp, Homo sapiens
atcagacactgccacttctactcagaggccacttaggaaccttgtgtcctatttaaagcaaaagcaggcagccgg

SEQ ID NO: 14900 - DNA, 73 bp, Homo sapiens
acttctactcagaggccacttaggaaccttgtgtcctatttaaagcaaaagcaggcagccggggtgatcagcc

SEQ ID NO: 14901 - DNA, 72 bp, Homo sapiens
ttaggaaccttgtgtcctatttaaagcaaaagcaggcagccggggtgatcagcctccctgtggggggcaaca

SEQ ID NO: 14902 - DNA, 72 bp, Homo sapiens
tgtcctatttaaagcaaaagcaggcagccggggtgatcagcctccctgtggggggcaacaaagacaaggaaa

SEQ ID NO: 14903 - DNA, 70 bp, Homo sapiens
atttaaagcaaaagcaggcagccggggtgatcagcctccctgtggggggcaacaaagacaaggaaaacac

SEQ ID NO: 14904 - DNA, 69 bp, Homo sapiens
gggtgatcagcctccctgtggggggcaacaaagacaaggaaaacaccggggtccttcatgccttcccac

SEQ ID NO: 14905 - DNA, 69 bp, Homo sapiens
ggggcaacaaagacaaggaaaacaccggggtccttcatgccttcccaccttgtgagttctcccagcagt

SEQ ID NO: 14906 - DNA, 69 bp, Homo sapiens
aaagacaaggaaaacaccggggtccttcatgccttcccaccttgtgagttctcccagcagttcctggat

SEQ ID NO: 14907 - DNA, 70 bp, Homo sapiens
aaaacaccggggtccttcatgccttcccaccttgtgagttctcccagcagttcctggattcccctgccaa

SEQ ID NO: 14908 - DNA, 77 bp, Homo sapiens
tccttcatgccttcccaccttgtgagttctcccagcagttcctggattcccctgccaaggcactggccaaatctgaa

SEQ ID NO: 14909 - DNA, 75 bp, Homo sapiens
cttcccaccttgtgagttctcccagcagttcctggattcccctgccaaggcactggccaaatctgaagaagatta

SEQ ID NO: 14910 - DNA, 74 bp, Homo sapiens
accttgtgagttctcccagcagttcctggattcccctgccaaggcactggccaaatctgaagaagattacctgg

SEQ ID NO: 14911 - DNA, 79 bp, Homo sapiens
ttctcccagcagttcctggattcccctgccaaggcactggccaaatctgaagaagattacctggtcatgatcattgtcc

SEQ ID NO: 14912 - DNA, 79 bp, Homo sapiens
tcctggattcccctgccaaggcactggccaaatctgaagaagattacctggtcatgatcattgtccgtggtgcgtccta

SEQ ID NO: 14913 - DNA, 78 bp, Homo sapiens
cactggccaaatctgaagaagattacctggtcatgatcattgtccgtggtgcgtcctaaagtccatgtgtaacttgta

SEQ ID NO: 14914 - DNA, 76 bp, Homo sapiens
aatctgaagaagattacctggtcatgatcattgtccgtggtgcgtcctaaagtccatgtgtaacttgtatttacta

SEQ ID NO: 14915 - DNA, 73 bp, Homo sapiens
aagaagattacctggtcatgatcattgtccgtggtgcgtcctaaagtccatgtgtaacttgtatttactactt

SEQ ID NO: 14916 - DNA, 75 bp, Homo sapiens
tcatgatcattgtccgtggtgcgtcctaaagtccatgtgtaacttgtatttactactttgacatggttcctgttt

SEQ ID NO: 14917 - DNA, 72 bp, Homo sapiens
atcattgtccgtggtgcgtcctaaagtccatgtgtaacttgtatttactactttgacatggttcctgttttg

SEQ ID NO: 14918 - DNA, 75 bp, Homo sapiens
tgcgtcctaaagtccatgtgtaacttgtatttactactttgacatggttcctgttttgtgatgtgtaatgggata

SEQ ID NO: 14919 - DNA, 78 bp, Homo sapiens
taaagtccatgtgtaacttgtatttactactttgacatggttcctgttttgtgatgtgtaatgggatacagcatcaga

SEQ ID NO: 14920 - DNA, 76 bp, Homo sapiens
gtatttactactttgacatggttcctgttttgtgatgtgtaatgggatacagcatcagatgcaattttctttttag

SEQ ID NO: 14921 - DNA, 77 bp, Homo sapiens
tttgacatggttcctgttttgtgatgtgtaatgggatacagcatcagatgcaattttctttttagttgttagttgta

SEQ ID NO: 14922 - DNA, 76 bp, Homo sapiens
gttcctgttttgtgatgtgtaatgggatacagcatcagatgcaattttctttttagttgttagttgtagcattttc

SEQ ID NO: 14923 - DNA, 76 bp, Homo sapiens
tgtgatgtgtaatgggatacagcatcagatgcaattttctttttagttgttagttgtagcattttcttttttatat

SEQ ID NO: 14924 - DNA, 64 bp, Homo sapiens
ttttatatttttataaacgtctttaaaatagaaatcaggacagtttagctatttttttgtttgt

SEQ ID NO: 14925 - DNA, 70 bp, Homo sapiens
ttttttgtttgtttagctattattttaagtgaaagggatgccctaaaggtagcaggcaggcagacagatt

SEQ ID NO: 14926 - DNA, 73 bp, Homo sapiens
ttgtttagctattattttaagtgaaagggatgccctaaaggtagcaggcaggcagacagatttgctttaatta

SEQ ID NO: 14927 - DNA, 72 bp, Homo sapiens
tattttaagtgaaagggatgccctaaaggtagcaggcaggcagacagatttgctttaattaggagttcccac

SEQ ID NO: 14928 - DNA, 72 bp, Homo sapiens
taagtgaaagggatgccctaaaggtagcaggcaggcagacagatttgctttaattaggagttcccaccctta

SEQ ID NO: 14929 - DNA, 69 bp, Homo sapiens
ccctaaaggtagcaggcaggcagacagatttgctttaattaggagttcccacccttatgagtaattttt

SEQ ID NO: 14930 - DNA, 70 bp, Homo sapiens
aaggtagcaggcaggcagacagatttgctttaattaggagttcccacccttatgagtaattttttttctc

SEQ ID NO: 14931 - DNA, 70 bp, Homo sapiens
caggcagacagatttgctttaattaggagttcccacccttatgagtaattttttttctctattcagttgt

SEQ ID NO: 14932 - DNA, 65 bp, Homo sapiens
agatttgctttaattaggagttcccacccttatgagtaattttttttctctattcagttgttttt

SEQ ID NO: 14933 - DNA, 66 bp, Homo sapiens
tttttaatcttgagcttaaaaaatcctcagagttacaaaaccaaaattttgaaaagtcagaatttg

SEQ ID NO: 14934 - DNA, 68 bp, Homo sapiens
tgagcttaaaaaatcctcagagttacaaaaccaaaattttgaaaagtcagaatttggagaaaggagtc

SEQ ID NO: 14935 - DNA, 69 bp, Homo sapiens
aaatcctcagagttacaaaaccaaaattttgaaaagtcagaatttggagaaaggagtccactgaccata

SEQ ID NO: 14936 - DNA, 69 bp, Homo sapiens
gagttacaaaaccaaaattttgaaaagtcagaatttggagaaaggagtccactgaccatataaagagag

SEQ ID NO: 14937 - DNA, 70 bp, Homo sapiens
aaccaaaattttgaaaagtcagaatttggagaaaggagtccactgaccatataaagagagtaatagccac

SEQ ID NO: 14938 - DNA, 72 bp, Homo sapiens
ttttgaaaagtcagaatttggagaaaggagtccactgaccatataaagagagtaatagccacctaaaaatga

SEQ ID NO: 14939 - DNA, 71 bp, Homo sapiens
ccactgaccatataaagagagtaatagccacctaaaaatgactcgattggtgtgtaggtaaataattcttt

SEQ ID NO: 14940 - DNA, 69 bp, Homo sapiens
aaagagagtaatagccacctaaaaatgactcgattggtgtgtaggtaaataattcttttaccagaaatg

SEQ ID NO: 14941 - DNA, 71 bp, Homo sapiens
agtaatagccacctaaaaatgactcgattggtgtgtaggtaaataattcttttaccagaaatgtgtgtgac

SEQ ID NO: 14942 - DNA, 73 bp, Homo sapiens
cctaaaaatgactcgattggtgtgtaggtaaataattcttttaccagaaatgtgtgtgactgaaatttgatca

SEQ ID NO: 14943 - DNA, 76 bp, Homo sapiens
tcgattggtgtgtaggtaaataattcttttaccagaaatgtgtgtgactgaaatttgatcagggatctcaaagata

SEQ ID NO: 14944 - DNA, 76 bp, Homo sapiens
gtgtaggtaaataattcttttaccagaaatgtgtgtgactgaaatttgatcagggatctcaaagatatgctggtaa

SEQ ID NO: 14945 - DNA, 79 bp, Homo sapiens
tttaccagaaatgtgtgtgactgaaatttgatcagggatctcaaagatatgctggtaaattgtatagcaatgtaattat

SEQ ID NO: 14946 - DNA, 79 bp, Homo sapiens
atgtgtgtgactgaaatttgatcagggatctcaaagatatgctggtaaattgtatagcaatgtaattattttaatcagg

SEQ ID NO: 14947 - DNA, 77 bp, Homo sapiens
ctgaaatttgatcagggatctcaaagatatgctggtaaattgtatagcaatgtaattattttaatcaggtatttgag

SEQ ID NO: 14948 - DNA, 75 bp, Homo sapiens
gggatctcaaagatatgctggtaaattgtatagcaatgtaattattttaatcaggtatttgagtatttcttaaga

SEQ ID NO: 14949 - DNA, 75 bp, Homo sapiens
ctcaaagatatgctggtaaattgtatagcaatgtaattattttaatcaggtatttgagtatttcttaagatacag

SEQ ID NO: 14950 - DNA, 73 bp, Homo sapiens
tgctggtaaattgtatagcaatgtaattattttaatcaggtatttgagtatttcttaagatacagtttattcc

SEQ ID NO: 14951 - DNA, 72 bp, Homo sapiens
gctggtaaattgtatagcaatgtaattattttaatcaggtatttgagtatttcttaagatacagtttattcc

SEQ ID NO: 14952 - DNA, 72 bp, Homo sapiens
aattgtatagcaatgtaattattttaatcaggtatttgagtatttcttaagatacagtttattcccagagag

SEQ ID NO: 14953 - DNA, 72 bp, Homo sapiens
gcaatgtaattattttaatcaggtatttgagtatttcttaagatacagtttattcccagagagtttgcttta

SEQ ID NO: 14954 - DNA, 71 bp, Homo sapiens
attttaatcaggtatttgagtatttcttaagatacagtttattcccagagagtttgctttaacatgcattt

SEQ ID NO: 14955 - DNA, 71 bp, Homo sapiens
tttaatcaggtatttgagtatttcttaagatacagtttattcccagagagtttgctttaacatgcattttt

SEQ ID NO: 14956 - DNA, 73 bp, Homo sapiens
tcaggtatttgagtatttcttaagatacagtttattcccagagagtttgctttaacatgcattttttaaatca

SEQ ID NO: 14957 - DNA, 72 bp, Homo sapiens
gtatttcttaagatacagtttattcccagagagtttgctttaacatgcattttttaaatcatttgttctaga

SEQ ID NO: 14958 - DNA, 74 bp, Homo sapiens
gatacagtttattcccagagagtttgctttaacatgcattttttaaatcatttgttctagagttctgtatccca

SEQ ID NO: 14959 - DNA, 76 bp, Homo sapiens
tttgctttaacatgcattttttaaatcatttgttctagagttctgtatcccatatatgcacttttggtttgtagca

SEQ ID NO: 14960 - DNA, 77 bp, Homo sapiens
catgcattttttaaatcatttgttctagagttctgtatcccatatatgcacttttggtttgtagcagtaactgttca

SEQ ID NO: 14961 - DNA, 73 bp, Homo sapiens
ttgttctagagttctgtatcccatatatgcacttttggtttgtagcagtaactgttcagtaaaaattaaggac

SEQ ID NO: 14962 - DNA, 72 bp, Homo sapiens
atcccatatatgcacttttggtttgtagcagtaactgttcagtaaaaattaaggactatgttacaaaccata

SEQ ID NO: 14963 - DNA, 77 bp, Homo sapiens
ttgtagcagtaactgttcagtaaaaattaaggactatgttacaaaccatatatgtcttatgcttacactagtatgca

SEQ ID NO: 14964 - DNA, 75 bp, Homo sapiens
actgttcagtaaaaattaaggactatgttacaaaccatatatgtcttatgcttacactagtatgcaagaagtgag

SEQ ID NO: 14965 - DNA, 76 bp, Homo sapiens
cagtaaaaattaaggactatgttacaaaccatatatgtcttatgcttacactagtatgcaagaagtgagtaggtgc

SEQ ID NO: 14966 - DNA, 76 bp, Homo sapiens
aaggactatgttacaaaccatatatgtcttatgcttacactagtatgcaagaagtgagtaggtgcttttaaaatca

SEQ ID NO: 14967 - DNA, 77 bp, Homo sapiens
caaaccatatatgtcttatgcttacactagtatgcaagaagtgagtaggtgcttttaaaatcagaattctttggtca

SEQ ID NO: 14968 - DNA, 76 bp, Homo sapiens
tatgtcttatgcttacactagtatgcaagaagtgagtaggtgcttttaaaatcagaattctttggtcagttattgg

SEQ ID NO: 14969 - DNA, 76 bp, Homo sapiens
tatgcttacactagtatgcaagaagtgagtaggtgcttttaaaatcagaattctttggtcagttattggtgtgtgg

SEQ ID NO: 14970 - DNA, 73 bp, Homo sapiens
tatgcaagaagtgagtaggtgcttttaaaatcagaattctttggtcagttattggtgtgtggtggtgttttta

SEQ ID NO: 14971 - DNA, 70 bp, Homo sapiens
tgagtaggtgcttttaaaatcagaattctttggtcagttattggtgtgtggtggtgtttttactgacttt

SEQ ID NO: 14972 - DNA, 70 bp, Homo sapiens
gcttttaaaatcagaattctttggtcagttattggtgtgtggtggtgtttttactgactttttcagagag

SEQ ID NO: 14973 - DNA, 72 bp, Homo sapiens
aaaatcagaattctttggtcagttattggtgtgtggtggtgtttttactgactttttcagagaggtgtagca

SEQ ID NO: 14974 - DNA, 72 bp, Homo sapiens
tttggtcagttattggtgtgtggtggtgtttttactgactttttcagagaggtgtagcaggtacagttctaa

SEQ ID NO: 14975 - DNA, 73 bp, Homo sapiens
tggtggtgtttttactgactttttcagagaggtgtagcaggtacagttctaatcgtgcatatttcgaaactaa

SEQ ID NO: 14976 - DNA, 76 bp, Homo sapiens
tactgactttttcagagaggtgtagcaggtacagttctaatcgtgcatatttcgaaactaagtgttcttcatcaaa

SEQ ID NO: 14977 - DNA, 76 bp, Homo sapiens
tttcagagaggtgtagcaggtacagttctaatcgtgcatatttcgaaactaagtgttcttcatcaaagatgagttt

SEQ ID NO: 14978 - DNA, 74 bp, Homo sapiens
caggtacagttctaatcgtgcatatttcgaaactaagtgttcttcatcaaagatgagtttttgtttttgtatca

SEQ ID NO: 14979 - DNA, 73 bp, Homo sapiens
tcgtgcatatttcgaaactaagtgttcttcatcaaagatgagtttttgtttttgtatcaattcaaatttctgg

SEQ ID NO: 14980 - DNA, 70 bp, Homo sapiens
catatttcgaaactaagtgttcttcatcaaagatgagtttttgtttttgtatcaattcaaatttctggtt

SEQ ID NO: 14981 - DNA, 71 bp, Homo sapiens
aactaagtgttcttcatcaaagatgagtttttgtttttgtatcaattcaaatttctggtttcaataataga

SEQ ID NO: 14982 - DNA, 73 bp, Homo sapiens
gagtttttgtttttgtatcaattcaaatttctggtttcaataatagaaagaagagttgtctgcaggctcatag

SEQ ID NO: 14983 - DNA, 76 bp, Homo sapiens
ttcaaatttctggtttcaataatagaaagaagagttgtctgcaggctcatagtcatcttttatttcagtgggcatt

SEQ ID NO: 14984 - DNA, 77 bp, Homo sapiens
tttctggtttcaataatagaaagaagagttgtctgcaggctcatagtcatcttttatttcagtgggcatttaaatca

SEQ ID NO: 14985 - DNA, 78 bp, Homo sapiens
ataatagaaagaagagttgtctgcaggctcatagtcatcttttatttcagtgggcatttaaatcagccatatttggat

SEQ ID NO: 14986 - DNA, 79 bp, Homo sapiens
aagaagagttgtctgcaggctcatagtcatcttttatttcagtgggcatttaaatcagccatatttggattgcagaatt

SEQ ID NO: 14987 - DNA, 79 bp, Homo sapiens
tgtctgcaggctcatagtcatcttttatttcagtgggcatttaaatcagccatatttggattgcagaatttcttaaaaa

SEQ ID NO: 14988 - DNA, 78 bp, Homo sapiens
ctcatagtcatcttttatttcagtgggcatttaaatcagccatatttggattgcagaatttcttaaaaagtcatcata

SEQ ID NO: 14989 - DNA, 77 bp, Homo sapiens
tatttcagtgggcatttaaatcagccatatttggattgcagaatttcttaaaaagtcatcataaaatgcctttgaca

SEQ ID NO: 14990 - DNA, 77 bp, Homo sapiens
agtgggcatttaaatcagccatatttggattgcagaatttcttaaaaagtcatcataaaatgcctttgacatgctct

SEQ ID NO: 14991 - DNA, 76 bp, Homo sapiens
tcagccatatttggattgcagaatttcttaaaaagtcatcataaaatgcctttgacatgctcttttaaaattttgc

SEQ ID NO: 14992 - DNA, 74 bp, Homo sapiens
catatttggattgcagaatttcttaaaaagtcatcataaaatgcctttgacatgctcttttaaaattttgcttg

SEQ ID NO: 14993 - DNA, 72 bp, Homo sapiens
ttgcagaatttcttaaaaagtcatcataaaatgcctttgacatgctcttttaaaattttgcttgtcttttta

SEQ ID NO: 14994 - DNA, 72 bp, Homo sapiens
atgcctttgacatgctcttttaaaattttgcttgtctttttattttcatatttaaacagtagtgacattaca

SEQ ID NO: 14995 - DNA, 70 bp, Homo sapiens
taaaattttgcttgtctttttattttcatatttaaacagtagtgacattacattattgaaaatgttttga

SEQ ID NO: 14996 - DNA, 73 bp, Homo sapiens
tgcttgtctttttattttcatatttaaacagtagtgacattacattattgaaaatgttttgaacatcttggaa

SEQ ID NO: 14997 - DNA, 73 bp, Homo sapiens
tattttcatatttaaacagtagtgacattacattattgaaaatgttttgaacatcttggaaattttatgttca

SEQ ID NO: 14998 - DNA, 73 bp, Homo sapiens
tttaaacagtagtgacattacattattgaaaatgttttgaacatcttggaaattttatgttcaatattctcac

SEQ ID NO: 14999 - DNA, 78 bp, Homo sapiens
cagtagtgacattacattattgaaaatgttttgaacatcttggaaattttatgttcaatattctcactgctgtccagc

SEQ ID NO: 15000 - DNA, 76 bp, Homo sapiens
cattattgaaaatgttttgaacatcttggaaattttatgttcaatattctcactgctgtccagctacggaattgaa

SEQ ID NO: 15001 - DNA, 77 bp, Homo sapiens
ttgaaaatgttttgaacatcttggaaattttatgttcaatattctcactgctgtccagctacggaattgaaatgtca

SEQ ID NO: 15002 - DNA, 77 bp, Homo sapiens
aatgttttgaacatcttggaaattttatgttcaatattctcactgctgtccagctacggaattgaaatgtcagtgta

SEQ ID NO: 15003 - DNA, 77 bp, Homo sapiens
ttgaacatcttggaaattttatgttcaatattctcactgctgtccagctacggaattgaaatgtcagtgtaggaaaa

SEQ ID NO: 15004 - DNA, 73 bp, Homo sapiens
ttatgttcaatattctcactgctgtccagctacggaattgaaatgtcagtgtaggaaaaccttttttaattgt

SEQ ID NO: 15005 - DNA, 72 bp, Homo sapiens
atgttcaatattctcactgctgtccagctacggaattgaaatgtcagtgtaggaaaaccttttttaattgtt

SEQ ID NO: 15006 - DNA, 70 bp, Homo sapiens
tctcactgctgtccagctacggaattgaaatgtcagtgtaggaaaaccttttttaattgttttattttcc

SEQ ID NO: 15007 - DNA, 65 bp, Homo sapiens
gctacggaattgaaatgtcagtgtaggaaaaccttttttaattgttttattttcccagacacccg

SEQ ID NO: 15008 - DNA, 64 bp, Homo sapiens
aatgtcagtgtaggaaaaccttttttaattgttttattttcccagacacccggaattaatacag

SEQ ID NO: 15009 - DNA, 65 bp, Homo sapiens
cagtgtaggaaaaccttttttaattgttttattttcccagacacccggaattaatacaggatcat

SEQ ID NO: 15010 - DNA, 67 bp, Homo sapiens
ttttttaattgttttattttcccagacacccggaattaatacaggatcatttaacttagcctcacag

SEQ ID NO: 15011 - DNA, 66 bp, Homo sapiens
aattgttttattttcccagacacccggaattaatacaggatcatttaacttagcctcacagttttt

SEQ ID NO: 15012 - DNA, 73 bp, Homo sapiens
tttttttttcaaaggtgagatgatatcaacctctggttctcaacaaggacttttgctgcttaacagtaatgga

SEQ ID NO: 15013 - DNA, 73 bp, Homo sapiens
ttttcaaaggtgagatgatatcaacctctggttctcaacaaggacttttgctgcttaacagtaatggattttt

SEQ ID NO: 15014 - DNA, 65 bp, Homo sapiens
ttttttttttaatctatcccctctgtcccacccctaatttgtcaggtcattagtaagtatatttt

SEQ ID NO: 15015 - DNA, 67 bp, Homo sapiens
tttttaatctatcccctctgtcccacccctaatttgtcaggtcattagtaagtatatttttctccct

SEQ ID NO: 15016 - DNA, 71 bp, Homo sapiens
ctctgtcccacccctaatttgtcaggtcattagtaagtatatttttctcccttgatttaagtgctgaagac

SEQ ID NO: 15017 - DNA, 71 bp, Homo sapiens
acccctaatttgtcaggtcattagtaagtatatttttctcccttgatttaagtgctgaagacttcagctaa

SEQ ID NO: 15018 - DNA, 71 bp, Homo sapiens
aatttgtcaggtcattagtaagtatatttttctcccttgatttaagtgctgaagacttcagctaaggccct

SEQ ID NO: 15019 - DNA, 72 bp, Homo sapiens
gtcattagtaagtatatttttctcccttgatttaagtgctgaagacttcagctaaggcccttgatatttaat

SEQ ID NO: 15020 - DNA, 72 bp, Homo sapiens
atttttctcccttgatttaagtgctgaagacttcagctaaggcccttgatatttaattatgattagagactt

SEQ ID NO: 15021 - DNA, 74 bp, Homo sapiens
cttgatttaagtgctgaagacttcagctaaggcccttgatatttaattatgattagagacttttggaccttctg

SEQ ID NO: 15022 - DNA, 76 bp, Homo sapiens
tttaagtgctgaagacttcagctaaggcccttgatatttaattatgattagagacttttggaccttctggatcatg

SEQ ID NO: 15023 - DNA, 75 bp, Homo sapiens
aagacttcagctaaggcccttgatatttaattatgattagagacttttggaccttctggatcatggtcatgtttc

SEQ ID NO: 15024 - DNA, 74 bp, Homo sapiens
atttaattatgattagagacttttggaccttctggatcatggtcatgtttctgttctatgaaagtgacttaact

SEQ ID NO: 15025 - DNA, 76 bp, Homo sapiens
attatgattagagacttttggaccttctggatcatggtcatgtttctgttctatgaaagtgacttaacttgaagcc

SEQ ID NO: 15026 - DNA, 75 bp, Homo sapiens
ttctggatcatggtcatgtttctgttctatgaaagtgacttaacttgaagcctggcagaacccaactgttttctt

SEQ ID NO: 15027 - DNA, 74 bp, Homo sapiens
atcatggtcatgtttctgttctatgaaagtgacttaacttgaagcctggcagaacccaactgttttctttctgt

SEQ ID NO: 15028 - DNA, 73 bp, Homo sapiens
tttctgttctatgaaagtgacttaacttgaagcctggcagaacccaactgttttctttctgttatcaaagctg

SEQ ID NO: 15029 - DNA, 72 bp, Homo sapiens
tctatgaaagtgacttaacttgaagcctggcagaacccaactgttttctttctgttatcaaagctggtagtt

SEQ ID NO: 15030 - DNA, 71 bp, Homo sapiens
tatgaaagtgacttaacttgaagcctggcagaacccaactgttttctttctgttatcaaagctggtagttt

SEQ ID NO: 15031 - DNA, 71 bp, Homo sapiens
gtgacttaacttgaagcctggcagaacccaactgttttctttctgttatcaaagctggtagttttgaaata

SEQ ID NO: 15032 - DNA, 71 bp, Homo sapiens
acttaacttgaagcctggcagaacccaactgttttctttctgttatcaaagctggtagttttgaaatagca

SEQ ID NO: 15033 - DNA, 73 bp, Homo sapiens
ttgaagcctggcagaacccaactgttttctttctgttatcaaagctggtagttttgaaatagcaccaataata

SEQ ID NO: 15034 - DNA, 71 bp, Homo sapiens
aagcctggcagaacccaactgttttctttctgttatcaaagctggtagttttgaaatagcaccaataataa

SEQ ID NO: 15035 - DNA, 69 bp, Homo sapiens
ccaactgttttctttctgttatcaaagctggtagttttgaaatagcaccaataataacccagggaaatg

SEQ ID NO: 15036 - DNA, 72 bp, Homo sapiens
ctgttttctttctgttatcaaagctggtagttttgaaatagcaccaataataacccagggaaatgtcatgta

SEQ ID NO: 15037 - DNA, 71 bp, Homo sapiens
ttctttctgttatcaaagctggtagttttgaaatagcaccaataataacccagggaaatgtcatgtaattt

SEQ ID NO: 15038 - DNA, 70 bp, Homo sapiens
ctttctgttatcaaagctggtagttttgaaatagcaccaataataacccagggaaatgtcatgtaatttt

SEQ ID NO: 15039 - DNA, 70 bp, Homo sapiens
atcaaagctggtagttttgaaatagcaccaataataacccagggaaatgtcatgtaatttttattttcca

SEQ ID NO: 15040 - DNA, 71 bp, Homo sapiens
gttttgaaatagcaccaataataacccagggaaatgtcatgtaatttttattttccattatgacaggtgtc

SEQ ID NO: 15041 - DNA, 78 bp, Homo sapiens
atagcaccaataataacccagggaaatgtcatgtaatttttattttccattatgacaggtgtctaatgcatgtcagca

SEQ ID NO: 15042 - DNA, 76 bp, Homo sapiens
taataacccagggaaatgtcatgtaatttttattttccattatgacaggtgtctaatgcatgtcagcacaaaagtg

SEQ ID NO: 15043 - DNA, 83 bp, Homo sapiens
aaatgtcatgtaatttttattttccattatgacaggtgtctaatgcatgtcagcacaaaagtgtcatcactgctgtgtcatcc

SEQ ID NO: 15044 - DNA, 83 bp, Homo sapiens
ttattttccattatgacaggtgtctaatgcatgtcagcacaaaagtgtcatcactgctgtgtcatccctcttggttttcacta

SEQ ID NO: 15045 - DNA, 86 bp, Homo sapiens
ttatgacaggtgtctaatgcatgtcagcacaaaagtgtcatcactgctgtgtcatccctcttggttttcactatgcatctataatt

SEQ ID NO: 15046 - DNA, 82 bp, Homo sapiens
tctaatgcatgtcagcacaaaagtgtcatcactgctgtgtcatccctcttggttttcactatgcatctataattttttaagt

SEQ ID NO: 15047 - DNA, 77 bp, Homo sapiens
agcacaaaagtgtcatcactgctgtgtcatccctcttggttttcactatgcatctataattttttaagtttgcaggt

SEQ ID NO: 15048 - DNA, 74 bp, Homo sapiens
aaaagtgtcatcactgctgtgtcatccctcttggttttcactatgcatctataattttttaagtttgcaggttt

SEQ ID NO: 15049 - DNA, 71 bp, Homo sapiens
tgctgtgtcatccctcttggttttcactatgcatctataattttttaagtttgcaggttttgtgggggttt

SEQ ID NO: 15050 - DNA, 68 bp, Homo sapiens
gtcatccctcttggttttcactatgcatctataattttttaagtttgcaggttttgtgggggtttttg

SEQ ID NO: 15051 - DNA, 71 bp, Homo sapiens
tgtttgtttttaaactggaaaaactagccattttgagagaaggaaggttctaggctatgagcatgaaggtc

SEQ ID NO: 15052 - DNA, 70 bp, Homo sapiens
gtttttaaactggaaaaactagccattttgagagaaggaaggttctaggctatgagcatgaaggtccttg

SEQ ID NO: 15053 - DNA, 73 bp, Homo sapiens
aaaactagccattttgagagaaggaaggttctaggctatgagcatgaaggtccttgtgcctcttgggaaaata

SEQ ID NO: 15054 - DNA, 74 bp, Homo sapiens
agaaggaaggttctaggctatgagcatgaaggtccttgtgcctcttgggaaaatacctgaaatcctataatgaa

SEQ ID NO: 15055 - DNA, 77 bp, Homo sapiens
ttctaggctatgagcatgaaggtccttgtgcctcttgggaaaatacctgaaatcctataatgaagacttttgatgct

SEQ ID NO: 15056 - DNA, 77 bp, Homo sapiens
tatgagcatgaaggtccttgtgcctcttgggaaaatacctgaaatcctataatgaagacttttgatgcttcttgctt

SEQ ID NO: 15057 - DNA, 72 bp, Homo sapiens
aaggtccttgtgcctcttgggaaaatacctgaaatcctataatgaagacttttgatgcttcttgctttcaaa

SEQ ID NO: 15058 - DNA, 72 bp, Homo sapiens
tcttgggaaaatacctgaaatcctataatgaagacttttgatgcttcttgctttcaaaaagctgtggttggt

SEQ ID NO: 15059 - DNA, 72 bp, Homo sapiens
aaatacctgaaatcctataatgaagacttttgatgcttcttgctttcaaaaagctgtggttggtttggagta

SEQ ID NO: 15060 - DNA, 72 bp, Homo sapiens
aaatcctataatgaagacttttgatgcttcttgctttcaaaaagctgtggttggtttggagtagacacctgt

SEQ ID NO: 15061 - DNA, 73 bp, Homo sapiens
atgaagacttttgatgcttcttgctttcaaaaagctgtggttggtttggagtagacacctgttcagaaactaa

SEQ ID NO: 15062 - DNA, 76 bp, Homo sapiens
tttgatgcttcttgctttcaaaaagctgtggttggtttggagtagacacctgttcagaaactaatgcaagtgtgga

SEQ ID NO: 15063 - DNA, 74 bp, Homo sapiens
tttcaaaaagctgtggttggtttggagtagacacctgttcagaaactaatgcaagtgtggagtctacatacgtg

SEQ ID NO: 15064 - DNA, 77 bp, Homo sapiens
ctgtggttggtttggagtagacacctgttcagaaactaatgcaagtgtggagtctacatacgtgggctcatagtata

SEQ ID NO: 15065 - DNA, 75 bp, Homo sapiens
gttggtttggagtagacacctgttcagaaactaatgcaagtgtggagtctacatacgtgggctcatagtataatt

SEQ ID NO: 15066 - DNA, 78 bp, Homo sapiens
tttggagtagacacctgttcagaaactaatgcaagtgtggagtctacatacgtgggctcatagtataatttgtggcca

SEQ ID NO: 15067 - DNA, 77 bp, Homo sapiens
acacctgttcagaaactaatgcaagtgtggagtctacatacgtgggctcatagtataatttgtggccagctacattt

SEQ ID NO: 15068 - DNA, 76 bp, Homo sapiens
acctgttcagaaactaatgcaagtgtggagtctacatacgtgggctcatagtataatttgtggccagctacatttt

SEQ ID NO: 15069 - DNA, 72 bp, Homo sapiens
aagtgtggagtctacatacgtgggctcatagtataatttgtggccagctacatttttccagtttaaataaac

SEQ ID NO: 15070 - DNA, 72 bp, Homo sapiens
agtctacatacgtgggctcatagtataatttgtggccagctacatttttccagtttaaataaactcactaac

SEQ ID NO: 15071 - DNA, 72 bp, Homo sapiens
acatacgtgggctcatagtataatttgtggccagctacatttttccagtttaaataaactcactaaccatta

SEQ ID NO: 15072 - DNA, 70 bp, Homo sapiens
cgtgggctcatagtataatttgtggccagctacatttttccagtttaaataaactcactaaccattaatt

SEQ ID NO: 15073 - DNA, 70 bp, Homo sapiens
tagtataatttgtggccagctacatttttccagtttaaataaactcactaaccattaatttttgaatatc

SEQ ID NO: 15074 - DNA, 69 bp, Homo sapiens
catttttccagtttaaataaactcactaaccattaatttttgaatatcttttgttgagatagttggaca

SEQ ID NO: 15075 - DNA, 70 bp, Homo sapiens
gtttaaataaactcactaaccattaatttttgaatatcttttgttgagatagttggacaaatgattttgc

SEQ ID NO: 15076 - DNA, 74 bp, Homo sapiens
ctcactaaccattaatttttgaatatcttttgttgagatagttggacaaatgattttgctcttttggagagtga

SEQ ID NO: 15077 - DNA, 77 bp, Homo sapiens
taatttttgaatatcttttgttgagatagttggacaaatgattttgctcttttggagagtgaagtccatgacatcta

SEQ ID NO: 15078 - DNA, 76 bp, Homo sapiens
gaatatcttttgttgagatagttggacaaatgattttgctcttttggagagtgaagtccatgacatctaattttac

SEQ ID NO: 15079 - DNA, 78 bp, Homo sapiens
tttgttgagatagttggacaaatgattttgctcttttggagagtgaagtccatgacatctaattttactgtcatccaa

SEQ ID NO: 15080 - DNA, 75 bp, Homo sapiens
aatgattttgctcttttggagagtgaagtccatgacatctaattttactgtcatccaaaatgtgtgttttatttc

SEQ ID NO: 15081 - DNA, 73 bp, Homo sapiens
gctcttttggagagtgaagtccatgacatctaattttactgtcatccaaaatgtgtgttttatttcttttctt

SEQ ID NO: 15082 - DNA, 76 bp, Homo sapiens
tttgttagtgtgacagcgtacagaagagtactgtgtttttgctccatgtttgtttgaatctttacctgacattgcc

SEQ ID NO: 15083 - DNA, 74 bp, Homo sapiens
acagcgtacagaagagtactgtgtttttgctccatgtttgtttgaatctttacctgacattgccgcttttgtta

SEQ ID NO: 15084 - DNA, 72 bp, Homo sapiens
agaagagtactgtgtttttgctccatgtttgtttgaatctttacctgacattgccgcttttgttaggtctgg

SEQ ID NO: 15085 - DNA, 74 bp, Homo sapiens
tttttgctccatgtttgtttgaatctttacctgacattgccgcttttgttaggtctgggcaatttgtgcttcag

SEQ ID NO: 15086 - DNA, 73 bp, Homo sapiens
atgtttgtttgaatctttacctgacattgccgcttttgttaggtctgggcaatttgtgcttcagtgtttttga

SEQ ID NO: 15087 - DNA, 73 bp, Homo sapiens
tgtttgaatctttacctgacattgccgcttttgttaggtctgggcaatttgtgcttcagtgtttttgaaacaa

SEQ ID NO: 15088 - DNA, 74 bp, Homo sapiens
tttacctgacattgccgcttttgttaggtctgggcaatttgtgcttcagtgtttttgaaacaatggcttgatac

SEQ ID NO: 15089 - DNA, 73 bp, Homo sapiens
cgcttttgttaggtctgggcaatttgtgcttcagtgtttttgaaacaatggcttgataccatttctaaatgta

SEQ ID NO: 15090 - DNA, 75 bp, Homo sapiens
ttgttaggtctgggcaatttgtgcttcagtgtttttgaaacaatggcttgataccatttctaaatgtatgtatta

SEQ ID NO: 15091 - DNA, 72 bp, Homo sapiens
gggcaatttgtgcttcagtgtttttgaaacaatggcttgataccatttctaaatgtatgtattataaaaaac

SEQ ID NO: 15092 - DNA, 72 bp, Homo sapiens
gtgcttcagtgtttttgaaacaatggcttgataccatttctaaatgtatgtattataaaaaactaattatgt

SEQ ID NO: 15093 - DNA, 72 bp, Homo sapiens
tgaaacaatggcttgataccatttctaaatgtatgtattataaaaaactaattatgtttagttggtcattac

SEQ ID NO: 15094 - DNA, 73 bp, Homo sapiens
gcttgataccatttctaaatgtatgtattataaaaaactaattatgtttagttggtcattacctacagagtgc

SEQ ID NO: 15095 - DNA, 73 bp, Homo sapiens
catttctaaatgtatgtattataaaaaactaattatgtttagttggtcattacctacagagtgccatagtcca

SEQ ID NO: 15096 - DNA, 74 bp, Homo sapiens
taaatgtatgtattataaaaaactaattatgtttagttggtcattacctacagagtgccatagtccacatgaac

SEQ ID NO: 15097 - DNA, 75 bp, Homo sapiens
gtatgtattataaaaaactaattatgtttagttggtcattacctacagagtgccatagtccacatgaacctcata

SEQ ID NO: 15098 - DNA, 73 bp, Homo sapiens
gtattataaaaaactaattatgtttagttggtcattacctacagagtgccatagtccacatgaacctcatatt

SEQ ID NO: 15099 - DNA, 75 bp, Homo sapiens
aattatgtttagttggtcattacctacagagtgccatagtccacatgaacctcatatttgtactgcccattcttt

SEQ ID NO: 15100 - DNA, 76 bp, Homo sapiens
attatgtttagttggtcattacctacagagtgccatagtccacatgaacctcatatttgtactgcccattcttttg

SEQ ID NO: 15101 - DNA, 77 bp, Homo sapiens
tttagttggtcattacctacagagtgccatagtccacatgaacctcatatttgtactgcccattcttttgtgcaggt

SEQ ID NO: 15102 - DNA, 80 bp, Homo sapiens
attacctacagagtgccatagtccacatgaacctcatatttgtactgcccattcttttgtgcaggttcataatatccata

SEQ ID NO: 15103 - DNA, 79 bp, Homo sapiens
acctacagagtgccatagtccacatgaacctcatatttgtactgcccattcttttgtgcaggttcataatatccataaa

SEQ ID NO: 15104 - DNA, 77 bp, Homo sapiens
atagtccacatgaacctcatatttgtactgcccattcttttgtgcaggttcataatatccataaagtatctagttaa

SEQ ID NO: 15105 - DNA, 75 bp, Homo sapiens
cacatgaacctcatatttgtactgcccattcttttgtgcaggttcataatatccataaagtatctagttaaacct

SEQ ID NO: 15106 - DNA, 71 bp, Homo sapiens
cttttgtgcaggttcataatatccataaagtatctagttaaaccttaagaattcaaatgaaagcaaaagtc

SEQ ID NO: 15107 - DNA, 67 bp, Homo sapiens
cataatatccataaagtatctagttaaaccttaagaattcaaatgaaagcaaaagtctaaaaccggt

SEQ ID NO: 15108 - DNA, 67 bp, Homo sapiens
taaagtatctagttaaaccttaagaattcaaatgaaagcaaaagtctaaaaccggttctacttctca

SEQ ID NO: 15109 - DNA, 67 bp, Homo sapiens
ctagttaaaccttaagaattcaaatgaaagcaaaagtctaaaaccggttctacttctcattagccag

SEQ ID NO: 15110 - DNA, 70 bp, Homo sapiens
taagaattcaaatgaaagcaaaagtctaaaaccggttctacttctcattagccaggatttaataatccca

SEQ ID NO: 15111 - DNA, 68 bp, Homo sapiens
aatgaaagcaaaagtctaaaaccggttctacttctcattagccaggatttaataatcccaacgttgaa

SEQ ID NO: 15112 - DNA, 68 bp, Homo sapiens
aaaccggttctacttctcattagccaggatttaataatcccaacgttgaatgttctttgtaacaacca

SEQ ID NO: 15113 - DNA, 68 bp, Homo sapiens
ttctacttctcattagccaggatttaataatcccaacgttgaatgttctttgtaacaaccaatttttt

SEQ ID NO: 15114 - DNA, 68 bp, Homo sapiens
cattagccaggatttaataatcccaacgttgaatgttctttgtaacaaccaatttttttctatctttc

SEQ ID NO: 15115 - DNA, 66 bp, Homo sapiens
gatttaataatcccaacgttgaatgttctttgtaacaaccaatttttttctatctttcttctttaa

SEQ ID NO: 15116 - DNA, 65 bp, Homo sapiens
tcccaacgttgaatgttctttgtaacaaccaatttttttctatctttcttctttaattattttaa

SEQ ID NO: 15117 - DNA, 66 bp, Homo sapiens
gaatgttctttgtaacaaccaatttttttctatctttcttctttaattattttaatgtagttgatt

SEQ ID NO: 15118 - DNA, 66 bp, Homo sapiens
caaccaatttttttctatctttcttctttaattattttaatgtagttgatttttctggaactcagt

SEQ ID NO: 15119 - DNA, 69 bp, Homo sapiens
ttttctatctttcttctttaattattttaatgtagttgatttttctggaactcagttaaaatgaatgga

SEQ ID NO: 15120 - DNA, 67 bp, Homo sapiens
ttcttctttaattattttaatgtagttgatttttctggaactcagttaaaatgaatggaaagaaaac

SEQ ID NO: 15121 - DNA, 72 bp, Homo sapiens
ttaatgtagttgatttttctggaactcagttaaaatgaatggaaagaaaacttcaggatatcatttaatgac

SEQ ID NO: 15122 - DNA, 72 bp, Homo sapiens
tggaactcagttaaaatgaatggaaagaaaacttcaggatatcatttaatgactattaagtattattggtaa

SEQ ID NO: 15123 - DNA, 69 bp, Homo sapiens
agaaaacttcaggatatcatttaatgactattaagtattattggtaaaaacgtgaagataagactttta

SEQ ID NO: 15124 - DNA, 70 bp, Homo sapiens
catttaatgactattaagtattattggtaaaaacgtgaagataagacttttagatcacagcttcaaattt

SEQ ID NO: 15125 - DNA, 70 bp, Homo sapiens
gactattaagtattattggtaaaaacgtgaagataagacttttagatcacagcttcaaattttatggaaa

SEQ ID NO: 15126 - DNA, 71 bp, Homo sapiens
ttggtaaaaacgtgaagataagacttttagatcacagcttcaaattttatggaaaattaagcaagcaatac

SEQ ID NO: 15127 - DNA, 73 bp, Homo sapiens
acgtgaagataagacttttagatcacagcttcaaattttatggaaaattaagcaagcaatacctagccaatag

SEQ ID NO: 15128 - DNA, 73 bp, Homo sapiens
agacttttagatcacagcttcaaattttatggaaaattaagcaagcaatacctagccaatagttctgcttaac

SEQ ID NO: 15129 - DNA, 73 bp, Homo sapiens
tagatcacagcttcaaattttatggaaaattaagcaagcaatacctagccaatagttctgcttaactttttgg

SEQ ID NO: 15130 - DNA, 69 bp, Homo sapiens
gcttcaaattttatggaaaattaagcaagcaatacctagccaatagttctgcttaactttttggttaag

SEQ ID NO: 15131 - DNA, 68 bp, Homo sapiens
ggaaaattaagcaagcaatacctagccaatagttctgcttaactttttggttaagtattttgttggga

SEQ ID NO: 15132 - DNA, 69 bp, Homo sapiens
aagcaagcaatacctagccaatagttctgcttaactttttggttaagtattttgttgggattcctataa

SEQ ID NO: 15133 - DNA, 65 bp, Homo sapiens
tgcttaactttttggttaagtattttgttgggattcctataaataatttttcacacaaagtttta

SEQ ID NO: 15134 - DNA, 66 bp, Homo sapiens
tggttaagtattttgttgggattcctataaataatttttcacacaaagttttaaatttctggtgta

SEQ ID NO: 15135 - DNA, 70 bp, Homo sapiens
tgttgggattcctataaataatttttcacacaaagttttaaatttctggtgtactttgactctcaactga

SEQ ID NO: 15136 - DNA, 71 bp, Homo sapiens
cctataaataatttttcacacaaagttttaaatttctggtgtactttgactctcaactgagagtggataga

SEQ ID NO: 15137 - DNA, 69 bp, Homo sapiens
atttttcacacaaagttttaaatttctggtgtactttgactctcaactgagagtggatagagtttttct

SEQ ID NO: 15138 - DNA, 71 bp, Homo sapiens
cacacaaagttttaaatttctggtgtactttgactctcaactgagagtggatagagtttttcttttgagga

SEQ ID NO: 15139 - DNA, 72 bp, Homo sapiens
aatttctggtgtactttgactctcaactgagagtggatagagtttttcttttgaggattacatcttaaaatg

SEQ ID NO: 15140 - DNA, 75 bp, Homo sapiens
gtgtactttgactctcaactgagagtggatagagtttttcttttgaggattacatcttaaaatgtccatcgcctg

SEQ ID NO: 15141 - DNA, 75 bp, Homo sapiens
ctctcaactgagagtggatagagtttttcttttgaggattacatcttaaaatgtccatcgcctggctggttataa

SEQ ID NO: 15142 - DNA, 75 bp, Homo sapiens
agagtggatagagtttttcttttgaggattacatcttaaaatgtccatcgcctggctggttataagcatttgtca

SEQ ID NO: 15143 - DNA, 73 bp, Homo sapiens
attacatcttaaaatgtccatcgcctggctggttataagcatttgtcaccttttgaaggtaaaatatactctg

SEQ ID NO: 15144 - DNA, 72 bp, Homo sapiens
taaaatgtccatcgcctggctggttataagcatttgtcaccttttgaaggtaaaatatactctggcccttct

SEQ ID NO: 15145 - DNA, 73 bp, Homo sapiens
atcgcctggctggttataagcatttgtcaccttttgaaggtaaaatatactctggcccttcttgactcagtta

SEQ ID NO: 15146 - DNA, 72 bp, Homo sapiens
ttataagcatttgtcaccttttgaaggtaaaatatactctggcccttcttgactcagttacaggtcatttta

SEQ ID NO: 15147 - DNA, 70 bp, Homo sapiens
atttgtcaccttttgaaggtaaaatatactctggcccttcttgactcagttacaggtcattttaggtcca

SEQ ID NO: 15148 - DNA, 72 bp, Homo sapiens
tttgaaggtaaaatatactctggcccttcttgactcagttacaggtcattttaggtccagtaataagagtca

SEQ ID NO: 15149 - DNA, 71 bp, Homo sapiens
aaaatatactctggcccttcttgactcagttacaggtcattttaggtccagtaataagagtcaggtgtttg

SEQ ID NO: 15150 - DNA, 72 bp, Homo sapiens
cccttcttgactcagttacaggtcattttaggtccagtaataagagtcaggtgtttggttattgctttcaga

SEQ ID NO: 15151 - DNA, 75 bp, Homo sapiens
ttgactcagttacaggtcattttaggtccagtaataagagtcaggtgtttggttattgctttcagagtcagacat

SEQ ID NO: 15152 - DNA, 70 bp, Homo sapiens
ttttaggtccagtaataagagtcaggtgtttggttattgctttcagagtcagacattgtttaggtttatt

SEQ ID NO: 15153 - DNA, 69 bp, Homo sapiens
agtaataagagtcaggtgtttggttattgctttcagagtcagacattgtttaggtttatttaaaaacta

SEQ ID NO: 15154 - DNA, 73 bp, Homo sapiens
tggttattgctttcagagtcagacattgtttaggtttatttaaaaactattagcaggttttcactgacaatgc

SEQ ID NO: 15155 - DNA, 66 bp, Homo sapiens
agacattgtttaggtttatttaaaaactattagcaggttttcactgacaatgcttttttaaaaata

SEQ ID NO: 15156 - DNA, 71 bp, Homo sapiens
aaaataaaaaatgtaaatccacttttttaaggcagattgttcattatgcatatacagcttgaactatagtt

SEQ ID NO: 15157 - DNA, 76 bp, Homo sapiens
atgtaaatccacttttttaaggcagattgttcattatgcatatacagcttgaactatagtttgggtccatatagga

SEQ ID NO: 15158 - DNA, 75 bp, Homo sapiens
acttttttaaggcagattgttcattatgcatatacagcttgaactatagtttgggtccatataggaaccaatcac

SEQ ID NO: 15159 - DNA, 75 bp, Homo sapiens
attgttcattatgcatatacagcttgaactatagtttgggtccatataggaaccaatcaccaaaaactctggtaa

SEQ ID NO: 15160 - DNA, 75 bp, Homo sapiens
ttatgcatatacagcttgaactatagtttgggtccatataggaaccaatcaccaaaaactctggtaacagaatta

SEQ ID NO: 15161 - DNA, 72 bp, Homo sapiens
atatacagcttgaactatagtttgggtccatataggaaccaatcaccaaaaactctggtaacagaattagga

SEQ ID NO: 15162 - DNA, 72 bp, Homo sapiens
tatacagcttgaactatagtttgggtccatataggaaccaatcaccaaaaactctggtaacagaattaggaa

SEQ ID NO: 15163 - DNA, 70 bp, Homo sapiens
agcttgaactatagtttgggtccatataggaaccaatcaccaaaaactctggtaacagaattaggaaatc

SEQ ID NO: 15164 - DNA, 68 bp, Homo sapiens
aactatagtttgggtccatataggaaccaatcaccaaaaactctggtaacagaattaggaaatcctct

SEQ ID NO: 15165 - DNA, 71 bp, Homo sapiens
atataggaaccaatcaccaaaaactctggtaacagaattaggaaatcctcttgagaagagggccttaatga

SEQ ID NO: 15166 - DNA, 68 bp, Homo sapiens
aaccaatcaccaaaaactctggtaacagaattaggaaatcctcttgagaagagggccttaatgacctt

SEQ ID NO: 15167 - DNA, 69 bp, Homo sapiens
caaaaactctggtaacagaattaggaaatcctcttgagaagagggccttaatgaccttttatgtgaaaa

SEQ ID NO: 15168 - DNA, 68 bp, Homo sapiens
actctggtaacagaattaggaaatcctcttgagaagagggccttaatgaccttttatgtgaaaaaaat

SEQ ID NO: 15169 - DNA, 69 bp, Homo sapiens
cagaattaggaaatcctcttgagaagagggccttaatgaccttttatgtgaaaaaaattttggagagaa

SEQ ID NO: 15170 - DNA, 69 bp, Homo sapiens
aatcctcttgagaagagggccttaatgaccttttatgtgaaaaaaattttggagagaatttctggacat

SEQ ID NO: 15171 - DNA, 66 bp, Homo sapiens
gagaagagggccttaatgaccttttatgtgaaaaaaattttggagagaatttctggacattttttt

SEQ ID NO: 15172 - DNA, 70 bp, Homo sapiens
ttttggagagaatttctggacatttttttttctgtctctctcacagggtttggttttcagataggagtta

SEQ ID NO: 15173 - DNA, 70 bp, Homo sapiens
aatttctggacatttttttttctgtctctctcacagggtttggttttcagataggagttaggtatgagaa

SEQ ID NO: 15174 - DNA, 71 bp, Homo sapiens
ttttttttctgtctctctcacagggtttggttttcagataggagttaggtatgagaacaagaagagagaaa

SEQ ID NO: 15175 - DNA, 73 bp, Homo sapiens
tttctgtctctctcacagggtttggttttcagataggagttaggtatgagaacaagaagagagaaaacttggc

SEQ ID NO: 15176 - DNA, 71 bp, Homo sapiens
cagggtttggttttcagataggagttaggtatgagaacaagaagagagaaaacttggcgctgaccctgtta

SEQ ID NO: 15177 - DNA, 73 bp, Homo sapiens
gttttcagataggagttaggtatgagaacaagaagagagaaaacttggcgctgaccctgttatagtggttata

SEQ ID NO: 15178 - DNA, 73 bp, Homo sapiens
agataggagttaggtatgagaacaagaagagagaaaacttggcgctgaccctgttatagtggttatagtggtg

SEQ ID NO: 15179 - DNA, 72 bp, Homo sapiens
taggtatgagaacaagaagagagaaaacttggcgctgaccctgttatagtggttatagtggtgtccctaaag

SEQ ID NO: 15180 - DNA, 66 bp, Homo sapiens
atattgtaaacatttgtactgaataacctttttttccccccctccgcaagcaaaactggttgaaca

SEQ ID NO: 15181 - DNA, 68 bp, Homo sapiens
ataacctttttttccccccctccgcaagcaaaactggttgaacagcggatgaagatatggaattcaaa

SEQ ID NO: 15182 - DNA, 72 bp, Homo sapiens
tttttccccccctccgcaagcaaaactggttgaacagcggatgaagatatggaattcaaagctctaatggac

SEQ ID NO: 15183 - DNA, 75 bp, Homo sapiens
acagcggatgaagatatggaattcaaagctctaatggacctttttgaagagaagttgtggcttatgtggagttta

SEQ ID NO: 15184 - DNA, 75 bp, Homo sapiens
atgaagatatggaattcaaagctctaatggacctttttgaagagaagttgtggcttatgtggagtttacatgggc

SEQ ID NO: 15185 - DNA, 74 bp, Homo sapiens
aattcaaagctctaatggacctttttgaagagaagttgtggcttatgtggagtttacatgggcctctgatggaa

SEQ ID NO: 15186 - DNA, 75 bp, Homo sapiens
taatggacctttttgaagagaagttgtggcttatgtggagtttacatgggcctctgatggaagaaagctaatctg

SEQ ID NO: 15187 - DNA, 74 bp, Homo sapiens
ttttgaagagaagttgtggcttatgtggagtttacatgggcctctgatggaagaaagctaatctgtttagtatt

SEQ ID NO: 15188 - DNA, 76 bp, Homo sapiens
aagagaagttgtggcttatgtggagtttacatgggcctctgatggaagaaagctaatctgtttagtatttgtgcat

SEQ ID NO: 15189 - DNA, 74 bp, Homo sapiens
cttatgtggagtttacatgggcctctgatggaagaaagctaatctgtttagtatttgtgcattttactaaaatg

SEQ ID NO: 15190 - DNA, 74 bp, Homo sapiens
agtttacatgggcctctgatggaagaaagctaatctgtttagtatttgtgcattttactaaaatggcagcttaa

SEQ ID NO: 15191 - DNA, 76 bp, Homo sapiens
cctctgatggaagaaagctaatctgtttagtatttgtgcattttactaaaatggcagcttaaagttgtgtatctgc

SEQ ID NO: 15192 - DNA, 79 bp, Homo sapiens
agctaatctgtttagtatttgtgcattttactaaaatggcagcttaaagttgtgtatctgctattgtgatgccaatgcc

SEQ ID NO: 15193 - DNA, 77 bp, Homo sapiens
tatttgtgcattttactaaaatggcagcttaaagttgtgtatctgctattgtgatgccaatgccggtgttttaagtg

SEQ ID NO: 15194 - DNA, 73 bp, Homo sapiens
attttactaaaatggcagcttaaagttgtgtatctgctattgtgatgccaatgccggtgttttaagtggaaaa

SEQ ID NO: 15195 - DNA, 74 bp, Homo sapiens
ctaaaatggcagcttaaagttgtgtatctgctattgtgatgccaatgccggtgttttaagtggaaaaaaaatga

SEQ ID NO: 15196 - DNA, 72 bp, Homo sapiens
ttaaagttgtgtatctgctattgtgatgccaatgccggtgttttaagtggaaaaaaaatgacctctttgatt

SEQ ID NO: 15197 - DNA, 77 bp, Homo sapiens
tatctgctattgtgatgccaatgccggtgttttaagtggaaaaaaaatgacctctttgatttgtgctgtgtacacaa

SEQ ID NO: 15198 - DNA, 74 bp, Homo sapiens
tattgtgatgccaatgccggtgttttaagtggaaaaaaaatgacctctttgatttgtgctgtgtacacaagatt

SEQ ID NO: 15199 - DNA, 70 bp, Homo sapiens
aatgccggtgttttaagtggaaaaaaaatgacctctttgatttgtgctgtgtacacaagatttctggaaa

SEQ ID NO: 15200 - DNA, 69 bp, Homo sapiens
gttttaagtggaaaaaaaatgacctctttgatttgtgctgtgtacacaagatttctggaaaagtaaaga

SEQ ID NO: 15201 - DNA, 66 bp, Homo sapiens
aaaaaatgacctctttgatttgtgctgtgtacacaagatttctggaaaagtaaagaaaaacccttt

SEQ ID NO: 15202 - DNA, 70 bp, Homo sapiens
acctctttgatttgtgctgtgtacacaagatttctggaaaagtaaagaaaaaccctttttatggctcaca

SEQ ID NO: 15203 - DNA, 71 bp, Homo sapiens
atttgtgctgtgtacacaagatttctggaaaagtaaagaaaaaccctttttatggctcacacagcttaaga

SEQ ID NO: 15204 - DNA, 73 bp, Homo sapiens
tacacaagatttctggaaaagtaaagaaaaaccctttttatggctcacacagcttaagagtagctgtctctca

SEQ ID NO: 15205 - DNA, 70 bp, Homo sapiens
agatttctggaaaagtaaagaaaaaccctttttatggctcacacagcttaagagtagctgtctctcaaac

SEQ ID NO: 15206 - DNA, 76 bp, Homo sapiens
aaaaccctttttatggctcacacagcttaagagtagctgtctctcaaacgtgcgctcacagttgagctgcttttgt

SEQ ID NO: 15207 - DNA, 80 bp, Homo sapiens
tttatggctcacacagcttaagagtagctgtctctcaaacgtgcgctcacagttgagctgcttttgttttattctaaata

SEQ ID NO: 15208 - DNA, 75 bp, Homo sapiens
acagcttaagagtagctgtctctcaaacgtgcgctcacagttgagctgcttttgttttattctaaataaattgtt

SEQ ID NO: 15209 - DNA, 75 bp, Homo sapiens
agagtagctgtctctcaaacgtgcgctcacagttgagctgcttttgttttattctaaataaattgtttcttttga

SEQ ID NO: 15210 - DNA, 72 bp, Homo sapiens
ctctcaaacgtgcgctcacagttgagctgcttttgttttattctaaataaattgtttcttttgaggaaaatg

SEQ ID NO: 15211 - DNA, 72 bp, Homo sapiens
gtgcgctcacagttgagctgcttttgttttattctaaataaattgtttcttttgaggaaaatgtttttctgc

SEQ ID NO: 15212 - DNA, 68 bp, Homo sapiens
gttgagctgcttttgttttattctaaataaattgtttcttttgaggaaaatgtttttctgcctggaag

SEQ ID NO: 15213 - DNA, 68 bp, Homo sapiens
gttttattctaaataaattgtttcttttgaggaaaatgtttttctgcctggaagtgaattgacggcaa

SEQ ID NO: 15214 - DNA, 79 bp, Homo sapiens
tgtgctcaagtgacccttccacatcagcctctgtagatgagactacaggtacacaccatcaagcctggttaaatttttg

SEQ ID NO: 15215 - DNA, 74 bp, Homo sapiens
tgacccttccacatcagcctctgtagatgagactacaggtacacaccatcaagcctggttaaatttttgggttt

SEQ ID NO: 15216 - DNA, 68 bp, Homo sapiens
cggcgacctattggctcctgctggaggcgggactcccggttgctaggcggtaccttttccggaagtgt

SEQ ID NO: 15217 - DNA, 67 bp, Homo sapiens
acctattggctcctgctggaggcgggactcccggttgctaggcggtaccttttccggaagtgtttgt

SEQ ID NO: 15218 - DNA, 71 bp, Homo sapiens
ctggaggcgggactcccggttgctaggcggtaccttttccggaagtgtttgttgcgcgctgcagggcaaca

SEQ ID NO: 15219 - DNA, 69 bp, Homo sapiens
ggcgggactcccggttgctaggcggtaccttttccggaagtgtttgttgcgcgctgcagggcaacaccc

SEQ ID NO: 15220 - DNA, 70 bp, Homo sapiens
gttgctaggcggtaccttttccggaagtgtttgttgcgcgctgcagggcaacaccccggcgtccctggaa

SEQ ID NO: 15221 - DNA, 69 bp, Homo sapiens
ggcggtaccttttccggaagtgtttgttgcgcgctgcagggcaacaccccggcgtccctggaagctggg

SEQ ID NO: 15222 - DNA, 70 bp, Homo sapiens
tttccggaagtgtttgttgcgcgctgcagggcaacaccccggcgtccctggaagctgggggagcgggtgg

SEQ ID NO: 15223 - DNA, 72 bp, Homo sapiens
tgtttgttgcgcgctgcagggcaacaccccggcgtccctggaagctgggggagcgggtgggtgttgggtggc

SEQ ID NO: 15224 - DNA, 68 bp, Homo sapiens
cgctgcagggcaacaccccggcgtccctggaagctgggggagcgggtgggtgttgggtggcgttgggg

SEQ ID NO: 15225 - DNA, 67 bp, Homo sapiens
aacaccccggcgtccctggaagctgggggagcgggtgggtgttgggtggcgttgggggagctgcgcc

SEQ ID NO: 15226 - DNA, 71 bp, Homo sapiens
cgtccctggaagctgggggagcgggtgggtgttgggtggcgttgggggagctgcgcctcgcccagagcctc

SEQ ID NO: 15227 - DNA, 71 bp, Homo sapiens
aagctgggggagcgggtgggtgttgggtggcgttgggggagctgcgcctcgcccagagcctcgcccggagc

SEQ ID NO: 15228 - DNA, 78 bp, Homo sapiens
ggagcgagcgtggcgggggacccgaggcacgctctcgagccaacgagcgtgatgcgctcgagtgtgggcggggactga

SEQ ID NO: 15229 - DNA, 76 bp, Homo sapiens
tggcgggggacccgaggcacgctctcgagccaacgagcgtgatgcgctcgagtgtgggcggggactgagggaagaa

SEQ ID NO: 15230 - DNA, 76 bp, Homo sapiens
acccgaggcacgctctcgagccaacgagcgtgatgcgctcgagtgtgggcggggactgagggaagaagtgaaaatc

SEQ ID NO: 15231 - DNA, 79 bp, Homo sapiens
tctcgagccaacgagcgtgatgcgctcgagtgtgggcggggactgagggaagaagtgaaaatcggactgccaggcgaca

SEQ ID NO: 15232 - DNA, 75 bp, Homo sapiens
aacgagcgtgatgcgctcgagtgtgggcggggactgagggaagaagtgaaaatcggactgccaggcgacagttcc

SEQ ID NO: 15233 - DNA, 76 bp, Homo sapiens
tgatgcgctcgagtgtgggcggggactgagggaagaagtgaaaatcggactgccaggcgacagttcctccgtttga

SEQ ID NO: 15234 - DNA, 71 bp, Homo sapiens
agtgtgggcggggactgagggaagaagtgaaaatcggactgccaggcgacagttcctccgtttgaaatctc

SEQ ID NO: 15235 - DNA, 73 bp, Homo sapiens
actgagggaagaagtgaaaatcggactgccaggcgacagttcctccgtttgaaatctcgccggctcctgagcg

SEQ ID NO: 15236 - DNA, 72 bp, Homo sapiens
aagaagtgaaaatcggactgccaggcgacagttcctccgtttgaaatctcgccggctcctgagcgggccacc

SEQ ID NO: 15237 - DNA, 70 bp, Homo sapiens
aaaatcggactgccaggcgacagttcctccgtttgaaatctcgccggctcctgagcgggccaccgggccc

SEQ ID NO: 15238 - DNA, 68 bp, Homo sapiens
aggcgacagttcctccgtttgaaatctcgccggctcctgagcgggccaccgggcccgggctgggggtc

SEQ ID NO: 15239 - DNA, 69 bp, Homo sapiens
ttcctccgtttgaaatctcgccggctcctgagcgggccaccgggcccgggctgggggtctggcgggtga

SEQ ID NO: 15240 - DNA, 72 bp, Homo sapiens
gtttgaaatctcgccggctcctgagcgggccaccgggcccgggctgggggtctggcgggtgagtgagcagcg

SEQ ID NO: 15241 - DNA, 71 bp, Homo sapiens
tcgccggctcctgagcgggccaccgggcccgggctgggggtctggcgggtgagtgagcagcgggtcgggac

SEQ ID NO: 15242 - DNA, 70 bp, Homo sapiens
ctgagcgggccaccgggcccgggctgggggtctggcgggtgagtgagcagcgggtcgggacgcgggagag

SEQ ID NO: 15243 - DNA, 75 bp, Homo sapiens
gaaataactttatttggactgagagctggagaatgagaataggacctgagagtatattgggctaaggaggagagg

SEQ ID NO: 15244 - DNA, 74 bp, Homo sapiens
aactttatttggactgagagctggagaatgagaataggacctgagagtatattgggctaaggaggagaggtaag

SEQ ID NO: 15245 - DNA, 73 bp, Homo sapiens
actgagagctggagaatgagaataggacctgagagtatattgggctaaggaggagaggtaaggttccaaaacg

SEQ ID NO: 15246 - DNA, 70 bp, Homo sapiens
agaatgagaataggacctgagagtatattgggctaaggaggagaggtaaggttccaaaacggcggtcaaa

SEQ ID NO: 15247 - DNA, 71 bp, Homo sapiens
aataggacctgagagtatattgggctaaggaggagaggtaaggttccaaaacggcggtcaaagctcatcga

SEQ ID NO: 15248 - DNA, 69 bp, Homo sapiens
agagtatattgggctaaggaggagaggtaaggttccaaaacggcggtcaaagctcatcgactaaacgga

SEQ ID NO: 15249 - DNA, 75 bp, Homo sapiens
ttaagcttggtcactgatttttctcttttggtgggggcctctgggatctaggtgtttgagcccagatgagtcatg

SEQ ID NO: 15250 - DNA, 74 bp, Homo sapiens
actgatttttctcttttggtgggggcctctgggatctaggtgtttgagcccagatgagtcatggctggacgacc

SEQ ID NO: 15251 - DNA, 76 bp, Homo sapiens
ttctcttttggtgggggcctctgggatctaggtgtttgagcccagatgagtcatggctggacgacccctccgcata

SEQ ID NO: 15252 - DNA, 81 bp, Homo sapiens
ggcctctgggatctaggtgtttgagcccagatgagtcatggctggacgacccctccgcataggagatcagctggttctgga

SEQ ID NO: 15253 - DNA, 80 bp, Homo sapiens
atctaggtgtttgagcccagatgagtcatggctggacgacccctccgcataggagatcagctggttctggaagaagatta

SEQ ID NO: 15254 - DNA, 83 bp, Homo sapiens
tttgagcccagatgagtcatggctggacgacccctccgcataggagatcagctggttctggaagaagattatgatgagaccta

SEQ ID NO: 15255 - DNA, 82 bp, Homo sapiens
agatgagtcatggctggacgacccctccgcataggagatcagctggttctggaagaagattatgatgagacctacattccta

SEQ ID NO: 15256 - DNA, 81 bp, Homo sapiens
atggctggacgacccctccgcataggagatcagctggttctggaagaagattatgatgagacctacattcctagtgagcaa

SEQ ID NO: 15257 - DNA, 79 bp, Homo sapiens
ccctccgcataggagatcagctggttctggaagaagattatgatgagacctacattcctagtgagcaaggtaacaagtc

SEQ ID NO: 15258 - DNA, 80 bp, Homo sapiens
ataggagatcagctggttctggaagaagattatgatgagacctacattcctagtgagcaaggtaacaagtctgtgaagag

SEQ ID NO: 15259 - DNA, 80 bp, Homo sapiens
atcagctggttctggaagaagattatgatgagacctacattcctagtgagcaaggtaacaagtctgtgaagaggcctgtg

SEQ ID NO: 15260 - DNA, 77 bp, Homo sapiens
aagaagattatgatgagacctacattcctagtgagcaaggtaacaagtctgtgaagaggcctgtggtgtattgtgtt

SEQ ID NO: 15261 - DNA, 71 bp, Homo sapiens
tttttcttcttttcatctctcttactttcccacctctgcctctccttgcagaaattcttgaatttgcccgg

SEQ ID NO: 15262 - DNA, 75 bp, Homo sapiens
tttcatctctcttactttcccacctctgcctctccttgcagaaattcttgaatttgcccgggagattggtattga

SEQ ID NO: 15263 - DNA, 74 bp, Homo sapiens
ttactttcccacctctgcctctccttgcagaaattcttgaatttgcccgggagattggtattgatcccatcaag

SEQ ID NO: 15264 - DNA, 78 bp, Homo sapiens
tctgcctctccttgcagaaattcttgaatttgcccgggagattggtattgatcccatcaaggaaccagaactgatgtg

SEQ ID NO: 15265 - DNA, 79 bp, Homo sapiens
ttgcagaaattcttgaatttgcccgggagattggtattgatcccatcaaggaaccagaactgatgtggctggcgcgaga

SEQ ID NO: 15266 - DNA, 75 bp, Homo sapiens
aaattcttgaatttgcccgggagattggtattgatcccatcaaggaaccagaactgatgtggctggcgcgagagg

SEQ ID NO: 15267 - DNA, 77 bp, Homo sapiens
aatttgcccgggagattggtattgatcccatcaaggaaccagaactgatgtggctggcgcgagagggcatcgtggcc

SEQ ID NO: 15268 - DNA, 80 bp, Homo sapiens
agattggtattgatcccatcaaggaaccagaactgatgtggctggcgcgagagggcatcgtggccccactgcctggagag

SEQ ID NO: 15269 - DNA, 79 bp, Homo sapiens
attgatcccatcaaggaaccagaactgatgtggctggcgcgagagggcatcgtggccccactgcctggagagtggaaac

SEQ ID NO: 15270 - DNA, 76 bp, Homo sapiens
aaggaaccagaactgatgtggctggcgcgagagggcatcgtggccccactgcctggagagtggaaaccatggtaag

SEQ ID NO: 15271 - DNA, 78 bp, Homo sapiens
agaactgatgtggctggcgcgagagggcatcgtggccccactgcctggagagtggaaaccatggtaagtcagcagggg

SEQ ID NO: 15272 - DNA, 78 bp, Homo sapiens
ctggcgcgagagggcatcgtggccccactgcctggagagtggaaaccatggtaagtcagcagggggtgcggccactga

SEQ ID NO: 15273 - DNA, 76 bp, Homo sapiens
agagggcatcgtggccccactgcctggagagtggaaaccatggtaagtcagcagggggtgcggccactgacttggc

SEQ ID NO: 15274 - DNA, 78 bp, Homo sapiens
tcttttgtatctgagcagggactaacttctgaactctgcccatccccagccaggacatcacaggtgacatttactatt

SEQ ID NO: 15275 - DNA, 78 bp, Homo sapiens
atctgagcagggactaacttctgaactctgcccatccccagccaggacatcacaggtgacatttactatttcaacttc

SEQ ID NO: 15276 - DNA, 74 bp, Homo sapiens
actaacttctgaactctgcccatccccagccaggacatcacaggtgacatttactatttcaacttcgccaacgg

SEQ ID NO: 15277 - DNA, 76 bp, Homo sapiens
aactctgcccatccccagccaggacatcacaggtgacatttactatttcaacttcgccaacgggcagtctatgtgg

SEQ ID NO: 15278 - DNA, 77 bp, Homo sapiens
atccccagccaggacatcacaggtgacatttactatttcaacttcgccaacgggcagtctatgtgggaccatccatg

SEQ ID NO: 15279 - DNA, 79 bp, Homo sapiens
gacatcacaggtgacatttactatttcaacttcgccaacgggcagtctatgtgggaccatccatgtgacgaacactatc

SEQ ID NO: 15280 - DNA, 76 bp, Homo sapiens
acaggtgacatttactatttcaacttcgccaacgggcagtctatgtgggaccatccatgtgacgaacactatcgga

SEQ ID NO: 15281 - DNA, 77 bp, Homo sapiens
actatttcaacttcgccaacgggcagtctatgtgggaccatccatgtgacgaacactatcggagcttggtgatccaa

SEQ ID NO: 15282 - DNA, 78 bp, Homo sapiens
aacttcgccaacgggcagtctatgtgggaccatccatgtgacgaacactatcggagcttggtgatccaagagcgggca

SEQ ID NO: 15283 - DNA, 79 bp, Homo sapiens
aacgggcagtctatgtgggaccatccatgtgacgaacactatcggagcttggtgatccaagagcgggcaaagctgtcaa

SEQ ID NO: 15284 - DNA, 80 bp, Homo sapiens
tctatgtgggaccatccatgtgacgaacactatcggagcttggtgatccaagagcgggcaaagctgtcaacttctggggc

SEQ ID NO: 15285 - DNA, 78 bp, Homo sapiens
atccatgtgacgaacactatcggagcttggtgatccaagagcgggcaaagctgtcaacttctggggccattaagaaga

SEQ ID NO: 15286 - DNA, 74 bp, Homo sapiens
acgaacactatcggagcttggtgatccaagagcgggcaaagctgtcaacttctggggccattaagaagaagaaa

SEQ ID NO: 15287 - DNA, 69 bp, Homo sapiens
aaaaggaaaagaaagacaagaaggacagagacccccccaaaagttcgctggtgagtcagtggatgcctc

SEQ ID NO: 15288 - DNA, 71 bp, Homo sapiens
aaaagaaagacaagaaggacagagacccccccaaaagttcgctggtgagtcagtggatgcctcctcccaga

SEQ ID NO: 15289 - DNA, 76 bp, Homo sapiens
atcagaagtgctttgtcttcgttttctctgcatgtttatatacccatctaggaaacgcagcctgaggagggacttc

SEQ ID NO: 15290 - DNA, 74 bp, Homo sapiens
ctttgtcttcgttttctctgcatgtttatatacccatctaggaaacgcagcctgaggagggacttctgcctcct

SEQ ID NO: 15291 - DNA, 76 bp, Homo sapiens
gttttctctgcatgtttatatacccatctaggaaacgcagcctgaggagggacttctgcctccttcatcctttctc

SEQ ID NO: 15292 - DNA, 78 bp, Homo sapiens
atgtttatatacccatctaggaaacgcagcctgaggagggacttctgcctccttcatcctttctctgcagcttgtctc

SEQ ID NO: 15293 - DNA, 80 bp, Homo sapiens
tacccatctaggaaacgcagcctgaggagggacttctgcctccttcatcctttctctgcagcttgtctcctccgtcagca

SEQ ID NO: 15294 - DNA, 79 bp, Homo sapiens
aaacgcagcctgaggagggacttctgcctccttcatcctttctctgcagcttgtctcctccgtcagcacctgggcttgc

SEQ ID NO: 15295 - DNA, 80 bp, Homo sapiens
aggagggacttctgcctccttcatcctttctctgcagcttgtctcctccgtcagcacctgggcttgctgatctggaccta

SEQ ID NO: 15296 - DNA, 83 bp, Homo sapiens
acttctgcctccttcatcctttctctgcagcttgtctcctccgtcagcacctgggcttgctgatctggacctagatcaagaga

SEQ ID NO: 15297 - DNA, 87 bp, Homo sapiens
ttcatcctttctctgcagcttgtctcctccgtcagcacctgggcttgctgatctggacctagatcaagagatgcaggctataagtga

SEQ ID NO: 15298 - DNA, 87 bp, Homo sapiens
tctgcagcttgtctcctccgtcagcacctgggcttgctgatctggacctagatcaagagatgcaggctataagtgagggatcctata

SEQ ID NO: 15299 - DNA, 83 bp, Homo sapiens
ttgtctcctccgtcagcacctgggcttgctgatctggacctagatcaagagatgcaggctataagtgagggatcctataacaa

SEQ ID NO: 15300 - DNA, 81 bp, Homo sapiens
tccgtcagcacctgggcttgctgatctggacctagatcaagagatgcaggctataagtgagggatcctataacaaaggaaa

SEQ ID NO: 15301 - DNA, 79 bp, Homo sapiens
cctgggcttgctgatctggacctagatcaagagatgcaggctataagtgagggatcctataacaaaggaaagagcccag

SEQ ID NO: 15302 - DNA, 81 bp, Homo sapiens
atctggacctagatcaagagatgcaggctataagtgagggatcctataacaaaggaaagagcccaggcatgctgggtgaca

SEQ ID NO: 15303 - DNA, 80 bp, Homo sapiens
ctagatcaagagatgcaggctataagtgagggatcctataacaaaggaaagagcccaggcatgctgggtgacactccctg

SEQ ID NO: 15304 - DNA, 76 bp, Homo sapiens
tataagtgagggatcctataacaaaggaaagagcccaggcatgctgggtgacactccctggcgtttcatgggtgcc

SEQ ID NO: 15305 - DNA, 74 bp, Homo sapiens
atcctataacaaaggaaagagcccaggcatgctgggtgacactccctggcgtttcatgggtgcccttcccagaa

SEQ ID NO: 15306 - DNA, 76 bp, Homo sapiens
aacaaaggaaagagcccaggcatgctgggtgacactccctggcgtttcatgggtgcccttcccagaaagctgcagc

SEQ ID NO: 15307 - DNA, 78 bp, Homo sapiens
ccaggcatgctgggtgacactccctggcgtttcatgggtgcccttcccagaaagctgcagccactctccaaaggccaa

SEQ ID NO: 15308 - DNA, 75 bp, Homo sapiens
atgctgggtgacactccctggcgtttcatgggtgcccttcccagaaagctgcagccactctccaaaggccaacct

SEQ ID NO: 15309 - DNA, 72 bp, Homo sapiens
acactccctggcgtttcatgggtgcccttcccagaaagctgcagccactctccaaaggccaaccttcccaaa

SEQ ID NO: 15310 - DNA, 72 bp, Homo sapiens
tttcatgggtgcccttcccagaaagctgcagccactctccaaaggccaaccttcccaaatccaccaggtctt

SEQ ID NO: 15311 - DNA, 75 bp, Homo sapiens
cccttcccagaaagctgcagccactctccaaaggccaaccttcccaaatccaccaggtctttgctgacatggaga

SEQ ID NO: 15312 - DNA, 75 bp, Homo sapiens
agaaagctgcagccactctccaaaggccaaccttcccaaatccaccaggtctttgctgacatggagaaaatctta

SEQ ID NO: 15313 - DNA, 73 bp, Homo sapiens
agccactctccaaaggccaaccttcccaaatccaccaggtctttgctgacatggagaaaatcttaggcagggc

SEQ ID NO: 15314 - DNA, 71 bp, Homo sapiens
aaggccaaccttcccaaatccaccaggtctttgctgacatggagaaaatcttaggcagggccccagcccaa

SEQ ID NO: 15315 - DNA, 76 bp, Homo sapiens
ttcccaaatccaccaggtctttgctgacatggagaaaatcttaggcagggccccagcccaatgcaggagagaatta

SEQ ID NO: 15316 - DNA, 76 bp, Homo sapiens
aaatccaccaggtctttgctgacatggagaaaatcttaggcagggccccagcccaatgcaggagagaattaggtga

SEQ ID NO: 15317 - DNA, 80 bp, Homo sapiens
tttgctgacatggagaaaatcttaggcagggccccagcccaatgcaggagagaattaggtgatcagcagggtctggagaa

SEQ ID NO: 15318 - DNA, 77 bp, Homo sapiens
atggagaaaatcttaggcagggccccagcccaatgcaggagagaattaggtgatcagcagggtctggagaaactcca

SEQ ID NO: 15319 - DNA, 76 bp, Homo sapiens
aaatcttaggcagggccccagcccaatgcaggagagaattaggtgatcagcagggtctggagaaactccagaaggc

SEQ ID NO: 15320 - DNA, 76 bp, Homo sapiens
cccaatgcaggagagaattaggtgatcagcagggtctggagaaactccagaaggcgacagagaaaatctacctggg

SEQ ID NO: 15321 - DNA, 74 bp, Homo sapiens
agaattaggtgatcagcagggtctggagaaactccagaaggcgacagagaaaatctacctggggttttcagatc

SEQ ID NO: 15322 - DNA, 74 bp, Homo sapiens
tctggagaaactccagaaggcgacagagaaaatctacctggggttttcagatcctgaaacagaagagctggaaa

SEQ ID NO: 15323 - DNA, 73 bp, Homo sapiens
aaactccagaaggcgacagagaaaatctacctggggttttcagatcctgaaacagaagagctggaaatgagaa

SEQ ID NO: 15324 - DNA, 77 bp, Homo sapiens
aaggcgacagagaaaatctacctggggttttcagatcctgaaacagaagagctggaaatgagaagcaggcagcagaa

SEQ ID NO: 15325 - DNA, 76 bp, Homo sapiens
agaaaatctacctggggttttcagatcctgaaacagaagagctggaaatgagaagcaggcagcagaaactgggcac

SEQ ID NO: 15326 - DNA, 79 bp, Homo sapiens
gggttttcagatcctgaaacagaagagctggaaatgagaagcaggcagcagaaactgggcactccagcccctcagaaca

SEQ ID NO: 15327 - DNA, 80 bp, Homo sapiens
atcctgaaacagaagagctggaaatgagaagcaggcagcagaaactgggcactccagcccctcagaacactgggcttctc

SEQ ID NO: 15328 - DNA, 79 bp, Homo sapiens
acagaagagctggaaatgagaagcaggcagcagaaactgggcactccagcccctcagaacactgggcttctccaaaata

SEQ ID NO: 15329 - DNA, 81 bp, Homo sapiens
gaaatgagaagcaggcagcagaaactgggcactccagcccctcagaacactgggcttctccaaaatatgcaggatgtggta

SEQ ID NO: 15330 - DNA, 79 bp, Homo sapiens
agaagcaggcagcagaaactgggcactccagcccctcagaacactgggcttctccaaaatatgcaggatgtggtagaaa

SEQ ID NO: 15331 - DNA, 77 bp, Homo sapiens
ctcagaacactgggcttctccaaaatatgcaggatgtggtagaaagcaggaaccaggcctctgtccactcaaagctt

SEQ ID NO: 15332 - DNA, 77 bp, Homo sapiens
aacactgggcttctccaaaatatgcaggatgtggtagaaagcaggaaccaggcctctgtccactcaaagctttctga

SEQ ID NO: 15333 - DNA, 78 bp, Homo sapiens
ttctccaaaatatgcaggatgtggtagaaagcaggaaccaggcctctgtccactcaaagctttctgaagccatcaaag

SEQ ID NO: 15334 - DNA, 77 bp, Homo sapiens
aggatgtggtagaaagcaggaaccaggcctctgtccactcaaagctttctgaagccatcaaaggcctgccactgaaa

SEQ ID NO: 15335 - DNA, 75 bp, Homo sapiens
gtggtagaaagcaggaaccaggcctctgtccactcaaagctttctgaagccatcaaaggcctgccactgaaaggg

SEQ ID NO: 15336 - DNA, 79 bp, Homo sapiens
aggaaccaggcctctgtccactcaaagctttctgaagccatcaaaggcctgccactgaaaggggagcagcacagccaca

SEQ ID NO: 15337 - DNA, 82 bp, Homo sapiens
tctgtccactcaaagctttctgaagccatcaaaggcctgccactgaaaggggagcagcacagccacagcttagccaaactga

SEQ ID NO: 15338 - DNA, 79 bp, Homo sapiens
actcaaagctttctgaagccatcaaaggcctgccactgaaaggggagcagcacagccacagcttagccaaactgagccc

SEQ ID NO: 15339 - DNA, 79 bp, Homo sapiens
tttctgaagccatcaaaggcctgccactgaaaggggagcagcacagccacagcttagccaaactgagccccactggccc

SEQ ID NO: 15340 - DNA, 77 bp, Homo sapiens
atcaaaggcctgccactgaaaggggagcagcacagccacagcttagccaaactgagccccactggccctggagggga

SEQ ID NO: 15341 - DNA, 74 bp, Homo sapiens
acagccacagcttagccaaactgagccccactggccctggaggggacaagggccaaagccccattcccatgtca

SEQ ID NO: 15342 - DNA, 72 bp, Homo sapiens
cttagccaaactgagccccactggccctggaggggacaagggccaaagccccattcccatgtcatcccctga

SEQ ID NO: 15343 - DNA, 72 bp, Homo sapiens
aactgagccccactggccctggaggggacaagggccaaagccccattcccatgtcatcccctgaggaggagc

SEQ ID NO: 15344 - DNA, 73 bp, Homo sapiens
ccagagccacctggtttcttgagttgtaacaagatgttttctgttgcacaggccttgggttcctcattagccc

SEQ ID NO: 15345 - DNA, 74 bp, Homo sapiens
ttcttgagttgtaacaagatgttttctgttgcacaggccttgggttcctcattagccccagttcatgttcctct

SEQ ID NO: 15346 - DNA, 72 bp, Homo sapiens
agttgtaacaagatgttttctgttgcacaggccttgggttcctcattagccccagttcatgttcctcttggg

SEQ ID NO: 15347 - DNA, 72 bp, Homo sapiens
atgttttctgttgcacaggccttgggttcctcattagccccagttcatgttcctcttgggggcctggctcct

SEQ ID NO: 15348 - DNA, 72 bp, Homo sapiens
tgcacaggccttgggttcctcattagccccagttcatgttcctcttgggggcctggctcctttacgaggtct

SEQ ID NO: 15349 - DNA, 71 bp, Homo sapiens
ttgggttcctcattagccccagttcatgttcctcttgggggcctggctcctttacgaggtcttgtggatac

SEQ ID NO: 15350 - DNA, 69 bp, Homo sapiens
attagccccagttcatgttcctcttgggggcctggctcctttacgaggtcttgtggataccccaccctc

SEQ ID NO: 15351 - DNA, 71 bp, Homo sapiens
agttcatgttcctcttgggggcctggctcctttacgaggtcttgtggataccccaccctctgctcttcgtg

SEQ ID NO: 15352 - DNA, 72 bp, Homo sapiens
ttcctcttgggggcctggctcctttacgaggtcttgtggataccccaccctctgctcttcgtggatctcaaa

SEQ ID NO: 15353 - DNA, 74 bp, Homo sapiens
ggcctggctcctttacgaggtcttgtggataccccaccctctgctcttcgtggatctcaaagcgtgagcctggg

SEQ ID NO: 15354 - DNA, 75 bp, Homo sapiens
ctcctttacgaggtcttgtggataccccaccctctgctcttcgtggatctcaaagcgtgagcctggggagctcag

SEQ ID NO: 15355 - DNA, 77 bp, Homo sapiens
aggtcttgtggataccccaccctctgctcttcgtggatctcaaagcgtgagcctggggagctcagtggagtctggac

SEQ ID NO: 15356 - DNA, 80 bp, Homo sapiens
cccaccctctgctcttcgtggatctcaaagcgtgagcctggggagctcagtggagtctggacgtcagcttggagaactca

SEQ ID NO: 15357 - DNA, 83 bp, Homo sapiens
tgctcttcgtggatctcaaagcgtgagcctggggagctcagtggagtctggacgtcagcttggagaactcatgctggtaagta

SEQ ID NO: 15358 - DNA, 80 bp, Homo sapiens
gatctcaaagcgtgagcctggggagctcagtggagtctggacgtcagcttggagaactcatgctggtaagtacgttctct

SEQ ID NO: 15359 - DNA, 80 bp, Homo sapiens
agcgtgagcctggggagctcagtggagtctggacgtcagcttggagaactcatgctggtaagtacgttctcttgcgttca

SEQ ID NO: 15360 - DNA, 79 bp, Homo sapiens
gggagctcagtggagtctggacgtcagcttggagaactcatgctggtaagtacgttctcttgcgttcagtgtctgtagt

SEQ ID NO: 15361 - DNA, 72 bp, Homo sapiens
ttccaaaggtcttccaagtgagtcctttgactgtccttctctattttgaagccttcacagggtctcaagacc

SEQ ID NO: 15362 - DNA, 75 bp, Homo sapiens
ttccaagtgagtcctttgactgtccttctctattttgaagccttcacagggtctcaagacctctgcttatacaaa

SEQ ID NO: 15363 - DNA, 74 bp, Homo sapiens
tcctttgactgtccttctctattttgaagccttcacagggtctcaagacctctgcttatacaaagggtctcttg

SEQ ID NO: 15364 - DNA, 76 bp, Homo sapiens
cttctctattttgaagccttcacagggtctcaagacctctgcttatacaaagggtctcttgggctccatatatgag

SEQ ID NO: 15365 - DNA, 77 bp, Homo sapiens
tattttgaagccttcacagggtctcaagacctctgcttatacaaagggtctcttgggctccatatatgaggacaaga

SEQ ID NO: 15366 - DNA, 80 bp, Homo sapiens
ttcacagggtctcaagacctctgcttatacaaagggtctcttgggctccatatatgaggacaagactgctctcagcctct

SEQ ID NO: 15367 - DNA, 79 bp, Homo sapiens
tctcaagacctctgcttatacaaagggtctcttgggctccatatatgaggacaagactgctctcagcctcttgggttta

SEQ ID NO: 15368 - DNA, 77 bp, Homo sapiens
tgcttatacaaagggtctcttgggctccatatatgaggacaagactgctctcagcctcttgggtttaggagaagaaa

SEQ ID NO: 15369 - DNA, 75 bp, Homo sapiens
tacaaagggtctcttgggctccatatatgaggacaagactgctctcagcctcttgggtttaggagaagaaaccaa

SEQ ID NO: 15370 - DNA, 78 bp, Homo sapiens
ctcttgggctccatatatgaggacaagactgctctcagcctcttgggtttaggagaagaaaccaatgaggaggatgag

SEQ ID NO: 15371 - DNA, 77 bp, Homo sapiens
atatatgaggacaagactgctctcagcctcttgggtttaggagaagaaaccaatgaggaggatgaggaggaaagtga

SEQ ID NO: 15372 - DNA, 74 bp, Homo sapiens
agactgctctcagcctcttgggtttaggagaagaaaccaatgaggaggatgaggaggaaagtgacaaccaggta

SEQ ID NO: 15373 - DNA, 74 bp, Homo sapiens
tcagcctcttgggtttaggagaagaaaccaatgaggaggatgaggaggaaagtgacaaccaggtaatgatgaag

SEQ ID NO: 15374 - DNA, 73 bp, Homo sapiens
tcttgggtttaggagaagaaaccaatgaggaggatgaggaggaaagtgacaaccaggtaatgatgaagtcctc

SEQ ID NO: 15375 - DNA, 73 bp, Homo sapiens
aagaaaccaatgaggaggatgaggaggaaagtgacaaccaggtaatgatgaagtcctctccctggcctggaaa

SEQ ID NO: 15376 - DNA, 75 bp, Homo sapiens
tcaccctgggttgaccagtttcttcagagttaccacttgtcatcatttttgtttctagagtgtccacagctcaag

SEQ ID NO: 15377 - DNA, 77 bp, Homo sapiens
ttgaccagtttcttcagagttaccacttgtcatcatttttgtttctagagtgtccacagctcaagtgagcctcttag

SEQ ID NO: 15378 - DNA, 76 bp, Homo sapiens
tttcttcagagttaccacttgtcatcatttttgtttctagagtgtccacagctcaagtgagcctcttaggaaccta

SEQ ID NO: 15379 - DNA, 76 bp, Homo sapiens
ttaccacttgtcatcatttttgtttctagagtgtccacagctcaagtgagcctcttaggaacctacacctggacat

SEQ ID NO: 15380 - DNA, 75 bp, Homo sapiens
atcatttttgtttctagagtgtccacagctcaagtgagcctcttaggaacctacacctggacattggggcactgg

SEQ ID NO: 15381 - DNA, 73 bp, Homo sapiens
ttttgtttctagagtgtccacagctcaagtgagcctcttaggaacctacacctggacattggggcactggggg

SEQ ID NO: 15382 - DNA, 74 bp, Homo sapiens
agtgtccacagctcaagtgagcctcttaggaacctacacctggacattggggcactggggggtgactttgagta

SEQ ID NO: 15383 - DNA, 73 bp, Homo sapiens
caagtgagcctcttaggaacctacacctggacattggggcactggggggtgactttgagtatgaggtaagagc

SEQ ID NO: 15384 - DNA, 71 bp, Homo sapiens
ctcttaggaacctacacctggacattggggcactggggggtgactttgagtatgaggtaagagccctaatc

SEQ ID NO: 15385 - DNA, 70 bp, Homo sapiens
aacctacacctggacattggggcactggggggtgactttgagtatgaggtaagagccctaatccctacag

SEQ ID NO: 15386 - DNA, 77 bp, Homo sapiens
tggacattggggcactggggggtgactttgagtatgaggtaagagccctaatccctacaggcacatgtgtcagcctg

SEQ ID NO: 15387 - DNA, 76 bp, Homo sapiens
tccttttgtcttcctttctaacatggtctgttgctccctaggagtctctgagaacaagccagccagaggagaagaa

SEQ ID NO: 15388 - DNA, 78 bp, Homo sapiens
tttctaacatggtctgttgctccctaggagtctctgagaacaagccagccagaggagaagaaggatgtttctctggat

SEQ ID NO: 15389 - DNA, 83 bp, Homo sapiens
acatggtctgttgctccctaggagtctctgagaacaagccagccagaggagaagaaggatgtttctctggattcagatgctgc

SEQ ID NO: 15390 - DNA, 80 bp, Homo sapiens
ttgctccctaggagtctctgagaacaagccagccagaggagaagaaggatgtttctctggattcagatgctgccggtccc

SEQ ID NO: 15391 - DNA, 80 bp, Homo sapiens
tctctgagaacaagccagccagaggagaagaaggatgtttctctggattcagatgctgccggtccccctactccctgcaa

SEQ ID NO: 15392 - DNA, 77 bp, Homo sapiens
agaacaagccagccagaggagaagaaggatgtttctctggattcagatgctgccggtccccctactccctgcaagcc

SEQ ID NO: 15393 - DNA, 75 bp, Homo sapiens
agaggagaagaaggatgtttctctggattcagatgctgccggtccccctactccctgcaagccctccagcccagg

SEQ ID NO: 15394 - DNA, 79 bp, Homo sapiens
aagaaggatgtttctctggattcagatgctgccggtccccctactccctgcaagccctccagcccaggtgcagacagca

SEQ ID NO: 15395 - DNA, 84 bp, Homo sapiens
ttctctggattcagatgctgccggtccccctactccctgcaagccctccagcccaggtgcagacagcagtctgagcagtgctgt

SEQ ID NO: 15396 - DNA, 83 bp, Homo sapiens
attcagatgctgccggtccccctactccctgcaagccctccagcccaggtgcagacagcagtctgagcagtgctgttggcaaa

SEQ ID NO: 15397 - DNA, 80 bp, Homo sapiens
gtccccctactccctgcaagccctccagcccaggtgcagacagcagtctgagcagtgctgttggcaaagggcgacaggga

SEQ ID NO: 15398 - DNA, 83 bp, Homo sapiens
tactccctgcaagccctccagcccaggtgcagacagcagtctgagcagtgctgttggcaaagggcgacagggaagtggagcaa

SEQ ID NO: 15399 - DNA, 80 bp, Homo sapiens
aagccctccagcccaggtgcagacagcagtctgagcagtgctgttggcaaagggcgacagggaagtggagcaagacctgg

SEQ ID NO: 15400 - DNA, 80 bp, Homo sapiens
caggtgcagacagcagtctgagcagtgctgttggcaaagggcgacagggaagtggagcaagacctggtcttccagaaaaa

SEQ ID NO: 15401 - DNA, 77 bp, Homo sapiens
acagcagtctgagcagtgctgttggcaaagggcgacagggaagtggagcaagacctggtcttccagaaaaagaggaa

SEQ ID NO: 15402 - DNA, 74 bp, Homo sapiens
agcagtgctgttggcaaagggcgacagggaagtggagcaagacctggtcttccagaaaaagaggaaaatgagaa

SEQ ID NO: 15403 - DNA, 73 bp, Homo sapiens
tgttggcaaagggcgacagggaagtggagcaagacctggtcttccagaaaaagaggaaaatgagaagagtgaa

SEQ ID NO: 15404 - DNA, 74 bp, Homo sapiens
gcgacagggaagtggagcaagacctggtcttccagaaaaagaggaaaatgagaagagtgaacctaagatttgca

SEQ ID NO: 15405 - DNA, 73 bp, Homo sapiens
aagtggagcaagacctggtcttccagaaaaagaggaaaatgagaagagtgaacctaagatttgcaggaatctg

SEQ ID NO: 15406 - DNA, 71 bp, Homo sapiens
aagacctggtcttccagaaaaagaggaaaatgagaagagtgaacctaagatttgcaggaatctggtgaccc

SEQ ID NO: 15407 - DNA, 73 bp, Homo sapiens
tcttccagaaaaagaggaaaatgagaagagtgaacctaagatttgcaggaatctggtgacccccaaggcagac

SEQ ID NO: 15408 - DNA, 71 bp, Homo sapiens
aaaaagaggaaaatgagaagagtgaacctaagatttgcaggaatctggtgacccccaaggcagaccctaca

SEQ ID NO: 15409 - DNA, 77 bp, Homo sapiens
atgagaagagtgaacctaagatttgcaggaatctggtgacccccaaggcagaccctacaggcagtgagcctgccaaa

SEQ ID NO: 15410 - DNA, 75 bp, Homo sapiens
aacctaagatttgcaggaatctggtgacccccaaggcagaccctacaggcagtgagcctgccaaagcctctgaaa

SEQ ID NO: 15411 - DNA, 77 bp, Homo sapiens
agatttgcaggaatctggtgacccccaaggcagaccctacaggcagtgagcctgccaaagcctctgaaaaggaagca

SEQ ID NO: 15412 - DNA, 76 bp, Homo sapiens
aatctggtgacccccaaggcagaccctacaggcagtgagcctgccaaagcctctgaaaaggaagcaccagaggaca

SEQ ID NO: 15413 - DNA, 81 bp, Homo sapiens
caaggcagaccctacaggcagtgagcctgccaaagcctctgaaaaggaagcaccagaggacacagtagatgcaggagagga

SEQ ID NO: 15414 - DNA, 77 bp, Homo sapiens
accctacaggcagtgagcctgccaaagcctctgaaaaggaagcaccagaggacacagtagatgcaggagaggagggt

SEQ ID NO: 15415 - DNA, 77 bp, Homo sapiens
agtgagcctgccaaagcctctgaaaaggaagcaccagaggacacagtagatgcaggagaggagggttccaggaggga

SEQ ID NO: 15416 - DNA, 75 bp, Homo sapiens
cctgccaaagcctctgaaaaggaagcaccagaggacacagtagatgcaggagaggagggttccaggagggaagag

SEQ ID NO: 15417 - DNA, 77 bp, Homo sapiens
tgaaaaggaagcaccagaggacacagtagatgcaggagaggagggttccaggagggaagaggcagccaaggagccaa

SEQ ID NO: 15418 - DNA, 76 bp, Homo sapiens
aagcaccagaggacacagtagatgcaggagaggagggttccaggagggaagaggcagccaaggagccaaagaagaa

SEQ ID NO: 15419 - DNA, 77 bp, Homo sapiens
acacagtagatgcaggagaggagggttccaggagggaagaggcagccaaggagccaaagaagaaggcttctgctctg

SEQ ID NO: 15420 - DNA, 77 bp, Homo sapiens
tagatgcaggagaggagggttccaggagggaagaggcagccaaggagccaaagaagaaggcttctgctctggaagag

SEQ ID NO: 15421 - DNA, 74 bp, Homo sapiens
agggttccaggagggaagaggcagccaaggagccaaagaagaaggcttctgctctggaagagggcagttcagac

SEQ ID NO: 15422 - DNA, 77 bp, Homo sapiens
gagggaagaggcagccaaggagccaaagaagaaggcttctgctctggaagagggcagttcagacgccagccaagtaa

SEQ ID NO: 15423 - DNA, 78 bp, Homo sapiens
aggcagccaaggagccaaagaagaaggcttctgctctggaagagggcagttcagacgccagccaagtaagtcactgta

SEQ ID NO: 15424 - DNA, 77 bp, Homo sapiens
aaggagccaaagaagaaggcttctgctctggaagagggcagttcagacgccagccaagtaagtcactgtatcccata

SEQ ID NO: 15425 - DNA, 76 bp, Homo sapiens
aagaaggcttctgctctggaagagggcagttcagacgccagccaagtaagtcactgtatcccataggcaggggttg

SEQ ID NO: 15426 - DNA, 81 bp, Homo sapiens
accatgactctttgtgctctgctctgagggatttctctgtgggtctgtctctccaggaactggaaattagtgaacacatga

SEQ ID NO: 15427 - DNA, 79 bp, Homo sapiens
actctttgtgctctgctctgagggatttctctgtgggtctgtctctccaggaactggaaattagtgaacacatgaagga

SEQ ID NO: 15428 - DNA, 81 bp, Homo sapiens
tctgctctgagggatttctctgtgggtctgtctctccaggaactggaaattagtgaacacatgaaggaaccacagctctca

SEQ ID NO: 15429 - DNA, 79 bp, Homo sapiens
ggatttctctgtgggtctgtctctccaggaactggaaattagtgaacacatgaaggaaccacagctctcagactccata

SEQ ID NO: 15430 - DNA, 79 bp, Homo sapiens
tgggtctgtctctccaggaactggaaattagtgaacacatgaaggaaccacagctctcagactccatagcttctgaccc

SEQ ID NO: 15431 - DNA, 77 bp, Homo sapiens
tctccaggaactggaaattagtgaacacatgaaggaaccacagctctcagactccatagcttctgaccccaagtcct

SEQ ID NO: 15432 - DNA, 77 bp, Homo sapiens
ggaactggaaattagtgaacacatgaaggaaccacagctctcagactccatagcttctgaccccaagtccttccatg

SEQ ID NO: 15433 - DNA, 78 bp, Homo sapiens
attagtgaacacatgaaggaaccacagctctcagactccatagcttctgaccccaagtccttccatggcctggtgagt

SEQ ID NO: 15434 - DNA, 79 bp, Homo sapiens
acatgaaggaaccacagctctcagactccatagcttctgaccccaagtccttccatggcctggtgagtttgagatgagg

SEQ ID NO: 15435 - DNA, 80 bp, Homo sapiens
acagctctcagactccatagcttctgaccccaagtccttccatggcctggtgagtttgagatgagggcagtagagtggtg

SEQ ID NO: 15436 - DNA, 78 bp, Homo sapiens
agactccatagcttctgaccccaagtccttccatggcctggtgagtttgagatgagggcagtagagtggtggtgaaga

SEQ ID NO: 15437 - DNA, 79 bp, Homo sapiens
tgggtgttgactgtgacagaggcagagttgacctttgcatctccactgtctccaggacttcggttttcgcagccggatc

SEQ ID NO: 15438 - DNA, 81 bp, Homo sapiens
ttgactgtgacagaggcagagttgacctttgcatctccactgtctccaggacttcggttttcgcagccggatctcggagca

SEQ ID NO: 15439 - DNA, 81 bp, Homo sapiens
gcagagttgacctttgcatctccactgtctccaggacttcggttttcgcagccggatctcggagcacctgctggatgttga

SEQ ID NO: 15440 - DNA, 79 bp, Homo sapiens
acctttgcatctccactgtctccaggacttcggttttcgcagccggatctcggagcacctgctggatgttgatgtgctt

SEQ ID NO: 15441 - DNA, 78 bp, Homo sapiens
atctccactgtctccaggacttcggttttcgcagccggatctcggagcacctgctggatgttgatgtgctttccccag

SEQ ID NO: 15442 - DNA, 77 bp, Homo sapiens
tgtctccaggacttcggttttcgcagccggatctcggagcacctgctggatgttgatgtgctttccccagtcctggg

SEQ ID NO: 15443 - DNA, 76 bp, Homo sapiens
acttcggttttcgcagccggatctcggagcacctgctggatgttgatgtgctttccccagtcctgggtggagcttg

SEQ ID NO: 15444 - DNA, 78 bp, Homo sapiens
agccggatctcggagcacctgctggatgttgatgtgctttccccagtcctgggtggagcttgtcggcaggtgagtttc

SEQ ID NO: 15445 - DNA, 78 bp, Homo sapiens
atctcggagcacctgctggatgttgatgtgctttccccagtcctgggtggagcttgtcggcaggtgagtttctgtggg

SEQ ID NO: 15446 - DNA, 76 bp, Homo sapiens
acctgctggatgttgatgtgctttccccagtcctgggtggagcttgtcggcaggtgagtttctgtgggtggtgggc

SEQ ID NO: 15447 - DNA, 77 bp, Homo sapiens
tgttgatgtgctttccccagtcctgggtggagcttgtcggcaggtgagtttctgtgggtggtgggctgagctggggc

SEQ ID NO: 15448 - DNA, 73 bp, Homo sapiens
aaatgcagtccctccaacacaaactttttattgcttctctcctacaggcccagcaaccactgggaatagaaga

SEQ ID NO: 15449 - DNA, 71 bp, Homo sapiens
agtccctccaacacaaactttttattgcttctctcctacaggcccagcaaccactgggaatagaagacaag

SEQ ID NO: 15450 - DNA, 75 bp, Homo sapiens
acaaactttttattgcttctctcctacaggcccagcaaccactgggaatagaagacaaggatgacagccagtcca

SEQ ID NO: 15451 - DNA, 83 bp, Homo sapiens
tttattgcttctctcctacaggcccagcaaccactgggaatagaagacaaggatgacagccagtccagccaagatgagctgca

SEQ ID NO: 15452 - DNA, 84 bp, Homo sapiens
ctacaggcccagcaaccactgggaatagaagacaaggatgacagccagtccagccaagatgagctgcagagcaagcagtccaaa

SEQ ID NO: 15453 - DNA, 83 bp, Homo sapiens
agcaaccactgggaatagaagacaaggatgacagccagtccagccaagatgagctgcagagcaagcagtccaaaggcctggag

SEQ ID NO: 15454 - DNA, 83 bp, Homo sapiens
tgggaatagaagacaaggatgacagccagtccagccaagatgagctgcagagcaagcagtccaaaggcctggaggagaggtac

SEQ ID NO: 15455 - DNA, 82 bp, Homo sapiens
aagacaaggatgacagccagtccagccaagatgagctgcagagcaagcagtccaaaggcctggaggagaggtaccataggtg

SEQ ID NO: 15456 - DNA, 83 bp, Homo sapiens
atgacagccagtccagccaagatgagctgcagagcaagcagtccaaaggcctggaggagaggtaccataggtgggaggctatc

SEQ ID NO: 15457 - DNA, 80 bp, Homo sapiens
agtccagccaagatgagctgcagagcaagcagtccaaaggcctggaggagaggtaccataggtgggaggctatccccagc

SEQ ID NO: 15458 - DNA, 82 bp, Homo sapiens
agatgagctgcagagcaagcagtccaaaggcctggaggagaggtaccataggtgggaggctatccccagcgctgtgccttca

SEQ ID NO: 15459 - DNA, 76 bp, Homo sapiens
agagcaagcagtccaaaggcctggaggagaggtaccataggtgggaggctatccccagcgctgtgccttcagggtg

SEQ ID NO: 15460 - DNA, 78 bp, Homo sapiens
tctccaaatggaggggcctgactctgctgctctgcccggcctgaccaggttatctcctccacttccacacgaggagcg

SEQ ID NO: 15461 - DNA, 77 bp, Homo sapiens
atggaggggcctgactctgctgctctgcccggcctgaccaggttatctcctccacttccacacgaggagcgggccca

SEQ ID NO: 15462 - DNA, 75 bp, Homo sapiens
actctgctgctctgcccggcctgaccaggttatctcctccacttccacacgaggagcgggcccagagtccccctc

SEQ ID NO: 15463 - DNA, 74 bp, Homo sapiens
ctctgcccggcctgaccaggttatctcctccacttccacacgaggagcgggcccagagtccccctcgcagcctg

SEQ ID NO: 15464 - DNA, 76 bp, Homo sapiens
tgaccaggttatctcctccacttccacacgaggagcgggcccagagtccccctcgcagcctggccactgaagaaga

SEQ ID NO: 15465 - DNA, 75 bp, Homo sapiens
ttatctcctccacttccacacgaggagcgggcccagagtccccctcgcagcctggccactgaagaagagcctccc

SEQ ID NO: 15466 - DNA, 74 bp, Homo sapiens
tccacttccacacgaggagcgggcccagagtccccctcgcagcctggccactgaagaagagcctccccagggcc

SEQ ID NO: 15467 - DNA, 70 bp, Homo sapiens
acgaggagcgggcccagagtccccctcgcagcctggccactgaagaagagcctccccagggccccgaggg

SEQ ID NO: 15468 - DNA, 72 bp, Homo sapiens
ccagagtccccctcgcagcctggccactgaagaagagcctccccagggccccgaggggcagcccgagtggaa

SEQ ID NO: 15469 - DNA, 73 bp, Homo sapiens
ccctcgcagcctggccactgaagaagagcctccccagggccccgaggggcagcccgagtggaaggaggcagag

SEQ ID NO: 15470 - DNA, 73 bp, Homo sapiens
agcctggccactgaagaagagcctccccagggccccgaggggcagcccgagtggaaggaggcagaggagcttg

SEQ ID NO: 15471 - DNA, 72 bp, Homo sapiens
tgaagaagagcctccccagggccccgaggggcagcccgagtggaaggaggcagaggagcttggggaggactc

SEQ ID NO: 15472 - DNA, 75 bp, Homo sapiens
cccagggccccgaggggcagcccgagtggaaggaggcagaggagcttggggaggactctgcagccagcctcagcc

SEQ ID NO: 15473 - DNA, 81 bp, Homo sapiens
cgaggggcagcccgagtggaaggaggcagaggagcttggggaggactctgcagccagcctcagcctgcagctgtccctcca

SEQ ID NO: 15474 - DNA, 80 bp, Homo sapiens
agcccgagtggaaggaggcagaggagcttggggaggactctgcagccagcctcagcctgcagctgtccctccagaggtaa

SEQ ID NO: 15475 - DNA, 81 bp, Homo sapiens
tggaaggaggcagaggagcttggggaggactctgcagccagcctcagcctgcagctgtccctccagaggtaaggatgaggg

SEQ ID NO: 15476 - DNA, 83 bp, Homo sapiens
aggagcttggggaggactctgcagccagcctcagcctgcagctgtccctccagaggtaaggatgaggggaagcatcctcatga

SEQ ID NO: 15477 - DNA, 85 bp, Homo sapiens
ggaggactctgcagccagcctcagcctgcagctgtccctccagaggtaaggatgaggggaagcatcctcatgaggatgagggctg

SEQ ID NO: 15478 - DNA, 72 bp, Homo sapiens
ctcttgctttcttactggctttaacacagttgtttccttactgctatcaagggagcaggccccaagcccacc

SEQ ID NO: 15479 - DNA, 76 bp, Homo sapiens
ttactggctttaacacagttgtttccttactgctatcaagggagcaggccccaagcccacctgctgcctgtgagaa

SEQ ID NO: 15480 - DNA, 76 bp, Homo sapiens
ttaacacagttgtttccttactgctatcaagggagcaggccccaagcccacctgctgcctgtgagaagggcaagga

SEQ ID NO: 15481 - DNA, 79 bp, Homo sapiens
tgtttccttactgctatcaagggagcaggccccaagcccacctgctgcctgtgagaagggcaaggagcagcattcccag

SEQ ID NO: 15482 - DNA, 81 bp, Homo sapiens
ctgctatcaagggagcaggccccaagcccacctgctgcctgtgagaagggcaaggagcagcattcccaggccgaggagctg

SEQ ID NO: 15483 - DNA, 78 bp, Homo sapiens
gggagcaggccccaagcccacctgctgcctgtgagaagggcaaggagcagcattcccaggccgaggagctgggccctg

SEQ ID NO: 15484 - DNA, 78 bp, Homo sapiens
cccaagcccacctgctgcctgtgagaagggcaaggagcagcattcccaggccgaggagctgggccctgggcaggaaga

SEQ ID NO: 15485 - DNA, 81 bp, Homo sapiens
tgcctgtgagaagggcaaggagcagcattcccaggccgaggagctgggccctgggcaggaagaggcagaggatcctgagga

SEQ ID NO: 15486 - DNA, 77 bp, Homo sapiens
agaagggcaaggagcagcattcccaggccgaggagctgggccctgggcaggaagaggcagaggatcctgaggagaag

SEQ ID NO: 15487 - DNA, 78 bp, Homo sapiens
aggagcagcattcccaggccgaggagctgggccctgggcaggaagaggcagaggatcctgaggagaaggtggcggtca

SEQ ID NO: 15488 - DNA, 75 bp, Homo sapiens
attcccaggccgaggagctgggccctgggcaggaagaggcagaggatcctgaggagaaggtggcggtcagcccca

SEQ ID NO: 15489 - DNA, 76 bp, Homo sapiens
gagctgggccctgggcaggaagaggcagaggatcctgaggagaaggtggcggtcagccccaccccgccagtctctc

SEQ ID NO: 15490 - DNA, 76 bp, Homo sapiens
ctgggcaggaagaggcagaggatcctgaggagaaggtggcggtcagccccaccccgccagtctctccagaggtgta

SEQ ID NO: 15491 - DNA, 74 bp, Homo sapiens
aagaggcagaggatcctgaggagaaggtggcggtcagccccaccccgccagtctctccagaggtgtaagggcca

SEQ ID NO: 15492 - DNA, 71 bp, Homo sapiens
agaggatcctgaggagaaggtggcggtcagccccaccccgccagtctctccagaggtgtaagggccagttt

SEQ ID NO: 15493 - DNA, 72 bp, Homo sapiens
aggagaaggtggcggtcagccccaccccgccagtctctccagaggtgtaagggccagttttgtgtgtctgtc

SEQ ID NO: 15494 - DNA, 74 bp, Homo sapiens
tggcggtcagccccaccccgccagtctctccagaggtgtaagggccagttttgtgtgtctgtccctgacctcca

SEQ ID NO: 15495 - DNA, 70 bp, Homo sapiens
agttggggccttggcttccccagctcctccccagttgccttggccgattcattcctttgtcttgtgtttc

SEQ ID NO: 15496 - DNA, 73 bp, Homo sapiens
ttggcttccccagctcctccccagttgccttggccgattcattcctttgtcttgtgtttctcccgccatccca

SEQ ID NO: 15497 - DNA, 74 bp, Homo sapiens
agctcctccccagttgccttggccgattcattcctttgtcttgtgtttctcccgccatcccagcgaggctgccc

SEQ ID NO: 15498 - DNA, 76 bp, Homo sapiens
ttggccgattcattcctttgtcttgtgtttctcccgccatcccagcgaggctgcccctgctagggtctgagaaata

SEQ ID NO: 15499 - DNA, 74 bp, Homo sapiens
attcctttgtcttgtgtttctcccgccatcccagcgaggctgcccctgctagggtctgagaaatacctgaccac

SEQ ID NO: 15500 - DNA, 76 bp, Homo sapiens
tgtttctcccgccatcccagcgaggctgcccctgctagggtctgagaaatacctgaccacgcagtttcagtttata

SEQ ID NO: 15501 - DNA, 76 bp, Homo sapiens
tcccgccatcccagcgaggctgcccctgctagggtctgagaaatacctgaccacgcagtttcagtttataccatcc

SEQ ID NO: 15502 - DNA, 72 bp, Homo sapiens
cgaggctgcccctgctagggtctgagaaatacctgaccacgcagtttcagtttataccatccccttaggaaa

SEQ ID NO: 15503 - DNA, 72 bp, Homo sapiens
cctgctagggtctgagaaatacctgaccacgcagtttcagtttataccatccccttaggaaatgccttctct

SEQ ID NO: 15504 - DNA, 71 bp, Homo sapiens
tagggtctgagaaatacctgaccacgcagtttcagtttataccatccccttaggaaatgccttctcttcct

SEQ ID NO: 15505 - DNA, 70 bp, Homo sapiens
aaatacctgaccacgcagtttcagtttataccatccccttaggaaatgccttctcttcctttcctgagtc

SEQ ID NO: 15506 - DNA, 71 bp, Homo sapiens
accacgcagtttcagtttataccatccccttaggaaatgccttctcttcctttcctgagtctcttcaggcc

SEQ ID NO: 15507 - DNA, 72 bp, Homo sapiens
ttcagtttataccatccccttaggaaatgccttctcttcctttcctgagtctcttcaggccccatcgcttcc

SEQ ID NO: 15508 - DNA, 71 bp, Homo sapiens
tccccttaggaaatgccttctcttcctttcctgagtctcttcaggccccatcgcttccgtgttattaatct

SEQ ID NO: 15509 - DNA, 75 bp, Homo sapiens
aaatgccttctcttcctttcctgagtctcttcaggccccatcgcttccgtgttattaatctttacagcggcatca

SEQ ID NO: 15510 - DNA, 75 bp, Homo sapiens
cttcctttcctgagtctcttcaggccccatcgcttccgtgttattaatctttacagcggcatcaggaatggatgg

SEQ ID NO: 15511 - DNA, 76 bp, Homo sapiens
tgagtctcttcaggccccatcgcttccgtgttattaatctttacagcggcatcaggaatggatgggttgtctaggt

SEQ ID NO: 15512 - DNA, 74 bp, Homo sapiens
tcttcaggccccatcgcttccgtgttattaatctttacagcggcatcaggaatggatgggttgtctaggttttg

SEQ ID NO: 15513 - DNA, 74 bp, Homo sapiens
atcgcttccgtgttattaatctttacagcggcatcaggaatggatgggttgtctaggttttgtgggagtagctc

SEQ ID NO: 15514 - DNA, 75 bp, Homo sapiens
ccgtgttattaatctttacagcggcatcaggaatggatgggttgtctaggttttgtgggagtagctctgtgtctg

SEQ ID NO: 15515 - DNA, 77 bp, Homo sapiens
aatctttacagcggcatcaggaatggatgggttgtctaggttttgtgggagtagctctgtgtctgtcagcttccaaa

SEQ ID NO: 15516 - DNA, 77 bp, Homo sapiens
atcaggaatggatgggttgtctaggttttgtgggagtagctctgtgtctgtcagcttccaaaggtgtagtcaagctg

SEQ ID NO: 15517 - DNA, 78 bp, Homo sapiens
aatggatgggttgtctaggttttgtgggagtagctctgtgtctgtcagcttccaaaggtgtagtcaagctggatctga

SEQ ID NO: 15518 - DNA, 76 bp, Homo sapiens
gttgtctaggttttgtgggagtagctctgtgtctgtcagcttccaaaggtgtagtcaagctggatctgaagggtta

SEQ ID NO: 15519 - DNA, 79 bp, Homo sapiens
ttttgtgggagtagctctgtgtctgtcagcttccaaaggtgtagtcaagctggatctgaagggttaggagcagagggca

SEQ ID NO: 15520 - DNA, 80 bp, Homo sapiens
gtagctctgtgtctgtcagcttccaaaggtgtagtcaagctggatctgaagggttaggagcagagggcaagctagaggga

SEQ ID NO: 15521 - DNA, 78 bp, Homo sapiens
tcagcttccaaaggtgtagtcaagctggatctgaagggttaggagcagagggcaagctagagggagcaggtaggtcca

SEQ ID NO: 15522 - DNA, 76 bp, Homo sapiens
ttccaaaggtgtagtcaagctggatctgaagggttaggagcagagggcaagctagagggagcaggtaggtccagga

SEQ ID NO: 15523 - DNA, 80 bp, Homo sapiens
gtagtcaagctggatctgaagggttaggagcagagggcaagctagagggagcaggtaggtccaggaggcaacatgtgcca

SEQ ID NO: 15524 - DNA, 79 bp, Homo sapiens
tctgaagggttaggagcagagggcaagctagagggagcaggtaggtccaggaggcaacatgtgccactcaccgaatgct

SEQ ID NO: 15525 - DNA, 80 bp, Homo sapiens
ttaggagcagagggcaagctagagggagcaggtaggtccaggaggcaacatgtgccactcaccgaatgctttctggccaa

SEQ ID NO: 15526 - DNA, 78 bp, Homo sapiens
agagggcaagctagagggagcaggtaggtccaggaggcaacatgtgccactcaccgaatgctttctggccaaggccag

SEQ ID NO: 15527 - DNA, 77 bp, Homo sapiens
tagagggagcaggtaggtccaggaggcaacatgtgccactcaccgaatgctttctggccaaggccagggctaggaaa

SEQ ID NO: 15528 - DNA, 74 bp, Homo sapiens
ccaggaggcaacatgtgccactcaccgaatgctttctggccaaggccagggctaggaaacaggaaggtcctccc

SEQ ID NO: 15529 - DNA, 75 bp, Homo sapiens
ccgaatgctttctggccaaggccagggctaggaaacaggaaggtcctccccgtgtcatgccagcatctttcgtga

SEQ ID NO: 15530 - DNA, 74 bp, Homo sapiens
tttctggccaaggccagggctaggaaacaggaaggtcctccccgtgtcatgccagcatctttcgtgaggatttc

SEQ ID NO: 15531 - DNA, 74 bp, Homo sapiens
aaggccagggctaggaaacaggaaggtcctccccgtgtcatgccagcatctttcgtgaggatttccagagaaga

SEQ ID NO: 15532 - DNA, 73 bp, Homo sapiens
gaaacaggaaggtcctccccgtgtcatgccagcatctttcgtgaggatttccagagaagagggtaaaagaatc

SEQ ID NO: 15533 - DNA, 72 bp, Homo sapiens
aggaaggtcctccccgtgtcatgccagcatctttcgtgaggatttccagagaagagggtaaaagaatccaaa

SEQ ID NO: 15534 - DNA, 77 bp, Homo sapiens
gtgtcatgccagcatctttcgtgaggatttccagagaagagggtaaaagaatccaaaccaccaagttgagtatgaga

SEQ ID NO: 15535 - DNA, 74 bp, Homo sapiens
agcatctttcgtgaggatttccagagaagagggtaaaagaatccaaaccaccaagttgagtatgagaggagaca

SEQ ID NO: 15536 - DNA, 71 bp, Homo sapiens
gtgaggatttccagagaagagggtaaaagaatccaaaccaccaagttgagtatgagaggagacataacttt

SEQ ID NO: 15537 - DNA, 71 bp, Homo sapiens
tttccagagaagagggtaaaagaatccaaaccaccaagttgagtatgagaggagacataacttttgtggta

SEQ ID NO: 15538 - DNA, 70 bp, Homo sapiens
agggtaaaagaatccaaaccaccaagttgagtatgagaggagacataacttttgtggtagtaccatgaaa

SEQ ID NO: 15539 - DNA, 70 bp, Homo sapiens
aaagaatccaaaccaccaagttgagtatgagaggagacataacttttgtggtagtaccatgaaaaccatt

SEQ ID NO: 15540 - DNA, 72 bp, Homo sapiens
aaccaccaagttgagtatgagaggagacataacttttgtggtagtaccatgaaaaccatttcacagtgtttc

SEQ ID NO: 15541 - DNA, 75 bp, Homo sapiens
ttgagtatgagaggagacataacttttgtggtagtaccatgaaaaccatttcacagtgtttctaggtgccatttc

SEQ ID NO: 15542 - DNA, 70 bp, Homo sapiens
agacataacttttgtggtagtaccatgaaaaccatttcacagtgtttctaggtgccatttccccgccctc

SEQ ID NO: 15543 - DNA, 70 bp, Homo sapiens
ttttgtggtagtaccatgaaaaccatttcacagtgtttctaggtgccatttccccgccctccgctctctt

SEQ ID NO: 15544 - DNA, 70 bp, Homo sapiens
gtagtaccatgaaaaccatttcacagtgtttctaggtgccatttccccgccctccgctctctttcttccc

SEQ ID NO: 15545 - DNA, 69 bp, Homo sapiens
aaaaccatttcacagtgtttctaggtgccatttccccgccctccgctctctttcttccctgtctctccc

SEQ ID NO: 15546 - DNA, 71 bp, Homo sapiens
cccgccctccgctctctttcttccctgtctctccctgctttcccttcttgctttctctcccgtatctttga

SEQ ID NO: 15547 - DNA, 73 bp, Homo sapiens
ctccgctctctttcttccctgtctctccctgctttcccttcttgctttctctcccgtatctttgagctacttg

SEQ ID NO: 15548 - DNA, 74 bp, Homo sapiens
ttccctgtctctccctgctttcccttcttgctttctctcccgtatctttgagctacttggtggccagcctgaaa

SEQ ID NO: 15549 - DNA, 77 bp, Homo sapiens
tctccctgctttcccttcttgctttctctcccgtatctttgagctacttggtggccagcctgaaatgattatgctcc

SEQ ID NO: 15550 - DNA, 79 bp, Homo sapiens
tttcccttcttgctttctctcccgtatctttgagctacttggtggccagcctgaaatgattatgctcctgcagagcctc

SEQ ID NO: 15551 - DNA, 80 bp, Homo sapiens
ttgctttctctcccgtatctttgagctacttggtggccagcctgaaatgattatgctcctgcagagcctcccctttgtca

SEQ ID NO: 15552 - DNA, 80 bp, Homo sapiens
cgtatctttgagctacttggtggccagcctgaaatgattatgctcctgcagagcctcccctttgtcactcactgtaggaa

SEQ ID NO: 15553 - DNA, 79 bp, Homo sapiens
tttgagctacttggtggccagcctgaaatgattatgctcctgcagagcctcccctttgtcactcactgtaggaaactgg

SEQ ID NO: 15554 - DNA, 81 bp, Homo sapiens
tggccagcctgaaatgattatgctcctgcagagcctcccctttgtcactcactgtaggaaactgggtcccactgattctga

SEQ ID NO: 15555 - DNA, 80 bp, Homo sapiens
ctgaaatgattatgctcctgcagagcctcccctttgtcactcactgtaggaaactgggtcccactgattctgatacctga

SEQ ID NO: 15556 - DNA, 74 bp, Homo sapiens
gagcctcccctttgtcactcactgtaggaaactgggtcccactgattctgatacctgaggagttggcctagaaa

SEQ ID NO: 15557 - DNA, 77 bp, Homo sapiens
tttgtcactcactgtaggaaactgggtcccactgattctgatacctgaggagttggcctagaaatcagagctgtttc

SEQ ID NO: 15558 - DNA, 75 bp, Homo sapiens
actcactgtaggaaactgggtcccactgattctgatacctgaggagttggcctagaaatcagagctgtttcttcc

SEQ ID NO: 15559 - DNA, 73 bp, Homo sapiens
aggaaactgggtcccactgattctgatacctgaggagttggcctagaaatcagagctgtttcttcccctggag

SEQ ID NO: 15560 - DNA, 76 bp, Homo sapiens
actgattctgatacctgaggagttggcctagaaatcagagctgtttcttcccctggagtcctcaacttcccaatca

SEQ ID NO: 15561 - DNA, 78 bp, Homo sapiens
ttctgatacctgaggagttggcctagaaatcagagctgtttcttcccctggagtcctcaacttcccaatcatgtcatg

SEQ ID NO: 15562 - DNA, 75 bp, Homo sapiens
aggagttggcctagaaatcagagctgtttcttcccctggagtcctcaacttcccaatcatgtcatggacctttca

SEQ ID NO: 15563 - DNA, 76 bp, Homo sapiens
tagaaatcagagctgtttcttcccctggagtcctcaacttcccaatcatgtcatggacctttcaggcattgtttac

SEQ ID NO: 15564 - DNA, 74 bp, Homo sapiens
ctgtttcttcccctggagtcctcaacttcccaatcatgtcatggacctttcaggcattgtttactgccttggaa

SEQ ID NO: 15565 - DNA, 78 bp, Homo sapiens
ctcaacttcccaatcatgtcatggacctttcaggcattgtttactgccttggaactgagctagcagtttgggctacta

SEQ ID NO: 15566 - DNA, 74 bp, Homo sapiens
atgtcatggacctttcaggcattgtttactgccttggaactgagctagcagtttgggctactagacctttaaaa

SEQ ID NO: 15567 - DNA, 74 bp, Homo sapiens
tttcaggcattgtttactgccttggaactgagctagcagtttgggctactagacctttaaaacagtgcgaggga

SEQ ID NO: 15568 - DNA, 72 bp, Homo sapiens
attgtttactgccttggaactgagctagcagtttgggctactagacctttaaaacagtgcgagggagaagag

SEQ ID NO: 15569 - DNA, 75 bp, Homo sapiens
cttggaactgagctagcagtttgggctactagacctttaaaacagtgcgagggagaagaggtccactgacagaca

SEQ ID NO: 15570 - DNA, 73 bp, Homo sapiens
gtttgggctactagacctttaaaacagtgcgagggagaagaggtccactgacagacagcccaggttgcctctg

SEQ ID NO: 15571 - DNA, 76 bp, Homo sapiens
tagacctttaaaacagtgcgagggagaagaggtccactgacagacagcccaggttgcctctgtgcaagttcactgg

SEQ ID NO: 15572 - DNA, 80 bp, Homo sapiens
aaaacagtgcgagggagaagaggtccactgacagacagcccaggttgcctctgtgcaagttcactggtgctcatagcctg

SEQ ID NO: 15573 - DNA, 86 bp, Homo sapiens
aggtccactgacagacagcccaggttgcctctgtgcaagttcactggtgctcatagcctgggcacatgccccacatggtctgatgc

SEQ ID NO: 15574 - DNA, 84 bp, Homo sapiens
agacagcccaggttgcctctgtgcaagttcactggtgctcatagcctgggcacatgccccacatggtctgatgccccatctttc

SEQ ID NO: 15575 - DNA, 85 bp, Homo sapiens
aggttgcctctgtgcaagttcactggtgctcatagcctgggcacatgccccacatggtctgatgccccatctttccacagcatta

SEQ ID NO: 15576 - DNA, 84 bp, Homo sapiens
ctgtgcaagttcactggtgctcatagcctgggcacatgccccacatggtctgatgccccatctttccacagcattatccctagg

SEQ ID NO: 15577 - DNA, 87 bp, Homo sapiens
tggtgctcatagcctgggcacatgccccacatggtctgatgccccatctttccacagcattatccctagggctccacatagcttgca

SEQ ID NO: 15578 - DNA, 87 bp, Homo sapiens
ggcacatgccccacatggtctgatgccccatctttccacagcattatccctagggctccacatagcttgcagcctgcaggagagaga

SEQ ID NO: 15579 - DNA, 80 bp, Homo sapiens
atgccccatctttccacagcattatccctagggctccacatagcttgcagcctgcaggagagagagacattaaaaggtac

SEQ ID NO: 15580 - DNA, 81 bp, Homo sapiens
ttccacagcattatccctagggctccacatagcttgcagcctgcaggagagagagacattaaaaggtaccatctcagggaa

SEQ ID NO: 15581 - DNA, 76 bp, Homo sapiens
attatccctagggctccacatagcttgcagcctgcaggagagagagacattaaaaggtaccatctcagggaaaaaa

SEQ ID NO: 15582 - DNA, 78 bp, Homo sapiens
tagggctccacatagcttgcagcctgcaggagagagagacattaaaaggtaccatctcagggaaaaaagatgttttca

SEQ ID NO: 15583 - DNA, 75 bp, Homo sapiens
atagcttgcagcctgcaggagagagagacattaaaaggtaccatctcagggaaaaaagatgttttcagccaaggt

SEQ ID NO: 15584 - DNA, 72 bp, Homo sapiens
gcaggagagagagacattaaaaggtaccatctcagggaaaaaagatgttttcagccaaggttggaaatgagt

SEQ ID NO: 15585 - DNA, 69 bp, Homo sapiens
agagacattaaaaggtaccatctcagggaaaaaagatgttttcagccaaggttggaaatgagttggagg

SEQ ID NO: 15586 - DNA, 68 bp, Homo sapiens
attaaaaggtaccatctcagggaaaaaagatgttttcagccaaggttggaaatgagttggagggttga

SEQ ID NO: 15587 - DNA, 73 bp, Homo sapiens
atctcagggaaaaaagatgttttcagccaaggttggaaatgagttggagggttgatgaggcggagagctgtgg

SEQ ID NO: 15588 - DNA, 72 bp, Homo sapiens
aaagatgttttcagccaaggttggaaatgagttggagggttgatgaggcggagagctgtgggggaagcctct

SEQ ID NO: 15589 - DNA, 74 bp, Homo sapiens
tgttttcagccaaggttggaaatgagttggagggttgatgaggcggagagctgtgggggaagcctctttctgag

SEQ ID NO: 15590 - DNA, 82 bp, Homo sapiens
ttgatgaggcggagagctgtgggggaagcctctttctgagggcaggattctcagaggaggtggcagccacatgtcttatata

SEQ ID NO: 15591 - DNA, 82 bp, Homo sapiens
gagagctgtgggggaagcctctttctgagggcaggattctcagaggaggtggcagccacatgtcttatatatgcattaattg

SEQ ID NO: 15592 - DNA, 82 bp, Homo sapiens
ggggaagcctctttctgagggcaggattctcagaggaggtggcagccacatgtcttatatatgcattaattgggctgtgtca

SEQ ID NO: 15593 - DNA, 84 bp, Homo sapiens
tctttctgagggcaggattctcagaggaggtggcagccacatgtcttatatatgcattaattgggctgtgtcaggggactgaga

SEQ ID NO: 15594 - DNA, 82 bp, Homo sapiens
agggcaggattctcagaggaggtggcagccacatgtcttatatatgcattaattgggctgtgtcaggggactgagaggaagc

SEQ ID NO: 15595 - DNA, 81 bp, Homo sapiens
attctcagaggaggtggcagccacatgtcttatatatgcattaattgggctgtgtcaggggactgagaggaagccaggctt

SEQ ID NO: 15596 - DNA, 79 bp, Homo sapiens
aggtggcagccacatgtcttatatatgcattaattgggctgtgtcaggggactgagaggaagccaggctttggaaggaa

SEQ ID NO: 15597 - DNA, 78 bp, Homo sapiens
acatgtcttatatatgcattaattgggctgtgtcaggggactgagaggaagccaggctttggaaggaaggagaagatg

SEQ ID NO: 15598 - DNA, 77 bp, Homo sapiens
tatatatgcattaattgggctgtgtcaggggactgagaggaagccaggctttggaaggaaggagaagatggagttgg

SEQ ID NO: 15599 - DNA, 77 bp, Homo sapiens
tcaggggactgagaggaagccaggctttggaaggaaggagaagatggagttgggagcagaagagaattgaaggcata

SEQ ID NO: 15600 - DNA, 78 bp, Homo sapiens
agaggaagccaggctttggaaggaaggagaagatggagttgggagcagaagagaattgaaggcataggctgaagatca

SEQ ID NO: 15601 - DNA, 77 bp, Homo sapiens
aggctttggaaggaaggagaagatggagttgggagcagaagagaattgaaggcataggctgaagatcatttctggtc

SEQ ID NO: 15602 - DNA, 78 bp, Homo sapiens
aggaaggagaagatggagttgggagcagaagagaattgaaggcataggctgaagatcatttctggtccgagttatgat

SEQ ID NO: 15603 - DNA, 74 bp, Homo sapiens
agttgggagcagaagagaattgaaggcataggctgaagatcatttctggtccgagttatgattttaggaaaggg

SEQ ID NO: 15604 - DNA, 71 bp, Homo sapiens
aagagaattgaaggcataggctgaagatcatttctggtccgagttatgattttaggaaaggggaaacgaaa

SEQ ID NO: 15605 - DNA, 69 bp, Homo sapiens
aaggcataggctgaagatcatttctggtccgagttatgattttaggaaaggggaaacgaaaggtcttta

SEQ ID NO: 15606 - DNA, 70 bp, Homo sapiens
tgaagatcatttctggtccgagttatgattttaggaaaggggaaacgaaaggtctttatggtaattcaga

SEQ ID NO: 15607 - DNA, 69 bp, Homo sapiens
atttctggtccgagttatgattttaggaaaggggaaacgaaaggtctttatggtaattcagagatgaca

SEQ ID NO: 15608 - DNA, 69 bp, Homo sapiens
attttaggaaaggggaaacgaaaggtctttatggtaattcagagatgacagtagcctgtcctgtcttcc

SEQ ID NO: 15609 - DNA, 75 bp, Homo sapiens
gggaaacgaaaggtctttatggtaattcagagatgacagtagcctgtcctgtcttcctctctctatagtctcaag

SEQ ID NO: 15610 - DNA, 79 bp, Homo sapiens
aaaggtctttatggtaattcagagatgacagtagcctgtcctgtcttcctctctctatagtctcaaggtgctgcaatgg

SEQ ID NO: 15611 - DNA, 81 bp, Homo sapiens
taattcagagatgacagtagcctgtcctgtcttcctctctctatagtctcaaggtgctgcaatgggattcgtaagcccttg

SEQ ID NO: 15612 - DNA, 78 bp, Homo sapiens
agatgacagtagcctgtcctgtcttcctctctctatagtctcaaggtgctgcaatgggattcgtaagcccttgttttc

SEQ ID NO: 15613 - DNA, 74 bp, Homo sapiens
cttcctctctctatagtctcaaggtgctgcaatgggattcgtaagcccttgttttcctctactgttctaatccg

SEQ ID NO: 15614 - DNA, 72 bp, Homo sapiens
aaggtgctgcaatgggattcgtaagcccttgttttcctctactgttctaatccggtcctgcccgctgctttc

SEQ ID NO: 15615 - DNA, 73 bp, Homo sapiens
aatgggattcgtaagcccttgttttcctctactgttctaatccggtcctgcccgctgctttccatctgcagcg

SEQ ID NO: 15616 - DNA, 73 bp, Homo sapiens
attcgtaagcccttgttttcctctactgttctaatccggtcctgcccgctgctttccatctgcagcggggctc

SEQ ID NO: 15617 - DNA, 76 bp, Homo sapiens
ttgttttcctctactgttctaatccggtcctgcccgctgctttccatctgcagcggggctcgagctggagggagaa

SEQ ID NO: 15618 - DNA, 78 bp, Homo sapiens
ctctactgttctaatccggtcctgcccgctgctttccatctgcagcggggctcgagctggagggagaagggattctga

SEQ ID NO: 15619 - DNA, 80 bp, Homo sapiens
tctaatccggtcctgcccgctgctttccatctgcagcggggctcgagctggagggagaagggattctgagtccacagcag

SEQ ID NO: 15620 - DNA, 81 bp, Homo sapiens
tcctgcccgctgctttccatctgcagcggggctcgagctggagggagaagggattctgagtccacagcagggaggaccagc

SEQ ID NO: 15621 - DNA, 77 bp, Homo sapiens
tttccatctgcagcggggctcgagctggagggagaagggattctgagtccacagcagggaggaccagctcccctgtt

SEQ ID NO: 15622 - DNA, 76 bp, Homo sapiens
agcggggctcgagctggagggagaagggattctgagtccacagcagggaggaccagctcccctgtttgactcttgc

SEQ ID NO: 15623 - DNA, 75 bp, Homo sapiens
agctggagggagaagggattctgagtccacagcagggaggaccagctcccctgtttgactcttgcccagccctct

SEQ ID NO: 15624 - DNA, 73 bp, Homo sapiens
agaagggattctgagtccacagcagggaggaccagctcccctgtttgactcttgcccagccctctttgttttg

SEQ ID NO: 15625 - DNA, 77 bp, Homo sapiens
attctgagtccacagcagggaggaccagctcccctgtttgactcttgcccagccctctttgttttggatcatgccca

SEQ ID NO: 15626 - DNA, 74 bp, Homo sapiens
acagcagggaggaccagctcccctgtttgactcttgcccagccctctttgttttggatcatgcccacactttcc

SEQ ID NO: 15627 - DNA, 73 bp, Homo sapiens
accagctcccctgtttgactcttgcccagccctctttgttttggatcatgcccacactttccgcttaggttga

SEQ ID NO: 15628 - DNA, 75 bp, Homo sapiens
cctgtttgactcttgcccagccctctttgttttggatcatgcccacactttccgcttaggttgactgagccacca

SEQ ID NO: 15629 - DNA, 79 bp, Homo sapiens
accatgccaggcctgcaacagcctgagtgctgtgcgaggagggtgtgtggtgaggccactttccaccgtaagattgagg

SEQ ID NO: 15630 - DNA, 77 bp, Homo sapiens
aggcctgcaacagcctgagtgctgtgcgaggagggtgtgtggtgaggccactttccaccgtaagattgagggacctg

SEQ ID NO: 15631 - DNA, 76 bp, Homo sapiens
agcctgagtgctgtgcgaggagggtgtgtggtgaggccactttccaccgtaagattgagggacctggacgtggaga

SEQ ID NO: 15632 - DNA, 72 bp, Homo sapiens
agggtgtgtggtgaggccactttccaccgtaagattgagggacctggacgtggagacacattctggccttta

SEQ ID NO: 15633 - DNA, 73 bp, Homo sapiens
tggtgaggccactttccaccgtaagattgagggacctggacgtggagacacattctggcctttaggaaagtca

SEQ ID NO: 15634 - DNA, 71 bp, Homo sapiens
actttccaccgtaagattgagggacctggacgtggagacacattctggcctttaggaaagtcactctggga

SEQ ID NO: 15635 - DNA, 74 bp, Homo sapiens
taagattgagggacctggacgtggagacacattctggcctttaggaaagtcactctgggagacaaaatgcttta

SEQ ID NO: 15636 - DNA, 75 bp, Homo sapiens
acctggacgtggagacacattctggcctttaggaaagtcactctgggagacaaaatgctttatcctgctcatggt

SEQ ID NO: 15637 - DNA, 78 bp, Homo sapiens
tggagacacattctggcctttaggaaagtcactctgggagacaaaatgctttatcctgctcatggtttcctcatgctt

SEQ ID NO: 15638 - DNA, 76 bp, Homo sapiens
acattctggcctttaggaaagtcactctgggagacaaaatgctttatcctgctcatggtttcctcatgctttatcc

SEQ ID NO: 15639 - DNA, 83 bp, Homo sapiens
actctgggagacaaaatgctttatcctgctcatggtttcctcatgctttatcctgctcatgctttatcctgctcagaatgttc

SEQ ID NO: 15640 - DNA, 82 bp, Homo sapiens
ctttatcctgctcatggtttcctcatgctttatcctgctcatgctttatcctgctcagaatgttctcaggattcctctttgg

SEQ ID NO: 15641 - DNA, 78 bp, Homo sapiens
tttatcctgctcatgctttatcctgctcagaatgttctcaggattcctctttgggcatttcgttgaagaaccagaaaa

SEQ ID NO: 15642 - DNA, 75 bp, Homo sapiens
atgctttatcctgctcagaatgttctcaggattcctctttgggcatttcgttgaagaaccagaaaacaagcaaaa

SEQ ID NO: 15643 - DNA, 72 bp, Homo sapiens
ctcagaatgttctcaggattcctctttgggcatttcgttgaagaaccagaaaacaagcaaaataacagtcct

SEQ ID NO: 15644 - DNA, 71 bp, Homo sapiens
atgttctcaggattcctctttgggcatttcgttgaagaaccagaaaacaagcaaaataacagtccttatta

SEQ ID NO: 15645 - DNA, 70 bp, Homo sapiens
cctctttgggcatttcgttgaagaaccagaaaacaagcaaaataacagtccttattactttatacacatc

SEQ ID NO: 15646 - DNA, 69 bp, Homo sapiens
ttgggcatttcgttgaagaaccagaaaacaagcaaaataacagtccttattactttatacacatctttt

SEQ ID NO: 15647 - DNA, 69 bp, Homo sapiens
cgttgaagaaccagaaaacaagcaaaataacagtccttattactttatacacatctttttaatggatac

SEQ ID NO: 15648 - DNA, 72 bp, Homo sapiens
aaacaagcaaaataacagtccttattactttatacacatctttttaatggataccattattcctgatctcac

SEQ ID NO: 15649 - DNA, 73 bp, Homo sapiens
gcaaaataacagtccttattactttatacacatctttttaatggataccattattcctgatctcaccaccctc

SEQ ID NO: 15650 - DNA, 74 bp, Homo sapiens
agtccttattactttatacacatctttttaatggataccattattcctgatctcaccaccctcctatgtatcca

SEQ ID NO: 15651 - DNA, 78 bp, Homo sapiens
tttatacacatctttttaatggataccattattcctgatctcaccaccctcctatgtatccaggtcagctctgaattc

SEQ ID NO: 15652 - DNA, 75 bp, Homo sapiens
atctttttaatggataccattattcctgatctcaccaccctcctatgtatccaggtcagctctgaattcctttta

SEQ ID NO: 15653 - DNA, 76 bp, Homo sapiens
ataccattattcctgatctcaccaccctcctatgtatccaggtcagctctgaattccttttattcatttctaaaca

SEQ ID NO: 15654 - DNA, 75 bp, Homo sapiens
attattcctgatctcaccaccctcctatgtatccaggtcagctctgaattccttttattcatttctaaacattta

SEQ ID NO: 15655 - DNA, 70 bp, Homo sapiens
aggtcagctctgaattccttttattcatttctaaacatttaattaactctaagcagacgaaaacgtgccc

SEQ ID NO: 15656 - DNA, 68 bp, Homo sapiens
ctgaattccttttattcatttctaaacatttaattaactctaagcagacgaaaacgtgcccccatggg

SEQ ID NO: 15657 - DNA, 74 bp, Homo sapiens
taaacatttaattaactctaagcagacgaaaacgtgcccccatgggtagacggggaacatggcactcatgtgca

SEQ ID NO: 15658 - DNA, 77 bp, Homo sapiens
ctctaagcagacgaaaacgtgcccccatgggtagacggggaacatggcactcatgtgcatgcttgctacattttttg

SEQ ID NO: 15659 - DNA, 79 bp, Homo sapiens
cccatgggtagacggggaacatggcactcatgtgcatgcttgctacattttttggcttaggggagcatctcctcctggc

SEQ ID NO: 15660 - DNA, 78 bp, Homo sapiens
tagacggggaacatggcactcatgtgcatgcttgctacattttttggcttaggggagcatctcctcctggcccccttg

SEQ ID NO: 15661 - DNA, 80 bp, Homo sapiens
aacatggcactcatgtgcatgcttgctacattttttggcttaggggagcatctcctcctggcccccttggtggtgtgata

SEQ ID NO: 15662 - DNA, 76 bp, Homo sapiens
atgtgcatgcttgctacattttttggcttaggggagcatctcctcctggcccccttggtggtgtgataggggagct

SEQ ID NO: 15663 - DNA, 72 bp, Homo sapiens
ttgctacattttttggcttaggggagcatctcctcctggcccccttggtggtgtgataggggagcttcctat

SEQ ID NO: 15664 - DNA, 71 bp, Homo sapiens
tttttggcttaggggagcatctcctcctggcccccttggtggtgtgataggggagcttcctattcctgggc

SEQ ID NO: 15665 - DNA, 74 bp, Homo sapiens
gagcatctcctcctggcccccttggtggtgtgataggggagcttcctattcctgggccttcctggactgttgta

SEQ ID NO: 15666 - DNA, 73 bp, Homo sapiens
tcctggcccccttggtggtgtgataggggagcttcctattcctgggccttcctggactgttgtagttctcaga

SEQ ID NO: 15667 - DNA, 74 bp, Homo sapiens
cccttggtggtgtgataggggagcttcctattcctgggccttcctggactgttgtagttctcagagctgggata

SEQ ID NO: 15668 - DNA, 79 bp, Homo sapiens
tggtgtgataggggagcttcctattcctgggccttcctggactgttgtagttctcagagctgggatacctgctgctgct

SEQ ID NO: 15669 - DNA, 78 bp, Homo sapiens
gggagcttcctattcctgggccttcctggactgttgtagttctcagagctgggatacctgctgctgcttctttcatgg

SEQ ID NO: 15670 - DNA, 82 bp, Homo sapiens
ttcctggactgttgtagttctcagagctgggatacctgctgctgcttctttcatgggcccatatacattggccactactcag

SEQ ID NO: 15671 - DNA, 80 bp, Homo sapiens
actgttgtagttctcagagctgggatacctgctgctgcttctttcatgggcccatatacattggccactactcagtttgg

SEQ ID NO: 15672 - DNA, 81 bp, Homo sapiens
tgggatacctgctgctgcttctttcatgggcccatatacattggccactactcagtttgggaggcagaaagcaatctctgg

SEQ ID NO: 15673 - DNA, 76 bp, Homo sapiens
ctttcatgggcccatatacattggccactactcagtttgggaggcagaaagcaatctctggggactgttcacaaat

SEQ ID NO: 15674 - DNA, 80 bp, Homo sapiens
atatacattggccactactcagtttgggaggcagaaagcaatctctggggactgttcacaaattgctggcatgagcctta

SEQ ID NO: 15675 - DNA, 80 bp, Homo sapiens
ttggccactactcagtttgggaggcagaaagcaatctctggggactgttcacaaattgctggcatgagccttaagtagca

SEQ ID NO: 15676 - DNA, 81 bp, Homo sapiens
tttgggaggcagaaagcaatctctggggactgttcacaaattgctggcatgagccttaagtagcaggcagagctctagcgg

SEQ ID NO: 15677 - DNA, 79 bp, Homo sapiens
agaaagcaatctctggggactgttcacaaattgctggcatgagccttaagtagcaggcagagctctagcggggaggtgg

SEQ ID NO: 15678 - DNA, 77 bp, Homo sapiens
aatctctggggactgttcacaaattgctggcatgagccttaagtagcaggcagagctctagcggggaggtggtaacg

SEQ ID NO: 15679 - DNA, 80 bp, Homo sapiens
tgttcacaaattgctggcatgagccttaagtagcaggcagagctctagcggggaggtggtaacggggctgtgagccattc

SEQ ID NO: 15680 - DNA, 78 bp, Homo sapiens
aattgctggcatgagccttaagtagcaggcagagctctagcggggaggtggtaacggggctgtgagccattctaggaa

SEQ ID NO: 15681 - DNA, 76 bp, Homo sapiens
atgagccttaagtagcaggcagagctctagcggggaggtggtaacggggctgtgagccattctaggaaggaatcca

SEQ ID NO: 15682 - DNA, 74 bp, Homo sapiens
ttaagtagcaggcagagctctagcggggaggtggtaacggggctgtgagccattctaggaaggaatccattagg

SEQ ID NO: 15683 - DNA, 74 bp, Homo sapiens
agagctctagcggggaggtggtaacggggctgtgagccattctaggaaggaatccattagggacagagcttcac

SEQ ID NO: 15684 - DNA, 76 bp, Homo sapiens
gggaggtggtaacggggctgtgagccattctaggaaggaatccattagggacagagcttcactctctccctgctgc

SEQ ID NO: 15685 - DNA, 81 bp, Homo sapiens
gtaacggggctgtgagccattctaggaaggaatccattagggacagagcttcactctctccctgctgctgccagctcttga

SEQ ID NO: 15686 - DNA, 85 bp, Homo sapiens
tgagccattctaggaaggaatccattagggacagagcttcactctctccctgctgctgccagctcttgagccgcagcttcagatt

SEQ ID NO: 15687 - DNA, 83 bp, Homo sapiens
attctaggaaggaatccattagggacagagcttcactctctccctgctgctgccagctcttgagccgcagcttcagattttga

SEQ ID NO: 15688 - DNA, 83 bp, Homo sapiens
acagagcttcactctctccctgctgctgccagctcttgagccgcagcttcagattttgatcttgggccataacctcgtaagtc

SEQ ID NO: 15689 - DNA, 85 bp, Homo sapiens
cttcactctctccctgctgctgccagctcttgagccgcagcttcagattttgatcttgggccataacctcgtaagtctgctgaga

SEQ ID NO: 15690 - DNA, 87 bp, Homo sapiens
tgctgctgccagctcttgagccgcagcttcagattttgatcttgggccataacctcgtaagtctgctgagagcctgctatgggctac

SEQ ID NO: 15691 - DNA, 80 bp, Homo sapiens
agctcttgagccgcagcttcagattttgatcttgggccataacctcgtaagtctgctgagagcctgctatgggctaccct

SEQ ID NO: 15692 - DNA, 80 bp, Homo sapiens
ttgagccgcagcttcagattttgatcttgggccataacctcgtaagtctgctgagagcctgctatgggctacccttctcc

SEQ ID NO: 15693 - DNA, 76 bp, Homo sapiens
agattttgatcttgggccataacctcgtaagtctgctgagagcctgctatgggctacccttctccctaggctcttg

SEQ ID NO: 15694 - DNA, 75 bp, Homo sapiens
tcttgggccataacctcgtaagtctgctgagagcctgctatgggctacccttctccctaggctcttggggcctta

SEQ ID NO: 15695 - DNA, 74 bp, Homo sapiens
ataacctcgtaagtctgctgagagcctgctatgggctacccttctccctaggctcttggggccttaaacagcca

SEQ ID NO: 15696 - DNA, 74 bp, Homo sapiens
cgtaagtctgctgagagcctgctatgggctacccttctccctaggctcttggggccttaaacagccacaatggg

SEQ ID NO: 15697 - DNA, 73 bp, Homo sapiens
agcctgctatgggctacccttctccctaggctcttggggccttaaacagccacaatggggcttgtcctatgga

SEQ ID NO: 15698 - DNA, 71 bp, Homo sapiens
ctatgggctacccttctccctaggctcttggggccttaaacagccacaatggggcttgtcctatggaacaa

SEQ ID NO: 15699 - DNA, 75 bp, Homo sapiens
ttctccctaggctcttggggccttaaacagccacaatggggcttgtcctatggaacaagcattgactgtatctct

SEQ ID NO: 15700 - DNA, 75 bp, Homo sapiens
ctcttggggccttaaacagccacaatggggcttgtcctatggaacaagcattgactgtatctcttggcctgccct

SEQ ID NO: 15701 - DNA, 76 bp, Homo sapiens
cttaaacagccacaatggggcttgtcctatggaacaagcattgactgtatctcttggcctgcccttgggtgacctc

SEQ ID NO: 15702 - DNA, 78 bp, Homo sapiens
cacaatggggcttgtcctatggaacaagcattgactgtatctcttggcctgcccttgggtgacctctttgactcctga

SEQ ID NO: 15703 - DNA, 78 bp, Homo sapiens
tatggaacaagcattgactgtatctcttggcctgcccttgggtgacctctttgactcctgattgtgggccctccatta

SEQ ID NO: 15704 - DNA, 76 bp, Homo sapiens
aagcattgactgtatctcttggcctgcccttgggtgacctctttgactcctgattgtgggccctccattaggattc

SEQ ID NO: 15705 - DNA, 78 bp, Homo sapiens
tgtatctcttggcctgcccttgggtgacctctttgactcctgattgtgggccctccattaggattccatctgtgatgt

SEQ ID NO: 15706 - DNA, 77 bp, Homo sapiens
gtgacctctttgactcctgattgtgggccctccattaggattccatctgtgatgttccgtatccattctaacctgga

SEQ ID NO: 15707 - DNA, 78 bp, Homo sapiens
ctttgactcctgattgtgggccctccattaggattccatctgtgatgttccgtatccattctaacctggatgcagagg

SEQ ID NO: 15708 - DNA, 78 bp, Homo sapiens
tgtgggccctccattaggattccatctgtgatgttccgtatccattctaacctggatgcagaggtgggtggacattaa

SEQ ID NO: 15709 - DNA, 80 bp, Homo sapiens
cattaggattccatctgtgatgttccgtatccattctaacctggatgcagaggtgggtggacattaaccctgtgatgata

SEQ ID NO: 15710 - DNA, 81 bp, Homo sapiens
attccatctgtgatgttccgtatccattctaacctggatgcagaggtgggtggacattaaccctgtgatgatatgccattc

SEQ ID NO: 15711 - DNA, 79 bp, Homo sapiens
tgtgatgttccgtatccattctaacctggatgcagaggtgggtggacattaaccctgtgatgatatgccattccccacc

SEQ ID NO: 15712 - DNA, 77 bp, Homo sapiens
cgtatccattctaacctggatgcagaggtgggtggacattaaccctgtgatgatatgccattccccacccatggtag

SEQ ID NO: 15713 - DNA, 79 bp, Homo sapiens
ctaacctggatgcagaggtgggtggacattaaccctgtgatgatatgccattccccacccatggtaggcgatccacaga

SEQ ID NO: 15714 - DNA, 78 bp, Homo sapiens
agaggtgggtggacattaaccctgtgatgatatgccattccccacccatggtaggcgatccacagagcctgtggctcc

SEQ ID NO: 15715 - DNA, 80 bp, Homo sapiens
ggtggacattaaccctgtgatgatatgccattccccacccatggtaggcgatccacagagcctgtggctcccccagagca

SEQ ID NO: 15716 - DNA, 86 bp, Homo sapiens
tgtgatgatatgccattccccacccatggtaggcgatccacagagcctgtggctcccccagagcagctctcagaggctgcactaaa

SEQ ID NO: 15717 - DNA, 82 bp, Homo sapiens
atatgccattccccacccatggtaggcgatccacagagcctgtggctcccccagagcagctctcagaggctgcactaaaggc

SEQ ID NO: 15718 - DNA, 81 bp, Homo sapiens
cccacccatggtaggcgatccacagagcctgtggctcccccagagcagctctcagaggctgcactaaaggccatggaagag

SEQ ID NO: 15719 - DNA, 83 bp, Homo sapiens
atggtaggcgatccacagagcctgtggctcccccagagcagctctcagaggctgcactaaaggccatggaagaggcagtggcc

SEQ ID NO: 15720 - DNA, 83 bp, Homo sapiens
cagagcctgtggctcccccagagcagctctcagaggctgcactaaaggccatggaagaggcagtggcccaagtactcgagcaa

SEQ ID NO: 15721 - DNA, 83 bp, Homo sapiens
tgtggctcccccagagcagctctcagaggctgcactaaaggccatggaagaggcagtggcccaagtactcgagcaagaccaga

SEQ ID NO: 15722 - DNA, 82 bp, Homo sapiens
tctcagaggctgcactaaaggccatggaagaggcagtggcccaagtactcgagcaagaccagaggcacctgctggaatccaa

SEQ ID NO: 15723 - DNA, 78 bp, Homo sapiens
actaaaggccatggaagaggcagtggcccaagtactcgagcaagaccagaggcacctgctggaatccaagcaagagaa

SEQ ID NO: 15724 - DNA, 83 bp, Homo sapiens
aagtactcgagcaagaccagaggcacctgctggaatccaagcaagagaagatgcagcaactgcgggagaagctgtgccaagag

SEQ ID NO: 15725 - DNA, 85 bp, Homo sapiens
tcgagcaagaccagaggcacctgctggaatccaagcaagagaagatgcagcaactgcgggagaagctgtgccaagaggaggaaga

SEQ ID NO: 15726 - DNA, 83 bp, Homo sapiens
agaggcacctgctggaatccaagcaagagaagatgcagcaactgcgggagaagctgtgccaagaggaggaagaggagatcctc

SEQ ID NO: 15727 - DNA, 82 bp, Homo sapiens
tggaatccaagcaagagaagatgcagcaactgcgggagaagctgtgccaagaggaggaagaggagatcctccggcttcacca

SEQ ID NO: 15728 - DNA, 81 bp, Homo sapiens
aagcaagagaagatgcagcaactgcgggagaagctgtgccaagaggaggaagaggagatcctccggcttcaccagcagaaa

SEQ ID NO: 15729 - DNA, 82 bp, Homo sapiens
aagatgcagcaactgcgggagaagctgtgccaagaggaggaagaggagatcctccggcttcaccagcagaaagagcaatctc

SEQ ID NO: 15730 - DNA, 79 bp, Homo sapiens
aactgcgggagaagctgtgccaagaggaggaagaggagatcctccggcttcaccagcagaaagagcaatctctcaggtc

SEQ ID NO: 15731 - DNA, 79 bp, Homo sapiens
agaagctgtgccaagaggaggaagaggagatcctccggcttcaccagcagaaagagcaatctctcaggtcctgcccttc

SEQ ID NO: 15732 - DNA, 77 bp, Homo sapiens
aggaggaagaggagatcctccggcttcaccagcagaaagagcaatctctcaggtcctgcccttccccttaggcatgc

SEQ ID NO: 15733 - DNA, 77 bp, Homo sapiens
aagaggagatcctccggcttcaccagcagaaagagcaatctctcaggtcctgcccttccccttaggcatgcttcctg

SEQ ID NO: 15734 - DNA, 73 bp, Homo sapiens
agacctttgtggtttctctgacaacctagcctttcctttccatctcagttccttgagggagcggctgcagaaa

SEQ ID NO: 15735 - DNA, 77 bp, Homo sapiens
tgtggtttctctgacaacctagcctttcctttccatctcagttccttgagggagcggctgcagaaagccattgagga

SEQ ID NO: 15736 - DNA, 76 bp, Homo sapiens
ctgacaacctagcctttcctttccatctcagttccttgagggagcggctgcagaaagccattgaggaggaggaggc

SEQ ID NO: 15737 - DNA, 77 bp, Homo sapiens
tttcctttccatctcagttccttgagggagcggctgcagaaagccattgaggaggaggaggcccggatgagagagga

SEQ ID NO: 15738 - DNA, 78 bp, Homo sapiens
ttccatctcagttccttgagggagcggctgcagaaagccattgaggaggaggaggcccggatgagagaggaggaaagc

SEQ ID NO: 15739 - DNA, 78 bp, Homo sapiens
ttccttgagggagcggctgcagaaagccattgaggaggaggaggcccggatgagagaggaggaaagccagaggctatc

SEQ ID NO: 15740 - DNA, 80 bp, Homo sapiens
cggctgcagaaagccattgaggaggaggaggcccggatgagagaggaggaaagccagaggctatcctggctccgagctca

SEQ ID NO: 15741 - DNA, 77 bp, Homo sapiens
aaagccattgaggaggaggaggcccggatgagagaggaggaaagccagaggctatcctggctccgagctcaggtcca

SEQ ID NO: 15742 - DNA, 81 bp, Homo sapiens
gaggaggaggcccggatgagagaggaggaaagccagaggctatcctggctccgagctcaggtccagtccagcacacaagca

SEQ ID NO: 15743 - DNA, 82 bp, Homo sapiens
aggcccggatgagagaggaggaaagccagaggctatcctggctccgagctcaggtccagtccagcacacaagcagatgagga

SEQ ID NO: 15744 - DNA, 81 bp, Homo sapiens
agaggaggaaagccagaggctatcctggctccgagctcaggtccagtccagcacacaagcagatgaggaccaaatcaggta

SEQ ID NO: 15745 - DNA, 80 bp, Homo sapiens
aggaaagccagaggctatcctggctccgagctcaggtccagtccagcacacaagcagatgaggaccaaatcaggtaagtg

SEQ ID NO: 15746 - DNA, 81 bp, Homo sapiens
aggctatcctggctccgagctcaggtccagtccagcacacaagcagatgaggaccaaatcaggtaagtgtgtgcttacctg

SEQ ID NO: 15747 - DNA, 83 bp, Homo sapiens
ctccgagctcaggtccagtccagcacacaagcagatgaggaccaaatcaggtaagtgtgtgcttacctgtgagctgcccagcc

SEQ ID NO: 15748 - DNA, 74 bp, Homo sapiens
accccagggtgcacaggcccgttaccattccactgtgtccacccagggctgagcaagaggcttccctgcagaaa

SEQ ID NO: 15749 - DNA, 78 bp, Homo sapiens
tgcacaggcccgttaccattccactgtgtccacccagggctgagcaagaggcttccctgcagaaactgagagaagagt

SEQ ID NO: 15750 - DNA, 78 bp, Homo sapiens
gttaccattccactgtgtccacccagggctgagcaagaggcttccctgcagaaactgagagaagagttggagtctcaa

SEQ ID NO: 15751 - DNA, 78 bp, Homo sapiens
attccactgtgtccacccagggctgagcaagaggcttccctgcagaaactgagagaagagttggagtctcaacagaag

SEQ ID NO: 15752 - DNA, 80 bp, Homo sapiens
tccacccagggctgagcaagaggcttccctgcagaaactgagagaagagttggagtctcaacagaaggctgagagggcca

SEQ ID NO: 15753 - DNA, 81 bp, Homo sapiens
tgagcaagaggcttccctgcagaaactgagagaagagttggagtctcaacagaaggctgagagggccagcttggaacagaa

SEQ ID NO: 15754 - DNA, 76 bp, Homo sapiens
cttccctgcagaaactgagagaagagttggagtctcaacagaaggctgagagggccagcttggaacagaaaaatag

SEQ ID NO: 15755 - DNA, 77 bp, Homo sapiens
agaaactgagagaagagttggagtctcaacagaaggctgagagggccagcttggaacagaaaaataggcaaatgctg

SEQ ID NO: 15756 - DNA, 80 bp, Homo sapiens
agagaagagttggagtctcaacagaaggctgagagggccagcttggaacagaaaaataggcaaatgctggagcagctcaa

SEQ ID NO: 15757 - DNA, 81 bp, Homo sapiens
ttggagtctcaacagaaggctgagagggccagcttggaacagaaaaataggcaaatgctggagcagctcaaggaagagata

SEQ ID NO: 15758 - DNA, 79 bp, Homo sapiens
aacagaaggctgagagggccagcttggaacagaaaaataggcaaatgctggagcagctcaaggaagagatagaggcttc

SEQ ID NO: 15759 - DNA, 79 bp, Homo sapiens
agagggccagcttggaacagaaaaataggcaaatgctggagcagctcaaggaagagatagaggcttcggagaagagcga

SEQ ID NO: 15760 - DNA, 82 bp, Homo sapiens
tggaacagaaaaataggcaaatgctggagcagctcaaggaagagatagaggcttcggagaagagcgagcaggctgccctgaa

SEQ ID NO: 15761 - DNA, 83 bp, Homo sapiens
aaaataggcaaatgctggagcagctcaaggaagagatagaggcttcggagaagagcgagcaggctgccctgaatgctgcaaag

SEQ ID NO: 15762 - DNA, 84 bp, Homo sapiens
aaatgctggagcagctcaaggaagagatagaggcttcggagaagagcgagcaggctgccctgaatgctgcaaaggagaaggctc

SEQ ID NO: 15763 - DNA, 88 bp, Homo sapiens
agcagctcaaggaagagatagaggcttcggagaagagcgagcaggctgccctgaatgctgcaaaggagaaggctctgcagcagctgag

SEQ ID NO: 15764 - DNA, 86 bp, Homo sapiens
aaggaagagatagaggcttcggagaagagcgagcaggctgccctgaatgctgcaaaggagaaggctctgcagcagctgagggagca

SEQ ID NO: 15765 - DNA, 86 bp, Homo sapiens
tagaggcttcggagaagagcgagcaggctgccctgaatgctgcaaaggagaaggctctgcagcagctgagggagcagctggaaggg

SEQ ID NO: 15766 - DNA, 84 bp, Homo sapiens
aagagcgagcaggctgccctgaatgctgcaaaggagaaggctctgcagcagctgagggagcagctggaaggggagaggaaagaa

SEQ ID NO: 15767 - DNA, 85 bp, Homo sapiens
ggctgccctgaatgctgcaaaggagaaggctctgcagcagctgagggagcagctggaaggggagaggaaagaagtgagctagtca

SEQ ID NO: 15768 - DNA, 81 bp, Homo sapiens
aatgctgcaaaggagaaggctctgcagcagctgagggagcagctggaaggggagaggaaagaagtgagctagtcaagtggg

SEQ ID NO: 15769 - DNA, 77 bp, Homo sapiens
aaaggagaaggctctgcagcagctgagggagcagctggaaggggagaggaaagaagtgagctagtcaagtggggacc

SEQ ID NO: 15770 - DNA, 80 bp, Homo sapiens
tcccaccatgatcagtacctggccagcttcactcacagtccctttgctcctccccaggctgtggcaacgctggagaagga

SEQ ID NO: 15771 - DNA, 82 bp, Homo sapiens
atgatcagtacctggccagcttcactcacagtccctttgctcctccccaggctgtggcaacgctggagaaggagcacagtgc

SEQ ID NO: 15772 - DNA, 83 bp, Homo sapiens
tacctggccagcttcactcacagtccctttgctcctccccaggctgtggcaacgctggagaaggagcacagtgctgagctgga

SEQ ID NO: 15773 - DNA, 84 bp, Homo sapiens
actcacagtccctttgctcctccccaggctgtggcaacgctggagaaggagcacagtgctgagctggagcggctctgctcctca

SEQ ID NO: 15774 - DNA, 83 bp, Homo sapiens
agtccctttgctcctccccaggctgtggcaacgctggagaaggagcacagtgctgagctggagcggctctgctcctcattgga

SEQ ID NO: 15775 - DNA, 84 bp, Homo sapiens
tccccaggctgtggcaacgctggagaaggagcacagtgctgagctggagcggctctgctcctcattggaggccaagcaccggga

SEQ ID NO: 15776 - DNA, 86 bp, Homo sapiens
tgtggcaacgctggagaaggagcacagtgctgagctggagcggctctgctcctcattggaggccaagcaccgggaggtaagatgca

SEQ ID NO: 15777 - DNA, 85 bp, Homo sapiens
aacgctggagaaggagcacagtgctgagctggagcggctctgctcctcattggaggccaagcaccgggaggtaagatgcagcatc

SEQ ID NO: 15778 - DNA, 83 bp, Homo sapiens
aaggagcacagtgctgagctggagcggctctgctcctcattggaggccaagcaccgggaggtaagatgcagcatcctgggccc

SEQ ID NO: 15779 - DNA, 83 bp, Homo sapiens
tgagctggagcggctctgctcctcattggaggccaagcaccgggaggtaagatgcagcatcctgggcccccttcatggctgat

SEQ ID NO: 15780 - DNA, 81 bp, Homo sapiens
ggctctgctcctcattggaggccaagcaccgggaggtaagatgcagcatcctgggcccccttcatggctgattagcagaat

SEQ ID NO: 15781 - DNA, 78 bp, Homo sapiens
tacagtctgtctgagggtcacactcccctgtgtgtgcgggggcctcctcaggtggtctccagcctccagaagaagata

SEQ ID NO: 15782 - DNA, 77 bp, Homo sapiens
ggtcacactcccctgtgtgtgcgggggcctcctcaggtggtctccagcctccagaagaagatacaggaagctcaaca

SEQ ID NO: 15783 - DNA, 76 bp, Homo sapiens
ccctgtgtgtgcgggggcctcctcaggtggtctccagcctccagaagaagatacaggaagctcaacagaaagagga

SEQ ID NO: 15784 - DNA, 77 bp, Homo sapiens
tgtgtgcgggggcctcctcaggtggtctccagcctccagaagaagatacaggaagctcaacagaaagaggaggccca

SEQ ID NO: 15785 - DNA, 80 bp, Homo sapiens
tcctcaggtggtctccagcctccagaagaagatacaggaagctcaacagaaagaggaggcccagctgcagaagtgccttg

SEQ ID NO: 15786 - DNA, 80 bp, Homo sapiens
gtctccagcctccagaagaagatacaggaagctcaacagaaagaggaggcccagctgcagaagtgccttgggcaagtgga

SEQ ID NO: 15787 - DNA, 82 bp, Homo sapiens
tccagaagaagatacaggaagctcaacagaaagaggaggcccagctgcagaagtgccttgggcaagtggagcacagagttca

SEQ ID NO: 15788 - DNA, 80 bp, Homo sapiens
atacaggaagctcaacagaaagaggaggcccagctgcagaagtgccttgggcaagtggagcacagagttcaccagaagtc

SEQ ID NO: 15789 - DNA, 80 bp, Homo sapiens
aagctcaacagaaagaggaggcccagctgcagaagtgccttgggcaagtggagcacagagttcaccagaagtcttatcac

SEQ ID NO: 15790 - DNA, 79 bp, Homo sapiens
aagaggaggcccagctgcagaagtgccttgggcaagtggagcacagagttcaccagaagtcttatcacgtggctgggta

SEQ ID NO: 15791 - DNA, 83 bp, Homo sapiens
cagctgcagaagtgccttgggcaagtggagcacagagttcaccagaagtcttatcacgtggctgggtatgagcacgaggtgag

SEQ ID NO: 15792 - DNA, 82 bp, Homo sapiens
agaagtgccttgggcaagtggagcacagagttcaccagaagtcttatcacgtggctgggtatgagcacgaggtgagtgctgc

SEQ ID NO: 15793 - DNA, 83 bp, Homo sapiens
cttgggcaagtggagcacagagttcaccagaagtcttatcacgtggctgggtatgagcacgaggtgagtgctgctctgtcttc

SEQ ID NO: 15794 - DNA, 86 bp, Homo sapiens
tggagcacagagttcaccagaagtcttatcacgtggctgggtatgagcacgaggtgagtgctgctctgtcttccacagtcgtgtgc

SEQ ID NO: 15795 - DNA, 82 bp, Homo sapiens
agttcaccagaagtcttatcacgtggctgggtatgagcacgaggtgagtgctgctctgtcttccacagtcgtgtgcgcctgt

SEQ ID NO: 15796 - DNA, 84 bp, Homo sapiens
tggtccgcctcggttcttcatgccacatccctgccatctcccctgcagctcagcagtctcctgcgagagaagcgccaggaagtg

SEQ ID NO: 15797 - DNA, 82 bp, Homo sapiens
cctcggttcttcatgccacatccctgccatctcccctgcagctcagcagtctcctgcgagagaagcgccaggaagtggaagg

SEQ ID NO: 15798 - DNA, 85 bp, Homo sapiens
atgccacatccctgccatctcccctgcagctcagcagtctcctgcgagagaagcgccaggaagtggaaggggagcatgagaggag

SEQ ID NO: 15799 - DNA, 84 bp, Homo sapiens
tgccatctcccctgcagctcagcagtctcctgcgagagaagcgccaggaagtggaaggggagcatgagaggaggttggacaaga

SEQ ID NO: 15800 - DNA, 83 bp, Homo sapiens
ctgcagctcagcagtctcctgcgagagaagcgccaggaagtggaaggggagcatgagaggaggttggacaagatgaaggagga

SEQ ID NO: 15801 - DNA, 80 bp, Homo sapiens
agcagtctcctgcgagagaagcgccaggaagtggaaggggagcatgagaggaggttggacaagatgaaggaggagcacca

SEQ ID NO: 15802 - DNA, 81 bp, Homo sapiens
tcctgcgagagaagcgccaggaagtggaaggggagcatgagaggaggttggacaagatgaaggaggagcaccagcaagtga

SEQ ID NO: 15803 - DNA, 79 bp, Homo sapiens
agaagcgccaggaagtggaaggggagcatgagaggaggttggacaagatgaaggaggagcaccagcaagtgatggctaa

SEQ ID NO: 15804 - DNA, 83 bp, Homo sapiens
tggaaggggagcatgagaggaggttggacaagatgaaggaggagcaccagcaagtgatggctaaggccagagagcagtatgaa

SEQ ID NO: 15805 - DNA, 85 bp, Homo sapiens
agcatgagaggaggttggacaagatgaaggaggagcaccagcaagtgatggctaaggccagagagcagtatgaagctgaggtagc

SEQ ID NO: 15806 - DNA, 85 bp, Homo sapiens
aggttggacaagatgaaggaggagcaccagcaagtgatggctaaggccagagagcagtatgaagctgaggtagctcagccacatc

SEQ ID NO: 15807 - DNA, 90 bp, Homo sapiens
agatgaaggaggagcaccagcaagtgatggctaaggccagagagcagtatgaagctgaggtagctcagccacatcccctgcgcgcatgca

SEQ ID NO: 15808 - DNA, 89 bp, Homo sapiens
aaggaggagcaccagcaagtgatggctaaggccagagagcagtatgaagctgaggtagctcagccacatcccctgcgcgcatgcacaca

SEQ ID NO: 15809 - DNA, 76 bp, Homo sapiens
tagaaggggctgccgcagcttcccaccggtgggcccaccctccttgcaggagaggaagcagcgggctgagcttctg

SEQ ID NO: 15810 - DNA, 75 bp, Homo sapiens
ccgcagcttcccaccggtgggcccaccctccttgcaggagaggaagcagcgggctgagcttctggggcacctgac

SEQ ID NO: 15811 - DNA, 74 bp, Homo sapiens
ttcccaccggtgggcccaccctccttgcaggagaggaagcagcgggctgagcttctggggcacctgaccggaga

SEQ ID NO: 15812 - DNA, 79 bp, Homo sapiens
cccaccctccttgcaggagaggaagcagcgggctgagcttctggggcacctgaccggagagctggagcgcctgcagagg

SEQ ID NO: 15813 - DNA, 83 bp, Homo sapiens
ttgcaggagaggaagcagcgggctgagcttctggggcacctgaccggagagctggagcgcctgcagagggcccatgaacgaga

SEQ ID NO: 15814 - DNA, 80 bp, Homo sapiens
aggaagcagcgggctgagcttctggggcacctgaccggagagctggagcgcctgcagagggcccatgaacgagaactgga

SEQ ID NO: 15815 - DNA, 81 bp, Homo sapiens
agcgggctgagcttctggggcacctgaccggagagctggagcgcctgcagagggcccatgaacgagaactggagactgtga

SEQ ID NO: 15816 - DNA, 82 bp, Homo sapiens
ttctggggcacctgaccggagagctggagcgcctgcagagggcccatgaacgagaactggagactgtgaggcaggagcaaca

SEQ ID NO: 15817 - DNA, 83 bp, Homo sapiens
tgaccggagagctggagcgcctgcagagggcccatgaacgagaactggagactgtgaggcaggagcaacacaagcgtcttgag

SEQ ID NO: 15818 - DNA, 83 bp, Homo sapiens
agagctggagcgcctgcagagggcccatgaacgagaactggagactgtgaggcaggagcaacacaagcgtcttgaggacttgc

SEQ ID NO: 15819 - DNA, 82 bp, Homo sapiens
ctgcagagggcccatgaacgagaactggagactgtgaggcaggagcaacacaagcgtcttgaggacttgcggcgccggcaca

SEQ ID NO: 15820 - DNA, 78 bp, Homo sapiens
agggcccatgaacgagaactggagactgtgaggcaggagcaacacaagcgtcttgaggacttgcggcgccggcacagg

SEQ ID NO: 15821 - DNA, 79 bp, Homo sapiens
aacgagaactggagactgtgaggcaggagcaacacaagcgtcttgaggacttgcggcgccggcacagggagcaggtgag

SEQ ID NO: 15822 - DNA, 79 bp, Homo sapiens
tggagactgtgaggcaggagcaacacaagcgtcttgaggacttgcggcgccggcacagggagcaggtgaggggcctggg

SEQ ID NO: 15823 - DNA, 77 bp, Homo sapiens
aggcaggagcaacacaagcgtcttgaggacttgcggcgccggcacagggagcaggtgaggggcctggggcagggtga

SEQ ID NO: 15824 - DNA, 77 bp, Homo sapiens
acacaagcgtcttgaggacttgcggcgccggcacagggagcaggtgaggggcctggggcagggtgagcccactgtga

SEQ ID NO: 15825 - DNA, 75 bp, Homo sapiens
ctcagctaatgccttacactctttctatgcttatgtgtttccctttctgggcaggaaaggaagctccaggattta

SEQ ID NO: 15826 - DNA, 73 bp, Homo sapiens
taatgccttacactctttctatgcttatgtgtttccctttctgggcaggaaaggaagctccaggatttagagt

SEQ ID NO: 15827 - DNA, 72 bp, Homo sapiens
tctttctatgcttatgtgtttccctttctgggcaggaaaggaagctccaggatttagagttggaccttgaaa

SEQ ID NO: 15828 - DNA, 71 bp, Homo sapiens
ttatgtgtttccctttctgggcaggaaaggaagctccaggatttagagttggaccttgaaaccagagctaa

SEQ ID NO: 15829 - DNA, 72 bp, Homo sapiens
ttccctttctgggcaggaaaggaagctccaggatttagagttggaccttgaaaccagagctaaagatgtcaa

SEQ ID NO: 15830 - DNA, 77 bp, Homo sapiens
gcaggaaaggaagctccaggatttagagttggaccttgaaaccagagctaaagatgtcaaggccagattggctctgc

SEQ ID NO: 15831 - DNA, 76 bp, Homo sapiens
aaaggaagctccaggatttagagttggaccttgaaaccagagctaaagatgtcaaggccagattggctctgctgga

SEQ ID NO: 15832 - DNA, 76 bp, Homo sapiens
aggatttagagttggaccttgaaaccagagctaaagatgtcaaggccagattggctctgctggaggtccaggtgag

SEQ ID NO: 15833 - DNA, 79 bp, Homo sapiens
agttggaccttgaaaccagagctaaagatgtcaaggccagattggctctgctggaggtccaggtgagggatctgcagga

SEQ ID NO: 15834 - DNA, 80 bp, Homo sapiens
ttgaaaccagagctaaagatgtcaaggccagattggctctgctggaggtccaggtgagggatctgcaggagtccttgacc

SEQ ID NO: 15835 - DNA, 83 bp, Homo sapiens
taaagatgtcaaggccagattggctctgctggaggtccaggtgagggatctgcaggagtccttgacctcagagtcatagcttc

SEQ ID NO: 15836 - DNA, 76 bp, Homo sapiens
aggctctgcccctcagacctggggtctgcagtcagccagaaaatcctgtctcttccctgcaaggaggagaccgccc

SEQ ID NO: 15837 - DNA, 75 bp, Homo sapiens
ctcagacctggggtctgcagtcagccagaaaatcctgtctcttccctgcaaggaggagaccgcccggagggagaa

SEQ ID NO: 15838 - DNA, 80 bp, Homo sapiens
gggtctgcagtcagccagaaaatcctgtctcttccctgcaaggaggagaccgcccggagggagaagcagcagctgcttga

SEQ ID NO: 15839 - DNA, 81 bp, Homo sapiens
agtcagccagaaaatcctgtctcttccctgcaaggaggagaccgcccggagggagaagcagcagctgcttgatgtgcagag

SEQ ID NO: 15840 - DNA, 79 bp, Homo sapiens
agaaaatcctgtctcttccctgcaaggaggagaccgcccggagggagaagcagcagctgcttgatgtgcagaggcaggt

SEQ ID NO: 15841 - DNA, 85 bp, Homo sapiens
tgtctcttccctgcaaggaggagaccgcccggagggagaagcagcagctgcttgatgtgcagaggcaggttgctctgaagagtga

SEQ ID NO: 15842 - DNA, 81 bp, Homo sapiens
aaggaggagaccgcccggagggagaagcagcagctgcttgatgtgcagaggcaggttgctctgaagagtgaggtttgtctc

SEQ ID NO: 15843 - DNA, 79 bp, Homo sapiens
accgcccggagggagaagcagcagctgcttgatgtgcagaggcaggttgctctgaagagtgaggtttgtctccctgttt

SEQ ID NO: 15844 - DNA, 82 bp, Homo sapiens
gagaagcagcagctgcttgatgtgcagaggcaggttgctctgaagagtgaggtttgtctccctgttttgtcctccctcctgt

SEQ ID NO: 15845 - DNA, 80 bp, Homo sapiens
agcagctgcttgatgtgcagaggcaggttgctctgaagagtgaggtttgtctccctgttttgtcctccctcctgttcttc

SEQ ID NO: 15846 - DNA, 75 bp, Homo sapiens
atgtgcagaggcaggttgctctgaagagtgaggtttgtctccctgttttgtcctccctcctgttcttcctccatt

SEQ ID NO: 15847 - DNA, 72 bp, Homo sapiens
agaggcaggttgctctgaagagtgaggtttgtctccctgttttgtcctccctcctgttcttcctccatttcc

SEQ ID NO: 15848 - DNA, 81 bp, Homo sapiens
ttctctctgtgctgtctctgggtgcttctatctttccttttgcccctaggaagccacagccacccatcagcagctggagga

SEQ ID NO: 15849 - DNA, 79 bp, Homo sapiens
ctgtctctgggtgcttctatctttccttttgcccctaggaagccacagccacccatcagcagctggaggaggcacagaa

SEQ ID NO: 15850 - DNA, 80 bp, Homo sapiens
tgggtgcttctatctttccttttgcccctaggaagccacagccacccatcagcagctggaggaggcacagaaggagcaca

SEQ ID NO: 15851 - DNA, 78 bp, Homo sapiens
tatctttccttttgcccctaggaagccacagccacccatcagcagctggaggaggcacagaaggagcacacccacctg

SEQ ID NO: 15852 - DNA, 82 bp, Homo sapiens
ccctaggaagccacagccacccatcagcagctggaggaggcacagaaggagcacacccacctgttgcagtcaaaccagcagc

SEQ ID NO: 15853 - DNA, 82 bp, Homo sapiens
ccacagccacccatcagcagctggaggaggcacagaaggagcacacccacctgttgcagtcaaaccagcagctccgagaaat

SEQ ID NO: 15854 - DNA, 83 bp, Homo sapiens
acccatcagcagctggaggaggcacagaaggagcacacccacctgttgcagtcaaaccagcagctccgagaaattcttgatga

SEQ ID NO: 15855 - DNA, 83 bp, Homo sapiens
agctggaggaggcacagaaggagcacacccacctgttgcagtcaaaccagcagctccgagaaattcttgatgagctgcaggcc

SEQ ID NO: 15856 - DNA, 84 bp, Homo sapiens
cacagaaggagcacacccacctgttgcagtcaaaccagcagctccgagaaattcttgatgagctgcaggcccgcaagctgaagc

SEQ ID NO: 15857 - DNA, 83 bp, Homo sapiens
aaggagcacacccacctgttgcagtcaaaccagcagctccgagaaattcttgatgagctgcaggcccgcaagctgaagctgga

SEQ ID NO: 15858 - DNA, 82 bp, Homo sapiens
acctgttgcagtcaaaccagcagctccgagaaattcttgatgagctgcaggcccgcaagctgaagctggagtcccaagtgga

SEQ ID NO: 15859 - DNA, 85 bp, Homo sapiens
agtcaaaccagcagctccgagaaattcttgatgagctgcaggcccgcaagctgaagctggagtcccaagtggatctgctgcaggc

SEQ ID NO: 15860 - DNA, 89 bp, Homo sapiens
agcagctccgagaaattcttgatgagctgcaggcccgcaagctgaagctggagtcccaagtggatctgctgcaggctcagagccagcaa

SEQ ID NO: 15861 - DNA, 88 bp, Homo sapiens
agaaattcttgatgagctgcaggcccgcaagctgaagctggagtcccaagtggatctgctgcaggctcagagccagcaactgcagaaa

SEQ ID NO: 15862 - DNA, 88 bp, Homo sapiens
atgagctgcaggcccgcaagctgaagctggagtcccaagtggatctgctgcaggctcagagccagcaactgcagaaacacttcaggtg

SEQ ID NO: 15863 - DNA, 84 bp, Homo sapiens
aggcccgcaagctgaagctggagtcccaagtggatctgctgcaggctcagagccagcaactgcagaaacacttcaggtggcgtg

SEQ ID NO: 15864 - DNA, 83 bp, Homo sapiens
aagctggagtcccaagtggatctgctgcaggctcagagccagcaactgcagaaacacttcaggtggcgtgggcaccctgcact

SEQ ID NO: 15865 - DNA, 82 bp, Homo sapiens
agtcccaagtggatctgctgcaggctcagagccagcaactgcagaaacacttcaggtggcgtgggcaccctgcacttagccc

SEQ ID NO: 15866 - DNA, 87 bp, Homo sapiens
gtggatctgctgcaggctcagagccagcaactgcagaaacacttcaggtggcgtgggcaccctgcacttagccctgctggctgcctc

SEQ ID NO: 15867 - DNA, 84 bp, Homo sapiens
catcgccagccgctgccctgcctctcactcatctttccttccacagcagcctggaggctgaagctcaaaagaagcagcacctgt

SEQ ID NO: 15868 - DNA, 83 bp, Homo sapiens
cgctgccctgcctctcactcatctttccttccacagcagcctggaggctgaagctcaaaagaagcagcacctgttgagagaag

SEQ ID NO: 15869 - DNA, 83 bp, Homo sapiens
cctctcactcatctttccttccacagcagcctggaggctgaagctcaaaagaagcagcacctgttgagagaagtgacagttga

SEQ ID NO: 15870 - DNA, 79 bp, Homo sapiens
atctttccttccacagcagcctggaggctgaagctcaaaagaagcagcacctgttgagagaagtgacagttgaggaaaa

SEQ ID NO: 15871 - DNA, 81 bp, Homo sapiens
tccttccacagcagcctggaggctgaagctcaaaagaagcagcacctgttgagagaagtgacagttgaggaaaataatgct

SEQ ID NO: 15872 - DNA, 77 bp, Homo sapiens
ctggaggctgaagctcaaaagaagcagcacctgttgagagaagtgacagttgaggaaaataatgcttccccacattt

SEQ ID NO: 15873 - DNA, 78 bp, Homo sapiens
aagctcaaaagaagcagcacctgttgagagaagtgacagttgaggaaaataatgcttccccacattttgagccagatc

SEQ ID NO: 15874 - DNA, 78 bp, Homo sapiens
aaagaagcagcacctgttgagagaagtgacagttgaggaaaataatgcttccccacattttgagccagatctccatat

SEQ ID NO: 15875 - DNA, 78 bp, Homo sapiens
acctgttgagagaagtgacagttgaggaaaataatgcttccccacattttgagccagatctccatattgaggacctga

SEQ ID NO: 15876 - DNA, 77 bp, Homo sapiens
agagaagtgacagttgaggaaaataatgcttccccacattttgagccagatctccatattgaggacctgaggaaatc

SEQ ID NO: 15877 - DNA, 74 bp, Homo sapiens
agttgaggaaaataatgcttccccacattttgagccagatctccatattgaggacctgaggaaatcccttggaa

SEQ ID NO: 15878 - DNA, 76 bp, Homo sapiens
aaaataatgcttccccacattttgagccagatctccatattgaggacctgaggaaatcccttggaacagtgagctg

SEQ ID NO: 15879 - DNA, 75 bp, Homo sapiens
ttccccacattttgagccagatctccatattgaggacctgaggaaatcccttggaacagtgagctgggggctggg

SEQ ID NO: 15880 - DNA, 75 bp, Homo sapiens
tttgagccagatctccatattgaggacctgaggaaatcccttggaacagtgagctgggggctggggcctgggggc

SEQ ID NO: 15881 - DNA, 73 bp, Homo sapiens
atctccatattgaggacctgaggaaatcccttggaacagtgagctgggggctggggcctgggggctggggcac

SEQ ID NO: 15882 - DNA, 76 bp, Homo sapiens
gtcttgaacctgcagggtgtctgcttttgctacactcagtggacttttctaccatgtgtccctagaaccagaccaa

SEQ ID NO: 15883 - DNA, 74 bp, Homo sapiens
aacctgcagggtgtctgcttttgctacactcagtggacttttctaccatgtgtccctagaaccagaccaaagag

SEQ ID NO: 15884 - DNA, 76 bp, Homo sapiens
tctgcttttgctacactcagtggacttttctaccatgtgtccctagaaccagaccaaagaggtgtcttcttctctc

SEQ ID NO: 15885 - DNA, 75 bp, Homo sapiens
tttgctacactcagtggacttttctaccatgtgtccctagaaccagaccaaagaggtgtcttcttctctctccca

SEQ ID NO: 15886 - DNA, 73 bp, Homo sapiens
agtggacttttctaccatgtgtccctagaaccagaccaaagaggtgtcttcttctctctcccagagcaaggag

SEQ ID NO: 15887 - DNA, 74 bp, Homo sapiens
ttctaccatgtgtccctagaaccagaccaaagaggtgtcttcttctctctcccagagcaaggaggacttatact

SEQ ID NO: 15888 - DNA, 73 bp, Homo sapiens
cctagaaccagaccaaagaggtgtcttcttctctctcccagagcaaggaggacttatacttggacaggtgagt

SEQ ID NO: 15889 - DNA, 74 bp, Homo sapiens
accagaccaaagaggtgtcttcttctctctcccagagcaaggaggacttatacttggacaggtgagttcccata

SEQ ID NO: 15890 - DNA, 74 bp, Homo sapiens
aggtgtcttcttctctctcccagagcaaggaggacttatacttggacaggtgagttcccatagcctgtcttatt

SEQ ID NO: 15891 - DNA, 75 bp, Homo sapiens
ttcttctctctcccagagcaaggaggacttatacttggacaggtgagttcccatagcctgtcttatttgaggtta

SEQ ID NO: 15892 - DNA, 73 bp, Homo sapiens
agagcaaggaggacttatacttggacaggtgagttcccatagcctgtcttatttgaggttagggtaccatgaa

SEQ ID NO: 15893 - DNA, 70 bp, Homo sapiens
aggaggacttatacttggacaggtgagttcccatagcctgtcttatttgaggttagggtaccatgaaggg

SEQ ID NO: 15894 - DNA, 76 bp, Homo sapiens
agagttcttagaggcttctgttttccttcttcaactctcctgctccagcctgtcctcccacaatgtctggcacctc

SEQ ID NO: 15895 - DNA, 80 bp, Homo sapiens
ttagaggcttctgttttccttcttcaactctcctgctccagcctgtcctcccacaatgtctggcacctcctctctgctga

SEQ ID NO: 15896 - DNA, 77 bp, Homo sapiens
ctgttttccttcttcaactctcctgctccagcctgtcctcccacaatgtctggcacctcctctctgctgagggggta

SEQ ID NO: 15897 - DNA, 78 bp, Homo sapiens
tcttcaactctcctgctccagcctgtcctcccacaatgtctggcacctcctctctgctgagggggtagccctccgtag

SEQ ID NO: 15898 - DNA, 78 bp, Homo sapiens
tgctccagcctgtcctcccacaatgtctggcacctcctctctgctgagggggtagccctccgtagtgccaaggagttc

SEQ ID NO: 15899 - DNA, 79 bp, Homo sapiens
tcctcccacaatgtctggcacctcctctctgctgagggggtagccctccgtagtgccaaggagttccttgtgcagcaga

SEQ ID NO: 15900 - DNA, 79 bp, Homo sapiens
aatgtctggcacctcctctctgctgagggggtagccctccgtagtgccaaggagttccttgtgcagcagacacgctcca

SEQ ID NO: 15901 - DNA, 78 bp, Homo sapiens
acctcctctctgctgagggggtagccctccgtagtgccaaggagttccttgtgcagcagacacgctccatgcggaggc

SEQ ID NO: 15902 - DNA, 83 bp, Homo sapiens
tgctgagggggtagccctccgtagtgccaaggagttccttgtgcagcagacacgctccatgcggaggcggcagacagctctga

SEQ ID NO: 15903 - DNA, 82 bp, Homo sapiens
gggtagccctccgtagtgccaaggagttccttgtgcagcagacacgctccatgcggaggcggcagacagctctgaaagctgc

SEQ ID NO: 15904 - DNA, 86 bp, Homo sapiens
ctccgtagtgccaaggagttccttgtgcagcagacacgctccatgcggaggcggcagacagctctgaaagctgcccagcagcattg

SEQ ID NO: 15905 - DNA, 89 bp, Homo sapiens
aaggagttccttgtgcagcagacacgctccatgcggaggcggcagacagctctgaaagctgcccagcagcattggcgccatgagctggc

SEQ ID NO: 15906 - DNA, 93 bp, Homo sapiens
ttgtgcagcagacacgctccatgcggaggcggcagacagctctgaaagctgcccagcagcattggcgccatgagctggccagtgcgcaggagg

SEQ ID NO: 15907 - DNA, 88 bp, Homo sapiens
acgctccatgcggaggcggcagacagctctgaaagctgcccagcagcattggcgccatgagctggccagtgcgcaggaggtggccaaa

SEQ ID NO: 15908 - DNA, 87 bp, Homo sapiens
atgcggaggcggcagacagctctgaaagctgcccagcagcattggcgccatgagctggccagtgcgcaggaggtggccaaagaccca

SEQ ID NO: 15909 - DNA, 86 bp, Homo sapiens
agacagctctgaaagctgcccagcagcattggcgccatgagctggccagtgcgcaggaggtggccaaagacccaccaggcatcaag

SEQ ID NO: 15910 - DNA, 86 bp, Homo sapiens
cagcagcattggcgccatgagctggccagtgcgcaggaggtggccaaagacccaccaggcatcaaggccctggaagatatgcgcaa

SEQ ID NO: 15911 - DNA, 82 bp, Homo sapiens
attggcgccatgagctggccagtgcgcaggaggtggccaaagacccaccaggcatcaaggccctggaagatatgcgcaagaa

SEQ ID NO: 15912 - DNA, 81 bp, Homo sapiens
atgagctggccagtgcgcaggaggtggccaaagacccaccaggcatcaaggccctggaagatatgcgcaagaacctggaga

SEQ ID NO: 15913 - DNA, 77 bp, Homo sapiens
agtgcgcaggaggtggccaaagacccaccaggcatcaaggccctggaagatatgcgcaagaacctggagaaggtcag

SEQ ID NO: 15914 - DNA, 76 bp, Homo sapiens
tggccaaagacccaccaggcatcaaggccctggaagatatgcgcaagaacctggagaaggtcaggagctttgggaa

SEQ ID NO: 15915 - DNA, 73 bp, Homo sapiens
aaagacccaccaggcatcaaggccctggaagatatgcgcaagaacctggagaaggtcaggagctttgggaagg

SEQ ID NO: 15916 - DNA, 76 bp, Homo sapiens
atcaaggccctggaagatatgcgcaagaacctggagaaggtcaggagctttgggaagggcctgccagccctgtgtg

SEQ ID NO: 15917 - DNA, 79 bp, Homo sapiens
agcgtctgtgtgggtagtcatttctcctctgttttctccttggctgcaggagaccaggcacctggatgagatgaagtcg

SEQ ID NO: 15918 - DNA, 79 bp, Homo sapiens
gtagtcatttctcctctgttttctccttggctgcaggagaccaggcacctggatgagatgaagtcggccatgcggaaag

SEQ ID NO: 15919 - DNA, 79 bp, Homo sapiens
tttctcctctgttttctccttggctgcaggagaccaggcacctggatgagatgaagtcggccatgcggaaaggccacaa

SEQ ID NO: 15920 - DNA, 80 bp, Homo sapiens
ttttctccttggctgcaggagaccaggcacctggatgagatgaagtcggccatgcggaaaggccacaacctgctgaagaa

SEQ ID NO: 15921 - DNA, 80 bp, Homo sapiens
cttggctgcaggagaccaggcacctggatgagatgaagtcggccatgcggaaaggccacaacctgctgaagaagaaagag

SEQ ID NO: 15922 - DNA, 80 bp, Homo sapiens
accaggcacctggatgagatgaagtcggccatgcggaaaggccacaacctgctgaagaagaaagaggagaagctgaatca

SEQ ID NO: 15923 - DNA, 79 bp, Homo sapiens
acctggatgagatgaagtcggccatgcggaaaggccacaacctgctgaagaagaaagaggagaagctgaatcagttgga

SEQ ID NO: 15924 - DNA, 75 bp, Homo sapiens
aagtcggccatgcggaaaggccacaacctgctgaagaagaaagaggagaagctgaatcagttggagtcctctctt

SEQ ID NO: 15925 - DNA, 75 bp, Homo sapiens
atgcggaaaggccacaacctgctgaagaagaaagaggagaagctgaatcagttggagtcctctctttgggaagag

SEQ ID NO: 15926 - DNA, 76 bp, Homo sapiens
aaaggccacaacctgctgaagaagaaagaggagaagctgaatcagttggagtcctctctttgggaagaggtgcagc

SEQ ID NO: 15927 - DNA, 78 bp, Homo sapiens
ctgaagaagaaagaggagaagctgaatcagttggagtcctctctttgggaagaggtgcagccccatgtccacatagtc

SEQ ID NO: 15928 - DNA, 77 bp, Homo sapiens
aagaaagaggagaagctgaatcagttggagtcctctctttgggaagaggtgcagccccatgtccacatagtccagtg

SEQ ID NO: 15929 - DNA, 81 bp, Homo sapiens
agggtggtgggggtctgtgtggacctgatggcactgttgtctctgtctcaggcatttgggacatatgctgagccttgcctc

SEQ ID NO: 15930 - DNA, 81 bp, Homo sapiens
gggtctgtgtggacctgatggcactgttgtctctgtctcaggcatttgggacatatgctgagccttgcctccctcccaccc

SEQ ID NO: 15931 - DNA, 88 bp, Homo sapiens
tgatggcactgttgtctctgtctcaggcatttgggacatatgctgagccttgcctccctcccaccctgctgtgaggcagcctgtgtga

SEQ ID NO: 15932 - DNA, 83 bp, Homo sapiens
actgttgtctctgtctcaggcatttgggacatatgctgagccttgcctccctcccaccctgctgtgaggcagcctgtgtgatt

SEQ ID NO: 15933 - DNA, 85 bp, Homo sapiens
tctgtctcaggcatttgggacatatgctgagccttgcctccctcccaccctgctgtgaggcagcctgtgtgatttgcttcgccca

SEQ ID NO: 15934 - DNA, 79 bp, Homo sapiens
atttgggacatatgctgagccttgcctccctcccaccctgctgtgaggcagcctgtgtgatttgcttcgcccagggtac

SEQ ID NO: 15935 - DNA, 79 bp, Homo sapiens
atatgctgagccttgcctccctcccaccctgctgtgaggcagcctgtgtgatttgcttcgcccagggtacctggtggaa

SEQ ID NO: 15936 - DNA, 76 bp, Homo sapiens
ttgcctccctcccaccctgctgtgaggcagcctgtgtgatttgcttcgcccagggtacctggtggaactctgggcc

SEQ ID NO: 15937 - DNA, 76 bp, Homo sapiens
ctcccaccctgctgtgaggcagcctgtgtgatttgcttcgcccagggtacctggtggaactctgggccccagagga

SEQ ID NO: 15938 - DNA, 77 bp, Homo sapiens
tgtgaggcagcctgtgtgatttgcttcgcccagggtacctggtggaactctgggccccagaggagtctactcaccaa

SEQ ID NO: 15939 - DNA, 74 bp, Homo sapiens
ctgtgtgatttgcttcgcccagggtacctggtggaactctgggccccagaggagtctactcaccaagtcctcag

SEQ ID NO: 15940 - DNA, 71 bp, Homo sapiens
atttgcttcgcccagggtacctggtggaactctgggccccagaggagtctactcaccaagtcctcagttcc

SEQ ID NO: 15941 - DNA, 72 bp, Homo sapiens
agggtacctggtggaactctgggccccagaggagtctactcaccaagtcctcagttcccacacatcacaagg

SEQ ID NO: 15942 - DNA, 77 bp, Homo sapiens
gtggaactctgggccccagaggagtctactcaccaagtcctcagttcccacacatcacaagggcgacagcctacata

SEQ ID NO: 15943 - DNA, 77 bp, Homo sapiens
tgggccccagaggagtctactcaccaagtcctcagttcccacacatcacaagggcgacagcctacataccaccttga

SEQ ID NO: 15944 - DNA, 76 bp, Homo sapiens
agaggagtctactcaccaagtcctcagttcccacacatcacaagggcgacagcctacataccaccttgaatttgta

SEQ ID NO: 15945 - DNA, 76 bp, Homo sapiens
tactcaccaagtcctcagttcccacacatcacaagggcgacagcctacataccaccttgaatttgtagcaacaaaa

SEQ ID NO: 15946 - DNA, 77 bp, Homo sapiens
tcagttcccacacatcacaagggcgacagcctacataccaccttgaatttgtagcaacaaaattgctaggagaacaa

SEQ ID NO: 15947 - DNA, 77 bp, Homo sapiens
acacatcacaagggcgacagcctacataccaccttgaatttgtagcaacaaaattgctaggagaacaaatggagatg

SEQ ID NO: 15948 - DNA, 75 bp, Homo sapiens
aagggcgacagcctacataccaccttgaatttgtagcaacaaaattgctaggagaacaaatggagatggccatat

SEQ ID NO: 15949 - DNA, 76 bp, Homo sapiens
agcctacataccaccttgaatttgtagcaacaaaattgctaggagaacaaatggagatggccatatttcatggatt

SEQ ID NO: 15950 - DNA, 75 bp, Homo sapiens
ccttgaatttgtagcaacaaaattgctaggagaacaaatggagatggccatatttcatggatttgcgtaagaaaa

SEQ ID NO: 15951 - DNA, 76 bp, Homo sapiens
tgtagcaacaaaattgctaggagaacaaatggagatggccatatttcatggatttgcgtaagaaaaccagcttaaa

SEQ ID NO: 15952 - DNA, 73 bp, Homo sapiens
aaattgctaggagaacaaatggagatggccatatttcatggatttgcgtaagaaaaccagcttaaagacaaaa

SEQ ID NO: 15953 - DNA, 74 bp, Homo sapiens
taggagaacaaatggagatggccatatttcatggatttgcgtaagaaaaccagcttaaagacaaaacataaaga

SEQ ID NO: 15954 - DNA, 77 bp, Homo sapiens
tagaaagcacgtgggagaggtgggtcataactgctgactttaccccacaggcctcagatgagggcactctgggagga

SEQ ID NO: 15955 - DNA, 76 bp, Homo sapiens
gagaggtgggtcataactgctgactttaccccacaggcctcagatgagggcactctgggaggatcccccaccaaga

SEQ ID NO: 15956 - DNA, 76 bp, Homo sapiens
gtcataactgctgactttaccccacaggcctcagatgagggcactctgggaggatcccccaccaagaaggcagtaa

SEQ ID NO: 15957 - DNA, 73 bp, Homo sapiens
tgactttaccccacaggcctcagatgagggcactctgggaggatcccccaccaagaaggcagtaaccttcgac

SEQ ID NO: 15958 - DNA, 77 bp, Homo sapiens
ccacaggcctcagatgagggcactctgggaggatcccccaccaagaaggcagtaaccttcgacctcagtgacatgga

SEQ ID NO: 15959 - DNA, 78 bp, Homo sapiens
cctcagatgagggcactctgggaggatcccccaccaagaaggcagtaaccttcgacctcagtgacatggacagcctga

SEQ ID NO: 15960 - DNA, 76 bp, Homo sapiens
cactctgggaggatcccccaccaagaaggcagtaaccttcgacctcagtgacatggacagcctgagcagtgaaagt

SEQ ID NO: 15961 - DNA, 76 bp, Homo sapiens
aggatcccccaccaagaaggcagtaaccttcgacctcagtgacatggacagcctgagcagtgaaagttctgaatct

SEQ ID NO: 15962 - DNA, 75 bp, Homo sapiens
cccaccaagaaggcagtaaccttcgacctcagtgacatggacagcctgagcagtgaaagttctgaatctttttcc

SEQ ID NO: 15963 - DNA, 75 bp, Homo sapiens
aaggcagtaaccttcgacctcagtgacatggacagcctgagcagtgaaagttctgaatctttttccccgcctcac

SEQ ID NO: 15964 - DNA, 76 bp, Homo sapiens
ccttcgacctcagtgacatggacagcctgagcagtgaaagttctgaatctttttccccgcctcaccgtgagtggtg

SEQ ID NO: 15965 - DNA, 79 bp, Homo sapiens
agtgacatggacagcctgagcagtgaaagttctgaatctttttccccgcctcaccgtgagtggtggcggcagcagagga

SEQ ID NO: 15966 - DNA, 77 bp, Homo sapiens
acagcctgagcagtgaaagttctgaatctttttccccgcctcaccgtgagtggtggcggcagcagaggagtgagtgg

SEQ ID NO: 15967 - DNA, 75 bp, Homo sapiens
agtgaaagttctgaatctttttccccgcctcaccgtgagtggtggcggcagcagaggagtgagtgggggagatgc

SEQ ID NO: 15968 - DNA, 75 bp, Homo sapiens
ttctgaatctttttccccgcctcaccgtgagtggtggcggcagcagaggagtgagtgggggagatgcggggtgag

SEQ ID NO: 15969 - DNA, 71 bp, Homo sapiens
agggtcctgagcttgagtcccttcccaccatccacctcttttctttcagtcgactcaaccccgagtctcac

SEQ ID NO: 15970 - DNA, 72 bp, Homo sapiens
ttgagtcccttcccaccatccacctcttttctttcagtcgactcaaccccgagtctcacctcccgcaagatc

SEQ ID NO: 15971 - DNA, 72 bp, Homo sapiens
tcccaccatccacctcttttctttcagtcgactcaaccccgagtctcacctcccgcaagatccacgggctta

SEQ ID NO: 15972 - DNA, 70 bp, Homo sapiens
acctcttttctttcagtcgactcaaccccgagtctcacctcccgcaagatccacgggcttagccactccc

SEQ ID NO: 15973 - DNA, 72 bp, Homo sapiens
ttttctttcagtcgactcaaccccgagtctcacctcccgcaagatccacgggcttagccactccctccggca

SEQ ID NO: 15974 - DNA, 79 bp, Homo sapiens
gtcgactcaaccccgagtctcacctcccgcaagatccacgggcttagccactccctccggcagatcagcagccagctga

SEQ ID NO: 15975 - DNA, 84 bp, Homo sapiens
agtctcacctcccgcaagatccacgggcttagccactccctccggcagatcagcagccagctgagcagtgtcctcagcatcctg

SEQ ID NO: 15976 - DNA, 86 bp, Homo sapiens
tcccgcaagatccacgggcttagccactccctccggcagatcagcagccagctgagcagtgtcctcagcatcctggacagcctcaa

SEQ ID NO: 15977 - DNA, 83 bp, Homo sapiens
aagatccacgggcttagccactccctccggcagatcagcagccagctgagcagtgtcctcagcatcctggacagcctcaaccc

SEQ ID NO: 15978 - DNA, 85 bp, Homo sapiens
ggcttagccactccctccggcagatcagcagccagctgagcagtgtcctcagcatcctggacagcctcaaccctcagtcgccgcc

SEQ ID NO: 15979 - DNA, 85 bp, Homo sapiens
ctccctccggcagatcagcagccagctgagcagtgtcctcagcatcctggacagcctcaaccctcagtcgccgccgccgctcctc

SEQ ID NO: 15980 - DNA, 88 bp, Homo sapiens
agatcagcagccagctgagcagtgtcctcagcatcctggacagcctcaaccctcagtcgccgccgccgctcctcgcctccatgccagc

SEQ ID NO: 15981 - DNA, 84 bp, Homo sapiens
agctgagcagtgtcctcagcatcctggacagcctcaaccctcagtcgccgccgccgctcctcgcctccatgccagcccagctcc

SEQ ID NO: 15982 - DNA, 80 bp, Homo sapiens
agtgtcctcagcatcctggacagcctcaaccctcagtcgccgccgccgctcctcgcctccatgccagcccagctccctcc

SEQ ID NO: 15983 - DNA, 77 bp, Homo sapiens
agcatcctggacagcctcaaccctcagtcgccgccgccgctcctcgcctccatgccagcccagctccctccccggga

SEQ ID NO: 15984 - DNA, 73 bp, Homo sapiens
agcctcaaccctcagtcgccgccgccgctcctcgcctccatgccagcccagctccctccccgggaccctaaga

SEQ ID NO: 15985 - DNA, 72 bp, Homo sapiens
ccctcagtcgccgccgccgctcctcgcctccatgccagcccagctccctccccgggaccctaagagcacccc

SEQ ID NO: 15986 - DNA, 70 bp, Homo sapiens
ccgccgccgctcctcgcctccatgccagcccagctccctccccgggaccctaagagcacccccaccccca

SEQ ID NO: 15987 - DNA, 71 bp, Homo sapiens
tcctcgcctccatgccagcccagctccctccccgggaccctaagagcacccccacccccacctactatggc

SEQ ID NO: 15988 - DNA, 70 bp, Homo sapiens
atgccagcccagctccctccccgggaccctaagagcacccccacccccacctactatggctccctggcca

SEQ ID NO: 15989 - DNA, 68 bp, Homo sapiens
agctccctccccgggaccctaagagcacccccacccccacctactatggctccctggccaggttctca

SEQ ID NO: 15990 - DNA, 74 bp, Homo sapiens
ggaccctaagagcacccccacccccacctactatggctccctggccaggttctcagccttatcatctgctacac

SEQ ID NO: 15991 - DNA, 75 bp, Homo sapiens
taagagcacccccacccccacctactatggctccctggccaggttctcagccttatcatctgctacacccacgtc

SEQ ID NO: 15992 - DNA, 75 bp, Homo sapiens
ccccacctactatggctccctggccaggttctcagccttatcatctgctacacccacgtccacccaatgggcctg

SEQ ID NO: 15993 - DNA, 77 bp, Homo sapiens
cctactatggctccctggccaggttctcagccttatcatctgctacacccacgtccacccaatgggcctgggattca

SEQ ID NO: 15994 - DNA, 75 bp, Homo sapiens
ctccctggccaggttctcagccttatcatctgctacacccacgtccacccaatgggcctgggattcagggcaggg

SEQ ID NO: 15995 - DNA, 75 bp, Homo sapiens
aggttctcagccttatcatctgctacacccacgtccacccaatgggcctgggattcagggcaggggcccaggctc

SEQ ID NO: 15996 - DNA, 75 bp, Homo sapiens
ttatcatctgctacacccacgtccacccaatgggcctgggattcagggcaggggcccaggctcccctcctctgtg

SEQ ID NO: 15997 - DNA, 74 bp, Homo sapiens
tgctacacccacgtccacccaatgggcctgggattcagggcaggggcccaggctcccctcctctgtggctcaaa

SEQ ID NO: 15998 - DNA, 71 bp, Homo sapiens
cacccaatgggcctgggattcagggcaggggcccaggctcccctcctctgtggctcaaacggtggacgact

SEQ ID NO: 15999 - DNA, 73 bp, Homo sapiens
gcctgggattcagggcaggggcccaggctcccctcctctgtggctcaaacggtggacgacttcctgttggaga

SEQ ID NO: 16000 - DNA, 72 bp, Homo sapiens
attcagggcaggggcccaggctcccctcctctgtggctcaaacggtggacgacttcctgttggagaagtggc

SEQ ID NO: 16001 - DNA, 72 bp, Homo sapiens
ccctcctctgtggctcaaacggtggacgacttcctgttggagaagtggcgcaagtattttccatgtaagccc

SEQ ID NO: 16002 - DNA, 74 bp, Homo sapiens
tctgtggctcaaacggtggacgacttcctgttggagaagtggcgcaagtattttccatgtaagccccactctgg

SEQ ID NO: 16003 - DNA, 71 bp, Homo sapiens
aaacggtggacgacttcctgttggagaagtggcgcaagtattttccatgtaagccccactctgggcggagc

SEQ ID NO: 16004 - DNA, 71 bp, Homo sapiens
ttttcttctaccctctttctcctgctccttttctcctcttcctcttttgcatccctttgccacacctctcc

SEQ ID NO: 16005 - DNA, 72 bp, Homo sapiens
tgctccttttctcctcttcctcttttgcatccctttgccacacctctcctcccccaacgttaccatagtcca

SEQ ID NO: 16006 - DNA, 73 bp, Homo sapiens
tcctcttcctcttttgcatccctttgccacacctctcctcccccaacgttaccatagtccattggtccattga

SEQ ID NO: 16007 - DNA, 73 bp, Homo sapiens
ttcctcttttgcatccctttgccacacctctcctcccccaacgttaccatagtccattggtccattgactcta

SEQ ID NO: 16008 - DNA, 71 bp, Homo sapiens
atccctttgccacacctctcctcccccaacgttaccatagtccattggtccattgactctacctgtgggtc

SEQ ID NO: 16009 - DNA, 69 bp, Homo sapiens
acacctctcctcccccaacgttaccatagtccattggtccattgactctacctgtgggtccctggggaa

SEQ ID NO: 16010 - DNA, 71 bp, Homo sapiens
ccccaacgttaccatagtccattggtccattgactctacctgtgggtccctggggaaggagacattgcagg

SEQ ID NO: 16011 - DNA, 72 bp, Homo sapiens
acgttaccatagtccattggtccattgactctacctgtgggtccctggggaaggagacattgcaggtggccc

SEQ ID NO: 16012 - DNA, 76 bp, Homo sapiens
attggtccattgactctacctgtgggtccctggggaaggagacattgcaggtggccctgcagccaggagttctatg

SEQ ID NO: 16013 - DNA, 74 bp, Homo sapiens
attgactctacctgtgggtccctggggaaggagacattgcaggtggccctgcagccaggagttctatgggttgg

SEQ ID NO: 16014 - DNA, 73 bp, Homo sapiens
tgtgggtccctggggaaggagacattgcaggtggccctgcagccaggagttctatgggttgggacggtttaga

SEQ ID NO: 16015 - DNA, 74 bp, Homo sapiens
cctggggaaggagacattgcaggtggccctgcagccaggagttctatgggttgggacggtttagatggagcctg

SEQ ID NO: 16016 - DNA, 76 bp, Homo sapiens
aaggagacattgcaggtggccctgcagccaggagttctatgggttgggacggtttagatggagcctggctgactgg

SEQ ID NO: 16017 - DNA, 74 bp, Homo sapiens
gtggccctgcagccaggagttctatgggttgggacggtttagatggagcctggctgactggggcctttattgtg

SEQ ID NO: 16018 - DNA, 74 bp, Homo sapiens
cctgcagccaggagttctatgggttgggacggtttagatggagcctggctgactggggcctttattgtggattc

SEQ ID NO: 16019 - DNA, 73 bp, Homo sapiens
agccaggagttctatgggttgggacggtttagatggagcctggctgactggggcctttattgtggattctgga

SEQ ID NO: 16020 - DNA, 73 bp, Homo sapiens
ttgggacggtttagatggagcctggctgactggggcctttattgtggattctggagctcagtagaacctaaaa

SEQ ID NO: 16021 - DNA, 74 bp, Homo sapiens
ggtttagatggagcctggctgactggggcctttattgtggattctggagctcagtagaacctaaaaggtcattg

SEQ ID NO: 16022 - DNA, 75 bp, Homo sapiens
tttagatggagcctggctgactggggcctttattgtggattctggagctcagtagaacctaaaaggtcattgtcg

SEQ ID NO: 16023 - DNA, 76 bp, Homo sapiens
gagcctggctgactggggcctttattgtggattctggagctcagtagaacctaaaaggtcattgtcgtcattatct

SEQ ID NO: 16024 - DNA, 75 bp, Homo sapiens
ctggctgactggggcctttattgtggattctggagctcagtagaacctaaaaggtcattgtcgtcattatcttaa

SEQ ID NO: 16025 - DNA, 80 bp, Homo sapiens
attctggagctcagtagaacctaaaaggtcattgtcgtcattatcttaatagctaccatcttgtgcaatacatgatgggc

SEQ ID NO: 16026 - DNA, 79 bp, Homo sapiens
tcagtagaacctaaaaggtcattgtcgtcattatcttaatagctaccatcttgtgcaatacatgatgggccaagcagtt

SEQ ID NO: 16027 - DNA, 78 bp, Homo sapiens
aacctaaaaggtcattgtcgtcattatcttaatagctaccatcttgtgcaatacatgatgggccaagcagtttatata

SEQ ID NO: 16028 - DNA, 80 bp, Homo sapiens
aggtcattgtcgtcattatcttaatagctaccatcttgtgcaatacatgatgggccaagcagtttatatatattttttca

SEQ ID NO: 16029 - DNA, 74 bp, Homo sapiens
tgaggaaactgagtttcagagagtttaagtagtatgctccagggtacccagtgagtgagtaacaaactcagttg

SEQ ID NO: 16030 - DNA, 73 bp, Homo sapiens
aaactgagtttcagagagtttaagtagtatgctccagggtacccagtgagtgagtaacaaactcagttgtgac

SEQ ID NO: 16031 - DNA, 75 bp, Homo sapiens
agagtttaagtagtatgctccagggtacccagtgagtgagtaacaaactcagttgtgaccccatgtctctgtgac

SEQ ID NO: 16032 - DNA, 77 bp, Homo sapiens
taagtagtatgctccagggtacccagtgagtgagtaacaaactcagttgtgaccccatgtctctgtgactccaggat

SEQ ID NO: 16033 - DNA, 75 bp, Homo sapiens
agggtacccagtgagtgagtaacaaactcagttgtgaccccatgtctctgtgactccaggattctgcttggaacc

SEQ ID NO: 16034 - DNA, 79 bp, Homo sapiens
agtgagtgagtaacaaactcagttgtgaccccatgtctctgtgactccaggattctgcttggaacctcttggctgtgtg

SEQ ID NO: 16035 - DNA, 78 bp, Homo sapiens
taacaaactcagttgtgaccccatgtctctgtgactccaggattctgcttggaacctcttggctgtgtggctaattct

SEQ ID NO: 16036 - DNA, 81 bp, Homo sapiens
actcagttgtgaccccatgtctctgtgactccaggattctgcttggaacctcttggctgtgtggctaattcttgcttctga

SEQ ID NO: 16037 - DNA, 81 bp, Homo sapiens
cccatgtctctgtgactccaggattctgcttggaacctcttggctgtgtggctaattcttgcttctgagccaggtggcctc

SEQ ID NO: 16038 - DNA, 80 bp, Homo sapiens
tgactccaggattctgcttggaacctcttggctgtgtggctaattcttgcttctgagccaggtggcctccccaggtctca

SEQ ID NO: 16039 - DNA, 77 bp, Homo sapiens
aggattctgcttggaacctcttggctgtgtggctaattcttgcttctgagccaggtggcctccccaggtctcagccc

SEQ ID NO: 16040 - DNA, 80 bp, Homo sapiens
gaacctcttggctgtgtggctaattcttgcttctgagccaggtggcctccccaggtctcagccctgctgaggattatgaa

SEQ ID NO: 16041 - DNA, 80 bp, Homo sapiens
gctgtgtggctaattcttgcttctgagccaggtggcctccccaggtctcagccctgctgaggattatgaaaagccataaa

SEQ ID NO: 16042 - DNA, 78 bp, Homo sapiens
tggctaattcttgcttctgagccaggtggcctccccaggtctcagccctgctgaggattatgaaaagccataaaacaa

SEQ ID NO: 16043 - DNA, 78 bp, Homo sapiens
ttgcttctgagccaggtggcctccccaggtctcagccctgctgaggattatgaaaagccataaaacaaggcatttgag

SEQ ID NO: 16044 - DNA, 73 bp, Homo sapiens
aggtggcctccccaggtctcagccctgctgaggattatgaaaagccataaaacaaggcatttgaggggaaaca

SEQ ID NO: 16045 - DNA, 73 bp, Homo sapiens
ccaggtctcagccctgctgaggattatgaaaagccataaaacaaggcatttgaggggaaacaaaatatcttct

SEQ ID NO: 16046 - DNA, 71 bp, Homo sapiens
agccctgctgaggattatgaaaagccataaaacaaggcatttgaggggaaacaaaatatcttctttttgcc

SEQ ID NO: 16047 - DNA, 67 bp, Homo sapiens
gaaaagccataaaacaaggcatttgaggggaaacaaaatatcttctttttgccctaacccaaattga

SEQ ID NO: 16048 - DNA, 66 bp, Homo sapiens
aacaaggcatttgaggggaaacaaaatatcttctttttgccctaacccaaattgaaaagtagatta

SEQ ID NO: 16049 - DNA, 65 bp, Homo sapiens
gcatttgaggggaaacaaaatatcttctttttgccctaacccaaattgaaaagtagattaagttt

SEQ ID NO: 16050 - DNA, 63 bp, Homo sapiens
ggaaacaaaatatcttctttttgccctaacccaaattgaaaagtagattaagttttaaaaata

SEQ ID NO: 16051 - DNA, 79 bp, Homo sapiens
aagaggtgctggtgggcagggtggtgaccactgcccatttctgagtcctgtccccatgctcttccagctggcatcccgc

SEQ ID NO: 16052 - DNA, 83 bp, Homo sapiens
tgggcagggtggtgaccactgcccatttctgagtcctgtccccatgctcttccagctggcatcccgctgctcagcaacagccc

SEQ ID NO: 16053 - DNA, 81 bp, Homo sapiens
ggtggtgaccactgcccatttctgagtcctgtccccatgctcttccagctggcatcccgctgctcagcaacagccccaccc

SEQ ID NO: 16054 - DNA, 83 bp, Homo sapiens
actgcccatttctgagtcctgtccccatgctcttccagctggcatcccgctgctcagcaacagccccaccccgctggagagca

SEQ ID NO: 16055 - DNA, 81 bp, Homo sapiens
agtcctgtccccatgctcttccagctggcatcccgctgctcagcaacagccccaccccgctggagagcaggctgggttaca

SEQ ID NO: 16056 - DNA, 85 bp, Homo sapiens
ccatgctcttccagctggcatcccgctgctcagcaacagccccaccccgctggagagcaggctgggttacatgtctgccaggtga

SEQ ID NO: 16057 - DNA, 84 bp, Homo sapiens
tcttccagctggcatcccgctgctcagcaacagccccaccccgctggagagcaggctgggttacatgtctgccaggtgagcctc

SEQ ID NO: 16058 - DNA, 80 bp, Homo sapiens
ggcatcccgctgctcagcaacagccccaccccgctggagagcaggctgggttacatgtctgccaggtgagcctccctggg

SEQ ID NO: 16059 - DNA, 75 bp, Homo sapiens
agcaacagccccaccccgctggagagcaggctgggttacatgtctgccaggtgagcctccctgggggctggttgg

SEQ ID NO: 16060 - DNA, 73 bp, Homo sapiens
cccaccccgctggagagcaggctgggttacatgtctgccaggtgagcctccctgggggctggttggggtggaa

SEQ ID NO: 16061 - DNA, 76 bp, Homo sapiens
ctggagagcaggctgggttacatgtctgccaggtgagcctccctgggggctggttggggtggaacgtcatagtcga

SEQ ID NO: 16062 - DNA, 79 bp, Homo sapiens
ttccgcgcctcctctctcccctcgccatgctctcctcttccttcccagtgagcagctccggctcctacagcactcccat

SEQ ID NO: 16063 - DNA, 81 bp, Homo sapiens
tctctcccctcgccatgctctcctcttccttcccagtgagcagctccggctcctacagcactcccattcgcaagtccctga

SEQ ID NO: 16064 - DNA, 81 bp, Homo sapiens
ctcgccatgctctcctcttccttcccagtgagcagctccggctcctacagcactcccattcgcaagtccctgaggcgggca

SEQ ID NO: 16065 - DNA, 78 bp, Homo sapiens
tcctcttccttcccagtgagcagctccggctcctacagcactcccattcgcaagtccctgaggcgggcagcaccacct

SEQ ID NO: 16066 - DNA, 80 bp, Homo sapiens
tcccagtgagcagctccggctcctacagcactcccattcgcaagtccctgaggcgggcagcaccacctttcagggcataa

SEQ ID NO: 16067 - DNA, 79 bp, Homo sapiens
cagctccggctcctacagcactcccattcgcaagtccctgaggcgggcagcaccacctttcagggcataattgaggcca

SEQ ID NO: 16068 - DNA, 76 bp, Homo sapiens
tcctacagcactcccattcgcaagtccctgaggcgggcagcaccacctttcagggcataattgaggccaaccggag

SEQ ID NO: 16069 - DNA, 74 bp, Homo sapiens
actcccattcgcaagtccctgaggcgggcagcaccacctttcagggcataattgaggccaaccggaggtggctg

SEQ ID NO: 16070 - DNA, 74 bp, Homo sapiens
caagtccctgaggcgggcagcaccacctttcagggcataattgaggccaaccggaggtggctggaacgtgtcaa

SEQ ID NO: 16071 - DNA, 73 bp, Homo sapiens
aggcgggcagcaccacctttcagggcataattgaggccaaccggaggtggctggaacgtgtcaagaatgaccc

SEQ ID NO: 16072 - DNA, 72 bp, Homo sapiens
caccacctttcagggcataattgaggccaaccggaggtggctggaacgtgtcaagaatgaccccaggttgta

SEQ ID NO: 16073 - DNA, 72 bp, Homo sapiens
ttcagggcataattgaggccaaccggaggtggctggaacgtgtcaagaatgaccccaggttgtatcctttta

SEQ ID NO: 16074 - DNA, 69 bp, Homo sapiens
ataattgaggccaaccggaggtggctggaacgtgtcaagaatgaccccaggttgtatccttttacctgg

SEQ ID NO: 16075 - DNA, 66 bp, Homo sapiens
aaccggaggtggctggaacgtgtcaagaatgaccccaggttgtatccttttacctggttcccaaac

SEQ ID NO: 16076 - DNA, 76 bp, Homo sapiens
cctggctatgcccagcgactgcagttttccttcaccttgtggccagacctctcttctcgtcaacacccaagccaaa

SEQ ID NO: 16077 - DNA, 74 bp, Homo sapiens
tgcagttttccttcaccttgtggccagacctctcttctcgtcaacacccaagccaaaagctactttgagcctcc

SEQ ID NO: 16078 - DNA, 81 bp, Homo sapiens
tggccagacctctcttctcgtcaacacccaagccaaaagctactttgagcctcctgcagctgggccttgatgagcacaaca

SEQ ID NO: 16079 - DNA, 80 bp, Homo sapiens
acctctcttctcgtcaacacccaagccaaaagctactttgagcctcctgcagctgggccttgatgagcacaacagagtga

SEQ ID NO: 16080 - DNA, 81 bp, Homo sapiens
tcaacacccaagccaaaagctactttgagcctcctgcagctgggccttgatgagcacaacagagtgaaggtgtatcgcttc

SEQ ID NO: 16081 - DNA, 82 bp, Homo sapiens
aagctactttgagcctcctgcagctgggccttgatgagcacaacagagtgaaggtgtatcgcttctgaggccctgagcaggg

SEQ ID NO: 16082 - DNA, 83 bp, Homo sapiens
ctcctgcagctgggccttgatgagcacaacagagtgaaggtgtatcgcttctgaggccctgagcaggggcttggggcagccca

SEQ ID NO: 16083 - DNA, 81 bp, Homo sapiens
agctgggccttgatgagcacaacagagtgaaggtgtatcgcttctgaggccctgagcaggggcttggggcagcccagcctc

SEQ ID NO: 16084 - DNA, 81 bp, Homo sapiens
ttgatgagcacaacagagtgaaggtgtatcgcttctgaggccctgagcaggggcttggggcagcccagcctctcctccacc

SEQ ID NO: 16085 - DNA, 77 bp, Homo sapiens
acagagtgaaggtgtatcgcttctgaggccctgagcaggggcttggggcagcccagcctctcctccacccagaccaa

SEQ ID NO: 16086 - DNA, 77 bp, Homo sapiens
aaggtgtatcgcttctgaggccctgagcaggggcttggggcagcccagcctctcctccacccagaccaagtgcctga

SEQ ID NO: 16087 - DNA, 79 bp, Homo sapiens
ttctgaggccctgagcaggggcttggggcagcccagcctctcctccacccagaccaagtgcctgaggagctgcctgcct

SEQ ID NO: 16088 - DNA, 80 bp, Homo sapiens
agcaggggcttggggcagcccagcctctcctccacccagaccaagtgcctgaggagctgcctgccttcttccatctgaga

SEQ ID NO: 16089 - DNA, 79 bp, Homo sapiens
ttggggcagcccagcctctcctccacccagaccaagtgcctgaggagctgcctgccttcttccatctgagaaagcaccc

SEQ ID NO: 16090 - DNA, 77 bp, Homo sapiens
ccagcctctcctccacccagaccaagtgcctgaggagctgcctgccttcttccatctgagaaagcaccctccttccc

SEQ ID NO: 16091 - DNA, 75 bp, Homo sapiens
tccacccagaccaagtgcctgaggagctgcctgccttcttccatctgagaaagcaccctccttccccctttgact

SEQ ID NO: 16092 - DNA, 77 bp, Homo sapiens
agaccaagtgcctgaggagctgcctgccttcttccatctgagaaagcaccctccttccccctttgacttgcaggagc

SEQ ID NO: 16093 - DNA, 77 bp, Homo sapiens
tgaggagctgcctgccttcttccatctgagaaagcaccctccttccccctttgacttgcaggagccaccagggacca

SEQ ID NO: 16094 - DNA, 73 bp, Homo sapiens
ctgcctgccttcttccatctgagaaagcaccctccttccccctttgacttgcaggagccaccagggaccaggg

SEQ ID NO: 16095 - DNA, 71 bp, Homo sapiens
ttcttccatctgagaaagcaccctccttccccctttgacttgcaggagccaccagggaccagggggttgag

SEQ ID NO: 16096 - DNA, 68 bp, Homo sapiens
aaagcaccctccttccccctttgacttgcaggagccaccagggaccagggggttgagtggaacagtaa

SEQ ID NO: 16097 - DNA, 71 bp, Homo sapiens
tccttccccctttgacttgcaggagccaccagggaccagggggttgagtggaacagtaaagccacacattc

SEQ ID NO: 16098 - DNA, 74 bp, Homo sapiens
aggagccaccagggaccagggggttgagtggaacagtaaagccacacattctgtgactatataacctatctcag

SEQ ID NO: 16099 - DNA, 73 bp, Homo sapiens
agggaccagggggttgagtggaacagtaaagccacacattctgtgactatataacctatctcaggctaaaatg

SEQ ID NO: 16100 - DNA, 78 bp, Homo sapiens
aacagtaaagccacacattctgtgactatataacctatctcaggctaaaatgtgtggactcgtacgagctcttgtcat

SEQ ID NO: 16101 - DNA, 82 bp, Homo sapiens
aagccacacattctgtgactatataacctatctcaggctaaaatgtgtggactcgtacgagctcttgtcattgacatggcaa

SEQ ID NO: 16102 - DNA, 83 bp, Homo sapiens
attctgtgactatataacctatctcaggctaaaatgtgtggactcgtacgagctcttgtcattgacatggcaagctgatggcg

SEQ ID NO: 16103 - DNA, 80 bp, Homo sapiens
aaaatgtgtggactcgtacgagctcttgtcattgacatggcaagctgatggcgtgcggtggctgcggggtatcagggccg

SEQ ID NO: 16104 - DNA, 78 bp, Homo sapiens
actcgtacgagctcttgtcattgacatggcaagctgatggcgtgcggtggctgcggggtatcagggccgggagccctt

SEQ ID NO: 16105 - DNA, 78 bp, Homo sapiens
agctcttgtcattgacatggcaagctgatggcgtgcggtggctgcggggtatcagggccgggagccctttgggaggaa

SEQ ID NO: 16106 - DNA, 75 bp, Homo sapiens
attgacatggcaagctgatggcgtgcggtggctgcggggtatcagggccgggagccctttgggaggaagggaggc

SEQ ID NO: 16107 - DNA, 71 bp, Homo sapiens
aagctgatggcgtgcggtggctgcggggtatcagggccgggagccctttgggaggaagggaggcgttagag

SEQ ID NO: 16108 - DNA, 69 bp, Homo sapiens
cggtggctgcggggtatcagggccgggagccctttgggaggaagggaggcgttagaggagctgccttcg

SEQ ID NO: 16109 - DNA, 71 bp, Homo sapiens
ctgcggggtatcagggccgggagccctttgggaggaagggaggcgttagaggagctgccttcggaggctca

SEQ ID NO: 16110 - DNA, 70 bp, Homo sapiens
atcagggccgggagccctttgggaggaagggaggcgttagaggagctgccttcggaggctcagggagtcc

SEQ ID NO: 16111 - DNA, 70 bp, Homo sapiens
cctttgggaggaagggaggcgttagaggagctgccttcggaggctcagggagtccctttggagctggttg

SEQ ID NO: 16112 - DNA, 70 bp, Homo sapiens
aggaagggaggcgttagaggagctgccttcggaggctcagggagtccctttggagctggttgtttccttg

SEQ ID NO: 16113 - DNA, 75 bp, Homo sapiens
aggcgttagaggagctgccttcggaggctcagggagtccctttggagctggttgtttccttggccctgcagcgca

SEQ ID NO: 16114 - DNA, 75 bp, Homo sapiens
aggagctgccttcggaggctcagggagtccctttggagctggttgtttccttggccctgcagcgcactgctcggg

SEQ ID NO: 16115 - DNA, 74 bp, Homo sapiens
ttcggaggctcagggagtccctttggagctggttgtttccttggccctgcagcgcactgctcggggctcccaag

SEQ ID NO: 16116 - DNA, 74 bp, Homo sapiens
agtccctttggagctggttgtttccttggccctgcagcgcactgctcggggctcccaaggaggttgtgtgtatg

SEQ ID NO: 16117 - DNA, 76 bp, Homo sapiens
gagctggttgtttccttggccctgcagcgcactgctcggggctcccaaggaggttgtgtgtatggttcttaattca

SEQ ID NO: 16118 - DNA, 76 bp, Homo sapiens
ttggccctgcagcgcactgctcggggctcccaaggaggttgtgtgtatggttcttaattcatcaggacaaagaccc

SEQ ID NO: 16119 - DNA, 75 bp, Homo sapiens
actgctcggggctcccaaggaggttgtgtgtatggttcttaattcatcaggacaaagacccccagcatgtgtgta

SEQ ID NO: 16120 - DNA, 74 bp, Homo sapiens
gctcccaaggaggttgtgtgtatggttcttaattcatcaggacaaagacccccagcatgtgtgtaccctgggac

SEQ ID NO: 16121 - DNA, 74 bp, Homo sapiens
tgtgtatggttcttaattcatcaggacaaagacccccagcatgtgtgtaccctgggacccgatttctctgggcc

SEQ ID NO: 16122 - DNA, 75 bp, Homo sapiens
ttcttaattcatcaggacaaagacccccagcatgtgtgtaccctgggacccgatttctctgggcccacatctatc

SEQ ID NO: 16123 - DNA, 78 bp, Homo sapiens
cccagcatgtgtgtaccctgggacccgatttctctgggcccacatctatctccaatacctcagcctcagatcagaccc

SEQ ID NO: 16124 - DNA, 75 bp, Homo sapiens
tgtgtaccctgggacccgatttctctgggcccacatctatctccaatacctcagcctcagatcagaccctttctt

SEQ ID NO: 16125 - DNA, 72 bp, Homo sapiens
ccctgggacccgatttctctgggcccacatctatctccaatacctcagcctcagatcagaccctttcttttt

SEQ ID NO: 16126 - DNA, 75 bp, Homo sapiens
tttctctgggcccacatctatctccaatacctcagcctcagatcagaccctttcttttttgtctttcttctctta

SEQ ID NO: 16127 - DNA, 72 bp, Homo sapiens
cacatctatctccaatacctcagcctcagatcagaccctttcttttttgtctttcttctcttaatttttaaa

SEQ ID NO: 16128 - DNA, 70 bp, Homo sapiens
tccaatacctcagcctcagatcagaccctttcttttttgtctttcttctcttaatttttaaatgcctctt

SEQ ID NO: 16129 - DNA, 70 bp, Homo sapiens
cctcagcctcagatcagaccctttcttttttgtctttcttctcttaatttttaaatgcctcttttcttga

SEQ ID NO: 16130 - DNA, 71 bp, Homo sapiens
cagatcagaccctttcttttttgtctttcttctcttaatttttaaatgcctcttttcttgagcattccatc

SEQ ID NO: 16131 - DNA, 76 bp, Homo sapiens
ttttaaatgcctcttttcttgagcattccatctctctttttgaccctctcaggactgggcttagctgtccagagcc

SEQ ID NO: 16132 - DNA, 76 bp, Homo sapiens
tcttttcttgagcattccatctctctttttgaccctctcaggactgggcttagctgtccagagccctgccggaggg

SEQ ID NO: 16133 - DNA, 75 bp, Homo sapiens
tctctctttttgaccctctcaggactgggcttagctgtccagagccctgccggagggtgctgggggctgtccctc

SEQ ID NO: 16134 - DNA, 77 bp, Homo sapiens
aggactgggcttagctgtccagagccctgccggagggtgctgggggctgtccctctgcaggcactgtgttttcctca

SEQ ID NO: 16135 - DNA, 76 bp, Homo sapiens
agagccctgccggagggtgctgggggctgtccctctgcaggcactgtgttttcctcaggggctgtcctcagaacac

SEQ ID NO: 16136 - DNA, 75 bp, Homo sapiens
agggtgctgggggctgtccctctgcaggcactgtgttttcctcaggggctgtcctcagaacacccctcctgctcc

SEQ ID NO: 16137 - DNA, 77 bp, Homo sapiens
ggctgtccctctgcaggcactgtgttttcctcaggggctgtcctcagaacacccctcctgctccctggggctcctca

SEQ ID NO: 16138 - DNA, 76 bp, Homo sapiens
tgcaggcactgtgttttcctcaggggctgtcctcagaacacccctcctgctccctggggctcctcagggagccatt

SEQ ID NO: 16139 - DNA, 76 bp, Homo sapiens
tgtgttttcctcaggggctgtcctcagaacacccctcctgctccctggggctcctcagggagccatttcagctgga

SEQ ID NO: 16140 - DNA, 79 bp, Homo sapiens
tcaggggctgtcctcagaacacccctcctgctccctggggctcctcagggagccatttcagctggagtctcaggtctca

SEQ ID NO: 16141 - DNA, 76 bp, Homo sapiens
tcctcagaacacccctcctgctccctggggctcctcagggagccatttcagctggagtctcaggtctcaaaaacaa

SEQ ID NO: 16142 - DNA, 73 bp, Homo sapiens
aacacccctcctgctccctggggctcctcagggagccatttcagctggagtctcaggtctcaaaaacaacttc

SEQ ID NO: 16143 - DNA, 74 bp, Homo sapiens
tccctggggctcctcagggagccatttcagctggagtctcaggtctcaaaaacaacttctccaggaggccaaaa

SEQ ID NO: 16144 - DNA, 73 bp, Homo sapiens
tcctcagggagccatttcagctggagtctcaggtctcaaaaacaacttctccaggaggccaaaaaaagactgg

SEQ ID NO: 16145 - DNA, 71 bp, Homo sapiens
agccatttcagctggagtctcaggtctcaaaaacaacttctccaggaggccaaaaaaagactgggttggct

SEQ ID NO: 16146 - DNA, 72 bp, Homo sapiens
ttcagctggagtctcaggtctcaaaaacaacttctccaggaggccaaaaaaagactgggttggcttctggtc

SEQ ID NO: 16147 - DNA, 70 bp, Homo sapiens
aggtctcaaaaacaacttctccaggaggccaaaaaaagactgggttggcttctggtcctcatgatggctt

SEQ ID NO: 16148 - DNA, 72 bp, Homo sapiens
tccaggaggccaaaaaaagactgggttggcttctggtcctcatgatggcttttatcctcctgggacactttg

SEQ ID NO: 16149 - DNA, 71 bp, Homo sapiens
aaaaaaagactgggttggcttctggtcctcatgatggcttttatcctcctgggacactttgggtatattca

SEQ ID NO: 16150 - DNA, 74 bp, Homo sapiens
actgggttggcttctggtcctcatgatggcttttatcctcctgggacactttgggtatattcatgggcattgtt

SEQ ID NO: 16151 - DNA, 76 bp, Homo sapiens
ttctggtcctcatgatggcttttatcctcctgggacactttgggtatattcatgggcattgtttccatctgtcttt

SEQ ID NO: 16152 - DNA, 76 bp, Homo sapiens
tcctcatgatggcttttatcctcctgggacactttgggtatattcatgggcattgtttccatctgtcttttctacc

SEQ ID NO: 16153 - DNA, 73 bp, Homo sapiens
ttttatcctcctgggacactttgggtatattcatgggcattgtttccatctgtcttttctacctgtgccaccc

SEQ ID NO: 16154 - DNA, 74 bp, Homo sapiens
actttgggtatattcatgggcattgtttccatctgtcttttctacctgtgccacccctgccctgattccacggc

SEQ ID NO: 16155 - DNA, 80 bp, Homo sapiens
tattcatgggcattgtttccatctgtcttttctacctgtgccacccctgccctgattccacggctgcctcaggcaggcag

SEQ ID NO: 16156 - DNA, 79 bp, Homo sapiens
ttgtttccatctgtcttttctacctgtgccacccctgccctgattccacggctgcctcaggcaggcaggcaaggagcta

SEQ ID NO: 16157 - DNA, 77 bp, Homo sapiens
atctgtcttttctacctgtgccacccctgccctgattccacggctgcctcaggcaggcaggcaaggagctaggccgg

SEQ ID NO: 16158 - DNA, 77 bp, Homo sapiens
tacctgtgccacccctgccctgattccacggctgcctcaggcaggcaggcaaggagctaggccggtgcccggccctg

SEQ ID NO: 16159 - DNA, 76 bp, Homo sapiens
acccctgccctgattccacggctgcctcaggcaggcaggcaaggagctaggccggtgcccggccctggcagcaagg

SEQ ID NO: 16160 - DNA, 79 bp, Homo sapiens
ctgattccacggctgcctcaggcaggcaggcaaggagctaggccggtgcccggccctggcagcaaggggtctttgtgca

SEQ ID NO: 16161 - DNA, 81 bp, Homo sapiens
tgcctcaggcaggcaggcaaggagctaggccggtgcccggccctggcagcaaggggtctttgtgcagttggagatgctgcc

SEQ ID NO: 16162 - DNA, 77 bp, Homo sapiens
aggcaggcaaggagctaggccggtgcccggccctggcagcaaggggtctttgtgcagttggagatgctgccgttgtg

SEQ ID NO: 16163 - DNA, 77 bp, Homo sapiens
aaggagctaggccggtgcccggccctggcagcaaggggtctttgtgcagttggagatgctgccgttgtggcagagcg

SEQ ID NO: 16164 - DNA, 79 bp, Homo sapiens
aggccggtgcccggccctggcagcaaggggtctttgtgcagttggagatgctgccgttgtggcagagcgtcctgcagcc

SEQ ID NO: 16165 - DNA, 84 bp, Homo sapiens
cctggcagcaaggggtctttgtgcagttggagatgctgccgttgtggcagagcgtcctgcagccccgcttccatcagcaggctc

SEQ ID NO: 16166 - DNA, 82 bp, Homo sapiens
agcaaggggtctttgtgcagttggagatgctgccgttgtggcagagcgtcctgcagccccgcttccatcagcaggctctggg

SEQ ID NO: 16167 - DNA, 81 bp, Homo sapiens
tttgtgcagttggagatgctgccgttgtggcagagcgtcctgcagccccgcttccatcagcaggctctggggtgggggctt

SEQ ID NO: 16168 - DNA, 80 bp, Homo sapiens
gttggagatgctgccgttgtggcagagcgtcctgcagccccgcttccatcagcaggctctggggtgggggctttgcaggg

SEQ ID NO: 16169 - DNA, 81 bp, Homo sapiens
gttgtggcagagcgtcctgcagccccgcttccatcagcaggctctggggtgggggctttgcaggggatgctctctgatgtt

SEQ ID NO: 16170 - DNA, 79 bp, Homo sapiens
agagcgtcctgcagccccgcttccatcagcaggctctggggtgggggctttgcaggggatgctctctgatgtttgttcc

SEQ ID NO: 16171 - DNA, 70 bp, Homo sapiens
ccccctccgcctccccgcccccctgtgttgtcgcctctccctctcgctgcttcacttcacggggcgaaca

SEQ ID NO: 16172 - DNA, 76 bp, Homo sapiens
ctccccgcccccctgtgttgtcgcctctccctctcgctgcttcacttcacggggcgaacatggcgcacagctgtcg

SEQ ID NO: 16173 - DNA, 78 bp, Homo sapiens
ccctgtgttgtcgcctctccctctcgctgcttcacttcacggggcgaacatggcgcacagctgtcggtggcgcttccc

SEQ ID NO: 16174 - DNA, 78 bp, Homo sapiens
tgttgtcgcctctccctctcgctgcttcacttcacggggcgaacatggcgcacagctgtcggtggcgcttccccgccc

SEQ ID NO: 16175 - DNA, 75 bp, Homo sapiens
ctctcgctgcttcacttcacggggcgaacatggcgcacagctgtcggtggcgcttccccgcccgacccgggacca

SEQ ID NO: 16176 - DNA, 72 bp, Homo sapiens
ctgcttcacttcacggggcgaacatggcgcacagctgtcggtggcgcttccccgcccgacccgggaccaccg

SEQ ID NO: 16177 - DNA, 69 bp, Homo sapiens
ttcacggggcgaacatggcgcacagctgtcggtggcgcttccccgcccgacccgggaccaccgggggcg

SEQ ID NO: 16178 - DNA, 65 bp, Homo sapiens
acagctgtcggtggcgcttccccgcccgacccgggaccaccgggggcggcggcggcggggggcgc

SEQ ID NO: 16179 - DNA, 63 bp, Homo sapiens
tggcgcttccccgcccgacccgggaccaccgggggcggcggcggcggggggcgccggggccta

SEQ ID NO: 16180 - DNA, 60 bp, Homo sapiens
cccgacccgggaccaccgggggcggcggcggcggggggcgccggggcctagggggcgccc

SEQ ID NO: 16181 - DNA, 64 bp, Homo sapiens
gaccaccgggggcggcggcggcggggggcgccggggcctagggggcgccccgcggcaacgcgtc

SEQ ID NO: 16182 - DNA, 67 bp, Homo sapiens
ggcggcggcggcggggggcgccggggcctagggggcgccccgcggcaacgcgtcccggccctgctgc

SEQ ID NO: 16183 - DNA, 66 bp, Homo sapiens
ggcggcggggggcgccggggcctagggggcgccccgcggcaacgcgtcccggccctgctgcttccc

SEQ ID NO: 16184 - DNA, 65 bp, Homo sapiens
gggcgccggggcctagggggcgccccgcggcaacgcgtcccggccctgctgcttccccccgggcc

SEQ ID NO: 16185 - DNA, 64 bp, Homo sapiens
tagggggcgccccgcggcaacgcgtcccggccctgctgcttccccccgggcccccggtcggcgg

SEQ ID NO: 16186 - DNA, 64 bp, Homo sapiens
ccccgcggcaacgcgtcccggccctgctgcttccccccgggcccccggtcggcggtggcggccc

SEQ ID NO: 16187 - DNA, 63 bp, Homo sapiens
aacgcgtcccggccctgctgcttccccccgggcccccggtcggcggtggcggccccggggcgc

SEQ ID NO: 16188 - DNA, 62 bp, Homo sapiens
cggccctgctgcttccccccgggcccccggtcggcggtggcggccccggggcgcccccctcc

SEQ ID NO: 16189 - DNA, 59 bp, Homo sapiens
cccccgggcccccggtcggcggtggcggccccggggcgcccccctcccccccggctgtg

SEQ ID NO: 16190 - DNA, 63 bp, Homo sapiens
cccggtcggcggtggcggccccggggcgcccccctcccccccggctgtggcggccgcggcggc

SEQ ID NO: 16191 - DNA, 72 bp, Homo sapiens
ggcggcggcgggaagcagcggggctggggttccagggggagcggccgccgcctcagcagcctcctcgtcgtc

SEQ ID NO: 16192 - DNA, 71 bp, Homo sapiens
gggctggggttccagggggagcggccgccgcctcagcagcctcctcgtcgtccgcctcgtcttcgtcttcg

SEQ ID NO: 16193 - DNA, 75 bp, Homo sapiens
gttccagggggagcggccgccgcctcagcagcctcctcgtcgtccgcctcgtcttcgtcttcgtcatcgtcctca

SEQ ID NO: 16194 - DNA, 77 bp, Homo sapiens
gggagcggccgccgcctcagcagcctcctcgtcgtccgcctcgtcttcgtcttcgtcatcgtcctcagcctcttcag

SEQ ID NO: 16195 - DNA, 77 bp, Homo sapiens
cctcagcagcctcctcgtcgtccgcctcgtcttcgtcttcgtcatcgtcctcagcctcttcagggccggccctgctc

SEQ ID NO: 16196 - DNA, 73 bp, Homo sapiens
agcctcctcgtcgtccgcctcgtcttcgtcttcgtcatcgtcctcagcctcttcagggccggccctgctccgg

SEQ ID NO: 16197 - DNA, 72 bp, Homo sapiens
cgtcgtccgcctcgtcttcgtcttcgtcatcgtcctcagcctcttcagggccggccctgctccgggtgggcc

SEQ ID NO: 16198 - DNA, 72 bp, Homo sapiens
ctcgtcttcgtcttcgtcatcgtcctcagcctcttcagggccggccctgctccgggtgggcccgggcttcga

SEQ ID NO: 16199 - DNA, 75 bp, Homo sapiens
tcttcgtcatcgtcctcagcctcttcagggccggccctgctccgggtgggcccgggcttcgacgcggcgctgcag

SEQ ID NO: 16200 - DNA, 75 bp, Homo sapiens
tcagcctcttcagggccggccctgctccgggtgggcccgggcttcgacgcggcgctgcaggtctcggccgccatc

SEQ ID NO: 16201 - DNA, 74 bp, Homo sapiens
tcagggccggccctgctccgggtgggcccgggcttcgacgcggcgctgcaggtctcggccgccatcggcaccaa

SEQ ID NO: 16202 - DNA, 73 bp, Homo sapiens
cctgctccgggtgggcccgggcttcgacgcggcgctgcaggtctcggccgccatcggcaccaacctgcgccgg

SEQ ID NO: 16203 - DNA, 72 bp, Homo sapiens
tccgggtgggcccgggcttcgacgcggcgctgcaggtctcggccgccatcggcaccaacctgcgccggttcc

SEQ ID NO: 16204 - DNA, 72 bp, Homo sapiens
cgggcttcgacgcggcgctgcaggtctcggccgccatcggcaccaacctgcgccggttccgggccgtgtttg

SEQ ID NO: 16205 - DNA, 72 bp, Homo sapiens
acgcggcgctgcaggtctcggccgccatcggcaccaacctgcgccggttccgggccgtgtttggggagagcg

SEQ ID NO: 16206 - DNA, 68 bp, Homo sapiens
aggtctcggccgccatcggcaccaacctgcgccggttccgggccgtgtttggggagagcggcggggga

SEQ ID NO: 16207 - DNA, 70 bp, Homo sapiens
ccatcggcaccaacctgcgccggttccgggccgtgtttggggagagcggcgggggaggcggcagcggaga

SEQ ID NO: 16208 - DNA, 67 bp, Homo sapiens
accaacctgcgccggttccgggccgtgtttggggagagcggcgggggaggcggcagcggagaggtaa

SEQ ID NO: 16209 - DNA, 66 bp, Homo sapiens
cggttccgggccgtgtttggggagagcggcgggggaggcggcagcggagaggtaagggggcgagga

SEQ ID NO: 16210 - DNA, 65 bp, Homo sapiens
ccgggccgtgtttggggagagcggcgggggaggcggcagcggagaggtaagggggcgaggaaccc

SEQ ID NO: 16211 - DNA, 65 bp, Homo sapiens
tttggggagagcggcgggggaggcggcagcggagaggtaagggggcgaggaacccccaggtccgg

SEQ ID NO: 16212 - DNA, 74 bp, Homo sapiens
tttaaaataattttcctttgttgtaggatgagcaattcttaggttttggctcagatgaagaagtcagagtgcga

SEQ ID NO: 16213 - DNA, 75 bp, Homo sapiens
attttcctttgttgtaggatgagcaattcttaggttttggctcagatgaagaagtcagagtgcgaagtcccacaa

SEQ ID NO: 16214 - DNA, 76 bp, Homo sapiens
tttgttgtaggatgagcaattcttaggttttggctcagatgaagaagtcagagtgcgaagtcccacaaggtctcct

SEQ ID NO: 16215 - DNA, 76 bp, Homo sapiens
atgagcaattcttaggttttggctcagatgaagaagtcagagtgcgaagtcccacaaggtctccttcaggtacggc

SEQ ID NO: 16216 - DNA, 74 bp, Homo sapiens
tcttaggttttggctcagatgaagaagtcagagtgcgaagtcccacaaggtctccttcaggtacggccaattaa

SEQ ID NO: 16217 - DNA, 77 bp, Homo sapiens
tcagatgaagaagtcagagtgcgaagtcccacaaggtctccttcaggtacggccaattaagtgcatggtgcctttta

SEQ ID NO: 16218 - DNA, 71 bp, Homo sapiens
aagtcagagtgcgaagtcccacaaggtctccttcaggtacggccaattaagtgcatggtgccttttaagtt

SEQ ID NO: 16219 - DNA, 70 bp, Homo sapiens
agagtgcgaagtcccacaaggtctccttcaggtacggccaattaagtgcatggtgccttttaagttttgt

SEQ ID NO: 16220 - DNA, 70 bp, Homo sapiens
aatatatgctcttcattgtttaatttctatacacagttaaaactagtcctcgaaaacctcgtgggagacc

SEQ ID NO: 16221 - DNA, 70 bp, Homo sapiens
atgctcttcattgtttaatttctatacacagttaaaactagtcctcgaaaacctcgtgggagacctagaa

SEQ ID NO: 16222 - DNA, 70 bp, Homo sapiens
taatttctatacacagttaaaactagtcctcgaaaacctcgtgggagacctagaagtggctctgaccgaa

SEQ ID NO: 16223 - DNA, 71 bp, Homo sapiens
atacacagttaaaactagtcctcgaaaacctcgtgggagacctagaagtggctctgaccgaaattcagcta

SEQ ID NO: 16224 - DNA, 72 bp, Homo sapiens
gttaaaactagtcctcgaaaacctcgtgggagacctagaagtggctctgaccgaaattcagctatcctctca

SEQ ID NO: 16225 - DNA, 76 bp, Homo sapiens
tcctcgaaaacctcgtgggagacctagaagtggctctgaccgaaattcagctatcctctcagatccatctgtgttt

SEQ ID NO: 16226 - DNA, 76 bp, Homo sapiens
gtgggagacctagaagtggctctgaccgaaattcagctatcctctcagatccatctgtgttttcccctctaaataa

SEQ ID NO: 16227 - DNA, 77 bp, Homo sapiens
agacctagaagtggctctgaccgaaattcagctatcctctcagatccatctgtgttttcccctctaaataaatcaga

SEQ ID NO: 16228 - DNA, 79 bp, Homo sapiens
tctgaccgaaattcagctatcctctcagatccatctgtgttttcccctctaaataaatcagagaccaaatctggagata

SEQ ID NO: 16229 - DNA, 78 bp, Homo sapiens
aaattcagctatcctctcagatccatctgtgttttcccctctaaataaatcagagaccaaatctggagataagatcaa

SEQ ID NO: 16230 - DNA, 77 bp, Homo sapiens
ctatcctctcagatccatctgtgttttcccctctaaataaatcagagaccaaatctggagataagatcaagaagaaa

SEQ ID NO: 16231 - DNA, 75 bp, Homo sapiens
gatccatctgtgttttcccctctaaataaatcagagaccaaatctggagataagatcaagaagaaagattctaaa

SEQ ID NO: 16232 - DNA, 72 bp, Homo sapiens
gttttcccctctaaataaatcagagaccaaatctggagataagatcaagaagaaagattctaaaagtataga

SEQ ID NO: 16233 - DNA, 73 bp, Homo sapiens
cctctaaataaatcagagaccaaatctggagataagatcaagaagaaagattctaaaagtatagaaaagaaga

SEQ ID NO: 16234 - DNA, 74 bp, Homo sapiens
atcagagaccaaatctggagataagatcaagaagaaagattctaaaagtatagaaaagaagagaggaagacctc

SEQ ID NO: 16235 - DNA, 70 bp, Homo sapiens
aaatctggagataagatcaagaagaaagattctaaaagtatagaaaagaagagaggaagacctcccacct

SEQ ID NO: 16236 - DNA, 69 bp, Homo sapiens
gatcaagaagaaagattctaaaagtatagaaaagaagagaggaagacctcccaccttccctggagtaaa

SEQ ID NO: 16237 - DNA, 67 bp, Homo sapiens
gaaagattctaaaagtatagaaaagaagagaggaagacctcccaccttccctggagtaaaaatcaaa

SEQ ID NO: 16238 - DNA, 68 bp, Homo sapiens
tctaaaagtatagaaaagaagagaggaagacctcccaccttccctggagtaaaaatcaaaataacaca

SEQ ID NO: 16239 - DNA, 67 bp, Homo sapiens
aaagaagagaggaagacctcccaccttccctggagtaaaaatcaaaataacacatggaaaggacatt

SEQ ID NO: 16240 - DNA, 69 bp, Homo sapiens
agaggaagacctcccaccttccctggagtaaaaatcaaaataacacatggaaaggacatttcagagtta

SEQ ID NO: 16241 - DNA, 67 bp, Homo sapiens
ccaccttccctggagtaaaaatcaaaataacacatggaaaggacatttcagagttaccaaagggaaa

SEQ ID NO: 16242 - DNA, 68 bp, Homo sapiens
ttccctggagtaaaaatcaaaataacacatggaaaggacatttcagagttaccaaagggaaacaaaga

SEQ ID NO: 16243 - DNA, 69 bp, Homo sapiens
aatcaaaataacacatggaaaggacatttcagagttaccaaagggaaacaaagaagatagcctgaaaaa

SEQ ID NO: 16244 - DNA, 68 bp, Homo sapiens
aataacacatggaaaggacatttcagagttaccaaagggaaacaaagaagatagcctgaaaaaaatta

SEQ ID NO: 16245 - DNA, 66 bp, Homo sapiens
ggacatttcagagttaccaaagggaaacaaagaagatagcctgaaaaaaattaaaaggacaccttc

SEQ ID NO: 16246 - DNA, 67 bp, Homo sapiens
tcagagttaccaaagggaaacaaagaagatagcctgaaaaaaattaaaaggacaccttctgctacgt

SEQ ID NO: 16247 - DNA, 67 bp, Homo sapiens
accaaagggaaacaaagaagatagcctgaaaaaaattaaaaggacaccttctgctacgtttcagcaa

SEQ ID NO: 16248 - DNA, 70 bp, Homo sapiens
acaaagaagatagcctgaaaaaaattaaaaggacaccttctgctacgtttcagcaagccacaaagattaa

SEQ ID NO: 16249 - DNA, 68 bp, Homo sapiens
gcctgaaaaaaattaaaaggacaccttctgctacgtttcagcaagccacaaagattaaaaaattaaga

SEQ ID NO: 16250 - DNA, 69 bp, Homo sapiens
attaaaaggacaccttctgctacgtttcagcaagccacaaagattaaaaaattaagagcaggtaaactc

SEQ ID NO: 16251 - DNA, 72 bp, Homo sapiens
acaccttctgctacgtttcagcaagccacaaagattaaaaaattaagagcaggtaaactctctcctctcaag

SEQ ID NO: 16252 - DNA, 70 bp, Homo sapiens
acgtttcagcaagccacaaagattaaaaaattaagagcaggtaaactctctcctctcaagtctaagttta

SEQ ID NO: 16253 - DNA, 69 bp, Homo sapiens
aagccacaaagattaaaaaattaagagcaggtaaactctctcctctcaagtctaagtttaagacaggga

SEQ ID NO: 16254 - DNA, 69 bp, Homo sapiens
aaaaattaagagcaggtaaactctctcctctcaagtctaagtttaagacagggaagcttcaaataggaa

SEQ ID NO: 16255 - DNA, 68 bp, Homo sapiens
gtaaactctctcctctcaagtctaagtttaagacagggaagcttcaaataggaaggaagggggtacaa

SEQ ID NO: 16256 - DNA, 69 bp, Homo sapiens
tctcctctcaagtctaagtttaagacagggaagcttcaaataggaaggaagggggtacaaattgtacga

SEQ ID NO: 16257 - DNA, 66 bp, Homo sapiens
aagtctaagtttaagacagggaagcttcaaataggaaggaagggggtacaaattgtacgacggaga

SEQ ID NO: 16258 - DNA, 67 bp, Homo sapiens
tttaagacagggaagcttcaaataggaaggaagggggtacaaattgtacgacggagaggaaggcctc

SEQ ID NO: 16259 - DNA, 68 bp, Homo sapiens
aagcttcaaataggaaggaagggggtacaaattgtacgacggagaggaaggcctccatcaacagaaag

SEQ ID NO: 16260 - DNA, 67 bp, Homo sapiens
aaataggaaggaagggggtacaaattgtacgacggagaggaaggcctccatcaacagaaaggataaa

SEQ ID NO: 16261 - DNA, 68 bp, Homo sapiens
gggtacaaattgtacgacggagaggaaggcctccatcaacagaaaggataaagaccccttcgggtctc

SEQ ID NO: 16262 - DNA, 69 bp, Homo sapiens
aaggcctccatcaacagaaaggataaagaccccttcgggtctcctcattaattctgaactggaaaagcc

SEQ ID NO: 16263 - DNA, 67 bp, Homo sapiens
aacagaaaggataaagaccccttcgggtctcctcattaattctgaactggaaaagccccagaaagtc

SEQ ID NO: 16264 - DNA, 67 bp, Homo sapiens
ataaagaccccttcgggtctcctcattaattctgaactggaaaagccccagaaagtccggaaagaca

SEQ ID NO: 16265 - DNA, 68 bp, Homo sapiens
cttcgggtctcctcattaattctgaactggaaaagccccagaaagtccggaaagacaaggaaggaaca

SEQ ID NO: 16266 - DNA, 69 bp, Homo sapiens
tcattaattctgaactggaaaagccccagaaagtccggaaagacaaggaaggaacacctccacttacaa

SEQ ID NO: 16267 - DNA, 67 bp, Homo sapiens
ttctgaactggaaaagccccagaaagtccggaaagacaaggaaggaacacctccacttacaaaagaa

SEQ ID NO: 16268 - DNA, 66 bp, Homo sapiens
aaagccccagaaagtccggaaagacaaggaaggaacacctccacttacaaaagaagataagacagt

SEQ ID NO: 16269 - DNA, 69 bp, Homo sapiens
agaaagtccggaaagacaaggaaggaacacctccacttacaaaagaagataagacagttgtcagacaaa

SEQ ID NO: 16270 - DNA, 71 bp, Homo sapiens
gacaaggaaggaacacctccacttacaaaagaagataagacagttgtcagacaaagccctcgaaggattaa

SEQ ID NO: 16271 - DNA, 71 bp, Homo sapiens
aggaacacctccacttacaaaagaagataagacagttgtcagacaaagccctcgaaggattaagccagtta

SEQ ID NO: 16272 - DNA, 70 bp, Homo sapiens
acttacaaaagaagataagacagttgtcagacaaagccctcgaaggattaagccagttaggattattcct

SEQ ID NO: 16273 - DNA, 71 bp, Homo sapiens
aaagaagataagacagttgtcagacaaagccctcgaaggattaagccagttaggattattccttcttcaaa

SEQ ID NO: 16274 - DNA, 72 bp, Homo sapiens
taagacagttgtcagacaaagccctcgaaggattaagccagttaggattattccttcttcaaaaaggacaga

SEQ ID NO: 16275 - DNA, 75 bp, Homo sapiens
tcgaaggattaagccagttaggattattccttcttcaaaaaggacagatgcaaccattgctaagcaactcttaca

SEQ ID NO: 16276 - DNA, 75 bp, Homo sapiens
attaagccagttaggattattccttcttcaaaaaggacagatgcaaccattgctaagcaactcttacagagggca

SEQ ID NO: 16277 - DNA, 72 bp, Homo sapiens
gttaggattattccttcttcaaaaaggacagatgcaaccattgctaagcaactcttacagagggcaaaaaag

SEQ ID NO: 16278 - DNA, 72 bp, Homo sapiens
ttcttcaaaaaggacagatgcaaccattgctaagcaactcttacagagggcaaaaaagggggctcaaaagaa

SEQ ID NO: 16279 - DNA, 69 bp, Homo sapiens
aaaaaggacagatgcaaccattgctaagcaactcttacagagggcaaaaaagggggctcaaaagaaaat

SEQ ID NO: 16280 - DNA, 71 bp, Homo sapiens
atgcaaccattgctaagcaactcttacagagggcaaaaaagggggctcaaaagaaaattgaaaaagaagca

SEQ ID NO: 16281 - DNA, 74 bp, Homo sapiens
ttgctaagcaactcttacagagggcaaaaaagggggctcaaaagaaaattgaaaaagaagcagctcagctgcag

SEQ ID NO: 16282 - DNA, 75 bp, Homo sapiens
gctcaaaagaaaattgaaaaagaagcagctcagctgcagggaagaaaggtgaagacacaggtcaaaaatattcga

SEQ ID NO: 16283 - DNA, 76 bp, Homo sapiens
aaaattgaaaaagaagcagctcagctgcagggaagaaaggtgaagacacaggtcaaaaatattcgacagttcatca

SEQ ID NO: 16284 - DNA, 82 bp, Homo sapiens
ctcagctgcagggaagaaaggtgaagacacaggtcaaaaatattcgacagttcatcatgcctgttgtcagtgctatctcctc

SEQ ID NO: 16285 - DNA, 81 bp, Homo sapiens
gaagaaaggtgaagacacaggtcaaaaatattcgacagttcatcatgcctgttgtcagtgctatctcctcgcggatcatta

SEQ ID NO: 16286 - DNA, 80 bp, Homo sapiens
aaggtgaagacacaggtcaaaaatattcgacagttcatcatgcctgttgtcagtgctatctcctcgcggatcattaagac

SEQ ID NO: 16287 - DNA, 77 bp, Homo sapiens
gtcaaaaatattcgacagttcatcatgcctgttgtcagtgctatctcctcgcggatcattaagacccctcggcggtt

SEQ ID NO: 16288 - DNA, 78 bp, Homo sapiens
aaatattcgacagttcatcatgcctgttgtcagtgctatctcctcgcggatcattaagacccctcggcggtttataga

SEQ ID NO: 16289 - DNA, 79 bp, Homo sapiens
agttcatcatgcctgttgtcagtgctatctcctcgcggatcattaagacccctcggcggtttatagaggatgaggatta

SEQ ID NO: 16290 - DNA, 77 bp, Homo sapiens
tgttgtcagtgctatctcctcgcggatcattaagacccctcggcggtttatagaggatgaggattatgaccctccaa

SEQ ID NO: 16291 - DNA, 72 bp, Homo sapiens
ctatctcctcgcggatcattaagacccctcggcggtttatagaggatgaggattatgaccctccaattaaaa

SEQ ID NO: 16292 - DNA, 71 bp, Homo sapiens
gcggatcattaagacccctcggcggtttatagaggatgaggattatgaccctccaattaaaattgcccgat

SEQ ID NO: 16293 - DNA, 69 bp, Homo sapiens
attaagacccctcggcggtttatagaggatgaggattatgaccctccaattaaaattgcccgattagag

SEQ ID NO: 16294 - DNA, 72 bp, Homo sapiens
ggcggtttatagaggatgaggattatgaccctccaattaaaattgcccgattagagtctacaccgaatagta

SEQ ID NO: 16295 - DNA, 74 bp, Homo sapiens
tttatagaggatgaggattatgaccctccaattaaaattgcccgattagagtctacaccgaatagtagattcag

SEQ ID NO: 16296 - DNA, 73 bp, Homo sapiens
atgaggattatgaccctccaattaaaattgcccgattagagtctacaccgaatagtagattcagtgccccgtc

SEQ ID NO: 16297 - DNA, 72 bp, Homo sapiens
attaaaattgcccgattagagtctacaccgaatagtagattcagtgccccgtcctgtggatcttctgaaaaa

SEQ ID NO: 16298 - DNA, 78 bp, Homo sapiens
ccgattagagtctacaccgaatagtagattcagtgccccgtcctgtggatcttctgaaaaatcaagtgcagcttctca

SEQ ID NO: 16299 - DNA, 83 bp, Homo sapiens
tgccccgtcctgtggatcttctgaaaaatcaagtgcagcttctcagcactcctctcaaatgtcttcagactcctctcgatcta

SEQ ID NO: 16300 - DNA, 83 bp, Homo sapiens
tcctgtggatcttctgaaaaatcaagtgcagcttctcagcactcctctcaaatgtcttcagactcctctcgatctagtagccc

SEQ ID NO: 16301 - DNA, 83 bp, Homo sapiens
ttctgaaaaatcaagtgcagcttctcagcactcctctcaaatgtcttcagactcctctcgatctagtagccccagtgttgata

SEQ ID NO: 16302 - DNA, 83 bp, Homo sapiens
aatcaagtgcagcttctcagcactcctctcaaatgtcttcagactcctctcgatctagtagccccagtgttgatacctccaca

SEQ ID NO: 16303 - DNA, 82 bp, Homo sapiens
agcttctcagcactcctctcaaatgtcttcagactcctctcgatctagtagccccagtgttgatacctccacagactctcag

SEQ ID NO: 16304 - DNA, 80 bp, Homo sapiens
aaatgtcttcagactcctctcgatctagtagccccagtgttgatacctccacagactctcaggcttctgaggagattcag

SEQ ID NO: 16305 - DNA, 78 bp, Homo sapiens
agactcctctcgatctagtagccccagtgttgatacctccacagactctcaggcttctgaggagattcaggtacttcc

SEQ ID NO: 16306 - DNA, 80 bp, Homo sapiens
tagtagccccagtgttgatacctccacagactctcaggcttctgaggagattcaggtacttcctgaggagcggagcgata

SEQ ID NO: 16307 - DNA, 78 bp, Homo sapiens
agtgttgatacctccacagactctcaggcttctgaggagattcaggtacttcctgaggagcggagcgatacccctgaa

SEQ ID NO: 16308 - DNA, 78 bp, Homo sapiens
atacctccacagactctcaggcttctgaggagattcaggtacttcctgaggagcggagcgatacccctgaagttcatc

SEQ ID NO: 16309 - DNA, 79 bp, Homo sapiens
acagactctcaggcttctgaggagattcaggtacttcctgaggagcggagcgatacccctgaagttcatcctccactgc

SEQ ID NO: 16310 - DNA, 76 bp, Homo sapiens
aggcttctgaggagattcaggtacttcctgaggagcggagcgatacccctgaagttcatcctccactgcccatttc

SEQ ID NO: 16311 - DNA, 74 bp, Homo sapiens
ggagattcaggtacttcctgaggagcggagcgatacccctgaagttcatcctccactgcccatttcccagtccc

SEQ ID NO: 16312 - DNA, 74 bp, Homo sapiens
gtacttcctgaggagcggagcgatacccctgaagttcatcctccactgcccatttcccagtccccagaaaatga

SEQ ID NO: 16313 - DNA, 75 bp, Homo sapiens
aggagcggagcgatacccctgaagttcatcctccactgcccatttcccagtccccagaaaatgagagtaatgata

SEQ ID NO: 16314 - DNA, 75 bp, Homo sapiens
aagttcatcctccactgcccatttcccagtccccagaaaatgagagtaatgataggagaagcagaaggtattcag

SEQ ID NO: 16315 - DNA, 75 bp, Homo sapiens
ctgcccatttcccagtccccagaaaatgagagtaatgataggagaagcagaaggtattcagtgtcggagagaagt

SEQ ID NO: 16316 - DNA, 73 bp, Homo sapiens
atttcccagtccccagaaaatgagagtaatgataggagaagcagaaggtattcagtgtcggagagaagttttg

SEQ ID NO: 16317 - DNA, 75 bp, Homo sapiens
agaaaatgagagtaatgataggagaagcagaaggtattcagtgtcggagagaagttttggatctagaacgacgaa

SEQ ID NO: 16318 - DNA, 72 bp, Homo sapiens
agtaatgataggagaagcagaaggtattcagtgtcggagagaagttttggatctagaacgacgaaaaaatta

SEQ ID NO: 16319 - DNA, 73 bp, Homo sapiens
taggagaagcagaaggtattcagtgtcggagagaagttttggatctagaacgacgaaaaaattatcaactcta

SEQ ID NO: 16320 - DNA, 70 bp, Homo sapiens
attcagtgtcggagagaagttttggatctagaacgacgaaaaaattatcaactctacaaagtgcccccca

SEQ ID NO: 16321 - DNA, 71 bp, Homo sapiens
agaagttttggatctagaacgacgaaaaaattatcaactctacaaagtgccccccagcagcagacctcctc

SEQ ID NO: 16322 - DNA, 73 bp, Homo sapiens
tttggatctagaacgacgaaaaaattatcaactctacaaagtgccccccagcagcagacctcctcgtctccac

SEQ ID NO: 16323 - DNA, 71 bp, Homo sapiens
aacgacgaaaaaattatcaactctacaaagtgccccccagcagcagacctcctcgtctccacctccacctc

SEQ ID NO: 16324 - DNA, 75 bp, Homo sapiens
aaaattatcaactctacaaagtgccccccagcagcagacctcctcgtctccacctccacctctgctgactccacc

SEQ ID NO: 16325 - DNA, 79 bp, Homo sapiens
actctacaaagtgccccccagcagcagacctcctcgtctccacctccacctctgctgactccaccgccaccactgcagc

SEQ ID NO: 16326 - DNA, 83 bp, Homo sapiens
ccccagcagcagacctcctcgtctccacctccacctctgctgactccaccgccaccactgcagccagcctccagtatctctga

SEQ ID NO: 16327 - DNA, 83 bp, Homo sapiens
agcagacctcctcgtctccacctccacctctgctgactccaccgccaccactgcagccagcctccagtatctctgaccacaca

SEQ ID NO: 16328 - DNA, 82 bp, Homo sapiens
tcgtctccacctccacctctgctgactccaccgccaccactgcagccagcctccagtatctctgaccacacaccttggctta

SEQ ID NO: 16329 - DNA, 80 bp, Homo sapiens
tgactccaccgccaccactgcagccagcctccagtatctctgaccacacaccttggcttatgcctccaacaatcccctta

SEQ ID NO: 16330 - DNA, 81 bp, Homo sapiens
gccaccactgcagccagcctccagtatctctgaccacacaccttggcttatgcctccaacaatccccttagcatcaccatt

SEQ ID NO: 16331 - DNA, 78 bp, Homo sapiens
agcctccagtatctctgaccacacaccttggcttatgcctccaacaatccccttagcatcaccatttttgcctgcttc

SEQ ID NO: 16332 - DNA, 79 bp, Homo sapiens
atctctgaccacacaccttggcttatgcctccaacaatccccttagcatcaccatttttgcctgcttccactgctccta

SEQ ID NO: 16333 - DNA, 77 bp, Homo sapiens
acaccttggcttatgcctccaacaatccccttagcatcaccatttttgcctgcttccactgctcctatgcaagggaa

SEQ ID NO: 16334 - DNA, 78 bp, Homo sapiens
tatgcctccaacaatccccttagcatcaccatttttgcctgcttccactgctcctatgcaagggaagcgaaaatctat

SEQ ID NO: 16335 - DNA, 76 bp, Homo sapiens
aacaatccccttagcatcaccatttttgcctgcttccactgctcctatgcaagggaagcgaaaatctattttgcga

SEQ ID NO: 16336 - DNA, 78 bp, Homo sapiens
tagcatcaccatttttgcctgcttccactgctcctatgcaagggaagcgaaaatctattttgcgagaaccgacattta

SEQ ID NO: 16337 - DNA, 74 bp, Homo sapiens
atttttgcctgcttccactgctcctatgcaagggaagcgaaaatctattttgcgagaaccgacatttaggtgga

SEQ ID NO: 16338 - DNA, 72 bp, Homo sapiens
ctcctatgcaagggaagcgaaaatctattttgcgagaaccgacatttaggtggacttctttaaagcattcta

SEQ ID NO: 16339 - DNA, 71 bp, Homo sapiens
aaaatctattttgcgagaaccgacatttaggtggacttctttaaagcattctaggtcagagccacaatact

SEQ ID NO: 16340 - DNA, 74 bp, Homo sapiens
ttttgcgagaaccgacatttaggtggacttctttaaagcattctaggtcagagccacaatacttttcctcagca

SEQ ID NO: 16341 - DNA, 74 bp, Homo sapiens
acatttaggtggacttctttaaagcattctaggtcagagccacaatacttttcctcagcaaagtatgccaaaga

SEQ ID NO: 16342 - DNA, 74 bp, Homo sapiens
tggacttctttaaagcattctaggtcagagccacaatacttttcctcagcaaagtatgccaaagaaggtcttat

SEQ ID NO: 16343 - DNA, 74 bp, Homo sapiens
tttaaagcattctaggtcagagccacaatacttttcctcagcaaagtatgccaaagaaggtcttattcgcaaac

SEQ ID NO: 16344 - DNA, 75 bp, Homo sapiens
taggtcagagccacaatacttttcctcagcaaagtatgccaaagaaggtcttattcgcaaaccaatatttgataa

SEQ ID NO: 16345 - DNA, 71 bp, Homo sapiens
acaatacttttcctcagcaaagtatgccaaagaaggtcttattcgcaaaccaatatttgataatttccgac

SEQ ID NO: 16346 - DNA, 69 bp, Homo sapiens
acttttcctcagcaaagtatgccaaagaaggtcttattcgcaaaccaatatttgataatttccgacccc

SEQ ID NO: 16347 - DNA, 67 bp, Homo sapiens
gtcttattcgcaaaccaatatttgataatttccgaccccctccactaactcccgaggacgttggctt

SEQ ID NO: 16348 - DNA, 67 bp, Homo sapiens
aaaccaatatttgataatttccgaccccctccactaactcccgaggacgttggctttgcatctggtt

SEQ ID NO: 16349 - DNA, 71 bp, Homo sapiens
tttgataatttccgaccccctccactaactcccgaggacgttggctttgcatctggtttttctgcatctgg

SEQ ID NO: 16350 - DNA, 74 bp, Homo sapiens
tccgaccccctccactaactcccgaggacgttggctttgcatctggtttttctgcatctggtaccgctgcttca

SEQ ID NO: 16351 - DNA, 76 bp, Homo sapiens
aggacgttggctttgcatctggtttttctgcatctggtaccgctgcttcagcccgattgttttcgccactccattc

SEQ ID NO: 16352 - DNA, 76 bp, Homo sapiens
tttgcatctggtttttctgcatctggtaccgctgcttcagcccgattgttttcgccactccattctggaacaaggt

SEQ ID NO: 16353 - DNA, 78 bp, Homo sapiens
gtttttctgcatctggtaccgctgcttcagcccgattgttttcgccactccattctggaacaaggtttgatatgcaca

SEQ ID NO: 16354 - DNA, 75 bp, Homo sapiens
taccgctgcttcagcccgattgttttcgccactccattctggaacaaggtttgatatgcacaaaaggagccctct

SEQ ID NO: 16355 - DNA, 77 bp, Homo sapiens
ttcagcccgattgttttcgccactccattctggaacaaggtttgatatgcacaaaaggagccctcttctgagagctc

SEQ ID NO: 16356 - DNA, 76 bp, Homo sapiens
ttgttttcgccactccattctggaacaaggtttgatatgcacaaaaggagccctcttctgagagctccaagattta

SEQ ID NO: 16357 - DNA, 76 bp, Homo sapiens
actccattctggaacaaggtttgatatgcacaaaaggagccctcttctgagagctccaagatttactccaagtgag

SEQ ID NO: 16358 - DNA, 78 bp, Homo sapiens
caaggtttgatatgcacaaaaggagccctcttctgagagctccaagatttactccaagtgaggctcactctagaatat

SEQ ID NO: 16359 - DNA, 80 bp, Homo sapiens
tttgatatgcacaaaaggagccctcttctgagagctccaagatttactccaagtgaggctcactctagaatatttgagtc

SEQ ID NO: 16360 - DNA, 76 bp, Homo sapiens
acaaaaggagccctcttctgagagctccaagatttactccaagtgaggctcactctagaatatttgagtctgtaac

SEQ ID NO: 16361 - DNA, 78 bp, Homo sapiens
ttctgagagctccaagatttactccaagtgaggctcactctagaatatttgagtctgtaaccttgcctagtaatcgaa

SEQ ID NO: 16362 - DNA, 75 bp, Homo sapiens
agctccaagatttactccaagtgaggctcactctagaatatttgagtctgtaaccttgcctagtaatcgaacttc

SEQ ID NO: 16363 - DNA, 77 bp, Homo sapiens
aagtgaggctcactctagaatatttgagtctgtaaccttgcctagtaatcgaacttctgctggaacatcttcttcag

SEQ ID NO: 16364 - DNA, 77 bp, Homo sapiens
tagaatatttgagtctgtaaccttgcctagtaatcgaacttctgctggaacatcttcttcaggagtatccaatagaa

SEQ ID NO: 16365 - DNA, 75 bp, Homo sapiens
tatttgagtctgtaaccttgcctagtaatcgaacttctgctggaacatcttcttcaggagtatccaatagaaaaa

SEQ ID NO: 16366 - DNA, 73 bp, Homo sapiens
aggaaaagaaaagtgtttagtcctattcgatctgaaccaagatctccttctcactccatgaggacaagaagtg

SEQ ID NO: 16367 - DNA, 74 bp, Homo sapiens
aaaagtgtttagtcctattcgatctgaaccaagatctccttctcactccatgaggacaagaagtggaaggctta

SEQ ID NO: 16368 - DNA, 81 bp, Homo sapiens
tcgatctgaaccaagatctccttctcactccatgaggacaagaagtggaaggcttagtagttctgagctctcacctctcac

SEQ ID NO: 16369 - DNA, 76 bp, Homo sapiens
ccaagatctccttctcactccatgaggacaagaagtggaaggcttagtagttctgagctctcacctctcacccccc

SEQ ID NO: 16370 - DNA, 76 bp, Homo sapiens
tcactccatgaggacaagaagtggaaggcttagtagttctgagctctcacctctcacccccccgtcttctgtctct

SEQ ID NO: 16371 - DNA, 74 bp, Homo sapiens
atgaggacaagaagtggaaggcttagtagttctgagctctcacctctcacccccccgtcttctgtctcttcctc

SEQ ID NO: 16372 - DNA, 72 bp, Homo sapiens
agtggaaggcttagtagttctgagctctcacctctcacccccccgtcttctgtctcttcctcgttaagcatt

SEQ ID NO: 16373 - DNA, 73 bp, Homo sapiens
cttagtagttctgagctctcacctctcacccccccgtcttctgtctcttcctcgttaagcatttctgttagtc

SEQ ID NO: 16374 - DNA, 73 bp, Homo sapiens
agctctcacctctcacccccccgtcttctgtctcttcctcgttaagcatttctgttagtcctcttgccactag

SEQ ID NO: 16375 - DNA, 69 bp, Homo sapiens
tgtctcttcctcgttaagcatttctgttagtcctcttgccactagtgccttaaacccaacttttacttt

SEQ ID NO: 16376 - DNA, 68 bp, Homo sapiens
atttctgttagtcctcttgccactagtgccttaaacccaacttttacttttccttctcattccctgac

SEQ ID NO: 16377 - DNA, 70 bp, Homo sapiens
tagtcctcttgccactagtgccttaaacccaacttttacttttccttctcattccctgactcagtctggg

SEQ ID NO: 16378 - DNA, 71 bp, Homo sapiens
tagtgccttaaacccaacttttacttttccttctcattccctgactcagtctggggaatctgcagagaaaa

SEQ ID NO: 16379 - DNA, 70 bp, Homo sapiens
ccttaaacccaacttttacttttccttctcattccctgactcagtctggggaatctgcagagaaaaatca

SEQ ID NO: 16380 - DNA, 72 bp, Homo sapiens
aacttttacttttccttctcattccctgactcagtctggggaatctgcagagaaaaatcagagaccaaggaa

SEQ ID NO: 16381 - DNA, 82 bp, Homo sapiens
ctgactcagtctggggaatctgcagagaaaaatcagagaccaaggaagcagactagtgctccggcagagccattttcatcaa

SEQ ID NO: 16382 - DNA, 79 bp, Homo sapiens
agtctggggaatctgcagagaaaaatcagagaccaaggaagcagactagtgctccggcagagccattttcatcaagtag

SEQ ID NO: 16383 - DNA, 80 bp, Homo sapiens
tgcagagaaaaatcagagaccaaggaagcagactagtgctccggcagagccattttcatcaagtagtcctactcctctct

SEQ ID NO: 16384 - DNA, 76 bp, Homo sapiens
aaaaatcagagaccaaggaagcagactagtgctccggcagagccattttcatcaagtagtcctactcctctcttcc

SEQ ID NO: 16385 - DNA, 74 bp, Homo sapiens
accaaggaagcagactagtgctccggcagagccattttcatcaagtagtcctactcctctcttcccttggttta

SEQ ID NO: 16386 - DNA, 73 bp, Homo sapiens
aagcagactagtgctccggcagagccattttcatcaagtagtcctactcctctcttcccttggtttaccccag

SEQ ID NO: 16387 - DNA, 74 bp, Homo sapiens
tccggcagagccattttcatcaagtagtcctactcctctcttcccttggtttaccccaggctctcagactgaaa

SEQ ID NO: 16388 - DNA, 72 bp, Homo sapiens
cattttcatcaagtagtcctactcctctcttcccttggtttaccccaggctctcagactgaaagagggagaa

SEQ ID NO: 16389 - DNA, 70 bp, Homo sapiens
gtcctactcctctcttcccttggtttaccccaggctctcagactgaaagagggagaaataaagacaaggc

SEQ ID NO: 16390 - DNA, 72 bp, Homo sapiens
tttaccccaggctctcagactgaaagagggagaaataaagacaaggcccccgaggagctgtccaaagatcga

SEQ ID NO: 16391 - DNA, 77 bp, Homo sapiens
aggctctcagactgaaagagggagaaataaagacaaggcccccgaggagctgtccaaagatcgagatgctgacaaga

SEQ ID NO: 16392 - DNA, 74 bp, Homo sapiens
aaagagggagaaataaagacaaggcccccgaggagctgtccaaagatcgagatgctgacaagagcgtggagaag

SEQ ID NO: 16393 - DNA, 79 bp, Homo sapiens
aagacaaggcccccgaggagctgtccaaagatcgagatgctgacaagagcgtggagaaggacaagagtagagagagaga

SEQ ID NO: 16394 - DNA, 79 bp, Homo sapiens
aggagctgtccaaagatcgagatgctgacaagagcgtggagaaggacaagagtagagagagagaccgggagagagaaaa

SEQ ID NO: 16395 - DNA, 78 bp, Homo sapiens
caaagatcgagatgctgacaagagcgtggagaaggacaagagtagagagagagaccgggagagagaaaaggagaataa

SEQ ID NO: 16396 - DNA, 73 bp, Homo sapiens
agagcgtggagaaggacaagagtagagagagagaccgggagagagaaaaggagaataagcgggagtcaaggaa

SEQ ID NO: 16397 - DNA, 71 bp, Homo sapiens
agaaggacaagagtagagagagagaccgggagagagaaaaggagaataagcgggagtcaaggaaagagaaa

SEQ ID NO: 16398 - DNA, 68 bp, Homo sapiens
agagagaccgggagagagaaaaggagaataagcgggagtcaaggaaagagaaaaggaaaaagggatca

SEQ ID NO: 16399 - DNA, 69 bp, Homo sapiens
agagagaaaaggagaataagcgggagtcaaggaaagagaaaaggaaaaagggatcagaaattcagagta

SEQ ID NO: 16400 - DNA, 67 bp, Homo sapiens
aaaaggagaataagcgggagtcaaggaaagagaaaaggaaaaagggatcagaaattcagagtagttc

SEQ ID NO: 16401 - DNA, 71 bp, Homo sapiens
taagcgggagtcaaggaaagagaaaaggaaaaagggatcagaaattcagagtagttctgctttgtatcctg

SEQ ID NO: 16402 - DNA, 69 bp, Homo sapiens
gaaagagaaaaggaaaaagggatcagaaattcagagtagttctgctttgtatcctgtgggtagggtttc

SEQ ID NO: 16403 - DNA, 69 bp, Homo sapiens
aaggaaaaagggatcagaaattcagagtagttctgctttgtatcctgtgggtagggtttccaaagagaa

SEQ ID NO: 16404 - DNA, 69 bp, Homo sapiens
aaagggatcagaaattcagagtagttctgctttgtatcctgtgggtagggtttccaaagagaaggttgt

SEQ ID NO: 16405 - DNA, 73 bp, Homo sapiens
tagttctgctttgtatcctgtgggtagggtttccaaagagaaggttgttggtgaagatgttgccacttcatct

SEQ ID NO: 16406 - DNA, 73 bp, Homo sapiens
tttgtatcctgtgggtagggtttccaaagagaaggttgttggtgaagatgttgccacttcatcttctgccaaa

SEQ ID NO: 16407 - DNA, 72 bp, Homo sapiens
gtgggtagggtttccaaagagaaggttgttggtgaagatgttgccacttcatcttctgccaaaaaagcaaca

SEQ ID NO: 16408 - DNA, 72 bp, Homo sapiens
aaagagaaggttgttggtgaagatgttgccacttcatcttctgccaaaaaagcaacagggcggaagaagtct

SEQ ID NO: 16409 - DNA, 77 bp, Homo sapiens
aggttgttggtgaagatgttgccacttcatcttctgccaaaaaagcaacagggcggaagaagtcttcatcacatgat

SEQ ID NO: 16410 - DNA, 79 bp, Homo sapiens
acttcatcttctgccaaaaaagcaacagggcggaagaagtcttcatcacatgattctgggactgatattacttctgtga

SEQ ID NO: 16411 - DNA, 78 bp, Homo sapiens
atcttctgccaaaaaagcaacagggcggaagaagtcttcatcacatgattctgggactgatattacttctgtgactct

SEQ ID NO: 16412 - DNA, 77 bp, Homo sapiens
aaaagcaacagggcggaagaagtcttcatcacatgattctgggactgatattacttctgtgactcttggggatacaa

SEQ ID NO: 16413 - DNA, 79 bp, Homo sapiens
cggaagaagtcttcatcacatgattctgggactgatattacttctgtgactcttggggatacaacagctgtcaaaacca

SEQ ID NO: 16414 - DNA, 78 bp, Homo sapiens
aagtcttcatcacatgattctgggactgatattacttctgtgactcttggggatacaacagctgtcaaaaccaaaata

SEQ ID NO: 16415 - DNA, 75 bp, Homo sapiens
acatgattctgggactgatattacttctgtgactcttggggatacaacagctgtcaaaaccaaaatacttataaa

SEQ ID NO: 16416 - DNA, 72 bp, Homo sapiens
ctgggactgatattacttctgtgactcttggggatacaacagctgtcaaaaccaaaatacttataaagaaag

SEQ ID NO: 16417 - DNA, 71 bp, Homo sapiens
tattacttctgtgactcttggggatacaacagctgtcaaaaccaaaatacttataaagaaagggagaggaa

SEQ ID NO: 16418 - DNA, 68 bp, Homo sapiens
actcttggggatacaacagctgtcaaaaccaaaatacttataaagaaagggagaggaaatctggaaaa

SEQ ID NO: 16419 - DNA, 67 bp, Homo sapiens
gggatacaacagctgtcaaaaccaaaatacttataaagaaagggagaggaaatctggaaaaaaccaa

SEQ ID NO: 16420 - DNA, 64 bp, Homo sapiens
gtcaaaaccaaaatacttataaagaaagggagaggaaatctggaaaaaaccaacttggacctcg

SEQ ID NO: 16421 - DNA, 64 bp, Homo sapiens
accaaaatacttataaagaaagggagaggaaatctggaaaaaaccaacttggacctcggcccaa

SEQ ID NO: 16422 - DNA, 66 bp, Homo sapiens
ttataaagaaagggagaggaaatctggaaaaaaccaacttggacctcggcccaactgccccatccc

SEQ ID NO: 16423 - DNA, 67 bp, Homo sapiens
agaggaaatctggaaaaaaccaacttggacctcggcccaactgccccatccctggagaaggagaaaa

SEQ ID NO: 16424 - DNA, 66 bp, Homo sapiens
aatctggaaaaaaccaacttggacctcggcccaactgccccatccctggagaaggagaaaaccctc

SEQ ID NO: 16425 - DNA, 67 bp, Homo sapiens
aaaccaacttggacctcggcccaactgccccatccctggagaaggagaaaaccctctgcctttccac

SEQ ID NO: 16426 - DNA, 73 bp, Homo sapiens
tcggcccaactgccccatccctggagaaggagaaaaccctctgcctttccactccttcatctagcactgttaa

SEQ ID NO: 16427 - DNA, 72 bp, Homo sapiens
aactgccccatccctggagaaggagaaaaccctctgcctttccactccttcatctagcactgttaaacattc

SEQ ID NO: 16428 - DNA, 73 bp, Homo sapiens
ctggagaaggagaaaaccctctgcctttccactccttcatctagcactgttaaacattccacttcctccatag

SEQ ID NO: 16429 - DNA, 74 bp, Homo sapiens
agaaaaccctctgcctttccactccttcatctagcactgttaaacattccacttcctccataggctccatgttg

SEQ ID NO: 16430 - DNA, 80 bp, Homo sapiens
ctctgcctttccactccttcatctagcactgttaaacattccacttcctccataggctccatgttggctcaggcagacaa

SEQ ID NO: 16431 - DNA, 80 bp, Homo sapiens
actccttcatctagcactgttaaacattccacttcctccataggctccatgttggctcaggcagacaagcttccaatgac

SEQ ID NO: 16432 - DNA, 83 bp, Homo sapiens
ttcatctagcactgttaaacattccacttcctccataggctccatgttggctcaggcagacaagcttccaatgactgacaaga

SEQ ID NO: 16433 - DNA, 78 bp, Homo sapiens
acttcctccataggctccatgttggctcaggcagacaagcttccaatgactgacaagagggttgccagcctcctaaaa

SEQ ID NO: 16434 - DNA, 77 bp, Homo sapiens
ataggctccatgttggctcaggcagacaagcttccaatgactgacaagagggttgccagcctcctaaaaaaggccaa

SEQ ID NO: 16435 - DNA, 78 bp, Homo sapiens
atgttggctcaggcagacaagcttccaatgactgacaagagggttgccagcctcctaaaaaaggccaaagctcagctc

SEQ ID NO: 16436 - DNA, 80 bp, Homo sapiens
gcagacaagcttccaatgactgacaagagggttgccagcctcctaaaaaaggccaaagctcagctctgcaagattgagaa

SEQ ID NO: 16437 - DNA, 78 bp, Homo sapiens
ttccaatgactgacaagagggttgccagcctcctaaaaaaggccaaagctcagctctgcaagattgagaagagtaaga

SEQ ID NO: 16438 - DNA, 76 bp, Homo sapiens
tgacaagagggttgccagcctcctaaaaaaggccaaagctcagctctgcaagattgagaagagtaagagtcttaaa

SEQ ID NO: 16439 - DNA, 73 bp, Homo sapiens
agggttgccagcctcctaaaaaaggccaaagctcagctctgcaagattgagaagagtaagagtcttaaacaaa

SEQ ID NO: 16440 - DNA, 74 bp, Homo sapiens
aaaaaggccaaagctcagctctgcaagattgagaagagtaagagtcttaaacaaaccgaccagcccaaagcaca

SEQ ID NO: 16441 - DNA, 74 bp, Homo sapiens
aagctcagctctgcaagattgagaagagtaagagtcttaaacaaaccgaccagcccaaagcacaggtactcttt

SEQ ID NO: 16442 - DNA, 70 bp, Homo sapiens
aagattgagaagagtaagagtcttaaacaaaccgaccagcccaaagcacaggtactcttttccaccttgc

SEQ ID NO: 16443 - DNA, 68 bp, Homo sapiens
agagtaagagtcttaaacaaaccgaccagcccaaagcacaggtactcttttccaccttgcctattaaa

SEQ ID NO: 16444 - DNA, 67 bp, Homo sapiens
agagtcttaaacaaaccgaccagcccaaagcacaggtactcttttccaccttgcctattaaaactaa

SEQ ID NO: 16445 - DNA, 77 bp, Homo sapiens
ataatttcaacatgtatggttgttattgtttttggattgcctcatattcagggtcaagaaagtgactcatcagagac

SEQ ID NO: 16446 - DNA, 79 bp, Homo sapiens
atgtatggttgttattgtttttggattgcctcatattcagggtcaagaaagtgactcatcagagacctctgtgcgagga

SEQ ID NO: 16447 - DNA, 76 bp, Homo sapiens
ttgtttttggattgcctcatattcagggtcaagaaagtgactcatcagagacctctgtgcgaggaccccggattaa

SEQ ID NO: 16448 - DNA, 78 bp, Homo sapiens
tttggattgcctcatattcagggtcaagaaagtgactcatcagagacctctgtgcgaggaccccggattaaacatgtc

SEQ ID NO: 16449 - DNA, 81 bp, Homo sapiens
atattcagggtcaagaaagtgactcatcagagacctctgtgcgaggaccccggattaaacatgtctgcagaagagcagctg

SEQ ID NO: 16450 - DNA, 81 bp, Homo sapiens
gtcaagaaagtgactcatcagagacctctgtgcgaggaccccggattaaacatgtctgcagaagagcagctgttgcccttg

SEQ ID NO: 16451 - DNA, 76 bp, Homo sapiens
acctctgtgcgaggaccccggattaaacatgtctgcagaagagcagctgttgcccttggccgaaaacgagctgtgt

SEQ ID NO: 16452 - DNA, 77 bp, Homo sapiens
cgaggaccccggattaaacatgtctgcagaagagcagctgttgcccttggccgaaaacgagctgtgtttcctgatga

SEQ ID NO: 16453 - DNA, 81 bp, Homo sapiens
ggattaaacatgtctgcagaagagcagctgttgcccttggccgaaaacgagctgtgtttcctgatgacatgcccaccctga

SEQ ID NO: 16454 - DNA, 82 bp, Homo sapiens
acatgtctgcagaagagcagctgttgcccttggccgaaaacgagctgtgtttcctgatgacatgcccaccctgagtgcctta

SEQ ID NO: 16455 - DNA, 78 bp, Homo sapiens
aagagcagctgttgcccttggccgaaaacgagctgtgtttcctgatgacatgcccaccctgagtgccttaccatggga

SEQ ID NO: 16456 - DNA, 76 bp, Homo sapiens
tgttgcccttggccgaaaacgagctgtgtttcctgatgacatgcccaccctgagtgccttaccatgggaagaacga

SEQ ID NO: 16457 - DNA, 73 bp, Homo sapiens
cgaaaacgagctgtgtttcctgatgacatgcccaccctgagtgccttaccatgggaagaacgagaaaagattt

SEQ ID NO: 16458 - DNA, 75 bp, Homo sapiens
acgagctgtgtttcctgatgacatgcccaccctgagtgccttaccatgggaagaacgagaaaagattttgtcttc

SEQ ID NO: 16459 - DNA, 73 bp, Homo sapiens
acatgcccaccctgagtgccttaccatgggaagaacgagaaaagattttgtcttccatggggaatgatggtag

SEQ ID NO: 16460 - DNA, 72 bp, Homo sapiens
agtgccttaccatgggaagaacgagaaaagattttgtcttccatggggaatgatggtaggtcaagaaggtca

SEQ ID NO: 16461 - DNA, 72 bp, Homo sapiens
ttaccatgggaagaacgagaaaagattttgtcttccatggggaatgatggtaggtcaagaaggtcaatcttg

SEQ ID NO: 16462 - DNA, 71 bp, Homo sapiens
aagaacgagaaaagattttgtcttccatggggaatgatggtaggtcaagaaggtcaatcttggagtcggaa

SEQ ID NO: 16463 - DNA, 76 bp, Homo sapiens
aggtttgaattcagtactcccttggaactaatgccacatttctttaacagacaagtcatcaattgctggctcagaa

SEQ ID NO: 16464 - DNA, 78 bp, Homo sapiens
agtactcccttggaactaatgccacatttctttaacagacaagtcatcaattgctggctcagaagatgctgaacctct

SEQ ID NO: 16465 - DNA, 81 bp, Homo sapiens
aactaatgccacatttctttaacagacaagtcatcaattgctggctcagaagatgctgaacctcttgctccacccatcaaa

SEQ ID NO: 16466 - DNA, 79 bp, Homo sapiens
acatttctttaacagacaagtcatcaattgctggctcagaagatgctgaacctcttgctccacccatcaaaccaattaa

SEQ ID NO: 16467 - DNA, 80 bp, Homo sapiens
tttaacagacaagtcatcaattgctggctcagaagatgctgaacctcttgctccacccatcaaaccaattaaacctgtca

SEQ ID NO: 16468 - DNA, 79 bp, Homo sapiens
acaagtcatcaattgctggctcagaagatgctgaacctcttgctccacccatcaaaccaattaaacctgtcactagaaa

SEQ ID NO: 16469 - DNA, 77 bp, Homo sapiens
aattgctggctcagaagatgctgaacctcttgctccacccatcaaaccaattaaacctgtcactagaaacaaggcac

SEQ ID NO: 16470 - DNA, 73 bp, Homo sapiens
agaagatgctgaacctcttgctccacccatcaaaccaattaaacctgtcactagaaacaaggcaccccaggaa

SEQ ID NO: 16471 - DNA, 70 bp, Homo sapiens
acctcttgctccacccatcaaaccaattaaacctgtcactagaaacaaggcaccccaggaacctccagta

SEQ ID NO: 16472 - DNA, 68 bp, Homo sapiens
ctccacccatcaaaccaattaaacctgtcactagaaacaaggcaccccaggaacctccagtaaagaaa

SEQ ID NO: 16473 - DNA, 66 bp, Homo sapiens
aaaccaattaaacctgtcactagaaacaaggcaccccaggaacctccagtaaagaaaggacgtcga

SEQ ID NO: 16474 - DNA, 68 bp, Homo sapiens
ttaaacctgtcactagaaacaaggcaccccaggaacctccagtaaagaaaggacgtcgatcgaggcgg

SEQ ID NO: 16475 - DNA, 70 bp, Homo sapiens
actagaaacaaggcaccccaggaacctccagtaaagaaaggacgtcgatcgaggcggtgtgggcagtgtc

SEQ ID NO: 16476 - DNA, 71 bp, Homo sapiens
aaggcaccccaggaacctccagtaaagaaaggacgtcgatcgaggcggtgtgggcagtgtcccggctgcca

SEQ ID NO: 16477 - DNA, 73 bp, Homo sapiens
aggaacctccagtaaagaaaggacgtcgatcgaggcggtgtgggcagtgtcccggctgccaggtgcctgagga

SEQ ID NO: 16478 - DNA, 75 bp, Homo sapiens
taaagaaaggacgtcgatcgaggcggtgtgggcagtgtcccggctgccaggtgcctgaggactgtggtgtttgta

SEQ ID NO: 16479 - DNA, 78 bp, Homo sapiens
tcgatcgaggcggtgtgggcagtgtcccggctgccaggtgcctgaggactgtggtgtttgtactaattgcttagataa

SEQ ID NO: 16480 - DNA, 75 bp, Homo sapiens
cggtgtgggcagtgtcccggctgccaggtgcctgaggactgtggtgtttgtactaattgcttagataagcccaag

SEQ ID NO: 16481 - DNA, 73 bp, Homo sapiens
agtgtcccggctgccaggtgcctgaggactgtggtgtttgtactaattgcttagataagcccaagtttggtgg

SEQ ID NO: 16482 - DNA, 75 bp, Homo sapiens
ctgccaggtgcctgaggactgtggtgtttgtactaattgcttagataagcccaagtttggtggtcgcaatataaa

SEQ ID NO: 16483 - DNA, 73 bp, Homo sapiens
aggtgcctgaggactgtggtgtttgtactaattgcttagataagcccaagtttggtggtcgcaatataaagaa

SEQ ID NO: 16484 - DNA, 76 bp, Homo sapiens
tgtggtgtttgtactaattgcttagataagcccaagtttggtggtcgcaatataaagaagcagtgctgcaagtaag

SEQ ID NO: 16485 - DNA, 76 bp, Homo sapiens
tactaattgcttagataagcccaagtttggtggtcgcaatataaagaagcagtgctgcaagtaagtgggtgtttca

SEQ ID NO: 16486 - DNA, 77 bp, Homo sapiens
attgcttagataagcccaagtttggtggtcgcaatataaagaagcagtgctgcaagtaagtgggtgtttcactctga

SEQ ID NO: 16487 - DNA, 78 bp, Homo sapiens
ccaagtttggtggtcgcaatataaagaagcagtgctgcaagtaagtgggtgtttcactctgagatgttgacctctcaa

SEQ ID NO: 16488 - DNA, 75 bp, Homo sapiens
agtgctgcaagtaagtgggtgtttcactctgagatgttgacctctcaaccataaaggttgcttatttatccctag

SEQ ID NO: 16489 - DNA, 71 bp, Homo sapiens
aagtaagtgggtgtttcactctgagatgttgacctctcaaccataaaggttgcttatttatccctagtttg

SEQ ID NO: 16490 - DNA, 79 bp, Homo sapiens
tgtttcactctgagatgttgacctctcaaccataaaggttgcttatttatccctagtttgttgcagagatacatcagga

SEQ ID NO: 16491 - DNA, 76 bp, Homo sapiens
actctgagatgttgacctctcaaccataaaggttgcttatttatccctagtttgttgcagagatacatcaggaaac

SEQ ID NO: 16492 - DNA, 75 bp, Homo sapiens
ttgacctctcaaccataaaggttgcttatttatccctagtttgttgcagagatacatcaggaaactgaatgtggt

SEQ ID NO: 16493 - DNA, 76 bp, Homo sapiens
cctagtttgttgcagagatacatcaggaaactgaatgtggttgtaattgagttgcaagacttgttacagttagatt

SEQ ID NO: 16494 - DNA, 77 bp, Homo sapiens
tttgttgcagagatacatcaggaaactgaatgtggttgtaattgagttgcaagacttgttacagttagattttgtgg

SEQ ID NO: 16495 - DNA, 76 bp, Homo sapiens
agatacatcaggaaactgaatgtggttgtaattgagttgcaagacttgttacagttagattttgtggtgtgggctg

SEQ ID NO: 16496 - DNA, 74 bp, Homo sapiens
aactgaatgtggttgtaattgagttgcaagacttgttacagttagattttgtggtgtgggctgtgcttaaataa

SEQ ID NO: 16497 - DNA, 74 bp, Homo sapiens
tgtggttgtaattgagttgcaagacttgttacagttagattttgtggtgtgggctgtgcttaaataagaaatac

SEQ ID NO: 16498 - DNA, 74 bp, Homo sapiens
attgagttgcaagacttgttacagttagattttgtggtgtgggctgtgcttaaataagaaatactctggggcca

SEQ ID NO: 16499 - DNA, 75 bp, Homo sapiens
acttgttacagttagattttgtggtgtgggctgtgcttaaataagaaatactctggggccatgctgtcattaata

SEQ ID NO: 16500 - DNA, 76 bp, Homo sapiens
acagttagattttgtggtgtgggctgtgcttaaataagaaatactctggggccatgctgtcattaatagaatgttc

SEQ ID NO: 16501 - DNA, 79 bp, Homo sapiens
tttgtggtgtgggctgtgcttaaataagaaatactctggggccatgctgtcattaatagaatgttctgcaacaatggaa

SEQ ID NO: 16502 - DNA, 79 bp, Homo sapiens
tgtgcttaaataagaaatactctggggccatgctgtcattaatagaatgttctgcaacaatggaaatgttctattggaa

SEQ ID NO: 16503 - DNA, 77 bp, Homo sapiens
aaataagaaatactctggggccatgctgtcattaatagaatgttctgcaacaatggaaatgttctattggaatagta

SEQ ID NO: 16504 - DNA, 79 bp, Homo sapiens
gccatgctgtcattaatagaatgttctgcaacaatggaaatgttctattggaatagtagacaacaataatggaaatgtt

SEQ ID NO: 16505 - DNA, 78 bp, Homo sapiens
atgttctgcaacaatggaaatgttctattggaatagtagacaacaataatggaaatgtttagttcagtatgcagccat

SEQ ID NO: 16506 - DNA, 79 bp, Homo sapiens
gccacatgtggctattgagcgcttgacatgtgattagtgtgactgaggaaccacactgtttatttcgtttaactttagc

SEQ ID NO: 16507 - DNA, 78 bp, Homo sapiens
gctattgagcgcttgacatgtgattagtgtgactgaggaaccacactgtttatttcgtttaactttagccatgtgtaa

SEQ ID NO: 16508 - DNA, 75 bp, Homo sapiens
agcgcttgacatgtgattagtgtgactgaggaaccacactgtttatttcgtttaactttagccatgtgtaactag

SEQ ID NO: 16509 - DNA, 74 bp, Homo sapiens
acatgtgattagtgtgactgaggaaccacactgtttatttcgtttaactttagccatgtgtaactagtggctac

SEQ ID NO: 16510 - DNA, 76 bp, Homo sapiens
tgtgactgaggaaccacactgtttatttcgtttaactttagccatgtgtaactagtggctaccatatcagactgta

SEQ ID NO: 16511 - DNA, 74 bp, Homo sapiens
actgaggaaccacactgtttatttcgtttaactttagccatgtgtaactagtggctaccatatcagactgtagc

SEQ ID NO: 16512 - DNA, 74 bp, Homo sapiens
aggaaccacactgtttatttcgtttaactttagccatgtgtaactagtggctaccatatcagactgtagctctg

SEQ ID NO: 16513 - DNA, 75 bp, Homo sapiens
ctgtttatttcgtttaactttagccatgtgtaactagtggctaccatatcagactgtagctctggaggatttcta

SEQ ID NO: 16514 - DNA, 75 bp, Homo sapiens
ttatttcgtttaactttagccatgtgtaactagtggctaccatatcagactgtagctctggaggatttctactta

SEQ ID NO: 16515 - DNA, 75 bp, Homo sapiens
tatttcgtttaactttagccatgtgtaactagtggctaccatatcagactgtagctctggaggatttctacttaa

SEQ ID NO: 16516 - DNA, 75 bp, Homo sapiens
tttaactttagccatgtgtaactagtggctaccatatcagactgtagctctggaggatttctacttaaaacctga

SEQ ID NO: 16517 - DNA, 76 bp, Homo sapiens
ttagccatgtgtaactagtggctaccatatcagactgtagctctggaggatttctacttaaaacctgacaacttta

SEQ ID NO: 16518 - DNA, 76 bp, Homo sapiens
atgtgtaactagtggctaccatatcagactgtagctctggaggatttctacttaaaacctgacaactttatgtata

SEQ ID NO: 16519 - DNA, 74 bp, Homo sapiens
taactagtggctaccatatcagactgtagctctggaggatttctacttaaaacctgacaactttatgtataatt

SEQ ID NO: 16520 - DNA, 74 bp, Homo sapiens
tagtggctaccatatcagactgtagctctggaggatttctacttaaaacctgacaactttatgtataatttttg

SEQ ID NO: 16521 - DNA, 73 bp, Homo sapiens
agtggctaccatatcagactgtagctctggaggatttctacttaaaacctgacaactttatgtataatttttg

SEQ ID NO: 16522 - DNA, 71 bp, Homo sapiens
agactgtagctctggaggatttctacttaaaacctgacaactttatgtataatttttgttgggtctactga

SEQ ID NO: 16523 - DNA, 69 bp, Homo sapiens
gtagctctggaggatttctacttaaaacctgacaactttatgtataatttttgttgggtctactgaaat

SEQ ID NO: 16524 - DNA, 69 bp, Homo sapiens
ttctacttaaaacctgacaactttatgtataatttttgttgggtctactgaaattatgttgacccaaca

SEQ ID NO: 16525 - DNA, 70 bp, Homo sapiens
aacctgacaactttatgtataatttttgttgggtctactgaaattatgttgacccaacaaaattatgaca

SEQ ID NO: 16526 - DNA, 71 bp, Homo sapiens
caactttatgtataatttttgttgggtctactgaaattatgttgacccaacaaaattatgacaattcagga

SEQ ID NO: 16527 - DNA, 75 bp, Homo sapiens
ttgttgggtctactgaaattatgttgacccaacaaaattatgacaattcaggaaacattggagataccttgcata

SEQ ID NO: 16528 - DNA, 76 bp, Homo sapiens
actgaaattatgttgacccaacaaaattatgacaattcaggaaacattggagataccttgcataaatatctgtgct

SEQ ID NO: 16529 - DNA, 78 bp, Homo sapiens
atgttgacccaacaaaattatgacaattcaggaaacattggagataccttgcataaatatctgtgctttctcactctc

SEQ ID NO: 16530 - DNA, 79 bp, Homo sapiens
caaaattatgacaattcaggaaacattggagataccttgcataaatatctgtgctttctcactctctcttagaatatgt

SEQ ID NO: 16531 - DNA, 82 bp, Homo sapiens
attcaggaaacattggagataccttgcataaatatctgtgctttctcactctctcttagaatatgttcatgcatatggaatt

SEQ ID NO: 16532 - DNA, 80 bp, Homo sapiens
ggaaacattggagataccttgcataaatatctgtgctttctcactctctcttagaatatgttcatgcatatggaattttt

SEQ ID NO: 16533 - DNA, 67 bp, Homo sapiens
ttgtacccattagccatcccctaatatggaattttttatgtggaaatttttattactctactttttc

SEQ ID NO: 16534 - DNA, 67 bp, Homo sapiens
cccattagccatcccctaatatggaattttttatgtggaaatttttattactctactttttctcctc

SEQ ID NO: 16535 - DNA, 65 bp, Homo sapiens
ccctaatatggaattttttatgtggaaatttttattactctactttttctcctcttttttagtca

SEQ ID NO: 16536 - DNA, 64 bp, Homo sapiens
attttttatgtggaaatttttattactctactttttctcctcttttttagtcagtttgtggagg

SEQ ID NO: 16537 - DNA, 68 bp, Homo sapiens
tggaaatttttattactctactttttctcctcttttttagtcagtttgtggaggtactttctgccatc

SEQ ID NO: 16538 - DNA, 71 bp, Homo sapiens
tattactctactttttctcctcttttttagtcagtttgtggaggtactttctgccatctggcatactttat

SEQ ID NO: 16539 - DNA, 70 bp, Homo sapiens
ctctactttttctcctcttttttagtcagtttgtggaggtactttctgccatctggcatactttatttaa

SEQ ID NO: 16540 - DNA, 75 bp, Homo sapiens
tcttttttagtcagtttgtggaggtactttctgccatctggcatactttatttaaaatagatcgagatagtagca

SEQ ID NO: 16541 - DNA, 76 bp, Homo sapiens
tttagtcagtttgtggaggtactttctgccatctggcatactttatttaaaatagatcgagatagtagcataaaca

SEQ ID NO: 16542 - DNA, 76 bp, Homo sapiens
tggaggtactttctgccatctggcatactttatttaaaatagatcgagatagtagcataaacagaaattttggtga

SEQ ID NO: 16543 - DNA, 77 bp, Homo sapiens
ctttctgccatctggcatactttatttaaaatagatcgagatagtagcataaacagaaattttggtgattaagcatc

SEQ ID NO: 16544 - DNA, 74 bp, Homo sapiens
ctggcatactttatttaaaatagatcgagatagtagcataaacagaaattttggtgattaagcatcttgtaaac

SEQ ID NO: 16545 - DNA, 74 bp, Homo sapiens
atttaaaatagatcgagatagtagcataaacagaaattttggtgattaagcatcttgtaaactactggcacaaa

SEQ ID NO: 16546 - DNA, 77 bp, Homo sapiens
gatagtagcataaacagaaattttggtgattaagcatcttgtaaactactggcacaaataataggtgtcaatagata

SEQ ID NO: 16547 - DNA, 75 bp, Homo sapiens
aaacagaaattttggtgattaagcatcttgtaaactactggcacaaataataggtgtcaatagatatttgctgaa

SEQ ID NO: 16548 - DNA, 83 bp, Homo sapiens
ttttggtgattaagcatcttgtaaactactggcacaaataataggtgtcaatagatatttgctgaatgagtgagtcacatgca

SEQ ID NO: 16549 - DNA, 83 bp, Homo sapiens
catcttgtaaactactggcacaaataataggtgtcaatagatatttgctgaatgagtgagtcacatgcaagtgattaatataa

SEQ ID NO: 16550 - DNA, 81 bp, Homo sapiens
gtaaactactggcacaaataataggtgtcaatagatatttgctgaatgagtgagtcacatgcaagtgattaatataaagaa

SEQ ID NO: 16551 - DNA, 82 bp, Homo sapiens
gtgtcaatagatatttgctgaatgagtgagtcacatgcaagtgattaatataaagaacagttgggagaaatgctacattatt

SEQ ID NO: 16552 - DNA, 78 bp, Homo sapiens
atgagtgagtcacatgcaagtgattaatataaagaacagttgggagaaatgctacattatttacttcaggggagataa

SEQ ID NO: 16553 - DNA, 76 bp, Homo sapiens
gagtcacatgcaagtgattaatataaagaacagttgggagaaatgctacattatttacttcaggggagataatttc

SEQ ID NO: 16554 - DNA, 74 bp, Homo sapiens
gcaagtgattaatataaagaacagttgggagaaatgctacattatttacttcaggggagataatttctaggaga

SEQ ID NO: 16555 - DNA, 72 bp, Homo sapiens
agttgggagaaatgctacattatttacttcaggggagataatttctaggagacaagaagtagttctgtgctt

SEQ ID NO: 16556 - DNA, 72 bp, Homo sapiens
ggagataatttctaggagacaagaagtagttctgtgctttggtttggtctgaccttaaacaagaatcttgtc

SEQ ID NO: 16557 - DNA, 73 bp, Homo sapiens
taatttctaggagacaagaagtagttctgtgctttggtttggtctgaccttaaacaagaatcttgtctcagtc

SEQ ID NO: 16558 - DNA, 71 bp, Homo sapiens
aagaagtagttctgtgctttggtttggtctgaccttaaacaagaatcttgtctcagtcctgttagtggaaa

SEQ ID NO: 16559 - DNA, 72 bp, Homo sapiens
tagttctgtgctttggtttggtctgaccttaaacaagaatcttgtctcagtcctgttagtggaaagaagtaa

SEQ ID NO: 16560 - DNA, 72 bp, Homo sapiens
ctgaccttaaacaagaatcttgtctcagtcctgttagtggaaagaagtaaactaattcacagatcacaaaaa

SEQ ID NO: 16561 - DNA, 76 bp, Homo sapiens
caagaatcttgtctcagtcctgttagtggaaagaagtaaactaattcacagatcacaaaaaagtacatgatagcaa

SEQ ID NO: 16562 - DNA, 77 bp, Homo sapiens
tctcagtcctgttagtggaaagaagtaaactaattcacagatcacaaaaaagtacatgatagcaagataaagttgca

SEQ ID NO: 16563 - DNA, 75 bp, Homo sapiens
gtcctgttagtggaaagaagtaaactaattcacagatcacaaaaaagtacatgatagcaagataaagttgcatta

SEQ ID NO: 16564 - DNA, 73 bp, Homo sapiens
ggaaagaagtaaactaattcacagatcacaaaaaagtacatgatagcaagataaagttgcattaaatttaaga

SEQ ID NO: 16565 - DNA, 75 bp, Homo sapiens
taattcacagatcacaaaaaagtacatgatagcaagataaagttgcattaaatttaagagttaaagtggattcag

SEQ ID NO: 16566 - DNA, 76 bp, Homo sapiens
cagatcacaaaaaagtacatgatagcaagataaagttgcattaaatttaagagttaaagtggattcagtgcaattg

SEQ ID NO: 16567 - DNA, 76 bp, Homo sapiens
aaagtacatgatagcaagataaagttgcattaaatttaagagttaaagtggattcagtgcaattgtagacttcaga

SEQ ID NO: 16568 - DNA, 77 bp, Homo sapiens
gatagcaagataaagttgcattaaatttaagagttaaagtggattcagtgcaattgtagacttcagattacatttga

SEQ ID NO: 16569 - DNA, 73 bp, Homo sapiens
gataaagttgcattaaatttaagagttaaagtggattcagtgcaattgtagacttcagattacatttgaattt

SEQ ID NO: 16570 - DNA, 72 bp, Homo sapiens
cattaaatttaagagttaaagtggattcagtgcaattgtagacttcagattacatttgaattttattaaatc

SEQ ID NO: 16571 - DNA, 71 bp, Homo sapiens
gagttaaagtggattcagtgcaattgtagacttcagattacatttgaattttattaaatctaaatttaggg

SEQ ID NO: 16572 - DNA, 73 bp, Homo sapiens
gtggattcagtgcaattgtagacttcagattacatttgaattttattaaatctaaatttaggggtgaagtata

SEQ ID NO: 16573 - DNA, 71 bp, Homo sapiens
gacttcagattacatttgaattttattaaatctaaatttaggggtgaagtatatatcaaagccaccagatt

SEQ ID NO: 16574 - DNA, 71 bp, Homo sapiens
catttgaattttattaaatctaaatttaggggtgaagtatatatcaaagccaccagatttaattatagcat

SEQ ID NO: 16575 - DNA, 73 bp, Homo sapiens
ttaaatctaaatttaggggtgaagtatatatcaaagccaccagatttaattatagcattatagtggtagacaa

SEQ ID NO: 16576 - DNA, 73 bp, Homo sapiens
tctaaatttaggggtgaagtatatatcaaagccaccagatttaattatagcattatagtggtagacaaaggag

SEQ ID NO: 16577 - DNA, 74 bp, Homo sapiens
gggtgaagtatatatcaaagccaccagatttaattatagcattatagtggtagacaaaggagttgtttgataat

SEQ ID NO: 16578 - DNA, 72 bp, Homo sapiens
gccaccagatttaattatagcattatagtggtagacaaaggagttgtttgataattttagtctgttttgtgt

SEQ ID NO: 16579 - DNA, 74 bp, Homo sapiens
tatagcattatagtggtagacaaaggagttgtttgataattttagtctgttttgtgttaagattacttgatgga

SEQ ID NO: 16580 - DNA, 72 bp, Homo sapiens
caaaggagttgtttgataattttagtctgttttgtgttaagattacttgatggatattaacatcgtaagaga

SEQ ID NO: 16581 - DNA, 75 bp, Homo sapiens
gtttgataattttagtctgttttgtgttaagattacttgatggatattaacatcgtaagagagtaggactgatgc

SEQ ID NO: 16582 - DNA, 76 bp, Homo sapiens
tttagtctgttttgtgttaagattacttgatggatattaacatcgtaagagagtaggactgatgcgactacaagaa

SEQ ID NO: 16583 - DNA, 76 bp, Homo sapiens
gttttgtgttaagattacttgatggatattaacatcgtaagagagtaggactgatgcgactacaagaaatactgac

SEQ ID NO: 16584 - DNA, 79 bp, Homo sapiens
ttaagattacttgatggatattaacatcgtaagagagtaggactgatgcgactacaagaaatactgactgatcattttc

SEQ ID NO: 16585 - DNA, 82 bp, Homo sapiens
atggatattaacatcgtaagagagtaggactgatgcgactacaagaaatactgactgatcattttctgtgtggtgctagtca

SEQ ID NO: 16586 - DNA, 80 bp, Homo sapiens
attaacatcgtaagagagtaggactgatgcgactacaagaaatactgactgatcattttctgtgtggtgctagtcagtgt

SEQ ID NO: 16587 - DNA, 80 bp, Homo sapiens
actgatgcgactacaagaaatactgactgatcattttctgtgtggtgctagtcagtgttggattacaagaaatttgagtc

SEQ ID NO: 16588 - DNA, 77 bp, Homo sapiens
caagaaatactgactgatcattttctgtgtggtgctagtcagtgttggattacaagaaatttgagtcccatttcaaa

SEQ ID NO: 16589 - DNA, 75 bp, Homo sapiens
gatcattttctgtgtggtgctagtcagtgttggattacaagaaatttgagtcccatttcaaaaataatttgatat

SEQ ID NO: 16590 - DNA, 71 bp, Homo sapiens
agtcagtgttggattacaagaaatttgagtcccatttcaaaaataatttgatatttgctccttttagatcc

SEQ ID NO: 16591 - DNA, 70 bp, Homo sapiens
tacaagaaatttgagtcccatttcaaaaataatttgatatttgctccttttagatcctaaaggtaggtga

SEQ ID NO: 16592 - DNA, 73 bp, Homo sapiens
ttgagtcccatttcaaaaataatttgatatttgctccttttagatcctaaaggtaggtgaaattgctgatcca

SEQ ID NO: 16593 - DNA, 71 bp, Homo sapiens
cccatttcaaaaataatttgatatttgctccttttagatcctaaaggtaggtgaaattgctgatccaggga

SEQ ID NO: 16594 - DNA, 75 bp, Homo sapiens
atatttgctccttttagatcctaaaggtaggtgaaattgctgatccagggattcaaaggctcagatttaatctga

SEQ ID NO: 16595 - DNA, 77 bp, Homo sapiens
ttttagatcctaaaggtaggtgaaattgctgatccagggattcaaaggctcagatttaatctgagtaatgagcagtc

SEQ ID NO: 16596 - DNA, 74 bp, Homo sapiens
ctaaaggtaggtgaaattgctgatccagggattcaaaggctcagatttaatctgagtaatgagcagtccttttt

SEQ ID NO: 16597 - DNA, 76 bp, Homo sapiens
tgaaattgctgatccagggattcaaaggctcagatttaatctgagtaatgagcagtccttttttcaactataaaaa

SEQ ID NO: 16598 - DNA, 73 bp, Homo sapiens
atccagggattcaaaggctcagatttaatctgagtaatgagcagtccttttttcaactataaaaatgtgaacc

SEQ ID NO: 16599 - DNA, 76 bp, Homo sapiens
caaaggctcagatttaatctgagtaatgagcagtccttttttcaactataaaaatgtgaacctgaatacagattca

SEQ ID NO: 16600 - DNA, 77 bp, Homo sapiens
ctcagatttaatctgagtaatgagcagtccttttttcaactataaaaatgtgaacctgaatacagattcactgattg

SEQ ID NO: 16601 - DNA, 78 bp, Homo sapiens
atctgagtaatgagcagtccttttttcaactataaaaatgtgaacctgaatacagattcactgattgttgcagacaaa

SEQ ID NO: 16602 - DNA, 76 bp, Homo sapiens
gagcagtccttttttcaactataaaaatgtgaacctgaatacagattcactgattgttgcagacaaaatgaacact

SEQ ID NO: 16603 - DNA, 78 bp, Homo sapiens
tcaactataaaaatgtgaacctgaatacagattcactgattgttgcagacaaaatgaacacttgtttcagtgcttttc

SEQ ID NO: 16604 - DNA, 76 bp, Homo sapiens
aaaaatgtgaacctgaatacagattcactgattgttgcagacaaaatgaacacttgtttcagtgcttttcttctaa

SEQ ID NO: 16605 - DNA, 75 bp, Homo sapiens
cagattcactgattgttgcagacaaaatgaacacttgtttcagtgcttttcttctaaatttaatttgtttcatgg

SEQ ID NO: 16606 - DNA, 71 bp, Homo sapiens
tgttgcagacaaaatgaacacttgtttcagtgcttttcttctaaatttaatttgtttcatggtttattcgt

SEQ ID NO: 16607 - DNA, 69 bp, Homo sapiens
cagacaaaatgaacacttgtttcagtgcttttcttctaaatttaatttgtttcatggtttattcgttgt

SEQ ID NO: 16608 - DNA, 71 bp, Homo sapiens
tcagtgcttttcttctaaatttaatttgtttcatggtttattcgttgttttcctaggatgagaaaatgtca

SEQ ID NO: 16609 - DNA, 71 bp, Homo sapiens
ctaaatttaatttgtttcatggtttattcgttgttttcctaggatgagaaaatgtcagaatctacaatgga

SEQ ID NO: 16610 - DNA, 73 bp, Homo sapiens
atttgtttcatggtttattcgttgttttcctaggatgagaaaatgtcagaatctacaatggatgccttccaaa

SEQ ID NO: 16611 - DNA, 74 bp, Homo sapiens
ttcatggtttattcgttgttttcctaggatgagaaaatgtcagaatctacaatggatgccttccaaagcctacc

SEQ ID NO: 16612 - DNA, 77 bp, Homo sapiens
ttgttttcctaggatgagaaaatgtcagaatctacaatggatgccttccaaagcctacctgcagaagcaagctaaag

SEQ ID NO: 16613 - DNA, 78 bp, Homo sapiens
taggatgagaaaatgtcagaatctacaatggatgccttccaaagcctacctgcagaagcaagctaaaggtagtgttgt

SEQ ID NO: 16614 - DNA, 74 bp, Homo sapiens
aaatgtcagaatctacaatggatgccttccaaagcctacctgcagaagcaagctaaaggtagtgttgttaaaaa

SEQ ID NO: 16615 - DNA, 72 bp, Homo sapiens
aatctacaatggatgccttccaaagcctacctgcagaagcaagctaaaggtagtgttgttaaaaaggtcttc

SEQ ID NO: 16616 - DNA, 72 bp, Homo sapiens
tgcagaagcaagctaaaggtagtgttgttaaaaaggtcttcccccaaatgctccttgcttaaatggtgtata

SEQ ID NO: 16617 - DNA, 69 bp, Homo sapiens
gctaaaggtagtgttgttaaaaaggtcttcccccaaatgctccttgcttaaatggtgtatagttgtata

SEQ ID NO: 16618 - DNA, 70 bp, Homo sapiens
tagtgttgttaaaaaggtcttcccccaaatgctccttgcttaaatggtgtatagttgtatacacccagta

SEQ ID NO: 16619 - DNA, 70 bp, Homo sapiens
tcttcccccaaatgctccttgcttaaatggtgtatagttgtatacacccagtagaagagaatactttttt

SEQ ID NO: 16620 - DNA, 67 bp, Homo sapiens
ttttttttttaaagtacaactctttctcagggagtagattgttgaagctaggtaataggtacatggg

SEQ ID NO: 16621 - DNA, 70 bp, Homo sapiens
ttttaaagtacaactctttctcagggagtagattgttgaagctaggtaataggtacatgggggttgattg

SEQ ID NO: 16622 - DNA, 73 bp, Homo sapiens
tctttctcagggagtagattgttgaagctaggtaataggtacatgggggttgattggactatttcctgtattg

SEQ ID NO: 16623 - DNA, 71 bp, Homo sapiens
gagtagattgttgaagctaggtaataggtacatgggggttgattggactatttcctgtattgggggatatt

SEQ ID NO: 16624 - DNA, 70 bp, Homo sapiens
attgttgaagctaggtaataggtacatgggggttgattggactatttcctgtattgggggatatttttga

SEQ ID NO: 16625 - DNA, 67 bp, Homo sapiens
ctaggtaataggtacatgggggttgattggactatttcctgtattgggggatatttttgaaattttc

SEQ ID NO: 16626 - DNA, 67 bp, Homo sapiens
aggtacatgggggttgattggactatttcctgtattgggggatatttttgaaattttccataataaa

SEQ ID NO: 16627 - DNA, 65 bp, Homo sapiens
gggttgattggactatttcctgtattgggggatatttttgaaattttccataataaattttttaa

SEQ ID NO: 16628 - DNA, 69 bp, Homo sapiens
aattttttaaatttatataaaaatcatagttcattatatttcctagagcaataaagtatacctatttca

SEQ ID NO: 16629 - DNA, 75 bp, Homo sapiens
atttatataaaaatcatagttcattatatttcctagagcaataaagtatacctatttcacctgatcaacttggca

SEQ ID NO: 16630 - DNA, 74 bp, Homo sapiens
aaatcatagttcattatatttcctagagcaataaagtatacctatttcacctgatcaacttggcattaactttc

SEQ ID NO: 16631 - DNA, 73 bp, Homo sapiens
gttcattatatttcctagagcaataaagtatacctatttcacctgatcaacttggcattaactttctttagcc

SEQ ID NO: 16632 - DNA, 74 bp, Homo sapiens
tcctagagcaataaagtatacctatttcacctgatcaacttggcattaactttctttagcctttcaatgctaac

SEQ ID NO: 16633 - DNA, 72 bp, Homo sapiens
gagcaataaagtatacctatttcacctgatcaacttggcattaactttctttagcctttcaatgctaacttt

SEQ ID NO: 16634 - DNA, 71 bp, Homo sapiens
acctatttcacctgatcaacttggcattaactttctttagcctttcaatgctaacttttaactgcaggaaa

SEQ ID NO: 16635 - DNA, 72 bp, Homo sapiens
acctgatcaacttggcattaactttctttagcctttcaatgctaacttttaactgcaggaaactgagaatgt

SEQ ID NO: 16636 - DNA, 75 bp, Homo sapiens
tggcattaactttctttagcctttcaatgctaacttttaactgcaggaaactgagaatgttgtgtcacatttcta

SEQ ID NO: 16637 - DNA, 74 bp, Homo sapiens
tttctttagcctttcaatgctaacttttaactgcaggaaactgagaatgttgtgtcacatttctacgcttctat

SEQ ID NO: 16638 - DNA, 73 bp, Homo sapiens
ttagcctttcaatgctaacttttaactgcaggaaactgagaatgttgtgtcacatttctacgcttctattttt

SEQ ID NO: 16639 - DNA, 72 bp, Homo sapiens
aatgctaacttttaactgcaggaaactgagaatgttgtgtcacatttctacgcttctattttttaaatgtat

SEQ ID NO: 16640 - DNA, 68 bp, Homo sapiens
tgtgttacaaacaaactaattatactcttgtaattatttttaagggtacagtaaattattgttgactg

SEQ ID NO: 16641 - DNA, 68 bp, Homo sapiens
caaactaattatactcttgtaattatttttaagggtacagtaaattattgttgactgtaatcaccctg

SEQ ID NO: 16642 - DNA, 69 bp, Homo sapiens
taattatactcttgtaattatttttaagggtacagtaaattattgttgactgtaatcaccctgttgtac

SEQ ID NO: 16643 - DNA, 77 bp, Homo sapiens
ctggatcatatggtggctctgtaattctattttaaataaaattattctcactatagacagatgatgttgttgtgttt

SEQ ID NO: 16644 - DNA, 75 bp, Homo sapiens
gtggctctgtaattctattttaaataaaattattctcactatagacagatgatgttgttgtgtttttccctcagc

SEQ ID NO: 16645 - DNA, 75 bp, Homo sapiens
ctgtaattctattttaaataaaattattctcactatagacagatgatgttgttgtgtttttccctcagctgtgaa

SEQ ID NO: 16646 - DNA, 74 bp, Homo sapiens
tttaaataaaattattctcactatagacagatgatgttgttgtgtttttccctcagctgtgaaaaagaaagaga

SEQ ID NO: 16647 - DNA, 71 bp, Homo sapiens
aaagaaagagaaaaagtctaagaccagtgaaaagaaagacagcaaagagagcagtgttgtgaagaacgtgg

SEQ ID NO: 16648 - DNA, 74 bp, Homo sapiens
aaaaagtctaagaccagtgaaaagaaagacagcaaagagagcagtgttgtgaagaacgtggtggactctagtca

SEQ ID NO: 16649 - DNA, 76 bp, Homo sapiens
tctaagaccagtgaaaagaaagacagcaaagagagcagtgttgtgaagaacgtggtggactctagtcagaaaccta

SEQ ID NO: 16650 - DNA, 75 bp, Homo sapiens
aaaagaaagacagcaaagagagcagtgttgtgaagaacgtggtggactctagtcagaaacctaccccatcagcaa

SEQ ID NO: 16651 - DNA, 78 bp, Homo sapiens
aagacagcaaagagagcagtgttgtgaagaacgtggtggactctagtcagaaacctaccccatcagcaagagaggatc

SEQ ID NO: 16652 - DNA, 76 bp, Homo sapiens
agcagtgttgtgaagaacgtggtggactctagtcagaaacctaccccatcagcaagagaggatcctgccccaaaga

SEQ ID NO: 16653 - DNA, 73 bp, Homo sapiens
gttgtgaagaacgtggtggactctagtcagaaacctaccccatcagcaagagaggatcctgccccaaagaaaa

SEQ ID NO: 16654 - DNA, 75 bp, Homo sapiens
acgtggtggactctagtcagaaacctaccccatcagcaagagaggatcctgccccaaagaaaagcagtagtgagc

SEQ ID NO: 16655 - DNA, 72 bp, Homo sapiens
aaacctaccccatcagcaagagaggatcctgccccaaagaaaagcagtagtgagcctcctccacgaaagccc

SEQ ID NO: 16656 - DNA, 74 bp, Homo sapiens
atcagcaagagaggatcctgccccaaagaaaagcagtagtgagcctcctccacgaaagcccgtcgaggaaaaga

SEQ ID NO: 16657 - DNA, 70 bp, Homo sapiens
aaagcagtagtgagcctcctccacgaaagcccgtcgaggaaaagagtgaagaagggaatgtctcggcccc

SEQ ID NO: 16658 - DNA, 70 bp, Homo sapiens
ctcctccacgaaagcccgtcgaggaaaagagtgaagaagggaatgtctcggcccctgggcctgaatccaa

SEQ ID NO: 16659 - DNA, 69 bp, Homo sapiens
ccacgaaagcccgtcgaggaaaagagtgaagaagggaatgtctcggcccctgggcctgaatccaaacag

SEQ ID NO: 16660 - DNA, 73 bp, Homo sapiens
tcgaggaaaagagtgaagaagggaatgtctcggcccctgggcctgaatccaaacaggccaccactccagcttc

SEQ ID NO: 16661 - DNA, 72 bp, Homo sapiens
aaagagtgaagaagggaatgtctcggcccctgggcctgaatccaaacaggccaccactccagcttccaggaa

SEQ ID NO: 16662 - DNA, 74 bp, Homo sapiens
aagggaatgtctcggcccctgggcctgaatccaaacaggccaccactccagcttccaggaagtcaagcaagcag

SEQ ID NO: 16663 - DNA, 77 bp, Homo sapiens
tctcggcccctgggcctgaatccaaacaggccaccactccagcttccaggaagtcaagcaagcaggtctcccagcca

SEQ ID NO: 16664 - DNA, 80 bp, Homo sapiens
tgggcctgaatccaaacaggccaccactccagcttccaggaagtcaagcaagcaggtctcccagccagcactggtcatcc

SEQ ID NO: 16665 - DNA, 81 bp, Homo sapiens
tccaaacaggccaccactccagcttccaggaagtcaagcaagcaggtctcccagccagcactggtcatcccgcctcagcca

SEQ ID NO: 16666 - DNA, 79 bp, Homo sapiens
actccagcttccaggaagtcaagcaagcaggtctcccagccagcactggtcatcccgcctcagccacctactacaggac

SEQ ID NO: 16667 - DNA, 77 bp, Homo sapiens
agtcaagcaagcaggtctcccagccagcactggtcatcccgcctcagccacctactacaggaccgccaagaaaagaa

SEQ ID NO: 16668 - DNA, 73 bp, Homo sapiens
gtctcccagccagcactggtcatcccgcctcagccacctactacaggaccgccaagaaaagaagttcccaaaa

SEQ ID NO: 16669 - DNA, 72 bp, Homo sapiens
cagcactggtcatcccgcctcagccacctactacaggaccgccaagaaaagaagttcccaaaaccactccta

SEQ ID NO: 16670 - DNA, 71 bp, Homo sapiens
ctggtcatcccgcctcagccacctactacaggaccgccaagaaaagaagttcccaaaaccactcctagtga

SEQ ID NO: 16671 - DNA, 69 bp, Homo sapiens
tcagccacctactacaggaccgccaagaaaagaagttcccaaaaccactcctagtgagcccaagaaaaa

SEQ ID NO: 16672 - DNA, 68 bp, Homo sapiens
acctactacaggaccgccaagaaaagaagttcccaaaaccactcctagtgagcccaagaaaaagcagc

SEQ ID NO: 16673 - DNA, 71 bp, Homo sapiens
cgccaagaaaagaagttcccaaaaccactcctagtgagcccaagaaaaagcagcctccaccaccagaatca

SEQ ID NO: 16674 - DNA, 70 bp, Homo sapiens
aaaagaagttcccaaaaccactcctagtgagcccaagaaaaagcagcctccaccaccagaatcaggtgag

SEQ ID NO: 16675 - DNA, 73 bp, Homo sapiens
aaaaccactcctagtgagcccaagaaaaagcagcctccaccaccagaatcaggtgagtgaggagggcaagaag

SEQ ID NO: 16676 - DNA, 78 bp, Homo sapiens
tagtgagcccaagaaaaagcagcctccaccaccagaatcaggtgagtgaggagggcaagaaggaattgctgaaccaca

SEQ ID NO: 16677 - DNA, 75 bp, Homo sapiens
aagaaaaagcagcctccaccaccagaatcaggtgagtgaggagggcaagaaggaattgctgaaccacaagtacta

SEQ ID NO: 16678 - DNA, 75 bp, Homo sapiens
aagcagcctccaccaccagaatcaggtgagtgaggagggcaagaaggaattgctgaaccacaagtactaacaaaa

SEQ ID NO: 16679 - DNA, 77 bp, Homo sapiens
accagaatcaggtgagtgaggagggcaagaaggaattgctgaaccacaagtactaacaaaaaagcactgatgtctca

SEQ ID NO: 16680 - DNA, 76 bp, Homo sapiens
aatcaggtgagtgaggagggcaagaaggaattgctgaaccacaagtactaacaaaaaagcactgatgtctcaaaca

SEQ ID NO: 16681 - DNA, 76 bp, Homo sapiens
gtgaggagggcaagaaggaattgctgaaccacaagtactaacaaaaaagcactgatgtctcaaacagcatttgaaa

SEQ ID NO: 16682 - DNA, 77 bp, Homo sapiens
aggaattgctgaaccacaagtactaacaaaaaagcactgatgtctcaaacagcatttgaaagcaggaaatgtatgat

SEQ ID NO: 16683 - DNA, 77 bp, Homo sapiens
tgaaccacaagtactaacaaaaaagcactgatgtctcaaacagcatttgaaagcaggaaatgtatgatttgaagtct

SEQ ID NO: 16684 - DNA, 76 bp, Homo sapiens
acaagtactaacaaaaaagcactgatgtctcaaacagcatttgaaagcaggaaatgtatgatttgaagtcttcagt

SEQ ID NO: 16685 - DNA, 79 bp, Homo sapiens
aaaaagcactgatgtctcaaacagcatttgaaagcaggaaatgtatgatttgaagtcttcagttcaagaaaatcagctc

SEQ ID NO: 16686 - DNA, 79 bp, Homo sapiens
tgtctcaaacagcatttgaaagcaggaaatgtatgatttgaagtcttcagttcaagaaaatcagctctctttctaacta

SEQ ID NO: 16687 - DNA, 77 bp, Homo sapiens
cagcatttgaaagcaggaaatgtatgatttgaagtcttcagttcaagaaaatcagctctctttctaactattatgtt

SEQ ID NO: 16688 - DNA, 74 bp, Homo sapiens
gaaatgtatgatttgaagtcttcagttcaagaaaatcagctctctttctaactattatgtttaataataaagaa

SEQ ID NO: 16689 - DNA, 72 bp, Homo sapiens
tttgaagtcttcagttcaagaaaatcagctctctttctaactattatgtttaataataaagaaacagaaaca

SEQ ID NO: 16690 - DNA, 69 bp, Homo sapiens
ttcagttcaagaaaatcagctctctttctaactattatgtttaataataaagaaacagaaacaaaaaaa

SEQ ID NO: 16691 - DNA, 64 bp, Homo sapiens
cagaaacaaaaaaaacagttaaattggaggtattgttttaatttcctgttcgaagcctagagtt

SEQ ID NO: 16692 - DNA, 63 bp, Homo sapiens
aaaaacagttaaattggaggtattgttttaatttcctgttcgaagcctagagtttaaatagtt

SEQ ID NO: 16693 - DNA, 63 bp, Homo sapiens
cagttaaattggaggtattgttttaatttcctgttcgaagcctagagtttaaatagttttttt

SEQ ID NO: 16694 - DNA, 75 bp, Homo sapiens
tttttttctaatggccctttcttcacaggtcagtcagtactaaagtagtcgttgccagcatctgactgcaattta

SEQ ID NO: 16695 - DNA, 78 bp, Homo sapiens
ttctaatggccctttcttcacaggtcagtcagtactaaagtagtcgttgccagcatctgactgcaatttattctgaat

SEQ ID NO: 16696 - DNA, 76 bp, Homo sapiens
tttcttcacaggtcagtcagtactaaagtagtcgttgccagcatctgactgcaatttattctgaattttttaggtc

SEQ ID NO: 16697 - DNA, 79 bp, Homo sapiens
gtcagtcagtactaaagtagtcgttgccagcatctgactgcaatttattctgaattttttaggtccagagcagagcaaa

SEQ ID NO: 16698 - DNA, 77 bp, Homo sapiens
tactaaagtagtcgttgccagcatctgactgcaatttattctgaattttttaggtccagagcagagcaaacagaaaa

SEQ ID NO: 16699 - DNA, 78 bp, Homo sapiens
tagtcgttgccagcatctgactgcaatttattctgaattttttaggtccagagcagagcaaacagaaaaaagtggctc

SEQ ID NO: 16700 - DNA, 73 bp, Homo sapiens
atctgactgcaatttattctgaattttttaggtccagagcagagcaaacagaaaaaagtggctccccgcccaa

SEQ ID NO: 16701 - DNA, 69 bp, Homo sapiens
aatttattctgaattttttaggtccagagcagagcaaacagaaaaaagtggctccccgcccaagtatcc

SEQ ID NO: 16702 - DNA, 68 bp, Homo sapiens
tttaggtccagagcagagcaaacagaaaaaagtggctccccgcccaagtatccctgtaaaacaaaaac

SEQ ID NO: 16703 - DNA, 70 bp, Homo sapiens
aaaagaaaaggtgaggagagatttgtttctctgccatttctcagggatgtattctattttgtagggaaaa

SEQ ID NO: 16704 - DNA, 72 bp, Homo sapiens
aaaggtgaggagagatttgtttctctgccatttctcagggatgtattctattttgtagggaaaagccttatc

SEQ ID NO: 16705 - DNA, 73 bp, Homo sapiens
atttgtttctctgccatttctcagggatgtattctattttgtagggaaaagccttatccttgacttctatgta

SEQ ID NO: 16706 - DNA, 76 bp, Homo sapiens
tgccatttctcagggatgtattctattttgtagggaaaagccttatccttgacttctatgtagatggcagtggaat

SEQ ID NO: 16707 - DNA, 73 bp, Homo sapiens
atttctcagggatgtattctattttgtagggaaaagccttatccttgacttctatgtagatggcagtggaatt

SEQ ID NO: 16708 - DNA, 74 bp, Homo sapiens
tcagggatgtattctattttgtagggaaaagccttatccttgacttctatgtagatggcagtggaatttcttaa

SEQ ID NO: 16709 - DNA, 72 bp, Homo sapiens
agggatgtattctattttgtagggaaaagccttatccttgacttctatgtagatggcagtggaatttcttaa

SEQ ID NO: 16710 - DNA, 71 bp, Homo sapiens
atgtattctattttgtagggaaaagccttatccttgacttctatgtagatggcagtggaatttcttaaaat

SEQ ID NO: 16711 - DNA, 71 bp, Homo sapiens
ttctattttgtagggaaaagccttatccttgacttctatgtagatggcagtggaatttcttaaaattaaga

SEQ ID NO: 16712 - DNA, 70 bp, Homo sapiens
gtagggaaaagccttatccttgacttctatgtagatggcagtggaatttcttaaaattaagaaacttcaa

SEQ ID NO: 16713 - DNA, 69 bp, Homo sapiens
agggaaaagccttatccttgacttctatgtagatggcagtggaatttcttaaaattaagaaacttcaag

SEQ ID NO: 16714 - DNA, 70 bp, Homo sapiens
aagccttatccttgacttctatgtagatggcagtggaatttcttaaaattaagaaacttcaagtttaggc

SEQ ID NO: 16715 - DNA, 71 bp, Homo sapiens
tccttgacttctatgtagatggcagtggaatttcttaaaattaagaaacttcaagtttaggcttttagctg

SEQ ID NO: 16716 - DNA, 72 bp, Homo sapiens
ttgacttctatgtagatggcagtggaatttcttaaaattaagaaacttcaagtttaggcttttagctgggca

SEQ ID NO: 16717 - DNA, 70 bp, Homo sapiens
acttctatgtagatggcagtggaatttcttaaaattaagaaacttcaagtttaggcttttagctgggcac

SEQ ID NO: 16718 - DNA, 61 bp, Homo sapiens
aaataaaaagtttaggctttagcctgtttcttttttggtttcttccttgttgcttttccct

SEQ ID NO: 16719 - DNA, 64 bp, Homo sapiens
aagtttaggctttagcctgtttcttttttggtttcttccttgttgcttttcccttctttgtggc

SEQ ID NO: 16720 - DNA, 67 bp, Homo sapiens
tttagcctgtttcttttttggtttcttccttgttgcttttcccttctttgtggccccacatgttcta

SEQ ID NO: 16721 - DNA, 68 bp, Homo sapiens
ttcttttttggtttcttccttgttgcttttcccttctttgtggccccacatgttctagcctaggaatc

SEQ ID NO: 16722 - DNA, 69 bp, Homo sapiens
ttttttggtttcttccttgttgcttttcccttctttgtggccccacatgttctagcctaggaatctgct

SEQ ID NO: 16723 - DNA, 71 bp, Homo sapiens
tttcttccttgttgcttttcccttctttgtggccccacatgttctagcctaggaatctgcttattctaaag

SEQ ID NO: 16724 - DNA, 73 bp, Homo sapiens
tgcttttcccttctttgtggccccacatgttctagcctaggaatctgcttattctaaaggccatttggcgtaa

SEQ ID NO: 16725 - DNA, 71 bp, Homo sapiens
ttctttgtggccccacatgttctagcctaggaatctgcttattctaaaggccatttggcgtaattattttt

SEQ ID NO: 16726 - DNA, 72 bp, Homo sapiens
tgtggccccacatgttctagcctaggaatctgcttattctaaaggccatttggcgtaattattttttgaccc

SEQ ID NO: 16727 - DNA, 70 bp, Homo sapiens
ttctagcctaggaatctgcttattctaaaggccatttggcgtaattattttttgaccccaacatccttta

SEQ ID NO: 16728 - DNA, 70 bp, Homo sapiens
ctaggaatctgcttattctaaaggccatttggcgtaattattttttgaccccaacatcctttagcaatta

SEQ ID NO: 16729 - DNA, 70 bp, Homo sapiens
gcttattctaaaggccatttggcgtaattattttttgaccccaacatcctttagcaattatttgtctgta

SEQ ID NO: 16730 - DNA, 68 bp, Homo sapiens
ggccatttggcgtaattattttttgaccccaacatcctttagcaattatttgtctgtaaaaatcaccc

SEQ ID NO: 16731 - DNA, 68 bp, Homo sapiens
tggcgtaattattttttgaccccaacatcctttagcaattatttgtctgtaaaaatcacccttccctg

SEQ ID NO: 16732 - DNA, 68 bp, Homo sapiens
tttttgaccccaacatcctttagcaattatttgtctgtaaaaatcacccttccctgtattcactattt

SEQ ID NO: 16733 - DNA, 68 bp, Homo sapiens
cccaacatcctttagcaattatttgtctgtaaaaatcacccttccctgtattcactatttttatttat

SEQ ID NO: 16734 - DNA, 71 bp, Homo sapiens
gcaattatttgtctgtaaaaatcacccttccctgtattcactatttttatttattatggataaagagatag

SEQ ID NO: 16735 - DNA, 73 bp, Homo sapiens
gtctgtaaaaatcacccttccctgtattcactatttttatttattatggataaagagatagtgtggtggctca

SEQ ID NO: 16736 - DNA, 64 bp, Homo sapiens
aaaaaaaattcaaagattatttgtttatgttggaaacatgttttttagatctattaataaaatt

SEQ ID NO: 16737 - DNA, 72 bp, Homo sapiens
tcaaagattatttgtttatgttggaaacatgttttttagatctattaataaaatttgtcatttgcattatta

SEQ ID NO: 16738 - DNA, 74 bp, Homo sapiens
ttgtttatgttggaaacatgttttttagatctattaataaaatttgtcatttgcattattatctgttgcaaatg

SEQ ID NO: 16739 - DNA, 77 bp, Homo sapiens
tatgttggaaacatgttttttagatctattaataaaatttgtcatttgcattattatctgttgcaaatgtgaaggca

SEQ ID NO: 16740 - DNA, 75 bp, Homo sapiens
gttttttagatctattaataaaatttgtcatttgcattattatctgttgcaaatgtgaaggcaaatagggtgtga

SEQ ID NO: 16741 - DNA, 76 bp, Homo sapiens
agatctattaataaaatttgtcatttgcattattatctgttgcaaatgtgaaggcaaatagggtgtgattttgttc

SEQ ID NO: 16742 - DNA, 77 bp, Homo sapiens
aatttgtcatttgcattattatctgttgcaaatgtgaaggcaaatagggtgtgattttgttctatattcatcttttg

SEQ ID NO: 16743 - DNA, 78 bp, Homo sapiens
ttgcattattatctgttgcaaatgtgaaggcaaatagggtgtgattttgttctatattcatcttttgtctccttagga

SEQ ID NO: 16744 - DNA, 73 bp, Homo sapiens
atctgttgcaaatgtgaaggcaaatagggtgtgattttgttctatattcatcttttgtctccttaggaaaaac

SEQ ID NO: 16745 - DNA, 74 bp, Homo sapiens
tctgttgcaaatgtgaaggcaaatagggtgtgattttgttctatattcatcttttgtctccttaggaaaaacca

SEQ ID NO: 16746 - DNA, 70 bp, Homo sapiens
aaatgtgaaggcaaatagggtgtgattttgttctatattcatcttttgtctccttaggaaaaaccacctc

SEQ ID NO: 16747 - DNA, 70 bp, Homo sapiens
aatgtgaaggcaaatagggtgtgattttgttctatattcatcttttgtctccttaggaaaaaccacctcc

SEQ ID NO: 16748 - DNA, 69 bp, Homo sapiens
caaatagggtgtgattttgttctatattcatcttttgtctccttaggaaaaaccacctccggtcaataa

SEQ ID NO: 16749 - DNA, 71 bp, Homo sapiens
ggtgtgattttgttctatattcatcttttgtctccttaggaaaaaccacctccggtcaataagcaggagaa

SEQ ID NO: 16750 - DNA, 73 bp, Homo sapiens
attttgttctatattcatcttttgtctccttaggaaaaaccacctccggtcaataagcaggagaatgcaggca

SEQ ID NO: 16751 - DNA, 74 bp, Homo sapiens
ttctatattcatcttttgtctccttaggaaaaaccacctccggtcaataagcaggagaatgcaggcactttgaa

SEQ ID NO: 16752 - DNA, 75 bp, Homo sapiens
ttttgtctccttaggaaaaaccacctccggtcaataagcaggagaatgcaggcactttgaacatcctcagcactc

SEQ ID NO: 16753 - DNA, 79 bp, Homo sapiens
taggaaaaaccacctccggtcaataagcaggagaatgcaggcactttgaacatcctcagcactctctccaatggcaata

SEQ ID NO: 16754 - DNA, 80 bp, Homo sapiens
acctccggtcaataagcaggagaatgcaggcactttgaacatcctcagcactctctccaatggcaatagttctaagcaaa

SEQ ID NO: 16755 - DNA, 80 bp, Homo sapiens
ggtcaataagcaggagaatgcaggcactttgaacatcctcagcactctctccaatggcaatagttctaagcaaaaaattc

SEQ ID NO: 16756 - DNA, 81 bp, Homo sapiens
actttgaacatcctcagcactctctccaatggcaatagttctaagcaaaaaattccagcagatggagtccacaggatcaga

SEQ ID NO: 16757 - DNA, 77 bp, Homo sapiens
tctctccaatggcaatagttctaagcaaaaaattccagcagatggagtccacaggatcagagtggactttaaggtaa

SEQ ID NO: 16758 - DNA, 73 bp, Homo sapiens
aatggcaatagttctaagcaaaaaattccagcagatggagtccacaggatcagagtggactttaaggtaaagg

SEQ ID NO: 16759 - DNA, 75 bp, Homo sapiens
aaaattccagcagatggagtccacaggatcagagtggactttaaggtaaaggtgttcagtgatcataaagtatat

SEQ ID NO: 16760 - DNA, 74 bp, Homo sapiens
cacaggatcagagtggactttaaggtaaaggtgttcagtgatcataaagtatattgagtgtcaaagactttaaa

SEQ ID NO: 16761 - DNA, 72 bp, Homo sapiens
cagagtggactttaaggtaaaggtgttcagtgatcataaagtatattgagtgtcaaagactttaaataaaga

SEQ ID NO: 16762 - DNA, 71 bp, Homo sapiens
aaggtaaaggtgttcagtgatcataaagtatattgagtgtcaaagactttaaataaagaaaatgctactac

SEQ ID NO: 16763 - DNA, 72 bp, Homo sapiens
ggtgttcagtgatcataaagtatattgagtgtcaaagactttaaataaagaaaatgctactaccaaaggtgt

SEQ ID NO: 16764 - DNA, 72 bp, Homo sapiens
gatcataaagtatattgagtgtcaaagactttaaataaagaaaatgctactaccaaaggtgttgaaagagga

SEQ ID NO: 16765 - DNA, 73 bp, Homo sapiens
tatattgagtgtcaaagactttaaataaagaaaatgctactaccaaaggtgttgaaagaggaaatcagcacca

SEQ ID NO: 16766 - DNA, 70 bp, Homo sapiens
agtgtcaaagactttaaataaagaaaatgctactaccaaaggtgttgaaagaggaaatcagcaccaactg

SEQ ID NO: 16767 - DNA, 70 bp, Homo sapiens
aaataaagaaaatgctactaccaaaggtgttgaaagaggaaatcagcaccaactgggggaatgaataaga

SEQ ID NO: 16768 - DNA, 71 bp, Homo sapiens
aaatgctactaccaaaggtgttgaaagaggaaatcagcaccaactgggggaatgaataagaactcccatta

SEQ ID NO: 16769 - DNA, 73 bp, Homo sapiens
ttgaaagaggaaatcagcaccaactgggggaatgaataagaactcccattagcaggtgggtttagcgctggga

SEQ ID NO: 16770 - DNA, 72 bp, Homo sapiens
aggaaatcagcaccaactgggggaatgaataagaactcccattagcaggtgggtttagcgctgggagagctt

SEQ ID NO: 16771 - DNA, 71 bp, Homo sapiens
aactgggggaatgaataagaactcccattagcaggtgggtttagcgctgggagagctttggtcagtgttgt

SEQ ID NO: 16772 - DNA, 73 bp, Homo sapiens
atgaataagaactcccattagcaggtgggtttagcgctgggagagctttggtcagtgttgttaggtcactgtt

SEQ ID NO: 16773 - DNA, 78 bp, Homo sapiens
ttagcaggtgggtttagcgctgggagagctttggtcagtgttgttaggtcactgtttgtgaactgactgcagaacata

SEQ ID NO: 16774 - DNA, 79 bp, Homo sapiens
tttagcgctgggagagctttggtcagtgttgttaggtcactgtttgtgaactgactgcagaacatacataatgaaacat

SEQ ID NO: 16775 - DNA, 82 bp, Homo sapiens
ttggtcagtgttgttaggtcactgtttgtgaactgactgcagaacatacataatgaaacattcctatccatcctgagcagta

SEQ ID NO: 16776 - DNA, 82 bp, Homo sapiens
ttaggtcactgtttgtgaactgactgcagaacatacataatgaaacattcctatccatcctgagcagtatcagaggaagtaa

SEQ ID NO: 16777 - DNA, 80 bp, Homo sapiens
actgtttgtgaactgactgcagaacatacataatgaaacattcctatccatcctgagcagtatcagaggaagtaattcct

SEQ ID NO: 16778 - DNA, 79 bp, Homo sapiens
agaacatacataatgaaacattcctatccatcctgagcagtatcagaggaagtaattccttcacatggaaagtatcaaa

SEQ ID NO: 16779 - DNA, 80 bp, Homo sapiens
ataatgaaacattcctatccatcctgagcagtatcagaggaagtaattccttcacatggaaagtatcaaaccatgatgat

SEQ ID NO: 16780 - DNA, 81 bp, Homo sapiens
attcctatccatcctgagcagtatcagaggaagtaattccttcacatggaaagtatcaaaccatgatgattccttgagtca

SEQ ID NO: 16781 - DNA, 81 bp, Homo sapiens
tgagcagtatcagaggaagtaattccttcacatggaaagtatcaaaccatgatgattccttgagtcagcaaaactgtaaga

SEQ ID NO: 16782 - DNA, 78 bp, Homo sapiens
agtatcagaggaagtaattccttcacatggaaagtatcaaaccatgatgattccttgagtcagcaaaactgtaagaga

SEQ ID NO: 16783 - DNA, 76 bp, Homo sapiens
aagtaattccttcacatggaaagtatcaaaccatgatgattccttgagtcagcaaaactgtaagagaaattcaatc

SEQ ID NO: 16784 - DNA, 77 bp, Homo sapiens
ttcacatggaaagtatcaaaccatgatgattccttgagtcagcaaaactgtaagagaaattcaatcccagtgtattt

SEQ ID NO: 16785 - DNA, 78 bp, Homo sapiens
atcaaaccatgatgattccttgagtcagcaaaactgtaagagaaattcaatcccagtgtattttcgcaatatattcaa

SEQ ID NO: 16786 - DNA, 76 bp, Homo sapiens
ccttgagtcagcaaaactgtaagagaaattcaatcccagtgtattttcgcaatatattcaatatgaattgaacaac

SEQ ID NO: 16787 - DNA, 76 bp, Homo sapiens
gcaaaactgtaagagaaattcaatcccagtgtattttcgcaatatattcaatatgaattgaacaactaggtgagcc

SEQ ID NO: 16788 - DNA, 75 bp, Homo sapiens
aatcccagtgtattttcgcaatatattcaatatgaattgaacaactaggtgagccttttaatagtccgtgtctga

SEQ ID NO: 16789 - DNA, 75 bp, Homo sapiens
gtgtattttcgcaatatattcaatatgaattgaacaactaggtgagccttttaatagtccgtgtctgagattaaa

SEQ ID NO: 16790 - DNA, 73 bp, Homo sapiens
gcaatatattcaatatgaattgaacaactaggtgagccttttaatagtccgtgtctgagattaaaacttttta

SEQ ID NO: 16791 - DNA, 69 bp, Homo sapiens
caactaggtgagccttttaatagtccgtgtctgagattaaaactttttaaagcagcagttatttttgga

SEQ ID NO: 16792 - DNA, 73 bp, Homo sapiens
agtccgtgtctgagattaaaactttttaaagcagcagttatttttggactcattgaaatgaaatactctgaca

SEQ ID NO: 16793 - DNA, 75 bp, Homo sapiens
actttttaaagcagcagttatttttggactcattgaaatgaaatactctgacattgtgatgtcacactaatttta

SEQ ID NO: 16794 - DNA, 79 bp, Homo sapiens
agcagcagttatttttggactcattgaaatgaaatactctgacattgtgatgtcacactaattttatgcttttcatcct

SEQ ID NO: 16795 - DNA, 78 bp, Homo sapiens
ggactcattgaaatgaaatactctgacattgtgatgtcacactaattttatgcttttcatccttattttccatccaaa

SEQ ID NO: 16796 - DNA, 77 bp, Homo sapiens
tgaaatactctgacattgtgatgtcacactaattttatgcttttcatccttattttccatccaaagttgtgtaattg

SEQ ID NO: 16797 - DNA, 75 bp, Homo sapiens
tctgacattgtgatgtcacactaattttatgcttttcatccttattttccatccaaagttgtgtaattgtaaaac

SEQ ID NO: 16798 - DNA, 71 bp, Homo sapiens
gtgatgtcacactaattttatgcttttcatccttattttccatccaaagttgtgtaattgtaaaactttcc

SEQ ID NO: 16799 - DNA, 70 bp, Homo sapiens
ttcatccttattttccatccaaagttgtgtaattgtaaaactttcctaagtgacctttctctctccacag

SEQ ID NO: 16800 - DNA, 70 bp, Homo sapiens
aaagttgtgtaattgtaaaactttcctaagtgacctttctctctccacaggaggattgtgaagcagaaaa

SEQ ID NO: 16801 - DNA, 74 bp, Homo sapiens
tgtaattgtaaaactttcctaagtgacctttctctctccacaggaggattgtgaagcagaaaatgtgtgggaga

SEQ ID NO: 16802 - DNA, 74 bp, Homo sapiens
aactttcctaagtgacctttctctctccacaggaggattgtgaagcagaaaatgtgtgggagatgggaggctta

SEQ ID NO: 16803 - DNA, 77 bp, Homo sapiens
taagtgacctttctctctccacaggaggattgtgaagcagaaaatgtgtgggagatgggaggcttaggaatcttgac

SEQ ID NO: 16804 - DNA, 78 bp, Homo sapiens
tctctccacaggaggattgtgaagcagaaaatgtgtgggagatgggaggcttaggaatcttgacttctgttcctataa

SEQ ID NO: 16805 - DNA, 75 bp, Homo sapiens
aggaggattgtgaagcagaaaatgtgtgggagatgggaggcttaggaatcttgacttctgttcctataacaccca

SEQ ID NO: 16806 - DNA, 71 bp, Homo sapiens
aagcagaaaatgtgtgggagatgggaggcttaggaatcttgacttctgttcctataacacccagggtggtt

SEQ ID NO: 16807 - DNA, 70 bp, Homo sapiens
aaaatgtgtgggagatgggaggcttaggaatcttgacttctgttcctataacacccagggtggtttgctt

SEQ ID NO: 16808 - DNA, 73 bp, Homo sapiens
atgggaggcttaggaatcttgacttctgttcctataacacccagggtggtttgctttctctgtgccagtagtg

SEQ ID NO: 16809 - DNA, 75 bp, Homo sapiens
cttaggaatcttgacttctgttcctataacacccagggtggtttgctttctctgtgccagtagtgggcatgtaga

SEQ ID NO: 16810 - DNA, 74 bp, Homo sapiens
atcttgacttctgttcctataacacccagggtggtttgctttctctgtgccagtagtgggcatgtagaggtaag

SEQ ID NO: 16811 - DNA, 75 bp, Homo sapiens
ttcctataacacccagggtggtttgctttctctgtgccagtagtgggcatgtagaggtaaggcatcctgcttctt

SEQ ID NO: 16812 - DNA, 74 bp, Homo sapiens
aacacccagggtggtttgctttctctgtgccagtagtgggcatgtagaggtaaggcatcctgcttctttgtacc

SEQ ID NO: 16813 - DNA, 76 bp, Homo sapiens
ttgctttctctgtgccagtagtgggcatgtagaggtaaggcatcctgcttctttgtaccccaggaagtacataaat

SEQ ID NO: 16814 - DNA, 75 bp, Homo sapiens
ttctctgtgccagtagtgggcatgtagaggtaaggcatcctgcttctttgtaccccaggaagtacataaattatt

SEQ ID NO: 16815 - DNA, 72 bp, Homo sapiens
agtagtgggcatgtagaggtaaggcatcctgcttctttgtaccccaggaagtacataaattatttttctgtg

SEQ ID NO: 16816 - DNA, 70 bp, Homo sapiens
cccaggaagtacataaattatttttctgtggatgaaattactatagtctgttttgttggtatttagcagg

SEQ ID NO: 16817 - DNA, 71 bp, Homo sapiens
cataaattatttttctgtggatgaaattactatagtctgttttgttggtatttagcaggtactattccctg

SEQ ID NO: 16818 - DNA, 70 bp, Homo sapiens
ggatgaaattactatagtctgttttgttggtatttagcaggtactattccctgtttaaaccagctaaaga

SEQ ID NO: 16819 - DNA, 68 bp, Homo sapiens
ttactatagtctgttttgttggtatttagcaggtactattccctgtttaaaccagctaaagaaatgtt

SEQ ID NO: 16820 - DNA, 67 bp, Homo sapiens
ctgttttgttggtatttagcaggtactattccctgtttaaaccagctaaagaaatgttttgaagtat

SEQ ID NO: 16821 - DNA, 67 bp, Homo sapiens
ggtatttagcaggtactattccctgtttaaaccagctaaagaaatgttttgaagtattttagagatt

SEQ ID NO: 16822 - DNA, 68 bp, Homo sapiens
ctattccctgtttaaaccagctaaagaaatgttttgaagtattttagagattttaggaaggaatctgc

SEQ ID NO: 16823 - DNA, 71 bp, Homo sapiens
tttaaaccagctaaagaaatgttttgaagtattttagagattttaggaaggaatctgctattagagtagca

SEQ ID NO: 16824 - DNA, 71 bp, Homo sapiens
ccagctaaagaaatgttttgaagtattttagagattttaggaaggaatctgctattagagtagcaaagtta

SEQ ID NO: 16825 - DNA, 72 bp, Homo sapiens
gttttgaagtattttagagattttaggaaggaatctgctattagagtagcaaagttattgagagtgaaaaga

SEQ ID NO: 16826 - DNA, 74 bp, Homo sapiens
attttagagattttaggaaggaatctgctattagagtagcaaagttattgagagtgaaaagatcaataatccca

SEQ ID NO: 16827 - DNA, 76 bp, Homo sapiens
agagattttaggaaggaatctgctattagagtagcaaagttattgagagtgaaaagatcaataatcccatctctct

SEQ ID NO: 16828 - DNA, 77 bp, Homo sapiens
gaaggaatctgctattagagtagcaaagttattgagagtgaaaagatcaataatcccatctctcttaaattcagtct

SEQ ID NO: 16829 - DNA, 77 bp, Homo sapiens
tgctattagagtagcaaagttattgagagtgaaaagatcaataatcccatctctcttaaattcagtctttattagag

SEQ ID NO: 16830 - DNA, 76 bp, Homo sapiens
gcaaagttattgagagtgaaaagatcaataatcccatctctcttaaattcagtctttattagagttctgatctttc

SEQ ID NO: 16831 - DNA, 78 bp, Homo sapiens
gagagtgaaaagatcaataatcccatctctcttaaattcagtctttattagagttctgatctttctgttagatgtcta

SEQ ID NO: 16832 - DNA, 77 bp, Homo sapiens
agatcaataatcccatctctcttaaattcagtctttattagagttctgatctttctgttagatgtctaaataagaga

SEQ ID NO: 16833 - DNA, 74 bp, Homo sapiens
ataatcccatctctcttaaattcagtctttattagagttctgatctttctgttagatgtctaaataagagaaaa

SEQ ID NO: 16834 - DNA, 72 bp, Homo sapiens
ctcttaaattcagtctttattagagttctgatctttctgttagatgtctaaataagagaaaaaattatacag

SEQ ID NO: 16835 - DNA, 74 bp, Homo sapiens
tagagttctgatctttctgttagatgtctaaataagagaaaaaattatacagtggtctattaaaagggatgcta

SEQ ID NO: 16836 - DNA, 74 bp, Homo sapiens
tgatctttctgttagatgtctaaataagagaaaaaattatacagtggtctattaaaagggatgctattgatggt

SEQ ID NO: 16837 - DNA, 72 bp, Homo sapiens
aagagaaaaaattatacagtggtctattaaaagggatgctattgatggttattttatattgtatatcaaagc

SEQ ID NO: 16838 - DNA, 75 bp, Homo sapiens
aaagggatgctattgatggttattttatattgtatatcaaagcctcttcatctataaggagctcttaccaattaa

SEQ ID NO: 16839 - DNA, 76 bp, Homo sapiens
atgctattgatggttattttatattgtatatcaaagcctcttcatctataaggagctcttaccaattaataagaaa

SEQ ID NO: 16840 - DNA, 74 bp, Homo sapiens
attttatattgtatatcaaagcctcttcatctataaggagctcttaccaattaataagaaaaaggaatgacatc

SEQ ID NO: 16841 - DNA, 71 bp, Homo sapiens
tcaaagcctcttcatctataaggagctcttaccaattaataagaaaaaggaatgacatccagaaaaaaaaa

SEQ ID NO: 16842 - DNA, 70 bp, Homo sapiens
ttcatctataaggagctcttaccaattaataagaaaaaggaatgacatccagaaaaaaaaataggcaaaa

SEQ ID NO: 16843 - DNA, 69 bp, Homo sapiens
aaaaataggcaaaagacagaaatagataattcacaaaattagaaataaatacatgttgggtggcagggg

SEQ ID NO: 16844 - DNA, 69 bp, Homo sapiens
aaaagacagaaatagataattcacaaaattagaaataaatacatgttgggtggcagggggaggtgaagg

SEQ ID NO: 16845 - DNA, 69 bp, Homo sapiens
aaatagataattcacaaaattagaaataaatacatgttgggtggcagggggaggtgaagggagggtgtc

SEQ ID NO: 16846 - DNA, 66 bp, Homo sapiens
aaaattagaaataaatacatgttgggtggcagggggaggtgaagggagggtgtctgttttttagcc

SEQ ID NO: 16847 - DNA, 69 bp, Homo sapiens
ataaatacatgttgggtggcagggggaggtgaagggagggtgtctgttttttagccctctagtgaccaa

SEQ ID NO: 16848 - DNA, 68 bp, Homo sapiens
tacatgttgggtggcagggggaggtgaagggagggtgtctgttttttagccctctagtgaccaaaaac

SEQ ID NO: 16849 - DNA, 64 bp, Homo sapiens
agggggaggtgaagggagggtgtctgttttttagccctctagtgaccaaaaactggaaattaaa

SEQ ID NO: 16850 - DNA, 68 bp, Homo sapiens
gtgaagggagggtgtctgttttttagccctctagtgaccaaaaactggaaattaaagcatgataaaaa

SEQ ID NO: 16851 - DNA, 67 bp, Homo sapiens
gggtgtctgttttttagccctctagtgaccaaaaactggaaattaaagcatgataaaaaaagaatcc

SEQ ID NO: 16852 - DNA, 68 bp, Homo sapiens
ttttagccctctagtgaccaaaaactggaaattaaagcatgataaaaaaagaatcctgaataaatggg

SEQ ID NO: 16853 - DNA, 68 bp, Homo sapiens
aactggaaattaaagcatgataaaaaaagaatcctgaataaatggggactttctgttggtggaaagaa

SEQ ID NO: 16854 - DNA, 70 bp, Homo sapiens
gaaattaaagcatgataaaaaaagaatcctgaataaatggggactttctgttggtggaaagaaatataga

SEQ ID NO: 16855 - DNA, 69 bp, Homo sapiens
gataaaaaaagaatcctgaataaatggggactttctgttggtggaaagaaatatagattagttacaatc

SEQ ID NO: 16856 - DNA, 70 bp, Homo sapiens
atcctgaataaatggggactttctgttggtggaaagaaatatagattagttacaatctttctttctgagg

SEQ ID NO: 16857 - DNA, 70 bp, Homo sapiens
cctgaataaatggggactttctgttggtggaaagaaatatagattagttacaatctttctttctgaggga

SEQ ID NO: 16858 - DNA, 69 bp, Homo sapiens
gaataaatggggactttctgttggtggaaagaaatatagattagttacaatctttctttctgagggaat

SEQ ID NO: 16859 - DNA, 69 bp, Homo sapiens
gggactttctgttggtggaaagaaatatagattagttacaatctttctttctgagggaattatttggaa

SEQ ID NO: 16860 - DNA, 69 bp, Homo sapiens
ggactttctgttggtggaaagaaatatagattagttacaatctttctttctgagggaattatttggaaa

SEQ ID NO: 16861 - DNA, 72 bp, Homo sapiens
ttctgttggtggaaagaaatatagattagttacaatctttctttctgagggaattatttggaaatatatatc

SEQ ID NO: 16862 - DNA, 72 bp, Homo sapiens
ttggtggaaagaaatatagattagttacaatctttctttctgagggaattatttggaaatatatatctatct

SEQ ID NO: 16863 - DNA, 71 bp, Homo sapiens
gaaatatagattagttacaatctttctttctgagggaattatttggaaatatatatctatctttaaaatag

SEQ ID NO: 16864 - DNA, 71 bp, Homo sapiens
gattagttacaatctttctttctgagggaattatttggaaatatatatctatctttaaaataggtatatcc

SEQ ID NO: 16865 - DNA, 72 bp, Homo sapiens
ttacaatctttctttctgagggaattatttggaaatatatatctatctttaaaataggtatatcctctaaca

SEQ ID NO: 16866 - DNA, 74 bp, Homo sapiens
caatctttctttctgagggaattatttggaaatatatatctatctttaaaataggtatatcctctaacatagca

SEQ ID NO: 16867 - DNA, 76 bp, Homo sapiens
atttggaaatatatatctatctttaaaataggtatatcctctaacatagcaattgcacttcaaacacttatggata

SEQ ID NO: 16868 - DNA, 77 bp, Homo sapiens
atatatctatctttaaaataggtatatcctctaacatagcaattgcacttcaaacacttatggatataattagataa

SEQ ID NO: 16869 - DNA, 75 bp, Homo sapiens
ctttaaaataggtatatcctctaacatagcaattgcacttcaaacacttatggatataattagataaattggcaa

SEQ ID NO: 16870 - DNA, 78 bp, Homo sapiens
aataggtatatcctctaacatagcaattgcacttcaaacacttatggatataattagataaattggcaaatctgtaga

SEQ ID NO: 16871 - DNA, 77 bp, Homo sapiens
cctctaacatagcaattgcacttcaaacacttatggatataattagataaattggcaaatctgtagatataaagaag

SEQ ID NO: 16872 - DNA, 77 bp, Homo sapiens
cacttcaaacacttatggatataattagataaattggcaaatctgtagatataaagaagtgttcatttcaatattgc

SEQ ID NO: 16873 - DNA, 78 bp, Homo sapiens
acttatggatataattagataaattggcaaatctgtagatataaagaagtgttcatttcaatattgctcataataata

SEQ ID NO: 16874 - DNA, 75 bp, Homo sapiens
attagataaattggcaaatctgtagatataaagaagtgttcatttcaatattgctcataataataaaaaactgga

SEQ ID NO: 16875 - DNA, 73 bp, Homo sapiens
gaagtgttcatttcaatattgctcataataataaaaaactggaaacaacccgaaagtccatctatagggagca

SEQ ID NO: 16876 - DNA, 72 bp, Homo sapiens
catttcaatattgctcataataataaaaaactggaaacaacccgaaagtccatctatagggagcatgggtta

SEQ ID NO: 16877 - DNA, 71 bp, Homo sapiens
ttgctcataataataaaaaactggaaacaacccgaaagtccatctatagggagcatgggttaaaataagca

SEQ ID NO: 16878 - DNA, 70 bp, Homo sapiens
ataaaaaactggaaacaacccgaaagtccatctatagggagcatgggttaaaataagcatagggcatata

SEQ ID NO: 16879 - DNA, 73 bp, Homo sapiens
actggaaacaacccgaaagtccatctatagggagcatgggttaaaataagcatagggcatatagctgggcacg

SEQ ID NO: 16880 - DNA, 72 bp, Homo sapiens
aaaaataaaagtgtagggcatatataatggcaaatatgaagtcctaaagataatatatattaatattattag

SEQ ID NO: 16881 - DNA, 80 bp, Homo sapiens
caaaagtaattgcagtaataacatggaaagatgtccatgacatatcactgagtgaaaagagcaggttacaagataatata

SEQ ID NO: 16882 - DNA, 79 bp, Homo sapiens
aaaagtaattgcagtaataacatggaaagatgtccatgacatatcactgagtgaaaagagcaggttacaagataatata

SEQ ID NO: 16883 - DNA, 83 bp, Homo sapiens
taattgcagtaataacatggaaagatgtccatgacatatcactgagtgaaaagagcaggttacaagataatatataaagcaca

SEQ ID NO: 16884 - DNA, 82 bp, Homo sapiens
taacatggaaagatgtccatgacatatcactgagtgaaaagagcaggttacaagataatatataaagcacaatcccatctta

SEQ ID NO: 16885 - DNA, 79 bp, Homo sapiens
atgtccatgacatatcactgagtgaaaagagcaggttacaagataatatataaagcacaatcccatcttagtttggaaa

SEQ ID NO: 16886 - DNA, 76 bp, Homo sapiens
gacatatcactgagtgaaaagagcaggttacaagataatatataaagcacaatcccatcttagtttggaaaagtgt

SEQ ID NO: 16887 - DNA, 71 bp, Homo sapiens
actgagtgaaaagagcaggttacaagataatatataaagcacaatcccatcttagtttggaaaagtgtttt

SEQ ID NO: 16888 - DNA, 70 bp, Homo sapiens
aagagcaggttacaagataatatataaagcacaatcccatcttagtttggaaaagtgtttttaaagtata

SEQ ID NO: 16889 - DNA, 71 bp, Homo sapiens
gataatatataaagcacaatcccatcttagtttggaaaagtgtttttaaagtatatatctagaaaacaatc

SEQ ID NO: 16890 - DNA, 69 bp, Homo sapiens
aaagcacaatcccatcttagtttggaaaagtgtttttaaagtatatatctagaaaacaatctggaagga

SEQ ID NO: 16891 - DNA, 68 bp, Homo sapiens
cttagtttggaaaagtgtttttaaagtatatatctagaaaacaatctggaaggattcacaccaaaata

SEQ ID NO: 16892 - DNA, 71 bp, Homo sapiens
gtgtttttaaagtatatatctagaaaacaatctggaaggattcacaccaaaatattaagagtgtggttgga

SEQ ID NO: 16893 - DNA, 73 bp, Homo sapiens
gtatatatctagaaaacaatctggaaggattcacaccaaaatattaagagtgtggttggattatgggtgacct

SEQ ID NO: 16894 - DNA, 70 bp, Homo sapiens
agaaaacaatctggaaggattcacaccaaaatattaagagtgtggttggattatgggtgacctttatttg

SEQ ID NO: 16895 - DNA, 71 bp, Homo sapiens
acaatctggaaggattcacaccaaaatattaagagtgtggttggattatgggtgacctttatttgtttctc

SEQ ID NO: 16896 - DNA, 68 bp, Homo sapiens
aggattcacaccaaaatattaagagtgtggttggattatgggtgacctttatttgtttctctggtttt

SEQ ID NO: 16897 - DNA, 66 bp, Homo sapiens
cacaccaaaatattaagagtgtggttggattatgggtgacctttatttgtttctctggtttttttt

SEQ ID NO: 16898 - DNA, 64 bp, Homo sapiens
ccaaaatattaagagtgtggttggattatgggtgacctttatttgtttctctggtttttttttt

SEQ ID NO: 16899 - DNA, 69 bp, Homo sapiens
ttttttaatctttctgagttttttgcagtatgtaccacctttacaatgaggaaggaaaaagtagcacaa

SEQ ID NO: 16900 - DNA, 69 bp, Homo sapiens
tttctgagttttttgcagtatgtaccacctttacaatgaggaaggaaaaagtagcacaattttaaatag

SEQ ID NO: 16901 - DNA, 70 bp, Homo sapiens
ttttgcagtatgtaccacctttacaatgaggaaggaaaaagtagcacaattttaaataggaagcagtagt

SEQ ID NO: 16902 - DNA, 71 bp, Homo sapiens
cagtatgtaccacctttacaatgaggaaggaaaaagtagcacaattttaaataggaagcagtagtttgtca

SEQ ID NO: 16903 - DNA, 71 bp, Homo sapiens
gaaggaaaaagtagcacaattttaaataggaagcagtagtttgtcatttataagggacatatcctacatcc

SEQ ID NO: 16904 - DNA, 72 bp, Homo sapiens
agtagcacaattttaaataggaagcagtagtttgtcatttataagggacatatcctacatcctttacagttc

SEQ ID NO: 16905 - DNA, 70 bp, Homo sapiens
tttaaataggaagcagtagtttgtcatttataagggacatatcctacatcctttacagttcttaaattcc

SEQ ID NO: 16906 - DNA, 74 bp, Homo sapiens
ataggaagcagtagtttgtcatttataagggacatatcctacatcctttacagttcttaaattcctggcagata

SEQ ID NO: 16907 - DNA, 73 bp, Homo sapiens
ttgtcatttataagggacatatcctacatcctttacagttcttaaattcctggcagatacctctttggcttat

SEQ ID NO: 16908 - DNA, 71 bp, Homo sapiens
tttataagggacatatcctacatcctttacagttcttaaattcctggcagatacctctttggcttattact

SEQ ID NO: 16909 - DNA, 74 bp, Homo sapiens
catatcctacatcctttacagttcttaaattcctggcagatacctctttggcttattacttaccacataagata

SEQ ID NO: 16910 - DNA, 74 bp, Homo sapiens
acatcctttacagttcttaaattcctggcagatacctctttggcttattacttaccacataagatatgtattca

SEQ ID NO: 16911 - DNA, 72 bp, Homo sapiens
cttaaattcctggcagatacctctttggcttattacttaccacataagatatgtattcaaaggtggtaaaga

SEQ ID NO: 16912 - DNA, 72 bp, Homo sapiens
attcctggcagatacctctttggcttattacttaccacataagatatgtattcaaaggtggtaaagaaaatc

SEQ ID NO: 16913 - DNA, 69 bp, Homo sapiens
atacctctttggcttattacttaccacataagatatgtattcaaaggtggtaaagaaaatccacgtcgg

SEQ ID NO: 16914 - DNA, 75 bp, Homo sapiens
taaaaaataagaaaatccaagctaggttgaaatctgaatgttgagcagtcagtgagacacaaactagctaagaaa

SEQ ID NO: 16915 - DNA, 76 bp, Homo sapiens
aataagaaaatccaagctaggttgaaatctgaatgttgagcagtcagtgagacacaaactagctaagaaagtcaac

SEQ ID NO: 16916 - DNA, 76 bp, Homo sapiens
aaaatccaagctaggttgaaatctgaatgttgagcagtcagtgagacacaaactagctaagaaagtcaaccctgcc

SEQ ID NO: 16917 - DNA, 78 bp, Homo sapiens
aagctaggttgaaatctgaatgttgagcagtcagtgagacacaaactagctaagaaagtcaaccctgcccacttgcca

SEQ ID NO: 16918 - DNA, 79 bp, Homo sapiens
taggttgaaatctgaatgttgagcagtcagtgagacacaaactagctaagaaagtcaaccctgcccacttgccatttga

SEQ ID NO: 16919 - DNA, 77 bp, Homo sapiens
aatctgaatgttgagcagtcagtgagacacaaactagctaagaaagtcaaccctgcccacttgccatttgaagttat

SEQ ID NO: 16920 - DNA, 78 bp, Homo sapiens
atctgaatgttgagcagtcagtgagacacaaactagctaagaaagtcaaccctgcccacttgccatttgaagttatta

SEQ ID NO: 16921 - DNA, 76 bp, Homo sapiens
aatgttgagcagtcagtgagacacaaactagctaagaaagtcaaccctgcccacttgccatttgaagttattacta

SEQ ID NO: 16922 - DNA, 74 bp, Homo sapiens
cagtcagtgagacacaaactagctaagaaagtcaaccctgcccacttgccatttgaagttattactagcaaaat

SEQ ID NO: 16923 - DNA, 73 bp, Homo sapiens
agtgagacacaaactagctaagaaagtcaaccctgcccacttgccatttgaagttattactagcaaaattaca

SEQ ID NO: 16924 - DNA, 71 bp, Homo sapiens
agacacaaactagctaagaaagtcaaccctgcccacttgccatttgaagttattactagcaaaattacaaa

SEQ ID NO: 16925 - DNA, 70 bp, Homo sapiens
acacaaactagctaagaaagtcaaccctgcccacttgccatttgaagttattactagcaaaattacaaat

SEQ ID NO: 16926 - DNA, 71 bp, Homo sapiens
aactagctaagaaagtcaaccctgcccacttgccatttgaagttattactagcaaaattacaaattattgc

SEQ ID NO: 16927 - DNA, 72 bp, Homo sapiens
gaaagtcaaccctgcccacttgccatttgaagttattactagcaaaattacaaattattgcctactattcat

SEQ ID NO: 16928 - DNA, 72 bp, Homo sapiens
tattactagcaaaattacaaattattgcctactattcatttactaagcaaatattctcttagtccctattac

SEQ ID NO: 16929 - DNA, 71 bp, Homo sapiens
gcaaaattacaaattattgcctactattcatttactaagcaaatattctcttagtccctattacgaacaac

SEQ ID NO: 16930 - DNA, 71 bp, Homo sapiens
ttattgcctactattcatttactaagcaaatattctcttagtccctattacgaacaacttattgttctaag

SEQ ID NO: 16931 - DNA, 73 bp, Homo sapiens
gcctactattcatttactaagcaaatattctcttagtccctattacgaacaacttattgttctaagtgcagaa

SEQ ID NO: 16932 - DNA, 76 bp, Homo sapiens
actaagcaaatattctcttagtccctattacgaacaacttattgttctaagtgcagaagttcagatatcattgaga

SEQ ID NO: 16933 - DNA, 77 bp, Homo sapiens
caaatattctcttagtccctattacgaacaacttattgttctaagtgcagaagttcagatatcattgagactgagaa

SEQ ID NO: 16934 - DNA, 79 bp, Homo sapiens
tcttagtccctattacgaacaacttattgttctaagtgcagaagttcagatatcattgagactgagaatattcagtcta

SEQ ID NO: 16935 - DNA, 80 bp, Homo sapiens
tattacgaacaacttattgttctaagtgcagaagttcagatatcattgagactgagaatattcagtctacaagtgccagg

SEQ ID NO: 16936 - DNA, 80 bp, Homo sapiens
acttattgttctaagtgcagaagttcagatatcattgagactgagaatattcagtctacaagtgccaggggtctactgta

SEQ ID NO: 16937 - DNA, 79 bp, Homo sapiens
ttcagatatcattgagactgagaatattcagtctacaagtgccaggggtctactgtatcctcttttccgtcttaataca

SEQ ID NO: 16938 - DNA, 75 bp, Homo sapiens
attgagactgagaatattcagtctacaagtgccaggggtctactgtatcctcttttccgtcttaatacagtgctt

SEQ ID NO: 16939 - DNA, 76 bp, Homo sapiens
gaatattcagtctacaagtgccaggggtctactgtatcctcttttccgtcttaatacagtgctttgcacccatata

SEQ ID NO: 16940 - DNA, 78 bp, Homo sapiens
ttcagtctacaagtgccaggggtctactgtatcctcttttccgtcttaatacagtgctttgcacccatatatatgcca

SEQ ID NO: 16941 - DNA, 75 bp, Homo sapiens
ccaggggtctactgtatcctcttttccgtcttaatacagtgctttgcacccatatatatgccacccacaggaata

SEQ ID NO: 16942 - DNA, 73 bp, Homo sapiens
tactgtatcctcttttccgtcttaatacagtgctttgcacccatatatatgccacccacaggaataacttttt

SEQ ID NO: 16943 - DNA, 72 bp, Homo sapiens
atcctcttttccgtcttaatacagtgctttgcacccatatatatgccacccacaggaataactttttttata

SEQ ID NO: 16944 - DNA, 74 bp, Homo sapiens
ttaatacagtgctttgcacccatatatatgccacccacaggaataactttttttatagcaccagtccttcaact

SEQ ID NO: 16945 - DNA, 75 bp, Homo sapiens
tgctttgcacccatatatatgccacccacaggaataactttttttatagcaccagtccttcaacttctgggatta

SEQ ID NO: 16946 - DNA, 72 bp, Homo sapiens
catatatatgccacccacaggaataactttttttatagcaccagtccttcaacttctgggattaaacagatt

SEQ ID NO: 16947 - DNA, 69 bp, Homo sapiens
atatgccacccacaggaataactttttttatagcaccagtccttcaacttctgggattaaacagatttt

SEQ ID NO: 16948 - DNA, 66 bp, Homo sapiens
caggaataactttttttatagcaccagtccttcaacttctgggattaaacagattttttttcaggg

SEQ ID NO: 16949 - DNA, 70 bp, Homo sapiens
agcaccagtccttcaacttctgggattaaacagattttttttcagggtataattgttctgatctaaattc

SEQ ID NO: 16950 - DNA, 74 bp, Homo sapiens
gattaaacagattttttttcagggtataattgttctgatctaaattctttatagttgtacatagcaatctcaca

SEQ ID NO: 16951 - DNA, 80 bp, Homo sapiens
gatctaaattctttatagttgtacatagcaatctcacagggttcctaaaatataaattagagaatagcatgctgcctgca

SEQ ID NO: 16952 - DNA, 81 bp, Homo sapiens
ttatagttgtacatagcaatctcacagggttcctaaaatataaattagagaatagcatgctgcctgcactgcactcctaaa

SEQ ID NO: 16953 - DNA, 83 bp, Homo sapiens
gtacatagcaatctcacagggttcctaaaatataaattagagaatagcatgctgcctgcactgcactcctaaagcatgaccag

SEQ ID NO: 16954 - DNA, 80 bp, Homo sapiens
acagggttcctaaaatataaattagagaatagcatgctgcctgcactgcactcctaaagcatgaccagtgcttgataaac

SEQ ID NO: 16955 - DNA, 85 bp, Homo sapiens
taaaatataaattagagaatagcatgctgcctgcactgcactcctaaagcatgaccagtgcttgataaactctcctccatgcgaa

SEQ ID NO: 16956 - DNA, 82 bp, Homo sapiens
aaattagagaatagcatgctgcctgcactgcactcctaaagcatgaccagtgcttgataaactctcctccatgcgaattttt

SEQ ID NO: 16957 - DNA, 81 bp, Homo sapiens
agaatagcatgctgcctgcactgcactcctaaagcatgaccagtgcttgataaactctcctccatgcgaattttttaaact

SEQ ID NO: 16958 - DNA, 74 bp, Homo sapiens
actcctaaagcatgaccagtgcttgataaactctcctccatgcgaattttttaaactttttatgttgacatgat

SEQ ID NO: 16959 - DNA, 76 bp, Homo sapiens
agcatgaccagtgcttgataaactctcctccatgcgaattttttaaactttttatgttgacatgatttcagactta

SEQ ID NO: 16960 - DNA, 73 bp, Homo sapiens
cagtgcttgataaactctcctccatgcgaattttttaaactttttatgttgacatgatttcagacttacaaaa

SEQ ID NO: 16961 - DNA, 70 bp, Homo sapiens
actctcctccatgcgaattttttaaactttttatgttgacatgatttcagacttacaaaaaaactatgag

SEQ ID NO: 16962 - DNA, 72 bp, Homo sapiens
tccatgcgaattttttaaactttttatgttgacatgatttcagacttacaaaaaaactatgagttgtacaga

SEQ ID NO: 16963 - DNA, 71 bp, Homo sapiens
taaactttttatgttgacatgatttcagacttacaaaaaaactatgagttgtacagagaattctaagtacc

SEQ ID NO: 16964 - DNA, 72 bp, Homo sapiens
atgttgacatgatttcagacttacaaaaaaactatgagttgtacagagaattctaagtacccctcacccaaa

SEQ ID NO: 16965 - DNA, 70 bp, Homo sapiens
tgatttcagacttacaaaaaaactatgagttgtacagagaattctaagtacccctcacccaaattcccta

SEQ ID NO: 16966 - DNA, 67 bp, Homo sapiens
gacttacaaaaaaactatgagttgtacagagaattctaagtacccctcacccaaattccctaagtgt

SEQ ID NO: 16967 - DNA, 71 bp, Homo sapiens
agttgtacagagaattctaagtacccctcacccaaattccctaagtgttaatatgtttctctgtgtgtata

SEQ ID NO: 16968 - DNA, 71 bp, Homo sapiens
gagaattctaagtacccctcacccaaattccctaagtgttaatatgtttctctgtgtgtatatattttaca

SEQ ID NO: 16969 - DNA, 69 bp, Homo sapiens
ccctcacccaaattccctaagtgttaatatgtttctctgtgtgtatatattttacaaaataacaaataa

SEQ ID NO: 16970 - DNA, 73 bp, Homo sapiens
gtgtatatattttacaaaataacaaataaaatacatatacacattttacctgtagatacacatgtatctaaaa

SEQ ID NO: 16971 - DNA, 72 bp, Homo sapiens
tttacaaaataacaaataaaatacatatacacattttacctgtagatacacatgtatctaaaaatttgagaa

SEQ ID NO: 16972 - DNA, 75 bp, Homo sapiens
aacaaataaaatacatatacacattttacctgtagatacacatgtatctaaaaatttgagaacaagttgcagaca

SEQ ID NO: 16973 - DNA, 75 bp, Homo sapiens
atacatatacacattttacctgtagatacacatgtatctaaaaatttgagaacaagttgcagacataaaccattt

SEQ ID NO: 16974 - DNA, 73 bp, Homo sapiens
acacattttacctgtagatacacatgtatctaaaaatttgagaacaagttgcagacataaaccattttacctc

SEQ ID NO: 16975 - DNA, 73 bp, Homo sapiens
ttacctgtagatacacatgtatctaaaaatttgagaacaagttgcagacataaaccattttacctctaaatat

SEQ ID NO: 16976 - DNA, 72 bp, Homo sapiens
atacacatgtatctaaaaatttgagaacaagttgcagacataaaccattttacctctaaatattttagtgta

SEQ ID NO: 16977 - DNA, 68 bp, Homo sapiens
atctaaaaatttgagaacaagttgcagacataaaccattttacctctaaatattttagtgtatatttt

SEQ ID NO: 16978 - DNA, 67 bp, Homo sapiens
ttttaaaaatcaaggacgttctcgtatttaaccatggtataattaccaaatcaggaaattaacacac

SEQ ID NO: 16979 - DNA, 72 bp, Homo sapiens
cgttctcgtatttaaccatggtataattaccaaatcaggaaattaacacactggtacattactattatctga

SEQ ID NO: 16980 - DNA, 73 bp, Homo sapiens
aaccatggtataattaccaaatcaggaaattaacacactggtacattactattatctgatctataggccttat

SEQ ID NO: 16981 - DNA, 72 bp, Homo sapiens
ggtataattaccaaatcaggaaattaacacactggtacattactattatctgatctataggccttatttagg

SEQ ID NO: 16982 - DNA, 74 bp, Homo sapiens
tcaggaaattaacacactggtacattactattatctgatctataggccttatttaggtttgaccaattgtccca

SEQ ID NO: 16983 - DNA, 72 bp, Homo sapiens
aacacactggtacattactattatctgatctataggccttatttaggtttgaccaattgtcccaataattcc

SEQ ID NO: 16984 - DNA, 73 bp, Homo sapiens
ggtacattactattatctgatctataggccttatttaggtttgaccaattgtcccaataattcctttatggca

SEQ ID NO: 16985 - DNA, 72 bp, Homo sapiens
tactattatctgatctataggccttatttaggtttgaccaattgtcccaataattcctttatggcaaaagaa

SEQ ID NO: 16986 - DNA, 70 bp, Homo sapiens
gatctataggccttatttaggtttgaccaattgtcccaataattcctttatggcaaaagaaaattctgga

SEQ ID NO: 16987 - DNA, 69 bp, Homo sapiens
gccttatttaggtttgaccaattgtcccaataattcctttatggcaaaagaaaattctggattatccta

SEQ ID NO: 16988 - DNA, 68 bp, Homo sapiens
ggtttgaccaattgtcccaataattcctttatggcaaaagaaaattctggattatcctagttagtatt

SEQ ID NO: 16989 - DNA, 68 bp, Homo sapiens
ttgtcccaataattcctttatggcaaaagaaaattctggattatcctagttagtatttttgaaaatcc

SEQ ID NO: 16990 - DNA, 70 bp, Homo sapiens
cctttatggcaaaagaaaattctggattatcctagttagtatttttgaaaatcctatatcaatatgaaaa

SEQ ID NO: 16991 - DNA, 70 bp, Homo sapiens
ggcaaaagaaaattctggattatcctagttagtatttttgaaaatcctatatcaatatgaaaataactta

SEQ ID NO: 16992 - DNA, 69 bp, Homo sapiens
aaaattctggattatcctagttagtatttttgaaaatcctatatcaatatgaaaataacttatttctaa

SEQ ID NO: 16993 - DNA, 69 bp, Homo sapiens
tcctagttagtatttttgaaaatcctatatcaatatgaaaataacttatttctaaaattagaaatggag

SEQ ID NO: 16994 - DNA, 65 bp, Homo sapiens
aaaaataaaattacaaatggaaaggacaaaccagaccttacaactgtttcgtatattacagaaaa

SEQ ID NO: 16995 - DNA, 65 bp, Homo sapiens
ttacaaatggaaaggacaaaccagaccttacaactgtttcgtatattacagaaaacgtttaaacc

SEQ ID NO: 16996 - DNA, 64 bp, Homo sapiens
gaaaggacaaaccagaccttacaactgtttcgtatattacagaaaacgtttaaaccctccctat

SEQ ID NO: 16997 - DNA, 63 bp, Homo sapiens
acaaaccagaccttacaactgtttcgtatattacagaaaacgtttaaaccctccctatttccc

SEQ ID NO: 16998 - DNA, 62 bp, Homo sapiens
ccttacaactgtttcgtatattacagaaaacgtttaaaccctccctatttcccccaccccac

SEQ ID NO: 16999 - DNA, 63 bp, Homo sapiens
tttcgtatattacagaaaacgtttaaaccctccctatttcccccaccccactcctttatattc

SEQ ID NO: 17000 - DNA, 64 bp, Homo sapiens
tacagaaaacgtttaaaccctccctatttcccccaccccactcctttatattcccatagctctt

SEQ ID NO: 17001 - DNA, 65 bp, Homo sapiens
gtttaaaccctccctatttcccccaccccactcctttatattcccatagctctttgtttatacca

SEQ ID NO: 17002 - DNA, 71 bp, Homo sapiens
tatttcccccaccccactcctttatattcccatagctctttgtttataccactcttaggtcacttagcatg

SEQ ID NO: 17003 - DNA, 71 bp, Homo sapiens
accccactcctttatattcccatagctctttgtttataccactcttaggtcacttagcatgttctgttaaa

SEQ ID NO: 17004 - DNA, 73 bp, Homo sapiens
actcctttatattcccatagctctttgtttataccactcttaggtcacttagcatgttctgttaaatcttgta

SEQ ID NO: 17005 - DNA, 73 bp, Homo sapiens
attcccatagctctttgtttataccactcttaggtcacttagcatgttctgttaaatcttgtattatatttat

SEQ ID NO: 17006 - DNA, 71 bp, Homo sapiens
ctctttgtttataccactcttaggtcacttagcatgttctgttaaatcttgtattatatttattttgttac

SEQ ID NO: 17007 - DNA, 71 bp, Homo sapiens
ccactcttaggtcacttagcatgttctgttaaatcttgtattatatttattttgttactttctatttccac

SEQ ID NO: 17008 - DNA, 72 bp, Homo sapiens
tcacttagcatgttctgttaaatcttgtattatatttattttgttactttctatttccactggtattaccac

SEQ ID NO: 17009 - DNA, 70 bp, Homo sapiens
gcatgttctgttaaatcttgtattatatttattttgttactttctatttccactggtattaccactttag

SEQ ID NO: 17010 - DNA, 70 bp, Homo sapiens
atcttgtattatatttattttgttactttctatttccactggtattaccactttagtactctgaatctcc

SEQ ID NO: 17011 - DNA, 71 bp, Homo sapiens
atatttattttgttactttctatttccactggtattaccactttagtactctgaatctcccgcagtgtcca

SEQ ID NO: 17012 - DNA, 70 bp, Homo sapiens
ctttctatttccactggtattaccactttagtactctgaatctcccgcagtgtccaatactgtacttttt

SEQ ID NO: 17013 - DNA, 74 bp, Homo sapiens
tggtattaccactttagtactctgaatctcccgcagtgtccaatactgtacttttttacatagtcattgcttaa

SEQ ID NO: 17014 - DNA, 76 bp, Homo sapiens
cactttagtactctgaatctcccgcagtgtccaatactgtacttttttacatagtcattgcttaatgaatatgtat

SEQ ID NO: 17015 - DNA, 77 bp, Homo sapiens
ctcccgcagtgtccaatactgtacttttttacatagtcattgcttaatgaatatgtattgaattaaatatatgccag

SEQ ID NO: 17016 - DNA, 78 bp, Homo sapiens
tgtccaatactgtacttttttacatagtcattgcttaatgaatatgtattgaattaaatatatgccagtggactacta

SEQ ID NO: 17017 - DNA, 74 bp, Homo sapiens
gtacttttttacatagtcattgcttaatgaatatgtattgaattaaatatatgccagtggactactaaaaccca

SEQ ID NO: 17018 - DNA, 77 bp, Homo sapiens
tacatagtcattgcttaatgaatatgtattgaattaaatatatgccagtggactactaaaacccaaagtatataaga

SEQ ID NO: 17019 - DNA, 71 bp, Homo sapiens
gtattgaattaaatatatgccagtggactactaaaacccaaagtatataagaagggtatggttgattatgt

SEQ ID NO: 17020 - DNA, 69 bp, Homo sapiens
gaattaaatatatgccagtggactactaaaacccaaagtatataagaagggtatggttgattatgtttt

SEQ ID NO: 17021 - DNA, 70 bp, Homo sapiens
gactactaaaacccaaagtatataagaagggtatggttgattatgtttttctacatattatttgacatac

SEQ ID NO: 17022 - DNA, 72 bp, Homo sapiens
cccaaagtatataagaagggtatggttgattatgtttttctacatattatttgacatacttctatcttccca

SEQ ID NO: 17023 - DNA, 76 bp, Homo sapiens
gttgattatgtttttctacatattatttgacatacttctatcttcccatgttcttactatagtttgtgtattgcca

SEQ ID NO: 17024 - DNA, 75 bp, Homo sapiens
tttttctacatattatttgacatacttctatcttcccatgttcttactatagtttgtgtattgccaagtctgttg

SEQ ID NO: 17025 - DNA, 76 bp, Homo sapiens
atattatttgacatacttctatcttcccatgttcttactatagtttgtgtattgccaagtctgttgtgagcccttc

SEQ ID NO: 17026 - DNA, 74 bp, Homo sapiens
catacttctatcttcccatgttcttactatagtttgtgtattgccaagtctgttgtgagcccttccacaagttt

SEQ ID NO: 17027 - DNA, 72 bp, Homo sapiens
atgttcttactatagtttgtgtattgccaagtctgttgtgagcccttccacaagttttgtttagaggagaac

SEQ ID NO: 17028 - DNA, 73 bp, Homo sapiens
atagtttgtgtattgccaagtctgttgtgagcccttccacaagttttgtttagaggagaacgagcgccctctg

SEQ ID NO: 17029 - DNA, 74 bp, Homo sapiens
gtgtattgccaagtctgttgtgagcccttccacaagttttgtttagaggagaacgagcgccctctggaggacca

SEQ ID NO: 17030 - DNA, 70 bp, Homo sapiens
ccttccacaagttttgtttagaggagaacgagcgccctctggaggaccagctggaaaattggtgttgtcg

SEQ ID NO: 17031 - DNA, 71 bp, Homo sapiens
gttttgtttagaggagaacgagcgccctctggaggaccagctggaaaattggtgttgtcgtcgttgcaaat

SEQ ID NO: 17032 - DNA, 73 bp, Homo sapiens
aacgagcgccctctggaggaccagctggaaaattggtgttgtcgtcgttgcaaattctgtcacgtttgtggaa

SEQ ID NO: 17033 - DNA, 77 bp, Homo sapiens
tggaggaccagctggaaaattggtgttgtcgtcgttgcaaattctgtcacgtttgtggaaggcaacatcaggctaca

SEQ ID NO: 17034 - DNA, 74 bp, Homo sapiens
ctggaaaattggtgttgtcgtcgttgcaaattctgtcacgtttgtggaaggcaacatcaggctacaaaggtaca

SEQ ID NO: 17035 - DNA, 72 bp, Homo sapiens
aaattggtgttgtcgtcgttgcaaattctgtcacgtttgtggaaggcaacatcaggctacaaaggtacaaaa

SEQ ID NO: 17036 - DNA, 73 bp, Homo sapiens
tcgttgcaaattctgtcacgtttgtggaaggcaacatcaggctacaaaggtacaaaacttggtaatagaacta

SEQ ID NO: 17037 - DNA, 72 bp, Homo sapiens
aaattctgtcacgtttgtggaaggcaacatcaggctacaaaggtacaaaacttggtaatagaactacagctg

SEQ ID NO: 17038 - DNA, 72 bp, Homo sapiens
acgtttgtggaaggcaacatcaggctacaaaggtacaaaacttggtaatagaactacagctgggcctctgta

SEQ ID NO: 17039 - DNA, 73 bp, Homo sapiens
aaggcaacatcaggctacaaaggtacaaaacttggtaatagaactacagctgggcctctgtatcagtgggttc

SEQ ID NO: 17040 - DNA, 73 bp, Homo sapiens
atcaggctacaaaggtacaaaacttggtaatagaactacagctgggcctctgtatcagtgggttctgtatccc

SEQ ID NO: 17041 - DNA, 72 bp, Homo sapiens
aaaggtacaaaacttggtaatagaactacagctgggcctctgtatcagtgggttctgtatccctggactcaa

SEQ ID NO: 17042 - DNA, 73 bp, Homo sapiens
aacttggtaatagaactacagctgggcctctgtatcagtgggttctgtatccctggactcaaccaaccttgga

SEQ ID NO: 17043 - DNA, 77 bp, Homo sapiens
tagaactacagctgggcctctgtatcagtgggttctgtatccctggactcaaccaaccttggattgaatgtatctgg

SEQ ID NO: 17044 - DNA, 75 bp, Homo sapiens
gcctctgtatcagtgggttctgtatccctggactcaaccaaccttggattgaatgtatctgggaaaaaatgagta

SEQ ID NO: 17045 - DNA, 75 bp, Homo sapiens
tgtatcagtgggttctgtatccctggactcaaccaaccttggattgaatgtatctgggaaaaaatgagtagttgc

SEQ ID NO: 17046 - DNA, 75 bp, Homo sapiens
ttctgtatccctggactcaaccaaccttggattgaatgtatctgggaaaaaatgagtagttgcctctgtactcta

SEQ ID NO: 17047 - DNA, 75 bp, Homo sapiens
gactcaaccaaccttggattgaatgtatctgggaaaaaatgagtagttgcctctgtactctatgtgaacagactt

SEQ ID NO: 17048 - DNA, 72 bp, Homo sapiens
aaccaaccttggattgaatgtatctgggaaaaaatgagtagttgcctctgtactctatgtgaacagactttt

SEQ ID NO: 17049 - DNA, 75 bp, Homo sapiens
ggattgaatgtatctgggaaaaaatgagtagttgcctctgtactctatgtgaacagactttttcttgtcattatt

SEQ ID NO: 17050 - DNA, 73 bp, Homo sapiens
atctgggaaaaaatgagtagttgcctctgtactctatgtgaacagactttttcttgtcattatttcctaaaca

SEQ ID NO: 17051 - DNA, 73 bp, Homo sapiens
aaaaaaaaaactatatgggaggatgtgcattttgttatatgcaaatgctgcaccattttgtctagggacttgg

SEQ ID NO: 17052 - DNA, 80 bp, Homo sapiens
aggatgtgcattttgttatatgcaaatgctgcaccattttgtctagggacttgggcatccatggactttggtatcctctg

SEQ ID NO: 17053 - DNA, 78 bp, Homo sapiens
gtgcattttgttatatgcaaatgctgcaccattttgtctagggacttgggcatccatggactttggtatcctctgggg

SEQ ID NO: 17054 - DNA, 77 bp, Homo sapiens
tatatgcaaatgctgcaccattttgtctagggacttgggcatccatggactttggtatcctctgggggtcctggaac

SEQ ID NO: 17055 - DNA, 74 bp, Homo sapiens
atgctgcaccattttgtctagggacttgggcatccatggactttggtatcctctgggggtcctggaaccaatcc

SEQ ID NO: 17056 - DNA, 72 bp, Homo sapiens
cctggaaccaatcccccatggaaaccaaggatgactgtgcttagagtattgctttctttcttgatttgtatt

SEQ ID NO: 17057 - DNA, 74 bp, Homo sapiens
aatcccccatggaaaccaaggatgactgtgcttagagtattgctttctttcttgatttgtatttctgtcttcca

SEQ ID NO: 17058 - DNA, 74 bp, Homo sapiens
tggaaaccaaggatgactgtgcttagagtattgctttctttcttgatttgtatttctgtcttccagttaagatt

SEQ ID NO: 17059 - DNA, 76 bp, Homo sapiens
caaggatgactgtgcttagagtattgctttctttcttgatttgtatttctgtcttccagttaagattttgtatcta

SEQ ID NO: 17060 - DNA, 75 bp, Homo sapiens
tgtgcttagagtattgctttctttcttgatttgtatttctgtcttccagttaagattttgtatctatattatttc

SEQ ID NO: 17061 - DNA, 71 bp, Homo sapiens
gtattgctttctttcttgatttgtatttctgtcttccagttaagattttgtatctatattatttctctttt

SEQ ID NO: 17062 - DNA, 71 bp, Homo sapiens
cttgatttgtatttctgtcttccagttaagattttgtatctatattatttctctttttacttagtctgtct

SEQ ID NO: 17063 - DNA, 71 bp, Homo sapiens
gtatttctgtcttccagttaagattttgtatctatattatttctctttttacttagtctgtctttagcatt

SEQ ID NO: 17064 - DNA, 70 bp, Homo sapiens
ccagttaagattttgtatctatattatttctctttttacttagtctgtctttagcatttaattgggtgta

SEQ ID NO: 17065 - DNA, 72 bp, Homo sapiens
gattttgtatctatattatttctctttttacttagtctgtctttagcatttaattgggtgtaatcagttgcc

SEQ ID NO: 17066 - DNA, 71 bp, Homo sapiens
ctatattatttctctttttacttagtctgtctttagcatttaattgggtgtaatcagttgcctattttgtg

SEQ ID NO: 17067 - DNA, 69 bp, Homo sapiens
ttctctttttacttagtctgtctttagcatttaattgggtgtaatcagttgcctattttgtgttttaat

SEQ ID NO: 17068 - DNA, 73 bp, Homo sapiens
ttagcatttaattgggtgtaatcagttgcctattttgtgttttaattttgggactatagcagaaaacatgatg

SEQ ID NO: 17069 - DNA, 72 bp, Homo sapiens
atttaattgggtgtaatcagttgcctattttgtgttttaattttgggactatagcagaaaacatgatgttga

SEQ ID NO: 17070 - DNA, 73 bp, Homo sapiens
gtgtaatcagttgcctattttgtgttttaattttgggactatagcagaaaacatgatgttgaataaaattcca

SEQ ID NO: 17071 - DNA, 70 bp, Homo sapiens
tgcctattttgtgttttaattttgggactatagcagaaaacatgatgttgaataaaattccaaaaataag

SEQ ID NO: 17072 - DNA, 70 bp, Homo sapiens
tgttttaattttgggactatagcagaaaacatgatgttgaataaaattccaaaaataagtcaaatctacc

SEQ ID NO: 17073 - DNA, 72 bp, Homo sapiens
aattttgggactatagcagaaaacatgatgttgaataaaattccaaaaataagtcaaatctacctaatatga

SEQ ID NO: 17074 - DNA, 76 bp, Homo sapiens
ggactatagcagaaaacatgatgttgaataaaattccaaaaataagtcaaatctacctaatatgaatactcatcac

SEQ ID NO: 17075 - DNA, 78 bp, Homo sapiens
atagcagaaaacatgatgttgaataaaattccaaaaataagtcaaatctacctaatatgaatactcatcactgagtgc

SEQ ID NO: 17076 - DNA, 77 bp, Homo sapiens
gcagaaaacatgatgttgaataaaattccaaaaataagtcaaatctacctaatatgaatactcatcactgagtgcct

SEQ ID NO: 17077 - DNA, 77 bp, Homo sapiens
acatgatgttgaataaaattccaaaaataagtcaaatctacctaatatgaatactcatcactgagtgcctttggcag

SEQ ID NO: 17078 - DNA, 74 bp, Homo sapiens
gttgaataaaattccaaaaataagtcaaatctacctaatatgaatactcatcactgagtgcctttggcaggaaa

SEQ ID NO: 17079 - DNA, 74 bp, Homo sapiens
aaattccaaaaataagtcaaatctacctaatatgaatactcatcactgagtgcctttggcaggaaataaatcta

SEQ ID NO: 17080 - DNA, 79 bp, Homo sapiens
tccaaaaataagtcaaatctacctaatatgaatactcatcactgagtgcctttggcaggaaataaatctatctcaatgc

SEQ ID NO: 17081 - DNA, 78 bp, Homo sapiens
aagtcaaatctacctaatatgaatactcatcactgagtgcctttggcaggaaataaatctatctcaatgctttaattg

SEQ ID NO: 17082 - DNA, 77 bp, Homo sapiens
acctaatatgaatactcatcactgagtgcctttggcaggaaataaatctatctcaatgctttaattgggagtaaata

SEQ ID NO: 17083 - DNA, 80 bp, Homo sapiens
tatgaatactcatcactgagtgcctttggcaggaaataaatctatctcaatgctttaattgggagtaaataatgtatgag

SEQ ID NO: 17084 - DNA, 76 bp, Homo sapiens
catcactgagtgcctttggcaggaaataaatctatctcaatgctttaattgggagtaaataatgtatgaggaaatt

SEQ ID NO: 17085 - DNA, 73 bp, Homo sapiens
gcctttggcaggaaataaatctatctcaatgctttaattgggagtaaataatgtatgaggaaatttaaactca

SEQ ID NO: 17086 - DNA, 75 bp, Homo sapiens
ataaatctatctcaatgctttaattgggagtaaataatgtatgaggaaatttaaactcataattgtgtgctgtac

SEQ ID NO: 17087 - DNA, 75 bp, Homo sapiens
ctcaatgctttaattgggagtaaataatgtatgaggaaatttaaactcataattgtgtgctgtacttacttgcca

SEQ ID NO: 17088 - DNA, 74 bp, Homo sapiens
gggagtaaataatgtatgaggaaatttaaactcataattgtgtgctgtacttacttgccagtaaatgtgaaatg

SEQ ID NO: 17089 - DNA, 73 bp, Homo sapiens
gtatgaggaaatttaaactcataattgtgtgctgtacttacttgccagtaaatgtgaaatggggtactaagta

SEQ ID NO: 17090 - DNA, 72 bp, Homo sapiens
ttaaactcataattgtgtgctgtacttacttgccagtaaatgtgaaatggggtactaagtaataggtgttgg

SEQ ID NO: 17091 - DNA, 72 bp, Homo sapiens
taattgtgtgctgtacttacttgccagtaaatgtgaaatggggtactaagtaataggtgttgggtgaaggta

SEQ ID NO: 17092 - DNA, 73 bp, Homo sapiens
tgtacttacttgccagtaaatgtgaaatggggtactaagtaataggtgttgggtgaaggtaatatgatgctta

SEQ ID NO: 17093 - DNA, 72 bp, Homo sapiens
ttacttgccagtaaatgtgaaatggggtactaagtaataggtgttgggtgaaggtaatatgatgcttatctt

SEQ ID NO: 17094 - DNA, 72 bp, Homo sapiens
gtaaatgtgaaatggggtactaagtaataggtgttgggtgaaggtaatatgatgcttatctttttgccatta

SEQ ID NO: 17095 - DNA, 73 bp, Homo sapiens
gggtactaagtaataggtgttgggtgaaggtaatatgatgcttatctttttgccattatattttcttacagca

SEQ ID NO: 17096 - DNA, 78 bp, Homo sapiens
taataggtgttgggtgaaggtaatatgatgcttatctttttgccattatattttcttacagcagctgctggagtgtaa

SEQ ID NO: 17097 - DNA, 79 bp, Homo sapiens
tgggtgaaggtaatatgatgcttatctttttgccattatattttcttacagcagctgctggagtgtaataagtgccgaa

SEQ ID NO: 17098 - DNA, 79 bp, Homo sapiens
aggtaatatgatgcttatctttttgccattatattttcttacagcagctgctggagtgtaataagtgccgaaacagcta

SEQ ID NO: 17099 - DNA, 79 bp, Homo sapiens
atgcttatctttttgccattatattttcttacagcagctgctggagtgtaataagtgccgaaacagctatcaccctgag

SEQ ID NO: 17100 - DNA, 78 bp, Homo sapiens
tatattttcttacagcagctgctggagtgtaataagtgccgaaacagctatcaccctgagtgcctgggaccaaactac

SEQ ID NO: 17101 - DNA, 75 bp, Homo sapiens
agcagctgctggagtgtaataagtgccgaaacagctatcaccctgagtgcctgggaccaaactaccccaccaaac

SEQ ID NO: 17102 - DNA, 70 bp, Homo sapiens
agtgtaataagtgccgaaacagctatcaccctgagtgcctgggaccaaactaccccaccaaacccacaaa

SEQ ID NO: 17103 - DNA, 70 bp, Homo sapiens
aataagtgccgaaacagctatcaccctgagtgcctgggaccaaactaccccaccaaacccacaaagaaga

SEQ ID NO: 17104 - DNA, 70 bp, Homo sapiens
ctgagtgcctgggaccaaactaccccaccaaacccacaaagaagaagaaagtctgggtgagttatacaca

SEQ ID NO: 17105 - DNA, 71 bp, Homo sapiens
aaactaccccaccaaacccacaaagaagaagaaagtctgggtgagttatacacatgatgctcttttataga

SEQ ID NO: 17106 - DNA, 75 bp, Homo sapiens
ttttcttcttttctagatctgtaccaagtgtgttcgctgtaagagctgtggatccacaactccaggcaaagggtg

SEQ ID NO: 17107 - DNA, 79 bp, Homo sapiens
ttcttttctagatctgtaccaagtgtgttcgctgtaagagctgtggatccacaactccaggcaaagggtgggatgcaca

SEQ ID NO: 17108 - DNA, 81 bp, Homo sapiens
tctgtaccaagtgtgttcgctgtaagagctgtggatccacaactccaggcaaagggtgggatgcacagtggtctcatgatt

SEQ ID NO: 17109 - DNA, 81 bp, Homo sapiens
aagtgtgttcgctgtaagagctgtggatccacaactccaggcaaagggtgggatgcacagtggtctcatgatttctcactg

SEQ ID NO: 17110 - DNA, 86 bp, Homo sapiens
tgtaagagctgtggatccacaactccaggcaaagggtgggatgcacagtggtctcatgatttctcactgtgtcatgattgcgccaa

SEQ ID NO: 17111 - DNA, 84 bp, Homo sapiens
ctgtggatccacaactccaggcaaagggtgggatgcacagtggtctcatgatttctcactgtgtcatgattgcgccaagctctt

SEQ ID NO: 17112 - DNA, 82 bp, Homo sapiens
actccaggcaaagggtgggatgcacagtggtctcatgatttctcactgtgtcatgattgcgccaagctctttgctaaaggta

SEQ ID NO: 17113 - DNA, 79 bp, Homo sapiens
aaagggtgggatgcacagtggtctcatgatttctcactgtgtcatgattgcgccaagctctttgctaaaggtacccaaa

SEQ ID NO: 17114 - DNA, 77 bp, Homo sapiens
cacagtggtctcatgatttctcactgtgtcatgattgcgccaagctctttgctaaaggtacccaaaaaagccagttt

SEQ ID NO: 17115 - DNA, 78 bp, Homo sapiens
tctcatgatttctcactgtgtcatgattgcgccaagctctttgctaaaggtacccaaaaaagccagttttgccagctt

SEQ ID NO: 17116 - DNA, 74 bp, Homo sapiens
atttctcactgtgtcatgattgcgccaagctctttgctaaaggtacccaaaaaagccagttttgccagctttcg

SEQ ID NO: 17117 - DNA, 77 bp, Homo sapiens
gggtatgtgagccaaagcactgctgtaaactttgctttgctttcaggaaacttctgccctctctgtgacaaatgtta

SEQ ID NO: 17118 - DNA, 84 bp, Homo sapiens
tgtgagccaaagcactgctgtaaactttgctttgctttcaggaaacttctgccctctctgtgacaaatgttatgatgatgatga

SEQ ID NO: 17119 - DNA, 83 bp, Homo sapiens
tgctgtaaactttgctttgctttcaggaaacttctgccctctctgtgacaaatgttatgatgatgatgactatgagagtaaga

SEQ ID NO: 17120 - DNA, 85 bp, Homo sapiens
taaactttgctttgctttcaggaaacttctgccctctctgtgacaaatgttatgatgatgatgactatgagagtaagatgatgca

SEQ ID NO: 17121 - DNA, 87 bp, Homo sapiens
tttcaggaaacttctgccctctctgtgacaaatgttatgatgatgatgactatgagagtaagatgatgcaatgtggaaagtgtgatc

SEQ ID NO: 17122 - DNA, 86 bp, Homo sapiens
aaacttctgccctctctgtgacaaatgttatgatgatgatgactatgagagtaagatgatgcaatgtggaaagtgtgatcgctggg

SEQ ID NO: 17123 - DNA, 90 bp, Homo sapiens
tctctgtgacaaatgttatgatgatgatgactatgagagtaagatgatgcaatgtggaaagtgtgatcgctgggtccattccaaatgtga

SEQ ID NO: 17124 - DNA, 86 bp, Homo sapiens
aatgttatgatgatgatgactatgagagtaagatgatgcaatgtggaaagtgtgatcgctgggtccattccaaatgtgagaatctt

SEQ ID NO: 17125 - DNA, 86 bp, Homo sapiens
atgatgatgactatgagagtaagatgatgcaatgtggaaagtgtgatcgctgggtccattccaaatgtgagaatctttcaggtaca

SEQ ID NO: 17126 - DNA, 83 bp, Homo sapiens
atgactatgagagtaagatgatgcaatgtggaaagtgtgatcgctgggtccattccaaatgtgagaatctttcaggtacagaa

SEQ ID NO: 17127 - DNA, 79 bp, Homo sapiens
agtaagatgatgcaatgtggaaagtgtgatcgctgggtccattccaaatgtgagaatctttcaggtacagaaggttgga

SEQ ID NO: 17128 - DNA, 74 bp, Homo sapiens
atgtggaaagtgtgatcgctgggtccattccaaatgtgagaatctttcaggtacagaaggttggagtcttttta

SEQ ID NO: 17129 - DNA, 73 bp, Homo sapiens
aaagtgtgatcgctgggtccattccaaatgtgagaatctttcaggtacagaaggttggagtctttttatttca

SEQ ID NO: 17130 - DNA, 82 bp, Homo sapiens
tctcattcttcagaggacctcatcatggtaggtttttgttttcttagatgagatgtatgagattctatctaatctgccagaa

SEQ ID NO: 17131 - DNA, 80 bp, Homo sapiens
ttcagaggacctcatcatggtaggtttttgttttcttagatgagatgtatgagattctatctaatctgccagaaagtgtg

SEQ ID NO: 17132 - DNA, 78 bp, Homo sapiens
atcatggtaggtttttgttttcttagatgagatgtatgagattctatctaatctgccagaaagtgtggcctacacttg

SEQ ID NO: 17133 - DNA, 79 bp, Homo sapiens
gtttttgttttcttagatgagatgtatgagattctatctaatctgccagaaagtgtggcctacacttgtgtgaactgta

SEQ ID NO: 17134 - DNA, 83 bp, Homo sapiens
ttttcttagatgagatgtatgagattctatctaatctgccagaaagtgtggcctacacttgtgtgaactgtactgagcggcac

SEQ ID NO: 17135 - DNA, 85 bp, Homo sapiens
atgagatgtatgagattctatctaatctgccagaaagtgtggcctacacttgtgtgaactgtactgagcggcaccctgcagagtg

SEQ ID NO: 17136 - DNA, 83 bp, Homo sapiens
atgagattctatctaatctgccagaaagtgtggcctacacttgtgtgaactgtactgagcggcaccctgcagagtggcgactg

SEQ ID NO: 17137 - DNA, 80 bp, Homo sapiens
taatctgccagaaagtgtggcctacacttgtgtgaactgtactgagcggcaccctgcagagtggcgactggcccttgaaa

SEQ ID NO: 17138 - DNA, 77 bp, Homo sapiens
agaaagtgtggcctacacttgtgtgaactgtactgagcggcaccctgcagagtggcgactggcccttgaaaaagagc

SEQ ID NO: 17139 - DNA, 81 bp, Homo sapiens
ctacacttgtgtgaactgtactgagcggcaccctgcagagtggcgactggcccttgaaaaagagctgcagatttctctgaa

SEQ ID NO: 17140 - DNA, 81 bp, Homo sapiens
ttgtgtgaactgtactgagcggcaccctgcagagtggcgactggcccttgaaaaagagctgcagatttctctgaagcaagt

SEQ ID NO: 17141 - DNA, 82 bp, Homo sapiens
tgtactgagcggcaccctgcagagtggcgactggcccttgaaaaagagctgcagatttctctgaagcaagttctgacagctt

SEQ ID NO: 17142 - DNA, 79 bp, Homo sapiens
accctgcagagtggcgactggcccttgaaaaagagctgcagatttctctgaagcaagttctgacagctttgttgaattc

SEQ ID NO: 17143 - DNA, 78 bp, Homo sapiens
agtggcgactggcccttgaaaaagagctgcagatttctctgaagcaagttctgacagctttgttgaattctcggacta

SEQ ID NO: 17144 - DNA, 79 bp, Homo sapiens
ccttgaaaaagagctgcagatttctctgaagcaagttctgacagctttgttgaattctcggactaccagccatttgcta

SEQ ID NO: 17145 - DNA, 79 bp, Homo sapiens
aaaaagagctgcagatttctctgaagcaagttctgacagctttgttgaattctcggactaccagccatttgctacgcta

SEQ ID NO: 17146 - DNA, 76 bp, Homo sapiens
atttctctgaagcaagttctgacagctttgttgaattctcggactaccagccatttgctacgctaccggcaggtag

SEQ ID NO: 17147 - DNA, 75 bp, Homo sapiens
aagcaagttctgacagctttgttgaattctcggactaccagccatttgctacgctaccggcaggtaggccaagtc

SEQ ID NO: 17148 - DNA, 75 bp, Homo sapiens
ttctgacagctttgttgaattctcggactaccagccatttgctacgctaccggcaggtaggccaagtctcatttt

SEQ ID NO: 17149 - DNA, 74 bp, Homo sapiens
tttgttgaattctcggactaccagccatttgctacgctaccggcaggtaggccaagtctcatttttttctgaga

SEQ ID NO: 17150 - DNA, 72 bp, Homo sapiens
accttggttttagtgttagataaaagcaacatatctttcctggcaataggctgccaagcctccagacttaaa

SEQ ID NO: 17151 - DNA, 76 bp, Homo sapiens
tttagtgttagataaaagcaacatatctttcctggcaataggctgccaagcctccagacttaaatcccgagacaga

SEQ ID NO: 17152 - DNA, 76 bp, Homo sapiens
ataaaagcaacatatctttcctggcaataggctgccaagcctccagacttaaatcccgagacagaggagagtatac

SEQ ID NO: 17153 - DNA, 76 bp, Homo sapiens
acatatctttcctggcaataggctgccaagcctccagacttaaatcccgagacagaggagagtataccttcccgca

SEQ ID NO: 17154 - DNA, 73 bp, Homo sapiens
caataggctgccaagcctccagacttaaatcccgagacagaggagagtataccttcccgcagctcccccgaag

SEQ ID NO: 17155 - DNA, 72 bp, Homo sapiens
ccaagcctccagacttaaatcccgagacagaggagagtataccttcccgcagctcccccgaaggacctgatc

SEQ ID NO: 17156 - DNA, 71 bp, Homo sapiens
agacttaaatcccgagacagaggagagtataccttcccgcagctcccccgaaggacctgatccaccagttc

SEQ ID NO: 17157 - DNA, 73 bp, Homo sapiens
taaatcccgagacagaggagagtataccttcccgcagctcccccgaaggacctgatccaccagttcttactga

SEQ ID NO: 17158 - DNA, 74 bp, Homo sapiens
acagaggagagtataccttcccgcagctcccccgaaggacctgatccaccagttcttactgaggtcagcaaaca

SEQ ID NO: 17159 - DNA, 77 bp, Homo sapiens
agtataccttcccgcagctcccccgaaggacctgatccaccagttcttactgaggtcagcaaacaggatgatcagca

SEQ ID NO: 17160 - DNA, 78 bp, Homo sapiens
agctcccccgaaggacctgatccaccagttcttactgaggtcagcaaacaggatgatcagcagcctttagatctagaa

SEQ ID NO: 17161 - DNA, 79 bp, Homo sapiens
aaggacctgatccaccagttcttactgaggtcagcaaacaggatgatcagcagcctttagatctagaaggagtcaagag

SEQ ID NO: 17162 - DNA, 80 bp, Homo sapiens
atccaccagttcttactgaggtcagcaaacaggatgatcagcagcctttagatctagaaggagtcaagaggaagatggac

SEQ ID NO: 17163 - DNA, 79 bp, Homo sapiens
tcttactgaggtcagcaaacaggatgatcagcagcctttagatctagaaggagtcaagaggaagatggaccaagggaat

SEQ ID NO: 17164 - DNA, 79 bp, Homo sapiens
aggtcagcaaacaggatgatcagcagcctttagatctagaaggagtcaagaggaagatggaccaagggaattacacatc

SEQ ID NO: 17165 - DNA, 78 bp, Homo sapiens
aggatgatcagcagcctttagatctagaaggagtcaagaggaagatggaccaagggaattacacatctgtggtatgtt

SEQ ID NO: 17166 - DNA, 78 bp, Homo sapiens
atcagcagcctttagatctagaaggagtcaagaggaagatggaccaagggaattacacatctgtggtatgtttctaca

SEQ ID NO: 17167 - DNA, 79 bp, Homo sapiens
tttagatctagaaggagtcaagaggaagatggaccaagggaattacacatctgtggtatgtttctacagtgagccatca

SEQ ID NO: 17168 - DNA, 77 bp, Homo sapiens
aaggagtcaagaggaagatggaccaagggaattacacatctgtggtatgtttctacagtgagccatcagaatttcta

SEQ ID NO: 17169 - DNA, 77 bp, Homo sapiens
gagcacactgttttaagaataattaacattttgtttttgtatacagttggagttcagtgatgatattgtgaagatca

SEQ ID NO: 17170 - DNA, 77 bp, Homo sapiens
ttttaagaataattaacattttgtttttgtatacagttggagttcagtgatgatattgtgaagatcattcaagcagc

SEQ ID NO: 17171 - DNA, 79 bp, Homo sapiens
aattaacattttgtttttgtatacagttggagttcagtgatgatattgtgaagatcattcaagcagccattaattcaga

SEQ ID NO: 17172 - DNA, 83 bp, Homo sapiens
tttgtttttgtatacagttggagttcagtgatgatattgtgaagatcattcaagcagccattaattcagatggaggacagcca

SEQ ID NO: 17173 - DNA, 83 bp, Homo sapiens
tatacagttggagttcagtgatgatattgtgaagatcattcaagcagccattaattcagatggaggacagccagaaattaaaa

SEQ ID NO: 17174 - DNA, 81 bp, Homo sapiens
agttcagtgatgatattgtgaagatcattcaagcagccattaattcagatggaggacagccagaaattaaaaaagccaaca

SEQ ID NO: 17175 - DNA, 82 bp, Homo sapiens
atgatattgtgaagatcattcaagcagccattaattcagatggaggacagccagaaattaaaaaagccaacagcatggtcaa

SEQ ID NO: 17176 - DNA, 78 bp, Homo sapiens
aagatcattcaagcagccattaattcagatggaggacagccagaaattaaaaaagccaacagcatggtcaagtccttc

SEQ ID NO: 17177 - DNA, 77 bp, Homo sapiens
attcaagcagccattaattcagatggaggacagccagaaattaaaaaagccaacagcatggtcaagtccttcttcat

SEQ ID NO: 17178 - DNA, 77 bp, Homo sapiens
taattcagatggaggacagccagaaattaaaaaagccaacagcatggtcaagtccttcttcattcgggtgaatgata

SEQ ID NO: 17179 - DNA, 75 bp, Homo sapiens
atggaggacagccagaaattaaaaaagccaacagcatggtcaagtccttcttcattcgggtgaatgatattacta

SEQ ID NO: 17180 - DNA, 73 bp, Homo sapiens
cagaaattaaaaaagccaacagcatggtcaagtccttcttcattcgggtgaatgatattactaattcatgttt

SEQ ID NO: 17181 - DNA, 74 bp, Homo sapiens
aaaagccaacagcatggtcaagtccttcttcattcgggtgaatgatattactaattcatgtttttaatgcttac

SEQ ID NO: 17182 - DNA, 72 bp, Homo sapiens
ttcatgtggtatctaaatgagtgtttacatatttacattttgtttgtgttttcttttagcaaatggaacgtg

SEQ ID NO: 17183 - DNA, 69 bp, Homo sapiens
gtggtatctaaatgagtgtttacatatttacattttgtttgtgttttcttttagcaaatggaacgtgtt

SEQ ID NO: 17184 - DNA, 69 bp, Homo sapiens
gagtgtttacatatttacattttgtttgtgttttcttttagcaaatggaacgtgtttttccatggttca

SEQ ID NO: 17185 - DNA, 69 bp, Homo sapiens
catatttacattttgtttgtgttttcttttagcaaatggaacgtgtttttccatggttcagtgtcaaaa

SEQ ID NO: 17186 - DNA, 67 bp, Homo sapiens
tgtttgtgttttcttttagcaaatggaacgtgtttttccatggttcagtgtcaaaaagtccaggttt

SEQ ID NO: 17187 - DNA, 68 bp, Homo sapiens
ttcttttagcaaatggaacgtgtttttccatggttcagtgtcaaaaagtccaggttttgggagccaaa

SEQ ID NO: 17188 - DNA, 68 bp, Homo sapiens
aaatggaacgtgtttttccatggttcagtgtcaaaaagtccaggttttgggagccaaataaagtatca

SEQ ID NO: 17189 - DNA, 71 bp, Homo sapiens
tgtttttccatggttcagtgtcaaaaagtccaggttttgggagccaaataaagtatcaagcaagtaagtga

SEQ ID NO: 17190 - DNA, 71 bp, Homo sapiens
ttccatggttcagtgtcaaaaagtccaggttttgggagccaaataaagtatcaagcaagtaagtgaattta

SEQ ID NO: 17191 - DNA, 70 bp, Homo sapiens
cagtgtcaaaaagtccaggttttgggagccaaataaagtatcaagcaagtaagtgaatttagcataactt

SEQ ID NO: 17192 - DNA, 68 bp, Homo sapiens
gtccaggttttgggagccaaataaagtatcaagcaagtaagtgaatttagcataacttttttttctcc

SEQ ID NO: 17193 - DNA, 71 bp, Homo sapiens
gggagccaaataaagtatcaagcaagtaagtgaatttagcataacttttttttctcctcatcggctagaaa

SEQ ID NO: 17194 - DNA, 78 bp, Homo sapiens
tatactgtaggagttcaataaatgcttgttgaatcaattattttcagcagtgggatgttaccaaacgcagtgcttcca

SEQ ID NO: 17195 - DNA, 75 bp, Homo sapiens
agttcaataaatgcttgttgaatcaattattttcagcagtgggatgttaccaaacgcagtgcttccaccttcact

SEQ ID NO: 17196 - DNA, 77 bp, Homo sapiens
atgcttgttgaatcaattattttcagcagtgggatgttaccaaacgcagtgcttccaccttcacttgaccataatta

SEQ ID NO: 17197 - DNA, 79 bp, Homo sapiens
aatcaattattttcagcagtgggatgttaccaaacgcagtgcttccaccttcacttgaccataattatgctcagtggca

SEQ ID NO: 17198 - DNA, 79 bp, Homo sapiens
attattttcagcagtgggatgttaccaaacgcagtgcttccaccttcacttgaccataattatgctcagtggcaggagc

SEQ ID NO: 17199 - DNA, 77 bp, Homo sapiens
agtgggatgttaccaaacgcagtgcttccaccttcacttgaccataattatgctcagtggcaggagcgagaggaaaa

SEQ ID NO: 17200 - DNA, 80 bp, Homo sapiens
ttaccaaacgcagtgcttccaccttcacttgaccataattatgctcagtggcaggagcgagaggaaaacagccacactga

SEQ ID NO: 17201 - DNA, 81 bp, Homo sapiens
tgcttccaccttcacttgaccataattatgctcagtggcaggagcgagaggaaaacagccacactgagcagcctcctttaa

SEQ ID NO: 17202 - DNA, 80 bp, Homo sapiens
ttcacttgaccataattatgctcagtggcaggagcgagaggaaaacagccacactgagcagcctcctttaatgaagaaaa

SEQ ID NO: 17203 - DNA, 80 bp, Homo sapiens
accataattatgctcagtggcaggagcgagaggaaaacagccacactgagcagcctcctttaatgaagaaaatcattcca

SEQ ID NO: 17204 - DNA, 81 bp, Homo sapiens
tatgctcagtggcaggagcgagaggaaaacagccacactgagcagcctcctttaatgaagaaaatcattccagctcccaaa

SEQ ID NO: 17205 - DNA, 74 bp, Homo sapiens
aggagcgagaggaaaacagccacactgagcagcctcctttaatgaagaaaatcattccagctcccaaacccaaa

SEQ ID NO: 17206 - DNA, 73 bp, Homo sapiens
aaaacagccacactgagcagcctcctttaatgaagaaaatcattccagctcccaaacccaaaggtcctggaga

SEQ ID NO: 17207 - DNA, 74 bp, Homo sapiens
acactgagcagcctcctttaatgaagaaaatcattccagctcccaaacccaaaggtcctggagaaccagactca

SEQ ID NO: 17208 - DNA, 70 bp, Homo sapiens
agcctcctttaatgaagaaaatcattccagctcccaaacccaaaggtcctggagaaccagactcaccaac

SEQ ID NO: 17209 - DNA, 74 bp, Homo sapiens
tttaatgaagaaaatcattccagctcccaaacccaaaggtcctggagaaccagactcaccaactcctctgcatc

SEQ ID NO: 17210 - DNA, 73 bp, Homo sapiens
aaaatcattccagctcccaaacccaaaggtcctggagaaccagactcaccaactcctctgcatcctcctacac

SEQ ID NO: 17211 - DNA, 72 bp, Homo sapiens
tcccaaacccaaaggtcctggagaaccagactcaccaactcctctgcatcctcctacaccaccaattttgag

SEQ ID NO: 17212 - DNA, 73 bp, Homo sapiens
aaggtcctggagaaccagactcaccaactcctctgcatcctcctacaccaccaattttgagtaagccaccaaa

SEQ ID NO: 17213 - DNA, 73 bp, Homo sapiens
agaaccagactcaccaactcctctgcatcctcctacaccaccaattttgagtaagccaccaaaaggagagtcg

SEQ ID NO: 17214 - DNA, 73 bp, Homo sapiens
aattttaactggatctcaaggtattgatgggagtcttttggatttcaaggtactgataggagtcgagaagaca

SEQ ID NO: 17215 - DNA, 76 bp, Homo sapiens
atctcaaggtattgatgggagtcttttggatttcaaggtactgataggagtcgagaagacagtccagagctgaacc

SEQ ID NO: 17216 - DNA, 74 bp, Homo sapiens
aggtattgatgggagtcttttggatttcaaggtactgataggagtcgagaagacagtccagagctgaacccacc

SEQ ID NO: 17217 - DNA, 74 bp, Homo sapiens
agtcttttggatttcaaggtactgataggagtcgagaagacagtccagagctgaacccacccccaggcatagaa

SEQ ID NO: 17218 - DNA, 76 bp, Homo sapiens
atttcaaggtactgataggagtcgagaagacagtccagagctgaacccacccccaggcatagaagacaatagacag

SEQ ID NO: 17219 - DNA, 80 bp, Homo sapiens
tgataggagtcgagaagacagtccagagctgaacccacccccaggcatagaagacaatagacagtgtgcgttatgtttga

SEQ ID NO: 17220 - DNA, 77 bp, Homo sapiens
agtcgagaagacagtccagagctgaacccacccccaggcatagaagacaatagacagtgtgcgttatgtttgactta

SEQ ID NO: 17221 - DNA, 80 bp, Homo sapiens
agacagtccagagctgaacccacccccaggcatagaagacaatagacagtgtgcgttatgtttgacttatggtgatgaca

SEQ ID NO: 17222 - DNA, 79 bp, Homo sapiens
tgaacccacccccaggcatagaagacaatagacagtgtgcgttatgtttgacttatggtgatgacagtgctaatgtaag

SEQ ID NO: 17223 - DNA, 82 bp, Homo sapiens
ccaggcatagaagacaatagacagtgtgcgttatgtttgacttatggtgatgacagtgctaatgtaagtactttgcaacaca

SEQ ID NO: 17224 - DNA, 80 bp, Homo sapiens
atagaagacaatagacagtgtgcgttatgtttgacttatggtgatgacagtgctaatgtaagtactttgcaacacagggc

SEQ ID NO: 17225 - DNA, 77 bp, Homo sapiens
acagtgtgcgttatgtttgacttatggtgatgacagtgctaatgtaagtactttgcaacacagggccctagttaata

SEQ ID NO: 17226 - DNA, 69 bp, Homo sapiens
ctcctttggcattatattctttaggaaaaaagaaatctctttattttataggatgctggtcgtttacta

SEQ ID NO: 17227 - DNA, 69 bp, Homo sapiens
tattctttaggaaaaaagaaatctctttattttataggatgctggtcgtttactatatattggccaaaa

SEQ ID NO: 17228 - DNA, 73 bp, Homo sapiens
gaaaaaagaaatctctttattttataggatgctggtcgtttactatatattggccaaaatgagtggacacatg

SEQ ID NO: 17229 - DNA, 76 bp, Homo sapiens
tctctttattttataggatgctggtcgtttactatatattggccaaaatgagtggacacatgtaaattgtgctttg

SEQ ID NO: 17230 - DNA, 77 bp, Homo sapiens
ttattttataggatgctggtcgtttactatatattggccaaaatgagtggacacatgtaaattgtgctttgtggtca

SEQ ID NO: 17231 - DNA, 76 bp, Homo sapiens
ctggtcgtttactatatattggccaaaatgagtggacacatgtaaattgtgctttgtggtcagcggaagtgtttga

SEQ ID NO: 17232 - DNA, 79 bp, Homo sapiens
tttactatatattggccaaaatgagtggacacatgtaaattgtgctttgtggtcagcggaagtgtttgaagatgatgac

SEQ ID NO: 17233 - DNA, 79 bp, Homo sapiens
ttggccaaaatgagtggacacatgtaaattgtgctttgtggtcagcggaagtgtttgaagatgatgacggatcactaaa

SEQ ID NO: 17234 - DNA, 82 bp, Homo sapiens
aatgagtggacacatgtaaattgtgctttgtggtcagcggaagtgtttgaagatgatgacggatcactaaagaatgtgcata

SEQ ID NO: 17235 - DNA, 84 bp, Homo sapiens
acatgtaaattgtgctttgtggtcagcggaagtgtttgaagatgatgacggatcactaaagaatgtgcatatggctgtgatcag

SEQ ID NO: 17236 - DNA, 85 bp, Homo sapiens
attgtgctttgtggtcagcggaagtgtttgaagatgatgacggatcactaaagaatgtgcatatggctgtgatcaggggcaagca

SEQ ID NO: 17237 - DNA, 84 bp, Homo sapiens
tcagcggaagtgtttgaagatgatgacggatcactaaagaatgtgcatatggctgtgatcaggggcaagcagctggtaagacct

SEQ ID NO: 17238 - DNA, 83 bp, Homo sapiens
tgtttgaagatgatgacggatcactaaagaatgtgcatatggctgtgatcaggggcaagcagctggtaagaccttatgggtaa

SEQ ID NO: 17239 - DNA, 80 bp, Homo sapiens
atgatgacggatcactaaagaatgtgcatatggctgtgatcaggggcaagcagctggtaagaccttatgggtaaatttta

SEQ ID NO: 17240 - DNA, 78 bp, Homo sapiens
cggatcactaaagaatgtgcatatggctgtgatcaggggcaagcagctggtaagaccttatgggtaaattttatgaaa

SEQ ID NO: 17241 - DNA, 77 bp, Homo sapiens
aagaatgtgcatatggctgtgatcaggggcaagcagctggtaagaccttatgggtaaattttatgaaagagattccc

SEQ ID NO: 17242 - DNA, 74 bp, Homo sapiens
aaacatatgaaagtctgaataggactctgttctttttggatttttagagatgtgaattctgccaaaagccagga

SEQ ID NO: 17243 - DNA, 74 bp, Homo sapiens
atgaaagtctgaataggactctgttctttttggatttttagagatgtgaattctgccaaaagccaggagccacc

SEQ ID NO: 17244 - DNA, 72 bp, Homo sapiens
aataggactctgttctttttggatttttagagatgtgaattctgccaaaagccaggagccaccgtgggttgc

SEQ ID NO: 17245 - DNA, 78 bp, Homo sapiens
tgttctttttggatttttagagatgtgaattctgccaaaagccaggagccaccgtgggttgctgtctcacatcctgca

SEQ ID NO: 17246 - DNA, 80 bp, Homo sapiens
tttttagagatgtgaattctgccaaaagccaggagccaccgtgggttgctgtctcacatcctgcaccagcaactatcact

SEQ ID NO: 17247 - DNA, 83 bp, Homo sapiens
agatgtgaattctgccaaaagccaggagccaccgtgggttgctgtctcacatcctgcaccagcaactatcacttcatgtgttc

SEQ ID NO: 17248 - DNA, 80 bp, Homo sapiens
ccaaaagccaggagccaccgtgggttgctgtctcacatcctgcaccagcaactatcacttcatgtgttcccgagccaaga

SEQ ID NO: 17249 - DNA, 80 bp, Homo sapiens
aggagccaccgtgggttgctgtctcacatcctgcaccagcaactatcacttcatgtgttcccgagccaagaactgtgtct

SEQ ID NO: 17250 - DNA, 83 bp, Homo sapiens
tgggttgctgtctcacatcctgcaccagcaactatcacttcatgtgttcccgagccaagaactgtgtctttctggatgataaa

SEQ ID NO: 17251 - DNA, 81 bp, Homo sapiens
tctcacatcctgcaccagcaactatcacttcatgtgttcccgagccaagaactgtgtctttctggatgataaaaaagtata

SEQ ID NO: 17252 - DNA, 79 bp, Homo sapiens
ctgcaccagcaactatcacttcatgtgttcccgagccaagaactgtgtctttctggatgataaaaaagtatattgccaa

SEQ ID NO: 17253 - DNA, 76 bp, Homo sapiens
aactatcacttcatgtgttcccgagccaagaactgtgtctttctggatgataaaaaagtatattgccaacgacatc

SEQ ID NO: 17254 - DNA, 76 bp, Homo sapiens
ttcatgtgttcccgagccaagaactgtgtctttctggatgataaaaaagtatattgccaacgacatcgggatttga

SEQ ID NO: 17255 - DNA, 74 bp, Homo sapiens
gttcccgagccaagaactgtgtctttctggatgataaaaaagtatattgccaacgacatcgggatttgatcaaa

SEQ ID NO: 17256 - DNA, 75 bp, Homo sapiens
aagaactgtgtctttctggatgataaaaaagtatattgccaacgacatcgggatttgatcaaaggcgaagtgaga

SEQ ID NO: 17257 - DNA, 76 bp, Homo sapiens
tctggatgataaaaaagtatattgccaacgacatcgggatttgatcaaaggcgaagtgagagagctttagttgctt

SEQ ID NO: 17258 - DNA, 71 bp, Homo sapiens
aaaaaagtatattgccaacgacatcgggatttgatcaaaggcgaagtgagagagctttagttgctttaaaa

SEQ ID NO: 17259 - DNA, 71 bp, Homo sapiens
agtatattgccaacgacatcgggatttgatcaaaggcgaagtgagagagctttagttgctttaaaaaaaaa

SEQ ID NO: 17260 - DNA, 71 bp, Homo sapiens
ataatgtgcaaagggacagcctattaacagctaccatgggttttatttaaggtggttcctgagaatggatt

SEQ ID NO: 17261 - DNA, 70 bp, Homo sapiens
acagcctattaacagctaccatgggttttatttaaggtggttcctgagaatggatttgaagttttcagaa

SEQ ID NO: 17262 - DNA, 70 bp, Homo sapiens
tattaacagctaccatgggttttatttaaggtggttcctgagaatggatttgaagttttcagaagagtgt

SEQ ID NO: 17263 - DNA, 69 bp, Homo sapiens
atgggttttatttaaggtggttcctgagaatggatttgaagttttcagaagagtgtttgtggactttga

SEQ ID NO: 17264 - DNA, 71 bp, Homo sapiens
tttatttaaggtggttcctgagaatggatttgaagttttcagaagagtgtttgtggactttgaaggaatca

SEQ ID NO: 17265 - DNA, 73 bp, Homo sapiens
ttcctgagaatggatttgaagttttcagaagagtgtttgtggactttgaaggaatcagcttgagaaggaagtt

SEQ ID NO: 17266 - DNA, 73 bp, Homo sapiens
aatggatttgaagttttcagaagagtgtttgtggactttgaaggaatcagcttgagaaggaagtttctcaatg

SEQ ID NO: 17267 - DNA, 72 bp, Homo sapiens
aagttttcagaagagtgtttgtggactttgaaggaatcagcttgagaaggaagtttctcaatggcttggaac

SEQ ID NO: 17268 - DNA, 73 bp, Homo sapiens
agaagagtgtttgtggactttgaaggaatcagcttgagaaggaagtttctcaatggcttggaaccagaaaata

SEQ ID NO: 17269 - DNA, 77 bp, Homo sapiens
tttgtggactttgaaggaatcagcttgagaaggaagtttctcaatggcttggaaccagaaaatatccacatgatgat

SEQ ID NO: 17270 - DNA, 79 bp, Homo sapiens
ttgaaggaatcagcttgagaaggaagtttctcaatggcttggaaccagaaaatatccacatgatgattggtatgaccta

SEQ ID NO: 17271 - DNA, 76 bp, Homo sapiens
ttgagaaggaagtttctcaatggcttggaaccagaaaatatccacatgatgattggtatgacctagccttggttat

SEQ ID NO: 17272 - DNA, 74 bp, Homo sapiens
aggaagtttctcaatggcttggaaccagaaaatatccacatgatgattggtatgacctagccttggttattggg

SEQ ID NO: 17273 - DNA, 71 bp, Homo sapiens
aaaaaaataaaatgacgctcataatcttctctaatcggttcttctttccttggtcagggtctatgacaatc

SEQ ID NO: 17274 - DNA, 75 bp, Homo sapiens
aataaaatgacgctcataatcttctctaatcggttcttctttccttggtcagggtctatgacaatcgactgctta

SEQ ID NO: 17275 - DNA, 74 bp, Homo sapiens
ataatcttctctaatcggttcttctttccttggtcagggtctatgacaatcgactgcttaggaattctaaatga

SEQ ID NO: 17276 - DNA, 75 bp, Homo sapiens
cttctctaatcggttcttctttccttggtcagggtctatgacaatcgactgcttaggaattctaaatgatctctc

SEQ ID NO: 17277 - DNA, 77 bp, Homo sapiens
ttcttctttccttggtcagggtctatgacaatcgactgcttaggaattctaaatgatctctccgactgtgaagataa

SEQ ID NO: 17278 - DNA, 78 bp, Homo sapiens
ttggtcagggtctatgacaatcgactgcttaggaattctaaatgatctctccgactgtgaagataagctctttcctat

SEQ ID NO: 17279 - DNA, 81 bp, Homo sapiens
tctatgacaatcgactgcttaggaattctaaatgatctctccgactgtgaagataagctctttcctattggatatcagtaa

SEQ ID NO: 17280 - DNA, 78 bp, Homo sapiens
acaatcgactgcttaggaattctaaatgatctctccgactgtgaagataagctctttcctattggatatcagtaagta

SEQ ID NO: 17281 - DNA, 78 bp, Homo sapiens
ttaggaattctaaatgatctctccgactgtgaagataagctctttcctattggatatcagtaagtagcactataaaga

SEQ ID NO: 17282 - DNA, 82 bp, Homo sapiens
tctaaatgatctctccgactgtgaagataagctctttcctattggatatcagtaagtagcactataaagagaagagagcagc

SEQ ID NO: 17283 - DNA, 79 bp, Homo sapiens
ctctccgactgtgaagataagctctttcctattggatatcagtaagtagcactataaagagaagagagcagccccacaa

SEQ ID NO: 17284 - DNA, 77 bp, Homo sapiens
aagataagctctttcctattggatatcagtaagtagcactataaagagaagagagcagccccacaacctgaacacac

SEQ ID NO: 17285 - DNA, 74 bp, Homo sapiens
ttctatcctctcccttatgatgattttcccaaatctgtttacccaggtgttccagggtatactggagcaccaca

SEQ ID NO: 17286 - DNA, 77 bp, Homo sapiens
tctcccttatgatgattttcccaaatctgtttacccaggtgttccagggtatactggagcaccacagatgctcgcaa

SEQ ID NO: 17287 - DNA, 79 bp, Homo sapiens
tgattttcccaaatctgtttacccaggtgttccagggtatactggagcaccacagatgctcgcaagcgctgtgtatata

SEQ ID NO: 17288 - DNA, 81 bp, Homo sapiens
aaatctgtttacccaggtgttccagggtatactggagcaccacagatgctcgcaagcgctgtgtatatacatgcaagatag

SEQ ID NO: 17289 - DNA, 84 bp, Homo sapiens
tgtttacccaggtgttccagggtatactggagcaccacagatgctcgcaagcgctgtgtatatacatgcaagatagtggagtgc

SEQ ID NO: 17290 - DNA, 85 bp, Homo sapiens
ttccagggtatactggagcaccacagatgctcgcaagcgctgtgtatatacatgcaagatagtggagtgccgtcctccagtcgta

SEQ ID NO: 17291 - DNA, 87 bp, Homo sapiens
tatactggagcaccacagatgctcgcaagcgctgtgtatatacatgcaagatagtggagtgccgtcctccagtcgtagagccggata

SEQ ID NO: 17292 - DNA, 87 bp, Homo sapiens
cacagatgctcgcaagcgctgtgtatatacatgcaagatagtggagtgccgtcctccagtcgtagagccggatatcaacagcactgt

SEQ ID NO: 17293 - DNA, 86 bp, Homo sapiens
atgctcgcaagcgctgtgtatatacatgcaagatagtggagtgccgtcctccagtcgtagagccggatatcaacagcactgttgaa

SEQ ID NO: 17294 - DNA, 84 bp, Homo sapiens
gtgtatatacatgcaagatagtggagtgccgtcctccagtcgtagagccggatatcaacagcactgttgaacatgatgaaaaca

SEQ ID NO: 17295 - DNA, 83 bp, Homo sapiens
tatacatgcaagatagtggagtgccgtcctccagtcgtagagccggatatcaacagcactgttgaacatgatgaaaacaggac

SEQ ID NO: 17296 - DNA, 81 bp, Homo sapiens
tagtggagtgccgtcctccagtcgtagagccggatatcaacagcactgttgaacatgatgaaaacaggaccattgcccata

SEQ ID NO: 17297 - DNA, 80 bp, Homo sapiens
gtcctccagtcgtagagccggatatcaacagcactgttgaacatgatgaaaacaggaccattgcccatagtccaacatct

SEQ ID NO: 17298 - DNA, 79 bp, Homo sapiens
agtcgtagagccggatatcaacagcactgttgaacatgatgaaaacaggaccattgcccatagtccaacatcttttaca

SEQ ID NO: 17299 - DNA, 79 bp, Homo sapiens
ggatatcaacagcactgttgaacatgatgaaaacaggaccattgcccatagtccaacatcttttacaggttagtcttga

SEQ ID NO: 17300 - DNA, 77 bp, Homo sapiens
aacagcactgttgaacatgatgaaaacaggaccattgcccatagtccaacatcttttacaggttagtcttgaatcaa

SEQ ID NO: 17301 - DNA, 76 bp, Homo sapiens
aacatgatgaaaacaggaccattgcccatagtccaacatcttttacaggttagtcttgaatcaagatgggacttga

SEQ ID NO: 17302 - DNA, 75 bp, Homo sapiens
atgaaaacaggaccattgcccatagtccaacatcttttacaggttagtcttgaatcaagatgggacttgaggctg

SEQ ID NO: 17303 - DNA, 68 bp, Homo sapiens
ttttaattgggcctttttagttaagagtttttatttcctgccacagaaagttcatcaaaagagagtca

SEQ ID NO: 17304 - DNA, 71 bp, Homo sapiens
gcctttttagttaagagtttttatttcctgccacagaaagttcatcaaaagagagtcaaaacacagctgaa

SEQ ID NO: 17305 - DNA, 72 bp, Homo sapiens
ttaagagtttttatttcctgccacagaaagttcatcaaaagagagtcaaaacacagctgaaattataagtcc

SEQ ID NO: 17306 - DNA, 74 bp, Homo sapiens
agtttttatttcctgccacagaaagttcatcaaaagagagtcaaaacacagctgaaattataagtcctccatca

SEQ ID NO: 17307 - DNA, 76 bp, Homo sapiens
ccacagaaagttcatcaaaagagagtcaaaacacagctgaaattataagtcctccatcaccagaccgacctcctca

SEQ ID NO: 17308 - DNA, 76 bp, Homo sapiens
agttcatcaaaagagagtcaaaacacagctgaaattataagtcctccatcaccagaccgacctcctcattcacaaa

SEQ ID NO: 17309 - DNA, 74 bp, Homo sapiens
aaaagagagtcaaaacacagctgaaattataagtcctccatcaccagaccgacctcctcattcacaaacctctg

SEQ ID NO: 17310 - DNA, 75 bp, Homo sapiens
aaacacagctgaaattataagtcctccatcaccagaccgacctcctcattcacaaacctctggctcctgttatta

SEQ ID NO: 17311 - DNA, 78 bp, Homo sapiens
aaattataagtcctccatcaccagaccgacctcctcattcacaaacctctggctcctgttattatcatgtcatctcaa

SEQ ID NO: 17312 - DNA, 78 bp, Homo sapiens
taagtcctccatcaccagaccgacctcctcattcacaaacctctggctcctgttattatcatgtcatctcaaaggtcc

SEQ ID NO: 17313 - DNA, 77 bp, Homo sapiens
cagaccgacctcctcattcacaaacctctggctcctgttattatcatgtcatctcaaaggtccccaggattcgaaca

SEQ ID NO: 17314 - DNA, 76 bp, Homo sapiens
tcctcattcacaaacctctggctcctgttattatcatgtcatctcaaaggtccccaggattcgaacacccagttat

SEQ ID NO: 17315 - DNA, 75 bp, Homo sapiens
attcacaaacctctggctcctgttattatcatgtcatctcaaaggtccccaggattcgaacacccagttattctc

SEQ ID NO: 17316 - DNA, 78 bp, Homo sapiens
ctctggctcctgttattatcatgtcatctcaaaggtccccaggattcgaacacccagttattctccaacacagagatc

SEQ ID NO: 17317 - DNA, 77 bp, Homo sapiens
ttattatcatgtcatctcaaaggtccccaggattcgaacacccagttattctccaacacagagatcccctggctgtc

SEQ ID NO: 17318 - DNA, 73 bp, Homo sapiens
atctcaaaggtccccaggattcgaacacccagttattctccaacacagagatcccctggctgtcgaccgttgc

SEQ ID NO: 17319 - DNA, 70 bp, Homo sapiens
aaaggtccccaggattcgaacacccagttattctccaacacagagatcccctggctgtcgaccgttgcct

SEQ ID NO: 17320 - DNA, 73 bp, Homo sapiens
aggattcgaacacccagttattctccaacacagagatcccctggctgtcgaccgttgccttctgcaggtaaaa

SEQ ID NO: 17321 - DNA, 73 bp, Homo sapiens
agttattctccaacacagagatcccctggctgtcgaccgttgccttctgcaggtaaaagactttattgaccta

SEQ ID NO: 17322 - DNA, 73 bp, Homo sapiens
caacacagagatcccctggctgtcgaccgttgccttctgcaggtaaaagactttattgacctacttgacctaa

SEQ ID NO: 17323 - DNA, 70 bp, Homo sapiens
cacatttgttctatctacaatagcatttattactttttctctcttgtttaggaagtcctaccccaaccac

SEQ ID NO: 17324 - DNA, 71 bp, Homo sapiens
ctatctacaatagcatttattactttttctctcttgtttaggaagtcctaccccaaccactcatgaaatag

SEQ ID NO: 17325 - DNA, 70 bp, Homo sapiens
atttattactttttctctcttgtttaggaagtcctaccccaaccactcatgaaatagtcacagtaggtga

SEQ ID NO: 17326 - DNA, 72 bp, Homo sapiens
tttctctcttgtttaggaagtcctaccccaaccactcatgaaatagtcacagtaggtgatcctttactctcc

SEQ ID NO: 17327 - DNA, 72 bp, Homo sapiens
ttgtttaggaagtcctaccccaaccactcatgaaatagtcacagtaggtgatcctttactctcctctggact

SEQ ID NO: 17328 - DNA, 74 bp, Homo sapiens
aagtcctaccccaaccactcatgaaatagtcacagtaggtgatcctttactctcctctggacttcgaagcattg

SEQ ID NO: 17329 - DNA, 79 bp, Homo sapiens
accactcatgaaatagtcacagtaggtgatcctttactctcctctggacttcgaagcattggctccaggcgtcacagta

SEQ ID NO: 17330 - DNA, 76 bp, Homo sapiens
aaatagtcacagtaggtgatcctttactctcctctggacttcgaagcattggctccaggcgtcacagtacctcttc

SEQ ID NO: 17331 - DNA, 76 bp, Homo sapiens
acagtaggtgatcctttactctcctctggacttcgaagcattggctccaggcgtcacagtacctcttccttatcac

SEQ ID NO: 17332 - DNA, 74 bp, Homo sapiens
atcctttactctcctctggacttcgaagcattggctccaggcgtcacagtacctcttccttatcaccccagcgg

SEQ ID NO: 17333 - DNA, 74 bp, Homo sapiens
tcctctggacttcgaagcattggctccaggcgtcacagtacctcttccttatcaccccagcggtccaaactccg

SEQ ID NO: 17334 - DNA, 73 bp, Homo sapiens
acttcgaagcattggctccaggcgtcacagtacctcttccttatcaccccagcggtccaaactccggataatg

SEQ ID NO: 17335 - DNA, 75 bp, Homo sapiens
attggctccaggcgtcacagtacctcttccttatcaccccagcggtccaaactccggataatgtctccaatgaga

SEQ ID NO: 17336 - DNA, 73 bp, Homo sapiens
cgtcacagtacctcttccttatcaccccagcggtccaaactccggataatgtctccaatgagaactgggaata

SEQ ID NO: 17337 - DNA, 72 bp, Homo sapiens
cttatcaccccagcggtccaaactccggataatgtctccaatgagaactgggaatacttactctaggaataa

SEQ ID NO: 17338 - DNA, 72 bp, Homo sapiens
agcggtccaaactccggataatgtctccaatgagaactgggaatacttactctaggaataatgtttcctcag

SEQ ID NO: 17339 - DNA, 73 bp, Homo sapiens
aaactccggataatgtctccaatgagaactgggaatacttactctaggaataatgtttcctcagtctccacca

SEQ ID NO: 17340 - DNA, 73 bp, Homo sapiens
atgtctccaatgagaactgggaatacttactctaggaataatgtttcctcagtctccaccaccgggaccgcta

SEQ ID NO: 17341 - DNA, 72 bp, Homo sapiens
agaactgggaatacttactctaggaataatgtttcctcagtctccaccaccgggaccgctactgatcttgaa

SEQ ID NO: 17342 - DNA, 74 bp, Homo sapiens
aatacttactctaggaataatgtttcctcagtctccaccaccgggaccgctactgatcttgaatcaagtgccaa

SEQ ID NO: 17343 - DNA, 77 bp, Homo sapiens
taggaataatgtttcctcagtctccaccaccgggaccgctactgatcttgaatcaagtgccaaagtagttgatcatg

SEQ ID NO: 17344 - DNA, 77 bp, Homo sapiens
taatgtttcctcagtctccaccaccgggaccgctactgatcttgaatcaagtgccaaagtagttgatcatgtcttag

SEQ ID NO: 17345 - DNA, 78 bp, Homo sapiens
tctccaccaccgggaccgctactgatcttgaatcaagtgccaaagtagttgatcatgtcttagggccactgaattcaa

SEQ ID NO: 17346 - DNA, 76 bp, Homo sapiens
gggaccgctactgatcttgaatcaagtgccaaagtagttgatcatgtcttagggccactgaattcaagtactagtt

SEQ ID NO: 17347 - DNA, 77 bp, Homo sapiens
tactgatcttgaatcaagtgccaaagtagttgatcatgtcttagggccactgaattcaagtactagtttagggcaaa

SEQ ID NO: 17348 - DNA, 72 bp, Homo sapiens
aaagtagttgatcatgtcttagggccactgaattcaagtactagtttagggcaaaacacttccacctcttca

SEQ ID NO: 17349 - DNA, 71 bp, Homo sapiens
tcttagggccactgaattcaagtactagtttagggcaaaacacttccacctcttcaaatttgcaaaggaca

SEQ ID NO: 17350 - DNA, 69 bp, Homo sapiens
aattcaagtactagtttagggcaaaacacttccacctcttcaaatttgcaaaggacagtggttactgta

SEQ ID NO: 17351 - DNA, 70 bp, Homo sapiens
tactagtttagggcaaaacacttccacctcttcaaatttgcaaaggacagtggttactgtaggcaataaa

SEQ ID NO: 17352 - DNA, 72 bp, Homo sapiens
acttccacctcttcaaatttgcaaaggacagtggttactgtaggcaataaaaacagtcacttggatggatct

SEQ ID NO: 17353 - DNA, 76 bp, Homo sapiens
tcttcaaatttgcaaaggacagtggttactgtaggcaataaaaacagtcacttggatggatcttcatcttcagaaa

SEQ ID NO: 17354 - DNA, 80 bp, Homo sapiens
tggttactgtaggcaataaaaacagtcacttggatggatcttcatcttcagaaatgaagcagtccagtgcttcagacttg

SEQ ID NO: 17355 - DNA, 81 bp, Homo sapiens
taggcaataaaaacagtcacttggatggatcttcatcttcagaaatgaagcagtccagtgcttcagacttggtgtccaaga

SEQ ID NO: 17356 - DNA, 81 bp, Homo sapiens
cagtcacttggatggatcttcatcttcagaaatgaagcagtccagtgcttcagacttggtgtccaagagctcctctttaaa

SEQ ID NO: 17357 - DNA, 78 bp, Homo sapiens
acttggatggatcttcatcttcagaaatgaagcagtccagtgcttcagacttggtgtccaagagctcctctttaaagg

SEQ ID NO: 17358 - DNA, 78 bp, Homo sapiens
tcatcttcagaaatgaagcagtccagtgcttcagacttggtgtccaagagctcctctttaaagggagagaagaccaaa

SEQ ID NO: 17359 - DNA, 77 bp, Homo sapiens
agaaatgaagcagtccagtgcttcagacttggtgtccaagagctcctctttaaagggagagaagaccaaagtgctga

SEQ ID NO: 17360 - DNA, 75 bp, Homo sapiens
agtccagtgcttcagacttggtgtccaagagctcctctttaaagggagagaagaccaaagtgctgagttccaaga

SEQ ID NO: 17361 - DNA, 76 bp, Homo sapiens
ttcagacttggtgtccaagagctcctctttaaagggagagaagaccaaagtgctgagttccaagagctcagaggga

SEQ ID NO: 17362 - DNA, 80 bp, Homo sapiens
tgtccaagagctcctctttaaagggagagaagaccaaagtgctgagttccaagagctcagagggatctgcacataatgtg

SEQ ID NO: 17363 - DNA, 79 bp, Homo sapiens
agagctcctctttaaagggagagaagaccaaagtgctgagttccaagagctcagagggatctgcacataatgtggctta

SEQ ID NO: 17364 - DNA, 77 bp, Homo sapiens
ttaaagggagagaagaccaaagtgctgagttccaagagctcagagggatctgcacataatgtggcttaccctggaat

SEQ ID NO: 17365 - DNA, 77 bp, Homo sapiens
agaagaccaaagtgctgagttccaagagctcagagggatctgcacataatgtggcttaccctggaattcctaaactg

SEQ ID NO: 17366 - DNA, 77 bp, Homo sapiens
ctgagttccaagagctcagagggatctgcacataatgtggcttaccctggaattcctaaactggccccacaggttca

SEQ ID NO: 17367 - DNA, 76 bp, Homo sapiens
aagagctcagagggatctgcacataatgtggcttaccctggaattcctaaactggccccacaggttcataacacaa

SEQ ID NO: 17368 - DNA, 74 bp, Homo sapiens
cataatgtggcttaccctggaattcctaaactggccccacaggttcataacacaacatctagagaactgaatgt

SEQ ID NO: 17369 - DNA, 71 bp, Homo sapiens
cttaccctggaattcctaaactggccccacaggttcataacacaacatctagagaactgaatgttagtaaa

SEQ ID NO: 17370 - DNA, 71 bp, Homo sapiens
aattcctaaactggccccacaggttcataacacaacatctagagaactgaatgttagtaaaatcggctcct

SEQ ID NO: 17371 - DNA, 74 bp, Homo sapiens
ctaaactggccccacaggttcataacacaacatctagagaactgaatgttagtaaaatcggctcctttgctgaa

SEQ ID NO: 17372 - DNA, 75 bp, Homo sapiens
acaggttcataacacaacatctagagaactgaatgttagtaaaatcggctcctttgctgaaccctcttcagtgtc

SEQ ID NO: 17373 - DNA, 73 bp, Homo sapiens
taacacaacatctagagaactgaatgttagtaaaatcggctcctttgctgaaccctcttcagtgtcgttttct

SEQ ID NO: 17374 - DNA, 72 bp, Homo sapiens
atctagagaactgaatgttagtaaaatcggctcctttgctgaaccctcttcagtgtcgttttcttctaaaga

SEQ ID NO: 17375 - DNA, 69 bp, Homo sapiens
atgttagtaaaatcggctcctttgctgaaccctcttcagtgtcgttttcttctaaagaggccctctcct

SEQ ID NO: 17376 - DNA, 69 bp, Homo sapiens
agtaaaatcggctcctttgctgaaccctcttcagtgtcgttttcttctaaagaggccctctccttccca

SEQ ID NO: 17377 - DNA, 72 bp, Homo sapiens
tcctttgctgaaccctcttcagtgtcgttttcttctaaagaggccctctccttcccacacctccatttgaga

SEQ ID NO: 17378 - DNA, 69 bp, Homo sapiens
aaccctcttcagtgtcgttttcttctaaagaggccctctccttcccacacctccatttgagagggcaaa

SEQ ID NO: 17379 - DNA, 72 bp, Homo sapiens
agtgtcgttttcttctaaagaggccctctccttcccacacctccatttgagagggcaaaggaatgatcgaga

SEQ ID NO: 17380 - DNA, 77 bp, Homo sapiens
ccctctccttcccacacctccatttgagagggcaaaggaatgatcgagaccaacacacagattctacccaatcagca

SEQ ID NO: 17381 - DNA, 77 bp, Homo sapiens
ttcccacacctccatttgagagggcaaaggaatgatcgagaccaacacacagattctacccaatcagcaaactcctc

SEQ ID NO: 17382 - DNA, 81 bp, Homo sapiens
tccatttgagagggcaaaggaatgatcgagaccaacacacagattctacccaatcagcaaactcctctccagatgaagata

SEQ ID NO: 17383 - DNA, 80 bp, Homo sapiens
ggcaaaggaatgatcgagaccaacacacagattctacccaatcagcaaactcctctccagatgaagatactgaagtcaaa

SEQ ID NO: 17384 - DNA, 79 bp, Homo sapiens
caacacacagattctacccaatcagcaaactcctctccagatgaagatactgaagtcaaaaccttgaagctatctggaa

SEQ ID NO: 17385 - DNA, 80 bp, Homo sapiens
acagattctacccaatcagcaaactcctctccagatgaagatactgaagtcaaaaccttgaagctatctggaatgagcaa

SEQ ID NO: 17386 - DNA, 84 bp, Homo sapiens
aatcagcaaactcctctccagatgaagatactgaagtcaaaaccttgaagctatctggaatgagcaacagatcatccattatca

SEQ ID NO: 17387 - DNA, 81 bp, Homo sapiens
atactgaagtcaaaaccttgaagctatctggaatgagcaacagatcatccattatcaacgaacatatgggatctagttcca

SEQ ID NO: 17388 - DNA, 81 bp, Homo sapiens
aaaaccttgaagctatctggaatgagcaacagatcatccattatcaacgaacatatgggatctagttccagagataggaga

SEQ ID NO: 17389 - DNA, 82 bp, Homo sapiens
aagctatctggaatgagcaacagatcatccattatcaacgaacatatgggatctagttccagagataggagacagaaaggga

SEQ ID NO: 17390 - DNA, 78 bp, Homo sapiens
ggaatgagcaacagatcatccattatcaacgaacatatgggatctagttccagagataggagacagaaagggaaaaaa

SEQ ID NO: 17391 - DNA, 75 bp, Homo sapiens
agatcatccattatcaacgaacatatgggatctagttccagagataggagacagaaagggaaaaaatcctgtaaa

SEQ ID NO: 17392 - DNA, 71 bp, Homo sapiens
attatcaacgaacatatgggatctagttccagagataggagacagaaagggaaaaaatcctgtaaagaaac

SEQ ID NO: 17393 - DNA, 70 bp, Homo sapiens
aacatatgggatctagttccagagataggagacagaaagggaaaaaatcctgtaaagaaactttcaaaga

SEQ ID NO: 17394 - DNA, 70 bp, Homo sapiens
gatctagttccagagataggagacagaaagggaaaaaatcctgtaaagaaactttcaaagaaaagcattc

SEQ ID NO: 17395 - DNA, 69 bp, Homo sapiens
cagagataggagacagaaagggaaaaaatcctgtaaagaaactttcaaagaaaagcattccagtaaatc

SEQ ID NO: 17396 - DNA, 67 bp, Homo sapiens
aaatcctgtaaagaaactttcaaagaaaagcattccagtaaatcttttttggaacctggtcaggtga

SEQ ID NO: 17397 - DNA, 68 bp, Homo sapiens
aaagaaactttcaaagaaaagcattccagtaaatcttttttggaacctggtcaggtgacaactggtga

SEQ ID NO: 17398 - DNA, 69 bp, Homo sapiens
tttcaaagaaaagcattccagtaaatcttttttggaacctggtcaggtgacaactggtgaggaaggaaa

SEQ ID NO: 17399 - DNA, 69 bp, Homo sapiens
aaaagcattccagtaaatcttttttggaacctggtcaggtgacaactggtgaggaaggaaacttgaagc

SEQ ID NO: 17400 - DNA, 72 bp, Homo sapiens
taaatcttttttggaacctggtcaggtgacaactggtgaggaaggaaacttgaagccagagtttatggatga

SEQ ID NO: 17401 - DNA, 70 bp, Homo sapiens
tttttggaacctggtcaggtgacaactggtgaggaaggaaacttgaagccagagtttatggatgaggttt

SEQ ID NO: 17402 - DNA, 73 bp, Homo sapiens
aactggtgaggaaggaaacttgaagccagagtttatggatgaggttttgactcctgagtatatgggccaacga

SEQ ID NO: 17403 - DNA, 73 bp, Homo sapiens
aaggaaacttgaagccagagtttatggatgaggttttgactcctgagtatatgggccaacgaccatgtaacaa

SEQ ID NO: 17404 - DNA, 76 bp, Homo sapiens
aagccagagtttatggatgaggttttgactcctgagtatatgggccaacgaccatgtaacaatgtttcttctgata

SEQ ID NO: 17405 - DNA, 75 bp, Homo sapiens
atgaggttttgactcctgagtatatgggccaacgaccatgtaacaatgtttcttctgataagattggtgataaag

SEQ ID NO: 17406 - DNA, 76 bp, Homo sapiens
actcctgagtatatgggccaacgaccatgtaacaatgtttcttctgataagattggtgataaaggcctttctatgc

SEQ ID NO: 17407 - DNA, 73 bp, Homo sapiens
aacgaccatgtaacaatgtttcttctgataagattggtgataaaggcctttctatgccaggagtccccaaagc

SEQ ID NO: 17408 - DNA, 75 bp, Homo sapiens
aatgtttcttctgataagattggtgataaaggcctttctatgccaggagtccccaaagctccacccatgcaagta

SEQ ID NO: 17409 - DNA, 76 bp, Homo sapiens
ttcttctgataagattggtgataaaggcctttctatgccaggagtccccaaagctccacccatgcaagtagaagga

SEQ ID NO: 17410 - DNA, 76 bp, Homo sapiens
tggtgataaaggcctttctatgccaggagtccccaaagctccacccatgcaagtagaaggatctgccaaggaatta

SEQ ID NO: 17411 - DNA, 74 bp, Homo sapiens
ataaaggcctttctatgccaggagtccccaaagctccacccatgcaagtagaaggatctgccaaggaattacag

SEQ ID NO: 17412 - DNA, 76 bp, Homo sapiens
ttctatgccaggagtccccaaagctccacccatgcaagtagaaggatctgccaaggaattacaggcaccacggaaa

SEQ ID NO: 17413 - DNA, 75 bp, Homo sapiens
tccccaaagctccacccatgcaagtagaaggatctgccaaggaattacaggcaccacggaaacgcacagtcaaag

SEQ ID NO: 17414 - DNA, 78 bp, Homo sapiens
aagctccacccatgcaagtagaaggatctgccaaggaattacaggcaccacggaaacgcacagtcaaagtgacactga

SEQ ID NO: 17415 - DNA, 74 bp, Homo sapiens
aagtagaaggatctgccaaggaattacaggcaccacggaaacgcacagtcaaagtgacactgacacctctaaaa

SEQ ID NO: 17416 - DNA, 74 bp, Homo sapiens
aaggatctgccaaggaattacaggcaccacggaaacgcacagtcaaagtgacactgacacctctaaaaatggaa

SEQ ID NO: 17417 - DNA, 76 bp, Homo sapiens
gaattacaggcaccacggaaacgcacagtcaaagtgacactgacacctctaaaaatggaaaatgagagtcaatcca

SEQ ID NO: 17418 - DNA, 73 bp, Homo sapiens
aggcaccacggaaacgcacagtcaaagtgacactgacacctctaaaaatggaaaatgagagtcaatccaaaaa

SEQ ID NO: 17419 - DNA, 72 bp, Homo sapiens
agtcaaagtgacactgacacctctaaaaatggaaaatgagagtcaatccaaaaatgccctgaaagaaagtag

SEQ ID NO: 17420 - DNA, 72 bp, Homo sapiens
acactgacacctctaaaaatggaaaatgagagtcaatccaaaaatgccctgaaagaaagtagtcctgcttcc

SEQ ID NO: 17421 - DNA, 73 bp, Homo sapiens
aaaatgagagtcaatccaaaaatgccctgaaagaaagtagtcctgcttcccctttgcaaatagagtcaacatc

SEQ ID NO: 17422 - DNA, 71 bp, Homo sapiens
aaaatgccctgaaagaaagtagtcctgcttcccctttgcaaatagagtcaacatctcccacagaaccaatt

SEQ ID NO: 17423 - DNA, 73 bp, Homo sapiens
aaagaaagtagtcctgcttcccctttgcaaatagagtcaacatctcccacagaaccaatttcagcctctgaaa

SEQ ID NO: 17424 - DNA, 77 bp, Homo sapiens
ctgcttcccctttgcaaatagagtcaacatctcccacagaaccaatttcagcctctgaaaatccaggagatggtcca

SEQ ID NO: 17425 - DNA, 77 bp, Homo sapiens
tttgcaaatagagtcaacatctcccacagaaccaatttcagcctctgaaaatccaggagatggtccagtggcccaac

SEQ ID NO: 17426 - DNA, 75 bp, Homo sapiens
aaatagagtcaacatctcccacagaaccaatttcagcctctgaaaatccaggagatggtccagtggcccaaccaa

SEQ ID NO: 17427 - DNA, 74 bp, Homo sapiens
atctcccacagaaccaatttcagcctctgaaaatccaggagatggtccagtggcccaaccaagccccaataata

SEQ ID NO: 17428 - DNA, 75 bp, Homo sapiens
agaaccaatttcagcctctgaaaatccaggagatggtccagtggcccaaccaagccccaataatacctcatgcca

SEQ ID NO: 17429 - DNA, 76 bp, Homo sapiens
gcctctgaaaatccaggagatggtccagtggcccaaccaagccccaataatacctcatgccaggattctcaaagta

SEQ ID NO: 17430 - DNA, 76 bp, Homo sapiens
atccaggagatggtccagtggcccaaccaagccccaataatacctcatgccaggattctcaaagtaacaactatca

SEQ ID NO: 17431 - DNA, 75 bp, Homo sapiens
agatggtccagtggcccaaccaagccccaataatacctcatgccaggattctcaaagtaacaactatcagaatct

SEQ ID NO: 17432 - DNA, 75 bp, Homo sapiens
agtggcccaaccaagccccaataatacctcatgccaggattctcaaagtaacaactatcagaatcttccagtaca

SEQ ID NO: 17433 - DNA, 75 bp, Homo sapiens
accaagccccaataatacctcatgccaggattctcaaagtaacaactatcagaatcttccagtacaggacagaaa

SEQ ID NO: 17434 - DNA, 76 bp, Homo sapiens
aataatacctcatgccaggattctcaaagtaacaactatcagaatcttccagtacaggacagaaacctaatgcttc

SEQ ID NO: 17435 - DNA, 75 bp, Homo sapiens
aacaactatcagaatcttccagtacaggacagaaacctaatgcttccagatggccccaaacctcaggaggatggc

SEQ ID NO: 17436 - DNA, 72 bp, Homo sapiens
aatcttccagtacaggacagaaacctaatgcttccagatggccccaaacctcaggaggatggctcttttaaa

SEQ ID NO: 17437 - DNA, 72 bp, Homo sapiens
tacaggacagaaacctaatgcttccagatggccccaaacctcaggaggatggctcttttaaaaggaggtatc

SEQ ID NO: 17438 - DNA, 68 bp, Homo sapiens
aaacctaatgcttccagatggccccaaacctcaggaggatggctcttttaaaaggaggtatccccgtc

SEQ ID NO: 17439 - DNA, 71 bp, Homo sapiens
ccaaacctcaggaggatggctcttttaaaaggaggtatccccgtcgcagtgcccgtgcacgttctaacatg

SEQ ID NO: 17440 - DNA, 70 bp, Homo sapiens
ctcaggaggatggctcttttaaaaggaggtatccccgtcgcagtgcccgtgcacgttctaacatgttttt

SEQ ID NO: 17441 - DNA, 67 bp, Homo sapiens
tcttttaaaaggaggtatccccgtcgcagtgcccgtgcacgttctaacatgttttttgggcttaccc

SEQ ID NO: 17442 - DNA, 69 bp, Homo sapiens
taaaaggaggtatccccgtcgcagtgcccgtgcacgttctaacatgttttttgggcttaccccactcta

SEQ ID NO: 17443 - DNA, 72 bp, Homo sapiens
cccgtcgcagtgcccgtgcacgttctaacatgttttttgggcttaccccactctatggagtaagatcctatg

SEQ ID NO: 17444 - DNA, 72 bp, Homo sapiens
agtgcccgtgcacgttctaacatgttttttgggcttaccccactctatggagtaagatcctatggtgaagaa

SEQ ID NO: 17445 - DNA, 73 bp, Homo sapiens
gttctaacatgttttttgggcttaccccactctatggagtaagatcctatggtgaagaagacattccattcta

SEQ ID NO: 17446 - DNA, 76 bp, Homo sapiens
atgttttttgggcttaccccactctatggagtaagatcctatggtgaagaagacattccattctacagcagctcaa

SEQ ID NO: 17447 - DNA, 82 bp, Homo sapiens
aagacattccattctacagcagctcaactgggaagaagcgaggcaagagatcagctgaaggacaggtggatggggccgatga

SEQ ID NO: 17448 - DNA, 81 bp, Homo sapiens
ttctacagcagctcaactgggaagaagcgaggcaagagatcagctgaaggacaggtggatggggccgatgacttaagcact

SEQ ID NO: 17449 - DNA, 81 bp, Homo sapiens
tcaactgggaagaagcgaggcaagagatcagctgaaggacaggtggatggggccgatgacttaagcacttcagatgaagac

SEQ ID NO: 17450 - DNA, 79 bp, Homo sapiens
caagagatcagctgaaggacaggtggatggggccgatgacttaagcacttcagatgaagacgacttatactattacaac

SEQ ID NO: 17451 - DNA, 77 bp, Homo sapiens
agctgaaggacaggtggatggggccgatgacttaagcacttcagatgaagacgacttatactattacaacttcacta

SEQ ID NO: 17452 - DNA, 77 bp, Homo sapiens
atgacttaagcacttcagatgaagacgacttatactattacaacttcactagaacagtgatttcttcaggtggagag

SEQ ID NO: 17453 - DNA, 75 bp, Homo sapiens
acttcagatgaagacgacttatactattacaacttcactagaacagtgatttcttcaggtggagaggaacgactg

SEQ ID NO: 17454 - DNA, 74 bp, Homo sapiens
acgacttatactattacaacttcactagaacagtgatttcttcaggtggagaggaacgactggcatcccataat

SEQ ID NO: 17455 - DNA, 75 bp, Homo sapiens
tatactattacaacttcactagaacagtgatttcttcaggtggagaggaacgactggcatcccataatttatttc

SEQ ID NO: 17456 - DNA, 72 bp, Homo sapiens
aacttcactagaacagtgatttcttcaggtggagaggaacgactggcatcccataatttatttcgggaggag

SEQ ID NO: 17457 - DNA, 74 bp, Homo sapiens
agtgatttcttcaggtggagaggaacgactggcatcccataatttatttcgggaggaggaacagtgtgatcttc

SEQ ID NO: 17458 - DNA, 73 bp, Homo sapiens
tcttcaggtggagaggaacgactggcatcccataatttatttcgggaggaggaacagtgtgatcttccaaaaa

SEQ ID NO: 17459 - DNA, 73 bp, Homo sapiens
agaggaacgactggcatcccataatttatttcgggaggaggaacagtgtgatcttccaaaaatctcacagttg

SEQ ID NO: 17460 - DNA, 75 bp, Homo sapiens
actggcatcccataatttatttcgggaggaggaacagtgtgatcttccaaaaatctcacagttggatggtgttga

SEQ ID NO: 17461 - DNA, 76 bp, Homo sapiens
ataatttatttcgggaggaggaacagtgtgatcttccaaaaatctcacagttggatggtgttgatgatgggacaga

SEQ ID NO: 17462 - DNA, 79 bp, Homo sapiens
tttcgggaggaggaacagtgtgatcttccaaaaatctcacagttggatggtgttgatgatgggacagagagtgatacta

SEQ ID NO: 17463 - DNA, 83 bp, Homo sapiens
aacagtgtgatcttccaaaaatctcacagttggatggtgttgatgatgggacagagagtgatactagtgtcacagccacaaca

SEQ ID NO: 17464 - DNA, 80 bp, Homo sapiens
tcttccaaaaatctcacagttggatggtgttgatgatgggacagagagtgatactagtgtcacagccacaacaaggaaaa

SEQ ID NO: 17465 - DNA, 80 bp, Homo sapiens
ggatggtgttgatgatgggacagagagtgatactagtgtcacagccacaacaaggaaaagcagccagattccaaaaagaa

SEQ ID NO: 17466 - DNA, 79 bp, Homo sapiens
ttgatgatgggacagagagtgatactagtgtcacagccacaacaaggaaaagcagccagattccaaaaagaaatggtaa

SEQ ID NO: 17467 - DNA, 74 bp, Homo sapiens
acagagagtgatactagtgtcacagccacaacaaggaaaagcagccagattccaaaaagaaatggtaaagaaaa

SEQ ID NO: 17468 - DNA, 71 bp, Homo sapiens
caaggaaaagcagccagattccaaaaagaaatggtaaagaaaatggaacagagaacttaaagattgataga

SEQ ID NO: 17469 - DNA, 72 bp, Homo sapiens
aagcagccagattccaaaaagaaatggtaaagaaaatggaacagagaacttaaagattgatagacctgaaga

SEQ ID NO: 17470 - DNA, 72 bp, Homo sapiens
aagaaatggtaaagaaaatggaacagagaacttaaagattgatagacctgaagatgctggggagaaagaaca

SEQ ID NO: 17471 - DNA, 75 bp, Homo sapiens
aaatggaacagagaacttaaagattgatagacctgaagatgctggggagaaagaacatgtcactaagagttctgt

SEQ ID NO: 17472 - DNA, 76 bp, Homo sapiens
gagaacttaaagattgatagacctgaagatgctggggagaaagaacatgtcactaagagttctgttggccacaaaa

SEQ ID NO: 17473 - DNA, 77 bp, Homo sapiens
cttaaagattgatagacctgaagatgctggggagaaagaacatgtcactaagagttctgttggccacaaaaatgagc

SEQ ID NO: 17474 - DNA, 78 bp, Homo sapiens
tagacctgaagatgctggggagaaagaacatgtcactaagagttctgttggccacaaaaatgagccaaagatggataa

SEQ ID NO: 17475 - DNA, 77 bp, Homo sapiens
aagatgctggggagaaagaacatgtcactaagagttctgttggccacaaaaatgagccaaagatggataactgccat

SEQ ID NO: 17476 - DNA, 78 bp, Homo sapiens
aagaacatgtcactaagagttctgttggccacaaaaatgagccaaagatggataactgccattctgtaagcagagtta

SEQ ID NO: 17477 - DNA, 77 bp, Homo sapiens
atgtcactaagagttctgttggccacaaaaatgagccaaagatggataactgccattctgtaagcagagttaaaaca

SEQ ID NO: 17478 - DNA, 76 bp, Homo sapiens
ttctgttggccacaaaaatgagccaaagatggataactgccattctgtaagcagagttaaaacacagggacaagat

SEQ ID NO: 17479 - DNA, 79 bp, Homo sapiens
aatgagccaaagatggataactgccattctgtaagcagagttaaaacacagggacaagattccttggaagctcagctca

SEQ ID NO: 17480 - DNA, 81 bp, Homo sapiens
atggataactgccattctgtaagcagagttaaaacacagggacaagattccttggaagctcagctcagctcattggagtca

SEQ ID NO: 17481 - DNA, 80 bp, Homo sapiens
attctgtaagcagagttaaaacacagggacaagattccttggaagctcagctcagctcattggagtcaagccgcagagtc

SEQ ID NO: 17482 - DNA, 78 bp, Homo sapiens
ttaaaacacagggacaagattccttggaagctcagctcagctcattggagtcaagccgcagagtccacacaagtaccc

SEQ ID NO: 17483 - DNA, 74 bp, Homo sapiens
ctcagctcattggagtcaagccgcagagtccacacaagtaccccctccgacaaaaatttactggacacctataa

SEQ ID NO: 17484 - DNA, 72 bp, Homo sapiens
attggagtcaagccgcagagtccacacaagtaccccctccgacaaaaatttactggacacctataatactga

SEQ ID NO: 17485 - DNA, 72 bp, Homo sapiens
aagccgcagagtccacacaagtaccccctccgacaaaaatttactggacacctataatactgagctcctgaa

SEQ ID NO: 17486 - DNA, 73 bp, Homo sapiens
agtccacacaagtaccccctccgacaaaaatttactggacacctataatactgagctcctgaaatcagattca

SEQ ID NO: 17487 - DNA, 78 bp, Homo sapiens
caaaaatttactggacacctataatactgagctcctgaaatcagattcagacaataacaacagtgatgactgtgggaa

SEQ ID NO: 17488 - DNA, 81 bp, Homo sapiens
atttactggacacctataatactgagctcctgaaatcagattcagacaataacaacagtgatgactgtgggaatatcctgc

SEQ ID NO: 17489 - DNA, 82 bp, Homo sapiens
acctataatactgagctcctgaaatcagattcagacaataacaacagtgatgactgtgggaatatcctgccttcagacatta

SEQ ID NO: 17490 - DNA, 82 bp, Homo sapiens
gctcctgaaatcagattcagacaataacaacagtgatgactgtgggaatatcctgccttcagacattatggactttgtacta

SEQ ID NO: 17491 - DNA, 80 bp, Homo sapiens
atcagattcagacaataacaacagtgatgactgtgggaatatcctgccttcagacattatggactttgtactaaagaata

SEQ ID NO: 17492 - DNA, 79 bp, Homo sapiens
aacagtgatgactgtgggaatatcctgccttcagacattatggactttgtactaaagaatactccatccatgcaggctt

SEQ ID NO: 17493 - DNA, 79 bp, Homo sapiens
atgactgtgggaatatcctgccttcagacattatggactttgtactaaagaatactccatccatgcaggctttgggtga

SEQ ID NO: 17494 - DNA, 78 bp, Homo sapiens
aatatcctgccttcagacattatggactttgtactaaagaatactccatccatgcaggctttgggtgagagcccagag

SEQ ID NO: 17495 - DNA, 82 bp, Homo sapiens
ttcagacattatggactttgtactaaagaatactccatccatgcaggctttgggtgagagcccagagtcatcttcatcagaa

SEQ ID NO: 17496 - DNA, 81 bp, Homo sapiens
ttatggactttgtactaaagaatactccatccatgcaggctttgggtgagagcccagagtcatcttcatcagaactcctga

SEQ ID NO: 17497 - DNA, 82 bp, Homo sapiens
tgtactaaagaatactccatccatgcaggctttgggtgagagcccagagtcatcttcatcagaactcctgaatcttggtgaa

SEQ ID NO: 17498 - DNA, 79 bp, Homo sapiens
caggctttgggtgagagcccagagtcatcttcatcagaactcctgaatcttggtgaaggattgggtcttgacagtaatc

SEQ ID NO: 17499 - DNA, 77 bp, Homo sapiens
agagtcatcttcatcagaactcctgaatcttggtgaaggattgggtcttgacagtaatcgtgaaaaagacatgggtc

SEQ ID NO: 17500 - DNA, 75 bp, Homo sapiens
tcatcagaactcctgaatcttggtgaaggattgggtcttgacagtaatcgtgaaaaagacatgggtctttttgaa

SEQ ID NO: 17501 - DNA, 71 bp, Homo sapiens
aactcctgaatcttggtgaaggattgggtcttgacagtaatcgtgaaaaagacatgggtctttttgaagta

SEQ ID NO: 17502 - DNA, 71 bp, Homo sapiens
aatcttggtgaaggattgggtcttgacagtaatcgtgaaaaagacatgggtctttttgaagtattttctca

SEQ ID NO: 17503 - DNA, 74 bp, Homo sapiens
aaggattgggtcttgacagtaatcgtgaaaaagacatgggtctttttgaagtattttctcagcagctgcctaca

SEQ ID NO: 17504 - DNA, 75 bp, Homo sapiens
acagtaatcgtgaaaaagacatgggtctttttgaagtattttctcagcagctgcctacaacagaacctgtggata

SEQ ID NO: 17505 - DNA, 74 bp, Homo sapiens
aatcgtgaaaaagacatgggtctttttgaagtattttctcagcagctgcctacaacagaacctgtggatagtag

SEQ ID NO: 17506 - DNA, 76 bp, Homo sapiens
aagacatgggtctttttgaagtattttctcagcagctgcctacaacagaacctgtggatagtagtgtctcttcctc

SEQ ID NO: 17507 - DNA, 81 bp, Homo sapiens
ttttgaagtattttctcagcagctgcctacaacagaacctgtggatagtagtgtctcttcctctatctcagcagaggaaca

SEQ ID NO: 17508 - DNA, 81 bp, Homo sapiens
ctgcctacaacagaacctgtggatagtagtgtctcttcctctatctcagcagaggaacagtttgagttgcctctagagcta

SEQ ID NO: 17509 - DNA, 81 bp, Homo sapiens
aacagaacctgtggatagtagtgtctcttcctctatctcagcagaggaacagtttgagttgcctctagagctaccatctga

SEQ ID NO: 17510 - DNA, 86 bp, Homo sapiens
tgtggatagtagtgtctcttcctctatctcagcagaggaacagtttgagttgcctctagagctaccatctgatctgtctgtcttga

SEQ ID NO: 17511 - DNA, 83 bp, Homo sapiens
tgtctcttcctctatctcagcagaggaacagtttgagttgcctctagagctaccatctgatctgtctgtcttgaccacccgga

SEQ ID NO: 17512 - DNA, 81 bp, Homo sapiens
ttcctctatctcagcagaggaacagtttgagttgcctctagagctaccatctgatctgtctgtcttgaccacccggagtcc

SEQ ID NO: 17513 - DNA, 78 bp, Homo sapiens
agcagaggaacagtttgagttgcctctagagctaccatctgatctgtctgtcttgaccacccggagtcccactgtccc

SEQ ID NO: 17514 - DNA, 78 bp, Homo sapiens
atctgtctgtcttgaccacccggagtcccactgtccccagccagaatcccagtagactagctgttatctcagactcag

SEQ ID NO: 17515 - DNA, 76 bp, Homo sapiens
tcttgaccacccggagtcccactgtccccagccagaatcccagtagactagctgttatctcagactcaggggagaa

SEQ ID NO: 17516 - DNA, 79 bp, Homo sapiens
gagtcccactgtccccagccagaatcccagtagactagctgttatctcagactcaggggagaagagagtaaccatcaca

SEQ ID NO: 17517 - DNA, 78 bp, Homo sapiens
tgtccccagccagaatcccagtagactagctgttatctcagactcaggggagaagagagtaaccatcacagaaaaatc

SEQ ID NO: 17518 - DNA, 77 bp, Homo sapiens
agaatcccagtagactagctgttatctcagactcaggggagaagagagtaaccatcacagaaaaatctgtagcctcc

SEQ ID NO: 17519 - DNA, 77 bp, Homo sapiens
agtagactagctgttatctcagactcaggggagaagagagtaaccatcacagaaaaatctgtagcctcctctgaaag

SEQ ID NO: 17520 - DNA, 80 bp, Homo sapiens
tagctgttatctcagactcaggggagaagagagtaaccatcacagaaaaatctgtagcctcctctgaaagtgacccagca

SEQ ID NO: 17521 - DNA, 79 bp, Homo sapiens
agactcaggggagaagagagtaaccatcacagaaaaatctgtagcctcctctgaaagtgacccagcactgctgagccca

SEQ ID NO: 17522 - DNA, 80 bp, Homo sapiens
gaagagagtaaccatcacagaaaaatctgtagcctcctctgaaagtgacccagcactgctgagcccaggagtagatccaa

SEQ ID NO: 17523 - DNA, 80 bp, Homo sapiens
taaccatcacagaaaaatctgtagcctcctctgaaagtgacccagcactgctgagcccaggagtagatccaactcctgaa

SEQ ID NO: 17524 - DNA, 80 bp, Homo sapiens
agaaaaatctgtagcctcctctgaaagtgacccagcactgctgagcccaggagtagatccaactcctgaaggccacatga

SEQ ID NO: 17525 - DNA, 82 bp, Homo sapiens
tagcctcctctgaaagtgacccagcactgctgagcccaggagtagatccaactcctgaaggccacatgactcctgatcattt

SEQ ID NO: 17526 - DNA, 82 bp, Homo sapiens
ctctgaaagtgacccagcactgctgagcccaggagtagatccaactcctgaaggccacatgactcctgatcattttatccaa

SEQ ID NO: 17527 - DNA, 82 bp, Homo sapiens
acccagcactgctgagcccaggagtagatccaactcctgaaggccacatgactcctgatcattttatccaaggacacatgga

SEQ ID NO: 17528 - DNA, 85 bp, Homo sapiens
tgagcccaggagtagatccaactcctgaaggccacatgactcctgatcattttatccaaggacacatggatgcagaccacatctc

SEQ ID NO: 17529 - DNA, 83 bp, Homo sapiens
aggagtagatccaactcctgaaggccacatgactcctgatcattttatccaaggacacatggatgcagaccacatctctagcc

SEQ ID NO: 17530 - DNA, 80 bp, Homo sapiens
tgcagaccacatctctagccctccttgtggttcagtagagcaaggtcatggcaacaatcaggatttaactaggaacagta

SEQ ID NO: 17531 - DNA, 77 bp, Homo sapiens
acatctctagccctccttgtggttcagtagagcaaggtcatggcaacaatcaggatttaactaggaacagtagcacc

SEQ ID NO: 17532 - DNA, 75 bp, Homo sapiens
tcagtagagcaaggtcatggcaacaatcaggatttaactaggaacagtagcacccctggccttcaggtacctgtt

SEQ ID NO: 17533 - DNA, 73 bp, Homo sapiens
agagcaaggtcatggcaacaatcaggatttaactaggaacagtagcacccctggccttcaggtacctgtttcc

SEQ ID NO: 17534 - DNA, 70 bp, Homo sapiens
atggcaacaatcaggatttaactaggaacagtagcacccctggccttcaggtacctgtttccccaactgt

SEQ ID NO: 17535 - DNA, 70 bp, Homo sapiens
atcaggatttaactaggaacagtagcacccctggccttcaggtacctgtttccccaactgttcccatcca

SEQ ID NO: 17536 - DNA, 69 bp, Homo sapiens
aactaggaacagtagcacccctggccttcaggtacctgtttccccaactgttcccatccagaaccagaa

SEQ ID NO: 17537 - DNA, 71 bp, Homo sapiens
cacccctggccttcaggtacctgtttccccaactgttcccatccagaaccagaagtatgtgcccaattcta

SEQ ID NO: 17538 - DNA, 73 bp, Homo sapiens
cttcaggtacctgtttccccaactgttcccatccagaaccagaagtatgtgcccaattctactgatagtcctg

SEQ ID NO: 17539 - DNA, 75 bp, Homo sapiens
cccaactgttcccatccagaaccagaagtatgtgcccaattctactgatagtcctggcccgtctcagatttccaa

SEQ ID NO: 17540 - DNA, 81 bp, Homo sapiens
ttcccatccagaaccagaagtatgtgcccaattctactgatagtcctggcccgtctcagatttccaatgcagctgtccaga

SEQ ID NO: 17541 - DNA, 79 bp, Homo sapiens
aaccagaagtatgtgcccaattctactgatagtcctggcccgtctcagatttccaatgcagctgtccagaccactccac

SEQ ID NO: 17542 - DNA, 80 bp, Homo sapiens
tatgtgcccaattctactgatagtcctggcccgtctcagatttccaatgcagctgtccagaccactccaccccacctgaa

SEQ ID NO: 17543 - DNA, 79 bp, Homo sapiens
attctactgatagtcctggcccgtctcagatttccaatgcagctgtccagaccactccaccccacctgaagccagccac

SEQ ID NO: 17544 - DNA, 79 bp, Homo sapiens
ctggcccgtctcagatttccaatgcagctgtccagaccactccaccccacctgaagccagccactgagaaactcatagt

SEQ ID NO: 17545 - DNA, 80 bp, Homo sapiens
tcagatttccaatgcagctgtccagaccactccaccccacctgaagccagccactgagaaactcatagttgttaaccaga

SEQ ID NO: 17546 - DNA, 78 bp, Homo sapiens
tttccaatgcagctgtccagaccactccaccccacctgaagccagccactgagaaactcatagttgttaaccagaaca

SEQ ID NO: 17547 - DNA, 78 bp, Homo sapiens
tgtccagaccactccaccccacctgaagccagccactgagaaactcatagttgttaaccagaacatgcagccacttta

SEQ ID NO: 17548 - DNA, 77 bp, Homo sapiens
ccacctgaagccagccactgagaaactcatagttgttaaccagaacatgcagccactttatgttctccaaactcttc

SEQ ID NO: 17549 - DNA, 77 bp, Homo sapiens
agccactgagaaactcatagttgttaaccagaacatgcagccactttatgttctccaaactcttccaaatggagtga

SEQ ID NO: 17550 - DNA, 73 bp, Homo sapiens
aaactcatagttgttaaccagaacatgcagccactttatgttctccaaactcttccaaatggagtgacccaaa

SEQ ID NO: 17551 - DNA, 72 bp, Homo sapiens
ttgttaaccagaacatgcagccactttatgttctccaaactcttccaaatggagtgacccaaaaaatccaat

SEQ ID NO: 17552 - DNA, 73 bp, Homo sapiens
acatgcagccactttatgttctccaaactcttccaaatggagtgacccaaaaaatccaattgacctcttctgt

SEQ ID NO: 17553 - DNA, 69 bp, Homo sapiens
actttatgttctccaaactcttccaaatggagtgacccaaaaaatccaattgacctcttctgttagttc

SEQ ID NO: 17554 - DNA, 70 bp, Homo sapiens
atgttctccaaactcttccaaatggagtgacccaaaaaatccaattgacctcttctgttagttctacacc

SEQ ID NO: 17555 - DNA, 73 bp, Homo sapiens
ttccaaatggagtgacccaaaaaatccaattgacctcttctgttagttctacacccagtgtgatggagacaaa

SEQ ID NO: 17556 - DNA, 73 bp, Homo sapiens
agtgacccaaaaaatccaattgacctcttctgttagttctacacccagtgtgatggagacaaatacttcagta

SEQ ID NO: 17557 - DNA, 72 bp, Homo sapiens
aaaaatccaattgacctcttctgttagttctacacccagtgtgatggagacaaatacttcagtattgggacc

SEQ ID NO: 17558 - DNA, 74 bp, Homo sapiens
tgttagttctacacccagtgtgatggagacaaatacttcagtattgggacccatgggaggtggtctcaccctta

SEQ ID NO: 17559 - DNA, 74 bp, Homo sapiens
gttctacacccagtgtgatggagacaaatacttcagtattgggacccatgggaggtggtctcacccttaccaca

SEQ ID NO: 17560 - DNA, 74 bp, Homo sapiens
tgtgatggagacaaatacttcagtattgggacccatgggaggtggtctcacccttaccacaggactaaatccaa

SEQ ID NO: 17561 - DNA, 71 bp, Homo sapiens
aaatacttcagtattgggacccatgggaggtggtctcacccttaccacaggactaaatccaagcttgccaa

SEQ ID NO: 17562 - DNA, 74 bp, Homo sapiens
gtggtctcacccttaccacaggactaaatccaagcttgccaacttctcaatctttgttcccttctgctagcaaa

SEQ ID NO: 17563 - DNA, 79 bp, Homo sapiens
aagcttgccaacttctcaatctttgttcccttctgctagcaaaggattgctacccatgtctcatcaccagcacttacat

SEQ ID NO: 17564 - DNA, 77 bp, Homo sapiens
aacttctcaatctttgttcccttctgctagcaaaggattgctacccatgtctcatcaccagcacttacattccttcc

SEQ ID NO: 17565 - DNA, 79 bp, Homo sapiens
aatctttgttcccttctgctagcaaaggattgctacccatgtctcatcaccagcacttacattccttccctgcagctac

SEQ ID NO: 17566 - DNA, 80 bp, Homo sapiens
ttctgctagcaaaggattgctacccatgtctcatcaccagcacttacattccttccctgcagctactcaaagtagtttcc

SEQ ID NO: 17567 - DNA, 76 bp, Homo sapiens
aaaggattgctacccatgtctcatcaccagcacttacattccttccctgcagctactcaaagtagtttcccaccaa

SEQ ID NO: 17568 - DNA, 80 bp, Homo sapiens
attgctacccatgtctcatcaccagcacttacattccttccctgcagctactcaaagtagtttcccaccaaacatcagca

SEQ ID NO: 17569 - DNA, 78 bp, Homo sapiens
atgtctcatcaccagcacttacattccttccctgcagctactcaaagtagtttcccaccaaacatcagcaatcctcct

SEQ ID NO: 17570 - DNA, 76 bp, Homo sapiens
cacttacattccttccctgcagctactcaaagtagtttcccaccaaacatcagcaatcctccttcaggcctgctta

SEQ ID NO: 17571 - DNA, 74 bp, Homo sapiens
attccttccctgcagctactcaaagtagtttcccaccaaacatcagcaatcctccttcaggcctgcttattggg

SEQ ID NO: 17572 - DNA, 74 bp, Homo sapiens
agctactcaaagtagtttcccaccaaacatcagcaatcctccttcaggcctgcttattggggttcagcctcctc

SEQ ID NO: 17573 - DNA, 72 bp, Homo sapiens
caccaaacatcagcaatcctccttcaggcctgcttattggggttcagcctcctccggatccccaacttttgg

SEQ ID NO: 17574 - DNA, 72 bp, Homo sapiens
aacatcagcaatcctccttcaggcctgcttattggggttcagcctcctccggatccccaacttttggtttca

SEQ ID NO: 17575 - DNA, 71 bp, Homo sapiens
atcctccttcaggcctgcttattggggttcagcctcctccggatccccaacttttggtttcagaatccagc

SEQ ID NO: 17576 - DNA, 72 bp, Homo sapiens
aggcctgcttattggggttcagcctcctccggatccccaacttttggtttcagaatccagccagaggacaga

SEQ ID NO: 17577 - DNA, 76 bp, Homo sapiens
cccaacttttggtttcagaatccagccagaggacagacctcagtaccacagtagccactccatcctctggactcaa

SEQ ID NO: 17578 - DNA, 76 bp, Homo sapiens
tcagtaccacagtagccactccatcctctggactcaagaaaagacccatatctcgtctacagacccgaaagaataa

SEQ ID NO: 17579 - DNA, 73 bp, Homo sapiens
ccacagtagccactccatcctctggactcaagaaaagacccatatctcgtctacagacccgaaagaataaaaa

SEQ ID NO: 17580 - DNA, 72 bp, Homo sapiens
catcctctggactcaagaaaagacccatatctcgtctacagacccgaaagaataaaaaacttgctccctcta

SEQ ID NO: 17581 - DNA, 68 bp, Homo sapiens
actcaagaaaagacccatatctcgtctacagacccgaaagaataaaaaacttgctccctctagtaccc

SEQ ID NO: 17582 - DNA, 67 bp, Homo sapiens
aaagacccatatctcgtctacagacccgaaagaataaaaaacttgctccctctagtaccccttcaaa

SEQ ID NO: 17583 - DNA, 68 bp, Homo sapiens
atatctcgtctacagacccgaaagaataaaaaacttgctccctctagtaccccttcaaacattgcccc

SEQ ID NO: 17584 - DNA, 67 bp, Homo sapiens
agacccgaaagaataaaaaacttgctccctctagtaccccttcaaacattgccccttctgatgtggt

SEQ ID NO: 17585 - DNA, 72 bp, Homo sapiens
aaaacttgctccctctagtaccccttcaaacattgccccttctgatgtggtttctaatatgacattgattaa

SEQ ID NO: 17586 - DNA, 75 bp, Homo sapiens
ccccttctgatgtggtttctaatatgacattgattaacttcacaccctcccagcttcctaatcatccaagtctgt

SEQ ID NO: 17587 - DNA, 75 bp, Homo sapiens
atgtggtttctaatatgacattgattaacttcacaccctcccagcttcctaatcatccaagtctgttagatttgg

SEQ ID NO: 17588 - DNA, 75 bp, Homo sapiens
taatatgacattgattaacttcacaccctcccagcttcctaatcatccaagtctgttagatttggggtcacttaa

SEQ ID NO: 17589 - DNA, 73 bp, Homo sapiens
attgattaacttcacaccctcccagcttcctaatcatccaagtctgttagatttggggtcacttaatacttca

SEQ ID NO: 17590 - DNA, 74 bp, Homo sapiens
taatcatccaagtctgttagatttggggtcacttaatacttcatctcaccgaactgtccccaacatcataaaaa

SEQ ID NO: 17591 - DNA, 72 bp, Homo sapiens
aagtctgttagatttggggtcacttaatacttcatctcaccgaactgtccccaacatcataaaaagatctaa

SEQ ID NO: 17592 - DNA, 76 bp, Homo sapiens
ttggggtcacttaatacttcatctcaccgaactgtccccaacatcataaaaagatctaaatctagcatcatgtatt

SEQ ID NO: 17593 - DNA, 75 bp, Homo sapiens
acttaatacttcatctcaccgaactgtccccaacatcataaaaagatctaaatctagcatcatgtattttgaacc

SEQ ID NO: 17594 - DNA, 75 bp, Homo sapiens
acttcatctcaccgaactgtccccaacatcataaaaagatctaaatctagcatcatgtattttgaaccggcaccc

SEQ ID NO: 17595 - DNA, 74 bp, Homo sapiens
aactgtccccaacatcataaaaagatctaaatctagcatcatgtattttgaaccggcacccctgttaccacaga

SEQ ID NO: 17596 - DNA, 75 bp, Homo sapiens
acatcataaaaagatctaaatctagcatcatgtattttgaaccggcacccctgttaccacagagtgtgggaggaa

SEQ ID NO: 17597 - DNA, 74 bp, Homo sapiens
ataaaaagatctaaatctagcatcatgtattttgaaccggcacccctgttaccacagagtgtgggaggaactgc

SEQ ID NO: 17598 - DNA, 78 bp, Homo sapiens
ctaaatctagcatcatgtattttgaaccggcacccctgttaccacagagtgtgggaggaactgctgccacagcggcag

SEQ ID NO: 17599 - DNA, 78 bp, Homo sapiens
atgtattttgaaccggcacccctgttaccacagagtgtgggaggaactgctgccacagcggcaggcacatcaacaata

SEQ ID NO: 17600 - DNA, 78 bp, Homo sapiens
tttgaaccggcacccctgttaccacagagtgtgggaggaactgctgccacagcggcaggcacatcaacaataagccag

SEQ ID NO: 17601 - DNA, 84 bp, Homo sapiens
ctgttaccacagagtgtgggaggaactgctgccacagcggcaggcacatcaacaataagccaggatactagccacctcacatca

SEQ ID NO: 17602 - DNA, 84 bp, Homo sapiens
tgggaggaactgctgccacagcggcaggcacatcaacaataagccaggatactagccacctcacatcagggtctgtgtctggct

SEQ ID NO: 17603 - DNA, 85 bp, Homo sapiens
ctgccacagcggcaggcacatcaacaataagccaggatactagccacctcacatcagggtctgtgtctggcttggcatccagttc

SEQ ID NO: 17604 - DNA, 81 bp, Homo sapiens
atcaacaataagccaggatactagccacctcacatcagggtctgtgtctggcttggcatccagttcctctgtcttgaatgt

SEQ ID NO: 17605 - DNA, 83 bp, Homo sapiens
tactagccacctcacatcagggtctgtgtctggcttggcatccagttcctctgtcttgaatgttgtatccatgcaaactacca

SEQ ID NO: 17606 - DNA, 79 bp, Homo sapiens
tgtgtctggcttggcatccagttcctctgtcttgaatgttgtatccatgcaaactaccacaacccctacaagtagtgcg

SEQ ID NO: 17607 - DNA, 78 bp, Homo sapiens
ttggcatccagttcctctgtcttgaatgttgtatccatgcaaactaccacaacccctacaagtagtgcgtcagttcca

SEQ ID NO: 17608 - DNA, 77 bp, Homo sapiens
ttcctctgtcttgaatgttgtatccatgcaaactaccacaacccctacaagtagtgcgtcagttccaggacacgtca

SEQ ID NO: 17609 - DNA, 74 bp, Homo sapiens
ttgaatgttgtatccatgcaaactaccacaacccctacaagtagtgcgtcagttccaggacacgtcaccttaac

SEQ ID NO: 17610 - DNA, 73 bp, Homo sapiens
tgttgtatccatgcaaactaccacaacccctacaagtagtgcgtcagttccaggacacgtcaccttaaccaac

SEQ ID NO: 17611 - DNA, 66 bp, Homo sapiens
aaactaccacaacccctacaagtagtgcgtcagttccaggacacgtcaccttaaccaacccaaggt

SEQ ID NO: 17612 - DNA, 68 bp, Homo sapiens
acaacccctacaagtagtgcgtcagttccaggacacgtcaccttaaccaacccaaggttgcttggtac

SEQ ID NO: 17613 - DNA, 71 bp, Homo sapiens
tacaagtagtgcgtcagttccaggacacgtcaccttaaccaacccaaggttgcttggtaccccagatattg

SEQ ID NO: 17614 - DNA, 71 bp, Homo sapiens
agttccaggacacgtcaccttaaccaacccaaggttgcttggtaccccagatattggctcaataagcaatc

SEQ ID NO: 17615 - DNA, 70 bp, Homo sapiens
accttaaccaacccaaggttgcttggtaccccagatattggctcaataagcaatcttttaatcaaagcta

SEQ ID NO: 17616 - DNA, 75 bp, Homo sapiens
aacccaaggttgcttggtaccccagatattggctcaataagcaatcttttaatcaaagctagccagcagagcctg

SEQ ID NO: 17617 - DNA, 77 bp, Homo sapiens
cttggtaccccagatattggctcaataagcaatcttttaatcaaagctagccagcagagcctggggattcaggacca

SEQ ID NO: 17618 - DNA, 79 bp, Homo sapiens
agatattggctcaataagcaatcttttaatcaaagctagccagcagagcctggggattcaggaccagcctgtggcttta

SEQ ID NO: 17619 - DNA, 75 bp, Homo sapiens
aataagcaatcttttaatcaaagctagccagcagagcctggggattcaggaccagcctgtggctttaccgccaag

SEQ ID NO: 17620 - DNA, 76 bp, Homo sapiens
aatcaaagctagccagcagagcctggggattcaggaccagcctgtggctttaccgccaagttcaggaatgtttcca

SEQ ID NO: 17621 - DNA, 74 bp, Homo sapiens
agccagcagagcctggggattcaggaccagcctgtggctttaccgccaagttcaggaatgtttccacaactggg

SEQ ID NO: 17622 - DNA, 73 bp, Homo sapiens
gggattcaggaccagcctgtggctttaccgccaagttcaggaatgtttccacaactggggacatcacagaccc

SEQ ID NO: 17623 - DNA, 72 bp, Homo sapiens
aggaccagcctgtggctttaccgccaagttcaggaatgtttccacaactggggacatcacagaccccctcta

SEQ ID NO: 17624 - DNA, 76 bp, Homo sapiens
tgtggctttaccgccaagttcaggaatgtttccacaactggggacatcacagaccccctctactgctgcaataaca

SEQ ID NO: 17625 - DNA, 80 bp, Homo sapiens
ccaagttcaggaatgtttccacaactggggacatcacagaccccctctactgctgcaataacagcggcatctagcatctg

SEQ ID NO: 17626 - DNA, 83 bp, Homo sapiens
tttccacaactggggacatcacagaccccctctactgctgcaataacagcggcatctagcatctgtgtgctcccctccactca

SEQ ID NO: 17627 - DNA, 82 bp, Homo sapiens
acagaccccctctactgctgcaataacagcggcatctagcatctgtgtgctcccctccactcagactacgggcataacagcc

SEQ ID NO: 17628 - DNA, 85 bp, Homo sapiens
tctactgctgcaataacagcggcatctagcatctgtgtgctcccctccactcagactacgggcataacagccgcttcaccttctg

SEQ ID NO: 17629 - DNA, 79 bp, Homo sapiens
aataacagcggcatctagcatctgtgtgctcccctccactcagactacgggcataacagccgcttcaccttctggggaa

SEQ ID NO: 17630 - DNA, 80 bp, Homo sapiens
tctagcatctgtgtgctcccctccactcagactacgggcataacagccgcttcaccttctggggaagcagacgaacacta

SEQ ID NO: 17631 - DNA, 80 bp, Homo sapiens
tgtgtgctcccctccactcagactacgggcataacagccgcttcaccttctggggaagcagacgaacactatcagcttca

SEQ ID NO: 17632 - DNA, 81 bp, Homo sapiens
ctccactcagactacgggcataacagccgcttcaccttctggggaagcagacgaacactatcagcttcagcatgtgaacca

SEQ ID NO: 17633 - DNA, 80 bp, Homo sapiens
ataacagccgcttcaccttctggggaagcagacgaacactatcagcttcagcatgtgaaccagctccttgccagcaaaac

SEQ ID NO: 17634 - DNA, 81 bp, Homo sapiens
ttcaccttctggggaagcagacgaacactatcagcttcagcatgtgaaccagctccttgccagcaaaactgggattcattc

SEQ ID NO: 17635 - DNA, 82 bp, Homo sapiens
agacgaacactatcagcttcagcatgtgaaccagctccttgccagcaaaactgggattcattcttcccagcgtgatcttgat

SEQ ID NO: 17636 - DNA, 84 bp, Homo sapiens
actatcagcttcagcatgtgaaccagctccttgccagcaaaactgggattcattcttcccagcgtgatcttgattctgcttcag

SEQ ID NO: 17637 - DNA, 80 bp, Homo sapiens
agcatgtgaaccagctccttgccagcaaaactgggattcattcttcccagcgtgatcttgattctgcttcagggccccag

SEQ ID NO: 17638 - DNA, 77 bp, Homo sapiens
gctccttgccagcaaaactgggattcattcttcccagcgtgatcttgattctgcttcagggccccaggtatccaact

SEQ ID NO: 17639 - DNA, 74 bp, Homo sapiens
agcaaaactgggattcattcttcccagcgtgatcttgattctgcttcagggccccaggtatccaactttaccca

SEQ ID NO: 17640 - DNA, 75 bp, Homo sapiens
tgggattcattcttcccagcgtgatcttgattctgcttcagggccccaggtatccaactttacccagacggtaga

SEQ ID NO: 17641 - DNA, 74 bp, Homo sapiens
ttcccagcgtgatcttgattctgcttcagggccccaggtatccaactttacccagacggtagacgctcctaata

SEQ ID NO: 17642 - DNA, 76 bp, Homo sapiens
tgatcttgattctgcttcagggccccaggtatccaactttacccagacggtagacgctcctaatagcatgggactg

SEQ ID NO: 17643 - DNA, 75 bp, Homo sapiens
attctgcttcagggccccaggtatccaactttacccagacggtagacgctcctaatagcatgggactggagcaga

SEQ ID NO: 17644 - DNA, 74 bp, Homo sapiens
aggtatccaactttacccagacggtagacgctcctaatagcatgggactggagcagaacaaggctttatcctca

SEQ ID NO: 17645 - DNA, 79 bp, Homo sapiens
ctttacccagacggtagacgctcctaatagcatgggactggagcagaacaaggctttatcctcagctgtgcaagccagc

SEQ ID NO: 17646 - DNA, 79 bp, Homo sapiens
acggtagacgctcctaatagcatgggactggagcagaacaaggctttatcctcagctgtgcaagccagccccacctctc

SEQ ID NO: 17647 - DNA, 79 bp, Homo sapiens
taatagcatgggactggagcagaacaaggctttatcctcagctgtgcaagccagccccacctctcctgggggttctcca

SEQ ID NO: 17648 - DNA, 77 bp, Homo sapiens
atgggactggagcagaacaaggctttatcctcagctgtgcaagccagccccacctctcctgggggttctccatcctc

SEQ ID NO: 17649 - DNA, 77 bp, Homo sapiens
agaacaaggctttatcctcagctgtgcaagccagccccacctctcctgggggttctccatcctctccatcttctgga

SEQ ID NO: 17650 - DNA, 79 bp, Homo sapiens
agctgtgcaagccagccccacctctcctgggggttctccatcctctccatcttctggacagcggtcagcaagcccttca

SEQ ID NO: 17651 - DNA, 76 bp, Homo sapiens
aagccagccccacctctcctgggggttctccatcctctccatcttctggacagcggtcagcaagcccttcagtgcc

SEQ ID NO: 17652 - DNA, 75 bp, Homo sapiens
tctcctgggggttctccatcctctccatcttctggacagcggtcagcaagcccttcagtgccgggtcccactaaa

SEQ ID NO: 17653 - DNA, 71 bp, Homo sapiens
atcctctccatcttctggacagcggtcagcaagcccttcagtgccgggtcccactaaacccaaaccaaaaa

SEQ ID NO: 17654 - DNA, 68 bp, Homo sapiens
atcttctggacagcggtcagcaagcccttcagtgccgggtcccactaaacccaaaccaaaaaccaaac

SEQ ID NO: 17655 - DNA, 66 bp, Homo sapiens
acagcggtcagcaagcccttcagtgccgggtcccactaaacccaaaccaaaaaccaaacggtttca

SEQ ID NO: 17656 - DNA, 66 bp, Homo sapiens
cccttcagtgccgggtcccactaaacccaaaccaaaaaccaaacggtttcagctgcctctagacaa

SEQ ID NO: 17657 - DNA, 64 bp, Homo sapiens
ccgggtcccactaaacccaaaccaaaaaccaaacggtttcagctgcctctagacaaagggaatg

SEQ ID NO: 17658 - DNA, 68 bp, Homo sapiens
actaaacccaaaccaaaaaccaaacggtttcagctgcctctagacaaagggaatggcaagaagcacaa

SEQ ID NO: 17659 - DNA, 68 bp, Homo sapiens
accaaaaaccaaacggtttcagctgcctctagacaaagggaatggcaagaagcacaaagtttcccatt

SEQ ID NO: 17660 - DNA, 70 bp, Homo sapiens
aaaccaaacggtttcagctgcctctagacaaagggaatggcaagaagcacaaagtttcccatttgcggac

SEQ ID NO: 17661 - DNA, 76 bp, Homo sapiens
gtttcagctgcctctagacaaagggaatggcaagaagcacaaagtttcccatttgcggaccagttcttctgaagca

SEQ ID NO: 17662 - DNA, 76 bp, Homo sapiens
tagacaaagggaatggcaagaagcacaaagtttcccatttgcggaccagttcttctgaagcacacattccagacca

SEQ ID NO: 17663 - DNA, 75 bp, Homo sapiens
agaagcacaaagtttcccatttgcggaccagttcttctgaagcacacattccagaccaagaaacgacatccctga

SEQ ID NO: 17664 - DNA, 78 bp, Homo sapiens
atttgcggaccagttcttctgaagcacacattccagaccaagaaacgacatccctgacctcaggcacagggtgagaga

SEQ ID NO: 17665 - DNA, 78 bp, Homo sapiens
agttcttctgaagcacacattccagaccaagaaacgacatccctgacctcaggcacagggtgagagatccaaatacta

SEQ ID NO: 17666 - DNA, 78 bp, Homo sapiens
aagcacacattccagaccaagaaacgacatccctgacctcaggcacagggtgagagatccaaatactagctaggctgg

SEQ ID NO: 17667 - DNA, 76 bp, Homo sapiens
acattcagtacatatttactggtggtttgtcttgaaaagatacaaatgcctgtgttccaggactccaggagcagag

SEQ ID NO: 17668 - DNA, 80 bp, Homo sapiens
tatttactggtggtttgtcttgaaaagatacaaatgcctgtgttccaggactccaggagcagaggctgagcagcaggata

SEQ ID NO: 17669 - DNA, 83 bp, Homo sapiens
tggtttgtcttgaaaagatacaaatgcctgtgttccaggactccaggagcagaggctgagcagcaggatacagctagcgtgga

SEQ ID NO: 17670 - DNA, 85 bp, Homo sapiens
tcttgaaaagatacaaatgcctgtgttccaggactccaggagcagaggctgagcagcaggatacagctagcgtggagcagtcctc

SEQ ID NO: 17671 - DNA, 84 bp, Homo sapiens
atacaaatgcctgtgttccaggactccaggagcagaggctgagcagcaggatacagctagcgtggagcagtcctcccagaagga

SEQ ID NO: 17672 - DNA, 84 bp, Homo sapiens
tgtgttccaggactccaggagcagaggctgagcagcaggatacagctagcgtggagcagtcctcccagaaggagtgtgggcaac

SEQ ID NO: 17673 - DNA, 83 bp, Homo sapiens
ctccaggagcagaggctgagcagcaggatacagctagcgtggagcagtcctcccagaaggagtgtgggcaacctgcagggtaa

SEQ ID NO: 17674 - DNA, 81 bp, Homo sapiens
aggctgagcagcaggatacagctagcgtggagcagtcctcccagaaggagtgtgggcaacctgcagggtaagctgaagaat

SEQ ID NO: 17675 - DNA, 78 bp, Homo sapiens
gcaggatacagctagcgtggagcagtcctcccagaaggagtgtgggcaacctgcagggtaagctgaagaattcgtctt

SEQ ID NO: 17676 - DNA, 76 bp, Homo sapiens
atacagctagcgtggagcagtcctcccagaaggagtgtgggcaacctgcagggtaagctgaagaattcgtctttta

SEQ ID NO: 17677 - DNA, 75 bp, Homo sapiens
agcagtcctcccagaaggagtgtgggcaacctgcagggtaagctgaagaattcgtcttttaagactaagctctca

SEQ ID NO: 17678 - DNA, 72 bp, Homo sapiens
ctcccagaaggagtgtgggcaacctgcagggtaagctgaagaattcgtcttttaagactaagctctcagttt

SEQ ID NO: 17679 - DNA, 69 bp, Homo sapiens
ctgggttttttctttgaattgaagaactagctgatattatatcttacatttggtttttatttaggcaag

SEQ ID NO: 17680 - DNA, 73 bp, Homo sapiens
tctttgaattgaagaactagctgatattatatcttacatttggtttttatttaggcaagtcgctgttcttccg

SEQ ID NO: 17681 - DNA, 73 bp, Homo sapiens
tgaagaactagctgatattatatcttacatttggtttttatttaggcaagtcgctgttcttccggaagttcag

SEQ ID NO: 17682 - DNA, 72 bp, Homo sapiens
actagctgatattatatcttacatttggtttttatttaggcaagtcgctgttcttccggaagttcaggtgac

SEQ ID NO: 17683 - DNA, 68 bp, Homo sapiens
attatatcttacatttggtttttatttaggcaagtcgctgttcttccggaagttcaggtgacccaaaa

SEQ ID NO: 17684 - DNA, 70 bp, Homo sapiens
ttggtttttatttaggcaagtcgctgttcttccggaagttcaggtgacccaaaatccagcaaatgaacaa

SEQ ID NO: 17685 - DNA, 73 bp, Homo sapiens
tttatttaggcaagtcgctgttcttccggaagttcaggtgacccaaaatccagcaaatgaacaagaaagtgca

SEQ ID NO: 17686 - DNA, 72 bp, Homo sapiens
aagtcgctgttcttccggaagttcaggtgacccaaaatccagcaaatgaacaagaaagtgcaggtatgtggg

SEQ ID NO: 17687 - DNA, 71 bp, Homo sapiens
ttcttccggaagttcaggtgacccaaaatccagcaaatgaacaagaaagtgcaggtatgtgggtgggtaaa

SEQ ID NO: 17688 - DNA, 70 bp, Homo sapiens
agttcaggtgacccaaaatccagcaaatgaacaagaaagtgcaggtatgtgggtgggtaaaaggttagaa

SEQ ID NO: 17689 - DNA, 75 bp, Homo sapiens
aaatccagcaaatgaacaagaaagtgcaggtatgtgggtgggtaaaaggttagaatcagagaatatcaatgctaa

SEQ ID NO: 17690 - DNA, 73 bp, Homo sapiens
aatgaacaagaaagtgcaggtatgtgggtgggtaaaaggttagaatcagagaatatcaatgctaaaaggatta

SEQ ID NO: 17691 - DNA, 72 bp, Homo sapiens
agtgagcatttgttactgcaaccactatctattttctccctattagaacctaaaacagtggaagaagaggaa

SEQ ID NO: 17692 - DNA, 70 bp, Homo sapiens
catttgttactgcaaccactatctattttctccctattagaacctaaaacagtggaagaagaggaaagta

SEQ ID NO: 17693 - DNA, 68 bp, Homo sapiens
aaccactatctattttctccctattagaacctaaaacagtggaagaagaggaaagtaatttcagctcc

SEQ ID NO: 17694 - DNA, 70 bp, Homo sapiens
tattttctccctattagaacctaaaacagtggaagaagaggaaagtaatttcagctccccactgatgctt

SEQ ID NO: 17695 - DNA, 74 bp, Homo sapiens
tattagaacctaaaacagtggaagaagaggaaagtaatttcagctccccactgatgctttggcttcagcaagaa

SEQ ID NO: 17696 - DNA, 72 bp, Homo sapiens
aacctaaaacagtggaagaagaggaaagtaatttcagctccccactgatgctttggcttcagcaagaacaaa

SEQ ID NO: 17697 - DNA, 74 bp, Homo sapiens
gaagaagaggaaagtaatttcagctccccactgatgctttggcttcagcaagaacaaaagcggaaggaaagcat

SEQ ID NO: 17698 - DNA, 74 bp, Homo sapiens
aaagtaatttcagctccccactgatgctttggcttcagcaagaacaaaagcggaaggaaagcattactgagaaa

SEQ ID NO: 17699 - DNA, 73 bp, Homo sapiens
aatttcagctccccactgatgctttggcttcagcaagaacaaaagcggaaggaaagcattactgagaaaaaac

SEQ ID NO: 17700 - DNA, 71 bp, Homo sapiens
ctgatgctttggcttcagcaagaacaaaagcggaaggaaagcattactgagaaaaaacccaagaaaggact

SEQ ID NO: 17701 - DNA, 68 bp, Homo sapiens
tggcttcagcaagaacaaaagcggaaggaaagcattactgagaaaaaacccaagaaaggacttgtttt

SEQ ID NO: 17702 - DNA, 67 bp, Homo sapiens
cagcaagaacaaaagcggaaggaaagcattactgagaaaaaacccaagaaaggacttgtttttgaaa

SEQ ID NO: 17703 - DNA, 68 bp, Homo sapiens
aagcggaaggaaagcattactgagaaaaaacccaagaaaggacttgtttttgaaatttccagtgatga

SEQ ID NO: 17704 - DNA, 71 bp, Homo sapiens
aaagcattactgagaaaaaacccaagaaaggacttgtttttgaaatttccagtgatgatggctttcagatc

SEQ ID NO: 17705 - DNA, 72 bp, Homo sapiens
gaaaaaacccaagaaaggacttgtttttgaaatttccagtgatgatggctttcagatctgtgcagaaagtat

SEQ ID NO: 17706 - DNA, 73 bp, Homo sapiens
aacccaagaaaggacttgtttttgaaatttccagtgatgatggctttcagatctgtgcagaaagtattgaagg

SEQ ID NO: 17707 - DNA, 77 bp, Homo sapiens
ttgtttttgaaatttccagtgatgatggctttcagatctgtgcagaaagtattgaaggtgagtggattaaatcaggt

SEQ ID NO: 17708 - DNA, 79 bp, Homo sapiens
tttgaaatttccagtgatgatggctttcagatctgtgcagaaagtattgaaggtgagtggattaaatcaggttgaccca

SEQ ID NO: 17709 - DNA, 68 bp, Homo sapiens
ttggtattaagaagggtttacgtgcatattttctggcttacgggttttctttatttcctttcagatgc

SEQ ID NO: 17710 - DNA, 73 bp, Homo sapiens
gtttacgtgcatattttctggcttacgggttttctttatttcctttcagatgcctggaagtcattgacagata

SEQ ID NO: 17711 - DNA, 71 bp, Homo sapiens
atattttctggcttacgggttttctttatttcctttcagatgcctggaagtcattgacagataaagtccag

SEQ ID NO: 17712 - DNA, 74 bp, Homo sapiens
gcttacgggttttctttatttcctttcagatgcctggaagtcattgacagataaagtccaggaagctcgatcaa

SEQ ID NO: 17713 - DNA, 76 bp, Homo sapiens
tttctttatttcctttcagatgcctggaagtcattgacagataaagtccaggaagctcgatcaaatgcccgcctaa

SEQ ID NO: 17714 - DNA, 80 bp, Homo sapiens
ttcctttcagatgcctggaagtcattgacagataaagtccaggaagctcgatcaaatgcccgcctaaagcagctctcatt

SEQ ID NO: 17715 - DNA, 81 bp, Homo sapiens
atgcctggaagtcattgacagataaagtccaggaagctcgatcaaatgcccgcctaaagcagctctcatttgcaggtaatg

SEQ ID NO: 17716 - DNA, 80 bp, Homo sapiens
aagtcattgacagataaagtccaggaagctcgatcaaatgcccgcctaaagcagctctcatttgcaggtaatggctggag

SEQ ID NO: 17717 - DNA, 78 bp, Homo sapiens
ataaagtccaggaagctcgatcaaatgcccgcctaaagcagctctcatttgcaggtaatggctggaggtgttattcca

SEQ ID NO: 17718 - DNA, 80 bp, Homo sapiens
aggaagctcgatcaaatgcccgcctaaagcagctctcatttgcaggtaatggctggaggtgttattccactcctgtctca

SEQ ID NO: 17719 - DNA, 80 bp, Homo sapiens
atcaaatgcccgcctaaagcagctctcatttgcaggtaatggctggaggtgttattccactcctgtctcagaatattatg

SEQ ID NO: 17720 - DNA, 78 bp, Homo sapiens
cgctcctcacttccctggtgcttctgattcttctaggtgttaacggtttgaggatgctggggattctccatgatgcag

SEQ ID NO: 17721 - DNA, 76 bp, Homo sapiens
acttccctggtgcttctgattcttctaggtgttaacggtttgaggatgctggggattctccatgatgcagttgtgt

SEQ ID NO: 17722 - DNA, 81 bp, Homo sapiens
cttctgattcttctaggtgttaacggtttgaggatgctggggattctccatgatgcagttgtgttcctcattgagcagctg

SEQ ID NO: 17723 - DNA, 80 bp, Homo sapiens
attcttctaggtgttaacggtttgaggatgctggggattctccatgatgcagttgtgttcctcattgagcagctgtctgg

SEQ ID NO: 17724 - DNA, 84 bp, Homo sapiens
ttaacggtttgaggatgctggggattctccatgatgcagttgtgttcctcattgagcagctgtctggtgccaagcactgtcgaa

SEQ ID NO: 17725 - DNA, 84 bp, Homo sapiens
aggatgctggggattctccatgatgcagttgtgttcctcattgagcagctgtctggtgccaagcactgtcgaaattacaaattc

SEQ ID NO: 17726 - DNA, 82 bp, Homo sapiens
ggattctccatgatgcagttgtgttcctcattgagcagctgtctggtgccaagcactgtcgaaattacaaattccgtttcca

SEQ ID NO: 17727 - DNA, 82 bp, Homo sapiens
atgatgcagttgtgttcctcattgagcagctgtctggtgccaagcactgtcgaaattacaaattccgtttccacaagccaga

SEQ ID NO: 17728 - DNA, 78 bp, Homo sapiens
agttgtgttcctcattgagcagctgtctggtgccaagcactgtcgaaattacaaattccgtttccacaagccagagga

SEQ ID NO: 17729 - DNA, 77 bp, Homo sapiens
attgagcagctgtctggtgccaagcactgtcgaaattacaaattccgtttccacaagccagaggaggccaatgaacc

SEQ ID NO: 17730 - DNA, 73 bp, Homo sapiens
agctgtctggtgccaagcactgtcgaaattacaaattccgtttccacaagccagaggaggccaatgaaccccc

SEQ ID NO: 17731 - DNA, 68 bp, Homo sapiens
aagcactgtcgaaattacaaattccgtttccacaagccagaggaggccaatgaaccccccttgaaccc

SEQ ID NO: 17732 - DNA, 68 bp, Homo sapiens
ctgtcgaaattacaaattccgtttccacaagccagaggaggccaatgaaccccccttgaaccctcacg

SEQ ID NO: 17733 - DNA, 71 bp, Homo sapiens
tacaaattccgtttccacaagccagaggaggccaatgaaccccccttgaaccctcacggctcagccagggc

SEQ ID NO: 17734 - DNA, 74 bp, Homo sapiens
tttccacaagccagaggaggccaatgaaccccccttgaaccctcacggctcagccagggctgaagtccacctca

SEQ ID NO: 17735 - DNA, 72 bp, Homo sapiens
agaggaggccaatgaaccccccttgaaccctcacggctcagccagggctgaagtccacctcaggcaagttcc

SEQ ID NO: 17736 - DNA, 69 bp, Homo sapiens
aatgaaccccccttgaaccctcacggctcagccagggctgaagtccacctcaggcaagttcccttcttt

SEQ ID NO: 17737 - DNA, 74 bp, Homo sapiens
cttgaaccctcacggctcagccagggctgaagtccacctcaggcaagttcccttcttttctgtcagcagttttg

SEQ ID NO: 17738 - DNA, 73 bp, Homo sapiens
ctgctttattaaagcatttctctaaatatgttttaatcttttggccccaggaagtcagcatttgacatgttta

SEQ ID NO: 17739 - DNA, 71 bp, Homo sapiens
aaagcatttctctaaatatgttttaatcttttggccccaggaagtcagcatttgacatgtttaacttcctg

SEQ ID NO: 17740 - DNA, 71 bp, Homo sapiens
aaatatgttttaatcttttggccccaggaagtcagcatttgacatgtttaacttcctggcttctaaacatc

SEQ ID NO: 17741 - DNA, 73 bp, Homo sapiens
ttttaatcttttggccccaggaagtcagcatttgacatgtttaacttcctggcttctaaacatcgtcagcctc

SEQ ID NO: 17742 - DNA, 76 bp, Homo sapiens
agcctcctgaatacaaccccaatgatgaagaagaggaggaggtacagctgaagtcagctcggtaagtcttgagtgg

SEQ ID NO: 17743 - DNA, 78 bp, Homo sapiens
tacaaccccaatgatgaagaagaggaggaggtacagctgaagtcagctcggtaagtcttgagtggggagcagtcatta

SEQ ID NO: 17744 - DNA, 78 bp, Homo sapiens
atgatgaagaagaggaggaggtacagctgaagtcagctcggtaagtcttgagtggggagcagtcattagaaactgctt

SEQ ID NO: 17745 - DNA, 72 bp, Homo sapiens
ctcaaaacattatttcctgaaaaaaattcgttaatagtatgtcttatctcttaggagggcaactagcatgga

SEQ ID NO: 17746 - DNA, 74 bp, Homo sapiens
acattatttcctgaaaaaaattcgttaatagtatgtcttatctcttaggagggcaactagcatggatctgccaa

SEQ ID NO: 17747 - DNA, 76 bp, Homo sapiens
aaaaaattcgttaatagtatgtcttatctcttaggagggcaactagcatggatctgccaatgcccatgcgcttccg

SEQ ID NO: 17748 - DNA, 78 bp, Homo sapiens
gttaatagtatgtcttatctcttaggagggcaactagcatggatctgccaatgcccatgcgcttccggcacttaaaaa

SEQ ID NO: 17749 - DNA, 77 bp, Homo sapiens
agtatgtcttatctcttaggagggcaactagcatggatctgccaatgcccatgcgcttccggcacttaaaaaagact

SEQ ID NO: 17750 - DNA, 76 bp, Homo sapiens
atctcttaggagggcaactagcatggatctgccaatgcccatgcgcttccggcacttaaaaaagacttctaaggag

SEQ ID NO: 17751 - DNA, 77 bp, Homo sapiens
aactagcatggatctgccaatgcccatgcgcttccggcacttaaaaaagacttctaaggaggcagttggtgtctaca

SEQ ID NO: 17752 - DNA, 77 bp, Homo sapiens
gatctgccaatgcccatgcgcttccggcacttaaaaaagacttctaaggaggcagttggtgtctacaggtatgacta

SEQ ID NO: 17753 - DNA, 72 bp, Homo sapiens
aatgcccatgcgcttccggcacttaaaaaagacttctaaggaggcagttggtgtctacaggtatgactaaaa

SEQ ID NO: 17754 - DNA, 69 bp, Homo sapiens
cttccggcacttaaaaaagacttctaaggaggcagttggtgtctacaggtatgactaaaattctagaaa

SEQ ID NO: 17755 - DNA, 70 bp, Homo sapiens
ggcacttaaaaaagacttctaaggaggcagttggtgtctacaggtatgactaaaattctagaaagaatta

SEQ ID NO: 17756 - DNA, 70 bp, Homo sapiens
aaagacttctaaggaggcagttggtgtctacaggtatgactaaaattctagaaagaattacagaaaacga

SEQ ID NO: 17757 - DNA, 71 bp, Homo sapiens
taaccttacttgcaaaatttgtgtctgacctcttttccatctttgtcctaggtctcccatccatggccggg

SEQ ID NO: 17758 - DNA, 70 bp, Homo sapiens
aaatttgtgtctgacctcttttccatctttgtcctaggtctcccatccatggccggggtcttttctgtaa

SEQ ID NO: 17759 - DNA, 73 bp, Homo sapiens
tctgacctcttttccatctttgtcctaggtctcccatccatggccggggtcttttctgtaagagaaacattga

SEQ ID NO: 17760 - DNA, 75 bp, Homo sapiens
ttttccatctttgtcctaggtctcccatccatggccggggtcttttctgtaagagaaacattgatgcaggtgaga

SEQ ID NO: 17761 - DNA, 78 bp, Homo sapiens
ttgtcctaggtctcccatccatggccggggtcttttctgtaagagaaacattgatgcaggtgagatggtgattgagta

SEQ ID NO: 17762 - DNA, 80 bp, Homo sapiens
tcccatccatggccggggtcttttctgtaagagaaacattgatgcaggtgagatggtgattgagtatgccggcaacgtca

SEQ ID NO: 17763 - DNA, 79 bp, Homo sapiens
atggccggggtcttttctgtaagagaaacattgatgcaggtgagatggtgattgagtatgccggcaacgtcatccgctc

SEQ ID NO: 17764 - DNA, 83 bp, Homo sapiens
cttttctgtaagagaaacattgatgcaggtgagatggtgattgagtatgccggcaacgtcatccgctccatccagactgacaa

SEQ ID NO: 17765 - DNA, 81 bp, Homo sapiens
agaaacattgatgcaggtgagatggtgattgagtatgccggcaacgtcatccgctccatccagactgacaagcgggaaaag

SEQ ID NO: 17766 - DNA, 81 bp, Homo sapiens
attgatgcaggtgagatggtgattgagtatgccggcaacgtcatccgctccatccagactgacaagcgggaaaagtattac

SEQ ID NO: 17767 - DNA, 79 bp, Homo sapiens
gatggtgattgagtatgccggcaacgtcatccgctccatccagactgacaagcgggaaaagtattacgacagcaaggta

SEQ ID NO: 17768 - DNA, 76 bp, Homo sapiens
attgagtatgccggcaacgtcatccgctccatccagactgacaagcgggaaaagtattacgacagcaaggtaagtc

SEQ ID NO: 17769 - DNA, 73 bp, Homo sapiens
ccggcaacgtcatccgctccatccagactgacaagcgggaaaagtattacgacagcaaggtaagtctcccact

SEQ ID NO: 17770 - DNA, 76 bp, Homo sapiens
atccgctccatccagactgacaagcgggaaaagtattacgacagcaaggtaagtctcccacttgcactcacacagt

SEQ ID NO: 17771 - DNA, 79 bp, Homo sapiens
agtttataagaaatgacaagttcttctcccttcttctgcatgtgcagggcattggttgctatatgttccgaattgatga

SEQ ID NO: 17772 - DNA, 81 bp, Homo sapiens
agaaatgacaagttcttctcccttcttctgcatgtgcagggcattggttgctatatgttccgaattgatgactcagaggta

SEQ ID NO: 17773 - DNA, 82 bp, Homo sapiens
aagttcttctcccttcttctgcatgtgcagggcattggttgctatatgttccgaattgatgactcagaggtagtggatgcca

SEQ ID NO: 17774 - DNA, 86 bp, Homo sapiens
tcccttcttctgcatgtgcagggcattggttgctatatgttccgaattgatgactcagaggtagtggatgccaccatgcatggaaa

SEQ ID NO: 17775 - DNA, 90 bp, Homo sapiens
tgtgcagggcattggttgctatatgttccgaattgatgactcagaggtagtggatgccaccatgcatggaaatgctgcacgcttcatcaa

SEQ ID NO: 17776 - DNA, 87 bp, Homo sapiens
attggttgctatatgttccgaattgatgactcagaggtagtggatgccaccatgcatggaaatgctgcacgcttcatcaatcactcg

SEQ ID NO: 17777 - DNA, 89 bp, Homo sapiens
tatatgttccgaattgatgactcagaggtagtggatgccaccatgcatggaaatgctgcacgcttcatcaatcactcgtgtgagcctaa

SEQ ID NO: 17778 - DNA, 89 bp, Homo sapiens
aattgatgactcagaggtagtggatgccaccatgcatggaaatgctgcacgcttcatcaatcactcgtgtgagcctaactgctattctc

SEQ ID NO: 17779 - DNA, 89 bp, Homo sapiens
tcagaggtagtggatgccaccatgcatggaaatgctgcacgcttcatcaatcactcgtgtgagcctaactgctattctcgggtcatcaa

SEQ ID NO: 17780 - DNA, 90 bp, Homo sapiens
tagtggatgccaccatgcatggaaatgctgcacgcttcatcaatcactcgtgtgagcctaactgctattctcgggtcatcaatattgatg

SEQ ID NO: 17781 - DNA, 89 bp, Homo sapiens
atgcatggaaatgctgcacgcttcatcaatcactcgtgtgagcctaactgctattctcgggtcatcaatattgatgggcagaagcacat

SEQ ID NO: 17782 - DNA, 88 bp, Homo sapiens
aaatgctgcacgcttcatcaatcactcgtgtgagcctaactgctattctcgggtcatcaatattgatgggcagaagcacattgtcatc

SEQ ID NO: 17783 - DNA, 86 bp, Homo sapiens
acgcttcatcaatcactcgtgtgagcctaactgctattctcgggtcatcaatattgatgggcagaagcacattgtcatctttgcca

SEQ ID NO: 17784 - DNA, 85 bp, Homo sapiens
aatcactcgtgtgagcctaactgctattctcgggtcatcaatattgatgggcagaagcacattgtcatctttgccatgcgtaaga

SEQ ID NO: 17785 - DNA, 83 bp, Homo sapiens
agcctaactgctattctcgggtcatcaatattgatgggcagaagcacattgtcatctttgccatgcgtaagatctaccgagga

SEQ ID NO: 17786 - DNA, 83 bp, Homo sapiens
actgctattctcgggtcatcaatattgatgggcagaagcacattgtcatctttgccatgcgtaagatctaccgaggagaggaa

SEQ ID NO: 17787 - DNA, 83 bp, Homo sapiens
gtcatcaatattgatgggcagaagcacattgtcatctttgccatgcgtaagatctaccgaggagaggaactcacttacgacta

SEQ ID NO: 17788 - DNA, 80 bp, Homo sapiens
aatattgatgggcagaagcacattgtcatctttgccatgcgtaagatctaccgaggagaggaactcacttacgactataa

SEQ ID NO: 17789 - DNA, 77 bp, Homo sapiens
gggcagaagcacattgtcatctttgccatgcgtaagatctaccgaggagaggaactcacttacgactataagttccc

SEQ ID NO: 17790 - DNA, 76 bp, Homo sapiens
acattgtcatctttgccatgcgtaagatctaccgaggagaggaactcacttacgactataagttccccattgagga

SEQ ID NO: 17791 - DNA, 77 bp, Homo sapiens
tttgccatgcgtaagatctaccgaggagaggaactcacttacgactataagttccccattgaggatgccagcaacaa

SEQ ID NO: 17792 - DNA, 78 bp, Homo sapiens
taagatctaccgaggagaggaactcacttacgactataagttccccattgaggatgccagcaacaagctgccctgcaa

SEQ ID NO: 17793 - DNA, 77 bp, Homo sapiens
accgaggagaggaactcacttacgactataagttccccattgaggatgccagcaacaagctgccctgcaactgtggc

SEQ ID NO: 17794 - DNA, 78 bp, Homo sapiens
aactcacttacgactataagttccccattgaggatgccagcaacaagctgccctgcaactgtggcgccaagaaatgcc

SEQ ID NO: 17795 - DNA, 75 bp, Homo sapiens
agcaacaagctgccctgcaactgtggcgccaagaaatgccggaagttcctaaactaaagctgctcttctccccca

SEQ ID NO: 17796 - DNA, 75 bp, Homo sapiens
tgcaactgtggcgccaagaaatgccggaagttcctaaactaaagctgctcttctcccccagtgttggagtgcaag

SEQ ID NO: 17797 - DNA, 73 bp, Homo sapiens
ctgtggcgccaagaaatgccggaagttcctaaactaaagctgctcttctcccccagtgttggagtgcaaggag

SEQ ID NO: 17798 - DNA, 71 bp, Homo sapiens
aagttcctaaactaaagctgctcttctcccccagtgttggagtgcaaggaggcggggccatccaaagcaac

SEQ ID NO: 17799 - DNA, 74 bp, Homo sapiens
taaagctgctcttctcccccagtgttggagtgcaaggaggcggggccatccaaagcaacgctgaaggccttttc

SEQ ID NO: 17800 - DNA, 75 bp, Homo sapiens
tcttctcccccagtgttggagtgcaaggaggcggggccatccaaagcaacgctgaaggccttttccagcagctgg

SEQ ID NO: 17801 - DNA, 75 bp, Homo sapiens
gtgttggagtgcaaggaggcggggccatccaaagcaacgctgaaggccttttccagcagctgggagctcccggat

SEQ ID NO: 17802 - DNA, 77 bp, Homo sapiens
agtgcaaggaggcggggccatccaaagcaacgctgaaggccttttccagcagctgggagctcccggattgcgtggca

SEQ ID NO: 17803 - DNA, 77 bp, Homo sapiens
aggcggggccatccaaagcaacgctgaaggccttttccagcagctgggagctcccggattgcgtggcacagctgagg

SEQ ID NO: 17804 - DNA, 80 bp, Homo sapiens
atccaaagcaacgctgaaggccttttccagcagctgggagctcccggattgcgtggcacagctgaggggcctctgtgatg

SEQ ID NO: 17805 - DNA, 84 bp, Homo sapiens
tgaaggccttttccagcagctgggagctcccggattgcgtggcacagctgaggggcctctgtgatggctgagctctcttatgtc

SEQ ID NO: 17806 - DNA, 85 bp, Homo sapiens
ttttccagcagctgggagctcccggattgcgtggcacagctgaggggcctctgtgatggctgagctctcttatgtcctatactca

SEQ ID NO: 17807 - DNA, 90 bp, Homo sapiens
tgggagctcccggattgcgtggcacagctgaggggcctctgtgatggctgagctctcttatgtcctatactcacatcagacatgtgatca

SEQ ID NO: 17808 - DNA, 90 bp, Homo sapiens
cggattgcgtggcacagctgaggggcctctgtgatggctgagctctcttatgtcctatactcacatcagacatgtgatcatagtcccaga

SEQ ID NO: 17809 - DNA, 87 bp, Homo sapiens
aggggcctctgtgatggctgagctctcttatgtcctatactcacatcagacatgtgatcatagtcccagagacagagttgaggtctc

SEQ ID NO: 17810 - DNA, 88 bp, Homo sapiens
tgtgatggctgagctctcttatgtcctatactcacatcagacatgtgatcatagtcccagagacagagttgaggtctcgaagaaaaga

SEQ ID NO: 17811 - DNA, 86 bp, Homo sapiens
agctctcttatgtcctatactcacatcagacatgtgatcatagtcccagagacagagttgaggtctcgaagaaaagatccatgatc

SEQ ID NO: 17812 - DNA, 84 bp, Homo sapiens
ttatgtcctatactcacatcagacatgtgatcatagtcccagagacagagttgaggtctcgaagaaaagatccatgatcggctt

SEQ ID NO: 17813 - DNA, 84 bp, Homo sapiens
tatactcacatcagacatgtgatcatagtcccagagacagagttgaggtctcgaagaaaagatccatgatcggctttctcctgg

SEQ ID NO: 17814 - DNA, 74 bp, Homo sapiens
tagtcccagagacagagttgaggtctcgaagaaaagatccatgatcggctttctcctggggcccctccaattgt

SEQ ID NO: 17815 - DNA, 71 bp, Homo sapiens
agttgaggtctcgaagaaaagatccatgatcggctttctcctggggcccctccaattgtttactgttagaa

SEQ ID NO: 17816 - DNA, 69 bp, Homo sapiens
aagaaaagatccatgatcggctttctcctggggcccctccaattgtttactgttagaaagtgggaatgg

SEQ ID NO: 17817 - DNA, 69 bp, Homo sapiens
atccatgatcggctttctcctggggcccctccaattgtttactgttagaaagtgggaatggggtcccta

SEQ ID NO: 17818 - DNA, 69 bp, Homo sapiens
tttctcctggggcccctccaattgtttactgttagaaagtgggaatggggtccctagcagacttgcctg

SEQ ID NO: 17819 - DNA, 70 bp, Homo sapiens
aattgtttactgttagaaagtgggaatggggtccctagcagacttgcctggaaggagcctattatagagg

SEQ ID NO: 17820 - DNA, 71 bp, Homo sapiens
agtgggaatggggtccctagcagacttgcctggaaggagcctattatagagggttggttatgttgggagat

SEQ ID NO: 17821 - DNA, 73 bp, Homo sapiens
gtccctagcagacttgcctggaaggagcctattatagagggttggttatgttgggagattgggcctgaatttc

SEQ ID NO: 17822 - DNA, 73 bp, Homo sapiens
agacttgcctggaaggagcctattatagagggttggttatgttgggagattgggcctgaatttctccacagaa

SEQ ID NO: 17823 - DNA, 72 bp, Homo sapiens
aaggagcctattatagagggttggttatgttgggagattgggcctgaatttctccacagaaataagttgcca

SEQ ID NO: 17824 - DNA, 73 bp, Homo sapiens
tattatagagggttggttatgttgggagattgggcctgaatttctccacagaaataagttgccatcctcaggt

SEQ ID NO: 17825 - DNA, 72 bp, Homo sapiens
gttggttatgttgggagattgggcctgaatttctccacagaaataagttgccatcctcaggttggccctttc

SEQ ID NO: 17826 - DNA, 74 bp, Homo sapiens
ttgggagattgggcctgaatttctccacagaaataagttgccatcctcaggttggccctttcccaagcactgta

SEQ ID NO: 17827 - DNA, 74 bp, Homo sapiens
tttctccacagaaataagttgccatcctcaggttggccctttcccaagcactgtaagtgagtgggtcaggcaaa

SEQ ID NO: 17828 - DNA, 70 bp, Homo sapiens
atcctcaggttggccctttcccaagcactgtaagtgagtgggtcaggcaaagccccaaatggagggttgg

SEQ ID NO: 17829 - DNA, 70 bp, Homo sapiens
ttggccctttcccaagcactgtaagtgagtgggtcaggcaaagccccaaatggagggttggttagattcc

SEQ ID NO: 17830 - DNA, 71 bp, Homo sapiens
tttcccaagcactgtaagtgagtgggtcaggcaaagccccaaatggagggttggttagattcctgacagtt

SEQ ID NO: 17831 - DNA, 73 bp, Homo sapiens
actgtaagtgagtgggtcaggcaaagccccaaatggagggttggttagattcctgacagtttgccagccaggc

SEQ ID NO: 17832 - DNA, 71 bp, Homo sapiens
agtgggtcaggcaaagccccaaatggagggttggttagattcctgacagtttgccagccaggccccaccta

SEQ ID NO: 17833 - DNA, 72 bp, Homo sapiens
aagccccaaatggagggttggttagattcctgacagtttgccagccaggccccacctacagcgtctgtcgaa

SEQ ID NO: 17834 - DNA, 73 bp, Homo sapiens
aaatggagggttggttagattcctgacagtttgccagccaggccccacctacagcgtctgtcgaacaaacaga

SEQ ID NO: 17835 - DNA, 74 bp, Homo sapiens
tgacagtttgccagccaggccccacctacagcgtctgtcgaacaaacagaggtctggtggttttccctactatc

SEQ ID NO: 17836 - DNA, 72 bp, Homo sapiens
cagccaggccccacctacagcgtctgtcgaacaaacagaggtctggtggttttccctactatcctcccactc

SEQ ID NO: 17837 - DNA, 72 bp, Homo sapiens
ccacctacagcgtctgtcgaacaaacagaggtctggtggttttccctactatcctcccactcgagagttcac

SEQ ID NO: 17838 - DNA, 71 bp, Homo sapiens
agcgtctgtcgaacaaacagaggtctggtggttttccctactatcctcccactcgagagttcacttctggt

SEQ ID NO: 17839 - DNA, 70 bp, Homo sapiens
aacaaacagaggtctggtggttttccctactatcctcccactcgagagttcacttctggttgggagacag

SEQ ID NO: 17840 - DNA, 71 bp, Homo sapiens
agaggtctggtggttttccctactatcctcccactcgagagttcacttctggttgggagacaggattccta

SEQ ID NO: 17841 - DNA, 74 bp, Homo sapiens
tactatcctcccactcgagagttcacttctggttgggagacaggattcctagcacctccggtgtcaaaaggctg

SEQ ID NO: 17842 - DNA, 72 bp, Homo sapiens
acttctggttgggagacaggattcctagcacctccggtgtcaaaaggctgtcatggggttgtgccaattaat

SEQ ID NO: 17843 - DNA, 72 bp, Homo sapiens
gttgggagacaggattcctagcacctccggtgtcaaaaggctgtcatggggttgtgccaattaattaccaaa

SEQ ID NO: 17844 - DNA, 73 bp, Homo sapiens
acaggattcctagcacctccggtgtcaaaaggctgtcatggggttgtgccaattaattaccaaacattgagcc

SEQ ID NO: 17845 - DNA, 74 bp, Homo sapiens
acctccggtgtcaaaaggctgtcatggggttgtgccaattaattaccaaacattgagcctgcaggctttgagtg

SEQ ID NO: 17846 - DNA, 75 bp, Homo sapiens
tcatggggttgtgccaattaattaccaaacattgagcctgcaggctttgagtgggagtgttgcccccaggagcct

SEQ ID NO: 17847 - DNA, 76 bp, Homo sapiens
ggttgtgccaattaattaccaaacattgagcctgcaggctttgagtgggagtgttgcccccaggagccttatctca

SEQ ID NO: 17848 - DNA, 75 bp, Homo sapiens
aattaattaccaaacattgagcctgcaggctttgagtgggagtgttgcccccaggagccttatctcagccaatta

SEQ ID NO: 17849 - DNA, 73 bp, Homo sapiens
tttgagtgggagtgttgcccccaggagccttatctcagccaattacctttcttgacagtaggagcggcttccc

SEQ ID NO: 17850 - DNA, 73 bp, Homo sapiens
agtgttgcccccaggagccttatctcagccaattacctttcttgacagtaggagcggcttccctctcccattc

SEQ ID NO: 17851 - DNA, 72 bp, Homo sapiens
agccttatctcagccaattacctttcttgacagtaggagcggcttccctctcccattccctcttcactccct

SEQ ID NO: 17852 - DNA, 72 bp, Homo sapiens
tatctcagccaattacctttcttgacagtaggagcggcttccctctcccattccctcttcactcccttttct

SEQ ID NO: 17853 - DNA, 67 bp, Homo sapiens
aattacctttcttgacagtaggagcggcttccctctcccattccctcttcactcccttttcttcctt

SEQ ID NO: 17854 - DNA, 70 bp, Homo sapiens
cttgacagtaggagcggcttccctctcccattccctcttcactcccttttcttcctttcccctgtcttca

SEQ ID NO: 17855 - DNA, 71 bp, Homo sapiens
agcggcttccctctcccattccctcttcactcccttttcttcctttcccctgtcttcatgccactgctttc

SEQ ID NO: 17856 - DNA, 73 bp, Homo sapiens
tctcccattccctcttcactcccttttcttcctttcccctgtcttcatgccactgctttcccatgcttctttc

SEQ ID NO: 17857 - DNA, 71 bp, Homo sapiens
tcttcactcccttttcttcctttcccctgtcttcatgccactgctttcccatgcttctttcgggttgtagg

SEQ ID NO: 17858 - DNA, 71 bp, Homo sapiens
cttttcttcctttcccctgtcttcatgccactgctttcccatgcttctttcgggttgtaggggagactgac

SEQ ID NO: 17859 - DNA, 80 bp, Homo sapiens
tgtcttcatgccactgctttcccatgcttctttcgggttgtaggggagactgactgcctgctcaaggacactccctgctg

SEQ ID NO: 17860 - DNA, 77 bp, Homo sapiens
actgctttcccatgcttctttcgggttgtaggggagactgactgcctgctcaaggacactccctgctgggcatagga

SEQ ID NO: 17861 - DNA, 79 bp, Homo sapiens
atgcttctttcgggttgtaggggagactgactgcctgctcaaggacactccctgctgggcataggatgtgcctgcaaaa

SEQ ID NO: 17862 - DNA, 80 bp, Homo sapiens
actgcctgctcaaggacactccctgctgggcataggatgtgcctgcaaaaagttccctgagcctgtaagcactccaggtg

SEQ ID NO: 17863 - DNA, 77 bp, Homo sapiens
ctcaaggacactccctgctgggcataggatgtgcctgcaaaaagttccctgagcctgtaagcactccaggtggggaa

SEQ ID NO: 17864 - DNA, 76 bp, Homo sapiens
actccctgctgggcataggatgtgcctgcaaaaagttccctgagcctgtaagcactccaggtggggaagtggacag

SEQ ID NO: 17865 - DNA, 77 bp, Homo sapiens
ataggatgtgcctgcaaaaagttccctgagcctgtaagcactccaggtggggaagtggacaggagccattggtcata

SEQ ID NO: 17866 - DNA, 76 bp, Homo sapiens
atgtgcctgcaaaaagttccctgagcctgtaagcactccaggtggggaagtggacaggagccattggtcataacca

SEQ ID NO: 17867 - DNA, 73 bp, Homo sapiens
aaagttccctgagcctgtaagcactccaggtggggaagtggacaggagccattggtcataaccagacagaatt

SEQ ID NO: 17868 - DNA, 73 bp, Homo sapiens
agcctgtaagcactccaggtggggaagtggacaggagccattggtcataaccagacagaatttggaaacattt

SEQ ID NO: 17869 - DNA, 73 bp, Homo sapiens
aagcactccaggtggggaagtggacaggagccattggtcataaccagacagaatttggaaacattttcataaa

SEQ ID NO: 17870 - DNA, 74 bp, Homo sapiens
ggaagtggacaggagccattggtcataaccagacagaatttggaaacattttcataaagctccatggagagttt

SEQ ID NO: 17871 - DNA, 72 bp, Homo sapiens
aggagccattggtcataaccagacagaatttggaaacattttcataaagctccatggagagttttaaagaaa

SEQ ID NO: 17872 - DNA, 76 bp, Homo sapiens
ggtcataaccagacagaatttggaaacattttcataaagctccatggagagttttaaagaaacatatgtagcatga

SEQ ID NO: 17873 - DNA, 74 bp, Homo sapiens
accagacagaatttggaaacattttcataaagctccatggagagttttaaagaaacatatgtagcatgattttg

SEQ ID NO: 17874 - DNA, 74 bp, Homo sapiens
tggaaacattttcataaagctccatggagagttttaaagaaacatatgtagcatgattttgtaggagaggaaaa

SEQ ID NO: 17875 - DNA, 73 bp, Homo sapiens
acattttcataaagctccatggagagttttaaagaaacatatgtagcatgattttgtaggagaggaaaaagat

SEQ ID NO: 17876 - DNA, 73 bp, Homo sapiens
gctccatggagagttttaaagaaacatatgtagcatgattttgtaggagaggaaaaagattatttaaatagga

SEQ ID NO: 17877 - DNA, 70 bp, Homo sapiens
ggagagttttaaagaaacatatgtagcatgattttgtaggagaggaaaaagattatttaaataggattta

SEQ ID NO: 17878 - DNA, 76 bp, Homo sapiens
gcatgattttgtaggagaggaaaaagattatttaaataggatttaaatcatgcaacaacgagagtatcacagccag

SEQ ID NO: 17879 - DNA, 72 bp, Homo sapiens
aaaaagattatttaaataggatttaaatcatgcaacaacgagagtatcacagccaggatgacccttgggtcc

SEQ ID NO: 17880 - DNA, 74 bp, Homo sapiens
ttatttaaataggatttaaatcatgcaacaacgagagtatcacagccaggatgacccttgggtcccattcctaa

SEQ ID NO: 17881 - DNA, 74 bp, Homo sapiens
atttaaatcatgcaacaacgagagtatcacagccaggatgacccttgggtcccattcctaagacatggttactt

SEQ ID NO: 17882 - DNA, 69 bp, Homo sapiens
aacgagagtatcacagccaggatgacccttgggtcccattcctaagacatggttactttattttcccct

SEQ ID NO: 17883 - DNA, 69 bp, Homo sapiens
acagccaggatgacccttgggtcccattcctaagacatggttactttattttccccttgttaagacata

SEQ ID NO: 17884 - DNA, 65 bp, Homo sapiens
acccttgggtcccattcctaagacatggttactttattttccccttgttaagacataggaagact

SEQ ID NO: 17885 - DNA, 64 bp, Homo sapiens
ggttactttattttccccttgttaagacataggaagacttaatttttaaacggtcagtgtccag

SEQ ID NO: 17886 - DNA, 67 bp, Homo sapiens
attttccccttgttaagacataggaagacttaatttttaaacggtcagtgtccagttgaaggcagaa

SEQ ID NO: 17887 - DNA, 72 bp, Homo sapiens
ttaagacataggaagacttaatttttaaacggtcagtgtccagttgaaggcagaacactaatcagatttcaa

SEQ ID NO: 17888 - DNA, 70 bp, Homo sapiens
agacttaatttttaaacggtcagtgtccagttgaaggcagaacactaatcagatttcaaggcccacaact

SEQ ID NO: 17889 - DNA, 71 bp, Homo sapiens
taatttttaaacggtcagtgtccagttgaaggcagaacactaatcagatttcaaggcccacaacttgggga

SEQ ID NO: 17890 - DNA, 76 bp, Homo sapiens
tcagtgtccagttgaaggcagaacactaatcagatttcaaggcccacaacttggggactagaccaccttatgttga

SEQ ID NO: 17891 - DNA, 72 bp, Homo sapiens
agttgaaggcagaacactaatcagatttcaaggcccacaacttggggactagaccaccttatgttgagggaa

SEQ ID NO: 17892 - DNA, 73 bp, Homo sapiens
aaggcccacaacttggggactagaccaccttatgttgagggaactctgccacctgcgtgcaacccacagctaa

SEQ ID NO: 17893 - DNA, 75 bp, Homo sapiens
actagaccaccttatgttgagggaactctgccacctgcgtgcaacccacagctaaagtaaattcaatgacactac

SEQ ID NO: 17894 - DNA, 78 bp, Homo sapiens
ttatgttgagggaactctgccacctgcgtgcaacccacagctaaagtaaattcaatgacactactgccctgattactc

SEQ ID NO: 17895 - DNA, 77 bp, Homo sapiens
aactctgccacctgcgtgcaacccacagctaaagtaaattcaatgacactactgccctgattactccttaggatgtg

SEQ ID NO: 17896 - DNA, 75 bp, Homo sapiens
acctgcgtgcaacccacagctaaagtaaattcaatgacactactgccctgattactccttaggatgtggtcaaaa

SEQ ID NO: 17897 - DNA, 75 bp, Homo sapiens
aacccacagctaaagtaaattcaatgacactactgccctgattactccttaggatgtggtcaaaacagcatcaaa

SEQ ID NO: 17898 - DNA, 75 bp, Homo sapiens
ctaaagtaaattcaatgacactactgccctgattactccttaggatgtggtcaaaacagcatcaaatgtttcttc

SEQ ID NO: 17899 - DNA, 76 bp, Homo sapiens
attcaatgacactactgccctgattactccttaggatgtggtcaaaacagcatcaaatgtttcttctcttcctttc

SEQ ID NO: 17900 - DNA, 73 bp, Homo sapiens
actactgccctgattactccttaggatgtggtcaaaacagcatcaaatgtttcttctcttcctttccccaaga

SEQ ID NO: 17901 - DNA, 73 bp, Homo sapiens
attactccttaggatgtggtcaaaacagcatcaaatgtttcttctcttcctttccccaagacagagtcctgaa

SEQ ID NO: 17902 - DNA, 72 bp, Homo sapiens
atgtggtcaaaacagcatcaaatgtttcttctcttcctttccccaagacagagtcctgaacctgttaaatta

SEQ ID NO: 17903 - DNA, 70 bp, Homo sapiens
aaaacagcatcaaatgtttcttctcttcctttccccaagacagagtcctgaacctgttaaattaagtcat

SEQ ID NO: 17904 - DNA, 68 bp, Homo sapiens
aatgtttcttctcttcctttccccaagacagagtcctgaacctgttaaattaagtcattggattttac

SEQ ID NO: 17905 - DNA, 69 bp, Homo sapiens
ctcttcctttccccaagacagagtcctgaacctgttaaattaagtcattggattttactctgttctgtt

SEQ ID NO: 17906 - DNA, 70 bp, Homo sapiens
ttccccaagacagagtcctgaacctgttaaattaagtcattggattttactctgttctgtttacagttta

SEQ ID NO: 17907 - DNA, 69 bp, Homo sapiens
cagagtcctgaacctgttaaattaagtcattggattttactctgttctgtttacagtttactatttaag

SEQ ID NO: 17908 - DNA, 66 bp, Homo sapiens
ctgaacctgttaaattaagtcattggattttactctgttctgtttacagtttactatttaaggttt

SEQ ID NO: 17909 - DNA, 67 bp, Homo sapiens
taaattaagtcattggattttactctgttctgtttacagtttactatttaaggttttataaatgtaa

SEQ ID NO: 17910 - DNA, 67 bp, Homo sapiens
cattggattttactctgttctgtttacagtttactatttaaggttttataaatgtaaatatattttg

SEQ ID NO: 17911 - DNA, 74 bp, Homo sapiens
aggttttataaatgtaaatatattttgtatatttttctatgagaagcacttcatagggagaagcacttatgaca

SEQ ID NO: 17912 - DNA, 73 bp, Homo sapiens
tattttgtatatttttctatgagaagcacttcatagggagaagcacttatgacaaggctattttttaaaccgc

SEQ ID NO: 17913 - DNA, 72 bp, Homo sapiens
atttttctatgagaagcacttcatagggagaagcacttatgacaaggctattttttaaaccgcggtattatc

SEQ ID NO: 17914 - DNA, 73 bp, Homo sapiens
tatgagaagcacttcatagggagaagcacttatgacaaggctattttttaaaccgcggtattatcctaattta

SEQ ID NO: 17915 - DNA, 67 bp, Homo sapiens
gggagaagcacttatgacaaggctattttttaaaccgcggtattatcctaatttaaaagaagatcgg

SEQ ID NO: 17916 - DNA, 64 bp, Homo sapiens
cttatgacaaggctattttttaaaccgcggtattatcctaatttaaaagaagatcggtttttaa

SEQ ID NO: 17917 - DNA, 70 bp, Homo sapiens
ttaataattttttattttcataggatgaagttagagaaaatattcagctgtacacacaaagtctggtttt

SEQ ID NO: 17918 - DNA, 72 bp, Homo sapiens
tttattttcataggatgaagttagagaaaatattcagctgtacacacaaagtctggtttttcctgcccaact

SEQ ID NO: 17919 - DNA, 67 bp, Homo sapiens
aaatattcagctgtacacacaaagtctggtttttcctgcccaacttccccctggaaggtgtactttt

SEQ ID NO: 17920 - DNA, 66 bp, Homo sapiens
tgtacacacaaagtctggtttttcctgcccaacttccccctggaaggtgtactttttgttgtttaa

SEQ ID NO: 17921 - DNA, 65 bp, Homo sapiens
acaaagtctggtttttcctgcccaacttccccctggaaggtgtactttttgttgtttaatgtgta

SEQ ID NO: 17922 - DNA, 67 bp, Homo sapiens
gtttttcctgcccaacttccccctggaaggtgtactttttgttgtttaatgtgtagcttgtttgtgc

SEQ ID NO: 17923 - DNA, 69 bp, Homo sapiens
gaaggtgtactttttgttgtttaatgtgtagcttgtttgtgccctgttgacataaatgtttcctgggtt

SEQ ID NO: 17924 - DNA, 72 bp, Homo sapiens
tttttgttgtttaatgtgtagcttgtttgtgccctgttgacataaatgtttcctgggtttgctctttgacaa

SEQ ID NO: 17925 - DNA, 74 bp, Homo sapiens
ttgtttaatgtgtagcttgtttgtgccctgttgacataaatgtttcctgggtttgctctttgacaataaatgga

SEQ ID NO: 17926 - DNA, 73 bp, Homo sapiens
gtgtagcttgtttgtgccctgttgacataaatgtttcctgggtttgctctttgacaataaatggagaaggaag

SEQ ID NO: 17927 - DNA, 72 bp, Homo sapiens
tttgtgccctgttgacataaatgtttcctgggtttgctctttgacaataaatggagaaggaaggtcacccaa

SEQ ID NO: 17928 - DNA, 71 bp, Homo sapiens
gttgacataaatgtttcctgggtttgctctttgacaataaatggagaaggaaggtcacccaactccattgg

SEQ ID NO: 17929 - DNA, 70 bp, Homo sapiens
atgtttcctgggtttgctctttgacaataaatggagaaggaaggtcacccaactccattgggccactccc

SEQ ID NO: 17930 - DNA, 69 bp, Homo sapiens
ggtttgctctttgacaataaatggagaaggaaggtcacccaactccattgggccactcccctccttccc

SEQ ID NO: 17931 - DNA, 71 bp, Homo sapiens
ttgacaataaatggagaaggaaggtcacccaactccattgggccactcccctccttcccctattgaagctc

SEQ ID NO: 17932 - DNA, 69 bp, Homo sapiens
agaaggaaggtcacccaactccattgggccactcccctccttcccctattgaagctcctcaaaaggcta

SEQ ID NO: 17933 - DNA, 73 bp, Homo sapiens
tcacccaactccattgggccactcccctccttcccctattgaagctcctcaaaaggctacagtaatatcttga

SEQ ID NO: 17934 - DNA, 72 bp, Homo sapiens
aactccattgggccactcccctccttcccctattgaagctcctcaaaaggctacagtaatatcttgatacaa

SEQ ID NO: 17935 - DNA, 72 bp, Homo sapiens
actcccctccttcccctattgaagctcctcaaaaggctacagtaatatcttgatacaacagattctcttctt

SEQ ID NO: 17936 - DNA, 75 bp, Homo sapiens
ttcccctattgaagctcctcaaaaggctacagtaatatcttgatacaacagattctcttctttcccgcctctctc

SEQ ID NO: 17937 - DNA, 75 bp, Homo sapiens
tattgaagctcctcaaaaggctacagtaatatcttgatacaacagattctcttctttcccgcctctctcctttcc

SEQ ID NO: 17938 - DNA, 75 bp, Homo sapiens
tacagtaatatcttgatacaacagattctcttctttcccgcctctctcctttccggcgcaacttccagagtggtg

SEQ ID NO: 17939 - DNA, 73 bp, Homo sapiens
atcttgatacaacagattctcttctttcccgcctctctcctttccggcgcaacttccagagtggtgggagacg

SEQ ID NO: 17940 - DNA, 71 bp, Homo sapiens
attctcttctttcccgcctctctcctttccggcgcaacttccagagtggtgggagacggcaatctttacat

SEQ ID NO: 17941 - DNA, 70 bp, Homo sapiens
cttctttcccgcctctctcctttccggcgcaacttccagagtggtgggagacggcaatctttacatttcc

SEQ ID NO: 17942 - DNA, 74 bp, Homo sapiens
ggcgcaacttccagagtggtgggagacggcaatctttacatttccctcatctttcttacttcagagttagcaaa

SEQ ID NO: 17943 - DNA, 72 bp, Homo sapiens
aacttccagagtggtgggagacggcaatctttacatttccctcatctttcttacttcagagttagcaaacaa

SEQ ID NO: 17944 - DNA, 76 bp, Homo sapiens
ttacatttccctcatctttcttacttcagagttagcaaacaacaagttgaatggcaacttgacatttttgcatcac

SEQ ID NO: 17945 - DNA, 79 bp, Homo sapiens
atctttcttacttcagagttagcaaacaacaagttgaatggcaacttgacatttttgcatcaccatctgcctcataggc

SEQ ID NO: 17946 - DNA, 79 bp, Homo sapiens
ttacttcagagttagcaaacaacaagttgaatggcaacttgacatttttgcatcaccatctgcctcataggccactctt

SEQ ID NO: 17947 - DNA, 77 bp, Homo sapiens
gttagcaaacaacaagttgaatggcaacttgacatttttgcatcaccatctgcctcataggccactctttcctttcc

SEQ ID NO: 17948 - DNA, 77 bp, Homo sapiens
aacaagttgaatggcaacttgacatttttgcatcaccatctgcctcataggccactctttcctttccctctgcccac

SEQ ID NO: 17949 - DNA, 80 bp, Homo sapiens
aacttgacatttttgcatcaccatctgcctcataggccactctttcctttccctctgcccaccaagtcctcatatctgca

SEQ ID NO: 17950 - DNA, 80 bp, Homo sapiens
acatttttgcatcaccatctgcctcataggccactctttcctttccctctgcccaccaagtcctcatatctgcagagaac

SEQ ID NO: 17951 - DNA, 81 bp, Homo sapiens
atcaccatctgcctcataggccactctttcctttccctctgcccaccaagtcctcatatctgcagagaacccattgatcac

SEQ ID NO: 17952 - DNA, 79 bp, Homo sapiens
tcataggccactctttcctttccctctgcccaccaagtcctcatatctgcagagaacccattgatcaccttgtgccctc

SEQ ID NO: 17953 - DNA, 75 bp, Homo sapiens
actctttcctttccctctgcccaccaagtcctcatatctgcagagaacccattgatcaccttgtgccctcttttg

SEQ ID NO: 17954 - DNA, 79 bp, Homo sapiens
tccctctgcccaccaagtcctcatatctgcagagaacccattgatcaccttgtgccctcttttggggcagcctgttgaa

SEQ ID NO: 17955 - DNA, 79 bp, Homo sapiens
accaagtcctcatatctgcagagaacccattgatcaccttgtgccctcttttggggcagcctgttgaaactgaagcaca

SEQ ID NO: 17956 - DNA, 83 bp, Homo sapiens
tcatatctgcagagaacccattgatcaccttgtgccctcttttggggcagcctgttgaaactgaagcacagtctgaccactca

SEQ ID NO: 17957 - DNA, 78 bp, Homo sapiens
ttgatcaccttgtgccctcttttggggcagcctgttgaaactgaagcacagtctgaccactcacgataaagcagattt

SEQ ID NO: 17958 - DNA, 75 bp, Homo sapiens
accttgtgccctcttttggggcagcctgttgaaactgaagcacagtctgaccactcacgataaagcagatttttc

SEQ ID NO: 17959 - DNA, 78 bp, Homo sapiens
acagtctgaccactcacgataaagcagatttttctctgcctctgccacaaggtttcagagtagtgtagtccaagtaga

SEQ ID NO: 17960 - DNA, 74 bp, Homo sapiens
actcacgataaagcagatttttctctgcctctgccacaaggtttcagagtagtgtagtccaagtagagggtggg

SEQ ID NO: 17961 - DNA, 74 bp, Homo sapiens
tctgcctctgccacaaggtttcagagtagtgtagtccaagtagagggtggggcacccttttctcgccgcaagaa

SEQ ID NO: 17962 - DNA, 70 bp, Homo sapiens
ccacaaggtttcagagtagtgtagtccaagtagagggtggggcacccttttctcgccgcaagaagcccat

SEQ ID NO: 17963 - DNA, 72 bp, Homo sapiens
tttcagagtagtgtagtccaagtagagggtggggcacccttttctcgccgcaagaagcccattcctatggaa

SEQ ID NO: 17964 - DNA, 73 bp, Homo sapiens
tagtgtagtccaagtagagggtggggcacccttttctcgccgcaagaagcccattcctatggaagtctagcaa

SEQ ID NO: 17965 - DNA, 72 bp, Homo sapiens
aagtagagggtggggcacccttttctcgccgcaagaagcccattcctatggaagtctagcaaagcaatacga

SEQ ID NO: 17966 - DNA, 77 bp, Homo sapiens
gggcacccttttctcgccgcaagaagcccattcctatggaagtctagcaaagcaatacgactcagcccagcactctc

SEQ ID NO: 17967 - DNA, 78 bp, Homo sapiens
ccttttctcgccgcaagaagcccattcctatggaagtctagcaaagcaatacgactcagcccagcactctctgcccca

SEQ ID NO: 17968 - DNA, 84 bp, Homo sapiens
attcctatggaagtctagcaaagcaatacgactcagcccagcactctctgccccaggactcatggctctgctgtgccttccatc

SEQ ID NO: 17969 - DNA, 85 bp, Homo sapiens
tggaagtctagcaaagcaatacgactcagcccagcactctctgccccaggactcatggctctgctgtgccttccatcctgggctc

SEQ ID NO: 17970 - DNA, 82 bp, Homo sapiens
aaagcaatacgactcagcccagcactctctgccccaggactcatggctctgctgtgccttccatcctgggctcccttctctc

SEQ ID NO: 17971 - DNA, 83 bp, Homo sapiens
tcagcccagcactctctgccccaggactcatggctctgctgtgccttccatcctgggctcccttctctcctgtgaccttaaga

SEQ ID NO: 17972 - DNA, 77 bp, Homo sapiens
cccaggactcatggctctgctgtgccttccatcctgggctcccttctctcctgtgaccttaagaactttgtctggtg

SEQ ID NO: 17973 - DNA, 78 bp, Homo sapiens
atggctctgctgtgccttccatcctgggctcccttctctcctgtgaccttaagaactttgtctggtggctttgctgga

SEQ ID NO: 17974 - DNA, 77 bp, Homo sapiens
tgtgccttccatcctgggctcccttctctcctgtgaccttaagaactttgtctggtggctttgctggaacattgtca

SEQ ID NO: 17975 - DNA, 78 bp, Homo sapiens
tcccttctctcctgtgaccttaagaactttgtctggtggctttgctggaacattgtcactgttttcactgtcatgcag

SEQ ID NO: 17976 - DNA, 79 bp, Homo sapiens
tctcctgtgaccttaagaactttgtctggtggctttgctggaacattgtcactgttttcactgtcatgcagggagccca

SEQ ID NO: 17977 - DNA, 80 bp, Homo sapiens
cttaagaactttgtctggtggctttgctggaacattgtcactgttttcactgtcatgcagggagcccagcactgtggcca

SEQ ID NO: 17978 - DNA, 84 bp, Homo sapiens
ttgtctggtggctttgctggaacattgtcactgttttcactgtcatgcagggagcccagcactgtggccaggatggcagagact

SEQ ID NO: 17979 - DNA, 86 bp, Homo sapiens
tttgctggaacattgtcactgttttcactgtcatgcagggagcccagcactgtggccaggatggcagagacttccttgtcatcatg

SEQ ID NO: 17980 - DNA, 84 bp, Homo sapiens
aacattgtcactgttttcactgtcatgcagggagcccagcactgtggccaggatggcagagacttccttgtcatcatggagaag

SEQ ID NO: 17981 - DNA, 85 bp, Homo sapiens
actgttttcactgtcatgcagggagcccagcactgtggccaggatggcagagacttccttgtcatcatggagaagtgccagcagg

SEQ ID NO: 17982 - DNA, 82 bp, Homo sapiens
atgcagggagcccagcactgtggccaggatggcagagacttccttgtcatcatggagaagtgccagcaggggactgggaaaa

SEQ ID NO: 17983 - DNA, 82 bp, Homo sapiens
agcccagcactgtggccaggatggcagagacttccttgtcatcatggagaagtgccagcaggggactgggaaaagcactcta

SEQ ID NO: 17984 - DNA, 80 bp, Homo sapiens
actgtggccaggatggcagagacttccttgtcatcatggagaagtgccagcaggggactgggaaaagcactctacccaga

SEQ ID NO: 17985 - DNA, 78 bp, Homo sapiens
aggatggcagagacttccttgtcatcatggagaagtgccagcaggggactgggaaaagcactctacccagacctcacc

SEQ ID NO: 17986 - DNA, 75 bp, Homo sapiens
agacttccttgtcatcatggagaagtgccagcaggggactgggaaaagcactctacccagacctcacctcccttc

SEQ ID NO: 17987 - DNA, 73 bp, Homo sapiens
atcatggagaagtgccagcaggggactgggaaaagcactctacccagacctcacctcccttcctccttttgcc

SEQ ID NO: 17988 - DNA, 76 bp, Homo sapiens
tgccagcaggggactgggaaaagcactctacccagacctcacctcccttcctccttttgcccatgaacaagatgca

SEQ ID NO: 17989 - DNA, 73 bp, Homo sapiens
ggactgggaaaagcactctacccagacctcacctcccttcctccttttgcccatgaacaagatgcagtggccc

SEQ ID NO: 17990 - DNA, 72 bp, Homo sapiens
ggaaaagcactctacccagacctcacctcccttcctccttttgcccatgaacaagatgcagtggccctaggg

SEQ ID NO: 17991 - DNA, 72 bp, Homo sapiens
tacccagacctcacctcccttcctccttttgcccatgaacaagatgcagtggccctaggggttccactagtg

SEQ ID NO: 17992 - DNA, 72 bp, Homo sapiens
cttcctccttttgcccatgaacaagatgcagtggccctaggggttccactagtgtctgctttcctttattat

SEQ ID NO: 17993 - DNA, 75 bp, Homo sapiens
ccatgaacaagatgcagtggccctaggggttccactagtgtctgctttcctttattattgcactgtgtgaggttt

SEQ ID NO: 17994 - DNA, 69 bp, Homo sapiens
agtggccctaggggttccactagtgtctgctttcctttattattgcactgtgtgaggtttttttgtaaa

SEQ ID NO: 17995 - DNA, 71 bp, Homo sapiens
gttccactagtgtctgctttcctttattattgcactgtgtgaggtttttttgtaaatccttgtattcctat

SEQ ID NO: 17996 - DNA, 69 bp, Homo sapiens
tagtgtctgctttcctttattattgcactgtgtgaggtttttttgtaaatccttgtattcctatttttt

SEQ ID NO: 17997 - DNA, 66 bp, Homo sapiens
tttcctttattattgcactgtgtgaggtttttttgtaaatccttgtattcctattttttttaaaga

SEQ ID NO: 17998 - DNA, 74 bp, Homo sapiens
aaaaaaaccttaagctgcatttgttactgaaatgattaatgcactgatgggtcctgaattcaccttgagaaaga

SEQ ID NO: 17999 - DNA, 75 bp, Homo sapiens
aaccttaagctgcatttgttactgaaatgattaatgcactgatgggtcctgaattcaccttgagaaagacccaaa

SEQ ID NO: 18000 - DNA, 74 bp, Homo sapiens
atttgttactgaaatgattaatgcactgatgggtcctgaattcaccttgagaaagacccaaaggccagtcaggg

SEQ ID NO: 18001 - DNA, 73 bp, Homo sapiens
actgaaatgattaatgcactgatgggtcctgaattcaccttgagaaagacccaaaggccagtcagggggtggg

SEQ ID NO: 18002 - DNA, 69 bp, Homo sapiens
atgggtcctgaattcaccttgagaaagacccaaaggccagtcagggggtggggggaactcagctaaata

SEQ ID NO: 18003 - DNA, 68 bp, Homo sapiens
attcaccttgagaaagacccaaaggccagtcagggggtggggggaactcagctaaatagacctagtta

SEQ ID NO: 18004 - DNA, 69 bp, Homo sapiens
agaaagacccaaaggccagtcagggggtggggggaactcagctaaatagacctagttactgccctgcta

SEQ ID NO: 18005 - DNA, 72 bp, Homo sapiens
aaaggccagtcagggggtggggggaactcagctaaatagacctagttactgccctgctaggccatgctgtac

SEQ ID NO: 18006 - DNA, 75 bp, Homo sapiens
ggggtggggggaactcagctaaatagacctagttactgccctgctaggccatgctgtactgtgagcccctcctca

SEQ ID NO: 18007 - DNA, 78 bp, Homo sapiens
gggaactcagctaaatagacctagttactgccctgctaggccatgctgtactgtgagcccctcctcactctctaccaa

SEQ ID NO: 18008 - DNA, 75 bp, Homo sapiens
ctaaatagacctagttactgccctgctaggccatgctgtactgtgagcccctcctcactctctaccaaccctaaa

SEQ ID NO: 18009 - DNA, 74 bp, Homo sapiens
acctagttactgccctgctaggccatgctgtactgtgagcccctcctcactctctaccaaccctaaaccctgag

SEQ ID NO: 18010 - DNA, 74 bp, Homo sapiens
cctgctaggccatgctgtactgtgagcccctcctcactctctaccaaccctaaaccctgaggacaggggaggaa

SEQ ID NO: 18011 - DNA, 73 bp, Homo sapiens
taggccatgctgtactgtgagcccctcctcactctctaccaaccctaaaccctgaggacaggggaggaaccca

SEQ ID NO: 18012 - DNA, 72 bp, Homo sapiens
atgctgtactgtgagcccctcctcactctctaccaaccctaaaccctgaggacaggggaggaacccacagct

SEQ ID NO: 18013 - DNA, 68 bp, Homo sapiens
agcccctcctcactctctaccaaccctaaaccctgaggacaggggaggaacccacagcttccttctcc

SEQ ID NO: 18014 - DNA, 70 bp, Homo sapiens
ccctcctcactctctaccaaccctaaaccctgaggacaggggaggaacccacagcttccttctcctgcca

SEQ ID NO: 18015 - DNA, 73 bp, Homo sapiens
actctctaccaaccctaaaccctgaggacaggggaggaacccacagcttccttctcctgccagctgcagatgg

SEQ ID NO: 18016 - DNA, 73 bp, Homo sapiens
tctctaccaaccctaaaccctgaggacaggggaggaacccacagcttccttctcctgccagctgcagatggtt

SEQ ID NO: 18017 - DNA, 73 bp, Homo sapiens
aaccctaaaccctgaggacaggggaggaacccacagcttccttctcctgccagctgcagatggtttgccttgc

SEQ ID NO: 18018 - DNA, 74 bp, Homo sapiens
gggaggaacccacagcttccttctcctgccagctgcagatggtttgccttgcctttccaccccctaattgtcaa

SEQ ID NO: 18019 - DNA, 74 bp, Homo sapiens
ttccttctcctgccagctgcagatggtttgccttgcctttccaccccctaattgtcaaccacaaaaatgagaaa

SEQ ID NO: 18020 - DNA, 73 bp, Homo sapiens
ccagctgcagatggtttgccttgcctttccaccccctaattgtcaaccacaaaaatgagaaattcctcttcta

SEQ ID NO: 18021 - DNA, 72 bp, Homo sapiens
agatggtttgccttgcctttccaccccctaattgtcaaccacaaaaatgagaaattcctcttctagctcagc

SEQ ID NO: 18022 - DNA, 72 bp, Homo sapiens
cttgcctttccaccccctaattgtcaaccacaaaaatgagaaattcctcttctagctcagccttgagtccat

SEQ ID NO: 18023 - DNA, 77 bp, Homo sapiens
aattgtcaaccacaaaaatgagaaattcctcttctagctcagccttgagtccattgccaaattttcagcacacctgc

SEQ ID NO: 18024 - DNA, 76 bp, Homo sapiens
aaaaatgagaaattcctcttctagctcagccttgagtccattgccaaattttcagcacacctgccagcaacttggg

SEQ ID NO: 18025 - DNA, 76 bp, Homo sapiens
ttctagctcagccttgagtccattgccaaattttcagcacacctgccagcaacttgggggaataagcgaaggtttc

SEQ ID NO: 18026 - DNA, 70 bp, Homo sapiens
attgccaaattttcagcacacctgccagcaacttgggggaataagcgaaggtttccctacaagagggaaa

SEQ ID NO: 18027 - DNA, 70 bp, Homo sapiens
attttcagcacacctgccagcaacttgggggaataagcgaaggtttccctacaagagggaaagaaggcaa

SEQ ID NO: 18028 - DNA, 70 bp, Homo sapiens
tgccagcaacttgggggaataagcgaaggtttccctacaagagggaaagaaggcaaaaacggcacagcta

SEQ ID NO: 18029 - DNA, 68 bp, Homo sapiens
ttgggggaataagcgaaggtttccctacaagagggaaagaaggcaaaaacggcacagctatctccaaa

SEQ ID NO: 18030 - DNA, 71 bp, Homo sapiens
aataagcgaaggtttccctacaagagggaaagaaggcaaaaacggcacagctatctccaaacacatctgag

SEQ ID NO: 18031 - DNA, 72 bp, Homo sapiens
gtttccctacaagagggaaagaaggcaaaaacggcacagctatctccaaacacatctgagttcatttcaaaa

SEQ ID NO: 18032 - DNA, 72 bp, Homo sapiens
agggaaagaaggcaaaaacggcacagctatctccaaacacatctgagttcatttcaaaagtgaccaagggaa

SEQ ID NO: 18033 - DNA, 75 bp, Homo sapiens
aggcaaaaacggcacagctatctccaaacacatctgagttcatttcaaaagtgaccaagggaatctccgcacaaa

SEQ ID NO: 18034 - DNA, 77 bp, Homo sapiens
aaacggcacagctatctccaaacacatctgagttcatttcaaaagtgaccaagggaatctccgcacaaaagtgcaga

SEQ ID NO: 18035 - DNA, 78 bp, Homo sapiens
aacacatctgagttcatttcaaaagtgaccaagggaatctccgcacaaaagtgcagattgaggaattgtgatgggtca

SEQ ID NO: 18036 - DNA, 75 bp, Homo sapiens
atttcaaaagtgaccaagggaatctccgcacaaaagtgcagattgaggaattgtgatgggtcattcccaagaatc

SEQ ID NO: 18037 - DNA, 73 bp, Homo sapiens
aaaagtgaccaagggaatctccgcacaaaagtgcagattgaggaattgtgatgggtcattcccaagaatcccc

SEQ ID NO: 18038 - DNA, 73 bp, Homo sapiens
acaaaagtgcagattgaggaattgtgatgggtcattcccaagaatcccccaaggggcatcccaaatccctgag

SEQ ID NO: 18039 - DNA, 73 bp, Homo sapiens
agattgaggaattgtgatgggtcattcccaagaatcccccaaggggcatcccaaatccctgaggagtaacagc

SEQ ID NO: 18040 - DNA, 73 bp, Homo sapiens
aggaattgtgatgggtcattcccaagaatcccccaaggggcatcccaaatccctgaggagtaacagctgcaaa

SEQ ID NO: 18041 - DNA, 74 bp, Homo sapiens
tcattcccaagaatcccccaaggggcatcccaaatccctgaggagtaacagctgcaaacctggtcagttctcag

SEQ ID NO: 18042 - DNA, 75 bp, Homo sapiens
aagaatcccccaaggggcatcccaaatccctgaggagtaacagctgcaaacctggtcagttctcagtgagagcca

SEQ ID NO: 18043 - DNA, 78 bp, Homo sapiens
aggggcatcccaaatccctgaggagtaacagctgcaaacctggtcagttctcagtgagagccagctcacttatagctt

SEQ ID NO: 18044 - DNA, 81 bp, Homo sapiens
caaatccctgaggagtaacagctgcaaacctggtcagttctcagtgagagccagctcacttatagctttgctgctagaacc

SEQ ID NO: 18045 - DNA, 84 bp, Homo sapiens
taacagctgcaaacctggtcagttctcagtgagagccagctcacttatagctttgctgctagaacctgttgtggctgcatttcc

SEQ ID NO: 18046 - DNA, 81 bp, Homo sapiens
aaacctggtcagttctcagtgagagccagctcacttatagctttgctgctagaacctgttgtggctgcatttcctggtggc

SEQ ID NO: 18047 - DNA, 85 bp, Homo sapiens
tctcagtgagagccagctcacttatagctttgctgctagaacctgttgtggctgcatttcctggtggccagtgacaactgtgtaa

SEQ ID NO: 18048 - DNA, 82 bp, Homo sapiens
acttatagctttgctgctagaacctgttgtggctgcatttcctggtggccagtgacaactgtgtaaccagaatagctgcatg

SEQ ID NO: 18049 - DNA, 80 bp, Homo sapiens
agaacctgttgtggctgcatttcctggtggccagtgacaactgtgtaaccagaatagctgcatggcgctgaccctttggc

SEQ ID NO: 18050 - DNA, 79 bp, Homo sapiens
tgcatttcctggtggccagtgacaactgtgtaaccagaatagctgcatggcgctgaccctttggccggaacttggtctc

SEQ ID NO: 18051 - DNA, 75 bp, Homo sapiens
agtgacaactgtgtaaccagaatagctgcatggcgctgaccctttggccggaacttggtctcttggctccctcct

SEQ ID NO: 18052 - DNA, 75 bp, Homo sapiens
ctgtgtaaccagaatagctgcatggcgctgaccctttggccggaacttggtctcttggctccctccttggccacc

SEQ ID NO: 18053 - DNA, 73 bp, Homo sapiens
atggcgctgaccctttggccggaacttggtctcttggctccctccttggccacccaccacctctcgcacagcc

SEQ ID NO: 18054 - DNA, 71 bp, Homo sapiens
ttggccggaacttggtctcttggctccctccttggccacccaccacctctcgcacagcccctctgttttta

SEQ ID NO: 18055 - DNA, 71 bp, Homo sapiens
aacttggtctcttggctccctccttggccacccaccacctctcgcacagcccctctgtttttacaccaata

SEQ ID NO: 18056 - DNA, 71 bp, Homo sapiens
ttggctccctccttggccacccaccacctctcgcacagcccctctgtttttacaccaataacaagaattaa

SEQ ID NO: 18057 - DNA, 71 bp, Homo sapiens
tcgcacagcccctctgtttttacaccaataacaagaattaagggggaagccctggcagctatacgttttca

SEQ ID NO: 18058 - DNA, 69 bp, Homo sapiens
ctctgtttttacaccaataacaagaattaagggggaagccctggcagctatacgttttcaaccagactc

SEQ ID NO: 18059 - DNA, 67 bp, Homo sapiens
tttttacaccaataacaagaattaagggggaagccctggcagctatacgttttcaaccagactcctt

SEQ ID NO: 18060 - DNA, 67 bp, Homo sapiens
aataacaagaattaagggggaagccctggcagctatacgttttcaaccagactcctttgccgggacc

SEQ ID NO: 18061 - DNA, 68 bp, Homo sapiens
attaagggggaagccctggcagctatacgttttcaaccagactcctttgccgggacccagcccgccac

SEQ ID NO: 18062 - DNA, 72 bp, Homo sapiens
ctggcagctatacgttttcaaccagactcctttgccgggacccagcccgccaccctgctcgcctccgtcaaa

SEQ ID NO: 18063 - DNA, 69 bp, Homo sapiens
agctatacgttttcaaccagactcctttgccgggacccagcccgccaccctgctcgcctccgtcaaacc

SEQ ID NO: 18064 - DNA, 68 bp, Homo sapiens
tttcaaccagactcctttgccgggacccagcccgccaccctgctcgcctccgtcaaacccccggccaa

SEQ ID NO: 18065 - DNA, 74 bp, Homo sapiens
tcctttgccgggacccagcccgccaccctgctcgcctccgtcaaacccccggccaatgcagtgagcaccatgta

SEQ ID NO: 18066 - DNA, 75 bp, Homo sapiens
cccagcccgccaccctgctcgcctccgtcaaacccccggccaatgcagtgagcaccatgtagctcccttgattta

SEQ ID NO: 18067 - DNA, 73 bp, Homo sapiens
ccgccaccctgctcgcctccgtcaaacccccggccaatgcagtgagcaccatgtagctcccttgatttaaaaa

SEQ ID NO: 18068 - DNA, 71 bp, Homo sapiens
ataaaaaaaatattctaatgaatgtatctttctaaaggactgacgttcaatcaaatatctgaaaatactaa

SEQ ID NO: 18069 - DNA, 71 bp, Homo sapiens
attctaatgaatgtatctttctaaaggactgacgttcaatcaaatatctgaaaatactaaaggtcaaaacc

SEQ ID NO: 18070 - DNA, 73 bp, Homo sapiens
gaatgtatctttctaaaggactgacgttcaatcaaatatctgaaaatactaaaggtcaaaaccttgtcagatg

SEQ ID NO: 18071 - DNA, 72 bp, Homo sapiens
tctaaaggactgacgttcaatcaaatatctgaaaatactaaaggtcaaaaccttgtcagatgttaacttcta

SEQ ID NO: 18072 - DNA, 70 bp, Homo sapiens
ctgacgttcaatcaaatatctgaaaatactaaaggtcaaaaccttgtcagatgttaacttctaagttcgg

SEQ ID NO: 18073 - DNA, 67 bp, Homo sapiens
caaatatctgaaaatactaaaggtcaaaaccttgtcagatgttaacttctaagttcggtttgggatt

SEQ ID NO: 18074 - DNA, 65 bp, Homo sapiens
atctgaaaatactaaaggtcaaaaccttgtcagatgttaacttctaagttcggtttgggattttt

SEQ ID NO: 18075 - DNA, 67 bp, Homo sapiens
tttgtttttaaggaaaagcgggtcattgcaaagggctgggtgtaattttatgtttcatttccttcat

SEQ ID NO: 18076 - DNA, 69 bp, Homo sapiens
ttaaggaaaagcgggtcattgcaaagggctgggtgtaattttatgtttcatttccttcattttaaagca

SEQ ID NO: 18077 - DNA, 70 bp, Homo sapiens
gggtcattgcaaagggctgggtgtaattttatgtttcatttccttcattttaaagcaatacaaggttatg

SEQ ID NO: 18078 - DNA, 70 bp, Homo sapiens
aagggctgggtgtaattttatgtttcatttccttcattttaaagcaatacaaggttatggagcagatggt

SEQ ID NO: 18079 - DNA, 71 bp, Homo sapiens
gggtgtaattttatgtttcatttccttcattttaaagcaatacaaggttatggagcagatggttttgtgcc

SEQ ID NO: 18080 - DNA, 76 bp, Homo sapiens
tttcatttccttcattttaaagcaatacaaggttatggagcagatggttttgtgccgaatcatgaatactagtcaa

SEQ ID NO: 18081 - DNA, 77 bp, Homo sapiens
ccttcattttaaagcaatacaaggttatggagcagatggttttgtgccgaatcatgaatactagtcaagtcacacac

SEQ ID NO: 18082 - DNA, 78 bp, Homo sapiens
attttaaagcaatacaaggttatggagcagatggttttgtgccgaatcatgaatactagtcaagtcacacactctgga

SEQ ID NO: 18083 - DNA, 78 bp, Homo sapiens
tttaaagcaatacaaggttatggagcagatggttttgtgccgaatcatgaatactagtcaagtcacacactctggaaa

SEQ ID NO: 18084 - DNA, 77 bp, Homo sapiens
aaagcaatacaaggttatggagcagatggttttgtgccgaatcatgaatactagtcaagtcacacactctggaaact

SEQ ID NO: 18085 - DNA, 76 bp, Homo sapiens
aaggttatggagcagatggttttgtgccgaatcatgaatactagtcaagtcacacactctggaaacttgcaacttt

SEQ ID NO: 18086 - DNA, 77 bp, Homo sapiens
ttatggagcagatggttttgtgccgaatcatgaatactagtcaagtcacacactctggaaacttgcaactttttgtt

SEQ ID NO: 18087 - DNA, 78 bp, Homo sapiens
tatggagcagatggttttgtgccgaatcatgaatactagtcaagtcacacactctggaaacttgcaactttttgtttg

SEQ ID NO: 18088 - DNA, 75 bp, Homo sapiens
agcagatggttttgtgccgaatcatgaatactagtcaagtcacacactctggaaacttgcaactttttgtttgtt

SEQ ID NO: 18089 - DNA, 74 bp, Homo sapiens
ttgttttggttttcaaataaatataaatatgatatatataggaactaatatagtaatgcaccatgtaacaaagc

SEQ ID NO: 18090 - DNA, 77 bp, Homo sapiens
tttcaaataaatataaatatgatatatataggaactaatatagtaatgcaccatgtaacaaagcctagttcagtcca

SEQ ID NO: 18091 - DNA, 77 bp, Homo sapiens
atataaatatgatatatataggaactaatatagtaatgcaccatgtaacaaagcctagttcagtccatggcttttaa

SEQ ID NO: 18092 - DNA, 77 bp, Homo sapiens
atgatatatataggaactaatatagtaatgcaccatgtaacaaagcctagttcagtccatggcttttaattctctta

SEQ ID NO: 18093 - DNA, 75 bp, Homo sapiens
ggaactaatatagtaatgcaccatgtaacaaagcctagttcagtccatggcttttaattctcttaacactataga

SEQ ID NO: 18094 - DNA, 76 bp, Homo sapiens
tatagtaatgcaccatgtaacaaagcctagttcagtccatggcttttaattctcttaacactatagataaggattg

SEQ ID NO: 18095 - DNA, 73 bp, Homo sapiens
accatgtaacaaagcctagttcagtccatggcttttaattctcttaacactatagataaggattgtgttacag

SEQ ID NO: 18096 - DNA, 74 bp, Homo sapiens
acaaagcctagttcagtccatggcttttaattctcttaacactatagataaggattgtgttacagttgctagta

SEQ ID NO: 18097 - DNA, 76 bp, Homo sapiens
ttttaattctcttaacactatagataaggattgtgttacagttgctagtagcggcaggaagatgtcaggctcactt

SEQ ID NO: 18098 - DNA, 77 bp, Homo sapiens
aattctcttaacactatagataaggattgtgttacagttgctagtagcggcaggaagatgtcaggctcactttcctc

SEQ ID NO: 18099 - DNA, 79 bp, Homo sapiens
tcttaacactatagataaggattgtgttacagttgctagtagcggcaggaagatgtcaggctcactttcctctgattcc

SEQ ID NO: 18100 - DNA, 77 bp, Homo sapiens
actatagataaggattgtgttacagttgctagtagcggcaggaagatgtcaggctcactttcctctgattcccgaaa

SEQ ID NO: 18101 - DNA, 77 bp, Homo sapiens
atagataaggattgtgttacagttgctagtagcggcaggaagatgtcaggctcactttcctctgattcccgaaatgg

SEQ ID NO: 18102 - DNA, 75 bp, Homo sapiens
taaggattgtgttacagttgctagtagcggcaggaagatgtcaggctcactttcctctgattcccgaaatggggg

SEQ ID NO: 18103 - DNA, 75 bp, Homo sapiens
tgttacagttgctagtagcggcaggaagatgtcaggctcactttcctctgattcccgaaatggggggaacctcta

SEQ ID NO: 18104 - DNA, 74 bp, Homo sapiens
ttacagttgctagtagcggcaggaagatgtcaggctcactttcctctgattcccgaaatggggggaacctctaa

SEQ ID NO: 18105 - DNA, 72 bp, Homo sapiens
ctagtagcggcaggaagatgtcaggctcactttcctctgattcccgaaatggggggaacctctaaccataaa

SEQ ID NO: 18106 - DNA, 67 bp, Homo sapiens
actttcctctgattcccgaaatggggggaacctctaaccataaaggaatggtagaacagtccattcc

SEQ ID NO: 18107 - DNA, 69 bp, Homo sapiens
attcccgaaatggggggaacctctaaccataaaggaatggtagaacagtccattcctcggatcagagaa

SEQ ID NO: 18108 - DNA, 71 bp, Homo sapiens
aaatggggggaacctctaaccataaaggaatggtagaacagtccattcctcggatcagagaaaaatgcaga

SEQ ID NO: 18109 - DNA, 76 bp, Homo sapiens
tctaaccataaaggaatggtagaacagtccattcctcggatcagagaaaaatgcagacatggtgtcacctggattt

SEQ ID NO: 18110 - DNA, 74 bp, Homo sapiens
ccataaaggaatggtagaacagtccattcctcggatcagagaaaaatgcagacatggtgtcacctggatttttt

SEQ ID NO: 18111 - DNA, 78 bp, Homo sapiens
atggtagaacagtccattcctcggatcagagaaaaatgcagacatggtgtcacctggatttttttctgcccatgaatg

SEQ ID NO: 18112 - DNA, 78 bp, Homo sapiens
attcctcggatcagagaaaaatgcagacatggtgtcacctggatttttttctgcccatgaatgttgccagtcagtacc

SEQ ID NO: 18113 - DNA, 78 bp, Homo sapiens
atcagagaaaaatgcagacatggtgtcacctggatttttttctgcccatgaatgttgccagtcagtacctgtcctcct

SEQ ID NO: 18114 - DNA, 73 bp, Homo sapiens
atggtgtcacctggatttttttctgcccatgaatgttgccagtcagtacctgtcctccttgtttctctatttt

SEQ ID NO: 18115 - DNA, 73 bp, Homo sapiens
ggatttttttctgcccatgaatgttgccagtcagtacctgtcctccttgtttctctatttttggttatgaatg

SEQ ID NO: 18116 - DNA, 73 bp, Homo sapiens
tttttctgcccatgaatgttgccagtcagtacctgtcctccttgtttctctatttttggttatgaatgttggg

SEQ ID NO: 18117 - DNA, 71 bp, Homo sapiens
atgaatgttgccagtcagtacctgtcctccttgtttctctatttttggttatgaatgttggggttaccacc

SEQ ID NO: 18118 - DNA, 69 bp, Homo sapiens
agtcagtacctgtcctccttgtttctctatttttggttatgaatgttggggttaccacctgcatttagg

SEQ ID NO: 18119 - DNA, 68 bp, Homo sapiens
tgtcctccttgtttctctatttttggttatgaatgttggggttaccacctgcatttaggggaaaattg

SEQ ID NO: 18120 - DNA, 69 bp, Homo sapiens
tttctctatttttggttatgaatgttggggttaccacctgcatttaggggaaaattgtgttctgtgctt

SEQ ID NO: 18121 - DNA, 69 bp, Homo sapiens
tttttggttatgaatgttggggttaccacctgcatttaggggaaaattgtgttctgtgctttcctggta

SEQ ID NO: 18122 - DNA, 72 bp, Homo sapiens
tatgaatgttggggttaccacctgcatttaggggaaaattgtgttctgtgctttcctggtatcttgttccga

SEQ ID NO: 18123 - DNA, 70 bp, Homo sapiens
atttaggggaaaattgtgttctgtgctttcctggtatcttgttccgaggtactctagttctgtctttcaa

SEQ ID NO: 18124 - DNA, 70 bp, Homo sapiens
aaaattgtgttctgtgctttcctggtatcttgttccgaggtactctagttctgtctttcaaccaagaaaa

SEQ ID NO: 18125 - DNA, 72 bp, Homo sapiens
gtgttctgtgctttcctggtatcttgttccgaggtactctagttctgtctttcaaccaagaaaatagaattg

SEQ ID NO: 18126 - DNA, 70 bp, Homo sapiens
atcttgttccgaggtactctagttctgtctttcaaccaagaaaatagaattgtggtgtttcttttattga

SEQ ID NO: 18127 - DNA, 67 bp, Homo sapiens
agttctgtctttcaaccaagaaaatagaattgtggtgtttcttttattgaacttttaacagtctctt

SEQ ID NO: 18128 - DNA, 67 bp, Homo sapiens
ccaagaaaatagaattgtggtgtttcttttattgaacttttaacagtctctttagtaaatacaggta

SEQ ID NO: 18129 - DNA, 67 bp, Homo sapiens
agaattgtggtgtttcttttattgaacttttaacagtctctttagtaaatacaggtagttgaataat

SEQ ID NO: 18130 - DNA, 74 bp, Homo sapiens
tattgaacttttaacagtctctttagtaaatacaggtagttgaataattgtttcaagagctcaacagatgacaa

SEQ ID NO: 18131 - DNA, 74 bp, Homo sapiens
ttaacagtctctttagtaaatacaggtagttgaataattgtttcaagagctcaacagatgacaagcttcttttc

SEQ ID NO: 18132 - DNA, 74 bp, Homo sapiens
gtctctttagtaaatacaggtagttgaataattgtttcaagagctcaacagatgacaagcttcttttctagaaa

SEQ ID NO: 18133 - DNA, 74 bp, Homo sapiens
taaatacaggtagttgaataattgtttcaagagctcaacagatgacaagcttcttttctagaaataagacattt

SEQ ID NO: 18134 - DNA, 74 bp, Homo sapiens
tagttgaataattgtttcaagagctcaacagatgacaagcttcttttctagaaataagacattttttgacaact

SEQ ID NO: 18135 - DNA, 78 bp, Homo sapiens
ttcaagagctcaacagatgacaagcttcttttctagaaataagacattttttgacaactttatcatgtataacagatc

SEQ ID NO: 18136 - DNA, 77 bp, Homo sapiens
gagctcaacagatgacaagcttcttttctagaaataagacattttttgacaactttatcatgtataacagatctgtt

SEQ ID NO: 18137 - DNA, 72 bp, Homo sapiens
gatgacaagcttcttttctagaaataagacattttttgacaactttatcatgtataacagatctgttttttt

SEQ ID NO: 18138 - DNA, 71 bp, Homo sapiens
ttctagaaataagacattttttgacaactttatcatgtataacagatctgttttttttccttgtgttcttc

SEQ ID NO: 18139 - DNA, 71 bp, Homo sapiens
aagacattttttgacaactttatcatgtataacagatctgttttttttccttgtgttcttccaagcttctg

SEQ ID NO: 18140 - DNA, 72 bp, Homo sapiens
ttgacaactttatcatgtataacagatctgttttttttccttgtgttcttccaagcttctggttagagaaaa

SEQ ID NO: 18141 - DNA, 71 bp, Homo sapiens
actttatcatgtataacagatctgttttttttccttgtgttcttccaagcttctggttagagaaaaagaga

SEQ ID NO: 18142 - DNA, 68 bp, Homo sapiens
aaaaaaaaggaaaatgtgtctaaagtccatcagtgttaactccctgtgacagggatgaaggaaaatac

SEQ ID NO: 18143 - DNA, 70 bp, Homo sapiens
aaaggaaaatgtgtctaaagtccatcagtgttaactccctgtgacagggatgaaggaaaatactttaata

SEQ ID NO: 18144 - DNA, 70 bp, Homo sapiens
gtgtctaaagtccatcagtgttaactccctgtgacagggatgaaggaaaatactttaatagttcaaaaaa

SEQ ID NO: 18145 - DNA, 73 bp, Homo sapiens
tccatcagtgttaactccctgtgacagggatgaaggaaaatactttaatagttcaaaaaataataatgctgaa

SEQ ID NO: 18146 - DNA, 73 bp, Homo sapiens
gtgacagggatgaaggaaaatactttaatagttcaaaaaataataatgctgaaagctctctacgaaagactga

SEQ ID NO: 18147 - DNA, 70 bp, Homo sapiens
ggaaaatactttaatagttcaaaaaataataatgctgaaagctctctacgaaagactgaatgtaaaagta

SEQ ID NO: 18148 - DNA, 72 bp, Homo sapiens
taatagttcaaaaaataataatgctgaaagctctctacgaaagactgaatgtaaaagtaaaaagtgtacata

SEQ ID NO: 18149 - DNA, 70 bp, Homo sapiens
aaaaataataatgctgaaagctctctacgaaagactgaatgtaaaagtaaaaagtgtacatagttgtaaa

SEQ ID NO: 18150 - DNA, 69 bp, Homo sapiens
atgctgaaagctctctacgaaagactgaatgtaaaagtaaaaagtgtacatagttgtaaaaaaaaggag

SEQ ID NO: 18151 - DNA, 66 bp, Homo sapiens
gaaagctctctacgaaagactgaatgtaaaagtaaaaagtgtacatagttgtaaaaaaaaggagtt

SEQ ID NO: 18152 - DNA, 64 bp, Homo sapiens
cgaaagactgaatgtaaaagtaaaaagtgtacatagttgtaaaaaaaaggagtttttaaacatg

SEQ ID NO: 18153 - DNA, 63 bp, Homo sapiens
tgaatgtaaaagtaaaaagtgtacatagttgtaaaaaaaaggagtttttaaacatgtttattt

SEQ ID NO: 18154 - DNA, 64 bp, Homo sapiens
agtaaaaagtgtacatagttgtaaaaaaaaggagtttttaaacatgtttattttctatgcactt

SEQ ID NO: 18155 - DNA, 63 bp, Homo sapiens
gtacatagttgtaaaaaaaaggagtttttaaacatgtttattttctatgcacttttttttatt

SEQ ID NO: 18156 - DNA, 63 bp, Homo sapiens
aaaaaggagtttttaaacatgtttattttctatgcacttttttttatttaagtgatagtttaa

SEQ ID NO: 18157 - DNA, 68 bp, Homo sapiens
ttttaaacatgtttattttctatgcacttttttttatttaagtgatagtttaattaataaacatgtca

SEQ ID NO: 18158 - DNA, 68 bp, Homo sapiens
gtttattttctatgcacttttttttatttaagtgatagtttaattaataaacatgtcaagtttattgc

SEQ ID NO: 18159 - DNA, 73 bp, Homo sapiens
tatgcacttttttttatttaagtgatagtttaattaataaacatgtcaagtttattgctgcacatggttaagc

SEQ ID NO: 18160 - DNA, 67 bp, Homo sapiens
actcccggcgccgcccactcccctccccacggccgctcctccctccgcccggatagccggcggcggc

SEQ ID NO: 18161 - DNA, 74 bp, Homo sapiens
ggcggcggcggcggccgggagaggcccctccttcacgccctgcttctctccctcgctcgcagtcgagccgagcc

SEQ ID NO: 18162 - DNA, 73 bp, Homo sapiens
gcggccgggagaggcccctccttcacgccctgcttctctccctcgctcgcagtcgagccgagccggcggaccc

SEQ ID NO: 18163 - DNA, 74 bp, Homo sapiens
agaggcccctccttcacgccctgcttctctccctcgctcgcagtcgagccgagccggcggacccgcctgggctc

SEQ ID NO: 18164 - DNA, 73 bp, Homo sapiens
ccctccttcacgccctgcttctctccctcgctcgcagtcgagccgagccggcggacccgcctgggctccgacc

SEQ ID NO: 18165 - DNA, 76 bp, Homo sapiens
tgcttctctccctcgctcgcagtcgagccgagccggcggacccgcctgggctccgaccctgcccaggccatggccg

SEQ ID NO: 18166 - DNA, 75 bp, Homo sapiens
cctcgctcgcagtcgagccgagccggcggacccgcctgggctccgaccctgcccaggccatggccggcaacgtga

SEQ ID NO: 18167 - DNA, 75 bp, Homo sapiens
tcgcagtcgagccgagccggcggacccgcctgggctccgaccctgcccaggccatggccggcaacgtgaagaaga

SEQ ID NO: 18168 - DNA, 73 bp, Homo sapiens
agccgagccggcggacccgcctgggctccgaccctgcccaggccatggccggcaacgtgaagaagagctctgg

SEQ ID NO: 18169 - DNA, 70 bp, Homo sapiens
cggacccgcctgggctccgaccctgcccaggccatggccggcaacgtgaagaagagctctggggccgggg

SEQ ID NO: 18170 - DNA, 74 bp, Homo sapiens
ctgggctccgaccctgcccaggccatggccggcaacgtgaagaagagctctggggccgggggcggcagcggctc

SEQ ID NO: 18171 - DNA, 72 bp, Homo sapiens
tgcccaggccatggccggcaacgtgaagaagagctctggggccgggggcggcagcggctccgggggctcggg

SEQ ID NO: 18172 - DNA, 68 bp, Homo sapiens
atggccggcaacgtgaagaagagctctggggccgggggcggcagcggctccgggggctcgggttcggg

SEQ ID NO: 18173 - DNA, 68 bp, Homo sapiens
aacgtgaagaagagctctggggccgggggcggcagcggctccgggggctcgggttcgggtggcctgat

SEQ ID NO: 18174 - DNA, 71 bp, Homo sapiens
aagagctctggggccgggggcggcagcggctccgggggctcgggttcgggtggcctgattgggctcatgaa

SEQ ID NO: 18175 - DNA, 70 bp, Homo sapiens
ccgggggcggcagcggctccgggggctcgggttcgggtggcctgattgggctcatgaaggacgccttcca

SEQ ID NO: 18176 - DNA, 73 bp, Homo sapiens
cagcggctccgggggctcgggttcgggtggcctgattgggctcatgaaggacgccttccagccgcaccaccac

SEQ ID NO: 18177 - DNA, 72 bp, Homo sapiens
ctccgggggctcgggttcgggtggcctgattgggctcatgaaggacgccttccagccgcaccaccaccacca

SEQ ID NO: 18178 - DNA, 72 bp, Homo sapiens
accaccaccacctcagcccccacccgccggggacggtggacaagaagatggtggagaagtgctggaagctca

SEQ ID NO: 18179 - DNA, 74 bp, Homo sapiens
ctcagcccccacccgccggggacggtggacaagaagatggtggagaagtgctggaagctcatggacaaggtgaa

SEQ ID NO: 18180 - DNA, 72 bp, Homo sapiens
ccacccgccggggacggtggacaagaagatggtggagaagtgctggaagctcatggacaaggtgaaaggccg

SEQ ID NO: 18181 - DNA, 80 bp, Homo sapiens
gacggtggacaagaagatggtggagaagtgctggaagctcatggacaaggtgaaaggccggctgagcgcccgctgttgca

SEQ ID NO: 18182 - DNA, 78 bp, Homo sapiens
acaagaagatggtggagaagtgctggaagctcatggacaaggtgaaaggccggctgagcgcccgctgttgcagggtgg

SEQ ID NO: 18183 - DNA, 71 bp, Homo sapiens
tccttaaaattctccaagtaatagcccttctttttcatttgttgcaggtggtgcggttgtgtcagaaccca

SEQ ID NO: 18184 - DNA, 71 bp, Homo sapiens
aaattctccaagtaatagcccttctttttcatttgttgcaggtggtgcggttgtgtcagaacccaaagctg

SEQ ID NO: 18185 - DNA, 73 bp, Homo sapiens
gtaatagcccttctttttcatttgttgcaggtggtgcggttgtgtcagaacccaaagctggcgctaaagaata

SEQ ID NO: 18186 - DNA, 74 bp, Homo sapiens
ttttcatttgttgcaggtggtgcggttgtgtcagaacccaaagctggcgctaaagaatagcccaccttatatct

SEQ ID NO: 18187 - DNA, 74 bp, Homo sapiens
atttgttgcaggtggtgcggttgtgtcagaacccaaagctggcgctaaagaatagcccaccttatatcttagac

SEQ ID NO: 18188 - DNA, 76 bp, Homo sapiens
tgcggttgtgtcagaacccaaagctggcgctaaagaatagcccaccttatatcttagacctgctaccagataccta

SEQ ID NO: 18189 - DNA, 77 bp, Homo sapiens
ttgtgtcagaacccaaagctggcgctaaagaatagcccaccttatatcttagacctgctaccagatacctaccagca

SEQ ID NO: 18190 - DNA, 76 bp, Homo sapiens
aagctggcgctaaagaatagcccaccttatatcttagacctgctaccagatacctaccagcatctccgtactatct

SEQ ID NO: 18191 - DNA, 79 bp, Homo sapiens
taaagaatagcccaccttatatcttagacctgctaccagatacctaccagcatctccgtactatcttgtcaagatatga

SEQ ID NO: 18192 - DNA, 77 bp, Homo sapiens
aatagcccaccttatatcttagacctgctaccagatacctaccagcatctccgtactatcttgtcaagatatgaggg

SEQ ID NO: 18193 - DNA, 80 bp, Homo sapiens
cttatatcttagacctgctaccagatacctaccagcatctccgtactatcttgtcaagatatgaggggaagatggagaca

SEQ ID NO: 18194 - DNA, 78 bp, Homo sapiens
acctgctaccagatacctaccagcatctccgtactatcttgtcaagatatgaggggaagatggagacacttggagaaa

SEQ ID NO: 18195 - DNA, 76 bp, Homo sapiens
atacctaccagcatctccgtactatcttgtcaagatatgaggggaagatggagacacttggagaaaatgagtattt

SEQ ID NO: 18196 - DNA, 74 bp, Homo sapiens
catctccgtactatcttgtcaagatatgaggggaagatggagacacttggagaaaatgagtattttagggtgtt

SEQ ID NO: 18197 - DNA, 74 bp, Homo sapiens
aagatatgaggggaagatggagacacttggagaaaatgagtattttagggtgtttatggagaatttgatgaaga

SEQ ID NO: 18198 - DNA, 71 bp, Homo sapiens
gggaagatggagacacttggagaaaatgagtattttagggtgtttatggagaatttgatgaagaaaactaa

SEQ ID NO: 18199 - DNA, 71 bp, Homo sapiens
ggagacacttggagaaaatgagtattttagggtgtttatggagaatttgatgaagaaaactaagcaaacca

SEQ ID NO: 18200 - DNA, 70 bp, Homo sapiens
ggagaaaatgagtattttagggtgtttatggagaatttgatgaagaaaactaagcaaaccataagcctct

SEQ ID NO: 18201 - DNA, 70 bp, Homo sapiens
tattttagggtgtttatggagaatttgatgaagaaaactaagcaaaccataagcctcttcaaggagggaa

SEQ ID NO: 18202 - DNA, 70 bp, Homo sapiens
tagggtgtttatggagaatttgatgaagaaaactaagcaaaccataagcctcttcaaggagggaaaagaa

SEQ ID NO: 18203 - DNA, 72 bp, Homo sapiens
gaatttgatgaagaaaactaagcaaaccataagcctcttcaaggagggaaaagaaagaatgtatgaggagaa

SEQ ID NO: 18204 - DNA, 73 bp, Homo sapiens
atgaagaaaactaagcaaaccataagcctcttcaaggagggaaaagaaagaatgtatgaggagaattctcagc

SEQ ID NO: 18205 - DNA, 72 bp, Homo sapiens
actaagcaaaccataagcctcttcaaggagggaaaagaaagaatgtatgaggagaattctcagcctaggtaa

SEQ ID NO: 18206 - DNA, 73 bp, Homo sapiens
ataagcctcttcaaggagggaaaagaaagaatgtatgaggagaattctcagcctaggtaatggagaaatacta

SEQ ID NO: 18207 - DNA, 71 bp, Homo sapiens
aaggagggaaaagaaagaatgtatgaggagaattctcagcctaggtaatggagaaatactacacaaataat

SEQ ID NO: 18208 - DNA, 69 bp, Homo sapiens
aaaaataattttatgtgtttaattattgcattctgatcatttgtaggcgaaacctaaccaaactgtccc

SEQ ID NO: 18209 - DNA, 74 bp, Homo sapiens
aattttatgtgtttaattattgcattctgatcatttgtaggcgaaacctaaccaaactgtccctcatcttcagc

SEQ ID NO: 18210 - DNA, 80 bp, Homo sapiens
taattattgcattctgatcatttgtaggcgaaacctaaccaaactgtccctcatcttcagccacatgctggcagaactaa

SEQ ID NO: 18211 - DNA, 76 bp, Homo sapiens
attctgatcatttgtaggcgaaacctaaccaaactgtccctcatcttcagccacatgctggcagaactaaaaggaa

SEQ ID NO: 18212 - DNA, 74 bp, Homo sapiens
atcatttgtaggcgaaacctaaccaaactgtccctcatcttcagccacatgctggcagaactaaaaggaatctt

SEQ ID NO: 18213 - DNA, 73 bp, Homo sapiens
aacctaaccaaactgtccctcatcttcagccacatgctggcagaactaaaaggaatctttccaagtggactct

SEQ ID NO: 18214 - DNA, 74 bp, Homo sapiens
aaccaaactgtccctcatcttcagccacatgctggcagaactaaaaggaatctttccaagtggactctttcagg

SEQ ID NO: 18215 - DNA, 78 bp, Homo sapiens
tcatcttcagccacatgctggcagaactaaaaggaatctttccaagtggactctttcagggagacacatttcggatta

SEQ ID NO: 18216 - DNA, 73 bp, Homo sapiens
ccacatgctggcagaactaaaaggaatctttccaagtggactctttcagggagacacatttcggattactaaa

SEQ ID NO: 18217 - DNA, 74 bp, Homo sapiens
cagaactaaaaggaatctttccaagtggactctttcagggagacacatttcggattactaaagcagatgctgcg

SEQ ID NO: 18218 - DNA, 72 bp, Homo sapiens
aaaggaatctttccaagtggactctttcagggagacacatttcggattactaaagcagatgctgcggaattt

SEQ ID NO: 18219 - DNA, 74 bp, Homo sapiens
tctttccaagtggactctttcagggagacacatttcggattactaaagcagatgctgcggaattttggagaaaa

SEQ ID NO: 18220 - DNA, 73 bp, Homo sapiens
tggactctttcagggagacacatttcggattactaaagcagatgctgcggaattttggagaaaagcttttggg

SEQ ID NO: 18221 - DNA, 70 bp, Homo sapiens
agacacatttcggattactaaagcagatgctgcggaattttggagaaaagcttttggggaaaagtaagtc

SEQ ID NO: 18222 - DNA, 71 bp, Homo sapiens
tttcggattactaaagcagatgctgcggaattttggagaaaagcttttggggaaaagtaagtctcagaata

SEQ ID NO: 18223 - DNA, 73 bp, Homo sapiens
tactaaagcagatgctgcggaattttggagaaaagcttttggggaaaagtaagtctcagaataatgaatttga

SEQ ID NO: 18224 - DNA, 72 bp, Homo sapiens
gatgctgcggaattttggagaaaagcttttggggaaaagtaagtctcagaataatgaatttgaactatgaaa

SEQ ID NO: 18225 - DNA, 71 bp, Homo sapiens
ttatctctgttatttcactttatgcctcctctccaccccctccccaggacaatagtcccttggaagagctt

SEQ ID NO: 18226 - DNA, 71 bp, Homo sapiens
tgttatttcactttatgcctcctctccaccccctccccaggacaatagtcccttggaagagctttcgacag

SEQ ID NO: 18227 - DNA, 73 bp, Homo sapiens
tttatgcctcctctccaccccctccccaggacaatagtcccttggaagagctttcgacaggctctacatgaag

SEQ ID NO: 18228 - DNA, 76 bp, Homo sapiens
tccaccccctccccaggacaatagtcccttggaagagctttcgacaggctctacatgaagtgcatcccatcagttc

SEQ ID NO: 18229 - DNA, 78 bp, Homo sapiens
cctccccaggacaatagtcccttggaagagctttcgacaggctctacatgaagtgcatcccatcagttctgggctgga

SEQ ID NO: 18230 - DNA, 81 bp, Homo sapiens
aatagtcccttggaagagctttcgacaggctctacatgaagtgcatcccatcagttctgggctggaggccatggctctgaa

SEQ ID NO: 18231 - DNA, 84 bp, Homo sapiens
ttggaagagctttcgacaggctctacatgaagtgcatcccatcagttctgggctggaggccatggctctgaaatccactattga

SEQ ID NO: 18232 - DNA, 86 bp, Homo sapiens
tttcgacaggctctacatgaagtgcatcccatcagttctgggctggaggccatggctctgaaatccactattgatctgacctgcaa

SEQ ID NO: 18233 - DNA, 86 bp, Homo sapiens
ctctacatgaagtgcatcccatcagttctgggctggaggccatggctctgaaatccactattgatctgacctgcaatgattatatt

SEQ ID NO: 18234 - DNA, 82 bp, Homo sapiens
tgcatcccatcagttctgggctggaggccatggctctgaaatccactattgatctgacctgcaatgattatatttcggtttt

SEQ ID NO: 18235 - DNA, 79 bp, Homo sapiens
tcagttctgggctggaggccatggctctgaaatccactattgatctgacctgcaatgattatatttcggtttttgaatt

SEQ ID NO: 18236 - DNA, 79 bp, Homo sapiens
ctggaggccatggctctgaaatccactattgatctgacctgcaatgattatatttcggtttttgaatttgacatcttta

SEQ ID NO: 18237 - DNA, 76 bp, Homo sapiens
atggctctgaaatccactattgatctgacctgcaatgattatatttcggtttttgaatttgacatctttacccgac

SEQ ID NO: 18238 - DNA, 76 bp, Homo sapiens
tgaaatccactattgatctgacctgcaatgattatatttcggtttttgaatttgacatctttacccgactctttca

SEQ ID NO: 18239 - DNA, 74 bp, Homo sapiens
ctattgatctgacctgcaatgattatatttcggtttttgaatttgacatctttacccgactctttcaggtagga

SEQ ID NO: 18240 - DNA, 70 bp, Homo sapiens
cctgcaatgattatatttcggtttttgaatttgacatctttacccgactctttcaggtaggacactaaaa

SEQ ID NO: 18241 - DNA, 66 bp, Homo sapiens
atatttcggtttttgaatttgacatctttacccgactctttcaggtaggacactaaaaaagttgac

SEQ ID NO: 18242 - DNA, 78 bp, Homo sapiens
ttggttgtacatctgacctgaatagtctgtgattgatcttgtttctttagccctggtcctctttgctcaggaattgga

SEQ ID NO: 18243 - DNA, 79 bp, Homo sapiens
tgacctgaatagtctgtgattgatcttgtttctttagccctggtcctctttgctcaggaattggaacagccttgctgta

SEQ ID NO: 18244 - DNA, 77 bp, Homo sapiens
aatagtctgtgattgatcttgtttctttagccctggtcctctttgctcaggaattggaacagccttgctgtaactca

SEQ ID NO: 18245 - DNA, 77 bp, Homo sapiens
attgatcttgtttctttagccctggtcctctttgctcaggaattggaacagccttgctgtaactcatcctggctaca

SEQ ID NO: 18246 - DNA, 75 bp, Homo sapiens
ttctttagccctggtcctctttgctcaggaattggaacagccttgctgtaactcatcctggctacatggcttttt

SEQ ID NO: 18247 - DNA, 78 bp, Homo sapiens
tggtcctctttgctcaggaattggaacagccttgctgtaactcatcctggctacatggcttttttgacgtatgacgaa

SEQ ID NO: 18248 - DNA, 78 bp, Homo sapiens
tctttgctcaggaattggaacagccttgctgtaactcatcctggctacatggcttttttgacgtatgacgaagtgaaa

SEQ ID NO: 18249 - DNA, 77 bp, Homo sapiens
aattggaacagccttgctgtaactcatcctggctacatggcttttttgacgtatgacgaagtgaaagctcggctcca

SEQ ID NO: 18250 - DNA, 79 bp, Homo sapiens
ttgctgtaactcatcctggctacatggcttttttgacgtatgacgaagtgaaagctcggctccagaaattcattcacaa

SEQ ID NO: 18251 - DNA, 76 bp, Homo sapiens
gtaactcatcctggctacatggcttttttgacgtatgacgaagtgaaagctcggctccagaaattcattcacaaac

SEQ ID NO: 18252 - DNA, 77 bp, Homo sapiens
tacatggcttttttgacgtatgacgaagtgaaagctcggctccagaaattcattcacaaacctggcaggtcagttca

SEQ ID NO: 18253 - DNA, 77 bp, Homo sapiens
tttttgacgtatgacgaagtgaaagctcggctccagaaattcattcacaaacctggcaggtcagttcaatgacgcaa

SEQ ID NO: 18254 - DNA, 78 bp, Homo sapiens
tatgacgaagtgaaagctcggctccagaaattcattcacaaacctggcaggtcagttcaatgacgcaaagagatttat

SEQ ID NO: 18255 - DNA, 76 bp, Homo sapiens
aagtgaaagctcggctccagaaattcattcacaaacctggcaggtcagttcaatgacgcaaagagatttattcttc

SEQ ID NO: 18256 - DNA, 77 bp, Homo sapiens
accgtaataccagcataatctactaaagcttctgtttatgtctgttcatagttatatcttccggctgagctgtactc

SEQ ID NO: 18257 - DNA, 77 bp, Homo sapiens
ataatctactaaagcttctgtttatgtctgttcatagttatatcttccggctgagctgtactcgtctgggtcagtgg

SEQ ID NO: 18258 - DNA, 78 bp, Homo sapiens
tactaaagcttctgtttatgtctgttcatagttatatcttccggctgagctgtactcgtctgggtcagtgggctattg

SEQ ID NO: 18259 - DNA, 80 bp, Homo sapiens
tttatgtctgttcatagttatatcttccggctgagctgtactcgtctgggtcagtgggctattgggtatgttactgctga

SEQ ID NO: 18260 - DNA, 80 bp, Homo sapiens
tctgttcatagttatatcttccggctgagctgtactcgtctgggtcagtgggctattgggtatgttactgctgatgggaa

SEQ ID NO: 18261 - DNA, 79 bp, Homo sapiens
gttatatcttccggctgagctgtactcgtctgggtcagtgggctattgggtatgttactgctgatgggaacattctcca

SEQ ID NO: 18262 - DNA, 81 bp, Homo sapiens
tgagctgtactcgtctgggtcagtgggctattgggtatgttactgctgatgggaacattctccagacaatccctcacaata

SEQ ID NO: 18263 - DNA, 78 bp, Homo sapiens
tgtactcgtctgggtcagtgggctattgggtatgttactgctgatgggaacattctccagacaatccctcacaataaa

SEQ ID NO: 18264 - DNA, 77 bp, Homo sapiens
gtcagtgggctattgggtatgttactgctgatgggaacattctccagacaatccctcacaataaacctctcttccaa

SEQ ID NO: 18265 - DNA, 80 bp, Homo sapiens
tattgggtatgttactgctgatgggaacattctccagacaatccctcacaataaacctctcttccaagcactgattgatg

SEQ ID NO: 18266 - DNA, 81 bp, Homo sapiens
tatgttactgctgatgggaacattctccagacaatccctcacaataaacctctcttccaagcactgattgatggcttcagg

SEQ ID NO: 18267 - DNA, 77 bp, Homo sapiens
atgggaacattctccagacaatccctcacaataaacctctcttccaagcactgattgatggcttcagggaaggcttg

SEQ ID NO: 18268 - DNA, 78 bp, Homo sapiens
ttctccagacaatccctcacaataaacctctcttccaagcactgattgatggcttcagggaaggcttgtgagtaccta

SEQ ID NO: 18269 - DNA, 78 bp, Homo sapiens
acaatccctcacaataaacctctcttccaagcactgattgatggcttcagggaaggcttgtgagtacctactgcatac

SEQ ID NO: 18270 - DNA, 79 bp, Homo sapiens
acaataaacctctcttccaagcactgattgatggcttcagggaaggcttgtgagtacctactgcataccatctgttaga

SEQ ID NO: 18271 - DNA, 69 bp, Homo sapiens
ttagcaagcactggcaaattggcttaaataaaacccagggttggttactctttacagctatttgtttcc

SEQ ID NO: 18272 - DNA, 67 bp, Homo sapiens
caaattggcttaaataaaacccagggttggttactctttacagctatttgtttcctgatggacgaaa

SEQ ID NO: 18273 - DNA, 70 bp, Homo sapiens
ttaaataaaacccagggttggttactctttacagctatttgtttcctgatggacgaaatcagaatcctga

SEQ ID NO: 18274 - DNA, 77 bp, Homo sapiens
cagggttggttactctttacagctatttgtttcctgatggacgaaatcagaatcctgatctgactggcttatgtgaa

SEQ ID NO: 18275 - DNA, 77 bp, Homo sapiens
ttggttactctttacagctatttgtttcctgatggacgaaatcagaatcctgatctgactggcttatgtgaaccaac

SEQ ID NO: 18276 - DNA, 79 bp, Homo sapiens
agctatttgtttcctgatggacgaaatcagaatcctgatctgactggcttatgtgaaccaactccccaagaccatatca

SEQ ID NO: 18277 - DNA, 77 bp, Homo sapiens
tttgtttcctgatggacgaaatcagaatcctgatctgactggcttatgtgaaccaactccccaagaccatatcaaag

SEQ ID NO: 18278 - DNA, 78 bp, Homo sapiens
atggacgaaatcagaatcctgatctgactggcttatgtgaaccaactccccaagaccatatcaaagtgacccaggtga

SEQ ID NO: 18279 - DNA, 74 bp, Homo sapiens
agaatcctgatctgactggcttatgtgaaccaactccccaagaccatatcaaagtgacccaggtgagttttgtt

SEQ ID NO: 18280 - DNA, 76 bp, Homo sapiens
atctgactggcttatgtgaaccaactccccaagaccatatcaaagtgacccaggtgagttttgtttcacatgataa

SEQ ID NO: 18281 - DNA, 76 bp, Homo sapiens
ttatgtgaaccaactccccaagaccatatcaaagtgacccaggtgagttttgtttcacatgataaccatatcactg

SEQ ID NO: 18282 - DNA, 75 bp, Homo sapiens
aaccaactccccaagaccatatcaaagtgacccaggtgagttttgtttcacatgataaccatatcactggacaca

SEQ ID NO: 18283 - DNA, 72 bp, Homo sapiens
tttaattttttttaatcaaaggaacaatatgaattatactgtgagatgggctccacattccaactatgtaaa

SEQ ID NO: 18284 - DNA, 79 bp, Homo sapiens
tttaatcaaaggaacaatatgaattatactgtgagatgggctccacattccaactatgtaaaatatgtgctgaaaatga

SEQ ID NO: 18285 - DNA, 78 bp, Homo sapiens
aaaggaacaatatgaattatactgtgagatgggctccacattccaactatgtaaaatatgtgctgaaaatgataagga

SEQ ID NO: 18286 - DNA, 81 bp, Homo sapiens
atatgaattatactgtgagatgggctccacattccaactatgtaaaatatgtgctgaaaatgataaggatgtaaagattga

SEQ ID NO: 18287 - DNA, 80 bp, Homo sapiens
atactgtgagatgggctccacattccaactatgtaaaatatgtgctgaaaatgataaggatgtaaagattgagccctgtg

SEQ ID NO: 18288 - DNA, 79 bp, Homo sapiens
atgggctccacattccaactatgtaaaatatgtgctgaaaatgataaggatgtaaagattgagccctgtggacacctca

SEQ ID NO: 18289 - DNA, 82 bp, Homo sapiens
caactatgtaaaatatgtgctgaaaatgataaggatgtaaagattgagccctgtggacacctcatgtgcacatcctgtctta

SEQ ID NO: 18290 - DNA, 82 bp, Homo sapiens
atgtaaaatatgtgctgaaaatgataaggatgtaaagattgagccctgtggacacctcatgtgcacatcctgtcttacatcc

SEQ ID NO: 18291 - DNA, 82 bp, Homo sapiens
tgaaaatgataaggatgtaaagattgagccctgtggacacctcatgtgcacatcctgtcttacatcctggcaggtacggatc

SEQ ID NO: 18292 - DNA, 80 bp, Homo sapiens
ataaggatgtaaagattgagccctgtggacacctcatgtgcacatcctgtcttacatcctggcaggtacggatctaaaca

SEQ ID NO: 18293 - DNA, 79 bp, Homo sapiens
taaagattgagccctgtggacacctcatgtgcacatcctgtcttacatcctggcaggtacggatctaaacagcgacttt

SEQ ID NO: 18294 - DNA, 80 bp, Homo sapiens
ctgtggacacctcatgtgcacatcctgtcttacatcctggcaggtacggatctaaacagcgacttttttcagctatgtaa

SEQ ID NO: 18295 - DNA, 76 bp, Homo sapiens
attttaagtattttcagatgcatctgttactatcttttgcttcttctgcaggaatcagaaggtcagggctgtcctt

SEQ ID NO: 18296 - DNA, 80 bp, Homo sapiens
agatgcatctgttactatcttttgcttcttctgcaggaatcagaaggtcagggctgtcctttctgccgatgtgaaattaa

SEQ ID NO: 18297 - DNA, 76 bp, Homo sapiens
atctgttactatcttttgcttcttctgcaggaatcagaaggtcagggctgtcctttctgccgatgtgaaattaaag

SEQ ID NO: 18298 - DNA, 75 bp, Homo sapiens
atcttttgcttcttctgcaggaatcagaaggtcagggctgtcctttctgccgatgtgaaattaaaggtactgaac

SEQ ID NO: 18299 - DNA, 76 bp, Homo sapiens
ttctgcaggaatcagaaggtcagggctgtcctttctgccgatgtgaaattaaaggtactgaacccatcgtggtaga

SEQ ID NO: 18300 - DNA, 72 bp, Homo sapiens
atcagaaggtcagggctgtcctttctgccgatgtgaaattaaaggtactgaacccatcgtggtagatccgtt

SEQ ID NO: 18301 - DNA, 72 bp, Homo sapiens
agggctgtcctttctgccgatgtgaaattaaaggtactgaacccatcgtggtagatccgtttgatcctagag

SEQ ID NO: 18302 - DNA, 72 bp, Homo sapiens
gtcctttctgccgatgtgaaattaaaggtactgaacccatcgtggtagatccgtttgatcctagagggagtg

SEQ ID NO: 18303 - DNA, 74 bp, Homo sapiens
gtgaaattaaaggtactgaacccatcgtggtagatccgtttgatcctagagggagtggcagcctgttgaggcaa

SEQ ID NO: 18304 - DNA, 75 bp, Homo sapiens
attaaaggtactgaacccatcgtggtagatccgtttgatcctagagggagtggcagcctgttgaggcaaggagca

SEQ ID NO: 18305 - DNA, 76 bp, Homo sapiens
aacccatcgtggtagatccgtttgatcctagagggagtggcagcctgttgaggcaaggagcagagggagctccctc

SEQ ID NO: 18306 - DNA, 79 bp, Homo sapiens
tagatccgtttgatcctagagggagtggcagcctgttgaggcaaggagcagagggagctccctccccaaattatgatga

SEQ ID NO: 18307 - DNA, 80 bp, Homo sapiens
ccgtttgatcctagagggagtggcagcctgttgaggcaaggagcagagggagctccctccccaaattatgatgatgatga

SEQ ID NO: 18308 - DNA, 86 bp, Homo sapiens
atgatgatgatgaacgagctgatgatactctcttcatgatgaaggaattggctggtgccaaggtaagatggcagtttaggagactg

SEQ ID NO: 18309 - DNA, 80 bp, Homo sapiens
aacgagctgatgatactctcttcatgatgaaggaattggctggtgccaaggtaagatggcagtttaggagactggcaaaa

SEQ ID NO: 18310 - DNA, 81 bp, Homo sapiens
atgatactctcttcatgatgaaggaattggctggtgccaaggtaagatggcagtttaggagactggcaaaatccattgtga

SEQ ID NO: 18311 - DNA, 63 bp, Homo sapiens
atttccccaaacgaaagtaatctgttaaattttttatgtaccctaggtggaacggccgccttc

SEQ ID NO: 18312 - DNA, 66 bp, Homo sapiens
aaacgaaagtaatctgttaaattttttatgtaccctaggtggaacggccgccttctccattctcca

SEQ ID NO: 18313 - DNA, 69 bp, Homo sapiens
agtaatctgttaaattttttatgtaccctaggtggaacggccgccttctccattctccatggccccaca

SEQ ID NO: 18314 - DNA, 67 bp, Homo sapiens
aaattttttatgtaccctaggtggaacggccgccttctccattctccatggccccacaagcttccct

SEQ ID NO: 18315 - DNA, 69 bp, Homo sapiens
atgtaccctaggtggaacggccgccttctccattctccatggccccacaagcttcccttcccccggtgc

SEQ ID NO: 18316 - DNA, 71 bp, Homo sapiens
gtggaacggccgccttctccattctccatggccccacaagcttcccttcccccggtgccaccacgacttga

SEQ ID NO: 18317 - DNA, 74 bp, Homo sapiens
ttctccattctccatggccccacaagcttcccttcccccggtgccaccacgacttgaccttctgccgcagcgag

SEQ ID NO: 18318 - DNA, 74 bp, Homo sapiens
tccatggccccacaagcttcccttcccccggtgccaccacgacttgaccttctgccgcagcgagtatgtgttcc

SEQ ID NO: 18319 - DNA, 74 bp, Homo sapiens
cacaagcttcccttcccccggtgccaccacgacttgaccttctgccgcagcgagtatgtgttccctcaagtgct

SEQ ID NO: 18320 - DNA, 75 bp, Homo sapiens
ttcccttcccccggtgccaccacgacttgaccttctgccgcagcgagtatgtgttccctcaagtgcttctgctct

SEQ ID NO: 18321 - DNA, 79 bp, Homo sapiens
cggtgccaccacgacttgaccttctgccgcagcgagtatgtgttccctcaagtgcttctgctcttggaactgcttctaa

SEQ ID NO: 18322 - DNA, 78 bp, Homo sapiens
gacttgaccttctgccgcagcgagtatgtgttccctcaagtgcttctgctcttggaactgcttctaaggtaaagcatt

SEQ ID NO: 18323 - DNA, 78 bp, Homo sapiens
cttctgccgcagcgagtatgtgttccctcaagtgcttctgctcttggaactgcttctaaggtaaagcattttccatta

SEQ ID NO: 18324 - DNA, 75 bp, Homo sapiens
cgagtatgtgttccctcaagtgcttctgctcttggaactgcttctaaggtaaagcattttccattactgcagttt

SEQ ID NO: 18325 - DNA, 74 bp, Homo sapiens
ttccctcaagtgcttctgctcttggaactgcttctaaggtaaagcattttccattactgcagtttttggattct

SEQ ID NO: 18326 - DNA, 75 bp, Homo sapiens
tgtactagtgggtttttactgatttgctttcaccctgcttccacaggctgcttctggctcccttcataaagacaa

SEQ ID NO: 18327 - DNA, 77 bp, Homo sapiens
ttccacaggctgcttctggctcccttcataaagacaaaccattgccagtacctcccacacttcgagatcttccacca

SEQ ID NO: 18328 - DNA, 73 bp, Homo sapiens
cttctggctcccttcataaagacaaaccattgccagtacctcccacacttcgagatcttccaccaccaccgcc

SEQ ID NO: 18329 - DNA, 73 bp, Homo sapiens
taaagacaaaccattgccagtacctcccacacttcgagatcttccaccaccaccgcctccagaccggccatat

SEQ ID NO: 18330 - DNA, 76 bp, Homo sapiens
attgccagtacctcccacacttcgagatcttccaccaccaccgcctccagaccggccatattctgttggagcagaa

SEQ ID NO: 18331 - DNA, 76 bp, Homo sapiens
tcccacacttcgagatcttccaccaccaccgcctccagaccggccatattctgttggagcagaatcccgacctcaa

SEQ ID NO: 18332 - DNA, 74 bp, Homo sapiens
acttcgagatcttccaccaccaccgcctccagaccggccatattctgttggagcagaatcccgacctcaaagac

SEQ ID NO: 18333 - DNA, 73 bp, Homo sapiens
caccaccaccgcctccagaccggccatattctgttggagcagaatcccgacctcaaagacgccccttgccttg

SEQ ID NO: 18334 - DNA, 73 bp, Homo sapiens
accgcctccagaccggccatattctgttggagcagaatcccgacctcaaagacgccccttgccttgtacacca

SEQ ID NO: 18335 - DNA, 74 bp, Homo sapiens
agaccggccatattctgttggagcagaatcccgacctcaaagacgccccttgccttgtacaccaggcgactgtc

SEQ ID NO: 18336 - DNA, 75 bp, Homo sapiens
atattctgttggagcagaatcccgacctcaaagacgccccttgccttgtacaccaggcgactgtccctccagaga

SEQ ID NO: 18337 - DNA, 73 bp, Homo sapiens
agcagaatcccgacctcaaagacgccccttgccttgtacaccaggcgactgtccctccagagacaaactgccc

SEQ ID NO: 18338 - DNA, 71 bp, Homo sapiens
cccgacctcaaagacgccccttgccttgtacaccaggcgactgtccctccagagacaaactgccccctgtc

SEQ ID NO: 18339 - DNA, 71 bp, Homo sapiens
aagacgccccttgccttgtacaccaggcgactgtccctccagagacaaactgccccctgtcccctctagcc

SEQ ID NO: 18340 - DNA, 74 bp, Homo sapiens
accaggcgactgtccctccagagacaaactgccccctgtcccctctagccgccttggagactcatggctgcccc

SEQ ID NO: 18341 - DNA, 74 bp, Homo sapiens
tgtccctccagagacaaactgccccctgtcccctctagccgccttggagactcatggctgccccggccaatccc

SEQ ID NO: 18342 - DNA, 72 bp, Homo sapiens
agagacaaactgccccctgtcccctctagccgccttggagactcatggctgccccggccaatccccaaagta

SEQ ID NO: 18343 - DNA, 73 bp, Homo sapiens
cctgtcccctctagccgccttggagactcatggctgccccggccaatccccaaagtaccagtatctgccccaa

SEQ ID NO: 18344 - DNA, 73 bp, Homo sapiens
ccctctagccgccttggagactcatggctgccccggccaatccccaaagtaccagtatctgccccaagttcca

SEQ ID NO: 18345 - DNA, 74 bp, Homo sapiens
actcatggctgccccggccaatccccaaagtaccagtatctgccccaagttccagtgatccctggacaggaaga

SEQ ID NO: 18346 - DNA, 72 bp, Homo sapiens
caaagtaccagtatctgccccaagttccagtgatccctggacaggaagagaattaaccaaccggcactcact

SEQ ID NO: 18347 - DNA, 73 bp, Homo sapiens
taccagtatctgccccaagttccagtgatccctggacaggaagagaattaaccaaccggcactcacttccatt

SEQ ID NO: 18348 - DNA, 74 bp, Homo sapiens
caagttccagtgatccctggacaggaagagaattaaccaaccggcactcacttccattttcattgccctcacaa

SEQ ID NO: 18349 - DNA, 74 bp, Homo sapiens
agtgatccctggacaggaagagaattaaccaaccggcactcacttccattttcattgccctcacaaatggagcc

SEQ ID NO: 18350 - DNA, 76 bp, Homo sapiens
acaggaagagaattaaccaaccggcactcacttccattttcattgccctcacaaatggagcccagaccagatgtgc

SEQ ID NO: 18351 - DNA, 75 bp, Homo sapiens
aagagaattaaccaaccggcactcacttccattttcattgccctcacaaatggagcccagaccagatgtgcctag

SEQ ID NO: 18352 - DNA, 78 bp, Homo sapiens
acttccattttcattgccctcacaaatggagcccagaccagatgtgcctaggctcggaagcacgttcagtctggatac

SEQ ID NO: 18353 - DNA, 79 bp, Homo sapiens
attttcattgccctcacaaatggagcccagaccagatgtgcctaggctcggaagcacgttcagtctggatacctccatg

SEQ ID NO: 18354 - DNA, 77 bp, Homo sapiens
acaaatggagcccagaccagatgtgcctaggctcggaagcacgttcagtctggatacctccatggtgagtcttaatt

SEQ ID NO: 18355 - DNA, 76 bp, Homo sapiens
cccagaccagatgtgcctaggctcggaagcacgttcagtctggatacctccatggtgagtcttaattttgaaacta

SEQ ID NO: 18356 - DNA, 73 bp, Homo sapiens
tcagctgtggtaagaaagttgtttttcaacacttttctttactttccagagtatgaatagcagcccattagta

SEQ ID NO: 18357 - DNA, 71 bp, Homo sapiens
taagaaagttgtttttcaacacttttctttactttccagagtatgaatagcagcccattagtaggtccaga

SEQ ID NO: 18358 - DNA, 72 bp, Homo sapiens
aagttgtttttcaacacttttctttactttccagagtatgaatagcagcccattagtaggtccagagtgtga

SEQ ID NO: 18359 - DNA, 72 bp, Homo sapiens
acttttctttactttccagagtatgaatagcagcccattagtaggtccagagtgtgaccaccccaaaatcaa

SEQ ID NO: 18360 - DNA, 72 bp, Homo sapiens
ctttactttccagagtatgaatagcagcccattagtaggtccagagtgtgaccaccccaaaatcaaaccttc

SEQ ID NO: 18361 - DNA, 77 bp, Homo sapiens
agtatgaatagcagcccattagtaggtccagagtgtgaccaccccaaaatcaaaccttcctcatctgccaatgccat

SEQ ID NO: 18362 - DNA, 75 bp, Homo sapiens
aatagcagcccattagtaggtccagagtgtgaccaccccaaaatcaaaccttcctcatctgccaatgccatttat

SEQ ID NO: 18363 - DNA, 77 bp, Homo sapiens
attagtaggtccagagtgtgaccaccccaaaatcaaaccttcctcatctgccaatgccatttattctctggctgcca

SEQ ID NO: 18364 - DNA, 77 bp, Homo sapiens
agtgtgaccaccccaaaatcaaaccttcctcatctgccaatgccatttattctctggctgccaggtaagtctgctaa

SEQ ID NO: 18365 - DNA, 76 bp, Homo sapiens
ccccaaaatcaaaccttcctcatctgccaatgccatttattctctggctgccaggtaagtctgctaaagctatatt

SEQ ID NO: 18366 - DNA, 78 bp, Homo sapiens
aaatcaaaccttcctcatctgccaatgccatttattctctggctgccaggtaagtctgctaaagctatattttgtaca

SEQ ID NO: 18367 - DNA, 73 bp, Homo sapiens
ctttttctattttttattcttcatcttccagacctcttcctgtgccaaaactgccacctggggagcaatgtga

SEQ ID NO: 18368 - DNA, 75 bp, Homo sapiens
tttttattcttcatcttccagacctcttcctgtgccaaaactgccacctggggagcaatgtgagggtgaagagga

SEQ ID NO: 18369 - DNA, 80 bp, Homo sapiens
ttcatcttccagacctcttcctgtgccaaaactgccacctggggagcaatgtgagggtgaagaggacacagagtacatga

SEQ ID NO: 18370 - DNA, 77 bp, Homo sapiens
gacctcttcctgtgccaaaactgccacctggggagcaatgtgagggtgaagaggacacagagtacatgactccctct

SEQ ID NO: 18371 - DNA, 77 bp, Homo sapiens
cttcctgtgccaaaactgccacctggggagcaatgtgagggtgaagaggacacagagtacatgactccctcttccag

SEQ ID NO: 18372 - DNA, 75 bp, Homo sapiens
aaaactgccacctggggagcaatgtgagggtgaagaggacacagagtacatgactccctcttccaggcctctacg

SEQ ID NO: 18373 - DNA, 77 bp, Homo sapiens
gggagcaatgtgagggtgaagaggacacagagtacatgactccctcttccaggcctctacggcctttggatacatcc

SEQ ID NO: 18374 - DNA, 76 bp, Homo sapiens
atgtgagggtgaagaggacacagagtacatgactccctcttccaggcctctacggcctttggatacatcccagagt

SEQ ID NO: 18375 - DNA, 74 bp, Homo sapiens
aagaggacacagagtacatgactccctcttccaggcctctacggcctttggatacatcccagagttcacggtag

SEQ ID NO: 18376 - DNA, 73 bp, Homo sapiens
agtacatgactccctcttccaggcctctacggcctttggatacatcccagagttcacggtaggttcacaacaa

SEQ ID NO: 18377 - DNA, 69 bp, Homo sapiens
tccctcttccaggcctctacggcctttggatacatcccagagttcacggtaggttcacaacaacccttt

SEQ ID NO: 18378 - DNA, 68 bp, Homo sapiens
cttccaggcctctacggcctttggatacatcccagagttcacggtaggttcacaacaaccctttttgg

SEQ ID NO: 18379 - DNA, 84 bp, Homo sapiens
taacagttctatttccaaagatcattatggcactttccttctggttcagagcatgtgattgcgaccagcagattgatagctgta

SEQ ID NO: 18380 - DNA, 85 bp, Homo sapiens
tctatttccaaagatcattatggcactttccttctggttcagagcatgtgattgcgaccagcagattgatagctgtacgtatgaa

SEQ ID NO: 18381 - DNA, 86 bp, Homo sapiens
atcattatggcactttccttctggttcagagcatgtgattgcgaccagcagattgatagctgtacgtatgaagcaatgtataatat

SEQ ID NO: 18382 - DNA, 84 bp, Homo sapiens
actttccttctggttcagagcatgtgattgcgaccagcagattgatagctgtacgtatgaagcaatgtataatattcagtccca

SEQ ID NO: 18383 - DNA, 88 bp, Homo sapiens
ttctggttcagagcatgtgattgcgaccagcagattgatagctgtacgtatgaagcaatgtataatattcagtcccaggcgccatcta

SEQ ID NO: 18384 - DNA, 88 bp, Homo sapiens
agagcatgtgattgcgaccagcagattgatagctgtacgtatgaagcaatgtataatattcagtcccaggcgccatctatcaccgaga

SEQ ID NO: 18385 - DNA, 85 bp, Homo sapiens
gaccagcagattgatagctgtacgtatgaagcaatgtataatattcagtcccaggcgccatctatcaccgagagcagcacctttg

SEQ ID NO: 18386 - DNA, 82 bp, Homo sapiens
agattgatagctgtacgtatgaagcaatgtataatattcagtcccaggcgccatctatcaccgagagcagcacctttggtaa

SEQ ID NO: 18387 - DNA, 81 bp, Homo sapiens
tgtacgtatgaagcaatgtataatattcagtcccaggcgccatctatcaccgagagcagcacctttggtaagttgccattc

SEQ ID NO: 18388 - DNA, 80 bp, Homo sapiens
gcaatgtataatattcagtcccaggcgccatctatcaccgagagcagcacctttggtaagttgccattctgctactttaa

SEQ ID NO: 18389 - DNA, 77 bp, Homo sapiens
tataatattcagtcccaggcgccatctatcaccgagagcagcacctttggtaagttgccattctgctactttaaaaa

SEQ ID NO: 18390 - DNA, 79 bp, Homo sapiens
ttagaagatgaagtgcgtcagaagaagataacatcactcatttttctccaggtgaagggaatttggccgcagcccatgc

SEQ ID NO: 18391 - DNA, 77 bp, Homo sapiens
aagtgcgtcagaagaagataacatcactcatttttctccaggtgaagggaatttggccgcagcccatgccaacactg

SEQ ID NO: 18392 - DNA, 74 bp, Homo sapiens
aagaagataacatcactcatttttctccaggtgaagggaatttggccgcagcccatgccaacactggtcccgag

SEQ ID NO: 18393 - DNA, 74 bp, Homo sapiens
actcatttttctccaggtgaagggaatttggccgcagcccatgccaacactggtcccgaggagtcagaaaatga

SEQ ID NO: 18394 - DNA, 75 bp, Homo sapiens
tttttctccaggtgaagggaatttggccgcagcccatgccaacactggtcccgaggagtcagaaaatgaggatga

SEQ ID NO: 18395 - DNA, 77 bp, Homo sapiens
agggaatttggccgcagcccatgccaacactggtcccgaggagtcagaaaatgaggatgatgggtatgatgtcccaa

SEQ ID NO: 18396 - DNA, 78 bp, Homo sapiens
atttggccgcagcccatgccaacactggtcccgaggagtcagaaaatgaggatgatgggtatgatgtcccaaagccac

SEQ ID NO: 18397 - DNA, 78 bp, Homo sapiens
atgccaacactggtcccgaggagtcagaaaatgaggatgatgggtatgatgtcccaaagccacctgtgccggccgtgc

SEQ ID NO: 18398 - DNA, 77 bp, Homo sapiens
aacactggtcccgaggagtcagaaaatgaggatgatgggtatgatgtcccaaagccacctgtgccggccgtgctggc

SEQ ID NO: 18399 - DNA, 80 bp, Homo sapiens
gagtcagaaaatgaggatgatgggtatgatgtcccaaagccacctgtgccggccgtgctggcccgccgaactctctcaga

SEQ ID NO: 18400 - DNA, 80 bp, Homo sapiens
aatgaggatgatgggtatgatgtcccaaagccacctgtgccggccgtgctggcccgccgaactctctcagatatctctaa

SEQ ID NO: 18401 - DNA, 79 bp, Homo sapiens
atgatgtcccaaagccacctgtgccggccgtgctggcccgccgaactctctcagatatctctaatgccagctcctcctt

SEQ ID NO: 18402 - DNA, 77 bp, Homo sapiens
aaagccacctgtgccggccgtgctggcccgccgaactctctcagatatctctaatgccagctcctcctttggctggt

SEQ ID NO: 18403 - DNA, 81 bp, Homo sapiens
ggccgtgctggcccgccgaactctctcagatatctctaatgccagctcctcctttggctggttgtctctggatggtgatcc

SEQ ID NO: 18404 - DNA, 81 bp, Homo sapiens
tggcccgccgaactctctcagatatctctaatgccagctcctcctttggctggttgtctctggatggtgatcctacaacaa

SEQ ID NO: 18405 - DNA, 82 bp, Homo sapiens
aactctctcagatatctctaatgccagctcctcctttggctggttgtctctggatggtgatcctacaacaagtgagtctcca

SEQ ID NO: 18406 - DNA, 79 bp, Homo sapiens
atatctctaatgccagctcctcctttggctggttgtctctggatggtgatcctacaacaagtgagtctccagactactt

SEQ ID NO: 18407 - DNA, 77 bp, Homo sapiens
taatgccagctcctcctttggctggttgtctctggatggtgatcctacaacaagtgagtctccagactactttgggt

SEQ ID NO: 18408 - DNA, 76 bp, Homo sapiens
tcctttggctggttgtctctggatggtgatcctacaacaagtgagtctccagactactttgggtttgtcctgaatg

SEQ ID NO: 18409 - DNA, 68 bp, Homo sapiens
aaatattttctttcctatttcttctagatgtcactgaaggttcccaagttcccgagaggcctccaaaa

SEQ ID NO: 18410 - DNA, 69 bp, Homo sapiens
tttctttcctatttcttctagatgtcactgaaggttcccaagttcccgagaggcctccaaaaccattcc

SEQ ID NO: 18411 - DNA, 71 bp, Homo sapiens
tttcttctagatgtcactgaaggttcccaagttcccgagaggcctccaaaaccattcccgcggagaatcaa

SEQ ID NO: 18412 - DNA, 70 bp, Homo sapiens
tcactgaaggttcccaagttcccgagaggcctccaaaaccattcccgcggagaatcaactctgaacggaa

SEQ ID NO: 18413 - DNA, 67 bp, Homo sapiens
aaggttcccaagttcccgagaggcctccaaaaccattcccgcggagaatcaactctgaacggaaagc

SEQ ID NO: 18414 - DNA, 74 bp, Homo sapiens
agttcccgagaggcctccaaaaccattcccgcggagaatcaactctgaacggaaagctggcagctgtcagcaag

SEQ ID NO: 18415 - DNA, 74 bp, Homo sapiens
aggcctccaaaaccattcccgcggagaatcaactctgaacggaaagctggcagctgtcagcaaggtagtggtcc

SEQ ID NO: 18416 - DNA, 82 bp, Homo sapiens
agaatcaactctgaacggaaagctggcagctgtcagcaaggtagtggtcctgccgcctctgctgccaccgcctcacctcagc

SEQ ID NO: 18417 - DNA, 82 bp, Homo sapiens
aactctgaacggaaagctggcagctgtcagcaaggtagtggtcctgccgcctctgctgccaccgcctcacctcagctctcca

SEQ ID NO: 18418 - DNA, 84 bp, Homo sapiens
aaagctggcagctgtcagcaaggtagtggtcctgccgcctctgctgccaccgcctcacctcagctctccagtgagatcgagaac

SEQ ID NO: 18419 - DNA, 86 bp, Homo sapiens
agctgtcagcaaggtagtggtcctgccgcctctgctgccaccgcctcacctcagctctccagtgagatcgagaacctcatgagtca

SEQ ID NO: 18420 - DNA, 81 bp, Homo sapiens
aggtagtggtcctgccgcctctgctgccaccgcctcacctcagctctccagtgagatcgagaacctcatgagtcaggggta

SEQ ID NO: 18421 - DNA, 83 bp, Homo sapiens
tgccgcctctgctgccaccgcctcacctcagctctccagtgagatcgagaacctcatgagtcaggggtactcctaccaggaca

SEQ ID NO: 18422 - DNA, 80 bp, Homo sapiens
ctgccaccgcctcacctcagctctccagtgagatcgagaacctcatgagtcaggggtactcctaccaggacatccagaaa

SEQ ID NO: 18423 - DNA, 80 bp, Homo sapiens
ctcacctcagctctccagtgagatcgagaacctcatgagtcaggggtactcctaccaggacatccagaaagctttggtca

SEQ ID NO: 18424 - DNA, 79 bp, Homo sapiens
agctctccagtgagatcgagaacctcatgagtcaggggtactcctaccaggacatccagaaagctttggtcattgccca

SEQ ID NO: 18425 - DNA, 77 bp, Homo sapiens
agtgagatcgagaacctcatgagtcaggggtactcctaccaggacatccagaaagctttggtcattgcccagaacaa

SEQ ID NO: 18426 - DNA, 77 bp, Homo sapiens
agaacctcatgagtcaggggtactcctaccaggacatccagaaagctttggtcattgcccagaacaacatcgagatg

SEQ ID NO: 18427 - DNA, 74 bp, Homo sapiens
agtcaggggtactcctaccaggacatccagaaagctttggtcattgcccagaacaacatcgagatggccaaaaa

SEQ ID NO: 18428 - DNA, 75 bp, Homo sapiens
tcctaccaggacatccagaaagctttggtcattgcccagaacaacatcgagatggccaaaaacatcctccgggaa

SEQ ID NO: 18429 - DNA, 73 bp, Homo sapiens
acatccagaaagctttggtcattgcccagaacaacatcgagatggccaaaaacatcctccgggaatttgtttc

SEQ ID NO: 18430 - DNA, 71 bp, Homo sapiens
agaaagctttggtcattgcccagaacaacatcgagatggccaaaaacatcctccgggaatttgtttccatt

SEQ ID NO: 18431 - DNA, 74 bp, Homo sapiens
ttgcccagaacaacatcgagatggccaaaaacatcctccgggaatttgtttccatttcttctcctgcccatgta

SEQ ID NO: 18432 - DNA, 73 bp, Homo sapiens
agaacaacatcgagatggccaaaaacatcctccgggaatttgtttccatttcttctcctgcccatgtagctac

SEQ ID NO: 18433 - DNA, 74 bp, Homo sapiens
atggccaaaaacatcctccgggaatttgtttccatttcttctcctgcccatgtagctacctagcacaccatctc

SEQ ID NO: 18434 - DNA, 73 bp, Homo sapiens
aaaaacatcctccgggaatttgtttccatttcttctcctgcccatgtagctacctagcacaccatctccctgc

SEQ ID NO: 18435 - DNA, 77 bp, Homo sapiens
ggaatttgtttccatttcttctcctgcccatgtagctacctagcacaccatctccctgctgcaggtttagaggacca

SEQ ID NO: 18436 - DNA, 78 bp, Homo sapiens
tttccatttcttctcctgcccatgtagctacctagcacaccatctccctgctgcaggtttagaggaccagtgagttgg

SEQ ID NO: 18437 - DNA, 78 bp, Homo sapiens
atgtagctacctagcacaccatctccctgctgcaggtttagaggaccagtgagttgggagttattactcaagtggcac

SEQ ID NO: 18438 - DNA, 77 bp, Homo sapiens
tacctagcacaccatctccctgctgcaggtttagaggaccagtgagttgggagttattactcaagtggcacctagaa

SEQ ID NO: 18439 - DNA, 74 bp, Homo sapiens
atctccctgctgcaggtttagaggaccagtgagttgggagttattactcaagtggcacctagaagggcaggagt

SEQ ID NO: 18440 - DNA, 72 bp, Homo sapiens
ctgcaggtttagaggaccagtgagttgggagttattactcaagtggcacctagaagggcaggagttcctttg

SEQ ID NO: 18441 - DNA, 71 bp, Homo sapiens
tttagaggaccagtgagttgggagttattactcaagtggcacctagaagggcaggagttcctttggtgact

SEQ ID NO: 18442 - DNA, 73 bp, Homo sapiens
gtgagttgggagttattactcaagtggcacctagaagggcaggagttcctttggtgacttcacagtgaagtct

SEQ ID NO: 18443 - DNA, 74 bp, Homo sapiens
agttattactcaagtggcacctagaagggcaggagttcctttggtgacttcacagtgaagtcttgccctctctg

SEQ ID NO: 18444 - DNA, 78 bp, Homo sapiens
aagtggcacctagaagggcaggagttcctttggtgacttcacagtgaagtcttgccctctctgtgggatatcacatca

SEQ ID NO: 18445 - DNA, 78 bp, Homo sapiens
tagaagggcaggagttcctttggtgacttcacagtgaagtcttgccctctctgtgggatatcacatcagtggttccaa

SEQ ID NO: 18446 - DNA, 76 bp, Homo sapiens
agttcctttggtgacttcacagtgaagtcttgccctctctgtgggatatcacatcagtggttccaagatttcaaag

SEQ ID NO: 18447 - DNA, 79 bp, Homo sapiens
gtgacttcacagtgaagtcttgccctctctgtgggatatcacatcagtggttccaagatttcaaagtggtgaaatgaaa

SEQ ID NO: 18448 - DNA, 79 bp, Homo sapiens
ttcacagtgaagtcttgccctctctgtgggatatcacatcagtggttccaagatttcaaagtggtgaaatgaaaatgga

SEQ ID NO: 18449 - DNA, 79 bp, Homo sapiens
tgccctctctgtgggatatcacatcagtggttccaagatttcaaagtggtgaaatgaaaatggagcagctagtatgttt

SEQ ID NO: 18450 - DNA, 77 bp, Homo sapiens
tgtgggatatcacatcagtggttccaagatttcaaagtggtgaaatgaaaatggagcagctagtatgttttattatt

SEQ ID NO: 18451 - DNA, 75 bp, Homo sapiens
tcacatcagtggttccaagatttcaaagtggtgaaatgaaaatggagcagctagtatgttttattattttatggg

SEQ ID NO: 18452 - DNA, 75 bp, Homo sapiens
gttccaagatttcaaagtggtgaaatgaaaatggagcagctagtatgttttattattttatgggtcttgagtgca

SEQ ID NO: 18453 - DNA, 75 bp, Homo sapiens
ttcaaagtggtgaaatgaaaatggagcagctagtatgttttattattttatgggtcttgagtgcatttgaaggtg

SEQ ID NO: 18454 - DNA, 76 bp, Homo sapiens
tgaaatgaaaatggagcagctagtatgttttattattttatgggtcttgagtgcatttgaaggtgtccttcagttc

SEQ ID NO: 18455 - DNA, 73 bp, Homo sapiens
aaaatggagcagctagtatgttttattattttatgggtcttgagtgcatttgaaggtgtccttcagttcccac

SEQ ID NO: 18456 - DNA, 77 bp, Homo sapiens
tttatgggtcttgagtgcatttgaaggtgtccttcagttcccacgtagagagagtgtggattatattacatgataac

SEQ ID NO: 18457 - DNA, 76 bp, Homo sapiens
ttgagtgcatttgaaggtgtccttcagttcccacgtagagagagtgtggattatattacatgataacctacctggg

SEQ ID NO: 18458 - DNA, 74 bp, Homo sapiens
agttcccacgtagagagagtgtggattatattacatgataacctacctggggaacagtccagaaagctatagaa

SEQ ID NO: 18459 - DNA, 72 bp, Homo sapiens
atattacatgataacctacctggggaacagtccagaaagctatagaacaagtattttgctggaaatcctaat

SEQ ID NO: 18460 - DNA, 71 bp, Homo sapiens
taacctacctggggaacagtccagaaagctatagaacaagtattttgctggaaatcctaattgaggactta

SEQ ID NO: 18461 - DNA, 71 bp, Homo sapiens
gggaacagtccagaaagctatagaacaagtattttgctggaaatcctaattgaggacttaagacttcctgg

SEQ ID NO: 18462 - DNA, 70 bp, Homo sapiens
agaaagctatagaacaagtattttgctggaaatcctaattgaggacttaagacttcctgggttaaggatg

SEQ ID NO: 18463 - DNA, 71 bp, Homo sapiens
tatagaacaagtattttgctggaaatcctaattgaggacttaagacttcctgggttaaggatgtggccgtg

SEQ ID NO: 18464 - DNA, 71 bp, Homo sapiens
aagtattttgctggaaatcctaattgaggacttaagacttcctgggttaaggatgtggccgtgtgtgtgtg

SEQ ID NO: 18465 - DNA, 80 bp, Homo sapiens
tgtgtgtgtctgcctgtggttgtatgtgtccttgtgattataagattaacctgctgtgtgtgttaattccaggcagggaa

SEQ ID NO: 18466 - DNA, 79 bp, Homo sapiens
tgcctgtggttgtatgtgtccttgtgattataagattaacctgctgtgtgtgttaattccaggcagggaattagcacaa

SEQ ID NO: 18467 - DNA, 73 bp, Homo sapiens
tccttgtgattataagattaacctgctgtgtgtgttaattccaggcagggaattagcacaaaaggtttaggaa

SEQ ID NO: 18468 - DNA, 71 bp, Homo sapiens
attataagattaacctgctgtgtgtgttaattccaggcagggaattagcacaaaaggtttaggaaggaatc

SEQ ID NO: 18469 - DNA, 68 bp, Homo sapiens
ttaacctgctgtgtgtgttaattccaggcagggaattagcacaaaaggtttaggaaggaatctttttt

SEQ ID NO: 18470 - DNA, 67 bp, Homo sapiens
aggcagggaattagcacaaaaggtttaggaaggaatctttttttaaagacttccatctactgtggta

SEQ ID NO: 18471 - DNA, 67 bp, Homo sapiens
attagcacaaaaggtttaggaaggaatctttttttaaagacttccatctactgtggtattataccca

SEQ ID NO: 18472 - DNA, 67 bp, Homo sapiens
aggtttaggaaggaatctttttttaaagacttccatctactgtggtattatacccaagcctagtgtg

SEQ ID NO: 18473 - DNA, 70 bp, Homo sapiens
aggaatctttttttaaagacttccatctactgtggtattatacccaagcctagtgtgtattacaacttca

SEQ ID NO: 18474 - DNA, 70 bp, Homo sapiens
ttttttaaagacttccatctactgtggtattatacccaagcctagtgtgtattacaacttcaacactccc

SEQ ID NO: 18475 - DNA, 73 bp, Homo sapiens
ttccatctactgtggtattatacccaagcctagtgtgtattacaacttcaacactcccctttggcttatatta

SEQ ID NO: 18476 - DNA, 73 bp, Homo sapiens
tctactgtggtattatacccaagcctagtgtgtattacaacttcaacactcccctttggcttatattaccatg

SEQ ID NO: 18477 - DNA, 75 bp, Homo sapiens
tattatacccaagcctagtgtgtattacaacttcaacactcccctttggcttatattaccatgtgcatagctaaa

SEQ ID NO: 18478 - DNA, 72 bp, Homo sapiens
attacaacttcaacactcccctttggcttatattaccatgtgcatagctaaagtcttctatttttagaacac

SEQ ID NO: 18479 - DNA, 72 bp, Homo sapiens
aacactcccctttggcttatattaccatgtgcatagctaaagtcttctatttttagaacaccttctgtctgt

SEQ ID NO: 18480 - DNA, 72 bp, Homo sapiens
ccctttggcttatattaccatgtgcatagctaaagtcttctatttttagaacaccttctgtctgttctttcc

SEQ ID NO: 18481 - DNA, 74 bp, Homo sapiens
tatattaccatgtgcatagctaaagtcttctatttttagaacaccttctgtctgttctttccccatcaactcct

SEQ ID NO: 18482 - DNA, 74 bp, Homo sapiens
atgtgcatagctaaagtcttctatttttagaacaccttctgtctgttctttccccatcaactccttcctcatcc

SEQ ID NO: 18483 - DNA, 73 bp, Homo sapiens
tatttttagaacaccttctgtctgttctttccccatcaactccttcctcatccttcttggtgttctgtcatgg

SEQ ID NO: 18484 - DNA, 79 bp, Homo sapiens
cccatcaactccttcctcatccttcttggtgttctgtcatgggccatgggcttgctatggccagccttactgaggccaa

SEQ ID NO: 18485 - DNA, 80 bp, Homo sapiens
ttcttggtgttctgtcatgggccatgggcttgctatggccagccttactgaggccaagcagcttatgggatgttctttat

SEQ ID NO: 18486 - DNA, 84 bp, Homo sapiens
tgttctgtcatgggccatgggcttgctatggccagccttactgaggccaagcagcttatgggatgttctttattgtgtgtgatg

SEQ ID NO: 18487 - DNA, 79 bp, Homo sapiens
ccatgggcttgctatggccagccttactgaggccaagcagcttatgggatgttctttattgtgtgtgatggtattggtt

SEQ ID NO: 18488 - DNA, 78 bp, Homo sapiens
cttgctatggccagccttactgaggccaagcagcttatgggatgttctttattgtgtgtgatggtattggtttgtttg

SEQ ID NO: 18489 - DNA, 74 bp, Homo sapiens
aggccaagcagcttatgggatgttctttattgtgtgtgatggtattggtttgtttggtagataagtgggaggaa

SEQ ID NO: 18490 - DNA, 73 bp, Homo sapiens
tgttctttattgtgtgtgatggtattggtttgtttggtagataagtgggaggaaaagtactgttgctacacta

SEQ ID NO: 18491 - DNA, 73 bp, Homo sapiens
gtattggtttgtttggtagataagtgggaggaaaagtactgttgctacactattataggcatgtttgatacta

SEQ ID NO: 18492 - DNA, 76 bp, Homo sapiens
tttgtttggtagataagtgggaggaaaagtactgttgctacactattataggcatgtttgatactagcagctaaca

SEQ ID NO: 18493 - DNA, 77 bp, Homo sapiens
taagtgggaggaaaagtactgttgctacactattataggcatgtttgatactagcagctaacactggtcactccaaa

SEQ ID NO: 18494 - DNA, 77 bp, Homo sapiens
aggaaaagtactgttgctacactattataggcatgtttgatactagcagctaacactggtcactccaaagcactgtt

SEQ ID NO: 18495 - DNA, 80 bp, Homo sapiens
tattataggcatgtttgatactagcagctaacactggtcactccaaagcactgtttctataggaacattgaagctattaa

SEQ ID NO: 18496 - DNA, 77 bp, Homo sapiens
atgtttgatactagcagctaacactggtcactccaaagcactgtttctataggaacattgaagctattaagatgttt

SEQ ID NO: 18497 - DNA, 78 bp, Homo sapiens
atactagcagctaacactggtcactccaaagcactgtttctataggaacattgaagctattaagatgttttgattatc

SEQ ID NO: 18498 - DNA, 76 bp, Homo sapiens
gctaacactggtcactccaaagcactgtttctataggaacattgaagctattaagatgttttgattatcctaatta

SEQ ID NO: 18499 - DNA, 76 bp, Homo sapiens
cactccaaagcactgtttctataggaacattgaagctattaagatgttttgattatcctaattacataatgaccga

SEQ ID NO: 18500 - DNA, 78 bp, Homo sapiens
gcactgtttctataggaacattgaagctattaagatgttttgattatcctaattacataatgaccgatttgagataga

SEQ ID NO: 18501 - DNA, 75 bp, Homo sapiens
ctataggaacattgaagctattaagatgttttgattatcctaattacataatgaccgatttgagatagaggcctt

SEQ ID NO: 18502 - DNA, 75 bp, Homo sapiens
gaagctattaagatgttttgattatcctaattacataatgaccgatttgagatagaggcctttaaatacattcca

SEQ ID NO: 18503 - DNA, 75 bp, Homo sapiens
taagatgttttgattatcctaattacataatgaccgatttgagatagaggcctttaaatacattccatgccctcc

SEQ ID NO: 18504 - DNA, 73 bp, Homo sapiens
attatcctaattacataatgaccgatttgagatagaggcctttaaatacattccatgccctccccagaaaata

SEQ ID NO: 18505 - DNA, 74 bp, Homo sapiens
ctaattacataatgaccgatttgagatagaggcctttaaatacattccatgccctccccagaaaatagtctgtg

SEQ ID NO: 18506 - DNA, 73 bp, Homo sapiens
aatgaccgatttgagatagaggcctttaaatacattccatgccctccccagaaaatagtctgtgggagtcagt

SEQ ID NO: 18507 - DNA, 76 bp, Homo sapiens
ttgagatagaggcctttaaatacattccatgccctccccagaaaatagtctgtgggagtcagttgccttggtgcca

SEQ ID NO: 18508 - DNA, 76 bp, Homo sapiens
tttaaatacattccatgccctccccagaaaatagtctgtgggagtcagttgccttggtgccaggtatgtgttctga

SEQ ID NO: 18509 - DNA, 77 bp, Homo sapiens
aaaatagtctgtgggagtcagttgccttggtgccaggtatgtgttctgatgtaggtcatgagtctttctacttaatg

SEQ ID NO: 18510 - DNA, 77 bp, Homo sapiens
tgtgggagtcagttgccttggtgccaggtatgtgttctgatgtaggtcatgagtctttctacttaatgggaagggaa

SEQ ID NO: 18511 - DNA, 73 bp, Homo sapiens
ccttggtgccaggtatgtgttctgatgtaggtcatgagtctttctacttaatgggaagggaagaacatttgtt

SEQ ID NO: 18512 - DNA, 74 bp, Homo sapiens
aggtatgtgttctgatgtaggtcatgagtctttctacttaatgggaagggaagaacatttgtttccaggatgac

SEQ ID NO: 18513 - DNA, 69 bp, Homo sapiens
tttctacttaatgggaagggaagaacatttgtttccaggatgactttctggccagaataccggaaagct

SEQ ID NO: 18514 - DNA, 68 bp, Homo sapiens
acttaatgggaagggaagaacatttgtttccaggatgactttctggccagaataccggaaagctttta

SEQ ID NO: 18515 - DNA, 72 bp, Homo sapiens
aagaacatttgtttccaggatgactttctggccagaataccggaaagcttttaggaagcttcgttcacatgc

SEQ ID NO: 18516 - DNA, 74 bp, Homo sapiens
ttctggccagaataccggaaagcttttaggaagcttcgttcacatgctatttaaatgcacaaaatagacagtaa

SEQ ID NO: 18517 - DNA, 72 bp, Homo sapiens
ataccggaaagcttttaggaagcttcgttcacatgctatttaaatgcacaaaatagacagtaaggatttatc

SEQ ID NO: 18518 - DNA, 73 bp, Homo sapiens
agcttttaggaagcttcgttcacatgctatttaaatgcacaaaatagacagtaaggatttatctgttcagttt

SEQ ID NO: 18519 - DNA, 73 bp, Homo sapiens
aagcttcgttcacatgctatttaaatgcacaaaatagacagtaaggatttatctgttcagtttttcttcccag

SEQ ID NO: 18520 - DNA, 74 bp, Homo sapiens
tgcacaaaatagacagtaaggatttatctgttcagtttttcttcccagtgaattaatttcagcttatatgggtg

SEQ ID NO: 18521 - DNA, 73 bp, Homo sapiens
tagacagtaaggatttatctgttcagtttttcttcccagtgaattaatttcagcttatatgggtgtcttcatt

SEQ ID NO: 18522 - DNA, 75 bp, Homo sapiens
ggatttatctgttcagtttttcttcccagtgaattaatttcagcttatatgggtgtcttcatttgaacatgagga

SEQ ID NO: 18523 - DNA, 73 bp, Homo sapiens
gttcagtttttcttcccagtgaattaatttcagcttatatgggtgtcttcatttgaacatgaggaatattagg

SEQ ID NO: 18524 - DNA, 76 bp, Homo sapiens
cagtgaattaatttcagcttatatgggtgtcttcatttgaacatgaggaatattaggttatattttcagcagtggt

SEQ ID NO: 18525 - DNA, 75 bp, Homo sapiens
tcagcttatatgggtgtcttcatttgaacatgaggaatattaggttatattttcagcagtggttttttcctttgc

SEQ ID NO: 18526 - DNA, 71 bp, Homo sapiens
atatgggtgtcttcatttgaacatgaggaatattaggttatattttcagcagtggttttttcctttgccct

SEQ ID NO: 18527 - DNA, 70 bp, Homo sapiens
tcatttgaacatgaggaatattaggttatattttcagcagtggttttttcctttgccctttaaggagtgg

SEQ ID NO: 18528 - DNA, 68 bp, Homo sapiens
atgaggaatattaggttatattttcagcagtggttttttcctttgccctttaaggagtggggataatg

SEQ ID NO: 18529 - DNA, 76 bp, Homo sapiens
tcctttgccctttaaggagtggggataatgtccacggtggcccagcctcttgctgatggcaccttccctgcattgc

SEQ ID NO: 18530 - DNA, 79 bp, Homo sapiens
tttaaggagtggggataatgtccacggtggcccagcctcttgctgatggcaccttccctgcattgctgcctcccgatga

SEQ ID NO: 18531 - DNA, 79 bp, Homo sapiens
ataatgtccacggtggcccagcctcttgctgatggcaccttccctgcattgctgcctcccgatgatgtggttcttttct

SEQ ID NO: 18532 - DNA, 80 bp, Homo sapiens
acggtggcccagcctcttgctgatggcaccttccctgcattgctgcctcccgatgatgtggttcttttcttgtgcctgtg

SEQ ID NO: 18533 - DNA, 80 bp, Homo sapiens
agcctcttgctgatggcaccttccctgcattgctgcctcccgatgatgtggttcttttcttgtgcctgtggctttgggaa

SEQ ID NO: 18534 - DNA, 79 bp, Homo sapiens
atggcaccttccctgcattgctgcctcccgatgatgtggttcttttcttgtgcctgtggctttgggaatgtaacatctc

SEQ ID NO: 18535 - DNA, 75 bp, Homo sapiens
attgctgcctcccgatgatgtggttcttttcttgtgcctgtggctttgggaatgtaacatctctttcctcctttc

SEQ ID NO: 18536 - DNA, 70 bp, Homo sapiens
atgatgtggttcttttcttgtgcctgtggctttgggaatgtaacatctctttcctcctttccttcccttt

SEQ ID NO: 18537 - DNA, 70 bp, Homo sapiens
ttcttttcttgtgcctgtggctttgggaatgtaacatctctttcctcctttccttcccttttcctcttca

SEQ ID NO: 18538 - DNA, 71 bp, Homo sapiens
tgcctgtggctttgggaatgtaacatctctttcctcctttccttcccttttcctcttcacctgaggtccta

SEQ ID NO: 18539 - DNA, 70 bp, Homo sapiens
tgtaacatctctttcctcctttccttcccttttcctcttcacctgaggtcctaaatactctctgtaatta

SEQ ID NO: 18540 - DNA, 70 bp, Homo sapiens
ttcctcctttccttcccttttcctcttcacctgaggtcctaaatactctctgtaattactgtgttcttca

SEQ ID NO: 18541 - DNA, 77 bp, Homo sapiens
tcctcttcacctgaggtcctaaatactctctgtaattactgtgttcttcacggtaattagacatcattcagtgaata

SEQ ID NO: 18542 - DNA, 75 bp, Homo sapiens
ttcacctgaggtcctaaatactctctgtaattactgtgttcttcacggtaattagacatcattcagtgaataaat

SEQ ID NO: 18543 - DNA, 76 bp, Homo sapiens
gtcctaaatactctctgtaattactgtgttcttcacggtaattagacatcattcagtgaataaattactgtagtca

SEQ ID NO: 18544 - DNA, 76 bp, Homo sapiens
ctctgtaattactgtgttcttcacggtaattagacatcattcagtgaataaattactgtagtcaaagacagtatgg

SEQ ID NO: 18545 - DNA, 77 bp, Homo sapiens
tactgtgttcttcacggtaattagacatcattcagtgaataaattactgtagtcaaagacagtatgggctggcagtt

SEQ ID NO: 18546 - DNA, 79 bp, Homo sapiens
ttagacatcattcagtgaataaattactgtagtcaaagacagtatgggctggcagtttgtgtaattgcaagttcataaa

SEQ ID NO: 18547 - DNA, 76 bp, Homo sapiens
attcagtgaataaattactgtagtcaaagacagtatgggctggcagtttgtgtaattgcaagttcataaagagaat

SEQ ID NO: 18548 - DNA, 76 bp, Homo sapiens
taaattactgtagtcaaagacagtatgggctggcagtttgtgtaattgcaagttcataaagagaattgagggtcca

SEQ ID NO: 18549 - DNA, 74 bp, Homo sapiens
aaagacagtatgggctggcagtttgtgtaattgcaagttcataaagagaattgagggtccagttgggagaacta

SEQ ID NO: 18550 - DNA, 75 bp, Homo sapiens
tatgggctggcagtttgtgtaattgcaagttcataaagagaattgagggtccagttgggagaactattagtcagt

SEQ ID NO: 18551 - DNA, 71 bp, Homo sapiens
agtttgtgtaattgcaagttcataaagagaattgagggtccagttgggagaactattagtcagttctttta

SEQ ID NO: 18552 - DNA, 76 bp, Homo sapiens
tgtaattgcaagttcataaagagaattgagggtccagttgggagaactattagtcagttcttttatatgctgataa

SEQ ID NO: 18553 - DNA, 74 bp, Homo sapiens
agttcataaagagaattgagggtccagttgggagaactattagtcagttcttttatatgctgataaatgatccc

SEQ ID NO: 18554 - DNA, 74 bp, Homo sapiens
aattgagggtccagttgggagaactattagtcagttcttttatatgctgataaatgatccctcgagttcagtta

SEQ ID NO: 18555 - DNA, 76 bp, Homo sapiens
agaactattagtcagttcttttatatgctgataaatgatccctcgagttcagttagtattctgtccagagtgttta

SEQ ID NO: 18556 - DNA, 76 bp, Homo sapiens
agttcttttatatgctgataaatgatccctcgagttcagttagtattctgtccagagtgtttagctcactttctta

SEQ ID NO: 18557 - DNA, 80 bp, Homo sapiens
ttatatgctgataaatgatccctcgagttcagttagtattctgtccagagtgtttagctcactttcttagcagtgtgtaa

SEQ ID NO: 18558 - DNA, 81 bp, Homo sapiens
ttctgtccagagtgtttagctcactttcttagcagtgtgtaagctttctccatgtcagaagcaagcctgctctttgataaa

SEQ ID NO: 18559 - DNA, 80 bp, Homo sapiens
agtgtttagctcactttcttagcagtgtgtaagctttctccatgtcagaagcaagcctgctctttgataaatctgtcttc

SEQ ID NO: 18560 - DNA, 79 bp, Homo sapiens
tttcttagcagtgtgtaagctttctccatgtcagaagcaagcctgctctttgataaatctgtcttcctgaaaatctaaa

SEQ ID NO: 18561 - DNA, 79 bp, Homo sapiens
agtgtgtaagctttctccatgtcagaagcaagcctgctctttgataaatctgtcttcctgaaaatctaaatcatgcttt

SEQ ID NO: 18562 - DNA, 80 bp, Homo sapiens
tcagaagcaagcctgctctttgataaatctgtcttcctgaaaatctaaatcatgcttttgtctttagatctacacagaaa

SEQ ID NO: 18563 - DNA, 77 bp, Homo sapiens
aagcctgctctttgataaatctgtcttcctgaaaatctaaatcatgcttttgtctttagatctacacagaaatgacc

SEQ ID NO: 18564 - DNA, 76 bp, Homo sapiens
tttgataaatctgtcttcctgaaaatctaaatcatgcttttgtctttagatctacacagaaatgaccctccttgga

SEQ ID NO: 18565 - DNA, 74 bp, Homo sapiens
tcttcctgaaaatctaaatcatgcttttgtctttagatctacacagaaatgaccctccttggatcagttttctt

SEQ ID NO: 18566 - DNA, 73 bp, Homo sapiens
aaaatctaaatcatgcttttgtctttagatctacacagaaatgaccctccttggatcagttttctttccagtc

SEQ ID NO: 18567 - DNA, 75 bp, Homo sapiens
aatcatgcttttgtctttagatctacacagaaatgaccctccttggatcagttttctttccagtctaatcatctt

SEQ ID NO: 18568 - DNA, 73 bp, Homo sapiens
tctttagatctacacagaaatgaccctccttggatcagttttctttccagtctaatcatctttggaactaaaa

SEQ ID NO: 18569 - DNA, 72 bp, Homo sapiens
tacacagaaatgaccctccttggatcagttttctttccagtctaatcatctttggaactaaaacttgttcta

SEQ ID NO: 18570 - DNA, 69 bp, Homo sapiens
aaatgaccctccttggatcagttttctttccagtctaatcatctttggaactaaaacttgttctaactc

SEQ ID NO: 18571 - DNA, 73 bp, Homo sapiens
cttggatcagttttctttccagtctaatcatctttggaactaaaacttgttctaactcgtctcttggcattca

SEQ ID NO: 18572 - DNA, 74 bp, Homo sapiens
tttctttccagtctaatcatctttggaactaaaacttgttctaactcgtctcttggcattcagctactcctaga

SEQ ID NO: 18573 - DNA, 73 bp, Homo sapiens
tctaatcatctttggaactaaaacttgttctaactcgtctcttggcattcagctactcctagatcttttggtt

SEQ ID NO: 18574 - DNA, 71 bp, Homo sapiens
atctttggaactaaaacttgttctaactcgtctcttggcattcagctactcctagatcttttggttttatc

SEQ ID NO: 18575 - DNA, 75 bp, Homo sapiens
ttctaactcgtctcttggcattcagctactcctagatcttttggttttatcccctggcctcagagccatttatat

SEQ ID NO: 18576 - DNA, 77 bp, Homo sapiens
ttttatcccctggcctcagagccatttatattcccagagtaggcagtacaggatctcgtgttgatttgctgtggtta

SEQ ID NO: 18577 - DNA, 79 bp, Homo sapiens
tggcctcagagccatttatattcccagagtaggcagtacaggatctcgtgttgatttgctgtggttacccagtgtcttc

SEQ ID NO: 18578 - DNA, 78 bp, Homo sapiens
agccatttatattcccagagtaggcagtacaggatctcgtgttgatttgctgtggttacccagtgtcttctctacatg

SEQ ID NO: 18579 - DNA, 79 bp, Homo sapiens
agagtaggcagtacaggatctcgtgttgatttgctgtggttacccagtgtcttctctacatggcataaagcggcaaagc

SEQ ID NO: 18580 - DNA, 78 bp, Homo sapiens
gtacaggatctcgtgttgatttgctgtggttacccagtgtcttctctacatggcataaagcggcaaagcccaccatta

SEQ ID NO: 18581 - DNA, 75 bp, Homo sapiens
tgtggttacccagtgtcttctctacatggcataaagcggcaaagcccaccattaggtgaggcggtcccgagttga

SEQ ID NO: 18582 - DNA, 74 bp, Homo sapiens
agtgtcttctctacatggcataaagcggcaaagcccaccattaggtgaggcggtcccgagttgaggtagagtgg

SEQ ID NO: 18583 - DNA, 75 bp, Homo sapiens
cttctctacatggcataaagcggcaaagcccaccattaggtgaggcggtcccgagttgaggtagagtggggcaga

SEQ ID NO: 18584 - DNA, 76 bp, Homo sapiens
tggcataaagcggcaaagcccaccattaggtgaggcggtcccgagttgaggtagagtggggcagaggaagatggca

SEQ ID NO: 18585 - DNA, 74 bp, Homo sapiens
aaagcccaccattaggtgaggcggtcccgagttgaggtagagtggggcagaggaagatggcagtgaatatcaaa

SEQ ID NO: 18586 - DNA, 75 bp, Homo sapiens
accattaggtgaggcggtcccgagttgaggtagagtggggcagaggaagatggcagtgaatatcaaacagtagac

SEQ ID NO: 18587 - DNA, 76 bp, Homo sapiens
cggtcccgagttgaggtagagtggggcagaggaagatggcagtgaatatcaaacagtagaccgccatcaacttcta

SEQ ID NO: 18588 - DNA, 78 bp, Homo sapiens
agtggggcagaggaagatggcagtgaatatcaaacagtagaccgccatcaacttctaacagccagtacacacactgtt

SEQ ID NO: 18589 - DNA, 79 bp, Homo sapiens
agaggaagatggcagtgaatatcaaacagtagaccgccatcaacttctaacagccagtacacacactgtttcattttga

SEQ ID NO: 18590 - DNA, 71 bp, Homo sapiens
aaacagtagaccgccatcaacttctaacagccagtacacacactgtttcattttgaggtaacgttcagttt

SEQ ID NO: 18591 - DNA, 71 bp, Homo sapiens
atcaacttctaacagccagtacacacactgtttcattttgaggtaacgttcagttttgcattttgtttaaa

SEQ ID NO: 18592 - DNA, 71 bp, Homo sapiens
aacagccagtacacacactgtttcattttgaggtaacgttcagttttgcattttgtttaaatattgaaggc

SEQ ID NO: 18593 - DNA, 69 bp, Homo sapiens
tttcattttgaggtaacgttcagttttgcattttgtttaaatattgaaggcctagacaaagaactagaa

SEQ ID NO: 18594 - DNA, 65 bp, Homo sapiens
aggtaacgttcagttttgcattttgtttaaatattgaaggcctagacaaagaactagaaaaaaaa

SEQ ID NO: 18595 - DNA, 72 bp, Homo sapiens
agaaaaaaaaaagcagtttccaggcccatccatattgtaatttttctttatctgcagatattgcctgtagtc

SEQ ID NO: 18596 - DNA, 75 bp, Homo sapiens
aaagcagtttccaggcccatccatattgtaatttttctttatctgcagatattgcctgtagtctaaagatctctt

SEQ ID NO: 18597 - DNA, 78 bp, Homo sapiens
ccatattgtaatttttctttatctgcagatattgcctgtagtctaaagatctctttggaagacaaagcattggctata

SEQ ID NO: 18598 - DNA, 78 bp, Homo sapiens
atttttctttatctgcagatattgcctgtagtctaaagatctctttggaagacaaagcattggctatatatcttttgc

SEQ ID NO: 18599 - DNA, 78 bp, Homo sapiens
ctttatctgcagatattgcctgtagtctaaagatctctttggaagacaaagcattggctatatatcttttgccttttc

SEQ ID NO: 18600 - DNA, 78 bp, Homo sapiens
atattgcctgtagtctaaagatctctttggaagacaaagcattggctatatatcttttgccttttccatgcatctaaa

SEQ ID NO: 18601 - DNA, 79 bp, Homo sapiens
tgtagtctaaagatctctttggaagacaaagcattggctatatatcttttgccttttccatgcatctaaatcttctctg

SEQ ID NO: 18602 - DNA, 79 bp, Homo sapiens
tctttggaagacaaagcattggctatatatcttttgccttttccatgcatctaaatcttctctggagattatctcccta

SEQ ID NO: 18603 - DNA, 76 bp, Homo sapiens
attggctatatatcttttgccttttccatgcatctaaatcttctctggagattatctccctactgtgtaggttaag

SEQ ID NO: 18604 - DNA, 77 bp, Homo sapiens
tatatcttttgccttttccatgcatctaaatcttctctggagattatctccctactgtgtaggttaagggcagtctc

SEQ ID NO: 18605 - DNA, 74 bp, Homo sapiens
ttccatgcatctaaatcttctctggagattatctccctactgtgtaggttaagggcagtctcgacttttccttt

SEQ ID NO: 18606 - DNA, 71 bp, Homo sapiens
atctaaatcttctctggagattatctccctactgtgtaggttaagggcagtctcgacttttccttttttga

SEQ ID NO: 18607 - DNA, 72 bp, Homo sapiens
ttctctggagattatctccctactgtgtaggttaagggcagtctcgacttttccttttttgagtcctgtgtg

SEQ ID NO: 18608 - DNA, 71 bp, Homo sapiens
attatctccctactgtgtaggttaagggcagtctcgacttttccttttttgagtcctgtgtggctctttga

SEQ ID NO: 18609 - DNA, 73 bp, Homo sapiens
tactgtgtaggttaagggcagtctcgacttttccttttttgagtcctgtgtggctctttgaatcagcgtgaaa

SEQ ID NO: 18610 - DNA, 72 bp, Homo sapiens
aggttaagggcagtctcgacttttccttttttgagtcctgtgtggctctttgaatcagcgtgaaactgaggc

SEQ ID NO: 18611 - DNA, 76 bp, Homo sapiens
tctcgacttttccttttttgagtcctgtgtggctctttgaatcagcgtgaaactgaggctccagctccctgtgttg

SEQ ID NO: 18612 - DNA, 77 bp, Homo sapiens
ttttccttttttgagtcctgtgtggctctttgaatcagcgtgaaactgaggctccagctccctgtgttgtgtgtgtg

SEQ ID NO: 18613 - DNA, 84 bp, Homo sapiens
ttgagtcctgtgtggctctttgaatcagcgtgaaactgaggctccagctccctgtgttgtgtgtgtgtgccatccatgggcttg

SEQ ID NO: 18614 - DNA, 82 bp, Homo sapiens
atcagcgtgaaactgaggctccagctccctgtgttgtgtgtgtgtgccatccatgggcttgggtgtcagtttgtcacaggta

SEQ ID NO: 18615 - DNA, 83 bp, Homo sapiens
aactgaggctccagctccctgtgttgtgtgtgtgtgccatccatgggcttgggtgtcagtttgtcacaggtatctgccagcat

SEQ ID NO: 18616 - DNA, 80 bp, Homo sapiens
agctccctgtgttgtgtgtgtgtgccatccatgggcttgggtgtcagtttgtcacaggtatctgccagcattcaaggttt

SEQ ID NO: 18617 - DNA, 82 bp, Homo sapiens
gttgtgtgtgtgtgccatccatgggcttgggtgtcagtttgtcacaggtatctgccagcattcaaggttttggatcatttca

SEQ ID NO: 18618 - DNA, 82 bp, Homo sapiens
tgtgccatccatgggcttgggtgtcagtttgtcacaggtatctgccagcattcaaggttttggatcatttcatgaggatctt

SEQ ID NO: 18619 - DNA, 78 bp, Homo sapiens
ttgggtgtcagtttgtcacaggtatctgccagcattcaaggttttggatcatttcatgaggatctttcctttgactgg

SEQ ID NO: 18620 - DNA, 79 bp, Homo sapiens
aggtatctgccagcattcaaggttttggatcatttcatgaggatctttcctttgactgggtgctgtgaggacacacctg

SEQ ID NO: 18621 - DNA, 78 bp, Homo sapiens
attcaaggttttggatcatttcatgaggatctttcctttgactgggtgctgtgaggacacacctgggtctgtgcctga

SEQ ID NO: 18622 - DNA, 80 bp, Homo sapiens
gttttggatcatttcatgaggatctttcctttgactgggtgctgtgaggacacacctgggtctgtgcctgagattgccag

SEQ ID NO: 18623 - DNA, 80 bp, Homo sapiens
atttcatgaggatctttcctttgactgggtgctgtgaggacacacctgggtctgtgcctgagattgccaggcaagattaa

SEQ ID NO: 18624 - DNA, 75 bp, Homo sapiens
tttcctttgactgggtgctgtgaggacacacctgggtctgtgcctgagattgccaggcaagattaaggaaagttt

SEQ ID NO: 18625 - DNA, 77 bp, Homo sapiens
actgggtgctgtgaggacacacctgggtctgtgcctgagattgccaggcaagattaaggaaagttttcatgtggctt

SEQ ID NO: 18626 - DNA, 75 bp, Homo sapiens
ctgtgaggacacacctgggtctgtgcctgagattgccaggcaagattaaggaaagttttcatgtggcttttgttt

SEQ ID NO: 18627 - DNA, 72 bp, Homo sapiens
acctgggtctgtgcctgagattgccaggcaagattaaggaaagttttcatgtggcttttgttttgaggttat

SEQ ID NO: 18628 - DNA, 72 bp, Homo sapiens
tgcctgagattgccaggcaagattaaggaaagttttcatgtggcttttgttttgaggttattctcaaaacct

SEQ ID NO: 18629 - DNA, 70 bp, Homo sapiens
gagattgccaggcaagattaaggaaagttttcatgtggcttttgttttgaggttattctcaaaaccttaa

SEQ ID NO: 18630 - DNA, 66 bp, Homo sapiens
aggaaagttttcatgtggcttttgttttgaggttattctcaaaaccttaatttcttatattttctg

SEQ ID NO: 18631 - DNA, 68 bp, Homo sapiens
gtggcttttgttttgaggttattctcaaaaccttaatttcttatattttctgttgactaaggcaccag

SEQ ID NO: 18632 - DNA, 68 bp, Homo sapiens
tttgaggttattctcaaaaccttaatttcttatattttctgttgactaaggcaccagtaacccattct

SEQ ID NO: 18633 - DNA, 70 bp, Homo sapiens
tattctcaaaaccttaatttcttatattttctgttgactaaggcaccagtaacccattcttcaccctcca

SEQ ID NO: 18634 - DNA, 71 bp, Homo sapiens
tttctgttgactaaggcaccagtaacccattcttcaccctccatttgtatggcaatttaaaagtctttggc

SEQ ID NO: 18635 - DNA, 72 bp, Homo sapiens
gcaccagtaacccattcttcaccctccatttgtatggcaatttaaaagtctttggctttgctctgaatttaa

SEQ ID NO: 18636 - DNA, 70 bp, Homo sapiens
agtaacccattcttcaccctccatttgtatggcaatttaaaagtctttggctttgctctgaatttaatta

SEQ ID NO: 18637 - DNA, 69 bp, Homo sapiens
cttcaccctccatttgtatggcaatttaaaagtctttggctttgctctgaatttaattaaaactgcctt

SEQ ID NO: 18638 - DNA, 72 bp, Homo sapiens
tgtatggcaatttaaaagtctttggctttgctctgaatttaattaaaactgccttttatgaacagacttcga

SEQ ID NO: 18639 - DNA, 69 bp, Homo sapiens
ggcaatttaaaagtctttggctttgctctgaatttaattaaaactgccttttatgaacagacttcgagt

SEQ ID NO: 18640 - DNA, 70 bp, Homo sapiens
agtctttggctttgctctgaatttaattaaaactgccttttatgaacagacttcgagttttgccattttg

SEQ ID NO: 18641 - DNA, 67 bp, Homo sapiens
aatttaattaaaactgccttttatgaacagacttcgagttttgccattttgggcaagcccttccgct

SEQ ID NO: 18642 - DNA, 71 bp, Homo sapiens
ttatgaacagacttcgagttttgccattttgggcaagcccttccgcttgtcccttcctagtggctaataaa

SEQ ID NO: 18643 - DNA, 67 bp, Homo sapiens
acttcgagttttgccattttgggcaagcccttccgcttgtcccttcctagtggctaataaagtaaaa

SEQ ID NO: 18644 - DNA, 65 bp, Homo sapiens
attttgggcaagcccttccgcttgtcccttcctagtggctaataaagtaaaaaaacccacactac

SEQ ID NO: 18645 - DNA, 65 bp, Homo sapiens
ttccgcttgtcccttcctagtggctaataaagtaaaaaaacccacactactttgttctctttttc

SEQ ID NO: 18646 - DNA, 69 bp, Homo sapiens
tcctagtggctaataaagtaaaaaaacccacactactttgttctctttttctcatattcattgggctgt

SEQ ID NO: 18647 - DNA, 71 bp, Homo sapiens
gctaataaagtaaaaaaacccacactactttgttctctttttctcatattcattgggctgttgtattcagc

SEQ ID NO: 18648 - DNA, 77 bp, Homo sapiens
acactactttgttctctttttctcatattcattgggctgttgtattcagccagtctcatgctttccctgggtcttca

SEQ ID NO: 18649 - DNA, 79 bp, Homo sapiens
tctctttttctcatattcattgggctgttgtattcagccagtctcatgctttccctgggtcttcacggattgctttcca

SEQ ID NO: 18650 - DNA, 80 bp, Homo sapiens
tcatattcattgggctgttgtattcagccagtctcatgctttccctgggtcttcacggattgctttccaagctgccttgt

SEQ ID NO: 18651 - DNA, 79 bp, Homo sapiens
ttcattgggctgttgtattcagccagtctcatgctttccctgggtcttcacggattgctttccaagctgccttgttgcg

SEQ ID NO: 18652 - DNA, 80 bp, Homo sapiens
ttgtattcagccagtctcatgctttccctgggtcttcacggattgctttccaagctgccttgttgcggggttgctgcaga

SEQ ID NO: 18653 - DNA, 80 bp, Homo sapiens
agtctcatgctttccctgggtcttcacggattgctttccaagctgccttgttgcggggttgctgcagagcagcaactgga

SEQ ID NO: 18654 - DNA, 76 bp, Homo sapiens
tttccctgggtcttcacggattgctttccaagctgccttgttgcggggttgctgcagagcagcaactggacctttc

SEQ ID NO: 18655 - DNA, 80 bp, Homo sapiens
attgctttccaagctgccttgttgcggggttgctgcagagcagcaactggacctttccagctgtcgccatgttccttcca

SEQ ID NO: 18656 - DNA, 78 bp, Homo sapiens
aagctgccttgttgcggggttgctgcagagcagcaactggacctttccagctgtcgccatgttccttccactaaagta

SEQ ID NO: 18657 - DNA, 77 bp, Homo sapiens
tgcggggttgctgcagagcagcaactggacctttccagctgtcgccatgttccttccactaaagtagagggttctta

SEQ ID NO: 18658 - DNA, 75 bp, Homo sapiens
ctgcagagcagcaactggacctttccagctgtcgccatgttccttccactaaagtagagggttcttaaaatggaa

SEQ ID NO: 18659 - DNA, 69 bp, Homo sapiens
agcaactggacctttccagctgtcgccatgttccttccactaaagtagagggttcttaaaatggaaaaa

SEQ ID NO: 18660 - DNA, 67 bp, Homo sapiens
acctttccagctgtcgccatgttccttccactaaagtagagggttcttaaaatggaaaaacctgtgg

SEQ ID NO: 18661 - DNA, 71 bp, Homo sapiens
agctgtcgccatgttccttccactaaagtagagggttcttaaaatggaaaaacctgtgggctcttcatata

SEQ ID NO: 18662 - DNA, 67 bp, Homo sapiens
tccttccactaaagtagagggttcttaaaatggaaaaacctgtgggctcttcatatacctcccttta

SEQ ID NO: 18663 - DNA, 66 bp, Homo sapiens
agggttcttaaaatggaaaaacctgtgggctcttcatatacctccctttagttaagtaatagacca

SEQ ID NO: 18664 - DNA, 71 bp, Homo sapiens
aaaatggaaaaacctgtgggctcttcatatacctccctttagttaagtaatagaccaggcagcttctcatc

SEQ ID NO: 18665 - DNA, 74 bp, Homo sapiens
tcttcatatacctccctttagttaagtaatagaccaggcagcttctcatctcagcatttacctgttaatatttt

SEQ ID NO: 18666 - DNA, 74 bp, Homo sapiens
tacctccctttagttaagtaatagaccaggcagcttctcatctcagcatttacctgttaatatttttgtgaata

SEQ ID NO: 18667 - DNA, 78 bp, Homo sapiens
tagttaagtaatagaccaggcagcttctcatctcagcatttacctgttaatatttttgtgaatagtgctctctacctg

SEQ ID NO: 18668 - DNA, 78 bp, Homo sapiens
tagaccaggcagcttctcatctcagcatttacctgttaatatttttgtgaatagtgctctctacctgtgggtggccgt

SEQ ID NO: 18669 - DNA, 76 bp, Homo sapiens
ttctcatctcagcatttacctgttaatatttttgtgaatagtgctctctacctgtgggtggccgttctcttccact

SEQ ID NO: 18670 - DNA, 74 bp, Homo sapiens
agcatttacctgttaatatttttgtgaatagtgctctctacctgtgggtggccgttctcttccacttgctcgtc

SEQ ID NO: 18671 - DNA, 73 bp, Homo sapiens
tacctgttaatatttttgtgaatagtgctctctacctgtgggtggccgttctcttccacttgctcgtctcccc

SEQ ID NO: 18672 - DNA, 77 bp, Homo sapiens
ttgtgaatagtgctctctacctgtgggtggccgttctcttccacttgctcgtctccccccagccccattctgcataa

SEQ ID NO: 18673 - DNA, 76 bp, Homo sapiens
aatagtgctctctacctgtgggtggccgttctcttccacttgctcgtctccccccagccccattctgcataatcta

SEQ ID NO: 18674 - DNA, 75 bp, Homo sapiens
tctacctgtgggtggccgttctcttccacttgctcgtctccccccagccccattctgcataatctaccattcttc

SEQ ID NO: 18675 - DNA, 74 bp, Homo sapiens
ggtggccgttctcttccacttgctcgtctccccccagccccattctgcataatctaccattcttctcctctctt

SEQ ID NO: 18676 - DNA, 77 bp, Homo sapiens
tcttccacttgctcgtctccccccagccccattctgcataatctaccattcttctcctctctttctcttcttataca

SEQ ID NO: 18677 - DNA, 76 bp, Homo sapiens
tcgtctccccccagccccattctgcataatctaccattcttctcctctctttctcttcttatacagaccctcatta

SEQ ID NO: 18678 - DNA, 75 bp, Homo sapiens
agccccattctgcataatctaccattcttctcctctctttctcttcttatacagaccctcattactggggcccaa

SEQ ID NO: 18679 - DNA, 76 bp, Homo sapiens
attctgcataatctaccattcttctcctctctttctcttcttatacagaccctcattactggggcccaagatgtgg

SEQ ID NO: 18680 - DNA, 74 bp, Homo sapiens
aatctaccattcttctcctctctttctcttcttatacagaccctcattactggggcccaagatgtgggatacta

SEQ ID NO: 18681 - DNA, 72 bp, Homo sapiens
ttctcttcttatacagaccctcattactggggcccaagatgtgggatactactgttagtattatttaactat

SEQ ID NO: 18682 - DNA, 72 bp, Homo sapiens
ttatacagaccctcattactggggcccaagatgtgggatactactgttagtattatttaactattttgtaga

SEQ ID NO: 18683 - DNA, 67 bp, Homo sapiens
tgggatactactgttagtattatttaactattttgtagatttaaaagatttctggttaagggaggtg

SEQ ID NO: 18684 - DNA, 64 bp, Homo sapiens
actactgttagtattatttaactattttgtagatttaaaagatttctggttaagggaggtgggg

SEQ ID NO: 18685 - DNA, 67 bp, Homo sapiens
atttaactattttgtagatttaaaagatttctggttaagggaggtgggggtcactgttcatcactct

SEQ ID NO: 18686 - DNA, 69 bp, Homo sapiens
tttgtagatttaaaagatttctggttaagggaggtgggggtcactgttcatcactcttaaaatatgtgt

SEQ ID NO: 18687 - DNA, 70 bp, Homo sapiens
tttctggttaagggaggtgggggtcactgttcatcactcttaaaatatgtgttttctctatagaaaagta

SEQ ID NO: 18688 - DNA, 71 bp, Homo sapiens
ggaggtgggggtcactgttcatcactcttaaaatatgtgttttctctatagaaaagtaaaatgtgtttatg

SEQ ID NO: 18689 - DNA, 72 bp, Homo sapiens
gtcactgttcatcactcttaaaatatgtgttttctctatagaaaagtaaaatgtgtttatggtcccaaacag

SEQ ID NO: 18690 - DNA, 73 bp, Homo sapiens
catcactcttaaaatatgtgttttctctatagaaaagtaaaatgtgtttatggtcccaaacagtcaactcaca

SEQ ID NO: 18691 - DNA, 69 bp, Homo sapiens
cttaaaatatgtgttttctctatagaaaagtaaaatgtgtttatggtcccaaacagtcaactcacaaat

SEQ ID NO: 18692 - DNA, 69 bp, Homo sapiens
gtgttttctctatagaaaagtaaaatgtgtttatggtcccaaacagtcaactcacaaatttttataaca

SEQ ID NO: 18693 - DNA, 66 bp, Homo sapiens
gaaaagtaaaatgtgtttatggtcccaaacagtcaactcacaaatttttataacaaaatttccttg

SEQ ID NO: 18694 - DNA, 66 bp, Homo sapiens
tgtgtttatggtcccaaacagtcaactcacaaatttttataacaaaatttccttgtaaaaactagg

SEQ ID NO: 18695 - DNA, 66 bp, Homo sapiens
ggtcccaaacagtcaactcacaaatttttataacaaaatttccttgtaaaaactagggaccatcta

SEQ ID NO: 18696 - DNA, 66 bp, Homo sapiens
cacaaatttttataacaaaatttccttgtaaaaactagggaccatctatatattccctttaagatc

SEQ ID NO: 18697 - DNA, 65 bp, Homo sapiens
aacaaaatttccttgtaaaaactagggaccatctatatattccctttaagatctagttctttttg

SEQ ID NO: 18698 - DNA, 69 bp, Homo sapiens
ccttgtaaaaactagggaccatctatatattccctttaagatctagttctttttgtaggtgttcagcaa

SEQ ID NO: 18699 - DNA, 76 bp, Homo sapiens
gaccatctatatattccctttaagatctagttctttttgtaggtgttcagcaatggtgataaagcagaatattctc

SEQ ID NO: 18700 - DNA, 75 bp, Homo sapiens
tatattccctttaagatctagttctttttgtaggtgttcagcaatggtgataaagcagaatattctcctacctca

SEQ ID NO: 18701 - DNA, 78 bp, Homo sapiens
tgttcagcaatggtgataaagcagaatattctcctacctcacgtcattaaagtcagaagattatagaccttctcaaac

SEQ ID NO: 18702 - DNA, 76 bp, Homo sapiens
caatggtgataaagcagaatattctcctacctcacgtcattaaagtcagaagattatagaccttctcaaactataa

SEQ ID NO: 18703 - DNA, 73 bp, Homo sapiens
cagaatattctcctacctcacgtcattaaagtcagaagattatagaccttctcaaactataagtccctcttct

SEQ ID NO: 18704 - DNA, 72 bp, Homo sapiens
ttctcctacctcacgtcattaaagtcagaagattatagaccttctcaaactataagtccctcttcttgccgt

SEQ ID NO: 18705 - DNA, 72 bp, Homo sapiens
acgtcattaaagtcagaagattatagaccttctcaaactataagtccctcttcttgccgttggcctttctga

SEQ ID NO: 18706 - DNA, 73 bp, Homo sapiens
ttaaagtcagaagattatagaccttctcaaactataagtccctcttcttgccgttggcctttctgactctgga

SEQ ID NO: 18707 - DNA, 74 bp, Homo sapiens
attatagaccttctcaaactataagtccctcttcttgccgttggcctttctgactctggaatgaccactgttca

SEQ ID NO: 18708 - DNA, 74 bp, Homo sapiens
ttctcaaactataagtccctcttcttgccgttggcctttctgactctggaatgaccactgttcattgaaaaata

SEQ ID NO: 18709 - DNA, 71 bp, Homo sapiens
actataagtccctcttcttgccgttggcctttctgactctggaatgaccactgttcattgaaaaatagttt

SEQ ID NO: 18710 - DNA, 75 bp, Homo sapiens
tcttcttgccgttggcctttctgactctggaatgaccactgttcattgaaaaatagttttctgactattggtctg

SEQ ID NO: 18711 - DNA, 75 bp, Homo sapiens
aatgaccactgttcattgaaaaatagttttctgactattggtctggctctaacagtttgtttgttcatccagcaa

SEQ ID NO: 18712 - DNA, 83 bp, Homo sapiens
ttctgactattggtctggctctaacagtttgtttgttcatccagcaaatgtttatgagtgatgaccatgtgccagaaatgtca

SEQ ID NO: 18713 - DNA, 82 bp, Homo sapiens
tggctctaacagtttgtttgttcatccagcaaatgtttatgagtgatgaccatgtgccagaaatgtcaggtatgtgtccttc

SEQ ID NO: 18714 - DNA, 79 bp, Homo sapiens
taacagtttgtttgttcatccagcaaatgtttatgagtgatgaccatgtgccagaaatgtcaggtatgtgtccttccct

SEQ ID NO: 18715 - DNA, 83 bp, Homo sapiens
ttgttcatccagcaaatgtttatgagtgatgaccatgtgccagaaatgtcaggtatgtgtccttcccttggcgccacatagta

SEQ ID NO: 18716 - DNA, 78 bp, Homo sapiens
aaatgtttatgagtgatgaccatgtgccagaaatgtcaggtatgtgtccttcccttggcgccacatagtagtttacta

SEQ ID NO: 18717 - DNA, 78 bp, Homo sapiens
tttatgagtgatgaccatgtgccagaaatgtcaggtatgtgtccttcccttggcgccacatagtagtttactaatgtt

SEQ ID NO: 18718 - DNA, 75 bp, Homo sapiens
catgtgccagaaatgtcaggtatgtgtccttcccttggcgccacatagtagtttactaatgtttgggggattgta

SEQ ID NO: 18719 - DNA, 71 bp, Homo sapiens
aaatgtcaggtatgtgtccttcccttggcgccacatagtagtttactaatgtttgggggattgtacttgga

SEQ ID NO: 18720 - DNA, 72 bp, Homo sapiens
aggtatgtgtccttcccttggcgccacatagtagtttactaatgtttgggggattgtacttggactgtcata

SEQ ID NO: 18721 - DNA, 71 bp, Homo sapiens
ccacatagtagtttactaatgtttgggggattgtacttggactgtcatagcctctgcgtttgaccttaaaa

SEQ ID NO: 18722 - DNA, 72 bp, Homo sapiens
tagtagtttactaatgtttgggggattgtacttggactgtcatagcctctgcgtttgaccttaaaatagctc

SEQ ID NO: 18723 - DNA, 72 bp, Homo sapiens
ctaatgtttgggggattgtacttggactgtcatagcctctgcgtttgaccttaaaatagctcttcccagtaa

SEQ ID NO: 18724 - DNA, 74 bp, Homo sapiens
attgtacttggactgtcatagcctctgcgtttgaccttaaaatagctcttcccagtaagattgtgcaattttta

SEQ ID NO: 18725 - DNA, 76 bp, Homo sapiens
actgtcatagcctctgcgtttgaccttaaaatagctcttcccagtaagattgtgcaatttttattcacagctcttc

SEQ ID NO: 18726 - DNA, 76 bp, Homo sapiens
atagcctctgcgtttgaccttaaaatagctcttcccagtaagattgtgcaatttttattcacagctcttccatgta

SEQ ID NO: 18727 - DNA, 75 bp, Homo sapiens
ttaaaatagctcttcccagtaagattgtgcaatttttattcacagctcttccatgtagacttacctttcctcata

SEQ ID NO: 18728 - DNA, 76 bp, Homo sapiens
ccagtaagattgtgcaatttttattcacagctcttccatgtagacttacctttcctcatagagctatcctggttaa

SEQ ID NO: 18729 - DNA, 76 bp, Homo sapiens
aagattgtgcaatttttattcacagctcttccatgtagacttacctttcctcatagagctatcctggttaataaca

SEQ ID NO: 18730 - DNA, 74 bp, Homo sapiens
atttttattcacagctcttccatgtagacttacctttcctcatagagctatcctggttaataacaggccaagat

SEQ ID NO: 18731 - DNA, 73 bp, Homo sapiens
atgtagacttacctttcctcatagagctatcctggttaataacaggccaagattctcccattatcccctgttg

SEQ ID NO: 18732 - DNA, 74 bp, Homo sapiens
ttacctttcctcatagagctatcctggttaataacaggccaagattctcccattatcccctgttgtctcctgta

SEQ ID NO: 18733 - DNA, 76 bp, Homo sapiens
atagagctatcctggttaataacaggccaagattctcccattatcccctgttgtctcctgtagctttgataatgcc

SEQ ID NO: 18734 - DNA, 75 bp, Homo sapiens
ctggttaataacaggccaagattctcccattatcccctgttgtctcctgtagctttgataatgcctgggagattc

SEQ ID NO: 18735 - DNA, 76 bp, Homo sapiens
tatcccctgttgtctcctgtagctttgataatgcctgggagattccttggtgtaagtgtcatggataccgactgtt

SEQ ID NO: 18736 - DNA, 76 bp, Homo sapiens
tgttgtctcctgtagctttgataatgcctgggagattccttggtgtaagtgtcatggataccgactgtttttatgt

SEQ ID NO: 18737 - DNA, 74 bp, Homo sapiens
tagctttgataatgcctgggagattccttggtgtaagtgtcatggataccgactgtttttatgttggaatttgt

SEQ ID NO: 18738 - DNA, 73 bp, Homo sapiens
ataatgcctgggagattccttggtgtaagtgtcatggataccgactgtttttatgttggaatttgttccaaca

SEQ ID NO: 18739 - DNA, 72 bp, Homo sapiens
agattccttggtgtaagtgtcatggataccgactgtttttatgttggaatttgttccaacataattagaatc

SEQ ID NO: 18740 - DNA, 74 bp, Homo sapiens
tggtgtaagtgtcatggataccgactgtttttatgttggaatttgttccaacataattagaatctgtttggtga

SEQ ID NO: 18741 - DNA, 71 bp, Homo sapiens
catggataccgactgtttttatgttggaatttgttccaacataattagaatctgtttggtgagttgaaagg

SEQ ID NO: 18742 - DNA, 72 bp, Homo sapiens
tgtttttatgttggaatttgttccaacataattagaatctgtttggtgagttgaaaggtaagttggctcaga

SEQ ID NO: 18743 - DNA, 75 bp, Homo sapiens
ttatgttggaatttgttccaacataattagaatctgtttggtgagttgaaaggtaagttggctcagagttgcaca

SEQ ID NO: 18744 - DNA, 73 bp, Homo sapiens
ataattagaatctgtttggtgagttgaaaggtaagttggctcagagttgcacagtagggcattaaatgtttaa

SEQ ID NO: 18745 - DNA, 75 bp, Homo sapiens
aatctgtttggtgagttgaaaggtaagttggctcagagttgcacagtagggcattaaatgtttaagcaaagcatc

SEQ ID NO: 18746 - DNA, 77 bp, Homo sapiens
taagttggctcagagttgcacagtagggcattaaatgtttaagcaaagcatctgcccacactcccctttccaatcta

SEQ ID NO: 18747 - DNA, 75 bp, Homo sapiens
gagttgcacagtagggcattaaatgtttaagcaaagcatctgcccacactcccctttccaatctagtgccttcct

SEQ ID NO: 18748 - DNA, 70 bp, Homo sapiens
attaaatgtttaagcaaagcatctgcccacactcccctttccaatctagtgccttccttgaactttttcc

SEQ ID NO: 18749 - DNA, 74 bp, Homo sapiens
tttaagcaaagcatctgcccacactcccctttccaatctagtgccttccttgaactttttcctgagctgctacg

SEQ ID NO: 18750 - DNA, 68 bp, Homo sapiens
aatctagtgccttccttgaactttttcctgagctgctacgtccctaatcccccttgttgggaggattt

SEQ ID NO: 18751 - DNA, 68 bp, Homo sapiens
ttccttgaactttttcctgagctgctacgtccctaatcccccttgttgggaggattttcgtatcaccc

SEQ ID NO: 18752 - DNA, 67 bp, Homo sapiens
aactttttcctgagctgctacgtccctaatcccccttgttgggaggattttcgtatcacccttatgg

SEQ ID NO: 18753 - DNA, 71 bp, Homo sapiens
agctgctacgtccctaatcccccttgttgggaggattttcgtatcacccttatgggacctgtcaccatgtc

SEQ ID NO: 18754 - DNA, 70 bp, Homo sapiens
tccctaatcccccttgttgggaggattttcgtatcacccttatgggacctgtcaccatgtcctgtactat

SEQ ID NO: 18755 - DNA, 70 bp, Homo sapiens
ccttgttgggaggattttcgtatcacccttatgggacctgtcaccatgtcctgtactatttggaattggt

SEQ ID NO: 18756 - DNA, 70 bp, Homo sapiens
aggattttcgtatcacccttatgggacctgtcaccatgtcctgtactatttggaattggttttccagtct

SEQ ID NO: 18757 - DNA, 72 bp, Homo sapiens
tttcgtatcacccttatgggacctgtcaccatgtcctgtactatttggaattggttttccagtctttcaaca

SEQ ID NO: 18758 - DNA, 72 bp, Homo sapiens
tatgggacctgtcaccatgtcctgtactatttggaattggttttccagtctttcaacaaccgttgtggctaa

SEQ ID NO: 18759 - DNA, 69 bp, Homo sapiens
atgtcctgtactatttggaattggttttccagtctttcaacaaccgttgtggctaactatgttttagaa

SEQ ID NO: 18760 - DNA, 68 bp, Homo sapiens
ctatttggaattggttttccagtctttcaacaaccgttgtggctaactatgttttagaagggctggag

SEQ ID NO: 18761 - DNA, 69 bp, Homo sapiens
ttttccagtctttcaacaaccgttgtggctaactatgttttagaagggctggaggtgtgggccctgtct

SEQ ID NO: 18762 - DNA, 71 bp, Homo sapiens
tctttcaacaaccgttgtggctaactatgttttagaagggctggaggtgtgggccctgtcttcgggtctca

SEQ ID NO: 18763 - DNA, 71 bp, Homo sapiens
gttgtggctaactatgttttagaagggctggaggtgtgggccctgtcttcgggtctcaggacccaaagatc

SEQ ID NO: 18764 - DNA, 69 bp, Homo sapiens
taactatgttttagaagggctggaggtgtgggccctgtcttcgggtctcaggacccaaagatcctttag

SEQ ID NO: 18765 - DNA, 69 bp, Homo sapiens
ttttagaagggctggaggtgtgggccctgtcttcgggtctcaggacccaaagatcctttagtcagttgt

SEQ ID NO: 18766 - DNA, 71 bp, Homo sapiens
tggaggtgtgggccctgtcttcgggtctcaggacccaaagatcctttagtcagttgttgggtcttccaaga

SEQ ID NO: 18767 - DNA, 71 bp, Homo sapiens
ccctgtcttcgggtctcaggacccaaagatcctttagtcagttgttgggtcttccaagagccagacattaa

SEQ ID NO: 18768 - DNA, 73 bp, Homo sapiens
tcttcgggtctcaggacccaaagatcctttagtcagttgttgggtcttccaagagccagacattaatacagat

SEQ ID NO: 18769 - DNA, 74 bp, Homo sapiens
aggacccaaagatcctttagtcagttgttgggtcttccaagagccagacattaatacagattgaactccatcag

SEQ ID NO: 18770 - DNA, 74 bp, Homo sapiens
agatcctttagtcagttgttgggtcttccaagagccagacattaatacagattgaactccatcagtcccctaat

SEQ ID NO: 18771 - DNA, 74 bp, Homo sapiens
agttgttgggtcttccaagagccagacattaatacagattgaactccatcagtcccctaattgtcagcctttac

SEQ ID NO: 18772 - DNA, 75 bp, Homo sapiens
tgggtcttccaagagccagacattaatacagattgaactccatcagtcccctaattgtcagcctttacctccctc

SEQ ID NO: 18773 - DNA, 75 bp, Homo sapiens
aagagccagacattaatacagattgaactccatcagtcccctaattgtcagcctttacctccctcccagagcaag

SEQ ID NO: 18774 - DNA, 72 bp, Homo sapiens
attaatacagattgaactccatcagtcccctaattgtcagcctttacctccctcccagagcaaggagtttag

SEQ ID NO: 18775 - DNA, 70 bp, Homo sapiens
atcagtcccctaattgtcagcctttacctccctcccagagcaaggagtttagggattctaaagcttagtg

SEQ ID NO: 18776 - DNA, 74 bp, Homo sapiens
attgtcagcctttacctccctcccagagcaaggagtttagggattctaaagcttagtgtccacacatcattcta

SEQ ID NO: 18777 - DNA, 73 bp, Homo sapiens
ttacctccctcccagagcaaggagtttagggattctaaagcttagtgtccacacatcattctaccagacctta

SEQ ID NO: 18778 - DNA, 74 bp, Homo sapiens
cccagagcaaggagtttagggattctaaagcttagtgtccacacatcattctaccagaccttagagctttagaa

SEQ ID NO: 18779 - DNA, 75 bp, Homo sapiens
gagtttagggattctaaagcttagtgtccacacatcattctaccagaccttagagctttagaagctcaatctaaa

SEQ ID NO: 18780 - DNA, 78 bp, Homo sapiens
ttagtgtccacacatcattctaccagaccttagagctttagaagctcaatctaaaatactgtaactcagcataaacta

SEQ ID NO: 18781 - DNA, 78 bp, Homo sapiens
acacatcattctaccagaccttagagctttagaagctcaatctaaaatactgtaactcagcataaactattactatca

SEQ ID NO: 18782 - DNA, 76 bp, Homo sapiens
taccagaccttagagctttagaagctcaatctaaaatactgtaactcagcataaactattactatcactcctttga

SEQ ID NO: 18783 - DNA, 79 bp, Homo sapiens
ctttagaagctcaatctaaaatactgtaactcagcataaactattactatcactcctttgaactcagtctccatgagca

SEQ ID NO: 18784 - DNA, 75 bp, Homo sapiens
ataaactattactatcactcctttgaactcagtctccatgagcagtgttttgttggaaatacatagaacggctta

SEQ ID NO: 18785 - DNA, 78 bp, Homo sapiens
tattactatcactcctttgaactcagtctccatgagcagtgttttgttggaaatacatagaacggcttaatgcctaga

SEQ ID NO: 18786 - DNA, 76 bp, Homo sapiens
ctttgaactcagtctccatgagcagtgttttgttggaaatacatagaacggcttaatgcctagagggtggtggata

SEQ ID NO: 18787 - DNA, 76 bp, Homo sapiens
aactcagtctccatgagcagtgttttgttggaaatacatagaacggcttaatgcctagagggtggtggatagtgaa

SEQ ID NO: 18788 - DNA, 72 bp, Homo sapiens
agcagtgttttgttggaaatacatagaacggcttaatgcctagagggtggtggatagtgaaggacggtcaag

SEQ ID NO: 18789 - DNA, 71 bp, Homo sapiens
tgttggaaatacatagaacggcttaatgcctagagggtggtggatagtgaaggacggtcaaggttatattt

SEQ ID NO: 18790 - DNA, 70 bp, Homo sapiens
aaatacatagaacggcttaatgcctagagggtggtggatagtgaaggacggtcaaggttatatttttgac

SEQ ID NO: 18791 - DNA, 71 bp, Homo sapiens
gcttaatgcctagagggtggtggatagtgaaggacggtcaaggttatatttttgactgcttagggattctt

SEQ ID NO: 18792 - DNA, 72 bp, Homo sapiens
tagagggtggtggatagtgaaggacggtcaaggttatatttttgactgcttagggattctttggatccaaga

SEQ ID NO: 18793 - DNA, 71 bp, Homo sapiens
gtggatagtgaaggacggtcaaggttatatttttgactgcttagggattctttggatccaagaaacagaaa

SEQ ID NO: 18794 - DNA, 71 bp, Homo sapiens
agtgaaggacggtcaaggttatatttttgactgcttagggattctttggatccaagaaacagaaatgttca

SEQ ID NO: 18795 - DNA, 70 bp, Homo sapiens
aggttatatttttgactgcttagggattctttggatccaagaaacagaaatgttcaagcggaataaagga

SEQ ID NO: 18796 - DNA, 70 bp, Homo sapiens
atatttttgactgcttagggattctttggatccaagaaacagaaatgttcaagcggaataaaggagggag

SEQ ID NO: 18797 - DNA, 70 bp, Homo sapiens
ttagggattctttggatccaagaaacagaaatgttcaagcggaataaaggagggagtggagttgtggtaa

SEQ ID NO: 18798 - DNA, 72 bp, Homo sapiens
attctttggatccaagaaacagaaatgttcaagcggaataaaggagggagtggagttgtggtaaggatgcag

SEQ ID NO: 18799 - DNA, 72 bp, Homo sapiens
agaaacagaaatgttcaagcggaataaaggagggagtggagttgtggtaaggatgcagggtatttcgcagaa

SEQ ID NO: 18800 - DNA, 71 bp, Homo sapiens
agaaatgttcaagcggaataaaggagggagtggagttgtggtaaggatgcagggtatttcgcagaacccag

SEQ ID NO: 18801 - DNA, 69 bp, Homo sapiens
aagcggaataaaggagggagtggagttgtggtaaggatgcagggtatttcgcagaacccaggacgggaa

SEQ ID NO: 18802 - DNA, 73 bp, Homo sapiens
gtaaggatgcagggtatttcgcagaacccaggacgggaagtgcctttggttcttgggtggagctggaactgca

SEQ ID NO: 18803 - DNA, 74 bp, Homo sapiens
gtatttcgcagaacccaggacgggaagtgcctttggttcttgggtggagctggaactgcagagctttgcaccta

SEQ ID NO: 18804 - DNA, 71 bp, Homo sapiens
aacccaggacgggaagtgcctttggttcttgggtggagctggaactgcagagctttgcacctagtcctttc

SEQ ID NO: 18805 - DNA, 73 bp, Homo sapiens
acgggaagtgcctttggttcttgggtggagctggaactgcagagctttgcacctagtcctttctcccgcttca

SEQ ID NO: 18806 - DNA, 78 bp, Homo sapiens
ttggttcttgggtggagctggaactgcagagctttgcacctagtcctttctcccgcttcacagtctgcttatggtata

SEQ ID NO: 18807 - DNA, 80 bp, Homo sapiens
tcttgggtggagctggaactgcagagctttgcacctagtcctttctcccgcttcacagtctgcttatggtatatgtggcc

SEQ ID NO: 18808 - DNA, 77 bp, Homo sapiens
ctggaactgcagagctttgcacctagtcctttctcccgcttcacagtctgcttatggtatatgtggcccccaaatag

SEQ ID NO: 18809 - DNA, 76 bp, Homo sapiens
agctttgcacctagtcctttctcccgcttcacagtctgcttatggtatatgtggcccccaaataggcactctagtc

SEQ ID NO: 18810 - DNA, 77 bp, Homo sapiens
tagtcctttctcccgcttcacagtctgcttatggtatatgtggcccccaaataggcactctagtcctcaagtctaca

SEQ ID NO: 18811 - DNA, 76 bp, Homo sapiens
tttctcccgcttcacagtctgcttatggtatatgtggcccccaaataggcactctagtcctcaagtctacaccacc

SEQ ID NO: 18812 - DNA, 77 bp, Homo sapiens
ttcacagtctgcttatggtatatgtggcccccaaataggcactctagtcctcaagtctacaccaccttccaactctg

SEQ ID NO: 18813 - DNA, 75 bp, Homo sapiens
ttatggtatatgtggcccccaaataggcactctagtcctcaagtctacaccaccttccaactctggggatcacca

SEQ ID NO: 18814 - DNA, 75 bp, Homo sapiens
atatgtggcccccaaataggcactctagtcctcaagtctacaccaccttccaactctggggatcaccatgaacaa

SEQ ID NO: 18815 - DNA, 74 bp, Homo sapiens
aaataggcactctagtcctcaagtctacaccaccttccaactctggggatcaccatgaacaaattctcaatttc

SEQ ID NO: 18816 - DNA, 73 bp, Homo sapiens
tagtcctcaagtctacaccaccttccaactctggggatcaccatgaacaaattctcaatttcccatacttaat

SEQ ID NO: 18817 - DNA, 69 bp, Homo sapiens
aagtctacaccaccttccaactctggggatcaccatgaacaaattctcaatttcccatacttaattttt

SEQ ID NO: 18818 - DNA, 67 bp, Homo sapiens
caccaccttccaactctggggatcaccatgaacaaattctcaatttcccatacttaatttttttttt

SEQ ID NO: 18819 - DNA, 76 bp, Homo sapiens
cgcgcccggcccatacttcgtattcttaaaaaaaactacactcagcccagcacattgatcaagtatctatctctga

SEQ ID NO: 18820 - DNA, 77 bp, Homo sapiens
ccatacttcgtattcttaaaaaaaactacactcagcccagcacattgatcaagtatctatctctgagcagttggcct

SEQ ID NO: 18821 - DNA, 78 bp, Homo sapiens
cttcgtattcttaaaaaaaactacactcagcccagcacattgatcaagtatctatctctgagcagttggccttgccag

SEQ ID NO: 18822 - DNA, 85 bp, Homo sapiens
aaaaactacactcagcccagcacattgatcaagtatctatctctgagcagttggccttgccagggagagcagagatgtggcaggc

SEQ ID NO: 18823 - DNA, 90 bp, Homo sapiens
tacactcagcccagcacattgatcaagtatctatctctgagcagttggccttgccagggagagcagagatgtggcaggctccttcagctg

SEQ ID NO: 18824 - DNA, 88 bp, Homo sapiens
agcacattgatcaagtatctatctctgagcagttggccttgccagggagagcagagatgtggcaggctccttcagctggagacaggga

SEQ ID NO: 18825 - DNA, 87 bp, Homo sapiens
atcaagtatctatctctgagcagttggccttgccagggagagcagagatgtggcaggctccttcagctggagacagggagcttctca

SEQ ID NO: 18826 - DNA, 88 bp, Homo sapiens
tctatctctgagcagttggccttgccagggagagcagagatgtggcaggctccttcagctggagacagggagcttctcagagaagtga

SEQ ID NO: 18827 - DNA, 85 bp, Homo sapiens
agttggccttgccagggagagcagagatgtggcaggctccttcagctggagacagggagcttctcagagaagtgagcagagactc

SEQ ID NO: 18828 - DNA, 86 bp, Homo sapiens
cagggagagcagagatgtggcaggctccttcagctggagacagggagcttctcagagaagtgagcagagactccacagacacccta

SEQ ID NO: 18829 - DNA, 81 bp, Homo sapiens
agagatgtggcaggctccttcagctggagacagggagcttctcagagaagtgagcagagactccacagacaccctaaaaag

SEQ ID NO: 18830 - DNA, 79 bp, Homo sapiens
caggctccttcagctggagacagggagcttctcagagaagtgagcagagactccacagacaccctaaaaaggcttctac

SEQ ID NO: 18831 - DNA, 80 bp, Homo sapiens
tcagctggagacagggagcttctcagagaagtgagcagagactccacagacaccctaaaaaggcttctactcaagaagta

SEQ ID NO: 18832 - DNA, 76 bp, Homo sapiens
agacagggagcttctcagagaagtgagcagagactccacagacaccctaaaaaggcttctactcaagaagtaaagc

SEQ ID NO: 18833 - DNA, 76 bp, Homo sapiens
agcttctcagagaagtgagcagagactccacagacaccctaaaaaggcttctactcaagaagtaaagccactactc

SEQ ID NO: 18834 - DNA, 75 bp, Homo sapiens
cttctcagagaagtgagcagagactccacagacaccctaaaaaggcttctactcaagaagtaaagccactactcc

SEQ ID NO: 18835 - DNA, 73 bp, Homo sapiens
agaagtgagcagagactccacagacaccctaaaaaggcttctactcaagaagtaaagccactactcctgcctt

SEQ ID NO: 18836 - DNA, 72 bp, Homo sapiens
agtgagcagagactccacagacaccctaaaaaggcttctactcaagaagtaaagccactactcctgcctttt

SEQ ID NO: 18837 - DNA, 70 bp, Homo sapiens
acagacaccctaaaaaggcttctactcaagaagtaaagccactactcctgcctttttgcttagtggacag

SEQ ID NO: 18838 - DNA, 69 bp, Homo sapiens
acaccctaaaaaggcttctactcaagaagtaaagccactactcctgcctttttgcttagtggacaggaa

SEQ ID NO: 18839 - DNA, 71 bp, Homo sapiens
aaaaaggcttctactcaagaagtaaagccactactcctgcctttttgcttagtggacaggaaggcacagga

SEQ ID NO: 18840 - DNA, 73 bp, Homo sapiens
cttctactcaagaagtaaagccactactcctgcctttttgcttagtggacaggaaggcacaggagtttgtctg

SEQ ID NO: 18841 - DNA, 74 bp, Homo sapiens
aagtaaagccactactcctgcctttttgcttagtggacaggaaggcacaggagtttgtctgggacatcatagaa

SEQ ID NO: 18842 - DNA, 71 bp, Homo sapiens
ctttttgcttagtggacaggaaggcacaggagtttgtctgggacatcatagaaattcttaggtttaactta

SEQ ID NO: 18843 - DNA, 73 bp, Homo sapiens
tagtggacaggaaggcacaggagtttgtctgggacatcatagaaattcttaggtttaacttaattctggtcat

SEQ ID NO: 18844 - DNA, 71 bp, Homo sapiens
aaggcacaggagtttgtctgggacatcatagaaattcttaggtttaacttaattctggtcattgtcttctt

SEQ ID NO: 18845 - DNA, 70 bp, Homo sapiens
acaggagtttgtctgggacatcatagaaattcttaggtttaacttaattctggtcattgtcttctttatt

SEQ ID NO: 18846 - DNA, 69 bp, Homo sapiens
gtctgggacatcatagaaattcttaggtttaacttaattctggtcattgtcttctttatttcctgtttt

SEQ ID NO: 18847 - DNA, 67 bp, Homo sapiens
tcatagaaattcttaggtttaacttaattctggtcattgtcttctttatttcctgtttttcttccct

SEQ ID NO: 18848 - DNA, 71 bp, Homo sapiens
tggtcattgtcttctttatttcctgtttttcttccctttgtcagtcttcgcatccaagatttcttccctcc

SEQ ID NO: 18849 - DNA, 69 bp, Homo sapiens
ttctttatttcctgtttttcttccctttgtcagtcttcgcatccaagatttcttccctccctcttgtgg

SEQ ID NO: 18850 - DNA, 72 bp, Homo sapiens
tttttcttccctttgtcagtcttcgcatccaagatttcttccctccctcttgtgggccagcctgtcctgttc

SEQ ID NO: 18851 - DNA, 75 bp, Homo sapiens
cttccctttgtcagtcttcgcatccaagatttcttccctccctcttgtgggccagcctgtcctgttccagagcta

SEQ ID NO: 18852 - DNA, 76 bp, Homo sapiens
tcttcgcatccaagatttcttccctccctcttgtgggccagcctgtcctgttccagagctagcctgttcctgggta

SEQ ID NO: 18853 - DNA, 73 bp, Homo sapiens
atccaagatttcttccctccctcttgtgggccagcctgtcctgttccagagctagcctgttcctgggtagcct

SEQ ID NO: 18854 - DNA, 73 bp, Homo sapiens
cttccctccctcttgtgggccagcctgtcctgttccagagctagcctgttcctgggtagccttccttagcctc

SEQ ID NO: 18855 - DNA, 77 bp, Homo sapiens
tgtgggccagcctgtcctgttccagagctagcctgttcctgggtagccttccttagcctccattcagcctcaggtct

SEQ ID NO: 18856 - DNA, 74 bp, Homo sapiens
cctgtcctgttccagagctagcctgttcctgggtagccttccttagcctccattcagcctcaggtcttttgcct

SEQ ID NO: 18857 - DNA, 74 bp, Homo sapiens
cctgttccagagctagcctgttcctgggtagccttccttagcctccattcagcctcaggtcttttgccttcttc

SEQ ID NO: 18858 - DNA, 71 bp, Homo sapiens
gcctgttcctgggtagccttccttagcctccattcagcctcaggtcttttgccttcttccgtgtttattta

SEQ ID NO: 18859 - DNA, 74 bp, Homo sapiens
tgggtagccttccttagcctccattcagcctcaggtcttttgccttcttccgtgtttatttagagagcagaatc

SEQ ID NO: 18860 - DNA, 73 bp, Homo sapiens
ttccttagcctccattcagcctcaggtcttttgccttcttccgtgtttatttagagagcagaatctaataacg

SEQ ID NO: 18861 - DNA, 73 bp, Homo sapiens
cattcagcctcaggtcttttgccttcttccgtgtttatttagagagcagaatctaataacgggttccactgta

SEQ ID NO: 18862 - DNA, 72 bp, Homo sapiens
caggtcttttgccttcttccgtgtttatttagagagcagaatctaataacgggttccactgtagccactatc

SEQ ID NO: 18863 - DNA, 73 bp, Homo sapiens
aatctaataacgggttccactgtagccactatccatggacttctgggtcctcttcaggtttgagtgcttgaaa

SEQ ID NO: 18864 - DNA, 77 bp, Homo sapiens
actgtagccactatccatggacttctgggtcctcttcaggtttgagtgcttgaaaatgttcattctctgggcttgtg

SEQ ID NO: 18865 - DNA, 77 bp, Homo sapiens
actatccatggacttctgggtcctcttcaggtttgagtgcttgaaaatgttcattctctgggcttgtggcctgtctc

SEQ ID NO: 18866 - DNA, 76 bp, Homo sapiens
acttctgggtcctcttcaggtttgagtgcttgaaaatgttcattctctgggcttgtggcctgtctcctccactctc

SEQ ID NO: 18867 - DNA, 77 bp, Homo sapiens
gtcctcttcaggtttgagtgcttgaaaatgttcattctctgggcttgtggcctgtctcctccactctcctcctcacc

SEQ ID NO: 18868 - DNA, 78 bp, Homo sapiens
tttgagtgcttgaaaatgttcattctctgggcttgtggcctgtctcctccactctcctcctcaccctctcgctccttc

SEQ ID NO: 18869 - DNA, 78 bp, Homo sapiens
ttgaaaatgttcattctctgggcttgtggcctgtctcctccactctcctcctcaccctctcgctccttcctgtgtgag

SEQ ID NO: 18870 - DNA, 81 bp, Homo sapiens
ttcattctctgggcttgtggcctgtctcctccactctcctcctcaccctctcgctccttcctgtgtgagggccgctctgca

SEQ ID NO: 18871 - DNA, 80 bp, Homo sapiens
ttgtggcctgtctcctccactctcctcctcaccctctcgctccttcctgtgtgagggccgctctgcagtaatgttctcag

SEQ ID NO: 18872 - DNA, 80 bp, Homo sapiens
tctcctccactctcctcctcaccctctcgctccttcctgtgtgagggccgctctgcagtaatgttctcaggcaagccttc

SEQ ID NO: 18873 - DNA, 78 bp, Homo sapiens
ccctctcgctccttcctgtgtgagggccgctctgcagtaatgttctcaggcaagccttcctaggcacctcagaaacta

SEQ ID NO: 18874 - DNA, 79 bp, Homo sapiens
tccttcctgtgtgagggccgctctgcagtaatgttctcaggcaagccttcctaggcacctcagaaactactttgccaga

SEQ ID NO: 18875 - DNA, 79 bp, Homo sapiens
tctgcagtaatgttctcaggcaagccttcctaggcacctcagaaactactttgccagagccagtaagaatatataatat

SEQ ID NO: 18876 - DNA, 76 bp, Homo sapiens
agtaatgttctcaggcaagccttcctaggcacctcagaaactactttgccagagccagtaagaatatataatattg

SEQ ID NO: 18877 - DNA, 78 bp, Homo sapiens
caagccttcctaggcacctcagaaactactttgccagagccagtaagaatatataatattggagcagttgccaggata

SEQ ID NO: 18878 - DNA, 77 bp, Homo sapiens
taggcacctcagaaactactttgccagagccagtaagaatatataatattggagcagttgccaggatagaaattaaa

SEQ ID NO: 18879 - DNA, 77 bp, Homo sapiens
cagaaactactttgccagagccagtaagaatatataatattggagcagttgccaggatagaaattaaatatagattc

SEQ ID NO: 18880 - DNA, 76 bp, Homo sapiens
gagccagtaagaatatataatattggagcagttgccaggatagaaattaaatatagattccagtttaggatagagt

SEQ ID NO: 18881 - DNA, 73 bp, Homo sapiens
tattggagcagttgccaggatagaaattaaatatagattccagtttaggatagagtttttaccgagagctctt

SEQ ID NO: 18882 - DNA, 71 bp, Homo sapiens
agttgccaggatagaaattaaatatagattccagtttaggatagagtttttaccgagagctctttagacag

SEQ ID NO: 18883 - DNA, 71 bp, Homo sapiens
aattaaatatagattccagtttaggatagagtttttaccgagagctctttagacagtatacctgtgtcttc

SEQ ID NO: 18884 - DNA, 74 bp, Homo sapiens
atatagattccagtttaggatagagtttttaccgagagctctttagacagtatacctgtgtcttctctggcaat

SEQ ID NO: 18885 - DNA, 73 bp, Homo sapiens
agtttaggatagagtttttaccgagagctctttagacagtatacctgtgtcttctctggcaattgctttcatt

SEQ ID NO: 18886 - DNA, 74 bp, Homo sapiens
agtttttaccgagagctctttagacagtatacctgtgtcttctctggcaattgctttcattttagtcctatata

SEQ ID NO: 18887 - DNA, 74 bp, Homo sapiens
agagctctttagacagtatacctgtgtcttctctggcaattgctttcattttagtcctatataaaagctttcct

SEQ ID NO: 18888 - DNA, 72 bp, Homo sapiens
ctttagacagtatacctgtgtcttctctggcaattgctttcattttagtcctatataaaagctttccttttc

SEQ ID NO: 18889 - DNA, 70 bp, Homo sapiens
gtatacctgtgtcttctctggcaattgctttcattttagtcctatataaaagctttccttttctgttttt

SEQ ID NO: 18890 - DNA, 80 bp, Homo sapiens
tatgcttttgcttgcctaaatcttttgatcttatatttctctcatctcagagcctgtcctgagttgtaaggtatttcata

SEQ ID NO: 18891 - DNA, 78 bp, Homo sapiens
ttgcctaaatcttttgatcttatatttctctcatctcagagcctgtcctgagttgtaaggtatttcatactgccttac

SEQ ID NO: 18892 - DNA, 74 bp, Homo sapiens
gatcttatatttctctcatctcagagcctgtcctgagttgtaaggtatttcatactgccttacttaaaagtttt

SEQ ID NO: 18893 - DNA, 71 bp, Homo sapiens
ctcatctcagagcctgtcctgagttgtaaggtatttcatactgccttacttaaaagttttttaaactacta

SEQ ID NO: 18894 - DNA, 70 bp, Homo sapiens
cagagcctgtcctgagttgtaaggtatttcatactgccttacttaaaagttttttaaactactagagtca

SEQ ID NO: 18895 - DNA, 69 bp, Homo sapiens
cctgagttgtaaggtatttcatactgccttacttaaaagttttttaaactactagagtcatttgataca

SEQ ID NO: 18896 - DNA, 69 bp, Homo sapiens
ggtatttcatactgccttacttaaaagttttttaaactactagagtcatttgatacacacagaagttac

SEQ ID NO: 18897 - DNA, 69 bp, Homo sapiens
catactgccttacttaaaagttttttaaactactagagtcatttgatacacacagaagttacctaataa

SEQ ID NO: 18898 - DNA, 69 bp, Homo sapiens
ctgccttacttaaaagttttttaaactactagagtcatttgatacacacagaagttacctaataatcca

SEQ ID NO: 18899 - DNA, 69 bp, Homo sapiens
tgccttacttaaaagttttttaaactactagagtcatttgatacacacagaagttacctaataatccaa

SEQ ID NO: 18900 - DNA, 71 bp, Homo sapiens
aaaagttttttaaactactagagtcatttgatacacacagaagttacctaataatccaaagatgtccatca

SEQ ID NO: 18901 - DNA, 72 bp, Homo sapiens
ttttttaaactactagagtcatttgatacacacagaagttacctaataatccaaagatgtccatcaagggag

SEQ ID NO: 18902 - DNA, 73 bp, Homo sapiens
taaactactagagtcatttgatacacacagaagttacctaataatccaaagatgtccatcaagggaggaaggg

SEQ ID NO: 18903 - DNA, 75 bp, Homo sapiens
tactagagtcatttgatacacacagaagttacctaataatccaaagatgtccatcaagggaggaagggtgggtca

SEQ ID NO: 18904 - DNA, 73 bp, Homo sapiens
atttgatacacacagaagttacctaataatccaaagatgtccatcaagggaggaagggtgggtcatcagactt

SEQ ID NO: 18905 - DNA, 75 bp, Homo sapiens
ataatccaaagatgtccatcaagggaggaagggtgggtcatcagactttgcctttgatgttgtagactaggctcc

SEQ ID NO: 18906 - DNA, 75 bp, Homo sapiens
aagggaggaagggtgggtcatcagactttgcctttgatgttgtagactaggctcctgagttaagcagcagaggga

SEQ ID NO: 18907 - DNA, 84 bp, Homo sapiens
tgggtcatcagactttgcctttgatgttgtagactaggctcctgagttaagcagcagagggacagcagtgccatgtgccttcac

SEQ ID NO: 18908 - DNA, 82 bp, Homo sapiens
agactttgcctttgatgttgtagactaggctcctgagttaagcagcagagggacagcagtgccatgtgccttcactgtgtcc

SEQ ID NO: 18909 - DNA, 80 bp, Homo sapiens
tagactaggctcctgagttaagcagcagagggacagcagtgccatgtgccttcactgtgtcccaggaaatctgggttggt

SEQ ID NO: 18910 - DNA, 75 bp, Homo sapiens
acagcagtgccatgtgccttcactgtgtcccaggaaatctgggttggttccagtgggaaataccagtatttcttg

SEQ ID NO: 18911 - DNA, 72 bp, Homo sapiens
atgtgccttcactgtgtcccaggaaatctgggttggttccagtgggaaataccagtatttcttggttctgga

SEQ ID NO: 18912 - DNA, 70 bp, Homo sapiens
ttcactgtgtcccaggaaatctgggttggttccagtgggaaataccagtatttcttggttctggaaagta

SEQ ID NO: 18913 - DNA, 68 bp, Homo sapiens
aggaaatctgggttggttccagtgggaaataccagtatttcttggttctggaaagtagcaaaagagta

SEQ ID NO: 18914 - DNA, 69 bp, Homo sapiens
ctgggttggttccagtgggaaataccagtatttcttggttctggaaagtagcaaaagagtaggagatgg

SEQ ID NO: 18915 - DNA, 69 bp, Homo sapiens
gttccagtgggaaataccagtatttcttggttctggaaagtagcaaaagagtaggagatggggaaatag

SEQ ID NO: 18916 - DNA, 69 bp, Homo sapiens
aaataccagtatttcttggttctggaaagtagcaaaagagtaggagatggggaaatagggatggggaga

SEQ ID NO: 18917 - DNA, 72 bp, Homo sapiens
tatttcttggttctggaaagtagcaaaagagtaggagatggggaaatagggatggggagagcaagccccgca

SEQ ID NO: 18918 - DNA, 77 bp, Homo sapiens
tctggaaagtagcaaaagagtaggagatggggaaatagggatggggagagcaagccccgcatgtccatggcgagtca

SEQ ID NO: 18919 - DNA, 73 bp, Homo sapiens
aaatagggatggggagagcaagccccgcatgtccatggcgagtcaggtggggagcacgggtggaagggccggc

SEQ ID NO: 18920 - DNA, 78 bp, Homo sapiens
ggagagcaagccccgcatgtccatggcgagtcaggtggggagcacgggtggaagggccggctgttgacagacagacta

SEQ ID NO: 18921 - DNA, 76 bp, Homo sapiens
aagccccgcatgtccatggcgagtcaggtggggagcacgggtggaagggccggctgttgacagacagactaagctg

SEQ ID NO: 18922 - DNA, 76 bp, Homo sapiens
cgagtcaggtggggagcacgggtggaagggccggctgttgacagacagactaagctgtgtggtgctcttgccgccc

SEQ ID NO: 18923 - DNA, 75 bp, Homo sapiens
agcacgggtggaagggccggctgttgacagacagactaagctgtgtggtgctcttgccgccccttcctgggtaca

SEQ ID NO: 18924 - DNA, 77 bp, Homo sapiens
gaagggccggctgttgacagacagactaagctgtgtggtgctcttgccgccccttcctgggtacagagcttgagaaa

SEQ ID NO: 18925 - DNA, 79 bp, Homo sapiens
ctgttgacagacagactaagctgtgtggtgctcttgccgccccttcctgggtacagagcttgagaaaaatgcagccgac

SEQ ID NO: 18926 - DNA, 78 bp, Homo sapiens
acagacagactaagctgtgtggtgctcttgccgccccttcctgggtacagagcttgagaaaaatgcagccgaccactc

SEQ ID NO: 18927 - DNA, 75 bp, Homo sapiens
ctcttgccgccccttcctgggtacagagcttgagaaaaatgcagccgaccactccctgtgtttgtacagagcaaa

SEQ ID NO: 18928 - DNA, 73 bp, Homo sapiens
cccttcctgggtacagagcttgagaaaaatgcagccgaccactccctgtgtttgtacagagcaaagcccaaaa

SEQ ID NO: 18929 - DNA, 76 bp, Homo sapiens
ttgagaaaaatgcagccgaccactccctgtgtttgtacagagcaaagcccaaaagccaacctcagatctcctgatt

SEQ ID NO: 18930 - DNA, 77 bp, Homo sapiens
aaaatgcagccgaccactccctgtgtttgtacagagcaaagcccaaaagccaacctcagatctcctgatttggcagc

SEQ ID NO: 18931 - DNA, 79 bp, Homo sapiens
accactccctgtgtttgtacagagcaaagcccaaaagccaacctcagatctcctgatttggcagctgaagaaatcagca

SEQ ID NO: 18932 - DNA, 81 bp, Homo sapiens
ctgtgtttgtacagagcaaagcccaaaagccaacctcagatctcctgatttggcagctgaagaaatcagcagagtcctgat

SEQ ID NO: 18933 - DNA, 83 bp, Homo sapiens
agagcaaagcccaaaagccaacctcagatctcctgatttggcagctgaagaaatcagcagagtcctgattgcctgattcagtc

SEQ ID NO: 18934 - DNA, 81 bp, Homo sapiens
aaaagccaacctcagatctcctgatttggcagctgaagaaatcagcagagtcctgattgcctgattcagtcccaaaaatga

SEQ ID NO: 18935 - DNA, 83 bp, Homo sapiens
aacctcagatctcctgatttggcagctgaagaaatcagcagagtcctgattgcctgattcagtcccaaaaatgaatgtcaggc

SEQ ID NO: 18936 - DNA, 81 bp, Homo sapiens
tctcctgatttggcagctgaagaaatcagcagagtcctgattgcctgattcagtcccaaaaatgaatgtcaggccccgccc

SEQ ID NO: 18937 - DNA, 74 bp, Homo sapiens
aaatcagcagagtcctgattgcctgattcagtcccaaaaatgaatgtcaggccccgccccctccccaccaacat

SEQ ID NO: 18938 - DNA, 75 bp, Homo sapiens
tcctgattgcctgattcagtcccaaaaatgaatgtcaggccccgccccctccccaccaacattgcctctcctaca

SEQ ID NO: 18939 - DNA, 73 bp, Homo sapiens
tgattcagtcccaaaaatgaatgtcaggccccgccccctccccaccaacattgcctctcctacattctccttc

SEQ ID NO: 18940 - DNA, 71 bp, Homo sapiens
agtcccaaaaatgaatgtcaggccccgccccctccccaccaacattgcctctcctacattctccttctgcc

SEQ ID NO: 18941 - DNA, 73 bp, Homo sapiens
aatgaatgtcaggccccgccccctccccaccaacattgcctctcctacattctccttctgcccctaaatcaga

SEQ ID NO: 18942 - DNA, 79 bp, Homo sapiens
cccaccaacattgcctctcctacattctccttctgcccctaaatcagacaggaggccagagaggagtattgctcaatgc

SEQ ID NO: 18943 - DNA, 81 bp, Homo sapiens
aacattgcctctcctacattctccttctgcccctaaatcagacaggaggccagagaggagtattgctcaatgcgtgctatg

SEQ ID NO: 18944 - DNA, 84 bp, Homo sapiens
tctcctacattctccttctgcccctaaatcagacaggaggccagagaggagtattgctcaatgcgtgctatgtgcaactcctca

SEQ ID NO: 18945 - DNA, 84 bp, Homo sapiens
tccttctgcccctaaatcagacaggaggccagagaggagtattgctcaatgcgtgctatgtgcaactcctcaggccttgtgcca

SEQ ID NO: 18946 - DNA, 86 bp, Homo sapiens
cctaaatcagacaggaggccagagaggagtattgctcaatgcgtgctatgtgcaactcctcaggccttgtgccacctccatgctga

SEQ ID NO: 18947 - DNA, 86 bp, Homo sapiens
agacaggaggccagagaggagtattgctcaatgcgtgctatgtgcaactcctcaggccttgtgccacctccatgctgagccctgaa

SEQ ID NO: 18948 - DNA, 85 bp, Homo sapiens
agagaggagtattgctcaatgcgtgctatgtgcaactcctcaggccttgtgccacctccatgctgagccctgaagcagggtgtcc

SEQ ID NO: 18949 - DNA, 85 bp, Homo sapiens
gtattgctcaatgcgtgctatgtgcaactcctcaggccttgtgccacctccatgctgagccctgaagcagggtgtcctgggtgcc

SEQ ID NO: 18950 - DNA, 86 bp, Homo sapiens
atgcgtgctatgtgcaactcctcaggccttgtgccacctccatgctgagccctgaagcagggtgtcctgggtgcctgtgtgtcagc

SEQ ID NO: 18951 - DNA, 80 bp, Homo sapiens
aactcctcaggccttgtgccacctccatgctgagccctgaagcagggtgtcctgggtgcctgtgtgtcagctccctcctc

SEQ ID NO: 18952 - DNA, 78 bp, Homo sapiens
acctccatgctgagccctgaagcagggtgtcctgggtgcctgtgtgtcagctccctcctctctacctacctctgacct

SEQ ID NO: 18953 - DNA, 74 bp, Homo sapiens
aagcagggtgtcctgggtgcctgtgtgtcagctccctcctctctacctacctctgaccttcttgtgggtgaggg

SEQ ID NO: 18954 - DNA, 78 bp, Homo sapiens
tcctgggtgcctgtgtgtcagctccctcctctctacctacctctgaccttcttgtgggtgagggtggccatgcttatg

SEQ ID NO: 18955 - DNA, 78 bp, Homo sapiens
tgtgtgtcagctccctcctctctacctacctctgaccttcttgtgggtgagggtggccatgcttatggccatcttaaa

SEQ ID NO: 18956 - DNA, 74 bp, Homo sapiens
ctccctcctctctacctacctctgaccttcttgtgggtgagggtggccatgcttatggccatcttaaaactgga

SEQ ID NO: 18957 - DNA, 77 bp, Homo sapiens
tcctctctacctacctctgaccttcttgtgggtgagggtggccatgcttatggccatcttaaaactggagaggcaga

SEQ ID NO: 18958 - DNA, 78 bp, Homo sapiens
tctgaccttcttgtgggtgagggtggccatgcttatggccatcttaaaactggagaggcagagaactacttatgagtc

SEQ ID NO: 18959 - DNA, 77 bp, Homo sapiens
agggtggccatgcttatggccatcttaaaactggagaggcagagaactacttatgagtctgtagaccacgtgttgtc

SEQ ID NO: 18960 - DNA, 78 bp, Homo sapiens
atgcttatggccatcttaaaactggagaggcagagaactacttatgagtctgtagaccacgtgttgtcttccatggcc

SEQ ID NO: 18961 - DNA, 75 bp, Homo sapiens
atcttaaaactggagaggcagagaactacttatgagtctgtagaccacgtgttgtcttccatggcctgtttctcc

SEQ ID NO: 18962 - DNA, 77 bp, Homo sapiens
aaaactggagaggcagagaactacttatgagtctgtagaccacgtgttgtcttccatggcctgtttctcctgctgtc

SEQ ID NO: 18963 - DNA, 81 bp, Homo sapiens
ctacttatgagtctgtagaccacgtgttgtcttccatggcctgtttctcctgctgtctgggtgagtgagcctgcaacgcaa

SEQ ID NO: 18964 - DNA, 82 bp, Homo sapiens
tagaccacgtgttgtcttccatggcctgtttctcctgctgtctgggtgagtgagcctgcaacgcaatgcccatgagagtaaa

SEQ ID NO: 18965 - DNA, 82 bp, Homo sapiens
acgtgttgtcttccatggcctgtttctcctgctgtctgggtgagtgagcctgcaacgcaatgcccatgagagtaaatgcctc

SEQ ID NO: 18966 - DNA, 82 bp, Homo sapiens
ttccatggcctgtttctcctgctgtctgggtgagtgagcctgcaacgcaatgcccatgagagtaaatgcctcctgacctacc

SEQ ID NO: 18967 - DNA, 86 bp, Homo sapiens
tctcctgctgtctgggtgagtgagcctgcaacgcaatgcccatgagagtaaatgcctcctgacctaccctgctcagcactgttcta

SEQ ID NO: 18968 - DNA, 84 bp, Homo sapiens
tctgggtgagtgagcctgcaacgcaatgcccatgagagtaaatgcctcctgacctaccctgctcagcactgttctagtgtcttg

SEQ ID NO: 18969 - DNA, 83 bp, Homo sapiens
tgagcctgcaacgcaatgcccatgagagtaaatgcctcctgacctaccctgctcagcactgttctagtgtcttggccttgaaa

SEQ ID NO: 18970 - DNA, 78 bp, Homo sapiens
catgagagtaaatgcctcctgacctaccctgctcagcactgttctagtgtcttggccttgaaagaaaagcctgacttc

SEQ ID NO: 18971 - DNA, 76 bp, Homo sapiens
agtaaatgcctcctgacctaccctgctcagcactgttctagtgtcttggccttgaaagaaaagcctgacttcctgc

SEQ ID NO: 18972 - DNA, 80 bp, Homo sapiens
tcctgacctaccctgctcagcactgttctagtgtcttggccttgaaagaaaagcctgacttcctgctgacacatgtggta

SEQ ID NO: 18973 - DNA, 81 bp, Homo sapiens
actgttctagtgtcttggccttgaaagaaaagcctgacttcctgctgacacatgtggtaggggcatggcagctatgaggca

SEQ ID NO: 18974 - DNA, 80 bp, Homo sapiens
agtgtcttggccttgaaagaaaagcctgacttcctgctgacacatgtggtaggggcatggcagctatgaggcacctccta

SEQ ID NO: 18975 - DNA, 80 bp, Homo sapiens
aaagcctgacttcctgctgacacatgtggtaggggcatggcagctatgaggcacctcctacgtctgttttctggctgtgg

SEQ ID NO: 18976 - DNA, 80 bp, Homo sapiens
tgctgacacatgtggtaggggcatggcagctatgaggcacctcctacgtctgttttctggctgtggtgacttgggatttt

SEQ ID NO: 18977 - DNA, 76 bp, Homo sapiens
acatgtggtaggggcatggcagctatgaggcacctcctacgtctgttttctggctgtggtgacttgggatttttaa

SEQ ID NO: 18978 - DNA, 75 bp, Homo sapiens
catggcagctatgaggcacctcctacgtctgttttctggctgtggtgacttgggatttttaaccttatatatctt

SEQ ID NO: 18979 - DNA, 71 bp, Homo sapiens
agctatgaggcacctcctacgtctgttttctggctgtggtgacttgggatttttaaccttatatatctttt

SEQ ID NO: 18980 - DNA, 67 bp, Homo sapiens
acctcctacgtctgttttctggctgtggtgacttgggatttttaaccttatatatctttttccttta

SEQ ID NO: 18981 - DNA, 68 bp, Homo sapiens
cgtctgttttctggctgtggtgacttgggatttttaaccttatatatctttttcctttactcaaaaca

SEQ ID NO: 18982 - DNA, 73 bp, Homo sapiens
aaaaaagccaaatgttttgtgcctttctaaggcagcactgtatcccaggctgcattttaggacttaatatgga

SEQ ID NO: 18983 - DNA, 74 bp, Homo sapiens
aaatgttttgtgcctttctaaggcagcactgtatcccaggctgcattttaggacttaatatggaaataccagag

SEQ ID NO: 18984 - DNA, 78 bp, Homo sapiens
tttgtgcctttctaaggcagcactgtatcccaggctgcattttaggacttaatatggaaataccagagtctgagctcc

SEQ ID NO: 18985 - DNA, 78 bp, Homo sapiens
taaggcagcactgtatcccaggctgcattttaggacttaatatggaaataccagagtctgagctcctctaccttgagt

SEQ ID NO: 18986 - DNA, 76 bp, Homo sapiens
tgcattttaggacttaatatggaaataccagagtctgagctcctctaccttgagtttcattagtccttagtgtcta

SEQ ID NO: 18987 - DNA, 75 bp, Homo sapiens
aatatggaaataccagagtctgagctcctctaccttgagtttcattagtccttagtgtctaggagacaggaaaga

SEQ ID NO: 18988 - DNA, 79 bp, Homo sapiens
agagtctgagctcctctaccttgagtttcattagtccttagtgtctaggagacaggaaagaatgctctctgtgactgga

SEQ ID NO: 18989 - DNA, 78 bp, Homo sapiens
agctcctctaccttgagtttcattagtccttagtgtctaggagacaggaaagaatgctctctgtgactggagaggtga

SEQ ID NO: 18990 - DNA, 82 bp, Homo sapiens
taccttgagtttcattagtccttagtgtctaggagacaggaaagaatgctctctgtgactggagaggtgacatgcaggtgca

SEQ ID NO: 18991 - DNA, 82 bp, Homo sapiens
cttagtgtctaggagacaggaaagaatgctctctgtgactggagaggtgacatgcaggtgcagtgtgtctggagtccctttc

SEQ ID NO: 18992 - DNA, 82 bp, Homo sapiens
acaggaaagaatgctctctgtgactggagaggtgacatgcaggtgcagtgtgtctggagtccctttcccctgctgtgagact

SEQ ID NO: 18993 - DNA, 83 bp, Homo sapiens
aaagaatgctctctgtgactggagaggtgacatgcaggtgcagtgtgtctggagtccctttcccctgctgtgagacttcagtg

SEQ ID NO: 18994 - DNA, 84 bp, Homo sapiens
tgtgactggagaggtgacatgcaggtgcagtgtgtctggagtccctttcccctgctgtgagacttcagtggaggagagaagcat

SEQ ID NO: 18995 - DNA, 81 bp, Homo sapiens
agaggtgacatgcaggtgcagtgtgtctggagtccctttcccctgctgtgagacttcagtggaggagagaagcattgtacc

SEQ ID NO: 18996 - DNA, 78 bp, Homo sapiens
aggtgcagtgtgtctggagtccctttcccctgctgtgagacttcagtggaggagagaagcattgtaccctgggatcat

SEQ ID NO: 18997 - DNA, 77 bp, Homo sapiens
tgtgtctggagtccctttcccctgctgtgagacttcagtggaggagagaagcattgtaccctgggatcatttggttg

SEQ ID NO: 18998 - DNA, 74 bp, Homo sapiens
agtccctttcccctgctgtgagacttcagtggaggagagaagcattgtaccctgggatcatttggttggttcca

SEQ ID NO: 18999 - DNA, 74 bp, Homo sapiens
acttcagtggaggagagaagcattgtaccctgggatcatttggttggttccaatcacaagcttagttatcaggt

SEQ ID NO: 19000 - DNA, 77 bp, Homo sapiens
aggagagaagcattgtaccctgggatcatttggttggttccaatcacaagcttagttatcaggttgcatgccttgtc

SEQ ID NO: 19001 - DNA, 78 bp, Homo sapiens
ttggttggttccaatcacaagcttagttatcaggttgcatgccttgtctcctgcaaaagacagaatgtttcacaattc

SEQ ID NO: 19002 - DNA, 76 bp, Homo sapiens
aatcacaagcttagttatcaggttgcatgccttgtctcctgcaaaagacagaatgtttcacaattcccaggtaaac

SEQ ID NO: 19003 - DNA, 76 bp, Homo sapiens
aagcttagttatcaggttgcatgccttgtctcctgcaaaagacagaatgtttcacaattcccaggtaaactctgga

SEQ ID NO: 19004 - DNA, 77 bp, Homo sapiens
tatcaggttgcatgccttgtctcctgcaaaagacagaatgtttcacaattcccaggtaaactctggaccattccaag

SEQ ID NO: 19005 - DNA, 73 bp, Homo sapiens
cttgtctcctgcaaaagacagaatgtttcacaattcccaggtaaactctggaccattccaagtgtcctagcct

SEQ ID NO: 19006 - DNA, 77 bp, Homo sapiens
tgcaaaagacagaatgtttcacaattcccaggtaaactctggaccattccaagtgtcctagccttctgatgacatta

SEQ ID NO: 19007 - DNA, 74 bp, Homo sapiens
gaatgtttcacaattcccaggtaaactctggaccattccaagtgtcctagccttctgatgacattaattaccta

SEQ ID NO: 19008 - DNA, 73 bp, Homo sapiens
tttcacaattcccaggtaaactctggaccattccaagtgtcctagccttctgatgacattaattacctagttg

SEQ ID NO: 19009 - DNA, 74 bp, Homo sapiens
aggtaaactctggaccattccaagtgtcctagccttctgatgacattaattacctagttgtgtcgaggagtata

SEQ ID NO: 19010 - DNA, 78 bp, Homo sapiens
gaccattccaagtgtcctagccttctgatgacattaattacctagttgtgtcgaggagtataggatggactctcctga

SEQ ID NO: 19011 - DNA, 77 bp, Homo sapiens
ttccaagtgtcctagccttctgatgacattaattacctagttgtgtcgaggagtataggatggactctcctgagaag

SEQ ID NO: 19012 - DNA, 74 bp, Homo sapiens
cctagccttctgatgacattaattacctagttgtgtcgaggagtataggatggactctcctgagaaggggaggt

SEQ ID NO: 19013 - DNA, 73 bp, Homo sapiens
atgacattaattacctagttgtgtcgaggagtataggatggactctcctgagaaggggaggttggtggctttg

SEQ ID NO: 19014 - DNA, 72 bp, Homo sapiens
agtataggatggactctcctgagaaggggaggttggtggctttgtcttttctttttgctggatcctgaactg

SEQ ID NO: 19015 - DNA, 69 bp, Homo sapiens
agaaggggaggttggtggctttgtcttttctttttgctggatcctgaactggtctagacctcctgcccc

SEQ ID NO: 19016 - DNA, 68 bp, Homo sapiens
aggttggtggctttgtcttttctttttgctggatcctgaactggtctagacctcctgcccccaccccc

SEQ ID NO: 19017 - DNA, 73 bp, Homo sapiens
tgtcttttctttttgctggatcctgaactggtctagacctcctgcccccaccccccagcccccatcagatgtg

SEQ ID NO: 19018 - DNA, 73 bp, Homo sapiens
tttttgctggatcctgaactggtctagacctcctgcccccaccccccagcccccatcagatgtggctggcctt

SEQ ID NO: 19019 - DNA, 73 bp, Homo sapiens
atcctgaactggtctagacctcctgcccccaccccccagcccccatcagatgtggctggcctttcatttgaag

SEQ ID NO: 19020 - DNA, 74 bp, Homo sapiens
tctagacctcctgcccccaccccccagcccccatcagatgtggctggcctttcatttgaaggcttcagacttaa

SEQ ID NO: 19021 - DNA, 75 bp, Homo sapiens
ctgcccccaccccccagcccccatcagatgtggctggcctttcatttgaaggcttcagacttaaagcattaagca

SEQ ID NO: 19022 - DNA, 80 bp, Homo sapiens
ccccagcccccatcagatgtggctggcctttcatttgaaggcttcagacttaaagcattaagcagctagtgccctctgca

SEQ ID NO: 19023 - DNA, 80 bp, Homo sapiens
catcagatgtggctggcctttcatttgaaggcttcagacttaaagcattaagcagctagtgccctctgcagggcctggtt

SEQ ID NO: 19024 - DNA, 77 bp, Homo sapiens
atgtggctggcctttcatttgaaggcttcagacttaaagcattaagcagctagtgccctctgcagggcctggtttcc

SEQ ID NO: 19025 - DNA, 74 bp, Homo sapiens
ctttcatttgaaggcttcagacttaaagcattaagcagctagtgccctctgcagggcctggtttccccagggaa

SEQ ID NO: 19026 - DNA, 74 bp, Homo sapiens
aaggcttcagacttaaagcattaagcagctagtgccctctgcagggcctggtttccccagggaagggcagcaag

SEQ ID NO: 19027 - DNA, 74 bp, Homo sapiens
agacttaaagcattaagcagctagtgccctctgcagggcctggtttccccagggaagggcagcaaggaacatgg

SEQ ID NO: 19028 - DNA, 75 bp, Homo sapiens
tgccctctgcagggcctggtttccccagggaagggcagcaaggaacatgggaccagaagcctgtcctcagtaatg

SEQ ID NO: 19029 - DNA, 73 bp, Homo sapiens
agggcctggtttccccagggaagggcagcaaggaacatgggaccagaagcctgtcctcagtaatgtgactata

SEQ ID NO: 19030 - DNA, 77 bp, Homo sapiens
tccccagggaagggcagcaaggaacatgggaccagaagcctgtcctcagtaatgtgactatagtgagctttagcaaa

SEQ ID NO: 19031 - DNA, 74 bp, Homo sapiens
aaggaacatgggaccagaagcctgtcctcagtaatgtgactatagtgagctttagcaaaagtttttctatataa

SEQ ID NO: 19032 - DNA, 75 bp, Homo sapiens
aagcctgtcctcagtaatgtgactatagtgagctttagcaaaagtttttctatataatgacatcttacttatctt

SEQ ID NO: 19033 - DNA, 71 bp, Homo sapiens
aatgtgactatagtgagctttagcaaaagtttttctatataatgacatcttacttatcttttaccctttcc

SEQ ID NO: 19034 - DNA, 67 bp, Homo sapiens
agctttagcaaaagtttttctatataatgacatcttacttatcttttaccctttcctcagttttccc

SEQ ID NO: 19035 - DNA, 66 bp, Homo sapiens
aatgacatcttacttatcttttaccctttcctcagttttcccctgcctttaactaataaagaattg

SEQ ID NO: 19036 - DNA, 65 bp, Homo sapiens
cttacttatcttttaccctttcctcagttttcccctgcctttaactaataaagaattgggagaca

SEQ ID NO: 19037 - DNA, 63 bp, Homo sapiens
cttttaccctttcctcagttttcccctgcctttaactaataaagaattgggagacagaaattt

SEQ ID NO: 19038 - DNA, 65 bp, Homo sapiens
cctcagttttcccctgcctttaactaataaagaattgggagacagaaattttaaagtcctcctta

SEQ ID NO: 19039 - DNA, 67 bp, Homo sapiens
ccctgcctttaactaataaagaattgggagacagaaattttaaagtcctccttattcaagattttga

SEQ ID NO: 19040 - DNA, 67 bp, Homo sapiens
aactaataaagaattgggagacagaaattttaaagtcctccttattcaagattttgaaattcttagc

SEQ ID NO: 19041 - DNA, 69 bp, Homo sapiens
aagaattgggagacagaaattttaaagtcctccttattcaagattttgaaattcttagcctgggagtgc

SEQ ID NO: 19042 - DNA, 71 bp, Homo sapiens
acagaaattttaaagtcctccttattcaagattttgaaattcttagcctgggagtgctggagagaacctga

SEQ ID NO: 19043 - DNA, 71 bp, Homo sapiens
aattttaaagtcctccttattcaagattttgaaattcttagcctgggagtgctggagagaacctgatgctt

SEQ ID NO: 19044 - DNA, 77 bp, Homo sapiens
cttattcaagattttgaaattcttagcctgggagtgctggagagaacctgatgctttctccagaatgaagagtccca

SEQ ID NO: 19045 - DNA, 78 bp, Homo sapiens
aattcttagcctgggagtgctggagagaacctgatgctttctccagaatgaagagtcccaatttgtatatcagtgtta

SEQ ID NO: 19046 - DNA, 77 bp, Homo sapiens
ggagtgctggagagaacctgatgctttctccagaatgaagagtcccaatttgtatatcagtgttaagaagaaaacaa

SEQ ID NO: 19047 - DNA, 75 bp, Homo sapiens
ctggagagaacctgatgctttctccagaatgaagagtcccaatttgtatatcagtgttaagaagaaaacaaaaca

SEQ ID NO: 19048 - DNA, 67 bp, Homo sapiens
acaaaacaaacacataggtgagattttcgtggactattttaaaaatgtgtcattaatataaaaaatt

SEQ ID NO: 19049 - DNA, 71 bp, Homo sapiens
acacataggtgagattttcgtggactattttaaaaatgtgtcattaatataaaaaatttatattagcagta

SEQ ID NO: 19050 - DNA, 71 bp, Homo sapiens
gtgagattttcgtggactattttaaaaatgtgtcattaatataaaaaatttatattagcagtatttaatca

SEQ ID NO: 19051 - DNA, 71 bp, Homo sapiens
cgtggactattttaaaaatgtgtcattaatataaaaaatttatattagcagtatttaatcattctcacctg

SEQ ID NO: 19052 - DNA, 71 bp, Homo sapiens
tttaaaaatgtgtcattaatataaaaaatttatattagcagtatttaatcattctcacctgtaaagaataa

SEQ ID NO: 19053 - DNA, 71 bp, Homo sapiens
aaaatgtgtcattaatataaaaaatttatattagcagtatttaatcattctcacctgtaaagaataagaaa

SEQ ID NO: 19054 - DNA, 73 bp, Homo sapiens
tgtgtcattaatataaaaaatttatattagcagtatttaatcattctcacctgtaaagaataagaaaaacaga

SEQ ID NO: 19055 - DNA, 68 bp, Homo sapiens
ataaaaaatttatattagcagtatttaatcattctcacctgtaaagaataagaaaaacagaaggtaaa

SEQ ID NO: 19056 - DNA, 69 bp, Homo sapiens
aaatttatattagcagtatttaatcattctcacctgtaaagaataagaaaaacagaaggtaaatattct

SEQ ID NO: 19057 - DNA, 73 bp, Homo sapiens
ttatattagcagtatttaatcattctcacctgtaaagaataagaaaaacagaaggtaaatattcttacagaga

SEQ ID NO: 19058 - DNA, 75 bp, Homo sapiens
tagcagtatttaatcattctcacctgtaaagaataagaaaaacagaaggtaaatattcttacagagaatagcaga

SEQ ID NO: 19059 - DNA, 75 bp, Homo sapiens
gcagtatttaatcattctcacctgtaaagaataagaaaaacagaaggtaaatattcttacagagaatagcagagc

SEQ ID NO: 19060 - DNA, 73 bp, Homo sapiens
gtatttaatcattctcacctgtaaagaataagaaaaacagaaggtaaatattcttacagagaatagcagagct

SEQ ID NO: 19061 - DNA, 75 bp, Homo sapiens
tcattctcacctgtaaagaataagaaaaacagaaggtaaatattcttacagagaatagcagagctttaagattca

SEQ ID NO: 19062 - DNA, 71 bp, Homo sapiens
cacctgtaaagaataagaaaaacagaaggtaaatattcttacagagaatagcagagctttaagattcattt

SEQ ID NO: 19063 - DNA, 71 bp, Homo sapiens
agaaaaacagaaggtaaatattcttacagagaatagcagagctttaagattcattttcattttaagtccat

SEQ ID NO: 19064 - DNA, 74 bp, Homo sapiens
ttcttacagagaatagcagagctttaagattcattttcattttaagtccattttattttgccagtgtattaatg

SEQ ID NO: 19065 - DNA, 74 bp, Homo sapiens
cagagaatagcagagctttaagattcattttcattttaagtccattttattttgccagtgtattaatgtttaga

SEQ ID NO: 19066 - DNA, 72 bp, Homo sapiens
gcagagctttaagattcattttcattttaagtccattttattttgccagtgtattaatgtttagaagtctgt

SEQ ID NO: 19067 - DNA, 70 bp, Homo sapiens
tcattttcattttaagtccattttattttgccagtgtattaatgtttagaagtctgttttactaatgtta

SEQ ID NO: 19068 - DNA, 69 bp, Homo sapiens
ttcattttaagtccattttattttgccagtgtattaatgtttagaagtctgttttactaatgttattta

SEQ ID NO: 19069 - DNA, 67 bp, Homo sapiens
gtccattttattttgccagtgtattaatgtttagaagtctgttttactaatgttatttattaatttt

SEQ ID NO: 19070 - DNA, 69 bp, Homo sapiens
taattttttttcatttccatacacagttagttaactaaagagctttttcaagcacccatgtctgtaaaa

SEQ ID NO: 19071 - DNA, 69 bp, Homo sapiens
ttttcatttccatacacagttagttaactaaagagctttttcaagcacccatgtctgtaaaaaaatatt

SEQ ID NO: 19072 - DNA, 68 bp, Homo sapiens
aatatttttaaataaagtttcttttgttgtagcagacttgagttcttgctcattcagggggttgggag

SEQ ID NO: 19073 - DNA, 75 bp, Homo sapiens
gtttgaaattaatattagcattctataaaggcacttcagtgaatataagaattatgactaagccaagaacttcca

SEQ ID NO: 19074 - DNA, 73 bp, Homo sapiens
attaatattagcattctataaaggcacttcagtgaatataagaattatgactaagccaagaacttccagtttt

SEQ ID NO: 19075 - DNA, 71 bp, Homo sapiens
agcattctataaaggcacttcagtgaatataagaattatgactaagccaagaacttccagtttttattttt

SEQ ID NO: 19076 - DNA, 64 bp, Homo sapiens
tattttttaaacatcatttaacaagaaaaaacattcaaccaaattaaaaagaactaggttggat

SEQ ID NO: 19077 - DNA, 66 bp, Homo sapiens
acatcatttaacaagaaaaaacattcaaccaaattaaaaagaactaggttggattaatttacaata

SEQ ID NO: 19078 - DNA, 65 bp, Homo sapiens
acaagaaaaaacattcaaccaaattaaaaagaactaggttggattaatttacaataaaataatca

SEQ ID NO: 19079 - DNA, 64 bp, Homo sapiens
aaaaacattcaaccaaattaaaaagaactaggttggattaatttacaataaaataatcaactta

SEQ ID NO: 19080 - DNA, 67 bp, Homo sapiens
gaactaggttggattaatttacaataaaataatcaacttaaaatatcggcccttccatttagggcca

SEQ ID NO: 19081 - DNA, 67 bp, Homo sapiens
ggattaatttacaataaaataatcaacttaaaatatcggcccttccatttagggccaaggaggccaa

SEQ ID NO: 19082 - DNA, 67 bp, Homo sapiens
tttacaataaaataatcaacttaaaatatcggcccttccatttagggccaaggaggccaatagttcc

SEQ ID NO: 19083 - DNA, 66 bp, Homo sapiens
aaataatcaacttaaaatatcggcccttccatttagggccaaggaggccaatagttcctgtttaaa

SEQ ID NO: 19084 - DNA, 71 bp, Homo sapiens
ttaaaatatcggcccttccatttagggccaaggaggccaatagttcctgtttaaacagcagaattgcacaa

SEQ ID NO: 19085 - DNA, 69 bp, Homo sapiens
cccttccatttagggccaaggaggccaatagttcctgtttaaacagcagaattgcacaattatttttac

SEQ ID NO: 19086 - DNA, 70 bp, Homo sapiens
catttagggccaaggaggccaatagttcctgtttaaacagcagaattgcacaattatttttacctatatt

SEQ ID NO: 19087 - DNA, 73 bp, Homo sapiens
caaggaggccaatagttcctgtttaaacagcagaattgcacaattatttttacctatatttgatggcacaaaa

SEQ ID NO: 19088 - DNA, 70 bp, Homo sapiens
aatagttcctgtttaaacagcagaattgcacaattatttttacctatatttgatggcacaaaaaaataaa

SEQ ID NO: 19089 - DNA, 71 bp, Homo sapiens
aacagcagaattgcacaattatttttacctatatttgatggcacaaaaaaataaaagtcttacaacttcca

SEQ ID NO: 19090 - DNA, 70 bp, Homo sapiens
ttgcacaattatttttacctatatttgatggcacaaaaaaataaaagtcttacaacttccacggacatcc

SEQ ID NO: 19091 - DNA, 67 bp, Homo sapiens
attatttttacctatatttgatggcacaaaaaaataaaagtcttacaacttccacggacatcctccc

SEQ ID NO: 19092 - DNA, 72 bp, Homo sapiens
ctatatttgatggcacaaaaaaataaaagtcttacaacttccacggacatcctcccctccctccagagcaga

SEQ ID NO: 19093 - DNA, 71 bp, Homo sapiens
gcacaaaaaaataaaagtcttacaacttccacggacatcctcccctccctccagagcagagttcatacaat

SEQ ID NO: 19094 - DNA, 74 bp, Homo sapiens
agtcttacaacttccacggacatcctcccctccctccagagcagagttcatacaattccatcttaggtcagtac

SEQ ID NO: 19095 - DNA, 73 bp, Homo sapiens
acggacatcctcccctccctccagagcagagttcatacaattccatcttaggtcagtactcaggcttttaaaa

SEQ ID NO: 19096 - DNA, 74 bp, Homo sapiens
tcccctccctccagagcagagttcatacaattccatcttaggtcagtactcaggcttttaaaaatcatcttacg

SEQ ID NO: 19097 - DNA, 74 bp, Homo sapiens
gcagagttcatacaattccatcttaggtcagtactcaggcttttaaaaatcatcttacgttttgaaatataata

SEQ ID NO: 19098 - DNA, 71 bp, Homo sapiens
tcttaggtcagtactcaggcttttaaaaatcatcttacgttttgaaatataatacaactactctggtaaca

SEQ ID NO: 19099 - DNA, 67 bp, Homo sapiens
aaaatcatcttacgttttgaaatataatacaactactctggtaacaagaatacttttaaaacaattc

SEQ ID NO: 19100 - DNA, 69 bp, Homo sapiens
catcttacgttttgaaatataatacaactactctggtaacaagaatacttttaaaacaattcttataga

SEQ ID NO: 19101 - DNA, 67 bp, Homo sapiens
gaaatataatacaactactctggtaacaagaatacttttaaaacaattcttatagaaaacaaatacc

SEQ ID NO: 19102 - DNA, 67 bp, Homo sapiens
caactactctggtaacaagaatacttttaaaacaattcttatagaaaacaaataccttagataattg

SEQ ID NO: 19103 - DNA, 70 bp, Homo sapiens
ctctggtaacaagaatacttttaaaacaattcttatagaaaacaaataccttagataattgtgtggcaca

SEQ ID NO: 19104 - DNA, 72 bp, Homo sapiens
tacttttaaaacaattcttatagaaaacaaataccttagataattgtgtggcacattagactgctcaaagaa

SEQ ID NO: 19105 - DNA, 76 bp, Homo sapiens
acaattcttatagaaaacaaataccttagataattgtgtggcacattagactgctcaaagaaacagcaaagatgaa

SEQ ID NO: 19106 - DNA, 75 bp, Homo sapiens
cttatagaaaacaaataccttagataattgtgtggcacattagactgctcaaagaaacagcaaagatgaaaaata

SEQ ID NO: 19107 - DNA, 76 bp, Homo sapiens
aacaaataccttagataattgtgtggcacattagactgctcaaagaaacagcaaagatgaaaaataatgtacaaga

SEQ ID NO: 19108 - DNA, 77 bp, Homo sapiens
gataattgtgtggcacattagactgctcaaagaaacagcaaagatgaaaaataatgtacaagaattatagtcccttg

SEQ ID NO: 19109 - DNA, 76 bp, Homo sapiens
gtgtggcacattagactgctcaaagaaacagcaaagatgaaaaataatgtacaagaattatagtcccttgtttata

SEQ ID NO: 19110 - DNA, 74 bp, Homo sapiens
gactgctcaaagaaacagcaaagatgaaaaataatgtacaagaattatagtcccttgtttatagaaaccatcca

SEQ ID NO: 19111 - DNA, 71 bp, Homo sapiens
caaagaaacagcaaagatgaaaaataatgtacaagaattatagtcccttgtttatagaaaccatccaaata

SEQ ID NO: 19112 - DNA, 69 bp, Homo sapiens
gcaaagatgaaaaataatgtacaagaattatagtcccttgtttatagaaaccatccaaataaaatattt

SEQ ID NO: 19113 - DNA, 66 bp, Homo sapiens
aatgtacaagaattatagtcccttgtttatagaaaccatccaaataaaatattttccctaattttc

SEQ ID NO: 19114 - DNA, 66 bp, Homo sapiens
tagtcccttgtttatagaaaccatccaaataaaatattttccctaattttccttgcttcttataat

SEQ ID NO: 19115 - DNA, 70 bp, Homo sapiens
tagaaaccatccaaataaaatattttccctaattttccttgcttcttataatttattagcagagatgaat

SEQ ID NO: 19116 - DNA, 72 bp, Homo sapiens
attttccctaattttccttgcttcttataatttattagcagagatgaattacaagaagcagaacgcaccatt

SEQ ID NO: 19117 - DNA, 72 bp, Homo sapiens
cctaattttccttgcttcttataatttattagcagagatgaattacaagaagcagaacgcaccattttttgg

SEQ ID NO: 19118 - DNA, 75 bp, Homo sapiens
cttcttataatttattagcagagatgaattacaagaagcagaacgcaccattttttggttcttggttgtagctgc

SEQ ID NO: 19119 - DNA, 74 bp, Homo sapiens
aatttattagcagagatgaattacaagaagcagaacgcaccattttttggttcttggttgtagctgccaactta

SEQ ID NO: 19120 - DNA, 75 bp, Homo sapiens
agagatgaattacaagaagcagaacgcaccattttttggttcttggttgtagctgccaacttaggagttcatgac

SEQ ID NO: 19121 - DNA, 74 bp, Homo sapiens
ttacaagaagcagaacgcaccattttttggttcttggttgtagctgccaacttaggagttcatgactataaata

SEQ ID NO: 19122 - DNA, 72 bp, Homo sapiens
agaacgcaccattttttggttcttggttgtagctgccaacttaggagttcatgactataaatataaagcaaa

SEQ ID NO: 19123 - DNA, 75 bp, Homo sapiens
ccattttttggttcttggttgtagctgccaacttaggagttcatgactataaatataaagcaaatatgattatgc

SEQ ID NO: 19124 - DNA, 81 bp, Homo sapiens
ttcttggttgtagctgccaacttaggagttcatgactataaatataaagcaaatatgattatgctcacaagctctggaatg

SEQ ID NO: 19125 - DNA, 80 bp, Homo sapiens
ttgtagctgccaacttaggagttcatgactataaatataaagcaaatatgattatgctcacaagctctggaatggtaaaa

SEQ ID NO: 19126 - DNA, 74 bp, Homo sapiens
acttaggagttcatgactataaatataaagcaaatatgattatgctcacaagctctggaatggtaaaaaaaccc

SEQ ID NO: 19127 - DNA, 78 bp, Homo sapiens
gttcatgactataaatataaagcaaatatgattatgctcacaagctctggaatggtaaaaaaaccccacatatctcta

SEQ ID NO: 19128 - DNA, 76 bp, Homo sapiens
tataaagcaaatatgattatgctcacaagctctggaatggtaaaaaaaccccacatatctctaaagtgtttctcta

SEQ ID NO: 19129 - DNA, 75 bp, Homo sapiens
agcaaatatgattatgctcacaagctctggaatggtaaaaaaaccccacatatctctaaagtgtttctctatcct

SEQ ID NO: 19130 - DNA, 74 bp, Homo sapiens
attatgctcacaagctctggaatggtaaaaaaaccccacatatctctaaagtgtttctctatccttgctttcaa

SEQ ID NO: 19131 - DNA, 75 bp, Homo sapiens
ccacatatctctaaagtgtttctctatccttgctttcaagtcatgacaaaaaaattcacagcagtttaaaggatg

SEQ ID NO: 19132 - DNA, 73 bp, Homo sapiens
ctctaaagtgtttctctatccttgctttcaagtcatgacaaaaaaattcacagcagtttaaaggatggtgaaa

SEQ ID NO: 19133 - DNA, 68 bp, Homo sapiens
aaaaattcacagcagtttaaaggatggtgaaagactaaacatgggcccactaaaatagagattaattt

SEQ ID NO: 19134 - DNA, 69 bp, Homo sapiens
gcagtttaaaggatggtgaaagactaaacatgggcccactaaaatagagattaattttacctattacac

SEQ ID NO: 19135 - DNA, 70 bp, Homo sapiens
ggatggtgaaagactaaacatgggcccactaaaatagagattaattttacctattacactcctatagtaa

SEQ ID NO: 19136 - DNA, 68 bp, Homo sapiens
gtgaaagactaaacatgggcccactaaaatagagattaattttacctattacactcctatagtaaaaa

SEQ ID NO: 19137 - DNA, 70 bp, Homo sapiens
ccactaaaatagagattaattttacctattacactcctatagtaaaaattgtaataagtatgatattgta

SEQ ID NO: 19138 - DNA, 70 bp, Homo sapiens
gattaattttacctattacactcctatagtaaaaattgtaataagtatgatattgtattaagtaacattc

SEQ ID NO: 19139 - DNA, 71 bp, Homo sapiens
cctattacactcctatagtaaaaattgtaataagtatgatattgtattaagtaacattctatagtaagccg

SEQ ID NO: 19140 - DNA, 73 bp, Homo sapiens
cactcctatagtaaaaattgtaataagtatgatattgtattaagtaacattctatagtaagccgttggagcaa

SEQ ID NO: 19141 - DNA, 75 bp, Homo sapiens
gtaataagtatgatattgtattaagtaacattctatagtaagccgttggagcaaatacagcatttaacaggttca

SEQ ID NO: 19142 - DNA, 73 bp, Homo sapiens
attgtattaagtaacattctatagtaagccgttggagcaaatacagcatttaacaggttcatttacagatccg

SEQ ID NO: 19143 - DNA, 75 bp, Homo sapiens
ttaagtaacattctatagtaagccgttggagcaaatacagcatttaacaggttcatttacagatccggcatggta

SEQ ID NO: 19144 - DNA, 76 bp, Homo sapiens
cgttggagcaaatacagcatttaacaggttcatttacagatccggcatggtagccttcagacagaacatcttattt

SEQ ID NO: 19145 - DNA, 77 bp, Homo sapiens
aatacagcatttaacaggttcatttacagatccggcatggtagccttcagacagaacatcttattttcactcttgaa

SEQ ID NO: 19146 - DNA, 76 bp, Homo sapiens
atttaacaggttcatttacagatccggcatggtagccttcagacagaacatcttattttcactcttgaacatgtaa

SEQ ID NO: 19147 - DNA, 73 bp, Homo sapiens
atttacagatccggcatggtagccttcagacagaacatcttattttcactcttgaacatgtaacctttaaaaa

SEQ ID NO: 19148 - DNA, 71 bp, Homo sapiens
atccggcatggtagccttcagacagaacatcttattttcactcttgaacatgtaacctttaaaaaaaccaa

SEQ ID NO: 19149 - DNA, 68 bp, Homo sapiens
cagacagaacatcttattttcactcttgaacatgtaacctttaaaaaaaccaaaaggaatatgtaatt

SEQ ID NO: 19150 - DNA, 69 bp, Homo sapiens
attttcactcttgaacatgtaacctttaaaaaaaccaaaaggaatatgtaatttatgacagctggccag

SEQ ID NO: 19151 - DNA, 71 bp, Homo sapiens
cactcttgaacatgtaacctttaaaaaaaccaaaaggaatatgtaatttatgacagctggccaggcactta

SEQ ID NO: 19152 - DNA, 68 bp, Homo sapiens
catgtaacctttaaaaaaaccaaaaggaatatgtaatttatgacagctggccaggcacttaatttggg

SEQ ID NO: 19153 - DNA, 68 bp, Homo sapiens
aaaaccaaaaggaatatgtaatttatgacagctggccaggcacttaatttggggaaagagaaggattt

SEQ ID NO: 19154 - DNA, 70 bp, Homo sapiens
aaaggaatatgtaatttatgacagctggccaggcacttaatttggggaaagagaaggattttgaggtaaa

SEQ ID NO: 19155 - DNA, 70 bp, Homo sapiens
taatttatgacagctggccaggcacttaatttggggaaagagaaggattttgaggtaaactagaattctt

SEQ ID NO: 19156 - DNA, 72 bp, Homo sapiens
gctggccaggcacttaatttggggaaagagaaggattttgaggtaaactagaattcttttcagcaatcacaa

SEQ ID NO: 19157 - DNA, 70 bp, Homo sapiens
cacttaatttggggaaagagaaggattttgaggtaaactagaattcttttcagcaatcacaaacatagcc

SEQ ID NO: 19158 - DNA, 69 bp, Homo sapiens
ggggaaagagaaggattttgaggtaaactagaattcttttcagcaatcacaaacatagcctaaaaacca

SEQ ID NO: 19159 - DNA, 70 bp, Homo sapiens
gaggtaaactagaattcttttcagcaatcacaaacatagcctaaaaaccacgttttataccacactgaag

SEQ ID NO: 19160 - DNA, 72 bp, Homo sapiens
ctagaattcttttcagcaatcacaaacatagcctaaaaaccacgttttataccacactgaagttattcagct

SEQ ID NO: 19161 - DNA, 70 bp, Homo sapiens
cttttcagcaatcacaaacatagcctaaaaaccacgttttataccacactgaagttattcagcttttaac

SEQ ID NO: 19162 - DNA, 69 bp, Homo sapiens
tcacaaacatagcctaaaaaccacgttttataccacactgaagttattcagcttttaactataagtttg

SEQ ID NO: 19163 - DNA, 67 bp, Homo sapiens
agcctaaaaaccacgttttataccacactgaagttattcagcttttaactataagtttgtcactcct

SEQ ID NO: 19164 - DNA, 69 bp, Homo sapiens
accacgttttataccacactgaagttattcagcttttaactataagtttgtcactcctttgtgccaaaa

SEQ ID NO: 19165 - DNA, 71 bp, Homo sapiens
acactgaagttattcagcttttaactataagtttgtcactcctttgtgccaaaattcacacctaggtgtaa

SEQ ID NO: 19166 - DNA, 69 bp, Homo sapiens
gaagttattcagcttttaactataagtttgtcactcctttgtgccaaaattcacacctaggtgtaactt

SEQ ID NO: 19167 - DNA, 69 bp, Homo sapiens
cccggctaattgtaacttcttaaggtattcaaagaacatactcaagtctgaattttggccccatttaga

SEQ ID NO: 19168 - DNA, 71 bp, Homo sapiens
ttgtaacttcttaaggtattcaaagaacatactcaagtctgaattttggccccatttagaaacttctgtgc

SEQ ID NO: 19169 - DNA, 71 bp, Homo sapiens
cttcttaaggtattcaaagaacatactcaagtctgaattttggccccatttagaaacttctgtgcttagaa

SEQ ID NO: 19170 - DNA, 70 bp, Homo sapiens
aaagaacatactcaagtctgaattttggccccatttagaaacttctgtgcttagaacatacttggaaaac

SEQ ID NO: 19171 - DNA, 71 bp, Homo sapiens
atactcaagtctgaattttggccccatttagaaacttctgtgcttagaacatacttggaaaactctaagta

SEQ ID NO: 19172 - DNA, 71 bp, Homo sapiens
gaattttggccccatttagaaacttctgtgcttagaacatacttggaaaactctaagtacatacatacaag

SEQ ID NO: 19173 - DNA, 74 bp, Homo sapiens
ccatttagaaacttctgtgcttagaacatacttggaaaactctaagtacatacatacaagggctattggcacaa

SEQ ID NO: 19174 - DNA, 74 bp, Homo sapiens
aaacttctgtgcttagaacatacttggaaaactctaagtacatacatacaagggctattggcacaagagcccaa

SEQ ID NO: 19175 - DNA, 76 bp, Homo sapiens
ttagaacatacttggaaaactctaagtacatacatacaagggctattggcacaagagcccaagatgagtaactatc

SEQ ID NO: 19176 - DNA, 75 bp, Homo sapiens
atacttggaaaactctaagtacatacatacaagggctattggcacaagagcccaagatgagtaactatctttctc

SEQ ID NO: 19177 - DNA, 73 bp, Homo sapiens
aaaactctaagtacatacatacaagggctattggcacaagagcccaagatgagtaactatctttctccctaat

SEQ ID NO: 19178 - DNA, 75 bp, Homo sapiens
atacatacaagggctattggcacaagagcccaagatgagtaactatctttctccctaatttgacatcaaatttaa

SEQ ID NO: 19179 - DNA, 73 bp, Homo sapiens
aagggctattggcacaagagcccaagatgagtaactatctttctccctaatttgacatcaaatttaatagatt

SEQ ID NO: 19180 - DNA, 73 bp, Homo sapiens
ttggcacaagagcccaagatgagtaactatctttctccctaatttgacatcaaatttaatagatttttaagaa

SEQ ID NO: 19181 - DNA, 73 bp, Homo sapiens
actatctttctccctaatttgacatcaaatttaatagatttttaagaaaaagaatcactgccagtcacagaca

SEQ ID NO: 19182 - DNA, 74 bp, Homo sapiens
tgacatcaaatttaatagatttttaagaaaaagaatcactgccagtcacagacatttaaaaaagaaatgactga

SEQ ID NO: 19183 - DNA, 73 bp, Homo sapiens
ttaatagatttttaagaaaaagaatcactgccagtcacagacatttaaaaaagaaatgactgaggtgataagc

SEQ ID NO: 19184 - DNA, 73 bp, Homo sapiens
tttaagaaaaagaatcactgccagtcacagacatttaaaaaagaaatgactgaggtgataagcctcaggaaaa

SEQ ID NO: 19185 - DNA, 77 bp, Homo sapiens
ccagtcacagacatttaaaaaagaaatgactgaggtgataagcctcaggaaaattacagagtagcactgctccagaa

SEQ ID NO: 19186 - DNA, 76 bp, Homo sapiens
acatttaaaaaagaaatgactgaggtgataagcctcaggaaaattacagagtagcactgctccagaaggagcagaa

SEQ ID NO: 19187 - DNA, 76 bp, Homo sapiens
aaaaagaaatgactgaggtgataagcctcaggaaaattacagagtagcactgctccagaaggagcagaaacagaaa

SEQ ID NO: 19188 - DNA, 78 bp, Homo sapiens
tgaggtgataagcctcaggaaaattacagagtagcactgctccagaaggagcagaaacagaaaagcagaatttccatt

SEQ ID NO: 19189 - DNA, 76 bp, Homo sapiens
ataagcctcaggaaaattacagagtagcactgctccagaaggagcagaaacagaaaagcagaatttccatttacaa

SEQ ID NO: 19190 - DNA, 77 bp, Homo sapiens
aaaattacagagtagcactgctccagaaggagcagaaacagaaaagcagaatttccatttacaaatgatgacagtac

SEQ ID NO: 19191 - DNA, 80 bp, Homo sapiens
acagagtagcactgctccagaaggagcagaaacagaaaagcagaatttccatttacaaatgatgacagtactgtgaaagc

SEQ ID NO: 19192 - DNA, 77 bp, Homo sapiens
ctccagaaggagcagaaacagaaaagcagaatttccatttacaaatgatgacagtactgtgaaagctcccagaatta

SEQ ID NO: 19193 - DNA, 77 bp, Homo sapiens
agcagaaacagaaaagcagaatttccatttacaaatgatgacagtactgtgaaagctcccagaattagcagtaagaa

SEQ ID NO: 19194 - DNA, 77 bp, Homo sapiens
aacagaaaagcagaatttccatttacaaatgatgacagtactgtgaaagctcccagaattagcagtaagaagcacaa

SEQ ID NO: 19195 - DNA, 80 bp, Homo sapiens
tttccatttacaaatgatgacagtactgtgaaagctcccagaattagcagtaagaagcacaactctgcaggttcattata

SEQ ID NO: 19196 - DNA, 80 bp, Homo sapiens
atttacaaatgatgacagtactgtgaaagctcccagaattagcagtaagaagcacaactctgcaggttcattatactctg

SEQ ID NO: 19197 - DNA, 80 bp, Homo sapiens
acagtactgtgaaagctcccagaattagcagtaagaagcacaactctgcaggttcattatactctggacacagtatatgt

SEQ ID NO: 19198 - DNA, 78 bp, Homo sapiens
aaagctcccagaattagcagtaagaagcacaactctgcaggttcattatactctggacacagtatatgtttcttctct

SEQ ID NO: 19199 - DNA, 80 bp, Homo sapiens
taagaagcacaactctgcaggttcattatactctggacacagtatatgtttcttctcttctgaatttcaaggtaatatga

SEQ ID NO: 19200 - DNA, 78 bp, Homo sapiens
aactctgcaggttcattatactctggacacagtatatgtttcttctcttctgaatttcaaggtaatatgacatttgct

SEQ ID NO: 19201 - DNA, 78 bp, Homo sapiens
gcaggttcattatactctggacacagtatatgtttcttctcttctgaatttcaaggtaatatgacatttgcttaataa

SEQ ID NO: 19202 - DNA, 76 bp, Homo sapiens
tcttctcttctgaatttcaaggtaatatgacatttgcttaataaatgaaaattcataatatagaagatggaggacc

SEQ ID NO: 19203 - DNA, 74 bp, Homo sapiens
catttgcttaataaatgaaaattcataatatagaagatggaggacctcagtaagtatttagatattaaagacag

SEQ ID NO: 19204 - DNA, 72 bp, Homo sapiens
ataaatgaaaattcataatatagaagatggaggacctcagtaagtatttagatattaaagacaggaacaaag

SEQ ID NO: 19205 - DNA, 73 bp, Homo sapiens
attcataatatagaagatggaggacctcagtaagtatttagatattaaagacaggaacaaagtggccattttg

SEQ ID NO: 19206 - DNA, 71 bp, Homo sapiens
atagaagatggaggacctcagtaagtatttagatattaaagacaggaacaaagtggccattttggaattag

SEQ ID NO: 19207 - DNA, 70 bp, Homo sapiens
gatggaggacctcagtaagtatttagatattaaagacaggaacaaagtggccattttggaattagtcttt

SEQ ID NO: 19208 - DNA, 69 bp, Homo sapiens
ctcagtaagtatttagatattaaagacaggaacaaagtggccattttggaattagtcttttatcaaaag

SEQ ID NO: 19209 - DNA, 69 bp, Homo sapiens
gatattaaagacaggaacaaagtggccattttggaattagtcttttatcaaaagttatccaagtctatt

SEQ ID NO: 19210 - DNA, 71 bp, Homo sapiens
agacaggaacaaagtggccattttggaattagtcttttatcaaaagttatccaagtctatttttcatgaga

SEQ ID NO: 19211 - DNA, 69 bp, Homo sapiens
agtggccattttggaattagtcttttatcaaaagttatccaagtctatttttcatgagaattaccaggg

SEQ ID NO: 19212 - DNA, 72 bp, Homo sapiens
ttggaattagtcttttatcaaaagttatccaagtctatttttcatgagaattaccagggtattatctgcaaa

SEQ ID NO: 19213 - DNA, 72 bp, Homo sapiens
gtcttttatcaaaagttatccaagtctatttttcatgagaattaccagggtattatctgcaaattaaaatgc

SEQ ID NO: 19214 - DNA, 73 bp, Homo sapiens
caaaagttatccaagtctatttttcatgagaattaccagggtattatctgcaaattaaaatgccaagcctcca

SEQ ID NO: 19215 - DNA, 76 bp, Homo sapiens
tatccaagtctatttttcatgagaattaccagggtattatctgcaaattaaaatgccaagcctccaaatcctcata

SEQ ID NO: 19216 - DNA, 75 bp, Homo sapiens
tttcatgagaattaccagggtattatctgcaaattaaaatgccaagcctccaaatcctcataggtatcaattaat

SEQ ID NO: 19217 - DNA, 74 bp, Homo sapiens
gagaattaccagggtattatctgcaaattaaaatgccaagcctccaaatcctcataggtatcaattaattatat

SEQ ID NO: 19218 - DNA, 74 bp, Homo sapiens
atgccaagcctccaaatcctcataggtatcaattaattatattttccattcctgtctcaacaatttcaacttcc

SEQ ID NO: 19219 - DNA, 74 bp, Homo sapiens
ccaaatcctcataggtatcaattaattatattttccattcctgtctcaacaatttcaacttcctgttttgagca

SEQ ID NO: 19220 - DNA, 76 bp, Homo sapiens
cataggtatcaattaattatattttccattcctgtctcaacaatttcaacttcctgttttgagcaaactcatcagc

SEQ ID NO: 19221 - DNA, 76 bp, Homo sapiens
taattatattttccattcctgtctcaacaatttcaacttcctgttttgagcaaactcatcagcttagatttatcaa

SEQ ID NO: 19222 - DNA, 76 bp, Homo sapiens
ttccattcctgtctcaacaatttcaacttcctgttttgagcaaactcatcagcttagatttatcaacatcttgttt

SEQ ID NO: 19223 - DNA, 73 bp, Homo sapiens
gtctcaacaatttcaacttcctgttttgagcaaactcatcagcttagatttatcaacatcttgttttaaaccc

SEQ ID NO: 19224 - DNA, 72 bp, Homo sapiens
aacaatttcaacttcctgttttgagcaaactcatcagcttagatttatcaacatcttgttttaaacccttca

SEQ ID NO: 19225 - DNA, 75 bp, Homo sapiens
ttgagcaaactcatcagcttagatttatcaacatcttgttttaaacccttcaaagaacattatgaataaagagaa

SEQ ID NO: 19226 - DNA, 72 bp, Homo sapiens
tcatcagcttagatttatcaacatcttgttttaaacccttcaaagaacattatgaataaagagaatttaaaa

SEQ ID NO: 19227 - DNA, 71 bp, Homo sapiens
tatcaacatcttgttttaaacccttcaaagaacattatgaataaagagaatttaaaacgtttctcagctga

SEQ ID NO: 19228 - DNA, 75 bp, Homo sapiens
acccttcaaagaacattatgaataaagagaatttaaaacgtttctcagctgagacatcctcattctcaaatgaga

SEQ ID NO: 19229 - DNA, 77 bp, Homo sapiens
caaagaacattatgaataaagagaatttaaaacgtttctcagctgagacatcctcattctcaaatgagaatattggc

SEQ ID NO: 19230 - DNA, 76 bp, Homo sapiens
atttaaaacgtttctcagctgagacatcctcattctcaaatgagaatattggcttaatttagagtttctacatggc

SEQ ID NO: 19231 - DNA, 77 bp, Homo sapiens
gtttctcagctgagacatcctcattctcaaatgagaatattggcttaatttagagtttctacatggctaaaagaaaa

SEQ ID NO: 19232 - DNA, 74 bp, Homo sapiens
agctgagacatcctcattctcaaatgagaatattggcttaatttagagtttctacatggctaaaagaaaaaaaa

SEQ ID NO: 19233 - DNA, 68 bp, Homo sapiens
gaaaaaaaaatgtttaaatacgtgatactgagttttccagtcatggtaaagggtttgtgctaactgac

SEQ ID NO: 19234 - DNA, 69 bp, Homo sapiens
aaatgtttaaatacgtgatactgagttttccagtcatggtaaagggtttgtgctaactgacctcttctt

SEQ ID NO: 19235 - DNA, 71 bp, Homo sapiens
aaatacgtgatactgagttttccagtcatggtaaagggtttgtgctaactgacctcttctttccttgcagg

SEQ ID NO: 19236 - DNA, 75 bp, Homo sapiens
tactgagttttccagtcatggtaaagggtttgtgctaactgacctcttctttccttgcagggctaactgcagcta

SEQ ID NO: 19237 - DNA, 73 bp, Homo sapiens
agtcatggtaaagggtttgtgctaactgacctcttctttccttgcagggctaactgcagctacctagcaaaat

SEQ ID NO: 19238 - DNA, 74 bp, Homo sapiens
taaagggtttgtgctaactgacctcttctttccttgcagggctaactgcagctacctagcaaaattactagctg

SEQ ID NO: 19239 - DNA, 78 bp, Homo sapiens
taactgacctcttctttccttgcagggctaactgcagctacctagcaaaattactagctggagttactggtgcaatga

SEQ ID NO: 19240 - DNA, 80 bp, Homo sapiens
cttctttccttgcagggctaactgcagctacctagcaaaattactagctggagttactggtgcaatgagcaaatgcagaa

SEQ ID NO: 19241 - DNA, 80 bp, Homo sapiens
ggctaactgcagctacctagcaaaattactagctggagttactggtgcaatgagcaaatgcagaagaatttctttctctg

SEQ ID NO: 19242 - DNA, 81 bp, Homo sapiens
tacctagcaaaattactagctggagttactggtgcaatgagcaaatgcagaagaatttctttctctgtgatgctaactgga

SEQ ID NO: 19243 - DNA, 80 bp, Homo sapiens
aaattactagctggagttactggtgcaatgagcaaatgcagaagaatttctttctctgtgatgctaactggattgttcaa

SEQ ID NO: 19244 - DNA, 79 bp, Homo sapiens
actggtgcaatgagcaaatgcagaagaatttctttctctgtgatgctaactggattgttcaagttttgaaactgtgacc

SEQ ID NO: 19245 - DNA, 75 bp, Homo sapiens
aaatgcagaagaatttctttctctgtgatgctaactggattgttcaagttttgaaactgtgaccctggtccatta

SEQ ID NO: 19246 - DNA, 77 bp, Homo sapiens
tttctctgtgatgctaactggattgttcaagttttgaaactgtgaccctggtccattagcaccatgctttactcaac

SEQ ID NO: 19247 - DNA, 75 bp, Homo sapiens
atgctaactggattgttcaagttttgaaactgtgaccctggtccattagcaccatgctttactcaactgaaataa

SEQ ID NO: 19248 - DNA, 74 bp, Homo sapiens
aagttttgaaactgtgaccctggtccattagcaccatgctttactcaactgaaataatcaagcccctattgctg

SEQ ID NO: 19249 - DNA, 78 bp, Homo sapiens
tgtgaccctggtccattagcaccatgctttactcaactgaaataatcaagcccctattgctgtgggggaagctgtaga

SEQ ID NO: 19250 - DNA, 76 bp, Homo sapiens
tggtccattagcaccatgctttactcaactgaaataatcaagcccctattgctgtgggggaagctgtagagggtgg

SEQ ID NO: 19251 - DNA, 73 bp, Homo sapiens
accatgctttactcaactgaaataatcaagcccctattgctgtgggggaagctgtagagggtggggtgagaag

SEQ ID NO: 19252 - DNA, 73 bp, Homo sapiens
tactcaactgaaataatcaagcccctattgctgtgggggaagctgtagagggtggggtgagaaggggattgaa

SEQ ID NO: 19253 - DNA, 73 bp, Homo sapiens
ataatcaagcccctattgctgtgggggaagctgtagagggtggggtgagaaggggattgaaggcaattatata

SEQ ID NO: 19254 - DNA, 75 bp, Homo sapiens
cctattgctgtgggggaagctgtagagggtggggtgagaaggggattgaaggcaattatatacatcattaagata

SEQ ID NO: 19255 - DNA, 78 bp, Homo sapiens
tgtagagggtggggtgagaaggggattgaaggcaattatatacatcattaagataccatgatatacagtgaaaatgta

SEQ ID NO: 19256 - DNA, 76 bp, Homo sapiens
gggtgagaaggggattgaaggcaattatatacatcattaagataccatgatatacagtgaaaatgtaatttgttaa

SEQ ID NO: 19257 - DNA, 77 bp, Homo sapiens
gggattgaaggcaattatatacatcattaagataccatgatatacagtgaaaatgtaatttgttaatatactatatt

SEQ ID NO: 19258 - DNA, 78 bp, Homo sapiens
tgaaggcaattatatacatcattaagataccatgatatacagtgaaaatgtaatttgttaatatactatatttgaggt

SEQ ID NO: 19259 - DNA, 78 bp, Homo sapiens
tacatcattaagataccatgatatacagtgaaaatgtaatttgttaatatactatatttgaggtttgaaaatcactga

SEQ ID NO: 19260 - DNA, 79 bp, Homo sapiens
gataccatgatatacagtgaaaatgtaatttgttaatatactatatttgaggtttgaaaatcactgatcacagctatta

SEQ ID NO: 19261 - DNA, 78 bp, Homo sapiens
catgatatacagtgaaaatgtaatttgttaatatactatatttgaggtttgaaaatcactgatcacagctattaaata

SEQ ID NO: 19262 - DNA, 76 bp, Homo sapiens
gaaaatgtaatttgttaatatactatatttgaggtttgaaaatcactgatcacagctattaaataacaatgcacca

SEQ ID NO: 19263 - DNA, 75 bp, Homo sapiens
ttgttaatatactatatttgaggtttgaaaatcactgatcacagctattaaataacaatgcaccaaagttttaca

SEQ ID NO: 19264 - DNA, 77 bp, Homo sapiens
gaggtttgaaaatcactgatcacagctattaaataacaatgcaccaaagttttacaatatttgaacatctgcaaatg

SEQ ID NO: 19265 - DNA, 79 bp, Homo sapiens
atcactgatcacagctattaaataacaatgcaccaaagttttacaatatttgaacatctgcaaatgtagagctttctgg

SEQ ID NO: 19266 - DNA, 79 bp, Homo sapiens
cacagctattaaataacaatgcaccaaagttttacaatatttgaacatctgcaaatgtagagctttctggtatgacaca

SEQ ID NO: 19267 - DNA, 77 bp, Homo sapiens
taaataacaatgcaccaaagttttacaatatttgaacatctgcaaatgtagagctttctggtatgacacaaatttga

SEQ ID NO: 19268 - DNA, 77 bp, Homo sapiens
gcaccaaagttttacaatatttgaacatctgcaaatgtagagctttctggtatgacacaaatttgaatacaaatgga

SEQ ID NO: 19269 - DNA, 79 bp, Homo sapiens
ttacaatatttgaacatctgcaaatgtagagctttctggtatgacacaaatttgaatacaaatggaagttcattgaata

SEQ ID NO: 19270 - DNA, 77 bp, Homo sapiens
gaacatctgcaaatgtagagctttctggtatgacacaaatttgaatacaaatggaagttcattgaatattaggttta

SEQ ID NO: 19271 - DNA, 77 bp, Homo sapiens
ctgcaaatgtagagctttctggtatgacacaaatttgaatacaaatggaagttcattgaatattaggtttatcagta

SEQ ID NO: 19272 - DNA, 74 bp, Homo sapiens
gagctttctggtatgacacaaatttgaatacaaatggaagttcattgaatattaggtttatcagtaagctaggg

SEQ ID NO: 19273 - DNA, 72 bp, Homo sapiens
tttgaatacaaatggaagttcattgaatattaggtttatcagtaagctaggggaaacaaattacatacattg

SEQ ID NO: 19274 - DNA, 71 bp, Homo sapiens
aatggaagttcattgaatattaggtttatcagtaagctaggggaaacaaattacatacattgtataggtag

SEQ ID NO: 19275 - DNA, 69 bp, Homo sapiens
atattaggtttatcagtaagctaggggaaacaaattacatacattgtataggtagtaacctatgaaaaa

SEQ ID NO: 19276 - DNA, 69 bp, Homo sapiens
cagtaagctaggggaaacaaattacatacattgtataggtagtaacctatgaaaaaagtggagattagg

SEQ ID NO: 19277 - DNA, 67 bp, Homo sapiens
gggaaacaaattacatacattgtataggtagtaacctatgaaaaaagtggagattaggtaaaaatta

SEQ ID NO: 19278 - DNA, 70 bp, Homo sapiens
ttgtataggtagtaacctatgaaaaaagtggagattaggtaaaaattattaagtgaaattattcatgtgc

SEQ ID NO: 19279 - DNA, 69 bp, Homo sapiens
ggtagtaacctatgaaaaaagtggagattaggtaaaaattattaagtgaaattattcatgtgctttcag

SEQ ID NO: 19280 - DNA, 71 bp, Homo sapiens
ggagattaggtaaaaattattaagtgaaattattcatgtgctttcagtttcatctttctcctgggaaagcc

SEQ ID NO: 19281 - DNA, 70 bp, Homo sapiens
aaaattattaagtgaaattattcatgtgctttcagtttcatctttctcctgggaaagccccaaaacaggc

SEQ ID NO: 19282 - DNA, 72 bp, Homo sapiens
taagtgaaattattcatgtgctttcagtttcatctttctcctgggaaagccccaaaacaggcctctggaaaa

SEQ ID NO: 19283 - DNA, 70 bp, Homo sapiens
attattcatgtgctttcagtttcatctttctcctgggaaagccccaaaacaggcctctggaaaaccaatt

SEQ ID NO: 19284 - DNA, 71 bp, Homo sapiens
tcagtttcatctttctcctgggaaagccccaaaacaggcctctggaaaaccaatttcatacatgtacaaaa

SEQ ID NO: 19285 - DNA, 76 bp, Homo sapiens
ggaaagccccaaaacaggcctctggaaaaccaatttcatacatgtacaaaatggcatctgctctcaaatagatata

SEQ ID NO: 19286 - DNA, 77 bp, Homo sapiens
aaaacaggcctctggaaaaccaatttcatacatgtacaaaatggcatctgctctcaaatagatatagctttccttca

SEQ ID NO: 19287 - DNA, 79 bp, Homo sapiens
tctggaaaaccaatttcatacatgtacaaaatggcatctgctctcaaatagatatagctttccttcaatggtagataag

SEQ ID NO: 19288 - DNA, 80 bp, Homo sapiens
aaaccaatttcatacatgtacaaaatggcatctgctctcaaatagatatagctttccttcaatggtagataagtcacaga

SEQ ID NO: 19289 - DNA, 84 bp, Homo sapiens
catgtacaaaatggcatctgctctcaaatagatatagctttccttcaatggtagataagtcacagacgtatctcagacattcat

SEQ ID NO: 19290 - DNA, 83 bp, Homo sapiens
acaaaatggcatctgctctcaaatagatatagctttccttcaatggtagataagtcacagacgtatctcagacattcatttca

SEQ ID NO: 19291 - DNA, 81 bp, Homo sapiens
ctctcaaatagatatagctttccttcaatggtagataagtcacagacgtatctcagacattcatttcatgcataaggattt

SEQ ID NO: 19292 - DNA, 80 bp, Homo sapiens
aaatagatatagctttccttcaatggtagataagtcacagacgtatctcagacattcatttcatgcataaggatttttga

SEQ ID NO: 19293 - DNA, 81 bp, Homo sapiens
ctttccttcaatggtagataagtcacagacgtatctcagacattcatttcatgcataaggatttttgagacatctattcca

SEQ ID NO: 19294 - DNA, 81 bp, Homo sapiens
aatggtagataagtcacagacgtatctcagacattcatttcatgcataaggatttttgagacatctattccactgaaatat

SEQ ID NO: 19295 - DNA, 81 bp, Homo sapiens
taagtcacagacgtatctcagacattcatttcatgcataaggatttttgagacatctattccactgaaatattataaagga

SEQ ID NO: 19296 - DNA, 79 bp, Homo sapiens
acgtatctcagacattcatttcatgcataaggatttttgagacatctattccactgaaatattataaaggaagtctaca

SEQ ID NO: 19297 - DNA, 76 bp, Homo sapiens
cattcatttcatgcataaggatttttgagacatctattccactgaaatattataaaggaagtctacaaaccacttc

SEQ ID NO: 19298 - DNA, 72 bp, Homo sapiens
tttgagacatctattccactgaaatattataaaggaagtctacaaaccacttctaggaaaaaggcacttcac

SEQ ID NO: 19299 - DNA, 70 bp, Homo sapiens
ctattccactgaaatattataaaggaagtctacaaaccacttctaggaaaaaggcacttcactgtgaaag

SEQ ID NO: 19300 - DNA, 70 bp, Homo sapiens
cactgaaatattataaaggaagtctacaaaccacttctaggaaaaaggcacttcactgtgaaagttggat

SEQ ID NO: 19301 - DNA, 69 bp, Homo sapiens
taaaggaagtctacaaaccacttctaggaaaaaggcacttcactgtgaaagttggatttaattacgtca

SEQ ID NO: 19302 - DNA, 70 bp, Homo sapiens
tacaaaccacttctaggaaaaaggcacttcactgtgaaagttggatttaattacgtcaaagttgtgaaga

SEQ ID NO: 19303 - DNA, 70 bp, Homo sapiens
acttctaggaaaaaggcacttcactgtgaaagttggatttaattacgtcaaagttgtgaagactaggata

SEQ ID NO: 19304 - DNA, 71 bp, Homo sapiens
gaaaaaggcacttcactgtgaaagttggatttaattacgtcaaagttgtgaagactaggatagactcaaaa

SEQ ID NO: 19305 - DNA, 73 bp, Homo sapiens
acttcactgtgaaagttggatttaattacgtcaaagttgtgaagactaggatagactcaaaattcagtattca

SEQ ID NO: 19306 - DNA, 71 bp, Homo sapiens
gaaagttggatttaattacgtcaaagttgtgaagactaggatagactcaaaattcagtattcatttttgta

SEQ ID NO: 19307 - DNA, 78 bp, Homo sapiens
ttacgtcaaagttgtgaagactaggatagactcaaaattcagtattcatttttgtatttatgaatctagagcagatgc

SEQ ID NO: 19308 - DNA, 79 bp, Homo sapiens
gttgtgaagactaggatagactcaaaattcagtattcatttttgtatttatgaatctagagcagatgccagtttagaga

SEQ ID NO: 19309 - DNA, 78 bp, Homo sapiens
actaggatagactcaaaattcagtattcatttttgtatttatgaatctagagcagatgccagtttagagaatagagcc

SEQ ID NO: 19310 - DNA, 77 bp, Homo sapiens
cagtattcatttttgtatttatgaatctagagcagatgccagtttagagaatagagccgataacattataaacaaac

SEQ ID NO: 19311 - DNA, 78 bp, Homo sapiens
tttgtatttatgaatctagagcagatgccagtttagagaatagagccgataacattataaacaaaccaaacagcaata

SEQ ID NO: 19312 - DNA, 73 bp, Homo sapiens
gccagtttagagaatagagccgataacattataaacaaaccaaacagcaataataactatattcttggcaaaa

SEQ ID NO: 19313 - DNA, 71 bp, Homo sapiens
ccgataacattataaacaaaccaaacagcaataataactatattcttggcaaaacagtaatttatgacatt

SEQ ID NO: 19314 - DNA, 72 bp, Homo sapiens
acaaaccaaacagcaataataactatattcttggcaaaacagtaatttatgacatttctccaaaaattagca

SEQ ID NO: 19315 - DNA, 73 bp, Homo sapiens
ccaaacagcaataataactatattcttggcaaaacagtaatttatgacatttctccaaaaattagcatagttc

SEQ ID NO: 19316 - DNA, 71 bp, Homo sapiens
ttcttggcaaaacagtaatttatgacatttctccaaaaattagcatagttctaagttcaacagtaaaaaga

SEQ ID NO: 19317 - DNA, 67 bp, Homo sapiens
aaaacagtaatttatgacatttctccaaaaattagcatagttctaagttcaacagtaaaaagaaaaa

SEQ ID NO: 19318 - DNA, 74 bp, Homo sapiens
aatcaccagcagttgctactttagagctcaagacactgttttcaatagaatttcacgtttgcggtttggttctc

SEQ ID NO: 19319 - DNA, 73 bp, Homo sapiens
agttgctactttagagctcaagacactgttttcaatagaatttcacgtttgcggtttggttctctgtttcaga

SEQ ID NO: 19320 - DNA, 75 bp, Homo sapiens
ttagagctcaagacactgttttcaatagaatttcacgtttgcggtttggttctctgtttcagacatgaactgctt

SEQ ID NO: 19321 - DNA, 73 bp, Homo sapiens
actgttttcaatagaatttcacgtttgcggtttggttctctgtttcagacatgaactgcttttcagatgaaaa

SEQ ID NO: 19322 - DNA, 73 bp, Homo sapiens
ttcaatagaatttcacgtttgcggtttggttctctgtttcagacatgaactgcttttcagatgaaaaacctgg

SEQ ID NO: 19323 - DNA, 77 bp, Homo sapiens
ttggttctctgtttcagacatgaactgcttttcagatgaaaaacctggggtggcagaggtgtgtttgtgctgtggaa

SEQ ID NO: 19324 - DNA, 74 bp, Homo sapiens
atgaactgcttttcagatgaaaaacctggggtggcagaggtgtgtttgtgctgtggaagaacccagggcagaaa

SEQ ID NO: 19325 - DNA, 72 bp, Homo sapiens
ttttcagatgaaaaacctggggtggcagaggtgtgtttgtgctgtggaagaacccagggcagaaaaataaca

SEQ ID NO: 19326 - DNA, 69 bp, Homo sapiens
aaaacctggggtggcagaggtgtgtttgtgctgtggaagaacccagggcagaaaaataacagggagtaa

SEQ ID NO: 19327 - DNA, 76 bp, Homo sapiens
tggcagaggtgtgtttgtgctgtggaagaacccagggcagaaaaataacagggagtaacaagaggtgcattctctg

SEQ ID NO: 19328 - DNA, 74 bp, Homo sapiens
aggtgtgtttgtgctgtggaagaacccagggcagaaaaataacagggagtaacaagaggtgcattctctggtca

SEQ ID NO: 19329 - DNA, 76 bp, Homo sapiens
tgtggaagaacccagggcagaaaaataacagggagtaacaagaggtgcattctctggtcagacagccaagtgagga

SEQ ID NO: 19330 - DNA, 74 bp, Homo sapiens
cccagggcagaaaaataacagggagtaacaagaggtgcattctctggtcagacagccaagtgaggaggtagtta

SEQ ID NO: 19331 - DNA, 74 bp, Homo sapiens
aaaaataacagggagtaacaagaggtgcattctctggtcagacagccaagtgaggaggtagttattctgagaac

SEQ ID NO: 19332 - DNA, 77 bp, Homo sapiens
taacagggagtaacaagaggtgcattctctggtcagacagccaagtgaggaggtagttattctgagaacttctcaaa

SEQ ID NO: 19333 - DNA, 79 bp, Homo sapiens
taacaagaggtgcattctctggtcagacagccaagtgaggaggtagttattctgagaacttctcaaatagagattattg

SEQ ID NO: 19334 - DNA, 76 bp, Homo sapiens
attctctggtcagacagccaagtgaggaggtagttattctgagaacttctcaaatagagattattgtactaaacta

SEQ ID NO: 19335 - DNA, 76 bp, Homo sapiens
agacagccaagtgaggaggtagttattctgagaacttctcaaatagagattattgtactaaactactgagagctgg

SEQ ID NO: 19336 - DNA, 74 bp, Homo sapiens
agtgaggaggtagttattctgagaacttctcaaatagagattattgtactaaactactgagagctggggaagta

SEQ ID NO: 19337 - DNA, 78 bp, Homo sapiens
agaacttctcaaatagagattattgtactaaactactgagagctggggaagtagcaggagcttctctgtgagactgaa

SEQ ID NO: 19338 - DNA, 79 bp, Homo sapiens
aaatagagattattgtactaaactactgagagctggggaagtagcaggagcttctctgtgagactgaagacagcaacag

SEQ ID NO: 19339 - DNA, 78 bp, Homo sapiens
attattgtactaaactactgagagctggggaagtagcaggagcttctctgtgagactgaagacagcaacaggaatact

SEQ ID NO: 19340 - DNA, 79 bp, Homo sapiens
actaaactactgagagctggggaagtagcaggagcttctctgtgagactgaagacagcaacaggaatacttctcctcca

SEQ ID NO: 19341 - DNA, 79 bp, Homo sapiens
agagctggggaagtagcaggagcttctctgtgagactgaagacagcaacaggaatacttctcctccagggaagtcagga

SEQ ID NO: 19342 - DNA, 77 bp, Homo sapiens
aagtagcaggagcttctctgtgagactgaagacagcaacaggaatacttctcctccagggaagtcaggaccagggtg

SEQ ID NO: 19343 - DNA, 81 bp, Homo sapiens
ttctctgtgagactgaagacagcaacaggaatacttctcctccagggaagtcaggaccagggtgtcagtgcagctgaaata

SEQ ID NO: 19344 - DNA, 78 bp, Homo sapiens
agactgaagacagcaacaggaatacttctcctccagggaagtcaggaccagggtgtcagtgcagctgaaatagaaaca

SEQ ID NO: 19345 - DNA, 76 bp, Homo sapiens
aagacagcaacaggaatacttctcctccagggaagtcaggaccagggtgtcagtgcagctgaaatagaaacagaat

SEQ ID NO: 19346 - DNA, 76 bp, Homo sapiens
cagtgcagctgaaatagaaacagaatttgtataagtgacacattcagagtataagaaaaacaaatatacaaaatta

SEQ ID NO: 19347 - DNA, 73 bp, Homo sapiens
gtgacacattcagagtataagaaaaacaaatatacaaaattaacaggaatgagaatacatttccaaacttgtc

SEQ ID NO: 19348 - DNA, 69 bp, Homo sapiens
cagagtataagaaaaacaaatatacaaaattaacaggaatgagaatacatttccaaacttgtcctacct

SEQ ID NO: 19349 - DNA, 69 bp, Homo sapiens
gaaaaacaaatatacaaaattaacaggaatgagaatacatttccaaacttgtcctaccttgaaagtggc

SEQ ID NO: 19350 - DNA, 72 bp, Homo sapiens
tatacaaaattaacaggaatgagaatacatttccaaacttgtcctaccttgaaagtggctcttttctgacaa

SEQ ID NO: 19351 - DNA, 69 bp, Homo sapiens
aaattaacaggaatgagaatacatttccaaacttgtcctaccttgaaagtggctcttttctgacaaaac

SEQ ID NO: 19352 - DNA, 68 bp, Homo sapiens
ggaatgagaatacatttccaaacttgtcctaccttgaaagtggctcttttctgacaaaactttaaaag

SEQ ID NO: 19353 - DNA, 67 bp, Homo sapiens
acatttccaaacttgtcctaccttgaaagtggctcttttctgacaaaactttaaaagtatctgtaaa

SEQ ID NO: 19354 - DNA, 67 bp, Homo sapiens
cttgtcctaccttgaaagtggctcttttctgacaaaactttaaaagtatctgtaaaaaaagaacaga

SEQ ID NO: 19355 - DNA, 67 bp, Homo sapiens
ccttgaaagtggctcttttctgacaaaactttaaaagtatctgtaaaaaaagaacagaaaccatgtc

SEQ ID NO: 19356 - DNA, 67 bp, Homo sapiens
tggctcttttctgacaaaactttaaaagtatctgtaaaaaaagaacagaaaccatgtccttattaac

SEQ ID NO: 19357 - DNA, 66 bp, Homo sapiens
ctgacaaaactttaaaagtatctgtaaaaaaagaacagaaaccatgtccttattaactagtttcaa

SEQ ID NO: 19358 - DNA, 68 bp, Homo sapiens
aagtatctgtaaaaaaagaacagaaaccatgtccttattaactagtttcaaagtagtgatccttcaaa

SEQ ID NO: 19359 - DNA, 80 bp, Homo sapiens
atactatatactaagatttgtaattatgccaagaaaccatatgctcaccttgttacatcaccacacatggcaatcccata

SEQ ID NO: 19360 - DNA, 78 bp, Homo sapiens
atactaagatttgtaattatgccaagaaaccatatgctcaccttgttacatcaccacacatggcaatcccatacaacc

SEQ ID NO: 19361 - DNA, 81 bp, Homo sapiens
ttgtaattatgccaagaaaccatatgctcaccttgttacatcaccacacatggcaatcccatacaaccctgagtcccatca

SEQ ID NO: 19362 - DNA, 82 bp, Homo sapiens
aagaaaccatatgctcaccttgttacatcaccacacatggcaatcccatacaaccctgagtcccatcatcactgctgttgag

SEQ ID NO: 19363 - DNA, 82 bp, Homo sapiens
atatgctcaccttgttacatcaccacacatggcaatcccatacaaccctgagtcccatcatcactgctgttgagttttttca

SEQ ID NO: 19364 - DNA, 79 bp, Homo sapiens
ttgttacatcaccacacatggcaatcccatacaaccctgagtcccatcatcactgctgttgagttttttcattcggtac

SEQ ID NO: 19365 - DNA, 77 bp, Homo sapiens
acacatggcaatcccatacaaccctgagtcccatcatcactgctgttgagttttttcattcggtactggcgtatttc

SEQ ID NO: 19366 - DNA, 74 bp, Homo sapiens
aatcccatacaaccctgagtcccatcatcactgctgttgagttttttcattcggtactggcgtatttctcttac

SEQ ID NO: 19367 - DNA, 74 bp, Homo sapiens
aaccctgagtcccatcatcactgctgttgagttttttcattcggtactggcgtatttctcttaccagtgtgtaa

SEQ ID NO: 19368 - DNA, 76 bp, Homo sapiens
ccatcatcactgctgttgagttttttcattcggtactggcgtatttctcttaccagtgtgtaaaaagcatcttcaa

SEQ ID NO: 19369 - DNA, 73 bp, Homo sapiens
tgctgttgagttttttcattcggtactggcgtatttctcttaccagtgtgtaaaaagcatcttcaacacccta

SEQ ID NO: 19370 - DNA, 69 bp, Homo sapiens
agttttttcattcggtactggcgtatttctcttaccagtgtgtaaaaagcatcttcaacaccctataaa

SEQ ID NO: 19371 - DNA, 68 bp, Homo sapiens
attcggtactggcgtatttctcttaccagtgtgtaaaaagcatcttcaacaccctataaaaggaaaaa

SEQ ID NO: 19372 - DNA, 68 bp, Homo sapiens
ctggcgtatttctcttaccagtgtgtaaaaagcatcttcaacaccctataaaaggaaaaaatgaaaaa

SEQ ID NO: 19373 - DNA, 82 bp, Homo sapiens
ttaatcaactgatgcaaactcttgcacaaatgctgaaagctgtaccatacctgtctggtcttggctgaggtttcaatgaatg

SEQ ID NO: 19374 - DNA, 78 bp, Homo sapiens
caaactcttgcacaaatgctgaaagctgtaccatacctgtctggtcttggctgaggtttcaatgaatggaatcccgta

SEQ ID NO: 19375 - DNA, 78 bp, Homo sapiens
ttgcacaaatgctgaaagctgtaccatacctgtctggtcttggctgaggtttcaatgaatggaatcccgtaactcttg

SEQ ID NO: 19376 - DNA, 76 bp, Homo sapiens
atgctgaaagctgtaccatacctgtctggtcttggctgaggtttcaatgaatggaatcccgtaactcttggccagt

SEQ ID NO: 19377 - DNA, 74 bp, Homo sapiens
taccatacctgtctggtcttggctgaggtttcaatgaatggaatcccgtaactcttggccagttcgtgggcttg

SEQ ID NO: 19378 - DNA, 74 bp, Homo sapiens
tctggtcttggctgaggtttcaatgaatggaatcccgtaactcttggccagttcgtgggcttgttttgtatcaa

SEQ ID NO: 19379 - DNA, 72 bp, Homo sapiens
ctgaggtttcaatgaatggaatcccgtaactcttggccagttcgtgggcttgttttgtatcaactgtccttg

SEQ ID NO: 19380 - DNA, 73 bp, Homo sapiens
aatgaatggaatcccgtaactcttggccagttcgtgggcttgttttgtatcaactgtccttgttggcaaatca

SEQ ID NO: 19381 - DNA, 71 bp, Homo sapiens
aatcccgtaactcttggccagttcgtgggcttgttttgtatcaactgtccttgttggcaaatcacacttgt

SEQ ID NO: 19382 - DNA, 73 bp, Homo sapiens
taactcttggccagttcgtgggcttgttttgtatcaactgtccttgttggcaaatcacacttgtttcccacta

SEQ ID NO: 19383 - DNA, 76 bp, Homo sapiens
ttcgtgggcttgttttgtatcaactgtccttgttggcaaatcacacttgtttcccactagcaccataggtacatca

SEQ ID NO: 19384 - DNA, 76 bp, Homo sapiens
tgttttgtatcaactgtccttgttggcaaatcacacttgtttcccactagcaccataggtacatcatccgagtctt

SEQ ID NO: 19385 - DNA, 77 bp, Homo sapiens
tgtatcaactgtccttgttggcaaatcacacttgtttcccactagcaccataggtacatcatccgagtcttttactc

SEQ ID NO: 19386 - DNA, 77 bp, Homo sapiens
ttgttggcaaatcacacttgtttcccactagcaccataggtacatcatccgagtcttttactcgcttaatctgctcc

SEQ ID NO: 19387 - DNA, 74 bp, Homo sapiens
aatcacacttgtttcccactagcaccataggtacatcatccgagtcttttactcgcttaatctgctccctaaaa

SEQ ID NO: 19388 - DNA, 73 bp, Homo sapiens
ttcccactagcaccataggtacatcatccgagtcttttactcgcttaatctgctccctaaaaacgggaatata

SEQ ID NO: 19389 - DNA, 74 bp, Homo sapiens
actagcaccataggtacatcatccgagtcttttactcgcttaatctgctccctaaaaacgggaatatattatca

SEQ ID NO: 19390 - DNA, 73 bp, Homo sapiens
gtacatcatccgagtcttttactcgcttaatctgctccctaaaaacgggaatatattatcagaacataagaaa

SEQ ID NO: 19391 - DNA, 76 bp, Homo sapiens
ttcagaacacaaagatcatcctttcagagaaaataatgctcctagtacctgtagaggttaatatccgcaaatgact

SEQ ID NO: 19392 - DNA, 75 bp, Homo sapiens
aaagatcatcctttcagagaaaataatgctcctagtacctgtagaggttaatatccgcaaatgacttgctattat

SEQ ID NO: 19393 - DNA, 79 bp, Homo sapiens
ttcagagaaaataatgctcctagtacctgtagaggttaatatccgcaaatgacttgctattattgatggcaaatacaca

SEQ ID NO: 19394 - DNA, 77 bp, Homo sapiens
agaaaataatgctcctagtacctgtagaggttaatatccgcaaatgacttgctattattgatggcaaatacacagag

SEQ ID NO: 19395 - DNA, 78 bp, Homo sapiens
tagtacctgtagaggttaatatccgcaaatgacttgctattattgatggcaaatacacagaggaagccttcgcctgtc

SEQ ID NO: 19396 - DNA, 80 bp, Homo sapiens
tagaggttaatatccgcaaatgacttgctattattgatggcaaatacacagaggaagccttcgcctgtcctcatgtattg

SEQ ID NO: 19397 - DNA, 82 bp, Homo sapiens
ttaatatccgcaaatgacttgctattattgatggcaaatacacagaggaagccttcgcctgtcctcatgtattggtctctca

SEQ ID NO: 19398 - DNA, 82 bp, Homo sapiens
aaatgacttgctattattgatggcaaatacacagaggaagccttcgcctgtcctcatgtattggtctctcatggcactgtac

SEQ ID NO: 19399 - DNA, 83 bp, Homo sapiens
tattattgatggcaaatacacagaggaagccttcgcctgtcctcatgtattggtctctcatggcactgtactcttcttgtcca

SEQ ID NO: 19400 - DNA, 81 bp, Homo sapiens
aaatacacagaggaagccttcgcctgtcctcatgtattggtctctcatggcactgtactcttcttgtccagctgtatccag

SEQ ID NO: 19401 - DNA, 82 bp, Homo sapiens
agaggaagccttcgcctgtcctcatgtattggtctctcatggcactgtactcttcttgtccagctgtatccagtatgtccaa

SEQ ID NO: 19402 - DNA, 81 bp, Homo sapiens
ttcgcctgtcctcatgtattggtctctcatggcactgtactcttcttgtccagctgtatccagtatgtccaacaaacaggt

SEQ ID NO: 19403 - DNA, 83 bp, Homo sapiens
tcatgtattggtctctcatggcactgtactcttcttgtccagctgtatccagtatgtccaacaaacaggtttcaccatctata

SEQ ID NO: 19404 - DNA, 79 bp, Homo sapiens
attggtctctcatggcactgtactcttcttgtccagctgtatccagtatgtccaacaaacaggtttcaccatctataac

SEQ ID NO: 19405 - DNA, 75 bp, Homo sapiens
cactgtactcttcttgtccagctgtatccagtatgtccaacaaacaggtttcaccatctataaccacttgttttc

SEQ ID NO: 19406 - DNA, 75 bp, Homo sapiens
tactcttcttgtccagctgtatccagtatgtccaacaaacaggtttcaccatctataaccacttgttttctgtaa

SEQ ID NO: 19407 - DNA, 74 bp, Homo sapiens
gtccagctgtatccagtatgtccaacaaacaggtttcaccatctataaccacttgttttctgtaagaatcctgg

SEQ ID NO: 19408 - DNA, 71 bp, Homo sapiens
atccagtatgtccaacaaacaggtttcaccatctataaccacttgttttctgtaagaatcctgggggtgtg

SEQ ID NO: 19409 - DNA, 67 bp, Homo sapiens
aacaaacaggtttcaccatctataaccacttgttttctgtaagaatcctgggggtgtggagggtaag

SEQ ID NO: 19410 - DNA, 67 bp, Homo sapiens
aggtttcaccatctataaccacttgttttctgtaagaatcctgggggtgtggagggtaagggggcag

SEQ ID NO: 19411 - DNA, 80 bp, Homo sapiens
acaagtgagagacaggatcaggtcagcgggctaccactgggcctcacctctatggtgggatcatattcatctacaaagtg

SEQ ID NO: 19412 - DNA, 78 bp, Homo sapiens
acaggatcaggtcagcgggctaccactgggcctcacctctatggtgggatcatattcatctacaaagtggttctggat

SEQ ID NO: 19413 - DNA, 79 bp, Homo sapiens
atcaggtcagcgggctaccactgggcctcacctctatggtgggatcatattcatctacaaagtggttctggattagctg

SEQ ID NO: 19414 - DNA, 80 bp, Homo sapiens
taccactgggcctcacctctatggtgggatcatattcatctacaaagtggttctggattagctggattgtcagtgcgctt

SEQ ID NO: 19415 - DNA, 79 bp, Homo sapiens
cctcacctctatggtgggatcatattcatctacaaagtggttctggattagctggattgtcagtgcgcttttcccaaca

SEQ ID NO: 19416 - DNA, 78 bp, Homo sapiens
cctctatggtgggatcatattcatctacaaagtggttctggattagctggattgtcagtgcgcttttcccaacaccac

SEQ ID NO: 19417 - DNA, 78 bp, Homo sapiens
atcatattcatctacaaagtggttctggattagctggattgtcagtgcgcttttcccaacaccacctgctccaaccac

SEQ ID NO: 19418 - DNA, 74 bp, Homo sapiens
tacaaagtggttctggattagctggattgtcagtgcgcttttcccaacaccacctgctccaaccaccaccagtt

SEQ ID NO: 19419 - DNA, 77 bp, Homo sapiens
ttctggattagctggattgtcagtgcgcttttcccaacaccacctgctccaaccaccaccagtttgtactcagtcat

SEQ ID NO: 19420 - DNA, 77 bp, Homo sapiens
attagctggattgtcagtgcgcttttcccaacaccacctgctccaaccaccaccagtttgtactcagtcatttcaca

SEQ ID NO: 19421 - DNA, 77 bp, Homo sapiens
attgtcagtgcgcttttcccaacaccacctgctccaaccaccaccagtttgtactcagtcatttcacaccagcaaga

SEQ ID NO: 19422 - DNA, 74 bp, Homo sapiens
ttcccaacaccacctgctccaaccaccaccagtttgtactcagtcatttcacaccagcaagaacctgttggaaa

SEQ ID NO: 19423 - DNA, 73 bp, Homo sapiens
accacctgctccaaccaccaccagtttgtactcagtcatttcacaccagcaagaacctgttggaaaccagtaa

SEQ ID NO: 19424 - DNA, 71 bp, Homo sapiens
aaccaccaccagtttgtactcagtcatttcacaccagcaagaacctgttggaaaccagtaatcagggttaa

SEQ ID NO: 19425 - DNA, 73 bp, Homo sapiens
accagtttgtactcagtcatttcacaccagcaagaacctgttggaaaccagtaatcagggttaattggcgagc

SEQ ID NO: 19426 - DNA, 79 bp, Homo sapiens
aacattccacagcccaaagccgaacactatgcatgagataaacttacctcaagctccactgcctctgctttggacagat

SEQ ID NO: 19427 - DNA, 78 bp, Homo sapiens
acagcccaaagccgaacactatgcatgagataaacttacctcaagctccactgcctctgctttggacagatttaggac

SEQ ID NO: 19428 - DNA, 78 bp, Homo sapiens
gaacactatgcatgagataaacttacctcaagctccactgcctctgctttggacagatttaggaccacagccgggaaa

SEQ ID NO: 19429 - DNA, 77 bp, Homo sapiens
tatgcatgagataaacttacctcaagctccactgcctctgctttggacagatttaggaccacagccgggaaaaatgt

SEQ ID NO: 19430 - DNA, 73 bp, Homo sapiens
ataaacttacctcaagctccactgcctctgctttggacagatttaggaccacagccgggaaaaatgttggaga

SEQ ID NO: 19431 - DNA, 70 bp, Homo sapiens
aagctccactgcctctgctttggacagatttaggaccacagccgggaaaaatgttggagaccccggaacc

SEQ ID NO: 19432 - DNA, 71 bp, Homo sapiens
actgcctctgctttggacagatttaggaccacagccgggaaaaatgttggagaccccggaaccgccatgaa

SEQ ID NO: 19433 - DNA, 68 bp, Homo sapiens
ctttggacagatttaggaccacagccgggaaaaatgttggagaccccggaaccgccatgaacagcccc

SEQ ID NO: 19434 - DNA, 67 bp, Homo sapiens
atttaggaccacagccgggaaaaatgttggagaccccggaaccgccatgaacagcccccaccaagga

SEQ ID NO: 19435 - DNA, 67 bp, Homo sapiens
aaaaatgttggagaccccggaaccgccatgaacagcccccaccaaggagcggcacttccggccccgc

SEQ ID NO: 19436 - DNA, 69 bp, Homo sapiens
cccggaaccgccatgaacagcccccaccaaggagcggcacttccggccccgcccgctacgtaatcagtc

SEQ ID NO: 19437 - DNA, 70 bp, Homo sapiens
aaccgccatgaacagcccccaccaaggagcggcacttccggccccgcccgctacgtaatcagtcggcgcc

SEQ ID NO: 19438 - DNA, 70 bp, Homo sapiens
cccccaccaaggagcggcacttccggccccgcccgctacgtaatcagtcggcgccccaggcgcctgagtc

SEQ ID NO: 19439 - DNA, 70 bp, Homo sapiens
accaaggagcggcacttccggccccgcccgctacgtaatcagtcggcgccccaggcgcctgagtccccgc

SEQ ID NO: 19440 - DNA, 68 bp, Homo sapiens
ttccggccccgcccgctacgtaatcagtcggcgccccaggcgcctgagtccccgccccggccacgtgg

SEQ ID NO: 19441 - DNA, 70 bp, Homo sapiens
gcccgctacgtaatcagtcggcgccccaggcgcctgagtccccgccccggccacgtgggcctccgaacca

SEQ ID NO: 19442 - DNA, 71 bp, Homo sapiens
tacgtaatcagtcggcgccccaggcgcctgagtccccgccccggccacgtgggcctccgaaccacgagtca

SEQ ID NO: 19443 - DNA, 72 bp, Homo sapiens
agtcggcgccccaggcgcctgagtccccgccccggccacgtgggcctccgaaccacgagtcatgcggcaggc

SEQ ID NO: 19444 - DNA, 72 bp, Homo sapiens
aggcgcctgagtccccgccccggccacgtgggcctccgaaccacgagtcatgcggcaggccgcacccagacc

SEQ ID NO: 19445 - DNA, 70 bp, Homo sapiens
cccgccccggccacgtgggcctccgaaccacgagtcatgcggcaggccgcacccagacccgcccctccca

SEQ ID NO: 19446 - DNA, 70 bp, Homo sapiens
ccacgtgggcctccgaaccacgagtcatgcggcaggccgcacccagacccgcccctcccacacgggacgt

SEQ ID NO: 19447 - DNA, 72 bp, Homo sapiens
ctccgaaccacgagtcatgcggcaggccgcacccagacccgcccctcccacacgggacgtttcaataatgaa

SEQ ID NO: 19448 - DNA, 73 bp, Homo sapiens
accacgagtcatgcggcaggccgcacccagacccgcccctcccacacgggacgtttcaataatgaaagcgcta

SEQ ID NO: 19449 - DNA, 74 bp, Homo sapiens
ggcaggccgcacccagacccgcccctcccacacgggacgtttcaataatgaaagcgctaggtgctagtgtctca

SEQ ID NO: 19450 - DNA, 78 bp, Homo sapiens
tggccttgagatttgaacacaatacagctgatggaatcttgccactttccttttgaatagactttaattgagagcaaa

SEQ ID NO: 19451 - DNA, 76 bp, Homo sapiens
agatttgaacacaatacagctgatggaatcttgccactttccttttgaatagactttaattgagagcaaagtgaaa

SEQ ID NO: 19452 - DNA, 75 bp, Homo sapiens
aatacagctgatggaatcttgccactttccttttgaatagactttaattgagagcaaagtgaaaaatgcaggtta

SEQ ID NO: 19453 - DNA, 74 bp, Homo sapiens
gctgatggaatcttgccactttccttttgaatagactttaattgagagcaaagtgaaaaatgcaggttacaatt

SEQ ID NO: 19454 - DNA, 70 bp, Homo sapiens
cttgccactttccttttgaatagactttaattgagagcaaagtgaaaaatgcaggttacaattttaagtg

SEQ ID NO: 19455 - DNA, 73 bp, Homo sapiens
ccttttgaatagactttaattgagagcaaagtgaaaaatgcaggttacaattttaagtgttatcatcaatatc

SEQ ID NO: 19456 - DNA, 76 bp, Homo sapiens
gactttaattgagagcaaagtgaaaaatgcaggttacaattttaagtgttatcatcaatatcttgtaagatcaaca

SEQ ID NO: 19457 - DNA, 79 bp, Homo sapiens
agagcaaagtgaaaaatgcaggttacaattttaagtgttatcatcaatatcttgtaagatcaacacccagtgatgcatc

SEQ ID NO: 19458 - DNA, 78 bp, Homo sapiens
gtgaaaaatgcaggttacaattttaagtgttatcatcaatatcttgtaagatcaacacccagtgatgcatctagtact

SEQ ID NO: 19459 - DNA, 78 bp, Homo sapiens
ggttacaattttaagtgttatcatcaatatcttgtaagatcaacacccagtgatgcatctagtacttatacagtccta

SEQ ID NO: 19460 - DNA, 78 bp, Homo sapiens
ttaagtgttatcatcaatatcttgtaagatcaacacccagtgatgcatctagtacttatacagtcctaattttagttg

SEQ ID NO: 19461 - DNA, 80 bp, Homo sapiens
atcatcaatatcttgtaagatcaacacccagtgatgcatctagtacttatacagtcctaattttagttgtcaaagagcaa

SEQ ID NO: 19462 - DNA, 78 bp, Homo sapiens
atatcttgtaagatcaacacccagtgatgcatctagtacttatacagtcctaattttagttgtcaaagagcaaatcat

SEQ ID NO: 19463 - DNA, 80 bp, Homo sapiens
aagatcaacacccagtgatgcatctagtacttatacagtcctaattttagttgtcaaagagcaaatcattatcagacata

SEQ ID NO: 19464 - DNA, 80 bp, Homo sapiens
cccagtgatgcatctagtacttatacagtcctaattttagttgtcaaagagcaaatcattatcagacatatatttacaca

SEQ ID NO: 19465 - DNA, 76 bp, Homo sapiens
catctagtacttatacagtcctaattttagttgtcaaagagcaaatcattatcagacatatatttacacagtaatt

SEQ ID NO: 19466 - DNA, 75 bp, Homo sapiens
cagtcctaattttagttgtcaaagagcaaatcattatcagacatatatttacacagtaatttcaagcaacggtaa

SEQ ID NO: 19467 - DNA, 74 bp, Homo sapiens
ctaattttagttgtcaaagagcaaatcattatcagacatatatttacacagtaatttcaagcaacggtaaataa

SEQ ID NO: 19468 - DNA, 73 bp, Homo sapiens
caaagagcaaatcattatcagacatatatttacacagtaatttcaagcaacggtaaataataaattccctccc

SEQ ID NO: 19469 - DNA, 72 bp, Homo sapiens
gcaaatcattatcagacatatatttacacagtaatttcaagcaacggtaaataataaattccctcccttaaa

SEQ ID NO: 19470 - DNA, 68 bp, Homo sapiens
atcagacatatatttacacagtaatttcaagcaacggtaaataataaattccctcccttaaaaaacaa

SEQ ID NO: 19471 - DNA, 74 bp, Homo sapiens
cacacacacacacgaccatctttaaacaatggatttcctcacccagtaagtctcatttttttcacatatacttg

SEQ ID NO: 19472 - DNA, 73 bp, Homo sapiens
acacacacgaccatctttaaacaatggatttcctcacccagtaagtctcatttttttcacatatacttgtaga

SEQ ID NO: 19473 - DNA, 70 bp, Homo sapiens
tctttaaacaatggatttcctcacccagtaagtctcatttttttcacatatacttgtagacccaaaggtc

SEQ ID NO: 19474 - DNA, 69 bp, Homo sapiens
atggatttcctcacccagtaagtctcatttttttcacatatacttgtagacccaaaggtccttaagtta

SEQ ID NO: 19475 - DNA, 67 bp, Homo sapiens
cctcacccagtaagtctcatttttttcacatatacttgtagacccaaaggtccttaagttacttaaa

SEQ ID NO: 19476 - DNA, 69 bp, Homo sapiens
tctcatttttttcacatatacttgtagacccaaaggtccttaagttacttaaaaacagtcttatcagtg

SEQ ID NO: 19477 - DNA, 70 bp, Homo sapiens
ttttcacatatacttgtagacccaaaggtccttaagttacttaaaaacagtcttatcagtggagatcctg

SEQ ID NO: 19478 - DNA, 70 bp, Homo sapiens
atatacttgtagacccaaaggtccttaagttacttaaaaacagtcttatcagtggagatcctggaccatc

SEQ ID NO: 19479 - DNA, 67 bp, Homo sapiens
caaaggtccttaagttacttaaaaacagtcttatcagtggagatcctggaccatcccctattttctt

SEQ ID NO: 19480 - DNA, 67 bp, Homo sapiens
gtccttaagttacttaaaaacagtcttatcagtggagatcctggaccatcccctattttcttttaaa

SEQ ID NO: 19481 - DNA, 69 bp, Homo sapiens
aacagtcttatcagtggagatcctggaccatcccctattttcttttaaagtcactttcatttttacaac

SEQ ID NO: 19482 - DNA, 70 bp, Homo sapiens
agtggagatcctggaccatcccctattttcttttaaagtcactttcatttttacaacttgaagccatata

SEQ ID NO: 19483 - DNA, 71 bp, Homo sapiens
atcctggaccatcccctattttcttttaaagtcactttcatttttacaacttgaagccatataccagcatg

SEQ ID NO: 19484 - DNA, 69 bp, Homo sapiens
ccctattttcttttaaagtcactttcatttttacaacttgaagccatataccagcatggtttttataca

SEQ ID NO: 19485 - DNA, 69 bp, Homo sapiens
ttttcttttaaagtcactttcatttttacaacttgaagccatataccagcatggtttttatacactaag

SEQ ID NO: 19486 - DNA, 71 bp, Homo sapiens
ttttaaagtcactttcatttttacaacttgaagccatataccagcatggtttttatacactaaggacactc

SEQ ID NO: 19487 - DNA, 73 bp, Homo sapiens
actttcatttttacaacttgaagccatataccagcatggtttttatacactaaggacactcccagtgatgaaa

SEQ ID NO: 19488 - DNA, 74 bp, Homo sapiens
catttttacaacttgaagccatataccagcatggtttttatacactaaggacactcccagtgatgaaaatgaat

SEQ ID NO: 19489 - DNA, 75 bp, Homo sapiens
ttgaagccatataccagcatggtttttatacactaaggacactcccagtgatgaaaatgaattcccctccatttg

SEQ ID NO: 19490 - DNA, 75 bp, Homo sapiens
atataccagcatggtttttatacactaaggacactcccagtgatgaaaatgaattcccctccatttgtgcaagga

SEQ ID NO: 19491 - DNA, 76 bp, Homo sapiens
ttttatacactaaggacactcccagtgatgaaaatgaattcccctccatttgtgcaaggaggtatgtacatctata

SEQ ID NO: 19492 - DNA, 75 bp, Homo sapiens
aattcccctccatttgtgcaaggaggtatgtacatctataaagacacatatgattaccactcaaaagagtcaaaa

SEQ ID NO: 19493 - DNA, 77 bp, Homo sapiens
ccatttgtgcaaggaggtatgtacatctataaagacacatatgattaccactcaaaagagtcaaaaacatacacaaa

SEQ ID NO: 19494 - DNA, 76 bp, Homo sapiens
ggaggtatgtacatctataaagacacatatgattaccactcaaaagagtcaaaaacatacacaaaaaaatctcaga

SEQ ID NO: 19495 - DNA, 77 bp, Homo sapiens
gtacatctataaagacacatatgattaccactcaaaagagtcaaaaacatacacaaaaaaatctcagatcttcatag

SEQ ID NO: 19496 - DNA, 77 bp, Homo sapiens
gacacatatgattaccactcaaaagagtcaaaaacatacacaaaaaaatctcagatcttcatagtttcttaagagca

SEQ ID NO: 19497 - DNA, 77 bp, Homo sapiens
aagagtcaaaaacatacacaaaaaaatctcagatcttcatagtttcttaagagcagtgtgccagtgttcacattgaa

SEQ ID NO: 19498 - DNA, 78 bp, Homo sapiens
aacatacacaaaaaaatctcagatcttcatagtttcttaagagcagtgtgccagtgttcacattgaattaactgaatg

SEQ ID NO: 19499 - DNA, 75 bp, Homo sapiens
aaaaaatctcagatcttcatagtttcttaagagcagtgtgccagtgttcacattgaattaactgaatggtaaaat

SEQ ID NO: 19500 - DNA, 78 bp, Homo sapiens
tctcagatcttcatagtttcttaagagcagtgtgccagtgttcacattgaattaactgaatggtaaaattcttttaga

SEQ ID NO: 19501 - DNA, 76 bp, Homo sapiens
taagagcagtgtgccagtgttcacattgaattaactgaatggtaaaattcttttagatttctatacagaggtactg

SEQ ID NO: 19502 - DNA, 71 bp, Homo sapiens
gttcacattgaattaactgaatggtaaaattcttttagatttctatacagaggtactggttagttctgatt

SEQ ID NO: 19503 - DNA, 72 bp, Homo sapiens
taactgaatggtaaaattcttttagatttctatacagaggtactggttagttctgattttttcttcagctgc

SEQ ID NO: 19504 - DNA, 75 bp, Homo sapiens
aaaattcttttagatttctatacagaggtactggttagttctgattttttcttcagctgcttgaaatgcatgagc

SEQ ID NO: 19505 - DNA, 78 bp, Homo sapiens
ttctatacagaggtactggttagttctgattttttcttcagctgcttgaaatgcatgagctttaaaagttgcctggca

SEQ ID NO: 19506 - DNA, 78 bp, Homo sapiens
ctgattttttcttcagctgcttgaaatgcatgagctttaaaagttgcctggcagaactacatcctgctttccaggtta

SEQ ID NO: 19507 - DNA, 79 bp, Homo sapiens
ttgaaatgcatgagctttaaaagttgcctggcagaactacatcctgctttccaggttagcagcctggctgacctcggga

SEQ ID NO: 19508 - DNA, 75 bp, Homo sapiens
tttaaaagttgcctggcagaactacatcctgctttccaggttagcagcctggctgacctcgggaatgttagacaa

SEQ ID NO: 19509 - DNA, 76 bp, Homo sapiens
ctggcagaactacatcctgctttccaggttagcagcctggctgacctcgggaatgttagacaagattcacccccga

SEQ ID NO: 19510 - DNA, 76 bp, Homo sapiens
tttccaggttagcagcctggctgacctcgggaatgttagacaagattcacccccgatgccttgctctctgatttat

SEQ ID NO: 19511 - DNA, 78 bp, Homo sapiens
ttagcagcctggctgacctcgggaatgttagacaagattcacccccgatgccttgctctctgatttatttcttgctgt

SEQ ID NO: 19512 - DNA, 75 bp, Homo sapiens
acctcgggaatgttagacaagattcacccccgatgccttgctctctgatttatttcttgctgttgctgttagtaa

SEQ ID NO: 19513 - DNA, 75 bp, Homo sapiens
aatgttagacaagattcacccccgatgccttgctctctgatttatttcttgctgttgctgttagtaaatggaaac

SEQ ID NO: 19514 - DNA, 76 bp, Homo sapiens
acaagattcacccccgatgccttgctctctgatttatttcttgctgttgctgttagtaaatggaaaccatgacaaa

SEQ ID NO: 19515 - DNA, 79 bp, Homo sapiens
cgatgccttgctctctgatttatttcttgctgttgctgttagtaaatggaaaccatgacaaagtttacattagcagaca

SEQ ID NO: 19516 - DNA, 80 bp, Homo sapiens
ttgctctctgatttatttcttgctgttgctgttagtaaatggaaaccatgacaaagtttacattagcagacacatacaca

SEQ ID NO: 19517 - DNA, 78 bp, Homo sapiens
tgttgctgttagtaaatggaaaccatgacaaagtttacattagcagacacatacacatgccctggcctataaatattc

SEQ ID NO: 19518 - DNA, 78 bp, Homo sapiens
aaaccatgacaaagtttacattagcagacacatacacatgccctggcctataaatattccatgatagaaaatggtaca

SEQ ID NO: 19519 - DNA, 77 bp, Homo sapiens
aaagtttacattagcagacacatacacatgccctggcctataaatattccatgatagaaaatggtacaataattcca

SEQ ID NO: 19520 - DNA, 79 bp, Homo sapiens
tagcagacacatacacatgccctggcctataaatattccatgatagaaaatggtacaataattccatccccagcgaaaa

SEQ ID NO: 19521 - DNA, 77 bp, Homo sapiens
atacacatgccctggcctataaatattccatgatagaaaatggtacaataattccatccccagcgaaaacgagcata

SEQ ID NO: 19522 - DNA, 70 bp, Homo sapiens
aaatattccatgatagaaaatggtacaataattccatccccagcgaaaacgagcataaaaaaagaaggga

SEQ ID NO: 19523 - DNA, 69 bp, Homo sapiens
ttccatgatagaaaatggtacaataattccatccccagcgaaaacgagcataaaaaaagaagggaaggg

SEQ ID NO: 19524 - DNA, 65 bp, Homo sapiens
aaaatggtacaataattccatccccagcgaaaacgagcataaaaaaagaagggaagggtcagggg

SEQ ID NO: 19525 - DNA, 71 bp, Homo sapiens
aataattccatccccagcgaaaacgagcataaaaaaagaagggaagggtcagggggacatgatcagctatg

SEQ ID NO: 19526 - DNA, 74 bp, Homo sapiens
cagcgaaaacgagcataaaaaaagaagggaagggtcagggggacatgatcagctatggctcttcttacagtaga

SEQ ID NO: 19527 - DNA, 71 bp, Homo sapiens
aaaacgagcataaaaaaagaagggaagggtcagggggacatgatcagctatggctcttcttacagtagaaa

SEQ ID NO: 19528 - DNA, 74 bp, Homo sapiens
aaagaagggaagggtcagggggacatgatcagctatggctcttcttacagtagaaaatccacaccaaatggcaa

SEQ ID NO: 19529 - DNA, 75 bp, Homo sapiens
aagggtcagggggacatgatcagctatggctcttcttacagtagaaaatccacaccaaatggcaatgggctttta

SEQ ID NO: 19530 - DNA, 77 bp, Homo sapiens
ggacatgatcagctatggctcttcttacagtagaaaatccacaccaaatggcaatgggcttttaactaaccagacat

SEQ ID NO: 19531 - DNA, 75 bp, Homo sapiens
atcagctatggctcttcttacagtagaaaatccacaccaaatggcaatgggcttttaactaaccagacattgtta

SEQ ID NO: 19532 - DNA, 75 bp, Homo sapiens
tcttcttacagtagaaaatccacaccaaatggcaatgggcttttaactaaccagacattgttagctgcttctcca

SEQ ID NO: 19533 - DNA, 74 bp, Homo sapiens
tacagtagaaaatccacaccaaatggcaatgggcttttaactaaccagacattgttagctgcttctccagggcc

SEQ ID NO: 19534 - DNA, 76 bp, Homo sapiens
atccacaccaaatggcaatgggcttttaactaaccagacattgttagctgcttctccagggcctgtgagtcaacta

SEQ ID NO: 19535 - DNA, 73 bp, Homo sapiens
aaatggcaatgggcttttaactaaccagacattgttagctgcttctccagggcctgtgagtcaactaaaagta

SEQ ID NO: 19536 - DNA, 75 bp, Homo sapiens
ttttaactaaccagacattgttagctgcttctccagggcctgtgagtcaactaaaagtaggcagggcagagacca

SEQ ID NO: 19537 - DNA, 76 bp, Homo sapiens
attgttagctgcttctccagggcctgtgagtcaactaaaagtaggcagggcagagaccaactcttccaggcacacc

SEQ ID NO: 19538 - DNA, 71 bp, Homo sapiens
aactaaaagtaggcagggcagagaccaactcttccaggcacacctggtagtttccagaagcaccggtatct

SEQ ID NO: 19539 - DNA, 74 bp, Homo sapiens
cagggcagagaccaactcttccaggcacacctggtagtttccagaagcaccggtatcttgtcttggaagttgga

SEQ ID NO: 19540 - DNA, 73 bp, Homo sapiens
agaccaactcttccaggcacacctggtagtttccagaagcaccggtatcttgtcttggaagttggatgaagaa

SEQ ID NO: 19541 - DNA, 75 bp, Homo sapiens
tccaggcacacctggtagtttccagaagcaccggtatcttgtcttggaagttggatgaagaagatcaactgaagt

SEQ ID NO: 19542 - DNA, 71 bp, Homo sapiens
ctggtagtttccagaagcaccggtatcttgtcttggaagttggatgaagaagatcaactgaagtttccttt

SEQ ID NO: 19543 - DNA, 70 bp, Homo sapiens
agtttccagaagcaccggtatcttgtcttggaagttggatgaagaagatcaactgaagtttcctttttag

SEQ ID NO: 19544 - DNA, 71 bp, Homo sapiens
accggtatcttgtcttggaagttggatgaagaagatcaactgaagtttcctttttagtgaggaggagtgga

SEQ ID NO: 19545 - DNA, 74 bp, Homo sapiens
tcttggaagttggatgaagaagatcaactgaagtttcctttttagtgaggaggagtggagagtcagacttgaaa

SEQ ID NO: 19546 - DNA, 73 bp, Homo sapiens
aagttggatgaagaagatcaactgaagtttcctttttagtgaggaggagtggagagtcagacttgaaagcagt

SEQ ID NO: 19547 - DNA, 76 bp, Homo sapiens
aagaagatcaactgaagtttcctttttagtgaggaggagtggagagtcagacttgaaagcagttcacacactgtgc

SEQ ID NO: 19548 - DNA, 77 bp, Homo sapiens
aagtttcctttttagtgaggaggagtggagagtcagacttgaaagcagttcacacactgtgctgcctgggacactga

SEQ ID NO: 19549 - DNA, 78 bp, Homo sapiens
tcctttttagtgaggaggagtggagagtcagacttgaaagcagttcacacactgtgctgcctgggacactgaacggtc

SEQ ID NO: 19550 - DNA, 75 bp, Homo sapiens
agagtcagacttgaaagcagttcacacactgtgctgcctgggacactgaacggtccccgagggagacccctcaaa

SEQ ID NO: 19551 - DNA, 77 bp, Homo sapiens
ttgaaagcagttcacacactgtgctgcctgggacactgaacggtccccgagggagacccctcaaagcgccagctgga

SEQ ID NO: 19552 - DNA, 74 bp, Homo sapiens
agttcacacactgtgctgcctgggacactgaacggtccccgagggagacccctcaaagcgccagctggagtttg

SEQ ID NO: 19553 - DNA, 76 bp, Homo sapiens
tgctgcctgggacactgaacggtccccgagggagacccctcaaagcgccagctggagtttggtcatgtttctctga

SEQ ID NO: 19554 - DNA, 77 bp, Homo sapiens
acactgaacggtccccgagggagacccctcaaagcgccagctggagtttggtcatgtttctctgatgcatgttgtga

SEQ ID NO: 19555 - DNA, 78 bp, Homo sapiens
gtccccgagggagacccctcaaagcgccagctggagtttggtcatgtttctctgatgcatgttgtgatggcggactaa

SEQ ID NO: 19556 - DNA, 79 bp, Homo sapiens
aaagcgccagctggagtttggtcatgtttctctgatgcatgttgtgatggcggactaattcatctgaccgggcaaactt

SEQ ID NO: 19557 - DNA, 79 bp, Homo sapiens
ctggagtttggtcatgtttctctgatgcatgttgtgatggcggactaattcatctgaccgggcaaactttttctgacaa

SEQ ID NO: 19558 - DNA, 78 bp, Homo sapiens
gtttggtcatgtttctctgatgcatgttgtgatggcggactaattcatctgaccgggcaaactttttctgacaacttg

SEQ ID NO: 19559 - DNA, 78 bp, Homo sapiens
gtttctctgatgcatgttgtgatggcggactaattcatctgaccgggcaaactttttctgacaacttggccaccgaca

SEQ ID NO: 19560 - DNA, 75 bp, Homo sapiens
atgttgtgatggcggactaattcatctgaccgggcaaactttttctgacaacttggccaccgacagctgaagggc

SEQ ID NO: 19561 - DNA, 73 bp, Homo sapiens
atggcggactaattcatctgaccgggcaaactttttctgacaacttggccaccgacagctgaagggcttttca

SEQ ID NO: 19562 - DNA, 74 bp, Homo sapiens
taattcatctgaccgggcaaactttttctgacaacttggccaccgacagctgaagggcttttcacctgttgaca

SEQ ID NO: 19563 - DNA, 76 bp, Homo sapiens
ggcaaactttttctgacaacttggccaccgacagctgaagggcttttcacctgttgacacaattgccagtcagaga

SEQ ID NO: 19564 - DNA, 78 bp, Homo sapiens
tttttctgacaacttggccaccgacagctgaagggcttttcacctgttgacacaattgccagtcagagacacttgcaa

SEQ ID NO: 19565 - DNA, 68 bp, Homo sapiens
aaaaataatgaaaaataaatgtgaagaaaagtttacgcacttgttttacctgtatgagtcctggtgtg

SEQ ID NO: 19566 - DNA, 68 bp, Homo sapiens
aaaaataaatgtgaagaaaagtttacgcacttgttttacctgtatgagtcctggtgtgggtcttcagg

SEQ ID NO: 19567 - DNA, 70 bp, Homo sapiens
aaatgtgaagaaaagtttacgcacttgttttacctgtatgagtcctggtgtgggtcttcaggtggtcgga

SEQ ID NO: 19568 - DNA, 68 bp, Homo sapiens
aaagtttacgcacttgttttacctgtatgagtcctggtgtgggtcttcaggtggtcggaccgggagaa

SEQ ID NO: 19569 - DNA, 70 bp, Homo sapiens
ttgttttacctgtatgagtcctggtgtgggtcttcaggtggtcggaccgggagaactttcgctgacaagt

SEQ ID NO: 19570 - DNA, 71 bp, Homo sapiens
ttacctgtatgagtcctggtgtgggtcttcaggtggtcggaccgggagaactttcgctgacaagttttaca

SEQ ID NO: 19571 - DNA, 70 bp, Homo sapiens
ctggtgtgggtcttcaggtggtcggaccgggagaactttcgctgacaagttttacactggaatggtttca

SEQ ID NO: 19572 - DNA, 69 bp, Homo sapiens
gtcttcaggtggtcggaccgggagaactttcgctgacaagttttacactggaatggtttcacacctaaa

SEQ ID NO: 19573 - DNA, 69 bp, Homo sapiens
aggtggtcggaccgggagaactttcgctgacaagttttacactggaatggtttcacacctaaatggaca

SEQ ID NO: 19574 - DNA, 70 bp, Homo sapiens
accgggagaactttcgctgacaagttttacactggaatggtttcacacctaaatggacagagaaggtcta

SEQ ID NO: 19575 - DNA, 72 bp, Homo sapiens
tttcgctgacaagttttacactggaatggtttcacacctaaatggacagagaaggtctagcctcggccctaa

SEQ ID NO: 19576 - DNA, 75 bp, Homo sapiens
atcaaccctagcccaagggaacacagctgccagcaatgagaagtgaacctacaaacctgtatgtctcctttggtg

SEQ ID NO: 19577 - DNA, 76 bp, Homo sapiens
aagggaacacagctgccagcaatgagaagtgaacctacaaacctgtatgtctcctttggtgtcttttgagctggtc

SEQ ID NO: 19578 - DNA, 77 bp, Homo sapiens
gctgccagcaatgagaagtgaacctacaaacctgtatgtctcctttggtgtcttttgagctggtctgaacgagaaaa

SEQ ID NO: 19579 - DNA, 71 bp, Homo sapiens
aatgagaagtgaacctacaaacctgtatgtctcctttggtgtcttttgagctggtctgaacgagaaaacct

SEQ ID NO: 19580 - DNA, 69 bp, Homo sapiens
aagtgaacctacaaacctgtatgtctcctttggtgtcttttgagctggtctgaacgagaaaaccttcgt

SEQ ID NO: 19581 - DNA, 71 bp, Homo sapiens
aaacctgtatgtctcctttggtgtcttttgagctggtctgaacgagaaaaccttcgttcacagtccttgaa

SEQ ID NO: 19582 - DNA, 74 bp, Homo sapiens
tctcctttggtgtcttttgagctggtctgaacgagaaaaccttcgttcacagtccttgaagtcacactggtatg

SEQ ID NO: 19583 - DNA, 73 bp, Homo sapiens
tcttttgagctggtctgaacgagaaaaccttcgttcacagtccttgaagtcacactggtatggtttctcacct

SEQ ID NO: 19584 - DNA, 71 bp, Homo sapiens
ctggtctgaacgagaaaaccttcgttcacagtccttgaagtcacactggtatggtttctcaccttggggaa

SEQ ID NO: 19585 - DNA, 71 bp, Homo sapiens
aacgagaaaaccttcgttcacagtccttgaagtcacactggtatggtttctcaccttggggaagacacata

SEQ ID NO: 19586 - DNA, 73 bp, Homo sapiens
cttcgttcacagtccttgaagtcacactggtatggtttctcaccttggggaagacacatattctatttgaaaa

SEQ ID NO: 19587 - DNA, 80 bp, Homo sapiens
aaggagctcttgaaccatgtttgcccaagactggacagcgggcacacttaccagtgtgcttcctgctgtgcatctgtaag

SEQ ID NO: 19588 - DNA, 80 bp, Homo sapiens
catgtttgcccaagactggacagcgggcacacttaccagtgtgcttcctgctgtgcatctgtaagtgggacagcttaaaa

SEQ ID NO: 19589 - DNA, 80 bp, Homo sapiens
caagactggacagcgggcacacttaccagtgtgcttcctgctgtgcatctgtaagtgggacagcttaaaatatctcttat

SEQ ID NO: 19590 - DNA, 81 bp, Homo sapiens
acagcgggcacacttaccagtgtgcttcctgctgtgcatctgtaagtgggacagcttaaaatatctcttattgcagcctgg

SEQ ID NO: 19591 - DNA, 81 bp, Homo sapiens
acttaccagtgtgcttcctgctgtgcatctgtaagtgggacagcttaaaatatctcttattgcagcctgggtaagcacaca

SEQ ID NO: 19592 - DNA, 81 bp, Homo sapiens
agtgtgcttcctgctgtgcatctgtaagtgggacagcttaaaatatctcttattgcagcctgggtaagcacacatgaaggg

SEQ ID NO: 19593 - DNA, 79 bp, Homo sapiens
ctgtgcatctgtaagtgggacagcttaaaatatctcttattgcagcctgggtaagcacacatgaaggggcgtttctcac

SEQ ID NO: 19594 - DNA, 76 bp, Homo sapiens
atctgtaagtgggacagcttaaaatatctcttattgcagcctgggtaagcacacatgaaggggcgtttctcactgg

SEQ ID NO: 19595 - DNA, 78 bp, Homo sapiens
acagcttaaaatatctcttattgcagcctgggtaagcacacatgaaggggcgtttctcactggtctcagatgccgacc

SEQ ID NO: 19596 - DNA, 78 bp, Homo sapiens
aaatatctcttattgcagcctgggtaagcacacatgaaggggcgtttctcactggtctcagatgccgaccgtacaaga

SEQ ID NO: 19597 - DNA, 76 bp, Homo sapiens
cttattgcagcctgggtaagcacacatgaaggggcgtttctcactggtctcagatgccgaccgtacaagagtcggg

SEQ ID NO: 19598 - DNA, 77 bp, Homo sapiens
ggtaagcacacatgaaggggcgtttctcactggtctcagatgccgaccgtacaagagtcggggctactccaggcaca

SEQ ID NO: 19599 - DNA, 77 bp, Homo sapiens
atgaaggggcgtttctcactggtctcagatgccgaccgtacaagagtcggggctactccaggcacacgtcgcacatc

SEQ ID NO: 19600 - DNA, 80 bp, Homo sapiens
gggcgtttctcactggtctcagatgccgaccgtacaagagtcggggctactccaggcacacgtcgcacatcctgcaggca

SEQ ID NO: 19601 - DNA, 80 bp, Homo sapiens
actggtctcagatgccgaccgtacaagagtcggggctactccaggcacacgtcgcacatcctgcaggcagagagtaagag

SEQ ID NO: 19602 - DNA, 78 bp, Homo sapiens
agatgccgaccgtacaagagtcggggctactccaggcacacgtcgcacatcctgcaggcagagagtaagaggaaggga

SEQ ID NO: 19603 - DNA, 76 bp, Homo sapiens
cgtacaagagtcggggctactccaggcacacgtcgcacatcctgcaggcagagagtaagaggaagggaggctttaa

SEQ ID NO: 19604 - DNA, 78 bp, Homo sapiens
aagaggcagtgcggcccccttcccgctggggcctgtctgtgtgctcacctgaatgcctctgaagacaccgtgcgtgtg

SEQ ID NO: 19605 - DNA, 79 bp, Homo sapiens
tgcggcccccttcccgctggggcctgtctgtgtgctcacctgaatgcctctgaagacaccgtgcgtgtgtattctgtat

SEQ ID NO: 19606 - DNA, 82 bp, Homo sapiens
ttcccgctggggcctgtctgtgtgctcacctgaatgcctctgaagacaccgtgcgtgtgtattctgtattgggctccgcaga

SEQ ID NO: 19607 - DNA, 83 bp, Homo sapiens
gcctgtctgtgtgctcacctgaatgcctctgaagacaccgtgcgtgtgtattctgtattgggctccgcagaggatgggcgttg

SEQ ID NO: 19608 - DNA, 82 bp, Homo sapiens
tgtgctcacctgaatgcctctgaagacaccgtgcgtgtgtattctgtattgggctccgcagaggatgggcgttgtgtggtta

SEQ ID NO: 19609 - DNA, 81 bp, Homo sapiens
tgaatgcctctgaagacaccgtgcgtgtgtattctgtattgggctccgcagaggatgggcgttgtgtggttatcgctctcg

SEQ ID NO: 19610 - DNA, 78 bp, Homo sapiens
tgaagacaccgtgcgtgtgtattctgtattgggctccgcagaggatgggcgttgtgtggttatcgctctcgtaccctg

SEQ ID NO: 19611 - DNA, 78 bp, Homo sapiens
accgtgcgtgtgtattctgtattgggctccgcagaggatgggcgttgtgtggttatcgctctcgtaccctgtgctgtg

SEQ ID NO: 19612 - DNA, 80 bp, Homo sapiens
tattctgtattgggctccgcagaggatgggcgttgtgtggttatcgctctcgtaccctgtgctgtggctgcaaacacaaa

SEQ ID NO: 19613 - DNA, 78 bp, Homo sapiens
tattgggctccgcagaggatgggcgttgtgtggttatcgctctcgtaccctgtgctgtggctgcaaacacaaagaagg

SEQ ID NO: 19614 - DNA, 75 bp, Homo sapiens
aggatgggcgttgtgtggttatcgctctcgtaccctgtgctgtggctgcaaacacaaagaagggaaaaaggctca

SEQ ID NO: 19615 - DNA, 82 bp, Homo sapiens
aactcctgcattgccccaggtgccagtcagcaaggcctacgccatttgctttgccatctccgcattgtccactcacttgctc

SEQ ID NO: 19616 - DNA, 82 bp, Homo sapiens
ccaggtgccagtcagcaaggcctacgccatttgctttgccatctccgcattgtccactcacttgctctgcccttctgtccat

SEQ ID NO: 19617 - DNA, 83 bp, Homo sapiens
ccagtcagcaaggcctacgccatttgctttgccatctccgcattgtccactcacttgctctgcccttctgtccatttcactga

SEQ ID NO: 19618 - DNA, 82 bp, Homo sapiens
aaggcctacgccatttgctttgccatctccgcattgtccactcacttgctctgcccttctgtccatttcactgagctggagc

SEQ ID NO: 19619 - DNA, 86 bp, Homo sapiens
tttgctttgccatctccgcattgtccactcacttgctctgcccttctgtccatttcactgagctggagctcccagcagcaactcta

SEQ ID NO: 19620 - DNA, 83 bp, Homo sapiens
atctccgcattgtccactcacttgctctgcccttctgtccatttcactgagctggagctcccagcagcaactctagaaaagaa

SEQ ID NO: 19621 - DNA, 81 bp, Homo sapiens
attgtccactcacttgctctgcccttctgtccatttcactgagctggagctcccagcagcaactctagaaaagaagaagag

SEQ ID NO: 19622 - DNA, 79 bp, Homo sapiens
actcacttgctctgcccttctgtccatttcactgagctggagctcccagcagcaactctagaaaagaagaagaggtggg

SEQ ID NO: 19623 - DNA, 76 bp, Homo sapiens
ccttctgtccatttcactgagctggagctcccagcagcaactctagaaaagaagaagaggtggggagtggggaatg

SEQ ID NO: 19624 - DNA, 81 bp, Homo sapiens
atttcactgagctggagctcccagcagcaactctagaaaagaagaagaggtggggagtggggaatggagcatgcatggatc

SEQ ID NO: 19625 - DNA, 82 bp, Homo sapiens
actgagctggagctcccagcagcaactctagaaaagaagaagaggtggggagtggggaatggagcatgcatggatctggcaa

SEQ ID NO: 19626 - DNA, 78 bp, Homo sapiens
agctcccagcagcaactctagaaaagaagaagaggtggggagtggggaatggagcatgcatggatctggcaagccccc

SEQ ID NO: 19627 - DNA, 67 bp, Homo sapiens
gaaacaacccacatttatgtttttgaaaatttaatactgaacacaactcaccaactaggggaaggag

SEQ ID NO: 19628 - DNA, 70 bp, Homo sapiens
tatgtttttgaaaatttaatactgaacacaactcaccaactaggggaaggaggaaagcgttctaatgtca

SEQ ID NO: 19629 - DNA, 70 bp, Homo sapiens
aaaatttaatactgaacacaactcaccaactaggggaaggaggaaagcgttctaatgtcacagagagctt

SEQ ID NO: 19630 - DNA, 72 bp, Homo sapiens
ttaatactgaacacaactcaccaactaggggaaggaggaaagcgttctaatgtcacagagagctttgccctt

SEQ ID NO: 19631 - DNA, 70 bp, Homo sapiens
acaactcaccaactaggggaaggaggaaagcgttctaatgtcacagagagctttgccctttcttctaaaa

SEQ ID NO: 19632 - DNA, 68 bp, Homo sapiens
aactaggggaaggaggaaagcgttctaatgtcacagagagctttgccctttcttctaaaactgtactt

SEQ ID NO: 19633 - DNA, 71 bp, Homo sapiens
aggaaagcgttctaatgtcacagagagctttgccctttcttctaaaactgtactttcttcataagttctaa

SEQ ID NO: 19634 - DNA, 73 bp, Homo sapiens
tctaatgtcacagagagctttgccctttcttctaaaactgtactttcttcataagttctaagcacctttgaaa

SEQ ID NO: 19635 - DNA, 71 bp, Homo sapiens
acagagagctttgccctttcttctaaaactgtactttcttcataagttctaagcacctttgaaatggttca

SEQ ID NO: 19636 - DNA, 70 bp, Homo sapiens
tgccctttcttctaaaactgtactttcttcataagttctaagcacctttgaaatggttcaaacaggtata

SEQ ID NO: 19637 - DNA, 70 bp, Homo sapiens
tctaaaactgtactttcttcataagttctaagcacctttgaaatggttcaaacaggtataagttactgtg

SEQ ID NO: 19638 - DNA, 70 bp, Homo sapiens
gtactttcttcataagttctaagcacctttgaaatggttcaaacaggtataagttactgtggaaaggcaa

SEQ ID NO: 19639 - DNA, 73 bp, Homo sapiens
ttcataagttctaagcacctttgaaatggttcaaacaggtataagttactgtggaaaggcaatggaatagaga

SEQ ID NO: 19640 - DNA, 70 bp, Homo sapiens
taagcacctttgaaatggttcaaacaggtataagttactgtggaaaggcaatggaatagagaaaacctta

SEQ ID NO: 19641 - DNA, 68 bp, Homo sapiens
tgaaatggttcaaacaggtataagttactgtggaaaggcaatggaatagagaaaaccttaccccttta

SEQ ID NO: 19642 - DNA, 66 bp, Homo sapiens
gttcaaacaggtataagttactgtggaaaggcaatggaatagagaaaaccttacccctttaaggtg

SEQ ID NO: 19643 - DNA, 68 bp, Homo sapiens
tataagttactgtggaaaggcaatggaatagagaaaaccttacccctttaaggtggctcctaagttca

SEQ ID NO: 19644 - DNA, 71 bp, Homo sapiens
tggaaaggcaatggaatagagaaaaccttacccctttaaggtggctcctaagttcatctgattccaggtca

SEQ ID NO: 19645 - DNA, 73 bp, Homo sapiens
aatggaatagagaaaaccttacccctttaaggtggctcctaagttcatctgattccaggtcatgcattcaagc

SEQ ID NO: 19646 - DNA, 73 bp, Homo sapiens
aaaaccttacccctttaaggtggctcctaagttcatctgattccaggtcatgcattcaagctgggatgtcatt

SEQ ID NO: 19647 - DNA, 78 bp, Homo sapiens
ccctttaaggtggctcctaagttcatctgattccaggtcatgcattcaagctgggatgtcatttggtataaattgtca

SEQ ID NO: 19648 - DNA, 80 bp, Homo sapiens
tggctcctaagttcatctgattccaggtcatgcattcaagctgggatgtcatttggtataaattgtcactgttagaaaaa

SEQ ID NO: 19649 - DNA, 80 bp, Homo sapiens
ctaagttcatctgattccaggtcatgcattcaagctgggatgtcatttggtataaattgtcactgttagaaaaacatcta

SEQ ID NO: 19650 - DNA, 77 bp, Homo sapiens
attccaggtcatgcattcaagctgggatgtcatttggtataaattgtcactgttagaaaaacatctagagttagaaa

SEQ ID NO: 19651 - DNA, 77 bp, Homo sapiens
atgcattcaagctgggatgtcatttggtataaattgtcactgttagaaaaacatctagagttagaaacacataacca

SEQ ID NO: 19652 - DNA, 74 bp, Homo sapiens
cctccggggtcccaaggacccagacgcagagcccagcgccttcctacctgctgtagggcgtcctcagcagcaaa

SEQ ID NO: 19653 - DNA, 80 bp, Homo sapiens
ccaaggacccagacgcagagcccagcgccttcctacctgctgtagggcgtcctcagcagcaaagcctggctgccggtgca

SEQ ID NO: 19654 - DNA, 81 bp, Homo sapiens
agacgcagagcccagcgccttcctacctgctgtagggcgtcctcagcagcaaagcctggctgccggtgcagctgtcggtgg

SEQ ID NO: 19655 - DNA, 78 bp, Homo sapiens
cccagcgccttcctacctgctgtagggcgtcctcagcagcaaagcctggctgccggtgcagctgtcggtgggggtgtg

SEQ ID NO: 19656 - DNA, 81 bp, Homo sapiens
ttcctacctgctgtagggcgtcctcagcagcaaagcctggctgccggtgcagctgtcggtgggggtgtggcagccatagac

SEQ ID NO: 19657 - DNA, 79 bp, Homo sapiens
cctgctgtagggcgtcctcagcagcaaagcctggctgccggtgcagctgtcggtgggggtgtggcagccatagaccggg

SEQ ID NO: 19658 - DNA, 79 bp, Homo sapiens
tcctcagcagcaaagcctggctgccggtgcagctgtcggtgggggtgtggcagccatagaccgggggcggcaccgagta

SEQ ID NO: 19659 - DNA, 78 bp, Homo sapiens
aaagcctggctgccggtgcagctgtcggtgggggtgtggcagccatagaccgggggcggcaccgagtactgctgctca

SEQ ID NO: 19660 - DNA, 81 bp, Homo sapiens
tgccggtgcagctgtcggtgggggtgtggcagccatagaccgggggcggcaccgagtactgctgctcacctgcagagagaa

SEQ ID NO: 19661 - DNA, 77 bp, Homo sapiens
agctgtcggtgggggtgtggcagccatagaccgggggcggcaccgagtactgctgctcacctgcagagagaaccgaa

SEQ ID NO: 19662 - DNA, 80 bp, Homo sapiens
ggggtgtggcagccatagaccgggggcggcaccgagtactgctgctcacctgcagagagaaccgaagacagctgagcgag

SEQ ID NO: 19663 - DNA, 82 bp, Homo sapiens
gtggcagccatagaccgggggcggcaccgagtactgctgctcacctgcagagagaaccgaagacagctgagcgagtgcgccc

SEQ ID NO: 19664 - DNA, 73 bp, Homo sapiens
atagcacggaagaaggggagaaggactccacttggttccgctcgcttacccagcgagccctgctggcccatgg

SEQ ID NO: 19665 - DNA, 76 bp, Homo sapiens
aggggagaaggactccacttggttccgctcgcttacccagcgagccctgctggcccatgggatcctcatgcttgaa

SEQ ID NO: 19666 - DNA, 77 bp, Homo sapiens
aaggactccacttggttccgctcgcttacccagcgagccctgctggcccatgggatcctcatgcttgaatgagtggt

SEQ ID NO: 19667 - DNA, 76 bp, Homo sapiens
acttggttccgctcgcttacccagcgagccctgctggcccatgggatcctcatgcttgaatgagtggttggggaac

SEQ ID NO: 19668 - DNA, 82 bp, Homo sapiens
ctcgcttacccagcgagccctgctggcccatgggatcctcatgcttgaatgagtggttggggaactgcgccgcatggtgcga

SEQ ID NO: 19669 - DNA, 82 bp, Homo sapiens
agcgagccctgctggcccatgggatcctcatgcttgaatgagtggttggggaactgcgccgcatggtgcgagggcgtgtgac

SEQ ID NO: 19670 - DNA, 80 bp, Homo sapiens
ctggcccatgggatcctcatgcttgaatgagtggttggggaactgcgccgcatggtgcgagggcgtgtgaccgtagctgg

SEQ ID NO: 19671 - DNA, 79 bp, Homo sapiens
atgggatcctcatgcttgaatgagtggttggggaactgcgccgcatggtgcgagggcgtgtgaccgtagctgggcgtcc

SEQ ID NO: 19672 - DNA, 76 bp, Homo sapiens
atgcttgaatgagtggttggggaactgcgccgcatggtgcgagggcgtgtgaccgtagctgggcgtcccgtcgaag

SEQ ID NO: 19673 - DNA, 75 bp, Homo sapiens
tggttggggaactgcgccgcatggtgcgagggcgtgtgaccgtagctgggcgtcccgtcgaaggtgaccgtgctg

SEQ ID NO: 19674 - DNA, 75 bp, Homo sapiens
aactgcgccgcatggtgcgagggcgtgtgaccgtagctgggcgtcccgtcgaaggtgaccgtgctgtaacctgcg

SEQ ID NO: 19675 - DNA, 73 bp, Homo sapiens
atggtgcgagggcgtgtgaccgtagctgggcgtcccgtcgaaggtgaccgtgctgtaacctgcgggagcggcg

SEQ ID NO: 19676 - DNA, 72 bp, Homo sapiens
agggcgtgtgaccgtagctgggcgtcccgtcgaaggtgaccgtgctgtaacctgcgggagcggcggagagaa

SEQ ID NO: 19677 - DNA, 76 bp, Homo sapiens
gtgaccgtagctgggcgtcccgtcgaaggtgaccgtgctgtaacctgcgggagcggcggagagaagcacagtgtca

SEQ ID NO: 19678 - DNA, 73 bp, Homo sapiens
agagagagagacgaaatagaagctacgaagaagttttctctagacgaacccttctccattcctgagcccagga

SEQ ID NO: 19679 - DNA, 70 bp, Homo sapiens
aagctacgaagaagttttctctagacgaacccttctccattcctgagcccaggagtaggcagggacccag

SEQ ID NO: 19680 - DNA, 73 bp, Homo sapiens
aagttttctctagacgaacccttctccattcctgagcccaggagtaggcagggacccagggcactgcacaatc

SEQ ID NO: 19681 - DNA, 78 bp, Homo sapiens
tctagacgaacccttctccattcctgagcccaggagtaggcagggacccagggcactgcacaatcctcagagccctgc

SEQ ID NO: 19682 - DNA, 79 bp, Homo sapiens
ttctccattcctgagcccaggagtaggcagggacccagggcactgcacaatcctcagagccctgctccgcaactgtccg

SEQ ID NO: 19683 - DNA, 79 bp, Homo sapiens
tgagcccaggagtaggcagggacccagggcactgcacaatcctcagagccctgctccgcaactgtccgtgcccggcgag

SEQ ID NO: 19684 - DNA, 76 bp, Homo sapiens
agtaggcagggacccagggcactgcacaatcctcagagccctgctccgcaactgtccgtgcccggcgagggccgtg

SEQ ID NO: 19685 - DNA, 74 bp, Homo sapiens
acccagggcactgcacaatcctcagagccctgctccgcaactgtccgtgcccggcgagggccgtgggtcccgag

SEQ ID NO: 19686 - DNA, 75 bp, Homo sapiens
actgcacaatcctcagagccctgctccgcaactgtccgtgcccggcgagggccgtgggtcccgagtcgcggcacc

SEQ ID NO: 19687 - DNA, 75 bp, Homo sapiens
ctcagagccctgctccgcaactgtccgtgcccggcgagggccgtgggtcccgagtcgcggcacccactctcgaga

SEQ ID NO: 19688 - DNA, 73 bp, Homo sapiens
tgctccgcaactgtccgtgcccggcgagggccgtgggtcccgagtcgcggcacccactctcgagacgtccgtc

SEQ ID NO: 19689 - DNA, 70 bp, Homo sapiens
aactgtccgtgcccggcgagggccgtgggtcccgagtcgcggcacccactctcgagacgtccgtccgcac

SEQ ID NO: 19690 - DNA, 69 bp, Homo sapiens
cccggcgagggccgtgggtcccgagtcgcggcacccactctcgagacgtccgtccgcaccccagaactc

SEQ ID NO: 19691 - DNA, 69 bp, Homo sapiens
ccgtgggtcccgagtcgcggcacccactctcgagacgtccgtccgcaccccagaactcgggcccaagga

SEQ ID NO: 19692 - DNA, 71 bp, Homo sapiens
gtcccgagtcgcggcacccactctcgagacgtccgtccgcaccccagaactcgggcccaaggatgcccgtg

SEQ ID NO: 19693 - DNA, 70 bp, Homo sapiens
actctcgagacgtccgtccgcaccccagaactcgggcccaaggatgcccgtggcccgcgagccctcctag

SEQ ID NO: 19694 - DNA, 71 bp, Homo sapiens
tccgtccgcaccccagaactcgggcccaaggatgcccgtggcccgcgagccctcctaggcctcctcccaga

SEQ ID NO: 19695 - DNA, 72 bp, Homo sapiens
cagaactcgggcccaaggatgcccgtggcccgcgagccctcctaggcctcctcccagaccggacacgcagac

SEQ ID NO: 19696 - DNA, 71 bp, Homo sapiens
ctcgggcccaaggatgcccgtggcccgcgagccctcctaggcctcctcccagaccggacacgcagacctcg

SEQ ID NO: 19697 - DNA, 72 bp, Homo sapiens
aggatgcccgtggcccgcgagccctcctaggcctcctcccagaccggacacgcagacctcggcgggcaaaga

SEQ ID NO: 19698 - DNA, 70 bp, Homo sapiens
cgcgagccctcctaggcctcctcccagaccggacacgcagacctcggcgggcaaagaccggcctcaaacc

SEQ ID NO: 19699 - DNA, 71 bp, Homo sapiens
tcctaggcctcctcccagaccggacacgcagacctcggcgggcaaagaccggcctcaaaccctctccttca

SEQ ID NO: 19700 - DNA, 69 bp, Homo sapiens
cctcctcccagaccggacacgcagacctcggcgggcaaagaccggcctcaaaccctctccttcaggtcc

SEQ ID NO: 19701 - DNA, 66 bp, Homo sapiens
agaccggacacgcagacctcggcgggcaaagaccggcctcaaaccctctccttcaggtccccccgg

SEQ ID NO: 19702 - DNA, 65 bp, Homo sapiens
agacctcggcgggcaaagaccggcctcaaaccctctccttcaggtccccccgggaggggcagtgg

SEQ ID NO: 19703 - DNA, 69 bp, Homo sapiens
gcaaagaccggcctcaaaccctctccttcaggtccccccgggaggggcagtggtgaaagcgcctgcgga

SEQ ID NO: 19704 - DNA, 68 bp, Homo sapiens
accggcctcaaaccctctccttcaggtccccccgggaggggcagtggtgaaagcgcctgcggagcgga

SEQ ID NO: 19705 - DNA, 68 bp, Homo sapiens
cttcaggtccccccgggaggggcagtggtgaaagcgcctgcggagcggagggaggtctcttttaatta

SEQ ID NO: 19706 - DNA, 74 bp, Homo sapiens
tggcgccactgccccgcgcgtagggggcgctccccggcctacttaccctgattgcgaatagcgggctggctctc

SEQ ID NO: 19707 - DNA, 74 bp, Homo sapiens
cgtagggggcgctccccggcctacttaccctgattgcgaatagcgggctggctctcgaggcagctgggcaggta

SEQ ID NO: 19708 - DNA, 75 bp, Homo sapiens
tccccggcctacttaccctgattgcgaatagcgggctggctctcgaggcagctgggcaggtagggcgcgttagga

SEQ ID NO: 19709 - DNA, 76 bp, Homo sapiens
ctacttaccctgattgcgaatagcgggctggctctcgaggcagctgggcaggtagggcgcgttaggaaacatcctg

SEQ ID NO: 19710 - DNA, 80 bp, Homo sapiens
tgattgcgaatagcgggctggctctcgaggcagctgggcaggtagggcgcgttaggaaacatcctggcctggccggatga

SEQ ID NO: 19711 - DNA, 76 bp, Homo sapiens
aatagcgggctggctctcgaggcagctgggcaggtagggcgcgttaggaaacatcctggcctggccggatgacgcc

SEQ ID NO: 19712 - DNA, 77 bp, Homo sapiens
tctcgaggcagctgggcaggtagggcgcgttaggaaacatcctggcctggccggatgacgcctggctgggcggagga

SEQ ID NO: 19713 - DNA, 74 bp, Homo sapiens
gctgggcaggtagggcgcgttaggaaacatcctggcctggccggatgacgcctggctgggcggaggaggaccga

SEQ ID NO: 19714 - DNA, 70 bp, Homo sapiens
aggtagggcgcgttaggaaacatcctggcctggccggatgacgcctggctgggcggaggaggaccgaagg

SEQ ID NO: 19715 - DNA, 72 bp, Homo sapiens
ttaggaaacatcctggcctggccggatgacgcctggctgggcggaggaggaccgaagggcccgtagcgacag

SEQ ID NO: 19716 - DNA, 73 bp, Homo sapiens
atcctggcctggccggatgacgcctggctgggcggaggaggaccgaagggcccgtagcgacaggctccggctg

SEQ ID NO: 19717 - DNA, 75 bp, Homo sapiens
ctggccggatgacgcctggctgggcggaggaggaccgaagggcccgtagcgacaggctccggctgtgccagtgaa

SEQ ID NO: 19718 - DNA, 72 bp, Homo sapiens
cctggctgggcggaggaggaccgaagggcccgtagcgacaggctccggctgtgccagtgaactggccggaaa

SEQ ID NO: 19719 - DNA, 74 bp, Homo sapiens
accgaagggcccgtagcgacaggctccggctgtgccagtgaactggccggaaaagtggacagtgaaggcgctca

SEQ ID NO: 19720 - DNA, 80 bp, Homo sapiens
cgtagcgacaggctccggctgtgccagtgaactggccggaaaagtggacagtgaaggcgctcaggcactgctcctcgtgc

SEQ ID NO: 19721 - DNA, 79 bp, Homo sapiens
acaggctccggctgtgccagtgaactggccggaaaagtggacagtgaaggcgctcaggcactgctcctcgtgcggctcc

SEQ ID NO: 19722 - DNA, 79 bp, Homo sapiens
cggctgtgccagtgaactggccggaaaagtggacagtgaaggcgctcaggcactgctcctcgtgcggctccgcgccgcc

SEQ ID NO: 19723 - DNA, 77 bp, Homo sapiens
agtgaactggccggaaaagtggacagtgaaggcgctcaggcactgctcctcgtgcggctccgcgccgccccagctcg

SEQ ID NO: 19724 - DNA, 79 bp, Homo sapiens
aaaagtggacagtgaaggcgctcaggcactgctcctcgtgcggctccgcgccgccccagctcggctcctgtttgatgaa

SEQ ID NO: 19725 - DNA, 81 bp, Homo sapiens
ggacagtgaaggcgctcaggcactgctcctcgtgcggctccgcgccgccccagctcggctcctgtttgatgaaggagtgag

SEQ ID NO: 19726 - DNA, 80 bp, Homo sapiens
ggcgctcaggcactgctcctcgtgcggctccgcgccgccccagctcggctcctgtttgatgaaggagtgaggcggcggcg

SEQ ID NO: 19727 - DNA, 75 bp, Homo sapiens
actgctcctcgtgcggctccgcgccgccccagctcggctcctgtttgatgaaggagtgaggcggcggcggcgggg

SEQ ID NO: 19728 - DNA, 75 bp, Homo sapiens
tgcggctccgcgccgccccagctcggctcctgtttgatgaaggagtgaggcggcggcggcgggggtggcggcgga

SEQ ID NO: 19729 - DNA, 72 bp, Homo sapiens
cgccccagctcggctcctgtttgatgaaggagtgaggcggcggcggcgggggtggcggcggagccggtggcg

SEQ ID NO: 19730 - DNA, 67 bp, Homo sapiens
agtgaggcggcggcggcgggggtggcggcggagccggtggcggcgcggggccgcccaacgacccgta

SEQ ID NO: 19731 - DNA, 66 bp, Homo sapiens
cggcggcgggggtggcggcggagccggtggcggcgcggggccgcccaacgacccgtaagccgaagc

SEQ ID NO: 19732 - DNA, 65 bp, Homo sapiens
gggtggcggcggagccggtggcggcgcggggccgcccaacgacccgtaagccgaagcgcccgggg

SEQ ID NO: 19733 - DNA, 69 bp, Homo sapiens
gagccggtggcggcgcggggccgcccaacgacccgtaagccgaagcgcccgggggcgcaaagtccagca

SEQ ID NO: 19734 - DNA, 69 bp, Homo sapiens
gggccgcccaacgacccgtaagccgaagcgcccgggggcgcaaagtccagcaccggcgcccactgcgcc

SEQ ID NO: 19735 - DNA, 77 bp, Homo sapiens
taagccgaagcgcccgggggcgcaaagtccagcaccggcgcccactgcgccgcgccgctcacaggcagggcacagcc

SEQ ID NO: 19736 - DNA, 75 bp, Homo sapiens
aaagtccagcaccggcgcccactgcgccgcgccgctcacaggcagggcacagccgccgccgccacccagggaggg

SEQ ID NO: 19737 - DNA, 75 bp, Homo sapiens
agcaccggcgcccactgcgccgcgccgctcacaggcagggcacagccgccgccgccacccagggaggggacggcg

SEQ ID NO: 19738 - DNA, 78 bp, Homo sapiens
actgcgccgcgccgctcacaggcagggcacagccgccgccgccacccagggaggggacggcgggcagcagcgcgttca

SEQ ID NO: 19739 - DNA, 76 bp, Homo sapiens
cgctcacaggcagggcacagccgccgccgccacccagggaggggacggcgggcagcagcgcgttcaggtcccgcac

SEQ ID NO: 19740 - DNA, 74 bp, Homo sapiens
acaggcagggcacagccgccgccgccacccagggaggggacggcgggcagcagcgcgttcaggtcccgcacgtc

SEQ ID NO: 19741 - DNA, 72 bp, Homo sapiens
ccgccgccgccacccagggaggggacggcgggcagcagcgcgttcaggtcccgcacgtcggagcccatttgc

SEQ ID NO: 19742 - DNA, 75 bp, Homo sapiens
cacccagggaggggacggcgggcagcagcgcgttcaggtcccgcacgtcggagcccatttgctgcggctcagacc

SEQ ID NO: 19743 - DNA, 74 bp, Homo sapiens
aggggacggcgggcagcagcgcgttcaggtcccgcacgtcggagcccatttgctgcggctcagacccggacgcc

SEQ ID NO: 19744 - DNA, 73 bp, Homo sapiens
agcgcgttcaggtcccgcacgtcggagcccatttgctgcggctcagacccggacgccccgcggctcctccggc

SEQ ID NO: 19745 - DNA, 73 bp, Homo sapiens
ccgcacgtcggagcccatttgctgcggctcagacccggacgccccgcggctcctccggccctggagacgttca

SEQ ID NO: 19746 - DNA, 74 bp, Homo sapiens
cgtcggagcccatttgctgcggctcagacccggacgccccgcggctcctccggccctggagacgttcagcgctg

SEQ ID NO: 19747 - DNA, 74 bp, Homo sapiens
atttgctgcggctcagacccggacgccccgcggctcctccggccctggagacgttcagcgctggcctcggcggc

SEQ ID NO: 19748 - DNA, 72 bp, Homo sapiens
tcagacccggacgccccgcggctcctccggccctggagacgttcagcgctggcctcggcggcgcctaacttg

SEQ ID NO: 19749 - DNA, 72 bp, Homo sapiens
cggacgccccgcggctcctccggccctggagacgttcagcgctggcctcggcggcgcctaacttggcccaga

SEQ ID NO: 19750 - DNA, 72 bp, Homo sapiens
tcctccggccctggagacgttcagcgctggcctcggcggcgcctaacttggcccagatgccgcccgggtccc

SEQ ID NO: 19751 - DNA, 73 bp, Homo sapiens
ctggagacgttcagcgctggcctcggcggcgcctaacttggcccagatgccgcccgggtcccggactccctgc

SEQ ID NO: 19752 - DNA, 74 bp, Homo sapiens
acgttcagcgctggcctcggcggcgcctaacttggcccagatgccgcccgggtcccggactccctgctgctctg

SEQ ID NO: 19753 - DNA, 77 bp, Homo sapiens
ctggcctcggcggcgcctaacttggcccagatgccgcccgggtcccggactccctgctgctctggctgctgtaggca

SEQ ID NO: 19754 - DNA, 75 bp, Homo sapiens
gcctaacttggcccagatgccgcccgggtcccggactccctgctgctctggctgctgtaggcacccaggcccgga

SEQ ID NO: 19755 - DNA, 75 bp, Homo sapiens
acttggcccagatgccgcccgggtcccggactccctgctgctctggctgctgtaggcacccaggcccggagcgga

SEQ ID NO: 19756 - DNA, 78 bp, Homo sapiens
atgccgcccgggtcccggactccctgctgctctggctgctgtaggcacccaggcccggagcggagcgtgtgctgagac

SEQ ID NO: 19757 - DNA, 79 bp, Homo sapiens
tcccggactccctgctgctctggctgctgtaggcacccaggcccggagcggagcgtgtgctgagacgccggctccggga

SEQ ID NO: 19758 - DNA, 81 bp, Homo sapiens
tgctgctctggctgctgtaggcacccaggcccggagcggagcgtgtgctgagacgccggctccgggacacacgtggaagcc

SEQ ID NO: 19759 - DNA, 76 bp, Homo sapiens
gctgctgtaggcacccaggcccggagcggagcgtgtgctgagacgccggctccgggacacacgtggaagccgggtc

SEQ ID NO: 19760 - DNA, 76 bp, Homo sapiens
tgtaggcacccaggcccggagcggagcgtgtgctgagacgccggctccgggacacacgtggaagccgggtcctgca

SEQ ID NO: 19761 - DNA, 75 bp, Homo sapiens
aggcccggagcggagcgtgtgctgagacgccggctccgggacacacgtggaagccgggtcctgcagcaagaggaa

SEQ ID NO: 19762 - DNA, 77 bp, Homo sapiens
cggagcgtgtgctgagacgccggctccgggacacacgtggaagccgggtcctgcagcaagaggaagtccaggatcgc

SEQ ID NO: 19763 - DNA, 78 bp, Homo sapiens
tgctgagacgccggctccgggacacacgtggaagccgggtcctgcagcaagaggaagtccaggatcgcggcgaggaga

SEQ ID NO: 19764 - DNA, 73 bp, Homo sapiens
cggctccgggacacacgtggaagccgggtcctgcagcaagaggaagtccaggatcgcggcgaggagacggcgg

SEQ ID NO: 19765 - DNA, 72 bp, Homo sapiens
acacacgtggaagccgggtcctgcagcaagaggaagtccaggatcgcggcgaggagacggcggggcccgggc

SEQ ID NO: 19766 - DNA, 73 bp, Homo sapiens
aagccgggtcctgcagcaagaggaagtccaggatcgcggcgaggagacggcggggcccgggcgcctgggctgc

SEQ ID NO: 19767 - DNA, 72 bp, Homo sapiens
agcaagaggaagtccaggatcgcggcgaggagacggcggggcccgggcgcctgggctgccgtcccggctctg

SEQ ID NO: 19768 - DNA, 70 bp, Homo sapiens
aggaagtccaggatcgcggcgaggagacggcggggcccgggcgcctgggctgccgtcccggctctgggtg

SEQ ID NO: 19769 - DNA, 66 bp, Homo sapiens
gggtgggtgggtgaatgagtaggtgggagggagggcgggaagtgggggagcggacaggcggtcggg

SEQ ID NO: 19770 - DNA, 69 bp, Homo sapiens
gtgggtgaatgagtaggtgggagggagggcgggaagtgggggagcggacaggcggtcgggttgcggaga

SEQ ID NO: 19771 - DNA, 65 bp, Homo sapiens
agtaggtgggagggagggcgggaagtgggggagcggacaggcggtcgggttgcggagagcccccg

SEQ ID NO: 19772 - DNA, 68 bp, Homo sapiens
gagggcgggaagtgggggagcggacaggcggtcgggttgcggagagcccccgggtgtgggcgctgcct

SEQ ID NO: 19773 - DNA, 69 bp, Homo sapiens
gggaagtgggggagcggacaggcggtcgggttgcggagagcccccgggtgtgggcgctgccttgaactc

SEQ ID NO: 19774 - DNA, 69 bp, Homo sapiens
gggagcggacaggcggtcgggttgcggagagcccccgggtgtgggcgctgccttgaactccttacccca

SEQ ID NO: 19775 - DNA, 72 bp, Homo sapiens
aggcggtcgggttgcggagagcccccgggtgtgggcgctgccttgaactccttaccccagctgcctggctgc

SEQ ID NO: 19776 - DNA, 75 bp, Homo sapiens
ttgcggagagcccccgggtgtgggcgctgccttgaactccttaccccagctgcctggctgccctcagcttcccaa

SEQ ID NO: 19777 - DNA, 70 bp, Homo sapiens
ataaagatcctcagggtaagaaggctcaaaaatacaaagggaaagccaataccaggaatgctataaacat

SEQ ID NO: 19778 - DNA, 68 bp, Homo sapiens
cctcagggtaagaaggctcaaaaatacaaagggaaagccaataccaggaatgctataaacattttatt

SEQ ID NO: 19779 - DNA, 75 bp, Homo sapiens
tatatattttttaataaaaacctttacattatcttcatgcataaagacccaggtgtggccatattgcctgagata

SEQ ID NO: 19780 - DNA, 74 bp, Homo sapiens
ttttaataaaaacctttacattatcttcatgcataaagacccaggtgtggccatattgcctgagatagccctaa

SEQ ID NO: 19781 - DNA, 76 bp, Homo sapiens
aaaaacctttacattatcttcatgcataaagacccaggtgtggccatattgcctgagatagccctaacaccagcta

SEQ ID NO: 19782 - DNA, 83 bp, Homo sapiens
acattatcttcatgcataaagacccaggtgtggccatattgcctgagatagccctaacaccagctatctcatgccattacctg

SEQ ID NO: 19783 - DNA, 78 bp, Homo sapiens
ataaagacccaggtgtggccatattgcctgagatagccctaacaccagctatctcatgccattacctggggctcccta

SEQ ID NO: 19784 - DNA, 83 bp, Homo sapiens
aggtgtggccatattgcctgagatagccctaacaccagctatctcatgccattacctggggctccctatagctgtcagcagtg

SEQ ID NO: 19785 - DNA, 83 bp, Homo sapiens
ccatattgcctgagatagccctaacaccagctatctcatgccattacctggggctccctatagctgtcagcagtgtagcaaag

SEQ ID NO: 19786 - DNA, 83 bp, Homo sapiens
atattgcctgagatagccctaacaccagctatctcatgccattacctggggctccctatagctgtcagcagtgtagcaaaggc

SEQ ID NO: 19787 - DNA, 81 bp, Homo sapiens
cctgagatagccctaacaccagctatctcatgccattacctggggctccctatagctgtcagcagtgtagcaaaggccctc

SEQ ID NO: 19788 - DNA, 81 bp, Homo sapiens
agatagccctaacaccagctatctcatgccattacctggggctccctatagctgtcagcagtgtagcaaaggccctctgcc

SEQ ID NO: 19789 - DNA, 80 bp, Homo sapiens
ccctaacaccagctatctcatgccattacctggggctccctatagctgtcagcagtgtagcaaaggccctctgcctgccc

SEQ ID NO: 19790 - DNA, 80 bp, Homo sapiens
aacaccagctatctcatgccattacctggggctccctatagctgtcagcagtgtagcaaaggccctctgcctgcccctaa

SEQ ID NO: 19791 - DNA, 78 bp, Homo sapiens
atctcatgccattacctggggctccctatagctgtcagcagtgtagcaaaggccctctgcctgcccctaacgcccaac

SEQ ID NO: 19792 - DNA, 77 bp, Homo sapiens
atgccattacctggggctccctatagctgtcagcagtgtagcaaaggccctctgcctgcccctaacgcccaactcca

SEQ ID NO: 19793 - DNA, 76 bp, Homo sapiens
attacctggggctccctatagctgtcagcagtgtagcaaaggccctctgcctgcccctaacgcccaactccatgcc

SEQ ID NO: 19794 - DNA, 80 bp, Homo sapiens
ctatagctgtcagcagtgtagcaaaggccctctgcctgcccctaacgcccaactccatgcctgcctcagtcatggtttgt

SEQ ID NO: 19795 - DNA, 77 bp, Homo sapiens
ctgtcagcagtgtagcaaaggccctctgcctgcccctaacgcccaactccatgcctgcctcagtcatggtttgtttt

SEQ ID NO: 19796 - DNA, 76 bp, Homo sapiens
tagcaaaggccctctgcctgcccctaacgcccaactccatgcctgcctcagtcatggtttgtttttgcttctggaa

SEQ ID NO: 19797 - DNA, 76 bp, Homo sapiens
tctgcctgcccctaacgcccaactccatgcctgcctcagtcatggtttgtttttgcttctggaaggggtagatgga

SEQ ID NO: 19798 - DNA, 72 bp, Homo sapiens
ccctaacgcccaactccatgcctgcctcagtcatggtttgtttttgcttctggaaggggtagatggagggtg

SEQ ID NO: 19799 - DNA, 73 bp, Homo sapiens
aactccatgcctgcctcagtcatggtttgtttttgcttctggaaggggtagatggagggtgggaaatgctttg

SEQ ID NO: 19800 - DNA, 74 bp, Homo sapiens
ctgcctcagtcatggtttgtttttgcttctggaaggggtagatggagggtgggaaatgctttggagctaacatg

SEQ ID NO: 19801 - DNA, 71 bp, Homo sapiens
tctggaaggggtagatggagggtgggaaatgctttggagctaacatgggatgaacagggagggttacccaa

SEQ ID NO: 19802 - DNA, 69 bp, Homo sapiens
gggaaatgctttggagctaacatgggatgaacagggagggttacccaacctgccattttttatccaaac

SEQ ID NO: 19803 - DNA, 72 bp, Homo sapiens
tttggagctaacatgggatgaacagggagggttacccaacctgccattttttatccaaactctgcaggcaaa

SEQ ID NO: 19804 - DNA, 74 bp, Homo sapiens
taacatgggatgaacagggagggttacccaacctgccattttttatccaaactctgcaggcaaatccagacaga

SEQ ID NO: 19805 - DNA, 75 bp, Homo sapiens
atgaacagggagggttacccaacctgccattttttatccaaactctgcaggcaaatccagacagagtctcagcaa

SEQ ID NO: 19806 - DNA, 74 bp, Homo sapiens
agggttacccaacctgccattttttatccaaactctgcaggcaaatccagacagagtctcagcaagactgaaaa

SEQ ID NO: 19807 - DNA, 76 bp, Homo sapiens
tgccattttttatccaaactctgcaggcaaatccagacagagtctcagcaagactgaaaaccagggaccaaaccaa

SEQ ID NO: 19808 - DNA, 74 bp, Homo sapiens
tttttatccaaactctgcaggcaaatccagacagagtctcagcaagactgaaaaccagggaccaaaccaaactc

SEQ ID NO: 19809 - DNA, 75 bp, Homo sapiens
aaactctgcaggcaaatccagacagagtctcagcaagactgaaaaccagggaccaaaccaaactctgggagcttc

SEQ ID NO: 19810 - DNA, 76 bp, Homo sapiens
aaatccagacagagtctcagcaagactgaaaaccagggaccaaaccaaactctgggagcttcccacagacatgtca

SEQ ID NO: 19811 - DNA, 77 bp, Homo sapiens
agagtctcagcaagactgaaaaccagggaccaaaccaaactctgggagcttcccacagacatgtcacatgtgaccaa

SEQ ID NO: 19812 - DNA, 72 bp, Homo sapiens
aagactgaaaaccagggaccaaaccaaactctgggagcttcccacagacatgtcacatgtgaccaagggttc

SEQ ID NO: 19813 - DNA, 76 bp, Homo sapiens
aaaccaaactctgggagcttcccacagacatgtcacatgtgaccaagggttcctgcacatagtagtagcaaaggta

SEQ ID NO: 19814 - DNA, 79 bp, Homo sapiens
aactctgggagcttcccacagacatgtcacatgtgaccaagggttcctgcacatagtagtagcaaaggtatggtgttca

SEQ ID NO: 19815 - DNA, 79 bp, Homo sapiens
ttcccacagacatgtcacatgtgaccaagggttcctgcacatagtagtagcaaaggtatggtgttcatggaactctaaa

SEQ ID NO: 19816 - DNA, 74 bp, Homo sapiens
atgtgaccaagggttcctgcacatagtagtagcaaaggtatggtgttcatggaactctaaaggcaggaacaaaa

SEQ ID NO: 19817 - DNA, 74 bp, Homo sapiens
acatagtagtagcaaaggtatggtgttcatggaactctaaaggcaggaacaaaaacagccctgaagatcaatcc

SEQ ID NO: 19818 - DNA, 72 bp, Homo sapiens
aaaggtatggtgttcatggaactctaaaggcaggaacaaaaacagccctgaagatcaatccctccgtgacag

SEQ ID NO: 19819 - DNA, 73 bp, Homo sapiens
aactctaaaggcaggaacaaaaacagccctgaagatcaatccctccgtgacaggcattcacttctgccctaag

SEQ ID NO: 19820 - DNA, 76 bp, Homo sapiens
aggaacaaaaacagccctgaagatcaatccctccgtgacaggcattcacttctgccctaagtgtgtcagaaagatc

SEQ ID NO: 19821 - DNA, 75 bp, Homo sapiens
aaaacagccctgaagatcaatccctccgtgacaggcattcacttctgccctaagtgtgtcagaaagatcccattt

SEQ ID NO: 19822 - DNA, 76 bp, Homo sapiens
ctgaagatcaatccctccgtgacaggcattcacttctgccctaagtgtgtcagaaagatcccattttgtttcctaa

SEQ ID NO: 19823 - DNA, 75 bp, Homo sapiens
atccctccgtgacaggcattcacttctgccctaagtgtgtcagaaagatcccattttgtttcctaactcaggcca

SEQ ID NO: 19824 - DNA, 71 bp, Homo sapiens
ttctgccctaagtgtgtcagaaagatcccattttgtttcctaactcaggccaaccctcctttgcctccaaa

SEQ ID NO: 19825 - DNA, 71 bp, Homo sapiens
tgtgtcagaaagatcccattttgtttcctaactcaggccaaccctcctttgcctccaaaattcagtgttaa

SEQ ID NO: 19826 - DNA, 67 bp, Homo sapiens
ttgtttcctaactcaggccaaccctcctttgcctccaaaattcagtgttaactaaccaattacttaa

SEQ ID NO: 19827 - DNA, 69 bp, Homo sapiens
taactcaggccaaccctcctttgcctccaaaattcagtgttaactaaccaattacttaagagacggatc

SEQ ID NO: 19828 - DNA, 66 bp, Homo sapiens
accctcctttgcctccaaaattcagtgttaactaaccaattacttaagagacggatccctcttcct

SEQ ID NO: 19829 - DNA, 71 bp, Homo sapiens
gcctccaaaattcagtgttaactaaccaattacttaagagacggatccctcttccttctgtggatagttca

SEQ ID NO: 19830 - DNA, 71 bp, Homo sapiens
aattcagtgttaactaaccaattacttaagagacggatccctcttccttctgtggatagttcatctgttaa

SEQ ID NO: 19831 - DNA, 72 bp, Homo sapiens
ttaactaaccaattacttaagagacggatccctcttccttctgtggatagttcatctgttaaggatccatta

SEQ ID NO: 19832 - DNA, 75 bp, Homo sapiens
aattacttaagagacggatccctcttccttctgtggatagttcatctgttaaggatccattatcacctgtctcac

SEQ ID NO: 19833 - DNA, 76 bp, Homo sapiens
aagagacggatccctcttccttctgtggatagttcatctgttaaggatccattatcacctgtctcactcctcctaa

SEQ ID NO: 19834 - DNA, 77 bp, Homo sapiens
tcttccttctgtggatagttcatctgttaaggatccattatcacctgtctcactcctcctaaggagtcctagtataa

SEQ ID NO: 19835 - DNA, 73 bp, Homo sapiens
gttcatctgttaaggatccattatcacctgtctcactcctcctaaggagtcctagtataaaagggccagggta

SEQ ID NO: 19836 - DNA, 71 bp, Homo sapiens
ttaaggatccattatcacctgtctcactcctcctaaggagtcctagtataaaagggccagggtaggagtag

SEQ ID NO: 19837 - DNA, 70 bp, Homo sapiens
ttatcacctgtctcactcctcctaaggagtcctagtataaaagggccagggtaggagtagggaagctggt

SEQ ID NO: 19838 - DNA, 68 bp, Homo sapiens
actcctcctaaggagtcctagtataaaagggccagggtaggagtagggaagctggttggcatggaggg

SEQ ID NO: 19839 - DNA, 72 bp, Homo sapiens
taaggagtcctagtataaaagggccagggtaggagtagggaagctggttggcatggagggtcacaagatcca

SEQ ID NO: 19840 - DNA, 74 bp, Homo sapiens
tcctagtataaaagggccagggtaggagtagggaagctggttggcatggagggtcacaagatccagaatggcta

SEQ ID NO: 19841 - DNA, 73 bp, Homo sapiens
aagggccagggtaggagtagggaagctggttggcatggagggtcacaagatccagaatggctagggatggaaa

SEQ ID NO: 19842 - DNA, 74 bp, Homo sapiens
taggagtagggaagctggttggcatggagggtcacaagatccagaatggctagggatggaaaaagaataccctg

SEQ ID NO: 19843 - DNA, 72 bp, Homo sapiens
aagctggttggcatggagggtcacaagatccagaatggctagggatggaaaaagaataccctggttctttgg

SEQ ID NO: 19844 - DNA, 72 bp, Homo sapiens
ttggcatggagggtcacaagatccagaatggctagggatggaaaaagaataccctggttctttgggggattc

SEQ ID NO: 19845 - DNA, 70 bp, Homo sapiens
acaagatccagaatggctagggatggaaaaagaataccctggttctttgggggattctgccaaaggagct

SEQ ID NO: 19846 - DNA, 69 bp, Homo sapiens
atccagaatggctagggatggaaaaagaataccctggttctttgggggattctgccaaaggagctttat

SEQ ID NO: 19847 - DNA, 65 bp, Homo sapiens
gaaaaagaataccctggttctttgggggattctgccaaaggagctttattgaccatttttttaaa

SEQ ID NO: 19848 - DNA, 68 bp, Homo sapiens
tggttctttgggggattctgccaaaggagctttattgaccatttttttaaaggaaaaacactgaatga

SEQ ID NO: 19849 - DNA, 71 bp, Homo sapiens
gagctttattgaccatttttttaaaggaaaaacactgaatgatcttgaggatggtaaactgtctcctcttc

SEQ ID NO: 19850 - DNA, 76 bp, Homo sapiens
tgaatgatcttgaggatggtaaactgtctcctcttctgggttccagaagcccttatgctacgttcagtattaagaa

SEQ ID NO: 19851 - DNA, 72 bp, Homo sapiens
atcttgaggatggtaaactgtctcctcttctgggttccagaagcccttatgctacgttcagtattaagaaaa

SEQ ID NO: 19852 - DNA, 74 bp, Homo sapiens
ctcttctgggttccagaagcccttatgctacgttcagtattaagaaaagccctgaacaagtggaggatgctgct

SEQ ID NO: 19853 - DNA, 76 bp, Homo sapiens
ctgggttccagaagcccttatgctacgttcagtattaagaaaagccctgaacaagtggaggatgctgcttctggca

SEQ ID NO: 19854 - DNA, 76 bp, Homo sapiens
aagcccttatgctacgttcagtattaagaaaagccctgaacaagtggaggatgctgcttctggcagcagggaggga

SEQ ID NO: 19855 - DNA, 78 bp, Homo sapiens
tacgttcagtattaagaaaagccctgaacaagtggaggatgctgcttctggcagcagggagggagggtagatgccaca

SEQ ID NO: 19856 - DNA, 77 bp, Homo sapiens
agtattaagaaaagccctgaacaagtggaggatgctgcttctggcagcagggagggagggtagatgccacagccaac

SEQ ID NO: 19857 - DNA, 80 bp, Homo sapiens
aaagccctgaacaagtggaggatgctgcttctggcagcagggagggagggtagatgccacagccaacccagagaatggca

SEQ ID NO: 19858 - DNA, 80 bp, Homo sapiens
atgctgcttctggcagcagggagggagggtagatgccacagccaacccagagaatggcaaacagtgccaatccaaacaag

SEQ ID NO: 19859 - DNA, 75 bp, Homo sapiens
agcagggagggagggtagatgccacagccaacccagagaatggcaaacagtgccaatccaaacaaggcagggaac

SEQ ID NO: 19860 - DNA, 75 bp, Homo sapiens
agggagggtagatgccacagccaacccagagaatggcaaacagtgccaatccaaacaaggcagggaacctctgtg

SEQ ID NO: 19861 - DNA, 79 bp, Homo sapiens
tagatgccacagccaacccagagaatggcaaacagtgccaatccaaacaaggcagggaacctctgtgtggtgtgaatgg

SEQ ID NO: 19862 - DNA, 79 bp, Homo sapiens
aacccagagaatggcaaacagtgccaatccaaacaaggcagggaacctctgtgtggtgtgaatgggcatgtgactgtga

SEQ ID NO: 19863 - DNA, 82 bp, Homo sapiens
agaatggcaaacagtgccaatccaaacaaggcagggaacctctgtgtggtgtgaatgggcatgtgactgtgatgcaaagtgc

SEQ ID NO: 19864 - DNA, 80 bp, Homo sapiens
aacagtgccaatccaaacaaggcagggaacctctgtgtggtgtgaatgggcatgtgactgtgatgcaaagtgcctggggc

SEQ ID NO: 19865 - DNA, 80 bp, Homo sapiens
aaacaaggcagggaacctctgtgtggtgtgaatgggcatgtgactgtgatgcaaagtgcctggggctcacaggctcccaa

SEQ ID NO: 19866 - DNA, 81 bp, Homo sapiens
agggaacctctgtgtggtgtgaatgggcatgtgactgtgatgcaaagtgcctggggctcacaggctcccaacagccagttc

SEQ ID NO: 19867 - DNA, 86 bp, Homo sapiens
tgtgtggtgtgaatgggcatgtgactgtgatgcaaagtgcctggggctcacaggctcccaacagccagttctcgcagataggactg

SEQ ID NO: 19868 - DNA, 81 bp, Homo sapiens
aatgggcatgtgactgtgatgcaaagtgcctggggctcacaggctcccaacagccagttctcgcagataggactgggtaag

SEQ ID NO: 19869 - DNA, 83 bp, Homo sapiens
tgactgtgatgcaaagtgcctggggctcacaggctcccaacagccagttctcgcagataggactgggtaaggctgcgcagttc

SEQ ID NO: 19870 - DNA, 79 bp, Homo sapiens
caaagtgcctggggctcacaggctcccaacagccagttctcgcagataggactgggtaaggctgcgcagttcgtccatg

SEQ ID NO: 19871 - DNA, 82 bp, Homo sapiens
tggggctcacaggctcccaacagccagttctcgcagataggactgggtaaggctgcgcagttcgtccatggcatagtcctca

SEQ ID NO: 19872 - DNA, 81 bp, Homo sapiens
acaggctcccaacagccagttctcgcagataggactgggtaaggctgcgcagttcgtccatggcatagtcctcaggcatgg

SEQ ID NO: 19873 - DNA, 80 bp, Homo sapiens
aacagccagttctcgcagataggactgggtaaggctgcgcagttcgtccatggcatagtcctcaggcatgggaagccggc

SEQ ID NO: 19874 - DNA, 80 bp, Homo sapiens
gttctcgcagataggactgggtaaggctgcgcagttcgtccatggcatagtcctcaggcatgggaagccggccaatgtgg

SEQ ID NO: 19875 - DNA, 78 bp, Homo sapiens
ataggactgggtaaggctgcgcagttcgtccatggcatagtcctcaggcatgggaagccggccaatgtggggagccaa

SEQ ID NO: 19876 - DNA, 79 bp, Homo sapiens
gtaaggctgcgcagttcgtccatggcatagtcctcaggcatgggaagccggccaatgtggggagccaagaggcgcaaag

SEQ ID NO: 19877 - DNA, 78 bp, Homo sapiens
agttcgtccatggcatagtcctcaggcatgggaagccggccaatgtggggagccaagaggcgcaaagggactcgctga

SEQ ID NO: 19878 - DNA, 76 bp, Homo sapiens
catagtcctcaggcatgggaagccggccaatgtggggagccaagaggcgcaaagggactcgctgagggtctggtgt

SEQ ID NO: 19879 - DNA, 75 bp, Homo sapiens
aggcatgggaagccggccaatgtggggagccaagaggcgcaaagggactcgctgagggtctggtgttgagtcgga

SEQ ID NO: 19880 - DNA, 73 bp, Homo sapiens
aagccggccaatgtggggagccaagaggcgcaaagggactcgctgagggtctggtgttgagtcggaggttcta

SEQ ID NO: 19881 - DNA, 81 bp, Homo sapiens
agccaagaggcgcaaagggactcgctgagggtctggtgttgagtcggaggttctatcaggaggatgatgcagactcagcac

SEQ ID NO: 19882 - DNA, 81 bp, Homo sapiens
aaagggactcgctgagggtctggtgttgagtcggaggttctatcaggaggatgatgcagactcagcaccacgcgcagcagg

SEQ ID NO: 19883 - DNA, 84 bp, Homo sapiens
tctggtgttgagtcggaggttctatcaggaggatgatgcagactcagcaccacgcgcagcaggttggctacacgtttggccatg

SEQ ID NO: 19884 - DNA, 85 bp, Homo sapiens
ttgagtcggaggttctatcaggaggatgatgcagactcagcaccacgcgcagcaggttggctacacgtttggccatgtctagaga

SEQ ID NO: 19885 - DNA, 86 bp, Homo sapiens
atgatgcagactcagcaccacgcgcagcaggttggctacacgtttggccatgtctagagagaaaaactagagtcaagcactgagca

SEQ ID NO: 19886 - DNA, 82 bp, Homo sapiens
agactcagcaccacgcgcagcaggttggctacacgtttggccatgtctagagagaaaaactagagtcaagcactgagcatgg

SEQ ID NO: 19887 - DNA, 74 bp, Homo sapiens
ataaaaacaggaagcaagaaggcagaaagagtgaggaggttagaggcttacctgactgagccaggcgatcttta

SEQ ID NO: 19888 - DNA, 77 bp, Homo sapiens
aagaaggcagaaagagtgaggaggttagaggcttacctgactgagccaggcgatctttagcactgtaacactgaatc

SEQ ID NO: 19889 - DNA, 79 bp, Homo sapiens
aaagagtgaggaggttagaggcttacctgactgagccaggcgatctttagcactgtaacactgaatctgctctatccga

SEQ ID NO: 19890 - DNA, 82 bp, Homo sapiens
ggaggttagaggcttacctgactgagccaggcgatctttagcactgtaacactgaatctgctctatccgactgcacagtgaa

SEQ ID NO: 19891 - DNA, 83 bp, Homo sapiens
tagaggcttacctgactgagccaggcgatctttagcactgtaacactgaatctgctctatccgactgcacagtgaagtcactt

SEQ ID NO: 19892 - DNA, 85 bp, Homo sapiens
actgagccaggcgatctttagcactgtaacactgaatctgctctatccgactgcacagtgaagtcactttgatgtgtaactgctc

SEQ ID NO: 19893 - DNA, 84 bp, Homo sapiens
cgatctttagcactgtaacactgaatctgctctatccgactgcacagtgaagtcactttgatgtgtaactgctccaggtcatta

SEQ ID NO: 19894 - DNA, 84 bp, Homo sapiens
tttagcactgtaacactgaatctgctctatccgactgcacagtgaagtcactttgatgtgtaactgctccaggtcattacctga

SEQ ID NO: 19895 - DNA, 84 bp, Homo sapiens
ctgaatctgctctatccgactgcacagtgaagtcactttgatgtgtaactgctccaggtcattacctgagcaatccacctacaa

SEQ ID NO: 19896 - DNA, 83 bp, Homo sapiens
tctgctctatccgactgcacagtgaagtcactttgatgtgtaactgctccaggtcattacctgagcaatccacctacaaagaa

SEQ ID NO: 19897 - DNA, 81 bp, Homo sapiens
ccgactgcacagtgaagtcactttgatgtgtaactgctccaggtcattacctgagcaatccacctacaaagaagcagagaa

SEQ ID NO: 19898 - DNA, 78 bp, Homo sapiens
aagtcactttgatgtgtaactgctccaggtcattacctgagcaatccacctacaaagaagcagagaagccaattaatc

SEQ ID NO: 19899 - DNA, 77 bp, Homo sapiens
tttgatgtgtaactgctccaggtcattacctgagcaatccacctacaaagaagcagagaagccaattaatccaaggg

SEQ ID NO: 19900 - DNA, 81 bp, Homo sapiens
gcctgagaaaaggaaaatcaggcagcagtttcaggatctcaggtacctgctgtatatggcggagcatttcaatgactctaa

SEQ ID NO: 19901 - DNA, 79 bp, Homo sapiens
aaaaggaaaatcaggcagcagtttcaggatctcaggtacctgctgtatatggcggagcatttcaatgactctaatatag

SEQ ID NO: 19902 - DNA, 80 bp, Homo sapiens
aggcagcagtttcaggatctcaggtacctgctgtatatggcggagcatttcaatgactctaatatagtccaggtaaacaa

SEQ ID NO: 19903 - DNA, 78 bp, Homo sapiens
agtttcaggatctcaggtacctgctgtatatggcggagcatttcaatgactctaatatagtccaggtaaacaagccca

SEQ ID NO: 19904 - DNA, 76 bp, Homo sapiens
aggtacctgctgtatatggcggagcatttcaatgactctaatatagtccaggtaaacaagcccagatgtttcccaa

SEQ ID NO: 19905 - DNA, 77 bp, Homo sapiens
ctgtatatggcggagcatttcaatgactctaatatagtccaggtaaacaagcccagatgtttcccaatcctgaatta

SEQ ID NO: 19906 - DNA, 77 bp, Homo sapiens
atggcggagcatttcaatgactctaatatagtccaggtaaacaagcccagatgtttcccaatcctgaattaggctgc

SEQ ID NO: 19907 - DNA, 78 bp, Homo sapiens
atttcaatgactctaatatagtccaggtaaacaagcccagatgtttcccaatcctgaattaggctgctgcgctctgga

SEQ ID NO: 19908 - DNA, 77 bp, Homo sapiens
taatatagtccaggtaaacaagcccagatgtttcccaatcctgaattaggctgctgcgctctggaggtgccaggtct

SEQ ID NO: 19909 - DNA, 75 bp, Homo sapiens
aggtaaacaagcccagatgtttcccaatcctgaattaggctgctgcgctctggaggtgccaggtcttccaagaac

SEQ ID NO: 19910 - DNA, 76 bp, Homo sapiens
acaagcccagatgtttcccaatcctgaattaggctgctgcgctctggaggtgccaggtcttccaagaaccccttca

SEQ ID NO: 19911 - DNA, 76 bp, Homo sapiens
atgtttcccaatcctgaattaggctgctgcgctctggaggtgccaggtcttccaagaaccccttcaggtagtcata

SEQ ID NO: 19912 - DNA, 77 bp, Homo sapiens
atcctgaattaggctgctgcgctctggaggtgccaggtcttccaagaaccccttcaggtagtcatagttctcattaa

SEQ ID NO: 19913 - DNA, 81 bp, Homo sapiens
tgctgcgctctggaggtgccaggtcttccaagaaccccttcaggtagtcatagttctcattaatgatggcatctgaagaaa

SEQ ID NO: 19914 - DNA, 77 bp, Homo sapiens
tctggaggtgccaggtcttccaagaaccccttcaggtagtcatagttctcattaatgatggcatctgaagaaacaaa

SEQ ID NO: 19915 - DNA, 77 bp, Homo sapiens
aggtcttccaagaaccccttcaggtagtcatagttctcattaatgatggcatctgaagaaacaaagtattgagcaca

SEQ ID NO: 19916 - DNA, 80 bp, Homo sapiens
aagaaccccttcaggtagtcatagttctcattaatgatggcatctgaagaaacaaagtattgagcacaatgtctgcacaa

SEQ ID NO: 19917 - DNA, 79 bp, Homo sapiens
ttggaggaatttggggtgattccaggagatgtggaacccagcactcaccagaagctaagtgtcggatgatgagcttgtg

SEQ ID NO: 19918 - DNA, 79 bp, Homo sapiens
atttggggtgattccaggagatgtggaacccagcactcaccagaagctaagtgtcggatgatgagcttgtggcagcggt

SEQ ID NO: 19919 - DNA, 83 bp, Homo sapiens
caggagatgtggaacccagcactcaccagaagctaagtgtcggatgatgagcttgtggcagcggttccagtgctcagccttaa

SEQ ID NO: 19920 - DNA, 81 bp, Homo sapiens
atgtggaacccagcactcaccagaagctaagtgtcggatgatgagcttgtggcagcggttccagtgctcagccttaaataa

SEQ ID NO: 19921 - DNA, 79 bp, Homo sapiens
actcaccagaagctaagtgtcggatgatgagcttgtggcagcggttccagtgctcagccttaaataagcaaagggcctc

SEQ ID NO: 19922 - DNA, 78 bp, Homo sapiens
aagctaagtgtcggatgatgagcttgtggcagcggttccagtgctcagccttaaataagcaaagggcctctaagtgct

SEQ ID NO: 19923 - DNA, 80 bp, Homo sapiens
agtgtcggatgatgagcttgtggcagcggttccagtgctcagccttaaataagcaaagggcctctaagtgcttgtcagat

SEQ ID NO: 19924 - DNA, 82 bp, Homo sapiens
atgagcttgtggcagcggttccagtgctcagccttaaataagcaaagggcctctaagtgcttgtcagattccatgtgtgctc

SEQ ID NO: 19925 - DNA, 80 bp, Homo sapiens
agcggttccagtgctcagccttaaataagcaaagggcctctaagtgcttgtcagattccatgtgtgctcgcacagctttg

SEQ ID NO: 19926 - DNA, 83 bp, Homo sapiens
tgctcagccttaaataagcaaagggcctctaagtgcttgtcagattccatgtgtgctcgcacagctttggcctcgtggatcca

SEQ ID NO: 19927 - DNA, 79 bp, Homo sapiens
cttaaataagcaaagggcctctaagtgcttgtcagattccatgtgtgctcgcacagctttggcctcgtggatccatttg

SEQ ID NO: 19928 - DNA, 81 bp, Homo sapiens
aagcaaagggcctctaagtgcttgtcagattccatgtgtgctcgcacagctttggcctcgtggatccatttggcaggtaca

SEQ ID NO: 19929 - DNA, 82 bp, Homo sapiens
taagtgcttgtcagattccatgtgtgctcgcacagctttggcctcgtggatccatttggcaggtacacggagcttctgggta

SEQ ID NO: 19930 - DNA, 80 bp, Homo sapiens
ttgtcagattccatgtgtgctcgcacagctttggcctcgtggatccatttggcaggtacacggagcttctgggtaaggaa

SEQ ID NO: 19931 - DNA, 76 bp, Homo sapiens
atgtgtgctcgcacagctttggcctcgtggatccatttggcaggtacacggagcttctgggtaaggaaagtctctt

SEQ ID NO: 19932 - DNA, 72 bp, Homo sapiens
acagctttggcctcgtggatccatttggcaggtacacggagcttctgggtaaggaaagtctctttagcccaa

SEQ ID NO: 19933 - DNA, 73 bp, Homo sapiens
tttggcctcgtggatccatttggcaggtacacggagcttctgggtaaggaaagtctctttagcccaagattca

SEQ ID NO: 19934 - DNA, 71 bp, Homo sapiens
atccatttggcaggtacacggagcttctgggtaaggaaagtctctttagcccaagattcaggggtctccaa

SEQ ID NO: 19935 - DNA, 73 bp, Homo sapiens
aggtacacggagcttctgggtaaggaaagtctctttagcccaagattcaggggtctccaacagctggcagtgc

SEQ ID NO: 19936 - DNA, 73 bp, Homo sapiens
agcttctgggtaaggaaagtctctttagcccaagattcaggggtctccaacagctggcagtgccgggtaagca

SEQ ID NO: 19937 - DNA, 75 bp, Homo sapiens
gtaaggaaagtctctttagcccaagattcaggggtctccaacagctggcagtgccgggtaagcagctctcgaaca

SEQ ID NO: 19938 - DNA, 77 bp, Homo sapiens
aagtctctttagcccaagattcaggggtctccaacagctggcagtgccgggtaagcagctctcgaacagccttctca

SEQ ID NO: 19939 - DNA, 79 bp, Homo sapiens
aagattcaggggtctccaacagctggcagtgccgggtaagcagctctcgaacagccttctcacgtatgctacagggaga

SEQ ID NO: 19940 - DNA, 81 bp, Homo sapiens
ggtctccaacagctggcagtgccgggtaagcagctctcgaacagccttctcacgtatgctacagggagagataagctagaa

SEQ ID NO: 19941 - DNA, 80 bp, Homo sapiens
aacagctggcagtgccgggtaagcagctctcgaacagccttctcacgtatgctacagggagagataagctagaataaatc

SEQ ID NO: 19942 - DNA, 79 bp, Homo sapiens
agtgccgggtaagcagctctcgaacagccttctcacgtatgctacagggagagataagctagaataaatcccatcctca

SEQ ID NO: 19943 - DNA, 77 bp, Homo sapiens
ccctgtagtgctagatgtacccagtgggttcaacggcttctcactcaccctgagttgtcaatgtgcaggaggacaaa

SEQ ID NO: 19944 - DNA, 78 bp, Homo sapiens
tagatgtacccagtgggttcaacggcttctcactcaccctgagttgtcaatgtgcaggaggacaaagatggcccactc

SEQ ID NO: 19945 - DNA, 77 bp, Homo sapiens
tacccagtgggttcaacggcttctcactcaccctgagttgtcaatgtgcaggaggacaaagatggcccactcccaga

SEQ ID NO: 19946 - DNA, 77 bp, Homo sapiens
ttcaacggcttctcactcaccctgagttgtcaatgtgcaggaggacaaagatggcccactcccagagcccctcactt

SEQ ID NO: 19947 - DNA, 80 bp, Homo sapiens
ttctcactcaccctgagttgtcaatgtgcaggaggacaaagatggcccactcccagagcccctcactttcaagctggcca

SEQ ID NO: 19948 - DNA, 78 bp, Homo sapiens
cctgagttgtcaatgtgcaggaggacaaagatggcccactcccagagcccctcactttcaagctggccagcgtaactg

SEQ ID NO: 19949 - DNA, 79 bp, Homo sapiens
aatgtgcaggaggacaaagatggcccactcccagagcccctcactttcaagctggccagcgtaactggcctgtagcaca

SEQ ID NO: 19950 - DNA, 77 bp, Homo sapiens
aggacaaagatggcccactcccagagcccctcactttcaagctggccagcgtaactggcctgtagcacaccttcaca

SEQ ID NO: 19951 - DNA, 81 bp, Homo sapiens
atggcccactcccagagcccctcactttcaagctggccagcgtaactggcctgtagcacaccttcacactgcgctgagaga

SEQ ID NO: 19952 - DNA, 80 bp, Homo sapiens
gagcccctcactttcaagctggccagcgtaactggcctgtagcacaccttcacactgcgctgagagatgggtgtagttaa

SEQ ID NO: 19953 - DNA, 80 bp, Homo sapiens
actttcaagctggccagcgtaactggcctgtagcacaccttcacactgcgctgagagatgggtgtagttaagagccctca

SEQ ID NO: 19954 - DNA, 81 bp, Homo sapiens
aagctggccagcgtaactggcctgtagcacaccttcacactgcgctgagagatgggtgtagttaagagccctcagcacttc

SEQ ID NO: 19955 - DNA, 80 bp, Homo sapiens
cgtaactggcctgtagcacaccttcacactgcgctgagagatgggtgtagttaagagccctcagcacttcccacaagtgc

SEQ ID NO: 19956 - DNA, 81 bp, Homo sapiens
tagcacaccttcacactgcgctgagagatgggtgtagttaagagccctcagcacttcccacaagtgccagcttaggcggta

SEQ ID NO: 19957 - DNA, 79 bp, Homo sapiens
ttcacactgcgctgagagatgggtgtagttaagagccctcagcacttcccacaagtgccagcttaggcggtagtccaaa

SEQ ID NO: 19958 - DNA, 78 bp, Homo sapiens
tgagagatgggtgtagttaagagccctcagcacttcccacaagtgccagcttaggcggtagtccaaaggatctgctgt

SEQ ID NO: 19959 - DNA, 78 bp, Homo sapiens
gtgtagttaagagccctcagcacttcccacaagtgccagcttaggcggtagtccaaaggatctgctgttatgcttcga

SEQ ID NO: 19960 - DNA, 79 bp, Homo sapiens
ttaagagccctcagcacttcccacaagtgccagcttaggcggtagtccaaaggatctgctgttatgcttcgaggctcca

SEQ ID NO: 19961 - DNA, 82 bp, Homo sapiens
cacttcccacaagtgccagcttaggcggtagtccaaaggatctgctgttatgcttcgaggctccagcagctggttgagatca

SEQ ID NO: 19962 - DNA, 84 bp, Homo sapiens
aagtgccagcttaggcggtagtccaaaggatctgctgttatgcttcgaggctccagcagctggttgagatcataatgtctgcaa

SEQ ID NO: 19963 - DNA, 82 bp, Homo sapiens
agcttaggcggtagtccaaaggatctgctgttatgcttcgaggctccagcagctggttgagatcataatgtctgcaaagaac

SEQ ID NO: 19964 - DNA, 85 bp, Homo sapiens
tagtccaaaggatctgctgttatgcttcgaggctccagcagctggttgagatcataatgtctgcaaagaacgtgttgagagtcaa

SEQ ID NO: 19965 - DNA, 86 bp, Homo sapiens
aaggatctgctgttatgcttcgaggctccagcagctggttgagatcataatgtctgcaaagaacgtgttgagagtcaacatacaca

SEQ ID NO: 19966 - DNA, 86 bp, Homo sapiens
tgttatgcttcgaggctccagcagctggttgagatcataatgtctgcaaagaacgtgttgagagtcaacatacacagccaggagac

SEQ ID NO: 19967 - DNA, 80 bp, Homo sapiens
ggctcatggagcactcaagtgacaataaagcctggctctcatttacctgtcactgtagagttttagaaggtgaaagcaga

SEQ ID NO: 19968 - DNA, 79 bp, Homo sapiens
atggagcactcaagtgacaataaagcctggctctcatttacctgtcactgtagagttttagaaggtgaaagcagacatc

SEQ ID NO: 19969 - DNA, 76 bp, Homo sapiens
aagtgacaataaagcctggctctcatttacctgtcactgtagagttttagaaggtgaaagcagacatctcgaagtg

SEQ ID NO: 19970 - DNA, 78 bp, Homo sapiens
taaagcctggctctcatttacctgtcactgtagagttttagaaggtgaaagcagacatctcgaagtggtgtctgtgag

SEQ ID NO: 19971 - DNA, 75 bp, Homo sapiens
atttacctgtcactgtagagttttagaaggtgaaagcagacatctcgaagtggtgtctgtgagttttgctcctcc

SEQ ID NO: 19972 - DNA, 80 bp, Homo sapiens
ctgtcactgtagagttttagaaggtgaaagcagacatctcgaagtggtgtctgtgagttttgctcctccgctatcacaca

SEQ ID NO: 19973 - DNA, 79 bp, Homo sapiens
tagagttttagaaggtgaaagcagacatctcgaagtggtgtctgtgagttttgctcctccgctatcacacagccagaac

SEQ ID NO: 19974 - DNA, 81 bp, Homo sapiens
tgaaagcagacatctcgaagtggtgtctgtgagttttgctcctccgctatcacacagccagaaccctccagatacgaagga

SEQ ID NO: 19975 - DNA, 78 bp, Homo sapiens
agacatctcgaagtggtgtctgtgagttttgctcctccgctatcacacagccagaaccctccagatacgaaggaagtg

SEQ ID NO: 19976 - DNA, 76 bp, Homo sapiens
aagtggtgtctgtgagttttgctcctccgctatcacacagccagaaccctccagatacgaaggaagtggggagcag

SEQ ID NO: 19977 - DNA, 82 bp, Homo sapiens
tgagttttgctcctccgctatcacacagccagaaccctccagatacgaaggaagtggggagcaggcatatctgtcactgtca

SEQ ID NO: 19978 - DNA, 81 bp, Homo sapiens
tcctccgctatcacacagccagaaccctccagatacgaaggaagtggggagcaggcatatctgtcactgtcagaggtattc

SEQ ID NO: 19979 - DNA, 81 bp, Homo sapiens
tatcacacagccagaaccctccagatacgaaggaagtggggagcaggcatatctgtcactgtcagaggtattctgaaggaa

SEQ ID NO: 19980 - DNA, 77 bp, Homo sapiens
agaaccctccagatacgaaggaagtggggagcaggcatatctgtcactgtcagaggtattctgaaggaataatttga

SEQ ID NO: 19981 - DNA, 77 bp, Homo sapiens
agatacgaaggaagtggggagcaggcatatctgtcactgtcagaggtattctgaaggaataatttgataaaacaata

SEQ ID NO: 19982 - DNA, 78 bp, Homo sapiens
aagtggggagcaggcatatctgtcactgtcagaggtattctgaaggaataatttgataaaacaatacattagctccta

SEQ ID NO: 19983 - DNA, 81 bp, Homo sapiens
atactttaacacccagcaagatttttgcttggctctattggccacatatacctgaaatgcttcttcatacatgctgagcgc

SEQ ID NO: 19984 - DNA, 82 bp, Homo sapiens
agcaagatttttgcttggctctattggccacatatacctgaaatgcttcttcatacatgctgagcgccctagaaatggaggc

SEQ ID NO: 19985 - DNA, 81 bp, Homo sapiens
atttttgcttggctctattggccacatatacctgaaatgcttcttcatacatgctgagcgccctagaaatggaggctgttg

SEQ ID NO: 19986 - DNA, 82 bp, Homo sapiens
ctctattggccacatatacctgaaatgcttcttcatacatgctgagcgccctagaaatggaggctgttggtggaagcaaata

SEQ ID NO: 19987 - DNA, 80 bp, Homo sapiens
acatatacctgaaatgcttcttcatacatgctgagcgccctagaaatggaggctgttggtggaagcaaataccaaagatg

SEQ ID NO: 19988 - DNA, 79 bp, Homo sapiens
aaatgcttcttcatacatgctgagcgccctagaaatggaggctgttggtggaagcaaataccaaagatggatagccagg

SEQ ID NO: 19989 - DNA, 79 bp, Homo sapiens
ttcatacatgctgagcgccctagaaatggaggctgttggtggaagcaaataccaaagatggatagccagggagcgtttc

SEQ ID NO: 19990 - DNA, 76 bp, Homo sapiens
tgagcgccctagaaatggaggctgttggtggaagcaaataccaaagatggatagccagggagcgtttccaatccaa

SEQ ID NO: 19991 - DNA, 74 bp, Homo sapiens
ctagaaatggaggctgttggtggaagcaaataccaaagatggatagccagggagcgtttccaatccaactggga

SEQ ID NO: 19992 - DNA, 73 bp, Homo sapiens
ctgttggtggaagcaaataccaaagatggatagccagggagcgtttccaatccaactgggagcacacgtttat

SEQ ID NO: 19993 - DNA, 72 bp, Homo sapiens
aagcaaataccaaagatggatagccagggagcgtttccaatccaactgggagcacacgtttatttgcttctt

SEQ ID NO: 19994 - DNA, 73 bp, Homo sapiens
aataccaaagatggatagccagggagcgtttccaatccaactgggagcacacgtttatttgcttcttttctga

SEQ ID NO: 19995 - DNA, 76 bp, Homo sapiens
atggatagccagggagcgtttccaatccaactgggagcacacgtttatttgcttcttttctgagagctgccacacc

SEQ ID NO: 19996 - DNA, 75 bp, Homo sapiens
agcgtttccaatccaactgggagcacacgtttatttgcttcttttctgagagctgccacacctgtgcgaaacaaa

SEQ ID NO: 19997 - DNA, 78 bp, Homo sapiens
aatccaactgggagcacacgtttatttgcttcttttctgagagctgccacacctgtgcgaaacaaaatcatcaccatg

SEQ ID NO: 19998 - DNA, 79 bp, Homo sapiens
agcacacgtttatttgcttcttttctgagagctgccacacctgtgcgaaacaaaatcatcaccatggctatattctacc

SEQ ID NO: 19999 - DNA, 72 bp, Homo sapiens
ttatgaaaaaaccaatgtgagatattatggtaaaagtagaagataccggttttccagccaacagagcaaaga

SEQ ID NO: 20000 - DNA, 73 bp, Homo sapiens
aaaaaccaatgtgagatattatggtaaaagtagaagataccggttttccagccaacagagcaaagatgcgcag

SEQ ID NO: 20001 - DNA, 78 bp, Homo sapiens
agatattatggtaaaagtagaagataccggttttccagccaacagagcaaagatgcgcagtctctcatcctggatgaa

SEQ ID NO: 20002 - DNA, 78 bp, Homo sapiens
tatggtaaaagtagaagataccggttttccagccaacagagcaaagatgcgcagtctctcatcctggatgaaggagtc

SEQ ID NO: 20003 - DNA, 85 bp, Homo sapiens
tagaagataccggttttccagccaacagagcaaagatgcgcagtctctcatcctggatgaaggagtctgcttggagctgatgcca

SEQ ID NO: 20004 - DNA, 88 bp, Homo sapiens
ttttccagccaacagagcaaagatgcgcagtctctcatcctggatgaaggagtctgcttggagctgatgccagtccaccaactgcatg

SEQ ID NO: 20005 - DNA, 90 bp, Homo sapiens
aacagagcaaagatgcgcagtctctcatcctggatgaaggagtctgcttggagctgatgccagtccaccaactgcatggtgagcagctcc

SEQ ID NO: 20006 - DNA, 87 bp, Homo sapiens
aaagatgcgcagtctctcatcctggatgaaggagtctgcttggagctgatgccagtccaccaactgcatggtgagcagctcccggac

SEQ ID NO: 20007 - DNA, 87 bp, Homo sapiens
agtctctcatcctggatgaaggagtctgcttggagctgatgccagtccaccaactgcatggtgagcagctcccggactgactggcta

SEQ ID NO: 20008 - DNA, 84 bp, Homo sapiens
tggatgaaggagtctgcttggagctgatgccagtccaccaactgcatggtgagcagctcccggactgactggctacccacaaac

SEQ ID NO: 20009 - DNA, 83 bp, Homo sapiens
agtctgcttggagctgatgccagtccaccaactgcatggtgagcagctcccggactgactggctacccacaaactgagataaa

SEQ ID NO: 20010 - DNA, 81 bp, Homo sapiens
cttggagctgatgccagtccaccaactgcatggtgagcagctcccggactgactggctacccacaaactgagataaaagaa

SEQ ID NO: 20011 - DNA, 80 bp, Homo sapiens
agtccaccaactgcatggtgagcagctcccggactgactggctacccacaaactgagataaaagaagagcaagacgatga

SEQ ID NO: 20012 - DNA, 79 bp, Homo sapiens
accaactgcatggtgagcagctcccggactgactggctacccacaaactgagataaaagaagagcaagacgatgatccc

SEQ ID NO: 20013 - DNA, 76 bp, Homo sapiens
agcagctcccggactgactggctacccacaaactgagataaaagaagagcaagacgatgatcccctataagagaaa

SEQ ID NO: 20014 - DNA, 74 bp, Homo sapiens
ggactgactggctacccacaaactgagataaaagaagagcaagacgatgatcccctataagagaaatggaagtt

SEQ ID NO: 20015 - DNA, 71 bp, Homo sapiens
actggctacccacaaactgagataaaagaagagcaagacgatgatcccctataagagaaatggaagttttt

SEQ ID NO: 20016 - DNA, 71 bp, Homo sapiens
ccacaaactgagataaaagaagagcaagacgatgatcccctataagagaaatggaagttttttggttatta

SEQ ID NO: 20017 - DNA, 81 bp, Homo sapiens
agtaggaaggcgacagaggcgcagagaaggaccatatgccttccccacctgactgctgggccagagagcaggcctcactga

SEQ ID NO: 20018 - DNA, 80 bp, Homo sapiens
aggcgacagaggcgcagagaaggaccatatgccttccccacctgactgctgggccagagagcaggcctcactgatccttt

SEQ ID NO: 20019 - DNA, 80 bp, Homo sapiens
agagaaggaccatatgccttccccacctgactgctgggccagagagcaggcctcactgatccttttgcctgtgaggtagc

SEQ ID NO: 20020 - DNA, 81 bp, Homo sapiens
aggaccatatgccttccccacctgactgctgggccagagagcaggcctcactgatccttttgcctgtgaggtagctgaata

SEQ ID NO: 20021 - DNA, 81 bp, Homo sapiens
ttccccacctgactgctgggccagagagcaggcctcactgatccttttgcctgtgaggtagctgaatacagcctccacagg

SEQ ID NO: 20022 - DNA, 79 bp, Homo sapiens
actgctgggccagagagcaggcctcactgatccttttgcctgtgaggtagctgaatacagcctccacagggctgttttt

SEQ ID NO: 20023 - DNA, 76 bp, Homo sapiens
agagagcaggcctcactgatccttttgcctgtgaggtagctgaatacagcctccacagggctgtttttttgggtta

SEQ ID NO: 20024 - DNA, 73 bp, Homo sapiens
aggcctcactgatccttttgcctgtgaggtagctgaatacagcctccacagggctgtttttttgggttaagga

SEQ ID NO: 20025 - DNA, 71 bp, Homo sapiens
tccttttgcctgtgaggtagctgaatacagcctccacagggctgtttttttgggttaaggagacttcctct

SEQ ID NO: 20026 - DNA, 74 bp, Homo sapiens
tgtgaggtagctgaatacagcctccacagggctgtttttttgggttaaggagacttcctcttcaatctgaggtg

SEQ ID NO: 20027 - DNA, 75 bp, Homo sapiens
tagctgaatacagcctccacagggctgtttttttgggttaaggagacttcctcttcaatctgaggtgtggcagta

SEQ ID NO: 20028 - DNA, 73 bp, Homo sapiens
acagcctccacagggctgtttttttgggttaaggagacttcctcttcaatctgaggtgtggcagtacaggata

SEQ ID NO: 20029 - DNA, 72 bp, Homo sapiens
ctgtttttttgggttaaggagacttcctcttcaatctgaggtgtggcagtacaggatagccagcgggagaaa

SEQ ID NO: 20030 - DNA, 74 bp, Homo sapiens
tttttgggttaaggagacttcctcttcaatctgaggtgtggcagtacaggatagccagcgggagaaagctcttc

SEQ ID NO: 20031 - DNA, 78 bp, Homo sapiens
agacttcctcttcaatctgaggtgtggcagtacaggatagccagcgggagaaagctcttcttcgctccagaatttgaa

SEQ ID NO: 20032 - DNA, 80 bp, Homo sapiens
tcttcaatctgaggtgtggcagtacaggatagccagcgggagaaagctcttcttcgctccagaatttgaatgtattcacg

SEQ ID NO: 20033 - DNA, 76 bp, Homo sapiens
gtgtggcagtacaggatagccagcgggagaaagctcttcttcgctccagaatttgaatgtattcacggggttcatt

SEQ ID NO: 20034 - DNA, 75 bp, Homo sapiens
agtacaggatagccagcgggagaaagctcttcttcgctccagaatttgaatgtattcacggggttcatttagctg

SEQ ID NO: 20035 - DNA, 77 bp, Homo sapiens
atagccagcgggagaaagctcttcttcgctccagaatttgaatgtattcacggggttcatttagctggctgtcaagc

SEQ ID NO: 20036 - DNA, 76 bp, Homo sapiens
agaaagctcttcttcgctccagaatttgaatgtattcacggggttcatttagctggctgtcaagctccttcaggtg

SEQ ID NO: 20037 - DNA, 76 bp, Homo sapiens
cttcttcgctccagaatttgaatgtattcacggggttcatttagctggctgtcaagctccttcaggtggccccata

SEQ ID NO: 20038 - DNA, 75 bp, Homo sapiens
aatttgaatgtattcacggggttcatttagctggctgtcaagctccttcaggtggccccatagggcttcacatag

SEQ ID NO: 20039 - DNA, 77 bp, Homo sapiens
aatgtattcacggggttcatttagctggctgtcaagctccttcaggtggccccatagggcttcacatagtgtccatg

SEQ ID NO: 20040 - DNA, 83 bp, Homo sapiens
ttcatttagctggctgtcaagctccttcaggtggccccatagggcttcacatagtgtccatgtcaggctccagtgcttcacaa

SEQ ID NO: 20041 - DNA, 82 bp, Homo sapiens
ttagctggctgtcaagctccttcaggtggccccatagggcttcacatagtgtccatgtcaggctccagtgcttcacaactaa

SEQ ID NO: 20042 - DNA, 80 bp, Homo sapiens
gtcaagctccttcaggtggccccatagggcttcacatagtgtccatgtcaggctccagtgcttcacaactaaggcaggaa

SEQ ID NO: 20043 - DNA, 78 bp, Homo sapiens
ttcaggtggccccatagggcttcacatagtgtccatgtcaggctccagtgcttcacaactaaggcaggaagagaaaaa

SEQ ID NO: 20044 - DNA, 78 bp, Homo sapiens
atagggcttcacatagtgtccatgtcaggctccagtgcttcacaactaaggcaggaagagaaaaacaatgttacgaga

SEQ ID NO: 20045 - DNA, 78 bp, Homo sapiens
cactattattgggacatcaaacattagaaacatagtgtgtactcactttgtgcttctggtaagtctcctgatgcttct

SEQ ID NO: 20046 - DNA, 77 bp, Homo sapiens
ttattgggacatcaaacattagaaacatagtgtgtactcactttgtgcttctggtaagtctcctgatgcttctttaa

SEQ ID NO: 20047 - DNA, 77 bp, Homo sapiens
aaacattagaaacatagtgtgtactcactttgtgcttctggtaagtctcctgatgcttctttaacccaatctgcata

SEQ ID NO: 20048 - DNA, 81 bp, Homo sapiens
aaacatagtgtgtactcactttgtgcttctggtaagtctcctgatgcttctttaacccaatctgcatagtcatgaatgaca

SEQ ID NO: 20049 - DNA, 82 bp, Homo sapiens
tactcactttgtgcttctggtaagtctcctgatgcttctttaacccaatctgcatagtcatgaatgacagcaactcccagat

SEQ ID NO: 20050 - DNA, 80 bp, Homo sapiens
ctttgtgcttctggtaagtctcctgatgcttctttaacccaatctgcatagtcatgaatgacagcaactcccagattggg

SEQ ID NO: 20051 - DNA, 83 bp, Homo sapiens
taagtctcctgatgcttctttaacccaatctgcatagtcatgaatgacagcaactcccagattggggacaatgagaggacaca

SEQ ID NO: 20052 - DNA, 83 bp, Homo sapiens
atgcttctttaacccaatctgcatagtcatgaatgacagcaactcccagattggggacaatgagaggacacagttcatccaca

SEQ ID NO: 20053 - DNA, 84 bp, Homo sapiens
tctttaacccaatctgcatagtcatgaatgacagcaactcccagattggggacaatgagaggacacagttcatccacatggaca

SEQ ID NO: 20054 - DNA, 85 bp, Homo sapiens
tgcatagtcatgaatgacagcaactcccagattggggacaatgagaggacacagttcatccacatggacagtgctgtgttttaat

SEQ ID NO: 20055 - DNA, 81 bp, Homo sapiens
acagcaactcccagattggggacaatgagaggacacagttcatccacatggacagtgctgtgttttaatttgagctccaga

SEQ ID NO: 20056 - DNA, 81 bp, Homo sapiens
ttggggacaatgagaggacacagttcatccacatggacagtgctgtgttttaatttgagctccagaggtgtctgatataat

SEQ ID NO: 20057 - DNA, 82 bp, Homo sapiens
aatgagaggacacagttcatccacatggacagtgctgtgttttaatttgagctccagaggtgtctgatataatttcatgtct

SEQ ID NO: 20058 - DNA, 82 bp, Homo sapiens
acagttcatccacatggacagtgctgtgttttaatttgagctccagaggtgtctgatataatttcatgtcttcatctggctt

SEQ ID NO: 20059 - DNA, 81 bp, Homo sapiens
atccacatggacagtgctgtgttttaatttgagctccagaggtgtctgatataatttcatgtcttcatctggctttctttg

SEQ ID NO: 20060 - DNA, 80 bp, Homo sapiens
tgctgtgttttaatttgagctccagaggtgtctgatataatttcatgtcttcatctggctttctttgtctcaaactgagt

SEQ ID NO: 20061 - DNA, 76 bp, Homo sapiens
ttttaatttgagctccagaggtgtctgatataatttcatgtcttcatctggctttctttgtctcaaactgagtttt

SEQ ID NO: 20062 - DNA, 76 bp, Homo sapiens
tccagaggtgtctgatataatttcatgtcttcatctggctttctttgtctcaaactgagtttttctaagtgaactt

SEQ ID NO: 20063 - DNA, 76 bp, Homo sapiens
ggtgtctgatataatttcatgtcttcatctggctttctttgtctcaaactgagtttttctaagtgaactttgaatg

SEQ ID NO: 20064 - DNA, 75 bp, Homo sapiens
tataatttcatgtcttcatctggctttctttgtctcaaactgagtttttctaagtgaactttgaatggggactca

SEQ ID NO: 20065 - DNA, 73 bp, Homo sapiens
ttcatctggctttctttgtctcaaactgagtttttctaagtgaactttgaatggggactcagttaggctacaa

SEQ ID NO: 20066 - DNA, 73 bp, Homo sapiens
tttctttgtctcaaactgagtttttctaagtgaactttgaatggggactcagttaggctacaagagcaaatga

SEQ ID NO: 20067 - DNA, 74 bp, Homo sapiens
tcaaactgagtttttctaagtgaactttgaatggggactcagttaggctacaagagcaaatgaggaatagaata

SEQ ID NO: 20068 - DNA, 71 bp, Homo sapiens
agtttttctaagtgaactttgaatggggactcagttaggctacaagagcaaatgaggaatagaatagaaaa

SEQ ID NO: 20069 - DNA, 77 bp, Homo sapiens
tttcacctatcatgttgcctttctcaaaaagcatcaagaaatgtgactcacggtttaacagctactggattgggcag

SEQ ID NO: 20070 - DNA, 75 bp, Homo sapiens
atgttgcctttctcaaaaagcatcaagaaatgtgactcacggtttaacagctactggattgggcaggaatccaaa

SEQ ID NO: 20071 - DNA, 74 bp, Homo sapiens
aaaaagcatcaagaaatgtgactcacggtttaacagctactggattgggcaggaatccaaactccatggaatcg

SEQ ID NO: 20072 - DNA, 77 bp, Homo sapiens
aagaaatgtgactcacggtttaacagctactggattgggcaggaatccaaactccatggaatcggcaatctgatgat

SEQ ID NO: 20073 - DNA, 78 bp, Homo sapiens
atgtgactcacggtttaacagctactggattgggcaggaatccaaactccatggaatcggcaatctgatgattttcta

SEQ ID NO: 20074 - DNA, 80 bp, Homo sapiens
tttaacagctactggattgggcaggaatccaaactccatggaatcggcaatctgatgattttctagttcatgagagccat

SEQ ID NO: 20075 - DNA, 83 bp, Homo sapiens
tactggattgggcaggaatccaaactccatggaatcggcaatctgatgattttctagttcatgagagccattcagctgttctc

SEQ ID NO: 20076 - DNA, 82 bp, Homo sapiens
aggaatccaaactccatggaatcggcaatctgatgattttctagttcatgagagccattcagctgttctccactattagcaa

SEQ ID NO: 20077 - DNA, 82 bp, Homo sapiens
aaactccatggaatcggcaatctgatgattttctagttcatgagagccattcagctgttctccactattagcaagagtccag

SEQ ID NO: 20078 - DNA, 82 bp, Homo sapiens
atggaatcggcaatctgatgattttctagttcatgagagccattcagctgttctccactattagcaagagtccagttggggc

SEQ ID NO: 20079 - DNA, 79 bp, Homo sapiens
atctgatgattttctagttcatgagagccattcagctgttctccactattagcaagagtccagttggggccccaaccaa

SEQ ID NO: 20080 - DNA, 76 bp, Homo sapiens
tttctagttcatgagagccattcagctgttctccactattagcaagagtccagttggggccccaaccaacacgaaa

SEQ ID NO: 20081 - DNA, 77 bp, Homo sapiens
agagccattcagctgttctccactattagcaagagtccagttggggccccaaccaacacgaaatgagcgtcccatga

SEQ ID NO: 20082 - DNA, 75 bp, Homo sapiens
attcagctgttctccactattagcaagagtccagttggggccccaaccaacacgaaatgagcgtcccatgaatag

SEQ ID NO: 20083 - DNA, 76 bp, Homo sapiens
cactattagcaagagtccagttggggccccaaccaacacgaaatgagcgtcccatgaatagggccatgtccatcaa

SEQ ID NO: 20084 - DNA, 72 bp, Homo sapiens
aagagtccagttggggccccaaccaacacgaaatgagcgtcccatgaatagggccatgtccatcaagagttt

SEQ ID NO: 20085 - DNA, 72 bp, Homo sapiens
tccagttggggccccaaccaacacgaaatgagcgtcccatgaatagggccatgtccatcaagagttttccct

SEQ ID NO: 20086 - DNA, 75 bp, Homo sapiens
aaccaacacgaaatgagcgtcccatgaatagggccatgtccatcaagagttttcccttgccataggtgacagact

SEQ ID NO: 20087 - DNA, 76 bp, Homo sapiens
acacgaaatgagcgtcccatgaatagggccatgtccatcaagagttttcccttgccataggtgacagacttttcac

SEQ ID NO: 20088 - DNA, 75 bp, Homo sapiens
agcgtcccatgaatagggccatgtccatcaagagttttcccttgccataggtgacagacttttcacgagggacta

SEQ ID NO: 20089 - DNA, 72 bp, Homo sapiens
aatagggccatgtccatcaagagttttcccttgccataggtgacagacttttcacgagggactaggcctagt

SEQ ID NO: 20090 - DNA, 72 bp, Homo sapiens
catcaagagttttcccttgccataggtgacagacttttcacgagggactaggcctagttgcctacgtgtacc

SEQ ID NO: 20091 - DNA, 70 bp, Homo sapiens
ttttcccttgccataggtgacagacttttcacgagggactaggcctagttgcctacgtgtacccactgtt

SEQ ID NO: 20092 - DNA, 70 bp, Homo sapiens
cataggtgacagacttttcacgagggactaggcctagttgcctacgtgtacccactgttttcaacggaac

SEQ ID NO: 20093 - DNA, 68 bp, Homo sapiens
acagacttttcacgagggactaggcctagttgcctacgtgtacccactgttttcaacggaacctcagg

SEQ ID NO: 20094 - DNA, 69 bp, Homo sapiens
tttcacgagggactaggcctagttgcctacgtgtacccactgttttcaacggaacctcaggggctgggc

SEQ ID NO: 20095 - DNA, 71 bp, Homo sapiens
actaggcctagttgcctacgtgtacccactgttttcaacggaacctcaggggctgggctgggcattgtgaa

SEQ ID NO: 20096 - DNA, 73 bp, Homo sapiens
agttgcctacgtgtacccactgttttcaacggaacctcaggggctgggctgggcattgtgaacacagaagtca

SEQ ID NO: 20097 - DNA, 72 bp, Homo sapiens
tgtacccactgttttcaacggaacctcaggggctgggctgggcattgtgaacacagaagtcaggggtggagg

SEQ ID NO: 20098 - DNA, 73 bp, Homo sapiens
tgttttcaacggaacctcaggggctgggctgggcattgtgaacacagaagtcaggggtggagggacagaccaa

SEQ ID NO: 20099 - DNA, 77 bp, Homo sapiens
ctcaggggctgggctgggcattgtgaacacagaagtcaggggtggagggacagaccaagaggatgtggatgggatat

SEQ ID NO: 20100 - DNA, 78 bp, Homo sapiens
tgggctgggcattgtgaacacagaagtcaggggtggagggacagaccaagaggatgtggatgggatattcattaaaga

SEQ ID NO: 20101 - DNA, 79 bp, Homo sapiens
attgtgaacacagaagtcaggggtggagggacagaccaagaggatgtggatgggatattcattaaagatgctgctctgg

SEQ ID NO: 20102 - DNA, 78 bp, Homo sapiens
aacacagaagtcaggggtggagggacagaccaagaggatgtggatgggatattcattaaagatgctgctctgggagta

SEQ ID NO: 20103 - DNA, 82 bp, Homo sapiens
ggtggagggacagaccaagaggatgtggatgggatattcattaaagatgctgctctgggagtacgacattcttgcacagaga

SEQ ID NO: 20104 - DNA, 83 bp, Homo sapiens
cagaccaagaggatgtggatgggatattcattaaagatgctgctctgggagtacgacattcttgcacagagacacttggtgaa

SEQ ID NO: 20105 - DNA, 80 bp, Homo sapiens
aggatgtggatgggatattcattaaagatgctgctctgggagtacgacattcttgcacagagacacttggtgaaagaaaa

SEQ ID NO: 20106 - DNA, 79 bp, Homo sapiens
atgggatattcattaaagatgctgctctgggagtacgacattcttgcacagagacacttggtgaaagaaaagctccact

SEQ ID NO: 20107 - DNA, 73 bp, Homo sapiens
agtacgacattcttgcacagagacacttggtgaaagaaaagctccacttgtaaattttgattgtagtaaccca

SEQ ID NO: 20108 - DNA, 73 bp, Homo sapiens
ttcttgcacagagacacttggtgaaagaaaagctccacttgtaaattttgattgtagtaacccaccaactgaa

SEQ ID NO: 20109 - DNA, 71 bp, Homo sapiens
acagagacacttggtgaaagaaaagctccacttgtaaattttgattgtagtaacccaccaactgaaatgaa

SEQ ID NO: 20110 - DNA, 69 bp, Homo sapiens
aaaagctccacttgtaaattttgattgtagtaacccaccaactgaaatgaagcgggaatgaaggggaga

SEQ ID NO: 20111 - DNA, 73 bp, Homo sapiens
acttgatgactgtacagctttcttgtaaaatagcatcttttatactgtacctagtgaacgagttttcgacgag

SEQ ID NO: 20112 - DNA, 74 bp, Homo sapiens
tacagctttcttgtaaaatagcatcttttatactgtacctagtgaacgagttttcgacgagtgggatgctgaaa

SEQ ID NO: 20113 - DNA, 73 bp, Homo sapiens
ttcttgtaaaatagcatcttttatactgtacctagtgaacgagttttcgacgagtgggatgctgaaatgggga

SEQ ID NO: 20114 - DNA, 74 bp, Homo sapiens
atagcatcttttatactgtacctagtgaacgagttttcgacgagtgggatgctgaaatggggagtctgggagaa

SEQ ID NO: 20115 - DNA, 73 bp, Homo sapiens
ttatactgtacctagtgaacgagttttcgacgagtgggatgctgaaatggggagtctgggagaacagatttct

SEQ ID NO: 20116 - DNA, 74 bp, Homo sapiens
cctagtgaacgagttttcgacgagtgggatgctgaaatggggagtctgggagaacagatttcttgagaagtatc

SEQ ID NO: 20117 - DNA, 74 bp, Homo sapiens
agttttcgacgagtgggatgctgaaatggggagtctgggagaacagatttcttgagaagtatctgctttggaag

SEQ ID NO: 20118 - DNA, 78 bp, Homo sapiens
tgggatgctgaaatggggagtctgggagaacagatttcttgagaagtatctgctttggaaggcaggcgactgaagcgt

SEQ ID NO: 20119 - DNA, 76 bp, Homo sapiens
aaatggggagtctgggagaacagatttcttgagaagtatctgctttggaaggcaggcgactgaagcgttgatccag

SEQ ID NO: 20120 - DNA, 82 bp, Homo sapiens
tctgggagaacagatttcttgagaagtatctgctttggaaggcaggcgactgaagcgttgatccagtgccatatctacatct

SEQ ID NO: 20121 - DNA, 83 bp, Homo sapiens
agatttcttgagaagtatctgctttggaaggcaggcgactgaagcgttgatccagtgccatatctacatcttcttcatcagta

SEQ ID NO: 20122 - DNA, 85 bp, Homo sapiens
agaagtatctgctttggaaggcaggcgactgaagcgttgatccagtgccatatctacatcttcttcatcagtaagcaatgatgct

SEQ ID NO: 20123 - DNA, 87 bp, Homo sapiens
gctttggaaggcaggcgactgaagcgttgatccagtgccatatctacatcttcttcatcagtaagcaatgatgctttcatgatctaa

SEQ ID NO: 20124 - DNA, 84 bp, Homo sapiens
aaggcaggcgactgaagcgttgatccagtgccatatctacatcttcttcatcagtaagcaatgatgctttcatgatctaaaaag

SEQ ID NO: 20125 - DNA, 87 bp, Homo sapiens
tgaagcgttgatccagtgccatatctacatcttcttcatcagtaagcaatgatgctttcatgatctaaaaaggcaatatctatagaa

SEQ ID NO: 20126 - DNA, 87 bp, Homo sapiens
gttgatccagtgccatatctacatcttcttcatcagtaagcaatgatgctttcatgatctaaaaaggcaatatctatagaatgaatg

SEQ ID NO: 20127 - DNA, 85 bp, Homo sapiens
atatctacatcttcttcatcagtaagcaatgatgctttcatgatctaaaaaggcaatatctatagaatgaatgtgcttcccagaa

SEQ ID NO: 20128 - DNA, 69 bp, Homo sapiens
tattagtttggctttctgttacaaaaaaggtgggttagaacttcacctgtaagacatgtggattaattc

SEQ ID NO: 20129 - DNA, 70 bp, Homo sapiens
ttggctttctgttacaaaaaaggtgggttagaacttcacctgtaagacatgtggattaattcccagtgaa

SEQ ID NO: 20130 - DNA, 73 bp, Homo sapiens
ttacaaaaaaggtgggttagaacttcacctgtaagacatgtggattaattcccagtgaagatgcaatatgtgt

SEQ ID NO: 20131 - DNA, 77 bp, Homo sapiens
aaaggtgggttagaacttcacctgtaagacatgtggattaattcccagtgaagatgcaatatgtgttgaggcagaca

SEQ ID NO: 20132 - DNA, 81 bp, Homo sapiens
tagaacttcacctgtaagacatgtggattaattcccagtgaagatgcaatatgtgttgaggcagacacaggttcctgatcc

SEQ ID NO: 20133 - DNA, 86 bp, Homo sapiens
taagacatgtggattaattcccagtgaagatgcaatatgtgttgaggcagacacaggttcctgatcctcaggcatgctctcttcta

SEQ ID NO: 20134 - DNA, 85 bp, Homo sapiens
atgtggattaattcccagtgaagatgcaatatgtgttgaggcagacacaggttcctgatcctcaggcatgctctcttctaacatg

SEQ ID NO: 20135 - DNA, 84 bp, Homo sapiens
ttcccagtgaagatgcaatatgtgttgaggcagacacaggttcctgatcctcaggcatgctctcttctaacatggtatccaaaa

SEQ ID NO: 20136 - DNA, 83 bp, Homo sapiens
aagatgcaatatgtgttgaggcagacacaggttcctgatcctcaggcatgctctcttctaacatggtatccaaaactggctcc

SEQ ID NO: 20137 - DNA, 83 bp, Homo sapiens
tgttgaggcagacacaggttcctgatcctcaggcatgctctcttctaacatggtatccaaaactggctcctgggtgatatcta

SEQ ID NO: 20138 - DNA, 82 bp, Homo sapiens
agacacaggttcctgatcctcaggcatgctctcttctaacatggtatccaaaactggctcctgggtgatatctaccatgtca

SEQ ID NO: 20139 - DNA, 82 bp, Homo sapiens
ttcctgatcctcaggcatgctctcttctaacatggtatccaaaactggctcctgggtgatatctaccatgtcactgtccagt

SEQ ID NO: 20140 - DNA, 79 bp, Homo sapiens
aggcatgctctcttctaacatggtatccaaaactggctcctgggtgatatctaccatgtcactgtccagttccacaacc

SEQ ID NO: 20141 - DNA, 75 bp, Homo sapiens
ttctaacatggtatccaaaactggctcctgggtgatatctaccatgtcactgtccagttccacaaccctccctaa

SEQ ID NO: 20142 - DNA, 76 bp, Homo sapiens
atggtatccaaaactggctcctgggtgatatctaccatgtcactgtccagttccacaaccctccctaactgctcca

SEQ ID NO: 20143 - DNA, 74 bp, Homo sapiens
aaaactggctcctgggtgatatctaccatgtcactgtccagttccacaaccctccctaactgctccacctctgg

SEQ ID NO: 20144 - DNA, 80 bp, Homo sapiens
tgggtgatatctaccatgtcactgtccagttccacaaccctccctaactgctccacctctgggctctggctctgtagaca

SEQ ID NO: 20145 - DNA, 80 bp, Homo sapiens
tatctaccatgtcactgtccagttccacaaccctccctaactgctccacctctgggctctggctctgtagacagcagaaa

SEQ ID NO: 20146 - DNA, 77 bp, Homo sapiens
actgtccagttccacaaccctccctaactgctccacctctgggctctggctctgtagacagcagaaagatcaggaaa

SEQ ID NO: 20147 - DNA, 75 bp, Homo sapiens
taccctcccctcccctgtacgcgcaaacatgtatatacacacattctccagaaatgcctcctaagagattattta

SEQ ID NO: 20148 - DNA, 76 bp, Homo sapiens
ccctgtacgcgcaaacatgtatatacacacattctccagaaatgcctcctaagagattatttaataaatcataaaa

SEQ ID NO: 20149 - DNA, 77 bp, Homo sapiens
cgcgcaaacatgtatatacacacattctccagaaatgcctcctaagagattatttaataaatcataaaaaccacaca

SEQ ID NO: 20150 - DNA, 78 bp, Homo sapiens
gtatatacacacattctccagaaatgcctcctaagagattatttaataaatcataaaaaccacacatttcagcagcca

SEQ ID NO: 20151 - DNA, 77 bp, Homo sapiens
ccagaaatgcctcctaagagattatttaataaatcataaaaaccacacatttcagcagccataagaattatagcatg

SEQ ID NO: 20152 - DNA, 76 bp, Homo sapiens
tcctaagagattatttaataaatcataaaaaccacacatttcagcagccataagaattatagcatggaaaatacca

SEQ ID NO: 20153 - DNA, 74 bp, Homo sapiens
ttaataaatcataaaaaccacacatttcagcagccataagaattatagcatggaaaataccaaaggtctagctt

SEQ ID NO: 20154 - DNA, 77 bp, Homo sapiens
aaatcataaaaaccacacatttcagcagccataagaattatagcatggaaaataccaaaggtctagctttcagcagc

SEQ ID NO: 20155 - DNA, 79 bp, Homo sapiens
aaccacacatttcagcagccataagaattatagcatggaaaataccaaaggtctagctttcagcagctgagaggtagag

SEQ ID NO: 20156 - DNA, 79 bp, Homo sapiens
agcagccataagaattatagcatggaaaataccaaaggtctagctttcagcagctgagaggtagaggatgctttacaaa

SEQ ID NO: 20157 - DNA, 76 bp, Homo sapiens
ataagaattatagcatggaaaataccaaaggtctagctttcagcagctgagaggtagaggatgctttacaaagaaa

SEQ ID NO: 20158 - DNA, 77 bp, Homo sapiens
tggaaaataccaaaggtctagctttcagcagctgagaggtagaggatgctttacaaagaaatcccgtatcaatgata

SEQ ID NO: 20159 - DNA, 77 bp, Homo sapiens
ataccaaaggtctagctttcagcagctgagaggtagaggatgctttacaaagaaatcccgtatcaatgatacaagta

SEQ ID NO: 20160 - DNA, 79 bp, Homo sapiens
tagctttcagcagctgagaggtagaggatgctttacaaagaaatcccgtatcaatgatacaagtaattgcgataaacaa

SEQ ID NO: 20161 - DNA, 76 bp, Homo sapiens
agctgagaggtagaggatgctttacaaagaaatcccgtatcaatgatacaagtaattgcgataaacaatgtaggcc

SEQ ID NO: 20162 - DNA, 73 bp, Homo sapiens
aggtagaggatgctttacaaagaaatcccgtatcaatgatacaagtaattgcgataaacaatgtaggccctaa

SEQ ID NO: 20163 - DNA, 73 bp, Homo sapiens
ttacaaagaaatcccgtatcaatgatacaagtaattgcgataaacaatgtaggccctaatctccccaagccaa

SEQ ID NO: 20164 - DNA, 72 bp, Homo sapiens
aaatcccgtatcaatgatacaagtaattgcgataaacaatgtaggccctaatctccccaagccaaataataa

SEQ ID NO: 20165 - DNA, 75 bp, Homo sapiens
gtatcaatgatacaagtaattgcgataaacaatgtaggccctaatctccccaagccaaataataattcatttaca

SEQ ID NO: 20166 - DNA, 71 bp, Homo sapiens
acaagtaattgcgataaacaatgtaggccctaatctccccaagccaaataataattcatttacattcccaa

SEQ ID NO: 20167 - DNA, 69 bp, Homo sapiens
gcgataaacaatgtaggccctaatctccccaagccaaataataattcatttacattcccaaactatttt

SEQ ID NO: 20168 - DNA, 69 bp, Homo sapiens
aatgtaggccctaatctccccaagccaaataataattcatttacattcccaaactatttttcataaaga

SEQ ID NO: 20169 - DNA, 70 bp, Homo sapiens
ctaatctccccaagccaaataataattcatttacattcccaaactatttttcataaagattatgtactat

SEQ ID NO: 20170 - DNA, 70 bp, Homo sapiens
caagccaaataataattcatttacattcccaaactatttttcataaagattatgtactattaaaatacaa

SEQ ID NO: 20171 - DNA, 69 bp, Homo sapiens
ttcatttacattcccaaactatttttcataaagattatgtactattaaaatacaaatatcaaggttacc

SEQ ID NO: 20172 - DNA, 67 bp, Homo sapiens
acattcccaaactatttttcataaagattatgtactattaaaatacaaatatcaaggttacccgaag

SEQ ID NO: 20173 - DNA, 68 bp, Homo sapiens
atttttcataaagattatgtactattaaaatacaaatatcaaggttacccgaagtataagcaaacaac

SEQ ID NO: 20174 - DNA, 67 bp, Homo sapiens
tgtactattaaaatacaaatatcaaggttacccgaagtataagcaaacaactttaaaaaaatggaga

SEQ ID NO: 20175 - DNA, 64 bp, Homo sapiens
tacaaatatcaaggttacccgaagtataagcaaacaactttaaaaaaatggagattaaaaaccc

SEQ ID NO: 20176 - DNA, 65 bp, Homo sapiens
tatcaaggttacccgaagtataagcaaacaactttaaaaaaatggagattaaaaaccctttcaga

SEQ ID NO: 20177 - DNA, 64 bp, Homo sapiens
tacccgaagtataagcaaacaactttaaaaaaatggagattaaaaaccctttcagaaagctaat

SEQ ID NO: 20178 - DNA, 62 bp, Homo sapiens
ataagcaaacaactttaaaaaaatggagattaaaaaccctttcagaaagctaatttaacttt

SEQ ID NO: 20179 - DNA, 62 bp, Homo sapiens
taaaaaaatggagattaaaaaccctttcagaaagctaatttaacttttaaaaaaccatggag

SEQ ID NO: 20180 - DNA, 67 bp, Homo sapiens
cagaaagctaatttaacttttaaaaaaccatggaggtaaagaaaaagattaaactgcacatcaggta

SEQ ID NO: 20181 - DNA, 69 bp, Homo sapiens
taacttttaaaaaaccatggaggtaaagaaaaagattaaactgcacatcaggtagtcaataaaggcaga

SEQ ID NO: 20182 - DNA, 74 bp, Homo sapiens
aaaaccatggaggtaaagaaaaagattaaactgcacatcaggtagtcaataaaggcagaatttactgtgcatga

SEQ ID NO: 20183 - DNA, 77 bp, Homo sapiens
aggtaaagaaaaagattaaactgcacatcaggtagtcaataaaggcagaatttactgtgcatgaacccacatgagca

SEQ ID NO: 20184 - DNA, 77 bp, Homo sapiens
aaaaagattaaactgcacatcaggtagtcaataaaggcagaatttactgtgcatgaacccacatgagcaaatcttaa

SEQ ID NO: 20185 - DNA, 79 bp, Homo sapiens
ttaaactgcacatcaggtagtcaataaaggcagaatttactgtgcatgaacccacatgagcaaatcttaagttaatcac

SEQ ID NO: 20186 - DNA, 80 bp, Homo sapiens
atcaggtagtcaataaaggcagaatttactgtgcatgaacccacatgagcaaatcttaagttaatcactgagcagagaat

SEQ ID NO: 20187 - DNA, 80 bp, Homo sapiens
aaaggcagaatttactgtgcatgaacccacatgagcaaatcttaagttaatcactgagcagagaattcagcaagtccaaa

SEQ ID NO: 20188 - DNA, 82 bp, Homo sapiens
aatttactgtgcatgaacccacatgagcaaatcttaagttaatcactgagcagagaattcagcaagtccaaatgagagagaa

SEQ ID NO: 20189 - DNA, 75 bp, Homo sapiens
caaatcttaagttaatcactgagcagagaattcagcaagtccaaatgagagagaacaaagggtttaaaaatgaca

SEQ ID NO: 20190 - DNA, 78 bp, Homo sapiens
taatcactgagcagagaattcagcaagtccaaatgagagagaacaaagggtttaaaaatgacaatctgtagaggaata

SEQ ID NO: 20191 - DNA, 74 bp, Homo sapiens
gagaattcagcaagtccaaatgagagagaacaaagggtttaaaaatgacaatctgtagaggaataatccaaaca

SEQ ID NO: 20192 - DNA, 73 bp, Homo sapiens
caagtccaaatgagagagaacaaagggtttaaaaatgacaatctgtagaggaataatccaaacagcaagagaa

SEQ ID NO: 20193 - DNA, 71 bp, Homo sapiens
caaagggtttaaaaatgacaatctgtagaggaataatccaaacagcaagagaattctttaaatctctccag

SEQ ID NO: 20194 - DNA, 73 bp, Homo sapiens
aaaaatgacaatctgtagaggaataatccaaacagcaagagaattctttaaatctctccagtaaaaagacaga

SEQ ID NO: 20195 - DNA, 77 bp, Homo sapiens
acaatctgtagaggaataatccaaacagcaagagaattctttaaatctctccagtaaaaagacagatgcctgcaaga

SEQ ID NO: 20196 - DNA, 77 bp, Homo sapiens
tagaggaataatccaaacagcaagagaattctttaaatctctccagtaaaaagacagatgcctgcaagacctcacgc

SEQ ID NO: 20197 - DNA, 75 bp, Homo sapiens
aacagcaagagaattctttaaatctctccagtaaaaagacagatgcctgcaagacctcacgccctcccttgcact

SEQ ID NO: 20198 - DNA, 74 bp, Homo sapiens
agaattctttaaatctctccagtaaaaagacagatgcctgcaagacctcacgccctcccttgcacttgtttcaa

SEQ ID NO: 20199 - DNA, 75 bp, Homo sapiens
agtaaaaagacagatgcctgcaagacctcacgccctcccttgcacttgtttcaacgtgattgccaatgtttgtac

SEQ ID NO: 20200 - DNA, 76 bp, Homo sapiens
acagatgcctgcaagacctcacgccctcccttgcacttgtttcaacgtgattgccaatgtttgtactcttcaaagt

SEQ ID NO: 20201 - DNA, 71 bp, Homo sapiens
aagacctcacgccctcccttgcacttgtttcaacgtgattgccaatgtttgtactcttcaaagttccaagg

SEQ ID NO: 20202 - DNA, 71 bp, Homo sapiens
acgccctcccttgcacttgtttcaacgtgattgccaatgtttgtactcttcaaagttccaagggtcataaa

SEQ ID NO: 20203 - DNA, 73 bp, Homo sapiens
ttgcacttgtttcaacgtgattgccaatgtttgtactcttcaaagttccaagggtcataaaacagctttgtat

SEQ ID NO: 20204 - DNA, 74 bp, Homo sapiens
tgtttcaacgtgattgccaatgtttgtactcttcaaagttccaagggtcataaaacagctttgtattagctgaa

SEQ ID NO: 20205 - DNA, 75 bp, Homo sapiens
attgccaatgtttgtactcttcaaagttccaagggtcataaaacagctttgtattagctgaatgacttgctttca

SEQ ID NO: 20206 - DNA, 73 bp, Homo sapiens
ttgtactcttcaaagttccaagggtcataaaacagctttgtattagctgaatgacttgctttcaacttcggta

SEQ ID NO: 20207 - DNA, 73 bp, Homo sapiens
ttcaaagttccaagggtcataaaacagctttgtattagctgaatgacttgctttcaacttcggtatcacggat

SEQ ID NO: 20208 - DNA, 73 bp, Homo sapiens
aagggtcataaaacagctttgtattagctgaatgacttgctttcaacttcggtatcacggattccattcaaat

SEQ ID NO: 20209 - DNA, 75 bp, Homo sapiens
ttgtattagctgaatgacttgctttcaacttcggtatcacggattccattcaaattcactgtccttttttctcta

SEQ ID NO: 20210 - DNA, 72 bp, Homo sapiens
aatgacttgctttcaacttcggtatcacggattccattcaaattcactgtccttttttctctacctgaggtg

SEQ ID NO: 20211 - DNA, 72 bp, Homo sapiens
ctttcaacttcggtatcacggattccattcaaattcactgtccttttttctctacctgaggtggaggtgcag

SEQ ID NO: 20212 - DNA, 74 bp, Homo sapiens
gtatcacggattccattcaaattcactgtccttttttctctacctgaggtggaggtgcaggtttgccattaaga

SEQ ID NO: 20213 - DNA, 76 bp, Homo sapiens
attccattcaaattcactgtccttttttctctacctgaggtggaggtgcaggtttgccattaagagccatctgcaa

SEQ ID NO: 20214 - DNA, 74 bp, Homo sapiens
aaattcactgtccttttttctctacctgaggtggaggtgcaggtttgccattaagagccatctgcaagggcgta

SEQ ID NO: 20215 - DNA, 79 bp, Homo sapiens
tttttctctacctgaggtggaggtgcaggtttgccattaagagccatctgcaagggcgtagtctggcttgcaggaggca

SEQ ID NO: 20216 - DNA, 79 bp, Homo sapiens
aggtgcaggtttgccattaagagccatctgcaagggcgtagtctggcttgcaggaggcaaaggagcagtcttcaacttc

SEQ ID NO: 20217 - DNA, 79 bp, Homo sapiens
tttgccattaagagccatctgcaagggcgtagtctggcttgcaggaggcaaaggagcagtcttcaacttctttgtacta

SEQ ID NO: 20218 - DNA, 76 bp, Homo sapiens
attaagagccatctgcaagggcgtagtctggcttgcaggaggcaaaggagcagtcttcaacttctttgtactagtt

SEQ ID NO: 20219 - DNA, 75 bp, Homo sapiens
atctgcaagggcgtagtctggcttgcaggaggcaaaggagcagtcttcaacttctttgtactagttttagacgga

SEQ ID NO: 20220 - DNA, 75 bp, Homo sapiens
cgtagtctggcttgcaggaggcaaaggagcagtcttcaacttctttgtactagttttagacggatgctcctcctc

SEQ ID NO: 20221 - DNA, 77 bp, Homo sapiens
ttgcaggaggcaaaggagcagtcttcaacttctttgtactagttttagacggatgctcctcctcctcttcatcagaa

SEQ ID NO: 20222 - DNA, 74 bp, Homo sapiens
aaaggagcagtcttcaacttctttgtactagttttagacggatgctcctcctcctcttcatcagaatcctgaag

SEQ ID NO: 20223 - DNA, 75 bp, Homo sapiens
ttcaacttctttgtactagttttagacggatgctcctcctcctcttcatcagaatcctgaaggccatacttagaa

SEQ ID NO: 20224 - DNA, 74 bp, Homo sapiens
ttctttgtactagttttagacggatgctcctcctcctcttcatcagaatcctgaaggccatacttagaaaaatg

SEQ ID NO: 20225 - DNA, 74 bp, Homo sapiens
atgctcctcctcctcttcatcagaatcctgaaggccatacttagaaaaatgggagacctaaggaagagaagaac

SEQ ID NO: 20226 - DNA, 72 bp, Homo sapiens
tcctcttcatcagaatcctgaaggccatacttagaaaaatgggagacctaaggaagagaagaaccccacaaa

SEQ ID NO: 20227 - DNA, 67 bp, Homo sapiens
agaatcctgaaggccatacttagaaaaatgggagacctaaggaagagaagaaccccacaaaacaact

SEQ ID NO: 20228 - DNA, 67 bp, Homo sapiens
ctccaaatatagtttataaaagtctgaactgggttaaatgactataccttaaacacccaagaaccag

SEQ ID NO: 20229 - DNA, 67 bp, Homo sapiens
tagtttataaaagtctgaactgggttaaatgactataccttaaacacccaagaaccagtttcaggcc

SEQ ID NO: 20230 - DNA, 66 bp, Homo sapiens
aagtctgaactgggttaaatgactataccttaaacacccaagaaccagtttcaggccggtattctt

SEQ ID NO: 20231 - DNA, 67 bp, Homo sapiens
aactgggttaaatgactataccttaaacacccaagaaccagtttcaggccggtattctttgaattga

SEQ ID NO: 20232 - DNA, 69 bp, Homo sapiens
aatgactataccttaaacacccaagaaccagtttcaggccggtattctttgaattgagctccctgtttc

SEQ ID NO: 20233 - DNA, 69 bp, Homo sapiens
ttaaacacccaagaaccagtttcaggccggtattctttgaattgagctccctgtttccttgaaactgct

SEQ ID NO: 20234 - DNA, 70 bp, Homo sapiens
aagaaccagtttcaggccggtattctttgaattgagctccctgtttccttgaaactgcttccaatcttcc

SEQ ID NO: 20235 - DNA, 74 bp, Homo sapiens
tttcaggccggtattctttgaattgagctccctgtttccttgaaactgcttccaatcttccttcatagttgata

SEQ ID NO: 20236 - DNA, 79 bp, Homo sapiens
tattctttgaattgagctccctgtttccttgaaactgcttccaatcttccttcatagttgatatcagcaaggcgatctg

SEQ ID NO: 20237 - DNA, 78 bp, Homo sapiens
attgagctccctgtttccttgaaactgcttccaatcttccttcatagttgatatcagcaaggcgatctgggctcttta

SEQ ID NO: 20238 - DNA, 76 bp, Homo sapiens
tttccttgaaactgcttccaatcttccttcatagttgatatcagcaaggcgatctgggctctttattaaacaacga

SEQ ID NO: 20239 - DNA, 76 bp, Homo sapiens
aactgcttccaatcttccttcatagttgatatcagcaaggcgatctgggctctttattaaacaacgagatgtttta

SEQ ID NO: 20240 - DNA, 77 bp, Homo sapiens
ttccaatcttccttcatagttgatatcagcaaggcgatctgggctctttattaaacaacgagatgttttatctgttg

SEQ ID NO: 20241 - DNA, 78 bp, Homo sapiens
ttcatagttgatatcagcaaggcgatctgggctctttattaaacaacgagatgttttatctgttggccaaactccatc

SEQ ID NO: 20242 - DNA, 76 bp, Homo sapiens
atatcagcaaggcgatctgggctctttattaaacaacgagatgttttatctgttggccaaactccatccaatgtaa

SEQ ID NO: 20243 - DNA, 73 bp, Homo sapiens
aaggcgatctgggctctttattaaacaacgagatgttttatctgttggccaaactccatccaatgtaacttca

SEQ ID NO: 20244 - DNA, 72 bp, Homo sapiens
tctttattaaacaacgagatgttttatctgttggccaaactccatccaatgtaacttcagccttcctgtaaa

SEQ ID NO: 20245 - DNA, 72 bp, Homo sapiens
ttaaacaacgagatgttttatctgttggccaaactccatccaatgtaacttcagccttcctgtaaaacataa

SEQ ID NO: 20246 - DNA, 70 bp, Homo sapiens
gttttatctgttggccaaactccatccaatgtaacttcagccttcctgtaaaacataaccaattaaagta

SEQ ID NO: 20247 - DNA, 70 bp, Homo sapiens
tgttggccaaactccatccaatgtaacttcagccttcctgtaaaacataaccaattaaagtaaccaatta

SEQ ID NO: 20248 - DNA, 72 bp, Homo sapiens
aaattgtgatttagctgataattttctgtatgtacataaactcttacctatttagcccttcacccacaggtg

SEQ ID NO: 20249 - DNA, 70 bp, Homo sapiens
gatttagctgataattttctgtatgtacataaactcttacctatttagcccttcacccacaggtggtttt

SEQ ID NO: 20250 - DNA, 70 bp, Homo sapiens
ttttctgtatgtacataaactcttacctatttagcccttcacccacaggtggtttttggttatcatctaa

SEQ ID NO: 20251 - DNA, 71 bp, Homo sapiens
tatgtacataaactcttacctatttagcccttcacccacaggtggtttttggttatcatctaagtagacaa

SEQ ID NO: 20252 - DNA, 68 bp, Homo sapiens
taaactcttacctatttagcccttcacccacaggtggtttttggttatcatctaagtagacaactact

SEQ ID NO: 20253 - DNA, 69 bp, Homo sapiens
tttagcccttcacccacaggtggtttttggttatcatctaagtagacaactacttctttcctccggata

SEQ ID NO: 20254 - DNA, 75 bp, Homo sapiens
ttcacccacaggtggtttttggttatcatctaagtagacaactacttctttcctccggatatgcacaatatcatc

SEQ ID NO: 20255 - DNA, 73 bp, Homo sapiens
ggtttttggttatcatctaagtagacaactacttctttcctccggatatgcacaatatcatccaaatttagat

SEQ ID NO: 20256 - DNA, 76 bp, Homo sapiens
ttggttatcatctaagtagacaactacttctttcctccggatatgcacaatatcatccaaatttagatttgtcaaa

SEQ ID NO: 20257 - DNA, 76 bp, Homo sapiens
taagtagacaactacttctttcctccggatatgcacaatatcatccaaatttagatttgtcaaattcacatctcct

SEQ ID NO: 20258 - DNA, 76 bp, Homo sapiens
ctacttctttcctccggatatgcacaatatcatccaaatttagatttgtcaaattcacatctccttcaaaatagat

SEQ ID NO: 20259 - DNA, 78 bp, Homo sapiens
tcctccggatatgcacaatatcatccaaatttagatttgtcaaattcacatctccttcaaaatagattgaaccataac

SEQ ID NO: 20260 - DNA, 78 bp, Homo sapiens
gcacaatatcatccaaatttagatttgtcaaattcacatctccttcaaaatagattgaaccataacctataaatcaga

SEQ ID NO: 20261 - DNA, 76 bp, Homo sapiens
atcatccaaatttagatttgtcaaattcacatctccttcaaaatagattgaaccataacctataaatcagagcaaa

SEQ ID NO: 20262 - DNA, 74 bp, Homo sapiens
atttagatttgtcaaattcacatctccttcaaaatagattgaaccataacctataaatcagagcaaatagttaa

SEQ ID NO: 20263 - DNA, 74 bp, Homo sapiens
gtcaaattcacatctccttcaaaatagattgaaccataacctataaatcagagcaaatagttaaaaattcattc

SEQ ID NO: 20264 - DNA, 74 bp, Homo sapiens
aataaggtgcaactctctggcttaatcactaagtgctaaactcacacttacctttccgaccaatagtgaaatca

SEQ ID NO: 20265 - DNA, 76 bp, Homo sapiens
aactctctggcttaatcactaagtgctaaactcacacttacctttccgaccaatagtgaaatcagagacaatgcac

SEQ ID NO: 20266 - DNA, 74 bp, Homo sapiens
ttaatcactaagtgctaaactcacacttacctttccgaccaatagtgaaatcagagacaatgcactctcctttt

SEQ ID NO: 20267 - DNA, 72 bp, Homo sapiens
ctaaactcacacttacctttccgaccaatagtgaaatcagagacaatgcactctcctttttcattggtaatt

SEQ ID NO: 20268 - DNA, 72 bp, Homo sapiens
acacttacctttccgaccaatagtgaaatcagagacaatgcactctcctttttcattggtaattttagcaag

SEQ ID NO: 20269 - DNA, 77 bp, Homo sapiens
tttccgaccaatagtgaaatcagagacaatgcactctcctttttcattggtaattttagcaaggtcatccatagatg

SEQ ID NO: 20270 - DNA, 78 bp, Homo sapiens
aatagtgaaatcagagacaatgcactctcctttttcattggtaattttagcaaggtcatccatagatggaatagtata

SEQ ID NO: 20271 - DNA, 77 bp, Homo sapiens
atcagagacaatgcactctcctttttcattggtaattttagcaaggtcatccatagatggaatagtatagtaaccaa

SEQ ID NO: 20272 - DNA, 73 bp, Homo sapiens
ctctcctttttcattggtaattttagcaaggtcatccatagatggaatagtatagtaaccaaccttagtgaga

SEQ ID NO: 20273 - DNA, 76 bp, Homo sapiens
tcattggtaattttagcaaggtcatccatagatggaatagtatagtaaccaaccttagtgagaataatacctgtga

SEQ ID NO: 20274 - DNA, 74 bp, Homo sapiens
ggtaattttagcaaggtcatccatagatggaatagtatagtaaccaaccttagtgagaataatacctgtgacaa

SEQ ID NO: 20275 - DNA, 72 bp, Homo sapiens
gcaaggtcatccatagatggaatagtatagtaaccaaccttagtgagaataatacctgtgacaaaaaaaaaa

SEQ ID NO: 20276 - DNA, 78 bp, Homo sapiens
atctcgaatgactggtaagagattaaacatgcaccaatctgaacctgacctgctgggtgcatatggtaagaattattt

SEQ ID NO: 20277 - DNA, 76 bp, Homo sapiens
actggtaagagattaaacatgcaccaatctgaacctgacctgctgggtgcatatggtaagaattattttctatttc

SEQ ID NO: 20278 - DNA, 77 bp, Homo sapiens
agattaaacatgcaccaatctgaacctgacctgctgggtgcatatggtaagaattattttctatttcttctcggtca

SEQ ID NO: 20279 - DNA, 79 bp, Homo sapiens
atgcaccaatctgaacctgacctgctgggtgcatatggtaagaattattttctatttcttctcggtcatcctgaagtga

SEQ ID NO: 20280 - DNA, 78 bp, Homo sapiens
aacctgacctgctgggtgcatatggtaagaattattttctatttcttctcggtcatcctgaagtgactcatcatgaaa

SEQ ID NO: 20281 - DNA, 76 bp, Homo sapiens
tgggtgcatatggtaagaattattttctatttcttctcggtcatcctgaagtgactcatcatgaaaagacgtttct

SEQ ID NO: 20282 - DNA, 76 bp, Homo sapiens
tatggtaagaattattttctatttcttctcggtcatcctgaagtgactcatcatgaaaagacgtttcttcactgct

SEQ ID NO: 20283 - DNA, 75 bp, Homo sapiens
aattattttctatttcttctcggtcatcctgaagtgactcatcatgaaaagacgtttcttcactgcttccttcca

SEQ ID NO: 20284 - DNA, 78 bp, Homo sapiens
tatttcttctcggtcatcctgaagtgactcatcatgaaaagacgtttcttcactgcttccttccagcccatttcgcaa

SEQ ID NO: 20285 - DNA, 82 bp, Homo sapiens
tcatcctgaagtgactcatcatgaaaagacgtttcttcactgcttccttccagcccatttcgcaaagcagcacgcatgttta

SEQ ID NO: 20286 - DNA, 80 bp, Homo sapiens
aagtgactcatcatgaaaagacgtttcttcactgcttccttccagcccatttcgcaaagcagcacgcatgtttaatgcaa

SEQ ID NO: 20287 - DNA, 79 bp, Homo sapiens
atgaaaagacgtttcttcactgcttccttccagcccatttcgcaaagcagcacgcatgtttaatgcaacaatggtatca

SEQ ID NO: 20288 - DNA, 80 bp, Homo sapiens
aagacgtttcttcactgcttccttccagcccatttcgcaaagcagcacgcatgtttaatgcaacaatggtatcatccaca

SEQ ID NO: 20289 - DNA, 85 bp, Homo sapiens
ttcactgcttccttccagcccatttcgcaaagcagcacgcatgtttaatgcaacaatggtatcatccacactgttgctgttgctg

SEQ ID NO: 20290 - DNA, 82 bp, Homo sapiens
cttccagcccatttcgcaaagcagcacgcatgtttaatgcaacaatggtatcatccacactgttgctgttgctgtgtttatt

SEQ ID NO: 20291 - DNA, 82 bp, Homo sapiens
atttcgcaaagcagcacgcatgtttaatgcaacaatggtatcatccacactgttgctgttgctgtgtttatttccagcactt

SEQ ID NO: 20292 - DNA, 80 bp, Homo sapiens
cacgcatgtttaatgcaacaatggtatcatccacactgttgctgttgctgtgtttatttccagcactttctggggtttga

SEQ ID NO: 20293 - DNA, 78 bp, Homo sapiens
tttaatgcaacaatggtatcatccacactgttgctgttgctgtgtttatttccagcactttctggggtttgaggaata

SEQ ID NO: 20294 - DNA, 74 bp, Homo sapiens
aacaatggtatcatccacactgttgctgttgctgtgtttatttccagcactttctggggtttgaggaataggtt

SEQ ID NO: 20295 - DNA, 75 bp, Homo sapiens
atcatccacactgttgctgttgctgtgtttatttccagcactttctggggtttgaggaataggtttggcaatagg

SEQ ID NO: 20296 - DNA, 72 bp, Homo sapiens
tgctgttgctgtgtttatttccagcactttctggggtttgaggaataggtttggcaatagggttagtataaa

SEQ ID NO: 20297 - DNA, 69 bp, Homo sapiens
tgtttatttccagcactttctggggtttgaggaataggtttggcaatagggttagtataaaaatgtgaa

SEQ ID NO: 20298 - DNA, 68 bp, Homo sapiens
atttccagcactttctggggtttgaggaataggtttggcaatagggttagtataaaaatgtgaaacaa

SEQ ID NO: 20299 - DNA, 68 bp, Homo sapiens
tttctggggtttgaggaataggtttggcaatagggttagtataaaaatgtgaaacaagggaatcttca

SEQ ID NO: 20300 - DNA, 73 bp, Homo sapiens
tttgaggaataggtttggcaatagggttagtataaaaatgtgaaacaagggaatcttcatctccatcctgctg

SEQ ID NO: 20301 - DNA, 77 bp, Homo sapiens
gtttggcaatagggttagtataaaaatgtgaaacaagggaatcttcatctccatcctgctggtgattctcatcaaca

SEQ ID NO: 20302 - DNA, 77 bp, Homo sapiens
gttagtataaaaatgtgaaacaagggaatcttcatctccatcctgctggtgattctcatcaacaggtttgcttagga

SEQ ID NO: 20303 - DNA, 75 bp, Homo sapiens
aaaatgtgaaacaagggaatcttcatctccatcctgctggtgattctcatcaacaggtttgcttaggaaactaaa

SEQ ID NO: 20304 - DNA, 76 bp, Homo sapiens
aaacaagggaatcttcatctccatcctgctggtgattctcatcaacaggtttgcttaggaaactaaatctgcaaag

SEQ ID NO: 20305 - DNA, 76 bp, Homo sapiens
aatcttcatctccatcctgctggtgattctcatcaacaggtttgcttaggaaactaaatctgcaaaggaaaagaaa

SEQ ID NO: 20306 - DNA, 73 bp, Homo sapiens
atcctgctggtgattctcatcaacaggtttgcttaggaaactaaatctgcaaaggaaaagaaataatacctta

SEQ ID NO: 20307 - DNA, 77 bp, Homo sapiens
atgagactataactctctactaagaagaactcaaaacagaattcagtgtacctctctccattttctggatattcaga

SEQ ID NO: 20308 - DNA, 77 bp, Homo sapiens
tctactaagaagaactcaaaacagaattcagtgtacctctctccattttctggatattcagatggtgaagctagatt

SEQ ID NO: 20309 - DNA, 78 bp, Homo sapiens
taagaagaactcaaaacagaattcagtgtacctctctccattttctggatattcagatggtgaagctagattttctga

SEQ ID NO: 20310 - DNA, 78 bp, Homo sapiens
aaacagaattcagtgtacctctctccattttctggatattcagatggtgaagctagattttctgaatcacgattaaca

SEQ ID NO: 20311 - DNA, 78 bp, Homo sapiens
attcagtgtacctctctccattttctggatattcagatggtgaagctagattttctgaatcacgattaacaggagaaa

SEQ ID NO: 20312 - DNA, 79 bp, Homo sapiens
tctccattttctggatattcagatggtgaagctagattttctgaatcacgattaacaggagaaaagagattgctattat

SEQ ID NO: 20313 - DNA, 77 bp, Homo sapiens
tggatattcagatggtgaagctagattttctgaatcacgattaacaggagaaaagagattgctattattaaggttct

SEQ ID NO: 20314 - DNA, 75 bp, Homo sapiens
cagatggtgaagctagattttctgaatcacgattaacaggagaaaagagattgctattattaaggttcttcaaaa

SEQ ID NO: 20315 - DNA, 73 bp, Homo sapiens
tgaagctagattttctgaatcacgattaacaggagaaaagagattgctattattaaggttcttcaaaaccaac

SEQ ID NO: 20316 - DNA, 73 bp, Homo sapiens
ttctgaatcacgattaacaggagaaaagagattgctattattaaggttcttcaaaaccaacttcttaatgctc

SEQ ID NO: 20317 - DNA, 71 bp, Homo sapiens
cacgattaacaggagaaaagagattgctattattaaggttcttcaaaaccaacttcttaatgctcttccta

SEQ ID NO: 20318 - DNA, 70 bp, Homo sapiens
ggagaaaagagattgctattattaaggttcttcaaaaccaacttcttaatgctcttcctataaacaagaa

SEQ ID NO: 20319 - DNA, 69 bp, Homo sapiens
gattgctattattaaggttcttcaaaaccaacttcttaatgctcttcctataaacaagaaaccaaaaga

SEQ ID NO: 20320 - DNA, 67 bp, Homo sapiens
tattaaggttcttcaaaaccaacttcttaatgctcttcctataaacaagaaaccaaaagaagaagaa

SEQ ID NO: 20321 - DNA, 74 bp, Homo sapiens
tatcagtattttacacttaatttctgttaacaaaaataaactcacttgggcatgaatgctccattggctaggga

SEQ ID NO: 20322 - DNA, 76 bp, Homo sapiens
cttaatttctgttaacaaaaataaactcacttgggcatgaatgctccattggctagggatggttcatcgtcatcca

SEQ ID NO: 20323 - DNA, 81 bp, Homo sapiens
caaaaataaactcacttgggcatgaatgctccattggctagggatggttcatcgtcatccagcccatcaaagagatgtgac

SEQ ID NO: 20324 - DNA, 83 bp, Homo sapiens
ataaactcacttgggcatgaatgctccattggctagggatggttcatcgtcatccagcccatcaaagagatgtgacttggctg

SEQ ID NO: 20325 - DNA, 84 bp, Homo sapiens
catgaatgctccattggctagggatggttcatcgtcatccagcccatcaaagagatgtgacttggctgtgcctgttgtttgtaa

SEQ ID NO: 20326 - DNA, 80 bp, Homo sapiens
tccattggctagggatggttcatcgtcatccagcccatcaaagagatgtgacttggctgtgcctgttgtttgtaaagcct

SEQ ID NO: 20327 - DNA, 78 bp, Homo sapiens
tagggatggttcatcgtcatccagcccatcaaagagatgtgacttggctgtgcctgttgtttgtaaagcctttggccg

SEQ ID NO: 20328 - DNA, 79 bp, Homo sapiens
ttcatcgtcatccagcccatcaaagagatgtgacttggctgtgcctgttgtttgtaaagcctttggccggactctagtg

SEQ ID NO: 20329 - DNA, 77 bp, Homo sapiens
atccagcccatcaaagagatgtgacttggctgtgcctgttgtttgtaaagcctttggccggactctagtggcagggc

SEQ ID NO: 20330 - DNA, 74 bp, Homo sapiens
atcaaagagatgtgacttggctgtgcctgttgtttgtaaagcctttggccggactctagtggcagggcggggtg

SEQ ID NO: 20331 - DNA, 71 bp, Homo sapiens
acttggctgtgcctgttgtttgtaaagcctttggccggactctagtggcagggcggggtgtcagtttataa

SEQ ID NO: 20332 - DNA, 70 bp, Homo sapiens
cctgttgtttgtaaagcctttggccggactctagtggcagggcggggtgtcagtttataatgagtaggtg

SEQ ID NO: 20333 - DNA, 71 bp, Homo sapiens
cctttggccggactctagtggcagggcggggtgtcagtttataatgagtaggtgtagtaagagccttctgg

SEQ ID NO: 20334 - DNA, 74 bp, Homo sapiens
actctagtggcagggcggggtgtcagtttataatgagtaggtgtagtaagagccttctgggctgctggatttgt

SEQ ID NO: 20335 - DNA, 72 bp, Homo sapiens
agggcggggtgtcagtttataatgagtaggtgtagtaagagccttctgggctgctggatttgttggtttcaa

SEQ ID NO: 20336 - DNA, 75 bp, Homo sapiens
tcagtttataatgagtaggtgtagtaagagccttctgggctgctggatttgttggtttcaatctctgaaaaacaa

SEQ ID NO: 20337 - DNA, 77 bp, Homo sapiens
tataatgagtaggtgtagtaagagccttctgggctgctggatttgttggtttcaatctctgaaaaacaaaagcatca

SEQ ID NO: 20338 - DNA, 72 bp, Homo sapiens
tagtaagagccttctgggctgctggatttgttggtttcaatctctgaaaaacaaaagcatcaaggaaatttt

SEQ ID NO: 20339 - DNA, 70 bp, Homo sapiens
cttctgggctgctggatttgttggtttcaatctctgaaaaacaaaagcatcaaggaaatttttggtttac

SEQ ID NO: 20340 - DNA, 69 bp, Homo sapiens
gggctgctggatttgttggtttcaatctctgaaaaacaaaagcatcaaggaaatttttggtttacttta

SEQ ID NO: 20341 - DNA, 70 bp, Homo sapiens
ttggtttcaatctctgaaaaacaaaagcatcaaggaaatttttggtttactttaaatgtactgcactggc

SEQ ID NO: 20342 - DNA, 69 bp, Homo sapiens
caatctctgaaaaacaaaagcatcaaggaaatttttggtttactttaaatgtactgcactggccttaaa

SEQ ID NO: 20343 - DNA, 69 bp, Homo sapiens
acaaaagcatcaaggaaatttttggtttactttaaatgtactgcactggccttaaaaatcacaagacca

SEQ ID NO: 20344 - DNA, 71 bp, Homo sapiens
agcatcaaggaaatttttggtttactttaaatgtactgcactggccttaaaaatcacaagaccagatttca

SEQ ID NO: 20345 - DNA, 73 bp, Homo sapiens
tttggtttactttaaatgtactgcactggccttaaaaatcacaagaccagatttcaatcctcatctttgtcat

SEQ ID NO: 20346 - DNA, 77 bp, Homo sapiens
ttactttaaatgtactgcactggccttaaaaatcacaagaccagatttcaatcctcatctttgtcattcacctgcta

SEQ ID NO: 20347 - DNA, 80 bp, Homo sapiens
atgtactgcactggccttaaaaatcacaagaccagatttcaatcctcatctttgtcattcacctgctagatacctgttga

SEQ ID NO: 20348 - DNA, 76 bp, Homo sapiens
atttcaatcctcatctttgtcattcacctgctagatacctgttgaagtctctgttcccataaaacaaggatgttaa

SEQ ID NO: 20349 - DNA, 74 bp, Homo sapiens
ttgtcattcacctgctagatacctgttgaagtctctgttcccataaaacaaggatgttaacacccaactttgta

SEQ ID NO: 20350 - DNA, 73 bp, Homo sapiens
ctagatacctgttgaagtctctgttcccataaaacaaggatgttaacacccaactttgtacatgttgagtatc

SEQ ID NO: 20351 - DNA, 73 bp, Homo sapiens
tacctgttgaagtctctgttcccataaaacaaggatgttaacacccaactttgtacatgttgagtatccctca

SEQ ID NO: 20352 - DNA, 73 bp, Homo sapiens
agtctctgttcccataaaacaaggatgttaacacccaactttgtacatgttgagtatccctcatccaaaatgc

SEQ ID NO: 20353 - DNA, 72 bp, Homo sapiens
ataaaacaaggatgttaacacccaactttgtacatgttgagtatccctcatccaaaatgcttgggtccagaa

SEQ ID NO: 20354 - DNA, 74 bp, Homo sapiens
tttgcattatacttaccagttgagtatcccaaatgtgaaaatccaaaatccaaaatgtcccaatgagcatttct

SEQ ID NO: 20355 - DNA, 72 bp, Homo sapiens
acttaccagttgagtatcccaaatgtgaaaatccaaaatccaaaatgtcccaatgagcatttcttttgaatg

SEQ ID NO: 20356 - DNA, 76 bp, Homo sapiens
ccagttgagtatcccaaatgtgaaaatccaaaatccaaaatgtcccaatgagcatttcttttgaatgtcatgtcag

SEQ ID NO: 20357 - DNA, 76 bp, Homo sapiens
caaatgtgaaaatccaaaatccaaaatgtcccaatgagcatttcttttgaatgtcatgtcagtgcaaagttttgga

SEQ ID NO: 20358 - DNA, 72 bp, Homo sapiens
ttttggattttcaatttttggatttgggaggcattatctgtgtgtatgtgtgaatactaaccgaactgtctt

SEQ ID NO: 20359 - DNA, 75 bp, Homo sapiens
ttcaatttttggatttgggaggcattatctgtgtgtatgtgtgaatactaaccgaactgtctttattgttctaga

SEQ ID NO: 20360 - DNA, 75 bp, Homo sapiens
tcaatttttggatttgggaggcattatctgtgtgtatgtgtgaatactaaccgaactgtctttattgttctagaa

SEQ ID NO: 20361 - DNA, 75 bp, Homo sapiens
gatttgggaggcattatctgtgtgtatgtgtgaatactaaccgaactgtctttattgttctagaactgattttta

SEQ ID NO: 20362 - DNA, 76 bp, Homo sapiens
ttatctgtgtgtatgtgtgaatactaaccgaactgtctttattgttctagaactgatttttactcatctttccagc

SEQ ID NO: 20363 - DNA, 74 bp, Homo sapiens
ctgtgtgtatgtgtgaatactaaccgaactgtctttattgttctagaactgatttttactcatctttccagccc

SEQ ID NO: 20364 - DNA, 70 bp, Homo sapiens
gtgaatactaaccgaactgtctttattgttctagaactgatttttactcatctttccagcccccatttaa

SEQ ID NO: 20365 - DNA, 69 bp, Homo sapiens
gaatactaaccgaactgtctttattgttctagaactgatttttactcatctttccagcccccatttaaa

SEQ ID NO: 20366 - DNA, 67 bp, Homo sapiens
actaaccgaactgtctttattgttctagaactgatttttactcatctttccagcccccatttaaaat

SEQ ID NO: 20367 - DNA, 71 bp, Homo sapiens
ttattgttctagaactgatttttactcatctttccagcccccatttaaaattatttgtctgacatctttta

SEQ ID NO: 20368 - DNA, 71 bp, Homo sapiens
gaactgatttttactcatctttccagcccccatttaaaattatttgtctgacatcttttaaaatgtaatca

SEQ ID NO: 20369 - DNA, 74 bp, Homo sapiens
tactcatctttccagcccccatttaaaattatttgtctgacatcttttaaaatgtaatcaagataatgaatctg

SEQ ID NO: 20370 - DNA, 74 bp, Homo sapiens
cagcccccatttaaaattatttgtctgacatcttttaaaatgtaatcaagataatgaatctgttagctggacag

SEQ ID NO: 20371 - DNA, 77 bp, Homo sapiens
ttaaaattatttgtctgacatcttttaaaatgtaatcaagataatgaatctgttagctggacagtggaagcgtgcac

SEQ ID NO: 20372 - DNA, 78 bp, Homo sapiens
attatttgtctgacatcttttaaaatgtaatcaagataatgaatctgttagctggacagtggaagcgtgcacctgtaa

SEQ ID NO: 20373 - DNA, 70 bp, Homo sapiens
gagcgagactctttccccaaaaaaatccaaagatgatgaatctgaaaaaagttctgtaaattaaaatgta

SEQ ID NO: 20374 - DNA, 68 bp, Homo sapiens
agactctttccccaaaaaaatccaaagatgatgaatctgaaaaaagttctgtaaattaaaatgtacta

SEQ ID NO: 20375 - DNA, 71 bp, Homo sapiens
aaaaatccaaagatgatgaatctgaaaaaagttctgtaaattaaaatgtactaacacaacatattaatata

SEQ ID NO: 20376 - DNA, 75 bp, Homo sapiens
agatgatgaatctgaaaaaagttctgtaaattaaaatgtactaacacaacatattaatatatcttgtccattctc

SEQ ID NO: 20377 - DNA, 73 bp, Homo sapiens
atctgaaaaaagttctgtaaattaaaatgtactaacacaacatattaatatatcttgtccattctcttcatcc

SEQ ID NO: 20378 - DNA, 76 bp, Homo sapiens
gttctgtaaattaaaatgtactaacacaacatattaatatatcttgtccattctcttcatcctatgagagtttagc

SEQ ID NO: 20379 - DNA, 81 bp, Homo sapiens
ttaaaatgtactaacacaacatattaatatatcttgtccattctcttcatcctatgagagtttagcttgcaatcattctgc

SEQ ID NO: 20380 - DNA, 82 bp, Homo sapiens
atgtactaacacaacatattaatatatcttgtccattctcttcatcctatgagagtttagcttgcaatcattctgctttgaa

SEQ ID NO: 20381 - DNA, 80 bp, Homo sapiens
acaacatattaatatatcttgtccattctcttcatcctatgagagtttagcttgcaatcattctgctttgaaaaacagta

SEQ ID NO: 20382 - DNA, 81 bp, Homo sapiens
tatcttgtccattctcttcatcctatgagagtttagcttgcaatcattctgctttgaaaaacagtatttatgttcatttga

SEQ ID NO: 20383 - DNA, 80 bp, Homo sapiens
gtccattctcttcatcctatgagagtttagcttgcaatcattctgctttgaaaaacagtatttatgttcatttgatgaaa

SEQ ID NO: 20384 - DNA, 80 bp, Homo sapiens
catcctatgagagtttagcttgcaatcattctgctttgaaaaacagtatttatgttcatttgatgaaaacatgataccaa

SEQ ID NO: 20385 - DNA, 78 bp, Homo sapiens
cctatgagagtttagcttgcaatcattctgctttgaaaaacagtatttatgttcatttgatgaaaacatgataccaaa

SEQ ID NO: 20386 - DNA, 76 bp, Homo sapiens
gagagtttagcttgcaatcattctgctttgaaaaacagtatttatgttcatttgatgaaaacatgataccaaaaaa

SEQ ID NO: 20387 - DNA, 76 bp, Homo sapiens
gcttgcaatcattctgctttgaaaaacagtatttatgttcatttgatgaaaacatgataccaaaaaaatcctaagc

SEQ ID NO: 20388 - DNA, 76 bp, Homo sapiens
tcattctgctttgaaaaacagtatttatgttcatttgatgaaaacatgataccaaaaaaatcctaagccatagaca

SEQ ID NO: 20389 - DNA, 73 bp, Homo sapiens
gctttgaaaaacagtatttatgttcatttgatgaaaacatgataccaaaaaaatcctaagccatagacattac

SEQ ID NO: 20390 - DNA, 71 bp, Homo sapiens
tttatgttcatttgatgaaaacatgataccaaaaaaatcctaagccatagacattacttttcaattaaacc

SEQ ID NO: 20391 - DNA, 71 bp, Homo sapiens
tgttcatttgatgaaaacatgataccaaaaaaatcctaagccatagacattacttttcaattaaacccaaa

SEQ ID NO: 20392 - DNA, 70 bp, Homo sapiens
gttcatttgatgaaaacatgataccaaaaaaatcctaagccatagacattacttttcaattaaacccaaa

SEQ ID NO: 20393 - DNA, 69 bp, Homo sapiens
acatgataccaaaaaaatcctaagccatagacattacttttcaattaaacccaaaatcttatacttcaa

SEQ ID NO: 20394 - DNA, 67 bp, Homo sapiens
ataccaaaaaaatcctaagccatagacattacttttcaattaaacccaaaatcttatacttcaagaa

SEQ ID NO: 20395 - DNA, 71 bp, Homo sapiens
cctaagccatagacattacttttcaattaaacccaaaatcttatacttcaagaaaaactgagattctgtca

SEQ ID NO: 20396 - DNA, 77 bp, Homo sapiens
ccaaaatcttatacttcaagaaaaactgagattctgtcatgaattaatattcaacttctatgtaatgcaagttgctc

SEQ ID NO: 20397 - DNA, 75 bp, Homo sapiens
gaaaaactgagattctgtcatgaattaatattcaacttctatgtaatgcaagttgctctggggaaaaaaaaggca

SEQ ID NO: 20398 - DNA, 75 bp, Homo sapiens
gtcatgaattaatattcaacttctatgtaatgcaagttgctctggggaaaaaaaaggcagatactagcttgtatt

SEQ ID NO: 20399 - DNA, 73 bp, Homo sapiens
ctatgtaatgcaagttgctctggggaaaaaaaaggcagatactagcttgtatttatccatcttttagtaaaca

SEQ ID NO: 20400 - DNA, 72 bp, Homo sapiens
tgcaagttgctctggggaaaaaaaaggcagatactagcttgtatttatccatcttttagtaaacattaataa

SEQ ID NO: 20401 - DNA, 68 bp, Homo sapiens
gggaaaaaaaaggcagatactagcttgtatttatccatcttttagtaaacattaataattaaacatta

SEQ ID NO: 20402 - DNA, 71 bp, Homo sapiens
ggcagatactagcttgtatttatccatcttttagtaaacattaataattaaacattaagtcaaactctggg

SEQ ID NO: 20403 - DNA, 70 bp, Homo sapiens
ctagcttgtatttatccatcttttagtaaacattaataattaaacattaagtcaaactctgggtaccaga

SEQ ID NO: 20404 - DNA, 67 bp, Homo sapiens
ttatccatcttttagtaaacattaataattaaacattaagtcaaactctgggtaccagaaataaagt

SEQ ID NO: 20405 - DNA, 68 bp, Homo sapiens
ttagtaaacattaataattaaacattaagtcaaactctgggtaccagaaataaagttacttcctctga

SEQ ID NO: 20406 - DNA, 68 bp, Homo sapiens
aacattaagtcaaactctgggtaccagaaataaagttacttcctctgattactgagaaaactacaagt

SEQ ID NO: 20407 - DNA, 70 bp, Homo sapiens
taagtcaaactctgggtaccagaaataaagttacttcctctgattactgagaaaactacaagttagtgga

SEQ ID NO: 20408 - DNA, 69 bp, Homo sapiens
ataaagttacttcctctgattactgagaaaactacaagttagtggaggacacacaactaaatttcaggg

SEQ ID NO: 20409 - DNA, 74 bp, Homo sapiens
ttacttcctctgattactgagaaaactacaagttagtggaggacacacaactaaatttcagggtgcttcagatg

SEQ ID NO: 20410 - DNA, 75 bp, Homo sapiens
acacaactaaatttcagggtgcttcagatggcacctctacaacatcctgaggatgttctatatttgttttcctaa

SEQ ID NO: 20411 - DNA, 77 bp, Homo sapiens
taaatttcagggtgcttcagatggcacctctacaacatcctgaggatgttctatatttgttttcctaacagcataaa

SEQ ID NO: 20412 - DNA, 76 bp, Homo sapiens
cacctctacaacatcctgaggatgttctatatttgttttcctaacagcataaatgagattacataaccacttcaaa

SEQ ID NO: 20413 - DNA, 76 bp, Homo sapiens
ctacaacatcctgaggatgttctatatttgttttcctaacagcataaatgagattacataaccacttcaaataaca

SEQ ID NO: 20414 - DNA, 78 bp, Homo sapiens
ctgaggatgttctatatttgttttcctaacagcataaatgagattacataaccacttcaaataacaatgtctagcata

SEQ ID NO: 20415 - DNA, 78 bp, Homo sapiens
atttgttttcctaacagcataaatgagattacataaccacttcaaataacaatgtctagcatatctagtctgtcagaa

SEQ ID NO: 20416 - DNA, 79 bp, Homo sapiens
cctaacagcataaatgagattacataaccacttcaaataacaatgtctagcatatctagtctgtcagaatttattcttc

SEQ ID NO: 20417 - DNA, 80 bp, Homo sapiens
gcataaatgagattacataaccacttcaaataacaatgtctagcatatctagtctgtcagaatttattcttctcttccca

SEQ ID NO: 20418 - DNA, 79 bp, Homo sapiens
agattacataaccacttcaaataacaatgtctagcatatctagtctgtcagaatttattcttctcttcccagtgcaagc

SEQ ID NO: 20419 - DNA, 79 bp, Homo sapiens
ttcaaataacaatgtctagcatatctagtctgtcagaatttattcttctcttcccagtgcaagctgtttacacttaaca

SEQ ID NO: 20420 - DNA, 79 bp, Homo sapiens
ataacaatgtctagcatatctagtctgtcagaatttattcttctcttcccagtgcaagctgtttacacttaacaatgaa

SEQ ID NO: 20421 - DNA, 75 bp, Homo sapiens
ttattcttctcttcccagtgcaagctgtttacacttaacaatgaatctttgttattcccagattgttgtgatctt

SEQ ID NO: 20422 - DNA, 75 bp, Homo sapiens
ttcccagtgcaagctgtttacacttaacaatgaatctttgttattcccagattgttgtgatctttcacaattctt

SEQ ID NO: 20423 - DNA, 76 bp, Homo sapiens
tttacacttaacaatgaatctttgttattcccagattgttgtgatctttcacaattctttggctggaatgcttgac

SEQ ID NO: 20424 - DNA, 77 bp, Homo sapiens
aatgaatctttgttattcccagattgttgtgatctttcacaattctttggctggaatgcttgacctagactcgccaa

SEQ ID NO: 20425 - DNA, 78 bp, Homo sapiens
ttgttattcccagattgttgtgatctttcacaattctttggctggaatgcttgacctagactcgccaagccctacata

SEQ ID NO: 20426 - DNA, 77 bp, Homo sapiens
attgttgtgatctttcacaattctttggctggaatgcttgacctagactcgccaagccctacatatccatacaaaaa

SEQ ID NO: 20427 - DNA, 74 bp, Homo sapiens
atctttcacaattctttggctggaatgcttgacctagactcgccaagccctacatatccatacaaaaaagttaa

SEQ ID NO: 20428 - DNA, 73 bp, Homo sapiens
acaattctttggctggaatgcttgacctagactcgccaagccctacatatccatacaaaaaagttaaatgttc

SEQ ID NO: 20429 - DNA, 74 bp, Homo sapiens
tggaatgcttgacctagactcgccaagccctacatatccatacaaaaaagttaaatgttcctcttctgaaaaca

SEQ ID NO: 20430 - DNA, 69 bp, Homo sapiens
acctagactcgccaagccctacatatccatacaaaaaagttaaatgttcctcttctgaaaacaaagcct

SEQ ID NO: 20431 - DNA, 70 bp, Homo sapiens
actcgccaagccctacatatccatacaaaaaagttaaatgttcctcttctgaaaacaaagccttatcaaa

SEQ ID NO: 20432 - DNA, 73 bp, Homo sapiens
gccctacatatccatacaaaaaagttaaatgttcctcttctgaaaacaaagccttatcaaattcatccaagca

SEQ ID NO: 20433 - DNA, 73 bp, Homo sapiens
ccatacaaaaaagttaaatgttcctcttctgaaaacaaagccttatcaaattcatccaagcatctatgatctt

SEQ ID NO: 20434 - DNA, 75 bp, Homo sapiens
agttaaatgttcctcttctgaaaacaaagccttatcaaattcatccaagcatctatgatcttttcactagtatat

SEQ ID NO: 20435 - DNA, 74 bp, Homo sapiens
gttcctcttctgaaaacaaagccttatcaaattcatccaagcatctatgatcttttcactagtatattttaaat

SEQ ID NO: 20436 - DNA, 74 bp, Homo sapiens
tgaaaacaaagccttatcaaattcatccaagcatctatgatcttttcactagtatattttaaattttgtattaa

SEQ ID NO: 20437 - DNA, 77 bp, Homo sapiens
atcaaattcatccaagcatctatgatcttttcactagtatattttaaattttgtattaagataaacctcatgtgaca

SEQ ID NO: 20438 - DNA, 77 bp, Homo sapiens
tccaagcatctatgatcttttcactagtatattttaaattttgtattaagataaacctcatgtgacatagaattcac

SEQ ID NO: 20439 - DNA, 72 bp, Homo sapiens
ttcactagtatattttaaattttgtattaagataaacctcatgtgacatagaattcaccgttttaacgcatc

SEQ ID NO: 20440 - DNA, 71 bp, Homo sapiens
attttaaattttgtattaagataaacctcatgtgacatagaattcaccgttttaacgcatctacttcaata

SEQ ID NO: 20441 - DNA, 70 bp, Homo sapiens
aaattttgtattaagataaacctcatgtgacatagaattcaccgttttaacgcatctacttcaatagttt

SEQ ID NO: 20442 - DNA, 74 bp, Homo sapiens
cctcatgtgacatagaattcaccgttttaacgcatctacttcaatagtttttagtatatttacaaggttgtgca

SEQ ID NO: 20443 - DNA, 71 bp, Homo sapiens
accactatctgattcctgaaaactttgatgacttcaaaaagaaactcagttcctctcaatttcttccctct

SEQ ID NO: 20444 - DNA, 70 bp, Homo sapiens
ctgaaaactttgatgacttcaaaaagaaactcagttcctctcaatttcttccctcttccctttgcaacta

SEQ ID NO: 20445 - DNA, 71 bp, Homo sapiens
aactttgatgacttcaaaaagaaactcagttcctctcaatttcttccctcttccctttgcaactatgaagc

SEQ ID NO: 20446 - DNA, 70 bp, Homo sapiens
aaaaagaaactcagttcctctcaatttcttccctcttccctttgcaactatgaagctgctttctttctta

SEQ ID NO: 20447 - DNA, 74 bp, Homo sapiens
actcagttcctctcaatttcttccctcttccctttgcaactatgaagctgctttctttcttatgatttgcctat

SEQ ID NO: 20448 - DNA, 77 bp, Homo sapiens
tcaatttcttccctcttccctttgcaactatgaagctgctttctttcttatgatttgcctattctgggtatatcata

SEQ ID NO: 20449 - DNA, 77 bp, Homo sapiens
tccctcttccctttgcaactatgaagctgctttctttcttatgatttgcctattctgggtatatcatacaaatgaaa

SEQ ID NO: 20450 - DNA, 79 bp, Homo sapiens
ctttgcaactatgaagctgctttctttcttatgatttgcctattctgggtatatcatacaaatgaaatcatgtgacttt

SEQ ID NO: 20451 - DNA, 74 bp, Homo sapiens
tttgcctattctgggtatatcatacaaatgaaatcatgtgactttttgtgtctggctcctttcacttaacgttt

SEQ ID NO: 20452 - DNA, 72 bp, Homo sapiens
ctgggtatatcatacaaatgaaatcatgtgactttttgtgtctggctcctttcacttaacgttttctttctt

SEQ ID NO: 20453 - DNA, 78 bp, Homo sapiens
ttttcaaggtttcatctatgttatagcatgtatcagtactttactcctatttatggctaaatgatattccattataga

SEQ ID NO: 20454 - DNA, 78 bp, Homo sapiens
ggtttcatctatgttatagcatgtatcagtactttactcctatttatggctaaatgatattccattatagacttataa

SEQ ID NO: 20455 - DNA, 75 bp, Homo sapiens
gttatagcatgtatcagtactttactcctatttatggctaaatgatattccattatagacttataaaacattttg

SEQ ID NO: 20456 - DNA, 73 bp, Homo sapiens
atgtatcagtactttactcctatttatggctaaatgatattccattatagacttataaaacattttgtttatc

SEQ ID NO: 20457 - DNA, 75 bp, Homo sapiens
tttgtttatccattcgtcattgatagacactcttctattaccacatacactctactgaaccagtgtaaacttaag

SEQ ID NO: 20458 - DNA, 78 bp, Homo sapiens
ttatccattcgtcattgatagacactcttctattaccacatacactctactgaaccagtgtaaacttaagtgcttgta

SEQ ID NO: 20459 - DNA, 78 bp, Homo sapiens
attgatagacactcttctattaccacatacactctactgaaccagtgtaaacttaagtgcttgtatgtctgatgtttg

SEQ ID NO: 20460 - DNA, 78 bp, Homo sapiens
atagacactcttctattaccacatacactctactgaaccagtgtaaacttaagtgcttgtatgtctgatgtttgtcac

SEQ ID NO: 20461 - DNA, 78 bp, Homo sapiens
actcttctattaccacatacactctactgaaccagtgtaaacttaagtgcttgtatgtctgatgtttgtcactggata

SEQ ID NO: 20462 - DNA, 78 bp, Homo sapiens
tattaccacatacactctactgaaccagtgtaaacttaagtgcttgtatgtctgatgtttgtcactggatagcaacct

SEQ ID NO: 20463 - DNA, 78 bp, Homo sapiens
taccacatacactctactgaaccagtgtaaacttaagtgcttgtatgtctgatgtttgtcactggatagcaaccttaa

SEQ ID NO: 20464 - DNA, 76 bp, Homo sapiens
atacactctactgaaccagtgtaaacttaagtgcttgtatgtctgatgtttgtcactggatagcaaccttaataaa

SEQ ID NO: 20465 - DNA, 76 bp, Homo sapiens
tacactctactgaaccagtgtaaacttaagtgcttgtatgtctgatgtttgtcactggatagcaaccttaataaat

SEQ ID NO: 20466 - DNA, 75 bp, Homo sapiens
tactgaaccagtgtaaacttaagtgcttgtatgtctgatgtttgtcactggatagcaaccttaataaattcttgt

SEQ ID NO: 20467 - DNA, 73 bp, Homo sapiens
cagtgtaaacttaagtgcttgtatgtctgatgtttgtcactggatagcaaccttaataaattcttgtttattt

SEQ ID NO: 20468 - DNA, 73 bp, Homo sapiens
taaacttaagtgcttgtatgtctgatgtttgtcactggatagcaaccttaataaattcttgtttattttcatt

SEQ ID NO: 20469 - DNA, 78 bp, Homo sapiens
gtgcttgtatgtctgatgtttgtcactggatagcaaccttaataaattcttgtttattttcattttgtatcctcagca

SEQ ID NO: 20470 - DNA, 76 bp, Homo sapiens
ataaattcttgtttattttcattttgtatcctcagcacttaacaacacaatgccttgcacatattcagctacctaa

SEQ ID NO: 20471 - DNA, 76 bp, Homo sapiens
ttgtttattttcattttgtatcctcagcacttaacaacacaatgccttgcacatattcagctacctaaaattaggc

SEQ ID NO: 20472 - DNA, 79 bp, Homo sapiens
cacttaacaacacaatgccttgcacatattcagctacctaaaattaggctgcataaataattgtctaatcatttacaca

SEQ ID NO: 20473 - DNA, 77 bp, Homo sapiens
tgccttgcacatattcagctacctaaaattaggctgcataaataattgtctaatcatttacacatcactttaaaagg

SEQ ID NO: 20474 - DNA, 75 bp, Homo sapiens
gcacatattcagctacctaaaattaggctgcataaataattgtctaatcatttacacatcactttaaaaggtact

SEQ ID NO: 20475 - DNA, 73 bp, Homo sapiens
cagctacctaaaattaggctgcataaataattgtctaatcatttacacatcactttaaaaggtactttcatat

SEQ ID NO: 20476 - DNA, 78 bp, Homo sapiens
taggctgcataaataattgtctaatcatttacacatcactttaaaaggtactttcatattcatatcttgcttctagta

SEQ ID NO: 20477 - DNA, 77 bp, Homo sapiens
gcataaataattgtctaatcatttacacatcactttaaaaggtactttcatattcatatcttgcttctagtatctag

SEQ ID NO: 20478 - DNA, 76 bp, Homo sapiens
tgtctaatcatttacacatcactttaaaaggtactttcatattcatatcttgcttctagtatctagtttacaggat

SEQ ID NO: 20479 - DNA, 73 bp, Homo sapiens
cacatcactttaaaaggtactttcatattcatatcttgcttctagtatctagtttacaggattaaatttaaga

SEQ ID NO: 20480 - DNA, 71 bp, Homo sapiens
cactttaaaaggtactttcatattcatatcttgcttctagtatctagtttacaggattaaatttaagaaca

SEQ ID NO: 20481 - DNA, 74 bp, Homo sapiens
ggtactttcatattcatatcttgcttctagtatctagtttacaggattaaatttaagaacatagtaagatccca

SEQ ID NO: 20482 - DNA, 72 bp, Homo sapiens
attcatatcttgcttctagtatctagtttacaggattaaatttaagaacatagtaagatcccatttctcttt

SEQ ID NO: 20483 - DNA, 68 bp, Homo sapiens
ttgcttctagtatctagtttacaggattaaatttaagaacatagtaagatcccatttctctttttttt

SEQ ID NO: 20484 - DNA, 73 bp, Homo sapiens
aacaaaacaacaaaataaaaagctgagggatacatgtaatcacataagtgactgaatagtagtttctgtatat

SEQ ID NO: 20485 - DNA, 77 bp, Homo sapiens
caaaataaaaagctgagggatacatgtaatcacataagtgactgaatagtagtttctgtatattgagcaatttacta

SEQ ID NO: 20486 - DNA, 80 bp, Homo sapiens
aaagctgagggatacatgtaatcacataagtgactgaatagtagtttctgtatattgagcaatttactatgatcctggta

SEQ ID NO: 20487 - DNA, 85 bp, Homo sapiens
ggatacatgtaatcacataagtgactgaatagtagtttctgtatattgagcaatttactatgatcctggtatgcatgatctcatt

SEQ ID NO: 20488 - DNA, 83 bp, Homo sapiens
gtaatcacataagtgactgaatagtagtttctgtatattgagcaatttactatgatcctggtatgcatgatctcatttagccc

SEQ ID NO: 20489 - DNA, 83 bp, Homo sapiens
aagtgactgaatagtagtttctgtatattgagcaatttactatgatcctggtatgcatgatctcatttagccctcaacattga

SEQ ID NO: 20490 - DNA, 82 bp, Homo sapiens
atagtagtttctgtatattgagcaatttactatgatcctggtatgcatgatctcatttagccctcaacattgaacactatta

SEQ ID NO: 20491 - DNA, 81 bp, Homo sapiens
tatattgagcaatttactatgatcctggtatgcatgatctcatttagccctcaacattgaacactattactcttcccattt

SEQ ID NO: 20492 - DNA, 79 bp, Homo sapiens
tatgatcctggtatgcatgatctcatttagccctcaacattgaacactattactcttcccattttacagaagaaacaaa

SEQ ID NO: 20493 - DNA, 73 bp, Homo sapiens
catgatctcatttagccctcaacattgaacactattactcttcccattttacagaagaaacaaatttagggag

SEQ ID NO: 20494 - DNA, 70 bp, Homo sapiens
catttagccctcaacattgaacactattactcttcccattttacagaagaaacaaatttagggaggcaaa

SEQ ID NO: 20495 - DNA, 69 bp, Homo sapiens
ccctcaacattgaacactattactcttcccattttacagaagaaacaaatttagggaggcaaaatgact

SEQ ID NO: 20496 - DNA, 71 bp, Homo sapiens
acaaatttagggaggcaaaatgactttctcattttccaatgtctcacagattataagcggtaaaacaagga

SEQ ID NO: 20497 - DNA, 74 bp, Homo sapiens
gaggcaaaatgactttctcattttccaatgtctcacagattataagcggtaaaacaaggatcaaacagaccaaa

SEQ ID NO: 20498 - DNA, 74 bp, Homo sapiens
aatgactttctcattttccaatgtctcacagattataagcggtaaaacaaggatcaaacagaccaaagactaca

SEQ ID NO: 20499 - DNA, 71 bp, Homo sapiens
ttttccaatgtctcacagattataagcggtaaaacaaggatcaaacagaccaaagactacacttttaacac

SEQ ID NO: 20500 - DNA, 73 bp, Homo sapiens
tctcacagattataagcggtaaaacaaggatcaaacagaccaaagactacacttttaacaccatgtgagtaaa

SEQ ID NO: 20501 - DNA, 71 bp, Homo sapiens
cagattataagcggtaaaacaaggatcaaacagaccaaagactacacttttaacaccatgtgagtaaaaga

SEQ ID NO: 20502 - DNA, 70 bp, Homo sapiens
gcggtaaaacaaggatcaaacagaccaaagactacacttttaacaccatgtgagtaaaagatcatgtttt

SEQ ID NO: 20503 - DNA, 71 bp, Homo sapiens
aaggatcaaacagaccaaagactacacttttaacaccatgtgagtaaaagatcatgtttttacactagagt

SEQ ID NO: 20504 - DNA, 73 bp, Homo sapiens
cagaccaaagactacacttttaacaccatgtgagtaaaagatcatgtttttacactagagttataagagatta

SEQ ID NO: 20505 - DNA, 74 bp, Homo sapiens
acaccatgtgagtaaaagatcatgtttttacactagagttataagagattaaagacaaagctatgtaaaaatca

SEQ ID NO: 20506 - DNA, 72 bp, Homo sapiens
tgagtaaaagatcatgtttttacactagagttataagagattaaagacaaagctatgtaaaaatcaagaggt

SEQ ID NO: 20507 - DNA, 70 bp, Homo sapiens
catgtttttacactagagttataagagattaaagacaaagctatgtaaaaatcaagaggttaagattttg

SEQ ID NO: 20508 - DNA, 73 bp, Homo sapiens
agagattaaagacaaagctatgtaaaaatcaagaggttaagattttggttatgccacttaagagcattatgat

SEQ ID NO: 20509 - DNA, 73 bp, Homo sapiens
gacaaagctatgtaaaaatcaagaggttaagattttggttatgccacttaagagcattatgatttgaggaaag

SEQ ID NO: 20510 - DNA, 75 bp, Homo sapiens
tgtaaaaatcaagaggttaagattttggttatgccacttaagagcattatgatttgaggaaagtcagcctctcta

SEQ ID NO: 20511 - DNA, 74 bp, Homo sapiens
agattttggttatgccacttaagagcattatgatttgaggaaagtcagcctctctaagccttagtttgcttaat

SEQ ID NO: 20512 - DNA, 75 bp, Homo sapiens
tggttatgccacttaagagcattatgatttgaggaaagtcagcctctctaagccttagtttgcttaattataaaa

SEQ ID NO: 20513 - DNA, 75 bp, Homo sapiens
ttaagagcattatgatttgaggaaagtcagcctctctaagccttagtttgcttaattataaaatgagaatagggc

SEQ ID NO: 20514 - DNA, 75 bp, Homo sapiens
attatgatttgaggaaagtcagcctctctaagccttagtttgcttaattataaaatgagaatagggctgggcatg

SEQ ID NO: 20515 - DNA, 67 bp, Homo sapiens
cttaaaaaaagttgttttaattaaaaatgagaacattaatatctgccttatttcaggactgttgaaa

SEQ ID NO: 20516 - DNA, 73 bp, Homo sapiens
gttgttttaattaaaaatgagaacattaatatctgccttatttcaggactgttgaaaaccctcagcattgatc

SEQ ID NO: 20517 - DNA, 76 bp, Homo sapiens
attaaaaatgagaacattaatatctgccttatttcaggactgttgaaaaccctcagcattgatcttcagtgtagtg

SEQ ID NO: 20518 - DNA, 79 bp, Homo sapiens
aatgagaacattaatatctgccttatttcaggactgttgaaaaccctcagcattgatcttcagtgtagtggtcatttca

SEQ ID NO: 20519 - DNA, 78 bp, Homo sapiens
ttaatatctgccttatttcaggactgttgaaaaccctcagcattgatcttcagtgtagtggtcatttcactgtcccaa

SEQ ID NO: 20520 - DNA, 75 bp, Homo sapiens
ccttatttcaggactgttgaaaaccctcagcattgatcttcagtgtagtggtcatttcactgtcccaacaccttc

SEQ ID NO: 20521 - DNA, 78 bp, Homo sapiens
tatttcaggactgttgaaaaccctcagcattgatcttcagtgtagtggtcatttcactgtcccaacaccttccagata

SEQ ID NO: 20522 - DNA, 78 bp, Homo sapiens
tttcaggactgttgaaaaccctcagcattgatcttcagtgtagtggtcatttcactgtcccaacaccttccagataca

SEQ ID NO: 20523 - DNA, 78 bp, Homo sapiens
tgttgaaaaccctcagcattgatcttcagtgtagtggtcatttcactgtcccaacaccttccagatacagcaaaaata

SEQ ID NO: 20524 - DNA, 75 bp, Homo sapiens
aaaaccctcagcattgatcttcagtgtagtggtcatttcactgtcccaacaccttccagatacagcaaaaataat

SEQ ID NO: 20525 - DNA, 75 bp, Homo sapiens
aaaccctcagcattgatcttcagtgtagtggtcatttcactgtcccaacaccttccagatacagcaaaaataatt

SEQ ID NO: 20526 - DNA, 75 bp, Homo sapiens
agcattgatcttcagtgtagtggtcatttcactgtcccaacaccttccagatacagcaaaaataatttactcccg

SEQ ID NO: 20527 - DNA, 74 bp, Homo sapiens
attgatcttcagtgtagtggtcatttcactgtcccaacaccttccagatacagcaaaaataatttactcccggc

SEQ ID NO: 20528 - DNA, 75 bp, Homo sapiens
tcagtgtagtggtcatttcactgtcccaacaccttccagatacagcaaaaataatttactcccggctgagtgaaa

SEQ ID NO: 20529 - DNA, 74 bp, Homo sapiens
tgtagtggtcatttcactgtcccaacaccttccagatacagcaaaaataatttactcccggctgagtgaaataa

SEQ ID NO: 20530 - DNA, 70 bp, Homo sapiens
actgtcccaacaccttccagatacagcaaaaataatttactcccggctgagtgaaataatatcttaaaaa

SEQ ID NO: 20531 - DNA, 69 bp, Homo sapiens
acagcaaaaataatttactcccggctgagtgaaataatatcttaaaaaattaattacacctagctttgc

SEQ ID NO: 20532 - DNA, 68 bp, Homo sapiens
ataatttactcccggctgagtgaaataatatcttaaaaaattaattacacctagctttgcttaatccc

SEQ ID NO: 20533 - DNA, 69 bp, Homo sapiens
actcccggctgagtgaaataatatcttaaaaaattaattacacctagctttgcttaatcccttaatata

SEQ ID NO: 20534 - DNA, 70 bp, Homo sapiens
cttaaaaaattaattacacctagctttgcttaatcccttaatatatacaggcaaaaaattacattctgca

SEQ ID NO: 20535 - DNA, 74 bp, Homo sapiens
ttaattacacctagctttgcttaatcccttaatatatacaggcaaaaaattacattctgcacattcagtttctc

SEQ ID NO: 20536 - DNA, 73 bp, Homo sapiens
acacctagctttgcttaatcccttaatatatacaggcaaaaaattacattctgcacattcagtttctctttct

SEQ ID NO: 20537 - DNA, 76 bp, Homo sapiens
ttgcttaatcccttaatatatacaggcaaaaaattacattctgcacattcagtttctctttctttgatatgatatt

SEQ ID NO: 20538 - DNA, 75 bp, Homo sapiens
ccttaatatatacaggcaaaaaattacattctgcacattcagtttctctttctttgatatgatattttacagaag

SEQ ID NO: 20539 - DNA, 74 bp, Homo sapiens
caggcaaaaaattacattctgcacattcagtttctctttctttgatatgatattttacagaagtatccttaaat

SEQ ID NO: 20540 - DNA, 74 bp, Homo sapiens
ttacattctgcacattcagtttctctttctttgatatgatattttacagaagtatccttaaatttacctcttcc

SEQ ID NO: 20541 - DNA, 73 bp, Homo sapiens
ctgcacattcagtttctctttctttgatatgatattttacagaagtatccttaaatttacctcttccttcttc

SEQ ID NO: 20542 - DNA, 71 bp, Homo sapiens
ctctttctttgatatgatattttacagaagtatccttaaatttacctcttccttcttcttagggtctgaca

SEQ ID NO: 20543 - DNA, 72 bp, Homo sapiens
ttgatatgatattttacagaagtatccttaaatttacctcttccttcttcttagggtctgacatcggattcc

SEQ ID NO: 20544 - DNA, 68 bp, Homo sapiens
atattttacagaagtatccttaaatttacctcttccttcttcttagggtctgacatcggattccggaa

SEQ ID NO: 20545 - DNA, 69 bp, Homo sapiens
agaagtatccttaaatttacctcttccttcttcttagggtctgacatcggattccggaagagaggagag

SEQ ID NO: 20546 - DNA, 69 bp, Homo sapiens
ttaaatttacctcttccttcttcttagggtctgacatcggattccggaagagaggagagtctccaaaag

SEQ ID NO: 20547 - DNA, 73 bp, Homo sapiens
tccttcttcttagggtctgacatcggattccggaagagaggagagtctccaaaaggtgagtatgttagactat

SEQ ID NO: 20548 - DNA, 78 bp, Homo sapiens
ttcttagggtctgacatcggattccggaagagaggagagtctccaaaaggtgagtatgttagactattgatgtgctgc

SEQ ID NO: 20549 - DNA, 78 bp, Homo sapiens
tatatataaatgcaaggatacaatgcatttgtaacacagagctcggtattctttttgaagaagtggtcttcaaaatgc

SEQ ID NO: 20550 - DNA, 78 bp, Homo sapiens
ataaatgcaaggatacaatgcatttgtaacacagagctcggtattctttttgaagaagtggtcttcaaaatgctcaga

SEQ ID NO: 20551 - DNA, 79 bp, Homo sapiens
atacaatgcatttgtaacacagagctcggtattctttttgaagaagtggtcttcaaaatgctcagatcaatggtatcat

SEQ ID NO: 20552 - DNA, 77 bp, Homo sapiens
atttgtaacacagagctcggtattctttttgaagaagtggtcttcaaaatgctcagatcaatggtatcattggggca

SEQ ID NO: 20553 - DNA, 79 bp, Homo sapiens
acagagctcggtattctttttgaagaagtggtcttcaaaatgctcagatcaatggtatcattggggcagaatgtgtgta

SEQ ID NO: 20554 - DNA, 79 bp, Homo sapiens
aagaagtggtcttcaaaatgctcagatcaatggtatcattggggcagaatgtgtgtagagcaaactgtaaagaaaatca

SEQ ID NO: 20555 - DNA, 80 bp, Homo sapiens
ttcaaaatgctcagatcaatggtatcattggggcagaatgtgtgtagagcaaactgtaaagaaaatcaagaatcaaataa

SEQ ID NO: 20556 - DNA, 77 bp, Homo sapiens
agatcaatggtatcattggggcagaatgtgtgtagagcaaactgtaaagaaaatcaagaatcaaataagctaatagg

SEQ ID NO: 20557 - DNA, 76 bp, Homo sapiens
aatggtatcattggggcagaatgtgtgtagagcaaactgtaaagaaaatcaagaatcaaataagctaataggtcaa

SEQ ID NO: 20558 - DNA, 74 bp, Homo sapiens
gggcagaatgtgtgtagagcaaactgtaaagaaaatcaagaatcaaataagctaataggtcaaatttaggaaga

SEQ ID NO: 20559 - DNA, 75 bp, Homo sapiens
tgtgtgtagagcaaactgtaaagaaaatcaagaatcaaataagctaataggtcaaatttaggaagagacatttca

SEQ ID NO: 20560 - DNA, 74 bp, Homo sapiens
gcaaactgtaaagaaaatcaagaatcaaataagctaataggtcaaatttaggaagagacatttcataagataca

SEQ ID NO: 20561 - DNA, 76 bp, Homo sapiens
tcaaataagctaataggtcaaatttaggaagagacatttcataagatacaatactcatataaattcacttacacag

SEQ ID NO: 20562 - DNA, 77 bp, Homo sapiens
gctaataggtcaaatttaggaagagacatttcataagatacaatactcatataaattcacttacacagtgttcactg

SEQ ID NO: 20563 - DNA, 77 bp, Homo sapiens
ggtcaaatttaggaagagacatttcataagatacaatactcatataaattcacttacacagtgttcactgtcactac

SEQ ID NO: 20564 - DNA, 78 bp, Homo sapiens
gaagagacatttcataagatacaatactcatataaattcacttacacagtgttcactgtcactactaatcaaagaaag

SEQ ID NO: 20565 - DNA, 75 bp, Homo sapiens
atttcataagatacaatactcatataaattcacttacacagtgttcactgtcactactaatcaaagaaaggaaaa

SEQ ID NO: 20566 - DNA, 74 bp, Homo sapiens
ataagatacaatactcatataaattcacttacacagtgttcactgtcactactaatcaaagaaaggaaaattta

SEQ ID NO: 20567 - DNA, 71 bp, Homo sapiens
atactcatataaattcacttacacagtgttcactgtcactactaatcaaagaaaggaaaatttaaacaacc

SEQ ID NO: 20568 - DNA, 72 bp, Homo sapiens
ctcatataaattcacttacacagtgttcactgtcactactaatcaaagaaaggaaaatttaaacaaccctga

SEQ ID NO: 20569 - DNA, 73 bp, Homo sapiens
catataaattcacttacacagtgttcactgtcactactaatcaaagaaaggaaaatttaaacaaccctgatga

SEQ ID NO: 20570 - DNA, 71 bp, Homo sapiens
attcacttacacagtgttcactgtcactactaatcaaagaaaggaaaatttaaacaaccctgatgaaatat

SEQ ID NO: 20571 - DNA, 70 bp, Homo sapiens
cacttacacagtgttcactgtcactactaatcaaagaaaggaaaatttaaacaaccctgatgaaatattt

SEQ ID NO: 20572 - DNA, 75 bp, Homo sapiens
tcactgtcactactaatcaaagaaaggaaaatttaaacaaccctgatgaaatattttatgcatacctatcactga

SEQ ID NO: 20573 - DNA, 74 bp, Homo sapiens
cactgtcactactaatcaaagaaaggaaaatttaaacaaccctgatgaaatattttatgcatacctatcactga

SEQ ID NO: 20574 - DNA, 75 bp, Homo sapiens
tactaatcaaagaaaggaaaatttaaacaaccctgatgaaatattttatgcatacctatcactgaaatagctgca

SEQ ID NO: 20575 - DNA, 74 bp, Homo sapiens
actaatcaaagaaaggaaaatttaaacaaccctgatgaaatattttatgcatacctatcactgaaatagctgca

SEQ ID NO: 20576 - DNA, 75 bp, Homo sapiens
ggaaaatttaaacaaccctgatgaaatattttatgcatacctatcactgaaatagctgcataaaaagccatagtc

SEQ ID NO: 20577 - DNA, 78 bp, Homo sapiens
aacaaccctgatgaaatattttatgcatacctatcactgaaatagctgcataaaaagccatagtctttgacttctaga

SEQ ID NO: 20578 - DNA, 78 bp, Homo sapiens
tttatgcatacctatcactgaaatagctgcataaaaagccatagtctttgacttctagaaacattatagactggtttg

SEQ ID NO: 20579 - DNA, 76 bp, Homo sapiens
ctatcactgaaatagctgcataaaaagccatagtctttgacttctagaaacattatagactggtttgtctaaagga

SEQ ID NO: 20580 - DNA, 74 bp, Homo sapiens
ctgaaatagctgcataaaaagccatagtctttgacttctagaaacattatagactggtttgtctaaaggaaata

SEQ ID NO: 20581 - DNA, 72 bp, Homo sapiens
gcataaaaagccatagtctttgacttctagaaacattatagactggtttgtctaaaggaaataatacgacag

SEQ ID NO: 20582 - DNA, 71 bp, Homo sapiens
agtctttgacttctagaaacattatagactggtttgtctaaaggaaataatacgacagtatacagggcaag

SEQ ID NO: 20583 - DNA, 73 bp, Homo sapiens
ttgacttctagaaacattatagactggtttgtctaaaggaaataatacgacagtatacagggcaagtagtgtg

SEQ ID NO: 20584 - DNA, 78 bp, Homo sapiens
gtgtgtgtgcgtgcgtgtatgtaattgtccaaaggaaataatatgacaatatacaacaggacaagtactgtgtgtttg

SEQ ID NO: 20585 - DNA, 78 bp, Homo sapiens
gtgcgtgtatgtaattgtccaaaggaaataatatgacaatatacaacaggacaagtactgtgtgtttgtgcgtgtaca

SEQ ID NO: 20586 - DNA, 79 bp, Homo sapiens
tgtatgtaattgtccaaaggaaataatatgacaatatacaacaggacaagtactgtgtgtttgtgcgtgtacacacaca

SEQ ID NO: 20587 - DNA, 69 bp, Homo sapiens
catgcctggcctctattttttaacctcataattttaatcatgaaaatttaactcgaactagaaagaaaa

SEQ ID NO: 20588 - DNA, 67 bp, Homo sapiens
ctggcctctattttttaacctcataattttaatcatgaaaatttaactcgaactagaaagaaaataa

SEQ ID NO: 20589 - DNA, 72 bp, Homo sapiens
taacctcataattttaatcatgaaaatttaactcgaactagaaagaaaataaattcctaagcattcactgca

SEQ ID NO: 20590 - DNA, 74 bp, Homo sapiens
tcataattttaatcatgaaaatttaactcgaactagaaagaaaataaattcctaagcattcactgcatagtata

SEQ ID NO: 20591 - DNA, 77 bp, Homo sapiens
tcatgaaaatttaactcgaactagaaagaaaataaattcctaagcattcactgcatagtatatatacagtcaagata

SEQ ID NO: 20592 - DNA, 75 bp, Homo sapiens
atttaactcgaactagaaagaaaataaattcctaagcattcactgcatagtatatatacagtcaagatatggaaa

SEQ ID NO: 20593 - DNA, 76 bp, Homo sapiens
gaaagaaaataaattcctaagcattcactgcatagtatatatacagtcaagatatggaaacaacctacgtgtccaa

SEQ ID NO: 20594 - DNA, 77 bp, Homo sapiens
taaattcctaagcattcactgcatagtatatatacagtcaagatatggaaacaacctacgtgtccaatattaagtta

SEQ ID NO: 20595 - DNA, 78 bp, Homo sapiens
gcattcactgcatagtatatatacagtcaagatatggaaacaacctacgtgtccaatattaagttaatagttgtaggc

SEQ ID NO: 20596 - DNA, 74 bp, Homo sapiens
actgcatagtatatatacagtcaagatatggaaacaacctacgtgtccaatattaagttaatagttgtaggcgg

SEQ ID NO: 20597 - DNA, 74 bp, Homo sapiens
tatatatacagtcaagatatggaaacaacctacgtgtccaatattaagttaatagttgtaggcggggtgcagtg

SEQ ID NO: 20598 - DNA, 70 bp, Homo sapiens
caaacaaaaaagttgtaaacatcatgacacatcaacataggttatgtagttattaaaaataataatttgt

SEQ ID NO: 20599 - DNA, 74 bp, Homo sapiens
gttgtaaacatcatgacacatcaacataggttatgtagttattaaaaataataatttgtttcattgtggaaata

SEQ ID NO: 20600 - DNA, 76 bp, Homo sapiens
catcatgacacatcaacataggttatgtagttattaaaaataataatttgtttcattgtggaaatatgaaattatc

SEQ ID NO: 20601 - DNA, 67 bp, Homo sapiens
attaaaaataataatttgtttcattgtggaaatatgaaattatctttaagtaaaatttccagaataa

SEQ ID NO: 20602 - DNA, 69 bp, Homo sapiens
taataatttgtttcattgtggaaatatgaaattatctttaagtaaaatttccagaataaaaatattatg

SEQ ID NO: 20603 - DNA, 72 bp, Homo sapiens
tcattgtggaaatatgaaattatctttaagtaaaatttccagaataaaaatattatgtacattaaggctaca

SEQ ID NO: 20604 - DNA, 70 bp, Homo sapiens
ggaaatatgaaattatctttaagtaaaatttccagaataaaaatattatgtacattaaggctacagagga

SEQ ID NO: 20605 - DNA, 73 bp, Homo sapiens
tatctttaagtaaaatttccagaataaaaatattatgtacattaaggctacagaggaaggcagcatacaaaca

SEQ ID NO: 20606 - DNA, 72 bp, Homo sapiens
gtaaaatttccagaataaaaatattatgtacattaaggctacagaggaaggcagcatacaaacaaaaatgtg

SEQ ID NO: 20607 - DNA, 71 bp, Homo sapiens
tttccagaataaaaatattatgtacattaaggctacagaggaaggcagcatacaaacaaaaatgtggtttt

SEQ ID NO: 20608 - DNA, 69 bp, Homo sapiens
aaatattatgtacattaaggctacagaggaaggcagcatacaaacaaaaatgtggttttttcttttccc

SEQ ID NO: 20609 - DNA, 70 bp, Homo sapiens
tgtacattaaggctacagaggaaggcagcatacaaacaaaaatgtggttttttcttttcccccaaatcca

SEQ ID NO: 20610 - DNA, 70 bp, Homo sapiens
tacagaggaaggcagcatacaaacaaaaatgtggttttttcttttcccccaaatccaggtgtcttcctga

SEQ ID NO: 20611 - DNA, 67 bp, Homo sapiens
aaggcagcatacaaacaaaaatgtggttttttcttttcccccaaatccaggtgtcttcctgaagaaa

SEQ ID NO: 20612 - DNA, 66 bp, Homo sapiens
ggttttttcttttcccccaaatccaggtgtcttcctgaagaaaatgcttaggctatccttataagt

SEQ ID NO: 20613 - DNA, 68 bp, Homo sapiens
ttcttttcccccaaatccaggtgtcttcctgaagaaaatgcttaggctatccttataagtttattatt

SEQ ID NO: 20614 - DNA, 69 bp, Homo sapiens
cccaaatccaggtgtcttcctgaagaaaatgcttaggctatccttataagtttattatttacatttatt

SEQ ID NO: 20615 - DNA, 72 bp, Homo sapiens
ggtgtcttcctgaagaaaatgcttaggctatccttataagtttattatttacatttatttaacattcacata

SEQ ID NO: 20616 - DNA, 73 bp, Homo sapiens
tgaagaaaatgcttaggctatccttataagtttattatttacatttatttaacattcacataatataaactga

SEQ ID NO: 20617 - DNA, 74 bp, Homo sapiens
gaaatcactaagcctaattttttctcaaagtgtaagaacatctgttatcaattgcagagaatttagggaacaga

SEQ ID NO: 20618 - DNA, 74 bp, Homo sapiens
gcctaattttttctcaaagtgtaagaacatctgttatcaattgcagagaatttagggaacagacataagtaaca

SEQ ID NO: 20619 - DNA, 79 bp, Homo sapiens
ctcaaagtgtaagaacatctgttatcaattgcagagaatttagggaacagacataagtaacaatgaagactattcatga

SEQ ID NO: 20620 - DNA, 79 bp, Homo sapiens
aagaacatctgttatcaattgcagagaatttagggaacagacataagtaacaatgaagactattcatgatctaccattg

SEQ ID NO: 20621 - DNA, 78 bp, Homo sapiens
gttatcaattgcagagaatttagggaacagacataagtaacaatgaagactattcatgatctaccattgtaccaagta

SEQ ID NO: 20622 - DNA, 76 bp, Homo sapiens
ttgcagagaatttagggaacagacataagtaacaatgaagactattcatgatctaccattgtaccaagtaaaacat

SEQ ID NO: 20623 - DNA, 74 bp, Homo sapiens
gaatttagggaacagacataagtaacaatgaagactattcatgatctaccattgtaccaagtaaaacattaaga

SEQ ID NO: 20624 - DNA, 73 bp, Homo sapiens
aacagacataagtaacaatgaagactattcatgatctaccattgtaccaagtaaaacattaagaaaaaagcaa

SEQ ID NO: 20625 - DNA, 71 bp, Homo sapiens
aacaatgaagactattcatgatctaccattgtaccaagtaaaacattaagaaaaaagcaaaaccactacag

SEQ ID NO: 20626 - DNA, 73 bp, Homo sapiens
tattcatgatctaccattgtaccaagtaaaacattaagaaaaaagcaaaaccactacagtataccctgactga

SEQ ID NO: 20627 - DNA, 69 bp, Homo sapiens
ctaccattgtaccaagtaaaacattaagaaaaaagcaaaaccactacagtataccctgactgaagaaga

SEQ ID NO: 20628 - DNA, 67 bp, Homo sapiens
gtaccaagtaaaacattaagaaaaaagcaaaaccactacagtataccctgactgaagaagaaacctc

SEQ ID NO: 20629 - DNA, 69 bp, Homo sapiens
acattaagaaaaaagcaaaaccactacagtataccctgactgaagaagaaacctctttgcaagataaaa

SEQ ID NO: 20630 - DNA, 70 bp, Homo sapiens
aaaagcaaaaccactacagtataccctgactgaagaagaaacctctttgcaagataaaatctctttccaa

SEQ ID NO: 20631 - DNA, 71 bp, Homo sapiens
aaccactacagtataccctgactgaagaagaaacctctttgcaagataaaatctctttccaaaaatactga

SEQ ID NO: 20632 - DNA, 69 bp, Homo sapiens
agaaacctctttgcaagataaaatctctttccaaaaatactgatcaaaacccaaaacataataaagtca

SEQ ID NO: 20633 - DNA, 71 bp, Homo sapiens
tttgcaagataaaatctctttccaaaaatactgatcaaaacccaaaacataataaagtcattttacagaca

SEQ ID NO: 20634 - DNA, 67 bp, Homo sapiens
ctctttccaaaaatactgatcaaaacccaaaacataataaagtcattttacagacaaaaatactacc

SEQ ID NO: 20635 - DNA, 65 bp, Homo sapiens
aaatactgatcaaaacccaaaacataataaagtcattttacagacaaaaatactacctttttccc

SEQ ID NO: 20636 - DNA, 66 bp, Homo sapiens
ctgatcaaaacccaaaacataataaagtcattttacagacaaaaatactacctttttcccttataa

SEQ ID NO: 20637 - DNA, 65 bp, Homo sapiens
cccaaaacataataaagtcattttacagacaaaaatactacctttttcccttataaacatttaca

SEQ ID NO: 20638 - DNA, 66 bp, Homo sapiens
agtcattttacagacaaaaatactacctttttcccttataaacatttacaaataaagttactgcca

SEQ ID NO: 20639 - DNA, 65 bp, Homo sapiens
acagacaaaaatactacctttttcccttataaacatttacaaataaagttactgccaaaatataa

SEQ ID NO: 20640 - DNA, 68 bp, Homo sapiens
tactacctttttcccttataaacatttacaaataaagttactgccaaaatataatacaataatccaca

SEQ ID NO: 20641 - DNA, 70 bp, Homo sapiens
ttcccttataaacatttacaaataaagttactgccaaaatataatacaataatccacagtaaaggagtga

SEQ ID NO: 20642 - DNA, 69 bp, Homo sapiens
aacatttacaaataaagttactgccaaaatataatacaataatccacagtaaaggagtgacataaaact

SEQ ID NO: 20643 - DNA, 70 bp, Homo sapiens
acaaataaagttactgccaaaatataatacaataatccacagtaaaggagtgacataaaactttctgaaa

SEQ ID NO: 20644 - DNA, 74 bp, Homo sapiens
ctgccaaaatataatacaataatccacagtaaaggagtgacataaaactttctgaaaagtctcacaatgttgtg

SEQ ID NO: 20645 - DNA, 71 bp, Homo sapiens
aaaatataatacaataatccacagtaaaggagtgacataaaactttctgaaaagtctcacaatgttgtggg

SEQ ID NO: 20646 - DNA, 72 bp, Homo sapiens
acaataatccacagtaaaggagtgacataaaactttctgaaaagtctcacaatgttgtggggagtgggtgga

SEQ ID NO: 20647 - DNA, 70 bp, Homo sapiens
acagtaaaggagtgacataaaactttctgaaaagtctcacaatgttgtggggagtgggtggagaacaaaa

SEQ ID NO: 20648 - DNA, 70 bp, Homo sapiens
cataaaactttctgaaaagtctcacaatgttgtggggagtgggtggagaacaaaagcagtaataacaaaa

SEQ ID NO: 20649 - DNA, 68 bp, Homo sapiens
aactttctgaaaagtctcacaatgttgtggggagtgggtggagaacaaaagcagtaataacaaaaaaa

SEQ ID NO: 20650 - DNA, 69 bp, Homo sapiens
caaacaaaaacagaacaggctgctatagctaaattaatgaaaaagaagagtcaaaggtttcttaaaatc

SEQ ID NO: 20651 - DNA, 72 bp, Homo sapiens
aacagaacaggctgctatagctaaattaatgaaaaagaagagtcaaaggtttcttaaaatcgatgtattcaa

SEQ ID NO: 20652 - DNA, 71 bp, Homo sapiens
aggctgctatagctaaattaatgaaaaagaagagtcaaaggtttcttaaaatcgatgtattcaataaatac

SEQ ID NO: 20653 - DNA, 66 bp, Homo sapiens
aattaatgaaaaagaagagtcaaaggtttcttaaaatcgatgtattcaataaatactaaaacaccg

SEQ ID NO: 20654 - DNA, 70 bp, Homo sapiens
aaagaagagtcaaaggtttcttaaaatcgatgtattcaataaatactaaaacaccgtacattcatgttga

SEQ ID NO: 20655 - DNA, 70 bp, Homo sapiens
gtcaaaggtttcttaaaatcgatgtattcaataaatactaaaacaccgtacattcatgttgatatttaac

SEQ ID NO: 20656 - DNA, 73 bp, Homo sapiens
tcttaaaatcgatgtattcaataaatactaaaacaccgtacattcatgttgatatttaactagacaggacaag

SEQ ID NO: 20657 - DNA, 77 bp, Homo sapiens
tgtattcaataaatactaaaacaccgtacattcatgttgatatttaactagacaggacaagtttgctcaggatctca

SEQ ID NO: 20658 - DNA, 73 bp, Homo sapiens
aaatactaaaacaccgtacattcatgttgatatttaactagacaggacaagtttgctcaggatctcaaaccaa

SEQ ID NO: 20659 - DNA, 77 bp, Homo sapiens
taaaacaccgtacattcatgttgatatttaactagacaggacaagtttgctcaggatctcaaaccaagagatgtcaa

SEQ ID NO: 20660 - DNA, 80 bp, Homo sapiens
tacattcatgttgatatttaactagacaggacaagtttgctcaggatctcaaaccaagagatgtcaattttaagagcaca

SEQ ID NO: 20661 - DNA, 78 bp, Homo sapiens
tgttgatatttaactagacaggacaagtttgctcaggatctcaaaccaagagatgtcaattttaagagcacagagtaa

SEQ ID NO: 20662 - DNA, 77 bp, Homo sapiens
ttgatatttaactagacaggacaagtttgctcaggatctcaaaccaagagatgtcaattttaagagcacagagtaaa

SEQ ID NO: 20663 - DNA, 78 bp, Homo sapiens
tatttaactagacaggacaagtttgctcaggatctcaaaccaagagatgtcaattttaagagcacagagtaaatcatc

SEQ ID NO: 20664 - DNA, 79 bp, Homo sapiens
acaggacaagtttgctcaggatctcaaaccaagagatgtcaattttaagagcacagagtaaatcatctgtattcagaaa

SEQ ID NO: 20665 - DNA, 78 bp, Homo sapiens
acaagtttgctcaggatctcaaaccaagagatgtcaattttaagagcacagagtaaatcatctgtattcagaaagttc

SEQ ID NO: 20666 - DNA, 78 bp, Homo sapiens
tttgctcaggatctcaaaccaagagatgtcaattttaagagcacagagtaaatcatctgtattcagaaagttcctaaa

SEQ ID NO: 20667 - DNA, 76 bp, Homo sapiens
aggatctcaaaccaagagatgtcaattttaagagcacagagtaaatcatctgtattcagaaagttcctaaatccaa

SEQ ID NO: 20668 - DNA, 76 bp, Homo sapiens
gatctcaaaccaagagatgtcaattttaagagcacagagtaaatcatctgtattcagaaagttcctaaatccaatt

SEQ ID NO: 20669 - DNA, 76 bp, Homo sapiens
accaagagatgtcaattttaagagcacagagtaaatcatctgtattcagaaagttcctaaatccaatttaagagca

SEQ ID NO: 20670 - DNA, 76 bp, Homo sapiens
caagagatgtcaattttaagagcacagagtaaatcatctgtattcagaaagttcctaaatccaatttaagagcaaa

SEQ ID NO: 20671 - DNA, 70 bp, Homo sapiens
agcacagagtaaatcatctgtattcagaaagttcctaaatccaatttaagagcaaaaaataaagaaaagt

SEQ ID NO: 20672 - DNA, 65 bp, Homo sapiens
aaatcatctgtattcagaaagttcctaaatccaatttaagagcaaaaaataaagaaaagtttttt

SEQ ID NO: 20673 - DNA, 74 bp, Homo sapiens
tttttttggtacacagtactacagattaacagcatactgctattttggggactatgcaaggagactcaagaaaa

SEQ ID NO: 20674 - DNA, 75 bp, Homo sapiens
ttggtacacagtactacagattaacagcatactgctattttggggactatgcaaggagactcaagaaaaacttta

SEQ ID NO: 20675 - DNA, 73 bp, Homo sapiens
acagattaacagcatactgctattttggggactatgcaaggagactcaagaaaaactttagagaactccaaac

SEQ ID NO: 20676 - DNA, 73 bp, Homo sapiens
ttaacagcatactgctattttggggactatgcaaggagactcaagaaaaactttagagaactccaaacctcac

SEQ ID NO: 20677 - DNA, 70 bp, Homo sapiens
tattttggggactatgcaaggagactcaagaaaaactttagagaactccaaacctcactggtcattttgt

SEQ ID NO: 20678 - DNA, 70 bp, Homo sapiens
aaggagactcaagaaaaactttagagaactccaaacctcactggtcattttgttactggacaggcaatta

SEQ ID NO: 20679 - DNA, 70 bp, Homo sapiens
gaaaaactttagagaactccaaacctcactggtcattttgttactggacaggcaattactcatttagaaa

SEQ ID NO: 20680 - DNA, 72 bp, Homo sapiens
tttagagaactccaaacctcactggtcattttgttactggacaggcaattactcatttagaaaactgacctg

SEQ ID NO: 20681 - DNA, 72 bp, Homo sapiens
aaacctcactggtcattttgttactggacaggcaattactcatttagaaaactgacctgtcttagttgatcc

SEQ ID NO: 20682 - DNA, 73 bp, Homo sapiens
gtcattttgttactggacaggcaattactcatttagaaaactgacctgtcttagttgatcccatcgtttaaca

SEQ ID NO: 20683 - DNA, 72 bp, Homo sapiens
tttgttactggacaggcaattactcatttagaaaactgacctgtcttagttgatcccatcgtttaacaagta

SEQ ID NO: 20684 - DNA, 74 bp, Homo sapiens
gacaggcaattactcatttagaaaactgacctgtcttagttgatcccatcgtttaacaagtacaaatcattcta

SEQ ID NO: 20685 - DNA, 70 bp, Homo sapiens
atttagaaaactgacctgtcttagttgatcccatcgtttaacaagtacaaatcattctacctgggcgttc

SEQ ID NO: 20686 - DNA, 70 bp, Homo sapiens
aaactgacctgtcttagttgatcccatcgtttaacaagtacaaatcattctacctgggcgttctcaaaaa

SEQ ID NO: 20687 - DNA, 74 bp, Homo sapiens
aaaaaaaccaaagacttcctttcacaaatccaaacacaagaaagtgcatgagcatgattttatatctgtatgaa

SEQ ID NO: 20688 - DNA, 77 bp, Homo sapiens
aaccaaagacttcctttcacaaatccaaacacaagaaagtgcatgagcatgattttatatctgtatgaataaatata

SEQ ID NO: 20689 - DNA, 78 bp, Homo sapiens
ttcacaaatccaaacacaagaaagtgcatgagcatgattttatatctgtatgaataaatataaactttgtgttaactg

SEQ ID NO: 20690 - DNA, 77 bp, Homo sapiens
gaaagtgcatgagcatgattttatatctgtatgaataaatataaactttgtgttaactgtagtatttaaagacacag

SEQ ID NO: 20691 - DNA, 77 bp, Homo sapiens
agtgcatgagcatgattttatatctgtatgaataaatataaactttgtgttaactgtagtatttaaagacacaggta

SEQ ID NO: 20692 - DNA, 77 bp, Homo sapiens
gcatgagcatgattttatatctgtatgaataaatataaactttgtgttaactgtagtatttaaagacacaggtaaga

SEQ ID NO: 20693 - DNA, 74 bp, Homo sapiens
gcatgattttatatctgtatgaataaatataaactttgtgttaactgtagtatttaaagacacaggtaagagag

SEQ ID NO: 20694 - DNA, 75 bp, Homo sapiens
tatatctgtatgaataaatataaactttgtgttaactgtagtatttaaagacacaggtaagagagtatcttgata

SEQ ID NO: 20695 - DNA, 74 bp, Homo sapiens
tgaataaatataaactttgtgttaactgtagtatttaaagacacaggtaagagagtatcttgatagattagcaa

SEQ ID NO: 20696 - DNA, 71 bp, Homo sapiens
aaatataaactttgtgttaactgtagtatttaaagacacaggtaagagagtatcttgatagattagcaaaa

SEQ ID NO: 20697 - DNA, 71 bp, Homo sapiens
aaactttgtgttaactgtagtatttaaagacacaggtaagagagtatcttgatagattagcaaaaacaaga

SEQ ID NO: 20698 - DNA, 72 bp, Homo sapiens
tttgtgttaactgtagtatttaaagacacaggtaagagagtatcttgatagattagcaaaaacaagaaaaca

SEQ ID NO: 20699 - DNA, 72 bp, Homo sapiens
actgtagtatttaaagacacaggtaagagagtatcttgatagattagcaaaaacaagaaaacaaacaagcac

SEQ ID NO: 20700 - DNA, 72 bp, Homo sapiens
acaggtaagagagtatcttgatagattagcaaaaacaagaaaacaaacaagcactagttaagcaactactgg

SEQ ID NO: 20701 - DNA, 75 bp, Homo sapiens
gagagtatcttgatagattagcaaaaacaagaaaacaaacaagcactagttaagcaactactggtattacattca

SEQ ID NO: 20702 - DNA, 74 bp, Homo sapiens
gatagattagcaaaaacaagaaaacaaacaagcactagttaagcaactactggtattacattcaatcttggtca

SEQ ID NO: 20703 - DNA, 71 bp, Homo sapiens
aacaagaaaacaaacaagcactagttaagcaactactggtattacattcaatcttggtcaaaataatttga

SEQ ID NO: 20704 - DNA, 71 bp, Homo sapiens
gcactagttaagcaactactggtattacattcaatcttggtcaaaataatttgaaaactttccaaagaaca

SEQ ID NO: 20705 - DNA, 69 bp, Homo sapiens
aagcaactactggtattacattcaatcttggtcaaaataatttgaaaactttccaaagaacaaattcca

SEQ ID NO: 20706 - DNA, 67 bp, Homo sapiens
ctggtattacattcaatcttggtcaaaataatttgaaaactttccaaagaacaaattccaaagaaat

SEQ ID NO: 20707 - DNA, 66 bp, Homo sapiens
attcaatcttggtcaaaataatttgaaaactttccaaagaacaaattccaaagaaatttcaaaata

SEQ ID NO: 20708 - DNA, 64 bp, Homo sapiens
ggtcaaaataatttgaaaactttccaaagaacaaattccaaagaaatttcaaaataaaagattc

SEQ ID NO: 20709 - DNA, 62 bp, Homo sapiens
gaaaactttccaaagaacaaattccaaagaaatttcaaaataaaagattccaaaaaactaaa

SEQ ID NO: 20710 - DNA, 66 bp, Homo sapiens
caaagaacaaattccaaagaaatttcaaaataaaagattccaaaaaactaaatcataaccaaatga

SEQ ID NO: 20711 - DNA, 66 bp, Homo sapiens
ttccaaagaaatttcaaaataaaagattccaaaaaactaaatcataaccaaatgattaaagggata

SEQ ID NO: 20712 - DNA, 64 bp, Homo sapiens
atttcaaaataaaagattccaaaaaactaaatcataaccaaatgattaaagggatagggaaaag

SEQ ID NO: 20713 - DNA, 63 bp, Homo sapiens
aaaagattccaaaaaactaaatcataaccaaatgattaaagggatagggaaaagtacaaaaac

SEQ ID NO: 20714 - DNA, 64 bp, Homo sapiens
ccaaaaaactaaatcataaccaaatgattaaagggatagggaaaagtacaaaaaccaagtcttc

SEQ ID NO: 20715 - DNA, 70 bp, Homo sapiens
atcataaccaaatgattaaagggatagggaaaagtacaaaaaccaagtcttctgatgaaacacaagaatc

SEQ ID NO: 20716 - DNA, 72 bp, Homo sapiens
ccaaatgattaaagggatagggaaaagtacaaaaaccaagtcttctgatgaaacacaagaatctgatgatac

SEQ ID NO: 20717 - DNA, 73 bp, Homo sapiens
gggatagggaaaagtacaaaaaccaagtcttctgatgaaacacaagaatctgatgatactttatccagaagaa

SEQ ID NO: 20718 - DNA, 74 bp, Homo sapiens
ggaaaagtacaaaaaccaagtcttctgatgaaacacaagaatctgatgatactttatccagaagaaagtcagtg

SEQ ID NO: 20719 - DNA, 75 bp, Homo sapiens
aaccaagtcttctgatgaaacacaagaatctgatgatactttatccagaagaaagtcagtgggttaccacaaata

SEQ ID NO: 20720 - DNA, 77 bp, Homo sapiens
agtcttctgatgaaacacaagaatctgatgatactttatccagaagaaagtcagtgggttaccacaaatatactaca

SEQ ID NO: 20721 - DNA, 76 bp, Homo sapiens
aaacacaagaatctgatgatactttatccagaagaaagtcagtgggttaccacaaatatactacagcaaggcatgg

SEQ ID NO: 20722 - DNA, 67 bp, Homo sapiens
aagaaaagaaaccatacatactagactggttttgcttagctttaggaaataaaagtagaaccactgg

SEQ ID NO: 20723 - DNA, 68 bp, Homo sapiens
agaaaccatacatactagactggttttgcttagctttaggaaataaaagtagaaccactgggtggaaa

SEQ ID NO: 20724 - DNA, 69 bp, Homo sapiens
acatactagactggttttgcttagctttaggaaataaaagtagaaccactgggtggaaactctatggag

SEQ ID NO: 20725 - DNA, 67 bp, Homo sapiens
tttgcttagctttaggaaataaaagtagaaccactgggtggaaactctatggaggaaggatttggtt

SEQ ID NO: 20726 - DNA, 67 bp, Homo sapiens
tttaggaaataaaagtagaaccactgggtggaaactctatggaggaaggatttggtttccacacaac

SEQ ID NO: 20727 - DNA, 69 bp, Homo sapiens
aataaaagtagaaccactgggtggaaactctatggaggaaggatttggtttccacacaaccagaacaga

SEQ ID NO: 20728 - DNA, 71 bp, Homo sapiens
aaccactgggtggaaactctatggaggaaggatttggtttccacacaaccagaacagaagaacagactgta

SEQ ID NO: 20729 - DNA, 73 bp, Homo sapiens
gaaactctatggaggaaggatttggtttccacacaaccagaacagaagaacagactgtactgcctgtaaggaa

SEQ ID NO: 20730 - DNA, 75 bp, Homo sapiens
tatggaggaaggatttggtttccacacaaccagaacagaagaacagactgtactgcctgtaaggaagccaccata

SEQ ID NO: 20731 - DNA, 72 bp, Homo sapiens
tttggtttccacacaaccagaacagaagaacagactgtactgcctgtaaggaagccaccatacctgaggttt

SEQ ID NO: 20732 - DNA, 72 bp, Homo sapiens
tttccacacaaccagaacagaagaacagactgtactgcctgtaaggaagccaccatacctgaggttttttta

SEQ ID NO: 20733 - DNA, 73 bp, Homo sapiens
aacagaagaacagactgtactgcctgtaaggaagccaccatacctgaggtttttttaagacaaggcacactca

SEQ ID NO: 20734 - DNA, 74 bp, Homo sapiens
acagactgtactgcctgtaaggaagccaccatacctgaggtttttttaagacaaggcacactcacatagttcta

SEQ ID NO: 20735 - DNA, 73 bp, Homo sapiens
tgtactgcctgtaaggaagccaccatacctgaggtttttttaagacaaggcacactcacatagttctaaagta

SEQ ID NO: 20736 - DNA, 71 bp, Homo sapiens
gaagccaccatacctgaggtttttttaagacaaggcacactcacatagttctaaagtaccttcaactaaga

SEQ ID NO: 20737 - DNA, 69 bp, Homo sapiens
atacctgaggtttttttaagacaaggcacactcacatagttctaaagtaccttcaactaagattccgtg

SEQ ID NO: 20738 - DNA, 74 bp, Homo sapiens
taagacaaggcacactcacatagttctaaagtaccttcaactaagattccgtggtataaagatgtacattctaa

SEQ ID NO: 20739 - DNA, 71 bp, Homo sapiens
cacactcacatagttctaaagtaccttcaactaagattccgtggtataaagatgtacattctaaaagtaaa

SEQ ID NO: 20740 - DNA, 67 bp, Homo sapiens
ctaaagtaccttcaactaagattccgtggtataaagatgtacattctaaaagtaaatacaattacct

SEQ ID NO: 20741 - DNA, 69 bp, Homo sapiens
cttcaactaagattccgtggtataaagatgtacattctaaaagtaaatacaattacctttaaatgggca

SEQ ID NO: 20742 - DNA, 69 bp, Homo sapiens
ctaagattccgtggtataaagatgtacattctaaaagtaaatacaattacctttaaatgggcagtaatg

SEQ ID NO: 20743 - DNA, 70 bp, Homo sapiens
gatgtacattctaaaagtaaatacaattacctttaaatgggcagtaatgttaaggcacacaaatttaata

SEQ ID NO: 20744 - DNA, 67 bp, Homo sapiens
agtaaatacaattacctttaaatgggcagtaatgttaaggcacacaaatttaatattaactaaattc

SEQ ID NO: 20745 - DNA, 69 bp, Homo sapiens
ctttaaatgggcagtaatgttaaggcacacaaatttaatattaactaaattcttgtgtcaggaactttg

SEQ ID NO: 20746 - DNA, 71 bp, Homo sapiens
gcagtaatgttaaggcacacaaatttaatattaactaaattcttgtgtcaggaactttggaaaaagagatg

SEQ ID NO: 20747 - DNA, 69 bp, Homo sapiens
ggcacacaaatttaatattaactaaattcttgtgtcaggaactttggaaaaagagatggattattaaaa

SEQ ID NO: 20748 - DNA, 68 bp, Homo sapiens
taatattaactaaattcttgtgtcaggaactttggaaaaagagatggattattaaaaaccagtcaaaa

SEQ ID NO: 20749 - DNA, 69 bp, Homo sapiens
actaaattcttgtgtcaggaactttggaaaaagagatggattattaaaaaccagtcaaaaagctataca

SEQ ID NO: 20750 - DNA, 70 bp, Homo sapiens
tgtcaggaactttggaaaaagagatggattattaaaaaccagtcaaaaagctatacaagtaaaaatggca

SEQ ID NO: 20751 - DNA, 68 bp, Homo sapiens
ggaactttggaaaaagagatggattattaaaaaccagtcaaaaagctatacaagtaaaaatggcatat

SEQ ID NO: 20752 - DNA, 73 bp, Homo sapiens
gagatggattattaaaaaccagtcaaaaagctatacaagtaaaaatggcatattacaataatttatgctacca

SEQ ID NO: 20753 - DNA, 70 bp, Homo sapiens
ggattattaaaaaccagtcaaaaagctatacaagtaaaaatggcatattacaataatttatgctaccacc

SEQ ID NO: 20754 - DNA, 71 bp, Homo sapiens
ccagtcaaaaagctatacaagtaaaaatggcatattacaataatttatgctaccaccttctactaaaacca

SEQ ID NO: 20755 - DNA, 69 bp, Homo sapiens
aaaagctatacaagtaaaaatggcatattacaataatttatgctaccaccttctactaaaaccaataaa

SEQ ID NO: 20756 - DNA, 69 bp, Homo sapiens
caagtaaaaatggcatattacaataatttatgctaccaccttctactaaaaccaataaaaaatgagaaa

SEQ ID NO: 20757 - DNA, 76 bp, Homo sapiens
acaggcgtgaggcaccgcaccaggcctatttttaatgataaagctaagtataaaatccgcacagagatcaatgaaa

SEQ ID NO: 20758 - DNA, 74 bp, Homo sapiens
ggcaccgcaccaggcctatttttaatgataaagctaagtataaaatccgcacagagatcaatgaaaactcgaat

SEQ ID NO: 20759 - DNA, 73 bp, Homo sapiens
accaggcctatttttaatgataaagctaagtataaaatccgcacagagatcaatgaaaactcgaattcacctc

SEQ ID NO: 20760 - DNA, 75 bp, Homo sapiens
ctatttttaatgataaagctaagtataaaatccgcacagagatcaatgaaaactcgaattcacctccgctctctc

SEQ ID NO: 20761 - DNA, 76 bp, Homo sapiens
ttttaatgataaagctaagtataaaatccgcacagagatcaatgaaaactcgaattcacctccgctctctccaaga

SEQ ID NO: 20762 - DNA, 76 bp, Homo sapiens
tttaatgataaagctaagtataaaatccgcacagagatcaatgaaaactcgaattcacctccgctctctccaagac

SEQ ID NO: 20763 - DNA, 74 bp, Homo sapiens
taagtataaaatccgcacagagatcaatgaaaactcgaattcacctccgctctctccaagaccttattaaatct

SEQ ID NO: 20764 - DNA, 73 bp, Homo sapiens
aagtataaaatccgcacagagatcaatgaaaactcgaattcacctccgctctctccaagaccttattaaatct

SEQ ID NO: 20765 - DNA, 75 bp, Homo sapiens
taaaatccgcacagagatcaatgaaaactcgaattcacctccgctctctccaagaccttattaaatctttggcta

SEQ ID NO: 20766 - DNA, 71 bp, Homo sapiens
agagatcaatgaaaactcgaattcacctccgctctctccaagaccttattaaatctttggctaaaaaatat

SEQ ID NO: 20767 - DNA, 71 bp, Homo sapiens
gatcaatgaaaactcgaattcacctccgctctctccaagaccttattaaatctttggctaaaaaatattaa

SEQ ID NO: 20768 - DNA, 69 bp, Homo sapiens
atgaaaactcgaattcacctccgctctctccaagaccttattaaatctttggctaaaaaatattaacat

SEQ ID NO: 20769 - DNA, 71 bp, Homo sapiens
gaattcacctccgctctctccaagaccttattaaatctttggctaaaaaatattaacatttatatatataa

SEQ ID NO: 20770 - DNA, 72 bp, Homo sapiens
gctctctccaagaccttattaaatctttggctaaaaaatattaacatttatatatataaacccacaatgaca

SEQ ID NO: 20771 - DNA, 72 bp, Homo sapiens
tctttggctaaaaaatattaacatttatatatataaacccacaatgacaaacaatgggaaggtggcaaatga

SEQ ID NO: 20772 - DNA, 73 bp, Homo sapiens
aaaaatattaacatttatatatataaacccacaatgacaaacaatgggaaggtggcaaatgaacacatgagaa

SEQ ID NO: 20773 - DNA, 74 bp, Homo sapiens
acatttatatatataaacccacaatgacaaacaatgggaaggtggcaaatgaacacatgagaaaatctaacaaa

SEQ ID NO: 20774 - DNA, 72 bp, Homo sapiens
atataaacccacaatgacaaacaatgggaaggtggcaaatgaacacatgagaaaatctaacaaatttctagg

SEQ ID NO: 20775 - DNA, 73 bp, Homo sapiens
acaatgacaaacaatgggaaggtggcaaatgaacacatgagaaaatctaacaaatttctaggggaaagatgtg

SEQ ID NO: 20776 - DNA, 73 bp, Homo sapiens
acaaacaatgggaaggtggcaaatgaacacatgagaaaatctaacaaatttctaggggaaagatgtggacaga

SEQ ID NO: 20777 - DNA, 76 bp, Homo sapiens
aaggtggcaaatgaacacatgagaaaatctaacaaatttctaggggaaagatgtggacagaggactgatcaagcag

SEQ ID NO: 20778 - DNA, 77 bp, Homo sapiens
aatgaacacatgagaaaatctaacaaatttctaggggaaagatgtggacagaggactgatcaagcaggatacagaaa

SEQ ID NO: 20779 - DNA, 75 bp, Homo sapiens
gaaaatctaacaaatttctaggggaaagatgtggacagaggactgatcaagcaggatacagaaaactatagctta

SEQ ID NO: 20780 - DNA, 78 bp, Homo sapiens
taggggaaagatgtggacagaggactgatcaagcaggatacagaaaactatagcttagagtacactcaaaagcagtta

SEQ ID NO: 20781 - DNA, 79 bp, Homo sapiens
atgtggacagaggactgatcaagcaggatacagaaaactatagcttagagtacactcaaaagcagttacagctgacctt

SEQ ID NO: 20782 - DNA, 78 bp, Homo sapiens
agaggactgatcaagcaggatacagaaaactatagcttagagtacactcaaaagcagttacagctgacctttgaacaa

SEQ ID NO: 20783 - DNA, 74 bp, Homo sapiens
aagcaggatacagaaaactatagcttagagtacactcaaaagcagttacagctgacctttgaacaacacaagtt

SEQ ID NO: 20784 - DNA, 77 bp, Homo sapiens
tatagcttagagtacactcaaaagcagttacagctgacctttgaacaacacaagtttgaactgtgtggatccactta

SEQ ID NO: 20785 - DNA, 77 bp, Homo sapiens
tacactcaaaagcagttacagctgacctttgaacaacacaagtttgaactgtgtggatccacttatgtgtggatttc

SEQ ID NO: 20786 - DNA, 74 bp, Homo sapiens
aaaagcagttacagctgacctttgaacaacacaagtttgaactgtgtggatccacttatgtgtggatttcctcc

SEQ ID NO: 20787 - DNA, 75 bp, Homo sapiens
acagctgacctttgaacaacacaagtttgaactgtgtggatccacttatgtgtggatttcctcctctgccacccc

SEQ ID NO: 20788 - DNA, 78 bp, Homo sapiens
tttgaacaacacaagtttgaactgtgtggatccacttatgtgtggatttcctcctctgccacccctgagagagcaaga

SEQ ID NO: 20789 - DNA, 75 bp, Homo sapiens
ttatgtgtggatttcctcctctgccacccctgagagagcaagaccaacaccttcctccaccttatgattttccta

SEQ ID NO: 20790 - DNA, 73 bp, Homo sapiens
atttcctcctctgccacccctgagagagcaagaccaacaccttcctccaccttatgattttcctaataataca

SEQ ID NO: 20791 - DNA, 72 bp, Homo sapiens
ctgccacccctgagagagcaagaccaacaccttcctccaccttatgattttcctaataatacattcttttct

SEQ ID NO: 20792 - DNA, 72 bp, Homo sapiens
tgagagagcaagaccaacaccttcctccaccttatgattttcctaataatacattcttttctttagcttact

SEQ ID NO: 20793 - DNA, 70 bp, Homo sapiens
gagcaagaccaacaccttcctccaccttatgattttcctaataatacattcttttctttagcttacttta

SEQ ID NO: 20794 - DNA, 68 bp, Homo sapiens
aacaccttcctccaccttatgattttcctaataatacattcttttctttagcttactttatagtaaga

SEQ ID NO: 20795 - DNA, 70 bp, Homo sapiens
tccaccttatgattttcctaataatacattcttttctttagcttactttatagtaagaatatagtacgta

SEQ ID NO: 20796 - DNA, 71 bp, Homo sapiens
tcctaataatacattcttttctttagcttactttatagtaagaatatagtacgtactacatataatatacg

SEQ ID NO: 20797 - DNA, 70 bp, Homo sapiens
acattcttttctttagcttactttatagtaagaatatagtacgtactacatataatatacgtaatttgta

SEQ ID NO: 20798 - DNA, 70 bp, Homo sapiens
ctttagcttactttatagtaagaatatagtacgtactacatataatatacgtaatttgtactgtttatgt

SEQ ID NO: 20799 - DNA, 72 bp, Homo sapiens
ctttatagtaagaatatagtacgtactacatataatatacgtaatttgtactgtttatgttgtcagtaaagc

SEQ ID NO: 20800 - DNA, 73 bp, Homo sapiens
aagaatatagtacgtactacatataatatacgtaatttgtactgtttatgttgtcagtaaagcttgggaatca

SEQ ID NO: 20801 - DNA, 72 bp, Homo sapiens
atagtacgtactacatataatatacgtaatttgtactgtttatgttgtcagtaaagcttgggaatcaaagat

SEQ ID NO: 20802 - DNA, 73 bp, Homo sapiens
ctacatataatatacgtaatttgtactgtttatgttgtcagtaaagcttgggaatcaaagattatttgcaaat

SEQ ID NO: 20803 - DNA, 76 bp, Homo sapiens
ttgtactgtttatgttgtcagtaaagcttgggaatcaaagattatttgcaaattatcaactgtgtgggggtcagca

SEQ ID NO: 20804 - DNA, 74 bp, Homo sapiens
tatgttgtcagtaaagcttgggaatcaaagattatttgcaaattatcaactgtgtgggggtcagcacccctaac

SEQ ID NO: 20805 - DNA, 73 bp, Homo sapiens
taaagcttgggaatcaaagattatttgcaaattatcaactgtgtgggggtcagcacccctaaccctcatgttg

SEQ ID NO: 20806 - DNA, 73 bp, Homo sapiens
atcaaagattatttgcaaattatcaactgtgtgggggtcagcacccctaaccctcatgttgtccaagggtcta

SEQ ID NO: 20807 - DNA, 75 bp, Homo sapiens
ttgcaaattatcaactgtgtgggggtcagcacccctaaccctcatgttgtccaagggtctactagtatgatcaaa

SEQ ID NO: 20808 - DNA, 74 bp, Homo sapiens
aattatcaactgtgtgggggtcagcacccctaaccctcatgttgtccaagggtctactagtatgatcaaatgac

SEQ ID NO: 20809 - DNA, 74 bp, Homo sapiens
tgggggtcagcacccctaaccctcatgttgtccaagggtctactagtatgatcaaatgacgcgtatctaccttg

SEQ ID NO: 20810 - DNA, 76 bp, Homo sapiens
tactagtatgatcaaatgacgcgtatctaccttggagaatcccagaagtctagggacttcagaataccaggtttga

SEQ ID NO: 20811 - DNA, 77 bp, Homo sapiens
tatgatcaaatgacgcgtatctaccttggagaatcccagaagtctagggacttcagaataccaggtttgatgaagta

SEQ ID NO: 20812 - DNA, 72 bp, Homo sapiens
cgtatctaccttggagaatcccagaagtctagggacttcagaataccaggtttgatgaagtagaattgaaaa

SEQ ID NO: 20813 - DNA, 72 bp, Homo sapiens
taccttggagaatcccagaagtctagggacttcagaataccaggtttgatgaagtagaattgaaaacaggaa

SEQ ID NO: 20814 - DNA, 71 bp, Homo sapiens
aatcccagaagtctagggacttcagaataccaggtttgatgaagtagaattgaaaacaggaagaggaaaga

SEQ ID NO: 20815 - DNA, 70 bp, Homo sapiens
ctagggacttcagaataccaggtttgatgaagtagaattgaaaacaggaagaggaaagaattaatggaaa

SEQ ID NO: 20816 - DNA, 70 bp, Homo sapiens
agaataccaggtttgatgaagtagaattgaaaacaggaagaggaaagaattaatggaaagtctaagccag

SEQ ID NO: 20817 - DNA, 70 bp, Homo sapiens
ccaggtttgatgaagtagaattgaaaacaggaagaggaaagaattaatggaaagtctaagccaggcgcgg

SEQ ID NO: 20818 - DNA, 76 bp, Homo sapiens
aaaagaaatgaagtttatatagaaaactacatattgccattctcctaatcactgatgctcaatacacaggtcaaag

SEQ ID NO: 20819 - DNA, 78 bp, Homo sapiens
aatgaagtttatatagaaaactacatattgccattctcctaatcactgatgctcaatacacaggtcaaagtatgcctt

SEQ ID NO: 20820 - DNA, 79 bp, Homo sapiens
tatagaaaactacatattgccattctcctaatcactgatgctcaatacacaggtcaaagtatgcctttctctaagtaaa

SEQ ID NO: 20821 - DNA, 79 bp, Homo sapiens
actacatattgccattctcctaatcactgatgctcaatacacaggtcaaagtatgcctttctctaagtaaacacataaa

SEQ ID NO: 20822 - DNA, 75 bp, Homo sapiens
attctcctaatcactgatgctcaatacacaggtcaaagtatgcctttctctaagtaaacacataaaaaggagaag

SEQ ID NO: 20823 - DNA, 76 bp, Homo sapiens
taatcactgatgctcaatacacaggtcaaagtatgcctttctctaagtaaacacataaaaaggagaagggcaacta

SEQ ID NO: 20824 - DNA, 70 bp, Homo sapiens
aatacacaggtcaaagtatgcctttctctaagtaaacacataaaaaggagaagggcaactactgtggtta

SEQ ID NO: 20825 - DNA, 72 bp, Homo sapiens
aggtcaaagtatgcctttctctaagtaaacacataaaaaggagaagggcaactactgtggttactgcaatca

SEQ ID NO: 20826 - DNA, 75 bp, Homo sapiens
tatgcctttctctaagtaaacacataaaaaggagaagggcaactactgtggttactgcaatcatcccagagctaa

SEQ ID NO: 20827 - DNA, 76 bp, Homo sapiens
agtaaacacataaaaaggagaagggcaactactgtggttactgcaatcatcccagagctaagaatctgacattcta

SEQ ID NO: 20828 - DNA, 76 bp, Homo sapiens
ataaaaaggagaagggcaactactgtggttactgcaatcatcccagagctaagaatctgacattctaacatttaga

SEQ ID NO: 20829 - DNA, 78 bp, Homo sapiens
aagggcaactactgtggttactgcaatcatcccagagctaagaatctgacattctaacatttagaggaccctctgata

SEQ ID NO: 20830 - DNA, 78 bp, Homo sapiens
aactactgtggttactgcaatcatcccagagctaagaatctgacattctaacatttagaggaccctctgataatagcc

SEQ ID NO: 20831 - DNA, 79 bp, Homo sapiens
tactgcaatcatcccagagctaagaatctgacattctaacatttagaggaccctctgataatagccggtttctagatta

SEQ ID NO: 20832 - DNA, 76 bp, Homo sapiens
atcatcccagagctaagaatctgacattctaacatttagaggaccctctgataatagccggtttctagattactta

SEQ ID NO: 20833 - DNA, 71 bp, Homo sapiens
ctgacattctaacatttagaggaccctctgataatagccggtttctagattacttactctaaagtaaaaca

SEQ ID NO: 20834 - DNA, 68 bp, Homo sapiens
ataatagccggtttctagattacttactctaaagtaaaacatactgggaaacaagccctactcacgta

SEQ ID NO: 20835 - DNA, 70 bp, Homo sapiens
ttctagattacttactctaaagtaaaacatactgggaaacaagccctactcacgtacaaagagttgccag

SEQ ID NO: 20836 - DNA, 70 bp, Homo sapiens
ttactctaaagtaaaacatactgggaaacaagccctactcacgtacaaagagttgccagtgagcttttaa

SEQ ID NO: 20837 - DNA, 69 bp, Homo sapiens
aaagtaaaacatactgggaaacaagccctactcacgtacaaagagttgccagtgagcttttaaatataa

SEQ ID NO: 20838 - DNA, 71 bp, Homo sapiens
catgcccagcctatttttaatcttaaatgggaatgaaaaggaccaccaagcactaaagtactatcaaaaca

SEQ ID NO: 20839 - DNA, 68 bp, Homo sapiens
ccagcctatttttaatcttaaatgggaatgaaaaggaccaccaagcactaaagtactatcaaaacaaa

SEQ ID NO: 20840 - DNA, 71 bp, Homo sapiens
tcttaaatgggaatgaaaaggaccaccaagcactaaagtactatcaaaacaaaaatcatcctgaaaatcca

SEQ ID NO: 20841 - DNA, 70 bp, Homo sapiens
aatgggaatgaaaaggaccaccaagcactaaagtactatcaaaacaaaaatcatcctgaaaatccaagga

SEQ ID NO: 20842 - DNA, 71 bp, Homo sapiens
gaatgaaaaggaccaccaagcactaaagtactatcaaaacaaaaatcatcctgaaaatccaaggaacagaa

SEQ ID NO: 20843 - DNA, 69 bp, Homo sapiens
aaaggaccaccaagcactaaagtactatcaaaacaaaaatcatcctgaaaatccaaggaacagaagaac

SEQ ID NO: 20844 - DNA, 70 bp, Homo sapiens
ccaccaagcactaaagtactatcaaaacaaaaatcatcctgaaaatccaaggaacagaagaacgctaaaa

SEQ ID NO: 20845 - DNA, 69 bp, Homo sapiens
ccaagcactaaagtactatcaaaacaaaaatcatcctgaaaatccaaggaacagaagaacgctaaaaaa

SEQ ID NO: 20846 - DNA, 67 bp, Homo sapiens
cactaaagtactatcaaaacaaaaatcatcctgaaaatccaaggaacagaagaacgctaaaaaaatt

SEQ ID NO: 20847 - DNA, 67 bp, Homo sapiens
ctatcaaaacaaaaatcatcctgaaaatccaaggaacagaagaacgctaaaaaaattttatcccaac

SEQ ID NO: 20848 - DNA, 67 bp, Homo sapiens
caaaacaaaaatcatcctgaaaatccaaggaacagaagaacgctaaaaaaattttatcccaactgag

SEQ ID NO: 20849 - DNA, 66 bp, Homo sapiens
acaaaaatcatcctgaaaatccaaggaacagaagaacgctaaaaaaattttatcccaactgagttt

SEQ ID NO: 20850 - DNA, 68 bp, Homo sapiens
atcatcctgaaaatccaaggaacagaagaacgctaaaaaaattttatcccaactgagttttaagcaaa

SEQ ID NO: 20851 - DNA, 67 bp, Homo sapiens
catcctgaaaatccaaggaacagaagaacgctaaaaaaattttatcccaactgagttttaagcaaaa

SEQ ID NO: 20852 - DNA, 65 bp, Homo sapiens
ctgaaaatccaaggaacagaagaacgctaaaaaaattttatcccaactgagttttaagcaaaaaa

SEQ ID NO: 20853 - DNA, 66 bp, Homo sapiens
ggaacagaagaacgctaaaaaaattttatcccaactgagttttaagcaaaaaaactgtatctaaga

SEQ ID NO: 20854 - DNA, 65 bp, Homo sapiens
gaacgctaaaaaaattttatcccaactgagttttaagcaaaaaaactgtatctaagaaacaggtg

SEQ ID NO: 20855 - DNA, 65 bp, Homo sapiens
aattttatcccaactgagttttaagcaaaaaaactgtatctaagaaacaggtgttgtggttaaaa

SEQ ID NO: 20856 - DNA, 63 bp, Homo sapiens
cccaactgagttttaagcaaaaaaactgtatctaagaaacaggtgttgtggttaaaaaaaaac

SEQ ID NO: 20857 - DNA, 65 bp, Homo sapiens
aagcaaaaaaactgtatctaagaaacaggtgttgtggttaaaaaaaaactttcagagaacaagaa

SEQ ID NO: 20858 - DNA, 68 bp, Homo sapiens
aactgtatctaagaaacaggtgttgtggttaaaaaaaaactttcagagaacaagaatgaattcttcca

SEQ ID NO: 20859 - DNA, 67 bp, Homo sapiens
atctaagaaacaggtgttgtggttaaaaaaaaactttcagagaacaagaatgaattcttccaaatta

SEQ ID NO: 20860 - DNA, 65 bp, Homo sapiens
caggtgttgtggttaaaaaaaaactttcagagaacaagaatgaattcttccaaattaaaaacaaa

SEQ ID NO: 20861 - DNA, 68 bp, Homo sapiens
aaaaggaaatccaaaaagactgagaagacaacaaaaaaatctcccagaaagcagaaacacaggtcaaa

SEQ ID NO: 20862 - DNA, 70 bp, Homo sapiens
aaatccaaaaagactgagaagacaacaaaaaaatctcccagaaagcagaaacacaggtcaaagacacaac

SEQ ID NO: 20863 - DNA, 72 bp, Homo sapiens
actgagaagacaacaaaaaaatctcccagaaagcagaaacacaggtcaaagacacaactgttaagatagaaa

SEQ ID NO: 20864 - DNA, 72 bp, Homo sapiens
acaaaaaaatctcccagaaagcagaaacacaggtcaaagacacaactgttaagatagaaaggatctaagcaa

SEQ ID NO: 20865 - DNA, 73 bp, Homo sapiens
aaaatctcccagaaagcagaaacacaggtcaaagacacaactgttaagatagaaaggatctaagcaaaatgta

SEQ ID NO: 20866 - DNA, 74 bp, Homo sapiens
aagcagaaacacaggtcaaagacacaactgttaagatagaaaggatctaagcaaaatgtagtaaaatgtcagga

SEQ ID NO: 20867 - DNA, 72 bp, Homo sapiens
acacaggtcaaagacacaactgttaagatagaaaggatctaagcaaaatgtagtaaaatgtcaggacaaaag

SEQ ID NO: 20868 - DNA, 73 bp, Homo sapiens
cacaactgttaagatagaaaggatctaagcaaaatgtagtaaaatgtcaggacaaaaggacaatcctaaatgc

SEQ ID NO: 20869 - DNA, 73 bp, Homo sapiens
taagatagaaaggatctaagcaaaatgtagtaaaatgtcaggacaaaaggacaatcctaaatgcttttgagga

SEQ ID NO: 20870 - DNA, 71 bp, Homo sapiens
aaaggatctaagcaaaatgtagtaaaatgtcaggacaaaaggacaatcctaaatgcttttgaggatagagg

SEQ ID NO: 20871 - DNA, 73 bp, Homo sapiens
aaaatgtagtaaaatgtcaggacaaaaggacaatcctaaatgcttttgaggatagagggcacaggtcacaaga

SEQ ID NO: 20872 - DNA, 76 bp, Homo sapiens
tagtaaaatgtcaggacaaaaggacaatcctaaatgcttttgaggatagagggcacaggtcacaagaagcacaaga

SEQ ID NO: 20873 - DNA, 79 bp, Homo sapiens
gacaaaaggacaatcctaaatgcttttgaggatagagggcacaggtcacaagaagcacaagagcattagaccatcagta

SEQ ID NO: 20874 - DNA, 78 bp, Homo sapiens
acaatcctaaatgcttttgaggatagagggcacaggtcacaagaagcacaagagcattagaccatcagtaatggttac

SEQ ID NO: 20875 - DNA, 80 bp, Homo sapiens
taaatgcttttgaggatagagggcacaggtcacaagaagcacaagagcattagaccatcagtaatggttactgcaagaag

SEQ ID NO: 20876 - DNA, 81 bp, Homo sapiens
gatagagggcacaggtcacaagaagcacaagagcattagaccatcagtaatggttactgcaagaaggaagacagtcgatgt

SEQ ID NO: 20877 - DNA, 81 bp, Homo sapiens
acaggtcacaagaagcacaagagcattagaccatcagtaatggttactgcaagaaggaagacagtcgatgttctgagaata

SEQ ID NO: 20878 - DNA, 78 bp, Homo sapiens
aagaagcacaagagcattagaccatcagtaatggttactgcaagaaggaagacagtcgatgttctgagaataaattat

SEQ ID NO: 20879 - DNA, 78 bp, Homo sapiens
acaagagcattagaccatcagtaatggttactgcaagaaggaagacagtcgatgttctgagaataaattattttcaca

SEQ ID NO: 20880 - DNA, 73 bp, Homo sapiens
agtaatggttactgcaagaaggaagacagtcgatgttctgagaataaattattttcacacaagtccctaatat

SEQ ID NO: 20881 - DNA, 75 bp, Homo sapiens
ggaagacagtcgatgttctgagaataaattattttcacacaagtccctaatattaaattgtgtggaatgaatgaa

SEQ ID NO: 20882 - DNA, 72 bp, Homo sapiens
cgatgttctgagaataaattattttcacacaagtccctaatattaaattgtgtggaatgaatgaaggtattt

SEQ ID NO: 20883 - DNA, 71 bp, Homo sapiens
cacacaagtccctaatattaaattgtgtggaatgaatgaaggtattttcagacctctaagtagtcaaaggt

SEQ ID NO: 20884 - DNA, 70 bp, Homo sapiens
gtccctaatattaaattgtgtggaatgaatgaaggtattttcagacctctaagtagtcaaaggttagcct

SEQ ID NO: 20885 - DNA, 73 bp, Homo sapiens
aattgtgtggaatgaatgaaggtattttcagacctctaagtagtcaaaggttagccttcatattacacttcac

SEQ ID NO: 20886 - DNA, 74 bp, Homo sapiens
aatgaatgaaggtattttcagacctctaagtagtcaaaggttagccttcatattacacttcacttgaagacaca

SEQ ID NO: 20887 - DNA, 73 bp, Homo sapiens
aaggtattttcagacctctaagtagtcaaaggttagccttcatattacacttcacttgaagacacattccaga

SEQ ID NO: 20888 - DNA, 75 bp, Homo sapiens
tttcagacctctaagtagtcaaaggttagccttcatattacacttcacttgaagacacattccagaaaattcaga

SEQ ID NO: 20889 - DNA, 72 bp, Homo sapiens
ctaagtagtcaaaggttagccttcatattacacttcacttgaagacacattccagaaaattcagaaaataaa

SEQ ID NO: 20890 - DNA, 74 bp, Homo sapiens
tcatattacacttcacttgaagacacattccagaaaattcagaaaataaataaagagaaaaaccctatatgcag

SEQ ID NO: 20891 - DNA, 75 bp, Homo sapiens
tcacttgaagacacattccagaaaattcagaaaataaataaagagaaaaaccctatatgcaggacatagcagttc

SEQ ID NO: 20892 - DNA, 76 bp, Homo sapiens
aaaattcagaaaataaataaagagaaaaaccctatatgcaggacatagcagttctcactgagcagacttgacgaga

SEQ ID NO: 20893 - DNA, 77 bp, Homo sapiens
aaaataaataaagagaaaaaccctatatgcaggacatagcagttctcactgagcagacttgacgagaatatcttgaa

SEQ ID NO: 20894 - DNA, 88 bp, Homo sapiens
atgcaggacatagcagttctcactgagcagacttgacgagaatatcttgaagcaatgctgaaggcctagagaataatcagagtccaca

SEQ ID NO: 20895 - DNA, 86 bp, Homo sapiens
actgagcagacttgacgagaatatcttgaagcaatgctgaaggcctagagaataatcagagtccacactgctgcaggaggacagag

SEQ ID NO: 20896 - DNA, 85 bp, Homo sapiens
acttgacgagaatatcttgaagcaatgctgaaggcctagagaataatcagagtccacactgctgcaggaggacagaggtagcaga

SEQ ID NO: 20897 - DNA, 85 bp, Homo sapiens
atatcttgaagcaatgctgaaggcctagagaataatcagagtccacactgctgcaggaggacagaggtagcagagaatgaagtaa

SEQ ID NO: 20898 - DNA, 80 bp, Homo sapiens
aataatcagagtccacactgctgcaggaggacagaggtagcagagaatgaagtaactggggtaaatgaaatgttctgata

SEQ ID NO: 20899 - DNA, 79 bp, Homo sapiens
acactgctgcaggaggacagaggtagcagagaatgaagtaactggggtaaatgaaatgttctgataccatccttcagaa

SEQ ID NO: 20900 - DNA, 75 bp, Homo sapiens
aggaggacagaggtagcagagaatgaagtaactggggtaaatgaaatgttctgataccatccttcagaatttgga

SEQ ID NO: 20901 - DNA, 74 bp, Homo sapiens
aggtagcagagaatgaagtaactggggtaaatgaaatgttctgataccatccttcagaatttggaacagttcta

SEQ ID NO: 20902 - DNA, 74 bp, Homo sapiens
agaatgaagtaactggggtaaatgaaatgttctgataccatccttcagaatttggaacagttctatggaagtca

SEQ ID NO: 20903 - DNA, 72 bp, Homo sapiens
aagtaactggggtaaatgaaatgttctgataccatccttcagaatttggaacagttctatggaagtcagtaa

SEQ ID NO: 20904 - DNA, 74 bp, Homo sapiens
aaatgaaatgttctgataccatccttcagaatttggaacagttctatggaagtcagtaagcggtggtaatacca

SEQ ID NO: 20905 - DNA, 73 bp, Homo sapiens
ttctgataccatccttcagaatttggaacagttctatggaagtcagtaagcggtggtaataccagggaaaata

SEQ ID NO: 20906 - DNA, 72 bp, Homo sapiens
atccttcagaatttggaacagttctatggaagtcagtaagcggtggtaataccagggaaaataggaatcaga

SEQ ID NO: 20907 - DNA, 70 bp, Homo sapiens
agaatttggaacagttctatggaagtcagtaagcggtggtaataccagggaaaataggaatcagaaactc

SEQ ID NO: 20908 - DNA, 68 bp, Homo sapiens
ttctatggaagtcagtaagcggtggtaataccagggaaaataggaatcagaaactccaaggggaaaaa

SEQ ID NO: 20909 - DNA, 68 bp, Homo sapiens
gtggtaataccagggaaaataggaatcagaaactccaaggggaaaaaatctgggcagcactactttcg

SEQ ID NO: 20910 - DNA, 68 bp, Homo sapiens
cagggaaaataggaatcagaaactccaaggggaaaaaatctgggcagcactactttcgtaagttgtaa

SEQ ID NO: 20911 - DNA, 74 bp, Homo sapiens
ggaaaaaatctgggcagcactactttcgtaagttgtaacagaatcatttgcaacagttcatttgcaactattaa

SEQ ID NO: 20912 - DNA, 75 bp, Homo sapiens
aatctgggcagcactactttcgtaagttgtaacagaatcatttgcaacagttcatttgcaactattaaattattc

SEQ ID NO: 20913 - DNA, 74 bp, Homo sapiens
agcactactttcgtaagttgtaacagaatcatttgcaacagttcatttgcaactattaaattattcttcaaaga

SEQ ID NO: 20914 - DNA, 75 bp, Homo sapiens
cgtaagttgtaacagaatcatttgcaacagttcatttgcaactattaaattattcttcaaagaacagaagacaga

SEQ ID NO: 20915 - DNA, 76 bp, Homo sapiens
cagaatcatttgcaacagttcatttgcaactattaaattattcttcaaagaacagaagacagaagacagtaacagt

SEQ ID NO: 20916 - DNA, 76 bp, Homo sapiens
gcaacagttcatttgcaactattaaattattcttcaaagaacagaagacagaagacagtaacagttacaggacaga

SEQ ID NO: 20917 - DNA, 73 bp, Homo sapiens
gttcatttgcaactattaaattattcttcaaagaacagaagacagaagacagtaacagttacaggacagaaaa

SEQ ID NO: 20918 - DNA, 72 bp, Homo sapiens
actattaaattattcttcaaagaacagaagacagaagacagtaacagttacaggacagaaaatattatcaat

SEQ ID NO: 20919 - DNA, 74 bp, Homo sapiens
attcttcaaagaacagaagacagaagacagtaacagttacaggacagaaaatattatcaattttatcaatataa

SEQ ID NO: 20920 - DNA, 73 bp, Homo sapiens
cagaagacagaagacagtaacagttacaggacagaaaatattatcaattttatcaatataaaaataaagatgg

SEQ ID NO: 20921 - DNA, 71 bp, Homo sapiens
gaagacagtaacagttacaggacagaaaatattatcaattttatcaatataaaaataaagatggggccagg

SEQ ID NO: 20922 - DNA, 70 bp, Homo sapiens
agtaacagttacaggacagaaaatattatcaattttatcaatataaaaataaagatggggccaggtgcgg

SEQ ID NO: 20923 - DNA, 64 bp, Homo sapiens
aaaaaaaaagatgagaaaagaaataagggtaataaaaacatagggaaaggtactaatatcctca

SEQ ID NO: 20924 - DNA, 70 bp, Homo sapiens
gatgagaaaagaaataagggtaataaaaacatagggaaaggtactaatatcctcatctgacaaagaagac

SEQ ID NO: 20925 - DNA, 69 bp, Homo sapiens
aagaaataagggtaataaaaacatagggaaaggtactaatatcctcatctgacaaagaagactcaagaa

SEQ ID NO: 20926 - DNA, 71 bp, Homo sapiens
gggtaataaaaacatagggaaaggtactaatatcctcatctgacaaagaagactcaagaaatattatcacc

SEQ ID NO: 20927 - DNA, 74 bp, Homo sapiens
aaacatagggaaaggtactaatatcctcatctgacaaagaagactcaagaaatattatcaccttgttgacagaa

SEQ ID NO: 20928 - DNA, 76 bp, Homo sapiens
catagggaaaggtactaatatcctcatctgacaaagaagactcaagaaatattatcaccttgttgacagaataaga

SEQ ID NO: 20929 - DNA, 75 bp, Homo sapiens
tagggaaaggtactaatatcctcatctgacaaagaagactcaagaaatattatcaccttgttgacagaataagaa

SEQ ID NO: 20930 - DNA, 73 bp, Homo sapiens
aaaggtactaatatcctcatctgacaaagaagactcaagaaatattatcaccttgttgacagaataagaaaaa

SEQ ID NO: 20931 - DNA, 77 bp, Homo sapiens
atatcctcatctgacaaagaagactcaagaaatattatcaccttgttgacagaataagaaaaatatgtaagtacgca

SEQ ID NO: 20932 - DNA, 76 bp, Homo sapiens
cctcatctgacaaagaagactcaagaaatattatcaccttgttgacagaataagaaaaatatgtaagtacgcagct

SEQ ID NO: 20933 - DNA, 77 bp, Homo sapiens
ctcatctgacaaagaagactcaagaaatattatcaccttgttgacagaataagaaaaatatgtaagtacgcagctta

SEQ ID NO: 20934 - DNA, 74 bp, Homo sapiens
ctgacaaagaagactcaagaaatattatcaccttgttgacagaataagaaaaatatgtaagtacgcagcttaaa

SEQ ID NO: 20935 - DNA, 74 bp, Homo sapiens
gaagactcaagaaatattatcaccttgttgacagaataagaaaaatatgtaagtacgcagcttaaatttgcaaa

SEQ ID NO: 20936 - DNA, 73 bp, Homo sapiens
gaaatattatcaccttgttgacagaataagaaaaatatgtaagtacgcagcttaaatttgcaaaggtttctca

SEQ ID NO: 20937 - DNA, 71 bp, Homo sapiens
caccttgttgacagaataagaaaaatatgtaagtacgcagcttaaatttgcaaaggtttctcaaaacctga

SEQ ID NO: 20938 - DNA, 76 bp, Homo sapiens
gacagaataagaaaaatatgtaagtacgcagcttaaatttgcaaaggtttctcaaaacctgacacatgtatcatga

SEQ ID NO: 20939 - DNA, 76 bp, Homo sapiens
tgtaagtacgcagcttaaatttgcaaaggtttctcaaaacctgacacatgtatcatgatagtatgggagattaatt

SEQ ID NO: 20940 - DNA, 76 bp, Homo sapiens
gcttaaatttgcaaaggtttctcaaaacctgacacatgtatcatgatagtatgggagattaatttagtggtacaga

SEQ ID NO: 20941 - DNA, 76 bp, Homo sapiens
aaggtttctcaaaacctgacacatgtatcatgatagtatgggagattaatttagtggtacagaaagatctgactat

SEQ ID NO: 20942 - DNA, 81 bp, Homo sapiens
gacacatgtatcatgatagtatgggagattaatttagtggtacagaaagatctgactattcattctatttatctcagttac

SEQ ID NO: 20943 - DNA, 79 bp, Homo sapiens
tgatagtatgggagattaatttagtggtacagaaagatctgactattcattctatttatctcagttactctgtttatgc

SEQ ID NO: 20944 - DNA, 76 bp, Homo sapiens
atgggagattaatttagtggtacagaaagatctgactattcattctatttatctcagttactctgtttatgccagg

SEQ ID NO: 20945 - DNA, 76 bp, Homo sapiens
taatttagtggtacagaaagatctgactattcattctatttatctcagttactctgtttatgccaggtgataaccc

SEQ ID NO: 20946 - DNA, 75 bp, Homo sapiens
tacagaaagatctgactattcattctatttatctcagttactctgtttatgccaggtgataacccgtttttcact

SEQ ID NO: 20947 - DNA, 75 bp, Homo sapiens
tgactattcattctatttatctcagttactctgtttatgccaggtgataacccgtttttcacttcctgtggaata

SEQ ID NO: 20948 - DNA, 72 bp, Homo sapiens
cattctatttatctcagttactctgtttatgccaggtgataacccgtttttcacttcctgtggaatataatt

SEQ ID NO: 20949 - DNA, 70 bp, Homo sapiens
ttatctcagttactctgtttatgccaggtgataacccgtttttcacttcctgtggaatataattttcttt

SEQ ID NO: 20950 - DNA, 64 bp, Homo sapiens
ggcgtgggccaccaggtccagcccataattttctttaaaaagctatttaaattaaaaagtaagt

SEQ ID NO: 20951 - DNA, 63 bp, Homo sapiens
caggtccagcccataattttctttaaaaagctatttaaattaaaaagtaagttaatttcggcc

SEQ ID NO: 20952 - DNA, 63 bp, Homo sapiens
gcccataattttctttaaaaagctatttaaattaaaaagtaagttaatttcggcctggcgtgg

SEQ ID NO: 20953 - DNA, 64 bp, Homo sapiens
aaaaaagtaagttaatttccttaagttcaaaatacataataaagtggtaggtggaccctggcaa

SEQ ID NO: 20954 - DNA, 66 bp, Homo sapiens
agttaatttccttaagttcaaaatacataataaagtggtaggtggaccctggcaaagtctggaagg

SEQ ID NO: 20955 - DNA, 70 bp, Homo sapiens
ttaagttcaaaatacataataaagtggtaggtggaccctggcaaagtctggaaggtggtattcaaatgaa

SEQ ID NO: 20956 - DNA, 72 bp, Homo sapiens
aatacataataaagtggtaggtggaccctggcaaagtctggaaggtggtattcaaatgaatgaagtatgaaa

SEQ ID NO: 20957 - DNA, 71 bp, Homo sapiens
ataataaagtggtaggtggaccctggcaaagtctggaaggtggtattcaaatgaatgaagtatgaaaaaca

SEQ ID NO: 20958 - DNA, 75 bp, Homo sapiens
taggtggaccctggcaaagtctggaaggtggtattcaaatgaatgaagtatgaaaaacacctcaggctgtgcgtg

SEQ ID NO: 20959 - DNA, 75 bp, Homo sapiens
ccctggcaaagtctggaaggtggtattcaaatgaatgaagtatgaaaaacacctcaggctgtgcgtggtggctta

SEQ ID NO: 20960 - DNA, 64 bp, Homo sapiens
taaaataaagaaaaacacttcaatagataaaactaaatttaggaaatacagtaaatttagtaaa

SEQ ID NO: 20961 - DNA, 66 bp, Homo sapiens
agaaaaacacttcaatagataaaactaaatttaggaaatacagtaaatttagtaaacataattata

SEQ ID NO: 20962 - DNA, 68 bp, Homo sapiens
cacttcaatagataaaactaaatttaggaaatacagtaaatttagtaaacataattatattggaagaa

SEQ ID NO: 20963 - DNA, 66 bp, Homo sapiens
gataaaactaaatttaggaaatacagtaaatttagtaaacataattatattggaagaagtaaataa

SEQ ID NO: 20964 - DNA, 72 bp, Homo sapiens
taggaaatacagtaaatttagtaaacataattatattggaagaagtaaataaagtagaggtgatacatgagc

SEQ ID NO: 20965 - DNA, 73 bp, Homo sapiens
gtaaatttagtaaacataattatattggaagaagtaaataaagtagaggtgatacatgagctaaattctcatc

SEQ ID NO: 20966 - DNA, 75 bp, Homo sapiens
taaacataattatattggaagaagtaaataaagtagaggtgatacatgagctaaattctcatctaccataacagg

SEQ ID NO: 20967 - DNA, 75 bp, Homo sapiens
tatattggaagaagtaaataaagtagaggtgatacatgagctaaattctcatctaccataacaggttacatttac

SEQ ID NO: 20968 - DNA, 74 bp, Homo sapiens
ggaagaagtaaataaagtagaggtgatacatgagctaaattctcatctaccataacaggttacatttacttaga

SEQ ID NO: 20969 - DNA, 73 bp, Homo sapiens
aagtagaggtgatacatgagctaaattctcatctaccataacaggttacatttacttagatttaataaaccaa

SEQ ID NO: 20970 - DNA, 74 bp, Homo sapiens
gaggtgatacatgagctaaattctcatctaccataacaggttacatttacttagatttaataaaccaaaacaca

SEQ ID NO: 20971 - DNA, 72 bp, Homo sapiens
gctaaattctcatctaccataacaggttacatttacttagatttaataaaccaaaacacagtaatataagca

SEQ ID NO: 20972 - DNA, 73 bp, Homo sapiens
tcatctaccataacaggttacatttacttagatttaataaaccaaaacacagtaatataagcacatttagcga

SEQ ID NO: 20973 - DNA, 72 bp, Homo sapiens
ccataacaggttacatttacttagatttaataaaccaaaacacagtaatataagcacatttagcgatatgaa

SEQ ID NO: 20974 - DNA, 74 bp, Homo sapiens
tttacttagatttaataaaccaaaacacagtaatataagcacatttagcgatatgaactaaattatatatcaga

SEQ ID NO: 20975 - DNA, 76 bp, Homo sapiens
tagatttaataaaccaaaacacagtaatataagcacatttagcgatatgaactaaattatatatcagatgaattaa

SEQ ID NO: 20976 - DNA, 75 bp, Homo sapiens
accaaaacacagtaatataagcacatttagcgatatgaactaaattatatatcagatgaattaaaaatagtaaca

SEQ ID NO: 20977 - DNA, 75 bp, Homo sapiens
cacagtaatataagcacatttagcgatatgaactaaattatatatcagatgaattaaaaatagtaacaaaagtgg

SEQ ID NO: 20978 - DNA, 75 bp, Homo sapiens
gcacatttagcgatatgaactaaattatatatcagatgaattaaaaatagtaacaaaagtggtttctttgacaga

SEQ ID NO: 20979 - DNA, 73 bp, Homo sapiens
gcgatatgaactaaattatatatcagatgaattaaaaatagtaacaaaagtggtttctttgacagaggaggcc

SEQ ID NO: 20980 - DNA, 72 bp, Homo sapiens
aattatatatcagatgaattaaaaatagtaacaaaagtggtttctttgacagaggaggcctaggagctggga

SEQ ID NO: 20981 - DNA, 74 bp, Homo sapiens
tatatcagatgaattaaaaatagtaacaaaagtggtttctttgacagaggaggcctaggagctgggaaagcaga

SEQ ID NO: 20982 - DNA, 69 bp, Homo sapiens
aattaaaaatagtaacaaaagtggtttctttgacagaggaggcctaggagctgggaaagcagagtaggc

SEQ ID NO: 20983 - DNA, 73 bp, Homo sapiens
taacaaaagtggtttctttgacagaggaggcctaggagctgggaaagcagagtaggccaggatctattaataa

SEQ ID NO: 20984 - DNA, 73 bp, Homo sapiens
tttctttgacagaggaggcctaggagctgggaaagcagagtaggccaggatctattaataagcccttctttac

SEQ ID NO: 20985 - DNA, 71 bp, Homo sapiens
agaggaggcctaggagctgggaaagcagagtaggccaggatctattaataagcccttctttactacccaat

SEQ ID NO: 20986 - DNA, 73 bp, Homo sapiens
taggagctgggaaagcagagtaggccaggatctattaataagcccttctttactacccaattgtttaatgaca

SEQ ID NO: 20987 - DNA, 75 bp, Homo sapiens
ctgggaaagcagagtaggccaggatctattaataagcccttctttactacccaattgtttaatgacatgcatgta

SEQ ID NO: 20988 - DNA, 77 bp, Homo sapiens
agagtaggccaggatctattaataagcccttctttactacccaattgtttaatgacatgcatgtatgcaatgccttg

SEQ ID NO: 20989 - DNA, 76 bp, Homo sapiens
atctattaataagcccttctttactacccaattgtttaatgacatgcatgtatgcaatgccttggtaggaatggga

SEQ ID NO: 20990 - DNA, 76 bp, Homo sapiens
ataagcccttctttactacccaattgtttaatgacatgcatgtatgcaatgccttggtaggaatgggacaggtgta

SEQ ID NO: 20991 - DNA, 77 bp, Homo sapiens
ttctttactacccaattgtttaatgacatgcatgtatgcaatgccttggtaggaatgggacaggtgtaggatggaaa

SEQ ID NO: 20992 - DNA, 81 bp, Homo sapiens
ttgtttaatgacatgcatgtatgcaatgccttggtaggaatgggacaggtgtaggatggaaaatcaggtcagcaagtatta

SEQ ID NO: 20993 - DNA, 82 bp, Homo sapiens
taatgacatgcatgtatgcaatgccttggtaggaatgggacaggtgtaggatggaaaatcaggtcagcaagtattagcaaaa

SEQ ID NO: 20994 - DNA, 76 bp, Homo sapiens
atgtatgcaatgccttggtaggaatgggacaggtgtaggatggaaaatcaggtcagcaagtattagcaaaaaatta

SEQ ID NO: 20995 - DNA, 70 bp, Homo sapiens
aatgggacaggtgtaggatggaaaatcaggtcagcaagtattagcaaaaaattaagaaaagccttctaaa

SEQ ID NO: 20996 - DNA, 72 bp, Homo sapiens
gtaggatggaaaatcaggtcagcaagtattagcaaaaaattaagaaaagccttctaaagtgactgacactta

SEQ ID NO: 20997 - DNA, 70 bp, Homo sapiens
aaatcaggtcagcaagtattagcaaaaaattaagaaaagccttctaaagtgactgacacttacctactgg

SEQ ID NO: 20998 - DNA, 69 bp, Homo sapiens
aggtcagcaagtattagcaaaaaattaagaaaagccttctaaagtgactgacacttacctactggggcc

SEQ ID NO: 20999 - DNA, 68 bp, Homo sapiens
tattagcaaaaaattaagaaaagccttctaaagtgactgacacttacctactggggcctggggggctc

SEQ ID NO: 21000 - DNA, 66 bp, Homo sapiens
aaaattaagaaaagccttctaaagtgactgacacttacctactggggcctggggggctccaaagcc

SEQ ID NO: 21001 - DNA, 70 bp, Homo sapiens
cttctaaagtgactgacacttacctactggggcctggggggctccaaagcccaaagtggctgtcgtagta

SEQ ID NO: 21002 - DNA, 69 bp, Homo sapiens
aagtgactgacacttacctactggggcctggggggctccaaagcccaaagtggctgtcgtagtattaaa

SEQ ID NO: 21003 - DNA, 67 bp, Homo sapiens
acacttacctactggggcctggggggctccaaagcccaaagtggctgtcgtagtattaaatccaggg

SEQ ID NO: 21004 - DNA, 68 bp, Homo sapiens
ggcctggggggctccaaagcccaaagtggctgtcgtagtattaaatccaggggccccaaaggctcctg

SEQ ID NO: 21005 - DNA, 69 bp, Homo sapiens
ccaaagtggctgtcgtagtattaaatccaggggccccaaaggctcctgtaccaagaggccctccaatct

SEQ ID NO: 21006 - DNA, 68 bp, Homo sapiens
tgtcgtagtattaaatccaggggccccaaaggctcctgtaccaagaggccctccaatcttaggttggt

SEQ ID NO: 21007 - DNA, 68 bp, Homo sapiens
tagtattaaatccaggggccccaaaggctcctgtaccaagaggccctccaatcttaggttggttgttc

SEQ ID NO: 21008 - DNA, 68 bp, Homo sapiens
gggccccaaaggctcctgtaccaagaggccctccaatcttaggttggttgttcccaaacaaagatgcc

SEQ ID NO: 21009 - DNA, 73 bp, Homo sapiens
taccaagaggccctccaatcttaggttggttgttcccaaacaaagatgcctgtccagcaccaagagctacgga

SEQ ID NO: 21010 - DNA, 72 bp, Homo sapiens
atcttaggttggttgttcccaaacaaagatgcctgtccagcaccaagagctacggagacaagaggaaagaaa

SEQ ID NO: 21011 - DNA, 76 bp, Homo sapiens
aaactagaaagtcaagctgtgtcacttcctagatctcatggtagcagtttcttacctgttccaaatcctgcaccaa

SEQ ID NO: 21012 - DNA, 77 bp, Homo sapiens
aagctgtgtcacttcctagatctcatggtagcagtttcttacctgttccaaatcctgcaccaagcccagttccaaga

SEQ ID NO: 21013 - DNA, 74 bp, Homo sapiens
acttcctagatctcatggtagcagtttcttacctgttccaaatcctgcaccaagcccagttccaagagtcccag

SEQ ID NO: 21014 - DNA, 75 bp, Homo sapiens
tctcatggtagcagtttcttacctgttccaaatcctgcaccaagcccagttccaagagtcccaggtgctggttta

SEQ ID NO: 21015 - DNA, 70 bp, Homo sapiens
agtttcttacctgttccaaatcctgcaccaagcccagttccaagagtcccaggtgctggtttacttccaa

SEQ ID NO: 21016 - DNA, 71 bp, Homo sapiens
tacctgttccaaatcctgcaccaagcccagttccaagagtcccaggtgctggtttacttccaaaaatacta

SEQ ID NO: 21017 - DNA, 70 bp, Homo sapiens
aaatcctgcaccaagcccagttccaagagtcccaggtgctggtttacttccaaaaatactattcccactg

SEQ ID NO: 21018 - DNA, 68 bp, Homo sapiens
accaagcccagttccaagagtcccaggtgctggtttacttccaaaaatactattcccactggtatttg

SEQ ID NO: 21019 - DNA, 69 bp, Homo sapiens
ttccaagagtcccaggtgctggtttacttccaaaaatactattcccactggtatttgtgccaaaaccta

SEQ ID NO: 21020 - DNA, 67 bp, Homo sapiens
aggtgctggtttacttccaaaaatactattcccactggtatttgtgccaaaacctaggaagacaaaa

SEQ ID NO: 21021 - DNA, 69 bp, Homo sapiens
ttacttccaaaaatactattcccactggtatttgtgccaaaacctaggaagacaaaagaatgagtggat

SEQ ID NO: 21022 - DNA, 69 bp, Homo sapiens
caaaaatactattcccactggtatttgtgccaaaacctaggaagacaaaagaatgagtggattgtactt

SEQ ID NO: 21023 - DNA, 70 bp, Homo sapiens
ggtatagtcagtgtaactttaagagagccaaacctgctttttatatgtaccaaaattagaagtgtttgta

SEQ ID NO: 21024 - DNA, 68 bp, Homo sapiens
gtgtaactttaagagagccaaacctgctttttatatgtaccaaaattagaagtgtttgtattggttcc

SEQ ID NO: 21025 - DNA, 68 bp, Homo sapiens
gagagccaaacctgctttttatatgtaccaaaattagaagtgtttgtattggttcctaaagtcagggt

SEQ ID NO: 21026 - DNA, 66 bp, Homo sapiens
acctgctttttatatgtaccaaaattagaagtgtttgtattggttcctaaagtcagggttggtttg

SEQ ID NO: 21027 - DNA, 67 bp, Homo sapiens
tatgtaccaaaattagaagtgtttgtattggttcctaaagtcagggttggtttgttaccaaagagcc

SEQ ID NO: 21028 - DNA, 65 bp, Homo sapiens
aaaattagaagtgtttgtattggttcctaaagtcagggttggtttgttaccaaagagcccgccac

SEQ ID NO: 21029 - DNA, 68 bp, Homo sapiens
tttgtattggttcctaaagtcagggttggtttgttaccaaagagcccgccactggttgtaccaaatga

SEQ ID NO: 21030 - DNA, 66 bp, Homo sapiens
attggttcctaaagtcagggttggtttgttaccaaagagcccgccactggttgtaccaaatgaagg

SEQ ID NO: 21031 - DNA, 70 bp, Homo sapiens
aaagtcagggttggtttgttaccaaagagcccgccactggttgtaccaaatgaaggtgcactggttgtgc

SEQ ID NO: 21032 - DNA, 74 bp, Homo sapiens
tttgttaccaaagagcccgccactggttgtaccaaatgaaggtgcactggttgtgctgcttccaaatgtagtaa

SEQ ID NO: 21033 - DNA, 74 bp, Homo sapiens
aaagagcccgccactggttgtaccaaatgaaggtgcactggttgtgctgcttccaaatgtagtaagcttgttat

SEQ ID NO: 21034 - DNA, 74 bp, Homo sapiens
actggttgtaccaaatgaaggtgcactggttgtgctgcttccaaatgtagtaagcttgttattgccaaacaggg

SEQ ID NO: 21035 - DNA, 74 bp, Homo sapiens
taccaaatgaaggtgcactggttgtgctgcttccaaatgtagtaagcttgttattgccaaacagggtctaaaaa

SEQ ID NO: 21036 - DNA, 73 bp, Homo sapiens
aaggtgcactggttgtgctgcttccaaatgtagtaagcttgttattgccaaacagggtctaaaaagaatagaa

SEQ ID NO: 21037 - DNA, 72 bp, Homo sapiens
ttgtgctgcttccaaatgtagtaagcttgttattgccaaacagggtctaaaaagaatagaatacaggaaaat

SEQ ID NO: 21038 - DNA, 69 bp, Homo sapiens
gcttccaaatgtagtaagcttgttattgccaaacagggtctaaaaagaatagaatacaggaaaatttaa

SEQ ID NO: 21039 - DNA, 73 bp, Homo sapiens
acaaatttacacacatcttcaaattacagtcaactgcagaaacctaccgaaccaacagcaccaaatccagtat

SEQ ID NO: 21040 - DNA, 75 bp, Homo sapiens
acacatcttcaaattacagtcaactgcagaaacctaccgaaccaacagcaccaaatccagtattggtctgcccaa

SEQ ID NO: 21041 - DNA, 74 bp, Homo sapiens
cttcaaattacagtcaactgcagaaacctaccgaaccaacagcaccaaatccagtattggtctgcccaaagaga

SEQ ID NO: 21042 - DNA, 72 bp, Homo sapiens
aactgcagaaacctaccgaaccaacagcaccaaatccagtattggtctgcccaaagagacctgttcctgttc

SEQ ID NO: 21043 - DNA, 70 bp, Homo sapiens
agaaacctaccgaaccaacagcaccaaatccagtattggtctgcccaaagagacctgttcctgttccaaa

SEQ ID NO: 21044 - DNA, 75 bp, Homo sapiens
aaccaacagcaccaaatccagtattggtctgcccaaagagacctgttcctgttccaaatgctgtcccagtgctgg

SEQ ID NO: 21045 - DNA, 76 bp, Homo sapiens
agcaccaaatccagtattggtctgcccaaagagacctgttcctgttccaaatgctgtcccagtgctggtgtttgta

SEQ ID NO: 21046 - DNA, 75 bp, Homo sapiens
tattggtctgcccaaagagacctgttcctgttccaaatgctgtcccagtgctggtgtttgtagctgtcccaaaaa

SEQ ID NO: 21047 - DNA, 73 bp, Homo sapiens
cccaaagagacctgttcctgttccaaatgctgtcccagtgctggtgtttgtagctgtcccaaaaagacctcca

SEQ ID NO: 21048 - DNA, 75 bp, Homo sapiens
agacctgttcctgttccaaatgctgtcccagtgctggtgtttgtagctgtcccaaaaagacctccaggctgtgag

SEQ ID NO: 21049 - DNA, 75 bp, Homo sapiens
ttccaaatgctgtcccagtgctggtgtttgtagctgtcccaaaaagacctccaggctgtgaggcttgggttactc

SEQ ID NO: 21050 - DNA, 74 bp, Homo sapiens
tgtcccagtgctggtgtttgtagctgtcccaaaaagacctccaggctgtgaggcttgggttactccaaataatc

SEQ ID NO: 21051 - DNA, 73 bp, Homo sapiens
tggtgtttgtagctgtcccaaaaagacctccaggctgtgaggcttgggttactccaaataatccctgcaaaga

SEQ ID NO: 21052 - DNA, 72 bp, Homo sapiens
tagctgtcccaaaaagacctccaggctgtgaggcttgggttactccaaataatccctgcaaagaagtttata

SEQ ID NO: 21053 - DNA, 70 bp, Homo sapiens
aaaaagacctccaggctgtgaggcttgggttactccaaataatccctgcaaagaagtttatatagattaa

SEQ ID NO: 21054 - DNA, 68 bp, Homo sapiens
acttaactctaaaaataagacatggaggtaagtaagggtctgtttccttaccatggtgttggtgcttg

SEQ ID NO: 21055 - DNA, 70 bp, Homo sapiens
aaaaataagacatggaggtaagtaagggtctgtttccttaccatggtgttggtgcttggctgtcctatgg

SEQ ID NO: 21056 - DNA, 71 bp, Homo sapiens
aggtaagtaagggtctgtttccttaccatggtgttggtgcttggctgtcctatggtgctggtattaccaaa

SEQ ID NO: 21057 - DNA, 71 bp, Homo sapiens
agtaagggtctgtttccttaccatggtgttggtgcttggctgtcctatggtgctggtattaccaaaggaaa

SEQ ID NO: 21058 - DNA, 74 bp, Homo sapiens
tgtttccttaccatggtgttggtgcttggctgtcctatggtgctggtattaccaaaggaaaagccagtgttctg

SEQ ID NO: 21059 - DNA, 74 bp, Homo sapiens
atggtgttggtgcttggctgtcctatggtgctggtattaccaaaggaaaagccagtgttctgggtggttgtagc

SEQ ID NO: 21060 - DNA, 73 bp, Homo sapiens
cttggctgtcctatggtgctggtattaccaaaggaaaagccagtgttctgggtggttgtagcctggccaaatg

SEQ ID NO: 21061 - DNA, 74 bp, Homo sapiens
tatggtgctggtattaccaaaggaaaagccagtgttctgggtggttgtagcctggccaaatggtttgctgaaga

SEQ ID NO: 21062 - DNA, 72 bp, Homo sapiens
gtattaccaaaggaaaagccagtgttctgggtggttgtagcctggccaaatggtttgctgaagaggctggta

SEQ ID NO: 21063 - DNA, 74 bp, Homo sapiens
aaaggaaaagccagtgttctgggtggttgtagcctggccaaatggtttgctgaagaggctggtagtctgctgat

SEQ ID NO: 21064 - DNA, 77 bp, Homo sapiens
agtgttctgggtggttgtagcctggccaaatggtttgctgaagaggctggtagtctgctgattctgttggccaaaga

SEQ ID NO: 21065 - DNA, 78 bp, Homo sapiens
tctgggtggttgtagcctggccaaatggtttgctgaagaggctggtagtctgctgattctgttggccaaagagaccac

SEQ ID NO: 21066 - DNA, 77 bp, Homo sapiens
cctggccaaatggtttgctgaagaggctggtagtctgctgattctgttggccaaagagaccacctggatttgttcca

SEQ ID NO: 21067 - DNA, 76 bp, Homo sapiens
aaatggtttgctgaagaggctggtagtctgctgattctgttggccaaagagaccacctggatttgttccaaatcca

SEQ ID NO: 21068 - DNA, 73 bp, Homo sapiens
aagaggctggtagtctgctgattctgttggccaaagagaccacctggatttgttccaaatccagttgtacctt

SEQ ID NO: 21069 - DNA, 72 bp, Homo sapiens
tagtctgctgattctgttggccaaagagaccacctggatttgttccaaatccagttgtaccttttaggaaaa

SEQ ID NO: 21070 - DNA, 67 bp, Homo sapiens
attctgttggccaaagagaccacctggatttgttccaaatccagttgtaccttttaggaaaaagaaa

SEQ ID NO: 21071 - DNA, 65 bp, Homo sapiens
gttggccaaagagaccacctggatttgttccaaatccagttgtaccttttaggaaaaagaaaaaa

SEQ ID NO: 21072 - DNA, 78 bp, Homo sapiens
ttagttatctgtctctcctcagtataatctaacatgatatcaagtgcttactagttccaaaggcagttttgttctgac

SEQ ID NO: 21073 - DNA, 80 bp, Homo sapiens
tcctcagtataatctaacatgatatcaagtgcttactagttccaaaggcagttttgttctgaccatatgcaaagcctgaa

SEQ ID NO: 21074 - DNA, 78 bp, Homo sapiens
agtataatctaacatgatatcaagtgcttactagttccaaaggcagttttgttctgaccatatgcaaagcctgaatta

SEQ ID NO: 21075 - DNA, 77 bp, Homo sapiens
aacatgatatcaagtgcttactagttccaaaggcagttttgttctgaccatatgcaaagcctgaattagtggtggag

SEQ ID NO: 21076 - DNA, 76 bp, Homo sapiens
aagtgcttactagttccaaaggcagttttgttctgaccatatgcaaagcctgaattagtggtggaggagctgaaga

SEQ ID NO: 21077 - DNA, 77 bp, Homo sapiens
ctagttccaaaggcagttttgttctgaccatatgcaaagcctgaattagtggtggaggagctgaagagtcctgttgc

SEQ ID NO: 21078 - DNA, 79 bp, Homo sapiens
agttttgttctgaccatatgcaaagcctgaattagtggtggaggagctgaagagtcctgttgcgctggaagtggctgga

SEQ ID NO: 21079 - DNA, 80 bp, Homo sapiens
tgaccatatgcaaagcctgaattagtggtggaggagctgaagagtcctgttgcgctggaagtggctggagaagacccaaa

SEQ ID NO: 21080 - DNA, 76 bp, Homo sapiens
aaagcctgaattagtggtggaggagctgaagagtcctgttgcgctggaagtggctggagaagacccaaacaagcca

SEQ ID NO: 21081 - DNA, 76 bp, Homo sapiens
attagtggtggaggagctgaagagtcctgttgcgctggaagtggctggagaagacccaaacaagccagttgtggta

SEQ ID NO: 21082 - DNA, 76 bp, Homo sapiens
aggagctgaagagtcctgttgcgctggaagtggctggagaagacccaaacaagccagttgtggtacctgctcccac

SEQ ID NO: 21083 - DNA, 73 bp, Homo sapiens
aagagtcctgttgcgctggaagtggctggagaagacccaaacaagccagttgtggtacctgctcccacctggt

SEQ ID NO: 21084 - DNA, 75 bp, Homo sapiens
ctgttgcgctggaagtggctggagaagacccaaacaagccagttgtggtacctgctcccacctggttctgtgggc

SEQ ID NO: 21085 - DNA, 72 bp, Homo sapiens
gtggctggagaagacccaaacaagccagttgtggtacctgctcccacctggttctgtgggcccttcctgtta

SEQ ID NO: 21086 - DNA, 71 bp, Homo sapiens
aagacccaaacaagccagttgtggtacctgctcccacctggttctgtgggcccttcctgttagcctgataa

SEQ ID NO: 21087 - DNA, 72 bp, Homo sapiens
aacaagccagttgtggtacctgctcccacctggttctgtgggcccttcctgttagcctgataatcctctaaa

SEQ ID NO: 21088 - DNA, 72 bp, Homo sapiens
tggtacctgctcccacctggttctgtgggcccttcctgttagcctgataatcctctaaacgaagttcctgaa

SEQ ID NO: 21089 - DNA, 70 bp, Homo sapiens
tcccacctggttctgtgggcccttcctgttagcctgataatcctctaaacgaagttcctgaagggaggga

SEQ ID NO: 21090 - DNA, 69 bp, Homo sapiens
ttctgtgggcccttcctgttagcctgataatcctctaaacgaagttcctgaagggagggaaaacatatt

SEQ ID NO: 21091 - DNA, 69 bp, Homo sapiens
ccttcctgttagcctgataatcctctaaacgaagttcctgaagggagggaaaacatatttctaatctta

SEQ ID NO: 21092 - DNA, 74 bp, Homo sapiens
ccaataaaatcaaaaggttagactgacattctgtattgtattttactgacctctagtgacttgctttcatattc

SEQ ID NO: 21093 - DNA, 78 bp, Homo sapiens
tcaaaaggttagactgacattctgtattgtattttactgacctctagtgacttgctttcatattctttcatagcagta

SEQ ID NO: 21094 - DNA, 79 bp, Homo sapiens
actgacattctgtattgtattttactgacctctagtgacttgctttcatattctttcatagcagtaatacactggtgct

SEQ ID NO: 21095 - DNA, 78 bp, Homo sapiens
tattgtattttactgacctctagtgacttgctttcatattctttcatagcagtaatacactggtgcttggtacttatg

SEQ ID NO: 21096 - DNA, 76 bp, Homo sapiens
attttactgacctctagtgacttgctttcatattctttcatagcagtaatacactggtgcttggtacttatgttag

SEQ ID NO: 21097 - DNA, 80 bp, Homo sapiens
tagtgacttgctttcatattctttcatagcagtaatacactggtgcttggtacttatgttagtgctaactccagctttga

SEQ ID NO: 21098 - DNA, 79 bp, Homo sapiens
tttcatattctttcatagcagtaatacactggtgcttggtacttatgttagtgctaactccagctttgaccatagtatc

SEQ ID NO: 21099 - DNA, 78 bp, Homo sapiens
attctttcatagcagtaatacactggtgcttggtacttatgttagtgctaactccagctttgaccatagtatctgtac

SEQ ID NO: 21100 - DNA, 78 bp, Homo sapiens
tagcagtaatacactggtgcttggtacttatgttagtgctaactccagctttgaccatagtatctgtaccagttggag

SEQ ID NO: 21101 - DNA, 77 bp, Homo sapiens
tggtgcttggtacttatgttagtgctaactccagctttgaccatagtatctgtaccagttggaggctgcaaagttaa

SEQ ID NO: 21102 - DNA, 75 bp, Homo sapiens
ttggtacttatgttagtgctaactccagctttgaccatagtatctgtaccagttggaggctgcaaagttaaataa

SEQ ID NO: 21103 - DNA, 74 bp, Homo sapiens
tgttagtgctaactccagctttgaccatagtatctgtaccagttggaggctgcaaagttaaataaaggcaaatt

SEQ ID NO: 21104 - DNA, 69 bp, Homo sapiens
tacatgcgggaaaaaacattccacaaagattggaagaaaatacatacgttaaatttaatagtagtccca

SEQ ID NO: 21105 - DNA, 69 bp, Homo sapiens
aaaaacattccacaaagattggaagaaaatacatacgttaaatttaatagtagtcccagtaggagcagc

SEQ ID NO: 21106 - DNA, 70 bp, Homo sapiens
cacaaagattggaagaaaatacatacgttaaatttaatagtagtcccagtaggagcagctgtaaaactac

SEQ ID NO: 21107 - DNA, 69 bp, Homo sapiens
ggaagaaaatacatacgttaaatttaatagtagtcccagtaggagcagctgtaaaactacttggcccaa

SEQ ID NO: 21108 - DNA, 68 bp, Homo sapiens
aaaatacatacgttaaatttaatagtagtcccagtaggagcagctgtaaaactacttggcccaaagag

SEQ ID NO: 21109 - DNA, 74 bp, Homo sapiens
aatttaatagtagtcccagtaggagcagctgtaaaactacttggcccaaagagggagccagatgtgctgccaaa

SEQ ID NO: 21110 - DNA, 75 bp, Homo sapiens
atagtagtcccagtaggagcagctgtaaaactacttggcccaaagagggagccagatgtgctgccaaaaggatta

SEQ ID NO: 21111 - DNA, 75 bp, Homo sapiens
taggagcagctgtaaaactacttggcccaaagagggagccagatgtgctgccaaaaggattagaggtggtatttg

SEQ ID NO: 21112 - DNA, 73 bp, Homo sapiens
tgtaaaactacttggcccaaagagggagccagatgtgctgccaaaaggattagaggtggtatttgtggttcca

SEQ ID NO: 21113 - DNA, 72 bp, Homo sapiens
actacttggcccaaagagggagccagatgtgctgccaaaaggattagaggtggtatttgtggttccaaagag

SEQ ID NO: 21114 - DNA, 75 bp, Homo sapiens
aagagggagccagatgtgctgccaaaaggattagaggtggtatttgtggttccaaagagtcctccactgctagta

SEQ ID NO: 21115 - DNA, 74 bp, Homo sapiens
agatgtgctgccaaaaggattagaggtggtatttgtggttccaaagagtcctccactgctagtactggttccaa

SEQ ID NO: 21116 - DNA, 70 bp, Homo sapiens
caaaaggattagaggtggtatttgtggttccaaagagtcctccactgctagtactggttccaaaatctaa

SEQ ID NO: 21117 - DNA, 69 bp, Homo sapiens
attagaggtggtatttgtggttccaaagagtcctccactgctagtactggttccaaaatctaaaaataa

SEQ ID NO: 21118 - DNA, 69 bp, Homo sapiens
tggtatttgtggttccaaagagtcctccactgctagtactggttccaaaatctaaaaataagaaagaaa

SEQ ID NO: 21119 - DNA, 70 bp, Homo sapiens
caaagagtcctccactgctagtactggttccaaaatctaaaaataagaaagaaaaatgagacgataacag

SEQ ID NO: 21120 - DNA, 73 bp, Homo sapiens
ataagcaaaccaaattattagatgcagaactccagtgatgtcccacttactgccaaagccagttggtttattt

SEQ ID NO: 21121 - DNA, 75 bp, Homo sapiens
aaattattagatgcagaactccagtgatgtcccacttactgccaaagccagttggtttattttgtgcaaaggcat

SEQ ID NO: 21122 - DNA, 75 bp, Homo sapiens
agatgcagaactccagtgatgtcccacttactgccaaagccagttggtttattttgtgcaaaggcattgttttgg

SEQ ID NO: 21123 - DNA, 74 bp, Homo sapiens
agtgatgtcccacttactgccaaagccagttggtttattttgtgcaaaggcattgttttgggatgagaagagac

SEQ ID NO: 21124 - DNA, 72 bp, Homo sapiens
acttactgccaaagccagttggtttattttgtgcaaaggcattgttttgggatgagaagagactggtccctg

SEQ ID NO: 21125 - DNA, 74 bp, Homo sapiens
aaagccagttggtttattttgtgcaaaggcattgttttgggatgagaagagactggtccctgtgcttgcagttc

SEQ ID NO: 21126 - DNA, 74 bp, Homo sapiens
ttggtttattttgtgcaaaggcattgttttgggatgagaagagactggtccctgtgcttgcagttccaaacaag

SEQ ID NO: 21127 - DNA, 75 bp, Homo sapiens
attttgtgcaaaggcattgttttgggatgagaagagactggtccctgtgcttgcagttccaaacaaggtatttgc

SEQ ID NO: 21128 - DNA, 74 bp, Homo sapiens
attgttttgggatgagaagagactggtccctgtgcttgcagttccaaacaaggtatttgctgttcctgttgacg

SEQ ID NO: 21129 - DNA, 75 bp, Homo sapiens
ttgggatgagaagagactggtccctgtgcttgcagttccaaacaaggtatttgctgttcctgttgacgtaccaaa

SEQ ID NO: 21130 - DNA, 71 bp, Homo sapiens
aagagactggtccctgtgcttgcagttccaaacaaggtatttgctgttcctgttgacgtaccaaacccaaa

SEQ ID NO: 21131 - DNA, 74 bp, Homo sapiens
tgtgcttgcagttccaaacaaggtatttgctgttcctgttgacgtaccaaacccaaagccagtgcttgtggagg

SEQ ID NO: 21132 - DNA, 71 bp, Homo sapiens
agttccaaacaaggtatttgctgttcctgttgacgtaccaaacccaaagccagtgcttgtggaggtagctg

SEQ ID NO: 21133 - DNA, 74 bp, Homo sapiens
aggtatttgctgttcctgttgacgtaccaaacccaaagccagtgcttgtggaggtagctggctggctaaatgaa

SEQ ID NO: 21134 - DNA, 74 bp, Homo sapiens
tgttcctgttgacgtaccaaacccaaagccagtgcttgtggaggtagctggctggctaaatgaactggttccaa

SEQ ID NO: 21135 - DNA, 74 bp, Homo sapiens
tgttgacgtaccaaacccaaagccagtgcttgtggaggtagctggctggctaaatgaactggttccaaacaatc

SEQ ID NO: 21136 - DNA, 74 bp, Homo sapiens
aaacccaaagccagtgcttgtggaggtagctggctggctaaatgaactggttccaaacaatcctcctgaggaga

SEQ ID NO: 21137 - DNA, 77 bp, Homo sapiens
aagccagtgcttgtggaggtagctggctggctaaatgaactggttccaaacaatcctcctgaggagatggagaagga

SEQ ID NO: 21138 - DNA, 74 bp, Homo sapiens
ttgtggaggtagctggctggctaaatgaactggttccaaacaatcctcctgaggagatggagaaggagggaaaa

SEQ ID NO: 21139 - DNA, 70 bp, Homo sapiens
ttcctatactagctacaaacaaaccagttatatcacaaataaagcccctacctggtttagtctgtgaatt

SEQ ID NO: 21140 - DNA, 69 bp, Homo sapiens
agctacaaacaaaccagttatatcacaaataaagcccctacctggtttagtctgtgaatttccaaagag

SEQ ID NO: 21141 - DNA, 69 bp, Homo sapiens
aaccagttatatcacaaataaagcccctacctggtttagtctgtgaatttccaaagaggcctccagtat

SEQ ID NO: 21142 - DNA, 70 bp, Homo sapiens
caaataaagcccctacctggtttagtctgtgaatttccaaagaggcctccagtattgttgctagaaccaa

SEQ ID NO: 21143 - DNA, 74 bp, Homo sapiens
ccctacctggtttagtctgtgaatttccaaagaggcctccagtattgttgctagaaccaaatgcagatgttcca

SEQ ID NO: 21144 - DNA, 75 bp, Homo sapiens
ctggtttagtctgtgaatttccaaagaggcctccagtattgttgctagaaccaaatgcagatgttccaaatgccc

SEQ ID NO: 21145 - DNA, 76 bp, Homo sapiens
tgtgaatttccaaagaggcctccagtattgttgctagaaccaaatgcagatgttccaaatgcccctccactagtag

SEQ ID NO: 21146 - DNA, 76 bp, Homo sapiens
aaagaggcctccagtattgttgctagaaccaaatgcagatgttccaaatgcccctccactagtagtgccaaagcca

SEQ ID NO: 21147 - DNA, 76 bp, Homo sapiens
agtattgttgctagaaccaaatgcagatgttccaaatgcccctccactagtagtgccaaagccagtatctgaaaaa

SEQ ID NO: 21148 - DNA, 77 bp, Homo sapiens
tgttgctagaaccaaatgcagatgttccaaatgcccctccactagtagtgccaaagccagtatctgaaaaagcaaaa

SEQ ID NO: 21149 - DNA, 76 bp, Homo sapiens
atgcagatgttccaaatgcccctccactagtagtgccaaagccagtatctgaaaaagcaaaatccagagtaaatta

SEQ ID NO: 21150 - DNA, 73 bp, Homo sapiens
tccaaatgcccctccactagtagtgccaaagccagtatctgaaaaagcaaaatccagagtaaattagaattta

SEQ ID NO: 21151 - DNA, 64 bp, Homo sapiens
agggagattaaggtttctccctcttttgtcctttttaaaaacttactctgtccaaatgttgaag

SEQ ID NO: 21152 - DNA, 66 bp, Homo sapiens
aggtttctccctcttttgtcctttttaaaaacttactctgtccaaatgttgaagttgtgccaaagc

SEQ ID NO: 21153 - DNA, 70 bp, Homo sapiens
tccctcttttgtcctttttaaaaacttactctgtccaaatgttgaagttgtgccaaagccacctgtgcca

SEQ ID NO: 21154 - DNA, 67 bp, Homo sapiens
ctttttaaaaacttactctgtccaaatgttgaagttgtgccaaagccacctgtgccacccccaaagg

SEQ ID NO: 21155 - DNA, 70 bp, Homo sapiens
taaaaacttactctgtccaaatgttgaagttgtgccaaagccacctgtgccacccccaaagggtgttcca

SEQ ID NO: 21156 - DNA, 71 bp, Homo sapiens
tccaaatgttgaagttgtgccaaagccacctgtgccacccccaaagggtgttccaaatgatttgttaaaca

SEQ ID NO: 21157 - DNA, 71 bp, Homo sapiens
ttgaagttgtgccaaagccacctgtgccacccccaaagggtgttccaaatgatttgttaaacatcttcaaa

SEQ ID NO: 21158 - DNA, 70 bp, Homo sapiens
caaagccacctgtgccacccccaaagggtgttccaaatgatttgttaaacatcttcaaaatgagtctttg

SEQ ID NO: 21159 - DNA, 70 bp, Homo sapiens
ctgtgccacccccaaagggtgttccaaatgatttgttaaacatcttcaaaatgagtctttgtttcagaaa

SEQ ID NO: 21160 - DNA, 69 bp, Homo sapiens
cccaaagggtgttccaaatgatttgttaaacatcttcaaaatgagtctttgtttcagaaagctgggaaa

SEQ ID NO: 21161 - DNA, 69 bp, Homo sapiens
gggtgttccaaatgatttgttaaacatcttcaaaatgagtctttgtttcagaaagctgggaaaaagaaa

SEQ ID NO: 21162 - DNA, 71 bp, Homo sapiens
gatttgttaaacatcttcaaaatgagtctttgtttcagaaagctgggaaaaagaaaacattatcactctct

SEQ ID NO: 21163 - DNA, 68 bp, Homo sapiens
ggagaaacctgccggtctcggccgctgcagctcgggctcccgacttaccgcggttcggtggggaaggg

SEQ ID NO: 21164 - DNA, 71 bp, Homo sapiens
tgccggtctcggccgctgcagctcgggctcccgacttaccgcggttcggtggggaaggggaagtgtcagga

SEQ ID NO: 21165 - DNA, 68 bp, Homo sapiens
agctcgggctcccgacttaccgcggttcggtggggaaggggaagtgtcaggagtcccctgctgccacc

SEQ ID NO: 21166 - DNA, 73 bp, Homo sapiens
cggttcggtggggaaggggaagtgtcaggagtcccctgctgccacccgccgctcacagagcagcgcgcggccc

SEQ ID NO: 21167 - DNA, 74 bp, Homo sapiens
gaaggggaagtgtcaggagtcccctgctgccacccgccgctcacagagcagcgcgcggcccccacgaaaccgtc

SEQ ID NO: 21168 - DNA, 75 bp, Homo sapiens
aagtgtcaggagtcccctgctgccacccgccgctcacagagcagcgcgcggcccccacgaaaccgtcgccgccgc

SEQ ID NO: 21169 - DNA, 74 bp, Homo sapiens
agtcccctgctgccacccgccgctcacagagcagcgcgcggcccccacgaaaccgtcgccgccgccgctaccac

SEQ ID NO: 21170 - DNA, 74 bp, Homo sapiens
ctgccacccgccgctcacagagcagcgcgcggcccccacgaaaccgtcgccgccgccgctaccacccctgccac

SEQ ID NO: 21171 - DNA, 73 bp, Homo sapiens
tcacagagcagcgcgcggcccccacgaaaccgtcgccgccgccgctaccacccctgccaccgaccgccgcttc

SEQ ID NO: 21172 - DNA, 69 bp, Homo sapiens
agcagcgcgcggcccccacgaaaccgtcgccgccgccgctaccacccctgccaccgaccgccgcttcgg

SEQ ID NO: 21173 - DNA, 71 bp, Homo sapiens
cccacgaaaccgtcgccgccgccgctaccacccctgccaccgaccgccgcttcgggcgcagcgcgcagagg

SEQ ID NO: 21174 - DNA, 71 bp, Homo sapiens
aaaccgtcgccgccgccgctaccacccctgccaccgaccgccgcttcgggcgcagcgcgcagagggcccga

SEQ ID NO: 21175 - DNA, 75 bp, Homo sapiens
gccgctaccacccctgccaccgaccgccgcttcgggcgcagcgcgcagagggcccgactgcgtcacacgccgccc

SEQ ID NO: 21176 - DNA, 75 bp, Homo sapiens
acccctgccaccgaccgccgcttcgggcgcagcgcgcagagggcccgactgcgtcacacgccgcccggcgtcaga

SEQ ID NO: 21177 - DNA, 76 bp, Homo sapiens
accgaccgccgcttcgggcgcagcgcgcagagggcccgactgcgtcacacgccgcccggcgtcagaggctcgttgc

SEQ ID NO: 21178 - DNA, 77 bp, Homo sapiens
cttcgggcgcagcgcgcagagggcccgactgcgtcacacgccgcccggcgtcagaggctcgttgcggacgctccgcc

SEQ ID NO: 21179 - DNA, 76 bp, Homo sapiens
agcgcgcagagggcccgactgcgtcacacgccgcccggcgtcagaggctcgttgcggacgctccgccctcgccgtc

SEQ ID NO: 21180 - DNA, 74 bp, Homo sapiens
ggcccgactgcgtcacacgccgcccggcgtcagaggctcgttgcggacgctccgccctcgccgtccgcgaattg

SEQ ID NO: 21181 - DNA, 74 bp, Homo sapiens
actgcgtcacacgccgcccggcgtcagaggctcgttgcggacgctccgccctcgccgtccgcgaattggtggac

SEQ ID NO: 21182 - DNA, 73 bp, Homo sapiens
cgcccggcgtcagaggctcgttgcggacgctccgccctcgccgtccgcgaattggtggacgcggccgccactc

SEQ ID NO: 21183 - DNA, 74 bp, Homo sapiens
cgtcagaggctcgttgcggacgctccgccctcgccgtccgcgaattggtggacgcggccgccactctgggtcga

SEQ ID NO: 21184 - DNA, 73 bp, Homo sapiens
ttgcggacgctccgccctcgccgtccgcgaattggtggacgcggccgccactctgggtcgaccctgttattca

SEQ ID NO: 21185 - DNA, 71 bp, Homo sapiens
acgctccgccctcgccgtccgcgaattggtggacgcggccgccactctgggtcgaccctgttattcattgg

SEQ ID NO: 21186 - DNA, 70 bp, Homo sapiens
ccgtccgcgaattggtggacgcggccgccactctgggtcgaccctgttattcattgggcaacgcgtcttt

SEQ ID NO: 21187 - DNA, 70 bp, Homo sapiens
aattggtggacgcggccgccactctgggtcgaccctgttattcattgggcaacgcgtcttttgaaaccga

SEQ ID NO: 21188 - DNA, 69 bp, Homo sapiens
acgcggccgccactctgggtcgaccctgttattcattgggcaacgcgtcttttgaaaccgaactgaagg

SEQ ID NO: 21189 - DNA, 67 bp, Homo sapiens
ccactctgggtcgaccctgttattcattgggcaacgcgtcttttgaaaccgaactgaagggggaagg

SEQ ID NO: 21190 - DNA, 66 bp, Homo sapiens
accctgttattcattgggcaacgcgtcttttgaaaccgaactgaagggggaaggggcgagagggaa

SEQ ID NO: 21191 - DNA, 67 bp, Homo sapiens
gttattcattgggcaacgcgtcttttgaaaccgaactgaagggggaaggggcgagagggaagaggag

SEQ ID NO: 21192 - DNA, 65 bp, Homo sapiens
aacgcgtcttttgaaaccgaactgaagggggaaggggcgagagggaagaggaggggcagaaggag

SEQ ID NO: 21193 - DNA, 65 bp, Homo sapiens
tcttttgaaaccgaactgaagggggaaggggcgagagggaagaggaggggcagaaggagttcggg

SEQ ID NO: 21194 - DNA, 66 bp, Homo sapiens
aactgaagggggaaggggcgagagggaagaggaggggcagaaggagttcggggaggcacagggtag

SEQ ID NO: 21195 - DNA, 69 bp, Homo sapiens
aaggggcgagagggaagaggaggggcagaaggagttcggggaggcacagggtaggagcggtgagagggc

SEQ ID NO: 21196 - DNA, 69 bp, Homo sapiens
agggaagaggaggggcagaaggagttcggggaggcacagggtaggagcggtgagagggccgtggagtcc

SEQ ID NO: 21197 - DNA, 69 bp, Homo sapiens
agaggaggggcagaaggagttcggggaggcacagggtaggagcggtgagagggccgtggagtcccgccc

SEQ ID NO: 21198 - DNA, 71 bp, Homo sapiens
gaggcacagggtaggagcggtgagagggccgtggagtcccgcccctcgccgccgcggttggcgggagcgtg

SEQ ID NO: 21199 - DNA, 72 bp, Homo sapiens
gtaggagcggtgagagggccgtggagtcccgcccctcgccgccgcggttggcgggagcgtgtcgtgacgtca

SEQ ID NO: 21200 - DNA, 72 bp, Homo sapiens
aatacggctgcgcgaattggcggcccggccctccttggtcacgtgttgggagacagcggcgtggcggcggcg

SEQ ID NO: 21201 - DNA, 71 bp, Homo sapiens
aattggcggcccggccctccttggtcacgtgttgggagacagcggcgtggcggcggcggtggcggtagcga

SEQ ID NO: 21202 - DNA, 72 bp, Homo sapiens
cggccctccttggtcacgtgttgggagacagcggcgtggcggcggcggtggcggtagcgacggcacgccgta

SEQ ID NO: 21203 - DNA, 74 bp, Homo sapiens
tggtcacgtgttgggagacagcggcgtggcggcggcggtggcggtagcgacggcacgccgtagggcggtcagaa

SEQ ID NO: 21204 - DNA, 72 bp, Homo sapiens
tgttgggagacagcggcgtggcggcggcggtggcggtagcgacggcacgccgtagggcggtcagaaggtttc

SEQ ID NO: 21205 - DNA, 69 bp, Homo sapiens
acagcggcgtggcggcggcggtggcggtagcgacggcacgccgtagggcggtcagaaggtttccggttc

SEQ ID NO: 21206 - DNA, 66 bp, Homo sapiens
ggcggcggtggcggtagcgacggcacgccgtagggcggtcagaaggtttccggttccggtgtaacg

SEQ ID NO: 21207 - DNA, 65 bp, Homo sapiens
cggtggcggtagcgacggcacgccgtagggcggtcagaaggtttccggttccggtgtaacgttcg

SEQ ID NO: 21208 - DNA, 67 bp, Homo sapiens
agcgacggcacgccgtagggcggtcagaaggtttccggttccggtgtaacgttcgggctccgtctca

SEQ ID NO: 21209 - DNA, 65 bp, Homo sapiens
gtagggcggtcagaaggtttccggttccggtgtaacgttcgggctccgtctcaggggctgaagtt

SEQ ID NO: 21210 - DNA, 67 bp, Homo sapiens
agaaggtttccggttccggtgtaacgttcgggctccgtctcaggggctgaagtttgtgaggtgagta

SEQ ID NO: 21211 - DNA, 68 bp, Homo sapiens
gtttccggttccggtgtaacgttcgggctccgtctcaggggctgaagtttgtgaggtgagtagtggcc

SEQ ID NO: 21212 - DNA, 70 bp, Homo sapiens
cggtgtaacgttcgggctccgtctcaggggctgaagtttgtgaggtgagtagtggccccgggcccacaga

SEQ ID NO: 21213 - DNA, 71 bp, Homo sapiens
tttttttttaggtgtagtattgagtcctgtttgagctattgttctctttttcctgaaaaatggcactgtca

SEQ ID NO: 21214 - DNA, 72 bp, Homo sapiens
ttttaggtgtagtattgagtcctgtttgagctattgttctctttttcctgaaaaatggcactgtcaaagagg

SEQ ID NO: 21215 - DNA, 78 bp, Homo sapiens
tattgagtcctgtttgagctattgttctctttttcctgaaaaatggcactgtcaaagagggagctggatgagctgaaa

SEQ ID NO: 21216 - DNA, 78 bp, Homo sapiens
ctgtttgagctattgttctctttttcctgaaaaatggcactgtcaaagagggagctggatgagctgaaaccatggata

SEQ ID NO: 21217 - DNA, 77 bp, Homo sapiens
attgttctctttttcctgaaaaatggcactgtcaaagagggagctggatgagctgaaaccatggatagagaagacag

SEQ ID NO: 21218 - DNA, 77 bp, Homo sapiens
tttttcctgaaaaatggcactgtcaaagagggagctggatgagctgaaaccatggatagagaagacagtgaagaggg

SEQ ID NO: 21219 - DNA, 76 bp, Homo sapiens
aaaatggcactgtcaaagagggagctggatgagctgaaaccatggatagagaagacagtgaagagggtcctgggtt

SEQ ID NO: 21220 - DNA, 76 bp, Homo sapiens
aaagagggagctggatgagctgaaaccatggatagagaagacagtgaagagggtcctgggtttctcagagcctacg

SEQ ID NO: 21221 - DNA, 80 bp, Homo sapiens
agctggatgagctgaaaccatggatagagaagacagtgaagagggtcctgggtttctcagagcctacggtggtcacagca

SEQ ID NO: 21222 - DNA, 79 bp, Homo sapiens
tgaaaccatggatagagaagacagtgaagagggtcctgggtttctcagagcctacggtggtcacagcagcattgaactg

SEQ ID NO: 21223 - DNA, 78 bp, Homo sapiens
atggatagagaagacagtgaagagggtcctgggtttctcagagcctacggtggtcacagcagcattgaactgtgtggg

SEQ ID NO: 21224 - DNA, 75 bp, Homo sapiens
agaagacagtgaagagggtcctgggtttctcagagcctacggtggtcacagcagcattgaactgtgtggggaagg

SEQ ID NO: 21225 - DNA, 76 bp, Homo sapiens
gggtcctgggtttctcagagcctacggtggtcacagcagcattgaactgtgtggggaagggcatggacaagaagaa

SEQ ID NO: 21226 - DNA, 79 bp, Homo sapiens
tttctcagagcctacggtggtcacagcagcattgaactgtgtggggaagggcatggacaagaagaaggcagccggtatg

SEQ ID NO: 21227 - DNA, 75 bp, Homo sapiens
cctacggtggtcacagcagcattgaactgtgtggggaagggcatggacaagaagaaggcagccggtatgtacctt

SEQ ID NO: 21228 - DNA, 79 bp, Homo sapiens
gtcacagcagcattgaactgtgtggggaagggcatggacaagaagaaggcagccggtatgtacctttctgcatctttta

SEQ ID NO: 21229 - DNA, 74 bp, Homo sapiens
attgaactgtgtggggaagggcatggacaagaagaaggcagccggtatgtacctttctgcatcttttatcttaa

SEQ ID NO: 21230 - DNA, 75 bp, Homo sapiens
actgtgtggggaagggcatggacaagaagaaggcagccggtatgtacctttctgcatcttttatcttaacatata

SEQ ID NO: 21231 - DNA, 72 bp, Homo sapiens
tgtactcttacctttccaaccctaccaccgcctttcttcctgtcagatcatctgaaaccttttcttgatgat

SEQ ID NO: 21232 - DNA, 72 bp, Homo sapiens
tcttacctttccaaccctaccaccgcctttcttcctgtcagatcatctgaaaccttttcttgatgattctac

SEQ ID NO: 21233 - DNA, 73 bp, Homo sapiens
aaccctaccaccgcctttcttcctgtcagatcatctgaaaccttttcttgatgattctactctccgatttgtg

SEQ ID NO: 21234 - DNA, 75 bp, Homo sapiens
cctttcttcctgtcagatcatctgaaaccttttcttgatgattctactctccgatttgtggacaaactgtttgag

SEQ ID NO: 21235 - DNA, 78 bp, Homo sapiens
ttcctgtcagatcatctgaaaccttttcttgatgattctactctccgatttgtggacaaactgtttgaggctgtggag

SEQ ID NO: 21236 - DNA, 74 bp, Homo sapiens
tctgaaaccttttcttgatgattctactctccgatttgtggacaaactgtttgaggctgtggaggaaggccgaa

SEQ ID NO: 21237 - DNA, 76 bp, Homo sapiens
ttttcttgatgattctactctccgatttgtggacaaactgtttgaggctgtggaggaaggccgaagctctaggcat

SEQ ID NO: 21238 - DNA, 75 bp, Homo sapiens
attctactctccgatttgtggacaaactgtttgaggctgtggaggaaggccgaagctctaggcattccaagtcta

SEQ ID NO: 21239 - DNA, 77 bp, Homo sapiens
actctccgatttgtggacaaactgtttgaggctgtggaggaaggccgaagctctaggcattccaagtctagcagtga

SEQ ID NO: 21240 - DNA, 79 bp, Homo sapiens
ttgtggacaaactgtttgaggctgtggaggaaggccgaagctctaggcattccaagtctagcagtgacaggagcagaaa

SEQ ID NO: 21241 - DNA, 79 bp, Homo sapiens
tgtttgaggctgtggaggaaggccgaagctctaggcattccaagtctagcagtgacaggagcagaaaacgagagctaaa

SEQ ID NO: 21242 - DNA, 76 bp, Homo sapiens
tggaggaaggccgaagctctaggcattccaagtctagcagtgacaggagcagaaaacgagagctaaaggtaggtta

SEQ ID NO: 21243 - DNA, 75 bp, Homo sapiens
cgaagctctaggcattccaagtctagcagtgacaggagcagaaaacgagagctaaaggtaggttacaatttactg

SEQ ID NO: 21244 - DNA, 77 bp, Homo sapiens
taggcattccaagtctagcagtgacaggagcagaaaacgagagctaaaggtaggttacaatttactgtctaatgagc

SEQ ID NO: 21245 - DNA, 71 bp, Homo sapiens
cccaccccacacaatatattatgggagagtcctttttcttgaactgtaggagttccaggaagcgctcgccc

SEQ ID NO: 21246 - DNA, 73 bp, Homo sapiens
caatatattatgggagagtcctttttcttgaactgtaggagttccaggaagcgctcgcccctggccgaggata

SEQ ID NO: 21247 - DNA, 73 bp, Homo sapiens
tattatgggagagtcctttttcttgaactgtaggagttccaggaagcgctcgcccctggccgaggatatgtcc

SEQ ID NO: 21248 - DNA, 72 bp, Homo sapiens
agtcctttttcttgaactgtaggagttccaggaagcgctcgcccctggccgaggatatgtccttgcaaaaca

SEQ ID NO: 21249 - DNA, 74 bp, Homo sapiens
aactgtaggagttccaggaagcgctcgcccctggccgaggatatgtccttgcaaaacacgagccctcctagtga

SEQ ID NO: 21250 - DNA, 74 bp, Homo sapiens
taggagttccaggaagcgctcgcccctggccgaggatatgtccttgcaaaacacgagccctcctagtgaagagg

SEQ ID NO: 21251 - DNA, 74 bp, Homo sapiens
aagcgctcgcccctggccgaggatatgtccttgcaaaacacgagccctcctagtgaagaggggatgtcacccaa

SEQ ID NO: 21252 - DNA, 73 bp, Homo sapiens
ccctggccgaggatatgtccttgcaaaacacgagccctcctagtgaagaggggatgtcacccaaagcctacca

SEQ ID NO: 21253 - DNA, 73 bp, Homo sapiens
atatgtccttgcaaaacacgagccctcctagtgaagaggggatgtcacccaaagcctaccaccggtgtgtaca

SEQ ID NO: 21254 - DNA, 72 bp, Homo sapiens
ttgcaaaacacgagccctcctagtgaagaggggatgtcacccaaagcctaccaccggtgtgtacatttgctt

SEQ ID NO: 21255 - DNA, 70 bp, Homo sapiens
acacgagccctcctagtgaagaggggatgtcacccaaagcctaccaccggtgtgtacatttgctttttcc

SEQ ID NO: 21256 - DNA, 70 bp, Homo sapiens
tcctagtgaagaggggatgtcacccaaagcctaccaccggtgtgtacatttgctttttcccattgtccct

SEQ ID NO: 21257 - DNA, 71 bp, Homo sapiens
cccacggggagggatacagcttttctttcatcttgggttcccttaggaggtgtttggtgatgactctgaga

SEQ ID NO: 21258 - DNA, 73 bp, Homo sapiens
agggatacagcttttctttcatcttgggttcccttaggaggtgtttggtgatgactctgagatctctaaagaa

SEQ ID NO: 21259 - DNA, 75 bp, Homo sapiens
ttttctttcatcttgggttcccttaggaggtgtttggtgatgactctgagatctctaaagaatcatcaggagtaa

SEQ ID NO: 21260 - DNA, 76 bp, Homo sapiens
tttcatcttgggttcccttaggaggtgtttggtgatgactctgagatctctaaagaatcatcaggagtaaagaagc

SEQ ID NO: 21261 - DNA, 75 bp, Homo sapiens
ttcccttaggaggtgtttggtgatgactctgagatctctaaagaatcatcaggagtaaagaagcgacgaataccc

SEQ ID NO: 21262 - DNA, 74 bp, Homo sapiens
aggtgtttggtgatgactctgagatctctaaagaatcatcaggagtaaagaagcgacgaataccccgttttgag

SEQ ID NO: 21263 - DNA, 74 bp, Homo sapiens
atgactctgagatctctaaagaatcatcaggagtaaagaagcgacgaataccccgttttgaggaggtggaagaa

SEQ ID NO: 21264 - DNA, 73 bp, Homo sapiens
agatctctaaagaatcatcaggagtaaagaagcgacgaataccccgttttgaggaggtggaagaagagccaga

SEQ ID NO: 21265 - DNA, 73 bp, Homo sapiens
taaagaatcatcaggagtaaagaagcgacgaataccccgttttgaggaggtggaagaagagccagaggtgatc

SEQ ID NO: 21266 - DNA, 69 bp, Homo sapiens
aggagtaaagaagcgacgaataccccgttttgaggaggtggaagaagagccagaggtgatccctgggcc

SEQ ID NO: 21267 - DNA, 74 bp, Homo sapiens
agaagcgacgaataccccgttttgaggaggtggaagaagagccagaggtgatccctgggcctccatcagagagc

SEQ ID NO: 21268 - DNA, 78 bp, Homo sapiens
cccgttttgaggaggtggaagaagagccagaggtgatccctgggcctccatcagagagccctggcatgctgactaagc

SEQ ID NO: 21269 - DNA, 81 bp, Homo sapiens
ggaggtggaagaagagccagaggtgatccctgggcctccatcagagagccctggcatgctgactaagctccaggttagtga

SEQ ID NO: 21270 - DNA, 80 bp, Homo sapiens
aagaagagccagaggtgatccctgggcctccatcagagagccctggcatgctgactaagctccaggttagtgattaggga

SEQ ID NO: 21271 - DNA, 79 bp, Homo sapiens
aggtgatccctgggcctccatcagagagccctggcatgctgactaagctccaggttagtgattagggactggaagcaaa

SEQ ID NO: 21272 - DNA, 78 bp, Homo sapiens
atcagagagccctggcatgctgactaagctccaggttagtgattagggactggaagcaaagtggttttgtgagttgaa

SEQ ID NO: 21273 - DNA, 76 bp, Homo sapiens
ctggcatgctgactaagctccaggttagtgattagggactggaagcaaagtggttttgtgagttgaagaagcaaaa

SEQ ID NO: 21274 - DNA, 73 bp, Homo sapiens
atgctgactaagctccaggttagtgattagggactggaagcaaagtggttttgtgagttgaagaagcaaaagg

SEQ ID NO: 21275 - DNA, 73 bp, Homo sapiens
caggttagtgattagggactggaagcaaagtggttttgtgagttgaagaagcaaaaggtgcatgggtctgtat

SEQ ID NO: 21276 - DNA, 74 bp, Homo sapiens
tagtgattagggactggaagcaaagtggttttgtgagttgaagaagcaaaaggtgcatgggtctgtatttattg

SEQ ID NO: 21277 - DNA, 71 bp, Homo sapiens
actggaagcaaagtggttttgtgagttgaagaagcaaaaggtgcatgggtctgtatttattgtggaatttt

SEQ ID NO: 21278 - DNA, 68 bp, Homo sapiens
caaagtggttttgtgagttgaagaagcaaaaggtgcatgggtctgtatttattgtggaattttttttt

SEQ ID NO: 21279 - DNA, 72 bp, Homo sapiens
atgggagaagtaagaaggagaaattaacagtttttcaatttttttcctggagagcagatcaaacagatgatg

SEQ ID NO: 21280 - DNA, 74 bp, Homo sapiens
agtaagaaggagaaattaacagtttttcaatttttttcctggagagcagatcaaacagatgatggaggcagcaa

SEQ ID NO: 21281 - DNA, 75 bp, Homo sapiens
aaattaacagtttttcaatttttttcctggagagcagatcaaacagatgatggaggcagcaacacgacaaatcga

SEQ ID NO: 21282 - DNA, 76 bp, Homo sapiens
ttttcaatttttttcctggagagcagatcaaacagatgatggaggcagcaacacgacaaatcgaggagaggaaaaa

SEQ ID NO: 21283 - DNA, 82 bp, Homo sapiens
tttcctggagagcagatcaaacagatgatggaggcagcaacacgacaaatcgaggagaggaaaaaacagctgagcttcatta

SEQ ID NO: 21284 - DNA, 81 bp, Homo sapiens
ggagagcagatcaaacagatgatggaggcagcaacacgacaaatcgaggagaggaaaaaacagctgagcttcattagcccc

SEQ ID NO: 21285 - DNA, 76 bp, Homo sapiens
aaacagatgatggaggcagcaacacgacaaatcgaggagaggaaaaaacagctgagcttcattagcccccctacac

SEQ ID NO: 21286 - DNA, 74 bp, Homo sapiens
aggcagcaacacgacaaatcgaggagaggaaaaaacagctgagcttcattagcccccctacacctcaggtattg

SEQ ID NO: 21287 - DNA, 73 bp, Homo sapiens
aacacgacaaatcgaggagaggaaaaaacagctgagcttcattagcccccctacacctcaggtattgtgtcta

SEQ ID NO: 21288 - DNA, 73 bp, Homo sapiens
aaatcgaggagaggaaaaaacagctgagcttcattagcccccctacacctcaggtattgtgtctagattactc

SEQ ID NO: 21289 - DNA, 74 bp, Homo sapiens
aaaaacagctgagcttcattagcccccctacacctcaggtattgtgtctagattactctgaacagaataatctt

SEQ ID NO: 21290 - DNA, 75 bp, Homo sapiens
tgtttgtctgcctgtcttaattcctctgatttctttttctctatctcacagccaaagactccttcttcctcccaa

SEQ ID NO: 21291 - DNA, 72 bp, Homo sapiens
tcttaattcctctgatttctttttctctatctcacagccaaagactccttcttcctcccaaccagaacgact

SEQ ID NO: 21292 - DNA, 73 bp, Homo sapiens
ctgatttctttttctctatctcacagccaaagactccttcttcctcccaaccagaacgacttcctattggcaa

SEQ ID NO: 21293 - DNA, 74 bp, Homo sapiens
tttttctctatctcacagccaaagactccttcttcctcccaaccagaacgacttcctattggcaacactattca

SEQ ID NO: 21294 - DNA, 75 bp, Homo sapiens
tatctcacagccaaagactccttcttcctcccaaccagaacgacttcctattggcaacactattcagccctccca

SEQ ID NO: 21295 - DNA, 72 bp, Homo sapiens
agactccttcttcctcccaaccagaacgacttcctattggcaacactattcagccctcccaggctgccactt

SEQ ID NO: 21296 - DNA, 74 bp, Homo sapiens
ccttcttcctcccaaccagaacgacttcctattggcaacactattcagccctcccaggctgccactttcatgaa

SEQ ID NO: 21297 - DNA, 80 bp, Homo sapiens
aaccagaacgacttcctattggcaacactattcagccctcccaggctgccactttcatgaatgatgccattgagaaggca

SEQ ID NO: 21298 - DNA, 79 bp, Homo sapiens
acgacttcctattggcaacactattcagccctcccaggctgccactttcatgaatgatgccattgagaaggcaaggaaa

SEQ ID NO: 21299 - DNA, 84 bp, Homo sapiens
attggcaacactattcagccctcccaggctgccactttcatgaatgatgccattgagaaggcaaggaaagcagctgaactgcaa

SEQ ID NO: 21300 - DNA, 85 bp, Homo sapiens
tattcagccctcccaggctgccactttcatgaatgatgccattgagaaggcaaggaaagcagctgaactgcaagctcgaatccaa

SEQ ID NO: 21301 - DNA, 87 bp, Homo sapiens
aggctgccactttcatgaatgatgccattgagaaggcaaggaaagcagctgaactgcaagctcgaatccaagcccagctggcactga

SEQ ID NO: 21302 - DNA, 85 bp, Homo sapiens
actttcatgaatgatgccattgagaaggcaaggaaagcagctgaactgcaagctcgaatccaagcccagctggcactgaagccag

SEQ ID NO: 21303 - DNA, 85 bp, Homo sapiens
aatgatgccattgagaaggcaaggaaagcagctgaactgcaagctcgaatccaagcccagctggcactgaagccaggactcatcg

SEQ ID NO: 21304 - DNA, 84 bp, Homo sapiens
agaaggcaaggaaagcagctgaactgcaagctcgaatccaagcccagctggcactgaagccaggactcatcggcaatgccaaca

SEQ ID NO: 21305 - DNA, 83 bp, Homo sapiens
aaggaaagcagctgaactgcaagctcgaatccaagcccagctggcactgaagccaggactcatcggcaatgccaacatggtgg

SEQ ID NO: 21306 - DNA, 85 bp, Homo sapiens
tgaactgcaagctcgaatccaagcccagctggcactgaagccaggactcatcggcaatgccaacatggtgggcctggctaatctc

SEQ ID NO: 21307 - DNA, 84 bp, Homo sapiens
aagctcgaatccaagcccagctggcactgaagccaggactcatcggcaatgccaacatggtgggcctggctaatctccatgcca

SEQ ID NO: 21308 - DNA, 85 bp, Homo sapiens
aagcccagctggcactgaagccaggactcatcggcaatgccaacatggtgggcctggctaatctccatgccatgggcattgctcc

SEQ ID NO: 21309 - DNA, 84 bp, Homo sapiens
gcactgaagccaggactcatcggcaatgccaacatggtgggcctggctaatctccatgccatgggcattgctcccccgtgagtg

SEQ ID NO: 21310 - DNA, 83 bp, Homo sapiens
caggactcatcggcaatgccaacatggtgggcctggctaatctccatgccatgggcattgctcccccgtgagtgtctatttca

SEQ ID NO: 21311 - DNA, 82 bp, Homo sapiens
atcggcaatgccaacatggtgggcctggctaatctccatgccatgggcattgctcccccgtgagtgtctatttcatggaata

SEQ ID NO: 21312 - DNA, 77 bp, Homo sapiens
ccaacatggtgggcctggctaatctccatgccatgggcattgctcccccgtgagtgtctatttcatggaataccttt

SEQ ID NO: 21313 - DNA, 77 bp, Homo sapiens
ggtgggcctggctaatctccatgccatgggcattgctcccccgtgagtgtctatttcatggaataccttttcatttc

SEQ ID NO: 21314 - DNA, 68 bp, Homo sapiens
cttaatgttccatacaggatttatttctttgcgggctatttttcaggaaggtggagttaaaagaccaa

SEQ ID NO: 21315 - DNA, 67 bp, Homo sapiens
ttccatacaggatttatttctttgcgggctatttttcaggaaggtggagttaaaagaccaaacgaaa

SEQ ID NO: 21316 - DNA, 65 bp, Homo sapiens
atttatttctttgcgggctatttttcaggaaggtggagttaaaagaccaaacgaaacctacacca

SEQ ID NO: 21317 - DNA, 70 bp, Homo sapiens
tttgcgggctatttttcaggaaggtggagttaaaagaccaaacgaaacctacaccactgatcctggatga

SEQ ID NO: 21318 - DNA, 70 bp, Homo sapiens
ctatttttcaggaaggtggagttaaaagaccaaacgaaacctacaccactgatcctggatgagcaagggc

SEQ ID NO: 21319 - DNA, 75 bp, Homo sapiens
aaggtggagttaaaagaccaaacgaaacctacaccactgatcctggatgagcaagggcgcactgtagatgcaaca

SEQ ID NO: 21320 - DNA, 77 bp, Homo sapiens
ttaaaagaccaaacgaaacctacaccactgatcctggatgagcaagggcgcactgtagatgcaacaggcaaggagat

SEQ ID NO: 21321 - DNA, 81 bp, Homo sapiens
aaacgaaacctacaccactgatcctggatgagcaagggcgcactgtagatgcaacaggcaaggagattgagctgacacacc

SEQ ID NO: 21322 - DNA, 88 bp, Homo sapiens
tacaccactgatcctggatgagcaagggcgcactgtagatgcaacaggcaaggagattgagctgacacaccgcatgcctactctgaaa

SEQ ID NO: 21323 - DNA, 86 bp, Homo sapiens
atcctggatgagcaagggcgcactgtagatgcaacaggcaaggagattgagctgacacaccgcatgcctactctgaaagccaatat

SEQ ID NO: 21324 - DNA, 85 bp, Homo sapiens
aagggcgcactgtagatgcaacaggcaaggagattgagctgacacaccgcatgcctactctgaaagccaatattcgtgctgtgaa

SEQ ID NO: 21325 - DNA, 84 bp, Homo sapiens
actgtagatgcaacaggcaaggagattgagctgacacaccgcatgcctactctgaaagccaatattcgtgctgtgaagagggaa

SEQ ID NO: 21326 - DNA, 81 bp, Homo sapiens
aacaggcaaggagattgagctgacacaccgcatgcctactctgaaagccaatattcgtgctgtgaagagggaacaattcaa

SEQ ID NO: 21327 - DNA, 81 bp, Homo sapiens
agattgagctgacacaccgcatgcctactctgaaagccaatattcgtgctgtgaagagggaacaattcaagcaacaactaa

SEQ ID NO: 21328 - DNA, 76 bp, Homo sapiens
acacaccgcatgcctactctgaaagccaatattcgtgctgtgaagagggaacaattcaagcaacaactaaaggaaa

SEQ ID NO: 21329 - DNA, 77 bp, Homo sapiens
atgcctactctgaaagccaatattcgtgctgtgaagagggaacaattcaagcaacaactaaaggaaaagccatcaga

SEQ ID NO: 21330 - DNA, 76 bp, Homo sapiens
actctgaaagccaatattcgtgctgtgaagagggaacaattcaagcaacaactaaaggaaaagccatcagaagaca

SEQ ID NO: 21331 - DNA, 76 bp, Homo sapiens
aatattcgtgctgtgaagagggaacaattcaagcaacaactaaaggaaaagccatcagaagacatggaatccaata

SEQ ID NO: 21332 - DNA, 72 bp, Homo sapiens
tgtgaagagggaacaattcaagcaacaactaaaggaaaagccatcagaagacatggaatccaataccttttt

SEQ ID NO: 21333 - DNA, 70 bp, Homo sapiens
agggaacaattcaagcaacaactaaaggaaaagccatcagaagacatggaatccaataccttttttgacc

SEQ ID NO: 21334 - DNA, 70 bp, Homo sapiens
agcaacaactaaaggaaaagccatcagaagacatggaatccaataccttttttgacccccgagtctccat

SEQ ID NO: 21335 - DNA, 70 bp, Homo sapiens
taaaggaaaagccatcagaagacatggaatccaataccttttttgacccccgagtctccattgccccttc

SEQ ID NO: 21336 - DNA, 73 bp, Homo sapiens
aagccatcagaagacatggaatccaataccttttttgacccccgagtctccattgccccttcccagcgccaga

SEQ ID NO: 21337 - DNA, 70 bp, Homo sapiens
atggaatccaataccttttttgacccccgagtctccattgccccttcccagcgccagagacgcactttta

SEQ ID NO: 21338 - DNA, 68 bp, Homo sapiens
aataccttttttgacccccgagtctccattgccccttcccagcgccagagacgcacttttaaattcca

SEQ ID NO: 21339 - DNA, 72 bp, Homo sapiens
tttttgacccccgagtctccattgccccttcccagcgccagagacgcacttttaaattccatgacaagggca

SEQ ID NO: 21340 - DNA, 74 bp, Homo sapiens
cgagtctccattgccccttcccagcgccagagacgcacttttaaattccatgacaagggcaaatttgagaagat

SEQ ID NO: 21341 - DNA, 77 bp, Homo sapiens
ttgccccttcccagcgccagagacgcacttttaaattccatgacaagggcaaatttgagaagattgctcagcgatta

SEQ ID NO: 21342 - DNA, 76 bp, Homo sapiens
gcgccagagacgcacttttaaattccatgacaagggcaaatttgagaagattgctcagcgattacggacaaaggta

SEQ ID NO: 21343 - DNA, 75 bp, Homo sapiens
agagacgcacttttaaattccatgacaagggcaaatttgagaagattgctcagcgattacggacaaaggtatctg

SEQ ID NO: 21344 - DNA, 76 bp, Homo sapiens
ttaaattccatgacaagggcaaatttgagaagattgctcagcgattacggacaaaggtatctggcttagagtataa

SEQ ID NO: 21345 - DNA, 76 bp, Homo sapiens
atgacaagggcaaatttgagaagattgctcagcgattacggacaaaggtatctggcttagagtataacacagaatt

SEQ ID NO: 21346 - DNA, 76 bp, Homo sapiens
ttttctatgactccaatttatctttctgtcttggattatcttgtttttaggctcaactggagaagctacaggcaga

SEQ ID NO: 21347 - DNA, 76 bp, Homo sapiens
actccaatttatctttctgtcttggattatcttgtttttaggctcaactggagaagctacaggcagagatttcaca

SEQ ID NO: 21348 - DNA, 77 bp, Homo sapiens
tttctgtcttggattatcttgtttttaggctcaactggagaagctacaggcagagatttcacaagcagctcgaaaaa

SEQ ID NO: 21349 - DNA, 78 bp, Homo sapiens
attatcttgtttttaggctcaactggagaagctacaggcagagatttcacaagcagctcgaaaaacaggcatccatac

SEQ ID NO: 21350 - DNA, 78 bp, Homo sapiens
tttttaggctcaactggagaagctacaggcagagatttcacaagcagctcgaaaaacaggcatccatacttcgactag

SEQ ID NO: 21351 - DNA, 79 bp, Homo sapiens
aactggagaagctacaggcagagatttcacaagcagctcgaaaaacaggcatccatacttcgactaggcttgccctcat

SEQ ID NO: 21352 - DNA, 80 bp, Homo sapiens
aagctacaggcagagatttcacaagcagctcgaaaaacaggcatccatacttcgactaggcttgccctcattgctcctaa

SEQ ID NO: 21353 - DNA, 79 bp, Homo sapiens
gagatttcacaagcagctcgaaaaacaggcatccatacttcgactaggcttgccctcattgctcctaagaaggagctaa

SEQ ID NO: 21354 - DNA, 76 bp, Homo sapiens
acaagcagctcgaaaaacaggcatccatacttcgactaggcttgccctcattgctcctaagaaggagctaaaggaa

SEQ ID NO: 21355 - DNA, 74 bp, Homo sapiens
aaaaacaggcatccatacttcgactaggcttgccctcattgctcctaagaaggagctaaaggaaggagatattc

SEQ ID NO: 21356 - DNA, 75 bp, Homo sapiens
atccatacttcgactaggcttgccctcattgctcctaagaaggagctaaaggaaggagatattcctgaaattgag

SEQ ID NO: 21357 - DNA, 75 bp, Homo sapiens
tacttcgactaggcttgccctcattgctcctaagaaggagctaaaggaaggagatattcctgaaattgagtggtg

SEQ ID NO: 21358 - DNA, 75 bp, Homo sapiens
ttgccctcattgctcctaagaaggagctaaaggaaggagatattcctgaaattgagtggtgggactcttacataa

SEQ ID NO: 21359 - DNA, 72 bp, Homo sapiens
taagaaggagctaaaggaaggagatattcctgaaattgagtggtgggactcttacataatccccaatggctt

SEQ ID NO: 21360 - DNA, 74 bp, Homo sapiens
taaaggaaggagatattcctgaaattgagtggtgggactcttacataatccccaatggctttgatctgtgagtt

SEQ ID NO: 21361 - DNA, 73 bp, Homo sapiens
atattcctgaaattgagtggtgggactcttacataatccccaatggctttgatctgtgagtttgttttagtac

SEQ ID NO: 21362 - DNA, 69 bp, Homo sapiens
aaattgagtggtgggactcttacataatccccaatggctttgatctgtgagtttgttttagtacctttt

SEQ ID NO: 21363 - DNA, 67 bp, Homo sapiens
ggtgggactcttacataatccccaatggctttgatctgtgagtttgttttagtacctttttaaaaaa

SEQ ID NO: 21364 - DNA, 72 bp, Homo sapiens
tcctctcttagaatcatctctacccgcatatcgtgttttcttttcttcctacaattttagtacagaggaaaa

SEQ ID NO: 21365 - DNA, 71 bp, Homo sapiens
agaatcatctctacccgcatatcgtgttttcttttcttcctacaattttagtacagaggaaaatcccaaga

SEQ ID NO: 21366 - DNA, 70 bp, Homo sapiens
tacccgcatatcgtgttttcttttcttcctacaattttagtacagaggaaaatcccaagagagaagatta

SEQ ID NO: 21367 - DNA, 68 bp, Homo sapiens
atcgtgttttcttttcttcctacaattttagtacagaggaaaatcccaagagagaagattattttgga

SEQ ID NO: 21368 - DNA, 72 bp, Homo sapiens
tcttcctacaattttagtacagaggaaaatcccaagagagaagattattttggaatcacaaatcttgttgaa

SEQ ID NO: 21369 - DNA, 72 bp, Homo sapiens
aattttagtacagaggaaaatcccaagagagaagattattttggaatcacaaatcttgttgaacatccagcc

SEQ ID NO: 21370 - DNA, 77 bp, Homo sapiens
tacagaggaaaatcccaagagagaagattattttggaatcacaaatcttgttgaacatccagcccagctcaatcctc

SEQ ID NO: 21371 - DNA, 78 bp, Homo sapiens
ccaagagagaagattattttggaatcacaaatcttgttgaacatccagcccagctcaatcctccaggtaatgtataga

SEQ ID NO: 21372 - DNA, 77 bp, Homo sapiens
aagattattttggaatcacaaatcttgttgaacatccagcccagctcaatcctccaggtaatgtatagattcctgaa

SEQ ID NO: 21373 - DNA, 78 bp, Homo sapiens
attttggaatcacaaatcttgttgaacatccagcccagctcaatcctccaggtaatgtatagattcctgaatcaagtc

SEQ ID NO: 21374 - DNA, 82 bp, Homo sapiens
acaaatcttgttgaacatccagcccagctcaatcctccaggtaatgtatagattcctgaatcaagtctctagagcagcatta

SEQ ID NO: 21375 - DNA, 70 bp, Homo sapiens
gcacctggccctaattttgttttctacatttgccaggtatcattgaatgagggggtttaacagcttaaag

SEQ ID NO: 21376 - DNA, 68 bp, Homo sapiens
gccctaattttgttttctacatttgccaggtatcattgaatgagggggtttaacagcttaaaggaaaa

SEQ ID NO: 21377 - DNA, 70 bp, Homo sapiens
tttctacatttgccaggtatcattgaatgagggggtttaacagcttaaaggaaaacaactaagaacacta

SEQ ID NO: 21378 - DNA, 69 bp, Homo sapiens
tttgccaggtatcattgaatgagggggtttaacagcttaaaggaaaacaactaagaacactacttaaga

SEQ ID NO: 21379 - DNA, 68 bp, Homo sapiens
ggtatcattgaatgagggggtttaacagcttaaaggaaaacaactaagaacactacttaagaaagata

SEQ ID NO: 21380 - DNA, 66 bp, Homo sapiens
aatgagggggtttaacagcttaaaggaaaacaactaagaacactacttaagaaagataagaggcca

SEQ ID NO: 21381 - DNA, 81 bp, Homo sapiens
tatatgtattcttactgctttggtatactaatatctctgcctgacagttgacaatgacacaccagttactctgggagtata

SEQ ID NO: 21382 - DNA, 79 bp, Homo sapiens
attcttactgctttggtatactaatatctctgcctgacagttgacaatgacacaccagttactctgggagtatatctta

SEQ ID NO: 21383 - DNA, 78 bp, Homo sapiens
tttggtatactaatatctctgcctgacagttgacaatgacacaccagttactctgggagtatatcttaccaagaagga

SEQ ID NO: 21384 - DNA, 77 bp, Homo sapiens
actaatatctctgcctgacagttgacaatgacacaccagttactctgggagtatatcttaccaagaaggaacagaaa

SEQ ID NO: 21385 - DNA, 74 bp, Homo sapiens
tgacagttgacaatgacacaccagttactctgggagtatatcttaccaagaaggaacagaaaaaacttcggaga

SEQ ID NO: 21386 - DNA, 72 bp, Homo sapiens
ttgacaatgacacaccagttactctgggagtatatcttaccaagaaggaacagaaaaaacttcggagacaaa

SEQ ID NO: 21387 - DNA, 69 bp, Homo sapiens
acacaccagttactctgggagtatatcttaccaagaaggaacagaaaaaacttcggagacaaacaagga

SEQ ID NO: 21388 - DNA, 71 bp, Homo sapiens
tactctgggagtatatcttaccaagaaggaacagaaaaaacttcggagacaaacaaggagggaagcacaga

SEQ ID NO: 21389 - DNA, 70 bp, Homo sapiens
tatatcttaccaagaaggaacagaaaaaacttcggagacaaacaaggagggaagcacagaaggaactaca

SEQ ID NO: 21390 - DNA, 66 bp, Homo sapiens
aagaaggaacagaaaaaacttcggagacaaacaaggagggaagcacagaaggaactacaagaaaaa

SEQ ID NO: 21391 - DNA, 69 bp, Homo sapiens
aaaaacttcggagacaaacaaggagggaagcacagaaggaactacaagaaaaagtcaggctgggcctga

SEQ ID NO: 21392 - DNA, 74 bp, Homo sapiens
ttcggagacaaacaaggagggaagcacagaaggaactacaagaaaaagtcaggctgggcctgatgcctcctcca

SEQ ID NO: 21393 - DNA, 72 bp, Homo sapiens
aacaaggagggaagcacagaaggaactacaagaaaaagtcaggctgggcctgatgcctcctccagaacccaa

SEQ ID NO: 21394 - DNA, 75 bp, Homo sapiens
aagcacagaaggaactacaagaaaaagtcaggctgggcctgatgcctcctccagaacccaaaggtgcatttctca

SEQ ID NO: 21395 - DNA, 74 bp, Homo sapiens
aactacaagaaaaagtcaggctgggcctgatgcctcctccagaacccaaaggtgcatttctcagtggcctcttc

SEQ ID NO: 21396 - DNA, 73 bp, Homo sapiens
aaaaagtcaggctgggcctgatgcctcctccagaacccaaaggtgcatttctcagtggcctcttctgttaaaa

SEQ ID NO: 21397 - DNA, 80 bp, Homo sapiens
tggagaagtgacttcaaagactgattgttgtcctctcttcactgcagtgagaatttctaatttgatgcgagtattaggaa

SEQ ID NO: 21398 - DNA, 79 bp, Homo sapiens
agtgacttcaaagactgattgttgtcctctcttcactgcagtgagaatttctaatttgatgcgagtattaggaacagaa

SEQ ID NO: 21399 - DNA, 80 bp, Homo sapiens
aagactgattgttgtcctctcttcactgcagtgagaatttctaatttgatgcgagtattaggaacagaagctgttcaaga

SEQ ID NO: 21400 - DNA, 78 bp, Homo sapiens
ttgtcctctcttcactgcagtgagaatttctaatttgatgcgagtattaggaacagaagctgttcaagaccccacgaa

SEQ ID NO: 21401 - DNA, 76 bp, Homo sapiens
cttcactgcagtgagaatttctaatttgatgcgagtattaggaacagaagctgttcaagaccccacgaaggtagaa

SEQ ID NO: 21402 - DNA, 73 bp, Homo sapiens
aatttctaatttgatgcgagtattaggaacagaagctgttcaagaccccacgaaggtagaagcccacgtcaga

SEQ ID NO: 21403 - DNA, 77 bp, Homo sapiens
ctaatttgatgcgagtattaggaacagaagctgttcaagaccccacgaaggtagaagcccacgtcagagctcagatg

SEQ ID NO: 21404 - DNA, 75 bp, Homo sapiens
agtattaggaacagaagctgttcaagaccccacgaaggtagaagcccacgtcagagctcagatggcaaaaagaca

SEQ ID NO: 21405 - DNA, 76 bp, Homo sapiens
agaagctgttcaagaccccacgaaggtagaagcccacgtcagagctcagatggcaaaaagacagaagtaagtgcca

SEQ ID NO: 21406 - DNA, 76 bp, Homo sapiens
ttcaagaccccacgaaggtagaagcccacgtcagagctcagatggcaaaaagacagaagtaagtgccatgggattg

SEQ ID NO: 21407 - DNA, 74 bp, Homo sapiens
acgaaggtagaagcccacgtcagagctcagatggcaaaaagacagaagtaagtgccatgggattgggtggaaac

SEQ ID NO: 21408 - DNA, 76 bp, Homo sapiens
tagaagcccacgtcagagctcagatggcaaaaagacagaagtaagtgccatgggattgggtggaaacctcgggcaa

SEQ ID NO: 21409 - DNA, 75 bp, Homo sapiens
atatttggagggaggggagagttctccgttgctctctctttccctcagccctgcctctgatcttcaatgcctttc

SEQ ID NO: 21410 - DNA, 78 bp, Homo sapiens
aggggagagttctccgttgctctctctttccctcagccctgcctctgatcttcaatgcctttctcacttgtggatgtc

SEQ ID NO: 21411 - DNA, 78 bp, Homo sapiens
agagttctccgttgctctctctttccctcagccctgcctctgatcttcaatgcctttctcacttgtggatgtccttcc

SEQ ID NO: 21412 - DNA, 84 bp, Homo sapiens
tctctctttccctcagccctgcctctgatcttcaatgcctttctcacttgtggatgtccttcctgtcacgacagagcgcatgaa

SEQ ID NO: 21413 - DNA, 82 bp, Homo sapiens
ctttccctcagccctgcctctgatcttcaatgcctttctcacttgtggatgtccttcctgtcacgacagagcgcatgaagag

SEQ ID NO: 21414 - DNA, 84 bp, Homo sapiens
tgcctctgatcttcaatgcctttctcacttgtggatgtccttcctgtcacgacagagcgcatgaagaggccaacgctgcccgaa

SEQ ID NO: 21415 - DNA, 81 bp, Homo sapiens
ttcaatgcctttctcacttgtggatgtccttcctgtcacgacagagcgcatgaagaggccaacgctgcccgaaaactcaca

SEQ ID NO: 21416 - DNA, 82 bp, Homo sapiens
tttctcacttgtggatgtccttcctgtcacgacagagcgcatgaagaggccaacgctgcccgaaaactcacagcagaacaga

SEQ ID NO: 21417 - DNA, 80 bp, Homo sapiens
acttgtggatgtccttcctgtcacgacagagcgcatgaagaggccaacgctgcccgaaaactcacagcagaacagagaaa

SEQ ID NO: 21418 - DNA, 78 bp, Homo sapiens
ttcctgtcacgacagagcgcatgaagaggccaacgctgcccgaaaactcacagcagaacagagaaaggtcaagaaaat

SEQ ID NO: 21419 - DNA, 75 bp, Homo sapiens
acgacagagcgcatgaagaggccaacgctgcccgaaaactcacagcagaacagagaaaggtcaagaaaattaaaa

SEQ ID NO: 21420 - DNA, 71 bp, Homo sapiens
atgaagaggccaacgctgcccgaaaactcacagcagaacagagaaaggtcaagaaaattaaaaagcttaaa

SEQ ID NO: 21421 - DNA, 69 bp, Homo sapiens
aacgctgcccgaaaactcacagcagaacagagaaaggtcaagaaaattaaaaagcttaaagaagacatt

SEQ ID NO: 21422 - DNA, 69 bp, Homo sapiens
cccgaaaactcacagcagaacagagaaaggtcaagaaaattaaaaagcttaaagaagacatttcacagg

SEQ ID NO: 21423 - DNA, 71 bp, Homo sapiens
agcagaacagagaaaggtcaagaaaattaaaaagcttaaagaagacatttcacagggggtacacatatctg

SEQ ID NO: 21424 - DNA, 70 bp, Homo sapiens
gagaaaggtcaagaaaattaaaaagcttaaagaagacatttcacagggggtacacatatctgtatatagg

SEQ ID NO: 21425 - DNA, 71 bp, Homo sapiens
agaaaattaaaaagcttaaagaagacatttcacagggggtacacatatctgtatataggtaggtgtccata

SEQ ID NO: 21426 - DNA, 72 bp, Homo sapiens
aaaagcttaaagaagacatttcacagggggtacacatatctgtatataggtaggtgtccatactgggccaaa

SEQ ID NO: 21427 - DNA, 72 bp, Homo sapiens
ttaaagaagacatttcacagggggtacacatatctgtatataggtaggtgtccatactgggccaaacttccc

SEQ ID NO: 21428 - DNA, 75 bp, Homo sapiens
tgctgatgctaaaatggaagacataactaaactttcccttctccagagttcgaaatttgagcaacccagccaaga

SEQ ID NO: 21429 - DNA, 69 bp, Homo sapiens
taaaatggaagacataactaaactttcccttctccagagttcgaaatttgagcaacccagccaagaagt

SEQ ID NO: 21430 - DNA, 71 bp, Homo sapiens
agacataactaaactttcccttctccagagttcgaaatttgagcaacccagccaagaagttcaagattgaa

SEQ ID NO: 21431 - DNA, 72 bp, Homo sapiens
actaaactttcccttctccagagttcgaaatttgagcaacccagccaagaagttcaagattgaagccaatgc

SEQ ID NO: 21432 - DNA, 78 bp, Homo sapiens
ttctccagagttcgaaatttgagcaacccagccaagaagttcaagattgaagccaatgctgggcaactgtacctgaca

SEQ ID NO: 21433 - DNA, 74 bp, Homo sapiens
agttcgaaatttgagcaacccagccaagaagttcaagattgaagccaatgctgggcaactgtacctgacagggg

SEQ ID NO: 21434 - DNA, 78 bp, Homo sapiens
tttgagcaacccagccaagaagttcaagattgaagccaatgctgggcaactgtacctgacaggggtggtggtactgca

SEQ ID NO: 21435 - DNA, 77 bp, Homo sapiens
caagaagttcaagattgaagccaatgctgggcaactgtacctgacaggggtggtggtactgcacaaggatgtcaacg

SEQ ID NO: 21436 - DNA, 78 bp, Homo sapiens
ttcaagattgaagccaatgctgggcaactgtacctgacaggggtggtggtactgcacaaggatgtcaacgtggtagta

SEQ ID NO: 21437 - DNA, 75 bp, Homo sapiens
aagccaatgctgggcaactgtacctgacaggggtggtggtactgcacaaggatgtcaacgtggtagtagtggaag

SEQ ID NO: 21438 - DNA, 75 bp, Homo sapiens
gcaactgtacctgacaggggtggtggtactgcacaaggatgtcaacgtggtagtagtggaagggggtgagtctga

SEQ ID NO: 21439 - DNA, 72 bp, Homo sapiens
tacctgacaggggtggtggtactgcacaaggatgtcaacgtggtagtagtggaagggggtgagtctgaaaaa

SEQ ID NO: 21440 - DNA, 73 bp, Homo sapiens
tggtggtactgcacaaggatgtcaacgtggtagtagtggaagggggtgagtctgaaaaacttgagggagactg

SEQ ID NO: 21441 - DNA, 72 bp, Homo sapiens
gtactgcacaaggatgtcaacgtggtagtagtggaagggggtgagtctgaaaaacttgagggagactgtccc

SEQ ID NO: 21442 - DNA, 73 bp, Homo sapiens
ttctttctaccccatcatcttccacagttctggcaaaattattcttctctgtttccaggccccaaggcccaga

SEQ ID NO: 21443 - DNA, 72 bp, Homo sapiens
ccatcatcttccacagttctggcaaaattattcttctctgtttccaggccccaaggcccagaagaaatttaa

SEQ ID NO: 21444 - DNA, 71 bp, Homo sapiens
acagttctggcaaaattattcttctctgtttccaggccccaaggcccagaagaaatttaagcgtcttatgc

SEQ ID NO: 21445 - DNA, 72 bp, Homo sapiens
aaaattattcttctctgtttccaggccccaaggcccagaagaaatttaagcgtcttatgctgcatcggataa

SEQ ID NO: 21446 - DNA, 75 bp, Homo sapiens
ttctctgtttccaggccccaaggcccagaagaaatttaagcgtcttatgctgcatcggataaagtgggatgaaca

SEQ ID NO: 21447 - DNA, 76 bp, Homo sapiens
tttccaggccccaaggcccagaagaaatttaagcgtcttatgctgcatcggataaagtgggatgaacagacatcta

SEQ ID NO: 21448 - DNA, 75 bp, Homo sapiens
aaggcccagaagaaatttaagcgtcttatgctgcatcggataaagtgggatgaacagacatctaacacaaaggga

SEQ ID NO: 21449 - DNA, 77 bp, Homo sapiens
agaagaaatttaagcgtcttatgctgcatcggataaagtgggatgaacagacatctaacacaaagggagatggtgaa

SEQ ID NO: 21450 - DNA, 77 bp, Homo sapiens
ttaagcgtcttatgctgcatcggataaagtgggatgaacagacatctaacacaaagggagatggtgaatgggggtta

SEQ ID NO: 21451 - DNA, 77 bp, Homo sapiens
tatgctgcatcggataaagtgggatgaacagacatctaacacaaagggagatggtgaatgggggttagaggggatta

SEQ ID NO: 21452 - DNA, 70 bp, Homo sapiens
cggataaagtgggatgaacagacatctaacacaaagggagatggtgaatgggggttagaggggattaagg

SEQ ID NO: 21453 - DNA, 72 bp, Homo sapiens
atgaacagacatctaacacaaagggagatggtgaatgggggttagaggggattaagggggagagctatggga

SEQ ID NO: 21454 - DNA, 76 bp, Homo sapiens
cttgaatattatttgtttagaacctgaatctcaagtctaagtctgtaacaagatttctcttccagatgatgaggag

SEQ ID NO: 21455 - DNA, 79 bp, Homo sapiens
atattatttgtttagaacctgaatctcaagtctaagtctgtaacaagatttctcttccagatgatgaggagtctgatga

SEQ ID NO: 21456 - DNA, 81 bp, Homo sapiens
tttagaacctgaatctcaagtctaagtctgtaacaagatttctcttccagatgatgaggagtctgatgaggaagctgtgaa

SEQ ID NO: 21457 - DNA, 79 bp, Homo sapiens
aatctcaagtctaagtctgtaacaagatttctcttccagatgatgaggagtctgatgaggaagctgtgaagaaaaccaa

SEQ ID NO: 21458 - DNA, 80 bp, Homo sapiens
tctaagtctgtaacaagatttctcttccagatgatgaggagtctgatgaggaagctgtgaagaaaaccaacaaatgtgta

SEQ ID NO: 21459 - DNA, 79 bp, Homo sapiens
taacaagatttctcttccagatgatgaggagtctgatgaggaagctgtgaagaaaaccaacaaatgtgtactagtctgg

SEQ ID NO: 21460 - DNA, 80 bp, Homo sapiens
tcttccagatgatgaggagtctgatgaggaagctgtgaagaaaaccaacaaatgtgtactagtctgggaggtaggtgatc

SEQ ID NO: 21461 - DNA, 76 bp, Homo sapiens
tgaggagtctgatgaggaagctgtgaagaaaaccaacaaatgtgtactagtctgggaggtaggtgatcctttgtaa

SEQ ID NO: 21462 - DNA, 72 bp, Homo sapiens
atgaggaagctgtgaagaaaaccaacaaatgtgtactagtctgggaggtaggtgatcctttgtaaaacattg

SEQ ID NO: 21463 - DNA, 69 bp, Homo sapiens
tgtgaagaaaaccaacaaatgtgtactagtctgggaggtaggtgatcctttgtaaaacattgtaaaact

SEQ ID NO: 21464 - DNA, 68 bp, Homo sapiens
aaccaacaaatgtgtactagtctgggaggtaggtgatcctttgtaaaacattgtaaaactttagccaa

SEQ ID NO: 21465 - DNA, 70 bp, Homo sapiens
aatgtgtactagtctgggaggtaggtgatcctttgtaaaacattgtaaaactttagccaactcctgaata

SEQ ID NO: 21466 - DNA, 69 bp, Homo sapiens
gatttaaataagaaattgaagtgtttttattatatatctcttttctagggtacagccaaagaccggagc

SEQ ID NO: 21467 - DNA, 70 bp, Homo sapiens
aagaaattgaagtgtttttattatatatctcttttctagggtacagccaaagaccggagctttggagaga

SEQ ID NO: 21468 - DNA, 70 bp, Homo sapiens
gtttttattatatatctcttttctagggtacagccaaagaccggagctttggagagatgaagtttaaaca

SEQ ID NO: 21469 - DNA, 73 bp, Homo sapiens
tattatatatctcttttctagggtacagccaaagaccggagctttggagagatgaagtttaaacagtgtccta

SEQ ID NO: 21470 - DNA, 73 bp, Homo sapiens
tcttttctagggtacagccaaagaccggagctttggagagatgaagtttaaacagtgtcctacagagaacatg

SEQ ID NO: 21471 - DNA, 74 bp, Homo sapiens
aaagaccggagctttggagagatgaagtttaaacagtgtcctacagagaacatggctcgtgagcatttcaaaaa

SEQ ID NO: 21472 - DNA, 79 bp, Homo sapiens
ttggagagatgaagtttaaacagtgtcctacagagaacatggctcgtgagcatttcaaaaagcatggggctgaacacta

SEQ ID NO: 21473 - DNA, 77 bp, Homo sapiens
atgaagtttaaacagtgtcctacagagaacatggctcgtgagcatttcaaaaagcatggggctgaacactactggga

SEQ ID NO: 21474 - DNA, 79 bp, Homo sapiens
aaacagtgtcctacagagaacatggctcgtgagcatttcaaaaagcatggggctgaacactactgggaccttgcgctga

SEQ ID NO: 21475 - DNA, 81 bp, Homo sapiens
agagaacatggctcgtgagcatttcaaaaagcatggggctgaacactactgggaccttgcgctgagtgaatctgtgttaga

SEQ ID NO: 21476 - DNA, 80 bp, Homo sapiens
ctcgtgagcatttcaaaaagcatggggctgaacactactgggaccttgcgctgagtgaatctgtgttagagtccactgat

SEQ ID NO: 21477 - DNA, 79 bp, Homo sapiens
atttcaaaaagcatggggctgaacactactgggaccttgcgctgagtgaatctgtgttagagtccactgattgagacta

SEQ ID NO: 21478 - DNA, 81 bp, Homo sapiens
aaaagcatggggctgaacactactgggaccttgcgctgagtgaatctgtgttagagtccactgattgagactactgcaagc

SEQ ID NO: 21479 - DNA, 81 bp, Homo sapiens
ctgaacactactgggaccttgcgctgagtgaatctgtgttagagtccactgattgagactactgcaagcccttgcctctcc

SEQ ID NO: 21480 - DNA, 81 bp, Homo sapiens
tactgggaccttgcgctgagtgaatctgtgttagagtccactgattgagactactgcaagcccttgcctctcctcccttgc

SEQ ID NO: 21481 - DNA, 81 bp, Homo sapiens
ttgcgctgagtgaatctgtgttagagtccactgattgagactactgcaagcccttgcctctcctcccttgcctttgtctct

SEQ ID NO: 21482 - DNA, 78 bp, Homo sapiens
aatctgtgttagagtccactgattgagactactgcaagcccttgcctctcctcccttgcctttgtctcttcagtcctc

SEQ ID NO: 21483 - DNA, 78 bp, Homo sapiens
ttagagtccactgattgagactactgcaagcccttgcctctcctcccttgcctttgtctcttcagtcctctcacttat

SEQ ID NO: 21484 - DNA, 76 bp, Homo sapiens
attgagactactgcaagcccttgcctctcctcccttgcctttgtctcttcagtcctctcacttattctatttccca

SEQ ID NO: 21485 - DNA, 73 bp, Homo sapiens
ctactgcaagcccttgcctctcctcccttgcctttgtctcttcagtcctctcacttattctatttcccaaccc

SEQ ID NO: 21486 - DNA, 71 bp, Homo sapiens
tgcctctcctcccttgcctttgtctcttcagtcctctcacttattctatttcccaaccccctcccacttgt

SEQ ID NO: 21487 - DNA, 73 bp, Homo sapiens
ccttgcctttgtctcttcagtcctctcacttattctatttcccaaccccctcccacttgtttgtgtgatctca

SEQ ID NO: 21488 - DNA, 73 bp, Homo sapiens
ctttgtctcttcagtcctctcacttattctatttcccaaccccctcccacttgtttgtgtgatctcagaactg

SEQ ID NO: 21489 - DNA, 77 bp, Homo sapiens
ttcagtcctctcacttattctatttcccaaccccctcccacttgtttgtgtgatctcagaactgtgccaagcagaca

SEQ ID NO: 21490 - DNA, 74 bp, Homo sapiens
ttattctatttcccaaccccctcccacttgtttgtgtgatctcagaactgtgccaagcagacactgggacaaag

SEQ ID NO: 21491 - DNA, 74 bp, Homo sapiens
tatttcccaaccccctcccacttgtttgtgtgatctcagaactgtgccaagcagacactgggacaaagggagaa

SEQ ID NO: 21492 - DNA, 79 bp, Homo sapiens
tcccacttgtttgtgtgatctcagaactgtgccaagcagacactgggacaaagggagaatatcttgctcccctcctgag

SEQ ID NO: 21493 - DNA, 80 bp, Homo sapiens
cttgtttgtgtgatctcagaactgtgccaagcagacactgggacaaagggagaatatcttgctcccctcctgagtcagcc

SEQ ID NO: 21494 - DNA, 78 bp, Homo sapiens
tcagaactgtgccaagcagacactgggacaaagggagaatatcttgctcccctcctgagtcagcctggtgttgccctt

SEQ ID NO: 21495 - DNA, 72 bp, Homo sapiens
acactgggacaaagggagaatatcttgctcccctcctgagtcagcctggtgttgccctttattccccttatg

SEQ ID NO: 21496 - DNA, 75 bp, Homo sapiens
aagggagaatatcttgctcccctcctgagtcagcctggtgttgccctttattccccttatgtgcatatgattaaa

SEQ ID NO: 21497 - DNA, 75 bp, Homo sapiens
aatatcttgctcccctcctgagtcagcctggtgttgccctttattccccttatgtgcatatgattaaagagttat

SEQ ID NO: 21498 - DNA, 71 bp, Homo sapiens
cctcctgagtcagcctggtgttgccctttattccccttatgtgcatatgattaaagagttatttttaaact

SEQ ID NO: 21499 - DNA, 73 bp, Homo sapiens
tcagcctggtgttgccctttattccccttatgtgcatatgattaaagagttatttttaaacttggtgtgatat

SEQ ID NO: 21500 - DNA, 69 bp, Homo sapiens
ggtgttgccctttattccccttatgtgcatatgattaaagagttatttttaaacttggtgtgatatttt

SEQ ID NO: 21501 - DNA, 72 bp, Homo sapiens
gtgcatatgattaaagagttatttttaaacttggtgtgatatttttcacacattcgtaagtattagagtttg

SEQ ID NO: 21502 - DNA, 69 bp, Homo sapiens
tgattaaagagttatttttaaacttggtgtgatatttttcacacattcgtaagtattagagtttgggtc

SEQ ID NO: 21503 - DNA, 69 bp, Homo sapiens
atttttaaacttggtgtgatatttttcacacattcgtaagtattagagtttgggtctacaggtgatctt

SEQ ID NO: 21504 - DNA, 69 bp, Homo sapiens
aacttggtgtgatatttttcacacattcgtaagtattagagtttgggtctacaggtgatcttttttccg

SEQ ID NO: 21505 - DNA, 76 bp, Homo sapiens
atcaagaccatccaataatttactgtgatcccatctgtgcccgacaagggcccacagaggcctgggaggggagcta

SEQ ID NO: 21506 - DNA, 73 bp, Homo sapiens
accatccaataatttactgtgatcccatctgtgcccgacaagggcccacagaggcctgggaggggagctaagg

SEQ ID NO: 21507 - DNA, 72 bp, Homo sapiens
taatttactgtgatcccatctgtgcccgacaagggcccacagaggcctgggaggggagctaagggctggggt

SEQ ID NO: 21508 - DNA, 73 bp, Homo sapiens
tgatcccatctgtgcccgacaagggcccacagaggcctgggaggggagctaagggctggggttccggtggcat

SEQ ID NO: 21509 - DNA, 70 bp, Homo sapiens
ccgacaagggcccacagaggcctgggaggggagctaagggctggggttccggtggcatttgggatgttca

SEQ ID NO: 21510 - DNA, 74 bp, Homo sapiens
cccacagaggcctgggaggggagctaagggctggggttccggtggcatttgggatgttcaagacagtctgtgca

SEQ ID NO: 21511 - DNA, 73 bp, Homo sapiens
cctgggaggggagctaagggctggggttccggtggcatttgggatgttcaagacagtctgtgcacagcctccc

SEQ ID NO: 21512 - DNA, 74 bp, Homo sapiens
ggagctaagggctggggttccggtggcatttgggatgttcaagacagtctgtgcacagcctccctgggagggtc

SEQ ID NO: 21513 - DNA, 76 bp, Homo sapiens
aagggctggggttccggtggcatttgggatgttcaagacagtctgtgcacagcctccctgggagggtctgcagtca

SEQ ID NO: 21514 - DNA, 77 bp, Homo sapiens
ttccggtggcatttgggatgttcaagacagtctgtgcacagcctccctgggagggtctgcagtcacctcggcccacg

SEQ ID NO: 21515 - DNA, 74 bp, Homo sapiens
atttgggatgttcaagacagtctgtgcacagcctccctgggagggtctgcagtcacctcggcccacggtcccgg

SEQ ID NO: 21516 - DNA, 74 bp, Homo sapiens
gttcaagacagtctgtgcacagcctccctgggagggtctgcagtcacctcggcccacggtcccggggtgactgg

SEQ ID NO: 21517 - DNA, 75 bp, Homo sapiens
tgcacagcctccctgggagggtctgcagtcacctcggcccacggtcccggggtgactgggctccagcagcccttc

SEQ ID NO: 21518 - DNA, 71 bp, Homo sapiens
ctccctgggagggtctgcagtcacctcggcccacggtcccggggtgactgggctccagcagcccttccttc

SEQ ID NO: 21519 - DNA, 72 bp, Homo sapiens
cttccttccttgcttccgtccttccttcctcctccttccgtctgcacctccttcctgcatccggcacctcca

SEQ ID NO: 21520 - DNA, 75 bp, Homo sapiens
ttccttgcttccgtccttccttcctcctccttccgtctgcacctccttcctgcatccggcacctccatgtcctga

SEQ ID NO: 21521 - DNA, 76 bp, Homo sapiens
cttccttcctcctccttccgtctgcacctccttcctgcatccggcacctccatgtcctgagcttgtgctgggcggg

SEQ ID NO: 21522 - DNA, 78 bp, Homo sapiens
ttcctcctccttccgtctgcacctccttcctgcatccggcacctccatgtcctgagcttgtgctgggcggggcacaag

SEQ ID NO: 21523 - DNA, 81 bp, Homo sapiens
ttccgtctgcacctccttcctgcatccggcacctccatgtcctgagcttgtgctgggcggggcacaagggaggctgctgac

SEQ ID NO: 21524 - DNA, 82 bp, Homo sapiens
tccttcctgcatccggcacctccatgtcctgagcttgtgctgggcggggcacaagggaggctgctgaccgcaggccaggaga

SEQ ID NO: 21525 - DNA, 79 bp, Homo sapiens
atccggcacctccatgtcctgagcttgtgctgggcggggcacaagggaggctgctgaccgcaggccaggagaccggcag

SEQ ID NO: 21526 - DNA, 77 bp, Homo sapiens
acctccatgtcctgagcttgtgctgggcggggcacaagggaggctgctgaccgcaggccaggagaccggcaggggcg

SEQ ID NO: 21527 - DNA, 75 bp, Homo sapiens
cctgagcttgtgctgggcggggcacaagggaggctgctgaccgcaggccaggagaccggcaggggcggggagccg

SEQ ID NO: 21528 - DNA, 74 bp, Homo sapiens
tgctgggcggggcacaagggaggctgctgaccgcaggccaggagaccggcaggggcggggagccggggtcatcc

SEQ ID NO: 21529 - DNA, 71 bp, Homo sapiens
acaagggaggctgctgaccgcaggccaggagaccggcaggggcggggagccggggtcatccggtgggcgtg

SEQ ID NO: 21530 - DNA, 72 bp, Homo sapiens
tgctgaccgcaggccaggagaccggcaggggcggggagccggggtcatccggtgggcgtggcggccgccctg

SEQ ID NO: 21531 - DNA, 68 bp, Homo sapiens
aggccaggagaccggcaggggcggggagccggggtcatccggtgggcgtggcggccgccctgggagtc

SEQ ID NO: 21532 - DNA, 67 bp, Homo sapiens
agaccggcaggggcggggagccggggtcatccggtgggcgtggcggccgccctgggagtccccctca

SEQ ID NO: 21533 - DNA, 71 bp, Homo sapiens
cggggagccggggtcatccggtgggcgtggcggccgccctgggagtccccctcacctgcgtcaggagagca

SEQ ID NO: 21534 - DNA, 80 bp, Homo sapiens
gggtcatccggtgggcgtggcggccgccctgggagtccccctcacctgcgtcaggagagcacacacttgcagctcatgca

SEQ ID NO: 21535 - DNA, 79 bp, Homo sapiens
atccggtgggcgtggcggccgccctgggagtccccctcacctgcgtcaggagagcacacacttgcagctcatgcagccg

SEQ ID NO: 21536 - DNA, 82 bp, Homo sapiens
cggccgccctgggagtccccctcacctgcgtcaggagagcacacacttgcagctcatgcagccggggccactctcatcagga

SEQ ID NO: 21537 - DNA, 87 bp, Homo sapiens
cctcacctgcgtcaggagagcacacacttgcagctcatgcagccggggccactctcatcaggagggttcagcttccgcagcttgtgc

SEQ ID NO: 21538 - DNA, 86 bp, Homo sapiens
acacacttgcagctcatgcagccggggccactctcatcaggagggttcagcttccgcagcttgtgctgccggatctcacgcaccaa

SEQ ID NO: 21539 - DNA, 84 bp, Homo sapiens
agctcatgcagccggggccactctcatcaggagggttcagcttccgcagcttgtgctgccggatctcacgcaccaacgtgtaga

SEQ ID NO: 21540 - DNA, 81 bp, Homo sapiens
atgcagccggggccactctcatcaggagggttcagcttccgcagcttgtgctgccggatctcacgcaccaacgtgtagaag

SEQ ID NO: 21541 - DNA, 81 bp, Homo sapiens
actctcatcaggagggttcagcttccgcagcttgtgctgccggatctcacgcaccaacgtgtagaaggcatcctccactcc

SEQ ID NO: 21542 - DNA, 79 bp, Homo sapiens
atcaggagggttcagcttccgcagcttgtgctgccggatctcacgcaccaacgtgtagaaggcatcctccactccctgg

SEQ ID NO: 21543 - DNA, 78 bp, Homo sapiens
ttcagcttccgcagcttgtgctgccggatctcacgcaccaacgtgtagaaggcatcctccactccctgggaaaggagg

SEQ ID NO: 21544 - DNA, 77 bp, Homo sapiens
agcttgtgctgccggatctcacgcaccaacgtgtagaaggcatcctccactccctgggaaaggagggatgggatcag

SEQ ID NO: 21545 - DNA, 75 bp, Homo sapiens
ctgccggatctcacgcaccaacgtgtagaaggcatcctccactccctgggaaaggagggatgggatcaggaggga

SEQ ID NO: 21546 - DNA, 71 bp, Homo sapiens
gtgagcccagaccccggccctcgcctccctcactgccctgccgtcccgggagacttacagcgcgaggggcc

SEQ ID NO: 21547 - DNA, 72 bp, Homo sapiens
ccggccctcgcctccctcactgccctgccgtcccgggagacttacagcgcgaggggccgctgggtcacatgg

SEQ ID NO: 21548 - DNA, 70 bp, Homo sapiens
cctccctcactgccctgccgtcccgggagacttacagcgcgaggggccgctgggtcacatgggtcccggg

SEQ ID NO: 21549 - DNA, 70 bp, Homo sapiens
tgccctgccgtcccgggagacttacagcgcgaggggccgctgggtcacatgggtcccggggggtcccaga

SEQ ID NO: 21550 - DNA, 68 bp, Homo sapiens
tgccgtcccgggagacttacagcgcgaggggccgctgggtcacatgggtcccggggggtcccagaggg

SEQ ID NO: 21551 - DNA, 69 bp, Homo sapiens
agacttacagcgcgaggggccgctgggtcacatgggtcccggggggtcccagagggtcccggagctgga

SEQ ID NO: 21552 - DNA, 71 bp, Homo sapiens
agcgcgaggggccgctgggtcacatgggtcccggggggtcccagagggtcccggagctggagctagagcca

SEQ ID NO: 21553 - DNA, 75 bp, Homo sapiens
tgggtcacatgggtcccggggggtcccagagggtcccggagctggagctagagccagagcggctgccctgtgtca

SEQ ID NO: 21554 - DNA, 72 bp, Homo sapiens
acatgggtcccggggggtcccagagggtcccggagctggagctagagccagagcggctgccctgtgtcaagg

SEQ ID NO: 21555 - DNA, 79 bp, Homo sapiens
gggtcccagagggtcccggagctggagctagagccagagcggctgccctgtgtcaagggagagggtcagtgagtgctgc

SEQ ID NO: 21556 - DNA, 80 bp, Homo sapiens
ccagagggtcccggagctggagctagagccagagcggctgccctgtgtcaagggagagggtcagtgagtgctgctccctg

SEQ ID NO: 21557 - DNA, 80 bp, Homo sapiens
ccggagctggagctagagccagagcggctgccctgtgtcaagggagagggtcagtgagtgctgctccctggctggggcgg

SEQ ID NO: 21558 - DNA, 74 bp, Homo sapiens
ggcggggcgggtccctggctagctgtggggtggagagctgcctcacctgccgggtcttggccgaggtctcgatg

SEQ ID NO: 21559 - DNA, 74 bp, Homo sapiens
ggcgggtccctggctagctgtggggtggagagctgcctcacctgccgggtcttggccgaggtctcgatgtaggg

SEQ ID NO: 21560 - DNA, 76 bp, Homo sapiens
tagctgtggggtggagagctgcctcacctgccgggtcttggccgaggtctcgatgtaggggatgccgtagcttcgg

SEQ ID NO: 21561 - DNA, 77 bp, Homo sapiens
tggagagctgcctcacctgccgggtcttggccgaggtctcgatgtaggggatgccgtagcttcgggcgaggtcctga

SEQ ID NO: 21562 - DNA, 75 bp, Homo sapiens
agctgcctcacctgccgggtcttggccgaggtctcgatgtaggggatgccgtagcttcgggcgaggtcctgagcc

SEQ ID NO: 21563 - DNA, 75 bp, Homo sapiens
cgggtcttggccgaggtctcgatgtaggggatgccgtagcttcgggcgaggtcctgagcctgccgagattccaca

SEQ ID NO: 21564 - DNA, 79 bp, Homo sapiens
cttggccgaggtctcgatgtaggggatgccgtagcttcgggcgaggtcctgagcctgccgagattccacagtgcgtgca

SEQ ID NO: 21565 - DNA, 81 bp, Homo sapiens
tctcgatgtaggggatgccgtagcttcgggcgaggtcctgagcctgccgagattccacagtgcgtgcagccaggtcacact

SEQ ID NO: 21566 - DNA, 78 bp, Homo sapiens
aggggatgccgtagcttcgggcgaggtcctgagcctgccgagattccacagtgcgtgcagccaggtcacacttgttcc

SEQ ID NO: 21567 - DNA, 80 bp, Homo sapiens
gtagcttcgggcgaggtcctgagcctgccgagattccacagtgcgtgcagccaggtcacacttgttccccaccagcacca

SEQ ID NO: 21568 - DNA, 81 bp, Homo sapiens
aggtcctgagcctgccgagattccacagtgcgtgcagccaggtcacacttgttccccaccagcaccatgggcacgtcatcc

SEQ ID NO: 21569 - DNA, 81 bp, Homo sapiens
ctgccgagattccacagtgcgtgcagccaggtcacacttgttccccaccagcaccatgggcacgtcatccgagtccttcac

SEQ ID NO: 21570 - DNA, 79 bp, Homo sapiens
tccacagtgcgtgcagccaggtcacacttgttccccaccagcaccatgggcacgtcatccgagtccttcacccgtttga

SEQ ID NO: 21571 - DNA, 80 bp, Homo sapiens
tgcagccaggtcacacttgttccccaccagcaccatgggcacgtcatccgagtccttcacccgtttgatctgctccctga

SEQ ID NO: 21572 - DNA, 76 bp, Homo sapiens
aggtcacacttgttccccaccagcaccatgggcacgtcatccgagtccttcacccgtttgatctgctccctgagag

SEQ ID NO: 21573 - DNA, 75 bp, Homo sapiens
cttgttccccaccagcaccatgggcacgtcatccgagtccttcacccgtttgatctgctccctgagaggtggaaa

SEQ ID NO: 21574 - DNA, 78 bp, Homo sapiens
agcaccatgggcacgtcatccgagtccttcacccgtttgatctgctccctgagaggtggaaagcgagagctggctacg

SEQ ID NO: 21575 - DNA, 72 bp, Homo sapiens
cccacctgtgcggcgtgggctcccgggccagcctcacggggttcacctgtactggtggatgtcctcaaaaga

SEQ ID NO: 21576 - DNA, 70 bp, Homo sapiens
cggcgtgggctcccgggccagcctcacggggttcacctgtactggtggatgtcctcaaaagacttggtgt

SEQ ID NO: 21577 - DNA, 73 bp, Homo sapiens
tcccgggccagcctcacggggttcacctgtactggtggatgtcctcaaaagacttggtgttgttgatggcaaa

SEQ ID NO: 21578 - DNA, 75 bp, Homo sapiens
ccagcctcacggggttcacctgtactggtggatgtcctcaaaagacttggtgttgttgatggcaaacacacacag

SEQ ID NO: 21579 - DNA, 74 bp, Homo sapiens
gggttcacctgtactggtggatgtcctcaaaagacttggtgttgttgatggcaaacacacacaggaagccctcc

SEQ ID NO: 21580 - DNA, 77 bp, Homo sapiens
tactggtggatgtcctcaaaagacttggtgttgttgatggcaaacacacacaggaagccctccccggtgcgcatgta

SEQ ID NO: 21581 - DNA, 75 bp, Homo sapiens
atgtcctcaaaagacttggtgttgttgatggcaaacacacacaggaagccctccccggtgcgcatgtactggtcc

SEQ ID NO: 21582 - DNA, 75 bp, Homo sapiens
aaaagacttggtgttgttgatggcaaacacacacaggaagccctccccggtgcgcatgtactggtcccgcatggc

SEQ ID NO: 21583 - DNA, 79 bp, Homo sapiens
tgttgttgatggcaaacacacacaggaagccctccccggtgcgcatgtactggtcccgcatggcgctgtactcctcctg

SEQ ID NO: 21584 - DNA, 75 bp, Homo sapiens
aggaagccctccccggtgcgcatgtactggtcccgcatggcgctgtactcctcctggccggcggtatccaggatg

SEQ ID NO: 21585 - DNA, 76 bp, Homo sapiens
ccctccccggtgcgcatgtactggtcccgcatggcgctgtactcctcctggccggcggtatccaggatgtccaaca

SEQ ID NO: 21586 - DNA, 79 bp, Homo sapiens
gtgcgcatgtactggtcccgcatggcgctgtactcctcctggccggcggtatccaggatgtccaacaggcacgtctccc

SEQ ID NO: 21587 - DNA, 78 bp, Homo sapiens
actggtcccgcatggcgctgtactcctcctggccggcggtatccaggatgtccaacaggcacgtctccccatcaatga

SEQ ID NO: 21588 - DNA, 78 bp, Homo sapiens
atggcgctgtactcctcctggccggcggtatccaggatgtccaacaggcacgtctccccatcaatgaccacctgcttc

SEQ ID NO: 21589 - DNA, 75 bp, Homo sapiens
tcctcctggccggcggtatccaggatgtccaacaggcacgtctccccatcaatgaccacctgcttccggtaggaa

SEQ ID NO: 21590 - DNA, 76 bp, Homo sapiens
ccggcggtatccaggatgtccaacaggcacgtctccccatcaatgaccacctgcttccggtaggaatcctgcagga

SEQ ID NO: 21591 - DNA, 77 bp, Homo sapiens
atccaggatgtccaacaggcacgtctccccatcaatgaccacctgcttccggtaggaatcctgcaggaggacagggc

SEQ ID NO: 21592 - DNA, 76 bp, Homo sapiens
tccaacaggcacgtctccccatcaatgaccacctgcttccggtaggaatcctgcaggaggacagggctcagggacc

SEQ ID NO: 21593 - DNA, 73 bp, Homo sapiens
acgtctccccatcaatgaccacctgcttccggtaggaatcctgcaggaggacagggctcagggaccccctcag

SEQ ID NO: 21594 - DNA, 79 bp, Homo sapiens
tcgcccgcagcagctgctggcacctggacggcggcgccaggctcacctctatagtggggtcgtattcgtccacaaaatg

SEQ ID NO: 21595 - DNA, 77 bp, Homo sapiens
cagctgctggcacctggacggcggcgccaggctcacctctatagtggggtcgtattcgtccacaaaatggttctgga

SEQ ID NO: 21596 - DNA, 76 bp, Homo sapiens
cacctggacggcggcgccaggctcacctctatagtggggtcgtattcgtccacaaaatggttctggatcagctgga

SEQ ID NO: 21597 - DNA, 77 bp, Homo sapiens
ggacggcggcgccaggctcacctctatagtggggtcgtattcgtccacaaaatggttctggatcagctggatggtca

SEQ ID NO: 21598 - DNA, 79 bp, Homo sapiens
aggctcacctctatagtggggtcgtattcgtccacaaaatggttctggatcagctggatggtcagcgcactcttgccca

SEQ ID NO: 21599 - DNA, 78 bp, Homo sapiens
cctctatagtggggtcgtattcgtccacaaaatggttctggatcagctggatggtcagcgcactcttgcccacaccgc

SEQ ID NO: 21600 - DNA, 78 bp, Homo sapiens
ggtcgtattcgtccacaaaatggttctggatcagctggatggtcagcgcactcttgcccacaccgccggcgcccacca

SEQ ID NO: 21601 - DNA, 72 bp, Homo sapiens
gcgcccaccaccaccagcttatattccgtcatcgctcctcaggggcctgcggcccggggtcctcctacaggg

SEQ ID NO: 21602 - DNA, 71 bp, Homo sapiens
accaccaccagcttatattccgtcatcgctcctcaggggcctgcggcccggggtcctcctacagggtctcc

SEQ ID NO: 21603 - DNA, 71 bp, Homo sapiens
agcttatattccgtcatcgctcctcaggggcctgcggcccggggtcctcctacagggtctcctgccccacc

SEQ ID NO: 21604 - DNA, 71 bp, Homo sapiens
ccgtcatcgctcctcaggggcctgcggcccggggtcctcctacagggtctcctgccccacctgccaaggag

SEQ ID NO: 21605 - DNA, 72 bp, Homo sapiens
tcctcaggggcctgcggcccggggtcctcctacagggtctcctgccccacctgccaaggagggccctgctca

SEQ ID NO: 21606 - DNA, 72 bp, Homo sapiens
cctgcggcccggggtcctcctacagggtctcctgccccacctgccaaggagggccctgctcagccaggccca

SEQ ID NO: 21607 - DNA, 71 bp, Homo sapiens
ggggcgaggagggcgcgcggcccggccgatccctgcccgcactcaccgttcacaggcgcgactgcccccgg

SEQ ID NO: 21608 - DNA, 71 bp, Homo sapiens
aggagggcgcgcggcccggccgatccctgcccgcactcaccgttcacaggcgcgactgcccccggggccag

SEQ ID NO: 21609 - DNA, 69 bp, Homo sapiens
cgcggcccggccgatccctgcccgcactcaccgttcacaggcgcgactgcccccggggccagggccggg

SEQ ID NO: 21610 - DNA, 69 bp, Homo sapiens
ccgatccctgcccgcactcaccgttcacaggcgcgactgcccccggggccagggccggggccgaggccg

SEQ ID NO: 21611 - DNA, 66 bp, Homo sapiens
cccgcactcaccgttcacaggcgcgactgcccccggggccagggccggggccgaggccggggcggg

SEQ ID NO: 21612 - DNA, 64 bp, Homo sapiens
ccgttcacaggcgcgactgcccccggggccagggccggggccgaggccggggcggggcgggggc

SEQ ID NO: 21613 - DNA, 67 bp, Homo sapiens
gccggggcggggcgggggcgggggcgcgcggttcgccccgcgcatgggctccgtccgcggcgggtgc

SEQ ID NO: 21614 - DNA, 69 bp, Homo sapiens
ggcgggggcgggggcgcgcggttcgccccgcgcatgggctccgtccgcggcgggtgcggctcgggttgc

SEQ ID NO: 21615 - DNA, 72 bp, Homo sapiens
ggggcgcgcggttcgccccgcgcatgggctccgtccgcggcgggtgcggctcgggttgcgggcgcagggcac

SEQ ID NO: 21616 - DNA, 71 bp, Homo sapiens
cgcggttcgccccgcgcatgggctccgtccgcggcgggtgcggctcgggttgcgggcgcagggcacgggcg

SEQ ID NO: 21617 - DNA, 72 bp, Homo sapiens
cccgcgcatgggctccgtccgcggcgggtgcggctcgggttgcgggcgcagggcacgggcggcggagactcg

SEQ ID NO: 21618 - DNA, 73 bp, Homo sapiens
tccgtccgcggcgggtgcggctcgggttgcgggcgcagggcacgggcggcggagactcgggcgggcctgcgca

SEQ ID NO: 21619 - DNA, 72 bp, Homo sapiens
cgcggcgggtgcggctcgggttgcgggcgcagggcacgggcggcggagactcgggcgggcctgcgcacgccc

SEQ ID NO: 21620 - DNA, 63 bp, Homo sapiens
aaaaccaggaagtgacagagggtgtttctaagtgttggggggggggagtttggggggtggcag

SEQ ID NO: 21621 - DNA, 62 bp, Homo sapiens
agtgacagagggtgtttctaagtgttggggggggggagtttggggggtggcaggggcggggg

SEQ ID NO: 21622 - DNA, 60 bp, Homo sapiens
ggtgtttctaagtgttggggggggggagtttggggggtggcaggggcggggggagggagg

SEQ ID NO: 21623 - DNA, 60 bp, Homo sapiens
agtgttggggggggggagtttggggggtggcaggggcggggggagggaggggagggatgg

SEQ ID NO: 21624 - DNA, 65 bp, Homo sapiens
gagtttggggggtggcaggggcggggggagggaggggagggatggggggaaagcaagctggagga

SEQ ID NO: 21625 - DNA, 70 bp, Homo sapiens
ggtggcaggggcggggggagggaggggagggatggggggaaagcaagctggaggacaggtgagacagcag

SEQ ID NO: 21626 - DNA, 71 bp, Homo sapiens
ggcggggggagggaggggagggatggggggaaagcaagctggaggacaggtgagacagcaggacaggtgag

SEQ ID NO: 21627 - DNA, 73 bp, Homo sapiens
agggaggggagggatggggggaaagcaagctggaggacaggtgagacagcaggacaggtgaggcgggccctga

SEQ ID NO: 21628 - DNA, 72 bp, Homo sapiens
ggagggatggggggaaagcaagctggaggacaggtgagacagcaggacaggtgaggcgggccctgagggggg

SEQ ID NO: 21629 - DNA, 73 bp, Homo sapiens
aaagcaagctggaggacaggtgagacagcaggacaggtgaggcgggccctgaggggggggcgggtgggagcca

SEQ ID NO: 21630 - DNA, 74 bp, Homo sapiens
tggaggacaggtgagacagcaggacaggtgaggcgggccctgaggggggggcgggtgggagccaggtgaatgta

SEQ ID NO: 21631 - DNA, 73 bp, Homo sapiens
gtgagacagcaggacaggtgaggcgggccctgaggggggggcgggtgggagccaggtgaatgtacggctcttg

SEQ ID NO: 21632 - DNA, 71 bp, Homo sapiens
acagcaggacaggtgaggcgggccctgaggggggggcgggtgggagccaggtgaatgtacggctcttggcg

SEQ ID NO: 21633 - DNA, 68 bp, Homo sapiens
aggtgaggcgggccctgaggggggggcgggtgggagccaggtgaatgtacggctcttggcggccgagg

SEQ ID NO: 21634 - DNA, 68 bp, Homo sapiens
gtgaggcgggccctgaggggggggcgggtgggagccaggtgaatgtacggctcttggcggccgagggg

SEQ ID NO: 21635 - DNA, 66 bp, Homo sapiens
ccctgaggggggggcgggtgggagccaggtgaatgtacggctcttggcggccgagggggggcgggc

SEQ ID NO: 21636 - DNA, 71 bp, Homo sapiens
gggcgggtgggagccaggtgaatgtacggctcttggcggccgagggggggcgggcggcaggaggaggcaga

SEQ ID NO: 21637 - DNA, 71 bp, Homo sapiens
agccaggtgaatgtacggctcttggcggccgagggggggcgggcggcaggaggaggcagagggcggcggag

SEQ ID NO: 21638 - DNA, 72 bp, Homo sapiens
tcttggcggccgagggggggcgggcggcaggaggaggcagagggcggcggaggaggagccccccagcagcga

SEQ ID NO: 21639 - DNA, 72 bp, Homo sapiens
agggggggcgggcggcaggaggaggcagagggcggcggaggaggagccccccagcagcgagcggcgagcaac

SEQ ID NO: 21640 - DNA, 76 bp, Homo sapiens
ggcggcaggaggaggcagagggcggcggaggaggagccccccagcagcgagcggcgagcaactgaccgcggccttc

SEQ ID NO: 21641 - DNA, 76 bp, Homo sapiens
aggaggcagagggcggcggaggaggagccccccagcagcgagcggcgagcaactgaccgcggccttctgaccagga

SEQ ID NO: 21642 - DNA, 74 bp, Homo sapiens
agagggcggcggaggaggagccccccagcagcgagcggcgagcaactgaccgcggccttctgaccaggaccgga

SEQ ID NO: 21643 - DNA, 74 bp, Homo sapiens
cggaggaggagccccccagcagcgagcggcgagcaactgaccgcggccttctgaccaggaccggagcagggccc

SEQ ID NO: 21644 - DNA, 73 bp, Homo sapiens
cccagcagcgagcggcgagcaactgaccgcggccttctgaccaggaccggagcagggccccaagcccccgggc

SEQ ID NO: 21645 - DNA, 70 bp, Homo sapiens
agcggcgagcaactgaccgcggccttctgaccaggaccggagcagggccccaagcccccgggcctggtgg

SEQ ID NO: 21646 - DNA, 68 bp, Homo sapiens
agcaactgaccgcggccttctgaccaggaccggagcagggccccaagcccccgggcctggtgggggac

SEQ ID NO: 21647 - DNA, 69 bp, Homo sapiens
gccttctgaccaggaccggagcagggccccaagcccccgggcctggtgggggacgcgcttcttcccaca

SEQ ID NO: 21648 - DNA, 70 bp, Homo sapiens
ctgaccaggaccggagcagggccccaagcccccgggcctggtgggggacgcgcttcttcccacactgtga

SEQ ID NO: 21649 - DNA, 73 bp, Homo sapiens
ccggagcagggccccaagcccccgggcctggtgggggacgcgcttcttcccacactgtgagcctcagcagctc

SEQ ID NO: 21650 - DNA, 74 bp, Homo sapiens
aagcccccgggcctggtgggggacgcgcttcttcccacactgtgagcctcagcagctccagccagcggacccga

SEQ ID NO: 21651 - DNA, 79 bp, Homo sapiens
gcctggtgggggacgcgcttcttcccacactgtgagcctcagcagctccagccagcggacccgacggctgagaggtgag

SEQ ID NO: 21652 - DNA, 79 bp, Homo sapiens
gggacgcgcttcttcccacactgtgagcctcagcagctccagccagcggacccgacggctgagaggtgagtgtacccca

SEQ ID NO: 21653 - DNA, 79 bp, Homo sapiens
acactgtgagcctcagcagctccagccagcggacccgacggctgagaggtgagtgtaccccacttttgtctcctggctc

SEQ ID NO: 21654 - DNA, 72 bp, Homo sapiens
gtgtcatggaaagaaaatgtagggaagcattaaggtctccctcatttcaggagccccagaaccaggactggg

SEQ ID NO: 21655 - DNA, 68 bp, Homo sapiens
aaagaaaatgtagggaagcattaaggtctccctcatttcaggagccccagaaccaggactgggggatt

SEQ ID NO: 21656 - DNA, 73 bp, Homo sapiens
aagcattaaggtctccctcatttcaggagccccagaaccaggactgggggatttggagctgggcagagactta

SEQ ID NO: 21657 - DNA, 71 bp, Homo sapiens
ttaaggtctccctcatttcaggagccccagaaccaggactgggggatttggagctgggcagagacttaacc

SEQ ID NO: 21658 - DNA, 70 bp, Homo sapiens
atttcaggagccccagaaccaggactgggggatttggagctgggcagagacttaacccccacagcaccgg

SEQ ID NO: 21659 - DNA, 71 bp, Homo sapiens
cccagaaccaggactgggggatttggagctgggcagagacttaacccccacagcaccgggaagcagccaac

SEQ ID NO: 21660 - DNA, 70 bp, Homo sapiens
aaccaggactgggggatttggagctgggcagagacttaacccccacagcaccgggaagcagccaactccc

SEQ ID NO: 21661 - DNA, 71 bp, Homo sapiens
ggatttggagctgggcagagacttaacccccacagcaccgggaagcagccaactcccctcgcctccttccc

SEQ ID NO: 21662 - DNA, 69 bp, Homo sapiens
ctgggcagagacttaacccccacagcaccgggaagcagccaactcccctcgcctccttcccccttcgtg

SEQ ID NO: 21663 - DNA, 68 bp, Homo sapiens
agacttaacccccacagcaccgggaagcagccaactcccctcgcctccttcccccttcgtggcttgcg

SEQ ID NO: 21664 - DNA, 70 bp, Homo sapiens
cccacagcaccgggaagcagccaactcccctcgcctccttcccccttcgtggcttgcggtctctcttccc

SEQ ID NO: 21665 - DNA, 68 bp, Homo sapiens
ccgggaagcagccaactcccctcgcctccttcccccttcgtggcttgcggtctctcttccccgcctcg

SEQ ID NO: 21666 - DNA, 66 bp, Homo sapiens
aactcccctcgcctccttcccccttcgtggcttgcggtctctcttccccgcctcggcccccaggaa

SEQ ID NO: 21667 - DNA, 71 bp, Homo sapiens
ctcgcctccttcccccttcgtggcttgcggtctctcttccccgcctcggcccccaggaagtgtgagtgctg

SEQ ID NO: 21668 - DNA, 71 bp, Homo sapiens
cttcgtggcttgcggtctctcttccccgcctcggcccccaggaagtgtgagtgctgggggtggtgaggtta

SEQ ID NO: 21669 - DNA, 71 bp, Homo sapiens
tggcttgcggtctctcttccccgcctcggcccccaggaagtgtgagtgctgggggtggtgaggttaggagg

SEQ ID NO: 21670 - DNA, 78 bp, Homo sapiens
accaggagcgttgggaagagcctcaggtctctccatcatccctggcaggaagatgttacagcctggtcctcatcctcc

SEQ ID NO: 21671 - DNA, 77 bp, Homo sapiens
cgttgggaagagcctcaggtctctccatcatccctggcaggaagatgttacagcctggtcctcatcctccctcaccc

SEQ ID NO: 21672 - DNA, 83 bp, Homo sapiens
tcaggtctctccatcatccctggcaggaagatgttacagcctggtcctcatcctccctcaccccaagctgctgctcctggaga

SEQ ID NO: 21673 - DNA, 82 bp, Homo sapiens
tctccatcatccctggcaggaagatgttacagcctggtcctcatcctccctcaccccaagctgctgctcctggagaagcctg

SEQ ID NO: 21674 - DNA, 79 bp, Homo sapiens
atccctggcaggaagatgttacagcctggtcctcatcctccctcaccccaagctgctgctcctggagaagcctggccag

SEQ ID NO: 21675 - DNA, 78 bp, Homo sapiens
aagatgttacagcctggtcctcatcctccctcaccccaagctgctgctcctggagaagcctggccaggcccctctcag

SEQ ID NO: 21676 - DNA, 78 bp, Homo sapiens
acagcctggtcctcatcctccctcaccccaagctgctgctcctggagaagcctggccaggcccctctcaggctccctg

SEQ ID NO: 21677 - DNA, 79 bp, Homo sapiens
tcctccctcaccccaagctgctgctcctggagaagcctggccaggcccctctcaggctccctggcagagcctagaggta

SEQ ID NO: 21678 - DNA, 77 bp, Homo sapiens
cctcaccccaagctgctgctcctggagaagcctggccaggcccctctcaggctccctggcagagcctagaggtaggg

SEQ ID NO: 21679 - DNA, 75 bp, Homo sapiens
ctgctcctggagaagcctggccaggcccctctcaggctccctggcagagcctagaggtaggggccttggaacctg

SEQ ID NO: 21680 - DNA, 72 bp, Homo sapiens
cctggagaagcctggccaggcccctctcaggctccctggcagagcctagaggtaggggccttggaacctggg

SEQ ID NO: 21681 - DNA, 69 bp, Homo sapiens
cctggccaggcccctctcaggctccctggcagagcctagaggtaggggccttggaacctggggaggggg

SEQ ID NO: 21682 - DNA, 77 bp, Homo sapiens
aggaggaagaggatgatgcttggaagctgccttctcttgtttgcatatgttttacagtgtcctaaccgctttggaga

SEQ ID NO: 21683 - DNA, 78 bp, Homo sapiens
aagaggatgatgcttggaagctgccttctcttgtttgcatatgttttacagtgtcctaaccgctttggagagcgataa

SEQ ID NO: 21684 - DNA, 75 bp, Homo sapiens
tggaagctgccttctcttgtttgcatatgttttacagtgtcctaaccgctttggagagcgataacttgagttaaa

SEQ ID NO: 21685 - DNA, 74 bp, Homo sapiens
cttctcttgtttgcatatgttttacagtgtcctaaccgctttggagagcgataacttgagttaaagcacctgtc

SEQ ID NO: 21686 - DNA, 75 bp, Homo sapiens
cttgtttgcatatgttttacagtgtcctaaccgctttggagagcgataacttgagttaaagcacctgtctgtgcc

SEQ ID NO: 21687 - DNA, 77 bp, Homo sapiens
tatgttttacagtgtcctaaccgctttggagagcgataacttgagttaaagcacctgtctgtgcctggcctccagca

SEQ ID NO: 21688 - DNA, 77 bp, Homo sapiens
agtgtcctaaccgctttggagagcgataacttgagttaaagcacctgtctgtgcctggcctccagcagatcttggtc

SEQ ID NO: 21689 - DNA, 81 bp, Homo sapiens
tttggagagcgataacttgagttaaagcacctgtctgtgcctggcctccagcagatcttggtccagtgtgagtctgaactc

SEQ ID NO: 21690 - DNA, 82 bp, Homo sapiens
agcgataacttgagttaaagcacctgtctgtgcctggcctccagcagatcttggtccagtgtgagtctgaactctctcattg

SEQ ID NO: 21691 - DNA, 82 bp, Homo sapiens
ttgagttaaagcacctgtctgtgcctggcctccagcagatcttggtccagtgtgagtctgaactctctcattggcctctccc

SEQ ID NO: 21692 - DNA, 81 bp, Homo sapiens
acctgtctgtgcctggcctccagcagatcttggtccagtgtgagtctgaactctctcattggcctctccccaggttatgag

SEQ ID NO: 21693 - DNA, 73 bp, Homo sapiens
cccactccctgagtttgaacactgttctgcacttaacttggaaaatcacttcacctgtctgaacctcagtttc

SEQ ID NO: 21694 - DNA, 76 bp, Homo sapiens
tgagtttgaacactgttctgcacttaacttggaaaatcacttcacctgtctgaacctcagtttccttgtctgtgaa

SEQ ID NO: 21695 - DNA, 79 bp, Homo sapiens
ttctgcacttaacttggaaaatcacttcacctgtctgaacctcagtttccttgtctgtgaaacagatgatgatcatact

SEQ ID NO: 21696 - DNA, 78 bp, Homo sapiens
acttaacttggaaaatcacttcacctgtctgaacctcagtttccttgtctgtgaaacagatgatgatcatacttcaga

SEQ ID NO: 21697 - DNA, 78 bp, Homo sapiens
aaaatcacttcacctgtctgaacctcagtttccttgtctgtgaaacagatgatgatcatacttcagagggttctggaa

SEQ ID NO: 21698 - DNA, 81 bp, Homo sapiens
ctcagtttccttgtctgtgaaacagatgatgatcatacttcagagggttctggaagatgaaatgagtgtaaagtactcaga

SEQ ID NO: 21699 - DNA, 79 bp, Homo sapiens
tttccttgtctgtgaaacagatgatgatcatacttcagagggttctggaagatgaaatgagtgtaaagtactcagaagg

SEQ ID NO: 21700 - DNA, 83 bp, Homo sapiens
aaacagatgatgatcatacttcagagggttctggaagatgaaatgagtgtaaagtactcagaagggtgactggcatgcagtca

SEQ ID NO: 21701 - DNA, 83 bp, Homo sapiens
tgatcatacttcagagggttctggaagatgaaatgagtgtaaagtactcagaagggtgactggcatgcagtcatccctcaata

SEQ ID NO: 21702 - DNA, 79 bp, Homo sapiens
ttcagagggttctggaagatgaaatgagtgtaaagtactcagaagggtgactggcatgcagtcatccctcaataagtat

SEQ ID NO: 21703 - DNA, 79 bp, Homo sapiens
tggaagatgaaatgagtgtaaagtactcagaagggtgactggcatgcagtcatccctcaataagtattggctaaagttg

SEQ ID NO: 21704 - DNA, 76 bp, Homo sapiens
aatgagtgtaaagtactcagaagggtgactggcatgcagtcatccctcaataagtattggctaaagttggtcctct

SEQ ID NO: 21705 - DNA, 75 bp, Homo sapiens
gtgtaaagtactcagaagggtgactggcatgcagtcatccctcaataagtattggctaaagttggtcctctttcc

SEQ ID NO: 21706 - DNA, 73 bp, Homo sapiens
agaagggtgactggcatgcagtcatccctcaataagtattggctaaagttggtcctctttccccagacccctg

SEQ ID NO: 21707 - DNA, 77 bp, Homo sapiens
tggcatgcagtcatccctcaataagtattggctaaagttggtcctctttccccagacccctgtgggctgagcgctct

SEQ ID NO: 21708 - DNA, 74 bp, Homo sapiens
tcatccctcaataagtattggctaaagttggtcctctttccccagacccctgtgggctgagcgctcttaatctc

SEQ ID NO: 21709 - DNA, 71 bp, Homo sapiens
ataagtattggctaaagttggtcctctttccccagacccctgtgggctgagcgctcttaatctcccctcta

SEQ ID NO: 21710 - DNA, 71 bp, Homo sapiens
attggctaaagttggtcctctttccccagacccctgtgggctgagcgctcttaatctcccctctacttgac

SEQ ID NO: 21711 - DNA, 76 bp, Homo sapiens
ttggtcctctttccccagacccctgtgggctgagcgctcttaatctcccctctacttgactctgcaggagaagatg

SEQ ID NO: 21712 - DNA, 75 bp, Homo sapiens
tttccccagacccctgtgggctgagcgctcttaatctcccctctacttgactctgcaggagaagatggggagccc

SEQ ID NO: 21713 - DNA, 79 bp, Homo sapiens
ctgtgggctgagcgctcttaatctcccctctacttgactctgcaggagaagatggggagccccgaggatgacctgattg

SEQ ID NO: 21714 - DNA, 76 bp, Homo sapiens
cgctcttaatctcccctctacttgactctgcaggagaagatggggagccccgaggatgacctgattgggattccat

SEQ ID NO: 21715 - DNA, 75 bp, Homo sapiens
ttaatctcccctctacttgactctgcaggagaagatggggagccccgaggatgacctgattgggattccattccc

SEQ ID NO: 21716 - DNA, 79 bp, Homo sapiens
tctacttgactctgcaggagaagatggggagccccgaggatgacctgattgggattccattcccggaccacagcagtga

SEQ ID NO: 21717 - DNA, 79 bp, Homo sapiens
caggagaagatggggagccccgaggatgacctgattgggattccattcccggaccacagcagtgagctcctgagctgcc

SEQ ID NO: 21718 - DNA, 80 bp, Homo sapiens
aagatggggagccccgaggatgacctgattgggattccattcccggaccacagcagtgagctcctgagctgcctcaatga

SEQ ID NO: 21719 - DNA, 85 bp, Homo sapiens
ccgaggatgacctgattgggattccattcccggaccacagcagtgagctcctgagctgcctcaatgagcagcgccagctgggcca

SEQ ID NO: 21720 - DNA, 87 bp, Homo sapiens
tgacctgattgggattccattcccggaccacagcagtgagctcctgagctgcctcaatgagcagcgccagctgggccacctatgtga

SEQ ID NO: 21721 - DNA, 85 bp, Homo sapiens
attccattcccggaccacagcagtgagctcctgagctgcctcaatgagcagcgccagctgggccacctatgtgacctcaccatcc

SEQ ID NO: 21722 - DNA, 86 bp, Homo sapiens
ttcccggaccacagcagtgagctcctgagctgcctcaatgagcagcgccagctgggccacctatgtgacctcaccatccggacgca

SEQ ID NO: 21723 - DNA, 84 bp, Homo sapiens
agtgagctcctgagctgcctcaatgagcagcgccagctgggccacctatgtgacctcaccatccggacgcagggccttgaatac

SEQ ID NO: 21724 - DNA, 84 bp, Homo sapiens
tgagctgcctcaatgagcagcgccagctgggccacctatgtgacctcaccatccggacgcagggccttgaataccgcacccaca

SEQ ID NO: 21725 - DNA, 80 bp, Homo sapiens
agcagcgccagctgggccacctatgtgacctcaccatccggacgcagggccttgaataccgcacccacagggctgtgcta

SEQ ID NO: 21726 - DNA, 79 bp, Homo sapiens
ctgggccacctatgtgacctcaccatccggacgcagggccttgaataccgcacccacagggctgtgctagctgcctgta

SEQ ID NO: 21727 - DNA, 76 bp, Homo sapiens
atccggacgcagggccttgaataccgcacccacagggctgtgctagctgcctgtagccactacttcaagaagcttt

SEQ ID NO: 21728 - DNA, 78 bp, Homo sapiens
acgcagggccttgaataccgcacccacagggctgtgctagctgcctgtagccactacttcaagaagcttttcactgag

SEQ ID NO: 21729 - DNA, 78 bp, Homo sapiens
cttgaataccgcacccacagggctgtgctagctgcctgtagccactacttcaagaagcttttcactgagggcggtggc

SEQ ID NO: 21730 - DNA, 79 bp, Homo sapiens
acccacagggctgtgctagctgcctgtagccactacttcaagaagcttttcactgagggcggtggcggagctgtcatgg

SEQ ID NO: 21731 - DNA, 77 bp, Homo sapiens
ctgtgctagctgcctgtagccactacttcaagaagcttttcactgagggcggtggcggagctgtcatgggggccggg

SEQ ID NO: 21732 - DNA, 72 bp, Homo sapiens
ctgtagccactacttcaagaagcttttcactgagggcggtggcggagctgtcatgggggccgggggtagcgg

SEQ ID NO: 21733 - DNA, 70 bp, Homo sapiens
actacttcaagaagcttttcactgagggcggtggcggagctgtcatgggggccgggggtagcgggacggc

SEQ ID NO: 21734 - DNA, 69 bp, Homo sapiens
aagaagcttttcactgagggcggtggcggagctgtcatgggggccgggggtagcgggacggccactggg

SEQ ID NO: 21735 - DNA, 73 bp, Homo sapiens
tggcggagctgtcatgggggccgggggtagcgggacggccactgggggagcaggggccggtgtgtgtgagctg

SEQ ID NO: 21736 - DNA, 74 bp, Homo sapiens
gtagcgggacggccactgggggagcaggggccggtgtgtgtgagctggactttgtagggccagaggcactaggc

SEQ ID NO: 21737 - DNA, 80 bp, Homo sapiens
tgtgtgtgagctggactttgtagggccagaggcactaggcgccctccttgaatttgcctatacagccacactgaccacca

SEQ ID NO: 21738 - DNA, 79 bp, Homo sapiens
tggactttgtagggccagaggcactaggcgccctccttgaatttgcctatacagccacactgaccaccagcagcgccaa

SEQ ID NO: 21739 - DNA, 81 bp, Homo sapiens
tttgtagggccagaggcactaggcgccctccttgaatttgcctatacagccacactgaccaccagcagcgccaacatgcca

SEQ ID NO: 21740 - DNA, 85 bp, Homo sapiens
ccctccttgaatttgcctatacagccacactgaccaccagcagcgccaacatgccagctgtgctccaggctgcccgcctgctgga

SEQ ID NO: 21741 - DNA, 86 bp, Homo sapiens
ttgaatttgcctatacagccacactgaccaccagcagcgccaacatgccagctgtgctccaggctgcccgcctgctggagatcccg

SEQ ID NO: 21742 - DNA, 90 bp, Homo sapiens
tatacagccacactgaccaccagcagcgccaacatgccagctgtgctccaggctgcccgcctgctggagatcccgtgtgtcatcgctgct

SEQ ID NO: 21743 - DNA, 94 bp, Homo sapiens
tgaccaccagcagcgccaacatgccagctgtgctccaggctgcccgcctgctggagatcccgtgtgtcatcgctgcttgcatggagattctgca

SEQ ID NO: 21744 - DNA, 91 bp, Homo sapiens
accagcagcgccaacatgccagctgtgctccaggctgcccgcctgctggagatcccgtgtgtcatcgctgcttgcatggagattctgcagg

SEQ ID NO: 21745 - DNA, 90 bp, Homo sapiens
atgccagctgtgctccaggctgcccgcctgctggagatcccgtgtgtcatcgctgcttgcatggagattctgcagggcagtgggctagaa

SEQ ID NO: 21746 - DNA, 89 bp, Homo sapiens
tgtgctccaggctgcccgcctgctggagatcccgtgtgtcatcgctgcttgcatggagattctgcagggcagtgggctagaagctccca

SEQ ID NO: 21747 - DNA, 84 bp, Homo sapiens
ctggagatcccgtgtgtcatcgctgcttgcatggagattctgcagggcagtgggctagaagctcccagcccggacgaggatgac

SEQ ID NO: 21748 - DNA, 85 bp, Homo sapiens
tcgctgcttgcatggagattctgcagggcagtgggctagaagctcccagcccggacgaggatgactgtgagcgagcccgccagta

SEQ ID NO: 21749 - DNA, 84 bp, Homo sapiens
ttgcatggagattctgcagggcagtgggctagaagctcccagcccggacgaggatgactgtgagcgagcccgccagtatctgga

SEQ ID NO: 21750 - DNA, 81 bp, Homo sapiens
tgcagggcagtgggctagaagctcccagcccggacgaggatgactgtgagcgagcccgccagtatctggaggcctttgcca

SEQ ID NO: 21751 - DNA, 79 bp, Homo sapiens
tagaagctcccagcccggacgaggatgactgtgagcgagcccgccagtatctggaggcctttgccacagccacggcctc

SEQ ID NO: 21752 - DNA, 78 bp, Homo sapiens
cggacgaggatgactgtgagcgagcccgccagtatctggaggcctttgccacagccacggcctctggagttcccaatg

SEQ ID NO: 21753 - DNA, 77 bp, Homo sapiens
agcgagcccgccagtatctggaggcctttgccacagccacggcctctggagttcccaatggtgaagacagtcctcca

SEQ ID NO: 21754 - DNA, 76 bp, Homo sapiens
ccagtatctggaggcctttgccacagccacggcctctggagttcccaatggtgaagacagtcctccacaggtgccc

SEQ ID NO: 21755 - DNA, 74 bp, Homo sapiens
aggcctttgccacagccacggcctctggagttcccaatggtgaagacagtcctccacaggtgcccctcccacca

SEQ ID NO: 21756 - DNA, 75 bp, Homo sapiens
ttgccacagccacggcctctggagttcccaatggtgaagacagtcctccacaggtgcccctcccaccacctccgc

SEQ ID NO: 21757 - DNA, 72 bp, Homo sapiens
acggcctctggagttcccaatggtgaagacagtcctccacaggtgcccctcccaccacctccgccaccgcca

SEQ ID NO: 21758 - DNA, 73 bp, Homo sapiens
ttcccaatggtgaagacagtcctccacaggtgcccctcccaccacctccgccaccgccacctcggcctgttgc

SEQ ID NO: 21759 - DNA, 72 bp, Homo sapiens
atggtgaagacagtcctccacaggtgcccctcccaccacctccgccaccgccacctcggcctgttgcccgcc

SEQ ID NO: 21760 - DNA, 73 bp, Homo sapiens
agtcctccacaggtgcccctcccaccacctccgccaccgccacctcggcctgttgcccgccgcagccgcaagc

SEQ ID NO: 21761 - DNA, 71 bp, Homo sapiens
tgcccctcccaccacctccgccaccgccacctcggcctgttgcccgccgcagccgcaagccccggaaagct

SEQ ID NO: 21762 - DNA, 71 bp, Homo sapiens
accacctccgccaccgccacctcggcctgttgcccgccgcagccgcaagccccggaaagctttcctgcaaa

SEQ ID NO: 21763 - DNA, 71 bp, Homo sapiens
tccgccaccgccacctcggcctgttgcccgccgcagccgcaagccccggaaagctttcctgcaaaccaagg

SEQ ID NO: 21764 - DNA, 72 bp, Homo sapiens
tcggcctgttgcccgccgcagccgcaagccccggaaagctttcctgcaaaccaagggggccagagcaaacca

SEQ ID NO: 21765 - DNA, 71 bp, Homo sapiens
ctgttgcccgccgcagccgcaagccccggaaagctttcctgcaaaccaagggggccagagcaaaccaccta

SEQ ID NO: 21766 - DNA, 70 bp, Homo sapiens
agccgcaagccccggaaagctttcctgcaaaccaagggggccagagcaaaccacctagtccctgaggtgc

SEQ ID NO: 21767 - DNA, 73 bp, Homo sapiens
ttcctgcaaaccaagggggccagagcaaaccacctagtccctgaggtgcccacagtgcccgcccatcccttga

SEQ ID NO: 21768 - DNA, 70 bp, Homo sapiens
aaaccaagggggccagagcaaaccacctagtccctgaggtgcccacagtgcccgcccatcccttgaccta

SEQ ID NO: 21769 - DNA, 74 bp, Homo sapiens
gggccagagcaaaccacctagtccctgaggtgcccacagtgcccgcccatcccttgacctatgaggaggaggag

SEQ ID NO: 21770 - DNA, 77 bp, Homo sapiens
agtccctgaggtgcccacagtgcccgcccatcccttgacctatgaggaggaggaggtggcgggcagagtgggcagca

SEQ ID NO: 21771 - DNA, 78 bp, Homo sapiens
tgcccacagtgcccgcccatcccttgacctatgaggaggaggaggtggcgggcagagtgggcagcagtgggggcagtg

SEQ ID NO: 21772 - DNA, 75 bp, Homo sapiens
tgcccgcccatcccttgacctatgaggaggaggaggtggcgggcagagtgggcagcagtgggggcagtgggccgg

SEQ ID NO: 21773 - DNA, 75 bp, Homo sapiens
ccttgacctatgaggaggaggaggtggcgggcagagtgggcagcagtgggggcagtgggccgggggacagctaca

SEQ ID NO: 21774 - DNA, 73 bp, Homo sapiens
aggaggtggcgggcagagtgggcagcagtgggggcagtgggccgggggacagctacagccctcccacaggaac

SEQ ID NO: 21775 - DNA, 74 bp, Homo sapiens
agagtgggcagcagtgggggcagtgggccgggggacagctacagccctcccacaggaactgcctcccctcctga

SEQ ID NO: 21776 - DNA, 71 bp, Homo sapiens
agcagtgggggcagtgggccgggggacagctacagccctcccacaggaactgcctcccctcctgagggtcc

SEQ ID NO: 21777 - DNA, 71 bp, Homo sapiens
agtgggccgggggacagctacagccctcccacaggaactgcctcccctcctgagggtccccagagctacga

SEQ ID NO: 21778 - DNA, 72 bp, Homo sapiens
gggacagctacagccctcccacaggaactgcctcccctcctgagggtccccagagctacgaaccctatgagg

SEQ ID NO: 21779 - DNA, 72 bp, Homo sapiens
tacagccctcccacaggaactgcctcccctcctgagggtccccagagctacgaaccctatgagggtgaggaa

SEQ ID NO: 21780 - DNA, 71 bp, Homo sapiens
ctcccacaggaactgcctcccctcctgagggtccccagagctacgaaccctatgagggtgaggaagaagaa

SEQ ID NO: 21781 - DNA, 72 bp, Homo sapiens
cctcccctcctgagggtccccagagctacgaaccctatgagggtgaggaagaagaagaggagctggtatatc

SEQ ID NO: 21782 - DNA, 74 bp, Homo sapiens
tgagggtccccagagctacgaaccctatgagggtgaggaagaagaagaggagctggtatatcccccagcctatg

SEQ ID NO: 21783 - DNA, 76 bp, Homo sapiens
cccagagctacgaaccctatgagggtgaggaagaagaagaggagctggtatatcccccagcctatgggctggcgca

SEQ ID NO: 21784 - DNA, 74 bp, Homo sapiens
ctacgaaccctatgagggtgaggaagaagaagaggagctggtatatcccccagcctatgggctggcgcagggtg

SEQ ID NO: 21785 - DNA, 74 bp, Homo sapiens
tatgagggtgaggaagaagaagaggagctggtatatcccccagcctatgggctggcgcagggtggcgggccccc

SEQ ID NO: 21786 - DNA, 74 bp, Homo sapiens
agaggagctggtatatcccccagcctatgggctggcgcagggtggcgggcccccgctgtccccagaggagctgg

SEQ ID NO: 21787 - DNA, 77 bp, Homo sapiens
gtatatcccccagcctatgggctggcgcagggtggcgggcccccgctgtccccagaggagctgggctcagatgagga

SEQ ID NO: 21788 - DNA, 82 bp, Homo sapiens
tatgggctggcgcagggtggcgggcccccgctgtccccagaggagctgggctcagatgaggatgccatcgatcctgacctga

SEQ ID NO: 21789 - DNA, 82 bp, Homo sapiens
tggcgcagggtggcgggcccccgctgtccccagaggagctgggctcagatgaggatgccatcgatcctgacctgatggccta

SEQ ID NO: 21790 - DNA, 81 bp, Homo sapiens
tggcgggcccccgctgtccccagaggagctgggctcagatgaggatgccatcgatcctgacctgatggcctacctaagctc

SEQ ID NO: 21791 - DNA, 83 bp, Homo sapiens
ctgtccccagaggagctgggctcagatgaggatgccatcgatcctgacctgatggcctacctaagctccctgcaccaggacaa

SEQ ID NO: 21792 - DNA, 83 bp, Homo sapiens
aggagctgggctcagatgaggatgccatcgatcctgacctgatggcctacctaagctccctgcaccaggacaacctggcacca

SEQ ID NO: 21793 - DNA, 83 bp, Homo sapiens
ctcagatgaggatgccatcgatcctgacctgatggcctacctaagctccctgcaccaggacaacctggcaccaggcctggaca

SEQ ID NO: 21794 - DNA, 82 bp, Homo sapiens
atgaggatgccatcgatcctgacctgatggcctacctaagctccctgcaccaggacaacctggcaccaggcctggacagcca

SEQ ID NO: 21795 - DNA, 79 bp, Homo sapiens
atcgatcctgacctgatggcctacctaagctccctgcaccaggacaacctggcaccaggcctggacagccaagacaagc

SEQ ID NO: 21796 - DNA, 79 bp, Homo sapiens
cctgatggcctacctaagctccctgcaccaggacaacctggcaccaggcctggacagccaagacaagctggtgcgcaaa

SEQ ID NO: 21797 - DNA, 78 bp, Homo sapiens
tacctaagctccctgcaccaggacaacctggcaccaggcctggacagccaagacaagctggtgcgcaaacgccgctcc

SEQ ID NO: 21798 - DNA, 81 bp, Homo sapiens
tccctgcaccaggacaacctggcaccaggcctggacagccaagacaagctggtgcgcaaacgccgctcccagatgcctcag

SEQ ID NO: 21799 - DNA, 80 bp, Homo sapiens
acaacctggcaccaggcctggacagccaagacaagctggtgcgcaaacgccgctcccagatgcctcaggagtgccctgtc

SEQ ID NO: 21800 - DNA, 83 bp, Homo sapiens
accaggcctggacagccaagacaagctggtgcgcaaacgccgctcccagatgcctcaggagtgccctgtctgccacaagatca

SEQ ID NO: 21801 - DNA, 83 bp, Homo sapiens
aagacaagctggtgcgcaaacgccgctcccagatgcctcaggagtgccctgtctgccacaagatcatccatggggcaggcaaa

SEQ ID NO: 21802 - DNA, 86 bp, Homo sapiens
gctcccagatgcctcaggagtgccctgtctgccacaagatcatccatggggcaggcaaactgcctcgccacatgaggacccacaca

SEQ ID NO: 21803 - DNA, 85 bp, Homo sapiens
agatgcctcaggagtgccctgtctgccacaagatcatccatggggcaggcaaactgcctcgccacatgaggacccacacaggcga

SEQ ID NO: 21804 - DNA, 83 bp, Homo sapiens
tgccctgtctgccacaagatcatccatggggcaggcaaactgcctcgccacatgaggacccacacaggcgagaagccctttgc

SEQ ID NO: 21805 - DNA, 84 bp, Homo sapiens
tgtctgccacaagatcatccatggggcaggcaaactgcctcgccacatgaggacccacacaggcgagaagccctttgcctgcga

SEQ ID NO: 21806 - DNA, 80 bp, Homo sapiens
gcaggcaaactgcctcgccacatgaggacccacacaggcgagaagccctttgcctgcgaggtctgcggtgttcgattcac

SEQ ID NO: 21807 - DNA, 77 bp, Homo sapiens
aaactgcctcgccacatgaggacccacacaggcgagaagccctttgcctgcgaggtctgcggtgttcgattcaccag

SEQ ID NO: 21808 - DNA, 78 bp, Homo sapiens
acatgaggacccacacaggcgagaagccctttgcctgcgaggtctgcggtgttcgattcaccaggtgagcagcaaggg

SEQ ID NO: 21809 - DNA, 75 bp, Homo sapiens
acccacacaggcgagaagccctttgcctgcgaggtctgcggtgttcgattcaccaggtgagcagcaaggggggaa

SEQ ID NO: 21810 - DNA, 79 bp, Homo sapiens
atcccatcctgaacacctccctgcccctcacccctgcctgtgccaggaacgacaagctgaagatccacatgcggaagca

SEQ ID NO: 21811 - DNA, 78 bp, Homo sapiens
ctccctgcccctcacccctgcctgtgccaggaacgacaagctgaagatccacatgcggaagcacacgggagagcgccc

SEQ ID NO: 21812 - DNA, 82 bp, Homo sapiens
tgtgccaggaacgacaagctgaagatccacatgcggaagcacacgggagagcgcccctactcatgcccgcactgcccagccc

SEQ ID NO: 21813 - DNA, 79 bp, Homo sapiens
aacgacaagctgaagatccacatgcggaagcacacgggagagcgcccctactcatgcccgcactgcccagcccgcttcc

SEQ ID NO: 21814 - DNA, 81 bp, Homo sapiens
aagatccacatgcggaagcacacgggagagcgcccctactcatgcccgcactgcccagcccgcttcctgcacagctacgac

SEQ ID NO: 21815 - DNA, 80 bp, Homo sapiens
atgcggaagcacacgggagagcgcccctactcatgcccgcactgcccagcccgcttcctgcacagctacgacctcaagaa

SEQ ID NO: 21816 - DNA, 82 bp, Homo sapiens
agcacacgggagagcgcccctactcatgcccgcactgcccagcccgcttcctgcacagctacgacctcaagaaccacatgca

SEQ ID NO: 21817 - DNA, 83 bp, Homo sapiens
agagcgcccctactcatgcccgcactgcccagcccgcttcctgcacagctacgacctcaagaaccacatgcacctgcacacag

SEQ ID NO: 21818 - DNA, 82 bp, Homo sapiens
tactcatgcccgcactgcccagcccgcttcctgcacagctacgacctcaagaaccacatgcacctgcacacaggggaccggc

SEQ ID NO: 21819 - DNA, 80 bp, Homo sapiens
actgcccagcccgcttcctgcacagctacgacctcaagaaccacatgcacctgcacacaggggaccggccctatgagtgc

SEQ ID NO: 21820 - DNA, 82 bp, Homo sapiens
gcttcctgcacagctacgacctcaagaaccacatgcacctgcacacaggggaccggccctatgagtgccacctgtgccacaa

SEQ ID NO: 21821 - DNA, 78 bp, Homo sapiens
acagctacgacctcaagaaccacatgcacctgcacacaggggaccggccctatgagtgccacctgtgccacaaggctt

SEQ ID NO: 21822 - DNA, 77 bp, Homo sapiens
acctcaagaaccacatgcacctgcacacaggggaccggccctatgagtgccacctgtgccacaaggctttcgccaag

SEQ ID NO: 21823 - DNA, 77 bp, Homo sapiens
aaccacatgcacctgcacacaggggaccggccctatgagtgccacctgtgccacaaggctttcgccaaggaggacca

SEQ ID NO: 21824 - DNA, 77 bp, Homo sapiens
acctgcacacaggggaccggccctatgagtgccacctgtgccacaaggctttcgccaaggaggaccacctgcagcgc

SEQ ID NO: 21825 - DNA, 75 bp, Homo sapiens
gggaccggccctatgagtgccacctgtgccacaaggctttcgccaaggaggaccacctgcagcgccacctcaaag

SEQ ID NO: 21826 - DNA, 78 bp, Homo sapiens
ccctatgagtgccacctgtgccacaaggctttcgccaaggaggaccacctgcagcgccacctcaaaggccagaactgc

SEQ ID NO: 21827 - DNA, 78 bp, Homo sapiens
acctgtgccacaaggctttcgccaaggaggaccacctgcagcgccacctcaaaggccagaactgcctggaggtgcgca

SEQ ID NO: 21828 - DNA, 75 bp, Homo sapiens
acaaggctttcgccaaggaggaccacctgcagcgccacctcaaaggccagaactgcctggaggtgcgcacccgac

SEQ ID NO: 21829 - DNA, 77 bp, Homo sapiens
ttcgccaaggaggaccacctgcagcgccacctcaaaggccagaactgcctggaggtgcgcacccgacggcgccgcaa

SEQ ID NO: 21830 - DNA, 78 bp, Homo sapiens
accacctgcagcgccacctcaaaggccagaactgcctggaggtgcgcacccgacggcgccgcaaggacgatgcaccac

SEQ ID NO: 21831 - DNA, 76 bp, Homo sapiens
agcgccacctcaaaggccagaactgcctggaggtgcgcacccgacggcgccgcaaggacgatgcaccaccccacta

SEQ ID NO: 21832 - DNA, 73 bp, Homo sapiens
aaaggccagaactgcctggaggtgcgcacccgacggcgccgcaaggacgatgcaccaccccactacccaccac

SEQ ID NO: 21833 - DNA, 73 bp, Homo sapiens
agaactgcctggaggtgcgcacccgacggcgccgcaaggacgatgcaccaccccactacccaccaccctctac

SEQ ID NO: 21834 - DNA, 75 bp, Homo sapiens
caaggacgatgcaccaccccactacccaccaccctctaccgctgctgcatcccccgctggcctcgacctctccaa

SEQ ID NO: 21835 - DNA, 74 bp, Homo sapiens
actacccaccaccctctaccgctgctgcatcccccgctggcctcgacctctccaatggccacctggacaccttc

SEQ ID NO: 21836 - DNA, 76 bp, Homo sapiens
accctctaccgctgctgcatcccccgctggcctcgacctctccaatggccacctggacaccttccgcctctctcta

SEQ ID NO: 21837 - DNA, 77 bp, Homo sapiens
cctcgacctctccaatggccacctggacaccttccgcctctctctagctcgattctgggagcagtcagcccccactg

SEQ ID NO: 21838 - DNA, 76 bp, Homo sapiens
acctctccaatggccacctggacaccttccgcctctctctagctcgattctgggagcagtcagcccccactgggcc

SEQ ID NO: 21839 - DNA, 73 bp, Homo sapiens
acctggacaccttccgcctctctctagctcgattctgggagcagtcagcccccactgggcccccggtctctac

SEQ ID NO: 21840 - DNA, 72 bp, Homo sapiens
acaccttccgcctctctctagctcgattctgggagcagtcagcccccactgggcccccggtctctaccccag

SEQ ID NO: 21841 - DNA, 74 bp, Homo sapiens
ctctctctagctcgattctgggagcagtcagcccccactgggcccccggtctctaccccagggccccctgatga

SEQ ID NO: 21842 - DNA, 71 bp, Homo sapiens
tgggagcagtcagcccccactgggcccccggtctctaccccagggccccctgatgacgatgaggaggaagg

SEQ ID NO: 21843 - DNA, 69 bp, Homo sapiens
cccactgggcccccggtctctaccccagggccccctgatgacgatgaggaggaaggggcacccaccaca

SEQ ID NO: 21844 - DNA, 70 bp, Homo sapiens
ccccggtctctaccccagggccccctgatgacgatgaggaggaaggggcacccaccacaccccaggctga

SEQ ID NO: 21845 - DNA, 73 bp, Homo sapiens
ccccctgatgacgatgaggaggaaggggcacccaccacaccccaggctgaaggtgccatggagtcctcttaaa

SEQ ID NO: 21846 - DNA, 71 bp, Homo sapiens
aggaaggggcacccaccacaccccaggctgaaggtgccatggagtcctcttaaagagggacgagggccaga

SEQ ID NO: 21847 - DNA, 75 bp, Homo sapiens
acccaccacaccccaggctgaaggtgccatggagtcctcttaaagagggacgagggccagactgaagcagcacaa

SEQ ID NO: 21848 - DNA, 75 bp, Homo sapiens
cccaggctgaaggtgccatggagtcctcttaaagagggacgagggccagactgaagcagcacaaggccggggaca

SEQ ID NO: 21849 - DNA, 75 bp, Homo sapiens
aggtgccatggagtcctcttaaagagggacgagggccagactgaagcagcacaaggccggggacacccatgccaa

SEQ ID NO: 21850 - DNA, 75 bp, Homo sapiens
atggagtcctcttaaagagggacgagggccagactgaagcagcacaaggccggggacacccatgccaagcagtgg

SEQ ID NO: 21851 - DNA, 78 bp, Homo sapiens
tcttaaagagggacgagggccagactgaagcagcacaaggccggggacacccatgccaagcagtgggagcacgcagga

SEQ ID NO: 21852 - DNA, 80 bp, Homo sapiens
acgagggccagactgaagcagcacaaggccggggacacccatgccaagcagtgggagcacgcaggacagacacagcaggg

SEQ ID NO: 21853 - DNA, 80 bp, Homo sapiens
ccagactgaagcagcacaaggccggggacacccatgccaagcagtgggagcacgcaggacagacacagcaggggtctggg

SEQ ID NO: 21854 - DNA, 76 bp, Homo sapiens
acaaggccggggacacccatgccaagcagtgggagcacgcaggacagacacagcaggggtctggggcacggagcct

SEQ ID NO: 21855 - DNA, 85 bp, Homo sapiens
atgccaagcagtgggagcacgcaggacagacacagcaggggtctggggcacggagccttgctggcatcagcatcagcccttcctc

SEQ ID NO: 21856 - DNA, 83 bp, Homo sapiens
agtgggagcacgcaggacagacacagcaggggtctggggcacggagccttgctggcatcagcatcagcccttcctcccagagc

SEQ ID NO: 21857 - DNA, 81 bp, Homo sapiens
aggacagacacagcaggggtctggggcacggagccttgctggcatcagcatcagcccttcctcccagagccctcattccaa

SEQ ID NO: 21858 - DNA, 80 bp, Homo sapiens
acacagcaggggtctggggcacggagccttgctggcatcagcatcagcccttcctcccagagccctcattccaattccaa

SEQ ID NO: 21859 - DNA, 80 bp, Homo sapiens
tctggggcacggagccttgctggcatcagcatcagcccttcctcccagagccctcattccaattccaagctaagaaggta

SEQ ID NO: 21860 - DNA, 77 bp, Homo sapiens
acggagccttgctggcatcagcatcagcccttcctcccagagccctcattccaattccaagctaagaaggtattggg

SEQ ID NO: 21861 - DNA, 80 bp, Homo sapiens
ttgctggcatcagcatcagcccttcctcccagagccctcattccaattccaagctaagaaggtattggggcagaggctcc

SEQ ID NO: 21862 - DNA, 72 bp, Homo sapiens
atcagcccttcctcccagagccctcattccaattccaagctaagaaggtattggggcagaggctccccaaat

SEQ ID NO: 21863 - DNA, 70 bp, Homo sapiens
ccttcctcccagagccctcattccaattccaagctaagaaggtattggggcagaggctccccaaattggg

SEQ ID NO: 21864 - DNA, 70 bp, Homo sapiens
cctcattccaattccaagctaagaaggtattggggcagaggctccccaaattggggtgatcccccaagga

SEQ ID NO: 21865 - DNA, 72 bp, Homo sapiens
attccaagctaagaaggtattggggcagaggctccccaaattggggtgatcccccaaggagtgatacatata

SEQ ID NO: 21866 - DNA, 72 bp, Homo sapiens
aagctaagaaggtattggggcagaggctccccaaattggggtgatcccccaaggagtgatacatatattgtg

SEQ ID NO: 21867 - DNA, 74 bp, Homo sapiens
aggctccccaaattggggtgatcccccaaggagtgatacatatattgtgtatatatttacagctgtattgtaaa

SEQ ID NO: 21868 - DNA, 74 bp, Homo sapiens
gtgatcccccaaggagtgatacatatattgtgtatatatttacagctgtattgtaaaagtggggtccctgtccc

SEQ ID NO: 21869 - DNA, 75 bp, Homo sapiens
tattgtgtatatatttacagctgtattgtaaaagtggggtccctgtccccagctgctcctggggagtagaagcaa

SEQ ID NO: 21870 - DNA, 71 bp, Homo sapiens
ctgtattgtaaaagtggggtccctgtccccagctgctcctggggagtagaagcaataatgtatttctaatt

SEQ ID NO: 21871 - DNA, 71 bp, Homo sapiens
ttgtaaaagtggggtccctgtccccagctgctcctggggagtagaagcaataatgtatttctaatttgtgg

SEQ ID NO: 21872 - DNA, 75 bp, Homo sapiens
tccctgtccccagctgctcctggggagtagaagcaataatgtatttctaatttgtgggtcccacttcggctatgc

SEQ ID NO: 21873 - DNA, 70 bp, Homo sapiens
tcctggggagtagaagcaataatgtatttctaatttgtgggtcccacttcggctatgcgggtttctaggg

SEQ ID NO: 21874 - DNA, 68 bp, Homo sapiens
gtagaagcaataatgtatttctaatttgtgggtcccacttcggctatgcgggtttctagggggtgggg

SEQ ID NO: 21875 - DNA, 66 bp, Homo sapiens
tatttctaatttgtgggtcccacttcggctatgcgggtttctagggggtgggggcttgggaccaaa

SEQ ID NO: 21876 - DNA, 65 bp, Homo sapiens
ggtcccacttcggctatgcgggtttctagggggtgggggcttgggaccaaagccttgccccgccc

SEQ ID NO: 21877 - DNA, 65 bp, Homo sapiens
ctatgcgggtttctagggggtgggggcttgggaccaaagccttgccccgcccctatgccccttgg

SEQ ID NO: 21878 - DNA, 62 bp, Homo sapiens
tttctagggggtgggggcttgggaccaaagccttgccccgcccctatgccccttgggggttt

SEQ ID NO: 21879 - DNA, 65 bp, Homo sapiens
ttgccccgcccctatgccccttgggggttttggctgtgtaagggggtgaaggactgcccctccct

SEQ ID NO: 21880 - DNA, 66 bp, Homo sapiens
ttttggctgtgtaagggggtgaaggactgcccctccctttcgagacccctccttcctggtttctgt

SEQ ID NO: 21881 - DNA, 64 bp, Homo sapiens
tgtaagggggtgaaggactgcccctccctttcgagacccctccttcctggtttctgttcctttt

SEQ ID NO: 21882 - DNA, 70 bp, Homo sapiens
gactgcccctccctttcgagacccctccttcctggtttctgttcctttttcctggcagtgaattatgcaa

SEQ ID NO: 21883 - DNA, 67 bp, Homo sapiens
ccctccctttcgagacccctccttcctggtttctgttcctttttcctggcagtgaattatgcaaagg

SEQ ID NO: 21884 - DNA, 67 bp, Homo sapiens
acccctccttcctggtttctgttcctttttcctggcagtgaattatgcaaagggggccggcaaagga

SEQ ID NO: 21885 - DNA, 67 bp, Homo sapiens
ttcctggtttctgttcctttttcctggcagtgaattatgcaaagggggccggcaaaggaagggtagg

SEQ ID NO: 21886 - DNA, 66 bp, Homo sapiens
ctgttcctttttcctggcagtgaattatgcaaagggggccggcaaaggaagggtaggtgggggaaa

SEQ ID NO: 21887 - DNA, 67 bp, Homo sapiens
tttttcctggcagtgaattatgcaaagggggccggcaaaggaagggtaggtgggggaaagccaggtg

SEQ ID NO: 21888 - DNA, 67 bp, Homo sapiens
agtgaattatgcaaagggggccggcaaaggaagggtaggtgggggaaagccaggtggaagcttgaaa

SEQ ID NO: 21889 - DNA, 63 bp, Homo sapiens
aaagggggccggcaaaggaagggtaggtgggggaaagccaggtggaagcttgaaagactgggg

SEQ ID NO: 21890 - DNA, 66 bp, Homo sapiens
caaaggaagggtaggtgggggaaagccaggtggaagcttgaaagactgggggactgggcctgtaag

SEQ ID NO: 21891 - DNA, 66 bp, Homo sapiens
aagggtaggtgggggaaagccaggtggaagcttgaaagactgggggactgggcctgtaaggaagga

SEQ ID NO: 21892 - DNA, 69 bp, Homo sapiens
ggggaaagccaggtggaagcttgaaagactgggggactgggcctgtaaggaaggagccatcccagtccc

SEQ ID NO: 21893 - DNA, 68 bp, Homo sapiens
aggtggaagcttgaaagactgggggactgggcctgtaaggaaggagccatcccagtccccctccgccc

SEQ ID NO: 21894 - DNA, 72 bp, Homo sapiens
gggactgggcctgtaaggaaggagccatcccagtccccctccgccctgctcccggcgctgagtcatggggtc

SEQ ID NO: 21895 - DNA, 72 bp, Homo sapiens
tgtaaggaaggagccatcccagtccccctccgccctgctcccggcgctgagtcatggggtcgtggagaaggg

SEQ ID NO: 21896 - DNA, 70 bp, Homo sapiens
aaggagccatcccagtccccctccgccctgctcccggcgctgagtcatggggtcgtggagaagggggcgg

SEQ ID NO: 21897 - DNA, 70 bp, Homo sapiens
agtccccctccgccctgctcccggcgctgagtcatggggtcgtggagaagggggcggggtggcctgattg

SEQ ID NO: 21898 - DNA, 74 bp, Homo sapiens
tccgccctgctcccggcgctgagtcatggggtcgtggagaagggggcggggtggcctgattggctcgcctgccc

SEQ ID NO: 21899 - DNA, 73 bp, Homo sapiens
tgctcccggcgctgagtcatggggtcgtggagaagggggcggggtggcctgattggctcgcctgcccctgggg

SEQ ID NO: 21900 - DNA, 72 bp, Homo sapiens
ctgagtcatggggtcgtggagaagggggcggggtggcctgattggctcgcctgcccctgggggcagtagagg

SEQ ID NO: 21901 - DNA, 70 bp, Homo sapiens
tcgtggagaagggggcggggtggcctgattggctcgcctgcccctgggggcagtagaggggccccgccca

SEQ ID NO: 21902 - DNA, 69 bp, Homo sapiens
agaagggggcggggtggcctgattggctcgcctgcccctgggggcagtagaggggccccgcccagctag

SEQ ID NO: 21903 - DNA, 73 bp, Homo sapiens
tggcctgattggctcgcctgcccctgggggcagtagaggggccccgcccagctaggggagccgctccgttcca

SEQ ID NO: 21904 - DNA, 70 bp, Homo sapiens
attggctcgcctgcccctgggggcagtagaggggccccgcccagctaggggagccgctccgttccactcc

SEQ ID NO: 21905 - DNA, 67 bp, Homo sapiens
ccctgggggcagtagaggggccccgcccagctaggggagccgctccgttccactcccctccctagcc

SEQ ID NO: 21906 - DNA, 66 bp, Homo sapiens
agtagaggggccccgcccagctaggggagccgctccgttccactcccctccctagccctccctccc

SEQ ID NO: 21907 - DNA, 66 bp, Homo sapiens
ccccgcccagctaggggagccgctccgttccactcccctccctagccctccctccccacggccctg

SEQ ID NO: 21908 - DNA, 67 bp, Homo sapiens
agctaggggagccgctccgttccactcccctccctagccctccctccccacggccctgggcagggaa

SEQ ID NO: 21909 - DNA, 68 bp, Homo sapiens
agccgctccgttccactcccctccctagccctccctccccacggccctgggcagggaatgtcttgttc

SEQ ID NO: 21910 - DNA, 68 bp, Homo sapiens
ttccactcccctccctagccctccctccccacggccctgggcagggaatgtcttgttcccgccgctcc

SEQ ID NO: 21911 - DNA, 66 bp, Homo sapiens
tccctagccctccctccccacggccctgggcagggaatgtcttgttcccgccgctccctccccggg

SEQ ID NO: 21912 - DNA, 68 bp, Homo sapiens
ctccctccccacggccctgggcagggaatgtcttgttcccgccgctccctccccggggccagagggca

SEQ ID NO: 21913 - DNA, 67 bp, Homo sapiens
acggccctgggcagggaatgtcttgttcccgccgctccctccccggggccagagggcagggcgggcc

SEQ ID NO: 21914 - DNA, 67 bp, Homo sapiens
gggaatgtcttgttcccgccgctccctccccggggccagagggcagggcgggccgggcggcgtccta

SEQ ID NO: 21915 - DNA, 66 bp, Homo sapiens
ccgccgctccctccccggggccagagggcagggcgggccgggcggcgtcctaccctcttctcctcc

SEQ ID NO: 21916 - DNA, 72 bp, Homo sapiens
cgtcctaccctcttctcctcctccccatctcctccccgcccaggtgcgagccggagccgccgccaccgctgc

SEQ ID NO: 21917 - DNA, 72 bp, Homo sapiens
taccctcttctcctcctccccatctcctccccgcccaggtgcgagccggagccgccgccaccgctgccgccc

SEQ ID NO: 21918 - DNA, 73 bp, Homo sapiens
ctccccatctcctccccgcccaggtgcgagccggagccgccgccaccgctgccgcccctgactcacgccgccc

SEQ ID NO: 21919 - DNA, 71 bp, Homo sapiens
atctcctccccgcccaggtgcgagccggagccgccgccaccgctgccgcccctgactcacgccgcccccgg

SEQ ID NO: 21920 - DNA, 74 bp, Homo sapiens
ccaggtgcgagccggagccgccgccaccgctgccgcccctgactcacgccgcccccgggctggcgcagcgaagg

SEQ ID NO: 21921 - DNA, 71 bp, Homo sapiens
cgccaccgctgccgcccctgactcacgccgcccccgggctggcgcagcgaagggtgtgggacagggtaagg

SEQ ID NO: 21922 - DNA, 70 bp, Homo sapiens
tgccgcccctgactcacgccgcccccgggctggcgcagcgaagggtgtgggacagggtaaggggttggaa

SEQ ID NO: 21923 - DNA, 70 bp, Homo sapiens
ctgactcacgccgcccccgggctggcgcagcgaagggtgtgggacagggtaaggggttggaagagccttg

SEQ ID NO: 21924 - DNA, 69 bp, Homo sapiens
cccccgggctggcgcagcgaagggtgtgggacagggtaaggggttggaagagccttgtggagagcgggc

SEQ ID NO: 21925 - DNA, 74 bp, Homo sapiens
tggcgcagcgaagggtgtgggacagggtaaggggttggaagagccttgtggagagcgggcgagccggcgccatc

SEQ ID NO: 21926 - DNA, 72 bp, Homo sapiens
agcgaagggtgtgggacagggtaaggggttggaagagccttgtggagagcgggcgagccggcgccatctggc

SEQ ID NO: 21927 - DNA, 76 bp, Homo sapiens
acagggtaaggggttggaagagccttgtggagagcgggcgagccggcgccatctggcggccatgctctgagtgggc

SEQ ID NO: 21928 - DNA, 79 bp, Homo sapiens
agccttgtggagagcgggcgagccggcgccatctggcggccatgctctgagtgggcgagcgccccccgcggccactgga

SEQ ID NO: 21929 - DNA, 80 bp, Homo sapiens
agagcgggcgagccggcgccatctggcggccatgctctgagtgggcgagcgccccccgcggccactggagcgagctgtct

SEQ ID NO: 21930 - DNA, 82 bp, Homo sapiens
agccggcgccatctggcggccatgctctgagtgggcgagcgccccccgcggccactggagcgagctgtcttcacgctcctca

SEQ ID NO: 21931 - DNA, 81 bp, Homo sapiens
ccatctggcggccatgctctgagtgggcgagcgccccccgcggccactggagcgagctgtcttcacgctcctcatccaccc

SEQ ID NO: 21932 - DNA, 80 bp, Homo sapiens
cggccatgctctgagtgggcgagcgccccccgcggccactggagcgagctgtcttcacgctcctcatccaccccagctgg

SEQ ID NO: 21933 - DNA, 79 bp, Homo sapiens
tgtcttcacgctcctcatccaccccagctggtgagcggcgcccccttgccaaggcagtgggcacagaacttctcgcttg

SEQ ID NO: 21934 - DNA, 77 bp, Homo sapiens
tcctcatccaccccagctggtgagcggcgcccccttgccaaggcagtgggcacagaacttctcgcttggccgcaggg

SEQ ID NO: 21935 - DNA, 73 bp, Homo sapiens
accccagctggtgagcggcgcccccttgccaaggcagtgggcacagaacttctcgcttggccgcaggggaagg

SEQ ID NO: 21936 - DNA, 75 bp, Homo sapiens
tgagcggcgcccccttgccaaggcagtgggcacagaacttctcgcttggccgcaggggaaggggctgcggacctg

SEQ ID NO: 21937 - DNA, 75 bp, Homo sapiens
cttgccaaggcagtgggcacagaacttctcgcttggccgcaggggaaggggctgcggacctgtgggaaagtgatc

SEQ ID NO: 21938 - DNA, 71 bp, Homo sapiens
agtgggcacagaacttctcgcttggccgcaggggaaggggctgcggacctgtgggaaagtgatccccttcc

SEQ ID NO: 21939 - DNA, 70 bp, Homo sapiens
agaacttctcgcttggccgcaggggaaggggctgcggacctgtgggaaagtgatccccttcccagatcct

SEQ ID NO: 21940 - DNA, 73 bp, Homo sapiens
tctcgcttggccgcaggggaaggggctgcggacctgtgggaaagtgatccccttcccagatccttgccagccg

SEQ ID NO: 21941 - DNA, 71 bp, Homo sapiens
aggggaaggggctgcggacctgtgggaaagtgatccccttcccagatccttgccagccgggcttcctgtca

SEQ ID NO: 21942 - DNA, 74 bp, Homo sapiens
ctgcggacctgtgggaaagtgatccccttcccagatccttgccagccgggcttcctgtcaggcaggggagaata

SEQ ID NO: 21943 - DNA, 72 bp, Homo sapiens
acctgtgggaaagtgatccccttcccagatccttgccagccgggcttcctgtcaggcaggggagaataatcc

SEQ ID NO: 21944 - DNA, 77 bp, Homo sapiens
ttcccagatccttgccagccgggcttcctgtcaggcaggggagaataatccccactctgctcttaggattgaatcca

SEQ ID NO: 21945 - DNA, 75 bp, Homo sapiens
ttgccagccgggcttcctgtcaggcaggggagaataatccccactctgctcttaggattgaatccacccccattc

SEQ ID NO: 21946 - DNA, 76 bp, Homo sapiens
cttcctgtcaggcaggggagaataatccccactctgctcttaggattgaatccacccccattctgtacatagcctc

SEQ ID NO: 21947 - DNA, 75 bp, Homo sapiens
aggcaggggagaataatccccactctgctcttaggattgaatccacccccattctgtacatagcctcttctgttg

SEQ ID NO: 21948 - DNA, 73 bp, Homo sapiens
ttgaatccacccccattctgtacatagcctcttctgttggtcttgttgaaatctagtttcagatttttaacta

SEQ ID NO: 21949 - DNA, 73 bp, Homo sapiens
attctgtacatagcctcttctgttggtcttgttgaaatctagtttcagatttttaactacccaattctgctgg

SEQ ID NO: 21950 - DNA, 72 bp, Homo sapiens
tacatagcctcttctgttggtcttgttgaaatctagtttcagatttttaactacccaattctgctgggggtg

SEQ ID NO: 21951 - DNA, 65 bp, Homo sapiens
ttgttgaaatctagtttcagatttttaactacccaattctgctgggggtgggggacaccccccct

SEQ ID NO: 21952 - DNA, 66 bp, Homo sapiens
atctagtttcagatttttaactacccaattctgctgggggtgggggacacccccccttcctcgctg

SEQ ID NO: 21953 - DNA, 66 bp, Homo sapiens
agatttttaactacccaattctgctgggggtgggggacacccccccttcctcgctgggtgctggac

SEQ ID NO: 21954 - DNA, 68 bp, Homo sapiens
tacccaattctgctgggggtgggggacacccccccttcctcgctgggtgctggaccccttttgcagcc

SEQ ID NO: 21955 - DNA, 70 bp, Homo sapiens
gggggtgggggacacccccccttcctcgctgggtgctggaccccttttgcagcctgggctctgccttgca

SEQ ID NO: 21956 - DNA, 71 bp, Homo sapiens
gggacacccccccttcctcgctgggtgctggaccccttttgcagcctgggctctgccttgcactatttccc

SEQ ID NO: 21957 - DNA, 74 bp, Homo sapiens
cccttcctcgctgggtgctggaccccttttgcagcctgggctctgccttgcactatttccccttcctggcctga

SEQ ID NO: 21958 - DNA, 74 bp, Homo sapiens
tgggtgctggaccccttttgcagcctgggctctgccttgcactatttccccttcctggcctgacggctcctccc

SEQ ID NO: 21959 - DNA, 70 bp, Homo sapiens
accccttttgcagcctgggctctgccttgcactatttccccttcctggcctgacggctcctccccctcct

SEQ ID NO: 21960 - DNA, 71 bp, Homo sapiens
tttgcagcctgggctctgccttgcactatttccccttcctggcctgacggctcctccccctccttaaaagg

SEQ ID NO: 21961 - DNA, 69 bp, Homo sapiens
ctctgccttgcactatttccccttcctggcctgacggctcctccccctccttaaaaggggcaggttcag

SEQ ID NO: 21962 - DNA, 67 bp, Homo sapiens
ttgcactatttccccttcctggcctgacggctcctccccctccttaaaaggggcaggttcaggggcc

SEQ ID NO: 21963 - DNA, 67 bp, Homo sapiens
cttcctggcctgacggctcctccccctccttaaaaggggcaggttcaggggcccggtgctcttcctc

SEQ ID NO: 21964 - DNA, 66 bp, Homo sapiens
ctcctccccctccttaaaaggggcaggttcaggggcccggtgctcttcctcccttccatgcacccc

SEQ ID NO: 21965 - DNA, 72 bp, Homo sapiens
tccttaaaaggggcaggttcaggggcccggtgctcttcctcccttccatgcacccccatgcccatttgcaca

SEQ ID NO: 21966 - DNA, 73 bp, Homo sapiens
aggttcaggggcccggtgctcttcctcccttccatgcacccccatgcccatttgcacagctgcccaggtaccc

SEQ ID NO: 21967 - DNA, 73 bp, Homo sapiens
cccggtgctcttcctcccttccatgcacccccatgcccatttgcacagctgcccaggtacccctaacagtggg

SEQ ID NO: 21968 - DNA, 74 bp, Homo sapiens
ttcctcccttccatgcacccccatgcccatttgcacagctgcccaggtacccctaacagtggggaggggtcaca

SEQ ID NO: 21969 - DNA, 73 bp, Homo sapiens
cccttccatgcacccccatgcccatttgcacagctgcccaggtacccctaacagtggggaggggtcacaggga

SEQ ID NO: 21970 - DNA, 71 bp, Homo sapiens
ccatgcccatttgcacagctgcccaggtacccctaacagtggggaggggtcacagggagggggtagcggga

SEQ ID NO: 21971 - DNA, 69 bp, Homo sapiens
atttgcacagctgcccaggtacccctaacagtggggaggggtcacagggagggggtagcgggaccagtc

SEQ ID NO: 21972 - DNA, 67 bp, Homo sapiens
tgcccaggtacccctaacagtggggaggggtcacagggagggggtagcgggaccagtccctgttatc

SEQ ID NO: 21973 - DNA, 65 bp, Homo sapiens
ccctaacagtggggaggggtcacagggagggggtagcgggaccagtccctgttatctatttaaaa

SEQ ID NO: 21974 - DNA, 69 bp, Homo sapiens
tggggaggggtcacagggagggggtagcgggaccagtccctgttatctatttaaaaagtgatgatgtaa

SEQ ID NO: 21975 - DNA, 70 bp, Homo sapiens
ggtcacagggagggggtagcgggaccagtccctgttatctatttaaaaagtgatgatgtaatatattggg

SEQ ID NO: 21976 - DNA, 71 bp, Homo sapiens
gggtagcgggaccagtccctgttatctatttaaaaagtgatgatgtaatatattggggtggcggggagatc

SEQ ID NO: 21977 - DNA, 70 bp, Homo sapiens
accagtccctgttatctatttaaaaagtgatgatgtaatatattggggtggcggggagatcgggttgtcc

SEQ ID NO: 21978 - DNA, 73 bp, Homo sapiens
tgttatctatttaaaaagtgatgatgtaatatattggggtggcggggagatcgggttgtcctgggcctcatct

SEQ ID NO: 21979 - DNA, 72 bp, Homo sapiens
atttaaaaagtgatgatgtaatatattggggtggcggggagatcgggttgtcctgggcctcatcttagcatt

SEQ ID NO: 21980 - DNA, 76 bp, Homo sapiens
agtgatgatgtaatatattggggtggcggggagatcgggttgtcctgggcctcatcttagcatttcaggtgatggg

SEQ ID NO: 21981 - DNA, 73 bp, Homo sapiens
taatatattggggtggcggggagatcgggttgtcctgggcctcatcttagcatttcaggtgatggggggagcc

SEQ ID NO: 21982 - DNA, 72 bp, Homo sapiens
gggtggcggggagatcgggttgtcctgggcctcatcttagcatttcaggtgatggggggagcccagggctgg

SEQ ID NO: 21983 - DNA, 72 bp, Homo sapiens
agatcgggttgtcctgggcctcatcttagcatttcaggtgatggggggagcccagggctggggagacctggg

SEQ ID NO: 21984 - DNA, 70 bp, Homo sapiens
atcttagcatttcaggtgatggggggagcccagggctggggagacctggggcccagccccagaaagtggg

SEQ ID NO: 21985 - DNA, 69 bp, Homo sapiens
atttcaggtgatggggggagcccagggctggggagacctggggcccagccccagaaagtggggacaatg

SEQ ID NO: 21986 - DNA, 69 bp, Homo sapiens
ggggagcccagggctggggagacctggggcccagccccagaaagtggggacaatgtggcctcccttctc

SEQ ID NO: 21987 - DNA, 67 bp, Homo sapiens
agggctggggagacctggggcccagccccagaaagtggggacaatgtggcctcccttctccctactt

SEQ ID NO: 21988 - DNA, 67 bp, Homo sapiens
agacctggggcccagccccagaaagtggggacaatgtggcctcccttctccctactttcggctttcc

SEQ ID NO: 21989 - DNA, 70 bp, Homo sapiens
ccagccccagaaagtggggacaatgtggcctcccttctccctactttcggctttcccagtcagtgcctta

SEQ ID NO: 21990 - DNA, 68 bp, Homo sapiens
cccagaaagtggggacaatgtggcctcccttctccctactttcggctttcccagtcagtgccttaggg

SEQ ID NO: 21991 - DNA, 70 bp, Homo sapiens
gggacaatgtggcctcccttctccctactttcggctttcccagtcagtgccttagggggagaggcactcc

SEQ ID NO: 21992 - DNA, 67 bp, Homo sapiens
tcccttctccctactttcggctttcccagtcagtgccttagggggagaggcactccccccctcctat

SEQ ID NO: 21993 - DNA, 67 bp, Homo sapiens
tctccctactttcggctttcccagtcagtgccttagggggagaggcactccccccctcctattccct

SEQ ID NO: 21994 - DNA, 66 bp, Homo sapiens
ttcggctttcccagtcagtgccttagggggagaggcactccccccctcctattcccttccccccac

SEQ ID NO: 21995 - DNA, 64 bp, Homo sapiens
agtcagtgccttagggggagaggcactccccccctcctattcccttccccccaccccaactccc

SEQ ID NO: 21996 - DNA, 62 bp, Homo sapiens
ttagggggagaggcactccccccctcctattcccttccccccaccccaactcccccacctcg

SEQ ID NO: 21997 - DNA, 65 bp, Homo sapiens
ctcctattcccttccccccaccccaactcccccacctcgggtgtaagcgacaggaagaaataata

SEQ ID NO: 21998 - DNA, 64 bp, Homo sapiens
attcccttccccccaccccaactcccccacctcgggtgtaagcgacaggaagaaataataataa

SEQ ID NO: 21999 - DNA, 71 bp, Homo sapiens
ctccctgtgtcctactcaccaggaaaataagtgtgttcatatcccacctaatttacaacagaagataaccc

SEQ ID NO: 22000 - DNA, 73 bp, Homo sapiens
tgtcctactcaccaggaaaataagtgtgttcatatcccacctaatttacaacagaagataaccccatcccatc

SEQ ID NO: 22001 - DNA, 70 bp, Homo sapiens
ggaaaataagtgtgttcatatcccacctaatttacaacagaagataaccccatcccatccccaaaacata

SEQ ID NO: 22002 - DNA, 69 bp, Homo sapiens
ataagtgtgttcatatcccacctaatttacaacagaagataaccccatcccatccccaaaacataaaaa

SEQ ID NO: 22003 - DNA, 70 bp, Homo sapiens
atatcccacctaatttacaacagaagataaccccatcccatccccaaaacataaaaatacaagtctatgc

SEQ ID NO: 22004 - DNA, 71 bp, Homo sapiens
taatttacaacagaagataaccccatcccatccccaaaacataaaaatacaagtctatgcccctagaatga

SEQ ID NO: 22005 - DNA, 69 bp, Homo sapiens
aagataaccccatcccatccccaaaacataaaaatacaagtctatgcccctagaatgatcaaaccagtt

SEQ ID NO: 22006 - DNA, 70 bp, Homo sapiens
catcccatccccaaaacataaaaatacaagtctatgcccctagaatgatcaaaccagtttaactccctcc

SEQ ID NO: 22007 - DNA, 67 bp, Homo sapiens
ccaaaacataaaaatacaagtctatgcccctagaatgatcaaaccagtttaactccctcccccccac

SEQ ID NO: 22008 - DNA, 67 bp, Homo sapiens
ataaaaatacaagtctatgcccctagaatgatcaaaccagtttaactccctcccccccaccctgaaa

SEQ ID NO: 22009 - DNA, 72 bp, Homo sapiens
tctatgcccctagaatgatcaaaccagtttaactccctcccccccaccctgaaatcttgctacataaataca

SEQ ID NO: 22010 - DNA, 72 bp, Homo sapiens
tagaatgatcaaaccagtttaactccctcccccccaccctgaaatcttgctacataaatacatgtatgtatt

SEQ ID NO: 22011 - DNA, 70 bp, Homo sapiens
aaaccagtttaactccctcccccccaccctgaaatcttgctacataaatacatgtatgtatttgattata

SEQ ID NO: 22012 - DNA, 71 bp, Homo sapiens
agtttaactccctcccccccaccctgaaatcttgctacataaatacatgtatgtatttgattatagtataa

SEQ ID NO: 22013 - DNA, 76 bp, Homo sapiens
accctgaaatcttgctacataaatacatgtatgtatttgattatagtataaacagctcctaatccacttccagttc

SEQ ID NO: 22014 - DNA, 82 bp, Homo sapiens
ctacataaatacatgtatgtatttgattatagtataaacagctcctaatccacttccagttctaagcatcagcagctgctgt

SEQ ID NO: 22015 - DNA, 82 bp, Homo sapiens
aaatacatgtatgtatttgattatagtataaacagctcctaatccacttccagttctaagcatcagcagctgctgttgccaa

SEQ ID NO: 22016 - DNA, 80 bp, Homo sapiens
atgtatttgattatagtataaacagctcctaatccacttccagttctaagcatcagcagctgctgttgccaagccctggg

SEQ ID NO: 22017 - DNA, 79 bp, Homo sapiens
ttatagtataaacagctcctaatccacttccagttctaagcatcagcagctgctgttgccaagccctggggtcctgacc

SEQ ID NO: 22018 - DNA, 79 bp, Homo sapiens
agctcctaatccacttccagttctaagcatcagcagctgctgttgccaagccctggggtcctgacccattccagagaaa

SEQ ID NO: 22019 - DNA, 78 bp, Homo sapiens
acttccagttctaagcatcagcagctgctgttgccaagccctggggtcctgacccattccagagaaacttgccactct

SEQ ID NO: 22020 - DNA, 78 bp, Homo sapiens
ttgccaagccctggggtcctgacccattccagagaaacttgccactcttgctcagctctcgggcttcagggtcatcat

SEQ ID NO: 22021 - DNA, 80 bp, Homo sapiens
tgacccattccagagaaacttgccactcttgctcagctctcgggcttcagggtcatcattccagcgccgcttcaaccgaa

SEQ ID NO: 22022 - DNA, 79 bp, Homo sapiens
attccagagaaacttgccactcttgctcagctctcgggcttcagggtcatcattccagcgccgcttcaaccgaagcttg

SEQ ID NO: 22023 - DNA, 79 bp, Homo sapiens
aacttgccactcttgctcagctctcgggcttcagggtcatcattccagcgccgcttcaaccgaagcttggggggcatca

SEQ ID NO: 22024 - DNA, 81 bp, Homo sapiens
ttgctcagctctcgggcttcagggtcatcattccagcgccgcttcaaccgaagcttggggggcatcagtgcatcttctttc

SEQ ID NO: 22025 - DNA, 79 bp, Homo sapiens
ctctcgggcttcagggtcatcattccagcgccgcttcaaccgaagcttggggggcatcagtgcatcttctttcttctca

SEQ ID NO: 22026 - DNA, 80 bp, Homo sapiens
gtcatcattccagcgccgcttcaaccgaagcttggggggcatcagtgcatcttctttcttctcaggtgcactgggctctt

SEQ ID NO: 22027 - DNA, 79 bp, Homo sapiens
attccagcgccgcttcaaccgaagcttggggggcatcagtgcatcttctttcttctcaggtgcactgggctctttgcca

SEQ ID NO: 22028 - DNA, 79 bp, Homo sapiens
cttcaaccgaagcttggggggcatcagtgcatcttctttcttctcaggtgcactgggctctttgccaggcctatcctca

SEQ ID NO: 22029 - DNA, 80 bp, Homo sapiens
aagcttggggggcatcagtgcatcttctttcttctcaggtgcactgggctctttgccaggcctatcctcactgtcttcag

SEQ ID NO: 22030 - DNA, 79 bp, Homo sapiens
atcttctttcttctcaggtgcactgggctctttgccaggcctatcctcactgtcttcagtcacctccagaggttctcca

SEQ ID NO: 22031 - DNA, 78 bp, Homo sapiens
ttcttctcaggtgcactgggctctttgccaggcctatcctcactgtcttcagtcacctccagaggttctccacttggg

SEQ ID NO: 22032 - DNA, 77 bp, Homo sapiens
actgggctctttgccaggcctatcctcactgtcttcagtcacctccagaggttctccacttggggtgctaatgggca

SEQ ID NO: 22033 - DNA, 77 bp, Homo sapiens
ctctttgccaggcctatcctcactgtcttcagtcacctccagaggttctccacttggggtgctaatgggcacagagg

SEQ ID NO: 22034 - DNA, 77 bp, Homo sapiens
cctatcctcactgtcttcagtcacctccagaggttctccacttggggtgctaatgggcacagagggccagatgggtg

SEQ ID NO: 22035 - DNA, 79 bp, Homo sapiens
actgtcttcagtcacctccagaggttctccacttggggtgctaatgggcacagagggccagatgggtggtgcagcagga

SEQ ID NO: 22036 - DNA, 76 bp, Homo sapiens
acctccagaggttctccacttggggtgctaatgggcacagagggccagatgggtggtgcagcaggacgggcaaaga

SEQ ID NO: 22037 - DNA, 76 bp, Homo sapiens
ttctccacttggggtgctaatgggcacagagggccagatgggtggtgcagcaggacgggcaaagatggtgcctttt

SEQ ID NO: 22038 - DNA, 75 bp, Homo sapiens
acttggggtgctaatgggcacagagggccagatgggtggtgcagcaggacgggcaaagatggtgcctttttcctc

SEQ ID NO: 22039 - DNA, 78 bp, Homo sapiens
taatgggcacagagggccagatgggtggtgcagcaggacgggcaaagatggtgcctttttcctcttcaatggtcctgc

SEQ ID NO: 22040 - DNA, 78 bp, Homo sapiens
acagagggccagatgggtggtgcagcaggacgggcaaagatggtgcctttttcctcttcaatggtcctgcttggcaca

SEQ ID NO: 22041 - DNA, 78 bp, Homo sapiens
ggtggtgcagcaggacgggcaaagatggtgcctttttcctcttcaatggtcctgcttggcacagtgccctcttcttga

SEQ ID NO: 22042 - DNA, 82 bp, Homo sapiens
ttcctcttcaatggtcctgcttggcacagtgccctcttcttgagtgtgctcctccttctctcgtgccgactgcctgaggctc

SEQ ID NO: 22043 - DNA, 83 bp, Homo sapiens
tcctgcttggcacagtgccctcttcttgagtgtgctcctccttctctcgtgccgactgcctgaggctctcaggatccttttca

SEQ ID NO: 22044 - DNA, 83 bp, Homo sapiens
ttggcacagtgccctcttcttgagtgtgctcctccttctctcgtgccgactgcctgaggctctcaggatccttttcagaggca

SEQ ID NO: 22045 - DNA, 79 bp, Homo sapiens
tcttcttgagtgtgctcctccttctctcgtgccgactgcctgaggctctcaggatccttttcagaggcaggttccacct

SEQ ID NO: 22046 - DNA, 78 bp, Homo sapiens
agtgtgctcctccttctctcgtgccgactgcctgaggctctcaggatccttttcagaggcaggttccaccttgattct

SEQ ID NO: 22047 - DNA, 75 bp, Homo sapiens
cctccttctctcgtgccgactgcctgaggctctcaggatccttttcagaggcaggttccaccttgattcttgggg

SEQ ID NO: 22048 - DNA, 77 bp, Homo sapiens
tcgtgccgactgcctgaggctctcaggatccttttcagaggcaggttccaccttgattcttgggggaatagaagcca

SEQ ID NO: 22049 - DNA, 75 bp, Homo sapiens
tgaggctctcaggatccttttcagaggcaggttccaccttgattcttgggggaatagaagccatggtgggcgtgg

SEQ ID NO: 22050 - DNA, 72 bp, Homo sapiens
aggatccttttcagaggcaggttccaccttgattcttgggggaatagaagccatggtgggcgtggtgactgg

SEQ ID NO: 22051 - DNA, 75 bp, Homo sapiens
ttttcagaggcaggttccaccttgattcttgggggaatagaagccatggtgggcgtggtgactggtgctgactcc

SEQ ID NO: 22052 - DNA, 77 bp, Homo sapiens
ccttgattcttgggggaatagaagccatggtgggcgtggtgactggtgctgactcctcgctgctctcaaccctctcc

SEQ ID NO: 22053 - DNA, 77 bp, Homo sapiens
gaatagaagccatggtgggcgtggtgactggtgctgactcctcgctgctctcaaccctctcccggttcttccgccca

SEQ ID NO: 22054 - DNA, 75 bp, Homo sapiens
aagccatggtgggcgtggtgactggtgctgactcctcgctgctctcaaccctctcccggttcttccgcccaactg

SEQ ID NO: 22055 - DNA, 78 bp, Homo sapiens
tggtgctgactcctcgctgctctcaaccctctcccggttcttccgcccaactggtgggggctgcagcttgatggagaa

SEQ ID NO: 22056 - DNA, 77 bp, Homo sapiens
tcctcgctgctctcaaccctctcccggttcttccgcccaactggtgggggctgcagcttgatggagaactgagttga

SEQ ID NO: 22057 - DNA, 75 bp, Homo sapiens
tcaaccctctcccggttcttccgcccaactggtgggggctgcagcttgatggagaactgagttgactcctcagga

SEQ ID NO: 22058 - DNA, 77 bp, Homo sapiens
ctctcccggttcttccgcccaactggtgggggctgcagcttgatggagaactgagttgactcctcaggatgcatttg

SEQ ID NO: 22059 - DNA, 82 bp, Homo sapiens
ttcttccgcccaactggtgggggctgcagcttgatggagaactgagttgactcctcaggatgcatttggcactgcagtggtg

SEQ ID NO: 22060 - DNA, 83 bp, Homo sapiens
aactggtgggggctgcagcttgatggagaactgagttgactcctcaggatgcatttggcactgcagtggtggaaccatgagcc

SEQ ID NO: 22061 - DNA, 82 bp, Homo sapiens
tgcagcttgatggagaactgagttgactcctcaggatgcatttggcactgcagtggtggaaccatgagccctgggtaacggg

SEQ ID NO: 22062 - DNA, 77 bp, Homo sapiens
tggagaactgagttgactcctcaggatgcatttggcactgcagtggtggaaccatgagccctgggtaacggggaaaa

SEQ ID NO: 22063 - DNA, 75 bp, Homo sapiens
actgagttgactcctcaggatgcatttggcactgcagtggtggaaccatgagccctgggtaacggggaaaagtcc

SEQ ID NO: 22064 - DNA, 73 bp, Homo sapiens
tttggcactgcagtggtggaaccatgagccctgggtaacggggaaaagtccgaggactcagatggtagttgaa

SEQ ID NO: 22065 - DNA, 71 bp, Homo sapiens
agtggtggaaccatgagccctgggtaacggggaaaagtccgaggactcagatggtagttgaacacagaaca

SEQ ID NO: 22066 - DNA, 72 bp, Homo sapiens
accatgagccctgggtaacggggaaaagtccgaggactcagatggtagttgaacacagaacaagcttgagaa

SEQ ID NO: 22067 - DNA, 72 bp, Homo sapiens
tgggtaacggggaaaagtccgaggactcagatggtagttgaacacagaacaagcttgagaatgaaggtagtg

SEQ ID NO: 22068 - DNA, 73 bp, Homo sapiens
gggaaaagtccgaggactcagatggtagttgaacacagaacaagcttgagaatgaaggtagtgtttcatttcc

SEQ ID NO: 22069 - DNA, 76 bp, Homo sapiens
tccgaggactcagatggtagttgaacacagaacaagcttgagaatgaaggtagtgtttcatttcctcagggttgaa

SEQ ID NO: 22070 - DNA, 78 bp, Homo sapiens
aacacagaacaagcttgagaatgaaggtagtgtttcatttcctcagggttgaaggagaagcagctgctgctggtgaaa

SEQ ID NO: 22071 - DNA, 78 bp, Homo sapiens
agaatgaaggtagtgtttcatttcctcagggttgaaggagaagcagctgctgctggtgaaagggctcaggcctggtga

SEQ ID NO: 22072 - DNA, 80 bp, Homo sapiens
tgtttcatttcctcagggttgaaggagaagcagctgctgctggtgaaagggctcaggcctggtgatgggctataggagaa

SEQ ID NO: 22073 - DNA, 82 bp, Homo sapiens
ttgaaggagaagcagctgctgctggtgaaagggctcaggcctggtgatgggctataggagaagatggtgggagtcagggaga

SEQ ID NO: 22074 - DNA, 81 bp, Homo sapiens
cagctgctgctggtgaaagggctcaggcctggtgatgggctataggagaagatggtgggagtcagggagagggctggtgaa

SEQ ID NO: 22075 - DNA, 77 bp, Homo sapiens
gctcaggcctggtgatgggctataggagaagatggtgggagtcagggagagggctggtgaaatggggacattaagga

SEQ ID NO: 22076 - DNA, 75 bp, Homo sapiens
ctggtgatgggctataggagaagatggtgggagtcagggagagggctggtgaaatggggacattaaggacacctc

SEQ ID NO: 22077 - DNA, 73 bp, Homo sapiens
ctataggagaagatggtgggagtcagggagagggctggtgaaatggggacattaaggacacctccgcggccag

SEQ ID NO: 22078 - DNA, 72 bp, Homo sapiens
aagatggtgggagtcagggagagggctggtgaaatggggacattaaggacacctccgcggccagggattgga

SEQ ID NO: 22079 - DNA, 73 bp, Homo sapiens
agtcagggagagggctggtgaaatggggacattaaggacacctccgcggccagggattggagagacagcgaag

SEQ ID NO: 22080 - DNA, 73 bp, Homo sapiens
agagggctggtgaaatggggacattaaggacacctccgcggccagggattggagagacagcgaagggactgtg

SEQ ID NO: 22081 - DNA, 70 bp, Homo sapiens
aaatggggacattaaggacacctccgcggccagggattggagagacagcgaagggactgtgggggtcagg

SEQ ID NO: 22082 - DNA, 72 bp, Homo sapiens
acctccgcggccagggattggagagacagcgaagggactgtgggggtcagggtacatccctggcctagcaaa

SEQ ID NO: 22083 - DNA, 74 bp, Homo sapiens
agggattggagagacagcgaagggactgtgggggtcagggtacatccctggcctagcaaacagaggaagcatta

SEQ ID NO: 22084 - DNA, 77 bp, Homo sapiens
agagacagcgaagggactgtgggggtcagggtacatccctggcctagcaaacagaggaagcattatgtcaggcttgc

SEQ ID NO: 22085 - DNA, 75 bp, Homo sapiens
aagggactgtgggggtcagggtacatccctggcctagcaaacagaggaagcattatgtcaggcttgcgtttctga

SEQ ID NO: 22086 - DNA, 77 bp, Homo sapiens
ggggtcagggtacatccctggcctagcaaacagaggaagcattatgtcaggcttgcgtttctgatggccaatccctc

SEQ ID NO: 22087 - DNA, 77 bp, Homo sapiens
agggtacatccctggcctagcaaacagaggaagcattatgtcaggcttgcgtttctgatggccaatccctcctccac

SEQ ID NO: 22088 - DNA, 81 bp, Homo sapiens
tggcctagcaaacagaggaagcattatgtcaggcttgcgtttctgatggccaatccctcctccaccaatggcattcctgga

SEQ ID NO: 22089 - DNA, 78 bp, Homo sapiens
aaacagaggaagcattatgtcaggcttgcgtttctgatggccaatccctcctccaccaatggcattcctggaggacac

SEQ ID NO: 22090 - DNA, 79 bp, Homo sapiens
aagcattatgtcaggcttgcgtttctgatggccaatccctcctccaccaatggcattcctggaggacacgggatccaca

SEQ ID NO: 22091 - DNA, 75 bp, Homo sapiens
gtcaggcttgcgtttctgatggccaatccctcctccaccaatggcattcctggaggacacgggatccacaccccg

SEQ ID NO: 22092 - DNA, 77 bp, Homo sapiens
gtttctgatggccaatccctcctccaccaatggcattcctggaggacacgggatccacaccccggcgccagtcagca

SEQ ID NO: 22093 - DNA, 78 bp, Homo sapiens
aatccctcctccaccaatggcattcctggaggacacgggatccacaccccggcgccagtcagcagctgagccatcctc

SEQ ID NO: 22094 - DNA, 81 bp, Homo sapiens
ctccaccaatggcattcctggaggacacgggatccacaccccggcgccagtcagcagctgagccatcctccagctctgaaa

SEQ ID NO: 22095 - DNA, 80 bp, Homo sapiens
attcctggaggacacgggatccacaccccggcgccagtcagcagctgagccatcctccagctctgaaagctcagtctttc

SEQ ID NO: 22096 - DNA, 82 bp, Homo sapiens
atccacaccccggcgccagtcagcagctgagccatcctccagctctgaaagctcagtctttctatcagtaccattactggac

SEQ ID NO: 22097 - DNA, 84 bp, Homo sapiens
cggcgccagtcagcagctgagccatcctccagctctgaaagctcagtctttctatcagtaccattactggactcctggccagaa

SEQ ID NO: 22098 - DNA, 84 bp, Homo sapiens
agtcagcagctgagccatcctccagctctgaaagctcagtctttctatcagtaccattactggactcctggccagaagcagtta

SEQ ID NO: 22099 - DNA, 82 bp, Homo sapiens
catcctccagctctgaaagctcagtctttctatcagtaccattactggactcctggccagaagcagttagggagctagcaga

SEQ ID NO: 22100 - DNA, 79 bp, Homo sapiens
agctctgaaagctcagtctttctatcagtaccattactggactcctggccagaagcagttagggagctagcagagaacc

SEQ ID NO: 22101 - DNA, 76 bp, Homo sapiens
aaagctcagtctttctatcagtaccattactggactcctggccagaagcagttagggagctagcagagaaccgtcc

SEQ ID NO: 22102 - DNA, 78 bp, Homo sapiens
attactggactcctggccagaagcagttagggagctagcagagaaccgtcccggctgcacatcattggttggagaatg

SEQ ID NO: 22103 - DNA, 78 bp, Homo sapiens
actcctggccagaagcagttagggagctagcagagaaccgtcccggctgcacatcattggttggagaatgggtgtcca

SEQ ID NO: 22104 - DNA, 76 bp, Homo sapiens
aagcagttagggagctagcagagaaccgtcccggctgcacatcattggttggagaatgggtgtccagaggtgggaa

SEQ ID NO: 22105 - DNA, 76 bp, Homo sapiens
ttagggagctagcagagaaccgtcccggctgcacatcattggttggagaatgggtgtccagaggtgggaaatggaa

SEQ ID NO: 22106 - DNA, 72 bp, Homo sapiens
agagaaccgtcccggctgcacatcattggttggagaatgggtgtccagaggtgggaaatggaaccgggaaga

SEQ ID NO: 22107 - DNA, 72 bp, Homo sapiens
ccgtcccggctgcacatcattggttggagaatgggtgtccagaggtgggaaatggaaccgggaagaggctgt

SEQ ID NO: 22108 - DNA, 75 bp, Homo sapiens
acatcattggttggagaatgggtgtccagaggtgggaaatggaaccgggaagaggctgttggcactggtggtgca

SEQ ID NO: 22109 - DNA, 75 bp, Homo sapiens
ttggagaatgggtgtccagaggtgggaaatggaaccgggaagaggctgttggcactggtggtgcactctgaggaa

SEQ ID NO: 22110 - DNA, 77 bp, Homo sapiens
tgtccagaggtgggaaatggaaccgggaagaggctgttggcactggtggtgcactctgaggaaccacacctgtgatg

SEQ ID NO: 22111 - DNA, 80 bp, Homo sapiens
aagaggctgttggcactggtggtgcactctgaggaaccacacctgtgatggtggaaaatacaaaagcctgcatcagagga

SEQ ID NO: 22112 - DNA, 73 bp, Homo sapiens
tttataaattaaacgttatcacagatacatatgagtggggttaagggaagaaaaaacatcatatatatgaatg

SEQ ID NO: 22113 - DNA, 73 bp, Homo sapiens
ttaaacgttatcacagatacatatgagtggggttaagggaagaaaaaacatcatatatatgaatggagtttgg

SEQ ID NO: 22114 - DNA, 77 bp, Homo sapiens
ttatcacagatacatatgagtggggttaagggaagaaaaaacatcatatatatgaatggagtttggtactatctgtg

SEQ ID NO: 22115 - DNA, 73 bp, Homo sapiens
atatgagtggggttaagggaagaaaaaacatcatatatatgaatggagtttggtactatctgtggtttgcgaa

SEQ ID NO: 22116 - DNA, 72 bp, Homo sapiens
gttaagggaagaaaaaacatcatatatatgaatggagtttggtactatctgtggtttgcgaatctactaggg

SEQ ID NO: 22117 - DNA, 75 bp, Homo sapiens
gaaaaaacatcatatatatgaatggagtttggtactatctgtggtttgcgaatctactaggggtcttagaacata

SEQ ID NO: 22118 - DNA, 78 bp, Homo sapiens
atatatatgaatggagtttggtactatctgtggtttgcgaatctactaggggtcttagaacatatactgctcagataa

SEQ ID NO: 22119 - DNA, 76 bp, Homo sapiens
tatgaatggagtttggtactatctgtggtttgcgaatctactaggggtcttagaacatatactgctcagataaggg

SEQ ID NO: 22120 - DNA, 74 bp, Homo sapiens
gtactatctgtggtttgcgaatctactaggggtcttagaacatatactgctcagataaggggaactactgtatt

SEQ ID NO: 22121 - DNA, 73 bp, Homo sapiens
atctgtggtttgcgaatctactaggggtcttagaacatatactgctcagataaggggaactactgtattttct

SEQ ID NO: 22122 - DNA, 74 bp, Homo sapiens
aatctactaggggtcttagaacatatactgctcagataaggggaactactgtattttcttgggcaggagtatga

SEQ ID NO: 22123 - DNA, 74 bp, Homo sapiens
tctactaggggtcttagaacatatactgctcagataaggggaactactgtattttcttgggcaggagtatgatt

SEQ ID NO: 22124 - DNA, 76 bp, Homo sapiens
ggtcttagaacatatactgctcagataaggggaactactgtattttcttgggcaggagtatgatttgcataaggaa

SEQ ID NO: 22125 - DNA, 75 bp, Homo sapiens
ttagaacatatactgctcagataaggggaactactgtattttcttgggcaggagtatgatttgcataaggaaaaa

SEQ ID NO: 22126 - DNA, 71 bp, Homo sapiens
cagataaggggaactactgtattttcttgggcaggagtatgatttgcataaggaaaaaaatcacaaacaaa

SEQ ID NO: 22127 - DNA, 70 bp, Homo sapiens
ggaactactgtattttcttgggcaggagtatgatttgcataaggaaaaaaatcacaaacaaaaaaccaca

SEQ ID NO: 22128 - DNA, 71 bp, Homo sapiens
ctgtattttcttgggcaggagtatgatttgcataaggaaaaaaatcacaaacaaaaaaccacacaacaaca

SEQ ID NO: 22129 - DNA, 70 bp, Homo sapiens
tttcttgggcaggagtatgatttgcataaggaaaaaaatcacaaacaaaaaaccacacaacaacaaagtc

SEQ ID NO: 22130 - DNA, 71 bp, Homo sapiens
ggcaggagtatgatttgcataaggaaaaaaatcacaaacaaaaaaccacacaacaacaaagtcttttgaga

SEQ ID NO: 22131 - DNA, 73 bp, Homo sapiens
tgcataaggaaaaaaatcacaaacaaaaaaccacacaacaacaaagtcttttgagagactgctttcaacatca

SEQ ID NO: 22132 - DNA, 71 bp, Homo sapiens
aaaaaatcacaaacaaaaaaccacacaacaacaaagtcttttgagagactgctttcaacatcaagagagaa

SEQ ID NO: 22133 - DNA, 77 bp, Homo sapiens
acaaagtcttttgagagactgctttcaacatcaagagagaatgtggggagctgtgatggaaagctataaccaggaaa

SEQ ID NO: 22134 - DNA, 79 bp, Homo sapiens
gtcttttgagagactgctttcaacatcaagagagaatgtggggagctgtgatggaaagctataaccaggaaagtcaaga

SEQ ID NO: 22135 - DNA, 77 bp, Homo sapiens
tgctttcaacatcaagagagaatgtggggagctgtgatggaaagctataaccaggaaagtcaagaggggaagcccta

SEQ ID NO: 22136 - DNA, 76 bp, Homo sapiens
tcaagagagaatgtggggagctgtgatggaaagctataaccaggaaagtcaagaggggaagccctactgcacttaa

SEQ ID NO: 22137 - DNA, 74 bp, Homo sapiens
aatgtggggagctgtgatggaaagctataaccaggaaagtcaagaggggaagccctactgcacttaacaggaga

SEQ ID NO: 22138 - DNA, 74 bp, Homo sapiens
agctgtgatggaaagctataaccaggaaagtcaagaggggaagccctactgcacttaacaggagagaaggtcaa

SEQ ID NO: 22139 - DNA, 71 bp, Homo sapiens
atggaaagctataaccaggaaagtcaagaggggaagccctactgcacttaacaggagagaaggtcaagtaa

SEQ ID NO: 22140 - DNA, 69 bp, Homo sapiens
caggaaagtcaagaggggaagccctactgcacttaacaggagagaaggtcaagtaaccccagaatcttt

SEQ ID NO: 22141 - DNA, 69 bp, Homo sapiens
aagtcaagaggggaagccctactgcacttaacaggagagaaggtcaagtaaccccagaatctttttctc

SEQ ID NO: 22142 - DNA, 74 bp, Homo sapiens
aagccctactgcacttaacaggagagaaggtcaagtaaccccagaatctttttctctgaggatttgctgttgca

SEQ ID NO: 22143 - DNA, 74 bp, Homo sapiens
acttaacaggagagaaggtcaagtaaccccagaatctttttctctgaggatttgctgttgcagatcaaagacac

SEQ ID NO: 22144 - DNA, 75 bp, Homo sapiens
acaggagagaaggtcaagtaaccccagaatctttttctctgaggatttgctgttgcagatcaaagacactgcttt

SEQ ID NO: 22145 - DNA, 78 bp, Homo sapiens
aagtaaccccagaatctttttctctgaggatttgctgttgcagatcaaagacactgcttttcactgcaaacatgtgaa

SEQ ID NO: 22146 - DNA, 78 bp, Homo sapiens
accccagaatctttttctctgaggatttgctgttgcagatcaaagacactgcttttcactgcaaacatgtgaacctcc

SEQ ID NO: 22147 - DNA, 81 bp, Homo sapiens
ttttctctgaggatttgctgttgcagatcaaagacactgcttttcactgcaaacatgtgaacctcccccttctctgatcaa

SEQ ID NO: 22148 - DNA, 81 bp, Homo sapiens
atttgctgttgcagatcaaagacactgcttttcactgcaaacatgtgaacctcccccttctctgatcaaggatgctgtggt

SEQ ID NO: 22149 - DNA, 81 bp, Homo sapiens
cagatcaaagacactgcttttcactgcaaacatgtgaacctcccccttctctgatcaaggatgctgtggttttgatgatat

SEQ ID NO: 22150 - DNA, 81 bp, Homo sapiens
acactgcttttcactgcaaacatgtgaacctcccccttctctgatcaaggatgctgtggttttgatgatattcacttgata

SEQ ID NO: 22151 - DNA, 78 bp, Homo sapiens
aacatgtgaacctcccccttctctgatcaaggatgctgtggttttgatgatattcacttgataagggagagcttggta

SEQ ID NO: 22152 - DNA, 79 bp, Homo sapiens
ttctctgatcaaggatgctgtggttttgatgatattcacttgataagggagagcttggtagtttcacagaaaatcggaa

SEQ ID NO: 22153 - DNA, 76 bp, Homo sapiens
atgctgtggttttgatgatattcacttgataagggagagcttggtagtttcacagaaaatcggaagtgtttgtaga

SEQ ID NO: 22154 - DNA, 74 bp, Homo sapiens
tggttttgatgatattcacttgataagggagagcttggtagtttcacagaaaatcggaagtgtttgtagaaaca

SEQ ID NO: 22155 - DNA, 71 bp, Homo sapiens
agagcttggtagtttcacagaaaatcggaagtgtttgtagaaacaggttcccatctatgaaagaaccactg

SEQ ID NO: 22156 - DNA, 71 bp, Homo sapiens
ttcacagaaaatcggaagtgtttgtagaaacaggttcccatctatgaaagaaccactgggctgggtgttaa

SEQ ID NO: 22157 - DNA, 67 bp, Homo sapiens
aaaatcggaagtgtttgtagaaacaggttcccatctatgaaagaaccactgggctgggtgttaaaac

SEQ ID NO: 22158 - DNA, 70 bp, Homo sapiens
ttgtagaaacaggttcccatctatgaaagaaccactgggctgggtgttaaaactgagtcctgaacgtaaa

SEQ ID NO: 22159 - DNA, 72 bp, Homo sapiens
aaacaggttcccatctatgaaagaaccactgggctgggtgttaaaactgagtcctgaacgtaaagatcatca

SEQ ID NO: 22160 - DNA, 73 bp, Homo sapiens
atctatgaaagaaccactgggctgggtgttaaaactgagtcctgaacgtaaagatcatcacaaacctatgaaa

SEQ ID NO: 22161 - DNA, 73 bp, Homo sapiens
aagaaccactgggctgggtgttaaaactgagtcctgaacgtaaagatcatcacaaacctatgaaacatcattc

SEQ ID NO: 22162 - DNA, 74 bp, Homo sapiens
tgggtgttaaaactgagtcctgaacgtaaagatcatcacaaacctatgaaacatcattcccaaacaagatagcg

SEQ ID NO: 22163 - DNA, 75 bp, Homo sapiens
taaaactgagtcctgaacgtaaagatcatcacaaacctatgaaacatcattcccaaacaagatagcgtaatagta

SEQ ID NO: 22164 - DNA, 76 bp, Homo sapiens
gaacgtaaagatcatcacaaacctatgaaacatcattcccaaacaagatagcgtaatagtatctaggagattacaa

SEQ ID NO: 22165 - DNA, 79 bp, Homo sapiens
aagatcatcacaaacctatgaaacatcattcccaaacaagatagcgtaatagtatctaggagattacaaacaatatgca

SEQ ID NO: 22166 - DNA, 75 bp, Homo sapiens
acctatgaaacatcattcccaaacaagatagcgtaatagtatctaggagattacaaacaatatgcagaaaaggga

SEQ ID NO: 22167 - DNA, 75 bp, Homo sapiens
tgaaacatcattcccaaacaagatagcgtaatagtatctaggagattacaaacaatatgcagaaaagggaaccaa

SEQ ID NO: 22168 - DNA, 71 bp, Homo sapiens
cccaaacaagatagcgtaatagtatctaggagattacaaacaatatgcagaaaagggaaccaaccaaataa

SEQ ID NO: 22169 - DNA, 71 bp, Homo sapiens
agatagcgtaatagtatctaggagattacaaacaatatgcagaaaagggaaccaaccaaataaaccaaaga

SEQ ID NO: 22170 - DNA, 72 bp, Homo sapiens
tagtatctaggagattacaaacaatatgcagaaaagggaaccaaccaaataaaccaaagaaatctatcttga

SEQ ID NO: 22171 - DNA, 73 bp, Homo sapiens
gagattacaaacaatatgcagaaaagggaaccaaccaaataaaccaaagaaatctatcttgatactgaatagc

SEQ ID NO: 22172 - DNA, 75 bp, Homo sapiens
caaccaaataaaccaaagaaatctatcttgatactgaatagcctataactctccttataagtgagatgacttgag

SEQ ID NO: 22173 - DNA, 77 bp, Homo sapiens
accaaagaaatctatcttgatactgaatagcctataactctccttataagtgagatgacttgagtaagaacattgag

SEQ ID NO: 22174 - DNA, 79 bp, Homo sapiens
aatctatcttgatactgaatagcctataactctccttataagtgagatgacttgagtaagaacattgaggcaatccaaa

SEQ ID NO: 22175 - DNA, 79 bp, Homo sapiens
atactgaatagcctataactctccttataagtgagatgacttgagtaagaacattgaggcaatccaaaggatcacatta

SEQ ID NO: 22176 - DNA, 76 bp, Homo sapiens
ctataactctccttataagtgagatgacttgagtaagaacattgaggcaatccaaaggatcacattattttagtgt

SEQ ID NO: 22177 - DNA, 76 bp, Homo sapiens
ctctccttataagtgagatgacttgagtaagaacattgaggcaatccaaaggatcacattattttagtgtttctaa

SEQ ID NO: 22178 - DNA, 74 bp, Homo sapiens
aagtgagatgacttgagtaagaacattgaggcaatccaaaggatcacattattttagtgtttctaaaatcttcc

SEQ ID NO: 22179 - DNA, 76 bp, Homo sapiens
tgagtaagaacattgaggcaatccaaaggatcacattattttagtgtttctaaaatcttcctaaacatgccatgtc

SEQ ID NO: 22180 - DNA, 75 bp, Homo sapiens
gaacattgaggcaatccaaaggatcacattattttagtgtttctaaaatcttcctaaacatgccatgtcttagat

SEQ ID NO: 22181 - DNA, 73 bp, Homo sapiens
gcaatccaaaggatcacattattttagtgtttctaaaatcttcctaaacatgccatgtcttagatttggattt

SEQ ID NO: 22182 - DNA, 70 bp, Homo sapiens
ggatcacattattttagtgtttctaaaatcttcctaaacatgccatgtcttagatttggatttttaaaaa

SEQ ID NO: 22183 - DNA, 63 bp, Homo sapiens
tttttaaaaattcttttcaattcaaaattaattccctaccaaaagagtttgtatcttaccact

SEQ ID NO: 22184 - DNA, 70 bp, Homo sapiens
ttcttttcaattcaaaattaattccctaccaaaagagtttgtatcttaccacttgaccgaatgttgatga

SEQ ID NO: 22185 - DNA, 69 bp, Homo sapiens
ttcaaaattaattccctaccaaaagagtttgtatcttaccacttgaccgaatgttgatgaatgggtagt

SEQ ID NO: 22186 - DNA, 70 bp, Homo sapiens
aattaattccctaccaaaagagtttgtatcttaccacttgaccgaatgttgatgaatgggtagttgggca

SEQ ID NO: 22187 - DNA, 73 bp, Homo sapiens
aaaagagtttgtatcttaccacttgaccgaatgttgatgaatgggtagttgggcatcaccagcttgttgaagt

SEQ ID NO: 22188 - DNA, 74 bp, Homo sapiens
tttgtatcttaccacttgaccgaatgttgatgaatgggtagttgggcatcaccagcttgttgaagttaaattta

SEQ ID NO: 22189 - DNA, 70 bp, Homo sapiens
aatgttgatgaatgggtagttgggcatcaccagcttgttgaagttaaatttataggtaaatcttttccct

SEQ ID NO: 22190 - DNA, 69 bp, Homo sapiens
gatgaatgggtagttgggcatcaccagcttgttgaagttaaatttataggtaaatcttttcccttttgt

SEQ ID NO: 22191 - DNA, 69 bp, Homo sapiens
tgggcatcaccagcttgttgaagttaaatttataggtaaatcttttcccttttgttttatgaaggatcc

SEQ ID NO: 22192 - DNA, 67 bp, Homo sapiens
caccagcttgttgaagttaaatttataggtaaatcttttcccttttgttttatgaaggatcctcttg

SEQ ID NO: 22193 - DNA, 66 bp, Homo sapiens
agttaaatttataggtaaatcttttcccttttgttttatgaaggatcctcttgttgtaatagtatc

SEQ ID NO: 22194 - DNA, 67 bp, Homo sapiens
ataggtaaatcttttcccttttgttttatgaaggatcctcttgttgtaatagtatctgtaaaaacag

SEQ ID NO: 22195 - DNA, 70 bp, Homo sapiens
cttttcccttttgttttatgaaggatcctcttgttgtaatagtatctgtaaaaacaggaatacatgtcca

SEQ ID NO: 22196 - DNA, 73 bp, Homo sapiens
tctccttccaatctgttaacacagatttgggaatccttttccttacctgagggcccggctcagcttgtcataa

SEQ ID NO: 22197 - DNA, 74 bp, Homo sapiens
ttccaatctgttaacacagatttgggaatccttttccttacctgagggcccggctcagcttgtcataattcatc

SEQ ID NO: 22198 - DNA, 75 bp, Homo sapiens
taacacagatttgggaatccttttccttacctgagggcccggctcagcttgtcataattcatctgtggtttgcat

SEQ ID NO: 22199 - DNA, 74 bp, Homo sapiens
tttgggaatccttttccttacctgagggcccggctcagcttgtcataattcatctgtggtttgcatttcctgcg

SEQ ID NO: 22200 - DNA, 75 bp, Homo sapiens
ttttccttacctgagggcccggctcagcttgtcataattcatctgtggtttgcatttcctgcggccccagaggcg

SEQ ID NO: 22201 - DNA, 78 bp, Homo sapiens
agggcccggctcagcttgtcataattcatctgtggtttgcatttcctgcggccccagaggcgggccacctcatctgga

SEQ ID NO: 22202 - DNA, 82 bp, Homo sapiens
tcagcttgtcataattcatctgtggtttgcatttcctgcggccccagaggcgggccacctcatctggatccttgatgacaaa

SEQ ID NO: 22203 - DNA, 77 bp, Homo sapiens
ataattcatctgtggtttgcatttcctgcggccccagaggcgggccacctcatctggatccttgatgacaaattccc

SEQ ID NO: 22204 - DNA, 76 bp, Homo sapiens
tgtggtttgcatttcctgcggccccagaggcgggccacctcatctggatccttgatgacaaattccccgtactctc

SEQ ID NO: 22205 - DNA, 78 bp, Homo sapiens
ttgcatttcctgcggccccagaggcgggccacctcatctggatccttgatgacaaattccccgtactctccctgctgc

SEQ ID NO: 22206 - DNA, 79 bp, Homo sapiens
ccccagaggcgggccacctcatctggatccttgatgacaaattccccgtactctccctgctgccaggcgatgacatggc

SEQ ID NO: 22207 - DNA, 79 bp, Homo sapiens
gggccacctcatctggatccttgatgacaaattccccgtactctccctgctgccaggcgatgacatggcggaactcttc

SEQ ID NO: 22208 - DNA, 78 bp, Homo sapiens
acctcatctggatccttgatgacaaattccccgtactctccctgctgccaggcgatgacatggcggaactcttccttc

SEQ ID NO: 22209 - DNA, 81 bp, Homo sapiens
atccttgatgacaaattccccgtactctccctgctgccaggcgatgacatggcggaactcttccttctgcagcagctccag

SEQ ID NO: 22210 - DNA, 81 bp, Homo sapiens
acaaattccccgtactctccctgctgccaggcgatgacatggcggaactcttccttctgcagcagctccaggatgaagtgc

SEQ ID NO: 22211 - DNA, 87 bp, Homo sapiens
ccgtactctccctgctgccaggcgatgacatggcggaactcttccttctgcagcagctccaggatgaagtgccacagctggatctgc

SEQ ID NO: 22212 - DNA, 87 bp, Homo sapiens
ctgctgccaggcgatgacatggcggaactcttccttctgcagcagctccaggatgaagtgccacagctggatctgccgggagcctgg

SEQ ID NO: 22213 - DNA, 85 bp, Homo sapiens
atgacatggcggaactcttccttctgcagcagctccaggatgaagtgccacagctggatctgccgggagcctggggatgactctg

SEQ ID NO: 22214 - DNA, 82 bp, Homo sapiens
gaactcttccttctgcagcagctccaggatgaagtgccacagctggatctgccgggagcctggggatgactctgttttgtag

SEQ ID NO: 22215 - DNA, 84 bp, Homo sapiens
ttctgcagcagctccaggatgaagtgccacagctggatctgccgggagcctggggatgactctgttttgtaggcccagtcagga

SEQ ID NO: 22216 - DNA, 78 bp, Homo sapiens
agctccaggatgaagtgccacagctggatctgccgggagcctggggatgactctgttttgtaggcccagtcaggaaac

SEQ ID NO: 22217 - DNA, 77 bp, Homo sapiens
tgaagtgccacagctggatctgccgggagcctggggatgactctgttttgtaggcccagtcaggaaactgataccct

SEQ ID NO: 22218 - DNA, 75 bp, Homo sapiens
tgccgggagcctggggatgactctgttttgtaggcccagtcaggaaactgataccctttcatgtgagaaggtcaa

SEQ ID NO: 22219 - DNA, 75 bp, Homo sapiens
tggggatgactctgttttgtaggcccagtcaggaaactgataccctttcatgtgagaaggtcaagattaagctag

SEQ ID NO: 22220 - DNA, 74 bp, Homo sapiens
atgactctgttttgtaggcccagtcaggaaactgataccctttcatgtgagaaggtcaagattaagctagttaa

SEQ ID NO: 22221 - DNA, 78 bp, Homo sapiens
ctcaagtggagaggacaggaaccactgagggaagcttccaggtacatcagagatgattaacttctgctcacctccacc

SEQ ID NO: 22222 - DNA, 76 bp, Homo sapiens
acaggaaccactgagggaagcttccaggtacatcagagatgattaacttctgctcacctccacctccttctggctt

SEQ ID NO: 22223 - DNA, 76 bp, Homo sapiens
aaccactgagggaagcttccaggtacatcagagatgattaacttctgctcacctccacctccttctggcttttcca

SEQ ID NO: 22224 - DNA, 78 bp, Homo sapiens
aagcttccaggtacatcagagatgattaacttctgctcacctccacctccttctggcttttccacgatgctacagccg

SEQ ID NO: 22225 - DNA, 80 bp, Homo sapiens
tacatcagagatgattaacttctgctcacctccacctccttctggcttttccacgatgctacagccggctttcattttca

SEQ ID NO: 22226 - DNA, 75 bp, Homo sapiens
agatgattaacttctgctcacctccacctccttctggcttttccacgatgctacagccggctttcattttcaccc

SEQ ID NO: 22227 - DNA, 79 bp, Homo sapiens
tgctcacctccacctccttctggcttttccacgatgctacagccggctttcattttcacccgcctgctgagagacacaa

SEQ ID NO: 22228 - DNA, 78 bp, Homo sapiens
cacctccttctggcttttccacgatgctacagccggctttcattttcacccgcctgctgagagacacaagccacacaa

SEQ ID NO: 22229 - DNA, 77 bp, Homo sapiens
tggcttttccacgatgctacagccggctttcattttcacccgcctgctgagagacacaagccacacaattactttaa

SEQ ID NO: 22230 - DNA, 78 bp, Homo sapiens
acgatgctacagccggctttcattttcacccgcctgctgagagacacaagccacacaattactttaagatgctattta

SEQ ID NO: 22231 - DNA, 76 bp, Homo sapiens
ctacagccggctttcattttcacccgcctgctgagagacacaagccacacaattactttaagatgctatttattta

SEQ ID NO: 22232 - DNA, 77 bp, Homo sapiens
tttcattttcacccgcctgctgagagacacaagccacacaattactttaagatgctatttatttagtatcctctcaa

SEQ ID NO: 22233 - DNA, 68 bp, Homo sapiens
gatccaacccagacaccccggcggccgaggcgaggccgggactcacctcttcccggcacggtccgtct

SEQ ID NO: 22234 - DNA, 67 bp, Homo sapiens
cggcggccgaggcgaggccgggactcacctcttcccggcacggtccgtcttcggtccggtctcctcc

SEQ ID NO: 22235 - DNA, 68 bp, Homo sapiens
aggcgaggccgggactcacctcttcccggcacggtccgtcttcggtccggtctcctccgcggcgtctc

SEQ ID NO: 22236 - DNA, 70 bp, Homo sapiens
actcacctcttcccggcacggtccgtcttcggtccggtctcctccgcggcgtctccggctcctcctcatc

SEQ ID NO: 22237 - DNA, 69 bp, Homo sapiens
cctcttcccggcacggtccgtcttcggtccggtctcctccgcggcgtctccggctcctcctcatccacc

SEQ ID NO: 22238 - DNA, 71 bp, Homo sapiens
acggtccgtcttcggtccggtctcctccgcggcgtctccggctcctcctcatccaccccagcaggaagtga

SEQ ID NO: 22239 - DNA, 73 bp, Homo sapiens
tcttcggtccggtctcctccgcggcgtctccggctcctcctcatccaccccagcaggaagtgacctcctcggc

SEQ ID NO: 22240 - DNA, 76 bp, Homo sapiens
tcctccgcggcgtctccggctcctcctcatccaccccagcaggaagtgacctcctcggctgctttcgtcacttcca

SEQ ID NO: 22241 - DNA, 79 bp, Homo sapiens
cgtctccggctcctcctcatccaccccagcaggaagtgacctcctcggctgctttcgtcacttccatcctcagcagaga

SEQ ID NO: 22242 - DNA, 77 bp, Homo sapiens
ctcctcctcatccaccccagcaggaagtgacctcctcggctgctttcgtcacttccatcctcagcagagagggcggg

SEQ ID NO: 22243 - DNA, 75 bp, Homo sapiens
atccaccccagcaggaagtgacctcctcggctgctttcgtcacttccatcctcagcagagagggcgggggaggag

SEQ ID NO: 22244 - DNA, 74 bp, Homo sapiens
aggaagtgacctcctcggctgctttcgtcacttccatcctcagcagagagggcgggggaggaggaggcgccctc

SEQ ID NO: 22245 - DNA, 73 bp, Homo sapiens
tcctcggctgctttcgtcacttccatcctcagcagagagggcgggggaggaggaggcgccctcccgccggttc

SEQ ID NO: 22246 - DNA, 74 bp, Homo sapiens
tgctttcgtcacttccatcctcagcagagagggcgggggaggaggaggcgccctcccgccggttcccagcctca

SEQ ID NO: 22247 - DNA, 71 bp, Homo sapiens
acttccatcctcagcagagagggcgggggaggaggaggcgccctcccgccggttcccagcctcacctcgcc

SEQ ID NO: 22248 - DNA, 74 bp, Homo sapiens
tcctcagcagagagggcgggggaggaggaggcgccctcccgccggttcccagcctcacctcgccgcacccagca

SEQ ID NO: 22249 - DNA, 70 bp, Homo sapiens
gcgggggaggaggaggcgccctcccgccggttcccagcctcacctcgccgcacccagcagcgtctccctt

SEQ ID NO: 22250 - DNA, 70 bp, Homo sapiens
ggaggaggaggcgccctcccgccggttcccagcctcacctcgccgcacccagcagcgtctccctttcctt

SEQ ID NO: 22251 - DNA, 72 bp, Homo sapiens
ccctcccgccggttcccagcctcacctcgccgcacccagcagcgtctccctttcctttctcctttcagcaga

SEQ ID NO: 22252 - DNA, 73 bp, Homo sapiens
cggttcccagcctcacctcgccgcacccagcagcgtctccctttcctttctcctttcagcagacgccgacttc

SEQ ID NO: 22253 - DNA, 75 bp, Homo sapiens
tcacctcgccgcacccagcagcgtctccctttcctttctcctttcagcagacgccgacttccgcccgcactcctc

SEQ ID NO: 22254 - DNA, 72 bp, Homo sapiens
cgccgcacccagcagcgtctccctttcctttctcctttcagcagacgccgacttccgcccgcactcctcccc

SEQ ID NO: 22255 - DNA, 72 bp, Homo sapiens
agcgtctccctttcctttctcctttcagcagacgccgacttccgcccgcactcctccccctgcgcgctcctc

SEQ ID NO: 22256 - DNA, 73 bp, Homo sapiens
tcctttctcctttcagcagacgccgacttccgcccgcactcctccccctgcgcgctcctcccggcccgcatcc

SEQ ID NO: 22257 - DNA, 76 bp, Homo sapiens
tctcctttcagcagacgccgacttccgcccgcactcctccccctgcgcgctcctcccggcccgcatcccgcgcatc

SEQ ID NO: 22258 - DNA, 71 bp, Homo sapiens
acttccgcccgcactcctccccctgcgcgctcctcccggcccgcatcccgcgcatccgccccggcacggcc

SEQ ID NO: 22259 - DNA, 75 bp, Homo sapiens
acaacacacacccatggcaaagaacagctgagccaggagaagctgaagaaaacagctttttatttgttactataa

SEQ ID NO: 22260 - DNA, 74 bp, Homo sapiens
ccatggcaaagaacagctgagccaggagaagctgaagaaaacagctttttatttgttactataagaaccaatta

SEQ ID NO: 22261 - DNA, 72 bp, Homo sapiens
aaagaacagctgagccaggagaagctgaagaaaacagctttttatttgttactataagaaccaattacagaa

SEQ ID NO: 22262 - DNA, 70 bp, Homo sapiens
gccaggagaagctgaagaaaacagctttttatttgttactataagaaccaattacagaatccgaggttaa

SEQ ID NO: 22263 - DNA, 68 bp, Homo sapiens
gagaagctgaagaaaacagctttttatttgttactataagaaccaattacagaatccgaggttaaaaa

SEQ ID NO: 22264 - DNA, 64 bp, Homo sapiens
acagctttttatttgttactataagaaccaattacagaatccgaggttaaaaaaacggacaaaa

SEQ ID NO: 22265 - DNA, 64 bp, Homo sapiens
atttgttactataagaaccaattacagaatccgaggttaaaaaaacggacaaaagatctttatt

SEQ ID NO: 22266 - DNA, 67 bp, Homo sapiens
ataagaaccaattacagaatccgaggttaaaaaaacggacaaaagatctttatttctgagaactggc

SEQ ID NO: 22267 - DNA, 67 bp, Homo sapiens
ccaattacagaatccgaggttaaaaaaacggacaaaagatctttatttctgagaactggcgtacaaa

SEQ ID NO: 22268 - DNA, 67 bp, Homo sapiens
agaatccgaggttaaaaaaacggacaaaagatctttatttctgagaactggcgtacaaaaggcagag

SEQ ID NO: 22269 - DNA, 65 bp, Homo sapiens
gttaaaaaaacggacaaaagatctttatttctgagaactggcgtacaaaaggcagagggggaggg

SEQ ID NO: 22270 - DNA, 71 bp, Homo sapiens
gaggggagggaaggaaagagcgagcgtggcctggggttgatgccagcttaggggcctcaaactccaattag

SEQ ID NO: 22271 - DNA, 70 bp, Homo sapiens
aaggaaagagcgagcgtggcctggggttgatgccagcttaggggcctcaaactccaattaggaaagtccg

SEQ ID NO: 22272 - DNA, 71 bp, Homo sapiens
aagagcgagcgtggcctggggttgatgccagcttaggggcctcaaactccaattaggaaagtccggacacc

SEQ ID NO: 22273 - DNA, 70 bp, Homo sapiens
ctggggttgatgccagcttaggggcctcaaactccaattaggaaagtccggacaccggacagaaagagaa

SEQ ID NO: 22274 - DNA, 69 bp, Homo sapiens
gttgatgccagcttaggggcctcaaactccaattaggaaagtccggacaccggacagaaagagaaaccc

SEQ ID NO: 22275 - DNA, 65 bp, Homo sapiens
ttaggggcctcaaactccaattaggaaagtccggacaccggacagaaagagaaacccccaattag

SEQ ID NO: 22276 - DNA, 64 bp, Homo sapiens
ctcaaactccaattaggaaagtccggacaccggacagaaagagaaacccccaattaggaaaaaa

SEQ ID NO: 22277 - DNA, 69 bp, Homo sapiens
aaaaagacatggcagtgcacgcccccctcccccaaccaggtaccaccacctgttatctgtttactcttc

SEQ ID NO: 22278 - DNA, 69 bp, Homo sapiens
acatggcagtgcacgcccccctcccccaaccaggtaccaccacctgttatctgtttactcttcccctcc

SEQ ID NO: 22279 - DNA, 64 bp, Homo sapiens
acgcccccctcccccaaccaggtaccaccacctgttatctgtttactcttcccctccccatccc

SEQ ID NO: 22280 - DNA, 66 bp, Homo sapiens
taccaccacctgttatctgtttactcttcccctccccatcccctttcacaaagggaggcaaaattt

SEQ ID NO: 22281 - DNA, 64 bp, Homo sapiens
acctgttatctgtttactcttcccctccccatcccctttcacaaagggaggcaaaatttttaaa

SEQ ID NO: 22282 - DNA, 61 bp, Homo sapiens
aaaattaaaaaaccctccccccaaaactgtccaagacatctgtgggtcctaccccccaaaa

SEQ ID NO: 22283 - DNA, 63 bp, Homo sapiens
aaaaccctccccccaaaactgtccaagacatctgtgggtcctaccccccaaaacaggctaggt

SEQ ID NO: 22284 - DNA, 68 bp, Homo sapiens
ccaaaactgtccaagacatctgtgggtcctaccccccaaaacaggctaggttcccacatgggccaagt

SEQ ID NO: 22285 - DNA, 71 bp, Homo sapiens
actgtccaagacatctgtgggtcctaccccccaaaacaggctaggttcccacatgggccaagttcctgcag

SEQ ID NO: 22286 - DNA, 72 bp, Homo sapiens
acatctgtgggtcctaccccccaaaacaggctaggttcccacatgggccaagttcctgcagtctgtcctcca

SEQ ID NO: 22287 - DNA, 79 bp, Homo sapiens
aaaacaggctaggttcccacatgggccaagttcctgcagtctgtcctccatcggcaagcatggaggcatgagacaagtc

SEQ ID NO: 22288 - DNA, 81 bp, Homo sapiens
ttcccacatgggccaagttcctgcagtctgtcctccatcggcaagcatggaggcatgagacaagtctcgaggtggtaacac

SEQ ID NO: 22289 - DNA, 80 bp, Homo sapiens
agttcctgcagtctgtcctccatcggcaagcatggaggcatgagacaagtctcgaggtggtaacaccagagggcgcccaa

SEQ ID NO: 22290 - DNA, 78 bp, Homo sapiens
gtctgtcctccatcggcaagcatggaggcatgagacaagtctcgaggtggtaacaccagagggcgcccaacccctcca

SEQ ID NO: 22291 - DNA, 77 bp, Homo sapiens
atcggcaagcatggaggcatgagacaagtctcgaggtggtaacaccagagggcgcccaacccctccagggacacaca

SEQ ID NO: 22292 - DNA, 76 bp, Homo sapiens
atggaggcatgagacaagtctcgaggtggtaacaccagagggcgcccaacccctccagggacacacactcacttgc

SEQ ID NO: 22293 - DNA, 72 bp, Homo sapiens
acaagtctcgaggtggtaacaccagagggcgcccaacccctccagggacacacactcacttgctctcttcct

SEQ ID NO: 22294 - DNA, 72 bp, Homo sapiens
aggtggtaacaccagagggcgcccaacccctccagggacacacactcacttgctctcttccttaattcactc

SEQ ID NO: 22295 - DNA, 72 bp, Homo sapiens
cccaacccctccagggacacacactcacttgctctcttccttaattcactcctcactcccttcgacacgaaa

SEQ ID NO: 22296 - DNA, 70 bp, Homo sapiens
acacactcacttgctctcttccttaattcactcctcactcccttcgacacgaaagggaagggaggtttgg

SEQ ID NO: 22297 - DNA, 69 bp, Homo sapiens
acactcacttgctctcttccttaattcactcctcactcccttcgacacgaaagggaagggaggtttggg

SEQ ID NO: 22298 - DNA, 69 bp, Homo sapiens
ttgctctcttccttaattcactcctcactcccttcgacacgaaagggaagggaggtttgggtgccctgg

SEQ ID NO: 22299 - DNA, 70 bp, Homo sapiens
tcttccttaattcactcctcactcccttcgacacgaaagggaagggaggtttgggtgccctgggcatcca

SEQ ID NO: 22300 - DNA, 69 bp, Homo sapiens
ttccttaattcactcctcactcccttcgacacgaaagggaagggaggtttgggtgccctgggcatccac

SEQ ID NO: 22301 - DNA, 70 bp, Homo sapiens
taattcactcctcactcccttcgacacgaaagggaagggaggtttgggtgccctgggcatccaccctcta

SEQ ID NO: 22302 - DNA, 71 bp, Homo sapiens
tcactcccttcgacacgaaagggaagggaggtttgggtgccctgggcatccaccctctacctctcagccca

SEQ ID NO: 22303 - DNA, 69 bp, Homo sapiens
ctcccttcgacacgaaagggaagggaggtttgggtgccctgggcatccaccctctacctctcagcccac

SEQ ID NO: 22304 - DNA, 68 bp, Homo sapiens
acacgaaagggaagggaggtttgggtgccctgggcatccaccctctacctctcagcccacctcccttc

SEQ ID NO: 22305 - DNA, 67 bp, Homo sapiens
acgaaagggaagggaggtttgggtgccctgggcatccaccctctacctctcagcccacctcccttcc

SEQ ID NO: 22306 - DNA, 68 bp, Homo sapiens
aagggaagggaggtttgggtgccctgggcatccaccctctacctctcagcccacctcccttccccaca

SEQ ID NO: 22307 - DNA, 77 bp, Homo sapiens
tgggcatccaccctctacctctcagcccacctcccttccccacaggtgctcagtcctccaggacaataggctcattg

SEQ ID NO: 22308 - DNA, 77 bp, Homo sapiens
accctctacctctcagcccacctcccttccccacaggtgctcagtcctccaggacaataggctcattggtgctggca

SEQ ID NO: 22309 - DNA, 79 bp, Homo sapiens
acctctcagcccacctcccttccccacaggtgctcagtcctccaggacaataggctcattggtgctggcaggatgtgag

SEQ ID NO: 22310 - DNA, 80 bp, Homo sapiens
tcccttccccacaggtgctcagtcctccaggacaataggctcattggtgctggcaggatgtgagggtgcaggtagaggga

SEQ ID NO: 22311 - DNA, 80 bp, Homo sapiens
tccccacaggtgctcagtcctccaggacaataggctcattggtgctggcaggatgtgagggtgcaggtagagggacaggg

SEQ ID NO: 22312 - DNA, 81 bp, Homo sapiens
agtcctccaggacaataggctcattggtgctggcaggatgtgagggtgcaggtagagggacagggggccgcactgcaatca

SEQ ID NO: 22313 - DNA, 83 bp, Homo sapiens
gacaataggctcattggtgctggcaggatgtgagggtgcaggtagagggacagggggccgcactgcaatcagcgttggcttca

SEQ ID NO: 22314 - DNA, 81 bp, Homo sapiens
taggctcattggtgctggcaggatgtgagggtgcaggtagagggacagggggccgcactgcaatcagcgttggcttcacct

SEQ ID NO: 22315 - DNA, 78 bp, Homo sapiens
tggcaggatgtgagggtgcaggtagagggacagggggccgcactgcaatcagcgttggcttcaccttcaggggcaagt

SEQ ID NO: 22316 - DNA, 75 bp, Homo sapiens
atgtgagggtgcaggtagagggacagggggccgcactgcaatcagcgttggcttcaccttcaggggcaagttggg

SEQ ID NO: 22317 - DNA, 75 bp, Homo sapiens
aggtagagggacagggggccgcactgcaatcagcgttggcttcaccttcaggggcaagttgggtcggcgagcagc

SEQ ID NO: 22318 - DNA, 77 bp, Homo sapiens
aatcagcgttggcttcaccttcaggggcaagttgggtcggcgagcagctcgccgcatttccagatgggtcagagcct

SEQ ID NO: 22319 - DNA, 75 bp, Homo sapiens
gggcaagttgggtcggcgagcagctcgccgcatttccagatgggtcagagccttccgtagggccctggccagaaa

SEQ ID NO: 22320 - DNA, 73 bp, Homo sapiens
accagcctggactgtccctctcagcccctcccatggtagacgccttacctggtatcctttgtggccacaaaca

SEQ ID NO: 22321 - DNA, 72 bp, Homo sapiens
actgtccctctcagcccctcccatggtagacgccttacctggtatcctttgtggccacaaacaccacaggat

SEQ ID NO: 22322 - DNA, 73 bp, Homo sapiens
agcccctcccatggtagacgccttacctggtatcctttgtggccacaaacaccacaggattgggggcatcagc

SEQ ID NO: 22323 - DNA, 72 bp, Homo sapiens
atggtagacgccttacctggtatcctttgtggccacaaacaccacaggattgggggcatcagctgggtttag

SEQ ID NO: 22324 - DNA, 72 bp, Homo sapiens
acgccttacctggtatcctttgtggccacaaacaccacaggattgggggcatcagctgggtttagtttctga

SEQ ID NO: 22325 - DNA, 76 bp, Homo sapiens
ctggtatcctttgtggccacaaacaccacaggattgggggcatcagctgggtttagtttctgacgcttggctgctg

SEQ ID NO: 22326 - DNA, 80 bp, Homo sapiens
tttgtggccacaaacaccacaggattgggggcatcagctgggtttagtttctgacgcttggctgctggctgtgagcttga

SEQ ID NO: 22327 - DNA, 77 bp, Homo sapiens
aaacaccacaggattgggggcatcagctgggtttagtttctgacgcttggctgctggctgtgagcttgaacgaatcc

SEQ ID NO: 22328 - DNA, 79 bp, Homo sapiens
aggattgggggcatcagctgggtttagtttctgacgcttggctgctggctgtgagcttgaacgaatccctgaagccaga

SEQ ID NO: 22329 - DNA, 79 bp, Homo sapiens
atcagctgggtttagtttctgacgcttggctgctggctgtgagcttgaacgaatccctgaagccagaggccttccattg

SEQ ID NO: 22330 - DNA, 79 bp, Homo sapiens
gtttagtttctgacgcttggctgctggctgtgagcttgaacgaatccctgaagccagaggccttccattggcagagaaa

SEQ ID NO: 22331 - DNA, 78 bp, Homo sapiens
ctgacgcttggctgctggctgtgagcttgaacgaatccctgaagccagaggccttccattggcagagaaaggaacccc

SEQ ID NO: 22332 - DNA, 78 bp, Homo sapiens
tggctgtgagcttgaacgaatccctgaagccagaggccttccattggcagagaaaggaacccctgcccctgccatctg

SEQ ID NO: 22333 - DNA, 73 bp, Homo sapiens
cttgaacgaatccctgaagccagaggccttccattggcagagaaaggaacccctgcccctgccatctggaaaa

SEQ ID NO: 22334 - DNA, 71 bp, Homo sapiens
acgaatccctgaagccagaggccttccattggcagagaaaggaacccctgcccctgccatctggaaaaggg

SEQ ID NO: 22335 - DNA, 72 bp, Homo sapiens
ttccattggcagagaaaggaacccctgcccctgccatctggaaaaggggtaggatggcacaatgagggaagg

SEQ ID NO: 22336 - DNA, 72 bp, Homo sapiens
aaagcccacccaactcaatctggcccacccctttctgtcaactcacagtctcataggcccgtttcaccataa

SEQ ID NO: 22337 - DNA, 73 bp, Homo sapiens
ccacccaactcaatctggcccacccctttctgtcaactcacagtctcataggcccgtttcaccataatgcccc

SEQ ID NO: 22338 - DNA, 71 bp, Homo sapiens
aatctggcccacccctttctgtcaactcacagtctcataggcccgtttcaccataatgccccccagtcccc

SEQ ID NO: 22339 - DNA, 71 bp, Homo sapiens
ccctttctgtcaactcacagtctcataggcccgtttcaccataatgccccccagtccccggttctgggaca

SEQ ID NO: 22340 - DNA, 73 bp, Homo sapiens
tgtcaactcacagtctcataggcccgtttcaccataatgccccccagtccccggttctgggacagctggtttc

SEQ ID NO: 22341 - DNA, 71 bp, Homo sapiens
agtctcataggcccgtttcaccataatgccccccagtccccggttctgggacagctggtttctgttgatcg

SEQ ID NO: 22342 - DNA, 70 bp, Homo sapiens
gtttcaccataatgccccccagtccccggttctgggacagctggtttctgttgatcggtgtcttggtacc

SEQ ID NO: 22343 - DNA, 69 bp, Homo sapiens
accataatgccccccagtccccggttctgggacagctggtttctgttgatcggtgtcttggtaccccga

SEQ ID NO: 22344 - DNA, 66 bp, Homo sapiens
agtccccggttctgggacagctggtttctgttgatcggtgtcttggtaccccgaggtgtttttggt

SEQ ID NO: 22345 - DNA, 67 bp, Homo sapiens
ccggttctgggacagctggtttctgttgatcggtgtcttggtaccccgaggtgtttttggtttcagg

SEQ ID NO: 22346 - DNA, 68 bp, Homo sapiens
ctggtttctgttgatcggtgtcttggtaccccgaggtgtttttggtttcaggggtgcctgggccactg

SEQ ID NO: 22347 - DNA, 68 bp, Homo sapiens
ttctgttgatcggtgtcttggtaccccgaggtgtttttggtttcaggggtgcctgggccactggaaaa

SEQ ID NO: 22348 - DNA, 65 bp, Homo sapiens
ggtgtcttggtaccccgaggtgtttttggtttcaggggtgcctgggccactggaaaaaaacagaa

SEQ ID NO: 22349 - DNA, 64 bp, Homo sapiens
ccgaggtgtttttggtttcaggggtgcctgggccactggaaaaaaacagaaaactttcgcacct

SEQ ID NO: 22350 - DNA, 75 bp, Homo sapiens
agggaaaggactgggagcctgatgccaacctcactggtccccatcccatacccagatctttgacgatagttgcca

SEQ ID NO: 22351 - DNA, 76 bp, Homo sapiens
aaggactgggagcctgatgccaacctcactggtccccatcccatacccagatctttgacgatagttgccaggggca

SEQ ID NO: 22352 - DNA, 79 bp, Homo sapiens
tgatgccaacctcactggtccccatcccatacccagatctttgacgatagttgccaggggcagccgcaccagagggtga

SEQ ID NO: 22353 - DNA, 78 bp, Homo sapiens
tcactggtccccatcccatacccagatctttgacgatagttgccaggggcagccgcaccagagggtgaatcttcaatg

SEQ ID NO: 22354 - DNA, 77 bp, Homo sapiens
cccatcccatacccagatctttgacgatagttgccaggggcagccgcaccagagggtgaatcttcaatggagtcttg

SEQ ID NO: 22355 - DNA, 77 bp, Homo sapiens
tacccagatctttgacgatagttgccaggggcagccgcaccagagggtgaatcttcaatggagtcttggcggcctta

SEQ ID NO: 22356 - DNA, 75 bp, Homo sapiens
atctttgacgatagttgccaggggcagccgcaccagagggtgaatcttcaatggagtcttggcggccttaggaag

SEQ ID NO: 22357 - DNA, 76 bp, Homo sapiens
atagttgccaggggcagccgcaccagagggtgaatcttcaatggagtcttggcggccttaggaagtcgaatggagc

SEQ ID NO: 22358 - DNA, 75 bp, Homo sapiens
agccgcaccagagggtgaatcttcaatggagtcttggcggccttaggaagtcgaatggagcctggagaacaaaga

SEQ ID NO: 22359 - DNA, 73 bp, Homo sapiens
accagagggtgaatcttcaatggagtcttggcggccttaggaagtcgaatggagcctggagaacaaagaagaa

SEQ ID NO: 22360 - DNA, 73 bp, Homo sapiens
aatcttcaatggagtcttggcggccttaggaagtcgaatggagcctggagaacaaagaagaaagcttctgaag

SEQ ID NO: 22361 - DNA, 72 bp, Homo sapiens
agtcttggcggccttaggaagtcgaatggagcctggagaacaaagaagaaagcttctgaagggcttcaccat

SEQ ID NO: 22362 - DNA, 77 bp, Homo sapiens
agagcaatccgaaacccaccaccagtcccaccactccctgcccttacactctgctttgatggcattggcattgatag

SEQ ID NO: 22363 - DNA, 78 bp, Homo sapiens
atccgaaacccaccaccagtcccaccactccctgcccttacactctgctttgatggcattggcattgataggagcata

SEQ ID NO: 22364 - DNA, 77 bp, Homo sapiens
accaccagtcccaccactccctgcccttacactctgctttgatggcattggcattgataggagcataaggccgtcgg

SEQ ID NO: 22365 - DNA, 76 bp, Homo sapiens
accactccctgcccttacactctgctttgatggcattggcattgataggagcataaggccgtcgggcggccctcct

SEQ ID NO: 22366 - DNA, 77 bp, Homo sapiens
ccttacactctgctttgatggcattggcattgataggagcataaggccgtcgggcggccctccttggctgtaatagg

SEQ ID NO: 22367 - DNA, 79 bp, Homo sapiens
actctgctttgatggcattggcattgataggagcataaggccgtcgggcggccctccttggctgtaataggtccctgca

SEQ ID NO: 22368 - DNA, 81 bp, Homo sapiens
gcattggcattgataggagcataaggccgtcgggcggccctccttggctgtaataggtccctgcacatgcgtctggcaaga

SEQ ID NO: 22369 - DNA, 76 bp, Homo sapiens
attgataggagcataaggccgtcgggcggccctccttggctgtaataggtccctgcacatgcgtctggcaagacgg

SEQ ID NO: 22370 - DNA, 74 bp, Homo sapiens
ataaggccgtcgggcggccctccttggctgtaataggtccctgcacatgcgtctggcaagacgggtcagctttg

SEQ ID NO: 22371 - DNA, 76 bp, Homo sapiens
cgtcgggcggccctccttggctgtaataggtccctgcacatgcgtctggcaagacgggtcagctttgtggtctgaa

SEQ ID NO: 22372 - DNA, 78 bp, Homo sapiens
tccttggctgtaataggtccctgcacatgcgtctggcaagacgggtcagctttgtggtctgaagcaggaaagtttgtc

SEQ ID NO: 22373 - DNA, 78 bp, Homo sapiens
tgtaataggtccctgcacatgcgtctggcaagacgggtcagctttgtggtctgaagcaggaaagtttgtctgttctta

SEQ ID NO: 22374 - DNA, 79 bp, Homo sapiens
tccctgcacatgcgtctggcaagacgggtcagctttgtggtctgaagcaggaaagtttgtctgttcttagccagtagct

SEQ ID NO: 22375 - DNA, 75 bp, Homo sapiens
gtctggcaagacgggtcagctttgtggtctgaagcaggaaagtttgtctgttcttagccagtagcttggccctgt

SEQ ID NO: 22376 - DNA, 74 bp, Homo sapiens
aagacgggtcagctttgtggtctgaagcaggaaagtttgtctgttcttagccagtagcttggccctgttggcgc

SEQ ID NO: 22377 - DNA, 75 bp, Homo sapiens
tttgtggtctgaagcaggaaagtttgtctgttcttagccagtagcttggccctgttggcgctggttgtgtaagga

SEQ ID NO: 22378 - DNA, 75 bp, Homo sapiens
tgaagcaggaaagtttgtctgttcttagccagtagcttggccctgttggcgctggttgtgtaaggagagagactt

SEQ ID NO: 22379 - DNA, 75 bp, Homo sapiens
aaagtttgtctgttcttagccagtagcttggccctgttggcgctggttgtgtaaggagagagactttgagcttca

SEQ ID NO: 22380 - DNA, 78 bp, Homo sapiens
ttcttagccagtagcttggccctgttggcgctggttgtgtaaggagagagactttgagcttcaggtctggataaatga

SEQ ID NO: 22381 - DNA, 76 bp, Homo sapiens
agccagtagcttggccctgttggcgctggttgtgtaaggagagagactttgagcttcaggtctggataaatgaccc

SEQ ID NO: 22382 - DNA, 76 bp, Homo sapiens
ttggccctgttggcgctggttgtgtaaggagagagactttgagcttcaggtctggataaatgaccccttgagtgtg

SEQ ID NO: 22383 - DNA, 76 bp, Homo sapiens
ctggttgtgtaaggagagagactttgagcttcaggtctggataaatgaccccttgagtgtggctcctagaagaaga

SEQ ID NO: 22384 - DNA, 77 bp, Homo sapiens
taaggagagagactttgagcttcaggtctggataaatgaccccttgagtgtggctcctagaagaagagcataggaaa

SEQ ID NO: 22385 - DNA, 72 bp, Homo sapiens
aatatgcttactgctctcccctgcttttcttcccactgatccttaccgtggtgccccgagtggccccctcaa

SEQ ID NO: 22386 - DNA, 72 bp, Homo sapiens
ttactgctctcccctgcttttcttcccactgatccttaccgtggtgccccgagtggccccctcaagctgagt

SEQ ID NO: 22387 - DNA, 71 bp, Homo sapiens
ctgcttttcttcccactgatccttaccgtggtgccccgagtggccccctcaagctgagttggggtcttcag

SEQ ID NO: 22388 - DNA, 70 bp, Homo sapiens
tttcttcccactgatccttaccgtggtgccccgagtggccccctcaagctgagttggggtcttcagtccc

SEQ ID NO: 22389 - DNA, 71 bp, Homo sapiens
tgatccttaccgtggtgccccgagtggccccctcaagctgagttggggtcttcagtcccccatacttcttc

SEQ ID NO: 22390 - DNA, 73 bp, Homo sapiens
tggtgccccgagtggccccctcaagctgagttggggtcttcagtcccccatacttcttccagtagatccaaca

SEQ ID NO: 22391 - DNA, 74 bp, Homo sapiens
agtggccccctcaagctgagttggggtcttcagtcccccatacttcttccagtagatccaacaggaagcacaga

SEQ ID NO: 22392 - DNA, 77 bp, Homo sapiens
aagctgagttggggtcttcagtcccccatacttcttccagtagatccaacaggaagcacagaggcggcactgcatgt

SEQ ID NO: 22393 - DNA, 76 bp, Homo sapiens
cttcagtcccccatacttcttccagtagatccaacaggaagcacagaggcggcactgcatgttaggtgggccccag

SEQ ID NO: 22394 - DNA, 81 bp, Homo sapiens
atacttcttccagtagatccaacaggaagcacagaggcggcactgcatgttaggtgggccccaggcataccactgagcaga

SEQ ID NO: 22395 - DNA, 83 bp, Homo sapiens
agtagatccaacaggaagcacagaggcggcactgcatgttaggtgggccccaggcataccactgagcagactgtgtggctgta

SEQ ID NO: 22396 - DNA, 82 bp, Homo sapiens
aggaagcacagaggcggcactgcatgttaggtgggccccaggcataccactgagcagactgtgtggctgtagagtacggaga

SEQ ID NO: 22397 - DNA, 80 bp, Homo sapiens
acagaggcggcactgcatgttaggtgggccccaggcataccactgagcagactgtgtggctgtagagtacggagaggagg

SEQ ID NO: 22398 - DNA, 77 bp, Homo sapiens
actgcatgttaggtgggccccaggcataccactgagcagactgtgtggctgtagagtacggagaggagggggacagg

SEQ ID NO: 22399 - DNA, 75 bp, Homo sapiens
ttaggtgggccccaggcataccactgagcagactgtgtggctgtagagtacggagaggagggggacagggaagaa

SEQ ID NO: 22400 - DNA, 75 bp, Homo sapiens
acagcaggccttccacccatccccaccatcccagtgcccccgtaactcactgtggcaactctcacaagtcaggcc

SEQ ID NO: 22401 - DNA, 75 bp, Homo sapiens
cacccatccccaccatcccagtgcccccgtaactcactgtggcaactctcacaagtcaggcccttctgaaatcca

SEQ ID NO: 22402 - DNA, 76 bp, Homo sapiens
ccaccatcccagtgcccccgtaactcactgtggcaactctcacaagtcaggcccttctgaaatccagccccattca

SEQ ID NO: 22403 - DNA, 75 bp, Homo sapiens
agtgcccccgtaactcactgtggcaactctcacaagtcaggcccttctgaaatccagccccattcatgccaggtt

SEQ ID NO: 22404 - DNA, 78 bp, Homo sapiens
taactcactgtggcaactctcacaagtcaggcccttctgaaatccagccccattcatgccaggttttgaacccacaga

SEQ ID NO: 22405 - DNA, 77 bp, Homo sapiens
actgtggcaactctcacaagtcaggcccttctgaaatccagccccattcatgccaggttttgaacccacagaaatga

SEQ ID NO: 22406 - DNA, 76 bp, Homo sapiens
ctctcacaagtcaggcccttctgaaatccagccccattcatgccaggttttgaacccacagaaatgatctggttag

SEQ ID NO: 22407 - DNA, 72 bp, Homo sapiens
cccttctgaaatccagccccattcatgccaggttttgaacccacagaaatgatctggttagggtttggctta

SEQ ID NO: 22408 - DNA, 72 bp, Homo sapiens
aaatccagccccattcatgccaggttttgaacccacagaaatgatctggttagggtttggcttagtgctaac

SEQ ID NO: 22409 - DNA, 71 bp, Homo sapiens
attcatgccaggttttgaacccacagaaatgatctggttagggtttggcttagtgctaacggggaaggcga

SEQ ID NO: 22410 - DNA, 68 bp, Homo sapiens
aggttttgaacccacagaaatgatctggttagggtttggcttagtgctaacggggaaggcgaggagaa

SEQ ID NO: 22411 - DNA, 67 bp, Homo sapiens
aacccacagaaatgatctggttagggtttggcttagtgctaacggggaaggcgaggagaagggaaaa

SEQ ID NO: 22412 - DNA, 67 bp, Homo sapiens
actgaggaaggcacaagttaggggaagggaaggaaaacactctggtctcccctacccaccacactta

SEQ ID NO: 22413 - DNA, 65 bp, Homo sapiens
aaggcacaagttaggggaagggaaggaaaacactctggtctcccctacccaccacacttactagg

SEQ ID NO: 22414 - DNA, 67 bp, Homo sapiens
gggaagggaaggaaaacactctggtctcccctacccaccacacttactaggtgggaatgtagacctg

SEQ ID NO: 22415 - DNA, 67 bp, Homo sapiens
aaggaaaacactctggtctcccctacccaccacacttactaggtgggaatgtagacctgtttcagtt

SEQ ID NO: 22416 - DNA, 74 bp, Homo sapiens
acactctggtctcccctacccaccacacttactaggtgggaatgtagacctgtttcagtttgctgtctgcttca

SEQ ID NO: 22417 - DNA, 74 bp, Homo sapiens
ctacccaccacacttactaggtgggaatgtagacctgtttcagtttgctgtctgcttcagcagctttcaacctt

SEQ ID NO: 22418 - DNA, 75 bp, Homo sapiens
accacacttactaggtgggaatgtagacctgtttcagtttgctgtctgcttcagcagctttcaaccttttctgta

SEQ ID NO: 22419 - DNA, 73 bp, Homo sapiens
gtgggaatgtagacctgtttcagtttgctgtctgcttcagcagctttcaaccttttctgtaagaaggtaaaaa

SEQ ID NO: 22420 - DNA, 72 bp, Homo sapiens
aatgtagacctgtttcagtttgctgtctgcttcagcagctttcaaccttttctgtaagaaggtaaaaagaaa

SEQ ID NO: 22421 - DNA, 75 bp, Homo sapiens
tgtttcagtttgctgtctgcttcagcagctttcaaccttttctgtaagaaggtaaaaagaaagagaaggatcaga

SEQ ID NO: 22422 - DNA, 77 bp, Homo sapiens
tgtctgcttcagcagctttcaaccttttctgtaagaaggtaaaaagaaagagaaggatcagagcctcatagcaggga

SEQ ID NO: 22423 - DNA, 81 bp, Homo sapiens
aagagaaggatcagagcctcatagcagggagaatgtcatcaacttcaaaggcagaggtcagcaggtagcctatggtccacc

SEQ ID NO: 22424 - DNA, 77 bp, Homo sapiens
atcaacttcaaaggcagaggtcagcaggtagcctatggtccaccctccccagcccagataatacctgctgaatatac

SEQ ID NO: 22425 - DNA, 74 bp, Homo sapiens
agaggtcagcaggtagcctatggtccaccctccccagcccagataatacctgctgaatataccggtctgtggtt

SEQ ID NO: 22426 - DNA, 73 bp, Homo sapiens
aggtagcctatggtccaccctccccagcccagataatacctgctgaatataccggtctgtggttttccacatg

SEQ ID NO: 22427 - DNA, 73 bp, Homo sapiens
tatggtccaccctccccagcccagataatacctgctgaatataccggtctgtggttttccacatgtaataaaa

SEQ ID NO: 22428 - DNA, 75 bp, Homo sapiens
ctccccagcccagataatacctgctgaatataccggtctgtggttttccacatgtaataaaactggactatgctg

SEQ ID NO: 22429 - DNA, 76 bp, Homo sapiens
agataatacctgctgaatataccggtctgtggttttccacatgtaataaaactggactatgctggcaagtgacttc

SEQ ID NO: 22430 - DNA, 75 bp, Homo sapiens
atacctgctgaatataccggtctgtggttttccacatgtaataaaactggactatgctggcaagtgacttccagg

SEQ ID NO: 22431 - DNA, 73 bp, Homo sapiens
aatataccggtctgtggttttccacatgtaataaaactggactatgctggcaagtgacttccagggtagctaa

SEQ ID NO: 22432 - DNA, 74 bp, Homo sapiens
tctgtggttttccacatgtaataaaactggactatgctggcaagtgacttccagggtagctaaggggggcagag

SEQ ID NO: 22433 - DNA, 74 bp, Homo sapiens
acatgtaataaaactggactatgctggcaagtgacttccagggtagctaaggggggcagagggaggaagaatga

SEQ ID NO: 22434 - DNA, 76 bp, Homo sapiens
ataaaactggactatgctggcaagtgacttccagggtagctaaggggggcagagggaggaagaatgagctggcatc

SEQ ID NO: 22435 - DNA, 76 bp, Homo sapiens
actatgctggcaagtgacttccagggtagctaaggggggcagagggaggaagaatgagctggcatctggccccagg

SEQ ID NO: 22436 - DNA, 78 bp, Homo sapiens
tcacctgtcatctctcccacttctcctcctagtgccatccacttacaaaatcctggcgaatatcattgaagtccttcc

SEQ ID NO: 22437 - DNA, 75 bp, Homo sapiens
atctctcccacttctcctcctagtgccatccacttacaaaatcctggcgaatatcattgaagtccttcccatact

SEQ ID NO: 22438 - DNA, 74 bp, Homo sapiens
acttctcctcctagtgccatccacttacaaaatcctggcgaatatcattgaagtccttcccatacttctctagg

SEQ ID NO: 22439 - DNA, 76 bp, Homo sapiens
tagtgccatccacttacaaaatcctggcgaatatcattgaagtccttcccatacttctctagggcctcctcaaata

SEQ ID NO: 22440 - DNA, 76 bp, Homo sapiens
atccacttacaaaatcctggcgaatatcattgaagtccttcccatacttctctagggcctcctcaaatagcatggc

SEQ ID NO: 22441 - DNA, 78 bp, Homo sapiens
aaaatcctggcgaatatcattgaagtccttcccatacttctctagggcctcctcaaatagcatggcctctgaggctga

SEQ ID NO: 22442 - DNA, 79 bp, Homo sapiens
aatatcattgaagtccttcccatacttctctagggcctcctcaaatagcatggcctctgaggctgaccattcctccatc

SEQ ID NO: 22443 - DNA, 79 bp, Homo sapiens
ttgaagtccttcccatacttctctagggcctcctcaaatagcatggcctctgaggctgaccattcctccatctcatccc

SEQ ID NO: 22444 - DNA, 81 bp, Homo sapiens
tcccatacttctctagggcctcctcaaatagcatggcctctgaggctgaccattcctccatctcatcccgacacagcaccg

SEQ ID NO: 22445 - DNA, 80 bp, Homo sapiens
tctagggcctcctcaaatagcatggcctctgaggctgaccattcctccatctcatcccgacacagcaccgggcctccctg

SEQ ID NO: 22446 - DNA, 79 bp, Homo sapiens
tcctcaaatagcatggcctctgaggctgaccattcctccatctcatcccgacacagcaccgggcctccctggggtacca

SEQ ID NO: 22447 - DNA, 76 bp, Homo sapiens
atggcctctgaggctgaccattcctccatctcatcccgacacagcaccgggcctccctggggtaccagggtcgaca

SEQ ID NO: 22448 - DNA, 74 bp, Homo sapiens
aggctgaccattcctccatctcatcccgacacagcaccgggcctccctggggtaccagggtcgacatggcctta

SEQ ID NO: 22449 - DNA, 74 bp, Homo sapiens
tcctccatctcatcccgacacagcaccgggcctccctggggtaccagggtcgacatggccttagccaggtcgta

SEQ ID NO: 22450 - DNA, 72 bp, Homo sapiens
tcatcccgacacagcaccgggcctccctggggtaccagggtcgacatggccttagccaggtcgtagccgttc

SEQ ID NO: 22451 - DNA, 70 bp, Homo sapiens
acagcaccgggcctccctggggtaccagggtcgacatggccttagccaggtcgtagccgttcctttgcaa

SEQ ID NO: 22452 - DNA, 73 bp, Homo sapiens
tccctggggtaccagggtcgacatggccttagccaggtcgtagccgttcctttgcaaggtatccatggcgtga

SEQ ID NO: 22453 - DNA, 73 bp, Homo sapiens
taccagggtcgacatggccttagccaggtcgtagccgttcctttgcaaggtatccatggcgtgaaactatggg

SEQ ID NO: 22454 - DNA, 74 bp, Homo sapiens
ggtcgacatggccttagccaggtcgtagccgttcctttgcaaggtatccatggcgtgaaactatggggaagatg

SEQ ID NO: 22455 - DNA, 76 bp, Homo sapiens
ttagccaggtcgtagccgttcctttgcaaggtatccatggcgtgaaactatggggaagatggagagcaactgagga

SEQ ID NO: 22456 - DNA, 75 bp, Homo sapiens
aagtccccagaaaacccagcctgcccaactacccaccaacttctgctcaccagagtgatatctcgggaggcagca

SEQ ID NO: 22457 - DNA, 82 bp, Homo sapiens
aaaacccagcctgcccaactacccaccaacttctgctcaccagagtgatatctcgggaggcagcagctgcactcatgtgcaa

SEQ ID NO: 22458 - DNA, 86 bp, Homo sapiens
ccaactacccaccaacttctgctcaccagagtgatatctcgggaggcagcagctgcactcatgtgcaagcttggctgccgaatgga

SEQ ID NO: 22459 - DNA, 90 bp, Homo sapiens
accaacttctgctcaccagagtgatatctcgggaggcagcagctgcactcatgtgcaagcttggctgccgaatggagctgctacaatcta

SEQ ID NO: 22460 - DNA, 93 bp, Homo sapiens
tgctcaccagagtgatatctcgggaggcagcagctgcactcatgtgcaagcttggctgccgaatggagctgctacaatctagggctcttgcaa

SEQ ID NO: 22461 - DNA, 87 bp, Homo sapiens
agtgatatctcgggaggcagcagctgcactcatgtgcaagcttggctgccgaatggagctgctacaatctagggctcttgcaaaggt

SEQ ID NO: 22462 - DNA, 86 bp, Homo sapiens
atctcgggaggcagcagctgcactcatgtgcaagcttggctgccgaatggagctgctacaatctagggctcttgcaaaggttccca

SEQ ID NO: 22463 - DNA, 84 bp, Homo sapiens
agctgcactcatgtgcaagcttggctgccgaatggagctgctacaatctagggctcttgcaaaggttcccacagctctaaggga

SEQ ID NO: 22464 - DNA, 79 bp, Homo sapiens
atgtgcaagcttggctgccgaatggagctgctacaatctagggctcttgcaaaggttcccacagctctaagggagaaat

SEQ ID NO: 22465 - DNA, 78 bp, Homo sapiens
aagcttggctgccgaatggagctgctacaatctagggctcttgcaaaggttcccacagctctaagggagaaattgaga

SEQ ID NO: 22466 - DNA, 75 bp, Homo sapiens
ccgaatggagctgctacaatctagggctcttgcaaaggttcccacagctctaagggagaaattgagaagtcaaaa

SEQ ID NO: 22467 - DNA, 72 bp, Homo sapiens
ctacaatctagggctcttgcaaaggttcccacagctctaagggagaaattgagaagtcaaaagcgaaagaaa

SEQ ID NO: 22468 - DNA, 69 bp, Homo sapiens
acaatgtccacacctcccccagcccatcttccctatccacccacccctcaccgggccaccacaagaaac

SEQ ID NO: 22469 - DNA, 70 bp, Homo sapiens
tcccccagcccatcttccctatccacccacccctcaccgggccaccacaagaaactggtcgatctgccgg

SEQ ID NO: 22470 - DNA, 71 bp, Homo sapiens
atcttccctatccacccacccctcaccgggccaccacaagaaactggtcgatctgccggtctgtgagaggg

SEQ ID NO: 22471 - DNA, 72 bp, Homo sapiens
tatccacccacccctcaccgggccaccacaagaaactggtcgatctgccggtctgtgagagggttgtctggg

SEQ ID NO: 22472 - DNA, 73 bp, Homo sapiens
cctcaccgggccaccacaagaaactggtcgatctgccggtctgtgagagggttgtctgggtcccagaccttca

SEQ ID NO: 22473 - DNA, 75 bp, Homo sapiens
gggccaccacaagaaactggtcgatctgccggtctgtgagagggttgtctgggtcccagaccttcatctccatct

SEQ ID NO: 22474 - DNA, 76 bp, Homo sapiens
acaagaaactggtcgatctgccggtctgtgagagggttgtctgggtcccagaccttcatctccatcttctgctggt

SEQ ID NO: 22475 - DNA, 79 bp, Homo sapiens
atctgccggtctgtgagagggttgtctgggtcccagaccttcatctccatcttctgctggttccgattatcagattctc

SEQ ID NO: 22476 - DNA, 77 bp, Homo sapiens
ccggtctgtgagagggttgtctgggtcccagaccttcatctccatcttctgctggttccgattatcagattctcctg

SEQ ID NO: 22477 - DNA, 75 bp, Homo sapiens
gttgtctgggtcccagaccttcatctccatcttctgctggttccgattatcagattctcctggggaaaagaacaa

SEQ ID NO: 22478 - DNA, 78 bp, Homo sapiens
tgggtcccagaccttcatctccatcttctgctggttccgattatcagattctcctggggaaaagaacaatggcatcaa

SEQ ID NO: 22479 - DNA, 77 bp, Homo sapiens
accttcatctccatcttctgctggttccgattatcagattctcctggggaaaagaacaatggcatcaacagggagag

SEQ ID NO: 22480 - DNA, 75 bp, Homo sapiens
cttggaattagacaacctggtagccgtacagtcttgtcctgttgcttaccctctactaggcgatctgggatctca

SEQ ID NO: 22481 - DNA, 74 bp, Homo sapiens
acaacctggtagccgtacagtcttgtcctgttgcttaccctctactaggcgatctgggatctcagcttggtatt

SEQ ID NO: 22482 - DNA, 76 bp, Homo sapiens
ccgtacagtcttgtcctgttgcttaccctctactaggcgatctgggatctcagcttggtatttgcaaccaactcta

SEQ ID NO: 22483 - DNA, 78 bp, Homo sapiens
ttgtcctgttgcttaccctctactaggcgatctgggatctcagcttggtatttgcaaccaactctaatctcgccctga

SEQ ID NO: 22484 - DNA, 80 bp, Homo sapiens
ttgcttaccctctactaggcgatctgggatctcagcttggtatttgcaaccaactctaatctcgccctgatcagcgagaa

SEQ ID NO: 22485 - DNA, 80 bp, Homo sapiens
cctctactaggcgatctgggatctcagcttggtatttgcaaccaactctaatctcgccctgatcagcgagaagtgtcttc

SEQ ID NO: 22486 - DNA, 80 bp, Homo sapiens
tctgggatctcagcttggtatttgcaaccaactctaatctcgccctgatcagcgagaagtgtcttctgcacggggtcaaa

SEQ ID NO: 22487 - DNA, 79 bp, Homo sapiens
atctcagcttggtatttgcaaccaactctaatctcgccctgatcagcgagaagtgtcttctgcacggggtcaaacacca

SEQ ID NO: 22488 - DNA, 76 bp, Homo sapiens
atttgcaaccaactctaatctcgccctgatcagcgagaagtgtcttctgcacggggtcaaacaccagtgagtaaaa

SEQ ID NO: 22489 - DNA, 73 bp, Homo sapiens
aaccaactctaatctcgccctgatcagcgagaagtgtcttctgcacggggtcaaacaccagtgagtaaaaaaa

SEQ ID NO: 22490 - DNA, 75 bp, Homo sapiens
aatctcgccctgatcagcgagaagtgtcttctgcacggggtcaaacaccagtgagtaaaaaaagcagtcctggaa

SEQ ID NO: 22491 - DNA, 74 bp, Homo sapiens
atcagcgagaagtgtcttctgcacggggtcaaacaccagtgagtaaaaaaagcagtcctggaattggggagaga

SEQ ID NO: 22492 - DNA, 71 bp, Homo sapiens
agtgtcttctgcacggggtcaaacaccagtgagtaaaaaaagcagtcctggaattggggagagacaaggta

SEQ ID NO: 22493 - DNA, 71 bp, Homo sapiens
ttccccctctcttttgcgggcaatacccattcccctcgctcttctctcaacatctctttctcacctccttt

SEQ ID NO: 22494 - DNA, 73 bp, Homo sapiens
ctctcttttgcgggcaatacccattcccctcgctcttctctcaacatctctttctcacctccttttccaggta

SEQ ID NO: 22495 - DNA, 76 bp, Homo sapiens
caatacccattcccctcgctcttctctcaacatctctttctcacctccttttccaggtactggctcaagatatctg

SEQ ID NO: 22496 - DNA, 78 bp, Homo sapiens
attcccctcgctcttctctcaacatctctttctcacctccttttccaggtactggctcaagatatctgtctcattcaa

SEQ ID NO: 22497 - DNA, 82 bp, Homo sapiens
tcttctctcaacatctctttctcacctccttttccaggtactggctcaagatatctgtctcattcaagagggtcacactgca

SEQ ID NO: 22498 - DNA, 78 bp, Homo sapiens
aacatctctttctcacctccttttccaggtactggctcaagatatctgtctcattcaagagggtcacactgcatttcc

SEQ ID NO: 22499 - DNA, 77 bp, Homo sapiens
tttctcacctccttttccaggtactggctcaagatatctgtctcattcaagagggtcacactgcatttccccctata

SEQ ID NO: 22500 - DNA, 78 bp, Homo sapiens
cttttccaggtactggctcaagatatctgtctcattcaagagggtcacactgcatttccccctataggagagagattg

SEQ ID NO: 22501 - DNA, 77 bp, Homo sapiens
ggtactggctcaagatatctgtctcattcaagagggtcacactgcatttccccctataggagagagattggaaaacc

SEQ ID NO: 22502 - DNA, 75 bp, Homo sapiens
aagatatctgtctcattcaagagggtcacactgcatttccccctataggagagagattggaaaaccccggtgagc

SEQ ID NO: 22503 - DNA, 74 bp, Homo sapiens
tctcattcaagagggtcacactgcatttccccctataggagagagattggaaaaccccggtgagccccactctc

SEQ ID NO: 22504 - DNA, 70 bp, Homo sapiens
agagggtcacactgcatttccccctataggagagagattggaaaaccccggtgagccccactctccctcc

SEQ ID NO: 22505 - DNA, 77 bp, Homo sapiens
ttctacgtaagtgcacgcaggctatgctggccccagttgtcctgtaccgtatgtgggtggctggtaatgattcaaat

SEQ ID NO: 22506 - DNA, 79 bp, Homo sapiens
taagtgcacgcaggctatgctggccccagttgtcctgtaccgtatgtgggtggctggtaatgattcaaattgccgagaa

SEQ ID NO: 22507 - DNA, 73 bp, Homo sapiens
ctatgctggccccagttgtcctgtaccgtatgtgggtggctggtaatgattcaaattgccgagaaagaaaaag

SEQ ID NO: 22508 - DNA, 69 bp, Homo sapiens
cccagttgtcctgtaccgtatgtgggtggctggtaatgattcaaattgccgagaaagaaaaagttcccg

SEQ ID NO: 22509 - DNA, 72 bp, Homo sapiens
ttgtcctgtaccgtatgtgggtggctggtaatgattcaaattgccgagaaagaaaaagttcccggtgcttca

SEQ ID NO: 22510 - DNA, 79 bp, Homo sapiens
tatgtgggtggctggtaatgattcaaattgccgagaaagaaaaagttcccggtgcttcagttgatggcgctgctgctca

SEQ ID NO: 22511 - DNA, 78 bp, Homo sapiens
tggctggtaatgattcaaattgccgagaaagaaaaagttcccggtgcttcagttgatggcgctgctgctcagacaccc

SEQ ID NO: 22512 - DNA, 76 bp, Homo sapiens
attcaaattgccgagaaagaaaaagttcccggtgcttcagttgatggcgctgctgctcagacacccctggctgctt

SEQ ID NO: 22513 - DNA, 78 bp, Homo sapiens
gagaaagaaaaagttcccggtgcttcagttgatggcgctgctgctcagacacccctggctgctttgattcctcttcaa

SEQ ID NO: 22514 - DNA, 77 bp, Homo sapiens
agaaaaagttcccggtgcttcagttgatggcgctgctgctcagacacccctggctgctttgattcctcttcaaactc

SEQ ID NO: 22515 - DNA, 80 bp, Homo sapiens
gtgcttcagttgatggcgctgctgctcagacacccctggctgctttgattcctcttcaaactcccctgggagattaaaga

SEQ ID NO: 22516 - DNA, 77 bp, Homo sapiens
agttgatggcgctgctgctcagacacccctggctgctttgattcctcttcaaactcccctgggagattaaagaggaa

SEQ ID NO: 22517 - DNA, 72 bp, Homo sapiens
ctgctcagacacccctggctgctttgattcctcttcaaactcccctgggagattaaagaggaagaaaccaag

SEQ ID NO: 22518 - DNA, 77 bp, Homo sapiens
aggcctcagatcatgggtaggagaaaaagaaagggaggaagatactcactggcattactatcagccaggctgttgag

SEQ ID NO: 22519 - DNA, 77 bp, Homo sapiens
tcatgggtaggagaaaaagaaagggaggaagatactcactggcattactatcagccaggctgttgaggctactagaa

SEQ ID NO: 22520 - DNA, 76 bp, Homo sapiens
taggagaaaaagaaagggaggaagatactcactggcattactatcagccaggctgttgaggctactagaaatgtcc

SEQ ID NO: 22521 - DNA, 76 bp, Homo sapiens
aagggaggaagatactcactggcattactatcagccaggctgttgaggctactagaaatgtccctgcgccggaaaa

SEQ ID NO: 22522 - DNA, 79 bp, Homo sapiens
aggaagatactcactggcattactatcagccaggctgttgaggctactagaaatgtccctgcgccggaaaagacagaca

SEQ ID NO: 22523 - DNA, 76 bp, Homo sapiens
actggcattactatcagccaggctgttgaggctactagaaatgtccctgcgccggaaaagacagacaacctttgcc

SEQ ID NO: 22524 - DNA, 76 bp, Homo sapiens
tactatcagccaggctgttgaggctactagaaatgtccctgcgccggaaaagacagacaacctttgcctccacatt

SEQ ID NO: 22525 - DNA, 76 bp, Homo sapiens
tgttgaggctactagaaatgtccctgcgccggaaaagacagacaacctttgcctccacatttccatttgcagtcta

SEQ ID NO: 22526 - DNA, 73 bp, Homo sapiens
aggctactagaaatgtccctgcgccggaaaagacagacaacctttgcctccacatttccatttgcagtctaag

SEQ ID NO: 22527 - DNA, 71 bp, Homo sapiens
aaatgtccctgcgccggaaaagacagacaacctttgcctccacatttccatttgcagtctaaggggaggaa

SEQ ID NO: 22528 - DNA, 67 bp, Homo sapiens
ccggaaaagacagacaacctttgcctccacatttccatttgcagtctaaggggaggaaaaaaacaaa

SEQ ID NO: 22529 - DNA, 72 bp, Homo sapiens
accagaagttagaaacctcagaagagaccactgcgggagggagggagagggattctgctccactcaccttgt

SEQ ID NO: 22530 - DNA, 76 bp, Homo sapiens
agaaacctcagaagagaccactgcgggagggagggagagggattctgctccactcaccttgttgagctcctcaatc

SEQ ID NO: 22531 - DNA, 75 bp, Homo sapiens
aagagaccactgcgggagggagggagagggattctgctccactcaccttgttgagctcctcaatccgtctaacca

SEQ ID NO: 22532 - DNA, 75 bp, Homo sapiens
ggagggagggagagggattctgctccactcaccttgttgagctcctcaatccgtctaaccaggtaaggattgctg

SEQ ID NO: 22533 - DNA, 77 bp, Homo sapiens
agagggattctgctccactcaccttgttgagctcctcaatccgtctaaccaggtaaggattgctggaagagttctca

SEQ ID NO: 22534 - DNA, 76 bp, Homo sapiens
attctgctccactcaccttgttgagctcctcaatccgtctaaccaggtaaggattgctggaagagttctcaaaata

SEQ ID NO: 22535 - DNA, 73 bp, Homo sapiens
accttgttgagctcctcaatccgtctaaccaggtaaggattgctggaagagttctcaaaatagacgtaatctg

SEQ ID NO: 22536 - DNA, 72 bp, Homo sapiens
agctcctcaatccgtctaaccaggtaaggattgctggaagagttctcaaaatagacgtaatctgtaagggaa

SEQ ID NO: 22537 - DNA, 69 bp, Homo sapiens
aatccgtctaaccaggtaaggattgctggaagagttctcaaaatagacgtaatctgtaagggaagggag

SEQ ID NO: 22538 - DNA, 69 bp, Homo sapiens
taaccaggtaaggattgctggaagagttctcaaaatagacgtaatctgtaagggaagggaggggggaga

SEQ ID NO: 22539 - DNA, 71 bp, Homo sapiens
attgctggaagagttctcaaaatagacgtaatctgtaagggaagggaggggggagaaccacgaagatcaga

SEQ ID NO: 22540 - DNA, 70 bp, Homo sapiens
aagagttctcaaaatagacgtaatctgtaagggaagggaggggggagaaccacgaagatcagaggagatg

SEQ ID NO: 22541 - DNA, 72 bp, Homo sapiens
cccagtcgcggcgaagtaattgtccgctctagcgcagggcccctaccttttcgaatcgaggcgcacaataac

SEQ ID NO: 22542 - DNA, 73 bp, Homo sapiens
gcgaagtaattgtccgctctagcgcagggcccctaccttttcgaatcgaggcgcacaataacgcctgggaaga

SEQ ID NO: 22543 - DNA, 72 bp, Homo sapiens
gtaattgtccgctctagcgcagggcccctaccttttcgaatcgaggcgcacaataacgcctgggaagaggaa

SEQ ID NO: 22544 - DNA, 69 bp, Homo sapiens
ctctagcgcagggcccctaccttttcgaatcgaggcgcacaataacgcctgggaagaggaaacctccgg

SEQ ID NO: 22545 - DNA, 67 bp, Homo sapiens
agggcccctaccttttcgaatcgaggcgcacaataacgcctgggaagaggaaacctccgggcggctc

SEQ ID NO: 22546 - DNA, 69 bp, Homo sapiens
ttttcgaatcgaggcgcacaataacgcctgggaagaggaaacctccgggcggctcccccgcggtggcaa

SEQ ID NO: 22547 - DNA, 70 bp, Homo sapiens
tcgaggcgcacaataacgcctgggaagaggaaacctccgggcggctcccccgcggtggcaaagccgtcgc

SEQ ID NO: 22548 - DNA, 66 bp, Homo sapiens
aataacgcctgggaagaggaaacctccgggcggctcccccgcggtggcaaagccgtcgccccagcc

SEQ ID NO: 22549 - DNA, 65 bp, Homo sapiens
aagaggaaacctccgggcggctcccccgcggtggcaaagccgtcgccccagcccctcgcgttccc

SEQ ID NO: 22550 - DNA, 65 bp, Homo sapiens
aaacctccgggcggctcccccgcggtggcaaagccgtcgccccagcccctcgcgttccctcccta

SEQ ID NO: 22551 - DNA, 69 bp, Homo sapiens
tcccccgcggtggcaaagccgtcgccccagcccctcgcgttccctccctaccctgtcagctccttcgga

SEQ ID NO: 22552 - DNA, 66 bp, Homo sapiens
aagccgtcgccccagcccctcgcgttccctccctaccctgtcagctccttcggaaccggttccgaa

SEQ ID NO: 22553 - DNA, 67 bp, Homo sapiens
agcccctcgcgttccctccctaccctgtcagctccttcggaaccggttccgaaggccactccgtgcc

SEQ ID NO: 22554 - DNA, 65 bp, Homo sapiens
cgcgttccctccctaccctgtcagctccttcggaaccggttccgaaggccactccgtgccccggg

SEQ ID NO: 22555 - DNA, 68 bp, Homo sapiens
cctaccctgtcagctccttcggaaccggttccgaaggccactccgtgccccggggagcccctgacgca

SEQ ID NO: 22556 - DNA, 68 bp, Homo sapiens
tcagctccttcggaaccggttccgaaggccactccgtgccccggggagcccctgacgcagccccgaaa

SEQ ID NO: 22557 - DNA, 65 bp, Homo sapiens
aaccggttccgaaggccactccgtgccccggggagcccctgacgcagccccgaaagtgccgtcgg

SEQ ID NO: 22558 - DNA, 70 bp, Homo sapiens
aaggccactccgtgccccggggagcccctgacgcagccccgaaagtgccgtcggggctgcccgcagcttc

SEQ ID NO: 22559 - DNA, 71 bp, Homo sapiens
actccgtgccccggggagcccctgacgcagccccgaaagtgccgtcggggctgcccgcagcttctctctgg

SEQ ID NO: 22560 - DNA, 75 bp, Homo sapiens
gggagcccctgacgcagccccgaaagtgccgtcggggctgcccgcagcttctctctgggagtctcggagccctgc

SEQ ID NO: 22561 - DNA, 76 bp, Homo sapiens
tgacgcagccccgaaagtgccgtcggggctgcccgcagcttctctctgggagtctcggagccctgccgcgtcgcgg

SEQ ID NO: 22562 - DNA, 72 bp, Homo sapiens
cccgaaagtgccgtcggggctgcccgcagcttctctctgggagtctcggagccctgccgcgtcgcggttccc

SEQ ID NO: 22563 - DNA, 75 bp, Homo sapiens
tcggggctgcccgcagcttctctctgggagtctcggagccctgccgcgtcgcggttccccgcaccctctctcctc

SEQ ID NO: 22564 - DNA, 73 bp, Homo sapiens
cgcagcttctctctgggagtctcggagccctgccgcgtcgcggttccccgcaccctctctcctcgtctcccgg

SEQ ID NO: 22565 - DNA, 71 bp, Homo sapiens
ttctctctgggagtctcggagccctgccgcgtcgcggttccccgcaccctctctcctcgtctcccggttcc

SEQ ID NO: 22566 - DNA, 67 bp, Homo sapiens
agtctcggagccctgccgcgtcgcggttccccgcaccctctctcctcgtctcccggttccggttccg

SEQ ID NO: 22567 - DNA, 68 bp, Homo sapiens
tcccgccccgggccccgtatccctgcgcccggtactcacctcccacccggtacatgttggccgccatg

SEQ ID NO: 22568 - DNA, 69 bp, Homo sapiens
cccgtatccctgcgcccggtactcacctcccacccggtacatgttggccgccatggccgttcccgccgc

SEQ ID NO: 22569 - DNA, 70 bp, Homo sapiens
atccctgcgcccggtactcacctcccacccggtacatgttggccgccatggccgttcccgccgccgcctc

SEQ ID NO: 22570 - DNA, 70 bp, Homo sapiens
tactcacctcccacccggtacatgttggccgccatggccgttcccgccgccgcctccggccgcacaaagg

SEQ ID NO: 22571 - DNA, 68 bp, Homo sapiens
tcccacccggtacatgttggccgccatggccgttcccgccgccgcctccggccgcacaaaggggtccg

SEQ ID NO: 22572 - DNA, 70 bp, Homo sapiens
gtacatgttggccgccatggccgttcccgccgccgcctccggccgcacaaaggggtccgggaggctcgcg

SEQ ID NO: 22573 - DNA, 68 bp, Homo sapiens
ccatggccgttcccgccgccgcctccggccgcacaaaggggtccgggaggctcgcgggggcagggctc

SEQ ID NO: 22574 - DNA, 70 bp, Homo sapiens
tcccgccgccgcctccggccgcacaaaggggtccgggaggctcgcgggggcagggctcggctcgaggcaa

SEQ ID NO: 22575 - DNA, 69 bp, Homo sapiens
cgccgcctccggccgcacaaaggggtccgggaggctcgcgggggcagggctcggctcgaggcaaagccc

SEQ ID NO: 22576 - DNA, 67 bp, Homo sapiens
ccgcacaaaggggtccgggaggctcgcgggggcagggctcggctcgaggcaaagccccgaacggtgg

SEQ ID NO: 22577 - DNA, 70 bp, Homo sapiens
ggtccgggaggctcgcgggggcagggctcggctcgaggcaaagccccgaacggtgggctgccgcttcgag

SEQ ID NO: 22578 - DNA, 72 bp, Homo sapiens
aggctcgcgggggcagggctcggctcgaggcaaagccccgaacggtgggctgccgcttcgagggagtctcac

SEQ ID NO: 22579 - DNA, 74 bp, Homo sapiens
cagggctcggctcgaggcaaagccccgaacggtgggctgccgcttcgagggagtctcactggggcccgcgcagc

SEQ ID NO: 22580 - DNA, 73 bp, Homo sapiens
ctcgaggcaaagccccgaacggtgggctgccgcttcgagggagtctcactggggcccgcgcagccggcacctc

SEQ ID NO: 22581 - DNA, 72 bp, Homo sapiens
aaagccccgaacggtgggctgccgcttcgagggagtctcactggggcccgcgcagccggcacctccgctgcc

SEQ ID NO: 22582 - DNA, 77 bp, Homo sapiens
ggtgggctgccgcttcgagggagtctcactggggcccgcgcagccggcacctccgctgcctcagccgtcgcggttca

SEQ ID NO: 22583 - DNA, 76 bp, Homo sapiens
ctgccgcttcgagggagtctcactggggcccgcgcagccggcacctccgctgcctcagccgtcgcggttcatcccg

SEQ ID NO: 22584 - DNA, 75 bp, Homo sapiens
agggagtctcactggggcccgcgcagccggcacctccgctgcctcagccgtcgcggttcatcccggcccgcgctg

SEQ ID NO: 22585 - DNA, 78 bp, Homo sapiens
tcactggggcccgcgcagccggcacctccgctgcctcagccgtcgcggttcatcccggcccgcgctgtcgccgccgca

SEQ ID NO: 22586 - DNA, 79 bp, Homo sapiens
cagccggcacctccgctgcctcagccgtcgcggttcatcccggcccgcgctgtcgccgccgcagctatcgcctcactcc

SEQ ID NO: 22587 - DNA, 76 bp, Homo sapiens
acctccgctgcctcagccgtcgcggttcatcccggcccgcgctgtcgccgccgcagctatcgcctcactcccggga

SEQ ID NO: 22588 - DNA, 78 bp, Homo sapiens
ctgcctcagccgtcgcggttcatcccggcccgcgctgtcgccgccgcagctatcgcctcactcccgggacgctgaggc

SEQ ID NO: 22589 - DNA, 75 bp, Homo sapiens
cgtcgcggttcatcccggcccgcgctgtcgccgccgcagctatcgcctcactcccgggacgctgaggctggcccc

SEQ ID NO: 22590 - DNA, 74 bp, Homo sapiens
atcccggcccgcgctgtcgccgccgcagctatcgcctcactcccgggacgctgaggctggcccccgtccgctcg

SEQ ID NO: 22591 - DNA, 74 bp, Homo sapiens
tgtcgccgccgcagctatcgcctcactcccgggacgctgaggctggcccccgtccgctcggcttcttccggaac

SEQ ID NO: 22592 - DNA, 75 bp, Homo sapiens
gcagctatcgcctcactcccgggacgctgaggctggcccccgtccgctcggcttcttccggaacgagctcggctc

SEQ ID NO: 22593 - DNA, 74 bp, Homo sapiens
tatcgcctcactcccgggacgctgaggctggcccccgtccgctcggcttcttccggaacgagctcggctcctgc

SEQ ID NO: 22594 - DNA, 73 bp, Homo sapiens
ctcccgggacgctgaggctggcccccgtccgctcggcttcttccggaacgagctcggctcctgccaggccaga

SEQ ID NO: 22595 - DNA, 77 bp, Homo sapiens
tgaggctggcccccgtccgctcggcttcttccggaacgagctcggctcctgccaggccagagccaggctccagctac

SEQ ID NO: 22596 - DNA, 73 bp, Homo sapiens
cccgtccgctcggcttcttccggaacgagctcggctcctgccaggccagagccaggctccagctacccccgcc

SEQ ID NO: 22597 - DNA, 73 bp, Homo sapiens
ctcggcttcttccggaacgagctcggctcctgccaggccagagccaggctccagctacccccgcccccgcgga

SEQ ID NO: 22598 - DNA, 73 bp, Homo sapiens
ttccggaacgagctcggctcctgccaggccagagccaggctccagctacccccgcccccgcggagtcccacta

SEQ ID NO: 22599 - DNA, 75 bp, Homo sapiens
tcggctcctgccaggccagagccaggctccagctacccccgcccccgcggagtcccactagtcgttgggctctgc

SEQ ID NO: 22600 - DNA, 72 bp, Homo sapiens
aggccagagccaggctccagctacccccgcccccgcggagtcccactagtcgttgggctctgccggccgcag

SEQ ID NO: 22601 - DNA, 70 bp, Homo sapiens
caggctccagctacccccgcccccgcggagtcccactagtcgttgggctctgccggccgcagggaaggct

SEQ ID NO: 22602 - DNA, 68 bp, Homo sapiens
agctacccccgcccccgcggagtcccactagtcgttgggctctgccggccgcagggaaggcttgccgg

SEQ ID NO: 22603 - DNA, 69 bp, Homo sapiens
ccccgcggagtcccactagtcgttgggctctgccggccgcagggaaggcttgccgggcccgcctcaggg

SEQ ID NO: 22604 - DNA, 69 bp, Homo sapiens
tgccggccgcagggaaggcttgccgggcccgcctcagggttcgcctccttccggaacaccttcggccga

SEQ ID NO: 22605 - DNA, 67 bp, Homo sapiens
agggaaggcttgccgggcccgcctcagggttcgcctccttccggaacaccttcggccgatccggaga

SEQ ID NO: 22606 - DNA, 67 bp, Homo sapiens
aggcttgccgggcccgcctcagggttcgcctccttccggaacaccttcggccgatccggagaacaag

SEQ ID NO: 22607 - DNA, 73 bp, Homo sapiens
aggaagctctgggaccccactgcttttcccaagactgaaagccaagatcggtttgaatcatctgcaactttat

SEQ ID NO: 22608 - DNA, 75 bp, Homo sapiens
ggaccccactgcttttcccaagactgaaagccaagatcggtttgaatcatctgcaactttattccagagcagaaa

SEQ ID NO: 22609 - DNA, 76 bp, Homo sapiens
tgcttttcccaagactgaaagccaagatcggtttgaatcatctgcaactttattccagagcagaaataagtcattt

SEQ ID NO: 22610 - DNA, 76 bp, Homo sapiens
aagactgaaagccaagatcggtttgaatcatctgcaactttattccagagcagaaataagtcattttctaacaata

SEQ ID NO: 22611 - DNA, 76 bp, Homo sapiens
gaaagccaagatcggtttgaatcatctgcaactttattccagagcagaaataagtcattttctaacaataaatata

SEQ ID NO: 22612 - DNA, 72 bp, Homo sapiens
atcggtttgaatcatctgcaactttattccagagcagaaataagtcattttctaacaataaatataaaaaaa

SEQ ID NO: 22613 - DNA, 67 bp, Homo sapiens
aaataataaattaagattcgaaaaaaatgtccaacaaaacaaaatctttaacactgacagaatagaa

SEQ ID NO: 22614 - DNA, 68 bp, Homo sapiens
aattaagattcgaaaaaaatgtccaacaaaacaaaatctttaacactgacagaatagaaacttatcca

SEQ ID NO: 22615 - DNA, 69 bp, Homo sapiens
cgaaaaaaatgtccaacaaaacaaaatctttaacactgacagaatagaaacttatccaaaaggatgaga

SEQ ID NO: 22616 - DNA, 71 bp, Homo sapiens
aatgtccaacaaaacaaaatctttaacactgacagaatagaaacttatccaaaaggatgagagatggggcc

SEQ ID NO: 22617 - DNA, 71 bp, Homo sapiens
aaaacaaaatctttaacactgacagaatagaaacttatccaaaaggatgagagatggggccgactggggca

SEQ ID NO: 22618 - DNA, 75 bp, Homo sapiens
ctttaacactgacagaatagaaacttatccaaaaggatgagagatggggccgactggggcatgggcaggacactc

SEQ ID NO: 22619 - DNA, 76 bp, Homo sapiens
agaatagaaacttatccaaaaggatgagagatggggccgactggggcatgggcaggacactcctgcagcaccggtc

SEQ ID NO: 22620 - DNA, 75 bp, Homo sapiens
aaacttatccaaaaggatgagagatggggccgactggggcatgggcaggacactcctgcagcaccggtccctgag

SEQ ID NO: 22621 - DNA, 79 bp, Homo sapiens
gatgagagatggggccgactggggcatgggcaggacactcctgcagcaccggtccctgagtccccagctcacgaatgtt

SEQ ID NO: 22622 - DNA, 80 bp, Homo sapiens
tgagagatggggccgactggggcatgggcaggacactcctgcagcaccggtccctgagtccccagctcacgaatgtttga

SEQ ID NO: 22623 - DNA, 78 bp, Homo sapiens
agatggggccgactggggcatgggcaggacactcctgcagcaccggtccctgagtccccagctcacgaatgtttgaca

SEQ ID NO: 22624 - DNA, 78 bp, Homo sapiens
cgactggggcatgggcaggacactcctgcagcaccggtccctgagtccccagctcacgaatgtttgacaccctctgtc

SEQ ID NO: 22625 - DNA, 76 bp, Homo sapiens
atgggcaggacactcctgcagcaccggtccctgagtccccagctcacgaatgtttgacaccctctgtccccagccc

SEQ ID NO: 22626 - DNA, 75 bp, Homo sapiens
aggacactcctgcagcaccggtccctgagtccccagctcacgaatgtttgacaccctctgtccccagccctggcg

SEQ ID NO: 22627 - DNA, 73 bp, Homo sapiens
ctgcagcaccggtccctgagtccccagctcacgaatgtttgacaccctctgtccccagccctggcggggcccc

SEQ ID NO: 22628 - DNA, 70 bp, Homo sapiens
accggtccctgagtccccagctcacgaatgtttgacaccctctgtccccagccctggcggggccccctgc

SEQ ID NO: 22629 - DNA, 76 bp, Homo sapiens
agctcacgaatgtttgacaccctctgtccccagccctggcggggccccctgccacacacacacattctctccacaa

SEQ ID NO: 22630 - DNA, 74 bp, Homo sapiens
aatgtttgacaccctctgtccccagccctggcggggccccctgccacacacacacattctctccacaaagtaca

SEQ ID NO: 22631 - DNA, 73 bp, Homo sapiens
acacattctctccacaaagtacaaaatatatatttaaaaacctcaacacaaccaagcatcttgcaaaggccca

SEQ ID NO: 22632 - DNA, 71 bp, Homo sapiens
atatatttaaaaacctcaacacaaccaagcatcttgcaaaggcccaggaaagcaagggtttggccagtcag

SEQ ID NO: 22633 - DNA, 73 bp, Homo sapiens
aaaacctcaacacaaccaagcatcttgcaaaggcccaggaaagcaagggtttggccagtcagggatgaggatg

SEQ ID NO: 22634 - DNA, 72 bp, Homo sapiens
acaaccaagcatcttgcaaaggcccaggaaagcaagggtttggccagtcagggatgaggatggggcccgagg

SEQ ID NO: 22635 - DNA, 71 bp, Homo sapiens
tcttgcaaaggcccaggaaagcaagggtttggccagtcagggatgaggatggggcccgagggtctaaagaa

SEQ ID NO: 22636 - DNA, 71 bp, Homo sapiens
caggaaagcaagggtttggccagtcagggatgaggatggggcccgagggtctaaagaaggcactagaggga

SEQ ID NO: 22637 - DNA, 70 bp, Homo sapiens
aagcaagggtttggccagtcagggatgaggatggggcccgagggtctaaagaaggcactagagggacagg

SEQ ID NO: 22638 - DNA, 72 bp, Homo sapiens
cagtcagggatgaggatggggcccgagggtctaaagaaggcactagagggacagggaccgctttgggtctca

SEQ ID NO: 22639 - DNA, 70 bp, Homo sapiens
ggatgaggatggggcccgagggtctaaagaaggcactagagggacagggaccgctttgggtctcacccag

SEQ ID NO: 22640 - DNA, 71 bp, Homo sapiens
gcccgagggtctaaagaaggcactagagggacagggaccgctttgggtctcacccagtcaagttcacagtc

SEQ ID NO: 22641 - DNA, 73 bp, Homo sapiens
tctaaagaaggcactagagggacagggaccgctttgggtctcacccagtcaagttcacagtctgccctcttag

SEQ ID NO: 22642 - DNA, 74 bp, Homo sapiens
cactagagggacagggaccgctttgggtctcacccagtcaagttcacagtctgccctcttagtgtgaggaaatg

SEQ ID NO: 22643 - DNA, 73 bp, Homo sapiens
acagggaccgctttgggtctcacccagtcaagttcacagtctgccctcttagtgtgaggaaatggggcttgag

SEQ ID NO: 22644 - DNA, 72 bp, Homo sapiens
ctttgggtctcacccagtcaagttcacagtctgccctcttagtgtgaggaaatggggcttgaggtaccctgt

SEQ ID NO: 22645 - DNA, 73 bp, Homo sapiens
gtctcacccagtcaagttcacagtctgccctcttagtgtgaggaaatggggcttgaggtaccctgtttacttg

SEQ ID NO: 22646 - DNA, 72 bp, Homo sapiens
aagttcacagtctgccctcttagtgtgaggaaatggggcttgaggtaccctgtttacttggcgctgggccaa

SEQ ID NO: 22647 - DNA, 75 bp, Homo sapiens
tcttagtgtgaggaaatggggcttgaggtaccctgtttacttggcgctgggccaagccctccatctcctgagatg

SEQ ID NO: 22648 - DNA, 75 bp, Homo sapiens
aaatggggcttgaggtaccctgtttacttggcgctgggccaagccctccatctcctgagatggcctcatgtggga

SEQ ID NO: 22649 - DNA, 76 bp, Homo sapiens
cttgaggtaccctgtttacttggcgctgggccaagccctccatctcctgagatggcctcatgtgggagaaggcgga

SEQ ID NO: 22650 - DNA, 76 bp, Homo sapiens
cgctgggccaagccctccatctcctgagatggcctcatgtgggagaaggcggagggaaggtcggcttgggaatatc

SEQ ID NO: 22651 - DNA, 76 bp, Homo sapiens
aagccctccatctcctgagatggcctcatgtgggagaaggcggagggaaggtcggcttgggaatatcccatatgtc

SEQ ID NO: 22652 - DNA, 76 bp, Homo sapiens
atctcctgagatggcctcatgtgggagaaggcggagggaaggtcggcttgggaatatcccatatgtctgtccgaag

SEQ ID NO: 22653 - DNA, 76 bp, Homo sapiens
agatggcctcatgtgggagaaggcggagggaaggtcggcttgggaatatcccatatgtctgtccgaaggctgtggc

SEQ ID NO: 22654 - DNA, 73 bp, Homo sapiens
atgtgggagaaggcggagggaaggtcggcttgggaatatcccatatgtctgtccgaaggctgtggcggggctc

SEQ ID NO: 22655 - DNA, 73 bp, Homo sapiens
aaggcggagggaaggtcggcttgggaatatcccatatgtctgtccgaaggctgtggcggggctcctgctccag

SEQ ID NO: 22656 - DNA, 75 bp, Homo sapiens
aaggtcggcttgggaatatcccatatgtctgtccgaaggctgtggcggggctcctgctccagggatgctgggacg

SEQ ID NO: 22657 - DNA, 78 bp, Homo sapiens
aatatcccatatgtctgtccgaaggctgtggcggggctcctgctccagggatgctgggacgtggcggtgcctgctaag

SEQ ID NO: 22658 - DNA, 82 bp, Homo sapiens
atatgtctgtccgaaggctgtggcggggctcctgctccagggatgctgggacgtggcggtgcctgctaagtgctcagctgtg

SEQ ID NO: 22659 - DNA, 83 bp, Homo sapiens
tgtccgaaggctgtggcggggctcctgctccagggatgctgggacgtggcggtgcctgctaagtgctcagctgtgtgcgtctc

SEQ ID NO: 22660 - DNA, 83 bp, Homo sapiens
tgtggcggggctcctgctccagggatgctgggacgtggcggtgcctgctaagtgctcagctgtgtgcgtctcgcagggaaaga

SEQ ID NO: 22661 - DNA, 82 bp, Homo sapiens
ctgctccagggatgctgggacgtggcggtgcctgctaagtgctcagctgtgtgcgtctcgcagggaaagagggcccagccca

SEQ ID NO: 22662 - DNA, 81 bp, Homo sapiens
agggatgctgggacgtggcggtgcctgctaagtgctcagctgtgtgcgtctcgcagggaaagagggcccagcccagcatcc

SEQ ID NO: 22663 - DNA, 85 bp, Homo sapiens
tgcctgctaagtgctcagctgtgtgcgtctcgcagggaaagagggcccagcccagcatccctggtcatctcctcagttcaggcca

SEQ ID NO: 22664 - DNA, 84 bp, Homo sapiens
tgctcagctgtgtgcgtctcgcagggaaagagggcccagcccagcatccctggtcatctcctcagttcaggccagggtgtcatc

SEQ ID NO: 22665 - DNA, 81 bp, Homo sapiens
tgtgtgcgtctcgcagggaaagagggcccagcccagcatccctggtcatctcctcagttcaggccagggtgtcatccgaga

SEQ ID NO: 22666 - DNA, 76 bp, Homo sapiens
agggaaagagggcccagcccagcatccctggtcatctcctcagttcaggccagggtgtcatccgagacccctcagc

SEQ ID NO: 22667 - DNA, 78 bp, Homo sapiens
agggcccagcccagcatccctggtcatctcctcagttcaggccagggtgtcatccgagacccctcagcggaagttgca

SEQ ID NO: 22668 - DNA, 76 bp, Homo sapiens
agcatccctggtcatctcctcagttcaggccagggtgtcatccgagacccctcagcggaagttgcagggggaggaa

SEQ ID NO: 22669 - DNA, 75 bp, Homo sapiens
tggtcatctcctcagttcaggccagggtgtcatccgagacccctcagcggaagttgcagggggaggaaagaacta

SEQ ID NO: 22670 - DNA, 72 bp, Homo sapiens
tcagttcaggccagggtgtcatccgagacccctcagcggaagttgcagggggaggaaagaactagaaataaa

SEQ ID NO: 22671 - DNA, 70 bp, Homo sapiens
tgtcatccgagacccctcagcggaagttgcagggggaggaaagaactagaaataaataaagtccccagtg

SEQ ID NO: 22672 - DNA, 72 bp, Homo sapiens
ccctcagcggaagttgcagggggaggaaagaactagaaataaataaagtccccagtggcccagcatggcaca

SEQ ID NO: 22673 - DNA, 72 bp, Homo sapiens
cggaagttgcagggggaggaaagaactagaaataaataaagtccccagtggcccagcatggcacagcaggga

SEQ ID NO: 22674 - DNA, 75 bp, Homo sapiens
gaggaaagaactagaaataaataaagtccccagtggcccagcatggcacagcagggaggccactctgtttcttca

SEQ ID NO: 22675 - DNA, 74 bp, Homo sapiens
actagaaataaataaagtccccagtggcccagcatggcacagcagggaggccactctgtttcttcaagtattct

SEQ ID NO: 22676 - DNA, 75 bp, Homo sapiens
aataaataaagtccccagtggcccagcatggcacagcagggaggccactctgtttcttcaagtattcttggccga

SEQ ID NO: 22677 - DNA, 79 bp, Homo sapiens
cagtggcccagcatggcacagcagggaggccactctgtttcttcaagtattcttggccgatggggctccaggccctgtc

SEQ ID NO: 22678 - DNA, 76 bp, Homo sapiens
acagcagggaggccactctgtttcttcaagtattcttggccgatggggctccaggccctgtcgaggctcagatggg

SEQ ID NO: 22679 - DNA, 76 bp, Homo sapiens
cactctgtttcttcaagtattcttggccgatggggctccaggccctgtcgaggctcagatggggatccccacagtg

SEQ ID NO: 22680 - DNA, 75 bp, Homo sapiens
tttcttcaagtattcttggccgatggggctccaggccctgtcgaggctcagatggggatccccacagtgttcacc

SEQ ID NO: 22681 - DNA, 74 bp, Homo sapiens
agtattcttggccgatggggctccaggccctgtcgaggctcagatggggatccccacagtgttcacctggtcct

SEQ ID NO: 22682 - DNA, 78 bp, Homo sapiens
tggggctccaggccctgtcgaggctcagatggggatccccacagtgttcacctggtccttgagtcccagcaggctgta

SEQ ID NO: 22683 - DNA, 80 bp, Homo sapiens
tccaggccctgtcgaggctcagatggggatccccacagtgttcacctggtccttgagtcccagcaggctgtaggcgatgc

SEQ ID NO: 22684 - DNA, 81 bp, Homo sapiens
tgtcgaggctcagatggggatccccacagtgttcacctggtccttgagtcccagcaggctgtaggcgatgcgcttctggtg

SEQ ID NO: 22685 - DNA, 78 bp, Homo sapiens
acagtgttcacctggtccttgagtcccagcaggctgtaggcgatgcgcttctggtggccgggcagccgcaccccaatc

SEQ ID NO: 22686 - DNA, 79 bp, Homo sapiens
ttcacctggtccttgagtcccagcaggctgtaggcgatgcgcttctggtggccgggcagccgcaccccaatcctcttga

SEQ ID NO: 22687 - DNA, 68 bp, Homo sapiens
agtgggaggcgggaggcgaggggggacggaaaggggcctgacttactcgttggtcatctgcaccacct

SEQ ID NO: 22688 - DNA, 72 bp, Homo sapiens
gggaggcgaggggggacggaaaggggcctgacttactcgttggtcatctgcaccaccttctcgatggcagtg

SEQ ID NO: 22689 - DNA, 73 bp, Homo sapiens
gggggacggaaaggggcctgacttactcgttggtcatctgcaccaccttctcgatggcagtgtagccggccgc

SEQ ID NO: 22690 - DNA, 77 bp, Homo sapiens
aaaggggcctgacttactcgttggtcatctgcaccaccttctcgatggcagtgtagccggccgccatgaagtgctcc

SEQ ID NO: 22691 - DNA, 82 bp, Homo sapiens
acttactcgttggtcatctgcaccaccttctcgatggcagtgtagccggccgccatgaagtgctccgtatactgctgcatct

SEQ ID NO: 22692 - DNA, 86 bp, Homo sapiens
tcgttggtcatctgcaccaccttctcgatggcagtgtagccggccgccatgaagtgctccgtatactgctgcatcttgatggactc

SEQ ID NO: 22693 - DNA, 84 bp, Homo sapiens
caccaccttctcgatggcagtgtagccggccgccatgaagtgctccgtatactgctgcatcttgatggactccagccactcgga

SEQ ID NO: 22694 - DNA, 85 bp, Homo sapiens
ttctcgatggcagtgtagccggccgccatgaagtgctccgtatactgctgcatcttgatggactccagccactcggacaccgtgc

SEQ ID NO: 22695 - DNA, 80 bp, Homo sapiens
agtgtagccggccgccatgaagtgctccgtatactgctgcatcttgatggactccagccactcggacaccgtgcggaagg

SEQ ID NO: 22696 - DNA, 79 bp, Homo sapiens
ccggccgccatgaagtgctccgtatactgctgcatcttgatggactccagccactcggacaccgtgcggaagggcaccc

SEQ ID NO: 22697 - DNA, 79 bp, Homo sapiens
tgaagtgctccgtatactgctgcatcttgatggactccagccactcggacaccgtgcggaagggcaccccctccgagcc

SEQ ID NO: 22698 - DNA, 79 bp, Homo sapiens
tatactgctgcatcttgatggactccagccactcggacaccgtgcggaagggcaccccctccgagccgctcgtgctggg

SEQ ID NO: 22699 - DNA, 74 bp, Homo sapiens
atcttgatggactccagccactcggacaccgtgcggaagggcaccccctccgagccgctcgtgctggggagccg

SEQ ID NO: 22700 - DNA, 73 bp, Homo sapiens
actccagccactcggacaccgtgcggaagggcaccccctccgagccgctcgtgctggggagccggatagacac

SEQ ID NO: 22701 - DNA, 75 bp, Homo sapiens
tcggacaccgtgcggaagggcaccccctccgagccgctcgtgctggggagccggatagacacgctgcaacaggaa

SEQ ID NO: 22702 - DNA, 77 bp, Homo sapiens
accgtgcggaagggcaccccctccgagccgctcgtgctggggagccggatagacacgctgcaacaggaagcactgca

SEQ ID NO: 22703 - DNA, 77 bp, Homo sapiens
agggcaccccctccgagccgctcgtgctggggagccggatagacacgctgcaacaggaagcactgcaggtgaggggc

SEQ ID NO: 22704 - DNA, 75 bp, Homo sapiens
cagaaggaaaattgaggtcatcatgggcagagggcatagaactcaccgggggtcaaagtcagccagggtcttgag

SEQ ID NO: 22705 - DNA, 75 bp, Homo sapiens
aaaattgaggtcatcatgggcagagggcatagaactcaccgggggtcaaagtcagccagggtcttgagggagtca

SEQ ID NO: 22706 - DNA, 76 bp, Homo sapiens
atcatgggcagagggcatagaactcaccgggggtcaaagtcagccagggtcttgagggagtcaggggcacgaatga

SEQ ID NO: 22707 - DNA, 74 bp, Homo sapiens
agagggcatagaactcaccgggggtcaaagtcagccagggtcttgagggagtcaggggcacgaatgagcttgtc

SEQ ID NO: 22708 - DNA, 75 bp, Homo sapiens
atagaactcaccgggggtcaaagtcagccagggtcttgagggagtcaggggcacgaatgagcttgtccaggatgc

SEQ ID NO: 22709 - DNA, 80 bp, Homo sapiens
ggtcaaagtcagccagggtcttgagggagtcaggggcacgaatgagcttgtccaggatgctgacgatgtcagcgaacttg

SEQ ID NO: 22710 - DNA, 79 bp, Homo sapiens
aagtcagccagggtcttgagggagtcaggggcacgaatgagcttgtccaggatgctgacgatgtcagcgaacttggggc

SEQ ID NO: 22711 - DNA, 81 bp, Homo sapiens
ttgagggagtcaggggcacgaatgagcttgtccaggatgctgacgatgtcagcgaacttggggcggcgggcacgctcctgc

SEQ ID NO: 22712 - DNA, 84 bp, Homo sapiens
ggagtcaggggcacgaatgagcttgtccaggatgctgacgatgtcagcgaacttggggcggcgggcacgctcctgctgccagca

SEQ ID NO: 22713 - DNA, 89 bp, Homo sapiens
aatgagcttgtccaggatgctgacgatgtcagcgaacttggggcggcgggcacgctcctgctgccagcactgcatcatgagctggtaga

SEQ ID NO: 22714 - DNA, 89 bp, Homo sapiens
ttgtccaggatgctgacgatgtcagcgaacttggggcggcgggcacgctcctgctgccagcactgcatcatgagctggtagatggcgga

SEQ ID NO: 22715 - DNA, 87 bp, Homo sapiens
atgctgacgatgtcagcgaacttggggcggcgggcacgctcctgctgccagcactgcatcatgagctggtagatggcggaggggcag

SEQ ID NO: 22716 - DNA, 85 bp, Homo sapiens
atgtcagcgaacttggggcggcgggcacgctcctgctgccagcactgcatcatgagctggtagatggcggaggggcagtccatgg

SEQ ID NO: 22717 - DNA, 82 bp, Homo sapiens
acttggggcggcgggcacgctcctgctgccagcactgcatcatgagctggtagatggcggaggggcagtccatgggtgtggg

SEQ ID NO: 22718 - DNA, 87 bp, Homo sapiens
cacgctcctgctgccagcactgcatcatgagctggtagatggcggaggggcagtccatgggtgtggggagccggaagccatcattga

SEQ ID NO: 22719 - DNA, 86 bp, Homo sapiens
ctgccagcactgcatcatgagctggtagatggcggaggggcagtccatgggtgtggggagccggaagccatcattgatggctttca

SEQ ID NO: 22720 - DNA, 83 bp, Homo sapiens
actgcatcatgagctggtagatggcggaggggcagtccatgggtgtggggagccggaagccatcattgatggctttcatcacc

SEQ ID NO: 22721 - DNA, 80 bp, Homo sapiens
atgagctggtagatggcggaggggcagtccatgggtgtggggagccggaagccatcattgatggctttcatcacctggcg

SEQ ID NO: 22722 - DNA, 79 bp, Homo sapiens
tagatggcggaggggcagtccatgggtgtggggagccggaagccatcattgatggctttcatcacctggcggggcacga

SEQ ID NO: 22723 - DNA, 76 bp, Homo sapiens
gggcagtccatgggtgtggggagccggaagccatcattgatggctttcatcacctggcggggcacgaaggtcaggg

SEQ ID NO: 22724 - DNA, 78 bp, Homo sapiens
gtgtggggagccggaagccatcattgatggctttcatcacctggcggggcacgaaggtcaggggcgctgttgcagaaa

SEQ ID NO: 22725 - DNA, 70 bp, Homo sapiens
cttgagttcaggtccggacaggcctggggagggcaagggcacccacctcgtggttggacaactcccagta

SEQ ID NO: 22726 - DNA, 69 bp, Homo sapiens
gttcaggtccggacaggcctggggagggcaagggcacccacctcgtggttggacaactcccagtagggc

SEQ ID NO: 22727 - DNA, 73 bp, Homo sapiens
ggcctggggagggcaagggcacccacctcgtggttggacaactcccagtagggccgctcgccataggtcatca

SEQ ID NO: 22728 - DNA, 73 bp, Homo sapiens
agggcaagggcacccacctcgtggttggacaactcccagtagggccgctcgccataggtcatcacctcccaca

SEQ ID NO: 22729 - DNA, 75 bp, Homo sapiens
acccacctcgtggttggacaactcccagtagggccgctcgccataggtcatcacctcccacatgacaatgccaaa

SEQ ID NO: 22730 - DNA, 78 bp, Homo sapiens
cctcgtggttggacaactcccagtagggccgctcgccataggtcatcacctcccacatgacaatgccaaagctccaca

SEQ ID NO: 22731 - DNA, 79 bp, Homo sapiens
aactcccagtagggccgctcgccataggtcatcacctcccacatgacaatgccaaagctccacacgtcgctggcagagg

SEQ ID NO: 22732 - DNA, 80 bp, Homo sapiens
agtagggccgctcgccataggtcatcacctcccacatgacaatgccaaagctccacacgtcgctggcagaggtgaacttc

SEQ ID NO: 22733 - DNA, 78 bp, Homo sapiens
ccataggtcatcacctcccacatgacaatgccaaagctccacacgtcgctggcagaggtgaacttccggtaggaaatg

SEQ ID NO: 22734 - DNA, 76 bp, Homo sapiens
atcacctcccacatgacaatgccaaagctccacacgtcgctggcagaggtgaacttccggtaggaaatggcctccg

SEQ ID NO: 22735 - DNA, 74 bp, Homo sapiens
acatgacaatgccaaagctccacacgtcgctggcagaggtgaacttccggtaggaaatggcctccggggcggtc

SEQ ID NO: 22736 - DNA, 72 bp, Homo sapiens
aatgccaaagctccacacgtcgctggcagaggtgaacttccggtaggaaatggcctccggggcggtccagcg

SEQ ID NO: 22737 - DNA, 72 bp, Homo sapiens
tccacacgtcgctggcagaggtgaacttccggtaggaaatggcctccggggcggtccagcggatggggatct

SEQ ID NO: 22738 - DNA, 73 bp, Homo sapiens
tggcagaggtgaacttccggtaggaaatggcctccggggcggtccagcggatggggatcttgccgccctgcag

SEQ ID NO: 22739 - DNA, 70 bp, Homo sapiens
aggtgaacttccggtaggaaatggcctccggggcggtccagcggatggggatcttgccgccctgcaggga

SEQ ID NO: 22740 - DNA, 72 bp, Homo sapiens
gtaggaaatggcctccggggcggtccagcggatggggatcttgccgccctgcagggaacccaggcccagtca

SEQ ID NO: 22741 - DNA, 74 bp, Homo sapiens
atggcctccggggcggtccagcggatggggatcttgccgccctgcagggaacccaggcccagtcaccactgtgc

SEQ ID NO: 22742 - DNA, 70 bp, Homo sapiens
atgcagggcgaaggccgcttctcccttgaggtccccttccccaacttacactggtggtgtaggtggcctc

SEQ ID NO: 22743 - DNA, 66 bp, Homo sapiens
aaggccgcttctcccttgaggtccccttccccaacttacactggtggtgtaggtggcctcggggtc

SEQ ID NO: 22744 - DNA, 69 bp, Homo sapiens
ttctcccttgaggtccccttccccaacttacactggtggtgtaggtggcctcggggtcgtcctccagca

SEQ ID NO: 22745 - DNA, 69 bp, Homo sapiens
cccttccccaacttacactggtggtgtaggtggcctcggggtcgtcctccagcacgcgggacaggccaa

SEQ ID NO: 22746 - DNA, 71 bp, Homo sapiens
aacttacactggtggtgtaggtggcctcggggtcgtcctccagcacgcgggacaggccaaagtcagacacc

SEQ ID NO: 22747 - DNA, 74 bp, Homo sapiens
actggtggtgtaggtggcctcggggtcgtcctccagcacgcgggacaggccaaagtcagacaccttgcagacca

SEQ ID NO: 22748 - DNA, 76 bp, Homo sapiens
taggtggcctcggggtcgtcctccagcacgcgggacaggccaaagtcagacaccttgcagaccaggttgctgttga

SEQ ID NO: 22749 - DNA, 77 bp, Homo sapiens
ggtcgtcctccagcacgcgggacaggccaaagtcagacaccttgcagaccaggttgctgttgacgaggatgttgcgg

SEQ ID NO: 22750 - DNA, 81 bp, Homo sapiens
tccagcacgcgggacaggccaaagtcagacaccttgcagaccaggttgctgttgacgaggatgttgcgggcagccaggtca

SEQ ID NO: 22751 - DNA, 80 bp, Homo sapiens
acaggccaaagtcagacaccttgcagaccaggttgctgttgacgaggatgttgcgggcagccaggtcacggtgcacatag

SEQ ID NO: 22752 - DNA, 80 bp, Homo sapiens
aaagtcagacaccttgcagaccaggttgctgttgacgaggatgttgcgggcagccaggtcacggtgcacatagttcatgt

SEQ ID NO: 22753 - DNA, 80 bp, Homo sapiens
acaccttgcagaccaggttgctgttgacgaggatgttgcgggcagccaggtcacggtgcacatagttcatgttggccagg

SEQ ID NO: 22754 - DNA, 81 bp, Homo sapiens
accaggttgctgttgacgaggatgttgcgggcagccaggtcacggtgcacatagttcatgttggccaggtacttcatgcca

SEQ ID NO: 22755 - DNA, 84 bp, Homo sapiens
ctgttgacgaggatgttgcgggcagccaggtcacggtgcacatagttcatgttggccaggtacttcatgccagctgcgatgccc

SEQ ID NO: 22756 - DNA, 86 bp, Homo sapiens
atgttgcgggcagccaggtcacggtgcacatagttcatgttggccaggtacttcatgccagctgcgatgccccgcagcatgcccac

SEQ ID NO: 22757 - DNA, 90 bp, Homo sapiens
ccaggtcacggtgcacatagttcatgttggccaggtacttcatgccagctgcgatgccccgcagcatgcccaccagctgcagcacgctga

SEQ ID NO: 22758 - DNA, 89 bp, Homo sapiens
acggtgcacatagttcatgttggccaggtacttcatgccagctgcgatgccccgcagcatgcccaccagctgcagcacgctgaactcgc

SEQ ID NO: 22759 - DNA, 88 bp, Homo sapiens
atagttcatgttggccaggtacttcatgccagctgcgatgccccgcagcatgcccaccagctgcagcacgctgaactcgccatccttc

SEQ ID NO: 22760 - DNA, 92 bp, Homo sapiens
tacttcatgccagctgcgatgccccgcagcatgcccaccagctgcagcacgctgaactcgccatccttctcctgccggagcacaggcgctca

SEQ ID NO: 22761 - DNA, 92 bp, Homo sapiens
agctgcgatgccccgcagcatgcccaccagctgcagcacgctgaactcgccatccttctcctgccggagcacaggcgctcagctgcaggcca

SEQ ID NO: 22762 - DNA, 89 bp, Homo sapiens
cccgcagcatgcccaccagctgcagcacgctgaactcgccatccttctcctgccggagcacaggcgctcagctgcaggccagccctgaa

SEQ ID NO: 22763 - DNA, 70 bp, Homo sapiens
cctgaacccgccaggccagccccgggctcaatggccaggcatccccgccccctacaacccacatccttac

SEQ ID NO: 22764 - DNA, 68 bp, Homo sapiens
ccagccccgggctcaatggccaggcatccccgccccctacaacccacatccttacccgaaggaacttg

SEQ ID NO: 22765 - DNA, 68 bp, Homo sapiens
cccgggctcaatggccaggcatccccgccccctacaacccacatccttacccgaaggaacttgtccag

SEQ ID NO: 22766 - DNA, 68 bp, Homo sapiens
atggccaggcatccccgccccctacaacccacatccttacccgaaggaacttgtccagggccccattc

SEQ ID NO: 22767 - DNA, 72 bp, Homo sapiens
cgccccctacaacccacatccttacccgaaggaacttgtccagggccccattctccatgtactcagtgatga

SEQ ID NO: 22768 - DNA, 77 bp, Homo sapiens
tacaacccacatccttacccgaaggaacttgtccagggccccattctccatgtactcagtgatgatcatcatgggct

SEQ ID NO: 22769 - DNA, 78 bp, Homo sapiens
acatccttacccgaaggaacttgtccagggccccattctccatgtactcagtgatgatcatcatgggcttgtctgtag

SEQ ID NO: 22770 - DNA, 78 bp, Homo sapiens
aaggaacttgtccagggccccattctccatgtactcagtgatgatcatcatgggcttgtctgtaggggggtgggcaca

SEQ ID NO: 22771 - DNA, 80 bp, Homo sapiens
tccagggccccattctccatgtactcagtgatgatcatcatgggcttgtctgtaggggggtgggcacaggtgagaggtaa

SEQ ID NO: 22772 - DNA, 79 bp, Homo sapiens
attctccatgtactcagtgatgatcatcatgggcttgtctgtaggggggtgggcacaggtgagaggtaagtgggcccag

SEQ ID NO: 22773 - DNA, 80 bp, Homo sapiens
atgtactcagtgatgatcatcatgggcttgtctgtaggggggtgggcacaggtgagaggtaagtgggcccaggcatgtgg

SEQ ID NO: 22774 - DNA, 78 bp, Homo sapiens
tgctaagtggcccctctccacccagtgtgggcaggccccaagcctcacatttggagatgacgccctctaggcggatga

SEQ ID NO: 22775 - DNA, 77 bp, Homo sapiens
ccctctccacccagtgtgggcaggccccaagcctcacatttggagatgacgccctctaggcggatgatgttgtggtg

SEQ ID NO: 22776 - DNA, 78 bp, Homo sapiens
acccagtgtgggcaggccccaagcctcacatttggagatgacgccctctaggcggatgatgttgtggtggctgaactg

SEQ ID NO: 22777 - DNA, 80 bp, Homo sapiens
aggccccaagcctcacatttggagatgacgccctctaggcggatgatgttgtggtggctgaactggcccatgatgccggc

SEQ ID NO: 22778 - DNA, 81 bp, Homo sapiens
aagcctcacatttggagatgacgccctctaggcggatgatgttgtggtggctgaactggcccatgatgccggcctcgccga

SEQ ID NO: 22779 - DNA, 79 bp, Homo sapiens
atttggagatgacgccctctaggcggatgatgttgtggtggctgaactggcccatgatgccggcctcgccgaggaagtc

SEQ ID NO: 22780 - DNA, 80 bp, Homo sapiens
ccctctaggcggatgatgttgtggtggctgaactggcccatgatgccggcctcgccgaggaagtccactcgctgcttctc

SEQ ID NO: 22781 - DNA, 83 bp, Homo sapiens
taggcggatgatgttgtggtggctgaactggcccatgatgccggcctcgccgaggaagtccactcgctgcttctctgtgtagc

SEQ ID NO: 22782 - DNA, 81 bp, Homo sapiens
tgttgtggtggctgaactggcccatgatgccggcctcgccgaggaagtccactcgctgcttctctgtgtagccggctttca

SEQ ID NO: 22783 - DNA, 81 bp, Homo sapiens
ctgaactggcccatgatgccggcctcgccgaggaagtccactcgctgcttctctgtgtagccggctttcagcgtcttgatg

SEQ ID NO: 22784 - DNA, 80 bp, Homo sapiens
atgatgccggcctcgccgaggaagtccactcgctgcttctctgtgtagccggctttcagcgtcttgatggccaccggcac

SEQ ID NO: 22785 - DNA, 77 bp, Homo sapiens
ctcgccgaggaagtccactcgctgcttctctgtgtagccggctttcagcgtcttgatggccaccggcacctccttct

SEQ ID NO: 22786 - DNA, 76 bp, Homo sapiens
cgaggaagtccactcgctgcttctctgtgtagccggctttcagcgtcttgatggccaccggcacctccttcttccc

SEQ ID NO: 22787 - DNA, 76 bp, Homo sapiens
actcgctgcttctctgtgtagccggctttcagcgtcttgatggccaccggcacctccttcttccccgaggatgtct

SEQ ID NO: 22788 - DNA, 78 bp, Homo sapiens
tgtgtagccggctttcagcgtcttgatggccaccggcacctccttcttccccgaggatgtcttcagcatgcccttgta

SEQ ID NO: 22789 - DNA, 76 bp, Homo sapiens
agccggctttcagcgtcttgatggccaccggcacctccttcttccccgaggatgtcttcagcatgcccttgtacac

SEQ ID NO: 22790 - DNA, 74 bp, Homo sapiens
agcgtcttgatggccaccggcacctccttcttccccgaggatgtcttcagcatgcccttgtacacctccccaaa

SEQ ID NO: 22791 - DNA, 73 bp, Homo sapiens
atggccaccggcacctccttcttccccgaggatgtcttcagcatgcccttgtacacctccccaaactctcctg

SEQ ID NO: 22792 - DNA, 73 bp, Homo sapiens
acctccttcttccccgaggatgtcttcagcatgcccttgtacacctccccaaactctcctgtgggcagacagg

SEQ ID NO: 22793 - DNA, 75 bp, Homo sapiens
cccgaggatgtcttcagcatgcccttgtacacctccccaaactctcctgtgggcagacagggtcaggggagtgcc

SEQ ID NO: 22794 - DNA, 75 bp, Homo sapiens
accaccgctgcctcctcagggccccttggcagggggccaacctcacctgctccgatcaccttctgccgagtgaca

SEQ ID NO: 22795 - DNA, 76 bp, Homo sapiens
cctcctcagggccccttggcagggggccaacctcacctgctccgatcaccttctgccgagtgacacaggatggatg

SEQ ID NO: 22796 - DNA, 77 bp, Homo sapiens
gccccttggcagggggccaacctcacctgctccgatcaccttctgccgagtgacacaggatggatggatctcggtag

SEQ ID NO: 22797 - DNA, 77 bp, Homo sapiens
agggggccaacctcacctgctccgatcaccttctgccgagtgacacaggatggatggatctcggtagtgaacttcaa

SEQ ID NO: 22798 - DNA, 79 bp, Homo sapiens
acctcacctgctccgatcaccttctgccgagtgacacaggatggatggatctcggtagtgaacttcaacacagcctggt

SEQ ID NO: 22799 - DNA, 79 bp, Homo sapiens
tccgatcaccttctgccgagtgacacaggatggatggatctcggtagtgaacttcaacacagcctggttggggtcctca

SEQ ID NO: 22800 - DNA, 78 bp, Homo sapiens
accttctgccgagtgacacaggatggatggatctcggtagtgaacttcaacacagcctggttggggtcctcatatgtg

SEQ ID NO: 22801 - DNA, 77 bp, Homo sapiens
agtgacacaggatggatggatctcggtagtgaacttcaacacagcctggttggggtcctcatatgtgtgggggtcca

SEQ ID NO: 22802 - DNA, 75 bp, Homo sapiens
atggatggatctcggtagtgaacttcaacacagcctggttggggtcctcatatgtgtgggggtccacgtatgtct

SEQ ID NO: 22803 - DNA, 73 bp, Homo sapiens
atctcggtagtgaacttcaacacagcctggttggggtcctcatatgtgtgggggtccacgtatgtcttcaggg

SEQ ID NO: 22804 - DNA, 72 bp, Homo sapiens
aacttcaacacagcctggttggggtcctcatatgtgtgggggtccacgtatgtcttcaggggcttcagttgt

SEQ ID NO: 22805 - DNA, 73 bp, Homo sapiens
aacacagcctggttggggtcctcatatgtgtgggggtccacgtatgtcttcaggggcttcagttgttctggaa

SEQ ID NO: 22806 - DNA, 71 bp, Homo sapiens
ggttggggtcctcatatgtgtgggggtccacgtatgtcttcaggggcttcagttgttctggaaggagaagg

SEQ ID NO: 22807 - DNA, 73 bp, Homo sapiens
ctcatatgtgtgggggtccacgtatgtcttcaggggcttcagttgttctggaaggagaaggggtggggtcaca

SEQ ID NO: 22808 - DNA, 73 bp, Homo sapiens
cccacctcccccacagagctggggacggtgcgggcagggctgggcctggagcgggggctgcgtctcacctgac

SEQ ID NO: 22809 - DNA, 75 bp, Homo sapiens
ccacagagctggggacggtgcgggcagggctgggcctggagcgggggctgcgtctcacctgacttggagaagtaa

SEQ ID NO: 22810 - DNA, 72 bp, Homo sapiens
tggggacggtgcgggcagggctgggcctggagcgggggctgcgtctcacctgacttggagaagtaaacgtcc

SEQ ID NO: 22811 - DNA, 71 bp, Homo sapiens
ggtgcgggcagggctgggcctggagcgggggctgcgtctcacctgacttggagaagtaaacgtcctccggg

SEQ ID NO: 22812 - DNA, 71 bp, Homo sapiens
ctgggcctggagcgggggctgcgtctcacctgacttggagaagtaaacgtcctccggggactggcgggcac

SEQ ID NO: 22813 - DNA, 70 bp, Homo sapiens
agcgggggctgcgtctcacctgacttggagaagtaaacgtcctccggggactggcgggcacgctggttct

SEQ ID NO: 22814 - DNA, 70 bp, Homo sapiens
cgtctcacctgacttggagaagtaaacgtcctccggggactggcgggcacgctggttcttcctcctgaaa

SEQ ID NO: 22815 - DNA, 69 bp, Homo sapiens
acctgacttggagaagtaaacgtcctccggggactggcgggcacgctggttcttcctcctgaaagagcc

SEQ ID NO: 22816 - DNA, 67 bp, Homo sapiens
ggagaagtaaacgtcctccggggactggcgggcacgctggttcttcctcctgaaagagccccacggg

SEQ ID NO: 22817 - DNA, 69 bp, Homo sapiens
acgtcctccggggactggcgggcacgctggttcttcctcctgaaagagccccacggggaaccaaatgca

SEQ ID NO: 22818 - DNA, 71 bp, Homo sapiens
actggcgggcacgctggttcttcctcctgaaagagccccacggggaaccaaatgcagggaggtcagtgagg

SEQ ID NO: 22819 - DNA, 72 bp, Homo sapiens
acgctggttcttcctcctgaaagagccccacggggaaccaaatgcagggaggtcagtgaggtctgctccggc

SEQ ID NO: 22820 - DNA, 72 bp, Homo sapiens
attttcccacccaagcccatgtggagccagggtatgggctctgacgaacctgcggtggataaagaagccaac

SEQ ID NO: 22821 - DNA, 77 bp, Homo sapiens
aagcccatgtggagccagggtatgggctctgacgaacctgcggtggataaagaagccaactcctgccagcaccagaa

SEQ ID NO: 22822 - DNA, 78 bp, Homo sapiens
atgtggagccagggtatgggctctgacgaacctgcggtggataaagaagccaactcctgccagcaccagaagcaggac

SEQ ID NO: 22823 - DNA, 76 bp, Homo sapiens
agggtatgggctctgacgaacctgcggtggataaagaagccaactcctgccagcaccagaagcaggaccacaccga

SEQ ID NO: 22824 - DNA, 78 bp, Homo sapiens
tgacgaacctgcggtggataaagaagccaactcctgccagcaccagaagcaggaccacaccgacagccacgccgccaa

SEQ ID NO: 22825 - DNA, 77 bp, Homo sapiens
cggtggataaagaagccaactcctgccagcaccagaagcaggaccacaccgacagccacgccgccaatcaccgccaa

SEQ ID NO: 22826 - DNA, 78 bp, Homo sapiens
ataaagaagccaactcctgccagcaccagaagcaggaccacaccgacagccacgccgccaatcaccgccaagttgcca

SEQ ID NO: 22827 - DNA, 77 bp, Homo sapiens
aactcctgccagcaccagaagcaggaccacaccgacagccacgccgccaatcaccgccaagttgccagatccctccg

SEQ ID NO: 22828 - DNA, 75 bp, Homo sapiens
ccagaagcaggaccacaccgacagccacgccgccaatcaccgccaagttgccagatccctccggggctggtggaa

SEQ ID NO: 22829 - DNA, 74 bp, Homo sapiens
agcaggaccacaccgacagccacgccgccaatcaccgccaagttgccagatccctccggggctggtggaagaaa

SEQ ID NO: 22830 - DNA, 77 bp, Homo sapiens
accgacagccacgccgccaatcaccgccaagttgccagatccctccggggctggtggaagaaatcagctgatgacaa

SEQ ID NO: 22831 - DNA, 75 bp, Homo sapiens
acgccgccaatcaccgccaagttgccagatccctccggggctggtggaagaaatcagctgatgacaagggagttc

SEQ ID NO: 22832 - DNA, 75 bp, Homo sapiens
ttggttctgggccctggcctggtccatgcccagggtcccccaactcacacagcgtctggaattcgtgcaccttgc

SEQ ID NO: 22833 - DNA, 76 bp, Homo sapiens
tgggccctggcctggtccatgcccagggtcccccaactcacacagcgtctggaattcgtgcaccttgctgccggcc

SEQ ID NO: 22834 - DNA, 75 bp, Homo sapiens
tggtccatgcccagggtcccccaactcacacagcgtctggaattcgtgcaccttgctgccggccccctggccctc

SEQ ID NO: 22835 - DNA, 75 bp, Homo sapiens
agggtcccccaactcacacagcgtctggaattcgtgcaccttgctgccggccccctggccctcctgcgtcagtgc

SEQ ID NO: 22836 - DNA, 79 bp, Homo sapiens
aactcacacagcgtctggaattcgtgcaccttgctgccggccccctggccctcctgcgtcagtgcctgcacctggacca

SEQ ID NO: 22837 - DNA, 77 bp, Homo sapiens
acagcgtctggaattcgtgcaccttgctgccggccccctggccctcctgcgtcagtgcctgcacctggaccaggtag

SEQ ID NO: 22838 - DNA, 76 bp, Homo sapiens
aattcgtgcaccttgctgccggccccctggccctcctgcgtcagtgcctgcacctggaccaggtaggtggtgtctg

SEQ ID NO: 22839 - DNA, 74 bp, Homo sapiens
accttgctgccggccccctggccctcctgcgtcagtgcctgcacctggaccaggtaggtggtgtctggggccag

SEQ ID NO: 22840 - DNA, 74 bp, Homo sapiens
cccctggccctcctgcgtcagtgcctgcacctggaccaggtaggtggtgtctggggccaggtcgtccagggtca

SEQ ID NO: 22841 - DNA, 74 bp, Homo sapiens
tcctgcgtcagtgcctgcacctggaccaggtaggtggtgtctggggccaggtcgtccagggtcacggagaaacc

SEQ ID NO: 22842 - DNA, 70 bp, Homo sapiens
agtgcctgcacctggaccaggtaggtggtgtctggggccaggtcgtccagggtcacggagaaaccctcgg

SEQ ID NO: 22843 - DNA, 71 bp, Homo sapiens
ctggaccaggtaggtggtgtctggggccaggtcgtccagggtcacggagaaaccctcggtgcggcgcacat

SEQ ID NO: 22844 - DNA, 74 bp, Homo sapiens
taggtggtgtctggggccaggtcgtccagggtcacggagaaaccctcggtgcggcgcacattgtagctgttgga

SEQ ID NO: 22845 - DNA, 74 bp, Homo sapiens
tctggggccaggtcgtccagggtcacggagaaaccctcggtgcggcgcacattgtagctgttggagtctccctg

SEQ ID NO: 22846 - DNA, 72 bp, Homo sapiens
aggtcgtccagggtcacggagaaaccctcggtgcggcgcacattgtagctgttggagtctccctgtgggtgg

SEQ ID NO: 22847 - DNA, 72 bp, Homo sapiens
agggtcacggagaaaccctcggtgcggcgcacattgtagctgttggagtctccctgtgggtgggtggccggc

SEQ ID NO: 22848 - DNA, 75 bp, Homo sapiens
agaaaccctcggtgcggcgcacattgtagctgttggagtctccctgtgggtgggtggccggcggaggagcaggca

SEQ ID NO: 22849 - DNA, 82 bp, Homo sapiens
atctgcagaagggtgcttcttcagatggctgggtggtttggtgatcatctatgtgaccagcctgtcccctgctgtcggccca

SEQ ID NO: 22850 - DNA, 80 bp, Homo sapiens
aagggtgcttcttcagatggctgggtggtttggtgatcatctatgtgaccagcctgtcccctgctgtcggcccagctaga

SEQ ID NO: 22851 - DNA, 82 bp, Homo sapiens
tcttcagatggctgggtggtttggtgatcatctatgtgaccagcctgtcccctgctgtcggcccagctagagccagccccgc

SEQ ID NO: 22852 - DNA, 78 bp, Homo sapiens
ctgggtggtttggtgatcatctatgtgaccagcctgtcccctgctgtcggcccagctagagccagccccgcccctctg

SEQ ID NO: 22853 - DNA, 78 bp, Homo sapiens
tgatcatctatgtgaccagcctgtcccctgctgtcggcccagctagagccagccccgcccctctgggagttaccttct

SEQ ID NO: 22854 - DNA, 76 bp, Homo sapiens
tctatgtgaccagcctgtcccctgctgtcggcccagctagagccagccccgcccctctgggagttaccttcttgcg

SEQ ID NO: 22855 - DNA, 73 bp, Homo sapiens
tgtcccctgctgtcggcccagctagagccagccccgcccctctgggagttaccttcttgcggtaagtgacctc

SEQ ID NO: 22856 - DNA, 72 bp, Homo sapiens
tgtcggcccagctagagccagccccgcccctctgggagttaccttcttgcggtaagtgacctcgtacttcca

SEQ ID NO: 22857 - DNA, 71 bp, Homo sapiens
agctagagccagccccgcccctctgggagttaccttcttgcggtaagtgacctcgtacttccacactcggc

SEQ ID NO: 22858 - DNA, 72 bp, Homo sapiens
agccccgcccctctgggagttaccttcttgcggtaagtgacctcgtacttccacactcggctctgctgcggc

SEQ ID NO: 22859 - DNA, 75 bp, Homo sapiens
tctgggagttaccttcttgcggtaagtgacctcgtacttccacactcggctctgctgcggcggggggatgctcca

SEQ ID NO: 22860 - DNA, 74 bp, Homo sapiens
agttaccttcttgcggtaagtgacctcgtacttccacactcggctctgctgcggcggggggatgctccaggaga

SEQ ID NO: 22861 - DNA, 76 bp, Homo sapiens
ttgcggtaagtgacctcgtacttccacactcggctctgctgcggcggggggatgctccaggagacgctaagcgagg

SEQ ID NO: 22862 - DNA, 79 bp, Homo sapiens
gtgacctcgtacttccacactcggctctgctgcggcggggggatgctccaggagacgctaagcgaggtggtgctgcggc

SEQ ID NO: 22863 - DNA, 78 bp, Homo sapiens
acttccacactcggctctgctgcggcggggggatgctccaggagacgctaagcgaggtggtgctgcggccctccagcc

SEQ ID NO: 22864 - DNA, 78 bp, Homo sapiens
tcggctctgctgcggcggggggatgctccaggagacgctaagcgaggtggtgctgcggccctccagcctcaccttggg

SEQ ID NO: 22865 - DNA, 76 bp, Homo sapiens
tgcggcggggggatgctccaggagacgctaagcgaggtggtgctgcggccctccagcctcaccttggggggctctg

SEQ ID NO: 22866 - DNA, 78 bp, Homo sapiens
atgctccaggagacgctaagcgaggtggtgctgcggccctccagcctcaccttggggggctctgggcaggacaggcag

SEQ ID NO: 22867 - DNA, 75 bp, Homo sapiens
ggagacgctaagcgaggtggtgctgcggccctccagcctcaccttggggggctctgggcaggacaggcagtgggg

SEQ ID NO: 22868 - DNA, 72 bp, Homo sapiens
aggtggtgctgcggccctccagcctcaccttggggggctctgggcaggacaggcagtgggggaagtgggtaa

SEQ ID NO: 22869 - DNA, 79 bp, Homo sapiens
acctgggcaggccccatagggcacagctgccacccctggacctcacctgtctggttgatgctgacactggcagtacgga

SEQ ID NO: 22870 - DNA, 80 bp, Homo sapiens
aggccccatagggcacagctgccacccctggacctcacctgtctggttgatgctgacactggcagtacggaagctgcggc

SEQ ID NO: 22871 - DNA, 80 bp, Homo sapiens
atagggcacagctgccacccctggacctcacctgtctggttgatgctgacactggcagtacggaagctgcggctggttac

SEQ ID NO: 22872 - DNA, 78 bp, Homo sapiens
ccacccctggacctcacctgtctggttgatgctgacactggcagtacggaagctgcggctggttaccaggcctgagac

SEQ ID NO: 22873 - DNA, 81 bp, Homo sapiens
tggacctcacctgtctggttgatgctgacactggcagtacggaagctgcggctggttaccaggcctgagacgccattgcgg

SEQ ID NO: 22874 - DNA, 81 bp, Homo sapiens
tctggttgatgctgacactggcagtacggaagctgcggctggttaccaggcctgagacgccattgcgggcctccacggtga

SEQ ID NO: 22875 - DNA, 77 bp, Homo sapiens
ctgacactggcagtacggaagctgcggctggttaccaggcctgagacgccattgcgggcctccacggtgaaggtgta

SEQ ID NO: 22876 - DNA, 76 bp, Homo sapiens
aagctgcggctggttaccaggcctgagacgccattgcgggcctccacggtgaaggtgtagttcatgtggggctcca

SEQ ID NO: 22877 - DNA, 76 bp, Homo sapiens
gttaccaggcctgagacgccattgcgggcctccacggtgaaggtgtagttcatgtggggctccaggtcgctcactg

SEQ ID NO: 22878 - DNA, 78 bp, Homo sapiens
aggcctgagacgccattgcgggcctccacggtgaaggtgtagttcatgtggggctccaggtcgctcactgtcacactg

SEQ ID NO: 22879 - DNA, 77 bp, Homo sapiens
attgcgggcctccacggtgaaggtgtagttcatgtggggctccaggtcgctcactgtcacactggtgcgggtcagtc

SEQ ID NO: 22880 - DNA, 77 bp, Homo sapiens
ctccacggtgaaggtgtagttcatgtggggctccaggtcgctcactgtcacactggtgcgggtcagtccgtgaggag

SEQ ID NO: 22881 - DNA, 77 bp, Homo sapiens
aaggtgtagttcatgtggggctccaggtcgctcactgtcacactggtgcgggtcagtccgtgaggaggctccgagta

SEQ ID NO: 22882 - DNA, 81 bp, Homo sapiens
tagttcatgtggggctccaggtcgctcactgtcacactggtgcgggtcagtccgtgaggaggctccgagtagcgcacactg

SEQ ID NO: 22883 - DNA, 80 bp, Homo sapiens
gggctccaggtcgctcactgtcacactggtgcgggtcagtccgtgaggaggctccgagtagcgcacactggcctcacacg

SEQ ID NO: 22884 - DNA, 79 bp, Homo sapiens
ctcactgtcacactggtgcgggtcagtccgtgaggaggctccgagtagcgcacactggcctcacacggcccgcattccc

SEQ ID NO: 22885 - DNA, 79 bp, Homo sapiens
tcacactggtgcgggtcagtccgtgaggaggctccgagtagcgcacactggcctcacacggcccgcattccccagactc

SEQ ID NO: 22886 - DNA, 80 bp, Homo sapiens
gtgaggaggctccgagtagcgcacactggcctcacacggcccgcattccccagactcgggccagcactgttcgcaggtga

SEQ ID NO: 22887 - DNA, 80 bp, Homo sapiens
cgagtagcgcacactggcctcacacggcccgcattccccagactcgggccagcactgttcgcaggtgacgctgtagacaa

SEQ ID NO: 22888 - DNA, 79 bp, Homo sapiens
acactggcctcacacggcccgcattccccagactcgggccagcactgttcgcaggtgacgctgtagacaatgtcctcgc

SEQ ID NO: 22889 - DNA, 77 bp, Homo sapiens
cctcacacggcccgcattccccagactcgggccagcactgttcgcaggtgacgctgtagacaatgtcctcgcggccc

SEQ ID NO: 22890 - DNA, 78 bp, Homo sapiens
ccgcattccccagactcgggccagcactgttcgcaggtgacgctgtagacaatgtcctcgcggcccccgctgtcctga

SEQ ID NO: 22891 - DNA, 76 bp, Homo sapiens
agactcgggccagcactgttcgcaggtgacgctgtagacaatgtcctcgcggcccccgctgtcctgagggggcgtc

SEQ ID NO: 22892 - DNA, 79 bp, Homo sapiens
agcactgttcgcaggtgacgctgtagacaatgtcctcgcggcccccgctgtcctgagggggcgtccagcgcagctccac

SEQ ID NO: 22893 - DNA, 78 bp, Homo sapiens
tgttcgcaggtgacgctgtagacaatgtcctcgcggcccccgctgtcctgagggggcgtccagcgcagctccaccttg

SEQ ID NO: 22894 - DNA, 79 bp, Homo sapiens
tgacgctgtagacaatgtcctcgcggcccccgctgtcctgagggggcgtccagcgcagctccaccttggcacccatgcc

SEQ ID NO: 22895 - DNA, 77 bp, Homo sapiens
aatgtcctcgcggcccccgctgtcctgagggggcgtccagcgcagctccaccttggcacccatgcccacggctgtga

SEQ ID NO: 22896 - DNA, 77 bp, Homo sapiens
ggcgtccagcgcagctccaccttggcacccatgcccacggctgtgaggtagtgtggggcggaggggggtcctgcaca

SEQ ID NO: 22897 - DNA, 76 bp, Homo sapiens
cagctccaccttggcacccatgcccacggctgtgaggtagtgtggggcggaggggggtcctgcacagacaggagga

SEQ ID NO: 22898 - DNA, 74 bp, Homo sapiens
accttggcacccatgcccacggctgtgaggtagtgtggggcggaggggggtcctgcacagacaggaggagtcag

SEQ ID NO: 22899 - DNA, 83 bp, Homo sapiens
tcctgcacagacaggaggagtcagtgctgtgctggacccaggcggacacgtcaccctcagtcacgccaccctgacccactgca

SEQ ID NO: 22900 - DNA, 79 bp, Homo sapiens
cggacacgtcaccctcagtcacgccaccctgacccactgcaagactcacgtgtgcaaggcatcgacgctgggtcctgag

SEQ ID NO: 22901 - DNA, 79 bp, Homo sapiens
ctcagtcacgccaccctgacccactgcaagactcacgtgtgcaaggcatcgacgctgggtcctgaggtgcccggaagaa

SEQ ID NO: 22902 - DNA, 76 bp, Homo sapiens
ccaccctgacccactgcaagactcacgtgtgcaaggcatcgacgctgggtcctgaggtgcccggaagaagccttcc

SEQ ID NO: 22903 - DNA, 79 bp, Homo sapiens
acccactgcaagactcacgtgtgcaaggcatcgacgctgggtcctgaggtgcccggaagaagccttcctcacactcgca

SEQ ID NO: 22904 - DNA, 77 bp, Homo sapiens
aagactcacgtgtgcaaggcatcgacgctgggtcctgaggtgcccggaagaagccttcctcacactcgcaggaggtg

SEQ ID NO: 22905 - DNA, 78 bp, Homo sapiens
cgtgtgcaaggcatcgacgctgggtcctgaggtgcccggaagaagccttcctcacactcgcaggaggtggcaccctca

SEQ ID NO: 22906 - DNA, 76 bp, Homo sapiens
atcgacgctgggtcctgaggtgcccggaagaagccttcctcacactcgcaggaggtggcaccctcaggggatggca

SEQ ID NO: 22907 - DNA, 79 bp, Homo sapiens
tgggtcctgaggtgcccggaagaagccttcctcacactcgcaggaggtggcaccctcaggggatggcagcgtgtgctca

SEQ ID NO: 22908 - DNA, 79 bp, Homo sapiens
gtgcccggaagaagccttcctcacactcgcaggaggtggcaccctcaggggatggcagcgtgtgctcagggcactccaa

SEQ ID NO: 22909 - DNA, 81 bp, Homo sapiens
aagccttcctcacactcgcaggaggtggcaccctcaggggatggcagcgtgtgctcagggcactccaagcaggggctctca

SEQ ID NO: 22910 - DNA, 81 bp, Homo sapiens
actcgcaggaggtggcaccctcaggggatggcagcgtgtgctcagggcactccaagcaggggctctcagatgcctcaaact

SEQ ID NO: 22911 - DNA, 78 bp, Homo sapiens
aggtggcaccctcaggggatggcagcgtgtgctcagggcactccaagcaggggctctcagatgcctcaaacttaaaaa

SEQ ID NO: 22912 - DNA, 77 bp, Homo sapiens
accctcaggggatggcagcgtgtgctcagggcactccaagcaggggctctcagatgcctcaaacttaaaaaatccag

SEQ ID NO: 22913 - DNA, 81 bp, Homo sapiens
atggcagcgtgtgctcagggcactccaagcaggggctctcagatgcctcaaacttaaaaaatccaggcgagcaggctggtg

SEQ ID NO: 22914 - DNA, 79 bp, Homo sapiens
ctcagggcactccaagcaggggctctcagatgcctcaaacttaaaaaatccaggcgagcaggctggtggacacaggaca

SEQ ID NO: 22915 - DNA, 81 bp, Homo sapiens
tccaagcaggggctctcagatgcctcaaacttaaaaaatccaggcgagcaggctggtggacacaggacagacagagcacaa

SEQ ID NO: 22916 - DNA, 81 bp, Homo sapiens
ggctctcagatgcctcaaacttaaaaaatccaggcgagcaggctggtggacacaggacagacagagcacaaggacatcagt

SEQ ID NO: 22917 - DNA, 71 bp, Homo sapiens
aacctgggaatgcagaacccccttccctgcaacccagaaccgtcactcaccctggcaggcatcctccacct

SEQ ID NO: 22918 - DNA, 75 bp, Homo sapiens
atgcagaacccccttccctgcaacccagaaccgtcactcaccctggcaggcatcctccaccttctcgtagcctgc

SEQ ID NO: 22919 - DNA, 77 bp, Homo sapiens
cccttccctgcaacccagaaccgtcactcaccctggcaggcatcctccaccttctcgtagcctgcctggcacaggca

SEQ ID NO: 22920 - DNA, 77 bp, Homo sapiens
aacccagaaccgtcactcaccctggcaggcatcctccaccttctcgtagcctgcctggcacaggcactgcccaatgg

SEQ ID NO: 22921 - DNA, 84 bp, Homo sapiens
tcactcaccctggcaggcatcctccaccttctcgtagcctgcctggcacaggcactgcccaatgggcaccagccactcgccatc

SEQ ID NO: 22922 - DNA, 88 bp, Homo sapiens
gcaggcatcctccaccttctcgtagcctgcctggcacaggcactgcccaatgggcaccagccactcgccatccactgcacagtgcata

SEQ ID NO: 22923 - DNA, 84 bp, Homo sapiens
atcctccaccttctcgtagcctgcctggcacaggcactgcccaatgggcaccagccactcgccatccactgcacagtgcatacg

SEQ ID NO: 22924 - DNA, 85 bp, Homo sapiens
ttctcgtagcctgcctggcacaggcactgcccaatgggcaccagccactcgccatccactgcacagtgcatacggggctcttcac

SEQ ID NO: 22925 - DNA, 80 bp, Homo sapiens
ctggcacaggcactgcccaatgggcaccagccactcgccatccactgcacagtgcatacggggctcttcaccccccggtg

SEQ ID NO: 22926 - DNA, 79 bp, Homo sapiens
aggcactgcccaatgggcaccagccactcgccatccactgcacagtgcatacggggctcttcaccccccggtggcacca

SEQ ID NO: 22927 - DNA, 78 bp, Homo sapiens
aatgggcaccagccactcgccatccactgcacagtgcatacggggctcttcaccccccggtggcaccacggcatggtc

SEQ ID NO: 22928 - DNA, 78 bp, Homo sapiens
accagccactcgccatccactgcacagtgcatacggggctcttcaccccccggtggcaccacggcatggtccacacag

SEQ ID NO: 22929 - DNA, 78 bp, Homo sapiens
cgccatccactgcacagtgcatacggggctcttcaccccccggtggcaccacggcatggtccacacaggtgccggcca

SEQ ID NO: 22930 - DNA, 76 bp, Homo sapiens
gggctcttcaccccccggtggcaccacggcatggtccacacaggtgccggccacagtggccagggaaggtgcatca

SEQ ID NO: 22931 - DNA, 76 bp, Homo sapiens
cttcaccccccggtggcaccacggcatggtccacacaggtgccggccacagtggccagggaaggtgcatcagagcc

SEQ ID NO: 22932 - DNA, 81 bp, Homo sapiens
tggcaccacggcatggtccacacaggtgccggccacagtggccagggaaggtgcatcagagccggcgatggtctcagggaa

SEQ ID NO: 22933 - DNA, 78 bp, Homo sapiens
acggcatggtccacacaggtgccggccacagtggccagggaaggtgcatcagagccggcgatggtctcagggaagtgg

SEQ ID NO: 22934 - DNA, 79 bp, Homo sapiens
acacaggtgccggccacagtggccagggaaggtgcatcagagccggcgatggtctcagggaagtgggccaggccctgca

SEQ ID NO: 22935 - DNA, 79 bp, Homo sapiens
cggccacagtggccagggaaggtgcatcagagccggcgatggtctcagggaagtgggccaggccctgcagcagctcggg

SEQ ID NO: 22936 - DNA, 79 bp, Homo sapiens
cagggaaggtgcatcagagccggcgatggtctcagggaagtgggccaggccctgcagcagctcggggcacttcttgtag

SEQ ID NO: 22937 - DNA, 80 bp, Homo sapiens
aaggtgcatcagagccggcgatggtctcagggaagtgggccaggccctgcagcagctcggggcacttcttgtagtagaca

SEQ ID NO: 22938 - DNA, 76 bp, Homo sapiens
agagccggcgatggtctcagggaagtgggccaggccctgcagcagctcggggcacttcttgtagtagacacggacg

SEQ ID NO: 22939 - DNA, 80 bp, Homo sapiens
tctcagggaagtgggccaggccctgcagcagctcggggcacttcttgtagtagacacggacggagagcagcgccacacag

SEQ ID NO: 22940 - DNA, 81 bp, Homo sapiens
tgggccaggccctgcagcagctcggggcacttcttgtagtagacacggacggagagcagcgccacacaggcaccgatatcc

SEQ ID NO: 22941 - DNA, 81 bp, Homo sapiens
cctgcagcagctcggggcacttcttgtagtagacacggacggagagcagcgccacacaggcaccgatatcctggaaggcca

SEQ ID NO: 22942 - DNA, 78 bp, Homo sapiens
agcagctcggggcacttcttgtagtagacacggacggagagcagcgccacacaggcaccgatatcctggaaggccagg

SEQ ID NO: 22943 - DNA, 75 bp, Homo sapiens
acttcttgtagtagacacggacggagagcagcgccacacaggcaccgatatcctggaaggccaggtagaagcctt

SEQ ID NO: 22944 - DNA, 77 bp, Homo sapiens
gtagtagacacggacggagagcagcgccacacaggcaccgatatcctggaaggccaggtagaagcctttgcgggtga

SEQ ID NO: 22945 - DNA, 75 bp, Homo sapiens
acggagagcagcgccacacaggcaccgatatcctggaaggccaggtagaagcctttgcgggtgagcggccccacg

SEQ ID NO: 22946 - DNA, 72 bp, Homo sapiens
aggcaccgatatcctggaaggccaggtagaagcctttgcgggtgagcggccccacggagcgctcctccacgt

SEQ ID NO: 22947 - DNA, 74 bp, Homo sapiens
aggtagaagcctttgcgggtgagcggccccacggagcgctcctccacgttcagcttcacgtggcgtgcctcgaa

SEQ ID NO: 22948 - DNA, 78 bp, Homo sapiens
agcctttgcgggtgagcggccccacggagcgctcctccacgttcagcttcacgtggcgtgcctcgaagtcgctgctga

SEQ ID NO: 22949 - DNA, 81 bp, Homo sapiens
tgagcggccccacggagcgctcctccacgttcagcttcacgtggcgtgcctcgaagtcgctgctgacggtgatctcatcgg

SEQ ID NO: 22950 - DNA, 81 bp, Homo sapiens
acggagcgctcctccacgttcagcttcacgtggcgtgcctcgaagtcgctgctgacggtgatctcatcgggcgcaatggtg

SEQ ID NO: 22951 - DNA, 82 bp, Homo sapiens
ctcctccacgttcagcttcacgtggcgtgcctcgaagtcgctgctgacggtgatctcatcgggcgcaatggtgtcaatcttg

SEQ ID NO: 22952 - DNA, 82 bp, Homo sapiens
acgttcagcttcacgtggcgtgcctcgaagtcgctgctgacggtgatctcatcgggcgcaatggtgtcaatcttggtgaaca

SEQ ID NO: 22953 - DNA, 82 bp, Homo sapiens
tggcgtgcctcgaagtcgctgctgacggtgatctcatcgggcgcaatggtgtcaatcttggtgaacaggcgcttctggaagt

SEQ ID NO: 22954 - DNA, 81 bp, Homo sapiens
cctcgaagtcgctgctgacggtgatctcatcgggcgcaatggtgtcaatcttggtgaacaggcgcttctggaagttggtgc

SEQ ID NO: 22955 - DNA, 82 bp, Homo sapiens
tcgctgctgacggtgatctcatcgggcgcaatggtgtcaatcttggtgaacaggcgcttctggaagttggtgccgtagtcca

SEQ ID NO: 22956 - DNA, 77 bp, Homo sapiens
atctcatcgggcgcaatggtgtcaatcttggtgaacaggcgcttctggaagttggtgccgtagtccaggtccgactc

SEQ ID NO: 22957 - DNA, 78 bp, Homo sapiens
gcgcaatggtgtcaatcttggtgaacaggcgcttctggaagttggtgccgtagtccaggtccgactcggcatagtaga

SEQ ID NO: 22958 - DNA, 76 bp, Homo sapiens
tgtcaatcttggtgaacaggcgcttctggaagttggtgccgtagtccaggtccgactcggcatagtagaggttgaa

SEQ ID NO: 22959 - DNA, 74 bp, Homo sapiens
ttggtgaacaggcgcttctggaagttggtgccgtagtccaggtccgactcggcatagtagaggttgaaagtctc

SEQ ID NO: 22960 - DNA, 74 bp, Homo sapiens
aggcgcttctggaagttggtgccgtagtccaggtccgactcggcatagtagaggttgaaagtctccttgcagga

SEQ ID NO: 22961 - DNA, 75 bp, Homo sapiens
aagttggtgccgtagtccaggtccgactcggcatagtagaggttgaaagtctccttgcaggagctggcgccacca

SEQ ID NO: 22962 - DNA, 75 bp, Homo sapiens
cgtagtccaggtccgactcggcatagtagaggttgaaagtctccttgcaggagctggcgccaccagggaagctgt

SEQ ID NO: 22963 - DNA, 79 bp, Homo sapiens
gtccgactcggcatagtagaggttgaaagtctccttgcaggagctggcgccaccagggaagctgttgcagtcacgtaca

SEQ ID NO: 22964 - DNA, 77 bp, Homo sapiens
atagtagaggttgaaagtctccttgcaggagctggcgccaccagggaagctgttgcagtcacgtacagtaaacttga

SEQ ID NO: 22965 - DNA, 81 bp, Homo sapiens
ttgaaagtctccttgcaggagctggcgccaccagggaagctgttgcagtcacgtacagtaaacttgagctcaatgaagata

SEQ ID NO: 22966 - DNA, 82 bp, Homo sapiens
agtctccttgcaggagctggcgccaccagggaagctgttgcagtcacgtacagtaaacttgagctcaatgaagatacgctca

SEQ ID NO: 22967 - DNA, 81 bp, Homo sapiens
aggagctggcgccaccagggaagctgttgcagtcacgtacagtaaacttgagctcaatgaagatacgctcagcctctcctc

SEQ ID NO: 22968 - DNA, 78 bp, Homo sapiens
accagggaagctgttgcagtcacgtacagtaaacttgagctcaatgaagatacgctcagcctctcctcggtacaccca

SEQ ID NO: 22969 - DNA, 79 bp, Homo sapiens
aagctgttgcagtcacgtacagtaaacttgagctcaatgaagatacgctcagcctctcctcggtacacccagttggtgc

SEQ ID NO: 22970 - DNA, 76 bp, Homo sapiens
acgtacagtaaacttgagctcaatgaagatacgctcagcctctcctcggtacacccagttggtgcggagccagttg

SEQ ID NO: 22971 - DNA, 76 bp, Homo sapiens
agtaaacttgagctcaatgaagatacgctcagcctctcctcggtacacccagttggtgcggagccagttgtcctgg

SEQ ID NO: 22972 - DNA, 79 bp, Homo sapiens
tcaatgaagatacgctcagcctctcctcggtacacccagttggtgcggagccagttgtcctggtcgccagacatcacgt

SEQ ID NO: 22973 - DNA, 79 bp, Homo sapiens
aagatacgctcagcctctcctcggtacacccagttggtgcggagccagttgtcctggtcgccagacatcacgttgcaca

SEQ ID NO: 22974 - DNA, 79 bp, Homo sapiens
tctcctcggtacacccagttggtgcggagccagttgtcctggtcgccagacatcacgttgcacacggagtacatgtaga

SEQ ID NO: 22975 - DNA, 82 bp, Homo sapiens
tacacccagttggtgcggagccagttgtcctggtcgccagacatcacgttgcacacggagtacatgtagatcggcatgtcat

SEQ ID NO: 22976 - DNA, 84 bp, Homo sapiens
agttggtgcggagccagttgtcctggtcgccagacatcacgttgcacacggagtacatgtagatcggcatgtcattcatgatgt

SEQ ID NO: 22977 - DNA, 87 bp, Homo sapiens
cagttgtcctggtcgccagacatcacgttgcacacggagtacatgtagatcggcatgtcattcatgatgttctgcatcaggtcccac

SEQ ID NO: 22978 - DNA, 87 bp, Homo sapiens
gtcctggtcgccagacatcacgttgcacacggagtacatgtagatcggcatgtcattcatgatgttctgcatcaggtcccactgtgg

SEQ ID NO: 22979 - DNA, 82 bp, Homo sapiens
agtacatgtagatcggcatgtcattcatgatgttctgcatcaggtcccactgtggggggaagatacaggttagtgtgggcag

SEQ ID NO: 22980 - DNA, 82 bp, Homo sapiens
tagatcggcatgtcattcatgatgttctgcatcaggtcccactgtggggggaagatacaggttagtgtgggcaggtgcctgg

SEQ ID NO: 22981 - DNA, 72 bp, Homo sapiens
atctctacaggggaccagcagccccattctcacacctctccccaccccgaaggcttacatacccctttgcca

SEQ ID NO: 22982 - DNA, 70 bp, Homo sapiens
gggaccagcagccccattctcacacctctccccaccccgaaggcttacatacccctttgccatacgggtg

SEQ ID NO: 22983 - DNA, 73 bp, Homo sapiens
agcagccccattctcacacctctccccaccccgaaggcttacatacccctttgccatacgggtgtgtgagcca

SEQ ID NO: 22984 - DNA, 73 bp, Homo sapiens
attctcacacctctccccaccccgaaggcttacatacccctttgccatacgggtgtgtgagccagccgagctc

SEQ ID NO: 22985 - DNA, 75 bp, Homo sapiens
cccaccccgaaggcttacatacccctttgccatacgggtgtgtgagccagccgagctcccctccagctgcagcaa

SEQ ID NO: 22986 - DNA, 78 bp, Homo sapiens
aaggcttacatacccctttgccatacgggtgtgtgagccagccgagctcccctccagctgcagcaaagtccagcagta

SEQ ID NO: 22987 - DNA, 78 bp, Homo sapiens
atacccctttgccatacgggtgtgtgagccagccgagctcccctccagctgcagcaaagtccagcagtaccactgaaa

SEQ ID NO: 22988 - DNA, 79 bp, Homo sapiens
tttgccatacgggtgtgtgagccagccgagctcccctccagctgcagcaaagtccagcagtaccactgaaagggagaag

SEQ ID NO: 22989 - DNA, 77 bp, Homo sapiens
gggtgtgtgagccagccgagctcccctccagctgcagcaaagtccagcagtaccactgaaagggagaagggagaggg

SEQ ID NO: 22990 - DNA, 75 bp, Homo sapiens
agccgagctcccctccagctgcagcaaagtccagcagtaccactgaaagggagaagggagagggggtgagcctgg

SEQ ID NO: 22991 - DNA, 75 bp, Homo sapiens
ctccagctgcagcaaagtccagcagtaccactgaaagggagaagggagagggggtgagcctgggggtgtcttcag

SEQ ID NO: 22992 - DNA, 71 bp, Homo sapiens
gggcactggggcccgggggccaggggtccagacgccgcgcgcactcaccttccttgccctgcgccgccgcg

SEQ ID NO: 22993 - DNA, 74 bp, Homo sapiens
ccgggggccaggggtccagacgccgcgcgcactcaccttccttgccctgcgccgccgcggccgcggccagcgca

SEQ ID NO: 22994 - DNA, 78 bp, Homo sapiens
aggggtccagacgccgcgcgcactcaccttccttgccctgcgccgccgcggccgcggccagcgcacagccccacagca

SEQ ID NO: 22995 - DNA, 80 bp, Homo sapiens
agacgccgcgcgcactcaccttccttgccctgcgccgccgcggccgcggccagcgcacagccccacagcagggcgaagca

SEQ ID NO: 22996 - DNA, 79 bp, Homo sapiens
actcaccttccttgccctgcgccgccgcggccgcggccagcgcacagccccacagcagggcgaagcaggcgcgggctgc

SEQ ID NO: 22997 - DNA, 79 bp, Homo sapiens
ccttccttgccctgcgccgccgcggccgcggccagcgcacagccccacagcagggcgaagcaggcgcgggctgcctgga

SEQ ID NO: 22998 - DNA, 83 bp, Homo sapiens
gccgccgcggccgcggccagcgcacagccccacagcagggcgaagcaggcgcgggctgcctggagctccatgccgcgcttctc

SEQ ID NO: 22999 - DNA, 83 bp, Homo sapiens
ccgcggccagcgcacagccccacagcagggcgaagcaggcgcgggctgcctggagctccatgccgcgcttctcgctctcggtc

SEQ ID NO: 23000 - DNA, 82 bp, Homo sapiens
agcgcacagccccacagcagggcgaagcaggcgcgggctgcctggagctccatgccgcgcttctcgctctcggtccgatccc

SEQ ID NO: 23001 - DNA, 79 bp, Homo sapiens
cacagcagggcgaagcaggcgcgggctgcctggagctccatgccgcgcttctcgctctcggtccgatccccccgagccc

SEQ ID NO: 23002 - DNA, 76 bp, Homo sapiens
agggcgaagcaggcgcgggctgcctggagctccatgccgcgcttctcgctctcggtccgatccccccgagcccggc

SEQ ID NO: 23003 - DNA, 76 bp, Homo sapiens
aggcgcgggctgcctggagctccatgccgcgcttctcgctctcggtccgatccccccgagcccggctcccgcacac

SEQ ID NO: 23004 - DNA, 77 bp, Homo sapiens
ctggagctccatgccgcgcttctcgctctcggtccgatccccccgagcccggctcccgcacacccgcacgcctgcac

SEQ ID NO: 23005 - DNA, 75 bp, Homo sapiens
ctccatgccgcgcttctcgctctcggtccgatccccccgagcccggctcccgcacacccgcacgcctgcacgccg

SEQ ID NO: 23006 - DNA, 73 bp, Homo sapiens
ttctcgctctcggtccgatccccccgagcccggctcccgcacacccgcacgcctgcacgccggcctcggtgtc

SEQ ID NO: 23007 - DNA, 72 bp, Homo sapiens
tctcggtccgatccccccgagcccggctcccgcacacccgcacgcctgcacgccggcctcggtgtccgctcc

SEQ ID NO: 23008 - DNA, 72 bp, Homo sapiens
cccgagcccggctcccgcacacccgcacgcctgcacgccggcctcggtgtccgctcccgcccgccggcctgc

SEQ ID NO: 23009 - DNA, 76 bp, Homo sapiens
gctcccgcacacccgcacgcctgcacgccggcctcggtgtccgctcccgcccgccggcctgcgcgcaacttctgcc

SEQ ID NO: 23010 - DNA, 73 bp, Homo sapiens
acacccgcacgcctgcacgccggcctcggtgtccgctcccgcccgccggcctgcgcgcaacttctgcccctcc

SEQ ID NO: 23011 - DNA, 73 bp, Homo sapiens
acgcctgcacgccggcctcggtgtccgctcccgcccgccggcctgcgcgcaacttctgcccctcctgccccga

SEQ ID NO: 23012 - DNA, 72 bp, Homo sapiens
gcctcggtgtccgctcccgcccgccggcctgcgcgcaacttctgcccctcctgccccgagtccttaatggaa

SEQ ID NO: 23013 - DNA, 72 bp, Homo sapiens
tccgctcccgcccgccggcctgcgcgcaacttctgcccctcctgccccgagtccttaatggaagttgggtga

SEQ ID NO: 23014 - DNA, 71 bp, Homo sapiens
ccgccggcctgcgcgcaacttctgcccctcctgccccgagtccttaatggaagttgggtgagaaccgactc

SEQ ID NO: 23015 - DNA, 74 bp, Homo sapiens
ctgcgcgcaacttctgcccctcctgccccgagtccttaatggaagttgggtgagaaccgactcctgttcattca

SEQ ID NO: 23016 - DNA, 71 bp, Homo sapiens
aacttctgcccctcctgccccgagtccttaatggaagttgggtgagaaccgactcctgttcattcatgccc

SEQ ID NO: 23017 - DNA, 75 bp, Homo sapiens
tcctgccccgagtccttaatggaagttgggtgagaaccgactcctgttcattcatgccctgcgtgacgtcaccaa

SEQ ID NO: 23018 - DNA, 71 bp, Homo sapiens
ctggcgttgtgcgcggcaggcggggccggaggcggcggcggctccggggcgcgggcgcgcgggcggcggcg

SEQ ID NO: 23019 - DNA, 70 bp, Homo sapiens
gcggcggcggcggcgccccgactgcagtcccggcgggagcggagcgcgagccggggccgggcccgagccg

SEQ ID NO: 23020 - DNA, 70 bp, Homo sapiens
cggcgccccgactgcagtcccggcgggagcggagcgcgagccggggccgggcccgagccggcgccatggg

SEQ ID NO: 23021 - DNA, 71 bp, Homo sapiens
actgcagtcccggcgggagcggagcgcgagccggggccgggcccgagccggcgccatggggcggcgccgcc

SEQ ID NO: 23022 - DNA, 71 bp, Homo sapiens
agtcccggcgggagcggagcgcgagccggggccgggcccgagccggcgccatggggcggcgccgcctgtga

SEQ ID NO: 23023 - DNA, 74 bp, Homo sapiens
agcggagcgcgagccggggccgggcccgagccggcgccatggggcggcgccgcctgtgagcggcggcgagcgga

SEQ ID NO: 23024 - DNA, 72 bp, Homo sapiens
agccggggccgggcccgagccggcgccatggggcggcgccgcctgtgagcggcggcgagcggagccgcgggc

SEQ ID NO: 23025 - DNA, 76 bp, Homo sapiens
gggcccgagccggcgccatggggcggcgccgcctgtgagcggcggcgagcggagccgcgggcgccgagcagggcca

SEQ ID NO: 23026 - DNA, 76 bp, Homo sapiens
agccggcgccatggggcggcgccgcctgtgagcggcggcgagcggagccgcgggcgccgagcagggccaggcggga

SEQ ID NO: 23027 - DNA, 76 bp, Homo sapiens
gcggcgccgcctgtgagcggcggcgagcggagccgcgggcgccgagcagggccaggcgggaggcgtcggcgcccga

SEQ ID NO: 23028 - DNA, 76 bp, Homo sapiens
ctgtgagcggcggcgagcggagccgcgggcgccgagcagggccaggcgggaggcgtcggcgcccgaggccgagcga

SEQ ID NO: 23029 - DNA, 74 bp, Homo sapiens
agcggcggcgagcggagccgcgggcgccgagcagggccaggcgggaggcgtcggcgcccgaggccgagcgagcc

SEQ ID NO: 23030 - DNA, 71 bp, Homo sapiens
agccgcgggcgccgagcagggccaggcgggaggcgtcggcgcccgaggccgagcgagccgcggccgggccg

SEQ ID NO: 23031 - DNA, 70 bp, Homo sapiens
cgggcgccgagcagggccaggcgggaggcgtcggcgcccgaggccgagcgagccgcggccgggccgggcc

SEQ ID NO: 23032 - DNA, 74 bp, Homo sapiens
gccaggcgggaggcgtcggcgcccgaggccgagcgagccgcggccgggccgggccgagcgccgagcgagcagga

SEQ ID NO: 23033 - DNA, 73 bp, Homo sapiens
cgggaggcgtcggcgcccgaggccgagcgagccgcggccgggccgggccgagcgccgagcgagcaggagcggc

SEQ ID NO: 23034 - DNA, 74 bp, Homo sapiens
tcggcgcccgaggccgagcgagccgcggccgggccgggccgagcgccgagcgagcaggagcggcggcggcggcg

SEQ ID NO: 23035 - DNA, 76 bp, Homo sapiens
ggcggcggcggcgggaggaggcagcgccgccgccaagatggcggacctggaggcggtgctggccgacgtgagctac

SEQ ID NO: 23036 - DNA, 80 bp, Homo sapiens
gcgggaggaggcagcgccgccgccaagatggcggacctggaggcggtgctggccgacgtgagctacctgatggccatgga

SEQ ID NO: 23037 - DNA, 80 bp, Homo sapiens
aggaggcagcgccgccgccaagatggcggacctggaggcggtgctggccgacgtgagctacctgatggccatggagaaga

SEQ ID NO: 23038 - DNA, 79 bp, Homo sapiens
ccgccgccaagatggcggacctggaggcggtgctggccgacgtgagctacctgatggccatggagaagagcaaggccac

SEQ ID NO: 23039 - DNA, 79 bp, Homo sapiens
agatggcggacctggaggcggtgctggccgacgtgagctacctgatggccatggagaagagcaaggccacgccggccgc

SEQ ID NO: 23040 - DNA, 81 bp, Homo sapiens
aggcggtgctggccgacgtgagctacctgatggccatggagaagagcaaggccacgccggccgcgcgcgccagcaagaaga

SEQ ID NO: 23041 - DNA, 85 bp, Homo sapiens
gtgctggccgacgtgagctacctgatggccatggagaagagcaaggccacgccggccgcgcgcgccagcaagaagatcctgctgc

SEQ ID NO: 23042 - DNA, 82 bp, Homo sapiens
acgtgagctacctgatggccatggagaagagcaaggccacgccggccgcgcgcgccagcaagaagatcctgctgcccgagcc

SEQ ID NO: 23043 - DNA, 81 bp, Homo sapiens
atggccatggagaagagcaaggccacgccggccgcgcgcgccagcaagaagatcctgctgcccgagcccaggtgaggagaa

SEQ ID NO: 23044 - DNA, 81 bp, Homo sapiens
atggagaagagcaaggccacgccggccgcgcgcgccagcaagaagatcctgctgcccgagcccaggtgaggagaagctgcc

SEQ ID NO: 23045 - DNA, 77 bp, Homo sapiens
aaggccacgccggccgcgcgcgccagcaagaagatcctgctgcccgagcccaggtgaggagaagctgcccgcggccc

SEQ ID NO: 23046 - DNA, 75 bp, Homo sapiens
ccgcgcgcgccagcaagaagatcctgctgcccgagcccaggtgaggagaagctgcccgcggccccggcccgaccc

SEQ ID NO: 23047 - DNA, 80 bp, Homo sapiens
gcctgcagcccccacgggctctgggggcttctgcttactgcgcccccctgacccacagcatccgcagtgtcatgcagaag

SEQ ID NO: 23048 - DNA, 78 bp, Homo sapiens
cccacgggctctgggggcttctgcttactgcgcccccctgacccacagcatccgcagtgtcatgcagaagtacctgga

SEQ ID NO: 23049 - DNA, 77 bp, Homo sapiens
tctgggggcttctgcttactgcgcccccctgacccacagcatccgcagtgtcatgcagaagtacctggaggaccggg

SEQ ID NO: 23050 - DNA, 78 bp, Homo sapiens
cttctgcttactgcgcccccctgacccacagcatccgcagtgtcatgcagaagtacctggaggaccggggcgaggtga

SEQ ID NO: 23051 - DNA, 77 bp, Homo sapiens
tactgcgcccccctgacccacagcatccgcagtgtcatgcagaagtacctggaggaccggggcgaggtgacctttga

SEQ ID NO: 23052 - DNA, 75 bp, Homo sapiens
acccacagcatccgcagtgtcatgcagaagtacctggaggaccggggcgaggtgacctttgagaagatcttttcc

SEQ ID NO: 23053 - DNA, 76 bp, Homo sapiens
agcatccgcagtgtcatgcagaagtacctggaggaccggggcgaggtgacctttgagaagatcttttcccagaagc

SEQ ID NO: 23054 - DNA, 74 bp, Homo sapiens
agtgtcatgcagaagtacctggaggaccggggcgaggtgacctttgagaagatcttttcccagaagctgggtga

SEQ ID NO: 23055 - DNA, 72 bp, Homo sapiens
agaagtacctggaggaccggggcgaggtgacctttgagaagatcttttcccagaagctgggtgagtatggca

SEQ ID NO: 23056 - DNA, 76 bp, Homo sapiens
aggaccggggcgaggtgacctttgagaagatcttttcccagaagctgggtgagtatggcagtggctctgccagcca

SEQ ID NO: 23057 - DNA, 75 bp, Homo sapiens
ggtgacctttgagaagatcttttcccagaagctgggtgagtatggcagtggctctgccagccaccggacttaact

SEQ ID NO: 23058 - DNA, 76 bp, Homo sapiens
tttgagaagatcttttcccagaagctgggtgagtatggcagtggctctgccagccaccggacttaacttcttgccc

SEQ ID NO: 23059 - DNA, 78 bp, Homo sapiens
aatgatgggaaggcctctgagagaggcgtggctctgtgaccttacactgttgccttcagggtacctgctcttccgaga

SEQ ID NO: 23060 - DNA, 77 bp, Homo sapiens
aaggcctctgagagaggcgtggctctgtgaccttacactgttgccttcagggtacctgctcttccgagacttctgcc

SEQ ID NO: 23061 - DNA, 79 bp, Homo sapiens
tctgagagaggcgtggctctgtgaccttacactgttgccttcagggtacctgctcttccgagacttctgcctgaaccac

SEQ ID NO: 23062 - DNA, 77 bp, Homo sapiens
gctctgtgaccttacactgttgccttcagggtacctgctcttccgagacttctgcctgaaccacctggaggaggcca

SEQ ID NO: 23063 - DNA, 75 bp, Homo sapiens
gtgaccttacactgttgccttcagggtacctgctcttccgagacttctgcctgaaccacctggaggaggccaggc

SEQ ID NO: 23064 - DNA, 73 bp, Homo sapiens
ttgccttcagggtacctgctcttccgagacttctgcctgaaccacctggaggaggccaggcccttggtggaat

SEQ ID NO: 23065 - DNA, 73 bp, Homo sapiens
agggtacctgctcttccgagacttctgcctgaaccacctggaggaggccaggcccttggtggaattctatgag

SEQ ID NO: 23066 - DNA, 75 bp, Homo sapiens
tcttccgagacttctgcctgaaccacctggaggaggccaggcccttggtggaattctatgaggaggtgagaccca

SEQ ID NO: 23067 - DNA, 74 bp, Homo sapiens
cttctgcctgaaccacctggaggaggccaggcccttggtggaattctatgaggaggtgagacccagaggcccaa

SEQ ID NO: 23068 - DNA, 75 bp, Homo sapiens
tgaaccacctggaggaggccaggcccttggtggaattctatgaggaggtgagacccagaggcccaagccctgctc

SEQ ID NO: 23069 - DNA, 75 bp, Homo sapiens
aggaggccaggcccttggtggaattctatgaggaggtgagacccagaggcccaagccctgctctgcctggagaaa

SEQ ID NO: 23070 - DNA, 73 bp, Homo sapiens
aggcccttggtggaattctatgaggaggtgagacccagaggcccaagccctgctctgcctggagaaaggggag

SEQ ID NO: 23071 - DNA, 79 bp, Homo sapiens
attccctgctgggctctagatgacctgcaggaatcctgtcctccagatcaagaagtacgagaagctggagacggaggag

SEQ ID NO: 23072 - DNA, 80 bp, Homo sapiens
ctgggctctagatgacctgcaggaatcctgtcctccagatcaagaagtacgagaagctggagacggaggaggagcgtgtg

SEQ ID NO: 23073 - DNA, 80 bp, Homo sapiens
ctagatgacctgcaggaatcctgtcctccagatcaagaagtacgagaagctggagacggaggaggagcgtgtggcccgca

SEQ ID NO: 23074 - DNA, 77 bp, Homo sapiens
gaatcctgtcctccagatcaagaagtacgagaagctggagacggaggaggagcgtgtggcccgcagccgggagatct

SEQ ID NO: 23075 - DNA, 79 bp, Homo sapiens
ctccagatcaagaagtacgagaagctggagacggaggaggagcgtgtggcccgcagccgggagatcttcgactcataca

SEQ ID NO: 23076 - DNA, 80 bp, Homo sapiens
atcaagaagtacgagaagctggagacggaggaggagcgtgtggcccgcagccgggagatcttcgactcatacatcatgaa

SEQ ID NO: 23077 - DNA, 83 bp, Homo sapiens
tacgagaagctggagacggaggaggagcgtgtggcccgcagccgggagatcttcgactcatacatcatgaaggagctgctggc

SEQ ID NO: 23078 - DNA, 85 bp, Homo sapiens
acggaggaggagcgtgtggcccgcagccgggagatcttcgactcatacatcatgaaggagctgctggcctgctcgcatgtgagtg

SEQ ID NO: 23079 - DNA, 88 bp, Homo sapiens
aggagcgtgtggcccgcagccgggagatcttcgactcatacatcatgaaggagctgctggcctgctcgcatgtgagtgtcctcagctg

SEQ ID NO: 23080 - DNA, 88 bp, Homo sapiens
gtggcccgcagccgggagatcttcgactcatacatcatgaaggagctgctggcctgctcgcatgtgagtgtcctcagctggccctgtg

SEQ ID NO: 23081 - DNA, 91 bp, Homo sapiens
gggagatcttcgactcatacatcatgaaggagctgctggcctgctcgcatgtgagtgtcctcagctggccctgtgtgctggcccagagtca

SEQ ID NO: 23082 - DNA, 74 bp, Homo sapiens
agattgggaggggaagagaggaccctgctgagaattcatggccacctctgtcttccccagcccttctcgaagag

SEQ ID NO: 23083 - DNA, 81 bp, Homo sapiens
ggaagagaggaccctgctgagaattcatggccacctctgtcttccccagcccttctcgaagagtgccactgagcatgtcca

SEQ ID NO: 23084 - DNA, 80 bp, Homo sapiens
aggaccctgctgagaattcatggccacctctgtcttccccagcccttctcgaagagtgccactgagcatgtccaaggcca

SEQ ID NO: 23085 - DNA, 77 bp, Homo sapiens
agaattcatggccacctctgtcttccccagcccttctcgaagagtgccactgagcatgtccaaggccacctggggaa

SEQ ID NO: 23086 - DNA, 77 bp, Homo sapiens
atggccacctctgtcttccccagcccttctcgaagagtgccactgagcatgtccaaggccacctggggaagaagcag

SEQ ID NO: 23087 - DNA, 77 bp, Homo sapiens
tcttccccagcccttctcgaagagtgccactgagcatgtccaaggccacctggggaagaagcaggtgcctccggatc

SEQ ID NO: 23088 - DNA, 77 bp, Homo sapiens
agcccttctcgaagagtgccactgagcatgtccaaggccacctggggaagaagcaggtgcctccggatctcttccag

SEQ ID NO: 23089 - DNA, 80 bp, Homo sapiens
tcgaagagtgccactgagcatgtccaaggccacctggggaagaagcaggtgcctccggatctcttccaggtgtgtgcctc

SEQ ID NO: 23090 - DNA, 75 bp, Homo sapiens
actgagcatgtccaaggccacctggggaagaagcaggtgcctccggatctcttccaggtgtgtgcctcccggtcc

SEQ ID NO: 23091 - DNA, 72 bp, Homo sapiens
tgtccaaggccacctggggaagaagcaggtgcctccggatctcttccaggtgtgtgcctcccggtccctccc

SEQ ID NO: 23092 - DNA, 72 bp, Homo sapiens
tggggaagaagcaggtgcctccggatctcttccaggtgtgtgcctcccggtccctccccaggcaaggtcacc

SEQ ID NO: 23093 - DNA, 73 bp, Homo sapiens
agaagcaggtgcctccggatctcttccaggtgtgtgcctcccggtccctccccaggcaaggtcaccttggaca

SEQ ID NO: 23094 - DNA, 72 bp, Homo sapiens
gggtggggcctgggcaaccacggtctctcggggctcagtcaccaacttccagcttcctcccttagccataca

SEQ ID NO: 23095 - DNA, 75 bp, Homo sapiens
tgggcaaccacggtctctcggggctcagtcaccaacttccagcttcctcccttagccatacatcgaagagatttg

SEQ ID NO: 23096 - DNA, 74 bp, Homo sapiens
aaccacggtctctcggggctcagtcaccaacttccagcttcctcccttagccatacatcgaagagatttgtcaa

SEQ ID NO: 23097 - DNA, 74 bp, Homo sapiens
tctcggggctcagtcaccaacttccagcttcctcccttagccatacatcgaagagatttgtcaaaacctccgag

SEQ ID NO: 23098 - DNA, 70 bp, Homo sapiens
accaacttccagcttcctcccttagccatacatcgaagagatttgtcaaaacctccgaggggacgtgttc

SEQ ID NO: 23099 - DNA, 71 bp, Homo sapiens
agcttcctcccttagccatacatcgaagagatttgtcaaaacctccgaggggacgtgttccagaaattcat

SEQ ID NO: 23100 - DNA, 74 bp, Homo sapiens
tcccttagccatacatcgaagagatttgtcaaaacctccgaggggacgtgttccagaaattcattgagaggtga

SEQ ID NO: 23101 - DNA, 74 bp, Homo sapiens
atacatcgaagagatttgtcaaaacctccgaggggacgtgttccagaaattcattgagaggtgagagcagggaa

SEQ ID NO: 23102 - DNA, 72 bp, Homo sapiens
aagagatttgtcaaaacctccgaggggacgtgttccagaaattcattgagaggtgagagcagggaagtgtgg

SEQ ID NO: 23103 - DNA, 70 bp, Homo sapiens
aaaacctccgaggggacgtgttccagaaattcattgagaggtgagagcagggaagtgtgggagaggaagg

SEQ ID NO: 23104 - DNA, 71 bp, Homo sapiens
cgaggggacgtgttccagaaattcattgagaggtgagagcagggaagtgtgggagaggaagggggagggag

SEQ ID NO: 23105 - DNA, 74 bp, Homo sapiens
ttccagaaattcattgagaggtgagagcagggaagtgtgggagaggaagggggagggaggggccgctctcagaa

SEQ ID NO: 23106 - DNA, 78 bp, Homo sapiens
gggaggctcacgacagcatcatccttcccacattctgagtggcccctgagccctgattcttcttttccagcgataagt

SEQ ID NO: 23107 - DNA, 77 bp, Homo sapiens
cgacagcatcatccttcccacattctgagtggcccctgagccctgattcttcttttccagcgataagttcacacggt

SEQ ID NO: 23108 - DNA, 74 bp, Homo sapiens
atccttcccacattctgagtggcccctgagccctgattcttcttttccagcgataagttcacacggttttgcca

SEQ ID NO: 23109 - DNA, 74 bp, Homo sapiens
acattctgagtggcccctgagccctgattcttcttttccagcgataagttcacacggttttgccagtggaagaa

SEQ ID NO: 23110 - DNA, 76 bp, Homo sapiens
tggcccctgagccctgattcttcttttccagcgataagttcacacggttttgccagtggaagaatgtggagctcaa

SEQ ID NO: 23111 - DNA, 76 bp, Homo sapiens
ccctgattcttcttttccagcgataagttcacacggttttgccagtggaagaatgtggagctcaacatccacgtga

SEQ ID NO: 23112 - DNA, 75 bp, Homo sapiens
attcttcttttccagcgataagttcacacggttttgccagtggaagaatgtggagctcaacatccacgtgagtgg

SEQ ID NO: 23113 - DNA, 76 bp, Homo sapiens
tccagcgataagttcacacggttttgccagtggaagaatgtggagctcaacatccacgtgagtgggcttgggtggg

SEQ ID NO: 23114 - DNA, 75 bp, Homo sapiens
agttcacacggttttgccagtggaagaatgtggagctcaacatccacgtgagtgggcttgggtggggcatggaaa

SEQ ID NO: 23115 - DNA, 76 bp, Homo sapiens
gttttgccagtggaagaatgtggagctcaacatccacgtgagtgggcttgggtggggcatggaaagccacgcaccc

SEQ ID NO: 23116 - DNA, 78 bp, Homo sapiens
aagaatgtggagctcaacatccacgtgagtgggcttgggtggggcatggaaagccacgcaccctgctgctcctctccc

SEQ ID NO: 23117 - DNA, 89 bp, Homo sapiens
agggctgggcagaggcagcctgtggtgaccgcagctgtcgctgcccctcagctgaccatgaatgacttcagcgtgcatcgcatcattgg

SEQ ID NO: 23118 - DNA, 89 bp, Homo sapiens
ggcagaggcagcctgtggtgaccgcagctgtcgctgcccctcagctgaccatgaatgacttcagcgtgcatcgcatcattgggcgcggg

SEQ ID NO: 23119 - DNA, 85 bp, Homo sapiens
agcctgtggtgaccgcagctgtcgctgcccctcagctgaccatgaatgacttcagcgtgcatcgcatcattgggcgcgggggctt

SEQ ID NO: 23120 - DNA, 85 bp, Homo sapiens
cagctgtcgctgcccctcagctgaccatgaatgacttcagcgtgcatcgcatcattgggcgcgggggctttggcgaggtctatgg

SEQ ID NO: 23121 - DNA, 83 bp, Homo sapiens
tgcccctcagctgaccatgaatgacttcagcgtgcatcgcatcattgggcgcgggggctttggcgaggtctatgggtgccgga

SEQ ID NO: 23122 - DNA, 82 bp, Homo sapiens
ctgaccatgaatgacttcagcgtgcatcgcatcattgggcgcgggggctttggcgaggtctatgggtgccggaaggctgaca

SEQ ID NO: 23123 - DNA, 80 bp, Homo sapiens
aatgacttcagcgtgcatcgcatcattgggcgcgggggctttggcgaggtctatgggtgccggaaggctgacacaggcaa

SEQ ID NO: 23124 - DNA, 84 bp, Homo sapiens
ttcagcgtgcatcgcatcattgggcgcgggggctttggcgaggtctatgggtgccggaaggctgacacaggcaagatgtgagca

SEQ ID NO: 23125 - DNA, 80 bp, Homo sapiens
atcgcatcattgggcgcgggggctttggcgaggtctatgggtgccggaaggctgacacaggcaagatgtgagcaccctgc

SEQ ID NO: 23126 - DNA, 77 bp, Homo sapiens
cgcgggggctttggcgaggtctatgggtgccggaaggctgacacaggcaagatgtgagcaccctgctcggcgcggtg

SEQ ID NO: 23127 - DNA, 78 bp, Homo sapiens
ctttggcgaggtctatgggtgccggaaggctgacacaggcaagatgtgagcaccctgctcggcgcggtgggatacctc

SEQ ID NO: 23128 - DNA, 77 bp, Homo sapiens
aggtctatgggtgccggaaggctgacacaggcaagatgtgagcaccctgctcggcgcggtgggatacctcggggagc

SEQ ID NO: 23129 - DNA, 73 bp, Homo sapiens
cccctgctctgagggtgggtgttgactgccgacctctgccccgtaggtacgccatgaagtgcctggacaaaaa

SEQ ID NO: 23130 - DNA, 78 bp, Homo sapiens
tgagggtgggtgttgactgccgacctctgccccgtaggtacgccatgaagtgcctggacaaaaagcgcatcaagatga

SEQ ID NO: 23131 - DNA, 78 bp, Homo sapiens
tgggtgttgactgccgacctctgccccgtaggtacgccatgaagtgcctggacaaaaagcgcatcaagatgaagcagg

SEQ ID NO: 23132 - DNA, 74 bp, Homo sapiens
ccgacctctgccccgtaggtacgccatgaagtgcctggacaaaaagcgcatcaagatgaagcagggggagaccc

SEQ ID NO: 23133 - DNA, 75 bp, Homo sapiens
ccgtaggtacgccatgaagtgcctggacaaaaagcgcatcaagatgaagcagggggagaccctggccctgaacga

SEQ ID NO: 23134 - DNA, 83 bp, Homo sapiens
tacgccatgaagtgcctggacaaaaagcgcatcaagatgaagcagggggagaccctggccctgaacgagcgcatcatgctctc

SEQ ID NO: 23135 - DNA, 82 bp, Homo sapiens
aagtgcctggacaaaaagcgcatcaagatgaagcagggggagaccctggccctgaacgagcgcatcatgctctcgctcgtca

SEQ ID NO: 23136 - DNA, 82 bp, Homo sapiens
aaaaagcgcatcaagatgaagcagggggagaccctggccctgaacgagcgcatcatgctctcgctcgtcagcactggggtga

SEQ ID NO: 23137 - DNA, 82 bp, Homo sapiens
atcaagatgaagcagggggagaccctggccctgaacgagcgcatcatgctctcgctcgtcagcactggggtgagctgggtgg

SEQ ID NO: 23138 - DNA, 78 bp, Homo sapiens
aagcagggggagaccctggccctgaacgagcgcatcatgctctcgctcgtcagcactggggtgagctgggtgggccgg

SEQ ID NO: 23139 - DNA, 84 bp, Homo sapiens
cctggccctgaacgagcgcatcatgctctcgctcgtcagcactggggtgagctgggtgggccgggctgccgctgaggctctgga

SEQ ID NO: 23140 - DNA, 82 bp, Homo sapiens
ccctgaacgagcgcatcatgctctcgctcgtcagcactggggtgagctgggtgggccgggctgccgctgaggctctggaacc

SEQ ID NO: 23141 - DNA, 72 bp, Homo sapiens
actggggtgagctgggtgggccgggctgccgctgaggctctggaaccccgggcgcccctgctaactgcccgc

SEQ ID NO: 23142 - DNA, 80 bp, Homo sapiens
ctcccctcctctcccctcctaggactgcccattcattgtctgcatgtcatacgcgttccacacgccagacaagctcagct

SEQ ID NO: 23143 - DNA, 83 bp, Homo sapiens
tctcccctcctaggactgcccattcattgtctgcatgtcatacgcgttccacacgccagacaagctcagcttcatcctggacc

SEQ ID NO: 23144 - DNA, 86 bp, Homo sapiens
taggactgcccattcattgtctgcatgtcatacgcgttccacacgccagacaagctcagcttcatcctggacctcatgaacggtga

SEQ ID NO: 23145 - DNA, 85 bp, Homo sapiens
attcattgtctgcatgtcatacgcgttccacacgccagacaagctcagcttcatcctggacctcatgaacggtgagtgctggccg

SEQ ID NO: 23146 - DNA, 84 bp, Homo sapiens
ttgtctgcatgtcatacgcgttccacacgccagacaagctcagcttcatcctggacctcatgaacggtgagtgctggccgggcc

SEQ ID NO: 23147 - DNA, 77 bp, Homo sapiens
atacgcgttccacacgccagacaagctcagcttcatcctggacctcatgaacggtgagtgctggccgggccctaggg

SEQ ID NO: 23148 - DNA, 77 bp, Homo sapiens
ttccacacgccagacaagctcagcttcatcctggacctcatgaacggtgagtgctggccgggccctagggtgggccg

SEQ ID NO: 23149 - DNA, 76 bp, Homo sapiens
agacaagctcagcttcatcctggacctcatgaacggtgagtgctggccgggccctagggtgggccgggcccaggca

SEQ ID NO: 23150 - DNA, 72 bp, Homo sapiens
agcttcatcctggacctcatgaacggtgagtgctggccgggccctagggtgggccgggcccaggcacgggag

SEQ ID NO: 23151 - DNA, 75 bp, Homo sapiens
tgctggccgggccctagggtgggccgggcccaggcacgggaggctggggcaagacactgagtgctgcctgtggga

SEQ ID NO: 23152 - DNA, 79 bp, Homo sapiens
aggctggggcaagacactgagtgctgcctgtgggactgcctccctcaggtggggacctgcactaccacctctcccagca

SEQ ID NO: 23153 - DNA, 76 bp, Homo sapiens
agacactgagtgctgcctgtgggactgcctccctcaggtggggacctgcactaccacctctcccagcacggggtct

SEQ ID NO: 23154 - DNA, 76 bp, Homo sapiens
agtgctgcctgtgggactgcctccctcaggtggggacctgcactaccacctctcccagcacggggtcttctcagag

SEQ ID NO: 23155 - DNA, 78 bp, Homo sapiens
ggactgcctccctcaggtggggacctgcactaccacctctcccagcacggggtcttctcagaggctgacatgcgcttc

SEQ ID NO: 23156 - DNA, 78 bp, Homo sapiens
cctccctcaggtggggacctgcactaccacctctcccagcacggggtcttctcagaggctgacatgcgcttctatgcg

SEQ ID NO: 23157 - DNA, 81 bp, Homo sapiens
gggacctgcactaccacctctcccagcacggggtcttctcagaggctgacatgcgcttctatgcggccgagatcatcctgg

SEQ ID NO: 23158 - DNA, 82 bp, Homo sapiens
actaccacctctcccagcacggggtcttctcagaggctgacatgcgcttctatgcggccgagatcatcctgggcctggagca

SEQ ID NO: 23159 - DNA, 85 bp, Homo sapiens
tcccagcacggggtcttctcagaggctgacatgcgcttctatgcggccgagatcatcctgggcctggagcacatgcacaaccgct

SEQ ID NO: 23160 - DNA, 85 bp, Homo sapiens
ggtcttctcagaggctgacatgcgcttctatgcggccgagatcatcctgggcctggagcacatgcacaaccgcttcgtggtctac

SEQ ID NO: 23161 - DNA, 82 bp, Homo sapiens
agaggctgacatgcgcttctatgcggccgagatcatcctgggcctggagcacatgcacaaccgcttcgtggtctaccgggac

SEQ ID NO: 23162 - DNA, 80 bp, Homo sapiens
acatgcgcttctatgcggccgagatcatcctgggcctggagcacatgcacaaccgcttcgtggtctaccgggacctgaag

SEQ ID NO: 23163 - DNA, 80 bp, Homo sapiens
ttctatgcggccgagatcatcctgggcctggagcacatgcacaaccgcttcgtggtctaccgggacctgaaggtgagcgc

SEQ ID NO: 23164 - DNA, 78 bp, Homo sapiens
agatcatcctgggcctggagcacatgcacaaccgcttcgtggtctaccgggacctgaaggtgagcgcccctgctgtcc

SEQ ID NO: 23165 - DNA, 75 bp, Homo sapiens
cctgggcctggagcacatgcacaaccgcttcgtggtctaccgggacctgaaggtgagcgcccctgctgtccccag

SEQ ID NO: 23166 - DNA, 75 bp, Homo sapiens
agcacatgcacaaccgcttcgtggtctaccgggacctgaaggtgagcgcccctgctgtccccaggctggacctcc

SEQ ID NO: 23167 - DNA, 83 bp, Homo sapiens
tgggccccatcctgagctgccccaggcagctcactgggcttccttcacagccagccaacatccttctggacgagcatggccac

SEQ ID NO: 23168 - DNA, 84 bp, Homo sapiens
atcctgagctgccccaggcagctcactgggcttccttcacagccagccaacatccttctggacgagcatggccacgtgcggatc

SEQ ID NO: 23169 - DNA, 81 bp, Homo sapiens
ccaggcagctcactgggcttccttcacagccagccaacatccttctggacgagcatggccacgtgcggatctcggacctgg

SEQ ID NO: 23170 - DNA, 80 bp, Homo sapiens
agctcactgggcttccttcacagccagccaacatccttctggacgagcatggccacgtgcggatctcggacctgggcctg

SEQ ID NO: 23171 - DNA, 80 bp, Homo sapiens
ttccttcacagccagccaacatccttctggacgagcatggccacgtgcggatctcggacctgggcctggcctgtgacttc

SEQ ID NO: 23172 - DNA, 79 bp, Homo sapiens
cagccaacatccttctggacgagcatggccacgtgcggatctcggacctgggcctggcctgtgacttctccaagaagaa

SEQ ID NO: 23173 - DNA, 77 bp, Homo sapiens
aacatccttctggacgagcatggccacgtgcggatctcggacctgggcctggcctgtgacttctccaagaagaagcc

SEQ ID NO: 23174 - DNA, 80 bp, Homo sapiens
acgagcatggccacgtgcggatctcggacctgggcctggcctgtgacttctccaagaagaagccccatgccagcgtgtga

SEQ ID NO: 23175 - DNA, 79 bp, Homo sapiens
tggccacgtgcggatctcggacctgggcctggcctgtgacttctccaagaagaagccccatgccagcgtgtgagtgccc

SEQ ID NO: 23176 - DNA, 75 bp, Homo sapiens
atctcggacctgggcctggcctgtgacttctccaagaagaagccccatgccagcgtgtgagtgccccccaccctc

SEQ ID NO: 23177 - DNA, 74 bp, Homo sapiens
acctgggcctggcctgtgacttctccaagaagaagccccatgccagcgtgtgagtgccccccaccctctccctc

SEQ ID NO: 23178 - DNA, 71 bp, Homo sapiens
cctgtgacttctccaagaagaagccccatgccagcgtgtgagtgccccccaccctctccctccccacccct

SEQ ID NO: 23179 - DNA, 69 bp, Homo sapiens
agcgtgtgagtgccccccaccctctccctccccaccccttgccactcccgcttatggcccccttgctcc

SEQ ID NO: 23180 - DNA, 69 bp, Homo sapiens
tgagtgccccccaccctctccctccccaccccttgccactcccgcttatggcccccttgctcccacagg

SEQ ID NO: 23181 - DNA, 70 bp, Homo sapiens
tccccaccccttgccactcccgcttatggcccccttgctcccacaggggcacccacgggtacatggctcc

SEQ ID NO: 23182 - DNA, 74 bp, Homo sapiens
ttgccactcccgcttatggcccccttgctcccacaggggcacccacgggtacatggctccggaggtcctgcaga

SEQ ID NO: 23183 - DNA, 71 bp, Homo sapiens
actcccgcttatggcccccttgctcccacaggggcacccacgggtacatggctccggaggtcctgcagaag

SEQ ID NO: 23184 - DNA, 72 bp, Homo sapiens
ccccttgctcccacaggggcacccacgggtacatggctccggaggtcctgcagaagggcgtggcctacgaca

SEQ ID NO: 23185 - DNA, 75 bp, Homo sapiens
ccacaggggcacccacgggtacatggctccggaggtcctgcagaagggcgtggcctacgacagcagtgccgactg

SEQ ID NO: 23186 - DNA, 75 bp, Homo sapiens
acccacgggtacatggctccggaggtcctgcagaagggcgtggcctacgacagcagtgccgactggttctctctg

SEQ ID NO: 23187 - DNA, 82 bp, Homo sapiens
tacatggctccggaggtcctgcagaagggcgtggcctacgacagcagtgccgactggttctctctggggtgcatgctcttca

SEQ ID NO: 23188 - DNA, 78 bp, Homo sapiens
ctccggaggtcctgcagaagggcgtggcctacgacagcagtgccgactggttctctctggggtgcatgctcttcaagt

SEQ ID NO: 23189 - DNA, 79 bp, Homo sapiens
cagaagggcgtggcctacgacagcagtgccgactggttctctctggggtgcatgctcttcaagttgctgcgggggtgag

SEQ ID NO: 23190 - DNA, 81 bp, Homo sapiens
tggcctacgacagcagtgccgactggttctctctggggtgcatgctcttcaagttgctgcgggggtgagtggcccatccca

SEQ ID NO: 23191 - DNA, 80 bp, Homo sapiens
tacgacagcagtgccgactggttctctctggggtgcatgctcttcaagttgctgcgggggtgagtggcccatcccaggtg

SEQ ID NO: 23192 - DNA, 78 bp, Homo sapiens
gtgccgactggttctctctggggtgcatgctcttcaagttgctgcgggggtgagtggcccatcccaggtgggcaggtg

SEQ ID NO: 23193 - DNA, 75 bp, Homo sapiens
gttctctctggggtgcatgctcttcaagttgctgcgggggtgagtggcccatcccaggtgggcaggtgggttggg

SEQ ID NO: 23194 - DNA, 73 bp, Homo sapiens
atgctgcctgcctccctttccccattcctgtcctttgacattggtttttggcctttcttgcccaggcacagcc

SEQ ID NO: 23195 - DNA, 68 bp, Homo sapiens
tccctttccccattcctgtcctttgacattggtttttggcctttcttgcccaggcacagccccttccg

SEQ ID NO: 23196 - DNA, 73 bp, Homo sapiens
cattcctgtcctttgacattggtttttggcctttcttgcccaggcacagccccttccggcagcacaagaccaa

SEQ ID NO: 23197 - DNA, 73 bp, Homo sapiens
tgtcctttgacattggtttttggcctttcttgcccaggcacagccccttccggcagcacaagaccaaagacaa

SEQ ID NO: 23198 - DNA, 76 bp, Homo sapiens
acattggtttttggcctttcttgcccaggcacagccccttccggcagcacaagaccaaagacaagcatgagatcga

SEQ ID NO: 23199 - DNA, 81 bp, Homo sapiens
ctttcttgcccaggcacagccccttccggcagcacaagaccaaagacaagcatgagatcgaccgcatgacgctgacgatgg

SEQ ID NO: 23200 - DNA, 83 bp, Homo sapiens
caggcacagccccttccggcagcacaagaccaaagacaagcatgagatcgaccgcatgacgctgacgatggtgggtgcaggtc

SEQ ID NO: 23201 - DNA, 83 bp, Homo sapiens
cccttccggcagcacaagaccaaagacaagcatgagatcgaccgcatgacgctgacgatggtgggtgcaggtctcagtgcagg

SEQ ID NO: 23202 - DNA, 85 bp, Homo sapiens
ccggcagcacaagaccaaagacaagcatgagatcgaccgcatgacgctgacgatggtgggtgcaggtctcagtgcagggccgcag

SEQ ID NO: 23203 - DNA, 82 bp, Homo sapiens
aagaccaaagacaagcatgagatcgaccgcatgacgctgacgatggtgggtgcaggtctcagtgcagggccgcagggggctg

SEQ ID NO: 23204 - DNA, 82 bp, Homo sapiens
acaagcatgagatcgaccgcatgacgctgacgatggtgggtgcaggtctcagtgcagggccgcagggggctggggggagctc

SEQ ID NO: 23205 - DNA, 78 bp, Homo sapiens
atcgaccgcatgacgctgacgatggtgggtgcaggtctcagtgcagggccgcagggggctggggggagctcctgtggg

SEQ ID NO: 23206 - DNA, 72 bp, Homo sapiens
aagggctcttcctaagcccctgctaatgtcccactcctctctaaaggccgtggagctgcccgactccttctc

SEQ ID NO: 23207 - DNA, 73 bp, Homo sapiens
tcttcctaagcccctgctaatgtcccactcctctctaaaggccgtggagctgcccgactccttctcccctgaa

SEQ ID NO: 23208 - DNA, 76 bp, Homo sapiens
tgctaatgtcccactcctctctaaaggccgtggagctgcccgactccttctcccctgaactacgctccctgctgga

SEQ ID NO: 23209 - DNA, 73 bp, Homo sapiens
atgtcccactcctctctaaaggccgtggagctgcccgactccttctcccctgaactacgctccctgctggagg

SEQ ID NO: 23210 - DNA, 75 bp, Homo sapiens
cctctctaaaggccgtggagctgcccgactccttctcccctgaactacgctccctgctggaggggttgctgcaga

SEQ ID NO: 23211 - DNA, 77 bp, Homo sapiens
tggagctgcccgactccttctcccctgaactacgctccctgctggaggggttgctgcagagggatgtcaaccggaga

SEQ ID NO: 23212 - DNA, 75 bp, Homo sapiens
tgcccgactccttctcccctgaactacgctccctgctggaggggttgctgcagagggatgtcaaccggagattgg

SEQ ID NO: 23213 - DNA, 75 bp, Homo sapiens
ccttctcccctgaactacgctccctgctggaggggttgctgcagagggatgtcaaccggagattgggctgcctgg

SEQ ID NO: 23214 - DNA, 76 bp, Homo sapiens
actacgctccctgctggaggggttgctgcagagggatgtcaaccggagattgggctgcctgggccgagggtgagta

SEQ ID NO: 23215 - DNA, 76 bp, Homo sapiens
tgctggaggggttgctgcagagggatgtcaaccggagattgggctgcctgggccgagggtgagtaccctggcgcct

SEQ ID NO: 23216 - DNA, 80 bp, Homo sapiens
gttgctgcagagggatgtcaaccggagattgggctgcctgggccgagggtgagtaccctggcgccttgggcatgctgctg

SEQ ID NO: 23217 - DNA, 79 bp, Homo sapiens
agagggatgtcaaccggagattgggctgcctgggccgagggtgagtaccctggcgccttgggcatgctgctggctgtgc

SEQ ID NO: 23218 - DNA, 76 bp, Homo sapiens
ctcaatcaggagttaagcccgggactcagggtggggctgagcccagatgactggcctctccccacagggctcagga

SEQ ID NO: 23219 - DNA, 73 bp, Homo sapiens
agttaagcccgggactcagggtggggctgagcccagatgactggcctctccccacagggctcaggaggtgaaa

SEQ ID NO: 23220 - DNA, 73 bp, Homo sapiens
actcagggtggggctgagcccagatgactggcctctccccacagggctcaggaggtgaaagagagcccctttt

SEQ ID NO: 23221 - DNA, 75 bp, Homo sapiens
ggctgagcccagatgactggcctctccccacagggctcaggaggtgaaagagagcccctttttccgctccctgga

SEQ ID NO: 23222 - DNA, 75 bp, Homo sapiens
agatgactggcctctccccacagggctcaggaggtgaaagagagcccctttttccgctccctggactggcagatg

SEQ ID NO: 23223 - DNA, 72 bp, Homo sapiens
cctctccccacagggctcaggaggtgaaagagagcccctttttccgctccctggactggcagatggtcttct

SEQ ID NO: 23224 - DNA, 74 bp, Homo sapiens
cagggctcaggaggtgaaagagagcccctttttccgctccctggactggcagatggtcttcttgcagaaggtaa

SEQ ID NO: 23225 - DNA, 76 bp, Homo sapiens
gaggtgaaagagagcccctttttccgctccctggactggcagatggtcttcttgcagaaggtaacagtctgcggca

SEQ ID NO: 23226 - DNA, 74 bp, Homo sapiens
aaagagagcccctttttccgctccctggactggcagatggtcttcttgcagaaggtaacagtctgcggcaggga

SEQ ID NO: 23227 - DNA, 72 bp, Homo sapiens
ccctttttccgctccctggactggcagatggtcttcttgcagaaggtaacagtctgcggcagggactggggg

SEQ ID NO: 23228 - DNA, 78 bp, Homo sapiens
ctccctggactggcagatggtcttcttgcagaaggtaacagtctgcggcagggactgggggtgctctgcagccccacc

SEQ ID NO: 23229 - DNA, 73 bp, Homo sapiens
aaggtaacagtctgcggcagggactgggggtgctctgcagccccacccccgagctaatgcccatgacccctgt

SEQ ID NO: 23230 - DNA, 78 bp, Homo sapiens
agtctgcggcagggactgggggtgctctgcagccccacccccgagctaatgcccatgacccctgttctgctgcagtac

SEQ ID NO: 23231 - DNA, 74 bp, Homo sapiens
agggactgggggtgctctgcagccccacccccgagctaatgcccatgacccctgttctgctgcagtaccctccc

SEQ ID NO: 23232 - DNA, 75 bp, Homo sapiens
tgcagccccacccccgagctaatgcccatgacccctgttctgctgcagtaccctcccccgctgatccccccacga

SEQ ID NO: 23233 - DNA, 71 bp, Homo sapiens
ccacccccgagctaatgcccatgacccctgttctgctgcagtaccctcccccgctgatccccccacgaggg

SEQ ID NO: 23234 - DNA, 73 bp, Homo sapiens
agctaatgcccatgacccctgttctgctgcagtaccctcccccgctgatccccccacgaggggaggtgaacgc

SEQ ID NO: 23235 - DNA, 71 bp, Homo sapiens
atgacccctgttctgctgcagtaccctcccccgctgatccccccacgaggggaggtgaacgcggccgacgc

SEQ ID NO: 23236 - DNA, 72 bp, Homo sapiens
ttctgctgcagtaccctcccccgctgatccccccacgaggggaggtgaacgcggccgacgccttcgacattg

SEQ ID NO: 23237 - DNA, 69 bp, Homo sapiens
taccctcccccgctgatccccccacgaggggaggtgaacgcggccgacgccttcgacattggctccttc

SEQ ID NO: 23238 - DNA, 73 bp, Homo sapiens
ctgatccccccacgaggggaggtgaacgcggccgacgccttcgacattggctccttcgatgaggaggacacaa

SEQ ID NO: 23239 - DNA, 73 bp, Homo sapiens
cacgaggggaggtgaacgcggccgacgccttcgacattggctccttcgatgaggaggacacaaaaggaatcaa

SEQ ID NO: 23240 - DNA, 72 bp, Homo sapiens
aggtgaacgcggccgacgccttcgacattggctccttcgatgaggaggacacaaaaggaatcaaggtactgg

SEQ ID NO: 23241 - DNA, 73 bp, Homo sapiens
acgcggccgacgccttcgacattggctccttcgatgaggaggacacaaaaggaatcaaggtactgggccttgc

SEQ ID NO: 23242 - DNA, 75 bp, Homo sapiens
tcgacattggctccttcgatgaggaggacacaaaaggaatcaaggtactgggccttgcctggcctcttgtaccta

SEQ ID NO: 23243 - DNA, 73 bp, Homo sapiens
attggctccttcgatgaggaggacacaaaaggaatcaaggtactgggccttgcctggcctcttgtacctaggc

SEQ ID NO: 23244 - DNA, 78 bp, Homo sapiens
ttccggcatctctgtccacccatgtgcccctgccccatccacctggtaaagttactggacagtgatcaggagctctac

SEQ ID NO: 23245 - DNA, 77 bp, Homo sapiens
tctgtccacccatgtgcccctgccccatccacctggtaaagttactggacagtgatcaggagctctaccgcaacttc

SEQ ID NO: 23246 - DNA, 74 bp, Homo sapiens
atgtgcccctgccccatccacctggtaaagttactggacagtgatcaggagctctaccgcaacttccccctcac

SEQ ID NO: 23247 - DNA, 75 bp, Homo sapiens
catccacctggtaaagttactggacagtgatcaggagctctaccgcaacttccccctcaccatctcggagcggtg

SEQ ID NO: 23248 - DNA, 76 bp, Homo sapiens
acctggtaaagttactggacagtgatcaggagctctaccgcaacttccccctcaccatctcggagcggtggcagca

SEQ ID NO: 23249 - DNA, 80 bp, Homo sapiens
gttactggacagtgatcaggagctctaccgcaacttccccctcaccatctcggagcggtggcagcaggaggtggcagaga

SEQ ID NO: 23250 - DNA, 80 bp, Homo sapiens
agtgatcaggagctctaccgcaacttccccctcaccatctcggagcggtggcagcaggaggtggcagagactgtcttcga

SEQ ID NO: 23251 - DNA, 79 bp, Homo sapiens
agctctaccgcaacttccccctcaccatctcggagcggtggcagcaggaggtggcagagactgtcttcgacaccatcaa

SEQ ID NO: 23252 - DNA, 80 bp, Homo sapiens
aacttccccctcaccatctcggagcggtggcagcaggaggtggcagagactgtcttcgacaccatcaacgctgagacaga

SEQ ID NO: 23253 - DNA, 84 bp, Homo sapiens
tcaccatctcggagcggtggcagcaggaggtggcagagactgtcttcgacaccatcaacgctgagacagaccggctggaggctc

SEQ ID NO: 23254 - DNA, 82 bp, Homo sapiens
cggtggcagcaggaggtggcagagactgtcttcgacaccatcaacgctgagacagaccggctggaggctcgcaagaaagcca

SEQ ID NO: 23255 - DNA, 79 bp, Homo sapiens
aggaggtggcagagactgtcttcgacaccatcaacgctgagacagaccggctggaggctcgcaagaaagccaagaacaa

SEQ ID NO: 23256 - DNA, 81 bp, Homo sapiens
agagactgtcttcgacaccatcaacgctgagacagaccggctggaggctcgcaagaaagccaagaacaagcagctgggcca

SEQ ID NO: 23257 - DNA, 82 bp, Homo sapiens
tgtcttcgacaccatcaacgctgagacagaccggctggaggctcgcaagaaagccaagaacaagcagctgggccatgaggaa

SEQ ID NO: 23258 - DNA, 79 bp, Homo sapiens
accatcaacgctgagacagaccggctggaggctcgcaagaaagccaagaacaagcagctgggccatgaggaaggtgagg

SEQ ID NO: 23259 - DNA, 79 bp, Homo sapiens
accggctggaggctcgcaagaaagccaagaacaagcagctgggccatgaggaaggtgagggtcgccggctgctgcggca

SEQ ID NO: 23260 - DNA, 79 bp, Homo sapiens
ctcgcaagaaagccaagaacaagcagctgggccatgaggaaggtgagggtcgccggctgctgcggcaccaggcccctgc

SEQ ID NO: 23261 - DNA, 71 bp, Homo sapiens
aaaaagaaacccaggtggggccggctgagtctcctctgtctctcgcctcagactacgccctgggcaaggac

SEQ ID NO: 23262 - DNA, 86 bp, Homo sapiens
tggggccggctgagtctcctctgtctctcgcctcagactacgccctgggcaaggactgcatcatgcatggctacatgtccaagatg

SEQ ID NO: 23263 - DNA, 85 bp, Homo sapiens
ctgagtctcctctgtctctcgcctcagactacgccctgggcaaggactgcatcatgcatggctacatgtccaagatgggcaaccc

SEQ ID NO: 23264 - DNA, 84 bp, Homo sapiens
tctgtctctcgcctcagactacgccctgggcaaggactgcatcatgcatggctacatgtccaagatgggcaaccccttcctgac

SEQ ID NO: 23265 - DNA, 82 bp, Homo sapiens
tctcgcctcagactacgccctgggcaaggactgcatcatgcatggctacatgtccaagatgggcaaccccttcctgacccag

SEQ ID NO: 23266 - DNA, 81 bp, Homo sapiens
actacgccctgggcaaggactgcatcatgcatggctacatgtccaagatgggcaaccccttcctgacccagtggcagcggc

SEQ ID NO: 23267 - DNA, 79 bp, Homo sapiens
aaggactgcatcatgcatggctacatgtccaagatgggcaaccccttcctgacccagtggcagcggcggtacttctacc

SEQ ID NO: 23268 - DNA, 77 bp, Homo sapiens
atcatgcatggctacatgtccaagatgggcaaccccttcctgacccagtggcagcggcggtacttctacctgttccc

SEQ ID NO: 23269 - DNA, 73 bp, Homo sapiens
atggctacatgtccaagatgggcaaccccttcctgacccagtggcagcggcggtacttctacctgttccccaa

SEQ ID NO: 23270 - DNA, 69 bp, Homo sapiens
aagatgggcaaccccttcctgacccagtggcagcggcggtacttctacctgttccccaaccgcctcgag

SEQ ID NO: 23271 - DNA, 67 bp, Homo sapiens
aaccccttcctgacccagtggcagcggcggtacttctacctgttccccaaccgcctcgagtggcggg

SEQ ID NO: 23272 - DNA, 71 bp, Homo sapiens
ttcctgacccagtggcagcggcggtacttctacctgttccccaaccgcctcgagtggcggggcgagggcga

SEQ ID NO: 23273 - DNA, 67 bp, Homo sapiens
cagcggcggtacttctacctgttccccaaccgcctcgagtggcggggcgagggcgaggccccggtaa

SEQ ID NO: 23274 - DNA, 66 bp, Homo sapiens
cggtacttctacctgttccccaaccgcctcgagtggcggggcgagggcgaggccccggtaaggagc

SEQ ID NO: 23275 - DNA, 66 bp, Homo sapiens
tacctgttccccaaccgcctcgagtggcggggcgagggcgaggccccggtaaggagcccgtgcggg

SEQ ID NO: 23276 - DNA, 65 bp, Homo sapiens
ccaaccgcctcgagtggcggggcgagggcgaggccccggtaaggagcccgtgcgggggtccggga

SEQ ID NO: 23277 - DNA, 82 bp, Homo sapiens
tggctggccggcccggctcttacctgcaccacccatccctggccctgcagcagagcctgctgaccatggaggagatccagtc

SEQ ID NO: 23278 - DNA, 83 bp, Homo sapiens
ggctcttacctgcaccacccatccctggccctgcagcagagcctgctgaccatggaggagatccagtcggtggaggagacgca

SEQ ID NO: 23279 - DNA, 84 bp, Homo sapiens
ttacctgcaccacccatccctggccctgcagcagagcctgctgaccatggaggagatccagtcggtggaggagacgcagatcaa

SEQ ID NO: 23280 - DNA, 86 bp, Homo sapiens
atccctggccctgcagcagagcctgctgaccatggaggagatccagtcggtggaggagacgcagatcaaggagcgcaagtgcctgc

SEQ ID NO: 23281 - DNA, 88 bp, Homo sapiens
ctgcagcagagcctgctgaccatggaggagatccagtcggtggaggagacgcagatcaaggagcgcaagtgcctgctcctcaagatcc

SEQ ID NO: 23282 - DNA, 84 bp, Homo sapiens
agagcctgctgaccatggaggagatccagtcggtggaggagacgcagatcaaggagcgcaagtgcctgctcctcaagatccgcg

SEQ ID NO: 23283 - DNA, 81 bp, Homo sapiens
catggaggagatccagtcggtggaggagacgcagatcaaggagcgcaagtgcctgctcctcaagatccgcggtgggaaaca

SEQ ID NO: 23284 - DNA, 78 bp, Homo sapiens
atccagtcggtggaggagacgcagatcaaggagcgcaagtgcctgctcctcaagatccgcggtgggaaacagttcatt

SEQ ID NO: 23285 - DNA, 84 bp, Homo sapiens
tggaggagacgcagatcaaggagcgcaagtgcctgctcctcaagatccgcggtgggaaacagttcattttgcagtgcgatgtga

SEQ ID NO: 23286 - DNA, 82 bp, Homo sapiens
agacgcagatcaaggagcgcaagtgcctgctcctcaagatccgcggtgggaaacagttcattttgcagtgcgatgtgagtgg

SEQ ID NO: 23287 - DNA, 80 bp, Homo sapiens
aaggagcgcaagtgcctgctcctcaagatccgcggtgggaaacagttcattttgcagtgcgatgtgagtgggggctgagc

SEQ ID NO: 23288 - DNA, 79 bp, Homo sapiens
aagtgcctgctcctcaagatccgcggtgggaaacagttcattttgcagtgcgatgtgagtgggggctgagccagggatg

SEQ ID NO: 23289 - DNA, 77 bp, Homo sapiens
ctcctcaagatccgcggtgggaaacagttcattttgcagtgcgatgtgagtgggggctgagccagggatgggagggc

SEQ ID NO: 23290 - DNA, 86 bp, Homo sapiens
agagccccagctgacagagctgggcttggcatgtgcagagcgaccctgagctggtgcagtggaagaaggagctgcgcgacgcctac

SEQ ID NO: 23291 - DNA, 85 bp, Homo sapiens
agctgggcttggcatgtgcagagcgaccctgagctggtgcagtggaagaaggagctgcgcgacgcctaccgcgaggcccagcagc

SEQ ID NO: 23292 - DNA, 84 bp, Homo sapiens
atgtgcagagcgaccctgagctggtgcagtggaagaaggagctgcgcgacgcctaccgcgaggcccagcagctggtgcagcggg

SEQ ID NO: 23293 - DNA, 81 bp, Homo sapiens
accctgagctggtgcagtggaagaaggagctgcgcgacgcctaccgcgaggcccagcagctggtgcagcgggtgcccaaga

SEQ ID NO: 23294 - DNA, 82 bp, Homo sapiens
tggtgcagtggaagaaggagctgcgcgacgcctaccgcgaggcccagcagctggtgcagcgggtgcccaagatgaagaacaa

SEQ ID NO: 23295 - DNA, 79 bp, Homo sapiens
agtggaagaaggagctgcgcgacgcctaccgcgaggcccagcagctggtgcagcgggtgcccaagatgaagaacaagcc

SEQ ID NO: 23296 - DNA, 81 bp, Homo sapiens
ctaccgcgaggcccagcagctggtgcagcgggtgcccaagatgaagaacaagccgcgctcgcccgtggtggagctgagcaa

SEQ ID NO: 23297 - DNA, 82 bp, Homo sapiens
gcccagcagctggtgcagcgggtgcccaagatgaagaacaagccgcgctcgcccgtggtggagctgagcaaggtgccgctgg

SEQ ID NO: 23298 - DNA, 81 bp, Homo sapiens
agctggtgcagcgggtgcccaagatgaagaacaagccgcgctcgcccgtggtggagctgagcaaggtgccgctggtccagc

SEQ ID NO: 23299 - DNA, 81 bp, Homo sapiens
ggtgcccaagatgaagaacaagccgcgctcgcccgtggtggagctgagcaaggtgccgctggtccagcgcggcagtgccaa

SEQ ID NO: 23300 - DNA, 81 bp, Homo sapiens
atgaagaacaagccgcgctcgcccgtggtggagctgagcaaggtgccgctggtccagcgcggcagtgccaacggcctctga

SEQ ID NO: 23301 - DNA, 78 bp, Homo sapiens
aacaagccgcgctcgcccgtggtggagctgagcaaggtgccgctggtccagcgcggcagtgccaacggcctctgaccc

SEQ ID NO: 23302 - DNA, 75 bp, Homo sapiens
gagctgagcaaggtgccgctggtccagcgcggcagtgccaacggcctctgacccgcccacccgccttttataaac

SEQ ID NO: 23303 - DNA, 72 bp, Homo sapiens
agcaaggtgccgctggtccagcgcggcagtgccaacggcctctgacccgcccacccgccttttataaacctc

SEQ ID NO: 23304 - DNA, 69 bp, Homo sapiens
tggtccagcgcggcagtgccaacggcctctgacccgcccacccgccttttataaacctctaatttattt

SEQ ID NO: 23305 - DNA, 64 bp, Homo sapiens
acggcctctgacccgcccacccgccttttataaacctctaatttattttgtcgaatttttatta

SEQ ID NO: 23306 - DNA, 64 bp, Homo sapiens
ctctgacccgcccacccgccttttataaacctctaatttattttgtcgaatttttattatttgt

SEQ ID NO: 23307 - DNA, 62 bp, Homo sapiens
taaacctctaatttattttgtcgaatttttattatttgttttcccgccaagcggaaaaggtt

SEQ ID NO: 23308 - DNA, 62 bp, Homo sapiens
ctctaatttattttgtcgaatttttattatttgttttcccgccaagcggaaaaggttttatt

SEQ ID NO: 23309 - DNA, 65 bp, Homo sapiens
ttgtcgaatttttattatttgttttcccgccaagcggaaaaggttttattttgtaattattgtga

SEQ ID NO: 23310 - DNA, 64 bp, Homo sapiens
attatttgttttcccgccaagcggaaaaggttttattttgtaattattgtgatttcccgtggcc

SEQ ID NO: 23311 - DNA, 65 bp, Homo sapiens
ttgttttcccgccaagcggaaaaggttttattttgtaattattgtgatttcccgtggccccagcc

SEQ ID NO: 23312 - DNA, 67 bp, Homo sapiens
ccaagcggaaaaggttttattttgtaattattgtgatttcccgtggccccagcctggcccagctccc

SEQ ID NO: 23313 - DNA, 65 bp, Homo sapiens
aaaggttttattttgtaattattgtgatttcccgtggccccagcctggcccagctcccccgggag

SEQ ID NO: 23314 - DNA, 68 bp, Homo sapiens
ttttgtaattattgtgatttcccgtggccccagcctggcccagctcccccgggaggggcccgcttgcc

SEQ ID NO: 23315 - DNA, 73 bp, Homo sapiens
attgtgatttcccgtggccccagcctggcccagctcccccgggaggggcccgcttgcctcggctcctgctgca

SEQ ID NO: 23316 - DNA, 71 bp, Homo sapiens
cccgtggccccagcctggcccagctcccccgggaggggcccgcttgcctcggctcctgctgcaccaaccca

SEQ ID NO: 23317 - DNA, 73 bp, Homo sapiens
tggcccagctcccccgggaggggcccgcttgcctcggctcctgctgcaccaacccagccgctgcccggcgccc

SEQ ID NO: 23318 - DNA, 74 bp, Homo sapiens
tcccccgggaggggcccgcttgcctcggctcctgctgcaccaacccagccgctgcccggcgccctctgtcctga

SEQ ID NO: 23319 - DNA, 78 bp, Homo sapiens
ttgcctcggctcctgctgcaccaacccagccgctgcccggcgccctctgtcctgacttcaggggctgcccgctcccag

SEQ ID NO: 23320 - DNA, 78 bp, Homo sapiens
tcctgctgcaccaacccagccgctgcccggcgccctctgtcctgacttcaggggctgcccgctcccagtgtcttcctg

SEQ ID NO: 23321 - DNA, 73 bp, Homo sapiens
accaacccagccgctgcccggcgccctctgtcctgacttcaggggctgcccgctcccagtgtcttcctgtggg

SEQ ID NO: 23322 - DNA, 76 bp, Homo sapiens
agccgctgcccggcgccctctgtcctgacttcaggggctgcccgctcccagtgtcttcctgtgggggaagagcaca

SEQ ID NO: 23323 - DNA, 73 bp, Homo sapiens
ccctctgtcctgacttcaggggctgcccgctcccagtgtcttcctgtgggggaagagcacagccctcccgccc

SEQ ID NO: 23324 - DNA, 73 bp, Homo sapiens
tgtcctgacttcaggggctgcccgctcccagtgtcttcctgtgggggaagagcacagccctcccgccccttcc

SEQ ID NO: 23325 - DNA, 74 bp, Homo sapiens
ggctgcccgctcccagtgtcttcctgtgggggaagagcacagccctcccgccccttccccgagggatgatgcca

SEQ ID NO: 23326 - DNA, 74 bp, Homo sapiens
tcccagtgtcttcctgtgggggaagagcacagccctcccgccccttccccgagggatgatgccacaccaagctg

SEQ ID NO: 23327 - DNA, 75 bp, Homo sapiens
tgtcttcctgtgggggaagagcacagccctcccgccccttccccgagggatgatgccacaccaagctgtgccacc

SEQ ID NO: 23328 - DNA, 75 bp, Homo sapiens
gggaagagcacagccctcccgccccttccccgagggatgatgccacaccaagctgtgccaccctgggctctgtgg

SEQ ID NO: 23329 - DNA, 81 bp, Homo sapiens
ccccttccccgagggatgatgccacaccaagctgtgccaccctgggctctgtgggctgcactctgtgcccatgggcactgc

SEQ ID NO: 23330 - DNA, 85 bp, Homo sapiens
cgagggatgatgccacaccaagctgtgccaccctgggctctgtgggctgcactctgtgcccatgggcactgctgggtggcccatc

SEQ ID NO: 23331 - DNA, 80 bp, Homo sapiens
accaagctgtgccaccctgggctctgtgggctgcactctgtgcccatgggcactgctgggtggcccatcccccctcacca

SEQ ID NO: 23332 - DNA, 79 bp, Homo sapiens
accctgggctctgtgggctgcactctgtgcccatgggcactgctgggtggcccatcccccctcaccaggggcaggcaca

SEQ ID NO: 23333 - DNA, 82 bp, Homo sapiens
tgtgggctgcactctgtgcccatgggcactgctgggtggcccatcccccctcaccaggggcaggcacagcacagggatccga

SEQ ID NO: 23334 - DNA, 75 bp, Homo sapiens
atgggcactgctgggtggcccatcccccctcaccaggggcaggcacagcacagggatccgacttgaattttccca

SEQ ID NO: 23335 - DNA, 73 bp, Homo sapiens
tggcccatcccccctcaccaggggcaggcacagcacagggatccgacttgaattttcccactgcaccccctcc

SEQ ID NO: 23336 - DNA, 75 bp, Homo sapiens
cccctcaccaggggcaggcacagcacagggatccgacttgaattttcccactgcaccccctcctgctgcagaggg

SEQ ID NO: 23337 - DNA, 78 bp, Homo sapiens
acagggatccgacttgaattttcccactgcaccccctcctgctgcagaggggcaggccctgcactgtcctgctccaca

SEQ ID NO: 23338 - DNA, 78 bp, Homo sapiens
atccgacttgaattttcccactgcaccccctcctgctgcagaggggcaggccctgcactgtcctgctccacagtgttg

SEQ ID NO: 23339 - DNA, 78 bp, Homo sapiens
aattttcccactgcaccccctcctgctgcagaggggcaggccctgcactgtcctgctccacagtgttggcgagaggag

SEQ ID NO: 23340 - DNA, 76 bp, Homo sapiens
accccctcctgctgcagaggggcaggccctgcactgtcctgctccacagtgttggcgagaggaggggcccgttgtc

SEQ ID NO: 23341 - DNA, 78 bp, Homo sapiens
ctgcagaggggcaggccctgcactgtcctgctccacagtgttggcgagaggaggggcccgttgtctccctggccctca

SEQ ID NO: 23342 - DNA, 75 bp, Homo sapiens
cactgtcctgctccacagtgttggcgagaggaggggcccgttgtctccctggccctcaaggcctcccacagtgac

SEQ ID NO: 23343 - DNA, 74 bp, Homo sapiens
tcctgctccacagtgttggcgagaggaggggcccgttgtctccctggccctcaaggcctcccacagtgactcgg

SEQ ID NO: 23344 - DNA, 76 bp, Homo sapiens
ttgtctccctggccctcaaggcctcccacagtgactcgggctcctgtgcccttattcaggaaaagcctctgtgtca

SEQ ID NO: 23345 - DNA, 76 bp, Homo sapiens
tccctggccctcaaggcctcccacagtgactcgggctcctgtgcccttattcaggaaaagcctctgtgtcactggc

SEQ ID NO: 23346 - DNA, 77 bp, Homo sapiens
acagtgactcgggctcctgtgcccttattcaggaaaagcctctgtgtcactggctgcctccactcccacttccctga

SEQ ID NO: 23347 - DNA, 77 bp, Homo sapiens
tcgggctcctgtgcccttattcaggaaaagcctctgtgtcactggctgcctccactcccacttccctgacactgcgg

SEQ ID NO: 23348 - DNA, 78 bp, Homo sapiens
cttattcaggaaaagcctctgtgtcactggctgcctccactcccacttccctgacactgcggggcttggctgagagag

SEQ ID NO: 23349 - DNA, 79 bp, Homo sapiens
aggaaaagcctctgtgtcactggctgcctccactcccacttccctgacactgcggggcttggctgagagagtggcattg

SEQ ID NO: 23350 - DNA, 86 bp, Homo sapiens
tctgtgtcactggctgcctccactcccacttccctgacactgcggggcttggctgagagagtggcattggcagcaggtgctgctac

SEQ ID NO: 23351 - DNA, 82 bp, Homo sapiens
actggctgcctccactcccacttccctgacactgcggggcttggctgagagagtggcattggcagcaggtgctgctaccctc

SEQ ID NO: 23352 - DNA, 80 bp, Homo sapiens
actcccacttccctgacactgcggggcttggctgagagagtggcattggcagcaggtgctgctaccctccctgctgtccc

SEQ ID NO: 23353 - DNA, 81 bp, Homo sapiens
cttccctgacactgcggggcttggctgagagagtggcattggcagcaggtgctgctaccctccctgctgtcccctcttgcc

SEQ ID NO: 23354 - DNA, 78 bp, Homo sapiens
actgcggggcttggctgagagagtggcattggcagcaggtgctgctaccctccctgctgtcccctcttgccccaaccc

SEQ ID NO: 23355 - DNA, 78 bp, Homo sapiens
ttggctgagagagtggcattggcagcaggtgctgctaccctccctgctgtcccctcttgccccaacccccagcacccg

SEQ ID NO: 23356 - DNA, 75 bp, Homo sapiens
agtggcattggcagcaggtgctgctaccctccctgctgtcccctcttgccccaacccccagcacccgggctcagg

SEQ ID NO: 23357 - DNA, 74 bp, Homo sapiens
agcaggtgctgctaccctccctgctgtcccctcttgccccaacccccagcacccgggctcagggaccacagcaa

SEQ ID NO: 23358 - DNA, 75 bp, Homo sapiens
tgctaccctccctgctgtcccctcttgccccaacccccagcacccgggctcagggaccacagcaaggcacctgca

SEQ ID NO: 23359 - DNA, 75 bp, Homo sapiens
tgctgtcccctcttgccccaacccccagcacccgggctcagggaccacagcaaggcacctgcaggttgggccata

SEQ ID NO: 23360 - DNA, 75 bp, Homo sapiens
aacccccagcacccgggctcagggaccacagcaaggcacctgcaggttgggccatactggcctcgcctggcctga

SEQ ID NO: 23361 - DNA, 79 bp, Homo sapiens
acccgggctcagggaccacagcaaggcacctgcaggttgggccatactggcctcgcctggcctgaggtctcgctgatgc

SEQ ID NO: 23362 - DNA, 81 bp, Homo sapiens
ctcagggaccacagcaaggcacctgcaggttgggccatactggcctcgcctggcctgaggtctcgctgatgctgggctggg

SEQ ID NO: 23363 - DNA, 81 bp, Homo sapiens
aaggcacctgcaggttgggccatactggcctcgcctggcctgaggtctcgctgatgctgggctgggtgcgaccccatctgc

SEQ ID NO: 23364 - DNA, 79 bp, Homo sapiens
tgggccatactggcctcgcctggcctgaggtctcgctgatgctgggctgggtgcgaccccatctgcccaggacggggcc

SEQ ID NO: 23365 - DNA, 76 bp, Homo sapiens
cctcgcctggcctgaggtctcgctgatgctgggctgggtgcgaccccatctgcccaggacggggccggccaggtgg

SEQ ID NO: 23366 - DNA, 80 bp, Homo sapiens
tgaggtctcgctgatgctgggctgggtgcgaccccatctgcccaggacggggccggccaggtgggcgggcagcacagcaa

SEQ ID NO: 23367 - DNA, 79 bp, Homo sapiens
tctcgctgatgctgggctgggtgcgaccccatctgcccaggacggggccggccaggtgggcgggcagcacagcaaggag

SEQ ID NO: 23368 - DNA, 76 bp, Homo sapiens
ctgggctgggtgcgaccccatctgcccaggacggggccggccaggtgggcgggcagcacagcaaggaggctggctg

SEQ ID NO: 23369 - DNA, 75 bp, Homo sapiens
accccatctgcccaggacggggccggccaggtgggcgggcagcacagcaaggaggctggctggggcctatcagtg

SEQ ID NO: 23370 - DNA, 76 bp, Homo sapiens
atctgcccaggacggggccggccaggtgggcgggcagcacagcaaggaggctggctggggcctatcagtgtgcccc

SEQ ID NO: 23371 - DNA, 78 bp, Homo sapiens
ggccggccaggtgggcgggcagcacagcaaggaggctggctggggcctatcagtgtgccccccatcctggcccatcag

SEQ ID NO: 23372 - DNA, 77 bp, Homo sapiens
aggtgggcgggcagcacagcaaggaggctggctggggcctatcagtgtgccccccatcctggcccatcagtgtaccc

SEQ ID NO: 23373 - DNA, 77 bp, Homo sapiens
agcacagcaaggaggctggctggggcctatcagtgtgccccccatcctggcccatcagtgtacccccgcccaggctg

SEQ ID NO: 23374 - DNA, 76 bp, Homo sapiens
agcaaggaggctggctggggcctatcagtgtgccccccatcctggcccatcagtgtacccccgcccaggctggcca

SEQ ID NO: 23375 - DNA, 76 bp, Homo sapiens
ctggctggggcctatcagtgtgccccccatcctggcccatcagtgtacccccgcccaggctggccagccccacagc

SEQ ID NO: 23376 - DNA, 77 bp, Homo sapiens
tatcagtgtgccccccatcctggcccatcagtgtacccccgcccaggctggccagccccacagcccacgtcctgtca

SEQ ID NO: 23377 - DNA, 76 bp, Homo sapiens
tggcccatcagtgtacccccgcccaggctggccagccccacagcccacgtcctgtcagtgccgccgcctcgcccac

SEQ ID NO: 23378 - DNA, 79 bp, Homo sapiens
caggctggccagccccacagcccacgtcctgtcagtgccgccgcctcgcccaccgcatgccccctcgtgccagtcgcgc

SEQ ID NO: 23379 - DNA, 79 bp, Homo sapiens
agccccacagcccacgtcctgtcagtgccgccgcctcgcccaccgcatgccccctcgtgccagtcgcgctgcctgtgtg

SEQ ID NO: 23380 - DNA, 80 bp, Homo sapiens
acagcccacgtcctgtcagtgccgccgcctcgcccaccgcatgccccctcgtgccagtcgcgctgcctgtgtggtgtcgc

SEQ ID NO: 23381 - DNA, 80 bp, Homo sapiens
tcctgtcagtgccgccgcctcgcccaccgcatgccccctcgtgccagtcgcgctgcctgtgtggtgtcgcgccttctccc

SEQ ID NO: 23382 - DNA, 73 bp, Homo sapiens
ccgcctcgcccaccgcatgccccctcgtgccagtcgcgctgcctgtgtggtgtcgcgccttctcccccccggg

SEQ ID NO: 23383 - DNA, 73 bp, Homo sapiens
ccaccgcatgccccctcgtgccagtcgcgctgcctgtgtggtgtcgcgccttctcccccccggggctgggttg

SEQ ID NO: 23384 - DNA, 72 bp, Homo sapiens
cccctcgtgccagtcgcgctgcctgtgtggtgtcgcgccttctcccccccggggctgggttggcgcaccctc

SEQ ID NO: 23385 - DNA, 72 bp, Homo sapiens
cgtgccagtcgcgctgcctgtgtggtgtcgcgccttctcccccccggggctgggttggcgcaccctcccctc

SEQ ID NO: 23386 - DNA, 70 bp, Homo sapiens
tgcctgtgtggtgtcgcgccttctcccccccggggctgggttggcgcaccctcccctcccgtctactcat

SEQ ID NO: 23387 - DNA, 68 bp, Homo sapiens
tgtggtgtcgcgccttctcccccccggggctgggttggcgcaccctcccctcccgtctactcattccc

SEQ ID NO: 23388 - DNA, 63 bp, Homo sapiens
ttctcccccccggggctgggttggcgcaccctcccctcccgtctactcattccccggggcgtt

SEQ ID NO: 23389 - DNA, 65 bp, Homo sapiens
ggggctgggttggcgcaccctcccctcccgtctactcattccccggggcgtttctttgccgattt

SEQ ID NO: 23390 - DNA, 65 bp, Homo sapiens
accctcccctcccgtctactcattccccggggcgtttctttgccgatttttgaatgtgattttaa

SEQ ID NO: 23391 - DNA, 70 bp, Homo sapiens
tctactcattccccggggcgtttctttgccgatttttgaatgtgattttaaagagtgaaaaatgagacta

SEQ ID NO: 23392 - DNA, 68 bp, Homo sapiens
attccccggggcgtttctttgccgatttttgaatgtgattttaaagagtgaaaaatgagactatgcgt

SEQ ID NO: 23393 - DNA, 69 bp, Homo sapiens
gggcgtttctttgccgatttttgaatgtgattttaaagagtgaaaaatgagactatgcgtttttataaa

SEQ ID NO: 23394 - DNA, 71 bp, Homo sapiens
gccgatttttgaatgtgattttaaagagtgaaaaatgagactatgcgtttttataaaaaatggtgcctgat

SEQ ID NO: 23395 - DNA, 74 bp, Homo sapiens
atgtgattttaaagagtgaaaaatgagactatgcgtttttataaaaaatggtgcctgattcggctgtctcagac

SEQ ID NO: 23396 - DNA, 73 bp, Homo sapiens
aagagtgaaaaatgagactatgcgtttttataaaaaatggtgcctgattcggctgtctcagactctttttgta

SEQ ID NO: 23397 - DNA, 71 bp, Homo sapiens
aaaaatgagactatgcgtttttataaaaaatggtgcctgattcggctgtctcagactctttttgtacctgg

SEQ ID NO: 23398 - DNA, 79 bp, Homo sapiens
tttttttccttcttgaggaatggagcttcgcagaggttgcatttagattcaacagttcacagcggcgggctgctgctgc

SEQ ID NO: 23399 - DNA, 84 bp, Homo sapiens
ttcttgaggaatggagcttcgcagaggttgcatttagattcaacagttcacagcggcgggctgctgctgctgcctctccgaaga

SEQ ID NO: 23400 - DNA, 84 bp, Homo sapiens
aggaatggagcttcgcagaggttgcatttagattcaacagttcacagcggcgggctgctgctgctgcctctccgaagagctcgc

SEQ ID NO: 23401 - DNA, 83 bp, Homo sapiens
cttcgcagaggttgcatttagattcaacagttcacagcggcgggctgctgctgctgcctctccgaagagctcgcggagctccc

SEQ ID NO: 23402 - DNA, 83 bp, Homo sapiens
ttgcatttagattcaacagttcacagcggcgggctgctgctgctgcctctccgaagagctcgcggagctccccagaggcggtg

SEQ ID NO: 23403 - DNA, 79 bp, Homo sapiens
attcaacagttcacagcggcgggctgctgctgctgcctctccgaagagctcgcggagctccccagaggcggtggtcccc

SEQ ID NO: 23404 - DNA, 81 bp, Homo sapiens
ttcacagcggcgggctgctgctgctgcctctccgaagagctcgcggagctccccagaggcggtggtccccgtgcttgtctg

SEQ ID NO: 23405 - DNA, 84 bp, Homo sapiens
tgctgctgctgcctctccgaagagctcgcggagctccccagaggcggtggtccccgtgcttgtctggatgcggctctgagtctc

SEQ ID NO: 23406 - DNA, 79 bp, Homo sapiens
tgcctctccgaagagctcgcggagctccccagaggcggtggtccccgtgcttgtctggatgcggctctgagtctccgtg

SEQ ID NO: 23407 - DNA, 77 bp, Homo sapiens
aagagctcgcggagctccccagaggcggtggtccccgtgcttgtctggatgcggctctgagtctccgtgtgtctttc

SEQ ID NO: 23408 - DNA, 78 bp, Homo sapiens
tcgcggagctccccagaggcggtggtccccgtgcttgtctggatgcggctctgagtctccgtgtgtctttctgcttgt

SEQ ID NO: 23409 - DNA, 79 bp, Homo sapiens
agaggcggtggtccccgtgcttgtctggatgcggctctgagtctccgtgtgtctttctgcttgttgctgtgtgcgggtg

SEQ ID NO: 23410 - DNA, 82 bp, Homo sapiens
tccccgtgcttgtctggatgcggctctgagtctccgtgtgtctttctgcttgttgctgtgtgcgggtgttcggccgcgatca

SEQ ID NO: 23411 - DNA, 81 bp, Homo sapiens
ttgtctggatgcggctctgagtctccgtgtgtctttctgcttgttgctgtgtgcgggtgttcggccgcgatcacctttgtg

SEQ ID NO: 23412 - DNA, 80 bp, Homo sapiens
atgcggctctgagtctccgtgtgtctttctgcttgttgctgtgtgcgggtgttcggccgcgatcacctttgtgtgtcttc

SEQ ID NO: 23413 - DNA, 78 bp, Homo sapiens
tctccgtgtgtctttctgcttgttgctgtgtgcgggtgttcggccgcgatcacctttgtgtgtcttctgtctgtttaa

SEQ ID NO: 23414 - DNA, 77 bp, Homo sapiens
tctttctgcttgttgctgtgtgcgggtgttcggccgcgatcacctttgtgtgtcttctgtctgtttaaacctcagga

SEQ ID NO: 23415 - DNA, 77 bp, Homo sapiens
ttgttgctgtgtgcgggtgttcggccgcgatcacctttgtgtgtcttctgtctgtttaaacctcaggatggctcgct

SEQ ID NO: 23416 - DNA, 75 bp, Homo sapiens
tgtgtgcgggtgttcggccgcgatcacctttgtgtgtcttctgtctgtttaaacctcaggatggctcgcttcggg

SEQ ID NO: 23417 - DNA, 74 bp, Homo sapiens
tgttcggccgcgatcacctttgtgtgtcttctgtctgtttaaacctcaggatggctcgcttcggggaggcggtg

SEQ ID NO: 23418 - DNA, 74 bp, Homo sapiens
ccgcgatcacctttgtgtgtcttctgtctgtttaaacctcaggatggctcgcttcggggaggcggtggtcgcca

SEQ ID NO: 23419 - DNA, 74 bp, Homo sapiens
atcacctttgtgtgtcttctgtctgtttaaacctcaggatggctcgcttcggggaggcggtggtcgccaggcca

SEQ ID NO: 23420 - DNA, 73 bp, Homo sapiens
ttgtgtgtcttctgtctgtttaaacctcaggatggctcgcttcggggaggcggtggtcgccaggccagggtcc

SEQ ID NO: 23421 - DNA, 74 bp, Homo sapiens
tctgtctgtttaaacctcaggatggctcgcttcggggaggcggtggtcgccaggccagggtccggcgatggaga

SEQ ID NO: 23422 - DNA, 73 bp, Homo sapiens
tctgtttaaacctcaggatggctcgcttcggggaggcggtggtcgccaggccagggtccggcgatggagactc

SEQ ID NO: 23423 - DNA, 72 bp, Homo sapiens
tttaaacctcaggatggctcgcttcggggaggcggtggtcgccaggccagggtccggcgatggagactcgga

SEQ ID NO: 23424 - DNA, 73 bp, Homo sapiens
taaacctcaggatggctcgcttcggggaggcggtggtcgccaggccagggtccggcgatggagactcggacca

SEQ ID NO: 23425 - DNA, 74 bp, Homo sapiens
aggatggctcgcttcggggaggcggtggtcgccaggccagggtccggcgatggagactcggaccagagcaggaa

SEQ ID NO: 23426 - DNA, 72 bp, Homo sapiens
ttcggggaggcggtggtcgccaggccagggtccggcgatggagactcggaccagagcaggaaccggcaagga

SEQ ID NO: 23427 - DNA, 70 bp, Homo sapiens
caggccagggtccggcgatggagactcggaccagagcaggaaccggcaaggaacccccgtgccggcctcg

SEQ ID NO: 23428 - DNA, 69 bp, Homo sapiens
agggtccggcgatggagactcggaccagagcaggaaccggcaaggaacccccgtgccggcctcggggca

SEQ ID NO: 23429 - DNA, 70 bp, Homo sapiens
atggagactcggaccagagcaggaaccggcaaggaacccccgtgccggcctcggggcaggcggccgccta

SEQ ID NO: 23430 - DNA, 70 bp, Homo sapiens
accagagcaggaaccggcaaggaacccccgtgccggcctcggggcaggcggccgcctacaagcagacgaa

SEQ ID NO: 23431 - DNA, 71 bp, Homo sapiens
aggaacccccgtgccggcctcggggcaggcggccgcctacaagcagacgaaagcacagagggcgcggacta

SEQ ID NO: 23432 - DNA, 75 bp, Homo sapiens
cgtgccggcctcggggcaggcggccgcctacaagcagacgaaagcacagagggcgcggactatggctttgtacaa

SEQ ID NO: 23433 - DNA, 73 bp, Homo sapiens
gggcaggcggccgcctacaagcagacgaaagcacagagggcgcggactatggctttgtacaaccccattcccg

SEQ ID NO: 23434 - DNA, 73 bp, Homo sapiens
ccgcctacaagcagacgaaagcacagagggcgcggactatggctttgtacaaccccattcccgtccggcagaa

SEQ ID NO: 23435 - DNA, 73 bp, Homo sapiens
aagcagacgaaagcacagagggcgcggactatggctttgtacaaccccattcccgtccggcagaactgtttca

SEQ ID NO: 23436 - DNA, 71 bp, Homo sapiens
aaagcacagagggcgcggactatggctttgtacaaccccattcccgtccggcagaactgtttcaccgtcaa

SEQ ID NO: 23437 - DNA, 72 bp, Homo sapiens
cgcggactatggctttgtacaaccccattcccgtccggcagaactgtttcaccgtcaacagatccctgttca

SEQ ID NO: 23438 - DNA, 72 bp, Homo sapiens
actatggctttgtacaaccccattcccgtccggcagaactgtttcaccgtcaacagatccctgttcatcttc

SEQ ID NO: 23439 - DNA, 71 bp, Homo sapiens
aaccccattcccgtccggcagaactgtttcaccgtcaacagatccctgttcatcttcggagaagataacat

SEQ ID NO: 23440 - DNA, 74 bp, Homo sapiens
attcccgtccggcagaactgtttcaccgtcaacagatccctgttcatcttcggagaagataacattgtcaggaa

SEQ ID NO: 23441 - DNA, 78 bp, Homo sapiens
agaactgtttcaccgtcaacagatccctgttcatcttcggagaagataacattgtcaggaaatatgccaagaagctca

SEQ ID NO: 23442 - DNA, 79 bp, Homo sapiens
gtttcaccgtcaacagatccctgttcatcttcggagaagataacattgtcaggaaatatgccaagaagctcatcgattg

SEQ ID NO: 23443 - DNA, 79 bp, Homo sapiens
aacagatccctgttcatcttcggagaagataacattgtcaggaaatatgccaagaagctcatcgattggccatatcctt

SEQ ID NO: 23444 - DNA, 81 bp, Homo sapiens
ttcatcttcggagaagataacattgtcaggaaatatgccaagaagctcatcgattggccatatcctttcttgcccaccata

SEQ ID NO: 23445 - DNA, 78 bp, Homo sapiens
agaagataacattgtcaggaaatatgccaagaagctcatcgattggccatatcctttcttgcccaccataactccctc

SEQ ID NO: 23446 - DNA, 77 bp, Homo sapiens
taacattgtcaggaaatatgccaagaagctcatcgattggccatatcctttcttgcccaccataactccctctcccc

SEQ ID NO: 23447 - DNA, 75 bp, Homo sapiens
ctgtgtccctctctggtgaatttgttccttaactccgctttcccacgccatttgagtacatgatcctggccacca

SEQ ID NO: 23448 - DNA, 77 bp, Homo sapiens
tctctggtgaatttgttccttaactccgctttcccacgccatttgagtacatgatcctggccaccatcattgccaac

SEQ ID NO: 23449 - DNA, 77 bp, Homo sapiens
aatttgttccttaactccgctttcccacgccatttgagtacatgatcctggccaccatcattgccaactgcatcgtc

SEQ ID NO: 23450 - DNA, 79 bp, Homo sapiens
tccttaactccgctttcccacgccatttgagtacatgatcctggccaccatcattgccaactgcatcgtcctggccctg

SEQ ID NO: 23451 - DNA, 84 bp, Homo sapiens
ctttcccacgccatttgagtacatgatcctggccaccatcattgccaactgcatcgtcctggccctggagcagcatcttcctga

SEQ ID NO: 23452 - DNA, 85 bp, Homo sapiens
atttgagtacatgatcctggccaccatcattgccaactgcatcgtcctggccctggagcagcatcttcctgaggatgacaagacc

SEQ ID NO: 23453 - DNA, 86 bp, Homo sapiens
tacatgatcctggccaccatcattgccaactgcatcgtcctggccctggagcagcatcttcctgaggatgacaagacccccatgtc

SEQ ID NO: 23454 - DNA, 82 bp, Homo sapiens
caccatcattgccaactgcatcgtcctggccctggagcagcatcttcctgaggatgacaagacccccatgtcccgaagactg

SEQ ID NO: 23455 - DNA, 80 bp, Homo sapiens
attgccaactgcatcgtcctggccctggagcagcatcttcctgaggatgacaagacccccatgtcccgaagactggtatg

SEQ ID NO: 23456 - DNA, 80 bp, Homo sapiens
ctgcatcgtcctggccctggagcagcatcttcctgaggatgacaagacccccatgtcccgaagactggtatgtgattccc

SEQ ID NO: 23457 - DNA, 78 bp, Homo sapiens
tggccctggagcagcatcttcctgaggatgacaagacccccatgtcccgaagactggtatgtgattcccctccttctc

SEQ ID NO: 23458 - DNA, 74 bp, Homo sapiens
agcagcatcttcctgaggatgacaagacccccatgtcccgaagactggtatgtgattcccctccttctcccctt

SEQ ID NO: 23459 - DNA, 78 bp, Homo sapiens
ataaagcacagtcctcttctcactggtgcttctgctcctcatccccacaggagaagacagaaccttatttcattggga

SEQ ID NO: 23460 - DNA, 78 bp, Homo sapiens
tcttctcactggtgcttctgctcctcatccccacaggagaagacagaaccttatttcattgggatcttttgctttgaa

SEQ ID NO: 23461 - DNA, 76 bp, Homo sapiens
actggtgcttctgctcctcatccccacaggagaagacagaaccttatttcattgggatcttttgctttgaagctgg

SEQ ID NO: 23462 - DNA, 74 bp, Homo sapiens
ctcctcatccccacaggagaagacagaaccttatttcattgggatcttttgctttgaagctgggatcaaaattg

SEQ ID NO: 23463 - DNA, 73 bp, Homo sapiens
ccacaggagaagacagaaccttatttcattgggatcttttgctttgaagctgggatcaaaattgtggccctgg

SEQ ID NO: 23464 - DNA, 72 bp, Homo sapiens
aagacagaaccttatttcattgggatcttttgctttgaagctgggatcaaaattgtggccctggggttcatc

SEQ ID NO: 23465 - DNA, 72 bp, Homo sapiens
aaccttatttcattgggatcttttgctttgaagctgggatcaaaattgtggccctggggttcatcttccata

SEQ ID NO: 23466 - DNA, 72 bp, Homo sapiens
attgggatcttttgctttgaagctgggatcaaaattgtggccctggggttcatcttccataagggctcttac

SEQ ID NO: 23467 - DNA, 73 bp, Homo sapiens
ttttgctttgaagctgggatcaaaattgtggccctggggttcatcttccataagggctcttacctccgcaatg

SEQ ID NO: 23468 - DNA, 75 bp, Homo sapiens
aagctgggatcaaaattgtggccctggggttcatcttccataagggctcttacctccgcaatggctggaatgtca

SEQ ID NO: 23469 - DNA, 75 bp, Homo sapiens
aaaattgtggccctggggttcatcttccataagggctcttacctccgcaatggctggaatgtcatggacttcatc

SEQ ID NO: 23470 - DNA, 77 bp, Homo sapiens
tggggttcatcttccataagggctcttacctccgcaatggctggaatgtcatggacttcatcgtggtcctcagtggg

SEQ ID NO: 23471 - DNA, 77 bp, Homo sapiens
atcttccataagggctcttacctccgcaatggctggaatgtcatggacttcatcgtggtcctcagtgggtaagtcca

SEQ ID NO: 23472 - DNA, 75 bp, Homo sapiens
ataagggctcttacctccgcaatggctggaatgtcatggacttcatcgtggtcctcagtgggtaagtccattttc

SEQ ID NO: 23473 - DNA, 79 bp, Homo sapiens
ttacctccgcaatggctggaatgtcatggacttcatcgtggtcctcagtgggtaagtccattttctctctctgtctgtg

SEQ ID NO: 23474 - DNA, 78 bp, Homo sapiens
gaaaaccagactggtaaccttgacccttctgtgtctctgtctgcagcatcctggccactgcaggaacccacttcaata

SEQ ID NO: 23475 - DNA, 79 bp, Homo sapiens
agactggtaaccttgacccttctgtgtctctgtctgcagcatcctggccactgcaggaacccacttcaatactcacgtg

SEQ ID NO: 23476 - DNA, 79 bp, Homo sapiens
aaccttgacccttctgtgtctctgtctgcagcatcctggccactgcaggaacccacttcaatactcacgtggacctgag

SEQ ID NO: 23477 - DNA, 82 bp, Homo sapiens
tgtgtctctgtctgcagcatcctggccactgcaggaacccacttcaatactcacgtggacctgaggaccctccgggctgtgc

SEQ ID NO: 23478 - DNA, 81 bp, Homo sapiens
tctgtctgcagcatcctggccactgcaggaacccacttcaatactcacgtggacctgaggaccctccgggctgtgcgtgtc

SEQ ID NO: 23479 - DNA, 75 bp, Homo sapiens
ctggccactgcaggaacccacttcaatactcacgtggacctgaggaccctccgggctgtgcgtgtcctgcggcct

SEQ ID NO: 23480 - DNA, 74 bp, Homo sapiens
actgcaggaacccacttcaatactcacgtggacctgaggaccctccgggctgtgcgtgtcctgcggcctttgaa

SEQ ID NO: 23481 - DNA, 76 bp, Homo sapiens
cttcaatactcacgtggacctgaggaccctccgggctgtgcgtgtcctgcggcctttgaagctcgtgtcagggata

SEQ ID NO: 23482 - DNA, 75 bp, Homo sapiens
atactcacgtggacctgaggaccctccgggctgtgcgtgtcctgcggcctttgaagctcgtgtcagggataccta

SEQ ID NO: 23483 - DNA, 79 bp, Homo sapiens
tgaggaccctccgggctgtgcgtgtcctgcggcctttgaagctcgtgtcagggatacctagtgagcatctgccattctt

SEQ ID NO: 23484 - DNA, 79 bp, Homo sapiens
accctccgggctgtgcgtgtcctgcggcctttgaagctcgtgtcagggatacctagtgagcatctgccattctttctgc

SEQ ID NO: 23485 - DNA, 82 bp, Homo sapiens
tgtgcgtgtcctgcggcctttgaagctcgtgtcagggatacctagtgagcatctgccattctttctgctctgctaagaactt

SEQ ID NO: 23486 - DNA, 85 bp, Homo sapiens
atggtgctgagggacagctgcattggtcattctctgtccttccttctaggcctgcagattgtgttgaagtccatcatgaaggcca

SEQ ID NO: 23487 - DNA, 82 bp, Homo sapiens
acagctgcattggtcattctctgtccttccttctaggcctgcagattgtgttgaagtccatcatgaaggccatggtacctct

SEQ ID NO: 23488 - DNA, 82 bp, Homo sapiens
attggtcattctctgtccttccttctaggcctgcagattgtgttgaagtccatcatgaaggccatggtacctcttctgcaga

SEQ ID NO: 23489 - DNA, 82 bp, Homo sapiens
ctgtccttccttctaggcctgcagattgtgttgaagtccatcatgaaggccatggtacctcttctgcagattggccttctgc

SEQ ID NO: 23490 - DNA, 82 bp, Homo sapiens
ttccttctaggcctgcagattgtgttgaagtccatcatgaaggccatggtacctcttctgcagattggccttctgctcttct

SEQ ID NO: 23491 - DNA, 85 bp, Homo sapiens
tgcagattgtgttgaagtccatcatgaaggccatggtacctcttctgcagattggccttctgctcttctttgccatcctgatgtt

SEQ ID NO: 23492 - DNA, 85 bp, Homo sapiens
tgttgaagtccatcatgaaggccatggtacctcttctgcagattggccttctgctcttctttgccatcctgatgtttgctatcat

SEQ ID NO: 23493 - DNA, 83 bp, Homo sapiens
atcatgaaggccatggtacctcttctgcagattggccttctgctcttctttgccatcctgatgtttgctatcattggtttgga

SEQ ID NO: 23494 - DNA, 81 bp, Homo sapiens
ccatggtacctcttctgcagattggccttctgctcttctttgccatcctgatgtttgctatcattggtttggagttctaca

SEQ ID NO: 23495 - DNA, 82 bp, Homo sapiens
tcttctgcagattggccttctgctcttctttgccatcctgatgtttgctatcattggtttggagttctacagtggcaagtta

SEQ ID NO: 23496 - DNA, 80 bp, Homo sapiens
agattggccttctgctcttctttgccatcctgatgtttgctatcattggtttggagttctacagtggcaagttacatcga

SEQ ID NO: 23497 - DNA, 85 bp, Homo sapiens
tgctcttctttgccatcctgatgtttgctatcattggtttggagttctacagtggcaagttacatcgagcatgcttcatgaacaa

SEQ ID NO: 23498 - DNA, 84 bp, Homo sapiens
ttgccatcctgatgtttgctatcattggtttggagttctacagtggcaagttacatcgagcatgcttcatgaacaattcaggta

SEQ ID NO: 23499 - DNA, 79 bp, Homo sapiens
tgtttgctatcattggtttggagttctacagtggcaagttacatcgagcatgcttcatgaacaattcaggtagggtcgt

SEQ ID NO: 23500 - DNA, 77 bp, Homo sapiens
tatcattggtttggagttctacagtggcaagttacatcgagcatgcttcatgaacaattcaggtagggtcgttcttt

SEQ ID NO: 23501 - DNA, 76 bp, Homo sapiens
gtttggagttctacagtggcaagttacatcgagcatgcttcatgaacaattcaggtagggtcgttcttttctgtct

SEQ ID NO: 23502 - DNA, 76 bp, Homo sapiens
ctacagtggcaagttacatcgagcatgcttcatgaacaattcaggtagggtcgttcttttctgtcttctccttttc

SEQ ID NO: 23503 - DNA, 74 bp, Homo sapiens
atgcgaaacaccatgtgatttatctcctaccctccaaatgtgtctgcaggtattctagaaggatttgacccccc

SEQ ID NO: 23504 - DNA, 74 bp, Homo sapiens
accatgtgatttatctcctaccctccaaatgtgtctgcaggtattctagaaggatttgacccccctcacccatg

SEQ ID NO: 23505 - DNA, 75 bp, Homo sapiens
tttatctcctaccctccaaatgtgtctgcaggtattctagaaggatttgacccccctcacccatgtggtgtgcag

SEQ ID NO: 23506 - DNA, 78 bp, Homo sapiens
tccaaatgtgtctgcaggtattctagaaggatttgacccccctcacccatgtggtgtgcagggctgcccagctggtta

SEQ ID NO: 23507 - DNA, 81 bp, Homo sapiens
tgtgtctgcaggtattctagaaggatttgacccccctcacccatgtggtgtgcagggctgcccagctggttatgaatgcaa

SEQ ID NO: 23508 - DNA, 79 bp, Homo sapiens
tattctagaaggatttgacccccctcacccatgtggtgtgcagggctgcccagctggttatgaatgcaaggactggatc

SEQ ID NO: 23509 - DNA, 76 bp, Homo sapiens
aaggatttgacccccctcacccatgtggtgtgcagggctgcccagctggttatgaatgcaaggactggatcggccc

SEQ ID NO: 23510 - DNA, 81 bp, Homo sapiens
ctcacccatgtggtgtgcagggctgcccagctggttatgaatgcaaggactggatcggccccaatgatgggatcacccagt

SEQ ID NO: 23511 - DNA, 81 bp, Homo sapiens
atgtggtgtgcagggctgcccagctggttatgaatgcaaggactggatcggccccaatgatgggatcacccagtttgataa

SEQ ID NO: 23512 - DNA, 77 bp, Homo sapiens
ggctgcccagctggttatgaatgcaaggactggatcggccccaatgatgggatcacccagtttgataacatcctttt

SEQ ID NO: 23513 - DNA, 77 bp, Homo sapiens
cccagctggttatgaatgcaaggactggatcggccccaatgatgggatcacccagtttgataacatcctttttgctg

SEQ ID NO: 23514 - DNA, 81 bp, Homo sapiens
tatgaatgcaaggactggatcggccccaatgatgggatcacccagtttgataacatcctttttgctgtgctgactgtcttc

SEQ ID NO: 23515 - DNA, 81 bp, Homo sapiens
aggactggatcggccccaatgatgggatcacccagtttgataacatcctttttgctgtgctgactgtcttccagtgcatca

SEQ ID NO: 23516 - DNA, 81 bp, Homo sapiens
ccaatgatgggatcacccagtttgataacatcctttttgctgtgctgactgtcttccagtgcatcaccatggaagggtgga

SEQ ID NO: 23517 - DNA, 79 bp, Homo sapiens
atgggatcacccagtttgataacatcctttttgctgtgctgactgtcttccagtgcatcaccatggaagggtggaccac

SEQ ID NO: 23518 - DNA, 81 bp, Homo sapiens
agtttgataacatcctttttgctgtgctgactgtcttccagtgcatcaccatggaagggtggaccactgtgctgtacaatg

SEQ ID NO: 23519 - DNA, 84 bp, Homo sapiens
taacatcctttttgctgtgctgactgtcttccagtgcatcaccatggaagggtggaccactgtgctgtacaatgtgagtagagc

SEQ ID NO: 23520 - DNA, 84 bp, Homo sapiens
tttgctgtgctgactgtcttccagtgcatcaccatggaagggtggaccactgtgctgtacaatgtgagtagagctggtggggac

SEQ ID NO: 23521 - DNA, 79 bp, Homo sapiens
actgtcttccagtgcatcaccatggaagggtggaccactgtgctgtacaatgtgagtagagctggtggggacctggaag

SEQ ID NO: 23522 - DNA, 78 bp, Homo sapiens
agtgcatcaccatggaagggtggaccactgtgctgtacaatgtgagtagagctggtggggacctggaaggaggaggga

SEQ ID NO: 23523 - DNA, 71 bp, Homo sapiens
acttatggaagatggctttaagtattaaggaaccatttttctttctttcagaccaatgatgccttaggagc

SEQ ID NO: 23524 - DNA, 70 bp, Homo sapiens
atggctttaagtattaaggaaccatttttctttctttcagaccaatgatgccttaggagccacctggaat

SEQ ID NO: 23525 - DNA, 71 bp, Homo sapiens
agtattaaggaaccatttttctttctttcagaccaatgatgccttaggagccacctggaattggctgtact

SEQ ID NO: 23526 - DNA, 77 bp, Homo sapiens
tttttctttctttcagaccaatgatgccttaggagccacctggaattggctgtacttcatccccctcatcatcattg

SEQ ID NO: 23527 - DNA, 79 bp, Homo sapiens
tctttcagaccaatgatgccttaggagccacctggaattggctgtacttcatccccctcatcatcattggatccttctt

SEQ ID NO: 23528 - DNA, 78 bp, Homo sapiens
aatgatgccttaggagccacctggaattggctgtacttcatccccctcatcatcattggatccttctttgttctcaac

SEQ ID NO: 23529 - DNA, 76 bp, Homo sapiens
ttaggagccacctggaattggctgtacttcatccccctcatcatcattggatccttctttgttctcaacctagtcc

SEQ ID NO: 23530 - DNA, 77 bp, Homo sapiens
tggaattggctgtacttcatccccctcatcatcattggatccttctttgttctcaacctagtcctgggagtgctttc

SEQ ID NO: 23531 - DNA, 75 bp, Homo sapiens
ctgtacttcatccccctcatcatcattggatccttctttgttctcaacctagtcctgggagtgctttccgggtga

SEQ ID NO: 23532 - DNA, 75 bp, Homo sapiens
atccccctcatcatcattggatccttctttgttctcaacctagtcctgggagtgctttccgggtgagccagatgt

SEQ ID NO: 23533 - DNA, 76 bp, Homo sapiens
atcatcattggatccttctttgttctcaacctagtcctgggagtgctttccgggtgagccagatgtttctctcttc

SEQ ID NO: 23534 - DNA, 75 bp, Homo sapiens
tttgttctcaacctagtcctgggagtgctttccgggtgagccagatgtttctctcttcttaactcatttgctgac

SEQ ID NO: 23535 - DNA, 76 bp, Homo sapiens
ctagtcctgggagtgctttccgggtgagccagatgtttctctcttcttaactcatttgctgactgctaactgtaaa

SEQ ID NO: 23536 - DNA, 76 bp, Homo sapiens
agtgctttccgggtgagccagatgtttctctcttcttaactcatttgctgactgctaactgtaaactaatgcctcc

SEQ ID NO: 23537 - DNA, 83 bp, Homo sapiens
gtgagccagatgtttctctcttcttaactcatttgctgactgctaactgtaaactaatgcctcctgactcatggcagattcat

SEQ ID NO: 23538 - DNA, 81 bp, Homo sapiens
atgtttctctcttcttaactcatttgctgactgctaactgtaaactaatgcctcctgactcatggcagattcattcattta

SEQ ID NO: 23539 - DNA, 79 bp, Homo sapiens
ttcttaactcatttgctgactgctaactgtaaactaatgcctcctgactcatggcagattcattcatttaaccttcatt

SEQ ID NO: 23540 - DNA, 79 bp, Homo sapiens
aactcatttgctgactgctaactgtaaactaatgcctcctgactcatggcagattcattcatttaaccttcatttagaa

SEQ ID NO: 23541 - DNA, 77 bp, Homo sapiens
ctgctaactgtaaactaatgcctcctgactcatggcagattcattcatttaaccttcatttagaagacacttaccta

SEQ ID NO: 23542 - DNA, 76 bp, Homo sapiens
actgtaaactaatgcctcctgactcatggcagattcattcatttaaccttcatttagaagacacttacctagcagt

SEQ ID NO: 23543 - DNA, 79 bp, Homo sapiens
atgcctcctgactcatggcagattcattcatttaaccttcatttagaagacacttacctagcagttcctctgtgccaaa

SEQ ID NO: 23544 - DNA, 78 bp, Homo sapiens
actcatggcagattcattcatttaaccttcatttagaagacacttacctagcagttcctctgtgccaaatgctttcta

SEQ ID NO: 23545 - DNA, 77 bp, Homo sapiens
ttcattcatttaaccttcatttagaagacacttacctagcagttcctctgtgccaaatgctttctagatgctgggaa

SEQ ID NO: 23546 - DNA, 77 bp, Homo sapiens
atttaaccttcatttagaagacacttacctagcagttcctctgtgccaaatgctttctagatgctgggaatgcagta

SEQ ID NO: 23547 - DNA, 81 bp, Homo sapiens
ttagaagacacttacctagcagttcctctgtgccaaatgctttctagatgctgggaatgcagtagtgaaccatcattctaa

SEQ ID NO: 23548 - DNA, 82 bp, Homo sapiens
ttacctagcagttcctctgtgccaaatgctttctagatgctgggaatgcagtagtgaaccatcattctaataatcttgatta

SEQ ID NO: 23549 - DNA, 82 bp, Homo sapiens
ttcctctgtgccaaatgctttctagatgctgggaatgcagtagtgaaccatcattctaataatcttgattattctcaggaat

SEQ ID NO: 23550 - DNA, 78 bp, Homo sapiens
ccaaatgctttctagatgctgggaatgcagtagtgaaccatcattctaataatcttgattattctcaggaattaaaaa

SEQ ID NO: 23551 - DNA, 78 bp, Homo sapiens
ctttctagatgctgggaatgcagtagtgaaccatcattctaataatcttgattattctcaggaattaaaaagtcttga

SEQ ID NO: 23552 - DNA, 80 bp, Homo sapiens
tgggaatgcagtagtgaaccatcattctaataatcttgattattctcaggaattaaaaagtcttgatgtcaggcacaaca

SEQ ID NO: 23553 - DNA, 78 bp, Homo sapiens
agtagtgaaccatcattctaataatcttgattattctcaggaattaaaaagtcttgatgtcaggcacaacactgaaca

SEQ ID NO: 23554 - DNA, 81 bp, Homo sapiens
tcattctaataatcttgattattctcaggaattaaaaagtcttgatgtcaggcacaacactgaacacagtatgtagtgaga

SEQ ID NO: 23555 - DNA, 80 bp, Homo sapiens
taataatcttgattattctcaggaattaaaaagtcttgatgtcaggcacaacactgaacacagtatgtagtgagagttca

SEQ ID NO: 23556 - DNA, 79 bp, Homo sapiens
attattctcaggaattaaaaagtcttgatgtcaggcacaacactgaacacagtatgtagtgagagttcatttattcatc

SEQ ID NO: 23557 - DNA, 81 bp, Homo sapiens
aattaaaaagtcttgatgtcaggcacaacactgaacacagtatgtagtgagagttcatttattcatccatgctttcattca

SEQ ID NO: 23558 - DNA, 83 bp, Homo sapiens
aaagtcttgatgtcaggcacaacactgaacacagtatgtagtgagagttcatttattcatccatgctttcattcagtaactca

SEQ ID NO: 23559 - DNA, 84 bp, Homo sapiens
aggcacaacactgaacacagtatgtagtgagagttcatttattcatccatgctttcattcagtaactcagcagtcagagaccta

SEQ ID NO: 23560 - DNA, 84 bp, Homo sapiens
actgaacacagtatgtagtgagagttcatttattcatccatgctttcattcagtaactcagcagtcagagacctatgtcaaaca

SEQ ID NO: 23561 - DNA, 83 bp, Homo sapiens
tatgtagtgagagttcatttattcatccatgctttcattcagtaactcagcagtcagagacctatgtcaaacacggtgctggt

SEQ ID NO: 23562 - DNA, 80 bp, Homo sapiens
agagttcatttattcatccatgctttcattcagtaactcagcagtcagagacctatgtcaaacacggtgctggttgttag

SEQ ID NO: 23563 - DNA, 79 bp, Homo sapiens
ttattcatccatgctttcattcagtaactcagcagtcagagacctatgtcaaacacggtgctggttgttagggaaataa

SEQ ID NO: 23564 - DNA, 76 bp, Homo sapiens
atgctttcattcagtaactcagcagtcagagacctatgtcaaacacggtgctggttgttagggaaataaaattgaa

SEQ ID NO: 23565 - DNA, 75 bp, Homo sapiens
attcagtaactcagcagtcagagacctatgtcaaacacggtgctggttgttagggaaataaaattgaactagaca

SEQ ID NO: 23566 - DNA, 75 bp, Homo sapiens
agtcagagacctatgtcaaacacggtgctggttgttagggaaataaaattgaactagacacaggctgtgcctcaa

SEQ ID NO: 23567 - DNA, 72 bp, Homo sapiens
ctatgtcaaacacggtgctggttgttagggaaataaaattgaactagacacaggctgtgcctcaaaagtttc

SEQ ID NO: 23568 - DNA, 69 bp, Homo sapiens
aaacacggtgctggttgttagggaaataaaattgaactagacacaggctgtgcctcaaaagtttcttac

SEQ ID NO: 23569 - DNA, 70 bp, Homo sapiens
tggttgttagggaaataaaattgaactagacacaggctgtgcctcaaaagtttcttactctgtagtgttt

SEQ ID NO: 23570 - DNA, 71 bp, Homo sapiens
aaataaaattgaactagacacaggctgtgcctcaaaagtttcttactctgtagtgttttggggatcaagtc

SEQ ID NO: 23571 - DNA, 73 bp, Homo sapiens
aaattgaactagacacaggctgtgcctcaaaagtttcttactctgtagtgttttggggatcaagtctcatatt

SEQ ID NO: 23572 - DNA, 74 bp, Homo sapiens
tgtgcctcaaaagtttcttactctgtagtgttttggggatcaagtctcatatttgtggcttgaattagtttata

SEQ ID NO: 23573 - DNA, 74 bp, Homo sapiens
gtttcttactctgtagtgttttggggatcaagtctcatatttgtggcttgaattagtttatacaaatctgcaac

SEQ ID NO: 23574 - DNA, 74 bp, Homo sapiens
ctctgtagtgttttggggatcaagtctcatatttgtggcttgaattagtttatacaaatctgcaactatttggg

SEQ ID NO: 23575 - DNA, 75 bp, Homo sapiens
gggatcaagtctcatatttgtggcttgaattagtttatacaaatctgcaactatttggggtccaataccatggta

SEQ ID NO: 23576 - DNA, 75 bp, Homo sapiens
aagtctcatatttgtggcttgaattagtttatacaaatctgcaactatttggggtccaataccatggtaagcatc

SEQ ID NO: 23577 - DNA, 76 bp, Homo sapiens
atttgtggcttgaattagtttatacaaatctgcaactatttggggtccaataccatggtaagcatcgccaggagca

SEQ ID NO: 23578 - DNA, 75 bp, Homo sapiens
attagtttatacaaatctgcaactatttggggtccaataccatggtaagcatcgccaggagcacacaaagtataa

SEQ ID NO: 23579 - DNA, 72 bp, Homo sapiens
aactatttggggtccaataccatggtaagcatcgccaggagcacacaaagtataaggtgtggttcctctcct

SEQ ID NO: 23580 - DNA, 74 bp, Homo sapiens
tccaataccatggtaagcatcgccaggagcacacaaagtataaggtgtggttcctctccttaggaaacatgttt

SEQ ID NO: 23581 - DNA, 74 bp, Homo sapiens
atggtaagcatcgccaggagcacacaaagtataaggtgtggttcctctccttaggaaacatgttttgccaagaa

SEQ ID NO: 23582 - DNA, 75 bp, Homo sapiens
acacaaagtataaggtgtggttcctctccttaggaaacatgttttgccaagaagatgatacacatgaaacagaga

SEQ ID NO: 23583 - DNA, 74 bp, Homo sapiens
aagtataaggtgtggttcctctccttaggaaacatgttttgccaagaagatgatacacatgaaacagagaatag

SEQ ID NO: 23584 - DNA, 75 bp, Homo sapiens
ttcctctccttaggaaacatgttttgccaagaagatgatacacatgaaacagagaataggagttcttttactgac

SEQ ID NO: 23585 - DNA, 75 bp, Homo sapiens
taggaaacatgttttgccaagaagatgatacacatgaaacagagaataggagttcttttactgacttatacaagg

SEQ ID NO: 23586 - DNA, 77 bp, Homo sapiens
acatgttttgccaagaagatgatacacatgaaacagagaataggagttcttttactgacttatacaaggtataatca

SEQ ID NO: 23587 - DNA, 75 bp, Homo sapiens
gccaagaagatgatacacatgaaacagagaataggagttcttttactgacttatacaaggtataatcatttgttt

SEQ ID NO: 23588 - DNA, 71 bp, Homo sapiens
cacatgaaacagagaataggagttcttttactgacttatacaaggtataatcatttgttttggggaaagga

SEQ ID NO: 23589 - DNA, 69 bp, Homo sapiens
acagagaataggagttcttttactgacttatacaaggtataatcatttgttttggggaaaggacaaatc

SEQ ID NO: 23590 - DNA, 71 bp, Homo sapiens
ggagttcttttactgacttatacaaggtataatcatttgttttggggaaaggacaaatctatgtaatctga

SEQ ID NO: 23591 - DNA, 74 bp, Homo sapiens
ctgacttatacaaggtataatcatttgttttggggaaaggacaaatctatgtaatctgaagtcatcagggatag

SEQ ID NO: 23592 - DNA, 74 bp, Homo sapiens
caaggtataatcatttgttttggggaaaggacaaatctatgtaatctgaagtcatcagggatagtttcatcaag

SEQ ID NO: 23593 - DNA, 75 bp, Homo sapiens
tcatttgttttggggaaaggacaaatctatgtaatctgaagtcatcagggatagtttcatcaaggattgagattt

SEQ ID NO: 23594 - DNA, 77 bp, Homo sapiens
ttggggaaaggacaaatctatgtaatctgaagtcatcagggatagtttcatcaaggattgagattttgcttggatta

SEQ ID NO: 23595 - DNA, 79 bp, Homo sapiens
aaggacaaatctatgtaatctgaagtcatcagggatagtttcatcaaggattgagattttgcttggattatgaaatatg

SEQ ID NO: 23596 - DNA, 85 bp, Homo sapiens
agagagagagagtggagaaccgaagggctttcatgaagctgcggcgccagcagcagattgagcgtgagctgaatggctaccgtgc

SEQ ID NO: 23597 - DNA, 84 bp, Homo sapiens
agagtggagaaccgaagggctttcatgaagctgcggcgccagcagcagattgagcgtgagctgaatggctaccgtgcctggata

SEQ ID NO: 23598 - DNA, 83 bp, Homo sapiens
agaaccgaagggctttcatgaagctgcggcgccagcagcagattgagcgtgagctgaatggctaccgtgcctggatagacaaa

SEQ ID NO: 23599 - DNA, 85 bp, Homo sapiens
tttcatgaagctgcggcgccagcagcagattgagcgtgagctgaatggctaccgtgcctggatagacaaagcaggtaggcctggg

SEQ ID NO: 23600 - DNA, 82 bp, Homo sapiens
aagctgcggcgccagcagcagattgagcgtgagctgaatggctaccgtgcctggatagacaaagcaggtaggcctggggggc

SEQ ID NO: 23601 - DNA, 82 bp, Homo sapiens
agcagcagattgagcgtgagctgaatggctaccgtgcctggatagacaaagcaggtaggcctggggggctgcaggaggctgg

SEQ ID NO: 23602 - DNA, 80 bp, Homo sapiens
attgagcgtgagctgaatggctaccgtgcctggatagacaaagcaggtaggcctggggggctgcaggaggctggtgagtg

SEQ ID NO: 23603 - DNA, 71 bp, Homo sapiens
ccctgagggattttaatcttgcagaataatttggcatttacagataatttaccaaaccatttgtttccata

SEQ ID NO: 23604 - DNA, 76 bp, Homo sapiens
aatcttgcagaataatttggcatttacagataatttaccaaaccatttgtttccatatagaggaagtcatgctcgc

SEQ ID NO: 23605 - DNA, 76 bp, Homo sapiens
cagaataatttggcatttacagataatttaccaaaccatttgtttccatatagaggaagtcatgctcgctgaagaa

SEQ ID NO: 23606 - DNA, 74 bp, Homo sapiens
ttggcatttacagataatttaccaaaccatttgtttccatatagaggaagtcatgctcgctgaagaaaataaaa

SEQ ID NO: 23607 - DNA, 75 bp, Homo sapiens
gataatttaccaaaccatttgtttccatatagaggaagtcatgctcgctgaagaaaataaaaatgctggaacatc

SEQ ID NO: 23608 - DNA, 74 bp, Homo sapiens
aaaccatttgtttccatatagaggaagtcatgctcgctgaagaaaataaaaatgctggaacatccgccttagaa

SEQ ID NO: 23609 - DNA, 74 bp, Homo sapiens
tttccatatagaggaagtcatgctcgctgaagaaaataaaaatgctggaacatccgccttagaaggtaaggaaa

SEQ ID NO: 23610 - DNA, 75 bp, Homo sapiens
atagaggaagtcatgctcgctgaagaaaataaaaatgctggaacatccgccttagaaggtaaggaaatgttctga

SEQ ID NO: 23611 - DNA, 75 bp, Homo sapiens
atgctcgctgaagaaaataaaaatgctggaacatccgccttagaaggtaaggaaatgttctgatgccttattcca

SEQ ID NO: 23612 - DNA, 73 bp, Homo sapiens
aaaataaaaatgctggaacatccgccttagaaggtaaggaaatgttctgatgccttattccagttgcatttgc

SEQ ID NO: 23613 - DNA, 74 bp, Homo sapiens
aaatgctggaacatccgccttagaaggtaaggaaatgttctgatgccttattccagttgcatttgcccctctta

SEQ ID NO: 23614 - DNA, 75 bp, Homo sapiens
aacatccgccttagaaggtaaggaaatgttctgatgccttattccagttgcatttgcccctcttaggcgatggca

SEQ ID NO: 23615 - DNA, 76 bp, Homo sapiens
aatggtctgggtgtacttgtggcctctcactggtcttccctttccctgatgcagtgcttcgaagggcaaccatcaa

SEQ ID NO: 23616 - DNA, 78 bp, Homo sapiens
tacttgtggcctctcactggtcttccctttccctgatgcagtgcttcgaagggcaaccatcaagaggagccggacaga

SEQ ID NO: 23617 - DNA, 79 bp, Homo sapiens
ctctcactggtcttccctttccctgatgcagtgcttcgaagggcaaccatcaagaggagccggacagaggccatgactc

SEQ ID NO: 23618 - DNA, 79 bp, Homo sapiens
tcttccctttccctgatgcagtgcttcgaagggcaaccatcaagaggagccggacagaggccatgactcgagactccag

SEQ ID NO: 23619 - DNA, 84 bp, Homo sapiens
tttccctgatgcagtgcttcgaagggcaaccatcaagaggagccggacagaggccatgactcgagactccagtgatgagcactg

SEQ ID NO: 23620 - DNA, 84 bp, Homo sapiens
agtgcttcgaagggcaaccatcaagaggagccggacagaggccatgactcgagactccagtgatgagcactgtgttgatatctc

SEQ ID NO: 23621 - DNA, 85 bp, Homo sapiens
tcgaagggcaaccatcaagaggagccggacagaggccatgactcgagactccagtgatgagcactgtgttgatatctcctctgtg

SEQ ID NO: 23622 - DNA, 85 bp, Homo sapiens
accatcaagaggagccggacagaggccatgactcgagactccagtgatgagcactgtgttgatatctcctctgtgggtgagtgga

SEQ ID NO: 23623 - DNA, 84 bp, Homo sapiens
cggacagaggccatgactcgagactccagtgatgagcactgtgttgatatctcctctgtgggtgagtggatccagttagatctt

SEQ ID NO: 23624 - DNA, 83 bp, Homo sapiens
agaggccatgactcgagactccagtgatgagcactgtgttgatatctcctctgtgggtgagtggatccagttagatcttttac

SEQ ID NO: 23625 - DNA, 84 bp, Homo sapiens
actcgagactccagtgatgagcactgtgttgatatctcctctgtgggtgagtggatccagttagatcttttactgctctgaatc

SEQ ID NO: 23626 - DNA, 76 bp, Homo sapiens
cacaggatattttgcagtctcattcttccttacttctccctcttaggcacacctctggcccgagccagtatcaaaa

SEQ ID NO: 23627 - DNA, 76 bp, Homo sapiens
tattttgcagtctcattcttccttacttctccctcttaggcacacctctggcccgagccagtatcaaaagtgcaaa

SEQ ID NO: 23628 - DNA, 74 bp, Homo sapiens
agtctcattcttccttacttctccctcttaggcacacctctggcccgagccagtatcaaaagtgcaaaggtaga

SEQ ID NO: 23629 - DNA, 72 bp, Homo sapiens
tacttctccctcttaggcacacctctggcccgagccagtatcaaaagtgcaaaggtagacggggtctcttat

SEQ ID NO: 23630 - DNA, 73 bp, Homo sapiens
tcttaggcacacctctggcccgagccagtatcaaaagtgcaaaggtagacggggtctcttatttccggcacaa

SEQ ID NO: 23631 - DNA, 70 bp, Homo sapiens
acacctctggcccgagccagtatcaaaagtgcaaaggtagacggggtctcttatttccggcacaaggaaa

SEQ ID NO: 23632 - DNA, 74 bp, Homo sapiens
cgagccagtatcaaaagtgcaaaggtagacggggtctcttatttccggcacaaggaaaggcttctgcgcatctc

SEQ ID NO: 23633 - DNA, 73 bp, Homo sapiens
agtatcaaaagtgcaaaggtagacggggtctcttatttccggcacaaggaaaggcttctgcgcatctccattc

SEQ ID NO: 23634 - DNA, 72 bp, Homo sapiens
aaaggtagacggggtctcttatttccggcacaaggaaaggcttctgcgcatctccattcgccacatggttaa

SEQ ID NO: 23635 - DNA, 74 bp, Homo sapiens
tagacggggtctcttatttccggcacaaggaaaggcttctgcgcatctccattcgccacatggttaaatcccag

SEQ ID NO: 23636 - DNA, 74 bp, Homo sapiens
tcttatttccggcacaaggaaaggcttctgcgcatctccattcgccacatggttaaatcccaggtgttttactg

SEQ ID NO: 23637 - DNA, 76 bp, Homo sapiens
acaaggaaaggcttctgcgcatctccattcgccacatggttaaatcccaggtgttttactggattgtgctgagcct

SEQ ID NO: 23638 - DNA, 78 bp, Homo sapiens
aaaggcttctgcgcatctccattcgccacatggttaaatcccaggtgttttactggattgtgctgagccttgtggcac

SEQ ID NO: 23639 - DNA, 79 bp, Homo sapiens
atctccattcgccacatggttaaatcccaggtgttttactggattgtgctgagccttgtggcactcaacactgcctgtg

SEQ ID NO: 23640 - DNA, 79 bp, Homo sapiens
attcgccacatggttaaatcccaggtgttttactggattgtgctgagccttgtggcactcaacactgcctgtgtggcca

SEQ ID NO: 23641 - DNA, 80 bp, Homo sapiens
ttaaatcccaggtgttttactggattgtgctgagccttgtggcactcaacactgcctgtgtggccattgtccatcacaac

SEQ ID NO: 23642 - DNA, 80 bp, Homo sapiens
aggtgttttactggattgtgctgagccttgtggcactcaacactgcctgtgtggccattgtccatcacaaccagccccag

SEQ ID NO: 23643 - DNA, 84 bp, Homo sapiens
tactggattgtgctgagccttgtggcactcaacactgcctgtgtggccattgtccatcacaaccagccccagtggctcacccac

SEQ ID NO: 23644 - DNA, 80 bp, Homo sapiens
agccttgtggcactcaacactgcctgtgtggccattgtccatcacaaccagccccagtggctcacccacctcctctgtaa

SEQ ID NO: 23645 - DNA, 80 bp, Homo sapiens
tgtggcactcaacactgcctgtgtggccattgtccatcacaaccagccccagtggctcacccacctcctctgtaagtaaa

SEQ ID NO: 23646 - DNA, 78 bp, Homo sapiens
tgcctgtgtggccattgtccatcacaaccagccccagtggctcacccacctcctctgtaagtaaagcctctctctaaa

SEQ ID NO: 23647 - DNA, 77 bp, Homo sapiens
tgtggccattgtccatcacaaccagccccagtggctcacccacctcctctgtaagtaaagcctctctctaaagcctc

SEQ ID NO: 23648 - DNA, 76 bp, Homo sapiens
atgagcccaccccacatgtggaaccaatgctctacttttaatacttccagactatgcagaatttctgtttctggga

SEQ ID NO: 23649 - DNA, 75 bp, Homo sapiens
acatgtggaaccaatgctctacttttaatacttccagactatgcagaatttctgtttctgggactcttcctcttg

SEQ ID NO: 23650 - DNA, 75 bp, Homo sapiens
aaccaatgctctacttttaatacttccagactatgcagaatttctgtttctgggactcttcctcttggagatgtc

SEQ ID NO: 23651 - DNA, 76 bp, Homo sapiens
tacttttaatacttccagactatgcagaatttctgtttctgggactcttcctcttggagatgtccctgaagatgta

SEQ ID NO: 23652 - DNA, 78 bp, Homo sapiens
aatacttccagactatgcagaatttctgtttctgggactcttcctcttggagatgtccctgaagatgtatggcatggg

SEQ ID NO: 23653 - DNA, 77 bp, Homo sapiens
tgcagaatttctgtttctgggactcttcctcttggagatgtccctgaagatgtatggcatggggcctcgcctttatt

SEQ ID NO: 23654 - DNA, 75 bp, Homo sapiens
atttctgtttctgggactcttcctcttggagatgtccctgaagatgtatggcatggggcctcgcctttattttca

SEQ ID NO: 23655 - DNA, 78 bp, Homo sapiens
gactcttcctcttggagatgtccctgaagatgtatggcatggggcctcgcctttattttcactcttcattcaactgct

SEQ ID NO: 23656 - DNA, 77 bp, Homo sapiens
ctcttggagatgtccctgaagatgtatggcatggggcctcgcctttattttcactcttcattcaactgctttgattt

SEQ ID NO: 23657 - DNA, 75 bp, Homo sapiens
tgtccctgaagatgtatggcatggggcctcgcctttattttcactcttcattcaactgctttgattttggggtaa

SEQ ID NO: 23658 - DNA, 73 bp, Homo sapiens
aagatgtatggcatggggcctcgcctttattttcactcttcattcaactgctttgattttggggtaagtcctc

SEQ ID NO: 23659 - DNA, 71 bp, Homo sapiens
atggggcctcgcctttattttcactcttcattcaactgctttgattttggggtaagtcctcggaagcctgc

SEQ ID NO: 23660 - DNA, 73 bp, Homo sapiens
ctcgcctttattttcactcttcattcaactgctttgattttggggtaagtcctcggaagcctgcctctgctcc

SEQ ID NO: 23661 - DNA, 81 bp, Homo sapiens
tcttcctcctcctctcactgtggctggcattgcctctctaggtcacagtgggcagtatctttgaagtggtctgggcaatct

SEQ ID NO: 23662 - DNA, 82 bp, Homo sapiens
tcctctcactgtggctggcattgcctctctaggtcacagtgggcagtatctttgaagtggtctgggcaatcttcagacctgg

SEQ ID NO: 23663 - DNA, 79 bp, Homo sapiens
tggctggcattgcctctctaggtcacagtgggcagtatctttgaagtggtctgggcaatcttcagacctggtacgtctt

SEQ ID NO: 23664 - DNA, 76 bp, Homo sapiens
ttgcctctctaggtcacagtgggcagtatctttgaagtggtctgggcaatcttcagacctggtacgtcttttggaa

SEQ ID NO: 23665 - DNA, 76 bp, Homo sapiens
taggtcacagtgggcagtatctttgaagtggtctgggcaatcttcagacctggtacgtcttttggaatcagtgtct

SEQ ID NO: 23666 - DNA, 76 bp, Homo sapiens
agtgggcagtatctttgaagtggtctgggcaatcttcagacctggtacgtcttttggaatcagtgtcttgcgagcc

SEQ ID NO: 23667 - DNA, 75 bp, Homo sapiens
ttgaagtggtctgggcaatcttcagacctggtacgtcttttggaatcagtgtcttgcgagccctccggcttctaa

SEQ ID NO: 23668 - DNA, 74 bp, Homo sapiens
gtctgggcaatcttcagacctggtacgtcttttggaatcagtgtcttgcgagccctccggcttctaagaatatt

SEQ ID NO: 23669 - DNA, 71 bp, Homo sapiens
aatcttcagacctggtacgtcttttggaatcagtgtcttgcgagccctccggcttctaagaatatttaaaa

SEQ ID NO: 23670 - DNA, 70 bp, Homo sapiens
tggtacgtcttttggaatcagtgtcttgcgagccctccggcttctaagaatatttaaaataaccaagtaa

SEQ ID NO: 23671 - DNA, 72 bp, Homo sapiens
tttggaatcagtgtcttgcgagccctccggcttctaagaatatttaaaataaccaagtaagtgatcagaatt

SEQ ID NO: 23672 - DNA, 70 bp, Homo sapiens
agtgtcttgcgagccctccggcttctaagaatatttaaaataaccaagtaagtgatcagaatttggactt

SEQ ID NO: 23673 - DNA, 68 bp, Homo sapiens
agccctccggcttctaagaatatttaaaataaccaagtaagtgatcagaatttggacttttcccaatg

SEQ ID NO: 23674 - DNA, 73 bp, Homo sapiens
acttggtatgcagtgttcacagctgtcacattgtctgggttttgtaggtattgggcttccctacggaatttgg

SEQ ID NO: 23675 - DNA, 71 bp, Homo sapiens
agtgttcacagctgtcacattgtctgggttttgtaggtattgggcttccctacggaatttggtggtctcct

SEQ ID NO: 23676 - DNA, 74 bp, Homo sapiens
agctgtcacattgtctgggttttgtaggtattgggcttccctacggaatttggtggtctccttgatgagctcaa

SEQ ID NO: 23677 - DNA, 73 bp, Homo sapiens
ttgtctgggttttgtaggtattgggcttccctacggaatttggtggtctccttgatgagctcaatgaagtcta

SEQ ID NO: 23678 - DNA, 74 bp, Homo sapiens
gttttgtaggtattgggcttccctacggaatttggtggtctccttgatgagctcaatgaagtctatcatcagtt

SEQ ID NO: 23679 - DNA, 75 bp, Homo sapiens
ggtattgggcttccctacggaatttggtggtctccttgatgagctcaatgaagtctatcatcagtttgcttttcc

SEQ ID NO: 23680 - DNA, 76 bp, Homo sapiens
ttccctacggaatttggtggtctccttgatgagctcaatgaagtctatcatcagtttgcttttcctcctcttcctc

SEQ ID NO: 23681 - DNA, 78 bp, Homo sapiens
atttggtggtctccttgatgagctcaatgaagtctatcatcagtttgcttttcctcctcttcctcttcatcgttgtct

SEQ ID NO: 23682 - DNA, 80 bp, Homo sapiens
cttgatgagctcaatgaagtctatcatcagtttgcttttcctcctcttcctcttcatcgttgtctttgctctcctaggaa

SEQ ID NO: 23683 - DNA, 79 bp, Homo sapiens
tcaatgaagtctatcatcagtttgcttttcctcctcttcctcttcatcgttgtctttgctctcctaggaatgcagttat

SEQ ID NO: 23684 - DNA, 76 bp, Homo sapiens
aagtctatcatcagtttgcttttcctcctcttcctcttcatcgttgtctttgctctcctaggaatgcagttatttg

SEQ ID NO: 23685 - DNA, 74 bp, Homo sapiens
tttgcttttcctcctcttcctcttcatcgttgtctttgctctcctaggaatgcagttatttggaggcaggtaag

SEQ ID NO: 23686 - DNA, 76 bp, Homo sapiens
tcctcttcctcttcatcgttgtctttgctctcctaggaatgcagttatttggaggcaggtaagtgcccagaagctt

SEQ ID NO: 23687 - DNA, 77 bp, Homo sapiens
tcttcatcgttgtctttgctctcctaggaatgcagttatttggaggcaggtaagtgcccagaagctttccatccaaa

SEQ ID NO: 23688 - DNA, 75 bp, Homo sapiens
tcgttgtctttgctctcctaggaatgcagttatttggaggcaggtaagtgcccagaagctttccatccaaaggag

SEQ ID NO: 23689 - DNA, 68 bp, Homo sapiens
gggaatggaaaacttggtatgtgagattttcatttcattattttctctaattttgtttttcaggttta

SEQ ID NO: 23690 - DNA, 70 bp, Homo sapiens
ttggtatgtgagattttcatttcattattttctctaattttgtttttcaggtttaactttaatgatggga

SEQ ID NO: 23691 - DNA, 69 bp, Homo sapiens
tgagattttcatttcattattttctctaattttgtttttcaggtttaactttaatgatgggactccttc

SEQ ID NO: 23692 - DNA, 67 bp, Homo sapiens
catttcattattttctctaattttgtttttcaggtttaactttaatgatgggactccttcggcaaat

SEQ ID NO: 23693 - DNA, 67 bp, Homo sapiens
tctctaattttgtttttcaggtttaactttaatgatgggactccttcggcaaattttgataccttcc

SEQ ID NO: 23694 - DNA, 68 bp, Homo sapiens
attttgtttttcaggtttaactttaatgatgggactccttcggcaaattttgataccttccctgcagc

SEQ ID NO: 23695 - DNA, 75 bp, Homo sapiens
ttcaggtttaactttaatgatgggactccttcggcaaattttgataccttccctgcagccatcatgactgtgttc

SEQ ID NO: 23696 - DNA, 77 bp, Homo sapiens
actttaatgatgggactccttcggcaaattttgataccttccctgcagccatcatgactgtgttccaggtatgaggc

SEQ ID NO: 23697 - DNA, 79 bp, Homo sapiens
actccttcggcaaattttgataccttccctgcagccatcatgactgtgttccaggtatgaggccagctgacggttcaca

SEQ ID NO: 23698 - DNA, 81 bp, Homo sapiens
aaattttgataccttccctgcagccatcatgactgtgttccaggtatgaggccagctgacggttcacaagtgctgcatggg

SEQ ID NO: 23699 - DNA, 82 bp, Homo sapiens
ttgataccttccctgcagccatcatgactgtgttccaggtatgaggccagctgacggttcacaagtgctgcatggggtccct

SEQ ID NO: 23700 - DNA, 77 bp, Homo sapiens
ttttctcctccagcccaggtttctgatgcgcctgtcatttgctttttgtagatcctgacgggtgaggactggaatga

SEQ ID NO: 23701 - DNA, 79 bp, Homo sapiens
caggtttctgatgcgcctgtcatttgctttttgtagatcctgacgggtgaggactggaatgaggtgatgtacaatggga

SEQ ID NO: 23702 - DNA, 81 bp, Homo sapiens
ttctgatgcgcctgtcatttgctttttgtagatcctgacgggtgaggactggaatgaggtgatgtacaatgggatccgctc

SEQ ID NO: 23703 - DNA, 75 bp, Homo sapiens
catttgctttttgtagatcctgacgggtgaggactggaatgaggtgatgtacaatgggatccgctcccagggtgg

SEQ ID NO: 23704 - DNA, 74 bp, Homo sapiens
ctttttgtagatcctgacgggtgaggactggaatgaggtgatgtacaatgggatccgctcccagggtggggtca

SEQ ID NO: 23705 - DNA, 78 bp, Homo sapiens
atcctgacgggtgaggactggaatgaggtgatgtacaatgggatccgctcccagggtggggtcagctcaggcatgtgg

SEQ ID NO: 23706 - DNA, 81 bp, Homo sapiens
ggactggaatgaggtgatgtacaatgggatccgctcccagggtggggtcagctcaggcatgtggtctgccatctacttcat

SEQ ID NO: 23707 - DNA, 83 bp, Homo sapiens
aatgaggtgatgtacaatgggatccgctcccagggtggggtcagctcaggcatgtggtctgccatctacttcattgtgctcac

SEQ ID NO: 23708 - DNA, 80 bp, Homo sapiens
atgtacaatgggatccgctcccagggtggggtcagctcaggcatgtggtctgccatctacttcattgtgctcaccttgtt

SEQ ID NO: 23709 - DNA, 81 bp, Homo sapiens
atccgctcccagggtggggtcagctcaggcatgtggtctgccatctacttcattgtgctcaccttgtttggcaactgtatc

SEQ ID NO: 23710 - DNA, 79 bp, Homo sapiens
ggtggggtcagctcaggcatgtggtctgccatctacttcattgtgctcaccttgtttggcaactgtatcctttttaaga

SEQ ID NO: 23711 - DNA, 82 bp, Homo sapiens
gctcaggcatgtggtctgccatctacttcattgtgctcaccttgtttggcaactgtatcctttttaagatgcacctcctcaa

SEQ ID NO: 23712 - DNA, 80 bp, Homo sapiens
atgtggtctgccatctacttcattgtgctcaccttgtttggcaactgtatcctttttaagatgcacctcctcaagctgcc

SEQ ID NO: 23713 - DNA, 77 bp, Homo sapiens
ctctcagccttgctgaagacttttgcttttcttatttgcccatccttaattcatcaccccagacacgctactgaatg

SEQ ID NO: 23714 - DNA, 76 bp, Homo sapiens
ttgctgaagacttttgcttttcttatttgcccatccttaattcatcaccccagacacgctactgaatgtgttcttg

SEQ ID NO: 23715 - DNA, 74 bp, Homo sapiens
aagacttttgcttttcttatttgcccatccttaattcatcaccccagacacgctactgaatgtgttcttggcta

SEQ ID NO: 23716 - DNA, 78 bp, Homo sapiens
ttttcttatttgcccatccttaattcatcaccccagacacgctactgaatgtgttcttggctatcgctgtggataatc

SEQ ID NO: 23717 - DNA, 80 bp, Homo sapiens
catccttaattcatcaccccagacacgctactgaatgtgttcttggctatcgctgtggataatctcgccaacgcccagga

SEQ ID NO: 23718 - DNA, 80 bp, Homo sapiens
ttaattcatcaccccagacacgctactgaatgtgttcttggctatcgctgtggataatctcgccaacgcccaggaactga

SEQ ID NO: 23719 - DNA, 78 bp, Homo sapiens
agacacgctactgaatgtgttcttggctatcgctgtggataatctcgccaacgcccaggaactgaccaaggtaagcat

SEQ ID NO: 23720 - DNA, 76 bp, Homo sapiens
ctactgaatgtgttcttggctatcgctgtggataatctcgccaacgcccaggaactgaccaaggtaagcattgttt

SEQ ID NO: 23721 - DNA, 76 bp, Homo sapiens
tgtgttcttggctatcgctgtggataatctcgccaacgcccaggaactgaccaaggtaagcattgttttctgggga

SEQ ID NO: 23722 - DNA, 77 bp, Homo sapiens
tatcgctgtggataatctcgccaacgcccaggaactgaccaaggtaagcattgttttctggggatctgatgtttctc

SEQ ID NO: 23723 - DNA, 75 bp, Homo sapiens
ataatctcgccaacgcccaggaactgaccaaggtaagcattgttttctggggatctgatgtttctctagtgccat

SEQ ID NO: 23724 - DNA, 72 bp, Homo sapiens
aacgcccaggaactgaccaaggtaagcattgttttctggggatctgatgtttctctagtgccattgggtacc

SEQ ID NO: 23725 - DNA, 77 bp, Homo sapiens
tctccttcctggggatcccaggcaaagccatctctgctttgtgtctaggatgaacaggaggaagaagaggccttcaa

SEQ ID NO: 23726 - DNA, 79 bp, Homo sapiens
gggatcccaggcaaagccatctctgctttgtgtctaggatgaacaggaggaagaagaggccttcaaccagaaacatgca

SEQ ID NO: 23727 - DNA, 80 bp, Homo sapiens
aggcaaagccatctctgctttgtgtctaggatgaacaggaggaagaagaggccttcaaccagaaacatgcactgcagaag

SEQ ID NO: 23728 - DNA, 79 bp, Homo sapiens
atctctgctttgtgtctaggatgaacaggaggaagaagaggccttcaaccagaaacatgcactgcagaaggccaaggag

SEQ ID NO: 23729 - DNA, 78 bp, Homo sapiens
tttgtgtctaggatgaacaggaggaagaagaggccttcaaccagaaacatgcactgcagaaggccaaggaggtcagcc

SEQ ID NO: 23730 - DNA, 80 bp, Homo sapiens
aggatgaacaggaggaagaagaggccttcaaccagaaacatgcactgcagaaggccaaggaggtcagcccgatgtctgca

SEQ ID NO: 23731 - DNA, 79 bp, Homo sapiens
aagaagaggccttcaaccagaaacatgcactgcagaaggccaaggaggtcagcccgatgtctgcacccaacatgccttc

SEQ ID NO: 23732 - DNA, 83 bp, Homo sapiens
cttcaaccagaaacatgcactgcagaaggccaaggaggtcagcccgatgtctgcacccaacatgccttcgatcgagtgagtca

SEQ ID NO: 23733 - DNA, 84 bp, Homo sapiens
accagaaacatgcactgcagaaggccaaggaggtcagcccgatgtctgcacccaacatgccttcgatcgagtgagtcagctgcc

SEQ ID NO: 23734 - DNA, 83 bp, Homo sapiens
tgcagaaggccaaggaggtcagcccgatgtctgcacccaacatgccttcgatcgagtgagtcagctgcccccttcactgatcc

SEQ ID NO: 23735 - DNA, 79 bp, Homo sapiens
aaggccaaggaggtcagcccgatgtctgcacccaacatgccttcgatcgagtgagtcagctgcccccttcactgatccc

SEQ ID NO: 23736 - DNA, 70 bp, Homo sapiens
tggtggctgtggggcttgaggttcctagaggttggggtgaactgaacctgtccatttttcttccccagaa

SEQ ID NO: 23737 - DNA, 70 bp, Homo sapiens
tggggcttgaggttcctagaggttggggtgaactgaacctgtccatttttcttccccagaagagacagaa

SEQ ID NO: 23738 - DNA, 70 bp, Homo sapiens
ttgaggttcctagaggttggggtgaactgaacctgtccatttttcttccccagaagagacagaaggagaa

SEQ ID NO: 23739 - DNA, 73 bp, Homo sapiens
tagaggttggggtgaactgaacctgtccatttttcttccccagaagagacagaaggagaagacaccacatgtc

SEQ ID NO: 23740 - DNA, 76 bp, Homo sapiens
aactgaacctgtccatttttcttccccagaagagacagaaggagaagacaccacatgtcgatgtgggagccacgca

SEQ ID NO: 23741 - DNA, 80 bp, Homo sapiens
tccatttttcttccccagaagagacagaaggagaagacaccacatgtcgatgtgggagccacgcagcagccacctgtatg

SEQ ID NO: 23742 - DNA, 81 bp, Homo sapiens
ttttcttccccagaagagacagaaggagaagacaccacatgtcgatgtgggagccacgcagcagccacctgtatgtgtgta

SEQ ID NO: 23743 - DNA, 82 bp, Homo sapiens
gagacagaaggagaagacaccacatgtcgatgtgggagccacgcagcagccacctgtatgtgtgtaccagtttgcgtgtttg

SEQ ID NO: 23744 - DNA, 82 bp, Homo sapiens
gagaagacaccacatgtcgatgtgggagccacgcagcagccacctgtatgtgtgtaccagtttgcgtgtttgtgagtggtta

SEQ ID NO: 23745 - DNA, 80 bp, Homo sapiens
acaccacatgtcgatgtgggagccacgcagcagccacctgtatgtgtgtaccagtttgcgtgtttgtgagtggttacgtg

SEQ ID NO: 23746 - DNA, 78 bp, Homo sapiens
atgtgggagccacgcagcagccacctgtatgtgtgtaccagtttgcgtgtttgtgagtggttacgtgtgggcgtggga

SEQ ID NO: 23747 - DNA, 77 bp, Homo sapiens
tgcagcttctgggctctgaccgcggccctgccctttccccttggcaggagggagcggaggcgccggcaccacatgtc

SEQ ID NO: 23748 - DNA, 73 bp, Homo sapiens
ttctgggctctgaccgcggccctgccctttccccttggcaggagggagcggaggcgccggcaccacatgtccg

SEQ ID NO: 23749 - DNA, 74 bp, Homo sapiens
gcggccctgccctttccccttggcaggagggagcggaggcgccggcaccacatgtccgtgtgggagcagcgtac

SEQ ID NO: 23750 - DNA, 76 bp, Homo sapiens
cctttccccttggcaggagggagcggaggcgccggcaccacatgtccgtgtgggagcagcgtaccagccagctgag

SEQ ID NO: 23751 - DNA, 85 bp, Homo sapiens
ttggcaggagggagcggaggcgccggcaccacatgtccgtgtgggagcagcgtaccagccagctgaggaagcacatgcagatgtc

SEQ ID NO: 23752 - DNA, 84 bp, Homo sapiens
agggagcggaggcgccggcaccacatgtccgtgtgggagcagcgtaccagccagctgaggaagcacatgcagatgtccagccag

SEQ ID NO: 23753 - DNA, 86 bp, Homo sapiens
gccggcaccacatgtccgtgtgggagcagcgtaccagccagctgaggaagcacatgcagatgtccagccaggaggccctcaacaga

SEQ ID NO: 23754 - DNA, 85 bp, Homo sapiens
accacatgtccgtgtgggagcagcgtaccagccagctgaggaagcacatgcagatgtccagccaggaggccctcaacagagagga

SEQ ID NO: 23755 - DNA, 86 bp, Homo sapiens
tgggagcagcgtaccagccagctgaggaagcacatgcagatgtccagccaggaggccctcaacagagaggaggcgccgaccatgaa

SEQ ID NO: 23756 - DNA, 84 bp, Homo sapiens
gtaccagccagctgaggaagcacatgcagatgtccagccaggaggccctcaacagagaggaggcgccgaccatgaacccgctca

SEQ ID NO: 23757 - DNA, 82 bp, Homo sapiens
agccagctgaggaagcacatgcagatgtccagccaggaggccctcaacagagaggaggcgccgaccatgaacccgctcaacc

SEQ ID NO: 23758 - DNA, 78 bp, Homo sapiens
aagcacatgcagatgtccagccaggaggccctcaacagagaggaggcgccgaccatgaacccgctcaaccccctcaac

SEQ ID NO: 23759 - DNA, 75 bp, Homo sapiens
agatgtccagccaggaggccctcaacagagaggaggcgccgaccatgaacccgctcaaccccctcaacccgctca

SEQ ID NO: 23760 - DNA, 73 bp, Homo sapiens
aggaggccctcaacagagaggaggcgccgaccatgaacccgctcaaccccctcaacccgctcagctccctcaa

SEQ ID NO: 23761 - DNA, 74 bp, Homo sapiens
aacagagaggaggcgccgaccatgaacccgctcaaccccctcaacccgctcagctccctcaacccgctcaatgc

SEQ ID NO: 23762 - DNA, 73 bp, Homo sapiens
agaggaggcgccgaccatgaacccgctcaaccccctcaacccgctcagctccctcaacccgctcaatgcccac

SEQ ID NO: 23763 - DNA, 71 bp, Homo sapiens
accatgaacccgctcaaccccctcaacccgctcagctccctcaacccgctcaatgcccaccccagccttta

SEQ ID NO: 23764 - DNA, 71 bp, Homo sapiens
ctcaaccccctcaacccgctcagctccctcaacccgctcaatgcccaccccagcctttatcggcgacccag

SEQ ID NO: 23765 - DNA, 73 bp, Homo sapiens
ccctcaacccgctcagctccctcaacccgctcaatgcccaccccagcctttatcggcgacccagggccattga

SEQ ID NO: 23766 - DNA, 74 bp, Homo sapiens
tcagctccctcaacccgctcaatgcccaccccagcctttatcggcgacccagggccattgagggcctggccctg

SEQ ID NO: 23767 - DNA, 71 bp, Homo sapiens
ccctcaacccgctcaatgcccaccccagcctttatcggcgacccagggccattgagggcctggccctgggc

SEQ ID NO: 23768 - DNA, 73 bp, Homo sapiens
tcaatgcccaccccagcctttatcggcgacccagggccattgagggcctggccctgggcctggccctggagaa

SEQ ID NO: 23769 - DNA, 72 bp, Homo sapiens
cagcctttatcggcgacccagggccattgagggcctggccctgggcctggccctggagaagttcgaggagga

SEQ ID NO: 23770 - DNA, 73 bp, Homo sapiens
acccagggccattgagggcctggccctgggcctggccctggagaagttcgaggaggagcgcatcagccgtggg

SEQ ID NO: 23771 - DNA, 73 bp, Homo sapiens
ttgagggcctggccctgggcctggccctggagaagttcgaggaggagcgcatcagccgtggggggtccctcaa

SEQ ID NO: 23772 - DNA, 71 bp, Homo sapiens
ctgggcctggccctggagaagttcgaggaggagcgcatcagccgtggggggtccctcaagggggatggagg

SEQ ID NO: 23773 - DNA, 70 bp, Homo sapiens
ccctggagaagttcgaggaggagcgcatcagccgtggggggtccctcaagggggatggaggggaccgatc

SEQ ID NO: 23774 - DNA, 72 bp, Homo sapiens
aggagcgcatcagccgtggggggtccctcaagggggatggaggggaccgatccagtgccctggacaaccaga

SEQ ID NO: 23775 - DNA, 69 bp, Homo sapiens
atcagccgtggggggtccctcaagggggatggaggggaccgatccagtgccctggacaaccagaggacc

SEQ ID NO: 23776 - DNA, 68 bp, Homo sapiens
ggtccctcaagggggatggaggggaccgatccagtgccctggacaaccagaggacccctttgtccctg

SEQ ID NO: 23777 - DNA, 70 bp, Homo sapiens
ggggatggaggggaccgatccagtgccctggacaaccagaggacccctttgtccctgggccagcgggagc

SEQ ID NO: 23778 - DNA, 73 bp, Homo sapiens
gggaccgatccagtgccctggacaaccagaggacccctttgtccctgggccagcgggagccaccatggctggc

SEQ ID NO: 23779 - DNA, 73 bp, Homo sapiens
atccagtgccctggacaaccagaggacccctttgtccctgggccagcgggagccaccatggctggccaggccc

SEQ ID NO: 23780 - DNA, 74 bp, Homo sapiens
tggacaaccagaggacccctttgtccctgggccagcgggagccaccatggctggccaggccctgtcatggaaac

SEQ ID NO: 23781 - DNA, 73 bp, Homo sapiens
aggacccctttgtccctgggccagcgggagccaccatggctggccaggccctgtcatggaaactgtgacccga

SEQ ID NO: 23782 - DNA, 77 bp, Homo sapiens
ctttgtccctgggccagcgggagccaccatggctggccaggccctgtcatggaaactgtgacccgactcagcaggag

SEQ ID NO: 23783 - DNA, 78 bp, Homo sapiens
ccagcgggagccaccatggctggccaggccctgtcatggaaactgtgacccgactcagcaggaggcagggggaggaga

SEQ ID NO: 23784 - DNA, 79 bp, Homo sapiens
caccatggctggccaggccctgtcatggaaactgtgacccgactcagcaggaggcagggggaggagaggctgtggtgac

SEQ ID NO: 23785 - DNA, 77 bp, Homo sapiens
tggccaggccctgtcatggaaactgtgacccgactcagcaggaggcagggggaggagaggctgtggtgacctttgag

SEQ ID NO: 23786 - DNA, 76 bp, Homo sapiens
tgtcatggaaactgtgacccgactcagcaggaggcagggggaggagaggctgtggtgacctttgaggaccgggcca

SEQ ID NO: 23787 - DNA, 74 bp, Homo sapiens
aaactgtgacccgactcagcaggaggcagggggaggagaggctgtggtgacctttgaggaccgggccaggcaca

SEQ ID NO: 23788 - DNA, 76 bp, Homo sapiens
acccgactcagcaggaggcagggggaggagaggctgtggtgacctttgaggaccgggccaggcacaggcagagcca

SEQ ID NO: 23789 - DNA, 75 bp, Homo sapiens
aggaggcagggggaggagaggctgtggtgacctttgaggaccgggccaggcacaggcagagccaacggcgcagcc

SEQ ID NO: 23790 - DNA, 79 bp, Homo sapiens
gaggagaggctgtggtgacctttgaggaccgggccaggcacaggcagagccaacggcgcagccggcatcgccgcgtcag

SEQ ID NO: 23791 - DNA, 78 bp, Homo sapiens
ctgtggtgacctttgaggaccgggccaggcacaggcagagccaacggcgcagccggcatcgccgcgtcaggacagaag

SEQ ID NO: 23792 - DNA, 79 bp, Homo sapiens
tgacctttgaggaccgggccaggcacaggcagagccaacggcgcagccggcatcgccgcgtcaggacagaaggcaagga

SEQ ID NO: 23793 - DNA, 79 bp, Homo sapiens
ggaccgggccaggcacaggcagagccaacggcgcagccggcatcgccgcgtcaggacagaaggcaaggagtcctcttca

SEQ ID NO: 23794 - DNA, 79 bp, Homo sapiens
acaggcagagccaacggcgcagccggcatcgccgcgtcaggacagaaggcaaggagtcctcttcagcctcccggagcag

SEQ ID NO: 23795 - DNA, 79 bp, Homo sapiens
agagccaacggcgcagccggcatcgccgcgtcaggacagaaggcaaggagtcctcttcagcctcccggagcaggtctgc

SEQ ID NO: 23796 - DNA, 79 bp, Homo sapiens
agccggcatcgccgcgtcaggacagaaggcaaggagtcctcttcagcctcccggagcaggtctgccagccaggaacgca

SEQ ID NO: 23797 - DNA, 79 bp, Homo sapiens
ccgcgtcaggacagaaggcaaggagtcctcttcagcctcccggagcaggtctgccagccaggaacgcagtctggatgaa

SEQ ID NO: 23798 - DNA, 80 bp, Homo sapiens
acagaaggcaaggagtcctcttcagcctcccggagcaggtctgccagccaggaacgcagtctggatgaagccatgcccac

SEQ ID NO: 23799 - DNA, 78 bp, Homo sapiens
aaggagtcctcttcagcctcccggagcaggtctgccagccaggaacgcagtctggatgaagccatgcccactgaaggg

SEQ ID NO: 23800 - DNA, 81 bp, Homo sapiens
ttcagcctcccggagcaggtctgccagccaggaacgcagtctggatgaagccatgcccactgaaggggagaaggaccatga

SEQ ID NO: 23801 - DNA, 81 bp, Homo sapiens
ctcccggagcaggtctgccagccaggaacgcagtctggatgaagccatgcccactgaaggggagaaggaccatgagctcag

SEQ ID NO: 23802 - DNA, 80 bp, Homo sapiens
aggtctgccagccaggaacgcagtctggatgaagccatgcccactgaaggggagaaggaccatgagctcaggggcaacca

SEQ ID NO: 23803 - DNA, 79 bp, Homo sapiens
aggaacgcagtctggatgaagccatgcccactgaaggggagaaggaccatgagctcaggggcaaccatggtgccaagga

SEQ ID NO: 23804 - DNA, 81 bp, Homo sapiens
tctggatgaagccatgcccactgaaggggagaaggaccatgagctcaggggcaaccatggtgccaaggagccaacgatcca

SEQ ID NO: 23805 - DNA, 77 bp, Homo sapiens
aagccatgcccactgaaggggagaaggaccatgagctcaggggcaaccatggtgccaaggagccaacgatccaagaa

SEQ ID NO: 23806 - DNA, 77 bp, Homo sapiens
actgaaggggagaaggaccatgagctcaggggcaaccatggtgccaaggagccaacgatccaagaagagagagccca

SEQ ID NO: 23807 - DNA, 76 bp, Homo sapiens
aaggaccatgagctcaggggcaaccatggtgccaaggagccaacgatccaagaagagagagcccaggatttaagga

SEQ ID NO: 23808 - DNA, 77 bp, Homo sapiens
caaccatggtgccaaggagccaacgatccaagaagagagagcccaggatttaaggaggtgagtgagtcacagggctc

SEQ ID NO: 23809 - DNA, 77 bp, Homo sapiens
atggtgccaaggagccaacgatccaagaagagagagcccaggatttaaggaggtgagtgagtcacagggctcccaga

SEQ ID NO: 23810 - DNA, 79 bp, Homo sapiens
agccaacgatccaagaagagagagcccaggatttaaggaggtgagtgagtcacagggctcccagatggatggcacacag

SEQ ID NO: 23811 - DNA, 81 bp, Homo sapiens
atttggggacagcgtctgagcaccagctctctcttcctctctcttcacaggaccaacagtctgatggtgtccagaggctcc

SEQ ID NO: 23812 - DNA, 83 bp, Homo sapiens
agcgtctgagcaccagctctctcttcctctctcttcacaggaccaacagtctgatggtgtccagaggctccgggctggcagga

SEQ ID NO: 23813 - DNA, 81 bp, Homo sapiens
agctctctcttcctctctcttcacaggaccaacagtctgatggtgtccagaggctccgggctggcaggaggccttgatgag

SEQ ID NO: 23814 - DNA, 81 bp, Homo sapiens
ttcctctctcttcacaggaccaacagtctgatggtgtccagaggctccgggctggcaggaggccttgatgaggctgacacc

SEQ ID NO: 23815 - DNA, 77 bp, Homo sapiens
accaacagtctgatggtgtccagaggctccgggctggcaggaggccttgatgaggctgacacccccctagtcctgcc

SEQ ID NO: 23816 - DNA, 80 bp, Homo sapiens
tgatggtgtccagaggctccgggctggcaggaggccttgatgaggctgacacccccctagtcctgccccatcctgagctg

SEQ ID NO: 23817 - DNA, 78 bp, Homo sapiens
tccagaggctccgggctggcaggaggccttgatgaggctgacacccccctagtcctgccccatcctgagctggaagtg

SEQ ID NO: 23818 - DNA, 76 bp, Homo sapiens
ctggcaggaggccttgatgaggctgacacccccctagtcctgccccatcctgagctggaagtggggaagcacgtgg

SEQ ID NO: 23819 - DNA, 77 bp, Homo sapiens
aggaggccttgatgaggctgacacccccctagtcctgccccatcctgagctggaagtggggaagcacgtggtgctga

SEQ ID NO: 23820 - DNA, 78 bp, Homo sapiens
atgaggctgacacccccctagtcctgccccatcctgagctggaagtggggaagcacgtggtgctgacggagcaggagc

SEQ ID NO: 23821 - DNA, 80 bp, Homo sapiens
cccctagtcctgccccatcctgagctggaagtggggaagcacgtggtgctgacggagcaggagccagaaggcagcagtga

SEQ ID NO: 23822 - DNA, 82 bp, Homo sapiens
agtcctgccccatcctgagctggaagtggggaagcacgtggtgctgacggagcaggagccagaaggcagcagtgagcaggcc

SEQ ID NO: 23823 - DNA, 82 bp, Homo sapiens
atcctgagctggaagtggggaagcacgtggtgctgacggagcaggagccagaaggcagcagtgagcaggccctgctggggaa

SEQ ID NO: 23824 - DNA, 84 bp, Homo sapiens
aagtggggaagcacgtggtgctgacggagcaggagccagaaggcagcagtgagcaggccctgctggggaatgtgcagctagaca

SEQ ID NO: 23825 - DNA, 84 bp, Homo sapiens
aagcacgtggtgctgacggagcaggagccagaaggcagcagtgagcaggccctgctggggaatgtgcagctagacatgggccgg

SEQ ID NO: 23826 - DNA, 88 bp, Homo sapiens
gtgctgacggagcaggagccagaaggcagcagtgagcaggccctgctggggaatgtgcagctagacatgggccgggtcatcagccaga

SEQ ID NO: 23827 - DNA, 86 bp, Homo sapiens
aggagccagaaggcagcagtgagcaggccctgctggggaatgtgcagctagacatgggccgggtcatcagccagagcgagcctgac

SEQ ID NO: 23828 - DNA, 89 bp, Homo sapiens
aggcagcagtgagcaggccctgctggggaatgtgcagctagacatgggccgggtcatcagccagagcgagcctgacctctcctgcatca

SEQ ID NO: 23829 - DNA, 85 bp, Homo sapiens
agcaggccctgctggggaatgtgcagctagacatgggccgggtcatcagccagagcgagcctgacctctcctgcatcacggccaa

SEQ ID NO: 23830 - DNA, 83 bp, Homo sapiens
ctggggaatgtgcagctagacatgggccgggtcatcagccagagcgagcctgacctctcctgcatcacggccaacacggacaa

SEQ ID NO: 23831 - DNA, 83 bp, Homo sapiens
aatgtgcagctagacatgggccgggtcatcagccagagcgagcctgacctctcctgcatcacggccaacacggacaaggccac

SEQ ID NO: 23832 - DNA, 81 bp, Homo sapiens
tagacatgggccgggtcatcagccagagcgagcctgacctctcctgcatcacggccaacacggacaaggccaccaccgaga

SEQ ID NO: 23833 - DNA, 82 bp, Homo sapiens
gtcatcagccagagcgagcctgacctctcctgcatcacggccaacacggacaaggccaccaccgagagcaccagcgtcaccg

SEQ ID NO: 23834 - DNA, 80 bp, Homo sapiens
agagcgagcctgacctctcctgcatcacggccaacacggacaaggccaccaccgagagcaccagcgtcaccgtcgccatc

SEQ ID NO: 23835 - DNA, 77 bp, Homo sapiens
tgacctctcctgcatcacggccaacacggacaaggccaccaccgagagcaccagcgtcaccgtcgccatccccgacg

SEQ ID NO: 23836 - DNA, 77 bp, Homo sapiens
tctcctgcatcacggccaacacggacaaggccaccaccgagagcaccagcgtcaccgtcgccatccccgacgtggac

SEQ ID NO: 23837 - DNA, 71 bp, Homo sapiens
ccaacacggacaaggccaccaccgagagcaccagcgtcaccgtcgccatccccgacgtggaccccttggtg

SEQ ID NO: 23838 - DNA, 71 bp, Homo sapiens
acaaggccaccaccgagagcaccagcgtcaccgtcgccatccccgacgtggaccccttggtggactcaacc

SEQ ID NO: 23839 - DNA, 73 bp, Homo sapiens
accaccgagagcaccagcgtcaccgtcgccatccccgacgtggaccccttggtggactcaaccgtggtgcaca

SEQ ID NO: 23840 - DNA, 75 bp, Homo sapiens
accagcgtcaccgtcgccatccccgacgtggaccccttggtggactcaaccgtggtgcacagtgagagcacagtc

SEQ ID NO: 23841 - DNA, 73 bp, Homo sapiens
accgtcgccatccccgacgtggaccccttggtggactcaaccgtggtgcacagtgagagcacagtccctgttc

SEQ ID NO: 23842 - DNA, 71 bp, Homo sapiens
cccgacgtggaccccttggtggactcaaccgtggtgcacagtgagagcacagtccctgttcccctccaccc

SEQ ID NO: 23843 - DNA, 78 bp, Homo sapiens
attttcacatgcctcatgatttctgaagatttcaacgtgttcctcttgcagttagcaacaagacggatggggaagcca

SEQ ID NO: 23844 - DNA, 74 bp, Homo sapiens
atgatttctgaagatttcaacgtgttcctcttgcagttagcaacaagacggatggggaagccagtcccttgaag

SEQ ID NO: 23845 - DNA, 75 bp, Homo sapiens
ttctgaagatttcaacgtgttcctcttgcagttagcaacaagacggatggggaagccagtcccttgaaggaggca

SEQ ID NO: 23846 - DNA, 77 bp, Homo sapiens
ttcaacgtgttcctcttgcagttagcaacaagacggatggggaagccagtcccttgaaggaggcagagatcagagag

SEQ ID NO: 23847 - DNA, 79 bp, Homo sapiens
tcctcttgcagttagcaacaagacggatggggaagccagtcccttgaaggaggcagagatcagagaggatgaggaggag

SEQ ID NO: 23848 - DNA, 78 bp, Homo sapiens
ttagcaacaagacggatggggaagccagtcccttgaaggaggcagagatcagagaggatgaggaggaggtggagaaga

SEQ ID NO: 23849 - DNA, 77 bp, Homo sapiens
acggatggggaagccagtcccttgaaggaggcagagatcagagaggatgaggaggaggtggagaagaagaagcagaa

SEQ ID NO: 23850 - DNA, 78 bp, Homo sapiens
ggaagccagtcccttgaaggaggcagagatcagagaggatgaggaggaggtggagaagaagaagcagaagaaggagaa

SEQ ID NO: 23851 - DNA, 81 bp, Homo sapiens
ttgaaggaggcagagatcagagaggatgaggaggaggtggagaagaagaagcagaagaaggagaagcgtgagacaggcaaa

SEQ ID NO: 23852 - DNA, 81 bp, Homo sapiens
agagatcagagaggatgaggaggaggtggagaagaagaagcagaagaaggagaagcgtgagacaggcaaagccatggtgcc

SEQ ID NO: 23853 - DNA, 80 bp, Homo sapiens
aggatgaggaggaggtggagaagaagaagcagaagaaggagaagcgtgagacaggcaaagccatggtgccccacagctca

SEQ ID NO: 23854 - DNA, 80 bp, Homo sapiens
ggaggtggagaagaagaagcagaagaaggagaagcgtgagacaggcaaagccatggtgccccacagctcaatgttcatct

SEQ ID NO: 23855 - DNA, 82 bp, Homo sapiens
aagaagaagcagaagaaggagaagcgtgagacaggcaaagccatggtgccccacagctcaatgttcatcttcagcaccacca

SEQ ID NO: 23856 - DNA, 79 bp, Homo sapiens
agaagaaggagaagcgtgagacaggcaaagccatggtgccccacagctcaatgttcatcttcagcaccaccaacccgta

SEQ ID NO: 23857 - DNA, 79 bp, Homo sapiens
aaggagaagcgtgagacaggcaaagccatggtgccccacagctcaatgttcatcttcagcaccaccaacccgtaagcca

SEQ ID NO: 23858 - DNA, 78 bp, Homo sapiens
acaggcaaagccatggtgccccacagctcaatgttcatcttcagcaccaccaacccgtaagccaccctcgcgttgctc

SEQ ID NO: 23859 - DNA, 76 bp, Homo sapiens
ccatggtgccccacagctcaatgttcatcttcagcaccaccaacccgtaagccaccctcgcgttgctccctcttta

SEQ ID NO: 23860 - DNA, 79 bp, Homo sapiens
atgggcgtggtggggagtgggccagctcagccatgcccactgcccgcaggatccggagggcctgccactacatcgtgaa

SEQ ID NO: 23861 - DNA, 81 bp, Homo sapiens
ggagtgggccagctcagccatgcccactgcccgcaggatccggagggcctgccactacatcgtgaacctgcgctactttga

SEQ ID NO: 23862 - DNA, 84 bp, Homo sapiens
agctcagccatgcccactgcccgcaggatccggagggcctgccactacatcgtgaacctgcgctactttgagatgtgcatcctc

SEQ ID NO: 23863 - DNA, 82 bp, Homo sapiens
atgcccactgcccgcaggatccggagggcctgccactacatcgtgaacctgcgctactttgagatgtgcatcctcctggtga

SEQ ID NO: 23864 - DNA, 83 bp, Homo sapiens
actgcccgcaggatccggagggcctgccactacatcgtgaacctgcgctactttgagatgtgcatcctcctggtgattgcagc

SEQ ID NO: 23865 - DNA, 85 bp, Homo sapiens
atccggagggcctgccactacatcgtgaacctgcgctactttgagatgtgcatcctcctggtgattgcagccagcagcatcgccc

SEQ ID NO: 23866 - DNA, 88 bp, Homo sapiens
tgccactacatcgtgaacctgcgctactttgagatgtgcatcctcctggtgattgcagccagcagcatcgccctggcggcagaggacc

SEQ ID NO: 23867 - DNA, 85 bp, Homo sapiens
tacatcgtgaacctgcgctactttgagatgtgcatcctcctggtgattgcagccagcagcatcgccctggcggcagaggaccccg

SEQ ID NO: 23868 - DNA, 85 bp, Homo sapiens
tgcgctactttgagatgtgcatcctcctggtgattgcagccagcagcatcgccctggcggcagaggaccccgtcctgaccaactc

SEQ ID NO: 23869 - DNA, 85 bp, Homo sapiens
ttgagatgtgcatcctcctggtgattgcagccagcagcatcgccctggcggcagaggaccccgtcctgaccaactcggagcgcaa

SEQ ID NO: 23870 - DNA, 80 bp, Homo sapiens
tcctcctggtgattgcagccagcagcatcgccctggcggcagaggaccccgtcctgaccaactcggagcgcaacaaagtg

SEQ ID NO: 23871 - DNA, 78 bp, Homo sapiens
attgcagccagcagcatcgccctggcggcagaggaccccgtcctgaccaactcggagcgcaacaaagtgggtacacag

SEQ ID NO: 23872 - DNA, 75 bp, Homo sapiens
agccagcagcatcgccctggcggcagaggaccccgtcctgaccaactcggagcgcaacaaagtgggtacacaggg

SEQ ID NO: 23873 - DNA, 74 bp, Homo sapiens
atcgccctggcggcagaggaccccgtcctgaccaactcggagcgcaacaaagtgggtacacaggggccatgtgc

SEQ ID NO: 23874 - DNA, 79 bp, Homo sapiens
tgggagctcatgtagtagcctgttggccacacatggtcatttccttccaccatatgtgtctttcaggtcctgaggtatt

SEQ ID NO: 23875 - DNA, 77 bp, Homo sapiens
atgtagtagcctgttggccacacatggtcatttccttccaccatatgtgtctttcaggtcctgaggtattttgacta

SEQ ID NO: 23876 - DNA, 79 bp, Homo sapiens
tagcctgttggccacacatggtcatttccttccaccatatgtgtctttcaggtcctgaggtattttgactatgtgttca

SEQ ID NO: 23877 - DNA, 76 bp, Homo sapiens
acatggtcatttccttccaccatatgtgtctttcaggtcctgaggtattttgactatgtgttcacgggcgtgttca

SEQ ID NO: 23878 - DNA, 72 bp, Homo sapiens
atttccttccaccatatgtgtctttcaggtcctgaggtattttgactatgtgttcacgggcgtgttcacctt

SEQ ID NO: 23879 - DNA, 75 bp, Homo sapiens
catatgtgtctttcaggtcctgaggtattttgactatgtgttcacgggcgtgttcacctttgagatggttataaa

SEQ ID NO: 23880 - DNA, 71 bp, Homo sapiens
tttcaggtcctgaggtattttgactatgtgttcacgggcgtgttcacctttgagatggttataaaggtaaa

SEQ ID NO: 23881 - DNA, 71 bp, Homo sapiens
tgaggtattttgactatgtgttcacgggcgtgttcacctttgagatggttataaaggtaaaaacttctaga

SEQ ID NO: 23882 - DNA, 70 bp, Homo sapiens
tattttgactatgtgttcacgggcgtgttcacctttgagatggttataaaggtaaaaacttctagagaaa

SEQ ID NO: 23883 - DNA, 68 bp, Homo sapiens
atgtgttcacgggcgtgttcacctttgagatggttataaaggtaaaaacttctagagaaaacctgggc

SEQ ID NO: 23884 - DNA, 68 bp, Homo sapiens
tgttcacctttgagatggttataaaggtaaaaacttctagagaaaacctgggctcttgggtttagatg

SEQ ID NO: 23885 - DNA, 65 bp, Homo sapiens
acctttgagatggttataaaggtaaaaacttctagagaaaacctgggctcttgggtttagatggg

SEQ ID NO: 23886 - DNA, 84 bp, Homo sapiens
tcttggctcactgtggctgttcatatccttctgcagatgatagaccaaggcttgatcctgcaggatgggtcctacttccgagac

SEQ ID NO: 23887 - DNA, 82 bp, Homo sapiens
ctgtggctgttcatatccttctgcagatgatagaccaaggcttgatcctgcaggatgggtcctacttccgagacttgtggaa

SEQ ID NO: 23888 - DNA, 82 bp, Homo sapiens
ttcatatccttctgcagatgatagaccaaggcttgatcctgcaggatgggtcctacttccgagacttgtggaacatcctgga

SEQ ID NO: 23889 - DNA, 80 bp, Homo sapiens
ttctgcagatgatagaccaaggcttgatcctgcaggatgggtcctacttccgagacttgtggaacatcctggactttgtg

SEQ ID NO: 23890 - DNA, 76 bp, Homo sapiens
atgatagaccaaggcttgatcctgcaggatgggtcctacttccgagacttgtggaacatcctggactttgtggtgg

SEQ ID NO: 23891 - DNA, 76 bp, Homo sapiens
cttgatcctgcaggatgggtcctacttccgagacttgtggaacatcctggactttgtggtggtcgttggcgcattg

SEQ ID NO: 23892 - DNA, 73 bp, Homo sapiens
caggatgggtcctacttccgagacttgtggaacatcctggactttgtggtggtcgttggcgcattggtggcct

SEQ ID NO: 23893 - DNA, 74 bp, Homo sapiens
tgggtcctacttccgagacttgtggaacatcctggactttgtggtggtcgttggcgcattggtggcctttgctc

SEQ ID NO: 23894 - DNA, 75 bp, Homo sapiens
agacttgtggaacatcctggactttgtggtggtcgttggcgcattggtggcctttgctctggcgtaagtgactct

SEQ ID NO: 23895 - DNA, 74 bp, Homo sapiens
aacatcctggactttgtggtggtcgttggcgcattggtggcctttgctctggcgtaagtgactcttttcatatt

SEQ ID NO: 23896 - DNA, 73 bp, Homo sapiens
actttgtggtggtcgttggcgcattggtggcctttgctctggcgtaagtgactcttttcatatttgattccct

SEQ ID NO: 23897 - DNA, 74 bp, Homo sapiens
gtggtggtcgttggcgcattggtggcctttgctctggcgtaagtgactcttttcatatttgattcccttccttc

SEQ ID NO: 23898 - DNA, 72 bp, Homo sapiens
gttttattttgattttctactgctctctgattggatcctccataggaacgctttggggtaaatatgttcgat

SEQ ID NO: 23899 - DNA, 75 bp, Homo sapiens
tttgattttctactgctctctgattggatcctccataggaacgctttggggtaaatatgttcgattatctttgaa

SEQ ID NO: 23900 - DNA, 75 bp, Homo sapiens
tgctctctgattggatcctccataggaacgctttggggtaaatatgttcgattatctttgaagtaaacgatacaa

SEQ ID NO: 23901 - DNA, 70 bp, Homo sapiens
attggatcctccataggaacgctttggggtaaatatgttcgattatctttgaagtaaacgatacaaggaa

SEQ ID NO: 23902 - DNA, 71 bp, Homo sapiens
tcctccataggaacgctttggggtaaatatgttcgattatctttgaagtaaacgatacaaggaatgagttg

SEQ ID NO: 23903 - DNA, 70 bp, Homo sapiens
ctttggggtaaatatgttcgattatctttgaagtaaacgatacaaggaatgagttggaggagcgagaaag

SEQ ID NO: 23904 - DNA, 73 bp, Homo sapiens
taaatatgttcgattatctttgaagtaaacgatacaaggaatgagttggaggagcgagaaagtatggttggga

SEQ ID NO: 23905 - DNA, 71 bp, Homo sapiens
gttcgattatctttgaagtaaacgatacaaggaatgagttggaggagcgagaaagtatggttgggagggga

SEQ ID NO: 23906 - DNA, 68 bp, Homo sapiens
atttttatttctcccccattccatatgattccctgggggcctctcccctgcagaaccaacaaaggacg

SEQ ID NO: 23907 - DNA, 74 bp, Homo sapiens
ccattccatatgattccctgggggcctctcccctgcagaaccaacaaaggacgggacatcaagaccatcaagtc

SEQ ID NO: 23908 - DNA, 74 bp, Homo sapiens
atatgattccctgggggcctctcccctgcagaaccaacaaaggacgggacatcaagaccatcaagtctctgcgg

SEQ ID NO: 23909 - DNA, 74 bp, Homo sapiens
ggggcctctcccctgcagaaccaacaaaggacgggacatcaagaccatcaagtctctgcgggtgctccgagttc

SEQ ID NO: 23910 - DNA, 76 bp, Homo sapiens
ccctgcagaaccaacaaaggacgggacatcaagaccatcaagtctctgcgggtgctccgagttctaaggccactga

SEQ ID NO: 23911 - DNA, 72 bp, Homo sapiens
aaccaacaaaggacgggacatcaagaccatcaagtctctgcgggtgctccgagttctaaggccactgaaaac

SEQ ID NO: 23912 - DNA, 75 bp, Homo sapiens
aaaggacgggacatcaagaccatcaagtctctgcgggtgctccgagttctaaggccactgaaaaccatcaagcgc

SEQ ID NO: 23913 - DNA, 79 bp, Homo sapiens
acatcaagaccatcaagtctctgcgggtgctccgagttctaaggccactgaaaaccatcaagcgcttgcccaagctcaa

SEQ ID NO: 23914 - DNA, 75 bp, Homo sapiens
agtctctgcgggtgctccgagttctaaggccactgaaaaccatcaagcgcttgcccaagctcaaggtagtgttta

SEQ ID NO: 23915 - DNA, 74 bp, Homo sapiens
ggtgctccgagttctaaggccactgaaaaccatcaagcgcttgcccaagctcaaggtagtgtttacagagtttg

SEQ ID NO: 23916 - DNA, 74 bp, Homo sapiens
agttctaaggccactgaaaaccatcaagcgcttgcccaagctcaaggtagtgtttacagagtttgttcccatca

SEQ ID NO: 23917 - DNA, 73 bp, Homo sapiens
aaggccactgaaaaccatcaagcgcttgcccaagctcaaggtagtgtttacagagtttgttcccatcaaatcc

SEQ ID NO: 23918 - DNA, 79 bp, Homo sapiens
agaccatcacagggttcacacagcagggctgtttgctctgtccacaggccgtcttcgactgcgtagtgacctccttgaa

SEQ ID NO: 23919 - DNA, 77 bp, Homo sapiens
agggttcacacagcagggctgtttgctctgtccacaggccgtcttcgactgcgtagtgacctccttgaagaatgtct

SEQ ID NO: 23920 - DNA, 79 bp, Homo sapiens
agcagggctgtttgctctgtccacaggccgtcttcgactgcgtagtgacctccttgaagaatgtcttcaacatactcat

SEQ ID NO: 23921 - DNA, 80 bp, Homo sapiens
tgtttgctctgtccacaggccgtcttcgactgcgtagtgacctccttgaagaatgtcttcaacatactcattgtgtacaa

SEQ ID NO: 23922 - DNA, 80 bp, Homo sapiens
tccacaggccgtcttcgactgcgtagtgacctccttgaagaatgtcttcaacatactcattgtgtacaagctcttcatgt

SEQ ID NO: 23923 - DNA, 79 bp, Homo sapiens
ccgtcttcgactgcgtagtgacctccttgaagaatgtcttcaacatactcattgtgtacaagctcttcatgttcatctt

SEQ ID NO: 23924 - DNA, 84 bp, Homo sapiens
cgtagtgacctccttgaagaatgtcttcaacatactcattgtgtacaagctcttcatgttcatctttgctgtcatcgcagttca

SEQ ID NO: 23925 - DNA, 85 bp, Homo sapiens
tccttgaagaatgtcttcaacatactcattgtgtacaagctcttcatgttcatctttgctgtcatcgcagttcagctcttcaagg

SEQ ID NO: 23926 - DNA, 83 bp, Homo sapiens
aagaatgtcttcaacatactcattgtgtacaagctcttcatgttcatctttgctgtcatcgcagttcagctcttcaagggaaa

SEQ ID NO: 23927 - DNA, 80 bp, Homo sapiens
aacatactcattgtgtacaagctcttcatgttcatctttgctgtcatcgcagttcagctcttcaagggaaagttctttta

SEQ ID NO: 23928 - DNA, 80 bp, Homo sapiens
attgtgtacaagctcttcatgttcatctttgctgtcatcgcagttcagctcttcaagggaaagttcttttattgcacgga

SEQ ID NO: 23929 - DNA, 79 bp, Homo sapiens
tcttcatgttcatctttgctgtcatcgcagttcagctcttcaagggaaagttcttttattgcacggacagttccaagga

SEQ ID NO: 23930 - DNA, 78 bp, Homo sapiens
atgttcatctttgctgtcatcgcagttcagctcttcaagggaaagttcttttattgcacggacagttccaaggacaca

SEQ ID NO: 23931 - DNA, 77 bp, Homo sapiens
ttgctgtcatcgcagttcagctcttcaagggaaagttcttttattgcacggacagttccaaggacacagagaaggag

SEQ ID NO: 23932 - DNA, 74 bp, Homo sapiens
agttcagctcttcaagggaaagttcttttattgcacggacagttccaaggacacagagaaggagtgcatgtaag

SEQ ID NO: 23933 - DNA, 75 bp, Homo sapiens
ctcttcaagggaaagttcttttattgcacggacagttccaaggacacagagaaggagtgcatgtaagtgccacca

SEQ ID NO: 23934 - DNA, 78 bp, Homo sapiens
ttcttttattgcacggacagttccaaggacacagagaaggagtgcatgtaagtgccaccagcgcattccacttgattt

SEQ ID NO: 23935 - DNA, 83 bp, Homo sapiens
ttattgcacggacagttccaaggacacagagaaggagtgcatgtaagtgccaccagcgcattccacttgattttgctgaagca

SEQ ID NO: 23936 - DNA, 81 bp, Homo sapiens
tagaatgagctatagtgaggaggctctctttcatttctgctctggttttagaggcaactatgtagatcatgagaaaaacaa

SEQ ID NO: 23937 - DNA, 79 bp, Homo sapiens
tatagtgaggaggctctctttcatttctgctctggttttagaggcaactatgtagatcatgagaaaaacaagatggagg

SEQ ID NO: 23938 - DNA, 75 bp, Homo sapiens
ctctttcatttctgctctggttttagaggcaactatgtagatcatgagaaaaacaagatggaggtgaagggccgg

SEQ ID NO: 23939 - DNA, 76 bp, Homo sapiens
ttctgctctggttttagaggcaactatgtagatcatgagaaaaacaagatggaggtgaagggccgggaatggaagc

SEQ ID NO: 23940 - DNA, 76 bp, Homo sapiens
ttttagaggcaactatgtagatcatgagaaaaacaagatggaggtgaagggccgggaatggaagcgccatgaattc

SEQ ID NO: 23941 - DNA, 76 bp, Homo sapiens
aactatgtagatcatgagaaaaacaagatggaggtgaagggccgggaatggaagcgccatgaattccactacgaca

SEQ ID NO: 23942 - DNA, 77 bp, Homo sapiens
tagatcatgagaaaaacaagatggaggtgaagggccgggaatggaagcgccatgaattccactacgacaacattatc

SEQ ID NO: 23943 - DNA, 72 bp, Homo sapiens
aaaaacaagatggaggtgaagggccgggaatggaagcgccatgaattccactacgacaacattatctgggcc

SEQ ID NO: 23944 - DNA, 75 bp, Homo sapiens
agatggaggtgaagggccgggaatggaagcgccatgaattccactacgacaacattatctgggccctgctgaccc

SEQ ID NO: 23945 - DNA, 73 bp, Homo sapiens
aagggccgggaatggaagcgccatgaattccactacgacaacattatctgggccctgctgaccctcttcaccg

SEQ ID NO: 23946 - DNA, 76 bp, Homo sapiens
aatggaagcgccatgaattccactacgacaacattatctgggccctgctgaccctcttcaccgtctccacagggga

SEQ ID NO: 23947 - DNA, 76 bp, Homo sapiens
atgaattccactacgacaacattatctgggccctgctgaccctcttcaccgtctccacaggggaaggatggcctca

SEQ ID NO: 23948 - DNA, 76 bp, Homo sapiens
actacgacaacattatctgggccctgctgaccctcttcaccgtctccacaggggaaggatggcctcagtgagtgat

SEQ ID NO: 23949 - DNA, 78 bp, Homo sapiens
aacattatctgggccctgctgaccctcttcaccgtctccacaggggaaggatggcctcagtgagtgattgagttgtca

SEQ ID NO: 23950 - DNA, 84 bp, Homo sapiens
ctgctgaccctcttcaccgtctccacaggggaaggatggcctcagtgagtgattgagttgtcatgcttgtctgtggctgtgata

SEQ ID NO: 23951 - DNA, 84 bp, Homo sapiens
aagccaagactgtcatccaccatctgtgccctcttgttctgtccccatagagttctgcagcactctgtagatgtgacagaggaa

SEQ ID NO: 23952 - DNA, 82 bp, Homo sapiens
atccaccatctgtgccctcttgttctgtccccatagagttctgcagcactctgtagatgtgacagaggaagaccgaggccca

SEQ ID NO: 23953 - DNA, 82 bp, Homo sapiens
atctgtgccctcttgttctgtccccatagagttctgcagcactctgtagatgtgacagaggaagaccgaggcccaagccgca

SEQ ID NO: 23954 - DNA, 83 bp, Homo sapiens
ttgttctgtccccatagagttctgcagcactctgtagatgtgacagaggaagaccgaggcccaagccgcagcaaccgcatgga

SEQ ID NO: 23955 - DNA, 84 bp, Homo sapiens
ccatagagttctgcagcactctgtagatgtgacagaggaagaccgaggcccaagccgcagcaaccgcatggagatgtctatctt

SEQ ID NO: 23956 - DNA, 84 bp, Homo sapiens
gttctgcagcactctgtagatgtgacagaggaagaccgaggcccaagccgcagcaaccgcatggagatgtctatcttttatgta

SEQ ID NO: 23957 - DNA, 80 bp, Homo sapiens
tctgtagatgtgacagaggaagaccgaggcccaagccgcagcaaccgcatggagatgtctatcttttatgtagtctactt

SEQ ID NO: 23958 - DNA, 77 bp, Homo sapiens
gacagaggaagaccgaggcccaagccgcagcaaccgcatggagatgtctatcttttatgtagtctactttgtggtct

SEQ ID NO: 23959 - DNA, 75 bp, Homo sapiens
aggaagaccgaggcccaagccgcagcaaccgcatggagatgtctatcttttatgtagtctactttgtggtcttcc

SEQ ID NO: 23960 - DNA, 74 bp, Homo sapiens
aggcccaagccgcagcaaccgcatggagatgtctatcttttatgtagtctactttgtggtcttccccttcttct

SEQ ID NO: 23961 - DNA, 74 bp, Homo sapiens
agcaaccgcatggagatgtctatcttttatgtagtctactttgtggtcttccccttcttctttgtcaatatctt

SEQ ID NO: 23962 - DNA, 76 bp, Homo sapiens
atggagatgtctatcttttatgtagtctactttgtggtcttccccttcttctttgtcaatatctttgtggctctca

SEQ ID NO: 23963 - DNA, 77 bp, Homo sapiens
tatcttttatgtagtctactttgtggtcttccccttcttctttgtcaatatctttgtggctctcatcatcatcacct

(The sequence listing continues in the following parts.)
